United States Patent Application Publication US 2006/0257851 A1 - sequence listing, part 3

SEQ ID NO: 68493 - RNA, 32 nt, Homo Sapiens
uuuuauugaaacauauacuaaguuccauguau

SEQ ID NO: 68494 - RNA, 32 nt, Homo Sapiens
cacugcacuccagcccaggugacagagcaaga

SEQ ID NO: 68495 - RNA, 32 nt, Homo Sapiens
uucagucaauuaauauaaggauaguuuuuguu

SEQ ID NO: 68496 - RNA, 32 nt, Homo Sapiens
ggaugguucugauugcugguauucagauccaa

SEQ ID NO: 68497 - RNA, 32 nt, Homo Sapiens
uagauaacauaaaugaccaugaagugucccac

SEQ ID NO: 68498 - RNA, 29 nt, Homo Sapiens
gacuucuggggacagacaaggugccuguu

SEQ ID NO: 68499 - RNA, 32 nt, Homo Sapiens
uuuggacagucuuuauuuuucuucuuaaaaau

SEQ ID NO: 68500 - RNA, 32 nt, Homo Sapiens
ucccacuccccaucccacuuggaaaacuccaa

SEQ ID NO: 68501 - RNA, 32 nt, Homo Sapiens
gacuuuuacuuuuuauuacauaaaaauauuaa

SEQ ID NO: 68502 - RNA, 32 nt, Homo Sapiens
aaaagaggaauauugcaaauggcuucagauuc

SEQ ID NO: 68503 - RNA, 32 nt, Homo Sapiens
cucgauuggcugcccggcuggcacugacgucc

SEQ ID NO: 68504 - RNA, 32 nt, Homo Sapiens
uauggaauucgguuuucuuaauaaauguuuga

SEQ ID NO: 68505 - RNA, 32 nt, Homo Sapiens
uugggaggcagagaugggaggauacuugaauc

SEQ ID NO: 68506 - RNA, 32 nt, Homo Sapiens
acaggcugucacacugaugccaguggccccac

SEQ ID NO: 68507 - RNA, 32 nt, Homo Sapiens
uaucaggccggguggcuggcucacgcgggagg

SEQ ID NO: 68508 - RNA, 32 nt, Homo Sapiens
ugccaaauuugucuuauuaaauaaaaacaaug

SEQ ID NO: 68509 - RNA, 32 nt, Homo Sapiens
ucuuuaagucuuuuuuuuuuuaauccccuucu

SEQ ID NO: 68510 - RNA, 32 nt, Homo Sapiens
aauacuuuaucauuuaguauuaucauaaagua

SEQ ID NO: 68511 - RNA, 32 nt, Homo Sapiens
uaugagaugggagaggugagugggggaccuuc

SEQ ID NO: 68512 - RNA, 32 nt, Homo Sapiens
cguguuggccccaggacuccuuuggaauauag

SEQ ID NO: 68513 - RNA, 32 nt, Homo Sapiens
ugaccaucucuuaggucuaaugauauuuuaug

SEQ ID NO: 68514 - RNA, 32 nt, Homo Sapiens
cccaaaccuugcucucaucaccagcuagagcu

SEQ ID NO: 68515 - RNA, 32 nt, Homo Sapiens
uuuaucugcccccagcauuccggggcagaaac

SEQ ID NO: 68516 - RNA, 31 nt, Homo Sapiens
ugucaggcgggcagcuugccccgccgcccca

SEQ ID NO: 68517 - RNA, 32 nt, Homo Sapiens
uccccugcaguucuggguuggccacagggagc

SEQ ID NO: 68518 - RNA, 32 nt, Homo Sapiens
ucaauauaugguuuuuguucaucuccccauug

SEQ ID NO: 68519 - RNA, 32 nt, Homo Sapiens
aaagggauaaaacuuagauggcagcuuguacu

SEQ ID NO: 68520 - RNA, 32 nt, Homo Sapiens
ccccaccuccccagccuuccaccuccuguucu

SEQ ID NO: 68521 - RNA, 32 nt, Homo Sapiens
uuccucgggggcccgcccgcagguggugcugg

SEQ ID NO: 68522 - RNA, 32 nt, Homo Sapiens
gccaccaggugaagguccaaggcugcuggggc

SEQ ID NO: 68523 - RNA, 32 nt, Homo Sapiens
uacucagucauaucagaauuauaggaaaagua

SEQ ID NO: 68524 - RNA, 32 nt, Homo Sapiens
gagcucagaggggagaggggcuggccuggcau

SEQ ID NO: 68525 - RNA, 32 nt, Homo Sapiens
auguauauggguacagaaaauaaacccucaua

SEQ ID NO: 68526 - RNA, 32 nt, Homo Sapiens
cacgcaaagggagaagugugagaggagaaaca

SEQ ID NO: 68527 - RNA, 32 nt, Homo Sapiens
uuccuuuacacauaacuacaccugacaccagg

SEQ ID NO: 68528 - RNA, 32 nt, Homo Sapiens
uaacucccugccuccuccucucuucugcuguu

SEQ ID NO: 68529 - RNA, 32 nt, Homo Sapiens
acuuaagucaacauaaaacucauacuugccaa

SEQ ID NO: 68530 - RNA, 32 nt, Homo Sapiens
gcagagaaaaauuuuacagaugaaggagacca

SEQ ID NO: 68531 - RNA, 32 nt, Homo Sapiens
ggaaccuguggcugccuuggacgcugcagccc

SEQ ID NO: 68532 - RNA, 32 nt, Homo Sapiens
gggucgugggcagcugcuacucagugccaacc

SEQ ID NO: 68533 - RNA, 32 nt, Homo Sapiens
uaaguaaacaacauauuugggguuugcuugua

SEQ ID NO: 68534 - RNA, 32 nt, Homo Sapiens
uauaaccugugcuuauuacucaaauggucuuc

SEQ ID NO: 68535 - RNA, 32 nt, Homo Sapiens
agccggggcagccgcgcgugggcauccacggg

SEQ ID NO: 68536 - RNA, 32 nt, Homo Sapiens
cgacugucucaaccgcccggccgccucccccg

SEQ ID NO: 68537 - RNA, 31 nt, Homo Sapiens
gugcccaugagcauaugcauaugggugaaug

SEQ ID NO: 68538 - RNA, 32 nt, Homo Sapiens
gcugcccacacugggguaugccugggugaugg

SEQ ID NO: 68539 - RNA, 32 nt, Homo Sapiens
gcagaggggucccggggggagcaagcggagga

SEQ ID NO: 68540 - RNA, 32 nt, Homo Sapiens
gcugcacauucuuccaaaaugauccuuagcac

SEQ ID NO: 68541 - RNA, 32 nt, Homo Sapiens
uuaauucuuucugccuuugcugauauaaucca

SEQ ID NO: 68542 - RNA, 30 nt, Homo Sapiens
cucgacucgcccgugcugcugccgccgccg

SEQ ID NO: 68543 - RNA, 32 nt, Homo Sapiens
uacauuuuuuacacggcauauauuuaaaaagg

SEQ ID NO: 68544 - RNA, 32 nt, Homo Sapiens
cacauuucuuuuucuuuuucuuucuuuuuuuu

SEQ ID NO: 68545 - RNA, 31 nt, Homo Sapiens
ugcccuuucuaacaauaaaugcuccguguuu

SEQ ID NO: 68546 - RNA, 32 nt, Homo Sapiens
cauggcgcgggccgaguacugagcgcacgguc

SEQ ID NO: 68547 - RNA, 32 nt, Homo Sapiens
acuuguacucaauucuaauugcccccuggcaa

SEQ ID NO: 68548 - RNA, 32 nt, Homo Sapiens
cuuaucacagaaagugcugagccaagagcucc

SEQ ID NO: 68549 - RNA, 32 nt, Homo Sapiens
uaaaucugaaaaugaauuauguuauuugcucu

SEQ ID NO: 68550 - RNA, 32 nt, Homo Sapiens
uuuuuucccacuuuugaugccugugaugcaau

SEQ ID NO: 68551 - RNA, 32 nt, Homo Sapiens
aauagcucagauuuuucuuccuuuuucuuugc

SEQ ID NO: 68552 - RNA, 32 nt, Homo Sapiens
gggaaaagauuuucuuuuuuuauuaauuaggg

SEQ ID NO: 68553 - RNA, 32 nt, Homo Sapiens
uuccuucucugggucuuaauuuucccaccugu

SEQ ID NO: 68554 - RNA, 32 nt, Homo Sapiens
cugcaccaacuggagggugccuggcucuuuga

SEQ ID NO: 68555 - RNA, 32 nt, Homo Sapiens
cugacaacuuggcuacugcuuuugcugugccu

SEQ ID NO: 68556 - RNA, 32 nt, Homo Sapiens
agccagggagaaugggcccaggggaagcaaag

SEQ ID NO: 68557 - RNA, 32 nt, Homo Sapiens
guuuuuacuuguuuuauuaauaaaacguaauu

SEQ ID NO: 68558 - RNA, 32 nt, Homo Sapiens
cucaguugcauuucuucaguagauucauuucc

SEQ ID NO: 68559 - RNA, 32 nt, Homo Sapiens
agagucucaauuucagcaaguaccugucauga

SEQ ID NO: 68560 - RNA, 32 nt, Homo Sapiens
gcccucgugcuuugcuggccccugcccgcuac

SEQ ID NO: 68561 - RNA, 32 nt, Homo Sapiens
aucgcugcacuccagccugggcgacaagagcg

SEQ ID NO: 68562 - RNA, 30 nt, Homo Sapiens
cagcauuuggauggacacgcagcgacaggg

SEQ ID NO: 68563 - RNA, 32 nt, Homo Sapiens
gaaauguuaugaaaauaguugaaguugugcuu

SEQ ID NO: 68564 - RNA, 32 nt, Homo Sapiens
auuuuauuuucuuuuucuuucuucauaaagau

SEQ ID NO: 68565 - RNA, 32 nt, Homo Sapiens
ccgcgccauggccggagcucccggggcgcagc

SEQ ID NO: 68566 - RNA, 32 nt, Homo Sapiens
ggagguuugugcuuuuucauauuuugugauau

SEQ ID NO: 68567 - RNA, 32 nt, Homo Sapiens
ugaaagacaaaauucauagaaaauggagcaaa

SEQ ID NO: 68568 - RNA, 32 nt, Homo Sapiens
cacagccacuccccggcaugagacucagugca

SEQ ID NO: 68569 - RNA, 32 nt, Homo Sapiens
ccuggguucuuugcugaaauuauaguugaaug

SEQ ID NO: 68570 - RNA, 32 nt, Homo Sapiens
uuuccaucaaggacacuggaacaagagucuua

SEQ ID NO: 68571 - RNA, 32 nt, Homo Sapiens
cgugaacccucuccccgcgccugggaagccuu

SEQ ID NO: 68572 - RNA, 32 nt, Homo Sapiens
gagcauaaacucccagguggaguacaaacagc

SEQ ID NO: 68573 - RNA, 32 nt, Homo Sapiens
uccaggcauggccuguggcccgagggccaacc

SEQ ID NO: 68574 - RNA, 32 nt, Homo Sapiens
aaucuaaaacaauuaagagauaauaugauagc

SEQ ID NO: 68575 - RNA, 32 nt, Homo Sapiens
cagcugacugcaccaccccgacccuugcacaa

SEQ ID NO: 68576 - RNA, 32 nt, Homo Sapiens
agccgggccucgccgcgacccuuccggcccau

SEQ ID NO: 68577 - RNA, 32 nt, Homo Sapiens
gggcgacuacgaccagugaggcggccgccgca

SEQ ID NO: 68578 - RNA, 32 nt, Homo Sapiens
gggugcccauccccaucucuaaaaccaguaaa

SEQ ID NO: 68579 - RNA, 32 nt, Homo Sapiens
ugccgagaggggcaguuuugcucuuuuguaca

SEQ ID NO: 68580 - RNA, 32 nt, Homo Sapiens
gaguuuuguaauuuauacaaggacuuaaauau

SEQ ID NO: 68581 - RNA, 32 nt, Homo Sapiens
aguacuuucugcaggggccuguuaaggacgag

SEQ ID NO: 68582 - RNA, 32 nt, Homo Sapiens
accgugugcagcaccuuccucacacauuuugc

SEQ ID NO: 68583 - RNA, 32 nt, Homo Sapiens
cuaaguuaaguucauaaaaaccacugguuuca

SEQ ID NO: 68584 - RNA, 32 nt, Homo Sapiens
uugaugucuaaccccuagacagucuuuuuagu

SEQ ID NO: 68585 - RNA, 32 nt, Homo Sapiens
gagccccggcuggcggugcugccgccccacgc

SEQ ID NO: 68586 - RNA, 32 nt, Homo Sapiens
agggucauccccagcccaucccugugucagcc

SEQ ID NO: 68587 - RNA, 32 nt, Homo Sapiens
uuucuuuucuuuucuuuuuuuuuuuuuuugag

SEQ ID NO: 68588 - RNA, 32 nt, Homo Sapiens
ucuacuuccagaagauggucacuuuaaccuug

SEQ ID NO: 68589 - RNA, 32 nt, Homo Sapiens
gguugagccgucccucaagggccccugcccag

SEQ ID NO: 68590 - RNA, 32 nt, Homo Sapiens
uaacaaguuugccugccacuguuuuguggaua

SEQ ID NO: 68591 - RNA, 32 nt, Homo Sapiens
uccccgucagucugucuuuacucuucuuuucc

SEQ ID NO: 68592 - RNA, 32 nt, Homo Sapiens
caagucucugggcuauuuuuuauuuuugcaaa

SEQ ID NO: 68593 - RNA, 32 nt, Homo Sapiens
ucuguccccagcuccaccauuccucccugugg

SEQ ID NO: 68594 - RNA, 32 nt, Homo Sapiens
acagcucccuggauccuccccgugacuggccg

SEQ ID NO: 68595 - RNA, 32 nt, Homo Sapiens
aaagagauucagaaugauaaccucuuuuagag

SEQ ID NO: 68596 - RNA, 32 nt, Homo Sapiens
gggccgcacccgacucgcgccuggacacucgc

SEQ ID NO: 68597 - RNA, 32 nt, Homo Sapiens
aacacaugccuucccuccccagccacaccgug

SEQ ID NO: 68598 - RNA, 32 nt, Homo Sapiens
uuucagucuauuucuaggagcuuucucugaau

SEQ ID NO: 68599 - RNA, 32 nt, Homo Sapiens
ggcaaacugaggcucugggagauguaguaauu

SEQ ID NO: 68600 - RNA, 32 nt, Homo Sapiens
uucccagaacggaucuccccagccucgacugg

SEQ ID NO: 68601 - RNA, 32 nt, Homo Sapiens
ugggaguuagaguccugcucccgccccuugcu

SEQ ID NO: 68602 - RNA, 32 nt, Homo Sapiens
uggggccuuuuaaugucuuuaacagcaaucuu

SEQ ID NO: 68603 - RNA, 32 nt, Homo Sapiens
cucggucggcgcggguggagggggcgugaggc

SEQ ID NO: 68604 - RNA, 32 nt, Homo Sapiens
ccccgcuugguggccugggaucuggcacacuc

SEQ ID NO: 68605 - RNA, 32 nt, Homo Sapiens
guuaaugugcuuucuuggauccaaauuuaaau

SEQ ID NO: 68606 - RNA, 32 nt, Homo Sapiens
uuaauccuguauuauuucuucuacuuuguuuu

SEQ ID NO: 68607 - RNA, 32 nt, Homo Sapiens
cuugcucucagaaaugggaaacacgaugaaga

SEQ ID NO: 68608 - RNA, 28 nt, Homo Sapiens
gcuaggguuacaggcaugagccacugug

SEQ ID NO: 68609 - RNA, 32 nt, Homo Sapiens
cugcaggaaguaccaaggucguuaagaaucag

SEQ ID NO: 68610 - RNA, 32 nt, Homo Sapiens
agaaacuuuaauuuauuuuccuccuccuccuu

SEQ ID NO: 68611 - RNA, 32 nt, Homo Sapiens
gacugaagggaaggugguugggagaggcuguc

SEQ ID NO: 68612 - RNA, 32 nt, Homo Sapiens
ugaaaaauauaaagguauccaaacucugucuu

SEQ ID NO: 68613 - RNA, 32 nt, Homo Sapiens
aagugaaaauuguuuguaaccacaauauucug

SEQ ID NO: 68614 - RNA, 32 nt, Homo Sapiens
ugaccaggcuuccaaugacuaggucaccaggu

SEQ ID NO: 68615 - RNA, 32 nt, Homo Sapiens
cggcggcggcgcuuccccggcgcggagcggcu

SEQ ID NO: 68616 - RNA, 32 nt, Homo Sapiens
aagaguaggaagauugggaagugguagacaac

SEQ ID NO: 68617 - RNA, 32 nt, Homo Sapiens
aucucaagaaagcugcugcaaaaaauaucaua

SEQ ID NO: 68618 - RNA, 32 nt, Homo Sapiens
ggggaggccacaccuggcccagccccuuucac

SEQ ID NO: 68619 - RNA, 32 nt, Homo Sapiens
cacauuuuacuuaccuguuaccagugugucgc

SEQ ID NO: 68620 - RNA, 32 nt, Homo Sapiens
uaaaggaaugucaaagauuguuugauagugau

SEQ ID NO: 68621 - RNA, 32 nt, Homo Sapiens
agaauucuauuuuaaccugauguugagcaccu

SEQ ID NO: 68622 - RNA, 29 nt, Homo Sapiens
aaaauaugcuagucaucuauaaaagugcc

SEQ ID NO: 68623 - RNA, 32 nt, Homo Sapiens
ccggcggcggcugccgcagagcagcguucggu

SEQ ID NO: 68624 - RNA, 32 nt, Homo Sapiens
ggaugcagagucuacagccugacccagcugcc

SEQ ID NO: 68625 - RNA, 32 nt, Homo Sapiens
augagcaccagggcggguccagcccuugcuug

SEQ ID NO: 68626 - RNA, 32 nt, Homo Sapiens
auauauuuaagauacauagaaauuaugaugcg

SEQ ID NO: 68627 - RNA, 32 nt, Homo Sapiens
cgacucggcggagucccggcggcgcguccuug

SEQ ID NO: 68628 - RNA, 32 nt, Homo Sapiens
acuccucugagagggcagaacacacauaucca

SEQ ID NO: 68629 - RNA, 32 nt, Homo Sapiens
ccgccuggggcagaaagccacaaacuccaucc

SEQ ID NO: 68630 - RNA, 32 nt, Homo Sapiens
cuccugacgccuccgccgcccgggucaugugg

SEQ ID NO: 68631 - RNA, 32 nt, Homo Sapiens
uuuccuggccagaugcuucucauccacaccug

SEQ ID NO: 68632 - RNA, 32 nt, Homo Sapiens
gggacucgcucgcuccucccuccuucccaccg

SEQ ID NO: 68633 - RNA, 32 nt, Homo Sapiens
gauguauguguuagacuaucgaaagggccuua

SEQ ID NO: 68634 - RNA, 28 nt, Homo Sapiens
aucugguugucuaaaaguguguggcacc

SEQ ID NO: 68635 - RNA, 32 nt, Homo Sapiens
aucaaaaaaauuugcuauuuuaucucacauac

SEQ ID NO: 68636 - RNA, 32 nt, Homo Sapiens
gcucuagugucuaugauucugcucuccacguc

SEQ ID NO: 68637 - RNA, 32 nt, Homo Sapiens
uucccuuccuucccuucucuggaguugcuacc

SEQ ID NO: 68638 - RNA, 32 nt, Homo Sapiens
ugaaggggccagaccacgccccugccugagac

SEQ ID NO: 68639 - RNA, 32 nt, Homo Sapiens
aaggagccccaacccacccccaaccuuggccc

SEQ ID NO: 68640 - RNA, 32 nt, Homo Sapiens
cuaaacagugaacaggagcucugugucucugu

SEQ ID NO: 68641 - RNA, 32 nt, Homo Sapiens
cagcuccaucacucacagcacagcaaauaucu

SEQ ID NO: 68642 - RNA, 32 nt, Homo Sapiens
gcaggugugugcgucuuugugcucuuccaaau

SEQ ID NO: 68643 - RNA, 32 nt, Homo Sapiens
uaccucguuucuuuugagaccaaaaauuccca

SEQ ID NO: 68644 - RNA, 29 nt, Homo Sapiens
cauuaugugaguuuccugcuauauuaaca

SEQ ID NO: 68645 - RNA, 32 nt, Homo Sapiens
cuaggcuauuucugccgggcgcuccgcgaaga

SEQ ID NO: 68646 - RNA, 32 nt, Homo Sapiens
ggucacacacgcgcccgguggagcacgagaga

SEQ ID NO: 68647 - RNA, 32 nt, Homo Sapiens
uucuuugggacuuuugggacgcagcacuugaa

SEQ ID NO: 68648 - RNA, 32 nt, Homo Sapiens
ucaaucuucagcaaaagugguuugaaaaugaa

SEQ ID NO: 68649 - RNA, 32 nt, Homo Sapiens
gcuccugagcccccagcuuccagcaggaggga

SEQ ID NO: 68650 - RNA, 32 nt, Homo Sapiens
ucaccacuuaggauagaccuagaauauuuguc

SEQ ID NO: 68651 - RNA, 31 nt, Homo Sapiens
gacuuacaacaucucugcggauaugucacca

SEQ ID NO: 68652 - RNA, 32 nt, Homo Sapiens
cauuuuuccagauggaggaagagcaugugcca

SEQ ID NO: 68653 - RNA, 32 nt, Homo Sapiens
ggcuuccccuugggccuccucaguagcggucu

SEQ ID NO: 68654 - RNA, 32 nt, Homo Sapiens
uuucaaauaaacaaacaaaaccuaagcauuug

SEQ ID NO: 68655 - RNA, 32 nt, Homo Sapiens
uucugaaauauuaaauagcuguacagaagcag

SEQ ID NO: 68656 - RNA, 32 nt, Homo Sapiens
uuacaauacuuuuauugaaacuuuuguuaagu

SEQ ID NO: 68657 - RNA, 32 nt, Homo Sapiens
cacacaaaaucguucuuuacuuucauuuugau

SEQ ID NO: 68658 - RNA, 32 nt, Homo Sapiens
ggguagcggaagagagaucaaagggaagacaa

SEQ ID NO: 68659 - RNA, 32 nt, Homo Sapiens
ucaauggacuuccugagaaggacagagagacg

SEQ ID NO: 68660 - RNA, 32 nt, Homo Sapiens
aaucacgccccagccgcaccggaccuugcgcu

SEQ ID NO: 68661 - RNA, 32 nt, Homo Sapiens
cagucucuuguacagcguuuuaaaagaaaugg

SEQ ID NO: 68662 - RNA, 32 nt, Homo Sapiens
gagcgcgaaaaaucacuaccaauauaauggau

SEQ ID NO: 68663 - RNA, 32 nt, Homo Sapiens
aguaauggauccccggccucagucccuacucu

SEQ ID NO: 68664 - RNA, 32 nt, Homo Sapiens
ccccugcccucccucccuguccugugccacac

SEQ ID NO: 68665 - RNA, 32 nt, Homo Sapiens
gggccucgggaugcagccgccggugcccgggc

SEQ ID NO: 68666 - RNA, 32 nt, Homo Sapiens
cccacaggccugcuuucuccuguccuaacacc

SEQ ID NO: 68667 - RNA, 32 nt, Homo Sapiens
agugaacagucccugacugccuguaggcugcg

SEQ ID NO: 68668 - RNA, 32 nt, Homo Sapiens
aaggagagguauuucuuagagagaucaucauu

SEQ ID NO: 68669 - RNA, 32 nt, Homo Sapiens
aagaaacaggauggcuuucuguagccacaccu

SEQ ID NO: 68670 - RNA, 32 nt, Homo Sapiens
ugcugggggugacagagugcugaucacuuccc

SEQ ID NO: 68671 - RNA, 29 nt, Homo Sapiens
gccaauggcuucuuggagaacauguggcc

SEQ ID NO: 68672 - RNA, 32 nt, Homo Sapiens
auguaguggagcaucaggguaggcuaucuucu

SEQ ID NO: 68673 - RNA, 32 nt, Homo Sapiens
gucacuuuuuauuuuuccucagucuucaauga

SEQ ID NO: 68674 - RNA, 32 nt, Homo Sapiens
uuucucccauuccuccuucuuuauauaaugcc

SEQ ID NO: 68675 - RNA, 32 nt, Homo Sapiens
ugcggccgcaacgcaacggacacuggcuggaa

SEQ ID NO: 68676 - RNA, 32 nt, Homo Sapiens
caugugucaccaucuucccuccugucugccuu

SEQ ID NO: 68677 - RNA, 30 nt, Homo Sapiens
uuuuaucuggacugacaugccucugcugcu

SEQ ID NO: 68678 - RNA, 32 nt, Homo Sapiens
aagaucagaauggccuugagaauagagccaca

SEQ ID NO: 68679 - RNA, 32 nt, Homo Sapiens
gagauacaacaaaugaauauaacacuauaaca

SEQ ID NO: 68680 - RNA, 32 nt, Homo Sapiens
ccguuuucuaguuugggguaacugagucuuga

SEQ ID NO: 68681 - RNA, 32 nt, Homo Sapiens
cuugcuuugagaaggagcugccggccggggcc

SEQ ID NO: 68682 - RNA, 32 nt, Homo Sapiens
aacgggggccgcggcgcucgccugcaguccca

SEQ ID NO: 68683 - RNA, 32 nt, Homo Sapiens
uucauuuugcaccuuauucagaaaauagagca

SEQ ID NO: 68684 - RNA, 32 nt, Homo Sapiens
guuuuaugguguaaaaucauacccauuccauu

SEQ ID NO: 68685 - RNA, 32 nt, Homo Sapiens
cagugcugccgugcaacgcugugucucucacu

SEQ ID NO: 68686 - RNA, 32 nt, Homo Sapiens
aagaauauuaaacauuuuucacuuaaguugag

SEQ ID NO: 68687 - RNA, 32 nt, Homo Sapiens
cgugauucacuuuaaccugaugguuugcauuu

SEQ ID NO: 68688 - RNA, 32 nt, Homo Sapiens
guuagccacggaaacauagaaacauacacaag

SEQ ID NO: 68689 - RNA, 32 nt, Homo Sapiens
caugaccgagaugaccucuaugcugagcagau

SEQ ID NO: 68690 - RNA, 32 nt, Homo Sapiens
gguuguagcuggaagaccuacaacccaaggau

SEQ ID NO: 68691 - RNA, 32 nt, Homo Sapiens
cagaugccagccauuccccaggucuugcugac

SEQ ID NO: 68692 - RNA, 32 nt, Homo Sapiens
agggcgcgcacgcggaucccccgccuggccug

SEQ ID NO: 68693 - RNA, 32 nt, Homo Sapiens
ggcagucaaggaauaaacuacaguguaaacau

SEQ ID NO: 68694 - RNA, 32 nt, Homo Sapiens
gauacauuuuauauuucuuaaaauagaaauau

SEQ ID NO: 68695 - RNA, 32 nt, Homo Sapiens
agacaggccagcccagcuccaguguccaaaaa

SEQ ID NO: 68696 - RNA, 32 nt, Homo Sapiens
gcuaggugcgcugcgagcgcgcggagccacga

SEQ ID NO: 68697 - RNA, 32 nt, Homo Sapiens
gagcaucauaacacagcuuuagauaaaugacc

SEQ ID NO: 68698 - RNA, 32 nt, Homo Sapiens
acauuucucagacaauguugaugcuacugauu

SEQ ID NO: 68699 - RNA, 32 nt, Homo Sapiens
cauguuauuaaacucuuuaaauaugucauaga

SEQ ID NO: 68700 - RNA, 32 nt, Homo Sapiens
gauguuaacaccuuugacgucuuuggaguuga

SEQ ID NO: 68701 - RNA, 32 nt, Homo Sapiens
ggaugaggaggaguugggggcuggggggaauc

SEQ ID NO: 68702 - RNA, 32 nt, Homo Sapiens
gaccaaugggucuguguuuuggaccggcgaag

SEQ ID NO: 68703 - RNA, 32 nt, Homo Sapiens
cucguccuuagccccagugacaugugcugauc

SEQ ID NO: 68704 - RNA, 32 nt, Homo Sapiens
cccuccgcccccgcaggcuucugugugcugcu

SEQ ID NO: 68705 - RNA, 32 nt, Homo Sapiens
ggugaguguuuauacagagaugucuggggcag

SEQ ID NO: 68706 - RNA, 32 nt, Homo Sapiens
cgucucccgcuccgcccucccuuuucccugga

SEQ ID NO: 68707 - RNA, 32 nt, Homo Sapiens
auucacauuaaaugagauuacuuuuuaguagg

SEQ ID NO: 68708 - RNA, 32 nt, Homo Sapiens
auuacaccuucaaaauacacacucugaauuau

SEQ ID NO: 68709 - RNA, 32 nt, Homo Sapiens
cacugcacuccagucugggugagagugagacu

SEQ ID NO: 68710 - RNA, 32 nt, Homo Sapiens
auuaguauuucacugcacgucuuccauacuaa

SEQ ID NO: 68711 - RNA, 32 nt, Homo Sapiens
ccauguaacaaaucugcacaugugccccugua

SEQ ID NO: 68712 - RNA, 32 nt, Homo Sapiens
cucagcuccgccuccuggguucacgugauucu

SEQ ID NO: 68713 - RNA, 32 nt, Homo Sapiens
cagucgcaaugaguaauuuaaugguagcuaug

SEQ ID NO: 68714 - RNA, 32 nt, Homo Sapiens
uaccccacagaaaccaugggaaggacucugac

SEQ ID NO: 68715 - RNA, 32 nt, Homo Sapiens
gcugcaagugaccaggaccacugcagcagaag

SEQ ID NO: 68716 - RNA, 32 nt, Homo Sapiens
uacauccccucccccugcuggggccucaguuu

SEQ ID NO: 68717 - RNA, 32 nt, Homo Sapiens
cucccauucaggaugcccacggcuggagcugc

SEQ ID NO: 68718 - RNA, 32 nt, Homo Sapiens
cggggggcggggggaguuccgguuccgguucu

SEQ ID NO: 68719 - RNA, 32 nt, Homo Sapiens
ggcugaguggcuuuaucaccaccgagugaugu

SEQ ID NO: 68720 - RNA, 32 nt, Homo Sapiens
ucucccaccccuccccugauggucuuguucuc

SEQ ID NO: 68721 - RNA, 32 nt, Homo Sapiens
cagccuucuuuacuuuuugagccucugauuuc

SEQ ID NO: 68722 - RNA, 32 nt, Homo Sapiens
gcaguuauaugaagguuuauuuccuucuuaua

SEQ ID NO: 68723 - RNA, 32 nt, Homo Sapiens
gauugaaggugauaagggaaaagauaaagacc

SEQ ID NO: 68724 - RNA, 32 nt, Homo Sapiens
gcagcucuguggcccagcccacugcuucagcu

SEQ ID NO: 68725 - RNA, 32 nt, Homo Sapiens
cccugccgucuuccucgagcuccccggggcuu

SEQ ID NO: 68726 - RNA, 32 nt, Homo Sapiens
aagccaaguaaccauuugauauggauaauaau

SEQ ID NO: 68727 - RNA, 32 nt, Homo Sapiens
aggaccagacugccccuacuguuggaugacug

SEQ ID NO: 68728 - RNA, 32 nt, Homo Sapiens
gugugauugcuauaauuuugugaaauuuuauu

SEQ ID NO: 68729 - RNA, 32 nt, Homo Sapiens
uucaaagcagaacuucucaucaucuccaugcu

SEQ ID NO: 68730 - RNA, 32 nt, Homo Sapiens
uuauccuauuuuuaaacaaaauguagacaaag

SEQ ID NO: 68731 - RNA, 32 nt, Homo Sapiens
agcugugacgggggcacugagccccgcuggug

SEQ ID NO: 68732 - RNA, 32 nt, Homo Sapiens
aauaagguccccacaagaugaugccucaucuc

SEQ ID NO: 68733 - RNA, 32 nt, Homo Sapiens
ugauacugacuucuguugggagcucuccaaag

SEQ ID NO: 68734 - RNA, 32 nt, Homo Sapiens
cuucugcacugacuuccagaucaugguucucc

SEQ ID NO: 68735 - RNA, 32 nt, Homo Sapiens
cgagccugggagaggggcuucggugcgcgggg

SEQ ID NO: 68736 - RNA, 32 nt, Homo Sapiens
ugagccauuuuucaagcaacagaaguugaaug

SEQ ID NO: 68737 - RNA, 32 nt, Homo Sapiens
acaauuuuauauugauguguguuuacaaugag

SEQ ID NO: 68738 - RNA, 32 nt, Homo Sapiens
aauaugugccuuaaguuuuagucuuuagaacu

SEQ ID NO: 68739 - RNA, 32 nt, Homo Sapiens
uaucaucuaauuuggguguuuauuuugcagau

SEQ ID NO: 68740 - RNA, 32 nt, Homo Sapiens
guccuuccacccaacaaguccuaagggcagaa

SEQ ID NO: 68741 - RNA, 32 nt, Homo Sapiens
cucccugcuucuuuucuuuugcaucauaacaa

SEQ ID NO: 68742 - RNA, 32 nt, Homo Sapiens
uaacaaagauccuaaugaccuaauauuauugg

SEQ ID NO: 68743 - RNA, 32 nt, Homo Sapiens
gcccaggaggcugaggcugcagugcaucguga

SEQ ID NO: 68744 - RNA, 32 nt, Homo Sapiens
aggacugauggcuuugagucuagguuggaaag

SEQ ID NO: 68745 - RNA, 32 nt, Homo Sapiens
auauguugaugguggcuguaguuguuuaaaug

SEQ ID NO: 68746 - RNA, 32 nt, Homo Sapiens
gcggccgcgccggcggugagggagccggaguu

SEQ ID NO: 68747 - RNA, 32 nt, Homo Sapiens
caccgggaggaaaagagagagaucuggggcug

SEQ ID NO: 68748 - RNA, 32 nt, Homo Sapiens
cguuaccagagauuuacccaucggguaagaug

SEQ ID NO: 68749 - RNA, 32 nt, Homo Sapiens
aaaauauuuuaaaaacaaaauuugugaaaccu

SEQ ID NO: 68750 - RNA, 32 nt, Homo Sapiens
ugugaguaagagacucuguuucccuucaggga

SEQ ID NO: 68751 - RNA, 32 nt, Homo Sapiens
ugagcauugauggggaugggggugguuuggga

SEQ ID NO: 68752 - RNA, 32 nt, Homo Sapiens
uguguggugucgucugugaaugcuaaguccau

SEQ ID NO: 68753 - RNA, 32 nt, Homo Sapiens
ccaaacgggagaucuugugcaacaucaaggag

SEQ ID NO: 68754 - RNA, 32 nt, Homo Sapiens
ugacaagagaggaaacaaaaaguuaaacuuac

SEQ ID NO: 68755 - RNA, 32 nt, Homo Sapiens
accauguccuggagagggucccgggccccacc

SEQ ID NO: 68756 - RNA, 32 nt, Homo Sapiens
cacuagaauugguauggaaaagcaaaauacug

SEQ ID NO: 68757 - RNA, 32 nt, Homo Sapiens
uuauguugaccauuuuaaaccguuggcaauaa

SEQ ID NO: 68758 - RNA, 32 nt, Homo Sapiens
uacaagauucuuccuuuuaacuuggauuucuc

SEQ ID NO: 68759 - RNA, 32 nt, Homo Sapiens
ucucaggugaacuuuuuucaguuauaaaacau

SEQ ID NO: 68760 - RNA, 32 nt, Homo Sapiens
cgagggacccagcucuguuucugcugcuucca

SEQ ID NO: 68761 - RNA, 32 nt, Homo Sapiens
ccuauguggaaacaacagcaaacuaacaccaa

SEQ ID NO: 68762 - RNA, 32 nt, Homo Sapiens
ucuggucauuggcauuuguaucgucauucugu

SEQ ID NO: 68763 - RNA, 32 nt, Homo Sapiens
gcuuuucuuuugcaacaguuaauguauuuauu

SEQ ID NO: 68764 - RNA, 32 nt, Homo Sapiens
agagcaucucggaguucagacucucagaccug

SEQ ID NO: 68765 - RNA, 32 nt, Homo Sapiens
aguaaauccaaguuucagaauuaaaaauaagc

SEQ ID NO: 68766 - RNA, 32 nt, Homo Sapiens
guccugcauauuuuuucuuaaauauuucccaa

SEQ ID NO: 68767 - RNA, 32 nt, Homo Sapiens
uuguguaaaaauuuauuuucauuauauaaaug

SEQ ID NO: 68768 - RNA, 31 nt, Homo Sapiens
gaguguucagacaugccaggaguccagccuc

SEQ ID NO: 68769 - RNA, 32 nt, Homo Sapiens
uccguuaaauauguauuuaaaacaugaagaac

SEQ ID NO: 68770 - RNA, 32 nt, Homo Sapiens
gguuuuuuguuauucuaauauauuauugugua

SEQ ID NO: 68771 - RNA, 32 nt, Homo Sapiens
uuuuugggggagacuugggccuugaggugccc

SEQ ID NO: 68772 - RNA, 32 nt, Homo Sapiens
auuuugagagcaugaaguguggaaugugucac

SEQ ID NO: 68773 - RNA, 32 nt, Homo Sapiens
cacugcacuccagccugggugacagagcaagg

SEQ ID NO: 68774 - RNA, 32 nt, Homo Sapiens
uggucagggcuguccuggagaagugccugggc

SEQ ID NO: 68775 - RNA, 32 nt, Homo Sapiens
ugcauggggcagggcugcugaagcgcggaguu

SEQ ID NO: 68776 - RNA, 32 nt, Homo Sapiens
aaaacgggcaauggguggauucggguccagau

SEQ ID NO: 68777 - RNA, 32 nt, Homo Sapiens
ccuuuuguugcuaucggcagcugcuggcucag

SEQ ID NO: 68778 - RNA, 32 nt, Homo Sapiens
caagacggucggggcugcuugcuaacuccagg

SEQ ID NO: 68779 - RNA, 32 nt, Homo Sapiens
ggagccagaggccccaggcagucccggaggaa

SEQ ID NO: 68780 - RNA, 32 nt, Homo Sapiens
aggauguauuaagaauuauaugaagucagguu

SEQ ID NO: 68781 - RNA, 32 nt, Homo Sapiens
uuacucucauuuccguaauagaagaggaagca

SEQ ID NO: 68782 - RNA, 32 nt, Homo Sapiens
gacuugagacuuuggucccagcccagacuccu

SEQ ID NO: 68783 - RNA, 32 nt, Homo Sapiens
cccuggaccaugcaguucggcggccgcggcug

SEQ ID NO: 68784 - RNA, 32 nt, Homo Sapiens
agccugguggagacggagguguguuacaggac

SEQ ID NO: 68785 - RNA, 32 nt, Homo Sapiens
cuugaagguggcugaggccgggccagucuucc

SEQ ID NO: 68786 - RNA, 32 nt, Homo Sapiens
agauaaaguuguauuuuuuucuuagaauggcc

SEQ ID NO: 68787 - RNA, 32 nt, Homo Sapiens
gcgucugugugcgcucuguggaugccagggcc

SEQ ID NO: 68788 - RNA, 32 nt, Homo Sapiens
uucuggauuggggguucuggggaccagggagg

SEQ ID NO: 68789 - RNA, 32 nt, Homo Sapiens
cugccacugccgccuacuggacgcugcccugc

SEQ ID NO: 68790 - RNA, 32 nt, Homo Sapiens
uaggauaguaaaucauuucuguuauaugagac

SEQ ID NO: 68791 - RNA, 32 nt, Homo Sapiens
uccgaaagucugaaucucccaaggagggcacc

SEQ ID NO: 68792 - RNA, 32 nt, Homo Sapiens
accccuccucacugccucuccucucugggaca

SEQ ID NO: 68793 - RNA, 32 nt, Homo Sapiens
aaugaaugcucauauguaauugaaauacuuca

SEQ ID NO: 68794 - RNA, 32 nt, Homo Sapiens
gguaugccgggcguccccgagacgcggcugcc

SEQ ID NO: 68795 - RNA, 32 nt, Homo Sapiens
caguuaugcauaucaggauacugugagcaaca

SEQ ID NO: 68796 - RNA, 32 nt, Homo Sapiens
ccaauguauuccagucugggugacagagugag

SEQ ID NO: 68797 - RNA, 32 nt, Homo Sapiens
ucaaaccagugacaccacaggaaagaaagacc

SEQ ID NO: 68798 - RNA, 32 nt, Homo Sapiens
uuuccugugccuguagcucccugguuggauag

SEQ ID NO: 68799 - RNA, 32 nt, Homo Sapiens
gucgggaaauucugcugcuugaaacuucagcc

SEQ ID NO: 68800 - RNA, 27 nt, Homo Sapiens
cgauucuccugccucagccccucaagu

SEQ ID NO: 68801 - RNA, 32 nt, Homo Sapiens
uccauaacagagcucuuagaauuuuguaggcu

SEQ ID NO: 68802 - RNA, 32 nt, Homo Sapiens
ugaaugcucuggcuuuuugucauuuugucuug

SEQ ID NO: 68803 - RNA, 32 nt, Homo Sapiens
cuguggagcucuggaacacucucuaaauuucc

SEQ ID NO: 68804 - RNA, 32 nt, Homo Sapiens
uugcuucuuucagugagguguuucuguguuag

SEQ ID NO: 68805 - RNA, 32 nt, Homo Sapiens
ugcguguguauauaaaugccuuuuccauaucu

SEQ ID NO: 68806 - RNA, 32 nt, Homo Sapiens
guacaacauuuauauauugucuguaaaaaaug

SEQ ID NO: 68807 - RNA, 32 nt, Homo Sapiens
gggagagaguggagucuuggggucgaccugug

SEQ ID NO: 68808 - RNA, 32 nt, Homo Sapiens
aagaucugccagcccugccuguucucucaccc

SEQ ID NO: 68809 - RNA, 32 nt, Homo Sapiens
caaggaggguggcagagccugcuuagccagga

SEQ ID NO: 68810 - RNA, 32 nt, Homo Sapiens
gggccaggaaaagccauuacugaauggagauc

SEQ ID NO: 68811 - RNA, 32 nt, Homo Sapiens
aaagccuaaaauugaguuuguggacuuuauua

SEQ ID NO: 68812 - RNA, 32 nt, Homo Sapiens
ucgagcagagccgguaaccaccacgugccaga

SEQ ID NO: 68813 - RNA, 32 nt, Homo Sapiens
ugcaggucuucuucuuuuuugauguaggugcu

SEQ ID NO: 68814 - RNA, 32 nt, Homo Sapiens
gcccagggccccagugcagccuggacacagua

SEQ ID NO: 68815 - RNA, 32 nt, Homo Sapiens
aaucagauucaggagcucaguuucuuuuucac

SEQ ID NO: 68816 - RNA, 32 nt, Homo Sapiens
uuuauggucacauuuuaaucaauccacugcuu

SEQ ID NO: 68817 - RNA, 32 nt, Homo Sapiens
gcacgcgcggcacaggccggccuccgcuuccc

SEQ ID NO: 68818 - RNA, 32 nt, Homo Sapiens
uuggagcagggccggagccgaacgccuggaac

SEQ ID NO: 68819 - RNA, 32 nt, Homo Sapiens
aagaauaguaauaucaccucuaguuauaagcc

SEQ ID NO: 68820 - RNA, 32 nt, Homo Sapiens
cuccucaccacacuggccccaggucucaggag

SEQ ID NO: 68821 - RNA, 32 nt, Homo Sapiens
aaaaaccuucagauuugguguuagaacucaga

SEQ ID NO: 68822 - RNA, 32 nt, Homo Sapiens
aggaagaaucaggugacacagggacuugaagg

SEQ ID NO: 68823 - RNA, 27 nt, Homo Sapiens
uuccauuauuucuucagcuucauguaa

SEQ ID NO: 68824 - RNA, 32 nt, Homo Sapiens
gugugcgcaccuccccggcccuggcccaccuu

SEQ ID NO: 68825 - RNA, 32 nt, Homo Sapiens
uacauuuuaaacacauuaggaaaaguugcuau

SEQ ID NO: 68826 - RNA, 32 nt, Homo Sapiens
ugcaaaauaaaauaaacauuuaaaaugacauu

SEQ ID NO: 68827 - RNA, 32 nt, Homo Sapiens
ugggagauggggaggaagccccaucucugcug

SEQ ID NO: 68828 - RNA, 32 nt, Homo Sapiens
uuacugccaacuucauggauaggaggaaugau

SEQ ID NO: 68829 - RNA, 30 nt, Homo Sapiens
augcuggguucccugagucgucaggccaga

SEQ ID NO: 68830 - RNA, 32 nt, Homo Sapiens
gcuuccgcuccagccccaccuaucgugacugc

SEQ ID NO: 68831 - RNA, 32 nt, Homo Sapiens
uacaugacuggccgacgccgccggguggggcu

SEQ ID NO: 68832 - RNA, 32 nt, Homo Sapiens
guugucuuuauguggcaguuaaguaugguuua

SEQ ID NO: 68833 - RNA, 32 nt, Homo Sapiens
ggaucguucucaggcccuccccccggaguacu

SEQ ID NO: 68834 - RNA, 32 nt, Homo Sapiens
acuugaauucauuugauguagaugaaccuguu

SEQ ID NO: 68835 - RNA, 32 nt, Homo Sapiens
gccagaacugcugcagaaauuuuuauaauuuu

SEQ ID NO: 68836 - RNA, 32 nt, Homo Sapiens
gggaagaugaugacacugcauuauaaaggcca

SEQ ID NO: 68837 - RNA, 32 nt, Homo Sapiens
accccacuuuugcuuccccacugcccccugcc

SEQ ID NO: 68838 - RNA, 32 nt, Homo Sapiens
uuuuuuaagagaaucuaaucuaauuguuuuua

SEQ ID NO: 68839 - RNA, 32 nt, Homo Sapiens
uugucagagaaaaacaaaguuuuuguaugaau

SEQ ID NO: 68840 - RNA, 32 nt, Homo Sapiens
uugaaagaucgguggaacuuuuuaagagagua

SEQ ID NO: 68841 - RNA, 32 nt, Homo Sapiens
auuggacucugcacggacaagggcccuagaga

SEQ ID NO: 68842 - RNA, 32 nt, Homo Sapiens
cucuccuaggacagcucuccccgggugcucgc

SEQ ID NO: 68843 - RNA, 32 nt, Homo Sapiens
gguuuagaaaauuccccugugcaugguauuac

SEQ ID NO: 68844 - RNA, 32 nt, Homo Sapiens
aguguccccuccccuccaucucucuuccccau

SEQ ID NO: 68845 - RNA, 32 nt, Homo Sapiens
cagcccacagagcuaauaauaccucaguauaa

SEQ ID NO: 68846 - RNA, 32 nt, Homo Sapiens
uggaggcuggagcagggucacccacggacaga

SEQ ID NO: 68847 - RNA, 32 nt, Homo Sapiens
cauagccuccaaguauacucucaaauguauga

SEQ ID NO: 68848 - RNA, 32 nt, Homo Sapiens
gagguuuuaaacagucccuaccauuggccugc

SEQ ID NO: 68849 - RNA, 32 nt, Homo Sapiens
agaaacagcucagauuugaccaagaucacaca

SEQ ID NO: 68850 - RNA, 32 nt, Homo Sapiens
agugggucagaagccagaggggacguggggag

SEQ ID NO: 68851 - RNA, 32 nt, Homo Sapiens
agcugugcccgaaagcuuuuuuuagaguaaau

SEQ ID NO: 68852 - RNA, 32 nt, Homo Sapiens
gcugagaaggccagcccucccuggcugugagc

SEQ ID NO: 68853 - RNA, 32 nt, Homo Sapiens
ccauaguaugcauuguuauacauacuguguac

SEQ ID NO: 68854 - RNA, 32 nt, Homo Sapiens
ucaauuuucuccuuuacagccauuguucuggu

SEQ ID NO: 68855 - RNA, 32 nt, Homo Sapiens
gccggccagcuguguccacagcaguuuuugau

SEQ ID NO: 68856 - RNA, 32 nt, Homo Sapiens
uggcuccaggccagguguccucuccaggacug

SEQ ID NO: 68857 - RNA, 32 nt, Homo Sapiens
aggagcgccuggaagcugccagccagcagaaa

SEQ ID NO: 68858 - RNA, 32 nt, Homo Sapiens
agcucuugcacccauagcacacacuccuugcu

SEQ ID NO: 68859 - RNA, 32 nt, Homo Sapiens
acacuccuuggcuuccuuucucuucccuuaac

SEQ ID NO: 68860 - RNA, 27 nt, Homo Sapiens
caauucuccuucuucagccucccgagu

SEQ ID NO: 68861 - RNA, 32 nt, Homo Sapiens
aucaagagaguaaacagacagcuuacagaaug

SEQ ID NO: 68862 - RNA, 32 nt, Homo Sapiens
ccggcgcugcagcguucccagcccuuugccga

SEQ ID NO: 68863 - RNA, 32 nt, Homo Sapiens
acuucauaguguaaaaauuuauauuauuguga

SEQ ID NO: 68864 - RNA, 32 nt, Homo Sapiens
uaauaaaaauuuaaaaauccaguauaacaccu

SEQ ID NO: 68865 - RNA, 32 nt, Homo Sapiens
ucaucuuaaugauuaaaugacuugcucagcau

SEQ ID NO: 68866 - RNA, 32 nt, Homo Sapiens
uauuuaguuugucuuuccuguuucacagcugg

SEQ ID NO: 68867 - RNA, 32 nt, Homo Sapiens
uacucccagacacccacccucgcuucagccac

SEQ ID NO: 68868 - RNA, 32 nt, Homo Sapiens
aggcucugacuucugacauucaacuagaugug

SEQ ID NO: 68869 - RNA, 32 nt, Homo Sapiens
ugccagugccuucucaccaccacgugccugcg

SEQ ID NO: 68870 - RNA, 32 nt, Homo Sapiens
uaagcuaaagcaguguuugcuccaccuucaua

SEQ ID NO: 68871 - RNA, 32 nt, Homo Sapiens
accugcagaaaaguagguaaagguucugaucu

SEQ ID NO: 68872 - RNA, 32 nt, Homo Sapiens
uagguuugcuucaaauaaaggcauauauacca

SEQ ID NO: 68873 - RNA, 32 nt, Homo Sapiens
ucugggcaccucggcuuuccccggugccaguc

SEQ ID NO: 68874 - RNA, 32 nt, Homo Sapiens
guuuucuuucuuuuccugguagauaggaucuu

SEQ ID NO: 68875 - RNA, 32 nt, Homo Sapiens
ugcccacaugggaccuggccccaggcugucac

SEQ ID NO: 68876 - RNA, 32 nt, Homo Sapiens
uccugagggauuucuaaccauguaucuaaucc

SEQ ID NO: 68877 - RNA, 32 nt, Homo Sapiens
cgacccucucucuggcgacgccucccacccac

SEQ ID NO: 68878 - RNA, 32 nt, Homo Sapiens
agcaguuaauacuagauuguguucugucucug

SEQ ID NO: 68879 - RNA, 32 nt, Homo Sapiens
cuaaauucuggugagugguguuuugauaagua

SEQ ID NO: 68880 - RNA, 32 nt, Homo Sapiens
cuuugcuuuuaaaaugaugaucuguuucagcc

SEQ ID NO: 68881 - RNA, 32 nt, Homo Sapiens
ucaagacgacgaacaaugaacuaaagccaaau

SEQ ID NO: 68882 - RNA, 29 nt, Homo Sapiens
ccgcccuggggguccuggacgccgccucg

SEQ ID NO: 68883 - RNA, 32 nt, Homo Sapiens
ccuauuuuuuauuuucuauggauuuucauaaa

SEQ ID NO: 68884 - RNA, 30 nt, Homo Sapiens
gcuuggcuugaaaacauccguccgguuuua

SEQ ID NO: 68885 - RNA, 32 nt, Homo Sapiens
cccacugccaccugcagccgcagccuggacug

SEQ ID NO: 68886 - RNA, 32 nt, Homo Sapiens
ucagggcccugccccaggccacugggccguuu

SEQ ID NO: 68887 - RNA, 29 nt, Homo Sapiens
aucaaauaaaguuuuauuuuccccuuuaa

SEQ ID NO: 68888 - RNA, 32 nt, Homo Sapiens
cccaaguccuccccgcgccgccuccucuguau

SEQ ID NO: 68889 - RNA, 32 nt, Homo Sapiens
ucauuccaccgccauccuucaccucucccuca

SEQ ID NO: 68890 - RNA, 32 nt, Homo Sapiens
ccauuauuuucauuuucauuuuuggcucuuca

SEQ ID NO: 68891 - RNA, 32 nt, Homo Sapiens
aggaccuggcuucaggacuguggacugggcug

SEQ ID NO: 68892 - RNA, 32 nt, Homo Sapiens
uaauaaaacaacaacaaaaacagcaguuugug

SEQ ID NO: 68893 - RNA, 32 nt, Homo Sapiens
gcacaaucuuuggaaucacucuaucuuugguc

SEQ ID NO: 68894 - RNA, 32 nt, Homo Sapiens
agggcaugaagccuuuuuccuggucccagcag

SEQ ID NO: 68895 - RNA, 32 nt, Homo Sapiens
uuauaccuuuuguuuuccuugccgcgacugug

SEQ ID NO: 68896 - RNA, 32 nt, Homo Sapiens
uauauauuugcagauuacgccuuuuuguaacg

SEQ ID NO: 68897 - RNA, 32 nt, Homo Sapiens
cucauuuggagauccuagauggcugccugcuu

SEQ ID NO: 68898 - RNA, 32 nt, Homo Sapiens
uaacauguaaauguacauaauaaaauuccagg

SEQ ID NO: 68899 - RNA, 32 nt, Homo Sapiens
ucugguucuuguaauauuguguuuccugccaa

SEQ ID NO: 68900 - RNA, 32 nt, Homo Sapiens
gagaagcgcuauaaaaguuuugugcuguugag

SEQ ID NO: 68901 - RNA, 32 nt, Homo Sapiens
aguaaauuucugauuuuccuuuauugauuaug

SEQ ID NO: 68902 - RNA, 32 nt, Homo Sapiens
ucugacagagccauauguacccuacccugcac

SEQ ID NO: 68903 - RNA, 32 nt, Homo Sapiens
gccgccgugccgcuccucccuugcccucaggc

SEQ ID NO: 68904 - RNA, 32 nt, Homo Sapiens
cuucacuuuuuccauuuccccaguucucugcc

SEQ ID NO: 68905 - RNA, 32 nt, Homo Sapiens
cuucuggaaaaauacaaauauguggagaauuu

SEQ ID NO: 68906 - RNA, 32 nt, Homo Sapiens
aguuuaaaaaagacaaaaaaaaccuuugcuua

SEQ ID NO: 68907 - RNA, 32 nt, Homo Sapiens
cggcggagaaggagguagagggggcggcggcg

SEQ ID NO: 68908 - RNA, 32 nt, Homo Sapiens
aauaugcagaaucucugccuagaaucuuuauu

SEQ ID NO: 68909 - RNA, 32 nt, Homo Sapiens
ugccccacggacccgggcagugaaccagagau

SEQ ID NO: 68910 - RNA, 32 nt, Homo Sapiens
cucccuggaucuccucccuccucccagggguu

SEQ ID NO: 68911 - RNA, 32 nt, Homo Sapiens
aucugcaucuucucuuauuucugaccuuuuuc

SEQ ID NO: 68912 - RNA, 32 nt, Homo Sapiens
gccggcucaagcagccgagacagagcagagug

SEQ ID NO: 68913 - RNA, 32 nt, Homo Sapiens
aagguguaagccaugguccacagugaaaguga

SEQ ID NO: 68914 - RNA, 32 nt, Homo Sapiens
ugaauguaaccaaaaguuuacaguuuuuuguc

SEQ ID NO: 68915 - RNA, 32 nt, Homo Sapiens
gggaauugauaaaggagagugguugcuguuaa

SEQ ID NO: 68916 - RNA, 32 nt, Homo Sapiens
gcccgccgugccaugggguucccggccgcggc

SEQ ID NO: 68917 - RNA, 32 nt, Homo Sapiens
ugaccuuccucuauccccugcccauccucccu

SEQ ID NO: 68918 - RNA, 32 nt, Homo Sapiens
cugggggagaaugcuggagggagcacgccgcu

SEQ ID NO: 68919 - RNA, 32 nt, Homo Sapiens
ccagggcuccagcccagcccgguggauccucu

SEQ ID NO: 68920 - RNA, 32 nt, Homo Sapiens
cagugggggguggaaugcaugugugggggcag

SEQ ID NO: 68921 - RNA, 32 nt, Homo Sapiens
aacauuucuuugcauuugguuuuuguguuccu

SEQ ID NO: 68922 - RNA, 32 nt, Homo Sapiens
cagcugccaguguugaauaauguaucauccag

SEQ ID NO: 68923 - RNA, 32 nt, Homo Sapiens
ucagugugaacaugccuucugugggcggaaau

SEQ ID NO: 68924 - RNA, 32 nt, Homo Sapiens
ccauucagaaacaaaacuguagaacuguguau

SEQ ID NO: 68925 - RNA, 32 nt, Homo Sapiens
ggccccgccccggccuccugcauuugcccgag

SEQ ID NO: 68926 - RNA, 32 nt, Homo Sapiens
cugaagcuuuguguuuggcugcaccugcauaa

SEQ ID NO: 68927 - RNA, 32 nt, Homo Sapiens
uauuauauaaaagguaaaccagcauucucacu

SEQ ID NO: 68928 - RNA, 32 nt, Homo Sapiens
cugcuuguccuguucaaguugcuggagcaggg

SEQ ID NO: 68929 - RNA, 32 nt, Homo Sapiens
agacucuugucuagauuguuuaaaagaaacuu

SEQ ID NO: 68930 - RNA, 32 nt, Homo Sapiens
gcaggccucgcgcagccuagcuccucacagcu

SEQ ID NO: 68931 - RNA, 32 nt, Homo Sapiens
ccccagaccccucccgcagccagagggcugga

SEQ ID NO: 68932 - RNA, 32 nt, Homo Sapiens
ggccagaaccccgcugggaggacuccccagaa

SEQ ID NO: 68933 - RNA, 32 nt, Homo Sapiens
agggggugguggcgaggcuccgcaacuuugga

SEQ ID NO: 68934 - RNA, 32 nt, Homo Sapiens
aucugccaaaauggcuuagacacaaaaacacc

SEQ ID NO: 68935 - RNA, 32 nt, Homo Sapiens
ccucaaaucuuuugggauuuggcacuugggga

SEQ ID NO: 68936 - RNA, 32 nt, Homo Sapiens
cuuugcccaagccuggaagccuuggcaggugg

SEQ ID NO: 68937 - RNA, 32 nt, Homo Sapiens
auguauauauugcauauucacuuuuuccuuua

SEQ ID NO: 68938 - RNA, 32 nt, Homo Sapiens
agucucugcuccagaaucucuggacggagcug

SEQ ID NO: 68939 - RNA, 32 nt, Homo Sapiens
ggagaggucuuuaauagcuuugaaaugcuuug

SEQ ID NO: 68940 - RNA, 32 nt, Homo Sapiens
uccccacuuuuuucccuuucucucuacuuccu

SEQ ID NO: 68941 - RNA, 32 nt, Homo Sapiens
gaauauacaccuguaaacgaguagcauguaua

SEQ ID NO: 68942 - RNA, 32 nt, Homo Sapiens
aaguacaacggaucaaaaaaccacagggcuuu

SEQ ID NO: 68943 - RNA, 32 nt, Homo Sapiens
cgcgaggggagacugaaguucacguuccgcuc

SEQ ID NO: 68944 - RNA, 32 nt, Homo Sapiens
ugagguggagccgcgggacgccggcaggguug

SEQ ID NO: 68945 - RNA, 32 nt, Homo Sapiens
augguccucccagcuucaguacauguugucug

SEQ ID NO: 68946 - RNA, 32 nt, Homo Sapiens
acaagaacagagcauuaaaccaagcacagggu

SEQ ID NO: 68947 - RNA, 32 nt, Homo Sapiens
guuguaagccacuacuuguguuuaccuuuuca

SEQ ID NO: 68948 - RNA, 32 nt, Homo Sapiens
uaacuguaaggugguuuaaaucaaauaugcaa

SEQ ID NO: 68949 - RNA, 32 nt, Homo Sapiens
gaagaaggacagagaccuggagcccuauggaa

SEQ ID NO: 68950 - RNA, 32 nt, Homo Sapiens
uuacaggugugagccacugcacccggccugaa

SEQ ID NO: 68951 - RNA, 32 nt, Homo Sapiens
uugaugaugugaauuuuggaaauauucucccc

SEQ ID NO: 68952 - RNA, 32 nt, Homo Sapiens
gaguuguuaacaguguucuuugaaagaaucuc

SEQ ID NO: 68953 - RNA, 32 nt, Homo Sapiens
aacaugcaacaaaagcacuuugaaaaauauau

SEQ ID NO: 68954 - RNA, 32 nt, Homo Sapiens
aauaacagaaaauuauucuggucagaaaaccu

SEQ ID NO: 68955 - RNA, 32 nt, Homo Sapiens
gaacagcaccucaggagcagagacucccuacg

SEQ ID NO: 68956 - RNA, 32 nt, Homo Sapiens
ccuggugucacaugacaccagcaugcauugca

SEQ ID NO: 68957 - RNA, 32 nt, Homo Sapiens
uuuauaauauaccagcagccacaauugcuaaa

SEQ ID NO: 68958 - RNA, 32 nt, Homo Sapiens
aagaaaccaacccugccgagacaccuugaucu

SEQ ID NO: 68959 - RNA, 32 nt, Homo Sapiens
cuuggccaagguggacgagaaccacucagagu

SEQ ID NO: 68960 - RNA, 32 nt, Homo Sapiens
gaucauuuucccuucacagauuccuccgccag

SEQ ID NO: 68961 - RNA, 32 nt, Homo Sapiens
uauauaucugaauuguaagaguuguuagcaca

SEQ ID NO: 68962 - RNA, 32 nt, Homo Sapiens
auucuugaguccaauuugaaaaacuaggguca

SEQ ID NO: 68963 - RNA, 32 nt, Homo Sapiens
uugcccaggcuggacucaaauuccugggcuca

SEQ ID NO: 68964 - RNA, 32 nt, Homo Sapiens
uguauaaauuuauuuacugcuagucuuaagaa

SEQ ID NO: 68965 - RNA, 32 nt, Homo Sapiens
ugucagggagaauggagaaggggucgccgaca

SEQ ID NO: 68966 - RNA, 32 nt, Homo Sapiens
uacuccauccuucauggagaccccuggugcug

SEQ ID NO: 68967 - RNA, 32 nt, Homo Sapiens
aguggugccauugugugaugucagcaugacgu

SEQ ID NO: 68968 - RNA, 32 nt, Homo Sapiens
uauuguccaaaggagauauuuuugacagugaa

SEQ ID NO: 68969 - RNA, 32 nt, Homo Sapiens
caaguaacuggggaguacaugcuuuaggacac

SEQ ID NO: 68970 - RNA, 32 nt, Homo Sapiens
cccccgcagagcugccgcccgcgcucucgcac

SEQ ID NO: 68971 - RNA, 32 nt, Homo Sapiens
gcucugggauccugggggccuggguugggggc

SEQ ID NO: 68972 - RNA, 32 nt, Homo Sapiens
ggguacuagagucagaacuaagaugaggcuga

SEQ ID NO: 68973 - RNA, 32 nt, Homo Sapiens
ggccaggcgugguggcucaugcuuguaauccc

SEQ ID NO: 68974 - RNA, 32 nt, Homo Sapiens
ggccaggcgugguggcucaugccuguaaucuc

SEQ ID NO: 68975 - RNA, 32 nt, Homo Sapiens
gccggacgggugggcuggacugagagaauucu

SEQ ID NO: 68976 - RNA, 32 nt, Homo Sapiens
gcuguaucaguucaucgucccacaagcagagu

SEQ ID NO: 68977 - RNA, 32 nt, Homo Sapiens
ggucgagccuggcgcgccgcagccauggccau

SEQ ID NO: 68978 - RNA, 32 nt, Homo Sapiens
acaucuuauuucugccucuaguuuuguaagcu

SEQ ID NO: 68979 - RNA, 32 nt, Homo Sapiens
caccgugugcaggcguuagcccgggguuggcu

SEQ ID NO: 68980 - RNA, 32 nt, Homo Sapiens
uauuuuuguauauacaauaauauuugcaacug

SEQ ID NO: 68981 - RNA, 32 nt, Homo Sapiens
gcaccgcgcuggcuggcacugaaggacagcaa

SEQ ID NO: 68982 - RNA, 32 nt, Homo Sapiens
gccaguccuugacauugucgggcuuuucacau

SEQ ID NO: 68983 - RNA, 32 nt, Homo Sapiens
uacaaaccaaaauuauuuuacagcaacgaaaa

SEQ ID NO: 68984 - RNA, 32 nt, Homo Sapiens
aaccugauuacaaguuguacuaacauauuaaa

SEQ ID NO: 68985 - RNA, 32 nt, Homo Sapiens
acgagcagcggccggcgggcggcggggauacu

SEQ ID NO: 68986 - RNA, 32 nt, Homo Sapiens
aauugucacuagaacuauuugcugugggcauu

SEQ ID NO: 68987 - RNA, 32 nt, Homo Sapiens
uucucccugaggggccucuccuaucucucgcc

SEQ ID NO: 68988 - RNA, 32 nt, Homo Sapiens
cugacccauucacauuuuaacauaggcaagag

SEQ ID NO: 68989 - RNA, 32 nt, Homo Sapiens
ucugcagugugggggaaccaaucuucaacuug

SEQ ID NO: 68990 - RNA, 32 nt, Homo Sapiens
gcuuccaggcuggccucaaacuccugggcuca

SEQ ID NO: 68991 - RNA, 32 nt, Homo Sapiens
gaguugcucacucuccucuuaccuccuugagg

SEQ ID NO: 68992 - RNA, 30 nt, Homo Sapiens
gcugaggcgccgcggccgggucccucucca

SEQ ID NO: 68993 - RNA, 32 nt, Homo Sapiens
gccagaggagaccagcagcagcacuugauuua

SEQ ID NO: 68994 - RNA, 32 nt, Homo Sapiens
uuucccugccagcaaaccccaccacccuaaga

SEQ ID NO: 68995 - RNA, 32 nt, Homo Sapiens
cugaguuuuuauuccugaaauucuuucuucug

SEQ ID NO: 68996 - RNA, 32 nt, Homo Sapiens
ucuguguaccaccccauauauuucauauuacu

SEQ ID NO: 68997 - RNA, 32 nt, Homo Sapiens
ugaccuuuuuaaaagaagcugauuuugaaacu

SEQ ID NO: 68998 - RNA, 32 nt, Homo Sapiens
aaagaaaccuuggccuggucucgagaagcuuc

SEQ ID NO: 68999 - RNA, 32 nt, Homo Sapiens
cuucuaugaggaaaggcugacauggcauuccu

SEQ ID NO: 69000 - RNA, 27 nt, Homo Sapiens
cuucaguuauucuucaguucuacucaa

SEQ ID NO: 69001 - RNA, 32 nt, Homo Sapiens
cucuaugcugaauucagaguagccuuggacaa

SEQ ID NO: 69002 - RNA, 32 nt, Homo Sapiens
ucuuuuuaacauguaguuaugaaaaucuccuu

SEQ ID NO: 69003 - RNA, 32 nt, Homo Sapiens
gcugaguaaggcggcgggcucggcgggggcca

SEQ ID NO: 69004 - RNA, 32 nt, Homo Sapiens
augggauuuacuauaggugaagauagccauca

SEQ ID NO: 69005 - RNA, 32 nt, Homo Sapiens
cuccucagccggcggcggcccgggcccagcaa

SEQ ID NO: 69006 - RNA, 32 nt, Homo Sapiens
guggccagaggucaccucccucauggguuggg

SEQ ID NO: 69007 - RNA, 32 nt, Homo Sapiens
uuaagacuugucacggcuucucacugggacug

SEQ ID NO: 69008 - RNA, 32 nt, Homo Sapiens
uggaugauccaaaaauaagugauaaugaaaac

SEQ ID NO: 69009 - RNA, 32 nt, Homo Sapiens
gauuuucaacuggcuaaccuuggcuuccacaa

SEQ ID NO: 69010 - RNA, 32 nt, Homo Sapiens
ugccuguaaccccagcacuuugggaggccgag

SEQ ID NO: 69011 - RNA, 32 nt, Homo Sapiens
uuauaaaggucccaggaucacuuuuaagggau

SEQ ID NO: 69012 - RNA, 32 nt, Homo Sapiens
gcucucuccaccugccgaccugccgggggccc

SEQ ID NO: 69013 - RNA, 32 nt, Homo Sapiens
agcucuggccagggcucugggacugcagugua

SEQ ID NO: 69014 - RNA, 32 nt, Homo Sapiens
ccuaauuuauuaaagagaauuagcuuagcgau

SEQ ID NO: 69015 - RNA, 32 nt, Homo Sapiens
ggggucggggcugcagccgucaugccggggau

SEQ ID NO: 69016 - RNA, 32 nt, Homo Sapiens
uuucauggccaaaguguuaacuaguuuuacua

SEQ ID NO: 69017 - RNA, 32 nt, Homo Sapiens
gcagacagcaucagcucugagguucaucaucu

SEQ ID NO: 69018 - RNA, 32 nt, Homo Sapiens
gcagagaggagcugacaggguaccugcuccgg

SEQ ID NO: 69019 - RNA, 32 nt, Homo Sapiens
auaagaagucagcagucugcaacccagaagag

SEQ ID NO: 69020 - RNA, 32 nt, Homo Sapiens
ugguaacauuuuagcagcaguguaugccaaaa

SEQ ID NO: 69021 - RNA, 32 nt, Homo Sapiens
uugaggcauuucauuucuuuugcuaguucauu

SEQ ID NO: 69022 - RNA, 32 nt, Homo Sapiens
uaguggugaugaugaugaugauaaugaugaug

SEQ ID NO: 69023 - RNA, 32 nt, Homo Sapiens
agcaguaucuagauaugucaguuucuuauaua

SEQ ID NO: 69024 - RNA, 32 nt, Homo Sapiens
ugguuggaaaucaaaauccuuccagggcaucu

SEQ ID NO: 69025 - RNA, 32 nt, Homo Sapiens
uucaggaccucagcugcacuuuggcgcuaacg

SEQ ID NO: 69026 - RNA, 32 nt, Homo Sapiens
agggguuugaguuuguuggaaaagcaguuaac

SEQ ID NO: 69027 - RNA, 32 nt, Homo Sapiens
ggccauuccuugaauuuuuaggucaccaguug

SEQ ID NO: 69028 - RNA, 32 nt, Homo Sapiens
cugaugggugucuucuguuuuccugcuggggu

SEQ ID NO: 69029 - RNA, 32 nt, Homo Sapiens
gauugcuugagccugggagguugaggcugcag

SEQ ID NO: 69030 - RNA, 32 nt, Homo Sapiens
cguaacccgucccagacacgucuuuucauucc

SEQ ID NO: 69031 - RNA, 32 nt, Homo Sapiens
guccaggugcgcugggaaggguccuggcggug

SEQ ID NO: 69032 - RNA, 32 nt, Homo Sapiens
aguuucauuaugucuucuguacuaguggggua

SEQ ID NO: 69033 - RNA, 32 nt, Homo Sapiens
uucugucacagacacucagggauagcaguacc

SEQ ID NO: 69034 - RNA, 32 nt, Homo Sapiens
aucuaagugucuguguucuuguaagccugagg

SEQ ID NO: 69035 - RNA, 31 nt, Homo Sapiens
cuuuggaaauaaaaauccagguucucucaga

SEQ ID NO: 69036 - RNA, 32 nt, Homo Sapiens
uuuuucagacugccccuccccuuuuuguaaaa

SEQ ID NO: 69037 - RNA, 32 nt, Homo Sapiens
ugcacgagucagaguccagggauugucacuau

SEQ ID NO: 69038 - RNA, 32 nt, Homo Sapiens
cacaccccacuuugaacacccuugcuuuagug

SEQ ID NO: 69039 - RNA, 32 nt, Homo Sapiens
gaccugcccccuccucaggcaucugggagggc

SEQ ID NO: 69040 - RNA, 32 nt, Homo Sapiens
cucauuccaaaaaggagcccaggccgggcaca

SEQ ID NO: 69041 - RNA, 32 nt, Homo Sapiens
aauggauuacacauuuuaaaugaacccauaau

SEQ ID NO: 69042 - RNA, 32 nt, Homo Sapiens
gccauuacaccugcagaauucaccuucgucca

SEQ ID NO: 69043 - RNA, 32 nt, Homo Sapiens
guuccuuguaucuauuuucguauuccugagaa

SEQ ID NO: 69044 - RNA, 30 nt, Homo Sapiens
agcaggaggagcggcggcggcugcaggagg

SEQ ID NO: 69045 - RNA, 32 nt, Homo Sapiens
agcuccgccucccggguucacgccacucuccc

SEQ ID NO: 69046 - RNA, 32 nt, Homo Sapiens
aaguuuugucucuugguccacaguauuuggaa

SEQ ID NO: 69047 - RNA, 32 nt, Homo Sapiens
aagagaagggggaaauggggcugggggccguc

SEQ ID NO: 69048 - RNA, 32 nt, Homo Sapiens
uuaaccacguguauaacagcucugcuggacac

SEQ ID NO: 69049 - RNA, 32 nt, Homo Sapiens
ggccgcgucuucaggcagcugcgcgcaccacc

SEQ ID NO: 69050 - RNA, 32 nt, Homo Sapiens
gcagcccuggcgggaccgcagcaaccaccgga

SEQ ID NO: 69051 - RNA, 32 nt, Homo Sapiens
gugcauccccucagcccuccuggcccuucagu

SEQ ID NO: 69052 - RNA, 32 nt, Homo Sapiens
caaguguguaugagacuagacuuuacaacugu

SEQ ID NO: 69053 - RNA, 32 nt, Homo Sapiens
gguagaggguggaccagaggcugaggacugag

SEQ ID NO: 69054 - RNA, 32 nt, Homo Sapiens
ggagccccacccaggagcuggccgcggcaccu

SEQ ID NO: 69055 - RNA, 32 nt, Homo Sapiens
gugcccaggauagauguaauauuucuuacaga

SEQ ID NO: 69056 - RNA, 32 nt, Homo Sapiens
cugcugaaggcuuuagaugaugagaaaaaggg

SEQ ID NO: 69057 - RNA, 32 nt, Homo Sapiens
cuucaguucaacaugcuuccuuagcuuuucau

SEQ ID NO: 69058 - RNA, 32 nt, Homo Sapiens
aaggucagcaauucuuuuuuuuuuuuuuuuug

SEQ ID NO: 69059 - RNA, 32 nt, Homo Sapiens
ccagcucggcggugguggacugagaggggccc

SEQ ID NO: 69060 - RNA, 32 nt, Homo Sapiens
cugugguccccgagacacaggcacgggucccu

SEQ ID NO: 69061 - RNA, 32 nt, Homo Sapiens
ccagcaggggaggaggcauccgaauccacagg

SEQ ID NO: 69062 - RNA, 30 nt, Homo Sapiens
cggaggaagggaaugggggagacagccuga

SEQ ID NO: 69063 - RNA, 32 nt, Homo Sapiens
cucugauuccuuccuuucccuccauuucacaa

SEQ ID NO: 69064 - RNA, 32 nt, Homo Sapiens
cuagguuuuuuuuuuucuuucuuccucuccug

SEQ ID NO: 69065 - RNA, 32 nt, Homo Sapiens
guggccacggaacgcugcccggagccgcgcga

SEQ ID NO: 69066 - RNA, 32 nt, Homo Sapiens
uuccugauagagucucaauaaaagcaaccuua

SEQ ID NO: 69067 - RNA, 32 nt, Homo Sapiens
cggcucgggugacagcgucgcggccgccggac

SEQ ID NO: 69068 - RNA, 32 nt, Homo Sapiens
uggugguacccuccucccccagcccaucuguu

SEQ ID NO: 69069 - RNA, 32 nt, Homo Sapiens
uuuuccaccccauggucucuagugcugccuau

SEQ ID NO: 69070 - RNA, 32 nt, Homo Sapiens
gcaaauguaaaaauaaaaucuaacucucauuu

SEQ ID NO: 69071 - RNA, 32 nt, Homo Sapiens
caguuuugucauuguucuaguaaauuaguucc

SEQ ID NO: 69072 - RNA, 32 nt, Homo Sapiens
uugaguugauucaguaaaucgacuucaaauac

SEQ ID NO: 69073 - RNA, 32 nt, Homo Sapiens
guaaaaaugauauauauaggcauuaaccacac

SEQ ID NO: 69074 - RNA, 32 nt, Homo Sapiens
cuaugcaaccucagaagacacccaggagugau

SEQ ID NO: 69075 - RNA, 32 nt, Homo Sapiens
aagaaauaauggucuuuuuuuuuuuuuuaaaa

SEQ ID NO: 69076 - RNA, 32 nt, Homo Sapiens
uuuacacugaagauuuuauuuauucuucucuc

SEQ ID NO: 69077 - RNA, 32 nt, Homo Sapiens
ugucgauuuuucuagaaaucugcacgguauaa

SEQ ID NO: 69078 - RNA, 32 nt, Homo Sapiens
gaggccagggauagaggauauugggucucagc

SEQ ID NO: 69079 - RNA, 32 nt, Homo Sapiens
ccuggcagcagcagggcuuucaggcaccagug

SEQ ID NO: 69080 - RNA, 32 nt, Homo Sapiens
cagggaaaaagaaaaguuaacacauaaauaaa

SEQ ID NO: 69081 - RNA, 32 nt, Homo Sapiens
ggugggagccccagccaaauccugggcucccu

SEQ ID NO: 69082 - RNA, 32 nt, Homo Sapiens
gagucucgcucuuucgcccaggcuggcgugca

SEQ ID NO: 69083 - RNA, 32 nt, Homo Sapiens
gucucgugggguccugccuguuuagucgcuuu

SEQ ID NO: 69084 - RNA, 32 nt, Homo Sapiens
ucucuauuaaacaauuuaguucuagucuuaaa

SEQ ID NO: 69085 - RNA, 32 nt, Homo Sapiens
agcccagaacagagaaucagcuggagcccaga

SEQ ID NO: 69086 - RNA, 32 nt, Homo Sapiens
guaagggcaggacuggcuccagugggccucau

SEQ ID NO: 69087 - RNA, 32 nt, Homo Sapiens
gaggacccggugccugccuggcagaugugccc

SEQ ID NO: 69088 - RNA, 32 nt, Homo Sapiens
guuuuccuugaugggccuggaaguuguugaca

SEQ ID NO: 69089 - RNA, 32 nt, Homo Sapiens
agguguggacauuugagaagguguccuaucaa

SEQ ID NO: 69090 - RNA, 32 nt, Homo Sapiens
guaaagaugcuguuucucuucauguuucucaa

SEQ ID NO: 69091 - RNA, 32 nt, Homo Sapiens
uguugucugacaucccacacacaucggcacac

SEQ ID NO: 69092 - RNA, 32 nt, Homo Sapiens
cuggcuaggguuggcugggaaccucaaagagg

SEQ ID NO: 69093 - RNA, 32 nt, Homo Sapiens
caccucuaaucccagcacuuugggaggcugag

SEQ ID NO: 69094 - RNA, 32 nt, Homo Sapiens
ccggagcccgcggcgguaccugcagcggagga

SEQ ID NO: 69095 - RNA, 32 nt, Homo Sapiens
uaccgagaugaccccgcccacugccauacucu

SEQ ID NO: 69096 - RNA, 32 nt, Homo Sapiens
acagccccaagccccaggauccagguccacca

SEQ ID NO: 69097 - RNA, 32 nt, Homo Sapiens
cuggccgcagccugacacgccacgcggccccc

SEQ ID NO: 69098 - RNA, 32 nt, Homo Sapiens
uggcauggcuuuauuuguuuucuuguuucauu

SEQ ID NO: 69099 - RNA, 32 nt, Homo Sapiens
caccugcagccuguugcccaauaaauuuaaga

SEQ ID NO: 69100 - RNA, 32 nt, Homo Sapiens
uucuuggaugacagaugcauguugaugcccua

SEQ ID NO: 69101 - RNA, 32 nt, Homo Sapiens
cucugugcagacacaugugccgggccauuggc

SEQ ID NO: 69102 - RNA, 32 nt, Homo Sapiens
gugcuugaaggggauguggacucuugacuucc

SEQ ID NO: 69103 - RNA, 32 nt, Homo Sapiens
cccagucuugucccggcagugccgcccucccc

SEQ ID NO: 69104 - RNA, 32 nt, Homo Sapiens
agggcggcacgcuggccggggaccucugcgag

SEQ ID NO: 69105 - RNA, 32 nt, Homo Sapiens
cccggucgugcuaaucacuuugaaaggcauua

SEQ ID NO: 69106 - RNA, 32 nt, Homo Sapiens
uuccuuuucucuucuuuauuuucuuuuuuaag

SEQ ID NO: 69107 - RNA, 31 nt, Homo Sapiens
caggaggcggagguugcagugagacgagauu

SEQ ID NO: 69108 - RNA, 32 nt, Homo Sapiens
ugguguguggagguggcgggaggggucaguga

SEQ ID NO: 69109 - RNA, 32 nt, Homo Sapiens
gacgguaagcaacauuugaggaccauucacua

SEQ ID NO: 69110 - RNA, 32 nt, Homo Sapiens
ccuuucugccagccgauguguccucaucucag

SEQ ID NO: 69111 - RNA, 32 nt, Homo Sapiens
aaaguauauagauucuguacuccagauaagau

SEQ ID NO: 69112 - RNA, 32 nt, Homo Sapiens
aagagaugucgggcuagggcccgggacgggcg

SEQ ID NO: 69113 - RNA, 32 nt, Homo Sapiens
aaaaauucuuaaaaacgcuuuaauuuuuaugu

SEQ ID NO: 69114 - RNA, 32 nt, Homo Sapiens
ccauucugaggggaaauuugccugcugguaac

SEQ ID NO: 69115 - RNA, 32 nt, Homo Sapiens
uggcccuccaggguguccccagccaucaggag

SEQ ID NO: 69116 - RNA, 32 nt, Homo Sapiens
gcagccauguaugaauggaaagaaauuaugca

SEQ ID NO: 69117 - RNA, 32 nt, Homo Sapiens
ggaacagaagacugaggccugcagguuccgau

SEQ ID NO: 69118 - RNA, 32 nt, Homo Sapiens
uccuugcuuugcauucuuugccugcaggacac

SEQ ID NO: 69119 - RNA, 32 nt, Homo Sapiens
caucauccagcauggacccuaccuccagauca

SEQ ID NO: 69120 - RNA, 32 nt, Homo Sapiens
uccuguaaacaaauggggacaaugcauccaaa

SEQ ID NO: 69121 - RNA, 32 nt, Homo Sapiens
aucacuccaaaauaaaugccuguacacacuag

SEQ ID NO: 69122 - RNA, 32 nt, Homo Sapiens
gccgagcccagcugugggcggcuccuggugcu

SEQ ID NO: 69123 - RNA, 32 nt, Homo Sapiens
ccugacaggcucagcucugcaucuugaggucc

SEQ ID NO: 69124 - RNA, 32 nt, Homo Sapiens
uuggcagagaaccaagcaauccugucaaacag

SEQ ID NO: 69125 - RNA, 32 nt, Homo Sapiens
ugggcuuggccagagcucagggugcugagcgu

SEQ ID NO: 69126 - RNA, 32 nt, Homo Sapiens
ggcuuugucaauccuguugacugguguauguc

SEQ ID NO: 69127 - RNA, 32 nt, Homo Sapiens
ggcuagguuggauggaaggugaaagggaugaa

SEQ ID NO: 69128 - RNA, 32 nt, Homo Sapiens
cucgcaccccucgccgcccaccagggccaugc

SEQ ID NO: 69129 - RNA, 32 nt, Homo Sapiens
gaauccuacugugaaaucaugucuguauuuuu

SEQ ID NO: 69130 - RNA, 32 nt, Homo Sapiens
uacuuuuuguauaaaggaaauaaaacaauguu

SEQ ID NO: 69131 - RNA, 32 nt, Homo Sapiens
ucaggguagccaccgaacaugaugcucgggca

SEQ ID NO: 69132 - RNA, 32 nt, Homo Sapiens
cuacggccgcgcgggggcgggagccagguggc

SEQ ID NO: 69133 - RNA, 32 nt, Homo Sapiens
cacauaccacgcuuaaaccaacccccaaauuu

SEQ ID NO: 69134 - RNA, 32 nt, Homo Sapiens
acucuguauuccaggcuggaugauagagcaag

SEQ ID NO: 69135 - RNA, 32 nt, Homo Sapiens
ucuucucaaucuuccuucuccccuggaaaacc

SEQ ID NO: 69136 - RNA, 32 nt, Homo Sapiens
gcuagagguucaaagauauuuugcuuugugau

SEQ ID NO: 69137 - RNA, 32 nt, Homo Sapiens
uaaccugcaauaacuugaaaugcauacccuuu

SEQ ID NO: 69138 - RNA, 32 nt, Homo Sapiens
ccgcgcugacuucggguccccggagccugggg

SEQ ID NO: 69139 - RNA, 32 nt, Homo Sapiens
aguauaggugauuuuucuuuuaauucuguuaa

SEQ ID NO: 69140 - RNA, 32 nt, Homo Sapiens
gagucggcgucccuuacccaguuaauaagauc

SEQ ID NO: 69141 - RNA, 32 nt, Homo Sapiens
cgcagcaucuguagcccggccccgcuuguggu

SEQ ID NO: 69142 - RNA, 32 nt, Homo Sapiens
augcacugcaucccaaaccaucagggccuuuu

SEQ ID NO: 69143 - RNA, 32 nt, Homo Sapiens
cacaaucucauuggaacggcugcaucuguggg

SEQ ID NO: 69144 - RNA, 32 nt, Homo Sapiens
cuguugucccgucugcucuccucuuacccacc

SEQ ID NO: 69145 - RNA, 32 nt, Homo Sapiens
auagaaagaauuuuuucuugaucuguuuuguu

SEQ ID NO: 69146 - RNA, 32 nt, Homo Sapiens
aaugauuuuuaaauaccguuuuuuacaccguu

SEQ ID NO: 69147 - RNA, 32 nt, Homo Sapiens
acuugguaaaaguuuuaauguauuggauaaaa

SEQ ID NO: 69148 - RNA, 32 nt, Homo Sapiens
ggccggcguugucgcgcacggcccggcgccac

SEQ ID NO: 69149 - RNA, 32 nt, Homo Sapiens
cacugaaugcaaaccacaggguuucgcagcgu

SEQ ID NO: 69150 - RNA, 32 nt, Homo Sapiens
cacauaaaacauuuucuuugguaaaucaagau

SEQ ID NO: 69151 - RNA, 32 nt, Homo Sapiens
cugcggggcgaccgcgggcaccagccacgcgc

SEQ ID NO: 69152 - RNA, 32 nt, Homo Sapiens
cacuggcccagggccaccucuugcuuggggag

SEQ ID NO: 69153 - RNA, 32 nt, Homo Sapiens
uuuuacacucucuuuucuuauucuuagggcuu

SEQ ID NO: 69154 - RNA, 31 nt, Homo Sapiens
gccccgaggcucauccugccccggcacgggu

SEQ ID NO: 69155 - RNA, 32 nt, Homo Sapiens
gaguugcuaugaaaucaggaaacugucuccuu

SEQ ID NO: 69156 - RNA, 32 nt, Homo Sapiens
auuguggaaugacuagcaaacaagcaauguca

SEQ ID NO: 69157 - RNA, 32 nt, Homo Sapiens
ugguuugguuuuggacaugauaaaccugccaa

SEQ ID NO: 69158 - RNA, 32 nt, Homo Sapiens
ccuggggccagcucugccccagcccugagagg

SEQ ID NO: 69159 - RNA, 32 nt, Homo Sapiens
guuaaauaaacuagaguauugucuucuucauu

SEQ ID NO: 69160 - RNA, 32 nt, Homo Sapiens
gaaugcuggccucaccuucucuaucauccaca

SEQ ID NO: 69161 - RNA, 32 nt, Homo Sapiens
ucuuuuucuccugccuucuccuggagaugaag

SEQ ID NO: 69162 - RNA, 32 nt, Homo Sapiens
aguugcacacuggggcugccacggauaagccc

SEQ ID NO: 69163 - RNA, 32 nt, Homo Sapiens
uauugcacuccagccugggugacagagcaaga

SEQ ID NO: 69164 - RNA, 32 nt, Homo Sapiens
auuuuguugguuugaaaauaugugugacuuac

SEQ ID NO: 69165 - RNA, 32 nt, Homo Sapiens
uguagguuuuguagaggagaucugcacuggag

SEQ ID NO: 69166 - RNA, 32 nt, Homo Sapiens
uguguaggacagagaccuggaugugcuuugau

SEQ ID NO: 69167 - RNA, 32 nt, Homo Sapiens
aaaauauugcaaagguguaugcuuuaaguugu

SEQ ID NO: 69168 - RNA, 32 nt, Homo Sapiens
uuuucuaaugaacacguauacuuuuguaauca

SEQ ID NO: 69169 - RNA, 32 nt, Homo Sapiens
accgcugggucaucgcgccgcgcggcuuccug

SEQ ID NO: 69170 - RNA, 32 nt, Homo Sapiens
ccagucccacccucccgcacauaccuggccca

SEQ ID NO: 69171 - RNA, 32 nt, Homo Sapiens
gcugaguuacuauuuuuauuuacaaugaaucc

SEQ ID NO: 69172 - RNA, 32 nt, Homo Sapiens
cgaggcgggguggggcugcccgggccacucug

SEQ ID NO: 69173 - RNA, 32 nt, Homo Sapiens
gcuucuugcuacuuccacucugcuuugagacu

SEQ ID NO: 69174 - RNA, 32 nt, Homo Sapiens
uugccugucgccaucuuggggccuucaccgga

SEQ ID NO: 69175 - RNA, 32 nt, Homo Sapiens
uguaucucuaaagauagaauacagugcgauuu

SEQ ID NO: 69176 - RNA, 32 nt, Homo Sapiens
caugugugggcaccagggcugcggcuggaacc

SEQ ID NO: 69177 - RNA, 32 nt, Homo Sapiens
aaucuucuagaagaagagaaacaaagggauug

SEQ ID NO: 69178 - RNA, 32 nt, Homo Sapiens
uugacaagaugcuugaaaaaccaagaggauau

SEQ ID NO: 69179 - RNA, 32 nt, Homo Sapiens
accagaaugcaaacuuaaguaagauacaguuc

SEQ ID NO: 69180 - RNA, 32 nt, Homo Sapiens
acuguguugcaucauccuccaguuugccuggu

SEQ ID NO: 69181 - RNA, 32 nt, Homo Sapiens
acugccugccccagccccucaguggcggcuug

SEQ ID NO: 69182 - RNA, 32 nt, Homo Sapiens
cuaaaaacuagaggugagaaauuuaaacuaua

SEQ ID NO: 69183 - RNA, 32 nt, Homo Sapiens
guaaaaucauucacaagguuggcacuucagua

SEQ ID NO: 69184 - RNA, 32 nt, Homo Sapiens
uuagggguaguuacagaucucuguagagcucc

SEQ ID NO: 69185 - RNA, 32 nt, Homo Sapiens
gagguguaacgggggugggcucccucccucgg

SEQ ID NO: 69186 - RNA, 32 nt, Homo Sapiens
auacagaaggcacuuuaauguuuagacaucaa

SEQ ID NO: 69187 - RNA, 32 nt, Homo Sapiens
gccuuuguguguuugugucaauaaaaagccaa

SEQ ID NO: 69188 - RNA, 32 nt, Homo Sapiens
ccgccagaccgccgccgcgccgccaucaugga

SEQ ID NO: 69189 - RNA, 32 nt, Homo Sapiens
gguugagcaccagaaucucagaauuuaccacc

SEQ ID NO: 69190 - RNA, 32 nt, Homo Sapiens
ggguggguguuuuguugcagcugcugaucuuu

SEQ ID NO: 69191 - RNA, 32 nt, Homo Sapiens
cucccuccaguacuucuguuugugcccuucug

SEQ ID NO: 69192 - RNA, 32 nt, Homo Sapiens
uuaggccacagugaccugcgcaauguuuauau

SEQ ID NO: 69193 - RNA, 32 nt, Homo Sapiens
caccacuuggagaucuuugcuuccuugcuuuu

SEQ ID NO: 69194 - RNA, 32 nt, Homo Sapiens
uguugcuuugcuuguuggugacuugcauuuuu

SEQ ID NO: 69195 - RNA, 32 nt, Homo Sapiens
gucgggugccgcggccagaggcgcgcggggcu

SEQ ID NO: 69196 - RNA, 31 nt, Homo Sapiens
cccuaagcacccaggccacaggcaagaaccu

SEQ ID NO: 69197 - RNA, 30 nt, Homo Sapiens
cuccuuccgccggggccgccgggccucaug

SEQ ID NO: 69198 - RNA, 32 nt, Homo Sapiens
ccauaaaauggcaacaguccaggcuccuugcc

SEQ ID NO: 69199 - RNA, 32 nt, Homo Sapiens
cucaccauaaccuccgccucccagguucaagc

SEQ ID NO: 69200 - RNA, 32 nt, Homo Sapiens
acauaucagaauaaaaauaaauguauacucac

SEQ ID NO: 69201 - RNA, 32 nt, Homo Sapiens
auccuguagaaaguuuauaagaaaaccaguau

SEQ ID NO: 69202 - RNA, 32 nt, Homo Sapiens
cucaccgcaaccuccgccucccggguucaagu

SEQ ID NO: 69203 - RNA, 32 nt, Homo Sapiens
ugcacagaacagacugcguuauuguuauuuuu

SEQ ID NO: 69204 - RNA, 32 nt, Homo Sapiens
cuguuccuccacuaugggcucccuuucaaacu

SEQ ID NO: 69205 - RNA, 32 nt, Homo Sapiens
uuuuaauucuaauucacuuguuuauuuugggg

SEQ ID NO: 69206 - RNA, 32 nt, Homo Sapiens
cgaugaggcgcugaggcggcugccggcgcugc

SEQ ID NO: 69207 - RNA, 32 nt, Homo Sapiens
ucauauucuauuauugaacaguauuaaugcuu

SEQ ID NO: 69208 - RNA, 32 nt, Homo Sapiens
aaaaugccaaccccugguccucgcuuuacugu

SEQ ID NO: 69209 - RNA, 32 nt, Homo Sapiens
uucucugucuacgccucccgagaaaagaaagg

SEQ ID NO: 69210 - RNA, 32 nt, Homo Sapiens
caagcuccucaauaaacuugucuccacuuaaa

SEQ ID NO: 69211 - RNA, 32 nt, Homo Sapiens
gcuuugaaaacaccuguuauuaaugaaauacu

SEQ ID NO: 69212 - RNA, 32 nt, Homo Sapiens
uaaaaacuugaaaacagcuuugaaacacaauu

SEQ ID NO: 69213 - RNA, 30 nt, Homo Sapiens
ccucuggguucccaaguugaagccuagacu

SEQ ID NO: 69214 - RNA, 32 nt, Homo Sapiens
guauucuucuauuugugcagauuaagauugca

SEQ ID NO: 69215 - RNA, 32 nt, Homo Sapiens
cccuggaggacgcggccagagcccccacacca

SEQ ID NO: 69216 - RNA, 32 nt, Homo Sapiens
gcccuggcucugcagccagcacaacuggguaa

SEQ ID NO: 69217 - RNA, 32 nt, Homo Sapiens
gcccagcccugccacaccccccgcccccggcc

SEQ ID NO: 69218 - RNA, 32 nt, Homo Sapiens
uaaguuccuucccagcacaucgccagcccugg

SEQ ID NO: 69219 - RNA, 32 nt, Homo Sapiens
gugcgaggcuggggcugaaagcagaagcaugc

SEQ ID NO: 69220 - RNA, 32 nt, Homo Sapiens
ugggacauagaaccucuuaucugggcagucau

SEQ ID NO: 69221 - RNA, 32 nt, Homo Sapiens
cuuuccugagaagaugcgguggcugccuaugu

SEQ ID NO: 69222 - RNA, 32 nt, Homo Sapiens
ggcccagaggggccauacugccuggcaggggu

SEQ ID NO: 69223 - RNA, 32 nt, Homo Sapiens
cuucucaaacuucugcuagaaaaugcugacuc

SEQ ID NO: 69224 - RNA, 32 nt, Homo Sapiens
agugacccaaggucuucuugagcuuuggaacc

SEQ ID NO: 69225 - RNA, 32 nt, Homo Sapiens
ucucaccuggacuuaagcgucuggcucuaauu

SEQ ID NO: 69226 - RNA, 32 nt, Homo Sapiens
cagcggcagcgcccucccgaggaacaggcguc

SEQ ID NO: 69227 - RNA, 32 nt, Homo Sapiens
aagacagcugccugccuggcugccgggaacac

SEQ ID NO: 69228 - RNA, 32 nt, Homo Sapiens
uccuuagugaguuuagagacuuggccaugaau

SEQ ID NO: 69229 - RNA, 32 nt, Homo Sapiens
acacaggccagccccagucucacggcugaagu

SEQ ID NO: 69230 - RNA, 32 nt, Homo Sapiens
gacggagaucucuggagcagaccucaagguga

SEQ ID NO: 69231 - RNA, 32 nt, Homo Sapiens
ggccucaagagugaagcugcagaccuucgcgg

SEQ ID NO: 69232 - RNA, 32 nt, Homo Sapiens
augacaugaaaauaauugugaaauauggaauu

SEQ ID NO: 69233 - RNA, 32 nt, Homo Sapiens
ccggcgaucgaugcccgccgcggcgccuggcc

SEQ ID NO: 69234 - RNA, 32 nt, Homo Sapiens
ucuuuuuuucuuucuuuuuuuuuuuuuccucc

SEQ ID NO: 69235 - RNA, 32 nt, Homo Sapiens
uagucccuucccuuuuuauuaagauauuucua

SEQ ID NO: 69236 - RNA, 32 nt, Homo Sapiens
uaaauaaaacaucuguuuuucaaugugguaau

SEQ ID NO: 69237 - RNA, 32 nt, Homo Sapiens
ggauggcagggccgagcugcuagcuucgacag

SEQ ID NO: 69238 - RNA, 32 nt, Homo Sapiens
aaaaugauguaaagauguaauaaaauuccuuu

SEQ ID NO: 69239 - RNA, 32 nt, Homo Sapiens
ucaaucuaguuagaaagaaaaaugaggcaaug

SEQ ID NO: 69240 - RNA, 32 nt, Homo Sapiens
uucuucccuaaaacguggagacucuaaguuaa

SEQ ID NO: 69241 - RNA, 32 nt, Homo Sapiens
cucuaacaacuggcaugcaaggcauguuuuuc

SEQ ID NO: 69242 - RNA, 32 nt, Homo Sapiens
ccacuaccaacccagcuccacccagcaguguc

SEQ ID NO: 69243 - RNA, 32 nt, Homo Sapiens
cgccuggguuucuuggccccagcugcccagca

SEQ ID NO: 69244 - RNA, 32 nt, Homo Sapiens
uuaaagggccccacccagcgacuggauuuucu

SEQ ID NO: 69245 - RNA, 32 nt, Homo Sapiens
aaaagaaaacaucauuugcaaagggagagagg

SEQ ID NO: 69246 - RNA, 32 nt, Homo Sapiens
aucuuauaucuagaaaaauguagagacuccac

SEQ ID NO: 69247 - RNA, 32 nt, Homo Sapiens
gcgagaggcggcggcgggagcggcggugaugg

SEQ ID NO: 69248 - RNA, 30 nt, Homo Sapiens
gaagagccacuugccaucaggcugucccuu

SEQ ID NO: 69249 - RNA, 32 nt, Homo Sapiens
uguagcucuucuaucaugagccuugaccguca

SEQ ID NO: 69250 - RNA, 32 nt, Homo Sapiens
ggagguguacuugacacccaauaaacugcacg

SEQ ID NO: 69251 - RNA, 32 nt, Homo Sapiens
gcuugcagcccauuucgaugcugcgaaacgug

SEQ ID NO: 69252 - RNA, 32 nt, Homo Sapiens
aauaaugacccggcccccgcccucugccccca

SEQ ID NO: 69253 - RNA, 32 nt, Homo Sapiens
ucauuauguuuuauuacuuuccaauuaccugu

SEQ ID NO: 69254 - RNA, 32 nt, Homo Sapiens
uuauugaguuugcaagauaagauguauuugua

SEQ ID NO: 69255 - RNA, 32 nt, Homo Sapiens
caucuauaaaaauuacuuuaagggcucucaca

SEQ ID NO: 69256 - RNA, 32 nt, Homo Sapiens
uuauagagcauuugaagugcugauaauuuaug

SEQ ID NO: 69257 - RNA, 32 nt, Homo Sapiens
gaaaaguguuuugaaucagagcagauucucaa

SEQ ID NO: 69258 - RNA, 32 nt, Homo Sapiens
cauggagugggcucauguugggaccagcugac

SEQ ID NO: 69259 - RNA, 32 nt, Homo Sapiens
uaucuccagaccuuuaccuagccccuccaggu

SEQ ID NO: 69260 - RNA, 32 nt, Homo Sapiens
caaauuuauuggcaugauauugcucauaauau

SEQ ID NO: 69261 - RNA, 32 nt, Homo Sapiens
ugccucugcccuccacgccgccgccacccucc

SEQ ID NO: 69262 - RNA, 32 nt, Homo Sapiens
gggcccggagacggccccucuaagucuguaac

SEQ ID NO: 69263 - RNA, 32 nt, Homo Sapiens
cacuaagcugguuuccuccuccccaggguuuu

SEQ ID NO: 69264 - RNA, 32 nt, Homo Sapiens
ggaagauggacuggcagagaccucuuuguugc

SEQ ID NO: 69265 - RNA, 32 nt, Homo Sapiens
gcaccgggcacggccuucaaugggcgaggaca

SEQ ID NO: 69266 - RNA, 32 nt, Homo Sapiens
gggcgggcgcgguguagcggcccgcgggcuga

SEQ ID NO: 69267 - RNA, 32 nt, Homo Sapiens
auuaauugauugcauuuguguuuuacauaaua

SEQ ID NO: 69268 - RNA, 32 nt, Homo Sapiens
uagcauuuauauauuuguguauggaaaacacu

SEQ ID NO: 69269 - RNA, 32 nt, Homo Sapiens
cugagccagacgcggcgguggcggcggcuccg

SEQ ID NO: 69270 - RNA, 30 nt, Homo Sapiens
cuuuuugucugugucugggaacuaccugcc

SEQ ID NO: 69271 - RNA, 32 nt, Homo Sapiens
acacggcuggcugcuuuucucagcgccgaagc

SEQ ID NO: 69272 - RNA, 32 nt, Homo Sapiens
cuguaugcaaaauaacuucuauuagaauaaug

SEQ ID NO: 69273 - RNA, 30 nt, Homo Sapiens
gcgggacccucugccacccucucugccacg

SEQ ID NO: 69274 - RNA, 29 nt, Homo Sapiens
ucuuaauaaaguuuuauguucuuuuugaa

SEQ ID NO: 69275 - RNA, 32 nt, Homo Sapiens
auaguuuauuguguggucauguuuacauugug

SEQ ID NO: 69276 - RNA, 32 nt, Homo Sapiens
gucuucacaaaacggggguccuccaggaguuc

SEQ ID NO: 69277 - RNA, 32 nt, Homo Sapiens
ugaagucugaccagcacaaggaaggaggcugg

SEQ ID NO: 69278 - RNA, 32 nt, Homo Sapiens
cuuuuucacucauagaauaugaauacauuuau

SEQ ID NO: 69279 - RNA, 31 nt, Homo Sapiens
cuuuuaacaaauuuuuggguuuuguauauag

SEQ ID NO: 69280 - RNA, 32 nt, Homo Sapiens
aguggaaaauuccaccagggccugagcuguga

SEQ ID NO: 69281 - RNA, 32 nt, Homo Sapiens
cugaggggcgggggcgcugcggcacagcuggu

SEQ ID NO: 69282 - RNA, 32 nt, Homo Sapiens
agggucuggguggaaggaccgcgggugucgca

SEQ ID NO: 69283 - RNA, 32 nt, Homo Sapiens
aaguauugaagagcuuccauugcuaggugagc

SEQ ID NO: 69284 - RNA, 32 nt, Homo Sapiens
aaaaccaccgacagcccuuggguuggcaagaa

SEQ ID NO: 69285 - RNA, 32 nt, Homo Sapiens
uauacuggugaaaucucgauggguuucagaua

SEQ ID NO: 69286 - RNA, 32 nt, Homo Sapiens
cgauuccugcgguaacucugagcccugaaauc

SEQ ID NO: 69287 - RNA, 32 nt, Homo Sapiens
gaaggcaaugaaauauaacauaaaucucucau

SEQ ID NO: 69288 - RNA, 32 nt, Homo Sapiens
uuuccccgguggauuggucucuggcccagccc

SEQ ID NO: 69289 - RNA, 32 nt, Homo Sapiens
uuaccccaugugaaccuggagagaccauccug

SEQ ID NO: 69290 - RNA, 32 nt, Homo Sapiens
ugguuuuuuauguggccacccgagggcgcccc

SEQ ID NO: 69291 - RNA, 32 nt, Homo Sapiens
ccccgccccagcgcagugccggccacacccca

SEQ ID NO: 69292 - RNA, 32 nt, Homo Sapiens
ugcauuguccuguauuuaucacaguuucuguu

SEQ ID NO: 69293 - RNA, 32 nt, Homo Sapiens
auugcccaccccuggcuuuuccggguagaaaa

SEQ ID NO: 69294 - RNA, 32 nt, Homo Sapiens
accugcccccacuguggccugcaugcgccccu

SEQ ID NO: 69295 - RNA, 32 nt, Homo Sapiens
acuggaaaacaaacacugcauuauguauguua

SEQ ID NO: 69296 - RNA, 32 nt, Homo Sapiens
cgagggaggaccugugggcacccaggcagcag

SEQ ID NO: 69297 - RNA, 32 nt, Homo Sapiens
ggccacuugcuguuucuucaguuucuaauuug

SEQ ID NO: 69298 - RNA, 32 nt, Homo Sapiens
uucgagaccagccugcccaauauggugaaacc

SEQ ID NO: 69299 - RNA, 32 nt, Homo Sapiens
ggcgcucucgcacccacacugccgcucacgcg

SEQ ID NO: 69300 - RNA, 32 nt, Homo Sapiens
cuuuauaaaaauucauaguaauccugccaaau

SEQ ID NO: 69301 - RNA, 32 nt, Homo Sapiens
guagugcaaaagcagccauagacaacacauac

SEQ ID NO: 69302 - RNA, 32 nt, Homo Sapiens
cgccggcaccaugggcugcugcaccggacgcu

SEQ ID NO: 69303 - RNA, 32 nt, Homo Sapiens
gcauauuccggaggggcuggcuccaggccacg

SEQ ID NO: 69304 - RNA, 32 nt, Homo Sapiens
ggcagggaagcaauguaguguggugggcagag

SEQ ID NO: 69305 - RNA, 32 nt, Homo Sapiens
cucucgaccucgcgcgcccauuuucgccgcug

SEQ ID NO: 69306 - RNA, 32 nt, Homo Sapiens
ucaagcccuagaagcuggguuucuuuaaauua

SEQ ID NO: 69307 - RNA, 32 nt, Homo Sapiens
cuaccgcgcccagccugaaauacucuauauug

SEQ ID NO: 69308 - RNA, 32 nt, Homo Sapiens
gacccguccccucccucagggggaccuaaagg

SEQ ID NO: 69309 - RNA, 32 nt, Homo Sapiens
gggauggcccuccuggcuucagcauccugcag

SEQ ID NO: 69310 - RNA, 32 nt, Homo Sapiens
gugcuggccccggguccgccccagaggagucc

SEQ ID NO: 69311 - RNA, 32 nt, Homo Sapiens
gacacacacaugaacacacugaagauauuucc

SEQ ID NO: 69312 - RNA, 32 nt, Homo Sapiens
guaucucccgagggcugcuuggacccuggugg

SEQ ID NO: 69313 - RNA, 32 nt, Homo Sapiens
uccugagagaggaggaggcugggcagggcccc

SEQ ID NO: 69314 - RNA, 32 nt, Homo Sapiens
agacuauaaauaaaaacuuauuuuauccuuaa

SEQ ID NO: 69315 - RNA, 32 nt, Homo Sapiens
uuuaaaaaaaucuauuucuuaaauaauaauaa

SEQ ID NO: 69316 - RNA, 32 nt, Homo Sapiens
ucuccugcugucacagcugccauccacuucuc

SEQ ID NO: 69317 - RNA, 29 nt, Homo Sapiens
caccaugccuucuuggaucggggcuguga

SEQ ID NO: 69318 - RNA, 32 nt, Homo Sapiens
auuaacauuauguacuguauauaucauuuuag

SEQ ID NO: 69319 - RNA, 32 nt, Homo Sapiens
uuguaggcaugagaaacuuauuuugacccuag

SEQ ID NO: 69320 - RNA, 32 nt, Homo Sapiens
gguaguugcugcucaugguucugucuguccgu

SEQ ID NO: 69321 - RNA, 28 nt, Homo Sapiens
aggucggugaggggcccgagguggcaga

SEQ ID NO: 69322 - RNA, 32 nt, Homo Sapiens
cucgccucccgcgcgccuaggugccugcgacu

SEQ ID NO: 69323 - RNA, 32 nt, Homo Sapiens
uuccacaggaggagucacagagucaccaaggg

SEQ ID NO: 69324 - RNA, 32 nt, Homo Sapiens
aaaauauaauugcucuuaauucuuggggaggu

SEQ ID NO: 69325 - RNA, 32 nt, Homo Sapiens
gccgcgacaaugagaggucccaucugaugccg

SEQ ID NO: 69326 - RNA, 32 nt, Homo Sapiens
uaacucugugggugggggcggggggcauagcu

SEQ ID NO: 69327 - RNA, 32 nt, Homo Sapiens
uccagagcauugcuacggcugcugcccuugua

SEQ ID NO: 69328 - RNA, 32 nt, Homo Sapiens
cugcugcuucugcccgagcccgcggccucacg

SEQ ID NO: 69329 - RNA, 32 nt, Homo Sapiens
gaggcuguagcggcugccuguugagggaggaa

SEQ ID NO: 69330 - RNA, 32 nt, Homo Sapiens
augaugaugauaauuuauuaacuuuuuggaag

SEQ ID NO: 69331 - RNA, 32 nt, Homo Sapiens
ugccauccagcucucuuguguacacaacauag

SEQ ID NO: 69332 - RNA, 32 nt, Homo Sapiens
ugcauuuccuuccucuccucuuccccaucagg

SEQ ID NO: 69333 - RNA, 32 nt, Homo Sapiens
gaacuguauuuaaucgguaguguuggggccgg

SEQ ID NO: 69334 - RNA, 32 nt, Homo Sapiens
uugcugguuuaguccuauuaaggucuguauuu

SEQ ID NO: 69335 - RNA, 32 nt, Homo Sapiens
aguguucagugcccauuucucauuuuacauuu

SEQ ID NO: 69336 - RNA, 32 nt, Homo Sapiens
ccggccauaucccccaugcuuuccgggccuca

SEQ ID NO: 69337 - RNA, 32 nt, Homo Sapiens
aagaccucucgccucuacguggcaccuggaau

SEQ ID NO: 69338 - RNA, 32 nt, Homo Sapiens
cugcuccaacuggugcggggcccugcagaugg

SEQ ID NO: 69339 - RNA, 32 nt, Homo Sapiens
gccgggcggcgguggcuguagguugugcggcu

SEQ ID NO: 69340 - RNA, 32 nt, Homo Sapiens
augagauacugagcucauuaucaguuccuuca

SEQ ID NO: 69341 - RNA, 32 nt, Homo Sapiens
uuggauuuaauuuuggggggcuuauacaaggu

SEQ ID NO: 69342 - RNA, 32 nt, Homo Sapiens
aauuuuguauauuuuuaaccaaugcaacauac

SEQ ID NO: 69343 - RNA, 32 nt, Homo Sapiens
cucugcccaaggccccgcacacacugggaccu

SEQ ID NO: 69344 - RNA, 32 nt, Homo Sapiens
guaaauaucagaaugaauccucuucccagggg

SEQ ID NO: 69345 - RNA, 32 nt, Homo Sapiens
cccagcgccgccccgucgucgucugccuucgc

SEQ ID NO: 69346 - RNA, 32 nt, Homo Sapiens
ggccccggauugagcccuccccgcccgggcuc

SEQ ID NO: 69347 - RNA, 32 nt, Homo Sapiens
cugauagcauuuauauuuuaaauauggcauug

SEQ ID NO: 69348 - RNA, 32 nt, Homo Sapiens
cacugcacuccagccugggugacagagugagg

SEQ ID NO: 69349 - RNA, 32 nt, Homo Sapiens
cgaguguccucuugcguguccaaaaguagccc

SEQ ID NO: 69350 - RNA, 32 nt, Homo Sapiens
gcgucagagccauggcgacggaggagaagaag

SEQ ID NO: 69351 - RNA, 31 nt, Homo Sapiens
aaauggauggccugccugccuucccuguccg

SEQ ID NO: 69352 - RNA, 32 nt, Homo Sapiens
ggccgguggcccgggcccgaccaccccagcug

SEQ ID NO: 69353 - RNA, 32 nt, Homo Sapiens
uugaugaaaacacuaaacaauggaaucuuggg

SEQ ID NO: 69354 - RNA, 32 nt, Homo Sapiens
aagaggcauccaccgcagcccugcgcucgcca

SEQ ID NO: 69355 - RNA, 32 nt, Homo Sapiens
uuaugaaaccaaaaacaaacaaguuugcuuuc

SEQ ID NO: 69356 - RNA, 32 nt, Homo Sapiens
acugccaguggagaggcaggaggacaggcugg

SEQ ID NO: 69357 - RNA, 32 nt, Homo Sapiens
guugcuaguauugauucagguacaccauuaag

SEQ ID NO: 69358 - RNA, 32 nt, Homo Sapiens
uuauuauuuuuuucuuuuuuuaaaaaguucug

SEQ ID NO: 69359 - RNA, 32 nt, Homo Sapiens
cagcuaauuuuuuguauucuuaguagagaugg

SEQ ID NO: 69360 - RNA, 32 nt, Homo Sapiens
ccugagcaaaacaaacaacgugagauuuuuac

SEQ ID NO: 69361 - RNA, 32 nt, Homo Sapiens
uuuaaccagaaagucaccugaguacggagucc

SEQ ID NO: 69362 - RNA, 32 nt, Homo Sapiens
cuuucgcuccugcccucugcccggcccuacug

SEQ ID NO: 69363 - RNA, 32 nt, Homo Sapiens
augucuauuuucaaaucagguauccugaagag

SEQ ID NO: 69364 - RNA, 32 nt, Homo Sapiens
aagagugcccgcuacaaccgcuucuccggggg

SEQ ID NO: 69365 - RNA, 32 nt, Homo Sapiens
ccaauacccuccccccaaguccuugggaccac

SEQ ID NO: 69366 - RNA, 32 nt, Homo Sapiens
agguuguucagcagaagucuuggagugcauuu

SEQ ID NO: 69367 - RNA, 32 nt, Homo Sapiens
gcaccucuggggucuugguaugguccccgcuc

SEQ ID NO: 69368 - RNA, 32 nt, Homo Sapiens
caacaagaaguggaugagaauauuuuguugac

SEQ ID NO: 69369 - RNA, 32 nt, Homo Sapiens
uugcacagcugauguagacagucaggcaaaac

SEQ ID NO: 69370 - RNA, 32 nt, Homo Sapiens
uuguugugcuauggggggaggggggaggaaug

SEQ ID NO: 69371 - RNA, 32 nt, Homo Sapiens
acaucaagucagagggggcaucugaaugcagg

SEQ ID NO: 69372 - RNA, 32 nt, Homo Sapiens
uguuguguuucugaauaauagaaauuaacagg

SEQ ID NO: 69373 - RNA, 31 nt, Homo Sapiens
guuuugaaauaaaaagaguauauucaaaaaa

SEQ ID NO: 69374 - RNA, 32 nt, Homo Sapiens
ucaacaucggcucuggccuggcacugcuaggc

SEQ ID NO: 69375 - RNA, 32 nt, Homo Sapiens
uaucagaggaaaauuuucguagucuuuguaaa

SEQ ID NO: 69376 - RNA, 32 nt, Homo Sapiens
gcuccaccuugaugggucaaccuuuguguggc

SEQ ID NO: 69377 - RNA, 32 nt, Homo Sapiens
caugcuacagaaagcugcuugccauucucuug

SEQ ID NO: 69378 - RNA, 32 nt, Homo Sapiens
agaugcuguucuuccuuuagauuuugucacgu

SEQ ID NO: 69379 - RNA, 32 nt, Homo Sapiens
cgugcuugaguccccggcgugauguguucaug

SEQ ID NO: 69380 - RNA, 32 nt, Homo Sapiens
gugccugugggaagagacgucggagucugauc

SEQ ID NO: 69381 - RNA, 32 nt, Homo Sapiens
cccagcaacacugaggccgccgccgccgccug

SEQ ID NO: 69382 - RNA, 31 nt, Homo Sapiens
gugaagugcaaagcagauggaguccaggccc

SEQ ID NO: 69383 - RNA, 32 nt, Homo Sapiens
auucaguccauauagagcuguccuacagcauu

SEQ ID NO: 69384 - RNA, 32 nt, Homo Sapiens
ggcagaggggccagaaucgcccggcccagccc

SEQ ID NO: 69385 - RNA, 29 nt, Homo Sapiens
aauaaagcugcauaugucucauuguuacc

SEQ ID NO: 69386 - RNA, 32 nt, Homo Sapiens
uucccugacaauguuuguaauauggcuguguu

SEQ ID NO: 69387 - RNA, 32 nt, Homo Sapiens
ccaggguggcaccagcucagcuggcgcauguc

SEQ ID NO: 69388 - RNA, 32 nt, Homo Sapiens
ccuuuccauuuuuuuuuuuuuaacggcuuucu

SEQ ID NO: 69389 - RNA, 32 nt, Homo Sapiens
uugccacuuucccaccaaauugugagugcuug

SEQ ID NO: 69390 - RNA, 32 nt, Homo Sapiens
guggguaaaagaaaacaaaacauuuccuauaa

SEQ ID NO: 69391 - RNA, 32 nt, Homo Sapiens
uuuguucaaguuuuggguauguuuaaucuguu

SEQ ID NO: 69392 - RNA, 32 nt, Homo Sapiens
gugagugaagaccaccuggaucuccugccucc

SEQ ID NO: 69393 - RNA, 32 nt, Homo Sapiens
uuauuaggcuuggaaucagggccucuaacucu

SEQ ID NO: 69394 - RNA, 32 nt, Homo Sapiens
ucacgggaguggggcugcuuguucuccuuuua

SEQ ID NO: 69395 - RNA, 32 nt, Homo Sapiens
gacagaggaggccacagugaugaccuguacgc

SEQ ID NO: 69396 - RNA, 32 nt, Homo Sapiens
agauuuuccacaccacccagaggcucauauuc

SEQ ID NO: 69397 - RNA, 32 nt, Homo Sapiens
aacacaucaguucagucuugaugaacaucugu

SEQ ID NO: 69398 - RNA, 32 nt, Homo Sapiens
ucacccugcucuggcccagccgcuggcgcccg

SEQ ID NO: 69399 - RNA, 32 nt, Homo Sapiens
aauaaauaguaauauaucaucuuuuuagggau

SEQ ID NO: 69400 - RNA, 32 nt, Homo Sapiens
agcaggcugccugcuguuucccggggagauca

SEQ ID NO: 69401 - RNA, 32 nt, Homo Sapiens
gagaucacuagaacagaaaaacaacccagauu

SEQ ID NO: 69402 - RNA, 32 nt, Homo Sapiens
ccgcuuucgucuccguccugcugccguuaccg

SEQ ID NO: 69403 - RNA, 32 nt, Homo Sapiens
ggauaugugcuaaugaaggaaaauguggcacu

SEQ ID NO: 69404 - RNA, 32 nt, Homo Sapiens
cucccagggaagaucccggaggaagaguggga

SEQ ID NO: 69405 - RNA, 30 nt, Homo Sapiens
cgcccggcgcccgcccucggcuccugcacu

SEQ ID NO: 69406 - RNA, 32 nt, Homo Sapiens
cugcauuuacacacacaccacacacgcacaca

SEQ ID NO: 69407 - RNA, 32 nt, Homo Sapiens
aaccugagagacggagguugcagggagccgag

SEQ ID NO: 69408 - RNA, 32 nt, Homo Sapiens
cgaaggccuguuugacaagccucccccggaag

SEQ ID NO: 69409 - RNA, 32 nt, Homo Sapiens
ccaacgcauauaauaccagggauugggcuauc

SEQ ID NO: 69410 - RNA, 32 nt, Homo Sapiens
acucugagggugggggagagagaggcgugguc

SEQ ID NO: 69411 - RNA, 32 nt, Homo Sapiens
cuuuuagagaacuuucagagcacuguuuuuga

SEQ ID NO: 69412 - RNA, 32 nt, Homo Sapiens
uuagcccaagagugcaaaucugccagccuagg

SEQ ID NO: 69413 - RNA, 32 nt, Homo Sapiens
uguacauccgacagacggugcugaaagugugu

SEQ ID NO: 69414 - RNA, 32 nt, Homo Sapiens
gccauuucaaccagaauaauuuuauugcuaau

SEQ ID NO: 69415 - RNA, 32 nt, Homo Sapiens
uguuuaauguaaaucuaauaguacuuguaauu

SEQ ID NO: 69416 - RNA, 32 nt, Homo Sapiens
gucuucccuucccgcguuccccgggagaaaca

SEQ ID NO: 69417 - RNA, 32 nt, Homo Sapiens
gagucaagauuugaaauaggugaggcaggguu

SEQ ID NO: 69418 - RNA, 32 nt, Homo Sapiens
cacugcggcagaggcagcgugcacacucggau

SEQ ID NO: 69419 - RNA, 32 nt, Homo Sapiens
augggaaaucauauauuuuaaaaaugauuuua

SEQ ID NO: 69420 - RNA, 31 nt, Homo Sapiens
caaaaaauucccaguaaccaggcaugaucaa

SEQ ID NO: 69421 - RNA, 32 nt, Homo Sapiens
ucuccagccaauuucaaagaaaacagaccagc

SEQ ID NO: 69422 - RNA, 32 nt, Homo Sapiens
gcaaccacagucacuguugugcucuuuguugg

SEQ ID NO: 69423 - RNA, 32 nt, Homo Sapiens
caccaaccagauucaugagcuuucucacauuu

SEQ ID NO: 69424 - RNA, 32 nt, Homo Sapiens
acauauauauauauuugucuguaagaauuaug

SEQ ID NO: 69425 - RNA, 32 nt, Homo Sapiens
cgggaggcgcauccguggaccaugggggcagc

SEQ ID NO: 69426 - RNA, 32 nt, Homo Sapiens
agucauaugguugaauaaauaauuauaaauug

SEQ ID NO: 69427 - RNA, 32 nt, Homo Sapiens
gccccugggagcacccagcaguucuuggagau

SEQ ID NO: 69428 - RNA, 32 nt, Homo Sapiens
auuuaaagauuccacagaggcugagagcagug

SEQ ID NO: 69429 - RNA, 31 nt, Homo Sapiens
ggcagccgagccugccugcgucccgaggccg

SEQ ID NO: 69430 - RNA, 32 nt, Homo Sapiens
acuuguuacuuaaaaauugugaauucuguugu

SEQ ID NO: 69431 - RNA, 32 nt, Homo Sapiens
acuggaagacaaugcaccuuggagggugggca

SEQ ID NO: 69432 - RNA, 32 nt, Homo Sapiens
uuuaccuagugacaccaaauuaucgguauuuu

SEQ ID NO: 69433 - RNA, 32 nt, Homo Sapiens
ccagacucuuggccuccacuggaagcuuugga

SEQ ID NO: 69434 - RNA, 32 nt, Homo Sapiens
acacugaauacuguagaaaugcacuuugcuca

SEQ ID NO: 69435 - RNA, 32 nt, Homo Sapiens
cucuugacuuuauaggaguacggggaagcuuu

SEQ ID NO: 69436 - RNA, 32 nt, Homo Sapiens
gagucuugcuaccucagucaguauuguuuugg

SEQ ID NO: 69437 - RNA, 32 nt, Homo Sapiens
auuccuuccagaugccucagugcuacaccaca

SEQ ID NO: 69438 - RNA, 32 nt, Homo Sapiens
gaacucgguugggaauggcagcugcuuggaca

SEQ ID NO: 69439 - RNA, 32 nt, Homo Sapiens
uaugcuucacgguccauacagucucugucaca

SEQ ID NO: 69440 - RNA, 32 nt, Homo Sapiens
cccaccacgagcaucauccaguccucagcccu

SEQ ID NO: 69441 - RNA, 32 nt, Homo Sapiens
gggcaggggacugagggugcuugaguaggaug

SEQ ID NO: 69442 - RNA, 32 nt, Homo Sapiens
cauacugugaaauaaacuaaaaugaaaccaaa

SEQ ID NO: 69443 - RNA, 32 nt, Homo Sapiens
ugagggcaccgccuauugguguccugugggag

SEQ ID NO: 69444 - RNA, 32 nt, Homo Sapiens
gcccucccaagucccacccucuucccaugucc

SEQ ID NO: 69445 - RNA, 32 nt, Homo Sapiens
auaggaaggcagagccaccuccucuccucucc

SEQ ID NO: 69446 - RNA, 32 nt, Homo Sapiens
aagccucauuugcuuaucuugcuggagccaac

SEQ ID NO: 69447 - RNA, 32 nt, Homo Sapiens
gguuaaccaaaaugauuacuacucuugacaau

SEQ ID NO: 69448 - RNA, 32 nt, Homo Sapiens
cacucagaugacugcauuuuuaaguugcuagg

SEQ ID NO: 69449 - RNA, 32 nt, Homo Sapiens
agacuguaugcccugcuaucagaugccagauc

SEQ ID NO: 69450 - RNA, 32 nt, Homo Sapiens
guaccuuauaaauguauuugaaaguuaaauau

SEQ ID NO: 69451 - RNA, 32 nt, Homo Sapiens
cggcccgugcgacucgccggaccucgcgggcg

SEQ ID NO: 69452 - RNA, 32 nt, Homo Sapiens
gguucccauggucuugggcagcucugccccug

SEQ ID NO: 69453 - RNA, 32 nt, Homo Sapiens
ggaacaagcauuaaguuuucagccaaacugga

SEQ ID NO: 69454 - RNA, 32 nt, Homo Sapiens
uaaugugacuaaauguuucaucuugaagaguu

SEQ ID NO: 69455 - RNA, 32 nt, Homo Sapiens
uuacuguguucugacagccaugugucacuaua

SEQ ID NO: 69456 - RNA, 32 nt, Homo Sapiens
aagaaaaacgucuuacagccagugucuaaacu

SEQ ID NO: 69457 - RNA, 32 nt, Homo Sapiens
cagccuccagcauguguggccacuguaccccc

SEQ ID NO: 69458 - RNA, 32 nt, Homo Sapiens
cccuugccucuguggcagcugcgagugugucu

SEQ ID NO: 69459 - RNA, 32 nt, Homo Sapiens
gcugcucugugccugcugucagagcccuggug

SEQ ID NO: 69460 - RNA, 32 nt, Homo Sapiens
uaacucugcaugaacggacuggauaguaaagu

SEQ ID NO: 69461 - RNA, 32 nt, Homo Sapiens
cuccaucucuuggucuucuccuuugaagcaca

SEQ ID NO: 69462 - RNA, 32 nt, Homo Sapiens
ccagcgcccccaggccgcucccggggcucacg

SEQ ID NO: 69463 - RNA, 32 nt, Homo Sapiens
uaugaaggacaaagucaaaagcagcaguggau

SEQ ID NO: 69464 - RNA, 32 nt, Homo Sapiens
aucacugggaaaacacaaaaaauuacacaacc

SEQ ID NO: 69465 - RNA, 28 nt, Homo Sapiens
uucgaugaagggaaacauuuggaaaccc

SEQ ID NO: 69466 - RNA, 32 nt, Homo Sapiens
cugggcgcccagcuacaggcgccgggcaacuu

SEQ ID NO: 69467 - RNA, 29 nt, Homo Sapiens
uuucugucauuuuucagaguuuagauugu

SEQ ID NO: 69468 - RNA, 32 nt, Homo Sapiens
cuuuuauucucuuuuucuuaaucucugcuccu

SEQ ID NO: 69469 - RNA, 32 nt, Homo Sapiens
cauuacuaaugaaaauuauucucuagcauuuu

SEQ ID NO: 69470 - RNA, 32 nt, Homo Sapiens
ggcaggggggcugaggcacgugguagcccucu

SEQ ID NO: 69471 - RNA, 32 nt, Homo Sapiens
ggagcgcuggugccggcagaggcggcgacggu

SEQ ID NO: 69472 - RNA, 32 nt, Homo Sapiens
uuuucauguuucuauuuguuuuguuucuagaa

SEQ ID NO: 69473 - RNA, 32 nt, Homo Sapiens
ggugagggccugccagcuccguccucccugcc

SEQ ID NO: 69474 - RNA, 32 nt, Homo Sapiens
cugccuugacuucuucccugcaugcucccucc

SEQ ID NO: 69475 - RNA, 32 nt, Homo Sapiens
ugcaggacgaggugaccccccgccccgcugcg

SEQ ID NO: 69476 - RNA, 32 nt, Homo Sapiens
agaggcugagcccccugaaaccccugccccuu

SEQ ID NO: 69477 - RNA, 32 nt, Homo Sapiens
ccucucaggcccggcuuucgggcgcuugccgu

SEQ ID NO: 69478 - RNA, 32 nt, Homo Sapiens
uggaauaucauacugugguuucugccuaaaau

SEQ ID NO: 69479 - RNA, 32 nt, Homo Sapiens
acugaagaucuccccugaacaacacugggauu

SEQ ID NO: 69480 - RNA, 32 nt, Homo Sapiens
uccuggcucucuacugucuuucugggcccauc

SEQ ID NO: 69481 - RNA, 31 nt, Homo Sapiens
uuugcaggaguuagccaaccaugggaaccuu

SEQ ID NO: 69482 - RNA, 32 nt, Homo Sapiens
cccagucccuagaaaugugucaauauguuuua

SEQ ID NO: 69483 - RNA, 32 nt, Homo Sapiens
uccuccccucccugagauguuccuccugcccc

SEQ ID NO: 69484 - RNA, 32 nt, Homo Sapiens
uuuaaagucuuacuugucuuucuuguugcuuu

SEQ ID NO: 69485 - RNA, 32 nt, Homo Sapiens
gagacagggucucacuguguugccucacucga

SEQ ID NO: 69486 - RNA, 32 nt, Homo Sapiens
uuuugagagaauaauuuauaaguuucugugca

SEQ ID NO: 69487 - RNA, 32 nt, Homo Sapiens
ccgauauuuuaaaagcugagaucuccacuaca

SEQ ID NO: 69488 - RNA, 32 nt, Homo Sapiens
gcggcgcgucccgcccgagggcggcucuggcu

SEQ ID NO: 69489 - RNA, 32 nt, Homo Sapiens
uggggacuggccguggacauggagcggaugau

SEQ ID NO: 69490 - RNA, 31 nt, Homo Sapiens
uggaggaggugcuggacuccaaggccggcug

SEQ ID NO: 69491 - RNA, 32 nt, Homo Sapiens
uggggauggggguguguacagaugaagucagu

SEQ ID NO: 69492 - RNA, 32 nt, Homo Sapiens
gacaguuuggugguugccauugggacagugag

SEQ ID NO: 69493 - RNA, 32 nt, Homo Sapiens
gcgugccggcgauggagcgcgcgguagagccu

SEQ ID NO: 69494 - RNA, 32 nt, Homo Sapiens
gucguagagagggggcggggcggccauugggg

SEQ ID NO: 69495 - RNA, 32 nt, Homo Sapiens
caucuaugauuguccaauuuaacaucaaaguc

SEQ ID NO: 69496 - RNA, 32 nt, Homo Sapiens
cauacacacacacacacacacacacacacaca

SEQ ID NO: 69497 - RNA, 32 nt, Homo Sapiens
agaaaauuuuuguaguagcguuuuuuaaaugu

SEQ ID NO: 69498 - RNA, 32 nt, Homo Sapiens
cacacgcacauacacacacacacacacacgca

SEQ ID NO: 69499 - RNA, 32 nt, Homo Sapiens
cacacacacacacauacauacacacacacaua

SEQ ID NO: 69500 - RNA, 32 nt, Homo Sapiens
cacacacacauacacacacacacacacacaca

SEQ ID NO: 69501 - RNA, 32 nt, Homo Sapiens
acuuugggagaccgaggugggcagguaacuug

SEQ ID NO: 69502 - RNA, 32 nt, Homo Sapiens
uuuuuaauuuuuuuauuuuuuauuuucuuuuu

SEQ ID NO: 69503 - RNA, 32 nt, Homo Sapiens
ugcauagugucugagaaauaagaaaugcucag

SEQ ID NO: 69504 - RNA, 30 nt, Homo Sapiens
gcaucccugcagcuuugggaaaccaugcua

SEQ ID NO: 69505 - RNA, 32 nt, Homo Sapiens
uugcauaaugauauucacauccccucaguugc

SEQ ID NO: 69506 - RNA, 32 nt, Homo Sapiens
accacucugugcuaagcccuagagcaggucaa

SEQ ID NO: 69507 - RNA, 32 nt, Homo Sapiens
gcccaccagugaccacgaaggcugugcugcuu

SEQ ID NO: 69508 - RNA, 32 nt, Homo Sapiens
uuggcauggcccagcccugccucaugggaugg

SEQ ID NO: 69509 - RNA, 32 nt, Homo Sapiens
aauauauacuaaaauauaccacuuaagcauug

SEQ ID NO: 69510 - RNA, 32 nt, Homo Sapiens
aaaauguaauccaagccaaaaguuaacaagaa

SEQ ID NO: 69511 - RNA, 32 nt, Homo Sapiens
cucuuauuucucuguucgggggccucccacag

SEQ ID NO: 69512 - RNA, 32 nt, Homo Sapiens
gggcuugguaguacaguaaaauuuuaguguaa

SEQ ID NO: 69513 - RNA, 32 nt, Homo Sapiens
caccuguuggugccggagccucgugcuggucu

SEQ ID NO: 69514 - RNA, 32 nt, Homo Sapiens
gcagacacgugccuggacuccgagggcuucug

SEQ ID NO: 69515 - RNA, 32 nt, Homo Sapiens
gcggaggcaguggcggccgcgaggggaggggg

SEQ ID NO: 69516 - RNA, 32 nt, Homo Sapiens
gccggcgacaccuuuccuggacuauaaauuga

SEQ ID NO: 69517 - RNA, 32 nt, Homo Sapiens
aguaaacuuaaaaucacaaacaugacauugcu

SEQ ID NO: 69518 - RNA, 30 nt, Homo Sapiens
cggcgauggcggugcaggcggcgcuccuca

SEQ ID NO: 69519 - RNA, 32 nt, Homo Sapiens
aucuacggaggccugcucccggaccgugcggg

SEQ ID NO: 69520 - RNA, 32 nt, Homo Sapiens
acguaacugggaccucaagggccuucugucag

SEQ ID NO: 69521 - RNA, 32 nt, Homo Sapiens
accagcacuuucccucuguuuccugaccuaug

SEQ ID NO: 69522 - RNA, 32 nt, Homo Sapiens
gcauggcccucccuggcucccugucccugggc

SEQ ID NO: 69523 - RNA, 32 nt, Homo Sapiens
aaccaccaaaaauacuauggagagcuacacug

SEQ ID NO: 69524 - RNA, 32 nt, Homo Sapiens
acgccgggaaaggugauggcugucucucagcu

SEQ ID NO: 69525 - RNA, 32 nt, Homo Sapiens
ugauccuccccucccugagauguuccuccugc

SEQ ID NO: 69526 - RNA, 32 nt, Homo Sapiens
auggagcagcuucgagacgugcccaucgacca

SEQ ID NO: 69527 - RNA, 32 nt, Homo Sapiens
cucgcuuucccuccggccaaccucugaagccg

SEQ ID NO: 69528 - RNA, 32 nt, Homo Sapiens
caguuaaguacuuguuucuuaauaguuucauu

SEQ ID NO: 69529 - RNA, 32 nt, Homo Sapiens
ccuuagcccucccugcuuugccuggcccguug

SEQ ID NO: 69530 - RNA, 32 nt, Homo Sapiens
auguuaaaugacuugauuguacuuggaguaau

SEQ ID NO: 69531 - RNA, 32 nt, Homo Sapiens
acuggucuucccagcccuaaacccugccccag

SEQ ID NO: 69532 - RNA, 32 nt, Homo Sapiens
acggaaugggauaguuauucuguaaacuaagu

SEQ ID NO: 69533 - RNA, 32 nt, Homo Sapiens
agggacauuauccauuacagucuaacucuuuc

SEQ ID NO: 69534 - RNA, 32 nt, Homo Sapiens
cccuuccccacuucuuacacuccaaacucagc

SEQ ID NO: 69535 - RNA, 32 nt, Homo Sapiens
ggcggggguuauucucuuuccuucaggaaaug

SEQ ID NO: 69536 - RNA, 32 nt, Homo Sapiens
agacucugccagcgcguccugcccgcuucccu

SEQ ID NO: 69537 - RNA, 32 nt, Homo Sapiens
uauuuucuuuuuucuuuuucuauuuuaguguu

SEQ ID NO: 69538 - RNA, 32 nt, Homo Sapiens
gguuuuuaaaagacaagucaucauuugaaaau

SEQ ID NO: 69539 - RNA, 32 nt, Homo Sapiens
agcucacaccugaaaucuuagcacuucgggag

SEQ ID NO: 69540 - RNA, 32 nt, Homo Sapiens
ggugcugugccaagggacucagagcacaugug

SEQ ID NO: 69541 - RNA, 32 nt, Homo Sapiens
ucagaaagucagccgagauacaugaugggggc

SEQ ID NO: 69542 - RNA, 32 nt, Homo Sapiens
ugggcagcccucgcaugcuggggucgggccag

SEQ ID NO: 69543 - RNA, 32 nt, Homo Sapiens
guccuucauuucuccuucauuucucagucacc

SEQ ID NO: 69544 - RNA, 32 nt, Homo Sapiens
cacugcacuccagccugggugauagagcugga

SEQ ID NO: 69545 - RNA, 32 nt, Homo Sapiens
ucaucagaaaugcugcagaaaacuacagccaa

SEQ ID NO: 69546 - RNA, 32 nt, Homo Sapiens
cacuuccucucuucuuacuaucuucuucucau

SEQ ID NO: 69547 - RNA, 32 nt, Homo Sapiens
uaaaacuaaaaucuuaaauaaaacagaaaacu

SEQ ID NO: 69548 - RNA, 32 nt, Homo Sapiens
guucaauuucuggggagaaaugucuauugauu

SEQ ID NO: 69549 - RNA, 32 nt, Homo Sapiens
ugagggacacuggccuggcccucgggucuucg

SEQ ID NO: 69550 - RNA, 32 nt, Homo Sapiens
ccacagauccugccuccacccaguuccccaca

SEQ ID NO: 69551 - RNA, 32 nt, Homo Sapiens
gccagugugccuuugccugaguucuuguccug

SEQ ID NO: 69552 - RNA, 32 nt, Homo Sapiens
guggagcccguggucucaggccuccaacuuug

SEQ ID NO: 69553 - RNA, 32 nt, Homo Sapiens
gugagaacguggauuguucuacaacuugcaca

SEQ ID NO: 69554 - RNA, 32 nt, Homo Sapiens
gguuuuugcugcgccaacgcagugaccgaagg

SEQ ID NO: 69555 - RNA, 32 nt, Homo Sapiens
auuagaauaaaaacagaauacuauguucaucc

SEQ ID NO: 69556 - RNA, 32 nt, Homo Sapiens
agcaggaggcggaggugguggaaggcuguuuc

SEQ ID NO: 69557 - RNA, 32 nt, Homo Sapiens
uuccucuuuuucugugugagguuuuuuuuuuu

SEQ ID NO: 69558 - RNA, 32 nt, Homo Sapiens
cauaauuugaguuuuacauaaaauagaaauuu

SEQ ID NO: 69559 - RNA, 32 nt, Homo Sapiens
cuggucacaguaucuuugucucugccaggugg

SEQ ID NO: 69560 - RNA, 32 nt, Homo Sapiens
ggcaggcagcuugggcccgagcccaagcauuu

SEQ ID NO: 69561 - RNA, 32 nt, Homo Sapiens
agccaccaaagccccagggauggagcccagug

SEQ ID NO: 69562 - RNA, 32 nt, Homo Sapiens
aaaccugucccgggcucugucacuucacaccc

SEQ ID NO: 69563 - RNA, 32 nt, Homo Sapiens
caacgcugucggcagagcugacuugccuguac

SEQ ID NO: 69564 - RNA, 32 nt, Homo Sapiens
ccuugucccacggcugcuggggccccccagua

SEQ ID NO: 69565 - RNA, 32 nt, Homo Sapiens
ggaaccaguuguggauuucccgggggcagggu

SEQ ID NO: 69566 - RNA, 32 nt, Homo Sapiens
gccgcuuuuaaaaaauacccauuggcuaugcc

SEQ ID NO: 69567 - RNA, 32 nt, Homo Sapiens
cccaaaauguuuuucuuccugucugaaaaugg

SEQ ID NO: 69568 - RNA, 32 nt, Homo Sapiens
ucauuaagaaaguugaugaauaagucauauua

SEQ ID NO: 69569 - RNA, 32 nt, Homo Sapiens
ugggaaagccggagggggcggcuggggcaggg

SEQ ID NO: 69570 - RNA, 32 nt, Homo Sapiens
uguaacuguuauguauaaauccauuuaguuuu

SEQ ID NO: 69571 - RNA, 32 nt, Homo Sapiens
uaugacagccuacuucggcagaugugggagag

SEQ ID NO: 69572 - RNA, 32 nt, Homo Sapiens
gagcccgccgucugcgccugcgauuucgccca

SEQ ID NO: 69573 - RNA, 32 nt, Homo Sapiens
cagucuuucuucagcucacuuggcucucuaga

SEQ ID NO: 69574 - RNA, 32 nt, Homo Sapiens
ugguccuugucugaaaaaauuaguucacucgg

SEQ ID NO: 69575 - RNA, 32 nt, Homo Sapiens
agguucauuuucaucuucuguuuuccaaauga

SEQ ID NO: 69576 - RNA, 32 nt, Homo Sapiens
acagagacuuucacuauauuuugcuuugacag

SEQ ID NO: 69577 - RNA, 30 nt, Homo Sapiens
ccaaagaugauaaagggggaaaugguuuuu

SEQ ID NO: 69578 - RNA, 32 nt, Homo Sapiens
augguguaauuuccuaugcugaaacuuuguag

SEQ ID NO: 69579 - RNA, 32 nt, Homo Sapiens
cuggaagggcagaguagccaggguguggcccu

SEQ ID NO: 69580 - RNA, 32 nt, Homo Sapiens
aaugcuucugucaaaacuuaauccccaaugca

SEQ ID NO: 69581 - RNA, 32 nt, Homo Sapiens
acuccagccaucucggagcccuuguguaggca

SEQ ID NO: 69582 - RNA, 31 nt, Homo Sapiens
augcuacaggggccagcaggagugaccacag

SEQ ID NO: 69583 - RNA, 28 nt, Homo Sapiens
ugcuucuugguucccaggaugccacuuc

SEQ ID NO: 69584 - RNA, 32 nt, Homo Sapiens
agaauuucugagaacaauggguguuagcaacu

SEQ ID NO: 69585 - RNA, 32 nt, Homo Sapiens
gaaaggaacuuaaauuaaaaauauuuaaaucc

SEQ ID NO: 69586 - RNA, 30 nt, Homo Sapiens
ucgggaccaguccugggcgcccugagacca

SEQ ID NO: 69587 - RNA, 32 nt, Homo Sapiens
uagacuuacaaauuauuuuaaaugcauuuauc

SEQ ID NO: 69588 - RNA, 32 nt, Homo Sapiens
cuugaccccugguccugucuccagcccgucuu

SEQ ID NO: 69589 - RNA, 32 nt, Homo Sapiens
ggaaaaucaccauagaucauggcugaaauagu

SEQ ID NO: 69590 - RNA, 32 nt, Homo Sapiens
cggcugucauugcgagguucuacuacucccug

SEQ ID NO: 69591 - RNA, 32 nt, Homo Sapiens
aagaggaaccucagcagccaggacaggcagga

SEQ ID NO: 69592 - RNA, 32 nt, Homo Sapiens
uuacugaaauuaaaauauauuauguuucucca

SEQ ID NO: 69593 - RNA, 32 nt, Homo Sapiens
cuucccagcagcguucaagacacaucauuuau

SEQ ID NO: 69594 - RNA, 32 nt, Homo Sapiens
ucauuaggaagguaaacaaugaaaagaagaag

SEQ ID NO: 69595 - RNA, 32 nt, Homo Sapiens
ucgggggugcuggggccagggcagaugugggg

SEQ ID NO: 69596 - RNA, 32 nt, Homo Sapiens
cagcagcuguggagcacguggaugcugccuac

SEQ ID NO: 69597 - RNA, 32 nt, Homo Sapiens
caauguguacauccucacgggcaagguggagg

SEQ ID NO: 69598 - RNA, 32 nt, Homo Sapiens
uucaguaacaacauuacaggaagagaggagag

SEQ ID NO: 69599 - RNA, 32 nt, Homo Sapiens
auuguugcuguaacgauggacuacugaggaga

SEQ ID NO: 69600 - RNA, 32 nt, Homo Sapiens
ggcaguaggccauagaauuggcuacugccaua

SEQ ID NO: 69601 - RNA, 32 nt, Homo Sapiens
cugaaauaaaauguaugguuuucuuaaaagga

SEQ ID NO: 69602 - RNA, 32 nt, Homo Sapiens
aaagacaauuuuccuuggaacacauaagaacu

SEQ ID NO: 69603 - RNA, 32 nt, Homo Sapiens
aguuacuuggggauuugcgaaaauccuacuua

SEQ ID NO: 69604 - RNA, 32 nt, Homo Sapiens
ggaguguuuuaacggaucgugucgcaggagag

SEQ ID NO: 69605 - RNA, 32 nt, Homo Sapiens
uuuacucuuauucuuagcuguauauacauuuu

SEQ ID NO: 69606 - RNA, 32 nt, Homo Sapiens
gaaaguaguuuucauuuacuuagcucauguuu

SEQ ID NO: 69607 - RNA, 32 nt, Homo Sapiens
acaagccuucuggccuggucguggccagaaag

SEQ ID NO: 69608 - RNA, 32 nt, Homo Sapiens
cucaugucugguauauauuuuaccaaacagcc

SEQ ID NO: 69609 - RNA, 32 nt, Homo Sapiens
cagcucacuccagccuccacuucccagguuca

SEQ ID NO: 69610 - RNA, 32 nt, Homo Sapiens
gugucuggcuguagcagacgcgaggcggcgac

SEQ ID NO: 69611 - RNA, 32 nt, Homo Sapiens
aagcaaguacuauucugauacaaccaccugaa

SEQ ID NO: 69612 - RNA, 32 nt, Homo Sapiens
ggaugugccucccaggccugcugugguucuga

SEQ ID NO: 69613 - RNA, 32 nt, Homo Sapiens
gcaaccuggugcgagcagcccgggcuacaggg

SEQ ID NO: 69614 - RNA, 32 nt, Homo Sapiens
ccugcuuuguucaccacugggacucuccuucc

SEQ ID NO: 69615 - RNA, 32 nt, Homo Sapiens
uguucaauccggauucuuccaguaaaagcuuc

SEQ ID NO: 69616 - RNA, 29 nt, Homo Sapiens
aggaauggcuucggcgggcagcggcaugg

SEQ ID NO: 69617 - RNA, 32 nt, Homo Sapiens
agcucggcgucccgcucccuccgcggcucaug

SEQ ID NO: 69618 - RNA, 32 nt, Homo Sapiens
ucauauuuaaacaauuguuggauagcuggaaa

SEQ ID NO: 69619 - RNA, 32 nt, Homo Sapiens
uuaccauaaggcaguucucaccauacaucaga

SEQ ID NO: 69620 - RNA, 32 nt, Homo Sapiens
aaaacuaguuauaaaaauuacauaauucaaag

SEQ ID NO: 69621 - RNA, 32 nt, Homo Sapiens
cgggagcagaggggcgggggcgagagggaagu

SEQ ID NO: 69622 - RNA, 32 nt, Homo Sapiens
gcugccuucugccccagguuuuuggcuacuga

SEQ ID NO: 69623 - RNA, 32 nt, Homo Sapiens
ucuuccugcugcucugauucugcauuuguggu

SEQ ID NO: 69624 - RNA, 31 nt, Homo Sapiens
ucacugugaaacagucucuugcuugucgugu

SEQ ID NO: 69625 - RNA, 32 nt, Homo Sapiens
auuugaugacugaaaaugaacuguaaaugcuc

SEQ ID NO: 69626 - RNA, 32 nt, Homo Sapiens
gucagccaugaccaccccggcucguaugucac

SEQ ID NO: 69627 - RNA, 32 nt, Homo Sapiens
uagauuuccuucccaucccagcugaaauacug

SEQ ID NO: 69628 - RNA, 32 nt, Homo Sapiens
guuauuugaaaauaaaauuauuuuccuguuca

SEQ ID NO: 69629 - RNA, 32 nt, Homo Sapiens
aaucuccuguuccggggccugauucucaggaa

SEQ ID NO: 69630 - RNA, 32 nt, Homo Sapiens
cggccgcucccuccccuccucccuugcucacc

SEQ ID NO: 69631 - RNA, 32 nt, Homo Sapiens
uaugagugccagugacuuauuuuacuuguuuu

SEQ ID NO: 69632 - RNA, 32 nt, Homo Sapiens
auucuuucuaaagaugaaaugggauuguuuuu

SEQ ID NO: 69633 - RNA, 31 nt, Homo Sapiens
aaucgguggcggcggauuccccgcgcgcccg

SEQ ID NO: 69634 - RNA, 32 nt, Homo Sapiens
gaaaaaauauuuuuauuuguaagaguuuuucu

SEQ ID NO: 69635 - RNA, 31 nt, Homo Sapiens
cggugccgccgcugccugcucccgccacccu

SEQ ID NO: 69636 - RNA, 32 nt, Homo Sapiens
cuuauuggccccagaggggcccucccauggga

SEQ ID NO: 69637 - RNA, 32 nt, Homo Sapiens
uggcggugcguugcgcacccccggggcgccgc

SEQ ID NO: 69638 - RNA, 32 nt, Homo Sapiens
ccucuccgcgccccugucggcgcggaacccug

SEQ ID NO: 69639 - RNA, 32 nt, Homo Sapiens
cccaccgugagcucgccggcccgucgcccgcu

SEQ ID NO: 69640 - RNA, 32 nt, Homo Sapiens
gcuucucugaccauucuuuuugacuguaauga

SEQ ID NO: 69641 - RNA, 32 nt, Homo Sapiens
ugcauauucuauuugcugaucuaccagcuguu

SEQ ID NO: 69642 - RNA, 32 nt, Homo Sapiens
gagauucuguacauuuauuugggagaaaauuu

SEQ ID NO: 69643 - RNA, 32 nt, Homo Sapiens
cuucaccaacugguucugggggcucggccugg

SEQ ID NO: 69644 - RNA, 32 nt, Homo Sapiens
accuguugcccacacagaccgcccugcaguuu

SEQ ID NO: 69645 - RNA, 32 nt, Homo Sapiens
ccaacccggugucgcugcacccgcccgagccc

SEQ ID NO: 69646 - RNA, 32 nt, Homo Sapiens
cuucccccaucccuccaaucugugccccgucu

SEQ ID NO: 69647 - RNA, 32 nt, Homo Sapiens
agugggucgcagaucuucgggcggcuagggga

SEQ ID NO: 69648 - RNA, 32 nt, Homo Sapiens
aucagugguguugggccacuauuguuaccuca

SEQ ID NO: 69649 - RNA, 32 nt, Homo Sapiens
uuucacaagagucaacauuaaaaaauaaauua

SEQ ID NO: 69650 - RNA, 32 nt, Homo Sapiens
agcggucuccccagccugcccugcucaggccu

SEQ ID NO: 69651 - RNA, 32 nt, Homo Sapiens
aggcaccggcgcccaaggcgggagguucggcu

SEQ ID NO: 69652 - RNA, 32 nt, Homo Sapiens
acaacccgcucccgaaaacggagcccccaagu

SEQ ID NO: 69653 - RNA, 32 nt, Homo Sapiens
guauuggcaagguuuuuuauagauagcucuug

SEQ ID NO: 69654 - RNA, 32 nt, Homo Sapiens
uaagaaaaaaaaaaaagacauaaaauaagcga

SEQ ID NO: 69655 - RNA, 32 nt, Homo Sapiens
gaaaacauugaaaaccagauuccuccuccagg

SEQ ID NO: 69656 - RNA, 32 nt, Homo Sapiens
gcagagaauuacagacucuacugcugccuggg

SEQ ID NO: 69657 - RNA, 32 nt, Homo Sapiens
cuuuuuauuuuuguugguggggaggucauugg

SEQ ID NO: 69658 - RNA, 32 nt, Homo Sapiens
gccucuauaaauauguaauaucaucaugggag

SEQ ID NO: 69659 - RNA, 32 nt, Homo Sapiens
aagguguugaggagggcaggcguuuagggaaa

SEQ ID NO: 69660 - RNA, 27 nt, Homo Sapiens
augggguccuucugcugucucuggggc

SEQ ID NO: 69661 - RNA, 32 nt, Homo Sapiens
ggccugaggcuuuggguccagggugggcucuu

SEQ ID NO: 69662 - RNA, 32 nt, Homo Sapiens
agugugccaagaguucgauguuaguguuuccg

SEQ ID NO: 69663 - RNA, 32 nt, Homo Sapiens
cccgccaucgccauggcccgcgggaaagccaa

SEQ ID NO: 69664 - RNA, 32 nt, Homo Sapiens
agaaaauggaaauuuucccaguacuuagaaau

SEQ ID NO: 69665 - RNA, 32 nt, Homo Sapiens
gguggauggcacuuuccagagcccagguucuu

SEQ ID NO: 69666 - RNA, 31 nt, Homo Sapiens
aacaauuuauugacuuuaaauaauuuugucu

SEQ ID NO: 69667 - RNA, 32 nt, Homo Sapiens
aaccugugaugaugaaaaacuucuuggaccug

SEQ ID NO: 69668 - RNA, 32 nt, Homo Sapiens
cuccgucccucuaucucuggcuccugcaucug

SEQ ID NO: 69669 - RNA, 32 nt, Homo Sapiens
acccuacucuacuggauucaaggccaguaaau

SEQ ID NO: 69670 - RNA, 32 nt, Homo Sapiens
uggaaagcucgucuucaauggaaaucccauca

SEQ ID NO: 69671 - RNA, 32 nt, Homo Sapiens
cugauucuagagcugggauaugaacuauacaa

SEQ ID NO: 69672 - RNA, 32 nt, Homo Sapiens
ggagguauggggugggggaggggccuggaccg

SEQ ID NO: 69673 - RNA, 32 nt, Homo Sapiens
gggggaguggcauggggcaggggcccaguucu

SEQ ID NO: 69674 - RNA, 25 nt, Homo Sapiens
cgcgcgcgguuugaccacggccggg

SEQ ID NO: 69675 - RNA, 32 nt, Homo Sapiens
agacagguugucaucagcuugucccauucaag

SEQ ID NO: 69676 - RNA, 32 nt, Homo Sapiens
cacugggcaguuacuucaguacuuuugauagc

SEQ ID NO: 69677 - RNA, 32 nt, Homo Sapiens
cuaaaauuaugauacauaauaucugagcaguu

SEQ ID NO: 69678 - RNA, 32 nt, Homo Sapiens
uuacauggagggcauugcaugaggucugccag

SEQ ID NO: 69679 - RNA, 32 nt, Homo Sapiens
gccauucuaugaaaaaguguucggaauguaca

SEQ ID NO: 69680 - RNA, 31 nt, Homo Sapiens
augcugcagacuccagugggccugguuucug

SEQ ID NO: 69681 - RNA, 32 nt, Homo Sapiens
agaggauuuaggaugccuccuucuaagaacca

SEQ ID NO: 69682 - RNA, 32 nt, Homo Sapiens
ggccaggcaugguggcucacgccuguaguccc

SEQ ID NO: 69683 - RNA, 32 nt, Homo Sapiens
cugccugcgguuuuguguauguguguaugugu

SEQ ID NO: 69684 - RNA, 32 nt, Homo Sapiens
cuucaaccagccuaagucuacugcaagcaagg

SEQ ID NO: 69685 - RNA, 32 nt, Homo Sapiens
cugcgucccgcaccccagcagccgcgccauga

SEQ ID NO: 69686 - RNA, 32 nt, Homo Sapiens
aaagaggcggguguggggucggggggcggugg

SEQ ID NO: 69687 - RNA, 32 nt, Homo Sapiens
auuuaaguauaaaauccaaucauauaaaaacu

SEQ ID NO: 69688 - RNA, 32 nt, Homo Sapiens
augaaugcgggccccggcugugaacccugcac

SEQ ID NO: 69689 - RNA, 32 nt, Homo Sapiens
uuuuggcuaugacaauuuguauggaggguacg

SEQ ID NO: 69690 - RNA, 32 nt, Homo Sapiens
uccccggcaggcgggggcggcuucggccggga

SEQ ID NO: 69691 - RNA, 32 nt, Homo Sapiens
cgggagcacgggugcgccagggcccccagcca

SEQ ID NO: 69692 - RNA, 32 nt, Homo Sapiens
aacagccagcccuuuaaauauugcagucagcc

SEQ ID NO: 69693 - RNA, 32 nt, Homo Sapiens
cuccagacucgcggaggucgcgggcggggguc

SEQ ID NO: 69694 - RNA, 32 nt, Homo Sapiens
uaccccaauuuuggaguccccaucccauucuc

SEQ ID NO: 69695 - RNA, 32 nt, Homo Sapiens
ggauggucugguguuggcgugugggagacaug

SEQ ID NO: 69696 - RNA, 32 nt, Homo Sapiens
ucggccaucgccacgcugcagcaggccguggu

SEQ ID NO: 69697 - RNA, 32 nt, Homo Sapiens
cgaggcaggaggagcccggacggcggguagga

SEQ ID NO: 69698 - RNA, 32 nt, Homo Sapiens
aauuagcuaggcgugguggcugggaccuguaa

SEQ ID NO: 69699 - RNA, 32 nt, Homo Sapiens
cgcggcgcgcacggcuccugcggcgggguaga

SEQ ID NO: 69700 - RNA, 32 nt, Homo Sapiens
uuauuguauguuuacugugaucuuaaugggca

SEQ ID NO: 69701 - RNA, 32 nt, Homo Sapiens
uuaaauuuaugaugaaugacuaacuggacaaa

SEQ ID NO: 69702 - RNA, 32 nt, Homo Sapiens
uguugaguucacugugccagcaugcuuccucc

SEQ ID NO: 69703 - RNA, 32 nt, Homo Sapiens
agguaggaggaucaccugagccuggagaugua

SEQ ID NO: 69704 - RNA, 32 nt, Homo Sapiens
uuuuucauauauaucucuaaaacauuuuguua

SEQ ID NO: 69705 - RNA, 32 nt, Homo Sapiens
aaacaacauugaauacaaaagaggcuugugua

SEQ ID NO: 69706 - RNA, 32 nt, Homo Sapiens
uuuuaauguacaaaacgcuauuaaguggcuua

SEQ ID NO: 69707 - RNA, 32 nt, Homo Sapiens
cuuugauuacaauugagauucaugugacuauu

SEQ ID NO: 69708 - RNA, 32 nt, Homo Sapiens
agcccagggcccgaagcccacccacucgcguc

SEQ ID NO: 69709 - RNA, 32 nt, Homo Sapiens
uaaaugguaucuuuuuaaugaugcugagguaa

SEQ ID NO: 69710 - RNA, 32 nt, Homo Sapiens
gaguuucgcucuugucacccaggcuggagugc

SEQ ID NO: 69711 - RNA, 32 nt, Homo Sapiens
auaaggcaguguggccuugguuuauaugcacu

SEQ ID NO: 69712 - RNA, 32 nt, Homo Sapiens
agauuucaagacuguguacauuuuaaauuauu

SEQ ID NO: 69713 - RNA, 32 nt, Homo Sapiens
gaaauuauuugugguaaggaaauauucuuuac

SEQ ID NO: 69714 - RNA, 30 nt, Homo Sapiens
uaaagaacagcucgcuaaccacgaaagagg

SEQ ID NO: 69715 - RNA, 32 nt, Homo Sapiens
agcucauccuucauguccuaaaacagaugaua

SEQ ID NO: 69716 - RNA, 32 nt, Homo Sapiens
aacggaggcugcgggggcggcggcgcgagcgg

SEQ ID NO: 69717 - RNA, 32 nt, Homo Sapiens
aaaauaaccaugaugcaucuucaguguuguag

SEQ ID NO: 69718 - RNA, 32 nt, Homo Sapiens
augcgcaucccgguggagagcgcgcccauguu

SEQ ID NO: 69719 - RNA, 32 nt, Homo Sapiens
ggucugaggccccgcuccccgaaacgugacca

SEQ ID NO: 69720 - RNA, 32 nt, Homo Sapiens
gcagaaggagcagcugcuccgcgccccgccgc

SEQ ID NO: 69721 - RNA, 32 nt, Homo Sapiens
gaaaugaggagcuuccucucuuccugugaagg

SEQ ID NO: 69722 - RNA, 32 nt, Homo Sapiens
acggauuucagcgccuucgcaucccgucugaa

SEQ ID NO: 69723 - RNA, 32 nt, Homo Sapiens
uagaaaaauuagaaacagaacauauggacugc

SEQ ID NO: 69724 - RNA, 32 nt, Homo Sapiens
caagccacucccacaagguggguccuacuaga

SEQ ID NO: 69725 - RNA, 32 nt, Homo Sapiens
auuuuagacaaaaaguuucauuguacauucaa

SEQ ID NO: 69726 - RNA, 32 nt, Homo Sapiens
aggaguucgacaccaucuugggcaacauggug

SEQ ID NO: 69727 - RNA, 32 nt, Homo Sapiens
uggugaugagugaguucucacucaauucacau

SEQ ID NO: 69728 - RNA, 32 nt, Homo Sapiens
gcccugcaccgcuccuggccccgggcccccug

SEQ ID NO: 69729 - RNA, 32 nt, Homo Sapiens
agccacuggugggacagaaauaggcuccuggu

SEQ ID NO: 69730 - RNA, 32 nt, Homo Sapiens
acggucgccucuauccgggaacucauggagga

SEQ ID NO: 69731 - RNA, 32 nt, Homo Sapiens
ucuaggacccugauugaguccucggaccacca

SEQ ID NO: 69732 - RNA, 32 nt, Homo Sapiens
cucccccucccuccccuugccugugccaggug

SEQ ID NO: 69733 - RNA, 32 nt, Homo Sapiens
augccuaggaaggaugaggaugacaggcacua

SEQ ID NO: 69734 - RNA, 32 nt, Homo Sapiens
aaaauuuauacaccagcaauuuagacaaagcc

SEQ ID NO: 69735 - RNA, 32 nt, Homo Sapiens
cauucacauaucugcuuaucagugugcaauac

SEQ ID NO: 69736 - RNA, 32 nt, Homo Sapiens
gcaggcggcuggaaggccaggccuggucaucu

SEQ ID NO: 69737 - RNA, 29 nt, Homo Sapiens
aaguuuucuaaauuuaucaguaccuaagu

SEQ ID NO: 69738 - RNA, 32 nt, Homo Sapiens
uacaagucaaggaagaaaaaucaaaguaguuu

SEQ ID NO: 69739 - RNA, 32 nt, Homo Sapiens
ugaggacagccacccuuucuucgucucugcug

SEQ ID NO: 69740 - RNA, 32 nt, Homo Sapiens
gccagggccaaggggagagccuggcaagauuu

SEQ ID NO: 69741 - RNA, 32 nt, Homo Sapiens
cguggcgccuugugaccccgggccccugccgc

SEQ ID NO: 69742 - RNA, 32 nt, Homo Sapiens
cagcucgcggcgggcgcugggcgggauccgac

SEQ ID NO: 69743 - RNA, 32 nt, Homo Sapiens
ggcugccuugugcuauagaauagggugcuucc

SEQ ID NO: 69744 - RNA, 32 nt, Homo Sapiens
guacuacuccgccagugacccuggacaguaac

SEQ ID NO: 69745 - RNA, 32 nt, Homo Sapiens
ugaggggcgccgagcgaggggaggcgcgggcc

SEQ ID NO: 69746 - RNA, 32 nt, Homo Sapiens
gguucagaggcccaugcugaggggugggugcu

SEQ ID NO: 69747 - RNA, 32 nt, Homo Sapiens
ggguggcagaggauuguuuggccaggucugug

SEQ ID NO: 69748 - RNA, 32 nt, Homo Sapiens
uucucccuucccuccucuugcuccucaaguaa

SEQ ID NO: 69749 - RNA, 29 nt, Homo Sapiens
gacgagccugggcaacauggcaaaugccg

SEQ ID NO: 69750 - RNA, 32 nt, Homo Sapiens
ggggcugguugagggucauacagaaagucagu

SEQ ID NO: 69751 - RNA, 32 nt, Homo Sapiens
aaggcaagccccaaacuccuuaucuuuugcag

SEQ ID NO: 69752 - RNA, 32 nt, Homo Sapiens
accuggugcauucccuagacaccuccgggguc

SEQ ID NO: 69753 - RNA, 32 nt, Homo Sapiens
aaaggagaaaguugaggccuaauaaagucuuu

SEQ ID NO: 69754 - RNA, 32 nt, Homo Sapiens
gagugcacggcgaccccgugcuccucagggcc

SEQ ID NO: 69755 - RNA, 32 nt, Homo Sapiens
uucauuuccccucccccaauccaugaaagccu

SEQ ID NO: 69756 - RNA, 32 nt, Homo Sapiens
aguccugggacugcgggaugcuaacauugaaa

SEQ ID NO: 69757 - RNA, 32 nt, Homo Sapiens
auguaaaacuaaauuauuuuccugggauggaa

SEQ ID NO: 69758 - RNA, 32 nt, Homo Sapiens
aggccgcgccgggagcgcgguggggcuaggcg

SEQ ID NO: 69759 - RNA, 32 nt, Homo Sapiens
ccuguauaaaaaauaaauucuuuuuacauuuu

SEQ ID NO: 69760 - RNA, 32 nt, Homo Sapiens
agauucucuggcucagccccagccuuucugaa

SEQ ID NO: 69761 - RNA, 32 nt, Homo Sapiens
gguccaggggauauugguguuggugggaaugg

SEQ ID NO: 69762 - RNA, 32 nt, Homo Sapiens
uccgagucuccgccgcugcgggcccgcuccga

SEQ ID NO: 69763 - RNA, 32 nt, Homo Sapiens
uacagcuccaggagcccagcgccgggcuguga

SEQ ID NO: 69764 - RNA, 32 nt, Homo Sapiens
uccaggacugguuuccuagccucccgcuaaga

SEQ ID NO: 69765 - RNA, 32 nt, Homo Sapiens
auguauauguugucuuuggaaauaucuucugu

SEQ ID NO: 69766 - RNA, 32 nt, Homo Sapiens
ccacccaggaccgcgccgccggccucugccgc

SEQ ID NO: 69767 - RNA, 32 nt, Homo Sapiens
uuccuucacagcaagaauuaaucuucagugua

SEQ ID NO: 69768 - RNA, 32 nt, Homo Sapiens
uuugaguccucccuuggcggcuccaucuaaaa

SEQ ID NO: 69769 - RNA, 32 nt, Homo Sapiens
cagcucuucuaccuggcugcgucuagucagcc

SEQ ID NO: 69770 - RNA, 32 nt, Homo Sapiens
uagagcuccaugaaaaggcggaugccacaucc

SEQ ID NO: 69771 - RNA, 32 nt, Homo Sapiens
ugcccgugcguugcugcagaccaucugggguc

SEQ ID NO: 69772 - RNA, 32 nt, Homo Sapiens
cugcagaaaauugacaaugccugccuguguaa

SEQ ID NO: 69773 - RNA, 32 nt, Homo Sapiens
ugaagcgcucucgucugacauuuguuuggaau

SEQ ID NO: 69774 - RNA, 32 nt, Homo Sapiens
acuggggccuggaaagugccccugccuggugc

SEQ ID NO: 69775 - RNA, 32 nt, Homo Sapiens
agccaaacaagaagagaagaaaauauuguuga

SEQ ID NO: 69776 - RNA, 32 nt, Homo Sapiens
ugaagagaggaacaggugucagauacucauag

SEQ ID NO: 69777 - RNA, 32 nt, Homo Sapiens
cuaaaggauacugucauuugcauuuuuaaaaa

SEQ ID NO: 69778 - RNA, 32 nt, Homo Sapiens
caaagaggggaagagggcaugcagucuuaggc

SEQ ID NO: 69779 - RNA, 32 nt, Homo Sapiens
uucagcaucacuauaggacugucuagugucac

SEQ ID NO: 69780 - RNA, 32 nt, Homo Sapiens
aaaaaaucauuuacuuggaaauccaugccugu

SEQ ID NO: 69781 - RNA, 32 nt, Homo Sapiens
uuugaguugguucucucaaugaucuauugauc

SEQ ID NO: 69782 - RNA, 32 nt, Homo Sapiens
aauuuaauauaaagcaaguccagucuuaaaaa

SEQ ID NO: 69783 - RNA, 32 nt, Homo Sapiens
gccagaagcggcuggacaguggcugccucaug

SEQ ID NO: 69784 - RNA, 32 nt, Homo Sapiens
gcaggauggacgcguuggcugucaugauguag

SEQ ID NO: 69785 - RNA, 31 nt, Homo Sapiens
cccgcgcgccccuguacuccccgcgccgcuc

SEQ ID NO: 69786 - RNA, 32 nt, Homo Sapiens
uguuucugauuugaguccaaaggccugagaac

SEQ ID NO: 69787 - RNA, 32 nt, Homo Sapiens
ggaacccccgcgggcgcuggcuccgucugcca

SEQ ID NO: 69788 - RNA, 32 nt, Homo Sapiens
ccuggccucaaggggaugauccuccuacuuca

SEQ ID NO: 69789 - RNA, 32 nt, Homo Sapiens
uaauagucuauaaaaauuauguuuccucuguu

SEQ ID NO: 69790 - RNA, 32 nt, Homo Sapiens
uacagcuucagccuauggugacacagcucaga

SEQ ID NO: 69791 - RNA, 32 nt, Homo Sapiens
gaccgagcccgcuucgcacagcccuuccuagg

SEQ ID NO: 69792 - RNA, 32 nt, Homo Sapiens
caggccuccuccuccaucacagaugucuggau

SEQ ID NO: 69793 - RNA, 32 nt, Homo Sapiens
auugggaugagcaucuuugugcaugaauccua

SEQ ID NO: 69794 - RNA, 32 nt, Homo Sapiens
ggcgcacagcuccucucaggcuccucaaacuu

SEQ ID NO: 69795 - RNA, 32 nt, Homo Sapiens
ggcugggcgcgguugcucacgccuguaauccc

SEQ ID NO: 69796 - RNA, 32 nt, Homo Sapiens
ggguagcuauacucauggucauaaauguuugc

SEQ ID NO: 69797 - RNA, 32 nt, Homo Sapiens
aagguuuaaaaauacaucauguggccaaagaa

SEQ ID NO: 69798 - RNA, 32 nt, Homo Sapiens
aagucaagaacaauaggaauaaaaugcuuucu

SEQ ID NO: 69799 - RNA, 32 nt, Homo Sapiens
cggaggaggaagauccagaaauugugaacaau

SEQ ID NO: 69800 - RNA, 32 nt, Homo Sapiens
ccauugaacauuaauuugauaauaggucuaga

SEQ ID NO: 69801 - RNA, 32 nt, Homo Sapiens
auugcccgcgcuuucucauugccucuuuccgu

SEQ ID NO: 69802 - RNA, 32 nt, Homo Sapiens
agccugcccuguacccaagcuucccucccccu

SEQ ID NO: 69803 - RNA, 31 nt, Homo Sapiens
gaggcagggcacugccuggccuuggcucuuu

SEQ ID NO: 69804 - RNA, 32 nt, Homo Sapiens
uuuuauccggugcccggagccugcgcacugga

SEQ ID NO: 69805 - RNA, 32 nt, Homo Sapiens
gucuaggaacucggcuucuggcaccucugaau

SEQ ID NO: 69806 - RNA, 32 nt, Homo Sapiens
cuggcagcggacuggcccccagugucaggcag

SEQ ID NO: 69807 - RNA, 32 nt, Homo Sapiens
aggggcacuggcccggcccgcaccuuccuagc

SEQ ID NO: 69808 - RNA, 32 nt, Homo Sapiens
gcagaauguuuccuguucucagugcacaaaga

SEQ ID NO: 69809 - RNA, 32 nt, Homo Sapiens
gugcuaucaguucuuuuauuuccaaaacaugc

SEQ ID NO: 69810 - RNA, 32 nt, Homo Sapiens
ccuggaauagcucaaguucuuaaaaguugcgu

SEQ ID NO: 69811 - RNA, 32 nt, Homo Sapiens
uuauccagaggcuuaauuaaaugaugugguaa

SEQ ID NO: 69812 - RNA, 32 nt, Homo Sapiens
gagcggagaggcccgcggggcucgcgggaguc

SEQ ID NO: 69813 - RNA, 32 nt, Homo Sapiens
uuugugacaagcucucaaaaaaugcauuucua

SEQ ID NO: 69814 - RNA, 32 nt, Homo Sapiens
cauugccugcuuccaaccaaugggcaggagag

SEQ ID NO: 69815 - RNA, 32 nt, Homo Sapiens
ucaaaaaaguauuuuuaaauauccaugauuuc

SEQ ID NO: 69816 - RNA, 32 nt, Homo Sapiens
cuagucauucacuauagcauuuaucacagugg

SEQ ID NO: 69817 - RNA, 32 nt, Homo Sapiens
auuugucaacugagauuccauguguuuugcuc

SEQ ID NO: 69818 - RNA, 32 nt, Homo Sapiens
uagguacuuauuccagaugccuucuccagaca

SEQ ID NO: 69819 - RNA, 32 nt, Homo Sapiens
uugucuagugagggcccucuuccuccuagaug

SEQ ID NO: 69820 - RNA, 32 nt, Homo Sapiens
ucaucugcaaaagggaggaaagaaugccugcg

SEQ ID NO: 69821 - RNA, 32 nt, Homo Sapiens
uaaaguuaauauauuuuaggauguuauguaaa

SEQ ID NO: 69822 - RNA, 32 nt, Homo Sapiens
gcuggcagcucuucccagugauguugagagca

SEQ ID NO: 69823 - RNA, 32 nt, Homo Sapiens
aacucagugcccucuugcagacuugcauagaa

SEQ ID NO: 69824 - RNA, 32 nt, Homo Sapiens
uuuguaauguaguacauuucuaaucuauuauu

SEQ ID NO: 69825 - RNA, 32 nt, Homo Sapiens
aucuugacauaaguaaaaccaaugugaaugga

SEQ ID NO: 69826 - RNA, 32 nt, Homo Sapiens
uacuuaacaaaauaauacccgagaauguaagg

SEQ ID NO: 69827 - RNA, 32 nt, Homo Sapiens
auugugcacugcguagaugacucuggccacug

SEQ ID NO: 69828 - RNA, 32 nt, Homo Sapiens
ggggcagcagcgacgcgcugcacagccagaca

SEQ ID NO: 69829 - RNA, 32 nt, Homo Sapiens
accccaagccccagcccgcgaggccuccccuc

SEQ ID NO: 69830 - RNA, 30 nt, Homo Sapiens
aaccgugucugugucccucagaaggcccug

SEQ ID NO: 69831 - RNA, 32 nt, Homo Sapiens
gguuugguucaaacaccagacccaggcuuguu

SEQ ID NO: 69832 - RNA, 32 nt, Homo Sapiens
ggugcccuuucuguagggcacagugaggggga

SEQ ID NO: 69833 - RNA, 32 nt, Homo Sapiens
gaaacugaaguaccaguugucgcuagaacagu

SEQ ID NO: 69834 - RNA, 32 nt, Homo Sapiens
uuaccaucagcuuuugacuggauacuggcaaa

SEQ ID NO: 69835 - RNA, 32 nt, Homo Sapiens
ccaacugggagggggcagccgaggggagcucc

SEQ ID NO: 69836 - RNA, 32 nt, Homo Sapiens
auauuuaaacuucaauuuuuuauauuuaaacu

SEQ ID NO: 69837 - RNA, 32 nt, Homo Sapiens
cgggaagagcgggcaccgcggcaguggcuccg

SEQ ID NO: 69838 - RNA, 32 nt, Homo Sapiens
ccgccuggacggggcgcgcgcggccuuagagg

SEQ ID NO: 69839 - RNA, 32 nt, Homo Sapiens
uuuguuuguuuuuucuccuuagcaguaggacu

SEQ ID NO: 69840 - RNA, 32 nt, Homo Sapiens
aaguucucaagaagaacuuaugaguaagcagu

SEQ ID NO: 69841 - RNA, 32 nt, Homo Sapiens
ucuggucaggggaaacaaaaucuugacccagc

SEQ ID NO: 69842 - RNA, 29 nt, Homo Sapiens
aacaggagaaucugggcccuaggagcccu

SEQ ID NO: 69843 - RNA, 32 nt, Homo Sapiens
gcaauagucugcuuccacggugaucagagccc

SEQ ID NO: 69844 - RNA, 32 nt, Homo Sapiens
agguacaucuucuuuguauccauugggaggcu

SEQ ID NO: 69845 - RNA, 32 nt, Homo Sapiens
uuaaagaaaaagacaaaagaaaguggaagugg

SEQ ID NO: 69846 - RNA, 32 nt, Homo Sapiens
uuaggggccagaaaaucuggggccccccaaaa

SEQ ID NO: 69847 - RNA, 32 nt, Homo Sapiens
ucaggcgucaggcuaagcacuuugauaaacug

SEQ ID NO: 69848 - RNA, 32 nt, Homo Sapiens
uugacucagaucagguuggcuaucaagcaggg

SEQ ID NO: 69849 - RNA, 32 nt, Homo Sapiens
gauaguuuguggaugccuggagcuacagauga

SEQ ID NO: 69850 - RNA, 32 nt, Homo Sapiens
gaguccauuucccacaucuuuccucaaguauc

SEQ ID NO: 69851 - RNA, 32 nt, Homo Sapiens
ugaauccuacuuugcuguucaaugaaaagauc

SEQ ID NO: 69852 - RNA, 32 nt, Homo Sapiens
uggagggcaccacggugacccgggccaucuca

SEQ ID NO: 69853 - RNA, 32 nt, Homo Sapiens
gacauuaagcaucuucuagaaacucuucuagc

SEQ ID NO: 69854 - RNA, 32 nt, Homo Sapiens
ucaauaaaacaaaaauuucuagguauuugcuu

SEQ ID NO: 69855 - RNA, 32 nt, Homo Sapiens
cccuggcugcuugauuggcugagggggaaaga

SEQ ID NO: 69856 - RNA, 29 nt, Homo Sapiens
uaaauguuggcaaccaauuugaacacuuu

SEQ ID NO: 69857 - RNA, 32 nt, Homo Sapiens
gguaaaauaaguucagauaaaauagugguggu

SEQ ID NO: 69858 - RNA, 32 nt, Homo Sapiens
acaggugaaaaggagcagaaagagacugcuaa

SEQ ID NO: 69859 - RNA, 32 nt, Homo Sapiens
uggagacgccgggaacccgcguuggcgugguu

SEQ ID NO: 69860 - RNA, 32 nt, Homo Sapiens
uugaucaggaaaguguauaacacaucuuagag

SEQ ID NO: 69861 - RNA, 32 nt, Homo Sapiens
gauccagccagagcgucugugcaucgccccag

SEQ ID NO: 69862 - RNA, 32 nt, Homo Sapiens
uuucuccccucuaguaccucugcauuugugag

SEQ ID NO: 69863 - RNA, 32 nt, Homo Sapiens
ugauauugaagaaaagacugaagugaaagaag

SEQ ID NO: 69864 - RNA, 32 nt, Homo Sapiens
ccugcaugcagcaauaucaaacaucagcuaac

SEQ ID NO: 69865 - RNA, 32 nt, Homo Sapiens
guuaugauauuguaaaacaggugccacggugc

SEQ ID NO: 69866 - RNA, 30 nt, Homo Sapiens
uauaaugucugugguguacaagucguuuuu

SEQ ID NO: 69867 - RNA, 32 nt, Homo Sapiens
cucugggcccucccgguguccgucucuuccag

SEQ ID NO: 69868 - RNA, 32 nt, Homo Sapiens
gaccucagaugacccaccugccucggccuccc

SEQ ID NO: 69869 - RNA, 32 nt, Homo Sapiens
aacaagggcuggugcuucuuacaggcaauucc

SEQ ID NO: 69870 - RNA, 32 nt, Homo Sapiens
uuuugaucuucagcuugguagauuuaauugcc

SEQ ID NO: 69871 - RNA, 32 nt, Homo Sapiens
cgcaggcccccgauccccggcgggcgcccccg

SEQ ID NO: 69872 - RNA, 32 nt, Homo Sapiens
gccccgcacccuccccguggcucaggucuccc

SEQ ID NO: 69873 - RNA, 31 nt, Homo Sapiens
ggaagcuggcacugcggggaucuugcccggu

SEQ ID NO: 69874 - RNA, 32 nt, Homo Sapiens
gaaucucugaauagaccaauaacaggcucuga

SEQ ID NO: 69875 - RNA, 32 nt, Homo Sapiens
cugcucugaagagaccccggcggcggcggagg

SEQ ID NO: 69876 - RNA, 32 nt, Homo Sapiens
agggugggagagcggcuccgcggccaccgaug

SEQ ID NO: 69877 - RNA, 32 nt, Homo Sapiens
ugauuuucauguuucuuagaaacuuuaaaccu

SEQ ID NO: 69878 - RNA, 32 nt, Homo Sapiens
gugaggccuuaaaaacagaagagaacaagauu

SEQ ID NO: 69879 - RNA, 32 nt, Homo Sapiens
aauuauaucaguccucuuucaaagguagccau

SEQ ID NO: 69880 - RNA, 32 nt, Homo Sapiens
gugcaagauuucuuggacagauguguguauac

SEQ ID NO: 69881 - RNA, 32 nt, Homo Sapiens
aucuggaccugccucuucucugagggacggcu

SEQ ID NO: 69882 - RNA, 32 nt, Homo Sapiens
gaccgggccuaccgcgaugcgcgcguggaacu

SEQ ID NO: 69883 - RNA, 32 nt, Homo Sapiens
cugcucuuauauucuuuuuuuuccucagagaa

SEQ ID NO: 69884 - RNA, 32 nt, Homo Sapiens
caguggcaaacgccagcagggcugcugugaau

SEQ ID NO: 69885 - RNA, 32 nt, Homo Sapiens
auacagugaugauggcauuauugauaagccau

SEQ ID NO: 69886 - RNA, 32 nt, Homo Sapiens
ugaggagggggaggaguugcuccuaggucuga

SEQ ID NO: 69887 - RNA, 32 nt, Homo Sapiens
gagcuugcagugagccgagaucgugcugcugc

SEQ ID NO: 69888 - RNA, 32 nt, Homo Sapiens
ugaagccugagcgggggccgggggccgggcgg

SEQ ID NO: 69889 - RNA, 32 nt, Homo Sapiens
gauuauuugagcucaggaguuugagaccaucc

SEQ ID NO: 69890 - RNA, 32 nt, Homo Sapiens
uuagggucuuauccuggcauugagggcgccgg

SEQ ID NO: 69891 - RNA, 29 nt, Homo Sapiens
gguggugggcugguucggacgugggucga

SEQ ID NO: 69892 - RNA, 32 nt, Homo Sapiens
ugagccugacccccaccgcgcagugauccagu

SEQ ID NO: 69893 - RNA, 32 nt, Homo Sapiens
uccagccggccggcacgaggggggcgagcgcc

SEQ ID NO: 69894 - RNA, 32 nt, Homo Sapiens
gugagcuucucggcugccccgcgggccggggu

SEQ ID NO: 69895 - RNA, 32 nt, Homo Sapiens
ggagccuuugggcugagcaagcacugaggagg

SEQ ID NO: 69896 - RNA, 32 nt, Homo Sapiens
caaaggccugaagacaaaucugggggugacag

SEQ ID NO: 69897 - RNA, 32 nt, Homo Sapiens
cagcacucaggagaggggagaaaggaggugca

SEQ ID NO: 69898 - RNA, 32 nt, Homo Sapiens
aagagcagcgaccgcgcaccuguccgcccgga

SEQ ID NO: 69899 - RNA, 32 nt, Homo Sapiens
cuacauuauaaaugucucuuuaaugucacagg

SEQ ID NO: 69900 - RNA, 32 nt, Homo Sapiens
caacauuuucucuguaaaaacaauagaguuuc

SEQ ID NO: 69901 - RNA, 32 nt, Homo Sapiens
uggauaaaauaauuuuuguuaaagcucaaaua

SEQ ID NO: 69902 - RNA, 32 nt, Homo Sapiens
augguagccaucuacagugcugcuggagauuu

SEQ ID NO: 69903 - RNA, 32 nt, Homo Sapiens
aaggucccagggugggagggcuagggaaaggg

SEQ ID NO: 69904 - RNA, 32 nt, Homo Sapiens
acccccuggagccugcccucccuugggaccag

SEQ ID NO: 69905 - RNA, 32 nt, Homo Sapiens
aagcgcgggcccgucuuccucgcgucuccucg

SEQ ID NO: 69906 - RNA, 32 nt, Homo Sapiens
gaguagcugggguuacaggugugugccgccau

SEQ ID NO: 69907 - RNA, 32 nt, Homo Sapiens
guggcuggugcgugcgcgcgcuucugggaaac

SEQ ID NO: 69908 - RNA, 32 nt, Homo Sapiens
cuuguccgcccggaccccucccugccuccuag

SEQ ID NO: 69909 - RNA, 32 nt, Homo Sapiens
ugggcccuggcggcggaucuggacguggcggc

SEQ ID NO: 69910 - RNA, 32 nt, Homo Sapiens
uuucuccccucuauucuuugucucaggugaug

SEQ ID NO: 69911 - RNA, 32 nt, Homo Sapiens
auuuucaaagguuuuucugugacguuuaaaac

SEQ ID NO: 69912 - RNA, 32 nt, Homo Sapiens
guguccauugaaaagaaaauaggcgcuuuguc

SEQ ID NO: 69913 - RNA, 32 nt, Homo Sapiens
ugcggugaggggcuccugccaggagcucugag

SEQ ID NO: 69914 - RNA, 32 nt, Homo Sapiens
guccccuggaguuuggggggacaucccgccuc

SEQ ID NO: 69915 - RNA, 32 nt, Homo Sapiens
ggcuggaugagugaaacaggaauggagcaagc

SEQ ID NO: 69916 - RNA, 32 nt, Homo Sapiens
cccggccggggcgggggagcccggggcuuguu

SEQ ID NO: 69917 - RNA, 32 nt, Homo Sapiens
ugagggcgggagcgcgcagagcucuucccucc

SEQ ID NO: 69918 - RNA, 32 nt, Homo Sapiens
auaaaucauuuuguaauuuuuaucuccuacuc

SEQ ID NO: 69919 - RNA, 32 nt, Homo Sapiens
gagucaauuaaaccucuuuauucauuaaaaaa

SEQ ID NO: 69920 - RNA, 32 nt, Homo Sapiens
uuuauuuguaaaaaguuaaaagagaguggguc

SEQ ID NO: 69921 - RNA, 32 nt, Homo Sapiens
uccucccugccaaccuccuccucccugcccag

SEQ ID NO: 69922 - RNA, 32 nt, Homo Sapiens
aaaagcaauuuaauguaccacgaugaauagcu

SEQ ID NO: 69923 - RNA, 32 nt, Homo Sapiens
uugcaagucuaaaaacauuuacuauuuggccc

SEQ ID NO: 69924 - RNA, 32 nt, Homo Sapiens
cuguccugccccaccuucccugcuaacaucga

SEQ ID NO: 69925 - RNA, 32 nt, Homo Sapiens
caguucaguaccuggaggaggagcaggggcgu

SEQ ID NO: 69926 - RNA, 32 nt, Homo Sapiens
accacccaacuggggcuagaguggggaagauu

SEQ ID NO: 69927 - RNA, 32 nt, Homo Sapiens
gacgggguagccuggggugaggacgucguuca

SEQ ID NO: 69928 - RNA, 32 nt, Homo Sapiens
aaauuauuaacuacuucccaaaauaguauuuc

SEQ ID NO: 69929 - RNA, 32 nt, Homo Sapiens
guguucucaacacacaguauagauaaauccaa

SEQ ID NO: 69930 - RNA, 32 nt, Homo Sapiens
ucacugucugcagcugccugucuggugucugu

SEQ ID NO: 69931 - RNA, 32 nt, Homo Sapiens
gaucuauuguuccauauaaccaaaaagcaugg

SEQ ID NO: 69932 - RNA, 32 nt, Homo Sapiens
uuccuugguucccggucccccagcccauccgc

SEQ ID NO: 69933 - RNA, 32 nt, Homo Sapiens
cccugcagccuacgggucuguuuucugugugu

SEQ ID NO: 69934 - RNA, 32 nt, Homo Sapiens
gcagugcgcgccccgccuguguuugcccuucc

SEQ ID NO: 69935 - RNA, 32 nt, Homo Sapiens
uuuuuauuugauauuucauauaugucugaaau

SEQ ID NO: 69936 - RNA, 32 nt, Homo Sapiens
cagauccccacuuuaaaauuaaauaagaguau

SEQ ID NO: 69937 - RNA, 32 nt, Homo Sapiens
gagcucugucucccggccuucuccacuggagc

SEQ ID NO: 69938 - RNA, 32 nt, Homo Sapiens
ccuggagcaguuuugugaggcuuuugugcucc

SEQ ID NO: 69939 - RNA, 32 nt, Homo Sapiens
ccucuuuggagcauacccacugauggugguuc

SEQ ID NO: 69940 - RNA, 27 nt, Homo Sapiens
gaaccccccuucuucuuucuccugaau

SEQ ID NO: 69941 - RNA, 32 nt, Homo Sapiens
caaagauggaaagccaguuucugaauauauua

SEQ ID NO: 69942 - RNA, 32 nt, Homo Sapiens
gaacuucgggcccugccuggaguccuugaccg

SEQ ID NO: 69943 - RNA, 32 nt, Homo Sapiens
guauacuauaguguuauguucaguaggaaaac

SEQ ID NO: 69944 - RNA, 32 nt, Homo Sapiens
aaaauuagcuggaagugguggugcauaccugu

SEQ ID NO: 69945 - RNA, 32 nt, Homo Sapiens
cuauccgcaccuccgcucccacccggcgccuc

SEQ ID NO: 69946 - RNA, 32 nt, Homo Sapiens
uuugggauaagaccagauuuuccugacauuuu

SEQ ID NO: 69947 - RNA, 32 nt, Homo Sapiens
ucccuccugccagcugcaugcugccaguuccu

SEQ ID NO: 69948 - RNA, 32 nt, Homo Sapiens
guuuuggcuuugucacagauuuauugaaaaac

SEQ ID NO: 69949 - RNA, 32 nt, Homo Sapiens
acugggaagguuuuuucuuaaaauaacaaugg

SEQ ID NO: 69950 - RNA, 32 nt, Homo Sapiens
caaccuguugcauggcggcagugcucgcaggg

SEQ ID NO: 69951 - RNA, 32 nt, Homo Sapiens
uuugauuuuuguuuucugaaauuggauuuuau

SEQ ID NO: 69952 - RNA, 32 nt, Homo Sapiens
uuugggggucagcauccagugugagauacugu

SEQ ID NO: 69953 - RNA, 32 nt, Homo Sapiens
uggaagggaugaugaggcauccugaaaaucgu

SEQ ID NO: 69954 - RNA, 32 nt, Homo Sapiens
aagcauguguuaauguuaacaaaccuacguaa

SEQ ID NO: 69955 - RNA, 32 nt, Homo Sapiens
gccuaccccucccccagcuccccgcagcuccu

SEQ ID NO: 69956 - RNA, 32 nt, Homo Sapiens
ccccauguacaaagcucaccaagccccugccc

SEQ ID NO: 69957 - RNA, 32 nt, Homo Sapiens
aggcugcgagcacuucagugccugggauuuac

SEQ ID NO: 69958 - RNA, 32 nt, Homo Sapiens
gccaacaaagauugcugauuugcuccuuaagc

SEQ ID NO: 69959 - RNA, 32 nt, Homo Sapiens
gguguucagagguggcagcccacaugcugaaa

SEQ ID NO: 69960 - RNA, 32 nt, Homo Sapiens
aagugugaagacucaugguuugauagcaaugc

SEQ ID NO: 69961 - RNA, 32 nt, Homo Sapiens
uguggccccugagccagugguucccaaacugg

SEQ ID NO: 69962 - RNA, 32 nt, Homo Sapiens
auuuccuguauaucaggugaccugguagagau

SEQ ID NO: 69963 - RNA, 32 nt, Homo Sapiens
agcccaugagauuguuuuucucaggaauguag

SEQ ID NO: 69964 - RNA, 32 nt, Homo Sapiens
ccacuccaagcacucugugcccugauggccuc

SEQ ID NO: 69965 - RNA, 32 nt, Homo Sapiens
uggggccuccuugccuggcuucuuccuccagc

SEQ ID NO: 69966 - RNA, 29 nt, Homo Sapiens
cuauagauuaguuuacauuuucuagaauu

SEQ ID NO: 69967 - RNA, 32 nt, Homo Sapiens
auuccuggaaaaaacuucuagauucuaaacug

SEQ ID NO: 69968 - RNA, 32 nt, Homo Sapiens
cucucaaugcaaacacuaugcggagagcaguc

SEQ ID NO: 69969 - RNA, 32 nt, Homo Sapiens
aauaaacaggucuccuuccuuccucaauaguc

SEQ ID NO: 69970 - RNA, 32 nt, Homo Sapiens
aguuaugguaugcaugagcuguguaaauuuug

SEQ ID NO: 69971 - RNA, 32 nt, Homo Sapiens
uucuccugccuaagccucccaaguaacuggga

SEQ ID NO: 69972 - RNA, 27 nt, Homo Sapiens
ggaugguggcggccguccugcuggggc

SEQ ID NO: 69973 - RNA, 32 nt, Homo Sapiens
cacuacucgccucgucaguccacaguccgauc

SEQ ID NO: 69974 - RNA, 32 nt, Homo Sapiens
gagaggaggaagcuccugccggcugagcgggc

SEQ ID NO: 69975 - RNA, 32 nt, Homo Sapiens
cccagaaggaggaggggaaaaaugaccaaguu

SEQ ID NO: 69976 - RNA, 32 nt, Homo Sapiens
uaccaucaagacagagaauggugugauacuca

SEQ ID NO: 69977 - RNA, 25 nt, Homo Sapiens
uauuagaaaaagucucuuucugguc

SEQ ID NO: 69978 - RNA, 32 nt, Homo Sapiens
gcuagucuggacuggccaauccaggucccugc

SEQ ID NO: 69979 - RNA, 32 nt, Homo Sapiens
gcacagaguugggagugacuccagagccuccu

SEQ ID NO: 69980 - RNA, 32 nt, Homo Sapiens
auguguguuuuuucuuuuuuuuuaaguucuua

SEQ ID NO: 69981 - RNA, 32 nt, Homo Sapiens
agcgccagccuggcccugagugcgaacucguc

SEQ ID NO: 69982 - RNA, 32 nt, Homo Sapiens
agacucagcugccagagccugcucuuaacacc

SEQ ID NO: 69983 - RNA, 32 nt, Homo Sapiens
cauuauuccuccauccugucuggaauacacca

SEQ ID NO: 69984 - RNA, 32 nt, Homo Sapiens
ccagccuucugacugcauucagcccucucuag

SEQ ID NO: 69985 - RNA, 32 nt, Homo Sapiens
cagcagaaagagaguaggccggauguuuucau

SEQ ID NO: 69986 - RNA, 32 nt, Homo Sapiens
gacacugccccucccccgaccugggcccacac

SEQ ID NO: 69987 - RNA, 32 nt, Homo Sapiens
agcccagccccgcgcagcccagcccugcccug

SEQ ID NO: 69988 - RNA, 32 nt, Homo Sapiens
cgagggcagcgggagccucccugccucaggcc

SEQ ID NO: 69989 - RNA, 32 nt, Homo Sapiens
gucucgcgcgcccccauagccuugcuagaggg

SEQ ID NO: 69990 - RNA, 32 nt, Homo Sapiens
cggcgcgucagcgcccucgguguccagagagg

SEQ ID NO: 69991 - RNA, 32 nt, Homo Sapiens
uggcgggucucucaggaacgcauauuuucuuu

SEQ ID NO: 69992 - RNA, 32 nt, Homo Sapiens
uucuaccacacuggauuaaauaaacuugucaa

SEQ ID NO: 69993 - RNA, 32 nt, Homo Sapiens
accugauaccucagggcaaggcccuuuuuccc

SEQ ID NO: 69994 - RNA, 32 nt, Homo Sapiens
aacacauucccgcccgcccacaggccugaggu

SEQ ID NO: 69995 - RNA, 32 nt, Homo Sapiens
acagacagucccuuucucuccucccaagugag

SEQ ID NO: 69996 - RNA, 32 nt, Homo Sapiens
ugagcuaguauugacugaaaucuuuagaacuu

SEQ ID NO: 69997 - RNA, 32 nt, Homo Sapiens
ggcccggcgucaaaggaaauugguuuugacuu

SEQ ID NO: 69998 - RNA, 32 nt, Homo Sapiens
cugccuuuccccuuuuucauucccugugcuga

SEQ ID NO: 69999 - RNA, 32 nt, Homo Sapiens
augaggcacuuuauauuuuuuauuagagagua

SEQ ID NO: 70000 - RNA, 32 nt, Homo Sapiens
uauucuggacauuuuaggaaaugguaauuugc

SEQ ID NO: 70001 - RNA, 32 nt, Homo Sapiens
aaauauacuaaacaaacuuauauuucaauaaa

SEQ ID NO: 70002 - RNA, 32 nt, Homo Sapiens
uccuccuggggaacugguuuauucuguacucc

SEQ ID NO: 70003 - RNA, 32 nt, Homo Sapiens
uucuuucuucguuuuuuuuucuuuuuuucuuu

SEQ ID NO: 70004 - RNA, 32 nt, Homo Sapiens
uaguugccaugggaaccuaguaacagacucug

SEQ ID NO: 70005 - RNA, 28 nt, Homo Sapiens
caaauagaggcgaacauuugaacuccga

SEQ ID NO: 70006 - RNA, 32 nt, Homo Sapiens
gccggccgcgaccugcugcugcccuccccggu

SEQ ID NO: 70007 - RNA, 32 nt, Homo Sapiens
agaucugaaaagaaggugaauauuuugcacuu

SEQ ID NO: 70008 - RNA, 32 nt, Homo Sapiens
caguaugaaaaggcuuucucauccaaguaucu

SEQ ID NO: 70009 - RNA, 32 nt, Homo Sapiens
uugacucuuuugccauuaaacuuaccugggca

SEQ ID NO: 70010 - RNA, 32 nt, Homo Sapiens
auagaugauaagacucccauuuagaccgcaaa

SEQ ID NO: 70011 - RNA, 32 nt, Homo Sapiens
gagcacaugugaauuaaccugcauugauggaa

SEQ ID NO: 70012 - RNA, 32 nt, Homo Sapiens
uaggucucucaaauaauuaagaauagagccag

SEQ ID NO: 70013 - RNA, 32 nt, Homo Sapiens
cuucuggcuccucuccucuuuggggaucacca

SEQ ID NO: 70014 - RNA, 32 nt, Homo Sapiens
aaugccugccccacagcgauguccucagaugu

SEQ ID NO: 70015 - RNA, 32 nt, Homo Sapiens
aaacaauuuuuauuuggccaaaacagaacaaa

SEQ ID NO: 70016 - RNA, 32 nt, Homo Sapiens
ugcuauugcugggauugggagaaauaaaacau

SEQ ID NO: 70017 - RNA, 32 nt, Homo Sapiens
uugauaaccgccgccggguggcguggagcguc

SEQ ID NO: 70018 - RNA, 32 nt, Homo Sapiens
uuaaaauccaaauauaucucaugguacagugg

SEQ ID NO: 70019 - RNA, 32 nt, Homo Sapiens
acuuuccugcugccgcgccgccagcccccgcc

SEQ ID NO: 70020 - RNA, 32 nt, Homo Sapiens
auuuuuaaauguugaucuuguauuccgcaauc

SEQ ID NO: 70021 - RNA, 32 nt, Homo Sapiens
aauuagccgggcguggugguggagcgcacgcc

SEQ ID NO: 70022 - RNA, 32 nt, Homo Sapiens
cgcugccacccaggguucccaagguuucuccc

SEQ ID NO: 70023 - RNA, 32 nt, Homo Sapiens
uuccucuucucuaucagaggucucuuuggaag

SEQ ID NO: 70024 - RNA, 32 nt, Homo Sapiens
aagacccgucgagcugcggcgccggcgcguuc

SEQ ID NO: 70025 - RNA, 32 nt, Homo Sapiens
auuuuccagagccccagagccagcucaucuuc

SEQ ID NO: 70026 - RNA, 32 nt, Homo Sapiens
uucauucauuuucugaauuuccuaugugagga

SEQ ID NO: 70027 - RNA, 30 nt, Homo Sapiens
acacauucuacagugggggaauccaggguu

SEQ ID NO: 70028 - RNA, 32 nt, Homo Sapiens
uauuauguauauauuuuucaaggucuguuuuu

SEQ ID NO: 70029 - RNA, 32 nt, Homo Sapiens
accuuggggaugugccuagacccggcgcagca

SEQ ID NO: 70030 - RNA, 32 nt, Homo Sapiens
ucuuuacggcuucggcggcuaugcuaccgcuu

SEQ ID NO: 70031 - RNA, 32 nt, Homo Sapiens
gcauccuuggcagugggaauguucuuucugcu

SEQ ID NO: 70032 - RNA, 32 nt, Homo Sapiens
gcccggguauucgcgccgccgccgcccgccau

SEQ ID NO: 70033 - RNA, 32 nt, Homo Sapiens
aacugugugugagcugcacuggccucacagcu

SEQ ID NO: 70034 - RNA, 32 nt, Homo Sapiens
caaaguuuuguuauuaaaaauuugauacacac

SEQ ID NO: 70035 - RNA, 32 nt, Homo Sapiens
ccugccugaggacucuacucaccaccaugcuu

SEQ ID NO: 70036 - RNA, 30 nt, Homo Sapiens
uuguguggaagacaggggggucccggagaa

SEQ ID NO: 70037 - RNA, 32 nt, Homo Sapiens
auucauaauccgcaggaucuguagaagacauu

SEQ ID NO: 70038 - RNA, 32 nt, Homo Sapiens
cccucgguccccgcacccccaggccgcccgcu

SEQ ID NO: 70039 - RNA, 32 nt, Homo Sapiens
cagucucgagggaagagggucugguggaagga

SEQ ID NO: 70040 - RNA, 32 nt, Homo Sapiens
gacagcgcgggggcuccggccgugccuccgcg

SEQ ID NO: 70041 - RNA, 32 nt, Homo Sapiens
accaguguuuaggguacgugcuuccuaaguaa

SEQ ID NO: 70042 - RNA, 32 nt, Homo Sapiens
agcaaauuuuuucaauaaagggucagauaaau

SEQ ID NO: 70043 - RNA, 32 nt, Homo Sapiens
uucagcaauuuguaguuauuuccacuauagac

SEQ ID NO: 70044 - RNA, 32 nt, Homo Sapiens
uuucccuuuccacggguaacgcugccugaacc

SEQ ID NO: 70045 - RNA, 32 nt, Homo Sapiens
agccccaggaggaguaggaguugggcagggga

SEQ ID NO: 70046 - RNA, 32 nt, Homo Sapiens
cugaggguggggccugugucagaagcauuugg

SEQ ID NO: 70047 - RNA, 32 nt, Homo Sapiens
uauucacuuagaaggguuucuuucucuuuggc

SEQ ID NO: 70048 - RNA, 32 nt, Homo Sapiens
ucuccugugacacguguacugcagaguguuuc

SEQ ID NO: 70049 - RNA, 32 nt, Homo Sapiens
agggccagcacuggcgucugcggccgcagcag

SEQ ID NO: 70050 - RNA, 32 nt, Homo Sapiens
uggggggaggggugccuuggggcucgcagagu

SEQ ID NO: 70051 - RNA, 32 nt, Homo Sapiens
uggagcagcuccugggcugugcucuguuugaa

SEQ ID NO: 70052 - RNA, 32 nt, Homo Sapiens
augaaguacuuccuggcaaguuuuccauuccu

SEQ ID NO: 70053 - RNA, 32 nt, Homo Sapiens
auuuguaaaaauuuuauauauauguauuuaaa

SEQ ID NO: 70054 - RNA, 32 nt, Homo Sapiens
aucaagauauauuaaauagcuguauuguuuag

SEQ ID NO: 70055 - RNA, 32 nt, Homo Sapiens
uuacaggugugagccaccgcacccagccuaug

SEQ ID NO: 70056 - RNA, 32 nt, Homo Sapiens
cguucacgcuccugagcagagccuuccggugc

SEQ ID NO: 70057 - RNA, 32 nt, Homo Sapiens
aucuccuuuucucuaguauuugacuguuacug

SEQ ID NO: 70058 - RNA, 32 nt, Homo Sapiens
ucggcgucccgcucccuccgcggcucauggcg

SEQ ID NO: 70059 - RNA, 32 nt, Homo Sapiens
uuuuaaaaugucuccagcuuuaauuuuauuag

SEQ ID NO: 70060 - RNA, 32 nt, Homo Sapiens
ugguccuugagccccugaguuguggggguagg

SEQ ID NO: 70061 - RNA, 32 nt, Homo Sapiens
gccucgugccuggcccggacaucuggccccuc

SEQ ID NO: 70062 - RNA, 32 nt, Homo Sapiens
ggugguuucuugcaucccacuccccuuuuacc

SEQ ID NO: 70063 - RNA, 32 nt, Homo Sapiens
gccagccccucgccugcagcaggaaggcgacc

SEQ ID NO: 70064 - RNA, 32 nt, Homo Sapiens
gagagcugcugggaacauccacaaagaaagag

SEQ ID NO: 70065 - RNA, 32 nt, Homo Sapiens
cgccucucacaugcagcacccgggccagcucc

SEQ ID NO: 70066 - RNA, 28 nt, Homo Sapiens
uguauaguuacaguauacgaguugagua

SEQ ID NO: 70067 - RNA, 32 nt, Homo Sapiens
uuguagagacaggggaagguguuccauagaag

SEQ ID NO: 70068 - RNA, 32 nt, Homo Sapiens
uauauauuugaaagaagucaaaugaaugagcu

SEQ ID NO: 70069 - RNA, 32 nt, Homo Sapiens
aggcuaaguguagaagauaauuuaagauacau

SEQ ID NO: 70070 - RNA, 32 nt, Homo Sapiens
gcaauucugacuucucccaucuaguggaaaug

SEQ ID NO: 70071 - RNA, 32 nt, Homo Sapiens
gacuuuguauaccaccugaccagccuuugugc

SEQ ID NO: 70072 - RNA, 32 nt, Homo Sapiens
acagacuugacaacggugacagcacuggggcg

SEQ ID NO: 70073 - RNA, 30 nt, Homo Sapiens
cugccugucugugguccaggcuucaggaac

SEQ ID NO: 70074 - RNA, 32 nt, Homo Sapiens
gcugcccuuccagggagcugccccccugguag

SEQ ID NO: 70075 - RNA, 32 nt, Homo Sapiens
auuuauuauuuuacaaaaacaaaguuguguuu

SEQ ID NO: 70076 - RNA, 32 nt, Homo Sapiens
augaaucugguaccaucugugcuuucacaaaa

SEQ ID NO: 70077 - RNA, 32 nt, Homo Sapiens
ccaagaugaugcugaggccugaugacauuuau

SEQ ID NO: 70078 - RNA, 32 nt, Homo Sapiens
gcccaaggaaaugaaacacgauuuccaaaaug

SEQ ID NO: 70079 - RNA, 32 nt, Homo Sapiens
ccagcccccucccuccucccaccuucacugug

SEQ ID NO: 70080 - RNA, 32 nt, Homo Sapiens
gcaguucugaaucauucucucauucaccagug

SEQ ID NO: 70081 - RNA, 32 nt, Homo Sapiens
ggcggcuuuuccaaggccuccugauggggggc

SEQ ID NO: 70082 - RNA, 32 nt, Homo Sapiens
gagcaugugaugcuuaggcuacggcagccauc

SEQ ID NO: 70083 - RNA, 32 nt, Homo Sapiens
aacucuuccaggccccaccucccugcaccccu

SEQ ID NO: 70084 - RNA, 32 nt, Homo Sapiens
gcaccuccacaugcaguuggugccaaaugucu

SEQ ID NO: 70085 - RNA, 32 nt, Homo Sapiens
aaacaaacaaacaaacaaaaacaagucuuuug

SEQ ID NO: 70086 - RNA, 32 nt, Homo Sapiens
agcgcgugcagggaggggcuugaucuccacau

SEQ ID NO: 70087 - RNA, 32 nt, Homo Sapiens
ucaugggagaagagccuggagauucuuuccug

SEQ ID NO: 70088 - RNA, 32 nt, Homo Sapiens
cuguucuccacuuugcagaaugauccuucuaa

SEQ ID NO: 70089 - RNA, 32 nt, Homo Sapiens
gcauggauucuaugagcuuccaagucccuuuc

SEQ ID NO: 70090 - RNA, 32 nt, Homo Sapiens
aauccuacugcuuuuccuaaaaacagaauaau

SEQ ID NO: 70091 - RNA, 32 nt, Homo Sapiens
cagugagcucuagcaagggaggcgcugccuuu

SEQ ID NO: 70092 - RNA, 32 nt, Homo Sapiens
gugguacgaaaacaauuccccuguggccugcu

SEQ ID NO: 70093 - RNA, 32 nt, Homo Sapiens
ugaacccagguccuaacaucugcacugcagcg

SEQ ID NO: 70094 - RNA, 32 nt, Homo Sapiens
gagaacauauuuccaagacagaggauucuaug

SEQ ID NO: 70095 - RNA, 30 nt, Homo Sapiens
uugaccuucuuugccaccaucugaaccuac

SEQ ID NO: 70096 - RNA, 32 nt, Homo Sapiens
ggcugcagccugccuccuggggacucacucca

SEQ ID NO: 70097 - RNA, 32 nt, Homo Sapiens
guccauggagaggccagaggcuggcggcccug

SEQ ID NO: 70098 - RNA, 32 nt, Homo Sapiens
caacuuuuuaccauugaauuuauaaaagggca

SEQ ID NO: 70099 - RNA, 32 nt, Homo Sapiens
gacggugagaauuuuaugcauguaucuugccu

SEQ ID NO: 70100 - RNA, 32 nt, Homo Sapiens
agauggugaccuggguauccccugccuccugc

SEQ ID NO: 70101 - RNA, 27 nt, Homo Sapiens
uaaauggccuuggugggaccaaauggg

SEQ ID NO: 70102 - RNA, 32 nt, Homo Sapiens
cacgcccagcuaauuuuuguauuuucaguaga

SEQ ID NO: 70103 - RNA, 32 nt, Homo Sapiens
cacgcccggcuaauuuuuguauuuucaguagg

SEQ ID NO: 70104 - RNA, 32 nt, Homo Sapiens
aagggcugaguucugaggcgccaggcacaggg

SEQ ID NO: 70105 - RNA, 32 nt, Homo Sapiens
caaacaaacaaacaguuuuuccaauuauaaau

SEQ ID NO: 70106 - RNA, 32 nt, Homo Sapiens
ggaauuaauccacacgacuuugaaaagaauaa

SEQ ID NO: 70107 - RNA, 32 nt, Homo Sapiens
cagcuaggggcuucugcucucaucucugacca

SEQ ID NO: 70108 - RNA, 32 nt, Homo Sapiens
cccuccaaggacccgcauggaggcagugggcu

SEQ ID NO: 70109 - RNA, 32 nt, Homo Sapiens
ggaugaaaaauaugaaaugaaaucuuuuauau

SEQ ID NO: 70110 - RNA, 32 nt, Homo Sapiens
aauuagauauuguacgaaaagugccuagcaca

SEQ ID NO: 70111 - RNA, 32 nt, Homo Sapiens
caggucauuccuuuaguuuagagcugggcagu

SEQ ID NO: 70112 - RNA, 32 nt, Homo Sapiens
uucuaugguuacaaggggcugcugcugcugcu

SEQ ID NO: 70113 - RNA, 32 nt, Homo Sapiens
ggcccucggcgcccagcuccgcguccugugag

SEQ ID NO: 70114 - RNA, 32 nt, Homo Sapiens
caaucuaccucuucuuugucuaguuaccccca

SEQ ID NO: 70115 - RNA, 32 nt, Homo Sapiens
gugccuggguccagggccccagugcuuccaga

SEQ ID NO: 70116 - RNA, 27 nt, Homo Sapiens
aucugucucuacuucagccuccacugg

SEQ ID NO: 70117 - RNA, 32 nt, Homo Sapiens
acgccagaaugaauucuauggacaggcacauc

SEQ ID NO: 70118 - RNA, 32 nt, Homo Sapiens
cccacugccuccugccugggguggccuggccc

SEQ ID NO: 70119 - RNA, 32 nt, Homo Sapiens
ggugcgcucccggcgagcugcccuugucuuug

SEQ ID NO: 70120 - RNA, 32 nt, Homo Sapiens
cgggucuggcugucccuggccuuagggagcag

SEQ ID NO: 70121 - RNA, 32 nt, Homo Sapiens
agcggcacauaaauacucagcauuuacguagu

SEQ ID NO: 70122 - RNA, 32 nt, Homo Sapiens
cauuugcaagggaaaagucucuuguaauccga

SEQ ID NO: 70123 - RNA, 32 nt, Homo Sapiens
cauuugcccgcccuuccagcccuuccccagcc

SEQ ID NO: 70124 - RNA, 32 nt, Homo Sapiens
guccuuaucuauaucaucuuacugccugugug

SEQ ID NO: 70125 - RNA, 32 nt, Homo Sapiens
cagggcagggacugacuccagcccuuggacuc

SEQ ID NO: 70126 - RNA, 29 nt, Homo Sapiens
uggagggcgggacagaggggcugggccca

SEQ ID NO: 70127 - RNA, 32 nt, Homo Sapiens
agagccaccuccaaccagcaagagggaaugaa

SEQ ID NO: 70128 - RNA, 32 nt, Homo Sapiens
gucaucagccccagcccugacaggcccugcgu

SEQ ID NO: 70129 - RNA, 32 nt, Homo Sapiens
uacuuguuugcaaaaucugcugaaacuucugu

SEQ ID NO: 70130 - RNA, 32 nt, Homo Sapiens
ggggcugcccaaagcagaacuacuccuucaau

SEQ ID NO: 70131 - RNA, 32 nt, Homo Sapiens
auaugucauaaaugucugcauuacuuuuccau

SEQ ID NO: 70132 - RNA, 32 nt, Homo Sapiens
cugcagauggcguccagguacacaguggcgag

SEQ ID NO: 70133 - RNA, 32 nt, Homo Sapiens
gugauguauaaaauaaaauauucuuugcagua

SEQ ID NO: 70134 - RNA, 32 nt, Homo Sapiens
aguaaaaagcaucagaugugccagaaaauaag

SEQ ID NO: 70135 - RNA, 32 nt, Homo Sapiens
uuuuaauguaucuauuuguacaauuuuaaagu

SEQ ID NO: 70136 - RNA, 32 nt, Homo Sapiens
aaagugacucucugagaaccagcccuucugug

SEQ ID NO: 70137 - RNA, 32 nt, Homo Sapiens
gccagcgaagguggcgaaggcucccacuggau

SEQ ID NO: 70138 - RNA, 32 nt, Homo Sapiens
uuuaggcgucuucggauaucuucucaccuaug

SEQ ID NO: 70139 - RNA, 32 nt, Homo Sapiens
cugaggucaagaguuugagaccagccuggcca

SEQ ID NO: 70140 - RNA, 32 nt, Homo Sapiens
uuccgcccggugccugggacgggcucagccgc

SEQ ID NO: 70141 - RNA, 32 nt, Homo Sapiens
ccuggccccccgcaggccccgaggcucccgug

SEQ ID NO: 70142 - RNA, 32 nt, Homo Sapiens
uuaucugauacauaguuugacaauggguaauu

SEQ ID NO: 70143 - RNA, 32 nt, Homo Sapiens
gccgcagcagcgcgcuaugcgcugcgcgagau

SEQ ID NO: 70144 - RNA, 32 nt, Homo Sapiens
auggcuguaaacacagagcauuugagcugcca

SEQ ID NO: 70145 - RNA, 32 nt, Homo Sapiens
aguggccgcaugcacaccucccggccccuccu

SEQ ID NO: 70146 - RNA, 32 nt, Homo Sapiens
uagggacacgggguucuggaaggaccuccuca

SEQ ID NO: 70147 - RNA, 32 nt, Homo Sapiens
acgcgggcucuugaggggcagagcagcgcauc

SEQ ID NO: 70148 - RNA, 32 nt, Homo Sapiens
ugcaaaauauaaguaaguauauauugaaaaua

SEQ ID NO: 70149 - RNA, 32 nt, Homo Sapiens
uugugauuaauguuuucuuaagauuuucacau

SEQ ID NO: 70150 - RNA, 32 nt, Homo Sapiens
ggcucaaugcuguguggaagguucugagaaag

SEQ ID NO: 70151 - RNA, 32 nt, Homo Sapiens
cuggaguggggcuugcagaaaaggaaaggggg

SEQ ID NO: 70152 - RNA, 32 nt, Homo Sapiens
ccaccccaccuuuuguuaucauuuucauuuca

SEQ ID NO: 70153 - RNA, 32 nt, Homo Sapiens
gccccgccgcuuggcggccccuggaucgagau

SEQ ID NO: 70154 - RNA, 32 nt, Homo Sapiens
acccugccagcauguuuacgcccugccuggag

SEQ ID NO: 70155 - RNA, 32 nt, Homo Sapiens
gaagaguggcauucacaaauggaucagugacu

SEQ ID NO: 70156 - RNA, 32 nt, Homo Sapiens
ucagagguaugaauguuguaaaacugucagga

SEQ ID NO: 70157 - RNA, 32 nt, Homo Sapiens
agaaaggugcagagaugaaaagauuuugaagg

SEQ ID NO: 70158 - RNA, 32 nt, Homo Sapiens
ugaggcccagcaaacaggcauucucacagcug

SEQ ID NO: 70159 - RNA, 32 nt, Homo Sapiens
uaguaauuuaagaaaacaccagaugaguuagg

SEQ ID NO: 70160 - RNA, 32 nt, Homo Sapiens
cguccagcaguucggucaguucucaaaagaua

SEQ ID NO: 70161 - RNA, 32 nt, Homo Sapiens
cagccggugcgcgcagggcggcaggcuggcuu

SEQ ID NO: 70162 - RNA, 32 nt, Homo Sapiens
ccucagaaggcaccagcaccagggcccaggua

SEQ ID NO: 70163 - RNA, 32 nt, Homo Sapiens
cauaauuaaaaauuauuuauuuggacuucuuc

SEQ ID NO: 70164 - RNA, 32 nt, Homo Sapiens
uucuccuaacucucuuccuuuguuggagcucu

SEQ ID NO: 70165 - RNA, 32 nt, Homo Sapiens
cucagcuaccuggagccacgugacagucuccu

SEQ ID NO: 70166 - RNA, 32 nt, Homo Sapiens
uacugcaggaccaguccaugagcucccaagaa

SEQ ID NO: 70167 - RNA, 32 nt, Homo Sapiens
gcaggucaggaggugccguccaggugugcggc

SEQ ID NO: 70168 - RNA, 32 nt, Homo Sapiens
cucaggagaaccggggcuggaggagcggcaag

SEQ ID NO: 70169 - RNA, 32 nt, Homo Sapiens
uaaaaggccgagagaagcuguauucuggagau

SEQ ID NO: 70170 - RNA, 32 nt, Homo Sapiens
gcccagggaaaaaaccacaacgcuguuucaag

SEQ ID NO: 70171 - RNA, 32 nt, Homo Sapiens
uucaauuuuaggaaaaucaugaccaugugggg

SEQ ID NO: 70172 - RNA, 31 nt, Homo Sapiens
agccuguaauccucagcugacacauaauuug

SEQ ID NO: 70173 - RNA, 32 nt, Homo Sapiens
ucaacguauacuuuuccgagacuguauacguc

SEQ ID NO: 70174 - RNA, 32 nt, Homo Sapiens
agauugaucuguauuuaauauucguuaauuaa

SEQ ID NO: 70175 - RNA, 32 nt, Homo Sapiens
ccuccugcaaccaccauuuuugaaauaagaau

SEQ ID NO: 70176 - RNA, 32 nt, Homo Sapiens
gcuacaggaugaugaaacaugguuucaaacga

SEQ ID NO: 70177 - RNA, 32 nt, Homo Sapiens
gaacuguauuuggaaaaauacuggccaggaaa

SEQ ID NO: 70178 - RNA, 32 nt, Homo Sapiens
acagugugaaacuccuauugccugcaguuaaa

SEQ ID NO: 70179 - RNA, 32 nt, Homo Sapiens
cauauucccuaccugucuuauuucauagguac

SEQ ID NO: 70180 - RNA, 32 nt, Homo Sapiens
acacagcaggcuccccggccccggggccucag

SEQ ID NO: 70181 - RNA, 32 nt, Homo Sapiens
uuuaccuuuucaaagcacuuuuaucuagcuag

SEQ ID NO: 70182 - RNA, 32 nt, Homo Sapiens
gguauugguuaaauaacguuuaaaaacaugua

SEQ ID NO: 70183 - RNA, 32 nt, Homo Sapiens
auaaagacgugcgaauagagugccaaaaagca

SEQ ID NO: 70184 - RNA, 32 nt, Homo Sapiens
uucucugaauucuccuuucuucucaacagcuu

SEQ ID NO: 70185 - RNA, 32 nt, Homo Sapiens
aaugaaugaucuuggcuuuccuauaagaaauu

SEQ ID NO: 70186 - RNA, 32 nt, Homo Sapiens
gcgccugggaccuggcgggcggcccugaccgc

SEQ ID NO: 70187 - RNA, 32 nt, Homo Sapiens
uuuuuugagucuuuuuuuuuuaagugaaauuu

SEQ ID NO: 70188 - RNA, 32 nt, Homo Sapiens
ggcucucgcccggcuucucuugccgacccgcc

SEQ ID NO: 70189 - RNA, 32 nt, Homo Sapiens
ccuguccaggauaaggcauauuuggacgguga

SEQ ID NO: 70190 - RNA, 32 nt, Homo Sapiens
cuuaccaaaaauuagcuuuucuaauuuuaguc

SEQ ID NO: 70191 - RNA, 32 nt, Homo Sapiens
auauugcuccacuuacugaaguauagagauga

SEQ ID NO: 70192 - RNA, 32 nt, Homo Sapiens
ggcugggcggccucgcuggggcgggccgcagu

SEQ ID NO: 70193 - RNA, 32 nt, Homo Sapiens
gcguacuugaauuuuucuuccucuccacuucu

SEQ ID NO: 70194 - RNA, 32 nt, Homo Sapiens
uaugcgugugcgccugugcccugcuugcaggc

SEQ ID NO: 70195 - RNA, 32 nt, Homo Sapiens
cguuccucuguggcguggccaggccggggccu

SEQ ID NO: 70196 - RNA, 32 nt, Homo Sapiens
gguaugaaaaggagagcucuccuaguugugaa

SEQ ID NO: 70197 - RNA, 32 nt, Homo Sapiens
auugugucccgucauuggguggcauauguuaa

SEQ ID NO: 70198 - RNA, 32 nt, Homo Sapiens
caaauuuucaagccacagaucccgggcggugg

SEQ ID NO: 70199 - RNA, 30 nt, Homo Sapiens
cuuggaguaucaaugggggaagggggaugg

SEQ ID NO: 70200 - RNA, 32 nt, Homo Sapiens
agauuuuuauuguaauuguccugaguucuaca

SEQ ID NO: 70201 - RNA, 28 nt, Homo Sapiens
cugguauaaaguucuggccuucuaccuu

SEQ ID NO: 70202 - RNA, 32 nt, Homo Sapiens
gugcucagacugcccccaagaucaaaucucuc

SEQ ID NO: 70203 - RNA, 32 nt, Homo Sapiens
agagcccaagguuuaaacuucucugaagggag

SEQ ID NO: 70204 - RNA, 32 nt, Homo Sapiens
gaccuagcugaugaagauuuugaaagaguuca

SEQ ID NO: 70205 - RNA, 32 nt, Homo Sapiens
ccaccccccuccccccgccccgcacuccuaag

SEQ ID NO: 70206 - RNA, 32 nt, Homo Sapiens
gaaggccuccugggcacuguccuuccaccugu

SEQ ID NO: 70207 - RNA, 32 nt, Homo Sapiens
ccuggagugucugcccagucccgccugcaugu

SEQ ID NO: 70208 - RNA, 32 nt, Homo Sapiens
ucuccuuggcugaauagcacaggugaccccua

SEQ ID NO: 70209 - RNA, 32 nt, Homo Sapiens
cuuaggaaaaggaagagcuaagucaggguccg

SEQ ID NO: 70210 - RNA, 32 nt, Homo Sapiens
auuugcuuuagaguucugaaauaaaaugaaau

SEQ ID NO: 70211 - RNA, 32 nt, Homo Sapiens
ugauggccauucgauuggauuccucccaaauu

SEQ ID NO: 70212 - RNA, 32 nt, Homo Sapiens
cucccagguucaagcgauuuuccugccucagc

SEQ ID NO: 70213 - RNA, 32 nt, Homo Sapiens
ccuccaaacgagcucucagaauguuauuuuuc

SEQ ID NO: 70214 - RNA, 32 nt, Homo Sapiens
cagcuuguucccaagaggauaauucuuuauac

SEQ ID NO: 70215 - RNA, 32 nt, Homo Sapiens
cccuuggcccccagccucacugcggcuuauac

SEQ ID NO: 70216 - RNA, 32 nt, Homo Sapiens
uugccucauguuugaaugauaauuuaccuggg

SEQ ID NO: 70217 - RNA, 32 nt, Homo Sapiens
auacuccagaacuuucauguuuaugaguauua

SEQ ID NO: 70218 - RNA, 32 nt, Homo Sapiens
ccgccgccagcuggacgcgagccccgggucca

SEQ ID NO: 70219 - RNA, 32 nt, Homo Sapiens
ggcagaggggccagaaggacuccauggcccaa

SEQ ID NO: 70220 - RNA, 32 nt, Homo Sapiens
cagccuggccaacauauagugaaacccagucu

SEQ ID NO: 70221 - RNA, 32 nt, Homo Sapiens
ugucaacuaugaauauggugacuagauuuuaa

SEQ ID NO: 70222 - RNA, 32 nt, Homo Sapiens
caugauguaaaaaugguuagucuccacuuuua

SEQ ID NO: 70223 - RNA, 32 nt, Homo Sapiens
guuuaccaaauaggauuaaacacacacaaaau

SEQ ID NO: 70224 - RNA, 32 nt, Homo Sapiens
uaauacauuccuccccucccccuagccaugaa

SEQ ID NO: 70225 - RNA, 32 nt, Homo Sapiens
ugaacacagggauuggggagggaccagagcgc

SEQ ID NO: 70226 - RNA, 32 nt, Homo Sapiens
cuggagaugaacuggaugggccacuggagucu

SEQ ID NO: 70227 - RNA, 32 nt, Homo Sapiens
cgcugccauuuucuaaaccgugaugcgguugu

SEQ ID NO: 70228 - RNA, 32 nt, Homo Sapiens
guauuuugaagaagaacauuguaguagaauug

SEQ ID NO: 70229 - RNA, 32 nt, Homo Sapiens
uugacaucugccuuagaacuucugggacaauc

SEQ ID NO: 70230 - RNA, 32 nt, Homo Sapiens
uuucauuuccucacugacuauaaaagaauaga

SEQ ID NO: 70231 - RNA, 32 nt, Homo Sapiens
agcacccagcuccccgccaccgccaugguccc

SEQ ID NO: 70232 - RNA, 32 nt, Homo Sapiens
cgcuagcagcgcauuuuuuuuaguucaggcua

SEQ ID NO: 70233 - RNA, 32 nt, Homo Sapiens
agcagucuccacgaggacccaggcggacccuc

SEQ ID NO: 70234 - RNA, 32 nt, Homo Sapiens
gccugcuggucuuuacacauucugggagaggc

SEQ ID NO: 70235 - RNA, 32 nt, Homo Sapiens
ucacucugccuguggacgcugcaccugccacu

SEQ ID NO: 70236 - RNA, 32 nt, Homo Sapiens
cugaggccgcuggaagccaccgggccaaggga

SEQ ID NO: 70237 - RNA, 32 nt, Homo Sapiens
uuuuaauaacuuagaggagauuuuaacuuuau

SEQ ID NO: 70238 - RNA, 32 nt, Homo Sapiens
uaaaggaagaaauuauuuguuaauuccaguag

SEQ ID NO: 70239 - RNA, 32 nt, Homo Sapiens
uuagauucaacaaugaauauuuuauuauacuu

SEQ ID NO: 70240 - RNA, 32 nt, Homo Sapiens
ugacuugacauaacuucccauccagccaggag

SEQ ID NO: 70241 - RNA, 32 nt, Homo Sapiens
uuguuuuucaacaugaaucugauauugauuua

SEQ ID NO: 70242 - RNA, 32 nt, Homo Sapiens
aaagcguuaacaggcucugacuucugacauuc

SEQ ID NO: 70243 - RNA, 32 nt, Homo Sapiens
ucaguacauuuccuacuuuaagaguaauuacu

SEQ ID NO: 70244 - RNA, 32 nt, Homo Sapiens
caaugccucagugaugcauuagaucucuaaua

SEQ ID NO: 70245 - RNA, 32 nt, Homo Sapiens
gauuuagcaggcuagaccaucuaaguagccau

SEQ ID NO: 70246 - RNA, 32 nt, Homo Sapiens
agaagaaaggcacagcuccccaucaguuucau

SEQ ID NO: 70247 - RNA, 32 nt, Homo Sapiens
gccuuuggcauauaccucuccuccuccccacu

SEQ ID NO: 70248 - RNA, 32 nt, Homo Sapiens
auuucaaugcagcaauuuucucaaacgucaaa

SEQ ID NO: 70249 - RNA, 32 nt, Homo Sapiens
ccuccccucugagacuccacugagacguggcu

SEQ ID NO: 70250 - RNA, 32 nt, Homo Sapiens
guuaugucagcaaugaagacuuugaagugaac

SEQ ID NO: 70251 - RNA, 32 nt, Homo Sapiens
aaucugggugcugcugacguggccgcgcggcc

SEQ ID NO: 70252 - RNA, 32 nt, Homo Sapiens
ccugggggucgugggcagcugcuacucagugc

SEQ ID NO: 70253 - RNA, 32 nt, Homo Sapiens
aaaaagagaaaguccaaaagacucuaaacaaa

SEQ ID NO: 70254 - RNA, 32 nt, Homo Sapiens
aucauguagacauuuuuaaaugugaagcuuua

SEQ ID NO: 70255 - RNA, 32 nt, Homo Sapiens
ugacacgauagaucuuauuccauacuucuuua

SEQ ID NO: 70256 - RNA, 32 nt, Homo Sapiens
gucuggaugauuacagagaagauguaaaauug

SEQ ID NO: 70257 - RNA, 32 nt, Homo Sapiens
cuucucuggacagccagacauguggugcccgu

SEQ ID NO: 70258 - RNA, 32 nt, Homo Sapiens
ugaguucuguuguuguuuucaugccgccugug

SEQ ID NO: 70259 - RNA, 32 nt, Homo Sapiens
uuucugugcugaguagaauagcagccauuaca

SEQ ID NO: 70260 - RNA, 32 nt, Homo Sapiens
ucugugaaugauucuugaaauaauauguaaaa

SEQ ID NO: 70261 - RNA, 32 nt, Homo Sapiens
uaggaaaccaaagcaagcuuugugaaacuggc

SEQ ID NO: 70262 - RNA, 32 nt, Homo Sapiens
uuugaaauauugaugcagacaaaugaaauaau

SEQ ID NO: 70263 - RNA, 31 nt, Homo Sapiens
acagaaauacaaacucucagaaacugcugug

SEQ ID NO: 70264 - RNA, 32 nt, Homo Sapiens
cuuuuauuuauaaguuaccauuccuaguuucu

SEQ ID NO: 70265 - RNA, 32 nt, Homo Sapiens
caggcguggggagcuuccugucgccuuggcug

SEQ ID NO: 70266 - RNA, 32 nt, Homo Sapiens
gauccgcccucccggaauccuggcucggcccu

SEQ ID NO: 70267 - RNA, 32 nt, Homo Sapiens
cuagcuuguaguuuucuaagacugaguaaacu

SEQ ID NO: 70268 - RNA, 32 nt, Homo Sapiens
caaagaggaacgccucuugcaguucaaaugga

SEQ ID NO: 70269 - RNA, 32 nt, Homo Sapiens
ccccuagccuacucuuguguuuaggggauggu

SEQ ID NO: 70270 - RNA, 32 nt, Homo Sapiens
ggaucccggcagcggccugacccggcuccacg

SEQ ID NO: 70271 - RNA, 32 nt, Homo Sapiens
gucguguauggacuagcacuauuaaacuucaa

SEQ ID NO: 70272 - RNA, 32 nt, Homo Sapiens
uauucagccgacugccagagaagugggaaugg

SEQ ID NO: 70273 - RNA, 32 nt, Homo Sapiens
uagucgccgcgucgccggugcggccgccauug

SEQ ID NO: 70274 - RNA, 32 nt, Homo Sapiens
uaaaagacguugagagagacagugcaagagag

SEQ ID NO: 70275 - RNA, 32 nt, Homo Sapiens
caucuguaaaaugaugguaauaauacuucacc

SEQ ID NO: 70276 - RNA, 32 nt, Homo Sapiens
ggagaagcaggaaaccuguuuccuuaguggcu

SEQ ID NO: 70277 - RNA, 32 nt, Homo Sapiens
uuacauuguuugucugucuucauagcagauuu

SEQ ID NO: 70278 - RNA, 32 nt, Homo Sapiens
uaaauugguguaaaaauggaacugagucaucu

SEQ ID NO: 70279 - RNA, 32 nt, Homo Sapiens
uucuggucuccucgugccuccucccagaucac

SEQ ID NO: 70280 - RNA, 32 nt, Homo Sapiens
gagccguccggcggcugggaucgagccccgac

SEQ ID NO: 70281 - RNA, 32 nt, Homo Sapiens
gucaguuucauuuuuagaaguuucacacaaua

SEQ ID NO: 70282 - RNA, 32 nt, Homo Sapiens
ccucgcugugguugguggcagcucgccuugcu

SEQ ID NO: 70283 - RNA, 32 nt, Homo Sapiens
ccgacccaguguuucgcggacugaggucuccg

SEQ ID NO: 70284 - RNA, 32 nt, Homo Sapiens
aaugaacuaaugaggauugcugauucuuuaaa

SEQ ID NO: 70285 - RNA, 32 nt, Homo Sapiens
acacaagagggacuguauuucuguggaaaaca

SEQ ID NO: 70286 - RNA, 27 nt, Homo Sapiens
cgauccucccacuucagccuuucgagu

SEQ ID NO: 70287 - RNA, 32 nt, Homo Sapiens
cuucaugcuguaaauggaauuuguuuuaucuc

SEQ ID NO: 70288 - RNA, 32 nt, Homo Sapiens
uucuaauucuaaaaugcugaucuucucuggag

SEQ ID NO: 70289 - RNA, 32 nt, Homo Sapiens
gccgagggggcaggcuucgggcgugaacugaa

SEQ ID NO: 70290 - RNA, 32 nt, Homo Sapiens
gacugugcuuuuucuuuuucucucccuuccuu

SEQ ID NO: 70291 - RNA, 32 nt, Homo Sapiens
accaugccaauccaagcuuccaucaccuugcu

SEQ ID NO: 70292 - RNA, 32 nt, Homo Sapiens
cacagggcaggugggcucucggggaagguguc

SEQ ID NO: 70293 - RNA, 32 nt, Homo Sapiens
uucucaagaacaagaaccuagaaugaauaucc

SEQ ID NO: 70294 - RNA, 32 nt, Homo Sapiens
ggagcgcggcccggagcgcggcgcuggcacau

SEQ ID NO: 70295 - RNA, 32 nt, Homo Sapiens
gccagugucuccugggugccuucugaggacuc

SEQ ID NO: 70296 - RNA, 32 nt, Homo Sapiens
cccagggcugggggcugcuugucugcuauccu

SEQ ID NO: 70297 - RNA, 32 nt, Homo Sapiens
aagguuuguugguuuacuuuuaucuuuuuuaa

SEQ ID NO: 70298 - RNA, 32 nt, Homo Sapiens
auuuuauauuguacaugaaaaguuuuaaagau

SEQ ID NO: 70299 - RNA, 32 nt, Homo Sapiens
ucuguagaguagacuuccuucacgggugguug

SEQ ID NO: 70300 - RNA, 32 nt, Homo Sapiens
ugucuaauauaaaagcugggauuucuugcccg

SEQ ID NO: 70301 - RNA, 32 nt, Homo Sapiens
gggcaagugggaggaggggaagugcaacagga

SEQ ID NO: 70302 - RNA, 32 nt, Homo Sapiens
auagggcugugccucucugcguuuccaggugg

SEQ ID NO: 70303 - RNA, 32 nt, Homo Sapiens
uuaugcaauauuaauguaagggcucuaaaaca

SEQ ID NO: 70304 - RNA, 32 nt, Homo Sapiens
aggagcgcgcugcgccccggcgcugaggcccc

SEQ ID NO: 70305 - RNA, 32 nt, Homo Sapiens
cugaacggccgucgcccucccuacgggcagcc

SEQ ID NO: 70306 - RNA, 32 nt, Homo Sapiens
gagcugcuuucucuccucuucccuuuccgggu

SEQ ID NO: 70307 - RNA, 32 nt, Homo Sapiens
ccuguaugcugagcugguaaaauacauuguaa

SEQ ID NO: 70308 - RNA, 32 nt, Homo Sapiens
cucaaaccauuguaaaguugcugacuagguug

SEQ ID NO: 70309 - RNA, 32 nt, Homo Sapiens
ccccaacuuuaaaggugugagaguauuaggaa

SEQ ID NO: 70310 - RNA, 32 nt, Homo Sapiens
aaauaucauucuucuuuuuauuuguuuucacc

SEQ ID NO: 70311 - RNA, 32 nt, Homo Sapiens
accaccucccucccagccccagcgccucagcc

SEQ ID NO: 70312 - RNA, 32 nt, Homo Sapiens
ucaccauguuugucaccagcagggccugcauu

SEQ ID NO: 70313 - RNA, 32 nt, Homo Sapiens
ucccucccggucgggguggcugccgggcggag

SEQ ID NO: 70314 - RNA, 32 nt, Homo Sapiens
agguuuauaugauaagacaauuuguauuacac

SEQ ID NO: 70315 - RNA, 32 nt, Homo Sapiens
caaaccccacuuucucccuccuccuuuuccug

SEQ ID NO: 70316 - RNA, 32 nt, Homo Sapiens
gcugugagccccccacucccagcccgucaggg

SEQ ID NO: 70317 - RNA, 32 nt, Homo Sapiens
agaaguaggaggaaacaguucucacugggaag

SEQ ID NO: 70318 - RNA, 32 nt, Homo Sapiens
gcuggugcuggccucugggauggaggagcuuc

SEQ ID NO: 70319 - RNA, 32 nt, Homo Sapiens
acucgggcgccccggcggccgccaccucuccc

SEQ ID NO: 70320 - RNA, 32 nt, Homo Sapiens
ugcacacgcucgcagucugugggcccuccggg

SEQ ID NO: 70321 - RNA, 32 nt, Homo Sapiens
ugaaucugcugacacaucaaggccacuuuucu

SEQ ID NO: 70322 - RNA, 32 nt, Homo Sapiens
acuaucaauauuuaaguuuguugcugucaaga

SEQ ID NO: 70323 - RNA, 32 nt, Homo Sapiens
auguuguuggggugucuuucuggugcccaaac

SEQ ID NO: 70324 - RNA, 32 nt, Homo Sapiens
agaaaaaaaaucuuuuugauaagcacauuaaa

SEQ ID NO: 70325 - RNA, 32 nt, Homo Sapiens
ucuuaguucuucauuacugcauugaaaaggaa

SEQ ID NO: 70326 - RNA, 32 nt, Homo Sapiens
gcuuggcuccuuucaccccauccacaugggua

SEQ ID NO: 70327 - RNA, 32 nt, Homo Sapiens
uggagcucagccugucucuuuaacucaucugu

SEQ ID NO: 70328 - RNA, 32 nt, Homo Sapiens
uuuggaucucuuaguauugccuuugaaacugc

SEQ ID NO: 70329 - RNA, 32 nt, Homo Sapiens
uuuaagggcuuuaugugaacuaugauauugua

SEQ ID NO: 70330 - RNA, 28 nt, Homo Sapiens
uaaauagagagaaaacauuuguauauga

SEQ ID NO: 70331 - RNA, 32 nt, Homo Sapiens
ggugcagugaaugggcugggggugggguggcc

SEQ ID NO: 70332 - RNA, 32 nt, Homo Sapiens
ugcuaccaacaccgugagugcagcaugccauc

SEQ ID NO: 70333 - RNA, 32 nt, Homo Sapiens
ucaaauugaauaaaaaucacagcaaucucuga

SEQ ID NO: 70334 - RNA, 32 nt, Homo Sapiens
acuuaaaaugacucaauaaaaugacuugcuac

SEQ ID NO: 70335 - RNA, 32 nt, Homo Sapiens
uaaaauaagaaacgugauaagaauauagauga

SEQ ID NO: 70336 - RNA, 32 nt, Homo Sapiens
cagaguugagaguugguggugcaaauauguau

SEQ ID NO: 70337 - RNA, 32 nt, Homo Sapiens
cccacaagggaaggggucaaaguugcugcccu

SEQ ID NO: 70338 - RNA, 32 nt, Homo Sapiens
agucucaaacuuaacccucaucuagcacccgg

SEQ ID NO: 70339 - RNA, 32 nt, Homo Sapiens
uucuuuccugcagcuggggaaguugggcagag

SEQ ID NO: 70340 - RNA, 32 nt, Homo Sapiens
uuugaauauaaggucuuaacacuauguuuaac

SEQ ID NO: 70341 - RNA, 32 nt, Homo Sapiens
uauuaguacaauaagcguuaagggcagagucu

SEQ ID NO: 70342 - RNA, 32 nt, Homo Sapiens
uauguaauauaaauaaaacuaugguaaaugug

SEQ ID NO: 70343 - RNA, 32 nt, Homo Sapiens
gcaaacauuaaugugaaauaaauugaauuuaa

SEQ ID NO: 70344 - RNA, 32 nt, Homo Sapiens
gcccugcucacagagagccuugugacagaucu

SEQ ID NO: 70345 - RNA, 32 nt, Homo Sapiens
ccauggauggacacaauucuaagacaucaugc

SEQ ID NO: 70346 - RNA, 32 nt, Homo Sapiens
aagacgaggcccucgggcccagcccccacagu

SEQ ID NO: 70347 - RNA, 32 nt, Homo Sapiens
gaccggggugacaagcagauacugcuguguaa

SEQ ID NO: 70348 - RNA, 32 nt, Homo Sapiens
ccugcccuccgccccgccccagccggcggacu

SEQ ID NO: 70349 - RNA, 32 nt, Homo Sapiens
cggggcugcgguagccacuuuagauuugggca

SEQ ID NO: 70350 - RNA, 32 nt, Homo Sapiens
uuugauucugagcauuugauucugacuucugu

SEQ ID NO: 70351 - RNA, 32 nt, Homo Sapiens
ccaauauacaagcaguauaucagauuugggaa

SEQ ID NO: 70352 - RNA, 32 nt, Homo Sapiens
gugcccggcccugcggaggcggcagcggccac

SEQ ID NO: 70353 - RNA, 32 nt, Homo Sapiens
guguuuaagaggucaggaggccugcugaucuu

SEQ ID NO: 70354 - RNA, 31 nt, Homo Sapiens
gucagcgcccggugccugcccugggcaccuc

SEQ ID NO: 70355 - RNA, 31 nt, Homo Sapiens
uacgugcaggcuggcucgggaguccagugag

SEQ ID NO: 70356 - RNA, 32 nt, Homo Sapiens
guuuugugcggcucgauggggcauuuggaacu

SEQ ID NO: 70357 - RNA, 32 nt, Homo Sapiens
aaugugugcgcgcugugguaugggugugcaag

SEQ ID NO: 70358 - RNA, 32 nt, Homo Sapiens
aguuccucuaaaaaguuuuucuuccucucuuc

SEQ ID NO: 70359 - RNA, 32 nt, Homo Sapiens
ccagugaaggugagggaggugugacaguagaa

SEQ ID NO: 70360 - RNA, 32 nt, Homo Sapiens
uaaggagagaauagcuuuuauguacugacuuc

SEQ ID NO: 70361 - RNA, 32 nt, Homo Sapiens
cugagggcgggugguacagauguguaugggaa

SEQ ID NO: 70362 - RNA, 32 nt, Homo Sapiens
auuuaucaaauuauacuggguucggauuguga

SEQ ID NO: 70363 - RNA, 32 nt, Homo Sapiens
acuuuuaccgcaggauaccaagcuaaccucaa

SEQ ID NO: 70364 - RNA, 32 nt, Homo Sapiens
ucuguccuccccgucuggacccucccagccac

SEQ ID NO: 70365 - RNA, 32 nt, Homo Sapiens
ugauuuuguuuauuuagaucucucuucuguuu

SEQ ID NO: 70366 - RNA, 32 nt, Homo Sapiens
cugcacaaaugguuccucuccuccuuccugau

SEQ ID NO: 70367 - RNA, 32 nt, Homo Sapiens
caccccacagaaauuaacuuggagagccugag

SEQ ID NO: 70368 - RNA, 32 nt, Homo Sapiens
aaauauuuuuauuuuauugcucuuuuaguuug

SEQ ID NO: 70369 - RNA, 31 nt, Homo Sapiens
ugucuaaaguguauuuucagagccggcccgc

SEQ ID NO: 70370 - RNA, 32 nt, Homo Sapiens
cucuucucaccgugagauuuucucagccagug

SEQ ID NO: 70371 - RNA, 32 nt, Homo Sapiens
uuugggaguucuuugacgaacuuugauaugug

SEQ ID NO: 70372 - RNA, 32 nt, Homo Sapiens
ucucugcuucccucccaggccucgccagggcu

SEQ ID NO: 70373 - RNA, 32 nt, Homo Sapiens
cuggagcagccucuccuguccacagccagggg

SEQ ID NO: 70374 - RNA, 32 nt, Homo Sapiens
cugcgggcggguggucuuagcuccaguccccc

SEQ ID NO: 70375 - RNA, 32 nt, Homo Sapiens
agguuugggguggaaagggccugaggggugaa

SEQ ID NO: 70376 - RNA, 32 nt, Homo Sapiens
auauuuuugcuuaauuuuuuuaaauugucauu

SEQ ID NO: 70377 - RNA, 32 nt, Homo Sapiens
cccaggugacagagcgagacuccaucucaaaa

SEQ ID NO: 70378 - RNA, 32 nt, Homo Sapiens
guuaugugagaaauguuacuggggaaauagau

SEQ ID NO: 70379 - RNA, 32 nt, Homo Sapiens
ucggggcugagugugggcgcgcgguucccggc

SEQ ID NO: 70380 - RNA, 32 nt, Homo Sapiens
gaaaucggguucagaacacuuuuuaugacaaa

SEQ ID NO: 70381 - RNA, 32 nt, Homo Sapiens
ccaccugccaggagcacgucccgccggcaguc

SEQ ID NO: 70382 - RNA, 32 nt, Homo Sapiens
gugcuuucggcugcccucuggcccaggaaauu

SEQ ID NO: 70383 - RNA, 32 nt, Homo Sapiens
acucggaguuguaucuuuuucuuucuuuuuuu

SEQ ID NO: 70384 - RNA, 32 nt, Homo Sapiens
uauuuguacacaaauuuucuuuucucaguuuu

SEQ ID NO: 70385 - RNA, 32 nt, Homo Sapiens
aagagcaaaaguggccaaaaaaugcaugucug

SEQ ID NO: 70386 - RNA, 32 nt, Homo Sapiens
gggggaccucagccagcuccggggcucucauc

SEQ ID NO: 70387 - RNA, 32 nt, Homo Sapiens
ccgcugcucacgcgcgccggccugcagggccg

SEQ ID NO: 70388 - RNA, 32 nt, Homo Sapiens
ggggugcugagaaggcggcugcugggcagagc

SEQ ID NO: 70389 - RNA, 32 nt, Homo Sapiens
ucagaggcuucagcccagcugcauaguugaag

SEQ ID NO: 70390 - RNA, 30 nt, Homo Sapiens
cagccugcuggcaugggggauuccaggagg

SEQ ID NO: 70391 - RNA, 32 nt, Homo Sapiens
ucgaggaccugggcacggggucggauggacac

SEQ ID NO: 70392 - RNA, 32 nt, Homo Sapiens
aggaguuggggauguccuacaaacccaucgcc

SEQ ID NO: 70393 - RNA, 32 nt, Homo Sapiens
uuccauagaaaguaggucccccugccuucucc

SEQ ID NO: 70394 - RNA, 32 nt, Homo Sapiens
auguucacugcgaugcuggacacuacagguau

SEQ ID NO: 70395 - RNA, 32 nt, Homo Sapiens
cucccgggccgccgcgaucaugucggaccagg

SEQ ID NO: 70396 - RNA, 32 nt, Homo Sapiens
aauaacugauuuuuuucuuuauuucuuuucaa

SEQ ID NO: 70397 - RNA, 32 nt, Homo Sapiens
auagcaucuugcuaccugaggaacgcaaggag

SEQ ID NO: 70398 - RNA, 32 nt, Homo Sapiens
aaauaacaaaaauuagugacuguaauaauugg

SEQ ID NO: 70399 - RNA, 32 nt, Homo Sapiens
ucuucuguuugucugagucucaucucucugca

SEQ ID NO: 70400 - RNA, 32 nt, Homo Sapiens
gaagcccaggcggcccggggccuuggcuggca

SEQ ID NO: 70401 - RNA, 31 nt, Homo Sapiens
uacuaguccaaagaucacugaguuaaacugc

SEQ ID NO: 70402 - RNA, 32 nt, Homo Sapiens
ucauguucauuacuaaaacaaacagcaaaacu

SEQ ID NO: 70403 - RNA, 32 nt, Homo Sapiens
cgccuacagccacucacaccccggggacagga

SEQ ID NO: 70404 - RNA, 32 nt, Homo Sapiens
aucuuuucuuccggaucuucaucauggaaguu

SEQ ID NO: 70405 - RNA, 32 nt, Homo Sapiens
gaggagcugaagucggagggaagacagugcca

SEQ ID NO: 70406 - RNA, 32 nt, Homo Sapiens
ugcuacugaacauccaggaccacaaaagaaac

SEQ ID NO: 70407 - RNA, 32 nt, Homo Sapiens
guggagucaggugccucccagcccugccaaug

SEQ ID NO: 70408 - RNA, 32 nt, Homo Sapiens
agagaaggcuuauaaaaguaaaugcauuaagg

SEQ ID NO: 70409 - RNA, 32 nt, Homo Sapiens
aaacaauagaaagcuguagaagcuguagagau

SEQ ID NO: 70410 - RNA, 32 nt, Homo Sapiens
gccaagagaagcuggagcagagagcuggcaug

SEQ ID NO: 70411 - RNA, 32 nt, Homo Sapiens
guuuuuauaauucaguuuaaucaauaaacaug

SEQ ID NO: 70412 - RNA, 32 nt, Homo Sapiens
ccucucuuccuggaucgucuccagaacugcug

SEQ ID NO: 70413 - RNA, 32 nt, Homo Sapiens
augagaaguauuugcauaagaauguauggaau

SEQ ID NO: 70414 - RNA, 32 nt, Homo Sapiens
ugaaagaauaauauauuggguacaauagauua

SEQ ID NO: 70415 - RNA, 32 nt, Homo Sapiens
uuggauuuaaacauuuacuaagacaguaccua

SEQ ID NO: 70416 - RNA, 32 nt, Homo Sapiens
gcuuaaauuuggauuguuaguacaauucuagc

SEQ ID NO: 70417 - RNA, 32 nt, Homo Sapiens
accacaguuucuaaauucuuugaaaccacuuu

SEQ ID NO: 70418 - RNA, 32 nt, Homo Sapiens
uuuguaagauauuugcaguuuuucauuuuaaa

SEQ ID NO: 70419 - RNA, 32 nt, Homo Sapiens
aucuguacuuuuuucaaauauugaaugccuua

SEQ ID NO: 70420 - RNA, 32 nt, Homo Sapiens
uaaaaguucaauaaguaugccuuuaaauacgg

SEQ ID NO: 70421 - RNA, 32 nt, Homo Sapiens
cucuggcccccuccgcgcggcacagggcgggg

SEQ ID NO: 70422 - RNA, 32 nt, Homo Sapiens
ccaaagcuggagcccagaccguagcugaggcc

SEQ ID NO: 70423 - RNA, 30 nt, Homo Sapiens
gauacccuggacugaccugcccuggcuggc

SEQ ID NO: 70424 - RNA, 32 nt, Homo Sapiens
agaaaagauaucacaacucuauggaaaaugac

SEQ ID NO: 70425 - RNA, 32 nt, Homo Sapiens
cccgaaccucugcggcggccugcagggagguc

SEQ ID NO: 70426 - RNA, 32 nt, Homo Sapiens
ggcugaggagagaggaggcggcggcuuagcug

SEQ ID NO: 70427 - RNA, 32 nt, Homo Sapiens
cccggccccuccccaccuuucccaccccagcc

SEQ ID NO: 70428 - RNA, 32 nt, Homo Sapiens
ccccucugccccagcaaaugcccagcccaggc

SEQ ID NO: 70429 - RNA, 32 nt, Homo Sapiens
gagacagccccugguuuacaaacaccugacuu

SEQ ID NO: 70430 - RNA, 32 nt, Homo Sapiens
cugcuuagccccuaaaucugguaacuacuuug

SEQ ID NO: 70431 - RNA, 32 nt, Homo Sapiens
cggccuccucgcccgccgcgggaacccgagac

SEQ ID NO: 70432 - RNA, 32 nt, Homo Sapiens
ugguuauugccuuauuuugacugcauuucucu

SEQ ID NO: 70433 - RNA, 32 nt, Homo Sapiens
aggggcgagcgcgagaagccccuuccucggcg

SEQ ID NO: 70434 - RNA, 32 nt, Homo Sapiens
ccaucaggcaccuugaacuugcuggccucgug

SEQ ID NO: 70435 - RNA, 32 nt, Homo Sapiens
cgauaucuaccguccucgagacuucccugugu

SEQ ID NO: 70436 - RNA, 32 nt, Homo Sapiens
cucucaaggggaggcucaacagaacauugacc

SEQ ID NO: 70437 - RNA, 32 nt, Homo Sapiens
ccuacauagacacaccaagaaguggauguaua

SEQ ID NO: 70438 - RNA, 32 nt, Homo Sapiens
ggaaggggaaaggggaauggcugcuuuugaua

SEQ ID NO: 70439 - RNA, 32 nt, Homo Sapiens
cccaggaaccccggcacuccugcauucagcac

SEQ ID NO: 70440 - RNA, 32 nt, Homo Sapiens
uaaaggccugcuggcuuggggcgccugccucc

SEQ ID NO: 70441 - RNA, 32 nt, Homo Sapiens
ugaagccauccagucgcaagucagcagacagc

SEQ ID NO: 70442 - RNA, 32 nt, Homo Sapiens
aaaagccuacuaaagugcugugagauuggggu

SEQ ID NO: 70443 - RNA, 32 nt, Homo Sapiens
gcucccgccgcggaaaggcgucaugccgccca

SEQ ID NO: 70444 - RNA, 32 nt, Homo Sapiens
uacauguaaaaagccagcaaacuaucuucaaa

SEQ ID NO: 70445 - RNA, 32 nt, Homo Sapiens
ggaugucgccagcauuaccuuccacugccuuu

SEQ ID NO: 70446 - RNA, 32 nt, Homo Sapiens
agagaaacaagcauauugccucauggaugaaa

SEQ ID NO: 70447 - RNA, 32 nt, Homo Sapiens
gcaguggggaagccauggaggcugggaagggc

SEQ ID NO: 70448 - RNA, 32 nt, Homo Sapiens
ucaaaaaaaaacaaaacaaaaccaaguuccca

SEQ ID NO: 70449 - RNA, 32 nt, Homo Sapiens
gggaucuggugccccucuucuccuggauucac

SEQ ID NO: 70450 - RNA, 32 nt, Homo Sapiens
cuuuguuucagaggaugagaaauacuacuuac

SEQ ID NO: 70451 - RNA, 32 nt, Homo Sapiens
uggacaggagucagugucuggcuuuuuccucu

SEQ ID NO: 70452 - RNA, 32 nt, Homo Sapiens
ggucucgcugcgguggcacgaucgcggcucac

SEQ ID NO: 70453 - RNA, 32 nt, Homo Sapiens
gauggagucucacucuguaacccaggcuggag

SEQ ID NO: 70454 - RNA, 32 nt, Homo Sapiens
ccccuccucggacagcagcugcacccgcccac

SEQ ID NO: 70455 - RNA, 32 nt, Homo Sapiens
uccuuuuuuauacaggaaaaacaaaacaaaga

SEQ ID NO: 70456 - RNA, 32 nt, Homo Sapiens
acccugagggagggucagggaugugugacacc

SEQ ID NO: 70457 - RNA, 32 nt, Homo Sapiens
auccuggacaaagcuuggcugccggcuucauu

SEQ ID NO: 70458 - RNA, 32 nt, Homo Sapiens
agguguccuuuuuauaaggugcacuuuuggag

SEQ ID NO: 70459 - RNA, 32 nt, Homo Sapiens
aaucgaugucauuguauguuuucuuuaaaguu

SEQ ID NO: 70460 - RNA, 31 nt, Homo Sapiens
gggaggcggcacugugggggcugccggcagc

SEQ ID NO: 70461 - RNA, 32 nt, Homo Sapiens
uuccccgcugcccaaucauuugcaaugcccua

SEQ ID NO: 70462 - RNA, 32 nt, Homo Sapiens
agcuccgccucccggguucacgucauucuccu

SEQ ID NO: 70463 - RNA, 32 nt, Homo Sapiens
ucgcccgcguccccggccgcggcgugaugcgc

SEQ ID NO: 70464 - RNA, 32 nt, Homo Sapiens
gcacuuuguguauauauacacacauacauaug

SEQ ID NO: 70465 - RNA, 32 nt, Homo Sapiens
auaaaugcauauauugagucuuaaaaaaaaaa

SEQ ID NO: 70466 - RNA, 32 nt, Homo Sapiens
guaggggcaugguauaaggaaauaucauaaug

SEQ ID NO: 70467 - RNA, 32 nt, Homo Sapiens
aagaaggccaagggaauucagauucugaccag

SEQ ID NO: 70468 - RNA, 32 nt, Homo Sapiens
cggggccucccucugcugccugcugggacccu

SEQ ID NO: 70469 - RNA, 32 nt, Homo Sapiens
caguuguuauuuauucaaauuaucucacauua

SEQ ID NO: 70470 - RNA, 32 nt, Homo Sapiens
caucuacauuuuaguuuuuuuauucuauagau

SEQ ID NO: 70471 - RNA, 31 nt, Homo Sapiens
cucucauucuuuaaguuauagauuaaaauuc

SEQ ID NO: 70472 - RNA, 32 nt, Homo Sapiens
caugaggcgaggggcaaggugcuuaguccauc

SEQ ID NO: 70473 - RNA, 32 nt, Homo Sapiens
gcccuguugaacuggugggcccagggacugga

SEQ ID NO: 70474 - RNA, 32 nt, Homo Sapiens
gagcuuauucucuucuagcaguuucuugccac

SEQ ID NO: 70475 - RNA, 32 nt, Homo Sapiens
aaaauacaaaaauuagcugggcgugauguugc

SEQ ID NO: 70476 - RNA, 32 nt, Homo Sapiens
gccaaguuugguuuuuucccugaaucucugca

SEQ ID NO: 70477 - RNA, 32 nt, Homo Sapiens
auggaacuuugagcucugaaaagauggagaau

SEQ ID NO: 70478 - RNA, 32 nt, Homo Sapiens
uaaaauugaagcaacuacaacuucuccuuaga

SEQ ID NO: 70479 - RNA, 32 nt, Homo Sapiens
ggcuacauugacgagcaugagcuggaugcccu

SEQ ID NO: 70480 - RNA, 32 nt, Homo Sapiens
cugguacauuguccgucagcggugcugcuugg

SEQ ID NO: 70481 - RNA, 32 nt, Homo Sapiens
auuaaguagaguagcuucuuuaugauaaagac

SEQ ID NO: 70482 - RNA, 32 nt, Homo Sapiens
ucacuccucccaccccaccuaccucacagggu

SEQ ID NO: 70483 - RNA, 32 nt, Homo Sapiens
ggcuggcugaggugcaugggccccacacagga

SEQ ID NO: 70484 - RNA, 32 nt, Homo Sapiens
uucacuuugugauuauuucacuuuagaugcug

SEQ ID NO: 70485 - RNA, 32 nt, Homo Sapiens
ggugcuuccauugcuucauaaucuucaugaag

SEQ ID NO: 70486 - RNA, 32 nt, Homo Sapiens
ugugcucaaaaaugcauauuccugguggggau

SEQ ID NO: 70487 - RNA, 32 nt, Homo Sapiens
cuuuccagauugaaggauuaaucaccagaaga

SEQ ID NO: 70488 - RNA, 32 nt, Homo Sapiens
ucuccugugcuaagauuaagaagaccaacguc

SEQ ID NO: 70489 - RNA, 32 nt, Homo Sapiens
gccauuguugauauccacucucuucuuuccac

SEQ ID NO: 70490 - RNA, 32 nt, Homo Sapiens
ugaugcacagagcugccuacaccuagacacgu

SEQ ID NO: 70491 - RNA, 31 nt, Homo Sapiens
cggcggcagcgcacagccguugcaccagggu

SEQ ID NO: 70492 - RNA, 32 nt, Homo Sapiens
agggggcgcgguaccgggagggaacggggcgg

SEQ ID NO: 70493 - RNA, 32 nt, Homo Sapiens
ugugacugccccagccccauccuaccccaccc

SEQ ID NO: 70494 - RNA, 32 nt, Homo Sapiens
ugagcccuggcgccgccgcggccgcgguccca

SEQ ID NO: 70495 - RNA, 32 nt, Homo Sapiens
acccuggccuccuggggcaaugcuccucccuc

SEQ ID NO: 70496 - RNA, 32 nt, Homo Sapiens
gucuccgucccucuucucuccuccagcccgca

SEQ ID NO: 70497 - RNA, 32 nt, Homo Sapiens
gaugaccucuuuccuuguuuuguuuucaugcu

SEQ ID NO: 70498 - RNA, 32 nt, Homo Sapiens
ugguucugaugaugugccuggguggacauggc

SEQ ID NO: 70499 - RNA, 30 nt, Homo Sapiens
gaccgccucccuuugccgccggggacgcuu

SEQ ID NO: 70500 - RNA, 27 nt, Homo Sapiens
ugcugacuccuccucagccccucgugu

SEQ ID NO: 70501 - RNA, 32 nt, Homo Sapiens
auuuucuucuuugcugccuucucccuguggca

SEQ ID NO: 70502 - RNA, 32 nt, Homo Sapiens
uucugaauugagcauuccuuuaugauauucac

SEQ ID NO: 70503 - RNA, 32 nt, Homo Sapiens
caacaauaugagcaauaaguuaugauagcuuu

SEQ ID NO: 70504 - RNA, 32 nt, Homo Sapiens
gaagggccccgcugcgcaggaccagcgguucu

SEQ ID NO: 70505 - RNA, 32 nt, Homo Sapiens
cuucucaccacgguguaccgggauauuaaacc

SEQ ID NO: 70506 - RNA, 32 nt, Homo Sapiens
ucuauaaugaagaucaacagugaagaggaaag

SEQ ID NO: 70507 - RNA, 32 nt, Homo Sapiens
ccacaggugugagccaccacaccuggcuaauu

SEQ ID NO: 70508 - RNA, 32 nt, Homo Sapiens
gcugcccggaggagccgucgcgcgcccgcuuc

SEQ ID NO: 70509 - RNA, 32 nt, Homo Sapiens
uaaccucaauuuuuccaaaaacagcuucugac

SEQ ID NO: 70510 - RNA, 32 nt, Homo Sapiens
cuccccuuccccucccccuccccucccccucc

SEQ ID NO: 70511 - RNA, 32 nt, Homo Sapiens
caaaguucagcuuccuuccccaggucucugug

SEQ ID NO: 70512 - RNA, 32 nt, Homo Sapiens
cuuugcccucgcgacgccgccaccuccggaac

SEQ ID NO: 70513 - RNA, 32 nt, Homo Sapiens
ccuucuaugcccucuauccuaucauagauaac

SEQ ID NO: 70514 - RNA, 31 nt, Homo Sapiens
gcugccauggcucaauacaagggcgccgcga

SEQ ID NO: 70515 - RNA, 32 nt, Homo Sapiens
ccagccucggaaccugagcgcccuucugccug

SEQ ID NO: 70516 - RNA, 32 nt, Homo Sapiens
cccuuauugauuacuuaaguguuuacauuauu

SEQ ID NO: 70517 - RNA, 29 nt, Homo Sapiens
uuggagacuuauaaucaugguaaauauaa

SEQ ID NO: 70518 - RNA, 32 nt, Homo Sapiens
ugagccugcggugcauggcucaggccuuuucc

SEQ ID NO: 70519 - RNA, 32 nt, Homo Sapiens
ggauggccuuaggguuccuucugcggcuauug

SEQ ID NO: 70520 - RNA, 32 nt, Homo Sapiens
cuggccugacauucuuuaugaaauuuagaauu

SEQ ID NO: 70521 - RNA, 32 nt, Homo Sapiens
caguccccagggugggggugccaggagcccuu

SEQ ID NO: 70522 - RNA, 32 nt, Homo Sapiens
ggcuucaccaucuuggccaggcuggucuugaa

SEQ ID NO: 70523 - RNA, 32 nt, Homo Sapiens
uaugcuaaauuugugaguuagcaagacccugc

SEQ ID NO: 70524 - RNA, 32 nt, Homo Sapiens
gaggaggaggccggggaauggccgcggugugg

SEQ ID NO: 70525 - RNA, 32 nt, Homo Sapiens
cuucucccacugggcucccccauccugggcca

SEQ ID NO: 70526 - RNA, 32 nt, Homo Sapiens
uuccuaauugguuaacugacuucaucucacau

SEQ ID NO: 70527 - RNA, 32 nt, Homo Sapiens
ccagcuacuuaauugacuuaugcuuccuaguu

SEQ ID NO: 70528 - RNA, 32 nt, Homo Sapiens
uucagccagggcugaggucucaucugaaggcu

SEQ ID NO: 70529 - RNA, 32 nt, Homo Sapiens
uccucuuugggaagaggaaagggugugugaac

SEQ ID NO: 70530 - RNA, 30 nt, Homo Sapiens
agcgggcugaccgugccgagcggcagcugc

SEQ ID NO: 70531 - RNA, 32 nt, Homo Sapiens
gccuuccgcggguccugccuggcgaccccgac

SEQ ID NO: 70532 - RNA, 32 nt, Homo Sapiens
uguaacuacaugccaaggacaaacacauggac

SEQ ID NO: 70533 - RNA, 31 nt, Homo Sapiens
aauguuuuugaaauauucagagccgaacaga

SEQ ID NO: 70534 - RNA, 32 nt, Homo Sapiens
agcuuauauuuugugaagacugggaagugacu

SEQ ID NO: 70535 - RNA, 32 nt, Homo Sapiens
uuuuuguuaauggaaauaaaugucuccauucc

SEQ ID NO: 70536 - RNA, 32 nt, Homo Sapiens
uggugacuuuugucaccuggacacacucauuu

SEQ ID NO: 70537 - RNA, 32 nt, Homo Sapiens
ggcugggucagaggggaguuaagggacugcag

SEQ ID NO: 70538 - RNA, 32 nt, Homo Sapiens
ucuguugaaguaccacugacacuuaguaagcc

SEQ ID NO: 70539 - RNA, 32 nt, Homo Sapiens
gacagagucucauucugucacccaggcuggag

SEQ ID NO: 70540 - RNA, 32 nt, Homo Sapiens
gauggagucuuguucugucacccaggcuggag

SEQ ID NO: 70541 - RNA, 32 nt, Homo Sapiens
caucucugccaggaugucugugcccucaugua

SEQ ID NO: 70542 - RNA, 32 nt, Homo Sapiens
cugggcgggggagaggaaggggcggggcaggg

SEQ ID NO: 70543 - RNA, 32 nt, Homo Sapiens
cgcacggagcuggccaucaaggugugggugcc

SEQ ID NO: 70544 - RNA, 32 nt, Homo Sapiens
ggagauaaugaaagguaucaguuguguugagu

SEQ ID NO: 70545 - RNA, 32 nt, Homo Sapiens
gggaggaaagacuggugggaagugagcagcug

SEQ ID NO: 70546 - RNA, 32 nt, Homo Sapiens
agcugguguuauguauuuugcagggaaacagu

SEQ ID NO: 70547 - RNA, 32 nt, Homo Sapiens
cuggauucugggaggcaagaaaaggacaaaua

SEQ ID NO: 70548 - RNA, 32 nt, Homo Sapiens
gccagcacucuggaggcugcugcuaaguggau

SEQ ID NO: 70549 - RNA, 32 nt, Homo Sapiens
aagggaguuuaaaauuuguuguauacuguuca

SEQ ID NO: 70550 - RNA, 32 nt, Homo Sapiens
aaacuuguaaauuucuuuguauauaaacuagc

SEQ ID NO: 70551 - RNA, 32 nt, Homo Sapiens
ccagucuccuucccugaagcaagcccaggaga

SEQ ID NO: 70552 - RNA, 32 nt, Homo Sapiens
caccaaguuuggaaauacaauuguacauggag

SEQ ID NO: 70553 - RNA, 32 nt, Homo Sapiens
agacgaggugcgguggcuauaauccuagcacu

SEQ ID NO: 70554 - RNA, 32 nt, Homo Sapiens
cagcaauaaggcggcccccggaccucaccccg

SEQ ID NO: 70555 - RNA, 32 nt, Homo Sapiens
cucacugcaaccuccgccucccggguucaaga

SEQ ID NO: 70556 - RNA, 32 nt, Homo Sapiens
gggccuugccagcaaagcccagggccuucacu

SEQ ID NO: 70557 - RNA, 32 nt, Homo Sapiens
cucuuauuucugaguucucuauucuguuccgu

SEQ ID NO: 70558 - RNA, 32 nt, Homo Sapiens
ugugggagggcuucgcgaucuugggggaccca

SEQ ID NO: 70559 - RNA, 32 nt, Homo Sapiens
guuaguucaaccauauauuuauacugucuggg

SEQ ID NO: 70560 - RNA, 31 nt, Homo Sapiens
uuugugaaugacguacagguauucauuuauu

SEQ ID NO: 70561 - RNA, 32 nt, Homo Sapiens
cuccugaauugucuccucucccucugcaugug

SEQ ID NO: 70562 - RNA, 32 nt, Homo Sapiens
agcccucagcccuucccucguuuccaggccuc

SEQ ID NO: 70563 - RNA, 30 nt, Homo Sapiens
uuuuguucuguugccgccuaacuuucucau

SEQ ID NO: 70564 - RNA, 32 nt, Homo Sapiens
uuaacuugaugaugaugugcaggcacaaaucu

SEQ ID NO: 70565 - RNA, 32 nt, Homo Sapiens
aagaaacuauacauuuauuguuacgguaugaa

SEQ ID NO: 70566 - RNA, 32 nt, Homo Sapiens
ugcagcucugcgccuggcacagagacaggcuc

SEQ ID NO: 70567 - RNA, 32 nt, Homo Sapiens
guuguggcuacuagagaacaagagggaaagua

SEQ ID NO: 70568 - RNA, 32 nt, Homo Sapiens
ugaccauuaucaguuuuccagagcagcagaga

SEQ ID NO: 70569 - RNA, 32 nt, Homo Sapiens
augagcaagugccugcugcagguccaaacaca

SEQ ID NO: 70570 - RNA, 32 nt, Homo Sapiens
uuacuuaaguaagaaggaaguaguaauugaua

SEQ ID NO: 70571 - RNA, 32 nt, Homo Sapiens
cccuuuauuccacuuuagucccuucauuuuca

SEQ ID NO: 70572 - RNA, 28 nt, Homo Sapiens
uggauggugugucggcagcuccguccuu

SEQ ID NO: 70573 - RNA, 32 nt, Homo Sapiens
aauggggccucuucaugguugugugucaugac

SEQ ID NO: 70574 - RNA, 32 nt, Homo Sapiens
cuuuuccuaguuaagcccacuccagccccaga

SEQ ID NO: 70575 - RNA, 32 nt, Homo Sapiens
gcauggguggugccggccggcugugcccaaag

SEQ ID NO: 70576 - RNA, 32 nt, Homo Sapiens
cauuccugcgcauggugcagugccgcucugua

SEQ ID NO: 70577 - RNA, 32 nt, Homo Sapiens
agguuuuucgcgcuccucccuuuccuccuccu

SEQ ID NO: 70578 - RNA, 32 nt, Homo Sapiens
gacagccuggaaagauugggugccagcugcag

SEQ ID NO: 70579 - RNA, 32 nt, Homo Sapiens
gagacccgcaguuaacgcuugguguucuggcc

SEQ ID NO: 70580 - RNA, 32 nt, Homo Sapiens
ugugauuucuugcaugaaagacauguggcauc

SEQ ID NO: 70581 - RNA, 32 nt, Homo Sapiens
cagauucaagugcuuuuuccacuguuucccca

SEQ ID NO: 70582 - RNA, 32 nt, Homo Sapiens
cugcuucugcgccuucugcguuuggacauagg

SEQ ID NO: 70583 - RNA, 32 nt, Homo Sapiens
cauugcuuucaggcugccccuucugggucugu

SEQ ID NO: 70584 - RNA, 32 nt, Homo Sapiens
cuggaacuaaugaaacaaaacaucagaaccag

SEQ ID NO: 70585 - RNA, 32 nt, Homo Sapiens
ccgguuuguaggacccaaaaagaaguuaggcu

SEQ ID NO: 70586 - RNA, 32 nt, Homo Sapiens
agccugagggcuuagcacaucgccuaucauuu

SEQ ID NO: 70587 - RNA, 32 nt, Homo Sapiens
gcaugugugugagcuccuugaacgcacggagc

SEQ ID NO: 70588 - RNA, 32 nt, Homo Sapiens
aagauucucuaguccucucucaucuggugauc

SEQ ID NO: 70589 - RNA, 32 nt, Homo Sapiens
acuccgaaccccgcgcagccugggaaaggccu

SEQ ID NO: 70590 - RNA, 32 nt, Homo Sapiens
gacagaauacgacucaauucaccggcuacaac

SEQ ID NO: 70591 - RNA, 32 nt, Homo Sapiens
acugguugacucuuccucauuaucuuugaugc

SEQ ID NO: 70592 - RNA, 32 nt, Homo Sapiens
gccugugccgucgcucuuuccccucccugccc

SEQ ID NO: 70593 - RNA, 32 nt, Homo Sapiens
auaaaauguuauuaugucaaccagugaggcug

SEQ ID NO: 70594 - RNA, 32 nt, Homo Sapiens
ucccugacgcagagaccguugccucccccaca

SEQ ID NO: 70595 - RNA, 32 nt, Homo Sapiens
gcucguacgcggcuaguggguccucaguggau

SEQ ID NO: 70596 - RNA, 32 nt, Homo Sapiens
caccccugcccccaggggcuccuucccaggga

SEQ ID NO: 70597 - RNA, 32 nt, Homo Sapiens
aaggcaauuuccagagcccggaugccaguuuc

SEQ ID NO: 70598 - RNA, 32 nt, Homo Sapiens
aaaaaacaaaaauaaagucuaauaagaacuuu

SEQ ID NO: 70599 - RNA, 32 nt, Homo Sapiens
gcccccgcaucccacucccagggugucacgag

SEQ ID NO: 70600 - RNA, 32 nt, Homo Sapiens
guuugagccagacaggccuuucccagggaagc

SEQ ID NO: 70601 - RNA, 32 nt, Homo Sapiens
gcggcgcgcgcccuuccguggaggacagaggg

SEQ ID NO: 70602 - RNA, 32 nt, Homo Sapiens
guggaauggugcugugccccuugccagcaggc

SEQ ID NO: 70603 - RNA, 32 nt, Homo Sapiens
cgucgcugcagguccucuguuguccagguguu

SEQ ID NO: 70604 - RNA, 32 nt, Homo Sapiens
uaaaaauaugaguaacaucauaaaaauuagua

SEQ ID NO: 70605 - RNA, 32 nt, Homo Sapiens
gagagcuggaagagcagaaucuuacuuuguuu

SEQ ID NO: 70606 - RNA, 32 nt, Homo Sapiens
guucagcccacccacccccaugauuguaugaa

SEQ ID NO: 70607 - RNA, 32 nt, Homo Sapiens
accaacccgcggcgcagguggggcugcacaga

SEQ ID NO: 70608 - RNA, 32 nt, Homo Sapiens
uggaagcgcucgcggcccggcgccuggacggg

SEQ ID NO: 70609 - RNA, 32 nt, Homo Sapiens
ugggugugguggcaugcgcauguagucccagc

SEQ ID NO: 70610 - RNA, 32 nt, Homo Sapiens
gaagauuuacuauguauuugaaaggcuucccc

SEQ ID NO: 70611 - RNA, 32 nt, Homo Sapiens
uucacaacugaguucaaauuagguuccgccaa

SEQ ID NO: 70612 - RNA, 27 nt, Homo Sapiens
caauucuguggcuucagccuccggagu

SEQ ID NO: 70613 - RNA, 32 nt, Homo Sapiens
aauugucauuaaaugagagaugucuaguccuc

SEQ ID NO: 70614 - RNA, 32 nt, Homo Sapiens
aaagccacauuauuuuaugcuauacauucuau

SEQ ID NO: 70615 - RNA, 32 nt, Homo Sapiens
cuuuuuaaaugaaauuuauguuauuauccugc

SEQ ID NO: 70616 - RNA, 32 nt, Homo Sapiens
ccggagaggaucuggacuggcugggagugggg

SEQ ID NO: 70617 - RNA, 32 nt, Homo Sapiens
uagaugcugucuauaauagugaacagucaccc

SEQ ID NO: 70618 - RNA, 32 nt, Homo Sapiens
uuuuaaauauucuguucccaugucaaucagug

SEQ ID NO: 70619 - RNA, 30 nt, Homo Sapiens
cgcaggugcaggcgccgcugggcucgcggg

SEQ ID NO: 70620 - RNA, 32 nt, Homo Sapiens
acauuugaaaacaacucugaaugugcgguucg

SEQ ID NO: 70621 - RNA, 32 nt, Homo Sapiens
auuuugauaaauuuauaaauauauaaaauuau

SEQ ID NO: 70622 - RNA, 32 nt, Homo Sapiens
aauguucauuuucucuguaugaaugugauugg

SEQ ID NO: 70623 - RNA, 32 nt, Homo Sapiens
gcacaagguucaaguuuagauuuuaagcacuu

SEQ ID NO: 70624 - RNA, 32 nt, Homo Sapiens
uccugcugcccccggacugcuucagagcgagc

SEQ ID NO: 70625 - RNA, 32 nt, Homo Sapiens
acugcuuuuaccuuuuucucauguuuauauaa

SEQ ID NO: 70626 - RNA, 32 nt, Homo Sapiens
ggguaagaaaggaaauugcugaaagccaaaua

SEQ ID NO: 70627 - RNA, 32 nt, Homo Sapiens
uuugcugaagacuguaaaguuaauggaagaau

SEQ ID NO: 70628 - RNA, 30 nt, Homo Sapiens
aggguugagcugcugccgccgccgccucug

SEQ ID NO: 70629 - RNA, 32 nt, Homo Sapiens
aagauauacccaaauucccaguuccagcccgu

SEQ ID NO: 70630 - RNA, 32 nt, Homo Sapiens
agacucuucacagauuuuuaucuuaauugcaa

SEQ ID NO: 70631 - RNA, 32 nt, Homo Sapiens
ggcagcugaaguuugauucagaugggcacuuu

SEQ ID NO: 70632 - RNA, 32 nt, Homo Sapiens
agucuggcugaaugaaauacauuggugauaag

SEQ ID NO: 70633 - RNA, 31 nt, Homo Sapiens
agcaaggagccccagucucccgagcggguag

SEQ ID NO: 70634 - RNA, 32 nt, Homo Sapiens
ccggcucccugugcugccccaggaccaugaau

SEQ ID NO: 70635 - RNA, 32 nt, Homo Sapiens
gccuacccaagccugucuuucccagcgucaug

SEQ ID NO: 70636 - RNA, 32 nt, Homo Sapiens
ggaagaaggcccuacagauuugccaugucccc

SEQ ID NO: 70637 - RNA, 31 nt, Homo Sapiens
aguggggaaacacagaaccagggauggcucu

SEQ ID NO: 70638 - RNA, 32 nt, Homo Sapiens
cccaaggcgggggcauuggggacacagggaag

SEQ ID NO: 70639 - RNA, 32 nt, Homo Sapiens
agggcccuguauucaccuccacugcccccagg

SEQ ID NO: 70640 - RNA, 32 nt, Homo Sapiens
gacguaauagccauacaaaaaaugacucuauu

SEQ ID NO: 70641 - RNA, 32 nt, Homo Sapiens
agggaugauguaccaucaagguagacccaucu

SEQ ID NO: 70642 - RNA, 32 nt, Homo Sapiens
auuaguaggauuuuuguuuuguuuuuacaaau

SEQ ID NO: 70643 - RNA, 32 nt, Homo Sapiens
ggaaggcuucggcagagcugcgccgccgaggc

SEQ ID NO: 70644 - RNA, 32 nt, Homo Sapiens
acaugugagccaccgcgccuguccuugauuuu

SEQ ID NO: 70645 - RNA, 32 nt, Homo Sapiens
gguaauaaaaauuuauauuauaggcuucaaug

SEQ ID NO: 70646 - RNA, 30 nt, Homo Sapiens
aucauaccuguggcuccagaagcucuuggg

SEQ ID NO: 70647 - RNA, 32 nt, Homo Sapiens
acaaaauguauuauuacaucauccauguccug

SEQ ID NO: 70648 - RNA, 32 nt, Homo Sapiens
cucuagaagaggugcagacaucccgucugacu

SEQ ID NO: 70649 - RNA, 32 nt, Homo Sapiens
aaccguuuuaaauaaacucccccuggaaaaaa

SEQ ID NO: 70650 - RNA, 31 nt, Homo Sapiens
ggugccaugaaccagaaccauguaaaacggc

SEQ ID NO: 70651 - RNA, 32 nt, Homo Sapiens
gcccuucucuggaagaagaggcugggaccaaa

SEQ ID NO: 70652 - RNA, 32 nt, Homo Sapiens
aaaaaacuggagccaguccuuuugccaggaga

SEQ ID NO: 70653 - RNA, 32 nt, Homo Sapiens
uuauuaaucacaaagaagaacucuguaagcuu

SEQ ID NO: 70654 - RNA, 32 nt, Homo Sapiens
aaacgguucccggcccagucccguccugcagc

SEQ ID NO: 70655 - RNA, 32 nt, Homo Sapiens
cuccacggcagagcuuaauuauccuuuuaauu

SEQ ID NO: 70656 - RNA, 32 nt, Homo Sapiens
gcacgccucgcacccagcuguagagccccaug

SEQ ID NO: 70657 - RNA, 32 nt, Homo Sapiens
caccugagcugcaguguaacuuugaaacugga

SEQ ID NO: 70658 - RNA, 32 nt, Homo Sapiens
auuuuugauauucaaauuaauucuuacagcuu

SEQ ID NO: 70659 - RNA, 32 nt, Homo Sapiens
gcuacuuaagagaaauggcaaguuuugauaug

SEQ ID NO: 70660 - RNA, 32 nt, Homo Sapiens
uuacuggccggccccgcgcugcucuccuaaga

SEQ ID NO: 70661 - RNA, 32 nt, Homo Sapiens
uguuaacagagaagaaauauuugagucuggaa

SEQ ID NO: 70662 - RNA, 32 nt, Homo Sapiens
ggcugccgcggccccaggucccgcuucgagac

SEQ ID NO: 70663 - RNA, 32 nt, Homo Sapiens
guggagggcaggcgccugggcugggggcgggg

SEQ ID NO: 70664 - RNA, 30 nt, Homo Sapiens
gcgcggagacaguggccgccggcggcccaa

SEQ ID NO: 70665 - RNA, 32 nt, Homo Sapiens
aacuuaacaaaauuauuuuuggaaaaaucguu

SEQ ID NO: 70666 - RNA, 32 nt, Homo Sapiens
ccaggagggaggaggacgacgucccucccgaa

SEQ ID NO: 70667 - RNA, 32 nt, Homo Sapiens
ccugaaaucccugccucuggcuuccuaaaccc

SEQ ID NO: 70668 - RNA, 32 nt, Homo Sapiens
accagccuggacaacauagugagaccucgucu

SEQ ID NO: 70669 - RNA, 32 nt, Homo Sapiens
gagcggcggaaccucccuccccagcucugagc

SEQ ID NO: 70670 - RNA, 30 nt, Homo Sapiens
acaggguuucaccauguuagccaggcugac

SEQ ID NO: 70671 - RNA, 32 nt, Homo Sapiens
gggguggaacuugcacagcaaaaacaaacaaa

SEQ ID NO: 70672 - RNA, 32 nt, Homo Sapiens
uugagaacuugaugcauaaaauuugcaugacu

SEQ ID NO: 70673 - RNA, 32 nt, Homo Sapiens
cacuugaacucuuuucuuguuuaucuagcaua

SEQ ID NO: 70674 - RNA, 32 nt, Homo Sapiens
auaaagccuuuucauguucuuuuacaucucuu

SEQ ID NO: 70675 - RNA, 32 nt, Homo Sapiens
gcagcaccagggccggccgccaccgccucuag

SEQ ID NO: 70676 - RNA, 32 nt, Homo Sapiens
gauucuugauucaaauccgagguaucacacau

SEQ ID NO: 70677 - RNA, 32 nt, Homo Sapiens
gacccccaguguucuugccugugaccucuuau

SEQ ID NO: 70678 - RNA, 32 nt, Homo Sapiens
gaugcgcugguagaugcauagucaggaacuuu

SEQ ID NO: 70679 - RNA, 32 nt, Homo Sapiens
gaauuagauaacuauaaggaaauuuacuaaag

SEQ ID NO: 70680 - RNA, 32 nt, Homo Sapiens
gccucgcuggccccgcgccccggagcccuaua

SEQ ID NO: 70681 - RNA, 32 nt, Homo Sapiens
ugggcacggagcuuccugccucugcuccgaca

SEQ ID NO: 70682 - RNA, 32 nt, Homo Sapiens
uaaaggcaaaccauuacugccaaacaucucac

SEQ ID NO: 70683 - RNA, 32 nt, Homo Sapiens
gcagcugaucaauuuguauuuauuuauuuuaa

SEQ ID NO: 70684 - RNA, 31 nt, Homo Sapiens
cuguguaauggaauuaaagugcuuuugcaca

SEQ ID NO: 70685 - RNA, 32 nt, Homo Sapiens
gacuccagcccaccucuucagagcagcucugc

SEQ ID NO: 70686 - RNA, 32 nt, Homo Sapiens
ugggcuucggggacggcggggaggggagccgg

SEQ ID NO: 70687 - RNA, 32 nt, Homo Sapiens
uuccugcggggcucagcccccuccaggaugca

SEQ ID NO: 70688 - RNA, 31 nt, Homo Sapiens
aguggaguggcuauucacagagccuguucug

SEQ ID NO: 70689 - RNA, 32 nt, Homo Sapiens
ccagcucuuccgcuccucucacagccgccaga

SEQ ID NO: 70690 - RNA, 32 nt, Homo Sapiens
ugauggcucucccuccucccuccccauuucau

SEQ ID NO: 70691 - RNA, 32 nt, Homo Sapiens
uugcuccccugggucaccuccucccugcucgc

SEQ ID NO: 70692 - RNA, 32 nt, Homo Sapiens
uuguauuuucaauuuuuuuuuaaaacugcuuu

SEQ ID NO: 70693 - RNA, 32 nt, Homo Sapiens
aauuuccuuucugccugauuagccaaauaaau

SEQ ID NO: 70694 - RNA, 32 nt, Homo Sapiens
uucuucugucaagcuuacuacagugaaagaau

SEQ ID NO: 70695 - RNA, 32 nt, Homo Sapiens
cucccagguucaagugauucuucuugccucag

SEQ ID NO: 70696 - RNA, 32 nt, Homo Sapiens
cuaggugaagagagggcaggggagcccacauc

SEQ ID NO: 70697 - RNA, 32 nt, Homo Sapiens
uaggggcauggugacccuugacucaccauccc

SEQ ID NO: 70698 - RNA, 29 nt, Homo Sapiens
cagugugugggacagagguguucggcugg

SEQ ID NO: 70699 - RNA, 32 nt, Homo Sapiens
cacagccguaccugccugaggacaaaggcuug

SEQ ID NO: 70700 - RNA, 32 nt, Homo Sapiens
uuccucccaaguuccuucacugucccggcuuu

SEQ ID NO: 70701 - RNA, 32 nt, Homo Sapiens
ggcugugagaggggccggcgccgcuuuguccu

SEQ ID NO: 70702 - RNA, 32 nt, Homo Sapiens
ucccgggaaaagggcuuugccauggagaagga

SEQ ID NO: 70703 - RNA, 32 nt, Homo Sapiens
agacggaagauaaugacauacaauccaaaauu

SEQ ID NO: 70704 - RNA, 32 nt, Homo Sapiens
caccauuuuuaaaacucuguaugcuagcacac

SEQ ID NO: 70705 - RNA, 32 nt, Homo Sapiens
agcuguuacaggauguuuguugccagaaaagg

SEQ ID NO: 70706 - RNA, 32 nt, Homo Sapiens
ggagggggaggacauggcaccauuccagaaac

SEQ ID NO: 70707 - RNA, 32 nt, Homo Sapiens
accucccacuccgcccucugaggaugguacca

SEQ ID NO: 70708 - RNA, 32 nt, Homo Sapiens
agcacuuugaaaauauuucuauguaaauuauu

SEQ ID NO: 70709 - RNA, 32 nt, Homo Sapiens
gggaggucuccaugugguccgagugaggugag

SEQ ID NO: 70710 - RNA, 32 nt, Homo Sapiens
cuacuugaccucugagccgaggugggccggaa

SEQ ID NO: 70711 - RNA, 30 nt, Homo Sapiens
ggcagugcgaggcgcgcggggcacggaggg

SEQ ID NO: 70712 - RNA, 32 nt, Homo Sapiens
uguccccgcuccccuaacaggugcgguuccuc

SEQ ID NO: 70713 - RNA, 32 nt, Homo Sapiens
guuccgcagcuguaggcaccugucguccugcc

SEQ ID NO: 70714 - RNA, 32 nt, Homo Sapiens
cugcucaaccuggcagaaggguuauuggacug

SEQ ID NO: 70715 - RNA, 32 nt, Homo Sapiens
uauuauuauuuuuccuuuaaugauggugcuaa

SEQ ID NO: 70716 - RNA, 32 nt, Homo Sapiens
acauuaacucauuagacuggaacuugaacuga

SEQ ID NO: 70717 - RNA, 32 nt, Homo Sapiens
aaucuacacaucauuucauuaaaaauugugcc

SEQ ID NO: 70718 - RNA, 32 nt, Homo Sapiens
ccugcugcuaccccuggucccgagggcuggga

SEQ ID NO: 70719 - RNA, 32 nt, Homo Sapiens
ccgccccgcgccccgcgcagccugcaggccuu

SEQ ID NO: 70720 - RNA, 32 nt, Homo Sapiens
caugaaugaugauauucugccuggccugucau

SEQ ID NO: 70721 - RNA, 32 nt, Homo Sapiens
gccagucccucccccuagaccccgcgccucug

SEQ ID NO: 70722 - RNA, 32 nt, Homo Sapiens
uggguauaggcacaaggcugaugccgagagag

SEQ ID NO: 70723 - RNA, 32 nt, Homo Sapiens
ggagucaggaauggagagaaggguaauggugu

SEQ ID NO: 70724 - RNA, 32 nt, Homo Sapiens
gaucaugaggaucagguggaucaugaggauca

SEQ ID NO: 70725 - RNA, 32 nt, Homo Sapiens
uucaugcaggacuuaauuauugcuuuuaaaaa

SEQ ID NO: 70726 - RNA, 32 nt, Homo Sapiens
ucccucaguaauauuucuuagagaugguuaaa

SEQ ID NO: 70727 - RNA, 32 nt, Homo Sapiens
accaagaugaguuuuuaaauaaugaauauuau

SEQ ID NO: 70728 - RNA, 32 nt, Homo Sapiens
cauuauucuagggucuuacucuuuguaugaug

SEQ ID NO: 70729 - RNA, 32 nt, Homo Sapiens
gucauuuauuaccauauacuacagcuuugugg

SEQ ID NO: 70730 - RNA, 32 nt, Homo Sapiens
guuuauaaugcacaacucgcaaauauaaauug

SEQ ID NO: 70731 - RNA, 32 nt, Homo Sapiens
auuuuuguuuccauuuucuucaucucgaaggu

SEQ ID NO: 70732 - RNA, 32 nt, Homo Sapiens
caaauuuucuaaaagacacaucucuugaaaaa

SEQ ID NO: 70733 - RNA, 32 nt, Homo Sapiens
guuugacuuccacccccaaugguuuuucacuc

SEQ ID NO: 70734 - RNA, 32 nt, Homo Sapiens
gcccuccgagggugcccgagugcggcguggag

SEQ ID NO: 70735 - RNA, 32 nt, Homo Sapiens
agacagggaucccgggcugcugccgcuaccaa

SEQ ID NO: 70736 - RNA, 32 nt, Homo Sapiens
gcgggcgaguccccggcuccuccagcuccuuc

SEQ ID NO: 70737 - RNA, 32 nt, Homo Sapiens
uuucacaaaaauaucuuuugaaauuggcuuug

SEQ ID NO: 70738 - RNA, 32 nt, Homo Sapiens
ccaucccgggagagcccucccugguccccaua

SEQ ID NO: 70739 - RNA, 32 nt, Homo Sapiens
cccagaggagaugggggcuucugaagauggac

SEQ ID NO: 70740 - RNA, 32 nt, Homo Sapiens
uguaagccacuacuuguguuuaccuuuucauu

SEQ ID NO: 70741 - RNA, 32 nt, Homo Sapiens
uauggaaagcagcaggaacugcucuuaaaaac

SEQ ID NO: 70742 - RNA, 32 nt, Homo Sapiens
cgcaggcgcccuggggacccgguagcggcggu

SEQ ID NO: 70743 - RNA, 32 nt, Homo Sapiens
uugcgcggcugauguuuagaacgccuagucaa

SEQ ID NO: 70744 - RNA, 32 nt, Homo Sapiens
cuuggauguaggacaauggaagaguuagaugc

SEQ ID NO: 70745 - RNA, 32 nt, Homo Sapiens
gaggguccgcggcuucaugaagucgcagagac

SEQ ID NO: 70746 - RNA, 32 nt, Homo Sapiens
uauggcaguccugguccuuccacugugcaccu

SEQ ID NO: 70747 - RNA, 32 nt, Homo Sapiens
ucacaagauuuaccaugauaauaauagguuaa

SEQ ID NO: 70748 - RNA, 32 nt, Homo Sapiens
ccgcuccccuccccuacguccugcacuuucuc

SEQ ID NO: 70749 - RNA, 32 nt, Homo Sapiens
cagaaugggggucagaggcagaaggacagauc

SEQ ID NO: 70750 - RNA, 32 nt, Homo Sapiens
cuuaggacucucagcucugagcaucccuggca

SEQ ID NO: 70751 - RNA, 28 nt, Homo Sapiens
accaugagcaaugaaucuuguuuaccuu

SEQ ID NO: 70752 - RNA, 32 nt, Homo Sapiens
uuuucuacacacucagccacaaagccccccag

SEQ ID NO: 70753 - RNA, 32 nt, Homo Sapiens
ccaagaggagaugugaugacaauugucuuuug

SEQ ID NO: 70754 - RNA, 32 nt, Homo Sapiens
ucugugagagagauaugaaauauuuuauaguu

SEQ ID NO: 70755 - RNA, 32 nt, Homo Sapiens
gagucaaugagcauccauccugauggccacau

SEQ ID NO: 70756 - RNA, 32 nt, Homo Sapiens
gggcaugggcgggggcccgagcagggguggag

SEQ ID NO: 70757 - RNA, 32 nt, Homo Sapiens
uguacuuuaaaauaaaauacuucuaauggaaa

SEQ ID NO: 70758 - RNA, 32 nt, Homo Sapiens
ucccuucagcggggcucugcucucuccccgcc

SEQ ID NO: 70759 - RNA, 32 nt, Homo Sapiens
uguuugcagaaucuccggccugugaaacugug

SEQ ID NO: 70760 - RNA, 32 nt, Homo Sapiens
uucuggggacgccugguucguucgcccaccag

SEQ ID NO: 70761 - RNA, 32 nt, Homo Sapiens
acugcuauucccuaauccuccuccuauaagau

SEQ ID NO: 70762 - RNA, 32 nt, Homo Sapiens
gggagagcaggcugcacagcuguguguggaag

SEQ ID NO: 70763 - RNA, 30 nt, Homo Sapiens
gucuagcgcgcgccgcgcagacgcccccgg

SEQ ID NO: 70764 - RNA, 32 nt, Homo Sapiens
guaccggcgcccacgacuccccggaccccgac

SEQ ID NO: 70765 - RNA, 32 nt, Homo Sapiens
ccaggguacuugagggccugagguagggggau

SEQ ID NO: 70766 - RNA, 32 nt, Homo Sapiens
uacgaucaaauuguacuagugucugcaggguu

SEQ ID NO: 70767 - RNA, 32 nt, Homo Sapiens
guacagaaauauacuggccuagcagaggcaaa

SEQ ID NO: 70768 - RNA, 32 nt, Homo Sapiens
ccugcugugcugcuuuucccccacaugaggag

SEQ ID NO: 70769 - RNA, 32 nt, Homo Sapiens
agccucagcaacccagggagaggacagaaaug

SEQ ID NO: 70770 - RNA, 32 nt, Homo Sapiens
guguuauuuggaaccuuguuuuggacaguuua

SEQ ID NO: 70771 - RNA, 32 nt, Homo Sapiens
gaagaugaaccagucuucuuccccucacuacc

SEQ ID NO: 70772 - RNA, 32 nt, Homo Sapiens
uuugaucuuugggagacagcauuuauuaacca

SEQ ID NO: 70773 - RNA, 32 nt, Homo Sapiens
auuuuaguauguuaaacuugguuacuucuuuc

SEQ ID NO: 70774 - RNA, 32 nt, Homo Sapiens
gggacagugaugggcauuccugagagaacugg

SEQ ID NO: 70775 - RNA, 32 nt, Homo Sapiens
cugcgggaauccagcgcuuauucgcugacccu

SEQ ID NO: 70776 - RNA, 32 nt, Homo Sapiens
aaaagcauuggauccaagccauauauugaaau

SEQ ID NO: 70777 - RNA, 32 nt, Homo Sapiens
augagaaguggaacuuaagugguuucccuggu

SEQ ID NO: 70778 - RNA, 32 nt, Homo Sapiens
agacccccauccccauguccuuccagcccgug

SEQ ID NO: 70779 - RNA, 32 nt, Homo Sapiens
agcaagagugggaggcgcgcgcggaggccgcg

SEQ ID NO: 70780 - RNA, 32 nt, Homo Sapiens
guccagucauuccacacucuuaaaaggguuuc

SEQ ID NO: 70781 - RNA, 32 nt, Homo Sapiens
aaguauccucuagcggaccagacgaguggaaa

SEQ ID NO: 70782 - RNA, 32 nt, Homo Sapiens
aacagggggacagagcgccuuccaccugcggc

SEQ ID NO: 70783 - RNA, 32 nt, Homo Sapiens
gauuaaccaaaggccacccugacuuuguuuuu

SEQ ID NO: 70784 - RNA, 32 nt, Homo Sapiens
aagugugcucaagaucuuugccuguaagcuug

SEQ ID NO: 70785 - RNA, 27 nt, Homo Sapiens
ugcugcuuuuacuucagccacuucuga

SEQ ID NO: 70786 - RNA, 32 nt, Homo Sapiens
gcggcagggcagggcggggagcuccgcgcacc

SEQ ID NO: 70787 - RNA, 32 nt, Homo Sapiens
gauuugagucucucauguggaugcauuaguca

SEQ ID NO: 70788 - RNA, 32 nt, Homo Sapiens
agaacauucagugaauacaacuucaucaaaga

SEQ ID NO: 70789 - RNA, 32 nt, Homo Sapiens
aaugagcaaggagaaaaaaaccaccaagaaca

SEQ ID NO: 70790 - RNA, 32 nt, Homo Sapiens
gcugcuccccaugcccuucccacuuuuuggaa

SEQ ID NO: 70791 - RNA, 32 nt, Homo Sapiens
ccagcggacagggacccccuuccccggcuccc

SEQ ID NO: 70792 - RNA, 32 nt, Homo Sapiens
aaauauuacugaucaauucaguuaguggccau

SEQ ID NO: 70793 - RNA, 32 nt, Homo Sapiens
uuuagguuguugauuuuuuuuaauuaacuauu

SEQ ID NO: 70794 - RNA, 32 nt, Homo Sapiens
uuccccuccuccuguuggauagaugaagaggc

SEQ ID NO: 70795 - RNA, 32 nt, Homo Sapiens
cagagcucuggccagcugccucuucuuuaacu

SEQ ID NO: 70796 - RNA, 32 nt, Homo Sapiens
cucucuuacaaguuuucaaacacacauaagaa

SEQ ID NO: 70797 - RNA, 32 nt, Homo Sapiens
aaggcugcaggcacugguugcagacgucuuua

SEQ ID NO: 70798 - RNA, 32 nt, Homo Sapiens
ugcgucgccgcaguugauaagagugucuaccu

SEQ ID NO: 70799 - RNA, 32 nt, Homo Sapiens
uuacuuuacaauguucccuuaagcaaaauuga

SEQ ID NO: 70800 - RNA, 32 nt, Homo Sapiens
acuaaagggacuucuuuuuugauacuuuucuc

SEQ ID NO: 70801 - RNA, 32 nt, Homo Sapiens
uucagaugcuuuucuuuuuuuaauggugaggg

SEQ ID NO: 70802 - RNA, 32 nt, Homo Sapiens
cagccaacuuaguugcagacaucaccuccuua

SEQ ID NO: 70803 - RNA, 32 nt, Homo Sapiens
gggggaagggaagagaaaaucgacucuucuuu

SEQ ID NO: 70804 - RNA, 32 nt, Homo Sapiens
gcagcaggcugccugcuguuucccggggagau

SEQ ID NO: 70805 - RNA, 32 nt, Homo Sapiens
agaguagcuuuaggaagagaauaaacacauac

SEQ ID NO: 70806 - RNA, 32 nt, Homo Sapiens
ugcaggcccgagggagcagccaucacaaacuc

SEQ ID NO: 70807 - RNA, 32 nt, Homo Sapiens
augcaguccugugccagggcguuggggcugcu

SEQ ID NO: 70808 - RNA, 32 nt, Homo Sapiens
cugggggagagcuugcagccccugccccgggc

SEQ ID NO: 70809 - RNA, 31 nt, Homo Sapiens
ccucaggugaucugccugccucggccuccca

SEQ ID NO: 70810 - RNA, 32 nt, Homo Sapiens
aggaauucuuugaagaacucugcauugagaau

SEQ ID NO: 70811 - RNA, 32 nt, Homo Sapiens
cauugugagaauuuuaauacuaauggaauguu

SEQ ID NO: 70812 - RNA, 32 nt, Homo Sapiens
gccaccgcccgcgccgcgaccggccggugaag

SEQ ID NO: 70813 - RNA, 32 nt, Homo Sapiens
uccuucccuccccgcuuucugaaccucucaac

SEQ ID NO: 70814 - RNA, 32 nt, Homo Sapiens
gaccugucucuccucagucuauuccugucaua

SEQ ID NO: 70815 - RNA, 32 nt, Homo Sapiens
uauaaacauguaaaaauagguuguauuuuacu

SEQ ID NO: 70816 - RNA, 32 nt, Homo Sapiens
ggcucaacaccuguagucccagcacucuggga

SEQ ID NO: 70817 - RNA, 32 nt, Homo Sapiens
acaccacccagcaggcgcuggugcuccuucug

SEQ ID NO: 70818 - RNA, 32 nt, Homo Sapiens
gaagcugccccgaggcuggcagagcgcccagc

SEQ ID NO: 70819 - RNA, 32 nt, Homo Sapiens
uuauauaguuuaggaguaagagucuuguuuuu

SEQ ID NO: 70820 - RNA, 32 nt, Homo Sapiens
acaugcaaaccacucagauaaaacagcuauuc

SEQ ID NO: 70821 - RNA, 32 nt, Homo Sapiens
gagacugagaaaccacaaaguauuguuucuaa

SEQ ID NO: 70822 - RNA, 32 nt, Homo Sapiens
uuuuuggcagcguggcagcuuugcaaggggcu

SEQ ID NO: 70823 - RNA, 32 nt, Homo Sapiens
cugggggcggccacagacggccucgaaaccac

SEQ ID NO: 70824 - RNA, 32 nt, Homo Sapiens
ggucagacuuucccuuuuccggccagcuuccu

SEQ ID NO: 70825 - RNA, 32 nt, Homo Sapiens
ugggacaagugagggaggagggggccgauucu

SEQ ID NO: 70826 - RNA, 32 nt, Homo Sapiens
uggugcauauguuccagauggcagaugcuguc

SEQ ID NO: 70827 - RNA, 32 nt, Homo Sapiens
ugcggccgcgcccccucccccuccagccgggu

SEQ ID NO: 70828 - RNA, 31 nt, Homo Sapiens
uugguggugaggaccaucagagccuaaauuc

SEQ ID NO: 70829 - RNA, 32 nt, Homo Sapiens
gaggcggcggucccggccucgcgucccggaug

SEQ ID NO: 70830 - RNA, 32 nt, Homo Sapiens
gggcaggggggcugaccccccaccaccucccu

SEQ ID NO: 70831 - RNA, 32 nt, Homo Sapiens
aaugcuuaaauuauauuucccuuuaggcugug

SEQ ID NO: 70832 - RNA, 32 nt, Homo Sapiens
ccgaccgccugcccacuauggacugcaaccaa

SEQ ID NO: 70833 - RNA, 32 nt, Homo Sapiens
agucuggcccuccugucgucugguugguguug

SEQ ID NO: 70834 - RNA, 32 nt, Homo Sapiens
uuuuccaaguggauaagcccaggccccaugga

SEQ ID NO: 70835 - RNA, 32 nt, Homo Sapiens
cuccauggucuagucaauuuuguacaauuagg

SEQ ID NO: 70836 - RNA, 32 nt, Homo Sapiens
uguaaucaguuaugccguauaggaugucagac

SEQ ID NO: 70837 - RNA, 32 nt, Homo Sapiens
guuacccaggacagcucugcacugauugcuuu

SEQ ID NO: 70838 - RNA, 32 nt, Homo Sapiens
uuucuaucaguucgacaugaaguccacaucac

SEQ ID NO: 70839 - RNA, 32 nt, Homo Sapiens
gucucguguguuguuacagaggugaugugcuu

SEQ ID NO: 70840 - RNA, 32 nt, Homo Sapiens
uguguaucugggaguucucacuuucuagccag

SEQ ID NO: 70841 - RNA, 32 nt, Homo Sapiens
auuuucaggguucuccauuacaguguaaaaau

SEQ ID NO: 70842 - RNA, 32 nt, Homo Sapiens
ucucuucagaaauaaaacuuuaucacuugcuu

SEQ ID NO: 70843 - RNA, 32 nt, Homo Sapiens
ugaaaaaccuauuugcuugauuaccauuccca

SEQ ID NO: 70844 - RNA, 32 nt, Homo Sapiens
agcccgcccgcacccaccauggccacaguuca

SEQ ID NO: 70845 - RNA, 32 nt, Homo Sapiens
uucaccagcaagauguacagaacgccuguguu

SEQ ID NO: 70846 - RNA, 31 nt, Homo Sapiens
cacugcacuccagucugggugacagcaagac

SEQ ID NO: 70847 - RNA, 32 nt, Homo Sapiens
ucuaaugauaauuguaccuuuaucuuucaaaa

SEQ ID NO: 70848 - RNA, 32 nt, Homo Sapiens
agcacucccccgucuagcagccaggcagggcg

SEQ ID NO: 70849 - RNA, 27 nt, Homo Sapiens
gucuguuccuucuugagccugccugca

SEQ ID NO: 70850 - RNA, 32 nt, Homo Sapiens
uucugaacugucauccauauaucaccgaugau

SEQ ID NO: 70851 - RNA, 32 nt, Homo Sapiens
gucaacuccgcgggacacgaggacacgggacg

SEQ ID NO: 70852 - RNA, 32 nt, Homo Sapiens
auguuaaacuguaauuuguauuuaaaaagcau

SEQ ID NO: 70853 - RNA, 32 nt, Homo Sapiens
uuuuguuauuuuuucagacugugcaauacuua

SEQ ID NO: 70854 - RNA, 32 nt, Homo Sapiens
gauuugcuaauuuuuccaacucagcauucacc

SEQ ID NO: 70855 - RNA, 32 nt, Homo Sapiens
ugcuccuuucuccacaccccccuuggccuccc

SEQ ID NO: 70856 - RNA, 32 nt, Homo Sapiens
ucuuuucuuuugcucaucuuagaccacagacu

SEQ ID NO: 70857 - RNA, 32 nt, Homo Sapiens
cccucagaugaccucauaucaccggaugcuau

SEQ ID NO: 70858 - RNA, 32 nt, Homo Sapiens
gcaaaaugucucugcgugucuuuugccauuuu

SEQ ID NO: 70859 - RNA, 32 nt, Homo Sapiens
caggaaauugcaaagaaaauucucaagugaua

SEQ ID NO: 70860 - RNA, 32 nt, Homo Sapiens
cgagugugcgcgcgcucucgcuacccggcggg

SEQ ID NO: 70861 - RNA, 32 nt, Homo Sapiens
ugcugcuucucccuggggaggaccccugcccu

SEQ ID NO: 70862 - RNA, 32 nt, Homo Sapiens
uggcuuuguaauuauaauuuuuuccuuauuua

SEQ ID NO: 70863 - RNA, 32 nt, Homo Sapiens
ggaagaguuuggaauucagaauccauugaggc

SEQ ID NO: 70864 - RNA, 32 nt, Homo Sapiens
cagaaaaauggcagccgccgcuccggacucac

SEQ ID NO: 70865 - RNA, 32 nt, Homo Sapiens
acuauucuuacacacauacacacacacacaca

SEQ ID NO: 70866 - RNA, 31 nt, Homo Sapiens
cagccuuggcugugccugccccugcccucuc

SEQ ID NO: 70867 - RNA, 32 nt, Homo Sapiens
uccuuucucuaaaagaaaaauaguuugauagu

SEQ ID NO: 70868 - RNA, 32 nt, Homo Sapiens
ccaugucuacuaaaauacaaaaaauuagccag

SEQ ID NO: 70869 - RNA, 32 nt, Homo Sapiens
cgcuaucgccuggccgugggugccggagcggc

SEQ ID NO: 70870 - RNA, 32 nt, Homo Sapiens
ucgcgugggcugcccucccgggcccgcagugg

SEQ ID NO: 70871 - RNA, 32 nt, Homo Sapiens
cuccaggucaggaggggagggugcugggccug

SEQ ID NO: 70872 - RNA, 32 nt, Homo Sapiens
ccaacggcucugcuaucauuuguacucgggaa

SEQ ID NO: 70873 - RNA, 32 nt, Homo Sapiens
aaggucugagcggcccggguccugccgggcug

SEQ ID NO: 70874 - RNA, 32 nt, Homo Sapiens
uccuggccaggcugcuccugcccuugggcgaa

SEQ ID NO: 70875 - RNA, 32 nt, Homo Sapiens
caagaauuacagaagacaaaaauacuaaugca

SEQ ID NO: 70876 - RNA, 32 nt, Homo Sapiens
acuuauccccaccaccuggggacccccuuguu

SEQ ID NO: 70877 - RNA, 32 nt, Homo Sapiens
auugcuucagcuaggcucccccugcccuauuu

SEQ ID NO: 70878 - RNA, 32 nt, Homo Sapiens
caaccgggcuggaagugcgguugagcucucug

SEQ ID NO: 70879 - RNA, 32 nt, Homo Sapiens
gcugaggcgggcccugugcugggggugguaga

SEQ ID NO: 70880 - RNA, 32 nt, Homo Sapiens
agagcgccgucuccacaagaguuuacaaauga

SEQ ID NO: 70881 - RNA, 32 nt, Homo Sapiens
aaauaucuauaagugcauuaugcugaaaaaua

SEQ ID NO: 70882 - RNA, 23 nt, Homo Sapiens
ggccggggaggcggaggcucagu

SEQ ID NO: 70883 - RNA, 32 nt, Homo Sapiens
gagcaccuucccuuuuuucagccaacugcucg

SEQ ID NO: 70884 - RNA, 32 nt, Homo Sapiens
ugggaagaggggccagaaaggcagcuggcagc

SEQ ID NO: 70885 - RNA, 32 nt, Homo Sapiens
agcucauuccucacaauggucuucccaggccc

SEQ ID NO: 70886 - RNA, 29 nt, Homo Sapiens
gguugauaaaguuuccauauuuuucugga

SEQ ID NO: 70887 - RNA, 32 nt, Homo Sapiens
uguuucuuaauucuccucuccuuucuuaccua

SEQ ID NO: 70888 - RNA, 32 nt, Homo Sapiens
cucuuccugucccacacucugccucuguuaga

SEQ ID NO: 70889 - RNA, 32 nt, Homo Sapiens
aguggcaggagccaugcaugauucuuggcuga

SEQ ID NO: 70890 - RNA, 32 nt, Homo Sapiens
augauuuagauaugugucaacaauuaaugauc

SEQ ID NO: 70891 - RNA, 32 nt, Homo Sapiens
aagcggcggcgccgggaagcaggcauggagag

SEQ ID NO: 70892 - RNA, 32 nt, Homo Sapiens
aaaacugaagaaggaggaauggcuguggggcu

SEQ ID NO: 70893 - RNA, 32 nt, Homo Sapiens
ucccaagacaccuuucagccucuuuacaaccu

SEQ ID NO: 70894 - RNA, 32 nt, Homo Sapiens
cggcggcgaggaggaggcgagaaggaguugga

SEQ ID NO: 70895 - RNA, 30 nt, Homo Sapiens
ucggugauccgcggcggcggcagcggcgcu

SEQ ID NO: 70896 - RNA, 32 nt, Homo Sapiens
gggcggaggaaggaucguuauacgucuucaga

SEQ ID NO: 70897 - RNA, 32 nt, Homo Sapiens
uucuuccggacaguagacacccugcccgugca

SEQ ID NO: 70898 - RNA, 32 nt, Homo Sapiens
uaacaagccugccucugguagucaacagccuu

SEQ ID NO: 70899 - RNA, 32 nt, Homo Sapiens
uguuuugaacaaagaauuagauaaaaugcaca

SEQ ID NO: 70900 - RNA, 32 nt, Homo Sapiens
cgccucgugaggagugccucccccgcugcgau

SEQ ID NO: 70901 - RNA, 32 nt, Homo Sapiens
gcugugcucacuuuuccugcuuugugccuuga

SEQ ID NO: 70902 - RNA, 32 nt, Homo Sapiens
ccagucuaccccgccucccucauuaggaaggu

SEQ ID NO: 70903 - RNA, 32 nt, Homo Sapiens
ugaggcauauaugaucucuggguaggugaguu

SEQ ID NO: 70904 - RNA, 32 nt, Homo Sapiens
acccagacaaggcaaaaggauaccuuucuugu

SEQ ID NO: 70905 - RNA, 32 nt, Homo Sapiens
ucaauuccuguuucuuuuuuuuuuucuuaagg

SEQ ID NO: 70906 - RNA, 31 nt, Homo Sapiens
gauguaauaaauuguaguaauaaauaugacc

SEQ ID NO: 70907 - RNA, 32 nt, Homo Sapiens
acaaagccacauccugcaccgucuacccuucu

SEQ ID NO: 70908 - RNA, 32 nt, Homo Sapiens
uauaaggcugagggcugccagcagccccgucu

SEQ ID NO: 70909 - RNA, 32 nt, Homo Sapiens
uuaggccucucagagucaccacuuccucuguu

SEQ ID NO: 70910 - RNA, 32 nt, Homo Sapiens
aguauuuggccauggaaacagauguacguugu

SEQ ID NO: 70911 - RNA, 32 nt, Homo Sapiens
ugcuccgggcgcagguggcagcagccauggag

SEQ ID NO: 70912 - RNA, 32 nt, Homo Sapiens
uuuccuaaaauaaaaguuagauaauggguuuu

SEQ ID NO: 70913 - RNA, 32 nt, Homo Sapiens
uuguucuucccaaugucauauccaccaggacc

SEQ ID NO: 70914 - RNA, 32 nt, Homo Sapiens
ugcucucagcuuugcaccucgucauugucuuc

SEQ ID NO: 70915 - RNA, 32 nt, Homo Sapiens
cccucucucccucugggcuggagcucagugag

SEQ ID NO: 70916 - RNA, 32 nt, Homo Sapiens
uagaacaccugccuucuacccucugguuggga

SEQ ID NO: 70917 - RNA, 32 nt, Homo Sapiens
ccuggcaugacauuccuucucuuuccuggccc

SEQ ID NO: 70918 - RNA, 32 nt, Homo Sapiens
ucucugugcuggggauaacuaaguugguggcc

SEQ ID NO: 70919 - RNA, 32 nt, Homo Sapiens
cuucaaaacaaaucaaccuaguucuauagaug

SEQ ID NO: 70920 - RNA, 32 nt, Homo Sapiens
uaacuaauuuaaaccagcagaaaagugcuuag

SEQ ID NO: 70921 - RNA, 32 nt, Homo Sapiens
gaaaauaugacaugaacuuaugaauucaacag

SEQ ID NO: 70922 - RNA, 32 nt, Homo Sapiens
auaccuuuuuauuuucuuuaagauuccuguug

SEQ ID NO: 70923 - RNA, 32 nt, Homo Sapiens
uaguaaaagcaucaggggcuggggacaauuuc

SEQ ID NO: 70924 - RNA, 32 nt, Homo Sapiens
uaguccaucuguucccucuccucuccucauuc

SEQ ID NO: 70925 - RNA, 32 nt, Homo Sapiens
uagcaaauggaaauuacauuugaaagccauua

SEQ ID NO: 70926 - RNA, 32 nt, Homo Sapiens
aaggccuggcagcagagacccgacuucugggc

SEQ ID NO: 70927 - RNA, 32 nt, Homo Sapiens
acaucagcacugggcauucuuggagggauccu

SEQ ID NO: 70928 - RNA, 32 nt, Homo Sapiens
uuucacuuaauuauaaaaccaguaauucauuu

SEQ ID NO: 70929 - RNA, 32 nt, Homo Sapiens
gagcgcggucccagcccggccacugcggaucc

SEQ ID NO: 70930 - RNA, 32 nt, Homo Sapiens
ucucagcgugcaugcauauauagaguuuagua

SEQ ID NO: 70931 - RNA, 32 nt, Homo Sapiens
gguguguccugggcuccucagagccugaagca

SEQ ID NO: 70932 - RNA, 32 nt, Homo Sapiens
guggaagcuuuauagucaauguccucuccauc

SEQ ID NO: 70933 - RNA, 32 nt, Homo Sapiens
uaagugcuccgaagaacaugugucacaaaaga

SEQ ID NO: 70934 - RNA, 32 nt, Homo Sapiens
cggaggacugcgcggcagccguggccuacugc

SEQ ID NO: 70935 - RNA, 32 nt, Homo Sapiens
gggcauccccauaucuucuccucuccccuugu

SEQ ID NO: 70936 - RNA, 32 nt, Homo Sapiens
cauuuguauccauaacuugaauaaaaauauag

SEQ ID NO: 70937 - RNA, 32 nt, Homo Sapiens
gagcugggcgcgcacggcuaccgcgcguggag

SEQ ID NO: 70938 - RNA, 32 nt, Homo Sapiens
gcuuuguuaaacuuauuucaagugauggucau

SEQ ID NO: 70939 - RNA, 32 nt, Homo Sapiens
agagcuggccggggagggacgcugcucagcug

SEQ ID NO: 70940 - RNA, 32 nt, Homo Sapiens
ucuauauaagcagucuugcaauaacuaaucac

SEQ ID NO: 70941 - RNA, 32 nt, Homo Sapiens
gggccuugcaagaugggagaguaaaccuugaa

SEQ ID NO: 70942 - RNA, 32 nt, Homo Sapiens
ccaggaugcccccaagcaccugcgcgucccgg

SEQ ID NO: 70943 - RNA, 32 nt, Homo Sapiens
agcuuucggccgcggacccgggccgcguguga

SEQ ID NO: 70944 - RNA, 32 nt, Homo Sapiens
ggcguugccgucugcuucuucccuggccccac

SEQ ID NO: 70945 - RNA, 32 nt, Homo Sapiens
ccuugaagauucugaaaguggagguuucuuaa

SEQ ID NO: 70946 - RNA, 32 nt, Homo Sapiens
ugucuauccuucacuuuuuuuuuuucauuucu

SEQ ID NO: 70947 - RNA, 32 nt, Homo Sapiens
gucaaagcuuuuucuuuuucucuaagguucuu

SEQ ID NO: 70948 - RNA, 32 nt, Homo Sapiens
aaaaucuuucccuucucaagacuuugagcagu

SEQ ID NO: 70949 - RNA, 32 nt, Homo Sapiens
aauuauccagcauauauguaagaaacauagca

SEQ ID NO: 70950 - RNA, 32 nt, Homo Sapiens
accuuaguuuacuagucuccaauacacuuuac

SEQ ID NO: 70951 - RNA, 32 nt, Homo Sapiens
ucaugaaagaucuggauaauacagagaaaaau

SEQ ID NO: 70952 - RNA, 32 nt, Homo Sapiens
caggagaggaaucggcggggagggggaggggu

SEQ ID NO: 70953 - RNA, 32 nt, Homo Sapiens
guguugugaguuuaguaagguuguguacacug

SEQ ID NO: 70954 - RNA, 32 nt, Homo Sapiens
gagaaacgcccggccugccgcggcggcgcgag

SEQ ID NO: 70955 - RNA, 32 nt, Homo Sapiens
aggggcaauuuaaauuaagaagugguuaggca

SEQ ID NO: 70956 - RNA, 32 nt, Homo Sapiens
ccgagcuguggcggucccugcgcggaccccga

SEQ ID NO: 70957 - RNA, 32 nt, Homo Sapiens
uggaauugaauggauuuacugauaaugaucag

SEQ ID NO: 70958 - RNA, 30 nt, Homo Sapiens
uggacuggauauugacucuaacucuuguuu

SEQ ID NO: 70959 - RNA, 32 nt, Homo Sapiens
uuaaaauguaggaagaaaaauguuugaguacc

SEQ ID NO: 70960 - RNA, 32 nt, Homo Sapiens
agcacagaggugagggauuaaaaggaaaggca

SEQ ID NO: 70961 - RNA, 32 nt, Homo Sapiens
cagagccugccagccaccaggcaugugaccca

SEQ ID NO: 70962 - RNA, 32 nt, Homo Sapiens
caaaaauauauucguugauaguuuugauuccu

SEQ ID NO: 70963 - RNA, 32 nt, Homo Sapiens
ggcgugugcaggguuaaacuccugaaguaacu

SEQ ID NO: 70964 - RNA, 29 nt, Homo Sapiens
augcauauauggauugcuauaaaaaaugu

SEQ ID NO: 70965 - RNA, 32 nt, Homo Sapiens
uuugaaaagcuacagcuuccagcagccaaaag

SEQ ID NO: 70966 - RNA, 32 nt, Homo Sapiens
caccuuugcaucuuuugugucuuucuuaucau

SEQ ID NO: 70967 - RNA, 32 nt, Homo Sapiens
agcuacuguauauaagauuggagaucucacug

SEQ ID NO: 70968 - RNA, 32 nt, Homo Sapiens
gucucggguggcggccggcccaggcgcuggac

SEQ ID NO: 70969 - RNA, 32 nt, Homo Sapiens
ugcagaggcaucacaauguuaagauuuuuaca

SEQ ID NO: 70970 - RNA, 32 nt, Homo Sapiens
ggcccucgccgggcaggacgccgccagcgcug

SEQ ID NO: 70971 - RNA, 32 nt, Homo Sapiens
gggcugcgguggccaccgcggcggagcccgag

SEQ ID NO: 70972 - RNA, 32 nt, Homo Sapiens
aacacuaauaauacacugggauugagaauuuc

SEQ ID NO: 70973 - RNA, 32 nt, Homo Sapiens
cccgcugcccgccggggcucuccagcuucgcc

SEQ ID NO: 70974 - RNA, 32 nt, Homo Sapiens
guggccgggcucgguggcucucgccuguaauc

SEQ ID NO: 70975 - RNA, 32 nt, Homo Sapiens
uuucuguacauaaaaauaaugaaaauaauaca

SEQ ID NO: 70976 - RNA, 32 nt, Homo Sapiens
uuucuccgugucccccgcccgccccguccacu

SEQ ID NO: 70977 - RNA, 32 nt, Homo Sapiens
auccccaucuucuugcaccucaacgucugugg

SEQ ID NO: 70978 - RNA, 32 nt, Homo Sapiens
agcaggcagggccgguggacuucgucggauga

SEQ ID NO: 70979 - RNA, 32 nt, Homo Sapiens
ccagcgccuggggcugccccucaagaugguca

SEQ ID NO: 70980 - RNA, 32 nt, Homo Sapiens
aagccacauuacauuuaucuuuguaaaaagau

SEQ ID NO: 70981 - RNA, 32 nt, Homo Sapiens
gccgucggacgacgaggggcucuccgugguag

SEQ ID NO: 70982 - RNA, 32 nt, Homo Sapiens
agaugccgcaugcagucaucuacauaaagcca

SEQ ID NO: 70983 - RNA, 32 nt, Homo Sapiens
ucugcucacuguguuauaaucccugucacucc

SEQ ID NO: 70984 - RNA, 32 nt, Homo Sapiens
aaccaaaaggacaaaacugacaggaaugcaca

SEQ ID NO: 70985 - RNA, 32 nt, Homo Sapiens
auugcgggcucugcaagacccuuggcaaacug

SEQ ID NO: 70986 - RNA, 32 nt, Homo Sapiens
ugguaacuaagaaauggcacaaacaccuuaag

SEQ ID NO: 70987 - RNA, 32 nt, Homo Sapiens
uccuggguucaagugauucuucugccucagcc

SEQ ID NO: 70988 - RNA, 32 nt, Homo Sapiens
gacuuaccuguaacuuccuuuaucucagaagg

SEQ ID NO: 70989 - RNA, 30 nt, Homo Sapiens
agcucagagaagcuccgugggccuguuucc

SEQ ID NO: 70990 - RNA, 32 nt, Homo Sapiens
agggaaauauuuguuacauaguaggcaauuuu

SEQ ID NO: 70991 - RNA, 30 nt, Homo Sapiens
uugcugggaaguugugagcaaaauaaguug

SEQ ID NO: 70992 - RNA, 31 nt, Homo Sapiens
cugguugcaaggugugaccacaggaauccug

SEQ ID NO: 70993 - RNA, 32 nt, Homo Sapiens
ggagauggagagugugugaacagccuacgccu

SEQ ID NO: 70994 - RNA, 32 nt, Homo Sapiens
cccgcgcuuuccccggcgccugcacgcggcgc

SEQ ID NO: 70995 - RNA, 32 nt, Homo Sapiens
cccgucuuccucaccgccccagcaggggaacg

SEQ ID NO: 70996 - RNA, 32 nt, Homo Sapiens
gcugggaaggauucacucucuuuagccccagg

SEQ ID NO: 70997 - RNA, 32 nt, Homo Sapiens
ggcagcgagcagccgcuuugcucgcgugcagg

SEQ ID NO: 70998 - RNA, 32 nt, Homo Sapiens
guuucaaaucaucagcucugcauucaagugcc

SEQ ID NO: 70999 - RNA, 32 nt, Homo Sapiens
ucacaucccagccccagagucacuguccagcc

SEQ ID NO: 71000 - RNA, 32 nt, Homo Sapiens
uuguauuuauauauuucuuguuugccuuaauu

SEQ ID NO: 71001 - RNA, 32 nt, Homo Sapiens
caguuaaggaccgaggcccugcccucuccuuc

SEQ ID NO: 71002 - RNA, 32 nt, Homo Sapiens
aggcugggcagcggcccggacagggagcuccg

SEQ ID NO: 71003 - RNA, 32 nt, Homo Sapiens
ccacuuccagcuuuugaucuuggggccagagg

SEQ ID NO: 71004 - RNA, 32 nt, Homo Sapiens
auuguaaaugucaaguauucuguuuuuggggu

SEQ ID NO: 71005 - RNA, 32 nt, Homo Sapiens
cuggcccaaucccacacccugcagaguucucc

SEQ ID NO: 71006 - RNA, 32 nt, Homo Sapiens
ucacauuugggguuuguguuugauuggcuuuc

SEQ ID NO: 71007 - RNA, 30 nt, Homo Sapiens
aaaauuuuuuuuuuaauuagccaggcguga

SEQ ID NO: 71008 - RNA, 32 nt, Homo Sapiens
gcuucuucaaaagucuggaucccuuuaagaua

SEQ ID NO: 71009 - RNA, 32 nt, Homo Sapiens
gcaguauauuauagugauaauuuuguauuuuc

SEQ ID NO: 71010 - RNA, 32 nt, Homo Sapiens
cuuuuacuuuucaaaacuggcuuagguauuca

SEQ ID NO: 71011 - RNA, 32 nt, Homo Sapiens
caugauuuuuuggcaggugucuauccugggug

SEQ ID NO: 71012 - RNA, 32 nt, Homo Sapiens
auggcugcaaaaucguuaaaaucuucaaggug

SEQ ID NO: 71013 - RNA, 32 nt, Homo Sapiens
cuagcauccuuuuuuucuuuucaguggccuca

SEQ ID NO: 71014 - RNA, 30 nt, Homo Sapiens
ugggagacuguucgccccgcccugaguacu

SEQ ID NO: 71015 - RNA, 32 nt, Homo Sapiens
gugaaaccccgucucuacaaaaauagaaaaau

SEQ ID NO: 71016 - RNA, 32 nt, Homo Sapiens
gugcaccuuguacuauuucacaguggguucug

SEQ ID NO: 71017 - RNA, 32 nt, Homo Sapiens
ggggacccuccccccgcccacacagcccacuu

SEQ ID NO: 71018 - RNA, 32 nt, Homo Sapiens
ucccuaaauggcagcugagacaguccucccug

SEQ ID NO: 71019 - RNA, 32 nt, Homo Sapiens
aguuaggugcucagguuugugcucuuggauga

SEQ ID NO: 71020 - RNA, 32 nt, Homo Sapiens
uucaucaagacaccccucugcccagcucacca

SEQ ID NO: 71021 - RNA, 32 nt, Homo Sapiens
uguggcaccgucuggaggagcucuacacgaag

SEQ ID NO: 71022 - RNA, 30 nt, Homo Sapiens
cgaggguggggcgcgggcguaguggcgccg

SEQ ID NO: 71023 - RNA, 32 nt, Homo Sapiens
aaagaaauggacagaugugcuuugaaaggccu

SEQ ID NO: 71024 - RNA, 32 nt, Homo Sapiens
caagaaauggacuuucaguuuacuuaagauua

SEQ ID NO: 71025 - RNA, 32 nt, Homo Sapiens
ccuguccccacgcuccuccacucccgcccuug

SEQ ID NO: 71026 - RNA, 32 nt, Homo Sapiens
ucacacauuucccaaaguuucucuuugucaua

SEQ ID NO: 71027 - RNA, 32 nt, Homo Sapiens
ugggugccccacucacuucucugagaucgaac

SEQ ID NO: 71028 - RNA, 32 nt, Homo Sapiens
gcaggucacaugcccacugcagcccuccagcc

SEQ ID NO: 71029 - RNA, 32 nt, Homo Sapiens
cagcggcccacccaccagcagcugcuggaggu

SEQ ID NO: 71030 - RNA, 32 nt, Homo Sapiens
agucaggcuggguaaggcaagcugaaagagga

SEQ ID NO: 71031 - RNA, 32 nt, Homo Sapiens
ggcaagggcguuuugugaaccuuuggcaaggc

SEQ ID NO: 71032 - RNA, 32 nt, Homo Sapiens
cugucaaagagauagagagcugcuuuuaugcu

SEQ ID NO: 71033 - RNA, 31 nt, Homo Sapiens
uccuacagcacuguuuuuaaucuugauguuu

SEQ ID NO: 71034 - RNA, 32 nt, Homo Sapiens
ggcagggccccggccugggacucagcauuucu

SEQ ID NO: 71035 - RNA, 32 nt, Homo Sapiens
ucuggacagcgccuuggugccggugauccaug

SEQ ID NO: 71036 - RNA, 30 nt, Homo Sapiens
aaggaaggaggugguugugcaggauggcga

SEQ ID NO: 71037 - RNA, 32 nt, Homo Sapiens
acucagcuuggguucugugcuccuccucucuu

SEQ ID NO: 71038 - RNA, 32 nt, Homo Sapiens
gaguuagcguccccccguuuccagcggugccg

SEQ ID NO: 71039 - RNA, 32 nt, Homo Sapiens
uucauaaaauuuguauuuuuaaaugaaaguuc

SEQ ID NO: 71040 - RNA, 32 nt, Homo Sapiens
uuaaagauugcugcuuuuuuuuugacauuguc

SEQ ID NO: 71041 - RNA, 30 nt, Homo Sapiens
agaguuccacuugcuauaaaaccucacuua

SEQ ID NO: 71042 - RNA, 32 nt, Homo Sapiens
acaccccacuccucuuucuccucuccucagcc

SEQ ID NO: 71043 - RNA, 32 nt, Homo Sapiens
uacaguggcacgaucucggcuuauggcaaccu

SEQ ID NO: 71044 - RNA, 32 nt, Homo Sapiens
agucccggucacgaggccaccgccgcugcccg

SEQ ID NO: 71045 - RNA, 32 nt, Homo Sapiens
gccguuaggggaggaguuuggggucuccacac

SEQ ID NO: 71046 - RNA, 32 nt, Homo Sapiens
ucccacugcccucuccccgucucuagcucaga

SEQ ID NO: 71047 - RNA, 32 nt, Homo Sapiens
agaagagacugaucucuucaauuauugucauc

SEQ ID NO: 71048 - RNA, 32 nt, Homo Sapiens
ugagugucuauaucaaugucaguguccagaau

SEQ ID NO: 71049 - RNA, 32 nt, Homo Sapiens
ugaaaggcucaguagaaccuuuccagguucuc

SEQ ID NO: 71050 - RNA, 32 nt, Homo Sapiens
ucuaucaacuguaaaauggggguucuagaguu

SEQ ID NO: 71051 - RNA, 32 nt, Homo Sapiens
aguugaucuuuugaccaagaccucaagagagc

SEQ ID NO: 71052 - RNA, 32 nt, Homo Sapiens
uuuaaauugacagaaaaauuugaauguuuucu

SEQ ID NO: 71053 - RNA, 32 nt, Homo Sapiens
ggaggaaagggagcaggcgcagggggacugga

SEQ ID NO: 71054 - RNA, 32 nt, Homo Sapiens
aagccuauuggaggaauguggguguggccgag

SEQ ID NO: 71055 - RNA, 32 nt, Homo Sapiens
gggacaggccccagucccagagacccccaccu

SEQ ID NO: 71056 - RNA, 32 nt, Homo Sapiens
cuccaauucagauauugggaguucuucagaua

SEQ ID NO: 71057 - RNA, 32 nt, Homo Sapiens
uugcucauuuuucuucaauaaaucuuuuuggc

SEQ ID NO: 71058 - RNA, 32 nt, Homo Sapiens
uuacaggugugagccaccgcgcucggccagag

SEQ ID NO: 71059 - RNA, 32 nt, Homo Sapiens
aacauacuauuuacauauguguagcuuaguaa

SEQ ID NO: 71060 - RNA, 32 nt, Homo Sapiens
uuuuucccccacguugagauugugcaguaguu

SEQ ID NO: 71061 - RNA, 32 nt, Homo Sapiens
aacacuuaaaauugaauggacuugugucaagc

SEQ ID NO: 71062 - RNA, 32 nt, Homo Sapiens
cucuagaaucaucaaauaaugauauuuuccuc

SEQ ID NO: 71063 - RNA, 32 nt, Homo Sapiens
gacaggaucuccaucugucacccaggcuggug

SEQ ID NO: 71064 - RNA, 32 nt, Homo Sapiens
acaugggcucaauuauuauguuugucaggaua

SEQ ID NO: 71065 - RNA, 32 nt, Homo Sapiens
uuucugagaaccuggaggagcaaagcuugauu

SEQ ID NO: 71066 - RNA, 32 nt, Homo Sapiens
augcuaucuccaugagaaaauucauaaagggu

SEQ ID NO: 71067 - RNA, 32 nt, Homo Sapiens
ggcccgaggggagaggagaguuuggggcaggg

SEQ ID NO: 71068 - RNA, 32 nt, Homo Sapiens
aauaaauaguaauauuuaucaguaaauacucc

SEQ ID NO: 71069 - RNA, 32 nt, Homo Sapiens
gcaucaucaacccucuaauucaccuuaugggg

SEQ ID NO: 71070 - RNA, 32 nt, Homo Sapiens
cauuggagcuuaaugaacauuuuuaaaaauaa

SEQ ID NO: 71071 - RNA, 32 nt, Homo Sapiens
gaucucacauuccacccuccccgaccucagac

SEQ ID NO: 71072 - RNA, 32 nt, Homo Sapiens
ucaugccaagccugucccacuggggcuccagg

SEQ ID NO: 71073 - RNA, 32 nt, Homo Sapiens
accgaugguggguggggcugcagaugucccca

SEQ ID NO: 71074 - RNA, 32 nt, Homo Sapiens
uuucuuauguauaguuaaacuaaagcaguacu

SEQ ID NO: 71075 - RNA, 32 nt, Homo Sapiens
cuaccccaaaaugaccaguuaagauuuacuuu

SEQ ID NO: 71076 - RNA, 32 nt, Homo Sapiens
ccucuguugucccagugaacagauaagaggug

SEQ ID NO: 71077 - RNA, 32 nt, Homo Sapiens
ccagccggcugcaaguuuuguaagcgcggaca

SEQ ID NO: 71078 - RNA, 32 nt, Homo Sapiens
agggguuguuugggggccuggguggucggccu

SEQ ID NO: 71079 - RNA, 32 nt, Homo Sapiens
ggacaccgcggggaguucgacgcgcuccaagc

SEQ ID NO: 71080 - RNA, 32 nt, Homo Sapiens
uaaaguuuuuaaaaauuguuguuuauuugcca

SEQ ID NO: 71081 - RNA, 32 nt, Homo Sapiens
cgguccugcaccuguuauaguagagaaugaaa

SEQ ID NO: 71082 - RNA, 32 nt, Homo Sapiens
cgggugccucagucuccuuccccuccccucgc

SEQ ID NO: 71083 - RNA, 32 nt, Homo Sapiens
uggauucaggagcuaccaggcucuuccucggg

SEQ ID NO: 71084 - RNA, 32 nt, Homo Sapiens
ccacccugucuccugucuccaucguuggauua

SEQ ID NO: 71085 - RNA, 31 nt, Homo Sapiens
cgucuugcaaggucuuccacuucagcacaau

SEQ ID NO: 71086 - RNA, 32 nt, Homo Sapiens
acuauuugacccccacaacaauggguauccuu

SEQ ID NO: 71087 - RNA, 32 nt, Homo Sapiens
aaagagguuacacagacugagaaggacaagac

SEQ ID NO: 71088 - RNA, 32 nt, Homo Sapiens
ugggcaguguaaaggaagccuagagagaaaga

SEQ ID NO: 71089 - RNA, 32 nt, Homo Sapiens
ccugagucaggcuuacuaaugcugcccucacu

SEQ ID NO: 71090 - RNA, 32 nt, Homo Sapiens
accacugccucccaggcucaagugaucugccc

SEQ ID NO: 71091 - RNA, 32 nt, Homo Sapiens
uggcugcccagacagagcugacucugguccca

SEQ ID NO: 71092 - RNA, 32 nt, Homo Sapiens
acugcugccgagcagagcguccucugccaggc

SEQ ID NO: 71093 - RNA, 32 nt, Homo Sapiens
agaugaccgcggucacuguuaucuaaacgcaa

SEQ ID NO: 71094 - RNA, 32 nt, Homo Sapiens
ugcccucccucccccgaaguucucugugguga

SEQ ID NO: 71095 - RNA, 32 nt, Homo Sapiens
acugcgccuggccaaaugcucuacuuuuuaau

SEQ ID NO: 71096 - RNA, 29 nt, Homo Sapiens
ccuuuauaaaguuuuucucuaugcagaca

SEQ ID NO: 71097 - RNA, 32 nt, Homo Sapiens
ugccucagacuagauuugacuugaguucuuua

SEQ ID NO: 71098 - RNA, 32 nt, Homo Sapiens
acugcucagagguauuccuuuauuaugugguu

SEQ ID NO: 71099 - RNA, 32 nt, Homo Sapiens
uauaaauacauuuuugucagagugcacagaua

SEQ ID NO: 71100 - RNA, 32 nt, Homo Sapiens
acuuauuguaaaugcaugaagcacuguuuuua

SEQ ID NO: 71101 - RNA, 32 nt, Homo Sapiens
agcccccugcugcugcauccaccacccuucuu

SEQ ID NO: 71102 - RNA, 32 nt, Homo Sapiens
agccauuggccgcuccuccacccagugcuucu

SEQ ID NO: 71103 - RNA, 32 nt, Homo Sapiens
ccccaaacuuggaaacaagaacucuacuuuag

SEQ ID NO: 71104 - RNA, 32 nt, Homo Sapiens
aauucaaauaaaaagaggacugagaacugaaa

SEQ ID NO: 71105 - RNA, 32 nt, Homo Sapiens
ggccuuggaugcccggccccucccuuucugug

SEQ ID NO: 71106 - RNA, 32 nt, Homo Sapiens
aggcggcggcuggcggccggcuucucgcucgg

SEQ ID NO: 71107 - RNA, 32 nt, Homo Sapiens
aucuuugacucuuuugccauuaaacuuaccug

SEQ ID NO: 71108 - RNA, 32 nt, Homo Sapiens
agcugagggaccagcucuacuuccaccugaag

SEQ ID NO: 71109 - RNA, 32 nt, Homo Sapiens
aacuguuugcaguagcagccgcugcucccuuu

SEQ ID NO: 71110 - RNA, 32 nt, Homo Sapiens
aaguauuuaaacaauauuuagagcaagugucc

SEQ ID NO: 71111 - RNA, 32 nt, Homo Sapiens
auaauauacaaugaauugugacugugcuccca

SEQ ID NO: 71112 - RNA, 32 nt, Homo Sapiens
uccuccugccgcauuucuuuccugcuugcgaa

SEQ ID NO: 71113 - RNA, 32 nt, Homo Sapiens
gcauucaguguggauuccaagaacaaaaccaa

SEQ ID NO: 71114 - RNA, 32 nt, Homo Sapiens
cucuucccuaaaaugugucccagaugccuuca

SEQ ID NO: 71115 - RNA, 32 nt, Homo Sapiens
aaucagagccauuuaaugagguucaaagacaa

SEQ ID NO: 71116 - RNA, 32 nt, Homo Sapiens
aagagguaaaagaaagcagagauccagaaacc

SEQ ID NO: 71117 - RNA, 32 nt, Homo Sapiens
caugaggaggccggguucaugcaggguccuug

SEQ ID NO: 71118 - RNA, 32 nt, Homo Sapiens
cugcccuuccucgggggccugggcgggggcua

SEQ ID NO: 71119 - RNA, 32 nt, Homo Sapiens
uauaaucuugaacacgaaguguuuguaacaag

SEQ ID NO: 71120 - RNA, 32 nt, Homo Sapiens
cggugcuggaauccaacaccugugucuuggcu

SEQ ID NO: 71121 - RNA, 32 nt, Homo Sapiens
gagaccuucagcgccucggcuccagcgccaug

SEQ ID NO: 71122 - RNA, 32 nt, Homo Sapiens
aucccucuagguuaucuauacuguauaaaaaa

SEQ ID NO: 71123 - RNA, 32 nt, Homo Sapiens
ugaguccuauaaaaagcaaggauaugcaugau

SEQ ID NO: 71124 - RNA, 32 nt, Homo Sapiens
gccuauugcgcgggcuguucuucccuguguuc

SEQ ID NO: 71125 - RNA, 32 nt, Homo Sapiens
acucucauguaagucaacaacauccugggauu

SEQ ID NO: 71126 - RNA, 32 nt, Homo Sapiens
uaagaugaaggaaauauuuuauguaaagagca

SEQ ID NO: 71127 - RNA, 32 nt, Homo Sapiens
agucaacacucuucuuuuuuuauuuuuuuguu

SEQ ID NO: 71128 - RNA, 32 nt, Homo Sapiens
gagggcacagaaaauggaagacagcucuuaua

SEQ ID NO: 71129 - RNA, 32 nt, Homo Sapiens
uucacugccgcagcucuuuccacacggggccg

SEQ ID NO: 71130 - RNA, 32 nt, Homo Sapiens
cgggaggcagggccggccccacguccucugcg

SEQ ID NO: 71131 - RNA, 32 nt, Homo Sapiens
gcucauuggucagcuuagagacuugcagaccu

SEQ ID NO: 71132 - RNA, 32 nt, Homo Sapiens
gugguucugcggcacacuaagguuugaaaauc

SEQ ID NO: 71133 - RNA, 32 nt, Homo Sapiens
ccaccccgaccccagcccccagccucagcccc

SEQ ID NO: 71134 - RNA, 32 nt, Homo Sapiens
cuauccauuguuagaguccuucacucccaaau

SEQ ID NO: 71135 - RNA, 32 nt, Homo Sapiens
uggauuuuauuuuaaguucucuaacaagacuc

SEQ ID NO: 71136 - RNA, 32 nt, Homo Sapiens
ugacuucauuggcaguggaugaagccuaagcc

SEQ ID NO: 71137 - RNA, 32 nt, Homo Sapiens
acugcgugcagggcaccgucggccacaagauc

SEQ ID NO: 71138 - RNA, 32 nt, Homo Sapiens
uuaucuuccauuguguuuuucuuuauggacag

SEQ ID NO: 71139 - RNA, 32 nt, Homo Sapiens
cuccgccuccuggguucacgugauucucaugc

SEQ ID NO: 71140 - RNA, 32 nt, Homo Sapiens
agagaggacguuugaugccgggccccuugaga

SEQ ID NO: 71141 - RNA, 32 nt, Homo Sapiens
augcacucuauuuuaaucauauggucaaggau

SEQ ID NO: 71142 - RNA, 32 nt, Homo Sapiens
agcaacacagugagacccccaucucuacaaaa

SEQ ID NO: 71143 - RNA, 32 nt, Homo Sapiens
caggaugauccuccucccauccuuucccuuuu

SEQ ID NO: 71144 - RNA, 32 nt, Homo Sapiens
cccgggaguuccagcccuaggccaggcuccgg

SEQ ID NO: 71145 - RNA, 32 nt, Homo Sapiens
gaccacuucucgccauuucuacugcuacuacc

SEQ ID NO: 71146 - RNA, 32 nt, Homo Sapiens
gcaaaaaguauuuguuacauaaucaaaaggug

SEQ ID NO: 71147 - RNA, 32 nt, Homo Sapiens
aucauaauuuaaaaacaaggucugaccaggug

SEQ ID NO: 71148 - RNA, 32 nt, Homo Sapiens
aacuccgccucccagguucaacugauucuccu

SEQ ID NO: 71149 - RNA, 32 nt, Homo Sapiens
aggaaccugucauggcggcgccgcugcccgac

SEQ ID NO: 71150 - RNA, 32 nt, Homo Sapiens
aagaauuacacgcuuggaugacaggcuugcac

SEQ ID NO: 71151 - RNA, 32 nt, Homo Sapiens
acaugaucucauucuuuuuuuauggcugcaua

SEQ ID NO: 71152 - RNA, 32 nt, Homo Sapiens
ggaucacauuucaacaugugauuugacaggau

SEQ ID NO: 71153 - RNA, 32 nt, Homo Sapiens
aaaugaccgcagagcaggcugaauuccuccaa

SEQ ID NO: 71154 - RNA, 32 nt, Homo Sapiens
gcgccaucggccuggcgcuucagccaacgcgg

SEQ ID NO: 71155 - RNA, 32 nt, Homo Sapiens
gccuuuuacaaaauuuuuaaagaguagguaau

SEQ ID NO: 71156 - RNA, 32 nt, Homo Sapiens
ugccguggagggcagggggguggugcuugccu

SEQ ID NO: 71157 - RNA, 32 nt, Homo Sapiens
uaaucggaagaggacugucagaaggacguaga

SEQ ID NO: 71158 - RNA, 32 nt, Homo Sapiens
gauuacaugcucacauuuaacaaagagaggaa

SEQ ID NO: 71159 - RNA, 32 nt, Homo Sapiens
ucuagucucccugagugcccagaugggggucu

SEQ ID NO: 71160 - RNA, 32 nt, Homo Sapiens
ggccggggcucagggaaggggcugggaucgga

SEQ ID NO: 71161 - RNA, 32 nt, Homo Sapiens
cguagaaucuguguagacgaagggggcaucug

SEQ ID NO: 71162 - RNA, 32 nt, Homo Sapiens
cagaauuccuuagguaugggauuuaugagacc

SEQ ID NO: 71163 - RNA, 32 nt, Homo Sapiens
cggcugcuuuugcugcgcccucucagcuuccc

SEQ ID NO: 71164 - RNA, 32 nt, Homo Sapiens
acaggguuucuccauguugcccaaguuggucu

SEQ ID NO: 71165 - RNA, 32 nt, Homo Sapiens
guaguagcugggucugauggcagcagugcuug

SEQ ID NO: 71166 - RNA, 32 nt, Homo Sapiens
aggaagccacugccuggcagcuuguggaagcc

SEQ ID NO: 71167 - RNA, 32 nt, Homo Sapiens
ugccaagaccauuucacagaaaacauugacug

SEQ ID NO: 71168 - RNA, 32 nt, Homo Sapiens
aaaauccuaaggaaacugaacacucgaacgaa

SEQ ID NO: 71169 - RNA, 32 nt, Homo Sapiens
uaauagaauauaaaccucuugauaaaaaaugc

SEQ ID NO: 71170 - RNA, 32 nt, Homo Sapiens
acauuuaauuuaaauauaaaugcauuuugaga

SEQ ID NO: 71171 - RNA, 32 nt, Homo Sapiens
uccuccguccggcaccuuugccugcagccgug

SEQ ID NO: 71172 - RNA, 32 nt, Homo Sapiens
ucauccugggagagggggcaagguggaaugca

SEQ ID NO: 71173 - RNA, 32 nt, Homo Sapiens
ggcuggcuuccugcccucuggcuuccaggcca

SEQ ID NO: 71174 - RNA, 32 nt, Homo Sapiens
uuuucaagucuccucagucaucaauaguuccu

SEQ ID NO: 71175 - RNA, 32 nt, Homo Sapiens
ccaggccaucauggugcuggaggugcaggccu

SEQ ID NO: 71176 - RNA, 32 nt, Homo Sapiens
caaagacaccauggaugcuauuaauguacucu

SEQ ID NO: 71177 - RNA, 32 nt, Homo Sapiens
uuuuuccagaucucuuuccccaaguugcuauu

SEQ ID NO: 71178 - RNA, 32 nt, Homo Sapiens
cccacugcuuuuccaggcccagccccuguccc

SEQ ID NO: 71179 - RNA, 32 nt, Homo Sapiens
uauaaaacaaaaacagaaaggaucugagggaa

SEQ ID NO: 71180 - RNA, 32 nt, Homo Sapiens
gcccaccuccaccccaggagccgaaggccggc

SEQ ID NO: 71181 - RNA, 32 nt, Homo Sapiens
ucccgggggcgcagcuuggagagccgggggcg

SEQ ID NO: 71182 - RNA, 32 nt, Homo Sapiens
gauugcugcauaucagcaguuggauguucuug

SEQ ID NO: 71183 - RNA, 32 nt, Homo Sapiens
aaauaagaauacugcaauuuugugcuggcuuu

SEQ ID NO: 71184 - RNA, 32 nt, Homo Sapiens
ugcagcgcagaccaccugggcgggccguucgc

SEQ ID NO: 71185 - RNA, 32 nt, Homo Sapiens
caaucauaucaugaacauuuuauuuugcuaaa

SEQ ID NO: 71186 - RNA, 32 nt, Homo Sapiens
ccagccagcuggacgagggcaagugcgcuuac

SEQ ID NO: 71187 - RNA, 32 nt, Homo Sapiens
agauuaaaaaaucuuccugccuuauguccacu

SEQ ID NO: 71188 - RNA, 32 nt, Homo Sapiens
agcaguuuacuuuagacuaaagaauauauugg

SEQ ID NO: 71189 - RNA, 32 nt, Homo Sapiens
ugccgccgcuaagggagaggagcaugucugca

SEQ ID NO: 71190 - RNA, 27 nt, Homo Sapiens
gggugggcuucuuccagccccccgcgg

SEQ ID NO: 71191 - RNA, 32 nt, Homo Sapiens
ucaaauaaaaauuuaaaaaaauaauaaaaaag

SEQ ID NO: 71192 - RNA, 27 nt, Homo Sapiens
ugauuucccuucuucugucaucuaccu

SEQ ID NO: 71193 - RNA, 32 nt, Homo Sapiens
uugauguaaauauauuugaugagauaaacuua

SEQ ID NO: 71194 - RNA, 32 nt, Homo Sapiens
cuuuccacguacuucgguuucaucucuaggca

SEQ ID NO: 71195 - RNA, 32 nt, Homo Sapiens
gugacauugucaacaggaguccaauuaugggc

SEQ ID NO: 71196 - RNA, 32 nt, Homo Sapiens
ucgaaaguucccuaaucucuccaucccagcua

SEQ ID NO: 71197 - RNA, 32 nt, Homo Sapiens
gccgcccugauguguagucuccaggccgcccc

SEQ ID NO: 71198 - RNA, 32 nt, Homo Sapiens
gauuacagauuacugguguuuucaugccuuga

SEQ ID NO: 71199 - RNA, 32 nt, Homo Sapiens
uguuuguggucaacagaugacaacagccgucc

SEQ ID NO: 71200 - RNA, 31 nt, Homo Sapiens
gccuugccaguucaugacugaguuauacaug

SEQ ID NO: 71201 - RNA, 32 nt, Homo Sapiens
gccaccugaucacuaacaaaagacaucuucug

SEQ ID NO: 71202 - RNA, 32 nt, Homo Sapiens
uuuuuuacuuuuuuuucuuccuuuuuuaagag

SEQ ID NO: 71203 - RNA, 29 nt, Homo Sapiens
gggaugauuuguuucaggggaaaaugccc

SEQ ID NO: 71204 - RNA, 32 nt, Homo Sapiens
ccagcuaaucaucucuguugcacauguuuaau

SEQ ID NO: 71205 - RNA, 32 nt, Homo Sapiens
uaauguuaagccacugaccaacuuuuucauag

SEQ ID NO: 71206 - RNA, 30 nt, Homo Sapiens
ugcucgccucgguugccgccgcuuuagccg

SEQ ID NO: 71207 - RNA, 32 nt, Homo Sapiens
gaguuguuacauuuuuaagugcugcauuuaaa

SEQ ID NO: 71208 - RNA, 32 nt, Homo Sapiens
gcagcccuucucuggagucucagagccgcaag

SEQ ID NO: 71209 - RNA, 28 nt, Homo Sapiens
uuucaugaaggauaacauuuuuauacag

SEQ ID NO: 71210 - RNA, 32 nt, Homo Sapiens
uaauguaagcaguccccaccgggaguuccccc

SEQ ID NO: 71211 - RNA, 32 nt, Homo Sapiens
gagggaaauggucuggacuuauucccagcacu

SEQ ID NO: 71212 - RNA, 32 nt, Homo Sapiens
ugguuccucccucucuggccugugccgccuca

SEQ ID NO: 71213 - RNA, 32 nt, Homo Sapiens
uugggauggugugcauagcaagggcaguguua

SEQ ID NO: 71214 - RNA, 32 nt, Homo Sapiens
gcccccuugcagagggcaaaggaacguggaac

SEQ ID NO: 71215 - RNA, 32 nt, Homo Sapiens
uucagccucccuccccaccucaccccaggacc

SEQ ID NO: 71216 - RNA, 32 nt, Homo Sapiens
aagucacaaaaaugaucgacaaacaauauuuu

SEQ ID NO: 71217 - RNA, 32 nt, Homo Sapiens
aggaggcuugagcuuuccuuuauucuugaauc

SEQ ID NO: 71218 - RNA, 32 nt, Homo Sapiens
auguucuuuccacugcugauuucuuuuucaga

SEQ ID NO: 71219 - RNA, 32 nt, Homo Sapiens
uggaaacacaucccuuguaagcuaaaauaguu

SEQ ID NO: 71220 - RNA, 32 nt, Homo Sapiens
uugguuccuugccuccuucuggugcucuuacu

SEQ ID NO: 71221 - RNA, 32 nt, Homo Sapiens
auuuguuugucccccuucuccccugagcgcug

SEQ ID NO: 71222 - RNA, 32 nt, Homo Sapiens
ucauuaucaagucauuauuagauggagaugau

SEQ ID NO: 71223 - RNA, 32 nt, Homo Sapiens
acaagggugugaaaugaaaauauuuuaggauu

SEQ ID NO: 71224 - RNA, 32 nt, Homo Sapiens
cacucucugagaaguuggggcuccaucaagcc

SEQ ID NO: 71225 - RNA, 32 nt, Homo Sapiens
ggacggccauacuauuuuuaucuugcuuuuuc

SEQ ID NO: 71226 - RNA, 32 nt, Homo Sapiens
aguaucaggguaguucuguuucaaacuugcau

SEQ ID NO: 71227 - RNA, 32 nt, Homo Sapiens
ccggaccuugcuccccgcgccgcggcgggagc

SEQ ID NO: 71228 - RNA, 32 nt, Homo Sapiens
gcauguggacgaaaaugacgugcagacggugu

SEQ ID NO: 71229 - RNA, 32 nt, Homo Sapiens
gcagcuccagggggcucugguugccaacaaac

SEQ ID NO: 71230 - RNA, 32 nt, Homo Sapiens
gaccacugauaaaggcuuuauuagguauaucu

SEQ ID NO: 71231 - RNA, 32 nt, Homo Sapiens
acgagcuggaggaggagaaguaagcggugggg

SEQ ID NO: 71232 - RNA, 32 nt, Homo Sapiens
gucuuuuaggauaaggcagagaaacagauguu

SEQ ID NO: 71233 - RNA, 32 nt, Homo Sapiens
ugguuccugagaugcuccugcucugcuguguu

SEQ ID NO: 71234 - RNA, 32 nt, Homo Sapiens
cuuggcaugaaauaaacugcuauccuccccuu

SEQ ID NO: 71235 - RNA, 32 nt, Homo Sapiens
gccuggggagccggugacugaguucuccugcu

SEQ ID NO: 71236 - RNA, 32 nt, Homo Sapiens
uaaguaggauuuucuuuuugaucaacagggac

SEQ ID NO: 71237 - RNA, 32 nt, Homo Sapiens
ccucaaaaggaaauuaugcuggucaucacagg

SEQ ID NO: 71238 - RNA, 32 nt, Homo Sapiens
gcagggccagaagcagagacggcggcugggga

SEQ ID NO: 71239 - RNA, 32 nt, Homo Sapiens
ggcauccggcgcccagagaaggaguugcucua

SEQ ID NO: 71240 - RNA, 32 nt, Homo Sapiens
cagcuucagagaagcugaguccugauccucaa

SEQ ID NO: 71241 - RNA, 29 nt, Homo Sapiens
agaaaugguccuguucagacaccauucag

SEQ ID NO: 71242 - RNA, 32 nt, Homo Sapiens
aaguggcuggugucuuagcagcugcaaucuga

SEQ ID NO: 71243 - RNA, 32 nt, Homo Sapiens
agugccacagaguggauagcuuaaacaauaga

SEQ ID NO: 71244 - RNA, 32 nt, Homo Sapiens
aaaagaaaaaaugagagaaauaaaacagauau

SEQ ID NO: 71245 - RNA, 32 nt, Homo Sapiens
ggcgcgcgucccgcccugacccgccggccucu

SEQ ID NO: 71246 - RNA, 32 nt, Homo Sapiens
caggcagggggagaggggcagagggugugggu

SEQ ID NO: 71247 - RNA, 32 nt, Homo Sapiens
ggccgcggaucuccagcacgccgccccagucc

SEQ ID NO: 71248 - RNA, 32 nt, Homo Sapiens
ggccagugggugccggccugcugccucaccug

SEQ ID NO: 71249 - RNA, 32 nt, Homo Sapiens
acucugcaauccccggcaccuaacucuucuca

SEQ ID NO: 71250 - RNA, 32 nt, Homo Sapiens
auuuacauucaaaucagccuuuuauaauuaca

SEQ ID NO: 71251 - RNA, 32 nt, Homo Sapiens
acagauauaugauuugcaaaucuuuucuguuc

SEQ ID NO: 71252 - RNA, 32 nt, Homo Sapiens
gugaaguguauuguggaacaauuuagaaacuu

SEQ ID NO: 71253 - RNA, 29 nt, Homo Sapiens
uucauuaagaguuucaguuuaacuuugaa

SEQ ID NO: 71254 - RNA, 32 nt, Homo Sapiens
aacacgggaaaccagagucaaaaguuaucucc

SEQ ID NO: 71255 - RNA, 32 nt, Homo Sapiens
aucuuugcauagcccaugccucauggagaggu

SEQ ID NO: 71256 - RNA, 32 nt, Homo Sapiens
aagaguuuuugaaauuuuuuugaaagacaguu

SEQ ID NO: 71257 - RNA, 32 nt, Homo Sapiens
ucgccggcuccgccuacggcccggcccccacg

SEQ ID NO: 71258 - RNA, 32 nt, Homo Sapiens
auuuuacauuuuaaaguuaucuauggcuguuu

SEQ ID NO: 71259 - RNA, 32 nt, Homo Sapiens
cccagcuugucucuccuuguuucuucccacug

SEQ ID NO: 71260 - RNA, 32 nt, Homo Sapiens
aaccaacaaaaauaaaucccuaggcuacuuuu

SEQ ID NO: 71261 - RNA, 30 nt, Homo Sapiens
guggaggcggcgcagcaugaagcggcgcag

SEQ ID NO: 71262 - RNA, 32 nt, Homo Sapiens
cugaggucaggaguuugagccagccuggccaa

SEQ ID NO: 71263 - RNA, 32 nt, Homo Sapiens
ggcugggagcgguggcucacgccuguaauccu

SEQ ID NO: 71264 - RNA, 32 nt, Homo Sapiens
aaauauggugauuaaaauacuucucuucuaaa

SEQ ID NO: 71265 - RNA, 32 nt, Homo Sapiens
guuuucagcccuccucaggguggcucucagca

SEQ ID NO: 71266 - RNA, 32 nt, Homo Sapiens
cccuaggcuucggcccggugccccggcuccuu

SEQ ID NO: 71267 - RNA, 32 nt, Homo Sapiens
cagguugauuccuuaugcaaaugaacuuuuaa

SEQ ID NO: 71268 - RNA, 32 nt, Homo Sapiens
ucauguacauuuuauuugauauuaaaaucuuu

SEQ ID NO: 71269 - RNA, 32 nt, Homo Sapiens
guccaaacccucacacuacagaaaaccccaau

SEQ ID NO: 71270 - RNA, 32 nt, Homo Sapiens
uagaaaauguuagucaaucaacuuuauuauug

SEQ ID NO: 71271 - RNA, 32 nt, Homo Sapiens
caacacacaggcccagcaaacacaggcugcac

SEQ ID NO: 71272 - RNA, 32 nt, Homo Sapiens
ggcagcgccgacguccugcccaccacgcacuc

SEQ ID NO: 71273 - RNA, 32 nt, Homo Sapiens
gguuugcuggccauagauaccuuugggcugcc

SEQ ID NO: 71274 - RNA, 32 nt, Homo Sapiens
ggaagcggguggcgcugggacgcaugcucugg

SEQ ID NO: 71275 - RNA, 32 nt, Homo Sapiens
cuuacacaaaaauuaacacuagaugaauuaaa

SEQ ID NO: 71276 - RNA, 31 nt, Homo Sapiens
cuuuggggaacagaagaacgucuuaaaagau

SEQ ID NO: 71277 - RNA, 32 nt, Homo Sapiens
uccucugugugguuucugggaagugacugagg

SEQ ID NO: 71278 - RNA, 32 nt, Homo Sapiens
aaggugauccugagggcuguggcggacaaggg

SEQ ID NO: 71279 - RNA, 32 nt, Homo Sapiens
cugucuauacuucccccuccccagccccaaac

SEQ ID NO: 71280 - RNA, 32 nt, Homo Sapiens
guccaagccagacccuaaaggggagcccugga

SEQ ID NO: 71281 - RNA, 32 nt, Homo Sapiens
cgcagccccccucccuggaucaugcacagaaa

SEQ ID NO: 71282 - RNA, 32 nt, Homo Sapiens
cacgaugauguuaugacuauugauuuaaaaau

SEQ ID NO: 71283 - RNA, 32 nt, Homo Sapiens
gcuccauugugucgggcuacuccacccugucc

SEQ ID NO: 71284 - RNA, 32 nt, Homo Sapiens
cguacaauuucuaauccauacaggccugggua

SEQ ID NO: 71285 - RNA, 32 nt, Homo Sapiens
acaaacagaaagcguuucaaagcgucagcugu

SEQ ID NO: 71286 - RNA, 32 nt, Homo Sapiens
cucgcgcgcacggagcgacgacacccccgcgc

SEQ ID NO: 71287 - RNA, 32 nt, Homo Sapiens
gcagaauuuagaaaccacaggauaguguaccc

SEQ ID NO: 71288 - RNA, 32 nt, Homo Sapiens
auggaaaguuaaagugauaaaguauauucacu

SEQ ID NO: 71289 - RNA, 32 nt, Homo Sapiens
caaaaauccaaauauuguuaagggaccaggga

SEQ ID NO: 71290 - RNA, 32 nt, Homo Sapiens
ucaucuccacuuaaauugaugacacaagcagc

SEQ ID NO: 71291 - RNA, 29 nt, Homo Sapiens
uuucgugugacuugcgcuguugugauauu

SEQ ID NO: 71292 - RNA, 32 nt, Homo Sapiens
gacuugcggaaucacucuguccuuggaaguuu

SEQ ID NO: 71293 - RNA, 32 nt, Homo Sapiens
cguggucacaugccuagagcugaggagugagg

SEQ ID NO: 71294 - RNA, 32 nt, Homo Sapiens
acaaauacuguaaaaugccuaggaauuaacca

SEQ ID NO: 71295 - RNA, 32 nt, Homo Sapiens
acacuguggaaaucugaaacgaggggauguca

SEQ ID NO: 71296 - RNA, 32 nt, Homo Sapiens
agcugauaaaaaguccauccaaaaggcaaaau

SEQ ID NO: 71297 - RNA, 32 nt, Homo Sapiens
uugcagcggcggcagcagcaccaggcucugca

SEQ ID NO: 71298 - RNA, 32 nt, Homo Sapiens
cgugcgcuaggggagugggcggugaggccugg

SEQ ID NO: 71299 - RNA, 32 nt, Homo Sapiens
agagaaggagucaccugcagucuuuuguuuuu

SEQ ID NO: 71300 - RNA, 31 nt, Homo Sapiens
agccaccagucccagaacccgcuaaugcugg

SEQ ID NO: 71301 - RNA, 32 nt, Homo Sapiens
aauuggagggaaaguauaagcccauaaugcca

SEQ ID NO: 71302 - RNA, 32 nt, Homo Sapiens
caggauguucaaccugauaaagaaauuguugu

SEQ ID NO: 71303 - RNA, 32 nt, Homo Sapiens
uuucuagcugaacaaaaaugugcaguuaauac

SEQ ID NO: 71304 - RNA, 32 nt, Homo Sapiens
cagcagcacccuuuccucucauugucccuguu

SEQ ID NO: 71305 - RNA, 32 nt, Homo Sapiens
gggucuucccugaagcaucuccagggcuggag

SEQ ID NO: 71306 - RNA, 32 nt, Homo Sapiens
uggucuggaacuccuggccuccagucauuugc

SEQ ID NO: 71307 - RNA, 32 nt, Homo Sapiens
acuugcugaaucaauuugauaggauuaaucuc

SEQ ID NO: 71308 - RNA, 32 nt, Homo Sapiens
cccuuuggucugaguuaaaacugcgaugcuga

SEQ ID NO: 71309 - RNA, 32 nt, Homo Sapiens
aguggauuuuucugaguaaauuugcugaaaau

SEQ ID NO: 71310 - RNA, 32 nt, Homo Sapiens
cccuuacacacacaaagccccggugucggaca

SEQ ID NO: 71311 - RNA, 32 nt, Homo Sapiens
aaugauguaugcauuuuuuuuaauuugaggua

SEQ ID NO: 71312 - RNA, 32 nt, Homo Sapiens
gcuccaucuuccccggccacaugccccgccaa

SEQ ID NO: 71313 - RNA, 32 nt, Homo Sapiens
gcggcgccggcugccggcgggaggaagcgcuc

SEQ ID NO: 71314 - RNA, 32 nt, Homo Sapiens
gagaauaccauugaugacuauuaaacaaaaac

SEQ ID NO: 71315 - RNA, 32 nt, Homo Sapiens
auagauguugggaugccugggcauggccacau

SEQ ID NO: 71316 - RNA, 32 nt, Homo Sapiens
cuggacggugcuuguuugaauuuucugauauc

SEQ ID NO: 71317 - RNA, 32 nt, Homo Sapiens
cuuauuagcuagaaacaaaagccacuuacucc

SEQ ID NO: 71318 - RNA, 32 nt, Homo Sapiens
ggaucauugcauuuccagaaaucugccuccuu

SEQ ID NO: 71319 - RNA, 32 nt, Homo Sapiens
caguauuuguuaugaaauucaaaauaucucaa

SEQ ID NO: 71320 - RNA, 32 nt, Homo Sapiens
gucugggucagcugagugacuacaucaaagcu

SEQ ID NO: 71321 - RNA, 32 nt, Homo Sapiens
acagguggcuccugggcuugggcugcagguuu

SEQ ID NO: 71322 - RNA, 32 nt, Homo Sapiens
gauauggggggaggaggggcuagaacaagggc

SEQ ID NO: 71323 - RNA, 32 nt, Homo Sapiens
auuccaugaagaugagaacauucaauaagaau

SEQ ID NO: 71324 - RNA, 32 nt, Homo Sapiens
aguguuaacauuuuggaaaaauuuaugccacu

SEQ ID NO: 71325 - RNA, 32 nt, Homo Sapiens
ugaagcgaggacccgagggcagccucucggug

SEQ ID NO: 71326 - RNA, 32 nt, Homo Sapiens
augggcagagaugcuucuaugaucucuguucu

SEQ ID NO: 71327 - RNA, 32 nt, Homo Sapiens
ugcuaguuagaaagguuuggagggaugacuuu

SEQ ID NO: 71328 - RNA, 32 nt, Homo Sapiens
gagcgaguugggcagaugccggcggccgcggu

SEQ ID NO: 71329 - RNA, 32 nt, Homo Sapiens
ucccaaguauacaacuaagaagauuuucuuuu

SEQ ID NO: 71330 - RNA, 32 nt, Homo Sapiens
gggaguuauaucuauaguagucaauuaguaca

SEQ ID NO: 71331 - RNA, 32 nt, Homo Sapiens
aaaaugcacccgccgcgccgcgcgguccugca

SEQ ID NO: 71332 - RNA, 32 nt, Homo Sapiens
caccuagucuuuuuuuuuuucuuaacaaucau

SEQ ID NO: 71333 - RNA, 32 nt, Homo Sapiens
gacaccuguccccugcccugcaugggaaguga

SEQ ID NO: 71334 - RNA, 32 nt, Homo Sapiens
aaccaagcucccuucccuuccucccccuuccc

SEQ ID NO: 71335 - RNA, 32 nt, Homo Sapiens
cugauccucccuggggaccccuguggccuguc

SEQ ID NO: 71336 - RNA, 32 nt, Homo Sapiens
cccuguuggggguggggggcggggguugcaua

SEQ ID NO: 71337 - RNA, 32 nt, Homo Sapiens
uggcccggagccggcccggcccgaaaaccaua

SEQ ID NO: 71338 - RNA, 32 nt, Homo Sapiens
caaggucagagaagaggaaaagagacucagag

SEQ ID NO: 71339 - RNA, 32 nt, Homo Sapiens
ccuggccuccagccccagcaguguggcccaga

SEQ ID NO: 71340 - RNA, 32 nt, Homo Sapiens
cuggcagaucaugguagcagcagcgggggugg

SEQ ID NO: 71341 - RNA, 32 nt, Homo Sapiens
cugcuccgcgucugcgccgccgccggagucca

SEQ ID NO: 71342 - RNA, 32 nt, Homo Sapiens
acaugaaggcgaggaugcuggggcccugcagu

SEQ ID NO: 71343 - RNA, 32 nt, Homo Sapiens
cccagccgcgccccagccagcccugcggcagg

SEQ ID NO: 71344 - RNA, 32 nt, Homo Sapiens
gcacggcaggcacuucuggaugcagaggugga

SEQ ID NO: 71345 - RNA, 32 nt, Homo Sapiens
uaaauuacuguuucuuuuuugauuuucuuauc

SEQ ID NO: 71346 - RNA, 32 nt, Homo Sapiens
gggcaugagggagcgucacuuacaaucauguu

SEQ ID NO: 71347 - RNA, 32 nt, Homo Sapiens
ugaacccacaaccagcagaggcagugucugcc

SEQ ID NO: 71348 - RNA, 32 nt, Homo Sapiens
ccagggagaaaagaagccaugagaggcagcgc

SEQ ID NO: 71349 - RNA, 32 nt, Homo Sapiens
acgcauuugggcucagccuuggacauggaggc

SEQ ID NO: 71350 - RNA, 32 nt, Homo Sapiens
cguuguggcagagcguccugcagccccgcuuc

SEQ ID NO: 71351 - RNA, 32 nt, Homo Sapiens
ugcagaggcaagaaaaauauuugacauuguga

SEQ ID NO: 71352 - RNA, 32 nt, Homo Sapiens
ugguccgggucguugcgcgccaucugcggggu

SEQ ID NO: 71353 - RNA, 32 nt, Homo Sapiens
ggaaguagagaggcggccguccugucaacaga

SEQ ID NO: 71354 - RNA, 31 nt, Homo Sapiens
aagaacaaauaaaaagcaugucacugaguug

SEQ ID NO: 71355 - RNA, 32 nt, Homo Sapiens
acacccacugccggggaccacuguccagugaa

SEQ ID NO: 71356 - RNA, 32 nt, Homo Sapiens
ggaggugcucauaguucacuacgggacaugua

SEQ ID NO: 71357 - RNA, 32 nt, Homo Sapiens
uaguggaaagcgacggcgcggcuggaaaaugc

SEQ ID NO: 71358 - RNA, 29 nt, Homo Sapiens
gucaucccuucugagugaaauuugcucau

SEQ ID NO: 71359 - RNA, 32 nt, Homo Sapiens
acccaaauaaacaaaaucagaaaugaaaaaag

SEQ ID NO: 71360 - RNA, 32 nt, Homo Sapiens
gcgcucagccccacccugugccugcugaugcc

SEQ ID NO: 71361 - RNA, 32 nt, Homo Sapiens
gauccacuuuuguugaaggaaugcucauagga

SEQ ID NO: 71362 - RNA, 32 nt, Homo Sapiens
augauauuggauguugguaagaauaaaacaga

SEQ ID NO: 71363 - RNA, 32 nt, Homo Sapiens
uaagugucauucuuggaaacgugggagauuua

SEQ ID NO: 71364 - RNA, 32 nt, Homo Sapiens
ccagggcuagugugggggcuccggcgggggcu

SEQ ID NO: 71365 - RNA, 32 nt, Homo Sapiens
auaacgugaaaauuauauaaaauuugaauuuu

SEQ ID NO: 71366 - RNA, 32 nt, Homo Sapiens
acauuauagagacuccuaggauguguguucau

SEQ ID NO: 71367 - RNA, 32 nt, Homo Sapiens
gagucagaaccagagggaaaugagagacugag

SEQ ID NO: 71368 - RNA, 32 nt, Homo Sapiens
agagcacagaacaauuucucauuucauauuug

SEQ ID NO: 71369 - RNA, 32 nt, Homo Sapiens
aaauuccacacagauaagaggcaggauauaua

SEQ ID NO: 71370 - RNA, 32 nt, Homo Sapiens
cucgcauaaaaguuucccuaaaauauuucaga

SEQ ID NO: 71371 - RNA, 32 nt, Homo Sapiens
ucuggaaggcgaggguucgggccacagugagc

SEQ ID NO: 71372 - RNA, 32 nt, Homo Sapiens
ggacguugccuggcccugccucgaugccucuc

SEQ ID NO: 71373 - RNA, 32 nt, Homo Sapiens
cuagcgcugcggggcgggaggcuacgaagcgc

SEQ ID NO: 71374 - RNA, 32 nt, Homo Sapiens
ggaauugaugucggucauaguuuccugaagca

SEQ ID NO: 71375 - RNA, 32 nt, Homo Sapiens
aguaacugucagugagguugcaguuggucugg

SEQ ID NO: 71376 - RNA, 32 nt, Homo Sapiens
aagucauaaaagacagacugcccagaaaugac

SEQ ID NO: 71377 - RNA, 32 nt, Homo Sapiens
agcuaauuauuuauuucuuuuguauuuuuagu

SEQ ID NO: 71378 - RNA, 32 nt, Homo Sapiens
ucaucgccaccucuguccgaaagugugcuacc

SEQ ID NO: 71379 - RNA, 32 nt, Homo Sapiens
uccaaacgugucaccccggcgccgacggcccu

SEQ ID NO: 71380 - RNA, 32 nt, Homo Sapiens
cgugugccgccagcugggcuguggucgggccg

SEQ ID NO: 71381 - RNA, 32 nt, Homo Sapiens
guaggggcacagacuugugccucgcuucccag

SEQ ID NO: 71382 - RNA, 32 nt, Homo Sapiens
uugccuccaguggaagcagaaaggguuuuuuc

SEQ ID NO: 71383 - RNA, 32 nt, Homo Sapiens
aauaaaaaugacuuggcacuuuuaaagguaac

SEQ ID NO: 71384 - RNA, 32 nt, Homo Sapiens
guccacuugucccgggcuuccaccuggcugac

SEQ ID NO: 71385 - RNA, 32 nt, Homo Sapiens
agcgcgaccgccaggaccgccacgccccggag

SEQ ID NO: 71386 - RNA, 32 nt, Homo Sapiens
gaucuuauuaaacugcuggucugacuuuaugg

SEQ ID NO: 71387 - RNA, 30 nt, Homo Sapiens
ugguuagagaagcugaugccucauuucuac

SEQ ID NO: 71388 - RNA, 32 nt, Homo Sapiens
caaaagagaaacauaaaaaggaugggguaaca

SEQ ID NO: 71389 - RNA, 32 nt, Homo Sapiens
agacuuguaugcaaagguuggcauauuuauau

SEQ ID NO: 71390 - RNA, 32 nt, Homo Sapiens
cguggggggagccgcacugcagcccggcaacu

SEQ ID NO: 71391 - RNA, 32 nt, Homo Sapiens
cuccuucuuucugcaacauggggaagaacaaa

SEQ ID NO: 71392 - RNA, 32 nt, Homo Sapiens
auaaucuuauguauguaaaaccccguuacgau

SEQ ID NO: 71393 - RNA, 32 nt, Homo Sapiens
cuucugggaugcaggaaauguuagaugucuuu

SEQ ID NO: 71394 - RNA, 32 nt, Homo Sapiens
ugccucucuaucaaaucaggguuugcaccuug

SEQ ID NO: 71395 - RNA, 32 nt, Homo Sapiens
acagucuacggaaagcgcuagcagacccccga

SEQ ID NO: 71396 - RNA, 32 nt, Homo Sapiens
aggaagcacauaauguccagaucuauggcgaa

SEQ ID NO: 71397 - RNA, 32 nt, Homo Sapiens
gcugugagcugaaauggcgccacugcacucca

SEQ ID NO: 71398 - RNA, 32 nt, Homo Sapiens
uuuaggucaggagaucaagaccagcugggcca

SEQ ID NO: 71399 - RNA, 32 nt, Homo Sapiens
uuggggcgcaguggggaaagugccggaccacc

SEQ ID NO: 71400 - RNA, 32 nt, Homo Sapiens
agacacugaaaacaaaguucccuuucucaagg

SEQ ID NO: 71401 - RNA, 32 nt, Homo Sapiens
uugccuacaauaagauuguugccguuaagaag

SEQ ID NO: 71402 - RNA, 32 nt, Homo Sapiens
gcuggaccgacggcugccgggccgagcgcaca

SEQ ID NO: 71403 - RNA, 32 nt, Homo Sapiens
gcaggauaaaaauaaaaugugagacagauuua

SEQ ID NO: 71404 - RNA, 32 nt, Homo Sapiens
cuccuuucccccuccuucuccaucccuguaaa

SEQ ID NO: 71405 - RNA, 31 nt, Homo Sapiens
agcuugcuugcagaagacuagauuagauguu

SEQ ID NO: 71406 - RNA, 32 nt, Homo Sapiens
ccccuuguaaaaagaaccaagaguuuaugcau

SEQ ID NO: 71407 - RNA, 32 nt, Homo Sapiens
cccccaucagcaccgccuccaccacccgcuug

SEQ ID NO: 71408 - RNA, 32 nt, Homo Sapiens
ccaaauguguuaaauuuguaacuccucuuugg

SEQ ID NO: 71409 - RNA, 32 nt, Homo Sapiens
cugcaaaauggaguugaauuguaaccauuauu

SEQ ID NO: 71410 - RNA, 32 nt, Homo Sapiens
cggaccgcuuguggggacccaggcuccgccuu

SEQ ID NO: 71411 - RNA, 32 nt, Homo Sapiens
guaguucuucaaaugguuaaauguagaguuac

SEQ ID NO: 71412 - RNA, 32 nt, Homo Sapiens
ugaagaaagaaacuuaaaauccagguuguuga

SEQ ID NO: 71413 - RNA, 32 nt, Homo Sapiens
agaaagggcaaauuauuuuaauauuuuguauu

SEQ ID NO: 71414 - RNA, 31 nt, Homo Sapiens
gaggugucgcacugccucccacccugugucu

SEQ ID NO: 71415 - RNA, 32 nt, Homo Sapiens
accacgcccagcaaauuuuuaaauuuauuaua

SEQ ID NO: 71416 - RNA, 32 nt, Homo Sapiens
uggauguaauuuucuuuuuacguauuuuucuu

SEQ ID NO: 71417 - RNA, 32 nt, Homo Sapiens
gaaaguuuaaagaaacuugaccaaaagacagu

SEQ ID NO: 71418 - RNA, 32 nt, Homo Sapiens
aagaggaggaggagggucuagaggccugaaau

SEQ ID NO: 71419 - RNA, 32 nt, Homo Sapiens
cagugaguaaacaugagccucugguagauaag

SEQ ID NO: 71420 - RNA, 32 nt, Homo Sapiens
ggaccuuuuuguaacagggcuacauucugcaa

SEQ ID NO: 71421 - RNA, 32 nt, Homo Sapiens
uucccucccaggaucaguuucuacacaacucu

SEQ ID NO: 71422 - RNA, 32 nt, Homo Sapiens
ggacagagccucggggaccuucaacacuacua

SEQ ID NO: 71423 - RNA, 32 nt, Homo Sapiens
gccagcguccccagccuggcuucccugccaug

SEQ ID NO: 71424 - RNA, 32 nt, Homo Sapiens
cuuuaaauauauauuuaguuuaucaauaaaga

SEQ ID NO: 71425 - RNA, 32 nt, Homo Sapiens
uuaacuugauuucaugguaucucuuucaucuu

SEQ ID NO: 71426 - RNA, 32 nt, Homo Sapiens
aucgacaagcaguuucuguuuucuaaaggaca

SEQ ID NO: 71427 - RNA, 32 nt, Homo Sapiens
gcuguggaugagaauggauuguggguuauuua

SEQ ID NO: 71428 - RNA, 32 nt, Homo Sapiens
gcacagagccgugucccagacacgcugucagu

SEQ ID NO: 71429 - RNA, 32 nt, Homo Sapiens
uuccauuacccauucuccacagaaugaauuaa

SEQ ID NO: 71430 - RNA, 32 nt, Homo Sapiens
ugcgccacaucccaccggcccuuacacugugg

SEQ ID NO: 71431 - RNA, 32 nt, Homo Sapiens
caaaauugaaagggcaaccugugccuucuccu

SEQ ID NO: 71432 - RNA, 32 nt, Homo Sapiens
uugaguucaaaaggaagguggguuuugaaaga

SEQ ID NO: 71433 - RNA, 32 nt, Homo Sapiens
ccuuugucuggagcuuccuuaugcauuuucug

SEQ ID NO: 71434 - RNA, 32 nt, Homo Sapiens
ccaguguaauucagaaucauggccuagaaagu

SEQ ID NO: 71435 - RNA, 32 nt, Homo Sapiens
gcuuagcguaauuauaaauuuucaaauuuuaa

SEQ ID NO: 71436 - RNA, 32 nt, Homo Sapiens
aucugagggggagggagaaggaugcucaguug

SEQ ID NO: 71437 - RNA, 32 nt, Homo Sapiens
uauaaucagaucuauuacaaauauauaucgga

SEQ ID NO: 71438 - RNA, 32 nt, Homo Sapiens
ccuggcuguucacuucccugccauucaguaug

SEQ ID NO: 71439 - RNA, 32 nt, Homo Sapiens
gccaguauuuguuccuguuuuacaaugcuucu

SEQ ID NO: 71440 - RNA, 32 nt, Homo Sapiens
gacggcgggagccgcugcucuccggcugaggg

SEQ ID NO: 71441 - RNA, 32 nt, Homo Sapiens
ggacauuugccuuuuugugccuggaucuugca

SEQ ID NO: 71442 - RNA, 32 nt, Homo Sapiens
aauauucaauaguuuaaacaugcaacaaugau

SEQ ID NO: 71443 - RNA, 32 nt, Homo Sapiens
acacccagccaugaguuuuuccugaagcacuu

SEQ ID NO: 71444 - RNA, 32 nt, Homo Sapiens
ugguguuuguuuguuuguugggcucacgccug

SEQ ID NO: 71445 - RNA, 32 nt, Homo Sapiens
uuccauuuaagggauagcaguuccuuguauaa

SEQ ID NO: 71446 - RNA, 32 nt, Homo Sapiens
auccucuucuugucuuuuuuuuugcauuuucc

SEQ ID NO: 71447 - RNA, 32 nt, Homo Sapiens
uacuguugcuccaggcggacaaggcugacaag

SEQ ID NO: 71448 - RNA, 32 nt, Homo Sapiens
ccucgcuccucgcuccucgccccuaggacgcc

SEQ ID NO: 71449 - RNA, 32 nt, Homo Sapiens
uacuuaugaaaaguauuuugcuuaagguugug

SEQ ID NO: 71450 - RNA, 32 nt, Homo Sapiens
agugggaggaagagccugggacaguggccaua

SEQ ID NO: 71451 - RNA, 32 nt, Homo Sapiens
caccagggcugugugcgugugcauguuugugu

SEQ ID NO: 71452 - RNA, 32 nt, Homo Sapiens
augagccacugcacccggccuuucucauuuuu

SEQ ID NO: 71453 - RNA, 32 nt, Homo Sapiens
ggauauuuuucauaauuauuuaaaagacaggc

SEQ ID NO: 71454 - RNA, 32 nt, Homo Sapiens
gucucuggucccagcccaccccauggccccuc

SEQ ID NO: 71455 - RNA, 32 nt, Homo Sapiens
ccaguggagccgucuuccuucccgaggcagag

SEQ ID NO: 71456 - RNA, 32 nt, Homo Sapiens
caauugcucccuccucucuuucgcuacccccu

SEQ ID NO: 71457 - RNA, 32 nt, Homo Sapiens
ucgcagccgcugcuaucuccagugcucaucac

SEQ ID NO: 71458 - RNA, 32 nt, Homo Sapiens
cuugccaaaccaaagacccuugccagaacccu

SEQ ID NO: 71459 - RNA, 32 nt, Homo Sapiens
cucuucucugucaucgucaggcuccccacuug

SEQ ID NO: 71460 - RNA, 32 nt, Homo Sapiens
guguaagagaugagauugggaaaaaccucauu

SEQ ID NO: 71461 - RNA, 32 nt, Homo Sapiens
aaaaauauguuuagauuuuucuuucuugcacu

SEQ ID NO: 71462 - RNA, 32 nt, Homo Sapiens
aguaacaaacaaaagccaauguguguaugugu

SEQ ID NO: 71463 - RNA, 32 nt, Homo Sapiens
uagagcuacagauccagauacacacacuugug

SEQ ID NO: 71464 - RNA, 32 nt, Homo Sapiens
ugcggccuccaccaaccccgcggcccagaccc

SEQ ID NO: 71465 - RNA, 32 nt, Homo Sapiens
cgaaggaaaucuggccgccgccgccgcgagcg

SEQ ID NO: 71466 - RNA, 32 nt, Homo Sapiens
ggugccuguguacggagccugaugacuucacu

SEQ ID NO: 71467 - RNA, 32 nt, Homo Sapiens
uucucucugaugcaugaaaacucagagugaua

SEQ ID NO: 71468 - RNA, 32 nt, Homo Sapiens
uaauuacaauuaugaauggaggauauucuacu

SEQ ID NO: 71469 - RNA, 32 nt, Homo Sapiens
acuugaauucuaugcuaagcaggguuccaagu

SEQ ID NO: 71470 - RNA, 32 nt, Homo Sapiens
gcgacgccgggcggcgggacccauggaggcgc

SEQ ID NO: 71471 - RNA, 32 nt, Homo Sapiens
agaggcauuguuaaccacugugccucucacac

SEQ ID NO: 71472 - RNA, 32 nt, Homo Sapiens
caaagggccugggcccgccccgagggggcagc

SEQ ID NO: 71473 - RNA, 32 nt, Homo Sapiens
cauuuguugaucccuuuucucaucuuaccccu

SEQ ID NO: 71474 - RNA, 32 nt, Homo Sapiens
cuuuggcugucccucuccccagccuggagagg

SEQ ID NO: 71475 - RNA, 32 nt, Homo Sapiens
gaaccacaaagaugggagaaucuuccaaguca

SEQ ID NO: 71476 - RNA, 32 nt, Homo Sapiens
gaggguggagcaggaggcucucacuggugagu

SEQ ID NO: 71477 - RNA, 32 nt, Homo Sapiens
aguuugucaggaugcuuuaaggugauuaguaa

SEQ ID NO: 71478 - RNA, 32 nt, Homo Sapiens
uaauuuaacucuauguuguccgccguguaaac

SEQ ID NO: 71479 - RNA, 32 nt, Homo Sapiens
gaauuuucaugacccuuuuauuguauacaaau

SEQ ID NO: 71480 - RNA, 32 nt, Homo Sapiens
aguugucuggccugacacagcaucacaucaca

SEQ ID NO: 71481 - RNA, 32 nt, Homo Sapiens
ccucugagguugaaggacccaggcgugucagc

SEQ ID NO: 71482 - RNA, 31 nt, Homo Sapiens
cuuauaggacuggaauuauagauuagaaagu

SEQ ID NO: 71483 - RNA, 31 nt, Homo Sapiens
uucaacauaaagaaaagacgaauauuuaagg

SEQ ID NO: 71484 - RNA, 32 nt, Homo Sapiens
uggaagcuuuuugagggcagguccuugucuuu

SEQ ID NO: 71485 - RNA, 32 nt, Homo Sapiens
cauagaacuucgaugucuuuuguuucaucauc

SEQ ID NO: 71486 - RNA, 32 nt, Homo Sapiens
ugcuugugaaaaauaagagaacuuuuuucccu

SEQ ID NO: 71487 - RNA, 32 nt, Homo Sapiens
ugguagguggggcgagacuugcuggcuucggg

SEQ ID NO: 71488 - RNA, 32 nt, Homo Sapiens
ucauauacagaaaaauaguaugaaaauaaaau

SEQ ID NO: 71489 - RNA, 32 nt, Homo Sapiens
auuuuuugaguaauucugaaaugauauugcau

SEQ ID NO: 71490 - RNA, 32 nt, Homo Sapiens
gcaagaagaaugccaucugcaagccaggaaga

SEQ ID NO: 71491 - RNA, 32 nt, Homo Sapiens
agcauacuccaaacuguuucugauguguucca

SEQ ID NO: 71492 - RNA, 32 nt, Homo Sapiens
aggcacuguacuggguagagaagugccuauac

SEQ ID NO: 71493 - RNA, 32 nt, Homo Sapiens
uucccaacccacccccaaacuaaacacuaagu

SEQ ID NO: 71494 - RNA, 32 nt, Homo Sapiens
cuagauugaaguuuguuuucugaugcuguucu

SEQ ID NO: 71495 - RNA, 32 nt, Homo Sapiens
cugccacuggcuugcuuuuggaccuuggaugu

SEQ ID NO: 71496 - RNA, 32 nt, Homo Sapiens
ugcuuuagcgugucaggguccaggcugcaggg

SEQ ID NO: 71497 - RNA, 32 nt, Homo Sapiens
uugggccagugacccuuggaguaggauguaua

SEQ ID NO: 71498 - RNA, 32 nt, Homo Sapiens
uuugcuuagaaagucugauuguagcuaugauu

SEQ ID NO: 71499 - RNA, 32 nt, Homo Sapiens
auuuacaguuggcaucauuugcacagcggcag

SEQ ID NO: 71500 - RNA, 32 nt, Homo Sapiens
aguguggccccggccagacgcccugugaggug

SEQ ID NO: 71501 - RNA, 32 nt, Homo Sapiens
uugagaccucgcgguaaccuuguguagaauca

SEQ ID NO: 71502 - RNA, 32 nt, Homo Sapiens
acuguguuagacaugaguuugcuagauccaug

SEQ ID NO: 71503 - RNA, 31 nt, Homo Sapiens
gugccaaagaggccaugcugaguuagguagg

SEQ ID NO: 71504 - RNA, 32 nt, Homo Sapiens
uaguugggacagagaccauauggccugcaaag

SEQ ID NO: 71505 - RNA, 32 nt, Homo Sapiens
gucacauuggaacacagagcuggucugggaac

SEQ ID NO: 71506 - RNA, 32 nt, Homo Sapiens
uaugcucauguugcuuuuuuuguuuuagaaaa

SEQ ID NO: 71507 - RNA, 32 nt, Homo Sapiens
gcucacuuuacuauggguguauuuuaaucuug

SEQ ID NO: 71508 - RNA, 32 nt, Homo Sapiens
agccacggugauguugucauaaccucagagug

SEQ ID NO: 71509 - RNA, 32 nt, Homo Sapiens
uauuuccauuuucgucugucccaucuaugagg

SEQ ID NO: 71510 - RNA, 32 nt, Homo Sapiens
cauguuuccuuccuucaacuguguucucccug

SEQ ID NO: 71511 - RNA, 32 nt, Homo Sapiens
cccaucuaaggacuugauuugcugcuuucuga

SEQ ID NO: 71512 - RNA, 32 nt, Homo Sapiens
uguguuuacuuguaaauaaagccucugggugg

SEQ ID NO: 71513 - RNA, 32 nt, Homo Sapiens
cuaaauuaaaucuauuuuaaauaaagguuauu

SEQ ID NO: 71514 - RNA, 32 nt, Homo Sapiens
gugggauuugcagggacuuuucugggagaacu

SEQ ID NO: 71515 - RNA, 32 nt, Homo Sapiens
cuugugcuccagcuggagcuuuggucccguau

SEQ ID NO: 71516 - RNA, 32 nt, Homo Sapiens
acacagggccuggccugggguccugggcaaga

SEQ ID NO: 71517 - RNA, 32 nt, Homo Sapiens
cgaccugcuggugcgcgccggauguuucugug

SEQ ID NO: 71518 - RNA, 32 nt, Homo Sapiens
ugugucuuuuuucaucuuuguaucuuucaugc

SEQ ID NO: 71519 - RNA, 32 nt, Homo Sapiens
ucuguguuagacauuuugauuaucugcaguuu

SEQ ID NO: 71520 - RNA, 28 nt, Homo Sapiens
ucagacaugagcaccaggauggcagggg

SEQ ID NO: 71521 - RNA, 27 nt, Homo Sapiens
auauuauucuucuucaccuuugcaucc

SEQ ID NO: 71522 - RNA, 32 nt, Homo Sapiens
uggagugggugucaguauggaugugucugaau

SEQ ID NO: 71523 - RNA, 32 nt, Homo Sapiens
uccugcagcugagaucuaugcaggccauccuc

SEQ ID NO: 71524 - RNA, 32 nt, Homo Sapiens
gcauccucuggaguccuuccaguguccucccc

SEQ ID NO: 71525 - RNA, 32 nt, Homo Sapiens
uguauucaacuuuccuaugaauugagcuguga

SEQ ID NO: 71526 - RNA, 32 nt, Homo Sapiens
ucacucuguuucugaaaccaauccagaaauuc

SEQ ID NO: 71527 - RNA, 31 nt, Homo Sapiens
ggaauaaagugucaagcaagauuuuagccgc

SEQ ID NO: 71528 - RNA, 32 nt, Homo Sapiens
uaaccccaaauuauccacaugguguguauuau

SEQ ID NO: 71529 - RNA, 32 nt, Homo Sapiens
cacauaauuucuguuucagcaguacaaaggca

SEQ ID NO: 71530 - RNA, 32 nt, Homo Sapiens
acuucuauaaccuuaagugauagggugacaug

SEQ ID NO: 71531 - RNA, 32 nt, Homo Sapiens
cucuucauagacacauuuguuacucuaacccu

SEQ ID NO: 71532 - RNA, 32 nt, Homo Sapiens
gccuggccaacauguuguaaaccccgucucua

SEQ ID NO: 71533 - RNA, 32 nt, Homo Sapiens
cgcugcugcccugcugccccccucugccaggc

SEQ ID NO: 71534 - RNA, 32 nt, Homo Sapiens
ccugauuauuuuugauuucuguuuguguggua

SEQ ID NO: 71535 - RNA, 32 nt, Homo Sapiens
uuuuucuuuuuuucuuuuuucuuuucuuuuuu

SEQ ID NO: 71536 - RNA, 32 nt, Homo Sapiens
cuuucuuucucuucuuuccuucuuuuuuuuuu

SEQ ID NO: 71537 - RNA, 32 nt, Homo Sapiens
cugagaaaaaauagaaaagaccaagauuggug

SEQ ID NO: 71538 - RNA, 32 nt, Homo Sapiens
cagcugggcaugcggccagagcccaagaaaag

SEQ ID NO: 71539 - RNA, 32 nt, Homo Sapiens
gcaccuuacaugacagaagugauucagggauu

SEQ ID NO: 71540 - RNA, 32 nt, Homo Sapiens
guuauuuucauucaaaguguuauuuuguuuuu

SEQ ID NO: 71541 - RNA, 32 nt, Homo Sapiens
cugucuuuuuguuacuuuuuuguccguguccu

SEQ ID NO: 71542 - RNA, 32 nt, Homo Sapiens
acuuugaaaaagauauuuaugauguuaacauu

SEQ ID NO: 71543 - RNA, 32 nt, Homo Sapiens
gugcgcagaggcugcccucgggcccgcuaccc

SEQ ID NO: 71544 - RNA, 32 nt, Homo Sapiens
ccuagcugccagugcuuggagaugagaauugc

SEQ ID NO: 71545 - RNA, 32 nt, Homo Sapiens
ugaggcgcugaggcggcugccggcgcugcgcc

SEQ ID NO: 71546 - RNA, 32 nt, Homo Sapiens
ucuuucugugguagcggccagcagaagacaug

SEQ ID NO: 71547 - RNA, 32 nt, Homo Sapiens
ccaaggugcugggacuacaggcgugggucacu

SEQ ID NO: 71548 - RNA, 32 nt, Homo Sapiens
ucgccgcgguagccggccgacgcgccagcuuc

SEQ ID NO: 71549 - RNA, 32 nt, Homo Sapiens
uucuggccacggugccauaccuguuucuuccu

SEQ ID NO: 71550 - RNA, 32 nt, Homo Sapiens
ccagggggcagguggggugccugggagguccg

SEQ ID NO: 71551 - RNA, 32 nt, Homo Sapiens
aagugcagcugaaagcacuccuugggagucag

SEQ ID NO: 71552 - RNA, 32 nt, Homo Sapiens
uagcaacgaaaacagccagcaucuuugcuuaa

SEQ ID NO: 71553 - RNA, 32 nt, Homo Sapiens
uacaugauuuaugguagcucuggggugagcug

SEQ ID NO: 71554 - RNA, 32 nt, Homo Sapiens
guauuuguugacauugauccacagguuucuga

SEQ ID NO: 71555 - RNA, 32 nt, Homo Sapiens
ucuacuaaaaauacaaaauuagucggguaugg

SEQ ID NO: 71556 - RNA, 32 nt, Homo Sapiens
ugaugcacccccaggaaggccacgcgcucagg

SEQ ID NO: 71557 - RNA, 32 nt, Homo Sapiens
agaaaucugaacuuuuuaauauuguuaaauau

SEQ ID NO: 71558 - RNA, 32 nt, Homo Sapiens
uccucaaacaggucgcuucucgggaguucuug

SEQ ID NO: 71559 - RNA, 32 nt, Homo Sapiens
uaugcaacaaaguugaaaaccacugauccugg

SEQ ID NO: 71560 - RNA, 32 nt, Homo Sapiens
ugguggagcgucugcaccuuggcugcgccgcc

SEQ ID NO: 71561 - RNA, 32 nt, Homo Sapiens
uuagggcguggcagcuucggauaaacgcagga

SEQ ID NO: 71562 - RNA, 32 nt, Homo Sapiens
augaagaggucuuggaacaguagugaaaauuc

SEQ ID NO: 71563 - RNA, 32 nt, Homo Sapiens
cuguaauucuucuccuuugucaaaugguauuu

SEQ ID NO: 71564 - RNA, 32 nt, Homo Sapiens
guuucgcucccucgcugagucccuucuccccg

SEQ ID NO: 71565 - RNA, 32 nt, Homo Sapiens
agaaacagcauauuagcagggauucucucauc

SEQ ID NO: 71566 - RNA, 32 nt, Homo Sapiens
gugcuuuuugaaaaugcaaugaauuccuauac

SEQ ID NO: 71567 - RNA, 32 nt, Homo Sapiens
aagguggggucucagugcuuucgcacagggcg

SEQ ID NO: 71568 - RNA, 32 nt, Homo Sapiens
gccccuuggcugcugcugcugcuuacuccuga

SEQ ID NO: 71569 - RNA, 32 nt, Homo Sapiens
gaggggucaggauauccccacccccacccugg

SEQ ID NO: 71570 - RNA, 32 nt, Homo Sapiens
ggaugagacaaaaggccagacagaaauuggac

SEQ ID NO: 71571 - RNA, 32 nt, Homo Sapiens
ccgcuggcucugcaugguucauuuucugaugc

SEQ ID NO: 71572 - RNA, 31 nt, Homo Sapiens
ucugugucccugccacucugaguuauccaga

SEQ ID NO: 71573 - RNA, 32 nt, Homo Sapiens
gagggauguggcaaaauccacgaguagcgaaa

SEQ ID NO: 71574 - RNA, 32 nt, Homo Sapiens
gggccgagauccaguaugaugacuagccgcac

SEQ ID NO: 71575 - RNA, 32 nt, Homo Sapiens
aagcucuagugggaaaaaucuggccacuuuug

SEQ ID NO: 71576 - RNA, 32 nt, Homo Sapiens
aaggauaaaguaccuuugagcaugaguguauc

SEQ ID NO: 71577 - RNA, 32 nt, Homo Sapiens
aguauauuguuaacauuuuccaugucaauaaa

SEQ ID NO: 71578 - RNA, 32 nt, Homo Sapiens
gcgugcccucccggggguggguuccgggcgga

SEQ ID NO: 71579 - RNA, 32 nt, Homo Sapiens
ucuuuuaggucuuuaaguaacugaaguuaagc

SEQ ID NO: 71580 - RNA, 32 nt, Homo Sapiens
ugcagugugucuuuuuuccacuggcagcuuuu

SEQ ID NO: 71581 - RNA, 32 nt, Homo Sapiens
ugaucaacagguaugaauauaacuuaaaucag

SEQ ID NO: 71582 - RNA, 32 nt, Homo Sapiens
caccuguuuuucuucagcuaauaaaaaagaca

SEQ ID NO: 71583 - RNA, 32 nt, Homo Sapiens
ucaaaaaccuuuaucaggccuuggagauguua

SEQ ID NO: 71584 - RNA, 32 nt, Homo Sapiens
aacaauucaauugcuuuuuuuuuuugguccaa

SEQ ID NO: 71585 - RNA, 32 nt, Homo Sapiens
uuuauuuguaaaaaguuaagggagaguugguc

SEQ ID NO: 71586 - RNA, 32 nt, Homo Sapiens
aaauaguacccauacaugaauuauuucuaagu

SEQ ID NO: 71587 - RNA, 32 nt, Homo Sapiens
auagaaaccaacuggcagcuuucccugacaag

SEQ ID NO: 71588 - RNA, 32 nt, Homo Sapiens
auaacagaugagaagaaaucugauugaugcug

SEQ ID NO: 71589 - RNA, 32 nt, Homo Sapiens
aagcuccagguagaggguguguaaguagauag

SEQ ID NO: 71590 - RNA, 32 nt, Homo Sapiens
uauugaagggcaaagaggaacuguuguuugaa

SEQ ID NO: 71591 - RNA, 32 nt, Homo Sapiens
uccccaccacucagcggccgcuccacaccuaa

SEQ ID NO: 71592 - RNA, 32 nt, Homo Sapiens
gcgaucccuacugaacgcuugugucucagggu

SEQ ID NO: 71593 - RNA, 32 nt, Homo Sapiens
guauuuauaacucauugucagccaaaugcuau

SEQ ID NO: 71594 - RNA, 32 nt, Homo Sapiens
gcaauuuaagaaaauguggaaaaaauauuuuu

SEQ ID NO: 71595 - RNA, 32 nt, Homo Sapiens
uauaaauugggauaaacaucacaugagacaau

SEQ ID NO: 71596 - RNA, 32 nt, Homo Sapiens
cuggagcagcugcgggagcggcuggagucagg

SEQ ID NO: 71597 - RNA, 32 nt, Homo Sapiens
gagcgcgcggcccuuccccugucggaagccgu

SEQ ID NO: 71598 - RNA, 32 nt, Homo Sapiens
cccuuugaagaacugcagaaauucauagggca

SEQ ID NO: 71599 - RNA, 32 nt, Homo Sapiens
uagggggccagacggacccuggggaguaggca

SEQ ID NO: 71600 - RNA, 32 nt, Homo Sapiens
ucacagaaagacuguaagugagcaacuauuuu

SEQ ID NO: 71601 - RNA, 32 nt, Homo Sapiens
ccacagugcagggcugacugaacugucacugu

SEQ ID NO: 71602 - RNA, 32 nt, Homo Sapiens
gagcagccccacuuucgguaaagcaagcaacc

SEQ ID NO: 71603 - RNA, 32 nt, Homo Sapiens
acuguggcacaagcucaggccgcagacggugc

SEQ ID NO: 71604 - RNA, 32 nt, Homo Sapiens
acccaagagucagagauggggcuggucauguu

SEQ ID NO: 71605 - RNA, 32 nt, Homo Sapiens
gguggccugcaguaugcagagccccgcaggac

SEQ ID NO: 71606 - RNA, 32 nt, Homo Sapiens
uuaaagaaaaucccucuuggccggguguggua

SEQ ID NO: 71607 - RNA, 32 nt, Homo Sapiens
gggcacacgucucgccucuuugcgacucggug

SEQ ID NO: 71608 - RNA, 32 nt, Homo Sapiens
auuuggccgggcguccgcaggccgugggggau

SEQ ID NO: 71609 - RNA, 32 nt, Homo Sapiens
ucaauaaauauguggguaaaucucuguucaag

SEQ ID NO: 71610 - RNA, 32 nt, Homo Sapiens
gguaucccuuacccagcacuuaaacuuggcag

SEQ ID NO: 71611 - RNA, 32 nt, Homo Sapiens
cuccccugacagucccuccucuccggagcauu

SEQ ID NO: 71612 - RNA, 32 nt, Homo Sapiens
gggaguggguggcaggugggggugggcugcug

SEQ ID NO: 71613 - RNA, 32 nt, Homo Sapiens
augauuaaauuaauaucuucaggaauauuuug

SEQ ID NO: 71614 - RNA, 30 nt, Homo Sapiens
uccaaauugucaacuaagaaauggucacuu

SEQ ID NO: 71615 - RNA, 32 nt, Homo Sapiens
ggucaccggccgauggagacaccaaccgacag

SEQ ID NO: 71616 - RNA, 32 nt, Homo Sapiens
ucucccagccaccuccucccagccccccagga

SEQ ID NO: 71617 - RNA, 32 nt, Homo Sapiens
uccaggacacaccuguaucccagagagcaaag

SEQ ID NO: 71618 - RNA, 32 nt, Homo Sapiens
aucagauguaucuggucagugaagcccaggag

SEQ ID NO: 71619 - RNA, 32 nt, Homo Sapiens
aguuuuuacaugccacagcucagcugucugcc

SEQ ID NO: 71620 - RNA, 32 nt, Homo Sapiens
cccgcccgcucccggggcacgugggcagagcu

SEQ ID NO: 71621 - RNA, 32 nt, Homo Sapiens
ugguguccuacuguggcuucuccaccuggaaa

SEQ ID NO: 71622 - RNA, 32 nt, Homo Sapiens
ccaaacuagaaaagagggagcgagagaauggc

SEQ ID NO: 71623 - RNA, 32 nt, Homo Sapiens
accccuucuguccucacuguaccuugaagucc

SEQ ID NO: 71624 - RNA, 32 nt, Homo Sapiens
gguuccguaagaggccuggugcucucuuacuc

SEQ ID NO: 71625 - RNA, 32 nt, Homo Sapiens
aauuagugcuaauuuuccuaaaacagugucaa

SEQ ID NO: 71626 - RNA, 32 nt, Homo Sapiens
guugugauuggaacugaugaaguaaaauaagu

SEQ ID NO: 71627 - RNA, 32 nt, Homo Sapiens
guaaaggcagaguuguuaacugcuauauuuca

SEQ ID NO: 71628 - RNA, 32 nt, Homo Sapiens
ccugacccacccaggaguuggaccgggaguug

SEQ ID NO: 71629 - RNA, 32 nt, Homo Sapiens
aggcacaaaaugauggacccaaugcacacaaa

SEQ ID NO: 71630 - RNA, 32 nt, Homo Sapiens
aguagcuuggggugggggugggcaccuguggu

SEQ ID NO: 71631 - RNA, 32 nt, Homo Sapiens
cagagcuccccucccuucagauuauguuaacu

SEQ ID NO: 71632 - RNA, 32 nt, Homo Sapiens
ugcuuauaacauuaagaaaaacaauaaagaua

SEQ ID NO: 71633 - RNA, 32 nt, Homo Sapiens
gggaggccaucgcgcugcugcaggccauggug

SEQ ID NO: 71634 - RNA, 32 nt, Homo Sapiens
agcgggaggagcuuggcuuccucgcguauuug

SEQ ID NO: 71635 - RNA, 32 nt, Homo Sapiens
gucauggcagucuuuuuaaucuuuuuaucaua

SEQ ID NO: 71636 - RNA, 32 nt, Homo Sapiens
agguuaaacaaggucaugaggacccuaaucca

SEQ ID NO: 71637 - RNA, 32 nt, Homo Sapiens
cuaauuaggaguugauugagacuuuauuaugg

SEQ ID NO: 71638 - RNA, 32 nt, Homo Sapiens
cugacagagcaucagaaccagaggcuuggucc

SEQ ID NO: 71639 - RNA, 32 nt, Homo Sapiens
ugauuguguuucuuaaguuucauuuuuaauuu

SEQ ID NO: 71640 - RNA, 32 nt, Homo Sapiens
gaggaaggaaugccucuugcaguugagacaag

SEQ ID NO: 71641 - RNA, 32 nt, Homo Sapiens
cuguuggugaggagggucggaggggcgaccuc

SEQ ID NO: 71642 - RNA, 32 nt, Homo Sapiens
aagcaucuauguauuuuuuuuaaguuccacag

SEQ ID NO: 71643 - RNA, 32 nt, Homo Sapiens
acucacuaauacuacuguaccuuucauuggcg

SEQ ID NO: 71644 - RNA, 29 nt, Homo Sapiens
gcuaagccauaauagaaagaauggagaau

SEQ ID NO: 71645 - RNA, 32 nt, Homo Sapiens
uuggagccugaacaugacauuuccaggugggg

SEQ ID NO: 71646 - RNA, 32 nt, Homo Sapiens
ccuguggccccggccucaugagcacccccugc

SEQ ID NO: 71647 - RNA, 32 nt, Homo Sapiens
gagaugcuuagagacaggacaccuggcccuca

SEQ ID NO: 71648 - RNA, 32 nt, Homo Sapiens
aaucacugacaguggcagcuaugaacaaaauc

SEQ ID NO: 71649 - RNA, 32 nt, Homo Sapiens
cagcugggcccaccagccuccucaggaaggcg

SEQ ID NO: 71650 - RNA, 32 nt, Homo Sapiens
uggaaugaggcccuuucaaaagcgucauccac

SEQ ID NO: 71651 - RNA, 32 nt, Homo Sapiens
guggggaggucuuagcaggagcgggcccugua

SEQ ID NO: 71652 - RNA, 32 nt, Homo Sapiens
agggacacccucugagacgugcuggccccagg

SEQ ID NO: 71653 - RNA, 32 nt, Homo Sapiens
ugaauuacuguaaauaugcuacccucacuuuu

SEQ ID NO: 71654 - RNA, 32 nt, Homo Sapiens
acuucaaagauauucagaggcugagcggugca

SEQ ID NO: 71655 - RNA, 32 nt, Homo Sapiens
guggagcgguggagggcgucacuggguuucgg

SEQ ID NO: 71656 - RNA, 32 nt, Homo Sapiens
uucuggaggggaggggagauaauaaggagggc

SEQ ID NO: 71657 - RNA, 32 nt, Homo Sapiens
ucuggacgcccggcaguccccggggcuagagc

SEQ ID NO: 71658 - RNA, 32 nt, Homo Sapiens
ugccggggacaaagccgggggcgugaggggcg

SEQ ID NO: 71659 - RNA, 32 nt, Homo Sapiens
cacacaccuuucuuuacccagagccacugaaa

SEQ ID NO: 71660 - RNA, 32 nt, Homo Sapiens
ucagcaucuuccgccaguucaugccccagacc

SEQ ID NO: 71661 - RNA, 30 nt, Homo Sapiens
uaaaacuaucaccacaacugaagugaggaa

SEQ ID NO: 71662 - RNA, 32 nt, Homo Sapiens
uuagggcagaaaccaugggcuauguuaauguc

SEQ ID NO: 71663 - RNA, 32 nt, Homo Sapiens
acaacaagaacaaaaguaucacauuggcauaa

SEQ ID NO: 71664 - RNA, 32 nt, Homo Sapiens
gagaaaaggacacgcuaucaaaacacuuuagu

SEQ ID NO: 71665 - RNA, 29 nt, Homo Sapiens
augaugucauaugagggaguguugcuuga

SEQ ID NO: 71666 - RNA, 32 nt, Homo Sapiens
ucccgcaggagcuucgggcuucuccugguaga

SEQ ID NO: 71667 - RNA, 32 nt, Homo Sapiens
ccggguuucugcaguguuaaacggacguguaa

SEQ ID NO: 71668 - RNA, 27 nt, Homo Sapiens
uuaugccaucacaucugguaugugggu

SEQ ID NO: 71669 - RNA, 32 nt, Homo Sapiens
agcuggggugggugaggccugcacugauuggg

SEQ ID NO: 71670 - RNA, 32 nt, Homo Sapiens
caaagacauuuauauggguuuauuuucauucu

SEQ ID NO: 71671 - RNA, 32 nt, Homo Sapiens
cccggaggguuaaccuggguguccucggcaaa

SEQ ID NO: 71672 - RNA, 31 nt, Homo Sapiens
uaaaagaaaauaaaaugacauaaaagggagc

SEQ ID NO: 71673 - RNA, 32 nt, Homo Sapiens
cccagcauuucccucuuuuucuccucaucggc

SEQ ID NO: 71674 - RNA, 32 nt, Homo Sapiens
auggguagugacguuaagagauauauaucagc

SEQ ID NO: 71675 - RNA, 32 nt, Homo Sapiens
aguaccuaguauuggaagauccaccuuaacga

SEQ ID NO: 71676 - RNA, 32 nt, Homo Sapiens
uucugacccugccugucuuuuugggguuuuuu

SEQ ID NO: 71677 - RNA, 32 nt, Homo Sapiens
cuccuguauucuuagaaccagauugcugaagc

SEQ ID NO: 71678 - RNA, 32 nt, Homo Sapiens
aauauuuuuaaugucuuaaaaauguacacaga

SEQ ID NO: 71679 - RNA, 32 nt, Homo Sapiens
acagaucccauccaucagcucccuuuucuuuu

SEQ ID NO: 71680 - RNA, 32 nt, Homo Sapiens
uuuucugaacgcacuguacaugugcugagaga

SEQ ID NO: 71681 - RNA, 32 nt, Homo Sapiens
uuacaggugugagccaccgcgcccagccaaga

SEQ ID NO: 71682 - RNA, 32 nt, Homo Sapiens
aaauuagcuggguuugguggcgcaugcuugua

SEQ ID NO: 71683 - RNA, 32 nt, Homo Sapiens
gugagcgggcuccgcugcccccugcccugcac

SEQ ID NO: 71684 - RNA, 32 nt, Homo Sapiens
ggcuggcggaggaggaggcgaaggagacggca

SEQ ID NO: 71685 - RNA, 30 nt, Homo Sapiens
uaccucuaccagaugggggagaaccuagug

SEQ ID NO: 71686 - RNA, 32 nt, Homo Sapiens
ccgugcgcggccggcccggcaggcgggaugag

SEQ ID NO: 71687 - RNA, 29 nt, Homo Sapiens
acccaucuauguauguagucauugggggg

SEQ ID NO: 71688 - RNA, 32 nt, Homo Sapiens
uagagaccucgcgacuuuuacucccccgaccc

SEQ ID NO: 71689 - RNA, 32 nt, Homo Sapiens
gcgcccgcggcugccgcgggacugcugcggga

SEQ ID NO: 71690 - RNA, 32 nt, Homo Sapiens
auguacagaguuuuauauaaauuuaaaccaau

SEQ ID NO: 71691 - RNA, 32 nt, Homo Sapiens
cugugaaguuuuaaaugaaagcucuagcuuua

SEQ ID NO: 71692 - RNA, 32 nt, Homo Sapiens
aagaagaggcauguccaguaugcuuugcaggg

SEQ ID NO: 71693 - RNA, 32 nt, Homo Sapiens
ucaguuuauuauugauacaucacuccauuaau

SEQ ID NO: 71694 - RNA, 32 nt, Homo Sapiens
gguaaauaaccaaaacagagcauacuacauaa

SEQ ID NO: 71695 - RNA, 32 nt, Homo Sapiens
gaugacaucugacuuuugucgaugggacuucu

SEQ ID NO: 71696 - RNA, 32 nt, Homo Sapiens
ggccuccugccagcagccaugugaguggcauc

SEQ ID NO: 71697 - RNA, 32 nt, Homo Sapiens
cuggaggagcagcuggcucugcucugagaaac

SEQ ID NO: 71698 - RNA, 32 nt, Homo Sapiens
cuauuaaaauuuguuuaaauuaauggauacac

SEQ ID NO: 71699 - RNA, 32 nt, Homo Sapiens
accacaaagcugaaccucaaaaaguuagccug

SEQ ID NO: 71700 - RNA, 32 nt, Homo Sapiens
cauauucaguauuauucuuguuuucugaauuc

SEQ ID NO: 71701 - RNA, 32 nt, Homo Sapiens
uggcuguggcuucucccucccccauccccuac

SEQ ID NO: 71702 - RNA, 32 nt, Homo Sapiens
aaggcugggucccagcugggaguaugggugug

SEQ ID NO: 71703 - RNA, 32 nt, Homo Sapiens
agaggacgcggaggaugcugagcugcuggcgc

SEQ ID NO: 71704 - RNA, 32 nt, Homo Sapiens
cgaggggcggccuggcucucagcgugguggca

SEQ ID NO: 71705 - RNA, 32 nt, Homo Sapiens
uuucuuuggcaaccuuccuccucccuuacuga

SEQ ID NO: 71706 - RNA, 32 nt, Homo Sapiens
ugggcuccagaguguaagaauauuuuauuuuu

SEQ ID NO: 71707 - RNA, 32 nt, Homo Sapiens
aaagcucaaaaauugugauuccuugaacguuc

SEQ ID NO: 71708 - RNA, 32 nt, Homo Sapiens
ucuuuaaccacuuuucaaugucuaaaaacauu

SEQ ID NO: 71709 - RNA, 32 nt, Homo Sapiens
ggcaaaaggacacgagggcccgacugccagag

SEQ ID NO: 71710 - RNA, 32 nt, Homo Sapiens
agaucaggaaauguagacaucuagugauuucu

SEQ ID NO: 71711 - RNA, 32 nt, Homo Sapiens
acccccugcuccaccagcagcauggcauagcc

SEQ ID NO: 71712 - RNA, 32 nt, Homo Sapiens
acagcgggucugcguaggcggcagcgucuguc

SEQ ID NO: 71713 - RNA, 32 nt, Homo Sapiens
acccgcaggagcguagagagcgcgggacuaga

SEQ ID NO: 71714 - RNA, 31 nt, Homo Sapiens
guccugaaauaaauauugguucacuaugaaa

SEQ ID NO: 71715 - RNA, 32 nt, Homo Sapiens
agucuccgugcagaggacccaggcuccagcug

SEQ ID NO: 71716 - RNA, 32 nt, Homo Sapiens
ccuuuguuucuuucuuuuucauuuugugaaaa

SEQ ID NO: 71717 - RNA, 32 nt, Homo Sapiens
ggagcauccaacaggagucagcaaucaaagau

SEQ ID NO: 71718 - RNA, 32 nt, Homo Sapiens
uccucauuaagccgagcagcuuuggccaagua

SEQ ID NO: 71719 - RNA, 32 nt, Homo Sapiens
uugguguuuuccccucuagaaaacagaguugc

SEQ ID NO: 71720 - RNA, 32 nt, Homo Sapiens
ccaccgugucuggcugugcgggcccuggggag

SEQ ID NO: 71721 - RNA, 32 nt, Homo Sapiens
ugauccagagguucagcccgugugcagcgcac

SEQ ID NO: 71722 - RNA, 32 nt, Homo Sapiens
cacagaaaggucgaguggcgcagaggagcagg

SEQ ID NO: 71723 - RNA, 32 nt, Homo Sapiens
ggaaaggaaagccaggaagcagucgguggagg

SEQ ID NO: 71724 - RNA, 32 nt, Homo Sapiens
ggugcagcgguuaugcuuaugaaaauaccugg

SEQ ID NO: 71725 - RNA, 32 nt, Homo Sapiens
ccugcgcugggccccggcaccugcgcacuggc

SEQ ID NO: 71726 - RNA, 32 nt, Homo Sapiens
gaggggaugaaauagugugacaauggacugaa

SEQ ID NO: 71727 - RNA, 32 nt, Homo Sapiens
aggggggcccaggcccgggacgaggccucccc

SEQ ID NO: 71728 - RNA, 32 nt, Homo Sapiens
gacuccggcccggacuacgaggcgcugccggc

SEQ ID NO: 71729 - RNA, 32 nt, Homo Sapiens
cuaggguuucuuaaauauaugauuuauauuac

SEQ ID NO: 71730 - RNA, 32 nt, Homo Sapiens
uacuucagagaaacuuuuuuaacuacccuuaa

SEQ ID NO: 71731 - RNA, 32 nt, Homo Sapiens
uugucaauaccucauuuguaaaacagacccau

SEQ ID NO: 71732 - RNA, 31 nt, Homo Sapiens
gcgccggagccccugcgcccugcggcccgcu

SEQ ID NO: 71733 - RNA, 32 nt, Homo Sapiens
uaccaggaugacugaacaggagaaaaggaacu

SEQ ID NO: 71734 - RNA, 32 nt, Homo Sapiens
uaacagcauacuuacaauuuuaaaagaagcug

SEQ ID NO: 71735 - RNA, 32 nt, Homo Sapiens
aagacauguuagauggggguuaucauaccaug

SEQ ID NO: 71736 - RNA, 32 nt, Homo Sapiens
uaaagagggaguuuugggggcugggcgccgug

SEQ ID NO: 71737 - RNA, 32 nt, Homo Sapiens
uuuacaugggaccuauggaaacaaaggcuggc

SEQ ID NO: 71738 - RNA, 32 nt, Homo Sapiens
agacaaaagagcagugguaagaauaguagaug

SEQ ID NO: 71739 - RNA, 32 nt, Homo Sapiens
uucucagaacagacuuuucaaccugcugccgg

SEQ ID NO: 71740 - RNA, 32 nt, Homo Sapiens
aagcguugcugcguaaauggcgggggcguguc

SEQ ID NO: 71741 - RNA, 32 nt, Homo Sapiens
ucucaaagccccauuaacugcuuccuauuauu

SEQ ID NO: 71742 - RNA, 32 nt, Homo Sapiens
aacacuuccagucuggagagcugugucuauuu

SEQ ID NO: 71743 - RNA, 32 nt, Homo Sapiens
uuccuuucugcaacugcgguggcaccacaaau

SEQ ID NO: 71744 - RNA, 32 nt, Homo Sapiens
ccacuuuguucuauguucugguuuuguaaagg

SEQ ID NO: 71745 - RNA, 32 nt, Homo Sapiens
cccuugcuguuguuugcagcgucaggguguca

SEQ ID NO: 71746 - RNA, 28 nt, Homo Sapiens
uaccuaccuggcugcaggaugaagcugg

SEQ ID NO: 71747 - RNA, 32 nt, Homo Sapiens
ugcuuguaggcacaacuucugcaaguuuaaau

SEQ ID NO: 71748 - RNA, 31 nt, Homo Sapiens
acacaugagcucacacacugaguuaguuucg

SEQ ID NO: 71749 - RNA, 32 nt, Homo Sapiens
uagaugauauauauguaggccuuugauauaua

SEQ ID NO: 71750 - RNA, 32 nt, Homo Sapiens
acuggcuggacccacgcgcgcgccuccggggc

SEQ ID NO: 71751 - RNA, 32 nt, Homo Sapiens
augaugugguggcuagaaaugcaacuuguaua

SEQ ID NO: 71752 - RNA, 32 nt, Homo Sapiens
agaagaucuuccggaguaaugggguucagcuc

SEQ ID NO: 71753 - RNA, 32 nt, Homo Sapiens
gaggccgggcaggggugcggagggaccgacgg

SEQ ID NO: 71754 - RNA, 32 nt, Homo Sapiens
ggauccuugcugcagcgucagcgccgccgccc

SEQ ID NO: 71755 - RNA, 32 nt, Homo Sapiens
aucccaugagagagguguguaaaggagaaagc

SEQ ID NO: 71756 - RNA, 32 nt, Homo Sapiens
gcggccaacgggauuggaugacugauuauugg

SEQ ID NO: 71757 - RNA, 32 nt, Homo Sapiens
auugcuugaaccugggaagugcagguugcagu

SEQ ID NO: 71758 - RNA, 32 nt, Homo Sapiens
ucgacgggaagcuggcuugcgagugccccagc

SEQ ID NO: 71759 - RNA, 32 nt, Homo Sapiens
uggacaguggccaggagggcgcugcucagguu

SEQ ID NO: 71760 - RNA, 32 nt, Homo Sapiens
uucucagggaugucuguaaauuucaguguuau

SEQ ID NO: 71761 - RNA, 27 nt, Homo Sapiens
ccugaguccuucucaugccaucucucu

SEQ ID NO: 71762 - RNA, 32 nt, Homo Sapiens
uuuccuacuaccuuuacccaguuuguguguuu

SEQ ID NO: 71763 - RNA, 32 nt, Homo Sapiens
guuggcugguugcuuucuauuaucaugguauu

SEQ ID NO: 71764 - RNA, 32 nt, Homo Sapiens
aaaaggggccgcgcugcgccggggccgcuuuc

SEQ ID NO: 71765 - RNA, 32 nt, Homo Sapiens
gaugccagugagccuccccuccccucauuccc

SEQ ID NO: 71766 - RNA, 32 nt, Homo Sapiens
uaagaacaaauauuuuguauacuuucaaacuc

SEQ ID NO: 71767 - RNA, 32 nt, Homo Sapiens
ugacuaaggucugcuauuuaugcaaaauucug

SEQ ID NO: 71768 - RNA, 32 nt, Homo Sapiens
agaauccgcuguuccucccucaucuccucugc

SEQ ID NO: 71769 - RNA, 32 nt, Homo Sapiens
cuguaguggcggaggggcgggcaccgaagucc

SEQ ID NO: 71770 - RNA, 32 nt, Homo Sapiens
caggcgugguggcgcgcaccuguaaucccagc

SEQ ID NO: 71771 - RNA, 32 nt, Homo Sapiens
ugggcgugguggcacaugccuaugaucccagc

SEQ ID NO: 71772 - RNA, 32 nt, Homo Sapiens
ucuuccgccccggugggagccggcgcugcgcg

SEQ ID NO: 71773 - RNA, 32 nt, Homo Sapiens
caccgggcuccacuuggagaucagcaggaggg

SEQ ID NO: 71774 - RNA, 32 nt, Homo Sapiens
aggagcuuggcggcgagguauuuggggaagua

SEQ ID NO: 71775 - RNA, 32 nt, Homo Sapiens
gacucacccgcacaccguccgcgcacgccuga

SEQ ID NO: 71776 - RNA, 32 nt, Homo Sapiens
uaauccuauacauuguuaaauuuuaugaguag

SEQ ID NO: 71777 - RNA, 32 nt, Homo Sapiens
gaauaaagaaaaaacccauuacuccaagacgu

SEQ ID NO: 71778 - RNA, 32 nt, Homo Sapiens
uugcuuauuaauuuauaauucagucauucucu

SEQ ID NO: 71779 - RNA, 32 nt, Homo Sapiens
cugccucuccugccaucauucaucucaugccu

SEQ ID NO: 71780 - RNA, 32 nt, Homo Sapiens
cuuucuugcacuuuaaagugagauuaauuuag

SEQ ID NO: 71781 - RNA, 32 nt, Homo Sapiens
cuacucucugaaaugauucaaauacacuaauu

SEQ ID NO: 71782 - RNA, 32 nt, Homo Sapiens
cugcuccuaggaggcugcuuguugcccgagac

SEQ ID NO: 71783 - RNA, 32 nt, Homo Sapiens
uaaggagaaaaugugacacuugugaaaaagcu

SEQ ID NO: 71784 - RNA, 32 nt, Homo Sapiens
gcacguccuggagcugcagaggcgaaccugcc

SEQ ID NO: 71785 - RNA, 32 nt, Homo Sapiens
acuggagcucaguaaaaguaaauucauguaau

SEQ ID NO: 71786 - RNA, 32 nt, Homo Sapiens
aggacccgcgcgccgcgcucgggggccaugca

SEQ ID NO: 71787 - RNA, 32 nt, Homo Sapiens
guguugcgugaucugugaaaaauacaucuccc

SEQ ID NO: 71788 - RNA, 32 nt, Homo Sapiens
auacuucucaggaccuuuuccauccuuucaug

SEQ ID NO: 71789 - RNA, 32 nt, Homo Sapiens
ccucauuccccgcucuugcccuugucaagccu

SEQ ID NO: 71790 - RNA, 32 nt, Homo Sapiens
ucaggcuagucuaagucugugcugucuuggca

SEQ ID NO: 71791 - RNA, 31 nt, Homo Sapiens
aaaucaaauuugaauaaaaaucuuacacgug

SEQ ID NO: 71792 - RNA, 32 nt, Homo Sapiens
agcagcagcagcaacaguuuguguaccagccc

SEQ ID NO: 71793 - RNA, 32 nt, Homo Sapiens
ccucaccuuccccaagccacacauccuccucc

SEQ ID NO: 71794 - RNA, 32 nt, Homo Sapiens
ugaaucagaugaugauaauauguacauuuacu

SEQ ID NO: 71795 - RNA, 32 nt, Homo Sapiens
ugaauccuugaguguggggguucaggaauaug

SEQ ID NO: 71796 - RNA, 32 nt, Homo Sapiens
uaggguuggggugggggcgcucuccgcccggu

SEQ ID NO: 71797 - RNA, 27 nt, Homo Sapiens
acacauccucaauaaaaccuguuguau

SEQ ID NO: 71798 - RNA, 32 nt, Homo Sapiens
uugcccaggcugaucucaaauuccuggccuca

SEQ ID NO: 71799 - RNA, 30 nt, Homo Sapiens
ccagaauggcccugccccccagcccccugg

SEQ ID NO: 71800 - RNA, 32 nt, Homo Sapiens
aggagccuuguuuucaauuugcuaacaggugc

SEQ ID NO: 71801 - RNA, 32 nt, Homo Sapiens
gcuugaaaacugaaacaaaacagcagcaauaa

SEQ ID NO: 71802 - RNA, 32 nt, Homo Sapiens
cuacagccccagcccagaucuacuucaagagc

SEQ ID NO: 71803 - RNA, 32 nt, Homo Sapiens
uugcgggcgcggggcgccgcgggccaugcgau

SEQ ID NO: 71804 - RNA, 32 nt, Homo Sapiens
ccucugggaaagggaaucuuuaaccaguuuca

SEQ ID NO: 71805 - RNA, 32 nt, Homo Sapiens
ugaaaucagugguguuacauuuucuuguccaa

SEQ ID NO: 71806 - RNA, 32 nt, Homo Sapiens
cggcagcggccccuggaggaggaggcggagga

SEQ ID NO: 71807 - RNA, 32 nt, Homo Sapiens
uuuuuuaaccaccucugaagaaguucaaaaaa

SEQ ID NO: 71808 - RNA, 32 nt, Homo Sapiens
uuuauuuguauccaacagaagauguuuauuau

SEQ ID NO: 71809 - RNA, 32 nt, Homo Sapiens
gaggagggacucuggaguagcagaggggcugg

SEQ ID NO: 71810 - RNA, 31 nt, Homo Sapiens
ggacugaacauauaacgcuggucagcuuuuu

SEQ ID NO: 71811 - RNA, 32 nt, Homo Sapiens
ucgcuccgagccccggccgccuguccgucgau

SEQ ID NO: 71812 - RNA, 25 nt, Homo Sapiens
gauggccgguuugacacaaauuaga

SEQ ID NO: 71813 - RNA, 32 nt, Homo Sapiens
uaguggugaccucaaacaaaaugaagaaaaua

SEQ ID NO: 71814 - RNA, 32 nt, Homo Sapiens
ggugucucaguggucagcaugcgacagacagu

SEQ ID NO: 71815 - RNA, 32 nt, Homo Sapiens
guguuugccucucagucuuucauucauagccu

SEQ ID NO: 71816 - RNA, 32 nt, Homo Sapiens
uaugucaaaaucaaaaguauuuaaugaaauac

SEQ ID NO: 71817 - RNA, 32 nt, Homo Sapiens
ugcacacgucucugcccuucacuucuucucuu

SEQ ID NO: 71818 - RNA, 32 nt, Homo Sapiens
gagaaggcggcagcggcgauucuaggcggccc

SEQ ID NO: 71819 - RNA, 32 nt, Homo Sapiens
ugcagcuucccucuccccuuuuuuauuuuuga

SEQ ID NO: 71820 - RNA, 32 nt, Homo Sapiens
agacaauaaaauguuggucaaugaacugaauc

SEQ ID NO: 71821 - RNA, 32 nt, Homo Sapiens
aauuccggcauuaagaggcauuccgucuucau

SEQ ID NO: 71822 - RNA, 32 nt, Homo Sapiens
ggaaguucugguuaauacuaagauuuguaggu

SEQ ID NO: 71823 - RNA, 32 nt, Homo Sapiens
cucucucuuugcucucuuucucccuccccuac

SEQ ID NO: 71824 - RNA, 32 nt, Homo Sapiens
augcacaaacacacacagaaauauauucaugu

SEQ ID NO: 71825 - RNA, 32 nt, Homo Sapiens
gaaggauaucgagccacaaacaacaacaagac

SEQ ID NO: 71826 - RNA, 32 nt, Homo Sapiens
guguucccucaccaggccauccugucaaacga

SEQ ID NO: 71827 - RNA, 32 nt, Homo Sapiens
uggguagaucauuugaggucaggagccuggcc

SEQ ID NO: 71828 - RNA, 32 nt, Homo Sapiens
uuucaaguacuguaaguuuuugaaagaaaacu

SEQ ID NO: 71829 - RNA, 32 nt, Homo Sapiens
ucucaagaugaccugaguuccuuccugccaac

SEQ ID NO: 71830 - RNA, 32 nt, Homo Sapiens
auaauuuuacuuugguaaacgagauuuaacau

SEQ ID NO: 71831 - RNA, 32 nt, Homo Sapiens
ugagcagccaucccaagcccagcccaccuccc

SEQ ID NO: 71832 - RNA, 32 nt, Homo Sapiens
caauuuuaauaaaucagcuggaacugauagaa

SEQ ID NO: 71833 - RNA, 32 nt, Homo Sapiens
gcuggaccaaaauaaaaugacaugaaacugca

SEQ ID NO: 71834 - RNA, 32 nt, Homo Sapiens
ggagggcguccauggcugcagccaacaagggc

SEQ ID NO: 71835 - RNA, 32 nt, Homo Sapiens
ucagccucagucugcugugccuccagacugca

SEQ ID NO: 71836 - RNA, 32 nt, Homo Sapiens
gacuuaauacucagauggauuggaacuaucau

SEQ ID NO: 71837 - RNA, 32 nt, Homo Sapiens
gguuuugcuuuuuuccucuuacuuuaauugaa

SEQ ID NO: 71838 - RNA, 32 nt, Homo Sapiens
guaacucuuuuucugcagacagaagcuucguc

SEQ ID NO: 71839 - RNA, 32 nt, Homo Sapiens
cccugcgucgagcugggaagguuccaugaagc

SEQ ID NO: 71840 - RNA, 32 nt, Homo Sapiens
aaacaaaaauuccauaucaaugugccuugccc

SEQ ID NO: 71841 - RNA, 32 nt, Homo Sapiens
ggcuaagaaggaaggacccuccugucagugug

SEQ ID NO: 71842 - RNA, 32 nt, Homo Sapiens
agauuccacauaaaaugucacacuuguuucuu

SEQ ID NO: 71843 - RNA, 32 nt, Homo Sapiens
ggcucagaaaaaagaugcuaauauauuuaucu

SEQ ID NO: 71844 - RNA, 32 nt, Homo Sapiens
ucauauguugugugucaauguaucaucucuca

SEQ ID NO: 71845 - RNA, 32 nt, Homo Sapiens
aggaugaggugauggacaaaaccaucacaggg

SEQ ID NO: 71846 - RNA, 32 nt, Homo Sapiens
agaaauaugucacuugcauauagaauguuuua

SEQ ID NO: 71847 - RNA, 32 nt, Homo Sapiens
uccuucccaccagccugcucuccgcaggccca

SEQ ID NO: 71848 - RNA, 32 nt, Homo Sapiens
uccagugcauuacaugguauuguauaucagug

SEQ ID NO: 71849 - RNA, 32 nt, Homo Sapiens
uacccuggcaggagacuaaucagauaggccgg

SEQ ID NO: 71850 - RNA, 32 nt, Homo Sapiens
ugccccagccccacccuuggccaucucccuuu

SEQ ID NO: 71851 - RNA, 32 nt, Homo Sapiens
cugggccuggaugugacauaagaugcuucugc

SEQ ID NO: 71852 - RNA, 32 nt, Homo Sapiens
accccccgacagaccaaagcccgugugccgcu

SEQ ID NO: 71853 - RNA, 32 nt, Homo Sapiens
ccgcuucuaccagcugacugccccggcccggc

SEQ ID NO: 71854 - RNA, 32 nt, Homo Sapiens
aacucuugauaaaacauaaagguacagugguc

SEQ ID NO: 71855 - RNA, 32 nt, Homo Sapiens
augaaugcgugugcgugcaagcaugaaccuug

SEQ ID NO: 71856 - RNA, 32 nt, Homo Sapiens
uuauucuugccucagagcugccugaagacaug

SEQ ID NO: 71857 - RNA, 32 nt, Homo Sapiens
gacuagaggacacguuagagaugcccuucccu

SEQ ID NO: 71858 - RNA, 32 nt, Homo Sapiens
aagauacgccuggcugcaacucagggguggcc

SEQ ID NO: 71859 - RNA, 32 nt, Homo Sapiens
cgcggaugcgcucgcggguggcgugggccgag

SEQ ID NO: 71860 - RNA, 32 nt, Homo Sapiens
aggaagcguggccacacagucuuugcuguccc

SEQ ID NO: 71861 - RNA, 32 nt, Homo Sapiens
cugaauaggaauuuucucuccuccuuucaagu

SEQ ID NO: 71862 - RNA, 32 nt, Homo Sapiens
ggcggcgggugcgcuccgaggcggagcugcag

SEQ ID NO: 71863 - RNA, 32 nt, Homo Sapiens
ggggagcagaggccgcuugguguccgaguagg

SEQ ID NO: 71864 - RNA, 32 nt, Homo Sapiens
ggcgcgccgggcggcuccgcgaauccuccggc

SEQ ID NO: 71865 - RNA, 32 nt, Homo Sapiens
acugagaggcgcagcucugucucacuggaagg

SEQ ID NO: 71866 - RNA, 32 nt, Homo Sapiens
cgggguggagacggccggcucugucacggcuu

SEQ ID NO: 71867 - RNA, 32 nt, Homo Sapiens
cccaggagccagcgcccucuccccucucccga

SEQ ID NO: 71868 - RNA, 32 nt, Homo Sapiens
gaugaggucucacucugucacccaggcugcag

SEQ ID NO: 71869 - RNA, 32 nt, Homo Sapiens
uugacuuuuuaaaaauaccuuagaugcaaauu

SEQ ID NO: 71870 - RNA, 32 nt, Homo Sapiens
gggacuuucucugcaccauguagcauacugga

SEQ ID NO: 71871 - RNA, 32 nt, Homo Sapiens
uguugcucaugacuuucuuuuguaaauaucua

SEQ ID NO: 71872 - RNA, 32 nt, Homo Sapiens
ggugcggcggccacgggggcgcugcugagacg

SEQ ID NO: 71873 - RNA, 32 nt, Homo Sapiens
acccccagagggagccgagacucggaaaguga

SEQ ID NO: 71874 - RNA, 32 nt, Homo Sapiens
uuuuagaggauagugaagaugaaaaugcuuua

SEQ ID NO: 71875 - RNA, 31 nt, Homo Sapiens
cucgggcugccgggagucccgggaccuggcg

SEQ ID NO: 71876 - RNA, 32 nt, Homo Sapiens
cucuccuccuuccccgcugcuuauaaaccuca

SEQ ID NO: 71877 - RNA, 32 nt, Homo Sapiens
gcacccggccaccuuacucaguuuuuaaucaa

SEQ ID NO: 71878 - RNA, 32 nt, Homo Sapiens
ucauuuagucccgucuuccucaccgccccagc

SEQ ID NO: 71879 - RNA, 32 nt, Homo Sapiens
gguggaacucgccagcgccgggaccgcggauu

SEQ ID NO: 71880 - RNA, 32 nt, Homo Sapiens
uaugcugaauaguuuucuuacuuucagggaag

SEQ ID NO: 71881 - RNA, 32 nt, Homo Sapiens
gcuuccccacucucuccccuccccucagugcc

SEQ ID NO: 71882 - RNA, 32 nt, Homo Sapiens
cauuccaggaggaccaggggagcaucuggggc

SEQ ID NO: 71883 - RNA, 32 nt, Homo Sapiens
ucagcgacuccggcugcucugcggacugcgag

SEQ ID NO: 71884 - RNA, 32 nt, Homo Sapiens
uagaaaauguaaaauaaaucagugaauguuaa

SEQ ID NO: 71885 - RNA, 32 nt, Homo Sapiens
aacuggaaaugaauuugacaugaaaaggauga

SEQ ID NO: 71886 - RNA, 32 nt, Homo Sapiens
agaggucuaacuuaauccuuacauucggagua

SEQ ID NO: 71887 - RNA, 32 nt, Homo Sapiens
ugacccaggaccagcuggccuugcggauucca

SEQ ID NO: 71888 - RNA, 32 nt, Homo Sapiens
uuucagaaauacagauaaaugauucaaaaagu

SEQ ID NO: 71889 - RNA, 32 nt, Homo Sapiens
aaagcgggggcgagcgccgcccggggcguggg

SEQ ID NO: 71890 - RNA, 32 nt, Homo Sapiens
uccagauggaaauagaauucucucucuugccu

SEQ ID NO: 71891 - RNA, 32 nt, Homo Sapiens
ugccugcucuggagaauggggcagcuuccaca

SEQ ID NO: 71892 - RNA, 31 nt, Homo Sapiens
cgccuguaaucccagaacuuugggaggcuaa

SEQ ID NO: 71893 - RNA, 32 nt, Homo Sapiens
gcccaggagcuuuacucugugcccuggccucc

SEQ ID NO: 71894 - RNA, 32 nt, Homo Sapiens
uuugauuucacuaauaaagguguuauguguuu

SEQ ID NO: 71895 - RNA, 32 nt, Homo Sapiens
augucugggucuuuaggguaggacaggcugug

SEQ ID NO: 71896 - RNA, 32 nt, Homo Sapiens
cugcagguggauucugcagggguguggggccg

SEQ ID NO: 71897 - RNA, 32 nt, Homo Sapiens
aggccuggaaaagaaccagaaggaggcugggc

SEQ ID NO: 71898 - RNA, 32 nt, Homo Sapiens
gguaaaagucauuguuuaagaauuuaguuuua

SEQ ID NO: 71899 - RNA, 32 nt, Homo Sapiens
agaucaaagacaggccgugugagccaguccag

SEQ ID NO: 71900 - RNA, 32 nt, Homo Sapiens
acaggcugacccugugugaugugggaggggac

SEQ ID NO: 71901 - RNA, 32 nt, Homo Sapiens
acagacauuccaugguaccagagugcucagaa

SEQ ID NO: 71902 - RNA, 32 nt, Homo Sapiens
guccgcugucucccuccugauucuaaaauguc

SEQ ID NO: 71903 - RNA, 32 nt, Homo Sapiens
cgcuguucucacucaucuucuuucucuuucug

SEQ ID NO: 71904 - RNA, 32 nt, Homo Sapiens
uccauuaccuucugcuuucucuuuguccacuu

SEQ ID NO: 71905 - RNA, 32 nt, Homo Sapiens
gagagggagaggaaacaaaagcuguguccugg

SEQ ID NO: 71906 - RNA, 32 nt, Homo Sapiens
cuccccagccccagcccuguccgucugucugu

SEQ ID NO: 71907 - RNA, 32 nt, Homo Sapiens
uuguccuggugacaccccuccuuuuuccagug

SEQ ID NO: 71908 - RNA, 32 nt, Homo Sapiens
accgcccacacuuggacuggugucucaaaccu

SEQ ID NO: 71909 - RNA, 32 nt, Homo Sapiens
aaaaguaauguuuuucaaguuuauauaaaauc

SEQ ID NO: 71910 - RNA, 32 nt, Homo Sapiens
cgcagggccuaggugccuggacccagggugug

SEQ ID NO: 71911 - RNA, 32 nt, Homo Sapiens
gagccuuagcuacuccguaucucugagagcca

SEQ ID NO: 71912 - RNA, 32 nt, Homo Sapiens
gacuaugaagguuuuucuuaguucuucugcuu

SEQ ID NO: 71913 - RNA, 32 nt, Homo Sapiens
cuuugcaucuccaggcaguucucucacauuug

SEQ ID NO: 71914 - RNA, 32 nt, Homo Sapiens
cuccuggggccgcggcagcggcugcgagggga

SEQ ID NO: 71915 - RNA, 32 nt, Homo Sapiens
agucuuguucuuuuaguagcaaugaaauccua

SEQ ID NO: 71916 - RNA, 32 nt, Homo Sapiens
uuuuauuuauguucuuugauaauaauagcuca

SEQ ID NO: 71917 - RNA, 32 nt, Homo Sapiens
ucauaaaacacuguuuuacauaccauagggaa

SEQ ID NO: 71918 - RNA, 32 nt, Homo Sapiens
aaggagauaaagccuaugagguuuauucaucu

SEQ ID NO: 71919 - RNA, 32 nt, Homo Sapiens
auuuaaaacaagauccuggguuuuugugguuu

SEQ ID NO: 71920 - RNA, 32 nt, Homo Sapiens
gggcggggcuccugagggagcuccaacucaga

SEQ ID NO: 71921 - RNA, 32 nt, Homo Sapiens
ucauauuugaguuuaaaggaauugaaauuacu

SEQ ID NO: 71922 - RNA, 32 nt, Homo Sapiens
aaauuucuguuguuuauaagccacucagucua

SEQ ID NO: 71923 - RNA, 32 nt, Homo Sapiens
cagacuccucaauccaucugccuguugcacuu

SEQ ID NO: 71924 - RNA, 32 nt, Homo Sapiens
agugagaggcguguguugacugauugacccag

SEQ ID NO: 71925 - RNA, 32 nt, Homo Sapiens
ugugauucaucaaacagcacaaacuuucauuu

SEQ ID NO: 71926 - RNA, 32 nt, Homo Sapiens
gacccagggcgggaacccggacccggcuggaa

SEQ ID NO: 71927 - RNA, 32 nt, Homo Sapiens
aauucccgcccggcccggccccgcgccccgca

SEQ ID NO: 71928 - RNA, 32 nt, Homo Sapiens
gaaugugucugcuuaccuuguuuccuuuuaau

SEQ ID NO: 71929 - RNA, 32 nt, Homo Sapiens
caccauccaggguccagcuccuccucagcccu

SEQ ID NO: 71930 - RNA, 32 nt, Homo Sapiens
cccccgaccccucccagauccuggggaccaau

SEQ ID NO: 71931 - RNA, 32 nt, Homo Sapiens
gacccggcgcagcacacguccgggccaaccgc

SEQ ID NO: 71932 - RNA, 32 nt, Homo Sapiens
cuuuauggacgaagggcacaagguggaggggg

SEQ ID NO: 71933 - RNA, 32 nt, Homo Sapiens
aagcaguggaggagcacacggcaccuuucccc

SEQ ID NO: 71934 - RNA, 32 nt, Homo Sapiens
ugggauugccacuagcuucuucugccaauauc

SEQ ID NO: 71935 - RNA, 32 nt, Homo Sapiens
ugauaacccagcuccuucuggucauuuucuca

SEQ ID NO: 71936 - RNA, 32 nt, Homo Sapiens
uaacuggacuucccaagauaaaugguaccagc

SEQ ID NO: 71937 - RNA, 32 nt, Homo Sapiens
agaacucauuccaggguguggagacagugccg

SEQ ID NO: 71938 - RNA, 32 nt, Homo Sapiens
gggcgagccgggcgcaggagggggcgcgcuuu

SEQ ID NO: 71939 - RNA, 32 nt, Homo Sapiens
cugcugaugacaauacuuucaguguccccuuu

SEQ ID NO: 71940 - RNA, 32 nt, Homo Sapiens
auaaagaacaucuauuugaaauuuaguggcca

SEQ ID NO: 71941 - RNA, 32 nt, Homo Sapiens
ugaagaugaugaugaagaaccucugcauucua

SEQ ID NO: 71942 - RNA, 32 nt, Homo Sapiens
uuuuucuuucuuuuuucuuucuuuuuguuuuu

SEQ ID NO: 71943 - RNA, 32 nt, Homo Sapiens
cugcaugcggccugcgggcccgugcgcgccuc

SEQ ID NO: 71944 - RNA, 31 nt, Homo Sapiens
guggugcugccggucauccacagcugccagu

SEQ ID NO: 71945 - RNA, 32 nt, Homo Sapiens
uccccacgcgccgagucucccaugacgcccga

SEQ ID NO: 71946 - RNA, 32 nt, Homo Sapiens
gaaugcucuaccucacagaacucugaacccua

SEQ ID NO: 71947 - RNA, 32 nt, Homo Sapiens
agggcuucgccccucccaggggccuguaacua

SEQ ID NO: 71948 - RNA, 32 nt, Homo Sapiens
auuccuuggggccccaggagccucucaggagu

SEQ ID NO: 71949 - RNA, 32 nt, Homo Sapiens
ucagccuuuccacagcuguuagcagcaucugc

SEQ ID NO: 71950 - RNA, 32 nt, Homo Sapiens
cccggagccccgccuccaccgccggcgacagg

SEQ ID NO: 71951 - RNA, 32 nt, Homo Sapiens
ugauggggcugugcauugaggaccccugcuuc

SEQ ID NO: 71952 - RNA, 32 nt, Homo Sapiens
uugggcuggguggacauuuguauuuuguuagg

SEQ ID NO: 71953 - RNA, 32 nt, Homo Sapiens
uagcucagaaaagcagaagguaaauaauguca

SEQ ID NO: 71954 - RNA, 32 nt, Homo Sapiens
uacagaauuuuaaagaaaacauuucaucugau

SEQ ID NO: 71955 - RNA, 32 nt, Homo Sapiens
cgcagacucaccggagcgcagcgccugggcca

SEQ ID NO: 71956 - RNA, 32 nt, Homo Sapiens
ugcggugccaaaaaagaggcggaggcucgcgg

SEQ ID NO: 71957 - RNA, 31 nt, Homo Sapiens
accgaucaagccaccaugccugacaacacag

SEQ ID NO: 71958 - RNA, 32 nt, Homo Sapiens
aggcucuauaaggauguuacacucggucaucu

SEQ ID NO: 71959 - RNA, 32 nt, Homo Sapiens
uguaguccgagccacuugggaggcugaggugg

SEQ ID NO: 71960 - RNA, 28 nt, Homo Sapiens
gcucaaugauuaucacauuugagacccu

SEQ ID NO: 71961 - RNA, 32 nt, Homo Sapiens
cuggaaaaccaucagccaagcguucggaugag

SEQ ID NO: 71962 - RNA, 32 nt, Homo Sapiens
uagcugccuuaaacguuaacagcacauuugaa

SEQ ID NO: 71963 - RNA, 32 nt, Homo Sapiens
ucacuggagccaggugacuuccuccuugcgug

SEQ ID NO: 71964 - RNA, 32 nt, Homo Sapiens
uauauaugaugcucugcaaaaccuggauaaga

SEQ ID NO: 71965 - RNA, 32 nt, Homo Sapiens
cgcggcggacgggaugaggcgcugcagucucu

SEQ ID NO: 71966 - RNA, 32 nt, Homo Sapiens
cccaaggacaggaaacaacuuuuccaaaaucc

SEQ ID NO: 71967 - RNA, 32 nt, Homo Sapiens
guaaacgggaggagguggggcgaggcagccag

SEQ ID NO: 71968 - RNA, 32 nt, Homo Sapiens
uacaauuuuuaaagcucuuugucaaguuagug

SEQ ID NO: 71969 - RNA, 32 nt, Homo Sapiens
cccuggcuaauuaagauugcuuccaaauuggg

SEQ ID NO: 71970 - RNA, 32 nt, Homo Sapiens
gccauaggacagaagaggcacuggcugaauga

SEQ ID NO: 71971 - RNA, 32 nt, Homo Sapiens
gcuggagcggagccugacgccaggcgcccgcg

SEQ ID NO: 71972 - RNA, 32 nt, Homo Sapiens
aacuauguuggagguauuugcauuguuuaaag

SEQ ID NO: 71973 - RNA, 32 nt, Homo Sapiens
gaccuucaaccucauuggggagagcaccaucc

SEQ ID NO: 71974 - RNA, 32 nt, Homo Sapiens
auaacucagaaucuugauaaacacuuaauauu

SEQ ID NO: 71975 - RNA, 32 nt, Homo Sapiens
auguuuuucuggcgucucaguugacaugaucu

SEQ ID NO: 71976 - RNA, 32 nt, Homo Sapiens
uuugugucacuaaagaaagugagggccacugu

SEQ ID NO: 71977 - RNA, 32 nt, Homo Sapiens
ccugcccccucccagcagccagcccugccaaa

SEQ ID NO: 71978 - RNA, 32 nt, Homo Sapiens
guuucucucccuccccccgcauuuugcugcau

SEQ ID NO: 71979 - RNA, 32 nt, Homo Sapiens
uuuaugucaucuccaaagguucuuucauuccc

SEQ ID NO: 71980 - RNA, 32 nt, Homo Sapiens
ugcagauauuuaugaaguggugaaauuucaag

SEQ ID NO: 71981 - RNA, 32 nt, Homo Sapiens
acagugggggaagaggggaaguuaggcagccc

SEQ ID NO: 71982 - RNA, 32 nt, Homo Sapiens
agaaaauagaauaaaguuaauaccaaacuuga

SEQ ID NO: 71983 - RNA, 32 nt, Homo Sapiens
cgcccccagccggcugcccucguggaugccuc

SEQ ID NO: 71984 - RNA, 32 nt, Homo Sapiens
auuuuuauauaucauauuuucuuaauucauug

SEQ ID NO: 71985 - RNA, 32 nt, Homo Sapiens
acggacacucaagaagauguaaaauugggagg

SEQ ID NO: 71986 - RNA, 32 nt, Homo Sapiens
gauuauauauaaguacuuauuuaugaguauaa

SEQ ID NO: 71987 - RNA, 32 nt, Homo Sapiens
agaucacaguagggugaguuaaguaugugccc

SEQ ID NO: 71988 - RNA, 32 nt, Homo Sapiens
uuugaaugucauuguaaauaaagccucugcuc

SEQ ID NO: 71989 - RNA, 32 nt, Homo Sapiens
gccagagggcucuggagugagcagaaccucac

SEQ ID NO: 71990 - RNA, 32 nt, Homo Sapiens
gguuucgucauguuggccaggcuggucuccaa

SEQ ID NO: 71991 - RNA, 32 nt, Homo Sapiens
gguucuguuaaccucagcaucguggggcgaag

SEQ ID NO: 71992 - RNA, 32 nt, Homo Sapiens
cucuccccugucaggacaggcuagccaccaga

SEQ ID NO: 71993 - RNA, 32 nt, Homo Sapiens
cagcacauauaauuuuuuuuuaauuuaugauc

SEQ ID NO: 71994 - RNA, 32 nt, Homo Sapiens
uuuagaaaugugucaaaggaaaaauuggugau

SEQ ID NO: 71995 - RNA, 32 nt, Homo Sapiens
ccgaggaggaagaagaggggcagugggagcag

SEQ ID NO: 71996 - RNA, 32 nt, Homo Sapiens
uucucaaauaaucaauuguccuagaaccaugu

SEQ ID NO: 71997 - RNA, 32 nt, Homo Sapiens
gggaaauuuacacacacacacacacacacaca

SEQ ID NO: 71998 - RNA, 32 nt, Homo Sapiens
uugaaucgguugcaggcguuggugccucuguc

SEQ ID NO: 71999 - RNA, 32 nt, Homo Sapiens
gaacugugccuggcccagugggcagcaggagc

SEQ ID NO: 72000 - RNA, 32 nt, Homo Sapiens
ggagaacagccaacuuuaaucuuacuucucug

SEQ ID NO: 72001 - RNA, 32 nt, Homo Sapiens
aauaugaaaauugaucuuaauaacucucccuu

SEQ ID NO: 72002 - RNA, 32 nt, Homo Sapiens
aggacuuggccauuuacacaaaaccaaaagug

SEQ ID NO: 72003 - RNA, 32 nt, Homo Sapiens
ggcccagaagcagcugcagccaagcguguccu

SEQ ID NO: 72004 - RNA, 32 nt, Homo Sapiens
agcaugagggccugugguuagaccuauagagg

SEQ ID NO: 72005 - RNA, 32 nt, Homo Sapiens
agacggcccugcuaggccccaguucuuccucc

SEQ ID NO: 72006 - RNA, 32 nt, Homo Sapiens
cgaagcaaagcuccauucauggccgucaugga

SEQ ID NO: 72007 - RNA, 32 nt, Homo Sapiens
gcagaauguuuuuaaaacuuuuugccguguau

SEQ ID NO: 72008 - RNA, 27 nt, Homo Sapiens
guacuguccuucucacuucucauucuc

SEQ ID NO: 72009 - RNA, 32 nt, Homo Sapiens
aauguucacagcaucuuucucuguaauaacuu

SEQ ID NO: 72010 - RNA, 32 nt, Homo Sapiens
uuacagaaagagaaauacuuguuuguguuuua

SEQ ID NO: 72011 - RNA, 28 nt, Homo Sapiens
aaguguucagauuaacacuuuugaaauu

SEQ ID NO: 72012 - RNA, 32 nt, Homo Sapiens
auagagaagggugcuaugaguauuuuauuuuu

SEQ ID NO: 72013 - RNA, 32 nt, Homo Sapiens
aggccuuccuuccucagcuccugcagccucau

SEQ ID NO: 72014 - RNA, 32 nt, Homo Sapiens
ggccagacuggccugcccuuucucccauacuu

SEQ ID NO: 72015 - RNA, 32 nt, Homo Sapiens
ucugcugucucacccuuaugagcagccugccu

SEQ ID NO: 72016 - RNA, 32 nt, Homo Sapiens
aaggauaauuuaauaagcauuuuacguuacua

SEQ ID NO: 72017 - RNA, 32 nt, Homo Sapiens
uuguauagguggacuuuuuuacaggucaguug

SEQ ID NO: 72018 - RNA, 32 nt, Homo Sapiens
cucccuggcacccacccccagggcgggugaug

SEQ ID NO: 72019 - RNA, 32 nt, Homo Sapiens
ucuuggagauaaaaucuguaugugcaauucac

SEQ ID NO: 72020 - RNA, 32 nt, Homo Sapiens
guaaauuuuguacaguauuagaauguguaaau

SEQ ID NO: 72021 - RNA, 32 nt, Homo Sapiens
ccugaagcaaaucuugguugccuucuaacggc

SEQ ID NO: 72022 - RNA, 31 nt, Homo Sapiens
cccccgggauggagcggcucgagcccgcccg

SEQ ID NO: 72023 - RNA, 32 nt, Homo Sapiens
gcugccaugaagaucucugacauggugcugag

SEQ ID NO: 72024 - RNA, 32 nt, Homo Sapiens
gggacgcccacccacacccacugcuuccucuc

SEQ ID NO: 72025 - RNA, 32 nt, Homo Sapiens
gccagguuuuaauaaccacaaacaaaaaggca

SEQ ID NO: 72026 - RNA, 32 nt, Homo Sapiens
acuauuuaguuccauugugaacuggccacggg

SEQ ID NO: 72027 - RNA, 32 nt, Homo Sapiens
cuggguucaggcaauuuuccugccucagccuc

SEQ ID NO: 72028 - RNA, 32 nt, Homo Sapiens
aaugugaugagagcuucuugaaccgguaaacu

SEQ ID NO: 72029 - RNA, 32 nt, Homo Sapiens
ugcaugccugugauccuggcuacuucagaggc

SEQ ID NO: 72030 - RNA, 32 nt, Homo Sapiens
cccgcagcccaggcuccugggccagugcucuc

SEQ ID NO: 72031 - RNA, 32 nt, Homo Sapiens
auauaauauacaauauaaauauauagugugug

SEQ ID NO: 72032 - RNA, 32 nt, Homo Sapiens
cguuaggcccaagggugggggaggcaggagga

SEQ ID NO: 72033 - RNA, 30 nt, Homo Sapiens
aggcuuggagguggccaggacagcaagugg

SEQ ID NO: 72034 - RNA, 32 nt, Homo Sapiens
ccucuucugaagacaucagucacauuggauua

SEQ ID NO: 72035 - RNA, 32 nt, Homo Sapiens
aaaauuuuugaaauuauugucuuaauauuuuu

SEQ ID NO: 72036 - RNA, 32 nt, Homo Sapiens
cuagucaggaggagacuaagcugucuguagaa

SEQ ID NO: 72037 - RNA, 32 nt, Homo Sapiens
ucuugggaaggggcauguugggcaguccucga

SEQ ID NO: 72038 - RNA, 32 nt, Homo Sapiens
uacacucgggccucagaaguccgugccaguga

SEQ ID NO: 72039 - RNA, 32 nt, Homo Sapiens
cucagccucaccugccagacaacacccccucc

SEQ ID NO: 72040 - RNA, 32 nt, Homo Sapiens
caguuuguugccuguggcccaggcccacaagg

SEQ ID NO: 72041 - RNA, 32 nt, Homo Sapiens
agagcucaggugggaaugcuugcuccccacac

SEQ ID NO: 72042 - RNA, 32 nt, Homo Sapiens
gaaaauuugaaaucuugguauugaucaugcuu

SEQ ID NO: 72043 - RNA, 32 nt, Homo Sapiens
gucuuuuggauauagguuuccaauuaaguaca

SEQ ID NO: 72044 - RNA, 32 nt, Homo Sapiens
ccaccuuccaaggagcuuuguauucuugcauc

SEQ ID NO: 72045 - RNA, 32 nt, Homo Sapiens
aacauuagacaggaugcugaucuucuggacaa

SEQ ID NO: 72046 - RNA, 32 nt, Homo Sapiens
uuacuuugggacuacuuuuaugcugauaacuu

SEQ ID NO: 72047 - RNA, 32 nt, Homo Sapiens
gaaucaauuuguuccuuguuaaaggccuuuug

SEQ ID NO: 72048 - RNA, 32 nt, Homo Sapiens
aguggccgggugcccauuguguccuuggagug

SEQ ID NO: 72049 - RNA, 32 nt, Homo Sapiens
ccgcaggucagcggccgggccgagggcgccag

SEQ ID NO: 72050 - RNA, 32 nt, Homo Sapiens
agaugaagccccaugcucaguccccucccauc

SEQ ID NO: 72051 - RNA, 32 nt, Homo Sapiens
aaugguaaaaauuaaacuaaugaacuugcaga

SEQ ID NO: 72052 - RNA, 32 nt, Homo Sapiens
caccccugcccccucgggcuuccuccuggcuc

SEQ ID NO: 72053 - RNA, 32 nt, Homo Sapiens
gaggugucaggaggggacuucuggcccaccuu

SEQ ID NO: 72054 - RNA, 32 nt, Homo Sapiens
acccuuuuauaaaguuuguguuuguaaaauuu

SEQ ID NO: 72055 - RNA, 32 nt, Homo Sapiens
ugcggauaaaggugcggaugcugcuggcccug

SEQ ID NO: 72056 - RNA, 32 nt, Homo Sapiens
ggagggaaggauuuuuuaggagccuuaaucag

SEQ ID NO: 72057 - RNA, 32 nt, Homo Sapiens
agaaguuuucuuuuucccuuguguauaaaacu

SEQ ID NO: 72058 - RNA, 32 nt, Homo Sapiens
gugaaacaaccugggcaacauggugaaacccu

SEQ ID NO: 72059 - RNA, 32 nt, Homo Sapiens
gguauaugauagguuacauaaaaggaagguau

SEQ ID NO: 72060 - RNA, 32 nt, Homo Sapiens
uugcgugagauaagaugcaaagggcucugugu

SEQ ID NO: 72061 - RNA, 32 nt, Homo Sapiens
uuuuauauucauauacuguuaaugcacauuug

SEQ ID NO: 72062 - RNA, 32 nt, Homo Sapiens
ugcggcgcugacccggccggccccacacccgc

SEQ ID NO: 72063 - RNA, 32 nt, Homo Sapiens
uguggcuuggagcagagggaaguaaaaaguga

SEQ ID NO: 72064 - RNA, 32 nt, Homo Sapiens
uuuuaaagaguauuugaauauauuuuagaauc

SEQ ID NO: 72065 - RNA, 32 nt, Homo Sapiens
uaaugaaaauggcaauaaaauaauauuacaua

SEQ ID NO: 72066 - RNA, 32 nt, Homo Sapiens
ccuccccacccgcucccacaccccugugcccc

SEQ ID NO: 72067 - RNA, 32 nt, Homo Sapiens
aauuaagaaaauccuaagagccaggcauggug

SEQ ID NO: 72068 - RNA, 32 nt, Homo Sapiens
gcucccaggcgcccgcgccgcgcuucggguga

SEQ ID NO: 72069 - RNA, 32 nt, Homo Sapiens
cguuuuggggcguucugucagaggggaaggac

SEQ ID NO: 72070 - RNA, 32 nt, Homo Sapiens
acaaagggacgccuccaccaucauuaaggaga

SEQ ID NO: 72071 - RNA, 32 nt, Homo Sapiens
cccucucugucugcaccagggaguaguacccc

SEQ ID NO: 72072 - RNA, 32 nt, Homo Sapiens
ucaacaauauuucaacgcuucugcaaugauga

SEQ ID NO: 72073 - RNA, 29 nt, Homo Sapiens
ucaaaaugggguuuauauuuucaaaaucu

SEQ ID NO: 72074 - RNA, 32 nt, Homo Sapiens
agugggacugggggagacccaggccccgggcu

SEQ ID NO: 72075 - RNA, 32 nt, Homo Sapiens
aaaagacuuaccaagcacuuuuuaaaagaaga

SEQ ID NO: 72076 - RNA, 32 nt, Homo Sapiens
gcgucuuguugagggagggagagcagguuacu

SEQ ID NO: 72077 - RNA, 32 nt, Homo Sapiens
gagaggcagaucugggccuggugaggugaccu

SEQ ID NO: 72078 - RNA, 32 nt, Homo Sapiens
ucucccacauacagaagcaggguggaggggaa

SEQ ID NO: 72079 - RNA, 32 nt, Homo Sapiens
gacucacccccuccuuccuccuccugaucccu

SEQ ID NO: 72080 - RNA, 32 nt, Homo Sapiens
gaaaagccauauaaauguagugagugugggaa

SEQ ID NO: 72081 - RNA, 32 nt, Homo Sapiens
ucuccuauaauaccagggaauuugagcuugug

SEQ ID NO: 72082 - RNA, 32 nt, Homo Sapiens
cuuaaucugaagaucacuugaaaacugacugu

SEQ ID NO: 72083 - RNA, 32 nt, Homo Sapiens
gaguggaggaggaggaggagccuugcugggcc

SEQ ID NO: 72084 - RNA, 32 nt, Homo Sapiens
cuauauaaucauuaucuuuuuaucuuucuguu

SEQ ID NO: 72085 - RNA, 32 nt, Homo Sapiens
ggacaggaccccagcucugcgucgguccuggu

SEQ ID NO: 72086 - RNA, 31 nt, Homo Sapiens
cuuuauauguuguggaugcaagauuguuuuc

SEQ ID NO: 72087 - RNA, 32 nt, Homo Sapiens
cugcucgagagcccgcgcuagagucggggagg

SEQ ID NO: 72088 - RNA, 32 nt, Homo Sapiens
agacagucuucauuuccagccaguggaguccu

SEQ ID NO: 72089 - RNA, 30 nt, Homo Sapiens
gggauagacagauggaccuaugggguggga

SEQ ID NO: 72090 - RNA, 32 nt, Homo Sapiens
ccccagaggcgagggaccaguggaggugccag

SEQ ID NO: 72091 - RNA, 32 nt, Homo Sapiens
cugucuuaaaaauccauuaacuucuaccuaaa

SEQ ID NO: 72092 - RNA, 32 nt, Homo Sapiens
ugcccuuguucucccugcaacccaggcccugc

SEQ ID NO: 72093 - RNA, 32 nt, Homo Sapiens
cccuugcucugacugcggccaagcaccacgca

SEQ ID NO: 72094 - RNA, 29 nt, Homo Sapiens
gggcugucauauguaggauagccacuuuu

SEQ ID NO: 72095 - RNA, 32 nt, Homo Sapiens
gaagucgccaaauuuacccacucuucaacaag

SEQ ID NO: 72096 - RNA, 32 nt, Homo Sapiens
gguggagaagcugaggucaucaucagauuuga

SEQ ID NO: 72097 - RNA, 32 nt, Homo Sapiens
cuggugcugggggcuccccagggguccaggug

SEQ ID NO: 72098 - RNA, 32 nt, Homo Sapiens
auuaacaagacugaaaucaugcaugaucugaa

SEQ ID NO: 72099 - RNA, 32 nt, Homo Sapiens
gaggaagugugacaccaagcaggagaggaaga

SEQ ID NO: 72100 - RNA, 32 nt, Homo Sapiens
gugcuauagaugauauuuuaaauugaaaaguu

SEQ ID NO: 72101 - RNA, 32 nt, Homo Sapiens
uaauuucagaucaugucuccccugcccuuagu

SEQ ID NO: 72102 - RNA, 32 nt, Homo Sapiens
ggaauggacauuccuaacggguggugggcaug

SEQ ID NO: 72103 - RNA, 32 nt, Homo Sapiens
caccuguacagcaugugacuacugaauacuau

SEQ ID NO: 72104 - RNA, 32 nt, Homo Sapiens
gagacuaucauuauuucguuuuguuguacuuc

SEQ ID NO: 72105 - RNA, 32 nt, Homo Sapiens
ugugguuuuuggguguuuuucuucuugugucc

SEQ ID NO: 72106 - RNA, 32 nt, Homo Sapiens
gcgggucguuagggcgcgacgcugggaggcau

SEQ ID NO: 72107 - RNA, 32 nt, Homo Sapiens
cuguggcuggggccucuugcuuccugcaaccc

SEQ ID NO: 72108 - RNA, 32 nt, Homo Sapiens
aucagauuuaaggauaauacuccaucauagaa

SEQ ID NO: 72109 - RNA, 32 nt, Homo Sapiens
uucaaccaaguaaaagacgcaaauaauuccuc

SEQ ID NO: 72110 - RNA, 30 nt, Homo Sapiens
aaaaucuggaagaggcaguugaaaaagagu

SEQ ID NO: 72111 - RNA, 32 nt, Homo Sapiens
aacagcagacuaauuuuuuuuaucccagauca

SEQ ID NO: 72112 - RNA, 32 nt, Homo Sapiens
gucaucaccgacaggucacugggacucaacau

SEQ ID NO: 72113 - RNA, 32 nt, Homo Sapiens
ggaggugaugggaucaugggggugguuucccc

SEQ ID NO: 72114 - RNA, 32 nt, Homo Sapiens
uaacagcauacuggcaguuucaccuuaaccug

SEQ ID NO: 72115 - RNA, 32 nt, Homo Sapiens
uuuaauguugguauuagaauauuaucuucaua

SEQ ID NO: 72116 - RNA, 32 nt, Homo Sapiens
uaaagcaaaauaaaguuuuuuaaauaaauguu

SEQ ID NO: 72117 - RNA, 32 nt, Homo Sapiens
uuaaauuaugggaaaauaguguagccagcugc

SEQ ID NO: 72118 - RNA, 32 nt, Homo Sapiens
acuggcgguucugguuuuuacucugugaacuu

SEQ ID NO: 72119 - RNA, 30 nt, Homo Sapiens
ugcucugucugugcuuucuagguuaccuca

SEQ ID NO: 72120 - RNA, 32 nt, Homo Sapiens
cagaacgauugaugaaguaguugagaaaggau

SEQ ID NO: 72121 - RNA, 32 nt, Homo Sapiens
gggcaggccgugguccuccagcaugaagaagg

SEQ ID NO: 72122 - RNA, 32 nt, Homo Sapiens
gaccggcucugcgggcgccgccaggcccagac

SEQ ID NO: 72123 - RNA, 32 nt, Homo Sapiens
gggcgggagggggcgagaguggagaguggccc

SEQ ID NO: 72124 - RNA, 32 nt, Homo Sapiens
gcgaaaugcaagacacucagauguuugaaaau

SEQ ID NO: 72125 - RNA, 32 nt, Homo Sapiens
gucuuaggaggagucgccgccgccgccaccuc

SEQ ID NO: 72126 - RNA, 32 nt, Homo Sapiens
cccuucugggagcuccucccccuccccagaag

SEQ ID NO: 72127 - RNA, 28 nt, Homo Sapiens
aagauguacuucauuauuucugauuugu

SEQ ID NO: 72128 - RNA, 32 nt, Homo Sapiens
ggcucgagucccgcccuggggguccccgaugc

SEQ ID NO: 72129 - RNA, 32 nt, Homo Sapiens
cagccuugucuugauauuaauacaugaaauuu

SEQ ID NO: 72130 - RNA, 32 nt, Homo Sapiens
ccgaaggcaaggaaaaagcugaugguccuguc

SEQ ID NO: 72131 - RNA, 32 nt, Homo Sapiens
gggugccgagaccacaaagcgcccggcugugu

SEQ ID NO: 72132 - RNA, 32 nt, Homo Sapiens
agaucagcgucccccacuuuggcaucccggcc

SEQ ID NO: 72133 - RNA, 32 nt, Homo Sapiens
uugagauuacugacaagauuucucaagggcag

SEQ ID NO: 72134 - RNA, 32 nt, Homo Sapiens
ggccaagauaaaauuuugacagcucuuuaagc

SEQ ID NO: 72135 - RNA, 32 nt, Homo Sapiens
uauucuugauuaaagagugcuauacauguuaa

SEQ ID NO: 72136 - RNA, 32 nt, Homo Sapiens
uuauuuuauaucuauuuuuaaauuuccacaag

SEQ ID NO: 72137 - RNA, 32 nt, Homo Sapiens
ccccuacccugaccuuguccuacuucacugcc

SEQ ID NO: 72138 - RNA, 32 nt, Homo Sapiens
uacagacauuuuauuucuauuuugaaaugagu

SEQ ID NO: 72139 - RNA, 32 nt, Homo Sapiens
cccccaacaacaguuuguuggccacagguuga

SEQ ID NO: 72140 - RNA, 29 nt, Homo Sapiens
uggcuguggccuaaccugccgagagucca

SEQ ID NO: 72141 - RNA, 32 nt, Homo Sapiens
acacgcgugcgcgcggcgggcgagcgcgcucg

SEQ ID NO: 72142 - RNA, 32 nt, Homo Sapiens
ggauuauaaagcccgcggccaagucccggggc

SEQ ID NO: 72143 - RNA, 32 nt, Homo Sapiens
ggucaaggucccagccccaggcagcccuguca

SEQ ID NO: 72144 - RNA, 32 nt, Homo Sapiens
ugugagcaaggugguguuacucccauuaggua

SEQ ID NO: 72145 - RNA, 32 nt, Homo Sapiens
ccauuaacagcugugaaagaugccaucgauga

SEQ ID NO: 72146 - RNA, 32 nt, Homo Sapiens
auaaugcucuguacuucauuugaaauaaacug

SEQ ID NO: 72147 - RNA, 32 nt, Homo Sapiens
agacugcuuuuguaucugcgaagugcuucacu

SEQ ID NO: 72148 - RNA, 32 nt, Homo Sapiens
ucugugcagacacugucauugcacuuucugcu

SEQ ID NO: 72149 - RNA, 32 nt, Homo Sapiens
cagcagaguauuuuaauuauauuuucucggga

SEQ ID NO: 72150 - RNA, 32 nt, Homo Sapiens
gauggguuguguuuguguucugauggagaaaa

SEQ ID NO: 72151 - RNA, 32 nt, Homo Sapiens
aaaauucaaaguuuauuuuuuaucacaagcac

SEQ ID NO: 72152 - RNA, 29 nt, Homo Sapiens
cauuucguauguauguaauaugcacgugu

SEQ ID NO: 72153 - RNA, 32 nt, Homo Sapiens
ucauuugugcuaagcugauaaguaucaaacga

SEQ ID NO: 72154 - RNA, 32 nt, Homo Sapiens
cucaccacauccuccgccucccggguucaagc

SEQ ID NO: 72155 - RNA, 32 nt, Homo Sapiens
ugcccgguuccuuuccugaggacccggcagaa

SEQ ID NO: 72156 - RNA, 32 nt, Homo Sapiens
cuuuccagugguagcccuuuugccauggaggu

SEQ ID NO: 72157 - RNA, 30 nt, Homo Sapiens
cgggagcgcgcgcagcgggugcgcagaaga

SEQ ID NO: 72158 - RNA, 32 nt, Homo Sapiens
agcaaagugaacugggggaugggcugaagggg

SEQ ID NO: 72159 - RNA, 29 nt, Homo Sapiens
caaaugucauaugggguaacacugaccuu

SEQ ID NO: 72160 - RNA, 32 nt, Homo Sapiens
acccggaggcggaaccggcagugcagcccgaa

SEQ ID NO: 72161 - RNA, 31 nt, Homo Sapiens
ggauauucuaggagaaagccuauaauuucac

SEQ ID NO: 72162 - RNA, 32 nt, Homo Sapiens
auauuuaauauuaauagcagaggaagacuccu

SEQ ID NO: 72163 - RNA, 32 nt, Homo Sapiens
uuugucaaacuccaaggcaauuuucagugaga

SEQ ID NO: 72164 - RNA, 32 nt, Homo Sapiens
cagggccagccggcugcuccgagugcggggcc

SEQ ID NO: 72165 - RNA, 32 nt, Homo Sapiens
gagggucccuaugauccagaccucaagagagg

SEQ ID NO: 72166 - RNA, 32 nt, Homo Sapiens
uuacuuuaacauauuucuuuugcagaauguaa

SEQ ID NO: 72167 - RNA, 32 nt, Homo Sapiens
cgcucggccgucucgggcgugcucagcauagu

SEQ ID NO: 72168 - RNA, 32 nt, Homo Sapiens
uuccccuccccuuuccucuccagcauuaggau

SEQ ID NO: 72169 - RNA, 32 nt, Homo Sapiens
gacgcgggauucaagaaugaaguaaauacagu

SEQ ID NO: 72170 - RNA, 32 nt, Homo Sapiens
agucuugugucugcgucuguguugcgugucgu

SEQ ID NO: 72171 - RNA, 32 nt, Homo Sapiens
ugaguucuacuguggcagaaaaguaaacaaug

SEQ ID NO: 72172 - RNA, 32 nt, Homo Sapiens
uagaauguaucagaauaaauguuuuuaacagu

SEQ ID NO: 72173 - RNA, 32 nt, Homo Sapiens
gcagcggacugggaacugcagcugcgaccccc

SEQ ID NO: 72174 - RNA, 32 nt, Homo Sapiens
gcugugacauugucuauaagcauuuggcucca

SEQ ID NO: 72175 - RNA, 32 nt, Homo Sapiens
caauuucacccucuccucccccugccaacacu

SEQ ID NO: 72176 - RNA, 32 nt, Homo Sapiens
agccggggccucggcguccccgcccucucccc

SEQ ID NO: 72177 - RNA, 32 nt, Homo Sapiens
ugcagugccccgagucccgggcccgcgccgcc

SEQ ID NO: 72178 - RNA, 32 nt, Homo Sapiens
uuuuacuacauagaaaaacauuuuagugacuu

SEQ ID NO: 72179 - RNA, 32 nt, Homo Sapiens
agggcuguguccagacagcacaaaacggcaag

SEQ ID NO: 72180 - RNA, 32 nt, Homo Sapiens
cccugaagguaccgccucccccagcuuagaag

SEQ ID NO: 72181 - RNA, 32 nt, Homo Sapiens
ccagucccgcuucgggccgcaagccccaccgc

SEQ ID NO: 72182 - RNA, 32 nt, Homo Sapiens
caaaacuagacaagugagugccuacgugacac

SEQ ID NO: 72183 - RNA, 32 nt, Homo Sapiens
uugauggggacgacuggucuaauuacucuuuc

SEQ ID NO: 72184 - RNA, 32 nt, Homo Sapiens
ugcgugcuuuagcuccuucucgccugauccuu

SEQ ID NO: 72185 - RNA, 32 nt, Homo Sapiens
uuuuuucuuuuuccuuuuuuuuuuuuuuuuuu

SEQ ID NO: 72186 - RNA, 32 nt, Homo Sapiens
guuucauauaaaauacggguagagugguagag

SEQ ID NO: 72187 - RNA, 32 nt, Homo Sapiens
ugccccauuccuugcgccucagcccucaguuc

SEQ ID NO: 72188 - RNA, 32 nt, Homo Sapiens
agcccugcugggcuuucuggcuccuccuccgu

SEQ ID NO: 72189 - RNA, 32 nt, Homo Sapiens
ugcuuggauacgucuguacuauuucaucuggu

SEQ ID NO: 72190 - RNA, 32 nt, Homo Sapiens
cggcucacgcgcgcuccgacacacacgcucac

SEQ ID NO: 72191 - RNA, 32 nt, Homo Sapiens
gacaaccuggaaagauuuuuguuuucacugcu

SEQ ID NO: 72192 - RNA, 32 nt, Homo Sapiens
cugaaaccucugucauggaaaaguaccacgug

SEQ ID NO: 72193 - RNA, 32 nt, Homo Sapiens
ccaaacgcgcacccucgaagucuugaacucca

SEQ ID NO: 72194 - RNA, 32 nt, Homo Sapiens
gaggaguucuuugcuauguuccaagccaucua

SEQ ID NO: 72195 - RNA, 32 nt, Homo Sapiens
aauccuggucucaggaccucauggaagaagag

SEQ ID NO: 72196 - RNA, 32 nt, Homo Sapiens
augcagaaaugagaucauuaauuuagauacaa

SEQ ID NO: 72197 - RNA, 32 nt, Homo Sapiens
uauugaaaaugugguaacuuuauuuaaaauga

SEQ ID NO: 72198 - RNA, 32 nt, Homo Sapiens
uccagagcccugccuccccagacccacaggaa

SEQ ID NO: 72199 - RNA, 32 nt, Homo Sapiens
gauaacuagaacuuagguucacguuuauguaa

SEQ ID NO: 72200 - RNA, 29 nt, Homo Sapiens
aaagauggaaacacuggagucugaauuga

SEQ ID NO: 72201 - RNA, 27 nt, Homo Sapiens
uaccaguugugcuucagccuccuuucc

SEQ ID NO: 72202 - RNA, 32 nt, Homo Sapiens
uuugucuccuugugccucuuuuuauccuuagg

SEQ ID NO: 72203 - RNA, 32 nt, Homo Sapiens
ggggcagguaucuccuucccguuccucaucca

SEQ ID NO: 72204 - RNA, 32 nt, Homo Sapiens
guuugucgccuggaggcccaagaggaacggcc

SEQ ID NO: 72205 - RNA, 32 nt, Homo Sapiens
gagcccaccucccaggguaggcaccugggggc

SEQ ID NO: 72206 - RNA, 32 nt, Homo Sapiens
uuuuaagccaagggagaaaaccacugaaaagu

SEQ ID NO: 72207 - RNA, 32 nt, Homo Sapiens
gugcaugaggguuuuauuaaaacuauauauau

SEQ ID NO: 72208 - RNA, 32 nt, Homo Sapiens
gugcccuuucccuucuugcugcacccauguug

SEQ ID NO: 72209 - RNA, 32 nt, Homo Sapiens
cuuuugcaagacuacuccuugcuggcccccac

SEQ ID NO: 72210 - RNA, 32 nt, Homo Sapiens
aaaaauuucugcaguuguaaacguuuaacauu

SEQ ID NO: 72211 - RNA, 32 nt, Homo Sapiens
uuuucuuuuuauugccucuuauaucucugcuc

SEQ ID NO: 72212 - RNA, 32 nt, Homo Sapiens
augacuuauuuuuaaucugacuauggcauaac

SEQ ID NO: 72213 - RNA, 32 nt, Homo Sapiens
ccgcccgaccaggaggcccugcaggucgugua

SEQ ID NO: 72214 - RNA, 32 nt, Homo Sapiens
gggaagagggugguucccugggggucugugau

SEQ ID NO: 72215 - RNA, 32 nt, Homo Sapiens
uaccaguacaagcagcgcucgcugucccccgu

SEQ ID NO: 72216 - RNA, 32 nt, Homo Sapiens
cuuaauuagucaaaguuuuucuuaaggauuuc

SEQ ID NO: 72217 - RNA, 32 nt, Homo Sapiens
cuuuuuuggaagaagauuuaaaauauuugccc

SEQ ID NO: 72218 - RNA, 32 nt, Homo Sapiens
gcccauaugaaacaaacuuauuauucauugaa

SEQ ID NO: 72219 - RNA, 32 nt, Homo Sapiens
acuaguccucuucaacacauagcaaugguauc

SEQ ID NO: 72220 - RNA, 32 nt, Homo Sapiens
cagggccagcggggcccgguuccaauaaagag

SEQ ID NO: 72221 - RNA, 32 nt, Homo Sapiens
ucggcaaggggcgccuggggcuggggcugauu

SEQ ID NO: 72222 - RNA, 32 nt, Homo Sapiens
auacuaaaauuggaacgauacagagaagauua

SEQ ID NO: 72223 - RNA, 32 nt, Homo Sapiens
ucagcgaaugacaaaaucaucuuugugaaggc

SEQ ID NO: 72224 - RNA, 32 nt, Homo Sapiens
aaaaauauauauaggagugaacaucuuaugaa

SEQ ID NO: 72225 - RNA, 32 nt, Homo Sapiens
gucuggccggggagggcgucaaggccaaguac

SEQ ID NO: 72226 - RNA, 32 nt, Homo Sapiens
gaugguagggauuuuuucuuuguugaauauac

SEQ ID NO: 72227 - RNA, 32 nt, Homo Sapiens
uuugugaucauuacagaaaugcugguguaagg

SEQ ID NO: 72228 - RNA, 32 nt, Homo Sapiens
aucccugggaagccaugagaccucaaaccugu

SEQ ID NO: 72229 - RNA, 32 nt, Homo Sapiens
caaacucauccacaugugguacucauuucagg

SEQ ID NO: 72230 - RNA, 32 nt, Homo Sapiens
uucuuucguguuuuuucuuuuauuauaaacaa

SEQ ID NO: 72231 - RNA, 32 nt, Homo Sapiens
aucacagcauuaccuuuuaaaaguguuccagu

SEQ ID NO: 72232 - RNA, 32 nt, Homo Sapiens
aaauugaguuuauguagucauuuuacuuauuu

SEQ ID NO: 72233 - RNA, 32 nt, Homo Sapiens
gggcccgagacuccucgcuccuccucgccucg

SEQ ID NO: 72234 - RNA, 32 nt, Homo Sapiens
gacacagagaggaaucugggccugcuucucgg

SEQ ID NO: 72235 - RNA, 32 nt, Homo Sapiens
uauauguagaugacagaagagauacuuauuug

SEQ ID NO: 72236 - RNA, 32 nt, Homo Sapiens
accaaagaugggcuggaaaaacaaaggccacc

SEQ ID NO: 72237 - RNA, 32 nt, Homo Sapiens
ccccuccuaguaugaauuuauguaucaguugg

SEQ ID NO: 72238 - RNA, 32 nt, Homo Sapiens
aagccagcuuacuagcacuuuggaaugagucu

SEQ ID NO: 72239 - RNA, 32 nt, Homo Sapiens
ccgcucccaggagagugagggugacgcaauug

SEQ ID NO: 72240 - RNA, 32 nt, Homo Sapiens
auccaguguuugucucucggguccuucaagcc

SEQ ID NO: 72241 - RNA, 32 nt, Homo Sapiens
ccucuguuacccgcagauccugucccaugggc

SEQ ID NO: 72242 - RNA, 32 nt, Homo Sapiens
augcaccuauuauugcuauauagauuguuccu

SEQ ID NO: 72243 - RNA, 32 nt, Homo Sapiens
ugagcccaggaauuugagaccuggacaacaug

SEQ ID NO: 72244 - RNA, 32 nt, Homo Sapiens
cgccgccgccagaggagaaaugucugaaguaa

SEQ ID NO: 72245 - RNA, 32 nt, Homo Sapiens
uugucacauacgccacuguggaggagguggau

SEQ ID NO: 72246 - RNA, 32 nt, Homo Sapiens
uuuuaacaacaugaaacuauaaaccauauuua

SEQ ID NO: 72247 - RNA, 32 nt, Homo Sapiens
uguauuuuuuuuucuuuuuacaaacacacauu

SEQ ID NO: 72248 - RNA, 32 nt, Homo Sapiens
uaauuguaagaauuguuuaauaaaauacucag

SEQ ID NO: 72249 - RNA, 32 nt, Homo Sapiens
cuauugaaucuuccuugcucuuucauuugcaa

SEQ ID NO: 72250 - RNA, 32 nt, Homo Sapiens
uaguaggugauuacaaggugcacaguaaaauc

SEQ ID NO: 72251 - RNA, 32 nt, Homo Sapiens
uguucucuguccugucaccccauccccacucc

SEQ ID NO: 72252 - RNA, 32 nt, Homo Sapiens
ccacgcuccuagaggcagcugcagcugcccag

SEQ ID NO: 72253 - RNA, 32 nt, Homo Sapiens
uaagccccagaauggauucuccaggcacagug

SEQ ID NO: 72254 - RNA, 32 nt, Homo Sapiens
aaaauugcugcgguuguuacagaagcauggcg

SEQ ID NO: 72255 - RNA, 32 nt, Homo Sapiens
cucccuugccagcagggugcugccaauaaaag

SEQ ID NO: 72256 - RNA, 32 nt, Homo Sapiens
uuuccauccuaccagcagcaguguguaagaug

SEQ ID NO: 72257 - RNA, 32 nt, Homo Sapiens
gcgacgugagcggcuccgcggaccccgagcgg

SEQ ID NO: 72258 - RNA, 32 nt, Homo Sapiens
cugaguggagggccuuagugacaagugauaac

SEQ ID NO: 72259 - RNA, 32 nt, Homo Sapiens
agaucugggagauagggguugcuggcaugaaa

SEQ ID NO: 72260 - RNA, 27 nt, Homo Sapiens
ggaagguccuucugaaucccuucccug

SEQ ID NO: 72261 - RNA, 32 nt, Homo Sapiens
cgauucuucugcacugcgggucgcggccugga

SEQ ID NO: 72262 - RNA, 32 nt, Homo Sapiens
aaagugacauacaauuggaaauccauuuuugu

SEQ ID NO: 72263 - RNA, 32 nt, Homo Sapiens
acacagacacguaauaccagaccaaccucaau

SEQ ID NO: 72264 - RNA, 32 nt, Homo Sapiens
aaagcuacugaagugccuugggaaaugagaaa

SEQ ID NO: 72265 - RNA, 32 nt, Homo Sapiens
uuugaugcagagaagaaaauaguuuugauuuu

SEQ ID NO: 72266 - RNA, 32 nt, Homo Sapiens
caauaagaguuauggcaaaaagcaaaaggaac

SEQ ID NO: 72267 - RNA, 32 nt, Homo Sapiens
aagaaaugaagggacacuuaugcagaaccaug

SEQ ID NO: 72268 - RNA, 29 nt, Homo Sapiens
ugaauagaugcuguuucuauaaagcugug

SEQ ID NO: 72269 - RNA, 30 nt, Homo Sapiens
uugaaaauaaaauucuagauaugcaaauga

SEQ ID NO: 72270 - RNA, 32 nt, Homo Sapiens
aauugucagacagacacacuuuuccaccagug

SEQ ID NO: 72271 - RNA, 32 nt, Homo Sapiens
cgccggcugccagcuuuucggggccccgaguc

SEQ ID NO: 72272 - RNA, 32 nt, Homo Sapiens
uauuuucuuugccuaaauacaugugagaggag

SEQ ID NO: 72273 - RNA, 32 nt, Homo Sapiens
uaaauuuuggaugagaaaaugauaaaauaugc

SEQ ID NO: 72274 - RNA, 32 nt, Homo Sapiens
gauucccuugcauuugaauuaguucucuauuc

SEQ ID NO: 72275 - RNA, 32 nt, Homo Sapiens
augagaagcaggugcgcagagaauuccuugaa

SEQ ID NO: 72276 - RNA, 32 nt, Homo Sapiens
uguucaacauucagccagccccaggcaugguc

SEQ ID NO: 72277 - RNA, 32 nt, Homo Sapiens
aggaaaggacaaagccacacgcagccagggcu

SEQ ID NO: 72278 - RNA, 32 nt, Homo Sapiens
aauuucuaugacugcauuuuaagggaaaagau

SEQ ID NO: 72279 - RNA, 32 nt, Homo Sapiens
ggggagcccagcugcgggcccucagcccugcc

SEQ ID NO: 72280 - RNA, 32 nt, Homo Sapiens
ggaggggcgcgcugcgcgaggcggagagaggg

SEQ ID NO: 72281 - RNA, 32 nt, Homo Sapiens
gauggaacauauuuuauagcuacuguuagugc

SEQ ID NO: 72282 - RNA, 32 nt, Homo Sapiens
uggcuuggggucugcugggcuguccccacacu

SEQ ID NO: 72283 - RNA, 32 nt, Homo Sapiens
uaaucaaacaacaguuguacuaaaggaaagua

SEQ ID NO: 72284 - RNA, 32 nt, Homo Sapiens
gguuccugcuggaagcuccuggucugaucugg

SEQ ID NO: 72285 - RNA, 32 nt, Homo Sapiens
cauacugugggcuugccgcugcugcugauguc

SEQ ID NO: 72286 - RNA, 32 nt, Homo Sapiens
cuccaguaaaagacaccagguguggagauggg

SEQ ID NO: 72287 - RNA, 32 nt, Homo Sapiens
agaggggagaccugaccccccucccuucccuc

SEQ ID NO: 72288 - RNA, 32 nt, Homo Sapiens
caccucuggugcccgcccugucccccgggguc

SEQ ID NO: 72289 - RNA, 32 nt, Homo Sapiens
caguggaguugagugaggaggcagauguccug

SEQ ID NO: 72290 - RNA, 32 nt, Homo Sapiens
cugcuggaaaauaaguguggacauugaagcuu

SEQ ID NO: 72291 - RNA, 32 nt, Homo Sapiens
ggucaugaacauggucagaaccuuuggacaag

SEQ ID NO: 72292 - RNA, 32 nt, Homo Sapiens
gaccgcacugugaugugaauggcaccgaaguc

SEQ ID NO: 72293 - RNA, 32 nt, Homo Sapiens
cuugcccugacagccucuggcucccgcucuug

SEQ ID NO: 72294 - RNA, 32 nt, Homo Sapiens
gugacaaagggccagcagucuaccugcucguu

SEQ ID NO: 72295 - RNA, 32 nt, Homo Sapiens
aagaggaaacucccgggguccgaguaacaggg

SEQ ID NO: 72296 - RNA, 32 nt, Homo Sapiens
uuuuuuuucugauagcacuuugaggauauuag

SEQ ID NO: 72297 - RNA, 32 nt, Homo Sapiens
auucuggaaaauuggaaacaccccaaaauucu

SEQ ID NO: 72298 - RNA, 32 nt, Homo Sapiens
gguuucuccacccuuuuuuaugggguaaaaaa

SEQ ID NO: 72299 - RNA, 32 nt, Homo Sapiens
aggagcucuggcagcuguggacagaugugcuu

SEQ ID NO: 72300 - RNA, 32 nt, Homo Sapiens
accagagugugaagaagaagugaaauauaaau

SEQ ID NO: 72301 - RNA, 32 nt, Homo Sapiens
uguaaaacuaaaucagauuguaaucccaguac

SEQ ID NO: 72302 - RNA, 32 nt, Homo Sapiens
gaagcagagggaggaccucaagagacugccug

SEQ ID NO: 72303 - RNA, 32 nt, Homo Sapiens
uguucaaauauguuuaauaaugaccaaagugc

SEQ ID NO: 72304 - RNA, 32 nt, Homo Sapiens
uuaaggcaccccaagaggaucuuguucuguac

SEQ ID NO: 72305 - RNA, 32 nt, Homo Sapiens
uuauaauuugcacaaacaaaacaaaauguuau

SEQ ID NO: 72306 - RNA, 32 nt, Homo Sapiens
cuuagacaucauguaguucacacuggaaaaag

SEQ ID NO: 72307 - RNA, 32 nt, Homo Sapiens
ggacagccucuccgcggccuuccuccucccug

SEQ ID NO: 72308 - RNA, 32 nt, Homo Sapiens
auucucaguaaaaaugaaguuuuuguaggauu

SEQ ID NO: 72309 - RNA, 32 nt, Homo Sapiens
ccaucccgcucccggaguuccgggauccugga

SEQ ID NO: 72310 - RNA, 32 nt, Homo Sapiens
guuuuuaagaaguuuuacuacaggaaugucua

SEQ ID NO: 72311 - RNA, 32 nt, Homo Sapiens
acccuaugcucuacagcuuccagacaucucug

SEQ ID NO: 72312 - RNA, 31 nt, Homo Sapiens
aggacagagccccagaauaaccccguugucc

SEQ ID NO: 72313 - RNA, 32 nt, Homo Sapiens
gaugauagcaugucaauauauuagccuagcca

SEQ ID NO: 72314 - RNA, 32 nt, Homo Sapiens
ggcggagcaggugggguccgcggccgccggag

SEQ ID NO: 72315 - RNA, 32 nt, Homo Sapiens
ggcgccuuccuggccugaugcugugcugucua

SEQ ID NO: 72316 - RNA, 32 nt, Homo Sapiens
auggaguacuuguuauacuagguuugauuuga

SEQ ID NO: 72317 - RNA, 32 nt, Homo Sapiens
cgaagugcaccucaucuuugccuaaaucgggc

SEQ ID NO: 72318 - RNA, 32 nt, Homo Sapiens
ccccugucuaauguggggagacagguggagau

SEQ ID NO: 72319 - RNA, 32 nt, Homo Sapiens
aaggaggcgggcggcccgggccucaggccccu

SEQ ID NO: 72320 - RNA, 32 nt, Homo Sapiens
aggucagaugaccuaucagugugcccuccuuu

SEQ ID NO: 72321 - RNA, 32 nt, Homo Sapiens
cuuucccacucugaggcucuggccagagggag

SEQ ID NO: 72322 - RNA, 32 nt, Homo Sapiens
accagccugggcaacauagugagacucuguac

SEQ ID NO: 72323 - RNA, 32 nt, Homo Sapiens
guugugggggccggaggcgccaugggagccac

SEQ ID NO: 72324 - RNA, 28 nt, Homo Sapiens
aggcggagagauuaacagaugacagggu

SEQ ID NO: 72325 - RNA, 32 nt, Homo Sapiens
cuuaccacaaccaaaacccaaaguuuaaaggc

SEQ ID NO: 72326 - RNA, 32 nt, Homo Sapiens
uacaaaaacaacuuuucuuaauuugcauuaua

SEQ ID NO: 72327 - RNA, 32 nt, Homo Sapiens
ugaauaaagaaaaaccauaauugcuuguggug

SEQ ID NO: 72328 - RNA, 32 nt, Homo Sapiens
cccuguggagcccgcacccccacccuuugggg

SEQ ID NO: 72329 - RNA, 32 nt, Homo Sapiens
ugagagacaaauuugggggcagcuucagauca

SEQ ID NO: 72330 - RNA, 32 nt, Homo Sapiens
acuucugccaccuggccgccacacugaaaacu

SEQ ID NO: 72331 - RNA, 32 nt, Homo Sapiens
uuaguucuuucagaucuuugaaugccucuaac

SEQ ID NO: 72332 - RNA, 32 nt, Homo Sapiens
aauuguuuuggauuuuuuuucuuuccucuuca

SEQ ID NO: 72333 - RNA, 31 nt, Homo Sapiens
ugaccaacacggagaaaccccaucucuacua

SEQ ID NO: 72334 - RNA, 32 nt, Homo Sapiens
agaccagauggaucuccuuccuccccuggcac

SEQ ID NO: 72335 - RNA, 32 nt, Homo Sapiens
gccugagccaaggaacuuuccuucuacugccu

SEQ ID NO: 72336 - RNA, 32 nt, Homo Sapiens
ugaaacacccugcuaacacuguguuuugucag

SEQ ID NO: 72337 - RNA, 32 nt, Homo Sapiens
ccccaggacaucggcuuccacaucugcacauc

SEQ ID NO: 72338 - RNA, 32 nt, Homo Sapiens
cuggcuggcagccucccuccccacacccgccc

SEQ ID NO: 72339 - RNA, 27 nt, Homo Sapiens
cugggguccuucuuuguacugcaccca

SEQ ID NO: 72340 - RNA, 32 nt, Homo Sapiens
aauuaaucuuucccuguuaggcugauuucaga

SEQ ID NO: 72341 - RNA, 32 nt, Homo Sapiens
agagcuaccagcugcccuguuggcuucgcugg

SEQ ID NO: 72342 - RNA, 32 nt, Homo Sapiens
cucucacagaaauuauuaaaauauuuaaaacg

SEQ ID NO: 72343 - RNA, 32 nt, Homo Sapiens
caggcuggccccaggacucacgggcguccaug

SEQ ID NO: 72344 - RNA, 32 nt, Homo Sapiens
uguuuugggugacaaugcacacaugcugggca

SEQ ID NO: 72345 - RNA, 32 nt, Homo Sapiens
gucucacugaccccggcccacccgcgggacuc

SEQ ID NO: 72346 - RNA, 32 nt, Homo Sapiens
ucugcacccaccugucccacugcaguuccuuc

SEQ ID NO: 72347 - RNA, 32 nt, Homo Sapiens
gcgguguaaaauguuuacugugguguacacug

SEQ ID NO: 72348 - RNA, 32 nt, Homo Sapiens
uagugggugggcaggacuggaacucgguucuc

SEQ ID NO: 72349 - RNA, 27 nt, Homo Sapiens
uuccgccuuuucuucagcguccuaccc

SEQ ID NO: 72350 - RNA, 32 nt, Homo Sapiens
gugcaccccuccccauucacagagccuuuuuc

SEQ ID NO: 72351 - RNA, 32 nt, Homo Sapiens
cauucaccagauuauuugaugguacaaagaag

SEQ ID NO: 72352 - RNA, 32 nt, Homo Sapiens
aacuaguauuaaagguaguuuaccaaagcauu

SEQ ID NO: 72353 - RNA, 32 nt, Homo Sapiens
guacuuucauucccuuucaugauuugcaacuu

SEQ ID NO: 72354 - RNA, 32 nt, Homo Sapiens
cuuacuuugcccguggaagccagugugaaggu

SEQ ID NO: 72355 - RNA, 32 nt, Homo Sapiens
caaaacgcacaaagccuaugagcucuuguccu

SEQ ID NO: 72356 - RNA, 32 nt, Homo Sapiens
uccucuuccccuuuuccacaucccagccccac

SEQ ID NO: 72357 - RNA, 32 nt, Homo Sapiens
aaaaugaacaaaacccuacgaaagaauggcaa

SEQ ID NO: 72358 - RNA, 32 nt, Homo Sapiens
agugccuccacccuaccccccaucugacccac

SEQ ID NO: 72359 - RNA, 32 nt, Homo Sapiens
uccauuuuaagaugcauagcuacaugguuauu

SEQ ID NO: 72360 - RNA, 32 nt, Homo Sapiens
uuacaccagggagagggagccggggagacuuc

SEQ ID NO: 72361 - RNA, 32 nt, Homo Sapiens
cccggcgcggguggcggagagaucagaagccu

SEQ ID NO: 72362 - RNA, 32 nt, Homo Sapiens
acggagaucucuggagcagaccucaaggugac

SEQ ID NO: 72363 - RNA, 28 nt, Homo Sapiens
agcuggcuggcuaccaguggcagcggca

SEQ ID NO: 72364 - RNA, 32 nt, Homo Sapiens
ucagcucgucaagcugcaggggcggggcuccu

SEQ ID NO: 72365 - RNA, 32 nt, Homo Sapiens
auccuauauaaaagaaagauaaaacacagguc

SEQ ID NO: 72366 - RNA, 32 nt, Homo Sapiens
gacacuccagcaugcuagugaaucauguaucu

SEQ ID NO: 72367 - RNA, 32 nt, Homo Sapiens
cauuuuaaaaauacuucuuuuaugacucuucc

SEQ ID NO: 72368 - RNA, 32 nt, Homo Sapiens
agucccacaauuugcuuucuccuccucaaggg

SEQ ID NO: 72369 - RNA, 32 nt, Homo Sapiens
gccccucacagagacaguacuuugaaacucau

SEQ ID NO: 72370 - RNA, 32 nt, Homo Sapiens
caucuuacgacuauuucuucuuuuuaauacac

SEQ ID NO: 72371 - RNA, 32 nt, Homo Sapiens
ggcccuccugacgcgacacugccccucuccga

SEQ ID NO: 72372 - RNA, 32 nt, Homo Sapiens
cugaaguguucauuuuaaaugauugauucaug

SEQ ID NO: 72373 - RNA, 32 nt, Homo Sapiens
gcuugagaaaucaacaggugcagcccaguggg

SEQ ID NO: 72374 - RNA, 32 nt, Homo Sapiens
uggcagggugguuuuuuaauuuucuucuguuu

SEQ ID NO: 72375 - RNA, 32 nt, Homo Sapiens
ggagcuagggcuccagccugcggccgcgcauu

SEQ ID NO: 72376 - RNA, 30 nt, Homo Sapiens
agcgggcccguuccgccggagcugaggacc

SEQ ID NO: 72377 - RNA, 32 nt, Homo Sapiens
gaucucuuuaggaugacuguauuuuucaguug

SEQ ID NO: 72378 - RNA, 32 nt, Homo Sapiens
uuuccagaauaaauauguguguauuacuuaga

SEQ ID NO: 72379 - RNA, 32 nt, Homo Sapiens
ccuccauuuauccgccaugauaagugccagcc

SEQ ID NO: 72380 - RNA, 32 nt, Homo Sapiens
ucacacccacugccucucaugccggagugggg

SEQ ID NO: 72381 - RNA, 32 nt, Homo Sapiens
acuggguagcuggugugaacacaggggguacu

SEQ ID NO: 72382 - RNA, 31 nt, Homo Sapiens
gaguagcugccgggccccacgagccuccauc

SEQ ID NO: 72383 - RNA, 32 nt, Homo Sapiens
gggcugcggaggaccgaccguccccacgccug

SEQ ID NO: 72384 - RNA, 32 nt, Homo Sapiens
acccaacaugagguugcaugggcuugguucau

SEQ ID NO: 72385 - RNA, 31 nt, Homo Sapiens
gucucuucccugcagcuuccaagggcugcau

SEQ ID NO: 72386 - RNA, 32 nt, Homo Sapiens
ggaagaggagaagaggguaagggggcuucacu

SEQ ID NO: 72387 - RNA, 32 nt, Homo Sapiens
uggacaaggggucugugaagggcgggaacugg

SEQ ID NO: 72388 - RNA, 32 nt, Homo Sapiens
uguuaaguggaaugggcuuuguccuccaggag

SEQ ID NO: 72389 - RNA, 32 nt, Homo Sapiens
guauaaaagauuaaacucuacagaagaaugca

SEQ ID NO: 72390 - RNA, 32 nt, Homo Sapiens
uuuaaaaauaaauaacagucuuaccuaaauua

SEQ ID NO: 72391 - RNA, 32 nt, Homo Sapiens
uacuguauuuagugggguggaauucagaagaa

SEQ ID NO: 72392 - RNA, 32 nt, Homo Sapiens
cguggcggcuggagguagcggcggcggcgacg

SEQ ID NO: 72393 - RNA, 31 nt, Homo Sapiens
acuuucugagcaagcacuggaguccacuccg

SEQ ID NO: 72394 - RNA, 32 nt, Homo Sapiens
aauucauggcauuugggggcucaccccaccuc

SEQ ID NO: 72395 - RNA, 32 nt, Homo Sapiens
cagucuucagggccaacaauacaggauuaucu

SEQ ID NO: 72396 - RNA, 32 nt, Homo Sapiens
agccagacucuggcagaaguggggaugaccug

SEQ ID NO: 72397 - RNA, 32 nt, Homo Sapiens
cugcucgcgcggggcgucugagcccuccauuu

SEQ ID NO: 72398 - RNA, 32 nt, Homo Sapiens
gacccauucacauuuuaacauaggcaagagga

SEQ ID NO: 72399 - RNA, 32 nt, Homo Sapiens
ccgggcccugagcgcgucuucuccggggggcc

SEQ ID NO: 72400 - RNA, 32 nt, Homo Sapiens
ucagauuguaaguuaccugaaagcugcaguuc

SEQ ID NO: 72401 - RNA, 32 nt, Homo Sapiens
ccauaaaugaacugauaggcuggguucuccag

SEQ ID NO: 72402 - RNA, 32 nt, Homo Sapiens
uggggccccucgcacuccugugaggcuuuugc

SEQ ID NO: 72403 - RNA, 32 nt, Homo Sapiens
ucaugucuucugcuuucacgugucugggaugg

SEQ ID NO: 72404 - RNA, 32 nt, Homo Sapiens
cacauucaaguguucaccaaccacugaugugu

SEQ ID NO: 72405 - RNA, 32 nt, Homo Sapiens
uuugguugaauuacaaggaauuuaaguaucag

SEQ ID NO: 72406 - RNA, 32 nt, Homo Sapiens
uugcagcuaaauguugaaauggcuucccuuuc

SEQ ID NO: 72407 - RNA, 32 nt, Homo Sapiens
gccaggagccccacuaccugugcccgggcaug

SEQ ID NO: 72408 - RNA, 32 nt, Homo Sapiens
uuguuuaccauucaaauggcuuacuucaucau

SEQ ID NO: 72409 - RNA, 32 nt, Homo Sapiens
ugcaugcacacauacacaggcauacaugcaug

SEQ ID NO: 72410 - RNA, 32 nt, Homo Sapiens
auggaaggcaacacugaauaggaguuaaggga

SEQ ID NO: 72411 - RNA, 32 nt, Homo Sapiens
ggggagcaucgccgagcgccccacgggccgga

SEQ ID NO: 72412 - RNA, 32 nt, Homo Sapiens
auauuuguuucaucauaaaaauuauggcuuug

SEQ ID NO: 72413 - RNA, 32 nt, Homo Sapiens
aucaauaaugaaagggauuuucaaucaaccau

SEQ ID NO: 72414 - RNA, 32 nt, Homo Sapiens
ugaauacaaaaauuauuuauaaaugcacauau

SEQ ID NO: 72415 - RNA, 32 nt, Homo Sapiens
caacagacaaagaagaaucaaguucugugcug

SEQ ID NO: 72416 - RNA, 32 nt, Homo Sapiens
ccuguaguuccagcuacucaggaggcagaggu

SEQ ID NO: 72417 - RNA, 32 nt, Homo Sapiens
ucaaauaaaaauugguauugaggcgaggcuga

SEQ ID NO: 72418 - RNA, 32 nt, Homo Sapiens
uauucaucaaggaaagccuggugaagccuuua

SEQ ID NO: 72419 - RNA, 32 nt, Homo Sapiens
aggggaggccagaggagagcugcugggccccg

SEQ ID NO: 72420 - RNA, 32 nt, Homo Sapiens
acuccuaugcuagccucuggcuccucagggga

SEQ ID NO: 72421 - RNA, 31 nt, Homo Sapiens
augcugcagacucaacaaagcuaguucacug

SEQ ID NO: 72422 - RNA, 32 nt, Homo Sapiens
ccaccgccugcggcugccugggcuggggcucg

SEQ ID NO: 72423 - RNA, 32 nt, Homo Sapiens
agaccacuuaggauggcacaggguggcuggcc

SEQ ID NO: 72424 - RNA, 32 nt, Homo Sapiens
ucaagagauugugaugauucuuaaauuuuaac

SEQ ID NO: 72425 - RNA, 32 nt, Homo Sapiens
aggccacuauugaguggauagcaagaacauug

SEQ ID NO: 72426 - RNA, 32 nt, Homo Sapiens
ugggggugggugagggaauggggugggagucg

SEQ ID NO: 72427 - RNA, 32 nt, Homo Sapiens
cacuggcgucugcggccgcagcagcacuuuuu

SEQ ID NO: 72428 - RNA, 32 nt, Homo Sapiens
augaaauccuguacauagaaguuuugccucac

SEQ ID NO: 72429 - RNA, 32 nt, Homo Sapiens
uguuuccacaaggccuuuuccugcccccugcc

SEQ ID NO: 72430 - RNA, 32 nt, Homo Sapiens
guugccucaauacaugcuaauaacuaagcuuc

SEQ ID NO: 72431 - RNA, 32 nt, Homo Sapiens
agauuuauuuuuuuuagaugagguguugcugu

SEQ ID NO: 72432 - RNA, 32 nt, Homo Sapiens
uugugucaguguuuucuguacauauuauuugu

SEQ ID NO: 72433 - RNA, 32 nt, Homo Sapiens
guauagggagccgguggcaggaggaaggcugu

SEQ ID NO: 72434 - RNA, 32 nt, Homo Sapiens
ccugguuuauauuuuucuuucaaaaauuuuga

SEQ ID NO: 72435 - RNA, 32 nt, Homo Sapiens
gccucuuacccaccacccuggccugcuguccu

SEQ ID NO: 72436 - RNA, 32 nt, Homo Sapiens
cuccuggguuucauguucugugacauccugcu

SEQ ID NO: 72437 - RNA, 32 nt, Homo Sapiens
aggaagcagacaccucucacucccgacaggac

SEQ ID NO: 72438 - RNA, 32 nt, Homo Sapiens
gugauaaguggaaugguuacuguuuauacugu

SEQ ID NO: 72439 - RNA, 32 nt, Homo Sapiens
ggauccuucagcgaccugcccgggagccugga

SEQ ID NO: 72440 - RNA, 32 nt, Homo Sapiens
acggccggaguuucuguuuuugcaauaagaag

SEQ ID NO: 72441 - RNA, 32 nt, Homo Sapiens
ggccgaucggcguuggccgccgacaugacgcc

SEQ ID NO: 72442 - RNA, 32 nt, Homo Sapiens
ugacuucauuuuccaauccggagaaggggcuc

SEQ ID NO: 72443 - RNA, 29 nt, Homo Sapiens
agccaucggggacccagugauggccccgc

SEQ ID NO: 72444 - RNA, 32 nt, Homo Sapiens
cacgucacuccugggacugaggaggcagggga

SEQ ID NO: 72445 - RNA, 32 nt, Homo Sapiens
agacuugccacuuuucaugucauuugacauuu

SEQ ID NO: 72446 - RNA, 32 nt, Homo Sapiens
uuaauagauaguagccacugccugaagcuuug

SEQ ID NO: 72447 - RNA, 32 nt, Homo Sapiens
cuggagggucacgccgccuucuccucgagaca

SEQ ID NO: 72448 - RNA, 32 nt, Homo Sapiens
gacugcucucguauguggggaaugggaugaau

SEQ ID NO: 72449 - RNA, 30 nt, Homo Sapiens
gguuucucuuguaggaccugcagucagaug

SEQ ID NO: 72450 - RNA, 32 nt, Homo Sapiens
acugucaggaccaccuuugggagugucauccu

SEQ ID NO: 72451 - RNA, 32 nt, Homo Sapiens
uacuugauugacaaaaucguguuugccagucc

SEQ ID NO: 72452 - RNA, 32 nt, Homo Sapiens
uuuauuuuuguccuuuuuuucccucucuccac

SEQ ID NO: 72453 - RNA, 32 nt, Homo Sapiens
cacagagacaccucuggcuaccuagaguucuu

SEQ ID NO: 72454 - RNA, 32 nt, Homo Sapiens
uaaugacauccaacuaaagaugguguaauacc

SEQ ID NO: 72455 - RNA, 32 nt, Homo Sapiens
cccuucugccuggaaaguuuguggcuaggcgc

SEQ ID NO: 72456 - RNA, 32 nt, Homo Sapiens
agcuuaucucaguuaugaguauaauacauuac

SEQ ID NO: 72457 - RNA, 32 nt, Homo Sapiens
cuguggggcugggcauugugucugaccugugc

SEQ ID NO: 72458 - RNA, 32 nt, Homo Sapiens
gccaaaauaaguucuaugugugugauuguuau

SEQ ID NO: 72459 - RNA, 32 nt, Homo Sapiens
agccaaaaagaccuggagaaucugaaagccga

SEQ ID NO: 72460 - RNA, 32 nt, Homo Sapiens
augaggucaguaguuugagaccagccuggcca

SEQ ID NO: 72461 - RNA, 32 nt, Homo Sapiens
cacagagagugugugugcccacugcugcccaa

SEQ ID NO: 72462 - RNA, 32 nt, Homo Sapiens
ucaaccaagaaaccugaaaauauggauggaug

SEQ ID NO: 72463 - RNA, 32 nt, Homo Sapiens
uggguuacuugugacugcaguacucuauguua

SEQ ID NO: 72464 - RNA, 32 nt, Homo Sapiens
ugacagaagugggacaggagaaguuuuccaag

SEQ ID NO: 72465 - RNA, 30 nt, Homo Sapiens
gggagaagcggcgacggcggcaguggagua

SEQ ID NO: 72466 - RNA, 31 nt, Homo Sapiens
acugugagcuuuugccugccugugcuauuuu

SEQ ID NO: 72467 - RNA, 32 nt, Homo Sapiens
uccuuguuaucuuugcagauacuucauuuucu

SEQ ID NO: 72468 - RNA, 32 nt, Homo Sapiens
ugggguggggugccaccuccaguggccagcuc

SEQ ID NO: 72469 - RNA, 32 nt, Homo Sapiens
uuuuuuaaaaauuuuuuugagacagucucgcu

SEQ ID NO: 72470 - RNA, 32 nt, Homo Sapiens
ucaccucgcccacacggccagcaccgacucac

SEQ ID NO: 72471 - RNA, 32 nt, Homo Sapiens
agcggguugccugccacugccgugccaggaug

SEQ ID NO: 72472 - RNA, 32 nt, Homo Sapiens
cuccuuuuaaccaaauaaagaguucuuguuuc

SEQ ID NO: 72473 - RNA, 32 nt, Homo Sapiens
aucccaugggcgcagcagcacacccagcuccc

SEQ ID NO: 72474 - RNA, 32 nt, Homo Sapiens
guuuguuuuuacaguuuagcauauauaaacaa

SEQ ID NO: 72475 - RNA, 32 nt, Homo Sapiens
ggggguguugggguccgcagggggagggaggg

SEQ ID NO: 72476 - RNA, 32 nt, Homo Sapiens
ccaggaaucaguaauuugacggcaguguccuu

SEQ ID NO: 72477 - RNA, 32 nt, Homo Sapiens
caugccauguuugauugccgcuccggucccag

SEQ ID NO: 72478 - RNA, 32 nt, Homo Sapiens
uuaccuuguaaauaacuuuaauaauauucaaa

SEQ ID NO: 72479 - RNA, 32 nt, Homo Sapiens
aauaguaauuuaaacacacuuuuuuauuuccu

SEQ ID NO: 72480 - RNA, 32 nt, Homo Sapiens
auucugaugcagaacguaucagugaaacuccc

SEQ ID NO: 72481 - RNA, 32 nt, Homo Sapiens
cucagagagcaccugauguaucaucucaaaca

SEQ ID NO: 72482 - RNA, 32 nt, Homo Sapiens
acuccauucagaacuuaagagauacaggcuuu

SEQ ID NO: 72483 - RNA, 32 nt, Homo Sapiens
uuuuccaacaauguauaaucuccaccuauuca

SEQ ID NO: 72484 - RNA, 32 nt, Homo Sapiens
auugauuaauaaaauaucugaaaugaauaagg

SEQ ID NO: 72485 - RNA, 32 nt, Homo Sapiens
uccauccucucucuccuuggcacuuuccacac

SEQ ID NO: 72486 - RNA, 32 nt, Homo Sapiens
ucagacacugaacauacugacuccagguauag

SEQ ID NO: 72487 - RNA, 32 nt, Homo Sapiens
gcuuggggaaggcccgcggcaucccuugcagc

SEQ ID NO: 72488 - RNA, 32 nt, Homo Sapiens
guuucugcuguuucugucccugcaucuccccu

SEQ ID NO: 72489 - RNA, 32 nt, Homo Sapiens
aguccugaggcgcugggaauagcugauccucc

SEQ ID NO: 72490 - RNA, 32 nt, Homo Sapiens
gggaagauggcggcggccucgagcacccuucu

SEQ ID NO: 72491 - RNA, 32 nt, Homo Sapiens
ggcggcgaccgccgcaucaugucagccaagga

SEQ ID NO: 72492 - RNA, 32 nt, Homo Sapiens
gcuggugcugaggguccggcccggggucaucu

SEQ ID NO: 72493 - RNA, 32 nt, Homo Sapiens
ccauuccaguuggagaacguagugagucuuuc

SEQ ID NO: 72494 - RNA, 32 nt, Homo Sapiens
ugugggaagggagagcggggcagucucgggug

SEQ ID NO: 72495 - RNA, 32 nt, Homo Sapiens
cagugaggccuggccuggggcacuggauauug

SEQ ID NO: 72496 - RNA, 32 nt, Homo Sapiens
acaaauauuuugcuugaauuuaauuaauagau

SEQ ID NO: 72497 - RNA, 32 nt, Homo Sapiens
acagcaccagaauguauauuaagguguggcuu

SEQ ID NO: 72498 - RNA, 32 nt, Homo Sapiens
ucacaguuaccacuuggggucaguggaacaaa

SEQ ID NO: 72499 - RNA, 32 nt, Homo Sapiens
gguggccccguccuuccagggagggcccugcg

SEQ ID NO: 72500 - RNA, 32 nt, Homo Sapiens
cuucgcggaccccgagagcggcggcgcgacuc

SEQ ID NO: 72501 - RNA, 32 nt, Homo Sapiens
accuuagaauuuuggguauuguaaucugaagu

SEQ ID NO: 72502 - RNA, 32 nt, Homo Sapiens
acuucuauuccauuuuaauuguaggauaucuu

SEQ ID NO: 72503 - RNA, 32 nt, Homo Sapiens
gcaauacucugcuuucacguaccugugcucag

SEQ ID NO: 72504 - RNA, 32 nt, Homo Sapiens
ucccccauugaggcccgccacccccauaacuu

SEQ ID NO: 72505 - RNA, 32 nt, Homo Sapiens
ugugcaacgcugaccaccaucuacccggaaaa

SEQ ID NO: 72506 - RNA, 31 nt, Homo Sapiens
cccagauuucauauugcucaaacacacaugc

SEQ ID NO: 72507 - RNA, 32 nt, Homo Sapiens
ugcacuccuaggugaaugggcucagcaccaaa

SEQ ID NO: 72508 - RNA, 32 nt, Homo Sapiens
gaguuccaccaaaggucugugcaugucuuaga

SEQ ID NO: 72509 - RNA, 32 nt, Homo Sapiens
uucugcuguuuugguuguugcugcuggaaagc

SEQ ID NO: 72510 - RNA, 32 nt, Homo Sapiens
ggugccagccaagucaguuccuggugaggguu

SEQ ID NO: 72511 - RNA, 32 nt, Homo Sapiens
ggacuucugcggcugcaggagaaggagcugug

SEQ ID NO: 72512 - RNA, 32 nt, Homo Sapiens
aaauuccccguccugucaguguuugccuucgc

SEQ ID NO: 72513 - RNA, 32 nt, Homo Sapiens
cgaaagcagaucugagugucugacccaggaca

SEQ ID NO: 72514 - RNA, 32 nt, Homo Sapiens
cucuugggccccugcuggcagcucugccacgu

SEQ ID NO: 72515 - RNA, 32 nt, Homo Sapiens
agauacugggccauaaagaucuguaaaacaua

SEQ ID NO: 72516 - RNA, 32 nt, Homo Sapiens
aagaagcugaugcaggggaaagaaauuaacaa

SEQ ID NO: 72517 - RNA, 32 nt, Homo Sapiens
uuccaacugcugcauuaagauaggguggauuu

SEQ ID NO: 72518 - RNA, 32 nt, Homo Sapiens
caguggggaggggacaucuggcagcaucucuc

SEQ ID NO: 72519 - RNA, 32 nt, Homo Sapiens
aacucuacaaccugaguuugccuuugugaggc

SEQ ID NO: 72520 - RNA, 32 nt, Homo Sapiens
aauaagugggucaaguacaccagccaccucca

SEQ ID NO: 72521 - RNA, 32 nt, Homo Sapiens
uuccugugcacugagcccaccagccacagugc

SEQ ID NO: 72522 - RNA, 32 nt, Homo Sapiens
agcuaauuauucaaaugacggaucaaagaacc

SEQ ID NO: 72523 - RNA, 32 nt, Homo Sapiens
ucccucaacaugaagaugugucugcgucugag

SEQ ID NO: 72524 - RNA, 32 nt, Homo Sapiens
uuuggaacauagaaaacacaaaaacucaccuu

SEQ ID NO: 72525 - RNA, 27 nt, Homo Sapiens
uguugccauuaauacuuuuggauucca

SEQ ID NO: 72526 - RNA, 32 nt, Homo Sapiens
cucccugaaucucugcugcugcugcugcugcu

SEQ ID NO: 72527 - RNA, 32 nt, Homo Sapiens
acuucagccuaggugacauagcaagacccugu

SEQ ID NO: 72528 - RNA, 32 nt, Homo Sapiens
uguuuuuaugaguaaauacaugcauugucaua

SEQ ID NO: 72529 - RNA, 32 nt, Homo Sapiens
gagagcucaguuucccucucccccuccccaaa

SEQ ID NO: 72530 - RNA, 32 nt, Homo Sapiens
aacaggccaacaagacagcuuuuuacaugugu

SEQ ID NO: 72531 - RNA, 32 nt, Homo Sapiens
aaaaaauugagagagcuaugcuauagagggga

SEQ ID NO: 72532 - RNA, 32 nt, Homo Sapiens
ccuugggaaugggguagugaggccccagacuu

SEQ ID NO: 72533 - RNA, 32 nt, Homo Sapiens
ugccucggugggagagacccagcuuuucgcgu

SEQ ID NO: 72534 - RNA, 32 nt, Homo Sapiens
caccugcaccuguguccuccccuccccggccc

SEQ ID NO: 72535 - RNA, 32 nt, Homo Sapiens
gugucaauggcugugucucaccagccuggaga

SEQ ID NO: 72536 - RNA, 32 nt, Homo Sapiens
uccugcccacguggggacccagggagccgucg

SEQ ID NO: 72537 - RNA, 32 nt, Homo Sapiens
cagacugugggaaggaucagaaggaauccgcc

SEQ ID NO: 72538 - RNA, 32 nt, Homo Sapiens
ucagggcgcaaacacaucccugcacccggugg

SEQ ID NO: 72539 - RNA, 32 nt, Homo Sapiens
acaaggcagcuagucagcuacuuagagguugg

SEQ ID NO: 72540 - RNA, 32 nt, Homo Sapiens
uuuuuaugaugaugaaaauuuuaccagcagaa

SEQ ID NO: 72541 - RNA, 32 nt, Homo Sapiens
aacuaaaaauguucugugaaaacaagcagcua

SEQ ID NO: 72542 - RNA, 32 nt, Homo Sapiens
ccacugaagaucuggaaaauuccaggaacuuu

SEQ ID NO: 72543 - RNA, 31 nt, Homo Sapiens
aauaaacaguuuguaaacggauaacuuauuu

SEQ ID NO: 72544 - RNA, 32 nt, Homo Sapiens
ucuaugggaucccugaggaaggagaguggaua

SEQ ID NO: 72545 - RNA, 32 nt, Homo Sapiens
ggucccagguagucccugcucuuggcuucacc

SEQ ID NO: 72546 - RNA, 32 nt, Homo Sapiens
aucuccagcaucuggaacagagccugggacaa

SEQ ID NO: 72547 - RNA, 32 nt, Homo Sapiens
ccucuagaauucuuccuucccucccccacacc

SEQ ID NO: 72548 - RNA, 32 nt, Homo Sapiens
cgcucgcaccccagccgcccggcccgcgacca

SEQ ID NO: 72549 - RNA, 32 nt, Homo Sapiens
uuugcuuccccuccccccgagauuauuaccac

SEQ ID NO: 72550 - RNA, 32 nt, Homo Sapiens
gcucgggcauggcggaggagcggccgggggcc

SEQ ID NO: 72551 - RNA, 29 nt, Homo Sapiens
auacuugguuuucaguaccacaagagcua

SEQ ID NO: 72552 - RNA, 32 nt, Homo Sapiens
agcccaggugacaugccggugcucuccaggcc

SEQ ID NO: 72553 - RNA, 32 nt, Homo Sapiens
cuugcaaaauguuuggauguaauguuaaagcg

SEQ ID NO: 72554 - RNA, 31 nt, Homo Sapiens
agaaagauguugcucuaagugcuguuuguua

SEQ ID NO: 72555 - RNA, 32 nt, Homo Sapiens
gacuugaugagggaggguuauacguacaacca

SEQ ID NO: 72556 - RNA, 32 nt, Homo Sapiens
gacgccacccucgagaccuucugcagccugag

SEQ ID NO: 72557 - RNA, 32 nt, Homo Sapiens
cugacugcaagccccacccuccuugagacugg

SEQ ID NO: 72558 - RNA, 32 nt, Homo Sapiens
ccgaccccgcaacgacugcccgggcugcggga

SEQ ID NO: 72559 - RNA, 32 nt, Homo Sapiens
ggugaguggaccgggggcuguguuuuaagcug

SEQ ID NO: 72560 - RNA, 32 nt, Homo Sapiens
gugacucuaaauaguugauuuuucugccugaa

SEQ ID NO: 72561 - RNA, 32 nt, Homo Sapiens
acggagcuggagcggcggggcggcggcggagu

SEQ ID NO: 72562 - RNA, 32 nt, Homo Sapiens
cucauccccccucuucucacauuaagguggug

SEQ ID NO: 72563 - RNA, 32 nt, Homo Sapiens
agagcuggcccuucccaucuccccucuccccu

SEQ ID NO: 72564 - RNA, 32 nt, Homo Sapiens
aguuucucuuugucauaacccuggucuggcug

SEQ ID NO: 72565 - RNA, 32 nt, Homo Sapiens
ugccgugugcccucgggcgagucacugccucu

SEQ ID NO: 72566 - RNA, 32 nt, Homo Sapiens
uccacggugaucagagaagggauuguaccacu

SEQ ID NO: 72567 - RNA, 32 nt, Homo Sapiens
uaauggaaguauugacccucuaugauaugugc

SEQ ID NO: 72568 - RNA, 32 nt, Homo Sapiens
uggauacaucauuuguaacauuguaggaaaga

SEQ ID NO: 72569 - RNA, 32 nt, Homo Sapiens
auauuaugccuacuguccucauuuuuauuaua

SEQ ID NO: 72570 - RNA, 32 nt, Homo Sapiens
uuggucuuuaccuaggcuguguuuccuaagcu

SEQ ID NO: 72571 - RNA, 32 nt, Homo Sapiens
ucuuggucuuuuuuacuaauauugauuauaaa

SEQ ID NO: 72572 - RNA, 32 nt, Homo Sapiens
ccgagcggcgccacccgccccacuggcccgca

SEQ ID NO: 72573 - RNA, 32 nt, Homo Sapiens
acauccucuuuccugugucaagaagcaucguc

SEQ ID NO: 72574 - RNA, 32 nt, Homo Sapiens
cuuuucauauauauuuuccccuuaccaauugu

SEQ ID NO: 72575 - RNA, 32 nt, Homo Sapiens
gagacugaggagacccugcugcuuugggagga

SEQ ID NO: 72576 - RNA, 29 nt, Homo Sapiens
uggaauaauaaaguauauuuuucaugaaa

SEQ ID NO: 72577 - RNA, 31 nt, Homo Sapiens
uccccguaaucagugaaucucauccacccgc

SEQ ID NO: 72578 - RNA, 32 nt, Homo Sapiens
aaaaaaagaaaaacagaagaugaccuugaugg

SEQ ID NO: 72579 - RNA, 32 nt, Homo Sapiens
cagggagcccuucucccuccugccugcccucu

SEQ ID NO: 72580 - RNA, 32 nt, Homo Sapiens
gccucagaauaaaagaugauuucucaaaaaua

SEQ ID NO: 72581 - RNA, 32 nt, Homo Sapiens
acaaauacaaccaaaacucagcagugugaucu

SEQ ID NO: 72582 - RNA, 32 nt, Homo Sapiens
cgcgucgcccucugcccccgccggcacccugg

SEQ ID NO: 72583 - RNA, 32 nt, Homo Sapiens
gcagauggacacagcgcacacccagacccucc

SEQ ID NO: 72584 - RNA, 32 nt, Homo Sapiens
caccaaggcuagaagaggcagggaaggagccu

SEQ ID NO: 72585 - RNA, 32 nt, Homo Sapiens
uguuuagaggguaguauaaaugagcacagugc

SEQ ID NO: 72586 - RNA, 32 nt, Homo Sapiens
ggagcuucacuauuucuaagacuuuaugggcc

SEQ ID NO: 72587 - RNA, 32 nt, Homo Sapiens
ccaagcuagagaaagauaaacaggucaugaag

SEQ ID NO: 72588 - RNA, 32 nt, Homo Sapiens
ggaccgugggaaagaggacagcucagggagaa

SEQ ID NO: 72589 - RNA, 26 nt, Homo Sapiens
cauggggagcugcugcagcugccuga

SEQ ID NO: 72590 - RNA, 32 nt, Homo Sapiens
cucgacucccgauuucauuugcuggccaggaa

SEQ ID NO: 72591 - RNA, 32 nt, Homo Sapiens
caaauaguacauugcauuuugaaguuuugggu

SEQ ID NO: 72592 - RNA, 32 nt, Homo Sapiens
ccgccauacuucugucgcccugucgucugugu

SEQ ID NO: 72593 - RNA, 32 nt, Homo Sapiens
cucaugccuuuccuucccuuucucuggggauu

SEQ ID NO: 72594 - RNA, 32 nt, Homo Sapiens
guuuccgggcccagcccucgcagccccccacc

SEQ ID NO: 72595 - RNA, 32 nt, Homo Sapiens
agucacugagccguccuccccccaccucugag

SEQ ID NO: 72596 - RNA, 32 nt, Homo Sapiens
aucuggccuccgccagcuccugccuggcugcc

SEQ ID NO: 72597 - RNA, 32 nt, Homo Sapiens
agcaggggugggccggggagggguccuuugcg

SEQ ID NO: 72598 - RNA, 32 nt, Homo Sapiens
ugggcauccagcagaggagccccuaaggccag

SEQ ID NO: 72599 - RNA, 32 nt, Homo Sapiens
gccuggcacacagguaacugucggcaauguua

SEQ ID NO: 72600 - RNA, 32 nt, Homo Sapiens
aacaguuaugaguauugaucaucugaaacaga

SEQ ID NO: 72601 - RNA, 32 nt, Homo Sapiens
cccacacagcagcacagccaucacaggauucc

SEQ ID NO: 72602 - RNA, 32 nt, Homo Sapiens
cccaguagcugagacuauacaggugcaggcca

SEQ ID NO: 72603 - RNA, 32 nt, Homo Sapiens
cugccgcuccgguuccgauggcacucgagagg

SEQ ID NO: 72604 - RNA, 32 nt, Homo Sapiens
aaggggaugguuguuuucuuucugccuuuagu

SEQ ID NO: 72605 - RNA, 32 nt, Homo Sapiens
agccugaguaauacccguauuaaaagagccuc

SEQ ID NO: 72606 - RNA, 32 nt, Homo Sapiens
aaaugaaauguggaggcucccagucccagccc

SEQ ID NO: 72607 - RNA, 32 nt, Homo Sapiens
aggaacucuaaccccgguguaccuguauaaac

SEQ ID NO: 72608 - RNA, 32 nt, Homo Sapiens
ccuugcucuucugucugucaucuugcaggaug

SEQ ID NO: 72609 - RNA, 32 nt, Homo Sapiens
uauuggagaaaauaaacuuguuucauuuugca

SEQ ID NO: 72610 - RNA, 32 nt, Homo Sapiens
ucacuuaucuucuguauuuuuccucugucgug

SEQ ID NO: 72611 - RNA, 32 nt, Homo Sapiens
ugccagacugugcuccuuggaacuuauggccc

SEQ ID NO: 72612 - RNA, 32 nt, Homo Sapiens
ucagcuucaacaaaugguuucuggagacaaau

SEQ ID NO: 72613 - RNA, 32 nt, Homo Sapiens
ugacccccaagccuccaacauccugucuuucc

SEQ ID NO: 72614 - RNA, 32 nt, Homo Sapiens
cagcuggagaaagaggcccagccacugaccca

SEQ ID NO: 72615 - RNA, 32 nt, Homo Sapiens
uucugugaccaucaauuaaugaggguuugugc

SEQ ID NO: 72616 - RNA, 32 nt, Homo Sapiens
auuuaguguguguauguguauucauucuuuug

SEQ ID NO: 72617 - RNA, 32 nt, Homo Sapiens
ucagccaugagcagacggccuguggucccugg

SEQ ID NO: 72618 - RNA, 32 nt, Homo Sapiens
augacauugccaacuuaagacacacaaagcag

SEQ ID NO: 72619 - RNA, 32 nt, Homo Sapiens
ugccuuggccaccggccagcagcccucuguga

SEQ ID NO: 72620 - RNA, 32 nt, Homo Sapiens
caccuuuuucagagccagcagugcuguuuucu

SEQ ID NO: 72621 - RNA, 31 nt, Homo Sapiens
cauaauucucucacaaaguccacuuuacuca

SEQ ID NO: 72622 - RNA, 32 nt, Homo Sapiens
cagcaggugccuauaagcaagaaaguggguuc

SEQ ID NO: 72623 - RNA, 32 nt, Homo Sapiens
ccaguggccccucaggacccagggucccagcu

SEQ ID NO: 72624 - RNA, 32 nt, Homo Sapiens
gguuuaauuuauuugaaguuuucaugguguua

SEQ ID NO: 72625 - RNA, 32 nt, Homo Sapiens
aggcgacgggcacggcgggcgagcgggcggua

SEQ ID NO: 72626 - RNA, 32 nt, Homo Sapiens
uccugcccucaaguggcuuccaccucaagugg

SEQ ID NO: 72627 - RNA, 30 nt, Homo Sapiens
ugccugaauauccugucuuuucuuuuuuau

SEQ ID NO: 72628 - RNA, 32 nt, Homo Sapiens
uauuuuacaauuuuuuaucaugcauguccugu

SEQ ID NO: 72629 - RNA, 32 nt, Homo Sapiens
uuuucauuuuuuuuuuuuuuuauuauacucua

SEQ ID NO: 72630 - RNA, 26 nt, Homo Sapiens
cauggacuucccgugccucuggcuag

SEQ ID NO: 72631 - RNA, 32 nt, Homo Sapiens
gaaugugucuacugccuggugguucaaagguu

SEQ ID NO: 72632 - RNA, 32 nt, Homo Sapiens
aaaucccuugacaaaagcgcauagguuauuuc

SEQ ID NO: 72633 - RNA, 31 nt, Homo Sapiens
gcauggcggcgguggcugccccgauuuccuc

SEQ ID NO: 72634 - RNA, 32 nt, Homo Sapiens
cgguguugugguuuaccgucuccagcuucagc

SEQ ID NO: 72635 - RNA, 32 nt, Homo Sapiens
uggcgcagcgccagccucgagcuccucgguag

SEQ ID NO: 72636 - RNA, 32 nt, Homo Sapiens
ucccauaccugcuuuagaaugugugugagaca

SEQ ID NO: 72637 - RNA, 32 nt, Homo Sapiens
acaugaguugacuuagaaaugacucuaucagc

SEQ ID NO: 72638 - RNA, 32 nt, Homo Sapiens
auuugggauauguaaauuaugguuuggucuaa

SEQ ID NO: 72639 - RNA, 32 nt, Homo Sapiens
gcuugaauccuccaugcaaaucauggagucug

SEQ ID NO: 72640 - RNA, 32 nt, Homo Sapiens
ggggagagggaaaaacaguuuuggauauaacu

SEQ ID NO: 72641 - RNA, 32 nt, Homo Sapiens
uguaucauuguuaaaaaugcugucaaauccuu

SEQ ID NO: 72642 - RNA, 32 nt, Homo Sapiens
gauuucagucuaaagcgaaacaucaguaaguu

SEQ ID NO: 72643 - RNA, 32 nt, Homo Sapiens
uugguuuuguuguuucaaccauaguuagagac

SEQ ID NO: 72644 - RNA, 32 nt, Homo Sapiens
uuuacugacaccuugugcucaggccuguguug

SEQ ID NO: 72645 - RNA, 32 nt, Homo Sapiens
agcucugcaggauauacccggaggagggaagc

SEQ ID NO: 72646 - RNA, 32 nt, Homo Sapiens
gcugcuaaccuugaaauuaucagacacuuagg

SEQ ID NO: 72647 - RNA, 32 nt, Homo Sapiens
uuugaggaaggggaguuggguacuucugccuc

SEQ ID NO: 72648 - RNA, 32 nt, Homo Sapiens
ccagaggccugccugggcucccaggauucggg

SEQ ID NO: 72649 - RNA, 32 nt, Homo Sapiens
ggcaccuuucccuccgcuuucgauagguugcu

SEQ ID NO: 72650 - RNA, 32 nt, Homo Sapiens
uacagccugccagaucuggccugcccauguac

SEQ ID NO: 72651 - RNA, 32 nt, Homo Sapiens
cagucagcccauauggagagccagcagggucu

SEQ ID NO: 72652 - RNA, 32 nt, Homo Sapiens
aaccuguugaaaugauaauuauguaaagauaa

SEQ ID NO: 72653 - RNA, 32 nt, Homo Sapiens
agcuuuggcucaaaauauagcaggaccagguc

SEQ ID NO: 72654 - RNA, 32 nt, Homo Sapiens
uccugagcuugaaaauggaagaauuuaguuuu

SEQ ID NO: 72655 - RNA, 32 nt, Homo Sapiens
uguuaguaaauaaaugggcugaagauguuauc

SEQ ID NO: 72656 - RNA, 30 nt, Homo Sapiens
gagcugcugcaagugccgccugugcugggg

SEQ ID NO: 72657 - RNA, 32 nt, Homo Sapiens
uuuaggaucccggagccaggcaucucgcucac

SEQ ID NO: 72658 - RNA, 32 nt, Homo Sapiens
cccagggucuugcucugucacccaggcuggag

SEQ ID NO: 72659 - RNA, 32 nt, Homo Sapiens
cacaugguuggaucauguauuuagacccccca

SEQ ID NO: 72660 - RNA, 31 nt, Homo Sapiens
gccacagaggcucggucuccccgcgcacagc

SEQ ID NO: 72661 - RNA, 32 nt, Homo Sapiens
agcuggcugcagccuccaccucccuggcucaa

SEQ ID NO: 72662 - RNA, 32 nt, Homo Sapiens
uuucucuuacacaugaaaguccuuccaacauu

SEQ ID NO: 72663 - RNA, 32 nt, Homo Sapiens
cugcauguacucucuuugcagugaauuuggaa

SEQ ID NO: 72664 - RNA, 32 nt, Homo Sapiens
aacgagaugcaguuugagucugggauacucag

SEQ ID NO: 72665 - RNA, 29 nt, Homo Sapiens
gccugugugacuugggugugaaugguuug

SEQ ID NO: 72666 - RNA, 32 nt, Homo Sapiens
uugggauagccuaaaaaguaauguuuaauguu

SEQ ID NO: 72667 - RNA, 31 nt, Homo Sapiens
auccugcagcgcaaggacaccuggaccccca

SEQ ID NO: 72668 - RNA, 32 nt, Homo Sapiens
ugcugucccccggccucuaguuccccgcaggu

SEQ ID NO: 72669 - RNA, 32 nt, Homo Sapiens
uggaggucacucacaaguccucauggagacuc

SEQ ID NO: 72670 - RNA, 32 nt, Homo Sapiens
ugaaaccuggaaaggagcagugccugaggccu

SEQ ID NO: 72671 - RNA, 31 nt, Homo Sapiens
uggcggcggcacugcagcugcguggccgccc

SEQ ID NO: 72672 - RNA, 32 nt, Homo Sapiens
agcacaugaaguaguuugauaauaaauagcag

SEQ ID NO: 72673 - RNA, 32 nt, Homo Sapiens
uggauuuggggcugauuaccacugcuugccua

SEQ ID NO: 72674 - RNA, 32 nt, Homo Sapiens
guggccgauagcugguccucuuucuccaacac

SEQ ID NO: 72675 - RNA, 32 nt, Homo Sapiens
acuccaugucucuggaugugucacuuggacca

SEQ ID NO: 72676 - RNA, 32 nt, Homo Sapiens
uccucagugaccagcuccugcucacugcccuc

SEQ ID NO: 72677 - RNA, 32 nt, Homo Sapiens
acacuagcacaccucugguuauacaugcaugc

SEQ ID NO: 72678 - RNA, 32 nt, Homo Sapiens
uucugugauugugccuaugcaugaugaaugaa

SEQ ID NO: 72679 - RNA, 32 nt, Homo Sapiens
cuccagccauacucaccuccccuuucccaguc

SEQ ID NO: 72680 - RNA, 32 nt, Homo Sapiens
cuuggaagaaagggcuccaugugccuagaaga

SEQ ID NO: 72681 - RNA, 32 nt, Homo Sapiens
ugggcuucagccucccggggccccagagggcg

SEQ ID NO: 72682 - RNA, 32 nt, Homo Sapiens
gcucggauuaaaccugauuucuggguaugucu

SEQ ID NO: 72683 - RNA, 32 nt, Homo Sapiens
uaucguuagcuguaaaaguaauauuaugacau

SEQ ID NO: 72684 - RNA, 32 nt, Homo Sapiens
ccggagcggccuacgcugggcuccacaacauc

SEQ ID NO: 72685 - RNA, 32 nt, Homo Sapiens
uccucuuccucuaucaaggccuucucuucuuc

SEQ ID NO: 72686 - RNA, 32 nt, Homo Sapiens
gugugagcgcgugcgcgcauguggugcugagc

SEQ ID NO: 72687 - RNA, 32 nt, Homo Sapiens
agagagucuugcugcugauauuuuuucuaaua

SEQ ID NO: 72688 - RNA, 32 nt, Homo Sapiens
agggggccaggcuuccuuugccugaagcuguu

SEQ ID NO: 72689 - RNA, 32 nt, Homo Sapiens
uucaguuugcagcuggggauaugugcaugguu

SEQ ID NO: 72690 - RNA, 32 nt, Homo Sapiens
gguggcccccucuccuucuccuagcucuggag

SEQ ID NO: 72691 - RNA, 32 nt, Homo Sapiens
aaaagcauacuuucuuuuuucuuuuccuuuuu

SEQ ID NO: 72692 - RNA, 32 nt, Homo Sapiens
uuaccauuuuguggagcuuucacuuacauuau

SEQ ID NO: 72693 - RNA, 32 nt, Homo Sapiens
ggccacaaugagaaaaauaaaaaugaaaaaag

SEQ ID NO: 72694 - RNA, 32 nt, Homo Sapiens
aguuucccuggugacugcaaauccauugcuag

SEQ ID NO: 72695 - RNA, 32 nt, Homo Sapiens
uuacucccauauauuucuaguauuucccucug

SEQ ID NO: 72696 - RNA, 32 nt, Homo Sapiens
ggguuaucuauuugauucaugaugcuuaaauc

SEQ ID NO: 72697 - RNA, 30 nt, Homo Sapiens
agccaaggcaggcgugugugguaacacaua

SEQ ID NO: 72698 - RNA, 32 nt, Homo Sapiens
cugccccgcucccgccccagcgccaucccucc

SEQ ID NO: 72699 - RNA, 32 nt, Homo Sapiens
gcaccgauuuggcacuucccacugccuggaga

SEQ ID NO: 72700 - RNA, 32 nt, Homo Sapiens
caccugaaucauuccauguaaaacagagcucu

SEQ ID NO: 72701 - RNA, 32 nt, Homo Sapiens
ccuaggcuucucccaaacccaggcccuuccug

SEQ ID NO: 72702 - RNA, 32 nt, Homo Sapiens
aaaugacagcuacuaaagcccaaucauggaaa

SEQ ID NO: 72703 - RNA, 32 nt, Homo Sapiens
ccgacuuucugcacguguucacuuugaggcug

SEQ ID NO: 72704 - RNA, 32 nt, Homo Sapiens
cagaguggguggcagugauacuuuuaacuuuu

SEQ ID NO: 72705 - RNA, 32 nt, Homo Sapiens
cugaaagauggcagaagaaguggugguaguag

SEQ ID NO: 72706 - RNA, 30 nt, Homo Sapiens
agcuuugucugugugggugcucacaggagg

SEQ ID NO: 72707 - RNA, 31 nt, Homo Sapiens
gucuuucauuugaugagucugggugaagcca

SEQ ID NO: 72708 - RNA, 32 nt, Homo Sapiens
cuagagcagcauggagcuguugguagaauauu

SEQ ID NO: 72709 - RNA, 32 nt, Homo Sapiens
uuccuaauacucuuuauuaaaauguuuccaaa

SEQ ID NO: 72710 - RNA, 32 nt, Homo Sapiens
auuuuaguuguagaagaaaauuucuuacaaaa

SEQ ID NO: 72711 - RNA, 32 nt, Homo Sapiens
uagccacugucccaccuccauccacacacaga

SEQ ID NO: 72712 - RNA, 30 nt, Homo Sapiens
ugugcggccggaggcggcggcgggaacggc

SEQ ID NO: 72713 - RNA, 32 nt, Homo Sapiens
guaaugguucuuccucucagucuuucuauucc

SEQ ID NO: 72714 - RNA, 32 nt, Homo Sapiens
cggccuaaaggauggcgcagguccugggcagg

SEQ ID NO: 72715 - RNA, 32 nt, Homo Sapiens
ccagcugcagggucugcuuuuacuuggggugg

SEQ ID NO: 72716 - RNA, 30 nt, Homo Sapiens
cagggagguugugcugcaggcugacucaug

SEQ ID NO: 72717 - RNA, 32 nt, Homo Sapiens
cguccuccucgcccuccaggccgcccgcgccg

SEQ ID NO: 72718 - RNA, 32 nt, Homo Sapiens
agacagcuagaggauauguauauuuuaauauu

SEQ ID NO: 72719 - RNA, 32 nt, Homo Sapiens
guuuuuggagggcuccucugggaaauggcccg

SEQ ID NO: 72720 - RNA, 32 nt, Homo Sapiens
cagaaggaaugggacauugaccgucaucucug

SEQ ID NO: 72721 - RNA, 32 nt, Homo Sapiens
gcuggggcugcggcgccgcugcugacacggau

SEQ ID NO: 72722 - RNA, 32 nt, Homo Sapiens
guuugaagugauuaauauccuaaagacccuga

SEQ ID NO: 72723 - RNA, 32 nt, Homo Sapiens
aaggacugcucuauguugagggauguagcuca

SEQ ID NO: 72724 - RNA, 32 nt, Homo Sapiens
gcgaugggacggucagaggaagagacuucuuc

SEQ ID NO: 72725 - RNA, 32 nt, Homo Sapiens
aaagagagaugcuuguuauaccuuuagaaaau

SEQ ID NO: 72726 - RNA, 30 nt, Homo Sapiens
caucuuggagggcgcgcggguacugacagc

SEQ ID NO: 72727 - RNA, 32 nt, Homo Sapiens
ucuguuuucacccagaagugucuuaaauccgu

SEQ ID NO: 72728 - RNA, 32 nt, Homo Sapiens
uuugauacaguucuuuguaauaaaauugacca

SEQ ID NO: 72729 - RNA, 32 nt, Homo Sapiens
uguguccacuccugggaugguuccaggggaaa

SEQ ID NO: 72730 - RNA, 32 nt, Homo Sapiens
gccccgagcccuugcaccuuccugaggguuuu

SEQ ID NO: 72731 - RNA, 32 nt, Homo Sapiens
cuugucggagcccuaaccagggguaucucuga

SEQ ID NO: 72732 - RNA, 32 nt, Homo Sapiens
ggcgacggcggucgcgucggcgucagggucgg

SEQ ID NO: 72733 - RNA, 32 nt, Homo Sapiens
guuccagaaccgccgaaccaaccccgcaaggg

SEQ ID NO: 72734 - RNA, 32 nt, Homo Sapiens
cuggggagggugggagcacgaacgagguggga

SEQ ID NO: 72735 - RNA, 32 nt, Homo Sapiens
ggagguuccagugggaggagcucaggugggga

SEQ ID NO: 72736 - RNA, 32 nt, Homo Sapiens
cucuauauggauuuauacuuuuauauuuauaa

SEQ ID NO: 72737 - RNA, 32 nt, Homo Sapiens
cuucuccggcccggcuccuucuccgcucguua

SEQ ID NO: 72738 - RNA, 32 nt, Homo Sapiens
gcuguccagccaacagaaguggucaauauacu

SEQ ID NO: 72739 - RNA, 32 nt, Homo Sapiens
gucauuugugagucaucagaucuucuccugaa

SEQ ID NO: 72740 - RNA, 32 nt, Homo Sapiens
ucaccuuccccggagacccuggcgaccgccgg

SEQ ID NO: 72741 - RNA, 32 nt, Homo Sapiens
uugcugggaugggaaaccugcucaaaguccuu

SEQ ID NO: 72742 - RNA, 32 nt, Homo Sapiens
cccccaccuggaggggcuggcuccugcccucc

SEQ ID NO: 72743 - RNA, 32 nt, Homo Sapiens
ccccaccccgucuggggccugcccucccggcc

SEQ ID NO: 72744 - RNA, 32 nt, Homo Sapiens
uacauuuuuuaaauuuugcugugugggucaca

SEQ ID NO: 72745 - RNA, 32 nt, Homo Sapiens
accuacuguuuaaaauguguauguugggggag

SEQ ID NO: 72746 - RNA, 32 nt, Homo Sapiens
aauuggaaaaggagaagcuuacuacagcuuua

SEQ ID NO: 72747 - RNA, 32 nt, Homo Sapiens
ccagcagcggccugaucuggguuccgcugauu

SEQ ID NO: 72748 - RNA, 32 nt, Homo Sapiens
gcgccggcuaugccccaccgccuaccgggggc

SEQ ID NO: 72749 - RNA, 32 nt, Homo Sapiens
guuguuugcgcauuuuuuuuuaaagcauauug

SEQ ID NO: 72750 - RNA, 32 nt, Homo Sapiens
uccaguuuuccacagaaaaauuaugagacaca

SEQ ID NO: 72751 - RNA, 32 nt, Homo Sapiens
ccacgcacucaacgcaguggcuucgcuccucc

SEQ ID NO: 72752 - RNA, 32 nt, Homo Sapiens
uugugacauugugacaagcuccauguccuuua

SEQ ID NO: 72753 - RNA, 32 nt, Homo Sapiens
cacacuggcgagagaggacgugcaggaaguau

SEQ ID NO: 72754 - RNA, 32 nt, Homo Sapiens
ggucuggacuggucagcuguggcaccagccgg

SEQ ID NO: 72755 - RNA, 32 nt, Homo Sapiens
acaugaugauuccaaauucagaaagauuucca

SEQ ID NO: 72756 - RNA, 32 nt, Homo Sapiens
ucuuucuccgaauguuauguuuugcuuuuauc

SEQ ID NO: 72757 - RNA, 32 nt, Homo Sapiens
ggggagggaaagggaagauggggccauagccc

SEQ ID NO: 72758 - RNA, 32 nt, Homo Sapiens
guaaagggccagauaguaaauauuuugggcuu

SEQ ID NO: 72759 - RNA, 32 nt, Homo Sapiens
auuccuucugguggguucguggucucgcugac

SEQ ID NO: 72760 - RNA, 32 nt, Homo Sapiens
auacagauaaagauuagcuagauacaagaugc

SEQ ID NO: 72761 - RNA, 32 nt, Homo Sapiens
ggacucugucuccaugguggcucucaccccag

SEQ ID NO: 72762 - RNA, 32 nt, Homo Sapiens
cgucuuccgugcgcagggagggaccagcccag

SEQ ID NO: 72763 - RNA, 32 nt, Homo Sapiens
ccccaaagguuucucuuucuuccuccuugauu

SEQ ID NO: 72764 - RNA, 32 nt, Homo Sapiens
gcugcugggcagguguucuggcagcuucucag

SEQ ID NO: 72765 - RNA, 32 nt, Homo Sapiens
ggccugcccugccugcuggcuacuuccuggcu

SEQ ID NO: 72766 - RNA, 32 nt, Homo Sapiens
acucccccaucccuccucccuaucaaacuagu

SEQ ID NO: 72767 - RNA, 32 nt, Homo Sapiens
uuuugagacagagccucgauccaucauccagg

SEQ ID NO: 72768 - RNA, 32 nt, Homo Sapiens
ucuggaagggaaggggcaggacucaucaggac

SEQ ID NO: 72769 - RNA, 32 nt, Homo Sapiens
gauagagccuugcucugccacccaggcuggag

SEQ ID NO: 72770 - RNA, 32 nt, Homo Sapiens
agacuccucccuaguucugugcucuucucuag

SEQ ID NO: 72771 - RNA, 32 nt, Homo Sapiens
gaagaccagugccccaccuuuuaucuuaguag

SEQ ID NO: 72772 - RNA, 32 nt, Homo Sapiens
uuugucgcaggaauaaagauggcugcugaacc

SEQ ID NO: 72773 - RNA, 32 nt, Homo Sapiens
ccugcagaggucuggaggguagugagaaggua

SEQ ID NO: 72774 - RNA, 32 nt, Homo Sapiens
uuguuuaucugaaauuuuuauguucgaggaga

SEQ ID NO: 72775 - RNA, 32 nt, Homo Sapiens
auugggagacugccuuccucuggcacuggcag

SEQ ID NO: 72776 - RNA, 31 nt, Homo Sapiens
uaucucauuaauaucaucugaguuauccuga

SEQ ID NO: 72777 - RNA, 32 nt, Homo Sapiens
ugucacuguugucauuagauaauuaugaacua

SEQ ID NO: 72778 - RNA, 32 nt, Homo Sapiens
gccgagccgcgguccgaagucuugcuguguca

SEQ ID NO: 72779 - RNA, 32 nt, Homo Sapiens
uaagacucgugcccuccugguacaugggguuu

SEQ ID NO: 72780 - RNA, 31 nt, Homo Sapiens
ucucguugaaauaauuuuguauaucauucua

SEQ ID NO: 72781 - RNA, 32 nt, Homo Sapiens
ccccucaucuucuccacuacuauccacaugac

SEQ ID NO: 72782 - RNA, 32 nt, Homo Sapiens
acacacacauauauauauauauauaguacucu

SEQ ID NO: 72783 - RNA, 32 nt, Homo Sapiens
gaucugaaggcacacuuugauuuuuuuaagga

SEQ ID NO: 72784 - RNA, 32 nt, Homo Sapiens
cgagcuucccaucuccucgccucccccagguc

SEQ ID NO: 72785 - RNA, 32 nt, Homo Sapiens
uccgggagccgggcccggggucccgccaccac

SEQ ID NO: 72786 - RNA, 32 nt, Homo Sapiens
uuaaugguucuuaauguggaaauucacaacau

SEQ ID NO: 72787 - RNA, 32 nt, Homo Sapiens
aaaguucuucaugguagugagccucccaggau

SEQ ID NO: 72788 - RNA, 32 nt, Homo Sapiens
ucugguucauauuucuuugcuguuagaugaua

SEQ ID NO: 72789 - RNA, 32 nt, Homo Sapiens
uauacaauauuuaugaaaccuaaaauuaucug

SEQ ID NO: 72790 - RNA, 32 nt, Homo Sapiens
gagggaugggaagagcuggaacagcaggaggc

SEQ ID NO: 72791 - RNA, 32 nt, Homo Sapiens
cacacaccacagggagaaucugcaugugggga

SEQ ID NO: 72792 - RNA, 32 nt, Homo Sapiens
agggauuugugcucuucaucuguggguacuug

SEQ ID NO: 72793 - RNA, 32 nt, Homo Sapiens
cucccggcaacaucucugggaaucaacagcau

SEQ ID NO: 72794 - RNA, 32 nt, Homo Sapiens
cauguccgccccagcucuugaggcuggaucuu

SEQ ID NO: 72795 - RNA, 32 nt, Homo Sapiens
accucgcccgcggcagaaaccgguaagaagac

SEQ ID NO: 72796 - RNA, 32 nt, Homo Sapiens
guuuagaacauuauauucucaaugcaaagcag

SEQ ID NO: 72797 - RNA, 32 nt, Homo Sapiens
aaucccuugacaaaagcgcauagguuauuuca

SEQ ID NO: 72798 - RNA, 32 nt, Homo Sapiens
accuggagggaagaguggagguggauuccgag

SEQ ID NO: 72799 - RNA, 32 nt, Homo Sapiens
cuguugccgccgccgcagcugcugccgcgguu

SEQ ID NO: 72800 - RNA, 29 nt, Homo Sapiens
acaguauaaaguucacaauauucuauguc

SEQ ID NO: 72801 - RNA, 32 nt, Homo Sapiens
cgcccucagggugaccucuggucuccuugccu

SEQ ID NO: 72802 - RNA, 32 nt, Homo Sapiens
aaagaaaagaaaccauaaauaucgugucauau

SEQ ID NO: 72803 - RNA, 32 nt, Homo Sapiens
cggagccuuagacuugggggagccaaggaggc

SEQ ID NO: 72804 - RNA, 29 nt, Homo Sapiens
uuaauggaauguauguaacuagguagggu

SEQ ID NO: 72805 - RNA, 32 nt, Homo Sapiens
ucaucacaccuauccaugagcagugggaaaag

SEQ ID NO: 72806 - RNA, 32 nt, Homo Sapiens
ggcggacgcucgcgccggcucaccaugcacug

SEQ ID NO: 72807 - RNA, 32 nt, Homo Sapiens
uuuuuucuuuuuucuuuuuuuuuauuugaagc

SEQ ID NO: 72808 - RNA, 32 nt, Homo Sapiens
gcaaaauccaacaacuaacagacauucacagg

SEQ ID NO: 72809 - RNA, 32 nt, Homo Sapiens
ugcccauuucuccuucguaaauccauccuccc

SEQ ID NO: 72810 - RNA, 32 nt, Homo Sapiens
ugaaaugaaguaaaagagauuuccugugacag

SEQ ID NO: 72811 - RNA, 32 nt, Homo Sapiens
uagaaguucuucauucuaucuaacugcauuuu

SEQ ID NO: 72812 - RNA, 32 nt, Homo Sapiens
uaaucauaucucuuuugacauuuuggaaauuu

SEQ ID NO: 72813 - RNA, 32 nt, Homo Sapiens
cacaaugaaaguuuauacuuguaucucacugc

SEQ ID NO: 72814 - RNA, 32 nt, Homo Sapiens
aauuuccuuugaucucucuucugaauugcaga

SEQ ID NO: 72815 - RNA, 29 nt, Homo Sapiens
ugaaggauagugauucuugagagggcaaa

SEQ ID NO: 72816 - RNA, 32 nt, Homo Sapiens
agacuggaggcugaauuugagaaggauuucaa

SEQ ID NO: 72817 - RNA, 32 nt, Homo Sapiens
aauguuuauacagguuuauuaauagcaagugc

SEQ ID NO: 72818 - RNA, 32 nt, Homo Sapiens
acuuguccuuuuuuaucuggcuuauuucauuu

SEQ ID NO: 72819 - RNA, 32 nt, Homo Sapiens
gcaccuaccugauccugaucacuuccuaaacu

SEQ ID NO: 72820 - RNA, 32 nt, Homo Sapiens
gggaugagggccauccugggucuguucccaug

SEQ ID NO: 72821 - RNA, 32 nt, Homo Sapiens
agguauuuaaucuuguuaaauuauauaagcag

SEQ ID NO: 72822 - RNA, 32 nt, Homo Sapiens
acccuaacaaaccugaugugggugggaggggc

SEQ ID NO: 72823 - RNA, 32 nt, Homo Sapiens
cuguuaucucaacaucuucaucagcuccagac

SEQ ID NO: 72824 - RNA, 32 nt, Homo Sapiens
acacugcucuggcccuuccccaggcccaggcu

SEQ ID NO: 72825 - RNA, 32 nt, Homo Sapiens
aagacaaacuaaagacauuugaauuaaaugaa

SEQ ID NO: 72826 - RNA, 32 nt, Homo Sapiens
ccucaggaaugggaggaaggacuccuccacug

SEQ ID NO: 72827 - RNA, 32 nt, Homo Sapiens
aggacauacaaaaggugaccaaugacuggaca

SEQ ID NO: 72828 - RNA, 32 nt, Homo Sapiens
auaacaguuauuucaucauaaaacagucccuu

SEQ ID NO: 72829 - RNA, 32 nt, Homo Sapiens
gucaaguuguuggcuuuuauuguauugaauga

SEQ ID NO: 72830 - RNA, 32 nt, Homo Sapiens
uguuccauuauucagcuggcugauaccacaua

SEQ ID NO: 72831 - RNA, 32 nt, Homo Sapiens
accugguuuguaccugcccacccauggaaguu

SEQ ID NO: 72832 - RNA, 32 nt, Homo Sapiens
ccaugggcuucacccacccccacgccagggga

SEQ ID NO: 72833 - RNA, 32 nt, Homo Sapiens
ggcccagaccccagccuccccuccucccuccc

SEQ ID NO: 72834 - RNA, 29 nt, Homo Sapiens
aguugugugacuuucuaugcuauagaugu

SEQ ID NO: 72835 - RNA, 32 nt, Homo Sapiens
agcuggcauggcggccugcauugcagcggggc

SEQ ID NO: 72836 - RNA, 32 nt, Homo Sapiens
ugaugacagcguuuggcuaccaaacaugugcu

SEQ ID NO: 72837 - RNA, 32 nt, Homo Sapiens
auugcagcuacaguagggaacuguagucuagu

SEQ ID NO: 72838 - RNA, 32 nt, Homo Sapiens
ggcugccggcgcugcgccggagcuuaggacuc

SEQ ID NO: 72839 - RNA, 32 nt, Homo Sapiens
gguugaacuuccaaaauauaaaaauagagcca

SEQ ID NO: 72840 - RNA, 32 nt, Homo Sapiens
cauggggcacccacuuccuucuggguggggcu

SEQ ID NO: 72841 - RNA, 32 nt, Homo Sapiens
ggaguuuucuucauaauaugcauauucaucuu

SEQ ID NO: 72842 - RNA, 32 nt, Homo Sapiens
ggcuggcggggcgaaguuugggggguguuuug

SEQ ID NO: 72843 - RNA, 32 nt, Homo Sapiens
uuguccggagagcugcgaggccgggguuccca

SEQ ID NO: 72844 - RNA, 32 nt, Homo Sapiens
cucuguccuggucuugcuguggcaccccaucg

SEQ ID NO: 72845 - RNA, 32 nt, Homo Sapiens
aggcagaaggaucaccugaguccaggaauuug

SEQ ID NO: 72846 - RNA, 32 nt, Homo Sapiens
acaguauuuaucgagauaaacauggcaaucaa

SEQ ID NO: 72847 - RNA, 32 nt, Homo Sapiens
cgcguacugcuaaaggagucgaccacaccaaa

SEQ ID NO: 72848 - RNA, 32 nt, Homo Sapiens
aggcgaggaugggaaaccagcccaagaggcag

SEQ ID NO: 72849 - RNA, 32 nt, Homo Sapiens
cucgcagcgccgcuccccucccugcccuccgc

SEQ ID NO: 72850 - RNA, 28 nt, Homo Sapiens
gggauggggaggagggacaugagcacuc

SEQ ID NO: 72851 - RNA, 29 nt, Homo Sapiens
gcggucauauguaguaccuuagaaggcug

SEQ ID NO: 72852 - RNA, 32 nt, Homo Sapiens
cccaugccccugacagaucuaguucucuucuc

SEQ ID NO: 72853 - RNA, 32 nt, Homo Sapiens
gccacucggggccccugccgcgcauccugcag

SEQ ID NO: 72854 - RNA, 32 nt, Homo Sapiens
auuuucuuucuguuuucuuuuacucugcuuac

SEQ ID NO: 72855 - RNA, 29 nt, Homo Sapiens
aaccacuaaaguuuuguuuucaaaaucaa

SEQ ID NO: 72856 - RNA, 32 nt, Homo Sapiens
aaaagauuccuccauuaguucauuccaaaaca

SEQ ID NO: 72857 - RNA, 32 nt, Homo Sapiens
ccaguaaagcuacuguuggaaucugcugcagg

SEQ ID NO: 72858 - RNA, 32 nt, Homo Sapiens
ucugcacuguccucucccuuucuggggucauc

SEQ ID NO: 72859 - RNA, 32 nt, Homo Sapiens
ccauuccugcugcugcugcugcugcugcucug

SEQ ID NO: 72860 - RNA, 32 nt, Homo Sapiens
aggguaaauuauauacauauauguaugaaugu

SEQ ID NO: 72861 - RNA, 32 nt, Homo Sapiens
ggauccugcccccaagucauuuccgucccccc

SEQ ID NO: 72862 - RNA, 32 nt, Homo Sapiens
aagauguuuuggcuauucuaguuucuucugcu

SEQ ID NO: 72863 - RNA, 32 nt, Homo Sapiens
aucaccaccgacguuugggaaccgugcacgcc

SEQ ID NO: 72864 - RNA, 32 nt, Homo Sapiens
ucccuaagccccacagccaguucugcaucacc

SEQ ID NO: 72865 - RNA, 32 nt, Homo Sapiens
caucuucccucauuuggguggaggcacacauu

SEQ ID NO: 72866 - RNA, 32 nt, Homo Sapiens
uuuauuagagauuguuugaaugaugcauguua

SEQ ID NO: 72867 - RNA, 32 nt, Homo Sapiens
uaguauguggauuuuuuuuuuaaguauuaucu

SEQ ID NO: 72868 - RNA, 32 nt, Homo Sapiens
agcauuuuagaauugaucagacauuagaacac

SEQ ID NO: 72869 - RNA, 32 nt, Homo Sapiens
ggcacugucuuugcgccugcacaugugugugu

SEQ ID NO: 72870 - RNA, 32 nt, Homo Sapiens
uccuggcucccucccguagucuccugggugug

SEQ ID NO: 72871 - RNA, 32 nt, Homo Sapiens
aacaaaugaaggaaacugaaagccauucaguc

SEQ ID NO: 72872 - RNA, 32 nt, Homo Sapiens
ggaaggugggagaggggacccggacgcgaggu

SEQ ID NO: 72873 - RNA, 32 nt, Homo Sapiens
gcccccucccucccccuccccccuagaaccug

SEQ ID NO: 72874 - RNA, 32 nt, Homo Sapiens
gcugcucucggaaaagcggauccuaauaaagc

SEQ ID NO: 72875 - RNA, 32 nt, Homo Sapiens
ccuuucugugucuuacuccccccacacucucc

SEQ ID NO: 72876 - RNA, 32 nt, Homo Sapiens
ugaacugaacucuuuugggccuggagccccuc

SEQ ID NO: 72877 - RNA, 32 nt, Homo Sapiens
agguugagauguuuuucuuaaacacugccugu

SEQ ID NO: 72878 - RNA, 32 nt, Homo Sapiens
cuuguuugagugcuccaaauguuccauacacu

SEQ ID NO: 72879 - RNA, 32 nt, Homo Sapiens
agucuggcacggccccgucuucugccuccucc

SEQ ID NO: 72880 - RNA, 32 nt, Homo Sapiens
accucacagagccccagagggccugcuugagc

SEQ ID NO: 72881 - RNA, 32 nt, Homo Sapiens
gcccugcgagcuugguugugauguggggcagc

SEQ ID NO: 72882 - RNA, 32 nt, Homo Sapiens
agaccgcagcacagcaucaucugcaccgggac

SEQ ID NO: 72883 - RNA, 27 nt, Homo Sapiens
caauggaggaggaggaugaggaagcgc

SEQ ID NO: 72884 - RNA, 32 nt, Homo Sapiens
ucagaccaaccccgggcccccaucaucacugc

SEQ ID NO: 72885 - RNA, 32 nt, Homo Sapiens
uggcauugggcuuacuuuuguuuucugaauca

SEQ ID NO: 72886 - RNA, 32 nt, Homo Sapiens
ugagaguugcugucucccaguggaauguucac

SEQ ID NO: 72887 - RNA, 32 nt, Homo Sapiens
uuccuuccauggcggauacucccuugaaauuu

SEQ ID NO: 72888 - RNA, 32 nt, Homo Sapiens
caauuccuaaguuguaaacauaaaauauauua

SEQ ID NO: 72889 - RNA, 32 nt, Homo Sapiens
caggguuuugagccacugcugcugcugccauu

SEQ ID NO: 72890 - RNA, 32 nt, Homo Sapiens
gaauaaauaccaugaauccugugcaguguuua

SEQ ID NO: 72891 - RNA, 32 nt, Homo Sapiens
aucagcauuuuuccuaagaggucuagaaaugc

SEQ ID NO: 72892 - RNA, 32 nt, Homo Sapiens
uacgugggggauuacauaaaaccuuuaagaga

SEQ ID NO: 72893 - RNA, 32 nt, Homo Sapiens
aggaggugggucucaugguuucauuuugcuuu

SEQ ID NO: 72894 - RNA, 32 nt, Homo Sapiens
ggguauguaucaauaacagguauuaagacaaa

SEQ ID NO: 72895 - RNA, 32 nt, Homo Sapiens
auuuuacugauuuuaaaagguauauagaaaaa

SEQ ID NO: 72896 - RNA, 32 nt, Homo Sapiens
ugcuccugcccccaccuuacaggucugggaug

SEQ ID NO: 72897 - RNA, 32 nt, Homo Sapiens
ggccguguucccuccccggcucagagccacuc

SEQ ID NO: 72898 - RNA, 32 nt, Homo Sapiens
guuggaaggcucaccacgcagaugcgcucauc

SEQ ID NO: 72899 - RNA, 32 nt, Homo Sapiens
uucuuauggggguuaccaaauauuuuggccuc

SEQ ID NO: 72900 - RNA, 32 nt, Homo Sapiens
gaagaguagagcucugguccagcuccgcgcag

SEQ ID NO: 72901 - RNA, 32 nt, Homo Sapiens
ucugaucugugguuaaaaauauaucgaaauuc

SEQ ID NO: 72902 - RNA, 32 nt, Homo Sapiens
caaaauugccuggccaggucacaccccugcgu

SEQ ID NO: 72903 - RNA, 31 nt, Homo Sapiens
ccgggaucugacgcgccgagagccuggcgcg

SEQ ID NO: 72904 - RNA, 32 nt, Homo Sapiens
uggcuguguggccuuggcccaccugugaguuu

SEQ ID NO: 72905 - RNA, 32 nt, Homo Sapiens
ggggccugguccggcccggccggugcgugagg

SEQ ID NO: 72906 - RNA, 32 nt, Homo Sapiens
uggaagagacggagcacacuuguuacgaaucc

SEQ ID NO: 72907 - RNA, 32 nt, Homo Sapiens
gucuguaaagcaccucccagggucccccgacc

SEQ ID NO: 72908 - RNA, 32 nt, Homo Sapiens
gaaagaaaaaaguuauucaaaguauuuuuaaa

SEQ ID NO: 72909 - RNA, 32 nt, Homo Sapiens
auccuggcucugccagcugacuggcagagggg

SEQ ID NO: 72910 - RNA, 32 nt, Homo Sapiens
uggggucaccccccggccccgggacucagcca

SEQ ID NO: 72911 - RNA, 32 nt, Homo Sapiens
acgcagaccccacacuccauggagucuggaau

SEQ ID NO: 72912 - RNA, 32 nt, Homo Sapiens
cugaccagcgccgcccucccccgcccccgacc

SEQ ID NO: 72913 - RNA, 32 nt, Homo Sapiens
cgggacggcugcccggagcccucggcugccau

SEQ ID NO: 72914 - RNA, 32 nt, Homo Sapiens
auaccacuucacacuuguuuuauuuucuuuag

SEQ ID NO: 72915 - RNA, 32 nt, Homo Sapiens
guuauuuguuuauaaugugugugucauauaca

SEQ ID NO: 72916 - RNA, 32 nt, Homo Sapiens
accgggaaaaggaaaccguguuguguacguaa

SEQ ID NO: 72917 - RNA, 32 nt, Homo Sapiens
ccugcuggagucuuugguggccaggcauguga

SEQ ID NO: 72918 - RNA, 32 nt, Homo Sapiens
cccuuccugccagcgucagaggcccuggagag

SEQ ID NO: 72919 - RNA, 32 nt, Homo Sapiens
acccuuaucacacuguuugauuacaauagugu

SEQ ID NO: 72920 - RNA, 32 nt, Homo Sapiens
gggcaacuaccucaaaguuuuguuaucucugc

SEQ ID NO: 72921 - RNA, 32 nt, Homo Sapiens
uguugaauuugucauucagaucaugaauuguu

SEQ ID NO: 72922 - RNA, 32 nt, Homo Sapiens
auuuguguugguuuuuauuuucauauccagcc

SEQ ID NO: 72923 - RNA, 32 nt, Homo Sapiens
gaagacggcacggucuucccucuucccucagu

SEQ ID NO: 72924 - RNA, 32 nt, Homo Sapiens
uauguaugauguauaauuuaagggaaagcuau

SEQ ID NO: 72925 - RNA, 32 nt, Homo Sapiens
acuguaacacuguaccuacuagguuccuccug

SEQ ID NO: 72926 - RNA, 32 nt, Homo Sapiens
uguccugagcccugacacucccacaccugagc

SEQ ID NO: 72927 - RNA, 32 nt, Homo Sapiens
ccgacucccgguuuccuguccuucuccccucc

SEQ ID NO: 72928 - RNA, 32 nt, Homo Sapiens
cugccacccccuccuuuggggaugugguccau

SEQ ID NO: 72929 - RNA, 32 nt, Homo Sapiens
auaaauuuuuaaaauuuguguguuuuaucagg

SEQ ID NO: 72930 - RNA, 32 nt, Homo Sapiens
guaaauggcuucuuucugggguguggaaaugg

SEQ ID NO: 72931 - RNA, 32 nt, Homo Sapiens
gaagaagcggcggcgcggcggcggcggcuccu

SEQ ID NO: 72932 - RNA, 32 nt, Homo Sapiens
accucgauauuguugaagacauugaaccuauu

SEQ ID NO: 72933 - RNA, 32 nt, Homo Sapiens
uaucacuacucuuuaacgagugccaaaucuuu

SEQ ID NO: 72934 - RNA, 32 nt, Homo Sapiens
agguuccccucugcucaucccuccucauucag

SEQ ID NO: 72935 - RNA, 27 nt, Homo Sapiens
ccaugggaucgcugcuugcgcuccugg

SEQ ID NO: 72936 - RNA, 32 nt, Homo Sapiens
agggguuuaccaguguggcccacgcuggucuu

SEQ ID NO: 72937 - RNA, 32 nt, Homo Sapiens
caaacagaagaggagcaggaaauauccgugcc

SEQ ID NO: 72938 - RNA, 32 nt, Homo Sapiens
uauauugacucugcggcgcgggcccuuuaaua

SEQ ID NO: 72939 - RNA, 32 nt, Homo Sapiens
agcaguucaagguaagcagagaaguaaguucc

SEQ ID NO: 72940 - RNA, 32 nt, Homo Sapiens
gcuguugugucugcgacugcucccggccggag

SEQ ID NO: 72941 - RNA, 32 nt, Homo Sapiens
uuuguauuuugcaucugaccccggggggcugg

SEQ ID NO: 72942 - RNA, 32 nt, Homo Sapiens
ggucccugaggguggggcugugucucccugca

SEQ ID NO: 72943 - RNA, 32 nt, Homo Sapiens
gccaagcccgcagcagaguccugggcaaagac

SEQ ID NO: 72944 - RNA, 32 nt, Homo Sapiens
gcacgagggaagagggugauccgacccgggga

SEQ ID NO: 72945 - RNA, 32 nt, Homo Sapiens
cucuaaagcuuauuguuugaauuuauacgaau

SEQ ID NO: 72946 - RNA, 32 nt, Homo Sapiens
accaagugcccgcuccgcuccucccugugucc

SEQ ID NO: 72947 - RNA, 32 nt, Homo Sapiens
uccucuagcauucagcucuacugugugauggg

SEQ ID NO: 72948 - RNA, 32 nt, Homo Sapiens
caccauguugcccaggcuggucuugauuccug

SEQ ID NO: 72949 - RNA, 31 nt, Homo Sapiens
uguaagaauuugacuuucugaaugaaauaac

SEQ ID NO: 72950 - RNA, 32 nt, Homo Sapiens
uaccauacuguaaauaugagcuuuaugguguc

SEQ ID NO: 72951 - RNA, 32 nt, Homo Sapiens
ggcuuagcaaggaaacagugcaggaaauguag

SEQ ID NO: 72952 - RNA, 32 nt, Homo Sapiens
aguaauuacacacacacacacacacacacaca

SEQ ID NO: 72953 - RNA, 32 nt, Homo Sapiens
ucagccaggacauucccacgggcccgcuguca

SEQ ID NO: 72954 - RNA, 32 nt, Homo Sapiens
gguucccaggccugggguguuuguggagaucu

SEQ ID NO: 72955 - RNA, 32 nt, Homo Sapiens
ggagcggcggccgcagcccacccccacugcug

SEQ ID NO: 72956 - RNA, 32 nt, Homo Sapiens
cucucaaccauguccgccccagcucuugaggc

SEQ ID NO: 72957 - RNA, 32 nt, Homo Sapiens
auucacccaucccaagacuuucucaccagugg

SEQ ID NO: 72958 - RNA, 32 nt, Homo Sapiens
gcaucaaauuucaggaccugcagacaguacag

SEQ ID NO: 72959 - RNA, 32 nt, Homo Sapiens
agaaaaagcucaacuggagaaagaaauuaaug

SEQ ID NO: 72960 - RNA, 32 nt, Homo Sapiens
aaucuaacuugcuuuguuguucucuuuccccu

SEQ ID NO: 72961 - RNA, 32 nt, Homo Sapiens
ggacugacacccuaaugccaauaaaaguugcu

SEQ ID NO: 72962 - RNA, 32 nt, Homo Sapiens
acaaauacccaucuuaggaucccaucagcuuc

SEQ ID NO: 72963 - RNA, 32 nt, Homo Sapiens
uauuuuuucgauuuaaauuugccuguuacuga

SEQ ID NO: 72964 - RNA, 32 nt, Homo Sapiens
uauuuuuccucauagauuuuuccaccaucaga

SEQ ID NO: 72965 - RNA, 32 nt, Homo Sapiens
ggaucucagggccaggaguuauguuuugauuu

SEQ ID NO: 72966 - RNA, 32 nt, Homo Sapiens
cuauuccuuucugcgacgagcccauugcuaug

SEQ ID NO: 72967 - RNA, 32 nt, Homo Sapiens
cagaaacugagugugagaguugugaaauacaa

SEQ ID NO: 72968 - RNA, 32 nt, Homo Sapiens
uuuuuaacaauaaaaugaccagcaaguaaacu

SEQ ID NO: 72969 - RNA, 30 nt, Homo Sapiens
aacaguaggacuggggcagaagcucugccu

SEQ ID NO: 72970 - RNA, 32 nt, Homo Sapiens
aagccaccaugcccagccuguuuugucaaugu

SEQ ID NO: 72971 - RNA, 32 nt, Homo Sapiens
cugccguggacucgaggacgcuggucgccggc

SEQ ID NO: 72972 - RNA, 32 nt, Homo Sapiens
uggggaaaacgcauuuuagguuuuuuaaagaa

SEQ ID NO: 72973 - RNA, 32 nt, Homo Sapiens
cucugccccccgccuaaaguccugcauucagu

SEQ ID NO: 72974 - RNA, 32 nt, Homo Sapiens
cuauaaugguuuucauuuuuuacuuaauauca

SEQ ID NO: 72975 - RNA, 32 nt, Homo Sapiens
cuuccuuaaaauguaucaguauaggauuuaga

SEQ ID NO: 72976 - RNA, 32 nt, Homo Sapiens
cugucccuuggagcuguaaaccagagagcugc

SEQ ID NO: 72977 - RNA, 32 nt, Homo Sapiens
guuucgggaggagccacagaccuuggggagaa

SEQ ID NO: 72978 - RNA, 32 nt, Homo Sapiens
augaauuguaagucaagaugggcaacucagau

SEQ ID NO: 72979 - RNA, 30 nt, Homo Sapiens
ccuggaggagguggcaucaguaaugagccu

SEQ ID NO: 72980 - RNA, 32 nt, Homo Sapiens
ggggggaaugucuguagaacugcaacaucaau

SEQ ID NO: 72981 - RNA, 32 nt, Homo Sapiens
aggggagcgcccuagcggggccccaggguccg

SEQ ID NO: 72982 - RNA, 32 nt, Homo Sapiens
cccacaucccacccuuaccccagcccggucua

SEQ ID NO: 72983 - RNA, 31 nt, Homo Sapiens
cauuccuccuagguaaaguccauggccauau

SEQ ID NO: 72984 - RNA, 32 nt, Homo Sapiens
cucgcccgcccgggguuggcggggagggaaca

SEQ ID NO: 72985 - RNA, 32 nt, Homo Sapiens
auaaauagugaaaucugaauuacugaaaacca

SEQ ID NO: 72986 - RNA, 32 nt, Homo Sapiens
gcgccugcccgggaacauccuccuggacucaa

SEQ ID NO: 72987 - RNA, 32 nt, Homo Sapiens
aaauuccugucagcugacuuauaaagggacuu

SEQ ID NO: 72988 - RNA, 32 nt, Homo Sapiens
ugccacaggauagaaacugaauuauaacuuaa

SEQ ID NO: 72989 - RNA, 32 nt, Homo Sapiens
auuucuucuuuuucucuuuuuuagagccacca

SEQ ID NO: 72990 - RNA, 32 nt, Homo Sapiens
auauauaugucacccuuuccuguuuuugaaau

SEQ ID NO: 72991 - RNA, 32 nt, Homo Sapiens
guuuuguugcugucuucuguaaugauacaguu

SEQ ID NO: 72992 - RNA, 32 nt, Homo Sapiens
ugaaguuuaaauuuaaaaugcagagagaccaa

SEQ ID NO: 72993 - RNA, 32 nt, Homo Sapiens
gaccagcuggaacugagcaugagacgcuguca

SEQ ID NO: 72994 - RNA, 32 nt, Homo Sapiens
gcagcauuugaaaaauagaaauguucugauga

SEQ ID NO: 72995 - RNA, 32 nt, Homo Sapiens
cucuucugccucagccucaccaaaguguuggg

SEQ ID NO: 72996 - RNA, 32 nt, Homo Sapiens
uguaagucugacauacuaauagucacucaagc

SEQ ID NO: 72997 - RNA, 32 nt, Homo Sapiens
uccugucacccagcggcggccggagcgucacg

SEQ ID NO: 72998 - RNA, 32 nt, Homo Sapiens
cugccguguggcgaggcccaguguguccccuu

SEQ ID NO: 72999 - RNA, 32 nt, Homo Sapiens
aagccagcugucauauucggagggaauuucag

SEQ ID NO: 73000 - RNA, 32 nt, Homo Sapiens
acuggcuggcacaaaaagaaaccugcuguaua

SEQ ID NO: 73001 - RNA, 32 nt, Homo Sapiens
cccacgcguccgggccggguugccagauuacg

SEQ ID NO: 73002 - RNA, 32 nt, Homo Sapiens
uuguucacacguugggcacuaguggguccaca

SEQ ID NO: 73003 - RNA, 32 nt, Homo Sapiens
cacuucacuccagcaucaacaaguggggaauu

SEQ ID NO: 73004 - RNA, 32 nt, Homo Sapiens
cguagaggcccauggaggaaaaggaagauaag

SEQ ID NO: 73005 - RNA, 32 nt, Homo Sapiens
cacccacagcgaaggcacaugccccgaugucg

SEQ ID NO: 73006 - RNA, 32 nt, Homo Sapiens
cuaauuuauuuuuuauuaaagauggucaugac

SEQ ID NO: 73007 - RNA, 28 nt, Homo Sapiens
auagugaaagauuacuucugacauucca

SEQ ID NO: 73008 - RNA, 32 nt, Homo Sapiens
uuccauuuugugaucaauuguuuacagcccgu

SEQ ID NO: 73009 - RNA, 32 nt, Homo Sapiens
aacagaaaacaaaucacuucaacaguauuaac

SEQ ID NO: 73010 - RNA, 32 nt, Homo Sapiens
ucaacuuugugauuuggggagauacaguuuac

SEQ ID NO: 73011 - RNA, 32 nt, Homo Sapiens
gacaugaaacuauuugaaauggcuuuauguca

SEQ ID NO: 73012 - RNA, 32 nt, Homo Sapiens
ccaugauagaaaguuaagccagaaggacaaag

SEQ ID NO: 73013 - RNA, 32 nt, Homo Sapiens
uuaguggagacgggguuucaccaugcuggcca

SEQ ID NO: 73014 - RNA, 32 nt, Homo Sapiens
uucacuuuacuuuagagaacuauuaauauacu

SEQ ID NO: 73015 - RNA, 32 nt, Homo Sapiens
aaaaaaugucgaaagcauuauaacuguaacgu

SEQ ID NO: 73016 - RNA, 32 nt, Homo Sapiens
guaugcagaggguggugaaggcagauauugua

SEQ ID NO: 73017 - RNA, 32 nt, Homo Sapiens
cugggauuuuuaugcauagaaacucacauaua

SEQ ID NO: 73018 - RNA, 32 nt, Homo Sapiens
ggagcuggguggcaggagaggcaauagccccu

SEQ ID NO: 73019 - RNA, 32 nt, Homo Sapiens
cccuuuuccuccaaaacaaaaauuagaggauu

SEQ ID NO: 73020 - RNA, 32 nt, Homo Sapiens
aaagcaaaugucaaguuaaaauguauuguguu

SEQ ID NO: 73021 - RNA, 32 nt, Homo Sapiens
auuuacacguugaaaacuuaguauaugacaca

SEQ ID NO: 73022 - RNA, 32 nt, Homo Sapiens
ucagcagccccaccccacccugccccuugucc

SEQ ID NO: 73023 - RNA, 32 nt, Homo Sapiens
ucuaacugccgccaguggcagcucauuuccuc

SEQ ID NO: 73024 - RNA, 32 nt, Homo Sapiens
gaggcccggugaccacggaacucaccgucugg

SEQ ID NO: 73025 - RNA, 32 nt, Homo Sapiens
aauauucaaacacagaaauauaacaucuauuc

SEQ ID NO: 73026 - RNA, 32 nt, Homo Sapiens
ccacuaaaugcagccuguggucgggcagacag

SEQ ID NO: 73027 - RNA, 32 nt, Homo Sapiens
gucgggacuuggucgcccggcgcugccagaau

SEQ ID NO: 73028 - RNA, 32 nt, Homo Sapiens
uuuuguuuaauccuaauaaacuaaucuauaag

SEQ ID NO: 73029 - RNA, 32 nt, Homo Sapiens
gaauuauagaaaggagaacagaggaguggcug

SEQ ID NO: 73030 - RNA, 32 nt, Homo Sapiens
gagaaggaaaauuugagucuccagaaggaaag

SEQ ID NO: 73031 - RNA, 32 nt, Homo Sapiens
cgcgcggcccacacucgccuccccucggcacc

SEQ ID NO: 73032 - RNA, 32 nt, Homo Sapiens
uuaacuuuuuuccccuucugugucucagggua

SEQ ID NO: 73033 - RNA, 32 nt, Homo Sapiens
uuccugcucccuccucuuuuggcuccuacuca

SEQ ID NO: 73034 - RNA, 32 nt, Homo Sapiens
agugggucugcacuccuugcugucuucccagc

SEQ ID NO: 73035 - RNA, 32 nt, Homo Sapiens
cuucacaccgugggauaaaucuguaucaagau

SEQ ID NO: 73036 - RNA, 32 nt, Homo Sapiens
cuuguucuuuugcaaggaauacacaucuugcc

SEQ ID NO: 73037 - RNA, 32 nt, Homo Sapiens
gaacaacuaucuuuguauuuuguuuuuaaaau

SEQ ID NO: 73038 - RNA, 32 nt, Homo Sapiens
agcacuccuuucuccuugugagaucucuccuc

SEQ ID NO: 73039 - RNA, 32 nt, Homo Sapiens
uugcaguaaauauauacgugacgcauacauac

SEQ ID NO: 73040 - RNA, 32 nt, Homo Sapiens
uuuccauucggaucauuaucuguaugaugugg

SEQ ID NO: 73041 - RNA, 32 nt, Homo Sapiens
cuagcucggccacacuuggugcucccagcauc

SEQ ID NO: 73042 - RNA, 29 nt, Homo Sapiens
ccaaugaugaagauuuuaaggaaaguauu

SEQ ID NO: 73043 - RNA, 32 nt, Homo Sapiens
cgucgucugcccgggcccgcccaucggggucc

SEQ ID NO: 73044 - RNA, 32 nt, Homo Sapiens
auggggugagccaaccaggagcucagauuuau

SEQ ID NO: 73045 - RNA, 32 nt, Homo Sapiens
uaauacacccugucuacccagcgcauucccug

SEQ ID NO: 73046 - RNA, 32 nt, Homo Sapiens
cugugauggaggcauccagacacgugggcgca

SEQ ID NO: 73047 - RNA, 32 nt, Homo Sapiens
agucucuagcuaagcaucaggcuccaggggga

SEQ ID NO: 73048 - RNA, 32 nt, Homo Sapiens
cagccgcacuccaggcaagggccagugcgccu

SEQ ID NO: 73049 - RNA, 32 nt, Homo Sapiens
cgcaggaucgcaggaucgcauucuuuagauuu

SEQ ID NO: 73050 - RNA, 28 nt, Homo Sapiens
ucagagaagagaugacauuugagucaac

SEQ ID NO: 73051 - RNA, 32 nt, Homo Sapiens
uuuuuuacauuuuguauagaaacaaauucauu

SEQ ID NO: 73052 - RNA, 32 nt, Homo Sapiens
uaaacuaaaaauuaggguugauuuuuuugcuc

SEQ ID NO: 73053 - RNA, 32 nt, Homo Sapiens
ugucucccugggugccagcagcccugcugcca

SEQ ID NO: 73054 - RNA, 32 nt, Homo Sapiens
uuuuaaguuuaccaaugaauuguacaacaaug

SEQ ID NO: 73055 - RNA, 32 nt, Homo Sapiens
cuaugcaaguccuccucccucaucucaaaggg

SEQ ID NO: 73056 - RNA, 32 nt, Homo Sapiens
ccuggacgcucgcucuggugggggcacacgca

SEQ ID NO: 73057 - RNA, 32 nt, Homo Sapiens
ucacuucuaggguaugggaaauccaaucagag

SEQ ID NO: 73058 - RNA, 32 nt, Homo Sapiens
gagcucacaaaacuggggagcugagacauuug

SEQ ID NO: 73059 - RNA, 32 nt, Homo Sapiens
auggcuggcagagagcccuggcugggaguuag

SEQ ID NO: 73060 - RNA, 32 nt, Homo Sapiens
cucccaacguguucuuuuuuuuccucuucauu

SEQ ID NO: 73061 - RNA, 32 nt, Homo Sapiens
aauagcaacaagucuagaauucuuacuacuac

SEQ ID NO: 73062 - RNA, 32 nt, Homo Sapiens
cagugacgacuggcaguggaguggggagcacc

SEQ ID NO: 73063 - RNA, 32 nt, Homo Sapiens
ugucagcauagaaaaggaaauguuuuuaccuu

SEQ ID NO: 73064 - RNA, 32 nt, Homo Sapiens
ugagauauguuucugaucuuggaugaccauuu

SEQ ID NO: 73065 - RNA, 32 nt, Homo Sapiens
cugugaaauuuauaaaauuagcuuuuaccuau

SEQ ID NO: 73066 - RNA, 32 nt, Homo Sapiens
cacucccaggguuaacaaaucagugagauccc

SEQ ID NO: 73067 - RNA, 32 nt, Homo Sapiens
acccggcuugggucugugucuugaguguuuuu

SEQ ID NO: 73068 - RNA, 32 nt, Homo Sapiens
uguuuucuaguguuucuguguuuauuacuguu

SEQ ID NO: 73069 - RNA, 32 nt, Homo Sapiens
cugucucaaaauguauaauauagaaaugcaag

SEQ ID NO: 73070 - RNA, 32 nt, Homo Sapiens
aacagcuuuucgucuucagugucuuaaugugg

SEQ ID NO: 73071 - RNA, 32 nt, Homo Sapiens
gcacaugggcggggccuucuggaccuucauca

SEQ ID NO: 73072 - RNA, 32 nt, Homo Sapiens
gaaaggaaagugaguccagagaaguugaugcu

SEQ ID NO: 73073 - RNA, 32 nt, Homo Sapiens
acagaucaccugaguucuuucuauguaauuau

SEQ ID NO: 73074 - RNA, 32 nt, Homo Sapiens
aacaaaggauucaauauuugcuuauuuauucu

SEQ ID NO: 73075 - RNA, 32 nt, Homo Sapiens
ugguuucagcgucgucgccuggagcggcgguu

SEQ ID NO: 73076 - RNA, 29 nt, Homo Sapiens
cuugauguguguauguacauuggucaggu

SEQ ID NO: 73077 - RNA, 32 nt, Homo Sapiens
cacacacacaugcaugcacacacacacacaua

SEQ ID NO: 73078 - RNA, 32 nt, Homo Sapiens
ucaacgcccaauaaaacaaaguaggaugaaaa

SEQ ID NO: 73079 - RNA, 32 nt, Homo Sapiens
uggugguaaagauuaaauuugguugcaucauu

SEQ ID NO: 73080 - RNA, 31 nt, Homo Sapiens
ucacugcggcacuggacgcgcgggggaugcg

SEQ ID NO: 73081 - RNA, 32 nt, Homo Sapiens
aguggaggagacagacacguagucaacugaac

SEQ ID NO: 73082 - RNA, 32 nt, Homo Sapiens
acaaaaacaaagacauauagccaauacaaauc

SEQ ID NO: 73083 - RNA, 32 nt, Homo Sapiens
uuucauauuuuaauuuaaucucugucaauggc

SEQ ID NO: 73084 - RNA, 32 nt, Homo Sapiens
gcugguaaaugaauuugaaucgacauaguagc

SEQ ID NO: 73085 - RNA, 32 nt, Homo Sapiens
cuuuguucauccuaacuuucugagauggcuuu

SEQ ID NO: 73086 - RNA, 32 nt, Homo Sapiens
uucuaugcauguuuucccuccuccccccaauu

SEQ ID NO: 73087 - RNA, 32 nt, Homo Sapiens
auacagggauuugguaauggugacugugugug

SEQ ID NO: 73088 - RNA, 32 nt, Homo Sapiens
ccuggguguggacuuugaaaaucacacacauc

SEQ ID NO: 73089 - RNA, 32 nt, Homo Sapiens
augugaauguuuugauuuauuaaaaugaacug

SEQ ID NO: 73090 - RNA, 32 nt, Homo Sapiens
gagaguugggggcugggaagggcggggcccug

SEQ ID NO: 73091 - RNA, 32 nt, Homo Sapiens
gcccucuuggaaagacuucucugccaucccuu

SEQ ID NO: 73092 - RNA, 32 nt, Homo Sapiens
caucaccaguucugcccuggcagccuccugca

SEQ ID NO: 73093 - RNA, 32 nt, Homo Sapiens
aguauuuaaaagacaugagauuucccaaucug

SEQ ID NO: 73094 - RNA, 32 nt, Homo Sapiens
gcaagguagagugccuaggagcccuggacuca

SEQ ID NO: 73095 - RNA, 32 nt, Homo Sapiens
cagcuccgaggauggacguaggggccagcugc

SEQ ID NO: 73096 - RNA, 32 nt, Homo Sapiens
ccuccuggaagauuggguuccuggacagauca

SEQ ID NO: 73097 - RNA, 32 nt, Homo Sapiens
acguuugcuggccacauucucauuucuaaaca

SEQ ID NO: 73098 - RNA, 32 nt, Homo Sapiens
caaguuuguaaauuucaguaguaacucaguuu

SEQ ID NO: 73099 - RNA, 32 nt, Homo Sapiens
gcaucuuuggccaggcuucugcccucugcagc

SEQ ID NO: 73100 - RNA, 32 nt, Homo Sapiens
cguucaccaagccccccgccccgcccccauca

SEQ ID NO: 73101 - RNA, 32 nt, Homo Sapiens
aaaaagucugaccauuggucuuuggauaccuc

SEQ ID NO: 73102 - RNA, 32 nt, Homo Sapiens
ccaccccugcccccgccagcggaccggucccc

SEQ ID NO: 73103 - RNA, 32 nt, Homo Sapiens
agccaaagcggagcugcugcugccgaaccuca

SEQ ID NO: 73104 - RNA, 32 nt, Homo Sapiens
cugucauauugugguccuuaaucuugagauaa

SEQ ID NO: 73105 - RNA, 32 nt, Homo Sapiens
ugccauguguuucgcugugaugucccugccaa

SEQ ID NO: 73106 - RNA, 28 nt, Homo Sapiens
aagccacaagauggaaagugcuuggguu

SEQ ID NO: 73107 - RNA, 32 nt, Homo Sapiens
uuuccccccacuuucagggcucaccaggcacu

SEQ ID NO: 73108 - RNA, 32 nt, Homo Sapiens
ggcuuccccccucacccugcaucagggcccgg

SEQ ID NO: 73109 - RNA, 32 nt, Homo Sapiens
cagaagcggcuggacaguggcugccucaugac

SEQ ID NO: 73110 - RNA, 32 nt, Homo Sapiens
aaugucucaguugcuuuuauuaaauaaaaugu

SEQ ID NO: 73111 - RNA, 32 nt, Homo Sapiens
cccaggccagccugcuggacaagcagagacca

SEQ ID NO: 73112 - RNA, 32 nt, Homo Sapiens
ccgaccuggcgcagggcuccccggccacggca

SEQ ID NO: 73113 - RNA, 32 nt, Homo Sapiens
aaaugaaacucuucuccauuuaaaagaggcac

SEQ ID NO: 73114 - RNA, 29 nt, Homo Sapiens
ggggugaugaagaagaugaugaugauaau

SEQ ID NO: 73115 - RNA, 32 nt, Homo Sapiens
cccuuccugccagacuggagggccugggggaa

SEQ ID NO: 73116 - RNA, 32 nt, Homo Sapiens
gcgcgagcggccgggcgggcggccgaguuuuc

SEQ ID NO: 73117 - RNA, 32 nt, Homo Sapiens
uggauggugauguguguaguggacaaagugaa

SEQ ID NO: 73118 - RNA, 32 nt, Homo Sapiens
cgccgggcgccgggcgccaugagggugcgcua

SEQ ID NO: 73119 - RNA, 32 nt, Homo Sapiens
gacuggucucgaacuccugaccucaagugauc

SEQ ID NO: 73120 - RNA, 32 nt, Homo Sapiens
caggugcagacaccccccaacucccaugcaca

SEQ ID NO: 73121 - RNA, 32 nt, Homo Sapiens
cucugaggucaggucugaggccaguauccucc

SEQ ID NO: 73122 - RNA, 32 nt, Homo Sapiens
uuccucaaagauuuuagcugcuguuucacuga

SEQ ID NO: 73123 - RNA, 32 nt, Homo Sapiens
acuggcuuuucuccuguggagucgucacacgc

SEQ ID NO: 73124 - RNA, 32 nt, Homo Sapiens
cauugcauuagucuggauucuugcuuacagau

SEQ ID NO: 73125 - RNA, 32 nt, Homo Sapiens
auuaauucacuuuccuuuuuccuacaaugaaa

SEQ ID NO: 73126 - RNA, 31 nt, Homo Sapiens
aguuaagccaggagaaaguucacuuuauuua

SEQ ID NO: 73127 - RNA, 32 nt, Homo Sapiens
gcggguuuuucgcgccaugucguuugcugaga

SEQ ID NO: 73128 - RNA, 32 nt, Homo Sapiens
cucccauguggcucgugcugggacgccggcac

SEQ ID NO: 73129 - RNA, 32 nt, Homo Sapiens
cauccagagugauauaauggacuauggggacu

SEQ ID NO: 73130 - RNA, 32 nt, Homo Sapiens
caggccucccaguccuggacaagcaugugcag

SEQ ID NO: 73131 - RNA, 32 nt, Homo Sapiens
cuguaaaggucaacaauaaaaaccaaauuaug

SEQ ID NO: 73132 - RNA, 32 nt, Homo Sapiens
uaguuuaaaaauuguuacuuaauuuguugccc

SEQ ID NO: 73133 - RNA, 32 nt, Homo Sapiens
cuucuuuagauggcuguaaaucuauuggccau

SEQ ID NO: 73134 - RNA, 32 nt, Homo Sapiens
acggcacggcccggcucuggagcaccgcggac

SEQ ID NO: 73135 - RNA, 32 nt, Homo Sapiens
aucuuuugaugcuuuuuaauucuuguauuaca

SEQ ID NO: 73136 - RNA, 32 nt, Homo Sapiens
uuccuuauguggaaccgaaaucuuucuuucuc

SEQ ID NO: 73137 - RNA, 32 nt, Homo Sapiens
guccccuugccuuuuuccuguucuguuuggag

SEQ ID NO: 73138 - RNA, 32 nt, Homo Sapiens
agauggggagacugaggccguggcuguguguc

SEQ ID NO: 73139 - RNA, 31 nt, Homo Sapiens
ugacauacaaagaaaaugaguaugcuaaagc

SEQ ID NO: 73140 - RNA, 32 nt, Homo Sapiens
gggugaugggccgcacagcgaggcagucaagg

SEQ ID NO: 73141 - RNA, 32 nt, Homo Sapiens
aauaugugcauuuucuguauuguuaugauuug

SEQ ID NO: 73142 - RNA, 32 nt, Homo Sapiens
uuuuucacaggaacgacagacauguaugacug

SEQ ID NO: 73143 - RNA, 32 nt, Homo Sapiens
cuagaaucaggacagucagaucuguggucaca

SEQ ID NO: 73144 - RNA, 32 nt, Homo Sapiens
cuguugauggagauccaacuauuucuuucauc

SEQ ID NO: 73145 - RNA, 32 nt, Homo Sapiens
cuuugcggccccaggcauugacccccucuacc

SEQ ID NO: 73146 - RNA, 32 nt, Homo Sapiens
cagccacuuguuacaggugcuuccugcugaaa

SEQ ID NO: 73147 - RNA, 32 nt, Homo Sapiens
gauaauuccauuucuuuuuucccaaacccuca

SEQ ID NO: 73148 - RNA, 32 nt, Homo Sapiens
cuacaagaauuguaaacugcauacaguuuguu

SEQ ID NO: 73149 - RNA, 32 nt, Homo Sapiens
cucaaccacgcugugcugcgcgcgcucaugca

SEQ ID NO: 73150 - RNA, 32 nt, Homo Sapiens
accucaccgggcaaauggggucggggggacug

SEQ ID NO: 73151 - RNA, 32 nt, Homo Sapiens
caaaaaccacacgauauaggaaaaccuacccc

SEQ ID NO: 73152 - RNA, 32 nt, Homo Sapiens
aauaauagaugugaaaaugcuuugaaaauguu

SEQ ID NO: 73153 - RNA, 32 nt, Homo Sapiens
uguugaaaguuuccucuuaaguuucguggaga

SEQ ID NO: 73154 - RNA, 32 nt, Homo Sapiens
acagguggugauuuuaucagguccugggguug

SEQ ID NO: 73155 - RNA, 31 nt, Homo Sapiens
uaaacaucaaagaaaacauuuuuauuaguua

SEQ ID NO: 73156 - RNA, 32 nt, Homo Sapiens
gcuguaccauggagcauccuccuguguccugc

SEQ ID NO: 73157 - RNA, 32 nt, Homo Sapiens
cuuccuccucaacucccagccaucuguauaaa

SEQ ID NO: 73158 - RNA, 32 nt, Homo Sapiens
agaugcauuccauuuuaacucuucuugagcua

SEQ ID NO: 73159 - RNA, 32 nt, Homo Sapiens
gggugcagccaggagggcagggggacacggcc

SEQ ID NO: 73160 - RNA, 32 nt, Homo Sapiens
aggacugcgagggucuccuggggacagaggca

SEQ ID NO: 73161 - RNA, 32 nt, Homo Sapiens
cuguugagaaaacgaagucuuuuucauuuugc

SEQ ID NO: 73162 - RNA, 32 nt, Homo Sapiens
ggcauacuguagggucuucagaguaguguagg

SEQ ID NO: 73163 - RNA, 32 nt, Homo Sapiens
uauguuucuuuucucucuccucaugagaauau

SEQ ID NO: 73164 - RNA, 32 nt, Homo Sapiens
uuucaaaaacgaugucguauucaaguugugaa

SEQ ID NO: 73165 - RNA, 30 nt, Homo Sapiens
aaugggggagguggggaguuggggaguacu

SEQ ID NO: 73166 - RNA, 32 nt, Homo Sapiens
aguuggaaucauauuguguguaauguuguaug

SEQ ID NO: 73167 - RNA, 32 nt, Homo Sapiens
aauucaaggaggaggagaauguuuuaggcagg

SEQ ID NO: 73168 - RNA, 32 nt, Homo Sapiens
auuucaucuauuucugagaagguccuuaauga

SEQ ID NO: 73169 - RNA, 32 nt, Homo Sapiens
auuggugaaggugacuacacuaaacaacagau

SEQ ID NO: 73170 - RNA, 32 nt, Homo Sapiens
aagacucacucuuuggaauguccucuugcucc

SEQ ID NO: 73171 - RNA, 32 nt, Homo Sapiens
acaugcaacagaagugacuucuggagaaagcu

SEQ ID NO: 73172 - RNA, 32 nt, Homo Sapiens
uagagguacuauuucaauaaacacaugcuuua

SEQ ID NO: 73173 - RNA, 31 nt, Homo Sapiens
ggugucagaaguacucucagcgaaaacugau

SEQ ID NO: 73174 - RNA, 27 nt, Homo Sapiens
acgcaggcccuguccagcccccagugc

SEQ ID NO: 73175 - RNA, 32 nt, Homo Sapiens
auucagggagauuucagaggcugggguaaauc

SEQ ID NO: 73176 - RNA, 31 nt, Homo Sapiens
ucacuuaaauaaaagcagguuaaccucaaug

SEQ ID NO: 73177 - RNA, 30 nt, Homo Sapiens
acugcauggaaucagaaagaagcaaaagga

SEQ ID NO: 73178 - RNA, 32 nt, Homo Sapiens
ucacaucugaucccuuuggggugcgggggugg

SEQ ID NO: 73179 - RNA, 32 nt, Homo Sapiens
ucggggaagggucagggcuucuguggaacuug

SEQ ID NO: 73180 - RNA, 32 nt, Homo Sapiens
ccucuggaccugcuggucugcacugacagccu

SEQ ID NO: 73181 - RNA, 32 nt, Homo Sapiens
uuuuucaguaaaagggaauauuacaauguugg

SEQ ID NO: 73182 - RNA, 32 nt, Homo Sapiens
uguagcagcauuuacagaaaugccaaaaaugu

SEQ ID NO: 73183 - RNA, 32 nt, Homo Sapiens
acaaauaugcuuugggucauaaaucagaaagu

SEQ ID NO: 73184 - RNA, 32 nt, Homo Sapiens
ccuaaggguccugaaagaguguggggagaaau

SEQ ID NO: 73185 - RNA, 28 nt, Homo Sapiens
guccccggggcuaccaggcaggcacgug

SEQ ID NO: 73186 - RNA, 32 nt, Homo Sapiens
gugcggcugggcgggggacgccgccgccguug

SEQ ID NO: 73187 - RNA, 32 nt, Homo Sapiens
ucaacccuccuucacucuggcuucuucaggca

SEQ ID NO: 73188 - RNA, 32 nt, Homo Sapiens
gguuucaccauguuggcuaggcuggucucgaa

SEQ ID NO: 73189 - RNA, 32 nt, Homo Sapiens
aagaagaaaaagaacaacaucaaacuguaugu

SEQ ID NO: 73190 - RNA, 32 nt, Homo Sapiens
auauuugguuuagucuucccacugguauuuau

SEQ ID NO: 73191 - RNA, 32 nt, Homo Sapiens
uuucucaaauguaggcuuuuuacaaauuuuaa

SEQ ID NO: 73192 - RNA, 32 nt, Homo Sapiens
cacccgagaaaguuucagccaaacuucgggcg

SEQ ID NO: 73193 - RNA, 32 nt, Homo Sapiens
ggcagacccacccuuaaucuggguaggcacca

SEQ ID NO: 73194 - RNA, 32 nt, Homo Sapiens
ccccuggaaagugaucccggcauccgagagcc

SEQ ID NO: 73195 - RNA, 32 nt, Homo Sapiens
agugggggcuccagcccuccccacuaugccca

SEQ ID NO: 73196 - RNA, 32 nt, Homo Sapiens
uguggcacauucaugucaaaauuuaccagaag

SEQ ID NO: 73197 - RNA, 32 nt, Homo Sapiens
gugaaauguuuaggaacaaacuguugaaaucc

SEQ ID NO: 73198 - RNA, 32 nt, Homo Sapiens
ugugauuuuuauuuucuucuuuggucaugggg

SEQ ID NO: 73199 - RNA, 32 nt, Homo Sapiens
cuggaccccucuauuuauuucccuuccacagu

SEQ ID NO: 73200 - RNA, 32 nt, Homo Sapiens
cacuucuccugcuaccgggaccgcgggaugga

SEQ ID NO: 73201 - RNA, 32 nt, Homo Sapiens
cagaggccagcaccccacucuccugccuccag

SEQ ID NO: 73202 - RNA, 32 nt, Homo Sapiens
uggugggauagaugaggccuaugagccauaau

SEQ ID NO: 73203 - RNA, 32 nt, Homo Sapiens
uggcuaauccuccauuuuaacaaagaaaaaag

SEQ ID NO: 73204 - RNA, 32 nt, Homo Sapiens
gcagccucgcccagaagcugauguuugugaau

SEQ ID NO: 73205 - RNA, 32 nt, Homo Sapiens
ccgcggcggccucggcgccauggagcccccgu

SEQ ID NO: 73206 - RNA, 32 nt, Homo Sapiens
ccgcaugaaacacugcaccaggcagggcuuug

SEQ ID NO: 73207 - RNA, 32 nt, Homo Sapiens
aacagaagaugggaaagugugaccucacguuu

SEQ ID NO: 73208 - RNA, 32 nt, Homo Sapiens
aagcucccgcggcgccgcgauggaccucgagg

SEQ ID NO: 73209 - RNA, 32 nt, Homo Sapiens
uuuucauaaacucauauaaggcacauggcauu

SEQ ID NO: 73210 - RNA, 32 nt, Homo Sapiens
auauggagaaauuuaaacuauuguagucaaua

SEQ ID NO: 73211 - RNA, 32 nt, Homo Sapiens
ucaugcuugacaaugcuauguuuucucuuccc

SEQ ID NO: 73212 - RNA, 32 nt, Homo Sapiens
ugaguguggcuaggaagggggugcuggguggg

SEQ ID NO: 73213 - RNA, 32 nt, Homo Sapiens
gcggcacugcacccucacuagccaggguguug

SEQ ID NO: 73214 - RNA, 30 nt, Homo Sapiens
ugauguuucugcagaaguuuucccccuugg

SEQ ID NO: 73215 - RNA, 32 nt, Homo Sapiens
cauuuugcauauugcuauuuaacauuauugga

SEQ ID NO: 73216 - RNA, 32 nt, Homo Sapiens
augaaagguaacaaaauuauaaaaguagucag

SEQ ID NO: 73217 - RNA, 32 nt, Homo Sapiens
gagaauugcuugaaccugggagguggagguug

SEQ ID NO: 73218 - RNA, 32 nt, Homo Sapiens
cguaaaccccuccagccugggcgacagaacca

SEQ ID NO: 73219 - RNA, 32 nt, Homo Sapiens
gcccaggagggcggggucccgugguggaggcg

SEQ ID NO: 73220 - RNA, 32 nt, Homo Sapiens
gcucggcggaaccagccccggcugggcagcag

SEQ ID NO: 73221 - RNA, 32 nt, Homo Sapiens
gucucagcccagaggucaaggcuggcaccauc

SEQ ID NO: 73222 - RNA, 32 nt, Homo Sapiens
cgaccacugcagguaacagaggcgcugcgagg

SEQ ID NO: 73223 - RNA, 32 nt, Homo Sapiens
aauaccaauuuaauuuuuuaguauuuaccugu

SEQ ID NO: 73224 - RNA, 32 nt, Homo Sapiens
uaaaaauaaaaauuaaauaaauuaaaggugag

SEQ ID NO: 73225 - RNA, 32 nt, Homo Sapiens
acuuagcaguugcuggccauuauguuucagua

SEQ ID NO: 73226 - RNA, 31 nt, Homo Sapiens
gccgccaugcgccucuccuccuccccaccuc

SEQ ID NO: 73227 - RNA, 32 nt, Homo Sapiens
cuucuccgccgggaccucgagcgaaagacgcc

SEQ ID NO: 73228 - RNA, 32 nt, Homo Sapiens
ggcacuucacagagggucauucccucccaggg

SEQ ID NO: 73229 - RNA, 32 nt, Homo Sapiens
cugaugucuuauuggaacaaccacugagcuac

SEQ ID NO: 73230 - RNA, 32 nt, Homo Sapiens
auaacaaaauuaaguauauacuguguuuuauu

SEQ ID NO: 73231 - RNA, 32 nt, Homo Sapiens
uagguacaauuuccuuuaguuugcuaaacacc

SEQ ID NO: 73232 - RNA, 32 nt, Homo Sapiens
gggaccaggagaggugugccccugccaugcug

SEQ ID NO: 73233 - RNA, 32 nt, Homo Sapiens
uuauuuguccucaugugagaaagcagaucauc

SEQ ID NO: 73234 - RNA, 32 nt, Homo Sapiens
acgccucaggguggagcccccgccuggacuca

SEQ ID NO: 73235 - RNA, 32 nt, Homo Sapiens
uuuaaaauaaauuuaaaacauaaaaaaaaaaa

SEQ ID NO: 73236 - RNA, 32 nt, Homo Sapiens
uguuucauuuaacuauuuauuaacuuuauaag

SEQ ID NO: 73237 - RNA, 32 nt, Homo Sapiens
aaaaugcccacauuuuaacuuuuaaacuucug

SEQ ID NO: 73238 - RNA, 32 nt, Homo Sapiens
uuuguuauauauauuacagaugaaaucucacu

SEQ ID NO: 73239 - RNA, 32 nt, Homo Sapiens
caggggcggcuucuaggugcugccgccgccac

SEQ ID NO: 73240 - RNA, 28 nt, Homo Sapiens
aguggaggguguccaaagugcuuauuca

SEQ ID NO: 73241 - RNA, 32 nt, Homo Sapiens
cagucuggcuugggagaugcuuucagguugca

SEQ ID NO: 73242 - RNA, 32 nt, Homo Sapiens
uuaugggcuucucugagacaaguaaaugucag

SEQ ID NO: 73243 - RNA, 32 nt, Homo Sapiens
gcggagggccggagacgcugcagacccgcgac

SEQ ID NO: 73244 - RNA, 32 nt, Homo Sapiens
ggcgcugucaccuccacccagccuucuuucac

SEQ ID NO: 73245 - RNA, 32 nt, Homo Sapiens
gugaaucucugacauugauuugaaagaaguua

SEQ ID NO: 73246 - RNA, 32 nt, Homo Sapiens
uacacucugcugugaugguauugcgggauuca

SEQ ID NO: 73247 - RNA, 32 nt, Homo Sapiens
agucggggaguggaaggagauguggggugggg

SEQ ID NO: 73248 - RNA, 32 nt, Homo Sapiens
uauaauuaaacuucuuuucucuucuacauuga

SEQ ID NO: 73249 - RNA, 32 nt, Homo Sapiens
ucacauggugccuagggaugcagggcuggagg

SEQ ID NO: 73250 - RNA, 32 nt, Homo Sapiens
gggcagugcuggguuagaaaugucugucugga

SEQ ID NO: 73251 - RNA, 32 nt, Homo Sapiens
aagagacccaugaaacaaauccccaguucaau

SEQ ID NO: 73252 - RNA, 32 nt, Homo Sapiens
uggcucugaggguggagagcacacggcgcccg

SEQ ID NO: 73253 - RNA, 32 nt, Homo Sapiens
ugaugagagguagagcagcaugcaucgaggcc

SEQ ID NO: 73254 - RNA, 32 nt, Homo Sapiens
ccaaccccuggccugcugcugugcuucaguga

SEQ ID NO: 73255 - RNA, 32 nt, Homo Sapiens
acaaaucacuucaacaguauuaacuagaaaua

SEQ ID NO: 73256 - RNA, 32 nt, Homo Sapiens
acugaaauuuaaaaauauugagaauaacuaag

SEQ ID NO: 73257 - RNA, 32 nt, Homo Sapiens
uucuuuccuuauucuuuuuuauuuuguuuaaa

SEQ ID NO: 73258 - RNA, 32 nt, Homo Sapiens
ggagaaggaagcugccugguguggagugacuc

SEQ ID NO: 73259 - RNA, 32 nt, Homo Sapiens
agacucgcaggcacagauuuaucaccacugcc

SEQ ID NO: 73260 - RNA, 32 nt, Homo Sapiens
uugggcaaggacgccagugcgcccgcgcgcgu

SEQ ID NO: 73261 - RNA, 32 nt, Homo Sapiens
cccaaaccaauccuaaugucuuucuucaguga

SEQ ID NO: 73262 - RNA, 32 nt, Homo Sapiens
uaaugcaccgacaaugaguggcuguuuuccag

SEQ ID NO: 73263 - RNA, 32 nt, Homo Sapiens
uuucuugaugguaucauuugcagcacaaaacu

SEQ ID NO: 73264 - RNA, 32 nt, Homo Sapiens
agaucaucuaguucuccagccuugaagauggg

SEQ ID NO: 73265 - RNA, 32 nt, Homo Sapiens
auuaauuaaguacauagccauuuaaaaggaaa

SEQ ID NO: 73266 - RNA, 32 nt, Homo Sapiens
ccacuuuuaauguggacuuuuacucauggaaa

SEQ ID NO: 73267 - RNA, 32 nt, Homo Sapiens
gcgagcggcuccuggcucccugcucgcggggc

SEQ ID NO: 73268 - RNA, 32 nt, Homo Sapiens
gcauuuacuuuuuugaccacgagccaugaguu

SEQ ID NO: 73269 - RNA, 32 nt, Homo Sapiens
ucuugugugccagcuggcuguggcucgggagc

SEQ ID NO: 73270 - RNA, 32 nt, Homo Sapiens
ccagacagcaaccucuuagaugcugacucuau

SEQ ID NO: 73271 - RNA, 32 nt, Homo Sapiens
gcucugugaauauuauuuuguauaacaaagau

SEQ ID NO: 73272 - RNA, 32 nt, Homo Sapiens
cacacccuggaaggccccggcggggaacgggc

SEQ ID NO: 73273 - RNA, 32 nt, Homo Sapiens
cccgacugcuuaccaaauuaaaauguguccac

SEQ ID NO: 73274 - RNA, 32 nt, Homo Sapiens
cggcguuuucucccagccuccgccaugccggc

SEQ ID NO: 73275 - RNA, 32 nt, Homo Sapiens
ggacaagcacugggggacgugcccccagagcc

SEQ ID NO: 73276 - RNA, 32 nt, Homo Sapiens
aauaauuuucuuuugauuauucaugauguguc

SEQ ID NO: 73277 - RNA, 32 nt, Homo Sapiens
gcacugucaggagcgcagagaucagcccuacu

SEQ ID NO: 73278 - RNA, 32 nt, Homo Sapiens
uccugcgcaaccgcgacuucagcugggcagcc

SEQ ID NO: 73279 - RNA, 32 nt, Homo Sapiens
acuauagcuucauggcggcugaagagaugcau

SEQ ID NO: 73280 - RNA, 32 nt, Homo Sapiens
ggagacagggucuugugucacccaggcuggcg

SEQ ID NO: 73281 - RNA, 32 nt, Homo Sapiens
uuuaaaaaaaaaaaagaaaaucuuauguacua

SEQ ID NO: 73282 - RNA, 32 nt, Homo Sapiens
ggcauggaagcugugaggggacaggccugugc

SEQ ID NO: 73283 - RNA, 32 nt, Homo Sapiens
uuuuaguagcacuuucucuggaugacagaagg

SEQ ID NO: 73284 - RNA, 32 nt, Homo Sapiens
guuguuaauuauuauuauuauuucauaugcug

SEQ ID NO: 73285 - RNA, 32 nt, Homo Sapiens
ccuguaaucaaucccagcacuuugggaggcca

SEQ ID NO: 73286 - RNA, 31 nt, Homo Sapiens
ggggagaaguaaaaacaauguaauuuucugu

SEQ ID NO: 73287 - RNA, 32 nt, Homo Sapiens
gccuuacaugugugccgugaaaagguucaaag

SEQ ID NO: 73288 - RNA, 32 nt, Homo Sapiens
aggacugaggccccggccagcccuucuccucc

SEQ ID NO: 73289 - RNA, 32 nt, Homo Sapiens
aguggccgagagggaaaggagcauucgagguc

SEQ ID NO: 73290 - RNA, 32 nt, Homo Sapiens
agauuaagggaagaaggugggagggcauuagu

SEQ ID NO: 73291 - RNA, 32 nt, Homo Sapiens
auguauugcuucuuuuagaggaggaagcauac

SEQ ID NO: 73292 - RNA, 29 nt, Homo Sapiens
caugcuuuauaugagugucuucugggaag

SEQ ID NO: 73293 - RNA, 32 nt, Homo Sapiens
guagcagcagcgggcccggcuggggcgcgagc

SEQ ID NO: 73294 - RNA, 32 nt, Homo Sapiens
uaguuacuaaaaauugcugaucauuuuuguuu

SEQ ID NO: 73295 - RNA, 32 nt, Homo Sapiens
uaugaacugugaaaauggucuaauuuugcugg

SEQ ID NO: 73296 - RNA, 32 nt, Homo Sapiens
uuucccucucucgcuggcaaaaguaugaucua

SEQ ID NO: 73297 - RNA, 32 nt, Homo Sapiens
uguugaauacuuacucuagaauaacuacuuuu

SEQ ID NO: 73298 - RNA, 32 nt, Homo Sapiens
cuccagcucccuccccgccucuuuuuacacuc

SEQ ID NO: 73299 - RNA, 32 nt, Homo Sapiens
gacacaaaaauccucuucaaaacuacucagaa

SEQ ID NO: 73300 - RNA, 32 nt, Homo Sapiens
cucugggccugaagcaagagccagcccggcuc

SEQ ID NO: 73301 - RNA, 32 nt, Homo Sapiens
ugugcagaggguuaagugggccugcuugaagu

SEQ ID NO: 73302 - RNA, 32 nt, Homo Sapiens
agcuguccagcagccacggcccgggguuuuca

SEQ ID NO: 73303 - RNA, 32 nt, Homo Sapiens
aacaaagcagugcuuugucccauugcugugau

SEQ ID NO: 73304 - RNA, 32 nt, Homo Sapiens
ucagacuugaaucuucucggcccccaaaaaug

SEQ ID NO: 73305 - RNA, 32 nt, Homo Sapiens
ggggcuuuguccuggugcccccgccccugguc

SEQ ID NO: 73306 - RNA, 32 nt, Homo Sapiens
gugcgguggcucaugccuauaauccuagcacu

SEQ ID NO: 73307 - RNA, 32 nt, Homo Sapiens
gugugguggcuuaugccuauaauccuagcacu

SEQ ID NO: 73308 - RNA, 32 nt, Homo Sapiens
auuuuucauaguuucuguauucuuauaagauu

SEQ ID NO: 73309 - RNA, 32 nt, Homo Sapiens
cauccgagccccuguuucuccuccauucaugu

SEQ ID NO: 73310 - RNA, 32 nt, Homo Sapiens
guuaaacuguuccuguuuugaagugcuauuac

SEQ ID NO: 73311 - RNA, 27 nt, Homo Sapiens
ccauguauuuuucccaggaagaauggg

SEQ ID NO: 73312 - RNA, 32 nt, Homo Sapiens
uuugcuaaaaauucaaucuuugacccaagcug

SEQ ID NO: 73313 - RNA, 32 nt, Homo Sapiens
gaucaaaucaauaaagcaaauuuuaucuguuu

SEQ ID NO: 73314 - RNA, 32 nt, Homo Sapiens
guaccuucucaauaauuuauaccuacgugaua

SEQ ID NO: 73315 - RNA, 32 nt, Homo Sapiens
cccugccccccuccagagagugaggagggggc

SEQ ID NO: 73316 - RNA, 32 nt, Homo Sapiens
ugugccuuuugagagcucccauggccuaguga

SEQ ID NO: 73317 - RNA, 32 nt, Homo Sapiens
ggacaccugggguccugccgggccccucccca

SEQ ID NO: 73318 - RNA, 32 nt, Homo Sapiens
ggauaauuuaguacugcuuuuaucuaucaucu

SEQ ID NO: 73319 - RNA, 32 nt, Homo Sapiens
agcaagcuuccacugagcuuccacggagcacc

SEQ ID NO: 73320 - RNA, 28 nt, Homo Sapiens
uuuccaguggcuaugagauggucaaaau

SEQ ID NO: 73321 - RNA, 32 nt, Homo Sapiens
cgacccugcucgagagcccgcgcuagagucgg

SEQ ID NO: 73322 - RNA, 32 nt, Homo Sapiens
uggucacguguucccaugagccuagacguugc

SEQ ID NO: 73323 - RNA, 32 nt, Homo Sapiens
aagacaaggaccaggucuggccugaucccauu

SEQ ID NO: 73324 - RNA, 32 nt, Homo Sapiens
gcagaggugacauggugccaucaggaggcggc

SEQ ID NO: 73325 - RNA, 32 nt, Homo Sapiens
caggcgcccuggcccaaggaggaggcccuuca

SEQ ID NO: 73326 - RNA, 31 nt, Homo Sapiens
ggcuggugugcgugccugcccagcggcaucc

SEQ ID NO: 73327 - RNA, 32 nt, Homo Sapiens
acagcuauauuuaguggugccucgacacucac

SEQ ID NO: 73328 - RNA, 32 nt, Homo Sapiens
agcuagcauggcggccgccggggcugcggcua

SEQ ID NO: 73329 - RNA, 32 nt, Homo Sapiens
cauagcuuucaaaccuuuuuuauuuuaagaaa

SEQ ID NO: 73330 - RNA, 32 nt, Homo Sapiens
cuguaagaugacuguugcauuguugaauugua

SEQ ID NO: 73331 - RNA, 32 nt, Homo Sapiens
cugggcaaguuuuauugugagauuuucuaauu

SEQ ID NO: 73332 - RNA, 32 nt, Homo Sapiens
aagcuggaugccugggucucugggcacagcug

SEQ ID NO: 73333 - RNA, 29 nt, Homo Sapiens
aagaagggaaccucuaguuuaacaagaga

SEQ ID NO: 73334 - RNA, 32 nt, Homo Sapiens
agugacauuccucaaugaccucucccaaaccu

SEQ ID NO: 73335 - RNA, 32 nt, Homo Sapiens
ggaccgagugaugccccucuccccucuacuac

SEQ ID NO: 73336 - RNA, 32 nt, Homo Sapiens
gcuaaucuuguuuuccucuuaguauuccuuug

SEQ ID NO: 73337 - RNA, 32 nt, Homo Sapiens
cgcgcgccuuuucucucccgcgccagggaagg

SEQ ID NO: 73338 - RNA, 32 nt, Homo Sapiens
gcuuggcucuuaaauuuuacuggcagguguau

SEQ ID NO: 73339 - RNA, 32 nt, Homo Sapiens
ucgucguccuccccgaccgcguccugcagcag

SEQ ID NO: 73340 - RNA, 32 nt, Homo Sapiens
cauucuuugauuuuaaauuugaagcuguucag

SEQ ID NO: 73341 - RNA, 32 nt, Homo Sapiens
ucugccccuuugccacccaccgcugccgcgga

SEQ ID NO: 73342 - RNA, 32 nt, Homo Sapiens
gagauuguuguaauaaucagucauuuuauuaa

SEQ ID NO: 73343 - RNA, 32 nt, Homo Sapiens
cuucaucccgcaccaccuggccccacgcccuu

SEQ ID NO: 73344 - RNA, 32 nt, Homo Sapiens
uuggggcggcgguggcaggaagugcgggcagc

SEQ ID NO: 73345 - RNA, 32 nt, Homo Sapiens
ggguggggggagaggggagggauagcauuagg

SEQ ID NO: 73346 - RNA, 32 nt, Homo Sapiens
agauauggaauucaaagcucuaauggaccuuu

SEQ ID NO: 73347 - RNA, 32 nt, Homo Sapiens
agcauuccaaauagacuuugaauagcguucug

SEQ ID NO: 73348 - RNA, 32 nt, Homo Sapiens
caaagaagauaaauuagaagaguuucuuagau

SEQ ID NO: 73349 - RNA, 32 nt, Homo Sapiens
ccuaagccugaccgugaagcagcccucacgga

SEQ ID NO: 73350 - RNA, 32 nt, Homo Sapiens
cuuugcuucaggugcucgguaaugcuggagcu

SEQ ID NO: 73351 - RNA, 32 nt, Homo Sapiens
gaggcccagaggagcgacccccugcuuccacu

SEQ ID NO: 73352 - RNA, 32 nt, Homo Sapiens
augagacauagauaaagcauuuuuuagugaug

SEQ ID NO: 73353 - RNA, 31 nt, Homo Sapiens
gauccucugugcgccaccugaguuggaucca

SEQ ID NO: 73354 - RNA, 32 nt, Homo Sapiens
gggccucugugccaggccaucccgucuuugga

SEQ ID NO: 73355 - RNA, 32 nt, Homo Sapiens
aagagaauauauauuuaaaugggugaacugaa

SEQ ID NO: 73356 - RNA, 32 nt, Homo Sapiens
aagaaaauuaauacuggaaacuuuacaaaccu

SEQ ID NO: 73357 - RNA, 32 nt, Homo Sapiens
gggccccucccuccccugaggacaggugaggc

SEQ ID NO: 73358 - RNA, 32 nt, Homo Sapiens
ccuccccacuacuccuucuccuucuagauggu

SEQ ID NO: 73359 - RNA, 32 nt, Homo Sapiens
ccagcaaaaauauuuuuuaaaaauuagccggg

SEQ ID NO: 73360 - RNA, 32 nt, Homo Sapiens
ccccacacucccugcucagcuccucgugcugc

SEQ ID NO: 73361 - RNA, 32 nt, Homo Sapiens
ccuggccuaguuccuauacuuuucuuaauucu

SEQ ID NO: 73362 - RNA, 32 nt, Homo Sapiens
uggagauuaaaauauauguauuugagcugggg

SEQ ID NO: 73363 - RNA, 32 nt, Homo Sapiens
ugguuuuuaaauuuguauuauuuuuucuugua

SEQ ID NO: 73364 - RNA, 29 nt, Homo Sapiens
aaagagagucuauaauauuuucuaauccc

SEQ ID NO: 73365 - RNA, 32 nt, Homo Sapiens
aggggagcugccuacagguuggaccgggaggc

SEQ ID NO: 73366 - RNA, 32 nt, Homo Sapiens
cccuggcccuggaugccugcaaccucagaaga

SEQ ID NO: 73367 - RNA, 32 nt, Homo Sapiens
caagccuugcucugccgaagcuuacaauccag

SEQ ID NO: 73368 - RNA, 32 nt, Homo Sapiens
cacagauuaggguauaggcaucuagagaugca

SEQ ID NO: 73369 - RNA, 32 nt, Homo Sapiens
auccugugggccguugaauguggcugcucgcg

SEQ ID NO: 73370 - RNA, 32 nt, Homo Sapiens
ggcuuggcgucccgcgcgcacuucggcgaugg

SEQ ID NO: 73371 - RNA, 32 nt, Homo Sapiens
ucugggggccgcggcccuggggcgggcagcca

SEQ ID NO: 73372 - RNA, 32 nt, Homo Sapiens
uuucuuuccuucccaauucaucgcacuuuccc

SEQ ID NO: 73373 - RNA, 32 nt, Homo Sapiens
gacuuuuguaaaaucaaaucauccugucacaa

SEQ ID NO: 73374 - RNA, 32 nt, Homo Sapiens
uuuuauuuuauaaagcaugugcucuuaauagc

SEQ ID NO: 73375 - RNA, 32 nt, Homo Sapiens
gcccgaagcucugagggcuucccggcccccac

SEQ ID NO: 73376 - RNA, 32 nt, Homo Sapiens
uaguacuuuuucccuuuggcccugccccugcu

SEQ ID NO: 73377 - RNA, 32 nt, Homo Sapiens
ggaugaugccaggaugaugucugccucgcgcc

SEQ ID NO: 73378 - RNA, 32 nt, Homo Sapiens
ggcucgucuagaaccucugaccucaggugauc

SEQ ID NO: 73379 - RNA, 32 nt, Homo Sapiens
caggacuugcugcagagcugcugagaggauua

SEQ ID NO: 73380 - RNA, 32 nt, Homo Sapiens
ggcagcggcuacuucuggugcugcugcugggu

SEQ ID NO: 73381 - RNA, 32 nt, Homo Sapiens
uuuuuaaggucucuccucuuccuuccccaaca

SEQ ID NO: 73382 - RNA, 32 nt, Homo Sapiens
aagucuugcuaucugugacuaguuuuauuuuu

SEQ ID NO: 73383 - RNA, 32 nt, Homo Sapiens
cagagucccaccugggggcucucuccacccuu

SEQ ID NO: 73384 - RNA, 32 nt, Homo Sapiens
ugcaguuuucccagcccuucucgcugccaagg

SEQ ID NO: 73385 - RNA, 32 nt, Homo Sapiens
acacuggaaaauuuuccggccaauuuugcuac

SEQ ID NO: 73386 - RNA, 32 nt, Homo Sapiens
ucuggcuuaggacuguuucucucuaagacacc

SEQ ID NO: 73387 - RNA, 32 nt, Homo Sapiens
aaagagaaaucauaguuuuauauuuuaguuuc

SEQ ID NO: 73388 - RNA, 32 nt, Homo Sapiens
agaaggaugucccggguguguacaccaagguu

SEQ ID NO: 73389 - RNA, 32 nt, Homo Sapiens
uuuacacccacccccugggcagggaguuugca

SEQ ID NO: 73390 - RNA, 32 nt, Homo Sapiens
cccccgcugcucccaugcgcgcggguggguca

SEQ ID NO: 73391 - RNA, 32 nt, Homo Sapiens
uugggcacauucaaaucuauauccugggaccc

SEQ ID NO: 73392 - RNA, 32 nt, Homo Sapiens
gauuuuuaaugauaaagcugcagaugggcuaa

SEQ ID NO: 73393 - RNA, 32 nt, Homo Sapiens
ggcaaaacauacuagaauucacaggggagaca

SEQ ID NO: 73394 - RNA, 32 nt, Homo Sapiens
gcccccugccuugugaccucccuccaugcccc

SEQ ID NO: 73395 - RNA, 32 nt, Homo Sapiens
gcgaaauguggugauccgucccggggcgggga

SEQ ID NO: 73396 - RNA, 32 nt, Homo Sapiens
cacccgcggccggcgcucuccuccuccucgca

SEQ ID NO: 73397 - RNA, 32 nt, Homo Sapiens
ugagugugcguguaagagugugaaugcggcuc

SEQ ID NO: 73398 - RNA, 32 nt, Homo Sapiens
auguauucuucaaaacauuuggcacaugcugc

SEQ ID NO: 73399 - RNA, 32 nt, Homo Sapiens
gccacguaagggacuuuauagaugaacuagug

SEQ ID NO: 73400 - RNA, 32 nt, Homo Sapiens
ucagcagaaugggaaacuggacucagacaccu

SEQ ID NO: 73401 - RNA, 32 nt, Homo Sapiens
aacguuuaaaaacauguacugagaugaaucua

SEQ ID NO: 73402 - RNA, 32 nt, Homo Sapiens
cuuugcgccauccggggccaagagggggugga

SEQ ID NO: 73403 - RNA, 32 nt, Homo Sapiens
gggcguggagggcgugggagcgugggaggcgg

SEQ ID NO: 73404 - RNA, 32 nt, Homo Sapiens
gcucagaagggagaaucacacauggcuuccaa

SEQ ID NO: 73405 - RNA, 32 nt, Homo Sapiens
aguccacagcggggugucauguguucuguuau

SEQ ID NO: 73406 - RNA, 32 nt, Homo Sapiens
agcucuggaggguggccuggggccuguggaca

SEQ ID NO: 73407 - RNA, 32 nt, Homo Sapiens
cuugcggagcgcggcagugggcgccggcugcc

SEQ ID NO: 73408 - RNA, 32 nt, Homo Sapiens
gucucucuaugccucucuacagucucgucucu

SEQ ID NO: 73409 - RNA, 32 nt, Homo Sapiens
auguaaaaccucuggaagcagcaucaggacag

SEQ ID NO: 73410 - RNA, 32 nt, Homo Sapiens
gaguuguguacaaaaaucuugacuguccagau

SEQ ID NO: 73411 - RNA, 32 nt, Homo Sapiens
uaaaugcaccaaucagcucugugucuagcuaa

SEQ ID NO: 73412 - RNA, 32 nt, Homo Sapiens
gcagccucccaagucauucauuuuuaaguagu

SEQ ID NO: 73413 - RNA, 32 nt, Homo Sapiens
aauucuuuagagauuauaacaaauuuuucaaa

SEQ ID NO: 73414 - RNA, 31 nt, Homo Sapiens
cccugggcgucgagacaggaaggcagggcgc

SEQ ID NO: 73415 - RNA, 32 nt, Homo Sapiens
uuguuucuguuguucacuuggaguggauccag

SEQ ID NO: 73416 - RNA, 30 nt, Homo Sapiens
cacuuaagcuuaauuggggaaacugcuuug

SEQ ID NO: 73417 - RNA, 32 nt, Homo Sapiens
caaaauugaaucuguacauccacaaaaauaug

SEQ ID NO: 73418 - RNA, 32 nt, Homo Sapiens
gacauaagacaucagucaguacaugugaggug

SEQ ID NO: 73419 - RNA, 32 nt, Homo Sapiens
ggaccgggucugacaugccagugccuuccugg

SEQ ID NO: 73420 - RNA, 31 nt, Homo Sapiens
auggggagcuggagccugcccugcagccugg

SEQ ID NO: 73421 - RNA, 32 nt, Homo Sapiens
cugcacuguggaugaaguggcgacuggcuugu

SEQ ID NO: 73422 - RNA, 32 nt, Homo Sapiens
aggcuccggcggcggcgggggucacauacggg

SEQ ID NO: 73423 - RNA, 32 nt, Homo Sapiens
uucuccuugggagaucucuccucagcuggaau

SEQ ID NO: 73424 - RNA, 32 nt, Homo Sapiens
gaugccaaugccaagcucuccaagcuggaggc

SEQ ID NO: 73425 - RNA, 32 nt, Homo Sapiens
acccugcaggagcugcuggaccaagagcagcu

SEQ ID NO: 73426 - RNA, 32 nt, Homo Sapiens
ccgagcggcuccagcgcagagacucucacugc

SEQ ID NO: 73427 - RNA, 32 nt, Homo Sapiens
gagcaauguuuugggggcaggggguggaucuc

SEQ ID NO: 73428 - RNA, 32 nt, Homo Sapiens
ugauuaagacuuacauuuucugcacaggucug

SEQ ID NO: 73429 - RNA, 32 nt, Homo Sapiens
ccggguucaagcgauucuccuaccucagccuc

SEQ ID NO: 73430 - RNA, 32 nt, Homo Sapiens
cggcggcggcggcggcagcccgggcucuccau

SEQ ID NO: 73431 - RNA, 32 nt, Homo Sapiens
uucuuaaugacugcuagaagcugcaucuuauu

SEQ ID NO: 73432 - RNA, 32 nt, Homo Sapiens
cccuugcuugucagcauuucugcaaagcucac

SEQ ID NO: 73433 - RNA, 32 nt, Homo Sapiens
uuuuuuaaauauauuuuccaaucuugaaauaa

SEQ ID NO: 73434 - RNA, 32 nt, Homo Sapiens
cgacggccugacgucggcggagggaagccggc

SEQ ID NO: 73435 - RNA, 32 nt, Homo Sapiens
cauuuuuuucgaaucuuaauuuauuauuuuuu

SEQ ID NO: 73436 - RNA, 32 nt, Homo Sapiens
aaauugccggcgacgacuuuugucuauuuaug

SEQ ID NO: 73437 - RNA, 32 nt, Homo Sapiens
gugcccggccccagcccgagggagccagcugg

SEQ ID NO: 73438 - RNA, 32 nt, Homo Sapiens
agcagcagcaucaccagcaacaacaacaaaaa

SEQ ID NO: 73439 - RNA, 32 nt, Homo Sapiens
gcuuuuuuguaaaaucucuacucuuccugaga

SEQ ID NO: 73440 - RNA, 32 nt, Homo Sapiens
aagguacggcuugaaggaaacuucuggagggu

SEQ ID NO: 73441 - RNA, 32 nt, Homo Sapiens
guucacauugggucuuuaaaucuuuuagauau

SEQ ID NO: 73442 - RNA, 32 nt, Homo Sapiens
ccugugccucccugcucggccagcggccacgg

SEQ ID NO: 73443 - RNA, 31 nt, Homo Sapiens
ucuguucuguccucgucccaggcaagcccuu

SEQ ID NO: 73444 - RNA, 32 nt, Homo Sapiens
cgggccugggacugagcacgggccuguggcug

SEQ ID NO: 73445 - RNA, 32 nt, Homo Sapiens
cggggcuccccgcucgcuguccuuuuucugga

SEQ ID NO: 73446 - RNA, 32 nt, Homo Sapiens
uucuguuugcugucauguggaagaaaagagcc

SEQ ID NO: 73447 - RNA, 32 nt, Homo Sapiens
agacuauggaaauguggagagaauugaagaaa

SEQ ID NO: 73448 - RNA, 32 nt, Homo Sapiens
ccuccaguucccuccugagggcugugccagga

SEQ ID NO: 73449 - RNA, 32 nt, Homo Sapiens
gaaugauuauauuuuuaaaaaguuacaugggg

SEQ ID NO: 73450 - RNA, 32 nt, Homo Sapiens
ugucccaccuuggagcucuccuuguugaacgg

SEQ ID NO: 73451 - RNA, 32 nt, Homo Sapiens
auacucagaaugaaauuuuucuugguuuucuu

SEQ ID NO: 73452 - RNA, 32 nt, Homo Sapiens
cgcagcuggccagcugaguucuguuguuguuu

SEQ ID NO: 73453 - RNA, 32 nt, Homo Sapiens
acaaaacaaccuggaguauggucccugcagcc

SEQ ID NO: 73454 - RNA, 32 nt, Homo Sapiens
aacaacugggaugggugaguccacucuggcua

SEQ ID NO: 73455 - RNA, 31 nt, Homo Sapiens
ccaucccaagccaucccuggaagguuucauc

SEQ ID NO: 73456 - RNA, 32 nt, Homo Sapiens
uaacaaaaaugaauuuuguuugauagauuuau

SEQ ID NO: 73457 - RNA, 32 nt, Homo Sapiens
aacguugucauaacccaauggugcauucugua

SEQ ID NO: 73458 - RNA, 32 nt, Homo Sapiens
gagacagucuugcucugucacccaggcuggag

SEQ ID NO: 73459 - RNA, 32 nt, Homo Sapiens
agacuucaaugagaaguuuguuuauaagaauu

SEQ ID NO: 73460 - RNA, 32 nt, Homo Sapiens
cacagugccugccucguugugucugaaaaucu

SEQ ID NO: 73461 - RNA, 32 nt, Homo Sapiens
cagcugacaaaggaagcagauaauaagggccu

SEQ ID NO: 73462 - RNA, 32 nt, Homo Sapiens
gcgcugcgguacuccccccacccccuccccac

SEQ ID NO: 73463 - RNA, 32 nt, Homo Sapiens
cuagagggcuccugggagcgcucgcuucuccg

SEQ ID NO: 73464 - RNA, 32 nt, Homo Sapiens
cccucauuguucacuggcuccaucgcacuccu

SEQ ID NO: 73465 - RNA, 32 nt, Homo Sapiens
aggaccacugugagcuggaaaagggagaaagg

SEQ ID NO: 73466 - RNA, 32 nt, Homo Sapiens
cccaugcucagguuugacuauguccccagcuu

SEQ ID NO: 73467 - RNA, 32 nt, Homo Sapiens
cuugcaggggagccggcgacugagggcgaggc

SEQ ID NO: 73468 - RNA, 32 nt, Homo Sapiens
auguauguauguuacuaaguuaaacuuagaaa

SEQ ID NO: 73469 - RNA, 32 nt, Homo Sapiens
aagcaaccccccagccucuccccaacccugcc

SEQ ID NO: 73470 - RNA, 32 nt, Homo Sapiens
gcugggaccagacuuuguucucuuccucaccu

SEQ ID NO: 73471 - RNA, 32 nt, Homo Sapiens
agauggggcugcggccggugguggugaggggg

SEQ ID NO: 73472 - RNA, 32 nt, Homo Sapiens
uccauucugcauccccuccccauccaaccuaa

SEQ ID NO: 73473 - RNA, 32 nt, Homo Sapiens
augaggcugggucuuuccucauuucugcuucu

SEQ ID NO: 73474 - RNA, 32 nt, Homo Sapiens
uagacaucccugccuguagcucuucuuagugc

SEQ ID NO: 73475 - RNA, 32 nt, Homo Sapiens
gugggucccuugggaggccagcagccagacua

SEQ ID NO: 73476 - RNA, 32 nt, Homo Sapiens
agggucgucuucugcugcugacccccaucaaa

SEQ ID NO: 73477 - RNA, 32 nt, Homo Sapiens
ucugguuuagugaguguaauagagucccuggc

SEQ ID NO: 73478 - RNA, 32 nt, Homo Sapiens
cggcuuucaguggagggcaggggucuggcaca

SEQ ID NO: 73479 - RNA, 32 nt, Homo Sapiens
uaaagaaagcccuuaagaagguaagaaaccua

SEQ ID NO: 73480 - RNA, 32 nt, Homo Sapiens
gagcucugggggcagagaccaggccgccgucc

SEQ ID NO: 73481 - RNA, 32 nt, Homo Sapiens
uauuuuucugaggcaauuaaauuuauaccacg

SEQ ID NO: 73482 - RNA, 32 nt, Homo Sapiens
gcucuccuuuuuucuuuuuuuugucgugcaua

SEQ ID NO: 73483 - RNA, 32 nt, Homo Sapiens
aucacuugcagggcuguacucuucaaaucuuu

SEQ ID NO: 73484 - RNA, 32 nt, Homo Sapiens
cgggccuuuauuucucguucucucuuccuugu

SEQ ID NO: 73485 - RNA, 32 nt, Homo Sapiens
ggggugguggggggcggggagaugaacgcugc

SEQ ID NO: 73486 - RNA, 32 nt, Homo Sapiens
ggaccccagccagcugugugacagcugguugu

SEQ ID NO: 73487 - RNA, 32 nt, Homo Sapiens
cuacuuuucuaaaauagacaugacuucagcag

SEQ ID NO: 73488 - RNA, 32 nt, Homo Sapiens
cucaagcaaaaauugauuuugaaacgagagcu

SEQ ID NO: 73489 - RNA, 32 nt, Homo Sapiens
auaaacauuaucuuuuguuuucuuguuuuguu

SEQ ID NO: 73490 - RNA, 32 nt, Homo Sapiens
acucacacucccuugucugaugccccaaagcc

SEQ ID NO: 73491 - RNA, 32 nt, Homo Sapiens
cgcaaugcugccgcgagcugccccagcagucc

SEQ ID NO: 73492 - RNA, 32 nt, Homo Sapiens
uugguuuauuuuuuguuuguuuacaaaugcuu

SEQ ID NO: 73493 - RNA, 30 nt, Homo Sapiens
cuccugcccugcuaaagacagugcggaugc

SEQ ID NO: 73494 - RNA, 32 nt, Homo Sapiens
aguaaacaagauagccauuagaaaaacaggau

SEQ ID NO: 73495 - RNA, 32 nt, Homo Sapiens
uuccaaauuaauaagaaaauuuuuguagauca

SEQ ID NO: 73496 - RNA, 32 nt, Homo Sapiens
uacaguacucuuuuauuuuucuuuuaauagca

SEQ ID NO: 73497 - RNA, 32 nt, Homo Sapiens
uuuuaagauugugacaccaggcuuaccuuuua

SEQ ID NO: 73498 - RNA, 32 nt, Homo Sapiens
cugcugcuggacgcgcggccaagaccccggcc

SEQ ID NO: 73499 - RNA, 32 nt, Homo Sapiens
gcucugcugggagacccggcgcuggcggcugc

SEQ ID NO: 73500 - RNA, 32 nt, Homo Sapiens
auuuucuguuaauaaauugccuucauguaaaa

SEQ ID NO: 73501 - RNA, 32 nt, Homo Sapiens
ccccauucuccucuccucugaccccucagcuc

SEQ ID NO: 73502 - RNA, 32 nt, Homo Sapiens
uacccugcucccuggggugcugcugucuugga

SEQ ID NO: 73503 - RNA, 32 nt, Homo Sapiens
gguuaauggaaauaauuaaauaaaauagucca

SEQ ID NO: 73504 - RNA, 32 nt, Homo Sapiens
cacauggcccccaaaaagccgggacuggcagc

SEQ ID NO: 73505 - RNA, 32 nt, Homo Sapiens
uaaucaacauucaaagcagggauagcuaaaca

SEQ ID NO: 73506 - RNA, 32 nt, Homo Sapiens
ccuuccacagcuugcuuggaaauauccucagc

SEQ ID NO: 73507 - RNA, 32 nt, Homo Sapiens
cauuucgagugucaaguguauuuuuaacuguc

SEQ ID NO: 73508 - RNA, 32 nt, Homo Sapiens
cgccucgcagccugccacccgcgcucagcugc

SEQ ID NO: 73509 - RNA, 32 nt, Homo Sapiens
agucuucucaugcacgggaacacacacacccu

SEQ ID NO: 73510 - RNA, 32 nt, Homo Sapiens
ggcggaggugcgcgcggagccaugguuaucau

SEQ ID NO: 73511 - RNA, 32 nt, Homo Sapiens
ucaagcccaagagcucccuuggcccuguuccc

SEQ ID NO: 73512 - RNA, 32 nt, Homo Sapiens
uucacaguacgcgguuuguccgaacgucacgg

SEQ ID NO: 73513 - RNA, 32 nt, Homo Sapiens
gcuccucugccuguccucucccaacucaaggu

SEQ ID NO: 73514 - RNA, 32 nt, Homo Sapiens
caaucuugaguuucuuuuucuguccacaagua

SEQ ID NO: 73515 - RNA, 32 nt, Homo Sapiens
uggugcuagggucagcuagacaggucggcagg

SEQ ID NO: 73516 - RNA, 32 nt, Homo Sapiens
ugguaugucuuacugaaagaaagaaacaugcu

SEQ ID NO: 73517 - RNA, 27 nt, Homo Sapiens
gccaugucuuucuucaguguuauggcu

SEQ ID NO: 73518 - RNA, 32 nt, Homo Sapiens
uuccuuaauaaaauacuauuauaaaauaagcu

SEQ ID NO: 73519 - RNA, 32 nt, Homo Sapiens
ugggcgggggucuggggagcgcagcagccaug

SEQ ID NO: 73520 - RNA, 32 nt, Homo Sapiens
agcguuguacauucuguggguuuggacaaaug

SEQ ID NO: 73521 - RNA, 32 nt, Homo Sapiens
cugccuugucuucgcggaagcauuccugaugg

SEQ ID NO: 73522 - RNA, 32 nt, Homo Sapiens
gacaacuugguauguaggaugugcuaccucua

SEQ ID NO: 73523 - RNA, 32 nt, Homo Sapiens
ccgggccccgccccggccuccugcauuugccc

SEQ ID NO: 73524 - RNA, 32 nt, Homo Sapiens
auauagucuaaugcugacaacuucuauuuuaa

SEQ ID NO: 73525 - RNA, 32 nt, Homo Sapiens
ucaaggcguggcagcucaugccgguaaucuca

SEQ ID NO: 73526 - RNA, 30 nt, Homo Sapiens
caccagccgccagcugcccaucuucugcua

SEQ ID NO: 73527 - RNA, 32 nt, Homo Sapiens
ugauaacuuuaaauaaaacucaaauuuuuacu

SEQ ID NO: 73528 - RNA, 32 nt, Homo Sapiens
aaguacgagaaauguuucuguugaauguaaug

SEQ ID NO: 73529 - RNA, 32 nt, Homo Sapiens
gccgugacuagccuuucaucaguguccugccu

SEQ ID NO: 73530 - RNA, 32 nt, Homo Sapiens
ggagcgcccgccccgcgccucgccucuccucc

SEQ ID NO: 73531 - RNA, 32 nt, Homo Sapiens
ucguggcagcggcgcagcgcuccagccauguc

SEQ ID NO: 73532 - RNA, 32 nt, Homo Sapiens
cggacccucccucuccuggcuucccgucuggu

SEQ ID NO: 73533 - RNA, 32 nt, Homo Sapiens
uacuuuaauuuuuuuucuuaauaguguaaaaa

SEQ ID NO: 73534 - RNA, 32 nt, Homo Sapiens
gacauuuaacacuuccucccccgcuuccuccu

SEQ ID NO: 73535 - RNA, 32 nt, Homo Sapiens
acaauauauguauauauaguauauacacuaua

SEQ ID NO: 73536 - RNA, 32 nt, Homo Sapiens
uguuacaccacaugucuuacauccuugggaau

SEQ ID NO: 73537 - RNA, 32 nt, Homo Sapiens
gauggacaucucucuuguuuucacuuggugag

SEQ ID NO: 73538 - RNA, 32 nt, Homo Sapiens
ugcuccuaggauuuuacauguugccugcaaag

SEQ ID NO: 73539 - RNA, 32 nt, Homo Sapiens
aaccuggggggaggaggggcuggcacugagau

SEQ ID NO: 73540 - RNA, 32 nt, Homo Sapiens
uuuuacuagucuccuuuuuuuuuuuaccuuua

SEQ ID NO: 73541 - RNA, 32 nt, Homo Sapiens
cggccucuuguuacccggggcccgcuugccuc

SEQ ID NO: 73542 - RNA, 32 nt, Homo Sapiens
cuuuccccugucacuauuugucuuucuaaucu

SEQ ID NO: 73543 - RNA, 32 nt, Homo Sapiens
cuuuugccaaacuugucaaacucaggggaacu

SEQ ID NO: 73544 - RNA, 27 nt, Homo Sapiens
aaccaaucaugaaucugguauggacca

SEQ ID NO: 73545 - RNA, 32 nt, Homo Sapiens
aaaguaccaugagaaauaucagaguaaaacuu

SEQ ID NO: 73546 - RNA, 32 nt, Homo Sapiens
cuagaacaaauccuuuaaauauuuucauucaa

SEQ ID NO: 73547 - RNA, 32 nt, Homo Sapiens
ugucuuucccccuguccucgacagaagagugg

SEQ ID NO: 73548 - RNA, 32 nt, Homo Sapiens
gauggucacuuccucucuuaaaacagaaccag

SEQ ID NO: 73549 - RNA, 32 nt, Homo Sapiens
uagaaauauauucaagauauguuuauucuauu

SEQ ID NO: 73550 - RNA, 30 nt, Homo Sapiens
ugugaaccacuugacccuaguguugcaucu

SEQ ID NO: 73551 - RNA, 32 nt, Homo Sapiens
cucccuguccaggccccgcaggaggcagaugc

SEQ ID NO: 73552 - RNA, 32 nt, Homo Sapiens
caagugccuuuaaauagagcugcacaaacaga

SEQ ID NO: 73553 - RNA, 32 nt, Homo Sapiens
aaauuuaguuuugcuuauaugcacuuuuuaaa

SEQ ID NO: 73554 - RNA, 32 nt, Homo Sapiens
ucuaaacauauaucgaaagauaucugcuaaac

SEQ ID NO: 73555 - RNA, 32 nt, Homo Sapiens
auuuccucauucuccauguuauugucucagaa

SEQ ID NO: 73556 - RNA, 32 nt, Homo Sapiens
uuaaugacaaugaagugacacuuugacauuuc

SEQ ID NO: 73557 - RNA, 32 nt, Homo Sapiens
gcaucauguauauauuuaugcuuauaaguuug

SEQ ID NO: 73558 - RNA, 32 nt, Homo Sapiens
uaauacugaaacacaaaacugcuuuugcucuc

SEQ ID NO: 73559 - RNA, 32 nt, Homo Sapiens
uuccaagacaccuucccuucuuccucagccag

SEQ ID NO: 73560 - RNA, 32 nt, Homo Sapiens
cagcaugguggucacuguugcugcugguagag

SEQ ID NO: 73561 - RNA, 32 nt, Homo Sapiens
auugauggcagagcuguugcccacaagcgccu

SEQ ID NO: 73562 - RNA, 32 nt, Homo Sapiens
ccagggugguuuucaggaguccgagguagccu

SEQ ID NO: 73563 - RNA, 32 nt, Homo Sapiens
ggugcucggucggcgggugcugccgcuuuaag

SEQ ID NO: 73564 - RNA, 32 nt, Homo Sapiens
uuccuuuguauauaaaugaaaaauaccauuca

SEQ ID NO: 73565 - RNA, 32 nt, Homo Sapiens
gcuuguaaauggcuucuugaacuuuuuacaau

SEQ ID NO: 73566 - RNA, 32 nt, Homo Sapiens
uuuguuagcuacugccuguaggcauuuucagu

SEQ ID NO: 73567 - RNA, 32 nt, Homo Sapiens
cugucacugccacugcugcugcugcugcuggg

SEQ ID NO: 73568 - RNA, 32 nt, Homo Sapiens
gacccagaggggccucuggcgcucacucaguc

SEQ ID NO: 73569 - RNA, 32 nt, Homo Sapiens
ugucauccgagagagagcacaaacugcaggcc

SEQ ID NO: 73570 - RNA, 32 nt, Homo Sapiens
ugcuuguuuuaaaaguauguuuaauaaaauga

SEQ ID NO: 73571 - RNA, 32 nt, Homo Sapiens
gugagagugaaggauuugucccugcccuguag

SEQ ID NO: 73572 - RNA, 32 nt, Homo Sapiens
cuccggccgcggugcucauuuaagguggcgcg

SEQ ID NO: 73573 - RNA, 32 nt, Homo Sapiens
aaacaaauuugagaaaugauauguucaaauga

SEQ ID NO: 73574 - RNA, 32 nt, Homo Sapiens
agggcuggggggaaaaucaucuaugugaauga

SEQ ID NO: 73575 - RNA, 32 nt, Homo Sapiens
uuauuuaugcagugaccuggucaccuggggug

SEQ ID NO: 73576 - RNA, 32 nt, Homo Sapiens
uuaaauauuuaguugauagacugcuacaggua

SEQ ID NO: 73577 - RNA, 32 nt, Homo Sapiens
ucucagaguccuccucgccccuuucuucaccc

SEQ ID NO: 73578 - RNA, 32 nt, Homo Sapiens
auucagcaggcccuucccauucugccccagag

SEQ ID NO: 73579 - RNA, 32 nt, Homo Sapiens
ggacagacuggauuuuucauauuucuuauuaa

SEQ ID NO: 73580 - RNA, 32 nt, Homo Sapiens
cagccagagagaaaugugaucaaugaaggaga

SEQ ID NO: 73581 - RNA, 32 nt, Homo Sapiens
uaaagucccugccugcaugcauucuggcggaa

SEQ ID NO: 73582 - RNA, 32 nt, Homo Sapiens
uuccuccuacaccagcacuuccccucacccca

SEQ ID NO: 73583 - RNA, 32 nt, Homo Sapiens
cuuggcgcuauggaggagcccggggcuacccc

SEQ ID NO: 73584 - RNA, 32 nt, Homo Sapiens
ucacuuuuuuaguuuguguucuuuuaauaaac

SEQ ID NO: 73585 - RNA, 32 nt, Homo Sapiens
gaggcuggguuggagcagcccuccugugccug

SEQ ID NO: 73586 - RNA, 32 nt, Homo Sapiens
ccaggacuuaugggugggaggggagcauuuuu

SEQ ID NO: 73587 - RNA, 32 nt, Homo Sapiens
gcuccgcuucagcaccgcgggcguggacagcu

SEQ ID NO: 73588 - RNA, 32 nt, Homo Sapiens
cugcugacacggaucggccgcggccgccaccg

SEQ ID NO: 73589 - RNA, 32 nt, Homo Sapiens
cguagccacgucugcuccaagguggcuugaau

SEQ ID NO: 73590 - RNA, 32 nt, Homo Sapiens
guuccaaagugaauuucagccuugcuucacau

SEQ ID NO: 73591 - RNA, 32 nt, Homo Sapiens
cgagcuccuuuuuccccgccccggcccgcccu

SEQ ID NO: 73592 - RNA, 32 nt, Homo Sapiens
gauacgugccugaggacguuguguguauuucu

SEQ ID NO: 73593 - RNA, 31 nt, Homo Sapiens
gaacaaauuaccuauaacggauuugauaaaa

SEQ ID NO: 73594 - RNA, 32 nt, Homo Sapiens
aucccuugugaggcugcccucauggaguuccc

SEQ ID NO: 73595 - RNA, 32 nt, Homo Sapiens
uucauauuuuauauuucuacugauuuuguuuc

SEQ ID NO: 73596 - RNA, 32 nt, Homo Sapiens
guugggcaguuuuucugcccaguggcucugau

SEQ ID NO: 73597 - RNA, 32 nt, Homo Sapiens
ggcccucgcuccugggguguccugccgaaggg

SEQ ID NO: 73598 - RNA, 32 nt, Homo Sapiens
uccccauuuccucuccuuccccaccaccagua

SEQ ID NO: 73599 - RNA, 32 nt, Homo Sapiens
gggaaaaucaugauaacccagcuccuucuggu

SEQ ID NO: 73600 - RNA, 32 nt, Homo Sapiens
ccccagaguccucggcgcccaguccguccccc

SEQ ID NO: 73601 - RNA, 32 nt, Homo Sapiens
uuggcugaguggcuuugugugaccguggcccc

SEQ ID NO: 73602 - RNA, 32 nt, Homo Sapiens
aacucccccaccgacuucuccuccccuacccu

SEQ ID NO: 73603 - RNA, 32 nt, Homo Sapiens
gaccucuuuuuggggaggaaaggccgaaucgc

SEQ ID NO: 73604 - RNA, 32 nt, Homo Sapiens
uuaccuuuuuaaaagcugugggucagucuugc

SEQ ID NO: 73605 - RNA, 32 nt, Homo Sapiens
acauucuugucaacucaauaccauagcacuuu

SEQ ID NO: 73606 - RNA, 32 nt, Homo Sapiens
acuuccacaccugaggcaccugagagaggaac

SEQ ID NO: 73607 - RNA, 32 nt, Homo Sapiens
agcagugaaccaggggcucugcaggucacuug

SEQ ID NO: 73608 - RNA, 32 nt, Homo Sapiens
guccaaggcugagcggugacuguccccacaga

SEQ ID NO: 73609 - RNA, 32 nt, Homo Sapiens
aaagacugaaguaugaaagugcuuuugucacc

SEQ ID NO: 73610 - RNA, 32 nt, Homo Sapiens
ucuuguaaaaggugucuguguauuuuuaaaau

SEQ ID NO: 73611 - RNA, 32 nt, Homo Sapiens
ugagccaagauugagccauugcucuccagccu

SEQ ID NO: 73612 - RNA, 32 nt, Homo Sapiens
gccugacuuucuguugaauugggaaagagccu

SEQ ID NO: 73613 - RNA, 32 nt, Homo Sapiens
gcugggguggaagaggggagggggacacuggc

SEQ ID NO: 73614 - RNA, 32 nt, Homo Sapiens
acacagaggaagcucaggcacagaggacgagg

SEQ ID NO: 73615 - RNA, 32 nt, Homo Sapiens
aaagcugaaaaguggaaucggagcuguuguau

SEQ ID NO: 73616 - RNA, 32 nt, Homo Sapiens
uuuuaggccaaucacauuuacaugaccguaau

SEQ ID NO: 73617 - RNA, 32 nt, Homo Sapiens
uaaauauguaugccugucauuuuuguuuccuu

SEQ ID NO: 73618 - RNA, 32 nt, Homo Sapiens
ggccuuguggaggauggucggugguggugaug

SEQ ID NO: 73619 - RNA, 32 nt, Homo Sapiens
aggagcugaggucagaggggggcugugaacua

SEQ ID NO: 73620 - RNA, 32 nt, Homo Sapiens
cucguucuguaaacccccugcuaggagagugu

SEQ ID NO: 73621 - RNA, 32 nt, Homo Sapiens
uuuguuaauugccucaggauauuucuuuuaaa

SEQ ID NO: 73622 - RNA, 32 nt, Homo Sapiens
gucuguguuucuuuucgccauugccuagcuug

SEQ ID NO: 73623 - RNA, 31 nt, Homo Sapiens
ccagcaagaaagaaaagauuguuaugcaaga

SEQ ID NO: 73624 - RNA, 32 nt, Homo Sapiens
uucaauagcaacagaaauauaaauuauauucc

SEQ ID NO: 73625 - RNA, 32 nt, Homo Sapiens
auaaccauacacaacacuaaaggacgaaccug

SEQ ID NO: 73626 - RNA, 32 nt, Homo Sapiens
gugaagagcuggauugaugcaguacaccuaag

SEQ ID NO: 73627 - RNA, 32 nt, Homo Sapiens
ccugcaaaggaccccugugucuccugcccgac

SEQ ID NO: 73628 - RNA, 32 nt, Homo Sapiens
acgaugcgcugacuucagaaguaccugccauc

SEQ ID NO: 73629 - RNA, 32 nt, Homo Sapiens
ggcacagcagugccccccugcagccuuccccu

SEQ ID NO: 73630 - RNA, 32 nt, Homo Sapiens
cagcgguugaggagggguacagggcucucaag

SEQ ID NO: 73631 - RNA, 32 nt, Homo Sapiens
guguccuuauucuaauccuccuccccuggaau

SEQ ID NO: 73632 - RNA, 32 nt, Homo Sapiens
ccuuuuggccccaguuuuccucuggggcucuu

SEQ ID NO: 73633 - RNA, 32 nt, Homo Sapiens
aaguggugagagugaaggcccgaggaaugcuu

SEQ ID NO: 73634 - RNA, 32 nt, Homo Sapiens
ugguuccugccagcaaauggaguggcccuggu

SEQ ID NO: 73635 - RNA, 32 nt, Homo Sapiens
cuucaggcugucagcaaagugcucagguuuua

SEQ ID NO: 73636 - RNA, 32 nt, Homo Sapiens
agaugucagauuuuuguuuucuuucuuucagc

SEQ ID NO: 73637 - RNA, 32 nt, Homo Sapiens
agcuucucucuggcuuuuuuuguuuuguuuuc

SEQ ID NO: 73638 - RNA, 32 nt, Homo Sapiens
aaaagcaguuugauguaagauauuuuaaauau

SEQ ID NO: 73639 - RNA, 32 nt, Homo Sapiens
auuugaaagcaaaagaaaucuaauuuuguuuu

SEQ ID NO: 73640 - RNA, 32 nt, Homo Sapiens
gacuagcauccacauagagcacuugaaccucc

SEQ ID NO: 73641 - RNA, 32 nt, Homo Sapiens
auuuucuuggaaagacuauuuuguuggcaaga

SEQ ID NO: 73642 - RNA, 32 nt, Homo Sapiens
aguuugauguuaaccacaagugccagacugau

SEQ ID NO: 73643 - RNA, 32 nt, Homo Sapiens
ugugaaucuucccgucugaagaacgcccagcc

SEQ ID NO: 73644 - RNA, 32 nt, Homo Sapiens
gugaggcauaaugaaaguuuauuuaaugauuc

SEQ ID NO: 73645 - RNA, 32 nt, Homo Sapiens
gugacaguguguuccuagagaugguauugucu

SEQ ID NO: 73646 - RNA, 32 nt, Homo Sapiens
acauuuuuuuuuucuucagaaguaacgcuuuc

SEQ ID NO: 73647 - RNA, 32 nt, Homo Sapiens
auucuuacagugcugaugucaagacuguuacu

SEQ ID NO: 73648 - RNA, 32 nt, Homo Sapiens
gaguuuuuaauagaagagaaauccauuuccuc

SEQ ID NO: 73649 - RNA, 32 nt, Homo Sapiens
uuuauaacacugggcuccgucaugaucuuaug

SEQ ID NO: 73650 - RNA, 32 nt, Homo Sapiens
caggccagaguucaaggcucuggggcuggccu

SEQ ID NO: 73651 - RNA, 32 nt, Homo Sapiens
ucucuagucggccaccccugaagugcugaggu

SEQ ID NO: 73652 - RNA, 32 nt, Homo Sapiens
gugcccccauucuacuucccacccuccugccc

SEQ ID NO: 73653 - RNA, 32 nt, Homo Sapiens
gcuuuauuacagagaaaaauagucuccuguuu

SEQ ID NO: 73654 - RNA, 32 nt, Homo Sapiens
ccucgacccccuggggccccagucuggcucag

SEQ ID NO: 73655 - RNA, 32 nt, Homo Sapiens
uggaaucaaucuuuaacaaccucugagccuug

SEQ ID NO: 73656 - RNA, 32 nt, Homo Sapiens
guacaaaacauuugagaaaauauuuuaggaca

SEQ ID NO: 73657 - RNA, 32 nt, Homo Sapiens
ugggacacauucaaagcaguguguagacggaa

SEQ ID NO: 73658 - RNA, 32 nt, Homo Sapiens
uuagauuuucuuuaauaaaaugccauuugugc

SEQ ID NO: 73659 - RNA, 32 nt, Homo Sapiens
uggccuuuguagcugcaacagcagccaccugc

SEQ ID NO: 73660 - RNA, 32 nt, Homo Sapiens
cccaaaugucucucacuuacacagcaauccuc

SEQ ID NO: 73661 - RNA, 32 nt, Homo Sapiens
acucaagccccagccucuuuccacacucccug

SEQ ID NO: 73662 - RNA, 32 nt, Homo Sapiens
ggucuucuaucuguuuucuuuuggauagaagc

SEQ ID NO: 73663 - RNA, 32 nt, Homo Sapiens
ucuccaggggagaagaguucuucacgccucau

SEQ ID NO: 73664 - RNA, 32 nt, Homo Sapiens
cagccugcccgccugcucgccggcgcccggag

SEQ ID NO: 73665 - RNA, 32 nt, Homo Sapiens
cuggggccuggggauuuuagggaccagcgguu

SEQ ID NO: 73666 - RNA, 32 nt, Homo Sapiens
agcgaaguugcaugcauaaaauuaaccaucac

SEQ ID NO: 73667 - RNA, 32 nt, Homo Sapiens
gauuuagugaauucuguguuucaugauacuuc

SEQ ID NO: 73668 - RNA, 32 nt, Homo Sapiens
cuugccugcaaaccuuuacuucugaaaugacu

SEQ ID NO: 73669 - RNA, 32 nt, Homo Sapiens
uggcugacaaaggacucgcgcaacgcagaagg

SEQ ID NO: 73670 - RNA, 32 nt, Homo Sapiens
aaaguuggguugaauuuugaaugucuccacaa

SEQ ID NO: 73671 - RNA, 32 nt, Homo Sapiens
uucucaucuauuuauuucuuuauacauccaga

SEQ ID NO: 73672 - RNA, 32 nt, Homo Sapiens
uggcugugcgugcugacaguuuugcaacaggc

SEQ ID NO: 73673 - RNA, 31 nt, Homo Sapiens
gugcagugaccauuucucagagcaggacuug

SEQ ID NO: 73674 - RNA, 32 nt, Homo Sapiens
uaggagagugagucccuggguucuaaucuugg

SEQ ID NO: 73675 - RNA, 32 nt, Homo Sapiens
uagaagggaugaauucuaauuuuuuggcaagc

SEQ ID NO: 73676 - RNA, 32 nt, Homo Sapiens
aucuucuuaggacaucuuuuuuaaaaagcugu

SEQ ID NO: 73677 - RNA, 32 nt, Homo Sapiens
acugugugaacauagccaaaaguaugugccgu

SEQ ID NO: 73678 - RNA, 30 nt, Homo Sapiens
gcccagcgcgcgcuacuucucggacgagca

SEQ ID NO: 73679 - RNA, 32 nt, Homo Sapiens
ucugugcgggcaucgugguaauggugcuguuc

SEQ ID NO: 73680 - RNA, 32 nt, Homo Sapiens
ucuuaaaucaagauacuggugauucaaggaau

SEQ ID NO: 73681 - RNA, 32 nt, Homo Sapiens
acaaaagagagaaaauacaaaaaugaguuuug

SEQ ID NO: 73682 - RNA, 32 nt, Homo Sapiens
uuagggcccccggccucgggagaggugccgcc

SEQ ID NO: 73683 - RNA, 32 nt, Homo Sapiens
ucaaaggcuagcugcgcauagcucuugacacu

SEQ ID NO: 73684 - RNA, 32 nt, Homo Sapiens
aacucucuuuuggaaaacuagcuuauuagaaa

SEQ ID NO: 73685 - RNA, 32 nt, Homo Sapiens
acugccagcucccgcuuucuguuucacccgag

SEQ ID NO: 73686 - RNA, 32 nt, Homo Sapiens
acaggcuggggaggagaaaacaaacacaucaa

SEQ ID NO: 73687 - RNA, 32 nt, Homo Sapiens
cccaggcccaggccuguguucccggcccuugc

SEQ ID NO: 73688 - RNA, 32 nt, Homo Sapiens
aaggaccagcuuuggggccuccaccugccauc

SEQ ID NO: 73689 - RNA, 32 nt, Homo Sapiens
guggacaucucuucuuuuccugucccucuaga

SEQ ID NO: 73690 - RNA, 32 nt, Homo Sapiens
uucccagagcucccuuguccccggcccuuuac

SEQ ID NO: 73691 - RNA, 32 nt, Homo Sapiens
agcaccccagcuugcuggcugcccucuuugcc

SEQ ID NO: 73692 - RNA, 32 nt, Homo Sapiens
uauuauguaacuuauuuuuuuaauguggacag

SEQ ID NO: 73693 - RNA, 32 nt, Homo Sapiens
ggugauauuaaacauuuuuccccaaaaaaaaa

SEQ ID NO: 73694 - RNA, 32 nt, Homo Sapiens
gcuuccagcuggagauggcagccguuauuugc

SEQ ID NO: 73695 - RNA, 32 nt, Homo Sapiens
uaggcaggccccagagcucccugccucaaagu

SEQ ID NO: 73696 - RNA, 32 nt, Homo Sapiens
agaauaagcaaccuaaacaguaucacacagcu

SEQ ID NO: 73697 - RNA, 32 nt, Homo Sapiens
aggggcuccuguccuuccuugaaaugcuggac

SEQ ID NO: 73698 - RNA, 32 nt, Homo Sapiens
cgaggacuggccccuaggcugcugcugugacc

SEQ ID NO: 73699 - RNA, 32 nt, Homo Sapiens
cuuuccaaaaauuuacaggaauguuuagugua

SEQ ID NO: 73700 - RNA, 32 nt, Homo Sapiens
cuucuccagcucuccuucuggcuucauccugu

SEQ ID NO: 73701 - RNA, 32 nt, Homo Sapiens
uuuugacaagcuaccacacgucuuaaguaaau

SEQ ID NO: 73702 - RNA, 32 nt, Homo Sapiens
cagucuuuaaaggauuacaacacuuaaaauug

SEQ ID NO: 73703 - RNA, 32 nt, Homo Sapiens
aggaggaggaagaccugcgggacugguggguc

SEQ ID NO: 73704 - RNA, 32 nt, Homo Sapiens
ucuauuucacugcucuaaauucccuaugaaug

SEQ ID NO: 73705 - RNA, 32 nt, Homo Sapiens
cauguguuuuaaauaaauauuuuuuaauuggc

SEQ ID NO: 73706 - RNA, 32 nt, Homo Sapiens
aaggagaaaaaauaauuugaccuaguaguaua

SEQ ID NO: 73707 - RNA, 32 nt, Homo Sapiens
acgaggcaauacuaacuauccaccaggcaaca

SEQ ID NO: 73708 - RNA, 32 nt, Homo Sapiens
ugaccgcgaggcugcgggaggaaggggacagg

SEQ ID NO: 73709 - RNA, 32 nt, Homo Sapiens
guagugacuaugugucauuaaaaauuuacuug

SEQ ID NO: 73710 - RNA, 27 nt, Homo Sapiens
acacaaaggcucuucagcuccccuccc

SEQ ID NO: 73711 - RNA, 32 nt, Homo Sapiens
ggaaagcaggacgcacggcucccgcggcccgc

SEQ ID NO: 73712 - RNA, 32 nt, Homo Sapiens
uuccaggugugagccacaucacaguauuaccu

SEQ ID NO: 73713 - RNA, 32 nt, Homo Sapiens
ucacaggccuggcaucccugcugcuccucgcu

SEQ ID NO: 73714 - RNA, 32 nt, Homo Sapiens
uuauucccaaccucagaaaucacaccaucuca

SEQ ID NO: 73715 - RNA, 32 nt, Homo Sapiens
gggggcaauuuuuggaaguaaaugucacaauc

SEQ ID NO: 73716 - RNA, 32 nt, Homo Sapiens
aauuucaacuuauauuauaagaacgaaaguaa

SEQ ID NO: 73717 - RNA, 32 nt, Homo Sapiens
acugcgucuccaucaaccgggccgugccccag

SEQ ID NO: 73718 - RNA, 32 nt, Homo Sapiens
auauuguagugucaacauuuucaaauuaaaug

SEQ ID NO: 73719 - RNA, 32 nt, Homo Sapiens
uaaagaaaccaucagauuuguuaaggacauac

SEQ ID NO: 73720 - RNA, 32 nt, Homo Sapiens
cuuauauuuuauaaucagaauauguugcuuug

SEQ ID NO: 73721 - RNA, 32 nt, Homo Sapiens
gggaacuaauuuccacggacggcugcccgugg

SEQ ID NO: 73722 - RNA, 32 nt, Homo Sapiens
cugaugcaggucugcugccccgacggggccag

SEQ ID NO: 73723 - RNA, 32 nt, Homo Sapiens
gcuagaacagagccgccugcccaggacccuca

SEQ ID NO: 73724 - RNA, 32 nt, Homo Sapiens
auacauuuguacacgaucccaagguugcucaa

SEQ ID NO: 73725 - RNA, 32 nt, Homo Sapiens
aaagggaaguauauuucuuuuuaaagaaucuu

SEQ ID NO: 73726 - RNA, 32 nt, Homo Sapiens
ucuccagguagugaggcccaaccucuuuaaaa

SEQ ID NO: 73727 - RNA, 32 nt, Homo Sapiens
uuaaaucacagcacuuguucacuagcaguuug

SEQ ID NO: 73728 - RNA, 32 nt, Homo Sapiens
aaaucagaguuuaguccucaccacagugucaa

SEQ ID NO: 73729 - RNA, 32 nt, Homo Sapiens
ccaccaccgcccucaccauggugcuguuggca

SEQ ID NO: 73730 - RNA, 32 nt, Homo Sapiens
gguggcggggagagcgggcucccagcgcuggg

SEQ ID NO: 73731 - RNA, 28 nt, Homo Sapiens
aggaugucggaggugcggcugccaccgc

SEQ ID NO: 73732 - RNA, 32 nt, Homo Sapiens
caagccccacugacaugaacaccuggaccauu

SEQ ID NO: 73733 - RNA, 32 nt, Homo Sapiens
uugcugucaaggaagaaagguaagaaagcuga

SEQ ID NO: 73734 - RNA, 32 nt, Homo Sapiens
agcucagcuauauuuucuuuuucauuucuuuu

SEQ ID NO: 73735 - RNA, 32 nt, Homo Sapiens
ugaauggaauaaaagugagagccaaaaauaua

SEQ ID NO: 73736 - RNA, 32 nt, Homo Sapiens
aaacagcccauucuucgcuaauuuccucuucg

SEQ ID NO: 73737 - RNA, 32 nt, Homo Sapiens
uagaauuaaaacaaaauccaaguccucacacc

SEQ ID NO: 73738 - RNA, 32 nt, Homo Sapiens
gaaucugggauuugccaguugcuggcaaugua

SEQ ID NO: 73739 - RNA, 32 nt, Homo Sapiens
gcgaagcccccggcgagccgaggcugggagcg

SEQ ID NO: 73740 - RNA, 32 nt, Homo Sapiens
uggauauagcuuugauguaauuaaacuggaaa

SEQ ID NO: 73741 - RNA, 32 nt, Homo Sapiens
caacuucuccaugccuggaauccacgggugaa

SEQ ID NO: 73742 - RNA, 32 nt, Homo Sapiens
uccugaugaaagggcugucuuuacagccccaa

SEQ ID NO: 73743 - RNA, 32 nt, Homo Sapiens
uuuucucaauuucaagucagaagacaugucuu

SEQ ID NO: 73744 - RNA, 32 nt, Homo Sapiens
ugcccgcggugcccgcgcacgccugccgccau

SEQ ID NO: 73745 - RNA, 32 nt, Homo Sapiens
uuucacaucuucuuaucccucuuuagcagauu

SEQ ID NO: 73746 - RNA, 32 nt, Homo Sapiens
cagcaccuuucugccagagcagagcagccaug

SEQ ID NO: 73747 - RNA, 32 nt, Homo Sapiens
ggaaaaaggauucucuaaaaauaaaugacacu

SEQ ID NO: 73748 - RNA, 32 nt, Homo Sapiens
uguguugucucuagagcagggauuaaccucug

SEQ ID NO: 73749 - RNA, 32 nt, Homo Sapiens
aagaauuaaauugaugugauaauuuuauguuu

SEQ ID NO: 73750 - RNA, 32 nt, Homo Sapiens
agcccggcgcgguggcuuacgccuguaauccc

SEQ ID NO: 73751 - RNA, 32 nt, Homo Sapiens
augguaauuccuuuccucuuuuccuuccaaau

SEQ ID NO: 73752 - RNA, 32 nt, Homo Sapiens
uccuuggcuuaugagguggcaacaucuuguac

SEQ ID NO: 73753 - RNA, 32 nt, Homo Sapiens
auuuuuaaaaagagaagaaaaauacuaguuuu

SEQ ID NO: 73754 - RNA, 32 nt, Homo Sapiens
gaccugugucagcagagccgcccugcaccacc

SEQ ID NO: 73755 - RNA, 32 nt, Homo Sapiens
ggaggguggcacgguccccgccugcaccagug

SEQ ID NO: 73756 - RNA, 32 nt, Homo Sapiens
gauggcacagccugcgggccuaacauguugug

SEQ ID NO: 73757 - RNA, 32 nt, Homo Sapiens
guggcuccgccgcauccucacacugacggggg

SEQ ID NO: 73758 - RNA, 32 nt, Homo Sapiens
ugccuguaauuccagcacuuugggaggcggag

SEQ ID NO: 73759 - RNA, 32 nt, Homo Sapiens
acuacuaaaaggaaaaauuguguuacuuuuua

SEQ ID NO: 73760 - RNA, 29 nt, Homo Sapiens
ggccuucggggacgacggggcccuggagg

SEQ ID NO: 73761 - RNA, 32 nt, Homo Sapiens
uuucacaucuuucauuagauguguguaagaaa

SEQ ID NO: 73762 - RNA, 32 nt, Homo Sapiens
uccauacacacgcugccuucgguacccaccac

SEQ ID NO: 73763 - RNA, 32 nt, Homo Sapiens
uauaccucuuuaauuacuucuggucucuuugg

SEQ ID NO: 73764 - RNA, 32 nt, Homo Sapiens
gaccucuucuagcuccuuuuuaucgcauuugu

SEQ ID NO: 73765 - RNA, 32 nt, Homo Sapiens
caguggccaaaauaaaaaaucauggggcugga

SEQ ID NO: 73766 - RNA, 32 nt, Homo Sapiens
cuaugggcugggaagcacaauuugcaacgcuc

SEQ ID NO: 73767 - RNA, 32 nt, Homo Sapiens
guaguucugugccuccccccagaccccgcccc

SEQ ID NO: 73768 - RNA, 32 nt, Homo Sapiens
ugucuuuccuucccaccaaccagcucccaaac

SEQ ID NO: 73769 - RNA, 32 nt, Homo Sapiens
auucacugcccccagcucuucuccccaggugu

SEQ ID NO: 73770 - RNA, 32 nt, Homo Sapiens
uuuucugaagcacuuaaagaagaaacugaguu

SEQ ID NO: 73771 - RNA, 32 nt, Homo Sapiens
cuugcuucuguaaucuaaaaaauauuuaggau

SEQ ID NO: 73772 - RNA, 32 nt, Homo Sapiens
cccacaauaggauacaaacgaagaguuuaagc

SEQ ID NO: 73773 - RNA, 32 nt, Homo Sapiens
agggcuucugaguuucauuuccagucacaaaa

SEQ ID NO: 73774 - RNA, 32 nt, Homo Sapiens
ggaaaagggaugcgagcuccgccugggcuggu

SEQ ID NO: 73775 - RNA, 32 nt, Homo Sapiens
ucuucccgagagaucagcuacagaggaaccgg

SEQ ID NO: 73776 - RNA, 32 nt, Homo Sapiens
cuggccuaucuagagcagcugcauggccaaca

SEQ ID NO: 73777 - RNA, 31 nt, Homo Sapiens
gcucggggacaccugaguuauugugucacuc

SEQ ID NO: 73778 - RNA, 32 nt, Homo Sapiens
acucugguguuucacugugauuuuaaaaacug

SEQ ID NO: 73779 - RNA, 32 nt, Homo Sapiens
ggcccucccccucccccagcucagaccacaga

SEQ ID NO: 73780 - RNA, 32 nt, Homo Sapiens
cccgccgccugccgcccgcuggcaccgaggac

SEQ ID NO: 73781 - RNA, 32 nt, Homo Sapiens
ugaugacacggggcuccaguacacagucugau

SEQ ID NO: 73782 - RNA, 32 nt, Homo Sapiens
agacgucacccccuugcagccagccgcacagc

SEQ ID NO: 73783 - RNA, 32 nt, Homo Sapiens
cccugcagaccgggccucggagggucccaggc

SEQ ID NO: 73784 - RNA, 32 nt, Homo Sapiens
aauaucaugagcacuuuugcugguuccaguca

SEQ ID NO: 73785 - RNA, 32 nt, Homo Sapiens
gugcuucauuuuucgugcccgccccgcgcccc

SEQ ID NO: 73786 - RNA, 32 nt, Homo Sapiens
cuugcuucucacuggcaguguugagcuuugga

SEQ ID NO: 73787 - RNA, 32 nt, Homo Sapiens
agcaucuggaaccucccaucccugcccuccuc

SEQ ID NO: 73788 - RNA, 32 nt, Homo Sapiens
cacuuccuuggggucuuucucuagggucucuu

SEQ ID NO: 73789 - RNA, 32 nt, Homo Sapiens
uuggugaucucugccaagaagggggauguaaa

SEQ ID NO: 73790 - RNA, 32 nt, Homo Sapiens
aagugggagggccagagcuuuuugguucugau

SEQ ID NO: 73791 - RNA, 32 nt, Homo Sapiens
ugcuuugaaaagacauuuucauggagugaaag

SEQ ID NO: 73792 - RNA, 32 nt, Homo Sapiens
acgucagagaacucacagucuucuuggggaag

SEQ ID NO: 73793 - RNA, 32 nt, Homo Sapiens
ggucgccccagcaggcccaggcacauaggugc

SEQ ID NO: 73794 - RNA, 32 nt, Homo Sapiens
cuccuuuucuuuccucucuaggcugcuccuga

SEQ ID NO: 73795 - RNA, 32 nt, Homo Sapiens
aguugacaaaaauuucuuaaagugcaauagau

SEQ ID NO: 73796 - RNA, 32 nt, Homo Sapiens
acagaaauuccaugaugaacugguacagaaga

SEQ ID NO: 73797 - RNA, 32 nt, Homo Sapiens
aaaugguaacaagagggaccaaacuuugcuuc

SEQ ID NO: 73798 - RNA, 32 nt, Homo Sapiens
uguuaagagucuuuaacccauuugcauuaucu

SEQ ID NO: 73799 - RNA, 32 nt, Homo Sapiens
cugagcacacucccaagaauguacaacauuaa

SEQ ID NO: 73800 - RNA, 32 nt, Homo Sapiens
gggguggggugggacggcgcaccgccuccggu

SEQ ID NO: 73801 - RNA, 32 nt, Homo Sapiens
ugagaggagguagagugugaacaucaugaaau

SEQ ID NO: 73802 - RNA, 30 nt, Homo Sapiens
cauuauccuugugcugcaggagccggcucc

SEQ ID NO: 73803 - RNA, 32 nt, Homo Sapiens
ucagcuuccuucccugugccuuuuuugcauuu

SEQ ID NO: 73804 - RNA, 32 nt, Homo Sapiens
aaauucccuuaaugguguuguuuucuauuugu

SEQ ID NO: 73805 - RNA, 32 nt, Homo Sapiens
caucaaaaugugauucuuaaagaugcauauaa

SEQ ID NO: 73806 - RNA, 32 nt, Homo Sapiens
ugaggacuguauauagugaugugcuagaacuu

SEQ ID NO: 73807 - RNA, 29 nt, Homo Sapiens
gggaagcuucacaaucauggcggaaggug

SEQ ID NO: 73808 - RNA, 32 nt, Homo Sapiens
aaacagagcuuuuuucaaauagcaauuguacu

SEQ ID NO: 73809 - RNA, 32 nt, Homo Sapiens
acugcuuuacuuugauguaucauauuuuuaaa

SEQ ID NO: 73810 - RNA, 32 nt, Homo Sapiens
cugguggggcgagcgccgggagcccaucugcc

SEQ ID NO: 73811 - RNA, 32 nt, Homo Sapiens
auaccaacaaagucauaaagagcauauuuuag

SEQ ID NO: 73812 - RNA, 32 nt, Homo Sapiens
uaccuuccuagauguuuccccagaccgcuggc

SEQ ID NO: 73813 - RNA, 32 nt, Homo Sapiens
auguauuauuuuuacuuuucucucagugucuu

SEQ ID NO: 73814 - RNA, 32 nt, Homo Sapiens
cuuuucuauuuccccuuuauuaucauggccuu

SEQ ID NO: 73815 - RNA, 32 nt, Homo Sapiens
aggaugcaauuuuggaucccgaauuuugaugu

SEQ ID NO: 73816 - RNA, 32 nt, Homo Sapiens
acuuuuuaaaagacugauguaccauuuuaaac

SEQ ID NO: 73817 - RNA, 31 nt, Homo Sapiens
ggcacgaggcaggcuggaguccagcaccucu

SEQ ID NO: 73818 - RNA, 31 nt, Homo Sapiens
gaacacuauugaguaaaaaggaugauuuuag

SEQ ID NO: 73819 - RNA, 32 nt, Homo Sapiens
cggcggucggagccugcugcggcaguugaggc

SEQ ID NO: 73820 - RNA, 30 nt, Homo Sapiens
agcguguggcacgccgggggucccgcagca

SEQ ID NO: 73821 - RNA, 30 nt, Homo Sapiens
gcaccucccugugcugggggagccucaguc

SEQ ID NO: 73822 - RNA, 32 nt, Homo Sapiens
guuucucugugaacauuuccaguguuuaaucc

SEQ ID NO: 73823 - RNA, 32 nt, Homo Sapiens
auuuccggcuggaagugaggguccgagggauu

SEQ ID NO: 73824 - RNA, 32 nt, Homo Sapiens
ugcauggacaccugcucaccccugccucaucu

SEQ ID NO: 73825 - RNA, 32 nt, Homo Sapiens
ucgggacgcccggccagccgcucgggcgcagc

SEQ ID NO: 73826 - RNA, 32 nt, Homo Sapiens
aaacacauugaacauccuuccagaaagucuuu

SEQ ID NO: 73827 - RNA, 32 nt, Homo Sapiens
gauagaagguaacauugaugacucgcucauug

SEQ ID NO: 73828 - RNA, 32 nt, Homo Sapiens
ccucucaguuaccagcucuuuggagaaggauc

SEQ ID NO: 73829 - RNA, 32 nt, Homo Sapiens
caaugggccuagugucaucaaccgggagagga

SEQ ID NO: 73830 - RNA, 32 nt, Homo Sapiens
ugugggucaagagccugggugcagguuggcug

SEQ ID NO: 73831 - RNA, 32 nt, Homo Sapiens
aauagacuugaucccggcaggacugugauaca

SEQ ID NO: 73832 - RNA, 32 nt, Homo Sapiens
agcgcggccgcacggcccucggcagcgauggc

SEQ ID NO: 73833 - RNA, 32 nt, Homo Sapiens
ccucccucccucccgcggccagcccuucccuc

SEQ ID NO: 73834 - RNA, 32 nt, Homo Sapiens
uguaggugcaagauggaaaggauuguaggugc

SEQ ID NO: 73835 - RNA, 32 nt, Homo Sapiens
gaagaaguggaguugguggaugggugggcaug

SEQ ID NO: 73836 - RNA, 32 nt, Homo Sapiens
gugaugaacauauucaugaaauguagaaguca

SEQ ID NO: 73837 - RNA, 32 nt, Homo Sapiens
uacggguucccucacccugccagccgcccgcc

SEQ ID NO: 73838 - RNA, 32 nt, Homo Sapiens
ucgcaggugugagccaccacacccggcccuga

SEQ ID NO: 73839 - RNA, 32 nt, Homo Sapiens
uuucucuguuuaugaaauuauuaacugauaua

SEQ ID NO: 73840 - RNA, 32 nt, Homo Sapiens
aaggcaccaucccggagcgcaagccccugaug

SEQ ID NO: 73841 - RNA, 32 nt, Homo Sapiens
ggcauucagagggaaucaaagagccuugguga

SEQ ID NO: 73842 - RNA, 32 nt, Homo Sapiens
cagcugcuauaaauagccucccuguuuccaag

SEQ ID NO: 73843 - RNA, 32 nt, Homo Sapiens
ucuuugaaaauauguguaauauguaaaacauu

SEQ ID NO: 73844 - RNA, 32 nt, Homo Sapiens
auguucucccaauaaugauuuuauaguuacuu

SEQ ID NO: 73845 - RNA, 30 nt, Homo Sapiens
uugaaggcgcccgcugcucgcucuuucucu

SEQ ID NO: 73846 - RNA, 32 nt, Homo Sapiens
aucucgucccuggcuuccugcaugggaggacu

SEQ ID NO: 73847 - RNA, 32 nt, Homo Sapiens
aacauaggaaaugugaaaauauuuguguuugu

SEQ ID NO: 73848 - RNA, 32 nt, Homo Sapiens
acaggauacggauagucuauaaaucauuuuag

SEQ ID NO: 73849 - RNA, 32 nt, Homo Sapiens
gggcccuacugcccuccucugcccaggaaaug

SEQ ID NO: 73850 - RNA, 32 nt, Homo Sapiens
aaggucgguggcggaggggguggcucucacag

SEQ ID NO: 73851 - RNA, 32 nt, Homo Sapiens
auaacaguucacagccagguaaaauuuaacug

SEQ ID NO: 73852 - RNA, 32 nt, Homo Sapiens
gcugcccuggccaaagccccagccacucuccu

SEQ ID NO: 73853 - RNA, 32 nt, Homo Sapiens
uggaucugcaagauuguaagacagccugugcu

SEQ ID NO: 73854 - RNA, 32 nt, Homo Sapiens
ccgcugcagcuuccacaucccuggacacacuc

SEQ ID NO: 73855 - RNA, 32 nt, Homo Sapiens
acaaacauggguguacaaacauuucuucuaau

SEQ ID NO: 73856 - RNA, 32 nt, Homo Sapiens
gcaauuguauaaauguggaaccaaucuaaguu

SEQ ID NO: 73857 - RNA, 32 nt, Homo Sapiens
ggcuggucucgaaugucugaccucaggugauc

SEQ ID NO: 73858 - RNA, 32 nt, Homo Sapiens
aagguuuucuacaaauacagucaugguccuug

SEQ ID NO: 73859 - RNA, 32 nt, Homo Sapiens
gaaacaaacaaaagccaggaaaacacucauuu

SEQ ID NO: 73860 - RNA, 32 nt, Homo Sapiens
acaaccaugcaaugacagacaagcagcuccac

SEQ ID NO: 73861 - RNA, 32 nt, Homo Sapiens
caacgugaagagaaacaaagguuugaucuuuc

SEQ ID NO: 73862 - RNA, 32 nt, Homo Sapiens
acugaugucaaauggaggaaaggaacagaaaa

SEQ ID NO: 73863 - RNA, 32 nt, Homo Sapiens
gaauaauacucaguauauguauaauaucauau

SEQ ID NO: 73864 - RNA, 29 nt, Homo Sapiens
gucacucggggacaguuggcagaguauuc

SEQ ID NO: 73865 - RNA, 32 nt, Homo Sapiens
auauaagauaaugaaaguuaguaacguccauu

SEQ ID NO: 73866 - RNA, 32 nt, Homo Sapiens
guggaguucccucuccaucuucacccacuucu

SEQ ID NO: 73867 - RNA, 32 nt, Homo Sapiens
caucgcagcugcccgccgagacgcugcaccag

SEQ ID NO: 73868 - RNA, 32 nt, Homo Sapiens
ccgcaguguuugugucccuggguacuuaagau

SEQ ID NO: 73869 - RNA, 32 nt, Homo Sapiens
ugagaaugcugacugaaaaauagaaugaucaa

SEQ ID NO: 73870 - RNA, 32 nt, Homo Sapiens
uccgaagcugccgaugaggugugugcacuuga

SEQ ID NO: 73871 - RNA, 32 nt, Homo Sapiens
aaguuuacauucaaauguguauucaaaagaag

SEQ ID NO: 73872 - RNA, 32 nt, Homo Sapiens
gacucaggugccuccgcccuccugagagcagg

SEQ ID NO: 73873 - RNA, 32 nt, Homo Sapiens
aaucucugcauaaccacaugacuuggaaugcu

SEQ ID NO: 73874 - RNA, 32 nt, Homo Sapiens
gaaguucguagucccagaggugaggcaggagg

SEQ ID NO: 73875 - RNA, 32 nt, Homo Sapiens
gcacggaguugcgucccggggacuuggggccg

SEQ ID NO: 73876 - RNA, 32 nt, Homo Sapiens
caguggagguggacuggacacccacgugcagc

SEQ ID NO: 73877 - RNA, 32 nt, Homo Sapiens
auuucuguguguuugucuucauuccucuagca

SEQ ID NO: 73878 - RNA, 32 nt, Homo Sapiens
agggcaugaucaaaggggccauuucuugcuuu

SEQ ID NO: 73879 - RNA, 32 nt, Homo Sapiens
ggaaaaaacaggcaaaaacuaaggaaauauga

SEQ ID NO: 73880 - RNA, 30 nt, Homo Sapiens
ccgaaccgccuggcucugccggcgcccucc

SEQ ID NO: 73881 - RNA, 32 nt, Homo Sapiens
cacugcacuccagccugggcgacagugagacu

SEQ ID NO: 73882 - RNA, 32 nt, Homo Sapiens
aaaaauacuauuuuugagucuaaaugauagaa

SEQ ID NO: 73883 - RNA, 32 nt, Homo Sapiens
ggucucugggagaggaaggaagagggagggag

SEQ ID NO: 73884 - RNA, 32 nt, Homo Sapiens
acccacugcuccaaaaaacagaaguagaaugc

SEQ ID NO: 73885 - RNA, 32 nt, Homo Sapiens
ugaaccuggguggucgaggcugcagugagccg

SEQ ID NO: 73886 - RNA, 32 nt, Homo Sapiens
gugaauaaucccaaagcuucuugguuuuauuu

SEQ ID NO: 73887 - RNA, 31 nt, Homo Sapiens
uuggcaaaauaaaauaaagguaauuaaaaac

SEQ ID NO: 73888 - RNA, 32 nt, Homo Sapiens
cuagaaccgaucccgcggccccgccccucccg

SEQ ID NO: 73889 - RNA, 32 nt, Homo Sapiens
ggcagagccugccugugccugggugaggaacc

SEQ ID NO: 73890 - RNA, 32 nt, Homo Sapiens
ucuggggacucggcgugcagggcgggcuccaa

SEQ ID NO: 73891 - RNA, 32 nt, Homo Sapiens
gggagaggggcugagggggagccaagggugac

SEQ ID NO: 73892 - RNA, 32 nt, Homo Sapiens
guaaccuguguauggugacuggaggugccaac

SEQ ID NO: 73893 - RNA, 32 nt, Homo Sapiens
uccugcuucuccagccucuucggccuccucgc

SEQ ID NO: 73894 - RNA, 32 nt, Homo Sapiens
augcucuugccuucuuuuaucugcaaugugug

SEQ ID NO: 73895 - RNA, 32 nt, Homo Sapiens
acuuuuuaaaaaauucagaaauccaauaaagg

SEQ ID NO: 73896 - RNA, 32 nt, Homo Sapiens
ugcagagccauggcccggggcuacggggccac

SEQ ID NO: 73897 - RNA, 32 nt, Homo Sapiens
uuuuggaacgucacauaacaauggaacauaau

SEQ ID NO: 73898 - RNA, 32 nt, Homo Sapiens
ugguaaaggaccagguuuuuuguuuuccaguc

SEQ ID NO: 73899 - RNA, 32 nt, Homo Sapiens
aguugaacagagcuagaggccaugucuccugc

SEQ ID NO: 73900 - RNA, 32 nt, Homo Sapiens
cuucaucuguugccauugcugcuggagcccac

SEQ ID NO: 73901 - RNA, 32 nt, Homo Sapiens
cagcaguugggccaaccuuugcuggcugucag

SEQ ID NO: 73902 - RNA, 32 nt, Homo Sapiens
uaggcaaucuuuccaaaguaaauucagggccc

SEQ ID NO: 73903 - RNA, 32 nt, Homo Sapiens
uuguggagcagcuggagcuggcugggagggag

SEQ ID NO: 73904 - RNA, 32 nt, Homo Sapiens
aaagaagaacuguaaaugacggugcuauacaa

SEQ ID NO: 73905 - RNA, 32 nt, Homo Sapiens
cuacuaacaucauauggaacaggucuccuuua

SEQ ID NO: 73906 - RNA, 32 nt, Homo Sapiens
ggccugguggagcuucuggaaaaggaggaagu

SEQ ID NO: 73907 - RNA, 32 nt, Homo Sapiens
ccugcacucaauguauuguguaaaauccuuag

SEQ ID NO: 73908 - RNA, 32 nt, Homo Sapiens
agagcaaaggggcguccucaguccucaaccua

SEQ ID NO: 73909 - RNA, 32 nt, Homo Sapiens
aggcccuaauuacagcucuaugcaauagggac

SEQ ID NO: 73910 - RNA, 32 nt, Homo Sapiens
gcaguuugccacagguccggaccucucccucc

SEQ ID NO: 73911 - RNA, 27 nt, Homo Sapiens
uguggucuaaaauaaacuuuuaauugc

SEQ ID NO: 73912 - RNA, 32 nt, Homo Sapiens
guggaggguccugguuccuccucccaccaacc

SEQ ID NO: 73913 - RNA, 32 nt, Homo Sapiens
acacacacagaaaauauacuguaaagaaagag

SEQ ID NO: 73914 - RNA, 32 nt, Homo Sapiens
ggauacugcuggcuuuacucuaccucauauua

SEQ ID NO: 73915 - RNA, 27 nt, Homo Sapiens
gagaaguccuucuuaacuucuagcuaa

SEQ ID NO: 73916 - RNA, 32 nt, Homo Sapiens
auggaauuccucuacugcccagccccuccuga

SEQ ID NO: 73917 - RNA, 32 nt, Homo Sapiens
gcaauguggagcagcagccacugcacaggagg

SEQ ID NO: 73918 - RNA, 32 nt, Homo Sapiens
uguccucccucccacacucaucccugcuucuu

SEQ ID NO: 73919 - RNA, 32 nt, Homo Sapiens
cuguuuuuuuuuuuuuaaccauaacucauaga

SEQ ID NO: 73920 - RNA, 32 nt, Homo Sapiens
ucagacaauccacucucaggagcgcagcccga

SEQ ID NO: 73921 - RNA, 32 nt, Homo Sapiens
auauguaauauguuuuuagccgauggauuuaa

SEQ ID NO: 73922 - RNA, 32 nt, Homo Sapiens
uuuaaaaucaugcaaaaacugcaacucugugu

SEQ ID NO: 73923 - RNA, 32 nt, Homo Sapiens
gugcugcugggcccucccacuccaucuggcac

SEQ ID NO: 73924 - RNA, 32 nt, Homo Sapiens
cucuaugacgugauaaaaauaguaucucuugu

SEQ ID NO: 73925 - RNA, 32 nt, Homo Sapiens
ucgaguuucccaaaccgaaucaccuuaagaag

SEQ ID NO: 73926 - RNA, 32 nt, Homo Sapiens
aaaauguauuaaauuggaauuuuuuaauccuu

SEQ ID NO: 73927 - RNA, 32 nt, Homo Sapiens
agcuuuauuaugguccuuuacacuggagacag

SEQ ID NO: 73928 - RNA, 32 nt, Homo Sapiens
ccucccaccugccugcuccuggcgccuucucc

SEQ ID NO: 73929 - RNA, 32 nt, Homo Sapiens
cugagggguuuucccauuuuucccuccaucaa

SEQ ID NO: 73930 - RNA, 32 nt, Homo Sapiens
uggacgcaacuuaagcugggauaaucacauua

SEQ ID NO: 73931 - RNA, 32 nt, Homo Sapiens
ucucaagggcuucguuucugcucuccccggca

SEQ ID NO: 73932 - RNA, 32 nt, Homo Sapiens
uggccaugcagaggcguccgcaggugccgugu

SEQ ID NO: 73933 - RNA, 32 nt, Homo Sapiens
gcuauaauuacuaccuguuugcuauuuuuguu

SEQ ID NO: 73934 - RNA, 32 nt, Homo Sapiens
ggacuacacaugucauugaauuguagguuucc

SEQ ID NO: 73935 - RNA, 32 nt, Homo Sapiens
cagcuuucuucuucuuuuuuuuuucugaaaaa

SEQ ID NO: 73936 - RNA, 32 nt, Homo Sapiens
cuccuggaaggggacucgaaaaucugucauuc

SEQ ID NO: 73937 - RNA, 32 nt, Homo Sapiens
gcauaauagaaaguauuggacugagauauuug

SEQ ID NO: 73938 - RNA, 32 nt, Homo Sapiens
ccuccacgccacugccucccccgaaugcauuu

SEQ ID NO: 73939 - RNA, 32 nt, Homo Sapiens
agguguuugcaauguacaaauaauacagcugu

SEQ ID NO: 73940 - RNA, 32 nt, Homo Sapiens
gaaaugcuuuaaagaauguugguaaugccaug

SEQ ID NO: 73941 - RNA, 32 nt, Homo Sapiens
ccucccuagcgagcuuccugagguagacggcu

SEQ ID NO: 73942 - RNA, 32 nt, Homo Sapiens
caaccagucaaagaagcaggggaaaaguaagc

SEQ ID NO: 73943 - RNA, 32 nt, Homo Sapiens
uucuuggaucguguccucucccccucgccgcc

SEQ ID NO: 73944 - RNA, 32 nt, Homo Sapiens
uuuguaguauuuuuagucuuugauacucugua

SEQ ID NO: 73945 - RNA, 32 nt, Homo Sapiens
aggccgaggcaggcagauuauuugagcucagg

SEQ ID NO: 73946 - RNA, 32 nt, Homo Sapiens
ggccagcggggagaggcuggggcgaggggagg

SEQ ID NO: 73947 - RNA, 32 nt, Homo Sapiens
gugccacccagggcuacugccuggcuaucugg

SEQ ID NO: 73948 - RNA, 32 nt, Homo Sapiens
ggcuccguugagcaccggccgccgggccucug

SEQ ID NO: 73949 - RNA, 32 nt, Homo Sapiens
uuuuaaaaaaaauuauauuuuacgacugcauu

SEQ ID NO: 73950 - RNA, 32 nt, Homo Sapiens
aaucuacaugucucuuguuuuauuucucucua

SEQ ID NO: 73951 - RNA, 32 nt, Homo Sapiens
agggggccuugcuggaugcugcuguacaacuu

SEQ ID NO: 73952 - RNA, 32 nt, Homo Sapiens
augucaagaacaaagaccaggcaaaagaaaug

SEQ ID NO: 73953 - RNA, 32 nt, Homo Sapiens
cuguaaccaucccaaacuccucccaggcacag

SEQ ID NO: 73954 - RNA, 32 nt, Homo Sapiens
caugaaggaaaagaauagggaaaagcuuucag

SEQ ID NO: 73955 - RNA, 32 nt, Homo Sapiens
gcauuguuaugaagacuuaagguaacagagcu

SEQ ID NO: 73956 - RNA, 32 nt, Homo Sapiens
ccuccuuccuuccccacaggccaaccaaccag

SEQ ID NO: 73957 - RNA, 32 nt, Homo Sapiens
agcacuuugggaggccgaggccggcaaaucac

SEQ ID NO: 73958 - RNA, 29 nt, Homo Sapiens
uguggugugacuucugccccgaaguuccu

SEQ ID NO: 73959 - RNA, 30 nt, Homo Sapiens
uaaccacaagccaccacccauuugacaucc

SEQ ID NO: 73960 - RNA, 30 nt, Homo Sapiens
gugcaccaugcucacuguugcugcguggga

SEQ ID NO: 73961 - RNA, 32 nt, Homo Sapiens
gaccucaggugagaagcagaggaaggagagga

SEQ ID NO: 73962 - RNA, 32 nt, Homo Sapiens
caccacacauucaaaaggaucguuuuguuuug

SEQ ID NO: 73963 - RNA, 32 nt, Homo Sapiens
ucuugaaauagacaaaguuuguguucacgaua

SEQ ID NO: 73964 - RNA, 32 nt, Homo Sapiens
uggguccgggccagguaacuggagccggaaac

SEQ ID NO: 73965 - RNA, 32 nt, Homo Sapiens
gcucccuccucuaucucucucuguguaauuua

SEQ ID NO: 73966 - RNA, 32 nt, Homo Sapiens
ccuucccgcgccccgcagcgccccgcagagca

SEQ ID NO: 73967 - RNA, 32 nt, Homo Sapiens
guagguguaacagauaguucaccugugaacga

SEQ ID NO: 73968 - RNA, 32 nt, Homo Sapiens
aggaggagggaagagacuuaggaagaaaauuu

SEQ ID NO: 73969 - RNA, 32 nt, Homo Sapiens
acccccacaugggacauuuguuuaccccccac

SEQ ID NO: 73970 - RNA, 32 nt, Homo Sapiens
cucccacucuuugggcaggggcgacauggcac

SEQ ID NO: 73971 - RNA, 32 nt, Homo Sapiens
acaaaaugaauuaucuacauggucauccaauc

SEQ ID NO: 73972 - RNA, 32 nt, Homo Sapiens
uaauauugcuggauuugcuaccuuugguuacu

SEQ ID NO: 73973 - RNA, 32 nt, Homo Sapiens
ggacaggcuuucuggaggaaucaggcccuggg

SEQ ID NO: 73974 - RNA, 32 nt, Homo Sapiens
aaaaggcuuagaucugggcuauucccauguag

SEQ ID NO: 73975 - RNA, 32 nt, Homo Sapiens
cagcuauuucuagguauaaagagcagcucguu

SEQ ID NO: 73976 - RNA, 32 nt, Homo Sapiens
acaaugucaccauccauguggcuacuucuaca

SEQ ID NO: 73977 - RNA, 32 nt, Homo Sapiens
uuucuuuaucuaaauauuaacauucuaagucu

SEQ ID NO: 73978 - RNA, 32 nt, Homo Sapiens
cguauagauugcugggcagugaaacaguuaag

SEQ ID NO: 73979 - RNA, 32 nt, Homo Sapiens
cugcucuuauuuuacuauuaugcguguugcug

SEQ ID NO: 73980 - RNA, 32 nt, Homo Sapiens
acgcagcuccaacuuauauaaaauagacuuac

SEQ ID NO: 73981 - RNA, 32 nt, Homo Sapiens
ggauuucuagcuuugggagccuguuccaccua

SEQ ID NO: 73982 - RNA, 32 nt, Homo Sapiens
gaucucccggggugggggcagggcggguccca

SEQ ID NO: 73983 - RNA, 32 nt, Homo Sapiens
aaaauuagaaaagaaaagaaguugaggaggcc

SEQ ID NO: 73984 - RNA, 32 nt, Homo Sapiens
uccaugcugacugaugguuaaauaaugugauu

SEQ ID NO: 73985 - RNA, 29 nt, Homo Sapiens
aucugcgagugaagagggacgagggaaaa

SEQ ID NO: 73986 - RNA, 32 nt, Homo Sapiens
cuggcggcucggggcgucccagcgacgcggga

SEQ ID NO: 73987 - RNA, 32 nt, Homo Sapiens
gcugggcagccuguucuuacuccagcucaacc

SEQ ID NO: 73988 - RNA, 32 nt, Homo Sapiens
gcgauuucauuuccguagccaaagagucuuac

SEQ ID NO: 73989 - RNA, 32 nt, Homo Sapiens
ucacuggcugcagcugaucuguuuccuuauac

SEQ ID NO: 73990 - RNA, 32 nt, Homo Sapiens
guccugguacuuggcaccuuguagacaguugc

SEQ ID NO: 73991 - RNA, 32 nt, Homo Sapiens
gccaccugcccccuucucccacacugcuaggu

SEQ ID NO: 73992 - RNA, 32 nt, Homo Sapiens
aggacacuuggucuccuucucuuuggucucac

SEQ ID NO: 73993 - RNA, 32 nt, Homo Sapiens
uuucagacauuaagugacuguaucauguucgg

SEQ ID NO: 73994 - RNA, 32 nt, Homo Sapiens
ccacaggcuugagcccagucccacagccuucc

SEQ ID NO: 73995 - RNA, 32 nt, Homo Sapiens
accccuaagucuccugugccaagcugcucccu

SEQ ID NO: 73996 - RNA, 32 nt, Homo Sapiens
ugucccuugaguuucucaacugcuggaaggag

SEQ ID NO: 73997 - RNA, 32 nt, Homo Sapiens
agccugugucuauuuucauauuacucugcuuu

SEQ ID NO: 73998 - RNA, 32 nt, Homo Sapiens
uggacaagcaggaaacaaaccuccacagccca

SEQ ID NO: 73999 - RNA, 32 nt, Homo Sapiens
uuggccucuccagcccuugcagguggaaacag

SEQ ID NO: 74000 - RNA, 32 nt, Homo Sapiens
uuuaacagauguacuuuuuuauccucagaaua

SEQ ID NO: 74001 - RNA, 32 nt, Homo Sapiens
cuaucaccacguugcuuucucugaacuucauu

SEQ ID NO: 74002 - RNA, 32 nt, Homo Sapiens
gguuguucuaacuggcucauucuuacuugggu

SEQ ID NO: 74003 - RNA, 32 nt, Homo Sapiens
aagccccugucggcgagcuuguuggagcuuga

SEQ ID NO: 74004 - RNA, 32 nt, Homo Sapiens
aggauguugcugugugugugcgguggggggag

SEQ ID NO: 74005 - RNA, 32 nt, Homo Sapiens
gccggggucuccccggcgcugcccagucuguc

SEQ ID NO: 74006 - RNA, 32 nt, Homo Sapiens
aucugaguucccuccccucucuuugacauucc

SEQ ID NO: 74007 - RNA, 32 nt, Homo Sapiens
aaugcuuguuuccaauuuuucuuagauuaugu

SEQ ID NO: 74008 - RNA, 32 nt, Homo Sapiens
auucaaucuugccgucacuauucaucaaugaa

SEQ ID NO: 74009 - RNA, 24 nt, Homo Sapiens
uggcggcggcacugagggccccga

SEQ ID NO: 74010 - RNA, 32 nt, Homo Sapiens
auuucagggggagagguggagggcagaugucc

SEQ ID NO: 74011 - RNA, 32 nt, Homo Sapiens
gccggcucuugugccggaaggaggaaggcgug

SEQ ID NO: 74012 - RNA, 32 nt, Homo Sapiens
aaagucaagugucaccugaggcauuuugugaa

SEQ ID NO: 74013 - RNA, 32 nt, Homo Sapiens
aggaaucuaugaaauuuaacuuuaggaacaaa

SEQ ID NO: 74014 - RNA, 32 nt, Homo Sapiens
gaugucacccacccucaggcuggggccgagga

SEQ ID NO: 74015 - RNA, 32 nt, Homo Sapiens
ucuauuugguuugcuuuuuuuuuuuugcuuug

SEQ ID NO: 74016 - RNA, 32 nt, Homo Sapiens
auugaugcaaauaacacaaaugcucaaagaaa

SEQ ID NO: 74017 - RNA, 32 nt, Homo Sapiens
ugccacuugggagcaucaggcuccucaugcca

SEQ ID NO: 74018 - RNA, 32 nt, Homo Sapiens
ucuggcacgcgagggccccggcggggcuguua

SEQ ID NO: 74019 - RNA, 32 nt, Homo Sapiens
uauauaguaaagcugguagccuugaaaauguc

SEQ ID NO: 74020 - RNA, 27 nt, Homo Sapiens
ccauguccacuguccccaacccuacug

SEQ ID NO: 74021 - RNA, 32 nt, Homo Sapiens
cugcccuagcugaccccgagaagugcucuugg

SEQ ID NO: 74022 - RNA, 32 nt, Homo Sapiens
acugugaagauaaaguucaaaaguauuuuuac

SEQ ID NO: 74023 - RNA, 32 nt, Homo Sapiens
aaauguguguauauacacacacauaaauuaua

SEQ ID NO: 74024 - RNA, 32 nt, Homo Sapiens
ggcaggagccccugcccucccucccuguccug

SEQ ID NO: 74025 - RNA, 32 nt, Homo Sapiens
aaggcgucccggcaucggccaagauucuacau

SEQ ID NO: 74026 - RNA, 32 nt, Homo Sapiens
ugauguaugugcucugccagugugaaggguga

SEQ ID NO: 74027 - RNA, 32 nt, Homo Sapiens
cucaauuuuuccuuaucuuguuuuccacaauu

SEQ ID NO: 74028 - RNA, 32 nt, Homo Sapiens
ucucuggccucuugucuccccuuuuccaauaa

SEQ ID NO: 74029 - RNA, 32 nt, Homo Sapiens
uuuaaaaugugauuauucucuauauucuuaaa

SEQ ID NO: 74030 - RNA, 32 nt, Homo Sapiens
uauuuuuguggcgggcgggggugggagggcca

SEQ ID NO: 74031 - RNA, 27 nt, Homo Sapiens
ccccuuuccuucuuauggccaccccau

SEQ ID NO: 74032 - RNA, 32 nt, Homo Sapiens
uccagauuacaaucgccauaauauaaggaagg

SEQ ID NO: 74033 - RNA, 32 nt, Homo Sapiens
cggaugacccccagcccuacccuuggugccgc

SEQ ID NO: 74034 - RNA, 32 nt, Homo Sapiens
gcagggcuguggcuaccauguucucucgcgcg

SEQ ID NO: 74035 - RNA, 32 nt, Homo Sapiens
cugcauguuuaaaaucuugugaaucagccuga

SEQ ID NO: 74036 - RNA, 32 nt, Homo Sapiens
aacgucgagacuggagcgcccgaacugagcca

SEQ ID NO: 74037 - RNA, 32 nt, Homo Sapiens
cucccaguucccagcccucuaagcccuagcac

SEQ ID NO: 74038 - RNA, 32 nt, Homo Sapiens
cuaacagcugcaaaaaauccaaguacaccuuc

SEQ ID NO: 74039 - RNA, 32 nt, Homo Sapiens
uuuaugcacuagguuucugugcuuuuucuuug

SEQ ID NO: 74040 - RNA, 31 nt, Homo Sapiens
ggcccaggccucaccaccugacgcugcauga

SEQ ID NO: 74041 - RNA, 32 nt, Homo Sapiens
ggaggaauaagagaagcagcaggacuuuaaca

SEQ ID NO: 74042 - RNA, 32 nt, Homo Sapiens
uugcucuaaaagaaaaaggaacuaggucaaaa

SEQ ID NO: 74043 - RNA, 32 nt, Homo Sapiens
auggaaaaggaaacagaauaucaauggaaaag

SEQ ID NO: 74044 - RNA, 32 nt, Homo Sapiens
aaguuuccugucauguucacucaucuuuaaau

SEQ ID NO: 74045 - RNA, 32 nt, Homo Sapiens
aaacaaaagagaaaaaguuauacaggauaaaa

SEQ ID NO: 74046 - RNA, 32 nt, Homo Sapiens
auauaugguaaaaaucagugaauguuuguuga

SEQ ID NO: 74047 - RNA, 32 nt, Homo Sapiens
cugagcgcgcggcgcgggagcugcuggcaguc

SEQ ID NO: 74048 - RNA, 32 nt, Homo Sapiens
ggugcugugggaacggacuagagagaguugcg

SEQ ID NO: 74049 - RNA, 32 nt, Homo Sapiens
gccguccgcgcgcggccauggagcuggaggua

SEQ ID NO: 74050 - RNA, 32 nt, Homo Sapiens
uccaagccucacauggccacgaccacauccuc

SEQ ID NO: 74051 - RNA, 32 nt, Homo Sapiens
gagaaaggcuguaucuuaauuucugcaccccg

SEQ ID NO: 74052 - RNA, 32 nt, Homo Sapiens
ucuccuucuacgucaagacccucacucuacac

SEQ ID NO: 74053 - RNA, 32 nt, Homo Sapiens
agauaaaccuuuucuuuuuuacauuguucuug

SEQ ID NO: 74054 - RNA, 32 nt, Homo Sapiens
ucagaaauauaaaaguggaauuuauguacaug

SEQ ID NO: 74055 - RNA, 32 nt, Homo Sapiens
guuuuuuauuuuuuauuuuugagacggaguuu

SEQ ID NO: 74056 - RNA, 32 nt, Homo Sapiens
acgagcggucuggucggugaggucuuggccgc

SEQ ID NO: 74057 - RNA, 32 nt, Homo Sapiens
gagaaaaagcuaccaccagugaccuaggagaa

SEQ ID NO: 74058 - RNA, 32 nt, Homo Sapiens
gggagaggggguaauggaggccaagccugcag

SEQ ID NO: 74059 - RNA, 32 nt, Homo Sapiens
uugccuucguaauguuaaccguuucaggacca

SEQ ID NO: 74060 - RNA, 32 nt, Homo Sapiens
ugcccagccgucaaaagagucuuaauauauau

SEQ ID NO: 74061 - RNA, 32 nt, Homo Sapiens
cccccgcuccccccggcccuugaaggcggaga

SEQ ID NO: 74062 - RNA, 32 nt, Homo Sapiens
augcaacagucuucucugugcauuuccccaag

SEQ ID NO: 74063 - RNA, 32 nt, Homo Sapiens
cagcccuggccccuccaauccuccccgcucug

SEQ ID NO: 74064 - RNA, 32 nt, Homo Sapiens
auuuauuuauuuacagaagauugguuccuucc

SEQ ID NO: 74065 - RNA, 32 nt, Homo Sapiens
acagccuugaguuccuuggagagagaggacac

SEQ ID NO: 74066 - RNA, 32 nt, Homo Sapiens
gcuuucuccucaaugauuuucuuaauggcauc

SEQ ID NO: 74067 - RNA, 32 nt, Homo Sapiens
ggacugccucugacccucccccugccuuccuc

SEQ ID NO: 74068 - RNA, 32 nt, Homo Sapiens
gccugggcuggcgucuccugcugugagcuggc

SEQ ID NO: 74069 - RNA, 32 nt, Homo Sapiens
gggggugcaucauuggggauucugccucaggu

SEQ ID NO: 74070 - RNA, 32 nt, Homo Sapiens
uugugaauaaauuuauuaagaaaaaaaaaaaa

SEQ ID NO: 74071 - RNA, 32 nt, Homo Sapiens
aauuuguaggugccuuuuuuuuuuccuguaga

SEQ ID NO: 74072 - RNA, 32 nt, Homo Sapiens
gccgccuuccccuggaggagggaugcaggcgg

SEQ ID NO: 74073 - RNA, 32 nt, Homo Sapiens
caucaguggugucaagacaacucuaagaaggu

SEQ ID NO: 74074 - RNA, 32 nt, Homo Sapiens
ucagagaaaauagaaaaaacaauguuagaagg

SEQ ID NO: 74075 - RNA, 32 nt, Homo Sapiens
agcccuggggguggagguaguaaaggccaugg

SEQ ID NO: 74076 - RNA, 32 nt, Homo Sapiens
ucagcaaucaaagaugaguccuggagggaagg

SEQ ID NO: 74077 - RNA, 32 nt, Homo Sapiens
ccuaguaguggucaguuaucuuuacguggacu

SEQ ID NO: 74078 - RNA, 31 nt, Homo Sapiens
ggaaggaagcaugaaggacgcacaggucagg

SEQ ID NO: 74079 - RNA, 32 nt, Homo Sapiens
auagucggcacucaguaaauguuugguuccuu

SEQ ID NO: 74080 - RNA, 32 nt, Homo Sapiens
accaaaaugaaaccugcuguauggaaacuacu

SEQ ID NO: 74081 - RNA, 32 nt, Homo Sapiens
aaaaaauaagauuaauggaagacuuuaaggua

SEQ ID NO: 74082 - RNA, 32 nt, Homo Sapiens
ugaaaaaacugaugaagucugaauagaaucug

SEQ ID NO: 74083 - RNA, 32 nt, Homo Sapiens
gaguuucagaaaaugacugagaaggagcgaua

SEQ ID NO: 74084 - RNA, 32 nt, Homo Sapiens
aaauaguggaacaaaauugaaggguggucagu

SEQ ID NO: 74085 - RNA, 32 nt, Homo Sapiens
gcagaaagauaaacaaauguugggauguucag

SEQ ID NO: 74086 - RNA, 32 nt, Homo Sapiens
cgaccuuccaguucucggagccagguuagggg

SEQ ID NO: 74087 - RNA, 32 nt, Homo Sapiens
uuguucuguauauuuuaaugaucuuucacaag

SEQ ID NO: 74088 - RNA, 32 nt, Homo Sapiens
gaguauuaaauacagauguacuguaugcauau

SEQ ID NO: 74089 - RNA, 32 nt, Homo Sapiens
ugcuccccaaaagccacuucucuucuuccuga

SEQ ID NO: 74090 - RNA, 32 nt, Homo Sapiens
uucuuuucggccagaggccggagaccauucaa

SEQ ID NO: 74091 - RNA, 32 nt, Homo Sapiens
aaggcaaagacuugaaggcauuagcguuucuc

SEQ ID NO: 74092 - RNA, 32 nt, Homo Sapiens
cuugcaagaauauuuugugcuuucuuuagaaa

SEQ ID NO: 74093 - RNA, 32 nt, Homo Sapiens
uauucaacuaaagauguugacuuggauuuauu

SEQ ID NO: 74094 - RNA, 32 nt, Homo Sapiens
uucuugggguguuguacccagcccuaggagua

SEQ ID NO: 74095 - RNA, 32 nt, Homo Sapiens
cgagaggcuuguuagcuucucuacgcuuuuga

SEQ ID NO: 74096 - RNA, 29 nt, Homo Sapiens
gaggaugcuggcggggggcgugaggagca

SEQ ID NO: 74097 - RNA, 32 nt, Homo Sapiens
gaacacacagauugugucucauucaucuucag

SEQ ID NO: 74098 - RNA, 32 nt, Homo Sapiens
caucagcauaaugauuugagauugguccaugu

SEQ ID NO: 74099 - RNA, 32 nt, Homo Sapiens
cuuacagacaccuggggcucuuguccuggcac

SEQ ID NO: 74100 - RNA, 32 nt, Homo Sapiens
gaugccccagcauggaugacuacaugguccug

SEQ ID NO: 74101 - RNA, 28 nt, Homo Sapiens
cugcccuggcuugccaggauggcaggcc

SEQ ID NO: 74102 - RNA, 32 nt, Homo Sapiens
uuugaaaagggagaaagacucggacaggugcu

SEQ ID NO: 74103 - RNA, 32 nt, Homo Sapiens
cuccuucacacucuacacuggaugcuucugga

SEQ ID NO: 74104 - RNA, 32 nt, Homo Sapiens
ucaaugcuccugugcggauuggcacuccgucu

SEQ ID NO: 74105 - RNA, 32 nt, Homo Sapiens
cagcuucaccucagagcugcaggaaggaacgg

SEQ ID NO: 74106 - RNA, 32 nt, Homo Sapiens
cuuuuuaaaagcuuauaguugguauggaaaac

SEQ ID NO: 74107 - RNA, 32 nt, Homo Sapiens
cuauuguaacaaguaauguuaaaaauugucug

SEQ ID NO: 74108 - RNA, 32 nt, Homo Sapiens
ugugagucaucagaucuucuccugaaaauggg

SEQ ID NO: 74109 - RNA, 32 nt, Homo Sapiens
ggaaaggaagcacaaucagagaagaaaacagc

SEQ ID NO: 74110 - RNA, 32 nt, Homo Sapiens
auuguaggacagagaccacacugggucggcgg

SEQ ID NO: 74111 - RNA, 32 nt, Homo Sapiens
cagcgcugccagcguggaaagagcugcggggc

SEQ ID NO: 74112 - RNA, 32 nt, Homo Sapiens
agcaaaaggcaaauacacaaaauauuauuuaa

SEQ ID NO: 74113 - RNA, 32 nt, Homo Sapiens
gagggagggagcaaagagauugggguaugucc

SEQ ID NO: 74114 - RNA, 31 nt, Homo Sapiens
aaaaagaaauaaaaauaauagcugggugugg

SEQ ID NO: 74115 - RNA, 28 nt, Homo Sapiens
aagcagcugcggccgcaguggaggcugg

SEQ ID NO: 74116 - RNA, 32 nt, Homo Sapiens
uaugucagggugugccgguuuuagguaacaag

SEQ ID NO: 74117 - RNA, 25 nt, Homo Sapiens
auggcaucuccgggcucuggcuuuu

SEQ ID NO: 74118 - RNA, 32 nt, Homo Sapiens
cuggcgcucaaggucaccuguuuaaugccaag

SEQ ID NO: 74119 - RNA, 32 nt, Homo Sapiens
ggaacacugcgguggcuuagcagguggcugcc

SEQ ID NO: 74120 - RNA, 32 nt, Homo Sapiens
aauacgcacugacgacacaugaugcuuggaug

SEQ ID NO: 74121 - RNA, 32 nt, Homo Sapiens
accugucucgcugcgugcacgcccugccgccg

SEQ ID NO: 74122 - RNA, 32 nt, Homo Sapiens
guugucuccguuuauagcacagacuugaagga

SEQ ID NO: 74123 - RNA, 32 nt, Homo Sapiens
uccucauuucccuccaugcccaccauuguggu

SEQ ID NO: 74124 - RNA, 32 nt, Homo Sapiens
cgggcccugcagagcaggggccccaacagagu

SEQ ID NO: 74125 - RNA, 32 nt, Homo Sapiens
cugcugggcuccuggaugcuccaaggcccugc

SEQ ID NO: 74126 - RNA, 32 nt, Homo Sapiens
uuacaaggguauauauuuuaaaacgauuuuca

SEQ ID NO: 74127 - RNA, 32 nt, Homo Sapiens
uuuuuaagauggacauaaccuguacgaccuuc

SEQ ID NO: 74128 - RNA, 32 nt, Homo Sapiens
uugaggcuucuguuccucucuuuuccuguugu

SEQ ID NO: 74129 - RNA, 32 nt, Homo Sapiens
gagcacuuuuucuugugugcagucuugugugu

SEQ ID NO: 74130 - RNA, 32 nt, Homo Sapiens
cgcauuugugcagcuaaaagacugggcuucuc

SEQ ID NO: 74131 - RNA, 32 nt, Homo Sapiens
auucucaaaauauuuaaaacuuuuucaugauu

SEQ ID NO: 74132 - RNA, 32 nt, Homo Sapiens
aguuggagacauuuuagaguaugccauaacug

SEQ ID NO: 74133 - RNA, 31 nt, Homo Sapiens
aguggcggugucugugaugguccggagcgag

SEQ ID NO: 74134 - RNA, 28 nt, Homo Sapiens
uggggggcggcgcaggacguggguaggg

SEQ ID NO: 74135 - RNA, 32 nt, Homo Sapiens
uuguugcuucuuuuuucuuuucuuucuuuccc

SEQ ID NO: 74136 - RNA, 30 nt, Homo Sapiens
ggccccggcggcggcggcguggagcagcau

SEQ ID NO: 74137 - RNA, 32 nt, Homo Sapiens
accuggagcaugggcuaacaccggaggaaagg

SEQ ID NO: 74138 - RNA, 32 nt, Homo Sapiens
augugucaagacagacuuguuuagguguaauu

SEQ ID NO: 74139 - RNA, 32 nt, Homo Sapiens
guacuaccaaaauguaacugcuaaucaagggu

SEQ ID NO: 74140 - RNA, 32 nt, Homo Sapiens
gaagagguuuuccuuucauagucagguaguca

SEQ ID NO: 74141 - RNA, 32 nt, Homo Sapiens
acaauaccaaaauaacaaauugcauaggagug

SEQ ID NO: 74142 - RNA, 32 nt, Homo Sapiens
uccuaguuuuaaacagaagaaaaacuguaauc

SEQ ID NO: 74143 - RNA, 32 nt, Homo Sapiens
ccggaauugggguucgugccuccuagccuagg

SEQ ID NO: 74144 - RNA, 32 nt, Homo Sapiens
ccaaggcagaaucuaaaucacacuauuuucga

SEQ ID NO: 74145 - RNA, 32 nt, Homo Sapiens
cucgaagcuggcaacagcagugucugaaugcu

SEQ ID NO: 74146 - RNA, 32 nt, Homo Sapiens
gugcuguuugaaaauaaaucuuaguguucaaa

SEQ ID NO: 74147 - RNA, 32 nt, Homo Sapiens
cgcgcucgccggagagcugggugcuaccgcug

SEQ ID NO: 74148 - RNA, 32 nt, Homo Sapiens
gcggcucauggcggccguggggcccccgcagc

SEQ ID NO: 74149 - RNA, 32 nt, Homo Sapiens
cuccaggaacgauguuuggagcuucacaaggu

SEQ ID NO: 74150 - RNA, 32 nt, Homo Sapiens
cuacuguuaccuguuauagaaaauaguguugg

SEQ ID NO: 74151 - RNA, 31 nt, Homo Sapiens
ugaaauauaugugaaaggauaugaaucugag

SEQ ID NO: 74152 - RNA, 32 nt, Homo Sapiens
gcuguugacgcaccugugguuguuaguggggc

SEQ ID NO: 74153 - RNA, 32 nt, Homo Sapiens
uaaauaccaagagcuucagugcuggaucauaa

SEQ ID NO: 74154 - RNA, 32 nt, Homo Sapiens
uucauuguaaaaauaaauguacuuugcaccac

SEQ ID NO: 74155 - RNA, 32 nt, Homo Sapiens
cagggucugugcuauguguaaagguuuguuaa

SEQ ID NO: 74156 - RNA, 32 nt, Homo Sapiens
cucccuacacccaccaggccaagcccucugug

SEQ ID NO: 74157 - RNA, 32 nt, Homo Sapiens
ucuaugcugggaaccagggaccaagaguaaau

SEQ ID NO: 74158 - RNA, 32 nt, Homo Sapiens
gccacgucgcgguugguggucggagagggcga

SEQ ID NO: 74159 - RNA, 32 nt, Homo Sapiens
ucuuuugguuucugcuucucucuucucucaac

SEQ ID NO: 74160 - RNA, 32 nt, Homo Sapiens
gacgguugaugaugaagcgccggccguguaaa

SEQ ID NO: 74161 - RNA, 31 nt, Homo Sapiens
ccaagggcucaagacuuucuaacugggaugu

SEQ ID NO: 74162 - RNA, 32 nt, Homo Sapiens
cauuuagaugcacuuuuuuguguguucuuuaa

SEQ ID NO: 74163 - RNA, 32 nt, Homo Sapiens
uuccuuuuuaaugaugccugcacuaucaagag

SEQ ID NO: 74164 - RNA, 32 nt, Homo Sapiens
uggaccccaagcagccagagccuacugcugcc

SEQ ID NO: 74165 - RNA, 32 nt, Homo Sapiens
agcuuugagguuucuuuuuucauuguuucuug

SEQ ID NO: 74166 - RNA, 32 nt, Homo Sapiens
uuuuuuuuugcuauuuuuuuuaaagcucguca

SEQ ID NO: 74167 - RNA, 32 nt, Homo Sapiens
uggauacuuucugaaguaaaacauuuuaauua

SEQ ID NO: 74168 - RNA, 32 nt, Homo Sapiens
cauuggaccuuuccugaggaagagggacuguu

SEQ ID NO: 74169 - RNA, 32 nt, Homo Sapiens
gagggagcagccagacccccaucccgccaggg

SEQ ID NO: 74170 - RNA, 32 nt, Homo Sapiens
acuuaggggguccucuguuucauacuuuuaau

SEQ ID NO: 74171 - RNA, 32 nt, Homo Sapiens
ugaggaggauaaaaagauguugaaagaagaaa

SEQ ID NO: 74172 - RNA, 32 nt, Homo Sapiens
ugggcucaccuggccugggagacccaucuggu

SEQ ID NO: 74173 - RNA, 32 nt, Homo Sapiens
agcacgccaaccccagcaguccugggcccccu

SEQ ID NO: 74174 - RNA, 32 nt, Homo Sapiens
uuaacauguggaagaaaacaagacaugaaaag

SEQ ID NO: 74175 - RNA, 32 nt, Homo Sapiens
cacacuauggcugcccucugggcucccagaac

SEQ ID NO: 74176 - RNA, 32 nt, Homo Sapiens
augaauaaaacauaauucuuguccucugagag

SEQ ID NO: 74177 - RNA, 32 nt, Homo Sapiens
uuagaaucccaagaaaaucaaauggcauccgg

SEQ ID NO: 74178 - RNA, 32 nt, Homo Sapiens
uuaaagcuuccacuauuuaugucuuugagaag

SEQ ID NO: 74179 - RNA, 32 nt, Homo Sapiens
uuuccaugaugaugaugaugggacucaauugu

SEQ ID NO: 74180 - RNA, 32 nt, Homo Sapiens
ugagcggagaucugggcacuguacuuuagccu

SEQ ID NO: 74181 - RNA, 32 nt, Homo Sapiens
guucucugccccagccaacguuggccuuacuu

SEQ ID NO: 74182 - RNA, 32 nt, Homo Sapiens
uacguaucuuuucuccuccucccuaguguucc

SEQ ID NO: 74183 - RNA, 32 nt, Homo Sapiens
cacgcacgugcaugagauguuccuccuucaaa

SEQ ID NO: 74184 - RNA, 28 nt, Homo Sapiens
gccugcgggcggccagcgaagguggcga

SEQ ID NO: 74185 - RNA, 32 nt, Homo Sapiens
ggguggaggaggagggcacgugucugccuccc

SEQ ID NO: 74186 - RNA, 32 nt, Homo Sapiens
cagcaauguaugcaugagagaccaguugaucc

SEQ ID NO: 74187 - RNA, 32 nt, Homo Sapiens
gaacaggaugacuucucaauuuaacaccacuu

SEQ ID NO: 74188 - RNA, 32 nt, Homo Sapiens
acauaaagagagacauaaaaugggagaagaag

SEQ ID NO: 74189 - RNA, 32 nt, Homo Sapiens
ggccuaacaaagacauuuaaagacacgccaag

SEQ ID NO: 74190 - RNA, 32 nt, Homo Sapiens
uucucuggugaugggguuuguuuucaucgggc

SEQ ID NO: 74191 - RNA, 32 nt, Homo Sapiens
aggggcagucuccucaguaucuaggauucaau

SEQ ID NO: 74192 - RNA, 32 nt, Homo Sapiens
caaggacuuaggaguccagaagcucccagaug

SEQ ID NO: 74193 - RNA, 32 nt, Homo Sapiens
guucugcccaauaaugcaaacaaaauugggcu

SEQ ID NO: 74194 - RNA, 32 nt, Homo Sapiens
uaaauguuuuuaucuuacucuuucuguacaga

SEQ ID NO: 74195 - RNA, 32 nt, Homo Sapiens
aggacggcgaggagguccgcugaugugucgug

SEQ ID NO: 74196 - RNA, 32 nt, Homo Sapiens
cgugugaacaaaguuaccaauuccuauucuaa

SEQ ID NO: 74197 - RNA, 23 nt, Homo Sapiens
aaguauuaaaugucucuuucuac

SEQ ID NO: 74198 - RNA, 32 nt, Homo Sapiens
cuuccugccucugcugccaccaucacugugug

SEQ ID NO: 74199 - RNA, 32 nt, Homo Sapiens
aaaaccaaccaccagcauuucacuacaggacc

SEQ ID NO: 74200 - RNA, 32 nt, Homo Sapiens
acagggaccugagccgcaacacugccguccuc

SEQ ID NO: 74201 - RNA, 28 nt, Homo Sapiens
ccccaaguggcuaugaguuuugcauuaa

SEQ ID NO: 74202 - RNA, 32 nt, Homo Sapiens
auaugaauuuuucuagucaacauauuauugua

SEQ ID NO: 74203 - RNA, 32 nt, Homo Sapiens
gacucuuccuuccuccuccuccccaguaccac

SEQ ID NO: 74204 - RNA, 32 nt, Homo Sapiens
gcccugagcgccuuugucugccgcccgcgccc

SEQ ID NO: 74205 - RNA, 32 nt, Homo Sapiens
ggaggaaggaagaugagaaauaauucccugac

SEQ ID NO: 74206 - RNA, 32 nt, Homo Sapiens
cucaggauagggaagagcagggggaugcagga

SEQ ID NO: 74207 - RNA, 32 nt, Homo Sapiens
gggagauggccuugcuccuccucgcuguaccc

SEQ ID NO: 74208 - RNA, 32 nt, Homo Sapiens
ccccagaggccagaacccggggagccugggcc

SEQ ID NO: 74209 - RNA, 32 nt, Homo Sapiens
uuuccccuuucuuuuuaaccuaaauuaaagcu

SEQ ID NO: 74210 - RNA, 32 nt, Homo Sapiens
agagcaaaauaaagguuagauaaguccuugug

SEQ ID NO: 74211 - RNA, 32 nt, Homo Sapiens
gaugcauccguccaaguucacugccuuuauuu

SEQ ID NO: 74212 - RNA, 32 nt, Homo Sapiens
cugugaaguuuguuaauguacauauuagauug

SEQ ID NO: 74213 - RNA, 32 nt, Homo Sapiens
auuucagaugcccccacaauggcugccuugga

SEQ ID NO: 74214 - RNA, 32 nt, Homo Sapiens
aaauuuuccagaagaaaugaaauccaacuaga

SEQ ID NO: 74215 - RNA, 32 nt, Homo Sapiens
gggccgccguacgcccggggcugcggcucucc

SEQ ID NO: 74216 - RNA, 32 nt, Homo Sapiens
uuuccuuucucucuccucccgccgcccaagau

SEQ ID NO: 74217 - RNA, 32 nt, Homo Sapiens
gaagauauauauuuauacuggacuacuuuuac

SEQ ID NO: 74218 - RNA, 32 nt, Homo Sapiens
auagucuagaccagcuagugcuuccacaguca

SEQ ID NO: 74219 - RNA, 32 nt, Homo Sapiens
cagccaugaauaucuuuucuuaaagagaguuu

SEQ ID NO: 74220 - RNA, 32 nt, Homo Sapiens
gaaacaggcuccaagaggcugaggacuuugcc

SEQ ID NO: 74221 - RNA, 32 nt, Homo Sapiens
ucccccugcucugugcagcugccgcccgggcu

SEQ ID NO: 74222 - RNA, 32 nt, Homo Sapiens
uuuugguucuuacugggugacuuugacuuaau

SEQ ID NO: 74223 - RNA, 32 nt, Homo Sapiens
aggagcggggguggagccgggggaaggguggg

SEQ ID NO: 74224 - RNA, 32 nt, Homo Sapiens
cuaaaaucugugcuuuuuaaaaguauacucug

SEQ ID NO: 74225 - RNA, 32 nt, Homo Sapiens
aaugguugacacacacgaauugguggagacau

SEQ ID NO: 74226 - RNA, 27 nt, Homo Sapiens
aagguuuuccccuucagcccucaggua

SEQ ID NO: 74227 - RNA, 32 nt, Homo Sapiens
gccuacagagugccuggcacuugggacuucca

SEQ ID NO: 74228 - RNA, 32 nt, Homo Sapiens
aagcccagugauuugaucggauuugcuuuucu

SEQ ID NO: 74229 - RNA, 32 nt, Homo Sapiens
cacgcucgcucccgcugucggacucugggccu

SEQ ID NO: 74230 - RNA, 32 nt, Homo Sapiens
acgugugcuggcugcgggagggggccgagcug

SEQ ID NO: 74231 - RNA, 32 nt, Homo Sapiens
caccaaucagcacccugucaaaacagaccaau

SEQ ID NO: 74232 - RNA, 32 nt, Homo Sapiens
ucaggauuggaacacaggagcuggauuuggcu

SEQ ID NO: 74233 - RNA, 31 nt, Homo Sapiens
gcucuguagcaggaccugccccacgcacacc

SEQ ID NO: 74234 - RNA, 32 nt, Homo Sapiens
cagcgcugcuccaucagccggcuggacaguuu

SEQ ID NO: 74235 - RNA, 32 nt, Homo Sapiens
cuaagcuuauugaauucuuuuaccacuuucau

SEQ ID NO: 74236 - RNA, 32 nt, Homo Sapiens
guuuaaguuccgcgcgcaggccaggcugcaac

SEQ ID NO: 74237 - RNA, 32 nt, Homo Sapiens
uauccaucucaucgucauugacggccaccucu

SEQ ID NO: 74238 - RNA, 31 nt, Homo Sapiens
acuccugcaagguucgggucuggcgguacuu

SEQ ID NO: 74239 - RNA, 32 nt, Homo Sapiens
auuuauuucaucucagcaucaagcauucccaa

SEQ ID NO: 74240 - RNA, 32 nt, Homo Sapiens
caccaucuuuuucucuggauaauuauuucuua

SEQ ID NO: 74241 - RNA, 32 nt, Homo Sapiens
cgccggguuucccucaugaucccgggcgggug

SEQ ID NO: 74242 - RNA, 32 nt, Homo Sapiens
caucaugcuguaugggguggacagccggagcg

SEQ ID NO: 74243 - RNA, 32 nt, Homo Sapiens
aacacauaucguuucuuuuucuuggaaaaaaa

SEQ ID NO: 74244 - RNA, 32 nt, Homo Sapiens
cagcaccacaagagcagaucucugccagcaag

SEQ ID NO: 74245 - RNA, 32 nt, Homo Sapiens
cucagcaacuggccgcagucucuucugcacca

SEQ ID NO: 74246 - RNA, 32 nt, Homo Sapiens
uagcagggcauggcacgugagcuccggaauag

SEQ ID NO: 74247 - RNA, 32 nt, Homo Sapiens
uuucccucuggaccagacgccgccugcacggg

SEQ ID NO: 74248 - RNA, 32 nt, Homo Sapiens
uauugacguguuuaaaggaacaucucaucucc

SEQ ID NO: 74249 - RNA, 31 nt, Homo Sapiens
gcgcgccccgugugccugccccaggagcccc

SEQ ID NO: 74250 - RNA, 32 nt, Homo Sapiens
ucguuuaggccaugucacuagaagcgcaguuu

SEQ ID NO: 74251 - RNA, 32 nt, Homo Sapiens
auccagcagugacaggggugcggcacggagga

SEQ ID NO: 74252 - RNA, 32 nt, Homo Sapiens
aauggggaugacccugacaggugcccucaggg

SEQ ID NO: 74253 - RNA, 32 nt, Homo Sapiens
uaggguguggaggacuuggugcccuagacggc

SEQ ID NO: 74254 - RNA, 32 nt, Homo Sapiens
uaaguguucucuuuuuaccccuguuuccauuc

SEQ ID NO: 74255 - RNA, 32 nt, Homo Sapiens
caauaaaaaauauuaaaacugaguuuugcaga

SEQ ID NO: 74256 - RNA, 32 nt, Homo Sapiens
ggcaacacagagagacccugucucaaaacaaa

SEQ ID NO: 74257 - RNA, 32 nt, Homo Sapiens
ugagacugacgggugauguugcucauaggcuc

SEQ ID NO: 74258 - RNA, 32 nt, Homo Sapiens
gaggguuaguccaucaauguuuugcuucuugu

SEQ ID NO: 74259 - RNA, 32 nt, Homo Sapiens
uaauuacaauuauacuaacaauacacaugaga

SEQ ID NO: 74260 - RNA, 32 nt, Homo Sapiens
gauucagcgcccggcgaggcggaagcggccgc

SEQ ID NO: 74261 - RNA, 32 nt, Homo Sapiens
uaaaaccccauuuggugcuauugaguuuguuc

SEQ ID NO: 74262 - RNA, 32 nt, Homo Sapiens
cucgcggggcgccgcccgccucaccuuaccug

SEQ ID NO: 74263 - RNA, 32 nt, Homo Sapiens
aaucaguauucccaaggauggcgacaagggca

SEQ ID NO: 74264 - RNA, 32 nt, Homo Sapiens
ugaucaauuuuuguugauuucaagguacaaac

SEQ ID NO: 74265 - RNA, 32 nt, Homo Sapiens
accucagccuacuggguagcugggacuacagg

SEQ ID NO: 74266 - RNA, 32 nt, Homo Sapiens
ugggcggugaaacuuuuccagaugaacggacc

SEQ ID NO: 74267 - RNA, 32 nt, Homo Sapiens
aucaaguacacauuuaggagccagguagguua

SEQ ID NO: 74268 - RNA, 32 nt, Homo Sapiens
ccaaccccaaccccaaugagcaguacaguauu

SEQ ID NO: 74269 - RNA, 32 nt, Homo Sapiens
acaaccgcuguccauuguuugaggauguuacc

SEQ ID NO: 74270 - RNA, 32 nt, Homo Sapiens
cacuuccgcccggccuuccaccgguccagguc

SEQ ID NO: 74271 - RNA, 32 nt, Homo Sapiens
ggcucguguggccccaggccagugucugucag

SEQ ID NO: 74272 - RNA, 32 nt, Homo Sapiens
uggcucucucugaacuucuguuucuuuaucug

SEQ ID NO: 74273 - RNA, 32 nt, Homo Sapiens
cgugguccugaacacaacagaauagaaugcaa

SEQ ID NO: 74274 - RNA, 32 nt, Homo Sapiens
cugguaguuggggcacaaaaccaucggggaac

SEQ ID NO: 74275 - RNA, 32 nt, Homo Sapiens
uugugugcguguaucuguucuuucucuguugu

SEQ ID NO: 74276 - RNA, 32 nt, Homo Sapiens
ucugcaggcucaggucucggugcucugaccac

SEQ ID NO: 74277 - RNA, 27 nt, Homo Sapiens
cgcgucuccuucuucaccucggggucc

SEQ ID NO: 74278 - RNA, 32 nt, Homo Sapiens
cucucucucacacacacacacacacacacaca

SEQ ID NO: 74279 - RNA, 32 nt, Homo Sapiens
gauuauuuaauauauagugcuaucaagcaauc

SEQ ID NO: 74280 - RNA, 32 nt, Homo Sapiens
ucuugagacagaggaacaaaaccaaucgauuu

SEQ ID NO: 74281 - RNA, 32 nt, Homo Sapiens
cauugccccggcagcucuggccugugguucca

SEQ ID NO: 74282 - RNA, 32 nt, Homo Sapiens
aguuuuuggguuucuuuuuuugagacagaguc

SEQ ID NO: 74283 - RNA, 32 nt, Homo Sapiens
uagagcacagaaaaaucaagaccaugagaaga

SEQ ID NO: 74284 - RNA, 32 nt, Homo Sapiens
aggcagccuggccuagcaggccccacgccacc

SEQ ID NO: 74285 - RNA, 32 nt, Homo Sapiens
gggaagucagcucugggagcagcccucacugg

SEQ ID NO: 74286 - RNA, 32 nt, Homo Sapiens
uugaaugaugaaauguuguauguguguuugcu

SEQ ID NO: 74287 - RNA, 32 nt, Homo Sapiens
gagagggagucucacuuugugcccuagacugg

SEQ ID NO: 74288 - RNA, 32 nt, Homo Sapiens
ccucgggccugcugcgcagacguccaucacgu

SEQ ID NO: 74289 - RNA, 32 nt, Homo Sapiens
ucugcuuucccugcguagaucuaggccagggg

SEQ ID NO: 74290 - RNA, 28 nt, Homo Sapiens
ccgaggagccggccgccccggaggugcu

SEQ ID NO: 74291 - RNA, 32 nt, Homo Sapiens
uuccccagggaaaggagaaaagagaaaacagg

SEQ ID NO: 74292 - RNA, 32 nt, Homo Sapiens
gagcugcuggagaacaccauggaggccaugga

SEQ ID NO: 74293 - RNA, 32 nt, Homo Sapiens
ucgacacggaggcggcggccggacccccggcc

SEQ ID NO: 74294 - RNA, 32 nt, Homo Sapiens
uucuugugguuuuucaagaaaauauccuuuuu

SEQ ID NO: 74295 - RNA, 32 nt, Homo Sapiens
guggcccuggacuuccgucuccaguuccccuc

SEQ ID NO: 74296 - RNA, 32 nt, Homo Sapiens
augaauauuucauguuuauauaagcuguaauc

SEQ ID NO: 74297 - RNA, 32 nt, Homo Sapiens
gagugaacaaagugcuaaauaaauagaucuac

SEQ ID NO: 74298 - RNA, 32 nt, Homo Sapiens
ccccauuuuuguuuuucuuuuaaccgaggugu

SEQ ID NO: 74299 - RNA, 32 nt, Homo Sapiens
uguggccugggugcccucuggaggccggugug

SEQ ID NO: 74300 - RNA, 32 nt, Homo Sapiens
ccaaagccuggaaguucucaucaccuccaggu

SEQ ID NO: 74301 - RNA, 32 nt, Homo Sapiens
gaggaggaacggucacccuccucccccaugga

SEQ ID NO: 74302 - RNA, 32 nt, Homo Sapiens
cacucccccuggagucucaacuauagaaauug

SEQ ID NO: 74303 - RNA, 32 nt, Homo Sapiens
guauuagcaagauuguauaucuguaaagaaug

SEQ ID NO: 74304 - RNA, 32 nt, Homo Sapiens
gcaaaauucacauuuuaaauaauguaaaacaa

SEQ ID NO: 74305 - RNA, 32 nt, Homo Sapiens
auuuccaaucauccauuuuuaauagcaauaaa

SEQ ID NO: 74306 - RNA, 32 nt, Homo Sapiens
agagagaagaggaaaagaagagacacagcuac

SEQ ID NO: 74307 - RNA, 32 nt, Homo Sapiens
gacuggccagaagagagggucuggggccuggu

SEQ ID NO: 74308 - RNA, 32 nt, Homo Sapiens
ugagcucugcccggcugcagggauggcgggga

SEQ ID NO: 74309 - RNA, 32 nt, Homo Sapiens
cgcagcggggucgcugaggcgagggugucaug

SEQ ID NO: 74310 - RNA, 32 nt, Homo Sapiens
ucgcggggagggccguauugugcggagagccu

SEQ ID NO: 74311 - RNA, 32 nt, Homo Sapiens
guuguggggaagggcaaguuagucuuuacuga

SEQ ID NO: 74312 - RNA, 32 nt, Homo Sapiens
accgagccagugccgugcccucgggccgcgcc

SEQ ID NO: 74313 - RNA, 27 nt, Homo Sapiens
aagggauagcuuuucagcccucaaggu

SEQ ID NO: 74314 - RNA, 32 nt, Homo Sapiens
aauuucuguauuccucaccccaccugugaacu

SEQ ID NO: 74315 - RNA, 32 nt, Homo Sapiens
uguccacccacccacaccccuuggccucagcc

SEQ ID NO: 74316 - RNA, 32 nt, Homo Sapiens
caaauuuuaaguggguuaaguuuuuaaauacg

SEQ ID NO: 74317 - RNA, 32 nt, Homo Sapiens
uuuuaaaacggguaauaugucaugcucuuagu

SEQ ID NO: 74318 - RNA, 32 nt, Homo Sapiens
caagagcugagggagaaaauagaccuauugcc

SEQ ID NO: 74319 - RNA, 32 nt, Homo Sapiens
gccucgauccucagcucguccuccccgccccg

SEQ ID NO: 74320 - RNA, 32 nt, Homo Sapiens
ccaagguugagggacaggauuaggcagggucu

SEQ ID NO: 74321 - RNA, 32 nt, Homo Sapiens
cacucaggaagccagugagaccacgagcccca

SEQ ID NO: 74322 - RNA, 32 nt, Homo Sapiens
uuacguaaauuaaugauauaaaucaugauuau

SEQ ID NO: 74323 - RNA, 32 nt, Homo Sapiens
ccaguccugguccucccuccccagccgccccu

SEQ ID NO: 74324 - RNA, 32 nt, Homo Sapiens
uaugagagauaaaaaaucauugucuuaagcca

SEQ ID NO: 74325 - RNA, 32 nt, Homo Sapiens
uaugcagaauuaccggccgggucgcuccugaa

SEQ ID NO: 74326 - RNA, 32 nt, Homo Sapiens
uauauauaaugaauauaaauagacaaauagga

SEQ ID NO: 74327 - RNA, 32 nt, Homo Sapiens
ucuucugcucuaauuuuuuuuauuaagacuuu

SEQ ID NO: 74328 - RNA, 32 nt, Homo Sapiens
ggacucaaaccuuuuaaaucugaaugcgauca

SEQ ID NO: 74329 - RNA, 31 nt, Homo Sapiens
ugccugcuuuccugccugccccaccugccuc

SEQ ID NO: 74330 - RNA, 32 nt, Homo Sapiens
ccugcacacucucuauggauacuuggguugug

SEQ ID NO: 74331 - RNA, 32 nt, Homo Sapiens
auccuuccaaaaauauugauggugauuugugc

SEQ ID NO: 74332 - RNA, 32 nt, Homo Sapiens
auaucuuuucuuuuuuaucuuccuuaguauaa

SEQ ID NO: 74333 - RNA, 32 nt, Homo Sapiens
cggauucccugccugaccuugggaaagccucu

SEQ ID NO: 74334 - RNA, 32 nt, Homo Sapiens
uuuuguuucccuuuuuuguguggcugguagug

SEQ ID NO: 74335 - RNA, 32 nt, Homo Sapiens
cuagguacaaauaccagaauuauacuugaaaa

SEQ ID NO: 74336 - RNA, 32 nt, Homo Sapiens
ucucccaucccccuccucccauccgcuagcaa

SEQ ID NO: 74337 - RNA, 29 nt, Homo Sapiens
cuauuugugacuuuuuaaacgauuaguga

SEQ ID NO: 74338 - RNA, 32 nt, Homo Sapiens
cugugccccacuucuccauggcagcaccccgu

SEQ ID NO: 74339 - RNA, 32 nt, Homo Sapiens
ccgguaccggugccgguaccagagaccuccga

SEQ ID NO: 74340 - RNA, 32 nt, Homo Sapiens
agacuggcccagcaccaccccugggcagcagc

SEQ ID NO: 74341 - RNA, 32 nt, Homo Sapiens
ugucauuugagcauaaaauauuuucagauauu

SEQ ID NO: 74342 - RNA, 32 nt, Homo Sapiens
caccuuuaaaaagcaguuuuugaaagacaaaa

SEQ ID NO: 74343 - RNA, 32 nt, Homo Sapiens
uguugucugcaaacagaggguaguuugacuuc

SEQ ID NO: 74344 - RNA, 32 nt, Homo Sapiens
ucccucggaggacaucgucuguguccagguca

SEQ ID NO: 74345 - RNA, 32 nt, Homo Sapiens
ucucaguggcucccggaggacccggcgggccc

SEQ ID NO: 74346 - RNA, 32 nt, Homo Sapiens
uuauguacaaaacagaagucaaugcaacagua

SEQ ID NO: 74347 - RNA, 32 nt, Homo Sapiens
ccguuguaucauaauuuacauguagauacuca

SEQ ID NO: 74348 - RNA, 27 nt, Homo Sapiens
cguccuuccuucuuccccgauccaugc

SEQ ID NO: 74349 - RNA, 32 nt, Homo Sapiens
ucgagccucaucauugaagggauuguggcugu

SEQ ID NO: 74350 - RNA, 32 nt, Homo Sapiens
gguaucagcaaccucugguccacuacacaaca

SEQ ID NO: 74351 - RNA, 32 nt, Homo Sapiens
cagaggggcccaggcugcagccugccacaccu

SEQ ID NO: 74352 - RNA, 32 nt, Homo Sapiens
cccuguuggccauaucuuuccaccgacggacu

SEQ ID NO: 74353 - RNA, 32 nt, Homo Sapiens
gggcugggggaagaggcuggcagaaguuaccc

SEQ ID NO: 74354 - RNA, 30 nt, Homo Sapiens
cgagaccacgagauugaugaguuugccuug

SEQ ID NO: 74355 - RNA, 32 nt, Homo Sapiens
guuucucuguuguuuggacccuacuuggcaug

SEQ ID NO: 74356 - RNA, 32 nt, Homo Sapiens
uuggcagguccugaguucuuguccugagucca

SEQ ID NO: 74357 - RNA, 32 nt, Homo Sapiens
aaacaaaaagaaaagaaaauuuuuguaguagc

SEQ ID NO: 74358 - RNA, 29 nt, Homo Sapiens
cgcgggaugugugucaguuuacgccucug

SEQ ID NO: 74359 - RNA, 32 nt, Homo Sapiens
gcugcuguucuucagcuccgaccauguugcug

SEQ ID NO: 74360 - RNA, 32 nt, Homo Sapiens
cuuccccgucucuacuacaaauaaaaaauuag

SEQ ID NO: 74361 - RNA, 32 nt, Homo Sapiens
ggaagugcaggggcuggucagagccaaugaga

SEQ ID NO: 74362 - RNA, 32 nt, Homo Sapiens
aacuugccugguguggaaaaugauggcgguca

SEQ ID NO: 74363 - RNA, 32 nt, Homo Sapiens
acauaggugcucucuugaaaucuuaaauauga

SEQ ID NO: 74364 - RNA, 32 nt, Homo Sapiens
ggauggaaaaggaagacuagaggcuugcauaa

SEQ ID NO: 74365 - RNA, 32 nt, Homo Sapiens
uauucuaauauccaacgcaacuaucaaaauug

SEQ ID NO: 74366 - RNA, 32 nt, Homo Sapiens
agcccucuggggaugggcaaggccuuccagga

SEQ ID NO: 74367 - RNA, 32 nt, Homo Sapiens
augcuguuauugugggaggaaaugcuagguuu

SEQ ID NO: 74368 - RNA, 32 nt, Homo Sapiens
guggacccugucccggcuccgccccgcggccc

SEQ ID NO: 74369 - RNA, 32 nt, Homo Sapiens
gguaugagagacugaggcuugagugaacugaa

SEQ ID NO: 74370 - RNA, 32 nt, Homo Sapiens
gguuguggggcaaccugguuccugcuaacugc

SEQ ID NO: 74371 - RNA, 32 nt, Homo Sapiens
uaaugacaacuauaaagcuacuguagcugaga

SEQ ID NO: 74372 - RNA, 32 nt, Homo Sapiens
aacaauuugacuuuuguuccaguguuuaaacu

SEQ ID NO: 74373 - RNA, 32 nt, Homo Sapiens
ggaagcucaggaucugacauguucuuccuuuu

SEQ ID NO: 74374 - RNA, 32 nt, Homo Sapiens
agaugacuuccccugccuccuacuccaguaug

SEQ ID NO: 74375 - RNA, 32 nt, Homo Sapiens
ccugaccucaggugaucugccugccucagccu

SEQ ID NO: 74376 - RNA, 30 nt, Homo Sapiens
ggaggaggcggcggcggcgcaggaggaugu

SEQ ID NO: 74377 - RNA, 32 nt, Homo Sapiens
aaacuuugucuccuguguuccucuucaaugcu

SEQ ID NO: 74378 - RNA, 32 nt, Homo Sapiens
augccuccaucccauccccauggugcuuuggc

SEQ ID NO: 74379 - RNA, 32 nt, Homo Sapiens
uggcagcaacuuuccuucaacuaugcaagcgc

SEQ ID NO: 74380 - RNA, 32 nt, Homo Sapiens
gaagcccugaccucggcccaucugcagaaucu

SEQ ID NO: 74381 - RNA, 32 nt, Homo Sapiens
cagcuccaugugccaugcaccgccaugcaccc

SEQ ID NO: 74382 - RNA, 32 nt, Homo Sapiens
caaaggagacuggauggccaucuuuccucaug

SEQ ID NO: 74383 - RNA, 32 nt, Homo Sapiens
agaauuucauauugugucaaguacaggaguuu

SEQ ID NO: 74384 - RNA, 32 nt, Homo Sapiens
ccuauuagugcuacccaucuccccucagaaga

SEQ ID NO: 74385 - RNA, 32 nt, Homo Sapiens
gaauguuaaguagaugagguaaccauucaguu

SEQ ID NO: 74386 - RNA, 32 nt, Homo Sapiens
ucuguauguuacaccuuguaauuaaaauacgu

SEQ ID NO: 74387 - RNA, 32 nt, Homo Sapiens
auauuuggcuaaugguugagcagguuucugaa

SEQ ID NO: 74388 - RNA, 32 nt, Homo Sapiens
cagauuuuaguuccucauuuugcagaugaaaa

SEQ ID NO: 74389 - RNA, 32 nt, Homo Sapiens
gaggcggccgugguuaggcggcuccccggcgg

SEQ ID NO: 74390 - RNA, 32 nt, Homo Sapiens
agaaggugaagacaucuagaaacauuacacca

SEQ ID NO: 74391 - RNA, 32 nt, Homo Sapiens
agaccagagaaguuaagaaauacauccagggg

SEQ ID NO: 74392 - RNA, 32 nt, Homo Sapiens
agggggaugggcuggcuguggccagguuuagg

SEQ ID NO: 74393 - RNA, 32 nt, Homo Sapiens
caaaaaugccaaaaugugagcaugucaaugaa

SEQ ID NO: 74394 - RNA, 32 nt, Homo Sapiens
cggcccgagcgcggcgucggggccagcggaga

SEQ ID NO: 74395 - RNA, 32 nt, Homo Sapiens
ggcggagguggcgucccggcgugcagggcccc

SEQ ID NO: 74396 - RNA, 32 nt, Homo Sapiens
gucgaugggacuucucaagaagccauuccuug

SEQ ID NO: 74397 - RNA, 32 nt, Homo Sapiens
gaugagcauguucauuaaaaaacaagucaaau

SEQ ID NO: 74398 - RNA, 32 nt, Homo Sapiens
aauagaagaaggggaguguccgcaaaauggaa

SEQ ID NO: 74399 - RNA, 32 nt, Homo Sapiens
ugguuagugucuauuaaaauagcuuuugauaa

SEQ ID NO: 74400 - RNA, 32 nt, Homo Sapiens
cccccagcccgcguccggcaucggaggagguc

SEQ ID NO: 74401 - RNA, 32 nt, Homo Sapiens
uuguauauaugguuauuuuucuuuccauaaaa

SEQ ID NO: 74402 - RNA, 32 nt, Homo Sapiens
gcaucuacagccccggccggcgccuccucgag

SEQ ID NO: 74403 - RNA, 32 nt, Homo Sapiens
acaggagaggaccuguggauagacuuaguuuu

SEQ ID NO: 74404 - RNA, 32 nt, Homo Sapiens
uugagggaagggggcgucucgucagcuggucc

SEQ ID NO: 74405 - RNA, 32 nt, Homo Sapiens
ccugaaauaccagcagcuggugagauuugacu

SEQ ID NO: 74406 - RNA, 32 nt, Homo Sapiens
gacagggucucacucugucacccaggcuggag

SEQ ID NO: 74407 - RNA, 32 nt, Homo Sapiens
gauagggucuuacucugucacccaggcuggag

SEQ ID NO: 74408 - RNA, 32 nt, Homo Sapiens
gacggggucucgcucugucacccaggcuggag

SEQ ID NO: 74409 - RNA, 32 nt, Homo Sapiens
gagcgcauggggagggaaggcuggggugcagg

SEQ ID NO: 74410 - RNA, 32 nt, Homo Sapiens
acuccaagcugcugugcugggcguggaccagg

SEQ ID NO: 74411 - RNA, 32 nt, Homo Sapiens
cgagguggaccgcacggcugcagaccaccaga

SEQ ID NO: 74412 - RNA, 31 nt, Homo Sapiens
ugguggccaugucgccugcccccagcacucc

SEQ ID NO: 74413 - RNA, 32 nt, Homo Sapiens
cccuccccauucuugucuuacccucugcaaau

SEQ ID NO: 74414 - RNA, 32 nt, Homo Sapiens
agaaaaggggagcacaaggccuuaauggacau

SEQ ID NO: 74415 - RNA, 31 nt, Homo Sapiens
acccggcgcggcugccugcgcgcacgcaggg

SEQ ID NO: 74416 - RNA, 32 nt, Homo Sapiens
aaagaacggugauguaguauggccugacagcu

SEQ ID NO: 74417 - RNA, 32 nt, Homo Sapiens
aguuguggaaaugaguuuguggaaacauuaaa

SEQ ID NO: 74418 - RNA, 32 nt, Homo Sapiens
guugaaagccgacgaaccgacacgcggcagag

SEQ ID NO: 74419 - RNA, 32 nt, Homo Sapiens
caagaaccauuuccaaucuagaggaaagcucc

SEQ ID NO: 74420 - RNA, 32 nt, Homo Sapiens
aaguuggugugaaccaaaauagagucagcuga

SEQ ID NO: 74421 - RNA, 32 nt, Homo Sapiens
ugggacuggccuuugaagcucuggccagggau

SEQ ID NO: 74422 - RNA, 30 nt, Homo Sapiens
aguuugggcagcagguugggucccguguaa

SEQ ID NO: 74423 - RNA, 32 nt, Homo Sapiens
uucggggaaaauaccuggcaugaaacuguagu

SEQ ID NO: 74424 - RNA, 32 nt, Homo Sapiens
augguggggagauaaaauuauacaugugaaau

SEQ ID NO: 74425 - RNA, 31 nt, Homo Sapiens
ggucugugcgguacucucagcuuuggccugc

SEQ ID NO: 74426 - RNA, 32 nt, Homo Sapiens
guuccucucugguggcucuuugggcugguauu

SEQ ID NO: 74427 - RNA, 32 nt, Homo Sapiens
uggcacacaccuguaaucccagcuaccgggga

SEQ ID NO: 74428 - RNA, 32 nt, Homo Sapiens
gccaucuuuccacgccgucacaauggugcgca

SEQ ID NO: 74429 - RNA, 32 nt, Homo Sapiens
aauuuaaaaaucacuggauugcuuuauuauau

SEQ ID NO: 74430 - RNA, 32 nt, Homo Sapiens
cagagugacacccuaaagauccugugacauuu

SEQ ID NO: 74431 - RNA, 32 nt, Homo Sapiens
uaucugucaaaccauuucuguuagaacgaugu

SEQ ID NO: 74432 - RNA, 32 nt, Homo Sapiens
uacaaaugaaguauggagguguguauguuuau

SEQ ID NO: 74433 - RNA, 32 nt, Homo Sapiens
guauuaccaauauagaauacuaacaauuuuac

SEQ ID NO: 74434 - RNA, 32 nt, Homo Sapiens
aauccugcguuugccugggccggcccuggcug

SEQ ID NO: 74435 - RNA, 32 nt, Homo Sapiens
aucgugccaaacuuagucugguuacuaagccu

SEQ ID NO: 74436 - RNA, 32 nt, Homo Sapiens
caaggcaucucaccucuuuucaucuuguuuuc

SEQ ID NO: 74437 - RNA, 32 nt, Homo Sapiens
aaucuuacuauuugaauagaaauguguaugua

SEQ ID NO: 74438 - RNA, 32 nt, Homo Sapiens
ggggucuuuuaaaaauauaaagcuugugauaa

SEQ ID NO: 74439 - RNA, 32 nt, Homo Sapiens
uccugaggauuuuaucaagaaagcagauuugg

SEQ ID NO: 74440 - RNA, 32 nt, Homo Sapiens
cgagcuuuuggacagcucuccagaagcaugaa

SEQ ID NO: 74441 - RNA, 32 nt, Homo Sapiens
aaauauuugugaucuaguuuauugcuuguaaa

SEQ ID NO: 74442 - RNA, 32 nt, Homo Sapiens
auauccagaggcaucuuccucagcaccccuag

SEQ ID NO: 74443 - RNA, 32 nt, Homo Sapiens
ucuuagcacugaccgaccauugccauuucugg

SEQ ID NO: 74444 - RNA, 32 nt, Homo Sapiens
ccccgaccucgcgcacgcccuggcccgcuccc

SEQ ID NO: 74445 - RNA, 32 nt, Homo Sapiens
guguucuggugccagccugccuuggcaaaauu

SEQ ID NO: 74446 - RNA, 30 nt, Homo Sapiens
uuucaagagaagcuuccuuggguuaagaaa

SEQ ID NO: 74447 - RNA, 32 nt, Homo Sapiens
aggccccaggaggaaaccuuggcuucagacuu

SEQ ID NO: 74448 - RNA, 32 nt, Homo Sapiens
gaccucagcagagcuccugggccugcugccug

SEQ ID NO: 74449 - RNA, 32 nt, Homo Sapiens
uggauugagaagaaaacugacaagaguaagcu

SEQ ID NO: 74450 - RNA, 32 nt, Homo Sapiens
ccuauccccuggagcuuggauacugucugcac

SEQ ID NO: 74451 - RNA, 32 nt, Homo Sapiens
ugagcgugcggcggacgacgccggugauuggu

SEQ ID NO: 74452 - RNA, 32 nt, Homo Sapiens
cgggggucgcggguauggccgaggccaggaag

SEQ ID NO: 74453 - RNA, 32 nt, Homo Sapiens
ccagacccaucccuuuauuucagcccaucccu

SEQ ID NO: 74454 - RNA, 32 nt, Homo Sapiens
acauaugcacacucacacugacaagcauacac

SEQ ID NO: 74455 - RNA, 32 nt, Homo Sapiens
gcggcacaggucgggcgcaggauucagccgga

SEQ ID NO: 74456 - RNA, 32 nt, Homo Sapiens
gcauggauuccguggauagcuguugcagucuc

SEQ ID NO: 74457 - RNA, 32 nt, Homo Sapiens
uaagugaugacuacugaugaaauaauguuacu

SEQ ID NO: 74458 - RNA, 32 nt, Homo Sapiens
agaucagcugcaggauuuuaacaggaauguuu

SEQ ID NO: 74459 - RNA, 32 nt, Homo Sapiens
ugucucugguggugcuggggcuggccugcagg

SEQ ID NO: 74460 - RNA, 32 nt, Homo Sapiens
uccccccaacuuuuuuuuuuuaaaccaacaaa

SEQ ID NO: 74461 - RNA, 32 nt, Homo Sapiens
gccuggugucauuuggagagaaugcggggcuc

SEQ ID NO: 74462 - RNA, 32 nt, Homo Sapiens
ggcggcuggaugcguggccaauaaaaagcaga

SEQ ID NO: 74463 - RNA, 32 nt, Homo Sapiens
uaauucacggcccuuccacaguaccuuccaca

SEQ ID NO: 74464 - RNA, 30 nt, Homo Sapiens
caugagucugaagcugcagagguuagaagg

SEQ ID NO: 74465 - RNA, 32 nt, Homo Sapiens
aauuaauuucuuucuuuuuuucuuuuuuuuuu

SEQ ID NO: 74466 - RNA, 32 nt, Homo Sapiens
agaacaaggcggcgcuggaggcgugggucagg

SEQ ID NO: 74467 - RNA, 32 nt, Homo Sapiens
ucuggccucuuccaucguacacuuccugucuc

SEQ ID NO: 74468 - RNA, 32 nt, Homo Sapiens
gagguugcagugagcugagaucgagccacugc

SEQ ID NO: 74469 - RNA, 32 nt, Homo Sapiens
gggccccagaccuguggcuggcugguccgaag

SEQ ID NO: 74470 - RNA, 32 nt, Homo Sapiens
aagaacuuaaaauggguaaaguaagaaauguu

SEQ ID NO: 74471 - RNA, 32 nt, Homo Sapiens
cuuccaucuguggugacuggaaugggacccac

SEQ ID NO: 74472 - RNA, 32 nt, Homo Sapiens
uggaagagaaaaauacuguaaaacguguagug

SEQ ID NO: 74473 - RNA, 32 nt, Homo Sapiens
auaauaaagcuaccauuuaucaagcauuuacc

SEQ ID NO: 74474 - RNA, 32 nt, Homo Sapiens
uacauauugggguucaggguaagauuuuauuu

SEQ ID NO: 74475 - RNA, 32 nt, Homo Sapiens
aaguuuuuauuaugaauuacuaauccaguauu

SEQ ID NO: 74476 - RNA, 32 nt, Homo Sapiens
gaaguggaggaggaggcgcggcggcggcggcg

SEQ ID NO: 74477 - RNA, 32 nt, Homo Sapiens
uccguuugaguuucuuguuuucguuaaauguc

SEQ ID NO: 74478 - RNA, 32 nt, Homo Sapiens
cucagaauacugggcucuauuuuaucaagcgc

SEQ ID NO: 74479 - RNA, 32 nt, Homo Sapiens
agagaugagucaguugcugugcucuuuacuuc

SEQ ID NO: 74480 - RNA, 32 nt, Homo Sapiens
auucgcugugucaucacaucagcuccacuguu

SEQ ID NO: 74481 - RNA, 32 nt, Homo Sapiens
guuuguuccagaaucuguaugauucuauggag

SEQ ID NO: 74482 - RNA, 32 nt, Homo Sapiens
cgccccggagugcccgagccugcgccgccgca

SEQ ID NO: 74483 - RNA, 32 nt, Homo Sapiens
gauuccugagagcagagcucccagcgggcccu

SEQ ID NO: 74484 - RNA, 30 nt, Homo Sapiens
uaaucauaucaccacuauuaggguuuuaua

SEQ ID NO: 74485 - RNA, 32 nt, Homo Sapiens
gauaacacagaaaagaaaguaccaucaaagac

SEQ ID NO: 74486 - RNA, 32 nt, Homo Sapiens
gagaaaagggaagaaaagucgggggacuacgu

SEQ ID NO: 74487 - RNA, 32 nt, Homo Sapiens
ugaagcugcccuccucuucuccccucacacua

SEQ ID NO: 74488 - RNA, 32 nt, Homo Sapiens
caucccaccccgcucugcaggccgcccuucug

SEQ ID NO: 74489 - RNA, 32 nt, Homo Sapiens
ggugggggagggucuuauuuuaucuuaucuuu

SEQ ID NO: 74490 - RNA, 32 nt, Homo Sapiens
uucgacguuugacuagccaucucaagcaacuu

SEQ ID NO: 74491 - RNA, 32 nt, Homo Sapiens
ccuucucggcgauucugcggagggaucuccgu

SEQ ID NO: 74492 - RNA, 32 nt, Homo Sapiens
cucccugccggggcuagccgccuccugccgau

SEQ ID NO: 74493 - RNA, 32 nt, Homo Sapiens
agauaggcuugugguuuuuuuaauuuaaagau

SEQ ID NO: 74494 - RNA, 32 nt, Homo Sapiens
cuuuggccauugucucagccucugccacuucc

SEQ ID NO: 74495 - RNA, 32 nt, Homo Sapiens
ggcggcggugaccgcgagugggucggcaccgu

SEQ ID NO: 74496 - RNA, 30 nt, Homo Sapiens
aggaggagguggcuugaggcaaccauggcg

SEQ ID NO: 74497 - RNA, 32 nt, Homo Sapiens
uucgagggggaagaggagggaagcggccagcu

SEQ ID NO: 74498 - RNA, 32 nt, Homo Sapiens
cagguaaggguggaacaggagggguggggagg

SEQ ID NO: 74499 - RNA, 32 nt, Homo Sapiens
guuguuuuuguucuuuuugaaguuuuauuauu

SEQ ID NO: 74500 - RNA, 32 nt, Homo Sapiens
gcaaaggaggggaaacaaugaaaacaaauaaa

SEQ ID NO: 74501 - RNA, 32 nt, Homo Sapiens
cugucuucugcccucccugagcccacaggguc

SEQ ID NO: 74502 - RNA, 32 nt, Homo Sapiens
ucucuuuaacgauguugcagguauucucaauu

SEQ ID NO: 74503 - RNA, 32 nt, Homo Sapiens
auuugaagauugccuccaucauuuguagggcc

SEQ ID NO: 74504 - RNA, 32 nt, Homo Sapiens
aggauaacacaagcuuaguguuagaucuugua

SEQ ID NO: 74505 - RNA, 32 nt, Homo Sapiens
uaagcauuuuuuucuuuuuuugguucuuugca

SEQ ID NO: 74506 - RNA, 32 nt, Homo Sapiens
uggacugagcgccgccggccaggccgcgggga

SEQ ID NO: 74507 - RNA, 32 nt, Homo Sapiens
auuuucucaaguucuuucuuugagaucucaau

SEQ ID NO: 74508 - RNA, 32 nt, Homo Sapiens
acccgcgccuccucgcgagacccggggcuggg

SEQ ID NO: 74509 - RNA, 32 nt, Homo Sapiens
ucugucucccccaccccacucuguuuuacauc

SEQ ID NO: 74510 - RNA, 32 nt, Homo Sapiens
uggugguguuuacaacgucacuaaucauuaca

SEQ ID NO: 74511 - RNA, 32 nt, Homo Sapiens
cuuugcaaaugaaauaugaaauuuagaggcuc

SEQ ID NO: 74512 - RNA, 32 nt, Homo Sapiens
gccaggcuacaccagggcacccgccucucaaa

SEQ ID NO: 74513 - RNA, 30 nt, Homo Sapiens
uugagagagaagcauugggggugcaagugu

SEQ ID NO: 74514 - RNA, 32 nt, Homo Sapiens
agaauuggccccccauauccacagguuucaca

SEQ ID NO: 74515 - RNA, 32 nt, Homo Sapiens
gauacaggccccaagggaaacggaguaguaga

SEQ ID NO: 74516 - RNA, 32 nt, Homo Sapiens
ccgccccucuucccuucccacccagcugcgcc

SEQ ID NO: 74517 - RNA, 32 nt, Homo Sapiens
cauuuauuugaaaggccaucuagugagagauu

SEQ ID NO: 74518 - RNA, 32 nt, Homo Sapiens
augucacuugggccagaauggaccugcccuuu

SEQ ID NO: 74519 - RNA, 32 nt, Homo Sapiens
acuucuuccacaaugaccacagcaaaugacca

SEQ ID NO: 74520 - RNA, 32 nt, Homo Sapiens
augucuguguccucggaggcugagcuccgcuu

SEQ ID NO: 74521 - RNA, 32 nt, Homo Sapiens
uuagagcaacaucagcaagauuuuaggcagag

SEQ ID NO: 74522 - RNA, 32 nt, Homo Sapiens
gccuuucuuuuaaauuaauuauagacagagag

SEQ ID NO: 74523 - RNA, 32 nt, Homo Sapiens
guuuugcaagcugcaaaggacuguacaaacgc

SEQ ID NO: 74524 - RNA, 32 nt, Homo Sapiens
uaugucaggcccauccugguugucaccaugag

SEQ ID NO: 74525 - RNA, 32 nt, Homo Sapiens
gccggccgcguaucccccggcuaccugggccg

SEQ ID NO: 74526 - RNA, 32 nt, Homo Sapiens
augcccauugccuucagguuugccauggaaag

SEQ ID NO: 74527 - RNA, 32 nt, Homo Sapiens
auagguucaaggaauucuuuaaaccagauucu

SEQ ID NO: 74528 - RNA, 29 nt, Homo Sapiens
acguggguuuaugagugaaacuaauacua

SEQ ID NO: 74529 - RNA, 32 nt, Homo Sapiens
cuuccuacaccuggcacacuggggucugcaca

SEQ ID NO: 74530 - RNA, 32 nt, Homo Sapiens
cuacuguacucccucagcaucagagcaugcau

SEQ ID NO: 74531 - RNA, 32 nt, Homo Sapiens
uacaaaaugcuucuaguccaggaggcacaacc

SEQ ID NO: 74532 - RNA, 32 nt, Homo Sapiens
acuucaaggaggccuuccuucauucucugcuu

SEQ ID NO: 74533 - RNA, 31 nt, Homo Sapiens
caucgguguggcagccaaucuguaccuggac

SEQ ID NO: 74534 - RNA, 32 nt, Homo Sapiens
cucugcccuggacuuucccaugagccuccugg

SEQ ID NO: 74535 - RNA, 32 nt, Homo Sapiens
acccaaacuucucaguaaccacuuccagagaa

SEQ ID NO: 74536 - RNA, 32 nt, Homo Sapiens
agucccuguuucccuuuuuuccuuuucaccca

SEQ ID NO: 74537 - RNA, 32 nt, Homo Sapiens
uagagaugcaaauuauuaaguuguuuccaaua

SEQ ID NO: 74538 - RNA, 32 nt, Homo Sapiens
accucuuuccugugacucuccucccucccggg

SEQ ID NO: 74539 - RNA, 32 nt, Homo Sapiens
cgugcagguagccggccggccgggggucgcgg

SEQ ID NO: 74540 - RNA, 32 nt, Homo Sapiens
uuaaagacuaaugcuuugauuggauuugccag

SEQ ID NO: 74541 - RNA, 32 nt, Homo Sapiens
auauauucacuuuaauauuuauuaaaggaaag

SEQ ID NO: 74542 - RNA, 32 nt, Homo Sapiens
gugugaaaugacugaguacaaacugguggugg

SEQ ID NO: 74543 - RNA, 32 nt, Homo Sapiens
cucgggcccagcuguggcugcugccggggagc

SEQ ID NO: 74544 - RNA, 32 nt, Homo Sapiens
cuuccacccucgccgcgccccguggggaauag

SEQ ID NO: 74545 - RNA, 32 nt, Homo Sapiens
acaaacuaauauauuuuuuaauguuuacguca

SEQ ID NO: 74546 - RNA, 32 nt, Homo Sapiens
cugcuucugagccucuggagaaugggagaguu

SEQ ID NO: 74547 - RNA, 32 nt, Homo Sapiens
ugaguaggggguagaagacagagcgggugucu

SEQ ID NO: 74548 - RNA, 32 nt, Homo Sapiens
ggcaaggccagcgcccggggcuucugaaccga

SEQ ID NO: 74549 - RNA, 32 nt, Homo Sapiens
gcucauccucugcccuuacacccaugacugag

SEQ ID NO: 74550 - RNA, 32 nt, Homo Sapiens
gcuggucuuguggcacacacguggcaggaugu

SEQ ID NO: 74551 - RNA, 32 nt, Homo Sapiens
cauccugugugcggcccgcauggaggguuugg

SEQ ID NO: 74552 - RNA, 32 nt, Homo Sapiens
cauaaaugaagcugcuuuauggagcacgagca

SEQ ID NO: 74553 - RNA, 32 nt, Homo Sapiens
auauauacuaucuauuuuauugguuuauuuug

SEQ ID NO: 74554 - RNA, 32 nt, Homo Sapiens
ugcuuagaauaaaacuugcuacuagcaaaaga

SEQ ID NO: 74555 - RNA, 32 nt, Homo Sapiens
ccuggcccaccugacuuggcuuucucauccuu

SEQ ID NO: 74556 - RNA, 32 nt, Homo Sapiens
gcugaguugcuguccaaaucaguggucccuag

SEQ ID NO: 74557 - RNA, 32 nt, Homo Sapiens
uuaaucaaccccagcccauguccccuguucac

SEQ ID NO: 74558 - RNA, 32 nt, Homo Sapiens
gggaggcagggguccugcagguccuggugggu

SEQ ID NO: 74559 - RNA, 32 nt, Homo Sapiens
cuggugauccugagagcacacgauucccaaca

SEQ ID NO: 74560 - RNA, 32 nt, Homo Sapiens
cagcuugaguguccguguguucugcaugugca

SEQ ID NO: 74561 - RNA, 32 nt, Homo Sapiens
uuccuguggaaugacugucacacaucagagcu

SEQ ID NO: 74562 - RNA, 32 nt, Homo Sapiens
gacccaacccugccucccugggcuaggcucug

SEQ ID NO: 74563 - RNA, 32 nt, Homo Sapiens
uaugaagggcuuuucucucucagaguugcugu

SEQ ID NO: 74564 - RNA, 32 nt, Homo Sapiens
agaaaagccaucuccaguggggcagggaagcc

SEQ ID NO: 74565 - RNA, 25 nt, Homo Sapiens
augcucccuccuccucgauacagaa

SEQ ID NO: 74566 - RNA, 30 nt, Homo Sapiens
acacuugacaaauaaacuuauuuaccagua

SEQ ID NO: 74567 - RNA, 32 nt, Homo Sapiens
acagcuuugucaaacuacaauuuacaugccgu

SEQ ID NO: 74568 - RNA, 32 nt, Homo Sapiens
gaugcuguaugaucuuuuuuuuuuuuuuaguu

SEQ ID NO: 74569 - RNA, 32 nt, Homo Sapiens
uuuggagucugcuuuagugaaggagaccaaag

SEQ ID NO: 74570 - RNA, 32 nt, Homo Sapiens
uucuagcgcauggccugguuagaggcugguuu

SEQ ID NO: 74571 - RNA, 32 nt, Homo Sapiens
aggcucucaucuuuuccagguagaagguggag

SEQ ID NO: 74572 - RNA, 32 nt, Homo Sapiens
gcgggcaccgcaggagcuccgcgcggcugcag

SEQ ID NO: 74573 - RNA, 31 nt, Homo Sapiens
gccccuccggaccuugcuccccgcgccgcgg

SEQ ID NO: 74574 - RNA, 32 nt, Homo Sapiens
gcaggcaggccuugcuggggccccagucaagu

SEQ ID NO: 74575 - RNA, 32 nt, Homo Sapiens
gauuucuugcucauuuucagaauaacuuucca

SEQ ID NO: 74576 - RNA, 32 nt, Homo Sapiens
aggccccuggggaaugagaguuugguucccgg

SEQ ID NO: 74577 - RNA, 31 nt, Homo Sapiens
gagggggcgacuugccugccccugaagcccu

SEQ ID NO: 74578 - RNA, 32 nt, Homo Sapiens
augcuuccugcauuguguaaggucuugagaca

SEQ ID NO: 74579 - RNA, 32 nt, Homo Sapiens
uugccuggaagcugcguuaggagcgagcggcg

SEQ ID NO: 74580 - RNA, 32 nt, Homo Sapiens
cuagugggcucuggaagaaaacacauugaauu

SEQ ID NO: 74581 - RNA, 32 nt, Homo Sapiens
agcacgaccucuaugcagacaagugaacugua

SEQ ID NO: 74582 - RNA, 32 nt, Homo Sapiens
cucaggucaggcccuccccuccccuccccucc

SEQ ID NO: 74583 - RNA, 32 nt, Homo Sapiens
guggauauucccaaaacaaguaggaaaggugu

SEQ ID NO: 74584 - RNA, 32 nt, Homo Sapiens
cuaauaaauagugacugaaccaauuuaugcag

SEQ ID NO: 74585 - RNA, 32 nt, Homo Sapiens
uccuaaccuuuagguuuagggauugacugggu

SEQ ID NO: 74586 - RNA, 32 nt, Homo Sapiens
ccucaucucacugcaucccccaucacccccua

SEQ ID NO: 74587 - RNA, 32 nt, Homo Sapiens
ccagccggcgaucacgcagagcugaccccgca

SEQ ID NO: 74588 - RNA, 31 nt, Homo Sapiens
auaaugaaauaaaaacuacaaauuucacaac

SEQ ID NO: 74589 - RNA, 32 nt, Homo Sapiens
caugccauguauuagcccaaucuuacagauug

SEQ ID NO: 74590 - RNA, 32 nt, Homo Sapiens
ucaguccccauccuccuccccucagcccccag

SEQ ID NO: 74591 - RNA, 32 nt, Homo Sapiens
acuagcagcugcagucaacaguucaaagaagu

SEQ ID NO: 74592 - RNA, 32 nt, Homo Sapiens
acagcuaagcaaaagacgagaauagaaaacac

SEQ ID NO: 74593 - RNA, 32 nt, Homo Sapiens
ccuauuuaucauaaguuaugccucugacaguc

SEQ ID NO: 74594 - RNA, 32 nt, Homo Sapiens
cccccugcccggcuccgcggcgcggaggaugg

SEQ ID NO: 74595 - RNA, 32 nt, Homo Sapiens
gcuggaggcagacaggcucaaaaccaggcccc

SEQ ID NO: 74596 - RNA, 32 nt, Homo Sapiens
uuucacacucgcggccggcgcgcgcgggcacg

SEQ ID NO: 74597 - RNA, 32 nt, Homo Sapiens
gguuguaaauuuuuuuuuuuuacuugaaauua

SEQ ID NO: 74598 - RNA, 32 nt, Homo Sapiens
auccaagccaaggacgaggucaucaucaagcu

SEQ ID NO: 74599 - RNA, 32 nt, Homo Sapiens
uggaucugcgucccgacguagcuggcgccccc

SEQ ID NO: 74600 - RNA, 32 nt, Homo Sapiens
cuuuuguaacugagauaagaccaagaggauaa

SEQ ID NO: 74601 - RNA, 32 nt, Homo Sapiens
caucacagacuguauuugauugauucgagucu

SEQ ID NO: 74602 - RNA, 32 nt, Homo Sapiens
cuuguucagccucagcugggaacauguguacu

SEQ ID NO: 74603 - RNA, 32 nt, Homo Sapiens
gcaccaggcagacaacagacauggaauucuua

SEQ ID NO: 74604 - RNA, 32 nt, Homo Sapiens
ucagguggggcuuuugauaggaagugaguguu

SEQ ID NO: 74605 - RNA, 32 nt, Homo Sapiens
ggguuugcuccaugguggccugggccacgcag

SEQ ID NO: 74606 - RNA, 32 nt, Homo Sapiens
aaaaucuggcuucuaacuuucuguauguauag

SEQ ID NO: 74607 - RNA, 32 nt, Homo Sapiens
cuuaggggaacaaacugaagaaggguggagag

SEQ ID NO: 74608 - RNA, 32 nt, Homo Sapiens
acucuggaugcacuuugcugugugggaugaac

SEQ ID NO: 74609 - RNA, 32 nt, Homo Sapiens
acucgccagccccgcaccccaacagcuugcgc

SEQ ID NO: 74610 - RNA, 32 nt, Homo Sapiens
aacuuuggguuaugucucugguagcagagauu

SEQ ID NO: 74611 - RNA, 32 nt, Homo Sapiens
cuuccuucucagggucuccccagcccaguccc

SEQ ID NO: 74612 - RNA, 32 nt, Homo Sapiens
uuuuuguagaaauucuaaugcaugauuguaau

SEQ ID NO: 74613 - RNA, 32 nt, Homo Sapiens
ccagauguauaaagcaccugcaugcucagacu

SEQ ID NO: 74614 - RNA, 32 nt, Homo Sapiens
agcgccuugcccagaccuccccugcccaccug

SEQ ID NO: 74615 - RNA, 31 nt, Homo Sapiens
uggugugaacucacucucagcugccaaguga

SEQ ID NO: 74616 - RNA, 32 nt, Homo Sapiens
ucacugccgcagcagcuuggggugcaaggcgg

SEQ ID NO: 74617 - RNA, 28 nt, Homo Sapiens
acguacuuugugaccaggauggugccga

SEQ ID NO: 74618 - RNA, 32 nt, Homo Sapiens
uuucuaauauauaugcaccaauauauaugccu

SEQ ID NO: 74619 - RNA, 32 nt, Homo Sapiens
ccgacccccucgcgccuucugcagacuccgug

SEQ ID NO: 74620 - RNA, 27 nt, Homo Sapiens
accucccccgacuucagcccuuccuaa

SEQ ID NO: 74621 - RNA, 32 nt, Homo Sapiens
ccgcgccuccucggccgccugucgggcaugaa

SEQ ID NO: 74622 - RNA, 32 nt, Homo Sapiens
ggaugggggcuggccucuggcucucauggggu

SEQ ID NO: 74623 - RNA, 32 nt, Homo Sapiens
acccucccaaccccaagagcccagccccaugg

SEQ ID NO: 74624 - RNA, 32 nt, Homo Sapiens
gcgaagcggccugcgcccacggagcgcgcgac

SEQ ID NO: 74625 - RNA, 32 nt, Homo Sapiens
guaaggcaaggggaaagggaucaugagaaagg

SEQ ID NO: 74626 - RNA, 32 nt, Homo Sapiens
cggacuccgggacccagggcgccgggagccgg

SEQ ID NO: 74627 - RNA, 32 nt, Homo Sapiens
ucucguauguaaauaaaaggcaauuugguaaa

SEQ ID NO: 74628 - RNA, 32 nt, Homo Sapiens
aggggccggccaauggugaggcugggaaugcu

SEQ ID NO: 74629 - RNA, 32 nt, Homo Sapiens
agaaggugguggccguggcagccgcugggguc

SEQ ID NO: 74630 - RNA, 32 nt, Homo Sapiens
agccuggccuucagcccucacagaugcccagc

SEQ ID NO: 74631 - RNA, 32 nt, Homo Sapiens
guuaaauuuugugauggaugugaauuccucua

SEQ ID NO: 74632 - RNA, 32 nt, Homo Sapiens
uaaaacccaaaacuguucuuugaaaagguggg

SEQ ID NO: 74633 - RNA, 32 nt, Homo Sapiens
gccucucccggcugugggggccccacugagua

SEQ ID NO: 74634 - RNA, 32 nt, Homo Sapiens
auggguuuuuauuuuauuuccuuuuuuaaaau

SEQ ID NO: 74635 - RNA, 32 nt, Homo Sapiens
agaacguugacuuuuuuccaggauaaauuauc

SEQ ID NO: 74636 - RNA, 32 nt, Homo Sapiens
gagccgggccgcggcgccgagucgaacgggga

SEQ ID NO: 74637 - RNA, 32 nt, Homo Sapiens
uggcacccgccacgcccaccaagccccaaagg

SEQ ID NO: 74638 - RNA, 32 nt, Homo Sapiens
gaucuugaccuugaacuggacucuguaggaag

SEQ ID NO: 74639 - RNA, 32 nt, Homo Sapiens
uuugaaauguuuaugaaagaaauuccuucacc

SEQ ID NO: 74640 - RNA, 32 nt, Homo Sapiens
auacccuuugaaaaaguauaaauaaaaugagc

SEQ ID NO: 74641 - RNA, 32 nt, Homo Sapiens
aauuguccgggugugguggcgggcgccuguag

SEQ ID NO: 74642 - RNA, 32 nt, Homo Sapiens
ggaucugcccuucuccacuccucucuuggauc

SEQ ID NO: 74643 - RNA, 32 nt, Homo Sapiens
ggagugggggagagagaggagaccaggacagc

SEQ ID NO: 74644 - RNA, 32 nt, Homo Sapiens
cagguggagagcccuguucaccugauaggguc

SEQ ID NO: 74645 - RNA, 32 nt, Homo Sapiens
aaccucucuucuaucaucaccauaaugggaaa

SEQ ID NO: 74646 - RNA, 32 nt, Homo Sapiens
gaggaguuuucacuuuacuacagugauauaaa

SEQ ID NO: 74647 - RNA, 32 nt, Homo Sapiens
ugcacuggucugacccaggacuuuggagccac

SEQ ID NO: 74648 - RNA, 32 nt, Homo Sapiens
uuggacgaccaugacuacggguccuggggaaa

SEQ ID NO: 74649 - RNA, 32 nt, Homo Sapiens
uuccagguagggccagcucacaagcccaggcu

SEQ ID NO: 74650 - RNA, 32 nt, Homo Sapiens
ugguacccacauaguuugcagcucucuugaac

SEQ ID NO: 74651 - RNA, 32 nt, Homo Sapiens
cacacaccuguugucagcaucgagccaacacc

SEQ ID NO: 74652 - RNA, 32 nt, Homo Sapiens
aagaaguugcuguuguaacuaaaaaauuagua

SEQ ID NO: 74653 - RNA, 32 nt, Homo Sapiens
accugcaaacccaaaagcuuaugggagcuggc

SEQ ID NO: 74654 - RNA, 32 nt, Homo Sapiens
cgcuacugcgccgacgcccgcggcgagcugga

SEQ ID NO: 74655 - RNA, 32 nt, Homo Sapiens
cuuggcccgaacuuacgcccaacucuugacug

SEQ ID NO: 74656 - RNA, 32 nt, Homo Sapiens
ccgagggagcagggggcgcccguggaacuggc

SEQ ID NO: 74657 - RNA, 32 nt, Homo Sapiens
gaggcgcgccuggcggaucugaguguguugcc

SEQ ID NO: 74658 - RNA, 32 nt, Homo Sapiens
aauuguuagcuuguaaauacugagagauuggu

SEQ ID NO: 74659 - RNA, 32 nt, Homo Sapiens
cauuaacaaaucguccuuguccugaggggccc

SEQ ID NO: 74660 - RNA, 32 nt, Homo Sapiens
gcgcucgcaccgccccgcucuccagccaaggu

SEQ ID NO: 74661 - RNA, 32 nt, Homo Sapiens
auucucuacaaccuaaaaaauuccuaggugcu

SEQ ID NO: 74662 - RNA, 32 nt, Homo Sapiens
gccagucugggaacugguccuuauuugaacac

SEQ ID NO: 74663 - RNA, 32 nt, Homo Sapiens
ugccucugcggccuagcgcccggcgccgccug

SEQ ID NO: 74664 - RNA, 32 nt, Homo Sapiens
agcauauauaaaacaaaacaaacaaccugcca

SEQ ID NO: 74665 - RNA, 32 nt, Homo Sapiens
uagagccauccgucuauauagcaagaagcaga

SEQ ID NO: 74666 - RNA, 32 nt, Homo Sapiens
gagccucuuuugccuacacaccggcagugucc

SEQ ID NO: 74667 - RNA, 32 nt, Homo Sapiens
gcggggcucucgggcaccacguguaggugaug

SEQ ID NO: 74668 - RNA, 32 nt, Homo Sapiens
ggagucuugucucucugccacccaggacauca

SEQ ID NO: 74669 - RNA, 32 nt, Homo Sapiens
aguguccaugcauauacauacaugauacacau

SEQ ID NO: 74670 - RNA, 29 nt, Homo Sapiens
ggcggugucucguagcgggcggcagcgcc

SEQ ID NO: 74671 - RNA, 32 nt, Homo Sapiens
caacccacccucgggcuguucuuggguuugga

SEQ ID NO: 74672 - RNA, 32 nt, Homo Sapiens
cgguggcucaugccuguaaucccagcacugua

SEQ ID NO: 74673 - RNA, 32 nt, Homo Sapiens
acgcuucagcuacuaucuaaucaucacccgaa

SEQ ID NO: 74674 - RNA, 32 nt, Homo Sapiens
gaagagaaaaauuuuggucauguuuaugauuu

SEQ ID NO: 74675 - RNA, 32 nt, Homo Sapiens
aaggugagggaucgggagugauggagaugcau

SEQ ID NO: 74676 - RNA, 32 nt, Homo Sapiens
uucugaggucucuucucucaucuagcacugag

SEQ ID NO: 74677 - RNA, 32 nt, Homo Sapiens
guugcccuguuugaagggaaaagggaugaugg

SEQ ID NO: 74678 - RNA, 32 nt, Homo Sapiens
gggcggagccugagcuaggggguguggccugg

SEQ ID NO: 74679 - RNA, 32 nt, Homo Sapiens
guucugguugucauugaauugggauaaacaga

SEQ ID NO: 74680 - RNA, 32 nt, Homo Sapiens
ugacucaggaccagcucuggagucuccagccc

SEQ ID NO: 74681 - RNA, 32 nt, Homo Sapiens
aaaucacuaauaaaaaauuugcugguuuuaug

SEQ ID NO: 74682 - RNA, 32 nt, Homo Sapiens
gcaguaaauauuugcaagaaaucccacucauc

SEQ ID NO: 74683 - RNA, 32 nt, Homo Sapiens
uuuaagaaagaagagaagaaaacuaguaucuc

SEQ ID NO: 74684 - RNA, 32 nt, Homo Sapiens
cagcagaccaaggagcuggaucuccugcuauc

SEQ ID NO: 74685 - RNA, 32 nt, Homo Sapiens
gaggccaacgcggguggauugcuugagcccag

SEQ ID NO: 74686 - RNA, 32 nt, Homo Sapiens
guugggcgcugaggcgcgagaggaggggaugg

SEQ ID NO: 74687 - RNA, 32 nt, Homo Sapiens
ucauuauguuuguggagugcugauugauucac

SEQ ID NO: 74688 - RNA, 32 nt, Homo Sapiens
gaucagcacagcccggcccgcggccccggcgg

SEQ ID NO: 74689 - RNA, 32 nt, Homo Sapiens
gucgaauuacuaucuauuuaucuuauaucgua

SEQ ID NO: 74690 - RNA, 32 nt, Homo Sapiens
acggcaaguucgggcgggacggcggccgccgc

SEQ ID NO: 74691 - RNA, 32 nt, Homo Sapiens
uuucccucuuucuuauaauacucuguuguacu

SEQ ID NO: 74692 - RNA, 32 nt, Homo Sapiens
ugagagggcggcggcgggagcggagcgggacg

SEQ ID NO: 74693 - RNA, 32 nt, Homo Sapiens
gccugacaugagcccuugcgggccccucaacc

SEQ ID NO: 74694 - RNA, 32 nt, Homo Sapiens
uacucaaaaauauuuaaaacuguauugauacc

SEQ ID NO: 74695 - RNA, 32 nt, Homo Sapiens
caguuucuuuucuagccaaucaucucugaaga

SEQ ID NO: 74696 - RNA, 32 nt, Homo Sapiens
uugaauuuauagauuaaucugguaaaccaugu

SEQ ID NO: 74697 - RNA, 32 nt, Homo Sapiens
uucauucgucauauguuugugauagggauguu

SEQ ID NO: 74698 - RNA, 32 nt, Homo Sapiens
aagcagggcccagcccuuggagaagccuucag

SEQ ID NO: 74699 - RNA, 32 nt, Homo Sapiens
cuuggcugcucguagcgccgggccuucucucc

SEQ ID NO: 74700 - RNA, 32 nt, Homo Sapiens
uauaaucucauauuuuaacauggguccucuau

SEQ ID NO: 74701 - RNA, 32 nt, Homo Sapiens
acggccuccuccugcgcacgcgcgccgccacc

SEQ ID NO: 74702 - RNA, 32 nt, Homo Sapiens
uuucugaucccgggcugcguucggaccccugu

SEQ ID NO: 74703 - RNA, 32 nt, Homo Sapiens
cuguccuaccaguuuucuuuuacagauucuca

SEQ ID NO: 74704 - RNA, 27 nt, Homo Sapiens
ugauggcugcgguguuucugguaacgc

SEQ ID NO: 74705 - RNA, 32 nt, Homo Sapiens
uccugucccccaggaaccucacagggguauca

SEQ ID NO: 74706 - RNA, 32 nt, Homo Sapiens
uccucuucagaauugagcuggacacauuuggc

SEQ ID NO: 74707 - RNA, 32 nt, Homo Sapiens
aacaugagauaaaguuguauacucuacuuuca

SEQ ID NO: 74708 - RNA, 32 nt, Homo Sapiens
gcaagcuuuucuucuuuuuuuaaacucuuuuc

SEQ ID NO: 74709 - RNA, 32 nt, Homo Sapiens
uaagggcaagaucgaaacacggcacguggcug

SEQ ID NO: 74710 - RNA, 32 nt, Homo Sapiens
ugauaacaggacagcucugacauuguuuuugu

SEQ ID NO: 74711 - RNA, 32 nt, Homo Sapiens
uuuugaggacaguugggcuaugugucacagcu

SEQ ID NO: 74712 - RNA, 32 nt, Homo Sapiens
gccguaagaucaguuggauauuaaaccaucaa

SEQ ID NO: 74713 - RNA, 32 nt, Homo Sapiens
aaauuagcuggguauguuggugcaggcuugca

SEQ ID NO: 74714 - RNA, 32 nt, Homo Sapiens
uuaggacuacagacguuuaucaucucacaguu

SEQ ID NO: 74715 - RNA, 32 nt, Homo Sapiens
gaguagcagaauccuguuuugcuucaucaauc

SEQ ID NO: 74716 - RNA, 32 nt, Homo Sapiens
acagcugucauggcguccaaggcgcuggcugc

SEQ ID NO: 74717 - RNA, 32 nt, Homo Sapiens
auagaccucgguuuuucuggcuucaacccuug

SEQ ID NO: 74718 - RNA, 32 nt, Homo Sapiens
ggggaggacaggucgcagcuuggcuauggaag

SEQ ID NO: 74719 - RNA, 32 nt, Homo Sapiens
gcaggggcucugcguucugcucugggccgggc

SEQ ID NO: 74720 - RNA, 32 nt, Homo Sapiens
cagucaggccccagccccguuucuuaagaaac

SEQ ID NO: 74721 - RNA, 32 nt, Homo Sapiens
uuauuugugaaugaaguaaucucuucauugua

SEQ ID NO: 74722 - RNA, 32 nt, Homo Sapiens
cuaguuuaauagacgugcuaaauaucacuguu

SEQ ID NO: 74723 - RNA, 32 nt, Homo Sapiens
gggccccgacagcuugccguguuuccugugcc

SEQ ID NO: 74724 - RNA, 32 nt, Homo Sapiens
uuacaggcgugaagcaccacgcccagccugaa

SEQ ID NO: 74725 - RNA, 32 nt, Homo Sapiens
acugugggccgcaacccuguggcuguugagac

SEQ ID NO: 74726 - RNA, 32 nt, Homo Sapiens
guaucugcaaucaguuacgauacagaaauaac

SEQ ID NO: 74727 - RNA, 32 nt, Homo Sapiens
aucuuuuaaauuaugccacuacaggauguauc

SEQ ID NO: 74728 - RNA, 32 nt, Homo Sapiens
gugugguagcaggugccuguaaucacagcuac

SEQ ID NO: 74729 - RNA, 32 nt, Homo Sapiens
uugcccggugcgcgggcggggaggacggcggg

SEQ ID NO: 74730 - RNA, 32 nt, Homo Sapiens
cguuuaauuuuuuguauuuuuuguagagacag

SEQ ID NO: 74731 - RNA, 32 nt, Homo Sapiens
ccugccacuccagcccccuugagcugggaacu

SEQ ID NO: 74732 - RNA, 32 nt, Homo Sapiens
uguucugggggcacuccaggauucuuggacau

SEQ ID NO: 74733 - RNA, 32 nt, Homo Sapiens
uuaaugguuucuagauuuuucuuggaaagaua

SEQ ID NO: 74734 - RNA, 31 nt, Homo Sapiens
gcgcagcgagccuagccuccccgcgcccugg

SEQ ID NO: 74735 - RNA, 32 nt, Homo Sapiens
cacuuaucuccuuuuccuacuauacauuuagg

SEQ ID NO: 74736 - RNA, 32 nt, Homo Sapiens
ccuagaugagagagauagagagugaguacaug

SEQ ID NO: 74737 - RNA, 32 nt, Homo Sapiens
ucucagggacuacaacagcugcaccgcuguga

SEQ ID NO: 74738 - RNA, 32 nt, Homo Sapiens
gagagaguggggcugggcaggggucugcggcc

SEQ ID NO: 74739 - RNA, 32 nt, Homo Sapiens
cgcugccccuggagaugcucacauauauucug

SEQ ID NO: 74740 - RNA, 32 nt, Homo Sapiens
ggggggaauugucagaggcauuugaaucaaag

SEQ ID NO: 74741 - RNA, 32 nt, Homo Sapiens
aucaucauggagaucuuggagaauuaucugag

SEQ ID NO: 74742 - RNA, 32 nt, Homo Sapiens
acauacauauauauuuuugggggggggcggac

SEQ ID NO: 74743 - RNA, 32 nt, Homo Sapiens
ggguccugugggugggggacuacugcgcaaug

SEQ ID NO: 74744 - RNA, 32 nt, Homo Sapiens
guucccaugcuguuguguguugcuuuguaugu

SEQ ID NO: 74745 - RNA, 32 nt, Homo Sapiens
aaacaaauauaaaaccuguuucuguuuaugaa

SEQ ID NO: 74746 - RNA, 32 nt, Homo Sapiens
uugcaccacugugcuugguuuguacuuuuuua

SEQ ID NO: 74747 - RNA, 32 nt, Homo Sapiens
gaggcuucuccgccagccuccucuggacggca

SEQ ID NO: 74748 - RNA, 32 nt, Homo Sapiens
gugguuggaaauuuuuuuuuuaaucucuuuuu

SEQ ID NO: 74749 - RNA, 32 nt, Homo Sapiens
guauucuccacauuuuaaauguuuuauauuag

SEQ ID NO: 74750 - RNA, 32 nt, Homo Sapiens
gcucuggggaggcagcgcuggcggcggggcug

SEQ ID NO: 74751 - RNA, 27 nt, Homo Sapiens
aacuuuuguuaauucucuuaugaaguu

SEQ ID NO: 74752 - RNA, 32 nt, Homo Sapiens
uugcucagaaaagacucagugagaaugcauuu

SEQ ID NO: 74753 - RNA, 32 nt, Homo Sapiens
ccuuauuaaguccacguuuucuuucuuuuccu

SEQ ID NO: 74754 - RNA, 32 nt, Homo Sapiens
ccagcugccugccuucagcaagaucgggggca

SEQ ID NO: 74755 - RNA, 32 nt, Homo Sapiens
ccugcgcgcuggccgccugcgcgcugccagcc

SEQ ID NO: 74756 - RNA, 32 nt, Homo Sapiens
cugugucugcccaagcuccucucagaguccag

SEQ ID NO: 74757 - RNA, 32 nt, Homo Sapiens
ccauuuugaggaagaggugauggcggcaggca

SEQ ID NO: 74758 - RNA, 32 nt, Homo Sapiens
uucauccacuugcuccucccucuacccucggc

SEQ ID NO: 74759 - RNA, 32 nt, Homo Sapiens
uauuuuuucuaaaauuucuuaacuauugucug

SEQ ID NO: 74760 - RNA, 32 nt, Homo Sapiens
aauaguggugccucucccauguguguucacau

SEQ ID NO: 74761 - RNA, 32 nt, Homo Sapiens
caguuagaaaucagccacaauaaacaacaugg

SEQ ID NO: 74762 - RNA, 32 nt, Homo Sapiens
uacgagcgccuccagcagcuggagcucuggaa

SEQ ID NO: 74763 - RNA, 32 nt, Homo Sapiens
uuuucuuuucuuuuucaagauggagucucaau

SEQ ID NO: 74764 - RNA, 32 nt, Homo Sapiens
gcacugauccugaccuuuuggccugaggaugg

SEQ ID NO: 74765 - RNA, 32 nt, Homo Sapiens
auugaaguaaauguuucuuuuauguugcagau

SEQ ID NO: 74766 - RNA, 31 nt, Homo Sapiens
caugagcccuggggagcuccaaggcugcagc

SEQ ID NO: 74767 - RNA, 32 nt, Homo Sapiens
acuuuuguuuuacagcucaguggcauuaggua

SEQ ID NO: 74768 - RNA, 32 nt, Homo Sapiens
uuacacugccagcaguuccccaggccucuucc

SEQ ID NO: 74769 - RNA, 32 nt, Homo Sapiens
cccacaaacugggugccguaaggugggaggug

SEQ ID NO: 74770 - RNA, 32 nt, Homo Sapiens
uaccuaugcacuuguggaaugagagaaccgag

SEQ ID NO: 74771 - RNA, 32 nt, Homo Sapiens
caccugagagucccugggguccagucauugcu

SEQ ID NO: 74772 - RNA, 32 nt, Homo Sapiens
uuuuuaauccuccauguugaggacauuucauu

SEQ ID NO: 74773 - RNA, 32 nt, Homo Sapiens
acaucuccccggccauuucucaucuaccguca

SEQ ID NO: 74774 - RNA, 32 nt, Homo Sapiens
uaagaggaacacagcagcuguuccuggcugug

SEQ ID NO: 74775 - RNA, 32 nt, Homo Sapiens
ugcaccuccgcgggcugacugggccacagccc

SEQ ID NO: 74776 - RNA, 32 nt, Homo Sapiens
ugagcugacuccaugaagugguggaguggcag

SEQ ID NO: 74777 - RNA, 32 nt, Homo Sapiens
acacauucaaggauguacuaagcacuacaggc

SEQ ID NO: 74778 - RNA, 32 nt, Homo Sapiens
ugaaggguucaaaguaagaaauacuaugccau

SEQ ID NO: 74779 - RNA, 32 nt, Homo Sapiens
ucucuuaaacucuuuugaagcuaugcugcuaa

SEQ ID NO: 74780 - RNA, 32 nt, Homo Sapiens
ucuuaucaccuggccugccuguggcacgaauc

SEQ ID NO: 74781 - RNA, 32 nt, Homo Sapiens
gaaaugucauauuuuugaguuuuguaauggaa

SEQ ID NO: 74782 - RNA, 32 nt, Homo Sapiens
auggaccggccgggguucguggcagcgcuggu

SEQ ID NO: 74783 - RNA, 32 nt, Homo Sapiens
caggucgcuucucgggaguucuugguguugga

SEQ ID NO: 74784 - RNA, 32 nt, Homo Sapiens
ccuucucccuccccagggccacuuguugaagu

SEQ ID NO: 74785 - RNA, 32 nt, Homo Sapiens
gacuccucaauccaucugccuguugcacuuuu

SEQ ID NO: 74786 - RNA, 32 nt, Homo Sapiens
ugaaugggauauaaaauacguaaucagcacuu

SEQ ID NO: 74787 - RNA, 32 nt, Homo Sapiens
gguccucggagacacgcggcgguguccugugu

SEQ ID NO: 74788 - RNA, 32 nt, Homo Sapiens
aagugcugccagcuuugcugcgagcccuccgg

SEQ ID NO: 74789 - RNA, 32 nt, Homo Sapiens
aaucagggagcucuuaacccaguuugaaacgu

SEQ ID NO: 74790 - RNA, 32 nt, Homo Sapiens
ggcaauuuucuuuucuaucaguuuguauauua

SEQ ID NO: 74791 - RNA, 32 nt, Homo Sapiens
guucagaaaaaguuaaaaguauguuuucuaau

SEQ ID NO: 74792 - RNA, 32 nt, Homo Sapiens
auuacacauaauuuauacuggacagaaauccu

SEQ ID NO: 74793 - RNA, 32 nt, Homo Sapiens
gggagccagcuucuccuaaaccacguggaucu

SEQ ID NO: 74794 - RNA, 32 nt, Homo Sapiens
uccucgcccugggcugccccgacugggucugg

SEQ ID NO: 74795 - RNA, 32 nt, Homo Sapiens
uuguggggggcgccuccuggggugcacgauuc

SEQ ID NO: 74796 - RNA, 32 nt, Homo Sapiens
ugaggaagggaaagguuuuucuuguagggaac

SEQ ID NO: 74797 - RNA, 30 nt, Homo Sapiens
agccuuggguggugguggauaugccaucag

SEQ ID NO: 74798 - RNA, 32 nt, Homo Sapiens
caccaugcugacagaaggcugucuuugugagg

SEQ ID NO: 74799 - RNA, 32 nt, Homo Sapiens
guguucaauuuugguuuuucauuuucaaagcu

SEQ ID NO: 74800 - RNA, 32 nt, Homo Sapiens
cauguuagugauuuucuucauguguggguccc

SEQ ID NO: 74801 - RNA, 32 nt, Homo Sapiens
acuccggaaagcuuucuguuuuuacuggaaac

SEQ ID NO: 74802 - RNA, 32 nt, Homo Sapiens
cuccugaaaaagaagaagguaauucuaaccca

SEQ ID NO: 74803 - RNA, 32 nt, Homo Sapiens
ggagaggccggcggcucuggaaccacaagauu

SEQ ID NO: 74804 - RNA, 32 nt, Homo Sapiens
gcucuuuuauuuuauuuuuuuaguuuuauuuu

SEQ ID NO: 74805 - RNA, 32 nt, Homo Sapiens
cgggccgcgccgggcaagaagauggcgggauc

SEQ ID NO: 74806 - RNA, 32 nt, Homo Sapiens
agcagauccuggagcugcuggugcuggagcag

SEQ ID NO: 74807 - RNA, 32 nt, Homo Sapiens
uagacuuuuaucauaccuguaaguuaaaauac

SEQ ID NO: 74808 - RNA, 32 nt, Homo Sapiens
uggaugaaauuuggauagagaaugaggaagac

SEQ ID NO: 74809 - RNA, 32 nt, Homo Sapiens
uccucccuggggauguggggucccagcugccu

SEQ ID NO: 74810 - RNA, 32 nt, Homo Sapiens
uucucccggggucagcgccgcgccgcgccacc

SEQ ID NO: 74811 - RNA, 32 nt, Homo Sapiens
cuugagcgucauuuuucuuagugugccaagag

SEQ ID NO: 74812 - RNA, 32 nt, Homo Sapiens
gagaaaaugaauuugggauacuaaaguaguuu

SEQ ID NO: 74813 - RNA, 32 nt, Homo Sapiens
cuccccggccaagucagggccucccucuuccc

SEQ ID NO: 74814 - RNA, 32 nt, Homo Sapiens
uguggguucacagauuuauucuaaccuuccaa

SEQ ID NO: 74815 - RNA, 32 nt, Homo Sapiens
ugcaaacccagcugucacauuuuucuugcaac

SEQ ID NO: 74816 - RNA, 32 nt, Homo Sapiens
guuuucucugugccuauagaaaccucagcuag

SEQ ID NO: 74817 - RNA, 32 nt, Homo Sapiens
uccaggagcccacacggagaucuuguauauac

SEQ ID NO: 74818 - RNA, 32 nt, Homo Sapiens
acuucugccucuccucucuccuccuucaacag

SEQ ID NO: 74819 - RNA, 32 nt, Homo Sapiens
cuuguauauccuuaaaccuguacucuauuacc

SEQ ID NO: 74820 - RNA, 32 nt, Homo Sapiens
caauuuagagcaauucuauauuugaguuauuu

SEQ ID NO: 74821 - RNA, 32 nt, Homo Sapiens
aauggcuaugaagcgucauuucacauuuuacc

SEQ ID NO: 74822 - RNA, 32 nt, Homo Sapiens
aagugaagaacaauauguaggaaaaugggacc

SEQ ID NO: 74823 - RNA, 32 nt, Homo Sapiens
cccccgcgcaagcgacgccgggaaaugcccac

SEQ ID NO: 74824 - RNA, 32 nt, Homo Sapiens
ccuacuguucuuguauuucucauuuaacuuua

SEQ ID NO: 74825 - RNA, 32 nt, Homo Sapiens
cccuauaguuuuauguaguuaaaugcuuccua

SEQ ID NO: 74826 - RNA, 32 nt, Homo Sapiens
uauuuucaagauacauguuguauuuauggaag

SEQ ID NO: 74827 - RNA, 31 nt, Homo Sapiens
ccaaagguucccccaccucaucuacucuguu

SEQ ID NO: 74828 - RNA, 32 nt, Homo Sapiens
acugaagcuccagcccuuccuggcgcccuggu

SEQ ID NO: 74829 - RNA, 32 nt, Homo Sapiens
uuugugguaaccagcccugcacgaccccugaa

SEQ ID NO: 74830 - RNA, 32 nt, Homo Sapiens
cucgaagugggccgggccggccccaccugccu

SEQ ID NO: 74831 - RNA, 32 nt, Homo Sapiens
uuuuguaaaaauaccaaaauuagcgguggaaa

SEQ ID NO: 74832 - RNA, 32 nt, Homo Sapiens
ccggagcuccagccgcgcggaucgcgcgcucc

SEQ ID NO: 74833 - RNA, 32 nt, Homo Sapiens
aauaugauuuauuuagauugcuaaucccacuc

SEQ ID NO: 74834 - RNA, 32 nt, Homo Sapiens
uuguguaaacuaacccaauaaaaagcguucca

SEQ ID NO: 74835 - RNA, 32 nt, Homo Sapiens
uaaucuccuguuuguugagugcacugacugug

SEQ ID NO: 74836 - RNA, 29 nt, Homo Sapiens
uuaugcauagugauuauaauacuauauuc

SEQ ID NO: 74837 - RNA, 32 nt, Homo Sapiens
cggagccagcaccugccuccccgacccucgcu

SEQ ID NO: 74838 - RNA, 32 nt, Homo Sapiens
ccuuuccaaacacuguaaacaugcuuuuaaua

SEQ ID NO: 74839 - RNA, 32 nt, Homo Sapiens
guugucagguguugcaccuggagggcccagau

SEQ ID NO: 74840 - RNA, 32 nt, Homo Sapiens
agagcagccugggcaacauagcaagaacucau

SEQ ID NO: 74841 - RNA, 32 nt, Homo Sapiens
uucuuauuuaacuuaacauucuguaaaauguc

SEQ ID NO: 74842 - RNA, 32 nt, Homo Sapiens
cuuccuuauguuucacacauuguauuugaaca

SEQ ID NO: 74843 - RNA, 32 nt, Homo Sapiens
cauaaacuauuucauucaguacucaaagcuau

SEQ ID NO: 74844 - RNA, 32 nt, Homo Sapiens
gcuuuuaaaaaaucaauuaauuucuaaauggu

SEQ ID NO: 74845 - RNA, 32 nt, Homo Sapiens
gcaggggacuucauuuccuucucaguacugga

SEQ ID NO: 74846 - RNA, 32 nt, Homo Sapiens
agcucuuugagauaauacauuccgaggggcuc

SEQ ID NO: 74847 - RNA, 31 nt, Homo Sapiens
uaucaguuauugaaaaagguauauuaaaguc

SEQ ID NO: 74848 - RNA, 32 nt, Homo Sapiens
gggagguuugggcggcuuggcgucggaggaga

SEQ ID NO: 74849 - RNA, 31 nt, Homo Sapiens
gacgauacaagguccuagaguuccggagcug

SEQ ID NO: 74850 - RNA, 32 nt, Homo Sapiens
ucuggcggccgcggcuccuguccagacccuga

SEQ ID NO: 74851 - RNA, 32 nt, Homo Sapiens
guuccaaggcuuuggcugaauuugaagaaaaa

SEQ ID NO: 74852 - RNA, 32 nt, Homo Sapiens
uggauuaaaaacagcuaacauugucugaaaau

SEQ ID NO: 74853 - RNA, 32 nt, Homo Sapiens
aaaguuaggaagaucugggagauagggguugc

SEQ ID NO: 74854 - RNA, 32 nt, Homo Sapiens
ugcagaaaacaucacugaaaugagagucacaa

SEQ ID NO: 74855 - RNA, 32 nt, Homo Sapiens
agaccaucaagccacacccccuucuuaaaacu

SEQ ID NO: 74856 - RNA, 32 nt, Homo Sapiens
ugucccacugcaguuccuuccaugcucuguga

SEQ ID NO: 74857 - RNA, 32 nt, Homo Sapiens
augagggucaugcuugcauacuggccuugggu

SEQ ID NO: 74858 - RNA, 31 nt, Homo Sapiens
uggaaggaauaaaaauuugaguuucaaaaaa

SEQ ID NO: 74859 - RNA, 32 nt, Homo Sapiens
cugaggcacagcuugucacaccgaggcggauu

SEQ ID NO: 74860 - RNA, 32 nt, Homo Sapiens
ugacgggcgcccggccggcugcgguccgugcg

SEQ ID NO: 74861 - RNA, 32 nt, Homo Sapiens
gaugacuucgcuggaggaaaggugauacguac

SEQ ID NO: 74862 - RNA, 32 nt, Homo Sapiens
accuaguagauauaucaauguaaaaacaaaua

SEQ ID NO: 74863 - RNA, 32 nt, Homo Sapiens
acaauacauuuuaaagucagaguucauguuac

SEQ ID NO: 74864 - RNA, 32 nt, Homo Sapiens
aggccuaaugacaaaagguugaagauaaaguu

SEQ ID NO: 74865 - RNA, 32 nt, Homo Sapiens
ccucuguccugggcuccugggccaggugcagg

SEQ ID NO: 74866 - RNA, 32 nt, Homo Sapiens
uccacacccuggaaaugugucaacugccuguc

SEQ ID NO: 74867 - RNA, 32 nt, Homo Sapiens
gggggacucuccucccuucucuccccaguucu

SEQ ID NO: 74868 - RNA, 32 nt, Homo Sapiens
gcagcucugccagcuugggccgagccuagaga

SEQ ID NO: 74869 - RNA, 32 nt, Homo Sapiens
agacguucuucgcggagagucgucgggguuuc

SEQ ID NO: 74870 - RNA, 32 nt, Homo Sapiens
gugacguaugcucagcuggaccacugggcccu

SEQ ID NO: 74871 - RNA, 32 nt, Homo Sapiens
cugucucacccccacuuuguccccacucuaga

SEQ ID NO: 74872 - RNA, 32 nt, Homo Sapiens
ugcaaaacacaagaauaaaguggauguaguau

SEQ ID NO: 74873 - RNA, 32 nt, Homo Sapiens
caaggggagagccaguugcgcagagcccugca

SEQ ID NO: 74874 - RNA, 32 nt, Homo Sapiens
cuguaauuaauuugggucuauuauuaacucuc

SEQ ID NO: 74875 - RNA, 32 nt, Homo Sapiens
ccucccaggcuaggaaccucucugccaccaag

SEQ ID NO: 74876 - RNA, 32 nt, Homo Sapiens
gcugccuccgcggugcagcuaagguucguguc

SEQ ID NO: 74877 - RNA, 32 nt, Homo Sapiens
ucacuugagccuggggagguccaggccgcagu

SEQ ID NO: 74878 - RNA, 32 nt, Homo Sapiens
uucuagaagaaauguuuguaaaaggggcaggu

SEQ ID NO: 74879 - RNA, 32 nt, Homo Sapiens
ggcagaaucugcucaucuccaaauucgcuguc

SEQ ID NO: 74880 - RNA, 32 nt, Homo Sapiens
ucauuaaaaaggaaauuguaucaggacccaug

SEQ ID NO: 74881 - RNA, 32 nt, Homo Sapiens
cccacguggcaucgauccucccugcccgcgaa

SEQ ID NO: 74882 - RNA, 32 nt, Homo Sapiens
uuucuggggagaaaugucuauugauuacuaca

SEQ ID NO: 74883 - RNA, 32 nt, Homo Sapiens
cauuaaacgggagaggaaucacagaaacuggg

SEQ ID NO: 74884 - RNA, 32 nt, Homo Sapiens
gcccucgccccggcgagcugcccccgacgcga

SEQ ID NO: 74885 - RNA, 32 nt, Homo Sapiens
gaacugcuugaagagaacugguuggaguuaug

SEQ ID NO: 74886 - RNA, 32 nt, Homo Sapiens
ggggccgugcgcguggggucgcuccgcagcug

SEQ ID NO: 74887 - RNA, 32 nt, Homo Sapiens
auguguguuucauaauguauguaaucuaucga

SEQ ID NO: 74888 - RNA, 32 nt, Homo Sapiens
aggguacagcccgggggcgggcucgggucgcc

SEQ ID NO: 74889 - RNA, 32 nt, Homo Sapiens
gcucugugggagccccaggacaagugagcugg

SEQ ID NO: 74890 - RNA, 31 nt, Homo Sapiens
uugcacgcgggcccggcuucgggguuuuggg

SEQ ID NO: 74891 - RNA, 32 nt, Homo Sapiens
gguuggcagcucugcucugugccguccugugc

SEQ ID NO: 74892 - RNA, 32 nt, Homo Sapiens
uugcucuaaugaucaggaaugaugcuuauuag

SEQ ID NO: 74893 - RNA, 32 nt, Homo Sapiens
caaauaccuacuucuuuuauuccuccuuuugg

SEQ ID NO: 74894 - RNA, 32 nt, Homo Sapiens
caggucaggaggagugagcagccggcacagcc

SEQ ID NO: 74895 - RNA, 32 nt, Homo Sapiens
uuuucuguuuuaagggugucaggaguuucgcu

SEQ ID NO: 74896 - RNA, 32 nt, Homo Sapiens
gaggucucauuucaaaacuucauaaagaacaa

SEQ ID NO: 74897 - RNA, 32 nt, Homo Sapiens
agcuucgcuggaaaccucuggaggucaucucg

SEQ ID NO: 74898 - RNA, 32 nt, Homo Sapiens
cagcacguuguacaacuuaacuuuuuaacaua

SEQ ID NO: 74899 - RNA, 31 nt, Homo Sapiens
agcuggggugugggaugcacggccucguggg

SEQ ID NO: 74900 - RNA, 32 nt, Homo Sapiens
caggcucuccuccucccuccaaagcaguuauu

SEQ ID NO: 74901 - RNA, 32 nt, Homo Sapiens
agccugucugugcucagacauagagaaguacu

SEQ ID NO: 74902 - RNA, 32 nt, Homo Sapiens
uagcuauaaucagaaaacuaagaauauuauuc

SEQ ID NO: 74903 - RNA, 32 nt, Homo Sapiens
ccaggccuuucccgcuuuugccuggcugcagg

SEQ ID NO: 74904 - RNA, 32 nt, Homo Sapiens
cugagaucacgccguugcacuccagccugggc

SEQ ID NO: 74905 - RNA, 32 nt, Homo Sapiens
acuuagucaugggguguucaccaccacacagg

SEQ ID NO: 74906 - RNA, 32 nt, Homo Sapiens
ccaggaagugugaacauacugauagaaaaaga

SEQ ID NO: 74907 - RNA, 32 nt, Homo Sapiens
ccccccaaccccuuucucugguacagugcugu

SEQ ID NO: 74908 - RNA, 32 nt, Homo Sapiens
gccuauaaucccugcgcuuuggcaguccgagg

SEQ ID NO: 74909 - RNA, 32 nt, Homo Sapiens
agacugcuauuuacauuaaaauuggucacaua

SEQ ID NO: 74910 - RNA, 31 nt, Homo Sapiens
accuguguaaccaccaccaccuguguaacca

SEQ ID NO: 74911 - RNA, 32 nt, Homo Sapiens
caaauugccaucaacaguaaguugaaggcaau

SEQ ID NO: 74912 - RNA, 32 nt, Homo Sapiens
uugccucugggaagaggggugggaaugacuuu

SEQ ID NO: 74913 - RNA, 32 nt, Homo Sapiens
guaauucucuggauguuaggaccuaggggaac

SEQ ID NO: 74914 - RNA, 32 nt, Homo Sapiens
ugagacccuggccccgcccccgcggccagccc

SEQ ID NO: 74915 - RNA, 32 nt, Homo Sapiens
acgaggucaggaguucgagaccagucuggcca

SEQ ID NO: 74916 - RNA, 32 nt, Homo Sapiens
gcuaguuaagcacaaaggaaaauauuucaaua

SEQ ID NO: 74917 - RNA, 32 nt, Homo Sapiens
ggaucaguugccccccaucaccagagucuuaa

SEQ ID NO: 74918 - RNA, 32 nt, Homo Sapiens
gcauuugagcugagaccugaagaacgaggagu

SEQ ID NO: 74919 - RNA, 32 nt, Homo Sapiens
agugagcuggcuggaaagagggggcggagugc

SEQ ID NO: 74920 - RNA, 32 nt, Homo Sapiens
ucuuaauuuugcauuucuuaauuuuguuuuuc

SEQ ID NO: 74921 - RNA, 32 nt, Homo Sapiens
ccccucccgccccaugcgcccgcggcucugaa

SEQ ID NO: 74922 - RNA, 32 nt, Homo Sapiens
agcgaggucggcagcggcgcgcgcugugcucu

SEQ ID NO: 74923 - RNA, 32 nt, Homo Sapiens
gccggagcgcgacgaggccccgggcgcgcccu

SEQ ID NO: 74924 - RNA, 32 nt, Homo Sapiens
auaauaaagcuacugauuuccuuggagcuuuu

SEQ ID NO: 74925 - RNA, 32 nt, Homo Sapiens
gcuagcucagaagaagcagagggcgccuccga

SEQ ID NO: 74926 - RNA, 32 nt, Homo Sapiens
acauuucuuguaauuacuauuguuauuuuuau

SEQ ID NO: 74927 - RNA, 30 nt, Homo Sapiens
cuccuccugcaugugggggaaguagaccuc

SEQ ID NO: 74928 - RNA, 32 nt, Homo Sapiens
acucuccaguucuccuuucucaccacucuccu

SEQ ID NO: 74929 - RNA, 32 nt, Homo Sapiens
cagagggcuguuucuuuuuguugucuuuaaac

SEQ ID NO: 74930 - RNA, 32 nt, Homo Sapiens
cgaggaggccauggccggggccuacgacgcgc

SEQ ID NO: 74931 - RNA, 32 nt, Homo Sapiens
gggaggaaaugggaaauggcuggagucuuucc

SEQ ID NO: 74932 - RNA, 32 nt, Homo Sapiens
uacaucccucagcucccuccccaucucacauc

SEQ ID NO: 74933 - RNA, 32 nt, Homo Sapiens
aguucuaacuaguggaaaguuacucuagcuuu

SEQ ID NO: 74934 - RNA, 32 nt, Homo Sapiens
ggcugcccugaccccaggaggcuccaguucug

SEQ ID NO: 74935 - RNA, 32 nt, Homo Sapiens
gcggaaccucucggcugugcucucccaugagu

SEQ ID NO: 74936 - RNA, 30 nt, Homo Sapiens
augauccuucuggugggggaagaguuuaag

SEQ ID NO: 74937 - RNA, 32 nt, Homo Sapiens
ccaagagcugucagccuaaucuguaggagcag

SEQ ID NO: 74938 - RNA, 32 nt, Homo Sapiens
gcagccuccuuaaauguuuucugaagagcggu

SEQ ID NO: 74939 - RNA, 32 nt, Homo Sapiens
guagaugugggcaggaagccagacacagagcg

SEQ ID NO: 74940 - RNA, 32 nt, Homo Sapiens
cguucgcuccagccgcggcucuacagcagcgg

SEQ ID NO: 74941 - RNA, 32 nt, Homo Sapiens
guucccgcccggauggggaaaccuggacugcg

SEQ ID NO: 74942 - RNA, 32 nt, Homo Sapiens
ggguacugugucaucacaaaaucucucaguaa

SEQ ID NO: 74943 - RNA, 32 nt, Homo Sapiens
accuguucuuucccuuuucuugaaauguggug

SEQ ID NO: 74944 - RNA, 32 nt, Homo Sapiens
gucuccuugcuggcagagugcgcucacgcgag

SEQ ID NO: 74945 - RNA, 32 nt, Homo Sapiens
agaaaauaggggugauggagggggagaagccc

SEQ ID NO: 74946 - RNA, 32 nt, Homo Sapiens
ugcuggacgcgcggccaagaccccggcccgug

SEQ ID NO: 74947 - RNA, 32 nt, Homo Sapiens
aggcaggcagaucaccugaggccaggaguucg

SEQ ID NO: 74948 - RNA, 32 nt, Homo Sapiens
gccuccagccucaggagcaguguggaggaaga

SEQ ID NO: 74949 - RNA, 26 nt, Homo Sapiens
caugcgggacuacgacgaggugaucg

SEQ ID NO: 74950 - RNA, 32 nt, Homo Sapiens
ccucuacuucccgcccaguggggcuggaaugu

SEQ ID NO: 74951 - RNA, 32 nt, Homo Sapiens
uuuuaucaaaucgauagauaucucagauuuga

SEQ ID NO: 74952 - RNA, 32 nt, Homo Sapiens
acaagagggcuuuuccacacucggugugugca

SEQ ID NO: 74953 - RNA, 32 nt, Homo Sapiens
gacuccugccaggaauggggggugcugaguca

SEQ ID NO: 74954 - RNA, 28 nt, Homo Sapiens
agguuguagugagccaggauggcacaau

SEQ ID NO: 74955 - RNA, 32 nt, Homo Sapiens
ugcggugggcacagcagggcgcacagaggagg

SEQ ID NO: 74956 - RNA, 32 nt, Homo Sapiens
uuuucccuccccggggccccagcgcgcggcca

SEQ ID NO: 74957 - RNA, 32 nt, Homo Sapiens
cccaggccccuacaaaggcuucagaguagaua

SEQ ID NO: 74958 - RNA, 32 nt, Homo Sapiens
aaccguuguuugcuuuaaauuuucauaaacug

SEQ ID NO: 74959 - RNA, 30 nt, Homo Sapiens
cuaagaugaaucccgaccuggacaccggcc

SEQ ID NO: 74960 - RNA, 32 nt, Homo Sapiens
ggccauuauguuucaguagauuuuuucaauaa

SEQ ID NO: 74961 - RNA, 32 nt, Homo Sapiens
agcugagaggagaggcaggugugugcaggugc

SEQ ID NO: 74962 - RNA, 32 nt, Homo Sapiens
auguugcuuuaucuuugaaauuuugcaugaaa

SEQ ID NO: 74963 - RNA, 32 nt, Homo Sapiens
uuuuaacaguugucuuguuuuuucuucugcag

SEQ ID NO: 74964 - RNA, 32 nt, Homo Sapiens
aagaagaauuguaguggucauggacagcuaag

SEQ ID NO: 74965 - RNA, 32 nt, Homo Sapiens
caaaccgccucccggguucacgccauucuccu

SEQ ID NO: 74966 - RNA, 32 nt, Homo Sapiens
uguaacccgcuguccccgcagaugagaugagc

SEQ ID NO: 74967 - RNA, 32 nt, Homo Sapiens
ugucugaguagggcugauguguuuccuguuag

SEQ ID NO: 74968 - RNA, 32 nt, Homo Sapiens
uguauaaaacuuuuguguaauaaaauggaccu

SEQ ID NO: 74969 - RNA, 32 nt, Homo Sapiens
guauccagaagauuggaagagggauaagaaau

SEQ ID NO: 74970 - RNA, 32 nt, Homo Sapiens
uuauauguuuuaaauguugcuggauuuuugug

SEQ ID NO: 74971 - RNA, 32 nt, Homo Sapiens
cuggccagggaauggaagggagaccaggaggc

SEQ ID NO: 74972 - RNA, 32 nt, Homo Sapiens
aaaaauauaucccagucugcguggucacgggg

SEQ ID NO: 74973 - RNA, 32 nt, Homo Sapiens
ccaacaaggggaaaguacgcuguuacagcaua

SEQ ID NO: 74974 - RNA, 32 nt, Homo Sapiens
agcccucgggccagcauccgcggcugcugaaa

SEQ ID NO: 74975 - RNA, 32 nt, Homo Sapiens
cuccgcgcgcccucacugcagccccugcgucg

SEQ ID NO: 74976 - RNA, 32 nt, Homo Sapiens
uuaggaggcccaaaagaggggcgacagaacau

SEQ ID NO: 74977 - RNA, 32 nt, Homo Sapiens
agcgcgggauucuggagggaaauugagggaga

SEQ ID NO: 74978 - RNA, 32 nt, Homo Sapiens
aucuuucuccaagugguuccucuugaggggag

SEQ ID NO: 74979 - RNA, 32 nt, Homo Sapiens
cccagcucuggccacugcuccagacaucccca

SEQ ID NO: 74980 - RNA, 32 nt, Homo Sapiens
ggccugcugacacuucccugcaacccauccac

SEQ ID NO: 74981 - RNA, 32 nt, Homo Sapiens
ggucccccgcuucgcccgacuccggccaugua

SEQ ID NO: 74982 - RNA, 32 nt, Homo Sapiens
gaagcgaccgguuucucccucgcccucugaaa

SEQ ID NO: 74983 - RNA, 32 nt, Homo Sapiens
guuuuucuggacuuccaaaucucaagugauaa

SEQ ID NO: 74984 - RNA, 32 nt, Homo Sapiens
gaguuauuugaaaaguuaacagaacaaugaga

SEQ ID NO: 74985 - RNA, 32 nt, Homo Sapiens
ccacaccccucccagaucugcucacugccagg

SEQ ID NO: 74986 - RNA, 32 nt, Homo Sapiens
ugacucagaacugaagcucacaucucaaauuc

SEQ ID NO: 74987 - RNA, 32 nt, Homo Sapiens
agaccugcccagaggagaggggcaguguuccc

SEQ ID NO: 74988 - RNA, 32 nt, Homo Sapiens
ugugugaccugcccacccaacuccuggagcug

SEQ ID NO: 74989 - RNA, 32 nt, Homo Sapiens
auaggaaagcauuuauacuugaaaaaaaaugu

SEQ ID NO: 74990 - RNA, 32 nt, Homo Sapiens
cccuggcgcgcccucaucagccgucgcgcaag

SEQ ID NO: 74991 - RNA, 32 nt, Homo Sapiens
gacuuggagguggaggggacgcggcgguacuc

SEQ ID NO: 74992 - RNA, 32 nt, Homo Sapiens
cagaacuuccauucuuuagucauuccaggugg

SEQ ID NO: 74993 - RNA, 32 nt, Homo Sapiens
cccuggggaugaggguuggguguccauggugc

SEQ ID NO: 74994 - RNA, 32 nt, Homo Sapiens
uuauuguccuggguggaccaauccaaaggcua

SEQ ID NO: 74995 - RNA, 28 nt, Homo Sapiens
ucauguguucauuguuucauucacucaa

SEQ ID NO: 74996 - RNA, 32 nt, Homo Sapiens
uuaucuccccaggagcagcaucucugagcacc

SEQ ID NO: 74997 - RNA, 32 nt, Homo Sapiens
uggaacaagguucccccuccuccauucuugcc

SEQ ID NO: 74998 - RNA, 32 nt, Homo Sapiens
ugaagccaacugugaauaaacuguagccuaca

SEQ ID NO: 74999 - RNA, 32 nt, Homo Sapiens
uguaaaauggacugaaaugcuccaucaugaag

SEQ ID NO: 75000 - RNA, 32 nt, Homo Sapiens
gcccccagccagcaacucggcgcggacggccc

SEQ ID NO: 75001 - RNA, 32 nt, Homo Sapiens
cacuguagggaaccucuugugcuugacuuugc

SEQ ID NO: 75002 - RNA, 32 nt, Homo Sapiens
aaagaagugcaguaugaauuauagaaagugug

SEQ ID NO: 75003 - RNA, 32 nt, Homo Sapiens
gcccugggucgcgcgcagcgcgugcacagcgc

SEQ ID NO: 75004 - RNA, 32 nt, Homo Sapiens
uuacaggugugagccacggcacccagccuagc

SEQ ID NO: 75005 - RNA, 32 nt, Homo Sapiens
ggccagaugugguggcucaugccuguaauccc

SEQ ID NO: 75006 - RNA, 32 nt, Homo Sapiens
cgccagaugcgagcgcgccgggaagggcugcg

SEQ ID NO: 75007 - RNA, 32 nt, Homo Sapiens
ccauguguuucaucaaucagaaguccuccucc

SEQ ID NO: 75008 - RNA, 32 nt, Homo Sapiens
cugagcagcuggaagcacacuggcuaucugcg

SEQ ID NO: 75009 - RNA, 32 nt, Homo Sapiens
cgaaggcugucggcgcgccgcggcccgcaggc

SEQ ID NO: 75010 - RNA, 32 nt, Homo Sapiens
cguuucucagaaucaaguuagaagugagaguu

SEQ ID NO: 75011 - RNA, 32 nt, Homo Sapiens
uuuuuggugcuggguucucacauccaaguguu

SEQ ID NO: 75012 - RNA, 32 nt, Homo Sapiens
aacccaagaguuuguacagacauccugucuuc

SEQ ID NO: 75013 - RNA, 32 nt, Homo Sapiens
aagaugaaauuugaauuaauuugcagaacuug

SEQ ID NO: 75014 - RNA, 32 nt, Homo Sapiens
ugcugguugcuuaauccguuucuggaggaaga

SEQ ID NO: 75015 - RNA, 32 nt, Homo Sapiens
uguuuggccugccucagcagcaccaguugacu

SEQ ID NO: 75016 - RNA, 32 nt, Homo Sapiens
agcgucgugggccgcgcacggcccuggaagag

SEQ ID NO: 75017 - RNA, 32 nt, Homo Sapiens
gcugggucccaccuggccuccuccugccuggc

SEQ ID NO: 75018 - RNA, 31 nt, Homo Sapiens
gaacuuuugugcuuagugagugcaacgaaau

SEQ ID NO: 75019 - RNA, 32 nt, Homo Sapiens
uuccuccagggugcaugguacccauuaaccca

SEQ ID NO: 75020 - RNA, 32 nt, Homo Sapiens
ugcgcgcuggcagccgucaaggcgcugucccu

SEQ ID NO: 75021 - RNA, 32 nt, Homo Sapiens
aagggccgccgggggcuggacgaggaggcgac

SEQ ID NO: 75022 - RNA, 32 nt, Homo Sapiens
ucagugcacuguauauagaagucuaaaacaca

SEQ ID NO: 75023 - RNA, 32 nt, Homo Sapiens
guaguuaggaaacauuccauucucuuuguaug

SEQ ID NO: 75024 - RNA, 32 nt, Homo Sapiens
gaccuggucaccuggggugggggugauuugag

SEQ ID NO: 75025 - RNA, 32 nt, Homo Sapiens
acuaugggcugaaaccaugaggcgugcugagc

SEQ ID NO: 75026 - RNA, 32 nt, Homo Sapiens
auggguuucauuuucauauugaaaucauugau

SEQ ID NO: 75027 - RNA, 32 nt, Homo Sapiens
uuuuuccggcugcuucuccccccgaccucuuc

SEQ ID NO: 75028 - RNA, 32 nt, Homo Sapiens
uacacacaauggaguuauaauaaaauagcuau

SEQ ID NO: 75029 - RNA, 32 nt, Homo Sapiens
gcuccccggccgccuccacccggggaacgcga

SEQ ID NO: 75030 - RNA, 32 nt, Homo Sapiens
uaugggaaacaucagacguucugaguaagaua

SEQ ID NO: 75031 - RNA, 32 nt, Homo Sapiens
ccugguuccagaauuuggagucuccaguucuc

SEQ ID NO: 75032 - RNA, 32 nt, Homo Sapiens
ccaguguuagaaugcaagaggucagguuauuc

SEQ ID NO: 75033 - RNA, 30 nt, Homo Sapiens
aggccaugggucggccccugcugcugcccc

SEQ ID NO: 75034 - RNA, 32 nt, Homo Sapiens
auggagcgcgggguggcagagccucuggacgu

SEQ ID NO: 75035 - RNA, 32 nt, Homo Sapiens
agcaggagaggagagccagagaagugccaggg

SEQ ID NO: 75036 - RNA, 32 nt, Homo Sapiens
caacaugugaacugagaggaaaaggagguagu

SEQ ID NO: 75037 - RNA, 32 nt, Homo Sapiens
auaauuuuauuaagaguuaacuuuuuagguau

SEQ ID NO: 75038 - RNA, 32 nt, Homo Sapiens
auguuucaucaucauggagaucuuggagaauu

SEQ ID NO: 75039 - RNA, 32 nt, Homo Sapiens
auauacaaauggccaacagauacauuaaaaaa

SEQ ID NO: 75040 - RNA, 32 nt, Homo Sapiens
gccauuugucaccucagcauucgcugccgaaa

SEQ ID NO: 75041 - RNA, 32 nt, Homo Sapiens
cgccugccagaagcuggaggggugcuggagac

SEQ ID NO: 75042 - RNA, 32 nt, Homo Sapiens
gugguuuuuuauuaguuuucuuguguuucaga

SEQ ID NO: 75043 - RNA, 32 nt, Homo Sapiens
aagcgcucgcgcacgcgccggaagagcuggcg

SEQ ID NO: 75044 - RNA, 32 nt, Homo Sapiens
aaaucuggcacacacacacacacacacacaca

SEQ ID NO: 75045 - RNA, 32 nt, Homo Sapiens
cacagcccccgcaucacccaaccaaccagccg

SEQ ID NO: 75046 - RNA, 32 nt, Homo Sapiens
agaaagggaggcuagcauguguucaagguuag

SEQ ID NO: 75047 - RNA, 32 nt, Homo Sapiens
uucaaguuguggaauguaaaucuuuuauuaaa

SEQ ID NO: 75048 - RNA, 32 nt, Homo Sapiens
agcccuucacagcaagacccaggaagccgcgg

SEQ ID NO: 75049 - RNA, 32 nt, Homo Sapiens
ugccacggaugcagcaguggcuuacagagcau

SEQ ID NO: 75050 - RNA, 32 nt, Homo Sapiens
uugcaggcuguaguuuacaaaaacgaauauug

SEQ ID NO: 75051 - RNA, 32 nt, Homo Sapiens
accguuuauuuuacugacuuguuuaaaugauu

SEQ ID NO: 75052 - RNA, 32 nt, Homo Sapiens
aguaauucuggggauuugauggagcagaaagg

SEQ ID NO: 75053 - RNA, 32 nt, Homo Sapiens
cccagcucgccagaugcucgcccuggcugccc

SEQ ID NO: 75054 - RNA, 32 nt, Homo Sapiens
aacuacagaaaagagauuuagaguauaacaga

SEQ ID NO: 75055 - RNA, 32 nt, Homo Sapiens
ucucccacuucauuauucuuaaaugcuucagc

SEQ ID NO: 75056 - RNA, 32 nt, Homo Sapiens
gagcugaaaaauaccauuugaacucuggaaga

SEQ ID NO: 75057 - RNA, 32 nt, Homo Sapiens
uuaaaggaauccuucauuuauuucauauuccc

SEQ ID NO: 75058 - RNA, 32 nt, Homo Sapiens
cuccaguuuguaauaaaaugccaaauucuguc

SEQ ID NO: 75059 - RNA, 32 nt, Homo Sapiens
cuaagaggaaaauuauuuuggggaggaacuac

SEQ ID NO: 75060 - RNA, 32 nt, Homo Sapiens
acagggucuagauuuuguuaacccaaauguau

SEQ ID NO: 75061 - RNA, 32 nt, Homo Sapiens
cgccuuuccugucccacuggcccaguugccac

SEQ ID NO: 75062 - RNA, 32 nt, Homo Sapiens
ggucagagaacaaaugacgggugaauacaugu

SEQ ID NO: 75063 - RNA, 32 nt, Homo Sapiens
ugaagguggaaauaaacuauuuguaaagugaa

SEQ ID NO: 75064 - RNA, 32 nt, Homo Sapiens
guucauucuguagauaauacaugcauggaccu

SEQ ID NO: 75065 - RNA, 32 nt, Homo Sapiens
auuaguugucaaaauugauaagucacuuggcu

SEQ ID NO: 75066 - RNA, 28 nt, Homo Sapiens
gagaugcggagcaggagcaauuccgggg

SEQ ID NO: 75067 - RNA, 29 nt, Homo Sapiens
uuccgugucuuuuccaaccacaaaaccac

SEQ ID NO: 75068 - RNA, 32 nt, Homo Sapiens
cugcagggccuugauuugagacuuggccuugg

SEQ ID NO: 75069 - RNA, 32 nt, Homo Sapiens
uauaucuuuuaaaaauaauuuuacaagugaug

SEQ ID NO: 75070 - RNA, 32 nt, Homo Sapiens
caaauaggaaauguguaaguucgucuaaaagc

SEQ ID NO: 75071 - RNA, 32 nt, Homo Sapiens
ugcggcaggacgcgcgcggggaggcggcggag

SEQ ID NO: 75072 - RNA, 32 nt, Homo Sapiens
acaagaacccccuuuacccccaugaccaacau

SEQ ID NO: 75073 - RNA, 32 nt, Homo Sapiens
uuaacuacuguaaacauagccuauuuuugugc

SEQ ID NO: 75074 - RNA, 32 nt, Homo Sapiens
ucuguggaugcagaggaaguugugagagaaau

SEQ ID NO: 75075 - RNA, 32 nt, Homo Sapiens
ucugucuagagcauuguuguccuucacugcag

SEQ ID NO: 75076 - RNA, 32 nt, Homo Sapiens
aggcuggaggaccagguguggccacgggaggc

SEQ ID NO: 75077 - RNA, 32 nt, Homo Sapiens
uccugaaaggauuucggguaauacuggaggag

SEQ ID NO: 75078 - RNA, 32 nt, Homo Sapiens
uagauuuguaaaacaaaaaacacguguguucu

SEQ ID NO: 75079 - RNA, 32 nt, Homo Sapiens
guuuuucuuuugcuccacgucauuuugucagg

SEQ ID NO: 75080 - RNA, 32 nt, Homo Sapiens
accuucccugucaugggcagacauacaccccu

SEQ ID NO: 75081 - RNA, 32 nt, Homo Sapiens
guauguagcagauguuacagucuuagggaucc

SEQ ID NO: 75082 - RNA, 32 nt, Homo Sapiens
acuuuaugauagguuuauccggguacuaaaug

SEQ ID NO: 75083 - RNA, 32 nt, Homo Sapiens
ugaggaacuagauccuucucuccucagccuag

SEQ ID NO: 75084 - RNA, 32 nt, Homo Sapiens
agaagaggaaaagaagagacacagcuacuuug

SEQ ID NO: 75085 - RNA, 32 nt, Homo Sapiens
ucucgccgcgcgcgcccucgcagucaccgcca

SEQ ID NO: 75086 - RNA, 32 nt, Homo Sapiens
gucaugcccuccccugccagcucugggcuuca

SEQ ID NO: 75087 - RNA, 32 nt, Homo Sapiens
aagaccaaaccacuguaggagaguuguucgca

SEQ ID NO: 75088 - RNA, 32 nt, Homo Sapiens
auaucuuuguuaaccucaugucucucuggucc

SEQ ID NO: 75089 - RNA, 32 nt, Homo Sapiens
ccgccgcaaugaugaugauggcgcugagcaag

SEQ ID NO: 75090 - RNA, 32 nt, Homo Sapiens
uuuguggcucaugcuuuuuuuuuaggguuaca

SEQ ID NO: 75091 - RNA, 32 nt, Homo Sapiens
acuuccuauguucauuuugauuguaggugaug

SEQ ID NO: 75092 - RNA, 32 nt, Homo Sapiens
gccaacuacaugcaugucccccgggggcaagu

SEQ ID NO: 75093 - RNA, 32 nt, Homo Sapiens
cauaggaacugguguagauaagcaugcaauua

SEQ ID NO: 75094 - RNA, 32 nt, Homo Sapiens
caggggcgccgcgcgcaagcccgcgggcucuu

SEQ ID NO: 75095 - RNA, 32 nt, Homo Sapiens
gguuacgugugagccaacaucacguuuuguua

SEQ ID NO: 75096 - RNA, 32 nt, Homo Sapiens
auaaggcugucuugguguauacacuuaugguu

SEQ ID NO: 75097 - RNA, 32 nt, Homo Sapiens
uuuacuuuuuaaaaaauucuugugaaguuacu

SEQ ID NO: 75098 - RNA, 32 nt, Homo Sapiens
ucccaccccccagggagcugccucccaggcag

SEQ ID NO: 75099 - RNA, 32 nt, Homo Sapiens
caccagagaaaagaguagcagagauggccugc

SEQ ID NO: 75100 - RNA, 32 nt, Homo Sapiens
gagccgggccguccacccacccgcccgcccag

SEQ ID NO: 75101 - RNA, 32 nt, Homo Sapiens
acggguucccccagcccagcccuggaaggugg

SEQ ID NO: 75102 - RNA, 32 nt, Homo Sapiens
ucagggcuguggggagcagcuuucaacaccuu

SEQ ID NO: 75103 - RNA, 32 nt, Homo Sapiens
ccggcucucaaaaagaaaagccaggcacagau

SEQ ID NO: 75104 - RNA, 32 nt, Homo Sapiens
gcggcuucaccccacacccaggggccaggcuc

SEQ ID NO: 75105 - RNA, 32 nt, Homo Sapiens
cagacauuuccaguugguuuuguaaguuuuga

SEQ ID NO: 75106 - RNA, 27 nt, Homo Sapiens
auucacauuuaauucuugguauuauaa

SEQ ID NO: 75107 - RNA, 32 nt, Homo Sapiens
ggggaagacagacuuugaaguuucuagacgag

SEQ ID NO: 75108 - RNA, 32 nt, Homo Sapiens
gccccagcucagggggcaaacucaggagcuuc

SEQ ID NO: 75109 - RNA, 32 nt, Homo Sapiens
ccaggcugcuccaagacaguggauaucgaggc

SEQ ID NO: 75110 - RNA, 31 nt, Homo Sapiens
ucuaagaagcgcagcggaacucgaccggauc

SEQ ID NO: 75111 - RNA, 32 nt, Homo Sapiens
gagccaccaugccuggccccagcccugaaucu

SEQ ID NO: 75112 - RNA, 32 nt, Homo Sapiens
uugguauugcccaggaauccacagcaacagua

SEQ ID NO: 75113 - RNA, 32 nt, Homo Sapiens
auguguauuuucuucucuuuuacauaaauugu

SEQ ID NO: 75114 - RNA, 31 nt, Homo Sapiens
uguguagacugcagccaaguguaacacagca

SEQ ID NO: 75115 - RNA, 32 nt, Homo Sapiens
guguuucuguauaugcacacacauaaacggcu

SEQ ID NO: 75116 - RNA, 32 nt, Homo Sapiens
agcagaagcaaucccggggagcugccaggggu

SEQ ID NO: 75117 - RNA, 28 nt, Homo Sapiens
aauacuguuuguggaauguguuuaaagg

SEQ ID NO: 75118 - RNA, 32 nt, Homo Sapiens
cugccggcuucucggagcggcgcugggcgacc

SEQ ID NO: 75119 - RNA, 32 nt, Homo Sapiens
gacucacacgggggcuuauuuauugcuuuauu

SEQ ID NO: 75120 - RNA, 32 nt, Homo Sapiens
cugucgccgucgccgucgcccgaggucccagc

SEQ ID NO: 75121 - RNA, 32 nt, Homo Sapiens
agggagucaaacuuagggggcaggcaaacaaa

SEQ ID NO: 75122 - RNA, 32 nt, Homo Sapiens
agcggagcgaaggcgcgagcugcccgauaaug

SEQ ID NO: 75123 - RNA, 32 nt, Homo Sapiens
gaaugugccccgaggcauaaagcugcuaauuu

SEQ ID NO: 75124 - RNA, 32 nt, Homo Sapiens
cuuugaaauauauacauacauaugaaugaaag

SEQ ID NO: 75125 - RNA, 32 nt, Homo Sapiens
uucaguuuuguacuauuggcuuugaaucaagc

SEQ ID NO: 75126 - RNA, 32 nt, Homo Sapiens
ggcuggucugugucugggccugucccauggcu

SEQ ID NO: 75127 - RNA, 32 nt, Homo Sapiens
ucuccuuuuauguguaguugucucucuucaga

SEQ ID NO: 75128 - RNA, 32 nt, Homo Sapiens
uuggcuaugacucuaccuccagguuuaccaua

SEQ ID NO: 75129 - RNA, 32 nt, Homo Sapiens
gaggcccaagucccagagagcccacgcuggcc

SEQ ID NO: 75130 - RNA, 32 nt, Homo Sapiens
cguccccggaccagcccucagucucgguccac

SEQ ID NO: 75131 - RNA, 32 nt, Homo Sapiens
ggacugcccgggcgcaggauccaggcgcugcc

SEQ ID NO: 75132 - RNA, 32 nt, Homo Sapiens
ucugcccaguguuccuaagcgaaagaagaccg

SEQ ID NO: 75133 - RNA, 32 nt, Homo Sapiens
uguuugaagcuacuguuuucucuuuuguucau

SEQ ID NO: 75134 - RNA, 32 nt, Homo Sapiens
cccuggcagcccauguucuccucuuuucucac

SEQ ID NO: 75135 - RNA, 32 nt, Homo Sapiens
uuucagaacuuuagggccuuugaaauauuucc

SEQ ID NO: 75136 - RNA, 32 nt, Homo Sapiens
cuaaccuucaaucccaccgccggcugcgcguc

SEQ ID NO: 75137 - RNA, 32 nt, Homo Sapiens
ugggagcccugagacucccugacccagcagga

SEQ ID NO: 75138 - RNA, 32 nt, Homo Sapiens
aaaagaaagggagagauguugcgggaagucag

SEQ ID NO: 75139 - RNA, 32 nt, Homo Sapiens
cggcgcucgcagguccgcuccccucccaaacc

SEQ ID NO: 75140 - RNA, 32 nt, Homo Sapiens
agagaaaguauuuuuaacuguauccaaugugu

SEQ ID NO: 75141 - RNA, 32 nt, Homo Sapiens
ccgcggagugaccccaccuucucauggggggu

SEQ ID NO: 75142 - RNA, 32 nt, Homo Sapiens
ugccaugguugugcuauucucaucucaacaua

SEQ ID NO: 75143 - RNA, 32 nt, Homo Sapiens
cacacuguaacgugaugaccugcugcuccugg

SEQ ID NO: 75144 - RNA, 32 nt, Homo Sapiens
uugugcaaaacaaguuucaaguuuauagauau

SEQ ID NO: 75145 - RNA, 32 nt, Homo Sapiens
aggcacacauauauuggaaagaucauguugca

SEQ ID NO: 75146 - RNA, 32 nt, Homo Sapiens
ucggccggucagagcggccggcgugggcuuuu

SEQ ID NO: 75147 - RNA, 32 nt, Homo Sapiens
uggugaaggugugcgccaggauguggacuacu

SEQ ID NO: 75148 - RNA, 32 nt, Homo Sapiens
acagaauuaacaagagaaaaugucuaacuuuu

SEQ ID NO: 75149 - RNA, 32 nt, Homo Sapiens
aagagaacuucgucuguaaguaauuugucuua

SEQ ID NO: 75150 - RNA, 32 nt, Homo Sapiens
accuugcagggccccuaccaguccacagguga

SEQ ID NO: 75151 - RNA, 32 nt, Homo Sapiens
acugccacaacacccuccucagcccucgacau

SEQ ID NO: 75152 - RNA, 30 nt, Homo Sapiens
gguggguggggcgcccauagcacugccggu

SEQ ID NO: 75153 - RNA, 32 nt, Homo Sapiens
gaaaugauaccagcuuuuuuuguaccucugcu

SEQ ID NO: 75154 - RNA, 32 nt, Homo Sapiens
uuuaugucuuauccuuuuuuuuuuuuaaaaaa

SEQ ID NO: 75155 - RNA, 32 nt, Homo Sapiens
aggcuacuuaugucuugguuuuauuuuguucc

SEQ ID NO: 75156 - RNA, 32 nt, Homo Sapiens
guuugugcuguaaagaguugcuuuuuguuuau

SEQ ID NO: 75157 - RNA, 32 nt, Homo Sapiens
uggcuguagguguggguggugcccaggcauug

SEQ ID NO: 75158 - RNA, 32 nt, Homo Sapiens
aauaauugccaggaguacagugcucuuguuga

SEQ ID NO: 75159 - RNA, 32 nt, Homo Sapiens
uccaaagaagaauggaggccagaguggagcgu

SEQ ID NO: 75160 - RNA, 32 nt, Homo Sapiens
ccugcaggcccggcgcggggucgcccugcucu

SEQ ID NO: 75161 - RNA, 32 nt, Homo Sapiens
ccccucccccaaauauaaaaagauaaaauaaa

SEQ ID NO: 75162 - RNA, 32 nt, Homo Sapiens
cacaugcacacaggugcacagaccacacagca

SEQ ID NO: 75163 - RNA, 32 nt, Homo Sapiens
gugcaagucauggagugcaggcagaggggucc

SEQ ID NO: 75164 - RNA, 30 nt, Homo Sapiens
agggauggggaaaugggggggguugugugg

SEQ ID NO: 75165 - RNA, 32 nt, Homo Sapiens
agccucccuuuccucaucuacucugugggugg

SEQ ID NO: 75166 - RNA, 32 nt, Homo Sapiens
uuguaaucaguuccauagcuuuagacgguggu

SEQ ID NO: 75167 - RNA, 32 nt, Homo Sapiens
gaccagugucaaagaguuugcauauuggguag

SEQ ID NO: 75168 - RNA, 32 nt, Homo Sapiens
cauguuuggggucauaaacagaggaaguauca

SEQ ID NO: 75169 - RNA, 32 nt, Homo Sapiens
guaggcggcggcgcccucgggagggagcugcg

SEQ ID NO: 75170 - RNA, 32 nt, Homo Sapiens
gauacagccugcaagugguagcaagaagugau

SEQ ID NO: 75171 - RNA, 30 nt, Homo Sapiens
ccauauuucaguaggaccuggguagggauu

SEQ ID NO: 75172 - RNA, 32 nt, Homo Sapiens
guacaggaauggggcagacgcgauucagguga

SEQ ID NO: 75173 - RNA, 32 nt, Homo Sapiens
ucucugucaccccugaccccagccauucaccc

SEQ ID NO: 75174 - RNA, 32 nt, Homo Sapiens
caagcaucugaagagaguuuuccugauagauc

SEQ ID NO: 75175 - RNA, 32 nt, Homo Sapiens
aucugccugugcuaacccagcugaacaaugga

SEQ ID NO: 75176 - RNA, 32 nt, Homo Sapiens
augaauccaucccauugccuccccaacucugc

SEQ ID NO: 75177 - RNA, 32 nt, Homo Sapiens
ccugucggcagagugucuuaacaccagaugcu

SEQ ID NO: 75178 - RNA, 32 nt, Homo Sapiens
guccacagccacccagcugagguccugggucu

SEQ ID NO: 75179 - RNA, 32 nt, Homo Sapiens
aucuccugauacuuuuauuacaccucuagcag

SEQ ID NO: 75180 - RNA, 32 nt, Homo Sapiens
guggugggauccacgcugggccgaggauggga

SEQ ID NO: 75181 - RNA, 32 nt, Homo Sapiens
cuagccuuuaaauggagucaacuuuuuaauua

SEQ ID NO: 75182 - RNA, 32 nt, Homo Sapiens
ccuuuggcagguuggggaagggcuugccccca

SEQ ID NO: 75183 - RNA, 32 nt, Homo Sapiens
gauuuuaugcuguuuagcacaauuucuauuga

SEQ ID NO: 75184 - RNA, 32 nt, Homo Sapiens
ggucggggccggugggggccccgcccccgucu

SEQ ID NO: 75185 - RNA, 32 nt, Homo Sapiens
cggccccggucuaacugcccccgccccgaggc

SEQ ID NO: 75186 - RNA, 32 nt, Homo Sapiens
ucagggcuaggcggcgggagggcgccaggccg

SEQ ID NO: 75187 - RNA, 32 nt, Homo Sapiens
ccaggagggagagcgcagcugcugcaggauuc

SEQ ID NO: 75188 - RNA, 32 nt, Homo Sapiens
ccagccuugagcccagccugcggccaggggac

SEQ ID NO: 75189 - RNA, 32 nt, Homo Sapiens
augcauggaccugauaauccccggggaacagu

SEQ ID NO: 75190 - RNA, 29 nt, Homo Sapiens
gcucauggcgccggcgucgcgguugcucg

SEQ ID NO: 75191 - RNA, 28 nt, Homo Sapiens
aagaauguauaaauauguaugcucugcc

SEQ ID NO: 75192 - RNA, 28 nt, Homo Sapiens
aaaaugggaggcagccucugcugcugug

SEQ ID NO: 75193 - RNA, 32 nt, Homo Sapiens
aucugccuuuggagauuacaaaugaaauggcu

SEQ ID NO: 75194 - RNA, 32 nt, Homo Sapiens
uggauaauuuaaaagcuugauagcugggacug

SEQ ID NO: 75195 - RNA, 32 nt, Homo Sapiens
ccaccaaccccagccagugucagacacaaucc

SEQ ID NO: 75196 - RNA, 32 nt, Homo Sapiens
cgcgacucgccccgggaccccgcacagguuga

SEQ ID NO: 75197 - RNA, 32 nt, Homo Sapiens
cagccuucugaguagcugggaguacaggcgcc

SEQ ID NO: 75198 - RNA, 32 nt, Homo Sapiens
gugggcauuuuuuuauuuuaaauuuuuuacau

SEQ ID NO: 75199 - RNA, 32 nt, Homo Sapiens
cuccccccauccccgccgccuccauucuggcc

SEQ ID NO: 75200 - RNA, 32 nt, Homo Sapiens
cgcugagggaggagucaggcugucccagcgag

SEQ ID NO: 75201 - RNA, 32 nt, Homo Sapiens
ugaggaaauauuaauuuuccaaugcacaguug

SEQ ID NO: 75202 - RNA, 32 nt, Homo Sapiens
cagccacgcauaauucuagauuucaagagcau

SEQ ID NO: 75203 - RNA, 32 nt, Homo Sapiens
auggagagaugggccguugccaugguggacgg

SEQ ID NO: 75204 - RNA, 32 nt, Homo Sapiens
ugccuuaaugaaaucauuuuaacauuauauuc

SEQ ID NO: 75205 - RNA, 32 nt, Homo Sapiens
uuccugcuacuuaaauuugaaucugagugaau

SEQ ID NO: 75206 - RNA, 32 nt, Homo Sapiens
gaaggccggggagaggccagugugggaggacc

SEQ ID NO: 75207 - RNA, 32 nt, Homo Sapiens
ugaccuugaagaagaucaguagagauuaugua

SEQ ID NO: 75208 - RNA, 32 nt, Homo Sapiens
uaucugcuggguguucuuguuaucauauugua

SEQ ID NO: 75209 - RNA, 32 nt, Homo Sapiens
cuccacucuugaucucucuuguccucuucugc

SEQ ID NO: 75210 - RNA, 32 nt, Homo Sapiens
aaggacuucaacugaccuuaugcuaagcugcc

SEQ ID NO: 75211 - RNA, 32 nt, Homo Sapiens
gacggagucuggcucugucacccaggcuagag

SEQ ID NO: 75212 - RNA, 32 nt, Homo Sapiens
uggaugaaucaccuaaguuuuauuuuugagaa

SEQ ID NO: 75213 - RNA, 32 nt, Homo Sapiens
gguguuugcuaaacuucuauggcuuccagggu

SEQ ID NO: 75214 - RNA, 32 nt, Homo Sapiens
gcgagccccuccccgggagcccugggugcagg

SEQ ID NO: 75215 - RNA, 32 nt, Homo Sapiens
cuucuuuuguuuucuuuuaaauuaaaaaugau

SEQ ID NO: 75216 - RNA, 32 nt, Homo Sapiens
gagguauaauuucuguuagugaaaugcacagg

SEQ ID NO: 75217 - RNA, 32 nt, Homo Sapiens
uacuacaccuuaagagcaggacucugccuccu

SEQ ID NO: 75218 - RNA, 32 nt, Homo Sapiens
ggaaggcauccaaaugcugauggggaggcugg

SEQ ID NO: 75219 - RNA, 32 nt, Homo Sapiens
agccccaccagcgaugaggacccggcccggcc

SEQ ID NO: 75220 - RNA, 32 nt, Homo Sapiens
guaaacacuguguauuguuguaaaauguaaag

SEQ ID NO: 75221 - RNA, 32 nt, Homo Sapiens
uuagcugcggagcccuggaagcugccuguccu

SEQ ID NO: 75222 - RNA, 32 nt, Homo Sapiens
guagggcggggacuggagauccccucauuaaa

SEQ ID NO: 75223 - RNA, 32 nt, Homo Sapiens
aauaauuguuuuucucucugucaagguuucug

SEQ ID NO: 75224 - RNA, 32 nt, Homo Sapiens
cauggaggaaauuuaugcgaaguuuguguccc

SEQ ID NO: 75225 - RNA, 32 nt, Homo Sapiens
ccguggacaggaagaacaucgacacaagggcc

SEQ ID NO: 75226 - RNA, 32 nt, Homo Sapiens
auauacaggcuucccuuuuuuauuuuuaaagg

SEQ ID NO: 75227 - RNA, 32 nt, Homo Sapiens
uucuuuucuuuuucuuuuucuuuuuuucuuuu

SEQ ID NO: 75228 - RNA, 32 nt, Homo Sapiens
caaggugacauaucugaaguggcugccugagu

SEQ ID NO: 75229 - RNA, 32 nt, Homo Sapiens
gccugcgcgcacgcagggaccggagcccgagc

SEQ ID NO: 75230 - RNA, 32 nt, Homo Sapiens
ugauguuagcuacuuugagaaccacuggaaau

SEQ ID NO: 75231 - RNA, 32 nt, Homo Sapiens
ugguugacauccccuuccucagcccucccagc

SEQ ID NO: 75232 - RNA, 32 nt, Homo Sapiens
ccuugugguguuggaucagguacugugucugc

SEQ ID NO: 75233 - RNA, 32 nt, Homo Sapiens
acacaugaacacacugaagauauuuccuucag

SEQ ID NO: 75234 - RNA, 32 nt, Homo Sapiens
auuuuacaugguucauugcaucuagcauuuuu

SEQ ID NO: 75235 - RNA, 32 nt, Homo Sapiens
auauggggagcaucuguaaaucuuuagccuug

SEQ ID NO: 75236 - RNA, 32 nt, Homo Sapiens
agacccuccgccuggcaaccgccccgucugau

SEQ ID NO: 75237 - RNA, 32 nt, Homo Sapiens
aaagcaacuaaaaugaaacauaaaaccuuuua

SEQ ID NO: 75238 - RNA, 32 nt, Homo Sapiens
cugacaaagugagcuuucugcugcccaucuga

SEQ ID NO: 75239 - RNA, 32 nt, Homo Sapiens
acucagaagacacccagcugggcccuucaugg

SEQ ID NO: 75240 - RNA, 31 nt, Homo Sapiens
gccugacagcgcagcuccugaggacuucugc

SEQ ID NO: 75241 - RNA, 32 nt, Homo Sapiens
gaagcccuggggaugauguggaaauaggggca

SEQ ID NO: 75242 - RNA, 32 nt, Homo Sapiens
agcagccguggcgccacggggcgaggcgcggc

SEQ ID NO: 75243 - RNA, 32 nt, Homo Sapiens
aggaauagaaaagaaaaccuuaaaggauaugu

SEQ ID NO: 75244 - RNA, 32 nt, Homo Sapiens
agacuugggaggagaugcuuguccuaggucca

SEQ ID NO: 75245 - RNA, 29 nt, Homo Sapiens
uuaauagagacuaucuauuuucuuuuuua

SEQ ID NO: 75246 - RNA, 32 nt, Homo Sapiens
uuuuaaaaugacuaagucauuuuaguauguca

SEQ ID NO: 75247 - RNA, 32 nt, Homo Sapiens
uagacaugguagaaauguguuucucugcagaa

SEQ ID NO: 75248 - RNA, 32 nt, Homo Sapiens
gaggagaaaggacuuccacacggcagccagcg

SEQ ID NO: 75249 - RNA, 32 nt, Homo Sapiens
cauccauuguacugccuucuauggguugugag

SEQ ID NO: 75250 - RNA, 32 nt, Homo Sapiens
ccgagaagauaaagaguguacaucuuucuggu

SEQ ID NO: 75251 - RNA, 32 nt, Homo Sapiens
gccuagggcaggucgggagagaggcggccccc

SEQ ID NO: 75252 - RNA, 32 nt, Homo Sapiens
ggagugcaguggcgugaucuuaacucacugca

SEQ ID NO: 75253 - RNA, 32 nt, Homo Sapiens
gggcccaccuggagcccuccccugcccacccg

SEQ ID NO: 75254 - RNA, 32 nt, Homo Sapiens
cuguacucugcacgacuccuccagguggccag

SEQ ID NO: 75255 - RNA, 32 nt, Homo Sapiens
ucuugaucugaauuguaguuacuuggguuuag

SEQ ID NO: 75256 - RNA, 32 nt, Homo Sapiens
ucagucucggaacaugaccuuuagucugugga

SEQ ID NO: 75257 - RNA, 32 nt, Homo Sapiens
ugguuuucuucauccaugaaauccaaguaaua

SEQ ID NO: 75258 - RNA, 32 nt, Homo Sapiens
uccccggcuggcccuccuuucuccggggcauu

SEQ ID NO: 75259 - RNA, 32 nt, Homo Sapiens
aucuggcauuuccccugcuggcacucauucuc

SEQ ID NO: 75260 - RNA, 32 nt, Homo Sapiens
uccccccggggcccaggggcucugagcauuuc

SEQ ID NO: 75261 - RNA, 32 nt, Homo Sapiens
gaagauaaugaagaagaaauggaagagaaacu

SEQ ID NO: 75262 - RNA, 32 nt, Homo Sapiens
ccccaggagggagagggacccggcgagggcuc

SEQ ID NO: 75263 - RNA, 32 nt, Homo Sapiens
ggugcugcuggucuccuggaccuaccaggacg

SEQ ID NO: 75264 - RNA, 32 nt, Homo Sapiens
agcuaauagcaacucauuuauuucauuuuggu

SEQ ID NO: 75265 - RNA, 32 nt, Homo Sapiens
cacauguuuuaucugauuccugugauaacuua

SEQ ID NO: 75266 - RNA, 32 nt, Homo Sapiens
aagaugagaaaguaauuugagauuuuacucug

SEQ ID NO: 75267 - RNA, 32 nt, Homo Sapiens
aauuagccaggcaggguggugcaugccuguag

SEQ ID NO: 75268 - RNA, 32 nt, Homo Sapiens
caaggguacgggccucucugguacacgagcgu

SEQ ID NO: 75269 - RNA, 32 nt, Homo Sapiens
gucugaggccccaggcccuaggauuccucccc

SEQ ID NO: 75270 - RNA, 32 nt, Homo Sapiens
ggacagggcaucccagaucuggacuauccacg

SEQ ID NO: 75271 - RNA, 32 nt, Homo Sapiens
cccagcuuucccagccccagcguuuugggucu

SEQ ID NO: 75272 - RNA, 32 nt, Homo Sapiens
uuaacacuagaaucagcccgcaagaugcuugc

SEQ ID NO: 75273 - RNA, 26 nt, Homo Sapiens
cauggauggcccgacgcggggccaug

SEQ ID NO: 75274 - RNA, 32 nt, Homo Sapiens
uggcccccucuuaaccagcaguucuugucugg

SEQ ID NO: 75275 - RNA, 32 nt, Homo Sapiens
acuacagccugccuggauauggaugaugccaa

SEQ ID NO: 75276 - RNA, 32 nt, Homo Sapiens
gccucacuuuugcugcugcggggcccacacag

SEQ ID NO: 75277 - RNA, 32 nt, Homo Sapiens
cgccugccacgcugcgcgcugcccucagccgg

SEQ ID NO: 75278 - RNA, 32 nt, Homo Sapiens
auaccuuguauuugauaaaaauccauuacaug

SEQ ID NO: 75279 - RNA, 32 nt, Homo Sapiens
agaucaucugugugagauacaaauacaucuau

SEQ ID NO: 75280 - RNA, 32 nt, Homo Sapiens
gcgaaggccuggucacuauuaagggucugaaa

SEQ ID NO: 75281 - RNA, 32 nt, Homo Sapiens
ggcugauuauauuguaaugauguuagauaaua

SEQ ID NO: 75282 - RNA, 32 nt, Homo Sapiens
aaguuggggaggggcgcgggagggcgcaugcg

SEQ ID NO: 75283 - RNA, 32 nt, Homo Sapiens
ugcuuugaagcaguugugucagcuacugcgga

SEQ ID NO: 75284 - RNA, 32 nt, Homo Sapiens
uauuuguguggguucuuaauuuugaaggaccu

SEQ ID NO: 75285 - RNA, 32 nt, Homo Sapiens
uguccacgcucgcccggcucguccgacgcgcc

SEQ ID NO: 75286 - RNA, 32 nt, Homo Sapiens
uagcuggaucccaucuccaccaaaaaauacca

SEQ ID NO: 75287 - RNA, 32 nt, Homo Sapiens
cugccaaggcaaacagcauagucucgaguagg

SEQ ID NO: 75288 - RNA, 31 nt, Homo Sapiens
uacauuuuugaccuguauuagauuagaauuu

SEQ ID NO: 75289 - RNA, 32 nt, Homo Sapiens
gcugcggguacucgaugguccuggacaguacu

SEQ ID NO: 75290 - RNA, 32 nt, Homo Sapiens
gaggcaaagugucugcaucuucguccagcgac

SEQ ID NO: 75291 - RNA, 32 nt, Homo Sapiens
acaacagccugccgcugucuuccuccucacug

SEQ ID NO: 75292 - RNA, 32 nt, Homo Sapiens
aagcagcccgucuggauuuguuugcccaggac

SEQ ID NO: 75293 - RNA, 32 nt, Homo Sapiens
acuuacaauuuaaauccuuaaaaguuaccucc

SEQ ID NO: 75294 - RNA, 32 nt, Homo Sapiens
aaccuugggugugcagagccugccccgccuuc

SEQ ID NO: 75295 - RNA, 30 nt, Homo Sapiens
auccccaacugguccaaccguccgggugac

SEQ ID NO: 75296 - RNA, 32 nt, Homo Sapiens
agacaccccuggagcuucugugaaucugcugu

SEQ ID NO: 75297 - RNA, 32 nt, Homo Sapiens
uuaauugaaaauauuuucuggggauuuucucu

SEQ ID NO: 75298 - RNA, 32 nt, Homo Sapiens
agccguccggggccgccacucuccucggccgg

SEQ ID NO: 75299 - RNA, 29 nt, Homo Sapiens
uuugucauauguaaaagucauaacaccug

SEQ ID NO: 75300 - RNA, 32 nt, Homo Sapiens
agugcaagagcuuguuuauauuucauacuuuu

SEQ ID NO: 75301 - RNA, 32 nt, Homo Sapiens
uaccagcagccucagcuuuacaaaugccuugg

SEQ ID NO: 75302 - RNA, 32 nt, Homo Sapiens
caaagugucggccgcccggcgccggcgcccgc

SEQ ID NO: 75303 - RNA, 32 nt, Homo Sapiens
aacgagaaucaucauacuacuuugcaucggag

SEQ ID NO: 75304 - RNA, 32 nt, Homo Sapiens
cguguuaaacauugcauuuaaucgagaugcgu

SEQ ID NO: 75305 - RNA, 32 nt, Homo Sapiens
uguggcuccgggcaggggccgcggccgaaaga

SEQ ID NO: 75306 - RNA, 32 nt, Homo Sapiens
gcuaugggcucucgugcggacggcuggggcag

SEQ ID NO: 75307 - RNA, 32 nt, Homo Sapiens
gagauuuuuuaauccuuuuuuauuccauaaga

SEQ ID NO: 75308 - RNA, 32 nt, Homo Sapiens
aacagcagcagcacuaacuugaccuuuucguu

SEQ ID NO: 75309 - RNA, 32 nt, Homo Sapiens
ucaaaaaagacauagacauaggagacuagaaa

SEQ ID NO: 75310 - RNA, 32 nt, Homo Sapiens
acuguacacacgccugccccccagcgcccugc

SEQ ID NO: 75311 - RNA, 32 nt, Homo Sapiens
agcacccuguuccgcccgcccagcaugcagaa

SEQ ID NO: 75312 - RNA, 32 nt, Homo Sapiens
guuuucaucuucuaguuugucuauuuuaauaa

SEQ ID NO: 75313 - RNA, 32 nt, Homo Sapiens
agccugugucuucacacaacaaacaccaccug

SEQ ID NO: 75314 - RNA, 32 nt, Homo Sapiens
ugaccaggaggggacaucgugggaacaauaau

SEQ ID NO: 75315 - RNA, 32 nt, Homo Sapiens
ugcaaacaaggugucgccguccaaauguacug

SEQ ID NO: 75316 - RNA, 32 nt, Homo Sapiens
ccugugcccccaggcgggggucgggcagcccc

SEQ ID NO: 75317 - RNA, 31 nt, Homo Sapiens
cacacagcgcccgccgccugaguuagccuga

SEQ ID NO: 75318 - RNA, 32 nt, Homo Sapiens
cuccucggccagcucagguugcagcuucucug

SEQ ID NO: 75319 - RNA, 32 nt, Homo Sapiens
caggccccaaguuauuuuuuagcaaucuuacg

SEQ ID NO: 75320 - RNA, 32 nt, Homo Sapiens
cauuuuuguaaauucugugcccuuugcuguag

SEQ ID NO: 75321 - RNA, 32 nt, Homo Sapiens
cuugggugguaguuuuggaagcagucaguugu

SEQ ID NO: 75322 - RNA, 32 nt, Homo Sapiens
gaccaaacucucccuuuccccauccaaucggu

SEQ ID NO: 75323 - RNA, 32 nt, Homo Sapiens
caagucagcauauaaugugaaccaucacagug

SEQ ID NO: 75324 - RNA, 32 nt, Homo Sapiens
cuugucacuggcgaagucagaugcagccagua

SEQ ID NO: 75325 - RNA, 32 nt, Homo Sapiens
ucgggacugugagcuuccuggcuccugggcag

SEQ ID NO: 75326 - RNA, 32 nt, Homo Sapiens
ggugacagcaugacgagcgaggugauagaaga

SEQ ID NO: 75327 - RNA, 32 nt, Homo Sapiens
acacacccuccuccccgggacgccgcagcuuu

SEQ ID NO: 75328 - RNA, 32 nt, Homo Sapiens
gaggaggaccaguggaauauuccugcuucaca

SEQ ID NO: 75329 - RNA, 32 nt, Homo Sapiens
gaaaauauauguuuaaguggaacucuccaauu

SEQ ID NO: 75330 - RNA, 32 nt, Homo Sapiens
agagguucuggugggagagaaaggugcgugug

SEQ ID NO: 75331 - RNA, 32 nt, Homo Sapiens
augaggaauacagaagcagugugagcagggcu

SEQ ID NO: 75332 - RNA, 32 nt, Homo Sapiens
cuuuccaccucuugcggaaccaacucuuggag

SEQ ID NO: 75333 - RNA, 32 nt, Homo Sapiens
gggcgcgcggagaggaggccgggccggcggua

SEQ ID NO: 75334 - RNA, 32 nt, Homo Sapiens
cacaauggcaugaucucggcucacugcgaccu

SEQ ID NO: 75335 - RNA, 32 nt, Homo Sapiens
agugcccuguguuccuggagaaggcauuccag

SEQ ID NO: 75336 - RNA, 28 nt, Homo Sapiens
aaaauguauccuguagaagauuuugaag

SEQ ID NO: 75337 - RNA, 32 nt, Homo Sapiens
gcugccgugucugcggagccaggugccggcgu

SEQ ID NO: 75338 - RNA, 32 nt, Homo Sapiens
augcagcccucccuggccuccagagguggcgu

SEQ ID NO: 75339 - RNA, 32 nt, Homo Sapiens
ugggugaggguggcgggccugcggggacauuc

SEQ ID NO: 75340 - RNA, 32 nt, Homo Sapiens
ccuaaggaugccauuuuguucuuaauauaacu

SEQ ID NO: 75341 - RNA, 32 nt, Homo Sapiens
cccaauuuucuuaugaacagauauuuuuaacu

SEQ ID NO: 75342 - RNA, 32 nt, Homo Sapiens
guggaugagagcuauauacuuuuacacacuuu

SEQ ID NO: 75343 - RNA, 32 nt, Homo Sapiens
ucaugcuagccccuuucccuccccugaaccug

SEQ ID NO: 75344 - RNA, 32 nt, Homo Sapiens
guccaggcucgucauuggaggugaacaagcaa

SEQ ID NO: 75345 - RNA, 32 nt, Homo Sapiens
cuuccugcaauaaaaaaguggauccugcauuc

SEQ ID NO: 75346 - RNA, 32 nt, Homo Sapiens
ccccugaccccuuuccuucucugugguccccg

SEQ ID NO: 75347 - RNA, 32 nt, Homo Sapiens
uaaaauacagaauaguuauauuugaaguagcc

SEQ ID NO: 75348 - RNA, 32 nt, Homo Sapiens
ccccacccaguccugcacacuugguccaucca

SEQ ID NO: 75349 - RNA, 32 nt, Homo Sapiens
gaggucuugcagccccuguggaugcccccgcc

SEQ ID NO: 75350 - RNA, 32 nt, Homo Sapiens
cgcggcggcagguccaccugggcuugcgaagg

SEQ ID NO: 75351 - RNA, 32 nt, Homo Sapiens
caauucaauucuuccuuuuuuauuacuauuuc

SEQ ID NO: 75352 - RNA, 32 nt, Homo Sapiens
uagaggugaggcuggugccaucugucugcuuc

SEQ ID NO: 75353 - RNA, 32 nt, Homo Sapiens
agagaaaagacaaauaaauacuguauuaauaa

SEQ ID NO: 75354 - RNA, 32 nt, Homo Sapiens
ggcaggaggcuuuggaggcacaagccauuaua

SEQ ID NO: 75355 - RNA, 32 nt, Homo Sapiens
cggcggcuccagcagggucugguuaagggguc

SEQ ID NO: 75356 - RNA, 32 nt, Homo Sapiens
acgcaguugcaaacaauaaaaaaaaaaaaaaa

SEQ ID NO: 75357 - RNA, 32 nt, Homo Sapiens
cugggcgcgggaagguagcgggagcugcauuu

SEQ ID NO: 75358 - RNA, 32 nt, Homo Sapiens
caggugacuuggauucagaaauacaauuuaua

SEQ ID NO: 75359 - RNA, 32 nt, Homo Sapiens
acggagcuucaagucagacagaucccugccuu

SEQ ID NO: 75360 - RNA, 32 nt, Homo Sapiens
acccugguacugggcaaccccugggacaggca

SEQ ID NO: 75361 - RNA, 32 nt, Homo Sapiens
cugcaguguuugugucccuggguacuugagau

SEQ ID NO: 75362 - RNA, 32 nt, Homo Sapiens
uuguaaauaugaaacuuuuuaaaucugauuuu

SEQ ID NO: 75363 - RNA, 32 nt, Homo Sapiens
uaggcuaugugagcaccagagguaaagcaaca

SEQ ID NO: 75364 - RNA, 32 nt, Homo Sapiens
accuagcggacgggcgggcgggcgcgcgugug

SEQ ID NO: 75365 - RNA, 32 nt, Homo Sapiens
ccucauccugcuggggaccccacgaggggaca

SEQ ID NO: 75366 - RNA, 32 nt, Homo Sapiens
aaaauccuggaagacaacccaggcaguaccau

SEQ ID NO: 75367 - RNA, 32 nt, Homo Sapiens
ccaacuggaagacagcucgagauccagaaggg

SEQ ID NO: 75368 - RNA, 32 nt, Homo Sapiens
ugaccugaaaaagccuaucaaauacuaucaaa

SEQ ID NO: 75369 - RNA, 32 nt, Homo Sapiens
ucacccagcuucuugcauggauuuaguuacca

SEQ ID NO: 75370 - RNA, 32 nt, Homo Sapiens
ggcacaaucugugucugggcuaaggaaagcag

SEQ ID NO: 75371 - RNA, 32 nt, Homo Sapiens
uaauaggcuaauauuaucacuuucucagaaag

SEQ ID NO: 75372 - RNA, 32 nt, Homo Sapiens
gggguguggcgcggagaaugauuacggaccug

SEQ ID NO: 75373 - RNA, 32 nt, Homo Sapiens
gggccgcggcggugguggggggagcacgaauc

SEQ ID NO: 75374 - RNA, 32 nt, Homo Sapiens
gggguggagguaguaaaggccauggccaugca

SEQ ID NO: 75375 - RNA, 32 nt, Homo Sapiens
cuaaaaaguguuuuauacuagcuuucuugauu

SEQ ID NO: 75376 - RNA, 32 nt, Homo Sapiens
cuguauuguaaauacuacagggauagcacuau

SEQ ID NO: 75377 - RNA, 32 nt, Homo Sapiens
cuuugagucucucccccuggaaucuucuaucu

SEQ ID NO: 75378 - RNA, 32 nt, Homo Sapiens
cugaucuucugaccuucugugcuuuuuguugu

SEQ ID NO: 75379 - RNA, 32 nt, Homo Sapiens
cucccccaugucccacccuguaccucauccca

SEQ ID NO: 75380 - RNA, 32 nt, Homo Sapiens
gcugcuccccacucggccuccuggugcuacag

SEQ ID NO: 75381 - RNA, 32 nt, Homo Sapiens
ucucccccuccauggcucccuuagccgaaguc

SEQ ID NO: 75382 - RNA, 32 nt, Homo Sapiens
agaguggagagugacaugugcuggacacuguc

SEQ ID NO: 75383 - RNA, 32 nt, Homo Sapiens
uuuuaagaugaacuuuuaaagaaccuugcgau

SEQ ID NO: 75384 - RNA, 32 nt, Homo Sapiens
gaugguacuguaacauuccauauuaucuauaa

SEQ ID NO: 75385 - RNA, 32 nt, Homo Sapiens
uucuagguauauuauuaguguuuuauggucua

SEQ ID NO: 75386 - RNA, 32 nt, Homo Sapiens
gccagggcuggugcccggggccgcacugugag

SEQ ID NO: 75387 - RNA, 32 nt, Homo Sapiens
ugcagcuaaaagauggaauauuugcgggcgug

SEQ ID NO: 75388 - RNA, 32 nt, Homo Sapiens
uuuuuugcauuacuuuguaaccuuuuucuaug

SEQ ID NO: 75389 - RNA, 32 nt, Homo Sapiens
ugagccacggaccgcauccuccagggggccug

SEQ ID NO: 75390 - RNA, 31 nt, Homo Sapiens
cccuggcaagccaccacaguuauucggauuc

SEQ ID NO: 75391 - RNA, 32 nt, Homo Sapiens
acuggagcguccccuauggucuccugcugugg

SEQ ID NO: 75392 - RNA, 32 nt, Homo Sapiens
gcccuggagggugccuggcacacagaaucuug

SEQ ID NO: 75393 - RNA, 32 nt, Homo Sapiens
cauaucugucacaaauaggugugugcaaauag

SEQ ID NO: 75394 - RNA, 30 nt, Homo Sapiens
cccgguuucuucuaggucgcccugguuccu

SEQ ID NO: 75395 - RNA, 32 nt, Homo Sapiens
agccacauugaguugcuuuuucugggaugagg

SEQ ID NO: 75396 - RNA, 32 nt, Homo Sapiens
cucuggagccccugcuggcccaggccaacuuc

SEQ ID NO: 75397 - RNA, 32 nt, Homo Sapiens
gcaaugugcacuuuaaacaauuuggauauugg

SEQ ID NO: 75398 - RNA, 32 nt, Homo Sapiens
agucauuaugauaauaaggaaaacaguguuuu

SEQ ID NO: 75399 - RNA, 32 nt, Homo Sapiens
ccuuccuuuccacuggcugucaagcccacagg

SEQ ID NO: 75400 - RNA, 32 nt, Homo Sapiens
gagagagcugcggagagcugccagcugcaccg

SEQ ID NO: 75401 - RNA, 32 nt, Homo Sapiens
ucaggaaguguauacaacuuuuuuaaaaauua

SEQ ID NO: 75402 - RNA, 32 nt, Homo Sapiens
ugcuuuaaugugcauggugcugugaauaauug

SEQ ID NO: 75403 - RNA, 32 nt, Homo Sapiens
auuguuuuucccuuuauuacacaggacagcca

SEQ ID NO: 75404 - RNA, 32 nt, Homo Sapiens
caagucauuuuucuugaucguuguggaagguu

SEQ ID NO: 75405 - RNA, 32 nt, Homo Sapiens
gacaggugaugccagcaguuccugcuccucug

SEQ ID NO: 75406 - RNA, 32 nt, Homo Sapiens
aaagguacugucaauaucucacucuuggggau

SEQ ID NO: 75407 - RNA, 32 nt, Homo Sapiens
uaaccccucccuccccacagccagaggaggcc

SEQ ID NO: 75408 - RNA, 32 nt, Homo Sapiens
gguaggcauaguacaguacgauauaucauucc

SEQ ID NO: 75409 - RNA, 32 nt, Homo Sapiens
accucugcccgcggucucuccuccuuucagcc

SEQ ID NO: 75410 - RNA, 32 nt, Homo Sapiens
aggcugugguugggaauuuguauuuucucagg

SEQ ID NO: 75411 - RNA, 32 nt, Homo Sapiens
ccuccucgccgccgcuuccucucgagaaggcg

SEQ ID NO: 75412 - RNA, 32 nt, Homo Sapiens
acucucggguuccacacccuccgauccuaucc

SEQ ID NO: 75413 - RNA, 32 nt, Homo Sapiens
cuucagggacuggccugagaccggggcacagg

SEQ ID NO: 75414 - RNA, 32 nt, Homo Sapiens
uguguccguguggccuggaggagcccgaggga

SEQ ID NO: 75415 - RNA, 32 nt, Homo Sapiens
cgucacucacugugucugaucugucucacuca

SEQ ID NO: 75416 - RNA, 32 nt, Homo Sapiens
aauacugaaacagcucagcuugugaaagauaa

SEQ ID NO: 75417 - RNA, 32 nt, Homo Sapiens
cuagaaaagaguggaaagaaaccaagguggaa

SEQ ID NO: 75418 - RNA, 32 nt, Homo Sapiens
gacgcgcuggggccgggaccccgggagacuca

SEQ ID NO: 75419 - RNA, 32 nt, Homo Sapiens
aagcucaagggggcucuggccuuggggaccag

SEQ ID NO: 75420 - RNA, 32 nt, Homo Sapiens
caaauugaacucucucuuagacuggauuugga

SEQ ID NO: 75421 - RNA, 32 nt, Homo Sapiens
augagacaaucauuuuaaguuuuaagauaaca

SEQ ID NO: 75422 - RNA, 32 nt, Homo Sapiens
ccauuucggucccaaggugagcugacacaggc

SEQ ID NO: 75423 - RNA, 32 nt, Homo Sapiens
agggucuuugcagaugcaaugaagauauaagu

SEQ ID NO: 75424 - RNA, 32 nt, Homo Sapiens
ccggcgggagacggcggcuugcgagcuggcug

SEQ ID NO: 75425 - RNA, 32 nt, Homo Sapiens
gagcuugucacauucuaaucccucuccccauc

SEQ ID NO: 75426 - RNA, 31 nt, Homo Sapiens
ccacgcuacugcccccugccccccgcccccc

SEQ ID NO: 75427 - RNA, 32 nt, Homo Sapiens
gaagugacccuucuauuaggccuguugaaggg

SEQ ID NO: 75428 - RNA, 32 nt, Homo Sapiens
cuugcaaugcuguucauggaggaugcucagga

SEQ ID NO: 75429 - RNA, 32 nt, Homo Sapiens
ccccgccacagugaaauaaagcaucccacccu

SEQ ID NO: 75430 - RNA, 32 nt, Homo Sapiens
aaaucuguaugauaacauuuuuuccucuggac

SEQ ID NO: 75431 - RNA, 32 nt, Homo Sapiens
gcacuaacgcucucgugguugcucgacuguug

SEQ ID NO: 75432 - RNA, 32 nt, Homo Sapiens
caagucgccgcugcacgacgucuggccggcgc

SEQ ID NO: 75433 - RNA, 32 nt, Homo Sapiens
uuaauuuuucccuuuucaaccugaacaaauca

SEQ ID NO: 75434 - RNA, 31 nt, Homo Sapiens
cugaucacacggagaagagccaggacuccga

SEQ ID NO: 75435 - RNA, 31 nt, Homo Sapiens
gaagguaacaguuagaaccaggcaauuuagg

SEQ ID NO: 75436 - RNA, 32 nt, Homo Sapiens
cgacccgcgcagccugccgcucucccgccgcc

SEQ ID NO: 75437 - RNA, 32 nt, Homo Sapiens
cugaaaacaguugacaacaaagggcccccaua

SEQ ID NO: 75438 - RNA, 32 nt, Homo Sapiens
gaauaucuggauucugcucagaggaacuugua

SEQ ID NO: 75439 - RNA, 32 nt, Homo Sapiens
gaggcccaaggacaggacuugcgaccuugaag

SEQ ID NO: 75440 - RNA, 32 nt, Homo Sapiens
uuagcugaaaacaaaaucaaagcaguuaaguc

SEQ ID NO: 75441 - RNA, 32 nt, Homo Sapiens
uaaaaagaaugaauuacggauacauguggcaa

SEQ ID NO: 75442 - RNA, 30 nt, Homo Sapiens
uuggaugucuuugcugcagucuucucucug

SEQ ID NO: 75443 - RNA, 32 nt, Homo Sapiens
guaaauguuaucuauuuuuguagauaauuuua

SEQ ID NO: 75444 - RNA, 32 nt, Homo Sapiens
gaggcucucggcgagcgcggcgcgguaacaag

SEQ ID NO: 75445 - RNA, 32 nt, Homo Sapiens
aggacccccucccccacccaccucucuggcuu

SEQ ID NO: 75446 - RNA, 32 nt, Homo Sapiens
cacucuugcaguugguaaugggguggcaauca

SEQ ID NO: 75447 - RNA, 32 nt, Homo Sapiens
aacuggccgcacugacccgucaacucccgguu

SEQ ID NO: 75448 - RNA, 32 nt, Homo Sapiens
uguuuccagaauauccagaaauccaaaggggc

SEQ ID NO: 75449 - RNA, 32 nt, Homo Sapiens
agccagcugaaggaaagaggaagugcuagaga

SEQ ID NO: 75450 - RNA, 32 nt, Homo Sapiens
aguggacgauagaagaaaaagagcuguuugaa

SEQ ID NO: 75451 - RNA, 32 nt, Homo Sapiens
agcucauccaacaaaggccuccucaugcuggc

SEQ ID NO: 75452 - RNA, 32 nt, Homo Sapiens
cugagccggagacaggcaauugugaaaaacuu

SEQ ID NO: 75453 - RNA, 32 nt, Homo Sapiens
aggcucugggagggaaagggacuugccuaaag

SEQ ID NO: 75454 - RNA, 32 nt, Homo Sapiens
agauacuuauaaaaauacaaacuggcaugaaa

SEQ ID NO: 75455 - RNA, 32 nt, Homo Sapiens
gccccgcccccagacauagugaaucagaaacc

SEQ ID NO: 75456 - RNA, 32 nt, Homo Sapiens
uguacaccgcuccgcucccaccaccgcuacca

SEQ ID NO: 75457 - RNA, 32 nt, Homo Sapiens
agauccgugagagaauacauuuuuguuuucuu

SEQ ID NO: 75458 - RNA, 32 nt, Homo Sapiens
uccacacagagagagucagaugagggucuuua

SEQ ID NO: 75459 - RNA, 32 nt, Homo Sapiens
gggcucccuagggaagcccauccaucuggaug

SEQ ID NO: 75460 - RNA, 32 nt, Homo Sapiens
aggcuggcaaagccccacccucauggagccuc

SEQ ID NO: 75461 - RNA, 32 nt, Homo Sapiens
caaauaaagcuuuauuugaggacccccaaaaa

SEQ ID NO: 75462 - RNA, 32 nt, Homo Sapiens
gugguaugggauggggcgggggcggucuaggg

SEQ ID NO: 75463 - RNA, 32 nt, Homo Sapiens
aggaagccggucaucacccagccucugagagc

SEQ ID NO: 75464 - RNA, 32 nt, Homo Sapiens
ggccauuauccuguauuccuuuggcuuggcau

SEQ ID NO: 75465 - RNA, 32 nt, Homo Sapiens
ggggaaugcauuucuucaguguuucuccgaga

SEQ ID NO: 75466 - RNA, 32 nt, Homo Sapiens
ugagcuccccaaauuucuuuuuucauuuacuc

SEQ ID NO: 75467 - RNA, 32 nt, Homo Sapiens
aaaguuacuuuuuaaaugcacguaugcaaucu

SEQ ID NO: 75468 - RNA, 32 nt, Homo Sapiens
uaaaccuauauuuggacucugggcccuuugaa

SEQ ID NO: 75469 - RNA, 32 nt, Homo Sapiens
ugcucucuuuccuccgccccccgcgccauccu

SEQ ID NO: 75470 - RNA, 32 nt, Homo Sapiens
cagugcucuccagcccgccccacccugugaga

SEQ ID NO: 75471 - RNA, 32 nt, Homo Sapiens
aggcgaggcucuggugcuuacugcacagccug

SEQ ID NO: 75472 - RNA, 32 nt, Homo Sapiens
uucggcucacaguuuaaaaugucagaaacuca

SEQ ID NO: 75473 - RNA, 32 nt, Homo Sapiens
caugcaaucuacgaguccauggagcugagcag

SEQ ID NO: 75474 - RNA, 32 nt, Homo Sapiens
agauuggaagggggaaacagucuguucucccu

SEQ ID NO: 75475 - RNA, 32 nt, Homo Sapiens
aaucucggccccacucuucauuggcuuaaccu

SEQ ID NO: 75476 - RNA, 32 nt, Homo Sapiens
cccaguuauuuugccucauuagacaucaagaa

SEQ ID NO: 75477 - RNA, 32 nt, Homo Sapiens
ugccuggcucacgggucuccuguccuccugca

SEQ ID NO: 75478 - RNA, 32 nt, Homo Sapiens
gguccuucauucaccccuccccuccccacagu

SEQ ID NO: 75479 - RNA, 32 nt, Homo Sapiens
ugcuuuuaaaugaccaaagaugaccuguggua

SEQ ID NO: 75480 - RNA, 32 nt, Homo Sapiens
gcuaccacaguaaccagcagaccuccaggauc

SEQ ID NO: 75481 - RNA, 32 nt, Homo Sapiens
augggggcacuagcguagcuugggugcaacaa

SEQ ID NO: 75482 - RNA, 32 nt, Homo Sapiens
uuucauauauaccaccuuguuuccccugggaa

SEQ ID NO: 75483 - RNA, 32 nt, Homo Sapiens
ggagcuggcuucugcuggccaggauggcuuaa

SEQ ID NO: 75484 - RNA, 32 nt, Homo Sapiens
ucuaagauaaaacuucuauuuaaagacuuuaa

SEQ ID NO: 75485 - RNA, 32 nt, Homo Sapiens
uccucccccacgccuccauccacacacagcag

SEQ ID NO: 75486 - RNA, 32 nt, Homo Sapiens
aagccaugcaaugccagugacucucagugucc

SEQ ID NO: 75487 - RNA, 32 nt, Homo Sapiens
cgcccuccuccuccccgcgcggccuccgaucc

SEQ ID NO: 75488 - RNA, 30 nt, Homo Sapiens
uacguguccugugcugucggagacgcacag

SEQ ID NO: 75489 - RNA, 32 nt, Homo Sapiens
uuaaucuaggucccauugugucuugagggagg

SEQ ID NO: 75490 - RNA, 32 nt, Homo Sapiens
ggcgggugggaccgcgaguuacagccggccaa

SEQ ID NO: 75491 - RNA, 32 nt, Homo Sapiens
cgacugccugucagcgucccucccaggugcua

SEQ ID NO: 75492 - RNA, 32 nt, Homo Sapiens
aguuagcccucccagggauugcaguccuucac

SEQ ID NO: 75493 - RNA, 32 nt, Homo Sapiens
augcuaagcugauauuauuucuucucuuaucc

SEQ ID NO: 75494 - RNA, 32 nt, Homo Sapiens
agagagaaaaagaaaugcuguguuuaaucuuc

SEQ ID NO: 75495 - RNA, 32 nt, Homo Sapiens
acaacuggccgaccgacccauucauugggaac

SEQ ID NO: 75496 - RNA, 32 nt, Homo Sapiens
ugcucuguccuuccucacaccagauuguuccc

SEQ ID NO: 75497 - RNA, 32 nt, Homo Sapiens
aaccaaauaaaguggagaugagugauugagug

SEQ ID NO: 75498 - RNA, 32 nt, Homo Sapiens
gaugggauuuagggccaggucagaguuucuuu

SEQ ID NO: 75499 - RNA, 31 nt, Homo Sapiens
uccccugagccccaccaggaaaucuccgguu

SEQ ID NO: 75500 - RNA, 32 nt, Homo Sapiens
agcgcagcgggaagcgggaauucgcugcaagu

SEQ ID NO: 75501 - RNA, 32 nt, Homo Sapiens
gggaauugggagcacaguacugggaaauggga

SEQ ID NO: 75502 - RNA, 32 nt, Homo Sapiens
gguggaguguggggggagcuguucuagcucca

SEQ ID NO: 75503 - RNA, 32 nt, Homo Sapiens
uuguuuuuaaucauuaaauauuuucuuccugg

SEQ ID NO: 75504 - RNA, 32 nt, Homo Sapiens
ggaaaaagaccaaagaugaacucuguaugcaa

SEQ ID NO: 75505 - RNA, 32 nt, Homo Sapiens
ucuguuggccucccugaccuccccucccaauu

SEQ ID NO: 75506 - RNA, 32 nt, Homo Sapiens
gcgcgguugucauugcagaaaccgcugggugg

SEQ ID NO: 75507 - RNA, 32 nt, Homo Sapiens
ccuagcccuaccugucucggcccgcaaccucc

SEQ ID NO: 75508 - RNA, 32 nt, Homo Sapiens
aggcuaacaaggaaagccccuggagcuccugu

SEQ ID NO: 75509 - RNA, 32 nt, Homo Sapiens
cuugugugcauugcugugaauuagcucacuug

SEQ ID NO: 75510 - RNA, 32 nt, Homo Sapiens
guggggugcacuggagugagggggguggccgg

SEQ ID NO: 75511 - RNA, 32 nt, Homo Sapiens
uuaguacucugcccccaccucucuuuacugug

SEQ ID NO: 75512 - RNA, 32 nt, Homo Sapiens
uccugcgcagcgccagccccgcgcuccucuag

SEQ ID NO: 75513 - RNA, 32 nt, Homo Sapiens
augaucaaacacuggaauauauuuuccuagga

SEQ ID NO: 75514 - RNA, 32 nt, Homo Sapiens
uuuacaccaguuccuuucaaugguuugcaagg

SEQ ID NO: 75515 - RNA, 32 nt, Homo Sapiens
gaaaagaaauauuacagccaugccuaacugac

SEQ ID NO: 75516 - RNA, 32 nt, Homo Sapiens
ugcccagcuaauuuuuguuuuguuuucuuuuu

SEQ ID NO: 75517 - RNA, 32 nt, Homo Sapiens
caauccagauuuucuuuuuguauuuuaccaau

SEQ ID NO: 75518 - RNA, 32 nt, Homo Sapiens
gugcccccgcggcacuucugggugccaggugc

SEQ ID NO: 75519 - RNA, 32 nt, Homo Sapiens
aacaaagaauacugaagccacucaagacucgg

SEQ ID NO: 75520 - RNA, 32 nt, Homo Sapiens
guuggggagcuuugaggaccucauggauccca

SEQ ID NO: 75521 - RNA, 32 nt, Homo Sapiens
uacuccaucccauagagaugugaguuagcaau

SEQ ID NO: 75522 - RNA, 32 nt, Homo Sapiens
acucccugguguaguguauucucuaaaagcuu

SEQ ID NO: 75523 - RNA, 32 nt, Homo Sapiens
gaaagaugauauuguucauguacaucagaaca

SEQ ID NO: 75524 - RNA, 32 nt, Homo Sapiens
acgcugguagagauggaggaggaggcaauugg

SEQ ID NO: 75525 - RNA, 32 nt, Homo Sapiens
cccgccccgccgcuccuccucccuguaacaug

SEQ ID NO: 75526 - RNA, 32 nt, Homo Sapiens
ccaggcccggcggcuucucauuucucgcggcg

SEQ ID NO: 75527 - RNA, 31 nt, Homo Sapiens
ccucacagcugccuugcaccaagggccccac

SEQ ID NO: 75528 - RNA, 32 nt, Homo Sapiens
cggaacccagagacugcaucagagccacuguc

SEQ ID NO: 75529 - RNA, 32 nt, Homo Sapiens
cuuucaaguuggaaaaccuggaguuuccugau

SEQ ID NO: 75530 - RNA, 32 nt, Homo Sapiens
uagacuggagugggaccgcgucugucaaaagc

SEQ ID NO: 75531 - RNA, 32 nt, Homo Sapiens
uugaucguuuacuagauaacccauugguucuu

SEQ ID NO: 75532 - RNA, 32 nt, Homo Sapiens
cguccaccagaccgugccucccggccgcccgg

SEQ ID NO: 75533 - RNA, 32 nt, Homo Sapiens
gaagccaaccuucccugcuucuccggggcccu

SEQ ID NO: 75534 - RNA, 32 nt, Homo Sapiens
cuuuuuucgcaguggccuccugcauuucauga

SEQ ID NO: 75535 - RNA, 27 nt, Homo Sapiens
uugaucuccugccucagccccccaagu

SEQ ID NO: 75536 - RNA, 32 nt, Homo Sapiens
ggagguggauuugaggcagauaccauaaagaa

SEQ ID NO: 75537 - RNA, 32 nt, Homo Sapiens
uuguucuucagauguugaaaagaaagcaaaaa

SEQ ID NO: 75538 - RNA, 32 nt, Homo Sapiens
uacuguacuuuuuguuuugauccguuuguaua

SEQ ID NO: 75539 - RNA, 32 nt, Homo Sapiens
guggggugggucuggacaaggagcggcaggaa

SEQ ID NO: 75540 - RNA, 32 nt, Homo Sapiens
aaaccccucccucuucugcccccuaccacuuu

SEQ ID NO: 75541 - RNA, 32 nt, Homo Sapiens
cgacuucagacaccagcuccccucuuucuagg

SEQ ID NO: 75542 - RNA, 32 nt, Homo Sapiens
gacacagaauacugauuugaagauagccuuuu

SEQ ID NO: 75543 - RNA, 30 nt, Homo Sapiens
aagccaugggagacaagaagagccccacca

SEQ ID NO: 75544 - RNA, 32 nt, Homo Sapiens
ccaggggcgggggaccuagggcgacgucuuca

SEQ ID NO: 75545 - RNA, 32 nt, Homo Sapiens
caucguggggcagcugcggcugagggcugugg

SEQ ID NO: 75546 - RNA, 32 nt, Homo Sapiens
cucgggcacugaccccugccccugccugggcc

SEQ ID NO: 75547 - RNA, 32 nt, Homo Sapiens
aaaacaaccaccagugaaauguguguguauac

SEQ ID NO: 75548 - RNA, 32 nt, Homo Sapiens
ccugugucugcccuaaguguccugccuccaug

SEQ ID NO: 75549 - RNA, 32 nt, Homo Sapiens
ucaaaaccaucccagcucuucacccaggucuc

SEQ ID NO: 75550 - RNA, 32 nt, Homo Sapiens
ccaggaaaggagccagucaugccggaaacacu

SEQ ID NO: 75551 - RNA, 32 nt, Homo Sapiens
ccuucagacuucggcuucaguggcaccugcuc

SEQ ID NO: 75552 - RNA, 32 nt, Homo Sapiens
agacaaugagagaggguggaugguggugagug

SEQ ID NO: 75553 - RNA, 32 nt, Homo Sapiens
gggcaaaaucaaaggaagaaagagacuauggu

SEQ ID NO: 75554 - RNA, 32 nt, Homo Sapiens
auagguuauaaacuaguuaucuuuuaaaaggc

SEQ ID NO: 75555 - RNA, 32 nt, Homo Sapiens
cagggcacgcugggucggcggagcugaggcuc

SEQ ID NO: 75556 - RNA, 32 nt, Homo Sapiens
uuuuuguaccaaaauaaagaauggaucuuuag

SEQ ID NO: 75557 - RNA, 32 nt, Homo Sapiens
cuggcugccugccucuugcacagaaguucguu

SEQ ID NO: 75558 - RNA, 32 nt, Homo Sapiens
uguacaaugaugugcaccuugcagaugcucaa

SEQ ID NO: 75559 - RNA, 30 nt, Homo Sapiens
gggaucuucucugugggggaaaaggaagag

SEQ ID NO: 75560 - RNA, 32 nt, Homo Sapiens
ccacggccguacaauccccagcccuuccagcu

SEQ ID NO: 75561 - RNA, 32 nt, Homo Sapiens
uaaguguguuuguuuuuacaggugugaaaguc

SEQ ID NO: 75562 - RNA, 32 nt, Homo Sapiens
acagguucuggugaucccugaguuugcgggac

SEQ ID NO: 75563 - RNA, 30 nt, Homo Sapiens
cuguacugaucagugaaggaaaccgugguu

SEQ ID NO: 75564 - RNA, 32 nt, Homo Sapiens
cacucuuuaauugucauuuuuaucuuugaaaa

SEQ ID NO: 75565 - RNA, 32 nt, Homo Sapiens
cauggaggcuucugaauucagaaaagauagau

SEQ ID NO: 75566 - RNA, 32 nt, Homo Sapiens
cuuggucgcgcccucccuuggcguggagccag

SEQ ID NO: 75567 - RNA, 32 nt, Homo Sapiens
gcgcucagcugcccgccuccucagccagccau

SEQ ID NO: 75568 - RNA, 32 nt, Homo Sapiens
uuguuugaaggcauuagaguaaucuucagugu

SEQ ID NO: 75569 - RNA, 32 nt, Homo Sapiens
aaugaaugugggaaaaccuuucaucagaaguc

SEQ ID NO: 75570 - RNA, 32 nt, Homo Sapiens
acaucugccugccugcggccugucuguguuug

SEQ ID NO: 75571 - RNA, 32 nt, Homo Sapiens
cgaguauaguuuucuuuuuaucuuauuuuuac

SEQ ID NO: 75572 - RNA, 32 nt, Homo Sapiens
accgaucugcccguuguguuugugaaacagag

SEQ ID NO: 75573 - RNA, 32 nt, Homo Sapiens
cucuguuggucggagucggccaguugccugaa

SEQ ID NO: 75574 - RNA, 32 nt, Homo Sapiens
uuucacucauccuuuacucuccccucaaguau

SEQ ID NO: 75575 - RNA, 32 nt, Homo Sapiens
uuguuuauaucgagauacuuugaaaaaugauu

SEQ ID NO: 75576 - RNA, 32 nt, Homo Sapiens
cagaggaagccaggccugcugcuaacguuucu

SEQ ID NO: 75577 - RNA, 32 nt, Homo Sapiens
uagaguuuacuauuuuugaaguuuacauuguu

SEQ ID NO: 75578 - RNA, 32 nt, Homo Sapiens
uagaauggacaggccagaggacagucauagcg

SEQ ID NO: 75579 - RNA, 32 nt, Homo Sapiens
uugauuauuuucaaaacaaggugauuuguuuu

SEQ ID NO: 75580 - RNA, 32 nt, Homo Sapiens
cgggccgggcugccccgccgcgcauucugaga

SEQ ID NO: 75581 - RNA, 32 nt, Homo Sapiens
uccccagugugugaagcagagaugggaucgag

SEQ ID NO: 75582 - RNA, 30 nt, Homo Sapiens
gucgacgcugggcuuucgggucccgcgccc

SEQ ID NO: 75583 - RNA, 32 nt, Homo Sapiens
uacgugugguggcucacgccuguaaucccaac

SEQ ID NO: 75584 - RNA, 32 nt, Homo Sapiens
ugguaauguacuugaaugcacuuuuuaugaca

SEQ ID NO: 75585 - RNA, 32 nt, Homo Sapiens
agaaugaaaugaugaagggucuuugaaauucu

SEQ ID NO: 75586 - RNA, 32 nt, Homo Sapiens
accuugccccccacccaagaagcccugcccuc

SEQ ID NO: 75587 - RNA, 32 nt, Homo Sapiens
agaaaguuaaaaaacuguguaauucaacauau

SEQ ID NO: 75588 - RNA, 32 nt, Homo Sapiens
uuaaauaaaauauucauuuguuugucauucau

SEQ ID NO: 75589 - RNA, 32 nt, Homo Sapiens
gaacaacccuugccaaaccaaagacccuugcc

SEQ ID NO: 75590 - RNA, 32 nt, Homo Sapiens
guucccaugguuuccuuugcucccagcgguug

SEQ ID NO: 75591 - RNA, 32 nt, Homo Sapiens
ccugagagcugcuucuccuucucccugggcag

SEQ ID NO: 75592 - RNA, 32 nt, Homo Sapiens
cauauuccaaugcucuccucuuucucuggcca

SEQ ID NO: 75593 - RNA, 32 nt, Homo Sapiens
uugggagugaagacuugagccuugaaggagag

SEQ ID NO: 75594 - RNA, 32 nt, Homo Sapiens
agacccugugggugggggccggccccuaagca

SEQ ID NO: 75595 - RNA, 32 nt, Homo Sapiens
agaaggccuccucuccuuccucaacagccacc

SEQ ID NO: 75596 - RNA, 32 nt, Homo Sapiens
cuuuuacagaggcuauuuuaaucuuuagugca

SEQ ID NO: 75597 - RNA, 32 nt, Homo Sapiens
guagcgucuuuuccuugugguuccuuucuccg

SEQ ID NO: 75598 - RNA, 32 nt, Homo Sapiens
uccuguucccacagaacuuuggcacauucuga

SEQ ID NO: 75599 - RNA, 32 nt, Homo Sapiens
uauaguauuaaaacagaaaaaguaaagaagca

SEQ ID NO: 75600 - RNA, 32 nt, Homo Sapiens
ccucgcccgcggcugcucgcaccaacaaguuu

SEQ ID NO: 75601 - RNA, 32 nt, Homo Sapiens
gccucagggucucugaaaucucccgggaagcc

SEQ ID NO: 75602 - RNA, 32 nt, Homo Sapiens
uggagcacugggcucccgggccccacagacaa

SEQ ID NO: 75603 - RNA, 32 nt, Homo Sapiens
gucuuccccagcauuaaguaaaucagucucag

SEQ ID NO: 75604 - RNA, 32 nt, Homo Sapiens
acauucuugggcugaacgcgggccucugacac

SEQ ID NO: 75605 - RNA, 32 nt, Homo Sapiens
gucccauggaggcauccaaggcuuucugugcc

SEQ ID NO: 75606 - RNA, 32 nt, Homo Sapiens
guucagaaaucugucaccuuucugccugcccu

SEQ ID NO: 75607 - RNA, 32 nt, Homo Sapiens
gaucaguguaucaaaguaaaucugcaaauucc

SEQ ID NO: 75608 - RNA, 32 nt, Homo Sapiens
cgcgauggccgcgggccgcagucguacggagc

SEQ ID NO: 75609 - RNA, 32 nt, Homo Sapiens
ugcauugaggcaggcaggagcggcaggguggc

SEQ ID NO: 75610 - RNA, 32 nt, Homo Sapiens
uuaaacaaaaauauuguccgaagcucuaaaua

SEQ ID NO: 75611 - RNA, 31 nt, Homo Sapiens
ccuuuuuuguuuuauucuucaguguucauau

SEQ ID NO: 75612 - RNA, 32 nt, Homo Sapiens
uuaaaaagaaauauuucucuacuacuaugcuc

SEQ ID NO: 75613 - RNA, 32 nt, Homo Sapiens
cauaacuugugggcuuuuuuuuuuuuuaacuu

SEQ ID NO: 75614 - RNA, 32 nt, Homo Sapiens
uucggauuuuuccaggacucaggaguggcacu

SEQ ID NO: 75615 - RNA, 32 nt, Homo Sapiens
cagucccaacuaaaaggcugcguuaaagauuc

SEQ ID NO: 75616 - RNA, 32 nt, Homo Sapiens
guucaagacugccuguguggcacauguggaua

SEQ ID NO: 75617 - RNA, 32 nt, Homo Sapiens
uccgagagaaaguguguggaugcacccgccaa

SEQ ID NO: 75618 - RNA, 32 nt, Homo Sapiens
gcauugcuuuaauugcaacagaauagcuuuug

SEQ ID NO: 75619 - RNA, 32 nt, Homo Sapiens
caucacaaacucccgaccgaucaauuagaccu

SEQ ID NO: 75620 - RNA, 32 nt, Homo Sapiens
guaaggccggcggcucggggcccccgcagcag

SEQ ID NO: 75621 - RNA, 32 nt, Homo Sapiens
gacccacuccagcuuucuggugucacaggcgg

SEQ ID NO: 75622 - RNA, 32 nt, Homo Sapiens
guaugacaggcaggugaacuuuagucaaguag

SEQ ID NO: 75623 - RNA, 32 nt, Homo Sapiens
ccuccucccucccauccucacccaggccaagg

SEQ ID NO: 75624 - RNA, 32 nt, Homo Sapiens
cagguaaaaauacaauaacuacuuaucaucag

SEQ ID NO: 75625 - RNA, 32 nt, Homo Sapiens
cccggugccaucuuccauauccgggugcucaa

SEQ ID NO: 75626 - RNA, 32 nt, Homo Sapiens
aggacuuggcauggcugaggacacccaagagg

SEQ ID NO: 75627 - RNA, 32 nt, Homo Sapiens
ucaggugcuagauggcggcugcagaggcugug

SEQ ID NO: 75628 - RNA, 32 nt, Homo Sapiens
aaggggaggggaggagagaugcauacccguuu

SEQ ID NO: 75629 - RNA, 32 nt, Homo Sapiens
uaagaucuaaagccugggcccuugcuuguuuu

SEQ ID NO: 75630 - RNA, 32 nt, Homo Sapiens
auuucuaguuuaggagaggagcucaaaacuau

SEQ ID NO: 75631 - RNA, 32 nt, Homo Sapiens
uggcugauaauuccagaaaacuuacugaugcu

SEQ ID NO: 75632 - RNA, 32 nt, Homo Sapiens
caaguuagcaauauauagaaauccauccauac

SEQ ID NO: 75633 - RNA, 32 nt, Homo Sapiens
cuuugguuuguggguaucugccccaacuacug

SEQ ID NO: 75634 - RNA, 32 nt, Homo Sapiens
ggcccccgcccgggccaagggagcuucugucc

SEQ ID NO: 75635 - RNA, 32 nt, Homo Sapiens
gccugaccaauauggagaaacccugucucuac

SEQ ID NO: 75636 - RNA, 30 nt, Homo Sapiens
ggcagcggagcgcagcaucauggcggaccg

SEQ ID NO: 75637 - RNA, 32 nt, Homo Sapiens
aaucucggcggucaggaggcccggggucuaag

SEQ ID NO: 75638 - RNA, 32 nt, Homo Sapiens
uggcugggaaguucuaugaugaacgcuuugcu

SEQ ID NO: 75639 - RNA, 32 nt, Homo Sapiens
ggagccauuuucucagaccccuggccucaugc

SEQ ID NO: 75640 - RNA, 32 nt, Homo Sapiens
ggaaauucugugaggagcuuguaaccagauuu

SEQ ID NO: 75641 - RNA, 32 nt, Homo Sapiens
uaauguauuuauucuuguauguuuuuuccaga

SEQ ID NO: 75642 - RNA, 32 nt, Homo Sapiens
ugucaauaauggaaacaccaaaaacuguauua

SEQ ID NO: 75643 - RNA, 32 nt, Homo Sapiens
agaugaccugguauacuguaggugcacacaag

SEQ ID NO: 75644 - RNA, 32 nt, Homo Sapiens
ugggguugggagcugggaaucuauuuuuugua

SEQ ID NO: 75645 - RNA, 32 nt, Homo Sapiens
cugcaugugaaaaugugaccaauuuagcacaa

SEQ ID NO: 75646 - RNA, 32 nt, Homo Sapiens
cacggacaccuggcuacagaccaggacguggc

SEQ ID NO: 75647 - RNA, 32 nt, Homo Sapiens
ucccaguuggugcggggcaugcugggggcagg

SEQ ID NO: 75648 - RNA, 30 nt, Homo Sapiens
ggaaggauauauuaugccuaacccugccca

SEQ ID NO: 75649 - RNA, 32 nt, Homo Sapiens
uauauauuuuuccuuugaauuaaaaccuauga

SEQ ID NO: 75650 - RNA, 32 nt, Homo Sapiens
ugaugcugguagugaugcuggcuguucggaua

SEQ ID NO: 75651 - RNA, 32 nt, Homo Sapiens
agcgggacgcccgggcggcccugaaggggacg

SEQ ID NO: 75652 - RNA, 32 nt, Homo Sapiens
agguguaaugaaauuaucaacuggcacaauaa

SEQ ID NO: 75653 - RNA, 32 nt, Homo Sapiens
gugggaaucagaucugucuugaugugucaucu

SEQ ID NO: 75654 - RNA, 32 nt, Homo Sapiens
guguucuuugaaaacauaaaauaugaagaugc

SEQ ID NO: 75655 - RNA, 32 nt, Homo Sapiens
cuguggagaacuggacugacggaugcucucac

SEQ ID NO: 75656 - RNA, 32 nt, Homo Sapiens
gaguuugccguccaagcagccucgucucggcg

SEQ ID NO: 75657 - RNA, 32 nt, Homo Sapiens
cugccggcagagagggaaaggggcggggccca

SEQ ID NO: 75658 - RNA, 32 nt, Homo Sapiens
cugaaaugaagggaaaaaaaccaccccaucgu

SEQ ID NO: 75659 - RNA, 31 nt, Homo Sapiens
aucucucucaaugaucauugacagcucccgc

SEQ ID NO: 75660 - RNA, 32 nt, Homo Sapiens
caccuccaccgccgccucggaacccaggccug

SEQ ID NO: 75661 - RNA, 32 nt, Homo Sapiens
ugcggaucccccagaugcccgccccgccccau

SEQ ID NO: 75662 - RNA, 32 nt, Homo Sapiens
aaacucuuaaugcuuuauucucaaaugcuggg

SEQ ID NO: 75663 - RNA, 32 nt, Homo Sapiens
cucuccuccuuccccccucgguccgccggagc

SEQ ID NO: 75664 - RNA, 32 nt, Homo Sapiens
cuuuucauaaaacuuuacgguuuuuccuucac

SEQ ID NO: 75665 - RNA, 32 nt, Homo Sapiens
cuugcucccggauagccucagucagggagagg

SEQ ID NO: 75666 - RNA, 32 nt, Homo Sapiens
gugaccacaaagccugaaaacacuuugccacc

SEQ ID NO: 75667 - RNA, 32 nt, Homo Sapiens
cgggcgccauugugcggcgcgcgccggaguau

SEQ ID NO: 75668 - RNA, 31 nt, Homo Sapiens
guagccuccguguaaauguccacucccaugg

SEQ ID NO: 75669 - RNA, 32 nt, Homo Sapiens
ccaccgcagcucagcccuccgcagcccugacc

SEQ ID NO: 75670 - RNA, 32 nt, Homo Sapiens
caucucuuccacaacuaacagacuuaaaauaa

SEQ ID NO: 75671 - RNA, 32 nt, Homo Sapiens
ccuccugccaccuggaccucccucaguggaug

SEQ ID NO: 75672 - RNA, 32 nt, Homo Sapiens
ucugccuugcuaaagagguuugacuauguugu

SEQ ID NO: 75673 - RNA, 32 nt, Homo Sapiens
aaaacagaagaagaagaagagaauuaaaaaga

SEQ ID NO: 75674 - RNA, 29 nt, Homo Sapiens
ugugcccacacuuugcugccgaaacgaag

SEQ ID NO: 75675 - RNA, 32 nt, Homo Sapiens
uugcaaccaaaauaaagaugaguuaaaaggua

SEQ ID NO: 75676 - RNA, 32 nt, Homo Sapiens
cgugccaggaugcacagaccgaccaacagacc

SEQ ID NO: 75677 - RNA, 32 nt, Homo Sapiens
uaaugguaauuuuuaaacuugcuaaauauuga

SEQ ID NO: 75678 - RNA, 32 nt, Homo Sapiens
gucagcgcgauuggccggggcccgcgcgagcc

SEQ ID NO: 75679 - RNA, 31 nt, Homo Sapiens
acacaacgcugcugccugcuuugugcagggu

SEQ ID NO: 75680 - RNA, 32 nt, Homo Sapiens
agggaggguaagggcuggcuccagauaccccu

SEQ ID NO: 75681 - RNA, 32 nt, Homo Sapiens
gcaaccaguucauaugucaaugggccauuaau

SEQ ID NO: 75682 - RNA, 32 nt, Homo Sapiens
acugcccugcuggauuugucuuucucagcacc

SEQ ID NO: 75683 - RNA, 32 nt, Homo Sapiens
gcaccaaaugagccaguuuauaucaucagcua

SEQ ID NO: 75684 - RNA, 32 nt, Homo Sapiens
agccagugcgugagggcgcggggggccguguc

SEQ ID NO: 75685 - RNA, 32 nt, Homo Sapiens
gaccagcgccugaggugccccggagaggccau

SEQ ID NO: 75686 - RNA, 32 nt, Homo Sapiens
gauugccccagagccccacucccggccaggcg

SEQ ID NO: 75687 - RNA, 32 nt, Homo Sapiens
acaaaaaaauucccuguaaaucugaaauauau

SEQ ID NO: 75688 - RNA, 32 nt, Homo Sapiens
cuuccucgugcuucuccuuccugaggguuugg

SEQ ID NO: 75689 - RNA, 32 nt, Homo Sapiens
cacgcucccacgagaaugccacaggggccgug

SEQ ID NO: 75690 - RNA, 32 nt, Homo Sapiens
gaacacaggugucaugaaaacuacccccaaaa

SEQ ID NO: 75691 - RNA, 32 nt, Homo Sapiens
aauccagucucccucagcacucuaccaaaggg

SEQ ID NO: 75692 - RNA, 32 nt, Homo Sapiens
aaccuuugugcacuauugguggaaauguaaau

SEQ ID NO: 75693 - RNA, 32 nt, Homo Sapiens
ccaaggugcugggauuacaggcaugagggacc

SEQ ID NO: 75694 - RNA, 32 nt, Homo Sapiens
uauauugaauaaaaaauagacauguaguugga

SEQ ID NO: 75695 - RNA, 32 nt, Homo Sapiens
uggacacucccuaauuccauuauuaaaucuug

SEQ ID NO: 75696 - RNA, 32 nt, Homo Sapiens
aaccuacccacccucacggccuggaguucuug

SEQ ID NO: 75697 - RNA, 32 nt, Homo Sapiens
uaugggggagaaaagggaaaaugcugucagua

SEQ ID NO: 75698 - RNA, 32 nt, Homo Sapiens
cgggaagcugcguucucgaacacuagcagccc

SEQ ID NO: 75699 - RNA, 32 nt, Homo Sapiens
uucagugcuuacuuggcuccagcccuccagcu

SEQ ID NO: 75700 - RNA, 32 nt, Homo Sapiens
aggacucaucuuaaaaaucaugugugggaaca

SEQ ID NO: 75701 - RNA, 32 nt, Homo Sapiens
gcgagccgagccgagcgagcgcggcggugggg

SEQ ID NO: 75702 - RNA, 32 nt, Homo Sapiens
gggacucugaccacagccuguggcugggaagg

SEQ ID NO: 75703 - RNA, 32 nt, Homo Sapiens
agcccggcgcagaccccggagcucccgaggca

SEQ ID NO: 75704 - RNA, 32 nt, Homo Sapiens
acccacgguccuccccuuuuuccucucccuga

SEQ ID NO: 75705 - RNA, 32 nt, Homo Sapiens
ucugucaguuucuggggugaagcugcgugauu

SEQ ID NO: 75706 - RNA, 32 nt, Homo Sapiens
ugcugccggccgcgaccgcaacccgcuaggcc

SEQ ID NO: 75707 - RNA, 32 nt, Homo Sapiens
agccucucugcacacuaauaaaacauguggcu

SEQ ID NO: 75708 - RNA, 32 nt, Homo Sapiens
cuuucuggggccggccacccaggccgccuguc

SEQ ID NO: 75709 - RNA, 32 nt, Homo Sapiens
cggcucggguggcugagcgcgcggggaaaugg

SEQ ID NO: 75710 - RNA, 32 nt, Homo Sapiens
ugugaacauuuaaaaaguacuuuuaaauauuc

SEQ ID NO: 75711 - RNA, 32 nt, Homo Sapiens
augaugaugauuauguugcuguagcuaccagu

SEQ ID NO: 75712 - RNA, 32 nt, Homo Sapiens
gcaugcuacacugcucgagguacgguaugucc

SEQ ID NO: 75713 - RNA, 32 nt, Homo Sapiens
gaccggucggccugggcaaccugcgcugaaga

SEQ ID NO: 75714 - RNA, 32 nt, Homo Sapiens
cauugcuucaccucugucuccucccguccuuc

SEQ ID NO: 75715 - RNA, 32 nt, Homo Sapiens
uccccucuuuacucccagcaguggcugaaacu

SEQ ID NO: 75716 - RNA, 32 nt, Homo Sapiens
uagccuucauugaguuuggguaaaauaaguug

SEQ ID NO: 75717 - RNA, 32 nt, Homo Sapiens
uaauauacuuuuuaauggauaugugaaaacug

SEQ ID NO: 75718 - RNA, 32 nt, Homo Sapiens
ugcaaguaaaaugauguuguggcguuguucuu

SEQ ID NO: 75719 - RNA, 32 nt, Homo Sapiens
aaggcucucggcgcgccgcagcccgcaggcac

SEQ ID NO: 75720 - RNA, 32 nt, Homo Sapiens
ugcagccgccggucggcgcccgggcucccuag

SEQ ID NO: 75721 - RNA, 32 nt, Homo Sapiens
cugucucaccacacaaaccaaucuuguguuuu

SEQ ID NO: 75722 - RNA, 32 nt, Homo Sapiens
gauugagaccaaacagaagggaaaacaccuag

SEQ ID NO: 75723 - RNA, 32 nt, Homo Sapiens
cuccagccugaagagaaggaugcacuggagga

SEQ ID NO: 75724 - RNA, 32 nt, Homo Sapiens
ccuccccggagcggagcacgccggcucccagu

SEQ ID NO: 75725 - RNA, 31 nt, Homo Sapiens
ggagggugcgccacuuucagagccucugguc

SEQ ID NO: 75726 - RNA, 32 nt, Homo Sapiens
aaggcaucuaaagauuuuguggacucauaacu

SEQ ID NO: 75727 - RNA, 32 nt, Homo Sapiens
ugauuaaguagauauaaagugauuuaaaagac

SEQ ID NO: 75728 - RNA, 32 nt, Homo Sapiens
ugguuugccuuugucccccuggauagaacgug

SEQ ID NO: 75729 - RNA, 32 nt, Homo Sapiens
ugaaagagggagaggggagacuguagccugga

SEQ ID NO: 75730 - RNA, 32 nt, Homo Sapiens
ucccagcuuuaggucugagagucuacacuucu

SEQ ID NO: 75731 - RNA, 32 nt, Homo Sapiens
gccgggcaacuggcagagcgaggccuaagccc

SEQ ID NO: 75732 - RNA, 32 nt, Homo Sapiens
ccccaccuccuugcucuccccagccugccaag

SEQ ID NO: 75733 - RNA, 32 nt, Homo Sapiens
ugccuucucuuucuccuucacugccucaaguu

SEQ ID NO: 75734 - RNA, 32 nt, Homo Sapiens
gucuuggagaaaagguucugugcccucaggug

SEQ ID NO: 75735 - RNA, 32 nt, Homo Sapiens
ggggagcccccgcuccagggcucgcuccagga

SEQ ID NO: 75736 - RNA, 32 nt, Homo Sapiens
uucuggauacucugaggccugguuugucaggc

SEQ ID NO: 75737 - RNA, 32 nt, Homo Sapiens
aaucuguuccgggugagcccaggccgccccgg

SEQ ID NO: 75738 - RNA, 32 nt, Homo Sapiens
acaguguccccgcccgcccccggccgggucgc

SEQ ID NO: 75739 - RNA, 32 nt, Homo Sapiens
acuugggaggcugaggugggagggauugcuua

SEQ ID NO: 75740 - RNA, 32 nt, Homo Sapiens
ucaggcccugaacauuuccggugcugacucgg

SEQ ID NO: 75741 - RNA, 32 nt, Homo Sapiens
ccuggucaacauugcaaaaccuugucucuacu

SEQ ID NO: 75742 - RNA, 32 nt, Homo Sapiens
aacguuacuguaaacagcaugaggauaugaag

SEQ ID NO: 75743 - RNA, 32 nt, Homo Sapiens
aagucuucuucuucuuuuaauucauaagccuc

SEQ ID NO: 75744 - RNA, 32 nt, Homo Sapiens
uucagauggauccgaagcuaugcugaacagag

SEQ ID NO: 75745 - RNA, 32 nt, Homo Sapiens
ggagaaagagcaggugaaauauuuucucagca

SEQ ID NO: 75746 - RNA, 32 nt, Homo Sapiens
caguuccgccccaacccgggaacccuggacug

SEQ ID NO: 75747 - RNA, 32 nt, Homo Sapiens
uaccacacagaaaucaaagugggaaaagguag

SEQ ID NO: 75748 - RNA, 32 nt, Homo Sapiens
aacugauucuaccucccuccucuagacucagu

SEQ ID NO: 75749 - RNA, 32 nt, Homo Sapiens
ugaauguucaaaauaaacaugcuguuuacucu

SEQ ID NO: 75750 - RNA, 32 nt, Homo Sapiens
gcucacggagcggcuggcuaggcugaggagag

SEQ ID NO: 75751 - RNA, 32 nt, Homo Sapiens
ccggugccacacucacccagaagacgaaacuc

SEQ ID NO: 75752 - RNA, 32 nt, Homo Sapiens
ugcuccaaacaaaacaaaaaucuguguaacug

SEQ ID NO: 75753 - RNA, 32 nt, Homo Sapiens
uuuccuacucuugccaagagggagaaaccaag

SEQ ID NO: 75754 - RNA, 32 nt, Homo Sapiens
uaagaaagguggcaaugaacugugcauguaaa

SEQ ID NO: 75755 - RNA, 32 nt, Homo Sapiens
uuuuuuuaaauuugugacaggauuguagcaaa

SEQ ID NO: 75756 - RNA, 32 nt, Homo Sapiens
uuuagggcugauguuaucuggacugucugcca

SEQ ID NO: 75757 - RNA, 32 nt, Homo Sapiens
aagccgggcggauugcaaaugaaguguaaugc

SEQ ID NO: 75758 - RNA, 30 nt, Homo Sapiens
cagcagcccccguugccgccgcugccguac

SEQ ID NO: 75759 - RNA, 32 nt, Homo Sapiens
gcagccuccucgccgcgcugcgggggcugggc

SEQ ID NO: 75760 - RNA, 32 nt, Homo Sapiens
ugugacuguggguuucuugacaaccuaaucaa

SEQ ID NO: 75761 - RNA, 32 nt, Homo Sapiens
gaaauacaaauaucacguucuuauagcuguaa

SEQ ID NO: 75762 - RNA, 32 nt, Homo Sapiens
uaccugcgcacguggugccgcugcugcugccu

SEQ ID NO: 75763 - RNA, 32 nt, Homo Sapiens
gugacuucggcaccuuucccuccgcuuucgau

SEQ ID NO: 75764 - RNA, 32 nt, Homo Sapiens
cugggacuuuuguacaaauuucacauuuauuu

SEQ ID NO: 75765 - RNA, 32 nt, Homo Sapiens
ucguagaccacauuuuaaccagcaacugguaa

SEQ ID NO: 75766 - RNA, 32 nt, Homo Sapiens
ugaaaagguacacauguaaaauuuaggaaaau

SEQ ID NO: 75767 - RNA, 32 nt, Homo Sapiens
caucuauuguuuaaaauagaugauuauaacgg

SEQ ID NO: 75768 - RNA, 32 nt, Homo Sapiens
cagggaggggagagaugggcggccccgcccca

SEQ ID NO: 75769 - RNA, 32 nt, Homo Sapiens
gcagacacaaaacuccuauuagggguccugcg

SEQ ID NO: 75770 - RNA, 32 nt, Homo Sapiens
gggugaggauguggguugggacagguaguacc

SEQ ID NO: 75771 - RNA, 32 nt, Homo Sapiens
uaccaaacugccuugcagaaaucuccuaucaa

SEQ ID NO: 75772 - RNA, 32 nt, Homo Sapiens
gccaggcuggucuggaacuccuggccuccagu

SEQ ID NO: 75773 - RNA, 32 nt, Homo Sapiens
aaagaaagaagugggaggugcuaugcacuuuu

SEQ ID NO: 75774 - RNA, 31 nt, Homo Sapiens
caucccccuaaaacauaaacucaaugagagc

SEQ ID NO: 75775 - RNA, 32 nt, Homo Sapiens
ugccacaaugucuucuugucuauuaauagaug

SEQ ID NO: 75776 - RNA, 32 nt, Homo Sapiens
uacagauauuacaacuugauucuuauuuuuag

SEQ ID NO: 75777 - RNA, 32 nt, Homo Sapiens
ccugcaugacccuccuucuccuguacuuccuc

SEQ ID NO: 75778 - RNA, 32 nt, Homo Sapiens
gcagaugcuguggucaggaacuaggcaugcuu

SEQ ID NO: 75779 - RNA, 32 nt, Homo Sapiens
agaaaggaauuuuguuuauagagaguauuuuc

SEQ ID NO: 75780 - RNA, 32 nt, Homo Sapiens
gccacgaccgacuccggagccacgcgcugcaa

SEQ ID NO: 75781 - RNA, 32 nt, Homo Sapiens
uugaagaggacucaccccaagcaagggaaaau

SEQ ID NO: 75782 - RNA, 32 nt, Homo Sapiens
ccagccccauucucagguccuuuccucuuugu

SEQ ID NO: 75783 - RNA, 32 nt, Homo Sapiens
auuacaaaacaaaccucaucaguauaauauaa

SEQ ID NO: 75784 - RNA, 32 nt, Homo Sapiens
gccuugauuuccccuugucugucaaugguggg

SEQ ID NO: 75785 - RNA, 32 nt, Homo Sapiens
cuggccaaucaccugcagaaauguagauacau

SEQ ID NO: 75786 - RNA, 32 nt, Homo Sapiens
gggaaaagaaacaaagccacagacgcaacuug

SEQ ID NO: 75787 - RNA, 32 nt, Homo Sapiens
uuuccuuccuagagguaaucccagaacaaaag

SEQ ID NO: 75788 - RNA, 32 nt, Homo Sapiens
gaccaggaucgacuugcgcuuggcaccgagga

SEQ ID NO: 75789 - RNA, 32 nt, Homo Sapiens
gggucaacacuacuauucuauuucauauuuac

SEQ ID NO: 75790 - RNA, 32 nt, Homo Sapiens
gguuuucacugucucugucucaucuaguaccu

SEQ ID NO: 75791 - RNA, 32 nt, Homo Sapiens
gccucgccuucucggcacggccggcgacuccc

SEQ ID NO: 75792 - RNA, 32 nt, Homo Sapiens
cuaccgcgcgugcgggauuccggcgccgcucu

SEQ ID NO: 75793 - RNA, 32 nt, Homo Sapiens
cagagcaggagcuucuuccaggaguucugagc

SEQ ID NO: 75794 - RNA, 32 nt, Homo Sapiens
caagggaaaaggaagaguugugccagugggug

SEQ ID NO: 75795 - RNA, 32 nt, Homo Sapiens
uagagggaaauccugaucuuuuuuaugauuga

SEQ ID NO: 75796 - RNA, 32 nt, Homo Sapiens
gaacgcucacaccagcaggaugcuccaagucu

SEQ ID NO: 75797 - RNA, 32 nt, Homo Sapiens
agcugugcugcagugcacggccgcccgacugu

SEQ ID NO: 75798 - RNA, 32 nt, Homo Sapiens
gugacuguguuuggaacagcucccucaguuuc

SEQ ID NO: 75799 - RNA, 32 nt, Homo Sapiens
agguggaucaguaaagagcgugccuggacccu

SEQ ID NO: 75800 - RNA, 32 nt, Homo Sapiens
ccuguucuucgugcuccuuucgggcaaggauc

SEQ ID NO: 75801 - RNA, 32 nt, Homo Sapiens
auggggcccgcugggaaccuggaccaagccuu

SEQ ID NO: 75802 - RNA, 32 nt, Homo Sapiens
ugaccuccgagaccucuuccggaagccacugu

SEQ ID NO: 75803 - RNA, 32 nt, Homo Sapiens
cggccauucccggagcccggcgcggggcccgc

SEQ ID NO: 75804 - RNA, 32 nt, Homo Sapiens
ggcccacgggguaggcggggaggcggaagcgg

SEQ ID NO: 75805 - RNA, 32 nt, Homo Sapiens
ggaaugaguccuccuaguaaaguuccugcucu

SEQ ID NO: 75806 - RNA, 32 nt, Homo Sapiens
uuggguuuucuuuuuuaauuauccaaacagug

SEQ ID NO: 75807 - RNA, 32 nt, Homo Sapiens
aaggugcacagagaguccucagagcacaagcg

SEQ ID NO: 75808 - RNA, 32 nt, Homo Sapiens
cgaccagccugggcagaauagcaagacccagu

SEQ ID NO: 75809 - RNA, 32 nt, Homo Sapiens
gccaaggcggguggaucaauugaggucaggag

SEQ ID NO: 75810 - RNA, 32 nt, Homo Sapiens
aaggcccuguguuugggaaagggcagaaguca

SEQ ID NO: 75811 - RNA, 32 nt, Homo Sapiens
ugcugcugguuuuuuccuuuccuuuggguauu

SEQ ID NO: 75812 - RNA, 32 nt, Homo Sapiens
uccucacccgucugggguucagccccuccucu

SEQ ID NO: 75813 - RNA, 32 nt, Homo Sapiens
gacagccccgccggccggcuccguugcugacc

SEQ ID NO: 75814 - RNA, 32 nt, Homo Sapiens
guuuguuuucuuuucauaauccacuuacuccc

SEQ ID NO: 75815 - RNA, 32 nt, Homo Sapiens
uuagagucucuugucuuaaugauuauguccau

SEQ ID NO: 75816 - RNA, 32 nt, Homo Sapiens
aaacuuuaaaauuuauauuaauuugcaaaugu

SEQ ID NO: 75817 - RNA, 32 nt, Homo Sapiens
cuagaacgcggcagaaaugacaaaagagagga

SEQ ID NO: 75818 - RNA, 32 nt, Homo Sapiens
uuucuuaccugccugagccaccucagggaauc

SEQ ID NO: 75819 - RNA, 32 nt, Homo Sapiens
gcagaacuuuuguugcauuuuuuaaacuguug

SEQ ID NO: 75820 - RNA, 32 nt, Homo Sapiens
gagaaauuggaaacucuuucuguugcuauuau

SEQ ID NO: 75821 - RNA, 32 nt, Homo Sapiens
gaugucuucccuaaaaacaacaaaaucaucaa

SEQ ID NO: 75822 - RNA, 32 nt, Homo Sapiens
gaguguggcagagccuuugguggucagucaac

SEQ ID NO: 75823 - RNA, 32 nt, Homo Sapiens
cccauccccgccacuuuccccggagcugggcc

SEQ ID NO: 75824 - RNA, 32 nt, Homo Sapiens
uaccugugucuccucggaaggaagucauaguu

SEQ ID NO: 75825 - RNA, 32 nt, Homo Sapiens
aauggagcuaaaauuauauacuguaucauaua

SEQ ID NO: 75826 - RNA, 32 nt, Homo Sapiens
cuaagcucuagagucuagauccagucacugac

SEQ ID NO: 75827 - RNA, 32 nt, Homo Sapiens
uuuucaaucacgcuuuuuaacuuucuuaccac

SEQ ID NO: 75828 - RNA, 32 nt, Homo Sapiens
acccgcugcgugugugugcgcgcgcguguacg

SEQ ID NO: 75829 - RNA, 32 nt, Homo Sapiens
ccuuuaaggugcugaagugcauguacugugga

SEQ ID NO: 75830 - RNA, 32 nt, Homo Sapiens
gguugauggcgagggggcgcggcgcgggcucu

SEQ ID NO: 75831 - RNA, 32 nt, Homo Sapiens
cagcucugccccccagcuucccgggcgcacug

SEQ ID NO: 75832 - RNA, 32 nt, Homo Sapiens
cuuuccuggcaucagucugcaggaccaagcgg

SEQ ID NO: 75833 - RNA, 32 nt, Homo Sapiens
aagauucuagaaagauucugugucugggaaug

SEQ ID NO: 75834 - RNA, 32 nt, Homo Sapiens
uuaaaaaacaaauuguugcuauuuccuagaag

SEQ ID NO: 75835 - RNA, 32 nt, Homo Sapiens
agcuuuugggcgcugggucuccagggauagac

SEQ ID NO: 75836 - RNA, 32 nt, Homo Sapiens
uguccaaaccauccugaagggcuguaguagag

SEQ ID NO: 75837 - RNA, 32 nt, Homo Sapiens
uuguuaacagccaacacugaaaacacugugag

SEQ ID NO: 75838 - RNA, 32 nt, Homo Sapiens
ggcagggcagggaagggaagggcggagcuggg

SEQ ID NO: 75839 - RNA, 32 nt, Homo Sapiens
gacuccugucuuuuacccuccccucguuccag

SEQ ID NO: 75840 - RNA, 32 nt, Homo Sapiens
gcaccacugugacucugccaucuuccucagac

SEQ ID NO: 75841 - RNA, 32 nt, Homo Sapiens
cgcggagccgucuguuaggagcuuccagagug

SEQ ID NO: 75842 - RNA, 32 nt, Homo Sapiens
uaauuaacuaagacccuauaaaacguguuuag

SEQ ID NO: 75843 - RNA, 32 nt, Homo Sapiens
ggcagguaggucggcacuuggacaauggagug

SEQ ID NO: 75844 - RNA, 32 nt, Homo Sapiens
aagucagagacaagaagaggcuaacaugacug

SEQ ID NO: 75845 - RNA, 32 nt, Homo Sapiens
gaaagugcgguuguggaugcgcggagaggccg

SEQ ID NO: 75846 - RNA, 32 nt, Homo Sapiens
gcaaacuucacuuuuccuaaggaagggaagaa

SEQ ID NO: 75847 - RNA, 32 nt, Homo Sapiens
aucaccaacugggaccacauggggaagaucua

SEQ ID NO: 75848 - RNA, 32 nt, Homo Sapiens
cugcagacgaaaggcaggaaagggcaggccgg

SEQ ID NO: 75849 - RNA, 32 nt, Homo Sapiens
acagaagugcuagaagccagugcucgugaacu

SEQ ID NO: 75850 - RNA, 32 nt, Homo Sapiens
cccgccgugggcagcguccggucgccucuuaa

SEQ ID NO: 75851 - RNA, 32 nt, Homo Sapiens
ugaauuguuguaaugaaguuccugugaacauc

SEQ ID NO: 75852 - RNA, 32 nt, Homo Sapiens
guauaaagaacgucuguacauuggguuauaac

SEQ ID NO: 75853 - RNA, 32 nt, Homo Sapiens
gcaagaaccuccccuuuccccucccccaauaa

SEQ ID NO: 75854 - RNA, 32 nt, Homo Sapiens
aguccgggcacaccccaagcccucuucagggg

SEQ ID NO: 75855 - RNA, 30 nt, Homo Sapiens
uuuugaggagguggcaccggauauaacaug

SEQ ID NO: 75856 - RNA, 30 nt, Homo Sapiens
gcccauucuauagagagggaaaccggggcu

SEQ ID NO: 75857 - RNA, 32 nt, Homo Sapiens
cgccccguguguggagugcccgggcacccuau

SEQ ID NO: 75858 - RNA, 32 nt, Homo Sapiens
gacuauuuuuacuuuaaaaggcacagcugucc

SEQ ID NO: 75859 - RNA, 32 nt, Homo Sapiens
aauccaauauccauucaugauaaaaccucuca

SEQ ID NO: 75860 - RNA, 32 nt, Homo Sapiens
gggcggggcccggccaagcggcugccuuuuac

SEQ ID NO: 75861 - RNA, 32 nt, Homo Sapiens
gccaucaucaccgucagccuuagcgucacugu

SEQ ID NO: 75862 - RNA, 32 nt, Homo Sapiens
auuguuguauaaaucgguauagcuccucuguc

SEQ ID NO: 75863 - RNA, 32 nt, Homo Sapiens
uggacaaauuuaugugaaaauucauuuaacau

SEQ ID NO: 75864 - RNA, 32 nt, Homo Sapiens
ugcacagacaccucuaccuucagcacuauggg

SEQ ID NO: 75865 - RNA, 32 nt, Homo Sapiens
uggcaggcuacuccacucggcucuggaggagu

SEQ ID NO: 75866 - RNA, 32 nt, Homo Sapiens
gacuucucuacccuaaaacuguuugagagagg

SEQ ID NO: 75867 - RNA, 32 nt, Homo Sapiens
ggcuucugccagcccugcuuguccuucccuag

SEQ ID NO: 75868 - RNA, 32 nt, Homo Sapiens
ucugucaaucauggacgcaucuggagacaagu

SEQ ID NO: 75869 - RNA, 30 nt, Homo Sapiens
ccuuuggauaaaauggaugggucaaugccu

SEQ ID NO: 75870 - RNA, 32 nt, Homo Sapiens
agcaacccacuuuugcaugcuguaccuuugau

SEQ ID NO: 75871 - RNA, 29 nt, Homo Sapiens
gaagggaggaggaggaggacgccggucug

SEQ ID NO: 75872 - RNA, 32 nt, Homo Sapiens
ugauaauuuuuuucuucaccuucuccuuccgu

SEQ ID NO: 75873 - RNA, 32 nt, Homo Sapiens
agauguuuuuaaagauuuggcaucucuuccag

SEQ ID NO: 75874 - RNA, 32 nt, Homo Sapiens
cauuuugagaaccauggaaccacaggaaagga

SEQ ID NO: 75875 - RNA, 32 nt, Homo Sapiens
gggcagcccucccccuuuccuucucucccuga

SEQ ID NO: 75876 - RNA, 32 nt, Homo Sapiens
acgcucggccccaaacugguauuugucagacg

SEQ ID NO: 75877 - RNA, 32 nt, Homo Sapiens
uggaccuuuuccugcccuucuccuuccucugc

SEQ ID NO: 75878 - RNA, 32 nt, Homo Sapiens
cagaagaaguuccaggugggaguggaauucag

SEQ ID NO: 75879 - RNA, 32 nt, Homo Sapiens
agggcgccaaggggcggggagcgggcgugcgu

SEQ ID NO: 75880 - RNA, 32 nt, Homo Sapiens
acuggucccucauagcccucagacauuuauau

SEQ ID NO: 75881 - RNA, 32 nt, Homo Sapiens
uuuagguuccugaaacugguggcaacaugacc

SEQ ID NO: 75882 - RNA, 32 nt, Homo Sapiens
aaggcauggaaauguauacuuuugcuuagggu

SEQ ID NO: 75883 - RNA, 32 nt, Homo Sapiens
agauacagaaaagaugaguccuugggauaugg

SEQ ID NO: 75884 - RNA, 32 nt, Homo Sapiens
ucugaaggacaaaaacaagcaaacaaaaaccc

SEQ ID NO: 75885 - RNA, 32 nt, Homo Sapiens
cacaccucccuuagucccacucuugcuugugu

SEQ ID NO: 75886 - RNA, 32 nt, Homo Sapiens
aucccugugaaguaggugggacaaguauaagg

SEQ ID NO: 75887 - RNA, 29 nt, Homo Sapiens
agccgucgguuacagaggagacugacaga

SEQ ID NO: 75888 - RNA, 32 nt, Homo Sapiens
cccggacccucccccgagccgcagccucucuc

SEQ ID NO: 75889 - RNA, 32 nt, Homo Sapiens
ucuugaguuuaaaggcauuaguguuagauaca

SEQ ID NO: 75890 - RNA, 32 nt, Homo Sapiens
ggucaaggcccggccccaucagaggcuggggg

SEQ ID NO: 75891 - RNA, 32 nt, Homo Sapiens
ccccuagacuacugagggacagcgacagcaug

SEQ ID NO: 75892 - RNA, 32 nt, Homo Sapiens
guggcccaggacggggaccuccccuuaguccg

SEQ ID NO: 75893 - RNA, 32 nt, Homo Sapiens
uuuucucuuuuucuuuuuuuuauuuuuguuuu

SEQ ID NO: 75894 - RNA, 32 nt, Homo Sapiens
aagccguugggacuuugauacccaggaagacu

SEQ ID NO: 75895 - RNA, 31 nt, Homo Sapiens
aacagugggcacugcccaccaccucgugucu

SEQ ID NO: 75896 - RNA, 32 nt, Homo Sapiens
auggaguuguuuacauuaagcaugaccgaacg

SEQ ID NO: 75897 - RNA, 32 nt, Homo Sapiens
uugcccuuacugccacugauauugguaauguu

SEQ ID NO: 75898 - RNA, 32 nt, Homo Sapiens
ugccagcucccucucugucugcaccagggagu

SEQ ID NO: 75899 - RNA, 32 nt, Homo Sapiens
aagauuuuauguaucacuaacauuagaaguuu

SEQ ID NO: 75900 - RNA, 32 nt, Homo Sapiens
guugggcuuuaaaagaaaagguuuggcagaac

SEQ ID NO: 75901 - RNA, 32 nt, Homo Sapiens
ucucagugggauagauggauugugaaauggaa

SEQ ID NO: 75902 - RNA, 32 nt, Homo Sapiens
ugauuuccggggcagccuuucagaugcggcag

SEQ ID NO: 75903 - RNA, 32 nt, Homo Sapiens
uauucaucuuucaugguaaagccuccaguugc

SEQ ID NO: 75904 - RNA, 32 nt, Homo Sapiens
uuggugacaaagugucuuuggauuauaauuau

SEQ ID NO: 75905 - RNA, 32 nt, Homo Sapiens
gccgugcauggcccgcgcugcgcuccgagguc

SEQ ID NO: 75906 - RNA, 32 nt, Homo Sapiens
gaacaugaaaauuuauauuuuaguacaguaga

SEQ ID NO: 75907 - RNA, 32 nt, Homo Sapiens
uucaauaguaauauaauacacaaaaucaaaua

SEQ ID NO: 75908 - RNA, 32 nt, Homo Sapiens
uuugagaucagccugcccaacauggugaaacc

SEQ ID NO: 75909 - RNA, 32 nt, Homo Sapiens
ucugccauggccuuggcaggcugcuggaaggc

SEQ ID NO: 75910 - RNA, 32 nt, Homo Sapiens
cccccgaccccaucugccuccuuaagccacag

SEQ ID NO: 75911 - RNA, 29 nt, Homo Sapiens
aauaagucauauguuuguauccuguuuua

SEQ ID NO: 75912 - RNA, 32 nt, Homo Sapiens
cagguuccagucaucacaggaucccccaagcc

SEQ ID NO: 75913 - RNA, 32 nt, Homo Sapiens
ccacuggcaccaaggcccucugcaguggggag

SEQ ID NO: 75914 - RNA, 32 nt, Homo Sapiens
ucugaggguaguccacaugcaaguguucuaaa

SEQ ID NO: 75915 - RNA, 32 nt, Homo Sapiens
gcucaggucgcucuaagcacaaacguggcucu

SEQ ID NO: 75916 - RNA, 32 nt, Homo Sapiens
gucccuguguuccccacguccaggccguagau

SEQ ID NO: 75917 - RNA, 32 nt, Homo Sapiens
agcucagagagcugcgcuggaggagaaaagcc

SEQ ID NO: 75918 - RNA, 32 nt, Homo Sapiens
gcccucugcagcucagcccuguacauauaccu

SEQ ID NO: 75919 - RNA, 32 nt, Homo Sapiens
gcccacagcuggacacccugagagccagcuac

SEQ ID NO: 75920 - RNA, 32 nt, Homo Sapiens
ccccauucugccuccuucuggggaaauaaaca

SEQ ID NO: 75921 - RNA, 32 nt, Homo Sapiens
gcauguggaugugagcugggagggaucugccu

SEQ ID NO: 75922 - RNA, 32 nt, Homo Sapiens
gugucuggguccccgcccuccagccgccuuug

SEQ ID NO: 75923 - RNA, 32 nt, Homo Sapiens
ccagccaggggaggggcuuggccaaagucaca

SEQ ID NO: 75924 - RNA, 32 nt, Homo Sapiens
ccaaacuaaauacuguaacacuguauaacauu

SEQ ID NO: 75925 - RNA, 32 nt, Homo Sapiens
ggagaacugggauuugaacccccgccauccuu

SEQ ID NO: 75926 - RNA, 31 nt, Homo Sapiens
gggcaucagaacagccugcccugggcaccag

SEQ ID NO: 75927 - RNA, 32 nt, Homo Sapiens
cagcagaauuuucuccccgucuuccccuuccu

SEQ ID NO: 75928 - RNA, 31 nt, Homo Sapiens
ccugggccacagugccugccucguugugucu

SEQ ID NO: 75929 - RNA, 32 nt, Homo Sapiens
ggagauggcauagagaagaucuaauaccaucc

SEQ ID NO: 75930 - RNA, 32 nt, Homo Sapiens
acaacucaaauucacuagaaaacuacuguugg

SEQ ID NO: 75931 - RNA, 32 nt, Homo Sapiens
gcuuugaugggcaaacaaaauuagaaaguggg

SEQ ID NO: 75932 - RNA, 29 nt, Homo Sapiens
auuuguuaaaguuuguucguuuugugguu

SEQ ID NO: 75933 - RNA, 32 nt, Homo Sapiens
ucgggggagcccgaaauuugaagauucucuuu

SEQ ID NO: 75934 - RNA, 32 nt, Homo Sapiens
cacgcgcguucaaagcacuuuuguagucacuu

SEQ ID NO: 75935 - RNA, 32 nt, Homo Sapiens
uuguuaguuuaaauuguuuucuuucuuccaag

SEQ ID NO: 75936 - RNA, 32 nt, Homo Sapiens
cagccuccuuaguagcugggacuaccagugca

SEQ ID NO: 75937 - RNA, 28 nt, Homo Sapiens
cugccagaauaaaauuguuuccaauaaa

SEQ ID NO: 75938 - RNA, 32 nt, Homo Sapiens
gcuucugaaacacuuagacucuggacccagca

SEQ ID NO: 75939 - RNA, 32 nt, Homo Sapiens
aucagaauuucuguaguagaaacuacgaaaaa

SEQ ID NO: 75940 - RNA, 32 nt, Homo Sapiens
ugccuucucccucuucucuacacuucugccgg

SEQ ID NO: 75941 - RNA, 32 nt, Homo Sapiens
uggaaggagaauggcauuaucuauaaggcuga

SEQ ID NO: 75942 - RNA, 32 nt, Homo Sapiens
aaccuacucuaguauucggugauucagcccca

SEQ ID NO: 75943 - RNA, 32 nt, Homo Sapiens
ccugcccugcucuggagggagggccaggagcu

SEQ ID NO: 75944 - RNA, 32 nt, Homo Sapiens
acaugagccccagcucccagccccacacgccc

SEQ ID NO: 75945 - RNA, 32 nt, Homo Sapiens
guggagcccccggccccgccgagccacagccc

SEQ ID NO: 75946 - RNA, 31 nt, Homo Sapiens
ugguccccggagcuccugcccccagugcaug

SEQ ID NO: 75947 - RNA, 32 nt, Homo Sapiens
accugggaugguggccaggccgugcccuugcu

SEQ ID NO: 75948 - RNA, 32 nt, Homo Sapiens
gcccuggcugcagcugcagcgcgagccaugcg

SEQ ID NO: 75949 - RNA, 32 nt, Homo Sapiens
cuuucuccggcaugcauaugcuuucuacuaca

SEQ ID NO: 75950 - RNA, 32 nt, Homo Sapiens
uugguaucaggagauccugaggcugguagggg

SEQ ID NO: 75951 - RNA, 32 nt, Homo Sapiens
ucuugaccuguccccucuggcugccucugagu

SEQ ID NO: 75952 - RNA, 32 nt, Homo Sapiens
uuaggccaaaauuuauaugaauauuugaucuu

SEQ ID NO: 75953 - RNA, 32 nt, Homo Sapiens
cugggauaauguguugggaggcguccugggga

SEQ ID NO: 75954 - RNA, 32 nt, Homo Sapiens
cacuggccacucugccuggagagaggaguaaa

SEQ ID NO: 75955 - RNA, 32 nt, Homo Sapiens
auccucuuugugaucuuguugaaacagcauca

SEQ ID NO: 75956 - RNA, 32 nt, Homo Sapiens
uuuaugguaauaaaguuaucugcacaaguuca

SEQ ID NO: 75957 - RNA, 32 nt, Homo Sapiens
auuucuuauuggcauucaacauauguaaaauc

SEQ ID NO: 75958 - RNA, 32 nt, Homo Sapiens
ggucaguggaacaaaaugcauauaugguuuug

SEQ ID NO: 75959 - RNA, 32 nt, Homo Sapiens
ugacagggaaaguccaggucacuuuauucugu

SEQ ID NO: 75960 - RNA, 32 nt, Homo Sapiens
agagccugccccagcccuucgagcccccuccc

SEQ ID NO: 75961 - RNA, 32 nt, Homo Sapiens
gguggucuccuuaacugcggacuugcaagauc

SEQ ID NO: 75962 - RNA, 32 nt, Homo Sapiens
acuaaugugagguugguuuguuuucuaaucau

SEQ ID NO: 75963 - RNA, 32 nt, Homo Sapiens
uugucugugcccuguccacacccaggagccau

SEQ ID NO: 75964 - RNA, 32 nt, Homo Sapiens
gacuguguugucccagggcugaugcuguacag

SEQ ID NO: 75965 - RNA, 32 nt, Homo Sapiens
agggauccggcgggaugggucucaucugcugc

SEQ ID NO: 75966 - RNA, 32 nt, Homo Sapiens
gggaauguguauauacauuuauaaauuugugu

SEQ ID NO: 75967 - RNA, 32 nt, Homo Sapiens
cagaggaagaaaauggcagagaauacaaauuu

SEQ ID NO: 75968 - RNA, 32 nt, Homo Sapiens
agagaaggaagaagaugcccccugccuucucu

SEQ ID NO: 75969 - RNA, 32 nt, Homo Sapiens
auauacaucuucuuccuuuugguuucuugauc

SEQ ID NO: 75970 - RNA, 32 nt, Homo Sapiens
cuaagaugauucaaaguaguuuuauuuuaaua

SEQ ID NO: 75971 - RNA, 32 nt, Homo Sapiens
uguuuuuaaaagauuacuuucuacuuuguguu

SEQ ID NO: 75972 - RNA, 32 nt, Homo Sapiens
auugagaaacuuaugaugguggcauugccuuu

SEQ ID NO: 75973 - RNA, 32 nt, Homo Sapiens
uuaugaagcaccuagaauuuuucaauuauacg

SEQ ID NO: 75974 - RNA, 32 nt, Homo Sapiens
cgcccgcuagcucuccucccuuccgcuccugc

SEQ ID NO: 75975 - RNA, 32 nt, Homo Sapiens
cccugcagcucucagcuggcugcaguaacauu

SEQ ID NO: 75976 - RNA, 32 nt, Homo Sapiens
gaccccuccuucccagucccaugaucgcccca

SEQ ID NO: 75977 - RNA, 32 nt, Homo Sapiens
ucugaccccaucuccucauccucccccagccc

SEQ ID NO: 75978 - RNA, 32 nt, Homo Sapiens
agacuuauagauagauagauagauagauggau

SEQ ID NO: 75979 - RNA, 32 nt, Homo Sapiens
uccuagaggauuaugaggaauccuuucuaugu

SEQ ID NO: 75980 - RNA, 32 nt, Homo Sapiens
cagagggcgagaggcucugugcugugucccuu

SEQ ID NO: 75981 - RNA, 32 nt, Homo Sapiens
aauuauaaugggaaacaaaacuaucuauguuc

SEQ ID NO: 75982 - RNA, 32 nt, Homo Sapiens
cguccaguuucauuacacacacagacguacac

SEQ ID NO: 75983 - RNA, 29 nt, Homo Sapiens
gaacagucauaugccauuggaagucuugg

SEQ ID NO: 75984 - RNA, 32 nt, Homo Sapiens
gugcugggggcggccacccgcucuccaggaaa

SEQ ID NO: 75985 - RNA, 32 nt, Homo Sapiens
cuaauuuucugcagcuuuuaguuuggaaaaaa

SEQ ID NO: 75986 - RNA, 32 nt, Homo Sapiens
guuuugcacuaucacuuaguaccuguuugacc

SEQ ID NO: 75987 - RNA, 32 nt, Homo Sapiens
gggcaggcggguggggcaggcugggggcuggg

SEQ ID NO: 75988 - RNA, 31 nt, Homo Sapiens
uugauuccauucucagcuccaagcauuaggu

SEQ ID NO: 75989 - RNA, 32 nt, Homo Sapiens
gugggaggccuggcccgggccucccccgugac

SEQ ID NO: 75990 - RNA, 32 nt, Homo Sapiens
gccacacgugugaccugcugggccgugguucu

SEQ ID NO: 75991 - RNA, 32 nt, Homo Sapiens
uauacgagacccuuauaaaaacaaaagaaguc

SEQ ID NO: 75992 - RNA, 32 nt, Homo Sapiens
aggggaauaaaauuaccuauuuuuguuauuaa

SEQ ID NO: 75993 - RNA, 32 nt, Homo Sapiens
cggggaggaugcugcgcgagcggaccgugcgg

SEQ ID NO: 75994 - RNA, 32 nt, Homo Sapiens
gugcugcccgcucaccgcccgccauggcccgc

SEQ ID NO: 75995 - RNA, 32 nt, Homo Sapiens
gaucgccuugcggccuggcacuggagcuggug

SEQ ID NO: 75996 - RNA, 32 nt, Homo Sapiens
gaggaauaaaaugauuaagugcuugaggccaa

SEQ ID NO: 75997 - RNA, 32 nt, Homo Sapiens
acaggaucccacuauguuaggaaaguucugaa

SEQ ID NO: 75998 - RNA, 32 nt, Homo Sapiens
uugcuuuggacuaucuguuggcugaauggggg

SEQ ID NO: 75999 - RNA, 30 nt, Homo Sapiens
cgggcguggaggcagcaccgggcucggagc

SEQ ID NO: 76000 - RNA, 32 nt, Homo Sapiens
uauuucugugacgcgcccccaugcccccaccc

SEQ ID NO: 76001 - RNA, 32 nt, Homo Sapiens
cagagguggcaggggcggggcggcuggcggua

SEQ ID NO: 76002 - RNA, 32 nt, Homo Sapiens
cguguccgccgggcaacuccagccgaggccug

SEQ ID NO: 76003 - RNA, 32 nt, Homo Sapiens
ugugcagagacugggcggccagccugcccuug

SEQ ID NO: 76004 - RNA, 32 nt, Homo Sapiens
acaguaaauacuugaugaguuaaugaauggcc

SEQ ID NO: 76005 - RNA, 32 nt, Homo Sapiens
cccgcccagccccugcccccagccugugugcc

SEQ ID NO: 76006 - RNA, 32 nt, Homo Sapiens
aggagaggcaacaggaggcauucuguggccag

SEQ ID NO: 76007 - RNA, 32 nt, Homo Sapiens
cugcuguugagugagaucuucaaugcuuccuc

SEQ ID NO: 76008 - RNA, 32 nt, Homo Sapiens
caaccgcgacuucagcugggcagccucacagc

SEQ ID NO: 76009 - RNA, 32 nt, Homo Sapiens
auuaaagagauuuggaauauuuuugucaaugu

SEQ ID NO: 76010 - RNA, 32 nt, Homo Sapiens
ugcccucuccccagcccucaucucacucuccc

SEQ ID NO: 76011 - RNA, 32 nt, Homo Sapiens
gguugguggcgggggguuucggcgugccaaca

SEQ ID NO: 76012 - RNA, 32 nt, Homo Sapiens
acucaauucacugugugagcuggaguggcagg

SEQ ID NO: 76013 - RNA, 32 nt, Homo Sapiens
ucuuuggaaugggagaugacuuuucgcacuaa

SEQ ID NO: 76014 - RNA, 32 nt, Homo Sapiens
cgaaccuuggagguggagguuguggugagcca

SEQ ID NO: 76015 - RNA, 32 nt, Homo Sapiens
ccaguuuugugaaaauguucugcuaguaugaa

SEQ ID NO: 76016 - RNA, 32 nt, Homo Sapiens
aaagcacaaaaauaaucaaaaauaaaguaaaa

SEQ ID NO: 76017 - RNA, 32 nt, Homo Sapiens
uuggcaccauucucauucuuuaucccacucaa

SEQ ID NO: 76018 - RNA, 32 nt, Homo Sapiens
gccgucccgucccacacuccccugggcauucu

SEQ ID NO: 76019 - RNA, 30 nt, Homo Sapiens
gcccgugugcacguggcgccggcgcugccu

SEQ ID NO: 76020 - RNA, 32 nt, Homo Sapiens
guuuaauuuugucacacuguuuucauagcguu

SEQ ID NO: 76021 - RNA, 32 nt, Homo Sapiens
cucuuuaauuuaauuagaucuccuuugucagu

SEQ ID NO: 76022 - RNA, 32 nt, Homo Sapiens
ugcaggcaccugccacugugcagagccugggg

SEQ ID NO: 76023 - RNA, 32 nt, Homo Sapiens
gcauauagauguaauuuauagauagaucaguu

SEQ ID NO: 76024 - RNA, 32 nt, Homo Sapiens
ugucccggguggcgcgccccaccugccuggcu

SEQ ID NO: 76025 - RNA, 32 nt, Homo Sapiens
aggcccugccgggaacccaggcugcagccccc

SEQ ID NO: 76026 - RNA, 32 nt, Homo Sapiens
caucuucgucccagccccggaggcuccugugg

SEQ ID NO: 76027 - RNA, 32 nt, Homo Sapiens
uagcuaauuuaaaauuucagaaaaugcuauua

SEQ ID NO: 76028 - RNA, 32 nt, Homo Sapiens
auauaguucagcauuuauuguuuaggaguaua

SEQ ID NO: 76029 - RNA, 32 nt, Homo Sapiens
uuuuacuucuaaaaugagauugugacuggcaa

SEQ ID NO: 76030 - RNA, 32 nt, Homo Sapiens
gugaagacauggcugcccuugagaaggauuau

SEQ ID NO: 76031 - RNA, 32 nt, Homo Sapiens
acuaggugccagacgguccggaggcgggggcc

SEQ ID NO: 76032 - RNA, 32 nt, Homo Sapiens
uuucccggacucugccccuacaucucagcuga

SEQ ID NO: 76033 - RNA, 32 nt, Homo Sapiens
auguuaaugucuugauuaaauaucacaaugca

SEQ ID NO: 76034 - RNA, 32 nt, Homo Sapiens
aauuaagaugauccauuuuaaauuuaauauau

SEQ ID NO: 76035 - RNA, 32 nt, Homo Sapiens
cagaggacuuaaacaggcaagaaggacuuggu

SEQ ID NO: 76036 - RNA, 32 nt, Homo Sapiens
cccaccccaagcaggaaccccaggagaucaau

SEQ ID NO: 76037 - RNA, 32 nt, Homo Sapiens
gcaaaccaccccacccaucaccaucugucauc

SEQ ID NO: 76038 - RNA, 32 nt, Homo Sapiens
ccuuggccgcgugcauagcccagacacagaag

SEQ ID NO: 76039 - RNA, 32 nt, Homo Sapiens
uagauuaaacaaacaaacaauuggguacccag

SEQ ID NO: 76040 - RNA, 32 nt, Homo Sapiens
gcggcucgugguugucccgccauggcacuguc

SEQ ID NO: 76041 - RNA, 32 nt, Homo Sapiens
cgccuggccuggggggcggggagaggcagcag

SEQ ID NO: 76042 - RNA, 32 nt, Homo Sapiens
acggccugcccuccccgucccgggggacacug

SEQ ID NO: 76043 - RNA, 31 nt, Homo Sapiens
gccccacucgagucuucuggaguccaaggca

SEQ ID NO: 76044 - RNA, 32 nt, Homo Sapiens
cgcucacguuagcagacagcucugcccuagug

SEQ ID NO: 76045 - RNA, 32 nt, Homo Sapiens
gcugcguguaggccgcgcccucaggcccaguc

SEQ ID NO: 76046 - RNA, 30 nt, Homo Sapiens
gcuugugucugugacugcagcuauggccuu

SEQ ID NO: 76047 - RNA, 32 nt, Homo Sapiens
uauaacuuuuaaaauugguauaguaucuacag

SEQ ID NO: 76048 - RNA, 32 nt, Homo Sapiens
cuuccuuggcucuucuccacuccaccucgaag

SEQ ID NO: 76049 - RNA, 32 nt, Homo Sapiens
uauaccuguuaguucugagguuauuaaagaaa

SEQ ID NO: 76050 - RNA, 32 nt, Homo Sapiens
agaaggccagcuccauaacauaaaagugcgag

SEQ ID NO: 76051 - RNA, 32 nt, Homo Sapiens
cagagaucuccaaaaauuuaaaacagaauaau

SEQ ID NO: 76052 - RNA, 32 nt, Homo Sapiens
accuggaccagcaggaagauucugggagguca

SEQ ID NO: 76053 - RNA, 32 nt, Homo Sapiens
uuuauuuaauaaacuuaagcuuaacauggaaa

SEQ ID NO: 76054 - RNA, 32 nt, Homo Sapiens
ggacauauguuaggaauacucuuucuuucuuu

SEQ ID NO: 76055 - RNA, 32 nt, Homo Sapiens
gucucggaggccaggaugccugcccuggcaug

SEQ ID NO: 76056 - RNA, 32 nt, Homo Sapiens
aguaacccugguaacaauucucuucaccuuau

SEQ ID NO: 76057 - RNA, 30 nt, Homo Sapiens
ccagcaugaucgccgcgcagcuccuggccu

SEQ ID NO: 76058 - RNA, 32 nt, Homo Sapiens
agcuguguguggaagccacgggcucaagcagc

SEQ ID NO: 76059 - RNA, 32 nt, Homo Sapiens
agaggacagugaaugaacauggcauuacuuuu

SEQ ID NO: 76060 - RNA, 32 nt, Homo Sapiens
augaucaggagccuucauuaaaacagaaauuu

SEQ ID NO: 76061 - RNA, 32 nt, Homo Sapiens
uuucauuuaguagacaugccuaugggaacauu

SEQ ID NO: 76062 - RNA, 32 nt, Homo Sapiens
cuggauuugugcuuuucuuuugugguuucucu

SEQ ID NO: 76063 - RNA, 32 nt, Homo Sapiens
aucaaguguacacagcagcagcaaaaucaagg

SEQ ID NO: 76064 - RNA, 32 nt, Homo Sapiens
cugcucagaacaagaacugagauccagagaga

SEQ ID NO: 76065 - RNA, 32 nt, Homo Sapiens
ugcaggagauauuuauacuacgaggguuguuu

SEQ ID NO: 76066 - RNA, 32 nt, Homo Sapiens
cccuucucucgccccagguccuuucucagccu

SEQ ID NO: 76067 - RNA, 32 nt, Homo Sapiens
uuaaaagaaaaguuugcugaaaaaguaagaua

SEQ ID NO: 76068 - RNA, 32 nt, Homo Sapiens
aagaauuuaaguucuauucagcuuuccugggu

SEQ ID NO: 76069 - RNA, 32 nt, Homo Sapiens
cgucgcugagcuccacuguuggcaaagucuug

SEQ ID NO: 76070 - RNA, 32 nt, Homo Sapiens
cacaacauaucuaucuauuauuucauuugauu

SEQ ID NO: 76071 - RNA, 32 nt, Homo Sapiens
aaaacagaaaaaaucuucauguauuuuuauua

SEQ ID NO: 76072 - RNA, 32 nt, Homo Sapiens
uauauuuguaaaagaugaaggcuguaucuauu

SEQ ID NO: 76073 - RNA, 32 nt, Homo Sapiens
acugaaccaugguagagcuauuaguuuguagg

SEQ ID NO: 76074 - RNA, 32 nt, Homo Sapiens
uuacuuuugcaaacagacagaaaggauacacu

SEQ ID NO: 76075 - RNA, 32 nt, Homo Sapiens
aggucuucaaggauaaaaacugccaccccaac

SEQ ID NO: 76076 - RNA, 32 nt, Homo Sapiens
gaggccucgccuugcgccacggaggaggugcu

SEQ ID NO: 76077 - RNA, 32 nt, Homo Sapiens
gugcgggaaaaccaccugaccccuagggauuu

SEQ ID NO: 76078 - RNA, 32 nt, Homo Sapiens
ugcauccgcccggccccugcccgcccgagugg

SEQ ID NO: 76079 - RNA, 32 nt, Homo Sapiens
gaucucauucuauuugccaauuaugaauuuga

SEQ ID NO: 76080 - RNA, 32 nt, Homo Sapiens
ccaggccccgcgcuccucacuccugccucucc

SEQ ID NO: 76081 - RNA, 31 nt, Homo Sapiens
cggagcagcuggagccugcccuguccacggc

SEQ ID NO: 76082 - RNA, 32 nt, Homo Sapiens
uuccucagaacaaagauuggaaaaagcuggcc

SEQ ID NO: 76083 - RNA, 32 nt, Homo Sapiens
cuguuuguacucaaauauauuuucucaguuuc

SEQ ID NO: 76084 - RNA, 32 nt, Homo Sapiens
gacggcgccugccuguagauguuuggaucuuc

SEQ ID NO: 76085 - RNA, 32 nt, Homo Sapiens
aggagcggguccgucgcggagccggagggcgg

SEQ ID NO: 76086 - RNA, 32 nt, Homo Sapiens
uguggacacccaugaaaccucccccauaauca

SEQ ID NO: 76087 - RNA, 32 nt, Homo Sapiens
uccaggagaaaguauaaaaguuaccuugagga

SEQ ID NO: 76088 - RNA, 32 nt, Homo Sapiens
gccaccaccuggggagagccugcuugggaaug

SEQ ID NO: 76089 - RNA, 32 nt, Homo Sapiens
ggaggagccauggucaucaucaucggggacaa

SEQ ID NO: 76090 - RNA, 32 nt, Homo Sapiens
uuuugcucuccaaagcacuuuuggauacucag

SEQ ID NO: 76091 - RNA, 32 nt, Homo Sapiens
ugaacccguccucaccauguuugccacaucug

SEQ ID NO: 76092 - RNA, 32 nt, Homo Sapiens
acaccuggccccaagcuugaauuuucauucug

SEQ ID NO: 76093 - RNA, 32 nt, Homo Sapiens
uaugacuggaaacuuuuuuguacaacacucca

SEQ ID NO: 76094 - RNA, 32 nt, Homo Sapiens
aucccaacugcauuuucuauccuuccaggugg

SEQ ID NO: 76095 - RNA, 32 nt, Homo Sapiens
agcucucugggaaguuccuucucugggucuua

SEQ ID NO: 76096 - RNA, 32 nt, Homo Sapiens
ugcaggcaccaccuuuaaucuguuuuauaccu

SEQ ID NO: 76097 - RNA, 32 nt, Homo Sapiens
aauggcuguccucauacugucucgcucaagau

SEQ ID NO: 76098 - RNA, 32 nt, Homo Sapiens
gaauaauuucauacugaaauuauuuucuccaa

SEQ ID NO: 76099 - RNA, 32 nt, Homo Sapiens
ugcuuuuguaaauuuucacaaacagucacuca

SEQ ID NO: 76100 - RNA, 32 nt, Homo Sapiens
accaugccuggccagaagcuuuuuuaaaaaua

SEQ ID NO: 76101 - RNA, 32 nt, Homo Sapiens
aacugcucagauguuugaaacuucuguccucu

SEQ ID NO: 76102 - RNA, 32 nt, Homo Sapiens
gauacauaacuaaauuugauacuuauauuuuc

SEQ ID NO: 76103 - RNA, 32 nt, Homo Sapiens
auaauuguuauucaaauuagaagguuauauac

SEQ ID NO: 76104 - RNA, 32 nt, Homo Sapiens
gagcacaugccagcugagugaaaacgcacccu

SEQ ID NO: 76105 - RNA, 32 nt, Homo Sapiens
aggggguuguggucggggagcugggguacagg

SEQ ID NO: 76106 - RNA, 31 nt, Homo Sapiens
uggagcgguccgugcgcuccccgcgcccgag

SEQ ID NO: 76107 - RNA, 32 nt, Homo Sapiens
uucuaguaagaaauuaauaaaacuaccuuauu

SEQ ID NO: 76108 - RNA, 32 nt, Homo Sapiens
aucuuuucaaguuuuauguugaggaucuuaaa

SEQ ID NO: 76109 - RNA, 32 nt, Homo Sapiens
cuugguuuuuacaauuaaaaugaccaaaaacu

SEQ ID NO: 76110 - RNA, 32 nt, Homo Sapiens
cggcggcggcaccagcaccaccaugucgcgcu

SEQ ID NO: 76111 - RNA, 32 nt, Homo Sapiens
ugauaugcaccuguacaguaauucacuccccc

SEQ ID NO: 76112 - RNA, 32 nt, Homo Sapiens
uaguuuaauauuuguaugaccuugucuagucu

SEQ ID NO: 76113 - RNA, 32 nt, Homo Sapiens
gcacacacaccgaugcugacuccaugugugcu

SEQ ID NO: 76114 - RNA, 32 nt, Homo Sapiens
aaacaaucucuuaaauuggguucaugaugcag

SEQ ID NO: 76115 - RNA, 32 nt, Homo Sapiens
aauaggauauaaaagggacaaaaaauaaguag

SEQ ID NO: 76116 - RNA, 32 nt, Homo Sapiens
ugagcagaggagagcggcagcugggguugggc

SEQ ID NO: 76117 - RNA, 32 nt, Homo Sapiens
uucugccgucauuugacaggaaauuaggauga

SEQ ID NO: 76118 - RNA, 32 nt, Homo Sapiens
ccugaugcugccuggaagcuuauuuucccgug

SEQ ID NO: 76119 - RNA, 32 nt, Homo Sapiens
aaggaaaacauauugauuuuaucccuuuguua

SEQ ID NO: 76120 - RNA, 32 nt, Homo Sapiens
cuuguauaauuuccucuccuugggugcagaua

SEQ ID NO: 76121 - RNA, 32 nt, Homo Sapiens
cgagaggagagaggccugggggcugucccagg

SEQ ID NO: 76122 - RNA, 32 nt, Homo Sapiens
ucucuuuguaaguuggugacuugcaucugugg

SEQ ID NO: 76123 - RNA, 32 nt, Homo Sapiens
cucccggucuagagguuuuucuucuugguccu

SEQ ID NO: 76124 - RNA, 32 nt, Homo Sapiens
gaaucauaagauauugaaccagcaaauuuaag

SEQ ID NO: 76125 - RNA, 32 nt, Homo Sapiens
uuuggaagaaaaaaccuaaggugcuuuucaaa

SEQ ID NO: 76126 - RNA, 29 nt, Homo Sapiens
gagccagggggacaguggagccgagggag

SEQ ID NO: 76127 - RNA, 32 nt, Homo Sapiens
acugauuuuuaauucugacacccacaacaaaa

SEQ ID NO: 76128 - RNA, 32 nt, Homo Sapiens
gcagcaggccauguacuugccauggugagggu

SEQ ID NO: 76129 - RNA, 32 nt, Homo Sapiens
gcugcucugcaccuuccucccgucuugccuuc

SEQ ID NO: 76130 - RNA, 32 nt, Homo Sapiens
ugccgccgccccagccgaaggcccuccuggcg

SEQ ID NO: 76131 - RNA, 32 nt, Homo Sapiens
uguugcagcugagauucauguaacuagagugg

SEQ ID NO: 76132 - RNA, 32 nt, Homo Sapiens
gcaagagugggaggcgcgcgcggaggccgcga

SEQ ID NO: 76133 - RNA, 32 nt, Homo Sapiens
cggggaccaauauuuuuaacuuugccuauuug

SEQ ID NO: 76134 - RNA, 32 nt, Homo Sapiens
gaguccccaagccauagcagggcgucuguaaa

SEQ ID NO: 76135 - RNA, 32 nt, Homo Sapiens
uuucaggaaaauuacauccucccauggaggau

SEQ ID NO: 76136 - RNA, 32 nt, Homo Sapiens
agguccuacugccugccaguacucaugugagu

SEQ ID NO: 76137 - RNA, 32 nt, Homo Sapiens
ugcugacuaguagacuaacauaaaagauauaa

SEQ ID NO: 76138 - RNA, 32 nt, Homo Sapiens
gcuuauagcauaggcagccugacuccacagcu

SEQ ID NO: 76139 - RNA, 32 nt, Homo Sapiens
ggaauuucauucaaaggcauaauagcaaugac

SEQ ID NO: 76140 - RNA, 32 nt, Homo Sapiens
uuucccaaaaauuugagguaucauugaaacag

SEQ ID NO: 76141 - RNA, 32 nt, Homo Sapiens
gaucuucuauuuuggggaagacaugaagcgcu

SEQ ID NO: 76142 - RNA, 32 nt, Homo Sapiens
cccuaagaaggagccuugggggugugaugugg

SEQ ID NO: 76143 - RNA, 32 nt, Homo Sapiens
guucgagucggugcccugggggugggcugugc

SEQ ID NO: 76144 - RNA, 28 nt, Homo Sapiens
caguauccucauuaacauuugaaguugg

SEQ ID NO: 76145 - RNA, 32 nt, Homo Sapiens
ugccugccugccuggguugcggaagugauagc

SEQ ID NO: 76146 - RNA, 32 nt, Homo Sapiens
uuuuggaaaguuuuuguauuaagggauuuagu

SEQ ID NO: 76147 - RNA, 32 nt, Homo Sapiens
gaccagcugcgcacgaggccagcggcgggguc

SEQ ID NO: 76148 - RNA, 32 nt, Homo Sapiens
gauauaaauuccuuuuucuuauuuucaaauuu

SEQ ID NO: 76149 - RNA, 32 nt, Homo Sapiens
agcugccugcucccggcccacccucuaggagg

SEQ ID NO: 76150 - RNA, 32 nt, Homo Sapiens
aaucuacauuuaucaauaaaauguaaauuauc

SEQ ID NO: 76151 - RNA, 32 nt, Homo Sapiens
agagggugguauauagggaagggccagauagg

SEQ ID NO: 76152 - RNA, 32 nt, Homo Sapiens
agcggggcgcgcugcauugugggguggcggcg

SEQ ID NO: 76153 - RNA, 31 nt, Homo Sapiens
accggagcgagccccaugccccgcgcgggcu

SEQ ID NO: 76154 - RNA, 31 nt, Homo Sapiens
gacggucaggccaccaccgcaaagaggcagc

SEQ ID NO: 76155 - RNA, 32 nt, Homo Sapiens
ggccaccugccaggguucucuggcaucacgcu

SEQ ID NO: 76156 - RNA, 32 nt, Homo Sapiens
uuacagcucauguagccuggaccucccaagcu

SEQ ID NO: 76157 - RNA, 32 nt, Homo Sapiens
uguuuuuucgagccaagcuuaguuagacucuu

SEQ ID NO: 76158 - RNA, 32 nt, Homo Sapiens
aagccuauaaaaaaugauauuuuuuaguugcu

SEQ ID NO: 76159 - RNA, 32 nt, Homo Sapiens
gaggccaccuugcgaugagacaucccaggagc

SEQ ID NO: 76160 - RNA, 32 nt, Homo Sapiens
cuggggaacggcaggcagguguccucgggggc

SEQ ID NO: 76161 - RNA, 32 nt, Homo Sapiens
cugcaacccagcugcuggacugaucugaaacg

SEQ ID NO: 76162 - RNA, 32 nt, Homo Sapiens
aaguuuagagaugcauuuaagaauuauucaca

SEQ ID NO: 76163 - RNA, 32 nt, Homo Sapiens
uuuaguggagacgggguuucaccauguugucc

SEQ ID NO: 76164 - RNA, 32 nt, Homo Sapiens
gcucuggggcuaccucagggccccacaggaug

SEQ ID NO: 76165 - RNA, 32 nt, Homo Sapiens
cccuggacccagaggcagauacugcggggugg

SEQ ID NO: 76166 - RNA, 32 nt, Homo Sapiens
ugcucaucuccaauaaaauaaaagcacuuaug

SEQ ID NO: 76167 - RNA, 32 nt, Homo Sapiens
ccuuaaaauaauuuauaucuugauguuaaaac

SEQ ID NO: 76168 - RNA, 32 nt, Homo Sapiens
cuuuaauaauuuucuuuuuuuuuuuuuuuuuu

SEQ ID NO: 76169 - RNA, 32 nt, Homo Sapiens
ucauuucuuuuugggagagacuuguuuuggau

SEQ ID NO: 76170 - RNA, 32 nt, Homo Sapiens
agcaggacgcagagagccccgggcuguccaca

SEQ ID NO: 76171 - RNA, 32 nt, Homo Sapiens
uccuucuacaccugccucuggaacccacgugc

SEQ ID NO: 76172 - RNA, 29 nt, Homo Sapiens
auuauuauacugaugucuuggauucuuuu

SEQ ID NO: 76173 - RNA, 32 nt, Homo Sapiens
auucaacuuuuguaguauuuacguaugcagac

SEQ ID NO: 76174 - RNA, 32 nt, Homo Sapiens
guagagggaagaaacagaagcaguguuccauu

SEQ ID NO: 76175 - RNA, 32 nt, Homo Sapiens
caggguugcgcucuuucgcccaggcuggucuc

SEQ ID NO: 76176 - RNA, 32 nt, Homo Sapiens
aaaaauauaaagacagaagacaugaggaaaaa

SEQ ID NO: 76177 - RNA, 32 nt, Homo Sapiens
cagggcuacagccugugcccagcccucuaauu

SEQ ID NO: 76178 - RNA, 32 nt, Homo Sapiens
cuuccaucugcacacacccccaagguaagggu

SEQ ID NO: 76179 - RNA, 32 nt, Homo Sapiens
ugguccacagucugcccucaucccucuggcag

SEQ ID NO: 76180 - RNA, 32 nt, Homo Sapiens
gagggggcucuggucagccuucgucgaggcuu

SEQ ID NO: 76181 - RNA, 32 nt, Homo Sapiens
ccccauugccucuccuuccuugaacucuuucc

SEQ ID NO: 76182 - RNA, 32 nt, Homo Sapiens
guggggcuugagggugacguccuuccugcggc

SEQ ID NO: 76183 - RNA, 32 nt, Homo Sapiens
ugcugcguguggagccucgagugggcccuggc

SEQ ID NO: 76184 - RNA, 30 nt, Homo Sapiens
ggaccgcgagggcgcgcgucucgggugccg

SEQ ID NO: 76185 - RNA, 32 nt, Homo Sapiens
aaaaggugaacaucuguuugcagaaucugauu

SEQ ID NO: 76186 - RNA, 32 nt, Homo Sapiens
ucaaacacauaaaucaaaaugggccaaguagc

SEQ ID NO: 76187 - RNA, 32 nt, Homo Sapiens
ggccuuccgccaccauggaguaccucaucggu

SEQ ID NO: 76188 - RNA, 32 nt, Homo Sapiens
uuuuguuuguuuuguuuuuuuaaccacagaua

SEQ ID NO: 76189 - RNA, 31 nt, Homo Sapiens
ggaccaugagccugcuggacggccucgcuuc

SEQ ID NO: 76190 - RNA, 32 nt, Homo Sapiens
gagcaauaaaagacaaaugcaacauuuuaagg

SEQ ID NO: 76191 - RNA, 32 nt, Homo Sapiens
aaacaagcucuuguguaaauagacuucugugc

SEQ ID NO: 76192 - RNA, 30 nt, Homo Sapiens
ccugcugucuguguuguccagagagcgagc

SEQ ID NO: 76193 - RNA, 32 nt, Homo Sapiens
uugagaauuugccugccugggcaggaaaggga

SEQ ID NO: 76194 - RNA, 32 nt, Homo Sapiens
ggaugagucaggagcauuuucuuaagaggaac

SEQ ID NO: 76195 - RNA, 32 nt, Homo Sapiens
accaucauacucaagcuuuacagagugcugca

SEQ ID NO: 76196 - RNA, 32 nt, Homo Sapiens
gacuggucagugccggggccucccuuugugug

SEQ ID NO: 76197 - RNA, 32 nt, Homo Sapiens
aagucauugugaaaaugaugucuaccugccuu

SEQ ID NO: 76198 - RNA, 32 nt, Homo Sapiens
ucuccuccaaaggacuuuuuauuuacagcuuu

SEQ ID NO: 76199 - RNA, 32 nt, Homo Sapiens
cacagaaggggaggugccagacaaggauggac

SEQ ID NO: 76200 - RNA, 32 nt, Homo Sapiens
ggccagagcugggggagggaugagaacagaag

SEQ ID NO: 76201 - RNA, 32 nt, Homo Sapiens
ucucuuuugugucuccuuccuaagccauccuc

SEQ ID NO: 76202 - RNA, 32 nt, Homo Sapiens
cauuuuggacacugaggccuuucagagcucag

SEQ ID NO: 76203 - RNA, 32 nt, Homo Sapiens
uaguuucuccuacaauggguauguuaaauaac

SEQ ID NO: 76204 - RNA, 32 nt, Homo Sapiens
gugaaaugaggcugaggccugcugugcugcag

SEQ ID NO: 76205 - RNA, 32 nt, Homo Sapiens
ucuggaugccaaaacguuuauucugcuuuguc

SEQ ID NO: 76206 - RNA, 32 nt, Homo Sapiens
cgggcggcgcugggcuuuuaucugcggacccg

SEQ ID NO: 76207 - RNA, 32 nt, Homo Sapiens
accagccuggaccuccaccuccccuggaaaug

SEQ ID NO: 76208 - RNA, 32 nt, Homo Sapiens
aauugcauuaaacaucaauuauaauaaaauuu

SEQ ID NO: 76209 - RNA, 32 nt, Homo Sapiens
gccacugcaugucccaaccagacugugucugu

SEQ ID NO: 76210 - RNA, 32 nt, Homo Sapiens
accagccugggcaacauagugagaccucaucu

SEQ ID NO: 76211 - RNA, 32 nt, Homo Sapiens
ccuuggcaggcgucagcgugcuaccagaaauc

SEQ ID NO: 76212 - RNA, 32 nt, Homo Sapiens
aacauauuuuagaacaaaaaauguauuuguau

SEQ ID NO: 76213 - RNA, 32 nt, Homo Sapiens
agcugcuccuuaaauucuaagaguuggcauaa

SEQ ID NO: 76214 - RNA, 32 nt, Homo Sapiens
uugauugaaugauuguggaacucauugugggu

SEQ ID NO: 76215 - RNA, 32 nt, Homo Sapiens
uggaagaccgugccugcccagcccucgucacc

SEQ ID NO: 76216 - RNA, 32 nt, Homo Sapiens
gccaggaaggaaaagcacuguugaagauuuug

SEQ ID NO: 76217 - RNA, 32 nt, Homo Sapiens
guuuaccauguuacccuguaauuaaaaacaaa

SEQ ID NO: 76218 - RNA, 32 nt, Homo Sapiens
gccgaggcucccggagaggaccgcgaugaguc

SEQ ID NO: 76219 - RNA, 32 nt, Homo Sapiens
aggcuugccuccccggaucggauuccuuuccc

SEQ ID NO: 76220 - RNA, 32 nt, Homo Sapiens
ggaaaacggucagcguccggcgcgggcugagg

SEQ ID NO: 76221 - RNA, 32 nt, Homo Sapiens
gcgcucuagccuccgcuucucuaucuccuaca

SEQ ID NO: 76222 - RNA, 32 nt, Homo Sapiens
uuaggcggagagcgccgggcagagggggaggg

SEQ ID NO: 76223 - RNA, 32 nt, Homo Sapiens
ccucaaaacaaacugaauucugauggacuuuc

SEQ ID NO: 76224 - RNA, 32 nt, Homo Sapiens
aaauuuuccacucugaguaaaacaagucuccu

SEQ ID NO: 76225 - RNA, 32 nt, Homo Sapiens
cagcuucuguuguuuaucaggcagauguacag

SEQ ID NO: 76226 - RNA, 32 nt, Homo Sapiens
gcauuagggaaaccacacacuggugagagguc

SEQ ID NO: 76227 - RNA, 32 nt, Homo Sapiens
augagugaauggaugcauagucacuaaaucag

SEQ ID NO: 76228 - RNA, 32 nt, Homo Sapiens
agcaggaagaguacugcccaccccggcugcuc

SEQ ID NO: 76229 - RNA, 32 nt, Homo Sapiens
aggcaaauuugauguuaaccuaagcacauaca

SEQ ID NO: 76230 - RNA, 32 nt, Homo Sapiens
cgugugcggucccucccccucacguucucucu

SEQ ID NO: 76231 - RNA, 32 nt, Homo Sapiens
acugcuauaauuuaguugauguaaaaugacgg

SEQ ID NO: 76232 - RNA, 32 nt, Homo Sapiens
aaguuuuauaugcuuuauuaauguuuucaaaa

SEQ ID NO: 76233 - RNA, 32 nt, Homo Sapiens
auauauuugucaauggaauguuuccacauauu

SEQ ID NO: 76234 - RNA, 32 nt, Homo Sapiens
aguauggacaaaggcacugacgaggugaccag

SEQ ID NO: 76235 - RNA, 31 nt, Homo Sapiens
cugaccaucugcuuuccuccaaggguucugu

SEQ ID NO: 76236 - RNA, 32 nt, Homo Sapiens
uuuucaucuuugacuccaaaaugucagaggga

SEQ ID NO: 76237 - RNA, 32 nt, Homo Sapiens
aacucagaaagauauuuuuauauuacuucuca

SEQ ID NO: 76238 - RNA, 32 nt, Homo Sapiens
cuguaaugagugauucugaagagguacuuucc

SEQ ID NO: 76239 - RNA, 32 nt, Homo Sapiens
gauaauaaauuugaagagcaaagcauguuuug

SEQ ID NO: 76240 - RNA, 32 nt, Homo Sapiens
cugguucucgcccccuuccccagccuggggcc

SEQ ID NO: 76241 - RNA, 32 nt, Homo Sapiens
ugacugcuccgggucucacgcuuaguaaacgg

SEQ ID NO: 76242 - RNA, 32 nt, Homo Sapiens
aauuuuaauuuucaucauuccauggagauuca

SEQ ID NO: 76243 - RNA, 32 nt, Homo Sapiens
uagaugacuaucucaaaugaacuuuuuauaga

SEQ ID NO: 76244 - RNA, 32 nt, Homo Sapiens
ugaggcagugagaugcugcugcuguggauucu

SEQ ID NO: 76245 - RNA, 32 nt, Homo Sapiens
aucucuguugucaacaggauuaacucaguucu

SEQ ID NO: 76246 - RNA, 32 nt, Homo Sapiens
ccccuccuccgucauagcccccgccccccgcc

SEQ ID NO: 76247 - RNA, 32 nt, Homo Sapiens
cccugggguaguccagcucuuauucauuuccc

SEQ ID NO: 76248 - RNA, 32 nt, Homo Sapiens
agcuguguauaaacuggauguagaagcaaaaa

SEQ ID NO: 76249 - RNA, 32 nt, Homo Sapiens
gggaggaagaggauagacagguccagggcucc

SEQ ID NO: 76250 - RNA, 31 nt, Homo Sapiens
gcuucgcggggugcgcagccccgcguccccg

SEQ ID NO: 76251 - RNA, 32 nt, Homo Sapiens
ggcuggcuuggccaugccuuucugugccuuua

SEQ ID NO: 76252 - RNA, 27 nt, Homo Sapiens
acuuccuuuuucuucagcucccacacc

SEQ ID NO: 76253 - RNA, 30 nt, Homo Sapiens
gauguguauuauuugggggaacagaaaagg

SEQ ID NO: 76254 - RNA, 32 nt, Homo Sapiens
auuacuuuaccuaauaguuucuuaauauuuca

SEQ ID NO: 76255 - RNA, 32 nt, Homo Sapiens
auguggaugaacugagacccuccaucagccag

SEQ ID NO: 76256 - RNA, 32 nt, Homo Sapiens
gaagugcacauuguuuggucagagcauacuag

SEQ ID NO: 76257 - RNA, 32 nt, Homo Sapiens
gugccccuuuuggagauaagcuuuccaaaaua

SEQ ID NO: 76258 - RNA, 32 nt, Homo Sapiens
agagaagauugacaaacuuaugauagagaugg

SEQ ID NO: 76259 - RNA, 32 nt, Homo Sapiens
cuuaauuauggaaauauuaacuuuaucugaaa

SEQ ID NO: 76260 - RNA, 32 nt, Homo Sapiens
aggaagccccagcugccccuggcggguguggu

SEQ ID NO: 76261 - RNA, 32 nt, Homo Sapiens
uggacaagggaagggggaggcccagggcuggu

SEQ ID NO: 76262 - RNA, 32 nt, Homo Sapiens
ugaugucuagaaucaggggauccaggaucauc

SEQ ID NO: 76263 - RNA, 32 nt, Homo Sapiens
agucccucaccaucggcugcacaucgcgcccu

SEQ ID NO: 76264 - RNA, 32 nt, Homo Sapiens
aaaugagauaaaagauguacuugugaccauug

SEQ ID NO: 76265 - RNA, 32 nt, Homo Sapiens
cuuccauauccgcuccucuagucgcccuccgc

SEQ ID NO: 76266 - RNA, 32 nt, Homo Sapiens
gagcauggccccagccagcagcucccacgcug

SEQ ID NO: 76267 - RNA, 32 nt, Homo Sapiens
cucagagaucacagggagcgugggugaagccc

SEQ ID NO: 76268 - RNA, 32 nt, Homo Sapiens
aaguagauuuguaguuugucccauuuauuauu

SEQ ID NO: 76269 - RNA, 32 nt, Homo Sapiens
uuccuauuuggccaucuuggcuccucuccccu

SEQ ID NO: 76270 - RNA, 32 nt, Homo Sapiens
gaguuuugcucuugcacuccauccuggacaac

SEQ ID NO: 76271 - RNA, 32 nt, Homo Sapiens
uaagauuuggcucauaaugaugagccuaucau

SEQ ID NO: 76272 - RNA, 32 nt, Homo Sapiens
agugccauauauauuuuuaauuccaauauuaa

SEQ ID NO: 76273 - RNA, 32 nt, Homo Sapiens
ugacccuguauauagcccagccaggccccagg

SEQ ID NO: 76274 - RNA, 32 nt, Homo Sapiens
ccugccugcccggcccugcacaacaugcagcc

SEQ ID NO: 76275 - RNA, 32 nt, Homo Sapiens
ugcuccugccgcgcggggugcccgccgagagg

SEQ ID NO: 76276 - RNA, 32 nt, Homo Sapiens
ugcuguagacuccugggugcuggaggaguaga

SEQ ID NO: 76277 - RNA, 32 nt, Homo Sapiens
agaugggccagaggagcagagaggcugagacc

SEQ ID NO: 76278 - RNA, 32 nt, Homo Sapiens
uuuuuuggguaaugaagggagcagucuaaaga

SEQ ID NO: 76279 - RNA, 32 nt, Homo Sapiens
ugaagaaauaugucauaauuagaggagauaaa

SEQ ID NO: 76280 - RNA, 32 nt, Homo Sapiens
gugacauuggggaugauguauaucuaaugaca

SEQ ID NO: 76281 - RNA, 32 nt, Homo Sapiens
gccccugccugccagauggacagguacaccca

SEQ ID NO: 76282 - RNA, 32 nt, Homo Sapiens
auucauguaaauaaacaauagauccagcuuua

SEQ ID NO: 76283 - RNA, 32 nt, Homo Sapiens
ggaggaaggggaggguucaccgacuuacagcc

SEQ ID NO: 76284 - RNA, 32 nt, Homo Sapiens
acaaauggagaagucaacaacacucuagugag

SEQ ID NO: 76285 - RNA, 32 nt, Homo Sapiens
aagaagcucccucugucugacuggcagcaggg

SEQ ID NO: 76286 - RNA, 32 nt, Homo Sapiens
guuuuaaucugugaaaauggagagcuggcuuc

SEQ ID NO: 76287 - RNA, 32 nt, Homo Sapiens
uuauuagaauauaaaaaauguuauuacugagg

SEQ ID NO: 76288 - RNA, 32 nt, Homo Sapiens
ggagauaaaaccgccggcgccggcgccgccag

SEQ ID NO: 76289 - RNA, 32 nt, Homo Sapiens
ucuagaccuggccuuaagucugcaaaagccau

SEQ ID NO: 76290 - RNA, 32 nt, Homo Sapiens
aguauggaagggggcauguugauuaaccauac

SEQ ID NO: 76291 - RNA, 32 nt, Homo Sapiens
cggagcccaggagagcagagagcgagccugag

SEQ ID NO: 76292 - RNA, 32 nt, Homo Sapiens
auacaagaauacaguauauaauaaucacauca

SEQ ID NO: 76293 - RNA, 32 nt, Homo Sapiens
cggcuuggcgggagggucugcagcgccgaggg

SEQ ID NO: 76294 - RNA, 32 nt, Homo Sapiens
cacauuuguuugucauccaugugugaccauga

SEQ ID NO: 76295 - RNA, 32 nt, Homo Sapiens
acaaggaucuucaggagcaggugcuggcaggc

SEQ ID NO: 76296 - RNA, 32 nt, Homo Sapiens
gagcugcagcgaaggccaaggaaucacugaag

SEQ ID NO: 76297 - RNA, 32 nt, Homo Sapiens
auuucagaauuuacgucacuuuuagcuacaag

SEQ ID NO: 76298 - RNA, 32 nt, Homo Sapiens
guguccuugagccgcgggugacgguggcucuc

SEQ ID NO: 76299 - RNA, 32 nt, Homo Sapiens
ggcgggaccggcccggccuauauauuggguug

SEQ ID NO: 76300 - RNA, 32 nt, Homo Sapiens
cauuuauugguaggucaugauugcugaggguu

SEQ ID NO: 76301 - RNA, 32 nt, Homo Sapiens
agcuacgauaauuuuuuggaacggcagaaaug

SEQ ID NO: 76302 - RNA, 32 nt, Homo Sapiens
auccucauuugggguagcuagaggaaccaacc

SEQ ID NO: 76303 - RNA, 32 nt, Homo Sapiens
cccacccugccuggcuuucucucuuggugacu

SEQ ID NO: 76304 - RNA, 32 nt, Homo Sapiens
acaauucucacggaaauccaguggauagauug

SEQ ID NO: 76305 - RNA, 32 nt, Homo Sapiens
cuugugagggagaucugggggaggcaggaagc

SEQ ID NO: 76306 - RNA, 32 nt, Homo Sapiens
cggcccccgagcugcgggccggccuagagccc

SEQ ID NO: 76307 - RNA, 32 nt, Homo Sapiens
uuuugguuacacaacuguauacauuuacuaaa

SEQ ID NO: 76308 - RNA, 30 nt, Homo Sapiens
cuggggaaggguggcauggagccucuccgg

SEQ ID NO: 76309 - RNA, 32 nt, Homo Sapiens
gcucgagaauacugcccaguuacucuagcgcg

SEQ ID NO: 76310 - RNA, 32 nt, Homo Sapiens
uaacuuugacuuucuucugaauauuuuaucuu

SEQ ID NO: 76311 - RNA, 32 nt, Homo Sapiens
agucccaugagugaaagagauguuggaaagcc

SEQ ID NO: 76312 - RNA, 32 nt, Homo Sapiens
caguaaaaaaaauuaacauuugaccaucucca

SEQ ID NO: 76313 - RNA, 32 nt, Homo Sapiens
uucagcgcccuucucaaccccacacucccgcu

SEQ ID NO: 76314 - RNA, 32 nt, Homo Sapiens
uaggcugggcucucaaggcagcugcuccagga

SEQ ID NO: 76315 - RNA, 32 nt, Homo Sapiens
gccaacugcagcugggauaaagugauaauaga

SEQ ID NO: 76316 - RNA, 32 nt, Homo Sapiens
gcuugcagauugaagcacuuucgauguugggc

SEQ ID NO: 76317 - RNA, 32 nt, Homo Sapiens
ggacccagggaagggaggaauucuucaguaaa

SEQ ID NO: 76318 - RNA, 32 nt, Homo Sapiens
ccagaggcgagggcgcgcauggggagccuccg

SEQ ID NO: 76319 - RNA, 32 nt, Homo Sapiens
caggcucaaaaaugcagacccugccgaaacag

SEQ ID NO: 76320 - RNA, 32 nt, Homo Sapiens
aauuggagaauuuuaaugauuuucauuuauca

SEQ ID NO: 76321 - RNA, 32 nt, Homo Sapiens
ccaaauuuccaagucagaaugucucuuccuug

SEQ ID NO: 76322 - RNA, 30 nt, Homo Sapiens
guagccagugggugcuauucugugaaacua

SEQ ID NO: 76323 - RNA, 32 nt, Homo Sapiens
gaccgagauggcggccuccgggggccuagagg

SEQ ID NO: 76324 - RNA, 32 nt, Homo Sapiens
cgacugucauuagcuuccuggacgggacccgg

SEQ ID NO: 76325 - RNA, 32 nt, Homo Sapiens
aaguauaaaaacaaaaguuguaauuuaaaagu

SEQ ID NO: 76326 - RNA, 32 nt, Homo Sapiens
ggggagugaacaguucugucuugcugggguuc

SEQ ID NO: 76327 - RNA, 32 nt, Homo Sapiens
uuucccuagaaagugacacaaagacuugacuu

SEQ ID NO: 76328 - RNA, 32 nt, Homo Sapiens
ugaaugcagacacaccauagcccccuucuacu

SEQ ID NO: 76329 - RNA, 32 nt, Homo Sapiens
aagcuguuguacauuuaugauuuaauaaaaua

SEQ ID NO: 76330 - RNA, 32 nt, Homo Sapiens
acuagcuaaaggaaaccaaccuaaggagguga

SEQ ID NO: 76331 - RNA, 32 nt, Homo Sapiens
ccuuuacuaccacauuccugugcagagcacca

SEQ ID NO: 76332 - RNA, 32 nt, Homo Sapiens
ggugaagauugauuuugccuuaacucaagaga

SEQ ID NO: 76333 - RNA, 32 nt, Homo Sapiens
cgcaagaauggcggcccuucccggcacgguac

SEQ ID NO: 76334 - RNA, 32 nt, Homo Sapiens
uuucacuuaaggcuguugugaucugugacaua

SEQ ID NO: 76335 - RNA, 32 nt, Homo Sapiens
acuguucuauagaaguaaccuuuuauuuugca

SEQ ID NO: 76336 - RNA, 32 nt, Homo Sapiens
gccuacugcagguuuguggggcgugggcagcc

SEQ ID NO: 76337 - RNA, 32 nt, Homo Sapiens
agcaccgcgagaucugacggcgcggcuaccau

SEQ ID NO: 76338 - RNA, 32 nt, Homo Sapiens
aauucccaaaaggcagaauugacaguuguauc

SEQ ID NO: 76339 - RNA, 32 nt, Homo Sapiens
cgcuaggcucugccgucagcccgcaacagcgc

SEQ ID NO: 76340 - RNA, 32 nt, Homo Sapiens
acagauuuucccuuauggcuuucagaaggaac

SEQ ID NO: 76341 - RNA, 32 nt, Homo Sapiens
cagguaaaaauauacuuccuggacuuuguuuu

SEQ ID NO: 76342 - RNA, 32 nt, Homo Sapiens
uucuggaauuaccaacaggaaugaggaaagaa

SEQ ID NO: 76343 - RNA, 32 nt, Homo Sapiens
acgcuaggcucugccgucagcccgcaacagcg

SEQ ID NO: 76344 - RNA, 32 nt, Homo Sapiens
aaucuccuccaaguucuucucccuccaaccag

SEQ ID NO: 76345 - RNA, 32 nt, Homo Sapiens
ucccuaagaucaaaccccauggagcagccagc

SEQ ID NO: 76346 - RNA, 32 nt, Homo Sapiens
uugaaguccugauugcagcagugacucugcaa

SEQ ID NO: 76347 - RNA, 32 nt, Homo Sapiens
cugcuuguguccuccagcccagcccacccggg

SEQ ID NO: 76348 - RNA, 32 nt, Homo Sapiens
ccugaaggacacaaaaucuaggguggcuucug

SEQ ID NO: 76349 - RNA, 30 nt, Homo Sapiens
gucaggcgcgcgcgggcaggguccccauug

SEQ ID NO: 76350 - RNA, 30 nt, Homo Sapiens
ugcuugagugucucugcagaaaagacucca

SEQ ID NO: 76351 - RNA, 32 nt, Homo Sapiens
gauuagccucuuccucauuauggagcugauuu

SEQ ID NO: 76352 - RNA, 32 nt, Homo Sapiens
ucauauaauaucuauuuggaagaagaaacuuu

SEQ ID NO: 76353 - RNA, 30 nt, Homo Sapiens
ggugcaggcaggcagcccuguaccccaccc

SEQ ID NO: 76354 - RNA, 32 nt, Homo Sapiens
gcuucccaggacuggaggagcagcugggcccc

SEQ ID NO: 76355 - RNA, 32 nt, Homo Sapiens
caccaaguucuggaaaccacguggugucccug

SEQ ID NO: 76356 - RNA, 32 nt, Homo Sapiens
ugcugccccuucccugguaccuagcaaagcuc

SEQ ID NO: 76357 - RNA, 32 nt, Homo Sapiens
aaagccaggaaggaaucaguauuuuauucuaa

SEQ ID NO: 76358 - RNA, 32 nt, Homo Sapiens
gaauauuuaaugugcuuugucuauccuccacu

SEQ ID NO: 76359 - RNA, 32 nt, Homo Sapiens
uuuacuucaacuuuuauagaaacccaggcuca

SEQ ID NO: 76360 - RNA, 32 nt, Homo Sapiens
aaagccggagaauugggguacgaagcggggcu

SEQ ID NO: 76361 - RNA, 32 nt, Homo Sapiens
uuucuuauuuucuuauuuuagagcgcuuaaaa

SEQ ID NO: 76362 - RNA, 32 nt, Homo Sapiens
caaagaaacuaaaagagaaaugacucauugaa

SEQ ID NO: 76363 - RNA, 32 nt, Homo Sapiens
auuaacaaugaccucuaauuuaaauugggccc

SEQ ID NO: 76364 - RNA, 32 nt, Homo Sapiens
uaaagaccaaaggguccucucuaccuuugaaa

SEQ ID NO: 76365 - RNA, 32 nt, Homo Sapiens
guggcagaggaugucucaaacuucagauggga

SEQ ID NO: 76366 - RNA, 32 nt, Homo Sapiens
ugcccgagcucggggcgggcggagcccgcgug

SEQ ID NO: 76367 - RNA, 32 nt, Homo Sapiens
ucagucaguuauaaaaucaugguuuuaaauac

SEQ ID NO: 76368 - RNA, 32 nt, Homo Sapiens
ugggagugguggcucaugccuguaaucccugc

SEQ ID NO: 76369 - RNA, 32 nt, Homo Sapiens
ccuucuucaggacuaguuaaccagaggggcuu

SEQ ID NO: 76370 - RNA, 32 nt, Homo Sapiens
caacugggaaucaacaaugaguuuauuguuca

SEQ ID NO: 76371 - RNA, 32 nt, Homo Sapiens
ugagcugguaguggcagaggacugaggguacc

SEQ ID NO: 76372 - RNA, 32 nt, Homo Sapiens
uucuucuuucuuucuuuuuuuuuuuuuuuuag

SEQ ID NO: 76373 - RNA, 32 nt, Homo Sapiens
cgguccccgcgugcacuuuagggccggucagg

SEQ ID NO: 76374 - RNA, 32 nt, Homo Sapiens
agauacuguaggauugguucuggcccaugcag

SEQ ID NO: 76375 - RNA, 32 nt, Homo Sapiens
aguccugccgacggagccacuggggugggagg

SEQ ID NO: 76376 - RNA, 32 nt, Homo Sapiens
uccagcgagcgcgcggagcagccucuguccgu

SEQ ID NO: 76377 - RNA, 32 nt, Homo Sapiens
uuuuaaaaaugaacuucucuugcuacacagaa

SEQ ID NO: 76378 - RNA, 32 nt, Homo Sapiens
agacguuggcuuucccagcugcaucugcccca

SEQ ID NO: 76379 - RNA, 32 nt, Homo Sapiens
cuuuuggaagcagcaacaguaacagcagcagc

SEQ ID NO: 76380 - RNA, 32 nt, Homo Sapiens
ucauauuucuaaaaauaaucauacaaacuaga

SEQ ID NO: 76381 - RNA, 32 nt, Homo Sapiens
cccaaagggaugguauuggggguggggucuug

SEQ ID NO: 76382 - RNA, 32 nt, Homo Sapiens
acccgggcucccguccucccccaggacggucc

SEQ ID NO: 76383 - RNA, 32 nt, Homo Sapiens
agcuugauagagugauuauacaacuuccauuc

SEQ ID NO: 76384 - RNA, 32 nt, Homo Sapiens
gggccgagcccgcgugucccggcucauccgcg

SEQ ID NO: 76385 - RNA, 32 nt, Homo Sapiens
ugugugccugcagcuguguagugcuggacagu

SEQ ID NO: 76386 - RNA, 32 nt, Homo Sapiens
cgaagccaaaguaaauauaauauuaucaguaa

SEQ ID NO: 76387 - RNA, 32 nt, Homo Sapiens
gagcgagcccccagcccagccuggcgacuggg

SEQ ID NO: 76388 - RNA, 32 nt, Homo Sapiens
gggugucacagagccugccgcucugucagacu

SEQ ID NO: 76389 - RNA, 32 nt, Homo Sapiens
ccuuucuccagauugggugacucuuuucuaaa

SEQ ID NO: 76390 - RNA, 32 nt, Homo Sapiens
acuuagcucugcaacacguggcagccacgggg

SEQ ID NO: 76391 - RNA, 32 nt, Homo Sapiens
caggaagcacugggcaaugagucaggaggccu

SEQ ID NO: 76392 - RNA, 32 nt, Homo Sapiens
gugaaccccggagccagcggcgcuggggccag

SEQ ID NO: 76393 - RNA, 32 nt, Homo Sapiens
uauaauguuucugaauaacuguuuuccaggag

SEQ ID NO: 76394 - RNA, 32 nt, Homo Sapiens
ugcaucgucaggcucccacgcuuuguccguga

SEQ ID NO: 76395 - RNA, 32 nt, Homo Sapiens
ugauugucaacacaaacuggcuuaauaauauu

SEQ ID NO: 76396 - RNA, 30 nt, Homo Sapiens
cucgaggccggcggcggcgggagagcgacc

SEQ ID NO: 76397 - RNA, 32 nt, Homo Sapiens
acggccucacccagcccccugggcccauggcg

SEQ ID NO: 76398 - RNA, 32 nt, Homo Sapiens
guaauaaauuuagacagaaauuuuaugaguac

SEQ ID NO: 76399 - RNA, 32 nt, Homo Sapiens
cauuugugcuauuguucauucucugugaaggc

SEQ ID NO: 76400 - RNA, 32 nt, Homo Sapiens
ccccugucuauauauuuuuuuaauuuaaaaaa

SEQ ID NO: 76401 - RNA, 32 nt, Homo Sapiens
aagacauucccagucaugaaauguagaagacu

SEQ ID NO: 76402 - RNA, 32 nt, Homo Sapiens
ggagucccagcuuugagaaguacugagaccau

SEQ ID NO: 76403 - RNA, 32 nt, Homo Sapiens
aaaccugguaucuauuuguauauaugcuaaau

SEQ ID NO: 76404 - RNA, 32 nt, Homo Sapiens
ugaauguagagaagaaaugcugauuuugugac

SEQ ID NO: 76405 - RNA, 32 nt, Homo Sapiens
gcugggccugcgcugagcuucuggagcgcagg

SEQ ID NO: 76406 - RNA, 32 nt, Homo Sapiens
agcaggauggggggcgggggcagggaccaugg

SEQ ID NO: 76407 - RNA, 32 nt, Homo Sapiens
gggaccagaguauuuuuguuaauaaaacucaa

SEQ ID NO: 76408 - RNA, 32 nt, Homo Sapiens
ccacagaagacccagacggucuguguggccua

SEQ ID NO: 76409 - RNA, 32 nt, Homo Sapiens
gcucagccuccccaagcuacgaaugcaugauu

SEQ ID NO: 76410 - RNA, 32 nt, Homo Sapiens
gaaaacucuacauuuuaauuguauaguugcag

SEQ ID NO: 76411 - RNA, 32 nt, Homo Sapiens
gcgucccccuaaauggccggccacgaacccgu

SEQ ID NO: 76412 - RNA, 32 nt, Homo Sapiens
cuagaaaugcuguaggaauaaaucugugguaa

SEQ ID NO: 76413 - RNA, 32 nt, Homo Sapiens
aggcccccacguugcuggccgccuggccgagu

SEQ ID NO: 76414 - RNA, 32 nt, Homo Sapiens
cccuccgggcccagcucuuccucccggcugca

SEQ ID NO: 76415 - RNA, 32 nt, Homo Sapiens
ucccagaggugaccuccuccuccaggaaugga

SEQ ID NO: 76416 - RNA, 32 nt, Homo Sapiens
cucaggcuuggcggagggagcggcaugggcga

SEQ ID NO: 76417 - RNA, 32 nt, Homo Sapiens
gcaaacuggauuaguucuuuuacuucaguguu

SEQ ID NO: 76418 - RNA, 32 nt, Homo Sapiens
aucggguaucugggcccggcgcggagccugca

SEQ ID NO: 76419 - RNA, 32 nt, Homo Sapiens
aucuggcauuucugcucucuaugcuugagacc

SEQ ID NO: 76420 - RNA, 32 nt, Homo Sapiens
gggcauuaaaauguaagguuuaugaugaaaau

SEQ ID NO: 76421 - RNA, 32 nt, Homo Sapiens
acacacugccccccaguauaugccgcauugua

SEQ ID NO: 76422 - RNA, 32 nt, Homo Sapiens
acacaguuucucggcucuuccuccccgcugcc

SEQ ID NO: 76423 - RNA, 32 nt, Homo Sapiens
aaauaucuuuguuuugcuuucauucacaaagu

SEQ ID NO: 76424 - RNA, 32 nt, Homo Sapiens
aggcccggguccggaaguucggccccaaacug

SEQ ID NO: 76425 - RNA, 32 nt, Homo Sapiens
gaggcggaugcggcccggaccccguggauaug

SEQ ID NO: 76426 - RNA, 32 nt, Homo Sapiens
gccuccauagaagaugucccaggccaggugcc

SEQ ID NO: 76427 - RNA, 32 nt, Homo Sapiens
ucuuccuugcagaguaguguuagaauagaugg

SEQ ID NO: 76428 - RNA, 32 nt, Homo Sapiens
cugaccugccugugucccccacuuccacucag

SEQ ID NO: 76429 - RNA, 32 nt, Homo Sapiens
gaagcagaugcauucugguaguugauuggucc

SEQ ID NO: 76430 - RNA, 31 nt, Homo Sapiens
gaggcaggcagcugccugcucugcgccgagc

SEQ ID NO: 76431 - RNA, 32 nt, Homo Sapiens
aaaucacuuccacuuuccugugcccccacccc

SEQ ID NO: 76432 - RNA, 32 nt, Homo Sapiens
cacucacauuuucuauaggaaaacagccucau

SEQ ID NO: 76433 - RNA, 32 nt, Homo Sapiens
auguuaaccacugcuauucaagaacaauucua

SEQ ID NO: 76434 - RNA, 32 nt, Homo Sapiens
ggucuccagcaggaguggaggcuggucugggc

SEQ ID NO: 76435 - RNA, 32 nt, Homo Sapiens
aaauuuguguuggucguaagccacuaaaucac

SEQ ID NO: 76436 - RNA, 32 nt, Homo Sapiens
agucuguaaaccugguggccaagugauuguaa

SEQ ID NO: 76437 - RNA, 32 nt, Homo Sapiens
cccuguaacacucucuagcugcaccguaugau

SEQ ID NO: 76438 - RNA, 32 nt, Homo Sapiens
ccucuugcccuugggugcuaucuagcaguaaa

SEQ ID NO: 76439 - RNA, 32 nt, Homo Sapiens
aaauaugguguucaaggcaauaguacauaaua

SEQ ID NO: 76440 - RNA, 32 nt, Homo Sapiens
aggaacauggagaggagagcagcgggcccagg

SEQ ID NO: 76441 - RNA, 32 nt, Homo Sapiens
cccuaguugcagacucaucaccaugguuacca

SEQ ID NO: 76442 - RNA, 32 nt, Homo Sapiens
ccgcggcuggggaaccaagggccuggagggga

SEQ ID NO: 76443 - RNA, 32 nt, Homo Sapiens
ggccacucucgauucauaacacuuccugacau

SEQ ID NO: 76444 - RNA, 32 nt, Homo Sapiens
agaaaaaauuccacaaugaaagaauguauuuu

SEQ ID NO: 76445 - RNA, 32 nt, Homo Sapiens
aggcggaggaggaggcggaggaggguggcacc

SEQ ID NO: 76446 - RNA, 32 nt, Homo Sapiens
cugucgccgucgccgccgcggcuccuggaggu

SEQ ID NO: 76447 - RNA, 32 nt, Homo Sapiens
agaguaguucaugauaaauugaaaauauaaug

SEQ ID NO: 76448 - RNA, 32 nt, Homo Sapiens
gaacugcuuuugugcagaaaauuuagguucuu

SEQ ID NO: 76449 - RNA, 32 nt, Homo Sapiens
aacgcuuacugauauuacuugauaguuuuaua

SEQ ID NO: 76450 - RNA, 32 nt, Homo Sapiens
ucagaugaaacacaauccugaauuggcauggu

SEQ ID NO: 76451 - RNA, 32 nt, Homo Sapiens
cauucagacuuuccgaagagagguggagaaac

SEQ ID NO: 76452 - RNA, 32 nt, Homo Sapiens
agccagggaugaugcgcugcugccgccgccgc

SEQ ID NO: 76453 - RNA, 32 nt, Homo Sapiens
cgugcuggauauuuaaauuuaggggccggucu

SEQ ID NO: 76454 - RNA, 32 nt, Homo Sapiens
ccaggcccccucaggagaagguggaagagaaa

SEQ ID NO: 76455 - RNA, 32 nt, Homo Sapiens
ucaaaaacaaacaaacaaaaacucaagauccu

SEQ ID NO: 76456 - RNA, 32 nt, Homo Sapiens
ucuuaaaaaauggagaauaaaaagagaguuua

SEQ ID NO: 76457 - RNA, 32 nt, Homo Sapiens
aauuagaauauaauaaaacugugcuaguaggu

SEQ ID NO: 76458 - RNA, 32 nt, Homo Sapiens
aucacucuauauaaaauauaaauacagugugg

SEQ ID NO: 76459 - RNA, 32 nt, Homo Sapiens
acacccaccuguuuuccaguguucuucucucu

SEQ ID NO: 76460 - RNA, 32 nt, Homo Sapiens
ccuacuuuauuacuggaguaaaagaaaacaaa

SEQ ID NO: 76461 - RNA, 32 nt, Homo Sapiens
cugggcccaucccacaucccacagugggcagg

SEQ ID NO: 76462 - RNA, 32 nt, Homo Sapiens
gaauugucuucagguguuuucucucuuaaguc

SEQ ID NO: 76463 - RNA, 32 nt, Homo Sapiens
augugugccucucuccuuccuuagauggggaa

SEQ ID NO: 76464 - RNA, 32 nt, Homo Sapiens
gccgcggcgggaagaagggcuagcgaagcacc

SEQ ID NO: 76465 - RNA, 32 nt, Homo Sapiens
gaugaucuugucaugcauguaagagccacgug

SEQ ID NO: 76466 - RNA, 32 nt, Homo Sapiens
ugccaugcgggagcgcuggggcggcggggcaa

SEQ ID NO: 76467 - RNA, 32 nt, Homo Sapiens
ccugacuggagccccagacccgcccccucacc

SEQ ID NO: 76468 - RNA, 32 nt, Homo Sapiens
uuuagaaaaaggaaguacaucuauagccgaau

SEQ ID NO: 76469 - RNA, 32 nt, Homo Sapiens
cgaguccgcgcgcgggucgggccgcgacgagg

SEQ ID NO: 76470 - RNA, 32 nt, Homo Sapiens
accuuuucuucaugcugguauuuuuucaauag

SEQ ID NO: 76471 - RNA, 32 nt, Homo Sapiens
gagugccuggcucccaucuccuccucaccuuu

SEQ ID NO: 76472 - RNA, 32 nt, Homo Sapiens
gcaggagccccggcgcaucgcggcgcgcacag

SEQ ID NO: 76473 - RNA, 32 nt, Homo Sapiens
aaacaauaacaaaaaccagagaugugccuaua

SEQ ID NO: 76474 - RNA, 32 nt, Homo Sapiens
gaucagggcauuaccgacuauuuuuucuuacc

SEQ ID NO: 76475 - RNA, 32 nt, Homo Sapiens
cgggcuuccaggauguucgggcgcggggcggc

SEQ ID NO: 76476 - RNA, 32 nt, Homo Sapiens
cugcuauauaaaauauuuaccugaaacaaaag

SEQ ID NO: 76477 - RNA, 32 nt, Homo Sapiens
aacccaggucacugcuaagaaagggugccuuc

SEQ ID NO: 76478 - RNA, 32 nt, Homo Sapiens
cuuuuuucuuuuucuuuuuuacauuuaaaguu

SEQ ID NO: 76479 - RNA, 32 nt, Homo Sapiens
ucccgccaugccccggccccaacgagacccaa

SEQ ID NO: 76480 - RNA, 32 nt, Homo Sapiens
ggaggugcuucuucuucugguggcgucuuugg

SEQ ID NO: 76481 - RNA, 32 nt, Homo Sapiens
cucagagaugcaucugggagagguggggaaga

SEQ ID NO: 76482 - RNA, 32 nt, Homo Sapiens
gaauuaaacguguugccacaccugccggcuuc

SEQ ID NO: 76483 - RNA, 32 nt, Homo Sapiens
uuagucaacugucauuugauaaaaacaauuaa

SEQ ID NO: 76484 - RNA, 32 nt, Homo Sapiens
aaugaggccaaaugcagagaugaggcuaaggc

SEQ ID NO: 76485 - RNA, 32 nt, Homo Sapiens
aguaacaaaauaaaacagaugugucauaauau

SEQ ID NO: 76486 - RNA, 27 nt, Homo Sapiens
uaacaccauuaauuuugaguauaauuu

SEQ ID NO: 76487 - RNA, 32 nt, Homo Sapiens
ucggggaaucggaucaaggcgagaggauccgg

SEQ ID NO: 76488 - RNA, 32 nt, Homo Sapiens
uggccuauagauuagugacauaaaauauuuuc

SEQ ID NO: 76489 - RNA, 32 nt, Homo Sapiens
acggaggugccugaggguggggugggauuugc

SEQ ID NO: 76490 - RNA, 32 nt, Homo Sapiens
uuaguuccacaugaaauaaauguuguuaagcc

SEQ ID NO: 76491 - RNA, 32 nt, Homo Sapiens
uguggagugggcggggggucuccgcggaggag

SEQ ID NO: 76492 - RNA, 32 nt, Homo Sapiens
cauuguguggauccauggugauucuagacuuc

SEQ ID NO: 76493 - RNA, 32 nt, Homo Sapiens
uccaaaagauuugaacuccugcuggaauacaa

SEQ ID NO: 76494 - RNA, 32 nt, Homo Sapiens
uaaauuuugugcuuaucuucaaggcuggcuua

SEQ ID NO: 76495 - RNA, 32 nt, Homo Sapiens
caaagugccaggaacaaugaaaaaacaaauua

SEQ ID NO: 76496 - RNA, 32 nt, Homo Sapiens
ugccagugccggcccccggcccaguucaggga

SEQ ID NO: 76497 - RNA, 32 nt, Homo Sapiens
cgguuuaaauuaaggauuaucaggcaugugag

SEQ ID NO: 76498 - RNA, 32 nt, Homo Sapiens
uaacacugugaauguacuuaaugccacugaac

SEQ ID NO: 76499 - RNA, 32 nt, Homo Sapiens
aaguacugacuggccuggucuuuuucggugug

SEQ ID NO: 76500 - RNA, 32 nt, Homo Sapiens
caagaguagacauucuuacuagcucaauuuaa

SEQ ID NO: 76501 - RNA, 32 nt, Homo Sapiens
ucuacucuagaggggcagguccaaguucacag

SEQ ID NO: 76502 - RNA, 32 nt, Homo Sapiens
ugcccugggccagggaauggcuccuuauacca

SEQ ID NO: 76503 - RNA, 32 nt, Homo Sapiens
uucaauuuccugugcuaauuaagggaaauucu

SEQ ID NO: 76504 - RNA, 32 nt, Homo Sapiens
cugguuacugguuuccugcugggucuaccuug

SEQ ID NO: 76505 - RNA, 32 nt, Homo Sapiens
agacgugcgcccccgcuuagccagcaucguca

SEQ ID NO: 76506 - RNA, 32 nt, Homo Sapiens
aaacauuccccucuguccccuuggcuucggau

SEQ ID NO: 76507 - RNA, 32 nt, Homo Sapiens
ggugcaggcugguuggguugcauauuguccac

SEQ ID NO: 76508 - RNA, 32 nt, Homo Sapiens
caagaaaagaaacugcauaaaaaauuuaaaac

SEQ ID NO: 76509 - RNA, 32 nt, Homo Sapiens
ugagaugaugguguucagagggaccagcuucu

SEQ ID NO: 76510 - RNA, 32 nt, Homo Sapiens
guuguuguguguauauguauuuaagauguaca

SEQ ID NO: 76511 - RNA, 32 nt, Homo Sapiens
gagccgacccucggcuccauggagcccggcaa

SEQ ID NO: 76512 - RNA, 32 nt, Homo Sapiens
uaggaacuuuuguguaugaguuuuugugugga

SEQ ID NO: 76513 - RNA, 32 nt, Homo Sapiens
ugaaugaaaaagacccaaauuacugcuuauga

SEQ ID NO: 76514 - RNA, 32 nt, Homo Sapiens
gccugguucagcagaugucacaggauuaaaug

SEQ ID NO: 76515 - RNA, 32 nt, Homo Sapiens
gccucaggcaacauagagagccuccuguucuu

SEQ ID NO: 76516 - RNA, 32 nt, Homo Sapiens
agacacagaauuuguuauauuuuugugcuuag

SEQ ID NO: 76517 - RNA, 32 nt, Homo Sapiens
cgcuggggcuccugggcauccucucuggggag

SEQ ID NO: 76518 - RNA, 32 nt, Homo Sapiens
ugcaagcuccgucugccggguucacgccauuc

SEQ ID NO: 76519 - RNA, 27 nt, Homo Sapiens
gacccuccuccugucagcccccucacc

SEQ ID NO: 76520 - RNA, 32 nt, Homo Sapiens
ugcccucagagcucugcugaggaagcuugggg

SEQ ID NO: 76521 - RNA, 32 nt, Homo Sapiens
ucaacagaaugaaggacaaaaaucauauaguc

SEQ ID NO: 76522 - RNA, 32 nt, Homo Sapiens
agagagcaacgcuuuucauaguuggauauauu

SEQ ID NO: 76523 - RNA, 32 nt, Homo Sapiens
aaguucaguuuuucuuuuuucuuuauuuuaaa

SEQ ID NO: 76524 - RNA, 32 nt, Homo Sapiens
gugaguucaaagcaguggccgugaugcaaaag

SEQ ID NO: 76525 - RNA, 32 nt, Homo Sapiens
aggccaggcagggcugcugcugaacaucccug

SEQ ID NO: 76526 - RNA, 32 nt, Homo Sapiens
gguuccagaaauuuaaaacaaucagcuuagca

SEQ ID NO: 76527 - RNA, 32 nt, Homo Sapiens
uuggcuuuagauuuaaaguaaauugaaauguu

SEQ ID NO: 76528 - RNA, 32 nt, Homo Sapiens
uucguguggggcaucccggggagggggugccc

SEQ ID NO: 76529 - RNA, 32 nt, Homo Sapiens
gauggaguuuuacucucgcccaggcuagagug

SEQ ID NO: 76530 - RNA, 32 nt, Homo Sapiens
guguguguuuuuuuuuuuuuuaaguggcuuug

SEQ ID NO: 76531 - RNA, 32 nt, Homo Sapiens
uuugccuauuaaaaucuggcuaaacuguucug

SEQ ID NO: 76532 - RNA, 32 nt, Homo Sapiens
ucagaggccaggggucucuacugcccaugccg

SEQ ID NO: 76533 - RNA, 32 nt, Homo Sapiens
auuugagaugagaugagacuacuuguuguacc

SEQ ID NO: 76534 - RNA, 32 nt, Homo Sapiens
cccgagaggcugucccuggacccuggcuggca

SEQ ID NO: 76535 - RNA, 32 nt, Homo Sapiens
ugcuauguuuuaccauuacuauucuugcuaca

SEQ ID NO: 76536 - RNA, 32 nt, Homo Sapiens
aggcagaaucaguugaguugugagggugaagc

SEQ ID NO: 76537 - RNA, 32 nt, Homo Sapiens
ccugcugcacagguuauuaaugaguaagugag

SEQ ID NO: 76538 - RNA, 32 nt, Homo Sapiens
cgguggcagagcccgcgcggcgcuggaagcga

SEQ ID NO: 76539 - RNA, 32 nt, Homo Sapiens
uccaacuccuggcaaccgcgggcucaaggcag

SEQ ID NO: 76540 - RNA, 32 nt, Homo Sapiens
uauuacuacauuaaaacaaagucucugacuua

SEQ ID NO: 76541 - RNA, 32 nt, Homo Sapiens
gcaaauguucauuguuuaauuagcacugggau

SEQ ID NO: 76542 - RNA, 32 nt, Homo Sapiens
uugcaauaagaagccagauggauaaaggaagu

SEQ ID NO: 76543 - RNA, 31 nt, Homo Sapiens
uuugcuuauuugacuuagaaaaaugauuugu

SEQ ID NO: 76544 - RNA, 32 nt, Homo Sapiens
gaaaucagugacaacaagucuuugaaauggug

SEQ ID NO: 76545 - RNA, 32 nt, Homo Sapiens
auagauccaggagcugguuuuuugaaaggauc

SEQ ID NO: 76546 - RNA, 32 nt, Homo Sapiens
auacacaaggcacaucccuuuuaugcgugguu

SEQ ID NO: 76547 - RNA, 32 nt, Homo Sapiens
gagaggacggguggauaagaguccaguggggc

SEQ ID NO: 76548 - RNA, 32 nt, Homo Sapiens
gcaauuauaugaaaaaaguuuaguaauuacag

SEQ ID NO: 76549 - RNA, 32 nt, Homo Sapiens
ccacuguggccgcugcgccggggccuggcuuc

SEQ ID NO: 76550 - RNA, 32 nt, Homo Sapiens
uuucucuucaucuuguacauuugacagcugaa

SEQ ID NO: 76551 - RNA, 32 nt, Homo Sapiens
guccuggcgcgguggcucacgccugcaauccc

SEQ ID NO: 76552 - RNA, 32 nt, Homo Sapiens
gugaccugcugugacacugugcucucuucugu

SEQ ID NO: 76553 - RNA, 32 nt, Homo Sapiens
cuggcuuucuucauggccucucuguucugcau

SEQ ID NO: 76554 - RNA, 32 nt, Homo Sapiens
auguggaaauaccaucuugguuugagaugcau

SEQ ID NO: 76555 - RNA, 32 nt, Homo Sapiens
cuaucaccuccauuuuauccuugcugugauuu

SEQ ID NO: 76556 - RNA, 29 nt, Homo Sapiens
gccaaguugaagauucucaccaagacuca

SEQ ID NO: 76557 - RNA, 32 nt, Homo Sapiens
auugugcccuuguuuuaacaguuucugucaac

SEQ ID NO: 76558 - RNA, 31 nt, Homo Sapiens
aaaaauaagaaggcugccccaagggcauuug

SEQ ID NO: 76559 - RNA, 32 nt, Homo Sapiens
auaccagaugucauuucuuuuuuucauuauga

SEQ ID NO: 76560 - RNA, 32 nt, Homo Sapiens
ucgcuggcccggucgcccagucucgcgagagu

SEQ ID NO: 76561 - RNA, 32 nt, Homo Sapiens
acauccugcagcaucuccgucuccggaggaaa

SEQ ID NO: 76562 - RNA, 32 nt, Homo Sapiens
aauggcgauuaucaaaaagucaagaaacaaca

SEQ ID NO: 76563 - RNA, 32 nt, Homo Sapiens
ggcucgggacugucuucaacccugcccugcac

SEQ ID NO: 76564 - RNA, 32 nt, Homo Sapiens
auggauacagaaaauggacaaaauacucaaaa

SEQ ID NO: 76565 - RNA, 32 nt, Homo Sapiens
agaccacucagguggugccccugcgggcugug

SEQ ID NO: 76566 - RNA, 31 nt, Homo Sapiens
cauuggacgcugcggaaccaggcuucuucac

SEQ ID NO: 76567 - RNA, 32 nt, Homo Sapiens
ugcaaaucagcccaucggcaguguuucuugag

SEQ ID NO: 76568 - RNA, 32 nt, Homo Sapiens
acuuugcucucaauuaaagucuauucaaaagg

SEQ ID NO: 76569 - RNA, 32 nt, Homo Sapiens
ucaacaggucuuuuaauauaaauucugcuuca

SEQ ID NO: 76570 - RNA, 32 nt, Homo Sapiens
auuggauauggacucuuuuuuaugccuauucu

SEQ ID NO: 76571 - RNA, 32 nt, Homo Sapiens
uccucgucucagagcccuccuccggccuggug

SEQ ID NO: 76572 - RNA, 32 nt, Homo Sapiens
ccucuccuaccaagcaggaggccaggaacuuc

SEQ ID NO: 76573 - RNA, 32 nt, Homo Sapiens
aguuggcaaggugguaaugagagacagcaguu

SEQ ID NO: 76574 - RNA, 32 nt, Homo Sapiens
gccuggcacccacuucugucuuccccuggaac

SEQ ID NO: 76575 - RNA, 32 nt, Homo Sapiens
aacacacaguaccauuuaauucuuuuuaaaaa

SEQ ID NO: 76576 - RNA, 32 nt, Homo Sapiens
uuagaaaugcaaaaucucuacugcuuuggauc

SEQ ID NO: 76577 - RNA, 32 nt, Homo Sapiens
ugagaagaaaucauugggugacuaugacuaau

SEQ ID NO: 76578 - RNA, 32 nt, Homo Sapiens
cccucagaagcaucgugaaaagccuccuucug

SEQ ID NO: 76579 - RNA, 32 nt, Homo Sapiens
ggucaucagcaacuucuucugguuguaccuga

SEQ ID NO: 76580 - RNA, 32 nt, Homo Sapiens
ugccucggacugccucggacagaacugggggc

SEQ ID NO: 76581 - RNA, 32 nt, Homo Sapiens
acuagauuugaaagggugagucugaguugaaa

SEQ ID NO: 76582 - RNA, 32 nt, Homo Sapiens
cccacagccaagguggacguaccucuccagga

SEQ ID NO: 76583 - RNA, 32 nt, Homo Sapiens
gagccggggccauggcgaagcugcugagcugc

SEQ ID NO: 76584 - RNA, 32 nt, Homo Sapiens
cgccucugcucugaagaaagugcugucuggcu

SEQ ID NO: 76585 - RNA, 32 nt, Homo Sapiens
cugccucacagcagacucuucacacccagcuc

SEQ ID NO: 76586 - RNA, 32 nt, Homo Sapiens
cggggcuggccacuuccguacuuccgcuuucc

SEQ ID NO: 76587 - RNA, 32 nt, Homo Sapiens
guauaucugaaauuuguaauaaaaucaacuuc

SEQ ID NO: 76588 - RNA, 32 nt, Homo Sapiens
aaguuucuucccuuuuucucuuacuauauuua

SEQ ID NO: 76589 - RNA, 32 nt, Homo Sapiens
ugcucuggcucucucagcaugaggauucuacc

SEQ ID NO: 76590 - RNA, 32 nt, Homo Sapiens
gcggcgcagcgcgggugggaggcggggaggag

SEQ ID NO: 76591 - RNA, 32 nt, Homo Sapiens
cuugcugugggaagagagaugagggucagaua

SEQ ID NO: 76592 - RNA, 31 nt, Homo Sapiens
gcagagcagcgcaucaugcaggaucccaaug

SEQ ID NO: 76593 - RNA, 32 nt, Homo Sapiens
ugaaaauguauuaaaugucauugaaagccuua

SEQ ID NO: 76594 - RNA, 32 nt, Homo Sapiens
uccuugguucuaucuuccuuuuccucacugaa

SEQ ID NO: 76595 - RNA, 32 nt, Homo Sapiens
cccugucaggcgauggggagcggcugggcggg

SEQ ID NO: 76596 - RNA, 32 nt, Homo Sapiens
uacaugauuguugggauggcugucccauauuu

SEQ ID NO: 76597 - RNA, 32 nt, Homo Sapiens
auuucuguuuucuuucgcugggcucacagcag

SEQ ID NO: 76598 - RNA, 32 nt, Homo Sapiens
gugugcggaaaugcuucugcuacauuuuuagg

SEQ ID NO: 76599 - RNA, 32 nt, Homo Sapiens
cuuuuguaaaauguuacucuacaugaagauuu

SEQ ID NO: 76600 - RNA, 32 nt, Homo Sapiens
cucuguggcugcucugccuccucccacucaca

SEQ ID NO: 76601 - RNA, 32 nt, Homo Sapiens
aucuggaaagcauagacauuuuuuacacucug

SEQ ID NO: 76602 - RNA, 32 nt, Homo Sapiens
uuuacacaugugcugauguuuacaaugaugcc

SEQ ID NO: 76603 - RNA, 31 nt, Homo Sapiens
ucucuacugaguugugggggauauguuguau

SEQ ID NO: 76604 - RNA, 32 nt, Homo Sapiens
ucugcagggccuuccgcccagcgcuggccuua

SEQ ID NO: 76605 - RNA, 32 nt, Homo Sapiens
guugugagacugaguucuauauucuggugagu

SEQ ID NO: 76606 - RNA, 32 nt, Homo Sapiens
ucgcccacuggacgccgcccgcggccggaccg

SEQ ID NO: 76607 - RNA, 32 nt, Homo Sapiens
uucacaaacaauuuuccauaacuuuuuagccu

SEQ ID NO: 76608 - RNA, 32 nt, Homo Sapiens
ggcccuggugccuuggcagagagacgagaaac

SEQ ID NO: 76609 - RNA, 30 nt, Homo Sapiens
aaguagaauuucauccccaagaguauuuca

SEQ ID NO: 76610 - RNA, 32 nt, Homo Sapiens
ccuaugccucuaccccuccuccuuacccuacu

SEQ ID NO: 76611 - RNA, 32 nt, Homo Sapiens
auagugaaagauucaaauuugcuuuucaagaa

SEQ ID NO: 76612 - RNA, 32 nt, Homo Sapiens
guaaauauuaucauccuguuugacucaugaac

SEQ ID NO: 76613 - RNA, 32 nt, Homo Sapiens
caucaagucccuccccuacuggauggaacucu

SEQ ID NO: 76614 - RNA, 32 nt, Homo Sapiens
caaacugaaaauacagauagcuguuccgucag

SEQ ID NO: 76615 - RNA, 32 nt, Homo Sapiens
guaggagcugcugaggagcaguucuuaguuuu

SEQ ID NO: 76616 - RNA, 32 nt, Homo Sapiens
agagcaggucagagaccauccagaaucccaga

SEQ ID NO: 76617 - RNA, 32 nt, Homo Sapiens
uuuaccuugaacaaucaaggcaacuaguggag

SEQ ID NO: 76618 - RNA, 32 nt, Homo Sapiens
ugagccccagcccccaggacuggcgugacacc

SEQ ID NO: 76619 - RNA, 32 nt, Homo Sapiens
uacacuguuccuuuucacccaccaccccgauc

SEQ ID NO: 76620 - RNA, 32 nt, Homo Sapiens
guaguuaaaaaauuauuuuaaauaauuauuuu

SEQ ID NO: 76621 - RNA, 32 nt, Homo Sapiens
auggguggucuuuaugcugaaggucugugauu

SEQ ID NO: 76622 - RNA, 32 nt, Homo Sapiens
cguuuuggguagaugcguagcucuucacuuuc

SEQ ID NO: 76623 - RNA, 32 nt, Homo Sapiens
uucccaccucccgccccccagguccggaggcg

SEQ ID NO: 76624 - RNA, 32 nt, Homo Sapiens
gcugcgucugcacugaugaccgucugagccca

SEQ ID NO: 76625 - RNA, 32 nt, Homo Sapiens
uuguuuaaaaauuguauuuauuuaaucuccca

SEQ ID NO: 76626 - RNA, 32 nt, Homo Sapiens
guaucagccaugguucuuucugguggaaaaca

SEQ ID NO: 76627 - RNA, 32 nt, Homo Sapiens
cucccucugccccucuccaggcgccggcgggc

SEQ ID NO: 76628 - RNA, 32 nt, Homo Sapiens
ugcuggcugaggaggggucaaggugaguucaa

SEQ ID NO: 76629 - RNA, 32 nt, Homo Sapiens
uaaacugccuuuuuuucuuuuuugaggugggg

SEQ ID NO: 76630 - RNA, 32 nt, Homo Sapiens
cuccugcccucccugccaccuggcccccucag

SEQ ID NO: 76631 - RNA, 32 nt, Homo Sapiens
cccaccccugucagcacugugcuacugaugau

SEQ ID NO: 76632 - RNA, 32 nt, Homo Sapiens
ccuccguguccucccgccuccuccugguguga

SEQ ID NO: 76633 - RNA, 32 nt, Homo Sapiens
gaauucacuaggcuuaggucuuucaggaaaca

SEQ ID NO: 76634 - RNA, 32 nt, Homo Sapiens
uuuauugcaaugaugccuaccaaacauuucca

SEQ ID NO: 76635 - RNA, 32 nt, Homo Sapiens
cguggcgugagacggggcggggcgcgcguauc

SEQ ID NO: 76636 - RNA, 32 nt, Homo Sapiens
auauaguuccaaguagguaaagucacuugauu

SEQ ID NO: 76637 - RNA, 32 nt, Homo Sapiens
gcagacacaaacuacuugaacaugacaagaug

SEQ ID NO: 76638 - RNA, 32 nt, Homo Sapiens
cagccugcuucuccagccuucuaggccagucc

SEQ ID NO: 76639 - RNA, 32 nt, Homo Sapiens
uaggaggugcugugucccaugccuucuugccc

SEQ ID NO: 76640 - RNA, 32 nt, Homo Sapiens
gcucaagauucuguaaaccaagcaaauggggg

SEQ ID NO: 76641 - RNA, 32 nt, Homo Sapiens
uucccacccagcugcgcccucggcucggucuc

SEQ ID NO: 76642 - RNA, 32 nt, Homo Sapiens
aaucuagaaaccuaaaacauugugaaaucaaa

SEQ ID NO: 76643 - RNA, 32 nt, Homo Sapiens
agauccagcauggccuggccagaggcacccug

SEQ ID NO: 76644 - RNA, 32 nt, Homo Sapiens
gacgggaccugggccuggcccguguguguccu

SEQ ID NO: 76645 - RNA, 32 nt, Homo Sapiens
aaggagaaggucggguuguagaagcuggggug

SEQ ID NO: 76646 - RNA, 32 nt, Homo Sapiens
accaaguauguggcggacguccugccggggaa

SEQ ID NO: 76647 - RNA, 32 nt, Homo Sapiens
agaaacugauuuggacuguuaaaggcuaaaag

SEQ ID NO: 76648 - RNA, 32 nt, Homo Sapiens
caugccugacaucucagcacuucaggaguacg

SEQ ID NO: 76649 - RNA, 32 nt, Homo Sapiens
cuuugcagaacaggcagaggugcugcacaaca

SEQ ID NO: 76650 - RNA, 32 nt, Homo Sapiens
gaucaggccccucuccugggccugcugugcag

SEQ ID NO: 76651 - RNA, 32 nt, Homo Sapiens
gaaggggauuaagagggagggcggggacaacu

SEQ ID NO: 76652 - RNA, 32 nt, Homo Sapiens
uauuuuuauagacaaauaauaagcaaagggag

SEQ ID NO: 76653 - RNA, 32 nt, Homo Sapiens
gguuggcaguugauuauguucuggaugauucc

SEQ ID NO: 76654 - RNA, 27 nt, Homo Sapiens
cguuaaauguccuucagccucccuacc

SEQ ID NO: 76655 - RNA, 32 nt, Homo Sapiens
cuacagcagcgggcggcgggacccgggaccca

SEQ ID NO: 76656 - RNA, 32 nt, Homo Sapiens
ucucucaaacugaguucugaaauuuauuugau

SEQ ID NO: 76657 - RNA, 32 nt, Homo Sapiens
gaggcagccacccacaccuucccucucugaau

SEQ ID NO: 76658 - RNA, 32 nt, Homo Sapiens
agaauggcuguugaacauccacaaggcaccug

SEQ ID NO: 76659 - RNA, 32 nt, Homo Sapiens
aagcuggaggcacaacgcaccagacacucaca

SEQ ID NO: 76660 - RNA, 32 nt, Homo Sapiens
ccgucccucuccccggacaagcccaggacacu

SEQ ID NO: 76661 - RNA, 32 nt, Homo Sapiens
ucuguuucauggcaacacuggauaauggcuuu

SEQ ID NO: 76662 - RNA, 32 nt, Homo Sapiens
ccuucuucugcagcuccuggugcugcuugugu

SEQ ID NO: 76663 - RNA, 32 nt, Homo Sapiens
auucuaaggagcuugaucaggagggcuggaau

SEQ ID NO: 76664 - RNA, 32 nt, Homo Sapiens
gaaccuacuuuuuuauauuaaaaggauucaau

SEQ ID NO: 76665 - RNA, 32 nt, Homo Sapiens
ccaggcugcucccgaacugcugaccucagauc

SEQ ID NO: 76666 - RNA, 32 nt, Homo Sapiens
aaaucuacauaaaugucaguaaaccaaauaaa

SEQ ID NO: 76667 - RNA, 32 nt, Homo Sapiens
ccagagucaaggagggcgccugagucauuuga

SEQ ID NO: 76668 - RNA, 32 nt, Homo Sapiens
aguaguuuuccacagcaagggagcccuauggu

SEQ ID NO: 76669 - RNA, 32 nt, Homo Sapiens
agacccgguaccugcgagagccagggaacucg

SEQ ID NO: 76670 - RNA, 32 nt, Homo Sapiens
uuccguucuuacugccuuuucuagaggacugc

SEQ ID NO: 76671 - RNA, 32 nt, Homo Sapiens
cuccgugugcuccauuggcugcggcugcagga

SEQ ID NO: 76672 - RNA, 32 nt, Homo Sapiens
gcgguccgggguucuccuucggcgcucacacc

SEQ ID NO: 76673 - RNA, 32 nt, Homo Sapiens
aaugguauaucuuuuuauacacugccuaaauc

SEQ ID NO: 76674 - RNA, 32 nt, Homo Sapiens
gagggaaaaugaaucguuccucaaauguacca

SEQ ID NO: 76675 - RNA, 32 nt, Homo Sapiens
agcggcgucuuaaccggcggcgcuaggacucc

SEQ ID NO: 76676 - RNA, 32 nt, Homo Sapiens
uggcuaaaauuuguagcagggauuucacucag

SEQ ID NO: 76677 - RNA, 32 nt, Homo Sapiens
ugaauuacaaauauauggauuuggcuccccug

SEQ ID NO: 76678 - RNA, 32 nt, Homo Sapiens
ugauucaucuucuguaacaauucucuuuucca

SEQ ID NO: 76679 - RNA, 32 nt, Homo Sapiens
uccuauggaaaagaagauggcagauacaggag

SEQ ID NO: 76680 - RNA, 32 nt, Homo Sapiens
ugacccuugugcuuaugguggugaugaaggcc

SEQ ID NO: 76681 - RNA, 32 nt, Homo Sapiens
caauguauaaaccaagguauuuuguuuuuugg

SEQ ID NO: 76682 - RNA, 31 nt, Homo Sapiens
uguuuccuuccauaaagaaaguucuuguaag

SEQ ID NO: 76683 - RNA, 32 nt, Homo Sapiens
aaugcagggugauuucuuauuauuauauguua

SEQ ID NO: 76684 - RNA, 32 nt, Homo Sapiens
aggagcagagcgacuuccggagggaucacccg

SEQ ID NO: 76685 - RNA, 32 nt, Homo Sapiens
uuacaggugugagccaccgcacccggccaacu

SEQ ID NO: 76686 - RNA, 32 nt, Homo Sapiens
cuggagcuugaaaggagaaagcacggggucgc

SEQ ID NO: 76687 - RNA, 32 nt, Homo Sapiens
uuuuagucaaacuuauaaguuuucuguggcuc

SEQ ID NO: 76688 - RNA, 32 nt, Homo Sapiens
gcccaggaagccagcccucugcucggccucgc

SEQ ID NO: 76689 - RNA, 32 nt, Homo Sapiens
uuauacagauaaaguauuacauguguuugauu

SEQ ID NO: 76690 - RNA, 32 nt, Homo Sapiens
cugcugucaggaccagauuuucccagccaucc

SEQ ID NO: 76691 - RNA, 32 nt, Homo Sapiens
uggaaaaacugggagagucaaaagugagcaga

SEQ ID NO: 76692 - RNA, 32 nt, Homo Sapiens
ggcaagcggggagaccccggcgcagcagaacc

SEQ ID NO: 76693 - RNA, 32 nt, Homo Sapiens
guacaaggaaguaugaaauuagggcaauacag

SEQ ID NO: 76694 - RNA, 32 nt, Homo Sapiens
cagcgcggauucuggcugccgugcgucgccag

SEQ ID NO: 76695 - RNA, 32 nt, Homo Sapiens
gaaaccccuaaaacugucaguauuuaauguau

SEQ ID NO: 76696 - RNA, 32 nt, Homo Sapiens
gguuuauguucuugccuuuucuuuuuucauuu

SEQ ID NO: 76697 - RNA, 32 nt, Homo Sapiens
cgcccggcccacuacugguuuuuaacaggaug

SEQ ID NO: 76698 - RNA, 32 nt, Homo Sapiens
uguguaccccgcucaccacgggaacggccccc

SEQ ID NO: 76699 - RNA, 32 nt, Homo Sapiens
agaugguuaaacuugaaacaaacaauuuuaag

SEQ ID NO: 76700 - RNA, 32 nt, Homo Sapiens
uaaccacacugcuuuauuuuacacuuaagaag

SEQ ID NO: 76701 - RNA, 32 nt, Homo Sapiens
accucugggccuggucucgugugugcaccugg

SEQ ID NO: 76702 - RNA, 32 nt, Homo Sapiens
uugcucuaaaugucacaaaaaauuauacuucc

SEQ ID NO: 76703 - RNA, 32 nt, Homo Sapiens
uuucuguugggucuggcucaaggcccagcuca

SEQ ID NO: 76704 - RNA, 32 nt, Homo Sapiens
uccacuucuucuacuuuccccagcucuuccca

SEQ ID NO: 76705 - RNA, 32 nt, Homo Sapiens
ggaaauaggaaacugaaacucuguggaauaua

SEQ ID NO: 76706 - RNA, 32 nt, Homo Sapiens
caugugcccuggcgaagcuggugcugugagug

SEQ ID NO: 76707 - RNA, 32 nt, Homo Sapiens
cucgcaggguggcaguggcccagccccagccu

SEQ ID NO: 76708 - RNA, 32 nt, Homo Sapiens
uuccgacccugcccugugccccggcccaccug

SEQ ID NO: 76709 - RNA, 32 nt, Homo Sapiens
uguuucuguuugaagaaaauagagggagaaac

SEQ ID NO: 76710 - RNA, 32 nt, Homo Sapiens
aagagauuuguguucuuauugaaacaguaaau

SEQ ID NO: 76711 - RNA, 32 nt, Homo Sapiens
ucugaaggacauuugggagagggaugcccagg

SEQ ID NO: 76712 - RNA, 32 nt, Homo Sapiens
cccuaacuauccugugugagaaugggaauuuc

SEQ ID NO: 76713 - RNA, 32 nt, Homo Sapiens
uggggaggggguacuggccuugggccuccuau

SEQ ID NO: 76714 - RNA, 32 nt, Homo Sapiens
aggguaaggggaggcugcuuucugcccuucuc

SEQ ID NO: 76715 - RNA, 32 nt, Homo Sapiens
ugggguucacuguaguagcugcacuaggugau

SEQ ID NO: 76716 - RNA, 32 nt, Homo Sapiens
ucuuuuguccuccuuagcacaauguaaaaaag

SEQ ID NO: 76717 - RNA, 32 nt, Homo Sapiens
auugcugaaaauauugaaaggucuucauuuua

SEQ ID NO: 76718 - RNA, 32 nt, Homo Sapiens
agaaaagauguuggcauugcugauuguuuggu

SEQ ID NO: 76719 - RNA, 32 nt, Homo Sapiens
ucccugcccucccucccaggccgcacaggucc

SEQ ID NO: 76720 - RNA, 32 nt, Homo Sapiens
cagcauuucacaccacccaccaacccucagug

SEQ ID NO: 76721 - RNA, 32 nt, Homo Sapiens
ugccuugugcuaagcuguaacaaaauguugcu

SEQ ID NO: 76722 - RNA, 32 nt, Homo Sapiens
uaaaaauuucauaugcugaacucagaaccccc

SEQ ID NO: 76723 - RNA, 32 nt, Homo Sapiens
uuguauguauuucaauaagaacuaaaugcagu

SEQ ID NO: 76724 - RNA, 32 nt, Homo Sapiens
caucucuacuaaaaauagaaaccuuagccagg

SEQ ID NO: 76725 - RNA, 32 nt, Homo Sapiens
ucaccagaaaccgaaaaugccgaaaccaauca

SEQ ID NO: 76726 - RNA, 32 nt, Homo Sapiens
aauuguacaagagucccuuugaagauaauaau

SEQ ID NO: 76727 - RNA, 32 nt, Homo Sapiens
uagaaaagcugaucauaagugaauuuauaccu

SEQ ID NO: 76728 - RNA, 32 nt, Homo Sapiens
caccugcacucaccccaccuugcaugcaccuu

SEQ ID NO: 76729 - RNA, 32 nt, Homo Sapiens
agcagccuguuccacacccccacaccaucagg

SEQ ID NO: 76730 - RNA, 32 nt, Homo Sapiens
uggguucuggcaccaccugagcccacugggca

SEQ ID NO: 76731 - RNA, 32 nt, Homo Sapiens
uugguauaugauagguuacauaaaaggaaggu

SEQ ID NO: 76732 - RNA, 32 nt, Homo Sapiens
uuuuuuaggaccaguuuauauauuucugcaug

SEQ ID NO: 76733 - RNA, 32 nt, Homo Sapiens
cccaugcccuccuaaaagggugucucaaagca

SEQ ID NO: 76734 - RNA, 32 nt, Homo Sapiens
uucauguuaggauuaauuuucuuaaucaccuc

SEQ ID NO: 76735 - RNA, 32 nt, Homo Sapiens
agcacccuccgcuuccucuccuaggcgacgag

SEQ ID NO: 76736 - RNA, 32 nt, Homo Sapiens
uggaucccggaaacauggguggcugccugccu

SEQ ID NO: 76737 - RNA, 32 nt, Homo Sapiens
agacauagacuuguaaacugcagacguguuaa

SEQ ID NO: 76738 - RNA, 32 nt, Homo Sapiens
gacuguucccaucacccaccucuggagcuuac

SEQ ID NO: 76739 - RNA, 32 nt, Homo Sapiens
ugcuauuuuuauuuuguuuuuugcauuuuuau

SEQ ID NO: 76740 - RNA, 32 nt, Homo Sapiens
ugcccagcguuuguacuugccucccccaacag

SEQ ID NO: 76741 - RNA, 32 nt, Homo Sapiens
uuugacgcauacugccuggaaccagacuguuu

SEQ ID NO: 76742 - RNA, 32 nt, Homo Sapiens
aaccuacuccccacaagaacuggccuuuaaug

SEQ ID NO: 76743 - RNA, 32 nt, Homo Sapiens
ucaccugcaaggacgucacgggccccucuaaa

SEQ ID NO: 76744 - RNA, 32 nt, Homo Sapiens
ccugcucucacgggaucucuggagauaaaggc

SEQ ID NO: 76745 - RNA, 31 nt, Homo Sapiens
uuucuccucaaugauuuucuuaauggcaucu

SEQ ID NO: 76746 - RNA, 32 nt, Homo Sapiens
ucuaagaggauacaaauuuagugcucuuaacu

SEQ ID NO: 76747 - RNA, 32 nt, Homo Sapiens
caggagaccugccugauuccuuuacauccuuc

SEQ ID NO: 76748 - RNA, 32 nt, Homo Sapiens
gagauuuauauauaguugaaugucuaaaaugg

SEQ ID NO: 76749 - RNA, 32 nt, Homo Sapiens
aaugauuucacagaagccacuugcuuggagca

SEQ ID NO: 76750 - RNA, 32 nt, Homo Sapiens
gaguuugcuccuggcccuccaacagcgccucc

SEQ ID NO: 76751 - RNA, 32 nt, Homo Sapiens
auuucaaauuuaauguccugcuuucacauuga

SEQ ID NO: 76752 - RNA, 31 nt, Homo Sapiens
aguccucgcguccggccgccccgcgcucagu

SEQ ID NO: 76753 - RNA, 32 nt, Homo Sapiens
cacugcacccucacuagccaggguguugauga

SEQ ID NO: 76754 - RNA, 32 nt, Homo Sapiens
ugccauuuuuacuggcagauaagaggaaaaua

SEQ ID NO: 76755 - RNA, 30 nt, Homo Sapiens
agggcagagcagacugaugagucguuggaa

SEQ ID NO: 76756 - RNA, 32 nt, Homo Sapiens
ggccguuccuucaguguuuucagacgcccugg

SEQ ID NO: 76757 - RNA, 32 nt, Homo Sapiens
cuuuaucaaaaaugccuuggaauuuuuacuuu

SEQ ID NO: 76758 - RNA, 32 nt, Homo Sapiens
agcaugguuugugguaacuuaugugagggguu

SEQ ID NO: 76759 - RNA, 32 nt, Homo Sapiens
gauugagaagugccucuugguuaaggauuaac

SEQ ID NO: 76760 - RNA, 32 nt, Homo Sapiens
gcugccugggccccgaagccaagcccuuucca

SEQ ID NO: 76761 - RNA, 32 nt, Homo Sapiens
ugccugccgggcgggcuccgguggccgcagca

SEQ ID NO: 76762 - RNA, 32 nt, Homo Sapiens
agauguuugucaaaaauccaggacaugggcuu

SEQ ID NO: 76763 - RNA, 32 nt, Homo Sapiens
guagugaauggcaaauaaauguuuuaaaaucu

SEQ ID NO: 76764 - RNA, 32 nt, Homo Sapiens
cuuauacacacuacucucuaaaacagaaaaag

SEQ ID NO: 76765 - RNA, 32 nt, Homo Sapiens
auuauauuuuucccuaaaagucuaaaaccuua

SEQ ID NO: 76766 - RNA, 32 nt, Homo Sapiens
agcaaauagucuuuuuguuguuguuguuaugu

SEQ ID NO: 76767 - RNA, 32 nt, Homo Sapiens
cccggcucuccagcugcagaggcaggugugau

SEQ ID NO: 76768 - RNA, 32 nt, Homo Sapiens
guuuguccuccaaggguaggugucucauuugu

SEQ ID NO: 76769 - RNA, 32 nt, Homo Sapiens
gccuggccgcucccggcccuggggugcacauc

SEQ ID NO: 76770 - RNA, 32 nt, Homo Sapiens
ccgcucagcuccguucacucucugccuucugc

SEQ ID NO: 76771 - RNA, 32 nt, Homo Sapiens
augcgggugcgguggcugcgcuuuuggcuccu

SEQ ID NO: 76772 - RNA, 32 nt, Homo Sapiens
guaagacaaggucacugugcugauugauuuuu

SEQ ID NO: 76773 - RNA, 32 nt, Homo Sapiens
uaccaugaaauuaugacucgucauccugagaa

SEQ ID NO: 76774 - RNA, 32 nt, Homo Sapiens
ugggcaguagaggcgcggggugcggagcuagg

SEQ ID NO: 76775 - RNA, 32 nt, Homo Sapiens
ucacaguugcugugggcaacuccagcccaaca

SEQ ID NO: 76776 - RNA, 28 nt, Homo Sapiens
gcugggauuacaggaugacgcggcaugg

SEQ ID NO: 76777 - RNA, 32 nt, Homo Sapiens
aggagaaaggagaggagaguucucugcauccu

SEQ ID NO: 76778 - RNA, 32 nt, Homo Sapiens
uuucuucauuuuguucugaaauuaaagaaugu

SEQ ID NO: 76779 - RNA, 32 nt, Homo Sapiens
uggcagggcugggauucaaacccgggaguguc

SEQ ID NO: 76780 - RNA, 32 nt, Homo Sapiens
ucagcccagaaagcaauggggcuuuagugaug

SEQ ID NO: 76781 - RNA, 32 nt, Homo Sapiens
auaagucuuccauggccaaaucggucauccgc

SEQ ID NO: 76782 - RNA, 32 nt, Homo Sapiens
auaaugaagguggcugcggcgcggcggcaggc

SEQ ID NO: 76783 - RNA, 32 nt, Homo Sapiens
cugagauccuggagugauaugauccagagcag

SEQ ID NO: 76784 - RNA, 32 nt, Homo Sapiens
ucaccgccccccaucccgguucugggagagca

SEQ ID NO: 76785 - RNA, 32 nt, Homo Sapiens
ggcgucuucaggagggcuucgggguuuugcuu

SEQ ID NO: 76786 - RNA, 30 nt, Homo Sapiens
ggccagggaagaacggcagaugcagagaga

SEQ ID NO: 76787 - RNA, 32 nt, Homo Sapiens
ccacugggcuccugcauuaagcccgggguucg

SEQ ID NO: 76788 - RNA, 32 nt, Homo Sapiens
uuuauuuaaaaugauuuuuaacauuaugagag

SEQ ID NO: 76789 - RNA, 32 nt, Homo Sapiens
cauggucagggcauuggucagagggacagagc

SEQ ID NO: 76790 - RNA, 31 nt, Homo Sapiens
uuuugcccagugugugccugaguuaaaaggg

SEQ ID NO: 76791 - RNA, 32 nt, Homo Sapiens
uagcauuuugaaucucuuucuggcccauccuc

SEQ ID NO: 76792 - RNA, 32 nt, Homo Sapiens
uuuuauauggcuugugauucauuuucuuaauc

SEQ ID NO: 76793 - RNA, 32 nt, Homo Sapiens
caguggcccagugacccuccucaugcucccuu

SEQ ID NO: 76794 - RNA, 31 nt, Homo Sapiens
uuucaucauuugagucaaguggagaacuaac

SEQ ID NO: 76795 - RNA, 32 nt, Homo Sapiens
cagaauaaacgaugccucucucuucaucuuuc

SEQ ID NO: 76796 - RNA, 32 nt, Homo Sapiens
uccuuuuguuuuaccaggaaugaguucgggcu

SEQ ID NO: 76797 - RNA, 32 nt, Homo Sapiens
caguuccugcagcagagccuugaaagagugua

SEQ ID NO: 76798 - RNA, 32 nt, Homo Sapiens
auuaagcaauacagagaaaaacaaacaaacau

SEQ ID NO: 76799 - RNA, 32 nt, Homo Sapiens
auuuaagacacugugcaggugaaacagaaccu

SEQ ID NO: 76800 - RNA, 32 nt, Homo Sapiens
gagaagugguggcggcgggcggcgggcggcaa

SEQ ID NO: 76801 - RNA, 32 nt, Homo Sapiens
ccccaaccgucccgcaacuguccugucccaga

SEQ ID NO: 76802 - RNA, 32 nt, Homo Sapiens
ccagcgcccuccccaugucccugcucccacgc

SEQ ID NO: 76803 - RNA, 32 nt, Homo Sapiens
uuaccuuuauuccugguucuuaaaaggugaca

SEQ ID NO: 76804 - RNA, 32 nt, Homo Sapiens
cucucggacccuggguuucucauccuuuaaug

SEQ ID NO: 76805 - RNA, 32 nt, Homo Sapiens
ccauuuuagaaagugcaaaggcuagaguuaca

SEQ ID NO: 76806 - RNA, 32 nt, Homo Sapiens
cuuuaaggaugcugaggccuagagaugggaag

SEQ ID NO: 76807 - RNA, 32 nt, Homo Sapiens
gugugcgcgggaacucugcgccguggcguucc

SEQ ID NO: 76808 - RNA, 32 nt, Homo Sapiens
uuuuuagguauuuuagucuucuuguggcaauu

SEQ ID NO: 76809 - RNA, 32 nt, Homo Sapiens
aagcaaccucccaacccagaggaggcagaaua

SEQ ID NO: 76810 - RNA, 32 nt, Homo Sapiens
uaaauagcagaaaaauaccuuaaaggaacaaa

SEQ ID NO: 76811 - RNA, 32 nt, Homo Sapiens
ugccugcucacagaagcugccuaugcgucccc

SEQ ID NO: 76812 - RNA, 32 nt, Homo Sapiens
cagccgcaauacugaugaagcugagaagcagc

SEQ ID NO: 76813 - RNA, 32 nt, Homo Sapiens
aaccccaaacaaaaaugccauaauauaaaugu

SEQ ID NO: 76814 - RNA, 32 nt, Homo Sapiens
ucuuggucaggagcuguagagauggagcucaa

SEQ ID NO: 76815 - RNA, 32 nt, Homo Sapiens
gcgcuccaggguggucucggucccaggguggu

SEQ ID NO: 76816 - RNA, 32 nt, Homo Sapiens
cccggccccgccccccaacgugucuucagguc

SEQ ID NO: 76817 - RNA, 32 nt, Homo Sapiens
aaggaaggcuggggguuuuguaaaguguccac

SEQ ID NO: 76818 - RNA, 32 nt, Homo Sapiens
aggcuuucuguaaaaauuguauuguauauaau

SEQ ID NO: 76819 - RNA, 32 nt, Homo Sapiens
auucgguacccggaacccguguagaggugguc

SEQ ID NO: 76820 - RNA, 32 nt, Homo Sapiens
uugaggugauggguauuuuuuauuuuauuuau

SEQ ID NO: 76821 - RNA, 32 nt, Homo Sapiens
cccugccgugcagguccuggccgauggcgccu

SEQ ID NO: 76822 - RNA, 32 nt, Homo Sapiens
uaucuucauacgcguguguggaugcauagaga

SEQ ID NO: 76823 - RNA, 32 nt, Homo Sapiens
cggcggccggcgggggcuuucucccccacccc

SEQ ID NO: 76824 - RNA, 32 nt, Homo Sapiens
ucucugaaccccggagggcgggaccuacaagu

SEQ ID NO: 76825 - RNA, 32 nt, Homo Sapiens
cgaggaagccggcgccggggccgccgccucgu

SEQ ID NO: 76826 - RNA, 32 nt, Homo Sapiens
gugggcgcgcgguucccggcggcgugugaccc

SEQ ID NO: 76827 - RNA, 32 nt, Homo Sapiens
agcagagacagagggaagguaucuaguucaug

SEQ ID NO: 76828 - RNA, 32 nt, Homo Sapiens
uauugcucaugcuccuggugcugcugggacuu

SEQ ID NO: 76829 - RNA, 32 nt, Homo Sapiens
ggugguaucuauggaaaugaugaaguuaccca

SEQ ID NO: 76830 - RNA, 32 nt, Homo Sapiens
ugucgcaagcuuagccgagacaucaauaaauc

SEQ ID NO: 76831 - RNA, 32 nt, Homo Sapiens
uugauggcagugccucaucuucaacuuuagug

SEQ ID NO: 76832 - RNA, 32 nt, Homo Sapiens
auuuugggaaaggguuucccgaguggcccagu

SEQ ID NO: 76833 - RNA, 32 nt, Homo Sapiens
uuccuccuuuuuaccaucuacuuaugucugaa

SEQ ID NO: 76834 - RNA, 32 nt, Homo Sapiens
ucgcccuccgucguggccuggcguggauuccg

SEQ ID NO: 76835 - RNA, 32 nt, Homo Sapiens
aucagcaaccagccucuguuucaucugggagc

SEQ ID NO: 76836 - RNA, 32 nt, Homo Sapiens
cgggcgcagggucgcgggaggugacgcgcggc

SEQ ID NO: 76837 - RNA, 32 nt, Homo Sapiens
aucgaacaggccacaucggacaguguucaccc

SEQ ID NO: 76838 - RNA, 32 nt, Homo Sapiens
aaaggaugcuuugaauuaauauaaaauaaaga

SEQ ID NO: 76839 - RNA, 32 nt, Homo Sapiens
uugccugcauugcaauaaaggacucauuuauu

SEQ ID NO: 76840 - RNA, 32 nt, Homo Sapiens
cgcuccuggcuuuggggguugggacuuggugg

SEQ ID NO: 76841 - RNA, 32 nt, Homo Sapiens
cacacucagcugaccuaagagccuaacaaccu

SEQ ID NO: 76842 - RNA, 29 nt, Homo Sapiens
cccagcuaauuuuuauauuuuuuauagaa

SEQ ID NO: 76843 - RNA, 32 nt, Homo Sapiens
agcggcgggaccacgcagccaccugugagccu

SEQ ID NO: 76844 - RNA, 32 nt, Homo Sapiens
aggacaugaauuuugggggaugcuguucaccu

SEQ ID NO: 76845 - RNA, 32 nt, Homo Sapiens
guugugaaccggcuccuucuccaagaaagguu

SEQ ID NO: 76846 - RNA, 32 nt, Homo Sapiens
uaauauucgaagaaacaaaacauucguucuac

SEQ ID NO: 76847 - RNA, 32 nt, Homo Sapiens
uuagagcauaccuucauccacuccaugcucag

SEQ ID NO: 76848 - RNA, 32 nt, Homo Sapiens
uagugugcaccuguaauccuagcuacccggaa

SEQ ID NO: 76849 - RNA, 32 nt, Homo Sapiens
uauuggggacuuuuaaagugucuuuccaaaga

SEQ ID NO: 76850 - RNA, 32 nt, Homo Sapiens
uuuacucccagcugcaguucuguucagauuca

SEQ ID NO: 76851 - RNA, 32 nt, Homo Sapiens
cuaauucgucauaggcacauauuuuuaaaauu

SEQ ID NO: 76852 - RNA, 32 nt, Homo Sapiens
caaagagcaaaguggaugaggaccucccccug

SEQ ID NO: 76853 - RNA, 32 nt, Homo Sapiens
acugcggacagagggagcucaacgccauuccc

SEQ ID NO: 76854 - RNA, 32 nt, Homo Sapiens
aacuucuuuuuucuuuuuuuuauuauuauacu

SEQ ID NO: 76855 - RNA, 32 nt, Homo Sapiens
uacugaaauauguuuaauauuuaaggggaaaa

SEQ ID NO: 76856 - RNA, 32 nt, Homo Sapiens
cgcgucuggggaggcgcggcccgggacgcucg

SEQ ID NO: 76857 - RNA, 32 nt, Homo Sapiens
accaugguuuagugacugguagauagcuauua

SEQ ID NO: 76858 - RNA, 32 nt, Homo Sapiens
ucaggagccaccccaaaccauucugggacagg

SEQ ID NO: 76859 - RNA, 32 nt, Homo Sapiens
auuuguuuuaaaaaagucugaauuggcauggu

SEQ ID NO: 76860 - RNA, 32 nt, Homo Sapiens
gcggcggcgggcagaucgcggcgcgcaccagg

SEQ ID NO: 76861 - RNA, 32 nt, Homo Sapiens
aaaaauuagccgggcgugguggcaugcgccug

SEQ ID NO: 76862 - RNA, 32 nt, Homo Sapiens
cucaggguuugugaaugcaccaauggacacuc

SEQ ID NO: 76863 - RNA, 32 nt, Homo Sapiens
ugugcuuuuaggugugaauccagauaugcggu

SEQ ID NO: 76864 - RNA, 32 nt, Homo Sapiens
ccaaacaaaaacagaaaacuggaagaucuguc

SEQ ID NO: 76865 - RNA, 32 nt, Homo Sapiens
ucucuagcugugggucuacacccucaaucuuu

SEQ ID NO: 76866 - RNA, 32 nt, Homo Sapiens
ugggcagcccugcucaccccagccccacagcc

SEQ ID NO: 76867 - RNA, 32 nt, Homo Sapiens
aaccuaagaucaugaagguuuacuucuauguu

SEQ ID NO: 76868 - RNA, 32 nt, Homo Sapiens
gaguguuggaaugggagucagaaagccagggc

SEQ ID NO: 76869 - RNA, 32 nt, Homo Sapiens
ccauaauuaugaaaacucaugaucaagauaua

SEQ ID NO: 76870 - RNA, 32 nt, Homo Sapiens
gcccgccccacccgaggcgccaccccacccuu

SEQ ID NO: 76871 - RNA, 32 nt, Homo Sapiens
acuuuucauaaaacuuuuuuuuuacuuuuuuu

SEQ ID NO: 76872 - RNA, 32 nt, Homo Sapiens
ccgcguuccgaacgcgagggucgccggccugg

SEQ ID NO: 76873 - RNA, 32 nt, Homo Sapiens
gcacauuaugaggagggaaacaaaggaggcuu

SEQ ID NO: 76874 - RNA, 32 nt, Homo Sapiens
cuccgcucucccggcgccugggccuacccagc

SEQ ID NO: 76875 - RNA, 29 nt, Homo Sapiens
guuucugugacuuuucuccaguugggcau

SEQ ID NO: 76876 - RNA, 32 nt, Homo Sapiens
ggaggggguuuuucuuuuuauuuuuuuuuuaa

SEQ ID NO: 76877 - RNA, 32 nt, Homo Sapiens
uccaagcccgggcugaggagggggcggcggcg

SEQ ID NO: 76878 - RNA, 32 nt, Homo Sapiens
uguuuagcuuagcaaaaacaaacacacaaaaa

SEQ ID NO: 76879 - RNA, 32 nt, Homo Sapiens
ucaagcaauauuaaugaaguagguuccaguac

SEQ ID NO: 76880 - RNA, 32 nt, Homo Sapiens
acuuuuguuguaauuaaacugcuauauauugu

SEQ ID NO: 76881 - RNA, 32 nt, Homo Sapiens
uuuacacucgugugcucgcucacgcacacauc

SEQ ID NO: 76882 - RNA, 32 nt, Homo Sapiens
agcgacagauuccuucuauuaagggauuggcu

SEQ ID NO: 76883 - RNA, 32 nt, Homo Sapiens
accucugccucccagguucacgcaauucacau

SEQ ID NO: 76884 - RNA, 30 nt, Homo Sapiens
acacaggcuggugcugcaagggcuccugcc

SEQ ID NO: 76885 - RNA, 32 nt, Homo Sapiens
ccugcagccgccccgcgccgugaccugcgacc

SEQ ID NO: 76886 - RNA, 32 nt, Homo Sapiens
gcccagggcacgccccuggccccuugcuguuc

SEQ ID NO: 76887 - RNA, 32 nt, Homo Sapiens
gccauggacucaggaccugcccggugaugcug

SEQ ID NO: 76888 - RNA, 32 nt, Homo Sapiens
cgauccauugcucuuuccucuggcgccggccg

SEQ ID NO: 76889 - RNA, 32 nt, Homo Sapiens
cgaggccaccccagccugguguggacccaucg

SEQ ID NO: 76890 - RNA, 30 nt, Homo Sapiens
guaaauugacguggcauggaaauucuccgc

SEQ ID NO: 76891 - RNA, 32 nt, Homo Sapiens
cugcccucaaacaucagacuccagguucuucg

SEQ ID NO: 76892 - RNA, 32 nt, Homo Sapiens
uaccugaaaaagaauucaggagguuauuaagc

SEQ ID NO: 76893 - RNA, 32 nt, Homo Sapiens
cugggaaaaaggaaacaagaacauugcuaugg

SEQ ID NO: 76894 - RNA, 29 nt, Homo Sapiens
cuaacuauauguauuuuaacuuaguuuua

SEQ ID NO: 76895 - RNA, 32 nt, Homo Sapiens
cagagcucucugucucccccagccagacaccu

SEQ ID NO: 76896 - RNA, 32 nt, Homo Sapiens
gccugggauuuacacucaguccuuccccaucu

SEQ ID NO: 76897 - RNA, 31 nt, Homo Sapiens
aucggucugagcagccaaaguuggacaaaga

SEQ ID NO: 76898 - RNA, 32 nt, Homo Sapiens
agguucuugaggguguguggacacagaggcuu

SEQ ID NO: 76899 - RNA, 32 nt, Homo Sapiens
uuauacaauaccauguuaaccacaugaguuaa

SEQ ID NO: 76900 - RNA, 32 nt, Homo Sapiens
caacagcgauucaggacccaagugugaacaac

SEQ ID NO: 76901 - RNA, 32 nt, Homo Sapiens
caagaccaucacauugugggugauggcagagc

SEQ ID NO: 76902 - RNA, 32 nt, Homo Sapiens
ggucgcccacccaggagcggcccgcgggagga

SEQ ID NO: 76903 - RNA, 32 nt, Homo Sapiens
gcaagcgcuuccugcgcaggccgaggcgaccu

SEQ ID NO: 76904 - RNA, 32 nt, Homo Sapiens
augggaaucauacuauucugguaaaaaucagu

SEQ ID NO: 76905 - RNA, 32 nt, Homo Sapiens
ucgauuucccccuguaagaugcuguaucauuu

SEQ ID NO: 76906 - RNA, 32 nt, Homo Sapiens
gcuuuuaucucacaguaaaauaaauauaauua

SEQ ID NO: 76907 - RNA, 32 nt, Homo Sapiens
auuauaugaagauugggcuugaaguauauauu

SEQ ID NO: 76908 - RNA, 32 nt, Homo Sapiens
gaucauugccuccuuccuaaccuuccccauuu

SEQ ID NO: 76909 - RNA, 32 nt, Homo Sapiens
gggacucagagggaccacuuggggccagccag

SEQ ID NO: 76910 - RNA, 32 nt, Homo Sapiens
ucaguuuguccgcaucuuccaggccucauacc

SEQ ID NO: 76911 - RNA, 32 nt, Homo Sapiens
ccuggucccgcucucaucaaauguagcuuuaa

SEQ ID NO: 76912 - RNA, 32 nt, Homo Sapiens
ugcaucugguaugugguuggacagguuucuaa

SEQ ID NO: 76913 - RNA, 32 nt, Homo Sapiens
gcaauuuuuagcaaauaaucacuuuaaagaaa

SEQ ID NO: 76914 - RNA, 32 nt, Homo Sapiens
caaccccccuccccagcucggccccucuuucc

SEQ ID NO: 76915 - RNA, 32 nt, Homo Sapiens
gagcugccgaacccgcgccuccccugggugag

SEQ ID NO: 76916 - RNA, 32 nt, Homo Sapiens
cuuggagaugaccugcugcagcuccuguacca

SEQ ID NO: 76917 - RNA, 32 nt, Homo Sapiens
cauggggcguguucuucagaauauauaguuau

SEQ ID NO: 76918 - RNA, 32 nt, Homo Sapiens
gugguucugugcuuggucugucaauggaggag

SEQ ID NO: 76919 - RNA, 32 nt, Homo Sapiens
gguccccagcccucgucgcagccccggccgcc

SEQ ID NO: 76920 - RNA, 32 nt, Homo Sapiens
cagucacccggggcuccugggccgcucugccg

SEQ ID NO: 76921 - RNA, 30 nt, Homo Sapiens
acuguucugaaagacuuugagucugugguu

SEQ ID NO: 76922 - RNA, 32 nt, Homo Sapiens
uucauuuguucaauggaugauguuucagauuu

SEQ ID NO: 76923 - RNA, 32 nt, Homo Sapiens
caugaaggaaagggacacaaaaauaugugacu

SEQ ID NO: 76924 - RNA, 32 nt, Homo Sapiens
auccccaucugcauucauuuccuccagucuca

SEQ ID NO: 76925 - RNA, 32 nt, Homo Sapiens
auuugcaaggugacagggacuggagccauggc

SEQ ID NO: 76926 - RNA, 32 nt, Homo Sapiens
caugugcagcauacuucucaagucuuggcugg

SEQ ID NO: 76927 - RNA, 31 nt, Homo Sapiens
ccuuucugggcgguguccaggggcgguucca

SEQ ID NO: 76928 - RNA, 31 nt, Homo Sapiens
cuguuggugcugcuacugccccggcuggauu

SEQ ID NO: 76929 - RNA, 30 nt, Homo Sapiens
gauuaaaaggggcuugauggcuguuaaaaa

SEQ ID NO: 76930 - RNA, 32 nt, Homo Sapiens
cugaggauaaaggcugagccuggccaucccag

SEQ ID NO: 76931 - RNA, 32 nt, Homo Sapiens
gcugucccgucccccaggaaugcgugccccag

SEQ ID NO: 76932 - RNA, 32 nt, Homo Sapiens
augcgucggaagcucuuuggcgggggugagga

SEQ ID NO: 76933 - RNA, 32 nt, Homo Sapiens
gacgcucagucucauaaagacggagaauggug

SEQ ID NO: 76934 - RNA, 32 nt, Homo Sapiens
cugagacagacagugauucagauugguccuga

SEQ ID NO: 76935 - RNA, 32 nt, Homo Sapiens
augauaggggagauuaggaaccgugugcaauc

SEQ ID NO: 76936 - RNA, 32 nt, Homo Sapiens
gccuuggguggcccccucuccuucuccuagcu

SEQ ID NO: 76937 - RNA, 32 nt, Homo Sapiens
uguuaaccacugccuuccuggaccuuggagcc

SEQ ID NO: 76938 - RNA, 32 nt, Homo Sapiens
gaccauugaaagacacgccaagcaguuccaug

SEQ ID NO: 76939 - RNA, 32 nt, Homo Sapiens
agaggaaaacccucaagggcaugagcauugga

SEQ ID NO: 76940 - RNA, 32 nt, Homo Sapiens
aggcuacauaugacaaauccacagcuaauguc

SEQ ID NO: 76941 - RNA, 32 nt, Homo Sapiens
ccugaggaauacugagggagggccuggcuacu

SEQ ID NO: 76942 - RNA, 32 nt, Homo Sapiens
gcgcccaguagcugagcgcccgcggcugccug

SEQ ID NO: 76943 - RNA, 32 nt, Homo Sapiens
ggacccgcccucgggcucauggcggccccggu

SEQ ID NO: 76944 - RNA, 32 nt, Homo Sapiens
ccugcccuauucuccucaucuccccaucauug

SEQ ID NO: 76945 - RNA, 32 nt, Homo Sapiens
gguauaaaacaauaguucaagauccagcugaa

SEQ ID NO: 76946 - RNA, 32 nt, Homo Sapiens
agagcggaccccagccucugccagguucgguc

SEQ ID NO: 76947 - RNA, 32 nt, Homo Sapiens
gccauuuuagcauuugccuagcaagaaucaca

SEQ ID NO: 76948 - RNA, 32 nt, Homo Sapiens
cucgucccaagccccccaucuccacuuccucc

SEQ ID NO: 76949 - RNA, 32 nt, Homo Sapiens
cucuauuggucaggcauuguguuaagcauaug

SEQ ID NO: 76950 - RNA, 32 nt, Homo Sapiens
uucuucuguugaaauagccaucauauucacag

SEQ ID NO: 76951 - RNA, 32 nt, Homo Sapiens
ggcaaaaggucagccuugggguuggccguucc

SEQ ID NO: 76952 - RNA, 32 nt, Homo Sapiens
cggggucggggagguuggggggugucagccaa

SEQ ID NO: 76953 - RNA, 32 nt, Homo Sapiens
uaagacaggaggauggggaaaucaugcaaucu

SEQ ID NO: 76954 - RNA, 32 nt, Homo Sapiens
auacuuuuaaguguacugauucuaaauacaug

SEQ ID NO: 76955 - RNA, 32 nt, Homo Sapiens
cucccaggcuccgggacgauucugggcagugu

SEQ ID NO: 76956 - RNA, 32 nt, Homo Sapiens
gauuaaaugcccuagcugcaauaguucaaggc

SEQ ID NO: 76957 - RNA, 32 nt, Homo Sapiens
caauguaaccucaggggccaguuuuagcauuu

SEQ ID NO: 76958 - RNA, 32 nt, Homo Sapiens
ucccaucgcuugaauacaguacuccuagggcu

SEQ ID NO: 76959 - RNA, 32 nt, Homo Sapiens
cgccuccugccagucuccgggccgcggccguc

SEQ ID NO: 76960 - RNA, 32 nt, Homo Sapiens
ccucuaaguacuucuaaauauucugugcaaau

SEQ ID NO: 76961 - RNA, 32 nt, Homo Sapiens
cucucgacgcuggccugugucuaaggcugccu

SEQ ID NO: 76962 - RNA, 32 nt, Homo Sapiens
acgccaggaaccuggggucugggggggagcug

SEQ ID NO: 76963 - RNA, 32 nt, Homo Sapiens
ggagauguuucauguagagagcagucaugaug

SEQ ID NO: 76964 - RNA, 32 nt, Homo Sapiens
ggcugaaaaauaucuaaauauaauuuuaauuu

SEQ ID NO: 76965 - RNA, 32 nt, Homo Sapiens
gagggaugugacccuggaggccucgagagaga

SEQ ID NO: 76966 - RNA, 32 nt, Homo Sapiens
uuacuguguccauuauaaucuuucucuuucuc

SEQ ID NO: 76967 - RNA, 32 nt, Homo Sapiens
cccgcccgcucucccacuacucuucuuuuggc

SEQ ID NO: 76968 - RNA, 32 nt, Homo Sapiens
ugcgccugcuguggccgccgcgagccacgccc

SEQ ID NO: 76969 - RNA, 32 nt, Homo Sapiens
cgggcggccucguagcggggccccggaucccc

SEQ ID NO: 76970 - RNA, 32 nt, Homo Sapiens
ggggcuggacagggcugcggccccucugccca

SEQ ID NO: 76971 - RNA, 32 nt, Homo Sapiens
agaguugaaauugaugaagagauccagguaca

SEQ ID NO: 76972 - RNA, 32 nt, Homo Sapiens
ugggaaauguuauuuaggauauucaaaucugc

SEQ ID NO: 76973 - RNA, 32 nt, Homo Sapiens
uauucuuguauauaaacuuuacauccuguuuu

SEQ ID NO: 76974 - RNA, 32 nt, Homo Sapiens
aauuugaaaugauuagaaaaugucaaguauua

SEQ ID NO: 76975 - RNA, 32 nt, Homo Sapiens
ggaagagagaagccgcaagaagaaauuagaug

SEQ ID NO: 76976 - RNA, 32 nt, Homo Sapiens
gauucucuuaugucaucaguacacuuaucaaa

SEQ ID NO: 76977 - RNA, 32 nt, Homo Sapiens
cagccuuauuaagcuugucauauaaguuauua

SEQ ID NO: 76978 - RNA, 32 nt, Homo Sapiens
gagaggccggugccugcgcugccgucucuggc

SEQ ID NO: 76979 - RNA, 32 nt, Homo Sapiens
ccgugccagggcggcccagucgggagcccggg

SEQ ID NO: 76980 - RNA, 32 nt, Homo Sapiens
uacaguauaaaauccuuagauuugagcacaac

SEQ ID NO: 76981 - RNA, 32 nt, Homo Sapiens
ggccgucaggacacgggaggguuuggggacag

SEQ ID NO: 76982 - RNA, 32 nt, Homo Sapiens
gcacuggagagaaaggauuugguuguaagggu

SEQ ID NO: 76983 - RNA, 32 nt, Homo Sapiens
auuuuauuuacuauguguaaucauuuagagaa

SEQ ID NO: 76984 - RNA, 32 nt, Homo Sapiens
gauauacgaugauaauaacugcauuucguuug

SEQ ID NO: 76985 - RNA, 32 nt, Homo Sapiens
ugauuuaaggcacacacaaucccucacacugu

SEQ ID NO: 76986 - RNA, 32 nt, Homo Sapiens
caaaaaaaaaagcuuggaacuccaucacgugg

SEQ ID NO: 76987 - RNA, 32 nt, Homo Sapiens
gggaaguucuuugccugcugucagaggagcag

SEQ ID NO: 76988 - RNA, 32 nt, Homo Sapiens
cugcccgugaggcugaucauggccgugaguca

SEQ ID NO: 76989 - RNA, 32 nt, Homo Sapiens
aaccuaaaguccugauacauuacauacuccaa

SEQ ID NO: 76990 - RNA, 32 nt, Homo Sapiens
ugaaauccagcauuuuuacauaggagaugcac

SEQ ID NO: 76991 - RNA, 32 nt, Homo Sapiens
uuuauuguaaaguaucucugcuucauccauug

SEQ ID NO: 76992 - RNA, 30 nt, Homo Sapiens
cggccgauucugcaccuccguccggcgcug

SEQ ID NO: 76993 - RNA, 32 nt, Homo Sapiens
cggcccugguccagcccuaccucucgugcucu

SEQ ID NO: 76994 - RNA, 32 nt, Homo Sapiens
gacuggcuccggcuccgucgggcucacccuua

SEQ ID NO: 76995 - RNA, 32 nt, Homo Sapiens
agauggaaaaggaagaacuccagguggcccug

SEQ ID NO: 76996 - RNA, 32 nt, Homo Sapiens
cacugcaaggccaccuggugucggccaucagc

SEQ ID NO: 76997 - RNA, 32 nt, Homo Sapiens
cccgccaacacaugcgaguacacacacacccc

SEQ ID NO: 76998 - RNA, 32 nt, Homo Sapiens
aaaauuaguuuauccagaguuuauaaagucaa

SEQ ID NO: 76999 - RNA, 32 nt, Homo Sapiens
uucacgcugugcuacaugugugccucucacag

SEQ ID NO: 77000 - RNA, 32 nt, Homo Sapiens
uaacauuuauguaucuuuauuuucauauugua

SEQ ID NO: 77001 - RNA, 32 nt, Homo Sapiens
cagcgugccagcggcagaacccgaguguccua

SEQ ID NO: 77002 - RNA, 28 nt, Homo Sapiens
cucaugaaagauuaaaaaauggaaacca

SEQ ID NO: 77003 - RNA, 32 nt, Homo Sapiens
gccccggggaagccauccuggcagcuuggcca

SEQ ID NO: 77004 - RNA, 32 nt, Homo Sapiens
ccuguuacaucaugcugaauccuuucccuuag

SEQ ID NO: 77005 - RNA, 32 nt, Homo Sapiens
aagcgauccaaugggaagaagagauccaaugg

SEQ ID NO: 77006 - RNA, 31 nt, Homo Sapiens
gagauuguuuccuagaaccaggccuuaacuu

SEQ ID NO: 77007 - RNA, 32 nt, Homo Sapiens
gacuagucugggcaacauagugaggccccauc

SEQ ID NO: 77008 - RNA, 30 nt, Homo Sapiens
gaaaucagagguggcgcgcgaaggcugagc

SEQ ID NO: 77009 - RNA, 32 nt, Homo Sapiens
ccacagcagcuagcaugcguggcugugcacag

SEQ ID NO: 77010 - RNA, 32 nt, Homo Sapiens
gcuaccagucugccugccaccaucaccuuccc

SEQ ID NO: 77011 - RNA, 32 nt, Homo Sapiens
guguuuuuaaccaaaugaauuggcaucuuuau

SEQ ID NO: 77012 - RNA, 32 nt, Homo Sapiens
ucugggaggcuuuaaaaguuugggugcucaaa

SEQ ID NO: 77013 - RNA, 32 nt, Homo Sapiens
gacaaaaugggaggagggguagccagaccaug

SEQ ID NO: 77014 - RNA, 31 nt, Homo Sapiens
caggaagcccacugccuccucccuggcugca

SEQ ID NO: 77015 - RNA, 32 nt, Homo Sapiens
gcuuuaccgggcucaccucuagggcauuccag

SEQ ID NO: 77016 - RNA, 32 nt, Homo Sapiens
accaagauagaguaucuauuagaguuuuacau

SEQ ID NO: 77017 - RNA, 32 nt, Homo Sapiens
gucaaagggcagcugagaagggccugagcccc

SEQ ID NO: 77018 - RNA, 32 nt, Homo Sapiens
ggcuggcacugacugggcauagcuccccgcuu

SEQ ID NO: 77019 - RNA, 32 nt, Homo Sapiens
uggaaggcccaguagagcugcccuuccccaga

SEQ ID NO: 77020 - RNA, 32 nt, Homo Sapiens
cccuccccggcagugggggcgccgcgcccagc

SEQ ID NO: 77021 - RNA, 32 nt, Homo Sapiens
acuguaaauggcaacaagauuuucccuaccuc

SEQ ID NO: 77022 - RNA, 32 nt, Homo Sapiens
gcagggcugcgcaggacccuuggaaauguugc

SEQ ID NO: 77023 - RNA, 32 nt, Homo Sapiens
uucuugacucgcguugcugccggccucccccc

SEQ ID NO: 77024 - RNA, 32 nt, Homo Sapiens
aaggaauaaaaagcuggccguacaaauuacau

SEQ ID NO: 77025 - RNA, 32 nt, Homo Sapiens
cgaguccacgcagcaagcuguacuggaggacg

SEQ ID NO: 77026 - RNA, 32 nt, Homo Sapiens
uuaauauaaaaauuauugauaaucuuaaauua

SEQ ID NO: 77027 - RNA, 32 nt, Homo Sapiens
guugggguuuuaaaggggaucuuggaggauga

SEQ ID NO: 77028 - RNA, 32 nt, Homo Sapiens
gagccccccagggucugggaccccgcucagca

SEQ ID NO: 77029 - RNA, 32 nt, Homo Sapiens
aagugaaggagaaauggguuuuuuguggucuu

SEQ ID NO: 77030 - RNA, 32 nt, Homo Sapiens
ccagcaggaguaccuucuguaaaugcaugugg

SEQ ID NO: 77031 - RNA, 32 nt, Homo Sapiens
ggggugcgcuggccgcccucuucugccuacag

SEQ ID NO: 77032 - RNA, 32 nt, Homo Sapiens
gcgggaggccaggcugcccucgaagcggggcg

SEQ ID NO: 77033 - RNA, 32 nt, Homo Sapiens
caugcauggacacacacacacacacacacacc

SEQ ID NO: 77034 - RNA, 32 nt, Homo Sapiens
agaaggccaaaagaaggaugaggaggacaaua

SEQ ID NO: 77035 - RNA, 32 nt, Homo Sapiens
ugucccuggccaagccgccuccugugggagcu

SEQ ID NO: 77036 - RNA, 32 nt, Homo Sapiens
guccugagccaauggaagggaggggacaagaa

SEQ ID NO: 77037 - RNA, 32 nt, Homo Sapiens
gcugcccaggggagccgagagaagggacuuug

SEQ ID NO: 77038 - RNA, 32 nt, Homo Sapiens
ccccggcugugacacucuacccuccagaaccu

SEQ ID NO: 77039 - RNA, 32 nt, Homo Sapiens
guggguuaggaguauccuuucuggagacugag

SEQ ID NO: 77040 - RNA, 32 nt, Homo Sapiens
auuguaaaacaaugguaaguauuuguguaucu

SEQ ID NO: 77041 - RNA, 32 nt, Homo Sapiens
cgccccuggccggcgcugggccccagagcgau

SEQ ID NO: 77042 - RNA, 32 nt, Homo Sapiens
cuucggggagacggccgugcucgacgccuucu

SEQ ID NO: 77043 - RNA, 32 nt, Homo Sapiens
caguuucuagagcuuuuugucuguaaugguga

SEQ ID NO: 77044 - RNA, 32 nt, Homo Sapiens
caggucaauauuaugaaaauaauuuuuauauu

SEQ ID NO: 77045 - RNA, 32 nt, Homo Sapiens
aaugaggaauaaaggucagagaaggucagagc

SEQ ID NO: 77046 - RNA, 32 nt, Homo Sapiens
cacuguggagauuaagaaaugugaggucagag

SEQ ID NO: 77047 - RNA, 32 nt, Homo Sapiens
gccagacacccugacacccacccaggcuuuga

SEQ ID NO: 77048 - RNA, 32 nt, Homo Sapiens
ucagaaguauccuauccuuguuuacgauguau

SEQ ID NO: 77049 - RNA, 32 nt, Homo Sapiens
gaauucucauugauaauaagggugaaaagguu

SEQ ID NO: 77050 - RNA, 32 nt, Homo Sapiens
uauucaaccacagagccuuaugcuauaaaugu

SEQ ID NO: 77051 - RNA, 32 nt, Homo Sapiens
uucgacgaccacuggcccggcgccgaccaccc

SEQ ID NO: 77052 - RNA, 32 nt, Homo Sapiens
gggcugcccucccaacccccgccucuggcuca

SEQ ID NO: 77053 - RNA, 32 nt, Homo Sapiens
gcaguuccaucccaagucacagcugcccuagg

SEQ ID NO: 77054 - RNA, 32 nt, Homo Sapiens
cccucgcucacagaccacacacccagcccucc

SEQ ID NO: 77055 - RNA, 30 nt, Homo Sapiens
ggccaggcaccuuggccgccggcgcacgga

SEQ ID NO: 77056 - RNA, 32 nt, Homo Sapiens
gcuuuacggcgacggcggcugagugagaaccu

SEQ ID NO: 77057 - RNA, 32 nt, Homo Sapiens
cuguuucuauaaauaaauuuuuuaagaauacc

SEQ ID NO: 77058 - RNA, 32 nt, Homo Sapiens
gacugcauggaagaggaaaaacaucagaacug

SEQ ID NO: 77059 - RNA, 32 nt, Homo Sapiens
uuuuuuuguacggaauagauaauuaagaguga

SEQ ID NO: 77060 - RNA, 32 nt, Homo Sapiens
caagucgcccuugacugcggcggccgcgagcg

SEQ ID NO: 77061 - RNA, 32 nt, Homo Sapiens
auaaacaaaaauaaaauaccaucuacucaugg

SEQ ID NO: 77062 - RNA, 32 nt, Homo Sapiens
guuucucuucagggauggauagugaccugucu

SEQ ID NO: 77063 - RNA, 31 nt, Homo Sapiens
uggcacccacccucaucaaauguacgcaccc

SEQ ID NO: 77064 - RNA, 32 nt, Homo Sapiens
cuuaguccagggggucacuccucccaccccac

SEQ ID NO: 77065 - RNA, 32 nt, Homo Sapiens
gcuaacugaaucuuuuaccacuucuggccugg

SEQ ID NO: 77066 - RNA, 31 nt, Homo Sapiens
cauaagaaauaaaauacaagauaugaguaaa

SEQ ID NO: 77067 - RNA, 32 nt, Homo Sapiens
gaggguguguggaaacgauucacauguucaaa

SEQ ID NO: 77068 - RNA, 32 nt, Homo Sapiens
aagaagaaugcaaauaauauauuuucauauuu

SEQ ID NO: 77069 - RNA, 32 nt, Homo Sapiens
uccacacaaggugauguccccucccagguuga

SEQ ID NO: 77070 - RNA, 32 nt, Homo Sapiens
ucugccauuucccuucuucuuuuaauaaaacu

SEQ ID NO: 77071 - RNA, 32 nt, Homo Sapiens
ggauggcacuggugguccuccuccuccucacu

SEQ ID NO: 77072 - RNA, 32 nt, Homo Sapiens
acuguugagagcggugugaggugcuugguagc

SEQ ID NO: 77073 - RNA, 32 nt, Homo Sapiens
cgggccuccagcgggcggggccguuggcggag

SEQ ID NO: 77074 - RNA, 32 nt, Homo Sapiens
gagagaagagagacuccagagaaggcucccua

SEQ ID NO: 77075 - RNA, 32 nt, Homo Sapiens
gggugauuuuaaaagaccaugacgaaugugua

SEQ ID NO: 77076 - RNA, 32 nt, Homo Sapiens
acaguuuugugaugcuuuugugcauucuuugu

SEQ ID NO: 77077 - RNA, 32 nt, Homo Sapiens
cucuggcuuuucugccguggauucucccccug

SEQ ID NO: 77078 - RNA, 32 nt, Homo Sapiens
ugguggaggggcgccggcagauuuauuaagcu

SEQ ID NO: 77079 - RNA, 32 nt, Homo Sapiens
caaacaccccucauugcugcaaugcagccucu

SEQ ID NO: 77080 - RNA, 32 nt, Homo Sapiens
uauuuguuuuaccugcucaucuucuaaacugg

SEQ ID NO: 77081 - RNA, 32 nt, Homo Sapiens
cgccucagauuucaggacccuccuccucgccc

SEQ ID NO: 77082 - RNA, 32 nt, Homo Sapiens
uuuuuuccuucuacuauaccauuuuaaguucu

SEQ ID NO: 77083 - RNA, 32 nt, Homo Sapiens
uuccuggugcccacucccaacauccugagcag

SEQ ID NO: 77084 - RNA, 32 nt, Homo Sapiens
ucaugggagaaccucguugacaugcacaguuu

SEQ ID NO: 77085 - RNA, 32 nt, Homo Sapiens
ucucuuacauaaauauucaaaucagcuuauca

SEQ ID NO: 77086 - RNA, 32 nt, Homo Sapiens
uacaaguucauacgugauaaugacuuacuguu

SEQ ID NO: 77087 - RNA, 32 nt, Homo Sapiens
ccggugcccccuccccguugugacugagggcg

SEQ ID NO: 77088 - RNA, 32 nt, Homo Sapiens
uauugugcgauucgugagcgccgcccgagcgg

SEQ ID NO: 77089 - RNA, 32 nt, Homo Sapiens
uguuuuuagguuuaaauuacuaacuuacuauu

SEQ ID NO: 77090 - RNA, 32 nt, Homo Sapiens
ugugacuaaguugcuggagguacccugcccca

SEQ ID NO: 77091 - RNA, 32 nt, Homo Sapiens
acucuucugugagcugcagcuguggggcagag

SEQ ID NO: 77092 - RNA, 32 nt, Homo Sapiens
uguguuggguugaauauauuuuaaguaucaga

SEQ ID NO: 77093 - RNA, 32 nt, Homo Sapiens
agacccuccagauguauccuugggaaaagcag

SEQ ID NO: 77094 - RNA, 32 nt, Homo Sapiens
guuguuagauauuucuucacauaucagcugcc

SEQ ID NO: 77095 - RNA, 32 nt, Homo Sapiens
ugagggagccugagugggagaccgccagcccc

SEQ ID NO: 77096 - RNA, 32 nt, Homo Sapiens
ucauacaucuucuuuucuauauguaugucauc

SEQ ID NO: 77097 - RNA, 32 nt, Homo Sapiens
gggacagugggcacaaggaacugaacccagcu

SEQ ID NO: 77098 - RNA, 32 nt, Homo Sapiens
ucuauuuuuuaucuguuuuucuuuugcucugc

SEQ ID NO: 77099 - RNA, 32 nt, Homo Sapiens
cacauccuuccauguauuuaucuugaagagau

SEQ ID NO: 77100 - RNA, 32 nt, Homo Sapiens
cuccaagaguaaacagaaguaggauggacugg

SEQ ID NO: 77101 - RNA, 32 nt, Homo Sapiens
gccgcuucagcuugcugaggacugucuccaag

SEQ ID NO: 77102 - RNA, 32 nt, Homo Sapiens
gaaaucauuucugaagacaaaagcagaggaau

SEQ ID NO: 77103 - RNA, 32 nt, Homo Sapiens
cgacucgcugucugcugucgucgguggucgcg

SEQ ID NO: 77104 - RNA, 27 nt, Homo Sapiens
uccacugucuucuucagguccugagau

SEQ ID NO: 77105 - RNA, 32 nt, Homo Sapiens
acauagaauguuucaacauuuccaucacccca

SEQ ID NO: 77106 - RNA, 32 nt, Homo Sapiens
uuaguagauauaacuuuuuaguugcuauucaa

SEQ ID NO: 77107 - RNA, 32 nt, Homo Sapiens
uuacauucuugcucugcucaucuacacauaua

SEQ ID NO: 77108 - RNA, 32 nt, Homo Sapiens
caaaaaagaauaaaaaguuugaauagcuauua

SEQ ID NO: 77109 - RNA, 32 nt, Homo Sapiens
cagagagguuaagggaggaguuccugcccacc

SEQ ID NO: 77110 - RNA, 32 nt, Homo Sapiens
aacagcauauuuagaaaacagaucuaauucua

SEQ ID NO: 77111 - RNA, 32 nt, Homo Sapiens
gagaugagugguccaagacccuugcuggccuc

SEQ ID NO: 77112 - RNA, 31 nt, Homo Sapiens
uuguacuuggaaaauuaauauuggccauaug

SEQ ID NO: 77113 - RNA, 32 nt, Homo Sapiens
ugcucugaauacuggugcccagccagcccgug

SEQ ID NO: 77114 - RNA, 32 nt, Homo Sapiens
agggcuauguuugguaaaaauuagguauccaa

SEQ ID NO: 77115 - RNA, 32 nt, Homo Sapiens
ucgaugcucggccugcugcugcucugcacccc

SEQ ID NO: 77116 - RNA, 32 nt, Homo Sapiens
gcggccuauccugauccuuggaggaggaggaa

SEQ ID NO: 77117 - RNA, 32 nt, Homo Sapiens
cagcagccaagagccacccuucagaagauaga

SEQ ID NO: 77118 - RNA, 32 nt, Homo Sapiens
ugguuuggugacgcuguaaccauuccacgcca

SEQ ID NO: 77119 - RNA, 29 nt, Homo Sapiens
cauucagugaagauuuggggggccacuuu

SEQ ID NO: 77120 - RNA, 32 nt, Homo Sapiens
ggcccggugcgguggcucaugccuguaauccc

SEQ ID NO: 77121 - RNA, 32 nt, Homo Sapiens
aagaugugcauaacuuguuuucaguuucccug

SEQ ID NO: 77122 - RNA, 32 nt, Homo Sapiens
ggauggcgcggcacgggccgugcggcuagacg

SEQ ID NO: 77123 - RNA, 32 nt, Homo Sapiens
cugugcugucuccggaagauucugucguugcc

SEQ ID NO: 77124 - RNA, 32 nt, Homo Sapiens
cccuuccccugccugcugcugggggagaugcu

SEQ ID NO: 77125 - RNA, 32 nt, Homo Sapiens
cgccugaggaccggcaacauggugcggucggg

SEQ ID NO: 77126 - RNA, 32 nt, Homo Sapiens
ugucacugguggccagcgugggcgccuggaag

SEQ ID NO: 77127 - RNA, 32 nt, Homo Sapiens
agaaugaggucucacuguguugccaggcuggu

SEQ ID NO: 77128 - RNA, 32 nt, Homo Sapiens
cauaggcauaguccucuagaaacaggaaucaa

SEQ ID NO: 77129 - RNA, 32 nt, Homo Sapiens
uuggagcuauaaauacauguaguuucuaaaga

SEQ ID NO: 77130 - RNA, 32 nt, Homo Sapiens
uuuguagccaggcgcaguggcuuaugccugua

SEQ ID NO: 77131 - RNA, 32 nt, Homo Sapiens
gucuacgcauuucucucuuccccucccucacc

SEQ ID NO: 77132 - RNA, 32 nt, Homo Sapiens
uucuguuuuguuuuuguuuuuaucaucaugau

SEQ ID NO: 77133 - RNA, 32 nt, Homo Sapiens
cauccugcgcauguaccuggaacuuaaaaauu

SEQ ID NO: 77134 - RNA, 32 nt, Homo Sapiens
uuagaguuuuauuccuuuccuuuuuugagauu

SEQ ID NO: 77135 - RNA, 29 nt, Homo Sapiens
gggaggugggggcgggggacgccgacacc

SEQ ID NO: 77136 - RNA, 32 nt, Homo Sapiens
cuguuggaagcaguugaccagaaaugcuugcc

SEQ ID NO: 77137 - RNA, 32 nt, Homo Sapiens
ccacguggugccuguacugcgcuacuccugau

SEQ ID NO: 77138 - RNA, 32 nt, Homo Sapiens
auuugaagaugugcguugauguuuccuugauu

SEQ ID NO: 77139 - RNA, 32 nt, Homo Sapiens
uucuucagaugcuuuucuuuuuuuaaugguga

SEQ ID NO: 77140 - RNA, 32 nt, Homo Sapiens
uguauuuguaaaucuguggacaaaagaggguu

SEQ ID NO: 77141 - RNA, 32 nt, Homo Sapiens
uaaaaacaaaaauguagauuguaaugaaauac

SEQ ID NO: 77142 - RNA, 32 nt, Homo Sapiens
auucaaaguuaaaauucaguggcagcacagau

SEQ ID NO: 77143 - RNA, 32 nt, Homo Sapiens
accaagucugcacuccuaauguuucugcaaac

SEQ ID NO: 77144 - RNA, 32 nt, Homo Sapiens
auuuucuucuaaaaguuuuuaaauuuugcuuu

SEQ ID NO: 77145 - RNA, 32 nt, Homo Sapiens
cuccaagaauaacacaggcucuggagaaagau

SEQ ID NO: 77146 - RNA, 32 nt, Homo Sapiens
ccaggagcaccggcugccccucuggguggcac

SEQ ID NO: 77147 - RNA, 32 nt, Homo Sapiens
cggcuguuagugcgucgcagcugcuggcgauc

SEQ ID NO: 77148 - RNA, 32 nt, Homo Sapiens
gaucauuuguaucauucuuuaagggaaaagaa

SEQ ID NO: 77149 - RNA, 32 nt, Homo Sapiens
cuggagaaaacuggcuaucaucuuucagaagu

SEQ ID NO: 77150 - RNA, 32 nt, Homo Sapiens
aucccugggaccugcccucccuuggucccagg

SEQ ID NO: 77151 - RNA, 32 nt, Homo Sapiens
agcuggcccagcugcuccagcagugugcacgg

SEQ ID NO: 77152 - RNA, 32 nt, Homo Sapiens
ugcuuggaauccagcaggcagcuggggcugag

SEQ ID NO: 77153 - RNA, 32 nt, Homo Sapiens
aaaaugaaugcuugacuucaacuuuuuaguug

SEQ ID NO: 77154 - RNA, 32 nt, Homo Sapiens
ggguccaugggcuugcugggguuguccccucg

SEQ ID NO: 77155 - RNA, 32 nt, Homo Sapiens
ugcucugucccggcuggcuggcuccgagugug

SEQ ID NO: 77156 - RNA, 32 nt, Homo Sapiens
ggagaagcauaaauaaauaaaaagguuuaucu

SEQ ID NO: 77157 - RNA, 32 nt, Homo Sapiens
gagaagauggaccggcucuugcucccagcucc

SEQ ID NO: 77158 - RNA, 32 nt, Homo Sapiens
aaauggaaguuccauagguucuauuucuuacu

SEQ ID NO: 77159 - RNA, 32 nt, Homo Sapiens
aggcaaugcugccuacuaucaaacuagcuguc

SEQ ID NO: 77160 - RNA, 32 nt, Homo Sapiens
gccgccugaucauacuuucucauuuuacagau

SEQ ID NO: 77161 - RNA, 32 nt, Homo Sapiens
cccuagaaaaggaaagccuuuuccugucugau

SEQ ID NO: 77162 - RNA, 31 nt, Homo Sapiens
auucauuguuuguuuuggccaaauaaaaaug

SEQ ID NO: 77163 - RNA, 32 nt, Homo Sapiens
ccugucucaaacaaacaaaaaaucuauaaugg

SEQ ID NO: 77164 - RNA, 32 nt, Homo Sapiens
uguaauguaauugacaggauggcugcugcaga

SEQ ID NO: 77165 - RNA, 32 nt, Homo Sapiens
acuaaaauauuuuuaucaaauuuccucucugu

SEQ ID NO: 77166 - RNA, 32 nt, Homo Sapiens
aagcacguguaugucggcauauucacuggguc

SEQ ID NO: 77167 - RNA, 32 nt, Homo Sapiens
uuaauguggauuuuaaaauuguaagcaauaga

SEQ ID NO: 77168 - RNA, 32 nt, Homo Sapiens
uuccuucuccuccuccauccccagaacaaacc

SEQ ID NO: 77169 - RNA, 32 nt, Homo Sapiens
cuccuccacagcaccuguugccuucauuagca

SEQ ID NO: 77170 - RNA, 32 nt, Homo Sapiens
ccauuacucucccugcccuucucuguuggggu

SEQ ID NO: 77171 - RNA, 32 nt, Homo Sapiens
accugucuuccacuguaucuacuguacgaacu

SEQ ID NO: 77172 - RNA, 32 nt, Homo Sapiens
gccccuccggccgcgagucccacgcgccaccc

SEQ ID NO: 77173 - RNA, 32 nt, Homo Sapiens
aucauauaaacagauuucuuuuuaaauuguuu

SEQ ID NO: 77174 - RNA, 32 nt, Homo Sapiens
agacgcccgcgugcgaccugagacgccgcccu

SEQ ID NO: 77175 - RNA, 32 nt, Homo Sapiens
ccgaucuuguccucuuucccccuucugcgccu

SEQ ID NO: 77176 - RNA, 32 nt, Homo Sapiens
ccacuuagcauuaggaggucaugccauacaac

SEQ ID NO: 77177 - RNA, 32 nt, Homo Sapiens
uucccuauguagcacguugaauguguguuuau

SEQ ID NO: 77178 - RNA, 32 nt, Homo Sapiens
caccgucccucccuuuucuccucaaguccuga

SEQ ID NO: 77179 - RNA, 32 nt, Homo Sapiens
auaaaauuaaucauuucucaccaaagaguaug

SEQ ID NO: 77180 - RNA, 32 nt, Homo Sapiens
augcccaauauuugagguggcucugauuuccu

SEQ ID NO: 77181 - RNA, 32 nt, Homo Sapiens
auaaaugauuuaaccauugcccucucccccgc

SEQ ID NO: 77182 - RNA, 32 nt, Homo Sapiens
auuuauacagggauuaaucaaaucuggcuacu

SEQ ID NO: 77183 - RNA, 32 nt, Homo Sapiens
agaccugacaguaauuuuugucuuaagaaugc

SEQ ID NO: 77184 - RNA, 32 nt, Homo Sapiens
uccacaguucucugguggcugcacccugccug

SEQ ID NO: 77185 - RNA, 29 nt, Homo Sapiens
agacaguuggagaccauuuaaugguuaag

SEQ ID NO: 77186 - RNA, 32 nt, Homo Sapiens
gguuguguguggaaaaggcuuuagccauggac

SEQ ID NO: 77187 - RNA, 32 nt, Homo Sapiens
uccuauuggggaugaggguggcaugaggaggu

SEQ ID NO: 77188 - RNA, 32 nt, Homo Sapiens
cccagcuggacaaagagaauaggacuuguauu

SEQ ID NO: 77189 - RNA, 32 nt, Homo Sapiens
ugaguccguuuuccgcgccgggguggcgcccc

SEQ ID NO: 77190 - RNA, 32 nt, Homo Sapiens
gaaggaaagcccagcccuuucuggaucccaca

SEQ ID NO: 77191 - RNA, 32 nt, Homo Sapiens
gccgucgcgcggugcacagcuaagacgucgcg

SEQ ID NO: 77192 - RNA, 32 nt, Homo Sapiens
caauggaucuaauguuuuaauuuuuuccccua

SEQ ID NO: 77193 - RNA, 32 nt, Homo Sapiens
acuguuuugugaugcccccagacacugucauc

SEQ ID NO: 77194 - RNA, 32 nt, Homo Sapiens
aaaccaacaacaaaaauuguauggugcggaac

SEQ ID NO: 77195 - RNA, 32 nt, Homo Sapiens
acaauguucuuugucucaaaauaaagcaaugu

SEQ ID NO: 77196 - RNA, 31 nt, Homo Sapiens
acgacuuugugcugggguugggguaacugaa

SEQ ID NO: 77197 - RNA, 32 nt, Homo Sapiens
gcuagacgcgccgcgcaccgacggaggggaca

SEQ ID NO: 77198 - RNA, 32 nt, Homo Sapiens
augagacuuaggacuuuagacuuuugaguuga

SEQ ID NO: 77199 - RNA, 32 nt, Homo Sapiens
agcugcucccauuaaaauauuauuuaaaauac

SEQ ID NO: 77200 - RNA, 32 nt, Homo Sapiens
augugucaggugcagccaaauaucacaccuuc

SEQ ID NO: 77201 - RNA, 32 nt, Homo Sapiens
cucgcucuugcaugccucccccguccuuuuuc

SEQ ID NO: 77202 - RNA, 32 nt, Homo Sapiens
cacugcucuucugcaccaugagaccaacccag

SEQ ID NO: 77203 - RNA, 32 nt, Homo Sapiens
uucaagaugaacuggcuuguaucaaugaagcg

SEQ ID NO: 77204 - RNA, 32 nt, Homo Sapiens
agguugcagugagccaagauuaugccauugca

SEQ ID NO: 77205 - RNA, 32 nt, Homo Sapiens
ccaucccagagggcucaggaugccccaggaag

SEQ ID NO: 77206 - RNA, 32 nt, Homo Sapiens
gacaagacccucaccaucuacaaaauggagau

SEQ ID NO: 77207 - RNA, 32 nt, Homo Sapiens
ucgugcugcagcgcccaggagccagggcgcug

SEQ ID NO: 77208 - RNA, 32 nt, Homo Sapiens
aaaagaaauuaacagaacauuuaaaagugugu

SEQ ID NO: 77209 - RNA, 32 nt, Homo Sapiens
guaccaucccccgccucauccauccuugggcu

SEQ ID NO: 77210 - RNA, 32 nt, Homo Sapiens
uuaagaacaaguugcuacgcugaagaaugaga

SEQ ID NO: 77211 - RNA, 32 nt, Homo Sapiens
augccugagggucucaggggcuggggcucuac

SEQ ID NO: 77212 - RNA, 32 nt, Homo Sapiens
gcucuggguguuguucccacaacagcaacagc

SEQ ID NO: 77213 - RNA, 31 nt, Homo Sapiens
ggucacacaacauuggcaggaguccagacca

SEQ ID NO: 77214 - RNA, 31 nt, Homo Sapiens
agagggaaauaaaggggagucaugcuuaaaa

SEQ ID NO: 77215 - RNA, 32 nt, Homo Sapiens
cgauaggaggcacaauauuguguccuguggcu

SEQ ID NO: 77216 - RNA, 32 nt, Homo Sapiens
cuccuguuuccauggcucaaagccgguugcag

SEQ ID NO: 77217 - RNA, 32 nt, Homo Sapiens
aaaacuuuaaauuuauuuauauuaaggguaau

SEQ ID NO: 77218 - RNA, 32 nt, Homo Sapiens
uucugcugcugauguaccaugaucuugggaag

SEQ ID NO: 77219 - RNA, 32 nt, Homo Sapiens
uaugucuguauauaagaagauucuaauugcua

SEQ ID NO: 77220 - RNA, 32 nt, Homo Sapiens
aacuucccugcagcugcaggccuggugagaca

SEQ ID NO: 77221 - RNA, 32 nt, Homo Sapiens
accacgcucccgagcucccccgcggccuggag

SEQ ID NO: 77222 - RNA, 32 nt, Homo Sapiens
aagcaugacuauaaauauguuucauugugaua

SEQ ID NO: 77223 - RNA, 30 nt, Homo Sapiens
gucccccuggacugaguggcggcugggugc

SEQ ID NO: 77224 - RNA, 32 nt, Homo Sapiens
uuuguaauguuacuugcuaucauuccaguauu

SEQ ID NO: 77225 - RNA, 32 nt, Homo Sapiens
ggacaauaucccaauuauggcagggaacaggu

SEQ ID NO: 77226 - RNA, 32 nt, Homo Sapiens
agcauagaaauauuuuaggauauuuuaggaua

SEQ ID NO: 77227 - RNA, 32 nt, Homo Sapiens
ccagcgugggucugggucaaggcagucuccca

SEQ ID NO: 77228 - RNA, 32 nt, Homo Sapiens
gcucgcugguacagcccucccuguucuaccac

SEQ ID NO: 77229 - RNA, 32 nt, Homo Sapiens
ccaagcccaugagggccgcgcgcccggccgcc

SEQ ID NO: 77230 - RNA, 32 nt, Homo Sapiens
augaaacuuuaaaauuuauuuugguuuauccc

SEQ ID NO: 77231 - RNA, 32 nt, Homo Sapiens
gagaaucugaagcuauugauguuuccagaaaa

SEQ ID NO: 77232 - RNA, 32 nt, Homo Sapiens
ucuggggaccucccccaucacccagguuccua

SEQ ID NO: 77233 - RNA, 32 nt, Homo Sapiens
cagccccgggucaccgaggagcucuggcaggc

SEQ ID NO: 77234 - RNA, 32 nt, Homo Sapiens
gauguucuuuccaugauggggauggagguguu

SEQ ID NO: 77235 - RNA, 32 nt, Homo Sapiens
aacaauuaacuggacccacccaccacagccca

SEQ ID NO: 77236 - RNA, 32 nt, Homo Sapiens
ccgggcgcagcacgcucgguguccccacacug

SEQ ID NO: 77237 - RNA, 32 nt, Homo Sapiens
ccaaugagacuucuuuccuauuugagaucgga

SEQ ID NO: 77238 - RNA, 32 nt, Homo Sapiens
gccuaaucuuucaaacacaguuucacacugau

SEQ ID NO: 77239 - RNA, 32 nt, Homo Sapiens
gguggcccagggggccgcucucagaaggccga

SEQ ID NO: 77240 - RNA, 32 nt, Homo Sapiens
ucauuuguuaauauuucuucgugaugacauau

SEQ ID NO: 77241 - RNA, 32 nt, Homo Sapiens
agaucugcucccuucugggacccaggcuucag

SEQ ID NO: 77242 - RNA, 32 nt, Homo Sapiens
uggacucgugcagcuggggcguccgcagccgc

SEQ ID NO: 77243 - RNA, 32 nt, Homo Sapiens
cugcugagcgccacccucuacccggcugacag

SEQ ID NO: 77244 - RNA, 32 nt, Homo Sapiens
cuaggcaaacacacugauguaggaagcacgag

SEQ ID NO: 77245 - RNA, 32 nt, Homo Sapiens
uuccggcgcuggcuggcuggcuggcuguaaag

SEQ ID NO: 77246 - RNA, 32 nt, Homo Sapiens
ucuugugauccuccuuauugauuuuuucccuc

SEQ ID NO: 77247 - RNA, 32 nt, Homo Sapiens
aagugguuggucugagguuggaggaagcugaa

SEQ ID NO: 77248 - RNA, 32 nt, Homo Sapiens
aacaugucuguaaaacuuaggacuauagaaau

SEQ ID NO: 77249 - RNA, 32 nt, Homo Sapiens
auccccgcacaaagcggcucuaaaccucaggc

SEQ ID NO: 77250 - RNA, 32 nt, Homo Sapiens
uaccuggaccucuggcagaauuucaaggcaca

SEQ ID NO: 77251 - RNA, 32 nt, Homo Sapiens
gccagaugccuggcccugugcuggggcagaca

SEQ ID NO: 77252 - RNA, 32 nt, Homo Sapiens
aggagggcgaggggcugggcucagagggccag

SEQ ID NO: 77253 - RNA, 32 nt, Homo Sapiens
aggucuuauuccagaaaggagguuaaggagag

SEQ ID NO: 77254 - RNA, 32 nt, Homo Sapiens
ucuuaauggauuaaaaucauuaaaguucuuaa

SEQ ID NO: 77255 - RNA, 32 nt, Homo Sapiens
uuaacucaucuauagcacuuugaguaucuuug

SEQ ID NO: 77256 - RNA, 32 nt, Homo Sapiens
acacacacauauauuuguauaaagcuaaguuu

SEQ ID NO: 77257 - RNA, 32 nt, Homo Sapiens
uaauaaauauuuuacauccuuucuaaugacaa

SEQ ID NO: 77258 - RNA, 32 nt, Homo Sapiens
accagccuggacaacauagugagacccccauc

SEQ ID NO: 77259 - RNA, 32 nt, Homo Sapiens
augugugugucugaagaaagauuuacauagcc

SEQ ID NO: 77260 - RNA, 32 nt, Homo Sapiens
gaacugacguucuugugauguuuucucaugca

SEQ ID NO: 77261 - RNA, 28 nt, Homo Sapiens
guccuggggcggcagcugaggaagaaag

SEQ ID NO: 77262 - RNA, 32 nt, Homo Sapiens
gcacaggaugugguaccacagauugucccacc

SEQ ID NO: 77263 - RNA, 32 nt, Homo Sapiens
caggcuugcuuuagcccaccggaucaugcugu

SEQ ID NO: 77264 - RNA, 32 nt, Homo Sapiens
gccuuuguaccuuagagaugugucucagggcc

SEQ ID NO: 77265 - RNA, 32 nt, Homo Sapiens
uggugggccccgggcccucagccucucuugua

SEQ ID NO: 77266 - RNA, 32 nt, Homo Sapiens
gccagccagcccugcgggccuccgugcuccuu

SEQ ID NO: 77267 - RNA, 32 nt, Homo Sapiens
aauuuucauaaaacauauagcauaaaaaccuc

SEQ ID NO: 77268 - RNA, 32 nt, Homo Sapiens
gacuguucgauaacuccaaagcuuguucccau

SEQ ID NO: 77269 - RNA, 32 nt, Homo Sapiens
uaaccccgggagggaccuucccugcccugcug

SEQ ID NO: 77270 - RNA, 32 nt, Homo Sapiens
caagcccaggcaccagugucucggggggccuc

SEQ ID NO: 77271 - RNA, 32 nt, Homo Sapiens
ggugccugccagcagcugaggcgccauggcgg

SEQ ID NO: 77272 - RNA, 32 nt, Homo Sapiens
cuaaaucugcuaguagaggugcaugccuuuca

SEQ ID NO: 77273 - RNA, 32 nt, Homo Sapiens
gaucacuaucucugcucugugcuccucaaaau

SEQ ID NO: 77274 - RNA, 32 nt, Homo Sapiens
aaagauaaaaauuuaucaacauuccuuaacag

SEQ ID NO: 77275 - RNA, 32 nt, Homo Sapiens
uauaguaaauuuauuuuauuuuagauauuaaa

SEQ ID NO: 77276 - RNA, 32 nt, Homo Sapiens
ugcacuuguacuaagaaaauaucuuuauuuug

SEQ ID NO: 77277 - RNA, 32 nt, Homo Sapiens
aguacuaaagaaaaagcagucuaccauugugg

SEQ ID NO: 77278 - RNA, 32 nt, Homo Sapiens
gcugugcgucugaccuggcaugauuucuauuu

SEQ ID NO: 77279 - RNA, 32 nt, Homo Sapiens
caggagcuccagcucacgugaccugucacugc

SEQ ID NO: 77280 - RNA, 32 nt, Homo Sapiens
auggaggucuuagggguuggggguuacugaug

SEQ ID NO: 77281 - RNA, 28 nt, Homo Sapiens
agggccuuaacugccaggauggcacuag

SEQ ID NO: 77282 - RNA, 32 nt, Homo Sapiens
aggcuuugcgccucugcaggugcucucgggcc

SEQ ID NO: 77283 - RNA, 32 nt, Homo Sapiens
ccuguuugccccaccuucaccguguggaacaa

SEQ ID NO: 77284 - RNA, 32 nt, Homo Sapiens
cuuucgcccccacacccccuccccuugccagc

SEQ ID NO: 77285 - RNA, 32 nt, Homo Sapiens
cguugggcggcgggcgucccugagagaaauua

SEQ ID NO: 77286 - RNA, 32 nt, Homo Sapiens
gagaaaagaaucuuuuucaaaguuugugucgg

SEQ ID NO: 77287 - RNA, 32 nt, Homo Sapiens
guuagauucacuuugacacuuuucauaucauu

SEQ ID NO: 77288 - RNA, 29 nt, Homo Sapiens
gaaauguaaaguuuguauuuucaauuuau

SEQ ID NO: 77289 - RNA, 32 nt, Homo Sapiens
gaggagcuugaagagauggauagucaagaugc

SEQ ID NO: 77290 - RNA, 32 nt, Homo Sapiens
uguuacuucuaaaaaguauauucaaccuguau

SEQ ID NO: 77291 - RNA, 32 nt, Homo Sapiens
gccucgcucagcugcgugcugcccgacuucuu

SEQ ID NO: 77292 - RNA, 32 nt, Homo Sapiens
ggcuccaucccuggcuuccccagccugcggcc

SEQ ID NO: 77293 - RNA, 32 nt, Homo Sapiens
ucccucugcauucuuaauuccuugcuuuucuc

SEQ ID NO: 77294 - RNA, 32 nt, Homo Sapiens
aaggagcgcagccccagaccguccuggcuucg

SEQ ID NO: 77295 - RNA, 32 nt, Homo Sapiens
auauuuucucccugcuguucccaccaugcccu

SEQ ID NO: 77296 - RNA, 32 nt, Homo Sapiens
ccaacuuccuguugcuggccccugcccucugc

SEQ ID NO: 77297 - RNA, 32 nt, Homo Sapiens
ucugaucuuguggcccccacccgggaacugac

SEQ ID NO: 77298 - RNA, 32 nt, Homo Sapiens
ccugcuccacucuggcgaccgcccccgggguc

SEQ ID NO: 77299 - RNA, 32 nt, Homo Sapiens
ggaccucucuacacucugggggucucugccca

SEQ ID NO: 77300 - RNA, 32 nt, Homo Sapiens
gauggagacuuaacauuucaauguauuacagu

SEQ ID NO: 77301 - RNA, 32 nt, Homo Sapiens
aaaacccagaaagcacaaagcaugagguggag

SEQ ID NO: 77302 - RNA, 32 nt, Homo Sapiens
agaggcucuuaaauuuaaaaaauauacacagc

SEQ ID NO: 77303 - RNA, 32 nt, Homo Sapiens
aagaaauguaaugguuuuugauaauaugaucc

SEQ ID NO: 77304 - RNA, 32 nt, Homo Sapiens
gccagucugccaugccaggagucacuggacau

SEQ ID NO: 77305 - RNA, 32 nt, Homo Sapiens
aacacacacacacacacacacacacacacaca

SEQ ID NO: 77306 - RNA, 32 nt, Homo Sapiens
aacacauacacacacacacacacacacacaua

SEQ ID NO: 77307 - RNA, 32 nt, Homo Sapiens
aacacacacacacagacacacacacacacaga

SEQ ID NO: 77308 - RNA, 32 nt, Homo Sapiens
acaguaguucccuguccuuuaggucuucucca

SEQ ID NO: 77309 - RNA, 32 nt, Homo Sapiens
gugucccaggccagugcugaggccuuguggug

SEQ ID NO: 77310 - RNA, 32 nt, Homo Sapiens
guuauuccuuucccuuuccugcucuggccucc

SEQ ID NO: 77311 - RNA, 32 nt, Homo Sapiens
uguguguauguaauauuguacggauuuacucu

SEQ ID NO: 77312 - RNA, 32 nt, Homo Sapiens
aaaagacugaagauuuguguuuuuguuuuggu

SEQ ID NO: 77313 - RNA, 32 nt, Homo Sapiens
acgcucgccccgacgcauggacccgagaggcg

SEQ ID NO: 77314 - RNA, 32 nt, Homo Sapiens
cagauaaaccagugccauuagauggaaggcag

SEQ ID NO: 77315 - RNA, 32 nt, Homo Sapiens
ccacuguuauacccggggcacucuaaccauca

SEQ ID NO: 77316 - RNA, 32 nt, Homo Sapiens
uggugauaccccccuccccccaucucuacuaa

SEQ ID NO: 77317 - RNA, 32 nt, Homo Sapiens
uccuccaaggcacaauuuuaauucaaaagauc

SEQ ID NO: 77318 - RNA, 32 nt, Homo Sapiens
auagauuuaagugaauacauuaacggugcuaa

SEQ ID NO: 77319 - RNA, 32 nt, Homo Sapiens
guucgggagaaucuuggcugucgugaucacac

SEQ ID NO: 77320 - RNA, 32 nt, Homo Sapiens
gccagugaauucgggggcucagcccuccuccc

SEQ ID NO: 77321 - RNA, 32 nt, Homo Sapiens
uuuuugcccuguauagguugacuuggcaauuc

SEQ ID NO: 77322 - RNA, 32 nt, Homo Sapiens
gaguaggagagaaaucucuuaauuaugauuaa

SEQ ID NO: 77323 - RNA, 32 nt, Homo Sapiens
uuucagaagauauuaaauauuuguaaauugug

SEQ ID NO: 77324 - RNA, 32 nt, Homo Sapiens
cugcagacagggucggagguguuagcgagccu

SEQ ID NO: 77325 - RNA, 32 nt, Homo Sapiens
cccugcugcaucuucagcaucucccauguuca

SEQ ID NO: 77326 - RNA, 28 nt, Homo Sapiens
uggccaguggcuaccauauuggaccgca

SEQ ID NO: 77327 - RNA, 32 nt, Homo Sapiens
uccuaggggaaaaaggggggcugggagugaua

SEQ ID NO: 77328 - RNA, 32 nt, Homo Sapiens
aggaguaauggaccagaucuaccucaguauuc

SEQ ID NO: 77329 - RNA, 32 nt, Homo Sapiens
aaggacagacauuuuuggcagagcauagauga

SEQ ID NO: 77330 - RNA, 32 nt, Homo Sapiens
cagccccaggagaagggacaaaagguacuggu

SEQ ID NO: 77331 - RNA, 32 nt, Homo Sapiens
aagccugucuagaugugggacucauugcccca

SEQ ID NO: 77332 - RNA, 32 nt, Homo Sapiens
gacucuuggggauguagggcagaagagaacag

SEQ ID NO: 77333 - RNA, 32 nt, Homo Sapiens
cucagccucaagggaaaacuuccuccuagugc

SEQ ID NO: 77334 - RNA, 32 nt, Homo Sapiens
acauugaaggcuuccuggcagcucucacuacg

SEQ ID NO: 77335 - RNA, 32 nt, Homo Sapiens
accugaucuauuuuuuguuuuguugcuugagc

SEQ ID NO: 77336 - RNA, 32 nt, Homo Sapiens
agggccacgguggcguggcucuccucgcaggu

SEQ ID NO: 77337 - RNA, 32 nt, Homo Sapiens
ucuucauggcuuguuuacucuucuuucacaga

SEQ ID NO: 77338 - RNA, 32 nt, Homo Sapiens
aucuuuuagaaauaccuuuucuggagaaaaaa

SEQ ID NO: 77339 - RNA, 32 nt, Homo Sapiens
acuuugugcaggucgcggcgcuuccugccuca

SEQ ID NO: 77340 - RNA, 32 nt, Homo Sapiens
uuuuuuggugacucaaucccagugucugguuu

SEQ ID NO: 77341 - RNA, 32 nt, Homo Sapiens
auguccaaccgaugaacccaccaccgugaacc

SEQ ID NO: 77342 - RNA, 32 nt, Homo Sapiens
ggcuggaaugcaauggcgugaucuuggcucac

SEQ ID NO: 77343 - RNA, 32 nt, Homo Sapiens
uugcuaucaaaauaaauugaaauauaaugcaa

SEQ ID NO: 77344 - RNA, 32 nt, Homo Sapiens
ggaacauacuuuuugcagaggucugcaaagca

SEQ ID NO: 77345 - RNA, 32 nt, Homo Sapiens
ggugugauauuguaauaggcugaaugcaaaag

SEQ ID NO: 77346 - RNA, 32 nt, Homo Sapiens
ucuucucaaucacauuucaauguuuguggaga

SEQ ID NO: 77347 - RNA, 32 nt, Homo Sapiens
uauuuagcauauauaacuauaaaucacuuauu

SEQ ID NO: 77348 - RNA, 32 nt, Homo Sapiens
aaccgggccgggcacagcguggcuacagaggg

SEQ ID NO: 77349 - RNA, 32 nt, Homo Sapiens
ugucuuuuucuuaaauauuaugugaaaucaaa

SEQ ID NO: 77350 - RNA, 32 nt, Homo Sapiens
cgggcgcgaagcggccggccugggcgccgacu

SEQ ID NO: 77351 - RNA, 32 nt, Homo Sapiens
ggggcuccuggccaguucaucuuucguccugu

SEQ ID NO: 77352 - RNA, 32 nt, Homo Sapiens
gcccaggggagagaggcgcugggaagauggcu

SEQ ID NO: 77353 - RNA, 32 nt, Homo Sapiens
cucuuauaucuaaaucuguccaacugagaagu

SEQ ID NO: 77354 - RNA, 32 nt, Homo Sapiens
cgagaagccaaggccagguucuggguguaggg

SEQ ID NO: 77355 - RNA, 32 nt, Homo Sapiens
ugcaggggccccaaagcccgcacuuuguccgu

SEQ ID NO: 77356 - RNA, 32 nt, Homo Sapiens
auaaccaugagcacuacucuaccaugguucug

SEQ ID NO: 77357 - RNA, 32 nt, Homo Sapiens
gucucaugggcuuuaguuuccuccucucuaaa

SEQ ID NO: 77358 - RNA, 32 nt, Homo Sapiens
uuacaggugugagccaccacacccggccuaua

SEQ ID NO: 77359 - RNA, 32 nt, Homo Sapiens
cuguccgggggacacgcgcauguguuugccag

SEQ ID NO: 77360 - RNA, 32 nt, Homo Sapiens
gucuccauccgucuuuaaugggucagggcuuu

SEQ ID NO: 77361 - RNA, 32 nt, Homo Sapiens
ggccagaaucgcccggcccagcccuggagccc

SEQ ID NO: 77362 - RNA, 32 nt, Homo Sapiens
cugccgggcagggcuggagcuggacagaagcc

SEQ ID NO: 77363 - RNA, 32 nt, Homo Sapiens
augcugcagaacugccaccuccuggucaagug

SEQ ID NO: 77364 - RNA, 32 nt, Homo Sapiens
aaggccaagggaugugggggcugggggacugg

SEQ ID NO: 77365 - RNA, 32 nt, Homo Sapiens
gaugaaauguaucuccuuguaccuggaagaug

SEQ ID NO: 77366 - RNA, 32 nt, Homo Sapiens
uacauguuuuaacaguguaaugggaggaucug

SEQ ID NO: 77367 - RNA, 32 nt, Homo Sapiens
uauaccucauuucuaacucgugaccgagugac

SEQ ID NO: 77368 - RNA, 32 nt, Homo Sapiens
cgaggcgacgccaaggggagggggcugaccug

SEQ ID NO: 77369 - RNA, 32 nt, Homo Sapiens
gaccccacgugguaaccucuucccuccuaggc

SEQ ID NO: 77370 - RNA, 32 nt, Homo Sapiens
agaagcuggaacacagaagagaggagguugug

SEQ ID NO: 77371 - RNA, 32 nt, Homo Sapiens
aacuaauuuuuagauaguuccuggucacucaa

SEQ ID NO: 77372 - RNA, 32 nt, Homo Sapiens
agcaugaacaccaggcaccccugggacaccua

SEQ ID NO: 77373 - RNA, 32 nt, Homo Sapiens
agaagacauuuuacuaggcaaggaaugauaag

SEQ ID NO: 77374 - RNA, 32 nt, Homo Sapiens
cauguuuucuucauuuuuaaucaauaaagagu

SEQ ID NO: 77375 - RNA, 32 nt, Homo Sapiens
uugugaagagcaaagcacuuggaaucucuguu

SEQ ID NO: 77376 - RNA, 32 nt, Homo Sapiens
uaaaaggaguccaggcucccaacugugcccuu

SEQ ID NO: 77377 - RNA, 32 nt, Homo Sapiens
ggugcuuuggaggccagagugcaugcguacgg

SEQ ID NO: 77378 - RNA, 32 nt, Homo Sapiens
cgacgcacagccaugcacaggcagugcgccug

SEQ ID NO: 77379 - RNA, 32 nt, Homo Sapiens
ccuccaucuucaagccagcagugaugcgcuga

SEQ ID NO: 77380 - RNA, 32 nt, Homo Sapiens
cauuuguacuguuuuucuucaauaaucauuuu

SEQ ID NO: 77381 - RNA, 32 nt, Homo Sapiens
uauuauacuguaagaauauaaguauaaagugc

SEQ ID NO: 77382 - RNA, 32 nt, Homo Sapiens
aggcaagagaaagaauauguuauuguucuaaa

SEQ ID NO: 77383 - RNA, 32 nt, Homo Sapiens
gagggucuggcuguuuguguccuugggcgcug

SEQ ID NO: 77384 - RNA, 32 nt, Homo Sapiens
augaauaugcaguaugggacuuugaaauaaug

SEQ ID NO: 77385 - RNA, 32 nt, Homo Sapiens
cggccucaggucccggcccugccuucuacacu

SEQ ID NO: 77386 - RNA, 32 nt, Homo Sapiens
auuaguuagccaauauuuuucuuacugauuuu

SEQ ID NO: 77387 - RNA, 32 nt, Homo Sapiens
aucaggaacugcucaaagacuacaucaagcgc

SEQ ID NO: 77388 - RNA, 32 nt, Homo Sapiens
ugcagucauuuccuguuaauucugggagacaa

SEQ ID NO: 77389 - RNA, 32 nt, Homo Sapiens
auauaaggaaauggagacacagaaauuaaaug

SEQ ID NO: 77390 - RNA, 32 nt, Homo Sapiens
ccucacugguuuguguugcuaagcaaacguau

SEQ ID NO: 77391 - RNA, 32 nt, Homo Sapiens
uuuauuucuugagccuggcuuggaccuuggca

SEQ ID NO: 77392 - RNA, 32 nt, Homo Sapiens
ccuauuaaacaaaacuaggagagucagaaaaa

SEQ ID NO: 77393 - RNA, 32 nt, Homo Sapiens
cccuccucaaggaucacccauccuccuuucag

SEQ ID NO: 77394 - RNA, 32 nt, Homo Sapiens
aaaggguacauuuuaauuuaauguguuaaaaa

SEQ ID NO: 77395 - RNA, 32 nt, Homo Sapiens
ggagcagaguccaugagaaagaaggagggaug

SEQ ID NO: 77396 - RNA, 32 nt, Homo Sapiens
agauaauuuaugugagagaaaaugguaguguc

SEQ ID NO: 77397 - RNA, 32 nt, Homo Sapiens
acaaccuugagcccaagcagcacuuugggucc

SEQ ID NO: 77398 - RNA, 32 nt, Homo Sapiens
uaccauccucucuugcaacacccaugugccuu

SEQ ID NO: 77399 - RNA, 32 nt, Homo Sapiens
auauugggcagagauugcuugcgacaggaggg

SEQ ID NO: 77400 - RNA, 32 nt, Homo Sapiens
cugaggggugggggugccgcugucugaggggu

SEQ ID NO: 77401 - RNA, 32 nt, Homo Sapiens
uuucuauaugacuggcugauauccaacuaugc

SEQ ID NO: 77402 - RNA, 32 nt, Homo Sapiens
cggacuccgccgcucgucgccuccccccggcc

SEQ ID NO: 77403 - RNA, 32 nt, Homo Sapiens
gcuucauuguacuaccuguguauauaguuuuu

SEQ ID NO: 77404 - RNA, 32 nt, Homo Sapiens
gcccacaagagaaagcaggaaauaucuaaaau

SEQ ID NO: 77405 - RNA, 32 nt, Homo Sapiens
ggugcuuuuuguauauuuuauguauaaaucac

SEQ ID NO: 77406 - RNA, 32 nt, Homo Sapiens
gagauuauuucuguauguaauuaagagacuuu

SEQ ID NO: 77407 - RNA, 32 nt, Homo Sapiens
agcgggcggugcccgcggcggcguuuccuggg

SEQ ID NO: 77408 - RNA, 32 nt, Homo Sapiens
aaauaagggaugcuaggugucugggaucgggg

SEQ ID NO: 77409 - RNA, 32 nt, Homo Sapiens
gagcugagauuggaaggcagugaggcugaggg

SEQ ID NO: 77410 - RNA, 32 nt, Homo Sapiens
ccuaacccugaggcugccgcgcggcggucacu

SEQ ID NO: 77411 - RNA, 32 nt, Homo Sapiens
ggccucaggaccagcccuguccaccccaaccu

SEQ ID NO: 77412 - RNA, 32 nt, Homo Sapiens
aaagaagcaagaucuuugaaaguggcugggag

SEQ ID NO: 77413 - RNA, 32 nt, Homo Sapiens
auuuuuacaaaacagcauugauugaagcaagu

SEQ ID NO: 77414 - RNA, 32 nt, Homo Sapiens
gacuccccccaccgccagcagcugcuccucca

SEQ ID NO: 77415 - RNA, 32 nt, Homo Sapiens
gccuagggggccauggcccagcccuggcacuc

SEQ ID NO: 77416 - RNA, 32 nt, Homo Sapiens
ugggcggggugcaggcagcagagccugcgggc

SEQ ID NO: 77417 - RNA, 32 nt, Homo Sapiens
ggccgcgauguucagcuggcuggguacggacg

SEQ ID NO: 77418 - RNA, 32 nt, Homo Sapiens
ccugguugcugagacuccauuuugcugccaca

SEQ ID NO: 77419 - RNA, 32 nt, Homo Sapiens
aagagugucccuucuucacaccuacucacuuu

SEQ ID NO: 77420 - RNA, 32 nt, Homo Sapiens
uagcagaucuuacuccacguauacuuuuuggu

SEQ ID NO: 77421 - RNA, 32 nt, Homo Sapiens
aauaguaaccauuucuuuugucucucuguuuc

SEQ ID NO: 77422 - RNA, 32 nt, Homo Sapiens
uauaugacaaaaugcucugauuccuagugcca

SEQ ID NO: 77423 - RNA, 32 nt, Homo Sapiens
gaaugcucccccauccuccccuucccugcaaa

SEQ ID NO: 77424 - RNA, 32 nt, Homo Sapiens
uauauaaauggaaucauauccuuaaugaacac

SEQ ID NO: 77425 - RNA, 32 nt, Homo Sapiens
ggauucaggggagaggccccaaacagggagcc

SEQ ID NO: 77426 - RNA, 32 nt, Homo Sapiens
cagaauguucuuuccuuggagagauaucugau

SEQ ID NO: 77427 - RNA, 32 nt, Homo Sapiens
aauucuuucuuacauaauauauuuguuuugau

SEQ ID NO: 77428 - RNA, 32 nt, Homo Sapiens
cauuauuucuucagcuucauguaacccugacu

SEQ ID NO: 77429 - RNA, 32 nt, Homo Sapiens
ugaccaugauaggaggaaacgaaacuuguaag

SEQ ID NO: 77430 - RNA, 32 nt, Homo Sapiens
gggugucggguagagggaagagggcagggggc

SEQ ID NO: 77431 - RNA, 32 nt, Homo Sapiens
cuuuugaaacaucauuguaaaacagugcuuuu

SEQ ID NO: 77432 - RNA, 32 nt, Homo Sapiens
caaaagauaaaacauucucuugaauuucccuc

SEQ ID NO: 77433 - RNA, 32 nt, Homo Sapiens
aucugcaguaugguuuaacauguauuaauaau

SEQ ID NO: 77434 - RNA, 32 nt, Homo Sapiens
gguagggcgggggccggaugaggcgggaccuc

SEQ ID NO: 77435 - RNA, 32 nt, Homo Sapiens
uuuuuuuuuuugucuuuuuuuuaaggaggaag

SEQ ID NO: 77436 - RNA, 32 nt, Homo Sapiens
caagcugccaccuaaagacaagagugagaggg

SEQ ID NO: 77437 - RNA, 32 nt, Homo Sapiens
uccugauucacccacccaggagacaagauuug

SEQ ID NO: 77438 - RNA, 32 nt, Homo Sapiens
ucuuucugaucugcgcccccagcccccagccc

SEQ ID NO: 77439 - RNA, 30 nt, Homo Sapiens
uccgaguccuucuugggggaaauagcagag

SEQ ID NO: 77440 - RNA, 32 nt, Homo Sapiens
aauucaaacuguuuuguucagaaugggcuaaa

SEQ ID NO: 77441 - RNA, 32 nt, Homo Sapiens
uguguucccucauaugcaugcccuuccuuucu

SEQ ID NO: 77442 - RNA, 32 nt, Homo Sapiens
gcugcgaggugggaccugcugcugugcugggu

SEQ ID NO: 77443 - RNA, 32 nt, Homo Sapiens
acaggguacaagcaggagcacauuaacuugga

SEQ ID NO: 77444 - RNA, 32 nt, Homo Sapiens
uguggggaggggaggagaacugcucacuccuu

SEQ ID NO: 77445 - RNA, 32 nt, Homo Sapiens
gccacaggagaaaaaauuaaagagccauauga

SEQ ID NO: 77446 - RNA, 32 nt, Homo Sapiens
uugguuuggggaugcuccuaaggggggagaaa

SEQ ID NO: 77447 - RNA, 32 nt, Homo Sapiens
agaaggcuaugguugacuucuugcuugugcuu

SEQ ID NO: 77448 - RNA, 32 nt, Homo Sapiens
aagcugucccgagccaagagugccaagguguc

SEQ ID NO: 77449 - RNA, 32 nt, Homo Sapiens
cuaccaagccagacauaacaaacaaaaguccu

SEQ ID NO: 77450 - RNA, 32 nt, Homo Sapiens
agugacuggaguccagggacaugauggaucag

SEQ ID NO: 77451 - RNA, 32 nt, Homo Sapiens
ccauacuucagucaguccaaucauaguacagu

SEQ ID NO: 77452 - RNA, 32 nt, Homo Sapiens
gucaugugucugucaucccugaccuggccucu

SEQ ID NO: 77453 - RNA, 32 nt, Homo Sapiens
uagucuggacucuuaaauuugauauucagguu

SEQ ID NO: 77454 - RNA, 32 nt, Homo Sapiens
auacuucucuaguaaaugaaaaauuaccagcu

SEQ ID NO: 77455 - RNA, 32 nt, Homo Sapiens
uuuuacccaagcccuuucuugccucuccagug

SEQ ID NO: 77456 - RNA, 32 nt, Homo Sapiens
cagccggcugcuugagacgugccgccgugcca

SEQ ID NO: 77457 - RNA, 32 nt, Homo Sapiens
acagacuugaagaaaacuguuaucuuuuccug

SEQ ID NO: 77458 - RNA, 32 nt, Homo Sapiens
cguacauuucucucuuaagaaaaauagucuau

SEQ ID NO: 77459 - RNA, 32 nt, Homo Sapiens
ucuuuggacugaauucuuaccauacugccauu

SEQ ID NO: 77460 - RNA, 32 nt, Homo Sapiens
uugggucaguuauauucaguuuuaguauugua

SEQ ID NO: 77461 - RNA, 32 nt, Homo Sapiens
agucaauuuuauuuuuagcauacuguuaaaua

SEQ ID NO: 77462 - RNA, 32 nt, Homo Sapiens
cagacucuuaggaaaaugggugggacaucugu

SEQ ID NO: 77463 - RNA, 32 nt, Homo Sapiens
uccucuucugguuuuggaaaauuuccagauaa

SEQ ID NO: 77464 - RNA, 32 nt, Homo Sapiens
gagggaauuuaaaaggugucaacuuuugacca

SEQ ID NO: 77465 - RNA, 32 nt, Homo Sapiens
ucugcuguucccuuuugaaaucuuucauguca

SEQ ID NO: 77466 - RNA, 32 nt, Homo Sapiens
ucugugaucugguuuccacaccuacuacucuu

SEQ ID NO: 77467 - RNA, 32 nt, Homo Sapiens
accuuccaaaaauuacuuaguauugcaaaguc

SEQ ID NO: 77468 - RNA, 32 nt, Homo Sapiens
cuggccugccccagcucucagaggcccgccau

SEQ ID NO: 77469 - RNA, 32 nt, Homo Sapiens
cccuaacaaccuguacuaaauauauguacaaa

SEQ ID NO: 77470 - RNA, 32 nt, Homo Sapiens
ucaguucauguauguucagaagaaauucuguc

SEQ ID NO: 77471 - RNA, 32 nt, Homo Sapiens
aagucuuccuuccugugcucaucuccggagcu

SEQ ID NO: 77472 - RNA, 32 nt, Homo Sapiens
augaccugaccaaaaacuuuacaggauucaua

SEQ ID NO: 77473 - RNA, 32 nt, Homo Sapiens
cuucuccgcgccccagccgccggcugccagcu

SEQ ID NO: 77474 - RNA, 32 nt, Homo Sapiens
cugggcaaguuuacuuuuuuucugauguuucc

SEQ ID NO: 77475 - RNA, 32 nt, Homo Sapiens
cgaccgaggaggagggagccuagguucaaguc

SEQ ID NO: 77476 - RNA, 32 nt, Homo Sapiens
aaaguuauuuuuugggguuacauccuguuugu

SEQ ID NO: 77477 - RNA, 32 nt, Homo Sapiens
aguuuguuuauuacagauauaugcauauagag

SEQ ID NO: 77478 - RNA, 32 nt, Homo Sapiens
gcuccgacugaacaugcugagcaguugagcac

SEQ ID NO: 77479 - RNA, 32 nt, Homo Sapiens
agccugggcaagauggcaagaccuuguuucug

SEQ ID NO: 77480 - RNA, 32 nt, Homo Sapiens
uuugcuacuauaagggaauucuggccacccug

SEQ ID NO: 77481 - RNA, 32 nt, Homo Sapiens
gcggggagcaggcugcugcugcugacucugug

SEQ ID NO: 77482 - RNA, 32 nt, Homo Sapiens
ucuguaaaauuuaaaaaauauauaugcauacc

SEQ ID NO: 77483 - RNA, 32 nt, Homo Sapiens
uuccuuccaaaauaacauguccaggucccuug

SEQ ID NO: 77484 - RNA, 32 nt, Homo Sapiens
cacaccccaagccucagaggauugucuuaccc

SEQ ID NO: 77485 - RNA, 32 nt, Homo Sapiens
uacuucaugauuuuugucgaguuuacuucaug

SEQ ID NO: 77486 - RNA, 32 nt, Homo Sapiens
cuggcucccucccccucagacccucacuuccu

SEQ ID NO: 77487 - RNA, 32 nt, Homo Sapiens
auucugacagaaaagacaaagguuacuaauug

SEQ ID NO: 77488 - RNA, 32 nt, Homo Sapiens
cuuuaauuguaucuuuugagaagggaauagua

SEQ ID NO: 77489 - RNA, 32 nt, Homo Sapiens
gaucuuacagcuuuuacucuggaaccuuagcc

SEQ ID NO: 77490 - RNA, 32 nt, Homo Sapiens
gaacaauacgagguuggugcugaugggauuua

SEQ ID NO: 77491 - RNA, 32 nt, Homo Sapiens
aaccaacagguugccagccccggcgccacaca

SEQ ID NO: 77492 - RNA, 32 nt, Homo Sapiens
cucuuaagacugucuuugauugaugaguguuc

SEQ ID NO: 77493 - RNA, 32 nt, Homo Sapiens
ugcacguccugcgcgcagcugcaggcgacucc

SEQ ID NO: 77494 - RNA, 32 nt, Homo Sapiens
ucgccgggagugcucuggccuccggcaggaca

SEQ ID NO: 77495 - RNA, 32 nt, Homo Sapiens
auccuuuccccaaacgcaccccggcgauuuuu

SEQ ID NO: 77496 - RNA, 32 nt, Homo Sapiens
gugcuggcucugcugugaccaugcccgugacc

SEQ ID NO: 77497 - RNA, 32 nt, Homo Sapiens
ugucgacaauggcagcaucagcuccuaggagc

SEQ ID NO: 77498 - RNA, 32 nt, Homo Sapiens
auuuagauacuaguuuuggauuuuagacaguu

SEQ ID NO: 77499 - RNA, 32 nt, Homo Sapiens
aagcugguaaauaguuugguguugcucucauu

SEQ ID NO: 77500 - RNA, 32 nt, Homo Sapiens
auaucuggguuucuggcuucucuucaugggaa

SEQ ID NO: 77501 - RNA, 32 nt, Homo Sapiens
caccgcugccagcccagaguuacccucuaaag

SEQ ID NO: 77502 - RNA, 32 nt, Homo Sapiens
guuaauucaauacauggcugaaauuaccaaau

SEQ ID NO: 77503 - RNA, 30 nt, Homo Sapiens
uucccggcgaccgugccgcgggagcucgag

SEQ ID NO: 77504 - RNA, 31 nt, Homo Sapiens
auuacgucaacgcaacgucuaacuggacuuc

SEQ ID NO: 77505 - RNA, 32 nt, Homo Sapiens
cagugcaauuuaaagugaccuuagugaugcag

SEQ ID NO: 77506 - RNA, 32 nt, Homo Sapiens
gaacccugagagguguccaucuucuugcuguu

SEQ ID NO: 77507 - RNA, 32 nt, Homo Sapiens
aguguugccugccucauggcaguuggaucagc

SEQ ID NO: 77508 - RNA, 32 nt, Homo Sapiens
aggcccuggguucagggacuggcacucuacuc

SEQ ID NO: 77509 - RNA, 32 nt, Homo Sapiens
cacaucaaaucauggaguuaggucuucucuga

SEQ ID NO: 77510 - RNA, 32 nt, Homo Sapiens
ugcuuggggaggguggggcuuuuuguagaaac

SEQ ID NO: 77511 - RNA, 32 nt, Homo Sapiens
ucaguuuaaaaauuacuuucacauuuucuaag

SEQ ID NO: 77512 - RNA, 32 nt, Homo Sapiens
guucagaaggauuugcugcauugagacuugaa

SEQ ID NO: 77513 - RNA, 32 nt, Homo Sapiens
gucuucgccacgcgcccuccccugggcucgcg

SEQ ID NO: 77514 - RNA, 32 nt, Homo Sapiens
acuccucuucccaacuuccuccaggucauuuc

SEQ ID NO: 77515 - RNA, 32 nt, Homo Sapiens
cuugucagugguguaacuuggaggaagaugcu

SEQ ID NO: 77516 - RNA, 32 nt, Homo Sapiens
uuucucacagaggcauucugguaaaugaagcu

SEQ ID NO: 77517 - RNA, 32 nt, Homo Sapiens
cuugguuuuguuucucgaucuuuuguuuggag

SEQ ID NO: 77518 - RNA, 29 nt, Homo Sapiens
gcccagccuggucaacauggcaaaacccu

SEQ ID NO: 77519 - RNA, 32 nt, Homo Sapiens
ggcuauuuaccucaggggccaagcuucccgug

SEQ ID NO: 77520 - RNA, 32 nt, Homo Sapiens
auuuguuuuuauuuguauuuuucugcuuauua

SEQ ID NO: 77521 - RNA, 32 nt, Homo Sapiens
aggcacugcugagggggcgcgaggggaacgga

SEQ ID NO: 77522 - RNA, 32 nt, Homo Sapiens
gagauuuggcgcccacuuccaccucuucucuc

SEQ ID NO: 77523 - RNA, 32 nt, Homo Sapiens
gugcuaaguauuuuuuaaaugguuauguaagc

SEQ ID NO: 77524 - RNA, 32 nt, Homo Sapiens
uggccucccgcgguugggucaacauugcuggc

SEQ ID NO: 77525 - RNA, 32 nt, Homo Sapiens
caagugccuccagcugaccucuggcuccuguc

SEQ ID NO: 77526 - RNA, 32 nt, Homo Sapiens
uuguacuugaaguucuagccacagcaguuagg

SEQ ID NO: 77527 - RNA, 32 nt, Homo Sapiens
gucuggagggggguugugggggugugcccgcc

SEQ ID NO: 77528 - RNA, 28 nt, Homo Sapiens
uagcacaaggaagaccauuugaacucca

SEQ ID NO: 77529 - RNA, 30 nt, Homo Sapiens
gauacauuuggagacaaccguccggauuuu

SEQ ID NO: 77530 - RNA, 31 nt, Homo Sapiens
gaaucaguuaauaaaaucaucgcauucacug

SEQ ID NO: 77531 - RNA, 32 nt, Homo Sapiens
cauaucauuggagaaguauuuauuuucaaaua

SEQ ID NO: 77532 - RNA, 32 nt, Homo Sapiens
gauggccgccccgcugcccccagcgcucccug

SEQ ID NO: 77533 - RNA, 32 nt, Homo Sapiens
ccggggccgcguggccugcgggagcccauccc

SEQ ID NO: 77534 - RNA, 32 nt, Homo Sapiens
gucaacugucacuguuucuuccaaaagucaca

SEQ ID NO: 77535 - RNA, 32 nt, Homo Sapiens
cgccccggucucuccgucccgccccgagcacg

SEQ ID NO: 77536 - RNA, 32 nt, Homo Sapiens
uuacuaauucuauuucucuauguuuauucuag

SEQ ID NO: 77537 - RNA, 32 nt, Homo Sapiens
cgaaagguauugugacagauccacugggcugu

SEQ ID NO: 77538 - RNA, 32 nt, Homo Sapiens
acuaccaucucuacuaaaaauagaaacaaauu

SEQ ID NO: 77539 - RNA, 32 nt, Homo Sapiens
acugguaugauguauauuuaauuaaagcacac

SEQ ID NO: 77540 - RNA, 32 nt, Homo Sapiens
ccagcucucggccucggacccgggccgcgugu

SEQ ID NO: 77541 - RNA, 32 nt, Homo Sapiens
acuuaguccaaccaccugggaagccucucagu

SEQ ID NO: 77542 - RNA, 28 nt, Homo Sapiens
gggauggccuccugggcuaagggcagga

SEQ ID NO: 77543 - RNA, 32 nt, Homo Sapiens
guuuuuugagacggagucuugaucugucgccc

SEQ ID NO: 77544 - RNA, 32 nt, Homo Sapiens
guuuuuugagacggagucucgaucuguugccc

SEQ ID NO: 77545 - RNA, 32 nt, Homo Sapiens
cugcaucagagcccuuccuuucuugggggaug

SEQ ID NO: 77546 - RNA, 31 nt, Homo Sapiens
aaugugugaaacauccccucaggcugaagcc

SEQ ID NO: 77547 - RNA, 32 nt, Homo Sapiens
gaugcuucaaacaguguaaauccuauacugca

SEQ ID NO: 77548 - RNA, 32 nt, Homo Sapiens
uuuaaggggccugcccucaucaucaacgucuc

SEQ ID NO: 77549 - RNA, 32 nt, Homo Sapiens
aucaugcaguguacauuucagauaauuuccuu

SEQ ID NO: 77550 - RNA, 32 nt, Homo Sapiens
acauccaaggaguuauugaaaacuaucuuaaa

SEQ ID NO: 77551 - RNA, 32 nt, Homo Sapiens
aagccuguggaggacuguuucuuccaaaaguu

SEQ ID NO: 77552 - RNA, 32 nt, Homo Sapiens
ucugauucucuuaggugucauguucuuuuuuc

SEQ ID NO: 77553 - RNA, 32 nt, Homo Sapiens
caaaagggauuugaacaaguaagagguuaugc

SEQ ID NO: 77554 - RNA, 32 nt, Homo Sapiens
cacaaagacauuacaguuuuuguuccugcuug

SEQ ID NO: 77555 - RNA, 32 nt, Homo Sapiens
caggccccgcggcugccggguccucgccacgu

SEQ ID NO: 77556 - RNA, 32 nt, Homo Sapiens
cacagacgcguucugaggguggcugcccgcuu

SEQ ID NO: 77557 - RNA, 28 nt, Homo Sapiens
auggugcuguucucuauguguuugcagu

SEQ ID NO: 77558 - RNA, 32 nt, Homo Sapiens
gggcccaggaccagaaucgcugccuccuuucc

SEQ ID NO: 77559 - RNA, 32 nt, Homo Sapiens
ccuccucuucucggaggccucccuuuccaagc

SEQ ID NO: 77560 - RNA, 32 nt, Homo Sapiens
gucgggggucuucgcggcgcucaccucggcuc

SEQ ID NO: 77561 - RNA, 32 nt, Homo Sapiens
gacaaacacacaggcuuccuaccugcagcuuc

SEQ ID NO: 77562 - RNA, 32 nt, Homo Sapiens
uauauacacaaauauguauuuguuaugaggua

SEQ ID NO: 77563 - RNA, 32 nt, Homo Sapiens
ucuggaugucugucacaggcggagagauuaac

SEQ ID NO: 77564 - RNA, 32 nt, Homo Sapiens
acaaggcccauacuggcccccaucugaaccca

SEQ ID NO: 77565 - RNA, 32 nt, Homo Sapiens
aaacugucaaggaauucagagcauuggguacu

SEQ ID NO: 77566 - RNA, 32 nt, Homo Sapiens
ggccggccaggcagcgcgauccugcggcgucu

SEQ ID NO: 77567 - RNA, 32 nt, Homo Sapiens
uguugcuuaugucuugccaugaauuucaaaau

SEQ ID NO: 77568 - RNA, 32 nt, Homo Sapiens
cauaagaauuuauuuucuuuugugggguguaa

SEQ ID NO: 77569 - RNA, 32 nt, Homo Sapiens
gacugcgggaaugagggagucagauaaagaac

SEQ ID NO: 77570 - RNA, 32 nt, Homo Sapiens
gacucugccagcaucuuugaccucugacucug

SEQ ID NO: 77571 - RNA, 32 nt, Homo Sapiens
gcuugaaucuguuccuccucgaaugacccugu

SEQ ID NO: 77572 - RNA, 32 nt, Homo Sapiens
gcgagucccugcggguuaggggcccccucugg

SEQ ID NO: 77573 - RNA, 32 nt, Homo Sapiens
cgcccaggaccugcgagugugcaugcuuagcc

SEQ ID NO: 77574 - RNA, 32 nt, Homo Sapiens
aagaagaacuguaaugcuguuuuggaaucauc

SEQ ID NO: 77575 - RNA, 32 nt, Homo Sapiens
uccauguucagcagaguauuuuaauuauauuu

SEQ ID NO: 77576 - RNA, 32 nt, Homo Sapiens
gagucacuuugggcuuccugucccaacuugug

SEQ ID NO: 77577 - RNA, 32 nt, Homo Sapiens
ucuacuaaaaauacaaaaauuaucugggcaug

SEQ ID NO: 77578 - RNA, 32 nt, Homo Sapiens
ugugaagggagcaauuccauccagucucccgg

SEQ ID NO: 77579 - RNA, 32 nt, Homo Sapiens
gaggccgugggaagagaagcacgcccaggggg

SEQ ID NO: 77580 - RNA, 32 nt, Homo Sapiens
acccuuccaggucacuuggagcagccaguaau

SEQ ID NO: 77581 - RNA, 32 nt, Homo Sapiens
cauggaugauuacuguaugagacagaggggac

SEQ ID NO: 77582 - RNA, 32 nt, Homo Sapiens
gccccgcggaagccccgccgcgccaugucuuc

SEQ ID NO: 77583 - RNA, 32 nt, Homo Sapiens
cugauuuuacuuucccaucucaaaaacgugug

SEQ ID NO: 77584 - RNA, 32 nt, Homo Sapiens
aagacacaccaggacgugacucccucuccucu

SEQ ID NO: 77585 - RNA, 32 nt, Homo Sapiens
cuguucuguauauaaaaagcauuacaucugug

SEQ ID NO: 77586 - RNA, 32 nt, Homo Sapiens
uguuagccacugcagcugggaccauucugaca

SEQ ID NO: 77587 - RNA, 32 nt, Homo Sapiens
cugacuucucaaaggacaaucggauacauauc

SEQ ID NO: 77588 - RNA, 32 nt, Homo Sapiens
cuccaacaugcccugcccuggcugggacuagg

SEQ ID NO: 77589 - RNA, 32 nt, Homo Sapiens
ucagcuacaaugaaaugcucauuaacagaauc

SEQ ID NO: 77590 - RNA, 32 nt, Homo Sapiens
aggccuccgccagcuucgacggcugggccacc

SEQ ID NO: 77591 - RNA, 32 nt, Homo Sapiens
augcggcguaccuggcccggcgcggcgacugc

SEQ ID NO: 77592 - RNA, 32 nt, Homo Sapiens
caguuucaaagucuuucaagguuuggcuauau

SEQ ID NO: 77593 - RNA, 32 nt, Homo Sapiens
cacuaaggagagagguuaagauggagucacag

SEQ ID NO: 77594 - RNA, 32 nt, Homo Sapiens
aaucuucaacuggcagagcaccuagcuucucu

SEQ ID NO: 77595 - RNA, 32 nt, Homo Sapiens
caggauuaaaaguuuuuaaaaauaugguagaa

SEQ ID NO: 77596 - RNA, 32 nt, Homo Sapiens
aaugcuguuguaaauugaauuuaaagugguau

SEQ ID NO: 77597 - RNA, 32 nt, Homo Sapiens
uuuuacccaauccaauuuuagcacucaaguuc

SEQ ID NO: 77598 - RNA, 32 nt, Homo Sapiens
auggcucugcgguuccaggagaacuguuugug

SEQ ID NO: 77599 - RNA, 32 nt, Homo Sapiens
aggcugccagauguuucuggcuccucacgugu

SEQ ID NO: 77600 - RNA, 32 nt, Homo Sapiens
uuguguuguucccugcuguccuccguauuacg

SEQ ID NO: 77601 - RNA, 32 nt, Homo Sapiens
ccuggaggccccaagccauguuccccaguuca

SEQ ID NO: 77602 - RNA, 32 nt, Homo Sapiens
aaggacaaagagcaaaauacuauuacaauuua

SEQ ID NO: 77603 - RNA, 32 nt, Homo Sapiens
aaaauacaaaaauuagcugggugugguggcgu

SEQ ID NO: 77604 - RNA, 32 nt, Homo Sapiens
aaaauacaaaaauuagcugggcgugguggugu

SEQ ID NO: 77605 - RNA, 32 nt, Homo Sapiens
uaaggcuuuccuugguauuuggcacccaagcc

SEQ ID NO: 77606 - RNA, 32 nt, Homo Sapiens
gagcaaggcuuuucucuguuuccaguaaucgg

SEQ ID NO: 77607 - RNA, 32 nt, Homo Sapiens
ucaccacaaaaccugauguuuuaaaugugcuu

SEQ ID NO: 77608 - RNA, 32 nt, Homo Sapiens
ucaaccuguguuucuuuuuuuacugaggaguu

SEQ ID NO: 77609 - RNA, 32 nt, Homo Sapiens
cugaggcgcucagccgcacugcacugugggaa

SEQ ID NO: 77610 - RNA, 32 nt, Homo Sapiens
augcaugugucugacggauaguaguaucuuuc

SEQ ID NO: 77611 - RNA, 32 nt, Homo Sapiens
gagacagugucugugaugauguuuuggcccga

SEQ ID NO: 77612 - RNA, 31 nt, Homo Sapiens
aguucuccagcuucagcucaacucacagcuu

SEQ ID NO: 77613 - RNA, 32 nt, Homo Sapiens
uccaagaucaucucaugggaaaaacggcauag

SEQ ID NO: 77614 - RNA, 32 nt, Homo Sapiens
cuguacuggggaggugcccacccagcuacugg

SEQ ID NO: 77615 - RNA, 32 nt, Homo Sapiens
agccgccccgccgagucgcagugucgggggcu

SEQ ID NO: 77616 - RNA, 32 nt, Homo Sapiens
ugucauucucaacgcuucuccuuucucuccac

SEQ ID NO: 77617 - RNA, 32 nt, Homo Sapiens
caugauagaaaguuaagccagaaggacaaagg

SEQ ID NO: 77618 - RNA, 32 nt, Homo Sapiens
agcuuuaggacugacauuucuaucuugaauuu

SEQ ID NO: 77619 - RNA, 32 nt, Homo Sapiens
ggagcucuggggcucauacuucuuauaauucc

SEQ ID NO: 77620 - RNA, 32 nt, Homo Sapiens
cugagguuuuguuuuuuuuuuaaaggaaaugc

SEQ ID NO: 77621 - RNA, 32 nt, Homo Sapiens
auaagacaaaaauaauaguuuuagugaggaug

SEQ ID NO: 77622 - RNA, 32 nt, Homo Sapiens
ccggggcgccgacgaggagugcaggacucagg

SEQ ID NO: 77623 - RNA, 32 nt, Homo Sapiens
gaacauugcuaccauaauuaagaguagauuug

SEQ ID NO: 77624 - RNA, 32 nt, Homo Sapiens
ucuccaguucccuggacccccagcccaagcuc

SEQ ID NO: 77625 - RNA, 32 nt, Homo Sapiens
ggaccccggcgcccagcccggagccguaaccu

SEQ ID NO: 77626 - RNA, 32 nt, Homo Sapiens
uggaagugacagcgggagccccugcccucugu

SEQ ID NO: 77627 - RNA, 32 nt, Homo Sapiens
uagcuuugaaugugucccaaaacagcuuccuc

SEQ ID NO: 77628 - RNA, 32 nt, Homo Sapiens
cuaaguaauaauauauauuuacauugaagcua

SEQ ID NO: 77629 - RNA, 32 nt, Homo Sapiens
ugccaaggacagcgagugaggcugggagcuuc

SEQ ID NO: 77630 - RNA, 32 nt, Homo Sapiens
gccaggcguucccaccucuccuccuugggagg

SEQ ID NO: 77631 - RNA, 32 nt, Homo Sapiens
cgacugugguggcaggaccgucaggaggccau

SEQ ID NO: 77632 - RNA, 31 nt, Homo Sapiens
ggcgggcuauguugauugccccgccggggcc

SEQ ID NO: 77633 - RNA, 32 nt, Homo Sapiens
cucaggaggcgccccgcgaccggcgcgaugag

SEQ ID NO: 77634 - RNA, 32 nt, Homo Sapiens
uauagagaagugcagaauauucaccagaucug

SEQ ID NO: 77635 - RNA, 32 nt, Homo Sapiens
uuucuucuuuauguuucuuuuacuuauugcug

SEQ ID NO: 77636 - RNA, 32 nt, Homo Sapiens
uguaaccaacaagcuuucagauuuauggagaa

SEQ ID NO: 77637 - RNA, 32 nt, Homo Sapiens
cgcccuauuucugcaaguagaacucacugccu

SEQ ID NO: 77638 - RNA, 32 nt, Homo Sapiens
cucucuuuucuuuccaaauaucccaggaagug

SEQ ID NO: 77639 - RNA, 32 nt, Homo Sapiens
ucaggagugcacagcuccugcugauguauuuu

SEQ ID NO: 77640 - RNA, 31 nt, Homo Sapiens
ccccuacaagaggacuuugguucuaauggga

SEQ ID NO: 77641 - RNA, 32 nt, Homo Sapiens
ugucaauauuuuacuguaauuuauguucuuau

SEQ ID NO: 77642 - RNA, 32 nt, Homo Sapiens
gcgcccugguuuguuuuccccaguuguaauag

SEQ ID NO: 77643 - RNA, 32 nt, Homo Sapiens
ggggcaaagggcucaagggugaggaggccagu

SEQ ID NO: 77644 - RNA, 32 nt, Homo Sapiens
gugagcagcggcuggucucuucccuccaccug

SEQ ID NO: 77645 - RNA, 32 nt, Homo Sapiens
uugcucccgcaaguuuccuucucuggagcuuc

SEQ ID NO: 77646 - RNA, 32 nt, Homo Sapiens
cggccaguucccucuccaauguccggugccau

SEQ ID NO: 77647 - RNA, 32 nt, Homo Sapiens
uauucaagaaugcuuauucucuuagaugauac

SEQ ID NO: 77648 - RNA, 32 nt, Homo Sapiens
auaugauagggaacaggugcugaugggcccaa

SEQ ID NO: 77649 - RNA, 32 nt, Homo Sapiens
uuuguaauauggaaaucuuuuacauuuuuccu

SEQ ID NO: 77650 - RNA, 32 nt, Homo Sapiens
ccgcaaccuccuccccaccucccaucucuccu

SEQ ID NO: 77651 - RNA, 32 nt, Homo Sapiens
uuugaaaucaguauuuuauauuuuccuguugu

SEQ ID NO: 77652 - RNA, 32 nt, Homo Sapiens
ggaagggcagaggucaccaggcuggucuacca

SEQ ID NO: 77653 - RNA, 32 nt, Homo Sapiens
uccaauauuuaguauuguagucuucauagaaa

SEQ ID NO: 77654 - RNA, 32 nt, Homo Sapiens
aauugcaccucauuuuuaaccaaaaaaucauu

SEQ ID NO: 77655 - RNA, 32 nt, Homo Sapiens
uggaaggccaugaaccaggcugucgaagcauu

SEQ ID NO: 77656 - RNA, 32 nt, Homo Sapiens
aagucuauacacauuucuuuggcuuuucuaaa

SEQ ID NO: 77657 - RNA, 32 nt, Homo Sapiens
agccaguguucccuccaugggaccuaaagaca

SEQ ID NO: 77658 - RNA, 32 nt, Homo Sapiens
ucucuauaggucagguuuuccaaacauauuua

SEQ ID NO: 77659 - RNA, 32 nt, Homo Sapiens
uuuuuuauuuuuguauuuuuucgagauggagu

SEQ ID NO: 77660 - RNA, 32 nt, Homo Sapiens
uuaaggaaugaaccucuuuuguuggggaaggg

SEQ ID NO: 77661 - RNA, 32 nt, Homo Sapiens
ccugagcucaggugauccaccugccuugacuu

SEQ ID NO: 77662 - RNA, 32 nt, Homo Sapiens
cagagcggcucccgggcggcgccgagcggagc

SEQ ID NO: 77663 - RNA, 32 nt, Homo Sapiens
acuuugaagaaaaaugugauugagugauauug

SEQ ID NO: 77664 - RNA, 32 nt, Homo Sapiens
cucugggcagagaaacaaagcucuauaugcac

SEQ ID NO: 77665 - RNA, 32 nt, Homo Sapiens
guaauuagcaaugaggcuguauuuucauucug

SEQ ID NO: 77666 - RNA, 32 nt, Homo Sapiens
uacauaacacugggccuuacugcaugugguuc

SEQ ID NO: 77667 - RNA, 30 nt, Homo Sapiens
aauccuaaggcccccacccaucuuaacaga

SEQ ID NO: 77668 - RNA, 31 nt, Homo Sapiens
aggagugcuccccagaaccagaggagggugg

SEQ ID NO: 77669 - RNA, 32 nt, Homo Sapiens
uguuccuggcuuucagaaaaccaacgccaaga

SEQ ID NO: 77670 - RNA, 32 nt, Homo Sapiens
gccuuccggcccggcgcccgauuuccgccuuc

SEQ ID NO: 77671 - RNA, 32 nt, Homo Sapiens
gagaaagagaaaacuuucuucccucuacuaaa

SEQ ID NO: 77672 - RNA, 32 nt, Homo Sapiens
uucuucagacaucagucaauggaagaaauggc

SEQ ID NO: 77673 - RNA, 32 nt, Homo Sapiens
ccccagccaguggcagaacugggucucucagc

SEQ ID NO: 77674 - RNA, 32 nt, Homo Sapiens
cuucccuguuuauguuuguuugguguuuagga

SEQ ID NO: 77675 - RNA, 32 nt, Homo Sapiens
cgugaaauggcaucugucaucuuuagcgccac

SEQ ID NO: 77676 - RNA, 32 nt, Homo Sapiens
gaguguguuauaaaauaauguacugaauucuu

SEQ ID NO: 77677 - RNA, 32 nt, Homo Sapiens
aagugcuaaaacaaaaucaggugcuuuuuuaa

SEQ ID NO: 77678 - RNA, 32 nt, Homo Sapiens
augugggcaacaguggaggaccaagagaacag

SEQ ID NO: 77679 - RNA, 32 nt, Homo Sapiens
ggccucugccagccucuggcugcacggucagg

SEQ ID NO: 77680 - RNA, 32 nt, Homo Sapiens
aaagauugacagaaaaucaccagaagccuaga

SEQ ID NO: 77681 - RNA, 32 nt, Homo Sapiens
cugauauggucuucuuuuucucccaacuucgc

SEQ ID NO: 77682 - RNA, 32 nt, Homo Sapiens
cugggggcuccuucuccuuuccuggggcugag

SEQ ID NO: 77683 - RNA, 32 nt, Homo Sapiens
gaaaagagaacaaauuugaauuuguaauaaua

SEQ ID NO: 77684 - RNA, 32 nt, Homo Sapiens
uccucauccucaucaucaucuaccuccaggga

SEQ ID NO: 77685 - RNA, 32 nt, Homo Sapiens
uaacucggguugaaacuuuuggcuuucggggg

SEQ ID NO: 77686 - RNA, 32 nt, Homo Sapiens
ccuacgcccggcaggccuccagccaggagugc

SEQ ID NO: 77687 - RNA, 32 nt, Homo Sapiens
ugcuagcgucccuucauuuucccacaaguuug

SEQ ID NO: 77688 - RNA, 32 nt, Homo Sapiens
caagagagcagcaaggucuugcucuccuaggu

SEQ ID NO: 77689 - RNA, 30 nt, Homo Sapiens
acagaugagaagcugugagucuccaggauu

SEQ ID NO: 77690 - RNA, 32 nt, Homo Sapiens
cucaugcugucaugccagaaguggaauucccu

SEQ ID NO: 77691 - RNA, 32 nt, Homo Sapiens
cccgggugccuguccuugcccagcgccaccag

SEQ ID NO: 77692 - RNA, 32 nt, Homo Sapiens
auuccuuuaaauucuccaacccaaaguauucu

SEQ ID NO: 77693 - RNA, 32 nt, Homo Sapiens
cuuauuuugaaaucuuaaaaaucagguuacac

SEQ ID NO: 77694 - RNA, 32 nt, Homo Sapiens
aagugggaggaggggugccaguccucccuuuu

SEQ ID NO: 77695 - RNA, 32 nt, Homo Sapiens
cagccuacaaauagcucauuagaugacauuca

SEQ ID NO: 77696 - RNA, 32 nt, Homo Sapiens
aaguggaaaugaauucacaccauggcagcuuu

SEQ ID NO: 77697 - RNA, 32 nt, Homo Sapiens
uucuuggagaccaagccuucacuacacgugcu

SEQ ID NO: 77698 - RNA, 32 nt, Homo Sapiens
gucuccaaaaauaacaaaaaauaaauacaugc

SEQ ID NO: 77699 - RNA, 32 nt, Homo Sapiens
ugucugagauaaauaauauuguaaucuccaag

SEQ ID NO: 77700 - RNA, 32 nt, Homo Sapiens
uccuucccgcggccgugagggagaccgcggcu

SEQ ID NO: 77701 - RNA, 32 nt, Homo Sapiens
cuggauagagggaucagaaaugacugugucau

SEQ ID NO: 77702 - RNA, 32 nt, Homo Sapiens
ugcucucuccgagggguggaaugccgcugucu

SEQ ID NO: 77703 - RNA, 32 nt, Homo Sapiens
gcggcugcgcagacuggcgcgcgcggacgguc

SEQ ID NO: 77704 - RNA, 32 nt, Homo Sapiens
ggagcugcuguggucagcauggcuggcccucu

SEQ ID NO: 77705 - RNA, 32 nt, Homo Sapiens
uuauuauuuuuccauuaaaaauaauagcuggc

SEQ ID NO: 77706 - RNA, 32 nt, Homo Sapiens
auccucgcgggaccccacccucucccagccug

SEQ ID NO: 77707 - RNA, 32 nt, Homo Sapiens
gaagcggauggcaacuuaguuuccgagcgaau

SEQ ID NO: 77708 - RNA, 31 nt, Homo Sapiens
uuauccuucaaugauugauuauacuaagaau

SEQ ID NO: 77709 - RNA, 32 nt, Homo Sapiens
ccccagcccucccgcccagcccgcagcccccu

SEQ ID NO: 77710 - RNA, 31 nt, Homo Sapiens
aaaaucuguaacauccuuggaguccauggac

SEQ ID NO: 77711 - RNA, 32 nt, Homo Sapiens
ucuuaaggacaaaaucgugacucugauaccaa

SEQ ID NO: 77712 - RNA, 32 nt, Homo Sapiens
aucuccacuccaggucugcaguagggaauuua

SEQ ID NO: 77713 - RNA, 32 nt, Homo Sapiens
ugguacucccuguguuuacuggcacuccaugc

SEQ ID NO: 77714 - RNA, 32 nt, Homo Sapiens
cacaccacaaggggcucugcucuucugucugg

SEQ ID NO: 77715 - RNA, 32 nt, Homo Sapiens
guuuuauauaucuaugcauacauauauacaca

SEQ ID NO: 77716 - RNA, 32 nt, Homo Sapiens
uuuaugacacagagaccuuugcuuacguuuuc

SEQ ID NO: 77717 - RNA, 32 nt, Homo Sapiens
ccguggguuccgaaaaucccuggauuuagacu

SEQ ID NO: 77718 - RNA, 32 nt, Homo Sapiens
acccgugccccgagugcggcgaggccuucagc

SEQ ID NO: 77719 - RNA, 32 nt, Homo Sapiens
agcuugucaccaucugcauuuucuccgugggu

SEQ ID NO: 77720 - RNA, 32 nt, Homo Sapiens
ugaagguuauuuauuagaugacuaucucaaau

SEQ ID NO: 77721 - RNA, 32 nt, Homo Sapiens
agcgcccaaugagagggcgggaccuguguucc

SEQ ID NO: 77722 - RNA, 29 nt, Homo Sapiens
gggaccugggggcuccugccggauccaug

SEQ ID NO: 77723 - RNA, 32 nt, Homo Sapiens
uuuuuauccauuaucccuggaacuuauuguga

SEQ ID NO: 77724 - RNA, 32 nt, Homo Sapiens
cccagcccgacaggugagcgccaggccagccg

SEQ ID NO: 77725 - RNA, 32 nt, Homo Sapiens
gagaugauuggcgaguucccagaccugcaccg

SEQ ID NO: 77726 - RNA, 32 nt, Homo Sapiens
ggauggguuugaagaacucaucacucaucacu

SEQ ID NO: 77727 - RNA, 32 nt, Homo Sapiens
ggcauuuuaaagcagaucuuuacuaaacaggu

SEQ ID NO: 77728 - RNA, 32 nt, Homo Sapiens
cauguuucugguggacuaaauuguguaucugg

SEQ ID NO: 77729 - RNA, 32 nt, Homo Sapiens
aguaguaaccaccuacaauagcuuucaauuuc

SEQ ID NO: 77730 - RNA, 32 nt, Homo Sapiens
ccaucaagauugggaaggaaauuaaaacugaa

SEQ ID NO: 77731 - RNA, 32 nt, Homo Sapiens
gcccaauugccuguugccuuucugcagguguu

SEQ ID NO: 77732 - RNA, 32 nt, Homo Sapiens
aaaagcagaguuuugugcaagcacucacugug

SEQ ID NO: 77733 - RNA, 32 nt, Homo Sapiens
aacuaauuuuuggugcugauuggcaugucugg

SEQ ID NO: 77734 - RNA, 32 nt, Homo Sapiens
ucagaaaagccggcaggccagaaggacccacc

SEQ ID NO: 77735 - RNA, 32 nt, Homo Sapiens
acuacggaauccacauguggaccaugggaagu

SEQ ID NO: 77736 - RNA, 32 nt, Homo Sapiens
aaaucaaauggcauuuggccaggcuggcuuua

SEQ ID NO: 77737 - RNA, 32 nt, Homo Sapiens
cucuccccggcccgauccgcccgccggcuccc

SEQ ID NO: 77738 - RNA, 32 nt, Homo Sapiens
cuuuaggaaggggagcagcggcugggagugag

SEQ ID NO: 77739 - RNA, 32 nt, Homo Sapiens
aggcagccuggagcugacggcgccgggcugcg

SEQ ID NO: 77740 - RNA, 32 nt, Homo Sapiens
gagguuuuugguuuuucauugaugauaaacga

SEQ ID NO: 77741 - RNA, 32 nt, Homo Sapiens
aaacauaaauguugcagugaaaaaagaagcua

SEQ ID NO: 77742 - RNA, 32 nt, Homo Sapiens
cuugcuggaucagcugacgccacacagaugga

SEQ ID NO: 77743 - RNA, 32 nt, Homo Sapiens
gaaacuucgacacuggaaggaacgagaauaaa

SEQ ID NO: 77744 - RNA, 32 nt, Homo Sapiens
uuggggaggaggagagacgcaaggccgucaga

SEQ ID NO: 77745 - RNA, 32 nt, Homo Sapiens
uagccugugcccuccccuuacccaggcuuagg

SEQ ID NO: 77746 - RNA, 32 nt, Homo Sapiens
ugugagauuuauggaaauacacuaaaugagua

SEQ ID NO: 77747 - RNA, 32 nt, Homo Sapiens
aucuacacuuuuagucacuuugaaauauaaaa

SEQ ID NO: 77748 - RNA, 29 nt, Homo Sapiens
cauaaauaaaguuuuguguugauuuguga

SEQ ID NO: 77749 - RNA, 32 nt, Homo Sapiens
ccuccccgugcagugcugggugugcgugugcg

SEQ ID NO: 77750 - RNA, 32 nt, Homo Sapiens
gaggggauccuggggcuuugccugcaggagcc

SEQ ID NO: 77751 - RNA, 32 nt, Homo Sapiens
cccauccgcccggugcacccggggccgcgcuc

SEQ ID NO: 77752 - RNA, 32 nt, Homo Sapiens
uuuuaagucugcugauugggcagggaaaacau

SEQ ID NO: 77753 - RNA, 32 nt, Homo Sapiens
uauuuaguaucuuuuuauucagcucauggacu

SEQ ID NO: 77754 - RNA, 32 nt, Homo Sapiens
uuguuuguuuguuuuucuuaaagaauauuuuc

SEQ ID NO: 77755 - RNA, 28 nt, Homo Sapiens
uagccuugcucaaagauguguuuugugg

SEQ ID NO: 77756 - RNA, 32 nt, Homo Sapiens
gcgcuccgaguggccuuggaggacggucaagg

SEQ ID NO: 77757 - RNA, 32 nt, Homo Sapiens
agcgggggguuguguaugggacagugggcaac

SEQ ID NO: 77758 - RNA, 32 nt, Homo Sapiens
aggguauaaaaugacaucccauuaauuauauu

SEQ ID NO: 77759 - RNA, 29 nt, Homo Sapiens
uccccgggguguuucaguggacaggaggc

SEQ ID NO: 77760 - RNA, 32 nt, Homo Sapiens
ccagaccugcgguccaggcaggcacugggcug

SEQ ID NO: 77761 - RNA, 32 nt, Homo Sapiens
uuggauuuucauauauuuaacuuugcaaaaag

SEQ ID NO: 77762 - RNA, 32 nt, Homo Sapiens
gacaagaguugcuuguccugcugugggcuggg

SEQ ID NO: 77763 - RNA, 32 nt, Homo Sapiens
gguggggagggagggcgcaggcggcgggugcg

SEQ ID NO: 77764 - RNA, 32 nt, Homo Sapiens
gauaaucugaagcucacaaagaugaagugacu

SEQ ID NO: 77765 - RNA, 32 nt, Homo Sapiens
aggcagcgcuggcggcggggcuggggccacug

SEQ ID NO: 77766 - RNA, 32 nt, Homo Sapiens
aacagucaagcauucugauuuauuuucuucau

SEQ ID NO: 77767 - RNA, 32 nt, Homo Sapiens
ugugagacaacuggguuauauaaagaaauacu

SEQ ID NO: 77768 - RNA, 32 nt, Homo Sapiens
uguaugcaugugaacacacacacacacacaca

SEQ ID NO: 77769 - RNA, 32 nt, Homo Sapiens
ccuucuaacaauaccaauagcuaggacccggc

SEQ ID NO: 77770 - RNA, 32 nt, Homo Sapiens
gaauagguucuuuuuucuuuaaugucuccgua

SEQ ID NO: 77771 - RNA, 30 nt, Homo Sapiens
gaaugcuucugcucaaggugcuucugccac

SEQ ID NO: 77772 - RNA, 32 nt, Homo Sapiens
guguuugcuuugcuuuuugacaacugcuucuc

SEQ ID NO: 77773 - RNA, 32 nt, Homo Sapiens
gaugccaaggaccugaagggcuacuggaggga

SEQ ID NO: 77774 - RNA, 32 nt, Homo Sapiens
aagaacugagaagggaggcaugaggcgugagg

SEQ ID NO: 77775 - RNA, 32 nt, Homo Sapiens
acuuuggaaugggaacuagaaagacuaagcag

SEQ ID NO: 77776 - RNA, 32 nt, Homo Sapiens
gucacacaccaggaggacuggaugcuggggag

SEQ ID NO: 77777 - RNA, 32 nt, Homo Sapiens
guauucuuccuggcaagauacccauuaagcau

SEQ ID NO: 77778 - RNA, 32 nt, Homo Sapiens
uagcgggcacgcgguuccuuuuugcgagcuuu

SEQ ID NO: 77779 - RNA, 32 nt, Homo Sapiens
acaggcgaaagaggaugcugcauugcgaggac

SEQ ID NO: 77780 - RNA, 32 nt, Homo Sapiens
uucuuccugagauuucuauaaauauaaaugua

SEQ ID NO: 77781 - RNA, 32 nt, Homo Sapiens
gcguagaugggggccgggcggcggcggagcgg

SEQ ID NO: 77782 - RNA, 32 nt, Homo Sapiens
cuguguaauaggauccuuggaacuuuuuacaa

SEQ ID NO: 77783 - RNA, 32 nt, Homo Sapiens
uaauuuaacauguuuuuaaauuggaccuucuu

SEQ ID NO: 77784 - RNA, 32 nt, Homo Sapiens
aucuuccuucagcuccuccucuuaggagcuca

SEQ ID NO: 77785 - RNA, 32 nt, Homo Sapiens
ugggcuuugguuugcuggccugcgggcuccua

SEQ ID NO: 77786 - RNA, 32 nt, Homo Sapiens
accucugagcaccccccucccccucccucaau

SEQ ID NO: 77787 - RNA, 32 nt, Homo Sapiens
aguggagaggaagagggagugaggcccugugg

SEQ ID NO: 77788 - RNA, 32 nt, Homo Sapiens
uagauucgcuggaagcagcuggaggcuccagu

SEQ ID NO: 77789 - RNA, 32 nt, Homo Sapiens
caggacugggucuggaaacugcggaaggcagc

SEQ ID NO: 77790 - RNA, 32 nt, Homo Sapiens
cuguuuuguuggaaauguagguuuuagaugua

SEQ ID NO: 77791 - RNA, 32 nt, Homo Sapiens
cuggcaaagcaucucugcugguguucaucaga

SEQ ID NO: 77792 - RNA, 32 nt, Homo Sapiens
aguuccacuucuccccgcagaccuagguaaga

SEQ ID NO: 77793 - RNA, 32 nt, Homo Sapiens
uacaaagauaaggauggucacagugauuucuc

SEQ ID NO: 77794 - RNA, 32 nt, Homo Sapiens
gcccagccgggcgcucgcgccaggacuucccc

SEQ ID NO: 77795 - RNA, 32 nt, Homo Sapiens
gcauuucagaagaaaucucuuuguauugcugu

SEQ ID NO: 77796 - RNA, 32 nt, Homo Sapiens
gagagccacggcgggggcuggggcgaguggcc

SEQ ID NO: 77797 - RNA, 32 nt, Homo Sapiens
uagccucugucccagggcgauuuauccacuug

SEQ ID NO: 77798 - RNA, 32 nt, Homo Sapiens
gacuguaaacacaucguugaaguaaagcgauu

SEQ ID NO: 77799 - RNA, 32 nt, Homo Sapiens
ugcagcugcuccuccacgcgggcccgcugggc

SEQ ID NO: 77800 - RNA, 32 nt, Homo Sapiens
agccggcccaggcucggugaggaggcaagguu

SEQ ID NO: 77801 - RNA, 32 nt, Homo Sapiens
gucuggagacgcgccccccaccccgcgcuccc

SEQ ID NO: 77802 - RNA, 32 nt, Homo Sapiens
ggggaugggggcggggacugggggcgaagggg

SEQ ID NO: 77803 - RNA, 32 nt, Homo Sapiens
ggugagaaugggucuguaauuucucuaagaug

SEQ ID NO: 77804 - RNA, 32 nt, Homo Sapiens
gagcuccggagcgcccucuccucacuuccagg

SEQ ID NO: 77805 - RNA, 32 nt, Homo Sapiens
ccucccacauguacaguuccccugccucuugc

SEQ ID NO: 77806 - RNA, 32 nt, Homo Sapiens
aagcaugaaaugaaagguugcauaucaugcau

SEQ ID NO: 77807 - RNA, 32 nt, Homo Sapiens
cccaagacuacaggcacaugcgugccuggcuc

SEQ ID NO: 77808 - RNA, 32 nt, Homo Sapiens
auugcaacaaaagccagaauuguaaaugggau

SEQ ID NO: 77809 - RNA, 31 nt, Homo Sapiens
guugugaaauaaaaacuuaaauuguauauuu

SEQ ID NO: 77810 - RNA, 32 nt, Homo Sapiens
ggaagugaggagugugcacggaugcugaaugu

SEQ ID NO: 77811 - RNA, 32 nt, Homo Sapiens
acagagccauccacaaagacugaaagagguaa

SEQ ID NO: 77812 - RNA, 32 nt, Homo Sapiens
aacaaauaacugugaugcuauuucaaaggcau

SEQ ID NO: 77813 - RNA, 32 nt, Homo Sapiens
ucccgcgcauggcagaguggcuccucacagcc

SEQ ID NO: 77814 - RNA, 32 nt, Homo Sapiens
gucacagcagacaccugauacauggcggcugu

SEQ ID NO: 77815 - RNA, 32 nt, Homo Sapiens
cauucccugcccaccuucucccuccagcaacu

SEQ ID NO: 77816 - RNA, 32 nt, Homo Sapiens
ucucaaaagggaggggaggagaccucaguucc

SEQ ID NO: 77817 - RNA, 32 nt, Homo Sapiens
acaaggaagagacacaugugugcacuccugca

SEQ ID NO: 77818 - RNA, 32 nt, Homo Sapiens
ucuuuauuuuuccagcucccgguaaaacacaa

SEQ ID NO: 77819 - RNA, 32 nt, Homo Sapiens
aauuuuuuuuucugcaucugaaucugcaugau

SEQ ID NO: 77820 - RNA, 32 nt, Homo Sapiens
aguaagcucucguuugaggagacuaacaauuc

SEQ ID NO: 77821 - RNA, 32 nt, Homo Sapiens
cauaugcgugaacaaaagaaaagaggaaccca

SEQ ID NO: 77822 - RNA, 32 nt, Homo Sapiens
ucuuuuuguuuuuuacuagaaaauaguucagu

SEQ ID NO: 77823 - RNA, 32 nt, Homo Sapiens
aaaugauuauggaauuaaucagcaaauguaga

SEQ ID NO: 77824 - RNA, 32 nt, Homo Sapiens
cuuucccccugggaccaacagcagccagagca

SEQ ID NO: 77825 - RNA, 32 nt, Homo Sapiens
acuuuucuuguauuuaaacaaacaaugguagc

SEQ ID NO: 77826 - RNA, 32 nt, Homo Sapiens
uaacuauccuaacaagccuuggaccaaaugga

SEQ ID NO: 77827 - RNA, 32 nt, Homo Sapiens
uuuuuuggcacauggaucaacaaaaucggcaa

SEQ ID NO: 77828 - RNA, 32 nt, Homo Sapiens
cagggacugugucgggcuuggaccucaccuga

SEQ ID NO: 77829 - RNA, 32 nt, Homo Sapiens
ccaaccccgggcucggcggcggcggccagguc

SEQ ID NO: 77830 - RNA, 32 nt, Homo Sapiens
gccguccccgagcuccgcacagugcgccccag

SEQ ID NO: 77831 - RNA, 32 nt, Homo Sapiens
agcucccggccgcggcacagcagccccggcgc

SEQ ID NO: 77832 - RNA, 32 nt, Homo Sapiens
cccauggcacacucagcagaaggcacaaaccc

SEQ ID NO: 77833 - RNA, 32 nt, Homo Sapiens
ucuuccacccuuuuccucuuccgcugugcaac

SEQ ID NO: 77834 - RNA, 32 nt, Homo Sapiens
ggagucagcuaaggggugaauguucauaugcu

SEQ ID NO: 77835 - RNA, 32 nt, Homo Sapiens
ugucccauuuuagccaagcuuauuuaagauca

SEQ ID NO: 77836 - RNA, 32 nt, Homo Sapiens
gagggcacggcccgccagggcugggcaggcuc

SEQ ID NO: 77837 - RNA, 32 nt, Homo Sapiens
uggagaggaggauggaagggagggguccggca

SEQ ID NO: 77838 - RNA, 32 nt, Homo Sapiens
uaauuuggcugaacuuuuuuugaaagaauaug

SEQ ID NO: 77839 - RNA, 32 nt, Homo Sapiens
uucauuagguaacaaggaauuuuaucagaaau

SEQ ID NO: 77840 - RNA, 32 nt, Homo Sapiens
ggccccgcggagcgaugcugcugcuggcugcc

SEQ ID NO: 77841 - RNA, 32 nt, Homo Sapiens
augggcccaagccuccgcaucaacagacuggg

SEQ ID NO: 77842 - RNA, 32 nt, Homo Sapiens
cucaggugacgccacugcccccugcccaaucc

SEQ ID NO: 77843 - RNA, 32 nt, Homo Sapiens
uccaaggaagcccucuguugcaaccagauaug

SEQ ID NO: 77844 - RNA, 32 nt, Homo Sapiens
aaaacaaaacaaaauaaugcuuuucgaaauug

SEQ ID NO: 77845 - RNA, 32 nt, Homo Sapiens
ugguguccuguggcaccuccauccuccugccc

SEQ ID NO: 77846 - RNA, 32 nt, Homo Sapiens
cucacauccaucuccuucccagcucuccuuuu

SEQ ID NO: 77847 - RNA, 32 nt, Homo Sapiens
uauuuucuuguucauuuuuuuaugccaacaua

SEQ ID NO: 77848 - RNA, 32 nt, Homo Sapiens
gccccuggacuguguccagcugguuuggaguc

SEQ ID NO: 77849 - RNA, 32 nt, Homo Sapiens
ggccaaugagcgccucuuccuaggugcuggga

SEQ ID NO: 77850 - RNA, 32 nt, Homo Sapiens
uguagcagaauuacaagacaagaugaaggccc

SEQ ID NO: 77851 - RNA, 32 nt, Homo Sapiens
ccuuccugcucgccgcaccuccgggagccggg

SEQ ID NO: 77852 - RNA, 32 nt, Homo Sapiens
gacagagaggccugaaaaugugcaggaucaug

SEQ ID NO: 77853 - RNA, 32 nt, Homo Sapiens
caccgcgccuggccuuuuuuuuuuuuuuuuuu

SEQ ID NO: 77854 - RNA, 32 nt, Homo Sapiens
agaagagccacuaacucgugaccuccagccug

SEQ ID NO: 77855 - RNA, 32 nt, Homo Sapiens
ugacguggguggccagcgcgaugaacgccgca

SEQ ID NO: 77856 - RNA, 32 nt, Homo Sapiens
aaagguguuuuguuuucuuaauugauacuuuu

SEQ ID NO: 77857 - RNA, 32 nt, Homo Sapiens
accuaguccucaagguuaacaaacacaugaag

SEQ ID NO: 77858 - RNA, 31 nt, Homo Sapiens
gcucccugcuggucaccaccaagggcauuug

SEQ ID NO: 77859 - RNA, 32 nt, Homo Sapiens
cauacugaaaauccaauaaucagaaaaguaau

SEQ ID NO: 77860 - RNA, 32 nt, Homo Sapiens
aagcgcaguggggggcucucgcgguuggggaa

SEQ ID NO: 77861 - RNA, 32 nt, Homo Sapiens
accccuggccccagagcccccagcagggccau

SEQ ID NO: 77862 - RNA, 32 nt, Homo Sapiens
uguaagaaauaccauuucaggaaugaaaaaga

SEQ ID NO: 77863 - RNA, 31 nt, Homo Sapiens
agcgccgggcacugccgccucccucggucgc

SEQ ID NO: 77864 - RNA, 32 nt, Homo Sapiens
uucggaggagaagaggggcggagucacggcca

SEQ ID NO: 77865 - RNA, 32 nt, Homo Sapiens
ugcaauucgcccugcccagccauccucgguug

SEQ ID NO: 77866 - RNA, 32 nt, Homo Sapiens
cccgcaggugaagguucuuaaucuugacggcu

SEQ ID NO: 77867 - RNA, 32 nt, Homo Sapiens
gcauuuauuucuguucuaaccuauuacuguau

SEQ ID NO: 77868 - RNA, 32 nt, Homo Sapiens
agugacuagaccaaauaucaagaucauuuuga

SEQ ID NO: 77869 - RNA, 32 nt, Homo Sapiens
cuagcacagugccuugccuagaguaguaguau

SEQ ID NO: 77870 - RNA, 31 nt, Homo Sapiens
cuucugugaaacauggcgguaggcugggacc

SEQ ID NO: 77871 - RNA, 32 nt, Homo Sapiens
gaggagcuucagcagcgcuguugucccacagu

SEQ ID NO: 77872 - RNA, 32 nt, Homo Sapiens
cuccagcccaccggugacucagcccucacagc

SEQ ID NO: 77873 - RNA, 32 nt, Homo Sapiens
ucauuaaacauacauuaaaugucuguuagcau

SEQ ID NO: 77874 - RNA, 32 nt, Homo Sapiens
cguccccccguccccgucccuccaucccuguc

SEQ ID NO: 77875 - RNA, 32 nt, Homo Sapiens
ggguucagccuggccugcccgugcccugguga

SEQ ID NO: 77876 - RNA, 32 nt, Homo Sapiens
auggggcgugggggguuagagcaggaccacag

SEQ ID NO: 77877 - RNA, 32 nt, Homo Sapiens
agucaaaugcaaauggguuaaauaaaaugaga

SEQ ID NO: 77878 - RNA, 32 nt, Homo Sapiens
gccuucuccagagccggcacugucccggcaac

SEQ ID NO: 77879 - RNA, 32 nt, Homo Sapiens
cggcagcauggcggacgcagcuccucaacuag

SEQ ID NO: 77880 - RNA, 32 nt, Homo Sapiens
ugggggagccagggccugaagcaagcggaccc

SEQ ID NO: 77881 - RNA, 32 nt, Homo Sapiens
ccggagccgggcgagggcugggagcugggccg

SEQ ID NO: 77882 - RNA, 32 nt, Homo Sapiens
gguggggcggguggggggagccuggaacagug

SEQ ID NO: 77883 - RNA, 32 nt, Homo Sapiens
auaugcaguagugauauaaagaauuauaucca

SEQ ID NO: 77884 - RNA, 32 nt, Homo Sapiens
aagguggcuggagauggcugcugcucacccuc

SEQ ID NO: 77885 - RNA, 32 nt, Homo Sapiens
guacugcuaguaccuguaagcauuuuaggucc

SEQ ID NO: 77886 - RNA, 32 nt, Homo Sapiens
uggccagugucuuuuuucuguuguuguuguug

SEQ ID NO: 77887 - RNA, 32 nt, Homo Sapiens
aauguauaacaaguacuauuuacauaucugca

SEQ ID NO: 77888 - RNA, 32 nt, Homo Sapiens
gcuugagucccaugccuccacccugccaucug

SEQ ID NO: 77889 - RNA, 32 nt, Homo Sapiens
gcggcgcccgccaugggcgaggaggacuacua

SEQ ID NO: 77890 - RNA, 32 nt, Homo Sapiens
uuuccuggcuggggcucugaccacaaacuccc

SEQ ID NO: 77891 - RNA, 32 nt, Homo Sapiens
gugugccuguaagugugaaauaaaccucucug

SEQ ID NO: 77892 - RNA, 32 nt, Homo Sapiens
uucaccuaguguuucugcuuugccaugacccu

SEQ ID NO: 77893 - RNA, 32 nt, Homo Sapiens
ccuacuucuucagcugcaccccgugagccuug

SEQ ID NO: 77894 - RNA, 32 nt, Homo Sapiens
auguaugucaauuggacauuguagaagguaug

SEQ ID NO: 77895 - RNA, 32 nt, Homo Sapiens
cucgggcuucggguuggugaaggcgggguggg

SEQ ID NO: 77896 - RNA, 29 nt, Homo Sapiens
caccugagcuggauucggagagguaaaug

SEQ ID NO: 77897 - RNA, 32 nt, Homo Sapiens
ggccagagggucaccuggagcuggggagacac

SEQ ID NO: 77898 - RNA, 32 nt, Homo Sapiens
acaagccacaagucuuccagaggaugcuugau

SEQ ID NO: 77899 - RNA, 32 nt, Homo Sapiens
ucugaagaaaucacuacacucuuagagaaucc

SEQ ID NO: 77900 - RNA, 27 nt, Homo Sapiens
aaauggcgcuggccgcucguuugcuac

SEQ ID NO: 77901 - RNA, 32 nt, Homo Sapiens
ugcagagaccccagccacucugugugggcagg

SEQ ID NO: 77902 - RNA, 32 nt, Homo Sapiens
caugccugccagcguugugucaugccugucca

SEQ ID NO: 77903 - RNA, 32 nt, Homo Sapiens
gcuguccuuuugcucuuacgccccaccccaac

SEQ ID NO: 77904 - RNA, 32 nt, Homo Sapiens
ucacuaccuuccaaaguuuuuaaaagauguua

SEQ ID NO: 77905 - RNA, 32 nt, Homo Sapiens
agaugaggaaacugaggcccagagagguuaag

SEQ ID NO: 77906 - RNA, 32 nt, Homo Sapiens
agugucuauuguaaugguggcuccaucauuua

SEQ ID NO: 77907 - RNA, 32 nt, Homo Sapiens
gaggacuugcagagacacguaccacacaguaa

SEQ ID NO: 77908 - RNA, 32 nt, Homo Sapiens
auuggcguuggcacugauuccuuuaaaugguc

SEQ ID NO: 77909 - RNA, 32 nt, Homo Sapiens
uauugaggucauuguuuuuggcuuaaguuuau

SEQ ID NO: 77910 - RNA, 32 nt, Homo Sapiens
uccaaggcaggccugaaucaacugucuuuaaa

SEQ ID NO: 77911 - RNA, 32 nt, Homo Sapiens
ccuccaguucuuccucuuuuacuaauuaguug

SEQ ID NO: 77912 - RNA, 32 nt, Homo Sapiens
uguugauucugauaaacauagccaguaaaauu

SEQ ID NO: 77913 - RNA, 32 nt, Homo Sapiens
uauaauguagauguuuaaaauaaaaaccaaag

SEQ ID NO: 77914 - RNA, 32 nt, Homo Sapiens
gaguuuuugcagugaccagauaaacuugaauu

SEQ ID NO: 77915 - RNA, 32 nt, Homo Sapiens
ggcauucucagcuuagacugcguaagaagaaa

SEQ ID NO: 77916 - RNA, 32 nt, Homo Sapiens
gcaaguucauuguaacaauccaaacaauaccu

SEQ ID NO: 77917 - RNA, 32 nt, Homo Sapiens
uagggaaucuauuuguguagaacuaauuaaug

SEQ ID NO: 77918 - RNA, 32 nt, Homo Sapiens
aacccuauaagacaugggaauaccuucaguua

SEQ ID NO: 77919 - RNA, 32 nt, Homo Sapiens
auauuuugggguuauaauuucucuaaauuuua

SEQ ID NO: 77920 - RNA, 32 nt, Homo Sapiens
acugcuucccaauagauggaagcaaagcgucu

SEQ ID NO: 77921 - RNA, 32 nt, Homo Sapiens
cuaacuuaaccaacgcuagcuaucuugccucu

SEQ ID NO: 77922 - RNA, 32 nt, Homo Sapiens
uacugcuagaagcacuuuauguuuccuuuuug

SEQ ID NO: 77923 - RNA, 32 nt, Homo Sapiens
uuguuuuucuaaaaagucuucagcacccaauu

SEQ ID NO: 77924 - RNA, 32 nt, Homo Sapiens
ugauggagugaagugggcugggggcgauagag

SEQ ID NO: 77925 - RNA, 32 nt, Homo Sapiens
gaauucuggagggaaacaaacauucagaccau

SEQ ID NO: 77926 - RNA, 32 nt, Homo Sapiens
uuguagucucucuggaggacuuccagaaaauu

SEQ ID NO: 77927 - RNA, 32 nt, Homo Sapiens
aaacucccucagggagccccccugcccuguag

SEQ ID NO: 77928 - RNA, 32 nt, Homo Sapiens
auaaaaugcagauugacuuaacuauuagaaaa

SEQ ID NO: 77929 - RNA, 32 nt, Homo Sapiens
gccggaagcgcgcgccgccacugccacgccgu

SEQ ID NO: 77930 - RNA, 32 nt, Homo Sapiens
gagugagaccugagguucugcauguauaacaa

SEQ ID NO: 77931 - RNA, 32 nt, Homo Sapiens
acgagggcccgugccgccccagccgcugccgc

SEQ ID NO: 77932 - RNA, 32 nt, Homo Sapiens
agaauuuuuuaaaaauggcuguaccaaucuag

SEQ ID NO: 77933 - RNA, 32 nt, Homo Sapiens
agcguguguaggggagcggaaaaggaagucac

SEQ ID NO: 77934 - RNA, 32 nt, Homo Sapiens
ggugccagugucccauauguuccuccugacag

SEQ ID NO: 77935 - RNA, 30 nt, Homo Sapiens
cacauuauuacauucacccaucuuucuguu

SEQ ID NO: 77936 - RNA, 32 nt, Homo Sapiens
ugacugcaggugugauucggggcccccguggc

SEQ ID NO: 77937 - RNA, 32 nt, Homo Sapiens
accgugccuggccagaaacucuuuuuuaagcg

SEQ ID NO: 77938 - RNA, 32 nt, Homo Sapiens
aaauucaauaccaaauacaguaaaaacaaaug

SEQ ID NO: 77939 - RNA, 32 nt, Homo Sapiens
gcaauugugaaugggaguucacucaugauuug

SEQ ID NO: 77940 - RNA, 32 nt, Homo Sapiens
ugauguuuucuuuggaauuuccggauaaguuc

SEQ ID NO: 77941 - RNA, 32 nt, Homo Sapiens
cugcagcgggugcugcaggucuggccuucacu

SEQ ID NO: 77942 - RNA, 32 nt, Homo Sapiens
uuuuuauucagcagacuuucucuguguaugag

SEQ ID NO: 77943 - RNA, 32 nt, Homo Sapiens
gcaacauuuuuacauuuauuccuuccaagaag

SEQ ID NO: 77944 - RNA, 32 nt, Homo Sapiens
ucugugugccuguguccucaucugauucaccu

SEQ ID NO: 77945 - RNA, 32 nt, Homo Sapiens
aaauuagaccuagagcuuucugacagggaguc

SEQ ID NO: 77946 - RNA, 32 nt, Homo Sapiens
acaacuuuaauagaagacuacuaauaacagaa

SEQ ID NO: 77947 - RNA, 32 nt, Homo Sapiens
ggacucaaacaaaaacgaggucaaucaugcca

SEQ ID NO: 77948 - RNA, 32 nt, Homo Sapiens
acucugucuggaguauaguagugugaucauag

SEQ ID NO: 77949 - RNA, 32 nt, Homo Sapiens
gcaggugcaccaagagaucuggcgagggguac

SEQ ID NO: 77950 - RNA, 32 nt, Homo Sapiens
aacccagaaagguuuaaaaaacauaaggaaaa

SEQ ID NO: 77951 - RNA, 32 nt, Homo Sapiens
caucuuugugauuauuuccuuaauauuuuuuc

SEQ ID NO: 77952 - RNA, 32 nt, Homo Sapiens
gagaaccuaagccccaucguagcacaguauua

SEQ ID NO: 77953 - RNA, 32 nt, Homo Sapiens
aacauuuuacuuuuuaucauugauguguucaa

SEQ ID NO: 77954 - RNA, 32 nt, Homo Sapiens
aacguauauaaaauauaucuagaaaaccuuug

SEQ ID NO: 77955 - RNA, 32 nt, Homo Sapiens
acaggcuucugagcacagcugcauuaaaacaa

SEQ ID NO: 77956 - RNA, 32 nt, Homo Sapiens
agcgaaccaauauuuguagaaggguuauauuu

SEQ ID NO: 77957 - RNA, 30 nt, Homo Sapiens
cccaggcccagagaagaugagucuauggca

SEQ ID NO: 77958 - RNA, 32 nt, Homo Sapiens
ggugcuggccacaccagcccccuuucaccucc

SEQ ID NO: 77959 - RNA, 32 nt, Homo Sapiens
acaaaaaauaauccauuuaggugcugaguuac

SEQ ID NO: 77960 - RNA, 32 nt, Homo Sapiens
uggugcuguauauacgaaucuugcaaagcucu

SEQ ID NO: 77961 - RNA, 32 nt, Homo Sapiens
ugcaggcucauuccccaccucuucccagcccc

SEQ ID NO: 77962 - RNA, 32 nt, Homo Sapiens
agaagagugguaccauauguugcaggaaguca

SEQ ID NO: 77963 - RNA, 32 nt, Homo Sapiens
cuuuaucugcaccccucacccugcugguggug

SEQ ID NO: 77964 - RNA, 32 nt, Homo Sapiens
ugggguggagggaggaagggcugggagggagu

SEQ ID NO: 77965 - RNA, 32 nt, Homo Sapiens
cagaucuuucccuuuccuuacuagaccucucu

SEQ ID NO: 77966 - RNA, 32 nt, Homo Sapiens
aggcaguguggccuugguuuauaugcacuuuc

SEQ ID NO: 77967 - RNA, 27 nt, Homo Sapiens
ucaugaagcagguucaaaguugugaag

SEQ ID NO: 77968 - RNA, 32 nt, Homo Sapiens
ggggccugaaccccggccuccacccuggggga

SEQ ID NO: 77969 - RNA, 32 nt, Homo Sapiens
uaauauauuaguacacgacauaaaagaagaaa

SEQ ID NO: 77970 - RNA, 32 nt, Homo Sapiens
acuggucaccgcgggggccgaugguggagaau

SEQ ID NO: 77971 - RNA, 32 nt, Homo Sapiens
cuaauuccugucauuagugaccuaaguacccc

SEQ ID NO: 77972 - RNA, 32 nt, Homo Sapiens
uauugccagcuggcagacacagcuguccugau

SEQ ID NO: 77973 - RNA, 32 nt, Homo Sapiens
ugcgcuaagggaugcuggccuggcgggauggu

SEQ ID NO: 77974 - RNA, 32 nt, Homo Sapiens
cuuguuuuuuaaagauaccgugcuucuccaca

SEQ ID NO: 77975 - RNA, 32 nt, Homo Sapiens
cgcaccgcgggaagauggcguuggaggucggc

SEQ ID NO: 77976 - RNA, 32 nt, Homo Sapiens
aaaagugcuaaguuucucuuguccucguaaua

SEQ ID NO: 77977 - RNA, 32 nt, Homo Sapiens
acaaacaaacaaagcagaacuaaaauauuggg

SEQ ID NO: 77978 - RNA, 32 nt, Homo Sapiens
gcguggcgcuaggcauggcgauggaucaagua

SEQ ID NO: 77979 - RNA, 32 nt, Homo Sapiens
aauaaugacaccugguggauaaauguuacauu

SEQ ID NO: 77980 - RNA, 32 nt, Homo Sapiens
gccccgggauucuccuccgcuuccuuuucucg

SEQ ID NO: 77981 - RNA, 32 nt, Homo Sapiens
auccaaccuccccauugcacagauggggaaac

SEQ ID NO: 77982 - RNA, 32 nt, Homo Sapiens
aggacuauuauuaccugaagagguggaggguu

SEQ ID NO: 77983 - RNA, 31 nt, Homo Sapiens
gaaagaccgaagcucagaugaguuaaguggu

SEQ ID NO: 77984 - RNA, 32 nt, Homo Sapiens
gacuccugccucaggaugccgggggaggaaga

SEQ ID NO: 77985 - RNA, 32 nt, Homo Sapiens
cggaccgugcaauggcccagcguaagaaugcc

SEQ ID NO: 77986 - RNA, 32 nt, Homo Sapiens
aacacccagaucacaaugacaagaugccacuc

SEQ ID NO: 77987 - RNA, 32 nt, Homo Sapiens
ccaacucuggcaccaccaccucacagcugugu

SEQ ID NO: 77988 - RNA, 32 nt, Homo Sapiens
caaccugccugccuggauugcaccuuucugcc

SEQ ID NO: 77989 - RNA, 32 nt, Homo Sapiens
uuggacagaguguucacagaccuguggccaug

SEQ ID NO: 77990 - RNA, 32 nt, Homo Sapiens
ucggugccggugccgguggcugccgcgccuac

SEQ ID NO: 77991 - RNA, 32 nt, Homo Sapiens
gcucccuggugucugcugcauggcauccugga

SEQ ID NO: 77992 - RNA, 32 nt, Homo Sapiens
aagcaucugaagacuggguuuuuuuuguuguu

SEQ ID NO: 77993 - RNA, 32 nt, Homo Sapiens
uauugauguugauagcaucccaaagccacaga

SEQ ID NO: 77994 - RNA, 32 nt, Homo Sapiens
aagggguuggccucucugcugcuuucugggag

SEQ ID NO: 77995 - RNA, 32 nt, Homo Sapiens
agcuuggcagccacugauggugguaagcaugu

SEQ ID NO: 77996 - RNA, 32 nt, Homo Sapiens
gaaggccacgagcagcagcagcaggaaggcgu

SEQ ID NO: 77997 - RNA, 32 nt, Homo Sapiens
cagcccccaaggaaacaaggcugcaagaauuu

SEQ ID NO: 77998 - RNA, 32 nt, Homo Sapiens
uguuguaaaaauuauuauaggccagcuacauc

SEQ ID NO: 77999 - RNA, 32 nt, Homo Sapiens
caucccccacaugccucccaaaaugaaagaca

SEQ ID NO: 78000 - RNA, 32 nt, Homo Sapiens
ggaaaacaaaaaugauauaaagccauaugagg

SEQ ID NO: 78001 - RNA, 32 nt, Homo Sapiens
aagcuagugaggggcggggcaggcggcgcggu

SEQ ID NO: 78002 - RNA, 32 nt, Homo Sapiens
ggucaagguagcaaaaugugcccaaggacuag

SEQ ID NO: 78003 - RNA, 32 nt, Homo Sapiens
acuccuacaaccaaaugagaaaaaucagggau

SEQ ID NO: 78004 - RNA, 32 nt, Homo Sapiens
ugcaaugauuuuuuuucuuguuuagagaaguu

SEQ ID NO: 78005 - RNA, 32 nt, Homo Sapiens
agcggccgagcucugcaguucuccucccggcc

SEQ ID NO: 78006 - RNA, 32 nt, Homo Sapiens
ucuaacacuguaauucaacuagguuuuguguc

SEQ ID NO: 78007 - RNA, 32 nt, Homo Sapiens
caccucccuggccacacgccuguucccagcaa

SEQ ID NO: 78008 - RNA, 32 nt, Homo Sapiens
caugcccugcacuacauagcacagccgggaug

SEQ ID NO: 78009 - RNA, 32 nt, Homo Sapiens
gaacucaccaaaauguucgacaccauaacaac

SEQ ID NO: 78010 - RNA, 32 nt, Homo Sapiens
gugggguggguguaaaguuaaaaggaacaguu

SEQ ID NO: 78011 - RNA, 32 nt, Homo Sapiens
ucucacuaacugucucaccggguuucaaagcu

SEQ ID NO: 78012 - RNA, 32 nt, Homo Sapiens
gcuguccccguccccguaccucgcgcggaccc

SEQ ID NO: 78013 - RNA, 32 nt, Homo Sapiens
uuuucuaaaaauuuuccuaguaacauuuucuu

SEQ ID NO: 78014 - RNA, 32 nt, Homo Sapiens
uacccucugucucuccucccuguaucccaccu

SEQ ID NO: 78015 - RNA, 32 nt, Homo Sapiens
aaggacugacuuccuaguaacuguugcaguuu

SEQ ID NO: 78016 - RNA, 32 nt, Homo Sapiens
cauccagaaaagacauguauagggacagaaag

SEQ ID NO: 78017 - RNA, 32 nt, Homo Sapiens
cccuagugucgacuaugcgagaucugauuccg

SEQ ID NO: 78018 - RNA, 32 nt, Homo Sapiens
uggacugagccuggggggaggggcuggagcca

SEQ ID NO: 78019 - RNA, 32 nt, Homo Sapiens
uagcuucucuacaauuagauauuuuuagaagu

SEQ ID NO: 78020 - RNA, 32 nt, Homo Sapiens
ccacugccccuggccugagagccaggguuuaa

SEQ ID NO: 78021 - RNA, 32 nt, Homo Sapiens
gagacccuaucucuacuaaaaauagaaaaauu

SEQ ID NO: 78022 - RNA, 32 nt, Homo Sapiens
agaagauccaaguuuaaaauugcugcggaaug

SEQ ID NO: 78023 - RNA, 30 nt, Homo Sapiens
cgcuuauuuuaggccagcggcaggggacuc

SEQ ID NO: 78024 - RNA, 32 nt, Homo Sapiens
ccauggagaggagaggcacugccggagcccuu

SEQ ID NO: 78025 - RNA, 32 nt, Homo Sapiens
cgguaccggcggcggcagcgccgcugcucuuc

SEQ ID NO: 78026 - RNA, 32 nt, Homo Sapiens
agccuggccaacaugugaaaccccgucuccac

SEQ ID NO: 78027 - RNA, 32 nt, Homo Sapiens
cagccggccgggacgagcuggugucgcggucc

SEQ ID NO: 78028 - RNA, 32 nt, Homo Sapiens
ggcugaacuggggcuccugcuggauuccgaaa

SEQ ID NO: 78029 - RNA, 32 nt, Homo Sapiens
gaggcccaccugggcucuguccucugccaagc

SEQ ID NO: 78030 - RNA, 32 nt, Homo Sapiens
ucuuucaaucuaauuauucaccaccacaagac

SEQ ID NO: 78031 - RNA, 32 nt, Homo Sapiens
aacucacacaugcccugauauguaaaugauga

SEQ ID NO: 78032 - RNA, 32 nt, Homo Sapiens
cauagucuuaaauguuagaaauccuauauaau

SEQ ID NO: 78033 - RNA, 30 nt, Homo Sapiens
cccuuuugugcuuugggggaaacugaagac

SEQ ID NO: 78034 - RNA, 32 nt, Homo Sapiens
gauuaggugagugauccagaacccuuccaaag

SEQ ID NO: 78035 - RNA, 32 nt, Homo Sapiens
gaaugugaaaacuaaaguuugugucaugagaa

SEQ ID NO: 78036 - RNA, 32 nt, Homo Sapiens
augguucuuacuuuuccuggacuuaaagaaaa

SEQ ID NO: 78037 - RNA, 32 nt, Homo Sapiens
cuggccaggcccaccugcugcagauguggucu

SEQ ID NO: 78038 - RNA, 32 nt, Homo Sapiens
aaugcaugcucgcgcgcaagcacgcacgugcg

SEQ ID NO: 78039 - RNA, 32 nt, Homo Sapiens
auauugaagcgccuggcccagcccccagcccc

SEQ ID NO: 78040 - RNA, 28 nt, Homo Sapiens
uggcaggggcggcugggaggguaucugg

SEQ ID NO: 78041 - RNA, 32 nt, Homo Sapiens
ucugacccugggcuuucacgggccccauucca

SEQ ID NO: 78042 - RNA, 32 nt, Homo Sapiens
augcacagaaaacacacugacugugggacugu

SEQ ID NO: 78043 - RNA, 32 nt, Homo Sapiens
ucuccugcugauggccuucauguuguuaauuu

SEQ ID NO: 78044 - RNA, 32 nt, Homo Sapiens
uggucuaauuuaaugucuuuaaguuucauauu

SEQ ID NO: 78045 - RNA, 32 nt, Homo Sapiens
uuuaccugcauaacgggguucaagacugacaa

SEQ ID NO: 78046 - RNA, 32 nt, Homo Sapiens
aaagagacgauaaacauugaaugagggugagg

SEQ ID NO: 78047 - RNA, 32 nt, Homo Sapiens
cccgcgugcgaccugagacgccgcccucgccg

SEQ ID NO: 78048 - RNA, 32 nt, Homo Sapiens
aaauuagcugggugugguggcaggugccugua

SEQ ID NO: 78049 - RNA, 32 nt, Homo Sapiens
uccucauccccccaagcccacccagcacucuc

SEQ ID NO: 78050 - RNA, 32 nt, Homo Sapiens
uagcaauaagauucaaagcuaaucuggagcau

SEQ ID NO: 78051 - RNA, 32 nt, Homo Sapiens
aagacacuaugaauuaaauucuacagcuuuuu

SEQ ID NO: 78052 - RNA, 32 nt, Homo Sapiens
auuuuuuuuaagauuauaugaagucugugcaa

SEQ ID NO: 78053 - RNA, 32 nt, Homo Sapiens
uucucccuccuccucaguaauuuauuucgagc

SEQ ID NO: 78054 - RNA, 32 nt, Homo Sapiens
auuuaaauguagcaaacauacaugacaguucu

SEQ ID NO: 78055 - RNA, 32 nt, Homo Sapiens
ccuucgggucuggggugcagacauggcaaggc

SEQ ID NO: 78056 - RNA, 32 nt, Homo Sapiens
aauccaguauuucagccuuguuugcuuugcaa

SEQ ID NO: 78057 - RNA, 32 nt, Homo Sapiens
caagacauuucccccagugguagcaucugaag

SEQ ID NO: 78058 - RNA, 32 nt, Homo Sapiens
ucugcuuguaaaaguuucaaaauauguuuuuc

SEQ ID NO: 78059 - RNA, 32 nt, Homo Sapiens
agauugcaaagaguacaaaaccagcugaaaag

SEQ ID NO: 78060 - RNA, 32 nt, Homo Sapiens
cgcuccuggugccuguggcucugggcagggug

SEQ ID NO: 78061 - RNA, 31 nt, Homo Sapiens
ggggcuugggugcgaguccaggcaaggcagg

SEQ ID NO: 78062 - RNA, 32 nt, Homo Sapiens
augucauuacuucuaagacaucaucagucugc

SEQ ID NO: 78063 - RNA, 32 nt, Homo Sapiens
aaaugccuuaggauggaguuugcaagguuucc

SEQ ID NO: 78064 - RNA, 32 nt, Homo Sapiens
caagcugcccucgggucccccugcguggcagg

SEQ ID NO: 78065 - RNA, 32 nt, Homo Sapiens
ccauauuuaaauggaauaauaaagguuuuuua

SEQ ID NO: 78066 - RNA, 32 nt, Homo Sapiens
auuuauuuuauauuuuaaccuuuaauccacug

SEQ ID NO: 78067 - RNA, 32 nt, Homo Sapiens
auuguucuagcaguggagguguuacagugucg

SEQ ID NO: 78068 - RNA, 32 nt, Homo Sapiens
aauaaaugaugauaaagauguuucugacaaga

SEQ ID NO: 78069 - RNA, 32 nt, Homo Sapiens
guuaccgggagaggcugugucaaaggcgccau

SEQ ID NO: 78070 - RNA, 32 nt, Homo Sapiens
ucagacaggacaacugugauauuucaguuccu

SEQ ID NO: 78071 - RNA, 32 nt, Homo Sapiens
caagguaaaaauugaaguuuguaugauguaag

SEQ ID NO: 78072 - RNA, 32 nt, Homo Sapiens
ggcggagaccucucccgccagcccuucuuucu

SEQ ID NO: 78073 - RNA, 30 nt, Homo Sapiens
gcggcccuacccgugccccgagugcggccg

SEQ ID NO: 78074 - RNA, 32 nt, Homo Sapiens
cguauugcucacaguccuggggggcugggacg

SEQ ID NO: 78075 - RNA, 32 nt, Homo Sapiens
cucccggagguugggugggccggcuucaugcc

SEQ ID NO: 78076 - RNA, 29 nt, Homo Sapiens
gccuuuccuuguuucagugcuaacgauuu

SEQ ID NO: 78077 - RNA, 32 nt, Homo Sapiens
agagacaucuggaagccggagcuaguggaaga

SEQ ID NO: 78078 - RNA, 32 nt, Homo Sapiens
ucccagaacagucuccccaccuccccccaaca

SEQ ID NO: 78079 - RNA, 32 nt, Homo Sapiens
cuggccgccaugcgccucuccuccuccccacc

SEQ ID NO: 78080 - RNA, 32 nt, Homo Sapiens
ccgcuuggccccacaggaaaagaccccaauau

SEQ ID NO: 78081 - RNA, 32 nt, Homo Sapiens
guaacuuucccccgggacagcggccgccgcgg

SEQ ID NO: 78082 - RNA, 32 nt, Homo Sapiens
gcacagacugucagcaugaugucagaggccag

SEQ ID NO: 78083 - RNA, 28 nt, Homo Sapiens
auaacaguggcuacccaugagguaauac

SEQ ID NO: 78084 - RNA, 32 nt, Homo Sapiens
uguauauuucauguuguaauucuuuuuuucaa

SEQ ID NO: 78085 - RNA, 32 nt, Homo Sapiens
acuaggcuggccgaggcccaggccccgcccgu

SEQ ID NO: 78086 - RNA, 32 nt, Homo Sapiens
aaacuuauaaauauuucuccagcaaauuugag

SEQ ID NO: 78087 - RNA, 32 nt, Homo Sapiens
guuucaauauaucuaauauauacugucgcaaa

SEQ ID NO: 78088 - RNA, 32 nt, Homo Sapiens
uacuaagaugcaucguuugaaaucaucuagug

SEQ ID NO: 78089 - RNA, 32 nt, Homo Sapiens
uuucuuggcuuucaugcugagcuuguuggucu

SEQ ID NO: 78090 - RNA, 32 nt, Homo Sapiens
ugcccccaggggcuccuccggguugucucagg

SEQ ID NO: 78091 - RNA, 32 nt, Homo Sapiens
ggcaucucucaaccgcgauccccaacaccauu

SEQ ID NO: 78092 - RNA, 32 nt, Homo Sapiens
auaugcuguauauguuauguaauuuauuuuag

SEQ ID NO: 78093 - RNA, 32 nt, Homo Sapiens
cugcccccgccagguaccaucgccuccugcca

SEQ ID NO: 78094 - RNA, 32 nt, Homo Sapiens
uguaaaucacuuucuucuuuuguuuucuuuua

SEQ ID NO: 78095 - RNA, 32 nt, Homo Sapiens
aaaauaguucaguguaauauuaaguuagaaaa

SEQ ID NO: 78096 - RNA, 32 nt, Homo Sapiens
cuauuuaaauaauucgagguuacaucguaggu

SEQ ID NO: 78097 - RNA, 32 nt, Homo Sapiens
ccccggaggacacguggaugauggggucagag

SEQ ID NO: 78098 - RNA, 32 nt, Homo Sapiens
agaaaacaaaacaaaauaaugcuuuucgaaau

SEQ ID NO: 78099 - RNA, 32 nt, Homo Sapiens
gaaaaacacagcaugagaacuucgugaagcau

SEQ ID NO: 78100 - RNA, 32 nt, Homo Sapiens
uuagugacauuuaugauguuugucuuguaugu

SEQ ID NO: 78101 - RNA, 32 nt, Homo Sapiens
aaaagagaaaaagaaggauugaucagagcauu

SEQ ID NO: 78102 - RNA, 30 nt, Homo Sapiens
uaccuaggcaggcgugagggugugacggcc

SEQ ID NO: 78103 - RNA, 32 nt, Homo Sapiens
ugaaucacagaaagugggagcuuggaggaucc

SEQ ID NO: 78104 - RNA, 32 nt, Homo Sapiens
cuuaaugaaagacacgggugugggacuuuguc

SEQ ID NO: 78105 - RNA, 32 nt, Homo Sapiens
gcaaguguguggaagggccguguucguguugg

SEQ ID NO: 78106 - RNA, 32 nt, Homo Sapiens
ucgccuaaagugcagcagcagcuccucucaag

SEQ ID NO: 78107 - RNA, 32 nt, Homo Sapiens
auguugauaguuguuucauauucucucaggaa

SEQ ID NO: 78108 - RNA, 32 nt, Homo Sapiens
auguugaauuuaugugaucauugauuuuauuu

SEQ ID NO: 78109 - RNA, 32 nt, Homo Sapiens
ccccaugccagugccuucagcgguggccugcu

SEQ ID NO: 78110 - RNA, 32 nt, Homo Sapiens
cggcagcagcccccagcucccaccuccccuug

SEQ ID NO: 78111 - RNA, 32 nt, Homo Sapiens
uuacaagcuaucaaauucuacaugacacagga

SEQ ID NO: 78112 - RNA, 32 nt, Homo Sapiens
acauuguagccucuuuauggucucugagaaau

SEQ ID NO: 78113 - RNA, 32 nt, Homo Sapiens
auuucuuaauaaauucuuccaagaaauaaaga

SEQ ID NO: 78114 - RNA, 32 nt, Homo Sapiens
aagcagucaucaucauccauggaguggcugcu

SEQ ID NO: 78115 - RNA, 32 nt, Homo Sapiens
cccaauauguggucuuuaaauaauuaucuaau

SEQ ID NO: 78116 - RNA, 25 nt, Homo Sapiens
aaauaaaaacaaaagccagaauaaa

SEQ ID NO: 78117 - RNA, 32 nt, Homo Sapiens
aaguaaaagcuacuauguacugccuuagugcu

SEQ ID NO: 78118 - RNA, 32 nt, Homo Sapiens
aggccaggggagaccugggugccuucagcaaa

SEQ ID NO: 78119 - RNA, 32 nt, Homo Sapiens
cggucagucaauacacaaaacacacuaggggc

SEQ ID NO: 78120 - RNA, 32 nt, Homo Sapiens
uugggagcgggguuggugugcggagugguucg

SEQ ID NO: 78121 - RNA, 32 nt, Homo Sapiens
uuaugggugacuuugaaagaucuguucaauua

SEQ ID NO: 78122 - RNA, 32 nt, Homo Sapiens
guccucugacuuccagccacauccaucuggca

SEQ ID NO: 78123 - RNA, 32 nt, Homo Sapiens
gaugacacugcauuauaaaggccauggagagu

SEQ ID NO: 78124 - RNA, 32 nt, Homo Sapiens
gaucacggguggcaggggcaggauuugaaccc

SEQ ID NO: 78125 - RNA, 32 nt, Homo Sapiens
cccuggccugguuuccuaaccucuucuuccuc

SEQ ID NO: 78126 - RNA, 32 nt, Homo Sapiens
augucuguaaauuucaguguuauaugucauga

SEQ ID NO: 78127 - RNA, 32 nt, Homo Sapiens
ggagccggaggaagagggcugccuccgaagaa

SEQ ID NO: 78128 - RNA, 28 nt, Homo Sapiens
aucucagguuaaggaccaaguuccggcu

SEQ ID NO: 78129 - RNA, 32 nt, Homo Sapiens
guuauucccggcgaaggaagugccaaacucua

SEQ ID NO: 78130 - RNA, 32 nt, Homo Sapiens
guuaucuguuguggccucagcugcugaggaug

SEQ ID NO: 78131 - RNA, 32 nt, Homo Sapiens
cacaucucuccucagagcugucccuugacuug

SEQ ID NO: 78132 - RNA, 32 nt, Homo Sapiens
ugcaguuggggguggggcgugguguuuagaca

SEQ ID NO: 78133 - RNA, 32 nt, Homo Sapiens
aauuagucgucuuuuuuccccacucccagagc

SEQ ID NO: 78134 - RNA, 32 nt, Homo Sapiens
uguuuugcuuaauauugauugcuuuuaguuuc

SEQ ID NO: 78135 - RNA, 32 nt, Homo Sapiens
gcuuagagccaccgugccauccugugcugugc

SEQ ID NO: 78136 - RNA, 32 nt, Homo Sapiens
cagcuuugacauuauuuugucggguuuagucc

SEQ ID NO: 78137 - RNA, 32 nt, Homo Sapiens
acuggccauuuucacuagaguuugccuggcag

SEQ ID NO: 78138 - RNA, 32 nt, Homo Sapiens
aauaaauguaaaauaugacuaaaguuuucauu

SEQ ID NO: 78139 - RNA, 32 nt, Homo Sapiens
uccgggcgccgaccagguccccuuggcccccg

SEQ ID NO: 78140 - RNA, 32 nt, Homo Sapiens
gagcgcagugccacaggcgccaagagcaagua

SEQ ID NO: 78141 - RNA, 32 nt, Homo Sapiens
uccuauuuuccccaggcugaucucuaacucuu

SEQ ID NO: 78142 - RNA, 32 nt, Homo Sapiens
uuccaucagcugaguuccucacucugccuuuc

SEQ ID NO: 78143 - RNA, 32 nt, Homo Sapiens
uucggcuggugccuuuccucugaggggcuauc

SEQ ID NO: 78144 - RNA, 32 nt, Homo Sapiens
ggucuggaauccauuuggagcagauaccgugu

SEQ ID NO: 78145 - RNA, 32 nt, Homo Sapiens
ucccaucuuuucugccggucaugcugggagcc

SEQ ID NO: 78146 - RNA, 32 nt, Homo Sapiens
uguuuuucagaugaggcauauaaaaacuaaaa

SEQ ID NO: 78147 - RNA, 32 nt, Homo Sapiens
cugguaggcgucugcauucccuguuguguucc

SEQ ID NO: 78148 - RNA, 32 nt, Homo Sapiens
ggugucuuacuuucuuguggcaauugauuuuc

SEQ ID NO: 78149 - RNA, 32 nt, Homo Sapiens
ucacagcugucaugaagaggaugggaccuguu

SEQ ID NO: 78150 - RNA, 32 nt, Homo Sapiens
cgccggccgaccugaagcugguuucguggcag

SEQ ID NO: 78151 - RNA, 32 nt, Homo Sapiens
cauguguguacaugugcuugccauguguagga

SEQ ID NO: 78152 - RNA, 32 nt, Homo Sapiens
uagccuggcgcgcgugcacacacacacacaca

SEQ ID NO: 78153 - RNA, 32 nt, Homo Sapiens
cauuuuaaacacauuaggaaaaguugcuauuu

SEQ ID NO: 78154 - RNA, 32 nt, Homo Sapiens
ggaaguagcaauuacuagacaagcauuccgcc

SEQ ID NO: 78155 - RNA, 32 nt, Homo Sapiens
ggacccugguugcuuugugucuaguuuucuag

SEQ ID NO: 78156 - RNA, 32 nt, Homo Sapiens
cgggccggggccagcugcucgcgcucggcucg

SEQ ID NO: 78157 - RNA, 32 nt, Homo Sapiens
aauagaggugaacacaauuauuuuaaggcagu

SEQ ID NO: 78158 - RNA, 32 nt, Homo Sapiens
auuuuacucacagauguuguuauucaugagga

SEQ ID NO: 78159 - RNA, 32 nt, Homo Sapiens
cccaggcggagcgggaggagcuggcagcgggg

SEQ ID NO: 78160 - RNA, 32 nt, Homo Sapiens
uuuucuuuuuuucuuucuuuuuucgugugugu

SEQ ID NO: 78161 - RNA, 32 nt, Homo Sapiens
ggucagggagaccccugcuugcccuggcccag

SEQ ID NO: 78162 - RNA, 32 nt, Homo Sapiens
cggagcugccccacccuccugcuuggcacccu

SEQ ID NO: 78163 - RNA, 32 nt, Homo Sapiens
guuuacucauuucgauucagaauauuucaaau

SEQ ID NO: 78164 - RNA, 32 nt, Homo Sapiens
aacucuguaaauauauuacaaacaaugcauug

SEQ ID NO: 78165 - RNA, 32 nt, Homo Sapiens
cgucucauuuccccucuguuucucaguucccu

SEQ ID NO: 78166 - RNA, 32 nt, Homo Sapiens
gcugaggcuuggccaucuagcauuccaugcaa

SEQ ID NO: 78167 - RNA, 32 nt, Homo Sapiens
cccaggccagcuucacugccgucucuucacac

SEQ ID NO: 78168 - RNA, 32 nt, Homo Sapiens
gucucagguucaagcgauuuuucugccucagc

SEQ ID NO: 78169 - RNA, 32 nt, Homo Sapiens
gagugugagugugagcgagagggugagugugg

SEQ ID NO: 78170 - RNA, 28 nt, Homo Sapiens
cuacugguuuuuaacaggaugauucaaa

SEQ ID NO: 78171 - RNA, 32 nt, Homo Sapiens
ggcugcccccauuccugcugcugcugcugcug

SEQ ID NO: 78172 - RNA, 32 nt, Homo Sapiens
ugcuguugauaaagaaauaggguugccuuucc

SEQ ID NO: 78173 - RNA, 32 nt, Homo Sapiens
acaacagaaagagggacaagaggguucacaca

SEQ ID NO: 78174 - RNA, 32 nt, Homo Sapiens
auauuauugauagaaaauguggaaggaucagg

SEQ ID NO: 78175 - RNA, 32 nt, Homo Sapiens
uccuggcaggacuuagccucccugggccucag

SEQ ID NO: 78176 - RNA, 32 nt, Homo Sapiens
caucuucuuccgagaugaccgcuacuggcgcc

SEQ ID NO: 78177 - RNA, 32 nt, Homo Sapiens
uaugggcugcugcagaggcggcuggagaacau

SEQ ID NO: 78178 - RNA, 32 nt, Homo Sapiens
acucugacauacuggaauugcauauagagaug

SEQ ID NO: 78179 - RNA, 32 nt, Homo Sapiens
gagaaggaaguacccuggggagggaagggaca

SEQ ID NO: 78180 - RNA, 32 nt, Homo Sapiens
guaaaguuuuuacaguucuuacaccuggauaa

SEQ ID NO: 78181 - RNA, 32 nt, Homo Sapiens
uuaugcuugguacaagcuuaugcugucuuaaa

SEQ ID NO: 78182 - RNA, 32 nt, Homo Sapiens
gagagacaacagcuggguuuuccaucccuaac

SEQ ID NO: 78183 - RNA, 32 nt, Homo Sapiens
uugaccuguccccucuugcgcgcaggccuggg

SEQ ID NO: 78184 - RNA, 32 nt, Homo Sapiens
gggucggcgucuggggucagggcgcgcacagc

SEQ ID NO: 78185 - RNA, 32 nt, Homo Sapiens
uggaagagggugaaaggcagggcccuuggggc

SEQ ID NO: 78186 - RNA, 32 nt, Homo Sapiens
ccagaucuggaaugccaguuugaccuuugucu

SEQ ID NO: 78187 - RNA, 32 nt, Homo Sapiens
gcacauuguuggcacuaggagcaccaggaacc

SEQ ID NO: 78188 - RNA, 32 nt, Homo Sapiens
uguggggccauggccucgaugauggucuccac

SEQ ID NO: 78189 - RNA, 32 nt, Homo Sapiens
gcaaaugccaggaaauguguccauaugccaga

SEQ ID NO: 78190 - RNA, 32 nt, Homo Sapiens
ccucucagugcuuuuccaacgaauguaaagug

SEQ ID NO: 78191 - RNA, 32 nt, Homo Sapiens
aagaagcugaccgccugaaaagaaauuauaaa

SEQ ID NO: 78192 - RNA, 32 nt, Homo Sapiens
uccaguucgucggggcgggcgcggcggcggcg

SEQ ID NO: 78193 - RNA, 32 nt, Homo Sapiens
uuuuaaaaaaaaucuguaaauaaaguuuuaaa

SEQ ID NO: 78194 - RNA, 32 nt, Homo Sapiens
cgagcagccgcggcugucccggucgccacccu

SEQ ID NO: 78195 - RNA, 32 nt, Homo Sapiens
ucaaugaaagagauugagaauguuaacauuug

SEQ ID NO: 78196 - RNA, 32 nt, Homo Sapiens
aauucggcauguuuuucuuaaguagcaaguac

SEQ ID NO: 78197 - RNA, 32 nt, Homo Sapiens
gggggcugccagcagcugcugcaccugugugu

SEQ ID NO: 78198 - RNA, 32 nt, Homo Sapiens
aaugaucagaaaugcuaagugagaucaauauu

SEQ ID NO: 78199 - RNA, 32 nt, Homo Sapiens
uauuuggcgucaaaguugaugcaaaguuuaug

SEQ ID NO: 78200 - RNA, 32 nt, Homo Sapiens
aggaaacaagauggaauaaaagaaauugggau

SEQ ID NO: 78201 - RNA, 32 nt, Homo Sapiens
uauucuugcucuucucguguugcucacaacua

SEQ ID NO: 78202 - RNA, 32 nt, Homo Sapiens
ccagcuggguuuagcccgaggcuggucuuaga

SEQ ID NO: 78203 - RNA, 32 nt, Homo Sapiens
ggacaacaucagauagaaugugucacauaaau

SEQ ID NO: 78204 - RNA, 32 nt, Homo Sapiens
cggcugccaccugcugcagucuacacagcuuc

SEQ ID NO: 78205 - RNA, 32 nt, Homo Sapiens
acuuuaccugcuggccccgcaggccgcugaac

SEQ ID NO: 78206 - RNA, 32 nt, Homo Sapiens
auauaaaaggcacagcuguuggccaaagugaa

SEQ ID NO: 78207 - RNA, 30 nt, Homo Sapiens
gcacauuugaaaaagcaggaaaccgccccu

SEQ ID NO: 78208 - RNA, 32 nt, Homo Sapiens
gggaaaaggcuuuuguuuuguuuuguuuuguu

SEQ ID NO: 78209 - RNA, 32 nt, Homo Sapiens
aaaauauuguuauaaugauaauauccuuaugc

SEQ ID NO: 78210 - RNA, 32 nt, Homo Sapiens
ucuauggaaaaauuauuuauaaaauguauuuu

SEQ ID NO: 78211 - RNA, 32 nt, Homo Sapiens
ucccagccccaauaccucggaggcauccugaa

SEQ ID NO: 78212 - RNA, 32 nt, Homo Sapiens
cugagaccaacccagaaaccaccaccucucac

SEQ ID NO: 78213 - RNA, 32 nt, Homo Sapiens
ugugggucugagaugcccuuugaaaaugccug

SEQ ID NO: 78214 - RNA, 30 nt, Homo Sapiens
ugcccuaacguuugcuauucuaaggccgag

SEQ ID NO: 78215 - RNA, 32 nt, Homo Sapiens
aaccuaauuucaugacccagugguuugcaguc

SEQ ID NO: 78216 - RNA, 32 nt, Homo Sapiens
agcugagugaagcuaggcaaauggaguggggg

SEQ ID NO: 78217 - RNA, 32 nt, Homo Sapiens
ccuucucgcgcgcgggcgguuugugugauuuu

SEQ ID NO: 78218 - RNA, 32 nt, Homo Sapiens
aguauggugaaguacaaaauagaguguaacuc

SEQ ID NO: 78219 - RNA, 32 nt, Homo Sapiens
agcccacaaagggggacgaucacggcccagca

SEQ ID NO: 78220 - RNA, 32 nt, Homo Sapiens
cuggaagugauaauaaacuuuuuacagaaaau

SEQ ID NO: 78221 - RNA, 32 nt, Homo Sapiens
acgcacaggaugggggcgccaggagaggggcc

SEQ ID NO: 78222 - RNA, 32 nt, Homo Sapiens
acugcugugaaaaauaaaugucuuuguuuugc

SEQ ID NO: 78223 - RNA, 32 nt, Homo Sapiens
uuauuaaagucuaaacaaaauugcaauuucuu

SEQ ID NO: 78224 - RNA, 32 nt, Homo Sapiens
accgcccccagccccagcuaccaccuccuccc

SEQ ID NO: 78225 - RNA, 32 nt, Homo Sapiens
ccauuggcccucgggugagcugaggguuuuug

SEQ ID NO: 78226 - RNA, 32 nt, Homo Sapiens
agaagauagaaaggaugaaauagaaagagugc

SEQ ID NO: 78227 - RNA, 32 nt, Homo Sapiens
uaauuauaguguauuucuuucuugaauuucag

SEQ ID NO: 78228 - RNA, 32 nt, Homo Sapiens
aaccccgcgggccagcagcagucgucucgcgu

SEQ ID NO: 78229 - RNA, 32 nt, Homo Sapiens
cuguacccaagcugauuucucaucuggucaau

SEQ ID NO: 78230 - RNA, 32 nt, Homo Sapiens
uauuaauuggaauuccuuugcauaggagaaug

SEQ ID NO: 78231 - RNA, 32 nt, Homo Sapiens
cuuuuguugcuuaagaugcagauggcucuuaa

SEQ ID NO: 78232 - RNA, 32 nt, Homo Sapiens
agggaugugcugccagguugcuauagaaaccc

SEQ ID NO: 78233 - RNA, 32 nt, Homo Sapiens
ggaagggcguccccggagaaccagugugggau

SEQ ID NO: 78234 - RNA, 32 nt, Homo Sapiens
aaacuuuuaggauuagcuaguuuucuaaaaau

SEQ ID NO: 78235 - RNA, 32 nt, Homo Sapiens
acucaggcuuuucauugggcccggcuccacuu

SEQ ID NO: 78236 - RNA, 32 nt, Homo Sapiens
gaaaaauccacccacaaaugaauuaucaggag

SEQ ID NO: 78237 - RNA, 32 nt, Homo Sapiens
uuguuuccuuuuauuuuauagagcagaacccu

SEQ ID NO: 78238 - RNA, 32 nt, Homo Sapiens
uugguaauauauggcuaaugaagauuaagccc

SEQ ID NO: 78239 - RNA, 32 nt, Homo Sapiens
cuucgagagacccguggaccuggagggcucug

SEQ ID NO: 78240 - RNA, 26 nt, Homo Sapiens
cauguauggaaauuauucucacuuca

SEQ ID NO: 78241 - RNA, 28 nt, Homo Sapiens
cuaugaaauagguaacauuugaguaggu

SEQ ID NO: 78242 - RNA, 32 nt, Homo Sapiens
augcuagaguugccauuaagcagugcaaaauu

SEQ ID NO: 78243 - RNA, 32 nt, Homo Sapiens
cuucugcccuccccagccccagcucacacacc

SEQ ID NO: 78244 - RNA, 32 nt, Homo Sapiens
gacaguggccccagaaccucagcucuguaaau

SEQ ID NO: 78245 - RNA, 32 nt, Homo Sapiens
ugggcaguggauggaagaaaauaaaauaacaa

SEQ ID NO: 78246 - RNA, 32 nt, Homo Sapiens
uccagguucauccauguuaucacaaaugacag

SEQ ID NO: 78247 - RNA, 32 nt, Homo Sapiens
ggguuggcccuacuccagccuggagcucccug

SEQ ID NO: 78248 - RNA, 32 nt, Homo Sapiens
uaugcuaaucagggaggucauuuugguaaaau

SEQ ID NO: 78249 - RNA, 32 nt, Homo Sapiens
gccuccggcucuugccucccagugccaugcag

SEQ ID NO: 78250 - RNA, 32 nt, Homo Sapiens
gagagauaaaaauaaacuuguucugagccaaa

SEQ ID NO: 78251 - RNA, 32 nt, Homo Sapiens
aagaaguagagaacccagaugaucucuuagga

SEQ ID NO: 78252 - RNA, 32 nt, Homo Sapiens
cagggcuaugcgucaggggucagggugcacac

SEQ ID NO: 78253 - RNA, 32 nt, Homo Sapiens
cgaaaggcuuccagaugggagacccaucucuc

SEQ ID NO: 78254 - RNA, 31 nt, Homo Sapiens
ccuguggaggccaggcucagagccaccccug

SEQ ID NO: 78255 - RNA, 32 nt, Homo Sapiens
agcccgcccgguuucacccuccaacuucugac

SEQ ID NO: 78256 - RNA, 32 nt, Homo Sapiens
acugccacgucugccauccucccgcacccacg

SEQ ID NO: 78257 - RNA, 32 nt, Homo Sapiens
aaauguggugucugaaauggaaagaacuaagg

SEQ ID NO: 78258 - RNA, 32 nt, Homo Sapiens
aggaccaaaaauuauuuuuagcuauggcaagg

SEQ ID NO: 78259 - RNA, 32 nt, Homo Sapiens
aacuccacagaaauacaaacucucagaaacug

SEQ ID NO: 78260 - RNA, 32 nt, Homo Sapiens
aggugccugugcucccagcagguccaagugca

SEQ ID NO: 78261 - RNA, 32 nt, Homo Sapiens
acugccaucggacaggaggauuccuuguguuu

SEQ ID NO: 78262 - RNA, 32 nt, Homo Sapiens
agccugggcaacaagagcgaaacucugucuca

SEQ ID NO: 78263 - RNA, 32 nt, Homo Sapiens
gugaaguaucauuugagugcaagaagaaagag

SEQ ID NO: 78264 - RNA, 32 nt, Homo Sapiens
ucgagaauauauuccuugccuguguuagacau

SEQ ID NO: 78265 - RNA, 32 nt, Homo Sapiens
uggcccagcacccacccugccagggaggaagg

SEQ ID NO: 78266 - RNA, 32 nt, Homo Sapiens
cuauaggagugaucucaagugagauagcagag

SEQ ID NO: 78267 - RNA, 32 nt, Homo Sapiens
ucacauauuggaaaagugcuuuuuaaugugua

SEQ ID NO: 78268 - RNA, 32 nt, Homo Sapiens
uuuuuuagaguuucuuuuuuugaucacuuacu

SEQ ID NO: 78269 - RNA, 32 nt, Homo Sapiens
gggagcgucugccccagugaggaggcaggugg

SEQ ID NO: 78270 - RNA, 32 nt, Homo Sapiens
ugauuaagaggacaugcuaauauuuuguaaag

SEQ ID NO: 78271 - RNA, 32 nt, Homo Sapiens
aggaauaagcaugauggaaauaauagucuuga

SEQ ID NO: 78272 - RNA, 30 nt, Homo Sapiens
aagagacggcggcggagggaaaccgacuuc

SEQ ID NO: 78273 - RNA, 32 nt, Homo Sapiens
aauaaccaaggcuugguggcuuucucaacauu

SEQ ID NO: 78274 - RNA, 32 nt, Homo Sapiens
cggggcugggacccggccccggccugcccgau

SEQ ID NO: 78275 - RNA, 32 nt, Homo Sapiens
uugugugcuugaaagaaaauaucucugaccaa

SEQ ID NO: 78276 - RNA, 32 nt, Homo Sapiens
accacugggacaggccugggccccacccucac

SEQ ID NO: 78277 - RNA, 32 nt, Homo Sapiens
auauacuuuuuuucuuuuuucuuuuuuaaaga

SEQ ID NO: 78278 - RNA, 32 nt, Homo Sapiens
ucagcagcuaccccaaaccaaucaaggguuug

SEQ ID NO: 78279 - RNA, 32 nt, Homo Sapiens
aaugaaaagggaguuucguaagcaaaauagag

SEQ ID NO: 78280 - RNA, 32 nt, Homo Sapiens
aaugugugguuuuacgguucaaggaacuacau

SEQ ID NO: 78281 - RNA, 32 nt, Homo Sapiens
cagggacccucaagaaaagcggggaggcgggg

SEQ ID NO: 78282 - RNA, 32 nt, Homo Sapiens
uauuacaugcaaaaaaucauuguuuuuaagau

SEQ ID NO: 78283 - RNA, 32 nt, Homo Sapiens
uuuaaaacaaaauaaaaauaauguaaacaagc

SEQ ID NO: 78284 - RNA, 32 nt, Homo Sapiens
gcagaggcgaagggcuggugggcgaugggccc

SEQ ID NO: 78285 - RNA, 32 nt, Homo Sapiens
uaccaaagcuggcugcgcuucuccggguauuu

SEQ ID NO: 78286 - RNA, 32 nt, Homo Sapiens
aacaaagcaaacaaacaaaaaaaaggaaugca

SEQ ID NO: 78287 - RNA, 32 nt, Homo Sapiens
ggugagaagggagaaaggagggagugggcauu

SEQ ID NO: 78288 - RNA, 32 nt, Homo Sapiens
aucaucuuaaauuauagucauuauuuuuaguu

SEQ ID NO: 78289 - RNA, 32 nt, Homo Sapiens
aaaugaaggcuuuaaauuugcuuaguucuguu

SEQ ID NO: 78290 - RNA, 32 nt, Homo Sapiens
ucuucauuucuggccuaucuuuuaacaucucc

SEQ ID NO: 78291 - RNA, 32 nt, Homo Sapiens
gcucccuuucugcuucggacaccacucaaaca

SEQ ID NO: 78292 - RNA, 32 nt, Homo Sapiens
cacucucaccucaagguagcuccucccucccu

SEQ ID NO: 78293 - RNA, 32 nt, Homo Sapiens
gucccuaaacaucacaauguaaauaucauuuu

SEQ ID NO: 78294 - RNA, 32 nt, Homo Sapiens
uucacucugaacccaacgacuacuucacaaau

SEQ ID NO: 78295 - RNA, 32 nt, Homo Sapiens
cgggcgcguaucguccagaccggagcaccgcc

SEQ ID NO: 78296 - RNA, 30 nt, Homo Sapiens
ugaauucuuuuucacugcaagaguaacagg

SEQ ID NO: 78297 - RNA, 32 nt, Homo Sapiens
cccgaccggcgcgcuccgggacugcgcuuucc

SEQ ID NO: 78298 - RNA, 32 nt, Homo Sapiens
gguugucauauuuauugaucugaguccaggca

SEQ ID NO: 78299 - RNA, 32 nt, Homo Sapiens
ccgugccccaaguucauccguguacagugccc

SEQ ID NO: 78300 - RNA, 32 nt, Homo Sapiens
cugccaccuucagauccugugccccaucccac

SEQ ID NO: 78301 - RNA, 32 nt, Homo Sapiens
aggcgucugaggggcggacggaggcggcggcg

SEQ ID NO: 78302 - RNA, 32 nt, Homo Sapiens
acugagugaagggcagaaaaagagaaaacaga

SEQ ID NO: 78303 - RNA, 32 nt, Homo Sapiens
auauuuugauuuuucuauuuccuccuaaagaa

SEQ ID NO: 78304 - RNA, 32 nt, Homo Sapiens
guggcccuggguuagcagcugcugcauuuccc

SEQ ID NO: 78305 - RNA, 32 nt, Homo Sapiens
auaaaucuuaccaaaacuuaugcuaaauauac

SEQ ID NO: 78306 - RNA, 32 nt, Homo Sapiens
uuagugcauuucaaaaaguaaucauauaucaa

SEQ ID NO: 78307 - RNA, 32 nt, Homo Sapiens
ugugaauguucuaguuccuagguccagcaagu

SEQ ID NO: 78308 - RNA, 32 nt, Homo Sapiens
uuguguccccuggaggcccccggauccagcca

SEQ ID NO: 78309 - RNA, 32 nt, Homo Sapiens
uuuucacucuacucucuucucuaggaauucca

SEQ ID NO: 78310 - RNA, 32 nt, Homo Sapiens
gauaguggugagaacagaggaugaguuggguc

SEQ ID NO: 78311 - RNA, 27 nt, Homo Sapiens
uugggcugcuucuucaguuccuaauac

SEQ ID NO: 78312 - RNA, 32 nt, Homo Sapiens
accgggccucugguccuguccuccccauccug

SEQ ID NO: 78313 - RNA, 32 nt, Homo Sapiens
agagccccgcggcuaccgccuuagggguuguc

SEQ ID NO: 78314 - RNA, 32 nt, Homo Sapiens
agacccgcggguggcacagcccggggcggggc

SEQ ID NO: 78315 - RNA, 32 nt, Homo Sapiens
ggcagaggggagaaccggccguccgcgccgca

SEQ ID NO: 78316 - RNA, 32 nt, Homo Sapiens
ucucggcccacaccccaaaggcucuuuucaga

SEQ ID NO: 78317 - RNA, 32 nt, Homo Sapiens
accaccuugaauuuggcacacacacacacaca

SEQ ID NO: 78318 - RNA, 32 nt, Homo Sapiens
gugaaaaaaaacaaaaguaaaguuauaaaagg

SEQ ID NO: 78319 - RNA, 32 nt, Homo Sapiens
uguagagccaccauucaaagccaggcagucug

SEQ ID NO: 78320 - RNA, 32 nt, Homo Sapiens
gaaggguuugaacgaacugccuuuuuuuuucu

SEQ ID NO: 78321 - RNA, 32 nt, Homo Sapiens
aggauccguccucauuuuauuggugaugauga

SEQ ID NO: 78322 - RNA, 32 nt, Homo Sapiens
ucuuguccuuuaucuuuuuuuuuuuuuuuuaa

SEQ ID NO: 78323 - RNA, 32 nt, Homo Sapiens
ccccgucucgcucgguuccgcggcggccacgc

SEQ ID NO: 78324 - RNA, 32 nt, Homo Sapiens
aaaacaagucacuuaaaaaucaucaccuauuu

SEQ ID NO: 78325 - RNA, 29 nt, Homo Sapiens
gggcccgggugcugguggacgccggcucg

SEQ ID NO: 78326 - RNA, 32 nt, Homo Sapiens
cuuguagaauacagauaacauaaaaucuaaca

SEQ ID NO: 78327 - RNA, 32 nt, Homo Sapiens
gaugcugggauuggaggcucucgguuucaaca

SEQ ID NO: 78328 - RNA, 32 nt, Homo Sapiens
aaccagagaucugaucuucaagcaagaaaaua

SEQ ID NO: 78329 - RNA, 32 nt, Homo Sapiens
ugacccgcccccaccccugcaucccacuucug

SEQ ID NO: 78330 - RNA, 32 nt, Homo Sapiens
ccacccacccccuguuugagguucugagaagg

SEQ ID NO: 78331 - RNA, 32 nt, Homo Sapiens
aagaccacaucuaccacccccaguaggcucca

SEQ ID NO: 78332 - RNA, 32 nt, Homo Sapiens
gagccagugucuguugucgggacucgcaagug

SEQ ID NO: 78333 - RNA, 32 nt, Homo Sapiens
uuucugaaggauuucugauacaguccagaaaa

SEQ ID NO: 78334 - RNA, 32 nt, Homo Sapiens
acugucuaagaauaaugacguauugugaaauu

SEQ ID NO: 78335 - RNA, 32 nt, Homo Sapiens
ggaagagauacaacagaugucuuaugagaagc

SEQ ID NO: 78336 - RNA, 32 nt, Homo Sapiens
ccgccaggggcaggggcccaccgcacacccuu

SEQ ID NO: 78337 - RNA, 32 nt, Homo Sapiens
ugcccucacacgccucucccuugcugucuuua

SEQ ID NO: 78338 - RNA, 32 nt, Homo Sapiens
caugguucacgaagaacaagucaugccaaagc

SEQ ID NO: 78339 - RNA, 32 nt, Homo Sapiens
gaauggguugcacggcggagggggugaggugg

SEQ ID NO: 78340 - RNA, 32 nt, Homo Sapiens
cccucccucccggcggcccccaucaccucuac

SEQ ID NO: 78341 - RNA, 32 nt, Homo Sapiens
ggugagaggaggagcugucgcggacccuguag

SEQ ID NO: 78342 - RNA, 32 nt, Homo Sapiens
aggugcuguuggcaauugcagcugcguggugc

SEQ ID NO: 78343 - RNA, 32 nt, Homo Sapiens
uuccccauuuccccucaacucuccaggcuuca

SEQ ID NO: 78344 - RNA, 32 nt, Homo Sapiens
acgagcaucccccuccucucccuguuagaaau

SEQ ID NO: 78345 - RNA, 32 nt, Homo Sapiens
cccacuacccuucuccuuuccuucccaggccc

SEQ ID NO: 78346 - RNA, 32 nt, Homo Sapiens
cacccccgauuccuggacaaccagaggagaua

SEQ ID NO: 78347 - RNA, 32 nt, Homo Sapiens
guccgggagacgggaucaugaagcgcucggua

SEQ ID NO: 78348 - RNA, 32 nt, Homo Sapiens
ggagagggacccaccacacacccacacaugcc

SEQ ID NO: 78349 - RNA, 32 nt, Homo Sapiens
cuugagauaaccuucaaacauggguuuacaua

SEQ ID NO: 78350 - RNA, 32 nt, Homo Sapiens
guaaaucacuguucagcaacacugauuuccgu

SEQ ID NO: 78351 - RNA, 32 nt, Homo Sapiens
caggcucugggcggggcucccgagggucuugg

SEQ ID NO: 78352 - RNA, 32 nt, Homo Sapiens
agccaaggggagagucuaaaagggcuagagca

SEQ ID NO: 78353 - RNA, 32 nt, Homo Sapiens
cuuguuuugaguuuugcugaauagggagcgca

SEQ ID NO: 78354 - RNA, 32 nt, Homo Sapiens
uguuuacuaugaagacaauguuuuuaauuaca

SEQ ID NO: 78355 - RNA, 32 nt, Homo Sapiens
aauuagccgggcgugguggcgugcaccuguaa

SEQ ID NO: 78356 - RNA, 32 nt, Homo Sapiens
gaaagcccacccagacaacugagaccccuccc

SEQ ID NO: 78357 - RNA, 32 nt, Homo Sapiens
ugagcuacgcugggcuuugagguagagguugg

SEQ ID NO: 78358 - RNA, 32 nt, Homo Sapiens
ugcauggacuauccucuuguuuuuauuaaaaa

SEQ ID NO: 78359 - RNA, 32 nt, Homo Sapiens
aguuuugaaauagcuugggaaauacaccacgu

SEQ ID NO: 78360 - RNA, 32 nt, Homo Sapiens
uacugugaugaaaucuuguuaaccaccacuag

SEQ ID NO: 78361 - RNA, 32 nt, Homo Sapiens
cugaguagcauugccuuaaaucuuauccaguu

SEQ ID NO: 78362 - RNA, 32 nt, Homo Sapiens
gcguucuccuuuagccucccgggccucuccgc

SEQ ID NO: 78363 - RNA, 32 nt, Homo Sapiens
ugggggaggggagggguagagcacacccaggg

SEQ ID NO: 78364 - RNA, 32 nt, Homo Sapiens
cgugcuggaucuucccuccccagcugggaucu

SEQ ID NO: 78365 - RNA, 32 nt, Homo Sapiens
uuucuuugauaaaauggccaucaucuaguaau

SEQ ID NO: 78366 - RNA, 32 nt, Homo Sapiens
uuagcucugugccugucuccagucaggcugga

SEQ ID NO: 78367 - RNA, 32 nt, Homo Sapiens
caaccuacugggguaaaaucuuucucaacccu

SEQ ID NO: 78368 - RNA, 32 nt, Homo Sapiens
gcgaggacggcccggcugggcggccccgagcu

SEQ ID NO: 78369 - RNA, 32 nt, Homo Sapiens
cucuacgcgccggacccugggaugcucuucgg

SEQ ID NO: 78370 - RNA, 32 nt, Homo Sapiens
cugggcuugcaaggcgcgauccaagagggauu

SEQ ID NO: 78371 - RNA, 28 nt, Homo Sapiens
accauggcagugaccaaggagcucuuac

SEQ ID NO: 78372 - RNA, 32 nt, Homo Sapiens
uauuccccugaucaaggucacuggccuagaaa

SEQ ID NO: 78373 - RNA, 32 nt, Homo Sapiens
cuuuuauuuuacacagaaacacugccuuuuua

SEQ ID NO: 78374 - RNA, 32 nt, Homo Sapiens
caagcguggggcgcgggcccgcggcgggagcu

SEQ ID NO: 78375 - RNA, 32 nt, Homo Sapiens
acaggcucagaggguguccugcaccggggccu

SEQ ID NO: 78376 - RNA, 31 nt, Homo Sapiens
ugaagcaggcagaucaccugagguuaagagu

SEQ ID NO: 78377 - RNA, 32 nt, Homo Sapiens
uuguuagaucccauuuucauguuacuuuguag

SEQ ID NO: 78378 - RNA, 32 nt, Homo Sapiens
gccacugauauuaauaauaaaaguauuagaug

SEQ ID NO: 78379 - RNA, 32 nt, Homo Sapiens
gaacgcugaggaauucaugugcaucagucgga

SEQ ID NO: 78380 - RNA, 32 nt, Homo Sapiens
ugccucuacaguugguacagauggcauugucc

SEQ ID NO: 78381 - RNA, 32 nt, Homo Sapiens
ucaggaaccuguuugcccuuugcugggaagcc

SEQ ID NO: 78382 - RNA, 32 nt, Homo Sapiens
uccccuuuaagagcuuccacugcacccccucc

SEQ ID NO: 78383 - RNA, 32 nt, Homo Sapiens
ccagcgcucgaggaccgaggccugcuguggag

SEQ ID NO: 78384 - RNA, 32 nt, Homo Sapiens
ccagcgcccucccuccggugcagcccugccug

SEQ ID NO: 78385 - RNA, 32 nt, Homo Sapiens
ucucacaucuuauagaucuauaaggucacaug

SEQ ID NO: 78386 - RNA, 32 nt, Homo Sapiens
uccuacaaaagcucaagccugaagauacaaga

SEQ ID NO: 78387 - RNA, 32 nt, Homo Sapiens
uaauucagucugcauuuauucuguaaaaaggu

SEQ ID NO: 78388 - RNA, 32 nt, Homo Sapiens
gcuucuugacucgcguugcugccggccucccc

SEQ ID NO: 78389 - RNA, 32 nt, Homo Sapiens
uuggaggccgggagacuauucgcauucuguau

SEQ ID NO: 78390 - RNA, 32 nt, Homo Sapiens
acaaaagucuucaucuuugagagucuggaaca

SEQ ID NO: 78391 - RNA, 32 nt, Homo Sapiens
ccucagaagacaacacacaaagguuucuuuuu

SEQ ID NO: 78392 - RNA, 32 nt, Homo Sapiens
gggccagcucaguggaccguguggaacaggaa

SEQ ID NO: 78393 - RNA, 32 nt, Homo Sapiens
uuaugaacgugucauugguggaggucugaaug

SEQ ID NO: 78394 - RNA, 30 nt, Homo Sapiens
cuggcgcagccagagccgccgggugcccgc

SEQ ID NO: 78395 - RNA, 32 nt, Homo Sapiens
gucaucaaaugcaauguuuuuauuuuuucauc

SEQ ID NO: 78396 - RNA, 32 nt, Homo Sapiens
guauuguauugauaauuggacaaagagagaga

SEQ ID NO: 78397 - RNA, 32 nt, Homo Sapiens
ucuuccaaauuuccucuucaugcucagcugca

SEQ ID NO: 78398 - RNA, 32 nt, Homo Sapiens
cucgcuugcaggucgggagguuuccgggcggc

SEQ ID NO: 78399 - RNA, 32 nt, Homo Sapiens
gccgcuccccccagcccaucguucccugguuc

SEQ ID NO: 78400 - RNA, 32 nt, Homo Sapiens
gucccucuccccagcccuccgccucaccgccc

SEQ ID NO: 78401 - RNA, 32 nt, Homo Sapiens
aggucuuucuucaugauacaagcauuauaaag

SEQ ID NO: 78402 - RNA, 32 nt, Homo Sapiens
cuacagggcuccagcccuacagggacucugcg

SEQ ID NO: 78403 - RNA, 32 nt, Homo Sapiens
gcaccacgcucccgagcucccccgcggccugg

SEQ ID NO: 78404 - RNA, 32 nt, Homo Sapiens
uuccaccugccacugcuccccccucagcaucu

SEQ ID NO: 78405 - RNA, 32 nt, Homo Sapiens
uaguuauuuuucccaacacaguguaaagucac

SEQ ID NO: 78406 - RNA, 32 nt, Homo Sapiens
uugguggaaggggccacuauguuuucuaccuc

SEQ ID NO: 78407 - RNA, 32 nt, Homo Sapiens
cacuucaggaugguuuuuaaauuugguaugag

SEQ ID NO: 78408 - RNA, 32 nt, Homo Sapiens
cugcggggggagaggacgccccugcccuggcc

SEQ ID NO: 78409 - RNA, 32 nt, Homo Sapiens
uggaaaugacuucugaauagcgguuuuaggac

SEQ ID NO: 78410 - RNA, 32 nt, Homo Sapiens
ccgccaggccaaggacgagugcagcuuccaca

SEQ ID NO: 78411 - RNA, 32 nt, Homo Sapiens
accccagggacacacccauuucguugcuaccc

SEQ ID NO: 78412 - RNA, 32 nt, Homo Sapiens
ugucgggauccgcggcagcagcggcugcuuga

SEQ ID NO: 78413 - RNA, 32 nt, Homo Sapiens
cgguugaccugccgccuucuugaaccuggugg

SEQ ID NO: 78414 - RNA, 32 nt, Homo Sapiens
gucgcugucuucguggcuuccacccuuguuaa

SEQ ID NO: 78415 - RNA, 32 nt, Homo Sapiens
uguggacagugguggaugaugugugugcuuca

SEQ ID NO: 78416 - RNA, 32 nt, Homo Sapiens
uggaccaugugacauggaauauuugggauaau

SEQ ID NO: 78417 - RNA, 32 nt, Homo Sapiens
gggaugccuuccauggagcggcucgggacaaa

SEQ ID NO: 78418 - RNA, 32 nt, Homo Sapiens
ugaggugacuguggcaaauuauagaacacaga

SEQ ID NO: 78419 - RNA, 32 nt, Homo Sapiens
cgccugccccgcggaagaccgcccagugagcc

SEQ ID NO: 78420 - RNA, 32 nt, Homo Sapiens
uaggaguugucauggaaacugguaugagccug

SEQ ID NO: 78421 - RNA, 32 nt, Homo Sapiens
cauuagcgccugcgccgucucuaggccccgcc

SEQ ID NO: 78422 - RNA, 32 nt, Homo Sapiens
uaacuuugaaauacguaugaauucuggagaau

SEQ ID NO: 78423 - RNA, 32 nt, Homo Sapiens
ccgcuccgcucggccccgcgccgcccgucaac

SEQ ID NO: 78424 - RNA, 32 nt, Homo Sapiens
uugggccaccugaaacacacacaaacacacac

SEQ ID NO: 78425 - RNA, 32 nt, Homo Sapiens
caccacuccgggagaggcggcgcugggcgucu

SEQ ID NO: 78426 - RNA, 32 nt, Homo Sapiens
gguuuguucacagggcuuggugucacuuaucu

SEQ ID NO: 78427 - RNA, 32 nt, Homo Sapiens
cuuuugccagguuuuucugacuugauuucugu

SEQ ID NO: 78428 - RNA, 32 nt, Homo Sapiens
gugcccaggcccgugcccgccugcggcucaag

SEQ ID NO: 78429 - RNA, 32 nt, Homo Sapiens
auuguugacuaaaaugcugcuuuuaaaacaua

SEQ ID NO: 78430 - RNA, 32 nt, Homo Sapiens
uggugcagugauuauguguacccugugcuguu

SEQ ID NO: 78431 - RNA, 32 nt, Homo Sapiens
cuuccccgugcucagacagugcaccgcugucc

SEQ ID NO: 78432 - RNA, 32 nt, Homo Sapiens
uccccacaguguuccgugggguagggggugau

SEQ ID NO: 78433 - RNA, 30 nt, Homo Sapiens
gcugcgggaggcggcggcgguaggaagccg

SEQ ID NO: 78434 - RNA, 32 nt, Homo Sapiens
aauauguuuuauugucuucucuaagcaaaaag

SEQ ID NO: 78435 - RNA, 32 nt, Homo Sapiens
acaaaaaagcugugagauccacaguuacaagu

SEQ ID NO: 78436 - RNA, 32 nt, Homo Sapiens
gggacggacaugcgcgggagggcgccgcgggg

SEQ ID NO: 78437 - RNA, 32 nt, Homo Sapiens
gccccgccgaucgcgggcaccggagccagccc

SEQ ID NO: 78438 - RNA, 32 nt, Homo Sapiens
auaugucauaauguaaaauuagauaaauucuu

SEQ ID NO: 78439 - RNA, 32 nt, Homo Sapiens
ucccccgccuaccugaccccgccccgcagccg

SEQ ID NO: 78440 - RNA, 32 nt, Homo Sapiens
gccaccggucucgaccucuccucucagcccuu

SEQ ID NO: 78441 - RNA, 32 nt, Homo Sapiens
uuaagacuugguucuuuuuuugagggauccuu

SEQ ID NO: 78442 - RNA, 32 nt, Homo Sapiens
guccucacugauuguuuucuuugucauaccua

SEQ ID NO: 78443 - RNA, 32 nt, Homo Sapiens
cauuccuuaaguuagacuuucggguguggcuu

SEQ ID NO: 78444 - RNA, 32 nt, Homo Sapiens
acuuggaauggagccaugaggcugggaaccaa

SEQ ID NO: 78445 - RNA, 32 nt, Homo Sapiens
uggucaauauguaaagcagggcaaauuuggug

SEQ ID NO: 78446 - RNA, 32 nt, Homo Sapiens
gcuuguaauaaauuauuuacacgggaaaaaaa

SEQ ID NO: 78447 - RNA, 32 nt, Homo Sapiens
ggagcacugccuccccaguuucugggacaccu

SEQ ID NO: 78448 - RNA, 32 nt, Homo Sapiens
cucacguaagcaucucuggugugcaguauuuu

SEQ ID NO: 78449 - RNA, 32 nt, Homo Sapiens
gcaggucgagggacuacuggaaugguugcccg

SEQ ID NO: 78450 - RNA, 32 nt, Homo Sapiens
ucagccugggagcucaggcugcugccgcuggc

SEQ ID NO: 78451 - RNA, 32 nt, Homo Sapiens
gggacagucagcagcccuccuccucuggccuu

SEQ ID NO: 78452 - RNA, 32 nt, Homo Sapiens
gaugaaaagcuaccaucacuuccucaucauga

SEQ ID NO: 78453 - RNA, 32 nt, Homo Sapiens
aagucgcagacacuaugcugccucccauggcc

SEQ ID NO: 78454 - RNA, 32 nt, Homo Sapiens
uaauggacagcuaacggaacaauauaaucacc

SEQ ID NO: 78455 - RNA, 32 nt, Homo Sapiens
guuggacccaaguuaggugugacacguucaca

SEQ ID NO: 78456 - RNA, 32 nt, Homo Sapiens
ccugguccagucgggaggagcagcccggggag

SEQ ID NO: 78457 - RNA, 32 nt, Homo Sapiens
cccauggcuggggcagugagggggcccaguca

SEQ ID NO: 78458 - RNA, 32 nt, Homo Sapiens
agagcuccaguccagggaaucccggcugcccu

SEQ ID NO: 78459 - RNA, 32 nt, Homo Sapiens
aaggcggagcucggcgggagaggugcgggccg

SEQ ID NO: 78460 - RNA, 32 nt, Homo Sapiens
aaaacugaguaggaaaugaaauacuagauuag

SEQ ID NO: 78461 - RNA, 32 nt, Homo Sapiens
cccgcuggaaagggcucugacccccuggcccg

SEQ ID NO: 78462 - RNA, 32 nt, Homo Sapiens
gcccuucccacugagcacaucguggcuaccug

SEQ ID NO: 78463 - RNA, 31 nt, Homo Sapiens
uucuucuaguaugauggaaaguuucuuuuuu

SEQ ID NO: 78464 - RNA, 32 nt, Homo Sapiens
gugcgggacuccgguagccgccccuccgguag

SEQ ID NO: 78465 - RNA, 32 nt, Homo Sapiens
cgcucaguggcucgggccgugccuccgccgug

SEQ ID NO: 78466 - RNA, 32 nt, Homo Sapiens
uaugcaauuuucuuuuuauuaaggaugaaucu

SEQ ID NO: 78467 - RNA, 32 nt, Homo Sapiens
gugucauaacaggcauaacauauuuuuauguu

SEQ ID NO: 78468 - RNA, 32 nt, Homo Sapiens
gaggcauuugcgccugggcuucggagcguagc

SEQ ID NO: 78469 - RNA, 32 nt, Homo Sapiens
aagguagaggauguguuccagaaacauuagaa

SEQ ID NO: 78470 - RNA, 32 nt, Homo Sapiens
cuccagccugacgacaaagcgagacuccgucu

SEQ ID NO: 78471 - RNA, 32 nt, Homo Sapiens
uguguuauacgcuguauuuuuacaauaaggca

SEQ ID NO: 78472 - RNA, 32 nt, Homo Sapiens
gucaauguuucauagaaugcuuugguuacaau

SEQ ID NO: 78473 - RNA, 32 nt, Homo Sapiens
cgcgcacacacacacacgcagauggaggcgcc

SEQ ID NO: 78474 - RNA, 32 nt, Homo Sapiens
cuguaaaaaugguugucuuaacuucuuaaccu

SEQ ID NO: 78475 - RNA, 32 nt, Homo Sapiens
caaacuuucuaaaaaucaaaucucaggauugu

SEQ ID NO: 78476 - RNA, 32 nt, Homo Sapiens
uuuuccuuuuuucuucuuuguuuggauugcag

SEQ ID NO: 78477 - RNA, 32 nt, Homo Sapiens
cccccacugugcccuccccugcccaggagucu

SEQ ID NO: 78478 - RNA, 32 nt, Homo Sapiens
agcuugaaugguuuuucuuuucuuuauuuuua

SEQ ID NO: 78479 - RNA, 32 nt, Homo Sapiens
cccucugccagcgaccccgaagcagauaucuc

SEQ ID NO: 78480 - RNA, 32 nt, Homo Sapiens
ccuccagcagccacuucagagcccccgccuuu

SEQ ID NO: 78481 - RNA, 32 nt, Homo Sapiens
ggggccgcccucgggcaggcgugggugagagc

SEQ ID NO: 78482 - RNA, 32 nt, Homo Sapiens
uucaggaagacagaggaaggagauugaugcca

SEQ ID NO: 78483 - RNA, 32 nt, Homo Sapiens
auugcagacagaggggcacgucugggcagaaa

SEQ ID NO: 78484 - RNA, 32 nt, Homo Sapiens
agagucaaaggacacauucuccccucaagccc

SEQ ID NO: 78485 - RNA, 32 nt, Homo Sapiens
guaggugccauuaauaauauuacuauuguuaa

SEQ ID NO: 78486 - RNA, 32 nt, Homo Sapiens
gucuucuccaugaauuacacguuagaauagac

SEQ ID NO: 78487 - RNA, 32 nt, Homo Sapiens
gguaacauauuccaaaaccagacccaucuugu

SEQ ID NO: 78488 - RNA, 32 nt, Homo Sapiens
gauuggcugaguuuuacaaaugaggaaauuaa

SEQ ID NO: 78489 - RNA, 32 nt, Homo Sapiens
ggagcccaccuggccucccucagggugcugcc

SEQ ID NO: 78490 - RNA, 32 nt, Homo Sapiens
caagucugccaugggccgcggggcccgugucc

SEQ ID NO: 78491 - RNA, 32 nt, Homo Sapiens
guccuugucccuccuuuccccuaagcagaaaa

SEQ ID NO: 78492 - RNA, 32 nt, Homo Sapiens
uauuuucaauugacugaauggaucucaccaga

SEQ ID NO: 78493 - RNA, 27 nt, Homo Sapiens
gcuugaucguuuuucagccccguuucu

SEQ ID NO: 78494 - RNA, 32 nt, Homo Sapiens
ccccuuuaucuguacauagugacugagugggg

SEQ ID NO: 78495 - RNA, 32 nt, Homo Sapiens
uucugucuccuccaugucugcacuguuugggu

SEQ ID NO: 78496 - RNA, 32 nt, Homo Sapiens
ugagauucuacggccugcguggagcggcgcuc

SEQ ID NO: 78497 - RNA, 32 nt, Homo Sapiens
cagccugucugugcaucccccaucccagccag

SEQ ID NO: 78498 - RNA, 32 nt, Homo Sapiens
cgacgcgggcggaccggcgggugcugggaacc

SEQ ID NO: 78499 - RNA, 32 nt, Homo Sapiens
auauggaaaugaaaaaagguuuuuuugcccuc

SEQ ID NO: 78500 - RNA, 32 nt, Homo Sapiens
cucauuaugaccccuucuuuuauaaugcuuau

SEQ ID NO: 78501 - RNA, 23 nt, Homo Sapiens
aaaagggggagguuccugggggu

SEQ ID NO: 78502 - RNA, 32 nt, Homo Sapiens
gaccggucccccagccggcccccaccuccgcu

SEQ ID NO: 78503 - RNA, 32 nt, Homo Sapiens
auacucaagcagaaugagggugagauugaagu

SEQ ID NO: 78504 - RNA, 32 nt, Homo Sapiens
auaagcaagaguuguuucuguuauuuugucca

SEQ ID NO: 78505 - RNA, 32 nt, Homo Sapiens
auccuugcuguaaggaagagcuuuuuccuugu

SEQ ID NO: 78506 - RNA, 32 nt, Homo Sapiens
agucucggcccucucaggcccgcgucucugcc

SEQ ID NO: 78507 - RNA, 32 nt, Homo Sapiens
agaugcuccaugaggaaaaucccuguccacau

SEQ ID NO: 78508 - RNA, 29 nt, Homo Sapiens
gggcucauagugaguguucugugaggugg

SEQ ID NO: 78509 - RNA, 32 nt, Homo Sapiens
cuggcuucuccgccacccacacccuucccacc

SEQ ID NO: 78510 - RNA, 32 nt, Homo Sapiens
ggcaaauuugaaaauauacacauugagaauaa

SEQ ID NO: 78511 - RNA, 32 nt, Homo Sapiens
gcucugcugcacgaugcagccauccucuagca

SEQ ID NO: 78512 - RNA, 32 nt, Homo Sapiens
auaugcauauauauacauacaugaaauaaaua

SEQ ID NO: 78513 - RNA, 32 nt, Homo Sapiens
ugacaggcgccggcccgcccgccugccugcuc

SEQ ID NO: 78514 - RNA, 31 nt, Homo Sapiens
uaucugagcacugugcugggaguccagccuc

SEQ ID NO: 78515 - RNA, 32 nt, Homo Sapiens
cucuccugucuccacagccgcguuuuuuaacc

SEQ ID NO: 78516 - RNA, 32 nt, Homo Sapiens
uccaggaggaagagccuuugugcauuugacug

SEQ ID NO: 78517 - RNA, 29 nt, Homo Sapiens
cggcaugcugcgccagcugcugcucgccg

SEQ ID NO: 78518 - RNA, 32 nt, Homo Sapiens
ucuaacagggccagcugagcagcacaggccag

SEQ ID NO: 78519 - RNA, 32 nt, Homo Sapiens
cauaaugcuuuuacuuccuguuuggaucaguu

SEQ ID NO: 78520 - RNA, 32 nt, Homo Sapiens
cuguggggcauggcaguagucuccucguucuc

SEQ ID NO: 78521 - RNA, 31 nt, Homo Sapiens
uagaagaaauaaauaaaacuauugaucaauu

SEQ ID NO: 78522 - RNA, 32 nt, Homo Sapiens
accccgucguucccuuuccccuggcuggcagc

SEQ ID NO: 78523 - RNA, 32 nt, Homo Sapiens
uccauuuuuuaaaauaaauucaauuaugucuu

SEQ ID NO: 78524 - RNA, 28 nt, Homo Sapiens
gccauggaauccaacaaggaugaagcug

SEQ ID NO: 78525 - RNA, 32 nt, Homo Sapiens
ugccuuaugcucaccuguggacaccgaggaug

SEQ ID NO: 78526 - RNA, 32 nt, Homo Sapiens
auauauaauguauauuuuuucaauguugucgu

SEQ ID NO: 78527 - RNA, 30 nt, Homo Sapiens
ucaacucagcuaauggcugagguguuuaac

SEQ ID NO: 78528 - RNA, 32 nt, Homo Sapiens
cugcccuaaaauguauaauuagugaaaaauuu

SEQ ID NO: 78529 - RNA, 32 nt, Homo Sapiens
uuagcgcucaggucuuuuccuuccgccgaccc

SEQ ID NO: 78530 - RNA, 32 nt, Homo Sapiens
ccugccucagcccacaccugccucacccauug

SEQ ID NO: 78531 - RNA, 30 nt, Homo Sapiens
gcaucaugcgucgagggcgucugcuggaga

SEQ ID NO: 78532 - RNA, 32 nt, Homo Sapiens
gaggaaaagggagagggcgguugagaccaggc

SEQ ID NO: 78533 - RNA, 32 nt, Homo Sapiens
gaugaguccugucaagggggccacaggagagg

SEQ ID NO: 78534 - RNA, 32 nt, Homo Sapiens
aucaacugaagaucuuaugaccuaggcaaguu

SEQ ID NO: 78535 - RNA, 32 nt, Homo Sapiens
acuccccggcucucccccagccgcccgcagcc

SEQ ID NO: 78536 - RNA, 32 nt, Homo Sapiens
uggcccuguccccaagcucagcaccaccggcc

SEQ ID NO: 78537 - RNA, 32 nt, Homo Sapiens
aucagucagcaguggcuagguuaugcuuagug

SEQ ID NO: 78538 - RNA, 32 nt, Homo Sapiens
uuugcauuuacuaguauuuaagaguaaccuug

SEQ ID NO: 78539 - RNA, 32 nt, Homo Sapiens
ugaucaccacgauucaacaauuuggggcauug

SEQ ID NO: 78540 - RNA, 31 nt, Homo Sapiens
aaaaugccccucgugugaccauagauugaga

SEQ ID NO: 78541 - RNA, 32 nt, Homo Sapiens
guagggcgagacggaguuucgucauguuggcc

SEQ ID NO: 78542 - RNA, 32 nt, Homo Sapiens
ccggacgaggcccagccagucugggucuggcc

SEQ ID NO: 78543 - RNA, 32 nt, Homo Sapiens
gcaggaauggagugaggaagugagaagugggg

SEQ ID NO: 78544 - RNA, 32 nt, Homo Sapiens
cgagagguuccggagccccggcgcgggcgggu

SEQ ID NO: 78545 - RNA, 32 nt, Homo Sapiens
guggcagguuugggggagaccggaagugacga

SEQ ID NO: 78546 - RNA, 32 nt, Homo Sapiens
cugcuacaucgacuccacgcccugccgcuacu

SEQ ID NO: 78547 - RNA, 32 nt, Homo Sapiens
gacugcuccuccucuuccuccuccuccuccaa

SEQ ID NO: 78548 - RNA, 32 nt, Homo Sapiens
uggacgugugcagaggugggggugcugagcga

SEQ ID NO: 78549 - RNA, 32 nt, Homo Sapiens
aaccagauauguauuugcuacucaaguguaca

SEQ ID NO: 78550 - RNA, 30 nt, Homo Sapiens
aaccaguacuugucaguccaucuuaauacu

SEQ ID NO: 78551 - RNA, 32 nt, Homo Sapiens
aucuaaacccaccguuaccaagaaugcacaaa

SEQ ID NO: 78552 - RNA, 32 nt, Homo Sapiens
cuucaugcgcggugucucugcgccugaguaac

SEQ ID NO: 78553 - RNA, 32 nt, Homo Sapiens
uggguuucacauacucaccacggcuagucuag

SEQ ID NO: 78554 - RNA, 31 nt, Homo Sapiens
gggagccgcagcugcaggaguccugcccgcc

SEQ ID NO: 78555 - RNA, 32 nt, Homo Sapiens
uccuuacucuuugcauauucugcaucugagac

SEQ ID NO: 78556 - RNA, 32 nt, Homo Sapiens
gaacuguggucucguccaucugcacagccagg

SEQ ID NO: 78557 - RNA, 32 nt, Homo Sapiens
caaagguugacuguaagaggagagcggccuuc

SEQ ID NO: 78558 - RNA, 32 nt, Homo Sapiens
gcccuuucuucucaggccccagcccuuccgaa

SEQ ID NO: 78559 - RNA, 32 nt, Homo Sapiens
gaggccccuggccuaccagacccuuuucucag

SEQ ID NO: 78560 - RNA, 32 nt, Homo Sapiens
augcucaggucagacuggccucuucuuauggg

SEQ ID NO: 78561 - RNA, 32 nt, Homo Sapiens
uaggagaggcuuuggaccugggagccacaccu

SEQ ID NO: 78562 - RNA, 32 nt, Homo Sapiens
ggggaaucuauuuuuucucuccuuuucuuuuc

SEQ ID NO: 78563 - RNA, 32 nt, Homo Sapiens
ucagaaacugucgaccagaguuagaacggagc

SEQ ID NO: 78564 - RNA, 32 nt, Homo Sapiens
cgugagguccaggcuccugcccugcccgcccc

SEQ ID NO: 78565 - RNA, 32 nt, Homo Sapiens
agaagcucgucuuuccucuccgccucuccucc

SEQ ID NO: 78566 - RNA, 32 nt, Homo Sapiens
cucugagagugccggccgcggggcccucgcag

SEQ ID NO: 78567 - RNA, 32 nt, Homo Sapiens
uuaauguuucuuaaauggaauuauuugaaugu

SEQ ID NO: 78568 - RNA, 32 nt, Homo Sapiens
cuuugucuuuugcuugcauuuucuagauccac

SEQ ID NO: 78569 - RNA, 32 nt, Homo Sapiens
ggcacuguuccugaaaacgaucuuuacaaagc

SEQ ID NO: 78570 - RNA, 32 nt, Homo Sapiens
aagagcuuuccucuccucucucuugcucucag

SEQ ID NO: 78571 - RNA, 31 nt, Homo Sapiens
uguuucuccuggagaaagauccaucauuucu

SEQ ID NO: 78572 - RNA, 32 nt, Homo Sapiens
gcaaggugggucugggagguagauaugggucc

SEQ ID NO: 78573 - RNA, 32 nt, Homo Sapiens
gcuuuucucgacaagcuccccuguaagaaauc

SEQ ID NO: 78574 - RNA, 32 nt, Homo Sapiens
ucuauuucauggaauuugggauugaaguuaaa

SEQ ID NO: 78575 - RNA, 32 nt, Homo Sapiens
uuuacaaacaaauaaacauuguuuuguacuca

SEQ ID NO: 78576 - RNA, 32 nt, Homo Sapiens
ccaccuuccuuccuuuguccuugcauuccgca

SEQ ID NO: 78577 - RNA, 32 nt, Homo Sapiens
cuguauugauaaaaagucagucuugccacuac

SEQ ID NO: 78578 - RNA, 32 nt, Homo Sapiens
cgcucccuccgccuccuccccgccccgagccc

SEQ ID NO: 78579 - RNA, 32 nt, Homo Sapiens
gcacauuuuauuuccauuuguuuggauucauu

SEQ ID NO: 78580 - RNA, 32 nt, Homo Sapiens
uccucugccuucuccuuaucagacuacucaac

SEQ ID NO: 78581 - RNA, 32 nt, Homo Sapiens
aagaaauucaggccccaccuccccacccugcc

SEQ ID NO: 78582 - RNA, 32 nt, Homo Sapiens
gcuccuuggagucauguucccagccgccccuu

SEQ ID NO: 78583 - RNA, 32 nt, Homo Sapiens
cuggcugcccugaccuagcagcuaaucucugc

SEQ ID NO: 78584 - RNA, 32 nt, Homo Sapiens
uucaccccacuacaaugauguuuaccagcacu

SEQ ID NO: 78585 - RNA, 32 nt, Homo Sapiens
cccuugaagcggauaccauuauagaaaagugu

SEQ ID NO: 78586 - RNA, 32 nt, Homo Sapiens
ggcuggccucgaacuccugaccucaggugauc

SEQ ID NO: 78587 - RNA, 32 nt, Homo Sapiens
cacuggucucaaacuccugaccucaggugauc

SEQ ID NO: 78588 - RNA, 32 nt, Homo Sapiens
aaucaaguguaaggcuaaauaaaggcauuuuu

SEQ ID NO: 78589 - RNA, 32 nt, Homo Sapiens
cucaacaacuaaaauauaauacugaagaugaa

SEQ ID NO: 78590 - RNA, 32 nt, Homo Sapiens
gcagcccuugcuuuuugcuugcucucccacag

SEQ ID NO: 78591 - RNA, 32 nt, Homo Sapiens
acaaaaacaaaaaacuaagucugcucagugaa

SEQ ID NO: 78592 - RNA, 32 nt, Homo Sapiens
cugcugcugaaggcccugcugcuacugcugcu

SEQ ID NO: 78593 - RNA, 32 nt, Homo Sapiens
gcagagcggcggugggggcgggggcagcaagc

SEQ ID NO: 78594 - RNA, 32 nt, Homo Sapiens
ugguggaugugcuauuuucuuaaaggaguaug

SEQ ID NO: 78595 - RNA, 32 nt, Homo Sapiens
cccuucugcguuguuaugccacuucccuacug

SEQ ID NO: 78596 - RNA, 32 nt, Homo Sapiens
gguuuuucuugacuacacugagcacuuguuuc

SEQ ID NO: 78597 - RNA, 32 nt, Homo Sapiens
aacugcaagcucagaagugcugguguaaacau

SEQ ID NO: 78598 - RNA, 32 nt, Homo Sapiens
guguuacuuguggauagcacaaauauuuccug

SEQ ID NO: 78599 - RNA, 32 nt, Homo Sapiens
acauccuggccucuccucuccacggucgccug

SEQ ID NO: 78600 - RNA, 32 nt, Homo Sapiens
guaucuugugcauuuuaacuuuuuuuccuuaa

SEQ ID NO: 78601 - RNA, 32 nt, Homo Sapiens
cccguuucucaccucccaacaguugcuguucc

SEQ ID NO: 78602 - RNA, 32 nt, Homo Sapiens
ggggugggcgaggccugagcugcgggcugccc

SEQ ID NO: 78603 - RNA, 32 nt, Homo Sapiens
cugcgugcacucaccuggccgccgggccagcg

SEQ ID NO: 78604 - RNA, 32 nt, Homo Sapiens
agaggcugcugugcccucuggggagcccggcc

SEQ ID NO: 78605 - RNA, 32 nt, Homo Sapiens
gacuguuuuuuuuuuucuuuuucuuuuuuccu

SEQ ID NO: 78606 - RNA, 32 nt, Homo Sapiens
uguuugugaaaaaguuuuauuuccuguuaugu

SEQ ID NO: 78607 - RNA, 32 nt, Homo Sapiens
cgcggggcggguggagagcgucucuccgggcg

SEQ ID NO: 78608 - RNA, 32 nt, Homo Sapiens
ggaaaauggcucccuuaucaccauccugguca

SEQ ID NO: 78609 - RNA, 32 nt, Homo Sapiens
auuuuuuaaagacugugaaauguuugucuuuu

SEQ ID NO: 78610 - RNA, 32 nt, Homo Sapiens
ugugaguguuuauugguuuucuuaagagaaau

SEQ ID NO: 78611 - RNA, 32 nt, Homo Sapiens
gaaggaggaggaggaguagcccugaaacaaag

SEQ ID NO: 78612 - RNA, 32 nt, Homo Sapiens
aaaugcacaauauauuuauguauauacacaua

SEQ ID NO: 78613 - RNA, 32 nt, Homo Sapiens
gguuucuguuggcuguuuuucuuuucuuggag

SEQ ID NO: 78614 - RNA, 32 nt, Homo Sapiens
cuuuuguagaggaagcaagggcugggaugggg

SEQ ID NO: 78615 - RNA, 32 nt, Homo Sapiens
gagaacacauucaaaucaguuauugcacagau

SEQ ID NO: 78616 - RNA, 32 nt, Homo Sapiens
caucaacaaccgacuaaucaccacccaacaau

SEQ ID NO: 78617 - RNA, 32 nt, Homo Sapiens
cagggauagaguggaacccuggucaucggggu

SEQ ID NO: 78618 - RNA, 32 nt, Homo Sapiens
aggcuuggggcaauugguaaaggaaagagcag

SEQ ID NO: 78619 - RNA, 32 nt, Homo Sapiens
acaggaaggaggaggggaagcaguggaugugg

SEQ ID NO: 78620 - RNA, 32 nt, Homo Sapiens
ccuuugcucugccccugaagucuaucugcagg

SEQ ID NO: 78621 - RNA, 32 nt, Homo Sapiens
cacggguccgagccggggacggcggcgucggu

SEQ ID NO: 78622 - RNA, 32 nt, Homo Sapiens
ggcgcuugguuagcagguggacaggcguccuc

SEQ ID NO: 78623 - RNA, 32 nt, Homo Sapiens
cuuuguuacccaugcuggucuugaacuucugg

SEQ ID NO: 78624 - RNA, 32 nt, Homo Sapiens
gugcaggcuuccccggccccugcuguggugcu

SEQ ID NO: 78625 - RNA, 32 nt, Homo Sapiens
ggugaggaggagcuacagaugauucagccuga

SEQ ID NO: 78626 - RNA, 32 nt, Homo Sapiens
acucuucuccaagucuagcuuuccuuuccuuc

SEQ ID NO: 78627 - RNA, 27 nt, Homo Sapiens
ccaugggcgggaagaacaagcagcgaa

SEQ ID NO: 78628 - RNA, 32 nt, Homo Sapiens
caggcauaaggaaaacgauacuaauggcagca

SEQ ID NO: 78629 - RNA, 32 nt, Homo Sapiens
cugaccuccugccugaguuugggguauuuaua

SEQ ID NO: 78630 - RNA, 32 nt, Homo Sapiens
aauaacgguuuuuauuuugauuuuuucaguau

SEQ ID NO: 78631 - RNA, 32 nt, Homo Sapiens
aagagugcccuuccaugaacacaugugcugga

SEQ ID NO: 78632 - RNA, 32 nt, Homo Sapiens
cuuaaaaagccggggccaccccggcccaggac

SEQ ID NO: 78633 - RNA, 31 nt, Homo Sapiens
gacacuuucaggacccaguccacuguauggc

SEQ ID NO: 78634 - RNA, 32 nt, Homo Sapiens
ugggaggugucuguggggcccgaggccugucc

SEQ ID NO: 78635 - RNA, 32 nt, Homo Sapiens
cagcuccaccugcaucuucucaucaaagccau

SEQ ID NO: 78636 - RNA, 32 nt, Homo Sapiens
uauccgucuugcuuuuaaccuauguaaauuuc

SEQ ID NO: 78637 - RNA, 32 nt, Homo Sapiens
acaguuuugucaaaaaguguaucuugacccca

SEQ ID NO: 78638 - RNA, 32 nt, Homo Sapiens
aaauuaaaggaauggagaaauaaucaaaauca

SEQ ID NO: 78639 - RNA, 32 nt, Homo Sapiens
gcuggaggccgcgcgcgaugcggcucgcggag

SEQ ID NO: 78640 - RNA, 32 nt, Homo Sapiens
gcugguuggcauucuucuuaauguauuuagug

SEQ ID NO: 78641 - RNA, 32 nt, Homo Sapiens
cgcggguagcggcggcgggcgcuggaggcuuu

SEQ ID NO: 78642 - RNA, 32 nt, Homo Sapiens
aaagaagcauucaaaucugcuuucuacccuca

SEQ ID NO: 78643 - RNA, 32 nt, Homo Sapiens
uagcugccucugcugcccuuuacugugacaag

SEQ ID NO: 78644 - RNA, 32 nt, Homo Sapiens
auggagggacaacaaugguuucaacuguaugc

SEQ ID NO: 78645 - RNA, 32 nt, Homo Sapiens
cccgggaccugccccucuuucuuucccuucac

SEQ ID NO: 78646 - RNA, 32 nt, Homo Sapiens
uagacuucacucucucacucugauggagaauu

SEQ ID NO: 78647 - RNA, 32 nt, Homo Sapiens
aagacagcagggugggggugagcccacgcguc

SEQ ID NO: 78648 - RNA, 32 nt, Homo Sapiens
uuaauguuagagaugguaaagcugcacuuacu

SEQ ID NO: 78649 - RNA, 32 nt, Homo Sapiens
ccacaagcuucagcauggcaguaucucucacc

SEQ ID NO: 78650 - RNA, 32 nt, Homo Sapiens
aaaguuauuuaguuguucauuuucaguuauuu

SEQ ID NO: 78651 - RNA, 28 nt, Homo Sapiens
ucuuccuggugcaaaauuauaaaugggg

SEQ ID NO: 78652 - RNA, 32 nt, Homo Sapiens
gagagugaugaaaucagauguuuggcugagga

SEQ ID NO: 78653 - RNA, 32 nt, Homo Sapiens
cccucagcguuguacauucuguggguuuggac

SEQ ID NO: 78654 - RNA, 32 nt, Homo Sapiens
ggacaggcgccgugggucucccgggccuccgu

SEQ ID NO: 78655 - RNA, 32 nt, Homo Sapiens
agggugaaaccccaucucuaauaaaaauacaa

SEQ ID NO: 78656 - RNA, 32 nt, Homo Sapiens
guuagugauuuccauccuuaauuugggaaugu

SEQ ID NO: 78657 - RNA, 32 nt, Homo Sapiens
ugcugcaggacuggaucccaccccccugcagg

SEQ ID NO: 78658 - RNA, 32 nt, Homo Sapiens
cagacuguuuaauccaaaucugcauugcaaug

SEQ ID NO: 78659 - RNA, 32 nt, Homo Sapiens
uggagacggacggcaggauggauucacuuggc

SEQ ID NO: 78660 - RNA, 32 nt, Homo Sapiens
cuggagccuugggagcucuuuggccuccuggc

SEQ ID NO: 78661 - RNA, 27 nt, Homo Sapiens
ugguuacauuaauuuuaguuuauuuuc

SEQ ID NO: 78662 - RNA, 32 nt, Homo Sapiens
aggcuuuugugauaugucaccguaugccuuag

SEQ ID NO: 78663 - RNA, 32 nt, Homo Sapiens
auaccauggaaugucagaaaugacuuuaucau

SEQ ID NO: 78664 - RNA, 32 nt, Homo Sapiens
guuuccccacccaaaucucaccuugaauuuua

SEQ ID NO: 78665 - RNA, 32 nt, Homo Sapiens
ugugucaccugucugcccuucauuaaggugag

SEQ ID NO: 78666 - RNA, 32 nt, Homo Sapiens
ucucuacugucuguggggugguuccgggcugg

SEQ ID NO: 78667 - RNA, 28 nt, Homo Sapiens
ugcggccugacugccaggauggcucgga

SEQ ID NO: 78668 - RNA, 32 nt, Homo Sapiens
caucauaaugcaauuauguguaucauaacaug

SEQ ID NO: 78669 - RNA, 32 nt, Homo Sapiens
cgaggggaaugggggaagggccacaaccucug

SEQ ID NO: 78670 - RNA, 32 nt, Homo Sapiens
gaaacucucugcaaagggcugccccagaagca

SEQ ID NO: 78671 - RNA, 32 nt, Homo Sapiens
ucccagguuaugcucuuuucuuucucaggguc

SEQ ID NO: 78672 - RNA, 32 nt, Homo Sapiens
ccugggccccucuuauuccucuaggcaagcag

SEQ ID NO: 78673 - RNA, 32 nt, Homo Sapiens
ggcacuugggaguggggugagagcuaaacauu

SEQ ID NO: 78674 - RNA, 32 nt, Homo Sapiens
ccagguacagagaugagaagugggucugagaa

SEQ ID NO: 78675 - RNA, 32 nt, Homo Sapiens
gcaccgaggucuugcggcacaggcaacgcuug

SEQ ID NO: 78676 - RNA, 32 nt, Homo Sapiens
cccccuuauuuaaaugugugcuaugacccacu

SEQ ID NO: 78677 - RNA, 32 nt, Homo Sapiens
gaacucauuugguuuuucuccucucuuauuuu

SEQ ID NO: 78678 - RNA, 32 nt, Homo Sapiens
ugaugcauuguuuuugcaauugaccuaugaca

SEQ ID NO: 78679 - RNA, 32 nt, Homo Sapiens
agccacuccagccccagcccagccuggggugc

SEQ ID NO: 78680 - RNA, 32 nt, Homo Sapiens
uagucgggaggccucgguagccaggcagaaca

SEQ ID NO: 78681 - RNA, 32 nt, Homo Sapiens
uugaugagcugaggaaggcuuauuuggagauu

SEQ ID NO: 78682 - RNA, 32 nt, Homo Sapiens
ggcuucaguuguuccuccauggcuagaaccau

SEQ ID NO: 78683 - RNA, 32 nt, Homo Sapiens
uucugcuggaaagcugacguggggcaauccgu

SEQ ID NO: 78684 - RNA, 32 nt, Homo Sapiens
uuccaugcuuucuccuucaguccauuccgcaa

SEQ ID NO: 78685 - RNA, 32 nt, Homo Sapiens
ccugagcucaggaguuugagaccagccugucu

SEQ ID NO: 78686 - RNA, 32 nt, Homo Sapiens
ugucgugccccuaccccacgccgccccaccac

SEQ ID NO: 78687 - RNA, 32 nt, Homo Sapiens
ccugucugccagccugcagcucuccugcuuga

SEQ ID NO: 78688 - RNA, 32 nt, Homo Sapiens
cguagaagccaggcgucagagcccgggcuccg

SEQ ID NO: 78689 - RNA, 32 nt, Homo Sapiens
cagcuucagaucuggucuuggcgagcucucgc

SEQ ID NO: 78690 - RNA, 32 nt, Homo Sapiens
gaacccagcaacccaggagccuaguacaauau

SEQ ID NO: 78691 - RNA, 32 nt, Homo Sapiens
gaacagcucaaacacaucaguggccuacugga

SEQ ID NO: 78692 - RNA, 32 nt, Homo Sapiens
ggucccgcccgccgcgcugccgcugagcgcau

SEQ ID NO: 78693 - RNA, 32 nt, Homo Sapiens
cugguuugacauugcuaaguauauccuguaua

SEQ ID NO: 78694 - RNA, 32 nt, Homo Sapiens
cugcuacauacuuacuccgguugggugcugac

SEQ ID NO: 78695 - RNA, 32 nt, Homo Sapiens
aauguggcuuaaaagaaauuaaccaccuagga

SEQ ID NO: 78696 - RNA, 32 nt, Homo Sapiens
caccuguaaucccagcacuuugggaggccaaa

SEQ ID NO: 78697 - RNA, 32 nt, Homo Sapiens
caccugugaucccagcacuuugggaggccaag

SEQ ID NO: 78698 - RNA, 32 nt, Homo Sapiens
uugacuguugcccaagcuggaaugcaguggca

SEQ ID NO: 78699 - RNA, 32 nt, Homo Sapiens
ucgaggacccugugcaagacucggccgguuuu

SEQ ID NO: 78700 - RNA, 32 nt, Homo Sapiens
uucuagccuuggagaaaugacaauggccacac

SEQ ID NO: 78701 - RNA, 32 nt, Homo Sapiens
gccuuuugucuccuugugccucuuuuuauccu

SEQ ID NO: 78702 - RNA, 32 nt, Homo Sapiens
gaccuaccauaccaccagcacccugcgggccc

SEQ ID NO: 78703 - RNA, 32 nt, Homo Sapiens
aaugugucauuaggcaauugcauuguagugug

SEQ ID NO: 78704 - RNA, 32 nt, Homo Sapiens
agccacaguucagacccuguccccucagcacc

SEQ ID NO: 78705 - RNA, 32 nt, Homo Sapiens
cgugggaggagaaagaccugaccguccacgag

SEQ ID NO: 78706 - RNA, 32 nt, Homo Sapiens
gcccucccgggcccgcaguggucgcggcggca

SEQ ID NO: 78707 - RNA, 32 nt, Homo Sapiens
cuccagugauagggaaaaaauauuuucacggg

SEQ ID NO: 78708 - RNA, 32 nt, Homo Sapiens
gugcaccccggcccaccgccccggggccauuc

SEQ ID NO: 78709 - RNA, 32 nt, Homo Sapiens
ugacaaccgacgaagaaaccgacgacaaaucu

SEQ ID NO: 78710 - RNA, 32 nt, Homo Sapiens
gcagcuggcaguagcccuccucucuggcugcc

SEQ ID NO: 78711 - RNA, 32 nt, Homo Sapiens
uggaugaugaucaauaauuauaccaaauauau

SEQ ID NO: 78712 - RNA, 32 nt, Homo Sapiens
acugcucugcccccuagaauguguguauuuua

SEQ ID NO: 78713 - RNA, 32 nt, Homo Sapiens
guugucacaguagccauguuucccuggcaucc

SEQ ID NO: 78714 - RNA, 32 nt, Homo Sapiens
cccagagcuccccaaccucggaccucaccgca

SEQ ID NO: 78715 - RNA, 32 nt, Homo Sapiens
cgucaggaccacagaccccccaggcccagcag

SEQ ID NO: 78716 - RNA, 32 nt, Homo Sapiens
gagcgccgggugagcagcgucucggcugccgc

SEQ ID NO: 78717 - RNA, 32 nt, Homo Sapiens
aaggcagcagaugcaacacaagggcagaaacu

SEQ ID NO: 78718 - RNA, 32 nt, Homo Sapiens
cgccuccccucgcgcccgagcuucgagccaag

SEQ ID NO: 78719 - RNA, 32 nt, Homo Sapiens
cagggauggucucuguuccccagcccaccugg

SEQ ID NO: 78720 - RNA, 32 nt, Homo Sapiens
ccucuuucugaagcuuccugugccaccagggg

SEQ ID NO: 78721 - RNA, 32 nt, Homo Sapiens
gaaaauuaaaacuacaccagaugccauuuuuu

SEQ ID NO: 78722 - RNA, 32 nt, Homo Sapiens
aagagaaguaauauaauuuucuuacaaaguau

SEQ ID NO: 78723 - RNA, 32 nt, Homo Sapiens
agauccaccaaaauaauguuuucuacauuuuc

SEQ ID NO: 78724 - RNA, 32 nt, Homo Sapiens
uuugggaaguaguuaagauaugccugcuaucu

SEQ ID NO: 78725 - RNA, 32 nt, Homo Sapiens
acaggccagcuccacaguguugccagagccuu

SEQ ID NO: 78726 - RNA, 32 nt, Homo Sapiens
gcgaggcacugacuaagcgaggcucagagcuu

SEQ ID NO: 78727 - RNA, 32 nt, Homo Sapiens
cugcauggcccuaagaaagucaccuuaucuca

SEQ ID NO: 78728 - RNA, 32 nt, Homo Sapiens
uccuuaaaaaucacacuguaaauaugaaucug

SEQ ID NO: 78729 - RNA, 32 nt, Homo Sapiens
uuguugagggugagggggugcugggguacccg

SEQ ID NO: 78730 - RNA, 32 nt, Homo Sapiens
gccggcgaggccaggugcggggcgcgcugcac

SEQ ID NO: 78731 - RNA, 32 nt, Homo Sapiens
gacggugucucgcucucucgcccaggcuggag

SEQ ID NO: 78732 - RNA, 32 nt, Homo Sapiens
ccugaccucaagugauccacccgccucagucu

SEQ ID NO: 78733 - RNA, 32 nt, Homo Sapiens
auaaaaggccccagucggggguauuuaaaaag

SEQ ID NO: 78734 - RNA, 32 nt, Homo Sapiens
cucagaaguggaagucaaggcuaguucaugua

SEQ ID NO: 78735 - RNA, 32 nt, Homo Sapiens
gggaccugcccccagcuucugccacgcuuuau

SEQ ID NO: 78736 - RNA, 32 nt, Homo Sapiens
ggggucaggggcuaggggagggggcugaguuu

SEQ ID NO: 78737 - RNA, 32 nt, Homo Sapiens
ccgggcacgguguggcucugggguuagaaugg

SEQ ID NO: 78738 - RNA, 30 nt, Homo Sapiens
gcgccaugcugcgccuggggcugugcgcgg

SEQ ID NO: 78739 - RNA, 32 nt, Homo Sapiens
uggcuauaauccuagcacuuugggaggcugaa

SEQ ID NO: 78740 - RNA, 32 nt, Homo Sapiens
gucccagccccggcaagccacaggaaggaggg

SEQ ID NO: 78741 - RNA, 32 nt, Homo Sapiens
auucauuuuuauuuuugucuuuguuuaacuuu

SEQ ID NO: 78742 - RNA, 32 nt, Homo Sapiens
ugacaguaagugaguucucacaagaucggaug

SEQ ID NO: 78743 - RNA, 32 nt, Homo Sapiens
uucuuaaguuuucaucaaagcuaauuugucua

SEQ ID NO: 78744 - RNA, 30 nt, Homo Sapiens
ccugaggauggcccugccuggcagaggagu

SEQ ID NO: 78745 - RNA, 32 nt, Homo Sapiens
uggauagaaauuguuuucaaagagaagggcag

SEQ ID NO: 78746 - RNA, 32 nt, Homo Sapiens
ccagggcaggacgaggugccgcccucgcccgg

SEQ ID NO: 78747 - RNA, 32 nt, Homo Sapiens
ggguggggcagggccuggccugguccaggcuu

SEQ ID NO: 78748 - RNA, 32 nt, Homo Sapiens
acuuuugagggaaauagaagggcugcguuaca

SEQ ID NO: 78749 - RNA, 32 nt, Homo Sapiens
ccuagggugauauuuccuuccuccccuuccag

SEQ ID NO: 78750 - RNA, 32 nt, Homo Sapiens
ccgaguagaacaaaauaaaaaauucaaaaaac

SEQ ID NO: 78751 - RNA, 30 nt, Homo Sapiens
aagcgcuuccagggaggcggcagggaguua

SEQ ID NO: 78752 - RNA, 32 nt, Homo Sapiens
gguggcuggggagugccuggauggugcggugg

SEQ ID NO: 78753 - RNA, 32 nt, Homo Sapiens
aaauaacaaaaaucauuauaaggcucuuaagu

SEQ ID NO: 78754 - RNA, 32 nt, Homo Sapiens
uuaaugccaucuauuucacugaagauuccgcc

SEQ ID NO: 78755 - RNA, 30 nt, Homo Sapiens
ggggcaugacccagcucucaucccuccaag

SEQ ID NO: 78756 - RNA, 32 nt, Homo Sapiens
gagcagccaggagacucccuagugcccccacc

SEQ ID NO: 78757 - RNA, 32 nt, Homo Sapiens
gcuuagccaauauggugaaaccccgucucuac

SEQ ID NO: 78758 - RNA, 32 nt, Homo Sapiens
ccaagugggcccggcgccaacggcucagccga

SEQ ID NO: 78759 - RNA, 32 nt, Homo Sapiens
ggaagacaaacccuggucauccccucagucug

SEQ ID NO: 78760 - RNA, 32 nt, Homo Sapiens
uggucccaagugucauuggaauuuauauuuua

SEQ ID NO: 78761 - RNA, 31 nt, Homo Sapiens
acuagcugucgcuccacaggcgagcagggca

SEQ ID NO: 78762 - RNA, 32 nt, Homo Sapiens
uauguauaaaauaccauugaaaagauauuacu

SEQ ID NO: 78763 - RNA, 32 nt, Homo Sapiens
auugaguucaaauauaguguuuuaucuuccac

SEQ ID NO: 78764 - RNA, 32 nt, Homo Sapiens
caccuagauuuaggaagauucauggaaaaguc

SEQ ID NO: 78765 - RNA, 32 nt, Homo Sapiens
uucuuggagggagaggggaacggacagcaaac

SEQ ID NO: 78766 - RNA, 32 nt, Homo Sapiens
cacagcccucagaaggauccagcccugccaag

SEQ ID NO: 78767 - RNA, 31 nt, Homo Sapiens
caggagagggcggaggccggcgggccaugcc

SEQ ID NO: 78768 - RNA, 32 nt, Homo Sapiens
agcgggcucagagcgccgcggcauucagcccc

SEQ ID NO: 78769 - RNA, 32 nt, Homo Sapiens
aaacaaaaauuccauaucuagccccaucccac

SEQ ID NO: 78770 - RNA, 32 nt, Homo Sapiens
uuuuuuccuuuugcuuuuuuuccuuuucuccc

SEQ ID NO: 78771 - RNA, 32 nt, Homo Sapiens
uuuuuuuuucuuucuuuuuuuuuuuuuuugag

SEQ ID NO: 78772 - RNA, 32 nt, Homo Sapiens
cgcgguacaaggaaaugguagaacuagugauc

SEQ ID NO: 78773 - RNA, 32 nt, Homo Sapiens
cucuugugaaagaauuacaacuucuuaucauc

SEQ ID NO: 78774 - RNA, 32 nt, Homo Sapiens
ugccccaagaauaauauguaccgacucaagaa

SEQ ID NO: 78775 - RNA, 32 nt, Homo Sapiens
caacuccuucccaacccuccccuccagggacg

SEQ ID NO: 78776 - RNA, 32 nt, Homo Sapiens
aauuuaauuguguggguuuuuaauuuuccuag

SEQ ID NO: 78777 - RNA, 32 nt, Homo Sapiens
cauuucaucgacaccgcaccccggaguccaaa

SEQ ID NO: 78778 - RNA, 32 nt, Homo Sapiens
gaauuaaagcauucuguaaauuuaguugaguc

SEQ ID NO: 78779 - RNA, 32 nt, Homo Sapiens
uauucaugucucacuauguaggcagaaugucc

SEQ ID NO: 78780 - RNA, 32 nt, Homo Sapiens
gugggaaggucggugaggggcccgagguggca

SEQ ID NO: 78781 - RNA, 32 nt, Homo Sapiens
cacagccaccuggucagccaccagcuggggca

SEQ ID NO: 78782 - RNA, 32 nt, Homo Sapiens
cuuugucagcgcgcccgcugggagcggggccg

SEQ ID NO: 78783 - RNA, 32 nt, Homo Sapiens
aacaccucagaauucagaagauaugaacgcau

SEQ ID NO: 78784 - RNA, 32 nt, Homo Sapiens
cagugaaugcaaaaaaaaaaaaaaaaaaaaaa

SEQ ID NO: 78785 - RNA, 32 nt, Homo Sapiens
ccccgccccguccucuguccguaccgcccccg

SEQ ID NO: 78786 - RNA, 32 nt, Homo Sapiens
agauuucuauccuuagcuuuggcauuauugac

SEQ ID NO: 78787 - RNA, 32 nt, Homo Sapiens
uccgcuugucuccuggguacuccaucccauag

SEQ ID NO: 78788 - RNA, 32 nt, Homo Sapiens
uuagaaccaccgccccucuccccaccccaggc

SEQ ID NO: 78789 - RNA, 32 nt, Homo Sapiens
uuugucuggacaccgagagcgaccacauccug

SEQ ID NO: 78790 - RNA, 32 nt, Homo Sapiens
uuuucaaacugcccaaccaccuaagcaaagag

SEQ ID NO: 78791 - RNA, 32 nt, Homo Sapiens
caucucagaaugcugcaggcaccagccguuca

SEQ ID NO: 78792 - RNA, 32 nt, Homo Sapiens
acaguucugucccuagcuugaccgcuggcucg

SEQ ID NO: 78793 - RNA, 32 nt, Homo Sapiens
ccagugaggggcagugggggggccaugcugca

SEQ ID NO: 78794 - RNA, 32 nt, Homo Sapiens
caggguggggucuggaacuugucggguuggac

SEQ ID NO: 78795 - RNA, 32 nt, Homo Sapiens
gugaaaugggagcacaguacugggaaauggga

SEQ ID NO: 78796 - RNA, 32 nt, Homo Sapiens
ugacucgccccaccacccccagcccugucccu

SEQ ID NO: 78797 - RNA, 32 nt, Homo Sapiens
uuugaacuugucgaaccagaucuucucaugua

SEQ ID NO: 78798 - RNA, 32 nt, Homo Sapiens
ugaaugaaaaaauaaacgagugaauguugaua

SEQ ID NO: 78799 - RNA, 32 nt, Homo Sapiens
aauauguuacacucagaaaugaugaaaccaaa

SEQ ID NO: 78800 - RNA, 32 nt, Homo Sapiens
ccuuccuacccuccccugccaggaucugcagu

SEQ ID NO: 78801 - RNA, 32 nt, Homo Sapiens
gguaaccacaaaguuaugaugaacugcaaaca

SEQ ID NO: 78802 - RNA, 32 nt, Homo Sapiens
cugggcuguagggcagggccacuuccugaggu

SEQ ID NO: 78803 - RNA, 32 nt, Homo Sapiens
gagccuccagaccgccccuggccccgcccccc

SEQ ID NO: 78804 - RNA, 32 nt, Homo Sapiens
uuucaccucacaguucaugaacauuucccaug

SEQ ID NO: 78805 - RNA, 32 nt, Homo Sapiens
uugaaaccagcuucagaaaacaagaugccaua

SEQ ID NO: 78806 - RNA, 29 nt, Homo Sapiens
gggucuccgguccagggcgcggcaugggc

SEQ ID NO: 78807 - RNA, 32 nt, Homo Sapiens
cucauccagccacgucucggaaggucugugac

SEQ ID NO: 78808 - RNA, 32 nt, Homo Sapiens
uuuuaaaagagagaauuagaaaauauuaaauc

SEQ ID NO: 78809 - RNA, 32 nt, Homo Sapiens
gccuguuccuuccuuuucuuuaaacgucccag

SEQ ID NO: 78810 - RNA, 32 nt, Homo Sapiens
cuggugauaucugugcuucucauaauuacuga

SEQ ID NO: 78811 - RNA, 32 nt, Homo Sapiens
acagccccucaacuccacggacucuucgcccu

SEQ ID NO: 78812 - RNA, 32 nt, Homo Sapiens
ggaacacuuacaaagaaggcauugaucuugug

SEQ ID NO: 78813 - RNA, 32 nt, Homo Sapiens
ccuggcaccaugcacggccagcaagaaucaag

SEQ ID NO: 78814 - RNA, 32 nt, Homo Sapiens
ugucuguagcauaaggucugguaacugcagaa

SEQ ID NO: 78815 - RNA, 32 nt, Homo Sapiens
cuacaacauguugguagauuaacuuaauacca

SEQ ID NO: 78816 - RNA, 32 nt, Homo Sapiens
acaaguaccauuuuaauaaagcauguacaaua

SEQ ID NO: 78817 - RNA, 32 nt, Homo Sapiens
ucuacaagaauguuuccuuuuacuucaguuaa

SEQ ID NO: 78818 - RNA, 32 nt, Homo Sapiens
caugugugccuguguccacaccaugacccugu

SEQ ID NO: 78819 - RNA, 32 nt, Homo Sapiens
ggaaacugauguuacauuagguuccaauucgc

SEQ ID NO: 78820 - RNA, 32 nt, Homo Sapiens
ccuguguuauuuacauuagcugcuuaaaaaag

SEQ ID NO: 78821 - RNA, 32 nt, Homo Sapiens
ggugauggccccaguucuaccacuaacuagcc

SEQ ID NO: 78822 - RNA, 29 nt, Homo Sapiens
uuguguauagugaugugucuguaucuuua

SEQ ID NO: 78823 - RNA, 32 nt, Homo Sapiens
cgcggugggggcgggguggggggucuggacgg

SEQ ID NO: 78824 - RNA, 32 nt, Homo Sapiens
uuuauugacucauuuuauugcaaaacaaaaag

SEQ ID NO: 78825 - RNA, 32 nt, Homo Sapiens
uuggcuucaaaauaagauuguguuaucaccau

SEQ ID NO: 78826 - RNA, 32 nt, Homo Sapiens
cuuacugauuuagauauauuacuaguaucaga

SEQ ID NO: 78827 - RNA, 32 nt, Homo Sapiens
ugcaugggagacggcgagccucccguccaggu

SEQ ID NO: 78828 - RNA, 32 nt, Homo Sapiens
aguagcuuguaucuggagucuugagaaacaca

SEQ ID NO: 78829 - RNA, 32 nt, Homo Sapiens
cuguccucgggaaugaaccucccgcgggcuuu

SEQ ID NO: 78830 - RNA, 32 nt, Homo Sapiens
guuuagugaaacauuugugaaaaaagaagacu

SEQ ID NO: 78831 - RNA, 32 nt, Homo Sapiens
ugacuuuaaaagauuauuaaggagaauauucc

SEQ ID NO: 78832 - RNA, 32 nt, Homo Sapiens
gccuagagggugggggccagggguauuugcau

SEQ ID NO: 78833 - RNA, 32 nt, Homo Sapiens
auaugguagacaauuugccuuaggaagugacu

SEQ ID NO: 78834 - RNA, 32 nt, Homo Sapiens
gaauaaaaugaaauuucauaacuguggcuauu

SEQ ID NO: 78835 - RNA, 32 nt, Homo Sapiens
ugugacuccagcgaccccugcuggccagagcg

SEQ ID NO: 78836 - RNA, 32 nt, Homo Sapiens
cacagcucaggagaguugugagggaugggacg

SEQ ID NO: 78837 - RNA, 32 nt, Homo Sapiens
agaucggcgagggaggacaggggguucaucau

SEQ ID NO: 78838 - RNA, 32 nt, Homo Sapiens
uccgcgcggugacagcuuuaagaugaaggagg

SEQ ID NO: 78839 - RNA, 32 nt, Homo Sapiens
auugaagaugaugaugaagaaccucugcauuc

SEQ ID NO: 78840 - RNA, 32 nt, Homo Sapiens
gaacuggcccuggccugucuccagcucugcgc

SEQ ID NO: 78841 - RNA, 32 nt, Homo Sapiens
gaccagaaaaacuaucuuaauacuguauacug

SEQ ID NO: 78842 - RNA, 32 nt, Homo Sapiens
auugauuuuuaaaaacuauuuauuucuaggag

SEQ ID NO: 78843 - RNA, 32 nt, Homo Sapiens
cucuccuuugcuuuccucgggaugccacucug

SEQ ID NO: 78844 - RNA, 32 nt, Homo Sapiens
cugguugcagcggcgccuggugccgcgcaagg

SEQ ID NO: 78845 - RNA, 32 nt, Homo Sapiens
gaaucaaagccugagucacucuauuuaaccuu

SEQ ID NO: 78846 - RNA, 32 nt, Homo Sapiens
caaagaaaaucgcgggcgccggugccucagcc

SEQ ID NO: 78847 - RNA, 32 nt, Homo Sapiens
ucggggugguggcugggcagcgccuauguuuc

SEQ ID NO: 78848 - RNA, 32 nt, Homo Sapiens
aauguaauaauccuaaaaucagguuuacuuaa

SEQ ID NO: 78849 - RNA, 32 nt, Homo Sapiens
guuccuuuguaucugacaaucucaggacucca

SEQ ID NO: 78850 - RNA, 32 nt, Homo Sapiens
gccucgcgaaggaaacagagccguugaccaug

SEQ ID NO: 78851 - RNA, 32 nt, Homo Sapiens
ggacacaggacaccugacugauagugaaugua

SEQ ID NO: 78852 - RNA, 32 nt, Homo Sapiens
uaucagaauaauaucuacaauaucauuugugg

SEQ ID NO: 78853 - RNA, 32 nt, Homo Sapiens
aguagaacaauaaaacauuuauuuucauugac

SEQ ID NO: 78854 - RNA, 32 nt, Homo Sapiens
gcaagauuauguuuucuguuuccaggguuaug

SEQ ID NO: 78855 - RNA, 32 nt, Homo Sapiens
ccaccuuauucaucagacguggcccuggauga

SEQ ID NO: 78856 - RNA, 32 nt, Homo Sapiens
cuauucagggauuuuuccccuuugcucuucuu

SEQ ID NO: 78857 - RNA, 32 nt, Homo Sapiens
aaaaagcaguugcuaugugcuuucuuacccug

SEQ ID NO: 78858 - RNA, 32 nt, Homo Sapiens
gaacugaccccuccuuccucccucccugugcu

SEQ ID NO: 78859 - RNA, 32 nt, Homo Sapiens
agggaggccaccagcccucccccaucuucuuc

SEQ ID NO: 78860 - RNA, 32 nt, Homo Sapiens
aaaccauauggacaauaugaauuuuaauauua

SEQ ID NO: 78861 - RNA, 27 nt, Homo Sapiens
gaagagugaauuuucagcccucagagc

SEQ ID NO: 78862 - RNA, 32 nt, Homo Sapiens
aaugacuucauuaugaucaugauuugccacaa

SEQ ID NO: 78863 - RNA, 32 nt, Homo Sapiens
agcuacuuucuuuuacucuucaaauaacaaga

SEQ ID NO: 78864 - RNA, 32 nt, Homo Sapiens
caacccuguuauaaguuuauuaauauuaugua

SEQ ID NO: 78865 - RNA, 32 nt, Homo Sapiens
acggacccucuggauggccggagcagacacua

SEQ ID NO: 78866 - RNA, 32 nt, Homo Sapiens
gcauguucauguuuaagcaguuacuguaacaa

SEQ ID NO: 78867 - RNA, 32 nt, Homo Sapiens
ucuuuugccaaugggugguggcauugauuuuu

SEQ ID NO: 78868 - RNA, 30 nt, Homo Sapiens
aaauuaccacuugccauuaagcuauuucau

SEQ ID NO: 78869 - RNA, 32 nt, Homo Sapiens
uuuuccagucuccuuagaaaaauggcaacaca

SEQ ID NO: 78870 - RNA, 32 nt, Homo Sapiens
uuaucuucauuagcuauauccauccuuuaauc

SEQ ID NO: 78871 - RNA, 32 nt, Homo Sapiens
agugaccuauuuuuuaaaaaaaucacacucua

SEQ ID NO: 78872 - RNA, 32 nt, Homo Sapiens
gcaaucucacugcaagcuccacuuccuggguu

SEQ ID NO: 78873 - RNA, 32 nt, Homo Sapiens
cgcacgggguacugaggcggaagguuugaagg

SEQ ID NO: 78874 - RNA, 32 nt, Homo Sapiens
ugcuguaagcuucuccucucucaccccguaaa

SEQ ID NO: 78875 - RNA, 32 nt, Homo Sapiens
gaagacauacugggcuuggcucaugcuuuaau

SEQ ID NO: 78876 - RNA, 32 nt, Homo Sapiens
accaucagggguuaguugugguugugauaaau

SEQ ID NO: 78877 - RNA, 32 nt, Homo Sapiens
uuugguuucuuacuaaugccuuucuucuaaaa

SEQ ID NO: 78878 - RNA, 32 nt, Homo Sapiens
gcaagccccacuuauuccccauucuuccuagu

SEQ ID NO: 78879 - RNA, 32 nt, Homo Sapiens
agcaaaaagaucugggauauguguuggaaaac

SEQ ID NO: 78880 - RNA, 32 nt, Homo Sapiens
uauaugucauauuuauuuuaucuagaguagcu

SEQ ID NO: 78881 - RNA, 32 nt, Homo Sapiens
accagguguccaaggccaccucugcagggguu

SEQ ID NO: 78882 - RNA, 32 nt, Homo Sapiens
aaucaaauauuuuuggcauaucuguugcuacu

SEQ ID NO: 78883 - RNA, 32 nt, Homo Sapiens
gggcucuggacgcuacucuaucuacauugcca

SEQ ID NO: 78884 - RNA, 32 nt, Homo Sapiens
uauaaauauauucaggaguuggaauguuguag

SEQ ID NO: 78885 - RNA, 32 nt, Homo Sapiens
agugaauggcaccucccucuuguuuguucuuc

SEQ ID NO: 78886 - RNA, 32 nt, Homo Sapiens
aaacuuuucaagccuuuuuagagaaccagggg

SEQ ID NO: 78887 - RNA, 32 nt, Homo Sapiens
guaucagcagugcuugcaccucauaggugaug

SEQ ID NO: 78888 - RNA, 31 nt, Homo Sapiens
agcugacggagcauguggagagccugcagag

SEQ ID NO: 78889 - RNA, 32 nt, Homo Sapiens
aguacgccacgcugcacggcuaccggaccaac

SEQ ID NO: 78890 - RNA, 32 nt, Homo Sapiens
ccccgguccaguggcugccucccggccuccuc

SEQ ID NO: 78891 - RNA, 32 nt, Homo Sapiens
uucaaaucaaaagccagggaaaucuaagugca

SEQ ID NO: 78892 - RNA, 32 nt, Homo Sapiens
cucuuuugguuugaaugacaguucucauuccu

SEQ ID NO: 78893 - RNA, 32 nt, Homo Sapiens
gagggaauggucaaguuguuucaugaguuugc

SEQ ID NO: 78894 - RNA, 30 nt, Homo Sapiens
uuguaugguguaaauaucaagaguacagcu

SEQ ID NO: 78895 - RNA, 32 nt, Homo Sapiens
ggacuuuaaucacaucuacaaaacacuuccau

SEQ ID NO: 78896 - RNA, 32 nt, Homo Sapiens
gccgcgugcgcaccuuccuguccuagccaggu

SEQ ID NO: 78897 - RNA, 32 nt, Homo Sapiens
aaaacuuuaauagaaaaaugucugcaguuuug

SEQ ID NO: 78898 - RNA, 32 nt, Homo Sapiens
uaauguauuaaccaaaguauguuauaaaucaa

SEQ ID NO: 78899 - RNA, 32 nt, Homo Sapiens
cauguguuacuuaauccucaucuaccagguag

SEQ ID NO: 78900 - RNA, 32 nt, Homo Sapiens
aagcauauuauuauauacagguugaguauccc

SEQ ID NO: 78901 - RNA, 32 nt, Homo Sapiens
gcccuaggcuuauggaggaacacgguggagag

SEQ ID NO: 78902 - RNA, 31 nt, Homo Sapiens
cggcggcccggcagccaacauggcggcggcg

SEQ ID NO: 78903 - RNA, 32 nt, Homo Sapiens
agcaaggaagagaaaucuuaaucuucaaguua

SEQ ID NO: 78904 - RNA, 32 nt, Homo Sapiens
cugaggaguggcgugugggucuccggaagcuc

SEQ ID NO: 78905 - RNA, 32 nt, Homo Sapiens
aacugcugucuuuacuacuucaucucacccaa

SEQ ID NO: 78906 - RNA, 32 nt, Homo Sapiens
cggcugcagcggggugagcggcggcagcggcc

SEQ ID NO: 78907 - RNA, 32 nt, Homo Sapiens
ccaggccccccgcacccuucggcucgccagau

SEQ ID NO: 78908 - RNA, 32 nt, Homo Sapiens
agccuugccugcaccuugaucuuggaggucca

SEQ ID NO: 78909 - RNA, 32 nt, Homo Sapiens
gggaagaacagcuguuggaacaacaagaauau

SEQ ID NO: 78910 - RNA, 32 nt, Homo Sapiens
agccugugaucccagcacuuugggaggccaag

SEQ ID NO: 78911 - RNA, 32 nt, Homo Sapiens
aggcucauuucacuaagcuccuccuuuacuuc

SEQ ID NO: 78912 - RNA, 32 nt, Homo Sapiens
gguuuccuguguauuuuccuccaaauacauca

SEQ ID NO: 78913 - RNA, 32 nt, Homo Sapiens
uguaaugaugagacauaauuaagggucaucua

SEQ ID NO: 78914 - RNA, 32 nt, Homo Sapiens
cuguagcucgggcugcuugucggcuuggcucc

SEQ ID NO: 78915 - RNA, 32 nt, Homo Sapiens
ccaccguccccacccccuccccuuggucuccc

SEQ ID NO: 78916 - RNA, 32 nt, Homo Sapiens
agauuggacaauuuauaaagaaaaaaauuaua

SEQ ID NO: 78917 - RNA, 32 nt, Homo Sapiens
gcaaagauucagagaacuaauuuuucacugga

SEQ ID NO: 78918 - RNA, 32 nt, Homo Sapiens
cugguccacaugguacccuuuugguaaguagg

SEQ ID NO: 78919 - RNA, 32 nt, Homo Sapiens
cugcccgccucggccucccaaagugccgagau

SEQ ID NO: 78920 - RNA, 32 nt, Homo Sapiens
gagauccuuggccccaggaugggcagacagag

SEQ ID NO: 78921 - RNA, 32 nt, Homo Sapiens
uucucccaacuuuuuguuuuacguauuaucaa

SEQ ID NO: 78922 - RNA, 32 nt, Homo Sapiens
uacuacuuaauccuaauucacaauaacaaugg

SEQ ID NO: 78923 - RNA, 32 nt, Homo Sapiens
ugagccagccaggccuggccgcugggccugac

SEQ ID NO: 78924 - RNA, 32 nt, Homo Sapiens
aaaccaagucucauaaaugauaugagugaucu

SEQ ID NO: 78925 - RNA, 32 nt, Homo Sapiens
uagaauguagcaucuagugacuuuuuaaagcc

SEQ ID NO: 78926 - RNA, 32 nt, Homo Sapiens
gaaguuccaagcccuguuuccugcguaaaggu

SEQ ID NO: 78927 - RNA, 32 nt, Homo Sapiens
ucccuccccuccccccacuccucucagugggg

SEQ ID NO: 78928 - RNA, 32 nt, Homo Sapiens
agauuucguucccagcagcaucaagaaaagua

SEQ ID NO: 78929 - RNA, 32 nt, Homo Sapiens
caaaguaaaauucuaagcaaccccaaccaacu

SEQ ID NO: 78930 - RNA, 32 nt, Homo Sapiens
uccaucaucaacggcuucacaucgguguaugu

SEQ ID NO: 78931 - RNA, 32 nt, Homo Sapiens
aaucuggaugacugauuugaauuuuaauccuu

SEQ ID NO: 78932 - RNA, 32 nt, Homo Sapiens
acccagaaggcacauccauucacauuuuuacc

SEQ ID NO: 78933 - RNA, 32 nt, Homo Sapiens
cgugggggacuagcugccuuucuggcagcagg

SEQ ID NO: 78934 - RNA, 32 nt, Homo Sapiens
gugagacccugucucuagaaaaacagaaauac

SEQ ID NO: 78935 - RNA, 32 nt, Homo Sapiens
aagagguuucuucacuauuaaucuuaaaauug

SEQ ID NO: 78936 - RNA, 32 nt, Homo Sapiens
gguggugcaauggccaguggcugcuacacccc

SEQ ID NO: 78937 - RNA, 32 nt, Homo Sapiens
ggccgcccugccgcgcgcacauguaggcguuc

SEQ ID NO: 78938 - RNA, 32 nt, Homo Sapiens
cagaucccaagcacugcaaguccagaugcaac

SEQ ID NO: 78939 - RNA, 32 nt, Homo Sapiens
ccacaucuggaaagucggagccgcagccugcu

SEQ ID NO: 78940 - RNA, 32 nt, Homo Sapiens
uuccacuuacuuuaaccuaguccaccuuacuc

SEQ ID NO: 78941 - RNA, 32 nt, Homo Sapiens
auauaugugugagcagauauggcuauaaagac

SEQ ID NO: 78942 - RNA, 32 nt, Homo Sapiens
uacuguacaucauagauuucauuauggugaga

SEQ ID NO: 78943 - RNA, 32 nt, Homo Sapiens
agcuccgguuugcaucacccggaccgggggcc

SEQ ID NO: 78944 - RNA, 32 nt, Homo Sapiens
ucuauauucucauuuuaauaucuuaugcuauu

SEQ ID NO: 78945 - RNA, 32 nt, Homo Sapiens
aggcugacuuggacauggcaagagggguccca

SEQ ID NO: 78946 - RNA, 32 nt, Homo Sapiens
ggcucuguggacaugggcaaccccagacccug

SEQ ID NO: 78947 - RNA, 32 nt, Homo Sapiens
cuccagggcaaaauggaugagaauuaaaaagc

SEQ ID NO: 78948 - RNA, 32 nt, Homo Sapiens
cggagacgguguucagcgcugcugcaggagag

SEQ ID NO: 78949 - RNA, 32 nt, Homo Sapiens
acaccgauucagaaucuuuucucccucuugag

SEQ ID NO: 78950 - RNA, 32 nt, Homo Sapiens
ucuuaaugcagcuggaucuaaguaaaauguuu

SEQ ID NO: 78951 - RNA, 32 nt, Homo Sapiens
ucugaguucuuugauuuacucaugcugcauga

SEQ ID NO: 78952 - RNA, 32 nt, Homo Sapiens
ggggcuagcuaaucuugaauguuuuccugaga

SEQ ID NO: 78953 - RNA, 32 nt, Homo Sapiens
cgagcuccagugcgcgcacccguggccgccuc

SEQ ID NO: 78954 - RNA, 32 nt, Homo Sapiens
cacgaccaguuucccuuggagaaggaccaaug

SEQ ID NO: 78955 - RNA, 32 nt, Homo Sapiens
cccaggcccagcugugucccuacaccagcccc

SEQ ID NO: 78956 - RNA, 32 nt, Homo Sapiens
ugcacgauggcucagugccgggaccuggagaa

SEQ ID NO: 78957 - RNA, 32 nt, Homo Sapiens
aaaugugaaaauaaaauugucaacucuuucag

SEQ ID NO: 78958 - RNA, 32 nt, Homo Sapiens
acaaggucaggaguucgagaccagccugguca

SEQ ID NO: 78959 - RNA, 31 nt, Homo Sapiens
gagucaauuaaaccucuuucauuuauaaauu

SEQ ID NO: 78960 - RNA, 32 nt, Homo Sapiens
agggcccacaccugguggauaccugguugagc

SEQ ID NO: 78961 - RNA, 32 nt, Homo Sapiens
auuggcuauaagaggagcuugaucgugggugc

SEQ ID NO: 78962 - RNA, 32 nt, Homo Sapiens
ucauaugacuugcuuuuuccauuccagucauc

SEQ ID NO: 78963 - RNA, 32 nt, Homo Sapiens
gaaagaaaucuaacacauguaauuauguggca

SEQ ID NO: 78964 - RNA, 32 nt, Homo Sapiens
agugauuggaauggauuuaaagcgucaauucc

SEQ ID NO: 78965 - RNA, 32 nt, Homo Sapiens
auccaucccaugccucccuccuccccacccca

SEQ ID NO: 78966 - RNA, 32 nt, Homo Sapiens
ugcugauuaggguuuuuuaaauuuuauuuuau

SEQ ID NO: 78967 - RNA, 32 nt, Homo Sapiens
ccuagguaacagagagacaccucugucucuga

SEQ ID NO: 78968 - RNA, 32 nt, Homo Sapiens
ucuaggcacuguacaguuauuauauaucuugg

SEQ ID NO: 78969 - RNA, 32 nt, Homo Sapiens
ugccaccucccugacccgucuaauauauaaau

SEQ ID NO: 78970 - RNA, 32 nt, Homo Sapiens
uaacuauugcuagaaauagaaauguuuauuuu

SEQ ID NO: 78971 - RNA, 32 nt, Homo Sapiens
uuuaaaaaugacaugaggcagauucuuaucca

SEQ ID NO: 78972 - RNA, 32 nt, Homo Sapiens
uaaagggcggaagaggaagauacugacuaguc

SEQ ID NO: 78973 - RNA, 32 nt, Homo Sapiens
ucuggccacacuuuuccugagcuacaugccuu

SEQ ID NO: 78974 - RNA, 32 nt, Homo Sapiens
guucaugcuagagaaaggccucaacaguguag

SEQ ID NO: 78975 - RNA, 32 nt, Homo Sapiens
caucuccugccagcugaacuguaguuagaauc

SEQ ID NO: 78976 - RNA, 32 nt, Homo Sapiens
gcuguaugauuuguuuugaauuuuguuuuuau

SEQ ID NO: 78977 - RNA, 32 nt, Homo Sapiens
cggauaaaggcacauauacaauuaugcacaca

SEQ ID NO: 78978 - RNA, 32 nt, Homo Sapiens
ucccaggcgcacucuacuccagcccuucuccc

SEQ ID NO: 78979 - RNA, 32 nt, Homo Sapiens
cgugcucagacuccagcgcuccguucuucaag

SEQ ID NO: 78980 - RNA, 32 nt, Homo Sapiens
acccggcgcaggagccaccucccugagccccg

SEQ ID NO: 78981 - RNA, 32 nt, Homo Sapiens
ccagagucagggugggggcagggcagcccccc

SEQ ID NO: 78982 - RNA, 29 nt, Homo Sapiens
cacuuuucugugucauaccacaauaaaaa

SEQ ID NO: 78983 - RNA, 32 nt, Homo Sapiens
cacuagugccuaaauguaguaaaggcugcuua

SEQ ID NO: 78984 - RNA, 32 nt, Homo Sapiens
aggcugugacagagcugagagccuguguggag

SEQ ID NO: 78985 - RNA, 32 nt, Homo Sapiens
ccugugcaccccucccaccucugccucaguuu

SEQ ID NO: 78986 - RNA, 31 nt, Homo Sapiens
uuggcaauggugcccggcacaccccccaccc

SEQ ID NO: 78987 - RNA, 32 nt, Homo Sapiens
guauuuguaucuucuuugccuaacucacauua

SEQ ID NO: 78988 - RNA, 32 nt, Homo Sapiens
aauauucugcuauugcagcaauuaaaaauugu

SEQ ID NO: 78989 - RNA, 32 nt, Homo Sapiens
auuagaucguuguuggaugcauaguuggcaaa

SEQ ID NO: 78990 - RNA, 32 nt, Homo Sapiens
gacuguauugcagggugaagagugggcucccg

SEQ ID NO: 78991 - RNA, 32 nt, Homo Sapiens
aaauacagucugccuccacugagggcauccug

SEQ ID NO: 78992 - RNA, 32 nt, Homo Sapiens
ccaaugagucugccugggaugugugugaaucc

SEQ ID NO: 78993 - RNA, 32 nt, Homo Sapiens
caaugagauauuccuauacuuuuacacagcaa

SEQ ID NO: 78994 - RNA, 32 nt, Homo Sapiens
gggcucauauccacaauacuugguauaaggua

SEQ ID NO: 78995 - RNA, 32 nt, Homo Sapiens
gagcaggauguggcggggggcuggagugggag

SEQ ID NO: 78996 - RNA, 32 nt, Homo Sapiens
guacuguggcagagcugcuguuuucugaaggu

SEQ ID NO: 78997 - RNA, 32 nt, Homo Sapiens
uuaauuaaauuuauuuuucaguuuucuugcgu

SEQ ID NO: 78998 - RNA, 32 nt, Homo Sapiens
aauugggucacuauuuuaauuauucuugaagu

SEQ ID NO: 78999 - RNA, 32 nt, Homo Sapiens
ggaggcugcgcacagcuucucccggucauggc

SEQ ID NO: 79000 - RNA, 32 nt, Homo Sapiens
ugaucuuguucuacuguuaaagaugucaagcc

SEQ ID NO: 79001 - RNA, 31 nt, Homo Sapiens
cugcggagggcggggucauucuucuccugga

SEQ ID NO: 79002 - RNA, 32 nt, Homo Sapiens
uaguaccucucaucugugcagugucucauuuc

SEQ ID NO: 79003 - RNA, 32 nt, Homo Sapiens
uguuguuuaggucuaauuuaaguuuuacauag

SEQ ID NO: 79004 - RNA, 32 nt, Homo Sapiens
uauaucuguuuggaauuucaaaagucugaucu

SEQ ID NO: 79005 - RNA, 32 nt, Homo Sapiens
ugccugccugucugccuaugugaugaugaaau

SEQ ID NO: 79006 - RNA, 31 nt, Homo Sapiens
cuuugaggagcauggaacucgaggggagaag

SEQ ID NO: 79007 - RNA, 32 nt, Homo Sapiens
ggaacucggugucucuuaauucauuuaguaac

SEQ ID NO: 79008 - RNA, 32 nt, Homo Sapiens
guaagacgcugauacugggccuuguauugcuu

SEQ ID NO: 79009 - RNA, 32 nt, Homo Sapiens
cuucaauuuguuucuucaauauuucuuucauu

SEQ ID NO: 79010 - RNA, 32 nt, Homo Sapiens
cuucauaucagcuauguguuaagcauaggaga

SEQ ID NO: 79011 - RNA, 32 nt, Homo Sapiens
ggcuuuaauggcugaaaauggcaaagagauga

SEQ ID NO: 79012 - RNA, 32 nt, Homo Sapiens
aaucaguugacaacaaauuuauugcacagaau

SEQ ID NO: 79013 - RNA, 32 nt, Homo Sapiens
augugccaccccugugggcagcaagaagcugg

SEQ ID NO: 79014 - RNA, 32 nt, Homo Sapiens
gccugcugcccgcuccccggcgccacccucgg

SEQ ID NO: 79015 - RNA, 32 nt, Homo Sapiens
guaccagugaaugggugacauaucaugacugc

SEQ ID NO: 79016 - RNA, 32 nt, Homo Sapiens
uuccuucuuuugccuaauacagcucagcuaag

SEQ ID NO: 79017 - RNA, 32 nt, Homo Sapiens
guuccaggcagagcacagacgucagcucagac

SEQ ID NO: 79018 - RNA, 32 nt, Homo Sapiens
uccucauucuaaaaaugaucugcugcagcuug

SEQ ID NO: 79019 - RNA, 32 nt, Homo Sapiens
uaccugaguuuggggguacccuuuuuugugac

SEQ ID NO: 79020 - RNA, 32 nt, Homo Sapiens
ccuggcguugccuggaccugcugcugccucua

SEQ ID NO: 79021 - RNA, 32 nt, Homo Sapiens
gaaccugcagcuuuuggaagaaaggcacccug

SEQ ID NO: 79022 - RNA, 32 nt, Homo Sapiens
cccuuuccuucccuguguaacguggguuuugg

SEQ ID NO: 79023 - RNA, 32 nt, Homo Sapiens
uagcuuucuccaccagauaaccagcuaauccc

SEQ ID NO: 79024 - RNA, 32 nt, Homo Sapiens
agggacaccucaguuguccucccgcgggcccu

SEQ ID NO: 79025 - RNA, 31 nt, Homo Sapiens
cauccuacagccucagcucgggcccagccuu

SEQ ID NO: 79026 - RNA, 32 nt, Homo Sapiens
uauguuaaauuaacagagguggauguauugcu

SEQ ID NO: 79027 - RNA, 32 nt, Homo Sapiens
gguugcugcagcucugccuucuccauggggua

SEQ ID NO: 79028 - RNA, 32 nt, Homo Sapiens
gguugcggcagagccauggacuuccggucccu

SEQ ID NO: 79029 - RNA, 32 nt, Homo Sapiens
uagaccucucacuaugaccgcggccgccgccu

SEQ ID NO: 79030 - RNA, 32 nt, Homo Sapiens
ccucuuggagcugcugugcagaugaauuuucc

SEQ ID NO: 79031 - RNA, 32 nt, Homo Sapiens
aaacuugagagaagagaaguuagugauucccu

SEQ ID NO: 79032 - RNA, 32 nt, Homo Sapiens
guguccucuugcagcuuggccuugaugaccuc

SEQ ID NO: 79033 - RNA, 32 nt, Homo Sapiens
ugcuucucgcagaguggaaagccccggucccc

SEQ ID NO: 79034 - RNA, 32 nt, Homo Sapiens
ccagacacccucaacagaauauuaggcuugau

SEQ ID NO: 79035 - RNA, 32 nt, Homo Sapiens
uaauuuuauuacacauaacauguacuauuuuu

SEQ ID NO: 79036 - RNA, 32 nt, Homo Sapiens
acucucacuuucucucucacuccacucaagca

SEQ ID NO: 79037 - RNA, 32 nt, Homo Sapiens
aguggggguggaagaaggccugguaaaugugg

SEQ ID NO: 79038 - RNA, 32 nt, Homo Sapiens
uggguucuggaaaggaguugccgugcugucug

SEQ ID NO: 79039 - RNA, 32 nt, Homo Sapiens
uggugagaugaccccaaacaucucaccaaacu

SEQ ID NO: 79040 - RNA, 32 nt, Homo Sapiens
gggaugcuuaauuuuuuuuuuaacuuagaguu

SEQ ID NO: 79041 - RNA, 32 nt, Homo Sapiens
auuccugacaccuggcuguuuugauguugcuu

SEQ ID NO: 79042 - RNA, 32 nt, Homo Sapiens
ugagguggaaaacaaucagauguugagucucc

SEQ ID NO: 79043 - RNA, 32 nt, Homo Sapiens
cggagaggccgcgugugggagcguguugaaga

SEQ ID NO: 79044 - RNA, 32 nt, Homo Sapiens
uuaacaguaaucuauuuacuaauuauaguacc

SEQ ID NO: 79045 - RNA, 32 nt, Homo Sapiens
acgcacaauuucugccaaagauugauggcaaa

SEQ ID NO: 79046 - RNA, 32 nt, Homo Sapiens
caggcguugcuguuucuugucuuccaagucaa

SEQ ID NO: 79047 - RNA, 32 nt, Homo Sapiens
uuguuucucaaaaaagaaaaacaaaaaacaaa

SEQ ID NO: 79048 - RNA, 32 nt, Homo Sapiens
caaaucguuuauuucacacgcuguucuaaugg

SEQ ID NO: 79049 - RNA, 32 nt, Homo Sapiens
ggaagcagucucuggaggccagaaagaaaagc

SEQ ID NO: 79050 - RNA, 30 nt, Homo Sapiens
gccagguggggcgggaccccagcaccuccc

SEQ ID NO: 79051 - RNA, 32 nt, Homo Sapiens
gcgggagugggccuaggcagggggugcaggga

SEQ ID NO: 79052 - RNA, 32 nt, Homo Sapiens
gcgagggcgcgguggcgguggcggaguucauc

SEQ ID NO: 79053 - RNA, 32 nt, Homo Sapiens
caugcuuaauauauuuauauugcaguauccuu

SEQ ID NO: 79054 - RNA, 32 nt, Homo Sapiens
uacucagaugaccccagaacccaugcucuucc

SEQ ID NO: 79055 - RNA, 32 nt, Homo Sapiens
cccugaucugaagccagaagggcugaguguau

SEQ ID NO: 79056 - RNA, 32 nt, Homo Sapiens
cccucagccaugggaugcagacacggcuuccu

SEQ ID NO: 79057 - RNA, 32 nt, Homo Sapiens
aauccacccacccaugaggggaaacguggaga

SEQ ID NO: 79058 - RNA, 27 nt, Homo Sapiens
aaccguucccucuucagcagcccccuc

SEQ ID NO: 79059 - RNA, 32 nt, Homo Sapiens
aaccaguggaguagaauuccuucaaaucugcu

SEQ ID NO: 79060 - RNA, 32 nt, Homo Sapiens
caggguuuugggguccugggcuggggccacau

SEQ ID NO: 79061 - RNA, 32 nt, Homo Sapiens
gcaucagauaauguaagcauugaucaguuuuu

SEQ ID NO: 79062 - RNA, 32 nt, Homo Sapiens
aacgaguaacaagaaugggcacgcucuccacu

SEQ ID NO: 79063 - RNA, 32 nt, Homo Sapiens
guuuguuucuaaaaauccuacugugcccaguu

SEQ ID NO: 79064 - RNA, 32 nt, Homo Sapiens
gaaaucccuaaaacuuccagccucacauagca

SEQ ID NO: 79065 - RNA, 23 nt, Homo Sapiens
ggccccgccccucccaaggaggg

SEQ ID NO: 79066 - RNA, 31 nt, Homo Sapiens
caagugccugccaccacgccuggguuauuuu

SEQ ID NO: 79067 - RNA, 32 nt, Homo Sapiens
ggacuggcggagggugcacgcugauggauuua

SEQ ID NO: 79068 - RNA, 32 nt, Homo Sapiens
gcagccggccccagucaccaucaccgcaacua

SEQ ID NO: 79069 - RNA, 32 nt, Homo Sapiens
ccuugagaaaucaacuuggagaacgagcuaag

SEQ ID NO: 79070 - RNA, 32 nt, Homo Sapiens
uacaagugcagguuucuuuuugauauacugau

SEQ ID NO: 79071 - RNA, 32 nt, Homo Sapiens
agaggcgggcuucucccagccauggugucccc

SEQ ID NO: 79072 - RNA, 32 nt, Homo Sapiens
cuggucauguccaguuuaaccuugaaguggca

SEQ ID NO: 79073 - RNA, 32 nt, Homo Sapiens
aaagggggacugaguuucauccccagaaguuu

SEQ ID NO: 79074 - RNA, 32 nt, Homo Sapiens
ucuaugccacagaacaaacacuacucuagcag

SEQ ID NO: 79075 - RNA, 32 nt, Homo Sapiens
acgcaggugcuggcgcccguucugccugggac

SEQ ID NO: 79076 - RNA, 32 nt, Homo Sapiens
ucagaaggaagccuggacaggucccuuguuuc

SEQ ID NO: 79077 - RNA, 32 nt, Homo Sapiens
cauccuccugccucggccuccugaguagcugg

SEQ ID NO: 79078 - RNA, 32 nt, Homo Sapiens
uccccggcuuugccccggggcuggggugcaac

SEQ ID NO: 79079 - RNA, 32 nt, Homo Sapiens
auuuucuucuugauuuccuuucauaagcaaug

SEQ ID NO: 79080 - RNA, 32 nt, Homo Sapiens
guucuuccaagagcuucuuagaguaguauauu

SEQ ID NO: 79081 - RNA, 29 nt, Homo Sapiens
uuguugucagguuuauauucuacaagcag

SEQ ID NO: 79082 - RNA, 32 nt, Homo Sapiens
guuccauuuuuaaggguuaaggugguauuuuc

SEQ ID NO: 79083 - RNA, 32 nt, Homo Sapiens
aguaugcuuuuagucuaagaaaagcacagaug

SEQ ID NO: 79084 - RNA, 32 nt, Homo Sapiens
uuacccgagcuacuauccuccaaaaugcaagu

SEQ ID NO: 79085 - RNA, 32 nt, Homo Sapiens
gaaggguggacuggacucuacugagcaccguc

SEQ ID NO: 79086 - RNA, 32 nt, Homo Sapiens
gcuggugaagauguggagaaaagggaacccuu

SEQ ID NO: 79087 - RNA, 32 nt, Homo Sapiens
cgggcccugagccggcaccuccccuuucggac

SEQ ID NO: 79088 - RNA, 32 nt, Homo Sapiens
guguuugggagccaugggggagcucacccacc

SEQ ID NO: 79089 - RNA, 32 nt, Homo Sapiens
aagcgccgccgccgcuccucgccuccuugcug

SEQ ID NO: 79090 - RNA, 32 nt, Homo Sapiens
ugaauaauaauguaagaaaacauuugucagau

SEQ ID NO: 79091 - RNA, 32 nt, Homo Sapiens
gaauaucauacguuacuuuucuuaaauguguc

SEQ ID NO: 79092 - RNA, 32 nt, Homo Sapiens
ccucacucccuccgucccacuccacuccaggc

SEQ ID NO: 79093 - RNA, 32 nt, Homo Sapiens
uauaacugaucuuugcagaaaguggggaagug

SEQ ID NO: 79094 - RNA, 32 nt, Homo Sapiens
aucugcaccaaaaaguuuauuugugguauaua

SEQ ID NO: 79095 - RNA, 32 nt, Homo Sapiens
acuuuguaaaggaaacauauauguauauauuu

SEQ ID NO: 79096 - RNA, 32 nt, Homo Sapiens
ucacgccacugcccuccagccuggggagacag

SEQ ID NO: 79097 - RNA, 32 nt, Homo Sapiens
cuagcaaaagaucugaucuauaaaguugguug

SEQ ID NO: 79098 - RNA, 32 nt, Homo Sapiens
gugaggccugguaacagggaggcgcugucacc

SEQ ID NO: 79099 - RNA, 32 nt, Homo Sapiens
aagaagcuuuugauuagauguacaauacauug

SEQ ID NO: 79100 - RNA, 30 nt, Homo Sapiens
gcguuuuauaaauuauuuuuuugaaauaaa

SEQ ID NO: 79101 - RNA, 32 nt, Homo Sapiens
uaagaacucuggaugaauacaugguggcaaca

SEQ ID NO: 79102 - RNA, 32 nt, Homo Sapiens
aguuggagguggugcaccugccaggcagcgcc

SEQ ID NO: 79103 - RNA, 29 nt, Homo Sapiens
uauauuuaaaguuuauguuucaugaacug

SEQ ID NO: 79104 - RNA, 32 nt, Homo Sapiens
ucuacugcaaagcucuuuuuuauucuuaauuc

SEQ ID NO: 79105 - RNA, 32 nt, Homo Sapiens
gguggggugggaagccagcuggggaaaugggg

SEQ ID NO: 79106 - RNA, 32 nt, Homo Sapiens
aguuauaaaagcuuaauuuauggugagaaaaa

SEQ ID NO: 79107 - RNA, 32 nt, Homo Sapiens
gagccgggacgccggugcagccgcagcgcgcg

SEQ ID NO: 79108 - RNA, 30 nt, Homo Sapiens
aggccaccccggugcgcggguauggcggcc

SEQ ID NO: 79109 - RNA, 30 nt, Homo Sapiens
cgcgggcccguccggccgccggacaacaug

SEQ ID NO: 79110 - RNA, 32 nt, Homo Sapiens
uuuugacauuggcacuaaaugcauuuggggau

SEQ ID NO: 79111 - RNA, 32 nt, Homo Sapiens
gaccaaaagagccccugcuucuccggguaugg

SEQ ID NO: 79112 - RNA, 32 nt, Homo Sapiens
cuggagcagcugccgccucccgacaccuucag

SEQ ID NO: 79113 - RNA, 32 nt, Homo Sapiens
auucuguucuggaggaaagggaggaguggagg

SEQ ID NO: 79114 - RNA, 32 nt, Homo Sapiens
uaggaugugggaagucauuaaaggauuuaagc

SEQ ID NO: 79115 - RNA, 32 nt, Homo Sapiens
uccccaccgcgugcggucacgagacgccccca

SEQ ID NO: 79116 - RNA, 32 nt, Homo Sapiens
uuauugggauaucauuuuaaaaacuuuauugg

SEQ ID NO: 79117 - RNA, 32 nt, Homo Sapiens
gcuggagaggggcgugcugcggggcccugaug

SEQ ID NO: 79118 - RNA, 32 nt, Homo Sapiens
ccucaggcagugcccuuuccucccacuuuucc

SEQ ID NO: 79119 - RNA, 32 nt, Homo Sapiens
cugagaaaaauacauuaacaaaguacucaagg

SEQ ID NO: 79120 - RNA, 32 nt, Homo Sapiens
uccuucacugucagaaugggcucaaggagcca

SEQ ID NO: 79121 - RNA, 32 nt, Homo Sapiens
gugugaaaucaucaaaagagccauuggagggg

SEQ ID NO: 79122 - RNA, 32 nt, Homo Sapiens
uuauuauccuagauuauaucaaaguauuuguc

SEQ ID NO: 79123 - RNA, 32 nt, Homo Sapiens
cuacaaaauauuuuaaaaauuagccaggugug

SEQ ID NO: 79124 - RNA, 32 nt, Homo Sapiens
auaguuguuuuaauuuagcugaauguuagcau

SEQ ID NO: 79125 - RNA, 32 nt, Homo Sapiens
cuggguuucucuuuccucuuuuuggagaaaag

SEQ ID NO: 79126 - RNA, 32 nt, Homo Sapiens
guauuaucuuaccagaccauccuugaacagca

SEQ ID NO: 79127 - RNA, 32 nt, Homo Sapiens
gccucagcaggugcccaagcugcuacaaccuu

SEQ ID NO: 79128 - RNA, 32 nt, Homo Sapiens
gcagcaccuggggcuccagcugcuggaauccu

SEQ ID NO: 79129 - RNA, 32 nt, Homo Sapiens
gggccggcggaggagcagccacuuccuggggc

SEQ ID NO: 79130 - RNA, 32 nt, Homo Sapiens
aauuguagcguuuuauguuuucguucauagga

SEQ ID NO: 79131 - RNA, 32 nt, Homo Sapiens
auuugugaacucuugcuuccuggccuagaacc

SEQ ID NO: 79132 - RNA, 32 nt, Homo Sapiens
uuuguuuuucuuuucuaaaaugaagugagauu

SEQ ID NO: 79133 - RNA, 32 nt, Homo Sapiens
gugcguacuuucuggagggaaggggcggggga

SEQ ID NO: 79134 - RNA, 32 nt, Homo Sapiens
cccggcaacagccccaggggccuugagggucu

SEQ ID NO: 79135 - RNA, 32 nt, Homo Sapiens
uuccuuccuugucugacugcucuucuucucga

SEQ ID NO: 79136 - RNA, 32 nt, Homo Sapiens
gucuccucagcugggcugcuuccacugagacc

SEQ ID NO: 79137 - RNA, 32 nt, Homo Sapiens
uccaaagcugucugagccugcccuggcuucag

SEQ ID NO: 79138 - RNA, 32 nt, Homo Sapiens
uucccugaguucugaacccagcaccaucagua

SEQ ID NO: 79139 - RNA, 32 nt, Homo Sapiens
uuuuuauggaggcauuggagcugcugagaaag

SEQ ID NO: 79140 - RNA, 32 nt, Homo Sapiens
aacagagaaaucagacaaucuccuagaaaaau

SEQ ID NO: 79141 - RNA, 32 nt, Homo Sapiens
aaaauguuggcuuuuucuuauuuuuuaaugua

SEQ ID NO: 79142 - RNA, 32 nt, Homo Sapiens
guaagaacucuggaaagcuuugaaaacuguug

SEQ ID NO: 79143 - RNA, 32 nt, Homo Sapiens
aucuacgacuacuccggcuacggugccagcgc

SEQ ID NO: 79144 - RNA, 32 nt, Homo Sapiens
uugaaaggaacaaaauuaucagggauggcucu

SEQ ID NO: 79145 - RNA, 32 nt, Homo Sapiens
ggagagacacccggggccuggccacgcucugg

SEQ ID NO: 79146 - RNA, 32 nt, Homo Sapiens
cccugccaauggugggggcacucagguguggg

SEQ ID NO: 79147 - RNA, 32 nt, Homo Sapiens
agggagagaaguugcugucagaugaaugugag

SEQ ID NO: 79148 - RNA, 31 nt, Homo Sapiens
gcagccagccgcacagccugaguuggaguuc

SEQ ID NO: 79149 - RNA, 32 nt, Homo Sapiens
cugcacgugaucugcuggcccucaggcugcug

SEQ ID NO: 79150 - RNA, 32 nt, Homo Sapiens
ccccagucugcaggaaggaugaguagucauua

SEQ ID NO: 79151 - RNA, 32 nt, Homo Sapiens
acauguacccaccugauguaggucuuauuccu

SEQ ID NO: 79152 - RNA, 32 nt, Homo Sapiens
cccuucgagaucucccucuggauccuucuggc

SEQ ID NO: 79153 - RNA, 32 nt, Homo Sapiens
uggauggcagucucaugcagauuuuuuaaaag

SEQ ID NO: 79154 - RNA, 32 nt, Homo Sapiens
cccgccgcccauggagcgcgccgcgccgucgc

SEQ ID NO: 79155 - RNA, 32 nt, Homo Sapiens
uuucucaucucuuuucuggguugccugucggc

SEQ ID NO: 79156 - RNA, 32 nt, Homo Sapiens
ugaugagagauuauaaggugauuucauaaaag

SEQ ID NO: 79157 - RNA, 32 nt, Homo Sapiens
ucacuggggaucugacaugacaauggccgccu

SEQ ID NO: 79158 - RNA, 32 nt, Homo Sapiens
gugcggcuccccucggccuccucgccauggac

SEQ ID NO: 79159 - RNA, 32 nt, Homo Sapiens
uauauauuauuuacauguucagaauuauacug

SEQ ID NO: 79160 - RNA, 32 nt, Homo Sapiens
ggagggccagcauguggagagucgcugcggcu

SEQ ID NO: 79161 - RNA, 32 nt, Homo Sapiens
aaacauugucuaugaccccagaucaagucccc

SEQ ID NO: 79162 - RNA, 32 nt, Homo Sapiens
gaggggccgaggggcucaaggaggggaacauc

SEQ ID NO: 79163 - RNA, 32 nt, Homo Sapiens
caauuuacuuggaauuugcuuagccuuuaaua

SEQ ID NO: 79164 - RNA, 32 nt, Homo Sapiens
gucugaaaucucucucauuguuuacuucuguu

SEQ ID NO: 79165 - RNA, 32 nt, Homo Sapiens
ggagggacagugugaauaaauggcaucuagga

SEQ ID NO: 79166 - RNA, 32 nt, Homo Sapiens
gaaggcuccgcggaccggcacuaggagccggg

SEQ ID NO: 79167 - RNA, 32 nt, Homo Sapiens
cccugcccugggagaccuggggugggcaggga

SEQ ID NO: 79168 - RNA, 32 nt, Homo Sapiens
uaucugauuguguaaugaaauauguaugagga

SEQ ID NO: 79169 - RNA, 32 nt, Homo Sapiens
aauuuggcuuuuuuuucuuaauggacaaggga

SEQ ID NO: 79170 - RNA, 32 nt, Homo Sapiens
cucacccacucugguggccacuucauuccagc

SEQ ID NO: 79171 - RNA, 32 nt, Homo Sapiens
gaccaaacgcagccagccagaucgggagcaaa

SEQ ID NO: 79172 - RNA, 32 nt, Homo Sapiens
uaacugcacccugguccucuccccagucccca

SEQ ID NO: 79173 - RNA, 32 nt, Homo Sapiens
gggcccaggaagauggggcaccccccagcacc

SEQ ID NO: 79174 - RNA, 32 nt, Homo Sapiens
gggacugggcugcggccuccucgcggccccga

SEQ ID NO: 79175 - RNA, 32 nt, Homo Sapiens
uuggucuaaauuugaauauauaugaguuacuu

SEQ ID NO: 79176 - RNA, 32 nt, Homo Sapiens
aaguugcaccaacuuugaagucugauuuuccu

SEQ ID NO: 79177 - RNA, 32 nt, Homo Sapiens
agugauuugaagauuauaauuagcuaaaaucc

SEQ ID NO: 79178 - RNA, 32 nt, Homo Sapiens
cgucucugccuggcugcccauugucugggacg

SEQ ID NO: 79179 - RNA, 32 nt, Homo Sapiens
ccugccuuuauuguguaaguuugacgaaguca

SEQ ID NO: 79180 - RNA, 32 nt, Homo Sapiens
guaaguauauuuguauuuaaaugacgaccgau

SEQ ID NO: 79181 - RNA, 32 nt, Homo Sapiens
uaaauguuuuauuugggggcauguaaagaaac

SEQ ID NO: 79182 - RNA, 32 nt, Homo Sapiens
caagaucugaugcagauuggaguaagaaguag

SEQ ID NO: 79183 - RNA, 32 nt, Homo Sapiens
caguuguuauuuauugaaaugauuucacagug

SEQ ID NO: 79184 - RNA, 32 nt, Homo Sapiens
gcagggcccuuggaaaguuccggagcgcuuac

SEQ ID NO: 79185 - RNA, 32 nt, Homo Sapiens
guuaaauuuuaaaagaaccauaaauucuaagg

SEQ ID NO: 79186 - RNA, 32 nt, Homo Sapiens
gagaggccuggcgggccgcugcugcgggccag

SEQ ID NO: 79187 - RNA, 32 nt, Homo Sapiens
agccugcagagcugcgggcuggguguggucuc

SEQ ID NO: 79188 - RNA, 32 nt, Homo Sapiens
gcgguccuggaaauaaucuguccucugucgcc

SEQ ID NO: 79189 - RNA, 32 nt, Homo Sapiens
cccccacccccuccccacgcccugggcagccg

SEQ ID NO: 79190 - RNA, 32 nt, Homo Sapiens
aaaaugacaccgugauugagcuugucagcaga

SEQ ID NO: 79191 - RNA, 32 nt, Homo Sapiens
acgcacuuccggccucggacccgccccaaaca

SEQ ID NO: 79192 - RNA, 32 nt, Homo Sapiens
agcagcggcgaccgcagcuggaggcccggagc

SEQ ID NO: 79193 - RNA, 32 nt, Homo Sapiens
cagugggguauguucuuggagagaugguuucu

SEQ ID NO: 79194 - RNA, 32 nt, Homo Sapiens
auuuaauuaaugucaguauuucaacugaaguu

SEQ ID NO: 79195 - RNA, 32 nt, Homo Sapiens
uugcugaaauuuccugcuguaaccagaagcca

SEQ ID NO: 79196 - RNA, 32 nt, Homo Sapiens
ucacuuacuguaaauguacuaugguuuuauua

SEQ ID NO: 79197 - RNA, 32 nt, Homo Sapiens
augauagaguauagcuugggggugggagguga

SEQ ID NO: 79198 - RNA, 32 nt, Homo Sapiens
auuaucaaaacacaacucaacuaugaaucuuc

SEQ ID NO: 79199 - RNA, 32 nt, Homo Sapiens
cuucugucuguccucagcccuugucccuguuu

SEQ ID NO: 79200 - RNA, 32 nt, Homo Sapiens
uaaaugaauuuccaccugaucacccuguguuc

SEQ ID NO: 79201 - RNA, 32 nt, Homo Sapiens
ggcuucuggaccccuccucugccccgcaggag

SEQ ID NO: 79202 - RNA, 32 nt, Homo Sapiens
cagcuuccugugggccaggagcucagccgugc

SEQ ID NO: 79203 - RNA, 32 nt, Homo Sapiens
ccucccaaguagcuaggaccacaggugcgugu

SEQ ID NO: 79204 - RNA, 32 nt, Homo Sapiens
ccaagcaucucagcuuggggucaggaaaaugc

SEQ ID NO: 79205 - RNA, 31 nt, Homo Sapiens
uaccaauuaaauguuauccucauccagaaua

SEQ ID NO: 79206 - RNA, 32 nt, Homo Sapiens
uuuggacuuaggauuucuuauuguagcuaaga

SEQ ID NO: 79207 - RNA, 32 nt, Homo Sapiens
cuccccuuuucaugcaccuccuccuccugaua

SEQ ID NO: 79208 - RNA, 32 nt, Homo Sapiens
ccucugcuggauaccccucuuggaccuguagc

SEQ ID NO: 79209 - RNA, 32 nt, Homo Sapiens
ggauuucucaggugacugguuaguauguggug

SEQ ID NO: 79210 - RNA, 32 nt, Homo Sapiens
gacagcugccccccauccuacucaggucucug

SEQ ID NO: 79211 - RNA, 32 nt, Homo Sapiens
agagaaaaaaucuauuuguaaugaucuuuaac

SEQ ID NO: 79212 - RNA, 32 nt, Homo Sapiens
uuaguggagaagcuguauaaucguacacuggu

SEQ ID NO: 79213 - RNA, 32 nt, Homo Sapiens
accugcuugcgaccugcugagggcuugucugc

SEQ ID NO: 79214 - RNA, 32 nt, Homo Sapiens
agccucuguugaugccgccgccgcgccgcccu

SEQ ID NO: 79215 - RNA, 32 nt, Homo Sapiens
ccuacucauggagccagcagccaggcaauggu

SEQ ID NO: 79216 - RNA, 32 nt, Homo Sapiens
uaucaugacugauagaucugguuaaguugugu

SEQ ID NO: 79217 - RNA, 32 nt, Homo Sapiens
gggcuauuugaaaaaguuuggucugugaacaa

SEQ ID NO: 79218 - RNA, 32 nt, Homo Sapiens
ccauauucaaaaugaucauauuagagugacug

SEQ ID NO: 79219 - RNA, 32 nt, Homo Sapiens
guguuguuccacguuagaaacgcuugcauugc

SEQ ID NO: 79220 - RNA, 32 nt, Homo Sapiens
ugacaaggacgcccgaagcacaguggacgguc

SEQ ID NO: 79221 - RNA, 32 nt, Homo Sapiens
ugguggugcagguuuuguuuguuccuuucggg

SEQ ID NO: 79222 - RNA, 32 nt, Homo Sapiens
uuccuucugaauaaacaguuuauuuaagauaa

SEQ ID NO: 79223 - RNA, 32 nt, Homo Sapiens
agauacauuucccucuuucuuauaauacucug

SEQ ID NO: 79224 - RNA, 32 nt, Homo Sapiens
ggcccugugcuaagcacucauaauccucuggg

SEQ ID NO: 79225 - RNA, 32 nt, Homo Sapiens
ugugaggccagcaaauauuuucuuaaacucau

SEQ ID NO: 79226 - RNA, 32 nt, Homo Sapiens
uuuuguuuaaccaaauauuaaaaauggaaaac

SEQ ID NO: 79227 - RNA, 32 nt, Homo Sapiens
cuaggcgaguggggcggggcggccggcaccau

SEQ ID NO: 79228 - RNA, 32 nt, Homo Sapiens
agucaggaugcuggaguccagcccugccucuc

SEQ ID NO: 79229 - RNA, 32 nt, Homo Sapiens
guucagcgguugaggagaauugcggcgagaca

SEQ ID NO: 79230 - RNA, 32 nt, Homo Sapiens
ugcccccugccaggugugugcccugaggcugg

SEQ ID NO: 79231 - RNA, 32 nt, Homo Sapiens
guccucuugugcuugcuaacgugugcugacuc

SEQ ID NO: 79232 - RNA, 32 nt, Homo Sapiens
aguuuagguaaacuuuuuauuaugaccauuag

SEQ ID NO: 79233 - RNA, 32 nt, Homo Sapiens
cucauaguaguauaaaaagagauacauuuccc

SEQ ID NO: 79234 - RNA, 32 nt, Homo Sapiens
cagcuugcuauuuuuauaacauggugauugag

SEQ ID NO: 79235 - RNA, 32 nt, Homo Sapiens
uaaugcauuaaaccugucuccacugugccuuu

SEQ ID NO: 79236 - RNA, 32 nt, Homo Sapiens
ucgccggccuaaaaauaccccgaacuucacag

SEQ ID NO: 79237 - RNA, 32 nt, Homo Sapiens
uggcucccagcuggagauaggaggcccaggug

SEQ ID NO: 79238 - RNA, 32 nt, Homo Sapiens
gaccgggaucugaccuaggugugcaaaggggu

SEQ ID NO: 79239 - RNA, 32 nt, Homo Sapiens
cucagggucuuaggucuucaugcccuaucaca

SEQ ID NO: 79240 - RNA, 32 nt, Homo Sapiens
augaccagccacggcgucccugcugugagcuc

SEQ ID NO: 79241 - RNA, 32 nt, Homo Sapiens
accuaauaccaguaugugauaaauguugaugu

SEQ ID NO: 79242 - RNA, 32 nt, Homo Sapiens
uggcgccccccgccccacccuccacucccuuc

SEQ ID NO: 79243 - RNA, 32 nt, Homo Sapiens
aaugaaaaacacacccuacacacuagacuccg

SEQ ID NO: 79244 - RNA, 32 nt, Homo Sapiens
cgauuccccucuaucagucacugacaguuaac

SEQ ID NO: 79245 - RNA, 32 nt, Homo Sapiens
cgucuccguucccccguccccauccuccaucc

SEQ ID NO: 79246 - RNA, 32 nt, Homo Sapiens
guguauuaaaaauuagcuuuuacauaugauau

SEQ ID NO: 79247 - RNA, 32 nt, Homo Sapiens
aguuggagagggaaaaguuagcccagaaggaa

SEQ ID NO: 79248 - RNA, 32 nt, Homo Sapiens
cugaagcagcgaaggccacgguuccgacuucu

SEQ ID NO: 79249 - RNA, 32 nt, Homo Sapiens
ugguuuuauggagaccucuccuuccuacccuc

SEQ ID NO: 79250 - RNA, 32 nt, Homo Sapiens
ggcuguggccgucuccucccucagcucucugg

SEQ ID NO: 79251 - RNA, 32 nt, Homo Sapiens
ggggaucacaccucagaagccgccacaaugaa

SEQ ID NO: 79252 - RNA, 32 nt, Homo Sapiens
guggccucauuucacuagagacaaaucuuuaa

SEQ ID NO: 79253 - RNA, 32 nt, Homo Sapiens
gagagaaucuucugccacacacuccuuaguug

SEQ ID NO: 79254 - RNA, 32 nt, Homo Sapiens
acauggaacaaugaaaccaacaacaaacauuu

SEQ ID NO: 79255 - RNA, 32 nt, Homo Sapiens
ucuuucauuaggaacauuuugcuggugaugag

SEQ ID NO: 79256 - RNA, 32 nt, Homo Sapiens
gccaugagugaauaugcugaaugaggaccuuu

SEQ ID NO: 79257 - RNA, 32 nt, Homo Sapiens
agcuccuuacaagauagcaggcaggaauucca

SEQ ID NO: 79258 - RNA, 32 nt, Homo Sapiens
agcgggacgccgagagcccggcaacaccucag

SEQ ID NO: 79259 - RNA, 32 nt, Homo Sapiens
cggccgcggaaagaaugcgcgccgcccgugcg

SEQ ID NO: 79260 - RNA, 32 nt, Homo Sapiens
gugauuuauucauauauuccuguccaaagcca

SEQ ID NO: 79261 - RNA, 31 nt, Homo Sapiens
uucugccucaaugcauuugucuaaguuuagu

SEQ ID NO: 79262 - RNA, 32 nt, Homo Sapiens
cagcgggggauuucuuuuccugauggacugua

SEQ ID NO: 79263 - RNA, 32 nt, Homo Sapiens
caguccuguuguccugucaucaucuuugaggc

SEQ ID NO: 79264 - RNA, 32 nt, Homo Sapiens
gaaucuguuuauccuuuuuuuuuuuccaaaua

SEQ ID NO: 79265 - RNA, 32 nt, Homo Sapiens
ugcauuuaaggguagggcuuucugaaggauuu

SEQ ID NO: 79266 - RNA, 32 nt, Homo Sapiens
cugcguuuugucacguuauccauuguaaauuu

SEQ ID NO: 79267 - RNA, 32 nt, Homo Sapiens
auggcguuucagguggcgcuuuucucaucaug

SEQ ID NO: 79268 - RNA, 32 nt, Homo Sapiens
ccagaugaagagcugagccugauucaaauggu

SEQ ID NO: 79269 - RNA, 32 nt, Homo Sapiens
ucauauuuaauuauuucuugaucuuuacucaa

SEQ ID NO: 79270 - RNA, 32 nt, Homo Sapiens
ccagcuccgccccugcuccccaucccggcgca

SEQ ID NO: 79271 - RNA, 32 nt, Homo Sapiens
gaaucugaacacacugaggccaccuagcaagg

SEQ ID NO: 79272 - RNA, 32 nt, Homo Sapiens
gccuugggucucuuaaacuuuuucuccacuau

SEQ ID NO: 79273 - RNA, 31 nt, Homo Sapiens
auuagcugcaggauuuuuaaugagcugaaau

SEQ ID NO: 79274 - RNA, 32 nt, Homo Sapiens
uggggauguguggccugggcagagggcaguuu

SEQ ID NO: 79275 - RNA, 32 nt, Homo Sapiens
ccaacauguauaauuuuauuugaaauacauaa

SEQ ID NO: 79276 - RNA, 32 nt, Homo Sapiens
gaguugggaugcggggcagagccaccagggca

SEQ ID NO: 79277 - RNA, 32 nt, Homo Sapiens
ugcauaaauauguauaaugugagaauaucuuu

SEQ ID NO: 79278 - RNA, 32 nt, Homo Sapiens
ccucguccggcgccguccggcgcgcagaagcg

SEQ ID NO: 79279 - RNA, 32 nt, Homo Sapiens
gcgauuuggaaggggcuacugaggaaacacug

SEQ ID NO: 79280 - RNA, 32 nt, Homo Sapiens
aggacggccccgguccagguggaggccgcaga

SEQ ID NO: 79281 - RNA, 32 nt, Homo Sapiens
agagagaaguauugucuuguagacuuacuaga

SEQ ID NO: 79282 - RNA, 32 nt, Homo Sapiens
cccaccccucaccccacccccaccucuucugu

SEQ ID NO: 79283 - RNA, 32 nt, Homo Sapiens
gguggcucugggauccugggggccuggguugg

SEQ ID NO: 79284 - RNA, 32 nt, Homo Sapiens
ucugcuuucuuucuccuucuacuaugcuggau

SEQ ID NO: 79285 - RNA, 32 nt, Homo Sapiens
gcauggcaaggauguuucuggcagcacuuuuc

SEQ ID NO: 79286 - RNA, 32 nt, Homo Sapiens
gaccgccuucucacugggccuguagugcgggg

SEQ ID NO: 79287 - RNA, 32 nt, Homo Sapiens
accggccugcagccccugcugcccaauaaaac

SEQ ID NO: 79288 - RNA, 32 nt, Homo Sapiens
ccaugucccggggcuaggggcgcugugggcgc

SEQ ID NO: 79289 - RNA, 32 nt, Homo Sapiens
ucggugaccuccguccucuccccagccuggca

SEQ ID NO: 79290 - RNA, 32 nt, Homo Sapiens
cugccugccugccaauggcccugaauccagcu

SEQ ID NO: 79291 - RNA, 32 nt, Homo Sapiens
uuugcugggccuaaaggucuuggccaugggga

SEQ ID NO: 79292 - RNA, 32 nt, Homo Sapiens
ugagauuguucugaaaguaucaauugcuuuaa

SEQ ID NO: 79293 - RNA, 32 nt, Homo Sapiens
acacucagcaaccacacggaucugacagacaa

SEQ ID NO: 79294 - RNA, 32 nt, Homo Sapiens
ugugaacuucuguggcuucaguucucaugcug

SEQ ID NO: 79295 - RNA, 32 nt, Homo Sapiens
ucagugccccugcccuaggggugucugucucc

SEQ ID NO: 79296 - RNA, 32 nt, Homo Sapiens
gagcacuaaaggaaaacugugugccaagcauc

SEQ ID NO: 79297 - RNA, 32 nt, Homo Sapiens
cugugagaggggccggcgccgcuuuguccuag

SEQ ID NO: 79298 - RNA, 32 nt, Homo Sapiens
ggcuucggacauuaaaggagcaucagagaaga

SEQ ID NO: 79299 - RNA, 32 nt, Homo Sapiens
ggcaagaggguugggugguucuuucccagccu

SEQ ID NO: 79300 - RNA, 32 nt, Homo Sapiens
gaaguguggguggcgcacacaccaaguaggga

SEQ ID NO: 79301 - RNA, 32 nt, Homo Sapiens
guauaugugugucuauacacacacauacauaa

SEQ ID NO: 79302 - RNA, 32 nt, Homo Sapiens
ccagggaagacgcgcaacaggucagggauggc

SEQ ID NO: 79303 - RNA, 32 nt, Homo Sapiens
cuuuuuccucaauagccuguuuccuguuuuua

SEQ ID NO: 79304 - RNA, 32 nt, Homo Sapiens
aacuuguugaauuagacacacacacacagaca

SEQ ID NO: 79305 - RNA, 32 nt, Homo Sapiens
acgcugcuguaucucccuguggcagauuugua

SEQ ID NO: 79306 - RNA, 32 nt, Homo Sapiens
cgauacaggcuauuaaccuuuaccaagcuaau

SEQ ID NO: 79307 - RNA, 32 nt, Homo Sapiens
uccaaaacacuacucagcucucuugcacugag

SEQ ID NO: 79308 - RNA, 32 nt, Homo Sapiens
cccuuggaugcugcuguugacauggaaaagau

SEQ ID NO: 79309 - RNA, 32 nt, Homo Sapiens
accucaggggccugggauuccuguggcgcuuc

SEQ ID NO: 79310 - RNA, 32 nt, Homo Sapiens
gcuuucacaauuugucuuacaauuguuuuugu

SEQ ID NO: 79311 - RNA, 32 nt, Homo Sapiens
gagcgcuagggcccgccccuccgcuggggccc

SEQ ID NO: 79312 - RNA, 32 nt, Homo Sapiens
gcugccugggaggcuuccugguguggugucug

SEQ ID NO: 79313 - RNA, 32 nt, Homo Sapiens
gaccuggcucugcugggcuggacugccugggc

SEQ ID NO: 79314 - RNA, 32 nt, Homo Sapiens
gauauuaugugucaaggaucaucagcaaucag

SEQ ID NO: 79315 - RNA, 32 nt, Homo Sapiens
aaggccacccgcgggggcgugugugugguggg

SEQ ID NO: 79316 - RNA, 32 nt, Homo Sapiens
ucucagcccauuccccaccuccccuuccauac

SEQ ID NO: 79317 - RNA, 32 nt, Homo Sapiens
gcccagggccacauaccaagcuuugggacaug

SEQ ID NO: 79318 - RNA, 32 nt, Homo Sapiens
ggggaagcugaagggaggaaauguuacaguaa

SEQ ID NO: 79319 - RNA, 32 nt, Homo Sapiens
gaggcugggagcccuuccuguuacacguuauc

SEQ ID NO: 79320 - RNA, 32 nt, Homo Sapiens
aauuguacugugcagagcugucaggaaccuuc

SEQ ID NO: 79321 - RNA, 32 nt, Homo Sapiens
ugggaaaucugugagagggaauggggugggag

SEQ ID NO: 79322 - RNA, 32 nt, Homo Sapiens
uuuaaucggggaggggggagggggugguugua

SEQ ID NO: 79323 - RNA, 32 nt, Homo Sapiens
uugagaccagugcaacuuugggugcaaggcuu

SEQ ID NO: 79324 - RNA, 32 nt, Homo Sapiens
cccaggaauucaaggcuucaccgagauaagga

SEQ ID NO: 79325 - RNA, 32 nt, Homo Sapiens
uuauuuauuguuaaauuacauuuuuuaagcuc

SEQ ID NO: 79326 - RNA, 32 nt, Homo Sapiens
caaacccuugaagacauuucagggccaugcuc

SEQ ID NO: 79327 - RNA, 32 nt, Homo Sapiens
ccugccauaacacuaauggaagguaacagaag

SEQ ID NO: 79328 - RNA, 32 nt, Homo Sapiens
agcggcggccccaaccggccggaccucagcaa

SEQ ID NO: 79329 - RNA, 32 nt, Homo Sapiens
cccacauuaaggaaaccacuacgggucuggca

SEQ ID NO: 79330 - RNA, 32 nt, Homo Sapiens
ggacucaccgaaguggaauccaaguggaauuu

SEQ ID NO: 79331 - RNA, 32 nt, Homo Sapiens
cugucuguucaaagagcucacauuaaccaauc

SEQ ID NO: 79332 - RNA, 32 nt, Homo Sapiens
uucagaauauaaaauugaaauuuuagaguugu

SEQ ID NO: 79333 - RNA, 32 nt, Homo Sapiens
agguggcagcucacacccagacucacuggcca

SEQ ID NO: 79334 - RNA, 32 nt, Homo Sapiens
ggacgaaggaggaguaggugaaagcgggguga

SEQ ID NO: 79335 - RNA, 32 nt, Homo Sapiens
uguuucuucuugaauuuggacuguugcagcau

SEQ ID NO: 79336 - RNA, 32 nt, Homo Sapiens
uccacugucuuaacauaguacguggcacguua

SEQ ID NO: 79337 - RNA, 32 nt, Homo Sapiens
cauuuaguaaaccauagauuuuuuaaaaacua

SEQ ID NO: 79338 - RNA, 32 nt, Homo Sapiens
agaaccgggaugcaaggagcugccugugacac

SEQ ID NO: 79339 - RNA, 32 nt, Homo Sapiens
gccucccccacuuucuuucuuucuuuaaaaaa

SEQ ID NO: 79340 - RNA, 32 nt, Homo Sapiens
gcucucaaugauguauaugaccucagcuuauu

SEQ ID NO: 79341 - RNA, 32 nt, Homo Sapiens
aguuaggaguugcuggacuggaugcauuacga

SEQ ID NO: 79342 - RNA, 32 nt, Homo Sapiens
uagucugggauaaauuauaaaaauagcuauaa

SEQ ID NO: 79343 - RNA, 32 nt, Homo Sapiens
ugggcgcccucccccggcgcggaguccccgca

SEQ ID NO: 79344 - RNA, 32 nt, Homo Sapiens
ucauucuucaucagcuuugcuaauucugcuuu

SEQ ID NO: 79345 - RNA, 32 nt, Homo Sapiens
gggccuuuuccacuuccacggccucuccaggc

SEQ ID NO: 79346 - RNA, 32 nt, Homo Sapiens
ccagcucagaccccgccccgggacggccccac

SEQ ID NO: 79347 - RNA, 32 nt, Homo Sapiens
ggagucaaccugaguuccucccuccugggaag

SEQ ID NO: 79348 - RNA, 32 nt, Homo Sapiens
agaggccccuggauggaugcauggggaagguu

SEQ ID NO: 79349 - RNA, 32 nt, Homo Sapiens
acaugcccacugaauucagguccuuugaguaa

SEQ ID NO: 79350 - RNA, 32 nt, Homo Sapiens
aacugaccagagcugaggaacuguggcacagc

SEQ ID NO: 79351 - RNA, 32 nt, Homo Sapiens
gaggccgcgggcggguggaggcgcgucuccgg

SEQ ID NO: 79352 - RNA, 32 nt, Homo Sapiens
ugcgcuccggccuggggucucggcgcggggag

SEQ ID NO: 79353 - RNA, 32 nt, Homo Sapiens
aaauaguacuuuguggaucauuucaagauaua

SEQ ID NO: 79354 - RNA, 32 nt, Homo Sapiens
agcagugggaaaagaauuuaauucuagaucuu

SEQ ID NO: 79355 - RNA, 27 nt, Homo Sapiens
auccaggcguucuucagucagccugug

SEQ ID NO: 79356 - RNA, 32 nt, Homo Sapiens
gacugagugaugugagaaacuucuuuucuuuu

SEQ ID NO: 79357 - RNA, 30 nt, Homo Sapiens
gugauguuacuugccaccuacuuccuggag

SEQ ID NO: 79358 - RNA, 32 nt, Homo Sapiens
caguuucugacaugaaucuuccagucaaacag

SEQ ID NO: 79359 - RNA, 30 nt, Homo Sapiens
auuguaaagaagcuuggacaucugcaaaug

SEQ ID NO: 79360 - RNA, 32 nt, Homo Sapiens
uguauucuuuguggaagaugcuauauagucca

SEQ ID NO: 79361 - RNA, 32 nt, Homo Sapiens
cucccggagcccagcccuuuccuaacccaacc

SEQ ID NO: 79362 - RNA, 32 nt, Homo Sapiens
uuaauauaugaccaugacuuugaaaggcaaaa

SEQ ID NO: 79363 - RNA, 32 nt, Homo Sapiens
ugcccugucugugaccacacuccaccuaugug

SEQ ID NO: 79364 - RNA, 32 nt, Homo Sapiens
gcuaguuuuuuguauuuuuaguagagacggcg

SEQ ID NO: 79365 - RNA, 32 nt, Homo Sapiens
uugugccccucuaggauauauuuuuaucugug

SEQ ID NO: 79366 - RNA, 32 nt, Homo Sapiens
aauauguagaaaguauuuuagaaaguaaccug

SEQ ID NO: 79367 - RNA, 32 nt, Homo Sapiens
ccuccccucacgggcucuggccuuaaccagag

SEQ ID NO: 79368 - RNA, 32 nt, Homo Sapiens
uguuaggcauuugaaggaugaggugcacagug

SEQ ID NO: 79369 - RNA, 32 nt, Homo Sapiens
agccucaccccucccacccccauacugguacu

SEQ ID NO: 79370 - RNA, 32 nt, Homo Sapiens
uaucaacauaaacaggaguuugaaagaaguug

SEQ ID NO: 79371 - RNA, 32 nt, Homo Sapiens
cggccgcggcgcacgcugcaucgcggagccag

SEQ ID NO: 79372 - RNA, 32 nt, Homo Sapiens
ccaggguugcagucaggacaagagagcagguu

SEQ ID NO: 79373 - RNA, 32 nt, Homo Sapiens
aaguuuaacaauaaaaguaguuguuuguuucc

SEQ ID NO: 79374 - RNA, 32 nt, Homo Sapiens
aagugaaaucauaguaacauauguuuuaguau

SEQ ID NO: 79375 - RNA, 32 nt, Homo Sapiens
augcuuuuagaaugcaggagccuacuucuagc

SEQ ID NO: 79376 - RNA, 32 nt, Homo Sapiens
ggaguuuuauuuuuaagaaaaauucacaagcu

SEQ ID NO: 79377 - RNA, 32 nt, Homo Sapiens
gcagccgcgccagcugccgggacacugcugcc

SEQ ID NO: 79378 - RNA, 32 nt, Homo Sapiens
uaaacuagagagacauaauuagagaugcaugc

SEQ ID NO: 79379 - RNA, 32 nt, Homo Sapiens
cgcacaggcccuauucucucagcccucggcgg

SEQ ID NO: 79380 - RNA, 32 nt, Homo Sapiens
ggccucuguaccgcccggcagccccuucuggc

SEQ ID NO: 79381 - RNA, 32 nt, Homo Sapiens
gcugccacucagccagagagccagcaucuugg

SEQ ID NO: 79382 - RNA, 32 nt, Homo Sapiens
auauauauauauauuugaguguuguuuguguu

SEQ ID NO: 79383 - RNA, 32 nt, Homo Sapiens
uggagcaacuugggcuuuuggggauggggcag

SEQ ID NO: 79384 - RNA, 31 nt, Homo Sapiens
uuccagcggagccgccugcccucugcaaggc

SEQ ID NO: 79385 - RNA, 32 nt, Homo Sapiens
cacuguugaaaauuauuuuaaacaaaauagaa

SEQ ID NO: 79386 - RNA, 32 nt, Homo Sapiens
acugugcuaguuacauauuuuaucucauguaa

SEQ ID NO: 79387 - RNA, 32 nt, Homo Sapiens
uucauagaucuuuuuucuuuuuuuuaagccau

SEQ ID NO: 79388 - RNA, 32 nt, Homo Sapiens
uucuuuuuauuuacauuagcugaaaagagaaa

SEQ ID NO: 79389 - RNA, 32 nt, Homo Sapiens
ucccacaugagccccagcucccagccccacac

SEQ ID NO: 79390 - RNA, 32 nt, Homo Sapiens
gagacccgcgcgccugcccugcacgccgggcg

SEQ ID NO: 79391 - RNA, 32 nt, Homo Sapiens
agauaccaaaaccacagugccgacagcucucc

SEQ ID NO: 79392 - RNA, 32 nt, Homo Sapiens
ucugaggucgcugaggguuuggggaggcuuuu

SEQ ID NO: 79393 - RNA, 32 nt, Homo Sapiens
acccgaaguaguugaagagcuacuucauucuu

SEQ ID NO: 79394 - RNA, 32 nt, Homo Sapiens
ugcuaaacuacagccgagaucaucucaugcug

SEQ ID NO: 79395 - RNA, 30 nt, Homo Sapiens
gcagugugcaggcgcuagagguccugccuc

SEQ ID NO: 79396 - RNA, 32 nt, Homo Sapiens
cccagaggucgucacuggggagcccgccuccu

SEQ ID NO: 79397 - RNA, 32 nt, Homo Sapiens
aaauacuguaugugacagcacauagaguaguu

SEQ ID NO: 79398 - RNA, 32 nt, Homo Sapiens
guugacuauuuggaaugugaucugggacagac

SEQ ID NO: 79399 - RNA, 32 nt, Homo Sapiens
cggugagaggccggcgcgucgggagcgggccg

SEQ ID NO: 79400 - RNA, 32 nt, Homo Sapiens
ugagcaucucaaagaagucuguuaaaucauga

SEQ ID NO: 79401 - RNA, 32 nt, Homo Sapiens
uugucauccuggcagguauugcugagggccau

SEQ ID NO: 79402 - RNA, 32 nt, Homo Sapiens
aaaguguuauggcuauguuuuaugaugaugcu

SEQ ID NO: 79403 - RNA, 32 nt, Homo Sapiens
cuccaaaggcguagaaguuugugccaacacac

SEQ ID NO: 79404 - RNA, 32 nt, Homo Sapiens
ccccugagacucccaaucaaggaugcaaagua

SEQ ID NO: 79405 - RNA, 32 nt, Homo Sapiens
gaguccccguccgcccgcacaggccgguucgc

SEQ ID NO: 79406 - RNA, 32 nt, Homo Sapiens
aaacugcuaaauuuuucuuaaucaagaauauu

SEQ ID NO: 79407 - RNA, 32 nt, Homo Sapiens
uuuuauauuugccacuguuagauaguuggaaa

SEQ ID NO: 79408 - RNA, 32 nt, Homo Sapiens
gcuggggcucugcaggggcagcacagcugggg

SEQ ID NO: 79409 - RNA, 32 nt, Homo Sapiens
ggcuuggggcuaggguucuuucuggggucguc

SEQ ID NO: 79410 - RNA, 32 nt, Homo Sapiens
gguagggagcagccagccggcaaaggaaggag

SEQ ID NO: 79411 - RNA, 32 nt, Homo Sapiens
agggaagaucgaugaaguggucauaaauuaca

SEQ ID NO: 79412 - RNA, 32 nt, Homo Sapiens
agauugggggagagaugacagcugcagggaug

SEQ ID NO: 79413 - RNA, 32 nt, Homo Sapiens
ugugguuauuuucuccaugucuguaguugcuu

SEQ ID NO: 79414 - RNA, 32 nt, Homo Sapiens
gggcuauggaguggggguuguuugucaaacug

SEQ ID NO: 79415 - RNA, 32 nt, Homo Sapiens
guccaucgccuuggcuuaugcaugucaccaaa

SEQ ID NO: 79416 - RNA, 28 nt, Homo Sapiens
aggcacagagauuaacuaaucugaacca

SEQ ID NO: 79417 - RNA, 32 nt, Homo Sapiens
guauggauugguuaaagcccagauagcacuag

SEQ ID NO: 79418 - RNA, 32 nt, Homo Sapiens
uuccuccaugggcggugcuugcagcuccuuua

SEQ ID NO: 79419 - RNA, 32 nt, Homo Sapiens
cgcucgcccgugccggccgcucgcccgccaug

SEQ ID NO: 79420 - RNA, 32 nt, Homo Sapiens
caguucuugauauugucuagacuugcaucuag

SEQ ID NO: 79421 - RNA, 32 nt, Homo Sapiens
aggaggaugcgccuccucucccccaucccagu

SEQ ID NO: 79422 - RNA, 32 nt, Homo Sapiens
agccuugccacuuuucuauguuccugaucccc

SEQ ID NO: 79423 - RNA, 32 nt, Homo Sapiens
ugugguucagagagggugggcuggcaagccac

SEQ ID NO: 79424 - RNA, 32 nt, Homo Sapiens
caaucacaagguguagaaguugccagggacag

SEQ ID NO: 79425 - RNA, 32 nt, Homo Sapiens
cuccugccuuggcgaggcggcagcucauuguu

SEQ ID NO: 79426 - RNA, 32 nt, Homo Sapiens
gcaauuauauauauuuuggaaaguucauguua

SEQ ID NO: 79427 - RNA, 32 nt, Homo Sapiens
gcccaccccaaagaagaugcugcugcacucag

SEQ ID NO: 79428 - RNA, 32 nt, Homo Sapiens
auuguauugggaagaaaauguuacugaacuau

SEQ ID NO: 79429 - RNA, 32 nt, Homo Sapiens
agacuggucuucauccugccucaugacuccca

SEQ ID NO: 79430 - RNA, 32 nt, Homo Sapiens
ugaggaugcaagaugcaacaguuugucuucac

SEQ ID NO: 79431 - RNA, 32 nt, Homo Sapiens
aaccagcugucuguggagagaauggggugcuu

SEQ ID NO: 79432 - RNA, 32 nt, Homo Sapiens
ggaggcugggccggagggaggcggaggaaccg

SEQ ID NO: 79433 - RNA, 32 nt, Homo Sapiens
auuagcugggcgugguggcagaugccuguagu

SEQ ID NO: 79434 - RNA, 32 nt, Homo Sapiens
gagagcgcgcggugcuggagccgcaccgggug

SEQ ID NO: 79435 - RNA, 32 nt, Homo Sapiens
cugaaaacaccguggccccucggccuucucuc

SEQ ID NO: 79436 - RNA, 32 nt, Homo Sapiens
agacggguguauaaaaagaaaaugaacaaaga

SEQ ID NO: 79437 - RNA, 32 nt, Homo Sapiens
cugccgcuaccaagccgcggacgagaagaaaa

SEQ ID NO: 79438 - RNA, 32 nt, Homo Sapiens
uuaccagagugaaaucacaggauaggcucagc

SEQ ID NO: 79439 - RNA, 32 nt, Homo Sapiens
agccaggugugguggcucaugccuguaauccc

SEQ ID NO: 79440 - RNA, 30 nt, Homo Sapiens
gagggugucugugaagaugaaguaugggcc

SEQ ID NO: 79441 - RNA, 32 nt, Homo Sapiens
uuuuucaugcauauuucuauuuuguuuuuuug

SEQ ID NO: 79442 - RNA, 32 nt, Homo Sapiens
uugcggccugacgucgcugcggccuggcagug

SEQ ID NO: 79443 - RNA, 32 nt, Homo Sapiens
ugcuacaccaauauuucuaugaacagaucuua

SEQ ID NO: 79444 - RNA, 32 nt, Homo Sapiens
uggccagagcagccuaucccccgggcccccug

SEQ ID NO: 79445 - RNA, 32 nt, Homo Sapiens
gaguaguggcugagcucugugaucgcugugau

SEQ ID NO: 79446 - RNA, 32 nt, Homo Sapiens
uccccugggauuacaagaaacacugaugaaug

SEQ ID NO: 79447 - RNA, 32 nt, Homo Sapiens
ccuagcaggaagucccaccuccuugagcuccg

SEQ ID NO: 79448 - RNA, 32 nt, Homo Sapiens
guccuccugggcggccccagguccuggacaau

SEQ ID NO: 79449 - RNA, 32 nt, Homo Sapiens
cgugcccgcgcgccugucgcccaucuccgugc

SEQ ID NO: 79450 - RNA, 32 nt, Homo Sapiens
uugacacuccaaacuccugucauggcacggaa

SEQ ID NO: 79451 - RNA, 32 nt, Homo Sapiens
cuccugcccucucuguugagccaggaauccca

SEQ ID NO: 79452 - RNA, 32 nt, Homo Sapiens
agagucaucuaacuuccacuuucgugucacca

SEQ ID NO: 79453 - RNA, 32 nt, Homo Sapiens
cuucuccuccuggccucugucgggggcuaagc

SEQ ID NO: 79454 - RNA, 32 nt, Homo Sapiens
cguguuugcuggaagccuccgguagcugcuga

SEQ ID NO: 79455 - RNA, 32 nt, Homo Sapiens
ucaaguuugggaacugcuagaguucagcagaa

SEQ ID NO: 79456 - RNA, 32 nt, Homo Sapiens
aacucuaagaguuuaguugcuaccucaggucc

SEQ ID NO: 79457 - RNA, 32 nt, Homo Sapiens
cugaacugcuccaugaagccugaagagaaagc

SEQ ID NO: 79458 - RNA, 29 nt, Homo Sapiens
gaauaguuuccaaauuauggcaaauucau

SEQ ID NO: 79459 - RNA, 32 nt, Homo Sapiens
cuuccacugagcuuccacggagcaccugcacg

SEQ ID NO: 79460 - RNA, 32 nt, Homo Sapiens
ggcucuccccgcaggagagcgggcaccugcgc

SEQ ID NO: 79461 - RNA, 32 nt, Homo Sapiens
ucggagcaaauuauccacaaaggauuugcauu

SEQ ID NO: 79462 - RNA, 32 nt, Homo Sapiens
ucugcugaauaauaaacuuuuuuugaaauaau

SEQ ID NO: 79463 - RNA, 32 nt, Homo Sapiens
aaggcggaggagcgggaaccgcggcggcgcuc

SEQ ID NO: 79464 - RNA, 32 nt, Homo Sapiens
caacucugcauuuaauuuuguaaucugggaag

SEQ ID NO: 79465 - RNA, 32 nt, Homo Sapiens
acggacucuggcggccgggucguuggccgggg

SEQ ID NO: 79466 - RNA, 32 nt, Homo Sapiens
cgggagcugucagcugcacguugcggggguac

SEQ ID NO: 79467 - RNA, 32 nt, Homo Sapiens
aaauuucaggacuuuucuuuugcaagugagcc

SEQ ID NO: 79468 - RNA, 32 nt, Homo Sapiens
aggagaaaaaauuugugucaaaauguugaaug

SEQ ID NO: 79469 - RNA, 32 nt, Homo Sapiens
uggcaaguucuccccacccccagccccacagu

SEQ ID NO: 79470 - RNA, 32 nt, Homo Sapiens
uggugcccuuccucccgcuccagcggcaccac

SEQ ID NO: 79471 - RNA, 32 nt, Homo Sapiens
guauauacucagaaaugguggugcuggaucau

SEQ ID NO: 79472 - RNA, 32 nt, Homo Sapiens
acuuucucuuacuuaaauuaucuggcauaagc

SEQ ID NO: 79473 - RNA, 32 nt, Homo Sapiens
aaucgagcucgggccccggcccccggcccgcg

SEQ ID NO: 79474 - RNA, 32 nt, Homo Sapiens
ggagaagaaaaacaacauagaguuguuggaca

SEQ ID NO: 79475 - RNA, 32 nt, Homo Sapiens
cccgggcugggcgggggagaggaaggggcggg

SEQ ID NO: 79476 - RNA, 32 nt, Homo Sapiens
uuggagguaauuugacacugcugcuggcagua

SEQ ID NO: 79477 - RNA, 32 nt, Homo Sapiens
gugggugcgagggucgggagggucaugggauu

SEQ ID NO: 79478 - RNA, 32 nt, Homo Sapiens
ccaaauaaucagaaacaaagaacuccuggacg

SEQ ID NO: 79479 - RNA, 32 nt, Homo Sapiens
auguggaaggcagagauugugucuaggguggg

SEQ ID NO: 79480 - RNA, 32 nt, Homo Sapiens
cuauucugucaaagagacggugccaaaaggca

SEQ ID NO: 79481 - RNA, 32 nt, Homo Sapiens
gcuccggcuggcggcuucgggcccugcaccug

SEQ ID NO: 79482 - RNA, 32 nt, Homo Sapiens
uauauuuaaaacuagaucuauuaauacauuca

SEQ ID NO: 79483 - RNA, 32 nt, Homo Sapiens
cugauuuuaacaggcugcccauuuucaacagc

SEQ ID NO: 79484 - RNA, 32 nt, Homo Sapiens
cccugaggaaaggguuuccuugguccccucug

SEQ ID NO: 79485 - RNA, 32 nt, Homo Sapiens
cuuccucccugcaccugcccagaugggauaca

SEQ ID NO: 79486 - RNA, 32 nt, Homo Sapiens
guugucaccuuggucugauucaucucacucug

SEQ ID NO: 79487 - RNA, 32 nt, Homo Sapiens
auuuauuauuuuuucaucguaaugcaggguaa

SEQ ID NO: 79488 - RNA, 32 nt, Homo Sapiens
gggaaggugggaagaugggggaaccugaagac

SEQ ID NO: 79489 - RNA, 32 nt, Homo Sapiens
aaaaaacagaaguaaauacuuuucucaauauu

SEQ ID NO: 79490 - RNA, 32 nt, Homo Sapiens
acgaaugucccaacuacuuccgcuagcccauc

SEQ ID NO: 79491 - RNA, 32 nt, Homo Sapiens
aguaggaaaaagaaaaauaaaagaauauuacc

SEQ ID NO: 79492 - RNA, 32 nt, Homo Sapiens
gacccgcccagcugagccugccccaaacuaca

SEQ ID NO: 79493 - RNA, 32 nt, Homo Sapiens
cagugccugcugggaaccagcugcuggagauc

SEQ ID NO: 79494 - RNA, 32 nt, Homo Sapiens
aguggggagcagagacccagccaaauccaaac

SEQ ID NO: 79495 - RNA, 32 nt, Homo Sapiens
auugcgugcgcccgcgggaggcccggggcagc

SEQ ID NO: 79496 - RNA, 32 nt, Homo Sapiens
agcaucgagcacuagaggcggcaccgggaucc

SEQ ID NO: 79497 - RNA, 32 nt, Homo Sapiens
uaagugcuuacauuuuaauagagaugaaucag

SEQ ID NO: 79498 - RNA, 32 nt, Homo Sapiens
agaauuucaaagccgggggcucuaugacuggc

SEQ ID NO: 79499 - RNA, 32 nt, Homo Sapiens
ggcugggcgcgguggcucacgccuggaaucuc

SEQ ID NO: 79500 - RNA, 32 nt, Homo Sapiens
ugcaugcgaggguuucuaagggggcguugucc

SEQ ID NO: 79501 - RNA, 32 nt, Homo Sapiens
caagacuugucccaugauguuccuccuucagg

SEQ ID NO: 79502 - RNA, 32 nt, Homo Sapiens
uuugccacucgucccuauaccauccacccuca

SEQ ID NO: 79503 - RNA, 32 nt, Homo Sapiens
ccgacauccaacaggcgccaaacucacagagc

SEQ ID NO: 79504 - RNA, 32 nt, Homo Sapiens
gagagcgucugcuugauaauggauucugaauu

SEQ ID NO: 79505 - RNA, 32 nt, Homo Sapiens
uaucggcgccgcggccgcgugacgcguuuuca

SEQ ID NO: 79506 - RNA, 32 nt, Homo Sapiens
aaugguuaaguacacaguguaguagccauuua

SEQ ID NO: 79507 - RNA, 32 nt, Homo Sapiens
gacugacagaaugguuuuguuuuguuuuguuu

SEQ ID NO: 79508 - RNA, 32 nt, Homo Sapiens
cagcuccccucgccccgccccugcagugugaa

SEQ ID NO: 79509 - RNA, 32 nt, Homo Sapiens
cuuaccccugguauuucuuuuuuuuguuguuu

SEQ ID NO: 79510 - RNA, 32 nt, Homo Sapiens
aaguauuagucuuuuuggacuaugguauuguu

SEQ ID NO: 79511 - RNA, 32 nt, Homo Sapiens
ggaagaaccugggcauccuuccccucaagccu

SEQ ID NO: 79512 - RNA, 32 nt, Homo Sapiens
ugcugucucuuaucuucaguagcccaggaaau

SEQ ID NO: 79513 - RNA, 32 nt, Homo Sapiens
guucugcacugacuucuguuucggaaccacag

SEQ ID NO: 79514 - RNA, 32 nt, Homo Sapiens
augaaauaaaagaaacaaaugaaauaaauauu

SEQ ID NO: 79515 - RNA, 27 nt, Homo Sapiens
gccagccccuccuccagcccccucugg

SEQ ID NO: 79516 - RNA, 32 nt, Homo Sapiens
guacuaaguccucuccagguugguccugggau

SEQ ID NO: 79517 - RNA, 32 nt, Homo Sapiens
ucugaggcgcaggaauucaauaaagaaaaugg

SEQ ID NO: 79518 - RNA, 32 nt, Homo Sapiens
ucuguccccacuuccuucuggccugggagguc

SEQ ID NO: 79519 - RNA, 32 nt, Homo Sapiens
acaagccugggcaacauagugagaccuucucc

SEQ ID NO: 79520 - RNA, 32 nt, Homo Sapiens
ccagggauaauccgucaccuccccuccaccag

SEQ ID NO: 79521 - RNA, 32 nt, Homo Sapiens
ggaaaggcgggguggggaggcgagagcagcuu

SEQ ID NO: 79522 - RNA, 32 nt, Homo Sapiens
gcagacaaaaucaauaaaacuaaugucccucc

SEQ ID NO: 79523 - RNA, 32 nt, Homo Sapiens
uaaauucugaguaaaauucuuaagccaaaugg

SEQ ID NO: 79524 - RNA, 32 nt, Homo Sapiens
gggucaggggaggccgggaaaccucggcuccc

SEQ ID NO: 79525 - RNA, 30 nt, Homo Sapiens
uccagaaggaccuaaaagaccugugcuagu

SEQ ID NO: 79526 - RNA, 32 nt, Homo Sapiens
ggacuugucuucgcggccccaguccccgaccu

SEQ ID NO: 79527 - RNA, 32 nt, Homo Sapiens
ugccccugcccggaagaccuuccugcccccag

SEQ ID NO: 79528 - RNA, 32 nt, Homo Sapiens
ccaggugucccucuccuccccuggggcacaga

SEQ ID NO: 79529 - RNA, 32 nt, Homo Sapiens
cacaucauuuuucaucaacucuagaugagcua

SEQ ID NO: 79530 - RNA, 27 nt, Homo Sapiens
agcacauccuucuucagguguuuccug

SEQ ID NO: 79531 - RNA, 30 nt, Homo Sapiens
acagccaggucgugcgcgggucauccuggg

SEQ ID NO: 79532 - RNA, 32 nt, Homo Sapiens
acuaugaaaaagaaauuugaugcugauccagu

SEQ ID NO: 79533 - RNA, 30 nt, Homo Sapiens
aggagaggagggcgcgcggccugcagcccu

SEQ ID NO: 79534 - RNA, 32 nt, Homo Sapiens
ggcaccagacuccucagguuccagcggcucca

SEQ ID NO: 79535 - RNA, 32 nt, Homo Sapiens
aauucuucuggggucaggugccacugaccggg

SEQ ID NO: 79536 - RNA, 32 nt, Homo Sapiens
cggcccugcccccggcuucaaggcccgcggaa

SEQ ID NO: 79537 - RNA, 32 nt, Homo Sapiens
caugaauuugaaaauaaauaauuguggauaua

SEQ ID NO: 79538 - RNA, 32 nt, Homo Sapiens
cucccgccucccagccccggcgcacgcgcgcc

SEQ ID NO: 79539 - RNA, 32 nt, Homo Sapiens
ucggccgguccagccgcggccggcgccuggcu

SEQ ID NO: 79540 - RNA, 32 nt, Homo Sapiens
aagacuagccuauugaagcugcugccaggcaa

SEQ ID NO: 79541 - RNA, 32 nt, Homo Sapiens
ugugugcauacuuaugacugaaugugagcuaa

SEQ ID NO: 79542 - RNA, 32 nt, Homo Sapiens
cuaaacugcugaacacagaagugguaauguag

SEQ ID NO: 79543 - RNA, 32 nt, Homo Sapiens
aaaaacaacaaagcaaaaccuaucuuggcaaa

SEQ ID NO: 79544 - RNA, 32 nt, Homo Sapiens
gcaccagcagugccuuucucacuggggguacu

SEQ ID NO: 79545 - RNA, 32 nt, Homo Sapiens
ugggaaggagcgcagcccacccggccccuccg

SEQ ID NO: 79546 - RNA, 32 nt, Homo Sapiens
augggaucguccuucaagaggaccucacaggc

SEQ ID NO: 79547 - RNA, 32 nt, Homo Sapiens
caagaugaaaauaaagauccuaguuaccauuc

SEQ ID NO: 79548 - RNA, 32 nt, Homo Sapiens
gagcgccgcugugacgucugcgccacacaccu

SEQ ID NO: 79549 - RNA, 32 nt, Homo Sapiens
gcagacuauagauuuuuuuuuaauauaggauu

SEQ ID NO: 79550 - RNA, 32 nt, Homo Sapiens
aaugaugacaacaugcuggagccaagugcuaa

SEQ ID NO: 79551 - RNA, 32 nt, Homo Sapiens
agaugucgacaauggcagcaucagcuccuagg

SEQ ID NO: 79552 - RNA, 32 nt, Homo Sapiens
aacucaucugguggaaaccaaguuucagggga

SEQ ID NO: 79553 - RNA, 32 nt, Homo Sapiens
gacuccucugcuaguguuacagauggaaauaa

SEQ ID NO: 79554 - RNA, 32 nt, Homo Sapiens
uaaaguuuuaccauuacacauuaaacucucua

SEQ ID NO: 79555 - RNA, 32 nt, Homo Sapiens
gauuuacgaguaagaccuaaaacuauaauaau

SEQ ID NO: 79556 - RNA, 32 nt, Homo Sapiens
auuucaccaaaauaaaauauuuuuauguuuau

SEQ ID NO: 79557 - RNA, 32 nt, Homo Sapiens
gaagagaaggcacaauugucaccauuuuguuc

SEQ ID NO: 79558 - RNA, 32 nt, Homo Sapiens
aauaauaaaaauuuaaaaaaauuaaaaauaaa

SEQ ID NO: 79559 - RNA, 32 nt, Homo Sapiens
gauacucuguucguaagcucccggugaauuuu

SEQ ID NO: 79560 - RNA, 32 nt, Homo Sapiens
cagccaugaagaaggaagcuguagagguguuu

SEQ ID NO: 79561 - RNA, 32 nt, Homo Sapiens
caagcaaggauccaucugcuccccucaacucu

SEQ ID NO: 79562 - RNA, 32 nt, Homo Sapiens
cgucuccugccaggcgcggagcccugcgagcc

SEQ ID NO: 79563 - RNA, 32 nt, Homo Sapiens
cacgugacuccggcccggccuacagggcgcgu

SEQ ID NO: 79564 - RNA, 32 nt, Homo Sapiens
aaaaaaggaaaagaaggaagacaaugcuugua

SEQ ID NO: 79565 - RNA, 32 nt, Homo Sapiens
uucacuuuuacuaccccaaaguuugcucaagg

SEQ ID NO: 79566 - RNA, 32 nt, Homo Sapiens
gguuuuugaauuuuuuuuuuuaaauaaacacc

SEQ ID NO: 79567 - RNA, 32 nt, Homo Sapiens
ugaugaagaugaugaugaugacuuugaugaug

SEQ ID NO: 79568 - RNA, 32 nt, Homo Sapiens
caucuucacagcaaucauuuucuucacuuuuc

SEQ ID NO: 79569 - RNA, 32 nt, Homo Sapiens
ccuuuuuuuuuucuuucuuuuaucguuugcuu

SEQ ID NO: 79570 - RNA, 32 nt, Homo Sapiens
cccucccaugucugucugcuacggcucugaca

SEQ ID NO: 79571 - RNA, 32 nt, Homo Sapiens
ccaagcugaaguaugaaaggcuuuccaauggg

SEQ ID NO: 79572 - RNA, 32 nt, Homo Sapiens
uugugauuucaguacagucucaucucucagac

SEQ ID NO: 79573 - RNA, 32 nt, Homo Sapiens
ucuguacugugugccgagaaggcauuucuaga

SEQ ID NO: 79574 - RNA, 32 nt, Homo Sapiens
ucaaauacaaauauuaaauauaugaaauacgu

SEQ ID NO: 79575 - RNA, 32 nt, Homo Sapiens
guacacgcgugagcaugcauguguguguacac

SEQ ID NO: 79576 - RNA, 32 nt, Homo Sapiens
aaugauuugcucauaacagguaucauuaacug

SEQ ID NO: 79577 - RNA, 32 nt, Homo Sapiens
cuaacauuuuugggggugggaagagauggggu

SEQ ID NO: 79578 - RNA, 32 nt, Homo Sapiens
cccaggcacacgcuggguccuguccagcccuc

SEQ ID NO: 79579 - RNA, 32 nt, Homo Sapiens
gcuaguauucuauuaagaauuuuugcauugau

SEQ ID NO: 79580 - RNA, 32 nt, Homo Sapiens
ucucaaguauaaaaugugaauaaucaugucua

SEQ ID NO: 79581 - RNA, 32 nt, Homo Sapiens
ggcauggugaggaggaagguagcucaguggca

SEQ ID NO: 79582 - RNA, 32 nt, Homo Sapiens
cugaagccaguuugcuuauuuucaauugccua

SEQ ID NO: 79583 - RNA, 32 nt, Homo Sapiens
ggagcugaaaaacacagcacgagaccuucgug

SEQ ID NO: 79584 - RNA, 32 nt, Homo Sapiens
uccacauaagacaauucauauuuggagaaacc

SEQ ID NO: 79585 - RNA, 32 nt, Homo Sapiens
ucugcugauguuucacaucuauucauuuauga

SEQ ID NO: 79586 - RNA, 32 nt, Homo Sapiens
uucuaugaucagaacugggaaaacagugaauc

SEQ ID NO: 79587 - RNA, 32 nt, Homo Sapiens
uacaguggucccugcuggcccuuggugacggg

SEQ ID NO: 79588 - RNA, 32 nt, Homo Sapiens
ccaaaccugugcuacgugaugaauuuacagua

SEQ ID NO: 79589 - RNA, 32 nt, Homo Sapiens
cuuagucuaaagaaccaaaaccaucccugaaa

SEQ ID NO: 79590 - RNA, 32 nt, Homo Sapiens
auucaguacagcacuagauauuguuaauuuca

SEQ ID NO: 79591 - RNA, 32 nt, Homo Sapiens
ggcagccugcuggucagcacuccaguagcgag

SEQ ID NO: 79592 - RNA, 32 nt, Homo Sapiens
ugccgaauacucaggacggaccugaauucuga

SEQ ID NO: 79593 - RNA, 32 nt, Homo Sapiens
aauucuauauugcuaauuuuuucuuuugugug

SEQ ID NO: 79594 - RNA, 32 nt, Homo Sapiens
cgccggggagacgcgguuuacacccgggagaa

SEQ ID NO: 79595 - RNA, 32 nt, Homo Sapiens
gcccggcccucccuggaucuccucccuccucc

SEQ ID NO: 79596 - RNA, 32 nt, Homo Sapiens
uuuucgcucguaaaaauuuaggcgcugaauaa

SEQ ID NO: 79597 - RNA, 32 nt, Homo Sapiens
cccggcccugcacaacaugcagcccuccggcc

SEQ ID NO: 79598 - RNA, 32 nt, Homo Sapiens
ccguggugcagagaagaugcuucugaggccgc

SEQ ID NO: 79599 - RNA, 30 nt, Homo Sapiens
gaaggacagggagcugcagaagcucgagga

SEQ ID NO: 79600 - RNA, 32 nt, Homo Sapiens
agaaaugcuuuccuuacugacaaccuaacauc

SEQ ID NO: 79601 - RNA, 32 nt, Homo Sapiens
uagcauuugugaauuuaauagcauuaagauua

SEQ ID NO: 79602 - RNA, 32 nt, Homo Sapiens
uggcccuguggagcugcaguaagagucauacg

SEQ ID NO: 79603 - RNA, 32 nt, Homo Sapiens
uauaucccaagcaugggucuugggacacaugc

SEQ ID NO: 79604 - RNA, 32 nt, Homo Sapiens
cucucauuuagcaaauauuuuugaguucuacu

SEQ ID NO: 79605 - RNA, 32 nt, Homo Sapiens
agcuccgcgggugcguggccggugcuggcugg

SEQ ID NO: 79606 - RNA, 32 nt, Homo Sapiens
agacggaggcucuccuggggcuggugucucag

SEQ ID NO: 79607 - RNA, 32 nt, Homo Sapiens
cauuagaaagccaaggccuagaguggugggcu

SEQ ID NO: 79608 - RNA, 32 nt, Homo Sapiens
gacaauucaggaacugcugugcagccccucag

SEQ ID NO: 79609 - RNA, 32 nt, Homo Sapiens
agcucguccucgccgcgccggugccaccugug

SEQ ID NO: 79610 - RNA, 32 nt, Homo Sapiens
agagcaggagggggccugugcuucucgggguc

SEQ ID NO: 79611 - RNA, 32 nt, Homo Sapiens
agccuccuugucuauccuuccucccccaccca

SEQ ID NO: 79612 - RNA, 32 nt, Homo Sapiens
auuuuacugaugcauaaguccuagugggucaa

SEQ ID NO: 79613 - RNA, 32 nt, Homo Sapiens
uuagagaauuguagcuaggccuuguccaagaa

SEQ ID NO: 79614 - RNA, 32 nt, Homo Sapiens
gauauaauuuauuuugaaaauaaaucagacac

SEQ ID NO: 79615 - RNA, 32 nt, Homo Sapiens
gagguggguuuuauuuuuuuccuuuugauucc

SEQ ID NO: 79616 - RNA, 32 nt, Homo Sapiens
uguuuuugcccccaauucugcccauacccauu

SEQ ID NO: 79617 - RNA, 32 nt, Homo Sapiens
gcagagucaggagaccccaaggcaugugagca

SEQ ID NO: 79618 - RNA, 32 nt, Homo Sapiens
cgguauugcugagacuccagggucagccuucc

SEQ ID NO: 79619 - RNA, 32 nt, Homo Sapiens
gccuggaacugggaggaagcuggagaaaagau

SEQ ID NO: 79620 - RNA, 32 nt, Homo Sapiens
auaauuuuaagaaugaaaauguuuacaguauu

SEQ ID NO: 79621 - RNA, 32 nt, Homo Sapiens
uugugaucauuuccuaagaaaagguaaaauuc

SEQ ID NO: 79622 - RNA, 32 nt, Homo Sapiens
uugucucuugagccuuaguuaagaguagugua

SEQ ID NO: 79623 - RNA, 29 nt, Homo Sapiens
ucuccccuguguuucagagagaaaaccuc

SEQ ID NO: 79624 - RNA, 32 nt, Homo Sapiens
ccucucaggugcuggaggagcugaaggcuucg

SEQ ID NO: 79625 - RNA, 30 nt, Homo Sapiens
acuucgcggucgggcccgccggcugcgggc

SEQ ID NO: 79626 - RNA, 32 nt, Homo Sapiens
aauuggcuggcuguaauuugcauugagagacc

SEQ ID NO: 79627 - RNA, 32 nt, Homo Sapiens
gaaaguacuuggagaaacugaggccucuuaug

SEQ ID NO: 79628 - RNA, 27 nt, Homo Sapiens
aaccugggacagagugagacuccaucu

SEQ ID NO: 79629 - RNA, 32 nt, Homo Sapiens
gaggaagaucaccucggacaaacagccgacag

SEQ ID NO: 79630 - RNA, 32 nt, Homo Sapiens
augccuauauuccagcacuuugggaggccaag

SEQ ID NO: 79631 - RNA, 32 nt, Homo Sapiens
caccuuuccgucugcuggucgggccggccuuc

SEQ ID NO: 79632 - RNA, 32 nt, Homo Sapiens
gauuucucugaagcagaucuccaggcugaagu

SEQ ID NO: 79633 - RNA, 32 nt, Homo Sapiens
cuauauguuccuauacuuuucauuuucaagau

SEQ ID NO: 79634 - RNA, 32 nt, Homo Sapiens
uuuauaugaacacuuaguauuuuuuaaaccug

SEQ ID NO: 79635 - RNA, 32 nt, Homo Sapiens
aguuuaggaaacaaagauggacuucugagggg

SEQ ID NO: 79636 - RNA, 32 nt, Homo Sapiens
acaagauccaaauaauuaucccuaucuucaga

SEQ ID NO: 79637 - RNA, 32 nt, Homo Sapiens
ucagccugagucccuccucuuccuggagggau

SEQ ID NO: 79638 - RNA, 32 nt, Homo Sapiens
guguagggccgcgcgccguggccgcgucccac

SEQ ID NO: 79639 - RNA, 32 nt, Homo Sapiens
guggaagucauaaaguuaauagauauuaaucu

SEQ ID NO: 79640 - RNA, 32 nt, Homo Sapiens
ucugagauggacacuuaagagacggggcaaau

SEQ ID NO: 79641 - RNA, 32 nt, Homo Sapiens
ggacaugcaccaaggcuugccagagccaacag

SEQ ID NO: 79642 - RNA, 32 nt, Homo Sapiens
ugaucuggagaauguggagggagcaugucccu

SEQ ID NO: 79643 - RNA, 32 nt, Homo Sapiens
aaaaacucauuuucuuuuuuuuccuucucuuu

SEQ ID NO: 79644 - RNA, 32 nt, Homo Sapiens
ugcccuucacugacagucuccuuaacaucauc

SEQ ID NO: 79645 - RNA, 32 nt, Homo Sapiens
cagucaccacucaguucucacucauugcagaa

SEQ ID NO: 79646 - RNA, 32 nt, Homo Sapiens
uaaguguuuaaaauuaugcucuguaacucugu

SEQ ID NO: 79647 - RNA, 32 nt, Homo Sapiens
agggaucugcugcagccacagcuccuccagaa

SEQ ID NO: 79648 - RNA, 32 nt, Homo Sapiens
aacagaaaacaaagaaaagcuuguauauacuu

SEQ ID NO: 79649 - RNA, 32 nt, Homo Sapiens
aggcggcgagggugagucggcgccggccgcua

SEQ ID NO: 79650 - RNA, 32 nt, Homo Sapiens
uacuaagagugcuccuuuuguauuuuacauau

SEQ ID NO: 79651 - RNA, 32 nt, Homo Sapiens
aggcacagaaagauuaaguuaccggcccaagg

SEQ ID NO: 79652 - RNA, 32 nt, Homo Sapiens
ugcaggaggcgcccggcccggcggagcagccc

SEQ ID NO: 79653 - RNA, 32 nt, Homo Sapiens
aagccucuaaaaugggguguaggaucuggcca

SEQ ID NO: 79654 - RNA, 32 nt, Homo Sapiens
gcaauccaugauuuauacucagaaucgacauu

SEQ ID NO: 79655 - RNA, 32 nt, Homo Sapiens
acaaugugucucuuccggcagugucuccagug

SEQ ID NO: 79656 - RNA, 32 nt, Homo Sapiens
gaugcauugaaauuauauguaauuguauaaau

SEQ ID NO: 79657 - RNA, 32 nt, Homo Sapiens
cucccuggggagcccuugggggugcugcaagc

SEQ ID NO: 79658 - RNA, 32 nt, Homo Sapiens
uagccucucaacuucuugcuugggaucuccaa

SEQ ID NO: 79659 - RNA, 32 nt, Homo Sapiens
cuacccaccccgugagaaacgccccuggggag

SEQ ID NO: 79660 - RNA, 32 nt, Homo Sapiens
gccugcgccccgaugcugcgcguucugugccu

SEQ ID NO: 79661 - RNA, 32 nt, Homo Sapiens
gcaaggccagcuugcuucaggcuguagaggga

SEQ ID NO: 79662 - RNA, 32 nt, Homo Sapiens
agacuucuaaucuuaauuagucaaaguuuuuc

SEQ ID NO: 79663 - RNA, 32 nt, Homo Sapiens
gucucaaagagauauuaaauuuuauacauuua

SEQ ID NO: 79664 - RNA, 32 nt, Homo Sapiens
aagauggcggaagagggacauacaccugacua

SEQ ID NO: 79665 - RNA, 32 nt, Homo Sapiens
ccgcugggcgaccgcccaugacccgcucuugc

SEQ ID NO: 79666 - RNA, 32 nt, Homo Sapiens
ccccacuccaugagaagaggcucagacagcag

SEQ ID NO: 79667 - RNA, 32 nt, Homo Sapiens
agcggcggcgggaggcgcgucuccccggccca

SEQ ID NO: 79668 - RNA, 32 nt, Homo Sapiens
caaggcaggaaaaugagguggcugcuucucua

SEQ ID NO: 79669 - RNA, 32 nt, Homo Sapiens
uacauagcugaauuugaugaggauugaauguc

SEQ ID NO: 79670 - RNA, 32 nt, Homo Sapiens
accacgcuccuggagcucugcugucuucucag

SEQ ID NO: 79671 - RNA, 32 nt, Homo Sapiens
augccaucuucuuccuucucuuuuuuauaaua

SEQ ID NO: 79672 - RNA, 32 nt, Homo Sapiens
guuguaggcucuuccagccugaacccauggag

SEQ ID NO: 79673 - RNA, 32 nt, Homo Sapiens
cagucccauccguaggcgcccggcgcccggcc

SEQ ID NO: 79674 - RNA, 32 nt, Homo Sapiens
aggcggccgggcgcagggccaggcugcugggg

SEQ ID NO: 79675 - RNA, 32 nt, Homo Sapiens
aacucauuggaugaagcccacccuuauuccca

SEQ ID NO: 79676 - RNA, 32 nt, Homo Sapiens
uccccucacggcagcaccacguuuccaguccc

SEQ ID NO: 79677 - RNA, 32 nt, Homo Sapiens
uugccccccucccccagcccccaccccgcccc

SEQ ID NO: 79678 - RNA, 32 nt, Homo Sapiens
ucugguccgcaugcuccugcuccugacucacc

SEQ ID NO: 79679 - RNA, 32 nt, Homo Sapiens
cuuuggugggagaggggauagaagcccaugac

SEQ ID NO: 79680 - RNA, 32 nt, Homo Sapiens
gucagcgcacagagccggguaggagucggguc

SEQ ID NO: 79681 - RNA, 32 nt, Homo Sapiens
ggggaaauggaaaagucggggaggcgguggcu

SEQ ID NO: 79682 - RNA, 32 nt, Homo Sapiens
acaagauagcucuacuuuuuuauauggaaaua

SEQ ID NO: 79683 - RNA, 32 nt, Homo Sapiens
gugggagauaaaagauguuuauugucuuuuaa

SEQ ID NO: 79684 - RNA, 32 nt, Homo Sapiens
auuuugcaaaaguaguaaauauauuauuguuu

SEQ ID NO: 79685 - RNA, 32 nt, Homo Sapiens
gcuucgggcuccugggauuucuguccgcgcuc

SEQ ID NO: 79686 - RNA, 32 nt, Homo Sapiens
aauucuugacauuaaauaaaagguauccagau

SEQ ID NO: 79687 - RNA, 32 nt, Homo Sapiens
ugcuuuugugcauucuuugucaucucuucuga

SEQ ID NO: 79688 - RNA, 32 nt, Homo Sapiens
gacuuguucuccccggcuggcagcguaguggg

SEQ ID NO: 79689 - RNA, 32 nt, Homo Sapiens
uuuguuacugaauuaccuaaaaccagaccaca

SEQ ID NO: 79690 - RNA, 32 nt, Homo Sapiens
guuauagauuguugccuauuuccugcugaaag

SEQ ID NO: 79691 - RNA, 32 nt, Homo Sapiens
uaugcagaauguuuuuaaaauaugagugguua

SEQ ID NO: 79692 - RNA, 32 nt, Homo Sapiens
caauguaaaugagccagagauagaacauuuua

SEQ ID NO: 79693 - RNA, 32 nt, Homo Sapiens
gaggaacaaugggaagucugcccagcagaaga

SEQ ID NO: 79694 - RNA, 32 nt, Homo Sapiens
agaugccugugcuuacagcauuguggaaucau

SEQ ID NO: 79695 - RNA, 32 nt, Homo Sapiens
ggacaagcuacaagcucuguguuucuguacug

SEQ ID NO: 79696 - RNA, 32 nt, Homo Sapiens
guuuaacagauguacuuuuuuauccucagaau

SEQ ID NO: 79697 - RNA, 32 nt, Homo Sapiens
aaucucuugaaccucggaggcggagguugcag

SEQ ID NO: 79698 - RNA, 32 nt, Homo Sapiens
ucguccuccgcgggugugcuagcguugggacg

SEQ ID NO: 79699 - RNA, 32 nt, Homo Sapiens
aauacauuucuuccuggacaguugauaaaagu

SEQ ID NO: 79700 - RNA, 32 nt, Homo Sapiens
cugggaagccccacaggguguugaguugccuu

SEQ ID NO: 79701 - RNA, 32 nt, Homo Sapiens
ccuuuugauaugucuucauuuaauuuugugaa

SEQ ID NO: 79702 - RNA, 32 nt, Homo Sapiens
cccgggaaaaggagaagaugaaggaagccaag

SEQ ID NO: 79703 - RNA, 32 nt, Homo Sapiens
cuccugaccugaggcuccugugcuacuuugcc

SEQ ID NO: 79704 - RNA, 32 nt, Homo Sapiens
cuggaaggacaaauugugcuauguccacacau

SEQ ID NO: 79705 - RNA, 28 nt, Homo Sapiens
acgcugaugguggccaggaugcucagcu

SEQ ID NO: 79706 - RNA, 32 nt, Homo Sapiens
caaucaaacaaaugccaaaugaauugccuaau

SEQ ID NO: 79707 - RNA, 32 nt, Homo Sapiens
cugcuuucuuuuucuuuuuuuaauuuugugaa

SEQ ID NO: 79708 - RNA, 32 nt, Homo Sapiens
agcaaucagcgagacuccaugggcguaggacc

SEQ ID NO: 79709 - RNA, 31 nt, Homo Sapiens
aguuggggggcggugcagaggugugggucga

SEQ ID NO: 79710 - RNA, 32 nt, Homo Sapiens
auguuucaacacaaaaucucuguuuugugaga

SEQ ID NO: 79711 - RNA, 32 nt, Homo Sapiens
gcagcggcuguuccaaaggaaguaaaaguuga

SEQ ID NO: 79712 - RNA, 30 nt, Homo Sapiens
cucucaggcaggcuugcucugucccuuccu

SEQ ID NO: 79713 - RNA, 32 nt, Homo Sapiens
ugaugggcuccggcccgcugggguguuauuaa

SEQ ID NO: 79714 - RNA, 32 nt, Homo Sapiens
cgccgcugcuaccacagcugcccccugggggg

SEQ ID NO: 79715 - RNA, 31 nt, Homo Sapiens
uugcugaugaaccugacugagggccgugugg

SEQ ID NO: 79716 - RNA, 32 nt, Homo Sapiens
caaaacaacaacaaaaaacaaacaaacaaaaa

SEQ ID NO: 79717 - RNA, 32 nt, Homo Sapiens
ugggauuucuaaaaauaagauauuuaugaaaa

SEQ ID NO: 79718 - RNA, 32 nt, Homo Sapiens
uaacaucuguuucaggaacauggcaguauguu

SEQ ID NO: 79719 - RNA, 32 nt, Homo Sapiens
cgacagagacggaaggggucgcggcggcucgc

SEQ ID NO: 79720 - RNA, 32 nt, Homo Sapiens
aacaguaaaaacaaaaucaacccugaacccca

SEQ ID NO: 79721 - RNA, 32 nt, Homo Sapiens
gcggccggagagcgccagggccugagcugccg

SEQ ID NO: 79722 - RNA, 32 nt, Homo Sapiens
cuccccgccccgcuccccgucccgcgcuccac

SEQ ID NO: 79723 - RNA, 32 nt, Homo Sapiens
ccggcuguggcuccaccuccagcucuccgugc

SEQ ID NO: 79724 - RNA, 31 nt, Homo Sapiens
uucuugcaauuccagaaccaugacugauauu

SEQ ID NO: 79725 - RNA, 32 nt, Homo Sapiens
cuguauuuaaugcaggaugugugcuucaguug

SEQ ID NO: 79726 - RNA, 32 nt, Homo Sapiens
ggcuguggggccccaggauaaaacagacacag

SEQ ID NO: 79727 - RNA, 32 nt, Homo Sapiens
cagggcucucuguaucagucuuucuugagcag

SEQ ID NO: 79728 - RNA, 32 nt, Homo Sapiens
agcagaaaaaccuguuacaggauagccugcau

SEQ ID NO: 79729 - RNA, 32 nt, Homo Sapiens
aggcgugugguggacacgcagcugcaggcgcu

SEQ ID NO: 79730 - RNA, 31 nt, Homo Sapiens
cgcauggcgggccccgcgcggggauccggcu

SEQ ID NO: 79731 - RNA, 32 nt, Homo Sapiens
uagggagccccuccccaccucacuuggggccc

SEQ ID NO: 79732 - RNA, 32 nt, Homo Sapiens
acagaaacgggaauccuauaaggucagcagag

SEQ ID NO: 79733 - RNA, 32 nt, Homo Sapiens
cuguggccuuucuuucuuccaaggcugggcuu

SEQ ID NO: 79734 - RNA, 32 nt, Homo Sapiens
acauacauauauauguuuugaagcaaugaaau

SEQ ID NO: 79735 - RNA, 32 nt, Homo Sapiens
uccccugagaucuggacagaggaagaugggag

SEQ ID NO: 79736 - RNA, 32 nt, Homo Sapiens
cuucccuccacccaaugacugcuccagucuga

SEQ ID NO: 79737 - RNA, 32 nt, Homo Sapiens
aacagaguaaaauggacaagggacgaggauga

SEQ ID NO: 79738 - RNA, 32 nt, Homo Sapiens
accagcgcgugcacacgggcgagcggcccuuc

SEQ ID NO: 79739 - RNA, 32 nt, Homo Sapiens
aguaaaauauauauguaaauuuaugucuucgu

SEQ ID NO: 79740 - RNA, 32 nt, Homo Sapiens
gucauuauuugcuuuuaauuaagggaaaacag

SEQ ID NO: 79741 - RNA, 32 nt, Homo Sapiens
acagccgcccccgcugccggcuccucaccucu

SEQ ID NO: 79742 - RNA, 32 nt, Homo Sapiens
ucuccggccccggccccucggcgcgcccgacu

SEQ ID NO: 79743 - RNA, 32 nt, Homo Sapiens
gagugguccgcaggccccccagcccuucaggu

SEQ ID NO: 79744 - RNA, 32 nt, Homo Sapiens
caugaaauguuuuuauuuuauuuugcuuauuu

SEQ ID NO: 79745 - RNA, 32 nt, Homo Sapiens
uagucagauuagccaguaaucucuagauguaa

SEQ ID NO: 79746 - RNA, 32 nt, Homo Sapiens
auuagggcauuugagaaaugcauauuguauua

SEQ ID NO: 79747 - RNA, 32 nt, Homo Sapiens
cccucuggaucaugacuuuucucuaauuggcc

SEQ ID NO: 79748 - RNA, 32 nt, Homo Sapiens
ccauuucauuccccggcuccacccuaggccac

SEQ ID NO: 79749 - RNA, 32 nt, Homo Sapiens
aaaguuuuuaauguguuuuacucuucaguauu

SEQ ID NO: 79750 - RNA, 32 nt, Homo Sapiens
uagaacagagccuggcacugguaaauagucag

SEQ ID NO: 79751 - RNA, 32 nt, Homo Sapiens
auguaucauaugccuucuaccauccuccuguc

SEQ ID NO: 79752 - RNA, 32 nt, Homo Sapiens
aauguuuauugcuguuuugucuuucuuuuuuc

SEQ ID NO: 79753 - RNA, 32 nt, Homo Sapiens
ccccaugccauuggacaccgagguggacuuca

SEQ ID NO: 79754 - RNA, 32 nt, Homo Sapiens
cugaaacuggaaaauaaaauggcuuaucugcu

SEQ ID NO: 79755 - RNA, 32 nt, Homo Sapiens
ugaucccagagagcccgaggaggugucucagg

SEQ ID NO: 79756 - RNA, 32 nt, Homo Sapiens
cuuugaguguaaacuaagguagacuacuuugg

SEQ ID NO: 79757 - RNA, 32 nt, Homo Sapiens
ucaugagcuugggagggccaaugccacuucac

SEQ ID NO: 79758 - RNA, 32 nt, Homo Sapiens
ggaugugguagauaagaaugagucagcaguga

SEQ ID NO: 79759 - RNA, 32 nt, Homo Sapiens
ugagggccuugaacccucuccuuuucuucuuu

SEQ ID NO: 79760 - RNA, 32 nt, Homo Sapiens
uggcucacaccuguaaucccagcgcuuuggga

SEQ ID NO: 79761 - RNA, 32 nt, Homo Sapiens
uggcucacaccuguaaucccagcacuuugggg

SEQ ID NO: 79762 - RNA, 32 nt, Homo Sapiens
cccacccaucugguauggaaaccugccggcuc

SEQ ID NO: 79763 - RNA, 32 nt, Homo Sapiens
gccuggaggacgggacagauggacagacagcc

SEQ ID NO: 79764 - RNA, 31 nt, Homo Sapiens
gucggugaccugugggacucgagcuauuccu

SEQ ID NO: 79765 - RNA, 32 nt, Homo Sapiens
aguugcugggguggagaagggcuagcccaccg

SEQ ID NO: 79766 - RNA, 32 nt, Homo Sapiens
agcagcagccccagcccagccagacggaaucc

SEQ ID NO: 79767 - RNA, 32 nt, Homo Sapiens
gacugggaaaagguaugggagcagaaggagaa

SEQ ID NO: 79768 - RNA, 32 nt, Homo Sapiens
uguuaagccauuuaacuggagcuccgauuuaa

SEQ ID NO: 79769 - RNA, 32 nt, Homo Sapiens
aauccacaaguagcugccgccgguccccccaa

SEQ ID NO: 79770 - RNA, 32 nt, Homo Sapiens
gacagcaccuccagcucugcugcuucaacaac

SEQ ID NO: 79771 - RNA, 32 nt, Homo Sapiens
gacacucaugcaagaagugggcaggacuugga

SEQ ID NO: 79772 - RNA, 32 nt, Homo Sapiens
acuuuauuaaggauuacuuugucugcccacca

SEQ ID NO: 79773 - RNA, 32 nt, Homo Sapiens
aggguuuaaaagacaucucaaauuccauaggu

SEQ ID NO: 79774 - RNA, 32 nt, Homo Sapiens
uuuuguggucauuugaaaagaauguguauucu

SEQ ID NO: 79775 - RNA, 32 nt, Homo Sapiens
cacacuucaccaaauguuuguuuaccuuugaa

SEQ ID NO: 79776 - RNA, 32 nt, Homo Sapiens
gcgggugagcgcggcgagcggcgacccuggug

SEQ ID NO: 79777 - RNA, 32 nt, Homo Sapiens
ugaggugcaaccccaggaaggccccguagacc

SEQ ID NO: 79778 - RNA, 31 nt, Homo Sapiens
uuuuguguaauguguuaagugcuguucauuu

SEQ ID NO: 79779 - RNA, 32 nt, Homo Sapiens
uauuuggaauuuauuuugugucuguacauaau

SEQ ID NO: 79780 - RNA, 32 nt, Homo Sapiens
aacuacuguggaagcugggaggcggcccuccc

SEQ ID NO: 79781 - RNA, 32 nt, Homo Sapiens
aaaccugaauuuaugcagauaugacauuuucu

SEQ ID NO: 79782 - RNA, 32 nt, Homo Sapiens
augcaguuucuucauacuucugucacuuuuuc

SEQ ID NO: 79783 - RNA, 32 nt, Homo Sapiens
ggaggcgagagccgcgcgggcccgcggagugc

SEQ ID NO: 79784 - RNA, 32 nt, Homo Sapiens
uccagcuuccacaacuaugagacaauaaguuu

SEQ ID NO: 79785 - RNA, 32 nt, Homo Sapiens
guuuaaguuguucccccucccucugagaaaag

SEQ ID NO: 79786 - RNA, 32 nt, Homo Sapiens
cccuauguaggauacauacuuggaaauuuagc

SEQ ID NO: 79787 - RNA, 32 nt, Homo Sapiens
gucaccuccacauuugggcauggcaucuucaa

SEQ ID NO: 79788 - RNA, 32 nt, Homo Sapiens
cggcggcggcggcaccaacggcaccaacuauu

SEQ ID NO: 79789 - RNA, 32 nt, Homo Sapiens
cucuucccccucacuugaagcagcucucagca

SEQ ID NO: 79790 - RNA, 32 nt, Homo Sapiens
guaguucaaagagucugucuugagaucugauu

SEQ ID NO: 79791 - RNA, 32 nt, Homo Sapiens
uaauaacagcaguggaauaaguacuuagaaau

SEQ ID NO: 79792 - RNA, 32 nt, Homo Sapiens
cuaagagaaaugacuaucauccugucagcaga

SEQ ID NO: 79793 - RNA, 32 nt, Homo Sapiens
agccgugaaaacagugcuuuggggagcaguug

SEQ ID NO: 79794 - RNA, 32 nt, Homo Sapiens
cugugcaacugggaguggagaggagcccaaca

SEQ ID NO: 79795 - RNA, 32 nt, Homo Sapiens
aagcuuccagcccuccucccuucacccuggaa

SEQ ID NO: 79796 - RNA, 32 nt, Homo Sapiens
cauuuuauuuccucuuaauguuuauacugauu

SEQ ID NO: 79797 - RNA, 32 nt, Homo Sapiens
gcccugaugacaaaacccaguguuuuuuguug

SEQ ID NO: 79798 - RNA, 32 nt, Homo Sapiens
cggccugugucuauggucgggcccucugcguc

SEQ ID NO: 79799 - RNA, 32 nt, Homo Sapiens
gcaaaauaugggaaaaaauuugaaaggcaucc

SEQ ID NO: 79800 - RNA, 32 nt, Homo Sapiens
augagcugcaggugcagugcuccagcuuaagc

SEQ ID NO: 79801 - RNA, 32 nt, Homo Sapiens
uugagccucuaccugccuggugcuggucacag

SEQ ID NO: 79802 - RNA, 32 nt, Homo Sapiens
cuguccugccacccagccccagccagggcucu

SEQ ID NO: 79803 - RNA, 32 nt, Homo Sapiens
uuuguucaauaaauaugcaagcuguuagguaa

SEQ ID NO: 79804 - RNA, 32 nt, Homo Sapiens
gaguugcuuaagaaucacuaucccagaagaaa

SEQ ID NO: 79805 - RNA, 32 nt, Homo Sapiens
aauaacaacuguacuuugauuuuagguacuaa

SEQ ID NO: 79806 - RNA, 32 nt, Homo Sapiens
acgcacaggaugaccaccacccucgugucugc

SEQ ID NO: 79807 - RNA, 32 nt, Homo Sapiens
aguaauuugacuuuauagaaaucccucaguuu

SEQ ID NO: 79808 - RNA, 32 nt, Homo Sapiens
aaucaaaccaacaaaaauaaaucccuaggcua

SEQ ID NO: 79809 - RNA, 32 nt, Homo Sapiens
cccaucuuuuguguuuuccucaagcggggaaa

SEQ ID NO: 79810 - RNA, 32 nt, Homo Sapiens
ucggauucugccaguuucugcucugcagccaa

SEQ ID NO: 79811 - RNA, 32 nt, Homo Sapiens
aagaauugauaaaaacagugugacauauuaaa

SEQ ID NO: 79812 - RNA, 32 nt, Homo Sapiens
ucuguguccucggagccccgcccugcauccug

SEQ ID NO: 79813 - RNA, 32 nt, Homo Sapiens
gacacuggccccacaggaguugugagcccucu

SEQ ID NO: 79814 - RNA, 32 nt, Homo Sapiens
aaguggucuauuccugcccacccccgggugac

SEQ ID NO: 79815 - RNA, 32 nt, Homo Sapiens
gcauuucccuccccccucucaucuuuagaaca

SEQ ID NO: 79816 - RNA, 32 nt, Homo Sapiens
ucccuagauugugcucauauguauuuugaugu

SEQ ID NO: 79817 - RNA, 32 nt, Homo Sapiens
acugaggcgguggucgggacucgggguuugcu

SEQ ID NO: 79818 - RNA, 32 nt, Homo Sapiens
cccggggggcuuugggauucuugucaagcucc

SEQ ID NO: 79819 - RNA, 32 nt, Homo Sapiens
ggccgagggugguggcucacgcauguaauccu

SEQ ID NO: 79820 - RNA, 32 nt, Homo Sapiens
gaugaaaauauuugucaaaaucuuaacugaau

SEQ ID NO: 79821 - RNA, 32 nt, Homo Sapiens
uuuauucccauguucuugugugucacaguuca

SEQ ID NO: 79822 - RNA, 32 nt, Homo Sapiens
gcggguggcggcggcgcggggagccgguugca

SEQ ID NO: 79823 - RNA, 32 nt, Homo Sapiens
uucagacccugccuaccugcaggcagauggac

SEQ ID NO: 79824 - RNA, 32 nt, Homo Sapiens
aagcacccaucccucccagcucacucggcucc

SEQ ID NO: 79825 - RNA, 31 nt, Homo Sapiens
aaucuuuauuuguacuggccaaauacugaau

SEQ ID NO: 79826 - RNA, 32 nt, Homo Sapiens
gaugacucagcaccaccccucagcaaggauga

SEQ ID NO: 79827 - RNA, 32 nt, Homo Sapiens
cuccuucauuaaaaguuuuuaugucucguguc

SEQ ID NO: 79828 - RNA, 32 nt, Homo Sapiens
guaguuauuggaaaagucuguaaccuguggau

SEQ ID NO: 79829 - RNA, 32 nt, Homo Sapiens
cagccauguucucacuuugguuuaacagagaa

SEQ ID NO: 79830 - RNA, 32 nt, Homo Sapiens
augccucgagccauagagccugaaaucaucuu

SEQ ID NO: 79831 - RNA, 32 nt, Homo Sapiens
ggggacugcacgagcuggugaggcugaggagc

SEQ ID NO: 79832 - RNA, 32 nt, Homo Sapiens
ucccucuccgguggaaccagugucacaugccu

SEQ ID NO: 79833 - RNA, 32 nt, Homo Sapiens
gaaaugaaaaggaaauaauuaacaccaacaag

SEQ ID NO: 79834 - RNA, 32 nt, Homo Sapiens
gauugaugaaggaaugccuaaaaguuaccaca

SEQ ID NO: 79835 - RNA, 32 nt, Homo Sapiens
gugacaccagaauaaugagucugcauaaacuu

SEQ ID NO: 79836 - RNA, 32 nt, Homo Sapiens
ccaaaggcugcucccggcaaccccugcccagc

SEQ ID NO: 79837 - RNA, 32 nt, Homo Sapiens
ccuuucccuuccuuuuucuucccuaauaggag

SEQ ID NO: 79838 - RNA, 32 nt, Homo Sapiens
cuuuguauauuuguacaaauguuucagcugug

SEQ ID NO: 79839 - RNA, 32 nt, Homo Sapiens
gcaaccccuaaaaaugugggcaaaggacauga

SEQ ID NO: 79840 - RNA, 32 nt, Homo Sapiens
gcccacuguaguuugcagacaugcucuccaga

SEQ ID NO: 79841 - RNA, 32 nt, Homo Sapiens
aggggagggugcgugggggcgguguggcugca

SEQ ID NO: 79842 - RNA, 32 nt, Homo Sapiens
cuccaggagagccccaguacugccaguauggc

SEQ ID NO: 79843 - RNA, 32 nt, Homo Sapiens
gguuuagaaauuacuaauuuuacuucuaaguc

SEQ ID NO: 79844 - RNA, 32 nt, Homo Sapiens
acauaauuauccaggaagggaauaagguacaa

SEQ ID NO: 79845 - RNA, 32 nt, Homo Sapiens
caguggaguuuaucauugaauagagugcagag

SEQ ID NO: 79846 - RNA, 32 nt, Homo Sapiens
aguuucauauauuauuccguauuacauuuuug

SEQ ID NO: 79847 - RNA, 32 nt, Homo Sapiens
ucuaaugacaaugaauggaauuaaucacucaa

SEQ ID NO: 79848 - RNA, 32 nt, Homo Sapiens
ggcuucugguucaccgcccugauuccacagau

SEQ ID NO: 79849 - RNA, 32 nt, Homo Sapiens
gugggggaaagcggccggugcagcgcggggac

SEQ ID NO: 79850 - RNA, 28 nt, Homo Sapiens
cucagaauggauuaacaugaaaguuauc

SEQ ID NO: 79851 - RNA, 32 nt, Homo Sapiens
uaagagguuauauaguuuuucagugggagggg

SEQ ID NO: 79852 - RNA, 32 nt, Homo Sapiens
uguggguggugguuuucuuaugcuuuggaagc

SEQ ID NO: 79853 - RNA, 32 nt, Homo Sapiens
cacaggggccuggccucuagagggcuggugau

SEQ ID NO: 79854 - RNA, 32 nt, Homo Sapiens
ugauaguuaagauacagcaaccccaaaucccu

SEQ ID NO: 79855 - RNA, 32 nt, Homo Sapiens
cuuuuauuaauacuuucuuuuauuaauauaug

SEQ ID NO: 79856 - RNA, 32 nt, Homo Sapiens
ggcuccgugggguuggggggcccuggcucacu

SEQ ID NO: 79857 - RNA, 32 nt, Homo Sapiens
gccgcgcuucgggugauccggacggcggugga

SEQ ID NO: 79858 - RNA, 32 nt, Homo Sapiens
ccuguugaacaaagaaaggaaucaugugggcc

SEQ ID NO: 79859 - RNA, 32 nt, Homo Sapiens
cuuucuuccuuccccugagcgccuuggcuugc

SEQ ID NO: 79860 - RNA, 32 nt, Homo Sapiens
uucccagguccuuaguuuccucauggguaaaa

SEQ ID NO: 79861 - RNA, 32 nt, Homo Sapiens
cuccauuagagcauuaagcuaaaacuaucaac

SEQ ID NO: 79862 - RNA, 32 nt, Homo Sapiens
cgagcccgcgcucuccuucccccgcccucaga

SEQ ID NO: 79863 - RNA, 32 nt, Homo Sapiens
gaggcgcccaacccggcagacgggugcaggcc

SEQ ID NO: 79864 - RNA, 32 nt, Homo Sapiens
gauuguaccauugcuguccacaaacuuaguau

SEQ ID NO: 79865 - RNA, 32 nt, Homo Sapiens
gacucuuuuuaaggaucuuggcugcuuuuuac

SEQ ID NO: 79866 - RNA, 32 nt, Homo Sapiens
gggagacgcuccaagaggcuccucaguguggg

SEQ ID NO: 79867 - RNA, 32 nt, Homo Sapiens
uuaaaaaacaauuugcaagaaaauguguuuca

SEQ ID NO: 79868 - RNA, 32 nt, Homo Sapiens
agacgcugcuccauucugccuggaucauuucc

SEQ ID NO: 79869 - RNA, 32 nt, Homo Sapiens
gaauguuuggacaacucauuccaggucaccua

SEQ ID NO: 79870 - RNA, 32 nt, Homo Sapiens
cgugugagugugguaugccugaucacagaugg

SEQ ID NO: 79871 - RNA, 32 nt, Homo Sapiens
gccgccgcgcgcacacaccgggcccggcuccu

SEQ ID NO: 79872 - RNA, 32 nt, Homo Sapiens
uaguggcucacgccuguaaucccggcacuuug

SEQ ID NO: 79873 - RNA, 29 nt, Homo Sapiens
guuccauaaaguuucagauuuuuauuuga

SEQ ID NO: 79874 - RNA, 32 nt, Homo Sapiens
ucgccccaaacaggagcgccgggaccgcuggg

SEQ ID NO: 79875 - RNA, 32 nt, Homo Sapiens
aaauaauuuuuggugaaacuauugagauauua

SEQ ID NO: 79876 - RNA, 31 nt, Homo Sapiens
guaaccauagcgugcgggucaugaugaggca

SEQ ID NO: 79877 - RNA, 32 nt, Homo Sapiens
uggggaggggguaguacuugggccggugaguc

SEQ ID NO: 79878 - RNA, 32 nt, Homo Sapiens
caggcauuacaauuaaucuguuuuguacauaa

SEQ ID NO: 79879 - RNA, 32 nt, Homo Sapiens
cagaaugccuuuucuuuuuuugcuucaguugu

SEQ ID NO: 79880 - RNA, 32 nt, Homo Sapiens
cuuuugggagaguacuuuucuccacgagcccu

SEQ ID NO: 79881 - RNA, 32 nt, Homo Sapiens
augcucugcuauuugcacauuuugaaauugga

SEQ ID NO: 79882 - RNA, 32 nt, Homo Sapiens
agcucucugccagccacauggccggggaccga

SEQ ID NO: 79883 - RNA, 32 nt, Homo Sapiens
gacucugcccgcccccaccucccccugcgucg

SEQ ID NO: 79884 - RNA, 32 nt, Homo Sapiens
uaaagugcuuugcuuagcacacugucuggaac

SEQ ID NO: 79885 - RNA, 32 nt, Homo Sapiens
gauaaccugccagauggcuuuuacugugucug

SEQ ID NO: 79886 - RNA, 32 nt, Homo Sapiens
cuuuucagcuggaaagucugaacugaccaaca

SEQ ID NO: 79887 - RNA, 32 nt, Homo Sapiens
ccgucuccaagcccgccgacuccagcucgucc

SEQ ID NO: 79888 - RNA, 32 nt, Homo Sapiens
aggaaauaauaggaguuaaaaacacaaguaga

SEQ ID NO: 79889 - RNA, 32 nt, Homo Sapiens
aucaggcauuugccuggcagcuuuuguuguag

SEQ ID NO: 79890 - RNA, 32 nt, Homo Sapiens
gcaguuuguagccugauguggaguggaggguu

SEQ ID NO: 79891 - RNA, 32 nt, Homo Sapiens
uuuugcaggccagugccaaacacacacuaacu

SEQ ID NO: 79892 - RNA, 32 nt, Homo Sapiens
uucccugcugcaaccagcucuccgugaaucau

SEQ ID NO: 79893 - RNA, 32 nt, Homo Sapiens
acuuaccuggaaaauaauugcuaugccguaca

SEQ ID NO: 79894 - RNA, 32 nt, Homo Sapiens
ucccaccugugcugcuaugcccacagcacaaa

SEQ ID NO: 79895 - RNA, 32 nt, Homo Sapiens
uggcuggcgugggggugggggaggcacccguc

SEQ ID NO: 79896 - RNA, 32 nt, Homo Sapiens
aaauguuuuuaaaauacuguaugccaaaauag

SEQ ID NO: 79897 - RNA, 32 nt, Homo Sapiens
uuuccuuuggaauauggauaaauacaccauga

SEQ ID NO: 79898 - RNA, 32 nt, Homo Sapiens
uguagccagaugcacaguaguggguucccauc

SEQ ID NO: 79899 - RNA, 32 nt, Homo Sapiens
ggagguaggagggucagagagaucugaagaug

SEQ ID NO: 79900 - RNA, 32 nt, Homo Sapiens
ggccucgacaaggcccagccuccugccucccg

SEQ ID NO: 79901 - RNA, 32 nt, Homo Sapiens
gauggggaggacugcgcagacccuggcgaggg

SEQ ID NO: 79902 - RNA, 27 nt, Homo Sapiens
cuggcguccuucugaagccugcugucc

SEQ ID NO: 79903 - RNA, 32 nt, Homo Sapiens
ugaccccugccagcacacccugcagccaaggg

SEQ ID NO: 79904 - RNA, 32 nt, Homo Sapiens
aagacugugggagacccuggcugcugagcaga

SEQ ID NO: 79905 - RNA, 32 nt, Homo Sapiens
cauucaccagacacgacagugagcaaggcagg

SEQ ID NO: 79906 - RNA, 32 nt, Homo Sapiens
aacccuccccacuacccgucuuucucccagcu

SEQ ID NO: 79907 - RNA, 32 nt, Homo Sapiens
gaguugagaugacuuugaagcuaaaaugagua

SEQ ID NO: 79908 - RNA, 32 nt, Homo Sapiens
gcuucaguucccugccagcucaaggacgaauu

SEQ ID NO: 79909 - RNA, 32 nt, Homo Sapiens
gccucauuuucacagcacuacuugcuuauauu

SEQ ID NO: 79910 - RNA, 32 nt, Homo Sapiens
guguuacgaaaacauuccuuuaaagggaucug

SEQ ID NO: 79911 - RNA, 32 nt, Homo Sapiens
auuguggugggcccugaguccugguuuccugg

SEQ ID NO: 79912 - RNA, 32 nt, Homo Sapiens
cagagacugcccuucucacgggcucuaugccu

SEQ ID NO: 79913 - RNA, 32 nt, Homo Sapiens
uaauuuugacaauaccuucuguguacaaagaa

SEQ ID NO: 79914 - RNA, 32 nt, Homo Sapiens
aaaccgcggccauggcggcaccgcggcaaauc

SEQ ID NO: 79915 - RNA, 32 nt, Homo Sapiens
gggaaaaguauuuugaggggacauuuucauca

SEQ ID NO: 79916 - RNA, 32 nt, Homo Sapiens
gacaggcagcgggaaguccuucaccaugcagg

SEQ ID NO: 79917 - RNA, 32 nt, Homo Sapiens
uggaaagguucagaaauguggugaggaaguga

SEQ ID NO: 79918 - RNA, 32 nt, Homo Sapiens
cucuacauuucccuuguuuuuuaacucaugca

SEQ ID NO: 79919 - RNA, 32 nt, Homo Sapiens
uuuaccaccaaaacccauaguguuauguacau

SEQ ID NO: 79920 - RNA, 32 nt, Homo Sapiens
gccccagccgcacccaccgcugccccaggagc

SEQ ID NO: 79921 - RNA, 32 nt, Homo Sapiens
ugcggucauuuucuuuacugcuguuauuuuaa

SEQ ID NO: 79922 - RNA, 32 nt, Homo Sapiens
ccaugccaccuccuccuucucugcccgcccca

SEQ ID NO: 79923 - RNA, 32 nt, Homo Sapiens
gguuccaugaccuugcuguuaaguugaacuaa

SEQ ID NO: 79924 - RNA, 32 nt, Homo Sapiens
uuaguuuagguaaacuuuuuauuaugaccauu

SEQ ID NO: 79925 - RNA, 32 nt, Homo Sapiens
auggccuggagucggguggggcugggagugua

SEQ ID NO: 79926 - RNA, 32 nt, Homo Sapiens
gagcaggagaacaucaucuuaauagccuuugg

SEQ ID NO: 79927 - RNA, 32 nt, Homo Sapiens
cuauuauaaucucuugaauccaaaacuggaua

SEQ ID NO: 79928 - RNA, 32 nt, Homo Sapiens
cugugaucaacacaugccuaucuagcagcaua

SEQ ID NO: 79929 - RNA, 32 nt, Homo Sapiens
ccuggccacacccuauccccagcccaagcccc

SEQ ID NO: 79930 - RNA, 32 nt, Homo Sapiens
gaggaccgcucggcgccgccuccugccacacc

SEQ ID NO: 79931 - RNA, 32 nt, Homo Sapiens
cgccgucaggugccggcccagguggcaggcgc

SEQ ID NO: 79932 - RNA, 32 nt, Homo Sapiens
caccugcauuuuugcccgucuuuaugaggguc

SEQ ID NO: 79933 - RNA, 32 nt, Homo Sapiens
agcggugaccgguggugguuucccuccuuggc

SEQ ID NO: 79934 - RNA, 32 nt, Homo Sapiens
cugugcaaaaauaaaauggacagaauugcaaa

SEQ ID NO: 79935 - RNA, 32 nt, Homo Sapiens
gagagguuaaagauuauggggaagaagauuua

SEQ ID NO: 79936 - RNA, 32 nt, Homo Sapiens
uugggauuaagagcuuucuagccagaaucugg

SEQ ID NO: 79937 - RNA, 32 nt, Homo Sapiens
aauaugcgaugaugaggagaaaguagaccagu

SEQ ID NO: 79938 - RNA, 32 nt, Homo Sapiens
uuuucuagguggcaggacaaaucgcgcccauu

SEQ ID NO: 79939 - RNA, 32 nt, Homo Sapiens
gaagcugcuguccuuccaccaccagcaccgga

SEQ ID NO: 79940 - RNA, 32 nt, Homo Sapiens
ucguggcaaggggacauguguuccaacagcgg

SEQ ID NO: 79941 - RNA, 32 nt, Homo Sapiens
cuugccccggucccccugggccccaugaauaa

SEQ ID NO: 79942 - RNA, 32 nt, Homo Sapiens
ucguccaccagaccgugccucccggccgcccg

SEQ ID NO: 79943 - RNA, 32 nt, Homo Sapiens
uggcauccgggcccgcuacucgcccacuggga

SEQ ID NO: 79944 - RNA, 32 nt, Homo Sapiens
cucaaguauguggcaguaaauacaacaagaca

SEQ ID NO: 79945 - RNA, 31 nt, Homo Sapiens
aguuuccuuuugugucauucaguguaaaacu

SEQ ID NO: 79946 - RNA, 32 nt, Homo Sapiens
ucagccucuggaguagcugggaccacaaucac

SEQ ID NO: 79947 - RNA, 32 nt, Homo Sapiens
ugguuggcagcuggguacgaugacucacaccu

SEQ ID NO: 79948 - RNA, 30 nt, Homo Sapiens
cgcucagggaggcgcgcacugcuccucaga

SEQ ID NO: 79949 - RNA, 32 nt, Homo Sapiens
ugccuccuccaccagcagaauucaguuaccca

SEQ ID NO: 79950 - RNA, 32 nt, Homo Sapiens
uucuaacauuggcagccuggauuauggcccua

SEQ ID NO: 79951 - RNA, 32 nt, Homo Sapiens
aaaucaauuucuuucauucaguuagcucuuua

SEQ ID NO: 79952 - RNA, 32 nt, Homo Sapiens
gucacuguuuaugcugcuggaacuuagcacug

SEQ ID NO: 79953 - RNA, 32 nt, Homo Sapiens
uucugagcuuuauacccagcucugccacaaau

SEQ ID NO: 79954 - RNA, 32 nt, Homo Sapiens
ucacgauugaaauuauugcccuuugaauuacc

SEQ ID NO: 79955 - RNA, 32 nt, Homo Sapiens
uaauuuccaccaagccaaagcugucuggggau

SEQ ID NO: 79956 - RNA, 32 nt, Homo Sapiens
gccgggccccgcuggccacgccgcucccauca

SEQ ID NO: 79957 - RNA, 32 nt, Homo Sapiens
gaacucaggcugccuccagccagccuuugccc

SEQ ID NO: 79958 - RNA, 32 nt, Homo Sapiens
aaguguuaccgggucuuuuuaguguagccaug

SEQ ID NO: 79959 - RNA, 32 nt, Homo Sapiens
uccccucugaccacaagcuucugccugaagau

SEQ ID NO: 79960 - RNA, 32 nt, Homo Sapiens
agagugccacggcucugcacggcagcggggag

SEQ ID NO: 79961 - RNA, 32 nt, Homo Sapiens
guguaaagguaacugacgguaucuaccaaauu

SEQ ID NO: 79962 - RNA, 32 nt, Homo Sapiens
auauuugaccaaaaaucaguuuuacacguaca

SEQ ID NO: 79963 - RNA, 32 nt, Homo Sapiens
ggaaugaaggaguugagaugacuuugaagcua

SEQ ID NO: 79964 - RNA, 32 nt, Homo Sapiens
cugggcaaguguucugaaaacaucuuaucuga

SEQ ID NO: 79965 - RNA, 28 nt, Homo Sapiens
ggcagggggcccaccaggauguucugcc

SEQ ID NO: 79966 - RNA, 32 nt, Homo Sapiens
ccaacccugcgguuaaauguuccugaaauaau

SEQ ID NO: 79967 - RNA, 32 nt, Homo Sapiens
ccccagcccagucuuucuccccggcauucaca

SEQ ID NO: 79968 - RNA, 32 nt, Homo Sapiens
gguguccccgcggcgcaggaggcgguggagcg

SEQ ID NO: 79969 - RNA, 31 nt, Homo Sapiens
uucuguuguuaaacauuucaagauuuauuga

SEQ ID NO: 79970 - RNA, 32 nt, Homo Sapiens
cgggcgggcccggcugccaaggaggagggaga

SEQ ID NO: 79971 - RNA, 32 nt, Homo Sapiens
uucaaacauuucuggacaaaucuuauuuugua

SEQ ID NO: 79972 - RNA, 32 nt, Homo Sapiens
gugauccgccccaccucagccucccaaagugc

SEQ ID NO: 79973 - RNA, 32 nt, Homo Sapiens
uuaucaaguuugggucugugcugcuguuacug

SEQ ID NO: 79974 - RNA, 30 nt, Homo Sapiens
gaauuucagaagaugggggagaacuucuac

SEQ ID NO: 79975 - RNA, 32 nt, Homo Sapiens
aauuaaauacuagcaacuuacacaccuuaaau

SEQ ID NO: 79976 - RNA, 32 nt, Homo Sapiens
ccaauagaaaucaacuggucaugagaucacca

SEQ ID NO: 79977 - RNA, 32 nt, Homo Sapiens
acacgugcuggucugcacacaccugcacacac

SEQ ID NO: 79978 - RNA, 32 nt, Homo Sapiens
uaaccuuugacaaauaacuaauguuuuuacaa

SEQ ID NO: 79979 - RNA, 32 nt, Homo Sapiens
uaggaguaaaaaagucuuugcauaaaacagua

SEQ ID NO: 79980 - RNA, 32 nt, Homo Sapiens
aaaaaauaaagacuaaauuugauggacacacu

SEQ ID NO: 79981 - RNA, 32 nt, Homo Sapiens
aggauucaguauuccuggcccagagggccuug

SEQ ID NO: 79982 - RNA, 31 nt, Homo Sapiens
gugcccugguggagaaagcacugaccuguca

SEQ ID NO: 79983 - RNA, 32 nt, Homo Sapiens
uaccgccaccgccgcgcggcggcagcgagguu

SEQ ID NO: 79984 - RNA, 32 nt, Homo Sapiens
caugugugaggcauuugguauguaucugaauu

SEQ ID NO: 79985 - RNA, 32 nt, Homo Sapiens
uccagaugaggaaacagaggcuaagaaaggag

SEQ ID NO: 79986 - RNA, 32 nt, Homo Sapiens
cuuugccuuaaaccucuuuauuucauugcagu

SEQ ID NO: 79987 - RNA, 32 nt, Homo Sapiens
ggcggcagccugagagccauggagccgcuggg

SEQ ID NO: 79988 - RNA, 32 nt, Homo Sapiens
uggaaguuaguuuucuggcccguggccuuuaa

SEQ ID NO: 79989 - RNA, 32 nt, Homo Sapiens
ucuggggucugggcaagugcucccucacuccc

SEQ ID NO: 79990 - RNA, 32 nt, Homo Sapiens
aagaaaacuugauguauucuguguguaugguu

SEQ ID NO: 79991 - RNA, 32 nt, Homo Sapiens
cgcggcccgcggccgccaugcaguuuauguug

SEQ ID NO: 79992 - RNA, 32 nt, Homo Sapiens
gcgcccgaccccagccaccgcccugcggccag

SEQ ID NO: 79993 - RNA, 32 nt, Homo Sapiens
uggcagcuuaaguggcgcagccaggccaagcu

SEQ ID NO: 79994 - RNA, 32 nt, Homo Sapiens
aauggcuggggacugcaggcccgggaaucuga

SEQ ID NO: 79995 - RNA, 32 nt, Homo Sapiens
cuucugucaucuccagagauaaucuggcuugg

SEQ ID NO: 79996 - RNA, 32 nt, Homo Sapiens
gcaccucauggacucaggauccuccuggagca

SEQ ID NO: 79997 - RNA, 32 nt, Homo Sapiens
cgcgccugcgcgcgcuccuccguacgagaacu

SEQ ID NO: 79998 - RNA, 32 nt, Homo Sapiens
caccuccccguggccugggacguggcugguag

SEQ ID NO: 79999 - RNA, 32 nt, Homo Sapiens
gagagugauuuuaugaugugguacauugggac

SEQ ID NO: 80000 - RNA, 32 nt, Homo Sapiens
cccuggcucccuccuccaggccugccucccac

SEQ ID NO: 80001 - RNA, 32 nt, Homo Sapiens
accggaggccgcgucuccgccuucucugcucg

SEQ ID NO: 80002 - RNA, 32 nt, Homo Sapiens
acacuccuuccacuccccucucuaccaacaga

SEQ ID NO: 80003 - RNA, 32 nt, Homo Sapiens
gcaccccaaccugggcgacagagccagacucu

SEQ ID NO: 80004 - RNA, 32 nt, Homo Sapiens
guggcccuugucacccuggggaccagggccac

SEQ ID NO: 80005 - RNA, 32 nt, Homo Sapiens
uuugacguggugcaauuuugaugagaugucuc

SEQ ID NO: 80006 - RNA, 32 nt, Homo Sapiens
uuccugcgcacgccgcgccgcuggcgccagca

SEQ ID NO: 80007 - RNA, 32 nt, Homo Sapiens
cagcugaacuuucuaacaauucuaaccaaacg

SEQ ID NO: 80008 - RNA, 32 nt, Homo Sapiens
ggcgccacggccacuuccugcugcccuggacc

SEQ ID NO: 80009 - RNA, 32 nt, Homo Sapiens
ccauuguuuuuggcauuauuccaacaugcuuu

SEQ ID NO: 80010 - RNA, 32 nt, Homo Sapiens
uacauauaugcaauauaaaauaguaaugugau

SEQ ID NO: 80011 - RNA, 32 nt, Homo Sapiens
aagagggcagccacccaccuccaacaccuccu

SEQ ID NO: 80012 - RNA, 32 nt, Homo Sapiens
aaguuaaacaugaagggaaaauacuggaauca

SEQ ID NO: 80013 - RNA, 32 nt, Homo Sapiens
cuggcccgccccagcucucagaggcccgccau

SEQ ID NO: 80014 - RNA, 32 nt, Homo Sapiens
cguuccccuuuaagagcaacugcucuaagcca

SEQ ID NO: 80015 - RNA, 32 nt, Homo Sapiens
ugucugcaggguuugucaguacucgucaaagc

SEQ ID NO: 80016 - RNA, 32 nt, Homo Sapiens
ggaccagugugccuauggacuuaggagaguuc

SEQ ID NO: 80017 - RNA, 32 nt, Homo Sapiens
uaaaguugauacuuuccuaagaauuuaacaug

SEQ ID NO: 80018 - RNA, 32 nt, Homo Sapiens
agucagugucuuacauguuaagagggacugaa

SEQ ID NO: 80019 - RNA, 32 nt, Homo Sapiens
gaugcuuugaacuugacacauacucuagcaau

SEQ ID NO: 80020 - RNA, 32 nt, Homo Sapiens
caggaccuugcuuccuucucaucuugccucau

SEQ ID NO: 80021 - RNA, 32 nt, Homo Sapiens
gaguaaggggacgagggccagcucucuggcau

SEQ ID NO: 80022 - RNA, 32 nt, Homo Sapiens
auccguuaauuucaaagaagacuuacaugggg

SEQ ID NO: 80023 - RNA, 28 nt, Homo Sapiens
gacugggggaggaguccgaggugggguu

SEQ ID NO: 80024 - RNA, 32 nt, Homo Sapiens
aggaguuccuucccuuucaacgagggcuucca

SEQ ID NO: 80025 - RNA, 32 nt, Homo Sapiens
acaccguacaacucaaguuccuguggaauguu

SEQ ID NO: 80026 - RNA, 32 nt, Homo Sapiens
augaggaugggaucaaugugggaugaauaaac

SEQ ID NO: 80027 - RNA, 32 nt, Homo Sapiens
cguuaaaauaccagccaguaaaugggggugca

SEQ ID NO: 80028 - RNA, 32 nt, Homo Sapiens
ucaucucugggcuacacggugauucagauuga

SEQ ID NO: 80029 - RNA, 32 nt, Homo Sapiens
agaaaagcugaagugcaugaaaaggaaacauc

SEQ ID NO: 80030 - RNA, 32 nt, Homo Sapiens
agucuggggcccguuuuccccccagggggugu

SEQ ID NO: 80031 - RNA, 32 nt, Homo Sapiens
uuagaagauauuaaacaguucaagaaaacaac

SEQ ID NO: 80032 - RNA, 32 nt, Homo Sapiens
ggaguucggaagccauugcagcaaccuuccuu

SEQ ID NO: 80033 - RNA, 32 nt, Homo Sapiens
ucugcaaguggcggcccgggguccccugggcc

SEQ ID NO: 80034 - RNA, 32 nt, Homo Sapiens
auuuauaacuaauaugguuuuguuuucaauga

SEQ ID NO: 80035 - RNA, 32 nt, Homo Sapiens
guaaaguauacuuuuugcaguagaucaugccc

SEQ ID NO: 80036 - RNA, 32 nt, Homo Sapiens
aaagcucagaacggucucuggauccaugguau

SEQ ID NO: 80037 - RNA, 32 nt, Homo Sapiens
cuuucuguucggcuccuauuuuucucaucauu

SEQ ID NO: 80038 - RNA, 32 nt, Homo Sapiens
uuuauaauaacuguauacuaacaaauguuauu

SEQ ID NO: 80039 - RNA, 32 nt, Homo Sapiens
aaagcaaucuguagaaacaucuccaggcuuug

SEQ ID NO: 80040 - RNA, 32 nt, Homo Sapiens
auggggaggagaaccuucaugguggcccaccu

SEQ ID NO: 80041 - RNA, 32 nt, Homo Sapiens
gcagaauccgcggagacgcacggcuucgucga

SEQ ID NO: 80042 - RNA, 32 nt, Homo Sapiens
gcccaccgcgucgaccgcccgcucggcucggc

SEQ ID NO: 80043 - RNA, 32 nt, Homo Sapiens
auauuaucucaaaggauuuauauuggcgcuuu

SEQ ID NO: 80044 - RNA, 32 nt, Homo Sapiens
gaccccugcccuugucccacucaagccaagca

SEQ ID NO: 80045 - RNA, 32 nt, Homo Sapiens
ucgagccgcuucuaccugcugcugcugggcgu

SEQ ID NO: 80046 - RNA, 32 nt, Homo Sapiens
uggaacuauagcaaauaauucguuaaauuguc

SEQ ID NO: 80047 - RNA, 32 nt, Homo Sapiens
ucucugccaagaagggggauguaaacaggugg

SEQ ID NO: 80048 - RNA, 32 nt, Homo Sapiens
acacugcgcaucaccuaccccgagggcgccau

SEQ ID NO: 80049 - RNA, 32 nt, Homo Sapiens
cgccaccccccgccgcuuuaaccgcagggaac

SEQ ID NO: 80050 - RNA, 32 nt, Homo Sapiens
aaauaacuugcccugggggccuuuuuuuuuaa

SEQ ID NO: 80051 - RNA, 32 nt, Homo Sapiens
cuugccucuggccacccugucuuccccccacc

SEQ ID NO: 80052 - RNA, 32 nt, Homo Sapiens
aaacaugucacuccccucauuuagucaaucaa

SEQ ID NO: 80053 - RNA, 32 nt, Homo Sapiens
auuuuucaaagucuuagguuucgguguaucua

SEQ ID NO: 80054 - RNA, 32 nt, Homo Sapiens
uuuccucaagggguccccgagcagcgucgcag

SEQ ID NO: 80055 - RNA, 32 nt, Homo Sapiens
ugcuucuccuacacuggcaugcugaugagauc

SEQ ID NO: 80056 - RNA, 32 nt, Homo Sapiens
ccuacagggucucaugccauuccgaccuucac

SEQ ID NO: 80057 - RNA, 32 nt, Homo Sapiens
uucucggcaccccgggcccauacaggaccagg

SEQ ID NO: 80058 - RNA, 32 nt, Homo Sapiens
augguaguguuuugguucgauuuuggagcauc

SEQ ID NO: 80059 - RNA, 32 nt, Homo Sapiens
gaccucaggugauccgcccaccucggccuucc

SEQ ID NO: 80060 - RNA, 32 nt, Homo Sapiens
ccccgggcgcaucuggcuuaucuggagaccug

SEQ ID NO: 80061 - RNA, 32 nt, Homo Sapiens
accacagaggaugcugacaucauuuguauuau

SEQ ID NO: 80062 - RNA, 32 nt, Homo Sapiens
cagaagacacacuuguacgaauguagauuuau

SEQ ID NO: 80063 - RNA, 32 nt, Homo Sapiens
uauagauacagaucucucauaggaacaaaguu

SEQ ID NO: 80064 - RNA, 32 nt, Homo Sapiens
ggggcaggguagguccuggggcacugugggcc

SEQ ID NO: 80065 - RNA, 32 nt, Homo Sapiens
uggaaagggagggagaaaggcuuuuuuaggug

SEQ ID NO: 80066 - RNA, 32 nt, Homo Sapiens
ucuuauugaagaaagcacaaaaauaaucaaaa

SEQ ID NO: 80067 - RNA, 32 nt, Homo Sapiens
cacgugaggaaggcgcagcucuguggaaaggu

SEQ ID NO: 80068 - RNA, 32 nt, Homo Sapiens
agcccugcuccaggggccccagguauguguag

SEQ ID NO: 80069 - RNA, 32 nt, Homo Sapiens
cugaauucacuuaaguuuuuccaaaaccucag

SEQ ID NO: 80070 - RNA, 32 nt, Homo Sapiens
uuugucauauaguguuaugucuuggcuuuacc

SEQ ID NO: 80071 - RNA, 32 nt, Homo Sapiens
ucuugaagccccagcaggagcuauuuuccaaa

SEQ ID NO: 80072 - RNA, 32 nt, Homo Sapiens
cagaggauuuaggaagcagacagggauucggg

SEQ ID NO: 80073 - RNA, 32 nt, Homo Sapiens
caccuaaaaucgucugccuguguacuuuguag

SEQ ID NO: 80074 - RNA, 32 nt, Homo Sapiens
gggcagcggaagcucgagauggaggggcggca

SEQ ID NO: 80075 - RNA, 32 nt, Homo Sapiens
uuccagaggucacaucagcaucuuucugcuuu

SEQ ID NO: 80076 - RNA, 32 nt, Homo Sapiens
cuccagauuaucuauuugugugugugugugug

SEQ ID NO: 80077 - RNA, 30 nt, Homo Sapiens
gcgaaggccguucugcacugccccuuggcc

SEQ ID NO: 80078 - RNA, 32 nt, Homo Sapiens
uaaacuuguccucauuggagguugucguaaca

SEQ ID NO: 80079 - RNA, 32 nt, Homo Sapiens
cugcguucaaggaaggagggguggaggaagag

SEQ ID NO: 80080 - RNA, 32 nt, Homo Sapiens
aucuuucucccaugcuggacacuuccugcccu

SEQ ID NO: 80081 - RNA, 32 nt, Homo Sapiens
cacauacugcauuuuucuuagucacucacugg

SEQ ID NO: 80082 - RNA, 32 nt, Homo Sapiens
ggaggaggggguagucuguagaacccaugugu

SEQ ID NO: 80083 - RNA, 32 nt, Homo Sapiens
gguacagaugacugggauaccuggauguaaaa

SEQ ID NO: 80084 - RNA, 32 nt, Homo Sapiens
uaauaucuaaugaaaauacauguuguuauauu

SEQ ID NO: 80085 - RNA, 32 nt, Homo Sapiens
agcugggagcagcuccuuggccagaggcuuac

SEQ ID NO: 80086 - RNA, 32 nt, Homo Sapiens
ccggggcccaggaaggggagggggcgaacgcu

SEQ ID NO: 80087 - RNA, 32 nt, Homo Sapiens
gcagcauaaccuuggcuugauuaaggaauucu

SEQ ID NO: 80088 - RNA, 32 nt, Homo Sapiens
agcccagccugcggccaggggaccacgcacgu

SEQ ID NO: 80089 - RNA, 32 nt, Homo Sapiens
ggcgcguggugcggguuucggcggcggcugag

SEQ ID NO: 80090 - RNA, 32 nt, Homo Sapiens
uuaaaugucauaagaacaauagauaaauuuua

SEQ ID NO: 80091 - RNA, 32 nt, Homo Sapiens
ccgccgguccccagggccgcccggccccuucu

SEQ ID NO: 80092 - RNA, 32 nt, Homo Sapiens
ugcggcaggaggggcgggcggacggcggcucc

SEQ ID NO: 80093 - RNA, 32 nt, Homo Sapiens
agcgggaccggcuggaggaagagcaggaagag

SEQ ID NO: 80094 - RNA, 32 nt, Homo Sapiens
cagaaagauaccauggaguaguuugaaacagg

SEQ ID NO: 80095 - RNA, 32 nt, Homo Sapiens
guugggagcaggcuccugggggugagggucug

SEQ ID NO: 80096 - RNA, 32 nt, Homo Sapiens
aguguuaaucccaauaaacacccauccucuuc

SEQ ID NO: 80097 - RNA, 32 nt, Homo Sapiens
cacacagacgugcacacacacacacacacaca

SEQ ID NO: 80098 - RNA, 32 nt, Homo Sapiens
caguuccgucuucccuagaccuuggcauccug

SEQ ID NO: 80099 - RNA, 32 nt, Homo Sapiens
gugggauaauuuccucauugguugagucagug

SEQ ID NO: 80100 - RNA, 32 nt, Homo Sapiens
cugggcgcugcagcugcucccggcgcgucccc

SEQ ID NO: 80101 - RNA, 32 nt, Homo Sapiens
ucagcagcacaaagacagagccaggcagaaac

SEQ ID NO: 80102 - RNA, 32 nt, Homo Sapiens
gaugcaucuucaguguuguagucugacucuau

SEQ ID NO: 80103 - RNA, 32 nt, Homo Sapiens
aagagaaugaacuguggaauuuauuggcagcc

SEQ ID NO: 80104 - RNA, 32 nt, Homo Sapiens
cuugggacucuggugcgccggggccggggcgg

SEQ ID NO: 80105 - RNA, 32 nt, Homo Sapiens
ucuccuccaccgaccaggugaccuuuugcucu

SEQ ID NO: 80106 - RNA, 32 nt, Homo Sapiens
uugaauuuucuacagaucuacaacuacuaaug

SEQ ID NO: 80107 - RNA, 32 nt, Homo Sapiens
gaugcaucaaaugugaugcagcucuuguugaa

SEQ ID NO: 80108 - RNA, 30 nt, Homo Sapiens
uguuggugucaccacugcuuugggggaaau

SEQ ID NO: 80109 - RNA, 32 nt, Homo Sapiens
uaaagacugaggcacagaagcgaaacgagaac

SEQ ID NO: 80110 - RNA, 32 nt, Homo Sapiens
aguccuaauuuucaauauaucugaagauaaug

SEQ ID NO: 80111 - RNA, 32 nt, Homo Sapiens
agguacaguguuuuuuaccagcuuuauagaag

SEQ ID NO: 80112 - RNA, 32 nt, Homo Sapiens
gugauuacccaugaggcaacacuuauccgcug

SEQ ID NO: 80113 - RNA, 32 nt, Homo Sapiens
ugugaggauuaaaugagugaaugugugucuag

SEQ ID NO: 80114 - RNA, 32 nt, Homo Sapiens
auuuuuguauuuuuuguagggauuggguuuug

SEQ ID NO: 80115 - RNA, 32 nt, Homo Sapiens
ugaccauggcaguguucuggcuccaaauggua

SEQ ID NO: 80116 - RNA, 32 nt, Homo Sapiens
guuaaaauggcaaauuguauguuauaccuauu

SEQ ID NO: 80117 - RNA, 32 nt, Homo Sapiens
gaugccgagguggucaguauccugacuuucag

SEQ ID NO: 80118 - RNA, 32 nt, Homo Sapiens
auguaccgcgaagugugucaugugccgugccc

SEQ ID NO: 80119 - RNA, 32 nt, Homo Sapiens
uuggugguggguuugggggcccagcccacccg

SEQ ID NO: 80120 - RNA, 32 nt, Homo Sapiens
cuagaagccccauucaauaucacuacucuuua

SEQ ID NO: 80121 - RNA, 32 nt, Homo Sapiens
uuuaucuuuuuuaggcuucuccuuuuuagcaa

SEQ ID NO: 80122 - RNA, 32 nt, Homo Sapiens
cuuccgacacugggguucuggagagccuggug

SEQ ID NO: 80123 - RNA, 32 nt, Homo Sapiens
uucacccagaucuguugugccaguuaggaauu

SEQ ID NO: 80124 - RNA, 32 nt, Homo Sapiens
uccuggauguuucaugggcccggggcccccca

SEQ ID NO: 80125 - RNA, 32 nt, Homo Sapiens
aggagaugaagauagagaaagaagauaccgag

SEQ ID NO: 80126 - RNA, 32 nt, Homo Sapiens
cgggagccgcacgcgccggacgaggcucgcug

SEQ ID NO: 80127 - RNA, 32 nt, Homo Sapiens
uccuccacaccauucaggucuuucuuuccgag

SEQ ID NO: 80128 - RNA, 32 nt, Homo Sapiens
ggaguuuaacacacuuauaaacauugagugcc

SEQ ID NO: 80129 - RNA, 32 nt, Homo Sapiens
uuuguuagaaaaacuuuuuuuuuuuuuucuca

SEQ ID NO: 80130 - RNA, 32 nt, Homo Sapiens
ugagaacuuuauuugcagagacaccugagaau

SEQ ID NO: 80131 - RNA, 32 nt, Homo Sapiens
uggcccuuuccccuccuccccccucagcuggg

SEQ ID NO: 80132 - RNA, 32 nt, Homo Sapiens
agaaggcgggccggcccgggagccgcucacuu

SEQ ID NO: 80133 - RNA, 32 nt, Homo Sapiens
cugaaucauuggcauuuauccgauuccacugg

SEQ ID NO: 80134 - RNA, 32 nt, Homo Sapiens
gcaugguaccaccagccuccccgcugguacag

SEQ ID NO: 80135 - RNA, 32 nt, Homo Sapiens
ugccuugaaaaaauuuccaacuucuaccuuua

SEQ ID NO: 80136 - RNA, 32 nt, Homo Sapiens
ggaacuuaauaaaaguuggaaauuuuuaaaaa

SEQ ID NO: 80137 - RNA, 32 nt, Homo Sapiens
aguugcauguauugagugcuuaccaaauggca

SEQ ID NO: 80138 - RNA, 32 nt, Homo Sapiens
gugugugaucaugagugcacaaugaagaagac

SEQ ID NO: 80139 - RNA, 32 nt, Homo Sapiens
ucauuaacagaguggaauucagcacccgccac

SEQ ID NO: 80140 - RNA, 32 nt, Homo Sapiens
uagcaagacccaccccacacugccuucaccau

SEQ ID NO: 80141 - RNA, 32 nt, Homo Sapiens
gggagcugggucugggcggcgggcaggagcug

SEQ ID NO: 80142 - RNA, 32 nt, Homo Sapiens
uauuuuggaaaacaagugauuccacccauaaa

SEQ ID NO: 80143 - RNA, 32 nt, Homo Sapiens
acuucagagguggucucuucuuucuuguaaua

SEQ ID NO: 80144 - RNA, 32 nt, Homo Sapiens
aaagaggaggagaggagaacucccccggccau

SEQ ID NO: 80145 - RNA, 32 nt, Homo Sapiens
caauuguuauuuaaaacauagucccuauagcu

SEQ ID NO: 80146 - RNA, 32 nt, Homo Sapiens
cuuuaaacuuagugcuuugucuauucuuuauu

SEQ ID NO: 80147 - RNA, 28 nt, Homo Sapiens
acccagcaguugccccaucugcucaagg

SEQ ID NO: 80148 - RNA, 32 nt, Homo Sapiens
uugaguuuugguuuuuucuuuuucuuuuuuuu

SEQ ID NO: 80149 - RNA, 32 nt, Homo Sapiens
cuaguuggccuuuucucaguacuggcuggaug

SEQ ID NO: 80150 - RNA, 32 nt, Homo Sapiens
guuccuuaggauuuuuuccuucugaaguguuu

SEQ ID NO: 80151 - RNA, 32 nt, Homo Sapiens
gucuuucuuuaacacacacuaggcucuuugug

SEQ ID NO: 80152 - RNA, 32 nt, Homo Sapiens
caggacacggucugggccgccgaaucuccggc

SEQ ID NO: 80153 - RNA, 32 nt, Homo Sapiens
caaaauagcaaucccuuuuauuucauugcuuu

SEQ ID NO: 80154 - RNA, 32 nt, Homo Sapiens
cacuccaggaggaagucgggaggcguggaggg

SEQ ID NO: 80155 - RNA, 32 nt, Homo Sapiens
aucacugucauuucuauuuuagcauuuuauca

SEQ ID NO: 80156 - RNA, 32 nt, Homo Sapiens
ccuaaauauuaaaauauccaucuguuauucac

SEQ ID NO: 80157 - RNA, 32 nt, Homo Sapiens
aaaaaguaaagaaaaaucaugacuuguaauua

SEQ ID NO: 80158 - RNA, 32 nt, Homo Sapiens
agaggcuaguguuccuaucccaggauggcugu

SEQ ID NO: 80159 - RNA, 32 nt, Homo Sapiens
auagguacagaaaaagcauuugacaaaaucca

SEQ ID NO: 80160 - RNA, 32 nt, Homo Sapiens
gguuggugggugauaguggggucacaguggcu

SEQ ID NO: 80161 - RNA, 32 nt, Homo Sapiens
cuggaugccauggggccugggguuugugguaa

SEQ ID NO: 80162 - RNA, 32 nt, Homo Sapiens
ggugggcccggcccgcgccacaggacccucgc

SEQ ID NO: 80163 - RNA, 32 nt, Homo Sapiens
agaagauggcuuuuuaauaccuaauauucuga

SEQ ID NO: 80164 - RNA, 32 nt, Homo Sapiens
gacacggugaacuggcuguguccaucuuuguc

SEQ ID NO: 80165 - RNA, 32 nt, Homo Sapiens
ugccucaacaacaugcuuuugcugcagauaau

SEQ ID NO: 80166 - RNA, 32 nt, Homo Sapiens
acauuuuacaguagccaacuauggaaaugaau

SEQ ID NO: 80167 - RNA, 32 nt, Homo Sapiens
uuucuggcaccaaguuuaauucuucuucguac

SEQ ID NO: 80168 - RNA, 32 nt, Homo Sapiens
gucugcucccccugcuaggcaggaggagauuu

SEQ ID NO: 80169 - RNA, 32 nt, Homo Sapiens
gccaccacucaucgcaggaugaggauacagag

SEQ ID NO: 80170 - RNA, 32 nt, Homo Sapiens
caccagggguccgucaguagucauugccaccc

SEQ ID NO: 80171 - RNA, 32 nt, Homo Sapiens
guuugccagaaagugcacccuguauggucucc

SEQ ID NO: 80172 - RNA, 31 nt, Homo Sapiens
aaacauuuguaaaacauuccaaauaauucca

SEQ ID NO: 80173 - RNA, 32 nt, Homo Sapiens
uucuucuccccucccccaccgcaucuggccag

SEQ ID NO: 80174 - RNA, 32 nt, Homo Sapiens
uaauagauauugaaacccauuuccuguguguu

SEQ ID NO: 80175 - RNA, 32 nt, Homo Sapiens
agugagcuggagugcgaccagguccccacugg

SEQ ID NO: 80176 - RNA, 32 nt, Homo Sapiens
gccuucauuguuaagguggacuucauggccac

SEQ ID NO: 80177 - RNA, 32 nt, Homo Sapiens
agcuccgugcgcgggcugcagaugucugaccu

SEQ ID NO: 80178 - RNA, 32 nt, Homo Sapiens
gacugacuggagcccccuccccgacucccacu

SEQ ID NO: 80179 - RNA, 32 nt, Homo Sapiens
uuuguuaucauguuauacguacacuuagaaua

SEQ ID NO: 80180 - RNA, 32 nt, Homo Sapiens
ggggcgucucgcgucugggaacggccgggccc

SEQ ID NO: 80181 - RNA, 32 nt, Homo Sapiens
guacuuuucuuacuuugguuuuguuuacuuug

SEQ ID NO: 80182 - RNA, 32 nt, Homo Sapiens
gguggagugucccauccuuuuaaucaagguga

SEQ ID NO: 80183 - RNA, 30 nt, Homo Sapiens
uuuugagcugggaugggggaaaccucgucc

SEQ ID NO: 80184 - RNA, 32 nt, Homo Sapiens
gggugcucuccaugagaauggggccaucuguc

SEQ ID NO: 80185 - RNA, 32 nt, Homo Sapiens
acccaacaaguguugaaugaaugagguucccc

SEQ ID NO: 80186 - RNA, 32 nt, Homo Sapiens
accauuguuggcaaccugguaccucuacuuuu

SEQ ID NO: 80187 - RNA, 32 nt, Homo Sapiens
agcuagaugccacugcccauagacuuauaagu

SEQ ID NO: 80188 - RNA, 32 nt, Homo Sapiens
aaugaauugcgugugcagggcgcggauuuaaa

SEQ ID NO: 80189 - RNA, 32 nt, Homo Sapiens
accucccgcgcgccccgcacccgaccggcuca

SEQ ID NO: 80190 - RNA, 32 nt, Homo Sapiens
ggaagggcagacggaggcaucuugguguauac

SEQ ID NO: 80191 - RNA, 32 nt, Homo Sapiens
cuugauuccuggacccaggagcucucaacuaa

SEQ ID NO: 80192 - RNA, 32 nt, Homo Sapiens
gaaucuuaacaacagcacuuuguuacuucagc

SEQ ID NO: 80193 - RNA, 32 nt, Homo Sapiens
cgccguagccgucgcggccgggacuccccggg

SEQ ID NO: 80194 - RNA, 32 nt, Homo Sapiens
caaagugacuauauuucuuuuuacgaaaaugc

SEQ ID NO: 80195 - RNA, 32 nt, Homo Sapiens
cgccgggaccgagccccgucucccagggaguc

SEQ ID NO: 80196 - RNA, 32 nt, Homo Sapiens
cggacgguauggaggacuacgagcaggagcug

SEQ ID NO: 80197 - RNA, 32 nt, Homo Sapiens
aaacagauauuuuuguuucucaucuuaacuau

SEQ ID NO: 80198 - RNA, 32 nt, Homo Sapiens
auauuuuccaaauauuacaugguaccugaguu

SEQ ID NO: 80199 - RNA, 32 nt, Homo Sapiens
uucacuucaaagcuaaaaaauuguuaaacuug

SEQ ID NO: 80200 - RNA, 32 nt, Homo Sapiens
aaguaccgaugcacgccaccaccaugccugug

SEQ ID NO: 80201 - RNA, 32 nt, Homo Sapiens
uauucaaacgcaugcauauagacagagcaugc

SEQ ID NO: 80202 - RNA, 32 nt, Homo Sapiens
gucaugcgugccacgcucuccucuacgcgccg

SEQ ID NO: 80203 - RNA, 32 nt, Homo Sapiens
gaauguaucuucccuuccaagcugccuaaagc

SEQ ID NO: 80204 - RNA, 30 nt, Homo Sapiens
aauugauguuuaaugggggcgguuggggug

SEQ ID NO: 80205 - RNA, 32 nt, Homo Sapiens
augaugguguccacuauguauucuucaaaaca

SEQ ID NO: 80206 - RNA, 32 nt, Homo Sapiens
cagccccucagcucggccccagccuauuuccc

SEQ ID NO: 80207 - RNA, 32 nt, Homo Sapiens
uugggauugagaggauuccaaagggaaccagg

SEQ ID NO: 80208 - RNA, 32 nt, Homo Sapiens
uggacagacaccuucccccacccauaccccuc

SEQ ID NO: 80209 - RNA, 32 nt, Homo Sapiens
cuuacgaacuuccaacucugaaccaagaacag

SEQ ID NO: 80210 - RNA, 32 nt, Homo Sapiens
gccggaggguggggcggguggcggcgguggca

SEQ ID NO: 80211 - RNA, 32 nt, Homo Sapiens
agauuuaauuuaauagcuuucaugugauuaaa

SEQ ID NO: 80212 - RNA, 32 nt, Homo Sapiens
cuuuuuauggaugucuuuuucuuuuuauggcu

SEQ ID NO: 80213 - RNA, 32 nt, Homo Sapiens
aacaccaaaaauuuagaugccuuaauaguaua

SEQ ID NO: 80214 - RNA, 25 nt, Homo Sapiens
auggagaaucaagagaaggcgagua

SEQ ID NO: 80215 - RNA, 32 nt, Homo Sapiens
cuggcacuuuuagaagacagaaaccacacuca

SEQ ID NO: 80216 - RNA, 32 nt, Homo Sapiens
cgcccugacugacggcggccaguuccucgagg

SEQ ID NO: 80217 - RNA, 32 nt, Homo Sapiens
aacuagacguaccacccagucauuuuaaggac

SEQ ID NO: 80218 - RNA, 32 nt, Homo Sapiens
gaagugggagaagaagcagguagaccaccugu

SEQ ID NO: 80219 - RNA, 32 nt, Homo Sapiens
auugcucuucauccauauauagcaauuguaug

SEQ ID NO: 80220 - RNA, 32 nt, Homo Sapiens
aaaucaguauauacuguauacuguacuaugaa

SEQ ID NO: 80221 - RNA, 32 nt, Homo Sapiens
cuaacagggagaaguagcuaguagcaaugugc

SEQ ID NO: 80222 - RNA, 32 nt, Homo Sapiens
agaauguuuucaaauguucuccagucauuaug

SEQ ID NO: 80223 - RNA, 32 nt, Homo Sapiens
gacagugacguugguccacaccucaccugccc

SEQ ID NO: 80224 - RNA, 32 nt, Homo Sapiens
aacuggcccuggcccugaaccaaauaccuuga

SEQ ID NO: 80225 - RNA, 32 nt, Homo Sapiens
gcacuagauauguuucugugaugauuuugaga

SEQ ID NO: 80226 - RNA, 32 nt, Homo Sapiens
gaaaagauugcacaacuauauuauugauaaac

SEQ ID NO: 80227 - RNA, 32 nt, Homo Sapiens
caccccaaucccaaauuuuguuuugguucuaa

SEQ ID NO: 80228 - RNA, 32 nt, Homo Sapiens
accuuagagaacugaaauaaaaauagaaguuc

SEQ ID NO: 80229 - RNA, 32 nt, Homo Sapiens
ucauuucuucaguccuucuccucugucggaau

SEQ ID NO: 80230 - RNA, 32 nt, Homo Sapiens
uuuguuuuuuggccauuugucuuuugacuccg

SEQ ID NO: 80231 - RNA, 32 nt, Homo Sapiens
gcaaagcgccagcagcccugcacuccacgcug

SEQ ID NO: 80232 - RNA, 32 nt, Homo Sapiens
ucuuguggcccggagccggcccggcccgaaaa

SEQ ID NO: 80233 - RNA, 32 nt, Homo Sapiens
uggcccagugugaugcugcugccgcccggcca

SEQ ID NO: 80234 - RNA, 27 nt, Homo Sapiens
aaacgucuuuauuauccuuucuuucug

SEQ ID NO: 80235 - RNA, 32 nt, Homo Sapiens
caggggugaggagagcaggagaguagggguga

SEQ ID NO: 80236 - RNA, 32 nt, Homo Sapiens
cuuggauaucauaauuucuggggacaacuuua

SEQ ID NO: 80237 - RNA, 32 nt, Homo Sapiens
gaugaauccaaaugagcucuagacauuaucac

SEQ ID NO: 80238 - RNA, 32 nt, Homo Sapiens
ugcgagcagcgcgggcggcagcccgggggaag

SEQ ID NO: 80239 - RNA, 32 nt, Homo Sapiens
acuuccuucagcgccagcagcgcguagccgac

SEQ ID NO: 80240 - RNA, 32 nt, Homo Sapiens
agcugacacguuuuuucuuuugugugaauuuu

SEQ ID NO: 80241 - RNA, 28 nt, Homo Sapiens
gaggcccgacgcuggccgaggugcugag

SEQ ID NO: 80242 - RNA, 32 nt, Homo Sapiens
ggccuagucccgacgcgugugugcuagugagc

SEQ ID NO: 80243 - RNA, 32 nt, Homo Sapiens
acaagugaacaaaauaagcaacuaaaugagac

SEQ ID NO: 80244 - RNA, 30 nt, Homo Sapiens
guguaugucuguguauguaaguuugucuug

SEQ ID NO: 80245 - RNA, 32 nt, Homo Sapiens
uugaaaccagguggaaagaaaggggaagaauu

SEQ ID NO: 80246 - RNA, 32 nt, Homo Sapiens
guccacuccuaacacuagcaucagucccacuc

SEQ ID NO: 80247 - RNA, 32 nt, Homo Sapiens
uguaauucucuuugccagcugcacaaagcuga

SEQ ID NO: 80248 - RNA, 27 nt, Homo Sapiens
ggugccucuuucuucagugcuucuagc

SEQ ID NO: 80249 - RNA, 32 nt, Homo Sapiens
gcuggggaaggggcagugucugacagagagug

SEQ ID NO: 80250 - RNA, 32 nt, Homo Sapiens
uaggcagcuguagaucuugaucuuccagguac

SEQ ID NO: 80251 - RNA, 32 nt, Homo Sapiens
aaagcgugccugagcaucucagagcaauguca

SEQ ID NO: 80252 - RNA, 32 nt, Homo Sapiens
ccgaaguuacagauuauauuaaaauaauaaug

SEQ ID NO: 80253 - RNA, 32 nt, Homo Sapiens
cauguggcaugccuguguauguguguaacaga

SEQ ID NO: 80254 - RNA, 32 nt, Homo Sapiens
cgcuugaacgucugugacccagcccucaccgu

SEQ ID NO: 80255 - RNA, 32 nt, Homo Sapiens
gucauugccaaugggauggucauugccuucac

SEQ ID NO: 80256 - RNA, 32 nt, Homo Sapiens
cuucagggcaccguccucggcccugggcgagg

SEQ ID NO: 80257 - RNA, 32 nt, Homo Sapiens
ccccugguuugugaagugcggaaaaccagagg

SEQ ID NO: 80258 - RNA, 32 nt, Homo Sapiens
caguggcaacgcgcucggguccccuuccacac

SEQ ID NO: 80259 - RNA, 32 nt, Homo Sapiens
agcuguuuuuucccuuucuguuccaaagcagu

SEQ ID NO: 80260 - RNA, 32 nt, Homo Sapiens
aagaagcacgugucuuacaaagggagaggcag

SEQ ID NO: 80261 - RNA, 32 nt, Homo Sapiens
uauguaucaacagguaucaacaaaauccuauu

SEQ ID NO: 80262 - RNA, 32 nt, Homo Sapiens
gcaggagucuguccuucaggccccacagugca

SEQ ID NO: 80263 - RNA, 32 nt, Homo Sapiens
cccuuucuccccaugccccauccagcacuugg

SEQ ID NO: 80264 - RNA, 32 nt, Homo Sapiens
ucuuccucuggacagaggguccagucgggaaa

SEQ ID NO: 80265 - RNA, 32 nt, Homo Sapiens
ugcuggcuuuuggccccuggccccacccagcu

SEQ ID NO: 80266 - RNA, 32 nt, Homo Sapiens
auaaaacacagggcugggaaauuuaagaagau

SEQ ID NO: 80267 - RNA, 32 nt, Homo Sapiens
aggcgccgcucuagcggccgggacucugaacu

SEQ ID NO: 80268 - RNA, 32 nt, Homo Sapiens
cucucugacaguuacagugaucuuuguaucug

SEQ ID NO: 80269 - RNA, 32 nt, Homo Sapiens
ggaguaagauuaugaaaugauuuguauccugc

SEQ ID NO: 80270 - RNA, 32 nt, Homo Sapiens
gccacugcacaccagccuggacaacagagcga

SEQ ID NO: 80271 - RNA, 29 nt, Homo Sapiens
gaauaaagaaauucgugaaaugaaguugu

SEQ ID NO: 80272 - RNA, 32 nt, Homo Sapiens
uggcucuugacaaauacuugcuuuuccucuaa

SEQ ID NO: 80273 - RNA, 32 nt, Homo Sapiens
cacccugacuuccacaagacaccagaauucac

SEQ ID NO: 80274 - RNA, 32 nt, Homo Sapiens
ggacuucaacagaaccccauccagucauuuug

SEQ ID NO: 80275 - RNA, 32 nt, Homo Sapiens
uuccgcggcuccugcggcgguggcagugguag

SEQ ID NO: 80276 - RNA, 32 nt, Homo Sapiens
auuauguguacaguauuggacaaaggauuuua

SEQ ID NO: 80277 - RNA, 27 nt, Homo Sapiens
gccgccuccuucuucugcagcuccugg

SEQ ID NO: 80278 - RNA, 32 nt, Homo Sapiens
gagugcaguggugcaaucuuggcucacuguaa

SEQ ID NO: 80279 - RNA, 32 nt, Homo Sapiens
agacacuccaugaaauuugucaaaugaauaca

SEQ ID NO: 80280 - RNA, 32 nt, Homo Sapiens
aaacugcacaccuggggugauggcuuaaagcc

SEQ ID NO: 80281 - RNA, 32 nt, Homo Sapiens
gaaagagaaccaccccacucugucuucauauu

SEQ ID NO: 80282 - RNA, 32 nt, Homo Sapiens
gucucuccucuuccuuccccaacaauguaguu

SEQ ID NO: 80283 - RNA, 32 nt, Homo Sapiens
cggccgccuuggccgagcgccggcguugggca

SEQ ID NO: 80284 - RNA, 32 nt, Homo Sapiens
accccaccuccccgcgcggucccggccccugg

SEQ ID NO: 80285 - RNA, 32 nt, Homo Sapiens
gacacagaacuaaaacuacuacuuacaucuaa

SEQ ID NO: 80286 - RNA, 32 nt, Homo Sapiens
cugggcuggcuggccagugagccccgucucac

SEQ ID NO: 80287 - RNA, 30 nt, Homo Sapiens
ggacuggggaucccgccgccgggccgcagc

SEQ ID NO: 80288 - RNA, 32 nt, Homo Sapiens
ccacccgcccccuaagucucacuugcugcuac

SEQ ID NO: 80289 - RNA, 32 nt, Homo Sapiens
caucuuggcacagaaauuguuugggggauggg

SEQ ID NO: 80290 - RNA, 31 nt, Homo Sapiens
cucuccugccaacauccuccaagggccucca

SEQ ID NO: 80291 - RNA, 32 nt, Homo Sapiens
uggcauguaguagaugcucaauaaacacuugu

SEQ ID NO: 80292 - RNA, 32 nt, Homo Sapiens
cauuuauuuaagggcuuuuucuuaaauaagaa

SEQ ID NO: 80293 - RNA, 32 nt, Homo Sapiens
uaaccuggucugaaguucugggauguuuucag

SEQ ID NO: 80294 - RNA, 32 nt, Homo Sapiens
ggcaccagugccugcagccucaucucccuccc

SEQ ID NO: 80295 - RNA, 32 nt, Homo Sapiens
accaguuauaacaguguuuaauuuagauaagu

SEQ ID NO: 80296 - RNA, 32 nt, Homo Sapiens
cgguggcagccaugccucccccugccccagcc

SEQ ID NO: 80297 - RNA, 32 nt, Homo Sapiens
cccaacccaagcacugggcuacgcgccucuuc

SEQ ID NO: 80298 - RNA, 32 nt, Homo Sapiens
cugaaacuccccuggccccagcccucuccugc

SEQ ID NO: 80299 - RNA, 31 nt, Homo Sapiens
ggcucuggguuccccauuccuaauuaaacca

SEQ ID NO: 80300 - RNA, 30 nt, Homo Sapiens
caauucuacugaauggggguggaccuggca

SEQ ID NO: 80301 - RNA, 32 nt, Homo Sapiens
gggucccggcacggugggcauucugucaugaa

SEQ ID NO: 80302 - RNA, 32 nt, Homo Sapiens
gagaacauacccacuucuggcuccucaaggag

SEQ ID NO: 80303 - RNA, 32 nt, Homo Sapiens
acccuucuuuugcaucccccgccccugcuauu

SEQ ID NO: 80304 - RNA, 32 nt, Homo Sapiens
agccuaaugagguaauaaaauauauuaaaaua

SEQ ID NO: 80305 - RNA, 28 nt, Homo Sapiens
uucacaauggcgauguggugagaaacuc

SEQ ID NO: 80306 - RNA, 32 nt, Homo Sapiens
uagcgugggugcccuuuuccuuaugcggagug

SEQ ID NO: 80307 - RNA, 32 nt, Homo Sapiens
gaagcucacagucuauuggaaaagagagacau

SEQ ID NO: 80308 - RNA, 32 nt, Homo Sapiens
ucuuuguaaaauuuuaaaugcauaaagggggu

SEQ ID NO: 80309 - RNA, 32 nt, Homo Sapiens
gagcaguucucucagcuggagagacucgggau

SEQ ID NO: 80310 - RNA, 32 nt, Homo Sapiens
uuagauguuucccccagcuuaccuugaggacu

SEQ ID NO: 80311 - RNA, 32 nt, Homo Sapiens
uccaguuccccgcuccugacuccugaccucca

SEQ ID NO: 80312 - RNA, 32 nt, Homo Sapiens
gugccgcagcccucuuuuuuucucuagccaag

SEQ ID NO: 80313 - RNA, 32 nt, Homo Sapiens
cuccgcccucucccacucucucuuuccggugu

SEQ ID NO: 80314 - RNA, 32 nt, Homo Sapiens
gaucccuugagcucaggaguucaagaccagcc

SEQ ID NO: 80315 - RNA, 32 nt, Homo Sapiens
gcucaacgggacaugcaacauaaaaaugggaa

SEQ ID NO: 80316 - RNA, 32 nt, Homo Sapiens
auccaaacugaaauuuuguuucaacugaauuu

SEQ ID NO: 80317 - RNA, 31 nt, Homo Sapiens
gugccggagccccggccugccuggcccugug

SEQ ID NO: 80318 - RNA, 32 nt, Homo Sapiens
ccucucaaaaaaacaaaacaaacaaaaaagaa

SEQ ID NO: 80319 - RNA, 32 nt, Homo Sapiens
aagugucugaugcacggcgagugaacaccguu

SEQ ID NO: 80320 - RNA, 32 nt, Homo Sapiens
cugagcugaaaagaauaugagaaaucggauuu

SEQ ID NO: 80321 - RNA, 32 nt, Homo Sapiens
aacauaaaaaacaaaauaugggagucuuucag

SEQ ID NO: 80322 - RNA, 32 nt, Homo Sapiens
ggaagauuugaaaauuauuaaagaaaaauucc

SEQ ID NO: 80323 - RNA, 32 nt, Homo Sapiens
uuccuguuuauauaaauuggcaacaacuuaua

SEQ ID NO: 80324 - RNA, 32 nt, Homo Sapiens
ugccaccugaaacauaaaauggagcaugagca

SEQ ID NO: 80325 - RNA, 32 nt, Homo Sapiens
agcgagagcgccagagagagaagaucgggggg

SEQ ID NO: 80326 - RNA, 32 nt, Homo Sapiens
aaauuggaaaagacaauguuaaauaguuccua

SEQ ID NO: 80327 - RNA, 32 nt, Homo Sapiens
gugguugcuaagcagccauugcacagagcaua

SEQ ID NO: 80328 - RNA, 32 nt, Homo Sapiens
ucaggacccgccuuggugacucggggggaggg

SEQ ID NO: 80329 - RNA, 32 nt, Homo Sapiens
aagaggaaaaaguucaaaaaauaauuacauuu

SEQ ID NO: 80330 - RNA, 32 nt, Homo Sapiens
ccuguccaccccaccccaacacccuggaagcc

SEQ ID NO: 80331 - RNA, 32 nt, Homo Sapiens
uaccggaccucauaaaaggacucucagccucu

SEQ ID NO: 80332 - RNA, 32 nt, Homo Sapiens
uucucuuccuucccacccaagcuuccggcagc

SEQ ID NO: 80333 - RNA, 32 nt, Homo Sapiens
uuccagcugcaaacagcuaaagggauggucug

SEQ ID NO: 80334 - RNA, 32 nt, Homo Sapiens
acaaaugaggacuuaauuuguugaaauauaau

SEQ ID NO: 80335 - RNA, 32 nt, Homo Sapiens
uguguuauaacccaucugagcccccugcacca

SEQ ID NO: 80336 - RNA, 32 nt, Homo Sapiens
agcaguugucuccuccagccccuuaccaaccu

SEQ ID NO: 80337 - RNA, 32 nt, Homo Sapiens
ucaaaccccuucccuuccuaccuguuuucuga

SEQ ID NO: 80338 - RNA, 32 nt, Homo Sapiens
augcuuauauauaaucuaaccaaagaguuacc

SEQ ID NO: 80339 - RNA, 32 nt, Homo Sapiens
ccaauugcaacaguucauguuccuccuaaugu

SEQ ID NO: 80340 - RNA, 32 nt, Homo Sapiens
cacugucuauuuacauccguccuuacaaccau

SEQ ID NO: 80341 - RNA, 32 nt, Homo Sapiens
cggccgggccggcgcgggagcgggaaagggug

SEQ ID NO: 80342 - RNA, 32 nt, Homo Sapiens
uucuuacaaaaauauauuuuggaaaauuguau

SEQ ID NO: 80343 - RNA, 32 nt, Homo Sapiens
agaccgagcgugugccacuggaccucaguccu

SEQ ID NO: 80344 - RNA, 32 nt, Homo Sapiens
ucccaggcauuccccaggaggccagccuugac

SEQ ID NO: 80345 - RNA, 32 nt, Homo Sapiens
ugaugucugggucuauuuugcauucuaaagga

SEQ ID NO: 80346 - RNA, 32 nt, Homo Sapiens
gccccucccgggccugcccccgucgcgacugg

SEQ ID NO: 80347 - RNA, 30 nt, Homo Sapiens
cgccggcccguuccgugucgccccgcagug

SEQ ID NO: 80348 - RNA, 31 nt, Homo Sapiens
ucccgagagccccagaagucggcggggaagu

SEQ ID NO: 80349 - RNA, 32 nt, Homo Sapiens
gggaguguuugaaguuugcagaugagaagguu

SEQ ID NO: 80350 - RNA, 32 nt, Homo Sapiens
uuaacuggggcuccccgcugugaucuuauucu

SEQ ID NO: 80351 - RNA, 32 nt, Homo Sapiens
augguuuggcuguguccccacccaaaucuuau

SEQ ID NO: 80352 - RNA, 32 nt, Homo Sapiens
uucaaacaugcuauauuuuuuaaaaucaaugu

SEQ ID NO: 80353 - RNA, 32 nt, Homo Sapiens
uacccugugaaauggacuucaguggaaaagau

SEQ ID NO: 80354 - RNA, 32 nt, Homo Sapiens
guggacacacgcugcauagagcucuccuugaa

SEQ ID NO: 80355 - RNA, 32 nt, Homo Sapiens
cuuuguuucuaaaaguaccuugaaaugauaga

SEQ ID NO: 80356 - RNA, 32 nt, Homo Sapiens
cagcugagcugaugaaacggaugaccuggaag

SEQ ID NO: 80357 - RNA, 32 nt, Homo Sapiens
aagaguaucuucauuauucucauuuucucuga

SEQ ID NO: 80358 - RNA, 32 nt, Homo Sapiens
accgaaggcaccgcugaauggagugggcccuc

SEQ ID NO: 80359 - RNA, 32 nt, Homo Sapiens
uaggccgcgaggggcgggugcaauggcggagg

SEQ ID NO: 80360 - RNA, 32 nt, Homo Sapiens
aggccagcugagaugccuggcuacuuggcacc

SEQ ID NO: 80361 - RNA, 32 nt, Homo Sapiens
uaauaaaucccaauauaaucccagcuagugcu

SEQ ID NO: 80362 - RNA, 32 nt, Homo Sapiens
uguugggugaacugguauugcugcuggagggc

SEQ ID NO: 80363 - RNA, 32 nt, Homo Sapiens
ggaacucaugcagggcugggaauaguuuaugu

SEQ ID NO: 80364 - RNA, 32 nt, Homo Sapiens
cucugcaggaggaaagggaggcacucccucug

SEQ ID NO: 80365 - RNA, 32 nt, Homo Sapiens
gaugccaugcuggagugacgccgccuggccgg

SEQ ID NO: 80366 - RNA, 32 nt, Homo Sapiens
ggugcacuuucccacacuuguccccccaggug

SEQ ID NO: 80367 - RNA, 32 nt, Homo Sapiens
gugcucagcggcagccacuauggaggccgcca

SEQ ID NO: 80368 - RNA, 32 nt, Homo Sapiens
gcauagaaauauuuuaggauauuuuaggauau

SEQ ID NO: 80369 - RNA, 32 nt, Homo Sapiens
uggugugagauaucaggaaugucucaugauau

SEQ ID NO: 80370 - RNA, 32 nt, Homo Sapiens
cgucaacccacccugaguccaccugcacccca

SEQ ID NO: 80371 - RNA, 32 nt, Homo Sapiens
ugcggaagaguggagucuaaacuuuuucauug

SEQ ID NO: 80372 - RNA, 32 nt, Homo Sapiens
auagaucuggucucugcucccgagaccccgca

SEQ ID NO: 80373 - RNA, 32 nt, Homo Sapiens
aauuauaaucuacuuaaacucuaaucagaaaa

SEQ ID NO: 80374 - RNA, 29 nt, Homo Sapiens
cccuggggaggacucaggacgaggccccu

SEQ ID NO: 80375 - RNA, 32 nt, Homo Sapiens
ugauuaugaugauuacgauguugauuauaaca

SEQ ID NO: 80376 - RNA, 32 nt, Homo Sapiens
gcauuugaacaaaagacuuacuuacaaaguug

SEQ ID NO: 80377 - RNA, 32 nt, Homo Sapiens
ugucucaggguacggugcaggcacagccagug

SEQ ID NO: 80378 - RNA, 32 nt, Homo Sapiens
gcagaggagggcggggacucggggcggcucuc

SEQ ID NO: 80379 - RNA, 32 nt, Homo Sapiens
gccggcagcagaaauaugaggacccagagccu

SEQ ID NO: 80380 - RNA, 32 nt, Homo Sapiens
gagaguuucauaacagaagagguugaugaguc

SEQ ID NO: 80381 - RNA, 32 nt, Homo Sapiens
uuugcaagauccgcugucugugcgaagaaaag

SEQ ID NO: 80382 - RNA, 32 nt, Homo Sapiens
uaagccauggcugaggguagcuggauuccuca

SEQ ID NO: 80383 - RNA, 32 nt, Homo Sapiens
uccuaccucccucucuauguggcugcgcgggu

SEQ ID NO: 80384 - RNA, 32 nt, Homo Sapiens
cuugcauauuuuauauauuuuacaaugcuuuc

SEQ ID NO: 80385 - RNA, 32 nt, Homo Sapiens
aaaggcaucuucuggaauuuuuucgucagcug

SEQ ID NO: 80386 - RNA, 32 nt, Homo Sapiens
caggccgcagacagcccccagcccuucuccga

SEQ ID NO: 80387 - RNA, 32 nt, Homo Sapiens
uccaguucuugccccagggcuggccugcuagc

SEQ ID NO: 80388 - RNA, 32 nt, Homo Sapiens
uuaagaugauugucaguacauuaaacuuuuca

SEQ ID NO: 80389 - RNA, 32 nt, Homo Sapiens
ggaggcccaagccccuucuuccggcggggagu

SEQ ID NO: 80390 - RNA, 32 nt, Homo Sapiens
aggacucggcccggcucguggagcccuucgcc

SEQ ID NO: 80391 - RNA, 32 nt, Homo Sapiens
cuggccucaggaugcaggagccuccuccucag

SEQ ID NO: 80392 - RNA, 32 nt, Homo Sapiens
gaaucuuguagucagaaacuugaaagagagaa

SEQ ID NO: 80393 - RNA, 32 nt, Homo Sapiens
uguggaucuauuucuuuucaguuaauuuugcu

SEQ ID NO: 80394 - RNA, 32 nt, Homo Sapiens
cauccuguaaacaaagauuucuccuaacaggc

SEQ ID NO: 80395 - RNA, 32 nt, Homo Sapiens
ccagauguugguuaucuuucugaaguagacug

SEQ ID NO: 80396 - RNA, 32 nt, Homo Sapiens
ggacucuggcuugccuuccccagcugccucaa

SEQ ID NO: 80397 - RNA, 32 nt, Homo Sapiens
gcaauuuuuuaaagugcugucuuacuaagucu

SEQ ID NO: 80398 - RNA, 32 nt, Homo Sapiens
aggugaggaugaggcagggcagacacaggcca

SEQ ID NO: 80399 - RNA, 32 nt, Homo Sapiens
gcccagccuggagccguggccgagggcuuccc

SEQ ID NO: 80400 - RNA, 32 nt, Homo Sapiens
gaaugaaugaauuuagaaccacacaaugccaa

SEQ ID NO: 80401 - RNA, 32 nt, Homo Sapiens
uugauggauauuugguuugauuccauguuuuu

SEQ ID NO: 80402 - RNA, 32 nt, Homo Sapiens
cgugcgacugcuuuuucuucaaaggaguucag

SEQ ID NO: 80403 - RNA, 32 nt, Homo Sapiens
gaggaacagcugagggcgacagaggaucuagg

SEQ ID NO: 80404 - RNA, 32 nt, Homo Sapiens
aaacaccacaguguuccauguuccagucacug

SEQ ID NO: 80405 - RNA, 32 nt, Homo Sapiens
acuacagaaugggagaaaauguuuacaaacug

SEQ ID NO: 80406 - RNA, 32 nt, Homo Sapiens
auuuuugugucuagcucagggauuguaaacgc

SEQ ID NO: 80407 - RNA, 32 nt, Homo Sapiens
cccgcggaggucggcggcgaccagcagcgacu

SEQ ID NO: 80408 - RNA, 32 nt, Homo Sapiens
gcccaugccgcuucuagaagccaggcacaggu

SEQ ID NO: 80409 - RNA, 32 nt, Homo Sapiens
aucucccgcucccagacugcucucguaugugg

SEQ ID NO: 80410 - RNA, 32 nt, Homo Sapiens
gaggggcucauaugcugcugcagaaugagcuc

SEQ ID NO: 80411 - RNA, 32 nt, Homo Sapiens
ggauagagggacugaggguuagacggagaaga

SEQ ID NO: 80412 - RNA, 32 nt, Homo Sapiens
ucgaagcggggcggggcgaagcggggcggggc

SEQ ID NO: 80413 - RNA, 32 nt, Homo Sapiens
agaauuuauuuucucucucccccuuccucuuu

SEQ ID NO: 80414 - RNA, 32 nt, Homo Sapiens
cuuuucccaucccaggagcucauuauccaguc

SEQ ID NO: 80415 - RNA, 28 nt, Homo Sapiens
ugggcccagaggugacauuugacuuuuu

SEQ ID NO: 80416 - RNA, 32 nt, Homo Sapiens
acauuauauucaaguucauuuauuacugagcu

SEQ ID NO: 80417 - RNA, 32 nt, Homo Sapiens
gcuguuuuccggauccgcgcucucccagcauc

SEQ ID NO: 80418 - RNA, 32 nt, Homo Sapiens
uuauuuucuuuuucuuuuuuuuucuuuuuacu

SEQ ID NO: 80419 - RNA, 32 nt, Homo Sapiens
ccgccaccaaaaugcagauuuucgugaaaacc

SEQ ID NO: 80420 - RNA, 32 nt, Homo Sapiens
uccacaccacagaaggaaauaaaccauguggc

SEQ ID NO: 80421 - RNA, 32 nt, Homo Sapiens
acaccaaaauguugccaguagguaucucugug

SEQ ID NO: 80422 - RNA, 32 nt, Homo Sapiens
aauaaagcauucuauuugguucagauuucuca

SEQ ID NO: 80423 - RNA, 28 nt, Homo Sapiens
aaaaaugucgaaagcauuauaacuguaa

SEQ ID NO: 80424 - RNA, 32 nt, Homo Sapiens
agcccuggccuagucgugggccccagcaaggc

SEQ ID NO: 80425 - RNA, 30 nt, Homo Sapiens
caaguugaagagguuucuuuuuuggugacc

SEQ ID NO: 80426 - RNA, 32 nt, Homo Sapiens
caaagaaaaaacagaagugggagauaguuauu

SEQ ID NO: 80427 - RNA, 32 nt, Homo Sapiens
gaagaggugaagaaaaucauaguuugagguag

SEQ ID NO: 80428 - RNA, 32 nt, Homo Sapiens
ucuccccucccgcgagccuccuccccucccgc

SEQ ID NO: 80429 - RNA, 32 nt, Homo Sapiens
cuccgcuccaucgcgcaucgcggccgccuccc

SEQ ID NO: 80430 - RNA, 30 nt, Homo Sapiens
ccuggggccaccccucuccugcucugggug

SEQ ID NO: 80431 - RNA, 32 nt, Homo Sapiens
aaggcuacacuggugugucucaugaaugacuu

SEQ ID NO: 80432 - RNA, 32 nt, Homo Sapiens
gucuucaauuuaauaguuguuaaguuuugggc

SEQ ID NO: 80433 - RNA, 32 nt, Homo Sapiens
ggauggguaauuacagauuugcagacuauaga

SEQ ID NO: 80434 - RNA, 32 nt, Homo Sapiens
uugaaugaaaauacauaucauuuugaguuuga

SEQ ID NO: 80435 - RNA, 32 nt, Homo Sapiens
acaggucggcgccccgcaucuuauguggcgcc

SEQ ID NO: 80436 - RNA, 32 nt, Homo Sapiens
gggcagcguggcucaccucccacucuaucccc

SEQ ID NO: 80437 - RNA, 32 nt, Homo Sapiens
gaagcuaaaaggaaaagguuguuguuaaugaa

SEQ ID NO: 80438 - RNA, 32 nt, Homo Sapiens
aaaaggugaauaaaauuugacauuagauuaua

SEQ ID NO: 80439 - RNA, 32 nt, Homo Sapiens
gccuggugcuaagguggcuguggaugccacag

SEQ ID NO: 80440 - RNA, 32 nt, Homo Sapiens
ucuaucuugccaccuucaguauguuuuuaauc

SEQ ID NO: 80441 - RNA, 32 nt, Homo Sapiens
ggggcggcgacggcgacuggcgggugggagug

SEQ ID NO: 80442 - RNA, 32 nt, Homo Sapiens
auuugcauuggcuuuaccauuuuggagugugc

SEQ ID NO: 80443 - RNA, 32 nt, Homo Sapiens
cuggcuaaggcaugcauuagccacuacacaag

SEQ ID NO: 80444 - RNA, 32 nt, Homo Sapiens
cacaagggccuguggggugccuggaggugauc

SEQ ID NO: 80445 - RNA, 32 nt, Homo Sapiens
uuuuuaaaaaucagcuuggcaugguugguggc

SEQ ID NO: 80446 - RNA, 32 nt, Homo Sapiens
auagccuuuuucucccguuucauuccuuucuc

SEQ ID NO: 80447 - RNA, 32 nt, Homo Sapiens
ccugcgcucgcaccuccuacacggcugcagug

SEQ ID NO: 80448 - RNA, 32 nt, Homo Sapiens
aggaagcguuugcggugaucccggcgacugcg

SEQ ID NO: 80449 - RNA, 32 nt, Homo Sapiens
aaggaggucugugccaaagaagaauccaauaa

SEQ ID NO: 80450 - RNA, 32 nt, Homo Sapiens
uccagcugcccccgggaagccagccuccgcag

SEQ ID NO: 80451 - RNA, 32 nt, Homo Sapiens
augcauaaucgugacaauacugcuuuugaaua

SEQ ID NO: 80452 - RNA, 32 nt, Homo Sapiens
uggaguguuuuaaugaguuggaaauucaugcu

SEQ ID NO: 80453 - RNA, 32 nt, Homo Sapiens
ggaggagcccauguguuucucaucucaccaac

SEQ ID NO: 80454 - RNA, 32 nt, Homo Sapiens
aaaacgaggagcucucuguugaccuguaaauc

SEQ ID NO: 80455 - RNA, 32 nt, Homo Sapiens
auuaccuaacuguuccuuggucuauuuaugua

SEQ ID NO: 80456 - RNA, 32 nt, Homo Sapiens
gucuuggguauuuuaaccuguauacucuugaa

SEQ ID NO: 80457 - RNA, 32 nt, Homo Sapiens
gcaaaaaguugaacaaagaugaacuaauguau

SEQ ID NO: 80458 - RNA, 32 nt, Homo Sapiens
aucccaggccuggccucagaggagggaggcca

SEQ ID NO: 80459 - RNA, 32 nt, Homo Sapiens
uucucagccuccugggguuccgccggccaaca

SEQ ID NO: 80460 - RNA, 32 nt, Homo Sapiens
gccugugcucucucccucuccucccaccccac

SEQ ID NO: 80461 - RNA, 29 nt, Homo Sapiens
agagcauaaaguuaauuuuuucaagcauu

SEQ ID NO: 80462 - RNA, 32 nt, Homo Sapiens
acuccauggaaauuccagaaagucuugguuuu

SEQ ID NO: 80463 - RNA, 32 nt, Homo Sapiens
gugcaacacgaagcuuccagaaccauaaaaua

SEQ ID NO: 80464 - RNA, 32 nt, Homo Sapiens
auuguuauggcugaaauuccuccuaguugucu

SEQ ID NO: 80465 - RNA, 32 nt, Homo Sapiens
cgccuuugaaaauaaagcuguuauggguguca

SEQ ID NO: 80466 - RNA, 32 nt, Homo Sapiens
aauguguggcggaagcgcugggggucacggcu

SEQ ID NO: 80467 - RNA, 31 nt, Homo Sapiens
uguaugccauucucuuugccaaguaauagaa

SEQ ID NO: 80468 - RNA, 32 nt, Homo Sapiens
uaugaaauucagaacuuuauuucugaauguaa

SEQ ID NO: 80469 - RNA, 32 nt, Homo Sapiens
cgggcgugguggcacgcacguguaguuccagc

SEQ ID NO: 80470 - RNA, 32 nt, Homo Sapiens
cuggaccgcgcgcauccgcgcaguuggccucc

SEQ ID NO: 80471 - RNA, 32 nt, Homo Sapiens
cagaucuguauauccuacuggucacacagguc

SEQ ID NO: 80472 - RNA, 32 nt, Homo Sapiens
ggggccacaaaauaauuuaauauaaccuaagc

SEQ ID NO: 80473 - RNA, 32 nt, Homo Sapiens
ugcccucauacacacauaaauaaagugaauga

SEQ ID NO: 80474 - RNA, 32 nt, Homo Sapiens
caugccugccagccaguaugugccccucaccc

SEQ ID NO: 80475 - RNA, 32 nt, Homo Sapiens
uuauaggagguuuugguuuucuuuuuuauuau

SEQ ID NO: 80476 - RNA, 32 nt, Homo Sapiens
ggacaagcagcaugcgugugucagacacuggc

SEQ ID NO: 80477 - RNA, 32 nt, Homo Sapiens
uuggggaugcuuuugcagaaauguguucauag

SEQ ID NO: 80478 - RNA, 32 nt, Homo Sapiens
gaagaagaugccauccuauuauaucaucuuac

SEQ ID NO: 80479 - RNA, 32 nt, Homo Sapiens
ugagugcggccgcgacggggcgggcggacucu

SEQ ID NO: 80480 - RNA, 32 nt, Homo Sapiens
caccgccccauagcgccgcggcguccgcucgg

SEQ ID NO: 80481 - RNA, 32 nt, Homo Sapiens
ggaguuacuguaaaaacaagaacuggaagcuc

SEQ ID NO: 80482 - RNA, 32 nt, Homo Sapiens
augcccaguguaaagcuuguagucuuuaaaag

SEQ ID NO: 80483 - RNA, 32 nt, Homo Sapiens
uggguuuuauaguggcuuucugauuuuuggua

SEQ ID NO: 80484 - RNA, 32 nt, Homo Sapiens
aaucaaaucauccugucacaaggcaggaggag

SEQ ID NO: 80485 - RNA, 32 nt, Homo Sapiens
gcuggcauggaacacauugcccuugucuuguu

SEQ ID NO: 80486 - RNA, 32 nt, Homo Sapiens
gaguuccgucgaguuccgucccggcccugcuc

SEQ ID NO: 80487 - RNA, 32 nt, Homo Sapiens
aauaccuuggucauuuuuuuuauauugccuua

SEQ ID NO: 80488 - RNA, 29 nt, Homo Sapiens
auucuauaaaguuauuuucaacugauaaa

SEQ ID NO: 80489 - RNA, 32 nt, Homo Sapiens
caggggugcugugggaacugggauccaauuug

SEQ ID NO: 80490 - RNA, 32 nt, Homo Sapiens
cugacgcgcggcugcggggcggagagcugcgg

SEQ ID NO: 80491 - RNA, 32 nt, Homo Sapiens
ucuugaggacagaagaggcagcuggaagauca

SEQ ID NO: 80492 - RNA, 32 nt, Homo Sapiens
caagccuaggguccuguugagcuggcgacagg

SEQ ID NO: 80493 - RNA, 32 nt, Homo Sapiens
gagcacugcugcccuccuggcccugcuccuuc

SEQ ID NO: 80494 - RNA, 32 nt, Homo Sapiens
caugaacuugguucgcagccugccuugccccu

SEQ ID NO: 80495 - RNA, 32 nt, Homo Sapiens
gaccgggugcgguggcucacgccuguaauccc

SEQ ID NO: 80496 - RNA, 32 nt, Homo Sapiens
augacaggcucaucagccugugccugacccuu

SEQ ID NO: 80497 - RNA, 32 nt, Homo Sapiens
cugcauugugucugaaauauguaaaaguagug

SEQ ID NO: 80498 - RNA, 32 nt, Homo Sapiens
caacgggacaaagccaucucaccuagacuguu

SEQ ID NO: 80499 - RNA, 32 nt, Homo Sapiens
cggcgggacccccaggccuccuccgggguaug

SEQ ID NO: 80500 - RNA, 32 nt, Homo Sapiens
ucaaaugugaaaguacuuggagaaacugaggc

SEQ ID NO: 80501 - RNA, 32 nt, Homo Sapiens
auaaacucaauacacauucauuaaacuuuugu

SEQ ID NO: 80502 - RNA, 31 nt, Homo Sapiens
uguuuugcaaggugugcauuuccaucuugau

SEQ ID NO: 80503 - RNA, 28 nt, Homo Sapiens
uucuauaguauauaaauggcagcaaauc

SEQ ID NO: 80504 - RNA, 25 nt, Homo Sapiens
augccaggcagaggccgcugcccgg

SEQ ID NO: 80505 - RNA, 32 nt, Homo Sapiens
uccgccagcugagcccgcgggagcccaggacg

SEQ ID NO: 80506 - RNA, 32 nt, Homo Sapiens
auaauguauuucuacuauaaaauagaaucaac

SEQ ID NO: 80507 - RNA, 32 nt, Homo Sapiens
uuguguuuuguuuuuuuuuuuaaggaaaaucc

SEQ ID NO: 80508 - RNA, 32 nt, Homo Sapiens
gcuaagagaaucuuuguguguuguguauaaaa

SEQ ID NO: 80509 - RNA, 32 nt, Homo Sapiens
uaacaaauacauguaacuguagauaaaaccac

SEQ ID NO: 80510 - RNA, 32 nt, Homo Sapiens
ugaccggcucacucugcggcgccgugcucccg

SEQ ID NO: 80511 - RNA, 32 nt, Homo Sapiens
uaaacgaaucaucagggaccggauauuucuua

SEQ ID NO: 80512 - RNA, 32 nt, Homo Sapiens
uuacaggauagagguucaguuucuuaaaaaau

SEQ ID NO: 80513 - RNA, 32 nt, Homo Sapiens
uuugcuuccuuccagcauacuagcucuguugc

SEQ ID NO: 80514 - RNA, 32 nt, Homo Sapiens
aucugaggccucccggccccgggggaccccgc

SEQ ID NO: 80515 - RNA, 32 nt, Homo Sapiens
uguggggucuccuggguucagcggcuguugau

SEQ ID NO: 80516 - RNA, 32 nt, Homo Sapiens
cuacagacugucaggaucaccuccuaggccug

SEQ ID NO: 80517 - RNA, 32 nt, Homo Sapiens
accuagaagcagagacucugugagauaaucga

SEQ ID NO: 80518 - RNA, 32 nt, Homo Sapiens
auacugugucuaaagaaauuucaguggucuau

SEQ ID NO: 80519 - RNA, 32 nt, Homo Sapiens
cagggucucuucggagacccaggauuuagggu

SEQ ID NO: 80520 - RNA, 32 nt, Homo Sapiens
auggggcuaggcugaacugcugucugaacugg

SEQ ID NO: 80521 - RNA, 32 nt, Homo Sapiens
gcgccuucgcggaccgagccugacggagccgg

SEQ ID NO: 80522 - RNA, 32 nt, Homo Sapiens
uuucuggggauacaugcagauguuguuaaacg

SEQ ID NO: 80523 - RNA, 32 nt, Homo Sapiens
ccaccugggggccccuggacacugucuacuug

SEQ ID NO: 80524 - RNA, 32 nt, Homo Sapiens
ggaggaaagagcaguuaacaaacaaaggcagu

SEQ ID NO: 80525 - RNA, 32 nt, Homo Sapiens
gguggagguguguccaggggcuggggaagccg

SEQ ID NO: 80526 - RNA, 32 nt, Homo Sapiens
aacccgggaggcggaggcugcagugagccgag

SEQ ID NO: 80527 - RNA, 32 nt, Homo Sapiens
uuauuuugaaucguuaacauuauuuaaagacu

SEQ ID NO: 80528 - RNA, 32 nt, Homo Sapiens
ucaaguaauccucccaccccagccucccaggu

SEQ ID NO: 80529 - RNA, 32 nt, Homo Sapiens
uuggccauuucuguguuucccuuuaaaccaga

SEQ ID NO: 80530 - RNA, 31 nt, Homo Sapiens
gagaggagggcggggaaguuugcgucuuauu

SEQ ID NO: 80531 - RNA, 32 nt, Homo Sapiens
gcuacagcgucgaagauccccagcgcugcggg

SEQ ID NO: 80532 - RNA, 32 nt, Homo Sapiens
ccgccucucucaccgcgccgcucccucguccu

SEQ ID NO: 80533 - RNA, 32 nt, Homo Sapiens
uccagccccauggccacccccaccccugccuc

SEQ ID NO: 80534 - RNA, 32 nt, Homo Sapiens
ucuccuccugacugguggucuaucugccccua

SEQ ID NO: 80535 - RNA, 32 nt, Homo Sapiens
ggggggcaccucagggcagguacugacuucca

SEQ ID NO: 80536 - RNA, 30 nt, Homo Sapiens
caggagcaccggcagcaccagugugugagg

SEQ ID NO: 80537 - RNA, 32 nt, Homo Sapiens
agaccuagcugagaccucacuccacaguuuug

SEQ ID NO: 80538 - RNA, 32 nt, Homo Sapiens
uggaaacccagcuccacccugcuuccacuaca

SEQ ID NO: 80539 - RNA, 32 nt, Homo Sapiens
cucgccuugggggcuccuggccugaggcuggc

SEQ ID NO: 80540 - RNA, 32 nt, Homo Sapiens
gccugcgugcccuggugcugccccacaaccac

SEQ ID NO: 80541 - RNA, 32 nt, Homo Sapiens
cccuaccgcgcgcggggccgauucucccgccu

SEQ ID NO: 80542 - RNA, 32 nt, Homo Sapiens
cggugcgauccacagggcuggguuuucuugca

SEQ ID NO: 80543 - RNA, 32 nt, Homo Sapiens
uggaugcaugcaaugccagcauggaaauuggu

SEQ ID NO: 80544 - RNA, 32 nt, Homo Sapiens
accuugguugccuuuuauuuguuuccucuucu

SEQ ID NO: 80545 - RNA, 32 nt, Homo Sapiens
gugggcaccgcggcccgggacgacagccuggg

SEQ ID NO: 80546 - RNA, 32 nt, Homo Sapiens
agcggggugaggggcggaagggucccggcgcg

SEQ ID NO: 80547 - RNA, 32 nt, Homo Sapiens
agcugccccacuucuccuuuacgcuguguaga

SEQ ID NO: 80548 - RNA, 32 nt, Homo Sapiens
gcugcugggacuuccuugcucagccaucacuc

SEQ ID NO: 80549 - RNA, 32 nt, Homo Sapiens
cgugagccacuguguccagccuuuuccucugu

SEQ ID NO: 80550 - RNA, 28 nt, Homo Sapiens
cuuaaaauggcgaguucuauggauauua

SEQ ID NO: 80551 - RNA, 32 nt, Homo Sapiens
cgaauccccccuccccgacuguggaauggauc

SEQ ID NO: 80552 - RNA, 32 nt, Homo Sapiens
aauagggguauagcuauauuuuuuguaauuuc

SEQ ID NO: 80553 - RNA, 32 nt, Homo Sapiens
aagcugcgaugaggagcuuuacgacuucccgg

SEQ ID NO: 80554 - RNA, 32 nt, Homo Sapiens
guuucuccucuuccccgcacagugcuguuauc

SEQ ID NO: 80555 - RNA, 32 nt, Homo Sapiens
gccguuccgcgcgcucgcgccggagcagcgcu

SEQ ID NO: 80556 - RNA, 32 nt, Homo Sapiens
cugaccagggcauccugugguuauggccuuaa

SEQ ID NO: 80557 - RNA, 32 nt, Homo Sapiens
ccgggcuaccuguagccaaaaugcaacuggau

SEQ ID NO: 80558 - RNA, 32 nt, Homo Sapiens
ugcaugggaggagguuuaaaacaaaucaaaga

SEQ ID NO: 80559 - RNA, 32 nt, Homo Sapiens
aagacucaaggaccacccacauuacaagucug

SEQ ID NO: 80560 - RNA, 32 nt, Homo Sapiens
ccaggccaagacccucccauugcaggggaggc

SEQ ID NO: 80561 - RNA, 32 nt, Homo Sapiens
acaacuugugcuuauguagacacaauuuuuug

SEQ ID NO: 80562 - RNA, 32 nt, Homo Sapiens
cguguugaaaggaaaauaagaaagccaggaau

SEQ ID NO: 80563 - RNA, 32 nt, Homo Sapiens
cucuggaggagacagcuaccccggcccgggcu

SEQ ID NO: 80564 - RNA, 32 nt, Homo Sapiens
ccauuuuacguuuuagaaaauuuuauguauuu

SEQ ID NO: 80565 - RNA, 32 nt, Homo Sapiens
acucuaauuacaucuaaguuagacuugcucac

SEQ ID NO: 80566 - RNA, 32 nt, Homo Sapiens
aaguagcuugucaucaauccccuugucgaaaa

SEQ ID NO: 80567 - RNA, 32 nt, Homo Sapiens
uguauacauugugaagagacuaccacaaucaa

SEQ ID NO: 80568 - RNA, 32 nt, Homo Sapiens
uaagcaggaugauugggaugacaucaugugaa

SEQ ID NO: 80569 - RNA, 32 nt, Homo Sapiens
cuccgagaugccacaauuccuuggauggggga

SEQ ID NO: 80570 - RNA, 32 nt, Homo Sapiens
cuacaagugcggugggcgggggcgggggcggg

SEQ ID NO: 80571 - RNA, 32 nt, Homo Sapiens
gaggccccggcggccugugcuccucaccaccc

SEQ ID NO: 80572 - RNA, 32 nt, Homo Sapiens
guccugcugcgcacagugcuggaggucgggcg

SEQ ID NO: 80573 - RNA, 32 nt, Homo Sapiens
ggagugugcacggaugcugaauguuugggaau

SEQ ID NO: 80574 - RNA, 32 nt, Homo Sapiens
uguccuggaaaacaacacucuaccccacagca

SEQ ID NO: 80575 - RNA, 32 nt, Homo Sapiens
cccaucaccguggagugggaaaacagucagcu

SEQ ID NO: 80576 - RNA, 32 nt, Homo Sapiens
caccuguaaucccagcacuuugggaggccaua

SEQ ID NO: 80577 - RNA, 32 nt, Homo Sapiens
uccuauaaucccaauauuuugggaggccgagg

SEQ ID NO: 80578 - RNA, 32 nt, Homo Sapiens
cuggggaacaaggcccuccuuucuccaggccu

SEQ ID NO: 80579 - RNA, 30 nt, Homo Sapiens
acggcggcgcccgcugcgcgcgcauguuuc

SEQ ID NO: 80580 - RNA, 32 nt, Homo Sapiens
aaccagccgacuuuaggaaagccagaagccag

SEQ ID NO: 80581 - RNA, 32 nt, Homo Sapiens
ucauacuagaaugaucgugacuacccgggcag

SEQ ID NO: 80582 - RNA, 32 nt, Homo Sapiens
guauguucaaggagccuauuaauauauuuaua

SEQ ID NO: 80583 - RNA, 32 nt, Homo Sapiens
gaugaaacagagcuguuguuuuggaagucauu

SEQ ID NO: 80584 - RNA, 32 nt, Homo Sapiens
ccauaggccgagaaauggcaucugagaucugc

SEQ ID NO: 80585 - RNA, 32 nt, Homo Sapiens
ugccauggccgcagccccggccccacacaaaa

SEQ ID NO: 80586 - RNA, 32 nt, Homo Sapiens
caguuugguguuggcuuuuuucugccuaccug

SEQ ID NO: 80587 - RNA, 32 nt, Homo Sapiens
gaaggaagaaugcuuuugaguaccuaauaggu

SEQ ID NO: 80588 - RNA, 32 nt, Homo Sapiens
uuuguccuauaaaauucagggauagagacaag

SEQ ID NO: 80589 - RNA, 32 nt, Homo Sapiens
aagaggaauuaccaccucagccucuuuugccc

SEQ ID NO: 80590 - RNA, 32 nt, Homo Sapiens
uuauauguaaauuguacauaggaauaauugga

SEQ ID NO: 80591 - RNA, 32 nt, Homo Sapiens
gugcuagcucugucuauauaaauagagaaaug

SEQ ID NO: 80592 - RNA, 32 nt, Homo Sapiens
ugcacuuccaauagaccagggauugaccagag

SEQ ID NO: 80593 - RNA, 32 nt, Homo Sapiens
ccuacagaccccgaugggucuggaacaugugu

SEQ ID NO: 80594 - RNA, 32 nt, Homo Sapiens
ccugagugugacgcgccuuagugggcacacgu

SEQ ID NO: 80595 - RNA, 32 nt, Homo Sapiens
uggggucggggcucaccuccucccacaucccu

SEQ ID NO: 80596 - RNA, 31 nt, Homo Sapiens
cucgcugccgccguccugccccgcgccccca

SEQ ID NO: 80597 - RNA, 32 nt, Homo Sapiens
agcugggaccagcgucucggaggcgccgcaga

SEQ ID NO: 80598 - RNA, 32 nt, Homo Sapiens
uguggggaaggggcuguggcggcgccucgagc

SEQ ID NO: 80599 - RNA, 32 nt, Homo Sapiens
ugucuuuugugcuacaguuucguagcaugagu

SEQ ID NO: 80600 - RNA, 29 nt, Homo Sapiens
caccccuggggacagaggucagccuaagg

SEQ ID NO: 80601 - RNA, 32 nt, Homo Sapiens
ucgcaucucccuccccugccagcaaugccagg

SEQ ID NO: 80602 - RNA, 32 nt, Homo Sapiens
ucugccacagaaacaaaauauugggaaagagu

SEQ ID NO: 80603 - RNA, 31 nt, Homo Sapiens
aaagacuauugagccauugauagaaaagcaa

SEQ ID NO: 80604 - RNA, 32 nt, Homo Sapiens
cagauccaacugaaggauacaccaaccauuuu

SEQ ID NO: 80605 - RNA, 32 nt, Homo Sapiens
ucaccauuggacagucucccugauggacccuc

SEQ ID NO: 80606 - RNA, 32 nt, Homo Sapiens
gaguuacauuuucauggggacuugggacaauc

SEQ ID NO: 80607 - RNA, 32 nt, Homo Sapiens
auugaugugagaugugcuggaguggcuauuaa

SEQ ID NO: 80608 - RNA, 32 nt, Homo Sapiens
cugguccccgacgcaaccauggcugaagaaca

SEQ ID NO: 80609 - RNA, 32 nt, Homo Sapiens
gcugggcccagcugccuggugcauaccucuug

SEQ ID NO: 80610 - RNA, 32 nt, Homo Sapiens
gaagaggaucauaacugaaacaacauaagaca

SEQ ID NO: 80611 - RNA, 32 nt, Homo Sapiens
uuucuauaucuucuuauaacuuguaagucuga

SEQ ID NO: 80612 - RNA, 32 nt, Homo Sapiens
cacugaauaaaauaaauaagauaaacugccaa

SEQ ID NO: 80613 - RNA, 32 nt, Homo Sapiens
gcgcgcaccuaccgaggcgcgggcgcugcaga

SEQ ID NO: 80614 - RNA, 32 nt, Homo Sapiens
cauuguucugcuacuuccuucucuggaaguaa

SEQ ID NO: 80615 - RNA, 32 nt, Homo Sapiens
acucagauugaccuaaaauauauuuaucuucu

SEQ ID NO: 80616 - RNA, 32 nt, Homo Sapiens
cgccggaggagcucggacggcaugcugagccc

SEQ ID NO: 80617 - RNA, 32 nt, Homo Sapiens
uaaaaucccuggaucucucucaguuguguauu

SEQ ID NO: 80618 - RNA, 32 nt, Homo Sapiens
guggugauacugggggcggggaaggccuagaa

SEQ ID NO: 80619 - RNA, 32 nt, Homo Sapiens
acuauuaccagcauugucaucguuaucguuau

SEQ ID NO: 80620 - RNA, 32 nt, Homo Sapiens
uaugcccguggcgguggcacagugcuguaucc

SEQ ID NO: 80621 - RNA, 32 nt, Homo Sapiens
gcuccugcugucuguccuuccccgucauguug

SEQ ID NO: 80622 - RNA, 32 nt, Homo Sapiens
ccuuggugggccgcgggaccacccaccccgcc

SEQ ID NO: 80623 - RNA, 31 nt, Homo Sapiens
gcauugcuuguguccauaggaguccaucaag

SEQ ID NO: 80624 - RNA, 32 nt, Homo Sapiens
uugccccucagguguugcuuguguacaucgua

SEQ ID NO: 80625 - RNA, 32 nt, Homo Sapiens
cucuugaaacagugacacaaagguguaauucu

SEQ ID NO: 80626 - RNA, 32 nt, Homo Sapiens
aguuacuguaaaaugcaaaaaaucuuaauacu

SEQ ID NO: 80627 - RNA, 32 nt, Homo Sapiens
ggaaauguuuuuucuuuuuuuuuuguuuuucg

SEQ ID NO: 80628 - RNA, 32 nt, Homo Sapiens
ugaauauauucauauaauguguucuauaauau

SEQ ID NO: 80629 - RNA, 30 nt, Homo Sapiens
ggggcugcaauggggguagccagcaaacgg

SEQ ID NO: 80630 - RNA, 32 nt, Homo Sapiens
aagggucuauauauuugcaccuccucauucaa

SEQ ID NO: 80631 - RNA, 32 nt, Homo Sapiens
gagggggcccuccugaguagaucuguggguga

SEQ ID NO: 80632 - RNA, 28 nt, Homo Sapiens
gagaugucagaagcuaaggacaauggca

SEQ ID NO: 80633 - RNA, 32 nt, Homo Sapiens
cgcccgccaagaagccgcuuuccgcuggcccg

SEQ ID NO: 80634 - RNA, 32 nt, Homo Sapiens
agaugaugaugaugaagaagaugggaauuacc

SEQ ID NO: 80635 - RNA, 30 nt, Homo Sapiens
gugccccucgcgcgugugggucccggggca

SEQ ID NO: 80636 - RNA, 32 nt, Homo Sapiens
uuaguauccuuggauuuuuagauuccccagug

SEQ ID NO: 80637 - RNA, 32 nt, Homo Sapiens
auauuuuuauuuuuaucuccagugccuauaac

SEQ ID NO: 80638 - RNA, 32 nt, Homo Sapiens
cuucuugcuguugaggacccugaaacaccguu

SEQ ID NO: 80639 - RNA, 32 nt, Homo Sapiens
gugaaauaaagguuucuaucuaguuuguaaaa

SEQ ID NO: 80640 - RNA, 32 nt, Homo Sapiens
aaagcaggagcuuuaaaagaaaaaauaagaga

SEQ ID NO: 80641 - RNA, 32 nt, Homo Sapiens
caccuggccaaaaccaaagcuuucucauugag

SEQ ID NO: 80642 - RNA, 32 nt, Homo Sapiens
ccauguuggccaggcuggucugagagagaacu

SEQ ID NO: 80643 - RNA, 32 nt, Homo Sapiens
cccuuuuugccagugcagacacuaugccaaaa

SEQ ID NO: 80644 - RNA, 30 nt, Homo Sapiens
gaaggugauugcugcuauucuggaaugugu

SEQ ID NO: 80645 - RNA, 32 nt, Homo Sapiens
caguucgaucugucguuacgggcuugcaccac

SEQ ID NO: 80646 - RNA, 32 nt, Homo Sapiens
aauguuguauuaugaacuuuuguauuuuguau

SEQ ID NO: 80647 - RNA, 32 nt, Homo Sapiens
gucagcuucagcgugagaagcaggccaggccu

SEQ ID NO: 80648 - RNA, 32 nt, Homo Sapiens
cgagggccucugcgggacugucuguuugcaga

SEQ ID NO: 80649 - RNA, 32 nt, Homo Sapiens
uauaccuuagcugauucuuaauuuucaggaau

SEQ ID NO: 80650 - RNA, 32 nt, Homo Sapiens
uagagauaagaaaaaagagcagucagaaguau

SEQ ID NO: 80651 - RNA, 32 nt, Homo Sapiens
ccaguccagaaagaauugugugaauguucuga

SEQ ID NO: 80652 - RNA, 32 nt, Homo Sapiens
agaccagccugggcaacauagcaagaccccau

SEQ ID NO: 80653 - RNA, 32 nt, Homo Sapiens
aaaacccaaacaccuaguuaauugagggaugg

SEQ ID NO: 80654 - RNA, 32 nt, Homo Sapiens
aucaaccuggacucugcggaugggaugccagu

SEQ ID NO: 80655 - RNA, 32 nt, Homo Sapiens
uggggccuggggauuuuagggaccagcgguug

SEQ ID NO: 80656 - RNA, 32 nt, Homo Sapiens
gaagaugccccugggguaggggugcugauuac

SEQ ID NO: 80657 - RNA, 32 nt, Homo Sapiens
guggcccugaagaugccccgccuuaguuuucc

SEQ ID NO: 80658 - RNA, 32 nt, Homo Sapiens
uuuccuuuuuaaagcauagaaguaguaugugg

SEQ ID NO: 80659 - RNA, 32 nt, Homo Sapiens
uuuuccaaauaaauuugauuaacuuguuaaug

SEQ ID NO: 80660 - RNA, 32 nt, Homo Sapiens
uuguaaugugcucuuuuggaaaauaguugguu

SEQ ID NO: 80661 - RNA, 32 nt, Homo Sapiens
ugcacuuucagaagcuaaaaugacagugucug

SEQ ID NO: 80662 - RNA, 32 nt, Homo Sapiens
auuuucaucauuccauggagauucagucuguc

SEQ ID NO: 80663 - RNA, 32 nt, Homo Sapiens
ugccucccaggcuccgcaccccugaugcugcg

SEQ ID NO: 80664 - RNA, 32 nt, Homo Sapiens
uugaagaaauauauauuaacacuguggucagg

SEQ ID NO: 80665 - RNA, 32 nt, Homo Sapiens
ccuuauagaguagaacauucacagcaaagaag

SEQ ID NO: 80666 - RNA, 32 nt, Homo Sapiens
gaguguucaauacauggcuuccaagguugacu

SEQ ID NO: 80667 - RNA, 32 nt, Homo Sapiens
uccuggagcugugaggagauucgggccgucac

SEQ ID NO: 80668 - RNA, 32 nt, Homo Sapiens
cuccagcccucggcgguggcggcggccguagg

SEQ ID NO: 80669 - RNA, 32 nt, Homo Sapiens
guggaaacaaugccagcucuguggcuucugcc

SEQ ID NO: 80670 - RNA, 32 nt, Homo Sapiens
ccgggcacccucggaccccgugcggauuucga

SEQ ID NO: 80671 - RNA, 32 nt, Homo Sapiens
gcuguggcgcagugaugcauggccuguugaca

SEQ ID NO: 80672 - RNA, 32 nt, Homo Sapiens
guaccacugaccggaagcuggagccauccuac

SEQ ID NO: 80673 - RNA, 32 nt, Homo Sapiens
cuuggcuccccucuccuccuuagccagaaacc

SEQ ID NO: 80674 - RNA, 32 nt, Homo Sapiens
gaccuugcugguuuuuuggggguauucguuuc

SEQ ID NO: 80675 - RNA, 32 nt, Homo Sapiens
gcugcagcccucggcaguggggucaggcccug

SEQ ID NO: 80676 - RNA, 32 nt, Homo Sapiens
cugguuuggagagucuuaauuaauugaaauuu

SEQ ID NO: 80677 - RNA, 28 nt, Homo Sapiens
gaggggaagggaguacauuugagggcac

SEQ ID NO: 80678 - RNA, 32 nt, Homo Sapiens
gauuagcuuucugcuuuuuuuauuugaauaac

SEQ ID NO: 80679 - RNA, 32 nt, Homo Sapiens
cccauuuauuuaacuuuuuuuuucuccuaccu

SEQ ID NO: 80680 - RNA, 32 nt, Homo Sapiens
ugcggggaggccagggcgacagaggacucggg

SEQ ID NO: 80681 - RNA, 32 nt, Homo Sapiens
cgcuccgccuguuuccuccccagcaccuaggg

SEQ ID NO: 80682 - RNA, 32 nt, Homo Sapiens
uuguuguguuugaaguaaaacuaguuguuauc

SEQ ID NO: 80683 - RNA, 32 nt, Homo Sapiens
agcuguacaucuaaaucagggaucccaugacc

SEQ ID NO: 80684 - RNA, 32 nt, Homo Sapiens
auugccaaaaauucugguuaaaagcuuccuaa

SEQ ID NO: 80685 - RNA, 32 nt, Homo Sapiens
ggcaguccugcgccagccucgcgggacacgug

SEQ ID NO: 80686 - RNA, 32 nt, Homo Sapiens
gugggacacacaggugagacuccaucugcccu

SEQ ID NO: 80687 - RNA, 32 nt, Homo Sapiens
caguaucaugaaaggacucacacuggagagaa

SEQ ID NO: 80688 - RNA, 32 nt, Homo Sapiens
cauuaaacaaauuuauuaugaugaacgugaac

SEQ ID NO: 80689 - RNA, 32 nt, Homo Sapiens
auagcucuuucucauuuuuagagaagucaaau

SEQ ID NO: 80690 - RNA, 32 nt, Homo Sapiens
cacuggcggaguuccaagcccgggcugaggag

SEQ ID NO: 80691 - RNA, 32 nt, Homo Sapiens
ggcuccaggaagggcucuggcucagguugcag

SEQ ID NO: 80692 - RNA, 32 nt, Homo Sapiens
ccggggagacgcgguuuacacccgggagaaca

SEQ ID NO: 80693 - RNA, 32 nt, Homo Sapiens
agugauugacauuuuguagcuaguuuaaaauu

SEQ ID NO: 80694 - RNA, 32 nt, Homo Sapiens
cuguuaucuccaugguauuacuugcuaaaugc

SEQ ID NO: 80695 - RNA, 32 nt, Homo Sapiens
gacagcguccuggccuaggugccggggccuga

SEQ ID NO: 80696 - RNA, 32 nt, Homo Sapiens
cagaaagcgaugacgugggacauuauauugca

SEQ ID NO: 80697 - RNA, 32 nt, Homo Sapiens
aucagauuugaaauauuuaaaguggauacaaa

SEQ ID NO: 80698 - RNA, 32 nt, Homo Sapiens
acuaauauuucugucaauuauaucuaaauauu

SEQ ID NO: 80699 - RNA, 32 nt, Homo Sapiens
aacugagaaacacauaucaagauccagccugc

SEQ ID NO: 80700 - RNA, 32 nt, Homo Sapiens
uuggcaaaauaaauaacuuaugguaaucugga

SEQ ID NO: 80701 - RNA, 32 nt, Homo Sapiens
aagggcaguagcuuaugugucugugggugagg

SEQ ID NO: 80702 - RNA, 32 nt, Homo Sapiens
agauugagaagcugccaguggcugcaagagag

SEQ ID NO: 80703 - RNA, 32 nt, Homo Sapiens
cagugcccuuccuccuccuccuccucugccgc

SEQ ID NO: 80704 - RNA, 32 nt, Homo Sapiens
augaccccauccccgccuccuuccuugcuccu

SEQ ID NO: 80705 - RNA, 32 nt, Homo Sapiens
gggggaugucugacuagcucucauggagcucc

SEQ ID NO: 80706 - RNA, 32 nt, Homo Sapiens
gcauagaaggcaggugagcaaccaguuggcua

SEQ ID NO: 80707 - RNA, 32 nt, Homo Sapiens
ccaaacacuccauugggauccuagcuguuuua

SEQ ID NO: 80708 - RNA, 32 nt, Homo Sapiens
guguucuguccuuccucccaucggagggagaa

SEQ ID NO: 80709 - RNA, 30 nt, Homo Sapiens
aagggguuuaggugugcagaagcuuuccuu

SEQ ID NO: 80710 - RNA, 32 nt, Homo Sapiens
uuuuuucugaaucugcuguucuacccaugugu

SEQ ID NO: 80711 - RNA, 32 nt, Homo Sapiens
gccgucccuccucggcgcggccugagcgcccg

SEQ ID NO: 80712 - RNA, 32 nt, Homo Sapiens
cuuggaucuguucagagcugacccccuagcaa

SEQ ID NO: 80713 - RNA, 32 nt, Homo Sapiens
uuggauauaauccucagaaauaaugcacacua

SEQ ID NO: 80714 - RNA, 32 nt, Homo Sapiens
agcaggcccccuccccgcuauagguguagcag

SEQ ID NO: 80715 - RNA, 32 nt, Homo Sapiens
agccaggcgugguggcgggcgccuguaaucca

SEQ ID NO: 80716 - RNA, 32 nt, Homo Sapiens
acaaaauaaaaggauuuuucuguaacugucac

SEQ ID NO: 80717 - RNA, 32 nt, Homo Sapiens
ugcgaacguucgccgcggggguggcuccgggg

SEQ ID NO: 80718 - RNA, 32 nt, Homo Sapiens
ggaauucccucccccuccuugugccuucuuug

SEQ ID NO: 80719 - RNA, 32 nt, Homo Sapiens
ucugaagcuugggcccaguucuccuuuucucc

SEQ ID NO: 80720 - RNA, 32 nt, Homo Sapiens
accauacaaggugccuuguucaucaggaaaac

SEQ ID NO: 80721 - RNA, 32 nt, Homo Sapiens
gcugcuugucuggccugagcuguggggccgcu

SEQ ID NO: 80722 - RNA, 32 nt, Homo Sapiens
gugugccccucggucgcccaccugcacagcuc

SEQ ID NO: 80723 - RNA, 32 nt, Homo Sapiens
ucuguuuugugagaauacugcacuauggaaua

SEQ ID NO: 80724 - RNA, 32 nt, Homo Sapiens
gaaaucccuccccuuguuacagauggcguaga

SEQ ID NO: 80725 - RNA, 32 nt, Homo Sapiens
cuaauaaaaugaaucuaaacauugaaugugaa

SEQ ID NO: 80726 - RNA, 32 nt, Homo Sapiens
cacugucuugucaccucauuuugcauuacugu

SEQ ID NO: 80727 - RNA, 32 nt, Homo Sapiens
cgggugcggcggcaccggcaguuuucgguccc

SEQ ID NO: 80728 - RNA, 32 nt, Homo Sapiens
ucgcggggccgcggcggaguguaccgugcugc

SEQ ID NO: 80729 - RNA, 32 nt, Homo Sapiens
gucuccuccuagcagugcgcgccccgccugug

SEQ ID NO: 80730 - RNA, 30 nt, Homo Sapiens
cuggagggagguggagggaggaagguggga

SEQ ID NO: 80731 - RNA, 32 nt, Homo Sapiens
acucaggaggcugaagcagaagaaucacuuga

SEQ ID NO: 80732 - RNA, 32 nt, Homo Sapiens
gauggaaugaccaaccagcauucuucauggug

SEQ ID NO: 80733 - RNA, 32 nt, Homo Sapiens
uuacuguucuuugcuuuaaauuccuggcacuu

SEQ ID NO: 80734 - RNA, 32 nt, Homo Sapiens
accuaaaaaguuaaaacaaaacauggaugucu

SEQ ID NO: 80735 - RNA, 32 nt, Homo Sapiens
gacauuauaaugggcuuuugcacuguuauuau

SEQ ID NO: 80736 - RNA, 32 nt, Homo Sapiens
uccuugccugucaggaccauuuuagaagaguu

SEQ ID NO: 80737 - RNA, 29 nt, Homo Sapiens
cgaaaugaacaaaagccggcccugcccuu

SEQ ID NO: 80738 - RNA, 32 nt, Homo Sapiens
gcagaacccacaugugaauccuuguaggacuc

SEQ ID NO: 80739 - RNA, 32 nt, Homo Sapiens
gggaaggaaauuaaaacugaaaauguacaauu

SEQ ID NO: 80740 - RNA, 32 nt, Homo Sapiens
ugcaugcaguagacagaagaggaagaaagaac

SEQ ID NO: 80741 - RNA, 32 nt, Homo Sapiens
uuuagacagggucgggcggggaggggugugga

SEQ ID NO: 80742 - RNA, 32 nt, Homo Sapiens
aaauuuccuucugcacuguauaaaaggaccau

SEQ ID NO: 80743 - RNA, 32 nt, Homo Sapiens
cgaguuugccugcgcccuccccgccuccgagu

SEQ ID NO: 80744 - RNA, 32 nt, Homo Sapiens
augggcuaguuuuccuuggguucugaagaaaa

SEQ ID NO: 80745 - RNA, 32 nt, Homo Sapiens
gucuucccugaagaauacuggggguagggaaa

SEQ ID NO: 80746 - RNA, 32 nt, Homo Sapiens
uguaccugccccaccccagcucauccaugugc

SEQ ID NO: 80747 - RNA, 32 nt, Homo Sapiens
gcucuccgggauccagcuccgccccuggccag

SEQ ID NO: 80748 - RNA, 32 nt, Homo Sapiens
cggaacgggcaaucccagccgaggggaccagc

SEQ ID NO: 80749 - RNA, 32 nt, Homo Sapiens
ucugcgcggcggugcgggccuacgaucccgcg

SEQ ID NO: 80750 - RNA, 32 nt, Homo Sapiens
ccgaaucaguuagggaaagugauuuaaacuuu

SEQ ID NO: 80751 - RNA, 32 nt, Homo Sapiens
ucaacccauagucagagauaguccuaacugau

SEQ ID NO: 80752 - RNA, 32 nt, Homo Sapiens
aaauaaucuaaaucaaguugcuguguguguca

SEQ ID NO: 80753 - RNA, 32 nt, Homo Sapiens
gaugccccucuagguagccuggaucccaaaug

SEQ ID NO: 80754 - RNA, 32 nt, Homo Sapiens
ugagagaucuucauauacuucauuuuuuaaua

SEQ ID NO: 80755 - RNA, 32 nt, Homo Sapiens
guaacaucaaaauuauuuuauucuuucuucuu

SEQ ID NO: 80756 - RNA, 32 nt, Homo Sapiens
uuccuccuggaacagaagacagcugcuggguc

SEQ ID NO: 80757 - RNA, 32 nt, Homo Sapiens
ggugagcggcgggcugcgggacccucgcccgg

SEQ ID NO: 80758 - RNA, 32 nt, Homo Sapiens
gcccuggagcaccguggggugcugcuggagga

SEQ ID NO: 80759 - RNA, 32 nt, Homo Sapiens
uguccugugucugcagaauggggcugccuggu

SEQ ID NO: 80760 - RNA, 32 nt, Homo Sapiens
gagaugugcggaagggacccaggagaccugca

SEQ ID NO: 80761 - RNA, 32 nt, Homo Sapiens
gagagugcucuuucuucauacuuccuuuaaaa

SEQ ID NO: 80762 - RNA, 32 nt, Homo Sapiens
ggaccuugauaaaacaauuuuguagaguguaa

SEQ ID NO: 80763 - RNA, 32 nt, Homo Sapiens
ccuugcacucccuacccccacccaccuagccg

SEQ ID NO: 80764 - RNA, 32 nt, Homo Sapiens
gaguacgugaggaagaaaaaugucugaaaagc

SEQ ID NO: 80765 - RNA, 32 nt, Homo Sapiens
uaacccgcgcggggagcgcccaggaugccgcg

SEQ ID NO: 80766 - RNA, 32 nt, Homo Sapiens
gccuccacccucacuguguaacacugagccag

SEQ ID NO: 80767 - RNA, 32 nt, Homo Sapiens
gacagcuggccugggcucccccugcucaaaca

SEQ ID NO: 80768 - RNA, 32 nt, Homo Sapiens
auaauaauaaaacaacuuguuuccuuuuggcc

SEQ ID NO: 80769 - RNA, 32 nt, Homo Sapiens
uauuugggaaaguuaacugugugcacuuuuag

SEQ ID NO: 80770 - RNA, 32 nt, Homo Sapiens
ggccacguggagacaccacggucgacgacggc

SEQ ID NO: 80771 - RNA, 32 nt, Homo Sapiens
ugaugaguuaguaggguucuguuaccaauaaa

SEQ ID NO: 80772 - RNA, 32 nt, Homo Sapiens
ccaccaaguauuuuaaaagugugccaccuuuu

SEQ ID NO: 80773 - RNA, 32 nt, Homo Sapiens
uagcuaagaaauaaauacaucucaucuaacac

SEQ ID NO: 80774 - RNA, 32 nt, Homo Sapiens
gcuauauuuccccccaucgauuuguaauggcu

SEQ ID NO: 80775 - RNA, 32 nt, Homo Sapiens
uaacaggacuuccuagagcguugacagaaauu

SEQ ID NO: 80776 - RNA, 32 nt, Homo Sapiens
ucugcacuuaaucgcuccucuccgggggcggc

SEQ ID NO: 80777 - RNA, 32 nt, Homo Sapiens
ggcagggaaggggccaugacuuuucugcccug

SEQ ID NO: 80778 - RNA, 32 nt, Homo Sapiens
uuagcugugggaagaucugaaucuggggccgu

SEQ ID NO: 80779 - RNA, 32 nt, Homo Sapiens
ggggaaguguagccacaguucuuccaaaugua

SEQ ID NO: 80780 - RNA, 32 nt, Homo Sapiens
guuugaugaaguauguugggaaagagagcuuc

SEQ ID NO: 80781 - RNA, 32 nt, Homo Sapiens
uuuagacaagauguuuccuguguagcucauaa

SEQ ID NO: 80782 - RNA, 32 nt, Homo Sapiens
gugagggcugagagggcuguggcugggugguc

SEQ ID NO: 80783 - RNA, 32 nt, Homo Sapiens
ccaccggccgccgagaguccccggccuugggu

SEQ ID NO: 80784 - RNA, 32 nt, Homo Sapiens
ugaaauuauuacaaaauguauuauuacaucau

SEQ ID NO: 80785 - RNA, 32 nt, Homo Sapiens
ugcaguggucugaucucggcucacugcaaccu

SEQ ID NO: 80786 - RNA, 32 nt, Homo Sapiens
aaaacuuugaauaguuuuaguguguccuuaaa

SEQ ID NO: 80787 - RNA, 32 nt, Homo Sapiens
acggaggcacguacacugaaauuuaagucauc

SEQ ID NO: 80788 - RNA, 32 nt, Homo Sapiens
uauuaauucccuaaucugguagcaauccaucu

SEQ ID NO: 80789 - RNA, 32 nt, Homo Sapiens
ugauaugcauuuuuauacaggcacauaaaaau

SEQ ID NO: 80790 - RNA, 32 nt, Homo Sapiens
gaucacuugagccccggagguugagacugcag

SEQ ID NO: 80791 - RNA, 32 nt, Homo Sapiens
cuucauacccccaugucaguguguguauucug

SEQ ID NO: 80792 - RNA, 32 nt, Homo Sapiens
ggucucugcucccgagaccccgcacagggcuc

SEQ ID NO: 80793 - RNA, 32 nt, Homo Sapiens
cagcaggcauuuggugucgagaccacaccucc

SEQ ID NO: 80794 - RNA, 32 nt, Homo Sapiens
uuuauuaauguuuguagcuuuuuauauuugua

SEQ ID NO: 80795 - RNA, 31 nt, Homo Sapiens
acggugguugcagugagccaagauugugcca

SEQ ID NO: 80796 - RNA, 32 nt, Homo Sapiens
aagcuggagcccagagauguggcugccugugc

SEQ ID NO: 80797 - RNA, 32 nt, Homo Sapiens
ugccugucuucgcgccacuguugucccaccga

SEQ ID NO: 80798 - RNA, 32 nt, Homo Sapiens
ucuuccauaagccugcuaaaaaacagagauga

SEQ ID NO: 80799 - RNA, 32 nt, Homo Sapiens
cugugccaagcuaauuuuuuuauuuuuuguag

SEQ ID NO: 80800 - RNA, 30 nt, Homo Sapiens
auggggcacccgcugccgccgccgcuaccg

SEQ ID NO: 80801 - RNA, 32 nt, Homo Sapiens
ggcggcucggaggagcggcugcugcugcugcu

SEQ ID NO: 80802 - RNA, 32 nt, Homo Sapiens
aucagcuuuuguaauuauguauaauagcucau

SEQ ID NO: 80803 - RNA, 30 nt, Homo Sapiens
agcccaggcaggcggaggauacccagggug

SEQ ID NO: 80804 - RNA, 32 nt, Homo Sapiens
ucaaggccaaacucagggaggaugaggccaug

SEQ ID NO: 80805 - RNA, 32 nt, Homo Sapiens
uaagaacacaguugcaaacaguccucaaaccc

SEQ ID NO: 80806 - RNA, 32 nt, Homo Sapiens
ccuggcugcaaagggaggauuucugcgcgggg

SEQ ID NO: 80807 - RNA, 32 nt, Homo Sapiens
uugggucggggguggggggcaugaaggcaagg

SEQ ID NO: 80808 - RNA, 32 nt, Homo Sapiens
ggacuggagagccaccaggccacugagcacag

SEQ ID NO: 80809 - RNA, 32 nt, Homo Sapiens
auauggauuauguuuuagcauuuuauacaguc

SEQ ID NO: 80810 - RNA, 32 nt, Homo Sapiens
gcccagaaucaucaaaauagugaaagacugau

SEQ ID NO: 80811 - RNA, 32 nt, Homo Sapiens
aaggaaaugcaaagguaggaaaagucucuuag

SEQ ID NO: 80812 - RNA, 32 nt, Homo Sapiens
gcgccgcugcccgacgccggaagugcccgccu

SEQ ID NO: 80813 - RNA, 32 nt, Homo Sapiens
ugcaggggcuccugcccugcuguaucccacca

SEQ ID NO: 80814 - RNA, 32 nt, Homo Sapiens
caagcucucugaccggccccuccaugcgcuca

SEQ ID NO: 80815 - RNA, 32 nt, Homo Sapiens
uggacacucuguaucuagcuacucuggugggg

SEQ ID NO: 80816 - RNA, 32 nt, Homo Sapiens
aauuauuuuuaaaaccuugugauauauacaau

SEQ ID NO: 80817 - RNA, 32 nt, Homo Sapiens
ucaguauuguaaaauaaauguugacucauuuc

SEQ ID NO: 80818 - RNA, 32 nt, Homo Sapiens
ccguugucaccaugccggucguccggaagauu

SEQ ID NO: 80819 - RNA, 28 nt, Homo Sapiens
caaucgcugcggccgccuagugcucggg

SEQ ID NO: 80820 - RNA, 32 nt, Homo Sapiens
acugagacaaaacaguacucacugaguguuuu

SEQ ID NO: 80821 - RNA, 32 nt, Homo Sapiens
guccuuggggacguggcagaugccagcgacca

SEQ ID NO: 80822 - RNA, 32 nt, Homo Sapiens
cacacucagccaggcccgcgggcaucugcugc

SEQ ID NO: 80823 - RNA, 32 nt, Homo Sapiens
accuucugcuggaagaucugagcuuucuucuu

SEQ ID NO: 80824 - RNA, 32 nt, Homo Sapiens
aagggagccaagggauggacaucuugucauuu

SEQ ID NO: 80825 - RNA, 32 nt, Homo Sapiens
gacuggaggaccagcuguuggccucucuguua

SEQ ID NO: 80826 - RNA, 32 nt, Homo Sapiens
aacuuucugcuucccacagguuuucagcauuc

SEQ ID NO: 80827 - RNA, 32 nt, Homo Sapiens
aagcaagccaggaggugcuugcggccgcuucu

SEQ ID NO: 80828 - RNA, 32 nt, Homo Sapiens
ucaaguaacaugcuuagcuuucccuccuuaau

SEQ ID NO: 80829 - RNA, 32 nt, Homo Sapiens
uaucuuaagaugucuguaaauuuaacuuuuau

SEQ ID NO: 80830 - RNA, 32 nt, Homo Sapiens
uccauggaggauuaaguaaacugaaaccuaag

SEQ ID NO: 80831 - RNA, 32 nt, Homo Sapiens
aagguucuaccauuuugguuuccaaugccucu

SEQ ID NO: 80832 - RNA, 32 nt, Homo Sapiens
ugugcggcaccucgggcugggcuccuguuagg

SEQ ID NO: 80833 - RNA, 32 nt, Homo Sapiens
ucuaauccauuaauguaguuaauuacauaaug

SEQ ID NO: 80834 - RNA, 32 nt, Homo Sapiens
uuuggaauuucugcuuuacagacagaacaaug

SEQ ID NO: 80835 - RNA, 32 nt, Homo Sapiens
uuggaauucaauaaaaaaugugaacaauaaua

SEQ ID NO: 80836 - RNA, 32 nt, Homo Sapiens
ugccucuccacaggccgagauccugccuguug

SEQ ID NO: 80837 - RNA, 32 nt, Homo Sapiens
ccgccgcgcgcccacgcgccucgcuugcugcg

SEQ ID NO: 80838 - RNA, 32 nt, Homo Sapiens
uaucuaauccucccauuugggcaguauaggug

SEQ ID NO: 80839 - RNA, 32 nt, Homo Sapiens
uuccaaauauuuacagacucuaguugcaaggu

SEQ ID NO: 80840 - RNA, 32 nt, Homo Sapiens
ggugaggagcgcggcgcgggaggcacguuccu

SEQ ID NO: 80841 - RNA, 32 nt, Homo Sapiens
ucuggaaguauuucaaauaaauuacauuauua

SEQ ID NO: 80842 - RNA, 32 nt, Homo Sapiens
cucagcugcccccacaagucccacaugccccg

SEQ ID NO: 80843 - RNA, 32 nt, Homo Sapiens
aucucccaucugcuuuuccccauugccaugcg

SEQ ID NO: 80844 - RNA, 32 nt, Homo Sapiens
cuggguccucgccacccuaagccccgggacac

SEQ ID NO: 80845 - RNA, 32 nt, Homo Sapiens
ccucuccaugccuggccggcccggcccaugcc

SEQ ID NO: 80846 - RNA, 32 nt, Homo Sapiens
gcaaccucccugccugauucucuugccucagc

SEQ ID NO: 80847 - RNA, 32 nt, Homo Sapiens
gaugccuugacaaagggguuuaaaccucuuuc

SEQ ID NO: 80848 - RNA, 32 nt, Homo Sapiens
ggcaugucaacacugcccugagcuugcacaaa

SEQ ID NO: 80849 - RNA, 32 nt, Homo Sapiens
ugaacuggcuccuggggccaugaggcugucac

SEQ ID NO: 80850 - RNA, 32 nt, Homo Sapiens
acauuuucaaggacuguccaaaagccagccag

SEQ ID NO: 80851 - RNA, 32 nt, Homo Sapiens
aucaggccgggcgcgguggcucacgucuguaa

SEQ ID NO: 80852 - RNA, 32 nt, Homo Sapiens
gaucaagcuugggucugauuuaacucagcgac

SEQ ID NO: 80853 - RNA, 32 nt, Homo Sapiens
ccggccggccccacacccgcucuuccucuucu

SEQ ID NO: 80854 - RNA, 32 nt, Homo Sapiens
auugcuuugucaagaagggaaacauuuaccuu

SEQ ID NO: 80855 - RNA, 32 nt, Homo Sapiens
aaggcaucuauuauauauuaugaauuaacuuc

SEQ ID NO: 80856 - RNA, 32 nt, Homo Sapiens
gcagccuaugccugcugcucagagcacggugg

SEQ ID NO: 80857 - RNA, 30 nt, Homo Sapiens
agugggagaggcggcggcggcggccgagga

SEQ ID NO: 80858 - RNA, 32 nt, Homo Sapiens
agcacuccucaaugaaagacagaccuaaugac

SEQ ID NO: 80859 - RNA, 32 nt, Homo Sapiens
agacuuccuucccuccucccaaaaugccucca

SEQ ID NO: 80860 - RNA, 32 nt, Homo Sapiens
cagaauaccuugugcuuccugaaacagcauau

SEQ ID NO: 80861 - RNA, 32 nt, Homo Sapiens
gagacaaaagcuacaagaaguccccagcagca

SEQ ID NO: 80862 - RNA, 32 nt, Homo Sapiens
gccaucuccacucuccuucuccagaacccccu

SEQ ID NO: 80863 - RNA, 32 nt, Homo Sapiens
cugcuaaauaagacauauaaggacucugaagu

SEQ ID NO: 80864 - RNA, 32 nt, Homo Sapiens
guuuggggcuuuauuuuauaaguuagaacuuu

SEQ ID NO: 80865 - RNA, 32 nt, Homo Sapiens
acccuauuucacaugccuuguuuacuuuucag

SEQ ID NO: 80866 - RNA, 32 nt, Homo Sapiens
cucucucugacacaagcgcacacacacacaca

SEQ ID NO: 80867 - RNA, 32 nt, Homo Sapiens
gugauggcugagaaguccucucuagcugcaga

SEQ ID NO: 80868 - RNA, 32 nt, Homo Sapiens
auuugugccauuguuuggacaauauuaaagcu

SEQ ID NO: 80869 - RNA, 32 nt, Homo Sapiens
aagccguagcggcagcagcagccacagcgaca

SEQ ID NO: 80870 - RNA, 32 nt, Homo Sapiens
aucacuacucguguuaguccauuuucacgcug

SEQ ID NO: 80871 - RNA, 32 nt, Homo Sapiens
caguaaucucuuagugccuaugguggggauga

SEQ ID NO: 80872 - RNA, 32 nt, Homo Sapiens
ucccggguucaagugauucuucugccucagcc

SEQ ID NO: 80873 - RNA, 32 nt, Homo Sapiens
cuguauuuguuguuuccauuaaaggcgacauu

SEQ ID NO: 80874 - RNA, 32 nt, Homo Sapiens
agagaguauuggguagauauuuuuucugaaua

SEQ ID NO: 80875 - RNA, 32 nt, Homo Sapiens
ccuauucaggucuccuuccacaacucugaaga

SEQ ID NO: 80876 - RNA, 30 nt, Homo Sapiens
ggcccgaaccucugcggcggccugcaggga

SEQ ID NO: 80877 - RNA, 32 nt, Homo Sapiens
uuucuuucccccucuuuuuuuuggaugucccc

SEQ ID NO: 80878 - RNA, 32 nt, Homo Sapiens
gcugucaauggcuuggagaacaucucaugggc

SEQ ID NO: 80879 - RNA, 32 nt, Homo Sapiens
auaacauagagaaauacagagaaggacaagaa

SEQ ID NO: 80880 - RNA, 32 nt, Homo Sapiens
ggcugccaacccagcccucauccucccuugcu

SEQ ID NO: 80881 - RNA, 32 nt, Homo Sapiens
agucaaguucccuccugcagccugaccccagg

SEQ ID NO: 80882 - RNA, 32 nt, Homo Sapiens
gacccgaggaagaucggcgugguggugugcuu

SEQ ID NO: 80883 - RNA, 26 nt, Homo Sapiens
gaugaaggacaaacagaagaagaaga

SEQ ID NO: 80884 - RNA, 32 nt, Homo Sapiens
ucaguauaucguugugucucauauucaagcau

SEQ ID NO: 80885 - RNA, 32 nt, Homo Sapiens
ucccuuguaucuauuuguggugaauguguuuu

SEQ ID NO: 80886 - RNA, 32 nt, Homo Sapiens
gugugaaauucccuccucccuccuuccaccuu

SEQ ID NO: 80887 - RNA, 32 nt, Homo Sapiens
agaauuacacuggccuuuguuuuucuggaaau

SEQ ID NO: 80888 - RNA, 32 nt, Homo Sapiens
ccuguugugaggaaauguguucuuuucccgau

SEQ ID NO: 80889 - RNA, 32 nt, Homo Sapiens
agaagcaggcagccaguacccuugccacggua

SEQ ID NO: 80890 - RNA, 32 nt, Homo Sapiens
auaguguuagaugucuaauagcagcguuuuuc

SEQ ID NO: 80891 - RNA, 32 nt, Homo Sapiens
uauaugcagaauaccagcuaaaaaauaggcaa

SEQ ID NO: 80892 - RNA, 32 nt, Homo Sapiens
ucaggcucagccugacucaugcuugacacccc

SEQ ID NO: 80893 - RNA, 32 nt, Homo Sapiens
ggcgacuccgggaggcacagggcgcgcgaggu

SEQ ID NO: 80894 - RNA, 32 nt, Homo Sapiens
auuuacccuucaugaucuuuggcgauucucca

SEQ ID NO: 80895 - RNA, 32 nt, Homo Sapiens
gcccgaaacgcgggaggcgccaugucgcuggu

SEQ ID NO: 80896 - RNA, 32 nt, Homo Sapiens
ggaaagcuugaaaaaugaagacauuagcagga

SEQ ID NO: 80897 - RNA, 32 nt, Homo Sapiens
ugaugcucaauccaagacaugcaucagggcgg

SEQ ID NO: 80898 - RNA, 32 nt, Homo Sapiens
uugcugcagcgucagcgccgccgcccgugccu

SEQ ID NO: 80899 - RNA, 32 nt, Homo Sapiens
auuccuuugaaauaaacuuaugaaauguuuuc

SEQ ID NO: 80900 - RNA, 32 nt, Homo Sapiens
ccugaguucuugccuccuccuuuuggggacac

SEQ ID NO: 80901 - RNA, 32 nt, Homo Sapiens
uaacaccuguagcccacgugcuuugggaggau

SEQ ID NO: 80902 - RNA, 32 nt, Homo Sapiens
uguuaaauauuuuuguacaucgcuucuuuuuc

SEQ ID NO: 80903 - RNA, 30 nt, Homo Sapiens
cugcguugcuggugcucgggcugcugguag

SEQ ID NO: 80904 - RNA, 32 nt, Homo Sapiens
uauuuguucuacaccuucuccccugaggcuug

SEQ ID NO: 80905 - RNA, 32 nt, Homo Sapiens
gggaaucugcaguaggucugccggcgauggag

SEQ ID NO: 80906 - RNA, 32 nt, Homo Sapiens
cacuccccaagcacggaccagccaaggacaaa

SEQ ID NO: 80907 - RNA, 32 nt, Homo Sapiens
cgggcucgacucccacugcugccggccucccg

SEQ ID NO: 80908 - RNA, 32 nt, Homo Sapiens
cuuuuucaucuagagauggcugcgaguggaag

SEQ ID NO: 80909 - RNA, 32 nt, Homo Sapiens
cuguggguuggauuccaggggcacucucuccu

SEQ ID NO: 80910 - RNA, 32 nt, Homo Sapiens
ccccggguggcccauggacagcagcaggggcu

SEQ ID NO: 80911 - RNA, 32 nt, Homo Sapiens
guggcggcucugcccggaccaccgugcacggc

SEQ ID NO: 80912 - RNA, 32 nt, Homo Sapiens
aucagguguuuguuuacauagcugggaaggcu

SEQ ID NO: 80913 - RNA, 32 nt, Homo Sapiens
cuuuugugauaaaauauugauguuguauuuua

SEQ ID NO: 80914 - RNA, 31 nt, Homo Sapiens
aguucuuauugagccaugggaggaagaaaua

SEQ ID NO: 80915 - RNA, 32 nt, Homo Sapiens
gggcggccagccagcccuggggcccauugccc

SEQ ID NO: 80916 - RNA, 32 nt, Homo Sapiens
aaaauccauuuguuuaaauucacaucucaagg

SEQ ID NO: 80917 - RNA, 32 nt, Homo Sapiens
gaaaucauuuccugguuguuuauuuuuuggua

SEQ ID NO: 80918 - RNA, 32 nt, Homo Sapiens
ccggcucugaaucucgaccuuaauuuauuucc

SEQ ID NO: 80919 - RNA, 32 nt, Homo Sapiens
uuuuuuuuuuuuuuuuuuuuuaaccagaguuu

SEQ ID NO: 80920 - RNA, 32 nt, Homo Sapiens
cucuguccaccgagacucuggacuugcucagg

SEQ ID NO: 80921 - RNA, 32 nt, Homo Sapiens
cccagccacaaguucucaauucuuaagagaca

SEQ ID NO: 80922 - RNA, 32 nt, Homo Sapiens
auuguuguuauuuaguuguuuauuuuugacug

SEQ ID NO: 80923 - RNA, 32 nt, Homo Sapiens
accugggagacggagguugcagugagccaaga

SEQ ID NO: 80924 - RNA, 32 nt, Homo Sapiens
uuuccuuuagguuucuuuguuuuguuuuugag

SEQ ID NO: 80925 - RNA, 32 nt, Homo Sapiens
uacagaaugacuaaucuauacugugaugauuu

SEQ ID NO: 80926 - RNA, 32 nt, Homo Sapiens
cgugcguggucucugaucguccaucaccugac

SEQ ID NO: 80927 - RNA, 32 nt, Homo Sapiens
aaguggcaguugcagugaguggagaucgcgcc

SEQ ID NO: 80928 - RNA, 32 nt, Homo Sapiens
uuucccagggacccuccuaggauaggacugcc

SEQ ID NO: 80929 - RNA, 32 nt, Homo Sapiens
acgacagaaggggauuaagagggagggcgggg

SEQ ID NO: 80930 - RNA, 32 nt, Homo Sapiens
cggccacuacccagcccaucucugccugugcu

SEQ ID NO: 80931 - RNA, 32 nt, Homo Sapiens
uguaucuguuacguggauauaugggccagccu

SEQ ID NO: 80932 - RNA, 32 nt, Homo Sapiens
cacugacccagcuucuggguauggaaauaacc

SEQ ID NO: 80933 - RNA, 32 nt, Homo Sapiens
uaaaacacagaaaagugauuaaugaaugauaa

SEQ ID NO: 80934 - RNA, 32 nt, Homo Sapiens
auuaugcuauacuauaaccagcccuuaauauu

SEQ ID NO: 80935 - RNA, 32 nt, Homo Sapiens
cuggccaggaaugauggaugaacucuccgagu

SEQ ID NO: 80936 - RNA, 30 nt, Homo Sapiens
ggcccgucggcggaaaacgcagcggagcca

SEQ ID NO: 80937 - RNA, 32 nt, Homo Sapiens
uuugcucccccauuuuaacuugccacauccca

SEQ ID NO: 80938 - RNA, 32 nt, Homo Sapiens
cggaucccaagcccugcauuguaagcccacag

SEQ ID NO: 80939 - RNA, 32 nt, Homo Sapiens
aacauuucuaaaccagaggacaaaagggguua

SEQ ID NO: 80940 - RNA, 32 nt, Homo Sapiens
aggacguuagcaugcauaucgaguuugcccuu

SEQ ID NO: 80941 - RNA, 32 nt, Homo Sapiens
cuaaucccaaccccaaccccaugggaggagga

SEQ ID NO: 80942 - RNA, 32 nt, Homo Sapiens
agaaaagugacugggacgaugcuuccucucau

SEQ ID NO: 80943 - RNA, 31 nt, Homo Sapiens
acuguggacgcucgacuuccaagggucuucu

SEQ ID NO: 80944 - RNA, 32 nt, Homo Sapiens
uuguguauaauggaaaguuauuuacaauauaa

SEQ ID NO: 80945 - RNA, 29 nt, Homo Sapiens
acauagugcuguuuauauaguuuaggggu

SEQ ID NO: 80946 - RNA, 32 nt, Homo Sapiens
aaguaggcaccgugagugcagcgcggggucuc

SEQ ID NO: 80947 - RNA, 32 nt, Homo Sapiens
agcagcaaggagacagaagagaaggaggaggg

SEQ ID NO: 80948 - RNA, 32 nt, Homo Sapiens
guucuuucucucugaucccuggaagaaaaccc

SEQ ID NO: 80949 - RNA, 32 nt, Homo Sapiens
cccgggagcuccaggcucggccccgccccacc

SEQ ID NO: 80950 - RNA, 32 nt, Homo Sapiens
agccagcaguucuuucucccaguguccgaccu

SEQ ID NO: 80951 - RNA, 32 nt, Homo Sapiens
auuggaccagauuuauacaugcaccaaggauc

SEQ ID NO: 80952 - RNA, 32 nt, Homo Sapiens
ggaaguaaugaaaaauccaguguucaguguag

SEQ ID NO: 80953 - RNA, 32 nt, Homo Sapiens
aacugcaucuucucugaccccugguaccagac

SEQ ID NO: 80954 - RNA, 32 nt, Homo Sapiens
uuguuccuauuauuuuauuguuuuuauucuau

SEQ ID NO: 80955 - RNA, 32 nt, Homo Sapiens
ccaucccaccuucccgcacccugggaccgguc

SEQ ID NO: 80956 - RNA, 32 nt, Homo Sapiens
cuuugcaaagacccgggagcuggcggggaacc

SEQ ID NO: 80957 - RNA, 32 nt, Homo Sapiens
uguucucgugggccggccccaggcccuuugcg

SEQ ID NO: 80958 - RNA, 32 nt, Homo Sapiens
uccggagugaaggggacgacaauagucaccac

SEQ ID NO: 80959 - RNA, 25 nt, Homo Sapiens
gugugaaauaaaccucucugauggc

SEQ ID NO: 80960 - RNA, 32 nt, Homo Sapiens
acaaggucuggagaccccggguggcggacggg

SEQ ID NO: 80961 - RNA, 32 nt, Homo Sapiens
cggcuuuccuggauaucaggacuuccaauaaa

SEQ ID NO: 80962 - RNA, 32 nt, Homo Sapiens
cuugcuggaacccaucagacaccuggucccca

SEQ ID NO: 80963 - RNA, 32 nt, Homo Sapiens
gucggcggcguggggcagcuguagcagcguug

SEQ ID NO: 80964 - RNA, 32 nt, Homo Sapiens
gggcgguggaccccgccucccccggcacagcc

SEQ ID NO: 80965 - RNA, 32 nt, Homo Sapiens
cggagauccuagagacgcgaaaagcaggaggg

SEQ ID NO: 80966 - RNA, 32 nt, Homo Sapiens
aauuauuuuaucaugcuguugcuggggaauau

SEQ ID NO: 80967 - RNA, 32 nt, Homo Sapiens
gcccugagccccacagcaagucugccaugggc

SEQ ID NO: 80968 - RNA, 32 nt, Homo Sapiens
caagggaggggggcccggggccuggggcguca

SEQ ID NO: 80969 - RNA, 32 nt, Homo Sapiens
agcaguguguggaagagcagccuuccuuuguc

SEQ ID NO: 80970 - RNA, 32 nt, Homo Sapiens
cuggaggagucucagcuggaugaugagaaggg

SEQ ID NO: 80971 - RNA, 32 nt, Homo Sapiens
ugcacuccuuuaccacagaggcacauaaucau

SEQ ID NO: 80972 - RNA, 32 nt, Homo Sapiens
ugcgcggcugcgcuuuccuguccccaagccgu

SEQ ID NO: 80973 - RNA, 32 nt, Homo Sapiens
uauaguucuuuuggcuaacaaaucauuuugga

SEQ ID NO: 80974 - RNA, 32 nt, Homo Sapiens
cuggucaaccucauuccagaauggcacaguca

SEQ ID NO: 80975 - RNA, 32 nt, Homo Sapiens
uaaaagggaaagggcauugcaagugcauagag

SEQ ID NO: 80976 - RNA, 32 nt, Homo Sapiens
guuuuuuaaggaucuccucucacagugguaau

SEQ ID NO: 80977 - RNA, 32 nt, Homo Sapiens
ggccacuccuaaugugggccugcccucccuuu

SEQ ID NO: 80978 - RNA, 32 nt, Homo Sapiens
ccccauggugcuuuggccuccucaaagcaucc

SEQ ID NO: 80979 - RNA, 32 nt, Homo Sapiens
uggacacugucaauguucauaacuuaaaccug

SEQ ID NO: 80980 - RNA, 32 nt, Homo Sapiens
augggagcugugaggagccugaucccaaguug

SEQ ID NO: 80981 - RNA, 32 nt, Homo Sapiens
ccgggccuuaacuuuuugcgcucguuuugcua

SEQ ID NO: 80982 - RNA, 32 nt, Homo Sapiens
uccauaaagcugccucccggggacaaguccgg

SEQ ID NO: 80983 - RNA, 32 nt, Homo Sapiens
auaucuuagugucugagguugacuguggguaa

SEQ ID NO: 80984 - RNA, 32 nt, Homo Sapiens
ccgccucacccuggcuucugugcuacuuggca

SEQ ID NO: 80985 - RNA, 32 nt, Homo Sapiens
uacucuuuugaaaaauaaagguaucuaauguc

SEQ ID NO: 80986 - RNA, 32 nt, Homo Sapiens
ugaccucagaucuuugcaccagauacucauca

SEQ ID NO: 80987 - RNA, 32 nt, Homo Sapiens
cagcagcugcugccuccacaguguggcccugc

SEQ ID NO: 80988 - RNA, 32 nt, Homo Sapiens
augaagcaggacuugauguggauugucauaaa

SEQ ID NO: 80989 - RNA, 32 nt, Homo Sapiens
ggucaagacaauuuaauuuauuuacaugcugu

SEQ ID NO: 80990 - RNA, 32 nt, Homo Sapiens
aggaagaaacaagaacaagaaaaaagauuaua

SEQ ID NO: 80991 - RNA, 32 nt, Homo Sapiens
caaugacugacucgucccuuuggaccauagac

SEQ ID NO: 80992 - RNA, 32 nt, Homo Sapiens
gcgaacgcggccuccgggggcgcacggcagcu

SEQ ID NO: 80993 - RNA, 32 nt, Homo Sapiens
acaccgaagucuuuuuuuuuuucucuccgauc

SEQ ID NO: 80994 - RNA, 32 nt, Homo Sapiens
uugaggcuccuuuuuucuuuccuuugcaccag

SEQ ID NO: 80995 - RNA, 32 nt, Homo Sapiens
aauuaacaagguucuguguuuuucucaccuca

SEQ ID NO: 80996 - RNA, 32 nt, Homo Sapiens
cgcgcagcgggccggcaguggcggcggagaug

SEQ ID NO: 80997 - RNA, 32 nt, Homo Sapiens
cauggcaccucgcacaaguagcgccgccaaag

SEQ ID NO: 80998 - RNA, 32 nt, Homo Sapiens
uggcaggggaggaggacugacacggaggcaca

SEQ ID NO: 80999 - RNA, 32 nt, Homo Sapiens
ucugguaggaucagguugacauaucguuuauu

SEQ ID NO: 81000 - RNA, 32 nt, Homo Sapiens
cuagcaucagaaggguucauggcccuuucccc

SEQ ID NO: 81001 - RNA, 32 nt, Homo Sapiens
cacacacacacacacacacacacacacacgaa

SEQ ID NO: 81002 - RNA, 32 nt, Homo Sapiens
cguguuauuucugauaagaauuuaauugcauu

SEQ ID NO: 81003 - RNA, 32 nt, Homo Sapiens
ggcuggcgguggagcugcgggcggccagggcc

SEQ ID NO: 81004 - RNA, 32 nt, Homo Sapiens
cauuuaauauauuauuuuguuuuauaaccacu

SEQ ID NO: 81005 - RNA, 32 nt, Homo Sapiens
uuaaugugauccccauacugcaacugugaugc

SEQ ID NO: 81006 - RNA, 32 nt, Homo Sapiens
cugggcuuggaagcuucccugaggucgacgcu

SEQ ID NO: 81007 - RNA, 32 nt, Homo Sapiens
cggggcacccccagcgcagagcccuccaccag

SEQ ID NO: 81008 - RNA, 32 nt, Homo Sapiens
uccccuugcagggcagacagugccuggcacug

SEQ ID NO: 81009 - RNA, 32 nt, Homo Sapiens
accuggagcaccugcucagguaccucaagaac

SEQ ID NO: 81010 - RNA, 32 nt, Homo Sapiens
aaagugucacgacugcucuaugcauauuggau

SEQ ID NO: 81011 - RNA, 32 nt, Homo Sapiens
auuccaggugguuuuuagucuuuacugaugaa

SEQ ID NO: 81012 - RNA, 32 nt, Homo Sapiens
ugugugauggggcggcagccccgggccucugc

SEQ ID NO: 81013 - RNA, 32 nt, Homo Sapiens
ggagaacaagaaugcuacuguauuuuacaucu

SEQ ID NO: 81014 - RNA, 32 nt, Homo Sapiens
gauaagaaaauauuuauaaaacagacccccua

SEQ ID NO: 81015 - RNA, 32 nt, Homo Sapiens
acacagaaauuugauuuguggccaaauuggau

SEQ ID NO: 81016 - RNA, 32 nt, Homo Sapiens
gagaaucucguuaguagcauguggccuaacaa

SEQ ID NO: 81017 - RNA, 32 nt, Homo Sapiens
gaaugagccaucuugugaucaucuggcaagac

SEQ ID NO: 81018 - RNA, 32 nt, Homo Sapiens
cuccucaccuggacagucuccuggacaaggag

SEQ ID NO: 81019 - RNA, 32 nt, Homo Sapiens
cuuugaaauaacuuguuuuguuugucaaauuc

SEQ ID NO: 81020 - RNA, 32 nt, Homo Sapiens
cgcgcagccauacaacuuuagagcuggccuug

SEQ ID NO: 81021 - RNA, 32 nt, Homo Sapiens
ggagaagcccgaugccccaucccggcuuuccc

SEQ ID NO: 81022 - RNA, 32 nt, Homo Sapiens
uguucaaaguauuguagaaggaauauuguacu

SEQ ID NO: 81023 - RNA, 32 nt, Homo Sapiens
ggcgcccgaccccagccaccgcccugcggcca

SEQ ID NO: 81024 - RNA, 31 nt, Homo Sapiens
auuuguaugugaauuaaagugcucuuauuuu

SEQ ID NO: 81025 - RNA, 32 nt, Homo Sapiens
agccacccgcgugcggcacgcgccggccgccu

SEQ ID NO: 81026 - RNA, 32 nt, Homo Sapiens
gugugccgugcggcugccggaguucggggaag

SEQ ID NO: 81027 - RNA, 32 nt, Homo Sapiens
uguaugcauuucucccuuuuaagggagauuac

SEQ ID NO: 81028 - RNA, 32 nt, Homo Sapiens
gauuauucaaccaggauaccuaauucaagaac

SEQ ID NO: 81029 - RNA, 32 nt, Homo Sapiens
acagcgugccggaaccggcagcucucaccuuu

SEQ ID NO: 81030 - RNA, 32 nt, Homo Sapiens
aaggggcggguugguguguuuccccuugugua

SEQ ID NO: 81031 - RNA, 32 nt, Homo Sapiens
cgaggagucugagccgggcgcgggcgccuucc

SEQ ID NO: 81032 - RNA, 32 nt, Homo Sapiens
uauguaaauauuuauauauagauauauguagc

SEQ ID NO: 81033 - RNA, 31 nt, Homo Sapiens
cggccgcagcgcagggaagccugggggccag

SEQ ID NO: 81034 - RNA, 32 nt, Homo Sapiens
uuucuaauugcaucuccaugggcugugagacu

SEQ ID NO: 81035 - RNA, 32 nt, Homo Sapiens
uucuguuucaccgugcguggacacugcuaggc

SEQ ID NO: 81036 - RNA, 32 nt, Homo Sapiens
ccccccucugucaucaucgcccugcuccaagc

SEQ ID NO: 81037 - RNA, 32 nt, Homo Sapiens
uaaagaugaaauguguaaaaucuuauuaccau

SEQ ID NO: 81038 - RNA, 32 nt, Homo Sapiens
aaucuaaagucuucugguuccauccuguugug

SEQ ID NO: 81039 - RNA, 32 nt, Homo Sapiens
aaauagaugcgguuaagccgcgggggcugcaa

SEQ ID NO: 81040 - RNA, 29 nt, Homo Sapiens
cagaacauguguauguauuauuuggacua

SEQ ID NO: 81041 - RNA, 32 nt, Homo Sapiens
caaccccgcacccgccagcaccgcggcaaugu

SEQ ID NO: 81042 - RNA, 32 nt, Homo Sapiens
uccugugagggaggccgggcccgggcaccuga

SEQ ID NO: 81043 - RNA, 32 nt, Homo Sapiens
gcuaccgaaggccggcggccgcggagcccugc

SEQ ID NO: 81044 - RNA, 32 nt, Homo Sapiens
uugaggggcgcggcucgcagcggcgggugcag

SEQ ID NO: 81045 - RNA, 32 nt, Homo Sapiens
uuucucacauggcaucacugugacacuggccc

SEQ ID NO: 81046 - RNA, 32 nt, Homo Sapiens
uauguagguugcacaagaacuuuuacucacuu

SEQ ID NO: 81047 - RNA, 32 nt, Homo Sapiens
ucuucuguuucauaugcagaaguauucuuuuc

SEQ ID NO: 81048 - RNA, 32 nt, Homo Sapiens
gcccggggaccgagcuugugcuguggggaaac

SEQ ID NO: 81049 - RNA, 32 nt, Homo Sapiens
ucauuucucuccgcuggccccagccgcggggc

SEQ ID NO: 81050 - RNA, 32 nt, Homo Sapiens
uuguggccaggccuuccuuugcuggaggaagg

SEQ ID NO: 81051 - RNA, 32 nt, Homo Sapiens
aacaaaggaggaaguauaaggagaucuagguu

SEQ ID NO: 81052 - RNA, 32 nt, Homo Sapiens
aggguggaaaucaacccucuccugucugcccu

SEQ ID NO: 81053 - RNA, 32 nt, Homo Sapiens
cugugaaacuacugaggccagcugguauuagu

SEQ ID NO: 81054 - RNA, 32 nt, Homo Sapiens
gcgccaggccgcgcggcgccucgagcugccuc

SEQ ID NO: 81055 - RNA, 32 nt, Homo Sapiens
ugccgggccgcggcguggagccgggcaggagc

SEQ ID NO: 81056 - RNA, 32 nt, Homo Sapiens
aguagccgggcguggugcugcccgucaauaau

SEQ ID NO: 81057 - RNA, 32 nt, Homo Sapiens
agaaagcaugcacaacuuugugaaagaggccc

SEQ ID NO: 81058 - RNA, 32 nt, Homo Sapiens
uuauuacuaauagaucuaugcuucaguaucua

SEQ ID NO: 81059 - RNA, 32 nt, Homo Sapiens
gaggugacaccugugguaaucuguacugauag

SEQ ID NO: 81060 - RNA, 32 nt, Homo Sapiens
ggccccuguuuccucaucuaccaaaugagaau

SEQ ID NO: 81061 - RNA, 32 nt, Homo Sapiens
aguacagaaauucauuaugcugcuaauuuaac

SEQ ID NO: 81062 - RNA, 30 nt, Homo Sapiens
cacaucugcacaaugggggugaccaucccu

SEQ ID NO: 81063 - RNA, 32 nt, Homo Sapiens
aucuguaaaaccacaagaaaguacuuuauaaa

SEQ ID NO: 81064 - RNA, 32 nt, Homo Sapiens
aaacauuguauauauuuaugguauacaacaua

SEQ ID NO: 81065 - RNA, 32 nt, Homo Sapiens
gaccuccaccccggcucccaauaaaauuuaac

SEQ ID NO: 81066 - RNA, 32 nt, Homo Sapiens
agcaccgaucugcuucggagaaccugauucug

SEQ ID NO: 81067 - RNA, 32 nt, Homo Sapiens
cauccucccagguagucagagugagcuacauc

SEQ ID NO: 81068 - RNA, 32 nt, Homo Sapiens
aguuaaugcucuuagaagaguaccucauaugu

SEQ ID NO: 81069 - RNA, 32 nt, Homo Sapiens
gcccagcagcaccugcacccacuuccagcugc

SEQ ID NO: 81070 - RNA, 32 nt, Homo Sapiens
ggacagggcagcagaacaaggcugucuccuca

SEQ ID NO: 81071 - RNA, 32 nt, Homo Sapiens
auuggcagauauuggaaaaauauuuugugaaa

SEQ ID NO: 81072 - RNA, 32 nt, Homo Sapiens
uuuuuacaaaaauuaacagaacagugugauag

SEQ ID NO: 81073 - RNA, 32 nt, Homo Sapiens
gaguauuuuuccauuauguauucauaauaaug

SEQ ID NO: 81074 - RNA, 32 nt, Homo Sapiens
uggggucacagcaauuuauggcuacuauuccc

SEQ ID NO: 81075 - RNA, 32 nt, Homo Sapiens
uggcucuggcagcggcagcuacauccagcuuc

SEQ ID NO: 81076 - RNA, 32 nt, Homo Sapiens
uuacauauuugagagaaaauauuucuauuaau

SEQ ID NO: 81077 - RNA, 32 nt, Homo Sapiens
aaauucuaugaaaaguaagugauuugcaugua

SEQ ID NO: 81078 - RNA, 32 nt, Homo Sapiens
cacaaggccaagggugaaaaccauucacuagg

SEQ ID NO: 81079 - RNA, 32 nt, Homo Sapiens
ucaaguaaguucauuuuuuuuaucugggcuau

SEQ ID NO: 81080 - RNA, 32 nt, Homo Sapiens
ucccacgcggggggcgucccgaccgugggggc

SEQ ID NO: 81081 - RNA, 32 nt, Homo Sapiens
gcguccauuggcggcuucccccggccuccgcg

SEQ ID NO: 81082 - RNA, 32 nt, Homo Sapiens
cgcgcuccacagagccaguuggagccaggaac

SEQ ID NO: 81083 - RNA, 32 nt, Homo Sapiens
gggaaugccccucccaggaguuuaugggagaa

SEQ ID NO: 81084 - RNA, 32 nt, Homo Sapiens
ucaucaguguaugacuugauaucacauaacgu

SEQ ID NO: 81085 - RNA, 31 nt, Homo Sapiens
cuccugaaccacugaaaguccguuccccguc

SEQ ID NO: 81086 - RNA, 32 nt, Homo Sapiens
cuuucucaaugagauaauuucugcaaggagcu

SEQ ID NO: 81087 - RNA, 32 nt, Homo Sapiens
uagggcggggacccggacagccaggugacuac

SEQ ID NO: 81088 - RNA, 32 nt, Homo Sapiens
uuaacagguccucccuccagcuucccucaugg

SEQ ID NO: 81089 - RNA, 32 nt, Homo Sapiens
aguccgugucccuccgccuccaggaggggaca

SEQ ID NO: 81090 - RNA, 32 nt, Homo Sapiens
uauggaaacucaaaugcugccuuaaaaucacu

SEQ ID NO: 81091 - RNA, 32 nt, Homo Sapiens
ggugggagcgcuggcugaacugcuacgggcag

SEQ ID NO: 81092 - RNA, 32 nt, Homo Sapiens
gacaacacugcauacauaauuuugggggccca

SEQ ID NO: 81093 - RNA, 32 nt, Homo Sapiens
uugcuguggccccucucacgccgccaucucuc

SEQ ID NO: 81094 - RNA, 32 nt, Homo Sapiens
cggggcuggaggugcagacggugucugaccgg

SEQ ID NO: 81095 - RNA, 32 nt, Homo Sapiens
agaggaaggaucagagggucgcggccggaggg

SEQ ID NO: 81096 - RNA, 32 nt, Homo Sapiens
aaucucuuccauaagguauuuauuuuuuaauc

SEQ ID NO: 81097 - RNA, 32 nt, Homo Sapiens
uuccuaagaaugcaaacugccuuuuccacaca

SEQ ID NO: 81098 - RNA, 32 nt, Homo Sapiens
ccagcccuucccuccuucucacugcgugucgu

SEQ ID NO: 81099 - RNA, 32 nt, Homo Sapiens
uggaaucauaaaauauacagaaaugguauaua

SEQ ID NO: 81100 - RNA, 32 nt, Homo Sapiens
gaucccgagcgcggggaggcagaccgacugug

SEQ ID NO: 81101 - RNA, 29 nt, Homo Sapiens
gggaaggggagacagaggaugagcggcgu

SEQ ID NO: 81102 - RNA, 32 nt, Homo Sapiens
cugccugggcuuugugccacccucucccuugc

SEQ ID NO: 81103 - RNA, 32 nt, Homo Sapiens
cccgcccgcucccgcggggacccgcacuggag

SEQ ID NO: 81104 - RNA, 32 nt, Homo Sapiens
cuauacaacaucuauuugcugaguggaaggug

SEQ ID NO: 81105 - RNA, 32 nt, Homo Sapiens
uugaaugauagaugaaguauugcugaagccaa

SEQ ID NO: 81106 - RNA, 32 nt, Homo Sapiens
ucuguacauuuuuucuuuaucaaggagauaua

SEQ ID NO: 81107 - RNA, 32 nt, Homo Sapiens
uuuaauaauauuaaaucuuagcacucaagagu

SEQ ID NO: 81108 - RNA, 32 nt, Homo Sapiens
cuaguucucauucuuucaauuguuaugcacca

SEQ ID NO: 81109 - RNA, 32 nt, Homo Sapiens
uagaacaaugguuuuuaaaagacuuaagugga

SEQ ID NO: 81110 - RNA, 32 nt, Homo Sapiens
acuugaaucaccauuacuuugccucgcuggca

SEQ ID NO: 81111 - RNA, 32 nt, Homo Sapiens
gcaguuguaaaaauugucauguuguaauucau

SEQ ID NO: 81112 - RNA, 32 nt, Homo Sapiens
guuccacucucggcccggauccaggccuccgg

SEQ ID NO: 81113 - RNA, 32 nt, Homo Sapiens
gugucuggaguuucuuccuucugguggguucg

SEQ ID NO: 81114 - RNA, 32 nt, Homo Sapiens
gcuacccagccagauuuuguguguguaauggg

SEQ ID NO: 81115 - RNA, 32 nt, Homo Sapiens
uucgacauauuuucuguaaauugcuuuuuucg

SEQ ID NO: 81116 - RNA, 32 nt, Homo Sapiens
augauagugguggaguuaaucuuaucaagagu

SEQ ID NO: 81117 - RNA, 32 nt, Homo Sapiens
ggggagcgcgucgccucagccgcucgaaagca

SEQ ID NO: 81118 - RNA, 32 nt, Homo Sapiens
uggaauuuuccacauaauauuuuuggaccaag

SEQ ID NO: 81119 - RNA, 32 nt, Homo Sapiens
ccauacuguguguuuguuuguuuaauuuacuu

SEQ ID NO: 81120 - RNA, 32 nt, Homo Sapiens
uauuuuagcuuuaauugugcugucguucauga

SEQ ID NO: 81121 - RNA, 32 nt, Homo Sapiens
ugggcuaaacauuguugccguuucauacuucu

SEQ ID NO: 81122 - RNA, 32 nt, Homo Sapiens
ggaggagcuggguguggggugcguugggcugg

SEQ ID NO: 81123 - RNA, 32 nt, Homo Sapiens
accggccaggcgggcugcaggcaccucagagc

SEQ ID NO: 81124 - RNA, 32 nt, Homo Sapiens
ggggcaggggagaagaccacccaccugcugcu

SEQ ID NO: 81125 - RNA, 32 nt, Homo Sapiens
cucauugauaaggaauguggauguuugguuuc

SEQ ID NO: 81126 - RNA, 32 nt, Homo Sapiens
ugauuuggacagccauuuuuccaauuguggaa

SEQ ID NO: 81127 - RNA, 32 nt, Homo Sapiens
aucagauggaacaaucugaaugugauaugcuc

SEQ ID NO: 81128 - RNA, 32 nt, Homo Sapiens
uuuaaaaugugauuuuuguauauacuuguaua

SEQ ID NO: 81129 - RNA, 32 nt, Homo Sapiens
ccggcgucggccgagaucccucugggcaguuc

SEQ ID NO: 81130 - RNA, 32 nt, Homo Sapiens
gcugucgcggagccggaacagcagcggugaag

SEQ ID NO: 81131 - RNA, 32 nt, Homo Sapiens
gcuuaaagcccauuuucauuucuaaucuaaau

SEQ ID NO: 81132 - RNA, 32 nt, Homo Sapiens
ugaucuugacagagcccugccggcggacacgg

SEQ ID NO: 81133 - RNA, 32 nt, Homo Sapiens
gaauguucaauguuuuaaauggcgauuaaaau

SEQ ID NO: 81134 - RNA, 32 nt, Homo Sapiens
uugacgucaggaguucgagaccagccuggcca

SEQ ID NO: 81135 - RNA, 32 nt, Homo Sapiens
uugaggucaggaguucgagagcagccuggcca

SEQ ID NO: 81136 - RNA, 32 nt, Homo Sapiens
guccuguccugccuguggagggaagcaaaccu

SEQ ID NO: 81137 - RNA, 32 nt, Homo Sapiens
gaaaaaucccggugcuugguguccuugcauga

SEQ ID NO: 81138 - RNA, 32 nt, Homo Sapiens
uuuuguuuuuaaagccucaguaguuucuagau

SEQ ID NO: 81139 - RNA, 32 nt, Homo Sapiens
uaaauuuacaauuguuauguccucuugaugaa

SEQ ID NO: 81140 - RNA, 32 nt, Homo Sapiens
acccccaggaggaggauuccuggggcuggugu

SEQ ID NO: 81141 - RNA, 32 nt, Homo Sapiens
ugcccaaguugaaacaggggcccaucaucaug

SEQ ID NO: 81142 - RNA, 32 nt, Homo Sapiens
auuguaaaauuaaccauugagugucaaaguuc

SEQ ID NO: 81143 - RNA, 32 nt, Homo Sapiens
ccaaaaaauaacuucacacuuuuguauggcgu

SEQ ID NO: 81144 - RNA, 32 nt, Homo Sapiens
guuucuuuuuaacuauauaaaaaacaaaaggg

SEQ ID NO: 81145 - RNA, 32 nt, Homo Sapiens
acagccagcuccggagucuguccuuggcuuag

SEQ ID NO: 81146 - RNA, 32 nt, Homo Sapiens
uuaugcuugaguuguuaugugccauauuugcu

SEQ ID NO: 81147 - RNA, 32 nt, Homo Sapiens
uuuuguguggucagugggaggggguggaacug

SEQ ID NO: 81148 - RNA, 32 nt, Homo Sapiens
gaagauggagcagucgccguccacgccaccgc

SEQ ID NO: 81149 - RNA, 32 nt, Homo Sapiens
aaguuggauagucuuuccaauugacucaauuc

SEQ ID NO: 81150 - RNA, 32 nt, Homo Sapiens
guauaaaacccgauuguaugcuccaucuacug

SEQ ID NO: 81151 - RNA, 32 nt, Homo Sapiens
ccugggcugggcggccggagcuucccucccgg

SEQ ID NO: 81152 - RNA, 32 nt, Homo Sapiens
agccacugugcccagccuuguuugcuuuuuua

SEQ ID NO: 81153 - RNA, 32 nt, Homo Sapiens
agggcaccgugcucauguggcuccaaggacaa

SEQ ID NO: 81154 - RNA, 32 nt, Homo Sapiens
guuggagggccggggggugcugguggucaggc

SEQ ID NO: 81155 - RNA, 32 nt, Homo Sapiens
ccaaaggguacaauauuuacaauauuugaauu

SEQ ID NO: 81156 - RNA, 32 nt, Homo Sapiens
cucaccggccccagcugaccucguccauucag

SEQ ID NO: 81157 - RNA, 32 nt, Homo Sapiens
agaggucacgggggcuaauugcuggcuggcug

SEQ ID NO: 81158 - RNA, 32 nt, Homo Sapiens
ucggaggagagccccacccgcggaggaaccca

SEQ ID NO: 81159 - RNA, 32 nt, Homo Sapiens
aaaauuaaaaauuaaaaaaaauaacaaaguug

SEQ ID NO: 81160 - RNA, 32 nt, Homo Sapiens
auaauaaccacgauuccaacccaggucugcuu

SEQ ID NO: 81161 - RNA, 32 nt, Homo Sapiens
accaaaccugccggcaccuugcugugagauuu

SEQ ID NO: 81162 - RNA, 32 nt, Homo Sapiens
aacacuucuaaaaaguuguaacucuugagaca

SEQ ID NO: 81163 - RNA, 32 nt, Homo Sapiens
aauugauugccagaaauugcaagauguaauau

SEQ ID NO: 81164 - RNA, 32 nt, Homo Sapiens
caucagcuacauuuuuaaugaauggaucccuu

SEQ ID NO: 81165 - RNA, 32 nt, Homo Sapiens
aggagaaaauuugaagcuagcaguguucauga

SEQ ID NO: 81166 - RNA, 32 nt, Homo Sapiens
cugcggccuccucuccucuccuaaccucgcuc

SEQ ID NO: 81167 - RNA, 28 nt, Homo Sapiens
ggaguuuggcggccgcuucgagcugcuu

SEQ ID NO: 81168 - RNA, 32 nt, Homo Sapiens
gaagcccucuacagccugacuuucucuccagc

SEQ ID NO: 81169 - RNA, 32 nt, Homo Sapiens
auuuccucgccuaugauguccuugaccuccac

SEQ ID NO: 81170 - RNA, 32 nt, Homo Sapiens
cuaucuuuugcuguagucacuucugccagaga

SEQ ID NO: 81171 - RNA, 32 nt, Homo Sapiens
ggaggaggcauggcccggcagccuuaucguuu

SEQ ID NO: 81172 - RNA, 32 nt, Homo Sapiens
cagucauugucuauuccuggaacuuaccaaga

SEQ ID NO: 81173 - RNA, 32 nt, Homo Sapiens
gaaaaaacuguagaauagauauuuuuaaggcu

SEQ ID NO: 81174 - RNA, 32 nt, Homo Sapiens
auagggcagggccaaguauauaucccuuggug

SEQ ID NO: 81175 - RNA, 32 nt, Homo Sapiens
cugcagccccucuucucuuccuccccagguug

SEQ ID NO: 81176 - RNA, 32 nt, Homo Sapiens
ccgacgcguggaguagcggggagagcgggaag

SEQ ID NO: 81177 - RNA, 32 nt, Homo Sapiens
gacuacgagaaugccaacaaggcgcuggacaa

SEQ ID NO: 81178 - RNA, 32 nt, Homo Sapiens
gugggggcaggaagggcggggcaagccgaggc

SEQ ID NO: 81179 - RNA, 32 nt, Homo Sapiens
ugugaucacagcaguuauaaugcuauuuguac

SEQ ID NO: 81180 - RNA, 32 nt, Homo Sapiens
uaaacuuggugcccaacuauuacggggucugg

SEQ ID NO: 81181 - RNA, 32 nt, Homo Sapiens
ucacuguauuuuuuauuuaauggauuauggau

SEQ ID NO: 81182 - RNA, 32 nt, Homo Sapiens
cuggcgcccagcggggucauggugcccggcgc

SEQ ID NO: 81183 - RNA, 29 nt, Homo Sapiens
gggcguugggaacagaggacacuccaggc

SEQ ID NO: 81184 - RNA, 32 nt, Homo Sapiens
ccagcccaggccggcucuggccuccugaccca

SEQ ID NO: 81185 - RNA, 32 nt, Homo Sapiens
aagaguuaggugucucauagucacucauagug

SEQ ID NO: 81186 - RNA, 32 nt, Homo Sapiens
acaucaaaugcucugaugugcuauagauuuuc

SEQ ID NO: 81187 - RNA, 32 nt, Homo Sapiens
aucaacuuuaucagucuuuuuauuuuaugauu

SEQ ID NO: 81188 - RNA, 32 nt, Homo Sapiens
ccucagcagugcagccccggcgcggagcaggg

SEQ ID NO: 81189 - RNA, 32 nt, Homo Sapiens
acgcgccgugcagcggcugaguggcggcggcg

SEQ ID NO: 81190 - RNA, 32 nt, Homo Sapiens
uuucucccugucaccgucauccaccaccugug

SEQ ID NO: 81191 - RNA, 28 nt, Homo Sapiens
cuggcgguggcuacggcgacgggagccg

SEQ ID NO: 81192 - RNA, 32 nt, Homo Sapiens
gggaggacgcuccuucccuccccuccuagagg

SEQ ID NO: 81193 - RNA, 32 nt, Homo Sapiens
ucggaguggccauggugcugcugcugcuggug

SEQ ID NO: 81194 - RNA, 32 nt, Homo Sapiens
caugcacaaaaauaaacuaugguaauuaaugc

SEQ ID NO: 81195 - RNA, 32 nt, Homo Sapiens
cuuaggagggugcuaggcugcagacugccuug

SEQ ID NO: 81196 - RNA, 32 nt, Homo Sapiens
uucaauguauuaauguagcugauaaaauaguu

SEQ ID NO: 81197 - RNA, 32 nt, Homo Sapiens
uuccgccuggaaaaauuuucccucucccugcu

SEQ ID NO: 81198 - RNA, 32 nt, Homo Sapiens
ccgucggcgggugucgagggcggguugccucg

SEQ ID NO: 81199 - RNA, 32 nt, Homo Sapiens
auuuauuucacuuuuaauuugcugguguuuua

SEQ ID NO: 81200 - RNA, 32 nt, Homo Sapiens
gugcagaagucuuuuuaucucuauauacauau

SEQ ID NO: 81201 - RNA, 32 nt, Homo Sapiens
ugcuuaauuuuuuaagagcaagagggguagag

SEQ ID NO: 81202 - RNA, 32 nt, Homo Sapiens
ccacugcucccggcccuauuauccauaguucu

SEQ ID NO: 81203 - RNA, 32 nt, Homo Sapiens
uggcugauuuuuuuuucuuuuuuuuuuuuuuu

SEQ ID NO: 81204 - RNA, 32 nt, Homo Sapiens
uuaaaauguuuuuuaaacaaaaauauuguccg

SEQ ID NO: 81205 - RNA, 32 nt, Homo Sapiens
uaugguggggacgguuuggccacucucugguu

SEQ ID NO: 81206 - RNA, 32 nt, Homo Sapiens
cccgcaaguguucaccacgaggagggcagcag

SEQ ID NO: 81207 - RNA, 32 nt, Homo Sapiens
ccguucccgcggcccaccaccucugcccugag

SEQ ID NO: 81208 - RNA, 32 nt, Homo Sapiens
uggaaauggcugccagaugugcuguggcuguu

SEQ ID NO: 81209 - RNA, 32 nt, Homo Sapiens
cuucacuguauauaaacauauuuuuauacuuu

SEQ ID NO: 81210 - RNA, 32 nt, Homo Sapiens
gagagcagcuggaggacagcugagcuuccacu

SEQ ID NO: 81211 - RNA, 32 nt, Homo Sapiens
uuggcagcagucuacaggcauaacuuguuuua

SEQ ID NO: 81212 - RNA, 32 nt, Homo Sapiens
ucuacauugucuaucccuguuuuuauaugucu

SEQ ID NO: 81213 - RNA, 32 nt, Homo Sapiens
cccugugauuggcgccugcgccggcggaccgu

SEQ ID NO: 81214 - RNA, 32 nt, Homo Sapiens
aaaacaaaaaacaccuuugguuauauggccag

SEQ ID NO: 81215 - RNA, 32 nt, Homo Sapiens
gcacaucugggcggggaggccguggagggacc

SEQ ID NO: 81216 - RNA, 30 nt, Homo Sapiens
cggcgugagcagcagcaccgcgccgucggc

SEQ ID NO: 81217 - RNA, 32 nt, Homo Sapiens
gcugcgggagugggcgggagggagagggggug

SEQ ID NO: 81218 - RNA, 32 nt, Homo Sapiens
cggggccgcgggcgcgcaccgacucaagagcc

SEQ ID NO: 81219 - RNA, 32 nt, Homo Sapiens
cacacgaauauacuuuuuguuuguuuuccuuu

SEQ ID NO: 81220 - RNA, 31 nt, Homo Sapiens
gcccugcagagcgaggcgacggccuccacac

SEQ ID NO: 81221 - RNA, 32 nt, Homo Sapiens
gaggcuuuaugauaauagauucucuuguauaa

SEQ ID NO: 81222 - RNA, 32 nt, Homo Sapiens
uacccuguuaaaauugcuguauuguuaaugaa

SEQ ID NO: 81223 - RNA, 32 nt, Homo Sapiens
acuucaucugucagcugcagucucaggaaucc

SEQ ID NO: 81224 - RNA, 32 nt, Homo Sapiens
auaguaaaaaauaagucaaagcuaccuucccc

SEQ ID NO: 81225 - RNA, 32 nt, Homo Sapiens
guuuuuuccuuccuuuuguuguugaacuuucu

SEQ ID NO: 81226 - RNA, 32 nt, Homo Sapiens
uuuuucuccauauacauauauaaaaaaucaug

SEQ ID NO: 81227 - RNA, 32 nt, Homo Sapiens
caugaccuggagggguugggggugggggacag

SEQ ID NO: 81228 - RNA, 32 nt, Homo Sapiens
uuuuuccauugaaagaaguuggcacucuugcu

SEQ ID NO: 81229 - RNA, 32 nt, Homo Sapiens
uauuauuuucuuuuucuuaagaaaugccagug

SEQ ID NO: 81230 - RNA, 32 nt, Homo Sapiens
acuuccaauccuccuucuauguauuccuuucu

SEQ ID NO: 81231 - RNA, 32 nt, Homo Sapiens
uccaaacaaaacaaaaaucuguguaacuguaa

SEQ ID NO: 81232 - RNA, 32 nt, Homo Sapiens
gagaauuuaugccugagagauuccuugaaaau

SEQ ID NO: 81233 - RNA, 32 nt, Homo Sapiens
ccccuacucccucucggcuccuuguggcccaa

SEQ ID NO: 81234 - RNA, 32 nt, Homo Sapiens
gcagcaaaugaaacaaaaauggccaguuuuaa

SEQ ID NO: 81235 - RNA, 32 nt, Homo Sapiens
uuaacuaaauuaacauugggaaaucuuauauu

SEQ ID NO: 81236 - RNA, 32 nt, Homo Sapiens
cugaagaauuuaaugacuuguuuuacugcugu

SEQ ID NO: 81237 - RNA, 31 nt, Homo Sapiens
gaagcaaauauuuagcuuccaaauaaaguau

SEQ ID NO: 81238 - RNA, 32 nt, Homo Sapiens
uagagagggcggguccccggccucgggagcac

SEQ ID NO: 81239 - RNA, 32 nt, Homo Sapiens
gcugcagccugccugugcuggcugcugggguc

SEQ ID NO: 81240 - RNA, 32 nt, Homo Sapiens
ccuacagucacauauuaccauguuauucgauu

SEQ ID NO: 81241 - RNA, 32 nt, Homo Sapiens
uaaauuaucauacagaguuuuauuuugaguuu

SEQ ID NO: 81242 - RNA, 32 nt, Homo Sapiens
cugcuccgagagaucaaaggacacaaguguua

SEQ ID NO: 81243 - RNA, 31 nt, Homo Sapiens
cuugucuggcggagaaagccagcucccugca

SEQ ID NO: 81244 - RNA, 32 nt, Homo Sapiens
ccccuguggaaagcgguuaaacuuguggaggg

SEQ ID NO: 81245 - RNA, 32 nt, Homo Sapiens
uaaaaaauguacauuuacuguggauucuguuu

SEQ ID NO: 81246 - RNA, 32 nt, Homo Sapiens
aaagaguucuaaaucggcugagcauugacguc

SEQ ID NO: 81247 - RNA, 32 nt, Homo Sapiens
aaucccugucaggacuguggguugccuugcag

SEQ ID NO: 81248 - RNA, 32 nt, Homo Sapiens
ggcuuugaacucuccuacuccugucccagccc

SEQ ID NO: 81249 - RNA, 32 nt, Homo Sapiens
cucucgucuccagccagcaccaagaggauggu

SEQ ID NO: 81250 - RNA, 32 nt, Homo Sapiens
ccugucugccagccagcagccagcucucagcc

SEQ ID NO: 81251 - RNA, 32 nt, Homo Sapiens
guuagauuuuauugccuccauuuuacagauga

SEQ ID NO: 81252 - RNA, 32 nt, Homo Sapiens
cugcuugcagggccacuguccaggcaaaugcc

SEQ ID NO: 81253 - RNA, 32 nt, Homo Sapiens
ccacccugugaaaaaggugccuuuuucuccuu

SEQ ID NO: 81254 - RNA, 32 nt, Homo Sapiens
gcccgacagcggggcucugggcaucccgggug

SEQ ID NO: 81255 - RNA, 32 nt, Homo Sapiens
ccaucugagugucaagcggggauuucgcuguc

SEQ ID NO: 81256 - RNA, 32 nt, Homo Sapiens
ccagcauuaaaauaauaagauuguauaguuug

SEQ ID NO: 81257 - RNA, 32 nt, Homo Sapiens
gcccccagcccacucucaugguccacacugcu

SEQ ID NO: 81258 - RNA, 32 nt, Homo Sapiens
gugucacagaaagugcguggacggauggcccc

SEQ ID NO: 81259 - RNA, 32 nt, Homo Sapiens
agggaaaagcagcagcagcagcagcagcagca

SEQ ID NO: 81260 - RNA, 30 nt, Homo Sapiens
guguaccugcguggcggcggcgggagcagu

SEQ ID NO: 81261 - RNA, 32 nt, Homo Sapiens
ugcucucaaaaauauagccuaagaaaaaguaa

SEQ ID NO: 81262 - RNA, 32 nt, Homo Sapiens
ccagacccaggaaguauaagucauugacaguu

SEQ ID NO: 81263 - RNA, 32 nt, Homo Sapiens
cccauccgucgccuugggacuggccauaaacc

SEQ ID NO: 81264 - RNA, 32 nt, Homo Sapiens
agcccuucgucaugaaugggaucugcagaguu

SEQ ID NO: 81265 - RNA, 32 nt, Homo Sapiens
aacuucgggagugccuuaggccuuaauaggcu

SEQ ID NO: 81266 - RNA, 32 nt, Homo Sapiens
ccgugauggugccacugcacuccagccugggu

SEQ ID NO: 81267 - RNA, 32 nt, Homo Sapiens
gccgcccggcccggacauggcgaccguccggg

SEQ ID NO: 81268 - RNA, 32 nt, Homo Sapiens
gugcccagcuagcugcagagccacccuguguu

SEQ ID NO: 81269 - RNA, 32 nt, Homo Sapiens
auaacccuuucacagcacuugccuguuuuuaa

SEQ ID NO: 81270 - RNA, 32 nt, Homo Sapiens
cuguacaagaaauaaacuuuauuuuucucacu

SEQ ID NO: 81271 - RNA, 32 nt, Homo Sapiens
cguccuccgggcacucccacgaccagugacca

SEQ ID NO: 81272 - RNA, 32 nt, Homo Sapiens
ucgcucugucauggguuccgucucucugugga

SEQ ID NO: 81273 - RNA, 32 nt, Homo Sapiens
ccggacauugaacgccuucauaaaaagccaaa

SEQ ID NO: 81274 - RNA, 32 nt, Homo Sapiens
aaccacaaaaacuugaaaaaucugaaacagag

SEQ ID NO: 81275 - RNA, 32 nt, Homo Sapiens
acugucucuccaugccuagggaagucaaagcc

SEQ ID NO: 81276 - RNA, 32 nt, Homo Sapiens
ucccgugggaggugaucagaucaugggggugg

SEQ ID NO: 81277 - RNA, 32 nt, Homo Sapiens
ucucacucuuuguuucugcaaggucugguugu

SEQ ID NO: 81278 - RNA, 32 nt, Homo Sapiens
gcgagggucggggccaccgcgcggcgaccucg

SEQ ID NO: 81279 - RNA, 32 nt, Homo Sapiens
ccucccugcccgccgcgccgacccuccccagg

SEQ ID NO: 81280 - RNA, 32 nt, Homo Sapiens
guuuguucucccuguuuauuacacagaucagg

SEQ ID NO: 81281 - RNA, 32 nt, Homo Sapiens
uguuccuccaccccaggaccaauauguucagg

SEQ ID NO: 81282 - RNA, 32 nt, Homo Sapiens
uuuguuuggaaauugaacaaaggucaguaaug

SEQ ID NO: 81283 - RNA, 32 nt, Homo Sapiens
aucuguagugucaugggugcugccgcaggcag

SEQ ID NO: 81284 - RNA, 32 nt, Homo Sapiens
acuggccagcccagccccacuacugcccucuc

SEQ ID NO: 81285 - RNA, 32 nt, Homo Sapiens
aaaggacuggugguucucccaguguccgacau

SEQ ID NO: 81286 - RNA, 32 nt, Homo Sapiens
uuacacccuugucccacccccagcagcucacc

SEQ ID NO: 81287 - RNA, 32 nt, Homo Sapiens
uggauucccagggccuauuccacuagaagcaa

SEQ ID NO: 81288 - RNA, 32 nt, Homo Sapiens
cugugcccugguccccuugccgccauguggau

SEQ ID NO: 81289 - RNA, 32 nt, Homo Sapiens
cuuacagguugaaagucuuuuaagggcaucac

SEQ ID NO: 81290 - RNA, 32 nt, Homo Sapiens
gagauguggugagcucuguucuucuaccaacc

SEQ ID NO: 81291 - RNA, 32 nt, Homo Sapiens
gagaagaagauaauaaaagacauucuaaagga

SEQ ID NO: 81292 - RNA, 32 nt, Homo Sapiens
uccaucagaacagcuccaccgggacuuguggg

SEQ ID NO: 81293 - RNA, 32 nt, Homo Sapiens
agacuuuguugaguucuuucugggacuuggag

SEQ ID NO: 81294 - RNA, 32 nt, Homo Sapiens
uguccccgcaugcagaauccucucuuucuucu

SEQ ID NO: 81295 - RNA, 32 nt, Homo Sapiens
aguccuagccccagagccccagccccucaugu

SEQ ID NO: 81296 - RNA, 32 nt, Homo Sapiens
gcacuacugcggugaauggguucacacauggg

SEQ ID NO: 81297 - RNA, 32 nt, Homo Sapiens
ucuuuuguuaaaaauaaaacaaugaguauguu

SEQ ID NO: 81298 - RNA, 32 nt, Homo Sapiens
gaaacaaagugucggccgcccggcgccggcgc

SEQ ID NO: 81299 - RNA, 32 nt, Homo Sapiens
gacagcaccacuauccaucccaauguaacauu

SEQ ID NO: 81300 - RNA, 32 nt, Homo Sapiens
gaccccguggaaagauucagagacugcgcccu

SEQ ID NO: 81301 - RNA, 32 nt, Homo Sapiens
uaaucugaaagccaugcaggggcucugacggg

SEQ ID NO: 81302 - RNA, 32 nt, Homo Sapiens
gcgggaggcuggaagggcuggcagaucgcuuc

SEQ ID NO: 81303 - RNA, 32 nt, Homo Sapiens
uauuuuuauuuuuuauggagauggggucuugc

SEQ ID NO: 81304 - RNA, 32 nt, Homo Sapiens
gagauaccuccccuccuucugcucagcugccu

SEQ ID NO: 81305 - RNA, 32 nt, Homo Sapiens
cagaaaauucuaucugugauagaucuguaaag

SEQ ID NO: 81306 - RNA, 32 nt, Homo Sapiens
uuaugagaauccaaagaaugauguguguaagg

SEQ ID NO: 81307 - RNA, 32 nt, Homo Sapiens
aaccuggaguguggcauuagaauagaacucau

SEQ ID NO: 81308 - RNA, 32 nt, Homo Sapiens
gugccgccagcaugucugacaaacugcccuac

SEQ ID NO: 81309 - RNA, 32 nt, Homo Sapiens
ggacaaggcagagcuggacagauucugugaug

SEQ ID NO: 81310 - RNA, 32 nt, Homo Sapiens
uccggaucucgcucuccaccggaucucacccg

SEQ ID NO: 81311 - RNA, 32 nt, Homo Sapiens
uggaaucguguccauccuuucagucaacucag

SEQ ID NO: 81312 - RNA, 32 nt, Homo Sapiens
ucuuucuuuuuuuuuuuuuuuaaaauggaguc

SEQ ID NO: 81313 - RNA, 32 nt, Homo Sapiens
gaugccugcccggcuguugggguggcggugac

SEQ ID NO: 81314 - RNA, 32 nt, Homo Sapiens
aaggaaucaaaccacagaaaaauacaaaggga

SEQ ID NO: 81315 - RNA, 31 nt, Homo Sapiens
ugguugaacauaucgcuuucccuuuuuccuc

SEQ ID NO: 81316 - RNA, 32 nt, Homo Sapiens
ucugggcagugcaggcggcugccaggcccagc

SEQ ID NO: 81317 - RNA, 32 nt, Homo Sapiens
ccacacaaacuuaguucauaugcuuuuacuug

SEQ ID NO: 81318 - RNA, 32 nt, Homo Sapiens
cccucagcugucuccucccucccucuggaaag

SEQ ID NO: 81319 - RNA, 32 nt, Homo Sapiens
agguucgacugaaucaagcaucugaagacugg

SEQ ID NO: 81320 - RNA, 30 nt, Homo Sapiens
gucaucgccauucuccauucucgauuaacc

SEQ ID NO: 81321 - RNA, 32 nt, Homo Sapiens
auauuaaaauugacugauggaauagaagcucc

SEQ ID NO: 81322 - RNA, 32 nt, Homo Sapiens
ucuucaauacguaaaauuaaauuuauaccacu

SEQ ID NO: 81323 - RNA, 32 nt, Homo Sapiens
aauggaucucagccacuguuggaguggguaaa

SEQ ID NO: 81324 - RNA, 32 nt, Homo Sapiens
gagcaucugcuguuugaggacggggggugggg

SEQ ID NO: 81325 - RNA, 32 nt, Homo Sapiens
cauaccuagcagguaauaaaauuuaaaaaaua

SEQ ID NO: 81326 - RNA, 32 nt, Homo Sapiens
aauccaucacuuuccccaaaauucuugucaua

SEQ ID NO: 81327 - RNA, 32 nt, Homo Sapiens
cgcauaucgcuggggagggacaggccaugagg

SEQ ID NO: 81328 - RNA, 32 nt, Homo Sapiens
ggugggucuggguauaugacugugcagcuguu

SEQ ID NO: 81329 - RNA, 32 nt, Homo Sapiens
gaucuaggcacuuaguuugcuaccacauuguu

SEQ ID NO: 81330 - RNA, 32 nt, Homo Sapiens
ggccuggguuuguucaucuguuuucuacaggg

SEQ ID NO: 81331 - RNA, 32 nt, Homo Sapiens
ccggaaccggccugagcgcccgggaccaugaa

SEQ ID NO: 81332 - RNA, 32 nt, Homo Sapiens
ccugcgcgccgcgccucgagcuguagcgggca

SEQ ID NO: 81333 - RNA, 32 nt, Homo Sapiens
cgcuggagcugccagcagcaccccuuucgcac

SEQ ID NO: 81334 - RNA, 32 nt, Homo Sapiens
gagaacuagugauuauauauuuuucuguauuu

SEQ ID NO: 81335 - RNA, 32 nt, Homo Sapiens
cguguuuccccucucccucccucuccacgugg

SEQ ID NO: 81336 - RNA, 32 nt, Homo Sapiens
uaacauucaaaaaacuuguuuucacauggacc

SEQ ID NO: 81337 - RNA, 32 nt, Homo Sapiens
accccaccaaccccugcuuccccuucucgguc

SEQ ID NO: 81338 - RNA, 32 nt, Homo Sapiens
ggccaguggcaaacaucgauggucaagucucc

SEQ ID NO: 81339 - RNA, 32 nt, Homo Sapiens
aguagcugagauuacaggcgcccgccaccaug

SEQ ID NO: 81340 - RNA, 32 nt, Homo Sapiens
auuuucugaccaucgcugcuguugcucuguaa

SEQ ID NO: 81341 - RNA, 32 nt, Homo Sapiens
uggcuccuguuuccaauugauugagggaugcc

SEQ ID NO: 81342 - RNA, 32 nt, Homo Sapiens
uggaggagggaagauagccacuuuucaaaaac

SEQ ID NO: 81343 - RNA, 32 nt, Homo Sapiens
uacaaaaauagcaauuaauuuguaaacacugc

SEQ ID NO: 81344 - RNA, 32 nt, Homo Sapiens
auuuaaaaguuggacaucaauuuuuuccccug

SEQ ID NO: 81345 - RNA, 27 nt, Homo Sapiens
uuuuccuccuucuuccuccuggaggaa

SEQ ID NO: 81346 - RNA, 32 nt, Homo Sapiens
ccaccgcccaggcucaucuaccccgcuuccug

SEQ ID NO: 81347 - RNA, 32 nt, Homo Sapiens
aaaucaagcaaaugcuuuuuuaccaagagccc

SEQ ID NO: 81348 - RNA, 32 nt, Homo Sapiens
uugccagcucccauguaccugcggcuggaauc

SEQ ID NO: 81349 - RNA, 32 nt, Homo Sapiens
ggaccagaacagaugaaaauccugccaucuug

SEQ ID NO: 81350 - RNA, 32 nt, Homo Sapiens
aaaaguaggaaaauuagcugggugugguggcg

SEQ ID NO: 81351 - RNA, 32 nt, Homo Sapiens
aacaaaguuguuuguguuauuguacaauuuga

SEQ ID NO: 81352 - RNA, 29 nt, Homo Sapiens
uccuuauuaaaguuauauuuuucuauaag

SEQ ID NO: 81353 - RNA, 32 nt, Homo Sapiens
acacagcauggcaacucaucuacucacucaug

SEQ ID NO: 81354 - RNA, 32 nt, Homo Sapiens
ucggagcgcggccggggcgcgcgggggugaga

SEQ ID NO: 81355 - RNA, 32 nt, Homo Sapiens
accuauuuuguguucaauuugcuguccuuguu

SEQ ID NO: 81356 - RNA, 31 nt, Homo Sapiens
cuaguggcuguucaugcuccaagacuuuagu

SEQ ID NO: 81357 - RNA, 32 nt, Homo Sapiens
auuuacuggccauuuuaguuguaucacagcag

SEQ ID NO: 81358 - RNA, 32 nt, Homo Sapiens
cuuauaauuuaaaauaugcucuaaacauguuu

SEQ ID NO: 81359 - RNA, 32 nt, Homo Sapiens
aaaggcauccucaaaagaaagagaaaugaaau

SEQ ID NO: 81360 - RNA, 32 nt, Homo Sapiens
cuccucacuccaguugaaucauagggugaugu

SEQ ID NO: 81361 - RNA, 32 nt, Homo Sapiens
auguugcuuauauuuuaacuauugagcaaguu

SEQ ID NO: 81362 - RNA, 32 nt, Homo Sapiens
cauuccagacugcuuccaauuuucuggaauac

SEQ ID NO: 81363 - RNA, 32 nt, Homo Sapiens
ucgagaauuuuccuaaguacuaaaucaugugc

SEQ ID NO: 81364 - RNA, 32 nt, Homo Sapiens
uugcuaaucuucugcuuauuuuucagccuuua

SEQ ID NO: 81365 - RNA, 32 nt, Homo Sapiens
guugucaauggaugagugaucaacuaauagcu

SEQ ID NO: 81366 - RNA, 32 nt, Homo Sapiens
cuguuccuccaagugcacauuuagccuuaaaa

SEQ ID NO: 81367 - RNA, 32 nt, Homo Sapiens
gagugcgccggagcagcgugggaaagaaggga

SEQ ID NO: 81368 - RNA, 32 nt, Homo Sapiens
gccucugagaccccgccucaccucugagacac

SEQ ID NO: 81369 - RNA, 32 nt, Homo Sapiens
uaggaaagacugaauaaaaauggagggauauc

SEQ ID NO: 81370 - RNA, 32 nt, Homo Sapiens
ggugaugccuucuuggcaaagaguacaccacu

SEQ ID NO: 81371 - RNA, 32 nt, Homo Sapiens
agcucgggugguggagaugacaaggacacugu

SEQ ID NO: 81372 - RNA, 32 nt, Homo Sapiens
caggccggccaggggugagcccgccucacucu

SEQ ID NO: 81373 - RNA, 32 nt, Homo Sapiens
ggcagcccagucugaaagugaacugcagaagc

SEQ ID NO: 81374 - RNA, 32 nt, Homo Sapiens
gguguccggcuuugcuggcccagcaagccuga

SEQ ID NO: 81375 - RNA, 32 nt, Homo Sapiens
gguugaagauaauucauuuuaaucguaaugua

SEQ ID NO: 81376 - RNA, 32 nt, Homo Sapiens
uagcgggggccuuuccugaggacggcguacgg

SEQ ID NO: 81377 - RNA, 32 nt, Homo Sapiens
cuuuucuuugcuucuuuuuaguuuuuuucuuc

SEQ ID NO: 81378 - RNA, 32 nt, Homo Sapiens
gcaucucccaaugggguggcuuugcucugggc

SEQ ID NO: 81379 - RNA, 32 nt, Homo Sapiens
aaaggugagaggaggagaguggcauuaucccu

SEQ ID NO: 81380 - RNA, 32 nt, Homo Sapiens
uaaugugcugcuagguuuuuuguuuuguuuug

SEQ ID NO: 81381 - RNA, 30 nt, Homo Sapiens
ggccugggcaggcgcuugugcugccagggc

SEQ ID NO: 81382 - RNA, 32 nt, Homo Sapiens
gguaaugugcugucaugagaaaaauugagacu

SEQ ID NO: 81383 - RNA, 32 nt, Homo Sapiens
gggcuaccaucugcauggggcugggguccucc

SEQ ID NO: 81384 - RNA, 32 nt, Homo Sapiens
aaacaacacuuugucuuuacaaugaaacauuu

SEQ ID NO: 81385 - RNA, 32 nt, Homo Sapiens
aacaaguuaaggaaacaaaaauacuuauauau

SEQ ID NO: 81386 - RNA, 32 nt, Homo Sapiens
aaaggccagugggacugcuucaaggcccuugu

SEQ ID NO: 81387 - RNA, 32 nt, Homo Sapiens
uuccugcuguuuuuuauuugauccaaacaaug

SEQ ID NO: 81388 - RNA, 32 nt, Homo Sapiens
cucccacccuugccccaguccggccuggcccc

SEQ ID NO: 81389 - RNA, 32 nt, Homo Sapiens
gaggacaucuugugggaccaguccugcccaca

SEQ ID NO: 81390 - RNA, 32 nt, Homo Sapiens
uagcuauuugaaaauauaaaauguauuauugc

SEQ ID NO: 81391 - RNA, 31 nt, Homo Sapiens
gccaagaaacacugccugcccucugucuguc

SEQ ID NO: 81392 - RNA, 32 nt, Homo Sapiens
ccagcuagaguucugggugggcgugggauugg

SEQ ID NO: 81393 - RNA, 32 nt, Homo Sapiens
uacugagggcgcgcaggcagggagaagggccg

SEQ ID NO: 81394 - RNA, 32 nt, Homo Sapiens
ugcagcaaaaauuuacuacacaagauuauucg

SEQ ID NO: 81395 - RNA, 32 nt, Homo Sapiens
agccacccuccgaccaugccccggugaggggg

SEQ ID NO: 81396 - RNA, 28 nt, Homo Sapiens
uuuucaguuacagaguccaguggaccau

SEQ ID NO: 81397 - RNA, 32 nt, Homo Sapiens
ucacugauguauguuguauugcuggaguagaa

SEQ ID NO: 81398 - RNA, 32 nt, Homo Sapiens
ccauuuccggugccugcccaguggccacucuu

SEQ ID NO: 81399 - RNA, 32 nt, Homo Sapiens
uuuuuuaagaaacauuguuugguggcagcaau

SEQ ID NO: 81400 - RNA, 32 nt, Homo Sapiens
uuuguuuuguuucaagucaucauaaacuaggu

SEQ ID NO: 81401 - RNA, 32 nt, Homo Sapiens
agugccccuggccaacaaccccagcuucagcc

SEQ ID NO: 81402 - RNA, 27 nt, Homo Sapiens
cuuguggcagucuucagccuccucuac

SEQ ID NO: 81403 - RNA, 32 nt, Homo Sapiens
ccagucuagaggcaagcagagaguaggguuua

SEQ ID NO: 81404 - RNA, 32 nt, Homo Sapiens
ugaauacaugcacauuuguuucuuauacaggu

SEQ ID NO: 81405 - RNA, 32 nt, Homo Sapiens
aggacugcauuacaucaugcagcuuucagugg

SEQ ID NO: 81406 - RNA, 30 nt, Homo Sapiens
ccagggaauaucccuacaugauuuuuguca

SEQ ID NO: 81407 - RNA, 32 nt, Homo Sapiens
auuuuuagcuuuucuuuuuuuuuuaaauguca

SEQ ID NO: 81408 - RNA, 32 nt, Homo Sapiens
gucccccggcggccggcccauggccuggcgga

SEQ ID NO: 81409 - RNA, 32 nt, Homo Sapiens
ugaacacuguugcucugaguuaggaacagaau

SEQ ID NO: 81410 - RNA, 32 nt, Homo Sapiens
gccugccacuggccgagacacagaggcacaca

SEQ ID NO: 81411 - RNA, 32 nt, Homo Sapiens
gaguucauuaaaccucuuuccuuuauaaauua

SEQ ID NO: 81412 - RNA, 32 nt, Homo Sapiens
accucuggcugucuuuuuguacuuuuuguucc

SEQ ID NO: 81413 - RNA, 32 nt, Homo Sapiens
cguggccgauggggcggggaggccgcugggga

SEQ ID NO: 81414 - RNA, 32 nt, Homo Sapiens
ugaaacccaucccuggacuccaggcuaagaac

SEQ ID NO: 81415 - RNA, 32 nt, Homo Sapiens
cugcccauuucaccucuuugucauugcaauga

SEQ ID NO: 81416 - RNA, 32 nt, Homo Sapiens
uuugcauuuuccuaguauaauucauagcaagu

SEQ ID NO: 81417 - RNA, 32 nt, Homo Sapiens
cgcuggggccgcuggaggccccggggccugag

SEQ ID NO: 81418 - RNA, 32 nt, Homo Sapiens
ucuuccucacuccucccuucaguguccugagg

SEQ ID NO: 81419 - RNA, 32 nt, Homo Sapiens
caaguagaacugaacacaaauuuuaaaacugc

SEQ ID NO: 81420 - RNA, 32 nt, Homo Sapiens
gaaaaugguguuggguuuggucuccagcucca

SEQ ID NO: 81421 - RNA, 27 nt, Homo Sapiens
cgauucuccugcuucagccuucugagc

SEQ ID NO: 81422 - RNA, 32 nt, Homo Sapiens
cgccccuuuccacacgccgcugccccagcaac

SEQ ID NO: 81423 - RNA, 30 nt, Homo Sapiens
ggccuaggcaggcccgggccuguuggcaag

SEQ ID NO: 81424 - RNA, 32 nt, Homo Sapiens
aggaggaggaggaggagccgucgcaggaugaa

SEQ ID NO: 81425 - RNA, 32 nt, Homo Sapiens
cagaugcuuuccaacaugacaccugaacaucu

SEQ ID NO: 81426 - RNA, 32 nt, Homo Sapiens
cacaacuacccuccaaaccaccacagucucug

SEQ ID NO: 81427 - RNA, 32 nt, Homo Sapiens
ugcaacacauaaaauucaacaguuuugugcaa

SEQ ID NO: 81428 - RNA, 32 nt, Homo Sapiens
ucauuguguugguuaaguaacuugcuuagacu

SEQ ID NO: 81429 - RNA, 32 nt, Homo Sapiens
aacaaaacccaccagaaucuaagcaguuuuca

SEQ ID NO: 81430 - RNA, 32 nt, Homo Sapiens
gagugcagcucggacccaccggcggcccccgu

SEQ ID NO: 81431 - RNA, 32 nt, Homo Sapiens
uuaggguauaucauuuuuuacaauucugagac

SEQ ID NO: 81432 - RNA, 32 nt, Homo Sapiens
uucuuuuugcaaacaaaacaaaaaacagcaua

SEQ ID NO: 81433 - RNA, 32 nt, Homo Sapiens
ccugucccaccaacucugcacuccauggccac

SEQ ID NO: 81434 - RNA, 32 nt, Homo Sapiens
ggacagcgcccggcagcgcccgcgcccagguc

SEQ ID NO: 81435 - RNA, 32 nt, Homo Sapiens
cccgaagugcagcucgcccagcccuagcucag

SEQ ID NO: 81436 - RNA, 32 nt, Homo Sapiens
uaacuuuuuaaacaaaaacauaaaaucuaauu

SEQ ID NO: 81437 - RNA, 32 nt, Homo Sapiens
caggguggcguggggggcaggggugggugggu

SEQ ID NO: 81438 - RNA, 30 nt, Homo Sapiens
cacauguuugucugcauccucagggggcuc

SEQ ID NO: 81439 - RNA, 32 nt, Homo Sapiens
uaacccggcggggcggccggcgcgggacccga

SEQ ID NO: 81440 - RNA, 32 nt, Homo Sapiens
ccggagggugggccggaggcgaggcgcccacc

SEQ ID NO: 81441 - RNA, 32 nt, Homo Sapiens
gcacugcauuagacccugaggacacaguggug

SEQ ID NO: 81442 - RNA, 30 nt, Homo Sapiens
caggugggcaggcguguccuccuuuuccuc

SEQ ID NO: 81443 - RNA, 32 nt, Homo Sapiens
ccuccuauuagaguacgaaauuccuggcaacu

SEQ ID NO: 81444 - RNA, 32 nt, Homo Sapiens
cacgcuccugaacagccauugggucaaugaau

SEQ ID NO: 81445 - RNA, 32 nt, Homo Sapiens
gaggggaggcggagacggaggaaggucugagg

SEQ ID NO: 81446 - RNA, 30 nt, Homo Sapiens
cgguugcccgccucgccgccggccacagcc

SEQ ID NO: 81447 - RNA, 32 nt, Homo Sapiens
ugggacggcggcaugagaagaccagcgcagag

SEQ ID NO: 81448 - RNA, 32 nt, Homo Sapiens
cugcugccagccgaugccccagcccugcacgc

SEQ ID NO: 81449 - RNA, 32 nt, Homo Sapiens
ccaugucccggcugcugccgcugcugaggagc

SEQ ID NO: 81450 - RNA, 32 nt, Homo Sapiens
cugugucagggcacagacuaggucuuguggcu

SEQ ID NO: 81451 - RNA, 32 nt, Homo Sapiens
uccacugcaagagggagggccgggccaggaga

SEQ ID NO: 81452 - RNA, 32 nt, Homo Sapiens
caaaaacaagguuaacauuaaaaaagaaaaac

SEQ ID NO: 81453 - RNA, 32 nt, Homo Sapiens
gaaauacaaaaaugaaaauauuuauaauagga

SEQ ID NO: 81454 - RNA, 32 nt, Homo Sapiens
uugcgugccauuuugugucauccuucauuaaa

SEQ ID NO: 81455 - RNA, 32 nt, Homo Sapiens
ucaaaauauuccaggagagaagauaacauuua

SEQ ID NO: 81456 - RNA, 32 nt, Homo Sapiens
cuggauccuggagaacuuccaguguccuggau

SEQ ID NO: 81457 - RNA, 32 nt, Homo Sapiens
cuucguuaaagacacgcuuguguccugggcga

SEQ ID NO: 81458 - RNA, 32 nt, Homo Sapiens
acgaacgcacggaccgggccuccggaggcagg

SEQ ID NO: 81459 - RNA, 32 nt, Homo Sapiens
guuuuucggugggacagccccagggcccuaac

SEQ ID NO: 81460 - RNA, 32 nt, Homo Sapiens
uccaccugcaagucucuguuuccuuuuugugu

SEQ ID NO: 81461 - RNA, 32 nt, Homo Sapiens
uaggccccugucauucccacccucacucuugc

SEQ ID NO: 81462 - RNA, 32 nt, Homo Sapiens
auagucacacaucauuugauaaguuggauguu

SEQ ID NO: 81463 - RNA, 32 nt, Homo Sapiens
ggccggccgggcgcggugugcaggggugaggc

SEQ ID NO: 81464 - RNA, 32 nt, Homo Sapiens
uccuuauauauucuacaguggauagaauuagg

SEQ ID NO: 81465 - RNA, 32 nt, Homo Sapiens
cggcaccaaacacacagacugcuuugcaugag

SEQ ID NO: 81466 - RNA, 28 nt, Homo Sapiens
uugaaaugauagaaacauuugauguaau

SEQ ID NO: 81467 - RNA, 32 nt, Homo Sapiens
uaaauaggccgguggcucaugccuguaaucuc

SEQ ID NO: 81468 - RNA, 32 nt, Homo Sapiens
uggaagaaacaggccaggagaagugcgugccg

SEQ ID NO: 81469 - RNA, 32 nt, Homo Sapiens
aacgagguuccaguaaucugagcagucuaacg

SEQ ID NO: 81470 - RNA, 32 nt, Homo Sapiens
accugagaugugugaguuggggccuuuuaaaa

SEQ ID NO: 81471 - RNA, 32 nt, Homo Sapiens
gcaguauauaaaauaguuagauaaugagaagu

SEQ ID NO: 81472 - RNA, 32 nt, Homo Sapiens
ggcaagagaaagaaacaaaagccauccaaaua

SEQ ID NO: 81473 - RNA, 32 nt, Homo Sapiens
gaagugagacuggagggaaaggguagcugagu

SEQ ID NO: 81474 - RNA, 32 nt, Homo Sapiens
ucuucuucagggagcgggcaguggaguccgac

SEQ ID NO: 81475 - RNA, 32 nt, Homo Sapiens
agcugccuuuuggaggcccccuucaccugcag

SEQ ID NO: 81476 - RNA, 32 nt, Homo Sapiens
ccuaaagcugaauucccagcgcuuuggcuucu

SEQ ID NO: 81477 - RNA, 32 nt, Homo Sapiens
gcgccuccagccacguccccgccccggcuccg

SEQ ID NO: 81478 - RNA, 32 nt, Homo Sapiens
ucauugggucauuagugagaaacggggaugug

SEQ ID NO: 81479 - RNA, 32 nt, Homo Sapiens
caucugcgugcagccgggucacugcagcugcc

SEQ ID NO: 81480 - RNA, 32 nt, Homo Sapiens
cuugcuuucaggcuccucccucccaccacucc

SEQ ID NO: 81481 - RNA, 32 nt, Homo Sapiens
aagcguuguaaauaaauuguucucgacauauc

SEQ ID NO: 81482 - RNA, 32 nt, Homo Sapiens
ggcucagcuucagcuggguucuccucgcgcuc

SEQ ID NO: 81483 - RNA, 32 nt, Homo Sapiens
ucagagcagggucaggagacggggcugacggc

SEQ ID NO: 81484 - RNA, 32 nt, Homo Sapiens
agaugauuccuagacuucacaaacacucggca

SEQ ID NO: 81485 - RNA, 32 nt, Homo Sapiens
ucuuguagagaagacuuaggauaccucucuca

SEQ ID NO: 81486 - RNA, 32 nt, Homo Sapiens
gccuggauguucggggacccccacaucaccac

SEQ ID NO: 81487 - RNA, 32 nt, Homo Sapiens
aucaguauguucgaggguacuaugauauuuug

SEQ ID NO: 81488 - RNA, 32 nt, Homo Sapiens
cagcauuugagcucagcuaugaucagaaaaaa

SEQ ID NO: 81489 - RNA, 32 nt, Homo Sapiens
cgaacacaaccugccccguauggugccuaacu

SEQ ID NO: 81490 - RNA, 32 nt, Homo Sapiens
uaaaguacauuauguuuacucaaguaaauaau

SEQ ID NO: 81491 - RNA, 32 nt, Homo Sapiens
ugucaggcgcggugacagcucugugaguccga

SEQ ID NO: 81492 - RNA, 32 nt, Homo Sapiens
ggcgccuguagccccagcuacucgggaggcug

SEQ ID NO: 81493 - RNA, 32 nt, Homo Sapiens
auugaaacaaguaauauuaauaccgcaugggg

SEQ ID NO: 81494 - RNA, 32 nt, Homo Sapiens
uuuuucccuuuauuuuuuuuuaucaaaguaau

SEQ ID NO: 81495 - RNA, 32 nt, Homo Sapiens
ggcggccgcgggggacaaagggcgggcggauc

SEQ ID NO: 81496 - RNA, 32 nt, Homo Sapiens
uuuaguucaacaccaucaugguggauucauuu

SEQ ID NO: 81497 - RNA, 32 nt, Homo Sapiens
agaaagggcaggugaggccuggguaaccccag

SEQ ID NO: 81498 - RNA, 32 nt, Homo Sapiens
aaaacaaacaauuaauguaucuuuaugucccu

SEQ ID NO: 81499 - RNA, 30 nt, Homo Sapiens
guuggcagagguggcggcggcggcaugggu

SEQ ID NO: 81500 - RNA, 32 nt, Homo Sapiens
uuuuuaauuuaaacucucaagucugauuaaac

SEQ ID NO: 81501 - RNA, 28 nt, Homo Sapiens
cugggcgcggauucgccgaggcaccgag

SEQ ID NO: 81502 - RNA, 32 nt, Homo Sapiens
cagagccauguuugagccaaggucuuggaagg

SEQ ID NO: 81503 - RNA, 32 nt, Homo Sapiens
uguuuucucagaaucagcaacucaagguacua

SEQ ID NO: 81504 - RNA, 27 nt, Homo Sapiens
ggauccaccuucuuccuuagguccccu

SEQ ID NO: 81505 - RNA, 30 nt, Homo Sapiens
uaaccauuguguccuucccaucuuuuuugu

SEQ ID NO: 81506 - RNA, 32 nt, Homo Sapiens
agcuggaggaggaggaggaggauacgccaguc

SEQ ID NO: 81507 - RNA, 32 nt, Homo Sapiens
ugcuuuuuuuaaugaagugcuugaucacuugc

SEQ ID NO: 81508 - RNA, 32 nt, Homo Sapiens
ggauggucuaaggaagaccuggcuguucucca

SEQ ID NO: 81509 - RNA, 31 nt, Homo Sapiens
aguggcaggggcgcucgaccccgcgcaggaa

SEQ ID NO: 81510 - RNA, 32 nt, Homo Sapiens
aagcugugggcaugugcuugccugcgggagag

SEQ ID NO: 81511 - RNA, 32 nt, Homo Sapiens
uuugcggcuaguuuuucuuucuguuuccaggu

SEQ ID NO: 81512 - RNA, 32 nt, Homo Sapiens
ccaagcaaccucagccagugaguccaacguca

SEQ ID NO: 81513 - RNA, 31 nt, Homo Sapiens
auggcagccaacagagcaugggcugucuucc

SEQ ID NO: 81514 - RNA, 32 nt, Homo Sapiens
ucaaguuggauuuauagaguuugacuaguuuu

SEQ ID NO: 81515 - RNA, 32 nt, Homo Sapiens
cgcuaacauggugccccacaugugcugggcug

SEQ ID NO: 81516 - RNA, 30 nt, Homo Sapiens
cccuggcccucgcuggcccaucuuaagccu

SEQ ID NO: 81517 - RNA, 32 nt, Homo Sapiens
agacugauaaaaccucuuauuuuauuuaugug

SEQ ID NO: 81518 - RNA, 32 nt, Homo Sapiens
ccccgauugggggaaauaaaauuuaaacucua

SEQ ID NO: 81519 - RNA, 32 nt, Homo Sapiens
uccugcaaucucacccaaaauuaauucaugga

SEQ ID NO: 81520 - RNA, 32 nt, Homo Sapiens
uucagugauuuuucuuuuuguaguagcucagu

SEQ ID NO: 81521 - RNA, 32 nt, Homo Sapiens
aggauuucaagaaugacacucuacacaugcuc

SEQ ID NO: 81522 - RNA, 32 nt, Homo Sapiens
uuaaaggaaaauuuaaauggagacuggaaaaa

SEQ ID NO: 81523 - RNA, 32 nt, Homo Sapiens
cauuaaaguccagauuucugcuucuuuuuaaa

SEQ ID NO: 81524 - RNA, 32 nt, Homo Sapiens
caaaagcuugaacaacgucaucuugggagugc

SEQ ID NO: 81525 - RNA, 32 nt, Homo Sapiens
agcccgcagcgcuccggcuccuccucucgcga

SEQ ID NO: 81526 - RNA, 32 nt, Homo Sapiens
ggcugugugaugagcugaacucggggguauuu

SEQ ID NO: 81527 - RNA, 30 nt, Homo Sapiens
gccucauguaccgcgcgcuguacgcguucc

SEQ ID NO: 81528 - RNA, 32 nt, Homo Sapiens
ccagccuagcuaacaugguaaaacucugucuc

SEQ ID NO: 81529 - RNA, 32 nt, Homo Sapiens
ccaggcugcucccuaccaggugacggagcgcg

SEQ ID NO: 81530 - RNA, 32 nt, Homo Sapiens
ggacagaggaagcuuuagauagagacuuuaga

SEQ ID NO: 81531 - RNA, 32 nt, Homo Sapiens
acuaccuccaugagugcuacagacaggauggg

SEQ ID NO: 81532 - RNA, 32 nt, Homo Sapiens
gcccuggccccggcugcggucucagcccgggg

SEQ ID NO: 81533 - RNA, 32 nt, Homo Sapiens
auuuguaauugaucauaccauuaguguuacua

SEQ ID NO: 81534 - RNA, 31 nt, Homo Sapiens
acaggcaugguuucuggucagaauugcugug

SEQ ID NO: 81535 - RNA, 32 nt, Homo Sapiens
gcccuccccugccccaggaacccuggccucac

SEQ ID NO: 81536 - RNA, 32 nt, Homo Sapiens
uauuuuaauguuucuuggggaauauguuagag

SEQ ID NO: 81537 - RNA, 32 nt, Homo Sapiens
ucccuucugaaaggaacuguguagccagcagg

SEQ ID NO: 81538 - RNA, 32 nt, Homo Sapiens
uagcgcuggcccagcccaggccuugggaccug

SEQ ID NO: 81539 - RNA, 32 nt, Homo Sapiens
ucaagggcacauagaaaguaaauaaaaggacu

SEQ ID NO: 81540 - RNA, 32 nt, Homo Sapiens
aaaaucaacaaggugcauauaaaccauccuau

SEQ ID NO: 81541 - RNA, 32 nt, Homo Sapiens
uuuacauaaaccaaauaaagcuaucaaaauuu

SEQ ID NO: 81542 - RNA, 32 nt, Homo Sapiens
ucagcuacccgccuucgucuccgaguuugcga

SEQ ID NO: 81543 - RNA, 32 nt, Homo Sapiens
aaaauaagaaaauauaaugaucuguguuuauc

SEQ ID NO: 81544 - RNA, 32 nt, Homo Sapiens
gcauaacacugaguguuaauucuugugaaaua

SEQ ID NO: 81545 - RNA, 32 nt, Homo Sapiens
aggccgugugcgccggcuccgcggaagaugcc

SEQ ID NO: 81546 - RNA, 32 nt, Homo Sapiens
agcuguuacuggugauuauagaugaguauuuc

SEQ ID NO: 81547 - RNA, 32 nt, Homo Sapiens
gaggccccgcugucccggccggaccggccugg

SEQ ID NO: 81548 - RNA, 27 nt, Homo Sapiens
ccuuuuccuauuuucagcccauauuuc

SEQ ID NO: 81549 - RNA, 32 nt, Homo Sapiens
uauauagugcugacuuuuuuuuuuugaaauua

SEQ ID NO: 81550 - RNA, 32 nt, Homo Sapiens
uaccugacuucagcugugucaccaccccccag

SEQ ID NO: 81551 - RNA, 32 nt, Homo Sapiens
guccucaccauggccugggccaggugugacag

SEQ ID NO: 81552 - RNA, 32 nt, Homo Sapiens
aagaaaucuuuugaucaaauaaguugaaaauu

SEQ ID NO: 81553 - RNA, 31 nt, Homo Sapiens
gaaaagaaauaaagggugucuaucauaugaa

SEQ ID NO: 81554 - RNA, 32 nt, Homo Sapiens
aagcaagaaagcagauguauccccucacccuc

SEQ ID NO: 81555 - RNA, 32 nt, Homo Sapiens
agaguugagcuuggaaaccuucaccuagauuu

SEQ ID NO: 81556 - RNA, 32 nt, Homo Sapiens
cacuuccugacccuccgcccacuuccuucucc

SEQ ID NO: 81557 - RNA, 32 nt, Homo Sapiens
ccuccucuccuuagcuggcccguugguuuucu

SEQ ID NO: 81558 - RNA, 32 nt, Homo Sapiens
agagauacuuggaacuuaaagaaaauaccugg

SEQ ID NO: 81559 - RNA, 32 nt, Homo Sapiens
gaagauuugagaacuuuuuaacuauucauuga

SEQ ID NO: 81560 - RNA, 32 nt, Homo Sapiens
ccgcggcgggagaggaacgcgcagccagccuu

SEQ ID NO: 81561 - RNA, 32 nt, Homo Sapiens
cagugauucggccgcgccgccggggguggggg

SEQ ID NO: 81562 - RNA, 32 nt, Homo Sapiens
gcugagucaucucacgaagaaucccucacucu

SEQ ID NO: 81563 - RNA, 32 nt, Homo Sapiens
cagaauuuaagugacuuuugcccaaggaauuu

SEQ ID NO: 81564 - RNA, 32 nt, Homo Sapiens
gagucacccugugcuuccugcccaagauacug

SEQ ID NO: 81565 - RNA, 32 nt, Homo Sapiens
gaagaggauggaaaaacugaauacaagauacc

SEQ ID NO: 81566 - RNA, 32 nt, Homo Sapiens
cucaugucacugaguuccagccgcuuuuagag

SEQ ID NO: 81567 - RNA, 32 nt, Homo Sapiens
caguuucacagcaugguccccuacaauguuau

SEQ ID NO: 81568 - RNA, 32 nt, Homo Sapiens
ggguucuggaucaugucccauccaguccagug

SEQ ID NO: 81569 - RNA, 32 nt, Homo Sapiens
cccaccuucuucgaggacaugaccaagggaca

SEQ ID NO: 81570 - RNA, 32 nt, Homo Sapiens
gucagugaccuguugcggcccagcggcuggag

SEQ ID NO: 81571 - RNA, 32 nt, Homo Sapiens
cacuguacuuggcguuaaaucuugcugaauuc

SEQ ID NO: 81572 - RNA, 32 nt, Homo Sapiens
ccaaagaccaacaaagaguccuuccccaacuc

SEQ ID NO: 81573 - RNA, 32 nt, Homo Sapiens
ugggcugugccuuacauuuaauaaaaacuuac

SEQ ID NO: 81574 - RNA, 32 nt, Homo Sapiens
uaccccgcgggcccuuagcacgcgccccagcg

SEQ ID NO: 81575 - RNA, 32 nt, Homo Sapiens
aucauggguaguguuuuuaucuagauacuuag

SEQ ID NO: 81576 - RNA, 32 nt, Homo Sapiens
ccacggaggcagggccgccggaugcugugcgg

SEQ ID NO: 81577 - RNA, 32 nt, Homo Sapiens
gcccgcuccuucccagcuccuccccgugcccg

SEQ ID NO: 81578 - RNA, 32 nt, Homo Sapiens
agugcaaagagauaucccauuacaaugaguuu

SEQ ID NO: 81579 - RNA, 32 nt, Homo Sapiens
cuuuuuguuuuaaaggaugaaauuuugugggg

SEQ ID NO: 81580 - RNA, 32 nt, Homo Sapiens
uccaccugcccuccccaggcggcgggagccug

SEQ ID NO: 81581 - RNA, 27 nt, Homo Sapiens
aguuauuccuucuuucaguucaucuca

SEQ ID NO: 81582 - RNA, 32 nt, Homo Sapiens
aaaguagagaaauuauuugauuggcaaaaaug

SEQ ID NO: 81583 - RNA, 32 nt, Homo Sapiens
ggggcgccaggagguccuccccggggaggauc

SEQ ID NO: 81584 - RNA, 32 nt, Homo Sapiens
gaugccaaaaauauuucuggaauauuacaugu

SEQ ID NO: 81585 - RNA, 29 nt, Homo Sapiens
uagccagcaugcuagugaaaggcuagcag

SEQ ID NO: 81586 - RNA, 32 nt, Homo Sapiens
aguaggcagauaauccaccucccuauccccca

SEQ ID NO: 81587 - RNA, 32 nt, Homo Sapiens
gugugaggccuggccugggcccagaugcugau

SEQ ID NO: 81588 - RNA, 32 nt, Homo Sapiens
uaguuuugaugaugaaaaauauauuaaacgug

SEQ ID NO: 81589 - RNA, 32 nt, Homo Sapiens
aacaauguuucaucuggggaacugagcuaggc

SEQ ID NO: 81590 - RNA, 32 nt, Homo Sapiens
cugggcaggccgaggccaggaugugugccugu

SEQ ID NO: 81591 - RNA, 32 nt, Homo Sapiens
uaaagauggcagaaauuacucuacacagaccu

SEQ ID NO: 81592 - RNA, 32 nt, Homo Sapiens
aauuggccaggugugguggugcaugccuguaa

SEQ ID NO: 81593 - RNA, 32 nt, Homo Sapiens
uaagcucuccaaguucagacuccauucuugug

SEQ ID NO: 81594 - RNA, 32 nt, Homo Sapiens
agggcgcgggagcggcucgugcggcagguacc

SEQ ID NO: 81595 - RNA, 32 nt, Homo Sapiens
uucaucuccaaggcccgggggcuccggcaucu

SEQ ID NO: 81596 - RNA, 30 nt, Homo Sapiens
guugucugucaugugccagaagcuucucag

SEQ ID NO: 81597 - RNA, 32 nt, Homo Sapiens
gcagccgggcgcgugaggagcggcaggccuug

SEQ ID NO: 81598 - RNA, 32 nt, Homo Sapiens
acucaguuagcagccccuccucaccauucccc

SEQ ID NO: 81599 - RNA, 32 nt, Homo Sapiens
cagcaacaaaaugcaucuccaacugcaucuga

SEQ ID NO: 81600 - RNA, 32 nt, Homo Sapiens
uuuugaucuauuuuccuauggaguuguuucua

SEQ ID NO: 81601 - RNA, 32 nt, Homo Sapiens
ggagagcggcaggaggggugggaccaggcugg

SEQ ID NO: 81602 - RNA, 32 nt, Homo Sapiens
aauuagcugggugugcuggugcaugccuguaa

SEQ ID NO: 81603 - RNA, 32 nt, Homo Sapiens
uccuuuaugaaaacagaaaguugaaaacccca

SEQ ID NO: 81604 - RNA, 32 nt, Homo Sapiens
ccuuaggccgagucucggggguggucacaacc

SEQ ID NO: 81605 - RNA, 32 nt, Homo Sapiens
uguggauccgcuggcccggggccgggccuucc

SEQ ID NO: 81606 - RNA, 32 nt, Homo Sapiens
agcaccuuccucaggaugugggggccuggcag

SEQ ID NO: 81607 - RNA, 31 nt, Homo Sapiens
gccgugccuccgcguccgccccgcgccucag

SEQ ID NO: 81608 - RNA, 32 nt, Homo Sapiens
cgaagucucaaagcaucacuuccaccauacuc

SEQ ID NO: 81609 - RNA, 32 nt, Homo Sapiens
agcacgccugacgcuccucuacccucgggcag

SEQ ID NO: 81610 - RNA, 32 nt, Homo Sapiens
ucuuuaauuucuuuuuaccuuuucugacugau

SEQ ID NO: 81611 - RNA, 32 nt, Homo Sapiens
gaccuguucccaccccaguucaucaucaccuc

SEQ ID NO: 81612 - RNA, 32 nt, Homo Sapiens
uacauaugucaccucuaguguacaccucugua

SEQ ID NO: 81613 - RNA, 32 nt, Homo Sapiens
cagagcaaccccuggaccccagccucaaaucc

SEQ ID NO: 81614 - RNA, 32 nt, Homo Sapiens
gauguguacugugugcgccggggaggcgccgg

SEQ ID NO: 81615 - RNA, 32 nt, Homo Sapiens
ccuggggaugcagagcacaugccggccccagu

SEQ ID NO: 81616 - RNA, 32 nt, Homo Sapiens
gggugggugcgcacgcucugucccugcgugac

SEQ ID NO: 81617 - RNA, 32 nt, Homo Sapiens
aacaauggaaaacaggauuggcuucuucaaag

SEQ ID NO: 81618 - RNA, 29 nt, Homo Sapiens
caccaugagggccagcagcuucuugaucg

SEQ ID NO: 81619 - RNA, 32 nt, Homo Sapiens
uuuugggguaagacuuuuuuaugaguacuuuu

SEQ ID NO: 81620 - RNA, 32 nt, Homo Sapiens
uuucagggggagagguggagggcagauguccu

SEQ ID NO: 81621 - RNA, 32 nt, Homo Sapiens
cucuugggcucuccuaggauccccccaugccc

SEQ ID NO: 81622 - RNA, 32 nt, Homo Sapiens
gaccuggggcuuuggagugaagagaccaagau

SEQ ID NO: 81623 - RNA, 32 nt, Homo Sapiens
cgagcacuaugucguccccggcgucgaccccg

SEQ ID NO: 81624 - RNA, 32 nt, Homo Sapiens
aagggacagagcuuuaccuggcagugauaaag

SEQ ID NO: 81625 - RNA, 32 nt, Homo Sapiens
aucacuggaagacagguggccauuuuucucag

SEQ ID NO: 81626 - RNA, 32 nt, Homo Sapiens
uccuccaggucagaacggugccccacaguggu

SEQ ID NO: 81627 - RNA, 32 nt, Homo Sapiens
aagcuuuggaaguuuuuguagauaguagaaag

SEQ ID NO: 81628 - RNA, 32 nt, Homo Sapiens
agucgagccgggaggaacccaggcugcugccc

SEQ ID NO: 81629 - RNA, 32 nt, Homo Sapiens
cuuuuaaagcaucuacuugaagauugguauaa

SEQ ID NO: 81630 - RNA, 32 nt, Homo Sapiens
gguccgugugagcaggcccaccuggcuccaga

SEQ ID NO: 81631 - RNA, 32 nt, Homo Sapiens
agagccagacugcgcagccaggacugggguau

SEQ ID NO: 81632 - RNA, 32 nt, Homo Sapiens
ccucgucacagcaaaaacacuuuccuuucuac

SEQ ID NO: 81633 - RNA, 32 nt, Homo Sapiens
uguaugugucugugugaguccuaauauucagu

SEQ ID NO: 81634 - RNA, 32 nt, Homo Sapiens
aggaacgauaaggggucaucagacugggguuu

SEQ ID NO: 81635 - RNA, 32 nt, Homo Sapiens
ccacagcucuggaggcugcugcugccugggcc

SEQ ID NO: 81636 - RNA, 31 nt, Homo Sapiens
aaaacucuugguaacuuagcaggaguagcug

SEQ ID NO: 81637 - RNA, 32 nt, Homo Sapiens
aagaggaaaaagaaaauggcugugcugcauug

SEQ ID NO: 81638 - RNA, 32 nt, Homo Sapiens
uuggauuuuagcaaaagcauccaagaaaaaca

SEQ ID NO: 81639 - RNA, 32 nt, Homo Sapiens
cuugcaguggagaggaggucuuccagcagcag

SEQ ID NO: 81640 - RNA, 32 nt, Homo Sapiens
cgcuagcccagcugguauaaucucugugccuc

SEQ ID NO: 81641 - RNA, 32 nt, Homo Sapiens
uaaggagagcaugagagaaggcuggcauuggc

SEQ ID NO: 81642 - RNA, 32 nt, Homo Sapiens
gaaauagaggcuuuucagaagagaaagacaga

SEQ ID NO: 81643 - RNA, 32 nt, Homo Sapiens
agugauugauaaaaauugguugguguuucaug

SEQ ID NO: 81644 - RNA, 32 nt, Homo Sapiens
ccaaaauaucuccauaauaauucauaaugcuu

SEQ ID NO: 81645 - RNA, 32 nt, Homo Sapiens
cuugauucauccuucgggucccgauuggcugg

SEQ ID NO: 81646 - RNA, 32 nt, Homo Sapiens
guggagguggagguugcagugagccgagaucg

SEQ ID NO: 81647 - RNA, 32 nt, Homo Sapiens
guuuugcccgguuuuucucuucaauauuugug

SEQ ID NO: 81648 - RNA, 32 nt, Homo Sapiens
ccagccgcccgcccgcccggcgcagaugcacg

SEQ ID NO: 81649 - RNA, 32 nt, Homo Sapiens
uccccugagcccucuucucuccaggcuaaaga

SEQ ID NO: 81650 - RNA, 32 nt, Homo Sapiens
gcucaucucacacacaccccccucccggguca

SEQ ID NO: 81651 - RNA, 32 nt, Homo Sapiens
acaccuuguaguguuguacuaucuggaacucu

SEQ ID NO: 81652 - RNA, 32 nt, Homo Sapiens
aagugaauaauguaauucaacucucaaauuca

SEQ ID NO: 81653 - RNA, 32 nt, Homo Sapiens
cuucuccguacaccccagcuccuaggucucag

SEQ ID NO: 81654 - RNA, 32 nt, Homo Sapiens
uaggaugaggcaggcccaguccuccuccagaa

SEQ ID NO: 81655 - RNA, 32 nt, Homo Sapiens
cggggaugggacgucccggggcugugcugacc

SEQ ID NO: 81656 - RNA, 32 nt, Homo Sapiens
cucauauucuaaagggaagugauuucucagaa

SEQ ID NO: 81657 - RNA, 32 nt, Homo Sapiens
cccaccagcgccgguguccccggaggggcccc

SEQ ID NO: 81658 - RNA, 32 nt, Homo Sapiens
auacacacagaaaauacgggugugaaaagaaa

SEQ ID NO: 81659 - RNA, 32 nt, Homo Sapiens
caaauaccgagacagcugaugaggcuggcuca

SEQ ID NO: 81660 - RNA, 32 nt, Homo Sapiens
auucuuauuuuuguacaguuuugaaguuuaua

SEQ ID NO: 81661 - RNA, 32 nt, Homo Sapiens
gaucaaauuaagguugcuuaagaucaaacugc

SEQ ID NO: 81662 - RNA, 32 nt, Homo Sapiens
uggcuuccugucugcuggccucuccugcuacu

SEQ ID NO: 81663 - RNA, 32 nt, Homo Sapiens
ugcugcaagaauguauuuuuuaaugaaguucc

SEQ ID NO: 81664 - RNA, 32 nt, Homo Sapiens
ugaagaaaaguauuuuugucugacaguggaau

SEQ ID NO: 81665 - RNA, 32 nt, Homo Sapiens
ccggcucaccuggcggugcccgaggaguaguc

SEQ ID NO: 81666 - RNA, 32 nt, Homo Sapiens
agcaccaaccuaucaaggagaagucccaccca

SEQ ID NO: 81667 - RNA, 32 nt, Homo Sapiens
cucuggccccguguccagugccaggcaggcuu

SEQ ID NO: 81668 - RNA, 32 nt, Homo Sapiens
aaauaauaaauaauagcugauuaggguaauca

SEQ ID NO: 81669 - RNA, 32 nt, Homo Sapiens
ucgcuggcggccgguaacuggcggcgguuggg

SEQ ID NO: 81670 - RNA, 32 nt, Homo Sapiens
cugggaacugaagagacuugugguauuccauc

SEQ ID NO: 81671 - RNA, 32 nt, Homo Sapiens
cugcauuuugaguuaguuuauagugcuaauag

SEQ ID NO: 81672 - RNA, 32 nt, Homo Sapiens
aacacuagcaucagucccacucaucucaggcu

SEQ ID NO: 81673 - RNA, 32 nt, Homo Sapiens
agucgguucagaagcuaaagugacucucuggg

SEQ ID NO: 81674 - RNA, 32 nt, Homo Sapiens
gaccucaggauuuuauacuagguauuugaugc

SEQ ID NO: 81675 - RNA, 32 nt, Homo Sapiens
auuuuguaaugugguuuaacauccuuguuguu

SEQ ID NO: 81676 - RNA, 32 nt, Homo Sapiens
ggaauuggaaaaccaucauuuuucaaccauca

SEQ ID NO: 81677 - RNA, 32 nt, Homo Sapiens
acauccacaauaaccaagauauuuuuauccca

SEQ ID NO: 81678 - RNA, 32 nt, Homo Sapiens
ugauacgugugcauaacagugaggcauugugu

SEQ ID NO: 81679 - RNA, 32 nt, Homo Sapiens
agagcuagggcggcacccgcgcggcgagugua

SEQ ID NO: 81680 - RNA, 32 nt, Homo Sapiens
cuugggcccacccacagcccugggugccuucu

SEQ ID NO: 81681 - RNA, 32 nt, Homo Sapiens
gacagaguggaugaagaggccuugaauuuccc

SEQ ID NO: 81682 - RNA, 32 nt, Homo Sapiens
aaauaaaacugggcuuggauccugaaacccug

SEQ ID NO: 81683 - RNA, 31 nt, Homo Sapiens
acaaaggugaacaugaaggcgaggaugcugg

SEQ ID NO: 81684 - RNA, 32 nt, Homo Sapiens
gcauuagguagaaaagacaaaacccaaacacc

SEQ ID NO: 81685 - RNA, 32 nt, Homo Sapiens
uaaaggaaaugggcuaaacauaaaguucuuau

SEQ ID NO: 81686 - RNA, 32 nt, Homo Sapiens
gaaugucaguacuucaucaucuucuuugggca

SEQ ID NO: 81687 - RNA, 32 nt, Homo Sapiens
ucccccuuugucuguacauacuggccucugug

SEQ ID NO: 81688 - RNA, 32 nt, Homo Sapiens
aagaaguuucuacuccaugaguaacuccaagu

SEQ ID NO: 81689 - RNA, 32 nt, Homo Sapiens
gauggcuguucuuguucacgugagaugugcca

SEQ ID NO: 81690 - RNA, 32 nt, Homo Sapiens
ugugggcuuccacuguccccacuccgaacucc

SEQ ID NO: 81691 - RNA, 32 nt, Homo Sapiens
agcacagaacccucccacccagccccccauaa

SEQ ID NO: 81692 - RNA, 30 nt, Homo Sapiens
agcugccggacgcucgcgggucucggaacg

SEQ ID NO: 81693 - RNA, 32 nt, Homo Sapiens
aauugccccacuuaugcugccauccuuuuugc

SEQ ID NO: 81694 - RNA, 32 nt, Homo Sapiens
cuggcguccgcggcgcuuggcgccacagucac

SEQ ID NO: 81695 - RNA, 32 nt, Homo Sapiens
ggaaagaaaugaauuaauuugauaugcucuaa

SEQ ID NO: 81696 - RNA, 32 nt, Homo Sapiens
ugccccacccuguccccgugggccguggcaug

SEQ ID NO: 81697 - RNA, 32 nt, Homo Sapiens
aguucagaaaaaaugugaagucuacuuuagua

SEQ ID NO: 81698 - RNA, 32 nt, Homo Sapiens
aaaugagguauuaaaaagagauggauuacaca

SEQ ID NO: 81699 - RNA, 32 nt, Homo Sapiens
aaaaguauuaauucucuuuccauccuccuccu

SEQ ID NO: 81700 - RNA, 32 nt, Homo Sapiens
cuccauguuuucugcugagaagucaacugcua

SEQ ID NO: 81701 - RNA, 32 nt, Homo Sapiens
gucguauccgcggcgagagggcuuggucucaa

SEQ ID NO: 81702 - RNA, 32 nt, Homo Sapiens
gaagagaaagugaaguuugaaaacuuuucaaa

SEQ ID NO: 81703 - RNA, 32 nt, Homo Sapiens
gcucuugccugcccugcauaugugcucauuug

SEQ ID NO: 81704 - RNA, 32 nt, Homo Sapiens
uccuucccuaaaaugagaaguccaaggucauc

SEQ ID NO: 81705 - RNA, 32 nt, Homo Sapiens
cucaaaggccccaguauucucucuucuuuccu

SEQ ID NO: 81706 - RNA, 32 nt, Homo Sapiens
ugugacuggguuccuggguacccaggccugac

SEQ ID NO: 81707 - RNA, 32 nt, Homo Sapiens
gccuaguuugagagcaccuuguuuccucagca

SEQ ID NO: 81708 - RNA, 32 nt, Homo Sapiens
gccucuugggucagcccuccuugacugugucc

SEQ ID NO: 81709 - RNA, 32 nt, Homo Sapiens
ucaccugccccucccccaucccagguugugga

SEQ ID NO: 81710 - RNA, 32 nt, Homo Sapiens
ggcagaccccacgacccuuccucccccuuccu

SEQ ID NO: 81711 - RNA, 32 nt, Homo Sapiens
agggcugagccccuccucuccucguccggccu

SEQ ID NO: 81712 - RNA, 32 nt, Homo Sapiens
ccucuagcccgccgcuuucgggacucucagcc

SEQ ID NO: 81713 - RNA, 32 nt, Homo Sapiens
cuucccuccccuccccguccacagggcagccu

SEQ ID NO: 81714 - RNA, 32 nt, Homo Sapiens
cugcccucgccguggcgggcgacgguuucucg

SEQ ID NO: 81715 - RNA, 32 nt, Homo Sapiens
cugaucaucuucucccguacaucccuguauug

SEQ ID NO: 81716 - RNA, 32 nt, Homo Sapiens
agugcugucuucugcuggccucauccugcagc

SEQ ID NO: 81717 - RNA, 32 nt, Homo Sapiens
ucaaaguugugauuuuugggaaaaucauauau

SEQ ID NO: 81718 - RNA, 32 nt, Homo Sapiens
uuuguuaggcugugcuuuacugauaaaaccaa

SEQ ID NO: 81719 - RNA, 32 nt, Homo Sapiens
agaaacaugaagugauuaaauaaaauauucau

SEQ ID NO: 81720 - RNA, 32 nt, Homo Sapiens
aggcaauuaaauuuauaccacggccacaauac

SEQ ID NO: 81721 - RNA, 32 nt, Homo Sapiens
ggaggcuucggguuggggcccaagggaggugu

SEQ ID NO: 81722 - RNA, 32 nt, Homo Sapiens
augcaguagaaaguagugguaauaauuccuuu

SEQ ID NO: 81723 - RNA, 32 nt, Homo Sapiens
gaaguuauuuuauuuuuuuuuauuuuuaauuu

SEQ ID NO: 81724 - RNA, 32 nt, Homo Sapiens
caugagguugugaacgccacccgccccccacc

SEQ ID NO: 81725 - RNA, 32 nt, Homo Sapiens
ugcuccugccugcccuggcccugaggcuccac

SEQ ID NO: 81726 - RNA, 32 nt, Homo Sapiens
aauggaaaaaaguuacuuuguaaaaaauuugc

SEQ ID NO: 81727 - RNA, 32 nt, Homo Sapiens
gacucuguugcccaagcuggaguacaguagug

SEQ ID NO: 81728 - RNA, 32 nt, Homo Sapiens
guuuuaauugagauauaaauuaaugagacaaa

SEQ ID NO: 81729 - RNA, 32 nt, Homo Sapiens
aaaagaacccucagcagaauaacaaaaacuuu

SEQ ID NO: 81730 - RNA, 32 nt, Homo Sapiens
caaaggccgcguguaaucucguuagggcugcg

SEQ ID NO: 81731 - RNA, 32 nt, Homo Sapiens
gccccagcguuuugggucuucucagcccaagc

SEQ ID NO: 81732 - RNA, 32 nt, Homo Sapiens
guggaagauuucaagaaaggacaacucacugu

SEQ ID NO: 81733 - RNA, 32 nt, Homo Sapiens
cuacucccaagccuacgggacugucugccacu

SEQ ID NO: 81734 - RNA, 32 nt, Homo Sapiens
accauguuagacaguuuucauacuuuuucuau

SEQ ID NO: 81735 - RNA, 32 nt, Homo Sapiens
cgguauccuugacucuucaggauuaccugccu

SEQ ID NO: 81736 - RNA, 25 nt, Homo Sapiens
agcaacuggcuugaccacagucuga

SEQ ID NO: 81737 - RNA, 32 nt, Homo Sapiens
gggucccgcuccccgugccguggggcaggggc

SEQ ID NO: 81738 - RNA, 32 nt, Homo Sapiens
guccgugcgcuccccgcgcccgagggugcagg

SEQ ID NO: 81739 - RNA, 32 nt, Homo Sapiens
uaguuauaaacugaagcagauaccuggaacca

SEQ ID NO: 81740 - RNA, 32 nt, Homo Sapiens
ugcagcccuuucugcccuugggcccccggacu

SEQ ID NO: 81741 - RNA, 32 nt, Homo Sapiens
aaguucuggcccuuggcugugcucuccuuagc

SEQ ID NO: 81742 - RNA, 32 nt, Homo Sapiens
aggggcucuggagugccuuagagcagagcugc

SEQ ID NO: 81743 - RNA, 32 nt, Homo Sapiens
augacauuuucauuuuaaucaauaacauuauu

SEQ ID NO: 81744 - RNA, 32 nt, Homo Sapiens
guaaguuuauuaccaagaauauugguguggua

SEQ ID NO: 81745 - RNA, 32 nt, Homo Sapiens
ggacagcccucccagccaugaauccuuacuca

SEQ ID NO: 81746 - RNA, 32 nt, Homo Sapiens
accauuuuucuuuccgcuaauuuauaaugguu

SEQ ID NO: 81747 - RNA, 32 nt, Homo Sapiens
gcauugcuugaagagaugguuuugcugcucuc

SEQ ID NO: 81748 - RNA, 32 nt, Homo Sapiens
cugcuacuacuugggaguuggugcugcccugu

SEQ ID NO: 81749 - RNA, 32 nt, Homo Sapiens
uucugcaggacuccuuccuggcacucucucca

SEQ ID NO: 81750 - RNA, 32 nt, Homo Sapiens
cacagcuuuggggaauuuuggccaggagaccc

SEQ ID NO: 81751 - RNA, 32 nt, Homo Sapiens
uuuguuuucuucauuucucuugcucaccaaga

SEQ ID NO: 81752 - RNA, 32 nt, Homo Sapiens
uuccuggccuacugcauccuugugggagucag

SEQ ID NO: 81753 - RNA, 32 nt, Homo Sapiens
acauuucagagggucugggcaacauccacaug

SEQ ID NO: 81754 - RNA, 32 nt, Homo Sapiens
ggccgcgcucccagcccgcccggagcccaugc

SEQ ID NO: 81755 - RNA, 32 nt, Homo Sapiens
gcugaaguggggccuuccugauucuggggaca

SEQ ID NO: 81756 - RNA, 32 nt, Homo Sapiens
ucaccagacauuccugcuccguggcugaagag

SEQ ID NO: 81757 - RNA, 32 nt, Homo Sapiens
aaaauguagaugcuuugucuaauuccacuuca

SEQ ID NO: 81758 - RNA, 32 nt, Homo Sapiens
aggcagugcuucccacacuggaccucuuuccu

SEQ ID NO: 81759 - RNA, 32 nt, Homo Sapiens
cuccucagcagccaaggacggcaccauccagc

SEQ ID NO: 81760 - RNA, 27 nt, Homo Sapiens
aaguaaucauuccccagcccccaguau

SEQ ID NO: 81761 - RNA, 32 nt, Homo Sapiens
uaacaguagagcucuaugcacuccggcugcaa

SEQ ID NO: 81762 - RNA, 32 nt, Homo Sapiens
augaggacagaaggacuggugcgaccccccac

SEQ ID NO: 81763 - RNA, 32 nt, Homo Sapiens
accuugggaaagugggcucagaggaggaaagg

SEQ ID NO: 81764 - RNA, 32 nt, Homo Sapiens
cauaaccuagaaugucaagacacucaagauaa

SEQ ID NO: 81765 - RNA, 32 nt, Homo Sapiens
auuuuaugcaagaauuaaaugcuuuacaacau

SEQ ID NO: 81766 - RNA, 32 nt, Homo Sapiens
accgcugccauugguguugagaauaauaaagc

SEQ ID NO: 81767 - RNA, 32 nt, Homo Sapiens
gcagaguugcuuaaugaaaggguuuguaauac

SEQ ID NO: 81768 - RNA, 32 nt, Homo Sapiens
ugguaauauaguaaguuuuuuuagaagacaau

SEQ ID NO: 81769 - RNA, 32 nt, Homo Sapiens
gcagccaacaccccggccucggggcuccuggu

SEQ ID NO: 81770 - RNA, 30 nt, Homo Sapiens
gcacgaggccucgugccgccgggcucuugg

SEQ ID NO: 81771 - RNA, 32 nt, Homo Sapiens
cauggagcuggcccagcuccugcucacagccu

SEQ ID NO: 81772 - RNA, 32 nt, Homo Sapiens
ugcccuacgcaccccgauggcggagcugcggc

SEQ ID NO: 81773 - RNA, 32 nt, Homo Sapiens
ccagguacaccucccccugcgccccgcacgac

SEQ ID NO: 81774 - RNA, 32 nt, Homo Sapiens
accccuuccccgagagacggcaccaugacccg

SEQ ID NO: 81775 - RNA, 32 nt, Homo Sapiens
ggguauugagagccagugggcuuuuguguagc

SEQ ID NO: 81776 - RNA, 32 nt, Homo Sapiens
ugaaaugaagguuuuucaucagccuuaaaagu

SEQ ID NO: 81777 - RNA, 32 nt, Homo Sapiens
uagccuccacccaaaauaaaaugggcuuuaaa

SEQ ID NO: 81778 - RNA, 32 nt, Homo Sapiens
ggaaucugacuaugagauugaugacagggaug

SEQ ID NO: 81779 - RNA, 32 nt, Homo Sapiens
agaagcaggugaagagcaaccacaaguuuaaa

SEQ ID NO: 81780 - RNA, 32 nt, Homo Sapiens
guuacaauccuaaucauucacauuuucugacu

SEQ ID NO: 81781 - RNA, 32 nt, Homo Sapiens
uuuugggggccacaacucuacccuggcaugca

SEQ ID NO: 81782 - RNA, 32 nt, Homo Sapiens
uugaggaagcagucucguguccuccgugugaa

SEQ ID NO: 81783 - RNA, 32 nt, Homo Sapiens
ggcuccacucccucacccaagccugcucuccu

SEQ ID NO: 81784 - RNA, 28 nt, Homo Sapiens
uaugggagaaaaauacauuugaaccaug

SEQ ID NO: 81785 - RNA, 32 nt, Homo Sapiens
aagaacuauccugaguuucuguggauggaaac

SEQ ID NO: 81786 - RNA, 32 nt, Homo Sapiens
uacuccugaacaggucuagcuaguuauuuguu

SEQ ID NO: 81787 - RNA, 32 nt, Homo Sapiens
gcggccgcgggcccaggccucaccuuccccga

SEQ ID NO: 81788 - RNA, 32 nt, Homo Sapiens
aaacuuucccggcaggagcugacugcugggca

SEQ ID NO: 81789 - RNA, 32 nt, Homo Sapiens
gcgggacgugacgcagcgcccggggcgcggau

SEQ ID NO: 81790 - RNA, 32 nt, Homo Sapiens
gcuuuaaacggaaagcacuuaaauaaugacua

SEQ ID NO: 81791 - RNA, 32 nt, Homo Sapiens
aucucuacaaugaaaaauguaaaauauugauu

SEQ ID NO: 81792 - RNA, 32 nt, Homo Sapiens
uccugcacagcccgaccuccccggagccuccc

SEQ ID NO: 81793 - RNA, 32 nt, Homo Sapiens
guuuuccuguguucuuguuuucagaaaaugaa

SEQ ID NO: 81794 - RNA, 32 nt, Homo Sapiens
cccacagaggccuccguuccccgcccccuacu

SEQ ID NO: 81795 - RNA, 32 nt, Homo Sapiens
gacuugcccagcugagugcuggcucugaggaa

SEQ ID NO: 81796 - RNA, 32 nt, Homo Sapiens
ugcagcuucucgcgaggggcggcgacgguccc

SEQ ID NO: 81797 - RNA, 32 nt, Homo Sapiens
ccuuucuguugauguuacaucucuucuuccua

SEQ ID NO: 81798 - RNA, 32 nt, Homo Sapiens
ugggaagacagagaaacauaaagaggaaauua

SEQ ID NO: 81799 - RNA, 32 nt, Homo Sapiens
uuucugaagccucuaacaaaugaucuaguuca

SEQ ID NO: 81800 - RNA, 32 nt, Homo Sapiens
ccaaagugcugggauuacaggcaccgagaaga

SEQ ID NO: 81801 - RNA, 32 nt, Homo Sapiens
uaacagcuuaacauuuacauaguucuuacuac

SEQ ID NO: 81802 - RNA, 32 nt, Homo Sapiens
gaagcccucauccucaccgccucccccuucca

SEQ ID NO: 81803 - RNA, 32 nt, Homo Sapiens
caguccccgguguccaccccagccccgcuacc

SEQ ID NO: 81804 - RNA, 32 nt, Homo Sapiens
uacaguauuugggcagcaaaacaugauuaaag

SEQ ID NO: 81805 - RNA, 32 nt, Homo Sapiens
auuugugguguccagugaaaauaaaaaugcau

SEQ ID NO: 81806 - RNA, 32 nt, Homo Sapiens
auauuguucuuuguuacaauuucgggcaccgc

SEQ ID NO: 81807 - RNA, 32 nt, Homo Sapiens
cgucccccauucuucccguccugauuccccau

SEQ ID NO: 81808 - RNA, 32 nt, Homo Sapiens
ccuuccacccucgccgcgccccguggggaaua

SEQ ID NO: 81809 - RNA, 30 nt, Homo Sapiens
gcucaugucugugauuggaaaaucacgccu

SEQ ID NO: 81810 - RNA, 32 nt, Homo Sapiens
cauaaagaggcaaaugguaauauuuuaggcuu

SEQ ID NO: 81811 - RNA, 32 nt, Homo Sapiens
gccacuagcgcggcgccgccagccgggagcca

SEQ ID NO: 81812 - RNA, 32 nt, Homo Sapiens
cugcccugacuucucauaucuugccuaggaac

SEQ ID NO: 81813 - RNA, 32 nt, Homo Sapiens
cacugaaggauuuaauugauauuuuuaaugga

SEQ ID NO: 81814 - RNA, 32 nt, Homo Sapiens
cagacugucauguuucaucucuguaaauuaaa

SEQ ID NO: 81815 - RNA, 32 nt, Homo Sapiens
uuggauaagacggaagauaaugacauacaauc

SEQ ID NO: 81816 - RNA, 32 nt, Homo Sapiens
agguugagcucuucacugugucuuuccaucug

SEQ ID NO: 81817 - RNA, 32 nt, Homo Sapiens
ggcuuuuuaaaaacagaagaguaggaggaaau

SEQ ID NO: 81818 - RNA, 32 nt, Homo Sapiens
acugugaccuuccucagccucagcucccuuac

SEQ ID NO: 81819 - RNA, 32 nt, Homo Sapiens
agugcggcgagggccuaccaggggcgacaggg

SEQ ID NO: 81820 - RNA, 32 nt, Homo Sapiens
ugcuauugaauuggacacuuugaaauggugaa

SEQ ID NO: 81821 - RNA, 30 nt, Homo Sapiens
acacggccgaggcgcgcggcucccugggcc

SEQ ID NO: 81822 - RNA, 32 nt, Homo Sapiens
cgcacccccacccccacccccacuggaauugu

SEQ ID NO: 81823 - RNA, 32 nt, Homo Sapiens
gcuagcgcgcagcuccagcucugucacucgcg

SEQ ID NO: 81824 - RNA, 32 nt, Homo Sapiens
ccgacccagccagcugcacugcagggcacggg

SEQ ID NO: 81825 - RNA, 32 nt, Homo Sapiens
acaccucgccccacagagcucuguucuuagcc

SEQ ID NO: 81826 - RNA, 32 nt, Homo Sapiens
ggaaggcuguuuucacaaaugacuuguaaugu

SEQ ID NO: 81827 - RNA, 32 nt, Homo Sapiens
aaguuuaccugcuguucucacccccaaugagg

SEQ ID NO: 81828 - RNA, 32 nt, Homo Sapiens
acucaugucagacccgcugucuccaggccugu

SEQ ID NO: 81829 - RNA, 32 nt, Homo Sapiens
gugguccacccgagaccccuugagcaccaacc

SEQ ID NO: 81830 - RNA, 32 nt, Homo Sapiens
aaaacugaacaaagggauuaaauugugagaac

SEQ ID NO: 81831 - RNA, 32 nt, Homo Sapiens
uaaaauaaaaauuuaacaaggaucaaaauaaa

SEQ ID NO: 81832 - RNA, 30 nt, Homo Sapiens
uuuugaaguccggagaguuguuuaaaagcc

SEQ ID NO: 81833 - RNA, 32 nt, Homo Sapiens
ggcuagccucauuuguuucucaucucuugagg

SEQ ID NO: 81834 - RNA, 32 nt, Homo Sapiens
cccgcgcccucccagccggguccagccggagc

SEQ ID NO: 81835 - RNA, 32 nt, Homo Sapiens
ugaaagagggcuuaauucuguggguccuaaau

SEQ ID NO: 81836 - RNA, 32 nt, Homo Sapiens
gaaaagguuauguaauaaaauauuuuaaaauc

SEQ ID NO: 81837 - RNA, 32 nt, Homo Sapiens
gggguuuugccuaagaggagucuaaagaauua

SEQ ID NO: 81838 - RNA, 32 nt, Homo Sapiens
gacucuguauuucuauaguucuccuggcagag

SEQ ID NO: 81839 - RNA, 32 nt, Homo Sapiens
uuuucuugccucagccucccaagcagcuggga

SEQ ID NO: 81840 - RNA, 32 nt, Homo Sapiens
acuuuuuuagaaaugcaaaaucucuacugcuu

SEQ ID NO: 81841 - RNA, 32 nt, Homo Sapiens
ugcuauuuuccuccucuuguuacaagcuucag

SEQ ID NO: 81842 - RNA, 32 nt, Homo Sapiens
auggguagaacaaaaaguuguuaauacuguaa

SEQ ID NO: 81843 - RNA, 32 nt, Homo Sapiens
ugaaaaccucguuuuucuuuuguuugcauuuu

SEQ ID NO: 81844 - RNA, 32 nt, Homo Sapiens
cuucuggugccugccccuccccggccuaugug

SEQ ID NO: 81845 - RNA, 32 nt, Homo Sapiens
uccauucaguggcuuuuucguuucacaauuug

SEQ ID NO: 81846 - RNA, 32 nt, Homo Sapiens
gaccugggcuccugggugcucauuggcgccgu

SEQ ID NO: 81847 - RNA, 32 nt, Homo Sapiens
cggcuccggcuccugcggcagcuccucugggc

SEQ ID NO: 81848 - RNA, 32 nt, Homo Sapiens
uaaaaacaaaaacauuuuuacgacgaucccuu

SEQ ID NO: 81849 - RNA, 32 nt, Homo Sapiens
gcuuuauaauuucaaguucacacguuugcuca

SEQ ID NO: 81850 - RNA, 32 nt, Homo Sapiens
uaugugcuucuuuuccuauagcuaaauguaua

SEQ ID NO: 81851 - RNA, 32 nt, Homo Sapiens
augcaagauggccucauccagcccucccuccc

SEQ ID NO: 81852 - RNA, 32 nt, Homo Sapiens
acuaaccuaaaauguacucaaaacacugacaa

SEQ ID NO: 81853 - RNA, 32 nt, Homo Sapiens
guccucccgcggcggcccgcgggacggcguga

SEQ ID NO: 81854 - RNA, 32 nt, Homo Sapiens
uguguguugugggaagagaauuuucaauaugu

SEQ ID NO: 81855 - RNA, 32 nt, Homo Sapiens
uuccccuuccuguguccaaguguucucauugu

SEQ ID NO: 81856 - RNA, 32 nt, Homo Sapiens
aauuguauugaaaaaaugcugaggaaugaaug

SEQ ID NO: 81857 - RNA, 32 nt, Homo Sapiens
aaaacauccacuguuuucuccucccaauguua

SEQ ID NO: 81858 - RNA, 32 nt, Homo Sapiens
cggggagaaggacacuugcagagccuugagau

SEQ ID NO: 81859 - RNA, 32 nt, Homo Sapiens
ccuuggaagaguuugucugcaauggagccaac

SEQ ID NO: 81860 - RNA, 32 nt, Homo Sapiens
cgaggcacagaaaacaaauaucaaagaucuaa

SEQ ID NO: 81861 - RNA, 32 nt, Homo Sapiens
caagauuaagacuaaaacuuauuguuaccaua

SEQ ID NO: 81862 - RNA, 32 nt, Homo Sapiens
uguguaauaguauuaaauuuaauggcagaccu

SEQ ID NO: 81863 - RNA, 32 nt, Homo Sapiens
augcugagcuacccaaaccaacaccuagccuc

SEQ ID NO: 81864 - RNA, 32 nt, Homo Sapiens
gccaggggugcaggcagcugcccccaggaagu

SEQ ID NO: 81865 - RNA, 32 nt, Homo Sapiens
aguaccuugugcugcucuuuaugcaaagguaa

SEQ ID NO: 81866 - RNA, 32 nt, Homo Sapiens
auaaccacagccagcucuggggcucuucacug

SEQ ID NO: 81867 - RNA, 32 nt, Homo Sapiens
gaguggcccuguuuguagcugcugcugugacu

SEQ ID NO: 81868 - RNA, 31 nt, Homo Sapiens
acggagccuauguguaaguccacuacuggug

SEQ ID NO: 81869 - RNA, 31 nt, Homo Sapiens
uuuaaggaauaaaaacagguaaaacuaaaaa

SEQ ID NO: 81870 - RNA, 32 nt, Homo Sapiens
uugugccucacagcgaggccuacaagggaugg

SEQ ID NO: 81871 - RNA, 32 nt, Homo Sapiens
aagguguguggcugaccuccagggaggagcac

SEQ ID NO: 81872 - RNA, 32 nt, Homo Sapiens
ggccuccucccuuggcgccgcggccauggcgg

SEQ ID NO: 81873 - RNA, 31 nt, Homo Sapiens
caggagaaucacuugaaccaggaaggcagag

SEQ ID NO: 81874 - RNA, 32 nt, Homo Sapiens
cgcgcaaguccuccaccaugugaaugccaaca

SEQ ID NO: 81875 - RNA, 32 nt, Homo Sapiens
cauauuuauguaggugguuuuaauuuuuuaaa

SEQ ID NO: 81876 - RNA, 32 nt, Homo Sapiens
ccuaugcccucccugggccccuguggggcugg

SEQ ID NO: 81877 - RNA, 32 nt, Homo Sapiens
ugcgcaccugccccgcucggucagucagucgg

SEQ ID NO: 81878 - RNA, 32 nt, Homo Sapiens
ucuuaaauauaaaugccuaaagggcagauugg

SEQ ID NO: 81879 - RNA, 32 nt, Homo Sapiens
caaggaaaguaagaagacauggcacguguucu

SEQ ID NO: 81880 - RNA, 32 nt, Homo Sapiens
cugugaaaacaaaagggaagaggugaugugau

SEQ ID NO: 81881 - RNA, 31 nt, Homo Sapiens
cucuguaugcugcuguccccaagggcucuuu

SEQ ID NO: 81882 - RNA, 32 nt, Homo Sapiens
gaaugagaacuguguccgcuucgugaguauca

SEQ ID NO: 81883 - RNA, 32 nt, Homo Sapiens
gguccgugcagccacacccucuucccugccag

SEQ ID NO: 81884 - RNA, 32 nt, Homo Sapiens
cagcuugccucucaauucauuccuccucuucc

SEQ ID NO: 81885 - RNA, 32 nt, Homo Sapiens
uguggcucuuggugcuggccagaagccaacuu

SEQ ID NO: 81886 - RNA, 29 nt, Homo Sapiens
uuugaauagugaugggcuauaaaagacgg

SEQ ID NO: 81887 - RNA, 32 nt, Homo Sapiens
aaaucagauuuguaggucauguuaagcuucuu

SEQ ID NO: 81888 - RNA, 32 nt, Homo Sapiens
uacguauuucuuucuauucguuucuuuucguu

SEQ ID NO: 81889 - RNA, 32 nt, Homo Sapiens
uacugggggauagugaaaugggaaauaauuuu

SEQ ID NO: 81890 - RNA, 32 nt, Homo Sapiens
gauaauuguucauuauuuugucaauguuauuu

SEQ ID NO: 81891 - RNA, 32 nt, Homo Sapiens
gcguugcuggguggcgaugcccguccucuggc

SEQ ID NO: 81892 - RNA, 32 nt, Homo Sapiens
auucuuuagcuaaaccucugugcaucuucuug

SEQ ID NO: 81893 - RNA, 32 nt, Homo Sapiens
aaugcuuagucuuuuuuuuuuauuagauaaaa

SEQ ID NO: 81894 - RNA, 32 nt, Homo Sapiens
cuccgagcggcugcuucccgguugccucgacg

SEQ ID NO: 81895 - RNA, 32 nt, Homo Sapiens
cgugagggggcagaggcgagguggaggcguug

SEQ ID NO: 81896 - RNA, 32 nt, Homo Sapiens
gaacaugcagcauaagaaacugcugcagagug

SEQ ID NO: 81897 - RNA, 32 nt, Homo Sapiens
acggagccggcgagcgggaugcugcggacugc

SEQ ID NO: 81898 - RNA, 32 nt, Homo Sapiens
gcccuguguuagaggaggaaaagcggagauga

SEQ ID NO: 81899 - RNA, 32 nt, Homo Sapiens
uuuuuuuuucuguguccccagcacuuacaaca

SEQ ID NO: 81900 - RNA, 32 nt, Homo Sapiens
ccacucggccccaggggguuauggccacagag

SEQ ID NO: 81901 - RNA, 32 nt, Homo Sapiens
aggagcauccaccuccuucucugucucaugug

SEQ ID NO: 81902 - RNA, 32 nt, Homo Sapiens
acuggacaccucgacuugcagacggccacagc

SEQ ID NO: 81903 - RNA, 32 nt, Homo Sapiens
uuucccucauauauuuuggacaagauuuauau

SEQ ID NO: 81904 - RNA, 32 nt, Homo Sapiens
uuuuaugugagugugucuuuuacagaaaccau

SEQ ID NO: 81905 - RNA, 32 nt, Homo Sapiens
ugugaggcaucuuuccuggagccccgagccag

SEQ ID NO: 81906 - RNA, 32 nt, Homo Sapiens
guuccaaagaagcagaggcauuugucaaguua

SEQ ID NO: 81907 - RNA, 32 nt, Homo Sapiens
guagcugggaugcauggaugacccaucucacc

SEQ ID NO: 81908 - RNA, 32 nt, Homo Sapiens
cccagagaagacugaggcuacggggaacuucc

SEQ ID NO: 81909 - RNA, 32 nt, Homo Sapiens
gauuuaauacuagucuuuuaguauaaaggaau

SEQ ID NO: 81910 - RNA, 32 nt, Homo Sapiens
ucuuggagaagcuggugcugugagccagagga

SEQ ID NO: 81911 - RNA, 32 nt, Homo Sapiens
uggucaaauaauuggaacaaagggaaacagau

SEQ ID NO: 81912 - RNA, 32 nt, Homo Sapiens
acaaagaucauaauuuucaaugauuagccgug

SEQ ID NO: 81913 - RNA, 32 nt, Homo Sapiens
uaaaucugugcagcugccuuauaguaccauca

SEQ ID NO: 81914 - RNA, 32 nt, Homo Sapiens
cacaccaggccucccuggucuucuuaaaguca

SEQ ID NO: 81915 - RNA, 28 nt, Homo Sapiens
aaaugaaggucuaccaggaugaggguga

SEQ ID NO: 81916 - RNA, 32 nt, Homo Sapiens
cuuaaagucugcuguuauucuaaaaugaaaga

SEQ ID NO: 81917 - RNA, 32 nt, Homo Sapiens
uaugucgggcagugcugagggcugggaugcuc

SEQ ID NO: 81918 - RNA, 32 nt, Homo Sapiens
ucuaguugcuguugguuuuucuucugcugcca

SEQ ID NO: 81919 - RNA, 32 nt, Homo Sapiens
gguuucaccauguuggccaggcuggucucgaa

SEQ ID NO: 81920 - RNA, 32 nt, Homo Sapiens
gguuucaccaugcuggccaggcuggucuugaa

SEQ ID NO: 81921 - RNA, 31 nt, Homo Sapiens
cgccgccggcacugccucgauguuccagcug

SEQ ID NO: 81922 - RNA, 32 nt, Homo Sapiens
cccggccuggaacacagguucugucuggcugu

SEQ ID NO: 81923 - RNA, 32 nt, Homo Sapiens
uuuuucuuucuuucuuuuuugccuuaggagcu

SEQ ID NO: 81924 - RNA, 32 nt, Homo Sapiens
agagcgcagacccuugggaaaagcacuuggug

SEQ ID NO: 81925 - RNA, 32 nt, Homo Sapiens
ccuugacccccacccacccccacccuugcugg

SEQ ID NO: 81926 - RNA, 32 nt, Homo Sapiens
aaaguuacugcuuuuccacuugcucauauagu

SEQ ID NO: 81927 - RNA, 32 nt, Homo Sapiens
guagagugcaucacucaccacagcugccuccu

SEQ ID NO: 81928 - RNA, 32 nt, Homo Sapiens
gcccuccgccccaccacagcacucucaggaaa

SEQ ID NO: 81929 - RNA, 32 nt, Homo Sapiens
cagccaggccccaggcacugggaggcccuggg

SEQ ID NO: 81930 - RNA, 32 nt, Homo Sapiens
agucuuagcauuauuuccuuugugaaguacua

SEQ ID NO: 81931 - RNA, 32 nt, Homo Sapiens
gucucaaaauaaagaacuuaugguguguuuua

SEQ ID NO: 81932 - RNA, 32 nt, Homo Sapiens
uggcgcuccccgcucgcugaaccccguuugcc

SEQ ID NO: 81933 - RNA, 32 nt, Homo Sapiens
cgcagggccacagcagcucagccgccggugcc

SEQ ID NO: 81934 - RNA, 32 nt, Homo Sapiens
uauguuuuugacaucaaccauuaguaggucuu

SEQ ID NO: 81935 - RNA, 32 nt, Homo Sapiens
uaaacgaucuuuguuauccuuaucucacuggg

SEQ ID NO: 81936 - RNA, 32 nt, Homo Sapiens
ggugauaacaugguauauguauuguuauuaaa

SEQ ID NO: 81937 - RNA, 30 nt, Homo Sapiens
aggggguuucaccguguuagccaggauggu

SEQ ID NO: 81938 - RNA, 32 nt, Homo Sapiens
acagaagaaaugccuccccaggucugucucug

SEQ ID NO: 81939 - RNA, 32 nt, Homo Sapiens
aacugaggcagacagcagcucaggcacacuuc

SEQ ID NO: 81940 - RNA, 32 nt, Homo Sapiens
cagaaacaguugggcuuuucuuaacagguuaa

SEQ ID NO: 81941 - RNA, 32 nt, Homo Sapiens
aguccauacacuuuagcaaggcuuucaaggcc

SEQ ID NO: 81942 - RNA, 32 nt, Homo Sapiens
ccuucuuucuauuugaacguccuucacucauc

SEQ ID NO: 81943 - RNA, 32 nt, Homo Sapiens
uuuuuauggcugagauucgggaggaaguguga

SEQ ID NO: 81944 - RNA, 32 nt, Homo Sapiens
augugccuuaguuuaguggcugucugggguga

SEQ ID NO: 81945 - RNA, 32 nt, Homo Sapiens
cgcaccgugggucuuuccugauagcugcaggc

SEQ ID NO: 81946 - RNA, 31 nt, Homo Sapiens
cccaugugugaggaagcaggagucagccacc

SEQ ID NO: 81947 - RNA, 32 nt, Homo Sapiens
acuagcugaguuguaguguauuuuauaaaugg

SEQ ID NO: 81948 - RNA, 32 nt, Homo Sapiens
agccuggguggguucucuggcugagcaggucu

SEQ ID NO: 81949 - RNA, 32 nt, Homo Sapiens
gcaggaaggccgcggcagagggggcgcccucc

SEQ ID NO: 81950 - RNA, 32 nt, Homo Sapiens
acuauuuugcucucauguguaauguuuucuau

SEQ ID NO: 81951 - RNA, 32 nt, Homo Sapiens
agcacaaggaucucaaaaauuuguuugaugau

SEQ ID NO: 81952 - RNA, 32 nt, Homo Sapiens
cacguggacagagggcggaaugcagaugaggc

SEQ ID NO: 81953 - RNA, 32 nt, Homo Sapiens
uaaaaaaugacuuaaccaaacaucacagagcu

SEQ ID NO: 81954 - RNA, 31 nt, Homo Sapiens
cugagcacaaagaaggaugaucaacuuccca

SEQ ID NO: 81955 - RNA, 32 nt, Homo Sapiens
ccccagcccuccccacccagguuuucggccca

SEQ ID NO: 81956 - RNA, 32 nt, Homo Sapiens
ucuccccugcccccugcccccuggaguggcuu

SEQ ID NO: 81957 - RNA, 32 nt, Homo Sapiens
gcaacccaucuuucuucaguauguauguucug

SEQ ID NO: 81958 - RNA, 32 nt, Homo Sapiens
cuauguuguaaaaauaggaaauguggcuuaaa

SEQ ID NO: 81959 - RNA, 32 nt, Homo Sapiens
gcaggaaaaguuuuuucuuuauauccaguuuu

SEQ ID NO: 81960 - RNA, 32 nt, Homo Sapiens
auuauuuucacauuuuaauugcuaaucacugg

SEQ ID NO: 81961 - RNA, 32 nt, Homo Sapiens
ccgccucgggguggcggcgcgcgugugggacg

SEQ ID NO: 81962 - RNA, 32 nt, Homo Sapiens
agggagggaaaggcggcuugggccuccuggaa

SEQ ID NO: 81963 - RNA, 32 nt, Homo Sapiens
gucauauuuuguuaauaaaauuuuauuggaac

SEQ ID NO: 81964 - RNA, 32 nt, Homo Sapiens
aggcuaaugggguggcggguguguguuuaaac

SEQ ID NO: 81965 - RNA, 32 nt, Homo Sapiens
guaccugggcaagcuggcggcuggggucccag

SEQ ID NO: 81966 - RNA, 32 nt, Homo Sapiens
aggaaagggcgcugcgaccacccccgucccgg

SEQ ID NO: 81967 - RNA, 32 nt, Homo Sapiens
agcugacugcugaccacccuccccucagccau

SEQ ID NO: 81968 - RNA, 31 nt, Homo Sapiens
ugauauuuugguaauaaaugaagugggauca

SEQ ID NO: 81969 - RNA, 32 nt, Homo Sapiens
ugccaagggcuuuguuuugcacacuuugccau

SEQ ID NO: 81970 - RNA, 32 nt, Homo Sapiens
guaucugucauuguagggauagauaauaagcu

SEQ ID NO: 81971 - RNA, 32 nt, Homo Sapiens
uuuuaagagaaaaccaucagaaauugauaaug

SEQ ID NO: 81972 - RNA, 32 nt, Homo Sapiens
cggccaagaggcgcugggaggggcaaaaccau

SEQ ID NO: 81973 - RNA, 32 nt, Homo Sapiens
aaaaaaccaauggugaaauuucaaguuucaaa

SEQ ID NO: 81974 - RNA, 32 nt, Homo Sapiens
gcugucuuuuucacuuguuuggcacucagccc

SEQ ID NO: 81975 - RNA, 32 nt, Homo Sapiens
uggcuuucaguaacaaugguauaauaauuaug

SEQ ID NO: 81976 - RNA, 32 nt, Homo Sapiens
ccagcaaccuccagcaugggugucauagccau

SEQ ID NO: 81977 - RNA, 32 nt, Homo Sapiens
augcuauuucaaaaagccuguuuaauaaagcu

SEQ ID NO: 81978 - RNA, 32 nt, Homo Sapiens
ccagguccugucugggggccuguaccugcucu

SEQ ID NO: 81979 - RNA, 32 nt, Homo Sapiens
acaccaguuccuccuuguuucaucucuuugcu

SEQ ID NO: 81980 - RNA, 32 nt, Homo Sapiens
caugcggagagccgccgggauggaggacuucu

SEQ ID NO: 81981 - RNA, 30 nt, Homo Sapiens
ucauuugauaucccuuucuccauucuaggu

SEQ ID NO: 81982 - RNA, 32 nt, Homo Sapiens
auucaguugugauuuuuaacaugucucagaua

SEQ ID NO: 81983 - RNA, 32 nt, Homo Sapiens
augagucauggaauuuaagugauuuacugaag

SEQ ID NO: 81984 - RNA, 32 nt, Homo Sapiens
agcgagccgggcgagcggcgcgcuagggggag

SEQ ID NO: 81985 - RNA, 32 nt, Homo Sapiens
auuugggaugauauuuaggagcuaucaaucaa

SEQ ID NO: 81986 - RNA, 32 nt, Homo Sapiens
uucccaaguucuguuauuucaaaccugugaac

SEQ ID NO: 81987 - RNA, 32 nt, Homo Sapiens
guguuaaaggagccaguggucucucugggugg

SEQ ID NO: 81988 - RNA, 32 nt, Homo Sapiens
uuucugggcuccuggggcucagccuagugaac

SEQ ID NO: 81989 - RNA, 32 nt, Homo Sapiens
uccugcgcgggugggcggcgggccaggccuuc

SEQ ID NO: 81990 - RNA, 32 nt, Homo Sapiens
uuugagaauccugaaauugagccuaugagaaa

SEQ ID NO: 81991 - RNA, 32 nt, Homo Sapiens
gccccgcaaaacccacugaccggaggcaaaag

SEQ ID NO: 81992 - RNA, 32 nt, Homo Sapiens
acacauuuacccauaauugagauugccauaau

SEQ ID NO: 81993 - RNA, 32 nt, Homo Sapiens
aucguauuuccacuucagaugccuucucagag

SEQ ID NO: 81994 - RNA, 32 nt, Homo Sapiens
aacaucacugcucuuuuagauaaaccucugcc

SEQ ID NO: 81995 - RNA, 32 nt, Homo Sapiens
cugcgggcauugccgcgccgccuccgccggug

SEQ ID NO: 81996 - RNA, 32 nt, Homo Sapiens
ugggcaacagagcgauccuguuucagagaaaa

SEQ ID NO: 81997 - RNA, 32 nt, Homo Sapiens
ggcagggaaggggagggcugugcgugggggag

SEQ ID NO: 81998 - RNA, 32 nt, Homo Sapiens
cugccccggccgccugcgcacccggcagcacc

SEQ ID NO: 81999 - RNA, 32 nt, Homo Sapiens
uaaauuuuguugaauguauuaacaucauaugg

SEQ ID NO: 82000 - RNA, 32 nt, Homo Sapiens
acucagggaaaacaucaggccccuccagcuga

SEQ ID NO: 82001 - RNA, 32 nt, Homo Sapiens
ugcaaccuccaccuucagggugucaggccucu

SEQ ID NO: 82002 - RNA, 32 nt, Homo Sapiens
cugcuuacaaaacagggucaccagugcauuau

SEQ ID NO: 82003 - RNA, 32 nt, Homo Sapiens
caagugauccccgccuggcccuggagguguac

SEQ ID NO: 82004 - RNA, 32 nt, Homo Sapiens
agaagucaacgcaaaaucaugcugccguguuc

SEQ ID NO: 82005 - RNA, 32 nt, Homo Sapiens
aggccaacgcguacaaguaccucaggcuuucc

SEQ ID NO: 82006 - RNA, 32 nt, Homo Sapiens
cccaagggcugaggagugcgggugcacagcgc

SEQ ID NO: 82007 - RNA, 32 nt, Homo Sapiens
cccagcaucuccaucccccauccagucucagu

SEQ ID NO: 82008 - RNA, 32 nt, Homo Sapiens
aauuuuaaaaggaauauuuauuagccauaugc

SEQ ID NO: 82009 - RNA, 32 nt, Homo Sapiens
uccuucccuuaccaaggagaggggagcaaaug

SEQ ID NO: 82010 - RNA, 32 nt, Homo Sapiens
gccaccacagccaccuucuccuccuccgcugu

SEQ ID NO: 82011 - RNA, 32 nt, Homo Sapiens
agcccugagauccuccucccagcucaagggac

SEQ ID NO: 82012 - RNA, 32 nt, Homo Sapiens
aacuaaacccucacaaguaacaguugaagaaa

SEQ ID NO: 82013 - RNA, 32 nt, Homo Sapiens
uuccuaucagggcguccugugcucgccuugcc

SEQ ID NO: 82014 - RNA, 32 nt, Homo Sapiens
gugcaguggagauggaaggccagggaggagca

SEQ ID NO: 82015 - RNA, 32 nt, Homo Sapiens
uugaauugaaaauaaauaauuugagagcuuca

SEQ ID NO: 82016 - RNA, 32 nt, Homo Sapiens
ugaaauuaggaaggaaaucaucaauaacucag

SEQ ID NO: 82017 - RNA, 32 nt, Homo Sapiens
uauaugauaaugucuguaaacagcaucacuuu

SEQ ID NO: 82018 - RNA, 31 nt, Homo Sapiens
aaauacuauaucacuauucaagaucaucuuc

SEQ ID NO: 82019 - RNA, 32 nt, Homo Sapiens
guguucucucuuaacgccacuggugauaggaa

SEQ ID NO: 82020 - RNA, 32 nt, Homo Sapiens
gugcagggaaagggauggucaggcccaguucu

SEQ ID NO: 82021 - RNA, 28 nt, Homo Sapiens
auuaaaaagaccaaacauuugagauugu

SEQ ID NO: 82022 - RNA, 32 nt, Homo Sapiens
uccacaggccuuuggguacagaugaggccucg

SEQ ID NO: 82023 - RNA, 32 nt, Homo Sapiens
cagacaccagcucuccuuccugccuuuagauc

SEQ ID NO: 82024 - RNA, 32 nt, Homo Sapiens
ucauauaaauuaagcuuuauaaugacauuuca

SEQ ID NO: 82025 - RNA, 32 nt, Homo Sapiens
ccagggcuggcccugauccaccuaccugcuaa

SEQ ID NO: 82026 - RNA, 32 nt, Homo Sapiens
gucauucugugcuauauuguaacugccagaug

SEQ ID NO: 82027 - RNA, 32 nt, Homo Sapiens
ucugagcuggcaccaccacacggcccacgaca

SEQ ID NO: 82028 - RNA, 32 nt, Homo Sapiens
gucacugauucuugcgcccuagacaagcuaac

SEQ ID NO: 82029 - RNA, 30 nt, Homo Sapiens
aaucuggccguucugacacuggguguugag

SEQ ID NO: 82030 - RNA, 32 nt, Homo Sapiens
uguuccuguuuuuuuuuuuuuauuuaauuuug

SEQ ID NO: 82031 - RNA, 32 nt, Homo Sapiens
gcccgccccuccccugucacuugucgggcauc

SEQ ID NO: 82032 - RNA, 32 nt, Homo Sapiens
gagcccgucuuccgacgugcagccuggcagug

SEQ ID NO: 82033 - RNA, 32 nt, Homo Sapiens
cgcaugcgccccagccuuucccaugugccaaa

SEQ ID NO: 82034 - RNA, 32 nt, Homo Sapiens
aggucuaggaugugugaaguuuggaaaaauau

SEQ ID NO: 82035 - RNA, 32 nt, Homo Sapiens
aggccagaugagaacaagcagcguacacgauu

SEQ ID NO: 82036 - RNA, 32 nt, Homo Sapiens
auuuguuuuuuuuuuucuuuguuuugcuuuuu

SEQ ID NO: 82037 - RNA, 32 nt, Homo Sapiens
cugaccacaauuuuagguaaaacauuaaaugu

SEQ ID NO: 82038 - RNA, 32 nt, Homo Sapiens
cacuggcucggccagcacuggucucauuucgg

SEQ ID NO: 82039 - RNA, 32 nt, Homo Sapiens
cuuacccucauguucuuaauucuuagcucauu

SEQ ID NO: 82040 - RNA, 32 nt, Homo Sapiens
aagaguccccuuuuccgcacagcuguguugac

SEQ ID NO: 82041 - RNA, 32 nt, Homo Sapiens
cccaaaguguaaagcuuuaagagucauuuaua

SEQ ID NO: 82042 - RNA, 32 nt, Homo Sapiens
uagucaaugaacuggcugccacuuuaauauaa

SEQ ID NO: 82043 - RNA, 32 nt, Homo Sapiens
augaacugcccccagcccccgccccauuaaag

SEQ ID NO: 82044 - RNA, 32 nt, Homo Sapiens
ccccacccgccagucagcggcgcgggcguguu

SEQ ID NO: 82045 - RNA, 32 nt, Homo Sapiens
ggcgcgcccgggcgcgcaccuguguauggacc

SEQ ID NO: 82046 - RNA, 32 nt, Homo Sapiens
uggcaaacagaaaauguaaaagaagaugguag

SEQ ID NO: 82047 - RNA, 32 nt, Homo Sapiens
accuggcagccucagcucugugccccucaccc

SEQ ID NO: 82048 - RNA, 32 nt, Homo Sapiens
agccuuauccagguugguuuugcuguugaucg

SEQ ID NO: 82049 - RNA, 32 nt, Homo Sapiens
ugagcggggcacuucggcugcuccacagggaa

SEQ ID NO: 82050 - RNA, 32 nt, Homo Sapiens
aacuuuguuauaauacagucucugccacagau

SEQ ID NO: 82051 - RNA, 32 nt, Homo Sapiens
ugucuugaugccuguuuuuuuauguuuucauu

SEQ ID NO: 82052 - RNA, 32 nt, Homo Sapiens
ggcagcucacgguggcucuggaguacguuucc

SEQ ID NO: 82053 - RNA, 32 nt, Homo Sapiens
ucaaugauggaugguaaauuuucauggaaguu

SEQ ID NO: 82054 - RNA, 32 nt, Homo Sapiens
gagggcggguccccggccucgggagcacggcg

SEQ ID NO: 82055 - RNA, 32 nt, Homo Sapiens
uuuaucauguuaaauaaauguugauguucuua

SEQ ID NO: 82056 - RNA, 32 nt, Homo Sapiens
ccuccuguauaaauccaaccucuggguccguu

SEQ ID NO: 82057 - RNA, 32 nt, Homo Sapiens
ggauuccuaccuuuguucugcuacccacugcc

SEQ ID NO: 82058 - RNA, 32 nt, Homo Sapiens
gagguccgagauggcuucuggaggaaggcgcc

SEQ ID NO: 82059 - RNA, 32 nt, Homo Sapiens
uauuucuuaggacaugcaucuuuaagcuuuau

SEQ ID NO: 82060 - RNA, 32 nt, Homo Sapiens
ggagugcgggcgccgcgccgccuuuaaagcga

SEQ ID NO: 82061 - RNA, 32 nt, Homo Sapiens
cucccggccgcggcacagcagccccggcgcuc

SEQ ID NO: 82062 - RNA, 32 nt, Homo Sapiens
cuuuucuuuaacgauaucaacucuguggugcc

SEQ ID NO: 82063 - RNA, 32 nt, Homo Sapiens
uuuaucauauauauuuguauaauuaauuacug

SEQ ID NO: 82064 - RNA, 32 nt, Homo Sapiens
cugauccauagaguacaggggcugcaaaauau

SEQ ID NO: 82065 - RNA, 32 nt, Homo Sapiens
gagggagacggacguugagagaacgaggagga

SEQ ID NO: 82066 - RNA, 32 nt, Homo Sapiens
uaccuauauuggcauugcuggauuauaaacuc

SEQ ID NO: 82067 - RNA, 32 nt, Homo Sapiens
uggcccagguggagcaggagggaccacuggaa

SEQ ID NO: 82068 - RNA, 32 nt, Homo Sapiens
aguuucugcuucacauuugauuuuuucaaauu

SEQ ID NO: 82069 - RNA, 32 nt, Homo Sapiens
cggccgggcauguagcagcggcagcaacggcg

SEQ ID NO: 82070 - RNA, 32 nt, Homo Sapiens
ugcugaccuaauguggauuguugaagcagugg

SEQ ID NO: 82071 - RNA, 32 nt, Homo Sapiens
agaauuacagagcugaaccggaucuuggaagc

SEQ ID NO: 82072 - RNA, 32 nt, Homo Sapiens
ccucuaccguguuucucuuccaucccuaaacc

SEQ ID NO: 82073 - RNA, 32 nt, Homo Sapiens
ugguuauguaaaaaugaaauuuuuuagacaca

SEQ ID NO: 82074 - RNA, 32 nt, Homo Sapiens
gcuuaaucuggaacauaauuaaacauccuaca

SEQ ID NO: 82075 - RNA, 32 nt, Homo Sapiens
gggcccugacuucuugccuucgucucaaauag

SEQ ID NO: 82076 - RNA, 32 nt, Homo Sapiens
gcgcggcccccuccucccaggggagaguagaa

SEQ ID NO: 82077 - RNA, 32 nt, Homo Sapiens
agcuggagcugaucgugcgcgcggaggaugga

SEQ ID NO: 82078 - RNA, 32 nt, Homo Sapiens
ggagcugccagaaugucuucugcucagugccc

SEQ ID NO: 82079 - RNA, 32 nt, Homo Sapiens
ucagcagauaacuuauuuuaagaaucaaccug

SEQ ID NO: 82080 - RNA, 32 nt, Homo Sapiens
ucucaugccccugcagggccccggccugucua

SEQ ID NO: 82081 - RNA, 32 nt, Homo Sapiens
cacuggaaaaaauaaacuuaauuuuucaguag

SEQ ID NO: 82082 - RNA, 32 nt, Homo Sapiens
cgaggugugaaugacagagguggugccaucca

SEQ ID NO: 82083 - RNA, 32 nt, Homo Sapiens
agguuguuauuuacacagauggcuucccacag

SEQ ID NO: 82084 - RNA, 32 nt, Homo Sapiens
gacccacagaauaaauauguaagguuauuuug

SEQ ID NO: 82085 - RNA, 32 nt, Homo Sapiens
ccggcuggccuggccccucagggucccuggug

SEQ ID NO: 82086 - RNA, 32 nt, Homo Sapiens
auuucuccuaguauuucuuuguuaugucccag

SEQ ID NO: 82087 - RNA, 32 nt, Homo Sapiens
aaagcuauuuaugggccccuggcacucuuguu

SEQ ID NO: 82088 - RNA, 32 nt, Homo Sapiens
cucccacccagcgccucccagugguuuccugc

SEQ ID NO: 82089 - RNA, 32 nt, Homo Sapiens
cccagagggguggucaccccacccuucagggg

SEQ ID NO: 82090 - RNA, 32 nt, Homo Sapiens
aaacuugaaagaaaacaaaaccuguccccaga

SEQ ID NO: 82091 - RNA, 32 nt, Homo Sapiens
gcaucgcaaccugggccucagcaugcugcugc

SEQ ID NO: 82092 - RNA, 32 nt, Homo Sapiens
uuccccggcggguugggaggggcaggaggugg

SEQ ID NO: 82093 - RNA, 32 nt, Homo Sapiens
auuuucaaaaauuuguacaugauauacaccac

SEQ ID NO: 82094 - RNA, 32 nt, Homo Sapiens
auuaguagagaaaacuaaagauuuagaagaaa

SEQ ID NO: 82095 - RNA, 32 nt, Homo Sapiens
ggggccuggccuaccucccccauccccugcuu

SEQ ID NO: 82096 - RNA, 32 nt, Homo Sapiens
cuuccggagaacucaagcucccgauugugccc

SEQ ID NO: 82097 - RNA, 28 nt, Homo Sapiens
acuaugaccaccaaagauuauccaucau

SEQ ID NO: 82098 - RNA, 32 nt, Homo Sapiens
uaggucgcucuggggcuaucaggccagcaugg

SEQ ID NO: 82099 - RNA, 32 nt, Homo Sapiens
guauugauuauacaaauaauuauuuaacaugu

SEQ ID NO: 82100 - RNA, 32 nt, Homo Sapiens
ggccuguggggcuggaggaucccaggcaaggu

SEQ ID NO: 82101 - RNA, 32 nt, Homo Sapiens
cuaggcccaagcccaggcccaggccuguguuc

SEQ ID NO: 82102 - RNA, 32 nt, Homo Sapiens
cggggcccaagcagguaggagggucagaaagg

SEQ ID NO: 82103 - RNA, 32 nt, Homo Sapiens
uuuuauuuaacccuauauauugugacuuacuu

SEQ ID NO: 82104 - RNA, 30 nt, Homo Sapiens
cggacaaaagcgggcggcggcggcaggaug

SEQ ID NO: 82105 - RNA, 32 nt, Homo Sapiens
ucucaccucuaccccaaauaccucuguucuua

SEQ ID NO: 82106 - RNA, 32 nt, Homo Sapiens
aaggggugggcauuggggugccaggcaggcau

SEQ ID NO: 82107 - RNA, 32 nt, Homo Sapiens
ugucuuacaauuuuuaauuguuuaaaagaagg

SEQ ID NO: 82108 - RNA, 32 nt, Homo Sapiens
gagguaacggaaucaugggggcuggucuuucc

SEQ ID NO: 82109 - RNA, 32 nt, Homo Sapiens
cuaagaguagacaaaaucuauaaugaggguuu

SEQ ID NO: 82110 - RNA, 31 nt, Homo Sapiens
cacccugcggacugccugcgggcuugcuugc

SEQ ID NO: 82111 - RNA, 32 nt, Homo Sapiens
ucaggugcaagugccaaagagaauucaaguag

SEQ ID NO: 82112 - RNA, 32 nt, Homo Sapiens
uucaaguguggccggugagcugcggagagcuc

SEQ ID NO: 82113 - RNA, 27 nt, Homo Sapiens
cugugcuauaauuacugguauaaauau

SEQ ID NO: 82114 - RNA, 31 nt, Homo Sapiens
ggagccggcggccucucgacggcacgcacuu

SEQ ID NO: 82115 - RNA, 32 nt, Homo Sapiens
cuucucaggcuccuccucuccccuugcggccu

SEQ ID NO: 82116 - RNA, 32 nt, Homo Sapiens
uggggccagaaggaguugcugagaaggagcug

SEQ ID NO: 82117 - RNA, 32 nt, Homo Sapiens
ucugcccucaugcgcauccucacgcgcucccg

SEQ ID NO: 82118 - RNA, 32 nt, Homo Sapiens
cccaucccaaccccagcucacuagccuucaua

SEQ ID NO: 82119 - RNA, 32 nt, Homo Sapiens
caucuuuauguccccuuuaucuccaacuucua

SEQ ID NO: 82120 - RNA, 32 nt, Homo Sapiens
caggaugguauuuggaggugggaccuuuggga

SEQ ID NO: 82121 - RNA, 32 nt, Homo Sapiens
cggcggaggugcagguccuggugcucgguggu

SEQ ID NO: 82122 - RNA, 32 nt, Homo Sapiens
ggaggaacucaaccaucaaaauguggacagca

SEQ ID NO: 82123 - RNA, 32 nt, Homo Sapiens
ugcagcugggagagcugcuugucuguccguca

SEQ ID NO: 82124 - RNA, 32 nt, Homo Sapiens
cuuuuucuaauccaugaaggccaucuuguaga

SEQ ID NO: 82125 - RNA, 32 nt, Homo Sapiens
ggccgccccccgcgccgccaucuuacauccgg

SEQ ID NO: 82126 - RNA, 32 nt, Homo Sapiens
cuuuuuacugucaucuauuauuuuaacaggag

SEQ ID NO: 82127 - RNA, 32 nt, Homo Sapiens
uguuuucuuuuucuuucuuaaaaaaaaaugug

SEQ ID NO: 82128 - RNA, 32 nt, Homo Sapiens
ucccaauuucugaguuacauuuagauaucaua

SEQ ID NO: 82129 - RNA, 32 nt, Homo Sapiens
agucauugugucugaaaacugcaaagugaacu

SEQ ID NO: 82130 - RNA, 32 nt, Homo Sapiens
acgcgccggcggcgccuuugccugggggagcg

SEQ ID NO: 82131 - RNA, 32 nt, Homo Sapiens
agaagcgagaugagcgcagugugaagagcaca

SEQ ID NO: 82132 - RNA, 32 nt, Homo Sapiens
ccauuuccagcaugcaggugacuuccaaagaa

SEQ ID NO: 82133 - RNA, 32 nt, Homo Sapiens
cacccuccuaccuguucaguacucaucugauu

SEQ ID NO: 82134 - RNA, 32 nt, Homo Sapiens
aagaaucagaauuuaaaugcccaagggacacu

SEQ ID NO: 82135 - RNA, 32 nt, Homo Sapiens
gaccauuguaacaauagcacaauaaagcacug

SEQ ID NO: 82136 - RNA, 32 nt, Homo Sapiens
acccuccaccccacccauuaaugacuugagug

SEQ ID NO: 82137 - RNA, 32 nt, Homo Sapiens
ucgcgggccgaggacgccucuggggcggcacc

SEQ ID NO: 82138 - RNA, 32 nt, Homo Sapiens
agaccuggaaguuuuagccuagcuguucucaa

SEQ ID NO: 82139 - RNA, 32 nt, Homo Sapiens
cuguugccuaacagaagcuugcaugcgauuag

SEQ ID NO: 82140 - RNA, 31 nt, Homo Sapiens
aaaauguagguccucgcaggagcucuucuuc

SEQ ID NO: 82141 - RNA, 32 nt, Homo Sapiens
acuccuuucauaucaagacaaguuauuuguaa

SEQ ID NO: 82142 - RNA, 32 nt, Homo Sapiens
aagaagaaacaaaagaaagcaucaugaugaau

SEQ ID NO: 82143 - RNA, 32 nt, Homo Sapiens
cuacauggacauuugggggccacugcagcccc

SEQ ID NO: 82144 - RNA, 32 nt, Homo Sapiens
uccacgcggugugcgcugacacugccgggggg

SEQ ID NO: 82145 - RNA, 32 nt, Homo Sapiens
agcuaaaaauuaaauauagacaaucauacauc

SEQ ID NO: 82146 - RNA, 32 nt, Homo Sapiens
aaucuggcuuacgugcacguccagucauagua

SEQ ID NO: 82147 - RNA, 32 nt, Homo Sapiens
caugucccguauucugggucccugguugaagc

SEQ ID NO: 82148 - RNA, 32 nt, Homo Sapiens
caggagcaucuggcagaguggggggcguggca

SEQ ID NO: 82149 - RNA, 32 nt, Homo Sapiens
gggcagaaaaggacaagucggcagccgcuguc

SEQ ID NO: 82150 - RNA, 32 nt, Homo Sapiens
ggacgcagacaaucggcacauugugagcaggg

SEQ ID NO: 82151 - RNA, 32 nt, Homo Sapiens
aggaaagcagcaugcauugucuguacaaaugu

SEQ ID NO: 82152 - RNA, 32 nt, Homo Sapiens
agcgagaugguaguucugccugguuugcaguc

SEQ ID NO: 82153 - RNA, 32 nt, Homo Sapiens
ucuuguauuauaggauuuuucuuguucugaau

SEQ ID NO: 82154 - RNA, 32 nt, Homo Sapiens
cccagugccugccagggccuggaguggagguu

SEQ ID NO: 82155 - RNA, 32 nt, Homo Sapiens
gacucagccccaaccgggagccaggcagaaaa

SEQ ID NO: 82156 - RNA, 32 nt, Homo Sapiens
ugggagccacugggcaauugccagggcuccag

SEQ ID NO: 82157 - RNA, 32 nt, Homo Sapiens
aggcucuguuuucuaugguugggauaacaugg

SEQ ID NO: 82158 - RNA, 32 nt, Homo Sapiens
cagacuuugauuacuacuuauuuaaaauggaa

SEQ ID NO: 82159 - RNA, 32 nt, Homo Sapiens
uugaaaaauaccauaauggcauuugagacuga

SEQ ID NO: 82160 - RNA, 32 nt, Homo Sapiens
ccgccucuggguuugcugaugaucucucuccg

SEQ ID NO: 82161 - RNA, 32 nt, Homo Sapiens
cuccuugaaaauugaggccuuuucgauaguuu

SEQ ID NO: 82162 - RNA, 32 nt, Homo Sapiens
uggagggaggggcugccugggguaucuggggg

SEQ ID NO: 82163 - RNA, 32 nt, Homo Sapiens
gggcucggacgcccccucggaugaaugggacc

SEQ ID NO: 82164 - RNA, 32 nt, Homo Sapiens
auauguggguggggggcggggggcagguggcu

SEQ ID NO: 82165 - RNA, 32 nt, Homo Sapiens
agggagcaaguuauuucuuuuuuuuugacacg

SEQ ID NO: 82166 - RNA, 32 nt, Homo Sapiens
uuaccgugacuccugcccuuggagggcaugua

SEQ ID NO: 82167 - RNA, 32 nt, Homo Sapiens
uucuaaaaauuugcaagucaaguaaguguggg

SEQ ID NO: 82168 - RNA, 32 nt, Homo Sapiens
gcaagaauaugaaauguaaaucuuuauugauu

SEQ ID NO: 82169 - RNA, 32 nt, Homo Sapiens
gccgucccauggcuuccaucugagccaccucg

SEQ ID NO: 82170 - RNA, 32 nt, Homo Sapiens
ccgaagcccaggcacauguauuuugcaaaacu

SEQ ID NO: 82171 - RNA, 32 nt, Homo Sapiens
gcauccccacguccauucucucauggaacccu

SEQ ID NO: 82172 - RNA, 32 nt, Homo Sapiens
auuguaguuuugcugcucauccuauuuucucc

SEQ ID NO: 82173 - RNA, 32 nt, Homo Sapiens
ccagaucuuuugcacaaaucccaccugugcuc

SEQ ID NO: 82174 - RNA, 32 nt, Homo Sapiens
caauagggauguuuuuaauaaacucuauuuuc

SEQ ID NO: 82175 - RNA, 32 nt, Homo Sapiens
cccaaacacuggcaacaaccacuuccucaaca

SEQ ID NO: 82176 - RNA, 30 nt, Homo Sapiens
cccccagggcccgugcugcggcaagggcaa

SEQ ID NO: 82177 - RNA, 32 nt, Homo Sapiens
acaaaguucuuugugcuuuucugcugcauaug

SEQ ID NO: 82178 - RNA, 32 nt, Homo Sapiens
aaaggagacaggaacaaggaaaaguugagguu

SEQ ID NO: 82179 - RNA, 32 nt, Homo Sapiens
agccagaccagagggacucagacaccaccgau

SEQ ID NO: 82180 - RNA, 32 nt, Homo Sapiens
agccugggagcgcacagcgucugcgcccgccg

SEQ ID NO: 82181 - RNA, 32 nt, Homo Sapiens
ugaugccagcaccaccugggcugggcccuggg

SEQ ID NO: 82182 - RNA, 32 nt, Homo Sapiens
ucaagucccaccaguucugcucucccaucaag

SEQ ID NO: 82183 - RNA, 32 nt, Homo Sapiens
auuuucucucugagguucugcauuagauuuga

SEQ ID NO: 82184 - RNA, 31 nt, Homo Sapiens
gcaagagaauaaaaaucauguguuauuaaac

SEQ ID NO: 82185 - RNA, 28 nt, Homo Sapiens
uaaggaauggugagaaggaugacuugcc

SEQ ID NO: 82186 - RNA, 32 nt, Homo Sapiens
gauaagauuuuccuugaauccaaacacacaca

SEQ ID NO: 82187 - RNA, 32 nt, Homo Sapiens
ucaaaggaaaacagaaguugugaguucuucug

SEQ ID NO: 82188 - RNA, 32 nt, Homo Sapiens
accauuuugacccaggaauuuuucauaguuuc

SEQ ID NO: 82189 - RNA, 31 nt, Homo Sapiens
agcggcugccgcugccugcaucucgugugcc

SEQ ID NO: 82190 - RNA, 32 nt, Homo Sapiens
gguccucccuccccagaccccagagggagagg

SEQ ID NO: 82191 - RNA, 32 nt, Homo Sapiens
gagaggucauaucuguuuuucuuuaucauuca

SEQ ID NO: 82192 - RNA, 32 nt, Homo Sapiens
gaauguacaaaauaaaaucauucucuucacag

SEQ ID NO: 82193 - RNA, 32 nt, Homo Sapiens
agguuacauguaguuugaaauaagguauccug

SEQ ID NO: 82194 - RNA, 32 nt, Homo Sapiens
ccuucucuuggcucagccacucugggaggugg

SEQ ID NO: 82195 - RNA, 32 nt, Homo Sapiens
gggcgccugagggccaggcgccagggccgugg

SEQ ID NO: 82196 - RNA, 32 nt, Homo Sapiens
ggucauuauguucaaugaaauaugucaggaca

SEQ ID NO: 82197 - RNA, 32 nt, Homo Sapiens
agcggagccuccucaccuccguugccagcgaa

SEQ ID NO: 82198 - RNA, 32 nt, Homo Sapiens
cuugcuagcccaggaagaaacuuacauuuuga

SEQ ID NO: 82199 - RNA, 32 nt, Homo Sapiens
ccagggugucccggagcccuggaccgugcugg

SEQ ID NO: 82200 - RNA, 32 nt, Homo Sapiens
auggagcucuacuuaugggcauucuggggcuu

SEQ ID NO: 82201 - RNA, 32 nt, Homo Sapiens
aagagauguuauauucuuuucuuauuucuucc

SEQ ID NO: 82202 - RNA, 32 nt, Homo Sapiens
uuacaguuugucucuaacaugaaacagcaaga

SEQ ID NO: 82203 - RNA, 32 nt, Homo Sapiens
cacuaccuccgcccccgcccccgcccccgccc

SEQ ID NO: 82204 - RNA, 32 nt, Homo Sapiens
gucgcucgcgugggaguuuuguguguacguug

SEQ ID NO: 82205 - RNA, 32 nt, Homo Sapiens
agagcuggaguaaggaccuggguguggguggu

SEQ ID NO: 82206 - RNA, 32 nt, Homo Sapiens
ucaaguggauucaagcuaaaauacuaagacca

SEQ ID NO: 82207 - RNA, 32 nt, Homo Sapiens
ccccuccaggaagaagcaggggggaaucuauu

SEQ ID NO: 82208 - RNA, 32 nt, Homo Sapiens
cucgucaggcccagcucuccugcgccgccgcc

SEQ ID NO: 82209 - RNA, 32 nt, Homo Sapiens
ccaccccuugagucucagcaguguuaaagcug

SEQ ID NO: 82210 - RNA, 32 nt, Homo Sapiens
uuuauuuuuacuauuuaaguuuggaaaugaug

SEQ ID NO: 82211 - RNA, 32 nt, Homo Sapiens
ucuucugagcaagagaaggggaggcgggguaa

SEQ ID NO: 82212 - RNA, 32 nt, Homo Sapiens
cuggaugcuuugccgaaagcagcuuggcuugg

SEQ ID NO: 82213 - RNA, 32 nt, Homo Sapiens
uuuuaaaauacaucuaaacaaacaguugagaa

SEQ ID NO: 82214 - RNA, 32 nt, Homo Sapiens
gguguggacccugagggugcgguggugagcac

SEQ ID NO: 82215 - RNA, 32 nt, Homo Sapiens
augucauuugcguaucucugagaacaauagcu

SEQ ID NO: 82216 - RNA, 32 nt, Homo Sapiens
cuguaguuuuaacuucacauugauggacaagg

SEQ ID NO: 82217 - RNA, 32 nt, Homo Sapiens
auguggcugcugucacccuugaccagccgugg

SEQ ID NO: 82218 - RNA, 32 nt, Homo Sapiens
gcucuagcggcaaccucuagccaggagcccag

SEQ ID NO: 82219 - RNA, 32 nt, Homo Sapiens
ggaggcagagccaggccuccucaaguuggccu

SEQ ID NO: 82220 - RNA, 32 nt, Homo Sapiens
ucaggggcucuuauguggaaauccauacguaa

SEQ ID NO: 82221 - RNA, 32 nt, Homo Sapiens
uugaccugcuccgggccgcgggccgccaaugg

SEQ ID NO: 82222 - RNA, 32 nt, Homo Sapiens
accccuccccucccacccacagccauagaccu

SEQ ID NO: 82223 - RNA, 32 nt, Homo Sapiens
cuggguacccggggcggcucggcggccgggcu

SEQ ID NO: 82224 - RNA, 32 nt, Homo Sapiens
accauuuuaggaauuagaaaaaucaacauggg

SEQ ID NO: 82225 - RNA, 32 nt, Homo Sapiens
uuuuccgggccgggcgcacuaaggugcgcggc

SEQ ID NO: 82226 - RNA, 32 nt, Homo Sapiens
ccuuccugcagauggcuucucaaacucgggca

SEQ ID NO: 82227 - RNA, 32 nt, Homo Sapiens
aacuuugugaaugcaccauuuugaugaucaug

SEQ ID NO: 82228 - RNA, 32 nt, Homo Sapiens
ccggggcagagcggaggcugggcuuggccagg

SEQ ID NO: 82229 - RNA, 32 nt, Homo Sapiens
uuuagucaauuuuggaucgcuuugacuucucc

SEQ ID NO: 82230 - RNA, 29 nt, Homo Sapiens
ggggcugucgauuuccugccaccugggca

SEQ ID NO: 82231 - RNA, 32 nt, Homo Sapiens
gguuccacucuggccugggccugaggccagcg

SEQ ID NO: 82232 - RNA, 32 nt, Homo Sapiens
uggucuuggaagcucaucagaauguuuagagc

SEQ ID NO: 82233 - RNA, 32 nt, Homo Sapiens
agcuguuuaaucuauuugggaaaugaagaugc

SEQ ID NO: 82234 - RNA, 32 nt, Homo Sapiens
caguaacuugaucaucacugagauguauuuau

SEQ ID NO: 82235 - RNA, 32 nt, Homo Sapiens
aauuuguuuuaacguuaaauuguaguuugcug

SEQ ID NO: 82236 - RNA, 32 nt, Homo Sapiens
agccuacuggguggaggcugggggucccagca

SEQ ID NO: 82237 - RNA, 32 nt, Homo Sapiens
uacaucccuggcacugguuguuuucugugaaa

SEQ ID NO: 82238 - RNA, 32 nt, Homo Sapiens
cgucauugccaccccugacaccaucuaaucca

SEQ ID NO: 82239 - RNA, 32 nt, Homo Sapiens
cagcucaagcccccuuccuugcucuggacccc

SEQ ID NO: 82240 - RNA, 30 nt, Homo Sapiens
ccuaggaguaaaagacugaugugaauuugc

SEQ ID NO: 82241 - RNA, 32 nt, Homo Sapiens
uggugcuucccugccuggcccuggagggagcu

SEQ ID NO: 82242 - RNA, 32 nt, Homo Sapiens
ggagaguggguggggacacacccagagacugg

SEQ ID NO: 82243 - RNA, 32 nt, Homo Sapiens
ugucuggagucuuuugccaucuggaucuuagu

SEQ ID NO: 82244 - RNA, 32 nt, Homo Sapiens
acacaaggaaaugccccagauucuccuuuaaa

SEQ ID NO: 82245 - RNA, 32 nt, Homo Sapiens
cccugcacccucggggcugagucagaucuggg

SEQ ID NO: 82246 - RNA, 32 nt, Homo Sapiens
gaaauguagaaaguagaaaguguaagucccug

SEQ ID NO: 82247 - RNA, 32 nt, Homo Sapiens
gauguacugguaaacuagaaacaaagaaugca

SEQ ID NO: 82248 - RNA, 32 nt, Homo Sapiens
uuucagauaaacuauuacaauaaagaaaggag

SEQ ID NO: 82249 - RNA, 32 nt, Homo Sapiens
aaagacuugggaacagaugcugcuuguguugc

SEQ ID NO: 82250 - RNA, 32 nt, Homo Sapiens
uuggugcgggccacggggaggggaccgggaag

SEQ ID NO: 82251 - RNA, 24 nt, Homo Sapiens
ugucaggagacuacgaggaugacc

SEQ ID NO: 82252 - RNA, 32 nt, Homo Sapiens
gugcagaauuccugguucugagcaggugccca

SEQ ID NO: 82253 - RNA, 32 nt, Homo Sapiens
ccccgcgcaagcgcaaccccuggcgagcgacg

SEQ ID NO: 82254 - RNA, 32 nt, Homo Sapiens
ugucauagauguauucucuggugaggguggcu

SEQ ID NO: 82255 - RNA, 32 nt, Homo Sapiens
ugcuggcuggaacucccggaggacucugugag

SEQ ID NO: 82256 - RNA, 32 nt, Homo Sapiens
cucucccacccucuccuccccuugcgcucgcg

SEQ ID NO: 82257 - RNA, 32 nt, Homo Sapiens
ugagcccuagaagagugugaaaaggaauggca

SEQ ID NO: 82258 - RNA, 32 nt, Homo Sapiens
aagagaugguggcccaauugagaggggaaaau

SEQ ID NO: 82259 - RNA, 32 nt, Homo Sapiens
uccagucagaucuuuuguugccaaagaucaua

SEQ ID NO: 82260 - RNA, 30 nt, Homo Sapiens
aaggagcgcgcgcugggccugcagcggaaa

SEQ ID NO: 82261 - RNA, 32 nt, Homo Sapiens
ccaaaggcauucuccuuuuguaccuacaguau

SEQ ID NO: 82262 - RNA, 32 nt, Homo Sapiens
ggaagauagaaagguagaagccaucaugcaug

SEQ ID NO: 82263 - RNA, 32 nt, Homo Sapiens
ugcggccgggcuggcagagggcccggccccug

SEQ ID NO: 82264 - RNA, 32 nt, Homo Sapiens
caucacuggugcccaccuugggaauucccagg

SEQ ID NO: 82265 - RNA, 32 nt, Homo Sapiens
ccagccccaagauggugaugcugcugcugcug

SEQ ID NO: 82266 - RNA, 32 nt, Homo Sapiens
cggcgcgcacgcugcgcuccuuccccuggcag

SEQ ID NO: 82267 - RNA, 32 nt, Homo Sapiens
gcggacgcguggguuuuuccuuucuuccagaa

SEQ ID NO: 82268 - RNA, 32 nt, Homo Sapiens
auaggaauuuguauaaagcauuacucuuuuuc

SEQ ID NO: 82269 - RNA, 32 nt, Homo Sapiens
ggaugugaaaagacagaacagcuucaccauua

SEQ ID NO: 82270 - RNA, 28 nt, Homo Sapiens
cagauggggcggcuggccgggagggggg

SEQ ID NO: 82271 - RNA, 32 nt, Homo Sapiens
augaguccagcuuuuuaauuuaacagaauaga

SEQ ID NO: 82272 - RNA, 32 nt, Homo Sapiens
cuaaaggaugagauuuuucauguaucuuauag

SEQ ID NO: 82273 - RNA, 32 nt, Homo Sapiens
cgcaucugccccuccaccccagccagcucaug

SEQ ID NO: 82274 - RNA, 32 nt, Homo Sapiens
ggacagaaggcuccugcccccauaguggccuc

SEQ ID NO: 82275 - RNA, 32 nt, Homo Sapiens
cggaggacugagcccccaccggaacugggcug

SEQ ID NO: 82276 - RNA, 32 nt, Homo Sapiens
cauugcaagaguaaaacuuauuuagagcuaca

SEQ ID NO: 82277 - RNA, 32 nt, Homo Sapiens
aacagcccgcccgaccccgucccgacccuggc

SEQ ID NO: 82278 - RNA, 32 nt, Homo Sapiens
cguguccuguaguugcguggacucugcacaug

SEQ ID NO: 82279 - RNA, 32 nt, Homo Sapiens
ggugucuuggggauuuggugcacacaagacca

SEQ ID NO: 82280 - RNA, 32 nt, Homo Sapiens
auaaaaaucuuacuuccucuauucucugagcc

SEQ ID NO: 82281 - RNA, 32 nt, Homo Sapiens
ggcgaguuccaucaccagcauuauuauagugc

SEQ ID NO: 82282 - RNA, 32 nt, Homo Sapiens
cguguuccuaaaacauguuugaaaggugaauu

SEQ ID NO: 82283 - RNA, 32 nt, Homo Sapiens
ugccccaaugaacaucugcacuaggcccaagc

SEQ ID NO: 82284 - RNA, 32 nt, Homo Sapiens
gacuugcccagcugcccgguggugcccccgac

SEQ ID NO: 82285 - RNA, 32 nt, Homo Sapiens
uguuucuuaaguuucauuuuuaauuuucaaau

SEQ ID NO: 82286 - RNA, 32 nt, Homo Sapiens
cccucuacccucacucacagcagagguggaaa

SEQ ID NO: 82287 - RNA, 32 nt, Homo Sapiens
cucccgcagaauguggaugacgcccaaaagaa

SEQ ID NO: 82288 - RNA, 32 nt, Homo Sapiens
uagaaauaaaaugguguaaauaaagaccuugc

SEQ ID NO: 82289 - RNA, 32 nt, Homo Sapiens
cuauuuggaagacacugcauuuuagccagugu

SEQ ID NO: 82290 - RNA, 32 nt, Homo Sapiens
ugugcugaaccccugcccuuucauucuugggc

SEQ ID NO: 82291 - RNA, 32 nt, Homo Sapiens
auacguauauauacacgugugguucuauuuag

SEQ ID NO: 82292 - RNA, 32 nt, Homo Sapiens
guaccucuucucugcccuccacuucccugccc

SEQ ID NO: 82293 - RNA, 32 nt, Homo Sapiens
uggaagagggcgacauccuguacaccauguac

SEQ ID NO: 82294 - RNA, 32 nt, Homo Sapiens
ucccuggcgagggcacuggcggcggcggggcc

SEQ ID NO: 82295 - RNA, 32 nt, Homo Sapiens
aagcaaagaugcuguuaauguuaugauggugc

SEQ ID NO: 82296 - RNA, 32 nt, Homo Sapiens
cccaggugauugugaagugcugaccaauugcc

SEQ ID NO: 82297 - RNA, 32 nt, Homo Sapiens
ggagggaggggaggggugaaauccauacugua

SEQ ID NO: 82298 - RNA, 32 nt, Homo Sapiens
aucaauuuuugucacagcauuuucauaccuuc

SEQ ID NO: 82299 - RNA, 32 nt, Homo Sapiens
gccuggccaggccacaccccuugcugucucag

SEQ ID NO: 82300 - RNA, 32 nt, Homo Sapiens
uuagucucccagccuacaucuuucucccaugc

SEQ ID NO: 82301 - RNA, 32 nt, Homo Sapiens
cccuggggaucagaaaggugggcuugcuggag

SEQ ID NO: 82302 - RNA, 32 nt, Homo Sapiens
gaccuucucaucccagcaaacauccaauggag

SEQ ID NO: 82303 - RNA, 32 nt, Homo Sapiens
ugcaugaccuuuuaaccuuugacuuugcuuau

SEQ ID NO: 82304 - RNA, 32 nt, Homo Sapiens
cuagacaauuaaaggaauauaaacuccagugg

SEQ ID NO: 82305 - RNA, 32 nt, Homo Sapiens
caggagaggagagggcggcggcggcgguggga

SEQ ID NO: 82306 - RNA, 32 nt, Homo Sapiens
gaagaagcaugggauuuaaauauuuuacuucu

SEQ ID NO: 82307 - RNA, 32 nt, Homo Sapiens
cucugagugaagcugccagagcccuccucagu

SEQ ID NO: 82308 - RNA, 32 nt, Homo Sapiens
uaaaucauuauagcuuuuguauaauaagagua

SEQ ID NO: 82309 - RNA, 32 nt, Homo Sapiens
uuggacucugggguccuuguccugcucaggca

SEQ ID NO: 82310 - RNA, 32 nt, Homo Sapiens
aacauauauuuuauguaaaaacacauacaugg

SEQ ID NO: 82311 - RNA, 32 nt, Homo Sapiens
ccuuauucuaauaaguuucuucugucuguuuu

SEQ ID NO: 82312 - RNA, 32 nt, Homo Sapiens
ggaaccggcgcgcgcguaggggcugggaggcc

SEQ ID NO: 82313 - RNA, 32 nt, Homo Sapiens
guccgacuggcggcacggaggcggcggcggcg

SEQ ID NO: 82314 - RNA, 32 nt, Homo Sapiens
ccggcucuccaagugauucuguucuucuccau

SEQ ID NO: 82315 - RNA, 32 nt, Homo Sapiens
accugggcucccagcccccggcugccaaggac

SEQ ID NO: 82316 - RNA, 32 nt, Homo Sapiens
ggggagcagcuugguccaugugccuucagggg

SEQ ID NO: 82317 - RNA, 32 nt, Homo Sapiens
ccaccaaauaccagggagugaaggauagugau

SEQ ID NO: 82318 - RNA, 32 nt, Homo Sapiens
ugaugcugagcagggagggggcugccaggcug

SEQ ID NO: 82319 - RNA, 32 nt, Homo Sapiens
ccuaggaaaucaaaauaauguuuugaaguucu

SEQ ID NO: 82320 - RNA, 32 nt, Homo Sapiens
aggggacaccucacucggggccccgcggcagc

SEQ ID NO: 82321 - RNA, 32 nt, Homo Sapiens
ggccacugccagcacugggguggcagccugcc

SEQ ID NO: 82322 - RNA, 32 nt, Homo Sapiens
uuguguucagaaaugaauaaauggaaugcccu

SEQ ID NO: 82323 - RNA, 32 nt, Homo Sapiens
ugaggcagaaacaaaauccucgguaacauuga

SEQ ID NO: 82324 - RNA, 32 nt, Homo Sapiens
cuuuuaggugcuuuugucaucucccggaguau

SEQ ID NO: 82325 - RNA, 32 nt, Homo Sapiens
ugugcgagaaagugaaaaugccacucucucca

SEQ ID NO: 82326 - RNA, 32 nt, Homo Sapiens
ugcugcucuuugcgguuuguugauccccuccu

SEQ ID NO: 82327 - RNA, 32 nt, Homo Sapiens
gcuuugauacucuggaggagaaguuaacucaa

SEQ ID NO: 82328 - RNA, 32 nt, Homo Sapiens
ccagggccauggcggaggagcagggccgggaa

SEQ ID NO: 82329 - RNA, 32 nt, Homo Sapiens
gggcagcugcuggccuggauccgaguccugcc

SEQ ID NO: 82330 - RNA, 32 nt, Homo Sapiens
ugacucagggucccgaggccagagacaaagcu

SEQ ID NO: 82331 - RNA, 32 nt, Homo Sapiens
caguaagagauuaaugacaauaauaaaauaga

SEQ ID NO: 82332 - RNA, 32 nt, Homo Sapiens
uaucugccucuccacacaccagcccuuuccuu

SEQ ID NO: 82333 - RNA, 32 nt, Homo Sapiens
auuuauucuguaagugccaaguuguuuguaaa

SEQ ID NO: 82334 - RNA, 32 nt, Homo Sapiens
ucaacuugaugaugaacagcaggaagccuuac

SEQ ID NO: 82335 - RNA, 32 nt, Homo Sapiens
ccgccgaggaagagacccccgcuccagcccgc

SEQ ID NO: 82336 - RNA, 32 nt, Homo Sapiens
gcugccuuccccagcccaguuugucugcaaug

SEQ ID NO: 82337 - RNA, 32 nt, Homo Sapiens
gaagagaaagacugaaggagacacucauuucc

SEQ ID NO: 82338 - RNA, 32 nt, Homo Sapiens
uugcuguuaacacaauucucugaugcggugcu

SEQ ID NO: 82339 - RNA, 32 nt, Homo Sapiens
auuucuucucaaaggguacuuccacugaugga

SEQ ID NO: 82340 - RNA, 32 nt, Homo Sapiens
aaaguguucauuuacauagguaauggagaccu

SEQ ID NO: 82341 - RNA, 32 nt, Homo Sapiens
uguggcccgugucugccggcccgagucccggc

SEQ ID NO: 82342 - RNA, 32 nt, Homo Sapiens
cggcagcggcgguuaggggauguaacggucgc

SEQ ID NO: 82343 - RNA, 32 nt, Homo Sapiens
ccacaguguugcagauugccuggcuggcagca

SEQ ID NO: 82344 - RNA, 32 nt, Homo Sapiens
uuguugcuuucuuuucuauugagucugggcuu

SEQ ID NO: 82345 - RNA, 32 nt, Homo Sapiens
gagaaaggagucauacuugugaagacuuuuau

SEQ ID NO: 82346 - RNA, 32 nt, Homo Sapiens
guuauuaguagguagucauuaacauguuuaag

SEQ ID NO: 82347 - RNA, 32 nt, Homo Sapiens
aggaaauggugcauucuuaaagccccagucuc

SEQ ID NO: 82348 - RNA, 32 nt, Homo Sapiens
auuaacucuauuauuauuaccuuguauuauua

SEQ ID NO: 82349 - RNA, 32 nt, Homo Sapiens
cuuaaugguuacaacucccaccccaccaaagu

SEQ ID NO: 82350 - RNA, 32 nt, Homo Sapiens
cacaaugcagugccuuucuucucuccagugca

SEQ ID NO: 82351 - RNA, 32 nt, Homo Sapiens
cucuaauugcaaagugacuguacaauaggacg

SEQ ID NO: 82352 - RNA, 32 nt, Homo Sapiens
cugcgccccgacggacgcccgugcccagcuug

SEQ ID NO: 82353 - RNA, 32 nt, Homo Sapiens
gguccgccguccauuccacaccucugagcgcc

SEQ ID NO: 82354 - RNA, 32 nt, Homo Sapiens
ccgcgggacgcaugcgcacggcggacggaggc

SEQ ID NO: 82355 - RNA, 32 nt, Homo Sapiens
ugaugacgaugaugaugaauacccaacuccaa

SEQ ID NO: 82356 - RNA, 32 nt, Homo Sapiens
uuucugaaggauucagugacuugcuuucugua

SEQ ID NO: 82357 - RNA, 32 nt, Homo Sapiens
acuuuuuuuuuuauuucaauauauacaguuug

SEQ ID NO: 82358 - RNA, 32 nt, Homo Sapiens
auuuuccuccugccggccaccgacuccuacuc

SEQ ID NO: 82359 - RNA, 32 nt, Homo Sapiens
cccuucuucgaagucuguaaauuuaaaauccu

SEQ ID NO: 82360 - RNA, 32 nt, Homo Sapiens
ccccacaagaacucccuucuccccucagccaa

SEQ ID NO: 82361 - RNA, 30 nt, Homo Sapiens
ggagaagugggacgucacgcagacagcacu

SEQ ID NO: 82362 - RNA, 32 nt, Homo Sapiens
gccugucuaucccacaucccuguacuggucag

SEQ ID NO: 82363 - RNA, 32 nt, Homo Sapiens
aaaguaauuuuaaugaauuuuuagcuuguauu

SEQ ID NO: 82364 - RNA, 32 nt, Homo Sapiens
caucgugccguggagaguuuugaaauuagaca

SEQ ID NO: 82365 - RNA, 32 nt, Homo Sapiens
ggaguuagacugaugagaaggcaauggggugu

SEQ ID NO: 82366 - RNA, 32 nt, Homo Sapiens
gccuuauggaaauuucuuuuucuguauuuucu

SEQ ID NO: 82367 - RNA, 32 nt, Homo Sapiens
gucagacacagcaccucaggccgcugcucaga

SEQ ID NO: 82368 - RNA, 32 nt, Homo Sapiens
aaaugcagaaaaggaaaugcaugggguuacaa

SEQ ID NO: 82369 - RNA, 32 nt, Homo Sapiens
aguguuccccccauagagaccaggagggagag

SEQ ID NO: 82370 - RNA, 32 nt, Homo Sapiens
cucacuacaaccuugugcugguaagguccuag

SEQ ID NO: 82371 - RNA, 32 nt, Homo Sapiens
cgcccccgccgcgcgccgcugaguugucuggc

SEQ ID NO: 82372 - RNA, 32 nt, Homo Sapiens
acugaagauuuguucauauacuguguauugau

SEQ ID NO: 82373 - RNA, 32 nt, Homo Sapiens
acauguuuccaccccacccccaaccuuguccc

SEQ ID NO: 82374 - RNA, 32 nt, Homo Sapiens
gugggggcggugccggucggagggcuccuagu

SEQ ID NO: 82375 - RNA, 32 nt, Homo Sapiens
ugcaguuucuucaagacaaaaacauuuuugaa

SEQ ID NO: 82376 - RNA, 32 nt, Homo Sapiens
agcuguggguggaggcuggggugucugcacga

SEQ ID NO: 82377 - RNA, 32 nt, Homo Sapiens
ggggccaggggaggggcgggcagguaggugca

SEQ ID NO: 82378 - RNA, 32 nt, Homo Sapiens
caaagggcaaauugugguccagagacaaaagu

SEQ ID NO: 82379 - RNA, 31 nt, Homo Sapiens
gccugcccugccugccugcccugggcgauga

SEQ ID NO: 82380 - RNA, 32 nt, Homo Sapiens
gaucagucgguccugggcuggcugugguguag

SEQ ID NO: 82381 - RNA, 32 nt, Homo Sapiens
aggagauugugauugggagaggguaaggcaaa

SEQ ID NO: 82382 - RNA, 32 nt, Homo Sapiens
uaugaucccuaauucugagacuuacucaucug

SEQ ID NO: 82383 - RNA, 32 nt, Homo Sapiens
gccuccucagucgccgccgccuccucagucgc

SEQ ID NO: 82384 - RNA, 32 nt, Homo Sapiens
ggggagaggggagugcauuuagacuuaugugg

SEQ ID NO: 82385 - RNA, 32 nt, Homo Sapiens
ucucugucucaaccuguguccgugcuccagca

SEQ ID NO: 82386 - RNA, 32 nt, Homo Sapiens
ggagaggaaaucaaacuuucacgauggccgua

SEQ ID NO: 82387 - RNA, 32 nt, Homo Sapiens
gggcugagcgcucuuaaucuccccucuacuug

SEQ ID NO: 82388 - RNA, 32 nt, Homo Sapiens
ggaagaaaauauuuuuaaauggacaauggacu

SEQ ID NO: 82389 - RNA, 32 nt, Homo Sapiens
ugagguguuuauaucccagcucugucaggcau

SEQ ID NO: 82390 - RNA, 32 nt, Homo Sapiens
aguggaagggaagggaggacacaccaagacca

SEQ ID NO: 82391 - RNA, 32 nt, Homo Sapiens
uggaagccuccccagagcucucccaggcuguc

SEQ ID NO: 82392 - RNA, 32 nt, Homo Sapiens
acuuacccuaaaacauguguugccugaaagca

SEQ ID NO: 82393 - RNA, 32 nt, Homo Sapiens
ucuagugaacaaacuauaccuacuuauuugug

SEQ ID NO: 82394 - RNA, 32 nt, Homo Sapiens
auuuuuaucuucaaaacauugcugaaaucaau

SEQ ID NO: 82395 - RNA, 32 nt, Homo Sapiens
agugcugagccagccgugcaaaaggaaaucuu

SEQ ID NO: 82396 - RNA, 32 nt, Homo Sapiens
cacgagugugccacucaccaccauuccuuggc

SEQ ID NO: 82397 - RNA, 32 nt, Homo Sapiens
agauucauuuuucuuaaauuuuggacuuauac

SEQ ID NO: 82398 - RNA, 32 nt, Homo Sapiens
aacagccccguccgccgcuucucuuccuaguu

SEQ ID NO: 82399 - RNA, 32 nt, Homo Sapiens
aaagucucauuucaggaaggagggauagaagg

SEQ ID NO: 82400 - RNA, 32 nt, Homo Sapiens
acuacucuugucuacuuaggucucucucuucu

SEQ ID NO: 82401 - RNA, 29 nt, Homo Sapiens
agaaaucggggacucagggaccgcuugcu

SEQ ID NO: 82402 - RNA, 32 nt, Homo Sapiens
ugaccgaccgacggaggcgccgauuggccgau

SEQ ID NO: 82403 - RNA, 32 nt, Homo Sapiens
gagaggacccucuccgcccacugccgcuggcc

SEQ ID NO: 82404 - RNA, 32 nt, Homo Sapiens
agucgggaaacaagcauagaaauggaagaaag

SEQ ID NO: 82405 - RNA, 32 nt, Homo Sapiens
cagaggccgggcuggaggagaagauggcggcc

SEQ ID NO: 82406 - RNA, 32 nt, Homo Sapiens
ugaacccgcucccacggcacgggaacuccuua

SEQ ID NO: 82407 - RNA, 32 nt, Homo Sapiens
ucucucucucucucuuuuuuuuuacgaaagac

SEQ ID NO: 82408 - RNA, 32 nt, Homo Sapiens
uuagauucuggugagaguuuugacugaauguu

SEQ ID NO: 82409 - RNA, 32 nt, Homo Sapiens
uugccugcccagucuuuggagagcucaguaca

SEQ ID NO: 82410 - RNA, 32 nt, Homo Sapiens
uuaguccucacagccuaggaccaguuuuguau

SEQ ID NO: 82411 - RNA, 32 nt, Homo Sapiens
uccagucgaccccccggcucgcguucccgugg

SEQ ID NO: 82412 - RNA, 32 nt, Homo Sapiens
augcccccgcagaacuggcugcugcgugugaa

SEQ ID NO: 82413 - RNA, 32 nt, Homo Sapiens
ccccucccugaacugcuuucccugagucccuu

SEQ ID NO: 82414 - RNA, 32 nt, Homo Sapiens
caguggccucuuucggcccagcccagcucaug

SEQ ID NO: 82415 - RNA, 32 nt, Homo Sapiens
ucccaccuacagagacccuccccugcccccuc

SEQ ID NO: 82416 - RNA, 32 nt, Homo Sapiens
ucugaaggaaggcugugccaucuuugggcacu

SEQ ID NO: 82417 - RNA, 32 nt, Homo Sapiens
uccacccgauccucgaaccuccggcccaucuc

SEQ ID NO: 82418 - RNA, 32 nt, Homo Sapiens
auucugaacaacuauuuacaaaauuuuauccu

SEQ ID NO: 82419 - RNA, 32 nt, Homo Sapiens
ccagcuuugcagagagcgcccuccagggacua

SEQ ID NO: 82420 - RNA, 32 nt, Homo Sapiens
cgccucagccccagcgccccucggcuacccuc

SEQ ID NO: 82421 - RNA, 32 nt, Homo Sapiens
uuuaauguuugaauucaggacaaaagaaaaaa

SEQ ID NO: 82422 - RNA, 32 nt, Homo Sapiens
cagauccuuguacauuuguucaaaccagggug

SEQ ID NO: 82423 - RNA, 32 nt, Homo Sapiens
guggaccccucccgagauggugucacagugcu

SEQ ID NO: 82424 - RNA, 32 nt, Homo Sapiens
uaacuaaagagaagaaaaguuuuuaucguauu

SEQ ID NO: 82425 - RNA, 32 nt, Homo Sapiens
guuauuguuguuacaaaacaugguccauguga

SEQ ID NO: 82426 - RNA, 32 nt, Homo Sapiens
uuccccuucuaaauaaauaaacuucgagaaua

SEQ ID NO: 82427 - RNA, 32 nt, Homo Sapiens
caucauucacacuggaggauuagaggcaggga

SEQ ID NO: 82428 - RNA, 32 nt, Homo Sapiens
uggugguaggaacgcccuccccgacccucucc

SEQ ID NO: 82429 - RNA, 32 nt, Homo Sapiens
ucucaguguccaguggcuucucuucuccccac

SEQ ID NO: 82430 - RNA, 32 nt, Homo Sapiens
cagggaccccccacccaggggcccugcuccgu

SEQ ID NO: 82431 - RNA, 32 nt, Homo Sapiens
uguggaucuaucuaucugaucaccuuauugaa

SEQ ID NO: 82432 - RNA, 32 nt, Homo Sapiens
ugugugcccucccccuccuuuguguauuccuu

SEQ ID NO: 82433 - RNA, 32 nt, Homo Sapiens
auuuuaaaugacuuuucaguguuuuucauagu

SEQ ID NO: 82434 - RNA, 32 nt, Homo Sapiens
gaccucccgcccccgcugcgcgcguuucuggc

SEQ ID NO: 82435 - RNA, 32 nt, Homo Sapiens
acgccaggcuguccccgcggccgcccggccug

SEQ ID NO: 82436 - RNA, 32 nt, Homo Sapiens
cagagcugagagaucagcggcagggggagcgc

SEQ ID NO: 82437 - RNA, 32 nt, Homo Sapiens
aaauguaguguuucauuggauuuauuuuaugc

SEQ ID NO: 82438 - RNA, 32 nt, Homo Sapiens
auuuacacugcugcuuuucucauauucugcuu

SEQ ID NO: 82439 - RNA, 32 nt, Homo Sapiens
cucuguggugccugcagcaggagccaggaacg

SEQ ID NO: 82440 - RNA, 32 nt, Homo Sapiens
ucccgacgcaauggacccggcgcuggcagccc

SEQ ID NO: 82441 - RNA, 32 nt, Homo Sapiens
guuauuacuuuuuucugaaguggguguuuuau

SEQ ID NO: 82442 - RNA, 32 nt, Homo Sapiens
ucauuucaggcagccagcucuuccucacccac

SEQ ID NO: 82443 - RNA, 32 nt, Homo Sapiens
cccaccgcauuccccaggccaagcugguggcc

SEQ ID NO: 82444 - RNA, 32 nt, Homo Sapiens
ucagucuccuccccaucacccuccucaggccc

SEQ ID NO: 82445 - RNA, 32 nt, Homo Sapiens
aaaagaggggaagagacuuggaaaugggagac

SEQ ID NO: 82446 - RNA, 27 nt, Homo Sapiens
gaucaucacuucuucagccaucucacu

SEQ ID NO: 82447 - RNA, 32 nt, Homo Sapiens
ggggaucuuugucgcuagcucccggcccuucu

SEQ ID NO: 82448 - RNA, 32 nt, Homo Sapiens
agcccaccaucugcuucugagugucgcacuag

SEQ ID NO: 82449 - RNA, 32 nt, Homo Sapiens
gcaaggcuugggaggcggggcccugcaggacg

SEQ ID NO: 82450 - RNA, 32 nt, Homo Sapiens
gauguuguguugucauuuucauuuuugcauuu

SEQ ID NO: 82451 - RNA, 32 nt, Homo Sapiens
gggacuugguuaaauggcucugagagaggcac

SEQ ID NO: 82452 - RNA, 32 nt, Homo Sapiens
gcuccguccacuccacgcaucgaccugguauu

SEQ ID NO: 82453 - RNA, 31 nt, Homo Sapiens
ggaacaugcugcuugucuccaaggaauucau

SEQ ID NO: 82454 - RNA, 32 nt, Homo Sapiens
accuaguuaaacucauuucacuucuccuggga

SEQ ID NO: 82455 - RNA, 32 nt, Homo Sapiens
cucuucccaucuuuuccaacaguguucuccug

SEQ ID NO: 82456 - RNA, 32 nt, Homo Sapiens
ugugcucccagcucaccuccgggucugcaugu

SEQ ID NO: 82457 - RNA, 32 nt, Homo Sapiens
auuauguggagccaaguuacuucuuuucuuuu

SEQ ID NO: 82458 - RNA, 32 nt, Homo Sapiens
uuugggaaugcccuuccgcaauaucagaagca

SEQ ID NO: 82459 - RNA, 32 nt, Homo Sapiens
accugcccuguccccugcuccccuccuaccac

SEQ ID NO: 82460 - RNA, 32 nt, Homo Sapiens
agguacaaaaggaaaaggagaaguuggaggug

SEQ ID NO: 82461 - RNA, 32 nt, Homo Sapiens
ucaccugaggucgggaguuggagacccgccug

SEQ ID NO: 82462 - RNA, 32 nt, Homo Sapiens
uaccgacuugauagggauguuuuuguaaguua

SEQ ID NO: 82463 - RNA, 32 nt, Homo Sapiens
gagccggaucccagcccuacgccucguccccu

SEQ ID NO: 82464 - RNA, 32 nt, Homo Sapiens
cccucgccagcuuggcucgauguuugccauga

SEQ ID NO: 82465 - RNA, 32 nt, Homo Sapiens
cacauuuucuucacaacuuuuagcaucagcuc

SEQ ID NO: 82466 - RNA, 32 nt, Homo Sapiens
caugucagugaaaucugggaauggcuggauuc

SEQ ID NO: 82467 - RNA, 32 nt, Homo Sapiens
uuugagacagaguuucacucuuguuguccagu

SEQ ID NO: 82468 - RNA, 32 nt, Homo Sapiens
gaacugagaugaaacuuuuagacuucagcacg

SEQ ID NO: 82469 - RNA, 32 nt, Homo Sapiens
aggagccgaggugcagggaucccgaccaggau

SEQ ID NO: 82470 - RNA, 31 nt, Homo Sapiens
aacaugcuccacagccugcccuuugcucucc

SEQ ID NO: 82471 - RNA, 32 nt, Homo Sapiens
ccacugccagcuugcugcgggaacaugcucag

SEQ ID NO: 82472 - RNA, 32 nt, Homo Sapiens
auguuucucauuagugucucccgggccugucc

SEQ ID NO: 82473 - RNA, 32 nt, Homo Sapiens
guuugaauauaaaauucagauccaccuggaau

SEQ ID NO: 82474 - RNA, 32 nt, Homo Sapiens
cucauuuaaauucaaauccuagauaaacauuu

SEQ ID NO: 82475 - RNA, 32 nt, Homo Sapiens
cgaaguccgcggcugcccccggggcccuaguc

SEQ ID NO: 82476 - RNA, 32 nt, Homo Sapiens
uaauuuuacucuuuccucugauucccaccuua

SEQ ID NO: 82477 - RNA, 32 nt, Homo Sapiens
ugugagugaacagaaaugauuuuuguacaugg

SEQ ID NO: 82478 - RNA, 32 nt, Homo Sapiens
ccaaaggccugagaccccacccugcccccaaa

SEQ ID NO: 82479 - RNA, 32 nt, Homo Sapiens
acacgugacucauaacacacacauagaccaaa

SEQ ID NO: 82480 - RNA, 32 nt, Homo Sapiens
cccccuugcauucugaauuuauacacuuuucc

SEQ ID NO: 82481 - RNA, 32 nt, Homo Sapiens
agcuacuugggaagcagaggcuggaggaucau

SEQ ID NO: 82482 - RNA, 32 nt, Homo Sapiens
aagggugaaaaucagugaugggacauuuacua

SEQ ID NO: 82483 - RNA, 32 nt, Homo Sapiens
cgcacuggcccucagagcugaccaacccgcca

SEQ ID NO: 82484 - RNA, 32 nt, Homo Sapiens
gcagcccuagguaaggauuaugcuggcauccc

SEQ ID NO: 82485 - RNA, 32 nt, Homo Sapiens
uuuuauuagauaauuucucaccuauagacuua

SEQ ID NO: 82486 - RNA, 32 nt, Homo Sapiens
aacaauauauguucuucauauuuaguuaauau

SEQ ID NO: 82487 - RNA, 32 nt, Homo Sapiens
aggcaccggaggauccccgcccugccccgccc

SEQ ID NO: 82488 - RNA, 32 nt, Homo Sapiens
gaggacucacuugcccacaccgagggcgaccc

SEQ ID NO: 82489 - RNA, 32 nt, Homo Sapiens
uucgagaccugccuggccaacauggcaacacc

SEQ ID NO: 82490 - RNA, 32 nt, Homo Sapiens
cauuuuugcaugaguucuuacaaacuguuugu

SEQ ID NO: 82491 - RNA, 32 nt, Homo Sapiens
cucuggauuccggcccggacguccccuuggag

SEQ ID NO: 82492 - RNA, 32 nt, Homo Sapiens
cuugacugcaagaugaaacuccuugugcuagc

SEQ ID NO: 82493 - RNA, 32 nt, Homo Sapiens
gaaggcggcagccaagaaaaaguaaaaguucc

SEQ ID NO: 82494 - RNA, 32 nt, Homo Sapiens
cuuagucuucuauguauagcuaucaaggaaau

SEQ ID NO: 82495 - RNA, 32 nt, Homo Sapiens
guaaaggugcuuuuccuggggugaacuaaacc

SEQ ID NO: 82496 - RNA, 32 nt, Homo Sapiens
auuguguaucacgguaaaaagugaucuguuuu

SEQ ID NO: 82497 - RNA, 32 nt, Homo Sapiens
ggauaugcagaacuugggauguguguauauau

SEQ ID NO: 82498 - RNA, 32 nt, Homo Sapiens
cugcaggcggccugguugggauggggcgggca

SEQ ID NO: 82499 - RNA, 32 nt, Homo Sapiens
ugggugaggauggcagagggacacagugccug

SEQ ID NO: 82500 - RNA, 32 nt, Homo Sapiens
ggccucagcuggugcugccgcggcuggcgcug

SEQ ID NO: 82501 - RNA, 32 nt, Homo Sapiens
uaacugggauuacaggcaugcgccaccauacc

SEQ ID NO: 82502 - RNA, 32 nt, Homo Sapiens
ggcaacacagggagacccccucucuacaaaaa

SEQ ID NO: 82503 - RNA, 32 nt, Homo Sapiens
ccuugugaagagaucaucccuaagcaggagag

SEQ ID NO: 82504 - RNA, 32 nt, Homo Sapiens
agucagaccucaugcccucuuccuccucuuuc

SEQ ID NO: 82505 - RNA, 32 nt, Homo Sapiens
ugucuaguaagacagcagcaguauugaaaguu

SEQ ID NO: 82506 - RNA, 32 nt, Homo Sapiens
cccgcggaauggggccggcacugcucaggguc

SEQ ID NO: 82507 - RNA, 32 nt, Homo Sapiens
agggguggagacugaggccucaggagaagccc

SEQ ID NO: 82508 - RNA, 32 nt, Homo Sapiens
agccaugcccacgccccuccccagcccccacc

SEQ ID NO: 82509 - RNA, 32 nt, Homo Sapiens
ggccggggugggguggggcaggaugcuggaug

SEQ ID NO: 82510 - RNA, 32 nt, Homo Sapiens
aucccccggcuaccugggccgccccgcggcgg

SEQ ID NO: 82511 - RNA, 32 nt, Homo Sapiens
ugucuguuuuaaaaaccuguucaagucuacca

SEQ ID NO: 82512 - RNA, 32 nt, Homo Sapiens
uuaugcugucccggccucgcagcccucugggg

SEQ ID NO: 82513 - RNA, 32 nt, Homo Sapiens
uuauuccagaccaaaauugaaaaaaugguuga

SEQ ID NO: 82514 - RNA, 32 nt, Homo Sapiens
cagcucaccucuuuugcucuaccaccugccuu

SEQ ID NO: 82515 - RNA, 32 nt, Homo Sapiens
acaguagguauucaauaaaaauuuacugaauu

SEQ ID NO: 82516 - RNA, 32 nt, Homo Sapiens
ggccauuucugugaacccuacuccauuguggu

SEQ ID NO: 82517 - RNA, 32 nt, Homo Sapiens
caugguggacauuuuugugguggugaugucca

SEQ ID NO: 82518 - RNA, 32 nt, Homo Sapiens
gagucaggcagacagacagacacagccagcca

SEQ ID NO: 82519 - RNA, 32 nt, Homo Sapiens
uccucccugauggcaauggagacccaucuaac

SEQ ID NO: 82520 - RNA, 32 nt, Homo Sapiens
aucuccagccacagccagaagaaacacagcau

SEQ ID NO: 82521 - RNA, 32 nt, Homo Sapiens
aggaggcagcgcccggccaggcugggagcacc

SEQ ID NO: 82522 - RNA, 32 nt, Homo Sapiens
ucacaguuaugaaagaacaaagugggaaaaua

SEQ ID NO: 82523 - RNA, 32 nt, Homo Sapiens
uucccugggggauggcuugguaguggacuuuc

SEQ ID NO: 82524 - RNA, 32 nt, Homo Sapiens
gccccgcucggcgauccccggcgccgucgcca

SEQ ID NO: 82525 - RNA, 32 nt, Homo Sapiens
uuccuuuccuuccgacccauccccaagccuca

SEQ ID NO: 82526 - RNA, 32 nt, Homo Sapiens
aaggggccaagaggcccuacccgugucuaaac

SEQ ID NO: 82527 - RNA, 32 nt, Homo Sapiens
gccugcuccagagaguggaccuugacucuucc

SEQ ID NO: 82528 - RNA, 32 nt, Homo Sapiens
ggagauuagaucaguuuucucuuaauauguca

SEQ ID NO: 82529 - RNA, 32 nt, Homo Sapiens
ccaacauuuuucugcuuuuaauuguucuucaa

SEQ ID NO: 82530 - RNA, 32 nt, Homo Sapiens
ucccuaaauaguaaaucccacuguauacaaaa

SEQ ID NO: 82531 - RNA, 32 nt, Homo Sapiens
gacacguagagcucuuuuguaagauuuauuau

SEQ ID NO: 82532 - RNA, 32 nt, Homo Sapiens
ggcaaugccugccuguucaccacuuagccucu

SEQ ID NO: 82533 - RNA, 32 nt, Homo Sapiens
uugaaaauuaacaugaauauuuaguguucaua

SEQ ID NO: 82534 - RNA, 32 nt, Homo Sapiens
ucguuugcacuauuggaccauuaucugccaua

SEQ ID NO: 82535 - RNA, 32 nt, Homo Sapiens
aaggaguccuucggcggcuguugugucgggag

SEQ ID NO: 82536 - RNA, 32 nt, Homo Sapiens
uaaguuuccugaggccuccccagccacgcaga

SEQ ID NO: 82537 - RNA, 32 nt, Homo Sapiens
uugugggcuugggaaacacgacucgugguucu

SEQ ID NO: 82538 - RNA, 32 nt, Homo Sapiens
ggguuugaagacugcuucauucugccucuagu

SEQ ID NO: 82539 - RNA, 32 nt, Homo Sapiens
uaacaaggggcccagagcccccugcuccagcc

SEQ ID NO: 82540 - RNA, 32 nt, Homo Sapiens
gguggcauuuagaacacaauguuuaaucaaug

SEQ ID NO: 82541 - RNA, 32 nt, Homo Sapiens
cuaagucccuuucauuggggaucagucccauu

SEQ ID NO: 82542 - RNA, 32 nt, Homo Sapiens
agguggugcucucagccauuguagaagauggu

SEQ ID NO: 82543 - RNA, 32 nt, Homo Sapiens
agcgcugcggucucacuccuccccucauuuaa

SEQ ID NO: 82544 - RNA, 32 nt, Homo Sapiens
auuuauuaagugucuaccugguaaauguuuuu

SEQ ID NO: 82545 - RNA, 32 nt, Homo Sapiens
uuucacaauauuuuaacugauuuuuaauccaa

SEQ ID NO: 82546 - RNA, 32 nt, Homo Sapiens
agaaccaguuuaauaaaggcucuaugucauuc

SEQ ID NO: 82547 - RNA, 32 nt, Homo Sapiens
cagccggccaccugcuggcaggcugaacaccc

SEQ ID NO: 82548 - RNA, 32 nt, Homo Sapiens
gaggggaggggaaaucugcugcuagaaauguc

SEQ ID NO: 82549 - RNA, 32 nt, Homo Sapiens
gccaggcucagguuucugguaugcuccuaaau

SEQ ID NO: 82550 - RNA, 32 nt, Homo Sapiens
cuuaugccauguuaauuucaugugucaacuuc

SEQ ID NO: 82551 - RNA, 32 nt, Homo Sapiens
gauagagacucaucuuuuugccuuugagauuu

SEQ ID NO: 82552 - RNA, 32 nt, Homo Sapiens
cuucaaugugccuuuaccuuguagcuuuaaca

SEQ ID NO: 82553 - RNA, 32 nt, Homo Sapiens
guggcccuggucuugccccauccaucccaccu

SEQ ID NO: 82554 - RNA, 32 nt, Homo Sapiens
ccaaauaauuccauuccaguuuuuuaaaguuu

SEQ ID NO: 82555 - RNA, 32 nt, Homo Sapiens
cuccucacucugugcacuuugccguuggugug

SEQ ID NO: 82556 - RNA, 32 nt, Homo Sapiens
accaaaacuaccuguguuaucuguaaauucca

SEQ ID NO: 82557 - RNA, 32 nt, Homo Sapiens
cccaucuccagccccagucccagccccuucca

SEQ ID NO: 82558 - RNA, 32 nt, Homo Sapiens
gugccugacaacacugaagaaaaauugugaca

SEQ ID NO: 82559 - RNA, 32 nt, Homo Sapiens
cuuaucaaaaggauuggauaauaaaaauaagu

SEQ ID NO: 82560 - RNA, 32 nt, Homo Sapiens
aucaaaccaggaauaaccuaugcugaacccac

SEQ ID NO: 82561 - RNA, 32 nt, Homo Sapiens
caugagcuuccuggcuggccugggccuugcug

SEQ ID NO: 82562 - RNA, 32 nt, Homo Sapiens
uacaggguugaaaugaaugaugagcuauccau

SEQ ID NO: 82563 - RNA, 32 nt, Homo Sapiens
aaggaagaaacacuggaaauuucugcuaacac

SEQ ID NO: 82564 - RNA, 32 nt, Homo Sapiens
agucguggauuggaaggacccgagggagggag

SEQ ID NO: 82565 - RNA, 28 nt, Homo Sapiens
gccuguaaucccaacacuuugggaggcc

SEQ ID NO: 82566 - RNA, 32 nt, Homo Sapiens
aagcugccauggaccucacuucccugucccca

SEQ ID NO: 82567 - RNA, 32 nt, Homo Sapiens
gaucugcucggccgcccgggaccgccagcucu

SEQ ID NO: 82568 - RNA, 32 nt, Homo Sapiens
agucacucucuggccuaaaaccuuccuuggcu

SEQ ID NO: 82569 - RNA, 32 nt, Homo Sapiens
ugcuuccccccuccuggggugcaguggugagu

SEQ ID NO: 82570 - RNA, 32 nt, Homo Sapiens
uuuaaugacaaugaagugacacuuugacauuu

SEQ ID NO: 82571 - RNA, 32 nt, Homo Sapiens
aaagcaaucugugcuucagaagacagaggcuc

SEQ ID NO: 82572 - RNA, 32 nt, Homo Sapiens
gccauggaggcugccaggccugcugcuccugc

SEQ ID NO: 82573 - RNA, 32 nt, Homo Sapiens
aaaacuugacauuuaugguaaauuuucaaggg

SEQ ID NO: 82574 - RNA, 32 nt, Homo Sapiens
gagaggagguguaaggauucuuucucucuggu

SEQ ID NO: 82575 - RNA, 27 nt, Homo Sapiens
ggauguggauacugccugccggaggcu

SEQ ID NO: 82576 - RNA, 32 nt, Homo Sapiens
caacuccuccacagaaacacaaacacaguuau

SEQ ID NO: 82577 - RNA, 32 nt, Homo Sapiens
acaaauuagcuaggcauuguggggggugccug

SEQ ID NO: 82578 - RNA, 32 nt, Homo Sapiens
cauuucagccccagcgccccagccucaccuuc

SEQ ID NO: 82579 - RNA, 32 nt, Homo Sapiens
gcaacuggagcagugguuggaacuugcauuug

SEQ ID NO: 82580 - RNA, 32 nt, Homo Sapiens
gucauucuggguuuccuucugcuucacucuuu

SEQ ID NO: 82581 - RNA, 32 nt, Homo Sapiens
acuuucuuuuucuauuggaaaugguuacaagu

SEQ ID NO: 82582 - RNA, 32 nt, Homo Sapiens
gcgccgucggagccccucgcgcagccgcuggu

SEQ ID NO: 82583 - RNA, 32 nt, Homo Sapiens
gcucugcagcgggagguccucgucgccucucg

SEQ ID NO: 82584 - RNA, 32 nt, Homo Sapiens
gucaaaagcaaaacaagaagauacaucacuuu

SEQ ID NO: 82585 - RNA, 32 nt, Homo Sapiens
cagcauuucaaauaugcccagaugguaacauu

SEQ ID NO: 82586 - RNA, 32 nt, Homo Sapiens
ucccucccuucaccggcccccucccggcucuu

SEQ ID NO: 82587 - RNA, 32 nt, Homo Sapiens
aaaguaauuuuuucagcauucuauggggagua

SEQ ID NO: 82588 - RNA, 32 nt, Homo Sapiens
ucaaauuuuauuuuuguuuucuuaaugauguu

SEQ ID NO: 82589 - RNA, 32 nt, Homo Sapiens
ucuacuuuuuacaucauuucuauguucgguug

SEQ ID NO: 82590 - RNA, 32 nt, Homo Sapiens
ggggacugaacagggugugaaugccagguggg

SEQ ID NO: 82591 - RNA, 32 nt, Homo Sapiens
uuguuuuauuuuuucacauccccucaauggaa

SEQ ID NO: 82592 - RNA, 32 nt, Homo Sapiens
uuccuucauuggccucuccggauguugaaaca

SEQ ID NO: 82593 - RNA, 32 nt, Homo Sapiens
gccugcugauuuaacacacuuucaaaauagau

SEQ ID NO: 82594 - RNA, 32 nt, Homo Sapiens
augugaucccagugacugauagaucuguagaa

SEQ ID NO: 82595 - RNA, 32 nt, Homo Sapiens
gacaguccaagcccuggauaaugcuuuacuuu

SEQ ID NO: 82596 - RNA, 32 nt, Homo Sapiens
auuuuuucuguuuguuucaaucucuaaucuuu

SEQ ID NO: 82597 - RNA, 32 nt, Homo Sapiens
acaccaaauauuaauaucaucaaggagcucaa

SEQ ID NO: 82598 - RNA, 32 nt, Homo Sapiens
uugcuggacggugggagaagggcaagugcaag

SEQ ID NO: 82599 - RNA, 32 nt, Homo Sapiens
agcggucucugggggaucccccagcugaagga

SEQ ID NO: 82600 - RNA, 32 nt, Homo Sapiens
aaaagagaccucuggggccgagugugguggcu

SEQ ID NO: 82601 - RNA, 32 nt, Homo Sapiens
ucucacucacugauaaugcuuauuaccuucug

SEQ ID NO: 82602 - RNA, 32 nt, Homo Sapiens
cuguuccugcccuuugcccagcccugggccuc

SEQ ID NO: 82603 - RNA, 32 nt, Homo Sapiens
uuggcauccuucccucuaagccguuggcaccu

SEQ ID NO: 82604 - RNA, 32 nt, Homo Sapiens
ccucauggugccugucuuuguggugcuguugg

SEQ ID NO: 82605 - RNA, 32 nt, Homo Sapiens
ucugugauucaaaccccagcucugccaccuag

SEQ ID NO: 82606 - RNA, 32 nt, Homo Sapiens
cacauguuaaaaugacccugaauagaauagga

SEQ ID NO: 82607 - RNA, 28 nt, Homo Sapiens
auauugaaaggcaaacauuugaaggagg

SEQ ID NO: 82608 - RNA, 32 nt, Homo Sapiens
ugcgucuaugcugagcugccacagcaaggcug

SEQ ID NO: 82609 - RNA, 28 nt, Homo Sapiens
aaacuaugggaguguauuauaaaaucaa

SEQ ID NO: 82610 - RNA, 27 nt, Homo Sapiens
caaauaaauggcaccugcauucuuguu

SEQ ID NO: 82611 - RNA, 32 nt, Homo Sapiens
aucccaguagcccuccaccuccuucgccacuc

SEQ ID NO: 82612 - RNA, 32 nt, Homo Sapiens
acacuuugauaauuuuuuauauuuucauaaac

SEQ ID NO: 82613 - RNA, 32 nt, Homo Sapiens
cccucuucccggcccagggcgccggcccaccc

SEQ ID NO: 82614 - RNA, 32 nt, Homo Sapiens
uggacaugucauuucucucagcucguuucugu

SEQ ID NO: 82615 - RNA, 27 nt, Homo Sapiens
caacuugacaucuucagcuuccagaca

SEQ ID NO: 82616 - RNA, 32 nt, Homo Sapiens
uaggcgguucccucugcuccacagaaacccug

SEQ ID NO: 82617 - RNA, 32 nt, Homo Sapiens
ugaaaaccucucuauuuaaggcacaucauucc

SEQ ID NO: 82618 - RNA, 32 nt, Homo Sapiens
cccuaccuguggaagcccagccgcccgcuccc

SEQ ID NO: 82619 - RNA, 32 nt, Homo Sapiens
uaaggacaaucuaaggaaauaaagcaauugug

SEQ ID NO: 82620 - RNA, 32 nt, Homo Sapiens
guccuggccacagacgaggcugucccaggugu

SEQ ID NO: 82621 - RNA, 32 nt, Homo Sapiens
cuugaauuauuaaauaaacaaacauuaccacc

SEQ ID NO: 82622 - RNA, 32 nt, Homo Sapiens
cauuccuugcuucccguccccccgguagacuc

SEQ ID NO: 82623 - RNA, 32 nt, Homo Sapiens
agacgugacugucuuguucuuaauuuucaugg

SEQ ID NO: 82624 - RNA, 32 nt, Homo Sapiens
augagcuugagccagagcgaugcgggcagggg

SEQ ID NO: 82625 - RNA, 32 nt, Homo Sapiens
cugugguggguucacacgcagcuagacacagc

SEQ ID NO: 82626 - RNA, 32 nt, Homo Sapiens
auucacuauccuuccaagucccggguagcaga

SEQ ID NO: 82627 - RNA, 32 nt, Homo Sapiens
cggugaggccccaguggcuguucuggaagaaa

SEQ ID NO: 82628 - RNA, 32 nt, Homo Sapiens
auuguggauauuaaaauugacugauggaauag

SEQ ID NO: 82629 - RNA, 32 nt, Homo Sapiens
gggacugauauuaagagaaauaggaccuuugg

SEQ ID NO: 82630 - RNA, 29 nt, Homo Sapiens
agugauggcaacugcccucccgccgcguc

SEQ ID NO: 82631 - RNA, 32 nt, Homo Sapiens
gguguccucgcuccacccacccacgcugcugu

SEQ ID NO: 82632 - RNA, 32 nt, Homo Sapiens
gcccacccagcugccaguaggugcugggcucu

SEQ ID NO: 82633 - RNA, 31 nt, Homo Sapiens
cugacaucaaauggcagggugcuguugcaaa

SEQ ID NO: 82634 - RNA, 32 nt, Homo Sapiens
uagccccucccucuuccuuugaaggcccgagc

SEQ ID NO: 82635 - RNA, 32 nt, Homo Sapiens
acagcgcaagccccacgccacgcgucgcuggu

SEQ ID NO: 82636 - RNA, 32 nt, Homo Sapiens
caggacgcuccuuggguuaacguguaaccaug

SEQ ID NO: 82637 - RNA, 32 nt, Homo Sapiens
uuuggauucuaccauagacucugucauuuugu

SEQ ID NO: 82638 - RNA, 32 nt, Homo Sapiens
agaugcauuucuguggaauuccaaauaaguaa

SEQ ID NO: 82639 - RNA, 32 nt, Homo Sapiens
cccgggcccgcggcgcgauuggcgugaccggc

SEQ ID NO: 82640 - RNA, 31 nt, Homo Sapiens
guagaucauuugaaagggcuagauuauaaaa

SEQ ID NO: 82641 - RNA, 32 nt, Homo Sapiens
ucacacugccccaccugaaauucuuggccagu

SEQ ID NO: 82642 - RNA, 32 nt, Homo Sapiens
uggugguguguuuggcaauauuacugugccaa

SEQ ID NO: 82643 - RNA, 32 nt, Homo Sapiens
ccggguuccucccggguuucugccggguuucu

SEQ ID NO: 82644 - RNA, 32 nt, Homo Sapiens
uccacuccugcggucuacaucauuccacagua

SEQ ID NO: 82645 - RNA, 32 nt, Homo Sapiens
ggacccagaggggacauggagaggaacgcgga

SEQ ID NO: 82646 - RNA, 32 nt, Homo Sapiens
cccugcuuaauccuaacaauuuuccucauuag

SEQ ID NO: 82647 - RNA, 32 nt, Homo Sapiens
ugcaggugagcugggaaauccugagcaaucug

SEQ ID NO: 82648 - RNA, 32 nt, Homo Sapiens
aguaaacagugauguuaaaauaaaacaaugau

SEQ ID NO: 82649 - RNA, 32 nt, Homo Sapiens
aacauuauuucugguauaucaauaaaaagcaa

SEQ ID NO: 82650 - RNA, 32 nt, Homo Sapiens
gacuguagcugccuaugcuuggaaucuguccu

SEQ ID NO: 82651 - RNA, 32 nt, Homo Sapiens
acugggggcaauaugguuuagcacugaauuca

SEQ ID NO: 82652 - RNA, 32 nt, Homo Sapiens
gcgcacgugaguuuguaugaguuuguaccgga

SEQ ID NO: 82653 - RNA, 32 nt, Homo Sapiens
uauaaaagaggccccagaaaagcaucagaaaa

SEQ ID NO: 82654 - RNA, 32 nt, Homo Sapiens
ccagccggaugcccagcuccgcgccgcgcgga

SEQ ID NO: 82655 - RNA, 32 nt, Homo Sapiens
guguucagcccugugugcucuccagcuccuaa

SEQ ID NO: 82656 - RNA, 32 nt, Homo Sapiens
auuugaccagcauguuuuaaaagcucuuggua

SEQ ID NO: 82657 - RNA, 32 nt, Homo Sapiens
cggcgguacucuggcgucuuccgacuucgacu

SEQ ID NO: 82658 - RNA, 32 nt, Homo Sapiens
ugaggugccaucucgugguuuggugugggcug

SEQ ID NO: 82659 - RNA, 30 nt, Homo Sapiens
auggcugcuguaaugggggcagagaauacc

SEQ ID NO: 82660 - RNA, 32 nt, Homo Sapiens
gaauaaauaaucuauuuuagaguuuauuugcu

SEQ ID NO: 82661 - RNA, 32 nt, Homo Sapiens
cuccucaccucuugcccuucaccuccugcugu

SEQ ID NO: 82662 - RNA, 32 nt, Homo Sapiens
ucagggcuggagccugggguguccuacaguga

SEQ ID NO: 82663 - RNA, 32 nt, Homo Sapiens
ggcucccugggacccccuccccgcccuucuuu

SEQ ID NO: 82664 - RNA, 32 nt, Homo Sapiens
augggacuuuuaaagguuugaauuuauuagga

SEQ ID NO: 82665 - RNA, 32 nt, Homo Sapiens
auuagguguucccuaauuuuuaccguaauagg

SEQ ID NO: 82666 - RNA, 32 nt, Homo Sapiens
ugaccccacagaagcuugcuggcuggccauuu

SEQ ID NO: 82667 - RNA, 32 nt, Homo Sapiens
aauaaauaaaaagccgagaguaggggugcgug

SEQ ID NO: 82668 - RNA, 32 nt, Homo Sapiens
agggaucuaaucugaaaauucaguaacuaaua

SEQ ID NO: 82669 - RNA, 32 nt, Homo Sapiens
ccaggccuggggauuggggggcaggaaagagg

SEQ ID NO: 82670 - RNA, 32 nt, Homo Sapiens
cuagaacaaaaauuaagacauguuuggcaaua

SEQ ID NO: 82671 - RNA, 32 nt, Homo Sapiens
ugcuccuccaaaggcuugucuuucuuguagag

SEQ ID NO: 82672 - RNA, 32 nt, Homo Sapiens
uuucgucuguagucauauccugaaacauaggu

SEQ ID NO: 82673 - RNA, 32 nt, Homo Sapiens
ccugaaaacaaauagguccuuugcugaaaaga

SEQ ID NO: 82674 - RNA, 32 nt, Homo Sapiens
cugguggaacagagccucucucaccccugugg

SEQ ID NO: 82675 - RNA, 32 nt, Homo Sapiens
uuauuacuaaaauaaaccuaaauuuaauuaau

SEQ ID NO: 82676 - RNA, 32 nt, Homo Sapiens
uccucggaaaauuaagcgacccaaacgaaaaa

SEQ ID NO: 82677 - RNA, 32 nt, Homo Sapiens
cauggaucaaccaaguuacacgggguuacacu

SEQ ID NO: 82678 - RNA, 32 nt, Homo Sapiens
gccaacagaugugagccacuuuucucagccug

SEQ ID NO: 82679 - RNA, 32 nt, Homo Sapiens
ccagccccaggcgcgccgcgagagcaaccccu

SEQ ID NO: 82680 - RNA, 32 nt, Homo Sapiens
gccuauucuagguaucucuuuuaaguagaauc

SEQ ID NO: 82681 - RNA, 32 nt, Homo Sapiens
accccacaaaaaucagcacuccuuuauggaua

SEQ ID NO: 82682 - RNA, 32 nt, Homo Sapiens
cuuuagauucccucccccaugcugcgggucaa

SEQ ID NO: 82683 - RNA, 32 nt, Homo Sapiens
cccacccagucuugcccucccauccucucauc

SEQ ID NO: 82684 - RNA, 31 nt, Homo Sapiens
acaacugggaugggugaguccacucuggcua

SEQ ID NO: 82685 - RNA, 31 nt, Homo Sapiens
uuaacagcaaccaauaacggauuguaaagug

SEQ ID NO: 82686 - RNA, 32 nt, Homo Sapiens
ugguuuggauuuucaagagaugauugggcuuc

SEQ ID NO: 82687 - RNA, 32 nt, Homo Sapiens
cucccgcacccgcuccugcgccccguuugccu

SEQ ID NO: 82688 - RNA, 32 nt, Homo Sapiens
uaaacaguuauuguauuuuuuauuucuuucua

SEQ ID NO: 82689 - RNA, 32 nt, Homo Sapiens
gacuucucggaacccguaugccgcgguugcgu

SEQ ID NO: 82690 - RNA, 32 nt, Homo Sapiens
gcgcccaccuccccggcugcucccggagggcu

SEQ ID NO: 82691 - RNA, 32 nt, Homo Sapiens
aaggagugaagggacaggauuuugccuaggca

SEQ ID NO: 82692 - RNA, 32 nt, Homo Sapiens
gcgcuugcccgcccagugccacugccgccgcu

SEQ ID NO: 82693 - RNA, 32 nt, Homo Sapiens
ccucucagagauuuuuccucuguuccgugcgc

SEQ ID NO: 82694 - RNA, 30 nt, Homo Sapiens
uagcagggagguggcuggcuacagcaacag

SEQ ID NO: 82695 - RNA, 32 nt, Homo Sapiens
aucuguuagcacaaucacuucaguuacugaug

SEQ ID NO: 82696 - RNA, 32 nt, Homo Sapiens
cuggagugcaggggcacaaucuuggcucaccg

SEQ ID NO: 82697 - RNA, 32 nt, Homo Sapiens
ggggcccggccaggcaccuuggccgccggcgc

SEQ ID NO: 82698 - RNA, 32 nt, Homo Sapiens
cgcgcagugcugaguucccgcacgccgcagag

SEQ ID NO: 82699 - RNA, 32 nt, Homo Sapiens
uuucuuucuagcuaaccuuugggauacaucac

SEQ ID NO: 82700 - RNA, 32 nt, Homo Sapiens
ccuguuagcuccucacugugguaaaugccaca

SEQ ID NO: 82701 - RNA, 32 nt, Homo Sapiens
uuauacaccaaaauguucuguucaguaccuag

SEQ ID NO: 82702 - RNA, 32 nt, Homo Sapiens
gccucugacaaugugugccuggccuggaacua

SEQ ID NO: 82703 - RNA, 32 nt, Homo Sapiens
auagaagacaccuuucuuuugucuuuagguuu

SEQ ID NO: 82704 - RNA, 32 nt, Homo Sapiens
accagcagcuggaaucugaaggcaucagucuu

SEQ ID NO: 82705 - RNA, 32 nt, Homo Sapiens
aaaaauauuuuugugguaagguacuauuuuuu

SEQ ID NO: 82706 - RNA, 32 nt, Homo Sapiens
uagggcgccaccuagagccaaaaaagaggaag

SEQ ID NO: 82707 - RNA, 32 nt, Homo Sapiens
gcuagaccgggcuccgccgccucccccacagc

SEQ ID NO: 82708 - RNA, 32 nt, Homo Sapiens
ggcagagguaccugguggcugcccuguucgca

SEQ ID NO: 82709 - RNA, 32 nt, Homo Sapiens
aaauaagaaagauuaaaccauggauggacaca

SEQ ID NO: 82710 - RNA, 31 nt, Homo Sapiens
ggagugaaaccaauucucagagaacaaccca

SEQ ID NO: 82711 - RNA, 32 nt, Homo Sapiens
auucauucaaagcauggggaauaguucauaug

SEQ ID NO: 82712 - RNA, 32 nt, Homo Sapiens
uaguauggguaaacagaaauguauccagaagg

SEQ ID NO: 82713 - RNA, 32 nt, Homo Sapiens
cuccccgcucaugucccacaccugccauauug

SEQ ID NO: 82714 - RNA, 32 nt, Homo Sapiens
acuaguguucuuccauccuucaacugagcuca

SEQ ID NO: 82715 - RNA, 32 nt, Homo Sapiens
aucguguaugugguggagggacagccugccag

SEQ ID NO: 82716 - RNA, 32 nt, Homo Sapiens
agcacuuccccauggccaaggcuggccguguc

SEQ ID NO: 82717 - RNA, 32 nt, Homo Sapiens
acaugaaaggauucugggaaaggugcuuccuu

SEQ ID NO: 82718 - RNA, 32 nt, Homo Sapiens
aaggcuauauguaguguaugugucuuuuaaua

SEQ ID NO: 82719 - RNA, 32 nt, Homo Sapiens
uuuuccuuuguaggaugggaaaguauaaaaag

SEQ ID NO: 82720 - RNA, 31 nt, Homo Sapiens
ccaauguuaauuguacugcuaacugaacuau

SEQ ID NO: 82721 - RNA, 32 nt, Homo Sapiens
ggggccccagccccggcccccucucucccucc

SEQ ID NO: 82722 - RNA, 32 nt, Homo Sapiens
aauggggcccugagcccucccucuucaucccc

SEQ ID NO: 82723 - RNA, 32 nt, Homo Sapiens
gcuguaaucggcucccgcuugcucuccuggag

SEQ ID NO: 82724 - RNA, 32 nt, Homo Sapiens
gcaggcaggacacaggagggauggcacugccc

SEQ ID NO: 82725 - RNA, 32 nt, Homo Sapiens
aggaauaaagauuguuugacucuggagaggag

SEQ ID NO: 82726 - RNA, 32 nt, Homo Sapiens
cuugccaaaauggagcuuguaagaaggcucau

SEQ ID NO: 82727 - RNA, 30 nt, Homo Sapiens
caccuaccacuugguucuccagcguagacu

SEQ ID NO: 82728 - RNA, 30 nt, Homo Sapiens
ugugcauauaaaauauaucucagaaaauug

SEQ ID NO: 82729 - RNA, 32 nt, Homo Sapiens
ccgagcgcuggucuccgccgggaacccugggg

SEQ ID NO: 82730 - RNA, 32 nt, Homo Sapiens
uauauaacccaccauucaucccaggaccacaa

SEQ ID NO: 82731 - RNA, 32 nt, Homo Sapiens
gauuuuaaagaggaggcgacggcugcagguuc

SEQ ID NO: 82732 - RNA, 31 nt, Homo Sapiens
augaugcuugcgcgcgucccccgcgcgccgc

SEQ ID NO: 82733 - RNA, 32 nt, Homo Sapiens
ccaagauggugugauugcacuccagcccaggg

SEQ ID NO: 82734 - RNA, 32 nt, Homo Sapiens
ugaaauucccguuuccucuaguuucuuccugu

SEQ ID NO: 82735 - RNA, 32 nt, Homo Sapiens
uugaggaucagagugugaaaaggaguuucucu

SEQ ID NO: 82736 - RNA, 32 nt, Homo Sapiens
gcauagcggacggacacaccucauggacugag

SEQ ID NO: 82737 - RNA, 32 nt, Homo Sapiens
cucugaccaccucuggccccaggcccucaggg

SEQ ID NO: 82738 - RNA, 32 nt, Homo Sapiens
gaacugggccugaccuaccugaacugacuggc

SEQ ID NO: 82739 - RNA, 32 nt, Homo Sapiens
gggacgcgggagccgcgccgcgcgcagugucu

SEQ ID NO: 82740 - RNA, 32 nt, Homo Sapiens
gugcgcuccgccugccgcgucuggccacccgc

SEQ ID NO: 82741 - RNA, 32 nt, Homo Sapiens
aauguggcaaggaaaaacaggucuucaucgaa

SEQ ID NO: 82742 - RNA, 32 nt, Homo Sapiens
gacagugggugaguuaucgcagaguuaugccu

SEQ ID NO: 82743 - RNA, 32 nt, Homo Sapiens
cucccaggacacugaggccaagagaaauguaa

SEQ ID NO: 82744 - RNA, 32 nt, Homo Sapiens
cgagcgcgcucgagccagccccggccccaacc

SEQ ID NO: 82745 - RNA, 32 nt, Homo Sapiens
aaaaagaaaaacaaaaucuccgcaguguccaa

SEQ ID NO: 82746 - RNA, 32 nt, Homo Sapiens
uaaacagaaagauggaaacuaaaguacauuua

SEQ ID NO: 82747 - RNA, 32 nt, Homo Sapiens
gacauacaauuccacaacucauuaauuaaaug

SEQ ID NO: 82748 - RNA, 32 nt, Homo Sapiens
aggaaaagggaagaggguucugauauugaaga

SEQ ID NO: 82749 - RNA, 32 nt, Homo Sapiens
gaaaacucacaguuaauauacuguguaccuga

SEQ ID NO: 82750 - RNA, 32 nt, Homo Sapiens
gaguaaccuaagggaagugcugaaugguguug

SEQ ID NO: 82751 - RNA, 32 nt, Homo Sapiens
cacuagcugacugucaugagcugacguuaaag

SEQ ID NO: 82752 - RNA, 32 nt, Homo Sapiens
acauaaucagaccauauagacgaggcacuuug

SEQ ID NO: 82753 - RNA, 32 nt, Homo Sapiens
cuguuaaguauuuaaccauagcuaucaugugu

SEQ ID NO: 82754 - RNA, 32 nt, Homo Sapiens
cuuuagccugugaugaggggacaggcuccugc

SEQ ID NO: 82755 - RNA, 32 nt, Homo Sapiens
  misc_feature (11)..(11): n is a, c, g, or u
gcacuucgcgnagggcgcuaggggccgggacg

SEQ ID NO: 82756 - RNA, 32 nt, Homo Sapiens
ggugggagggggccuuccuccagggaauguga

SEQ ID NO: 82757 - RNA, 32 nt, Homo Sapiens
cgccacagcgcauccccacgcgggaagccgcg

SEQ ID NO: 82758 - RNA, 32 nt, Homo Sapiens
cgaaaagagucuuccaauuaaugcuuuuuuau

SEQ ID NO: 82759 - RNA, 32 nt, Homo Sapiens
ggcgcuuucacuugcgcccacggccgacgccc

SEQ ID NO: 82760 - RNA, 32 nt, Homo Sapiens
ggugacaagaggaaacaagaaccucaguucag

SEQ ID NO: 82761 - RNA, 32 nt, Homo Sapiens
auaauaccaggcaaagauuuucuucaacuaua

SEQ ID NO: 82762 - RNA, 32 nt, Homo Sapiens
ccgaggccgcccgggcuuugccuccaccagcg

SEQ ID NO: 82763 - RNA, 32 nt, Homo Sapiens
ucugauuuuaacuucacuaauguaauuacucu

SEQ ID NO: 82764 - RNA, 30 nt, Homo Sapiens
aacaugggagguggcuauagggagcaucug

SEQ ID NO: 82765 - RNA, 32 nt, Homo Sapiens
agucagagccaccagccaaugaucuuuucaau

SEQ ID NO: 82766 - RNA, 32 nt, Homo Sapiens
uuuucucccagugcccaccccauccccgagcc

SEQ ID NO: 82767 - RNA, 32 nt, Homo Sapiens
gugaccuuuccacagagcugcgccuuccucac

SEQ ID NO: 82768 - RNA, 32 nt, Homo Sapiens
cugucuuugaguugugguggaccgcuggccug

SEQ ID NO: 82769 - RNA, 32 nt, Homo Sapiens
ugcuuuacaugaugaugugaaaagcuguuugu

SEQ ID NO: 82770 - RNA, 32 nt, Homo Sapiens
agccuguuccuuggcuggggucgguagggcuu

SEQ ID NO: 82771 - RNA, 32 nt, Homo Sapiens
auaaugcuuucuuuuccagucgucuuugagaa

SEQ ID NO: 82772 - RNA, 32 nt, Homo Sapiens
ucuucaccccuacacugugaaggguacagauu

SEQ ID NO: 82773 - RNA, 32 nt, Homo Sapiens
guguuuguguuugacccgcgggcgccgguggc

SEQ ID NO: 82774 - RNA, 32 nt, Homo Sapiens
guuugaaaguacugaagcacaaacauauauca

SEQ ID NO: 82775 - RNA, 32 nt, Homo Sapiens
gcgggggcgggugaggagacuggccccaggcc

SEQ ID NO: 82776 - RNA, 32 nt, Homo Sapiens
cgugggugguggccacuggcacacuuaguguu

SEQ ID NO: 82777 - RNA, 32 nt, Homo Sapiens
guuucagccugugggaggaaaagagguaucuu

SEQ ID NO: 82778 - RNA, 32 nt, Homo Sapiens
gauauucuggacagcauuaagguugauagguu

SEQ ID NO: 82779 - RNA, 32 nt, Homo Sapiens
cagaaacugaggaggaagaugacggcaugaau

SEQ ID NO: 82780 - RNA, 32 nt, Homo Sapiens
acucagagcccggcugcucuagcaggaauguu

SEQ ID NO: 82781 - RNA, 32 nt, Homo Sapiens
ggccggccuagggcagaggagacccauagcgg

SEQ ID NO: 82782 - RNA, 32 nt, Homo Sapiens
aaaacagaaagauaguauuuuguuuuauuuua

SEQ ID NO: 82783 - RNA, 32 nt, Homo Sapiens
aaaucacgcucgcgugcuucggaagcauccga

SEQ ID NO: 82784 - RNA, 32 nt, Homo Sapiens
guaauacagcaagaagcacagaacugcucccu

SEQ ID NO: 82785 - RNA, 32 nt, Homo Sapiens
aacgacccggcggccaguucucuuccuccugc

SEQ ID NO: 82786 - RNA, 32 nt, Homo Sapiens
uggaagagaaaaauacuguaaaacgugucgug

SEQ ID NO: 82787 - RNA, 32 nt, Homo Sapiens
cugcugcgcugagagaauguucuuauaaugau

SEQ ID NO: 82788 - RNA, 32 nt, Homo Sapiens
cagcaugagcuccaagcuucaaacgcauucuc

SEQ ID NO: 82789 - RNA, 31 nt, Homo Sapiens
guauuguauacuauauuaaaugugaauuugu

SEQ ID NO: 82790 - RNA, 32 nt, Homo Sapiens
aacagccugcccgugcuuuccaagcgcugcgc

SEQ ID NO: 82791 - RNA, 32 nt, Homo Sapiens
acaucuuuuuauuaugaucuacacuuuaaaaa

SEQ ID NO: 82792 - RNA, 32 nt, Homo Sapiens
ugaucucccacuuucucuagcugcagccuuaa

SEQ ID NO: 82793 - RNA, 27 nt, Homo Sapiens
agauggcggcggugucuggcuuggugc

SEQ ID NO: 82794 - RNA, 32 nt, Homo Sapiens
cagguggugucaacacaacaucacacacaggu

SEQ ID NO: 82795 - RNA, 32 nt, Homo Sapiens
uaccugacacccgccgccuuuccccggcacug

SEQ ID NO: 82796 - RNA, 32 nt, Homo Sapiens
ucagccucauccuggcuccacuggccuccagc

SEQ ID NO: 82797 - RNA, 32 nt, Homo Sapiens
ucggaggaucauaagcaagcucagaccugccc

SEQ ID NO: 82798 - RNA, 32 nt, Homo Sapiens
uuuaguaaccauguuccuuguuuccuuuuauu

SEQ ID NO: 82799 - RNA, 32 nt, Homo Sapiens
guuuaaaaagaaugacguuuacauauaaaaug

SEQ ID NO: 82800 - RNA, 32 nt, Homo Sapiens
cagaacuuuuaguucugugcugucuaugugga

SEQ ID NO: 82801 - RNA, 32 nt, Homo Sapiens
ugggggcgcaggacggggcgcugcuggugcgg

SEQ ID NO: 82802 - RNA, 32 nt, Homo Sapiens
agccgcggagcccaggggccugcccggcucag

SEQ ID NO: 82803 - RNA, 32 nt, Homo Sapiens
uucaauuaauaaaauuugagccuguuacguaa

SEQ ID NO: 82804 - RNA, 32 nt, Homo Sapiens
gcagagaagaacuucagaggagucucgucuug

SEQ ID NO: 82805 - RNA, 32 nt, Homo Sapiens
ucaaagcaacuuucugaagccguguggaaaac

SEQ ID NO: 82806 - RNA, 32 nt, Homo Sapiens
gcuuugggcuuucuccuucuguggccccggag

SEQ ID NO: 82807 - RNA, 31 nt, Homo Sapiens
cgcuagcagcgcagcgggcacuaugagcggg

SEQ ID NO: 82808 - RNA, 32 nt, Homo Sapiens
gaaaugcucuguacaaagauauaagucaugug

SEQ ID NO: 82809 - RNA, 32 nt, Homo Sapiens
auuguuggacauuuggguugguuccaagucuu

SEQ ID NO: 82810 - RNA, 32 nt, Homo Sapiens
uccgcuaccgcgcgugcgggauuccggcgccg

SEQ ID NO: 82811 - RNA, 32 nt, Homo Sapiens
cagaugcuuggucuucaagggcuucuaccucc

SEQ ID NO: 82812 - RNA, 32 nt, Homo Sapiens
uuaacuuauugcuauguuaacuauuuauucuc

SEQ ID NO: 82813 - RNA, 32 nt, Homo Sapiens
auaacauucugcuuagccucagacugaaagca

SEQ ID NO: 82814 - RNA, 32 nt, Homo Sapiens
gcuuugucccagaaguccagagggaucagccc

SEQ ID NO: 82815 - RNA, 32 nt, Homo Sapiens
cgaaaggcuucacuccuccuccccugcgggac

SEQ ID NO: 82816 - RNA, 32 nt, Homo Sapiens
cgguggccgggcgugguggcucacgcugaggu

SEQ ID NO: 82817 - RNA, 32 nt, Homo Sapiens
cucaaggucacgggaccccuaaucagaguggc

SEQ ID NO: 82818 - RNA, 32 nt, Homo Sapiens
acuauuacguucguauuuaucuaguuucaggg

SEQ ID NO: 82819 - RNA, 32 nt, Homo Sapiens
ccgaggcagggccagaccagagcauccugggu

SEQ ID NO: 82820 - RNA, 32 nt, Homo Sapiens
caggugauggagaacacagaugacucgggcau

SEQ ID NO: 82821 - RNA, 32 nt, Homo Sapiens
gagccugcaugagagcuggcggugcuuggagc

SEQ ID NO: 82822 - RNA, 32 nt, Homo Sapiens
cuauuuugaaucuguaaauauuuuaaauguuu

SEQ ID NO: 82823 - RNA, 32 nt, Homo Sapiens
gccuaaacugagccaguggccaaacaaccgug

SEQ ID NO: 82824 - RNA, 32 nt, Homo Sapiens
cagcuaacaagagcucccuggggcuggucaca

SEQ ID NO: 82825 - RNA, 32 nt, Homo Sapiens
caaugcugugaguuuccaaccucagcccaucu

SEQ ID NO: 82826 - RNA, 32 nt, Homo Sapiens
uauuaucuuaucuauugggugguaugugaaau

SEQ ID NO: 82827 - RNA, 32 nt, Homo Sapiens
ucagcgaaugaauauuuaccaagagguuuuuc

SEQ ID NO: 82828 - RNA, 32 nt, Homo Sapiens
augauccucagauacagggagaaggacaaggc

SEQ ID NO: 82829 - RNA, 32 nt, Homo Sapiens
aacuguucuugacuaguaaucagggacaaaau

SEQ ID NO: 82830 - RNA, 32 nt, Homo Sapiens
caucgccugcagccgagcgggcccguuccgcc

SEQ ID NO: 82831 - RNA, 32 nt, Homo Sapiens
ccucauccugcguuugcucuccaggugucauc

SEQ ID NO: 82832 - RNA, 32 nt, Homo Sapiens
gacccuggccccaggccagcucccaucgcugg

SEQ ID NO: 82833 - RNA, 31 nt, Homo Sapiens
gcuuacuggaccugccugcucuugugucacc

SEQ ID NO: 82834 - RNA, 32 nt, Homo Sapiens
ggccuaaggcuuuguuuucuuauugucuagua

SEQ ID NO: 82835 - RNA, 32 nt, Homo Sapiens
gugucuggguggcagcugagcugggacucaag

SEQ ID NO: 82836 - RNA, 32 nt, Homo Sapiens
gguugccugugcuauucagccaauagugcugc

SEQ ID NO: 82837 - RNA, 32 nt, Homo Sapiens
agcccugagguaaacuuuuauuucuuagcuga

SEQ ID NO: 82838 - RNA, 32 nt, Homo Sapiens
uuuagagcagauuuagguucacagcaaaauua

SEQ ID NO: 82839 - RNA, 32 nt, Homo Sapiens
gcuccagaaagcugcggcgcgaguccgcgggg

SEQ ID NO: 82840 - RNA, 32 nt, Homo Sapiens
ucuaccauauauuacguuuuuguuauuaaaaa

SEQ ID NO: 82841 - RNA, 30 nt, Homo Sapiens
ggagaaggagguggaggcaggauggguccu

SEQ ID NO: 82842 - RNA, 32 nt, Homo Sapiens
ccugcgccugcgcggagcuggaguccggcugg

SEQ ID NO: 82843 - RNA, 32 nt, Homo Sapiens
ucugguuggaaugaugacaacaugcuggagcc

SEQ ID NO: 82844 - RNA, 32 nt, Homo Sapiens
gcugaggaggacaggagaagggcccagacacu

SEQ ID NO: 82845 - RNA, 29 nt, Homo Sapiens
ucacauauauguauguaucuuuguuugcu

SEQ ID NO: 82846 - RNA, 32 nt, Homo Sapiens
cagaaucgugacuauuauugcuccaucaaacu

SEQ ID NO: 82847 - RNA, 32 nt, Homo Sapiens
gagccagagcugcgcgcacgaaccgugcgcgg

SEQ ID NO: 82848 - RNA, 30 nt, Homo Sapiens
agacucacguccgucucgccggcgcccgag

SEQ ID NO: 82849 - RNA, 32 nt, Homo Sapiens
guguuauuuauuaguucuuacauauuauaggc

SEQ ID NO: 82850 - RNA, 32 nt, Homo Sapiens
accauuuaaacacaaauuugcugcacagaaua

SEQ ID NO: 82851 - RNA, 32 nt, Homo Sapiens
cuccuguguaaaauaaaucauuguuguuagua

SEQ ID NO: 82852 - RNA, 32 nt, Homo Sapiens
cuuucuauuaaacauucugauguccaguuucc

SEQ ID NO: 82853 - RNA, 30 nt, Homo Sapiens
acugggugcugggcugcagaggccggucag

SEQ ID NO: 82854 - RNA, 29 nt, Homo Sapiens
agcacuuugggaggcagaggcagacggau

SEQ ID NO: 82855 - RNA, 32 nt, Homo Sapiens
gggcuggggaguugugcaggcuggggugaccc

SEQ ID NO: 82856 - RNA, 32 nt, Homo Sapiens
cacgucgucuagggcguccgcggggcagcagc

SEQ ID NO: 82857 - RNA, 32 nt, Homo Sapiens
uuucccaggcuggucucaaacuccuggacuca

SEQ ID NO: 82858 - RNA, 32 nt, Homo Sapiens
uuccucgguuguuuuucuuuaaaugcuuuaua

SEQ ID NO: 82859 - RNA, 32 nt, Homo Sapiens
ggaguccagccauccccuccccaccuccugcc

SEQ ID NO: 82860 - RNA, 32 nt, Homo Sapiens
aggggaagccaagagaggcaucaggaugggug

SEQ ID NO: 82861 - RNA, 32 nt, Homo Sapiens
cugaucaaaaguauuacauaaaauauuuucuu

SEQ ID NO: 82862 - RNA, 32 nt, Homo Sapiens
acuacggcgcgggcgauggcccggggcucgcg

SEQ ID NO: 82863 - RNA, 32 nt, Homo Sapiens
uugcuccuuuuucucucugguuuuccuggacu

SEQ ID NO: 82864 - RNA, 32 nt, Homo Sapiens
acccuggagcagcuacugcagcccaucgugcu

SEQ ID NO: 82865 - RNA, 30 nt, Homo Sapiens
ugagugaauggcaaagcgguugcuucuccg

SEQ ID NO: 82866 - RNA, 32 nt, Homo Sapiens
agucuaguuccugaugacccaggcugccugag

SEQ ID NO: 82867 - RNA, 32 nt, Homo Sapiens
uuauauaaccuauauuucaagagagagaagau

SEQ ID NO: 82868 - RNA, 32 nt, Homo Sapiens
guuauugucauucguuggcugguuucuuucug

SEQ ID NO: 82869 - RNA, 32 nt, Homo Sapiens
aguucuugggagaggagcagcugugccugugu

SEQ ID NO: 82870 - RNA, 32 nt, Homo Sapiens
ccaaucaggaggaaguggguggggccagauaa

SEQ ID NO: 82871 - RNA, 32 nt, Homo Sapiens
augaaagaugaccuugugacacucaugcacag

SEQ ID NO: 82872 - RNA, 32 nt, Homo Sapiens
ggucgcaggagacuaccaaaaccuggugcguc

SEQ ID NO: 82873 - RNA, 32 nt, Homo Sapiens
gagcguggaccgaggaggucuuugugcccuga

SEQ ID NO: 82874 - RNA, 32 nt, Homo Sapiens
caucggguuuguucuccuuccaugguguguug

SEQ ID NO: 82875 - RNA, 32 nt, Homo Sapiens
augaaagugcuuuauaaagagacagggugugc

SEQ ID NO: 82876 - RNA, 32 nt, Homo Sapiens
ugggcucuuggacuccccucuuccucaagggu

SEQ ID NO: 82877 - RNA, 32 nt, Homo Sapiens
ugaccauauucaguuuuauuuauuuauuuuua

SEQ ID NO: 82878 - RNA, 32 nt, Homo Sapiens
aauccggcugagugggggaggggaagcaagaa

SEQ ID NO: 82879 - RNA, 32 nt, Homo Sapiens
agcaacugggacuggagucaucugaaggcuca

SEQ ID NO: 82880 - RNA, 32 nt, Homo Sapiens
ugcagugagccgagaucucaccauuacacucc

SEQ ID NO: 82881 - RNA, 32 nt, Homo Sapiens
auucccaguacauguuuauauugacuguguua

SEQ ID NO: 82882 - RNA, 32 nt, Homo Sapiens
acagcagucccaguauucucagagcauguguc

SEQ ID NO: 82883 - RNA, 32 nt, Homo Sapiens
aagcagaccauucuuccuuucuucccaauguc

SEQ ID NO: 82884 - RNA, 32 nt, Homo Sapiens
uggaaccaccccacccccacaccuggacgcuc

SEQ ID NO: 82885 - RNA, 32 nt, Homo Sapiens
uaaaaaucaacaaaauuugggauacuuaaaac

SEQ ID NO: 82886 - RNA, 32 nt, Homo Sapiens
cuccccgccucaggcuccuccuccucgcucuc

SEQ ID NO: 82887 - RNA, 32 nt, Homo Sapiens
gucaaguacaagcaagacugggaccuuagaaa

SEQ ID NO: 82888 - RNA, 32 nt, Homo Sapiens
cuuuuggccaguguguuuguauuaucugugca

SEQ ID NO: 82889 - RNA, 32 nt, Homo Sapiens
uuugcagcugcgcagucuaaagggcaggccag

SEQ ID NO: 82890 - RNA, 32 nt, Homo Sapiens
cagccgucugaggggacgcagccugcacuacg

SEQ ID NO: 82891 - RNA, 32 nt, Homo Sapiens
uguuugcguccccguccgucacaugugccaaa

SEQ ID NO: 82892 - RNA, 32 nt, Homo Sapiens
gcccuguuuuuccccaggagcggggccuggga

SEQ ID NO: 82893 - RNA, 32 nt, Homo Sapiens
aguggggugcuuggcagcuguucuguguuuuc

SEQ ID NO: 82894 - RNA, 32 nt, Homo Sapiens
cgcgggcgccgggagugagagugaggaccacg

SEQ ID NO: 82895 - RNA, 32 nt, Homo Sapiens
aacuugaaacaaaaauggacaaauauuuaaaa

SEQ ID NO: 82896 - RNA, 32 nt, Homo Sapiens
ggccaagcaggcggcagggaucaucaacguuc

SEQ ID NO: 82897 - RNA, 32 nt, Homo Sapiens
uuuauuggcuguuauucuguauaacacucaua

SEQ ID NO: 82898 - RNA, 32 nt, Homo Sapiens
acucaauucaccggcuacaacaauucauagaa

SEQ ID NO: 82899 - RNA, 32 nt, Homo Sapiens
acauaaggaauauugauucuuaagaaaauugg

SEQ ID NO: 82900 - RNA, 32 nt, Homo Sapiens
gugggugcaggaagagggcgcugagguggggg

SEQ ID NO: 82901 - RNA, 32 nt, Homo Sapiens
aaagcucuagcuuuaggagcuugagccauuuc

SEQ ID NO: 82902 - RNA, 32 nt, Homo Sapiens
gagccugugugcucagccuucuagggccaggu

SEQ ID NO: 82903 - RNA, 32 nt, Homo Sapiens
gaagucuaagaaugccaguggaguaauauggc

SEQ ID NO: 82904 - RNA, 32 nt, Homo Sapiens
acuucgcuuuuuucuuuuuaugcuuucguuug

SEQ ID NO: 82905 - RNA, 32 nt, Homo Sapiens
agucagucgcuucggcuguucauuccacuaau

SEQ ID NO: 82906 - RNA, 32 nt, Homo Sapiens
gcacuggacggcagcgggaggcugggacuuuc

SEQ ID NO: 82907 - RNA, 32 nt, Homo Sapiens
aagcccucucuauguguuuuuaucuccaccuu

SEQ ID NO: 82908 - RNA, 32 nt, Homo Sapiens
gucagugcugcccagauucagaagaauauugc

SEQ ID NO: 82909 - RNA, 32 nt, Homo Sapiens
uuucuuacuaaaaaucaccaucugaagcuuuu

SEQ ID NO: 82910 - RNA, 32 nt, Homo Sapiens
agcuauuuuuaaacauuuuuaaucacaagcug

SEQ ID NO: 82911 - RNA, 32 nt, Homo Sapiens
cugaggucaggaguuugagaccagccugacca

SEQ ID NO: 82912 - RNA, 32 nt, Homo Sapiens
caagcccgcccuguggccccagcccucggaug

SEQ ID NO: 82913 - RNA, 32 nt, Homo Sapiens
aucauuuuuaaacaaacaaaaguauuuaguua

SEQ ID NO: 82914 - RNA, 32 nt, Homo Sapiens
gcuuagaacaaaugcaucuuugcguauccuag

SEQ ID NO: 82915 - RNA, 32 nt, Homo Sapiens
ccagcccugaccaacccaugguugccucauca

SEQ ID NO: 82916 - RNA, 29 nt, Homo Sapiens
acccccuucauuugugaccacaaaaaugu

SEQ ID NO: 82917 - RNA, 32 nt, Homo Sapiens
agccuuuuguuuucucuuuuuuccugucuaug

SEQ ID NO: 82918 - RNA, 32 nt, Homo Sapiens
uuguguuuuauuuucaccaccagacccauucc

SEQ ID NO: 82919 - RNA, 32 nt, Homo Sapiens
caaaggugaagccaguguacuuucucagugag

SEQ ID NO: 82920 - RNA, 32 nt, Homo Sapiens
aagucuguauaaacuuguuuugaaauauaguc

SEQ ID NO: 82921 - RNA, 32 nt, Homo Sapiens
gcaggcgcggggccgcgccgcgaggccugauc

SEQ ID NO: 82922 - RNA, 32 nt, Homo Sapiens
ggacuaggcuggcccgggaggggagugacaga

SEQ ID NO: 82923 - RNA, 32 nt, Homo Sapiens
gggcuggcgggggcgcugugguuccagaacau

SEQ ID NO: 82924 - RNA, 32 nt, Homo Sapiens
uaaucccugacaauaucuuuggcauuaauacg

SEQ ID NO: 82925 - RNA, 32 nt, Homo Sapiens
accaaccccugaccuaccccagccaggcuccu

SEQ ID NO: 82926 - RNA, 32 nt, Homo Sapiens
ugaugugcccauaauuuuuaaagcugcaauau

SEQ ID NO: 82927 - RNA, 32 nt, Homo Sapiens
gccugagacuggguaauuuauaaagaaaagag

SEQ ID NO: 82928 - RNA, 30 nt, Homo Sapiens
uuggaggccguucugugcccagcagcggug

SEQ ID NO: 82929 - RNA, 32 nt, Homo Sapiens
gagguggaggauuuuccuauguuccccccauu

SEQ ID NO: 82930 - RNA, 32 nt, Homo Sapiens
uuuugaguagagagcaagggaagugguucuua

SEQ ID NO: 82931 - RNA, 32 nt, Homo Sapiens
auggaauuuugcaaagauuuaaucugccaagg

SEQ ID NO: 82932 - RNA, 30 nt, Homo Sapiens
gggggaauguggaugggggauguccuggcu

SEQ ID NO: 82933 - RNA, 32 nt, Homo Sapiens
cacugcacuccagcucgggugacaagagugag

SEQ ID NO: 82934 - RNA, 32 nt, Homo Sapiens
ucauccaauucugaguggauauuacucugaau

SEQ ID NO: 82935 - RNA, 32 nt, Homo Sapiens
gggguccagcuguggggugcagccaggaccca

SEQ ID NO: 82936 - RNA, 32 nt, Homo Sapiens
ugucuggagcagcuggagaccaugcagaccua

SEQ ID NO: 82937 - RNA, 32 nt, Homo Sapiens
aaagaaaauggcagcucuuacuccaaggaaga

SEQ ID NO: 82938 - RNA, 32 nt, Homo Sapiens
uuuugguucuuugcaacgugaguggcauuggc

SEQ ID NO: 82939 - RNA, 32 nt, Homo Sapiens
acagcucaaaagacauucagagauggaacaca

SEQ ID NO: 82940 - RNA, 32 nt, Homo Sapiens
gugugaucuguuuggacuauguuuucuuuucu

SEQ ID NO: 82941 - RNA, 32 nt, Homo Sapiens
cugagucugggcgggcgggaaaccugggcuag

SEQ ID NO: 82942 - RNA, 32 nt, Homo Sapiens
auuuaaucuugccaaccgaagacgaugugacu

SEQ ID NO: 82943 - RNA, 32 nt, Homo Sapiens
gccacuccagcuuguccugugcugccucccuc

SEQ ID NO: 82944 - RNA, 32 nt, Homo Sapiens
cagagagacagagacguggagagacacagaga

SEQ ID NO: 82945 - RNA, 32 nt, Homo Sapiens
acuguccagccuagcaggccgccgaccccgcc

SEQ ID NO: 82946 - RNA, 32 nt, Homo Sapiens
ggccuugugucagagcugggaguagcauggac

SEQ ID NO: 82947 - RNA, 32 nt, Homo Sapiens
gaaaaugggaugcacuuuauuugcuggugcaa

SEQ ID NO: 82948 - RNA, 32 nt, Homo Sapiens
aaauuugggaagacaaaauuagcugcaauaau

SEQ ID NO: 82949 - RNA, 31 nt, Homo Sapiens
ucaugccugaacacccugagagccuggugcu

SEQ ID NO: 82950 - RNA, 30 nt, Homo Sapiens
cugguugucugugcugccucaaagagcgug

SEQ ID NO: 82951 - RNA, 32 nt, Homo Sapiens
uccaaaaccaugcucacagacacacccagcau

SEQ ID NO: 82952 - RNA, 32 nt, Homo Sapiens
ggcaguuuuuaaacucucacuccccucucacc

SEQ ID NO: 82953 - RNA, 32 nt, Homo Sapiens
uguuccuucuauuuugcugauuuucagaaaaa

SEQ ID NO: 82954 - RNA, 32 nt, Homo Sapiens
guuggacgauaauggagaaaaagcagggaugc

SEQ ID NO: 82955 - RNA, 32 nt, Homo Sapiens
aucugugcaauaauuaaaugaaugaacuguga

SEQ ID NO: 82956 - RNA, 32 nt, Homo Sapiens
agagguccagaccggaaauggucguuuccaug

SEQ ID NO: 82957 - RNA, 32 nt, Homo Sapiens
cugggaaggagcgcagcccacccggccccucc

SEQ ID NO: 82958 - RNA, 32 nt, Homo Sapiens
uggguagucauuuaaguauacaaucugauuuc

SEQ ID NO: 82959 - RNA, 32 nt, Homo Sapiens
cugccucaaggaagaagcucacaggggacauc

SEQ ID NO: 82960 - RNA, 32 nt, Homo Sapiens
auucgcuguauuuuuucuuuaauuuauaaacu

SEQ ID NO: 82961 - RNA, 32 nt, Homo Sapiens
auaccuggaaauguguaauaccuucuuuuucu

SEQ ID NO: 82962 - RNA, 32 nt, Homo Sapiens
caauuccugggcccgcugcuguguguggcuuc

SEQ ID NO: 82963 - RNA, 32 nt, Homo Sapiens
gcagggaacaggugcugggggugcagaucccu

SEQ ID NO: 82964 - RNA, 32 nt, Homo Sapiens
cuggaagaggaggggggaaacaacaacucguu

SEQ ID NO: 82965 - RNA, 29 nt, Homo Sapiens
ucgguugggauuugcaguuuaauggccuc

SEQ ID NO: 82966 - RNA, 32 nt, Homo Sapiens
uaacccagaagcagcucugggcugccaggaug

SEQ ID NO: 82967 - RNA, 32 nt, Homo Sapiens
cgucagugccagcagcuggcgccacugcgucc

SEQ ID NO: 82968 - RNA, 32 nt, Homo Sapiens
gcuguggugauuugugauugcgccaccacugc

SEQ ID NO: 82969 - RNA, 32 nt, Homo Sapiens
gcaagcuccgccucccggguucacggcauucu

SEQ ID NO: 82970 - RNA, 32 nt, Homo Sapiens
ugucagauuugugucacucuucugccuucgug

SEQ ID NO: 82971 - RNA, 32 nt, Homo Sapiens
aucacuaauguuuacccccgugacggagugcc

SEQ ID NO: 82972 - RNA, 32 nt, Homo Sapiens
auuuaaauguaaagacaaaaaacuauauguau

SEQ ID NO: 82973 - RNA, 32 nt, Homo Sapiens
uuuccuucaaaguuuaauaaauuuauuuucuu

SEQ ID NO: 82974 - RNA, 32 nt, Homo Sapiens
gaggaaacacuggcuguuuguguccucaggag

SEQ ID NO: 82975 - RNA, 32 nt, Homo Sapiens
guacuaaggaaguacucugucuguggccugca

SEQ ID NO: 82976 - RNA, 32 nt, Homo Sapiens
caagagcagugagguuuguucuuuccagugaa

SEQ ID NO: 82977 - RNA, 32 nt, Homo Sapiens
ugcagcauuuccccagcugggcugucccaaau

SEQ ID NO: 82978 - RNA, 31 nt, Homo Sapiens
uuuccacaugagguuuuucugagaagggcuu

SEQ ID NO: 82979 - RNA, 32 nt, Homo Sapiens
accuuaaagaaccaucagcaucacccgggaac

SEQ ID NO: 82980 - RNA, 32 nt, Homo Sapiens
gccauucucacgguggugauugugauuagacg

SEQ ID NO: 82981 - RNA, 32 nt, Homo Sapiens
gaaagaggggaccaggguggcuggggaagagg

SEQ ID NO: 82982 - RNA, 32 nt, Homo Sapiens
uccugcccuucccagcuccauccacucuccac

SEQ ID NO: 82983 - RNA, 32 nt, Homo Sapiens
ggacuugaggggggucauauucccuccucagc

SEQ ID NO: 82984 - RNA, 32 nt, Homo Sapiens
agguuugcuccuuaauggagcaugcgaggguc

SEQ ID NO: 82985 - RNA, 32 nt, Homo Sapiens
gcagggagcuugcucuccuucucggagggccg

SEQ ID NO: 82986 - RNA, 32 nt, Homo Sapiens
uuuuccuuuuuggaggaaauggacauagauaa

SEQ ID NO: 82987 - RNA, 32 nt, Homo Sapiens
cagccucccaaguagcugggaauacagguguc

SEQ ID NO: 82988 - RNA, 30 nt, Homo Sapiens
uuguggcugcuaauggcagaagugccugug

SEQ ID NO: 82989 - RNA, 32 nt, Homo Sapiens
aauuuacuuaggauggauuuagcauugagguu

SEQ ID NO: 82990 - RNA, 32 nt, Homo Sapiens
gggagcgcagcucggcggaggcugcgugugcc

SEQ ID NO: 82991 - RNA, 30 nt, Homo Sapiens
cuccuccagggcccaccuggccugcugggg

SEQ ID NO: 82992 - RNA, 32 nt, Homo Sapiens
uucauauccuaagcaacaaaacaucagcagga

SEQ ID NO: 82993 - RNA, 32 nt, Homo Sapiens
ugguguuuuauuaugacuuuaguuugcauuuu

SEQ ID NO: 82994 - RNA, 32 nt, Homo Sapiens
auagacuaaaaucugagaauuuuuuaacauau

SEQ ID NO: 82995 - RNA, 32 nt, Homo Sapiens
ucauagaugcagccuuuaucuggaaaucagug

SEQ ID NO: 82996 - RNA, 32 nt, Homo Sapiens
ccagcuguccgaaaggucuucggaacuucggc

SEQ ID NO: 82997 - RNA, 32 nt, Homo Sapiens
ugucuagggauagccucugugccacuuuuugc

SEQ ID NO: 82998 - RNA, 32 nt, Homo Sapiens
cuggcgggaaguggauugugucuggcucggag

SEQ ID NO: 82999 - RNA, 32 nt, Homo Sapiens
gagaugaugcuggguguggcccaucuucugug

SEQ ID NO: 83000 - RNA, 32 nt, Homo Sapiens
gcugcuccaccccuacucuccucccuugcucc

SEQ ID NO: 83001 - RNA, 32 nt, Homo Sapiens
ugauuuuuaaaauaaauuuagugaaccuauuu

SEQ ID NO: 83002 - RNA, 32 nt, Homo Sapiens
ccgccccagcuuuucucggaaccaugaacccc

SEQ ID NO: 83003 - RNA, 32 nt, Homo Sapiens
ucucggcugucaccgaaccugugcaguugccg

SEQ ID NO: 83004 - RNA, 32 nt, Homo Sapiens
cuuauaauuuaaaggauuggugucuuaguaca

SEQ ID NO: 83005 - RNA, 32 nt, Homo Sapiens
uagauuugacauuuuucuguaucauuuuacug

SEQ ID NO: 83006 - RNA, 32 nt, Homo Sapiens
gcacgaaugcuguucuguccccauauuuucug

SEQ ID NO: 83007 - RNA, 32 nt, Homo Sapiens
acgagaagccucaggagaaggaaggagauccc

SEQ ID NO: 83008 - RNA, 32 nt, Homo Sapiens
uaugugcuccagcacacugaaggaauuuggug

SEQ ID NO: 83009 - RNA, 32 nt, Homo Sapiens
gucucagcucccagcccuuccccccagcccuc

SEQ ID NO: 83010 - RNA, 32 nt, Homo Sapiens
acugggugauuuauaugaaaagagguuuaauu

SEQ ID NO: 83011 - RNA, 32 nt, Homo Sapiens
agcugcagugaccccuggugggucccgauguc

SEQ ID NO: 83012 - RNA, 32 nt, Homo Sapiens
auuagagaaaaaaguaggauaacuugcaacau

SEQ ID NO: 83013 - RNA, 32 nt, Homo Sapiens
ucaaaaagcuugagaauugcugcuguaucacc

SEQ ID NO: 83014 - RNA, 32 nt, Homo Sapiens
gguggacugcagccuucaucuuuauugggaau

SEQ ID NO: 83015 - RNA, 32 nt, Homo Sapiens
guugcaggaaauguauuucagauaaaauaugg

SEQ ID NO: 83016 - RNA, 32 nt, Homo Sapiens
caagcauuuaucauguacugcugaccagaagu

SEQ ID NO: 83017 - RNA, 32 nt, Homo Sapiens
gagggguacagcaggcagggacuaugcugaag

SEQ ID NO: 83018 - RNA, 32 nt, Homo Sapiens
cgguuccccgcaccccggggcucacacuuacc

SEQ ID NO: 83019 - RNA, 32 nt, Homo Sapiens
gucucuaggagaccacccacugccacuucaga

SEQ ID NO: 83020 - RNA, 32 nt, Homo Sapiens
gauugaugugaacacaaagcauuuuguguaag

SEQ ID NO: 83021 - RNA, 32 nt, Homo Sapiens
uccgggcccuucccuaucgucgcccccuucac

SEQ ID NO: 83022 - RNA, 32 nt, Homo Sapiens
gaauggauguggaaaugaaagcuagcgcaccu

SEQ ID NO: 83023 - RNA, 32 nt, Homo Sapiens
ccaaucagccugccuacgugcugcagaucuuc

SEQ ID NO: 83024 - RNA, 32 nt, Homo Sapiens
cugcccggcuggcaauggugugagugucuugg

SEQ ID NO: 83025 - RNA, 29 nt, Homo Sapiens
gaaguagggagucucagucaauguaggca

SEQ ID NO: 83026 - RNA, 32 nt, Homo Sapiens
ucugccugcagauucuauuaaauacacccuuu

SEQ ID NO: 83027 - RNA, 32 nt, Homo Sapiens
uuguacauucuauuuacugagauaggagaaaa

SEQ ID NO: 83028 - RNA, 32 nt, Homo Sapiens
acaaaugcucuucuccuuuuucugucuucccu

SEQ ID NO: 83029 - RNA, 32 nt, Homo Sapiens
uaaacacaaaaauaaauuuuuuuucauuucca

SEQ ID NO: 83030 - RNA, 32 nt, Homo Sapiens
gccucccuggcugcugcugcugcaggucuggu

SEQ ID NO: 83031 - RNA, 32 nt, Homo Sapiens
uucuugaacgagccggacuuaguccaggaacc

SEQ ID NO: 83032 - RNA, 32 nt, Homo Sapiens
ggcacgaggcggggaaucauggccgcccccag

SEQ ID NO: 83033 - RNA, 27 nt, Homo Sapiens
aguccuccucacugcagcccccacagc

SEQ ID NO: 83034 - RNA, 32 nt, Homo Sapiens
aagaauaaacaaugaagauaauucacaauuca

SEQ ID NO: 83035 - RNA, 32 nt, Homo Sapiens
uccuugcugacucauuuccccaucugcaaaau

SEQ ID NO: 83036 - RNA, 32 nt, Homo Sapiens
guggaaggcagacagcaggcagcgccaagugc

SEQ ID NO: 83037 - RNA, 32 nt, Homo Sapiens
aaacugguacucaagauguugaagcuacaguu

SEQ ID NO: 83038 - RNA, 31 nt, Homo Sapiens
aacgugcaggagguuuuucuaggcaccgugu

SEQ ID NO: 83039 - RNA, 32 nt, Homo Sapiens
cugcugcucccucccugguccuggggacucgc

SEQ ID NO: 83040 - RNA, 32 nt, Homo Sapiens
ugcucagcguuggugguggcgguggcagcaug

SEQ ID NO: 83041 - RNA, 32 nt, Homo Sapiens
ggcaacaucagcaucacuggaacuuguuaaaa

SEQ ID NO: 83042 - RNA, 32 nt, Homo Sapiens
gcugugagccuggccccugcccagggcuuggg

SEQ ID NO: 83043 - RNA, 32 nt, Homo Sapiens
ucccugaggagcugggacaugcugggcaguug

SEQ ID NO: 83044 - RNA, 32 nt, Homo Sapiens
ugagcagugucuauguauuaaugcguuggaaa

SEQ ID NO: 83045 - RNA, 32 nt, Homo Sapiens
gaaagcugucuccuuaaucuuuccacaaaguc

SEQ ID NO: 83046 - RNA, 32 nt, Homo Sapiens
acauccuucccccagacacuguucccaaccug

SEQ ID NO: 83047 - RNA, 30 nt, Homo Sapiens
agcuuggcgcccgugugcucaaggcaaggg

SEQ ID NO: 83048 - RNA, 30 nt, Homo Sapiens
cgccugggaggugaggugugugugacccac

SEQ ID NO: 83049 - RNA, 32 nt, Homo Sapiens
ggaccccgagaccgcgcuggcccucugcuaaa

SEQ ID NO: 83050 - RNA, 32 nt, Homo Sapiens
cagcagggcacgccuggcuuuccuuggauacc

SEQ ID NO: 83051 - RNA, 32 nt, Homo Sapiens
aucgccaggggaagaggacuguagccaggaag

SEQ ID NO: 83052 - RNA, 32 nt, Homo Sapiens
ucaccauuauaaauacaauuauguuaagaaaa

SEQ ID NO: 83053 - RNA, 32 nt, Homo Sapiens
uggucaugaggcaccuugcuggagucucagau

SEQ ID NO: 83054 - RNA, 32 nt, Homo Sapiens
ucuaagaaguccagauacuaagagcaaagaug

SEQ ID NO: 83055 - RNA, 32 nt, Homo Sapiens
acaaaaacagaaaacgaaacaaugaaaacuca

SEQ ID NO: 83056 - RNA, 29 nt, Homo Sapiens
ccuugguaaaguuugacuuuuccugcaac

SEQ ID NO: 83057 - RNA, 32 nt, Homo Sapiens
aaacaucauacucugacaucuaaucugauuuu

SEQ ID NO: 83058 - RNA, 32 nt, Homo Sapiens
augagagccaggugcugcagccugaggggcca

SEQ ID NO: 83059 - RNA, 32 nt, Homo Sapiens
uacuaaguaacauacucaagacuuuguaucug

SEQ ID NO: 83060 - RNA, 32 nt, Homo Sapiens
cggaucuuucgaugcaaguccuggaggcaggg

SEQ ID NO: 83061 - RNA, 32 nt, Homo Sapiens
ccagcacagaucuggagaccaccuggaagguc

SEQ ID NO: 83062 - RNA, 32 nt, Homo Sapiens
uugaggugagcccuuccagggucaccuggcca

SEQ ID NO: 83063 - RNA, 32 nt, Homo Sapiens
ugaaggaggaggaggagccgagcgggcgcugg

SEQ ID NO: 83064 - RNA, 32 nt, Homo Sapiens
cagcaaccacagagccuuuucagacccagcug

SEQ ID NO: 83065 - RNA, 32 nt, Homo Sapiens
aacugagaaaauaaaagacugcacuuuggaga

SEQ ID NO: 83066 - RNA, 32 nt, Homo Sapiens
cuaugucuguuuucuuuuuuguaauguuaaau

SEQ ID NO: 83067 - RNA, 32 nt, Homo Sapiens
aagcuggguacacauuuccuaucuuccuccag

SEQ ID NO: 83068 - RNA, 32 nt, Homo Sapiens
aauucuagccuggcagcaagagucacaucuga

SEQ ID NO: 83069 - RNA, 32 nt, Homo Sapiens
ugccugcugcgcacccggacgugcggcucccc

SEQ ID NO: 83070 - RNA, 32 nt, Homo Sapiens
uuucagaauuuacaacucuggugacuucugau

SEQ ID NO: 83071 - RNA, 32 nt, Homo Sapiens
auccaaacaccaagcgcuccaggggcuguggg

SEQ ID NO: 83072 - RNA, 32 nt, Homo Sapiens
uucaggaugggacaguaucagaugaacuucaa

SEQ ID NO: 83073 - RNA, 32 nt, Homo Sapiens
gcgguuuccaaucccaauuauuucaugccccu

SEQ ID NO: 83074 - RNA, 32 nt, Homo Sapiens
uugggguuugucuggucuuccacagagagcag

SEQ ID NO: 83075 - RNA, 32 nt, Homo Sapiens
agggcaccuuggaggaccgugcagcccccaga

SEQ ID NO: 83076 - RNA, 32 nt, Homo Sapiens
ggaguggggcuuugggagaccuugaacggccc

SEQ ID NO: 83077 - RNA, 32 nt, Homo Sapiens
aaugacauuuaaauaaauagcaaagcugggug

SEQ ID NO: 83078 - RNA, 32 nt, Homo Sapiens
guuuugacuuuucuuacccagcguuaauugaa

SEQ ID NO: 83079 - RNA, 32 nt, Homo Sapiens
ugucguggggaagagggaugaaaagacaagac

SEQ ID NO: 83080 - RNA, 32 nt, Homo Sapiens
cugguuaccuuggucagugaaaagaugcuacu

SEQ ID NO: 83081 - RNA, 32 nt, Homo Sapiens
ggcaggccaaaugcugcgcccacuagugcagc

SEQ ID NO: 83082 - RNA, 32 nt, Homo Sapiens
gguguggguguggccugggguggcucagggcu

SEQ ID NO: 83083 - RNA, 30 nt, Homo Sapiens
cccugagccccggccacgggucccgcgucc

SEQ ID NO: 83084 - RNA, 32 nt, Homo Sapiens
cccagucugcuguggcgugcgugcuuggcaag

SEQ ID NO: 83085 - RNA, 32 nt, Homo Sapiens
agacaaacagcgauggagaugaaaacuguuga

SEQ ID NO: 83086 - RNA, 32 nt, Homo Sapiens
aucucaucaggcaaauuguacuaguuguaguu

SEQ ID NO: 83087 - RNA, 32 nt, Homo Sapiens
uauccugccuaagcuuccugugucacugggac

SEQ ID NO: 83088 - RNA, 32 nt, Homo Sapiens
gaagugucuuuuucagaggaauuggacuggag

SEQ ID NO: 83089 - RNA, 32 nt, Homo Sapiens
acuuacucucaggggcuucucugucaucugac

SEQ ID NO: 83090 - RNA, 32 nt, Homo Sapiens
uguccaggguggcaagaggauuuuugaccugg

SEQ ID NO: 83091 - RNA, 32 nt, Homo Sapiens
cccgcgccugggcugcgccgcgcuucgcaacg

SEQ ID NO: 83092 - RNA, 32 nt, Homo Sapiens
uauuucccaugcuauucuuuuaauugugaaua

SEQ ID NO: 83093 - RNA, 32 nt, Homo Sapiens
ccuccacguggcaacccucacuucuuaaguua

SEQ ID NO: 83094 - RNA, 32 nt, Homo Sapiens
ggccgguggggagcggggaggggcacugagau

SEQ ID NO: 83095 - RNA, 32 nt, Homo Sapiens
agggcgccgggcgcggcgggaggaugccgaag

SEQ ID NO: 83096 - RNA, 32 nt, Homo Sapiens
aaggucaaggucauuucuuagauggagaaguu

SEQ ID NO: 83097 - RNA, 32 nt, Homo Sapiens
auauguauauauaaaccagaguuuauuaagaa

SEQ ID NO: 83098 - RNA, 32 nt, Homo Sapiens
gccagaccgugcgccccgcgcuucucccgagg

SEQ ID NO: 83099 - RNA, 32 nt, Homo Sapiens
guccugaauuguuuuucuaagacugaucugag

SEQ ID NO: 83100 - RNA, 32 nt, Homo Sapiens
ugguucuucuucucggccgcugaaacccccgc

SEQ ID NO: 83101 - RNA, 32 nt, Homo Sapiens
ccucuaugugaacuugacuuugaaagacagag

SEQ ID NO: 83102 - RNA, 32 nt, Homo Sapiens
aaaugugacaguugucaaaaaaugcacuaaaa

SEQ ID NO: 83103 - RNA, 32 nt, Homo Sapiens
gccucuggcaccugcgcagcaaggcuggcugu

SEQ ID NO: 83104 - RNA, 32 nt, Homo Sapiens
gccgaccccuccccucuucucuagacuuauuu

SEQ ID NO: 83105 - RNA, 32 nt, Homo Sapiens
ucuccccuucuuccuuuccccuuugcauguga

SEQ ID NO: 83106 - RNA, 32 nt, Homo Sapiens
gcuacagucugugccauguugauguacaguuu

SEQ ID NO: 83107 - RNA, 32 nt, Homo Sapiens
aauguacuccucaggacaccugcccgcucuuu

SEQ ID NO: 83108 - RNA, 32 nt, Homo Sapiens
gacugccccgugcucugacuccaggucgccca

SEQ ID NO: 83109 - RNA, 32 nt, Homo Sapiens
auaaaaaacaaaugauggcaaguucucaaguu

SEQ ID NO: 83110 - RNA, 32 nt, Homo Sapiens
aaugauagccuacaaacacacacacacacaca

SEQ ID NO: 83111 - RNA, 32 nt, Homo Sapiens
gauagagugccuuucuguuucuuuucuuuucu

SEQ ID NO: 83112 - RNA, 32 nt, Homo Sapiens
aguaagcagcaaucuuccagaaguggcgugaa

SEQ ID NO: 83113 - RNA, 32 nt, Homo Sapiens
ccggcucggggcugugagcggcucggggccgg

SEQ ID NO: 83114 - RNA, 32 nt, Homo Sapiens
cacauucuagagagggcucggaggccuuuauu

SEQ ID NO: 83115 - RNA, 32 nt, Homo Sapiens
uaaaggccuuuucuccuuacugcaucugacgu

SEQ ID NO: 83116 - RNA, 32 nt, Homo Sapiens
uucuagcuuagaaccauuuuccaggucucuuc

SEQ ID NO: 83117 - RNA, 32 nt, Homo Sapiens
ucggauuuucuggguucacauuuuggaaacca

SEQ ID NO: 83118 - RNA, 32 nt, Homo Sapiens
auguacagacuuuuuucuuguuauuauucucu

SEQ ID NO: 83119 - RNA, 32 nt, Homo Sapiens
gcccaagcccuuggcuccccccggccucccuc

SEQ ID NO: 83120 - RNA, 31 nt, Homo Sapiens
uacugugguugccucuaugugcuguuuuucc

SEQ ID NO: 83121 - RNA, 32 nt, Homo Sapiens
aaugaaugaacuaugaaagauuuagucaacag

SEQ ID NO: 83122 - RNA, 32 nt, Homo Sapiens
uuccaaaccucauugaauaaaaagcaaugaaa

SEQ ID NO: 83123 - RNA, 32 nt, Homo Sapiens
aaaaauugcuuuuaguauuuuuccaaguuuuc

SEQ ID NO: 83124 - RNA, 32 nt, Homo Sapiens
cugcagacucgcgccugccaccgccacccucu

SEQ ID NO: 83125 - RNA, 32 nt, Homo Sapiens
uccuuguagccgggaaugcugcugcugcugcu

SEQ ID NO: 83126 - RNA, 32 nt, Homo Sapiens
auacagcuuccacuuccugcuucagagccugu

SEQ ID NO: 83127 - RNA, 32 nt, Homo Sapiens
gugugcgcaccucucugagccuccgcggccuu

SEQ ID NO: 83128 - RNA, 32 nt, Homo Sapiens
gaccuuucaaagcugccaagugggcaagcuuc

SEQ ID NO: 83129 - RNA, 32 nt, Homo Sapiens
cugccaccuggggcggugcgggcccggagccc

SEQ ID NO: 83130 - RNA, 32 nt, Homo Sapiens
aauacguuaauugcuauuuacuauuuaaaaag

SEQ ID NO: 83131 - RNA, 32 nt, Homo Sapiens
aucuaaggucuaggaauaacuauuguagaagc

SEQ ID NO: 83132 - RNA, 32 nt, Homo Sapiens
acagugcggugauuccucaaggaucuagaacc

SEQ ID NO: 83133 - RNA, 32 nt, Homo Sapiens
guuuggaggugcagccucaggaugcugagaaa

SEQ ID NO: 83134 - RNA, 32 nt, Homo Sapiens
agguccaaaaagacaguguuuaaaacugguag

SEQ ID NO: 83135 - RNA, 32 nt, Homo Sapiens
cccccugccggggaucuuggcaguggaggugc

SEQ ID NO: 83136 - RNA, 32 nt, Homo Sapiens
uaauucaccuaacuuacacuagguguucucuu

SEQ ID NO: 83137 - RNA, 32 nt, Homo Sapiens
gucucuguaggcggaggcucaaagacuguucg

SEQ ID NO: 83138 - RNA, 32 nt, Homo Sapiens
ugagauuugugauaagugauaguacucaaaaa

SEQ ID NO: 83139 - RNA, 32 nt, Homo Sapiens
cacguuuguauguauggaaauaaacuuauaaa

SEQ ID NO: 83140 - RNA, 32 nt, Homo Sapiens
cagauucaacuacuggcuuuuacuuuaauaaa

SEQ ID NO: 83141 - RNA, 32 nt, Homo Sapiens
cgcgagggcggagcugaguucuccucugcaca

SEQ ID NO: 83142 - RNA, 32 nt, Homo Sapiens
auacagaaccccguuugcucugggagagcaca

SEQ ID NO: 83143 - RNA, 32 nt, Homo Sapiens
ugagucccuggugaggcccaccuucaggccag

SEQ ID NO: 83144 - RNA, 32 nt, Homo Sapiens
ugauauuccacuucuagauguuuacccagcag

SEQ ID NO: 83145 - RNA, 32 nt, Homo Sapiens
cugucugucuuaggagcugggucggcguuccg

SEQ ID NO: 83146 - RNA, 32 nt, Homo Sapiens
auuaguuauauuuaaugguuauuuucaucacc

SEQ ID NO: 83147 - RNA, 32 nt, Homo Sapiens
cagcuaucucccacacccacggcugcauaccu

SEQ ID NO: 83148 - RNA, 32 nt, Homo Sapiens
gcucuggggaugcacggcggcaggguggggga

SEQ ID NO: 83149 - RNA, 32 nt, Homo Sapiens
ugcgucuuuggcaucacccugugucagcagca

SEQ ID NO: 83150 - RNA, 32 nt, Homo Sapiens
uugcacauucuauguaccccuccgauuuguga

SEQ ID NO: 83151 - RNA, 31 nt, Homo Sapiens
aaugacaugcuguuucugcaguuucugcugc

SEQ ID NO: 83152 - RNA, 32 nt, Homo Sapiens
ccacugaacuucucucucccccuuuguauucu

SEQ ID NO: 83153 - RNA, 32 nt, Homo Sapiens
gggcccaggccagucgggcguucccgccauga

SEQ ID NO: 83154 - RNA, 29 nt, Homo Sapiens
ggagaugagugccgaugaccacguuuuaa

SEQ ID NO: 83155 - RNA, 32 nt, Homo Sapiens
agccagccagcaccccaccuucgucuuugacc

SEQ ID NO: 83156 - RNA, 32 nt, Homo Sapiens
ccagcacuugccugucuuuguacaccaaucaa

SEQ ID NO: 83157 - RNA, 32 nt, Homo Sapiens
aaggagggaaaagccagucucuccggauucca

SEQ ID NO: 83158 - RNA, 32 nt, Homo Sapiens
aagcgagaggcgaggagcgcgcgggccguggc

SEQ ID NO: 83159 - RNA, 32 nt, Homo Sapiens
ucacugauggugaggaagaggaugcugaggcc

SEQ ID NO: 83160 - RNA, 32 nt, Homo Sapiens
uggguaucccacuccuucuccccauuucuguc

SEQ ID NO: 83161 - RNA, 32 nt, Homo Sapiens
uaauccaacuuuaauuugauugaagauuguga

SEQ ID NO: 83162 - RNA, 32 nt, Homo Sapiens
caagauuucuaaaacucuauauuuauacagug

SEQ ID NO: 83163 - RNA, 32 nt, Homo Sapiens
uuacuagccguuugcuuggaaaacagucuccg

SEQ ID NO: 83164 - RNA, 32 nt, Homo Sapiens
gagcuguguaaauuuugugaauauguauuaua

SEQ ID NO: 83165 - RNA, 32 nt, Homo Sapiens
gccucuuaccagguguccccagcccuacgcuc

SEQ ID NO: 83166 - RNA, 32 nt, Homo Sapiens
gcagggauauuguauguugauuuaaagugcau

SEQ ID NO: 83167 - RNA, 32 nt, Homo Sapiens
ccccaaguuuuaggaacauguuaggauauagg

SEQ ID NO: 83168 - RNA, 32 nt, Homo Sapiens
uucaguucugugucugguggguauggacagac

SEQ ID NO: 83169 - RNA, 32 nt, Homo Sapiens
ggggauaaaggcauugcuuaacuucuuauaua

SEQ ID NO: 83170 - RNA, 32 nt, Homo Sapiens
agagaugugcagaaagaaauguuuaguguuuu

SEQ ID NO: 83171 - RNA, 32 nt, Homo Sapiens
gaugugggggguggagggggaaugacagauuu

SEQ ID NO: 83172 - RNA, 32 nt, Homo Sapiens
ugcggauacuaguauuuauagaugucugacua

SEQ ID NO: 83173 - RNA, 32 nt, Homo Sapiens
gcugaagagaaauguuaugaaaauaguugaag

SEQ ID NO: 83174 - RNA, 32 nt, Homo Sapiens
aacuucagaacuguguggaggcacaugucugc

SEQ ID NO: 83175 - RNA, 32 nt, Homo Sapiens
cauuuggggaguauccacagagucaaaggaac

SEQ ID NO: 83176 - RNA, 32 nt, Homo Sapiens
auagaucuuuuuucuuuuuuuuaagccaugcu

SEQ ID NO: 83177 - RNA, 32 nt, Homo Sapiens
ccgccccggcggcuucucccagcccucgaggc

SEQ ID NO: 83178 - RNA, 32 nt, Homo Sapiens
uuuggggacccagugggaccaggugcgggggc

SEQ ID NO: 83179 - RNA, 32 nt, Homo Sapiens
ucauggggauuuuauugauuuauuuucacuuu

SEQ ID NO: 83180 - RNA, 31 nt, Homo Sapiens
agcccccaccucaccaccugagggccccugg

SEQ ID NO: 83181 - RNA, 32 nt, Homo Sapiens
acugaagguauuauuuccaauauuauuugguu

SEQ ID NO: 83182 - RNA, 32 nt, Homo Sapiens
caccugcagccagcuggccucgggcuugaaaa

SEQ ID NO: 83183 - RNA, 32 nt, Homo Sapiens
gcagagccccggggucucggcugagcagcggc

SEQ ID NO: 83184 - RNA, 32 nt, Homo Sapiens
gcucaaaaauaauuuuucaaguucaugaccuu

SEQ ID NO: 83185 - RNA, 32 nt, Homo Sapiens
uugaugagaaaguucguaggagggaggaacca

SEQ ID NO: 83186 - RNA, 32 nt, Homo Sapiens
ccuuugguaugucugcuuuucuuucaauccuc

SEQ ID NO: 83187 - RNA, 32 nt, Homo Sapiens
uccuccuccucucgccgcacagcccgccgccu

SEQ ID NO: 83188 - RNA, 32 nt, Homo Sapiens
gccccucugcccggccagccgccccguccagg

SEQ ID NO: 83189 - RNA, 32 nt, Homo Sapiens
ggcugaggcuguuuucuuuucuuuguucccau

SEQ ID NO: 83190 - RNA, 32 nt, Homo Sapiens
ccaucuucaccucgggccuggaucccaggccu

SEQ ID NO: 83191 - RNA, 29 nt, Homo Sapiens
gcuguggggggacagguggacguggagag

SEQ ID NO: 83192 - RNA, 32 nt, Homo Sapiens
ugaggacggcauuccuaccccucccccauucc

SEQ ID NO: 83193 - RNA, 32 nt, Homo Sapiens
gaaaagaaaaggaaagggccagaugugguggc

SEQ ID NO: 83194 - RNA, 32 nt, Homo Sapiens
uuugcacaucuuccugaguugaauguccacgu

SEQ ID NO: 83195 - RNA, 32 nt, Homo Sapiens
augggcugcccccagccagcucccagcagcuu

SEQ ID NO: 83196 - RNA, 32 nt, Homo Sapiens
agccugaagaacucuaagccagaugggguggc

SEQ ID NO: 83197 - RNA, 32 nt, Homo Sapiens
aauacaaaaaauacaaaaaauuagccgggcgc

SEQ ID NO: 83198 - RNA, 30 nt, Homo Sapiens
gccacugucugugcugaguuuuucaaaggu

SEQ ID NO: 83199 - RNA, 32 nt, Homo Sapiens
uauauuaaggaacugaugcaucugagcauucu

SEQ ID NO: 83200 - RNA, 32 nt, Homo Sapiens
gaaguauugcugucaagccguggcuagccaug

SEQ ID NO: 83201 - RNA, 32 nt, Homo Sapiens
cuucacccacugaggcugaguuucucacucau

SEQ ID NO: 83202 - RNA, 32 nt, Homo Sapiens
aagagccacuuuuuauuuacuuucucuaggga

SEQ ID NO: 83203 - RNA, 32 nt, Homo Sapiens
accaaagagcuacuaugaacuuuauaugucca

SEQ ID NO: 83204 - RNA, 32 nt, Homo Sapiens
uguuauuuuccauggacuaaaggucuggucau

SEQ ID NO: 83205 - RNA, 32 nt, Homo Sapiens
acagcucggucccgaguugcccuccuuuuguu

SEQ ID NO: 83206 - RNA, 28 nt, Homo Sapiens
gugauggaauguaacauuauauacaugu

SEQ ID NO: 83207 - RNA, 32 nt, Homo Sapiens
uuuuuuccccaagucagccucucuuguacagg

SEQ ID NO: 83208 - RNA, 32 nt, Homo Sapiens
ggaaugaaccuggaugagucugaaggauggga

SEQ ID NO: 83209 - RNA, 31 nt, Homo Sapiens
ccagcuuugugcuauugguucaguauauuuu

SEQ ID NO: 83210 - RNA, 32 nt, Homo Sapiens
ucaccugagccugggaaguggagguugcagua

SEQ ID NO: 83211 - RNA, 32 nt, Homo Sapiens
gcucccucccccacccucuuacuuuggaggga

SEQ ID NO: 83212 - RNA, 32 nt, Homo Sapiens
cuacccaaggcugcuggugcugcuggugugac

SEQ ID NO: 83213 - RNA, 32 nt, Homo Sapiens
agggugugggccgaggcgcggcggcggcugga

SEQ ID NO: 83214 - RNA, 32 nt, Homo Sapiens
gcagggagcuaugggguacauuccuugauuuc

SEQ ID NO: 83215 - RNA, 32 nt, Homo Sapiens
ucucauguuuuaaugugucaaauuagagagca

SEQ ID NO: 83216 - RNA, 32 nt, Homo Sapiens
cccuuucuaucgcgccaguccuguggucuccg

SEQ ID NO: 83217 - RNA, 32 nt, Homo Sapiens
caggccgggcagagcacagcggggugagaggg

SEQ ID NO: 83218 - RNA, 29 nt, Homo Sapiens
uuaaucugugcuuuccuggcgugaggagg

SEQ ID NO: 83219 - RNA, 27 nt, Homo Sapiens
agaugauggauugcacguggacacugc

SEQ ID NO: 83220 - RNA, 32 nt, Homo Sapiens
uccucccgccccagccaccucccugggcucuu

SEQ ID NO: 83221 - RNA, 32 nt, Homo Sapiens
ccgucaagcugcggucucuccucccccgcccu

SEQ ID NO: 83222 - RNA, 32 nt, Homo Sapiens
cagaggaaaaacagaggaugcugaaguacagu

SEQ ID NO: 83223 - RNA, 32 nt, Homo Sapiens
accacacccagccagugaacucuucuuaauaa

SEQ ID NO: 83224 - RNA, 32 nt, Homo Sapiens
auucuaggcagacaguugucuauguggucuga

SEQ ID NO: 83225 - RNA, 32 nt, Homo Sapiens
uugccacacaaggccugggucugccuuggggc

SEQ ID NO: 83226 - RNA, 32 nt, Homo Sapiens
gccccaccucaucgcgcuuggggacccgggcu

SEQ ID NO: 83227 - RNA, 32 nt, Homo Sapiens
ccuauaaagagccaugcuggaauuugacccac

SEQ ID NO: 83228 - RNA, 32 nt, Homo Sapiens
guaccggaauggggacccauucuucccaggcu

SEQ ID NO: 83229 - RNA, 32 nt, Homo Sapiens
ggagugccugacgggcccaacagacccaugcu

SEQ ID NO: 83230 - RNA, 32 nt, Homo Sapiens
agaaauauaacccucccuucccccaauacaca

SEQ ID NO: 83231 - RNA, 32 nt, Homo Sapiens
ccauugcugucuuuaugaaaagaaauuucauu

SEQ ID NO: 83232 - RNA, 32 nt, Homo Sapiens
augagauggcuuugguugucccaguacuccag

SEQ ID NO: 83233 - RNA, 32 nt, Homo Sapiens
ccaaaagccacuuuaaaauauuuuaaacuguu

SEQ ID NO: 83234 - RNA, 32 nt, Homo Sapiens
guuugcugaaauuaaucaacgauucuugaagu

SEQ ID NO: 83235 - RNA, 32 nt, Homo Sapiens
cuuaaagagacgggaggugcuaggaaucggca

SEQ ID NO: 83236 - RNA, 32 nt, Homo Sapiens
gugagcugccagcaggggcccagacgcgccag

SEQ ID NO: 83237 - RNA, 32 nt, Homo Sapiens
uggcguuguguuuuuuuuuucuuuaauuuuca

SEQ ID NO: 83238 - RNA, 32 nt, Homo Sapiens
gaagcuucuuguugccucuuucacuggcccuu

SEQ ID NO: 83239 - RNA, 32 nt, Homo Sapiens
gcgagugacaaugugacagaagccugggcgag

SEQ ID NO: 83240 - RNA, 32 nt, Homo Sapiens
agcagccgccgccgcugccgccguccuccccu

SEQ ID NO: 83241 - RNA, 32 nt, Homo Sapiens
ggcuaaauuuuuuuuuuuuuuaucuuuaguag

SEQ ID NO: 83242 - RNA, 32 nt, Homo Sapiens
gauggccuggaaaccucuggcuaaucgggcca

SEQ ID NO: 83243 - RNA, 32 nt, Homo Sapiens
ugaaauacaucauuauuauucuaguacugcug

SEQ ID NO: 83244 - RNA, 32 nt, Homo Sapiens
ccucccagcccagauagcucagccaccucacc

SEQ ID NO: 83245 - RNA, 32 nt, Homo Sapiens
augggacaggguccccuuccccggcacccaug

SEQ ID NO: 83246 - RNA, 32 nt, Homo Sapiens
uauauuccauugccaaagaaacauuaagaacu

SEQ ID NO: 83247 - RNA, 32 nt, Homo Sapiens
acuaccaaggcacagcugugucgcacguuccg

SEQ ID NO: 83248 - RNA, 31 nt, Homo Sapiens
agcugcagaaccaacuagguggcugaucuuc

SEQ ID NO: 83249 - RNA, 32 nt, Homo Sapiens
cagcuaggagccuacccucguuuugcagccca

SEQ ID NO: 83250 - RNA, 32 nt, Homo Sapiens
ugggcucuagcaccacccuccccuccccgcac

SEQ ID NO: 83251 - RNA, 32 nt, Homo Sapiens
uuuggaaaaucucagagggucuggggcaccag

SEQ ID NO: 83252 - RNA, 32 nt, Homo Sapiens
uuugacuguggaauaaauacaugaaugaaaaa

SEQ ID NO: 83253 - RNA, 32 nt, Homo Sapiens
uguaagaauaauuuauaguaaugaguuuaaaa

SEQ ID NO: 83254 - RNA, 32 nt, Homo Sapiens
aaggacccauccccaucucaucucaugcuugu

SEQ ID NO: 83255 - RNA, 32 nt, Homo Sapiens
ggauuuugacgaaugagaaugaagauaaacug

SEQ ID NO: 83256 - RNA, 32 nt, Homo Sapiens
cuugggacgcggagauugcaguaagccaggau

SEQ ID NO: 83257 - RNA, 32 nt, Homo Sapiens
ggggcaggggagauguggggaaguccaggacu

SEQ ID NO: 83258 - RNA, 32 nt, Homo Sapiens
ggccugccuugaugacaucacgaacuucucca

SEQ ID NO: 83259 - RNA, 32 nt, Homo Sapiens
ccagcucucggcggcggacccgggccgcgugu

SEQ ID NO: 83260 - RNA, 32 nt, Homo Sapiens
uugcuuauuuuuguuuuuaaagaccuacuuga

SEQ ID NO: 83261 - RNA, 32 nt, Homo Sapiens
uuuaagugcuagggcuggucacacacaaccaa

SEQ ID NO: 83262 - RNA, 32 nt, Homo Sapiens
aacugaaauuuauuuaugcuuaaauccuuuau

SEQ ID NO: 83263 - RNA, 32 nt, Homo Sapiens
ggauuguccaguuugccucagcccuuaguaug

SEQ ID NO: 83264 - RNA, 32 nt, Homo Sapiens
ggguuugcuuugcuuugggguucuucuauuua

SEQ ID NO: 83265 - RNA, 32 nt, Homo Sapiens
aaaauagaugacuuuaauguugaacucgauaa

SEQ ID NO: 83266 - RNA, 32 nt, Homo Sapiens
gccugagccaauggggcauguucugugacugc

SEQ ID NO: 83267 - RNA, 32 nt, Homo Sapiens
guguggcucaggugccaggucaggauguggga

SEQ ID NO: 83268 - RNA, 32 nt, Homo Sapiens
cccagguaccuuaaaaagugauuauacagaug

SEQ ID NO: 83269 - RNA, 32 nt, Homo Sapiens
cagaugagaacgacugggggccaggcaggggu

SEQ ID NO: 83270 - RNA, 32 nt, Homo Sapiens
gaauaaucuuaccugcucuggauugccaugag

SEQ ID NO: 83271 - RNA, 30 nt, Homo Sapiens
gcuggguuuucauggggcggcagccgaggc

SEQ ID NO: 83272 - RNA, 32 nt, Homo Sapiens
gaggaaaacaaagggagugaucgagugagccu

SEQ ID NO: 83273 - RNA, 30 nt, Homo Sapiens
ugagagggagguggcuaagcuggcuauggu

SEQ ID NO: 83274 - RNA, 32 nt, Homo Sapiens
aggcucacaccuguaaucccaacacuuuggga

SEQ ID NO: 83275 - RNA, 32 nt, Homo Sapiens
gugaggcagggccugcagcggucucugagagg

SEQ ID NO: 83276 - RNA, 32 nt, Homo Sapiens
uauauauuauuuuuugguucucucucguuuuu

SEQ ID NO: 83277 - RNA, 32 nt, Homo Sapiens
aaaguuuaaaaauacaauuugagaauguuuau

SEQ ID NO: 83278 - RNA, 32 nt, Homo Sapiens
agcacaccugggggcucugucacuuuaaaaag

SEQ ID NO: 83279 - RNA, 32 nt, Homo Sapiens
aggcgggcagaucaccugaggucgggaguuca

SEQ ID NO: 83280 - RNA, 32 nt, Homo Sapiens
ccggaccuugccgcggccgccuggcuccuuuc

SEQ ID NO: 83281 - RNA, 32 nt, Homo Sapiens
gucccucugacaccccucccccuaauucucau

SEQ ID NO: 83282 - RNA, 32 nt, Homo Sapiens
cucauagcacaaaauuaucuaucuguucaugu

SEQ ID NO: 83283 - RNA, 32 nt, Homo Sapiens
gagcgaggagaugcuccuugggcccuuugagu

SEQ ID NO: 83284 - RNA, 32 nt, Homo Sapiens
ccugcaugacuucagcuauuggcugguccugg

SEQ ID NO: 83285 - RNA, 32 nt, Homo Sapiens
guuggugauuucugccgugaucuguuugauau

SEQ ID NO: 83286 - RNA, 32 nt, Homo Sapiens
agaaaaaggccugaagugacucuguuuaauaa

SEQ ID NO: 83287 - RNA, 32 nt, Homo Sapiens
aauuauaaaauggcacaugaugcugaaaaaaa

SEQ ID NO: 83288 - RNA, 32 nt, Homo Sapiens
uguuuaccaaaacaguauuuugaagcaagauc

SEQ ID NO: 83289 - RNA, 32 nt, Homo Sapiens
gagaaugucuaauauugaucugaaucuaggau

SEQ ID NO: 83290 - RNA, 32 nt, Homo Sapiens
ggcggguggcgcaucaccggcgcggaggcagg

SEQ ID NO: 83291 - RNA, 32 nt, Homo Sapiens
aggaaggaauauuuaaacauugcuuuagauuu

SEQ ID NO: 83292 - RNA, 31 nt, Homo Sapiens
acauacuauugaguauuaauauucucugauu

SEQ ID NO: 83293 - RNA, 32 nt, Homo Sapiens
caaagacuuaucuggaggugagcaaaguaugu

SEQ ID NO: 83294 - RNA, 32 nt, Homo Sapiens
accaugggcguccacaccugcugcuccagaca

SEQ ID NO: 83295 - RNA, 32 nt, Homo Sapiens
uacauuugauaaaagauuuguauccaaaauau

SEQ ID NO: 83296 - RNA, 32 nt, Homo Sapiens
agcacggcguggucagcgugcucgcuaagggc

SEQ ID NO: 83297 - RNA, 32 nt, Homo Sapiens
gcuuuaaaaaggaacaguaaaaauauuaaucg

SEQ ID NO: 83298 - RNA, 32 nt, Homo Sapiens
acgcccuccaugaggcucgaggcuggcaggcc

SEQ ID NO: 83299 - RNA, 32 nt, Homo Sapiens
auucaguaaaccacugggaguccggcagcaug

SEQ ID NO: 83300 - RNA, 32 nt, Homo Sapiens
cgugcugccgccguccacgaaaagacccgcgc

SEQ ID NO: 83301 - RNA, 32 nt, Homo Sapiens
caguagaggucuuugugggggagggcagugca

SEQ ID NO: 83302 - RNA, 32 nt, Homo Sapiens
aagaguguacuauacuuguucuucuauaacau

SEQ ID NO: 83303 - RNA, 29 nt, Homo Sapiens
cggauggggcugcagaggacgcgcccgcg

SEQ ID NO: 83304 - RNA, 32 nt, Homo Sapiens
aguggcagcuguuggccacgcugcagaaauga

SEQ ID NO: 83305 - RNA, 32 nt, Homo Sapiens
uuagccuguuauauuuccuucuguaaaauaaa

SEQ ID NO: 83306 - RNA, 32 nt, Homo Sapiens
auggauucaguucucuuacccacagacacaga

SEQ ID NO: 83307 - RNA, 32 nt, Homo Sapiens
uaugacaucaaggagcuauuuuauuugguaaa

SEQ ID NO: 83308 - RNA, 32 nt, Homo Sapiens
gauuccacuguuuauuuucucauuguaucaag

SEQ ID NO: 83309 - RNA, 32 nt, Homo Sapiens
ugggagguggagguugcaguaagccaagaucg

SEQ ID NO: 83310 - RNA, 32 nt, Homo Sapiens
ccgagucugcgggcagcugcugucccagcauc

SEQ ID NO: 83311 - RNA, 32 nt, Homo Sapiens
gcggaugaguggacuuuuuucucucuuuuggg

SEQ ID NO: 83312 - RNA, 32 nt, Homo Sapiens
ccgccgcccaaccgccugcccagcgcugaggc

SEQ ID NO: 83313 - RNA, 32 nt, Homo Sapiens
agcccucccagcucugacaucaucaucaccau

SEQ ID NO: 83314 - RNA, 32 nt, Homo Sapiens
uugaugacaaccucugauugagggaauggugg

SEQ ID NO: 83315 - RNA, 32 nt, Homo Sapiens
uaaacugacaaugaauugguuauacaucaugc

SEQ ID NO: 83316 - RNA, 32 nt, Homo Sapiens
uguuaauagaaaggugggauagucuuugcugu

SEQ ID NO: 83317 - RNA, 32 nt, Homo Sapiens
guuaauuugggucuuuguccuggcagugccuc

SEQ ID NO: 83318 - RNA, 32 nt, Homo Sapiens
augcuugauaaaucuuuaagauaugucuugaa

SEQ ID NO: 83319 - RNA, 32 nt, Homo Sapiens
cgggcuaccggacuggcgacggcggcggcccc

SEQ ID NO: 83320 - RNA, 32 nt, Homo Sapiens
cagcugcagugacuugucaucaagagucaccu

SEQ ID NO: 83321 - RNA, 32 nt, Homo Sapiens
acuaucauauuuuucauacacuucucuggauu

SEQ ID NO: 83322 - RNA, 32 nt, Homo Sapiens
ccugugccgaggccuugguaacuguucagagg

SEQ ID NO: 83323 - RNA, 32 nt, Homo Sapiens
gcuccagccgugguuaacgggaccagcucugc

SEQ ID NO: 83324 - RNA, 32 nt, Homo Sapiens
aggagauaagaaugagagcaaaaguugaugaa

SEQ ID NO: 83325 - RNA, 32 nt, Homo Sapiens
ugucuuaaauuaauauggaucaggccauugga

SEQ ID NO: 83326 - RNA, 32 nt, Homo Sapiens
gugccagaacuaaacugacccuuaccauuggg

SEQ ID NO: 83327 - RNA, 32 nt, Homo Sapiens
aguguagugggcggggcccgucggcggaaaac

SEQ ID NO: 83328 - RNA, 32 nt, Homo Sapiens
ccacaaggcaucguacuaguugggcgagaccu

SEQ ID NO: 83329 - RNA, 32 nt, Homo Sapiens
gauauuccguacuaaacacgucugcaagucaa

SEQ ID NO: 83330 - RNA, 32 nt, Homo Sapiens
ucagccucuccccacaccacccacccagcugc

SEQ ID NO: 83331 - RNA, 32 nt, Homo Sapiens
uuagauauuauguauuguuuuacucugauuag

SEQ ID NO: 83332 - RNA, 32 nt, Homo Sapiens
cugguccagccagcggcugcaggcgaguuucu

SEQ ID NO: 83333 - RNA, 32 nt, Homo Sapiens
uaucaguagauuucgucauuugucuauuccuu

SEQ ID NO: 83334 - RNA, 32 nt, Homo Sapiens
uggcacgccugccccaggaugcccccuuuccc

SEQ ID NO: 83335 - RNA, 32 nt, Homo Sapiens
cuaugccagacucagucugcuaugucaaaaaa

SEQ ID NO: 83336 - RNA, 32 nt, Homo Sapiens
aaauccuuuucccccagccuauuuuuauaaau

SEQ ID NO: 83337 - RNA, 32 nt, Homo Sapiens
cgagagguggccugggaauggccgggccgggg

SEQ ID NO: 83338 - RNA, 32 nt, Homo Sapiens
gcucaugcugcugcuccuggguggacccgggg

SEQ ID NO: 83339 - RNA, 32 nt, Homo Sapiens
agccaucauaucauauccuaucaggcuagaua

SEQ ID NO: 83340 - RNA, 32 nt, Homo Sapiens
uucagcaccuccccguaccuuccuuccauggg

SEQ ID NO: 83341 - RNA, 32 nt, Homo Sapiens
acacuuguaaguaaauauaauuacauugcagc

SEQ ID NO: 83342 - RNA, 32 nt, Homo Sapiens
ugcaaguauauuuauguauauagacuauguau

SEQ ID NO: 83343 - RNA, 32 nt, Homo Sapiens
ugugauuuuuauuccuuuuuauuucucugugg

SEQ ID NO: 83344 - RNA, 29 nt, Homo Sapiens
uguaaugucugugaggagagagcaaggca

SEQ ID NO: 83345 - RNA, 32 nt, Homo Sapiens
ggacucuggcuauaguacuuugaaauuaucac

SEQ ID NO: 83346 - RNA, 32 nt, Homo Sapiens
caccucugguugggccugggggugccuggccu

SEQ ID NO: 83347 - RNA, 32 nt, Homo Sapiens
aaaccucucgagugagccccugcccgagugcc

SEQ ID NO: 83348 - RNA, 32 nt, Homo Sapiens
ccccucauucccuccuugcacagaugcauaca

SEQ ID NO: 83349 - RNA, 32 nt, Homo Sapiens
uuugagcccaggaguuuguaacuugugaccau

SEQ ID NO: 83350 - RNA, 32 nt, Homo Sapiens
guacauauguugucuuugauaauguugcugua

SEQ ID NO: 83351 - RNA, 32 nt, Homo Sapiens
gacuggaggauuuuuuccccuuggaagacacu

SEQ ID NO: 83352 - RNA, 32 nt, Homo Sapiens
caaagaaauucagaacagccugccuguucccc

SEQ ID NO: 83353 - RNA, 32 nt, Homo Sapiens
uuguaaaaaucauguuaauuuauuucauaguu

SEQ ID NO: 83354 - RNA, 32 nt, Homo Sapiens
gugcaucuguacucacccuguacgacaaacac

SEQ ID NO: 83355 - RNA, 32 nt, Homo Sapiens
uguaugcggugacggcggggugugguggccug

SEQ ID NO: 83356 - RNA, 32 nt, Homo Sapiens
agucuucugaccagcccgccuccaggcugucu

SEQ ID NO: 83357 - RNA, 32 nt, Homo Sapiens
caaaauaguuuauguaguugguauaauuuuua

SEQ ID NO: 83358 - RNA, 32 nt, Homo Sapiens
cugcacccacuuuaggguauagcuauugacuu

SEQ ID NO: 83359 - RNA, 32 nt, Homo Sapiens
ugacugugcucccgaacacgacccugguguug

SEQ ID NO: 83360 - RNA, 32 nt, Homo Sapiens
aauaauucaaaauuauguuaauagugcagagu

SEQ ID NO: 83361 - RNA, 32 nt, Homo Sapiens
gcccacagacugccccggagaccuggaggaca

SEQ ID NO: 83362 - RNA, 32 nt, Homo Sapiens
ggcggcggcugaacgcggagggggcggaggga

SEQ ID NO: 83363 - RNA, 32 nt, Homo Sapiens
agccacugaccggcagaggcugucccagaggc

SEQ ID NO: 83364 - RNA, 31 nt, Homo Sapiens
gaggcacccuuccuccuccaaacacaagaug

SEQ ID NO: 83365 - RNA, 32 nt, Homo Sapiens
accagcaucaucacugcuaucaucauuaacaa

SEQ ID NO: 83366 - RNA, 32 nt, Homo Sapiens
ugcccuuccuucccuugcccuaggaaaaaggc

SEQ ID NO: 83367 - RNA, 32 nt, Homo Sapiens
cucuccugccagccuccugcucccugcaagcc

SEQ ID NO: 83368 - RNA, 32 nt, Homo Sapiens
uaagauggaccucaagccgacugguuccuugu

SEQ ID NO: 83369 - RNA, 32 nt, Homo Sapiens
gauccccgcagccacgcgcggccgcuugcggg

SEQ ID NO: 83370 - RNA, 32 nt, Homo Sapiens
ggugggguccgcggccgccggagcguuccggu

SEQ ID NO: 83371 - RNA, 31 nt, Homo Sapiens
gcgggcgguggggcucacggccuagggaggc

SEQ ID NO: 83372 - RNA, 32 nt, Homo Sapiens
guuauuuguuuuauuuuuaggaguuuugagag

SEQ ID NO: 83373 - RNA, 32 nt, Homo Sapiens
agcaacugcccuggagccccagccccugcguc

SEQ ID NO: 83374 - RNA, 30 nt, Homo Sapiens
caaggaauucucccugccucagccuccuga

SEQ ID NO: 83375 - RNA, 32 nt, Homo Sapiens
uccacagacuucugcccuggcucuuccccauc

SEQ ID NO: 83376 - RNA, 32 nt, Homo Sapiens
aagacucuaaacaaaaaccucgacgccguuga

SEQ ID NO: 83377 - RNA, 32 nt, Homo Sapiens
cgggauccggacggggagcaaccggggcaggc

SEQ ID NO: 83378 - RNA, 32 nt, Homo Sapiens
ggacuggacgcaggccagccccggccccuagc

SEQ ID NO: 83379 - RNA, 32 nt, Homo Sapiens
uauuuaaaaucaacuguaaauacauggauaua

SEQ ID NO: 83380 - RNA, 32 nt, Homo Sapiens
gaggaggccuccuggguuuguccagugccugc

SEQ ID NO: 83381 - RNA, 32 nt, Homo Sapiens
ucccuggguuugucuggacaccgagagcgacc

SEQ ID NO: 83382 - RNA, 32 nt, Homo Sapiens
uauaggcuucuuccuucuugucaccaguuaaa

SEQ ID NO: 83383 - RNA, 32 nt, Homo Sapiens
aacccagcaucacuuuuaaacuucuggaaucc

SEQ ID NO: 83384 - RNA, 32 nt, Homo Sapiens
aggacuaacauuagacaccuguguguaguggc

SEQ ID NO: 83385 - RNA, 32 nt, Homo Sapiens
gaagacgugcgcgaugugacagcccugaacgu

SEQ ID NO: 83386 - RNA, 32 nt, Homo Sapiens
uggaaauucagaagcuucugaaaacauucacu

SEQ ID NO: 83387 - RNA, 32 nt, Homo Sapiens
ggaugaaucugugcucucuccuccccaggcca

SEQ ID NO: 83388 - RNA, 32 nt, Homo Sapiens
cccuccucugcagcugcacgaaggcgccaucu

SEQ ID NO: 83389 - RNA, 32 nt, Homo Sapiens
ccggagcggcccgggcaccgggggcacgcuga

SEQ ID NO: 83390 - RNA, 32 nt, Homo Sapiens
cuuauuacaucuuauuugauacuagggaaauc

SEQ ID NO: 83391 - RNA, 32 nt, Homo Sapiens
ucaaacccaguggcuugaaacuuccugagaaa

SEQ ID NO: 83392 - RNA, 32 nt, Homo Sapiens
cgccuguaauccaagcacuuggggaggccgag

SEQ ID NO: 83393 - RNA, 32 nt, Homo Sapiens
cuaccuugcaacaaaauaauugcaccaacucc

SEQ ID NO: 83394 - RNA, 32 nt, Homo Sapiens
cuguaccagaaucagaagaccuaugaaagaaa

SEQ ID NO: 83395 - RNA, 32 nt, Homo Sapiens
uguugccugggcuggaaugcaguggugugauc

SEQ ID NO: 83396 - RNA, 32 nt, Homo Sapiens
uccagaaaggucucugaggacaaacucacuca

SEQ ID NO: 83397 - RNA, 32 nt, Homo Sapiens
auuuauuaaauuuauauucuuaaagggggaau

SEQ ID NO: 83398 - RNA, 32 nt, Homo Sapiens
agaacuucuuugagcaucucuuugggagggga

SEQ ID NO: 83399 - RNA, 32 nt, Homo Sapiens
agcaaaccucucggauugggugucaaggucuc

SEQ ID NO: 83400 - RNA, 32 nt, Homo Sapiens
gcuacccugugucacacccagcaagaaguuuu

SEQ ID NO: 83401 - RNA, 32 nt, Homo Sapiens
ggcuggagaauagaugguuuugugaaaaauua

SEQ ID NO: 83402 - RNA, 32 nt, Homo Sapiens
ucgcgcggaggcggaggcuugggugcguucaa

SEQ ID NO: 83403 - RNA, 32 nt, Homo Sapiens
gguggaaggcgcggcgggcguaggaggguggg

SEQ ID NO: 83404 - RNA, 32 nt, Homo Sapiens
gugcagcuucccucggccgccgggggccuccc

SEQ ID NO: 83405 - RNA, 32 nt, Homo Sapiens
ccaugcucuaaagcgagugauuaggcagcagc

SEQ ID NO: 83406 - RNA, 32 nt, Homo Sapiens
uguucugguaaauuccaagcgcacauuagugc

SEQ ID NO: 83407 - RNA, 32 nt, Homo Sapiens
ugggguaggcagggguugugggugcugcuucc

SEQ ID NO: 83408 - RNA, 30 nt, Homo Sapiens
uccgagcccugcuccuugugggcgcucaca

SEQ ID NO: 83409 - RNA, 32 nt, Homo Sapiens
gcgccuucaagagcuaccucuggcggcaccug

SEQ ID NO: 83410 - RNA, 32 nt, Homo Sapiens
cucuaccccuucccuggcuucucugcugcaau

SEQ ID NO: 83411 - RNA, 32 nt, Homo Sapiens
agcaggccaagcugcgucgaauugcuuccacc

SEQ ID NO: 83412 - RNA, 32 nt, Homo Sapiens
cacaugaagguuuacuugagcuuuugugauuc

SEQ ID NO: 83413 - RNA, 32 nt, Homo Sapiens
augugcccccgccccaggacccucucccuugu

SEQ ID NO: 83414 - RNA, 32 nt, Homo Sapiens
ucgggucagggcgguucgcgggugcugucaga

SEQ ID NO: 83415 - RNA, 32 nt, Homo Sapiens
agaguuuuaaacaguuaagauuguacaauuuu

SEQ ID NO: 83416 - RNA, 32 nt, Homo Sapiens
accggccccccuccccgguuagcgggcgguug

SEQ ID NO: 83417 - RNA, 32 nt, Homo Sapiens
ucugcuccuggccagcagugucagcuccuucc

SEQ ID NO: 83418 - RNA, 32 nt, Homo Sapiens
augaacuagcaaccccaccuuccaccaugguu

SEQ ID NO: 83419 - RNA, 32 nt, Homo Sapiens
aaggacaugccuguuacccagguccuguacca

SEQ ID NO: 83420 - RNA, 32 nt, Homo Sapiens
ccugcaugcgccccucacgccccuggagcgca

SEQ ID NO: 83421 - RNA, 32 nt, Homo Sapiens
ugugacucuggcuuggccuaucuccuagggcu

SEQ ID NO: 83422 - RNA, 32 nt, Homo Sapiens
uuuuaggguauaucauuuuuuacaauucugag

SEQ ID NO: 83423 - RNA, 32 nt, Homo Sapiens
gcaugguggugcaugccuguauucccagcuac

SEQ ID NO: 83424 - RNA, 32 nt, Homo Sapiens
uuuaaaacuuggagaagcuggcugggcgcggu

SEQ ID NO: 83425 - RNA, 30 nt, Homo Sapiens
cgugcugccguuccggccacgccggugaag

SEQ ID NO: 83426 - RNA, 32 nt, Homo Sapiens
ccgauccucauccccuugcccucccccagccc

SEQ ID NO: 83427 - RNA, 32 nt, Homo Sapiens
ucaaggaguauguccuaaggccuucguauaau

SEQ ID NO: 83428 - RNA, 32 nt, Homo Sapiens
ggaauacaagaagaagcaggaccccuacuugc

SEQ ID NO: 83429 - RNA, 32 nt, Homo Sapiens
gcacggccuuggggguucugcgggccuucggg

SEQ ID NO: 83430 - RNA, 32 nt, Homo Sapiens
accucccggacggggcggcuggccaggcgggg

SEQ ID NO: 83431 - RNA, 32 nt, Homo Sapiens
ugcagcuccccgcuccugcagguccagcgucc

SEQ ID NO: 83432 - RNA, 32 nt, Homo Sapiens
agcggcauccucggggagaugcuggugagggg

SEQ ID NO: 83433 - RNA, 32 nt, Homo Sapiens
agaugaggagacugaggcucagagggcuuaaa

SEQ ID NO: 83434 - RNA, 32 nt, Homo Sapiens
agacauccugguuaucaaaaccaaugagcauu

SEQ ID NO: 83435 - RNA, 32 nt, Homo Sapiens
ugguguuagaaucuuucagugccuuugucaua

SEQ ID NO: 83436 - RNA, 32 nt, Homo Sapiens
gcggcugcgggugcgcaaagggcccgcucuag

SEQ ID NO: 83437 - RNA, 32 nt, Homo Sapiens
ugccuggcgcugcugccccacugcacagagcg

SEQ ID NO: 83438 - RNA, 32 nt, Homo Sapiens
acggucggcugauguuuuaauuuugcagagau

SEQ ID NO: 83439 - RNA, 32 nt, Homo Sapiens
ccacccuccaaccuggacugcccgccaccagc

SEQ ID NO: 83440 - RNA, 32 nt, Homo Sapiens
uuuuagugaacaucugaagugcccacaaguau

SEQ ID NO: 83441 - RNA, 32 nt, Homo Sapiens
ggagccaaggccgucgggccggcgcuuucagc

SEQ ID NO: 83442 - RNA, 32 nt, Homo Sapiens
uucugugaggcacaaucucagccucacagggc

SEQ ID NO: 83443 - RNA, 32 nt, Homo Sapiens
cugcagccgcagggagggaggggcuggccaga

SEQ ID NO: 83444 - RNA, 30 nt, Homo Sapiens
ugugugcgcgcgcgacgcgcgagugugcug

SEQ ID NO: 83445 - RNA, 32 nt, Homo Sapiens
gcucuaucucaccugccacgggcccaccgcag

SEQ ID NO: 83446 - RNA, 32 nt, Homo Sapiens
gcuuggaucugggucacuuuuaauuuugcccc

SEQ ID NO: 83447 - RNA, 32 nt, Homo Sapiens
ucuuugcugucaugcuggcuugccuaaggccc

SEQ ID NO: 83448 - RNA, 32 nt, Homo Sapiens
gcuggagcggcugcugguuggugccuuucccc

SEQ ID NO: 83449 - RNA, 32 nt, Homo Sapiens
ggcuuaggcuccggcgucugcaggggucgccg

SEQ ID NO: 83450 - RNA, 32 nt, Homo Sapiens
acugcgcugccgugagacuggugcuccaggaa

SEQ ID NO: 83451 - RNA, 32 nt, Homo Sapiens
augcucaugugugggcacacacgcacaaacac

SEQ ID NO: 83452 - RNA, 32 nt, Homo Sapiens
aacagcuaugcagggagggaggacccacacug

SEQ ID NO: 83453 - RNA, 32 nt, Homo Sapiens
agggauagcauuaggggauauaccuaauguua

SEQ ID NO: 83454 - RNA, 32 nt, Homo Sapiens
ugaaaucacaugccuauguaaggaaagugcua

SEQ ID NO: 83455 - RNA, 32 nt, Homo Sapiens
cuccaaaugcaaaugaaugauauaaaaauaag

SEQ ID NO: 83456 - RNA, 32 nt, Homo Sapiens
ugaaaaugcaucuauuucagagcugacaugaa

SEQ ID NO: 83457 - RNA, 32 nt, Homo Sapiens
cguucagcugucugugucuccagugcucccau

SEQ ID NO: 83458 - RNA, 32 nt, Homo Sapiens
acaguuucgacacuuugcaaagacaaagagcc

SEQ ID NO: 83459 - RNA, 32 nt, Homo Sapiens
gauuuuaauuguguuuuacauguaacauuaua

SEQ ID NO: 83460 - RNA, 32 nt, Homo Sapiens
ggcagaggagaaacuaugggggugcugggaga

SEQ ID NO: 83461 - RNA, 32 nt, Homo Sapiens
caauugauccuucuuauucuguguguacaugc

SEQ ID NO: 83462 - RNA, 32 nt, Homo Sapiens
cagcuggcccacugcuggcugcagcggcagga

SEQ ID NO: 83463 - RNA, 32 nt, Homo Sapiens
agcaggaaaaccaaccagugaauaccaaggca

SEQ ID NO: 83464 - RNA, 32 nt, Homo Sapiens
gugcaggaccucagggcugucggagagccugg

SEQ ID NO: 83465 - RNA, 32 nt, Homo Sapiens
ggccuggaucuugugucugccucgaaccuguu

SEQ ID NO: 83466 - RNA, 32 nt, Homo Sapiens
cauauuuuaaauaguuauuggaguguugaugu

SEQ ID NO: 83467 - RNA, 32 nt, Homo Sapiens
cagggcagccucagcccuugcagccaucugaa

SEQ ID NO: 83468 - RNA, 32 nt, Homo Sapiens
auguagggaaaagaaagagagaucagacuguu

SEQ ID NO: 83469 - RNA, 32 nt, Homo Sapiens
cgucgcugcggccccggccgcgcaauggggaa

SEQ ID NO: 83470 - RNA, 32 nt, Homo Sapiens
gauuuuuaaaauuuaauucaaaucucaaaauc

SEQ ID NO: 83471 - RNA, 32 nt, Homo Sapiens
ucuggggccgggccgcgcuuccgcgcacgcgc

SEQ ID NO: 83472 - RNA, 32 nt, Homo Sapiens
aaacagacaucccacaacaaaaacccaaguuu

SEQ ID NO: 83473 - RNA, 32 nt, Homo Sapiens
ugauggggucaucaaauuauuaaucugaaaau

SEQ ID NO: 83474 - RNA, 32 nt, Homo Sapiens
auuguuggauuguaugaagcugaaaccuauca

SEQ ID NO: 83475 - RNA, 32 nt, Homo Sapiens
caagcuaguguguuccauuaugcucacagcag

SEQ ID NO: 83476 - RNA, 32 nt, Homo Sapiens
cuaugugcccucaccauccaauaaaggccccu

SEQ ID NO: 83477 - RNA, 32 nt, Homo Sapiens
agccagagcagugccaguucuccuaggagcug

SEQ ID NO: 83478 - RNA, 32 nt, Homo Sapiens
uuuuuauugaugugcaaaaauuuuuggauuga

SEQ ID NO: 83479 - RNA, 32 nt, Homo Sapiens
augauguagcuacuauggaaaaugauacggca

SEQ ID NO: 83480 - RNA, 32 nt, Homo Sapiens
uucuuuggaaauguccacacaucauuuuugcu

SEQ ID NO: 83481 - RNA, 32 nt, Homo Sapiens
gcaggggcacacggcgggaggaagggcucuga

SEQ ID NO: 83482 - RNA, 32 nt, Homo Sapiens
auugucuuaucaccuuuauuagauaaaucaug

SEQ ID NO: 83483 - RNA, 31 nt, Homo Sapiens
gcugcuugcucuuuaguguagauuaguggaa

SEQ ID NO: 83484 - RNA, 32 nt, Homo Sapiens
ccgcucccgcccuccgcucgccuggcccggac

SEQ ID NO: 83485 - RNA, 32 nt, Homo Sapiens
uacuaggaaaaacauccugcaauguauaugaa

SEQ ID NO: 83486 - RNA, 32 nt, Homo Sapiens
cacuccacgccggcagccaacgcacaggaugg

SEQ ID NO: 83487 - RNA, 32 nt, Homo Sapiens
aggguuggcuagaaaugaaagccuggauuuug

SEQ ID NO: 83488 - RNA, 32 nt, Homo Sapiens
cuccuucugccuccccggagccacaggaugga

SEQ ID NO: 83489 - RNA, 32 nt, Homo Sapiens
guccccagccuuccgcgcacagagccgcaucc

SEQ ID NO: 83490 - RNA, 32 nt, Homo Sapiens
uaaauguugcugucucuugugaaucugucuuu

SEQ ID NO: 83491 - RNA, 32 nt, Homo Sapiens
gacuuagcugccaucugccccauccucguccu

SEQ ID NO: 83492 - RNA, 32 nt, Homo Sapiens
ugcugcaccuugcuguuguacuucugaaauca

SEQ ID NO: 83493 - RNA, 32 nt, Homo Sapiens
gcccccugacuucaagauccagugcacagagc

SEQ ID NO: 83494 - RNA, 32 nt, Homo Sapiens
agcggccaccgcgucccggccaggcgggcaga

SEQ ID NO: 83495 - RNA, 32 nt, Homo Sapiens
gcugcgcgcuggcgcugcagggcgggaugcug

SEQ ID NO: 83496 - RNA, 32 nt, Homo Sapiens
uaggucccaagagccucuuggugauggaggag

SEQ ID NO: 83497 - RNA, 32 nt, Homo Sapiens
ugcauccucucccacacuucuggagcugccac

SEQ ID NO: 83498 - RNA, 32 nt, Homo Sapiens
gcugaggcggguggaucacuaggucaggaguu

SEQ ID NO: 83499 - RNA, 32 nt, Homo Sapiens
cuccuuccuugaccagcagaucccagcucacg

SEQ ID NO: 83500 - RNA, 32 nt, Homo Sapiens
cugagccagagggaacugcugcuguccucccu

SEQ ID NO: 83501 - RNA, 32 nt, Homo Sapiens
ugcuccccuucccucccugaaccgggaguuuc

SEQ ID NO: 83502 - RNA, 27 nt, Homo Sapiens
ggccgccugcucuucagcuccugcucc

SEQ ID NO: 83503 - RNA, 32 nt, Homo Sapiens
agcugacuuauuuaagcaauaaccuuuuaaac

SEQ ID NO: 83504 - RNA, 32 nt, Homo Sapiens
gccauuccaccuccccucccccagcaucucuc

SEQ ID NO: 83505 - RNA, 32 nt, Homo Sapiens
gcaggcggcagagaggccucaacgccgucccu

SEQ ID NO: 83506 - RNA, 32 nt, Homo Sapiens
uauuuuuggaaaucauagcuuuuuauuuccaa

SEQ ID NO: 83507 - RNA, 32 nt, Homo Sapiens
uaugagauagaguugagagacaauuaauuauc

SEQ ID NO: 83508 - RNA, 32 nt, Homo Sapiens
cagcuagcauccaaaucagcccuugagauuug

SEQ ID NO: 83509 - RNA, 32 nt, Homo Sapiens
ggcgcgcggguacugacagccauggugcaugc

SEQ ID NO: 83510 - RNA, 32 nt, Homo Sapiens
guaaacuccagauggaucuguuagagguucau

SEQ ID NO: 83511 - RNA, 32 nt, Homo Sapiens
gggaggagcucaggucugcgccaggcaggaag

SEQ ID NO: 83512 - RNA, 32 nt, Homo Sapiens
cacagugaacacacuggggagacgugcuuuuu

SEQ ID NO: 83513 - RNA, 32 nt, Homo Sapiens
agaauguuaguaugucauaaaauauaacauua

SEQ ID NO: 83514 - RNA, 32 nt, Homo Sapiens
auauuagagauuauguacacaagggcaugggc

SEQ ID NO: 83515 - RNA, 32 nt, Homo Sapiens
ugacccuagcugcugcugcugcucacuuuauu

SEQ ID NO: 83516 - RNA, 32 nt, Homo Sapiens
cugucccaccccaccccucccauaccuccacu

SEQ ID NO: 83517 - RNA, 32 nt, Homo Sapiens
cacuauggccccagugccuugaggcccaggcc

SEQ ID NO: 83518 - RNA, 32 nt, Homo Sapiens
ccgcugccacccacccaccuccucccucugcu

SEQ ID NO: 83519 - RNA, 27 nt, Homo Sapiens
ccauggggaagggcacugugucugggc

SEQ ID NO: 83520 - RNA, 32 nt, Homo Sapiens
uuauuguggaaaucaucuucgaucuuggaauu

SEQ ID NO: 83521 - RNA, 32 nt, Homo Sapiens
aggagugugagacugauguugcuggacagaaa

SEQ ID NO: 83522 - RNA, 32 nt, Homo Sapiens
aagaggagaaauaaguaucauaccauaugcgu

SEQ ID NO: 83523 - RNA, 32 nt, Homo Sapiens
auauguaucuaguacauuuaauugagaacgua

SEQ ID NO: 83524 - RNA, 32 nt, Homo Sapiens
uuugggucaauacauccuuuugucucccaagg

SEQ ID NO: 83525 - RNA, 32 nt, Homo Sapiens
uuucuggaaugggggucuuaugaccuacaauc

SEQ ID NO: 83526 - RNA, 32 nt, Homo Sapiens
caccuccccgcggcgcccgcagcgcggagucc

SEQ ID NO: 83527 - RNA, 32 nt, Homo Sapiens
cccuggggcgccuggguccugcgaaggagccu

SEQ ID NO: 83528 - RNA, 32 nt, Homo Sapiens
uccagcaaugugggcaguggcuuguucaucgg

SEQ ID NO: 83529 - RNA, 32 nt, Homo Sapiens
cucggcucuuccuccuccuucuccgggacccg

SEQ ID NO: 83530 - RNA, 32 nt, Homo Sapiens
agcagggcuugccauaccuggaccccgaggag

SEQ ID NO: 83531 - RNA, 32 nt, Homo Sapiens
ucacgcuguuuccuccucccuccucuucccaa

SEQ ID NO: 83532 - RNA, 32 nt, Homo Sapiens
auggacccggcgggcgcgcuccccagccuccg

SEQ ID NO: 83533 - RNA, 32 nt, Homo Sapiens
uauaaggccauguuuauauaaagggaauuuca

SEQ ID NO: 83534 - RNA, 32 nt, Homo Sapiens
cggcuuccuggccagggcauuuucucugcggc

SEQ ID NO: 83535 - RNA, 32 nt, Homo Sapiens
cagcugccgcagccggccccagucuccaucac

SEQ ID NO: 83536 - RNA, 32 nt, Homo Sapiens
cuggacacagagaugacaaaacaaauggacuu

SEQ ID NO: 83537 - RNA, 32 nt, Homo Sapiens
ccagcccaugcaccugccccagccccuccagc

SEQ ID NO: 83538 - RNA, 32 nt, Homo Sapiens
cuacaggaggguguccagaagccacaagccau

SEQ ID NO: 83539 - RNA, 32 nt, Homo Sapiens
gccuagucaggcuuaugcaaugcaguggauag

SEQ ID NO: 83540 - RNA, 32 nt, Homo Sapiens
ggggcucagcuggacccuccccgggcucgagg

SEQ ID NO: 83541 - RNA, 32 nt, Homo Sapiens
ucuguucccagggccccgcucagggcccagca

SEQ ID NO: 83542 - RNA, 32 nt, Homo Sapiens
cacuuuccugucauuuauuuauauaggacugu

SEQ ID NO: 83543 - RNA, 32 nt, Homo Sapiens
aaauauugcuaaaauaucagcuuuaaaauaug

SEQ ID NO: 83544 - RNA, 32 nt, Homo Sapiens
cgccgccuccucagucgccgccgccuccucag

SEQ ID NO: 83545 - RNA, 32 nt, Homo Sapiens
guguucaagugggucauguuuuugcuguggug

SEQ ID NO: 83546 - RNA, 32 nt, Homo Sapiens
gaggcugugcuccgccauggugucccgguacc

SEQ ID NO: 83547 - RNA, 32 nt, Homo Sapiens
gucugcaggaggagaccuugugggacaucuga

SEQ ID NO: 83548 - RNA, 32 nt, Homo Sapiens
ucuggcuggccucuccuuccugaggcccagcc

SEQ ID NO: 83549 - RNA, 32 nt, Homo Sapiens
uuuuaucuagaauacuaugauuagguaguuga

SEQ ID NO: 83550 - RNA, 32 nt, Homo Sapiens
ugcugagucuagaaauuuuguuuucuggcaag

SEQ ID NO: 83551 - RNA, 32 nt, Homo Sapiens
agagggaggcggggcggaaaggcgagaggugu

SEQ ID NO: 83552 - RNA, 32 nt, Homo Sapiens
uccugcucaggaugaguuuuucccaggcggga

SEQ ID NO: 83553 - RNA, 32 nt, Homo Sapiens
gaauacaacgauggauuuuaaauacuguuugu

SEQ ID NO: 83554 - RNA, 32 nt, Homo Sapiens
ccacgcuggcucuucagccccuggacggacgc

SEQ ID NO: 83555 - RNA, 32 nt, Homo Sapiens
aagaauuuucuuuucccaacuccggcuuuugg

SEQ ID NO: 83556 - RNA, 32 nt, Homo Sapiens
aauggaggucccagcccuggggguuuaagcuc

SEQ ID NO: 83557 - RNA, 32 nt, Homo Sapiens
cuucuagacggcaggaggaacugagcaaagcu

SEQ ID NO: 83558 - RNA, 32 nt, Homo Sapiens
cccgccacccucaauaaauguugcuuggagug

SEQ ID NO: 83559 - RNA, 32 nt, Homo Sapiens
acuagggagaaaaacuuuccaugugugcggua

SEQ ID NO: 83560 - RNA, 29 nt, Homo Sapiens
gaauauccauguuucagagguaauauuua

SEQ ID NO: 83561 - RNA, 32 nt, Homo Sapiens
uguagcuaaugauguuacagacuuacguauac

SEQ ID NO: 83562 - RNA, 32 nt, Homo Sapiens
uuuucuagguagacaaucacaucgauugcaaa

SEQ ID NO: 83563 - RNA, 32 nt, Homo Sapiens
gccuugucauggccuccugggggcagaaggcg

SEQ ID NO: 83564 - RNA, 32 nt, Homo Sapiens
cugacagcaccaaggcccuccuggagcucacu

SEQ ID NO: 83565 - RNA, 32 nt, Homo Sapiens
gacauagaaccucagcuguuaaccaaggggaa

SEQ ID NO: 83566 - RNA, 32 nt, Homo Sapiens
aggacaucggcuggugugucucccucaucacc

SEQ ID NO: 83567 - RNA, 32 nt, Homo Sapiens
ucaguaaagagauuaauuuuaacgaacucuuu

SEQ ID NO: 83568 - RNA, 32 nt, Homo Sapiens
uaggauuauuuuuucuauuucuauaaaaauga

SEQ ID NO: 83569 - RNA, 32 nt, Homo Sapiens
cagaugcucuccccuccucggaggaugaugau

SEQ ID NO: 83570 - RNA, 32 nt, Homo Sapiens
ugcuucccugcagcugaccgggucacacaaag

SEQ ID NO: 83571 - RNA, 32 nt, Homo Sapiens
uaacgacauugaugaagacuggauguggagau

SEQ ID NO: 83572 - RNA, 32 nt, Homo Sapiens
auuuuuuauuuuccauuuguucuuaaccccac

SEQ ID NO: 83573 - RNA, 32 nt, Homo Sapiens
ucccugccacugggcucuggaccucaggaggg

SEQ ID NO: 83574 - RNA, 32 nt, Homo Sapiens
agccaauaaucccagcacuuugagaggccgaa

SEQ ID NO: 83575 - RNA, 32 nt, Homo Sapiens
ugaaggaaggagcuuucuuuuacagagacaga

SEQ ID NO: 83576 - RNA, 32 nt, Homo Sapiens
aaaaugaaaauauuuauaauaggacucgacuu

SEQ ID NO: 83577 - RNA, 32 nt, Homo Sapiens
gcuguuuuuauuauacaucaguuucuuugaau

SEQ ID NO: 83578 - RNA, 32 nt, Homo Sapiens
uauuaccuuguuccuguaaaauccauuuaauc

SEQ ID NO: 83579 - RNA, 32 nt, Homo Sapiens
cgggauccuucugucauagaaacucacaugag

SEQ ID NO: 83580 - RNA, 32 nt, Homo Sapiens
caacacagucccacccaucuguggguaacaaa

SEQ ID NO: 83581 - RNA, 32 nt, Homo Sapiens
uguggcugccaggcagcacacccaggaggccg

SEQ ID NO: 83582 - RNA, 32 nt, Homo Sapiens
ugccuccugauguacacccaucgccaucauag

SEQ ID NO: 83583 - RNA, 30 nt, Homo Sapiens
gagccccugcuaauggaguacagccgccag

SEQ ID NO: 83584 - RNA, 32 nt, Homo Sapiens
uaaaaggcugauuuuucuuuuugguuaugauu

SEQ ID NO: 83585 - RNA, 32 nt, Homo Sapiens
guuugccucuucugcuuuaaucucauccugac

SEQ ID NO: 83586 - RNA, 32 nt, Homo Sapiens
cagcagccaagcccccucuucucucccucccg

SEQ ID NO: 83587 - RNA, 32 nt, Homo Sapiens
guuucgagcucgccgggccgugucgcgccaug

SEQ ID NO: 83588 - RNA, 32 nt, Homo Sapiens
gaaggaccuuuauuauuaaaauaaucauuuug

SEQ ID NO: 83589 - RNA, 32 nt, Homo Sapiens
cuccaguccauccugaaccccuggaaaaccca

SEQ ID NO: 83590 - RNA, 32 nt, Homo Sapiens
aaaauauauacuuuuccaagacaaaauggaac

SEQ ID NO: 83591 - RNA, 32 nt, Homo Sapiens
ugugucugcaccgcuugguuugcaguugagag

SEQ ID NO: 83592 - RNA, 32 nt, Homo Sapiens
cggggcaagugaggugcugccgucauccaggc

SEQ ID NO: 83593 - RNA, 32 nt, Homo Sapiens
cuucuuuuaaacagaccacuaucuacacauuu

SEQ ID NO: 83594 - RNA, 32 nt, Homo Sapiens
cuuuaaagauauuuaucguuuauuuuuucaug

SEQ ID NO: 83595 - RNA, 32 nt, Homo Sapiens
gaggugauggcacaaugcugcuggcagcgagu

SEQ ID NO: 83596 - RNA, 32 nt, Homo Sapiens
acggaggcagcgcagcggcgggacuccgagcc

SEQ ID NO: 83597 - RNA, 32 nt, Homo Sapiens
gaguuaaauaccauccuuaauacugggaacag

SEQ ID NO: 83598 - RNA, 32 nt, Homo Sapiens
ccaaagcacagaccuauaucccuuugcagcuu

SEQ ID NO: 83599 - RNA, 32 nt, Homo Sapiens
gccagcccuugcgggggcaggcagaggacaga

SEQ ID NO: 83600 - RNA, 32 nt, Homo Sapiens
ccuucaggacucaccuggggccugcugcuuuu

SEQ ID NO: 83601 - RNA, 32 nt, Homo Sapiens
guuuucaccuaaauaaaaauugaaagcaagug

SEQ ID NO: 83602 - RNA, 32 nt, Homo Sapiens
gauugaguuucucugaccucauugcuucaccu

SEQ ID NO: 83603 - RNA, 32 nt, Homo Sapiens
agcacucaugcaacuuugguggcggccacuca

SEQ ID NO: 83604 - RNA, 32 nt, Homo Sapiens
caucaucagaggucaaauuauuaugauaacua

SEQ ID NO: 83605 - RNA, 32 nt, Homo Sapiens
uuggccuggugggaccagggcuccacagaggc

SEQ ID NO: 83606 - RNA, 27 nt, Homo Sapiens
agaugaugaugaugucccugaacagca

SEQ ID NO: 83607 - RNA, 32 nt, Homo Sapiens
caugccuguggagaugcacaguucuaccauuc

SEQ ID NO: 83608 - RNA, 32 nt, Homo Sapiens
cauguaaauauguaccaaauccuuaugaaguu

SEQ ID NO: 83609 - RNA, 27 nt, Homo Sapiens
uacuuguccuucugaaucacccuggca

SEQ ID NO: 83610 - RNA, 32 nt, Homo Sapiens
uucccacaaccugccagacuaggcuaucggug

SEQ ID NO: 83611 - RNA, 32 nt, Homo Sapiens
ggugaauaucuuucuucagaguugcugacucu

SEQ ID NO: 83612 - RNA, 32 nt, Homo Sapiens
ugugcccuccugagcucccacccaggcaucuc

SEQ ID NO: 83613 - RNA, 32 nt, Homo Sapiens
caaaaugaacacugaacuuggccacaggccca

SEQ ID NO: 83614 - RNA, 32 nt, Homo Sapiens
acuggucugugaacaaggggcauuugcccuuc

SEQ ID NO: 83615 - RNA, 32 nt, Homo Sapiens
guauuuuuaaagcauuugauuugcagaugggu

SEQ ID NO: 83616 - RNA, 32 nt, Homo Sapiens
gugucaaggaagaacuggauggcuggcuggcc

SEQ ID NO: 83617 - RNA, 32 nt, Homo Sapiens
gcuguaaugguugcaauuauguuucuuauuuc

SEQ ID NO: 83618 - RNA, 32 nt, Homo Sapiens
uuugggggugguuuuuaguuuaauuuuucuuu

SEQ ID NO: 83619 - RNA, 32 nt, Homo Sapiens
ucgggcagugcugagggcugggaugcucugug

SEQ ID NO: 83620 - RNA, 32 nt, Homo Sapiens
ccaucugucuguguuucuuuuugccagcuauu

SEQ ID NO: 83621 - RNA, 32 nt, Homo Sapiens
guuaagcugcuucuccccaucaucaagaaacu

SEQ ID NO: 83622 - RNA, 32 nt, Homo Sapiens
cgaaggcauauuuuucuuccaagcucaaguca

SEQ ID NO: 83623 - RNA, 32 nt, Homo Sapiens
cacacccuggcugcggcccgccgcccuggucc

SEQ ID NO: 83624 - RNA, 32 nt, Homo Sapiens
cagggccaggacccggagguuuagaagaugcu

SEQ ID NO: 83625 - RNA, 32 nt, Homo Sapiens
cccuccagucguuauuucuguuuguuuaagcu

SEQ ID NO: 83626 - RNA, 32 nt, Homo Sapiens
ccaaacccaguuuccuucucauuuuuguuagu

SEQ ID NO: 83627 - RNA, 32 nt, Homo Sapiens
ccccagccggcauacagucaccaccaagucag

SEQ ID NO: 83628 - RNA, 32 nt, Homo Sapiens
agagcuguguaggcugcagaugagaguucugu

SEQ ID NO: 83629 - RNA, 32 nt, Homo Sapiens
ggggagugggggugggaagcagugcguugggg

SEQ ID NO: 83630 - RNA, 32 nt, Homo Sapiens
ugccuacuuuugaauuuuuauucuagcaacag

SEQ ID NO: 83631 - RNA, 32 nt, Homo Sapiens
ccucgagugccaugugaagagaauuugacuug

SEQ ID NO: 83632 - RNA, 32 nt, Homo Sapiens
uuugaguuccaucaaguagauagagaacuucu

SEQ ID NO: 83633 - RNA, 32 nt, Homo Sapiens
cauucacucuuuuucaguuuuaucugucaaua

SEQ ID NO: 83634 - RNA, 32 nt, Homo Sapiens
aauacuguauuuuuacuauaccuuuucugugu

SEQ ID NO: 83635 - RNA, 32 nt, Homo Sapiens
agcagacgucugggcuuuuccccacccagaga

SEQ ID NO: 83636 - RNA, 32 nt, Homo Sapiens
aucucacgaaacaagaguaaugauggcacuuc

SEQ ID NO: 83637 - RNA, 32 nt, Homo Sapiens
uauugcacuuggaggguaacagcugcuuuuuc

SEQ ID NO: 83638 - RNA, 32 nt, Homo Sapiens
cacuuucagagcaucuguguuuuccugacugc

SEQ ID NO: 83639 - RNA, 32 nt, Homo Sapiens
cucauucucuucaucuuuuucuuuuuguuuga

SEQ ID NO: 83640 - RNA, 32 nt, Homo Sapiens
cuagaccggcccgggugacggcgguaggggac

SEQ ID NO: 83641 - RNA, 31 nt, Homo Sapiens
gucccucaagccaccagaugugacaguguug

SEQ ID NO: 83642 - RNA, 32 nt, Homo Sapiens
accauucagucccaggcaugcuggagggacuu

SEQ ID NO: 83643 - RNA, 32 nt, Homo Sapiens
gaaggggaagggagacuggcccugcccagccg

SEQ ID NO: 83644 - RNA, 32 nt, Homo Sapiens
ccauauuuaaggaaacaacaucccauaauaga

SEQ ID NO: 83645 - RNA, 32 nt, Homo Sapiens
ccaauccagugggugcaucccuggacaucagc

SEQ ID NO: 83646 - RNA, 32 nt, Homo Sapiens
ggggauugacagagccagauuggguggagucc

SEQ ID NO: 83647 - RNA, 32 nt, Homo Sapiens
ccccggaaccccgcgagucauugccuggccgc

SEQ ID NO: 83648 - RNA, 32 nt, Homo Sapiens
aaugaaauaaagguaauuaacacaucuaaaaa

SEQ ID NO: 83649 - RNA, 32 nt, Homo Sapiens
gcccgaugagagaaagggaaaguuaaggaugc

SEQ ID NO: 83650 - RNA, 32 nt, Homo Sapiens
uguauaacccuacaaaauacauagaaguauua

SEQ ID NO: 83651 - RNA, 32 nt, Homo Sapiens
agccagguucccucaccccaagcucacccacu

SEQ ID NO: 83652 - RNA, 32 nt, Homo Sapiens
uucauucuuuugcauguggaugugaaguuuuc

SEQ ID NO: 83653 - RNA, 32 nt, Homo Sapiens
ugugcuucugguuuccuggccaaccccagggu

SEQ ID NO: 83654 - RNA, 32 nt, Homo Sapiens
cacgaguacccgcugcacuggagcacggggga

SEQ ID NO: 83655 - RNA, 32 nt, Homo Sapiens
gugugaggacgcgcucccagucgcugagugcc

SEQ ID NO: 83656 - RNA, 32 nt, Homo Sapiens
ucgagaccauccuggccaacguggugaaaccc

SEQ ID NO: 83657 - RNA, 32 nt, Homo Sapiens
aaauaaaacuaaaaauacucaugaaaagagcc

SEQ ID NO: 83658 - RNA, 32 nt, Homo Sapiens
ucuccacccagcuaacuucugcucgucuuuca

SEQ ID NO: 83659 - RNA, 32 nt, Homo Sapiens
agcuuaugggucgauucuaaccaagaaaaguc

SEQ ID NO: 83660 - RNA, 32 nt, Homo Sapiens
gagguugcagugagccgagaucgagccauugc

SEQ ID NO: 83661 - RNA, 32 nt, Homo Sapiens
aaagaaaaagauaaagggauugugaaaagagc

SEQ ID NO: 83662 - RNA, 32 nt, Homo Sapiens
aguuaaauuauguacauauagaguaaucaugg

SEQ ID NO: 83663 - RNA, 32 nt, Homo Sapiens
uccacgcgcgcccugcgaggugggcgcugcgu

SEQ ID NO: 83664 - RNA, 32 nt, Homo Sapiens
agcuagcgucuggccugagaaccucggcgcuc

SEQ ID NO: 83665 - RNA, 32 nt, Homo Sapiens
acuauuuaucugaguucccucugccggaacau

SEQ ID NO: 83666 - RNA, 28 nt, Homo Sapiens
aguggggggcggcgggcagggcugcuuu

SEQ ID NO: 83667 - RNA, 28 nt, Homo Sapiens
aggaaggggcggcuguaggcgcagcuuc

SEQ ID NO: 83668 - RNA, 32 nt, Homo Sapiens
gcccucaccagagcagccauggaggagguggu

SEQ ID NO: 83669 - RNA, 32 nt, Homo Sapiens
gcccuuuuaagugaaggauucagcgacuuuca

SEQ ID NO: 83670 - RNA, 32 nt, Homo Sapiens
guagcauguuauaaaaauggaaucauacagca

SEQ ID NO: 83671 - RNA, 32 nt, Homo Sapiens
ggacagcgcgucggcugcgguucucucucgac

SEQ ID NO: 83672 - RNA, 32 nt, Homo Sapiens
guaaaagucaaucugcaugugcuucuuugauu

SEQ ID NO: 83673 - RNA, 32 nt, Homo Sapiens
gccgggcgugguagcgcacgccuguaauccca

SEQ ID NO: 83674 - RNA, 32 nt, Homo Sapiens
cccauaggucgccccagggccucugcccaccc

SEQ ID NO: 83675 - RNA, 32 nt, Homo Sapiens
acagccuccggccagcagcccuacccggggcu

SEQ ID NO: 83676 - RNA, 32 nt, Homo Sapiens
uauacuuuuuaaaaacuucuguaguucuuuug

SEQ ID NO: 83677 - RNA, 32 nt, Homo Sapiens
gguucguggcagcgcuggugcugcugcauuuu

SEQ ID NO: 83678 - RNA, 32 nt, Homo Sapiens
gaacauuguugaagagcagcauuucccaaaau

SEQ ID NO: 83679 - RNA, 32 nt, Homo Sapiens
acuuggggguccugacucccagcccucauccu

SEQ ID NO: 83680 - RNA, 32 nt, Homo Sapiens
ucucaaaagaaaagaaagaaagggaaguagaa

SEQ ID NO: 83681 - RNA, 32 nt, Homo Sapiens
auuuugcuuguuuuguuuuucuuuuuuaauua

SEQ ID NO: 83682 - RNA, 32 nt, Homo Sapiens
uugggaggccgaggccggcgcaucaucugagg

SEQ ID NO: 83683 - RNA, 32 nt, Homo Sapiens
acaaauucagcagaagacccggcuugcuccag

SEQ ID NO: 83684 - RNA, 32 nt, Homo Sapiens
gccgauucuggacacaccaugacggaacuaga

SEQ ID NO: 83685 - RNA, 32 nt, Homo Sapiens
ggacccugcccgcuuccuggacuucgugccuu

SEQ ID NO: 83686 - RNA, 32 nt, Homo Sapiens
ugcgcugcaugcccaagcguguagaggccagg

SEQ ID NO: 83687 - RNA, 32 nt, Homo Sapiens
aggacuaggaagcucaucagacacuggaaugc

SEQ ID NO: 83688 - RNA, 32 nt, Homo Sapiens
cagauuuaauuuccuaacugccaggugugggg

SEQ ID NO: 83689 - RNA, 29 nt, Homo Sapiens
ggagcucggggacagcgggcgcccuggga

SEQ ID NO: 83690 - RNA, 32 nt, Homo Sapiens
ccgucgcgcacgagguggccucguuggcuuua

SEQ ID NO: 83691 - RNA, 32 nt, Homo Sapiens
aguuuccccucccccaccccuuuuucgauaau

SEQ ID NO: 83692 - RNA, 32 nt, Homo Sapiens
uguuuuaauaaaccaaaauuauuguuauugug

SEQ ID NO: 83693 - RNA, 32 nt, Homo Sapiens
ugugcacgcccggccccggcacugcccggggc

SEQ ID NO: 83694 - RNA, 32 nt, Homo Sapiens
caaaauaugcuucauuuugggggcagaucuau

SEQ ID NO: 83695 - RNA, 32 nt, Homo Sapiens
uuacaggcguggccaccgcacccaggcacauu

SEQ ID NO: 83696 - RNA, 32 nt, Homo Sapiens
agagcccggcgcugcgcgcauggcccugcucu

SEQ ID NO: 83697 - RNA, 31 nt, Homo Sapiens
ggugccucugcauguccuccaaggcaaaguu

SEQ ID NO: 83698 - RNA, 32 nt, Homo Sapiens
guccagcuaccugacucuuuugcaauaacaac

SEQ ID NO: 83699 - RNA, 32 nt, Homo Sapiens
aaucuuucuaccucuuuuuucuaucugccaaa

SEQ ID NO: 83700 - RNA, 32 nt, Homo Sapiens
auguccccaagccccacugacaugaacaccug

SEQ ID NO: 83701 - RNA, 32 nt, Homo Sapiens
guacauuuuuaaaaucagguuguaaaauggca

SEQ ID NO: 83702 - RNA, 32 nt, Homo Sapiens
aaccaagccuuggcucguucucuucucucuuc

SEQ ID NO: 83703 - RNA, 31 nt, Homo Sapiens
gaaagcauggaaauaaaaaagcaaauuacag

SEQ ID NO: 83704 - RNA, 32 nt, Homo Sapiens
uucucaacgcaggacauccucggcggcuccug

SEQ ID NO: 83705 - RNA, 32 nt, Homo Sapiens
ggcacccggggugcgcccuccucggucccgcg

SEQ ID NO: 83706 - RNA, 32 nt, Homo Sapiens
cccaccucagccucccaaagugccgggauuac

SEQ ID NO: 83707 - RNA, 32 nt, Homo Sapiens
cagcugacauuagcuauaguauacaguagguu

SEQ ID NO: 83708 - RNA, 32 nt, Homo Sapiens
uuuggacuggauaagugcuaccuuaaagggua

SEQ ID NO: 83709 - RNA, 32 nt, Homo Sapiens
agagugggccaguugggacccacccgcagagc

SEQ ID NO: 83710 - RNA, 32 nt, Homo Sapiens
auacagguuuauuguauagauacauuauuuau

SEQ ID NO: 83711 - RNA, 32 nt, Homo Sapiens
uggaccagagaccugcagaggaucucaagcua

SEQ ID NO: 83712 - RNA, 29 nt, Homo Sapiens
auauuuauagugauuuacacaauagaaau

SEQ ID NO: 83713 - RNA, 32 nt, Homo Sapiens
caccagggcugccguggcugcagaugccaagc

SEQ ID NO: 83714 - RNA, 32 nt, Homo Sapiens
cacuuggcuccuuuaauagcuguccguccuau

SEQ ID NO: 83715 - RNA, 32 nt, Homo Sapiens
cugguggcugccagcccuggggcccggcacag

SEQ ID NO: 83716 - RNA, 31 nt, Homo Sapiens
caugggucccacugccuguccagccuggcuc

SEQ ID NO: 83717 - RNA, 32 nt, Homo Sapiens
uaacaaaagggaauguucuaaaacuuuuucuu

SEQ ID NO: 83718 - RNA, 32 nt, Homo Sapiens
cugcaguugggaacggugaucuucuugaauga

SEQ ID NO: 83719 - RNA, 32 nt, Homo Sapiens
gcaugccuggcugagagcuugaaacagaguuc

SEQ ID NO: 83720 - RNA, 32 nt, Homo Sapiens
uucuuucuucuuucuuuuuuucuaauugagag

SEQ ID NO: 83721 - RNA, 32 nt, Homo Sapiens
cuggcccuuucugccaagaaggccagcacccu

SEQ ID NO: 83722 - RNA, 32 nt, Homo Sapiens
cuugucccacgucaccauuucaucucauugua

SEQ ID NO: 83723 - RNA, 32 nt, Homo Sapiens
gcugaauggggcaaguugaugaaaacacuacu

SEQ ID NO: 83724 - RNA, 32 nt, Homo Sapiens
caaguggcccugagacacgugaacaccucccu

SEQ ID NO: 83725 - RNA, 32 nt, Homo Sapiens
cauauuugacauuguaguaauccaccuugcau

SEQ ID NO: 83726 - RNA, 32 nt, Homo Sapiens
cucuggcuggugcugggccggagguggcuaug

SEQ ID NO: 83727 - RNA, 32 nt, Homo Sapiens
caauagugguuuggcgaccccuccucaguggc

SEQ ID NO: 83728 - RNA, 32 nt, Homo Sapiens
gaguaauuggcacaacucuaucuaagguguuu

SEQ ID NO: 83729 - RNA, 32 nt, Homo Sapiens
ccgccgccgccgccaggcacuccggagcuguc

SEQ ID NO: 83730 - RNA, 32 nt, Homo Sapiens
ucccggggcugggauugcgcgcccgcccggaa

SEQ ID NO: 83731 - RNA, 32 nt, Homo Sapiens
ccagaccacagcauggcugugcaccugugugu

SEQ ID NO: 83732 - RNA, 32 nt, Homo Sapiens
gggugaaagagaaaccacguauuuuguuauua

SEQ ID NO: 83733 - RNA, 32 nt, Homo Sapiens
gcugguggcuuccauccguucuccucuggggu

SEQ ID NO: 83734 - RNA, 32 nt, Homo Sapiens
gcgccugcggucccuccuggccccacgguccc

SEQ ID NO: 83735 - RNA, 32 nt, Homo Sapiens
aagaaaagaaaagaaaaaggugaagcacaauu

SEQ ID NO: 83736 - RNA, 32 nt, Homo Sapiens
ugggcagggcccggcgccguccguggaugagc

SEQ ID NO: 83737 - RNA, 32 nt, Homo Sapiens
gugacuucuggugaugauaaaaaugguuuuau

SEQ ID NO: 83738 - RNA, 32 nt, Homo Sapiens
gguugcggcgcggcucuggcccgggcgcacgc

SEQ ID NO: 83739 - RNA, 32 nt, Homo Sapiens
auauguauaucaauauuuuaaauucaucuuug

SEQ ID NO: 83740 - RNA, 32 nt, Homo Sapiens
uaggaguuucaauaauaaccauugcuuuuaaa

SEQ ID NO: 83741 - RNA, 32 nt, Homo Sapiens
uguagcugaaacaaaaaugccagaaggauaau

SEQ ID NO: 83742 - RNA, 32 nt, Homo Sapiens
ccucuuccauccccaggcacagaucaaaggcg

SEQ ID NO: 83743 - RNA, 32 nt, Homo Sapiens
auaaaccuagaguauacauguacaaaauacau

SEQ ID NO: 83744 - RNA, 32 nt, Homo Sapiens
gcgagugcagauugcucccccgcggccgcaga

SEQ ID NO: 83745 - RNA, 32 nt, Homo Sapiens
guaucuuuucagaccuuuuucuuggcaaauga

SEQ ID NO: 83746 - RNA, 32 nt, Homo Sapiens
augagggaggucggggcugcagugagccaaga

SEQ ID NO: 83747 - RNA, 32 nt, Homo Sapiens
gcgaaugugcguuguuuuggacuucccuaaau

SEQ ID NO: 83748 - RNA, 32 nt, Homo Sapiens
ggugcaucugcacugucaccaugugcccagag

SEQ ID NO: 83749 - RNA, 32 nt, Homo Sapiens
cagcugagggagaggaagugagcgccacugcu

SEQ ID NO: 83750 - RNA, 32 nt, Homo Sapiens
gaaaagaacagaauucuugugccuaccuaaga

SEQ ID NO: 83751 - RNA, 32 nt, Homo Sapiens
uuccaaacucuuccuugugguaucaguuuccu

SEQ ID NO: 83752 - RNA, 32 nt, Homo Sapiens
cccuucuccaucgcccucucccagaaagcucc

SEQ ID NO: 83753 - RNA, 32 nt, Homo Sapiens
cagagcuggaaggccugcuugcgaaggcccuc

SEQ ID NO: 83754 - RNA, 32 nt, Homo Sapiens
aagggagggccuugccuauuagcagauauuuc

SEQ ID NO: 83755 - RNA, 32 nt, Homo Sapiens
uuuacagaugacuaaaaauguuaauuuuauga

SEQ ID NO: 83756 - RNA, 32 nt, Homo Sapiens
agccggcucagaggggccggcgcgcccgucgg

SEQ ID NO: 83757 - RNA, 30 nt, Homo Sapiens
gagguugauggcggcggcggagcuccgaga

SEQ ID NO: 83758 - RNA, 32 nt, Homo Sapiens
gacucaggacgcccagcacccuggauaggacc

SEQ ID NO: 83759 - RNA, 32 nt, Homo Sapiens
uuaccaaggauauuuuuuaggauaagguagcu

SEQ ID NO: 83760 - RNA, 32 nt, Homo Sapiens
aggccaggacgcgcgacacguggcuggcggcc

SEQ ID NO: 83761 - RNA, 30 nt, Homo Sapiens
uuauuuaugguaauggggggcagaguaaga

SEQ ID NO: 83762 - RNA, 32 nt, Homo Sapiens
cugugugccagcccugugugcacggccucugc

SEQ ID NO: 83763 - RNA, 32 nt, Homo Sapiens
agccccacugucagcagcaccgagccgggaaa

SEQ ID NO: 83764 - RNA, 32 nt, Homo Sapiens
ugcugugggaggcccagggagcucccgucugu

SEQ ID NO: 83765 - RNA, 32 nt, Homo Sapiens
caacauaaugagacccuguuucaacuuaaaaa

SEQ ID NO: 83766 - RNA, 32 nt, Homo Sapiens
ugccccuggccuggccagcagugaauguagga

SEQ ID NO: 83767 - RNA, 32 nt, Homo Sapiens
ccuguauccuaccacacgcagaucagcacuug

SEQ ID NO: 83768 - RNA, 32 nt, Homo Sapiens
agacaaggaucuuaguugauauuuugggcuug

SEQ ID NO: 83769 - RNA, 32 nt, Homo Sapiens
gaccuccccaugcccuccccagccucucccag

SEQ ID NO: 83770 - RNA, 32 nt, Homo Sapiens
acuugggcggccuugggaaaucgaugagaaau

SEQ ID NO: 83771 - RNA, 32 nt, Homo Sapiens
ccuugguguuuguaaaauaaguaugaauacac

SEQ ID NO: 83772 - RNA, 32 nt, Homo Sapiens
agcggcuccgggcggcagcuaugaggcgggac

SEQ ID NO: 83773 - RNA, 32 nt, Homo Sapiens
acaagcccuuucugcccauacucugggacaaa

SEQ ID NO: 83774 - RNA, 32 nt, Homo Sapiens
agaaucuuucccuugcuagaccccagaauuuu

SEQ ID NO: 83775 - RNA, 32 nt, Homo Sapiens
gcgaguggcuccaucuuccucagacuuaucgc

SEQ ID NO: 83776 - RNA, 32 nt, Homo Sapiens
cuccuccucuggcuccuccuugcagacaguua

SEQ ID NO: 83777 - RNA, 32 nt, Homo Sapiens
guccgcugucuccuggguuccccucguagcga

SEQ ID NO: 83778 - RNA, 32 nt, Homo Sapiens
ccaucuccauucucacccaguuccucucuccu

SEQ ID NO: 83779 - RNA, 32 nt, Homo Sapiens
aaaggaggaagagaaaaaauauuuuccugcca

SEQ ID NO: 83780 - RNA, 32 nt, Homo Sapiens
aucaaaacaaggaaagaaaaagacaggacagu

SEQ ID NO: 83781 - RNA, 32 nt, Homo Sapiens
auuuagaaaaagacugguagaaauuggaguga

SEQ ID NO: 83782 - RNA, 32 nt, Homo Sapiens
auaaaggguacccugguaacacugcaguucaa

SEQ ID NO: 83783 - RNA, 29 nt, Homo Sapiens
uugucuauagcuaugucuauaaacaaccu

SEQ ID NO: 83784 - RNA, 32 nt, Homo Sapiens
aauauaaacaaaugucaacucuguuauaauua

SEQ ID NO: 83785 - RNA, 32 nt, Homo Sapiens
cuggccagaggaauuggggucuugccaucccu

SEQ ID NO: 83786 - RNA, 32 nt, Homo Sapiens
uuuuuuaccuuuaaguuuuucuuccuuuugcu

SEQ ID NO: 83787 - RNA, 31 nt, Homo Sapiens
uggagugagaucuuacagguaucaggcacag

SEQ ID NO: 83788 - RNA, 32 nt, Homo Sapiens
agcccuuguguuuuccauuauguuuagugccu

SEQ ID NO: 83789 - RNA, 32 nt, Homo Sapiens
ugauggaaugacuucugcaacuguagucccag

SEQ ID NO: 83790 - RNA, 32 nt, Homo Sapiens
accauugccuaccucauagagauguuaugggg

SEQ ID NO: 83791 - RNA, 32 nt, Homo Sapiens
acuucaaaacaaagacuguguaagugugauuc

SEQ ID NO: 83792 - RNA, 32 nt, Homo Sapiens
cguuggaaagaaagcugcuuguguuugcuuug

SEQ ID NO: 83793 - RNA, 32 nt, Homo Sapiens
uugccacaggcaagccgccucugcagagcugu

SEQ ID NO: 83794 - RNA, 32 nt, Homo Sapiens
gaggaacugggacaccaaaaggagaaacucug

SEQ ID NO: 83795 - RNA, 32 nt, Homo Sapiens
aauggaaguuaguguaagcugauaaaaacgua

SEQ ID NO: 83796 - RNA, 32 nt, Homo Sapiens
ccuuccagggcuuuuccuuugggggaggcgga

SEQ ID NO: 83797 - RNA, 32 nt, Homo Sapiens
ccaggcccggcggacagccucuuccugcagcg

SEQ ID NO: 83798 - RNA, 32 nt, Homo Sapiens
uggagcagcuggagguaaggcugggcccuggg

SEQ ID NO: 83799 - RNA, 32 nt, Homo Sapiens
cagcucacagaaagagcugaaugaaggccugg

SEQ ID NO: 83800 - RNA, 32 nt, Homo Sapiens
guagucaugaguuuuucuuuguuugcauauaa

SEQ ID NO: 83801 - RNA, 32 nt, Homo Sapiens
guauuaauucucuuuccauccuccuccucaga

SEQ ID NO: 83802 - RNA, 32 nt, Homo Sapiens
aggcccuccgcgggggacaggaacacccagcc

SEQ ID NO: 83803 - RNA, 32 nt, Homo Sapiens
ucgcucggaggguggaagccggggucucgcgg

SEQ ID NO: 83804 - RNA, 32 nt, Homo Sapiens
cguugccgacucgcgcucucggcuucugcucc

SEQ ID NO: 83805 - RNA, 32 nt, Homo Sapiens
cguccucccguccagccagcccgggcccgcgg

SEQ ID NO: 83806 - RNA, 32 nt, Homo Sapiens
aacuuuuaaaaauuauuuaaaagaagucaaug

SEQ ID NO: 83807 - RNA, 32 nt, Homo Sapiens
uagagaaauucacuucauuguaccccaugacc

SEQ ID NO: 83808 - RNA, 32 nt, Homo Sapiens
uagccaucagcuuuguacaucaucauuuuucu

SEQ ID NO: 83809 - RNA, 32 nt, Homo Sapiens
uauaucuauauacauauucaguugaucauuuu

SEQ ID NO: 83810 - RNA, 32 nt, Homo Sapiens
cccugggacuuugggcucuauagggcagccuc

SEQ ID NO: 83811 - RNA, 32 nt, Homo Sapiens
gucucuggaaggcggcuugggcccuggggaac

SEQ ID NO: 83812 - RNA, 32 nt, Homo Sapiens
ugcaaggacaccuuugcagggauucuuguccu

SEQ ID NO: 83813 - RNA, 32 nt, Homo Sapiens
cacuuuuagcucugggcaccuccagcuccugc

SEQ ID NO: 83814 - RNA, 32 nt, Homo Sapiens
uucauaauuuucuauuugaaaaugugcugauu

SEQ ID NO: 83815 - RNA, 32 nt, Homo Sapiens
gaaagggagaugaaaacugaccacgugccagg

SEQ ID NO: 83816 - RNA, 32 nt, Homo Sapiens
gagggaaggacaaaaacagaaaaauguuuggg

SEQ ID NO: 83817 - RNA, 32 nt, Homo Sapiens
cagcccgcgggccugucgggcccagccgaggu

SEQ ID NO: 83818 - RNA, 32 nt, Homo Sapiens
ccugggggaaagggaagucugaagcucaguug

SEQ ID NO: 83819 - RNA, 32 nt, Homo Sapiens
ggggugcuggaugaaagagacgaggggugauc

SEQ ID NO: 83820 - RNA, 32 nt, Homo Sapiens
uuauuuuaacccucuuuaauucuuauucaauu

SEQ ID NO: 83821 - RNA, 32 nt, Homo Sapiens
caaaggaggggagaggcacggauccagguacc

SEQ ID NO: 83822 - RNA, 32 nt, Homo Sapiens
aguuggaacaucaccaguacuccagaagcccc

SEQ ID NO: 83823 - RNA, 32 nt, Homo Sapiens
aauguauguauuauaauggauuugaaauuugc

SEQ ID NO: 83824 - RNA, 32 nt, Homo Sapiens
ugguucucacaccagcagcaagaggcaaggca

SEQ ID NO: 83825 - RNA, 32 nt, Homo Sapiens
ucaauccuuuuaugccgagaagaucucagcug

SEQ ID NO: 83826 - RNA, 32 nt, Homo Sapiens
ccccuucacucagccccccagugucgaaggcc

SEQ ID NO: 83827 - RNA, 32 nt, Homo Sapiens
uugcagcacuacuuuaaauauuagauuauguc

SEQ ID NO: 83828 - RNA, 32 nt, Homo Sapiens
uuaaugaucagaaagaaugcugcuguaaacac

SEQ ID NO: 83829 - RNA, 32 nt, Homo Sapiens
gauaauuuucuuuucauuuuuaagugagaauu

SEQ ID NO: 83830 - RNA, 32 nt, Homo Sapiens
cagggacccagacccacccccagaagccaugu

SEQ ID NO: 83831 - RNA, 32 nt, Homo Sapiens
aaaaagacaacaacccacaggauuggaauggu

SEQ ID NO: 83832 - RNA, 32 nt, Homo Sapiens
uucucaacagcuuuccauucagucuggauccu

SEQ ID NO: 83833 - RNA, 32 nt, Homo Sapiens
ucguucagggagggacuugucaugcucauggu

SEQ ID NO: 83834 - RNA, 32 nt, Homo Sapiens
uuaaagacagaaagccacaggagcccccacgu

SEQ ID NO: 83835 - RNA, 31 nt, Homo Sapiens
ucuuucugacccucagaaauacauuguccuu

SEQ ID NO: 83836 - RNA, 32 nt, Homo Sapiens
aucuaguccccucuccugcaucugucucccuu

SEQ ID NO: 83837 - RNA, 32 nt, Homo Sapiens
cuugagacugugcuauacacacacagcugaga

SEQ ID NO: 83838 - RNA, 32 nt, Homo Sapiens
uugcagugguuuuagugggugaaaauguccca

SEQ ID NO: 83839 - RNA, 32 nt, Homo Sapiens
uuauuucaaccuguguuuuguaucauaacaga

SEQ ID NO: 83840 - RNA, 32 nt, Homo Sapiens
accucgccgggcaucucuaucuugcuggaagu

SEQ ID NO: 83841 - RNA, 31 nt, Homo Sapiens
cguuagaaauaaaagcagcaucaaugcauaa

SEQ ID NO: 83842 - RNA, 29 nt, Homo Sapiens
agacagaugaagauguagagagaacaaga

SEQ ID NO: 83843 - RNA, 32 nt, Homo Sapiens
ucagcgggguccaggagaagcaggcgccaggg

SEQ ID NO: 83844 - RNA, 32 nt, Homo Sapiens
cacuguuuaaugaguucuccauauuccuuuag

SEQ ID NO: 83845 - RNA, 32 nt, Homo Sapiens
agacaggcccaacccacccccauuugcacuga

SEQ ID NO: 83846 - RNA, 32 nt, Homo Sapiens
auaaaaucuuggcaucacuguuugcugcacag

SEQ ID NO: 83847 - RNA, 32 nt, Homo Sapiens
caugggagugccuaauguugcuuuuguuaugu

SEQ ID NO: 83848 - RNA, 32 nt, Homo Sapiens
cgcccggccccggcugggaccaugguguuucu

SEQ ID NO: 83849 - RNA, 32 nt, Homo Sapiens
ccggcuguucuucccgccacgaucuuucugug

SEQ ID NO: 83850 - RNA, 32 nt, Homo Sapiens
uuaguugcuaccaauauuuagcaacuacaaug

SEQ ID NO: 83851 - RNA, 32 nt, Homo Sapiens
cgcugcuggcuggccugaccuaggcgcgcggg

SEQ ID NO: 83852 - RNA, 32 nt, Homo Sapiens
ucuuauucacugaguuucuugcacgguuucuu

SEQ ID NO: 83853 - RNA, 32 nt, Homo Sapiens
gaagggucccccugcugacuggagagcuggga

SEQ ID NO: 83854 - RNA, 32 nt, Homo Sapiens
uucuucugacuucuuggcuaacuuccagacua

SEQ ID NO: 83855 - RNA, 32 nt, Homo Sapiens
cuccuuugugguagccucuggccaucuggacc

SEQ ID NO: 83856 - RNA, 31 nt, Homo Sapiens
uguauauaagagguuauugauaaacuucuga

SEQ ID NO: 83857 - RNA, 32 nt, Homo Sapiens
ucgaaccuaagguuuagaugcauuguauaaaa

SEQ ID NO: 83858 - RNA, 32 nt, Homo Sapiens
acaaagacauuauuuucuuacuguucuauauc

SEQ ID NO: 83859 - RNA, 32 nt, Homo Sapiens
cccaauuguuuuuucuuuucaacauuaccaau

SEQ ID NO: 83860 - RNA, 32 nt, Homo Sapiens
augagggaggccgaggacuucaugcuccggac

SEQ ID NO: 83861 - RNA, 32 nt, Homo Sapiens
gcccugugccuauauauacacaugcgucuauc

SEQ ID NO: 83862 - RNA, 32 nt, Homo Sapiens
cuuuacacuacuuuuucuuccccuuccucuug

SEQ ID NO: 83863 - RNA, 30 nt, Homo Sapiens
cagaggccacuugcuugcugacuuagccuc

SEQ ID NO: 83864 - RNA, 32 nt, Homo Sapiens
aagugguaaaaugaguaauucauucauuuugu

SEQ ID NO: 83865 - RNA, 32 nt, Homo Sapiens
gaggucuccgcgcacucgcucccggcccaugc

SEQ ID NO: 83866 - RNA, 32 nt, Homo Sapiens
cuuuugacaaaauaaacuuguguaaauuuuga

SEQ ID NO: 83867 - RNA, 32 nt, Homo Sapiens
uaucuguugggucugggacauuuaguuuaguu

SEQ ID NO: 83868 - RNA, 32 nt, Homo Sapiens
auugguauuuaaaauaauuucuaagcugugaa

SEQ ID NO: 83869 - RNA, 32 nt, Homo Sapiens
cagcuuuuguugaacaaaaaucgugcucuuuc

SEQ ID NO: 83870 - RNA, 32 nt, Homo Sapiens
guuuucuauucuuggagauaaaaauuaaaugg

SEQ ID NO: 83871 - RNA, 32 nt, Homo Sapiens
aucacaucugcccucccugcaauugggcagcu

SEQ ID NO: 83872 - RNA, 32 nt, Homo Sapiens
aguuugaacaaguuccucccaagcuucuguac

SEQ ID NO: 83873 - RNA, 32 nt, Homo Sapiens
auuuuccccccucgcuagaccggguccaaaac

SEQ ID NO: 83874 - RNA, 32 nt, Homo Sapiens
auccuggcuaacacgaugaaaccccgucucua

SEQ ID NO: 83875 - RNA, 32 nt, Homo Sapiens
ccagcggcagaggccuggcugcaccugagggc

SEQ ID NO: 83876 - RNA, 31 nt, Homo Sapiens
cagguggcagacacacucagagcaugucugg

SEQ ID NO: 83877 - RNA, 32 nt, Homo Sapiens
agaccaguacauauaaaguaaaugacauggau

SEQ ID NO: 83878 - RNA, 32 nt, Homo Sapiens
aaggcaccaugaacccuccacacugggccaaa

SEQ ID NO: 83879 - RNA, 32 nt, Homo Sapiens
agaaaacuuuguucuguaaauaugaucagugu

SEQ ID NO: 83880 - RNA, 32 nt, Homo Sapiens
gacgcuacaccuuggucuuuccggguccuugc

SEQ ID NO: 83881 - RNA, 32 nt, Homo Sapiens
caggacugccagcgggagcuccagagccugcu

SEQ ID NO: 83882 - RNA, 32 nt, Homo Sapiens
gggacugcugggggcggggcuugguggugacu

SEQ ID NO: 83883 - RNA, 32 nt, Homo Sapiens
cagaggaggagaaauugaagguccagggcaau

SEQ ID NO: 83884 - RNA, 32 nt, Homo Sapiens
ggagcacucgauacacaccgaugggcugaagg

SEQ ID NO: 83885 - RNA, 32 nt, Homo Sapiens
gaggcuugaugaugaugguguuggugaaaaua

SEQ ID NO: 83886 - RNA, 32 nt, Homo Sapiens
acgcccgggugagcgugugugcaugcacgugu

SEQ ID NO: 83887 - RNA, 32 nt, Homo Sapiens
gaggggguguugagggcggagaaaugcaaguu

SEQ ID NO: 83888 - RNA, 32 nt, Homo Sapiens
ccgaguggaguucgguccuucucugaacaguu

SEQ ID NO: 83889 - RNA, 32 nt, Homo Sapiens
aguuuuaucucuauacccaaaauggagguuaa

SEQ ID NO: 83890 - RNA, 32 nt, Homo Sapiens
ucugaccacccccuccuccccaucccaccccu

SEQ ID NO: 83891 - RNA, 32 nt, Homo Sapiens
cggcccccgcgugccucccaggcuccgcaccc

SEQ ID NO: 83892 - RNA, 32 nt, Homo Sapiens
uugaaagcuuuuuaggaaauuuugacaguauu

SEQ ID NO: 83893 - RNA, 32 nt, Homo Sapiens
ccacugccaaccuugagacaagacugaccccu

SEQ ID NO: 83894 - RNA, 32 nt, Homo Sapiens
cugggaugggccgcuuucagaagcccugcagu

SEQ ID NO: 83895 - RNA, 32 nt, Homo Sapiens
ccuuucggaucuauuuggucuuucucaugucc

SEQ ID NO: 83896 - RNA, 32 nt, Homo Sapiens
agauuggcucuggccuggccgaguuccaggug

SEQ ID NO: 83897 - RNA, 32 nt, Homo Sapiens
uuuauguacugacuucauaaaagccaucucag

SEQ ID NO: 83898 - RNA, 32 nt, Homo Sapiens
uguucaucuaucgcaaaguaaaaauguaaagu

SEQ ID NO: 83899 - RNA, 32 nt, Homo Sapiens
gugcacugcugcgcgcugggcagugcggggaa

SEQ ID NO: 83900 - RNA, 32 nt, Homo Sapiens
ggagaccuggcuugggcuaaaaucgaaauaca

SEQ ID NO: 83901 - RNA, 32 nt, Homo Sapiens
gcagcgggucugcggccgccgagaugggaagu

SEQ ID NO: 83902 - RNA, 32 nt, Homo Sapiens
uguugugggagggaggugggggugccuggcag

SEQ ID NO: 83903 - RNA, 32 nt, Homo Sapiens
gaugcauuccucccauuuacuuuauuauugua

SEQ ID NO: 83904 - RNA, 32 nt, Homo Sapiens
gccucggcuugcggccggcaguuuccgugggu

SEQ ID NO: 83905 - RNA, 32 nt, Homo Sapiens
uggcuaauauuuuuauaacgugguucuuauuu

SEQ ID NO: 83906 - RNA, 32 nt, Homo Sapiens
cucuucagguucccucuuggugccuaaccugg

SEQ ID NO: 83907 - RNA, 32 nt, Homo Sapiens
uuuacccaagugccuagauaucauuuuauaau

SEQ ID NO: 83908 - RNA, 32 nt, Homo Sapiens
ugaauccuagcccuuacccccauccucucuag

SEQ ID NO: 83909 - RNA, 32 nt, Homo Sapiens
uaaugcuagguuuuugucuuuacaaauuauuu

SEQ ID NO: 83910 - RNA, 32 nt, Homo Sapiens
ggcuggucucgaacucuugaccucaggugauc

SEQ ID NO: 83911 - RNA, 32 nt, Homo Sapiens
ggcuggucccgaacuccugaccucaggugauc

SEQ ID NO: 83912 - RNA, 29 nt, Homo Sapiens
gacucuguauaaaaugguugggaagcugc

SEQ ID NO: 83913 - RNA, 29 nt, Homo Sapiens
uuuaaagugcucuuauauuuucaugaguu

SEQ ID NO: 83914 - RNA, 32 nt, Homo Sapiens
cugcucagaagccauuucauuccccggcucca

SEQ ID NO: 83915 - RNA, 32 nt, Homo Sapiens
caccggcuugguucugggggcuccucuaacau

SEQ ID NO: 83916 - RNA, 32 nt, Homo Sapiens
agcuggaacccuggugucuccuccagcguggu

SEQ ID NO: 83917 - RNA, 32 nt, Homo Sapiens
agggaaaguuugcggcgccgugacggaucgac

SEQ ID NO: 83918 - RNA, 29 nt, Homo Sapiens
uucgccaugacuuucuagugaauuauuac

SEQ ID NO: 83919 - RNA, 32 nt, Homo Sapiens
cucaacgcuuuguuuucuuacacuugaaaauc

SEQ ID NO: 83920 - RNA, 32 nt, Homo Sapiens
gaaggcacgggacaggcaugugacacuaggcc

SEQ ID NO: 83921 - RNA, 32 nt, Homo Sapiens
gccccccaguccagcccucucccuuccacugg

SEQ ID NO: 83922 - RNA, 32 nt, Homo Sapiens
gugguagcucugagcccuccuucuugcccuga

SEQ ID NO: 83923 - RNA, 32 nt, Homo Sapiens
caucccggaggaggaagaagaaguguuauacg

SEQ ID NO: 83924 - RNA, 32 nt, Homo Sapiens
acaaaggcucaagggcagcaucccaggccggc

SEQ ID NO: 83925 - RNA, 32 nt, Homo Sapiens
ugguaaucaacacguguuugccugcaguggcc

SEQ ID NO: 83926 - RNA, 32 nt, Homo Sapiens
aauacaaauauguaaaauugagaauuaugauu

SEQ ID NO: 83927 - RNA, 32 nt, Homo Sapiens
acccgcgucuccagacucacgugugcaucuuu

SEQ ID NO: 83928 - RNA, 32 nt, Homo Sapiens
uucccucugaagaucucuuaggagugcaccag

SEQ ID NO: 83929 - RNA, 32 nt, Homo Sapiens
gcaugaaaaauaaaauaaaauaaaacggggau

SEQ ID NO: 83930 - RNA, 32 nt, Homo Sapiens
gugcauugauggagcagcuggugcugcuggga

SEQ ID NO: 83931 - RNA, 32 nt, Homo Sapiens
uuguauccagagggugacccucuucucaagga

SEQ ID NO: 83932 - RNA, 32 nt, Homo Sapiens
cagcuuauugcuuuuucuucccuuuuuauguu

SEQ ID NO: 83933 - RNA, 32 nt, Homo Sapiens
ccauguugcauaucagggugcucaaggauugg

SEQ ID NO: 83934 - RNA, 32 nt, Homo Sapiens
gucaaaaggugauggagggauccuacagaagc

SEQ ID NO: 83935 - RNA, 32 nt, Homo Sapiens
cggggcgccccgugucgccgccggagaggcac

SEQ ID NO: 83936 - RNA, 32 nt, Homo Sapiens
aaaugccaccgucccgaaauacaggauuuuug

SEQ ID NO: 83937 - RNA, 32 nt, Homo Sapiens
aauauuuaccagaauauucaauaaaaagauga

SEQ ID NO: 83938 - RNA, 32 nt, Homo Sapiens
ggacagcuagagcacauccucuaguuaguuug

SEQ ID NO: 83939 - RNA, 32 nt, Homo Sapiens
uuguucagcuuaauuuacuguucaaaggcauu

SEQ ID NO: 83940 - RNA, 32 nt, Homo Sapiens
uacgcgggcacgggaccucaccggagagaaug

SEQ ID NO: 83941 - RNA, 32 nt, Homo Sapiens
auccccuuggaauauuaagaggucaacacgug

SEQ ID NO: 83942 - RNA, 32 nt, Homo Sapiens
gaaaauguuuuaaaaucuguuaaaauaucuuu

SEQ ID NO: 83943 - RNA, 32 nt, Homo Sapiens
uauacauguuuaguauuaugucuuauuggugc

SEQ ID NO: 83944 - RNA, 32 nt, Homo Sapiens
ucuucuuuucccuuuuugucccagagcucagc

SEQ ID NO: 83945 - RNA, 32 nt, Homo Sapiens
ccacauaaaaauuuucugagguuguccucauu

SEQ ID NO: 83946 - RNA, 32 nt, Homo Sapiens
gacgccuuugcccagcucccacgccugacuca

SEQ ID NO: 83947 - RNA, 32 nt, Homo Sapiens
aagcccugaaaauaauccaaauaacauauacg

SEQ ID NO: 83948 - RNA, 32 nt, Homo Sapiens
gaggcgaggaggagcgcuggcgagacgguaaa

SEQ ID NO: 83949 - RNA, 32 nt, Homo Sapiens
cugcccgccugguaccgcgccgcggccgcugc

SEQ ID NO: 83950 - RNA, 32 nt, Homo Sapiens
uuuucuguuuccuauguuuucuuaaaaaauag

SEQ ID NO: 83951 - RNA, 32 nt, Homo Sapiens
uaggacacugaauaacuuggcuaaagccccgu

SEQ ID NO: 83952 - RNA, 32 nt, Homo Sapiens
gagaggcgcuccccgggcuuccuacccggcag

SEQ ID NO: 83953 - RNA, 30 nt, Homo Sapiens
ggccucgcacagccggccgcccugaggguc

SEQ ID NO: 83954 - RNA, 32 nt, Homo Sapiens
agcaucuuuacuauaauuaccaaaaacaugua

SEQ ID NO: 83955 - RNA, 32 nt, Homo Sapiens
cagagccucaggauaagcccgaagggggucug

SEQ ID NO: 83956 - RNA, 32 nt, Homo Sapiens
cacaagcccccuccccucuucaguggauacug

SEQ ID NO: 83957 - RNA, 32 nt, Homo Sapiens
cuuugcaaaaaggaacaaaacaacacaaaagc

SEQ ID NO: 83958 - RNA, 32 nt, Homo Sapiens
accaucugccuggaagaccugggcuucucagg

SEQ ID NO: 83959 - RNA, 32 nt, Homo Sapiens
ggaaggugguaaguaagguuucccuucuacug

SEQ ID NO: 83960 - RNA, 32 nt, Homo Sapiens
ucagucacguuuccuuuucauuuaauggggau

SEQ ID NO: 83961 - RNA, 32 nt, Homo Sapiens
cucaggccuccagcguuggcuggccauggcca

SEQ ID NO: 83962 - RNA, 32 nt, Homo Sapiens
ccucugcaaccaaaaauccuuggggucccagg

SEQ ID NO: 83963 - RNA, 32 nt, Homo Sapiens
aagcauugugaaugcuuuuuaauagcauucau

SEQ ID NO: 83964 - RNA, 32 nt, Homo Sapiens
acauauaucuguguauauaaauccacaugcac

SEQ ID NO: 83965 - RNA, 32 nt, Homo Sapiens
gcgcggccgccgagagaccccggaggcguagc

SEQ ID NO: 83966 - RNA, 32 nt, Homo Sapiens
guguccacguuccaacaccgccggcgagagca

SEQ ID NO: 83967 - RNA, 32 nt, Homo Sapiens
uucacgccgucucggagcggauaaugcgguga

SEQ ID NO: 83968 - RNA, 32 nt, Homo Sapiens
gcaccaggcaggagaugcugcaggcagguguc

SEQ ID NO: 83969 - RNA, 32 nt, Homo Sapiens
cugcuguccugccucugaccaguggccgcccc

SEQ ID NO: 83970 - RNA, 32 nt, Homo Sapiens
ugaggagagggugaggcccacucuguuccuac

SEQ ID NO: 83971 - RNA, 32 nt, Homo Sapiens
cgcgccagggcgcugacagucuggcucuugga

SEQ ID NO: 83972 - RNA, 32 nt, Homo Sapiens
ggcacagggccgcccucugugcugaggccgug

SEQ ID NO: 83973 - RNA, 32 nt, Homo Sapiens
auguuuggaguuucauuauauuuuuuguuuuu

SEQ ID NO: 83974 - RNA, 32 nt, Homo Sapiens
uuguagcacgaauaaauugcuguacuucauua

SEQ ID NO: 83975 - RNA, 32 nt, Homo Sapiens
gauauacuaugaaugcuauuucuagaaaaagu

SEQ ID NO: 83976 - RNA, 32 nt, Homo Sapiens
guuauuuugucuggggaaaaaauauuuacugg

SEQ ID NO: 83977 - RNA, 32 nt, Homo Sapiens
agaagcgugaaucauaugauaauuacauaugg

SEQ ID NO: 83978 - RNA, 32 nt, Homo Sapiens
gcgggggucgccccgcugcgcaucagccggug

SEQ ID NO: 83979 - RNA, 32 nt, Homo Sapiens
ugaauugacaacauuugagacuucgacaggca

SEQ ID NO: 83980 - RNA, 32 nt, Homo Sapiens
aucagucuucacacuuauuaaccaucagcgug

SEQ ID NO: 83981 - RNA, 32 nt, Homo Sapiens
cucggcccgcggccugacagggacuuagcccg

SEQ ID NO: 83982 - RNA, 32 nt, Homo Sapiens
uuaugaaaucauaguauaugauuguauuuaaa

SEQ ID NO: 83983 - RNA, 32 nt, Homo Sapiens
auuugcuuuauuucuacagugauucuacuucu

SEQ ID NO: 83984 - RNA, 32 nt, Homo Sapiens
gcgcggcagcgggucuggcuggcggcagcggc

SEQ ID NO: 83985 - RNA, 32 nt, Homo Sapiens
auuuugauuuuuucuucagaauaugguauacu

SEQ ID NO: 83986 - RNA, 32 nt, Homo Sapiens
aaauauuccagaauccauaugaaauucaugag

SEQ ID NO: 83987 - RNA, 32 nt, Homo Sapiens
gcucugcuauacagucuauaaaaauuguuauu

SEQ ID NO: 83988 - RNA, 32 nt, Homo Sapiens
ugaagaagccaacacagaugaccuuacgacuc

SEQ ID NO: 83989 - RNA, 32 nt, Homo Sapiens
aaagucggaagcucugugcugcugcuggcccc

SEQ ID NO: 83990 - RNA, 32 nt, Homo Sapiens
cugguaccugcguccgaccgggacgcucugca

SEQ ID NO: 83991 - RNA, 32 nt, Homo Sapiens
cacugcaacuucugccucccagguucaagcaa

SEQ ID NO: 83992 - RNA, 32 nt, Homo Sapiens
ccgcugaaccucccgcugcugcugcugcugcu

SEQ ID NO: 83993 - RNA, 32 nt, Homo Sapiens
ggaggucuaagaauuaaaguugugugggaguu

SEQ ID NO: 83994 - RNA, 32 nt, Homo Sapiens
ucagagaucaguacccuugaaaaguguccggu

SEQ ID NO: 83995 - RNA, 32 nt, Homo Sapiens
auuuugaguuuuucuuuuugugcauuguccuc

SEQ ID NO: 83996 - RNA, 32 nt, Homo Sapiens
agucaaaauacaaaugcauagauaguaaauga

SEQ ID NO: 83997 - RNA, 32 nt, Homo Sapiens
ccagugcgacaggcccuugguggggucugucu

SEQ ID NO: 83998 - RNA, 32 nt, Homo Sapiens
uuccgccucgcggaccccggaagcgcgcgugg

SEQ ID NO: 83999 - RNA, 32 nt, Homo Sapiens
uuuguuccuuuaaauuucagaccauguccaac

SEQ ID NO: 84000 - RNA, 32 nt, Homo Sapiens
ucuuuuccucuuucuuugugucucucuugaau

SEQ ID NO: 84001 - RNA, 32 nt, Homo Sapiens
uacacauggagugcuucuggaacuaucagccc

SEQ ID NO: 84002 - RNA, 32 nt, Homo Sapiens
gugauggaggaugugcuaauuguaaugucaua

SEQ ID NO: 84003 - RNA, 32 nt, Homo Sapiens
guugaaauacucggcuagcaucagcaccacua

SEQ ID NO: 84004 - RNA, 32 nt, Homo Sapiens
auuccuuuuuuggcuagggaugguuugauaaa

SEQ ID NO: 84005 - RNA, 32 nt, Homo Sapiens
uuuugagucgggugacucauuuuucuguguag

SEQ ID NO: 84006 - RNA, 32 nt, Homo Sapiens
ccaaagauaaaagccagguagauguugaaagc

SEQ ID NO: 84007 - RNA, 32 nt, Homo Sapiens
cuuuuuuaaauuauaaauggugguuugaaagu

SEQ ID NO: 84008 - RNA, 32 nt, Homo Sapiens
uuuuuuuuuuuuuuuuuuuuuacuucucccuc

SEQ ID NO: 84009 - RNA, 32 nt, Homo Sapiens
ugaaacaaaaauaucacauugagaagcuaguc

SEQ ID NO: 84010 - RNA, 32 nt, Homo Sapiens
gucccagaagaagccagagguagcggccccag

SEQ ID NO: 84011 - RNA, 32 nt, Homo Sapiens
aggagcgcacgggccggcugccgugcccacca

SEQ ID NO: 84012 - RNA, 32 nt, Homo Sapiens
aaauuuaaaaauuugccaggggcgguggcaca

SEQ ID NO: 84013 - RNA, 32 nt, Homo Sapiens
gagggugugggccgaggcgcggcggcggcugg

SEQ ID NO: 84014 - RNA, 32 nt, Homo Sapiens
gcucgggcugaaugggccgccaccgcagugcu

SEQ ID NO: 84015 - RNA, 32 nt, Homo Sapiens
uuuagggcucugcuggucuagcaagagaugcu

SEQ ID NO: 84016 - RNA, 32 nt, Homo Sapiens
cuguguauuuugauauuuuaauuuagagguuu

SEQ ID NO: 84017 - RNA, 32 nt, Homo Sapiens
guagggucuugaacagaagagggacaugauga

SEQ ID NO: 84018 - RNA, 32 nt, Homo Sapiens
acagcuggaugaugauaaaguaagugaccuug

SEQ ID NO: 84019 - RNA, 32 nt, Homo Sapiens
gugcccgcacaccagcugagaacugguucugg

SEQ ID NO: 84020 - RNA, 32 nt, Homo Sapiens
ccaaaagaauccaccaggucugaugggcaaag

SEQ ID NO: 84021 - RNA, 32 nt, Homo Sapiens
cucccugcaagccccucagguugggccuugcc

SEQ ID NO: 84022 - RNA, 32 nt, Homo Sapiens
agcgggcccuguacagggaugugaugcuggag

SEQ ID NO: 84023 - RNA, 32 nt, Homo Sapiens
aagagaacccacgaacauuccuggacuugucu

SEQ ID NO: 84024 - RNA, 32 nt, Homo Sapiens
gcccuuuuggaaagacugcccgugaugggguc

SEQ ID NO: 84025 - RNA, 32 nt, Homo Sapiens
uacugguaaaaugcagaagacaguguuaaugu

SEQ ID NO: 84026 - RNA, 32 nt, Homo Sapiens
aguggaggccucucacauccggagcccaucca

SEQ ID NO: 84027 - RNA, 28 nt, Homo Sapiens
cagggaguggcuagucaugauagcuaau

SEQ ID NO: 84028 - RNA, 32 nt, Homo Sapiens
aggcuucagguugcauugggguuccucuguac

SEQ ID NO: 84029 - RNA, 30 nt, Homo Sapiens
ccugcucucuuccauccccaucuuacagau

SEQ ID NO: 84030 - RNA, 30 nt, Homo Sapiens
gugggauggugaugaaguggggaugcagau

SEQ ID NO: 84031 - RNA, 32 nt, Homo Sapiens
ugggccuuugcaggcccggccuccugccucuc

SEQ ID NO: 84032 - RNA, 32 nt, Homo Sapiens
augcagccgggcggcagaucuagcgggagcuc

SEQ ID NO: 84033 - RNA, 31 nt, Homo Sapiens
ugccaggagccccaggcugagggcuuccccg

SEQ ID NO: 84034 - RNA, 32 nt, Homo Sapiens
cggggcucauucuccaugugccuuagccuuaa

SEQ ID NO: 84035 - RNA, 32 nt, Homo Sapiens
aaaaauuuuagccccaggucucaguaccuggc

SEQ ID NO: 84036 - RNA, 32 nt, Homo Sapiens
gagcaaauaaaaccagaagagcuugggaagau

SEQ ID NO: 84037 - RNA, 32 nt, Homo Sapiens
agaaauuucagauucucuaaaacuacauguca

SEQ ID NO: 84038 - RNA, 32 nt, Homo Sapiens
ucucacaugauuccagccaucaccuuagacca

SEQ ID NO: 84039 - RNA, 32 nt, Homo Sapiens
ugaggaguuuucaggcuuccgucucgaaggaa

SEQ ID NO: 84040 - RNA, 32 nt, Homo Sapiens
agccuaaaauuugagaccccgaggcagcuucc

SEQ ID NO: 84041 - RNA, 32 nt, Homo Sapiens
uauauguuuuccuuguuuuuuauugcuauuuc

SEQ ID NO: 84042 - RNA, 32 nt, Homo Sapiens
ugggagacggucugaggaaguaccucggucac

SEQ ID NO: 84043 - RNA, 32 nt, Homo Sapiens
guggcggccgccgcccccuccucggcccuagc

SEQ ID NO: 84044 - RNA, 32 nt, Homo Sapiens
uuuaccuucuaaaacaugcuucucuauaggug

SEQ ID NO: 84045 - RNA, 32 nt, Homo Sapiens
aagcuguugugcuucuucucuugugauacuag

SEQ ID NO: 84046 - RNA, 32 nt, Homo Sapiens
uguagauaaacuaaauguugugguuugaauau

SEQ ID NO: 84047 - RNA, 32 nt, Homo Sapiens
aagcuuaaauguugauaaaauaugacuaguuu

SEQ ID NO: 84048 - RNA, 32 nt, Homo Sapiens
caaggccuuccgcgcgcacucgcagcucaucc

SEQ ID NO: 84049 - RNA, 32 nt, Homo Sapiens
aaugggcuagagaggcagaggaaggcuaguca

SEQ ID NO: 84050 - RNA, 32 nt, Homo Sapiens
cguggcgcaggcggcgcggggaggcgucccag

SEQ ID NO: 84051 - RNA, 32 nt, Homo Sapiens
ccucacgagcgcggugcgccucgcuugcccgu

SEQ ID NO: 84052 - RNA, 32 nt, Homo Sapiens
gucacggggacauaaucacugcguaucuuccc

SEQ ID NO: 84053 - RNA, 32 nt, Homo Sapiens
gugggugggaagaaaaagaaaauuaacaggau

SEQ ID NO: 84054 - RNA, 32 nt, Homo Sapiens
ucuauucaggcuacuggaauugguuauuaaaa

SEQ ID NO: 84055 - RNA, 32 nt, Homo Sapiens
ccuuucagccggaacugccaucuuccaguaau

SEQ ID NO: 84056 - RNA, 32 nt, Homo Sapiens
cccauugcuguucucuguaucgugaucuaucc

SEQ ID NO: 84057 - RNA, 32 nt, Homo Sapiens
ggccuuuucugugccacuugguggggcagaug

SEQ ID NO: 84058 - RNA, 29 nt, Homo Sapiens
aaggcgcugucauggaggacgccgccgcg

SEQ ID NO: 84059 - RNA, 32 nt, Homo Sapiens
cuuuucuggagcucagcugacaucaagaaacc

SEQ ID NO: 84060 - RNA, 32 nt, Homo Sapiens
uagacggggcagcugcaggcuccggcgaccga

SEQ ID NO: 84061 - RNA, 32 nt, Homo Sapiens
uuuaaaaucauauccagcacaaaaacuauuuc

SEQ ID NO: 84062 - RNA, 32 nt, Homo Sapiens
gaccucuguagaccuucaguacucacucuucu

SEQ ID NO: 84063 - RNA, 32 nt, Homo Sapiens
gccuucaccggagcuguuuaccacgugagucc

SEQ ID NO: 84064 - RNA, 32 nt, Homo Sapiens
gccacugcauuccagacugggcgacagagcaa

SEQ ID NO: 84065 - RNA, 32 nt, Homo Sapiens
uucauucuaaugaaagguguauucuagugcug

SEQ ID NO: 84066 - RNA, 32 nt, Homo Sapiens
uauucaccucaaaugcaaucugcaccuaaaag

SEQ ID NO: 84067 - RNA, 32 nt, Homo Sapiens
ggagccggggagagcggggaagucucugcauc

SEQ ID NO: 84068 - RNA, 32 nt, Homo Sapiens
cgcguccucagcugguccuagacaugcguggc

SEQ ID NO: 84069 - RNA, 32 nt, Homo Sapiens
agcuugaguauuuugugauguucguuuuuuau

SEQ ID NO: 84070 - RNA, 32 nt, Homo Sapiens
aucgcccaggccugggaugcagugaugugauc

SEQ ID NO: 84071 - RNA, 32 nt, Homo Sapiens
ggaccucagggcuguggcuggcaccuuucaug

SEQ ID NO: 84072 - RNA, 32 nt, Homo Sapiens
uggaagacuugucuucaacuuggccacugucu

SEQ ID NO: 84073 - RNA, 32 nt, Homo Sapiens
auuuggaagauugcaucuguguagaaguaaug

SEQ ID NO: 84074 - RNA, 32 nt, Homo Sapiens
ucagacucuucccccacccccucucuuuucca

SEQ ID NO: 84075 - RNA, 32 nt, Homo Sapiens
aaauugacauuguaauuguguacauaauugga

SEQ ID NO: 84076 - RNA, 32 nt, Homo Sapiens
agcccagcaggcacuugcugagcccacgcuca

SEQ ID NO: 84077 - RNA, 32 nt, Homo Sapiens
gagacgugucuuuaggaagcagagaggguucg

SEQ ID NO: 84078 - RNA, 32 nt, Homo Sapiens
uguccucagguuaguggaaccacagaacuucc

SEQ ID NO: 84079 - RNA, 32 nt, Homo Sapiens
ugagcaugagaucuucuguucccauggaggca

SEQ ID NO: 84080 - RNA, 32 nt, Homo Sapiens
gcagcuggggccggggcgcggaugcuggaagu

SEQ ID NO: 84081 - RNA, 32 nt, Homo Sapiens
agagcuguguggcagggcccccugcuggggcu

SEQ ID NO: 84082 - RNA, 32 nt, Homo Sapiens
caccccaucguucccuacuccuccccaccacu

SEQ ID NO: 84083 - RNA, 28 nt, Homo Sapiens
cacaagcagguaaccaggauggcuaaca

SEQ ID NO: 84084 - RNA, 32 nt, Homo Sapiens
guuauucaaacauagucugcagagcaauacug

SEQ ID NO: 84085 - RNA, 32 nt, Homo Sapiens
cgcuggugguggcuucagcggaggcaggccgg

SEQ ID NO: 84086 - RNA, 32 nt, Homo Sapiens
auuggguucuugccugcaguguguguggcagc

SEQ ID NO: 84087 - RNA, 32 nt, Homo Sapiens
ggaguagagacucauaucauggccuuuuaaau

SEQ ID NO: 84088 - RNA, 32 nt, Homo Sapiens
ucacagcugaauucuuuuuuugugcugaacac

SEQ ID NO: 84089 - RNA, 32 nt, Homo Sapiens
ucccgcagccucuggagagagcugacggcaga

SEQ ID NO: 84090 - RNA, 32 nt, Homo Sapiens
uggucaaugaacugaggcccgaaggcuugagu

SEQ ID NO: 84091 - RNA, 32 nt, Homo Sapiens
accguauguucccuuuacugcacggccuuuau

SEQ ID NO: 84092 - RNA, 32 nt, Homo Sapiens
guacaggaagggguuuuaaaauacuuccucug

SEQ ID NO: 84093 - RNA, 32 nt, Homo Sapiens
cccucacuuccuugcuucuccucccccaggac

SEQ ID NO: 84094 - RNA, 32 nt, Homo Sapiens
accuuauaaaaaugcaguccacagugcuauca

SEQ ID NO: 84095 - RNA, 32 nt, Homo Sapiens
cugcugugcccccagccccacccagagcuggc

SEQ ID NO: 84096 - RNA, 32 nt, Homo Sapiens
gaagucagugcaaggugcaugcuugauugaua

SEQ ID NO: 84097 - RNA, 32 nt, Homo Sapiens
cgccuguagucccagcacuuugagaggccgag

SEQ ID NO: 84098 - RNA, 32 nt, Homo Sapiens
uacuacuuuuuguaggucuauauuuuaauaau

SEQ ID NO: 84099 - RNA, 32 nt, Homo Sapiens
ccgcgagcucaggcuguacugccgcccggccu

SEQ ID NO: 84100 - RNA, 29 nt, Homo Sapiens
augcauuaaaauaaacaucagaguaacuc

SEQ ID NO: 84101 - RNA, 32 nt, Homo Sapiens
gaggucgggguggaagaaacgggugauucccu

SEQ ID NO: 84102 - RNA, 32 nt, Homo Sapiens
uaaugaagcccuuagucaggguccugguguug

SEQ ID NO: 84103 - RNA, 32 nt, Homo Sapiens
ugcggugcuggcggccccgucuggccuggagc

SEQ ID NO: 84104 - RNA, 32 nt, Homo Sapiens
gcacccucggaacccagaggcccgcgcucuga

SEQ ID NO: 84105 - RNA, 32 nt, Homo Sapiens
aauguaauuacauuugguuuuguaagguauac

SEQ ID NO: 84106 - RNA, 32 nt, Homo Sapiens
cauguuggaaagaggaacagggcuuggauuga

SEQ ID NO: 84107 - RNA, 32 nt, Homo Sapiens
caguaaagaagccagccaaaacaucaaaacca

SEQ ID NO: 84108 - RNA, 32 nt, Homo Sapiens
ggaacaccuuggugcuuuugggccaaaugagg

SEQ ID NO: 84109 - RNA, 32 nt, Homo Sapiens
cguagcugaaaauuauuuccaaucauccauuu

SEQ ID NO: 84110 - RNA, 32 nt, Homo Sapiens
guugaaaaaauaucauuugacuuuuuauagaa

SEQ ID NO: 84111 - RNA, 32 nt, Homo Sapiens
gaggagcaaacugaggggcaggcuacuggggu

SEQ ID NO: 84112 - RNA, 32 nt, Homo Sapiens
cccuacgucguggcugcccuucgggggcuccu

SEQ ID NO: 84113 - RNA, 32 nt, Homo Sapiens
cucagcgccuccugggcugugcucugcuacua

SEQ ID NO: 84114 - RNA, 32 nt, Homo Sapiens
cccguggagcugacaaguuuuccuugcuuucc

SEQ ID NO: 84115 - RNA, 32 nt, Homo Sapiens
ggcugacugaguacugugagugaggcaacacu

SEQ ID NO: 84116 - RNA, 32 nt, Homo Sapiens
cccuuggccccgagaacagacaaagagcaccg

SEQ ID NO: 84117 - RNA, 32 nt, Homo Sapiens
uaccuuucagcaugccuacgcauucaguccuu

SEQ ID NO: 84118 - RNA, 32 nt, Homo Sapiens
cagcgcuugcccgcgccgccccgcccccguuu

SEQ ID NO: 84119 - RNA, 32 nt, Homo Sapiens
gauaacauaucuuuuuacuaugcuauugguuu

SEQ ID NO: 84120 - RNA, 32 nt, Homo Sapiens
acccugggcugcuggcgccugcgcagagcccu

SEQ ID NO: 84121 - RNA, 32 nt, Homo Sapiens
uuucccuuccccaccccacuuguaggcucugg

SEQ ID NO: 84122 - RNA, 32 nt, Homo Sapiens
caaagguuagcaugcagaagugaaagugucaa

SEQ ID NO: 84123 - RNA, 32 nt, Homo Sapiens
ugucugauuuuguuuaccacacgccagguccc

SEQ ID NO: 84124 - RNA, 32 nt, Homo Sapiens
gggucaaggcuuuauguuaaagcuuccugucg

SEQ ID NO: 84125 - RNA, 32 nt, Homo Sapiens
cgccgccgccgccgcugccauggcucaauaca

SEQ ID NO: 84126 - RNA, 32 nt, Homo Sapiens
uguggaggcucuaggcagcugaucgcuuugaa

SEQ ID NO: 84127 - RNA, 30 nt, Homo Sapiens
ugucggcgagggcgcgcgucucgcggucca

SEQ ID NO: 84128 - RNA, 32 nt, Homo Sapiens
uaaaauuaaauuauaacuuguaaggcaaaaaa

SEQ ID NO: 84129 - RNA, 32 nt, Homo Sapiens
gcugcuccaucccagccaccuuucaccaggag

SEQ ID NO: 84130 - RNA, 32 nt, Homo Sapiens
ggcaaaggaaagcacauccuguuugcggagcu

SEQ ID NO: 84131 - RNA, 32 nt, Homo Sapiens
aggguuuucuucccuuucgaguaauuuuuaaa

SEQ ID NO: 84132 - RNA, 32 nt, Homo Sapiens
gacgcuugggcagggauggggguguuggaugc

SEQ ID NO: 84133 - RNA, 32 nt, Homo Sapiens
acaaaacugacaagcaaugaaguaagaacuuc

SEQ ID NO: 84134 - RNA, 29 nt, Homo Sapiens
ccgucucuuggcaaaaauggcaaauaaug

SEQ ID NO: 84135 - RNA, 32 nt, Homo Sapiens
uaaggggaggucgggggaagccugucucagag

SEQ ID NO: 84136 - RNA, 32 nt, Homo Sapiens
uguagaugagcugacuccaugaagugguggag

SEQ ID NO: 84137 - RNA, 32 nt, Homo Sapiens
guaacaacccaaaaauaaaugucauagucaag

SEQ ID NO: 84138 - RNA, 32 nt, Homo Sapiens
cagacuugugauuuggggagagcaacuucagg

SEQ ID NO: 84139 - RNA, 32 nt, Homo Sapiens
gaugguugcuuguuuauuaacuaaagauguac

SEQ ID NO: 84140 - RNA, 32 nt, Homo Sapiens
aagaaaaaaguacuucugugacauauacaaaa

SEQ ID NO: 84141 - RNA, 32 nt, Homo Sapiens
caaguuuucuuaccacucuucucaccuuuggu

SEQ ID NO: 84142 - RNA, 30 nt, Homo Sapiens
cgcccauggcgcagccacacacgaccucgg

SEQ ID NO: 84143 - RNA, 32 nt, Homo Sapiens
acucuuuuuuaguuccaaaugaauuuuggcau

SEQ ID NO: 84144 - RNA, 32 nt, Homo Sapiens
auaauccuuuugcugcuuaucugauguugguu

SEQ ID NO: 84145 - RNA, 32 nt, Homo Sapiens
cuuagugaaaauacuagugggaucaacaauga

SEQ ID NO: 84146 - RNA, 32 nt, Homo Sapiens
auggaccagcugcccggaccuccuaguccaga

SEQ ID NO: 84147 - RNA, 31 nt, Homo Sapiens
aaagaggaauaaaaaugugaaucaaucaaca

SEQ ID NO: 84148 - RNA, 32 nt, Homo Sapiens
uaucuaauagagaacuuuuuguuaacagacac

SEQ ID NO: 84149 - RNA, 32 nt, Homo Sapiens
ugggcccaggacaggaggcugagaaggagcug

SEQ ID NO: 84150 - RNA, 32 nt, Homo Sapiens
cugcccguaugaccgcgccgggcgccgccggg

SEQ ID NO: 84151 - RNA, 32 nt, Homo Sapiens
gaugaaucaugggguggaauaaaggcugaguu

SEQ ID NO: 84152 - RNA, 32 nt, Homo Sapiens
gagcacuggucugaguccggccccacagaagg

SEQ ID NO: 84153 - RNA, 32 nt, Homo Sapiens
uaccaaagagacaagcacuugaaaaaagcaau

SEQ ID NO: 84154 - RNA, 32 nt, Homo Sapiens
cucccauuauauuuauuguuuauuuuagguca

SEQ ID NO: 84155 - RNA, 32 nt, Homo Sapiens
uaauuuacaagauuuuucaaauugguggggag

SEQ ID NO: 84156 - RNA, 30 nt, Homo Sapiens
cacaggggaggugccaucgggcagggguga

SEQ ID NO: 84157 - RNA, 32 nt, Homo Sapiens
uggagggcgacgagggcaggaugugcaucaac

SEQ ID NO: 84158 - RNA, 32 nt, Homo Sapiens
aggcgugcgccaucgugccuggcuaguuuuug

SEQ ID NO: 84159 - RNA, 32 nt, Homo Sapiens
cacuugaggccaggaguuugggaccagcccgg

SEQ ID NO: 84160 - RNA, 32 nt, Homo Sapiens
cagggcugucccagccccggcaagccacagga

SEQ ID NO: 84161 - RNA, 32 nt, Homo Sapiens
cagguguaguuggccuuguucuuuggggguau

SEQ ID NO: 84162 - RNA, 32 nt, Homo Sapiens
agacuccguggcggcagucaagcccagugccc

SEQ ID NO: 84163 - RNA, 32 nt, Homo Sapiens
aaaacugugauuaagaauucuaccucuccugu

SEQ ID NO: 84164 - RNA, 32 nt, Homo Sapiens
agacccagcuccccggguccgaccucacaacc

SEQ ID NO: 84165 - RNA, 32 nt, Homo Sapiens
ccguuaaggaggggggaagagaaggaagaggc

SEQ ID NO: 84166 - RNA, 32 nt, Homo Sapiens
cacaagaccuggaugugugacacacaguuuug

SEQ ID NO: 84167 - RNA, 32 nt, Homo Sapiens
cccgacggccgcggucagccggcauuccggag

SEQ ID NO: 84168 - RNA, 32 nt, Homo Sapiens
guccaccuacgcgccccggggugaccuggcgg

SEQ ID NO: 84169 - RNA, 32 nt, Homo Sapiens
cggaauuuuuaaaauaaacuguaaacuaauag

SEQ ID NO: 84170 - RNA, 32 nt, Homo Sapiens
acuaaaaacaaugaaauugugauuuggaaguu

SEQ ID NO: 84171 - RNA, 27 nt, Homo Sapiens
cgcacacauuaauuaggguuuauguac

SEQ ID NO: 84172 - RNA, 32 nt, Homo Sapiens
gagcucccuccauuccucucccuccgccgagg

SEQ ID NO: 84173 - RNA, 32 nt, Homo Sapiens
uucuagcuugagagaagggauauuuuaaauga

SEQ ID NO: 84174 - RNA, 32 nt, Homo Sapiens
uccucccuccgcuuucagcaguggucuuucag

SEQ ID NO: 84175 - RNA, 32 nt, Homo Sapiens
gcccgcaacccccagcgcugcgcuagagaaac

SEQ ID NO: 84176 - RNA, 32 nt, Homo Sapiens
gagcaggcagcaguguucuuccccucagagug

SEQ ID NO: 84177 - RNA, 32 nt, Homo Sapiens
guagccaggcaucuacugcagaugaagccagu

SEQ ID NO: 84178 - RNA, 32 nt, Homo Sapiens
ccacaaacuauaugguggucaagaagcaagaa

SEQ ID NO: 84179 - RNA, 32 nt, Homo Sapiens
ccgcaacccggggaugggcccgcggcugcgag

SEQ ID NO: 84180 - RNA, 32 nt, Homo Sapiens
cuguucuuuugcucagccugcugggcccuuug

SEQ ID NO: 84181 - RNA, 32 nt, Homo Sapiens
uauuugaagagaaaaacugacuuuuguauagu

SEQ ID NO: 84182 - RNA, 30 nt, Homo Sapiens
agaaaugucuguguuguagauguuucacuu

SEQ ID NO: 84183 - RNA, 32 nt, Homo Sapiens
auuauuaauuuaaugucuuuaucauuggaucu

SEQ ID NO: 84184 - RNA, 32 nt, Homo Sapiens
agaggcgcgggccagggcucuagcagggacug

SEQ ID NO: 84185 - RNA, 32 nt, Homo Sapiens
ggcugggcaugcugggaccuccccugugaggg

SEQ ID NO: 84186 - RNA, 32 nt, Homo Sapiens
uuguuuuuaucuuaaaaucaguuucuauuauc

SEQ ID NO: 84187 - RNA, 32 nt, Homo Sapiens
gagagggacuccuggggggccugccccucaua

SEQ ID NO: 84188 - RNA, 32 nt, Homo Sapiens
uuaucaccccagcuccuuuuuguuuuucuguc

SEQ ID NO: 84189 - RNA, 32 nt, Homo Sapiens
agaaaauuuaauauuuugacuaacaugucuuu

SEQ ID NO: 84190 - RNA, 32 nt, Homo Sapiens
acgcaacacuaaauucuagaaaguacuuuggc

SEQ ID NO: 84191 - RNA, 32 nt, Homo Sapiens
caucauggaagugagcugaggaccaggcccgg

SEQ ID NO: 84192 - RNA, 32 nt, Homo Sapiens
acucgucucugcccugcccacccagagccccu

SEQ ID NO: 84193 - RNA, 32 nt, Homo Sapiens
uacacaggaguaccuugguauaaugcauacau

SEQ ID NO: 84194 - RNA, 32 nt, Homo Sapiens
uucuccuagauuuggucgaagaucucagugaa

SEQ ID NO: 84195 - RNA, 32 nt, Homo Sapiens
uuuaagcuucauuauaaaauauuguuaaugcc

SEQ ID NO: 84196 - RNA, 32 nt, Homo Sapiens
ugccaugcauuaccaugcacuaauucaaucac

SEQ ID NO: 84197 - RNA, 32 nt, Homo Sapiens
gacccgccagcccagcggcccgggcucugggg

SEQ ID NO: 84198 - RNA, 32 nt, Homo Sapiens
ucuuggcacugaccuugaugcagccuucacau

SEQ ID NO: 84199 - RNA, 32 nt, Homo Sapiens
ucgcgccgcuaggccuggcuucugaggcgguu

SEQ ID NO: 84200 - RNA, 32 nt, Homo Sapiens
caaagaggaaaacguuguguggacuuuguucu

SEQ ID NO: 84201 - RNA, 32 nt, Homo Sapiens
cuugucauuuuucucgauugacauugauaagc

SEQ ID NO: 84202 - RNA, 32 nt, Homo Sapiens
gcauucagagcuugggucaccuggacacugaa

SEQ ID NO: 84203 - RNA, 31 nt, Homo Sapiens
cccucaguggacugccugcucccacagccug

SEQ ID NO: 84204 - RNA, 32 nt, Homo Sapiens
aaucggugagcgccagcuugcuucccuagaag

SEQ ID NO: 84205 - RNA, 32 nt, Homo Sapiens
cguguugccaucaucuuguugaaucagccauu

SEQ ID NO: 84206 - RNA, 32 nt, Homo Sapiens
gggugauaagaaaucuauucacugucaagguu

SEQ ID NO: 84207 - RNA, 32 nt, Homo Sapiens
ccuagcuccugcugagacccagguccuauggc

SEQ ID NO: 84208 - RNA, 32 nt, Homo Sapiens
cccauaaauaacaugaaugaaaaaagauuggg

SEQ ID NO: 84209 - RNA, 32 nt, Homo Sapiens
cggccccgggcauucgcggagaacgagccucg

SEQ ID NO: 84210 - RNA, 32 nt, Homo Sapiens
agugccgcggggggcguggggcggugcugagg

SEQ ID NO: 84211 - RNA, 32 nt, Homo Sapiens
ggccagagccuggcccagcucuuaggccaaug

SEQ ID NO: 84212 - RNA, 32 nt, Homo Sapiens
uccugccauucugcccugggcuccucagguag

SEQ ID NO: 84213 - RNA, 32 nt, Homo Sapiens
uuuuguuuuguucugucuuuucuucauuuugg

SEQ ID NO: 84214 - RNA, 32 nt, Homo Sapiens
auuuuuuaaaguuacccucguuuucaaaggua

SEQ ID NO: 84215 - RNA, 32 nt, Homo Sapiens
uuuacucaaguuuaauugugcaugaggguuuu

SEQ ID NO: 84216 - RNA, 32 nt, Homo Sapiens
ccucaagccuggcgcgcacgcauuccagacga

SEQ ID NO: 84217 - RNA, 32 nt, Homo Sapiens
ggugugagccccaccgcugugcaucgaaugag

SEQ ID NO: 84218 - RNA, 32 nt, Homo Sapiens
ccaugccgcccgggacccgggccugccgcguu

SEQ ID NO: 84219 - RNA, 32 nt, Homo Sapiens
augcacaguggaggaaaagaacaaagaagcac

SEQ ID NO: 84220 - RNA, 32 nt, Homo Sapiens
aauauuuuuaugugccuuuuuauuuuuguugg

SEQ ID NO: 84221 - RNA, 32 nt, Homo Sapiens
ugagaaccaagacaggcaucccuggguggccu

SEQ ID NO: 84222 - RNA, 32 nt, Homo Sapiens
cugcagaggcgcugcgccaagccgggccggag

SEQ ID NO: 84223 - RNA, 32 nt, Homo Sapiens
agaguagguuuccugugagcuggucggggcca

SEQ ID NO: 84224 - RNA, 32 nt, Homo Sapiens
ugcuuuaguuuuuacuacuuugaaaggggagg

SEQ ID NO: 84225 - RNA, 32 nt, Homo Sapiens
gucaagggcuggggaagaggccccacgguucu

SEQ ID NO: 84226 - RNA, 32 nt, Homo Sapiens
guggcuucucccucccccauccccuacucccc

SEQ ID NO: 84227 - RNA, 30 nt, Homo Sapiens
agccuugaagggaaugucagauucauuuuu

SEQ ID NO: 84228 - RNA, 32 nt, Homo Sapiens
uuccuccccccucccugggaccuuggcagaac

SEQ ID NO: 84229 - RNA, 32 nt, Homo Sapiens
cugcgcagcccccuccucccacuucccacucc

SEQ ID NO: 84230 - RNA, 32 nt, Homo Sapiens
auuccucaggaggagaccgaucaugagugugg

SEQ ID NO: 84231 - RNA, 32 nt, Homo Sapiens
ccaccucgggccggcgucuccggcgggcggga

SEQ ID NO: 84232 - RNA, 32 nt, Homo Sapiens
cugccggcccaccguggcaucgggaggccaug

SEQ ID NO: 84233 - RNA, 32 nt, Homo Sapiens
uuguauuguaaauuuuaaaagauuaucaggau

SEQ ID NO: 84234 - RNA, 32 nt, Homo Sapiens
ccaggacaagcugcucagaccugcuucccugg

SEQ ID NO: 84235 - RNA, 32 nt, Homo Sapiens
uucagauucuuugccccaguucuaaucuagug

SEQ ID NO: 84236 - RNA, 32 nt, Homo Sapiens
acccugcaauaaguguacuaaacucuacgcuc

SEQ ID NO: 84237 - RNA, 29 nt, Homo Sapiens
accugcauauguauaugcagguaguuguc

SEQ ID NO: 84238 - RNA, 32 nt, Homo Sapiens
caucucugcaagcucccuguguuuccuugccc

SEQ ID NO: 84239 - RNA, 32 nt, Homo Sapiens
ucaaauaaggcaaaugcugagcacuguaacca

SEQ ID NO: 84240 - RNA, 32 nt, Homo Sapiens
ucuucugccugccuuuggggauagguuuuuuu

SEQ ID NO: 84241 - RNA, 32 nt, Homo Sapiens
cugugauguugagagcugagaaaaaccuccaa

SEQ ID NO: 84242 - RNA, 32 nt, Homo Sapiens
auggaacaucagaaacguaucuugcuugcuaa

SEQ ID NO: 84243 - RNA, 32 nt, Homo Sapiens
caggaaaagacguuuuuguaucaagggauuuu

SEQ ID NO: 84244 - RNA, 32 nt, Homo Sapiens
cccggagaggggagcuggagggcgcgcccugu

SEQ ID NO: 84245 - RNA, 32 nt, Homo Sapiens
ccacauccagcacuugccuccgccauggucac

SEQ ID NO: 84246 - RNA, 32 nt, Homo Sapiens
auagcaccaaaggaauccuccuguccccucug

SEQ ID NO: 84247 - RNA, 32 nt, Homo Sapiens
cgagaaaaacaaaaaggaaaucaauauucaac

SEQ ID NO: 84248 - RNA, 32 nt, Homo Sapiens
agggauuuucuuuuucccagcaugagggacuc

SEQ ID NO: 84249 - RNA, 32 nt, Homo Sapiens
aaccucugccgcccuccacaccucuaaacauc

SEQ ID NO: 84250 - RNA, 32 nt, Homo Sapiens
uuuuaaccaauaugagacacacgaagaggaaa

SEQ ID NO: 84251 - RNA, 32 nt, Homo Sapiens
uccuugucuucuuuuucuugugcuuucccccu

SEQ ID NO: 84252 - RNA, 32 nt, Homo Sapiens
uggagcagugauuguaucaaagcuacuaaacc

SEQ ID NO: 84253 - RNA, 32 nt, Homo Sapiens
guggcccuuugcccuuucccagccugagagau

SEQ ID NO: 84254 - RNA, 30 nt, Homo Sapiens
ucaguucuguuuuagggggaaauggggggg

SEQ ID NO: 84255 - RNA, 32 nt, Homo Sapiens
ugggaugcaugucucuccuucucuagcuguca

SEQ ID NO: 84256 - RNA, 32 nt, Homo Sapiens
aauaaaaaaugaaauuauuuagaacggggcag

SEQ ID NO: 84257 - RNA, 32 nt, Homo Sapiens
auggcaagaaggaagacacagaauucuuucug

SEQ ID NO: 84258 - RNA, 32 nt, Homo Sapiens
aaaacaaaccaaacauaacauacuaucuaauu

SEQ ID NO: 84259 - RNA, 32 nt, Homo Sapiens
ugaaguaaauguucugaguggaguuacuagaa

SEQ ID NO: 84260 - RNA, 32 nt, Homo Sapiens
ggaggcccagaugugcccaucacguuuuuucu

SEQ ID NO: 84261 - RNA, 32 nt, Homo Sapiens
aagccccgcccggcagacuguucccaggaugc

SEQ ID NO: 84262 - RNA, 32 nt, Homo Sapiens
caauacagauauauuuucuuucucuuccuccu

SEQ ID NO: 84263 - RNA, 32 nt, Homo Sapiens
cucuuuaucuuguaaaaugaaacucuauaacc

SEQ ID NO: 84264 - RNA, 32 nt, Homo Sapiens
cuuaguuuuaucacauccagcucuauauuagc

SEQ ID NO: 84265 - RNA, 32 nt, Homo Sapiens
aacugaugguaguccuuaagcguccccuaggc

SEQ ID NO: 84266 - RNA, 32 nt, Homo Sapiens
uucaauauuuuuguaauaaaaaauauagggua

SEQ ID NO: 84267 - RNA, 32 nt, Homo Sapiens
ugaagucuauugccucuugauugcuggaaaag

SEQ ID NO: 84268 - RNA, 32 nt, Homo Sapiens
ggccguggccaugggaagauguuccacgcugc

SEQ ID NO: 84269 - RNA, 32 nt, Homo Sapiens
agaccuccuacuguacucuuucuggggaagca

SEQ ID NO: 84270 - RNA, 32 nt, Homo Sapiens
ggccaaccucacaggggugcugugaggaccag

SEQ ID NO: 84271 - RNA, 32 nt, Homo Sapiens
gcgcugccaccauguuccccagcccugcucuc

SEQ ID NO: 84272 - RNA, 32 nt, Homo Sapiens
guuuuggcccaaaugauuauguuuccucuuuu

SEQ ID NO: 84273 - RNA, 32 nt, Homo Sapiens
cauaacggaaaguuuuuagaauguugaaaagu

SEQ ID NO: 84274 - RNA, 31 nt, Homo Sapiens
ucucugcggcacucuucugccuggugacuga

SEQ ID NO: 84275 - RNA, 32 nt, Homo Sapiens
uaaaaacuaauguguagauaugucaaauuauu

SEQ ID NO: 84276 - RNA, 32 nt, Homo Sapiens
uugacuacugcaugcaugugcaaauacauggg

SEQ ID NO: 84277 - RNA, 32 nt, Homo Sapiens
ccggagccuccgggcuucgacaugcuggagga

SEQ ID NO: 84278 - RNA, 32 nt, Homo Sapiens
uuaguguuuagaguccuuucauuuuaagauuc

SEQ ID NO: 84279 - RNA, 32 nt, Homo Sapiens
gcgggcuguggcgggggcugcggucaaggccg

SEQ ID NO: 84280 - RNA, 32 nt, Homo Sapiens
guuucuuugugauuguuauuuaaauacauauu

SEQ ID NO: 84281 - RNA, 32 nt, Homo Sapiens
aacaaaaagggcucaaggggcuggagacuggc

SEQ ID NO: 84282 - RNA, 32 nt, Homo Sapiens
uucuccuugacaauggaaaggcagcagucuuc

SEQ ID NO: 84283 - RNA, 32 nt, Homo Sapiens
ccaucagguucagaccaguaggaaccaggcug

SEQ ID NO: 84284 - RNA, 32 nt, Homo Sapiens
gcugggaguccuggugccgccggcugcacuuc

SEQ ID NO: 84285 - RNA, 32 nt, Homo Sapiens
cugggugucacagggccugugcuccucccucc

SEQ ID NO: 84286 - RNA, 32 nt, Homo Sapiens
cuagugacgcagcagcugguucugggaguuaa

SEQ ID NO: 84287 - RNA, 32 nt, Homo Sapiens
guucgggccgcguaggggcgcuuuguuuuguu

SEQ ID NO: 84288 - RNA, 32 nt, Homo Sapiens
acaaguuugggaagcugaugcccuaauuuuga

SEQ ID NO: 84289 - RNA, 32 nt, Homo Sapiens
ccccaacucccuggauuuuccuccucucucca

SEQ ID NO: 84290 - RNA, 32 nt, Homo Sapiens
auuuuagggaaaaccacaaaaaccuucguaaa

SEQ ID NO: 84291 - RNA, 32 nt, Homo Sapiens
gaggcugcagugagccgagaucaugccacugc

SEQ ID NO: 84292 - RNA, 32 nt, Homo Sapiens
uuuauguauuuuuuaguugugcuguaaugggc

SEQ ID NO: 84293 - RNA, 32 nt, Homo Sapiens
ccggcugcaccucggcuccuugcuuccuccgc

SEQ ID NO: 84294 - RNA, 32 nt, Homo Sapiens
gggagaugucaaaacuccaugggggcugggcg

SEQ ID NO: 84295 - RNA, 31 nt, Homo Sapiens
caguuucauaagauucaaccaaauaaauaua

SEQ ID NO: 84296 - RNA, 32 nt, Homo Sapiens
agcggccggcugugggggcagcgcagcaggag

SEQ ID NO: 84297 - RNA, 32 nt, Homo Sapiens
cucucucagaucauggcagagaaggagcugcc

SEQ ID NO: 84298 - RNA, 32 nt, Homo Sapiens
agcuguuguaaauguuuaaaagaauagccacc

SEQ ID NO: 84299 - RNA, 32 nt, Homo Sapiens
cuuuuugcucuuucuguucagaugagaggcau

SEQ ID NO: 84300 - RNA, 32 nt, Homo Sapiens
aguguuuagaacagcgucuacugcauggaaag

SEQ ID NO: 84301 - RNA, 32 nt, Homo Sapiens
agaacaaugccagucagcacuccuggagccuc

SEQ ID NO: 84302 - RNA, 32 nt, Homo Sapiens
ugggaggccgcugcugcguggagcacuuaaag

SEQ ID NO: 84303 - RNA, 31 nt, Homo Sapiens
agggaggaggccaccucuccaagggcuucug

SEQ ID NO: 84304 - RNA, 32 nt, Homo Sapiens
uuuugauguauugcaaaaauagauaauaauuu

SEQ ID NO: 84305 - RNA, 32 nt, Homo Sapiens
gaagaggaguggcggcagcggcggcggggacc

SEQ ID NO: 84306 - RNA, 32 nt, Homo Sapiens
gcccaaagcuccucugcccacccuggcuccca

SEQ ID NO: 84307 - RNA, 32 nt, Homo Sapiens
ccugccuggugucggugagcuccuugagaccu

SEQ ID NO: 84308 - RNA, 32 nt, Homo Sapiens
cagcuucgcggcgcugccccgcggcgggagag

SEQ ID NO: 84309 - RNA, 32 nt, Homo Sapiens
gcgaguaggaagcuccgcgcggcggcgggggc

SEQ ID NO: 84310 - RNA, 32 nt, Homo Sapiens
acuguagaaaagaggccagcucugcagccccc

SEQ ID NO: 84311 - RNA, 32 nt, Homo Sapiens
uaccucucgguccggcuggcgccggggcgggc

SEQ ID NO: 84312 - RNA, 32 nt, Homo Sapiens
cgagcgcgcucgccgccucagucgccagcgcc

SEQ ID NO: 84313 - RNA, 32 nt, Homo Sapiens
cuugggccucaguuuccccaucugcaaaauga

SEQ ID NO: 84314 - RNA, 32 nt, Homo Sapiens
auaagcauuccuuccgagaaaaacaguuggug

SEQ ID NO: 84315 - RNA, 32 nt, Homo Sapiens
ugugugcuucugugacuguuccuggcaggcau

SEQ ID NO: 84316 - RNA, 32 nt, Homo Sapiens
ucccggauggugcugacugcucccuaagcggc

SEQ ID NO: 84317 - RNA, 32 nt, Homo Sapiens
gaauucggguggcaagaaaaaccgacgaaucu

SEQ ID NO: 84318 - RNA, 32 nt, Homo Sapiens
gaugugcaaaaauuuuuggauugacaguaacu

SEQ ID NO: 84319 - RNA, 32 nt, Homo Sapiens
uacacuuguaaauaaagcugauagcauauauu

SEQ ID NO: 84320 - RNA, 32 nt, Homo Sapiens
uaaagucauuuuuauagacagucuaaacaaaa

SEQ ID NO: 84321 - RNA, 32 nt, Homo Sapiens
ccccaaagcgcgacgcacaaauccacauaacc

SEQ ID NO: 84322 - RNA, 32 nt, Homo Sapiens
ugugugugguggccccuggcacugcagagacu

SEQ ID NO: 84323 - RNA, 32 nt, Homo Sapiens
caggccaucgccacccuccgcagccaugucca

SEQ ID NO: 84324 - RNA, 32 nt, Homo Sapiens
aauuuacauuuuucuuuuuuuuuuuuucauuu

SEQ ID NO: 84325 - RNA, 32 nt, Homo Sapiens
gcacagggcaucuuucaaaaaauagaaaaaug

SEQ ID NO: 84326 - RNA, 32 nt, Homo Sapiens
gagcccggcccagcugcagaggccagugcaga

SEQ ID NO: 84327 - RNA, 32 nt, Homo Sapiens
aggagccuggccccuccucuuccuggguggag

SEQ ID NO: 84328 - RNA, 32 nt, Homo Sapiens
guuaauuuaauuuggcuuuuuaccacauuccu

SEQ ID NO: 84329 - RNA, 32 nt, Homo Sapiens
ggcgcgcggcuggaugcccccggccugcggcu

SEQ ID NO: 84330 - RNA, 32 nt, Homo Sapiens
caggccccccggauagagagacagcaccggcc

SEQ ID NO: 84331 - RNA, 32 nt, Homo Sapiens
uagguuuauucuauccucuccucuuccucucc

SEQ ID NO: 84332 - RNA, 32 nt, Homo Sapiens
cuccacuucuccccgcccacccugccggaggc

SEQ ID NO: 84333 - RNA, 32 nt, Homo Sapiens
aucauaccaauauccuaaagucaugcacuucc

SEQ ID NO: 84334 - RNA, 32 nt, Homo Sapiens
ugcugucccccgcuggccuccugcccaagcga

SEQ ID NO: 84335 - RNA, 32 nt, Homo Sapiens
ugcucagacaaagggaaaaggacgggggagug

SEQ ID NO: 84336 - RNA, 32 nt, Homo Sapiens
ucagggggguugugaggccuggccaggcaccc

SEQ ID NO: 84337 - RNA, 32 nt, Homo Sapiens
uaucaagaacaaaaaugggaggagguguccac

SEQ ID NO: 84338 - RNA, 32 nt, Homo Sapiens
acuuugcaucccacgccggaggaggcauuaac

SEQ ID NO: 84339 - RNA, 32 nt, Homo Sapiens
guuuguuagggagucgugugcgugccuugguc

SEQ ID NO: 84340 - RNA, 32 nt, Homo Sapiens
aauucaaggugaugaauguccagauaagacua

SEQ ID NO: 84341 - RNA, 32 nt, Homo Sapiens
uccugcucucagaucagaucaagcauucuuuc

SEQ ID NO: 84342 - RNA, 32 nt, Homo Sapiens
cagucccgguacgcaaccacggcgagaacccg

SEQ ID NO: 84343 - RNA, 32 nt, Homo Sapiens
cggccucucuacggggcuggugagugcaagca

SEQ ID NO: 84344 - RNA, 32 nt, Homo Sapiens
acaaacaggccaucugccgccaaauacaucca

SEQ ID NO: 84345 - RNA, 32 nt, Homo Sapiens
aaguucucaauccuuacuaaacauaagguaau

SEQ ID NO: 84346 - RNA, 32 nt, Homo Sapiens
uucuugacacucuuuucuuaaucaucuggaaa

SEQ ID NO: 84347 - RNA, 32 nt, Homo Sapiens
gccccacccaaggggacccuggucucuccgcc

SEQ ID NO: 84348 - RNA, 32 nt, Homo Sapiens
augaaaaaucuucauguuaggauuaauuuucu

SEQ ID NO: 84349 - RNA, 32 nt, Homo Sapiens
cuguuguacauuccgguugggggaugagcguu

SEQ ID NO: 84350 - RNA, 32 nt, Homo Sapiens
gaggccgccccgaguagugcggcggagccggu

SEQ ID NO: 84351 - RNA, 32 nt, Homo Sapiens
auuuuuuauuugcauugauuugccauaagucu

SEQ ID NO: 84352 - RNA, 29 nt, Homo Sapiens
cacaauggaccgggcguccgagcugcucu

SEQ ID NO: 84353 - RNA, 32 nt, Homo Sapiens
uggaagacgagaaaguugagaagaacacgaag

SEQ ID NO: 84354 - RNA, 32 nt, Homo Sapiens
cccaggcugccccugccaggccugcagccucc

SEQ ID NO: 84355 - RNA, 32 nt, Homo Sapiens
ucucuggccuacggagcccacccaggcacagc

SEQ ID NO: 84356 - RNA, 32 nt, Homo Sapiens
gcgaucggagugggccuuuucuuucuuuuugu

SEQ ID NO: 84357 - RNA, 32 nt, Homo Sapiens
agaugggaaaauuagugucuagaaauacucuc

SEQ ID NO: 84358 - RNA, 32 nt, Homo Sapiens
gcccuggcccuuuccccuuccccuccccuccu

SEQ ID NO: 84359 - RNA, 30 nt, Homo Sapiens
acccuucacugugcugcgguuguucucugg

SEQ ID NO: 84360 - RNA, 32 nt, Homo Sapiens
uaaaagaaauaugcuuugaugugcuagcauaa

SEQ ID NO: 84361 - RNA, 32 nt, Homo Sapiens
ccaagcccuccccaccaagggguacugcaggg

SEQ ID NO: 84362 - RNA, 32 nt, Homo Sapiens
cacugcucaguuuccaggaucagcuuccuccu

SEQ ID NO: 84363 - RNA, 32 nt, Homo Sapiens
uguaaucaacugagcuaguuccaauaaaguua

SEQ ID NO: 84364 - RNA, 32 nt, Homo Sapiens
uagggggcuuucuggggccuagcgaucucucc

SEQ ID NO: 84365 - RNA, 32 nt, Homo Sapiens
caagacagaccugcaagucuucgucucaaggg

SEQ ID NO: 84366 - RNA, 32 nt, Homo Sapiens
ggauucagaaaagaaaaagaaugaugcuucuu

SEQ ID NO: 84367 - RNA, 32 nt, Homo Sapiens
agccgggcgugguggcucaugccuuuaauccc

SEQ ID NO: 84368 - RNA, 32 nt, Homo Sapiens
gccuccgcaucugacugucccaacggcaugcu

SEQ ID NO: 84369 - RNA, 32 nt, Homo Sapiens
aagccuuagucuacacugaacucauguucuga

SEQ ID NO: 84370 - RNA, 32 nt, Homo Sapiens
cugagggccuggcagcugcugcgcccucgcuu

SEQ ID NO: 84371 - RNA, 32 nt, Homo Sapiens
agcaagugggugugcugggaaccuggccacaa

SEQ ID NO: 84372 - RNA, 32 nt, Homo Sapiens
agcagguagacuacuuuuuugcaucuugggga

SEQ ID NO: 84373 - RNA, 32 nt, Homo Sapiens
uuuaacauucuacuuugccaguuucuucauua

SEQ ID NO: 84374 - RNA, 32 nt, Homo Sapiens
cgggggccuaaagcgacagucucaggggccau

SEQ ID NO: 84375 - RNA, 32 nt, Homo Sapiens
uauguauuuuuggaaucaguucuuauaaacag

SEQ ID NO: 84376 - RNA, 32 nt, Homo Sapiens
ugacuguccuaugggcuucuccaguguccaca

SEQ ID NO: 84377 - RNA, 32 nt, Homo Sapiens
ggucuuuuuuaaaaauagagauuucacaucug

SEQ ID NO: 84378 - RNA, 32 nt, Homo Sapiens
gcucuuccaaacaaaacaaaaaugucucuagg

SEQ ID NO: 84379 - RNA, 32 nt, Homo Sapiens
acugcaagcugauuuuucuuucuugcuuucau

SEQ ID NO: 84380 - RNA, 32 nt, Homo Sapiens
uuucuaaguauuuuuacaguuuuauuucauau

SEQ ID NO: 84381 - RNA, 29 nt, Homo Sapiens
ggccauggcccaggccggcgucgucggug

SEQ ID NO: 84382 - RNA, 32 nt, Homo Sapiens
uguaugcaaaugccggccggcugcgcccgccg

SEQ ID NO: 84383 - RNA, 32 nt, Homo Sapiens
ggugccccaagcauggcuccugccaacaccua

SEQ ID NO: 84384 - RNA, 32 nt, Homo Sapiens
gacuugaaugauuuuuccuaacuuguuugcaa

SEQ ID NO: 84385 - RNA, 32 nt, Homo Sapiens
guuauaaaaaauuuuaauaucagagggaugau

SEQ ID NO: 84386 - RNA, 32 nt, Homo Sapiens
uguucucugcuaucuuuuuuugguaugaaauu

SEQ ID NO: 84387 - RNA, 32 nt, Homo Sapiens
ugccucuucuucugcaauccucacuccccaag

SEQ ID NO: 84388 - RNA, 31 nt, Homo Sapiens
cgcccuccacccucagcucccugcacaauuc

SEQ ID NO: 84389 - RNA, 32 nt, Homo Sapiens
ucucuaagaacaaucucugagaagaacccuug

SEQ ID NO: 84390 - RNA, 32 nt, Homo Sapiens
ggaaaagaggaugcuacaguaguuucaaaguu

SEQ ID NO: 84391 - RNA, 32 nt, Homo Sapiens
agaugaucccccagccuccuaggauccccuug

SEQ ID NO: 84392 - RNA, 31 nt, Homo Sapiens
ggagcggcgucgagugucuccgugcgcccgu

SEQ ID NO: 84393 - RNA, 32 nt, Homo Sapiens
guuggccguuugcugcgucuagggguguucua

SEQ ID NO: 84394 - RNA, 32 nt, Homo Sapiens
caguguuuuuccaggcuuccauuuagcaaaug

SEQ ID NO: 84395 - RNA, 32 nt, Homo Sapiens
guaaugacacaaagccuuaugaaaauauuuau

SEQ ID NO: 84396 - RNA, 32 nt, Homo Sapiens
caggaaggcacuccgaagacauaagucgguga

SEQ ID NO: 84397 - RNA, 32 nt, Homo Sapiens
uuccggggcgacccagguccuccggcggaacg

SEQ ID NO: 84398 - RNA, 31 nt, Homo Sapiens
uggggcagggcgguggcgccuuccugaccuu

SEQ ID NO: 84399 - RNA, 32 nt, Homo Sapiens
ucaguuuuuagucagaaaucaagcauugggcu

SEQ ID NO: 84400 - RNA, 32 nt, Homo Sapiens
guuuacuuuaccuuuuucuagcuuuuuagggu

SEQ ID NO: 84401 - RNA, 32 nt, Homo Sapiens
gcugcucugccagcaagcuguggagcugccuc

SEQ ID NO: 84402 - RNA, 32 nt, Homo Sapiens
auagacucuaugugugcugaauguuccugugu

SEQ ID NO: 84403 - RNA, 32 nt, Homo Sapiens
cggggccgauguagaacuuagggcgccuugcc

SEQ ID NO: 84404 - RNA, 32 nt, Homo Sapiens
uucuuucuuucuucuuuuuuuucuuuggagac

SEQ ID NO: 84405 - RNA, 32 nt, Homo Sapiens
gaguuuucucuuaggcuucucucagguccccu

SEQ ID NO: 84406 - RNA, 32 nt, Homo Sapiens
caaaccuuaguagacauuagauaauucaugcg

SEQ ID NO: 84407 - RNA, 32 nt, Homo Sapiens
cagacucggaauccaagccggaccaggaggcc

SEQ ID NO: 84408 - RNA, 32 nt, Homo Sapiens
accgcaggcagcaguuugcguuuugaagguua

SEQ ID NO: 84409 - RNA, 32 nt, Homo Sapiens
agcccuuagaaaaagucagagaagucaaacug

SEQ ID NO: 84410 - RNA, 32 nt, Homo Sapiens
guugaaucaugguuuuuguuuuuguuuuuaac

SEQ ID NO: 84411 - RNA, 32 nt, Homo Sapiens
uccuuccuucccuccacagguuuggaacaaac

SEQ ID NO: 84412 - RNA, 32 nt, Homo Sapiens
ucuacuuuguuuaauguagaguaacuaauuuu

SEQ ID NO: 84413 - RNA, 32 nt, Homo Sapiens
cucuuuccuuuucaguuuuucuagccaagugu

SEQ ID NO: 84414 - RNA, 32 nt, Homo Sapiens
cacuuuauaaauuuaugugguguuauugguac

SEQ ID NO: 84415 - RNA, 32 nt, Homo Sapiens
agcugggacaaagcugccuuugccgcugggcu

SEQ ID NO: 84416 - RNA, 32 nt, Homo Sapiens
accaccacauaaauaacaugguagaaaaauug

SEQ ID NO: 84417 - RNA, 32 nt, Homo Sapiens
gaucucccaaccugccccggcgcgcggggauu

SEQ ID NO: 84418 - RNA, 32 nt, Homo Sapiens
auuggcauuguuaaugaaggcuuuauuuguga

SEQ ID NO: 84419 - RNA, 32 nt, Homo Sapiens
ugagagcccaggucguuguuuuuuccagcuua

SEQ ID NO: 84420 - RNA, 32 nt, Homo Sapiens
gacaagcaaaguaaauguauauauuaugugau

SEQ ID NO: 84421 - RNA, 32 nt, Homo Sapiens
acuacugcaguuaccaaagggauuguuucucu

SEQ ID NO: 84422 - RNA, 32 nt, Homo Sapiens
cgccggcggcgguggcugcugccagacccgga

SEQ ID NO: 84423 - RNA, 32 nt, Homo Sapiens
ugugucuguuugggaguggguuugcuagugau

SEQ ID NO: 84424 - RNA, 32 nt, Homo Sapiens
gagagcaaggaccuggcaggggcugcugagga

SEQ ID NO: 84425 - RNA, 32 nt, Homo Sapiens
guggcacccagcucccuaccuccugugccagc

SEQ ID NO: 84426 - RNA, 32 nt, Homo Sapiens
aauggaagaaaagagaagcaagggaugcauuc

SEQ ID NO: 84427 - RNA, 32 nt, Homo Sapiens
cugucucuagauuuugaaaccaaaaaacugaa

SEQ ID NO: 84428 - RNA, 32 nt, Homo Sapiens
aauccugccugggcaacauagcaagacccugu

SEQ ID NO: 84429 - RNA, 32 nt, Homo Sapiens
accugguguugggccugagccaccucaacaac

SEQ ID NO: 84430 - RNA, 32 nt, Homo Sapiens
aucuccgccucccagauucaagcgauucuccu

SEQ ID NO: 84431 - RNA, 32 nt, Homo Sapiens
cccauuuccuuccccuuucucugucaucccag

SEQ ID NO: 84432 - RNA, 32 nt, Homo Sapiens
acaguuaagugaaacaaacaaacaaucacaca

SEQ ID NO: 84433 - RNA, 32 nt, Homo Sapiens
uggccuggucccccggccccugccccaucucc

SEQ ID NO: 84434 - RNA, 32 nt, Homo Sapiens
gaaaaaggggagagaauggcugggugcugggg

SEQ ID NO: 84435 - RNA, 32 nt, Homo Sapiens
gaaauaauagaugacagacaugucugaaugaa

SEQ ID NO: 84436 - RNA, 32 nt, Homo Sapiens
aacccagacgcaugcccacaugugcuggguag

SEQ ID NO: 84437 - RNA, 32 nt, Homo Sapiens
cugcuuuuucuuuuccugcugaguacugcuaa

SEQ ID NO: 84438 - RNA, 32 nt, Homo Sapiens
gcagagccuggggagggcacccgccccgccac

SEQ ID NO: 84439 - RNA, 31 nt, Homo Sapiens
uagaaugcaagguucauaggcuuacauuuuc

SEQ ID NO: 84440 - RNA, 32 nt, Homo Sapiens
auuuuucaagacaaaauacuugggguuuucca

SEQ ID NO: 84441 - RNA, 32 nt, Homo Sapiens
auaggagguauuuaauaaacacauuaguugac

SEQ ID NO: 84442 - RNA, 32 nt, Homo Sapiens
aucccucauacacuaacuacuguuucuucaug

SEQ ID NO: 84443 - RNA, 32 nt, Homo Sapiens
ucuguauccuaagcauuuuaauaaaaaguuaa

SEQ ID NO: 84444 - RNA, 32 nt, Homo Sapiens
cucccccaguuucuccuccccuaaaauaaaaa

SEQ ID NO: 84445 - RNA, 32 nt, Homo Sapiens
gcagucucauccugcccuugccauccucccau

SEQ ID NO: 84446 - RNA, 32 nt, Homo Sapiens
auauuuugguaauaauuuaaaauacaagaacg

SEQ ID NO: 84447 - RNA, 32 nt, Homo Sapiens
aggugccgacaugguagguuuauggugagggc

SEQ ID NO: 84448 - RNA, 32 nt, Homo Sapiens
cuggcccgcuccccgcgcccuccacggguaac

SEQ ID NO: 84449 - RNA, 32 nt, Homo Sapiens
cugggcugcgucugcuucgcgcuggugcaggc

SEQ ID NO: 84450 - RNA, 32 nt, Homo Sapiens
aauguagcucccacaagguaaacuucauuggu

SEQ ID NO: 84451 - RNA, 32 nt, Homo Sapiens
caucuccagguacaguucgggguguggaugcc

SEQ ID NO: 84452 - RNA, 32 nt, Homo Sapiens
auguuacaaaauuuaaggguauguuaacuaaa

SEQ ID NO: 84453 - RNA, 32 nt, Homo Sapiens
cgccugcuguugcuccuccaucuccagaucgg

SEQ ID NO: 84454 - RNA, 32 nt, Homo Sapiens
ugugggcuagcucagaggaucccaggcccacu

SEQ ID NO: 84455 - RNA, 32 nt, Homo Sapiens
uugguugccuucuaacggcaggugggcauaag

SEQ ID NO: 84456 - RNA, 32 nt, Homo Sapiens
auauuuuguaaauacuguauaccauguauuau

SEQ ID NO: 84457 - RNA, 32 nt, Homo Sapiens
cugugcaggguacuccuccagauggaaucagg

SEQ ID NO: 84458 - RNA, 32 nt, Homo Sapiens
ccacauugccagccaccaggaaagcuuuucuu

SEQ ID NO: 84459 - RNA, 32 nt, Homo Sapiens
cagagaggggccgcagucuccgcggcugcguc

SEQ ID NO: 84460 - RNA, 32 nt, Homo Sapiens
uuggccccgcagcugcccccacuuccuuugag

SEQ ID NO: 84461 - RNA, 32 nt, Homo Sapiens
uacagagccaucuguuagcuggagaguugagg

SEQ ID NO: 84462 - RNA, 32 nt, Homo Sapiens
ggggcuauuuuuuuuucuuaagguaugaaauc

SEQ ID NO: 84463 - RNA, 32 nt, Homo Sapiens
acuuaaaugaggaugggacgcgggaagcagcu

SEQ ID NO: 84464 - RNA, 32 nt, Homo Sapiens
aggccccugccagccacgugaaaccuccuggc

SEQ ID NO: 84465 - RNA, 32 nt, Homo Sapiens
uugacuccacauuccccuccaguguucccucc

SEQ ID NO: 84466 - RNA, 32 nt, Homo Sapiens
aaguggaacaucagccucuggagccagucugc

SEQ ID NO: 84467 - RNA, 32 nt, Homo Sapiens
guagcuuacaaggggacaauucuggacuaaug

SEQ ID NO: 84468 - RNA, 32 nt, Homo Sapiens
acauggaagagaucaaguucccugcccggugc

SEQ ID NO: 84469 - RNA, 32 nt, Homo Sapiens
cuucuuuagagagaagcggggaguggguuaac

SEQ ID NO: 84470 - RNA, 32 nt, Homo Sapiens
accucuagguucuccucguccgcccguuguuc

SEQ ID NO: 84471 - RNA, 32 nt, Homo Sapiens
ucaaccacagauuuauacaaggguuaaccauu

SEQ ID NO: 84472 - RNA, 32 nt, Homo Sapiens
gggcggccccgccgcuucuuuccuuccugcag

SEQ ID NO: 84473 - RNA, 32 nt, Homo Sapiens
gaagcuaaacauaaaaaggaauuuuaaauuua

SEQ ID NO: 84474 - RNA, 32 nt, Homo Sapiens
cggccccggccgccccagcgaccucccuggca

SEQ ID NO: 84475 - RNA, 32 nt, Homo Sapiens
gauggucucccuccccaaggaggagagaagag

SEQ ID NO: 84476 - RNA, 32 nt, Homo Sapiens
uggggaggcagcgcgagggugcucuccacagc

SEQ ID NO: 84477 - RNA, 32 nt, Homo Sapiens
cuuauuauuucugauucuuuuauucuaaaaaa

SEQ ID NO: 84478 - RNA, 32 nt, Homo Sapiens
ggaaaagagcuacuauacaucauaugcagagg

SEQ ID NO: 84479 - RNA, 32 nt, Homo Sapiens
aagaaaauacaauaaacuauuggaaaguacuc

SEQ ID NO: 84480 - RNA, 32 nt, Homo Sapiens
ugcccaaggcuugcagaagagguaagggagug

SEQ ID NO: 84481 - RNA, 32 nt, Homo Sapiens
cacugucagcaaaucagugucuggacagccag

SEQ ID NO: 84482 - RNA, 32 nt, Homo Sapiens
aguguggggguuuuuucuucucuucccaaccu

SEQ ID NO: 84483 - RNA, 32 nt, Homo Sapiens
gaugcaggggugggaagcggccaggcagaaag

SEQ ID NO: 84484 - RNA, 32 nt, Homo Sapiens
agucuacaaaccagaaagcaucagggaugcua

SEQ ID NO: 84485 - RNA, 32 nt, Homo Sapiens
uucuuuuguuuuucuauuccugucccaaauca

SEQ ID NO: 84486 - RNA, 32 nt, Homo Sapiens
uugggucuaccuugggacugcugguugccaac

SEQ ID NO: 84487 - RNA, 32 nt, Homo Sapiens
gggagcuggaggaggggguggcagcuccuuua

SEQ ID NO: 84488 - RNA, 32 nt, Homo Sapiens
ucuaggaaaacucugagcuacugcauuuaggc

SEQ ID NO: 84489 - RNA, 32 nt, Homo Sapiens
uaguucucaaagugguccuuggaccaacagca

SEQ ID NO: 84490 - RNA, 32 nt, Homo Sapiens
acacuaagcgacccucagcugugugggaccag

SEQ ID NO: 84491 - RNA, 29 nt, Homo Sapiens
ggggacucucaauaaacucuacugaaggc

SEQ ID NO: 84492 - RNA, 32 nt, Homo Sapiens
cuaggcacccaccguaauacugcuaccuucag

SEQ ID NO: 84493 - RNA, 32 nt, Homo Sapiens
cccccaacaacccauccuuuucugcaaccccu

SEQ ID NO: 84494 - RNA, 32 nt, Homo Sapiens
aauuaugaaauacuuaaaauguaaaggagaua

SEQ ID NO: 84495 - RNA, 28 nt, Homo Sapiens
cuucgguaguggccgccguggugccaca

SEQ ID NO: 84496 - RNA, 32 nt, Homo Sapiens
ucaggauauuuucuuuuguaaaauucacuugu

SEQ ID NO: 84497 - RNA, 32 nt, Homo Sapiens
gggccccagcagagcaggcaggaugaguaucg

SEQ ID NO: 84498 - RNA, 32 nt, Homo Sapiens
uuggaagaccauuagggaaaagaaauuccugc

SEQ ID NO: 84499 - RNA, 32 nt, Homo Sapiens
aucacuguuaggguaagggaauguauguacac

SEQ ID NO: 84500 - RNA, 32 nt, Homo Sapiens
gucgggacucugcggaguggacccgagugaac

SEQ ID NO: 84501 - RNA, 32 nt, Homo Sapiens
aauggcgcuggcccgcggcgcugcgcuggcag

SEQ ID NO: 84502 - RNA, 32 nt, Homo Sapiens
gaggaugaaacaaagaagauguucucuuuucu

SEQ ID NO: 84503 - RNA, 32 nt, Homo Sapiens
uuguucuacauggcuuugauaauuguuugagg

SEQ ID NO: 84504 - RNA, 32 nt, Homo Sapiens
ggugcugcccgucaauaaucccagcuacucgg

SEQ ID NO: 84505 - RNA, 32 nt, Homo Sapiens
cgguuagaacagaacagagaaacccugacugu

SEQ ID NO: 84506 - RNA, 32 nt, Homo Sapiens
gauguuguuuuccuauggaaauauauaucuau

SEQ ID NO: 84507 - RNA, 32 nt, Homo Sapiens
agggggacuuguuuuucuuuuccucuagagac

SEQ ID NO: 84508 - RNA, 32 nt, Homo Sapiens
uuauucaaaaacagggauugaaaaaacuguaa

SEQ ID NO: 84509 - RNA, 32 nt, Homo Sapiens
cagggcaacacugaagacaugggcaagagcau

SEQ ID NO: 84510 - RNA, 32 nt, Homo Sapiens
uaccuaugaccugcgagcugcccaccaccccc

SEQ ID NO: 84511 - RNA, 32 nt, Homo Sapiens
cuccucucgugccuggccccagccaaaagggg

SEQ ID NO: 84512 - RNA, 32 nt, Homo Sapiens
ucccuuuggccauccucucaccccagaauauc

SEQ ID NO: 84513 - RNA, 32 nt, Homo Sapiens
gcgggauagggcggaaggggacaggcuugagg

SEQ ID NO: 84514 - RNA, 32 nt, Homo Sapiens
auuccugauaaugcuaugugaguguuuuuaau

SEQ ID NO: 84515 - RNA, 32 nt, Homo Sapiens
aagcuuugaaggaaaagaauacuuuguuucca

SEQ ID NO: 84516 - RNA, 32 nt, Homo Sapiens
gcacauccaggcuucuccuccucccgaggaac

SEQ ID NO: 84517 - RNA, 32 nt, Homo Sapiens
caguugagaccuuuuucuuuuagacucugcua

SEQ ID NO: 84518 - RNA, 32 nt, Homo Sapiens
auuuuacauucauuuaaccugccgauuauuua

SEQ ID NO: 84519 - RNA, 32 nt, Homo Sapiens
uuggauuuuaugcaugagggaacuacaaacug

SEQ ID NO: 84520 - RNA, 32 nt, Homo Sapiens
uauaaagaucauaacauuuauagccccagacu

SEQ ID NO: 84521 - RNA, 32 nt, Homo Sapiens
aacuuuuuaaacauuccacaagaggaagugcc

SEQ ID NO: 84522 - RNA, 32 nt, Homo Sapiens
aucacagaauuugaagcaaaauacauguacac

SEQ ID NO: 84523 - RNA, 32 nt, Homo Sapiens
auaagaagagacaaucaaaaauaaucagccau

SEQ ID NO: 84524 - RNA, 32 nt, Homo Sapiens
caucggcggcggugcucaugcaccacagcaag

SEQ ID NO: 84525 - RNA, 32 nt, Homo Sapiens
uggguuguggugcauuuugcacuaccuggagu

SEQ ID NO: 84526 - RNA, 28 nt, Homo Sapiens
cggugaauggcuaccaggaguggucaga

SEQ ID NO: 84527 - RNA, 32 nt, Homo Sapiens
agcguggcucacgggccuggcgcgcugaugcu

SEQ ID NO: 84528 - RNA, 32 nt, Homo Sapiens
cccccucagcucccccggucugagagagggga

SEQ ID NO: 84529 - RNA, 32 nt, Homo Sapiens
cugauagaaaaaaacaaacaaacaaacagaca

SEQ ID NO: 84530 - RNA, 32 nt, Homo Sapiens
cugccacccacaccccagggugacagccuggg

SEQ ID NO: 84531 - RNA, 32 nt, Homo Sapiens
ugaaucauggaaacacucuuuaugauuuuuua

SEQ ID NO: 84532 - RNA, 32 nt, Homo Sapiens
uaccacugguguaaaaaacaaacauuugaaga

SEQ ID NO: 84533 - RNA, 32 nt, Homo Sapiens
uuucuccucuuuaauauugcugugaacagugg

SEQ ID NO: 84534 - RNA, 32 nt, Homo Sapiens
uuuacauauuggaaaauagaaauugcaaauac

SEQ ID NO: 84535 - RNA, 32 nt, Homo Sapiens
gcaggccugcucagcccuccuggaggcccucc

SEQ ID NO: 84536 - RNA, 32 nt, Homo Sapiens
uuuguggcagguggagacagcuuauuaggcag

SEQ ID NO: 84537 - RNA, 32 nt, Homo Sapiens
gccugcgagcgcguccgcgggcugggcguuuc

SEQ ID NO: 84538 - RNA, 32 nt, Homo Sapiens
gauguccuaucaaguuaugucuucugggugac

SEQ ID NO: 84539 - RNA, 32 nt, Homo Sapiens
gugauuucugcauuuccaacugaggauuggac

SEQ ID NO: 84540 - RNA, 32 nt, Homo Sapiens
ccccuucccgucugcccuguguccucacugcg

SEQ ID NO: 84541 - RNA, 32 nt, Homo Sapiens
ggucagaagaucuagaacagccuggucaacau

SEQ ID NO: 84542 - RNA, 32 nt, Homo Sapiens
gguggccagggagaggcgcccggugcagaugg

SEQ ID NO: 84543 - RNA, 32 nt, Homo Sapiens
cagguguacagcaucuugugaaaguuauggag

SEQ ID NO: 84544 - RNA, 32 nt, Homo Sapiens
uccagagugaaugcagcuccgcucaccuuuug

SEQ ID NO: 84545 - RNA, 32 nt, Homo Sapiens
gugcccccaucccauccaccccuucucuucau

SEQ ID NO: 84546 - RNA, 32 nt, Homo Sapiens
cccugcucugcccagcccccagcccuccagua

SEQ ID NO: 84547 - RNA, 32 nt, Homo Sapiens
aauacuugaugcauucguuuccucagugcugc

SEQ ID NO: 84548 - RNA, 32 nt, Homo Sapiens
gucgccccaucccugcgcgcccagccugccaa

SEQ ID NO: 84549 - RNA, 32 nt, Homo Sapiens
gccccgcuggccagcccugggccacuucccgg

SEQ ID NO: 84550 - RNA, 32 nt, Homo Sapiens
gaaggcagacauuuauuuuuaauagccaagua

SEQ ID NO: 84551 - RNA, 32 nt, Homo Sapiens
cgggggcucccuggggaccccagaugggcuca

SEQ ID NO: 84552 - RNA, 32 nt, Homo Sapiens
gauacccacaguggaagcuguuugcagucggc

SEQ ID NO: 84553 - RNA, 32 nt, Homo Sapiens
acauucgaaaauuugauaguaucaaaauuagu

SEQ ID NO: 84554 - RNA, 32 nt, Homo Sapiens
uuuuauguuuuaaagauaugaaaucuguuuac

SEQ ID NO: 84555 - RNA, 32 nt, Homo Sapiens
uuagaggugugagccaccacgcccggccuauu

SEQ ID NO: 84556 - RNA, 32 nt, Homo Sapiens
gggugagcugcgccaggcccgggauagggacu

SEQ ID NO: 84557 - RNA, 32 nt, Homo Sapiens
agucaagugucugcuacauuuucaagcaugag

SEQ ID NO: 84558 - RNA, 32 nt, Homo Sapiens
gagucagugucuaugaccuugccucuuucuuc

SEQ ID NO: 84559 - RNA, 32 nt, Homo Sapiens
uauuuuaaauaaauuauaagcuuuaagguacg

SEQ ID NO: 84560 - RNA, 32 nt, Homo Sapiens
cuguuuucuuucuuuucuuaauccuauccaag

SEQ ID NO: 84561 - RNA, 32 nt, Homo Sapiens
ggagccaguuugccggauacaaacugguauuc

SEQ ID NO: 84562 - RNA, 32 nt, Homo Sapiens
gccacgccccgcgacacaccccggcggcucuc

SEQ ID NO: 84563 - RNA, 32 nt, Homo Sapiens
cuuacagccucuugcagcuuugccauugauca

SEQ ID NO: 84564 - RNA, 32 nt, Homo Sapiens
aguggugaugccugaggccugggguugaccac

SEQ ID NO: 84565 - RNA, 32 nt, Homo Sapiens
uauuuuuaaguaggcuuuacugagagaaacua

SEQ ID NO: 84566 - RNA, 32 nt, Homo Sapiens
uuguuuaacaauaugcguuuauuuuuguacau

SEQ ID NO: 84567 - RNA, 32 nt, Homo Sapiens
gccaaggaggccccaaacccaggccccaugca

SEQ ID NO: 84568 - RNA, 32 nt, Homo Sapiens
caaaaauuugagguaucauugaaacaggucau

SEQ ID NO: 84569 - RNA, 32 nt, Homo Sapiens
agcuuuuacaacagugcugaucuaaaaauacu

SEQ ID NO: 84570 - RNA, 32 nt, Homo Sapiens
cuccguugagcaccggccgccgggccucuggg

SEQ ID NO: 84571 - RNA, 32 nt, Homo Sapiens
ugucuucuuaccucauuuuaagaagcauguga

SEQ ID NO: 84572 - RNA, 32 nt, Homo Sapiens
uuccucagaacuccucguacugcucuagugcu

SEQ ID NO: 84573 - RNA, 32 nt, Homo Sapiens
gagaugcucucucuccacggccucagagccac

SEQ ID NO: 84574 - RNA, 32 nt, Homo Sapiens
ccagucggucuuccuccggcccgggcccuggc

SEQ ID NO: 84575 - RNA, 32 nt, Homo Sapiens
gcaggucgccgggaaaacccggagcggagcau

SEQ ID NO: 84576 - RNA, 32 nt, Homo Sapiens
ugauggucaguuccuuuuagauuucagaaaau

SEQ ID NO: 84577 - RNA, 32 nt, Homo Sapiens
ucaggccugcgagaagacccagcuggaguuca

SEQ ID NO: 84578 - RNA, 32 nt, Homo Sapiens
ucucuuuggucaguaacaagugcaauggaaag

SEQ ID NO: 84579 - RNA, 32 nt, Homo Sapiens
cugggcugccguccggugucaagccccggcgc

SEQ ID NO: 84580 - RNA, 32 nt, Homo Sapiens
cgacucgucccggcccguucggagccgcccga

SEQ ID NO: 84581 - RNA, 32 nt, Homo Sapiens
cuacgcugccucaggcccccagcccuguggcu

SEQ ID NO: 84582 - RNA, 32 nt, Homo Sapiens
cuuccuucccuccuuuuaaaauuuuguguucc

SEQ ID NO: 84583 - RNA, 32 nt, Homo Sapiens
cucccgacacaccagcagcaggaccagccccc

SEQ ID NO: 84584 - RNA, 32 nt, Homo Sapiens
ugcugcccagcagcucugccuacugcgcaggc

SEQ ID NO: 84585 - RNA, 32 nt, Homo Sapiens
uucagcugcugcucccaauaccucagcauggu

SEQ ID NO: 84586 - RNA, 32 nt, Homo Sapiens
uuucugcucacgggaacuuagcagaaacucac

SEQ ID NO: 84587 - RNA, 32 nt, Homo Sapiens
uggaggaagcaucugaguuugagaccauggcu

SEQ ID NO: 84588 - RNA, 32 nt, Homo Sapiens
ggggggccuagguguugucgucccugcuagua

SEQ ID NO: 84589 - RNA, 32 nt, Homo Sapiens
cccuuuggcucuugcugucuucagcagcaucu

SEQ ID NO: 84590 - RNA, 32 nt, Homo Sapiens
uaaccugaggagcauauuuuuaccaaauuaaa

SEQ ID NO: 84591 - RNA, 32 nt, Homo Sapiens
gcgagugaugagugcuucuuaauccuaaaaac

SEQ ID NO: 84592 - RNA, 32 nt, Homo Sapiens
gccuggcagugugcaugcugcaaacuaugcac

SEQ ID NO: 84593 - RNA, 32 nt, Homo Sapiens
ccauccccacccgccccucucccggcccugcu

SEQ ID NO: 84594 - RNA, 32 nt, Homo Sapiens
ccccacccccgccaugucccacuaggcguccu

SEQ ID NO: 84595 - RNA, 32 nt, Homo Sapiens
caucuagacuccaucucaaaaaaaaaaaaaaa

SEQ ID NO: 84596 - RNA, 32 nt, Homo Sapiens
gcuagugacaccuggugauucggcuguguaua

SEQ ID NO: 84597 - RNA, 32 nt, Homo Sapiens
ccaauggcaagagcuucccuagggcuggguca

SEQ ID NO: 84598 - RNA, 32 nt, Homo Sapiens
ccgcugccgcccagcacguccagguaagguac

SEQ ID NO: 84599 - RNA, 32 nt, Homo Sapiens
caggccacaugaugcauagagccucuuucaug

SEQ ID NO: 84600 - RNA, 32 nt, Homo Sapiens
ugucaucccugaugaauguaaaguuacacugu

SEQ ID NO: 84601 - RNA, 32 nt, Homo Sapiens
cugguucacaugccuuguagcuaagucuuucu

SEQ ID NO: 84602 - RNA, 32 nt, Homo Sapiens
cuggaagggcggcggcggcugggggagacggc

SEQ ID NO: 84603 - RNA, 32 nt, Homo Sapiens
cccagagauucccccuucuccucuccccuacu

SEQ ID NO: 84604 - RNA, 32 nt, Homo Sapiens
aagaaaaauauauaaacagaucuucuacauuu

SEQ ID NO: 84605 - RNA, 32 nt, Homo Sapiens
ugcaauaggcuacuuuggcaagcccuccguaa

SEQ ID NO: 84606 - RNA, 32 nt, Homo Sapiens
ugcccaauucuuggcacaggcauuauguuuga

SEQ ID NO: 84607 - RNA, 32 nt, Homo Sapiens
uuaacccccauaaggcauguguguguauacaa

SEQ ID NO: 84608 - RNA, 32 nt, Homo Sapiens
uuuauuuuuaugucucuccuuaacuaugagac

SEQ ID NO: 84609 - RNA, 32 nt, Homo Sapiens
auuuuuagcaauguuuuuaaauuugugucuau

SEQ ID NO: 84610 - RNA, 32 nt, Homo Sapiens
caggagagaagaauugggcagauucuuuacug

SEQ ID NO: 84611 - RNA, 32 nt, Homo Sapiens
uuguacauuuaauugauauuugugcugaggug

SEQ ID NO: 84612 - RNA, 32 nt, Homo Sapiens
cauaccggaaaguugaauaaauggaugaauuc

SEQ ID NO: 84613 - RNA, 32 nt, Homo Sapiens
gccgagaagaacuugcgugugcugggggagag

SEQ ID NO: 84614 - RNA, 32 nt, Homo Sapiens
gucaugcuuggaacagcauuuccacuagagaa

SEQ ID NO: 84615 - RNA, 31 nt, Homo Sapiens
aggacauagccccuggaggugcuguugcuau

SEQ ID NO: 84616 - RNA, 32 nt, Homo Sapiens
ucagcgugugcugguccagccagcggcugcag

SEQ ID NO: 84617 - RNA, 32 nt, Homo Sapiens
uucacaaaaauaucuuuugaaauuggcuuugg

SEQ ID NO: 84618 - RNA, 32 nt, Homo Sapiens
cgggcggcgcggaguagguggcggcggccaug

SEQ ID NO: 84619 - RNA, 32 nt, Homo Sapiens
agaugagaaggagggcaggccuuuuuaaucug

SEQ ID NO: 84620 - RNA, 32 nt, Homo Sapiens
auauaaagcucgggucucggaccuacuggaac

SEQ ID NO: 84621 - RNA, 32 nt, Homo Sapiens
guacagcccccguccccgccccgccccgcccg

SEQ ID NO: 84622 - RNA, 32 nt, Homo Sapiens
uuagaaauuaaaccuuuuuucagcuuaaugac

SEQ ID NO: 84623 - RNA, 32 nt, Homo Sapiens
uuugagguacauucuauaaaucaauauccuua

SEQ ID NO: 84624 - RNA, 32 nt, Homo Sapiens
ggacaauaauugucuguaagcuaaaauggguu

SEQ ID NO: 84625 - RNA, 32 nt, Homo Sapiens
uugaggcacucgccggacucugcccgagccuu

SEQ ID NO: 84626 - RNA, 32 nt, Homo Sapiens
gggaaaggacaauuuaauauaaauuucuguuu

SEQ ID NO: 84627 - RNA, 32 nt, Homo Sapiens
uucauacaaagcaucucacuccccuccccagg

SEQ ID NO: 84628 - RNA, 32 nt, Homo Sapiens
ccccuugguucccaggguccugcuccgaagca

SEQ ID NO: 84629 - RNA, 32 nt, Homo Sapiens
agacucacucuguccgcccaggcugggugcag

SEQ ID NO: 84630 - RNA, 32 nt, Homo Sapiens
gaguauuauaauaaaaagcuaaguuugcauuu

SEQ ID NO: 84631 - RNA, 29 nt, Homo Sapiens
ugguuucggggacaguaggguugguggga

SEQ ID NO: 84632 - RNA, 32 nt, Homo Sapiens
guuugucaucugucauggucuccuuccaccaa

SEQ ID NO: 84633 - RNA, 32 nt, Homo Sapiens
cugggagauuguggacgggcugugcugggagg

SEQ ID NO: 84634 - RNA, 32 nt, Homo Sapiens
ccucuggagcuccagucugcaagagucaggag

SEQ ID NO: 84635 - RNA, 32 nt, Homo Sapiens
aggugagagaaaaaugucagacucaauaaaug

SEQ ID NO: 84636 - RNA, 32 nt, Homo Sapiens
uuaauuguuuaguuauaggcaguguuaaauua

SEQ ID NO: 84637 - RNA, 32 nt, Homo Sapiens
ccuucacccugccugaauucucuuuggcuucu

SEQ ID NO: 84638 - RNA, 30 nt, Homo Sapiens
ccacuuggaaauggcaugcaaaagccauca

SEQ ID NO: 84639 - RNA, 32 nt, Homo Sapiens
gaccaccuggaacaaaugcagcugauaccauu

SEQ ID NO: 84640 - RNA, 32 nt, Homo Sapiens
gaaguuagcgccuugacgugggacaaccggac

SEQ ID NO: 84641 - RNA, 32 nt, Homo Sapiens
ccuguaaaacaaaaccuaucuagugucugcau

SEQ ID NO: 84642 - RNA, 32 nt, Homo Sapiens
ucuguagcaaauaaauccuuugaaagagcucc

SEQ ID NO: 84643 - RNA, 32 nt, Homo Sapiens
gacucggcucaccgugagaaagagucacucac

SEQ ID NO: 84644 - RNA, 32 nt, Homo Sapiens
cggagaggccgcgggccggcacuccccggaug

SEQ ID NO: 84645 - RNA, 32 nt, Homo Sapiens
ugagaauaguaagugagucaaaaaauaauugg

SEQ ID NO: 84646 - RNA, 32 nt, Homo Sapiens
gcccuucuuguacuuuuuucaucuuuacccug

SEQ ID NO: 84647 - RNA, 32 nt, Homo Sapiens
gccagugcagugccauccuacagguggcugga

SEQ ID NO: 84648 - RNA, 32 nt, Homo Sapiens
agugacauggggaaauaguuauagaaaauguc

SEQ ID NO: 84649 - RNA, 32 nt, Homo Sapiens
gaugcccgcccggggaguuuccgcggcggccu

SEQ ID NO: 84650 - RNA, 32 nt, Homo Sapiens
ucuuuuccggugccggaacuaucguacuggug

SEQ ID NO: 84651 - RNA, 27 nt, Homo Sapiens
cuccggauccuuuucagcccgaggccu

SEQ ID NO: 84652 - RNA, 32 nt, Homo Sapiens
ucuaguugguuuggggacccuggugcaugcua

SEQ ID NO: 84653 - RNA, 32 nt, Homo Sapiens
auacaugcuguaauauagaauuaguggaacau

SEQ ID NO: 84654 - RNA, 32 nt, Homo Sapiens
cuguuuucaaccaacuauuuuugaggaauuau

SEQ ID NO: 84655 - RNA, 29 nt, Homo Sapiens
gaaaguucauguugcugaaagcuguuugg

SEQ ID NO: 84656 - RNA, 32 nt, Homo Sapiens
cagccgcgcuucgaaggacgccgccgggagcu

SEQ ID NO: 84657 - RNA, 32 nt, Homo Sapiens
gacaccccgaaauaaacuggcacacagcuggg

SEQ ID NO: 84658 - RNA, 32 nt, Homo Sapiens
cccugucugcaggccacccccaccucccugca

SEQ ID NO: 84659 - RNA, 32 nt, Homo Sapiens
gugagcaauuguucuguugacuccaugucugc

SEQ ID NO: 84660 - RNA, 27 nt, Homo Sapiens
gcuaucuccaucuucagcuccagaguc

SEQ ID NO: 84661 - RNA, 32 nt, Homo Sapiens
acucuguggcuggccuggcacgggcucagccc

SEQ ID NO: 84662 - RNA, 32 nt, Homo Sapiens
agguugaaagacuugaagccaaauaguugaac

SEQ ID NO: 84663 - RNA, 32 nt, Homo Sapiens
ggcccguauggcggccccgcccguagaucauc

SEQ ID NO: 84664 - RNA, 32 nt, Homo Sapiens
uguggccuuccucuccuuccuguuuggugagu

SEQ ID NO: 84665 - RNA, 32 nt, Homo Sapiens
aggugugacaagaugguguucugcuaauguua

SEQ ID NO: 84666 - RNA, 32 nt, Homo Sapiens
cccacggagcccagccuggauuccugugccug

SEQ ID NO: 84667 - RNA, 32 nt, Homo Sapiens
cuguccccagguccugucucugcacagaaacu

SEQ ID NO: 84668 - RNA, 32 nt, Homo Sapiens
uugcuaaauaaaauaauuaugauucaacuagu

SEQ ID NO: 84669 - RNA, 32 nt, Homo Sapiens
uaggcccccuccccaacucuaaccagacccca

SEQ ID NO: 84670 - RNA, 32 nt, Homo Sapiens
uacauuuaacagaaacgaacauccucuugcaa

SEQ ID NO: 84671 - RNA, 32 nt, Homo Sapiens
cacauccugcccaauggccaggucuugggaug

SEQ ID NO: 84672 - RNA, 32 nt, Homo Sapiens
ugagauucagaauaaacuuauaacaucuugaa

SEQ ID NO: 84673 - RNA, 32 nt, Homo Sapiens
caagaccacccugucuuaauuacuauuguauc

SEQ ID NO: 84674 - RNA, 32 nt, Homo Sapiens
uuagccacauucaaagcaauccugggcugccu

SEQ ID NO: 84675 - RNA, 32 nt, Homo Sapiens
cagucggguccucccgcccgcucccgcgcagc

SEQ ID NO: 84676 - RNA, 32 nt, Homo Sapiens
uuucaaagcucuuuuccuaacugguuaaguaa

SEQ ID NO: 84677 - RNA, 32 nt, Homo Sapiens
cccggcuuccgcgcgccgcccgccaccaaucc

SEQ ID NO: 84678 - RNA, 31 nt, Homo Sapiens
acagcaucacgagccacuuccacuccugggu

SEQ ID NO: 84679 - RNA, 32 nt, Homo Sapiens
ugugagagacaaccagcagcauccucuuugua

SEQ ID NO: 84680 - RNA, 32 nt, Homo Sapiens
agacuccagccucuccuccuggggccacccaa

SEQ ID NO: 84681 - RNA, 32 nt, Homo Sapiens
uuaucuuuuuuauuguguuguguuaugccuac

SEQ ID NO: 84682 - RNA, 32 nt, Homo Sapiens
ccucuccgcgcgccccaccuccuccgccucgc

SEQ ID NO: 84683 - RNA, 32 nt, Homo Sapiens
auuguaugagauuuauaaccuaacuuaaaggu

SEQ ID NO: 84684 - RNA, 32 nt, Homo Sapiens
aguaugauccugaacacaaauugaucuucaga

SEQ ID NO: 84685 - RNA, 32 nt, Homo Sapiens
uggugcagccaacaaugcugaccggugcuuau

SEQ ID NO: 84686 - RNA, 27 nt, Homo Sapiens
cacacaacuauuuucagcccuuuaaua

SEQ ID NO: 84687 - RNA, 32 nt, Homo Sapiens
ugggggaaccuagaagaggaaaaggaauguca

SEQ ID NO: 84688 - RNA, 32 nt, Homo Sapiens
guuguccagagcucaggugcugggacaggugg

SEQ ID NO: 84689 - RNA, 32 nt, Homo Sapiens
acugucuuuucuauguuuguucuguacagcuc

SEQ ID NO: 84690 - RNA, 32 nt, Homo Sapiens
ugaauuuaauaaaaauauuccuaaugcuuuua

SEQ ID NO: 84691 - RNA, 32 nt, Homo Sapiens
gacaccucauggcacuucaaacuauuaaaaug

SEQ ID NO: 84692 - RNA, 31 nt, Homo Sapiens
acugcugcucggagaaaccacauccccaggc

SEQ ID NO: 84693 - RNA, 32 nt, Homo Sapiens
cucuggcugugaaccaccugggcuucaucuca

SEQ ID NO: 84694 - RNA, 32 nt, Homo Sapiens
uaagggaaguguucuccuccccuuucaggaac

SEQ ID NO: 84695 - RNA, 32 nt, Homo Sapiens
acccgcagcaaggcccugguuccuggagaaug

SEQ ID NO: 84696 - RNA, 32 nt, Homo Sapiens
cuuucuuuguaucucugcaagcagagauuucu

SEQ ID NO: 84697 - RNA, 32 nt, Homo Sapiens
agagugggacccagcccucaccucccccagag

SEQ ID NO: 84698 - RNA, 32 nt, Homo Sapiens
gcgguggcggcgagggcgguggggcugccugu

SEQ ID NO: 84699 - RNA, 32 nt, Homo Sapiens
ggcgcgucggagccgcugagaaagcgcagaga

SEQ ID NO: 84700 - RNA, 32 nt, Homo Sapiens
acccggagccgugcccaguccacgccggccgu

SEQ ID NO: 84701 - RNA, 32 nt, Homo Sapiens
acacauuuguauuuccucuguacugugagacu

SEQ ID NO: 84702 - RNA, 32 nt, Homo Sapiens
agagucaagcuggcucucugguaugugacccc

SEQ ID NO: 84703 - RNA, 32 nt, Homo Sapiens
cuagcuaagacugugauggaaacuacuugcug

SEQ ID NO: 84704 - RNA, 32 nt, Homo Sapiens
gcagaaugagagagggugaacagggaacucua

SEQ ID NO: 84705 - RNA, 27 nt, Homo Sapiens
aaacgccgcuucuucagucucugggga

SEQ ID NO: 84706 - RNA, 32 nt, Homo Sapiens
ccugcugauaaugaugauauacauuuuagcca

SEQ ID NO: 84707 - RNA, 32 nt, Homo Sapiens
uuugauuuuccaaaaaucauaauuguguaaga

SEQ ID NO: 84708 - RNA, 32 nt, Homo Sapiens
uuguuguccccacuuuacagauguggauauuu

SEQ ID NO: 84709 - RNA, 32 nt, Homo Sapiens
ucugcccuccggagaugacaagugagaaagaa

SEQ ID NO: 84710 - RNA, 32 nt, Homo Sapiens
ugugcacguauuguuuugauaaacaucuuaac

SEQ ID NO: 84711 - RNA, 32 nt, Homo Sapiens
agcccagcacaccugcagguguaagggacgau

SEQ ID NO: 84712 - RNA, 32 nt, Homo Sapiens
agauacuugacccagcacaucccccgccuggu

SEQ ID NO: 84713 - RNA, 32 nt, Homo Sapiens
acugaucucaaaugcagcugugacuaaaaguu

SEQ ID NO: 84714 - RNA, 32 nt, Homo Sapiens
gacuugcuuguggaagucuguguugugguugg

SEQ ID NO: 84715 - RNA, 32 nt, Homo Sapiens
caggcaggagaugagggagguuauauguggua

SEQ ID NO: 84716 - RNA, 32 nt, Homo Sapiens
aggaaagugucuauacaaucacagacuuauau

SEQ ID NO: 84717 - RNA, 32 nt, Homo Sapiens
aaaaaauauacauuuacaaauugugagauuuu

SEQ ID NO: 84718 - RNA, 32 nt, Homo Sapiens
acagagagaaucacaaacaggauaacuuagua

SEQ ID NO: 84719 - RNA, 32 nt, Homo Sapiens
aaacagaagaacuuuaugaugaugugguauag

SEQ ID NO: 84720 - RNA, 31 nt, Homo Sapiens
aagguucugccgguucccccagcucugggua

SEQ ID NO: 84721 - RNA, 32 nt, Homo Sapiens
uacccgaccuucccuucucccuugagugcuug

SEQ ID NO: 84722 - RNA, 30 nt, Homo Sapiens
gacucugagaggcgaucugagucugcuucc

SEQ ID NO: 84723 - RNA, 32 nt, Homo Sapiens
uuaugacacucccagcguaucauagaaaaugu

SEQ ID NO: 84724 - RNA, 32 nt, Homo Sapiens
aaugccacgugcccucacccagcccggccccc

SEQ ID NO: 84725 - RNA, 32 nt, Homo Sapiens
ugacuguggccgugcucauguaccacacucga

SEQ ID NO: 84726 - RNA, 32 nt, Homo Sapiens
ccgugacggggcgggcgggagccccggcaguc

SEQ ID NO: 84727 - RNA, 32 nt, Homo Sapiens
caggcgcucccucuucucacagcggcccacgu

SEQ ID NO: 84728 - RNA, 32 nt, Homo Sapiens
agcagcccgcgacgaggcagugcacgcucaga

SEQ ID NO: 84729 - RNA, 32 nt, Homo Sapiens
gcgcggcggggaagagagacugcggcgggagg

SEQ ID NO: 84730 - RNA, 32 nt, Homo Sapiens
cagcaaacaaaaaugcacaaagccugcuucgu

SEQ ID NO: 84731 - RNA, 32 nt, Homo Sapiens
uggccagggcugguuuuaaugcucuccguggg

SEQ ID NO: 84732 - RNA, 32 nt, Homo Sapiens
ucucuccuggaaacaucugccacauuuagugu

SEQ ID NO: 84733 - RNA, 32 nt, Homo Sapiens
gccuguuugcaaaaacauaauauauuucuguu

SEQ ID NO: 84734 - RNA, 31 nt, Homo Sapiens
cuaagaagcuucugaaaccaggcugccugag

SEQ ID NO: 84735 - RNA, 32 nt, Homo Sapiens
aaaacucuuauguguucauuaagggcucaaua

SEQ ID NO: 84736 - RNA, 32 nt, Homo Sapiens
ggacuccugaggggcggggcguguagccagcc

SEQ ID NO: 84737 - RNA, 32 nt, Homo Sapiens
uuauugaggcaucauuuauaguagcaaaacac

SEQ ID NO: 84738 - RNA, 32 nt, Homo Sapiens
uuggucuguugcccuccuucuuggcaugccau

SEQ ID NO: 84739 - RNA, 32 nt, Homo Sapiens
cuugccaucuugcuuuaagguguuaugguggc

SEQ ID NO: 84740 - RNA, 32 nt, Homo Sapiens
uuugaaaaauuuugcaaaugucuuaggugauu

SEQ ID NO: 84741 - RNA, 32 nt, Homo Sapiens
agcccauccccaggccucuccuccuaugccuu

SEQ ID NO: 84742 - RNA, 32 nt, Homo Sapiens
ggcacgaggccggcgcuucccggccggugucg

SEQ ID NO: 84743 - RNA, 32 nt, Homo Sapiens
caggaaaagcagcugggggauucaucaguucu

SEQ ID NO: 84744 - RNA, 32 nt, Homo Sapiens
ggaucccagcgcccgcacucccgcccccgcca

SEQ ID NO: 84745 - RNA, 32 nt, Homo Sapiens
ccgcacgucaggcuuuuuucauuagcaaacca

SEQ ID NO: 84746 - RNA, 32 nt, Homo Sapiens
ccuggcggaaagggggcuguuugaacuugaaa

SEQ ID NO: 84747 - RNA, 32 nt, Homo Sapiens
agagggauggguggagaaggacaugagaggug

SEQ ID NO: 84748 - RNA, 32 nt, Homo Sapiens
gggucucaagacagugcccuguggguuccuag

SEQ ID NO: 84749 - RNA, 32 nt, Homo Sapiens
gaugggcagggagagugacggggagcagcaca

SEQ ID NO: 84750 - RNA, 32 nt, Homo Sapiens
cuaggaagcugauagaaagaacuccuguauaa

SEQ ID NO: 84751 - RNA, 32 nt, Homo Sapiens
gcgcugggugcagcccccacggccggcgggca

SEQ ID NO: 84752 - RNA, 32 nt, Homo Sapiens
ccacaggguagucugcuaaauaaccagcuaga

SEQ ID NO: 84753 - RNA, 32 nt, Homo Sapiens
ucuaccccaucccucacagccucuugcugcua

SEQ ID NO: 84754 - RNA, 32 nt, Homo Sapiens
ucugcacauggugggggcuuguccacuguggu

SEQ ID NO: 84755 - RNA, 32 nt, Homo Sapiens
cucccacagaaaucagcccgagaagaaagccu

SEQ ID NO: 84756 - RNA, 32 nt, Homo Sapiens
ucaggcaggggaucuccaaaugcaaaaggaag

SEQ ID NO: 84757 - RNA, 32 nt, Homo Sapiens
guccauucaucccacccucucacaguucggac

SEQ ID NO: 84758 - RNA, 26 nt, Homo Sapiens
cauggcugggggccguggggcccccg

SEQ ID NO: 84759 - RNA, 32 nt, Homo Sapiens
gcuccaggcugacuucugucucugcaaagagg

SEQ ID NO: 84760 - RNA, 32 nt, Homo Sapiens
ugauuguuuauaguuuuuuguuuucagaaaug

SEQ ID NO: 84761 - RNA, 32 nt, Homo Sapiens
uuuagcaugguaacuggauguuuucuaaacac

SEQ ID NO: 84762 - RNA, 32 nt, Homo Sapiens
aguuuccaacaagaggcugugcaaauugcaaa

SEQ ID NO: 84763 - RNA, 32 nt, Homo Sapiens
uuuuacugaacugaaagcacaaagaagacuac

SEQ ID NO: 84764 - RNA, 32 nt, Homo Sapiens
cugaaguuugccauggagagaauagcaucucu

SEQ ID NO: 84765 - RNA, 32 nt, Homo Sapiens
aagcuacgaaaacucauccuggcuguaggaua

SEQ ID NO: 84766 - RNA, 27 nt, Homo Sapiens
gccuauaccuucuucaccccagggaac

SEQ ID NO: 84767 - RNA, 32 nt, Homo Sapiens
guccgggcagcaugaggcgcgcggcgcucugg

SEQ ID NO: 84768 - RNA, 32 nt, Homo Sapiens
auuagcuggaagaucuguauuugauggaagac

SEQ ID NO: 84769 - RNA, 32 nt, Homo Sapiens
agaagaugcucuggggguuuuguuuuugcuuu

SEQ ID NO: 84770 - RNA, 32 nt, Homo Sapiens
aguguuacuuggaagguuagcuucuaucauuc

SEQ ID NO: 84771 - RNA, 32 nt, Homo Sapiens
aacauuugguugcaaaucuccauccacaucag

SEQ ID NO: 84772 - RNA, 32 nt, Homo Sapiens
uuguauuuuuaaaauuuaucuucaauucuuca

SEQ ID NO: 84773 - RNA, 32 nt, Homo Sapiens
cuguucagcuuucuuauggaaugacagagaac

SEQ ID NO: 84774 - RNA, 32 nt, Homo Sapiens
agucucuuccuggaagacccugagggccggca

SEQ ID NO: 84775 - RNA, 32 nt, Homo Sapiens
acguuccccacuuagccuuugcugaaguguuu

SEQ ID NO: 84776 - RNA, 32 nt, Homo Sapiens
cuugaccaauuuucaccuuuucuggggauuau

SEQ ID NO: 84777 - RNA, 32 nt, Homo Sapiens
aaauuagcugggugugguggcgugcgccugua

SEQ ID NO: 84778 - RNA, 32 nt, Homo Sapiens
agugauucugugaaaaggacagugaagccagc

SEQ ID NO: 84779 - RNA, 32 nt, Homo Sapiens
cacuguaugacucuccucuccugcaggugucu

SEQ ID NO: 84780 - RNA, 32 nt, Homo Sapiens
ggccacccaccguggggccccuggacuccaca

SEQ ID NO: 84781 - RNA, 32 nt, Homo Sapiens
ccgaccgguaagcccgccuccucccucggccg

SEQ ID NO: 84782 - RNA, 32 nt, Homo Sapiens
ucacuaaaggauuucuauuugcugucaguuaa

SEQ ID NO: 84783 - RNA, 32 nt, Homo Sapiens
agggaaaaugacuuuauugcuuaauuucugcc

SEQ ID NO: 84784 - RNA, 32 nt, Homo Sapiens
uguccaauguaugacuucaugaguuacacaga

SEQ ID NO: 84785 - RNA, 32 nt, Homo Sapiens
cagagugugggaaggcccaggcgagggccaau

SEQ ID NO: 84786 - RNA, 32 nt, Homo Sapiens
gcuaggccccccgucccggucauggccaugcu

SEQ ID NO: 84787 - RNA, 32 nt, Homo Sapiens
cuccgugcuuuuagcccuccugagccaaagaa

SEQ ID NO: 84788 - RNA, 32 nt, Homo Sapiens
gggcagugagggggccggcgggcgugggccga

SEQ ID NO: 84789 - RNA, 32 nt, Homo Sapiens
cuggacagaaaaggggcagacacaccgaggau

SEQ ID NO: 84790 - RNA, 32 nt, Homo Sapiens
uuuuaaaagcaucuuaucuaaaagaaaggcua

SEQ ID NO: 84791 - RNA, 32 nt, Homo Sapiens
ucuucccuccgcgacccgggccgugcguccgu

SEQ ID NO: 84792 - RNA, 32 nt, Homo Sapiens
cugggccuggcccuccucuccugacucccaga

SEQ ID NO: 84793 - RNA, 32 nt, Homo Sapiens
aaacggaguccuccuguguugcccaggcuggu

SEQ ID NO: 84794 - RNA, 32 nt, Homo Sapiens
aggaggaggaggaggcaaaguuagaguugggg

SEQ ID NO: 84795 - RNA, 32 nt, Homo Sapiens
cuggcgaagcgagcggccggcgcgggccccug

SEQ ID NO: 84796 - RNA, 32 nt, Homo Sapiens
ggccacuccgcggaggccccacugggccccag

SEQ ID NO: 84797 - RNA, 32 nt, Homo Sapiens
uggauguauaugaaacaaaauaaauggagaua

SEQ ID NO: 84798 - RNA, 32 nt, Homo Sapiens
ggaagacgaagggaugcugcaguuccaaaaga

SEQ ID NO: 84799 - RNA, 32 nt, Homo Sapiens
cggcugcgaggcggcccgugcaguccgugcgc

SEQ ID NO: 84800 - RNA, 32 nt, Homo Sapiens
ggcgcgaggccggcgcugugcucgccucggag

SEQ ID NO: 84801 - RNA, 32 nt, Homo Sapiens
ggguggccagugcggcugccagguuccuguac

SEQ ID NO: 84802 - RNA, 31 nt, Homo Sapiens
gucgggagggcggagcuacagggccugcaag

SEQ ID NO: 84803 - RNA, 32 nt, Homo Sapiens
gcaucucugaagcuuggaaagcugucuuccag

SEQ ID NO: 84804 - RNA, 32 nt, Homo Sapiens
gaagauaauaaauguuuguuagauacaccaua

SEQ ID NO: 84805 - RNA, 32 nt, Homo Sapiens
acaaagaaagggaaaagucugcuuguaagcug

SEQ ID NO: 84806 - RNA, 32 nt, Homo Sapiens
gaggaucggugugugcgcgcgcggcuuuaaag

SEQ ID NO: 84807 - RNA, 32 nt, Homo Sapiens
augcacacacacauuucagggacauagcagua

SEQ ID NO: 84808 - RNA, 32 nt, Homo Sapiens
uuaguuuuuacuaccuuaggcuuuauugcuuu

SEQ ID NO: 84809 - RNA, 32 nt, Homo Sapiens
uaggugguggcaagggggcggcggcggaugcc

SEQ ID NO: 84810 - RNA, 32 nt, Homo Sapiens
uuuuuauuagggauuuucaaaaggggagggag

SEQ ID NO: 84811 - RNA, 32 nt, Homo Sapiens
auggcugccugccuuggggaggaaccauaucu

SEQ ID NO: 84812 - RNA, 32 nt, Homo Sapiens
cucuuuuucuucugcuguuccaccuuucuaaa

SEQ ID NO: 84813 - RNA, 32 nt, Homo Sapiens
ggacaaagugagccagucagcaccuacaaaga

SEQ ID NO: 84814 - RNA, 32 nt, Homo Sapiens
ugcucgguggggcuggagcggcuugcuuaccu

SEQ ID NO: 84815 - RNA, 32 nt, Homo Sapiens
acucuauacauacauccuuaugcugagauguu

SEQ ID NO: 84816 - RNA, 28 nt, Homo Sapiens
gucuuaguuacaggauucugugauuaaa

SEQ ID NO: 84817 - RNA, 31 nt, Homo Sapiens
gccugggagccccauguacaggagggagggc

SEQ ID NO: 84818 - RNA, 32 nt, Homo Sapiens
aaacuccaucacugcccuuuagccacucacau

SEQ ID NO: 84819 - RNA, 32 nt, Homo Sapiens
auaaaaaagacauuuuuguuacaaaguuugca

SEQ ID NO: 84820 - RNA, 32 nt, Homo Sapiens
ucuguaucaaacaaaauccuugagguugguau

SEQ ID NO: 84821 - RNA, 32 nt, Homo Sapiens
ucugggaggacgagagccggacacccagcaca

SEQ ID NO: 84822 - RNA, 31 nt, Homo Sapiens
cugcugcagcgcacccauacucugcacuugc

SEQ ID NO: 84823 - RNA, 28 nt, Homo Sapiens
uuuuguuaauaaaauuuuauuggaacac

SEQ ID NO: 84824 - RNA, 32 nt, Homo Sapiens
gggccuccuugcaggcuucuggaucucugguc

SEQ ID NO: 84825 - RNA, 32 nt, Homo Sapiens
cugcggggagaauggagccaggggagaccauc

SEQ ID NO: 84826 - RNA, 32 nt, Homo Sapiens
gaggcucccugccucuauucucucuccuuugc

SEQ ID NO: 84827 - RNA, 32 nt, Homo Sapiens
uuuauuauuuuuccauuaaaaauaauagcugg

SEQ ID NO: 84828 - RNA, 32 nt, Homo Sapiens
gcuuauuuagaaaaaaggguaagcuagagaga

SEQ ID NO: 84829 - RNA, 32 nt, Homo Sapiens
uuuauauauauucuaucuagguuucucuuugu

SEQ ID NO: 84830 - RNA, 32 nt, Homo Sapiens
agcugaaguauuuuuuaaaauuaagcauuucu

SEQ ID NO: 84831 - RNA, 32 nt, Homo Sapiens
cuugccaccggcucugguguuuuggcuuaugc

SEQ ID NO: 84832 - RNA, 32 nt, Homo Sapiens
aauagaucuuucagagcugggugcuggguuug

SEQ ID NO: 84833 - RNA, 32 nt, Homo Sapiens
ggcucugugggaaggagggagccgggagccug

SEQ ID NO: 84834 - RNA, 32 nt, Homo Sapiens
agaggcagccgcgcccgccgccgccccugcuc

SEQ ID NO: 84835 - RNA, 32 nt, Homo Sapiens
ucuuuggggaauggggugggggugggagagga

SEQ ID NO: 84836 - RNA, 32 nt, Homo Sapiens
gguggcugguuccagggcucgucccggcauuu

SEQ ID NO: 84837 - RNA, 32 nt, Homo Sapiens
cugcagauggcauccauagauacaguacagua

SEQ ID NO: 84838 - RNA, 32 nt, Homo Sapiens
agaaaugcaaucauauuguuuauuuuuaagug

SEQ ID NO: 84839 - RNA, 32 nt, Homo Sapiens
caucuacaaaucucuuuuuuuagguuuugucc

SEQ ID NO: 84840 - RNA, 32 nt, Homo Sapiens
cuggcgcgggcucgccggcuguguauggucua

SEQ ID NO: 84841 - RNA, 32 nt, Homo Sapiens
guuccuuggauauauccacgggcuuugcuuug

SEQ ID NO: 84842 - RNA, 32 nt, Homo Sapiens
cuugaauuggaaaaauguacuuugaaagaacc

SEQ ID NO: 84843 - RNA, 32 nt, Homo Sapiens
gaaaaaucgugccaagcaauaagauuuaugua

SEQ ID NO: 84844 - RNA, 32 nt, Homo Sapiens
ccugccugauguggcucugggaauuccugcag

SEQ ID NO: 84845 - RNA, 32 nt, Homo Sapiens
gagucggccgggcugcugcugcugcugcucca

SEQ ID NO: 84846 - RNA, 32 nt, Homo Sapiens
augaauuugucaacuuuugucuuccauuguuc

SEQ ID NO: 84847 - RNA, 32 nt, Homo Sapiens
cgcggaggcagacagaccgggcgcugccaccg

SEQ ID NO: 84848 - RNA, 32 nt, Homo Sapiens
ggcgggcgcgagcgaggcgcccuagacaucuu

SEQ ID NO: 84849 - RNA, 32 nt, Homo Sapiens
uauuuaaagucaguuggcaagcaguggaauaa

SEQ ID NO: 84850 - RNA, 32 nt, Homo Sapiens
uuaccacauuuuacuuacgcauuucuuuugug

SEQ ID NO: 84851 - RNA, 32 nt, Homo Sapiens
aggguacucugacugcaacaucuuucacccca

SEQ ID NO: 84852 - RNA, 32 nt, Homo Sapiens
aagggcugucauugcacauaagcuuccauuuu

SEQ ID NO: 84853 - RNA, 32 nt, Homo Sapiens
ccguccccugcgcacggacgccgggaagaagg

SEQ ID NO: 84854 - RNA, 32 nt, Homo Sapiens
ccagccuccaucagggaccccuccucaugaac

SEQ ID NO: 84855 - RNA, 32 nt, Homo Sapiens
auccugaagaacuaauguucuguggaacauac

SEQ ID NO: 84856 - RNA, 32 nt, Homo Sapiens
agugaggggaagcgaggaagggcgaguuauug

SEQ ID NO: 84857 - RNA, 32 nt, Homo Sapiens
cccagcucccccagccccuggcuuccugaccc

SEQ ID NO: 84858 - RNA, 32 nt, Homo Sapiens
cucuggacggugccgccaggugacccuacaug

SEQ ID NO: 84859 - RNA, 32 nt, Homo Sapiens
caguuccucucuccugguuccuccccaucugc

SEQ ID NO: 84860 - RNA, 32 nt, Homo Sapiens
gaaggcuugcugccccuggccacagccugccu

SEQ ID NO: 84861 - RNA, 32 nt, Homo Sapiens
acagaguucagcaauuuugauuaaauuaagac

SEQ ID NO: 84862 - RNA, 32 nt, Homo Sapiens
cucagaugcagggcccuuggcucuggccucuc

SEQ ID NO: 84863 - RNA, 32 nt, Homo Sapiens
cgcggggggaggaggaggagggacugagcggc

SEQ ID NO: 84864 - RNA, 32 nt, Homo Sapiens
cagaggucucagauggcaaggaucaucuuggu

SEQ ID NO: 84865 - RNA, 32 nt, Homo Sapiens
agugugcgcgcgcucucgcuacccggcgggga

SEQ ID NO: 84866 - RNA, 32 nt, Homo Sapiens
gcuucccgucccucacgcgggcccgccccaug

SEQ ID NO: 84867 - RNA, 32 nt, Homo Sapiens
cguuuuuauuccugcugaaauguuuaaugauc

SEQ ID NO: 84868 - RNA, 32 nt, Homo Sapiens
cauguacuaguggucucaucuccagcuagccu

SEQ ID NO: 84869 - RNA, 32 nt, Homo Sapiens
gaggggguggcacagggcugggaccagcacgg

SEQ ID NO: 84870 - RNA, 32 nt, Homo Sapiens
cuccacuaaaauuuuuccuguggcuuuugauc

SEQ ID NO: 84871 - RNA, 32 nt, Homo Sapiens
caauauuacaggggcuugaacaacacuacgaa

SEQ ID NO: 84872 - RNA, 32 nt, Homo Sapiens
ccaaacccuucaacuccuggcuccgcaggggu

SEQ ID NO: 84873 - RNA, 32 nt, Homo Sapiens
cccacucgccuggcugcccacgcccucccugg

SEQ ID NO: 84874 - RNA, 32 nt, Homo Sapiens
uuugugcuucguggcuuguccaggcaagcagg

SEQ ID NO: 84875 - RNA, 32 nt, Homo Sapiens
ggauggacagcaugaccucugggugucucucc

SEQ ID NO: 84876 - RNA, 32 nt, Homo Sapiens
cuuacuuuaucuucauuuuuggcaccucacag

SEQ ID NO: 84877 - RNA, 32 nt, Homo Sapiens
gcauaggaaaauuuuggaaugaggcagaaaag

SEQ ID NO: 84878 - RNA, 32 nt, Homo Sapiens
uccaucaccacacuccccccagccuucaccug

SEQ ID NO: 84879 - RNA, 32 nt, Homo Sapiens
ggcccggcggccuggacggcggagcguugaaa

SEQ ID NO: 84880 - RNA, 32 nt, Homo Sapiens
aggagcauugagugaacauccauccuuguacc

SEQ ID NO: 84881 - RNA, 32 nt, Homo Sapiens
guaucagagcgacugcguccccuugcacugca

SEQ ID NO: 84882 - RNA, 32 nt, Homo Sapiens
uacuuccgcuagcccaucguuucucaggcugc

SEQ ID NO: 84883 - RNA, 32 nt, Homo Sapiens
gcuuuaaugcuguuaucuaucuuauuguucuu

SEQ ID NO: 84884 - RNA, 32 nt, Homo Sapiens
cagcugcaaaccugcaccuuccgccugauucc

SEQ ID NO: 84885 - RNA, 32 nt, Homo Sapiens
agcuuuccaggaacccuacuggcugccagacu

SEQ ID NO: 84886 - RNA, 32 nt, Homo Sapiens
ugcuguuuuaugguugugaagaacgagagcaa

SEQ ID NO: 84887 - RNA, 32 nt, Homo Sapiens
ccugggcggcuguagcugggaauggaggaugg

SEQ ID NO: 84888 - RNA, 32 nt, Homo Sapiens
ucgugauguccugcccgccgggagucuuuccc

SEQ ID NO: 84889 - RNA, 32 nt, Homo Sapiens
gaauuuauguucaccuuuauuacaauuucaaa

SEQ ID NO: 84890 - RNA, 32 nt, Homo Sapiens
ggagcgcggagcccggcccggaagcuaggagc

SEQ ID NO: 84891 - RNA, 32 nt, Homo Sapiens
agcacccugcgggcccggggucuggcagagug

SEQ ID NO: 84892 - RNA, 32 nt, Homo Sapiens
uugaggcuugaagagggagacaagcuaaaaga

SEQ ID NO: 84893 - RNA, 31 nt, Homo Sapiens
accagcccgagccgccugccccgucgcccgg

SEQ ID NO: 84894 - RNA, 32 nt, Homo Sapiens
cccccgacccgagcucuuucgucugccugcca

SEQ ID NO: 84895 - RNA, 32 nt, Homo Sapiens
uuagucuuuagcuauuacuggaucucuuaaga

SEQ ID NO: 84896 - RNA, 32 nt, Homo Sapiens
gaacagguucacgugauuaccuuuuucuuuug

SEQ ID NO: 84897 - RNA, 32 nt, Homo Sapiens
uaguaauccuggguguuuaucacguucagaga

SEQ ID NO: 84898 - RNA, 32 nt, Homo Sapiens
ggacguggccccaggcagcccucgcagcucag

SEQ ID NO: 84899 - RNA, 32 nt, Homo Sapiens
gauuagccgggugugguggugcaugcuuguag

SEQ ID NO: 84900 - RNA, 32 nt, Homo Sapiens
gggcaagcacugugucuccuuucaaccauuau

SEQ ID NO: 84901 - RNA, 32 nt, Homo Sapiens
ugguggaggugauuugggauagacuagguuuc

SEQ ID NO: 84902 - RNA, 32 nt, Homo Sapiens
aauuagccaggugugguggugcaugcuuguag

SEQ ID NO: 84903 - RNA, 32 nt, Homo Sapiens
ugagggauugcugagcuggagcuccagguguc

SEQ ID NO: 84904 - RNA, 32 nt, Homo Sapiens
uaagguucucagugacacaagaauucaguauu

SEQ ID NO: 84905 - RNA, 32 nt, Homo Sapiens
ccuguguaguagugcauagaauucuagcuuuc

SEQ ID NO: 84906 - RNA, 32 nt, Homo Sapiens
cuaagaaacaaaagaauuucaagauaauuagg

SEQ ID NO: 84907 - RNA, 32 nt, Homo Sapiens
ccugggcauauccaccaccucccucaccaaca

SEQ ID NO: 84908 - RNA, 32 nt, Homo Sapiens
acauuaaagugccauauguaaaaaagaaaaau

SEQ ID NO: 84909 - RNA, 31 nt, Homo Sapiens
accuugaaauaaagaugggcuuaaucuaaug

SEQ ID NO: 84910 - RNA, 32 nt, Homo Sapiens
gcccaugcauugcuguguucucuucuaaaaca

SEQ ID NO: 84911 - RNA, 32 nt, Homo Sapiens
guuggcuccguccccaggaucuucccgguuca

SEQ ID NO: 84912 - RNA, 32 nt, Homo Sapiens
caggggaaacugagucccucacccccuucaag

SEQ ID NO: 84913 - RNA, 32 nt, Homo Sapiens
uggguccgcaucccugcuucuggcgccccacc

SEQ ID NO: 84914 - RNA, 31 nt, Homo Sapiens
acauggaaauaaaucaguuauucagauaucc

SEQ ID NO: 84915 - RNA, 32 nt, Homo Sapiens
gaccuugaaugccugcccugguuguguggacu

SEQ ID NO: 84916 - RNA, 32 nt, Homo Sapiens
acagaauucagauaaaauuugcuaauguucug

SEQ ID NO: 84917 - RNA, 32 nt, Homo Sapiens
gucaguguggcuaugccugggaauuccagacc

SEQ ID NO: 84918 - RNA, 32 nt, Homo Sapiens
ggcucugcucugcgggacagcgcggcgcccgg

SEQ ID NO: 84919 - RNA, 32 nt, Homo Sapiens
aaugauuguggaugcauaaagaauaaauuuaa

SEQ ID NO: 84920 - RNA, 32 nt, Homo Sapiens
gacugaccaagcccacagcagaacagccaauc

SEQ ID NO: 84921 - RNA, 32 nt, Homo Sapiens
cgcugccaccgccucugauccaagccaccucc

SEQ ID NO: 84922 - RNA, 32 nt, Homo Sapiens
uggcuguguccucaaggcaguccccucccauc

SEQ ID NO: 84923 - RNA, 32 nt, Homo Sapiens
ucaguauauugguugugcuuuauauuugccaa

SEQ ID NO: 84924 - RNA, 32 nt, Homo Sapiens
caaguagcuggcacuacagacacgcgccacca

SEQ ID NO: 84925 - RNA, 32 nt, Homo Sapiens
uauuucaggcaguuauggauagauacauuaca

SEQ ID NO: 84926 - RNA, 32 nt, Homo Sapiens
gccaucugucaggagcggagccggcgaggagg

SEQ ID NO: 84927 - RNA, 32 nt, Homo Sapiens
aacuucaaggccaccuaccgugccggcauugc

SEQ ID NO: 84928 - RNA, 32 nt, Homo Sapiens
gggcaaagccuggccucgccgcucgggagcuu

SEQ ID NO: 84929 - RNA, 32 nt, Homo Sapiens
aggacccccuccccauugucaggcucuccaug

SEQ ID NO: 84930 - RNA, 32 nt, Homo Sapiens
uucugguuucccuuucucagauguaagcuaag

SEQ ID NO: 84931 - RNA, 32 nt, Homo Sapiens
ccuucuguuuccacuggcuuuuauugacacug

SEQ ID NO: 84932 - RNA, 32 nt, Homo Sapiens
ugcacccuacugacaaccccuccccagccuug

SEQ ID NO: 84933 - RNA, 32 nt, Homo Sapiens
gagcucggaaucuacagcguccagccauuucc

SEQ ID NO: 84934 - RNA, 32 nt, Homo Sapiens
gcuugggguggguguuccucccggggcuucaa

SEQ ID NO: 84935 - RNA, 32 nt, Homo Sapiens
gccaugggagggcucgcaggggugcuggcacu

SEQ ID NO: 84936 - RNA, 32 nt, Homo Sapiens
gacccgaggaggcggcagcucuaccgucgcag

SEQ ID NO: 84937 - RNA, 32 nt, Homo Sapiens
auguauuuugcuuuggguacugugauaacuac

SEQ ID NO: 84938 - RNA, 32 nt, Homo Sapiens
uggacaucagcaccccacaacacuccucggga

SEQ ID NO: 84939 - RNA, 32 nt, Homo Sapiens
ccaucgagggagaggccugaagggacugccua

SEQ ID NO: 84940 - RNA, 31 nt, Homo Sapiens
ccaugugacuucagugccugaguugauauuu

SEQ ID NO: 84941 - RNA, 32 nt, Homo Sapiens
aaugcuguaugguguguguucucuucuguuac

SEQ ID NO: 84942 - RNA, 32 nt, Homo Sapiens
gccggcauuagucgcgccugcgcacggcccug

SEQ ID NO: 84943 - RNA, 32 nt, Homo Sapiens
aagucucugcccgaggcuccuggcagaagguu

SEQ ID NO: 84944 - RNA, 32 nt, Homo Sapiens
uuggaauugcucuucauucagaagaggaacac

SEQ ID NO: 84945 - RNA, 32 nt, Homo Sapiens
uugugaccagcacgaagacagugucgcugcag

SEQ ID NO: 84946 - RNA, 32 nt, Homo Sapiens
gagucagugugcuuuaccucagugacccaaga

SEQ ID NO: 84947 - RNA, 32 nt, Homo Sapiens
uauuaaagauguagauuuuaaagugaaaaaaa

SEQ ID NO: 84948 - RNA, 30 nt, Homo Sapiens
gcagcaguucuuaggaccucauggggcugu

SEQ ID NO: 84949 - RNA, 32 nt, Homo Sapiens
ccuagcgugcagucagcgucagcacggcgcuc

SEQ ID NO: 84950 - RNA, 29 nt, Homo Sapiens
ugugcaucucuuuucagagguguguuagu

SEQ ID NO: 84951 - RNA, 32 nt, Homo Sapiens
gggggcugcuugggcucugugcucccuccacu

SEQ ID NO: 84952 - RNA, 32 nt, Homo Sapiens
cagagauuccaagagucugaugaguuacucug

SEQ ID NO: 84953 - RNA, 32 nt, Homo Sapiens
augaaacauuaaugguaaaaguggaguaauua

SEQ ID NO: 84954 - RNA, 32 nt, Homo Sapiens
cugaaagcgggacgcgggagggguggaggcug

SEQ ID NO: 84955 - RNA, 32 nt, Homo Sapiens
cauccuguaaaacucuuacuacguaaccagua

SEQ ID NO: 84956 - RNA, 32 nt, Homo Sapiens
ucauuugcaugguugucggggguguggggcug

SEQ ID NO: 84957 - RNA, 32 nt, Homo Sapiens
guuugauccgccaguugcaaguagaggccuuu

SEQ ID NO: 84958 - RNA, 32 nt, Homo Sapiens
ucugaguuuacugagcacuuugagaccacuug

SEQ ID NO: 84959 - RNA, 32 nt, Homo Sapiens
gcuguuucuaguuuggggcuaucaugaauaaa

SEQ ID NO: 84960 - RNA, 32 nt, Homo Sapiens
aggcugcaucccggccggcgguuccggagccu

SEQ ID NO: 84961 - RNA, 32 nt, Homo Sapiens
ggagagucaaggaaaccgcuggcagacgauaa

SEQ ID NO: 84962 - RNA, 32 nt, Homo Sapiens
cgccugucaucccagcacuuugggaggcugag

SEQ ID NO: 84963 - RNA, 32 nt, Homo Sapiens
cgaguaguucgggucucgcgggccucuuguuu

SEQ ID NO: 84964 - RNA, 32 nt, Homo Sapiens
cuucccucggcggcccgggcuccgcucauccu

SEQ ID NO: 84965 - RNA, 32 nt, Homo Sapiens
cugugguuggcagccacccaccccagaggcug

SEQ ID NO: 84966 - RNA, 32 nt, Homo Sapiens
uucggccggacgccgggagggagcuccaggcu

SEQ ID NO: 84967 - RNA, 32 nt, Homo Sapiens
gagcuggcagagagggugugugagcgacaugg

SEQ ID NO: 84968 - RNA, 32 nt, Homo Sapiens
aggaucagcugaaucaugaccuuuaaaaguuc

SEQ ID NO: 84969 - RNA, 32 nt, Homo Sapiens
aggacucccugacuagcagacagagcaucaua

SEQ ID NO: 84970 - RNA, 32 nt, Homo Sapiens
agacuaccagcaaagauuaaagcaugaaaugu

SEQ ID NO: 84971 - RNA, 32 nt, Homo Sapiens
guaauaaaaucagguacgacuccaaaaggaga

SEQ ID NO: 84972 - RNA, 32 nt, Homo Sapiens
aggccaagauaaaauuuugacagcucuuuaag

SEQ ID NO: 84973 - RNA, 32 nt, Homo Sapiens
gcggugcaagcggccgggagggcgcggccgga

SEQ ID NO: 84974 - RNA, 32 nt, Homo Sapiens
gaagagacagcuuuuagaggggcagagaauua

SEQ ID NO: 84975 - RNA, 32 nt, Homo Sapiens
agcaagaugcaaacuaaugagauguauuaaaa

SEQ ID NO: 84976 - RNA, 32 nt, Homo Sapiens
cucaauguucuuuuccaacacaucuauauaua

SEQ ID NO: 84977 - RNA, 32 nt, Homo Sapiens
uucaagugacagcuauagccugucccaggggc

SEQ ID NO: 84978 - RNA, 32 nt, Homo Sapiens
gugugggccggaggcugccugcaccgcgucag

SEQ ID NO: 84979 - RNA, 32 nt, Homo Sapiens
uuuugaccaaauaguuauuuucuauguuggac

SEQ ID NO: 84980 - RNA, 32 nt, Homo Sapiens
cuggcuacguggcuaccaaaugccuaagggag

SEQ ID NO: 84981 - RNA, 32 nt, Homo Sapiens
uuaugacaaaaauuggguggaggggauaacuu

SEQ ID NO: 84982 - RNA, 32 nt, Homo Sapiens
cguucccacucucugcaauauggaucaggcag

SEQ ID NO: 84983 - RNA, 32 nt, Homo Sapiens
uuuuuagaaacugcaugguaacuauuauauag

SEQ ID NO: 84984 - RNA, 32 nt, Homo Sapiens
uuugcaauccgaaagaauagacugugaaauga

SEQ ID NO: 84985 - RNA, 32 nt, Homo Sapiens
aagaggcccugaugcuggucuuuccagagcuu

SEQ ID NO: 84986 - RNA, 32 nt, Homo Sapiens
uggggauggugagaauggagguucuagaaggg

SEQ ID NO: 84987 - RNA, 32 nt, Homo Sapiens
uauaccccaugauaccuauuaaaggaaaacca

SEQ ID NO: 84988 - RNA, 32 nt, Homo Sapiens
cucaggccccuacacuguggcagauaaggccc

SEQ ID NO: 84989 - RNA, 32 nt, Homo Sapiens
gcccggcgccccagccucuacccgugcccgcc

SEQ ID NO: 84990 - RNA, 32 nt, Homo Sapiens
gauggauuacagugacuacuguguugcacugg

SEQ ID NO: 84991 - RNA, 32 nt, Homo Sapiens
ccaccuuucccuggggacccuaacaggcccag

SEQ ID NO: 84992 - RNA, 32 nt, Homo Sapiens
gauuagaguguuucuuaauucauuucaaacuc

SEQ ID NO: 84993 - RNA, 32 nt, Homo Sapiens
gccugacugggagugacacaguucuugaccug

SEQ ID NO: 84994 - RNA, 32 nt, Homo Sapiens
ugccgcugcaucgcucucucccgggaaagaac

SEQ ID NO: 84995 - RNA, 32 nt, Homo Sapiens
cuccuaucuucugaauucuauagugccugggu

SEQ ID NO: 84996 - RNA, 32 nt, Homo Sapiens
ucuaacaugaauuuagauaugccaagaaagcc

SEQ ID NO: 84997 - RNA, 32 nt, Homo Sapiens
uggccucagggccacggcaucuucucccgaga

SEQ ID NO: 84998 - RNA, 32 nt, Homo Sapiens
cuucuguaacauaggcagcugcacugcgcguu

SEQ ID NO: 84999 - RNA, 32 nt, Homo Sapiens
ggcuuacaggcaacaagcggccaggcaggguc

SEQ ID NO: 85000 - RNA, 32 nt, Homo Sapiens
aauaagggccucuggauucucggaaaagaaaa

SEQ ID NO: 85001 - RNA, 32 nt, Homo Sapiens
ugggcccugccagcaucucuggcucggcuuuc

SEQ ID NO: 85002 - RNA, 32 nt, Homo Sapiens
caccucauuuuuccauggacaaaaguauucuu

SEQ ID NO: 85003 - RNA, 32 nt, Homo Sapiens
caccuguggggaaagagaaggggcagcuuccg

SEQ ID NO: 85004 - RNA, 32 nt, Homo Sapiens
auuuccccugcucacucuuccacagauauaaa

SEQ ID NO: 85005 - RNA, 32 nt, Homo Sapiens
ugccaagccaaggaguggaugccuccagucau

SEQ ID NO: 85006 - RNA, 32 nt, Homo Sapiens
cuacccaagcuguuacucccucauggggcgcc

SEQ ID NO: 85007 - RNA, 32 nt, Homo Sapiens
ccugcagcggaggagcucugucuuccccuuca

SEQ ID NO: 85008 - RNA, 32 nt, Homo Sapiens
uguacuuuuuugcugaauuuagcuucuuguag

SEQ ID NO: 85009 - RNA, 32 nt, Homo Sapiens
ugagcaucuacuguauaucaugugcugagaua

SEQ ID NO: 85010 - RNA, 32 nt, Homo Sapiens
auacuugguguugguuguguuuuuugguuccu

SEQ ID NO: 85011 - RNA, 32 nt, Homo Sapiens
ggaggagguaguauuugagaagagacuuaaau

SEQ ID NO: 85012 - RNA, 32 nt, Homo Sapiens
cuugcuuuaagaucuuuuuuuaaaaaaugacu

SEQ ID NO: 85013 - RNA, 32 nt, Homo Sapiens
caaccaaaucaucuggaugcaagucaagcuau

SEQ ID NO: 85014 - RNA, 32 nt, Homo Sapiens
agggugugugucagcucugucugucugggugc

SEQ ID NO: 85015 - RNA, 32 nt, Homo Sapiens
aaaguacuaggauucuuaagauggcgagaccc

SEQ ID NO: 85016 - RNA, 32 nt, Homo Sapiens
cugggggaggcaccccacagacucagcgccgc

SEQ ID NO: 85017 - RNA, 32 nt, Homo Sapiens
auguaugguuguccuuuuuuuuuguuuuuuuu

SEQ ID NO: 85018 - RNA, 32 nt, Homo Sapiens
cucguuggaggcgaauggucggaccccgagug

SEQ ID NO: 85019 - RNA, 32 nt, Homo Sapiens
gucucucccucccccagagccccucaugccac

SEQ ID NO: 85020 - RNA, 32 nt, Homo Sapiens
aggacccaggcccacacccagcccuucugccu

SEQ ID NO: 85021 - RNA, 32 nt, Homo Sapiens
accauucugauccaguucaccaguagguugga

SEQ ID NO: 85022 - RNA, 32 nt, Homo Sapiens
ccugcucguccuggcuugggccccagggagcc

SEQ ID NO: 85023 - RNA, 32 nt, Homo Sapiens
cugccgcaggauauguuuugguaaauguagac

SEQ ID NO: 85024 - RNA, 32 nt, Homo Sapiens
gucuagauucagaguauggauuuuugguaaga

SEQ ID NO: 85025 - RNA, 32 nt, Homo Sapiens
agagugagauuugacuugauaauuauguuucu

SEQ ID NO: 85026 - RNA, 32 nt, Homo Sapiens
accuucauccccacccaguggggccccugauc

SEQ ID NO: 85027 - RNA, 32 nt, Homo Sapiens
ccacaccccgucugccccuugaccccaccaca

SEQ ID NO: 85028 - RNA, 32 nt, Homo Sapiens
ucacgcggcgggucccaccucccacucuguca

SEQ ID NO: 85029 - RNA, 32 nt, Homo Sapiens
agccuccgcaggucgcugaucagggccaggcg

SEQ ID NO: 85030 - RNA, 32 nt, Homo Sapiens
auuaaauguucggcccggcgcggugccucaug

SEQ ID NO: 85031 - RNA, 32 nt, Homo Sapiens
aguugaagaguuuggaacuuguccuugugccu

SEQ ID NO: 85032 - RNA, 32 nt, Homo Sapiens
uuaaugucuaggauaauuuuuaaaagaggaaa

SEQ ID NO: 85033 - RNA, 32 nt, Homo Sapiens
uauguuacuuuuuaaaaaaugauguuugaagu

SEQ ID NO: 85034 - RNA, 32 nt, Homo Sapiens
uuuuguuguaaauuuuuaguuuuaaugaaagc

SEQ ID NO: 85035 - RNA, 32 nt, Homo Sapiens
auuggaaagcuucaaacagagaauuagauugu

SEQ ID NO: 85036 - RNA, 32 nt, Homo Sapiens
cacuggaccuuuggguucuuucuggggggaua

SEQ ID NO: 85037 - RNA, 32 nt, Homo Sapiens
uuggagcauccaccagguucgcguacaggaga

SEQ ID NO: 85038 - RNA, 32 nt, Homo Sapiens
aagccgcgcuguuuccuccuucccccucuauc

SEQ ID NO: 85039 - RNA, 32 nt, Homo Sapiens
agugccagaacacuuaggagggugucuuugga

SEQ ID NO: 85040 - RNA, 32 nt, Homo Sapiens
gccuucccaaccccgccccucacccuguugcc

SEQ ID NO: 85041 - RNA, 32 nt, Homo Sapiens
cacaggagggauccuuggcugaggauuguauu

SEQ ID NO: 85042 - RNA, 32 nt, Homo Sapiens
augaagagacuuucuucugugucacaugcaga

SEQ ID NO: 85043 - RNA, 32 nt, Homo Sapiens
cagugugccucugccccaugggcccgagagaa

SEQ ID NO: 85044 - RNA, 32 nt, Homo Sapiens
cccggggccuccucgugcugcagaugucgccu

SEQ ID NO: 85045 - RNA, 32 nt, Homo Sapiens
aggugacagcuauacugguccaacaucgccug

SEQ ID NO: 85046 - RNA, 32 nt, Homo Sapiens
accccccugggcccuccugcuuccggccgggg

SEQ ID NO: 85047 - RNA, 32 nt, Homo Sapiens
gucuaugugaccggcgggcccggagcagccgc

SEQ ID NO: 85048 - RNA, 32 nt, Homo Sapiens
gggucuccgugugcgccgcgggagggccgaag

SEQ ID NO: 85049 - RNA, 32 nt, Homo Sapiens
gaaauauauaucuauuauauauauauauuuuu

SEQ ID NO: 85050 - RNA, 32 nt, Homo Sapiens
guuucuguccccucagacaccguuacuguaag

SEQ ID NO: 85051 - RNA, 32 nt, Homo Sapiens
cagcugcgcgucgcagucccgacgcgagaagg

SEQ ID NO: 85052 - RNA, 29 nt, Homo Sapiens
cugcaugggcccggccucggccucacaga

SEQ ID NO: 85053 - RNA, 32 nt, Homo Sapiens
cccugggaaggcggguuucggcaccggugggc

SEQ ID NO: 85054 - RNA, 32 nt, Homo Sapiens
agacagggucgggcggggagggguguggagaa

SEQ ID NO: 85055 - RNA, 32 nt, Homo Sapiens
aacagcugguccuccacuuugcugguucagcc

SEQ ID NO: 85056 - RNA, 32 nt, Homo Sapiens
cugccuagugccagcucugauuccagcaagua

SEQ ID NO: 85057 - RNA, 32 nt, Homo Sapiens
caguaucggcccggcgcagccgcggcgggcga

SEQ ID NO: 85058 - RNA, 32 nt, Homo Sapiens
ccuggaugccccagcgcccucccuguccaguu

SEQ ID NO: 85059 - RNA, 32 nt, Homo Sapiens
ugcuauguguuaauauuucacuugcuuguauu

SEQ ID NO: 85060 - RNA, 32 nt, Homo Sapiens
gccggcgucuuccaguucuccuccaagcacaa

SEQ ID NO: 85061 - RNA, 32 nt, Homo Sapiens
cgccaagugcacccgcuuugaggugcagagcg

SEQ ID NO: 85062 - RNA, 32 nt, Homo Sapiens
gaggggauauuguggugaacaugacaggcauu

SEQ ID NO: 85063 - RNA, 32 nt, Homo Sapiens
aaggaggagggaacagcguggagcaauucauc

SEQ ID NO: 85064 - RNA, 32 nt, Homo Sapiens
cccagcgcguccuuggaaaucuguggcccugg

SEQ ID NO: 85065 - RNA, 32 nt, Homo Sapiens
aagauccaucaauggcaaaaccaucuguaguc

SEQ ID NO: 85066 - RNA, 32 nt, Homo Sapiens
agccugaccaacauggcaaaaccccgucugua

SEQ ID NO: 85067 - RNA, 32 nt, Homo Sapiens
cucucaggggagaccaugguggccccggccgc

SEQ ID NO: 85068 - RNA, 32 nt, Homo Sapiens
cuccaggcuguuucuuuuuuuaugacuguaaa

SEQ ID NO: 85069 - RNA, 32 nt, Homo Sapiens
guugccuguuagggcugaagaauagaauuggc

SEQ ID NO: 85070 - RNA, 32 nt, Homo Sapiens
ccgggaggggagacgccgcggggccgugaccu

SEQ ID NO: 85071 - RNA, 32 nt, Homo Sapiens
caggggauucuaugaaccccgaauuuagaaac

SEQ ID NO: 85072 - RNA, 32 nt, Homo Sapiens
uauuaaucauguuauuugauccuuucauuuac

SEQ ID NO: 85073 - RNA, 32 nt, Homo Sapiens
cacacagacacacagacacacacacacacacc

SEQ ID NO: 85074 - RNA, 32 nt, Homo Sapiens
cacacacacacacacacacacacacacacacc

SEQ ID NO: 85075 - RNA, 32 nt, Homo Sapiens
ugcgugucugugcgugugcgcgcgugugugca

SEQ ID NO: 85076 - RNA, 32 nt, Homo Sapiens
cacugcaacuucugccucccggguucaagcga

SEQ ID NO: 85077 - RNA, 32 nt, Homo Sapiens
aauuauugacacauuucuuuuuuacuuagaga

SEQ ID NO: 85078 - RNA, 32 nt, Homo Sapiens
uacggcgccugugauccguccaggaggacaaa

SEQ ID NO: 85079 - RNA, 32 nt, Homo Sapiens
ccugcgucuggggcuccagucgcugcucuugc

SEQ ID NO: 85080 - RNA, 32 nt, Homo Sapiens
cugugugcaacuuuuuuauuucauuuaguguu

SEQ ID NO: 85081 - RNA, 32 nt, Homo Sapiens
agucaugacacuaucaaugccucuggguaggu

SEQ ID NO: 85082 - RNA, 32 nt, Homo Sapiens
accgacccauucuccuucugcuucucuugccc

SEQ ID NO: 85083 - RNA, 32 nt, Homo Sapiens
cgcccgucugggggauggagggggguggcauu

SEQ ID NO: 85084 - RNA, 32 nt, Homo Sapiens
ccaucuuacccaugccguggacaccccgcccc

SEQ ID NO: 85085 - RNA, 30 nt, Homo Sapiens
ugaaagaaaaagaaucugaauucuauaucc

SEQ ID NO: 85086 - RNA, 32 nt, Homo Sapiens
ccaaaggauauguuuggauauuuugauacuga

SEQ ID NO: 85087 - RNA, 32 nt, Homo Sapiens
caugugagaauauuuuucccaggacuagagca

SEQ ID NO: 85088 - RNA, 32 nt, Homo Sapiens
auuucaacaacaaauaucuucauagaagucac

SEQ ID NO: 85089 - RNA, 32 nt, Homo Sapiens
ucccuagauugcuuccugaggaggcuggcacu

SEQ ID NO: 85090 - RNA, 32 nt, Homo Sapiens
gacaggaagauggguuugauugagguccuggu

SEQ ID NO: 85091 - RNA, 32 nt, Homo Sapiens
acuugaaguauuuucauguuuuauuuuaaauu

SEQ ID NO: 85092 - RNA, 32 nt, Homo Sapiens
ggccuuuauuuuuccucauuucucaugggcaa

SEQ ID NO: 85093 - RNA, 32 nt, Homo Sapiens
auuucccuuguacagaacuuuuacauuuuuga

SEQ ID NO: 85094 - RNA, 32 nt, Homo Sapiens
cccaaggcaucugcagggaacuuuggcagcuu

SEQ ID NO: 85095 - RNA, 32 nt, Homo Sapiens
gacuacucauuuccaagaggggagaaaaagug

SEQ ID NO: 85096 - RNA, 32 nt, Homo Sapiens
aucauauguucacauuugauaaguauaugcca

SEQ ID NO: 85097 - RNA, 32 nt, Homo Sapiens
ugguaugcaauaagaucaauaaauacuugugg

SEQ ID NO: 85098 - RNA, 32 nt, Homo Sapiens
ugagaauucccagggcagaaauccuuccugcu

SEQ ID NO: 85099 - RNA, 32 nt, Homo Sapiens
guucugugcacaaaacccagaccuguuagcag

SEQ ID NO: 85100 - RNA, 32 nt, Homo Sapiens
aacagcaguaaauaaugaggaaaaugaauuag

SEQ ID NO: 85101 - RNA, 32 nt, Homo Sapiens
uacaggcgcgugccaccacaccuggcuaauuu

SEQ ID NO: 85102 - RNA, 32 nt, Homo Sapiens
ccagagucuugcuccggccgcggccagcggag

SEQ ID NO: 85103 - RNA, 32 nt, Homo Sapiens
gagccuuuaagugacuaaggaacaacauagau

SEQ ID NO: 85104 - RNA, 32 nt, Homo Sapiens
cagucuugucuccucuccucaggccccuggac

SEQ ID NO: 85105 - RNA, 32 nt, Homo Sapiens
cuugcaccaaagggaggucgggaucucgguuu

SEQ ID NO: 85106 - RNA, 32 nt, Homo Sapiens
auauuuucauuuuuuucuugaauuuuauaucc

SEQ ID NO: 85107 - RNA, 32 nt, Homo Sapiens
caacuucugcacccucuguccagagucuaggg

SEQ ID NO: 85108 - RNA, 32 nt, Homo Sapiens
guggauaaauuggaauuuuuuauguugucucu

SEQ ID NO: 85109 - RNA, 32 nt, Homo Sapiens
agauggaggcacauucuagaaacgcuugaaac

SEQ ID NO: 85110 - RNA, 32 nt, Homo Sapiens
acugugaacuaaccaaaccaaaaccaacccca

SEQ ID NO: 85111 - RNA, 32 nt, Homo Sapiens
aaagucuuaaucgcaaguaacaacaaacuugg

SEQ ID NO: 85112 - RNA, 32 nt, Homo Sapiens
ugaucaugaugaugaugauuuuaacaguuuua

SEQ ID NO: 85113 - RNA, 32 nt, Homo Sapiens
uaugcagguguuucauugugaacucuagcuuu

SEQ ID NO: 85114 - RNA, 32 nt, Homo Sapiens
acuccuacgcccacucccaugcuugggagaau

SEQ ID NO: 85115 - RNA, 32 nt, Homo Sapiens
cucugcccugccucagccgccucccccacgcu

SEQ ID NO: 85116 - RNA, 32 nt, Homo Sapiens
gaggccagguuguuuuucaucauucagaacau

SEQ ID NO: 85117 - RNA, 32 nt, Homo Sapiens
uuucuagagaauaggagcuuuuguucugaagg

SEQ ID NO: 85118 - RNA, 32 nt, Homo Sapiens
cagggacuguggcucguggcggugcucccucc

SEQ ID NO: 85119 - RNA, 32 nt, Homo Sapiens
ugggaaugcagaaaacguacuccaugaucugc

SEQ ID NO: 85120 - RNA, 32 nt, Homo Sapiens
cacaugaaaaauacucaacauuauuauucauu

SEQ ID NO: 85121 - RNA, 32 nt, Homo Sapiens
gacccacuucuccaggcuuaugcugacagggg

SEQ ID NO: 85122 - RNA, 32 nt, Homo Sapiens
aacuuagaaaccggauguuauucauagauucc

SEQ ID NO: 85123 - RNA, 32 nt, Homo Sapiens
aagggaugaugauucuagacuucugccacaac

SEQ ID NO: 85124 - RNA, 32 nt, Homo Sapiens
aagagggggauggggcgggcgaggggugcaca

SEQ ID NO: 85125 - RNA, 32 nt, Homo Sapiens
uguuucucaguguauguaaaauuuauauuuug

SEQ ID NO: 85126 - RNA, 32 nt, Homo Sapiens
gccagcaucaucucuuuggggaccacuccucu

SEQ ID NO: 85127 - RNA, 32 nt, Homo Sapiens
caaguagcugggacuauagucacuugccacca

SEQ ID NO: 85128 - RNA, 32 nt, Homo Sapiens
ggcucaugguggggcuggggccccagaggugg

SEQ ID NO: 85129 - RNA, 32 nt, Homo Sapiens
ccagucaccaaagccaccuacaugacagucca

SEQ ID NO: 85130 - RNA, 32 nt, Homo Sapiens
gaaugaccuuggcgcuggcuucaggaauaugc

SEQ ID NO: 85131 - RNA, 32 nt, Homo Sapiens
ucuuguuuacacagcugcaucagacaaugcca

SEQ ID NO: 85132 - RNA, 32 nt, Homo Sapiens
cugguucauucugaaaacaacaacaacaaaag

SEQ ID NO: 85133 - RNA, 32 nt, Homo Sapiens
guggaucccgcacgcacaaucgugccccgcga

SEQ ID NO: 85134 - RNA, 32 nt, Homo Sapiens
ccccucccauccccauucccaaagucagaaag

SEQ ID NO: 85135 - RNA, 32 nt, Homo Sapiens
cugucccugccagcaccuggagcaccaacuac

SEQ ID NO: 85136 - RNA, 32 nt, Homo Sapiens
cuguaagaacuaaugauaauccaccacccuuu

SEQ ID NO: 85137 - RNA, 32 nt, Homo Sapiens
gacugacacccagugggaccaguguugccaca

SEQ ID NO: 85138 - RNA, 32 nt, Homo Sapiens
acuccuggcuucuccuugucccuccugcagcc

SEQ ID NO: 85139 - RNA, 32 nt, Homo Sapiens
uagauguuugacuuuaaagaugauuguucuuu

SEQ ID NO: 85140 - RNA, 32 nt, Homo Sapiens
gaggugggcuagcacugaaacugcuuuucaag

SEQ ID NO: 85141 - RNA, 32 nt, Homo Sapiens
ggguuucacgaguguuccugugcuuauauuca

SEQ ID NO: 85142 - RNA, 32 nt, Homo Sapiens
gaagguuaucagaccauucaauaaaaguuaac

SEQ ID NO: 85143 - RNA, 32 nt, Homo Sapiens
agcaggcgcgucgggacgccccgaggcauccu

SEQ ID NO: 85144 - RNA, 32 nt, Homo Sapiens
cuuaaggagugccaaagaagacuuuggaaucu

SEQ ID NO: 85145 - RNA, 32 nt, Homo Sapiens
uccugguccaaucuccgaucuguuuaguaaga

SEQ ID NO: 85146 - RNA, 32 nt, Homo Sapiens
guggucccugucauucacucgggugcgugugu

SEQ ID NO: 85147 - RNA, 31 nt, Homo Sapiens
uagaacgaucacugccuuaccccugcugcug

SEQ ID NO: 85148 - RNA, 32 nt, Homo Sapiens
ccccagcauuuccugaguuauaaggccacagg

SEQ ID NO: 85149 - RNA, 29 nt, Homo Sapiens
uugucauaaaguuguuauagauuuuuuaa

SEQ ID NO: 85150 - RNA, 32 nt, Homo Sapiens
guucauugaagcuuugugaaaacuacugaugu

SEQ ID NO: 85151 - RNA, 32 nt, Homo Sapiens
cucaguguucuggcccucuccucucuugaaag

SEQ ID NO: 85152 - RNA, 32 nt, Homo Sapiens
ccguguaccugauauauauacaauuaaaauau

SEQ ID NO: 85153 - RNA, 32 nt, Homo Sapiens
gguuuguuuacuauuuuauugguaaauuaaca

SEQ ID NO: 85154 - RNA, 32 nt, Homo Sapiens
uaguugaagaucuggaacaagagcuuagugag

SEQ ID NO: 85155 - RNA, 32 nt, Homo Sapiens
caaagccacaagauggaaagugcuuggguucu

SEQ ID NO: 85156 - RNA, 26 nt, Homo Sapiens
caugcgucuuucugcccugcuggccu

SEQ ID NO: 85157 - RNA, 32 nt, Homo Sapiens
ccuuccacuccagcacuagcucucuuugaaga

SEQ ID NO: 85158 - RNA, 32 nt, Homo Sapiens
uauuuuuauuuuugagauggaguuucacucuu

SEQ ID NO: 85159 - RNA, 32 nt, Homo Sapiens
agcguauuuuuccagcuuacauuaacccuguu

SEQ ID NO: 85160 - RNA, 32 nt, Homo Sapiens
uaauggggguagagcugguaacuguuggauca

SEQ ID NO: 85161 - RNA, 32 nt, Homo Sapiens
uuuuccagccaucaaauaaggaaggauuuggg

SEQ ID NO: 85162 - RNA, 32 nt, Homo Sapiens
ugucacccaggcuggaaugcaguggcgugauc

SEQ ID NO: 85163 - RNA, 32 nt, Homo Sapiens
cgccuccccucaccgacuuuggccuuuuuagc

SEQ ID NO: 85164 - RNA, 32 nt, Homo Sapiens
cacacuugucuuccccauguucauagcugccu

SEQ ID NO: 85165 - RNA, 32 nt, Homo Sapiens
uuaucuguugcaacugaaaacaaaaucuggaa

SEQ ID NO: 85166 - RNA, 32 nt, Homo Sapiens
ggcgcugucccuaaaauggcgaacauguguuu

SEQ ID NO: 85167 - RNA, 32 nt, Homo Sapiens
ugcagagugaagcucuuguugcugaacaauaa

SEQ ID NO: 85168 - RNA, 32 nt, Homo Sapiens
uguucuggggacgugucugcuugcccaugguu

SEQ ID NO: 85169 - RNA, 32 nt, Homo Sapiens
ucuuacauaauuacucuuucugaagaucugug

SEQ ID NO: 85170 - RNA, 32 nt, Homo Sapiens
aauucaugauucaacugcaucuccaaacauua

SEQ ID NO: 85171 - RNA, 32 nt, Homo Sapiens
aucuaugcauuaccuuaaugucucuguguggu

SEQ ID NO: 85172 - RNA, 32 nt, Homo Sapiens
uuagguuuuuaaaugcugugggugguaugauu

SEQ ID NO: 85173 - RNA, 32 nt, Homo Sapiens
ugaucugcucuuucuucaugauacuuagucug

SEQ ID NO: 85174 - RNA, 32 nt, Homo Sapiens
auauuugcuguaaagagaauuauaagaguuuu

SEQ ID NO: 85175 - RNA, 32 nt, Homo Sapiens
ccuguggaggggcugcugugggcccugaccuc

SEQ ID NO: 85176 - RNA, 32 nt, Homo Sapiens
uuuuauauagucauuguuuauuucauggaaac

SEQ ID NO: 85177 - RNA, 32 nt, Homo Sapiens
aaaaaaaaaaaaaaaugagagaauuagggaaa

SEQ ID NO: 85178 - RNA, 32 nt, Homo Sapiens
cacacacaggcacagaugcacacacacgcaga

SEQ ID NO: 85179 - RNA, 32 nt, Homo Sapiens
ggacuaaaggacuuaaagacaugcaggugucu

SEQ ID NO: 85180 - RNA, 32 nt, Homo Sapiens
agcuuuuugcaguaugguggguugguuuuggu

SEQ ID NO: 85181 - RNA, 32 nt, Homo Sapiens
cagcggcagccggggguccggagcggcuggag

SEQ ID NO: 85182 - RNA, 32 nt, Homo Sapiens
gaguauuucccucacaggauccugcucagccc

SEQ ID NO: 85183 - RNA, 32 nt, Homo Sapiens
uaaaauagacauuuguggggcucacacaauau

SEQ ID NO: 85184 - RNA, 32 nt, Homo Sapiens
cggcagacaggugacaccuggauaccaaaugc

SEQ ID NO: 85185 - RNA, 32 nt, Homo Sapiens
agcaaucuccuccuccacugccacuacaggga

SEQ ID NO: 85186 - RNA, 32 nt, Homo Sapiens
ucuccauagaauguaauuuauagaugcgugua

SEQ ID NO: 85187 - RNA, 32 nt, Homo Sapiens
accuauauuucuguuaauaaucacauuaauua

SEQ ID NO: 85188 - RNA, 32 nt, Homo Sapiens
auauguuuucaccaccauauaagauuuugguu

SEQ ID NO: 85189 - RNA, 32 nt, Homo Sapiens
cuagcguccucuuuuuuggugcugcugguuuc

SEQ ID NO: 85190 - RNA, 32 nt, Homo Sapiens
acuauuugcccauucuuuuucucugcagugca

SEQ ID NO: 85191 - RNA, 32 nt, Homo Sapiens
uucuucuaugucugugugucugugauagaucu

SEQ ID NO: 85192 - RNA, 32 nt, Homo Sapiens
ggacgaaguucucggacagagaacaagugcgc

SEQ ID NO: 85193 - RNA, 32 nt, Homo Sapiens
cgauuccuggccagugccaucucagccggagc

SEQ ID NO: 85194 - RNA, 32 nt, Homo Sapiens
gaaauacuguuuaaugaaacuccacggccaua

SEQ ID NO: 85195 - RNA, 32 nt, Homo Sapiens
aucuguuacuauauagugauaaaccaucugcu

SEQ ID NO: 85196 - RNA, 32 nt, Homo Sapiens
ugacccuccgcccuuccccuucaagcauuuuc

SEQ ID NO: 85197 - RNA, 32 nt, Homo Sapiens
cugcucuaauguauagugggagugguugugua

SEQ ID NO: 85198 - RNA, 32 nt, Homo Sapiens
caggaggacaggagaggccgguccuggccagg

SEQ ID NO: 85199 - RNA, 32 nt, Homo Sapiens
cagggcagucacagcugcuuggggcccacagc

SEQ ID NO: 85200 - RNA, 32 nt, Homo Sapiens
gggagagggcaggacaggggcugggcgagcag

SEQ ID NO: 85201 - RNA, 32 nt, Homo Sapiens
cauuucggcucacugcaacuucugccucccgg

SEQ ID NO: 85202 - RNA, 32 nt, Homo Sapiens
guagagcuugacccaagaacuacuccacauuc

SEQ ID NO: 85203 - RNA, 32 nt, Homo Sapiens
ggcacgaggcccuggccuucgcgcaucuccca

SEQ ID NO: 85204 - RNA, 29 nt, Homo Sapiens
cgcgaugaugccgaugauauuaacuguuu

SEQ ID NO: 85205 - RNA, 32 nt, Homo Sapiens
agaaaagauuuaagcaccuugucaagcugggu

SEQ ID NO: 85206 - RNA, 32 nt, Homo Sapiens
uccuugauuaacuucugaguacucaaucaauc

SEQ ID NO: 85207 - RNA, 32 nt, Homo Sapiens
augcuucacugaaagcaaaaccauuauaauua

SEQ ID NO: 85208 - RNA, 32 nt, Homo Sapiens
guauacguguuaucaauaauaagauuuugcaa

SEQ ID NO: 85209 - RNA, 32 nt, Homo Sapiens
aaagcuugaaaacacugacagaugaagugcaa

SEQ ID NO: 85210 - RNA, 32 nt, Homo Sapiens
auguaauugcaaauguuagauacauuugaagu

SEQ ID NO: 85211 - RNA, 32 nt, Homo Sapiens
accugugaacguggguccuuucuggggaguga

SEQ ID NO: 85212 - RNA, 32 nt, Homo Sapiens
uaaaaaauaaaauaaaauaauaauaauguaug

SEQ ID NO: 85213 - RNA, 32 nt, Homo Sapiens
cccggggggcccugggucggggcggaucagcu

SEQ ID NO: 85214 - RNA, 31 nt, Homo Sapiens
agaaugcugcccggccugcccugcugggcgg

SEQ ID NO: 85215 - RNA, 32 nt, Homo Sapiens
ggcugcgcaccucuuucccucagccaggucac

SEQ ID NO: 85216 - RNA, 29 nt, Homo Sapiens
caaagggagaagauucgggcucuggagcc

SEQ ID NO: 85217 - RNA, 32 nt, Homo Sapiens
gagcacacauucagucugguauuaguaacuuc

SEQ ID NO: 85218 - RNA, 30 nt, Homo Sapiens
ggaagagggggcgaucgcggcggagcuggc

SEQ ID NO: 85219 - RNA, 32 nt, Homo Sapiens
auccacacuuccugccuaucacgguccggagg

SEQ ID NO: 85220 - RNA, 32 nt, Homo Sapiens
gacauuucaaccaucaacauaauauagugagg

SEQ ID NO: 85221 - RNA, 32 nt, Homo Sapiens
cacaguugugaaaauaaauggaaguugguuga

SEQ ID NO: 85222 - RNA, 32 nt, Homo Sapiens
caaaacacucauucuuuuuucuauuaagccau

SEQ ID NO: 85223 - RNA, 32 nt, Homo Sapiens
uuaacauaguuugugauauuucaguauagaag

SEQ ID NO: 85224 - RNA, 32 nt, Homo Sapiens
aagugguagcccaugguggggaggccacacuc

SEQ ID NO: 85225 - RNA, 32 nt, Homo Sapiens
aaagaaugaacaaaauuacuggaagcaguauu

SEQ ID NO: 85226 - RNA, 32 nt, Homo Sapiens
cccuuuucucaucauugggguuagcgggugca

SEQ ID NO: 85227 - RNA, 32 nt, Homo Sapiens
guuuauuacuguggcauaaucuagucuauuuu

SEQ ID NO: 85228 - RNA, 32 nt, Homo Sapiens
aaguacugcucuucuuuuuauggggaaauuga

SEQ ID NO: 85229 - RNA, 32 nt, Homo Sapiens
uuccagcuggaaccauggaguguguagaagag

SEQ ID NO: 85230 - RNA, 32 nt, Homo Sapiens
cugcugccugucccgcuuugcugccaaugcaa

SEQ ID NO: 85231 - RNA, 32 nt, Homo Sapiens
aacuuuuuguuuuuauuucuuuuagaaaaggc

SEQ ID NO: 85232 - RNA, 32 nt, Homo Sapiens
uaaacaguuuccacugaugauaugaagggccg

SEQ ID NO: 85233 - RNA, 32 nt, Homo Sapiens
uguguggucaaguggauaguuguacucuugca

SEQ ID NO: 85234 - RNA, 32 nt, Homo Sapiens
uuuuaaaacccauuuuagucauuuuaugacaa

SEQ ID NO: 85235 - RNA, 32 nt, Homo Sapiens
gaaccgucgggccgcagccgccggcaaugccg

SEQ ID NO: 85236 - RNA, 32 nt, Homo Sapiens
gaucccgccacgagcaggcacgagacagcucc

SEQ ID NO: 85237 - RNA, 32 nt, Homo Sapiens
gauauaguauuaaccacuguguucaagaguaa

SEQ ID NO: 85238 - RNA, 32 nt, Homo Sapiens
ugcuuuccaccgaguacuguguuuauucucuc

SEQ ID NO: 85239 - RNA, 32 nt, Homo Sapiens
gacccaucacaccccauuuccuccucuuuccc

SEQ ID NO: 85240 - RNA, 32 nt, Homo Sapiens
cccaaacugacccaucaggaauagcaugagcu

SEQ ID NO: 85241 - RNA, 31 nt, Homo Sapiens
cuggcagcugcccagaacccugcugaugagc

SEQ ID NO: 85242 - RNA, 30 nt, Homo Sapiens
ccuaaucuggacuuuugcaucuguauaaaa

SEQ ID NO: 85243 - RNA, 32 nt, Homo Sapiens
uaagagaucacaugucuguguagugugaaugc

SEQ ID NO: 85244 - RNA, 32 nt, Homo Sapiens
ugaggcucucuggggguggccagaauuugugg

SEQ ID NO: 85245 - RNA, 32 nt, Homo Sapiens
uaucagugucuccuccacccucagccuccagu

SEQ ID NO: 85246 - RNA, 32 nt, Homo Sapiens
aacugaaacacacaaacacacacacacacaca

SEQ ID NO: 85247 - RNA, 32 nt, Homo Sapiens
uugacuaaaagcuaugucuaugcaaccuucca

SEQ ID NO: 85248 - RNA, 32 nt, Homo Sapiens
ucucacacccucaagaggaguuagaaaagagg

SEQ ID NO: 85249 - RNA, 32 nt, Homo Sapiens
ugccgccugccaggccauccggcccccagacg

SEQ ID NO: 85250 - RNA, 32 nt, Homo Sapiens
uggguuuccagaaaacaucuccaaagcuauac

SEQ ID NO: 85251 - RNA, 32 nt, Homo Sapiens
agggcuggaaggugugcagagcccggagaggu

SEQ ID NO: 85252 - RNA, 28 nt, Homo Sapiens
aagcaaggaaauuaacauuauugaaaua

SEQ ID NO: 85253 - RNA, 32 nt, Homo Sapiens
gcuuuccaaaauuaaccuuuaaacuuaaaauu

SEQ ID NO: 85254 - RNA, 31 nt, Homo Sapiens
aaccccugaaaugcucucagagcaccucuga

SEQ ID NO: 85255 - RNA, 32 nt, Homo Sapiens
agggaaugaaguauaccaacuucuuugaaagc

SEQ ID NO: 85256 - RNA, 32 nt, Homo Sapiens
ggauuccagugauauucugcaaucaaagugau

SEQ ID NO: 85257 - RNA, 32 nt, Homo Sapiens
caucugaauggggcagauacuucuuucuuucu

SEQ ID NO: 85258 - RNA, 32 nt, Homo Sapiens
guguuaaaaaucagauaccuccuuuagugacc

SEQ ID NO: 85259 - RNA, 31 nt, Homo Sapiens
ucacuguugugcucugcauuucguguguuag

SEQ ID NO: 85260 - RNA, 32 nt, Homo Sapiens
ggggccgccggcuccgcccaaccagguggugc

SEQ ID NO: 85261 - RNA, 32 nt, Homo Sapiens
gccagagcaucuuuguauauugcaauauacuu

SEQ ID NO: 85262 - RNA, 31 nt, Homo Sapiens
ccuaagccagccuuccuuccccgcgcgggca

SEQ ID NO: 85263 - RNA, 32 nt, Homo Sapiens
ucaaugucuagaucucuaaaguuucauauaaa

SEQ ID NO: 85264 - RNA, 32 nt, Homo Sapiens
uuuuaaaaaugaaauuuuccaaugucugccac

SEQ ID NO: 85265 - RNA, 32 nt, Homo Sapiens
uuggggucuguagguaaugaacagucacacca

SEQ ID NO: 85266 - RNA, 32 nt, Homo Sapiens
agaacuuggcauuuucugauauagaaaaaggc

SEQ ID NO: 85267 - RNA, 32 nt, Homo Sapiens
guuugcgggugcgggcgggaccggauuucguc

SEQ ID NO: 85268 - RNA, 32 nt, Homo Sapiens
agcaaagaaaaaagccauggaguaugaagcac

SEQ ID NO: 85269 - RNA, 32 nt, Homo Sapiens
uccuaccccucgcccugccgucggggcgcggc

SEQ ID NO: 85270 - RNA, 32 nt, Homo Sapiens
accccggacccugucccugccgcggccccagc

SEQ ID NO: 85271 - RNA, 32 nt, Homo Sapiens
gagucugagguccugaaagaaagcagagcugc

SEQ ID NO: 85272 - RNA, 32 nt, Homo Sapiens
gugagugcccccaacuuucccacacauauucc

SEQ ID NO: 85273 - RNA, 32 nt, Homo Sapiens
cagcugcugugccugaugugggaacagcucuu

SEQ ID NO: 85274 - RNA, 32 nt, Homo Sapiens
uaaagucuauccugucccacuuccuacauucu

SEQ ID NO: 85275 - RNA, 32 nt, Homo Sapiens
aaggcucggaggugggccggugaggcaagcaa

SEQ ID NO: 85276 - RNA, 32 nt, Homo Sapiens
cuggucaggccccugcagcugccucacaccgc

SEQ ID NO: 85277 - RNA, 32 nt, Homo Sapiens
guacgugaacaaauaauaaaccguuguuguua

SEQ ID NO: 85278 - RNA, 32 nt, Homo Sapiens
acacgauguugucaaggaugguuuugggacua

SEQ ID NO: 85279 - RNA, 32 nt, Homo Sapiens
ggaauggaaaagcucugucucccuaacucaac

SEQ ID NO: 85280 - RNA, 32 nt, Homo Sapiens
cgacaucaaugaaaucuguacuguaugaaagc

SEQ ID NO: 85281 - RNA, 32 nt, Homo Sapiens
uuuuuuucuuuuucuuuuucuuuuuuuuuuua

SEQ ID NO: 85282 - RNA, 32 nt, Homo Sapiens
ggcuuguccccuccucuuuccccuccccaggc

SEQ ID NO: 85283 - RNA, 32 nt, Homo Sapiens
cgcagaggaauuuuuucuuuugauuuuguuua

SEQ ID NO: 85284 - RNA, 31 nt, Homo Sapiens
gaggagaaguuccagaaccauccccuuuuuc

SEQ ID NO: 85285 - RNA, 32 nt, Homo Sapiens
ucuagaauuugggcuuggaccagaucuaacau

SEQ ID NO: 85286 - RNA, 32 nt, Homo Sapiens
gggcugcguucgcuccagccgcggcucuacag

SEQ ID NO: 85287 - RNA, 32 nt, Homo Sapiens
caacuggaauccagauuuaaggugauaaaagc

SEQ ID NO: 85288 - RNA, 29 nt, Homo Sapiens
uauggauauauccaauauccaagucaccc

SEQ ID NO: 85289 - RNA, 32 nt, Homo Sapiens
aauuuccauagucacaguuagguagcuuuagg

SEQ ID NO: 85290 - RNA, 32 nt, Homo Sapiens
gcaguaaaauacaugauacaaggaacucaaaa

SEQ ID NO: 85291 - RNA, 32 nt, Homo Sapiens
gccaaguccucauuuuccaugucgucuuuccu

SEQ ID NO: 85292 - RNA, 32 nt, Homo Sapiens
caccuccacaugcuccgccuccaggucccgcu

SEQ ID NO: 85293 - RNA, 32 nt, Homo Sapiens
cagucuucaacucccgggucagauccuguguc

SEQ ID NO: 85294 - RNA, 32 nt, Homo Sapiens
cagguuccuugccaacccuccuccccugccca

SEQ ID NO: 85295 - RNA, 32 nt, Homo Sapiens
gccaucacccucacccaagugaugugguggug

SEQ ID NO: 85296 - RNA, 32 nt, Homo Sapiens
ccucagcuugaaacaccugcugcuucgcggcg

SEQ ID NO: 85297 - RNA, 32 nt, Homo Sapiens
ucucagacaaacaggauuuaugcuggagcucu

SEQ ID NO: 85298 - RNA, 32 nt, Homo Sapiens
ggccuucguccuccgcgggugugcuagcguug

SEQ ID NO: 85299 - RNA, 32 nt, Homo Sapiens
cucauuuuacacaaagggaagucgggcauggu

SEQ ID NO: 85300 - RNA, 32 nt, Homo Sapiens
cggaacccucgcuguggcucccccgcucggcc

SEQ ID NO: 85301 - RNA, 32 nt, Homo Sapiens
cagccucugcccggcuccguacuccggccccg

SEQ ID NO: 85302 - RNA, 32 nt, Homo Sapiens
aaaagaacccucaauugaugaaaggcagggag

SEQ ID NO: 85303 - RNA, 32 nt, Homo Sapiens
gcucacuuuccacccucucuccaccugccucu

SEQ ID NO: 85304 - RNA, 32 nt, Homo Sapiens
guggaaugagagacaccuuugaggaaauacau

SEQ ID NO: 85305 - RNA, 32 nt, Homo Sapiens
aaggaagguggcgaaggcagugagugcucugc

SEQ ID NO: 85306 - RNA, 32 nt, Homo Sapiens
auugggauagaguauugaagacacuggguuua

SEQ ID NO: 85307 - RNA, 32 nt, Homo Sapiens
aaauuaccauauuguuuuuuuaucuuauacuu

SEQ ID NO: 85308 - RNA, 32 nt, Homo Sapiens
ugggcccucagugaaugaccgcccagagcuuu

SEQ ID NO: 85309 - RNA, 32 nt, Homo Sapiens
uucuuccuccaagaucucagucucucagugcu

SEQ ID NO: 85310 - RNA, 32 nt, Homo Sapiens
uuaauuauuuauauuuccuguauugcuuuagu

SEQ ID NO: 85311 - RNA, 32 nt, Homo Sapiens
ggcugagaggauucgagguggcugggaggguu

SEQ ID NO: 85312 - RNA, 32 nt, Homo Sapiens
ccuccgccugcagcugcgggacgacgcgcccc

SEQ ID NO: 85313 - RNA, 32 nt, Homo Sapiens
uuccuuaauguuuuaaaccuuuuacuguguuu

SEQ ID NO: 85314 - RNA, 32 nt, Homo Sapiens
uggaaagggaaacauaguaacuuuacagggga

SEQ ID NO: 85315 - RNA, 29 nt, Homo Sapiens
aucacucauuguuugugaaagcugagcuc

SEQ ID NO: 85316 - RNA, 32 nt, Homo Sapiens
ucucguccccgccggaucugcacugccaacug

SEQ ID NO: 85317 - RNA, 32 nt, Homo Sapiens
accucaccauacucaguuauuccacuauaagc

SEQ ID NO: 85318 - RNA, 32 nt, Homo Sapiens
auccuugcugauaaauauaaccaucaauaaag

SEQ ID NO: 85319 - RNA, 32 nt, Homo Sapiens
agacuucauuggguuuuauacuggcuuucuuu

SEQ ID NO: 85320 - RNA, 29 nt, Homo Sapiens
auuggcucauaugauuacggaggcugaga

SEQ ID NO: 85321 - RNA, 32 nt, Homo Sapiens
cauguuaaauuauuuuaaccgucgugaauaca

SEQ ID NO: 85322 - RNA, 32 nt, Homo Sapiens
cuauguaugagacauuguugugaauguuuuac

SEQ ID NO: 85323 - RNA, 32 nt, Homo Sapiens
ccacuaagccccaccagaaagcaugcuuggcc

SEQ ID NO: 85324 - RNA, 32 nt, Homo Sapiens
ccccaggugcugccccuucucuccuguuccuc

SEQ ID NO: 85325 - RNA, 32 nt, Homo Sapiens
ccuugcccuguuccccaccucccggcuccagu

SEQ ID NO: 85326 - RNA, 32 nt, Homo Sapiens
ucagccucagccccuggcccagccccagcagg

SEQ ID NO: 85327 - RNA, 31 nt, Homo Sapiens
aagguucccugaggucccagagccuguuccg

SEQ ID NO: 85328 - RNA, 32 nt, Homo Sapiens
gcuuucgcuguguuggccaggcuggucuugaa

SEQ ID NO: 85329 - RNA, 32 nt, Homo Sapiens
ccgugguccucccauggaccaauacgcccuuu

SEQ ID NO: 85330 - RNA, 32 nt, Homo Sapiens
ccaagccuggccugggugugcuggauagcuuc

SEQ ID NO: 85331 - RNA, 32 nt, Homo Sapiens
ccuuucuagauggcuuagguggcaccauggcu

SEQ ID NO: 85332 - RNA, 32 nt, Homo Sapiens
caaaggcuaauguggaaguaaagaaugaggag

SEQ ID NO: 85333 - RNA, 32 nt, Homo Sapiens
acauggucucaguuaaucugguaaauggcauc

SEQ ID NO: 85334 - RNA, 32 nt, Homo Sapiens
gcggugagcaucaggcgaugcggcacgggugc

SEQ ID NO: 85335 - RNA, 32 nt, Homo Sapiens
ccccuuccgcugcauuccccggaccgggaucc

SEQ ID NO: 85336 - RNA, 31 nt, Homo Sapiens
ccccggagggcgggucugcggccgagccagc

SEQ ID NO: 85337 - RNA, 32 nt, Homo Sapiens
uuuacuuuaaccaaaucuacaugguuuaauau

SEQ ID NO: 85338 - RNA, 32 nt, Homo Sapiens
ggcgugcggaggcggcugaggaggcgggaagg

SEQ ID NO: 85339 - RNA, 32 nt, Homo Sapiens
agcacaauaaaguggaugccaaaccaucagac

SEQ ID NO: 85340 - RNA, 32 nt, Homo Sapiens
ucuuacuauccacagcaguauaugucugcuca

SEQ ID NO: 85341 - RNA, 32 nt, Homo Sapiens
aaaauaucaaggaaggcaacgaagacauaaga

SEQ ID NO: 85342 - RNA, 32 nt, Homo Sapiens
ccggcuaauguuuguauuuuuagcagagaugg

SEQ ID NO: 85343 - RNA, 32 nt, Homo Sapiens
uuuucugguccauauaaagaugaugcucuaac

SEQ ID NO: 85344 - RNA, 32 nt, Homo Sapiens
gugggggucugcgggcugggaacucucguccu

SEQ ID NO: 85345 - RNA, 32 nt, Homo Sapiens
gcccacugucuccccauccuuccaccuacuug

SEQ ID NO: 85346 - RNA, 32 nt, Homo Sapiens
gugagggcuugucauuaccagacgguucacca

SEQ ID NO: 85347 - RNA, 32 nt, Homo Sapiens
uuaccaaggcuuugauugggauguuauauuug

SEQ ID NO: 85348 - RNA, 32 nt, Homo Sapiens
agggagggcagagcucugcacacucaaaggcu

SEQ ID NO: 85349 - RNA, 32 nt, Homo Sapiens
ugagcgccgaggggcugcggaggcagugaccu

SEQ ID NO: 85350 - RNA, 32 nt, Homo Sapiens
uccagcccgaaaugcugccgccaggcagcaac

SEQ ID NO: 85351 - RNA, 32 nt, Homo Sapiens
gugcuugauggcaaccgggacaccugcggccc

SEQ ID NO: 85352 - RNA, 32 nt, Homo Sapiens
cugcaggggaagggcuggcugggguccccgaa

SEQ ID NO: 85353 - RNA, 32 nt, Homo Sapiens
cacuacacuccagccugggugacagagagaua

SEQ ID NO: 85354 - RNA, 32 nt, Homo Sapiens
acccucacagaaagucaucgaggcaaaaagag

SEQ ID NO: 85355 - RNA, 32 nt, Homo Sapiens
gggcaaucuguggauugggguggcuuucucuu

SEQ ID NO: 85356 - RNA, 32 nt, Homo Sapiens
aagucgggcuggccccgacagaacgaaaagaa

SEQ ID NO: 85357 - RNA, 32 nt, Homo Sapiens
ugaauaccaggauagcuuuauaaagcaguuag

SEQ ID NO: 85358 - RNA, 32 nt, Homo Sapiens
uucaaugaaaguuucuucuggaucuacagaaa

SEQ ID NO: 85359 - RNA, 32 nt, Homo Sapiens
uaaacuuuaauauaaaguaguccugugaaugc

SEQ ID NO: 85360 - RNA, 32 nt, Homo Sapiens
gugaaguaaaacuuaagauauuugaguuaacc

SEQ ID NO: 85361 - RNA, 32 nt, Homo Sapiens
uggacagaguaacugcaguuauccccagguac

SEQ ID NO: 85362 - RNA, 32 nt, Homo Sapiens
ucucugcagaaaucaaucuuuacuucaucaga

SEQ ID NO: 85363 - RNA, 32 nt, Homo Sapiens
ucauuuaaaaaugcaccuauguuauuuacagg

SEQ ID NO: 85364 - RNA, 32 nt, Homo Sapiens
ugagcaugcuggggaggugaaugccacauccu

SEQ ID NO: 85365 - RNA, 32 nt, Homo Sapiens
ccuccaggugaccggccaccccagggcagucc

SEQ ID NO: 85366 - RNA, 32 nt, Homo Sapiens
cucucaagggaagagguuucauaugggaaagc

SEQ ID NO: 85367 - RNA, 32 nt, Homo Sapiens
ccaacuccagccgauggaagagucauauaucg

SEQ ID NO: 85368 - RNA, 32 nt, Homo Sapiens
ucucaaaaggcaaugauuugugagauaauaug

SEQ ID NO: 85369 - RNA, 32 nt, Homo Sapiens
cucaagauguugcuuuccuaaaacagaccagc

SEQ ID NO: 85370 - RNA, 32 nt, Homo Sapiens
cugguacugaagauggauggggaucauuaggu

SEQ ID NO: 85371 - RNA, 32 nt, Homo Sapiens
ccagguugccuguggcagcugugcacugaaga

SEQ ID NO: 85372 - RNA, 32 nt, Homo Sapiens
cuccccuucuccggaaggcuugucaaggggua

SEQ ID NO: 85373 - RNA, 32 nt, Homo Sapiens
gagacgauuggugggggcgcggcggcggcggc

SEQ ID NO: 85374 - RNA, 32 nt, Homo Sapiens
uuugaaguugcagaaugcuuugaaauucuaau

SEQ ID NO: 85375 - RNA, 32 nt, Homo Sapiens
uuucgaguucucacgcaacguacugggcaaau

SEQ ID NO: 85376 - RNA, 32 nt, Homo Sapiens
gacuccugccagcggcugcugaccuuccccug

SEQ ID NO: 85377 - RNA, 32 nt, Homo Sapiens
gauuguggaaugccuucuguggcaggcuuagc

SEQ ID NO: 85378 - RNA, 32 nt, Homo Sapiens
uauuagagcgccagcuccuuggggcagggccu

SEQ ID NO: 85379 - RNA, 32 nt, Homo Sapiens
uuccucaucugcaaaaucagagcauuagcugc

SEQ ID NO: 85380 - RNA, 32 nt, Homo Sapiens
aacccagcaauuuucuaugauuuuuucagaua

SEQ ID NO: 85381 - RNA, 32 nt, Homo Sapiens
cagcccgagacgggcgggcgcgcgggccaaug

SEQ ID NO: 85382 - RNA, 32 nt, Homo Sapiens
cgcucgggcggccgcggacaugugcaggaugu

SEQ ID NO: 85383 - RNA, 32 nt, Homo Sapiens
cgggcagaucacaaggucaggugaucgagacc

SEQ ID NO: 85384 - RNA, 32 nt, Homo Sapiens
caccacugcauuccagccuggaugacagagca

SEQ ID NO: 85385 - RNA, 32 nt, Homo Sapiens
guacggccaaaggguccgcggcguggagcgcu

SEQ ID NO: 85386 - RNA, 32 nt, Homo Sapiens
cagcuuguuccaaagacagucugcucaugaug

SEQ ID NO: 85387 - RNA, 32 nt, Homo Sapiens
uucugggacugauguuuaauuguaacacagau

SEQ ID NO: 85388 - RNA, 32 nt, Homo Sapiens
aacguccauuuucaucuggcugugaaagugag

SEQ ID NO: 85389 - RNA, 32 nt, Homo Sapiens
cugagggcggguguucuggggugucugcccuc

SEQ ID NO: 85390 - RNA, 32 nt, Homo Sapiens
cagguuucaaggaaguagaaacaaaauacaau

SEQ ID NO: 85391 - RNA, 32 nt, Homo Sapiens
caugacggaaugaaaggaugcaugucuccacu

SEQ ID NO: 85392 - RNA, 32 nt, Homo Sapiens
uaccuuaaaugcuuauuuuaaaaugacagugg

SEQ ID NO: 85393 - RNA, 32 nt, Homo Sapiens
ugcucuuaaaaauuauuuuuuuuauuauuauu

SEQ ID NO: 85394 - RNA, 32 nt, Homo Sapiens
gugauggagggcuggaggagcagcgagacaga

SEQ ID NO: 85395 - RNA, 32 nt, Homo Sapiens
cccauacucuaagccuucuagcaagaguuuuc

SEQ ID NO: 85396 - RNA, 32 nt, Homo Sapiens
aaaaaaucaucucacaugcauuuuauaguuuu

SEQ ID NO: 85397 - RNA, 32 nt, Homo Sapiens
acucuugcuagcuggcuucucccucccacaug

SEQ ID NO: 85398 - RNA, 32 nt, Homo Sapiens
aggggacaugaguaaagcaugucugugaccca

SEQ ID NO: 85399 - RNA, 32 nt, Homo Sapiens
uccucuuguaaguaaagcucgugguucuguag

SEQ ID NO: 85400 - RNA, 32 nt, Homo Sapiens
gagagauugggucucuccacauugccccggcu

SEQ ID NO: 85401 - RNA, 32 nt, Homo Sapiens
aguauuauaugaucacuaucgauuuccuggag

SEQ ID NO: 85402 - RNA, 32 nt, Homo Sapiens
ccuaaccauuccauccuguuggugcagagaaa

SEQ ID NO: 85403 - RNA, 32 nt, Homo Sapiens
agcccacacaagcuuuucuccuccucuugcag

SEQ ID NO: 85404 - RNA, 32 nt, Homo Sapiens
accucgaaggcggaccagccugccucugugau

SEQ ID NO: 85405 - RNA, 32 nt, Homo Sapiens
gugagggaggaaggagugugcaugaacugcag

SEQ ID NO: 85406 - RNA, 32 nt, Homo Sapiens
ccauuauguucuuuuuaugaaggcuuguauau

SEQ ID NO: 85407 - RNA, 32 nt, Homo Sapiens
ccaggucagccucgggccccaggguucccugg

SEQ ID NO: 85408 - RNA, 32 nt, Homo Sapiens
gagaaaauaauuuuauucugcuuuguccaauu

SEQ ID NO: 85409 - RNA, 32 nt, Homo Sapiens
gagacgggggucuuccuucaccagcuccccuc

SEQ ID NO: 85410 - RNA, 31 nt, Homo Sapiens
gcgguagagcggagaaagccuauuuucuuuu

SEQ ID NO: 85411 - RNA, 32 nt, Homo Sapiens
gaaauaaaaaaauuaauuaaaaaaaagagaga

SEQ ID NO: 85412 - RNA, 32 nt, Homo Sapiens
caggagcagggccacagcaccccugaggucug

SEQ ID NO: 85413 - RNA, 32 nt, Homo Sapiens
uguggaacagagcaagugguucuggccucccu

SEQ ID NO: 85414 - RNA, 32 nt, Homo Sapiens
uggguuauauggcucuaaucugauggaacaua

SEQ ID NO: 85415 - RNA, 32 nt, Homo Sapiens
cgcucauucaacaucaaagaauuuauaccuaa

SEQ ID NO: 85416 - RNA, 32 nt, Homo Sapiens
ggggguggaaaacuuuuguaucccuaagcaua

SEQ ID NO: 85417 - RNA, 32 nt, Homo Sapiens
cugcguguugagugugugggcggcagugcuuu

SEQ ID NO: 85418 - RNA, 32 nt, Homo Sapiens
cuuaccguggcgaguuccgcgcucaauggaga

SEQ ID NO: 85419 - RNA, 32 nt, Homo Sapiens
uuacugacacuacccucccccauccccuggca

SEQ ID NO: 85420 - RNA, 32 nt, Homo Sapiens
aacacugugcauuauuucaaacuguuuaccug

SEQ ID NO: 85421 - RNA, 32 nt, Homo Sapiens
ugggaccuggaaaguguuuagauucuugauaa

SEQ ID NO: 85422 - RNA, 32 nt, Homo Sapiens
uacuaaaagauauguuucugauacaauagcaa

SEQ ID NO: 85423 - RNA, 32 nt, Homo Sapiens
agcuccagggugaggucuggcuccuggcccag

SEQ ID NO: 85424 - RNA, 32 nt, Homo Sapiens
ccaagcugacucacaagaagaccucuuaaaaa

SEQ ID NO: 85425 - RNA, 32 nt, Homo Sapiens
uccuuuaaaaacaguguuugaaaugaagacug

SEQ ID NO: 85426 - RNA, 32 nt, Homo Sapiens
aauguuggugugaaacaaauuaaugaagcuuu

SEQ ID NO: 85427 - RNA, 32 nt, Homo Sapiens
gcaucugugaugggagcgucaggguuggugug

SEQ ID NO: 85428 - RNA, 32 nt, Homo Sapiens
caacccggcccgcgacaagaagacccgcauca

SEQ ID NO: 85429 - RNA, 32 nt, Homo Sapiens
cuugggacuggggucuccugggaacauucuag

SEQ ID NO: 85430 - RNA, 32 nt, Homo Sapiens
uuucuacauaucuguuuuagauaaaaauucca

SEQ ID NO: 85431 - RNA, 32 nt, Homo Sapiens
gccgggagcgggggcgcagguguuacugguug

SEQ ID NO: 85432 - RNA, 32 nt, Homo Sapiens
gcuuucuuuggaaaaauccacuuuguagccau

SEQ ID NO: 85433 - RNA, 32 nt, Homo Sapiens
gccgcagccagcagccugcagccgccgccggg

SEQ ID NO: 85434 - RNA, 32 nt, Homo Sapiens
cccauuucccccucuggugcugagaaauggag

SEQ ID NO: 85435 - RNA, 32 nt, Homo Sapiens
ugcacaucccuacaauggcuaaaacagcaaug

SEQ ID NO: 85436 - RNA, 32 nt, Homo Sapiens
cuauggcucauuucuauguauuuuucuuacuu

SEQ ID NO: 85437 - RNA, 32 nt, Homo Sapiens
agggccaccggccggagguuccauggcagcca

SEQ ID NO: 85438 - RNA, 32 nt, Homo Sapiens
ucuccguggaggacccgccgcgccccccggca

SEQ ID NO: 85439 - RNA, 32 nt, Homo Sapiens
uagcgcgggcggggcgcuuagucccaccccca

SEQ ID NO: 85440 - RNA, 32 nt, Homo Sapiens
agugaccuguuaaaagccacgcagcagacuca

SEQ ID NO: 85441 - RNA, 32 nt, Homo Sapiens
ugaaguguuuuaaguuguuucuggguaaggga

SEQ ID NO: 85442 - RNA, 30 nt, Homo Sapiens
gcagguguagaagcugcagaggccgcagca

SEQ ID NO: 85443 - RNA, 32 nt, Homo Sapiens
caagcuuuaugaauuuaucaagaacuuaaaaa

SEQ ID NO: 85444 - RNA, 32 nt, Homo Sapiens
caguuuuaguuucaaaauguuaacaacuugaa

SEQ ID NO: 85445 - RNA, 30 nt, Homo Sapiens
ccacagcccugcucauuccucacgcccuuc

SEQ ID NO: 85446 - RNA, 32 nt, Homo Sapiens
agggaauggugggaacauccucuagcucccag

SEQ ID NO: 85447 - RNA, 32 nt, Homo Sapiens
uccuauaucucacaguauuaaaaaauaaauaa

SEQ ID NO: 85448 - RNA, 32 nt, Homo Sapiens
augcccuugggaccugguucucuucuaacccc

SEQ ID NO: 85449 - RNA, 32 nt, Homo Sapiens
uucuggaugguucuuugacucuauuuuuauuu

SEQ ID NO: 85450 - RNA, 32 nt, Homo Sapiens
gcgaggaggaggaggauguggcgcgcggaggg

SEQ ID NO: 85451 - RNA, 32 nt, Homo Sapiens
uuucauuucaacuuauagcaagcuaugauuuu

SEQ ID NO: 85452 - RNA, 32 nt, Homo Sapiens
caacauucgccgggcgggcggcggcggagcgg

SEQ ID NO: 85453 - RNA, 32 nt, Homo Sapiens
ggggcggagcuggagggggugguucggcgugg

SEQ ID NO: 85454 - RNA, 29 nt, Homo Sapiens
gugcucuguguucccagaggcaggcggag

SEQ ID NO: 85455 - RNA, 32 nt, Homo Sapiens
ugaugaugaugauggugguguugaugguggcg

SEQ ID NO: 85456 - RNA, 32 nt, Homo Sapiens
uaugcagauaaaauuauuuuacugaagaucua

SEQ ID NO: 85457 - RNA, 31 nt, Homo Sapiens
aaaauauugggcaucaaauagauuagugugu

SEQ ID NO: 85458 - RNA, 32 nt, Homo Sapiens
acccacagaaauggugagauaaaccauagguu

SEQ ID NO: 85459 - RNA, 32 nt, Homo Sapiens
gguagauuugugcauacuguaagcaaauugcu

SEQ ID NO: 85460 - RNA, 32 nt, Homo Sapiens
acuuuugaugaaacggggaaccaagaggaacu

SEQ ID NO: 85461 - RNA, 32 nt, Homo Sapiens
agacagagcaucucuuuuuuuuuuuuuugaga

SEQ ID NO: 85462 - RNA, 32 nt, Homo Sapiens
auuuucuuuucuuuucucugguaauauugacu

SEQ ID NO: 85463 - RNA, 31 nt, Homo Sapiens
aaggggaugcugggugagauccugucugcau

SEQ ID NO: 85464 - RNA, 32 nt, Homo Sapiens
ccuucacggcgcccggcccuccuugggcugcg

SEQ ID NO: 85465 - RNA, 32 nt, Homo Sapiens
ugcccuuuaauaucauacuaagugugagcuuc

SEQ ID NO: 85466 - RNA, 32 nt, Homo Sapiens
gaacuuacugucagucaacuauaaacaggccc

SEQ ID NO: 85467 - RNA, 32 nt, Homo Sapiens
cgugggagagcagagccugaaaaaggacugcg

SEQ ID NO: 85468 - RNA, 32 nt, Homo Sapiens
gggugaaacugggaacaacuacucagaagcuc

SEQ ID NO: 85469 - RNA, 32 nt, Homo Sapiens
caaaguuucuggauguuuuauuaaauauugua

SEQ ID NO: 85470 - RNA, 32 nt, Homo Sapiens
uguggcggcccauuuguaaaugcugcggagau

SEQ ID NO: 85471 - RNA, 32 nt, Homo Sapiens
gaaacugaggucuggaggggugagcggaaaug

SEQ ID NO: 85472 - RNA, 32 nt, Homo Sapiens
aagguggaguucagacuuuuuuagacaacggc

SEQ ID NO: 85473 - RNA, 32 nt, Homo Sapiens
ccuaggggucacauuugcucaggaagugggua

SEQ ID NO: 85474 - RNA, 32 nt, Homo Sapiens
uuccaagcacccagcccuccugcuccaagagg

SEQ ID NO: 85475 - RNA, 32 nt, Homo Sapiens
aaagauuggccauguuccacuuggaaauggca

SEQ ID NO: 85476 - RNA, 32 nt, Homo Sapiens
cauccuuuccccagcccucuucagcccucccc

SEQ ID NO: 85477 - RNA, 32 nt, Homo Sapiens
aaucagugacuagcuuccuguagccaaucagg

SEQ ID NO: 85478 - RNA, 32 nt, Homo Sapiens
uuagggcucccucaccccuacucgggcauaga

SEQ ID NO: 85479 - RNA, 32 nt, Homo Sapiens
ucucacggcauucagcagcagcguugcuguaa

SEQ ID NO: 85480 - RNA, 32 nt, Homo Sapiens
gcucggcccuccccagcgcccggcuuugaacc

SEQ ID NO: 85481 - RNA, 32 nt, Homo Sapiens
cuugucgugcagaaacaaauggcuguccaguu

SEQ ID NO: 85482 - RNA, 32 nt, Homo Sapiens
gcuggugggaaaguaacauggugcaaccaaug

SEQ ID NO: 85483 - RNA, 31 nt, Homo Sapiens
cacggucaucuucgccugccccgccgcccuc

SEQ ID NO: 85484 - RNA, 32 nt, Homo Sapiens
gugaggcugcagugauugugauucucauccug

SEQ ID NO: 85485 - RNA, 32 nt, Homo Sapiens
uggaauugauuucuucaucuuauucugccuau

SEQ ID NO: 85486 - RNA, 32 nt, Homo Sapiens
uccacuucguugcacgcggguccggcgcacag

SEQ ID NO: 85487 - RNA, 32 nt, Homo Sapiens
accuuuucuacuuuuucuuucuucauauuaaa

SEQ ID NO: 85488 - RNA, 32 nt, Homo Sapiens
uuuauauauuccauaaaaauacaaaguaaccc

SEQ ID NO: 85489 - RNA, 32 nt, Homo Sapiens
acaugacgugacaccuguaugaaaaugugaug

SEQ ID NO: 85490 - RNA, 32 nt, Homo Sapiens
uggcacgauguuagccaacagcuccucaacca

SEQ ID NO: 85491 - RNA, 32 nt, Homo Sapiens
uaguuugcaccugaaucaggggcugucagagu

SEQ ID NO: 85492 - RNA, 32 nt, Homo Sapiens
cugaggucaggaguuugagaccauccuggcua

SEQ ID NO: 85493 - RNA, 32 nt, Homo Sapiens
auguacuuacuuuuuaaaguccaaauauguuu

SEQ ID NO: 85494 - RNA, 32 nt, Homo Sapiens
gccugggucgcacccccuccccacggccccac

SEQ ID NO: 85495 - RNA, 32 nt, Homo Sapiens
cugacuauccggagauggcggugaguauagag

SEQ ID NO: 85496 - RNA, 32 nt, Homo Sapiens
auuuacuauaccuggugacagguauuuacuau

SEQ ID NO: 85497 - RNA, 32 nt, Homo Sapiens
aucugagguucagugaggcaagguaagcuucc

SEQ ID NO: 85498 - RNA, 29 nt, Homo Sapiens
gucauagcccuugagggaaagcuacuuga

SEQ ID NO: 85499 - RNA, 32 nt, Homo Sapiens
auuucaggaagcuguggaccguguuuagccug

SEQ ID NO: 85500 - RNA, 32 nt, Homo Sapiens
aagcauguguaacgugaaaaaauggacacuuu

SEQ ID NO: 85501 - RNA, 30 nt, Homo Sapiens
ccaccgcaggucccccggggucccggaagc

SEQ ID NO: 85502 - RNA, 32 nt, Homo Sapiens
caccucggggauuuuuuccauuuugcaguaaa

SEQ ID NO: 85503 - RNA, 32 nt, Homo Sapiens
ugccccucugcccuccggccaggccgccccgc

SEQ ID NO: 85504 - RNA, 32 nt, Homo Sapiens
ccaagucuccucucacccacgccacccucacc

SEQ ID NO: 85505 - RNA, 32 nt, Homo Sapiens
acucccgagccccacacccacaucacccaugu

SEQ ID NO: 85506 - RNA, 32 nt, Homo Sapiens
ugaauucuguggaaauagaaaagcauauaucu

SEQ ID NO: 85507 - RNA, 32 nt, Homo Sapiens
ucugauuuuacuggaaguaauuccuuuucacc

SEQ ID NO: 85508 - RNA, 32 nt, Homo Sapiens
cugucuggagcagcugcagccgcagcuguggc

SEQ ID NO: 85509 - RNA, 32 nt, Homo Sapiens
caguggcaagcacugggguuggcccucguugg

SEQ ID NO: 85510 - RNA, 32 nt, Homo Sapiens
gcguggagcgcaagugcuggacagguggcccg

SEQ ID NO: 85511 - RNA, 32 nt, Homo Sapiens
aaccaggacuuucuucuuaaugcucucgacac

SEQ ID NO: 85512 - RNA, 32 nt, Homo Sapiens
uuugcggcggugggucgccgccgggagaagcg

SEQ ID NO: 85513 - RNA, 32 nt, Homo Sapiens
cccucaccucaccugcuuucuucauggcaugu

SEQ ID NO: 85514 - RNA, 31 nt, Homo Sapiens
ggagcuuugugcucagccugaggucagaugu

SEQ ID NO: 85515 - RNA, 26 nt, Homo Sapiens
caugugcuccgggcuccuggagcucc

SEQ ID NO: 85516 - RNA, 32 nt, Homo Sapiens
cagaaugaggacccgaggacaguggcagacag

SEQ ID NO: 85517 - RNA, 32 nt, Homo Sapiens
ugagcagcuccuccccggaggaccccagcgca

SEQ ID NO: 85518 - RNA, 32 nt, Homo Sapiens
agcugccccccgagccgagcgcagcgagcgcc

SEQ ID NO: 85519 - RNA, 32 nt, Homo Sapiens
uaccuaagccaucaaaaccugcaacaacucac

SEQ ID NO: 85520 - RNA, 32 nt, Homo Sapiens
ggucuacuccgucauuggguuccgcgccacac

SEQ ID NO: 85521 - RNA, 32 nt, Homo Sapiens
uggguuugguuguaagauaaaccuggaggaga

SEQ ID NO: 85522 - RNA, 32 nt, Homo Sapiens
agcgagcccuccccacccacccacgguccuca

SEQ ID NO: 85523 - RNA, 32 nt, Homo Sapiens
caggacuccagacuccuuuuuauucuucuccu

SEQ ID NO: 85524 - RNA, 32 nt, Homo Sapiens
gucuuaucuucagagccugcagagccucuguu

SEQ ID NO: 85525 - RNA, 32 nt, Homo Sapiens
ucaagagucccauguaucugguggcuaucaaa

SEQ ID NO: 85526 - RNA, 32 nt, Homo Sapiens
ucagaagccagaagcugauaaccugggcuuuc

SEQ ID NO: 85527 - RNA, 31 nt, Homo Sapiens
ucacagaacauaucagccucaagaaggauuu

SEQ ID NO: 85528 - RNA, 32 nt, Homo Sapiens
acagggaccaugacaagguuccccuugccucc

SEQ ID NO: 85529 - RNA, 32 nt, Homo Sapiens
cuccugaaugaggaagaaaugaaaggaagagg

SEQ ID NO: 85530 - RNA, 32 nt, Homo Sapiens
gaacaucugcugucuuuggcgcagggccauau

SEQ ID NO: 85531 - RNA, 30 nt, Homo Sapiens
aacucuacaucuccugccuaaccuacugcc

SEQ ID NO: 85532 - RNA, 32 nt, Homo Sapiens
aguuggguccaucagcaguuuuucuuccugca

SEQ ID NO: 85533 - RNA, 26 nt, Homo Sapiens
gauggcuccucgcgccgcgggcggcg

SEQ ID NO: 85534 - RNA, 32 nt, Homo Sapiens
guaaucgguuauaccuuuauuggacuuuuaua

SEQ ID NO: 85535 - RNA, 32 nt, Homo Sapiens
ccuugguagcagccuggggugaccucuagagc

SEQ ID NO: 85536 - RNA, 32 nt, Homo Sapiens
gcacugguuuauauguguauguguguuuuauu

SEQ ID NO: 85537 - RNA, 32 nt, Homo Sapiens
ccuuaagccaucuugguggguucugggugguc

SEQ ID NO: 85538 - RNA, 32 nt, Homo Sapiens
gcccccgccagucuuccacuuggucccuguga

SEQ ID NO: 85539 - RNA, 32 nt, Homo Sapiens
cccaagaccugacccggaccaaucagcugcau

SEQ ID NO: 85540 - RNA, 32 nt, Homo Sapiens
ccaggaccuugcccagccuuucuggacaacug

SEQ ID NO: 85541 - RNA, 32 nt, Homo Sapiens
gugcucuggggcuggaggcuaguaaggaaacu

SEQ ID NO: 85542 - RNA, 32 nt, Homo Sapiens
cauuugcccuucccuuucuccuacagucccuu

SEQ ID NO: 85543 - RNA, 32 nt, Homo Sapiens
gguaaauggggauaaugguaccgaccucuuag

SEQ ID NO: 85544 - RNA, 32 nt, Homo Sapiens
caacuucuccacauguuggguguccauccugg

SEQ ID NO: 85545 - RNA, 32 nt, Homo Sapiens
aaaauuugauuuugauuuuauuuuuucucugu

SEQ ID NO: 85546 - RNA, 32 nt, Homo Sapiens
accuggaaauacccacucaugaucccacugcu

SEQ ID NO: 85547 - RNA, 32 nt, Homo Sapiens
guuacugaaaauguauuuuccugcauaaucau

SEQ ID NO: 85548 - RNA, 32 nt, Homo Sapiens
agcugcuuuaacaugaagucauacauacuuag

SEQ ID NO: 85549 - RNA, 30 nt, Homo Sapiens
aaagccucaguaaugggggaugccccuccc

SEQ ID NO: 85550 - RNA, 32 nt, Homo Sapiens
uccccuuccugccuccucccagggcucugcca

SEQ ID NO: 85551 - RNA, 32 nt, Homo Sapiens
gcaugcagcuggaaagaacaggcuacuuccgu

SEQ ID NO: 85552 - RNA, 32 nt, Homo Sapiens
uuguacugacacaacagacaugugcuaguauc

SEQ ID NO: 85553 - RNA, 32 nt, Homo Sapiens
gaggaggcguccuccgcccgguggcccagagg

SEQ ID NO: 85554 - RNA, 32 nt, Homo Sapiens
caauggcaccucugcccuuccccucccgacag

SEQ ID NO: 85555 - RNA, 32 nt, Homo Sapiens
agcccggcccgcggccccggcggccaaucggg

SEQ ID NO: 85556 - RNA, 32 nt, Homo Sapiens
aggcaggagcagcuguuuuccaucccuuccca

SEQ ID NO: 85557 - RNA, 32 nt, Homo Sapiens
cagcccuucccagcacccccagcccugaaacc

SEQ ID NO: 85558 - RNA, 32 nt, Homo Sapiens
caccuacugaggaucucggcuguuggggacuu

SEQ ID NO: 85559 - RNA, 32 nt, Homo Sapiens
ugauugcucuuucuccuucuucccugagucuc

SEQ ID NO: 85560 - RNA, 32 nt, Homo Sapiens
cccccagcuucagccggagauucugagggugg

SEQ ID NO: 85561 - RNA, 32 nt, Homo Sapiens
gaaaaauaaaaauuaaaaaauaaaggguauuu

SEQ ID NO: 85562 - RNA, 32 nt, Homo Sapiens
ucccagcacuggcacaccagaagugccaugcu

SEQ ID NO: 85563 - RNA, 32 nt, Homo Sapiens
agagcagccaucuuagcuggaggugucgagug

SEQ ID NO: 85564 - RNA, 32 nt, Homo Sapiens
ucuguugcauacaugccuggcaucugucuccc

SEQ ID NO: 85565 - RNA, 32 nt, Homo Sapiens
gaugaauacagcgucagaaggaugccauaacc

SEQ ID NO: 85566 - RNA, 32 nt, Homo Sapiens
ccagggcugauauauauuggaaauaucacccc

SEQ ID NO: 85567 - RNA, 32 nt, Homo Sapiens
aggguggggggagggacaugaaaucaucuuag

SEQ ID NO: 85568 - RNA, 31 nt, Homo Sapiens
cagcuuuguugagccauuagaccuacaugca

SEQ ID NO: 85569 - RNA, 32 nt, Homo Sapiens
ggagggauuuuuccugugucauggauaaggaa

SEQ ID NO: 85570 - RNA, 32 nt, Homo Sapiens
cuuuagcuuuagccuggcaaccuggagaaucc

SEQ ID NO: 85571 - RNA, 32 nt, Homo Sapiens
cauggccuaagccccauagcagcuggcaaggg

SEQ ID NO: 85572 - RNA, 32 nt, Homo Sapiens
agaagagaaaccaguacaaaagaucaagagac

SEQ ID NO: 85573 - RNA, 29 nt, Homo Sapiens
agaucugaugaaguauauuuuuuauugcc

SEQ ID NO: 85574 - RNA, 32 nt, Homo Sapiens
uggcccccagccuccagacccucuaaugcccu

SEQ ID NO: 85575 - RNA, 32 nt, Homo Sapiens
aucuguuuaacucauauucugcacgaucugua

SEQ ID NO: 85576 - RNA, 32 nt, Homo Sapiens
ccuccccgccccaucgguuguugucugggcgg

SEQ ID NO: 85577 - RNA, 32 nt, Homo Sapiens
uugucugcccugcauuuuuuuauuucuugcaa

SEQ ID NO: 85578 - RNA, 32 nt, Homo Sapiens
ggcccucucaggugccccuacuugcuuucugc

SEQ ID NO: 85579 - RNA, 32 nt, Homo Sapiens
ggagaccagggacaggagagccagcagggugg

SEQ ID NO: 85580 - RNA, 32 nt, Homo Sapiens
uucgaauacuaugucaaguaagaguagugaga

SEQ ID NO: 85581 - RNA, 32 nt, Homo Sapiens
aacaggagucacuggcucaggaccccagggag

SEQ ID NO: 85582 - RNA, 32 nt, Homo Sapiens
ggcagggaccaugcuggggcccggggccaccc

SEQ ID NO: 85583 - RNA, 32 nt, Homo Sapiens
ugaggccugaggcaccccaacaugacaacgua

SEQ ID NO: 85584 - RNA, 32 nt, Homo Sapiens
ucagcuauuuuagaaaaauacaauaacucaga

SEQ ID NO: 85585 - RNA, 32 nt, Homo Sapiens
caguucuuccuccaccuccacccagugauccc

SEQ ID NO: 85586 - RNA, 32 nt, Homo Sapiens
agacugguuucuagcacuaccggucacggcca

SEQ ID NO: 85587 - RNA, 32 nt, Homo Sapiens
ccucucuugggguuggaucgggacccuguucc

SEQ ID NO: 85588 - RNA, 32 nt, Homo Sapiens
gggcccggaccucggcgagcccaccaccguuc

SEQ ID NO: 85589 - RNA, 32 nt, Homo Sapiens
cacccggcccugugucuuuucuuaauuugagc

SEQ ID NO: 85590 - RNA, 32 nt, Homo Sapiens
uucuguuccuucccgcucucgucuuccagccc

SEQ ID NO: 85591 - RNA, 32 nt, Homo Sapiens
ucuagcaugagacuucaagcaguuggcucacu

SEQ ID NO: 85592 - RNA, 32 nt, Homo Sapiens
ugcgagggucagcacugcacccgcccccgagc

SEQ ID NO: 85593 - RNA, 32 nt, Homo Sapiens
gaagcaguuaauaaaaaguauuaaaaguaucu

SEQ ID NO: 85594 - RNA, 32 nt, Homo Sapiens
cauaguccugcuccucaacgggaucaucaaag

SEQ ID NO: 85595 - RNA, 32 nt, Homo Sapiens
uauuucuugaguuuuuaguuugagaagcugga

SEQ ID NO: 85596 - RNA, 30 nt, Homo Sapiens
gccggcuguuucggcggccgcgggaugccc

SEQ ID NO: 85597 - RNA, 32 nt, Homo Sapiens
cggugguggcggcggcagcugcugccgggcgg

SEQ ID NO: 85598 - RNA, 31 nt, Homo Sapiens
gcuagcgucagcgccagccagaauuaaggaa

SEQ ID NO: 85599 - RNA, 32 nt, Homo Sapiens
uugaaccacguggccacacgcugcugccaguc

SEQ ID NO: 85600 - RNA, 32 nt, Homo Sapiens
agaagacuagaauuagagaaaagggaaagacc

SEQ ID NO: 85601 - RNA, 32 nt, Homo Sapiens
aggaucuggaguuugaggaggaagaggaagag

SEQ ID NO: 85602 - RNA, 32 nt, Homo Sapiens
ugaauguucucaucccuuuugcagcuuuucuu

SEQ ID NO: 85603 - RNA, 32 nt, Homo Sapiens
uuggaggggcggggugcuggcgguguggcggg

SEQ ID NO: 85604 - RNA, 32 nt, Homo Sapiens
ggagucacaggcugcauagacugcaggaaagc

SEQ ID NO: 85605 - RNA, 32 nt, Homo Sapiens
uuguuccaaagauggaauauugaaacuuaguu

SEQ ID NO: 85606 - RNA, 32 nt, Homo Sapiens
uaacacaugagcagucacuuuggagagaagcc

SEQ ID NO: 85607 - RNA, 32 nt, Homo Sapiens
cugcagaaaguaagauacacugagagaaaacu

SEQ ID NO: 85608 - RNA, 32 nt, Homo Sapiens
caccgagacuccuggggcugugggcaggggac

SEQ ID NO: 85609 - RNA, 32 nt, Homo Sapiens
ggccugcagcaaauacaucaguguucacucaa

SEQ ID NO: 85610 - RNA, 32 nt, Homo Sapiens
uaauuuguaauaaaaaucauggcaacauaauu

SEQ ID NO: 85611 - RNA, 32 nt, Homo Sapiens
uuggcagccagacuucuggaggaauugguugu

SEQ ID NO: 85612 - RNA, 29 nt, Homo Sapiens
agccaugguucaucaggugcucuaccggg

SEQ ID NO: 85613 - RNA, 32 nt, Homo Sapiens
uuuuauauuuaaacuucaauuuuuuagcaaca

SEQ ID NO: 85614 - RNA, 32 nt, Homo Sapiens
uaagaaaaauuuguauacuaauauuaagaaau

SEQ ID NO: 85615 - RNA, 32 nt, Homo Sapiens
uguuucgggcaucgcagcugcccgccgagacg

SEQ ID NO: 85616 - RNA, 32 nt, Homo Sapiens
ucaaguuauuuuuauaugaguuaaugugaaau

SEQ ID NO: 85617 - RNA, 32 nt, Homo Sapiens
gggaggagccgcggcucgcggggccggagcca

SEQ ID NO: 85618 - RNA, 32 nt, Homo Sapiens
uauggaagaacaauaggcaaggauaaucaaga

SEQ ID NO: 85619 - RNA, 32 nt, Homo Sapiens
ugaauugcuaaguguuuuuuuauuuuugcaua

SEQ ID NO: 85620 - RNA, 32 nt, Homo Sapiens
auugcauuggagauguugaauagaaaauugaa

SEQ ID NO: 85621 - RNA, 32 nt, Homo Sapiens
cucugaaguguuuguauauuugaaauaccuca

SEQ ID NO: 85622 - RNA, 32 nt, Homo Sapiens
cccuucuccaugaugugacuuccggagauaaa

SEQ ID NO: 85623 - RNA, 32 nt, Homo Sapiens
caucgugcuuugcaugagagcaggccaagguu

SEQ ID NO: 85624 - RNA, 32 nt, Homo Sapiens
auuccgcgcgccccuucacgcgcccugcuccu

SEQ ID NO: 85625 - RNA, 32 nt, Homo Sapiens
aguccggagugaggagcucggucgccgaagcg

SEQ ID NO: 85626 - RNA, 32 nt, Homo Sapiens
gugucaggaaaugucaaauauaauuccauuuu

SEQ ID NO: 85627 - RNA, 32 nt, Homo Sapiens
aaaaagaagcuacuuccucuauuacaguauga

SEQ ID NO: 85628 - RNA, 29 nt, Homo Sapiens
guuccuuggggacagggaccaugucuuau

SEQ ID NO: 85629 - RNA, 31 nt, Homo Sapiens
cucaugagaaacacucaggccugaccuaggc

SEQ ID NO: 85630 - RNA, 32 nt, Homo Sapiens
cgaaacuuccguugccucccagcccucuguau

SEQ ID NO: 85631 - RNA, 32 nt, Homo Sapiens
uccuaaucaagcugaacacuagucacuggguu

SEQ ID NO: 85632 - RNA, 29 nt, Homo Sapiens
uuuugcaauaaaguauauuuuuauuaagg

SEQ ID NO: 85633 - RNA, 32 nt, Homo Sapiens
uuccuucugcuagccucccaguaaaaucucua

SEQ ID NO: 85634 - RNA, 32 nt, Homo Sapiens
cggccgagcauggaagaacagcagccggaacc

SEQ ID NO: 85635 - RNA, 32 nt, Homo Sapiens
agcuaggcgcgugagaccggccgcccgcaggg

SEQ ID NO: 85636 - RNA, 32 nt, Homo Sapiens
ggcgggcggaggcggcgggcgagggcgacuac

SEQ ID NO: 85637 - RNA, 32 nt, Homo Sapiens
caccccagaugcugaggaugggggagcucagg

SEQ ID NO: 85638 - RNA, 32 nt, Homo Sapiens
auaacagcaaggaaacauuaaugcuuagaauu

SEQ ID NO: 85639 - RNA, 32 nt, Homo Sapiens
uugucuaaaaauuuaaguuguuuucaaauaaa

SEQ ID NO: 85640 - RNA, 32 nt, Homo Sapiens
ugaaaacuauaaaacauugcugagggaaauuu

SEQ ID NO: 85641 - RNA, 32 nt, Homo Sapiens
gucauugguggcaggggcauagaguggucagu

SEQ ID NO: 85642 - RNA, 32 nt, Homo Sapiens
uccccgcgccucggcuucgcgcucguguagau

SEQ ID NO: 85643 - RNA, 32 nt, Homo Sapiens
ggccuggcuugcaggcuagaggcggccgaggc

SEQ ID NO: 85644 - RNA, 32 nt, Homo Sapiens
uugccucuguuguugaaaaucaguugacugua

SEQ ID NO: 85645 - RNA, 32 nt, Homo Sapiens
agaacaacaaggaaaaaaauguuuguucuauu

SEQ ID NO: 85646 - RNA, 32 nt, Homo Sapiens
agcgcggcgcggggcugcugcgccugcgcgcu

SEQ ID NO: 85647 - RNA, 32 nt, Homo Sapiens
ggauuacagccacugcacccagccuaaucuuu

SEQ ID NO: 85648 - RNA, 32 nt, Homo Sapiens
ccuuugauuccaaauaauauguuuccuucccu

SEQ ID NO: 85649 - RNA, 32 nt, Homo Sapiens
gggaucgacacgugggggcgccugagcgaaga

SEQ ID NO: 85650 - RNA, 29 nt, Homo Sapiens
ccuuaaaaaaguuuacacuucuauguauc

SEQ ID NO: 85651 - RNA, 32 nt, Homo Sapiens
agccucaggcuguaucuggguaccucaugugc

SEQ ID NO: 85652 - RNA, 32 nt, Homo Sapiens
auugauuauuugcgguauuaacugaaucuuaa

SEQ ID NO: 85653 - RNA, 32 nt, Homo Sapiens
aaguacggccucaggagggaguaaaaagggug

SEQ ID NO: 85654 - RNA, 32 nt, Homo Sapiens
cuaggcgggaggggguggcgcuucucagccgg

SEQ ID NO: 85655 - RNA, 32 nt, Homo Sapiens
aaucaugguggaaggagaaggggaagcaagca

SEQ ID NO: 85656 - RNA, 32 nt, Homo Sapiens
gccgaagcagugccucugcgcaaucuccgggc

SEQ ID NO: 85657 - RNA, 32 nt, Homo Sapiens
gagaggcacacccacccucaaucugggugggc

SEQ ID NO: 85658 - RNA, 32 nt, Homo Sapiens
uuugcuuuuuugagacggagucucucucuguc

SEQ ID NO: 85659 - RNA, 32 nt, Homo Sapiens
cuaucuuggaugauuucuuuuacagauugguu

SEQ ID NO: 85660 - RNA, 32 nt, Homo Sapiens
gggucagaggaaaacagaaaaaucacaaauag

SEQ ID NO: 85661 - RNA, 32 nt, Homo Sapiens
ugcagcgggaggaggaggagcaccuccgccag

SEQ ID NO: 85662 - RNA, 32 nt, Homo Sapiens
aaggggcuaauuggaggcacgaggggaccccu

SEQ ID NO: 85663 - RNA, 32 nt, Homo Sapiens
aauuguauuucuuuauacuagcaacaaacaau

SEQ ID NO: 85664 - RNA, 32 nt, Homo Sapiens
ccgucauguacucaguguccacagcagucagu

SEQ ID NO: 85665 - RNA, 32 nt, Homo Sapiens
cgagaugcccagaggugaucccugcccgcccc

SEQ ID NO: 85666 - RNA, 32 nt, Homo Sapiens
uuuaaauuaaaauggaaaaauaugaaaaccug

SEQ ID NO: 85667 - RNA, 32 nt, Homo Sapiens
gggggcaauuguuucuuaggccuagcagaugu

SEQ ID NO: 85668 - RNA, 32 nt, Homo Sapiens
ccugcaaaacgaauuuaaguaccagccaagua

SEQ ID NO: 85669 - RNA, 32 nt, Homo Sapiens
ggaccccaggaggcugcgcgcgucucccugcc

SEQ ID NO: 85670 - RNA, 32 nt, Homo Sapiens
gggugcgggugacaccgccgagcgaagaaccc

SEQ ID NO: 85671 - RNA, 32 nt, Homo Sapiens
gggcucagcccaggaagaggagaaacgauccc

SEQ ID NO: 85672 - RNA, 32 nt, Homo Sapiens
uaaaagugccugggauauuuuccuccuuggcc

SEQ ID NO: 85673 - RNA, 32 nt, Homo Sapiens
uguaaaaugagggaagcagaggaagagauaac

SEQ ID NO: 85674 - RNA, 31 nt, Homo Sapiens
gaggaggaggagacaccuagagccugcgaca

SEQ ID NO: 85675 - RNA, 32 nt, Homo Sapiens
agaugauggaauauuugaugacaauuuuauug

SEQ ID NO: 85676 - RNA, 32 nt, Homo Sapiens
ccauuugcugcuaaaucugggcuggucagaau

SEQ ID NO: 85677 - RNA, 32 nt, Homo Sapiens
cucagaagauaaaagauaaguaggguaugcug

SEQ ID NO: 85678 - RNA, 32 nt, Homo Sapiens
aaucaaagagcaaaggcuguugugaaguggaa

SEQ ID NO: 85679 - RNA, 32 nt, Homo Sapiens
uggcucugccccuuuccagcaaugugaccuug

SEQ ID NO: 85680 - RNA, 32 nt, Homo Sapiens
uaagagucacccaaacaaucggcugagaauga

SEQ ID NO: 85681 - RNA, 32 nt, Homo Sapiens
gcagcggaaggcggcagaggcugggaggcggc

SEQ ID NO: 85682 - RNA, 32 nt, Homo Sapiens
aggcguccgggaaucuucacuuuuuccguugc

SEQ ID NO: 85683 - RNA, 32 nt, Homo Sapiens
ggcggcggcggcggcgucuuccgcaucguucg

SEQ ID NO: 85684 - RNA, 32 nt, Homo Sapiens
guuuccaagguaguucucacuguugcaugaca

SEQ ID NO: 85685 - RNA, 31 nt, Homo Sapiens
uccaguggggcccccauucacguugguccuc

SEQ ID NO: 85686 - RNA, 31 nt, Homo Sapiens
cgccaguccgcccagaagccauagacgagac

SEQ ID NO: 85687 - RNA, 32 nt, Homo Sapiens
ugacccagccccagccaccccauggacucagg

SEQ ID NO: 85688 - RNA, 32 nt, Homo Sapiens
cuccccaccccuccccgacccccacggcagag

SEQ ID NO: 85689 - RNA, 32 nt, Homo Sapiens
uccccgagccaccagcagccaggaccggaggc

SEQ ID NO: 85690 - RNA, 32 nt, Homo Sapiens
gcucugcccucccuucugguugcucugagggu

SEQ ID NO: 85691 - RNA, 32 nt, Homo Sapiens
cucacuuccaugaaggaugucuccaugcuagg

SEQ ID NO: 85692 - RNA, 32 nt, Homo Sapiens
cuuauggaaggggaccuguuacaauucuuuga

SEQ ID NO: 85693 - RNA, 32 nt, Homo Sapiens
cauccgcccucccggccuggccugcccuugcg

SEQ ID NO: 85694 - RNA, 32 nt, Homo Sapiens
cggggccgcugacuggccucggucaccucccg

SEQ ID NO: 85695 - RNA, 32 nt, Homo Sapiens
gcuguaccauggcagagacaagagaagaggag

SEQ ID NO: 85696 - RNA, 32 nt, Homo Sapiens
acaaccaugauaagagcaaggcuguuaaauaa

SEQ ID NO: 85697 - RNA, 32 nt, Homo Sapiens
uaggcuuuuuguuuuucuugcuuuuauuccuu

SEQ ID NO: 85698 - RNA, 32 nt, Homo Sapiens
cuaauuuuuuauccuuuuuuuuuuuuuauuuu

SEQ ID NO: 85699 - RNA, 32 nt, Homo Sapiens
auauaacauuuuaauuacuugugauuuagaug

SEQ ID NO: 85700 - RNA, 32 nt, Homo Sapiens
cccaaaggcaagguggacgcaguuaccauaaa

SEQ ID NO: 85701 - RNA, 32 nt, Homo Sapiens
cuuggaauggguaccacagaccaugucaucgu

SEQ ID NO: 85702 - RNA, 32 nt, Homo Sapiens
ccacagagcugcgccuuccucacgugugugaa

SEQ ID NO: 85703 - RNA, 32 nt, Homo Sapiens
caugguguccccucugccuccccucccccgac

SEQ ID NO: 85704 - RNA, 32 nt, Homo Sapiens
gaggugcccacccagcuacuggggaggcugag

SEQ ID NO: 85705 - RNA, 32 nt, Homo Sapiens
gccaacauuggaaagcacuagagggcaauggg

SEQ ID NO: 85706 - RNA, 32 nt, Homo Sapiens
guuugucuuuuugugccucucaucuuucuuuu

SEQ ID NO: 85707 - RNA, 32 nt, Homo Sapiens
ucucacuggaagugguugaucuccagggaauc

SEQ ID NO: 85708 - RNA, 32 nt, Homo Sapiens
cuucugaguauuuuaucaucaauuaaucaccc

SEQ ID NO: 85709 - RNA, 32 nt, Homo Sapiens
ccgccuucucugcucgcgccuggcgcccggag

SEQ ID NO: 85710 - RNA, 32 nt, Homo Sapiens
ucucugaggagcugcggcugcuggagcccuuc

SEQ ID NO: 85711 - RNA, 30 nt, Homo Sapiens
gcccuacuguacugaggggaaacccacaag

SEQ ID NO: 85712 - RNA, 32 nt, Homo Sapiens
gauccuaaauguuuuaauuaguguuuacuuaa

SEQ ID NO: 85713 - RNA, 32 nt, Homo Sapiens
caaggggcgagugugugacuaggugugugugc

SEQ ID NO: 85714 - RNA, 32 nt, Homo Sapiens
cuuaucccaucccacaaaacagaaucuguccg

SEQ ID NO: 85715 - RNA, 32 nt, Homo Sapiens
cucaccaaaugguguuuuguuauccagacagc

SEQ ID NO: 85716 - RNA, 32 nt, Homo Sapiens
uaggaggccuguacaagaagcuucaucggcaa

SEQ ID NO: 85717 - RNA, 32 nt, Homo Sapiens
caggagaugcucagcucuggugccuuuucuuu

SEQ ID NO: 85718 - RNA, 32 nt, Homo Sapiens
uucaggaauuuauguauucuggcuaaaaguug

SEQ ID NO: 85719 - RNA, 32 nt, Homo Sapiens
gggcccaggacuuggagaagggagcgcgccug

SEQ ID NO: 85720 - RNA, 32 nt, Homo Sapiens
uaaaaauggaguuuuucuucauuuuuuagaga

SEQ ID NO: 85721 - RNA, 32 nt, Homo Sapiens
guuagcuaaaggaucuuaggcaugacuguaga

SEQ ID NO: 85722 - RNA, 32 nt, Homo Sapiens
gucccuccgcggcuggagcgaagccuucugca

SEQ ID NO: 85723 - RNA, 32 nt, Homo Sapiens
gagguuauggaaagcagaggcucaggaaugac

SEQ ID NO: 85724 - RNA, 32 nt, Homo Sapiens
cugaggggaaaggguugucucucuccuuucug

SEQ ID NO: 85725 - RNA, 32 nt, Homo Sapiens
cccuuccccagcccugcccccgcagacucccc

SEQ ID NO: 85726 - RNA, 32 nt, Homo Sapiens
cuuuacucagaauccuagggauagguagaaga

SEQ ID NO: 85727 - RNA, 32 nt, Homo Sapiens
cugcagaauagaaagaggcuccagaggagcag

SEQ ID NO: 85728 - RNA, 32 nt, Homo Sapiens
ugugauuaauuugguugucaaguuuugggggu

SEQ ID NO: 85729 - RNA, 31 nt, Homo Sapiens
gggugggcugccugccugcucugagcucucu

SEQ ID NO: 85730 - RNA, 32 nt, Homo Sapiens
ccugccgaccucguccucccccugccagugcc

SEQ ID NO: 85731 - RNA, 32 nt, Homo Sapiens
cuauuaggagccacagcaggugaggcauuugg

SEQ ID NO: 85732 - RNA, 32 nt, Homo Sapiens
ugcaguggcugagaucacaccacuacacucca

SEQ ID NO: 85733 - RNA, 32 nt, Homo Sapiens
ucccacacccucacuguuauguggaccaaaau

SEQ ID NO: 85734 - RNA, 32 nt, Homo Sapiens
cucguucugagggacaggcuugagaucggcug

SEQ ID NO: 85735 - RNA, 32 nt, Homo Sapiens
ucucuaggagguaggaugaaguccucauaggg

SEQ ID NO: 85736 - RNA, 32 nt, Homo Sapiens
gcagaagagguucaacauauuaacuaaauuca

SEQ ID NO: 85737 - RNA, 32 nt, Homo Sapiens
cacgcccuggcccggcagcugcugcucuacga

SEQ ID NO: 85738 - RNA, 32 nt, Homo Sapiens
gggaagggaaaguuuuuuuuuauuauuuuuuu

SEQ ID NO: 85739 - RNA, 30 nt, Homo Sapiens
ugcugucuggacuuuuucugucccacugag

SEQ ID NO: 85740 - RNA, 32 nt, Homo Sapiens
ucuguuacccagggcucugcagcaccucaccu

SEQ ID NO: 85741 - RNA, 32 nt, Homo Sapiens
ugcagccgcccgggccgccggcccuccugucc

SEQ ID NO: 85742 - RNA, 32 nt, Homo Sapiens
acccugacccucggccagcaggguggccccag

SEQ ID NO: 85743 - RNA, 32 nt, Homo Sapiens
ucaaguucaaccccgggaccgcccagccccgc

SEQ ID NO: 85744 - RNA, 32 nt, Homo Sapiens
ucuuauauauauuauacauacauauuggugga

SEQ ID NO: 85745 - RNA, 32 nt, Homo Sapiens
caaaaaacaaaaaaacaaaacuaaggcacuuc

SEQ ID NO: 85746 - RNA, 32 nt, Homo Sapiens
gagcccagccacccucccccgcggcggcgcga

SEQ ID NO: 85747 - RNA, 30 nt, Homo Sapiens
cccccuggagguggccugcacaucccgcca

SEQ ID NO: 85748 - RNA, 32 nt, Homo Sapiens
gcugaacucuuccuacccaggcucugaacaca

SEQ ID NO: 85749 - RNA, 32 nt, Homo Sapiens
ccggugcgggagcuuuagcacacaucagccca

SEQ ID NO: 85750 - RNA, 32 nt, Homo Sapiens
uuauuccuauugcugcagcaauucucaccuuu

SEQ ID NO: 85751 - RNA, 32 nt, Homo Sapiens
uaaaggggccgcgcgcagccguguuucccucu

SEQ ID NO: 85752 - RNA, 32 nt, Homo Sapiens
gguguuuauuuuuacuuuuagaauugguccua

SEQ ID NO: 85753 - RNA, 32 nt, Homo Sapiens
cugccugagaguuuuuaaccauuacagccgug

SEQ ID NO: 85754 - RNA, 32 nt, Homo Sapiens
ggccgcagagucacacgcuggugccgggggug

SEQ ID NO: 85755 - RNA, 32 nt, Homo Sapiens
ggaagccugaugggugcugguggccuuucccc

SEQ ID NO: 85756 - RNA, 32 nt, Homo Sapiens
aaugcaucguggcaauccuuaagcaacauuau

SEQ ID NO: 85757 - RNA, 32 nt, Homo Sapiens
gaucuuggugacucaucucccaguucaacugu

SEQ ID NO: 85758 - RNA, 32 nt, Homo Sapiens
uggcaccuucccccucccccagccacucccca

SEQ ID NO: 85759 - RNA, 32 nt, Homo Sapiens
ggagacaggaguuguacuuaugcugcuacuug

SEQ ID NO: 85760 - RNA, 32 nt, Homo Sapiens
gcucucuugcuaccacccaacaugggcucuca

SEQ ID NO: 85761 - RNA, 32 nt, Homo Sapiens
uaaauacucaaguuuaagguauaaucuuaauu

SEQ ID NO: 85762 - RNA, 32 nt, Homo Sapiens
ucccgggccccgggccuggggcaugcguugca

SEQ ID NO: 85763 - RNA, 32 nt, Homo Sapiens
gccggcggcgcaccaccaugacccagucggug

SEQ ID NO: 85764 - RNA, 32 nt, Homo Sapiens
gcaugucucacucacccuccacagcacucagu

SEQ ID NO: 85765 - RNA, 32 nt, Homo Sapiens
cuggaguugcgcgcuucgcggggccgauguag

SEQ ID NO: 85766 - RNA, 32 nt, Homo Sapiens
ugcugugugucuagcacagccaccgggaucca

SEQ ID NO: 85767 - RNA, 32 nt, Homo Sapiens
ccuuucuccccgauccacccaggccuuucugu

SEQ ID NO: 85768 - RNA, 30 nt, Homo Sapiens
ucccagcuugguggcaugcauguuuagucc

SEQ ID NO: 85769 - RNA, 32 nt, Homo Sapiens
auuuuacagagcucuuuuuuccccucauaacc

SEQ ID NO: 85770 - RNA, 32 nt, Homo Sapiens
auacuuuuauagaacaauucuggcuucaggaa

SEQ ID NO: 85771 - RNA, 32 nt, Homo Sapiens
ccagaguggccuggccaggagcucuucaggcc

SEQ ID NO: 85772 - RNA, 32 nt, Homo Sapiens
gccagggguccagugcagcugcugcugggcac

SEQ ID NO: 85773 - RNA, 32 nt, Homo Sapiens
aguccuguucuaaauccucuuauucuuuuggu

SEQ ID NO: 85774 - RNA, 32 nt, Homo Sapiens
uaucccuuguuuucccagccucucuuccaaau

SEQ ID NO: 85775 - RNA, 32 nt, Homo Sapiens
acagugcggugguucuggaggcugggaagucc

SEQ ID NO: 85776 - RNA, 32 nt, Homo Sapiens
gugguucccuccccccugcccaucaaccccuc

SEQ ID NO: 85777 - RNA, 32 nt, Homo Sapiens
gguuucaucauguuggccaggcuggucucgag

SEQ ID NO: 85778 - RNA, 32 nt, Homo Sapiens
auguguggacaucaguaggcaaguaaccaguu

SEQ ID NO: 85779 - RNA, 32 nt, Homo Sapiens
ucuugcuuuccacaugcagucuaucagguuuc

SEQ ID NO: 85780 - RNA, 32 nt, Homo Sapiens
aguuuguuucuuugaauuuucauuuuacaguu

SEQ ID NO: 85781 - RNA, 32 nt, Homo Sapiens
acucuuaucagaauguuuuucuuaaccucagc

SEQ ID NO: 85782 - RNA, 32 nt, Homo Sapiens
cauggacacaugauggggaacaacacacacug

SEQ ID NO: 85783 - RNA, 32 nt, Homo Sapiens
uuuccaagugcccccaggacuccugggcccug

SEQ ID NO: 85784 - RNA, 32 nt, Homo Sapiens
aacuuuccaucccaccucuccgccucuccauc

SEQ ID NO: 85785 - RNA, 32 nt, Homo Sapiens
guagagucccugucgcccgccggcccugccug

SEQ ID NO: 85786 - RNA, 32 nt, Homo Sapiens
guccacccucaguccuuccccccgccgccccu

SEQ ID NO: 85787 - RNA, 32 nt, Homo Sapiens
uuuucagccaaagggaaauaugcuuucaucuu

SEQ ID NO: 85788 - RNA, 32 nt, Homo Sapiens
ucgccugugcccgggcaccccggagcugcaaa

SEQ ID NO: 85789 - RNA, 32 nt, Homo Sapiens
guuuuaacagguuuuucuuuucuuuuuucuuu

SEQ ID NO: 85790 - RNA, 32 nt, Homo Sapiens
uugcccuuuuucccuuuucuccaugcuuaaug

SEQ ID NO: 85791 - RNA, 32 nt, Homo Sapiens
cucaaaauauccacagugguugaauccaugaa

SEQ ID NO: 85792 - RNA, 32 nt, Homo Sapiens
gacccacgggccuuccaccucccucagcuucc

SEQ ID NO: 85793 - RNA, 32 nt, Homo Sapiens
gcgcgacgugagccggggccgugcgcgaagag

SEQ ID NO: 85794 - RNA, 32 nt, Homo Sapiens
guauuuuucugcacugguuuaaucaugcuuaa

SEQ ID NO: 85795 - RNA, 32 nt, Homo Sapiens
gaggcugcaacuggaccgcgcacgacaggacc

SEQ ID NO: 85796 - RNA, 32 nt, Homo Sapiens
cucagggcucugagagcugugcuccaggccag

SEQ ID NO: 85797 - RNA, 32 nt, Homo Sapiens
uauuacuucugcacuuaccaaauaaugccaga

SEQ ID NO: 85798 - RNA, 32 nt, Homo Sapiens
uagcagggucuauauuuacgugccuaacagua

SEQ ID NO: 85799 - RNA, 32 nt, Homo Sapiens
cgaguagcugggauuauagacacgugccacca

SEQ ID NO: 85800 - RNA, 32 nt, Homo Sapiens
cuugaccuggcuuaugccgugaaacagccccc

SEQ ID NO: 85801 - RNA, 32 nt, Homo Sapiens
uguucuuuuucacacaccccuucaugcccggc

SEQ ID NO: 85802 - RNA, 32 nt, Homo Sapiens
gggaagagggggcgaucgcggcggagcuggcc

SEQ ID NO: 85803 - RNA, 32 nt, Homo Sapiens
ugugccugaggccuagucuagcaagaggacau

SEQ ID NO: 85804 - RNA, 32 nt, Homo Sapiens
ucacaaaucaguaaaugcuugugucuuuuugu

SEQ ID NO: 85805 - RNA, 32 nt, Homo Sapiens
ggcucgacuccuggguacgcuggagcaaggau

SEQ ID NO: 85806 - RNA, 32 nt, Homo Sapiens
ucuacuaaaaagacaaaaaauuagcugggcau

SEQ ID NO: 85807 - RNA, 32 nt, Homo Sapiens
acgcuccccguccuuggccgccccuccacccc

SEQ ID NO: 85808 - RNA, 32 nt, Homo Sapiens
aggagaagauacugaggauuuuaaaaagaagc

SEQ ID NO: 85809 - RNA, 32 nt, Homo Sapiens
gcaaggcucgccccugcccggcguggagggcg

SEQ ID NO: 85810 - RNA, 32 nt, Homo Sapiens
uguacauguaugccugugugacguguguauau

SEQ ID NO: 85811 - RNA, 32 nt, Homo Sapiens
cuagcuuuaggggaccaugaagagacucucuu

SEQ ID NO: 85812 - RNA, 32 nt, Homo Sapiens
uuuagggauguucuguguuucuuucuuuuuug

SEQ ID NO: 85813 - RNA, 32 nt, Homo Sapiens
aacgugaugugccacuauauuuuacacguauc

SEQ ID NO: 85814 - RNA, 32 nt, Homo Sapiens
aaccuguuucccucugguucuuccuggcuuug

SEQ ID NO: 85815 - RNA, 32 nt, Homo Sapiens
gggcacagcuggaagagaggccuggcccaugc

SEQ ID NO: 85816 - RNA, 32 nt, Homo Sapiens
cuuuguaagcuacuuaucuccaaaaaacuuca

SEQ ID NO: 85817 - RNA, 32 nt, Homo Sapiens
gcucgccggggaagaggacacgcagaggagca

SEQ ID NO: 85818 - RNA, 32 nt, Homo Sapiens
ugcgggagggggucgagaaagaggaacgagga

SEQ ID NO: 85819 - RNA, 32 nt, Homo Sapiens
cacccccuuccagcugacaccacacugaggca

SEQ ID NO: 85820 - RNA, 32 nt, Homo Sapiens
agagcuaaauaaauaauaggagucauagccag

SEQ ID NO: 85821 - RNA, 32 nt, Homo Sapiens
aucuugucauaaaagaaaacagauuuuuauug

SEQ ID NO: 85822 - RNA, 31 nt, Homo Sapiens
agugcgagggcgggauagcuguccaaggucu

SEQ ID NO: 85823 - RNA, 32 nt, Homo Sapiens
auacacugaaaauuuuaacugugucaagucag

SEQ ID NO: 85824 - RNA, 32 nt, Homo Sapiens
uaccacuuauauucaucacauaaaaaccuaaa

SEQ ID NO: 85825 - RNA, 32 nt, Homo Sapiens
acagucuaaaggaaacaaaaccuauauguuau

SEQ ID NO: 85826 - RNA, 32 nt, Homo Sapiens
cuuggucaccagcuccucccuuguucucuaag

SEQ ID NO: 85827 - RNA, 32 nt, Homo Sapiens
gccgcgggauuugcggccgccgccaugccguc

SEQ ID NO: 85828 - RNA, 32 nt, Homo Sapiens
acuuaaugauuugguucguuuauuuaauaaaa

SEQ ID NO: 85829 - RNA, 32 nt, Homo Sapiens
cacgcccggcuaauuuuuguauuuucaguaga

SEQ ID NO: 85830 - RNA, 32 nt, Homo Sapiens
uacauugcaagcacucaguaaauaucagcaaa

SEQ ID NO: 85831 - RNA, 32 nt, Homo Sapiens
uccucuggccuguccccuccccuacccccacu

SEQ ID NO: 85832 - RNA, 32 nt, Homo Sapiens
cggagcaggcucuuccaccuccuucagcuccc

SEQ ID NO: 85833 - RNA, 32 nt, Homo Sapiens
gacagaccgcauuccacccccaacaucggcac

SEQ ID NO: 85834 - RNA, 32 nt, Homo Sapiens
cuauuucuuuuuuuuuuuuuuaaacaaaaaac

SEQ ID NO: 85835 - RNA, 32 nt, Homo Sapiens
uuuggggcugaacuuaccauggagaucccuca

SEQ ID NO: 85836 - RNA, 32 nt, Homo Sapiens
gaaugugcacaaaaccugcucauuaacaugca

SEQ ID NO: 85837 - RNA, 32 nt, Homo Sapiens
gaccacgcgggccgggcugugcaaagcccccc

SEQ ID NO: 85838 - RNA, 32 nt, Homo Sapiens
uccgccaggcaaaaggaagauugucuuuggcu

SEQ ID NO: 85839 - RNA, 30 nt, Homo Sapiens
ugagcaggcaggcaggagguccuguuagcc

SEQ ID NO: 85840 - RNA, 32 nt, Homo Sapiens
cucgcuaucugcuuuuuuuuuauuucuuguca

SEQ ID NO: 85841 - RNA, 32 nt, Homo Sapiens
aaucuguuuaggaaagaaaugaauuuucuaag

SEQ ID NO: 85842 - RNA, 32 nt, Homo Sapiens
uguugcuuccaguuuagcugccccucaaauuc

SEQ ID NO: 85843 - RNA, 32 nt, Homo Sapiens
uguagaagacaaaauguucacaauauauuuag

SEQ ID NO: 85844 - RNA, 32 nt, Homo Sapiens
cuaccagguguuccaccugaaagcucuguaaa

SEQ ID NO: 85845 - RNA, 32 nt, Homo Sapiens
ccucugcccugccucuccuucagcuccgaacc

SEQ ID NO: 85846 - RNA, 32 nt, Homo Sapiens
ucuuuggcuaggcaaaaugaaacuauaacuga

SEQ ID NO: 85847 - RNA, 32 nt, Homo Sapiens
cuuggcauuguuauaggucuuuuucuuggcuu

SEQ ID NO: 85848 - RNA, 32 nt, Homo Sapiens
aucuguauauauauuggguauguuuuaaggau

SEQ ID NO: 85849 - RNA, 31 nt, Homo Sapiens
cgugagcggcacugauuugucccuggggcgg

SEQ ID NO: 85850 - RNA, 32 nt, Homo Sapiens
aaaacccgcucccgaagcggcgcugccgucug

SEQ ID NO: 85851 - RNA, 32 nt, Homo Sapiens
aacugcguguggagucagcccagucuggaugc

SEQ ID NO: 85852 - RNA, 32 nt, Homo Sapiens
cauagaaaauaaauagaagagacagugaagca

SEQ ID NO: 85853 - RNA, 32 nt, Homo Sapiens
ccauguagaagagggagaaggagaggcucuga

SEQ ID NO: 85854 - RNA, 32 nt, Homo Sapiens
cuccagucacaggcaggggccuugaggaugau

SEQ ID NO: 85855 - RNA, 32 nt, Homo Sapiens
cuuuuuuggggauggugggagugaagggggug

SEQ ID NO: 85856 - RNA, 32 nt, Homo Sapiens
acugcacaagugcaaauacaagggcaggaaag

SEQ ID NO: 85857 - RNA, 32 nt, Homo Sapiens
caguugccaugguuaccgaggacccugguuac

SEQ ID NO: 85858 - RNA, 32 nt, Homo Sapiens
auaauaugugcuucuuuuuuuauuauuuuuug

SEQ ID NO: 85859 - RNA, 32 nt, Homo Sapiens
uuauuaggaaacaaagcuuagcaggagaggag

SEQ ID NO: 85860 - RNA, 32 nt, Homo Sapiens
uuucucaagguaucaucagggauuggccgaug

SEQ ID NO: 85861 - RNA, 32 nt, Homo Sapiens
ggguggggguuugaguugaggaccaaagugcc

SEQ ID NO: 85862 - RNA, 32 nt, Homo Sapiens
aaaauuaaaggaauggagaaauaaucaaaauc

SEQ ID NO: 85863 - RNA, 32 nt, Homo Sapiens
ggguuucugaauaaaaauuuguagugauaaca

SEQ ID NO: 85864 - RNA, 32 nt, Homo Sapiens
ccggcccaacccagcccagcccagcucagcuc

SEQ ID NO: 85865 - RNA, 32 nt, Homo Sapiens
gggcaaauggguuuuucuaaauaaaugacaua

SEQ ID NO: 85866 - RNA, 32 nt, Homo Sapiens
cuuccguaggaaaguugugaaaauaguuuaaa

SEQ ID NO: 85867 - RNA, 32 nt, Homo Sapiens
agccacccuccucaugcccacccagcaaggga

SEQ ID NO: 85868 - RNA, 32 nt, Homo Sapiens
ugcugcauagucuuguaauauauuaacaguca

SEQ ID NO: 85869 - RNA, 32 nt, Homo Sapiens
cguuucuacuaaaaauacaaaaaauuagccag

SEQ ID NO: 85870 - RNA, 32 nt, Homo Sapiens
aaacaucaaaauuuaugauuuacauucauagg

SEQ ID NO: 85871 - RNA, 32 nt, Homo Sapiens
gaggacagguggugauuuuaucagguccuggg

SEQ ID NO: 85872 - RNA, 32 nt, Homo Sapiens
acaauauagauaauauaaagaagugcaguaug

SEQ ID NO: 85873 - RNA, 32 nt, Homo Sapiens
caaauccuguccagccggguggcaccagcacu

SEQ ID NO: 85874 - RNA, 32 nt, Homo Sapiens
uugcugcggcugcaauggaggcaaggugcugc

SEQ ID NO: 85875 - RNA, 32 nt, Homo Sapiens
uuuuaaaaugacacuuaauguuauuggcuggc

SEQ ID NO: 85876 - RNA, 32 nt, Homo Sapiens
ggcggagggagacgguggcgucguccgcgggg

SEQ ID NO: 85877 - RNA, 26 nt, Homo Sapiens
gauggcgggagggcacugcggcagcu

SEQ ID NO: 85878 - RNA, 32 nt, Homo Sapiens
cuccacaaaaauaaaaaagaaacuauccagga

SEQ ID NO: 85879 - RNA, 32 nt, Homo Sapiens
accauuuucaucuauuucuuuaauaagaacaa

SEQ ID NO: 85880 - RNA, 32 nt, Homo Sapiens
agagggaaccagcuccggccucagccagcccc

SEQ ID NO: 85881 - RNA, 32 nt, Homo Sapiens
ccgggcaaauggccggagcuggaccgaccaug

SEQ ID NO: 85882 - RNA, 32 nt, Homo Sapiens
uauagcaugagcacauucuuaugacaacauaa

SEQ ID NO: 85883 - RNA, 32 nt, Homo Sapiens
uaacgauaaagaaagaaucagaauaaauguac

SEQ ID NO: 85884 - RNA, 29 nt, Homo Sapiens
cgcuugaugaagaagcagaucggaaguaa

SEQ ID NO: 85885 - RNA, 32 nt, Homo Sapiens
ggccuuugaguaugaguguauguacuuuugau

SEQ ID NO: 85886 - RNA, 32 nt, Homo Sapiens
ccucgcgccaggagaacgcgccgcccgcgccg

SEQ ID NO: 85887 - RNA, 32 nt, Homo Sapiens
cucagcagauguuuugauuugcugcuuuaguu

SEQ ID NO: 85888 - RNA, 32 nt, Homo Sapiens
agugccuucccuccccaacugaggggcuuggc

SEQ ID NO: 85889 - RNA, 32 nt, Homo Sapiens
ucugagggcauccgacaaggcccaucuccuuc

SEQ ID NO: 85890 - RNA, 32 nt, Homo Sapiens
uuucuccuuugcaaauuaauaauuacauaccu

SEQ ID NO: 85891 - RNA, 30 nt, Homo Sapiens
acuugggcgcccgccgucucuggcgcgaac

SEQ ID NO: 85892 - RNA, 32 nt, Homo Sapiens
gcacccuuugggggcucuguccacggacuccu

SEQ ID NO: 85893 - RNA, 32 nt, Homo Sapiens
gccgaggaugagaaacaagaaauguguuggau

SEQ ID NO: 85894 - RNA, 32 nt, Homo Sapiens
ccugugauggcgagacaaaugauccuuaaaga

SEQ ID NO: 85895 - RNA, 32 nt, Homo Sapiens
aauugauguccauuuuauuuuuucauuuaguu

SEQ ID NO: 85896 - RNA, 32 nt, Homo Sapiens
uacagggaggcucccggggccuggacaggcgg

SEQ ID NO: 85897 - RNA, 32 nt, Homo Sapiens
aagccugaagauuagcuuuucuuacugguuuu

SEQ ID NO: 85898 - RNA, 32 nt, Homo Sapiens
gaccuuaaaugcuacugaaacuuaccugagaa

SEQ ID NO: 85899 - RNA, 32 nt, Homo Sapiens
cugcacugccccggcucccccgcggcccccac

SEQ ID NO: 85900 - RNA, 32 nt, Homo Sapiens
gggagcaagagaauuugaaaagagacauccgc

SEQ ID NO: 85901 - RNA, 32 nt, Homo Sapiens
gcgcggggcgggcuccgcgccacgugacuccg

SEQ ID NO: 85902 - RNA, 32 nt, Homo Sapiens
cccuucugccccagcuccgucucggcggcggc

SEQ ID NO: 85903 - RNA, 32 nt, Homo Sapiens
uuccuuccuucccccaggaacacggaggccac

SEQ ID NO: 85904 - RNA, 32 nt, Homo Sapiens
gcccucgggagaccaugcugcagaugcgagga

SEQ ID NO: 85905 - RNA, 32 nt, Homo Sapiens
guaggauaaaucucagaggucugugugauuua

SEQ ID NO: 85906 - RNA, 32 nt, Homo Sapiens
uuagucuuugaagaaaaaauauguaaauauau

SEQ ID NO: 85907 - RNA, 32 nt, Homo Sapiens
gagauugcacuccagccugggcgacaggcuca

SEQ ID NO: 85908 - RNA, 32 nt, Homo Sapiens
gaaggccgccgggcccgggcaugguggucugg

SEQ ID NO: 85909 - RNA, 32 nt, Homo Sapiens
uguaauuuuauaauucauugacuuuuaguaaa

SEQ ID NO: 85910 - RNA, 32 nt, Homo Sapiens
aguagugcuuuugucagcacagacugcuaauc

SEQ ID NO: 85911 - RNA, 32 nt, Homo Sapiens
cuccaugcucuguucugacauaccugaccuac

SEQ ID NO: 85912 - RNA, 32 nt, Homo Sapiens
ccagaagaugagaaaaaagaauaguguugccu

SEQ ID NO: 85913 - RNA, 32 nt, Homo Sapiens
cacagcuuauuuccucauuuuuauaauguccc

SEQ ID NO: 85914 - RNA, 32 nt, Homo Sapiens
agugacaucagcuggcugugaugcuucgaaau

SEQ ID NO: 85915 - RNA, 32 nt, Homo Sapiens
ugaauuucccaacccacccccaaacuaaacac

SEQ ID NO: 85916 - RNA, 32 nt, Homo Sapiens
gccaggaugaucucgaucucuugaucucguga

SEQ ID NO: 85917 - RNA, 32 nt, Homo Sapiens
ugaggguagugggcuaagucgaggguccagcc

SEQ ID NO: 85918 - RNA, 32 nt, Homo Sapiens
aucaaauaucauuuauuuuuuauugcagagac

SEQ ID NO: 85919 - RNA, 32 nt, Homo Sapiens
aauacauggucugcugacuccuccucagcccc

SEQ ID NO: 85920 - RNA, 32 nt, Homo Sapiens
cagcuuccuccaggguuccccagccaccuccc

SEQ ID NO: 85921 - RNA, 32 nt, Homo Sapiens
uuugaaaaauggaaaaguuggauugggcuuac

SEQ ID NO: 85922 - RNA, 28 nt, Homo Sapiens
ugaugggggcggccaaggugacacuggg

SEQ ID NO: 85923 - RNA, 32 nt, Homo Sapiens
cagccuuucuaaaaguugcauguuaugugagu

SEQ ID NO: 85924 - RNA, 32 nt, Homo Sapiens
uuguacaacugaaauauaaauaauuuugucaa

SEQ ID NO: 85925 - RNA, 32 nt, Homo Sapiens
aggauaauuaaaaauaauguaaugugccuagc

SEQ ID NO: 85926 - RNA, 32 nt, Homo Sapiens
ucgcggggcgggagggagcggcugagccaggc

SEQ ID NO: 85927 - RNA, 32 nt, Homo Sapiens
ccaaauguucccuggggguggcaaauuugccc

SEQ ID NO: 85928 - RNA, 32 nt, Homo Sapiens
ugagugaggaagagcagaguauguggauaccc

SEQ ID NO: 85929 - RNA, 32 nt, Homo Sapiens
ugcauuuucuucagaauuauccauuacgugca

SEQ ID NO: 85930 - RNA, 32 nt, Homo Sapiens
cguggugguuauggcuggccugagcggcgcgc

SEQ ID NO: 85931 - RNA, 32 nt, Homo Sapiens
gcccgggagauaaguaugagaugcgcagccac

SEQ ID NO: 85932 - RNA, 32 nt, Homo Sapiens
uacgagaauaggcaucuuucauuuucauuuua

SEQ ID NO: 85933 - RNA, 32 nt, Homo Sapiens
aagccucuaccugcaccucacagugcaaggcu

SEQ ID NO: 85934 - RNA, 32 nt, Homo Sapiens
uggggccaacuggaaccauuggcagcugcacg

SEQ ID NO: 85935 - RNA, 32 nt, Homo Sapiens
aaaacuccacugaguucgcuccaaaugcucau

SEQ ID NO: 85936 - RNA, 32 nt, Homo Sapiens
gggaggagggauccaggguggggugaagcccg

SEQ ID NO: 85937 - RNA, 32 nt, Homo Sapiens
gguuauuuucuuuucuuucaacuugcauccaa

SEQ ID NO: 85938 - RNA, 32 nt, Homo Sapiens
accccagaauccuguucccccaucccuucucc

SEQ ID NO: 85939 - RNA, 32 nt, Homo Sapiens
cccgcccgcgcgccguaccgcggcggagaugg

SEQ ID NO: 85940 - RNA, 32 nt, Homo Sapiens
ccugccugccaucuguggcccgaagccauugc

SEQ ID NO: 85941 - RNA, 32 nt, Homo Sapiens
aaucaguuggaaaugauuagauaauaugggaa

SEQ ID NO: 85942 - RNA, 32 nt, Homo Sapiens
gggucuugcucuguugccaaguuaagugcagu

SEQ ID NO: 85943 - RNA, 32 nt, Homo Sapiens
uguccacuggggguggaaugggguaggguggg

SEQ ID NO: 85944 - RNA, 32 nt, Homo Sapiens
gcuaaaacagagccuucaaaacuucggcuagc

SEQ ID NO: 85945 - RNA, 32 nt, Homo Sapiens
agggccugcugaagcccucccucgcccgcgcc

SEQ ID NO: 85946 - RNA, 32 nt, Homo Sapiens
ugaaucuauguauuucugggugucuggugaag

SEQ ID NO: 85947 - RNA, 32 nt, Homo Sapiens
ugugguggaagaugaaguggagcuggcaugug

SEQ ID NO: 85948 - RNA, 32 nt, Homo Sapiens
gaaaguaauuuaauuuguaaaacuucugcucg

SEQ ID NO: 85949 - RNA, 32 nt, Homo Sapiens
aguggguggucuauggagagacuuuagugggu

SEQ ID NO: 85950 - RNA, 32 nt, Homo Sapiens
aguuauucuagugucauguuuuacuuuuuauu

SEQ ID NO: 85951 - RNA, 32 nt, Homo Sapiens
ggcucaagguaacaguguucuugugguuugac

SEQ ID NO: 85952 - RNA, 32 nt, Homo Sapiens
caaaugaggcaucagucugaaagccagggagu

SEQ ID NO: 85953 - RNA, 32 nt, Homo Sapiens
cgccugcucccacuuccccuucugccaggagu

SEQ ID NO: 85954 - RNA, 32 nt, Homo Sapiens
cugaaggagacggcggcgcgggaggccagcgc

SEQ ID NO: 85955 - RNA, 32 nt, Homo Sapiens
gccuccuggguucaagcgaaucuccugccuca

SEQ ID NO: 85956 - RNA, 32 nt, Homo Sapiens
acccauuaaauaccuguaaaugguaugaauuu

SEQ ID NO: 85957 - RNA, 32 nt, Homo Sapiens
ggagcucugccagcuuuggugaccuugggccg

SEQ ID NO: 85958 - RNA, 32 nt, Homo Sapiens
uucuccuugggguugaaucauucaacuuaacg

SEQ ID NO: 85959 - RNA, 32 nt, Homo Sapiens
guagaauuccucagagccuuggcacucuggug

SEQ ID NO: 85960 - RNA, 32 nt, Homo Sapiens
uuaacuagcugcauggcuugagccauaucacc

SEQ ID NO: 85961 - RNA, 32 nt, Homo Sapiens
caggcccucggugggacagcggcggccuugga

SEQ ID NO: 85962 - RNA, 32 nt, Homo Sapiens
cccggccggggcauuggcgucuggggagcccu

SEQ ID NO: 85963 - RNA, 32 nt, Homo Sapiens
accugcgaacggaggaggaacuguguuggcac

SEQ ID NO: 85964 - RNA, 32 nt, Homo Sapiens
agaauaauuuaaaagcaacaacucuauagaaa

SEQ ID NO: 85965 - RNA, 32 nt, Homo Sapiens
gauguggacuuccuuagugagcuccacauuac

SEQ ID NO: 85966 - RNA, 32 nt, Homo Sapiens
auuuuaaaauguuuaaauggugcugguuaaac

SEQ ID NO: 85967 - RNA, 32 nt, Homo Sapiens
gaauucuguguccucagcugucacuuuccggu

SEQ ID NO: 85968 - RNA, 32 nt, Homo Sapiens
gagaggccauaagcaagagacaucauguaaac

SEQ ID NO: 85969 - RNA, 32 nt, Homo Sapiens
uccuggcuuuccaggagacauauauaggggaa

SEQ ID NO: 85970 - RNA, 32 nt, Homo Sapiens
gcugcagagccugcucccucccugcccugguu

SEQ ID NO: 85971 - RNA, 32 nt, Homo Sapiens
uucugaggaaaauuauucuagaggaaccuaaa

SEQ ID NO: 85972 - RNA, 32 nt, Homo Sapiens
ucccgcacgcguuacaggagccaggucgguau

SEQ ID NO: 85973 - RNA, 32 nt, Homo Sapiens
gcccagcccaacccaacccggagcagaucaca

SEQ ID NO: 85974 - RNA, 32 nt, Homo Sapiens
gguggggucccgggggcggggcugucggcgga

SEQ ID NO: 85975 - RNA, 32 nt, Homo Sapiens
cuuuauugguugggguguuacccaggcuaaua

SEQ ID NO: 85976 - RNA, 32 nt, Homo Sapiens
uuguuaaucacuauacauauguauguguauau

SEQ ID NO: 85977 - RNA, 32 nt, Homo Sapiens
cgcucggcggcaccuccacacccgccccaacg

SEQ ID NO: 85978 - RNA, 32 nt, Homo Sapiens
acuaaagauuuuuauucugauuuuuucauaau

SEQ ID NO: 85979 - RNA, 32 nt, Homo Sapiens
cagucaguagcuuccuaagaaaaaguguagaa

SEQ ID NO: 85980 - RNA, 32 nt, Homo Sapiens
cucaccgcaaccuccgccuccuagguccaggc

SEQ ID NO: 85981 - RNA, 32 nt, Homo Sapiens
gccucgggcgggggcuggcccgggguuccagg

SEQ ID NO: 85982 - RNA, 32 nt, Homo Sapiens
uguuuauuauuuuguuucuuuauuuuuccagc

SEQ ID NO: 85983 - RNA, 32 nt, Homo Sapiens
auaacccaaggcugaaaauaauguagaaaacu

SEQ ID NO: 85984 - RNA, 32 nt, Homo Sapiens
uucauugcuauguuauuaaaaugaugggaauc

SEQ ID NO: 85985 - RNA, 32 nt, Homo Sapiens
cucacacccgguuuacaaccccccacccccag

SEQ ID NO: 85986 - RNA, 32 nt, Homo Sapiens
cuugacagggaguagcugcuugguuuuauagg

SEQ ID NO: 85987 - RNA, 27 nt, Homo Sapiens
aaugugaaacagcaccacagguacuug

SEQ ID NO: 85988 - RNA, 32 nt, Homo Sapiens
guggggugggcgguaaacagacaggcucuggc

SEQ ID NO: 85989 - RNA, 27 nt, Homo Sapiens
aaauaacauuauuucugguauaucaau

SEQ ID NO: 85990 - RNA, 32 nt, Homo Sapiens
ccgagaccucgcgcgccgccgcugccacgcgc

SEQ ID NO: 85991 - RNA, 32 nt, Homo Sapiens
acacauuaaaagacaaauauguagaauguaau

SEQ ID NO: 85992 - RNA, 32 nt, Homo Sapiens
ggcgcggggcugcacggacugcggcugggggc

SEQ ID NO: 85993 - RNA, 32 nt, Homo Sapiens
ucacuggccaagggcuggcagcucuuccuggc

SEQ ID NO: 85994 - RNA, 32 nt, Homo Sapiens
caauaggcuuaagguaaugaagcugcaggaua

SEQ ID NO: 85995 - RNA, 32 nt, Homo Sapiens
agacaagaagcuagagagcuacaggaaguuca

SEQ ID NO: 85996 - RNA, 32 nt, Homo Sapiens
aaauuagcugggugugguagugggugccugua

SEQ ID NO: 85997 - RNA, 32 nt, Homo Sapiens
gggaaauaaaucagcacauuugaaagaaagug

SEQ ID NO: 85998 - RNA, 27 nt, Homo Sapiens
gaggccgccuucuucaggcgccucccu

SEQ ID NO: 85999 - RNA, 32 nt, Homo Sapiens
agccaggcgcgguggcucacgccuguaauucc

SEQ ID NO: 86000 - RNA, 32 nt, Homo Sapiens
uuuggcgccgucgcccaggcgccccgcaaugu

SEQ ID NO: 86001 - RNA, 32 nt, Homo Sapiens
uguaaauacugcccuagugucuccauggacca

SEQ ID NO: 86002 - RNA, 32 nt, Homo Sapiens
uugcuugcagugcuuucuuaauuuuauggcuc

SEQ ID NO: 86003 - RNA, 32 nt, Homo Sapiens
ucucccaccccucccaguggucuacaaggugg

SEQ ID NO: 86004 - RNA, 32 nt, Homo Sapiens
acguaagacauguguuugcuccuccuucaccu

SEQ ID NO: 86005 - RNA, 32 nt, Homo Sapiens
agaagaugacugaguucuaagaccccacaagc

SEQ ID NO: 86006 - RNA, 32 nt, Homo Sapiens
aauagaagcagcaugcacuuuggaaauccggc

SEQ ID NO: 86007 - RNA, 32 nt, Homo Sapiens
guuacugaauguuguugcuaagaucauagaug

SEQ ID NO: 86008 - RNA, 32 nt, Homo Sapiens
ccggccagacuuggcugauguuuucuuguuuc

SEQ ID NO: 86009 - RNA, 28 nt, Homo Sapiens
auacuugguuguaauaugugaugguuaa

SEQ ID NO: 86010 - RNA, 30 nt, Homo Sapiens
cuccuugucuguguccccagcagaaggugg

SEQ ID NO: 86011 - RNA, 32 nt, Homo Sapiens
gccaggacaagcugucccggcgcgugggccgu

SEQ ID NO: 86012 - RNA, 32 nt, Homo Sapiens
auucaaaaaugaauaccagguugaaagauguu

SEQ ID NO: 86013 - RNA, 32 nt, Homo Sapiens
gccgccuccucguuccucuccuggaugggaca

SEQ ID NO: 86014 - RNA, 32 nt, Homo Sapiens
uuuuucaugauaucuguaaagcuugaguauuu

SEQ ID NO: 86015 - RNA, 32 nt, Homo Sapiens
ggucugcagagcaaaggcaggucuggagggug

SEQ ID NO: 86016 - RNA, 32 nt, Homo Sapiens
cuguggagaugcuggaggaacaagacauaaaa

SEQ ID NO: 86017 - RNA, 32 nt, Homo Sapiens
gaagcaaagaagaucaaggaaguuccuaugca

SEQ ID NO: 86018 - RNA, 27 nt, Homo Sapiens
gccaaguccuucucccgaacccagggu

SEQ ID NO: 86019 - RNA, 32 nt, Homo Sapiens
gccgccuccgcggccgccgaggucgugcgugu

SEQ ID NO: 86020 - RNA, 32 nt, Homo Sapiens
ggacccacgcaccucccuguaucugcgcagcu

SEQ ID NO: 86021 - RNA, 32 nt, Homo Sapiens
ugccgccgccucuuccuucuccagccggcagg

SEQ ID NO: 86022 - RNA, 32 nt, Homo Sapiens
gagcagucagaagacacaaaacauuaaucgau

SEQ ID NO: 86023 - RNA, 32 nt, Homo Sapiens
cagcauccgcggcugcugaaaaccugguccug

SEQ ID NO: 86024 - RNA, 32 nt, Homo Sapiens
cagcagcaugacuggggggaccaacaagacua

SEQ ID NO: 86025 - RNA, 32 nt, Homo Sapiens
uguaacuuauuuacuaaaugcucagugcuauu

SEQ ID NO: 86026 - RNA, 32 nt, Homo Sapiens
ccacccucuuccuacuggucucucuaugccuc

SEQ ID NO: 86027 - RNA, 32 nt, Homo Sapiens
aucugucccugagauacucauguuguuucaaa

SEQ ID NO: 86028 - RNA, 32 nt, Homo Sapiens
aucuagagaugauuuaaauuauacaggaaggu

SEQ ID NO: 86029 - RNA, 32 nt, Homo Sapiens
cggcugcacaagcagcaagaucaaaagugagc

SEQ ID NO: 86030 - RNA, 32 nt, Homo Sapiens
ucuuccaauuuaaccaaagauaaaggacuaga

SEQ ID NO: 86031 - RNA, 32 nt, Homo Sapiens
agaaaucccucauagaagcacucagcucccuc

SEQ ID NO: 86032 - RNA, 32 nt, Homo Sapiens
gccgcaccaccucuccuucucugccucugacc

SEQ ID NO: 86033 - RNA, 32 nt, Homo Sapiens
gagcccagccuggauuccugugccugcucgca

SEQ ID NO: 86034 - RNA, 32 nt, Homo Sapiens
cugguuucccccuguuuccccugagcugaggc

SEQ ID NO: 86035 - RNA, 32 nt, Homo Sapiens
ggccugcgccgccgcgcgagaggaagcaccca

SEQ ID NO: 86036 - RNA, 32 nt, Homo Sapiens
uuuuguuuuuauucuauuauccuuuauuucca

SEQ ID NO: 86037 - RNA, 32 nt, Homo Sapiens
gccagugucccgugcccuccagugucaaagau

SEQ ID NO: 86038 - RNA, 32 nt, Homo Sapiens
aauucaugacauaaguuuuguuuugaucaccc

SEQ ID NO: 86039 - RNA, 29 nt, Homo Sapiens
guauggcucagcuaauaaaggcgcacaug

SEQ ID NO: 86040 - RNA, 32 nt, Homo Sapiens
uuagauuguaaguuauggacaugauuugagau

SEQ ID NO: 86041 - RNA, 31 nt, Homo Sapiens
auccuuuuuaacacucucagguuuguuuguu

SEQ ID NO: 86042 - RNA, 32 nt, Homo Sapiens
cggggcuccccucucugcuccacgccauucag

SEQ ID NO: 86043 - RNA, 32 nt, Homo Sapiens
auuuggggagacuguaucugucuacuuagcgu

SEQ ID NO: 86044 - RNA, 32 nt, Homo Sapiens
aaaauuaguacuguuuuauugagagaauuuag

SEQ ID NO: 86045 - RNA, 32 nt, Homo Sapiens
gccggggcucugcguggcuugcugggaggugg

SEQ ID NO: 86046 - RNA, 32 nt, Homo Sapiens
ggucacccggcggguagcaguugcugaguguc

SEQ ID NO: 86047 - RNA, 32 nt, Homo Sapiens
ccaggcugggcaucccucuccuccuccauccc

SEQ ID NO: 86048 - RNA, 32 nt, Homo Sapiens
gaacguuccuuuguagauccgcaacuuaagga

SEQ ID NO: 86049 - RNA, 32 nt, Homo Sapiens
ggagggaggaggaggagaagaugcgcaguuac

SEQ ID NO: 86050 - RNA, 32 nt, Homo Sapiens
ccagaucccccgcuguucucacucaucuucuu

SEQ ID NO: 86051 - RNA, 32 nt, Homo Sapiens
aguauugcuugugcuccuaacaaccugucucu

SEQ ID NO: 86052 - RNA, 32 nt, Homo Sapiens
accuuggaccauaauuaaaucaaggacauuuu

SEQ ID NO: 86053 - RNA, 32 nt, Homo Sapiens
cuggcucugacgaggaccccaggccacucuga

SEQ ID NO: 86054 - RNA, 32 nt, Homo Sapiens
caucuguguuuguguuuuccaguuuuucugua

SEQ ID NO: 86055 - RNA, 32 nt, Homo Sapiens
ccguguggacauuuuuaauuuuuguaaaaaca

SEQ ID NO: 86056 - RNA, 32 nt, Homo Sapiens
ggaugcccauucuccaggacuucuccaacuua

SEQ ID NO: 86057 - RNA, 32 nt, Homo Sapiens
cauggaccgagaagcuggaugugcucuggcuc

SEQ ID NO: 86058 - RNA, 32 nt, Homo Sapiens
ccgggaggaggguggggaccuugcagccccca

SEQ ID NO: 86059 - RNA, 32 nt, Homo Sapiens
cauccauggcugucacauggcaucagugugua

SEQ ID NO: 86060 - RNA, 32 nt, Homo Sapiens
uagguuuuuauacuccaccuccuuucaaaaaa

SEQ ID NO: 86061 - RNA, 32 nt, Homo Sapiens
uuaacaucauauauuuguaauagugaaaccug

SEQ ID NO: 86062 - RNA, 32 nt, Homo Sapiens
aaauccagagggcagguggggguguguccuaa

SEQ ID NO: 86063 - RNA, 32 nt, Homo Sapiens
ggccuccacccuugcacccccagccuccaccc

SEQ ID NO: 86064 - RNA, 32 nt, Homo Sapiens
gugaggcucagggccugguacucuacagcagc

SEQ ID NO: 86065 - RNA, 32 nt, Homo Sapiens
auucacgagcacugggucugcagcugugggga

SEQ ID NO: 86066 - RNA, 25 nt, Homo Sapiens
augguggcgcccgcggcucgggucu

SEQ ID NO: 86067 - RNA, 32 nt, Homo Sapiens
ccagguaggggcaggaggagccacaugagaga

SEQ ID NO: 86068 - RNA, 32 nt, Homo Sapiens
ucaugcuucuuuccaacacguguucacaaucu

SEQ ID NO: 86069 - RNA, 32 nt, Homo Sapiens
gggcccuccugcuccacccccaucccacuccc

SEQ ID NO: 86070 - RNA, 32 nt, Homo Sapiens
agccaaauuuaguuuuaaauguguuuuguuga

SEQ ID NO: 86071 - RNA, 32 nt, Homo Sapiens
ugaagggcagacaugcacuuaagguaggaccc

SEQ ID NO: 86072 - RNA, 32 nt, Homo Sapiens
cucaggccuccaggucucccagccccuccuuc

SEQ ID NO: 86073 - RNA, 32 nt, Homo Sapiens
cauugaggaauuaaagugugggacagucauua

SEQ ID NO: 86074 - RNA, 32 nt, Homo Sapiens
cccaaucguuuuuucuuuuucuggguccauca

SEQ ID NO: 86075 - RNA, 32 nt, Homo Sapiens
ccgcugcgccgacggugcggggcgcuggggca

SEQ ID NO: 86076 - RNA, 32 nt, Homo Sapiens
cccccacucugcagagggaagcggggacaaug

SEQ ID NO: 86077 - RNA, 32 nt, Homo Sapiens
ucccuuaccccuccccuccacuucgcugggcu

SEQ ID NO: 86078 - RNA, 32 nt, Homo Sapiens
auuauaucaaggaguuagauaucuugcaugaa

SEQ ID NO: 86079 - RNA, 31 nt, Homo Sapiens
uuuaugcuuucaucuauucagaauuauuuca

SEQ ID NO: 86080 - RNA, 32 nt, Homo Sapiens
gcccuagauccgaauaagauccgaauaagaau

SEQ ID NO: 86081 - RNA, 32 nt, Homo Sapiens
uugauacaauauugugcaugcuaguguuguau

SEQ ID NO: 86082 - RNA, 32 nt, Homo Sapiens
gaggcugcagugagccgagaucaugccauuac

SEQ ID NO: 86083 - RNA, 32 nt, Homo Sapiens
acaguagaugagaauagaagaguaccuguacc

SEQ ID NO: 86084 - RNA, 32 nt, Homo Sapiens
ugcaaacaaccucccuuccccccgucgaguca

SEQ ID NO: 86085 - RNA, 32 nt, Homo Sapiens
gcuccagggcuuugcuccagaacacucacuau

SEQ ID NO: 86086 - RNA, 32 nt, Homo Sapiens
ggugccaaggcacaucaugcugcuggacaguc

SEQ ID NO: 86087 - RNA, 32 nt, Homo Sapiens
caucauuauuuuuagccuuuccuguuaauaaa

SEQ ID NO: 86088 - RNA, 32 nt, Homo Sapiens
auccgcagauggcuggaauauuaaaauucuuc

SEQ ID NO: 86089 - RNA, 32 nt, Homo Sapiens
gggacggggaaccucgggccuggggaucuggc

SEQ ID NO: 86090 - RNA, 32 nt, Homo Sapiens
gauaaggacaaugaugagguuacugguuugga

SEQ ID NO: 86091 - RNA, 32 nt, Homo Sapiens
uuuuuuuuuuuuuuuuuuuuuauuugagacgg

SEQ ID NO: 86092 - RNA, 32 nt, Homo Sapiens
ccaucccggcuggacgcgaccgggagugcagc

SEQ ID NO: 86093 - RNA, 32 nt, Homo Sapiens
ucgcaggcgccgccgcgccgccgucgcucucc

SEQ ID NO: 86094 - RNA, 32 nt, Homo Sapiens
ccugaaugaugaauuuaugugaacacaaagcc

SEQ ID NO: 86095 - RNA, 30 nt, Homo Sapiens
cagggguugguagugggggaaguggguaaa

SEQ ID NO: 86096 - RNA, 32 nt, Homo Sapiens
cccugcccaucccucccgcaccagugcugucc

SEQ ID NO: 86097 - RNA, 32 nt, Homo Sapiens
gguaauuuucuaguuuguuucuuaauuuauuu

SEQ ID NO: 86098 - RNA, 32 nt, Homo Sapiens
uaacuuugacauucugccuuacagucuauuuu

SEQ ID NO: 86099 - RNA, 28 nt, Homo Sapiens
gggagaguggccuggccgaggugugggg

SEQ ID NO: 86100 - RNA, 32 nt, Homo Sapiens
agucccuggugccaaaaacacugggaaccgcu

SEQ ID NO: 86101 - RNA, 32 nt, Homo Sapiens
gccgucgcggccgggacuccccgggcucucgc

SEQ ID NO: 86102 - RNA, 32 nt, Homo Sapiens
cccuccucagcccucccccacccacaggccca

SEQ ID NO: 86103 - RNA, 32 nt, Homo Sapiens
aacaaaccuugaucuguauauacuugugaggg

SEQ ID NO: 86104 - RNA, 32 nt, Homo Sapiens
gacugaaaaaucagcuuucuauuuacaugaaa

SEQ ID NO: 86105 - RNA, 32 nt, Homo Sapiens
caucuauuuuuauauauuaaauuugaaugugu

SEQ ID NO: 86106 - RNA, 32 nt, Homo Sapiens
agauccaccucauucauauauuugagcuucag

SEQ ID NO: 86107 - RNA, 30 nt, Homo Sapiens
ucagccggugcgcgcggcggcgggaggcag

SEQ ID NO: 86108 - RNA, 32 nt, Homo Sapiens
ugacaauuauacaccacaggcauuguauuauc

SEQ ID NO: 86109 - RNA, 32 nt, Homo Sapiens
acuuagguuagcaugagaaaaggggaaaaaca

SEQ ID NO: 86110 - RNA, 32 nt, Homo Sapiens
uaucuguguauauaaauccacaugcacaugaa

SEQ ID NO: 86111 - RNA, 32 nt, Homo Sapiens
ucccuacacacacacacacacacacacacaca

SEQ ID NO: 86112 - RNA, 32 nt, Homo Sapiens
augagcuauguucaaauguaaauauuuguaau

SEQ ID NO: 86113 - RNA, 32 nt, Homo Sapiens
cgcauccccgggagccgcacuccagacuggcc

SEQ ID NO: 86114 - RNA, 32 nt, Homo Sapiens
augcugacgcagaauggaguugaggugggggc

SEQ ID NO: 86115 - RNA, 32 nt, Homo Sapiens
ugccacuaccccgagucucuccaggucaccag

SEQ ID NO: 86116 - RNA, 32 nt, Homo Sapiens
uuaaauaacaauaaauaugacguuaaugguga

SEQ ID NO: 86117 - RNA, 30 nt, Homo Sapiens
ccccagaaggaauuugaugaggauuuggag

SEQ ID NO: 86118 - RNA, 32 nt, Homo Sapiens
cugaaaauucuaugaaauucagauuucagugu

SEQ ID NO: 86119 - RNA, 32 nt, Homo Sapiens
cgaaaggaaagggaggaaaaauuaaaagccaa

SEQ ID NO: 86120 - RNA, 32 nt, Homo Sapiens
uggcggaggaggaggcgaaggagacggcagga

SEQ ID NO: 86121 - RNA, 32 nt, Homo Sapiens
ggggccgcgccggcuacauuguuuccuccccc

SEQ ID NO: 86122 - RNA, 32 nt, Homo Sapiens
ggccugcuguucuguccuuccaucccucuuuu

SEQ ID NO: 86123 - RNA, 32 nt, Homo Sapiens
uggaccaugacauaguauacucaacugacuuu

SEQ ID NO: 86124 - RNA, 32 nt, Homo Sapiens
gcugccaggugagccccgggccaagggugguu

SEQ ID NO: 86125 - RNA, 32 nt, Homo Sapiens
acaccugcagugccagcucccucgucuucagc

SEQ ID NO: 86126 - RNA, 32 nt, Homo Sapiens
aaaaagcuauaaauguccuguucuuuuucuga

SEQ ID NO: 86127 - RNA, 32 nt, Homo Sapiens
ucuagagacgccguucuuccugucucagcuug

SEQ ID NO: 86128 - RNA, 32 nt, Homo Sapiens
gccaggccccagcgccagccagucuggccuua

SEQ ID NO: 86129 - RNA, 32 nt, Homo Sapiens
ugggcuccacacucuugggcuucagucugccc

SEQ ID NO: 86130 - RNA, 32 nt, Homo Sapiens
gggcuguggggaagacacccccugccugggcc

SEQ ID NO: 86131 - RNA, 30 nt, Homo Sapiens
ugaaugagauacaccaggauaugcacgugc

SEQ ID NO: 86132 - RNA, 32 nt, Homo Sapiens
guauuaaguauuuuaauggcuuauauguuuuu

SEQ ID NO: 86133 - RNA, 32 nt, Homo Sapiens
uuuucuugccugauuucccugggagcaccccc

SEQ ID NO: 86134 - RNA, 32 nt, Homo Sapiens
cgaugguugaauuccccuccucacgccagccu

SEQ ID NO: 86135 - RNA, 32 nt, Homo Sapiens
caccuggcacucaagcacuuugcacgaugucu

SEQ ID NO: 86136 - RNA, 32 nt, Homo Sapiens
uuuggggcauuuguaaaaaguagauuaaaaua

SEQ ID NO: 86137 - RNA, 32 nt, Homo Sapiens
aauagaaaacaaugaaaaugaugaauaaccag

SEQ ID NO: 86138 - RNA, 32 nt, Homo Sapiens
cuuuuccuuuuuacuucuggcuuauuuuaaaa

SEQ ID NO: 86139 - RNA, 32 nt, Homo Sapiens
agcaccagagccucgcaagggccccuucccuc

SEQ ID NO: 86140 - RNA, 32 nt, Homo Sapiens
ggauuguguuugugugugcauauauuugauau

SEQ ID NO: 86141 - RNA, 32 nt, Homo Sapiens
cagcgggacuggaugccuggaucucgggguaa

SEQ ID NO: 86142 - RNA, 32 nt, Homo Sapiens
cuaagaaaaaggaaaagaaaugcagauggcca

SEQ ID NO: 86143 - RNA, 32 nt, Homo Sapiens
auuuuucugucuaucaucuaucuaccaucuau

SEQ ID NO: 86144 - RNA, 32 nt, Homo Sapiens
uacagcgagggagagagauugggcucaacucu

SEQ ID NO: 86145 - RNA, 32 nt, Homo Sapiens
gguaagagcgucucgggggaguggggcaaggc

SEQ ID NO: 86146 - RNA, 32 nt, Homo Sapiens
gaggcaggcuccuggggcugagcuccuuccuc

SEQ ID NO: 86147 - RNA, 32 nt, Homo Sapiens
cuguaaaggaacaugaauguaaacuaacucag

SEQ ID NO: 86148 - RNA, 32 nt, Homo Sapiens
uaucaggcuauuauuuauuguauuaggaaaau

SEQ ID NO: 86149 - RNA, 32 nt, Homo Sapiens
caggucucagcaccacccucugugaccuaaaa

SEQ ID NO: 86150 - RNA, 32 nt, Homo Sapiens
guaacguggguucuguuuagcgaagauagacu

SEQ ID NO: 86151 - RNA, 32 nt, Homo Sapiens
auucccaggagcuucuggccugaccaucugca

SEQ ID NO: 86152 - RNA, 32 nt, Homo Sapiens
uggaucugcaguugggggcguggcggggcagg

SEQ ID NO: 86153 - RNA, 32 nt, Homo Sapiens
ugaaauaucccaugcaagagaguaguuucaag

SEQ ID NO: 86154 - RNA, 32 nt, Homo Sapiens
uucagaaaccaggcugcuuucaggaacauugc

SEQ ID NO: 86155 - RNA, 32 nt, Homo Sapiens
auccccccaagcccuagagcucccuccacucu

SEQ ID NO: 86156 - RNA, 32 nt, Homo Sapiens
aggaauucugggcucccagagagacccugagu

SEQ ID NO: 86157 - RNA, 32 nt, Homo Sapiens
ugacuuaguguaaccuaggagauuuuauaguu

SEQ ID NO: 86158 - RNA, 32 nt, Homo Sapiens
aaacagauauuuaugaaaaucuuuuugugaau

SEQ ID NO: 86159 - RNA, 32 nt, Homo Sapiens
cgcccuggugacagcucgcgcgugcugaugau

SEQ ID NO: 86160 - RNA, 32 nt, Homo Sapiens
ugagacuuggcacaacuauggugcugagaaug

SEQ ID NO: 86161 - RNA, 32 nt, Homo Sapiens
uucuuucauuguugguaagauauaaugaugaa

SEQ ID NO: 86162 - RNA, 32 nt, Homo Sapiens
cauauugccguuaggguaaaguucaaacaacu

SEQ ID NO: 86163 - RNA, 32 nt, Homo Sapiens
ugaaaccuaaaauuaucugaaguuggaagcac

SEQ ID NO: 86164 - RNA, 32 nt, Homo Sapiens
ugcuaugcauacgaaucuuucaucgccgaucc

SEQ ID NO: 86165 - RNA, 32 nt, Homo Sapiens
guaccaucagagccagucaggacucuugccgg

SEQ ID NO: 86166 - RNA, 32 nt, Homo Sapiens
aaugucagggacuuaagauuggggcucgcugg

SEQ ID NO: 86167 - RNA, 32 nt, Homo Sapiens
agcgcgggcgggcggcagcagcgacguagccc

SEQ ID NO: 86168 - RNA, 32 nt, Homo Sapiens
ugcccuggggacguccuguuuucccaccuacc

SEQ ID NO: 86169 - RNA, 32 nt, Homo Sapiens
aguacaacguuaaauuguccgauuuaugugua

SEQ ID NO: 86170 - RNA, 32 nt, Homo Sapiens
ugacuacugucaauaaucauuuaauuguacau

SEQ ID NO: 86171 - RNA, 32 nt, Homo Sapiens
gccccccuccccaaaaaaccauggaugagaaa

SEQ ID NO: 86172 - RNA, 32 nt, Homo Sapiens
ggccuccagcccagccccgguuccuccccgcu

SEQ ID NO: 86173 - RNA, 32 nt, Homo Sapiens
gccggacugggucugugguugcagcuugccaa

SEQ ID NO: 86174 - RNA, 32 nt, Homo Sapiens
caggugggggugggcugcuggccaugaaucuc

SEQ ID NO: 86175 - RNA, 30 nt, Homo Sapiens
uuugaggauaucccuuuaaaucucccaaau

SEQ ID NO: 86176 - RNA, 32 nt, Homo Sapiens
uucaaagaaacaaaaagaagaaccuguucuau

SEQ ID NO: 86177 - RNA, 32 nt, Homo Sapiens
uaaugugccaagauauuguuccugucaugcag

SEQ ID NO: 86178 - RNA, 32 nt, Homo Sapiens
cuaaaaagccccaaacagaacaccuccaugga

SEQ ID NO: 86179 - RNA, 32 nt, Homo Sapiens
aagaaugauguggcuucuuauuuuggaggagc

SEQ ID NO: 86180 - RNA, 32 nt, Homo Sapiens
uuggcuggucccuauccugccaauaguaaugg

SEQ ID NO: 86181 - RNA, 32 nt, Homo Sapiens
cagaauaauuuucaauguauuaaugaaaugaa

SEQ ID NO: 86182 - RNA, 32 nt, Homo Sapiens
uuugcuguauacuuuuaaaaaauacucugcua

SEQ ID NO: 86183 - RNA, 32 nt, Homo Sapiens
aaguaggaaggggcuccggguggcugcucugg

SEQ ID NO: 86184 - RNA, 32 nt, Homo Sapiens
cggcugccacgccccaggaccugcagcccuca

SEQ ID NO: 86185 - RNA, 32 nt, Homo Sapiens
aucacuuuaucuuuucuuccaagccccucccu

SEQ ID NO: 86186 - RNA, 32 nt, Homo Sapiens
uuuucucgcugaaagcacuaagaggugggagg

SEQ ID NO: 86187 - RNA, 32 nt, Homo Sapiens
gugaggaggaggaggaagggcaugagccgagc

SEQ ID NO: 86188 - RNA, 32 nt, Homo Sapiens
ugaagggagggacagugccuguuuuguucauu

SEQ ID NO: 86189 - RNA, 32 nt, Homo Sapiens
ggaauuggagggcauauguuaagugaaacaag

SEQ ID NO: 86190 - RNA, 32 nt, Homo Sapiens
gauuucugugcuauaaaccugauucuaaaugu

SEQ ID NO: 86191 - RNA, 32 nt, Homo Sapiens
aauuccaugaauugugcauuccauaaauucua

SEQ ID NO: 86192 - RNA, 32 nt, Homo Sapiens
gugucucacaugcuuuuucuuucaaaauuggg

SEQ ID NO: 86193 - RNA, 32 nt, Homo Sapiens
uucugagugucuauguuaacuucccucuaucc

SEQ ID NO: 86194 - RNA, 32 nt, Homo Sapiens
gaggaggggaaggacuccaugggccaucgugg

SEQ ID NO: 86195 - RNA, 32 nt, Homo Sapiens
ugucaugggucauuuuuuuuuaguuacagaag

SEQ ID NO: 86196 - RNA, 32 nt, Homo Sapiens
ucacguccugcaugucccacaccauuuuuuca

SEQ ID NO: 86197 - RNA, 32 nt, Homo Sapiens
gaaacaacccaccugaaggccaaaugccagag

SEQ ID NO: 86198 - RNA, 32 nt, Homo Sapiens
uacuuuuucuuacuuguuacuguaguguuuau

SEQ ID NO: 86199 - RNA, 32 nt, Homo Sapiens
ccuauuucauuuacaaacugaguucaaaauua

SEQ ID NO: 86200 - RNA, 32 nt, Homo Sapiens
ccuugcaaggccaccuggaggccugucuguua

SEQ ID NO: 86201 - RNA, 32 nt, Homo Sapiens
agaagggugauuaugagugguucacagcagcc

SEQ ID NO: 86202 - RNA, 32 nt, Homo Sapiens
cgauuuuauuuuuauucuuuaaauuaaggucg

SEQ ID NO: 86203 - RNA, 32 nt, Homo Sapiens
ggcagggaagauacuuauguauggaagauuau

SEQ ID NO: 86204 - RNA, 32 nt, Homo Sapiens
acaggccccuggaaaugcuaccuacguguugc

SEQ ID NO: 86205 - RNA, 32 nt, Homo Sapiens
aucaucgcucgaaaagccauggagcaacgagg

SEQ ID NO: 86206 - RNA, 30 nt, Homo Sapiens
ugaacuggcaggcgggugggugggggcugc

SEQ ID NO: 86207 - RNA, 32 nt, Homo Sapiens
agguaagacagaguuugcaaagcauuuguggc

SEQ ID NO: 86208 - RNA, 32 nt, Homo Sapiens
auuuuacauaauguauguguuguuuaagaaau

SEQ ID NO: 86209 - RNA, 32 nt, Homo Sapiens
uaaugaucagaagcggcugggcgcgguggcuc

SEQ ID NO: 86210 - RNA, 32 nt, Homo Sapiens
gacuuuugggccggggccgggcggcgggggag

SEQ ID NO: 86211 - RNA, 32 nt, Homo Sapiens
gguugaggagguggugauggugcggggcaugu

SEQ ID NO: 86212 - RNA, 32 nt, Homo Sapiens
uuccucccggcggccucugcaggcccagacug

SEQ ID NO: 86213 - RNA, 32 nt, Homo Sapiens
uuugggaaaucuuagaauaaagaacgagaaca

SEQ ID NO: 86214 - RNA, 32 nt, Homo Sapiens
uuucagucauauaaaagcuauggugagaugca

SEQ ID NO: 86215 - RNA, 32 nt, Homo Sapiens
cucucugagccucaguugucucuucuguaaaa

SEQ ID NO: 86216 - RNA, 32 nt, Homo Sapiens
ugauguucugaggauuuuuagagcuuauagua

SEQ ID NO: 86217 - RNA, 32 nt, Homo Sapiens
auaauuuguucuauuaaggcugucuaaaaugu

SEQ ID NO: 86218 - RNA, 32 nt, Homo Sapiens
uauuuuuguaaaacaauuguauguauaaucug

SEQ ID NO: 86219 - RNA, 32 nt, Homo Sapiens
cgucaggccaucagcucugucccucuggugcu

SEQ ID NO: 86220 - RNA, 32 nt, Homo Sapiens
uuggaggaaaaauuauuuuaaauaacugucaa

SEQ ID NO: 86221 - RNA, 32 nt, Homo Sapiens
ccacaugcugaaacccucacuccagugugaug

SEQ ID NO: 86222 - RNA, 32 nt, Homo Sapiens
ugccucucaaucccugucccaagccacagcua

SEQ ID NO: 86223 - RNA, 32 nt, Homo Sapiens
cuuuuaggggagaaaggagggcagauuuguaa

SEQ ID NO: 86224 - RNA, 32 nt, Homo Sapiens
ucuugccugccagcugcucccgagguggccuu

SEQ ID NO: 86225 - RNA, 32 nt, Homo Sapiens
cacauuuguggaaaaugcuauuauuaagagaa

SEQ ID NO: 86226 - RNA, 32 nt, Homo Sapiens
gggcauucuagaccucuguugggauaugguau

SEQ ID NO: 86227 - RNA, 32 nt, Homo Sapiens
ucuacucuugucauuuuuaauauuacugucuu

SEQ ID NO: 86228 - RNA, 32 nt, Homo Sapiens
cgugagcuuggacuggacccacugcugauucc

SEQ ID NO: 86229 - RNA, 32 nt, Homo Sapiens
caccugcccucccacucuuccaguccaaucca

SEQ ID NO: 86230 - RNA, 32 nt, Homo Sapiens
acaucaacaaagugggacugacucucucgaaa

SEQ ID NO: 86231 - RNA, 32 nt, Homo Sapiens
ugacuuuuggagcuuuccuucuuuuuucauuu

SEQ ID NO: 86232 - RNA, 32 nt, Homo Sapiens
gucagggauggcugcugcuugccaggugggcc

SEQ ID NO: 86233 - RNA, 32 nt, Homo Sapiens
cgcuccgcucggugucaggcgcggcggcggcg

SEQ ID NO: 86234 - RNA, 32 nt, Homo Sapiens
ccuguugggguuuguggcaucaucauccccug

SEQ ID NO: 86235 - RNA, 32 nt, Homo Sapiens
agggacaugagcauucccuauagauuaggguu

SEQ ID NO: 86236 - RNA, 32 nt, Homo Sapiens
caggcccccccaccuuuuuuuuuuguuuuugg

SEQ ID NO: 86237 - RNA, 28 nt, Homo Sapiens
uagcaguugcugcauauguguguacaga

SEQ ID NO: 86238 - RNA, 32 nt, Homo Sapiens
gccacuccacuccagucugggcgacagagcaa

SEQ ID NO: 86239 - RNA, 30 nt, Homo Sapiens
acugcaaccucugccacccauguucaagcg

SEQ ID NO: 86240 - RNA, 32 nt, Homo Sapiens
gccggaaaggacccggccucgagauggcagag

SEQ ID NO: 86241 - RNA, 32 nt, Homo Sapiens
auuauugugugggauugugcugauuuuuguug

SEQ ID NO: 86242 - RNA, 32 nt, Homo Sapiens
aagauagccacuuuucaaaaacaacgguuuca

SEQ ID NO: 86243 - RNA, 32 nt, Homo Sapiens
augaacauagaaacccuauacaugauaucacu

SEQ ID NO: 86244 - RNA, 32 nt, Homo Sapiens
ccucucaccucacucuuuuuggcacuuggacu

SEQ ID NO: 86245 - RNA, 32 nt, Homo Sapiens
uucuaccauuuucuucuuuaccaugaacaaac

SEQ ID NO: 86246 - RNA, 32 nt, Homo Sapiens
uuucucaaaaauucuccuaaaggugagggucu

SEQ ID NO: 86247 - RNA, 32 nt, Homo Sapiens
cucgguuugucaaaauuugcaaccauuuagga

SEQ ID NO: 86248 - RNA, 32 nt, Homo Sapiens
ugacacacguauacugaggggauuguacaauc

SEQ ID NO: 86249 - RNA, 32 nt, Homo Sapiens
cgcagaggagaaaaaucucugcucuugggcgc

SEQ ID NO: 86250 - RNA, 32 nt, Homo Sapiens
gggccggggggagcggggaggggguggaguga

SEQ ID NO: 86251 - RNA, 32 nt, Homo Sapiens
agcuuucuuauuuuuauuauuaaaaauguaac

SEQ ID NO: 86252 - RNA, 32 nt, Homo Sapiens
gcgccgaggggaggagagcggcccauggaccc

SEQ ID NO: 86253 - RNA, 32 nt, Homo Sapiens
cgcgggguugcugcugggcgcuuacgugcuug

SEQ ID NO: 86254 - RNA, 32 nt, Homo Sapiens
gaugggaggaggaggagaaggggggccuuggg

SEQ ID NO: 86255 - RNA, 32 nt, Homo Sapiens
gacccgacuggaauccacucuaaccaaucgca

SEQ ID NO: 86256 - RNA, 32 nt, Homo Sapiens
ccugggauauggguuuuaaauggacauugucu

SEQ ID NO: 86257 - RNA, 32 nt, Homo Sapiens
ccacagccagggcuccacggggcgcccuuguc

SEQ ID NO: 86258 - RNA, 32 nt, Homo Sapiens
uagccaaacgaugaaaacaaccccaagcuaua

SEQ ID NO: 86259 - RNA, 31 nt, Homo Sapiens
ggucggggggcgguggagaaaccuuggacuc

SEQ ID NO: 86260 - RNA, 32 nt, Homo Sapiens
aguccagauauuucacauuuugaaaggucaaa

SEQ ID NO: 86261 - RNA, 32 nt, Homo Sapiens
ucagagcugguuccgcgccgcggccgccgcga

SEQ ID NO: 86262 - RNA, 32 nt, Homo Sapiens
aaaaacccaacagugcaccccugggcaguuuu

SEQ ID NO: 86263 - RNA, 32 nt, Homo Sapiens
caugacggugacccugcacagcagccgggagc

SEQ ID NO: 86264 - RNA, 32 nt, Homo Sapiens
aaaaccucauagucauuuuucuuaauugcccu

SEQ ID NO: 86265 - RNA, 32 nt, Homo Sapiens
ggaugaggacagcugauguggcuggccugaaa

SEQ ID NO: 86266 - RNA, 32 nt, Homo Sapiens
acggccaugcuucagggucuucagguccugcc

SEQ ID NO: 86267 - RNA, 32 nt, Homo Sapiens
ucacuguuggggcaaaggaagaaggagacggg

SEQ ID NO: 86268 - RNA, 32 nt, Homo Sapiens
gacggcccagcuugcgucucuucugccugagu

SEQ ID NO: 86269 - RNA, 31 nt, Homo Sapiens
agagccugaggagccauuaugagugugggga

SEQ ID NO: 86270 - RNA, 32 nt, Homo Sapiens
uguguccagggccccagggucugcuccugcug

SEQ ID NO: 86271 - RNA, 32 nt, Homo Sapiens
gccccucggcuguuccuccccuguaggguuug

SEQ ID NO: 86272 - RNA, 32 nt, Homo Sapiens
cagaaaaaccacauuucuuuuauauacuguac

SEQ ID NO: 86273 - RNA, 32 nt, Homo Sapiens
uauuauuuugccauguuuauuaaauuuuuacu

SEQ ID NO: 86274 - RNA, 32 nt, Homo Sapiens
uacugaaugcaaaaaggaaaaaaacccacaaa

SEQ ID NO: 86275 - RNA, 32 nt, Homo Sapiens
cgucgcgcggugggcgggaguuggcggacggu

SEQ ID NO: 86276 - RNA, 32 nt, Homo Sapiens
cacaagaaaucgaccauuguacuacucucacu

SEQ ID NO: 86277 - RNA, 32 nt, Homo Sapiens
caucagcagugauggaauuugcuggaggacua

SEQ ID NO: 86278 - RNA, 32 nt, Homo Sapiens
agagacuuuguaaaaaagaaaaauguauauag

SEQ ID NO: 86279 - RNA, 29 nt, Homo Sapiens
ugcuuguugaaugagugagauguuuagaa

SEQ ID NO: 86280 - RNA, 32 nt, Homo Sapiens
gauugcuuggggugaaaaugucugugcuacug

SEQ ID NO: 86281 - RNA, 32 nt, Homo Sapiens
caugucccaagccugucaguggcccucccugg

SEQ ID NO: 86282 - RNA, 32 nt, Homo Sapiens
uccuucgucuugucacacuucucugaaaugua

SEQ ID NO: 86283 - RNA, 26 nt, Homo Sapiens
uaaauauaaaguuugcauucaguggc

SEQ ID NO: 86284 - RNA, 32 nt, Homo Sapiens
cccaaggugggccccaggaccucugggcagag

SEQ ID NO: 86285 - RNA, 32 nt, Homo Sapiens
ucacgauauuauuaguaagaaaacaucacuga

SEQ ID NO: 86286 - RNA, 30 nt, Homo Sapiens
gagcugggucugggcggcgggcaggagcug

SEQ ID NO: 86287 - RNA, 32 nt, Homo Sapiens
accuggccgcggcucggaggcucccgcgcacu

SEQ ID NO: 86288 - RNA, 27 nt, Homo Sapiens
ucagaauccggcaucagccccucccac

SEQ ID NO: 86289 - RNA, 32 nt, Homo Sapiens
agagcugcucuuccucuguggccaguugggga

SEQ ID NO: 86290 - RNA, 32 nt, Homo Sapiens
cuuggagcacauuuccucugcuucuuuuauca

SEQ ID NO: 86291 - RNA, 32 nt, Homo Sapiens
uccccacucugcaauggggugcagaagcuuau

SEQ ID NO: 86292 - RNA, 32 nt, Homo Sapiens
uaucuuccagcaugauaggauuugaccauuuu

SEQ ID NO: 86293 - RNA, 32 nt, Homo Sapiens
aucauccagguggucauaagcuaccuccucau

SEQ ID NO: 86294 - RNA, 32 nt, Homo Sapiens
caggcuccccggcccucuggcugccaaagcca

SEQ ID NO: 86295 - RNA, 32 nt, Homo Sapiens
guuugucagacggcgugggaaccacgccugaa

SEQ ID NO: 86296 - RNA, 32 nt, Homo Sapiens
ccagccccaucccauugcucccuggccccaug

SEQ ID NO: 86297 - RNA, 32 nt, Homo Sapiens
gguuuggguuuugaaauaaacaucuggaucuu

SEQ ID NO: 86298 - RNA, 32 nt, Homo Sapiens
ucuuacuuuaaaaauauuuucaucucugaaau

SEQ ID NO: 86299 - RNA, 32 nt, Homo Sapiens
auucugaacaauuuagggacucuuuuaacuug

SEQ ID NO: 86300 - RNA, 32 nt, Homo Sapiens
aaaaagagggauuuuuauccuuuacucuucua

SEQ ID NO: 86301 - RNA, 32 nt, Homo Sapiens
ccaccagccacacaggaguccugggcacccug

SEQ ID NO: 86302 - RNA, 32 nt, Homo Sapiens
uccuggccgaguuuccucugccccuucuugcu

SEQ ID NO: 86303 - RNA, 32 nt, Homo Sapiens
ggacagcgagggcaaccuccagauccaucacg

SEQ ID NO: 86304 - RNA, 32 nt, Homo Sapiens
gaauucaacauuaaagauuaauguuuauuuaa

SEQ ID NO: 86305 - RNA, 32 nt, Homo Sapiens
uugggccugaguggagaugggagacagaggca

SEQ ID NO: 86306 - RNA, 32 nt, Homo Sapiens
uuuaugccauucuccugucucagccucccgag

SEQ ID NO: 86307 - RNA, 32 nt, Homo Sapiens
uuucaagaaagaaaacuguaaauacuaguucu

SEQ ID NO: 86308 - RNA, 32 nt, Homo Sapiens
ugcaccggccagaggccaugcugcugcugcuc

SEQ ID NO: 86309 - RNA, 32 nt, Homo Sapiens
gcggggcgggcgcggggcagcugcugagggca

SEQ ID NO: 86310 - RNA, 32 nt, Homo Sapiens
cauaaauggaucuggggguuagaguggaggaa

SEQ ID NO: 86311 - RNA, 32 nt, Homo Sapiens
uaagauuuguguuuuucuuuuuccacaaggaa

SEQ ID NO: 86312 - RNA, 32 nt, Homo Sapiens
guuggggcggggggagugggcaggacuuccca

SEQ ID NO: 86313 - RNA, 32 nt, Homo Sapiens
gcuccccaggacucgauuuuagcuaaugcgcu

SEQ ID NO: 86314 - RNA, 32 nt, Homo Sapiens
ggagacugcacaaacuauccucccccagguug

SEQ ID NO: 86315 - RNA, 32 nt, Homo Sapiens
ugcugaugaagaugggcuggaaggagggcgag

SEQ ID NO: 86316 - RNA, 32 nt, Homo Sapiens
gccccgggggcugagguugcugugagccgaga

SEQ ID NO: 86317 - RNA, 32 nt, Homo Sapiens
agccaggcgcgguggcagugccuguaguccca

SEQ ID NO: 86318 - RNA, 32 nt, Homo Sapiens
cuccuccugcugaaguuucuuauuuaauucca

SEQ ID NO: 86319 - RNA, 32 nt, Homo Sapiens
gucacauugucuuugcuguuaagguuucuugg

SEQ ID NO: 86320 - RNA, 32 nt, Homo Sapiens
gcuacuuggaggaggacaacucggacgagagc

SEQ ID NO: 86321 - RNA, 32 nt, Homo Sapiens
aaugauuauuucuggaggagcaagggaacaga

SEQ ID NO: 86322 - RNA, 31 nt, Homo Sapiens
aagagucauauaucgaaaaccagucaagcau

SEQ ID NO: 86323 - RNA, 32 nt, Homo Sapiens
cacuccagagcaaaguggucuuuccauccuua

SEQ ID NO: 86324 - RNA, 32 nt, Homo Sapiens
ggccuguugcuuauuuuaaaacaucuguuuua

SEQ ID NO: 86325 - RNA, 32 nt, Homo Sapiens
ggagacagacuucgcccaggugacggguagua

SEQ ID NO: 86326 - RNA, 32 nt, Homo Sapiens
gugcgagaggggccaguguuguuguuaccuga

SEQ ID NO: 86327 - RNA, 32 nt, Homo Sapiens
uggagacugagagaagcagaggagucacacuc

SEQ ID NO: 86328 - RNA, 32 nt, Homo Sapiens
cauuuuuuaaaacuuucuaacaauauagucuu

SEQ ID NO: 86329 - RNA, 32 nt, Homo Sapiens
caggggcacgggggcugggcaccaccagugug

SEQ ID NO: 86330 - RNA, 32 nt, Homo Sapiens
ccgaccuggaccccggccggcugcgggaaaca

SEQ ID NO: 86331 - RNA, 32 nt, Homo Sapiens
gguauauuugugccugcuggagguggaauuaa

SEQ ID NO: 86332 - RNA, 32 nt, Homo Sapiens
agucaagccacauggugacuuuugaaaagagg

SEQ ID NO: 86333 - RNA, 32 nt, Homo Sapiens
uuagccgggcaugggggcgcgcaccuguaguu

SEQ ID NO: 86334 - RNA, 32 nt, Homo Sapiens
ucagauaaaaauuuuuacaaggagaagugagc

SEQ ID NO: 86335 - RNA, 32 nt, Homo Sapiens
gagccuccagcauuugcacaccacuacucacc

SEQ ID NO: 86336 - RNA, 32 nt, Homo Sapiens
cagaauggacugauuaaaauagaauggccuaa

SEQ ID NO: 86337 - RNA, 32 nt, Homo Sapiens
cgccauaguuuuacccucauuguacagaagug

SEQ ID NO: 86338 - RNA, 32 nt, Homo Sapiens
augcccgggugagugugugugcaugcacgugu

SEQ ID NO: 86339 - RNA, 32 nt, Homo Sapiens
gucucuacuaaaaauacaaacaaaauuagcug

SEQ ID NO: 86340 - RNA, 32 nt, Homo Sapiens
gcccuggagcagccaccccaugcuggccuugc

SEQ ID NO: 86341 - RNA, 32 nt, Homo Sapiens
gucgcaaucuuuguuuuaaguuucacauggcc

SEQ ID NO: 86342 - RNA, 32 nt, Homo Sapiens
uugccacaaaaauucuuuggcgauuguuacaa

SEQ ID NO: 86343 - RNA, 32 nt, Homo Sapiens
uaccugcuggagaagucgcgggccauccgcca

SEQ ID NO: 86344 - RNA, 32 nt, Homo Sapiens
ugcuagauagagacaaaauaucagugugaauu

SEQ ID NO: 86345 - RNA, 32 nt, Homo Sapiens
aaagauuguuaaguucuuucugaauuauucag

SEQ ID NO: 86346 - RNA, 32 nt, Homo Sapiens
ccacuguggaagcagagcaaucgccauggagu

SEQ ID NO: 86347 - RNA, 32 nt, Homo Sapiens
uucuaucguuggaguuuugugggagggaaccc

SEQ ID NO: 86348 - RNA, 32 nt, Homo Sapiens
ugccuaagaaaucauggcauucacacagccca

SEQ ID NO: 86349 - RNA, 32 nt, Homo Sapiens
ggcgccgacccuuccggcacccucccgccccg

SEQ ID NO: 86350 - RNA, 32 nt, Homo Sapiens
caguugaggcuguagugagcugugauugccac

SEQ ID NO: 86351 - RNA, 32 nt, Homo Sapiens
gccuguaaucccaacacuuugggaggcagaug

SEQ ID NO: 86352 - RNA, 32 nt, Homo Sapiens
guuccuggcugcgguguccgcggacuggcugg

SEQ ID NO: 86353 - RNA, 32 nt, Homo Sapiens
uauacuugaaguuuugugaacgucgcuaaaca

SEQ ID NO: 86354 - RNA, 32 nt, Homo Sapiens
ucuacagcauuaccacuguuagcaaauauuuc

SEQ ID NO: 86355 - RNA, 32 nt, Homo Sapiens
gcugccccaucccacccuacucuguguggcug

SEQ ID NO: 86356 - RNA, 32 nt, Homo Sapiens
ccccccaggcugugugcguccaggacgucgcc

SEQ ID NO: 86357 - RNA, 32 nt, Homo Sapiens
uaccaccagggccagcuaauuuuuguauguuu

SEQ ID NO: 86358 - RNA, 32 nt, Homo Sapiens
caaagguuuaaacuaccucaaaacacuuuccc

SEQ ID NO: 86359 - RNA, 32 nt, Homo Sapiens
guagaauauggacuuggaaaauucucuuaauc

SEQ ID NO: 86360 - RNA, 32 nt, Homo Sapiens
cauguuugguguucucugaccuguuccccaca

SEQ ID NO: 86361 - RNA, 32 nt, Homo Sapiens
ugugggcccacuuugguuugacacugcauaug

SEQ ID NO: 86362 - RNA, 32 nt, Homo Sapiens
ucuaccuuggugcccucuaaagaaauucugaa

SEQ ID NO: 86363 - RNA, 32 nt, Homo Sapiens
uacacucuagacgaggcuuauccaacccacgg

SEQ ID NO: 86364 - RNA, 32 nt, Homo Sapiens
ucuagaaauggcaagagugagcauccuuaugu

SEQ ID NO: 86365 - RNA, 32 nt, Homo Sapiens
ucacuggcaucuucuuuuaacuugggccaucu

SEQ ID NO: 86366 - RNA, 30 nt, Homo Sapiens
aggcccggcaggcgcgacccgggcugcgua

SEQ ID NO: 86367 - RNA, 32 nt, Homo Sapiens
ugccugagccaugugcagagcugggguccagc

SEQ ID NO: 86368 - RNA, 32 nt, Homo Sapiens
gggggccgacacccccaccucccucccggacc

SEQ ID NO: 86369 - RNA, 32 nt, Homo Sapiens
acugcagcuuugccaaggucugugauaugguu

SEQ ID NO: 86370 - RNA, 32 nt, Homo Sapiens
uguguugaaggauuauuuugcuauaaaauguc

SEQ ID NO: 86371 - RNA, 32 nt, Homo Sapiens
gcccauuccuuccuccgucccaccuccagccg

SEQ ID NO: 86372 - RNA, 32 nt, Homo Sapiens
guugguucuguaagagcaacugcucugucuag

SEQ ID NO: 86373 - RNA, 32 nt, Homo Sapiens
uuuucuuuuuauucuacuuggucagcuuuggg

SEQ ID NO: 86374 - RNA, 32 nt, Homo Sapiens
aauucaggcuucauucagcaucugagaguuca

SEQ ID NO: 86375 - RNA, 32 nt, Homo Sapiens
agaguggacaccugggguuccuagccgcauug

SEQ ID NO: 86376 - RNA, 32 nt, Homo Sapiens
guuugaccucaucucaccuggauucaaagggu

SEQ ID NO: 86377 - RNA, 32 nt, Homo Sapiens
ccaagcaccccacaccaaggacaggcuggacg

SEQ ID NO: 86378 - RNA, 32 nt, Homo Sapiens
ggacccuggaggcagagcuggagccacggcug

SEQ ID NO: 86379 - RNA, 32 nt, Homo Sapiens
aauugccuagauuccuucucucaucaacggga

SEQ ID NO: 86380 - RNA, 32 nt, Homo Sapiens
ggaggacugguuccuggacccauuccauuaaa

SEQ ID NO: 86381 - RNA, 32 nt, Homo Sapiens
agaggccccagcuguccucaucccugcccagc

SEQ ID NO: 86382 - RNA, 32 nt, Homo Sapiens
caucccugcccccaggugucuacacaccugug

SEQ ID NO: 86383 - RNA, 32 nt, Homo Sapiens
guccgagccccggccccaaguaacgccgccgc

SEQ ID NO: 86384 - RNA, 32 nt, Homo Sapiens
gccacuguugccuuuucuuacuucagagagcu

SEQ ID NO: 86385 - RNA, 32 nt, Homo Sapiens
cuuuuaaaaaucagaacagagacuuaauuuuu

SEQ ID NO: 86386 - RNA, 32 nt, Homo Sapiens
cacauagaaugcaguguguuucccuccugauc

SEQ ID NO: 86387 - RNA, 32 nt, Homo Sapiens
ccaggcucugugcuccuuccagcccuugcugg

SEQ ID NO: 86388 - RNA, 31 nt, Homo Sapiens
aagugaggaagagggcucagagccugacucu

SEQ ID NO: 86389 - RNA, 32 nt, Homo Sapiens
agagugaauauguuaagcuuugaugagauucu

SEQ ID NO: 86390 - RNA, 32 nt, Homo Sapiens
gaggaaggggcaugugcuggacgcggacacau

SEQ ID NO: 86391 - RNA, 31 nt, Homo Sapiens
cgagcggcccuacaccugccccgagugcggc

SEQ ID NO: 86392 - RNA, 32 nt, Homo Sapiens
ugggaucccucauggagcuaaggucagcuguu

SEQ ID NO: 86393 - RNA, 32 nt, Homo Sapiens
uagcgccuuuuuaaaauaaauaaaauaaaaua

SEQ ID NO: 86394 - RNA, 32 nt, Homo Sapiens
uugaggucaggaguuggagaccagucuggcca

SEQ ID NO: 86395 - RNA, 32 nt, Homo Sapiens
cugaggucaggaguucgagaccacccuggcca

SEQ ID NO: 86396 - RNA, 32 nt, Homo Sapiens
augcuaaucucacccuuuucugggcuggcauu

SEQ ID NO: 86397 - RNA, 32 nt, Homo Sapiens
cccuccugugaggccauuccagugucuucuag

SEQ ID NO: 86398 - RNA, 32 nt, Homo Sapiens
ccagggaaggccgggggcgcccgccggcccua

SEQ ID NO: 86399 - RNA, 32 nt, Homo Sapiens
aaaaggaaaaauuuagcuaacacagggguuac

SEQ ID NO: 86400 - RNA, 32 nt, Homo Sapiens
guagcuauguguuaaacagaggugauggcagc

SEQ ID NO: 86401 - RNA, 32 nt, Homo Sapiens
uaaaguccaaaaagaaguuaucuuucaauauu

SEQ ID NO: 86402 - RNA, 30 nt, Homo Sapiens
cuacaguauuacucuuacaagaguggacuc

SEQ ID NO: 86403 - RNA, 32 nt, Homo Sapiens
aaagcagagucuuauuauaauaaaauaauagu

SEQ ID NO: 86404 - RNA, 32 nt, Homo Sapiens
auagaaagggaagaaaaguaaaaguugcuuua

SEQ ID NO: 86405 - RNA, 32 nt, Homo Sapiens
uguuuccauuuucuuuggcuuugugcaauuuu

SEQ ID NO: 86406 - RNA, 32 nt, Homo Sapiens
cugaaauuaugacaccauggaaagaaaacauu

SEQ ID NO: 86407 - RNA, 32 nt, Homo Sapiens
ggcgcuuuacggggcguccucugcgccauuca

SEQ ID NO: 86408 - RNA, 32 nt, Homo Sapiens
aguaggcggcccggggccacaccgcggccgcc

SEQ ID NO: 86409 - RNA, 32 nt, Homo Sapiens
gagaggaggaagauugagcuggggcaacagcc

SEQ ID NO: 86410 - RNA, 32 nt, Homo Sapiens
auaauuuugucaaccaauacagaacaugagcc

SEQ ID NO: 86411 - RNA, 32 nt, Homo Sapiens
cuccacccacagccucacggguccaggacuug

SEQ ID NO: 86412 - RNA, 31 nt, Homo Sapiens
acacccuuuacuggccggccccgcgcugcuc

SEQ ID NO: 86413 - RNA, 32 nt, Homo Sapiens
caccguggcucaauuugcaugggcaacaggag

SEQ ID NO: 86414 - RNA, 32 nt, Homo Sapiens
uagcuccaaaggcuaucucuucauauugacug

SEQ ID NO: 86415 - RNA, 32 nt, Homo Sapiens
ugacggggaggguggaacaggucccggaggag

SEQ ID NO: 86416 - RNA, 32 nt, Homo Sapiens
gagguuccuuccaggggcuggcacugaagcaa

SEQ ID NO: 86417 - RNA, 32 nt, Homo Sapiens
ggcuccuugauggccuggccacaggggcagcu

SEQ ID NO: 86418 - RNA, 32 nt, Homo Sapiens
ggggaagugaguugaccagagaaggaugagag

SEQ ID NO: 86419 - RNA, 32 nt, Homo Sapiens
uuuacauagauucccuuaauuuucucaauaau

SEQ ID NO: 86420 - RNA, 32 nt, Homo Sapiens
gcugcgguccagcccaggacuucgaaccucgc

SEQ ID NO: 86421 - RNA, 32 nt, Homo Sapiens
gagcacucugggcguuaacuuccacugucucc

SEQ ID NO: 86422 - RNA, 32 nt, Homo Sapiens
uauuuaccuuuuaagacauuuucaugcuucca

SEQ ID NO: 86423 - RNA, 32 nt, Homo Sapiens
caagcagaagugaagagaaaagaggaggacug

SEQ ID NO: 86424 - RNA, 32 nt, Homo Sapiens
agacuuuaucccauacaugaaauuaucagacu

SEQ ID NO: 86425 - RNA, 31 nt, Homo Sapiens
ggcggcaugcuccugcuaggaguccagaugg

SEQ ID NO: 86426 - RNA, 32 nt, Homo Sapiens
cugaagacagcuuuuucugagacacagcugcc

SEQ ID NO: 86427 - RNA, 32 nt, Homo Sapiens
aauaagugacagagccacucgaaucccaggcu

SEQ ID NO: 86428 - RNA, 32 nt, Homo Sapiens
acuuuugugucugacgagaaugaugccaaaau

SEQ ID NO: 86429 - RNA, 32 nt, Homo Sapiens
caauuucaucugcuuucuauguuucauuguua

SEQ ID NO: 86430 - RNA, 32 nt, Homo Sapiens
gagggauuccaugcugccuucuccggacucug

SEQ ID NO: 86431 - RNA, 32 nt, Homo Sapiens
aauggucaggacuuuaauggaggaggugaggu

SEQ ID NO: 86432 - RNA, 32 nt, Homo Sapiens
cgcgcgccgagggagccccguccccggucgug

SEQ ID NO: 86433 - RNA, 32 nt, Homo Sapiens
cggucccgccgccuccggggccuccugggacc

SEQ ID NO: 86434 - RNA, 32 nt, Homo Sapiens
cuugguugccagcagaauggaauuugccagca

SEQ ID NO: 86435 - RNA, 32 nt, Homo Sapiens
acucugaaaaggucuaaaaaccacugcuucac

SEQ ID NO: 86436 - RNA, 32 nt, Homo Sapiens
aucagaacacaaggccuccagagggaugccaa

SEQ ID NO: 86437 - RNA, 32 nt, Homo Sapiens
gguucuguucacugcugaaauauucuaaauaa

SEQ ID NO: 86438 - RNA, 32 nt, Homo Sapiens
ggcugggcgagguggcucacgccuguaaucca

SEQ ID NO: 86439 - RNA, 32 nt, Homo Sapiens
gagcagucagaccgagcuuucugcuaacaugg

SEQ ID NO: 86440 - RNA, 32 nt, Homo Sapiens
ccuuccccagcaugauuuguaacggcugcacg

SEQ ID NO: 86441 - RNA, 32 nt, Homo Sapiens
ugcauuuuuaaaugaauggcuuuuacagauag

SEQ ID NO: 86442 - RNA, 32 nt, Homo Sapiens
gagcuugcagugagccgagauggcgccauugc

SEQ ID NO: 86443 - RNA, 32 nt, Homo Sapiens
gggcagggcuggggucccggcgcugagcgccc

SEQ ID NO: 86444 - RNA, 32 nt, Homo Sapiens
cugcaggugucugcuggcuuccugcucucccu

SEQ ID NO: 86445 - RNA, 32 nt, Homo Sapiens
ugaaagcuccgucuucugaauucaucucuaca

SEQ ID NO: 86446 - RNA, 32 nt, Homo Sapiens
augagauguauuaaaauaaacaugguauaccu

SEQ ID NO: 86447 - RNA, 32 nt, Homo Sapiens
cuggccagugaggugagagagcuuacacaggg

SEQ ID NO: 86448 - RNA, 32 nt, Homo Sapiens
gucuucauccugccucaugacucccauagacu

SEQ ID NO: 86449 - RNA, 32 nt, Homo Sapiens
uuauucuacuuugaacaaauaguaauuuuacc

SEQ ID NO: 86450 - RNA, 32 nt, Homo Sapiens
aucagcuuucccuggcucagggaucuucuccc

SEQ ID NO: 86451 - RNA, 32 nt, Homo Sapiens
guuggaucacugggcugacauggagaaggcug

SEQ ID NO: 86452 - RNA, 32 nt, Homo Sapiens
caucccagguguugggcggggggaggguugug

SEQ ID NO: 86453 - RNA, 32 nt, Homo Sapiens
ucacacugcucuggaaggggccccucagcugg

SEQ ID NO: 86454 - RNA, 32 nt, Homo Sapiens
ugggagccugggaggagaaggagccgggaggg

SEQ ID NO: 86455 - RNA, 32 nt, Homo Sapiens
gaugguuuucuuccuuauuaacaguugguguu

SEQ ID NO: 86456 - RNA, 32 nt, Homo Sapiens
ucuacuauguguguauuaaaauauauaaugug

SEQ ID NO: 86457 - RNA, 32 nt, Homo Sapiens
ggccugaugucaauuucauauuucauucuuua

SEQ ID NO: 86458 - RNA, 32 nt, Homo Sapiens
ccugcugagauuacagguguaagccaccauac

SEQ ID NO: 86459 - RNA, 32 nt, Homo Sapiens
cgugaggccucccagcagugccgcagcguuuc

SEQ ID NO: 86460 - RNA, 32 nt, Homo Sapiens
ggcuuuucagaauucagaauauggagaugaca

SEQ ID NO: 86461 - RNA, 32 nt, Homo Sapiens
uaaagcacauguuuaaagauaauuauuagauu

SEQ ID NO: 86462 - RNA, 32 nt, Homo Sapiens
uguuuggcauuuggggugacagggagugaccc

SEQ ID NO: 86463 - RNA, 32 nt, Homo Sapiens
agcggcccugucauccagcucacucaucaaug

SEQ ID NO: 86464 - RNA, 32 nt, Homo Sapiens
gucaucccaucccggcagacccuuaucguugg

SEQ ID NO: 86465 - RNA, 32 nt, Homo Sapiens
uacaggugaagacaccaagaguagaaagauua

SEQ ID NO: 86466 - RNA, 32 nt, Homo Sapiens
aaugugcaauuagaaaaauuuuauaugggcug

SEQ ID NO: 86467 - RNA, 32 nt, Homo Sapiens
ucuguugcacuuuaguuuucuaccugcauaug

SEQ ID NO: 86468 - RNA, 32 nt, Homo Sapiens
ugccuuccuucccccauuauuucccacaggcc

SEQ ID NO: 86469 - RNA, 32 nt, Homo Sapiens
auuuacaguuuaguaaaaggcuuaaaauuacu

SEQ ID NO: 86470 - RNA, 32 nt, Homo Sapiens
agcuccccacuggcugcccccacaggggcuuu

SEQ ID NO: 86471 - RNA, 32 nt, Homo Sapiens
uucauacuucugucacuuuuuccauuggaaga

SEQ ID NO: 86472 - RNA, 32 nt, Homo Sapiens
gacagagucuggcucugucacccaggcugaag

SEQ ID NO: 86473 - RNA, 32 nt, Homo Sapiens
gcagccgucaccccugccucccgcccccuugg

SEQ ID NO: 86474 - RNA, 32 nt, Homo Sapiens
guacuuuuuaucaagaccugcauuuugagugu

SEQ ID NO: 86475 - RNA, 32 nt, Homo Sapiens
auggucaauuuaauaauauuuuggggcauuuc

SEQ ID NO: 86476 - RNA, 32 nt, Homo Sapiens
guuggauugacauaguucuugcugacauguuu

SEQ ID NO: 86477 - RNA, 31 nt, Homo Sapiens
uuuguauauaacacuuucagagccuucccac

SEQ ID NO: 86478 - RNA, 32 nt, Homo Sapiens
agugcugcaauaaacguacauguacauuuguc

SEQ ID NO: 86479 - RNA, 32 nt, Homo Sapiens
agucagagagagaauggaagauaccaugcuuc

SEQ ID NO: 86480 - RNA, 32 nt, Homo Sapiens
uagccuggacagcagagcaagacuccaucucg

SEQ ID NO: 86481 - RNA, 32 nt, Homo Sapiens
cugcuagauuucuuauuuuucaccuuacccau

SEQ ID NO: 86482 - RNA, 32 nt, Homo Sapiens
aggcacccgcaugaggggcuggcuccuccccg

SEQ ID NO: 86483 - RNA, 32 nt, Homo Sapiens
uccuuuuguuuccauuaguuuucuuucgucuu

SEQ ID NO: 86484 - RNA, 32 nt, Homo Sapiens
cuugccauauacuuugugauaaauccuuaucu

SEQ ID NO: 86485 - RNA, 32 nt, Homo Sapiens
gggaaaaaucuaaaaugugugccagaugcccu

SEQ ID NO: 86486 - RNA, 32 nt, Homo Sapiens
cuccgcucgccugcccccacgccgcccgccac

SEQ ID NO: 86487 - RNA, 32 nt, Homo Sapiens
gacccuccgagccagcucuucuuggaucccuc

SEQ ID NO: 86488 - RNA, 32 nt, Homo Sapiens
cgcccccgccuucuccgguccccuccucggag

SEQ ID NO: 86489 - RNA, 32 nt, Homo Sapiens
uuccuaaagggagaugugacugaugcugcaag

SEQ ID NO: 86490 - RNA, 32 nt, Homo Sapiens
cgcugcuguagguggugagcucacugucaucg

SEQ ID NO: 86491 - RNA, 32 nt, Homo Sapiens
ccucaugcugaauuguaauuuucucuuaccug

SEQ ID NO: 86492 - RNA, 32 nt, Homo Sapiens
aauauguuuccucagcuggaugacgaggccac

SEQ ID NO: 86493 - RNA, 32 nt, Homo Sapiens
uucuguuucaaaauaauuaccugguuaaaacc

SEQ ID NO: 86494 - RNA, 32 nt, Homo Sapiens
cagagaaaaaaauuauuggcaaaucaacacau

SEQ ID NO: 86495 - RNA, 32 nt, Homo Sapiens
agaggaggaaacugaggcucaaagagucccac

SEQ ID NO: 86496 - RNA, 32 nt, Homo Sapiens
ucuagguacuucauuuuuuuuauccuauuaua

SEQ ID NO: 86497 - RNA, 32 nt, Homo Sapiens
uuugcauguauuucucauuucauuuuagggau

SEQ ID NO: 86498 - RNA, 32 nt, Homo Sapiens
guguuagucugcuggggaaugggauaaagcag

SEQ ID NO: 86499 - RNA, 32 nt, Homo Sapiens
agccuggagguagggggcugucuuggucacug

SEQ ID NO: 86500 - RNA, 32 nt, Homo Sapiens
gcaaucagauacuuuagauaauaaagaagcug

SEQ ID NO: 86501 - RNA, 32 nt, Homo Sapiens
guuccucccucccacacucgccaucuccuggg

SEQ ID NO: 86502 - RNA, 32 nt, Homo Sapiens
cuccacgugcgcgacugcgaggcuggacgcua

SEQ ID NO: 86503 - RNA, 32 nt, Homo Sapiens
aguacuaucuauugguaauggaugcauauaug

SEQ ID NO: 86504 - RNA, 32 nt, Homo Sapiens
acuucucaguuuuauugggggugucuaaauuu

SEQ ID NO: 86505 - RNA, 32 nt, Homo Sapiens
aagacauuaagacucaacaacaauaucacaga

SEQ ID NO: 86506 - RNA, 32 nt, Homo Sapiens
ccaaggaggugacaccugugguaaucuguacu

SEQ ID NO: 86507 - RNA, 32 nt, Homo Sapiens
uguggcuagaaccugaugugguguuuaaaaga

SEQ ID NO: 86508 - RNA, 32 nt, Homo Sapiens
cgccgccaugacgcugcgcgcggccgucuucg

SEQ ID NO: 86509 - RNA, 32 nt, Homo Sapiens
ggaugggcugggcaccaccugggggcggagcg

SEQ ID NO: 86510 - RNA, 32 nt, Homo Sapiens
agacaguugcauagauuuuaauuuauacauau

SEQ ID NO: 86511 - RNA, 32 nt, Homo Sapiens
cagcgcgauguucccgcagagccggcacccga

SEQ ID NO: 86512 - RNA, 32 nt, Homo Sapiens
agaugagaauuugaaacaagaaacagaguguu

SEQ ID NO: 86513 - RNA, 32 nt, Homo Sapiens
ugugagccacuacacccagcccugcagucccu

SEQ ID NO: 86514 - RNA, 32 nt, Homo Sapiens
gaacguugaguacacaugagugcguguaugcc

SEQ ID NO: 86515 - RNA, 32 nt, Homo Sapiens
gaaacuaggcccugggguuuucccugagcagg

SEQ ID NO: 86516 - RNA, 32 nt, Homo Sapiens
ucuguguacuguccuuuuuuuguucugggccu

SEQ ID NO: 86517 - RNA, 32 nt, Homo Sapiens
ccugaggggccucuuaugggcuggguucuacc

SEQ ID NO: 86518 - RNA, 32 nt, Homo Sapiens
ccuucuucaacacauguuaauaguguuuucuc

SEQ ID NO: 86519 - RNA, 32 nt, Homo Sapiens
uguugcuugagcuuuuggugacugcuaugguu

SEQ ID NO: 86520 - RNA, 32 nt, Homo Sapiens
aacauaauggauuaacaucucuaguaaucucu

SEQ ID NO: 86521 - RNA, 32 nt, Homo Sapiens
agcccccaguguggguucugcacccuggaaau

SEQ ID NO: 86522 - RNA, 32 nt, Homo Sapiens
ugaacagcggcuggacuuggagguagcuuuga

SEQ ID NO: 86523 - RNA, 32 nt, Homo Sapiens
cgccccgcccugaguacuccuaucuuguuucu

SEQ ID NO: 86524 - RNA, 32 nt, Homo Sapiens
uuggaccucuggcaggcucaccagugauugcu

SEQ ID NO: 86525 - RNA, 32 nt, Homo Sapiens
cuugacaguccaggaggcgccuggugcauccc

SEQ ID NO: 86526 - RNA, 32 nt, Homo Sapiens
ucgaggcgaccgcgacaguggugggggacgcu

SEQ ID NO: 86527 - RNA, 32 nt, Homo Sapiens
cacacagcaaaggggacuuugcagguggaauu

SEQ ID NO: 86528 - RNA, 32 nt, Homo Sapiens
acccagggugcgcugcguccucaugguacugu

SEQ ID NO: 86529 - RNA, 32 nt, Homo Sapiens
acagaccucagccccaguuuucuccuccucac

SEQ ID NO: 86530 - RNA, 32 nt, Homo Sapiens
uuuguugcuucuuucagugagguguuucugug

SEQ ID NO: 86531 - RNA, 32 nt, Homo Sapiens
cuaaccuaaaagacagcagggacaagauacau

SEQ ID NO: 86532 - RNA, 32 nt, Homo Sapiens
accucccuccaugccccaugaccuccuucaac

SEQ ID NO: 86533 - RNA, 32 nt, Homo Sapiens
agcuaaaaguuuauuauuuuaauccuauuuaa

SEQ ID NO: 86534 - RNA, 32 nt, Homo Sapiens
uccaccgucauccccgagacgcaacugcaggc

SEQ ID NO: 86535 - RNA, 32 nt, Homo Sapiens
cagaagccaauguuuggagauuugcacaaccu

SEQ ID NO: 86536 - RNA, 32 nt, Homo Sapiens
gugacauagcuuccucauuuuauuuuucugaa

SEQ ID NO: 86537 - RNA, 32 nt, Homo Sapiens
uuuaaauauaauucuguaaaugugaaaaaaaa

SEQ ID NO: 86538 - RNA, 32 nt, Homo Sapiens
acugaagcugaacagcagcagcagcuccucau

SEQ ID NO: 86539 - RNA, 32 nt, Homo Sapiens
aaaaggcaucuucaugguccagggaauaugua

SEQ ID NO: 86540 - RNA, 32 nt, Homo Sapiens
cuuuuguuaugaaauugcugaaauguuucuuu

SEQ ID NO: 86541 - RNA, 32 nt, Homo Sapiens
uuccgcgaagguuaaccuuggcugacuuggcu

SEQ ID NO: 86542 - RNA, 28 nt, Homo Sapiens
ggggagcggcggccgcgaggagguuaug

SEQ ID NO: 86543 - RNA, 32 nt, Homo Sapiens
ucugagcuucacauuccuagaccuccagaggu

SEQ ID NO: 86544 - RNA, 32 nt, Homo Sapiens
agcauaauuuaaaaaaucaguguuuuuaggau

SEQ ID NO: 86545 - RNA, 32 nt, Homo Sapiens
ggaagaauaaaauaaacguguaagcaaaauuu

SEQ ID NO: 86546 - RNA, 31 nt, Homo Sapiens
cugaggccucagacuagccaggcaagagccg

SEQ ID NO: 86547 - RNA, 31 nt, Homo Sapiens
gcagcgagggcggagccggccccaggugcuc

SEQ ID NO: 86548 - RNA, 32 nt, Homo Sapiens
ggaggaucucgaagagaagagaaggucguugc

SEQ ID NO: 86549 - RNA, 32 nt, Homo Sapiens
aggguggaauccacacagagcgcauucccagg

SEQ ID NO: 86550 - RNA, 32 nt, Homo Sapiens
acuuacagaaaaguaaugagacauagauaaaa

SEQ ID NO: 86551 - RNA, 32 nt, Homo Sapiens
gggugagcgcggggcugcugggugacccggcu

SEQ ID NO: 86552 - RNA, 32 nt, Homo Sapiens
ggagagaaagcaguggcuuucagacacaccaa

SEQ ID NO: 86553 - RNA, 32 nt, Homo Sapiens
gauuuuuauagcauccuuuuuaauuaaaggug

SEQ ID NO: 86554 - RNA, 32 nt, Homo Sapiens
ugugggggaaagggugguuucuugcuggauuu

SEQ ID NO: 86555 - RNA, 31 nt, Homo Sapiens
cuguguggggaccccauuccccaguuaaagu

SEQ ID NO: 86556 - RNA, 32 nt, Homo Sapiens
guugguucuuaccaagacuuaagaucaugaaa

SEQ ID NO: 86557 - RNA, 29 nt, Homo Sapiens
aauauuuagaggcaauauuuucuacuugc

SEQ ID NO: 86558 - RNA, 32 nt, Homo Sapiens
uagggaccagcgguugugaccaucuuuccuga

SEQ ID NO: 86559 - RNA, 32 nt, Homo Sapiens
ucugcaggccucuuugcucuccccucuugccu

SEQ ID NO: 86560 - RNA, 32 nt, Homo Sapiens
ccgcaugguggagcggagccugcgcagcgagc

SEQ ID NO: 86561 - RNA, 32 nt, Homo Sapiens
uggaacuuagagacuccuguugccagaaucag

SEQ ID NO: 86562 - RNA, 30 nt, Homo Sapiens
guccgcccauggccgccgccgggcagcugu

SEQ ID NO: 86563 - RNA, 32 nt, Homo Sapiens
gagugggagugagcagcagagaaggcuuguau

SEQ ID NO: 86564 - RNA, 32 nt, Homo Sapiens
gcucugccugaagggagguggaauaacggugc

SEQ ID NO: 86565 - RNA, 32 nt, Homo Sapiens
ccccagugccucuccuggcccugaaggugcca

SEQ ID NO: 86566 - RNA, 32 nt, Homo Sapiens
gaugaaaguuggcauacaaauaggauacuauc

SEQ ID NO: 86567 - RNA, 32 nt, Homo Sapiens
aaggagauauugugggguccguuuaacucgau

SEQ ID NO: 86568 - RNA, 32 nt, Homo Sapiens
aagugacaacaggaggaaauagacuuagacga

SEQ ID NO: 86569 - RNA, 32 nt, Homo Sapiens
ugugcuuuauggacacaaaaccagagcacuug

SEQ ID NO: 86570 - RNA, 32 nt, Homo Sapiens
acagggcaucuggccuggugucugcacauagu

SEQ ID NO: 86571 - RNA, 31 nt, Homo Sapiens
ggaagugacucgugugguaguggauuucuag

SEQ ID NO: 86572 - RNA, 32 nt, Homo Sapiens
uguugccgcccggcccuucccuccacagcucu

SEQ ID NO: 86573 - RNA, 32 nt, Homo Sapiens
uacaaauggaaauguuaccuuugauuuucuua

SEQ ID NO: 86574 - RNA, 32 nt, Homo Sapiens
aucucuaguaagaucugacauaugcugaaguu

SEQ ID NO: 86575 - RNA, 32 nt, Homo Sapiens
ucaacgccagcuuucugugcuucugccuguca

SEQ ID NO: 86576 - RNA, 32 nt, Homo Sapiens
uggcugccuuccaccccuuguaccucagucua

SEQ ID NO: 86577 - RNA, 32 nt, Homo Sapiens
ggcugcgcgacggcgcaggggcugcggggagc

SEQ ID NO: 86578 - RNA, 32 nt, Homo Sapiens
acauuuucuaaugugcagaaauguuccaaaag

SEQ ID NO: 86579 - RNA, 32 nt, Homo Sapiens
auaaugcucugcccucccucccccgaaguucu

SEQ ID NO: 86580 - RNA, 32 nt, Homo Sapiens
uuuucacaaguuuuugagacacuggauuucuu

SEQ ID NO: 86581 - RNA, 32 nt, Homo Sapiens
gcauuuuuacagcacacacuuccauaugucau

SEQ ID NO: 86582 - RNA, 32 nt, Homo Sapiens
uucaacuuuuucugcacacacgagguauuuua

SEQ ID NO: 86583 - RNA, 32 nt, Homo Sapiens
ugccuuuauuuuuuauucuuuucuaaggaaaa

SEQ ID NO: 86584 - RNA, 32 nt, Homo Sapiens
cgacagucggaaggcgcgaggggagggguccu

SEQ ID NO: 86585 - RNA, 32 nt, Homo Sapiens
aggagccgggagagccgagugggaggggccgc

SEQ ID NO: 86586 - RNA, 32 nt, Homo Sapiens
acugcgguaguguuuuccuucuuuccuuggga

SEQ ID NO: 86587 - RNA, 32 nt, Homo Sapiens
ucuuuuuuuuuuuuuuuuuuuaguuguugaga

SEQ ID NO: 86588 - RNA, 32 nt, Homo Sapiens
augagaggucuguugggaauaaagguuuuucu

SEQ ID NO: 86589 - RNA, 32 nt, Homo Sapiens
aaauuggcaucugguaauguacauugugaggu

SEQ ID NO: 86590 - RNA, 32 nt, Homo Sapiens
gcucuucaggccucccucucucuucugcucca

SEQ ID NO: 86591 - RNA, 32 nt, Homo Sapiens
gaggauaacaacagagugucagauaugucguc

SEQ ID NO: 86592 - RNA, 32 nt, Homo Sapiens
ugcugcaucuuauagcacuuugaaauaccuca

SEQ ID NO: 86593 - RNA, 32 nt, Homo Sapiens
cucaaauacuaaaggauuaucugcaaggaguu

SEQ ID NO: 86594 - RNA, 32 nt, Homo Sapiens
accuuuguuuuugucuuauguugggguaaagg

SEQ ID NO: 86595 - RNA, 32 nt, Homo Sapiens
uuauuuggaaaacuuuccaauauuccuguuac

SEQ ID NO: 86596 - RNA, 32 nt, Homo Sapiens
agcaggaugugucacuaugcuccaccucaccc

SEQ ID NO: 86597 - RNA, 32 nt, Homo Sapiens
cugcccgccucccacccgccucuccugccguc

SEQ ID NO: 86598 - RNA, 32 nt, Homo Sapiens
uugacccagcgggggaggagcugcagaccuuc

SEQ ID NO: 86599 - RNA, 32 nt, Homo Sapiens
uuuaucccauucucuguuacuugacucagugc

SEQ ID NO: 86600 - RNA, 32 nt, Homo Sapiens
gcugacucagggugggcccugcaugugaugac

SEQ ID NO: 86601 - RNA, 32 nt, Homo Sapiens
uucagaaacguaauucuuacauugugauugca

SEQ ID NO: 86602 - RNA, 32 nt, Homo Sapiens
uugucaaaaaucaauguuuugacauccacaga

SEQ ID NO: 86603 - RNA, 32 nt, Homo Sapiens
accuuguuguuguuaaauaucaguagaaacuc

SEQ ID NO: 86604 - RNA, 32 nt, Homo Sapiens
ccagacaggacucguggagacauccaggugcu

SEQ ID NO: 86605 - RNA, 32 nt, Homo Sapiens
uucgaaacaaaguaauaugaaaauauuuaaac

SEQ ID NO: 86606 - RNA, 32 nt, Homo Sapiens
ugcagggaaaagacaaauccucaaagcgugga

SEQ ID NO: 86607 - RNA, 32 nt, Homo Sapiens
uaccccgucccuuucccugcaucccuuggccc

SEQ ID NO: 86608 - RNA, 27 nt, Homo Sapiens
gcagcucccuucuuccuucccucugug

SEQ ID NO: 86609 - RNA, 32 nt, Homo Sapiens
gcguuugggcuuggugugcagcagccaggggg

SEQ ID NO: 86610 - RNA, 32 nt, Homo Sapiens
cugcggccgccgcgggcuccgcgggcgguauc

SEQ ID NO: 86611 - RNA, 32 nt, Homo Sapiens
aaccaggagcagaugacaguaaaauuucagug

SEQ ID NO: 86612 - RNA, 32 nt, Homo Sapiens
aagugagauugugcaugacauacuucuccuuu

SEQ ID NO: 86613 - RNA, 32 nt, Homo Sapiens
ccagugcacuccuuaucaauagugagggccgc

SEQ ID NO: 86614 - RNA, 32 nt, Homo Sapiens
ccugcccucugcaaggcgaagcggugggugcg

SEQ ID NO: 86615 - RNA, 32 nt, Homo Sapiens
gguagcuggcugcuugucuccaaacagcaacg

SEQ ID NO: 86616 - RNA, 32 nt, Homo Sapiens
gacaccugccagcagcccuuugcuaucugcgc

SEQ ID NO: 86617 - RNA, 32 nt, Homo Sapiens
cucgccggggacccggccauggcgcuggacuu

SEQ ID NO: 86618 - RNA, 32 nt, Homo Sapiens
ggcugcagugagcagagcgugccgcuacacuc

SEQ ID NO: 86619 - RNA, 32 nt, Homo Sapiens
gcggccgggaccccgcgcccaccgcgucugga

SEQ ID NO: 86620 - RNA, 32 nt, Homo Sapiens
cuuuuguguaagucacuggucagaauccucac

SEQ ID NO: 86621 - RNA, 32 nt, Homo Sapiens
ugcaaaagaccucaaucucauuacuguaauau

SEQ ID NO: 86622 - RNA, 32 nt, Homo Sapiens
aaugaagaaaauaaauugauuacuggcauugg

SEQ ID NO: 86623 - RNA, 32 nt, Homo Sapiens
uccacagaaugagagucauauguuguuauauu

SEQ ID NO: 86624 - RNA, 32 nt, Homo Sapiens
acuggcccuuccagagacagugccaaccagac

SEQ ID NO: 86625 - RNA, 32 nt, Homo Sapiens
uauucaguaugcauauuugacuucugaaauua

SEQ ID NO: 86626 - RNA, 32 nt, Homo Sapiens
ucauauucacuuuaaaugucuuuuuauuaugu

SEQ ID NO: 86627 - RNA, 32 nt, Homo Sapiens
gcugggcgcgguggcucacaccuauaauccca

SEQ ID NO: 86628 - RNA, 30 nt, Homo Sapiens
ugugucaauaaagucauuaauuuuaaacau

SEQ ID NO: 86629 - RNA, 32 nt, Homo Sapiens
cuagguuaagaaggaagagucuguggauggaa

SEQ ID NO: 86630 - RNA, 32 nt, Homo Sapiens
uccuacgauggcauggcugcuaaugccagcag

SEQ ID NO: 86631 - RNA, 31 nt, Homo Sapiens
guccagugaaacacccucggcugggaaguca

SEQ ID NO: 86632 - RNA, 32 nt, Homo Sapiens
cacaaauguacaaaaugcacaagacugauuuc

SEQ ID NO: 86633 - RNA, 32 nt, Homo Sapiens
aucucugaucccaguagguaccucugaauaua

SEQ ID NO: 86634 - RNA, 32 nt, Homo Sapiens
gaugagaaaauugagagcuauuauuaagaaaa

SEQ ID NO: 86635 - RNA, 32 nt, Homo Sapiens
guuccgaccuggaagcguuaaacugcugcaug

SEQ ID NO: 86636 - RNA, 32 nt, Homo Sapiens
cuagggaaauggugcugcuguucuuuuuaauu

SEQ ID NO: 86637 - RNA, 32 nt, Homo Sapiens
ggauguuuuacuacagaucuggauggcuauuc

SEQ ID NO: 86638 - RNA, 32 nt, Homo Sapiens
ccaaggaccagguuauuuuaaaaagauuuguu

SEQ ID NO: 86639 - RNA, 32 nt, Homo Sapiens
aaaauucucuauauauuuauuguguacaaugu

SEQ ID NO: 86640 - RNA, 32 nt, Homo Sapiens
augguaugcuacaaaaacaggcacauagacca

SEQ ID NO: 86641 - RNA, 32 nt, Homo Sapiens
gagggguagugggauggugggguaccagccac

SEQ ID NO: 86642 - RNA, 32 nt, Homo Sapiens
uuaaugaaaagcgucuguguugccaggucagg

SEQ ID NO: 86643 - RNA, 32 nt, Homo Sapiens
aggccacccccggccccggccccagcguucuc

SEQ ID NO: 86644 - RNA, 32 nt, Homo Sapiens
ucucccugucuccuguuccccuucccaguuaa

SEQ ID NO: 86645 - RNA, 32 nt, Homo Sapiens
agaaauuuuuaaaaagggauucuaguagugaa

SEQ ID NO: 86646 - RNA, 32 nt, Homo Sapiens
cuugacgcauuuuacagacggcacauaggguc

SEQ ID NO: 86647 - RNA, 32 nt, Homo Sapiens
guacccaugacaaagacagagucuuaaagagg

SEQ ID NO: 86648 - RNA, 32 nt, Homo Sapiens
uuuugaguauuuuuaaaaaauaugucguagaa

SEQ ID NO: 86649 - RNA, 32 nt, Homo Sapiens
aauuuuuauuuucagaaccauuuuacagauuu

SEQ ID NO: 86650 - RNA, 32 nt, Homo Sapiens
auaaggcagcccucauuagacaucaaaucuga

SEQ ID NO: 86651 - RNA, 32 nt, Homo Sapiens
cuagggaggagcuaagcaggcccggcaguugg

SEQ ID NO: 86652 - RNA, 32 nt, Homo Sapiens
gagcaaguccccauuacuaaaaaacccaaaag

SEQ ID NO: 86653 - RNA, 32 nt, Homo Sapiens
guccaccgcucccggcccgcuccgcccagagu

SEQ ID NO: 86654 - RNA, 32 nt, Homo Sapiens
ucugaguuguuuuagaaaauuagcgcaaugua

SEQ ID NO: 86655 - RNA, 32 nt, Homo Sapiens
aguuuucuuuuggagacguuugcugggugguu

SEQ ID NO: 86656 - RNA, 32 nt, Homo Sapiens
gcaguacauuuuaugcaaauauggaaauuauu

SEQ ID NO: 86657 - RNA, 32 nt, Homo Sapiens
cccacgagggucacggcggcggggagaggugg

SEQ ID NO: 86658 - RNA, 32 nt, Homo Sapiens
uaugauaguggguuuugcaucuaguaacgagg

SEQ ID NO: 86659 - RNA, 32 nt, Homo Sapiens
aucaucauaauuuuugugguucuauuucaggu

SEQ ID NO: 86660 - RNA, 32 nt, Homo Sapiens
uucagacccgucugucuguccgcccaucugua

SEQ ID NO: 86661 - RNA, 32 nt, Homo Sapiens
aaucuugauaacacugaacaaaggcuucacuu

SEQ ID NO: 86662 - RNA, 32 nt, Homo Sapiens
uauuucugauucuuuuauucuaaaaaauggag

SEQ ID NO: 86663 - RNA, 32 nt, Homo Sapiens
uggaucggguuugcugccagcggcgugagcuu

SEQ ID NO: 86664 - RNA, 32 nt, Homo Sapiens
ucgugaccgagacgccucgccgcggccagcuc

SEQ ID NO: 86665 - RNA, 32 nt, Homo Sapiens
uccuaggugucuaugggaaacucugggcuagg

SEQ ID NO: 86666 - RNA, 32 nt, Homo Sapiens
gcuuuuaauuguuuuuauuuuguuuuuuaaug

SEQ ID NO: 86667 - RNA, 26 nt, Homo Sapiens
cauggaggucuacaucccguccuuuc

SEQ ID NO: 86668 - RNA, 32 nt, Homo Sapiens
uuuuaaagccacaauuauuuuaauauuggaua

SEQ ID NO: 86669 - RNA, 32 nt, Homo Sapiens
ugacaaauugccuugcaucuucgucgaaaauc

SEQ ID NO: 86670 - RNA, 32 nt, Homo Sapiens
ugaccccaacugccuccaggugccuggaacag

SEQ ID NO: 86671 - RNA, 32 nt, Homo Sapiens
gcuuuaguuuaaaauaaggagauccagaauaa

SEQ ID NO: 86672 - RNA, 32 nt, Homo Sapiens
aaaccagcacgcgguucccacccggggccaac

SEQ ID NO: 86673 - RNA, 32 nt, Homo Sapiens
gagaggcuuaugcgguaccugauucauccagc

SEQ ID NO: 86674 - RNA, 32 nt, Homo Sapiens
gcuugccugccagcagugaugucccacccugu

SEQ ID NO: 86675 - RNA, 29 nt, Homo Sapiens
ucugacuugaagauucagacaccuucucc

SEQ ID NO: 86676 - RNA, 32 nt, Homo Sapiens
accuuugccugccccugggcgagugcgggcag

SEQ ID NO: 86677 - RNA, 32 nt, Homo Sapiens
ggacuuuaggaaaaagaggaacaaagacauua

SEQ ID NO: 86678 - RNA, 32 nt, Homo Sapiens
augggauggggaugaaguaaggagagggacug

SEQ ID NO: 86679 - RNA, 32 nt, Homo Sapiens
ggcucacaccuguaaucccagcccuuugggag

SEQ ID NO: 86680 - RNA, 32 nt, Homo Sapiens
cgagggcagcagggcguccuuggccucaccgu

SEQ ID NO: 86681 - RNA, 32 nt, Homo Sapiens
cuacauuuuguaauauauuaguacacgacaua

SEQ ID NO: 86682 - RNA, 32 nt, Homo Sapiens
auuguuuugugaauaaaacucagaaaugaaga

SEQ ID NO: 86683 - RNA, 32 nt, Homo Sapiens
ucaccuccucaaugaaaaccucaugguuuugc

SEQ ID NO: 86684 - RNA, 32 nt, Homo Sapiens
caaguugcccuugggguauaaaacuugacagc

SEQ ID NO: 86685 - RNA, 32 nt, Homo Sapiens
gcauuuaguuuugucuuucucaggguauaguc

SEQ ID NO: 86686 - RNA, 30 nt, Homo Sapiens
agcucucuggacuuuggcuggguggcccua

SEQ ID NO: 86687 - RNA, 32 nt, Homo Sapiens
uggcgaacauguguuuucaucauuucagccaa

SEQ ID NO: 86688 - RNA, 32 nt, Homo Sapiens
uagguuuugaaagauuacaugauucaagcgag

SEQ ID NO: 86689 - RNA, 32 nt, Homo Sapiens
ggaucccagggccagcugcccucuggcucugg

SEQ ID NO: 86690 - RNA, 32 nt, Homo Sapiens
gacuuccagaggagcgcugugcacguggagaa

SEQ ID NO: 86691 - RNA, 32 nt, Homo Sapiens
augugccuugcaugaaguguggguugcgccaa

SEQ ID NO: 86692 - RNA, 32 nt, Homo Sapiens
gaccauagcugcagaaaccaacccugcccuag

SEQ ID NO: 86693 - RNA, 32 nt, Homo Sapiens
ucucugaaccuuguguuucucaucugugaaag

SEQ ID NO: 86694 - RNA, 32 nt, Homo Sapiens
uccuuccauccagcgagguggugcugacagug

SEQ ID NO: 86695 - RNA, 32 nt, Homo Sapiens
ugggggaggguggggggagggagggcauugug

SEQ ID NO: 86696 - RNA, 29 nt, Homo Sapiens
gcccgggguccacagaggaugaggguugu

SEQ ID NO: 86697 - RNA, 32 nt, Homo Sapiens
gccuugauuauuuccucugugcuuucucagcu

SEQ ID NO: 86698 - RNA, 32 nt, Homo Sapiens
ggcauugggcaaacaguagacuuauaguaggg

SEQ ID NO: 86699 - RNA, 32 nt, Homo Sapiens
acaauuaucguggucccacgggcugcaagcua

SEQ ID NO: 86700 - RNA, 32 nt, Homo Sapiens
uggcugucuccaugaggaggccaacccuugcc

SEQ ID NO: 86701 - RNA, 32 nt, Homo Sapiens
ugaauguaaaccagauggcaaaacacuucuug

SEQ ID NO: 86702 - RNA, 32 nt, Homo Sapiens
cuuggugcccacaguauagauuuugcagaggc

SEQ ID NO: 86703 - RNA, 32 nt, Homo Sapiens
caggcagaugaccagagagccugagccuccgg

SEQ ID NO: 86704 - RNA, 32 nt, Homo Sapiens
ggucucaaacucccaaccucaagugauccgcc

SEQ ID NO: 86705 - RNA, 32 nt, Homo Sapiens
ugaccacugucuuuuucuuacccuacuucucu

SEQ ID NO: 86706 - RNA, 32 nt, Homo Sapiens
ucauugguggcuugauguuugcugguaucuuc

SEQ ID NO: 86707 - RNA, 27 nt, Homo Sapiens
cguguguccuucuguggccgcaccgug

SEQ ID NO: 86708 - RNA, 32 nt, Homo Sapiens
cagcggccuccuccccgcagugaagcaugggc

SEQ ID NO: 86709 - RNA, 32 nt, Homo Sapiens
aaugaagugagcacaacugaaugugcagcuau

SEQ ID NO: 86710 - RNA, 32 nt, Homo Sapiens
auguauauguaaguaugugaaugugcgcauuu

SEQ ID NO: 86711 - RNA, 32 nt, Homo Sapiens
augguugugaggaguaaaugugaucagcaugu

SEQ ID NO: 86712 - RNA, 29 nt, Homo Sapiens
guuuauacauaugagauagcuauuuugau

SEQ ID NO: 86713 - RNA, 32 nt, Homo Sapiens
agauuggaaugggauuacuuuggcccagggaa

SEQ ID NO: 86714 - RNA, 28 nt, Homo Sapiens
uagcggguaccuaccaggaggaucaggg

SEQ ID NO: 86715 - RNA, 32 nt, Homo Sapiens
gagggccgcagcugggccgccgccgccguuuc

SEQ ID NO: 86716 - RNA, 32 nt, Homo Sapiens
uaucuaucaguauauauacauaagaauguaua

SEQ ID NO: 86717 - RNA, 32 nt, Homo Sapiens
gccccgcgcgcagcugccgcgcucugcacccu

SEQ ID NO: 86718 - RNA, 32 nt, Homo Sapiens
cuacugaaagcugcugagugucuugcagcagg

SEQ ID NO: 86719 - RNA, 32 nt, Homo Sapiens
ggugaaggagaugacauguuuuuagaauugcu

SEQ ID NO: 86720 - RNA, 32 nt, Homo Sapiens
agcgucagacagcaaggaacugucaccagccg

SEQ ID NO: 86721 - RNA, 31 nt, Homo Sapiens
uugacugaauggagaaaguuucugugcuacc

SEQ ID NO: 86722 - RNA, 32 nt, Homo Sapiens
uauuuccuggggagcccugaggcuuuucuucu

SEQ ID NO: 86723 - RNA, 32 nt, Homo Sapiens
guuauuuuaagugccaauuaauuuaucagacu

SEQ ID NO: 86724 - RNA, 32 nt, Homo Sapiens
uaaucucuauuauggaaaaacuuuuuagauau

SEQ ID NO: 86725 - RNA, 32 nt, Homo Sapiens
uucugauaccaaccucuuuccuuuggaaguag

SEQ ID NO: 86726 - RNA, 32 nt, Homo Sapiens
accaguucuggaucagucaguguuucugcaug

SEQ ID NO: 86727 - RNA, 32 nt, Homo Sapiens
uguccccaggugaauuuuuuacugugacacuu

SEQ ID NO: 86728 - RNA, 32 nt, Homo Sapiens
acgugguccugugugucagcucccucaagauc

SEQ ID NO: 86729 - RNA, 32 nt, Homo Sapiens
ucaugugcuccucuccuucccaaggaaccugg

SEQ ID NO: 86730 - RNA, 32 nt, Homo Sapiens
uuccagcugccaagugcucuuuguuacugucc

SEQ ID NO: 86731 - RNA, 32 nt, Homo Sapiens
cugcaguggagguggacuggacacccacgugc

SEQ ID NO: 86732 - RNA, 32 nt, Homo Sapiens
ggucaucucuuuugccgagacuguauauuuau

SEQ ID NO: 86733 - RNA, 32 nt, Homo Sapiens
uuuaaaaaccaaacuugaagccaggcauggug

SEQ ID NO: 86734 - RNA, 32 nt, Homo Sapiens
ggaccugcucagcagcggggucggggagcugg

SEQ ID NO: 86735 - RNA, 32 nt, Homo Sapiens
ccucaggcaaauuauucaaucuucuugagugg

SEQ ID NO: 86736 - RNA, 32 nt, Homo Sapiens
uagagguuaaagcagaaguaaauugcaaacaa

SEQ ID NO: 86737 - RNA, 32 nt, Homo Sapiens
agcuaaugauagauagaaaugcccacucaaag

SEQ ID NO: 86738 - RNA, 32 nt, Homo Sapiens
guuccacggaggaggggagcugagagguucga

SEQ ID NO: 86739 - RNA, 32 nt, Homo Sapiens
gccucuggcagggcccuugcugcagaguuggu

SEQ ID NO: 86740 - RNA, 32 nt, Homo Sapiens
ucuucccuuugaucucucuuccgcuugcucaa

SEQ ID NO: 86741 - RNA, 32 nt, Homo Sapiens
cagaggcuaauauaacaaaaccaauaaaaccg

SEQ ID NO: 86742 - RNA, 32 nt, Homo Sapiens
uugcucuggacgguucccccagcccaugcaau

SEQ ID NO: 86743 - RNA, 32 nt, Homo Sapiens
gaaauguuaguucaaaauauuaacauauaguu

SEQ ID NO: 86744 - RNA, 32 nt, Homo Sapiens
caggucgcuggccuuaccaguugucgagaguc

SEQ ID NO: 86745 - RNA, 32 nt, Homo Sapiens
agccacuucccucccaacccugguggcuccaa

SEQ ID NO: 86746 - RNA, 32 nt, Homo Sapiens
cgagaagauuuggaacucuacuauaaaaaacu

SEQ ID NO: 86747 - RNA, 32 nt, Homo Sapiens
caaaugccagcuugaagaguuuuguuuuguuu

SEQ ID NO: 86748 - RNA, 32 nt, Homo Sapiens
uuugcuggcucggcgucucucucagcagucac

SEQ ID NO: 86749 - RNA, 32 nt, Homo Sapiens
cugacagggcggcggcagcugggaugcuggag

SEQ ID NO: 86750 - RNA, 32 nt, Homo Sapiens
ugaauucagcuugcagaauggaagcugaaucu

SEQ ID NO: 86751 - RNA, 32 nt, Homo Sapiens
ggaguguguuugucacuugguuuucacuagua

SEQ ID NO: 86752 - RNA, 32 nt, Homo Sapiens
uauccauauguugcuuaaauuuccuuaugagc

SEQ ID NO: 86753 - RNA, 32 nt, Homo Sapiens
gguuuugucaugccgaugaagccuccagguaa

SEQ ID NO: 86754 - RNA, 32 nt, Homo Sapiens
uuucuuugggggcuuuuuuucuuggcaaauac

SEQ ID NO: 86755 - RNA, 32 nt, Homo Sapiens
cacgaggccucgugccgcguccauuugaacgu

SEQ ID NO: 86756 - RNA, 32 nt, Homo Sapiens
gcccugcacuccugccucccagcccacagcca

SEQ ID NO: 86757 - RNA, 32 nt, Homo Sapiens
guaguucuguuuggugugucccauugguguug

SEQ ID NO: 86758 - RNA, 32 nt, Homo Sapiens
caagccccugcuucccaaaccuaugggucucu

SEQ ID NO: 86759 - RNA, 32 nt, Homo Sapiens
gcugcccgcccggccuuguggcagaggcuccu

SEQ ID NO: 86760 - RNA, 32 nt, Homo Sapiens
gggcuggccugccugagugggaagcacgcccu

SEQ ID NO: 86761 - RNA, 32 nt, Homo Sapiens
acggcaccagugaaaucaggggaggcagaaaa

SEQ ID NO: 86762 - RNA, 32 nt, Homo Sapiens
agacguuacuugcuccuccuugccuuccacca

SEQ ID NO: 86763 - RNA, 32 nt, Homo Sapiens
uggugacggcacagcccucacagcucaaacgc

SEQ ID NO: 86764 - RNA, 32 nt, Homo Sapiens
cggcggacgcgcggcucccaccccuccccucu

SEQ ID NO: 86765 - RNA, 32 nt, Homo Sapiens
uucuagugaacaggugguugauuugcugagau

SEQ ID NO: 86766 - RNA, 32 nt, Homo Sapiens
cccagcccgguccggcgcgccacgccgaggga

SEQ ID NO: 86767 - RNA, 32 nt, Homo Sapiens
cagguggcaguggucaucucccacugggaaua

SEQ ID NO: 86768 - RNA, 32 nt, Homo Sapiens
gugaguccccaaaguccauuauauuauucuuc

SEQ ID NO: 86769 - RNA, 32 nt, Homo Sapiens
auuagcugauauucaugguuguuuagcacaca

SEQ ID NO: 86770 - RNA, 32 nt, Homo Sapiens
gcuggcuuucccuucuccaggcucgcucaccc

SEQ ID NO: 86771 - RNA, 32 nt, Homo Sapiens
auuuaccccucuaauuaguacuauauguaugu

SEQ ID NO: 86772 - RNA, 32 nt, Homo Sapiens
agggacccaucccaugguuucuccccgaaagc

SEQ ID NO: 86773 - RNA, 32 nt, Homo Sapiens
ccagccuaaaaaaaguaacaaaccaauuaagu

SEQ ID NO: 86774 - RNA, 32 nt, Homo Sapiens
uauagaaacacuuuggaaacacuuuggaugaa

SEQ ID NO: 86775 - RNA, 32 nt, Homo Sapiens
gcaggagagagagcagcuccccugcccaccug

SEQ ID NO: 86776 - RNA, 32 nt, Homo Sapiens
aaaaagaaaaauguauauuuacaugaaaugca

SEQ ID NO: 86777 - RNA, 32 nt, Homo Sapiens
uagagcagggaguuuggcuggugcugggccug

SEQ ID NO: 86778 - RNA, 32 nt, Homo Sapiens
uaagcagugcuuguaaaccaucgcgugcaaug

SEQ ID NO: 86779 - RNA, 32 nt, Homo Sapiens
cauuuguaaaaaguagauuaaaauauuugccu

SEQ ID NO: 86780 - RNA, 32 nt, Homo Sapiens
ccuaacaacccucuuuauucucuuguuaaagu

SEQ ID NO: 86781 - RNA, 32 nt, Homo Sapiens
aucaaagauggaaaacaagaaauacugucaag

SEQ ID NO: 86782 - RNA, 32 nt, Homo Sapiens
gcgggaggcgcaggaggcucaggcuggcaaga

SEQ ID NO: 86783 - RNA, 32 nt, Homo Sapiens
ucucugaaacgcaacccugucuaggacaauau

SEQ ID NO: 86784 - RNA, 32 nt, Homo Sapiens
ucaaaggcuccuacauguuagagccuuuuaca

SEQ ID NO: 86785 - RNA, 32 nt, Homo Sapiens
uuuaaggaaggggauaugacaugggugagaau

SEQ ID NO: 86786 - RNA, 32 nt, Homo Sapiens
ucuuaaagaaaauaaauuucaaaugcuuacuu

SEQ ID NO: 86787 - RNA, 32 nt, Homo Sapiens
aggucugugggaagagagagccaccuagcaug

SEQ ID NO: 86788 - RNA, 32 nt, Homo Sapiens
gagcugugggagaggggucgugcggaggaucc

SEQ ID NO: 86789 - RNA, 32 nt, Homo Sapiens
acaaaauacagcacuuugacauauugaauauu

SEQ ID NO: 86790 - RNA, 32 nt, Homo Sapiens
ucuauuuugaauggcugaagcuaaggcaacgu

SEQ ID NO: 86791 - RNA, 32 nt, Homo Sapiens
aaagaugaugugcaugucuguaucauguguuu

SEQ ID NO: 86792 - RNA, 32 nt, Homo Sapiens
gccgggaggagaaagaaugucuuuucgaggcg

SEQ ID NO: 86793 - RNA, 32 nt, Homo Sapiens
cccugggcuccuuagcccacaauaguguaaua

SEQ ID NO: 86794 - RNA, 32 nt, Homo Sapiens
ucccagccaggagagcccgagucaugaggugg

SEQ ID NO: 86795 - RNA, 32 nt, Homo Sapiens
cuuggagaggggcaccagaaucugcauuugua

SEQ ID NO: 86796 - RNA, 32 nt, Homo Sapiens
uccaggcacuuuucuagguaaaacagauguga

SEQ ID NO: 86797 - RNA, 32 nt, Homo Sapiens
uugccgcugcuguccugcgaccccaagcaggu

SEQ ID NO: 86798 - RNA, 32 nt, Homo Sapiens
uggcugcuuuccuggaagacguuuccuuucuu

SEQ ID NO: 86799 - RNA, 32 nt, Homo Sapiens
ggcuaggcggggugcaucgggcgggcuccaug

SEQ ID NO: 86800 - RNA, 32 nt, Homo Sapiens
acccuuuugcccauuuacccuucuccccggau

SEQ ID NO: 86801 - RNA, 32 nt, Homo Sapiens
ucaccaguuacaaaugauguuucaugcuaccu

SEQ ID NO: 86802 - RNA, 32 nt, Homo Sapiens
guuuaacuuuuuuccgcagcugcaucuuucug

SEQ ID NO: 86803 - RNA, 32 nt, Homo Sapiens
cauaagaguauuuuaguuuguugaguguauca

SEQ ID NO: 86804 - RNA, 32 nt, Homo Sapiens
uucccgccuugcgcucgggggagcccccgcgc

SEQ ID NO: 86805 - RNA, 32 nt, Homo Sapiens
ccauuaugaguguguucagcucugguccacag

SEQ ID NO: 86806 - RNA, 32 nt, Homo Sapiens
cauuccauauaggcccuggcucugccagaauu

SEQ ID NO: 86807 - RNA, 32 nt, Homo Sapiens
aacuuagauguuucauggagcuuauuuugaga

SEQ ID NO: 86808 - RNA, 32 nt, Homo Sapiens
auuaagcuuuugcuguagauugccuaguaaaa

SEQ ID NO: 86809 - RNA, 32 nt, Homo Sapiens
uguaucauguuaggcacaacuauuaccauguu

SEQ ID NO: 86810 - RNA, 32 nt, Homo Sapiens
caguagaaagcaggaguaagaguggaaaugaa

SEQ ID NO: 86811 - RNA, 32 nt, Homo Sapiens
cccuccuccagguuccucuccugaaggccgga

SEQ ID NO: 86812 - RNA, 32 nt, Homo Sapiens
gagagccauacccuggccccagcgcgccccga

SEQ ID NO: 86813 - RNA, 32 nt, Homo Sapiens
guccucgcucucgggcggggcggcggcgacgc

SEQ ID NO: 86814 - RNA, 32 nt, Homo Sapiens
uuuggaggaggaggagugggccaagcagggaa

SEQ ID NO: 86815 - RNA, 32 nt, Homo Sapiens
gcccuuucucagcugccuccccugcccucaga

SEQ ID NO: 86816 - RNA, 32 nt, Homo Sapiens
aaaucucuccuccuuccuucacuccagacacu

SEQ ID NO: 86817 - RNA, 32 nt, Homo Sapiens
aaacacuucuauuuaucaauaauucaagaccu

SEQ ID NO: 86818 - RNA, 32 nt, Homo Sapiens
ugcugauguauucgaagauguguugacagucg

SEQ ID NO: 86819 - RNA, 32 nt, Homo Sapiens
cugacuuaucccaagcaugcuuccuuuagcug

SEQ ID NO: 86820 - RNA, 32 nt, Homo Sapiens
aguuuuacagcaguuccaacccuggaaucaac

SEQ ID NO: 86821 - RNA, 32 nt, Homo Sapiens
accuucucugcccacaccuccugccagcaccu

SEQ ID NO: 86822 - RNA, 32 nt, Homo Sapiens
gcugugcugcugcugcuaccccucccaagcuc

SEQ ID NO: 86823 - RNA, 32 nt, Homo Sapiens
uaugcaaaacuguguuuccuugcauuaaacca

SEQ ID NO: 86824 - RNA, 32 nt, Homo Sapiens
ggaaggauccuucaccaagacuaggauaugaa

SEQ ID NO: 86825 - RNA, 32 nt, Homo Sapiens
uguccagugucugcuugccauccugccagaac

SEQ ID NO: 86826 - RNA, 32 nt, Homo Sapiens
ucuaaguauaaaaucagugaguugaaaguaaa

SEQ ID NO: 86827 - RNA, 32 nt, Homo Sapiens
cuggugaagccaagcgggaggggagcugcgcc

SEQ ID NO: 86828 - RNA, 32 nt, Homo Sapiens
uggguugcagccuuaaaggcuuggacagcugu

SEQ ID NO: 86829 - RNA, 32 nt, Homo Sapiens
gucuugccccauugccucuccuuccuugaacu

SEQ ID NO: 86830 - RNA, 32 nt, Homo Sapiens
ugucaggcaguugcugaguggcugguccaugu

SEQ ID NO: 86831 - RNA, 32 nt, Homo Sapiens
ccauggggaagccgggcguggaggcagcaccg

SEQ ID NO: 86832 - RNA, 28 nt, Homo Sapiens
ggcgaauaguaggguauuauaaaggaga

SEQ ID NO: 86833 - RNA, 29 nt, Homo Sapiens
cuacuuuuauauuucagagguaucucgaa

SEQ ID NO: 86834 - RNA, 32 nt, Homo Sapiens
gaagaggcagaauugagaggcuaacauauuua

SEQ ID NO: 86835 - RNA, 32 nt, Homo Sapiens
ucugaugggaguauuauaucccuguauaguga

SEQ ID NO: 86836 - RNA, 32 nt, Homo Sapiens
guaccucuuaucuauuguguuaucaucucugu

SEQ ID NO: 86837 - RNA, 32 nt, Homo Sapiens
gaaauguaaaagaccuaaauaaauguggagcu

SEQ ID NO: 86838 - RNA, 32 nt, Homo Sapiens
ccgccgaaaaacaggaaaguugggaagcgggg

SEQ ID NO: 86839 - RNA, 32 nt, Homo Sapiens
acuccucccaaaaacuagccagguggaccaag

SEQ ID NO: 86840 - RNA, 32 nt, Homo Sapiens
uguugucccaagaagauaaaaaauauuguuaa

SEQ ID NO: 86841 - RNA, 32 nt, Homo Sapiens
acccaucggcucugccacggacaucuggggag

SEQ ID NO: 86842 - RNA, 32 nt, Homo Sapiens
uaccauguggaugauguaaccagucaucagua

SEQ ID NO: 86843 - RNA, 32 nt, Homo Sapiens
gaaacuggaaaaccaucucaguuagcuuuuug

SEQ ID NO: 86844 - RNA, 32 nt, Homo Sapiens
uucuccccaagccagcguggacccuggugucu

SEQ ID NO: 86845 - RNA, 32 nt, Homo Sapiens
agccccgacgucccgcgcccacgcggcagauc

SEQ ID NO: 86846 - RNA, 32 nt, Homo Sapiens
cucgcagcugggucgcggugucucucaaaggu

SEQ ID NO: 86847 - RNA, 32 nt, Homo Sapiens
guaggucgugcccgccuggugccuucuggccu

SEQ ID NO: 86848 - RNA, 32 nt, Homo Sapiens
ccuggaaaacgcagacaggagaggaaucggcg

SEQ ID NO: 86849 - RNA, 32 nt, Homo Sapiens
agcaggccuugaugagggugcaugaguguaug

SEQ ID NO: 86850 - RNA, 32 nt, Homo Sapiens
auucagcauuuucagguuuuauauugaaauac

SEQ ID NO: 86851 - RNA, 32 nt, Homo Sapiens
cacaaagggugcacuguaaauaaacagacauc

SEQ ID NO: 86852 - RNA, 32 nt, Homo Sapiens
uauuucuuauccaccuuugucuaggcucacga

SEQ ID NO: 86853 - RNA, 32 nt, Homo Sapiens
ugcccuugcccucccuucuccaugcucauuaa

SEQ ID NO: 86854 - RNA, 32 nt, Homo Sapiens
aucuuggugaaaggauuuuucaucucuuauuu

SEQ ID NO: 86855 - RNA, 32 nt, Homo Sapiens
cagaaaagucuuaaagcugccuuaaccuuuuu

SEQ ID NO: 86856 - RNA, 32 nt, Homo Sapiens
auuguaguauguuugcagaaaaauucuaaaca

SEQ ID NO: 86857 - RNA, 32 nt, Homo Sapiens
aagcgccuggcccagcccccagcccccagccc

SEQ ID NO: 86858 - RNA, 32 nt, Homo Sapiens
ccuuuuuuuuauuuucugaaaaucacucucgg

SEQ ID NO: 86859 - RNA, 32 nt, Homo Sapiens
cucgcagggcggccgggacccacgcgcguggg

SEQ ID NO: 86860 - RNA, 32 nt, Homo Sapiens
ccugaagggggcugggucugucugcggugcgg

SEQ ID NO: 86861 - RNA, 32 nt, Homo Sapiens
aagauucagagacugcgcccucucccuggcgc

SEQ ID NO: 86862 - RNA, 32 nt, Homo Sapiens
agcaccccccuacuccaggcuccccaucuccc

SEQ ID NO: 86863 - RNA, 32 nt, Homo Sapiens
caccagcucagccaggugauugagguuaacau

SEQ ID NO: 86864 - RNA, 32 nt, Homo Sapiens
ugucccacucacucuuuccccugccgcuccug

SEQ ID NO: 86865 - RNA, 32 nt, Homo Sapiens
accgcccucacgugaagcugggcugagagccc

SEQ ID NO: 86866 - RNA, 32 nt, Homo Sapiens
caaagccaaugggaauccugcuuguucggccc

SEQ ID NO: 86867 - RNA, 32 nt, Homo Sapiens
aggagcggaggcgggcgcgggcggccggccau

SEQ ID NO: 86868 - RNA, 32 nt, Homo Sapiens
uuauuuuuuaaauuaagcaguucuacucgauc

SEQ ID NO: 86869 - RNA, 32 nt, Homo Sapiens
uaauguucuucaccacagacaccuucuuguga

SEQ ID NO: 86870 - RNA, 32 nt, Homo Sapiens
uaaggagaaaaauaaaucaauuuaaaaaaugg

SEQ ID NO: 86871 - RNA, 32 nt, Homo Sapiens
guguccuccagcccagcccacccgggccuaug

SEQ ID NO: 86872 - RNA, 32 nt, Homo Sapiens
gagcagcgcgucgcuguccuccggcagcugga

SEQ ID NO: 86873 - RNA, 28 nt, Homo Sapiens
uaggguaaguggcuaauuauaaaucuac

SEQ ID NO: 86874 - RNA, 32 nt, Homo Sapiens
uuuaaaggaaacaaccacucuuuugaauguac

SEQ ID NO: 86875 - RNA, 32 nt, Homo Sapiens
uuuauauaaaauguaucuccaagagaaugucu

SEQ ID NO: 86876 - RNA, 32 nt, Homo Sapiens
cuuuaagaaaaguuaagacuauuauuuccuuc

SEQ ID NO: 86877 - RNA, 32 nt, Homo Sapiens
uagugucaauuucuucagaccuuucaccaggu

SEQ ID NO: 86878 - RNA, 32 nt, Homo Sapiens
gaggugguuagauaucucuguauaaugccugu

SEQ ID NO: 86879 - RNA, 32 nt, Homo Sapiens
acagcugccugccuggcugccgggaacacagu

SEQ ID NO: 86880 - RNA, 32 nt, Homo Sapiens
ucuccagcugucucugccccucuuccuggccc

SEQ ID NO: 86881 - RNA, 32 nt, Homo Sapiens
uccuuuuuucuuucuaaguuuagcucuucucu

SEQ ID NO: 86882 - RNA, 32 nt, Homo Sapiens
gcuguguagcuggcagaaaguucuguccagua

SEQ ID NO: 86883 - RNA, 32 nt, Homo Sapiens
cuggaaggagggggcgggcagggagaggcugg

SEQ ID NO: 86884 - RNA, 32 nt, Homo Sapiens
cauuaaauccuccacaccaaauaaauuauuga

SEQ ID NO: 86885 - RNA, 32 nt, Homo Sapiens
caccacugucacggucaaccagagccugcuga

SEQ ID NO: 86886 - RNA, 32 nt, Homo Sapiens
uuugaguugguguuccuuccccggcgccccca

SEQ ID NO: 86887 - RNA, 32 nt, Homo Sapiens
acuuauauuguaauauaugccgaucacuauuu

SEQ ID NO: 86888 - RNA, 32 nt, Homo Sapiens
ucuccugcacauaggcggccagcuccccagcc

SEQ ID NO: 86889 - RNA, 32 nt, Homo Sapiens
ugaggaaccaggucccaccuccccacaaggca

SEQ ID NO: 86890 - RNA, 32 nt, Homo Sapiens
auuuuacaaaaauuauaaaaaaugaauuagua

SEQ ID NO: 86891 - RNA, 32 nt, Homo Sapiens
cccaggcgcacucuacuccagcccuucucccu

SEQ ID NO: 86892 - RNA, 32 nt, Homo Sapiens
ggcggcggcagcggguucgguugcgcguggcg

SEQ ID NO: 86893 - RNA, 32 nt, Homo Sapiens
uggcugacggguuggaauauuugugaccguuc

SEQ ID NO: 86894 - RNA, 32 nt, Homo Sapiens
acauuugcuuggagaguccacuuguuauuuga

SEQ ID NO: 86895 - RNA, 32 nt, Homo Sapiens
aggagccugagagcgccgcgccacacccggca

SEQ ID NO: 86896 - RNA, 28 nt, Homo Sapiens
aagauggcggccuccgugugcagcgggu

SEQ ID NO: 86897 - RNA, 32 nt, Homo Sapiens
gccggggcaccaaggagccguuggaggguccg

SEQ ID NO: 86898 - RNA, 32 nt, Homo Sapiens
aacaugcucauucugugaauuuuugaagucaa

SEQ ID NO: 86899 - RNA, 32 nt, Homo Sapiens
cggccgcggcgacagcuccagcuccggcuccg

SEQ ID NO: 86900 - RNA, 32 nt, Homo Sapiens
ggcaucggaggugccgcagaggaggcaggaaa

SEQ ID NO: 86901 - RNA, 32 nt, Homo Sapiens
agggcugaaacacaucccuugcucgccauauu

SEQ ID NO: 86902 - RNA, 32 nt, Homo Sapiens
gaggccaucuucucacccaccccuuccucuuu

SEQ ID NO: 86903 - RNA, 32 nt, Homo Sapiens
gccaggcugccgugcaagggaauaccgacgag

SEQ ID NO: 86904 - RNA, 32 nt, Homo Sapiens
uuaaggauuugaauuaguauauguaaagugcu

SEQ ID NO: 86905 - RNA, 32 nt, Homo Sapiens
acuuacaugaugaggcuuucuggggaagaaca

SEQ ID NO: 86906 - RNA, 32 nt, Homo Sapiens
agcccaguccaagacucugugcucccuagguu

SEQ ID NO: 86907 - RNA, 32 nt, Homo Sapiens
ucucugauaauuaguuguuguauguuaacaua

SEQ ID NO: 86908 - RNA, 32 nt, Homo Sapiens
cguuuggaccucuggccgcaggaaaugggacc

SEQ ID NO: 86909 - RNA, 32 nt, Homo Sapiens
aauaucuuuucaaguuuccccagcuucaucuu

SEQ ID NO: 86910 - RNA, 32 nt, Homo Sapiens
aaaauauguuaauuauuuuauuuuguuuaaua

SEQ ID NO: 86911 - RNA, 32 nt, Homo Sapiens
aggaggguggguggagcagguggacuggaguu

SEQ ID NO: 86912 - RNA, 32 nt, Homo Sapiens
ccugaccucaguugagccgccggccucggccu

SEQ ID NO: 86913 - RNA, 32 nt, Homo Sapiens
uccagccagacacccgccccccggcccuggcu

SEQ ID NO: 86914 - RNA, 32 nt, Homo Sapiens
ucugcucugagccccaggacaagcugggggcc

SEQ ID NO: 86915 - RNA, 30 nt, Homo Sapiens
uuccaacaaugucucacccaucuuggcugc

SEQ ID NO: 86916 - RNA, 32 nt, Homo Sapiens
cugggaugggaagguuuuaacuuauugcagag

SEQ ID NO: 86917 - RNA, 32 nt, Homo Sapiens
ugagacuuuccacgugguaccuagauuugcaa

SEQ ID NO: 86918 - RNA, 32 nt, Homo Sapiens
acuuugcaauuucaaacgugcuacaaagcuac

SEQ ID NO: 86919 - RNA, 29 nt, Homo Sapiens
cuaccuucuauccucuguucccaaauggu

SEQ ID NO: 86920 - RNA, 32 nt, Homo Sapiens
cuucauuucuccuuagucuccuccaggcugac

SEQ ID NO: 86921 - RNA, 32 nt, Homo Sapiens
cuaccugugggaagaacauagcuggagcacaa

SEQ ID NO: 86922 - RNA, 32 nt, Homo Sapiens
uuucuauguauuauaauccuguagaagucacu

SEQ ID NO: 86923 - RNA, 32 nt, Homo Sapiens
agacauggaaggacuucagauaccaucuuauu

SEQ ID NO: 86924 - RNA, 32 nt, Homo Sapiens
gguaaugggcgacauggcuccgucuccacagc

SEQ ID NO: 86925 - RNA, 32 nt, Homo Sapiens
gucgcuaaagccagcccucccuguccuuucca

SEQ ID NO: 86926 - RNA, 32 nt, Homo Sapiens
aaaucuuuaaacaagcaauuggcaguaccccg

SEQ ID NO: 86927 - RNA, 32 nt, Homo Sapiens
cagcacaccaaugugauacuuccacugaccgg

SEQ ID NO: 86928 - RNA, 32 nt, Homo Sapiens
cccagcuacuugggacgcugaggugggaggau

SEQ ID NO: 86929 - RNA, 28 nt, Homo Sapiens
auugucauuuucaaaauguguuuguuuu

SEQ ID NO: 86930 - RNA, 32 nt, Homo Sapiens
uuguuagauuguggcuacuuaauaaauguuuu

SEQ ID NO: 86931 - RNA, 32 nt, Homo Sapiens
cuuggcgcuuugguccagaagggugcgaagag

SEQ ID NO: 86932 - RNA, 32 nt, Homo Sapiens
ugagcuuggcauaucugaaaucugcagggauu

SEQ ID NO: 86933 - RNA, 32 nt, Homo Sapiens
gacccccgccgcggcccgauucucugagcgcc

SEQ ID NO: 86934 - RNA, 32 nt, Homo Sapiens
agagggaggcuaugccugcugcuuggauucuc

SEQ ID NO: 86935 - RNA, 29 nt, Homo Sapiens
cagcuuaaguaauucagaggcuaagcucu

SEQ ID NO: 86936 - RNA, 32 nt, Homo Sapiens
gugcauaugaaaccacaucaugauucccgacg

SEQ ID NO: 86937 - RNA, 32 nt, Homo Sapiens
cuugucuacgugcuggacccggugcuaccuuu

SEQ ID NO: 86938 - RNA, 32 nt, Homo Sapiens
cccguggcccuacgaucccccgcgcguccgcc

SEQ ID NO: 86939 - RNA, 32 nt, Homo Sapiens
agugaugacauuuggcuauuuuucauauaguu

SEQ ID NO: 86940 - RNA, 32 nt, Homo Sapiens
gaguauggaagcugcgucuuaggagccuggga

SEQ ID NO: 86941 - RNA, 32 nt, Homo Sapiens
cucggccucggugcaggcagcggccgccgccg

SEQ ID NO: 86942 - RNA, 32 nt, Homo Sapiens
aguccccacuccaccccaacccucaccccacu

SEQ ID NO: 86943 - RNA, 32 nt, Homo Sapiens
cucccccaugcaccccacccucccccaaagcc

SEQ ID NO: 86944 - RNA, 32 nt, Homo Sapiens
cacuuauggugguggcuugagagccuugggga

SEQ ID NO: 86945 - RNA, 32 nt, Homo Sapiens
cccacaugaggcuggggcugggcuugcugagu

SEQ ID NO: 86946 - RNA, 32 nt, Homo Sapiens
cgaugccccccgguaugggaaccagcaccucc

SEQ ID NO: 86947 - RNA, 32 nt, Homo Sapiens
gugaaggaaaauuacuaaaaucaaguaaaacu

SEQ ID NO: 86948 - RNA, 32 nt, Homo Sapiens
uuaacuucuaauuauuugaucacugaggaaaa

SEQ ID NO: 86949 - RNA, 32 nt, Homo Sapiens
ucggggaggaggagagggcgcacgcugcgggu

SEQ ID NO: 86950 - RNA, 32 nt, Homo Sapiens
gaaccauagauauaacagugguaacagugcgu

SEQ ID NO: 86951 - RNA, 32 nt, Homo Sapiens
cauuacagcugaugugaaagagauucuggaaa

SEQ ID NO: 86952 - RNA, 32 nt, Homo Sapiens
gcucccccauccccacccacuucuacauccau

SEQ ID NO: 86953 - RNA, 32 nt, Homo Sapiens
gaggaggggcggggcgauagggauccagaguc

SEQ ID NO: 86954 - RNA, 32 nt, Homo Sapiens
ucgcuuucucaggcuuggacuguccccugguu

SEQ ID NO: 86955 - RNA, 32 nt, Homo Sapiens
guaauuuaaguacuaaauugggcagggcuuuu

SEQ ID NO: 86956 - RNA, 27 nt, Homo Sapiens
gcauggagcaucuggagcgcugcgagu

SEQ ID NO: 86957 - RNA, 32 nt, Homo Sapiens
gaacccuucccaaaccucccccauccccucuc

SEQ ID NO: 86958 - RNA, 32 nt, Homo Sapiens
ucccgagagcucaggaacauggagcugaucca

SEQ ID NO: 86959 - RNA, 32 nt, Homo Sapiens
ccguggcgccgacaggaugggcaagugucgug

SEQ ID NO: 86960 - RNA, 32 nt, Homo Sapiens
cugcacuacuuggaggucuaccugacagauga

SEQ ID NO: 86961 - RNA, 32 nt, Homo Sapiens
caaacugcaccaagcccuggagacccauuacc

SEQ ID NO: 86962 - RNA, 32 nt, Homo Sapiens
auauacgccucccuagaagugccuuccaaguc

SEQ ID NO: 86963 - RNA, 32 nt, Homo Sapiens
acguguacaucuguagaccaccagcugcaccc

SEQ ID NO: 86964 - RNA, 32 nt, Homo Sapiens
guacaguauuuauguuucuuuuuagaugugua

SEQ ID NO: 86965 - RNA, 32 nt, Homo Sapiens
auuaaguucuuaaauuguuuugcagucuuuua

SEQ ID NO: 86966 - RNA, 32 nt, Homo Sapiens
augagccggagcucuuguugccagguggaaua

SEQ ID NO: 86967 - RNA, 32 nt, Homo Sapiens
gaagaaaauauggaccuaaacaauaugaauca

SEQ ID NO: 86968 - RNA, 32 nt, Homo Sapiens
aggcggucauggccgcgccaggggaccgggga

SEQ ID NO: 86969 - RNA, 32 nt, Homo Sapiens
guugugaaauuugagaauuuguaagacuaauu

SEQ ID NO: 86970 - RNA, 32 nt, Homo Sapiens
uuugugaaaaaguuuuauuuccuguuauguau

SEQ ID NO: 86971 - RNA, 32 nt, Homo Sapiens
ccuggcuggccccagggcuaccacugguauuc

SEQ ID NO: 86972 - RNA, 32 nt, Homo Sapiens
gaugaaaugagccaccgugaacagacaucugc

SEQ ID NO: 86973 - RNA, 32 nt, Homo Sapiens
uggggaagccccaggaaacgcacaugcccaca

SEQ ID NO: 86974 - RNA, 32 nt, Homo Sapiens
gaggccuguggcggcugcgaccuccagcugaa

SEQ ID NO: 86975 - RNA, 32 nt, Homo Sapiens
cucuagcuauaugacauacugggaaaggcaga

SEQ ID NO: 86976 - RNA, 32 nt, Homo Sapiens
gguccccggcgccugcccccacggcacccaag

SEQ ID NO: 86977 - RNA, 30 nt, Homo Sapiens
aagauaaaagguuucaugugcaaugcagau

SEQ ID NO: 86978 - RNA, 32 nt, Homo Sapiens
gaauccccucgacaauuuaugaugccaccagc

SEQ ID NO: 86979 - RNA, 32 nt, Homo Sapiens
agacagguggaucaccugaggccgggaauuug

SEQ ID NO: 86980 - RNA, 32 nt, Homo Sapiens
cacaaacaagcacuucuccaguauggugccag

SEQ ID NO: 86981 - RNA, 32 nt, Homo Sapiens
cgccgaacggacccgggccggugcaacggggu

SEQ ID NO: 86982 - RNA, 32 nt, Homo Sapiens
cggaugcaggggucaugcacacagcaaagcug

SEQ ID NO: 86983 - RNA, 32 nt, Homo Sapiens
accugcccgaagugacaaggguccugggccgc

SEQ ID NO: 86984 - RNA, 32 nt, Homo Sapiens
uaauuuuggagguauuugauaacugaguaggu

SEQ ID NO: 86985 - RNA, 32 nt, Homo Sapiens
ccaccuccccacuuguggugcaauacguucca

SEQ ID NO: 86986 - RNA, 32 nt, Homo Sapiens
uuacaaucucaaaauaagcuuacguagacaaa

SEQ ID NO: 86987 - RNA, 32 nt, Homo Sapiens
gccugagaacagacuaauacaccugucaaugc

SEQ ID NO: 86988 - RNA, 32 nt, Homo Sapiens
gaaugacaaugaaagcacuguguagaaacacu

SEQ ID NO: 86989 - RNA, 32 nt, Homo Sapiens
gcaacuacugucaaaauaucuuuaagaaaaua

SEQ ID NO: 86990 - RNA, 32 nt, Homo Sapiens
cuguagggcauguugaggaaggaggagggcug

SEQ ID NO: 86991 - RNA, 32 nt, Homo Sapiens
uccugcugcgucgugaggacccggggccgggg

SEQ ID NO: 86992 - RNA, 32 nt, Homo Sapiens
aguugcaccauguuggccaggcuggucuugaa

SEQ ID NO: 86993 - RNA, 32 nt, Homo Sapiens
gagcguccuuucggaccaggaaugaaaguuac

SEQ ID NO: 86994 - RNA, 32 nt, Homo Sapiens
acccuaucuucuccaucagggaugguagcuau

SEQ ID NO: 86995 - RNA, 32 nt, Homo Sapiens
ucaggccucacagcuuugcaggcauuaaaauc

SEQ ID NO: 86996 - RNA, 32 nt, Homo Sapiens
uaaaccagaugaaaguaucauguuguuuuacu

SEQ ID NO: 86997 - RNA, 32 nt, Homo Sapiens
uuacaccguaauuuccuacuuuacacucuaac

SEQ ID NO: 86998 - RNA, 32 nt, Homo Sapiens
augggacacggggucgaaggggccuguacacu

SEQ ID NO: 86999 - RNA, 32 nt, Homo Sapiens
uguguccuagucugcuggggcuuggccucugg

SEQ ID NO: 87000 - RNA, 32 nt, Homo Sapiens
auacccgccucccuggacaguucccugcugca

SEQ ID NO: 87001 - RNA, 32 nt, Homo Sapiens
uuuaauacuuuuuaguagagauggggucucac

SEQ ID NO: 87002 - RNA, 32 nt, Homo Sapiens
gguauacaggguggaguagggagaagcugccc

SEQ ID NO: 87003 - RNA, 27 nt, Homo Sapiens
cuuugggacaucuucagcccuuuuauu

SEQ ID NO: 87004 - RNA, 32 nt, Homo Sapiens
auaauaccaggaauuuuaauaagauuuuguaa

SEQ ID NO: 87005 - RNA, 32 nt, Homo Sapiens
cuuuugcauaugaaacuagaaaacacugacuu

SEQ ID NO: 87006 - RNA, 32 nt, Homo Sapiens
cucugggcaaauccagcucccugcuuguuuuu

SEQ ID NO: 87007 - RNA, 32 nt, Homo Sapiens
uuuccaccuccucccccuccuucagccagccu

SEQ ID NO: 87008 - RNA, 32 nt, Homo Sapiens
auccuaaugcaaaccaacacaguuaaaagagc

SEQ ID NO: 87009 - RNA, 32 nt, Homo Sapiens
gcuaaggauaaaacauuucuuaccacuugauu

SEQ ID NO: 87010 - RNA, 32 nt, Homo Sapiens
acguagaaguggcaaugcuguaaccuggugcc

SEQ ID NO: 87011 - RNA, 32 nt, Homo Sapiens
ucuccuuuuuauaacaaaucaagaaauaugaa

SEQ ID NO: 87012 - RNA, 32 nt, Homo Sapiens
uuaagcuucuuggaagaauuuccuccugcuua

SEQ ID NO: 87013 - RNA, 32 nt, Homo Sapiens
ccaaucccagcaugugcugauucuacagcagg

SEQ ID NO: 87014 - RNA, 32 nt, Homo Sapiens
gucuguuuccuccucuagaaugcgagucuaug

SEQ ID NO: 87015 - RNA, 29 nt, Homo Sapiens
gcagcucugaaaguuaauuuucuagcuuu

SEQ ID NO: 87016 - RNA, 32 nt, Homo Sapiens
uuuauuuccacugcacgcuggugcugggagcg

SEQ ID NO: 87017 - RNA, 32 nt, Homo Sapiens
ggcuuccccccucaaguucucugaugggcaug

SEQ ID NO: 87018 - RNA, 32 nt, Homo Sapiens
gauguguccugguuucggcagcguagccagcu

SEQ ID NO: 87019 - RNA, 32 nt, Homo Sapiens
ccacccagugcaguggccgccgccucuuccgc

SEQ ID NO: 87020 - RNA, 32 nt, Homo Sapiens
ccuggaagacagagaccuccugccuccgccuc

SEQ ID NO: 87021 - RNA, 32 nt, Homo Sapiens
gaaggcugcggagugaggcggcagcuagccug

SEQ ID NO: 87022 - RNA, 32 nt, Homo Sapiens
ccccucccaccucuccuuuugaggcuucuccu

SEQ ID NO: 87023 - RNA, 32 nt, Homo Sapiens
uccagaauagagacaagguauacccuuugugc

SEQ ID NO: 87024 - RNA, 32 nt, Homo Sapiens
ggacgccaagcacuuccugccgcgggcggcgc

SEQ ID NO: 87025 - RNA, 32 nt, Homo Sapiens
cacccagguccucccuaguccuccagcgucaa

SEQ ID NO: 87026 - RNA, 32 nt, Homo Sapiens
aacugugccuuguuucaacaguuuuugcuaau

SEQ ID NO: 87027 - RNA, 32 nt, Homo Sapiens
uauucaugucuauguguauauagaucaaaugu

SEQ ID NO: 87028 - RNA, 32 nt, Homo Sapiens
uaauguuuaaacagacauaauagccuagauga

SEQ ID NO: 87029 - RNA, 32 nt, Homo Sapiens
ucuucaccuuuuauuuaccauucauugauugc

SEQ ID NO: 87030 - RNA, 32 nt, Homo Sapiens
cagcaugcugggggguuguggcagaggcuggg

SEQ ID NO: 87031 - RNA, 32 nt, Homo Sapiens
guguucagcucuuuccaaauuaaaacaaauau

SEQ ID NO: 87032 - RNA, 32 nt, Homo Sapiens
gugucugucugugagugcaucauuuuaagaca

SEQ ID NO: 87033 - RNA, 30 nt, Homo Sapiens
cccacccuggacugggcugucuccggagcc

SEQ ID NO: 87034 - RNA, 32 nt, Homo Sapiens
gcucgcuccgcaccccacccacuuccugugcu

SEQ ID NO: 87035 - RNA, 32 nt, Homo Sapiens
aauggcagcugcugugugaggaccagugucuu

SEQ ID NO: 87036 - RNA, 32 nt, Homo Sapiens
ggacuucugcuguauucucaccacucaauuug

SEQ ID NO: 87037 - RNA, 28 nt, Homo Sapiens
gcaucucuggcuaccgggcugggggcga

SEQ ID NO: 87038 - RNA, 32 nt, Homo Sapiens
cugccagcucuuuuguuuucccacuuagacca

SEQ ID NO: 87039 - RNA, 32 nt, Homo Sapiens
ucggaggcguuccuaacggaucuuuuggagaa

SEQ ID NO: 87040 - RNA, 32 nt, Homo Sapiens
uggaacaugcuucauggucacacauacaggca

SEQ ID NO: 87041 - RNA, 32 nt, Homo Sapiens
ucucaugccucagccucccaguagcugggauu

SEQ ID NO: 87042 - RNA, 32 nt, Homo Sapiens
uugccaucccuacaaggcccaucgccaccacc

SEQ ID NO: 87043 - RNA, 32 nt, Homo Sapiens
guuuugucugugacucguccugcuacauuucu

SEQ ID NO: 87044 - RNA, 32 nt, Homo Sapiens
ugagccacccuucccaccccagcccuugcugg

SEQ ID NO: 87045 - RNA, 31 nt, Homo Sapiens
ggggcaauggcggcuuccuguguucuacugc

SEQ ID NO: 87046 - RNA, 32 nt, Homo Sapiens
accgcucugcccgucccacuggccuacaccag

SEQ ID NO: 87047 - RNA, 32 nt, Homo Sapiens
uuccuggaauaauauuagucagaguaauauag

SEQ ID NO: 87048 - RNA, 32 nt, Homo Sapiens
ggaagagugcuccaagacuuggaccaggcaca

SEQ ID NO: 87049 - RNA, 32 nt, Homo Sapiens
acccaggagcagcaguguuuccugacccuccc

SEQ ID NO: 87050 - RNA, 32 nt, Homo Sapiens
uggacaugauuuagggaagcagggacaccccc

SEQ ID NO: 87051 - RNA, 32 nt, Homo Sapiens
gcuuguuucuuugcccuuauuccuacuggcuc

SEQ ID NO: 87052 - RNA, 32 nt, Homo Sapiens
ugucuuggagagccggcucugcagguccccag

SEQ ID NO: 87053 - RNA, 32 nt, Homo Sapiens
cagccuggcagcccggccagcaugcagcagca

SEQ ID NO: 87054 - RNA, 32 nt, Homo Sapiens
auuuaaaugacaaaacccuaucuagucuacug

SEQ ID NO: 87055 - RNA, 32 nt, Homo Sapiens
cugagccccccucccuucccuccccccuuggg

SEQ ID NO: 87056 - RNA, 32 nt, Homo Sapiens
uuuccauaucuuaaaugucccugaugaggaga

SEQ ID NO: 87057 - RNA, 32 nt, Homo Sapiens
ugaaagaaggaacauuuccuauggugcugucu

SEQ ID NO: 87058 - RNA, 32 nt, Homo Sapiens
cuuaaaaugcaaauaggacgggugagguagcu

SEQ ID NO: 87059 - RNA, 32 nt, Homo Sapiens
agagccucuguaaacuucuccugcccagcccc

SEQ ID NO: 87060 - RNA, 32 nt, Homo Sapiens
uucacuuauggcugguuuugcuauagaaauug

SEQ ID NO: 87061 - RNA, 30 nt, Homo Sapiens
gguggcggugugaagcaccagugucuggca

SEQ ID NO: 87062 - RNA, 32 nt, Homo Sapiens
cugaaugcugccauaauagaaaacuauauucu

SEQ ID NO: 87063 - RNA, 32 nt, Homo Sapiens
aaccuagaacuugaagugacuccuacuuauca

SEQ ID NO: 87064 - RNA, 32 nt, Homo Sapiens
ucggagcgagguggcgagucgcugagcccgcc

SEQ ID NO: 87065 - RNA, 32 nt, Homo Sapiens
aggccucuccaguuugcaccuguccccacccu

SEQ ID NO: 87066 - RNA, 32 nt, Homo Sapiens
cuugcaucaaggacacugagaaacacagucau

SEQ ID NO: 87067 - RNA, 32 nt, Homo Sapiens
cccgccgccccgagcuccccaagccuucgaga

SEQ ID NO: 87068 - RNA, 32 nt, Homo Sapiens
acacacauuacacacacacacacacacacaca

SEQ ID NO: 87069 - RNA, 32 nt, Homo Sapiens
cggcugcccuccccuugcuguccucuggacug

SEQ ID NO: 87070 - RNA, 32 nt, Homo Sapiens
ugccaaauauuuuugccagcacuuuuucaguu

SEQ ID NO: 87071 - RNA, 32 nt, Homo Sapiens
gcucuccccuucccugcccagugccccucuuc

SEQ ID NO: 87072 - RNA, 32 nt, Homo Sapiens
cugugugggugcccugcccacccccuccuuug

SEQ ID NO: 87073 - RNA, 32 nt, Homo Sapiens
gccuauugauccucgguauuggcuuggcaccu

SEQ ID NO: 87074 - RNA, 32 nt, Homo Sapiens
uggcucuguugcccuccucuguggcggcagga

SEQ ID NO: 87075 - RNA, 32 nt, Homo Sapiens
cacagauucauaaacuuuuaugacuuauauug

SEQ ID NO: 87076 - RNA, 32 nt, Homo Sapiens
ucacgggaucucuggagauaaaggcaguugag

SEQ ID NO: 87077 - RNA, 32 nt, Homo Sapiens
caccccgccgaggccccuccccggccugcuca

SEQ ID NO: 87078 - RNA, 32 nt, Homo Sapiens
agaugcacaggccccaggugcaggccaccacc

SEQ ID NO: 87079 - RNA, 32 nt, Homo Sapiens
uccuuuacacuggagacagacacagagacacu

SEQ ID NO: 87080 - RNA, 32 nt, Homo Sapiens
ucccacccuaacaacaacaaagggcaguaaau

SEQ ID NO: 87081 - RNA, 32 nt, Homo Sapiens
aaaaauaaaauagaaaaguaacaauaagccau

SEQ ID NO: 87082 - RNA, 32 nt, Homo Sapiens
auggcccgcgcgcccggcgcgaccucugcgga

SEQ ID NO: 87083 - RNA, 32 nt, Homo Sapiens
gguggugaugaugggugaguuuccaugguaac

SEQ ID NO: 87084 - RNA, 32 nt, Homo Sapiens
uuguuccuuucugcaugagaaucuaggagaga

SEQ ID NO: 87085 - RNA, 32 nt, Homo Sapiens
gggcuuagccuucggguccacguggccggagg

SEQ ID NO: 87086 - RNA, 32 nt, Homo Sapiens
aaaacaaaaaggaacuaguuagagucaaguuu

SEQ ID NO: 87087 - RNA, 32 nt, Homo Sapiens
gcaccaggauucuguuugggguugccauggac

SEQ ID NO: 87088 - RNA, 32 nt, Homo Sapiens
ggccuaggguggucugggaggcgucuccaagg

SEQ ID NO: 87089 - RNA, 32 nt, Homo Sapiens
aaugucccuucuguauguaaaaagcacguuau

SEQ ID NO: 87090 - RNA, 32 nt, Homo Sapiens
aaaagguaucucaagacuaacggccggaaucu

SEQ ID NO: 87091 - RNA, 32 nt, Homo Sapiens
aacaagaaaaacugguaacaaaaaagaccaug

SEQ ID NO: 87092 - RNA, 32 nt, Homo Sapiens
gugggccucuccccggggccgccccaggucuc

SEQ ID NO: 87093 - RNA, 32 nt, Homo Sapiens
ccaggggcccagcagacaguguccuuccuuuc

SEQ ID NO: 87094 - RNA, 32 nt, Homo Sapiens
cuuaauggggacgagcagacacacugaucuga

SEQ ID NO: 87095 - RNA, 30 nt, Homo Sapiens
cccuucuggccacgcagccguccgggccac

SEQ ID NO: 87096 - RNA, 32 nt, Homo Sapiens
ucagagauugaagaucaacuuaaugaaauaaa

SEQ ID NO: 87097 - RNA, 32 nt, Homo Sapiens
uuuuguuucuccucaagagccuggacaucucu

SEQ ID NO: 87098 - RNA, 32 nt, Homo Sapiens
aggaaaaacugcugaaguugugaggcugcucc

SEQ ID NO: 87099 - RNA, 32 nt, Homo Sapiens
cagugccauaaggugccccaguccuucuggag

SEQ ID NO: 87100 - RNA, 30 nt, Homo Sapiens
ugugugucugaacacacagaagcuaauuag

SEQ ID NO: 87101 - RNA, 32 nt, Homo Sapiens
ucccgccucgacuccuggcccagcguggggcu

SEQ ID NO: 87102 - RNA, 32 nt, Homo Sapiens
acuuauuuucuuuccauagguuuuaauauuuu

SEQ ID NO: 87103 - RNA, 32 nt, Homo Sapiens
uauuggaagaacucagccguguggcccacagc

SEQ ID NO: 87104 - RNA, 32 nt, Homo Sapiens
acccacuggacucaccucccccaucucuucug

SEQ ID NO: 87105 - RNA, 32 nt, Homo Sapiens
aaaaacaaaacaaaaacaaaauguagaaaaag

SEQ ID NO: 87106 - RNA, 32 nt, Homo Sapiens
uuuuucuuuuccauuucguuccaaauaaauca

SEQ ID NO: 87107 - RNA, 32 nt, Homo Sapiens
ggagcucagugcaaaaaucacuuuggggccuc

SEQ ID NO: 87108 - RNA, 32 nt, Homo Sapiens
cgcaaguuggacagaaggagguguugggguga

SEQ ID NO: 87109 - RNA, 32 nt, Homo Sapiens
uucguaaauauuuuauacuguuuaaguguuaa

SEQ ID NO: 87110 - RNA, 32 nt, Homo Sapiens
uggccuggcccaagccgcaccggagcagcggc

SEQ ID NO: 87111 - RNA, 32 nt, Homo Sapiens
gugccgaauucuuuuuuccccaggcuugccau

SEQ ID NO: 87112 - RNA, 32 nt, Homo Sapiens
uuaccaaaauguuaacugaugucuguugaaac

SEQ ID NO: 87113 - RNA, 32 nt, Homo Sapiens
uggagagguucaguaaaugguagcuauuauug

SEQ ID NO: 87114 - RNA, 32 nt, Homo Sapiens
guauuauggaaaguacccaagucuguguaucu

SEQ ID NO: 87115 - RNA, 32 nt, Homo Sapiens
uaugcagaaaaauaauaauauaaaugcccuug

SEQ ID NO: 87116 - RNA, 32 nt, Homo Sapiens
uuauuuuuauggucauaauaaaaauuauacag

SEQ ID NO: 87117 - RNA, 32 nt, Homo Sapiens
ggucccaugaccagcuccccgucuccauaggg

SEQ ID NO: 87118 - RNA, 32 nt, Homo Sapiens
ugcagggacaaagaggccuuuaaccauggugc

SEQ ID NO: 87119 - RNA, 32 nt, Homo Sapiens
cucgggcgccuggcaggcaugcggggccucua

SEQ ID NO: 87120 - RNA, 32 nt, Homo Sapiens
agcggggugggaagaagggaggggaugggguu

SEQ ID NO: 87121 - RNA, 32 nt, Homo Sapiens
uuacuaugcuaagggaguuggcuacuaucacu

SEQ ID NO: 87122 - RNA, 32 nt, Homo Sapiens
gacaccgccuucugcccaccacucacggacac

SEQ ID NO: 87123 - RNA, 32 nt, Homo Sapiens
auuuuuguuguaaucaagcuuuuccacaguuc

SEQ ID NO: 87124 - RNA, 32 nt, Homo Sapiens
gacacaugaagauuaaguuagucaagcaugga

SEQ ID NO: 87125 - RNA, 32 nt, Homo Sapiens
cuggcaggggagacaggagccuagcggagccc

SEQ ID NO: 87126 - RNA, 32 nt, Homo Sapiens
gcacaaacagaaaaguuggaaaaggauaauac

SEQ ID NO: 87127 - RNA, 32 nt, Homo Sapiens
gaguuccuuucugggaagaaaguaggaguggc

SEQ ID NO: 87128 - RNA, 32 nt, Homo Sapiens
uuaauuuucacaauugaugacagggugaguuu

SEQ ID NO: 87129 - RNA, 32 nt, Homo Sapiens
gauuuuauuguuuuuauuaauaauugacgaug

SEQ ID NO: 87130 - RNA, 32 nt, Homo Sapiens
uuuaaccuuuuucucuaucugaaguguucaca

SEQ ID NO: 87131 - RNA, 32 nt, Homo Sapiens
uaccuuuguugagucuuaaucuuuuagaagau

SEQ ID NO: 87132 - RNA, 32 nt, Homo Sapiens
agccagcccgaggacgcgagcggcaggugugc

SEQ ID NO: 87133 - RNA, 32 nt, Homo Sapiens
gucucgagggaagagggucugguggaaggaga

SEQ ID NO: 87134 - RNA, 32 nt, Homo Sapiens
guguuuuuguaucacaaagauuagagaggacu

SEQ ID NO: 87135 - RNA, 32 nt, Homo Sapiens
ggcauuccugaauaauuuccaaauguuuuuaa

SEQ ID NO: 87136 - RNA, 32 nt, Homo Sapiens
cgacuccugguuggaucuauaaacuaaugucu

SEQ ID NO: 87137 - RNA, 32 nt, Homo Sapiens
augggaauuacauugugauuuguacuaucuac

SEQ ID NO: 87138 - RNA, 32 nt, Homo Sapiens
gaagccugcuguuuuccacacuaccguggguc

SEQ ID NO: 87139 - RNA, 32 nt, Homo Sapiens
auuuaaaggaaagaauauguuaaugaacauau

SEQ ID NO: 87140 - RNA, 32 nt, Homo Sapiens
gguggaaucugucaauaagacuucccagagug

SEQ ID NO: 87141 - RNA, 32 nt, Homo Sapiens
ucacaauuuucugaagucugaauucaauuaca

SEQ ID NO: 87142 - RNA, 30 nt, Homo Sapiens
uugcuacugcuaauggaacugaacccccag

SEQ ID NO: 87143 - RNA, 32 nt, Homo Sapiens
aaauauacaaaauuauuugucaauuacaauaa

SEQ ID NO: 87144 - RNA, 32 nt, Homo Sapiens
agcugccgcccggugccaccucgugguagacu

SEQ ID NO: 87145 - RNA, 32 nt, Homo Sapiens
cugggaggcugacggcccgcgggcguaagcgg

SEQ ID NO: 87146 - RNA, 32 nt, Homo Sapiens
auacaacauauuugagagaauaugaguggagu

SEQ ID NO: 87147 - RNA, 32 nt, Homo Sapiens
ugcgacccgauuguccgcagugacuacacuca

SEQ ID NO: 87148 - RNA, 32 nt, Homo Sapiens
caauaugccuucugggcuggggaugggugagc

SEQ ID NO: 87149 - RNA, 32 nt, Homo Sapiens
cgugcggccccggaagaccgggcuguccaaac

SEQ ID NO: 87150 - RNA, 32 nt, Homo Sapiens
gcguguggggcucuuucagggaccacagagga

SEQ ID NO: 87151 - RNA, 32 nt, Homo Sapiens
ggccgcgcccugcagauugucucuuguugcgu

SEQ ID NO: 87152 - RNA, 32 nt, Homo Sapiens
gaagcuaauguuuuguacauuuuuuguaugag

SEQ ID NO: 87153 - RNA, 32 nt, Homo Sapiens
aagaauguccgccucuccauggggcgaggacu

SEQ ID NO: 87154 - RNA, 28 nt, Homo Sapiens
agacaggggcggccgagcuguaugacca

SEQ ID NO: 87155 - RNA, 32 nt, Homo Sapiens
gccucuuaccauaugacacgugucaagaugcc

SEQ ID NO: 87156 - RNA, 32 nt, Homo Sapiens
gcgcuggcccaguccccccaccccacccagcc

SEQ ID NO: 87157 - RNA, 32 nt, Homo Sapiens
cuucuuugaagaaaaguaugucucuggauccc

SEQ ID NO: 87158 - RNA, 32 nt, Homo Sapiens
uggccgccucccagcccucuuugccggacgag

SEQ ID NO: 87159 - RNA, 32 nt, Homo Sapiens
ucuacaaaaaauuuaaaaauuagccgggcaau

SEQ ID NO: 87160 - RNA, 32 nt, Homo Sapiens
uguuucugagugcaugaaguugugaagguccu

SEQ ID NO: 87161 - RNA, 32 nt, Homo Sapiens
ccucccauuggcucgcuccccccgcccaccgu

SEQ ID NO: 87162 - RNA, 32 nt, Homo Sapiens
augugagugacgaugauguacagauucuuuca

SEQ ID NO: 87163 - RNA, 32 nt, Homo Sapiens
aggcugugguggcaccacugagccuagaccau

SEQ ID NO: 87164 - RNA, 32 nt, Homo Sapiens
ccagucaaaaugccucuuucuaaaaagucaaa

SEQ ID NO: 87165 - RNA, 32 nt, Homo Sapiens
caaaugaaugucaaguuaaaauggcauguuuu

SEQ ID NO: 87166 - RNA, 32 nt, Homo Sapiens
agucuuggccaaggaagaaucacacccuugga

SEQ ID NO: 87167 - RNA, 32 nt, Homo Sapiens
augccuggguugcaggcccugcuugugguggc

SEQ ID NO: 87168 - RNA, 32 nt, Homo Sapiens
guuuagaguguuuuaguuuucauuuguuguau

SEQ ID NO: 87169 - RNA, 32 nt, Homo Sapiens
agcagucauguugauaucuggauucuaaaaau

SEQ ID NO: 87170 - RNA, 32 nt, Homo Sapiens
uuggauccauucagccgcagccgcccgggcgg

SEQ ID NO: 87171 - RNA, 32 nt, Homo Sapiens
gagggucuggcugucgcagcgccgggccgccc

SEQ ID NO: 87172 - RNA, 32 nt, Homo Sapiens
ggaacuaugugagccacuccaguguucccagc

SEQ ID NO: 87173 - RNA, 32 nt, Homo Sapiens
aagaaccaugaaguggcugcugcugcuggguc

SEQ ID NO: 87174 - RNA, 32 nt, Homo Sapiens
uuuauagugucuguauauuugugaugcaaugg

SEQ ID NO: 87175 - RNA, 32 nt, Homo Sapiens
aggaccagggaugcugugcugcucucccauga

SEQ ID NO: 87176 - RNA, 32 nt, Homo Sapiens
aaauugaugcaaacccuggaagucaguugauu

SEQ ID NO: 87177 - RNA, 32 nt, Homo Sapiens
gggaaaggaagggcuuggcuugccagaggaau

SEQ ID NO: 87178 - RNA, 32 nt, Homo Sapiens
uguucuuuuuccugcaauuaauaaucagacug

SEQ ID NO: 87179 - RNA, 32 nt, Homo Sapiens
cucuugcagacuugcauagaaauaauuacugg

SEQ ID NO: 87180 - RNA, 32 nt, Homo Sapiens
gacccuccgucuccuguaaagggggaagcccu

SEQ ID NO: 87181 - RNA, 32 nt, Homo Sapiens
agaggauuauguguguacacuccaucucugaa

SEQ ID NO: 87182 - RNA, 32 nt, Homo Sapiens
aacagcacugugggaggcugagguggguggau

SEQ ID NO: 87183 - RNA, 32 nt, Homo Sapiens
ugccucuugcguuccugaccucaugggaccag

SEQ ID NO: 87184 - RNA, 32 nt, Homo Sapiens
caggcaggaggcuggggugcugugugggggcc

SEQ ID NO: 87185 - RNA, 32 nt, Homo Sapiens
cgccccgggagcucgccuccccggugcucccc

SEQ ID NO: 87186 - RNA, 32 nt, Homo Sapiens
aaagaacacccgugcuggggucgggacgaggu

SEQ ID NO: 87187 - RNA, 32 nt, Homo Sapiens
caccuguaaucccagcacuuugagaggccgag

SEQ ID NO: 87188 - RNA, 32 nt, Homo Sapiens
agaagcuucauaaggaauaaacaaguugaaua

SEQ ID NO: 87189 - RNA, 32 nt, Homo Sapiens
ggagccugcguuacucgcggcccgcagccguc

SEQ ID NO: 87190 - RNA, 32 nt, Homo Sapiens
uacacgcgccagggcuguccccugcccucccc

SEQ ID NO: 87191 - RNA, 32 nt, Homo Sapiens
cagaccgagagccgcgccggcaccaugucagc

SEQ ID NO: 87192 - RNA, 32 nt, Homo Sapiens
ggcucccgcgcccucccggccggccaugcagc

SEQ ID NO: 87193 - RNA, 32 nt, Homo Sapiens
accgcuggaaaacacugucacuuucagagcuc

SEQ ID NO: 87194 - RNA, 32 nt, Homo Sapiens
uacuuaguucuaaauuuuuuuaugguaacaua

SEQ ID NO: 87195 - RNA, 32 nt, Homo Sapiens
ggcccccagccugguccacuaaaugcagccug

SEQ ID NO: 87196 - RNA, 32 nt, Homo Sapiens
cugauagauugugaacuccuuaaguuuuuggc

SEQ ID NO: 87197 - RNA, 32 nt, Homo Sapiens
gcucugcuggacagugacccucuucccaggcc

SEQ ID NO: 87198 - RNA, 27 nt, Homo Sapiens
cggaucucuggcuucagccgccagggg

SEQ ID NO: 87199 - RNA, 32 nt, Homo Sapiens
uguggucauucucgcccucccuuuuccucucu

SEQ ID NO: 87200 - RNA, 31 nt, Homo Sapiens
cugaggccgagguccgcagggccgcggggaa

SEQ ID NO: 87201 - RNA, 32 nt, Homo Sapiens
cgggggcaccggggcugcgcgcggucgcacac

SEQ ID NO: 87202 - RNA, 32 nt, Homo Sapiens
cccuaccuccagaucacccaccucaucaggaa

SEQ ID NO: 87203 - RNA, 32 nt, Homo Sapiens
auuauuuuauuaugaaacuuguguaaauacaa

SEQ ID NO: 87204 - RNA, 32 nt, Homo Sapiens
agcagcauuuuuaauaauaaaauaucacagua

SEQ ID NO: 87205 - RNA, 32 nt, Homo Sapiens
gaagagguaccaaugacuuccaaacaugugau

SEQ ID NO: 87206 - RNA, 32 nt, Homo Sapiens
gccugaggucacauuucacuuagugguugugu

SEQ ID NO: 87207 - RNA, 32 nt, Homo Sapiens
guuaccauuaaaccaucucccuggugcuuaug

SEQ ID NO: 87208 - RNA, 32 nt, Homo Sapiens
agcccagcgaagcucaugaggacgugcgaccc

SEQ ID NO: 87209 - RNA, 32 nt, Homo Sapiens
agagcuaucuggggggaagaauccuuaccaag

SEQ ID NO: 87210 - RNA, 31 nt, Homo Sapiens
auuaaaacuaacaugaaauauguguuguuuu

SEQ ID NO: 87211 - RNA, 32 nt, Homo Sapiens
uuugcagaagguuaggaauggguagauagcua

SEQ ID NO: 87212 - RNA, 27 nt, Homo Sapiens
uccgccuugcucuucagcuccuuccug

SEQ ID NO: 87213 - RNA, 32 nt, Homo Sapiens
cuccaagaaagugacuucaaaaauaacugauc

SEQ ID NO: 87214 - RNA, 30 nt, Homo Sapiens
ccucggaaaaucccugcuuuccccgcucgc

SEQ ID NO: 87215 - RNA, 32 nt, Homo Sapiens
uagaugauuuaaaaaugcaugugugauuugaa

SEQ ID NO: 87216 - RNA, 32 nt, Homo Sapiens
cuuugucacaugcucuuaaaaagggaguaaca

SEQ ID NO: 87217 - RNA, 32 nt, Homo Sapiens
aggccgagcgcggggcgccggaggcaggugug

SEQ ID NO: 87218 - RNA, 32 nt, Homo Sapiens
gcucagaucccucucuuuggaaaguuuagccu

SEQ ID NO: 87219 - RNA, 32 nt, Homo Sapiens
cccaccgaaucugaugcugcugcugccuuugc

SEQ ID NO: 87220 - RNA, 32 nt, Homo Sapiens
aggggacuuccacaccuccugccuuuaggcau

SEQ ID NO: 87221 - RNA, 32 nt, Homo Sapiens
ggccaggugcggggcgcgcugcaccggagcag

SEQ ID NO: 87222 - RNA, 32 nt, Homo Sapiens
caagcgcauucuggaggagaaaacacaugagu

SEQ ID NO: 87223 - RNA, 32 nt, Homo Sapiens
agcgugugccucuggaggaccugagugaagac

SEQ ID NO: 87224 - RNA, 30 nt, Homo Sapiens
accacgcuguuccuccaggaaaccguuucu

SEQ ID NO: 87225 - RNA, 32 nt, Homo Sapiens
ggaggaacguagcaauaucugcuccuuuucga

SEQ ID NO: 87226 - RNA, 32 nt, Homo Sapiens
agcuggggcugccgcucgcaauaaucacuauu

SEQ ID NO: 87227 - RNA, 32 nt, Homo Sapiens
auauuuuguaaaauagaauggagcugagugag

SEQ ID NO: 87228 - RNA, 32 nt, Homo Sapiens
aaucaaucagaauuagaauuagagcaugggag

SEQ ID NO: 87229 - RNA, 32 nt, Homo Sapiens
acaccgcggccgcccgggccugcgggaagcga

SEQ ID NO: 87230 - RNA, 32 nt, Homo Sapiens
aggccaagagggugggagguggggggcauuua

SEQ ID NO: 87231 - RNA, 32 nt, Homo Sapiens
gcaagacauuuucacagcaccauucacaacgg

SEQ ID NO: 87232 - RNA, 32 nt, Homo Sapiens
ucccuuucucccuggcuuacaccuccugcucc

SEQ ID NO: 87233 - RNA, 32 nt, Homo Sapiens
ucugcccccguccuacgaggcugccgugaaau

SEQ ID NO: 87234 - RNA, 32 nt, Homo Sapiens
aucgucacacagcugugauaagaguagauuau

SEQ ID NO: 87235 - RNA, 32 nt, Homo Sapiens
accacugacaacacgguucugacaguauuuca

SEQ ID NO: 87236 - RNA, 32 nt, Homo Sapiens
uguuucuggaacaaaauauuggucaucuaaaa

SEQ ID NO: 87237 - RNA, 32 nt, Homo Sapiens
cccagcccccuggggacccccggagagguggg

SEQ ID NO: 87238 - RNA, 32 nt, Homo Sapiens
caugauacauucucaagaguugcuugaccgaa

SEQ ID NO: 87239 - RNA, 32 nt, Homo Sapiens
caucugccuuucuuucccccagcccccacccg

SEQ ID NO: 87240 - RNA, 32 nt, Homo Sapiens
guccccgcaaucuccuuccaucccaggguguu

SEQ ID NO: 87241 - RNA, 32 nt, Homo Sapiens
cgcgcuccccgccgccagcccaggcgcaggca

SEQ ID NO: 87242 - RNA, 32 nt, Homo Sapiens
aucuaaaacugggguuugggggaagguuucag

SEQ ID NO: 87243 - RNA, 32 nt, Homo Sapiens
aaaauacaaaaauuagucaggugugguggugc

SEQ ID NO: 87244 - RNA, 32 nt, Homo Sapiens
ccacuuaauaaggaagcagagaguaugggaua

SEQ ID NO: 87245 - RNA, 32 nt, Homo Sapiens
gcgcucugguggcccuugcagaagcccuaagu

SEQ ID NO: 87246 - RNA, 32 nt, Homo Sapiens
uauuuccagacccaccaccagaguggaucuua

SEQ ID NO: 87247 - RNA, 32 nt, Homo Sapiens
gacgccgguguuuugcaguccugggcagcucg

SEQ ID NO: 87248 - RNA, 32 nt, Homo Sapiens
cuguggcaaugcccuucccacccauggcaccc

SEQ ID NO: 87249 - RNA, 32 nt, Homo Sapiens
acacaguucagcaaagucuucagaugcgaucc

SEQ ID NO: 87250 - RNA, 32 nt, Homo Sapiens
gccugcaaucccaacacuuuaggaggccaagg

SEQ ID NO: 87251 - RNA, 32 nt, Homo Sapiens
cauccauguacaacauuaugcuuacugcaucc

SEQ ID NO: 87252 - RNA, 32 nt, Homo Sapiens
uuccugucuccauggauugauggacccugaga

SEQ ID NO: 87253 - RNA, 32 nt, Homo Sapiens
ccgugcgucccauggggcaccuugacucuuca

SEQ ID NO: 87254 - RNA, 32 nt, Homo Sapiens
ugcuauuuucuuauuuuuaaucaaauaacuag

SEQ ID NO: 87255 - RNA, 32 nt, Homo Sapiens
auugucucuagagcuuccaaguccugggaaug

SEQ ID NO: 87256 - RNA, 32 nt, Homo Sapiens
cuaccgcccggagagggacgccgaguagggcu

SEQ ID NO: 87257 - RNA, 32 nt, Homo Sapiens
gaucugacaucugcgucccucuacguugaugu

SEQ ID NO: 87258 - RNA, 32 nt, Homo Sapiens
gaaagauuccuccucuucaucaucaucaacca

SEQ ID NO: 87259 - RNA, 32 nt, Homo Sapiens
gccuuccaggacuaugguuggacugaagccuu

SEQ ID NO: 87260 - RNA, 32 nt, Homo Sapiens
agcccugccucggcugccucaggggagagugc

SEQ ID NO: 87261 - RNA, 32 nt, Homo Sapiens
caagcuggcacuugcuaacaaaucagaaauau

SEQ ID NO: 87262 - RNA, 32 nt, Homo Sapiens
uuccuuuuuguucuuuuuguuugguuucuaac

SEQ ID NO: 87263 - RNA, 32 nt, Homo Sapiens
ugaauugucauucacacaccuacuuuucugcu

SEQ ID NO: 87264 - RNA, 32 nt, Homo Sapiens
cuuccagacccugcgauccuuucuguagcagu

SEQ ID NO: 87265 - RNA, 32 nt, Homo Sapiens
ucagcgugggcacaacuuauagacaguauccc

SEQ ID NO: 87266 - RNA, 32 nt, Homo Sapiens
acgauacauuuaauggaaaauuuuuaaaugcu

SEQ ID NO: 87267 - RNA, 32 nt, Homo Sapiens
gcagcgccagccucacuaucaguguggacaca

SEQ ID NO: 87268 - RNA, 32 nt, Homo Sapiens
aaugucaguuuaggagaaaagcuuccuuuuua

SEQ ID NO: 87269 - RNA, 32 nt, Homo Sapiens
aaucaccauaugcuguggacaccaccuauuuu

SEQ ID NO: 87270 - RNA, 32 nt, Homo Sapiens
uuugaugauguuucagauauauugcaaagucu

SEQ ID NO: 87271 - RNA, 32 nt, Homo Sapiens
gaagaaguuauccaaaguacuguauaacaucu

SEQ ID NO: 87272 - RNA, 32 nt, Homo Sapiens
ugggacugcccccgcucccccgacgcaugugg

SEQ ID NO: 87273 - RNA, 32 nt, Homo Sapiens
ggaaccucauugcuaccacagacuugcacuga

SEQ ID NO: 87274 - RNA, 32 nt, Homo Sapiens
uuugcuauaugauaauauaguuuucuguauuu

SEQ ID NO: 87275 - RNA, 32 nt, Homo Sapiens
gucuuucccacuuuuguugauguuuauuucag

SEQ ID NO: 87276 - RNA, 32 nt, Homo Sapiens
aggcggcggcccgguuccugggagugucggug

SEQ ID NO: 87277 - RNA, 32 nt, Homo Sapiens
aaguuugccugcgccucuccccgcccccacgc

SEQ ID NO: 87278 - RNA, 32 nt, Homo Sapiens
aagcauuaauucaaaugaggaguagucagucc

SEQ ID NO: 87279 - RNA, 32 nt, Homo Sapiens
uugaguguauucuauuuguguaaggacuuugg

SEQ ID NO: 87280 - RNA, 32 nt, Homo Sapiens
auacuugauaauaucuuccaaacgauuagaga

SEQ ID NO: 87281 - RNA, 32 nt, Homo Sapiens
cugcaugccuggaccaccccagcccucccacu

SEQ ID NO: 87282 - RNA, 32 nt, Homo Sapiens
aggguuucauucccuuucauggccagauaaca

SEQ ID NO: 87283 - RNA, 32 nt, Homo Sapiens
accuccaccugccuguccugggccaggacuaa

SEQ ID NO: 87284 - RNA, 32 nt, Homo Sapiens
ucagaacuccugaacaacuuugaaagcaguaa

SEQ ID NO: 87285 - RNA, 29 nt, Homo Sapiens
accuaugugcccauccugccggcucagcu

SEQ ID NO: 87286 - RNA, 32 nt, Homo Sapiens
gauggccgcucucuccucuccccuccucagag

SEQ ID NO: 87287 - RNA, 32 nt, Homo Sapiens
ugaaggauuaagaaacaaaaacaauccagaaa

SEQ ID NO: 87288 - RNA, 32 nt, Homo Sapiens
ucugcuuggcugaccccacacccaggaccacu

SEQ ID NO: 87289 - RNA, 32 nt, Homo Sapiens
accccuucagcuugcugugcacucccuugccu

SEQ ID NO: 87290 - RNA, 32 nt, Homo Sapiens
ucagggcagguccucugagccggcgccccugg

SEQ ID NO: 87291 - RNA, 32 nt, Homo Sapiens
acuuuaacugauuucugucauucaucaaugag

SEQ ID NO: 87292 - RNA, 32 nt, Homo Sapiens
cugcugaaccauuuuucuuaggaugcagccgu

SEQ ID NO: 87293 - RNA, 32 nt, Homo Sapiens
gggaggcccucccgggcugccugaccucccgg

SEQ ID NO: 87294 - RNA, 32 nt, Homo Sapiens
agaaaaauuaagaaaaacuuugaaauggucuc

SEQ ID NO: 87295 - RNA, 32 nt, Homo Sapiens
gcagguuccucuuacuuucacccauugcugag

SEQ ID NO: 87296 - RNA, 32 nt, Homo Sapiens
aaagaggagagcccagaaggccacaaacauua

SEQ ID NO: 87297 - RNA, 32 nt, Homo Sapiens
gcagcggccugacgcccuccccacccuggcau

SEQ ID NO: 87298 - RNA, 32 nt, Homo Sapiens
aggcuggcacggccuggcagucugagaaaauc

SEQ ID NO: 87299 - RNA, 32 nt, Homo Sapiens
gacaaagagcaacaacucugcugccagcacca

SEQ ID NO: 87300 - RNA, 32 nt, Homo Sapiens
ucaggccccgucccggcgccgcagccgccugc

SEQ ID NO: 87301 - RNA, 32 nt, Homo Sapiens
aaccacacugaagcuauaguaccuuccagaug

SEQ ID NO: 87302 - RNA, 32 nt, Homo Sapiens
cggaggcuuugcuguggcagcugcuggagcgg

SEQ ID NO: 87303 - RNA, 32 nt, Homo Sapiens
cccccaugcucuguggccuucuuacacuucuc

SEQ ID NO: 87304 - RNA, 32 nt, Homo Sapiens
accagcugguauauuguguaaauauuaaagcu

SEQ ID NO: 87305 - RNA, 32 nt, Homo Sapiens
augaugauacaacagguagugaaacagcuuaa

SEQ ID NO: 87306 - RNA, 32 nt, Homo Sapiens
cuugaauggacgggacuauccaccucgcgcuc

SEQ ID NO: 87307 - RNA, 32 nt, Homo Sapiens
agugccaguggcuccucgauguuuacauuuuu

SEQ ID NO: 87308 - RNA, 32 nt, Homo Sapiens
cauaagccaaaauacaacucaccuuuggaauc

SEQ ID NO: 87309 - RNA, 32 nt, Homo Sapiens
gcauacuuguuuuucuggaauaggguguuaag

SEQ ID NO: 87310 - RNA, 32 nt, Homo Sapiens
gaugauggggacgggguccaggagggccacug

SEQ ID NO: 87311 - RNA, 32 nt, Homo Sapiens
gguuuggaauguuggaaugaccaagagacaag

SEQ ID NO: 87312 - RNA, 32 nt, Homo Sapiens
agccuuuucuuuccucuucucuaucagagguc

SEQ ID NO: 87313 - RNA, 32 nt, Homo Sapiens
aguccaaugugcuaugagcaucagcuuacuuu

SEQ ID NO: 87314 - RNA, 29 nt, Homo Sapiens
guagcaugggggauauauuuuuugcuaua

SEQ ID NO: 87315 - RNA, 32 nt, Homo Sapiens
accucuuuuuuuuuuuuuuuuaaggaaguucc

SEQ ID NO: 87316 - RNA, 32 nt, Homo Sapiens
caagcuaauggcacaggagacaucagggcagc

SEQ ID NO: 87317 - RNA, 32 nt, Homo Sapiens
gagccugcguccugggguccugggccgcacgu

SEQ ID NO: 87318 - RNA, 30 nt, Homo Sapiens
cgccaacuugucucuguagaagcuccgggu

SEQ ID NO: 87319 - RNA, 31 nt, Homo Sapiens
guuuuguaauggaagaaccaggcacagaaac

SEQ ID NO: 87320 - RNA, 32 nt, Homo Sapiens
uucuuuguucaauugcauggaacuugguagug

SEQ ID NO: 87321 - RNA, 32 nt, Homo Sapiens
uaucuuuuaagugaaggugacauaaagauguu

SEQ ID NO: 87322 - RNA, 32 nt, Homo Sapiens
uacacgcuuucugcauguauuagaaacgcacg

SEQ ID NO: 87323 - RNA, 32 nt, Homo Sapiens
cuaauuaauguuuaguucuuauauuuguuaac

SEQ ID NO: 87324 - RNA, 30 nt, Homo Sapiens
uccagccuggacugcaccguucgcaucugg

SEQ ID NO: 87325 - RNA, 32 nt, Homo Sapiens
accgcagucugcuuagagcacaggaagugaca

SEQ ID NO: 87326 - RNA, 32 nt, Homo Sapiens
cccuggugcacugaagcuccagcccuuccugg

SEQ ID NO: 87327 - RNA, 32 nt, Homo Sapiens
gccauggagauuacaugcaaaauggcaugcaa

SEQ ID NO: 87328 - RNA, 32 nt, Homo Sapiens
gggaagcugaaaucauugauguaucaauagaa

SEQ ID NO: 87329 - RNA, 32 nt, Homo Sapiens
cagggcagacugccuggaggagugaugccaga

SEQ ID NO: 87330 - RNA, 32 nt, Homo Sapiens
ucuagcagaaucucgggagagaagggcaccgc

SEQ ID NO: 87331 - RNA, 32 nt, Homo Sapiens
agagcauuuuaaacggcucagaacgaaucuuu

SEQ ID NO: 87332 - RNA, 32 nt, Homo Sapiens
uuucuuuuuuuuucuuuuucuuuuuuuuuuug

SEQ ID NO: 87333 - RNA, 32 nt, Homo Sapiens
uuuguuuguuuuucuuuuuuuuuguuuguuug

SEQ ID NO: 87334 - RNA, 32 nt, Homo Sapiens
auuugaagaaaacguauaaaucuuucuuaacc

SEQ ID NO: 87335 - RNA, 32 nt, Homo Sapiens
uguuucauguuuacccguucuacauuuaaagg

SEQ ID NO: 87336 - RNA, 32 nt, Homo Sapiens
caggacacuuauacaaucauggcagaaaaagg

SEQ ID NO: 87337 - RNA, 32 nt, Homo Sapiens
aaauacccaagcccucugguacccagggagcu

SEQ ID NO: 87338 - RNA, 32 nt, Homo Sapiens
cuuuucuuucuuucuuuuuuguacauacugua

SEQ ID NO: 87339 - RNA, 32 nt, Homo Sapiens
uuauuuauuagcgauauaaccuugcuuugcaa

SEQ ID NO: 87340 - RNA, 32 nt, Homo Sapiens
gguugcuaaaagacuguaauaugauuuuugaa

SEQ ID NO: 87341 - RNA, 32 nt, Homo Sapiens
uaggguaagaacaguaauugaagccaauuauu

SEQ ID NO: 87342 - RNA, 32 nt, Homo Sapiens
ccucuuggagcaccuccucccugggucagggc

SEQ ID NO: 87343 - RNA, 32 nt, Homo Sapiens
ucucccccgcccggggacccccugugccuccc

SEQ ID NO: 87344 - RNA, 32 nt, Homo Sapiens
gcccugcagggacggugcaggcugguuggguu

SEQ ID NO: 87345 - RNA, 32 nt, Homo Sapiens
aggaaucccuccccaacggcugccuuccccaa

SEQ ID NO: 87346 - RNA, 32 nt, Homo Sapiens
uuuggauuuugacccauuuuccaggucuauuu

SEQ ID NO: 87347 - RNA, 32 nt, Homo Sapiens
aagaguugcaagagaaguuacaguccagguga

SEQ ID NO: 87348 - RNA, 32 nt, Homo Sapiens
cuuugcuaucaagaccacuuguuuuaaauaaa

SEQ ID NO: 87349 - RNA, 32 nt, Homo Sapiens
cugagcugaaggagaugccacccccuccugca

SEQ ID NO: 87350 - RNA, 32 nt, Homo Sapiens
cucugucuucccuccucuacucuuggugcuuu

SEQ ID NO: 87351 - RNA, 32 nt, Homo Sapiens
cucuucugaagcgcccuccagggaaguuaaga

SEQ ID NO: 87352 - RNA, 32 nt, Homo Sapiens
aaagugcaccugugagcgacacugccagcccu

SEQ ID NO: 87353 - RNA, 32 nt, Homo Sapiens
cuacacuaaagcucugucccagcccagccauc

SEQ ID NO: 87354 - RNA, 32 nt, Homo Sapiens
ucuugcugccaccacgugagaagugccuuucg

SEQ ID NO: 87355 - RNA, 32 nt, Homo Sapiens
cagaggaggaggagucaagggagcagggcagc

SEQ ID NO: 87356 - RNA, 32 nt, Homo Sapiens
gucuuccggcuccuuucgguaugugugggucu

SEQ ID NO: 87357 - RNA, 32 nt, Homo Sapiens
uagacacacacacauaugcacacacacacaca

SEQ ID NO: 87358 - RNA, 32 nt, Homo Sapiens
gccagccccgcgcuccucuaggcugcaaaggg

SEQ ID NO: 87359 - RNA, 32 nt, Homo Sapiens
gcucuaaaauuuguugauugguaagaaauugg

SEQ ID NO: 87360 - RNA, 32 nt, Homo Sapiens
cgucagcuccuucccucauuuauuuuuguuaa

SEQ ID NO: 87361 - RNA, 32 nt, Homo Sapiens
uagaauagaagagacuccaguaacagugguua

SEQ ID NO: 87362 - RNA, 32 nt, Homo Sapiens
ccguaucuucaccaguguucuaucuuguuccc

SEQ ID NO: 87363 - RNA, 32 nt, Homo Sapiens
gugcccagagggcggcgggggugcggagagac

SEQ ID NO: 87364 - RNA, 32 nt, Homo Sapiens
guuggcugagagagggcugggguccuucgugg

SEQ ID NO: 87365 - RNA, 32 nt, Homo Sapiens
gguuccugacaguguugguuuuugcacaucca

SEQ ID NO: 87366 - RNA, 32 nt, Homo Sapiens
ucucuuaagaaaaugaugcuggucaucgcagc

SEQ ID NO: 87367 - RNA, 32 nt, Homo Sapiens
agcacauugcuaaaauaaaaaauacaccuuaa

SEQ ID NO: 87368 - RNA, 32 nt, Homo Sapiens
gagcagccaggagcuuccugucaguaaccaug

SEQ ID NO: 87369 - RNA, 32 nt, Homo Sapiens
auauauuggccauucagcucacguaacuaaug

SEQ ID NO: 87370 - RNA, 32 nt, Homo Sapiens
ggcaaccaguugaagacguucuccuuggaagc

SEQ ID NO: 87371 - RNA, 32 nt, Homo Sapiens
aagagugaucagugacaaacaugccucauuga

SEQ ID NO: 87372 - RNA, 32 nt, Homo Sapiens
uugugauguauucuagcuaauguaauaacugu

SEQ ID NO: 87373 - RNA, 32 nt, Homo Sapiens
uaauauguuucaucggugacaggcaugauaau

SEQ ID NO: 87374 - RNA, 32 nt, Homo Sapiens
cgcggcgcguucggggaccgggaaccggggac

SEQ ID NO: 87375 - RNA, 32 nt, Homo Sapiens
ccguggggucaccccccggccccgggacucag

SEQ ID NO: 87376 - RNA, 32 nt, Homo Sapiens
caucaucuuuauacuucuuuuacauuuccuca

SEQ ID NO: 87377 - RNA, 32 nt, Homo Sapiens
cacaaagagcggggcggagaggcagcugcggg

SEQ ID NO: 87378 - RNA, 32 nt, Homo Sapiens
aacuucccaaaauagguugugucucaggaaag

SEQ ID NO: 87379 - RNA, 32 nt, Homo Sapiens
gaguaagaaaaugagucacuguguuaccugga

SEQ ID NO: 87380 - RNA, 32 nt, Homo Sapiens
cccggccgggagcagguggccauggugcccgg

SEQ ID NO: 87381 - RNA, 32 nt, Homo Sapiens
uauggagaaaucaacuguaauauuagucucug

SEQ ID NO: 87382 - RNA, 32 nt, Homo Sapiens
ccggggcagacacucuucugucuccugcuucc

SEQ ID NO: 87383 - RNA, 32 nt, Homo Sapiens
cagggaaaaauaauucugauauuuaacuguca

SEQ ID NO: 87384 - RNA, 32 nt, Homo Sapiens
uuaagaauugcagcaaguaagccaacaagguc

SEQ ID NO: 87385 - RNA, 32 nt, Homo Sapiens
uuggacaauuguaacugugaaacuauggcuua

SEQ ID NO: 87386 - RNA, 32 nt, Homo Sapiens
aaccuguaucucaggaacaaauguagauacau

SEQ ID NO: 87387 - RNA, 32 nt, Homo Sapiens
acugaagcugugauauuuccaacgacuguagg

SEQ ID NO: 87388 - RNA, 32 nt, Homo Sapiens
gucauuccaagguuucuucaugagucauucca

SEQ ID NO: 87389 - RNA, 32 nt, Homo Sapiens
uuuugcuucuauuggaacauuuguauacucgc

SEQ ID NO: 87390 - RNA, 32 nt, Homo Sapiens
ugaaccauuauacuuuauaucuguaaugauac

SEQ ID NO: 87391 - RNA, 32 nt, Homo Sapiens
agccuguguuuguaaauaaagcuuuguuggaa

SEQ ID NO: 87392 - RNA, 30 nt, Homo Sapiens
uucugugucugugacuuucgaaguuuuuua

SEQ ID NO: 87393 - RNA, 32 nt, Homo Sapiens
ggcauaaauacuaguauaguuuuuuaguuaag

SEQ ID NO: 87394 - RNA, 32 nt, Homo Sapiens
caaacagaaauguacaggauacuuaaauggaa

SEQ ID NO: 87395 - RNA, 29 nt, Homo Sapiens
auauuguuauaugaguagaaaucacuuaa

SEQ ID NO: 87396 - RNA, 32 nt, Homo Sapiens
ugggagcagcauaaaaggcggggucuuauuag

SEQ ID NO: 87397 - RNA, 32 nt, Homo Sapiens
acauauugcuuuagguucaucuccauuggucu

SEQ ID NO: 87398 - RNA, 32 nt, Homo Sapiens
agacgaucgcccacucuuccagcccuugcuug

SEQ ID NO: 87399 - RNA, 32 nt, Homo Sapiens
gagcggucccugcgcuugcugcugggaagugg

SEQ ID NO: 87400 - RNA, 32 nt, Homo Sapiens
uuuauucgcacaucccaccccauccccugaac

SEQ ID NO: 87401 - RNA, 32 nt, Homo Sapiens
ggucuaugaaaacaccugcucugauaugaggg

SEQ ID NO: 87402 - RNA, 32 nt, Homo Sapiens
gaaugucuuuaacuuaaaucuacccaauaauu

SEQ ID NO: 87403 - RNA, 32 nt, Homo Sapiens
uugugauuuguaacaaauacccuuuauuuucc

SEQ ID NO: 87404 - RNA, 32 nt, Homo Sapiens
cgcugaugaugggugaggagggggcggcaaga

SEQ ID NO: 87405 - RNA, 32 nt, Homo Sapiens
ggaggugcugccaucucuuccuccucaucgug

SEQ ID NO: 87406 - RNA, 32 nt, Homo Sapiens
auugugggacauuuuuauauauugaaucuggg

SEQ ID NO: 87407 - RNA, 32 nt, Homo Sapiens
ugagagcgcuauaaaggcagcggaaggguagu

SEQ ID NO: 87408 - RNA, 32 nt, Homo Sapiens
ucaccucuuuugcucuaccaccugccuuucuu

SEQ ID NO: 87409 - RNA, 32 nt, Homo Sapiens
uuaacuuucuaaaaaccuucuuuuagaucuuc

SEQ ID NO: 87410 - RNA, 32 nt, Homo Sapiens
agcaccccaucccacagcacauuacauccacc

SEQ ID NO: 87411 - RNA, 32 nt, Homo Sapiens
ggauucccgagugcaacguucccggcucgcgc

SEQ ID NO: 87412 - RNA, 31 nt, Homo Sapiens
auaccugaacuguuuccuccaaggcgggaac

SEQ ID NO: 87413 - RNA, 32 nt, Homo Sapiens
ucuuuggucaggcaaauguuuaaagagcaaua

SEQ ID NO: 87414 - RNA, 32 nt, Homo Sapiens
guagaucuaauagcugaacugauucaaacugu

SEQ ID NO: 87415 - RNA, 32 nt, Homo Sapiens
gaagagcacugacugugugccgggcacuagug

SEQ ID NO: 87416 - RNA, 32 nt, Homo Sapiens
uuggggagugggggguucgagggacuuagugg

SEQ ID NO: 87417 - RNA, 32 nt, Homo Sapiens
gggccggccccggugcccaccuguacccccac

SEQ ID NO: 87418 - RNA, 32 nt, Homo Sapiens
aguccagaaucaaagcacuuuugaaaaguggc

SEQ ID NO: 87419 - RNA, 32 nt, Homo Sapiens
guggcuggccccaguaccuggccaagcccacc

SEQ ID NO: 87420 - RNA, 32 nt, Homo Sapiens
ccaaguuuacuucuuaaaucuuuacaacugug

SEQ ID NO: 87421 - RNA, 32 nt, Homo Sapiens
uuggaaaauuacaacacugccuuugcaacacu

SEQ ID NO: 87422 - RNA, 32 nt, Homo Sapiens
aagccaaaaguaaggaggguggccaaauggua

SEQ ID NO: 87423 - RNA, 32 nt, Homo Sapiens
ggcaaaccggacccggccgccgccaggacugu

SEQ ID NO: 87424 - RNA, 32 nt, Homo Sapiens
acauaccucagacgccucuggauccaagaacc

SEQ ID NO: 87425 - RNA, 32 nt, Homo Sapiens
aaacuacgaaccggcuguccaaggcugagcgg

SEQ ID NO: 87426 - RNA, 32 nt, Homo Sapiens
accgccaccgccccggaguccggcgccgaagc

SEQ ID NO: 87427 - RNA, 28 nt, Homo Sapiens
auuccagaaguuaaucauuugaauucug

SEQ ID NO: 87428 - RNA, 32 nt, Homo Sapiens
gucgccuguggcggcccggacaggccacgggu

SEQ ID NO: 87429 - RNA, 32 nt, Homo Sapiens
uucuguggcaacagugaugacauugguguguu

SEQ ID NO: 87430 - RNA, 32 nt, Homo Sapiens
gucgggaagggagaugugacggaugaaaagga

SEQ ID NO: 87431 - RNA, 32 nt, Homo Sapiens
gaugauggcucucagcuuucagcccucuacag

SEQ ID NO: 87432 - RNA, 32 nt, Homo Sapiens
guguguucccacuguaucugcacuguucuuac

SEQ ID NO: 87433 - RNA, 32 nt, Homo Sapiens
guaucacuucaauaauacguauuauuauagga

SEQ ID NO: 87434 - RNA, 32 nt, Homo Sapiens
auggcugacaccuuuaaucgcaguacuuuggg

SEQ ID NO: 87435 - RNA, 32 nt, Homo Sapiens
aaaaucaaacaaaacuaaguugugaaggaagg

SEQ ID NO: 87436 - RNA, 32 nt, Homo Sapiens
acagugaaaccccgacucuacuaaaaauacaa

SEQ ID NO: 87437 - RNA, 32 nt, Homo Sapiens
guuucagugcuuugggacagauuuuauauuau

SEQ ID NO: 87438 - RNA, 32 nt, Homo Sapiens
gcuggcaggcugccuuccuuccuggagguucu

SEQ ID NO: 87439 - RNA, 32 nt, Homo Sapiens
acugcuuagugucaacuugacaucuucagcuu

SEQ ID NO: 87440 - RNA, 32 nt, Homo Sapiens
uuuuacggcugcggcggcuggugcucaguggg

SEQ ID NO: 87441 - RNA, 32 nt, Homo Sapiens
accuguauuacugaauaauaucaaauaaaaua

SEQ ID NO: 87442 - RNA, 32 nt, Homo Sapiens
gacagagagaaagggaucugaugaccaaagca

SEQ ID NO: 87443 - RNA, 32 nt, Homo Sapiens
aaggaguaucuugaauggcccuugaagaagcg

SEQ ID NO: 87444 - RNA, 32 nt, Homo Sapiens
uuucauuuuuaaaaacacugaauuacaguucu

SEQ ID NO: 87445 - RNA, 32 nt, Homo Sapiens
aaauaauuuguguucccugaucacucguuuaa

SEQ ID NO: 87446 - RNA, 32 nt, Homo Sapiens
cagccugcccugccuucccccggaugcugggc

SEQ ID NO: 87447 - RNA, 32 nt, Homo Sapiens
ugagccaucuguaucuacauauauuaaaauug

SEQ ID NO: 87448 - RNA, 32 nt, Homo Sapiens
ggagguagaggugggaggacugauugaggcca

SEQ ID NO: 87449 - RNA, 32 nt, Homo Sapiens
agacuuccaguuuuggaagcagcuggaucuua

SEQ ID NO: 87450 - RNA, 32 nt, Homo Sapiens
caucucacugggucuagucucaucucagacaa

SEQ ID NO: 87451 - RNA, 32 nt, Homo Sapiens
cgaguccgggcccgucccuccgcggccccauc

SEQ ID NO: 87452 - RNA, 32 nt, Homo Sapiens
ugaacuagggagaaaaacuuuccaugugugcg

SEQ ID NO: 87453 - RNA, 32 nt, Homo Sapiens
gcuaagacgcuugacuuauuaaggacuuuaac

SEQ ID NO: 87454 - RNA, 32 nt, Homo Sapiens
uacaugcccccucccuucacagggguacagaa

SEQ ID NO: 87455 - RNA, 32 nt, Homo Sapiens
cugaaaacaaugaugugaaaucuuaaaaaauu

SEQ ID NO: 87456 - RNA, 32 nt, Homo Sapiens
acccccgacagcagcccuccgcccacucugcc

SEQ ID NO: 87457 - RNA, 32 nt, Homo Sapiens
uuauagguugguuaaagugauggccuuuuuga

SEQ ID NO: 87458 - RNA, 32 nt, Homo Sapiens
gccuccucugaagaggaaaguggugauggaag

SEQ ID NO: 87459 - RNA, 32 nt, Homo Sapiens
guuuugugcaguuugucuacuuucuuagugaa

SEQ ID NO: 87460 - RNA, 32 nt, Homo Sapiens
agccaccccgacacccaaucuuggaagcccug

SEQ ID NO: 87461 - RNA, 32 nt, Homo Sapiens
uguuaaaaaaucaaugcaacuuuuaugugguc

SEQ ID NO: 87462 - RNA, 32 nt, Homo Sapiens
cuguuuucgcggcuaaaggccgcgcggcugac

SEQ ID NO: 87463 - RNA, 32 nt, Homo Sapiens
uauuuuuuucuuucuuuuuuaaaaaaauaugu

SEQ ID NO: 87464 - RNA, 32 nt, Homo Sapiens
cugcccaccuucccuucuucccaccugccugc

SEQ ID NO: 87465 - RNA, 32 nt, Homo Sapiens
gcaggugugagcgggccaugcugcuggcccag

SEQ ID NO: 87466 - RNA, 32 nt, Homo Sapiens
auacucaaucccauauucagcaagugugaagc

SEQ ID NO: 87467 - RNA, 32 nt, Homo Sapiens
uugucuuccucucugccccacccagauaaucg

SEQ ID NO: 87468 - RNA, 32 nt, Homo Sapiens
cuauaaauccgaagagaguucggacuauaagu

SEQ ID NO: 87469 - RNA, 32 nt, Homo Sapiens
uuccaggugugagccacuucacccagccacau

SEQ ID NO: 87470 - RNA, 32 nt, Homo Sapiens
ugacuaacaaacacagugaaaccccgucucua

SEQ ID NO: 87471 - RNA, 32 nt, Homo Sapiens
gcugaacucuguaccauucagaagaauggaag

SEQ ID NO: 87472 - RNA, 32 nt, Homo Sapiens
acaggccauuuucggacgcagccguucugugc

SEQ ID NO: 87473 - RNA, 32 nt, Homo Sapiens
gagcuguuuuuccgaggcagugaggaacggug

SEQ ID NO: 87474 - RNA, 32 nt, Homo Sapiens
cucuagggaccgcuccucccuuuuuccuuguc

SEQ ID NO: 87475 - RNA, 32 nt, Homo Sapiens
cuucucccaccccugcccccacuuccuguuug

SEQ ID NO: 87476 - RNA, 32 nt, Homo Sapiens
gccgaggcggguggaucaugaggucaggagga

SEQ ID NO: 87477 - RNA, 32 nt, Homo Sapiens
cuucucuccacuuuucacagucuucucauguu

SEQ ID NO: 87478 - RNA, 32 nt, Homo Sapiens
cccacacacuggauugugaggcucuuaacuuc

SEQ ID NO: 87479 - RNA, 32 nt, Homo Sapiens
ccuuaucuaaucuuugaauuuugucauguaau

SEQ ID NO: 87480 - RNA, 32 nt, Homo Sapiens
uuauuuacuuggauuagacucauuaaaaggua

SEQ ID NO: 87481 - RNA, 32 nt, Homo Sapiens
caucuacuucccuuucuucauguguuuccagc

SEQ ID NO: 87482 - RNA, 32 nt, Homo Sapiens
uuuuuaaacacacucacacacacacacacaua

SEQ ID NO: 87483 - RNA, 32 nt, Homo Sapiens
ccgcgacuccgggcuuggccccggcccuagcu

SEQ ID NO: 87484 - RNA, 32 nt, Homo Sapiens
cacaccauccccgcgggcggcgcggagccggc

SEQ ID NO: 87485 - RNA, 32 nt, Homo Sapiens
cucgaagcaucccagccugaaaagcacaugag

SEQ ID NO: 87486 - RNA, 32 nt, Homo Sapiens
aauacauuuuuccuaagaauuuuaaaaaguuc

SEQ ID NO: 87487 - RNA, 32 nt, Homo Sapiens
ccgaggccgugcugccccgagccccgagcccc

SEQ ID NO: 87488 - RNA, 32 nt, Homo Sapiens
uagcaaaugacagauuucuguaagccuauaua

SEQ ID NO: 87489 - RNA, 32 nt, Homo Sapiens
cagagaggagagcggagcggagcugccgcuga

SEQ ID NO: 87490 - RNA, 32 nt, Homo Sapiens
cgccaagggugggcugcgccuacgcccuugac

SEQ ID NO: 87491 - RNA, 32 nt, Homo Sapiens
aggccaucugaagagcguccugggugauggug

SEQ ID NO: 87492 - RNA, 32 nt, Homo Sapiens
gggucuccucgcugucgccgccgcugccacac

SEQ ID NO: 87493 - RNA, 32 nt, Homo Sapiens
uguguuuggaggcuaacuccagugugcugagu

SEQ ID NO: 87494 - RNA, 32 nt, Homo Sapiens
ccuuagcaguaggacuugauauuuucaauuuu

SEQ ID NO: 87495 - RNA, 32 nt, Homo Sapiens
uauuguggccucugacuucucuuucuucagcc

SEQ ID NO: 87496 - RNA, 32 nt, Homo Sapiens
aggugugaccagagaccaccucuguggccacc

SEQ ID NO: 87497 - RNA, 32 nt, Homo Sapiens
guugcugggcgguuccgaggugacggaagcgg

SEQ ID NO: 87498 - RNA, 32 nt, Homo Sapiens
ugcccguguuugucacuuacaaaaauguuuac

SEQ ID NO: 87499 - RNA, 30 nt, Homo Sapiens
uugagggauaaaaauuguguaagagccaaa

SEQ ID NO: 87500 - RNA, 32 nt, Homo Sapiens
gaaauacuccgcgugcgcuuguagaaggggag

SEQ ID NO: 87501 - RNA, 32 nt, Homo Sapiens
gugcaggugcaucaccuggaucaugaggucac

SEQ ID NO: 87502 - RNA, 32 nt, Homo Sapiens
gaaaugaggagagaaggacaugugcuauugaa

SEQ ID NO: 87503 - RNA, 32 nt, Homo Sapiens
aucugaaaaugguuccugguauuaugucugcu

SEQ ID NO: 87504 - RNA, 32 nt, Homo Sapiens
ugaagaugguaauuugcugcuaauagaguccu

SEQ ID NO: 87505 - RNA, 32 nt, Homo Sapiens
aauuucaagucuuccugauacaugacugaaua

SEQ ID NO: 87506 - RNA, 32 nt, Homo Sapiens
cgcuccaugccucucuguccucuucuuuguug

SEQ ID NO: 87507 - RNA, 32 nt, Homo Sapiens
ucugucagcaagcccuguggcuccagugacgg

SEQ ID NO: 87508 - RNA, 32 nt, Homo Sapiens
guuuccaguggcuaugagauggucaaaaugaa

SEQ ID NO: 87509 - RNA, 32 nt, Homo Sapiens
aucggcuuggagcgcgggagguggagucggcc

SEQ ID NO: 87510 - RNA, 32 nt, Homo Sapiens
agcauuugcauucuucugcagucgccucacca

SEQ ID NO: 87511 - RNA, 32 nt, Homo Sapiens
uuuauguauacuugcaaucaaauaaauauuau

SEQ ID NO: 87512 - RNA, 32 nt, Homo Sapiens
cgccacuauccuuaucagagacuuggcggggg

SEQ ID NO: 87513 - RNA, 30 nt, Homo Sapiens
cagccgggcaggcgaguccaaacccggaaa

SEQ ID NO: 87514 - RNA, 32 nt, Homo Sapiens
aaugauggagaauggaccaaaagcaggcgggg

SEQ ID NO: 87515 - RNA, 32 nt, Homo Sapiens
agccgcaggcuucgggaggcgagggggcgggg

SEQ ID NO: 87516 - RNA, 32 nt, Homo Sapiens
uccuggccucugggggaucggcggcggggggc

SEQ ID NO: 87517 - RNA, 32 nt, Homo Sapiens
caggccaggacugucagugcccgccccucggg

SEQ ID NO: 87518 - RNA, 32 nt, Homo Sapiens
cagugggugaugcuuuugcugcugcuuaaucc

SEQ ID NO: 87519 - RNA, 32 nt, Homo Sapiens
agauuuugggccucuuuuuuuccuuaauguca

SEQ ID NO: 87520 - RNA, 32 nt, Homo Sapiens
uagggugggcugcccagccuucuggucugagg

SEQ ID NO: 87521 - RNA, 32 nt, Homo Sapiens
auguuucauagguuugugaugaucuuuacguu

SEQ ID NO: 87522 - RNA, 32 nt, Homo Sapiens
gccagaccucagagaucucaccagcggggugc

SEQ ID NO: 87523 - RNA, 32 nt, Homo Sapiens
auuuuccccuguucuuuuuguguuaugcacuu

SEQ ID NO: 87524 - RNA, 32 nt, Homo Sapiens
uagaacgacaacaaaauaaauguuccugcagc

SEQ ID NO: 87525 - RNA, 30 nt, Homo Sapiens
ccgggauguggagcggcccaccccagccag

SEQ ID NO: 87526 - RNA, 32 nt, Homo Sapiens
uagagguuguagcaucuucugcuggaguaaua

SEQ ID NO: 87527 - RNA, 32 nt, Homo Sapiens
cacaagcuguaaacccuuuguagucauaagac

SEQ ID NO: 87528 - RNA, 32 nt, Homo Sapiens
cucagagcuuccauaucaaauuccucagcuuu

SEQ ID NO: 87529 - RNA, 32 nt, Homo Sapiens
gugcuuucucuguaccccccagcccauguccc

SEQ ID NO: 87530 - RNA, 31 nt, Homo Sapiens
acauagccaaaggucgcuccaagcguacagg

SEQ ID NO: 87531 - RNA, 32 nt, Homo Sapiens
gggaagcccucccuggccacagccucagcuug

SEQ ID NO: 87532 - RNA, 32 nt, Homo Sapiens
ugucgaaucugcggcggcgacccggcgccgcg

SEQ ID NO: 87533 - RNA, 32 nt, Homo Sapiens
aucaauguuucugaacucaaaccaguguacau

SEQ ID NO: 87534 - RNA, 32 nt, Homo Sapiens
guucucccggugaugcuggugcaugcucaagu

SEQ ID NO: 87535 - RNA, 32 nt, Homo Sapiens
agcuuaucaguguguuuuuuuauuuguaucag

SEQ ID NO: 87536 - RNA, 32 nt, Homo Sapiens
uuaaguagccgauacucuaaauaaaaauacca

SEQ ID NO: 87537 - RNA, 32 nt, Homo Sapiens
cucuccaguuuaaugaauguaauucuuguuaa

SEQ ID NO: 87538 - RNA, 31 nt, Homo Sapiens
gcuaaaaagcgcugccugcgccgccgccgcc

SEQ ID NO: 87539 - RNA, 29 nt, Homo Sapiens
augagacuuauucacuaccacaagaacag

SEQ ID NO: 87540 - RNA, 32 nt, Homo Sapiens
aucuaccugcuuuuccucucucucccaaggcc

SEQ ID NO: 87541 - RNA, 32 nt, Homo Sapiens
uucuuauuggaaucaagaccaauaccaaggag

SEQ ID NO: 87542 - RNA, 32 nt, Homo Sapiens
gugggcacagcugugguuugggugcugagcaa

SEQ ID NO: 87543 - RNA, 32 nt, Homo Sapiens
gcuaguguuuuccucuuguuccugcuuaugca

SEQ ID NO: 87544 - RNA, 32 nt, Homo Sapiens
ggagcggcgucccuuccaacccgccggucuca

SEQ ID NO: 87545 - RNA, 32 nt, Homo Sapiens
ucucuuaaauggaucauuuaaauuaguucuuc

SEQ ID NO: 87546 - RNA, 32 nt, Homo Sapiens
gcucacuauccugaaugaucgcggucaggggg

SEQ ID NO: 87547 - RNA, 32 nt, Homo Sapiens
uucucaagcugacuuccuaccucccccuccau

SEQ ID NO: 87548 - RNA, 32 nt, Homo Sapiens
uccuuccgaagagagaucuggugcuggcaugg

SEQ ID NO: 87549 - RNA, 32 nt, Homo Sapiens
cuacaggugcccgccaccacggucggcuaauu

SEQ ID NO: 87550 - RNA, 32 nt, Homo Sapiens
gcagcaggcggacgaggcguaagaccgcgcag

SEQ ID NO: 87551 - RNA, 32 nt, Homo Sapiens
aaaacuuguaaaugcugucaacuaugauaugg

SEQ ID NO: 87552 - RNA, 32 nt, Homo Sapiens
gagccagaccucuggcccagaaagccagacau

SEQ ID NO: 87553 - RNA, 32 nt, Homo Sapiens
cagguggagcugagauuaggccucuggggauc

SEQ ID NO: 87554 - RNA, 29 nt, Homo Sapiens
uguugugcauaugaggagcagcugaaaug

SEQ ID NO: 87555 - RNA, 32 nt, Homo Sapiens
gguccuccaguuuuuggcacagauguuccgga

SEQ ID NO: 87556 - RNA, 32 nt, Homo Sapiens
gggggccgcggcgcaaugucagagcagacgcc

SEQ ID NO: 87557 - RNA, 32 nt, Homo Sapiens
gccugggaauggggaggaacagaucuuggggg

SEQ ID NO: 87558 - RNA, 32 nt, Homo Sapiens
uuaaccuuuucugcagugaucuaagaagccag

SEQ ID NO: 87559 - RNA, 32 nt, Homo Sapiens
gcagccuaaggcaggguuuucagaccgugggu

SEQ ID NO: 87560 - RNA, 32 nt, Homo Sapiens
accagacucagcacuagcacuccaucagcacu

SEQ ID NO: 87561 - RNA, 32 nt, Homo Sapiens
gaaugaaaaugaaacucgauuuugauguuucu

SEQ ID NO: 87562 - RNA, 32 nt, Homo Sapiens
cuucuaucacugugcgguuaccucuuucacag

SEQ ID NO: 87563 - RNA, 31 nt, Homo Sapiens
uuggagaaauaaaugcuuuguguaacaucug

SEQ ID NO: 87564 - RNA, 32 nt, Homo Sapiens
gagccaccgagacugaaccaaacccaggaagc

SEQ ID NO: 87565 - RNA, 32 nt, Homo Sapiens
accagggacuaaaaucugcuguagcuagugag

SEQ ID NO: 87566 - RNA, 32 nt, Homo Sapiens
agaguuauuggugcagaaauggcuacccgaga

SEQ ID NO: 87567 - RNA, 32 nt, Homo Sapiens
caccuuucaagccccaguguucaagcucagag

SEQ ID NO: 87568 - RNA, 32 nt, Homo Sapiens
ccagccaggaaauuaaaguggcgacuaaaaca

SEQ ID NO: 87569 - RNA, 32 nt, Homo Sapiens
ucagcauguauuacuugacaaagagacacugu

SEQ ID NO: 87570 - RNA, 32 nt, Homo Sapiens
acuaaggauauuaaaguuaggggaaagaaaag

SEQ ID NO: 87571 - RNA, 32 nt, Homo Sapiens
auuuaugaauauuuauaccaaaaggaauucug

SEQ ID NO: 87572 - RNA, 32 nt, Homo Sapiens
cugccuugccccacccauagcccuguccauac

SEQ ID NO: 87573 - RNA, 32 nt, Homo Sapiens
cacacacacauauacacacacacacacuucac

SEQ ID NO: 87574 - RNA, 32 nt, Homo Sapiens
uccccuaaacaaaaagaacaauagaacugguc

SEQ ID NO: 87575 - RNA, 32 nt, Homo Sapiens
aaagagacucugcauugaccaagugcuugaga

SEQ ID NO: 87576 - RNA, 32 nt, Homo Sapiens
acauccuauuccuuccucuuuaucucacaauu

SEQ ID NO: 87577 - RNA, 27 nt, Homo Sapiens
cguucccucuucagcagcccccucccc

SEQ ID NO: 87578 - RNA, 32 nt, Homo Sapiens
aagaguugcauucuuauuauguaaggaugauu

SEQ ID NO: 87579 - RNA, 32 nt, Homo Sapiens
ccgcgucagaacuuagagggccaggcaggguc

SEQ ID NO: 87580 - RNA, 32 nt, Homo Sapiens
uaauaagaacagacauuuguauucugcuuuac

SEQ ID NO: 87581 - RNA, 32 nt, Homo Sapiens
agaucgcuauguauaauacugaugaagcauuu

SEQ ID NO: 87582 - RNA, 32 nt, Homo Sapiens
aaccuacccagcugagccccuccuuuguuuag

SEQ ID NO: 87583 - RNA, 32 nt, Homo Sapiens
gcaugagccaaauaaacuucuuacuuggacuu

SEQ ID NO: 87584 - RNA, 32 nt, Homo Sapiens
cuguacuaacuguucucuuguuccgguaccgg

SEQ ID NO: 87585 - RNA, 32 nt, Homo Sapiens
guaguuuuuuucuguucuaguuuuuuuuuuuu

SEQ ID NO: 87586 - RNA, 32 nt, Homo Sapiens
gauucucugauguggcggccacugcugagaac

SEQ ID NO: 87587 - RNA, 32 nt, Homo Sapiens
ugccugaagaaugaaagggucuauguuuucug

SEQ ID NO: 87588 - RNA, 32 nt, Homo Sapiens
cggcaggcugcccuggccuccugcgucaggac

SEQ ID NO: 87589 - RNA, 32 nt, Homo Sapiens
aaaggaugcucuaauggaugacagcgauacuc

SEQ ID NO: 87590 - RNA, 32 nt, Homo Sapiens
cccagcuuuguucugaggacguggugacuucc

SEQ ID NO: 87591 - RNA, 32 nt, Homo Sapiens
uaagcucuagagaagcacuuugggauucuuuc

SEQ ID NO: 87592 - RNA, 32 nt, Homo Sapiens
ggucuggaggacgguggcccucuucucacagc

SEQ ID NO: 87593 - RNA, 32 nt, Homo Sapiens
ugaaacgcaaacaaaauucuggugaaauaacu

SEQ ID NO: 87594 - RNA, 32 nt, Homo Sapiens
gguucuguacugaguugacgccccaggagcug

SEQ ID NO: 87595 - RNA, 32 nt, Homo Sapiens
cgguggaaggaucaccugagcccaggagguca

SEQ ID NO: 87596 - RNA, 32 nt, Homo Sapiens
uccugcccaucccuucccuacaaugcccacuc

SEQ ID NO: 87597 - RNA, 32 nt, Homo Sapiens
aguacauagggcaugauguggauuuauuaguc

SEQ ID NO: 87598 - RNA, 32 nt, Homo Sapiens
aaaugcucccuaggcuggcugcggcuacaagg

SEQ ID NO: 87599 - RNA, 32 nt, Homo Sapiens
ggaaugugaaugaacagaacguguugucugaa

SEQ ID NO: 87600 - RNA, 32 nt, Homo Sapiens
cugggcucuagcaccacccuccccuccccgca

SEQ ID NO: 87601 - RNA, 32 nt, Homo Sapiens
auuagaccuaggccucagcugcacugcccgaa

SEQ ID NO: 87602 - RNA, 32 nt, Homo Sapiens
cuacucaggaggaugaggcaggagaaucacuu

SEQ ID NO: 87603 - RNA, 32 nt, Homo Sapiens
ucaggagggaaccuggccccaaggcugcggcc

SEQ ID NO: 87604 - RNA, 32 nt, Homo Sapiens
agcaucccaccccugggagucuggccagcuga

SEQ ID NO: 87605 - RNA, 32 nt, Homo Sapiens
gcccugagaugagcauucccaagcugcuuccc

SEQ ID NO: 87606 - RNA, 32 nt, Homo Sapiens
cagagaagccuaaagugauucaauacccagga

SEQ ID NO: 87607 - RNA, 32 nt, Homo Sapiens
ucauacgaugaaaucuucacucucaaguugau

SEQ ID NO: 87608 - RNA, 32 nt, Homo Sapiens
uuugaugucauuucuuuuuuuuuuuuuaauaa

SEQ ID NO: 87609 - RNA, 32 nt, Homo Sapiens
ccggcuaggaggguggcccacccauuuccagu

SEQ ID NO: 87610 - RNA, 32 nt, Homo Sapiens
ccaaauuccaaagacuuuuucuuaaccuaaag

SEQ ID NO: 87611 - RNA, 32 nt, Homo Sapiens
gagaacccggguggccagcagcagccaacgcu

SEQ ID NO: 87612 - RNA, 32 nt, Homo Sapiens
cagauuauauucaaauaaagcuuauuucaaua

SEQ ID NO: 87613 - RNA, 32 nt, Homo Sapiens
gccagggaaauccaggaaucugcaacaaaaac

SEQ ID NO: 87614 - RNA, 32 nt, Homo Sapiens
ccgcuguggcggugcacaggggaggcaggucc

SEQ ID NO: 87615 - RNA, 32 nt, Homo Sapiens
aacauuaaaguuacuuuuuuuuuuuuuuuuuu

SEQ ID NO: 87616 - RNA, 32 nt, Homo Sapiens
cccgggggccgcgucgcagcccuccgugcucc

SEQ ID NO: 87617 - RNA, 32 nt, Homo Sapiens
uaaauacaaaaaugaauacugaauuuugaguc

SEQ ID NO: 87618 - RNA, 30 nt, Homo Sapiens
cacaaccauccuggucauucucgagcaugu

SEQ ID NO: 87619 - RNA, 32 nt, Homo Sapiens
auauuuuaguugauauuuuguaaaaugcacuu

SEQ ID NO: 87620 - RNA, 32 nt, Homo Sapiens
cguccccagcgggcccgggcccucacucccug

SEQ ID NO: 87621 - RNA, 32 nt, Homo Sapiens
uacugguucauuuguaaauuauuauucauaua

SEQ ID NO: 87622 - RNA, 32 nt, Homo Sapiens
auggcauccuaggaagaugaccucauguucau

SEQ ID NO: 87623 - RNA, 32 nt, Homo Sapiens
acaagcugccacggggaacugcagcuuuugcu

SEQ ID NO: 87624 - RNA, 32 nt, Homo Sapiens
ugucugcagaaccaccaccuugaaagauccau

SEQ ID NO: 87625 - RNA, 32 nt, Homo Sapiens
ucagcagaacagaauccuuuuccucuuuuccu

SEQ ID NO: 87626 - RNA, 32 nt, Homo Sapiens
aacaacagccuggccucgcugcccggcgaggc

SEQ ID NO: 87627 - RNA, 32 nt, Homo Sapiens
cuuaaccuuguacaguuauuuucaucucuuga

SEQ ID NO: 87628 - RNA, 32 nt, Homo Sapiens
ggggcauggggcaccuggugcugcugaggggc

SEQ ID NO: 87629 - RNA, 32 nt, Homo Sapiens
gaggucuguauauuguccuugccccagccugc

SEQ ID NO: 87630 - RNA, 32 nt, Homo Sapiens
aaaagcaguuuagaaaaaucucaaaaacaaaa

SEQ ID NO: 87631 - RNA, 32 nt, Homo Sapiens
cggcaguggcuuacucccggugccagguucuu

SEQ ID NO: 87632 - RNA, 31 nt, Homo Sapiens
caacuccaagccauccugaaagcuauucuug

SEQ ID NO: 87633 - RNA, 32 nt, Homo Sapiens
uuuuccaugcuuuuccucucccugaugguuac

SEQ ID NO: 87634 - RNA, 32 nt, Homo Sapiens
ucaccaccacgaucaagauguagaauauuccc

SEQ ID NO: 87635 - RNA, 32 nt, Homo Sapiens
uggcucauucucuccuuccagcucuuuacauc

SEQ ID NO: 87636 - RNA, 32 nt, Homo Sapiens
uaagaagcuaauugaucaguuccagaugaugc

SEQ ID NO: 87637 - RNA, 32 nt, Homo Sapiens
cccguccuccucguccaccccggagaggucag

SEQ ID NO: 87638 - RNA, 32 nt, Homo Sapiens
ccuccgcacggaagaggggccggacgccaccu

SEQ ID NO: 87639 - RNA, 32 nt, Homo Sapiens
guguuacacuugcaggaguugccgauggaggc

SEQ ID NO: 87640 - RNA, 32 nt, Homo Sapiens
gauguuguuugaaacaucuacauccaccauuu

SEQ ID NO: 87641 - RNA, 32 nt, Homo Sapiens
aauacucaaaacaaaaugaaugcaugugucca

SEQ ID NO: 87642 - RNA, 32 nt, Homo Sapiens
uugugcaaugguuucuuaauuuuuuuacuguu

SEQ ID NO: 87643 - RNA, 32 nt, Homo Sapiens
uucuuuucuuggggugauuuaaucaccuggga

SEQ ID NO: 87644 - RNA, 32 nt, Homo Sapiens
agcggcaguggcggcggaggagggggcggcgu

SEQ ID NO: 87645 - RNA, 32 nt, Homo Sapiens
cauuagucugaagaguauacauuggauaggaa

SEQ ID NO: 87646 - RNA, 32 nt, Homo Sapiens
aauaaccaguuauacguauuaaacaguuuaca

SEQ ID NO: 87647 - RNA, 32 nt, Homo Sapiens
gugagugcuuuaguguuuuaaacuauauggau

SEQ ID NO: 87648 - RNA, 32 nt, Homo Sapiens
uggggggcacaugucuucguucccucccgacu

SEQ ID NO: 87649 - RNA, 32 nt, Homo Sapiens
acaggaccagcugagacuaagaaggaccagca

SEQ ID NO: 87650 - RNA, 32 nt, Homo Sapiens
ucaguucccccauccucuuccuccucucgcug

SEQ ID NO: 87651 - RNA, 32 nt, Homo Sapiens
agggcagcguggagacaagacccggcgaccuc

SEQ ID NO: 87652 - RNA, 32 nt, Homo Sapiens
uguucuaaauucauagagaggcacuguaugac

SEQ ID NO: 87653 - RNA, 32 nt, Homo Sapiens
cuugugacgguguaccugaggcccccaucucc

SEQ ID NO: 87654 - RNA, 32 nt, Homo Sapiens
ggaugggccaccagccaccuccuccaacucaa

SEQ ID NO: 87655 - RNA, 32 nt, Homo Sapiens
uuaauacaaggaagauuguuuacuucaucaag

SEQ ID NO: 87656 - RNA, 32 nt, Homo Sapiens
auggucaugcugcaauuuguuagaauaauagg

SEQ ID NO: 87657 - RNA, 29 nt, Homo Sapiens
auuaauaaaggcuuauauuuugguaacac

SEQ ID NO: 87658 - RNA, 32 nt, Homo Sapiens
cuaacuugagcagaucugauuauucuuggaua

SEQ ID NO: 87659 - RNA, 32 nt, Homo Sapiens
ucugccugauccccuggcauuuggucagagua

SEQ ID NO: 87660 - RNA, 32 nt, Homo Sapiens
gcaggaauccacaaugacuuugaaguuguugg

SEQ ID NO: 87661 - RNA, 32 nt, Homo Sapiens
ccaucccugcacuccuggguccugcucuucca

SEQ ID NO: 87662 - RNA, 32 nt, Homo Sapiens
uuauuuauuuaguaagauggagucucgcucug

SEQ ID NO: 87663 - RNA, 32 nt, Homo Sapiens
cccacuacggcacgccgcaccggagcacggca

SEQ ID NO: 87664 - RNA, 32 nt, Homo Sapiens
ugccaccgagacccccagccacgugcgucccu

SEQ ID NO: 87665 - RNA, 32 nt, Homo Sapiens
aaaaagggugccaucugugucuggaggggcag

SEQ ID NO: 87666 - RNA, 32 nt, Homo Sapiens
caucgggcaaugccuccacuggggccagaaaa

SEQ ID NO: 87667 - RNA, 32 nt, Homo Sapiens
agugucuucuauuuucauuaucuuucagaaac

SEQ ID NO: 87668 - RNA, 32 nt, Homo Sapiens
cucuuuguaacugugugacuugagaucuaguu

SEQ ID NO: 87669 - RNA, 32 nt, Homo Sapiens
guuccuauaagaugcuuagaaacuaguuguua

SEQ ID NO: 87670 - RNA, 32 nt, Homo Sapiens
aacuaaggcauuaagagauauuagauauuucu

SEQ ID NO: 87671 - RNA, 32 nt, Homo Sapiens
ugguuuauaacuucagaagaaauaauggaaag

SEQ ID NO: 87672 - RNA, 32 nt, Homo Sapiens
ucugcugcugggagucucuggucugugucugu

SEQ ID NO: 87673 - RNA, 32 nt, Homo Sapiens
gugcgaggcgggguggcugcaggccgcccggu

SEQ ID NO: 87674 - RNA, 32 nt, Homo Sapiens
aauccauggaagagagauuuaagacuuauuga

SEQ ID NO: 87675 - RNA, 30 nt, Homo Sapiens
uugcgccccgaaccuggcgcccugaagcua

SEQ ID NO: 87676 - RNA, 31 nt, Homo Sapiens
cuguaagggggaaaaacaguauaucaccauu

SEQ ID NO: 87677 - RNA, 32 nt, Homo Sapiens
gcuaugguaaaaauaaaagugguuuuaugaug

SEQ ID NO: 87678 - RNA, 32 nt, Homo Sapiens
uaaguaauuuguaaaaguuucuuaaaauuuuu

SEQ ID NO: 87679 - RNA, 32 nt, Homo Sapiens
gucggagggcuuugggaccgccagauggggcc

SEQ ID NO: 87680 - RNA, 32 nt, Homo Sapiens
acgcucgacuucaugcucagugccaaagcuga

SEQ ID NO: 87681 - RNA, 32 nt, Homo Sapiens
acuguacaucuucuuggauuuguuucauuaaa

SEQ ID NO: 87682 - RNA, 32 nt, Homo Sapiens
acuacuccgagccugugacguuugcggcacca

SEQ ID NO: 87683 - RNA, 29 nt, Homo Sapiens
cuguccccggguuucagagacaacuuccc

SEQ ID NO: 87684 - RNA, 32 nt, Homo Sapiens
ugcuccuuauuuuaacuuugucuugcauuguc

SEQ ID NO: 87685 - RNA, 32 nt, Homo Sapiens
guugcaccugcuccacaccuccccacagccuc

SEQ ID NO: 87686 - RNA, 31 nt, Homo Sapiens
agaagguagcgcagcggggaaaggcgggaga

SEQ ID NO: 87687 - RNA, 32 nt, Homo Sapiens
aaccuaugauucaguaacuucuuaccauauaa

SEQ ID NO: 87688 - RNA, 30 nt, Homo Sapiens
ggcuccugguggcagcaccaggggacacac

SEQ ID NO: 87689 - RNA, 32 nt, Homo Sapiens
gcagugucuguggggguuucucugccagcagg

SEQ ID NO: 87690 - RNA, 32 nt, Homo Sapiens
agacagacgcagagacgcagaucuuugugaag

SEQ ID NO: 87691 - RNA, 32 nt, Homo Sapiens
acacccaugccaagcagugggagcacgcagga

SEQ ID NO: 87692 - RNA, 32 nt, Homo Sapiens
acuugcuagacaaagcuacccagauuugucuu

SEQ ID NO: 87693 - RNA, 32 nt, Homo Sapiens
ccaaggccacugucagaggaaauaaucuaaau

SEQ ID NO: 87694 - RNA, 32 nt, Homo Sapiens
gggccuggguggcaggggguggguggccugug

SEQ ID NO: 87695 - RNA, 31 nt, Homo Sapiens
ccuccccuaaagaaaaaggauauuagauugc

SEQ ID NO: 87696 - RNA, 32 nt, Homo Sapiens
cuuuguaguuuagguauuuggauuugugaaga

SEQ ID NO: 87697 - RNA, 32 nt, Homo Sapiens
auccuucuggaaggcauagaacacgguuacag

SEQ ID NO: 87698 - RNA, 32 nt, Homo Sapiens
cggccucggcccgccgggcccgcagugugaga

SEQ ID NO: 87699 - RNA, 32 nt, Homo Sapiens
uauuauauuuuugucaugguaaagagguauac

SEQ ID NO: 87700 - RNA, 32 nt, Homo Sapiens
cucaauacauaaauaccuuaguagagaguaag

SEQ ID NO: 87701 - RNA, 32 nt, Homo Sapiens
cugcaaccuuggcguuaucaguacugccugug

SEQ ID NO: 87702 - RNA, 32 nt, Homo Sapiens
aauacagucauguaucucuuggugacagggac

SEQ ID NO: 87703 - RNA, 32 nt, Homo Sapiens
uaaaauuuccuuauguucugcuauuauguuug

SEQ ID NO: 87704 - RNA, 32 nt, Homo Sapiens
acccaggucuaccuguugcagagucaagggac

SEQ ID NO: 87705 - RNA, 32 nt, Homo Sapiens
aggccccagcgccguuagucuccagcugacuc

SEQ ID NO: 87706 - RNA, 32 nt, Homo Sapiens
cuuaguuuacacauuauuuauggucaguuuuu

SEQ ID NO: 87707 - RNA, 32 nt, Homo Sapiens
cuuucaacccucacauucaggaauaauuuuau

SEQ ID NO: 87708 - RNA, 32 nt, Homo Sapiens
gagauggguaguaucauuuagauuaacauuug

SEQ ID NO: 87709 - RNA, 32 nt, Homo Sapiens
cgaggccccgccccggcgccccgccccuccuc

SEQ ID NO: 87710 - RNA, 32 nt, Homo Sapiens
cauucccuccagcgccagcaccacugcaacau

SEQ ID NO: 87711 - RNA, 32 nt, Homo Sapiens
ggagugcuuuacaauuuuuauuuuuaaauggg

SEQ ID NO: 87712 - RNA, 32 nt, Homo Sapiens
uuaaugacuguaaaguuguagguaaaauguca

SEQ ID NO: 87713 - RNA, 32 nt, Homo Sapiens
uccgaccaccgccgcuucugauauuucgguga

SEQ ID NO: 87714 - RNA, 32 nt, Homo Sapiens
gcaccuugagggggugggaggggcuggugucc

SEQ ID NO: 87715 - RNA, 32 nt, Homo Sapiens
auucauugacauuucugugguuugaauccaga

SEQ ID NO: 87716 - RNA, 32 nt, Homo Sapiens
cccugccccuccccgcccugccuggccgucac

SEQ ID NO: 87717 - RNA, 32 nt, Homo Sapiens
cuccucucuccaucgcaccccauccuuccuaa

SEQ ID NO: 87718 - RNA, 32 nt, Homo Sapiens
ccugccuggauccuccucccucccguccucgu

SEQ ID NO: 87719 - RNA, 32 nt, Homo Sapiens
cgagaggaacgcgccggugcccuugccuucgc

SEQ ID NO: 87720 - RNA, 32 nt, Homo Sapiens
caaacucccagccaaggcgcgcgguggcgucc

SEQ ID NO: 87721 - RNA, 32 nt, Homo Sapiens
aaaagaugaaaauaaaccaagccugcagcaua

SEQ ID NO: 87722 - RNA, 32 nt, Homo Sapiens
uauaaaaacaggaucauauacuguauauauaa

SEQ ID NO: 87723 - RNA, 32 nt, Homo Sapiens
ugggaggagagagcggcagagaagcucugaga

SEQ ID NO: 87724 - RNA, 32 nt, Homo Sapiens
uuuagagcugaacaagaauccaagccugcaac

SEQ ID NO: 87725 - RNA, 32 nt, Homo Sapiens
uggggauggugcccccuccucugaauagggga

SEQ ID NO: 87726 - RNA, 32 nt, Homo Sapiens
gcuggcucgggaaguucugugcaugcguggca

SEQ ID NO: 87727 - RNA, 32 nt, Homo Sapiens
auggaggauuguacauauaaauacuauuuaaa

SEQ ID NO: 87728 - RNA, 30 nt, Homo Sapiens
agaagucuggacuuucuucucccuuaucau

SEQ ID NO: 87729 - RNA, 29 nt, Homo Sapiens
agauacauauguaucuacacagaguaaua

SEQ ID NO: 87730 - RNA, 32 nt, Homo Sapiens
ccgagaucccaaggugcuuagaugggugcgcc

SEQ ID NO: 87731 - RNA, 32 nt, Homo Sapiens
uccauccucgguuucccuguccuugccccggg

SEQ ID NO: 87732 - RNA, 32 nt, Homo Sapiens
gacuuuucuuuuugguaaugacuugcauuuau

SEQ ID NO: 87733 - RNA, 32 nt, Homo Sapiens
cuucccgcagccgccuggcccagccugggcac

SEQ ID NO: 87734 - RNA, 32 nt, Homo Sapiens
gagcuaauuuguagaauuauuuuuacgauuuc

SEQ ID NO: 87735 - RNA, 32 nt, Homo Sapiens
cuuucugcgggugggaggggaacuagggaccc

SEQ ID NO: 87736 - RNA, 32 nt, Homo Sapiens
gucuacgugugugcgugcguggcugggggagg

SEQ ID NO: 87737 - RNA, 32 nt, Homo Sapiens
ucgcucaucagcacgucguucgugcucaaggg

SEQ ID NO: 87738 - RNA, 32 nt, Homo Sapiens
aaggagggcuugcggcacuuucuggaccgcgu

SEQ ID NO: 87739 - RNA, 32 nt, Homo Sapiens
cuccagcccuggugcuguacccccgacgugcu

SEQ ID NO: 87740 - RNA, 32 nt, Homo Sapiens
uuggugaaaaccuuccugaggaucuggauuca

SEQ ID NO: 87741 - RNA, 32 nt, Homo Sapiens
agcauggaucagcuguuaaucucauuggagga

SEQ ID NO: 87742 - RNA, 32 nt, Homo Sapiens
uuuugcuauguuaagguuguguuuuuuaauac

SEQ ID NO: 87743 - RNA, 32 nt, Homo Sapiens
gauuuggaaaaaaaaacuuaugauucuaagug

SEQ ID NO: 87744 - RNA, 32 nt, Homo Sapiens
ggccuuuccuuuucuuuuuaaacagaaacuuu

SEQ ID NO: 87745 - RNA, 32 nt, Homo Sapiens
uucacaggagaugucugagacuuuugccggua

SEQ ID NO: 87746 - RNA, 32 nt, Homo Sapiens
agcgccgccggcguuggaggccucgcacucgu

SEQ ID NO: 87747 - RNA, 29 nt, Homo Sapiens
aagccuucaucuaugaaccacaaaguagc

SEQ ID NO: 87748 - RNA, 31 nt, Homo Sapiens
guugccauggauccuggggacgacuggcugg

SEQ ID NO: 87749 - RNA, 32 nt, Homo Sapiens
ccccggaguggaagccgaagcaggaguuguug

SEQ ID NO: 87750 - RNA, 32 nt, Homo Sapiens
ccucgcaggcagcucaucaacgcaauugcaac

SEQ ID NO: 87751 - RNA, 32 nt, Homo Sapiens
gaggauucgggugcccggggccgcgucgcccc

SEQ ID NO: 87752 - RNA, 32 nt, Homo Sapiens
cccggauccugcuuuuguccagaugggccucg

SEQ ID NO: 87753 - RNA, 32 nt, Homo Sapiens
agugauuuuaacuauucuuggcugcuuaaaca

SEQ ID NO: 87754 - RNA, 32 nt, Homo Sapiens
ucccagcccuccccucuuucccaucgagucuc

SEQ ID NO: 87755 - RNA, 32 nt, Homo Sapiens
uccucccaccucagcucccugagaagcuggga

SEQ ID NO: 87756 - RNA, 32 nt, Homo Sapiens
ucaguccaucccagagggaccggaguuaugac

SEQ ID NO: 87757 - RNA, 32 nt, Homo Sapiens
uccaccccaaccccugcuggcuccucugggag

SEQ ID NO: 87758 - RNA, 32 nt, Homo Sapiens
cuagcucugugggaagguuuugggcucucugg

SEQ ID NO: 87759 - RNA, 32 nt, Homo Sapiens
cccaucugccucugcccuuucuagccaagguu

SEQ ID NO: 87760 - RNA, 29 nt, Homo Sapiens
uccagcucuauccauguugcugcaaauga

SEQ ID NO: 87761 - RNA, 32 nt, Homo Sapiens
gccggccucacagagagcgccgugugugugug

SEQ ID NO: 87762 - RNA, 32 nt, Homo Sapiens
acuagcuaauaaacuguaaauguaaaaaaaaa

SEQ ID NO: 87763 - RNA, 32 nt, Homo Sapiens
cacgugcccucccugccacccuccgucuagag

SEQ ID NO: 87764 - RNA, 32 nt, Homo Sapiens
aacacaagaaggaaaaggcuguggcugcagcu

SEQ ID NO: 87765 - RNA, 32 nt, Homo Sapiens
ggccuaaauagcuucaggauguaucuuagcug

SEQ ID NO: 87766 - RNA, 32 nt, Homo Sapiens
uuugguuuaaaagacacacuuguccacauagg

SEQ ID NO: 87767 - RNA, 32 nt, Homo Sapiens
aaaugccuuucugcaaagaagguuuccagaga

SEQ ID NO: 87768 - RNA, 32 nt, Homo Sapiens
agcaaauaguuuccucuccugcucugugcagu

SEQ ID NO: 87769 - RNA, 32 nt, Homo Sapiens
acaauuccgagcccucgggugguuugcgggag

SEQ ID NO: 87770 - RNA, 32 nt, Homo Sapiens
ugggauuuuguugauauuuucuuagagaauga

SEQ ID NO: 87771 - RNA, 32 nt, Homo Sapiens
caagagaguguccggcuucgcugcugagcgcg

SEQ ID NO: 87772 - RNA, 31 nt, Homo Sapiens
uuccaugcucuuuggcaccaggcaggagaug

SEQ ID NO: 87773 - RNA, 32 nt, Homo Sapiens
ccuccugcaauaauucggggagucucagcccc

SEQ ID NO: 87774 - RNA, 32 nt, Homo Sapiens
ccuccacaaaagcaaauccuuucaagaauggc

SEQ ID NO: 87775 - RNA, 32 nt, Homo Sapiens
ccaccaccacccaacuggggcuagagugggga

SEQ ID NO: 87776 - RNA, 32 nt, Homo Sapiens
aagagaggaaauguguuucaguuucuggagug

SEQ ID NO: 87777 - RNA, 32 nt, Homo Sapiens
gggccccguggcagagcccccaucccuugggg

SEQ ID NO: 87778 - RNA, 32 nt, Homo Sapiens
ucccccuccaaauauccuccaagaucuagaga

SEQ ID NO: 87779 - RNA, 32 nt, Homo Sapiens
gaggcuggucagagauucugugccugcuuuau

SEQ ID NO: 87780 - RNA, 32 nt, Homo Sapiens
cucucuaggaggggccugggggucugguuggg

SEQ ID NO: 87781 - RNA, 32 nt, Homo Sapiens
cucugggcaacgcggucugcugguucccacgu

SEQ ID NO: 87782 - RNA, 32 nt, Homo Sapiens
aggagccugccaggcugacgugcaucccaccc

SEQ ID NO: 87783 - RNA, 32 nt, Homo Sapiens
guaacaauugguugucuugguuauguuugucc

SEQ ID NO: 87784 - RNA, 32 nt, Homo Sapiens
cggcccugaaccagcuccagcccucugcucuc

SEQ ID NO: 87785 - RNA, 32 nt, Homo Sapiens
aagcccugucaugguggccucucugacaaguu

SEQ ID NO: 87786 - RNA, 32 nt, Homo Sapiens
ccuccuugcggcccugguggggauccaggcug

SEQ ID NO: 87787 - RNA, 32 nt, Homo Sapiens
cauuuauuggucccuccuccuuuccagcuauu

SEQ ID NO: 87788 - RNA, 32 nt, Homo Sapiens
ccggggcccggcggccgccgccgcgauguuuc

SEQ ID NO: 87789 - RNA, 32 nt, Homo Sapiens
agcugccuacuuuaacccauuuuucaaccugu

SEQ ID NO: 87790 - RNA, 32 nt, Homo Sapiens
gaccccguaucuacaaaaauuagccagguguu

SEQ ID NO: 87791 - RNA, 32 nt, Homo Sapiens
cagcugccccucccagaacacuccaugccacu

SEQ ID NO: 87792 - RNA, 32 nt, Homo Sapiens
uagcguaggcugugacuggcuccagcugaucc

SEQ ID NO: 87793 - RNA, 32 nt, Homo Sapiens
ccucagcagaccucuuggaauuaggguuucua

SEQ ID NO: 87794 - RNA, 32 nt, Homo Sapiens
ggaggagaacugggggcgcgggaggcuggugg

SEQ ID NO: 87795 - RNA, 32 nt, Homo Sapiens
cccggccccccgcgcccgcccccauuucaggu

SEQ ID NO: 87796 - RNA, 32 nt, Homo Sapiens
cucaccccaagccucauguucauaccagccag

SEQ ID NO: 87797 - RNA, 32 nt, Homo Sapiens
auauuacccaaguuucuucaugaguugacaug

SEQ ID NO: 87798 - RNA, 32 nt, Homo Sapiens
uaaacauacuauguacacaauuacuguaaggc

SEQ ID NO: 87799 - RNA, 32 nt, Homo Sapiens
auggaucaggacagcucuguucuccaaggcca

SEQ ID NO: 87800 - RNA, 32 nt, Homo Sapiens
ggggguaugauguggaagcugguuucagccca

SEQ ID NO: 87801 - RNA, 32 nt, Homo Sapiens
gcgggggagugggacucacccagcggcgaccc

SEQ ID NO: 87802 - RNA, 32 nt, Homo Sapiens
uuuguaaaaugaagauucgggacuggcucaua

SEQ ID NO: 87803 - RNA, 32 nt, Homo Sapiens
cugcauguuccacaucagucaaugcaacuuag

SEQ ID NO: 87804 - RNA, 32 nt, Homo Sapiens
uugagagagauauuuuugggacauuauuuugg

SEQ ID NO: 87805 - RNA, 32 nt, Homo Sapiens
cuuauugcuaaaaauacuaaaugucauggguc

SEQ ID NO: 87806 - RNA, 32 nt, Homo Sapiens
gcagaaaaaaucagcuagaacagccuuggggu

SEQ ID NO: 87807 - RNA, 32 nt, Homo Sapiens
agacagucuugucuccucuccucaggccccug

SEQ ID NO: 87808 - RNA, 30 nt, Homo Sapiens
gcaggugacugugcugugcagcucucuaaa

SEQ ID NO: 87809 - RNA, 26 nt, Homo Sapiens
gauggcgagccgggcgguggugagag

SEQ ID NO: 87810 - RNA, 32 nt, Homo Sapiens
ggaacaggaagacaugguguggucccuucuuc

SEQ ID NO: 87811 - RNA, 32 nt, Homo Sapiens
ccuuagacauaaaguaaaauaguuuaucauuu

SEQ ID NO: 87812 - RNA, 32 nt, Homo Sapiens
ugggagcggaguggagucgggcggggccgaag

SEQ ID NO: 87813 - RNA, 32 nt, Homo Sapiens
ugcgcguuucucuuuuucacucuuuuccauuu

SEQ ID NO: 87814 - RNA, 31 nt, Homo Sapiens
aaacugaugauucuuaaucaagauuguuuuc

SEQ ID NO: 87815 - RNA, 32 nt, Homo Sapiens
ggccaagcagagagaguggccuugaggaagcc

SEQ ID NO: 87816 - RNA, 32 nt, Homo Sapiens
auguccuucuuuaaaccuggcuuauuccacag

SEQ ID NO: 87817 - RNA, 32 nt, Homo Sapiens
cccgcagcaucccacccccaaaccaccgacuc

SEQ ID NO: 87818 - RNA, 32 nt, Homo Sapiens
cugguuggggccuggcuucaccgaggacaguc

SEQ ID NO: 87819 - RNA, 32 nt, Homo Sapiens
agcacacagcagucacauccuggaggaacugu

SEQ ID NO: 87820 - RNA, 32 nt, Homo Sapiens
uuucccugucuccuuucugcaucauaaagaug

SEQ ID NO: 87821 - RNA, 32 nt, Homo Sapiens
ucacauuguuaagaaaaauacuuuuuaaaguu

SEQ ID NO: 87822 - RNA, 32 nt, Homo Sapiens
cgcgcccgcgcgcguucuuaguacucuccccg

SEQ ID NO: 87823 - RNA, 32 nt, Homo Sapiens
ugccuggcccuuuuuucuucagagcuuguugu

SEQ ID NO: 87824 - RNA, 31 nt, Homo Sapiens
cuguggacgcccugccugcccugcagaggcg

SEQ ID NO: 87825 - RNA, 32 nt, Homo Sapiens
uccucgguucugucucgggucaccugaggcau

SEQ ID NO: 87826 - RNA, 32 nt, Homo Sapiens
ggaggagccggcagggagauccuguuuccuca

SEQ ID NO: 87827 - RNA, 32 nt, Homo Sapiens
accaaggagcagauccuggagcugcuggugcu

SEQ ID NO: 87828 - RNA, 32 nt, Homo Sapiens
gggcugcagggcugcgggcgcuugguucggcc

SEQ ID NO: 87829 - RNA, 32 nt, Homo Sapiens
uuugggaauaaaauauaaucgaauauucaaca

SEQ ID NO: 87830 - RNA, 32 nt, Homo Sapiens
uagaaaggaggcuguggcuaaagcagaaaugg

SEQ ID NO: 87831 - RNA, 32 nt, Homo Sapiens
agaccaccauuuuaagcauuugagaauucuua

SEQ ID NO: 87832 - RNA, 32 nt, Homo Sapiens
acugagugcugggagugaguugguaauaugag

SEQ ID NO: 87833 - RNA, 32 nt, Homo Sapiens
caguggacauuuauugcugaaugaaugaauca

SEQ ID NO: 87834 - RNA, 32 nt, Homo Sapiens
gcauuccugggaagagggaccuguccaagcug

SEQ ID NO: 87835 - RNA, 32 nt, Homo Sapiens
ggaacuaaaaauuaggaauaaaaccauuuucu

SEQ ID NO: 87836 - RNA, 32 nt, Homo Sapiens
aacccuuaucuaggacauccacaggguagagg

SEQ ID NO: 87837 - RNA, 32 nt, Homo Sapiens
agaaagcuauuuugauuugugaacauacugcc

SEQ ID NO: 87838 - RNA, 32 nt, Homo Sapiens
auuacagaucauauaagcaagacaguggcacu

SEQ ID NO: 87839 - RNA, 32 nt, Homo Sapiens
cgcccccaguguuuucugagggcggaaauggc

SEQ ID NO: 87840 - RNA, 32 nt, Homo Sapiens
gggggcgcagcacgcgccgcgcagccaugggg

SEQ ID NO: 87841 - RNA, 32 nt, Homo Sapiens
gcgcggggugggccuucggggaggcggagggc

SEQ ID NO: 87842 - RNA, 32 nt, Homo Sapiens
aaacccaugggguuugugguccugcugcucug

SEQ ID NO: 87843 - RNA, 32 nt, Homo Sapiens
cagugagguuuggagagaacaaugaagcucca

SEQ ID NO: 87844 - RNA, 32 nt, Homo Sapiens
uggagaugaucaaauccaaucccuuuauuuuc

SEQ ID NO: 87845 - RNA, 32 nt, Homo Sapiens
acauacacauaaaccagcacaguggguccuuu

SEQ ID NO: 87846 - RNA, 32 nt, Homo Sapiens
gcuguggguccuaaaggccuuugauccuuuga

SEQ ID NO: 87847 - RNA, 32 nt, Homo Sapiens
augaaacauuuaucagaaauguugccauuuua

SEQ ID NO: 87848 - RNA, 32 nt, Homo Sapiens
aagcucugggccccuccucccugcugccacuu

SEQ ID NO: 87849 - RNA, 32 nt, Homo Sapiens
ucaguggugggagaauaagcauaucgcguggu

SEQ ID NO: 87850 - RNA, 32 nt, Homo Sapiens
auacuuguaaucaaguuuuuccagccuccaag

SEQ ID NO: 87851 - RNA, 32 nt, Homo Sapiens
auacuuucuucagauccucuuugugccaagau

SEQ ID NO: 87852 - RNA, 32 nt, Homo Sapiens
aggcccccaagagcugugcugauccgaggccu

SEQ ID NO: 87853 - RNA, 31 nt, Homo Sapiens
cacaacagggaucccagaggaguccaaggaa

SEQ ID NO: 87854 - RNA, 32 nt, Homo Sapiens
gccugcggggaagggagucgccaggcggccgu

SEQ ID NO: 87855 - RNA, 32 nt, Homo Sapiens
gaaagaugagguagagguccaaguaaccgcua

SEQ ID NO: 87856 - RNA, 32 nt, Homo Sapiens
guggcucccagggucuaauuggaggcaccugg

SEQ ID NO: 87857 - RNA, 32 nt, Homo Sapiens
ccgcugcagcgcacagcaccccggugcgaggg

SEQ ID NO: 87858 - RNA, 32 nt, Homo Sapiens
ugaacuaaacauugccuugcuauauucaccaa

SEQ ID NO: 87859 - RNA, 32 nt, Homo Sapiens
aucagcacucuuucuuuuuuuuuuuuuuaaua

SEQ ID NO: 87860 - RNA, 32 nt, Homo Sapiens
ugaagcccccaacuucuagauugggaaacgaa

SEQ ID NO: 87861 - RNA, 32 nt, Homo Sapiens
ggcagugaggggcuugggcuugaggcuggaca

SEQ ID NO: 87862 - RNA, 32 nt, Homo Sapiens
guccugaccuucccuuccucccaaguuagcag

SEQ ID NO: 87863 - RNA, 32 nt, Homo Sapiens
uuuuauuuuauuuuauuuuuuauuuuuuguag

SEQ ID NO: 87864 - RNA, 32 nt, Homo Sapiens
ugucgccgccggagaggcacccugccccggga

SEQ ID NO: 87865 - RNA, 32 nt, Homo Sapiens
ugcccugcuuugcagaagccccacugcaugaa

SEQ ID NO: 87866 - RNA, 32 nt, Homo Sapiens
accugggaagggggagagugcaggccugcuca

SEQ ID NO: 87867 - RNA, 32 nt, Homo Sapiens
cgcacucagguggccucgcuucccugcggguc

SEQ ID NO: 87868 - RNA, 32 nt, Homo Sapiens
aaaaugcaaauaagguuauguuagaauuuaca

SEQ ID NO: 87869 - RNA, 32 nt, Homo Sapiens
uguauuuaaggauuuuaaaauaccaaacugua

SEQ ID NO: 87870 - RNA, 32 nt, Homo Sapiens
acaccuguuuccuucccgcagugucugcgucc

SEQ ID NO: 87871 - RNA, 32 nt, Homo Sapiens
cugggucccccuccugcacgcggacuccgggg

SEQ ID NO: 87872 - RNA, 32 nt, Homo Sapiens
auaccagccaaggggacaccauuguaucuacu

SEQ ID NO: 87873 - RNA, 32 nt, Homo Sapiens
ucucugaacuaaaaggacuaauuguacuuuga

SEQ ID NO: 87874 - RNA, 32 nt, Homo Sapiens
gcaaagcuuuaaacccuucucuguggucaaac

SEQ ID NO: 87875 - RNA, 32 nt, Homo Sapiens
ccaaaagcuucagauauuaucuuauauaaagg

SEQ ID NO: 87876 - RNA, 32 nt, Homo Sapiens
ccucgcgaagguggagaagggcaggggcagga

SEQ ID NO: 87877 - RNA, 32 nt, Homo Sapiens
gcguguguggggcaggcaggauguggugcagg

SEQ ID NO: 87878 - RNA, 30 nt, Homo Sapiens
cucucggagaggcacgagggucccggguga

SEQ ID NO: 87879 - RNA, 32 nt, Homo Sapiens
agucuucgccuguguccgaucccuaucuacuu

SEQ ID NO: 87880 - RNA, 32 nt, Homo Sapiens
aggggggauugugacauaucacuggacccaac

SEQ ID NO: 87881 - RNA, 32 nt, Homo Sapiens
agcuucgcacaggcuccuggagggcugccugg

SEQ ID NO: 87882 - RNA, 32 nt, Homo Sapiens
gauauuucaaggauuuauaucuauucauccaa

SEQ ID NO: 87883 - RNA, 32 nt, Homo Sapiens
cuuuuuucccccuuguccucgugauaaguaug

SEQ ID NO: 87884 - RNA, 32 nt, Homo Sapiens
acucauaguuuaggaaauaaucuuacagcaug

SEQ ID NO: 87885 - RNA, 32 nt, Homo Sapiens
cagcagccccaccugcccccagccucugugac

SEQ ID NO: 87886 - RNA, 32 nt, Homo Sapiens
ugaauuuucuucauuuucagauuaguccagug

SEQ ID NO: 87887 - RNA, 32 nt, Homo Sapiens
ccugucccuuuucucugggucucgugguggag

SEQ ID NO: 87888 - RNA, 32 nt, Homo Sapiens
caauuuauuccauuuuaagcacuuacacaguu

SEQ ID NO: 87889 - RNA, 32 nt, Homo Sapiens
ggaucaagacgaaaaccugcaaugacaacucc

SEQ ID NO: 87890 - RNA, 32 nt, Homo Sapiens
gucccagaggguggaaggagccaggacgcacc

SEQ ID NO: 87891 - RNA, 32 nt, Homo Sapiens
accucagcuuccugccugugccccacaaggag

SEQ ID NO: 87892 - RNA, 32 nt, Homo Sapiens
ggcagagggcacccgggcgguaguccgggacg

SEQ ID NO: 87893 - RNA, 32 nt, Homo Sapiens
cguugggaaucuugguuucaguuuuuuauucu

SEQ ID NO: 87894 - RNA, 32 nt, Homo Sapiens
gggacucugaucccauauucuuaacagaucuu

SEQ ID NO: 87895 - RNA, 32 nt, Homo Sapiens
agcagaugaccacaaggggguacuggagaggu

SEQ ID NO: 87896 - RNA, 32 nt, Homo Sapiens
aucugguacuuugacagcauucaaaacagcau

SEQ ID NO: 87897 - RNA, 32 nt, Homo Sapiens
gagggagggcuuuggagcgaccaggugagcug

SEQ ID NO: 87898 - RNA, 32 nt, Homo Sapiens
ggcgggcgcuggccacgucgcccugggugacc

SEQ ID NO: 87899 - RNA, 32 nt, Homo Sapiens
uccuggcaugaccugcaacuccagguggugga

SEQ ID NO: 87900 - RNA, 32 nt, Homo Sapiens
ccaagccuggggaaggacguggcauccaagcu

SEQ ID NO: 87901 - RNA, 32 nt, Homo Sapiens
uuuugaauuauuuuauacuuagagauauucug

SEQ ID NO: 87902 - RNA, 32 nt, Homo Sapiens
auaaacagaggaccagcuccauucucaggaaa

SEQ ID NO: 87903 - RNA, 31 nt, Homo Sapiens
acgacccugugucauagccucauccaucagc

SEQ ID NO: 87904 - RNA, 32 nt, Homo Sapiens
gccuugcccucccaagacacuguucuucaaga

SEQ ID NO: 87905 - RNA, 32 nt, Homo Sapiens
gccgcuccguguuccucggugggccagagcug

SEQ ID NO: 87906 - RNA, 32 nt, Homo Sapiens
ggcuugagguggaaguggggucgggcacucug

SEQ ID NO: 87907 - RNA, 32 nt, Homo Sapiens
caggagccauuuuagaaauaaauaucuuccuu

SEQ ID NO: 87908 - RNA, 32 nt, Homo Sapiens
acaguguuauuuauaaagaguucauuaucaau

SEQ ID NO: 87909 - RNA, 32 nt, Homo Sapiens
acaggcuguuuauggcucuagcugcguacuga

SEQ ID NO: 87910 - RNA, 32 nt, Homo Sapiens
gucgccaaaaauacagccuauaguaaaugugu

SEQ ID NO: 87911 - RNA, 30 nt, Homo Sapiens
gcccaggccguucuccugcccccgcggcug

SEQ ID NO: 87912 - RNA, 32 nt, Homo Sapiens
cgccaguguucgcaguccccgccuggucgcgg

SEQ ID NO: 87913 - RNA, 32 nt, Homo Sapiens
cugaauaggaacagcucuggucugcagcuccc

SEQ ID NO: 87914 - RNA, 32 nt, Homo Sapiens
aggcuggaaggcccauuuggcuccugcagccu

SEQ ID NO: 87915 - RNA, 32 nt, Homo Sapiens
agaagucucacgugaucacuuccgccacagcc

SEQ ID NO: 87916 - RNA, 32 nt, Homo Sapiens
ggcagcugugggaggaggcggcguggaaggcc

SEQ ID NO: 87917 - RNA, 32 nt, Homo Sapiens
cuucuucgcuuccuccucucccaagcaaugga

SEQ ID NO: 87918 - RNA, 32 nt, Homo Sapiens
uaauguaauagagggaaaaauagagugcuucu

SEQ ID NO: 87919 - RNA, 32 nt, Homo Sapiens
augaagaagauuccaaagaaacccuuaaaaca

SEQ ID NO: 87920 - RNA, 32 nt, Homo Sapiens
agcucuucucugaaauucgaucaaccugaagc

SEQ ID NO: 87921 - RNA, 32 nt, Homo Sapiens
agcuggaggcccggagcgccugcggggcuggc

SEQ ID NO: 87922 - RNA, 32 nt, Homo Sapiens
uguguuugaccuuuucagccauauauuguaca

SEQ ID NO: 87923 - RNA, 31 nt, Homo Sapiens
caggaauccagguguaccugaguuacuagga

SEQ ID NO: 87924 - RNA, 32 nt, Homo Sapiens
aggacagaggaggggcccuuccugucagcugg

SEQ ID NO: 87925 - RNA, 31 nt, Homo Sapiens
cugggcgccguggugucgacgggccccgagc

SEQ ID NO: 87926 - RNA, 32 nt, Homo Sapiens
agugcuuagcaacccuaaagcauuccaagcaa

SEQ ID NO: 87927 - RNA, 32 nt, Homo Sapiens
ugugcuccugaacaucaagucagagggggcau

SEQ ID NO: 87928 - RNA, 32 nt, Homo Sapiens
guaggggacaccuuucuuuugccacccugaau

SEQ ID NO: 87929 - RNA, 32 nt, Homo Sapiens
uucuguagcaagggggaauauuuuaaaaauaa

SEQ ID NO: 87930 - RNA, 32 nt, Homo Sapiens
accuagggccuuaguugccuccaggucuuccc

SEQ ID NO: 87931 - RNA, 32 nt, Homo Sapiens
aacuagagacuacggcuguggugguaaccugc

SEQ ID NO: 87932 - RNA, 32 nt, Homo Sapiens
guauucugugguuuuucugauggacuuuaggu

SEQ ID NO: 87933 - RNA, 32 nt, Homo Sapiens
aacccuggauguuacauauaaaacaaacaaaa

SEQ ID NO: 87934 - RNA, 32 nt, Homo Sapiens
uuauaagaaaacuacauguaaaaucuugauag

SEQ ID NO: 87935 - RNA, 30 nt, Homo Sapiens
ccgaccggccugaagcugccggcgccccgg

SEQ ID NO: 87936 - RNA, 32 nt, Homo Sapiens
auuuuuguguuguuaaacuucagcuuuggaaa

SEQ ID NO: 87937 - RNA, 32 nt, Homo Sapiens
cuaucgccguccccuuuugcagcccucucugg

SEQ ID NO: 87938 - RNA, 32 nt, Homo Sapiens
uuuucccuuucugcagcgguugcacuacaggu

SEQ ID NO: 87939 - RNA, 32 nt, Homo Sapiens
aguuuagaacagagggaccaaauugcuucuag

SEQ ID NO: 87940 - RNA, 32 nt, Homo Sapiens
uccuagacccagggcucugcacucucaaggcu

SEQ ID NO: 87941 - RNA, 32 nt, Homo Sapiens
uuggcggcuuggcuccugggagggaucccgcu

SEQ ID NO: 87942 - RNA, 32 nt, Homo Sapiens
uccugugcccuaagugggccaagcccagguaa

SEQ ID NO: 87943 - RNA, 32 nt, Homo Sapiens
accuggucgcccggcggccauggcggccguuc

SEQ ID NO: 87944 - RNA, 32 nt, Homo Sapiens
acugucaauggagcuggaaaacaucguggcca

SEQ ID NO: 87945 - RNA, 32 nt, Homo Sapiens
agaaugucuuccagaagaaaguagauaccauu

SEQ ID NO: 87946 - RNA, 32 nt, Homo Sapiens
ugcgaaggucauuugugugagcgugugagaaa

SEQ ID NO: 87947 - RNA, 32 nt, Homo Sapiens
aguuucaaugaaaaucauuaaaguaggacagc

SEQ ID NO: 87948 - RNA, 32 nt, Homo Sapiens
ugcccuuccaugaacacaugugcuggagacgu

SEQ ID NO: 87949 - RNA, 32 nt, Homo Sapiens
acauaacuuguacaugguuucauuuuguauuu

SEQ ID NO: 87950 - RNA, 32 nt, Homo Sapiens
uagaggaaagugaugcugcugcuaagaauauu

SEQ ID NO: 87951 - RNA, 32 nt, Homo Sapiens
caaacccagggcugaggccugccccaugaaga

SEQ ID NO: 87952 - RNA, 32 nt, Homo Sapiens
uugggagcagugccccggcccccgccgcuccc

SEQ ID NO: 87953 - RNA, 32 nt, Homo Sapiens
ccaucucugccuauccugggaccuccacacuc

SEQ ID NO: 87954 - RNA, 32 nt, Homo Sapiens
uuuggaggcugcuacagccuugaguuccuugg

SEQ ID NO: 87955 - RNA, 32 nt, Homo Sapiens
agcgggcgcaggagcaggcggcggcgguggcg

SEQ ID NO: 87956 - RNA, 32 nt, Homo Sapiens
gcaguggcagaauaaacucagauguguucaaa

SEQ ID NO: 87957 - RNA, 32 nt, Homo Sapiens
gaggauugcauucuguguucuauguuauauuc

SEQ ID NO: 87958 - RNA, 32 nt, Homo Sapiens
auugaaggucuggaucccuuucucugaaugga

SEQ ID NO: 87959 - RNA, 32 nt, Homo Sapiens
ugccucuuuuucuggccuucucugugggaccu

SEQ ID NO: 87960 - RNA, 32 nt, Homo Sapiens
uuggaaagaugguuaguugauaccguccgaug

SEQ ID NO: 87961 - RNA, 32 nt, Homo Sapiens
auuaugacauaaauuacauguaaauaguguau

SEQ ID NO: 87962 - RNA, 32 nt, Homo Sapiens
uuguccucucaggguuggggucuggcuccccu

SEQ ID NO: 87963 - RNA, 32 nt, Homo Sapiens
aguuuuaaauguuuuaaaaugacccuguguua

SEQ ID NO: 87964 - RNA, 32 nt, Homo Sapiens
gcuccccccgggggcggaggcgaaggguguug

SEQ ID NO: 87965 - RNA, 32 nt, Homo Sapiens
ccugcacuuguacaguuuggguguuugauaga

SEQ ID NO: 87966 - RNA, 32 nt, Homo Sapiens
acgggguccaccucuccucuguccuugcugcc

SEQ ID NO: 87967 - RNA, 28 nt, Homo Sapiens
agauggauagaggacccaagcgaaaaag

SEQ ID NO: 87968 - RNA, 32 nt, Homo Sapiens
ugguaauaauuucccucuuuuguagucugcac

SEQ ID NO: 87969 - RNA, 30 nt, Homo Sapiens
gcuggugucuguggagggggcuccggucca

SEQ ID NO: 87970 - RNA, 32 nt, Homo Sapiens
acaaaaauuucuucuuuauguuuuguguucag

SEQ ID NO: 87971 - RNA, 32 nt, Homo Sapiens
caggccggccccagucucugcuggacaacgcu

SEQ ID NO: 87972 - RNA, 32 nt, Homo Sapiens
ccggguccuccaggacggccaggccgugccgc

SEQ ID NO: 87973 - RNA, 32 nt, Homo Sapiens
cuaacuuauccaucuuugaacuucugacuacu

SEQ ID NO: 87974 - RNA, 32 nt, Homo Sapiens
uuuccauacuaaagcaucagucaccaccaauu

SEQ ID NO: 87975 - RNA, 32 nt, Homo Sapiens
agcccgucaccaugucgugcgagucgucuaug

SEQ ID NO: 87976 - RNA, 32 nt, Homo Sapiens
cugacuuccugcuugaugagcuuucaguuccu

SEQ ID NO: 87977 - RNA, 32 nt, Homo Sapiens
gccgaggaacagagucuuacaugacuuaaagc

SEQ ID NO: 87978 - RNA, 32 nt, Homo Sapiens
agcugagaacagaauuucacccccgagguucu

SEQ ID NO: 87979 - RNA, 32 nt, Homo Sapiens
uuauaguuuaacuuaacuuguuguguauguga

SEQ ID NO: 87980 - RNA, 31 nt, Homo Sapiens
aaacuguguaacaggugagagcucugcauca

SEQ ID NO: 87981 - RNA, 32 nt, Homo Sapiens
acaaauuuugcacuuuuuguuugaauguuaga

SEQ ID NO: 87982 - RNA, 32 nt, Homo Sapiens
uguauguguuccaggaauguuaaugagauggu

SEQ ID NO: 87983 - RNA, 32 nt, Homo Sapiens
guacaauaaguguuuuuguauugaaagcuuuu

SEQ ID NO: 87984 - RNA, 32 nt, Homo Sapiens
gauuuaaacacacagauacacacacacacaca

SEQ ID NO: 87985 - RNA, 32 nt, Homo Sapiens
aggggcggggagagacacgggcugcggcgcgg

SEQ ID NO: 87986 - RNA, 32 nt, Homo Sapiens
gcaagauaaaaacccugaaauucccagaaguu

SEQ ID NO: 87987 - RNA, 32 nt, Homo Sapiens
cagagaggaggauguggugagccccggagagg

SEQ ID NO: 87988 - RNA, 32 nt, Homo Sapiens
aagaguuugauaaauuuuuaccagcuuugaag

SEQ ID NO: 87989 - RNA, 32 nt, Homo Sapiens
uguccacauugggggaacaucauacuugauac

SEQ ID NO: 87990 - RNA, 32 nt, Homo Sapiens
aggugccaaggcacaucaugcugcuggacagu

SEQ ID NO: 87991 - RNA, 32 nt, Homo Sapiens
gaaaggcccagcugaaguucuacuaaaaaugc

SEQ ID NO: 87992 - RNA, 32 nt, Homo Sapiens
ucagggggcagguagggaaaauggggugagcc

SEQ ID NO: 87993 - RNA, 32 nt, Homo Sapiens
aaagggcaaauaaugaucgaaaaaauaauuau

SEQ ID NO: 87994 - RNA, 32 nt, Homo Sapiens
ucacauucaaggauuauuauacuugugcuuca

SEQ ID NO: 87995 - RNA, 32 nt, Homo Sapiens
guuuggagaggaggcaggggcugggcuggggg

SEQ ID NO: 87996 - RNA, 32 nt, Homo Sapiens
cuucagucaucauuaaacuucucuggaccaaa

SEQ ID NO: 87997 - RNA, 32 nt, Homo Sapiens
cucacuccuggagauuccauuccauuuucaag

SEQ ID NO: 87998 - RNA, 32 nt, Homo Sapiens
uagugauaaucugaugcugaagaucaaauaac

SEQ ID NO: 87999 - RNA, 32 nt, Homo Sapiens
uaucuaaaaauauuugagauauaauggcuuuu

SEQ ID NO: 88000 - RNA, 32 nt, Homo Sapiens
gauggcaucaccguggaggucauuguggucaa

SEQ ID NO: 88001 - RNA, 32 nt, Homo Sapiens
ccuuguggggccucuagccucccggccugggg

SEQ ID NO: 88002 - RNA, 32 nt, Homo Sapiens
ggagagcuuuggggcccggcccagccuggggu

SEQ ID NO: 88003 - RNA, 32 nt, Homo Sapiens
uacuuaugcaagauauuuuugaaguaaauuaa

SEQ ID NO: 88004 - RNA, 31 nt, Homo Sapiens
ggaugauacaguugaaggauagguagcuacc

SEQ ID NO: 88005 - RNA, 32 nt, Homo Sapiens
ggaucuguccaauaaacgcuuauuuggccaag

SEQ ID NO: 88006 - RNA, 32 nt, Homo Sapiens
gugauuuucuuuuuccaaaaauuccugaguau

SEQ ID NO: 88007 - RNA, 32 nt, Homo Sapiens
aagaaaucaaguaaugaauccaacugcuuaaa

SEQ ID NO: 88008 - RNA, 32 nt, Homo Sapiens
uuuguuuuucuuuauaaauuggguagaaauca

SEQ ID NO: 88009 - RNA, 32 nt, Homo Sapiens
gagaagaacugccccggagcgcagcagccacc

SEQ ID NO: 88010 - RNA, 32 nt, Homo Sapiens
uugugaacuggaagaaagcaacaaagauugag

SEQ ID NO: 88011 - RNA, 32 nt, Homo Sapiens
augcgccauuccugguugucuguugaucuuuc

SEQ ID NO: 88012 - RNA, 32 nt, Homo Sapiens
cuggccuugcaaccucuuuucgugaugggcag

SEQ ID NO: 88013 - RNA, 32 nt, Homo Sapiens
gauucuuccagauguuuuguuuuauacagcag

SEQ ID NO: 88014 - RNA, 32 nt, Homo Sapiens
acauggaagaucugggggaggaaguucaagga

SEQ ID NO: 88015 - RNA, 30 nt, Homo Sapiens
uugggcaucugugcucaggaggucaccagg

SEQ ID NO: 88016 - RNA, 32 nt, Homo Sapiens
gaaggaagcgaggcgcgacacugcuggggaga

SEQ ID NO: 88017 - RNA, 32 nt, Homo Sapiens
aguggacaugccccaccuccagacuugcucau

SEQ ID NO: 88018 - RNA, 32 nt, Homo Sapiens
ggccacugcugggacagggucuaugggcccac

SEQ ID NO: 88019 - RNA, 32 nt, Homo Sapiens
cggagggauccgcgcgcaguucagucgcuacg

SEQ ID NO: 88020 - RNA, 32 nt, Homo Sapiens
gaagauguugaauaaucauuuuacaaagcagu

SEQ ID NO: 88021 - RNA, 30 nt, Homo Sapiens
cagaggcuccgaggcggcggcggcgacucc

SEQ ID NO: 88022 - RNA, 32 nt, Homo Sapiens
gguugggcacuggaaguacauaaagaagaaga

SEQ ID NO: 88023 - RNA, 32 nt, Homo Sapiens
ucugucaaugaaaauacguugaauaaacuaua

SEQ ID NO: 88024 - RNA, 32 nt, Homo Sapiens
uuaauggacaucaucggcuggaccugggaucu

SEQ ID NO: 88025 - RNA, 32 nt, Homo Sapiens
gguugcugaaaagccaggagucaaaaugacug

SEQ ID NO: 88026 - RNA, 32 nt, Homo Sapiens
uaccuacuccucuuuucuuuuaaaagggccca

SEQ ID NO: 88027 - RNA, 32 nt, Homo Sapiens
ccacucugguuucucugaaaaaacgagguaau

SEQ ID NO: 88028 - RNA, 32 nt, Homo Sapiens
ugacauagaaaauaaacuuugcccaaucacaa

SEQ ID NO: 88029 - RNA, 32 nt, Homo Sapiens
agauguagagaaauaaccauuuuuguaucuuc

SEQ ID NO: 88030 - RNA, 32 nt, Homo Sapiens
aaccucagucuaccccucuccuuucacuccuu

SEQ ID NO: 88031 - RNA, 32 nt, Homo Sapiens
cuauuauggaacacuuuccugcuuagcaguua

SEQ ID NO: 88032 - RNA, 32 nt, Homo Sapiens
ggccgggcuggggcuucagcgggaggcagcag

SEQ ID NO: 88033 - RNA, 32 nt, Homo Sapiens
guggggauucuaugagcuuuggaucuggggac

SEQ ID NO: 88034 - RNA, 32 nt, Homo Sapiens
uguccuccagccccgcccuggcguggacaucc

SEQ ID NO: 88035 - RNA, 32 nt, Homo Sapiens
ucggggaggcggagggcgcgucggguuuggcc

SEQ ID NO: 88036 - RNA, 32 nt, Homo Sapiens
gcguauuucggggggcggaggcggcgggccac

SEQ ID NO: 88037 - RNA, 32 nt, Homo Sapiens
acccaggcucugccucuugcaccuugaggggg

SEQ ID NO: 88038 - RNA, 32 nt, Homo Sapiens
aaagccgguucccucucuggugucuguggacc

SEQ ID NO: 88039 - RNA, 32 nt, Homo Sapiens
aaugggguggcccuggaucuggaagaaagagc

SEQ ID NO: 88040 - RNA, 32 nt, Homo Sapiens
uuucagaaaauuggaccuuaaaacuuugcuuc

SEQ ID NO: 88041 - RNA, 32 nt, Homo Sapiens
ggagagaagcuuccagaccagcccuucacacc

SEQ ID NO: 88042 - RNA, 32 nt, Homo Sapiens
ccauggucgacaucccaccuccuuucgaccug

SEQ ID NO: 88043 - RNA, 29 nt, Homo Sapiens
cucaaaaugaagugcuauuuucuuauuuu

SEQ ID NO: 88044 - RNA, 32 nt, Homo Sapiens
caggggccucuggccuggcugaguucacagcc

SEQ ID NO: 88045 - RNA, 32 nt, Homo Sapiens
gcaacuugacagagccugaguuugccucuuag

SEQ ID NO: 88046 - RNA, 32 nt, Homo Sapiens
ggcuucccauccuagauauaaaauagguguug

SEQ ID NO: 88047 - RNA, 32 nt, Homo Sapiens
gugcuuuuccccagccuccccggcccugccgg

SEQ ID NO: 88048 - RNA, 32 nt, Homo Sapiens
ucgucucauggcaaccuucccuggccagauuc

SEQ ID NO: 88049 - RNA, 32 nt, Homo Sapiens
acugcgccccaccucccugccuguguguguua

SEQ ID NO: 88050 - RNA, 32 nt, Homo Sapiens
agucuagccugggaaacauagcaagacccugu

SEQ ID NO: 88051 - RNA, 32 nt, Homo Sapiens
gacguuguagaagcgaguggccucgaaggcua

SEQ ID NO: 88052 - RNA, 32 nt, Homo Sapiens
uugcuuuauaauuugauuuucuuacugaaacg

SEQ ID NO: 88053 - RNA, 32 nt, Homo Sapiens
acgcugucuuucacggccccagggaggccucu

SEQ ID NO: 88054 - RNA, 32 nt, Homo Sapiens
gaauggggaauuaagaauauaaacuguaaauu

SEQ ID NO: 88055 - RNA, 32 nt, Homo Sapiens
gagggagggagaggccgccacccccgccggug

SEQ ID NO: 88056 - RNA, 32 nt, Homo Sapiens
ccuacagguuucauuuuuauuaucuucaauga

SEQ ID NO: 88057 - RNA, 32 nt, Homo Sapiens
caacaauugaaagcuauguuugaaagucagau

SEQ ID NO: 88058 - RNA, 32 nt, Homo Sapiens
cagcacugaaccugaccacgaguagcauuggg

SEQ ID NO: 88059 - RNA, 32 nt, Homo Sapiens
ccgucgucauucagaucagaucaugacguuua

SEQ ID NO: 88060 - RNA, 28 nt, Homo Sapiens
gaaccuaauuaaaauauuucccagaauc

SEQ ID NO: 88061 - RNA, 32 nt, Homo Sapiens
gauaaucuggaaaguuccacugcaggaaagac

SEQ ID NO: 88062 - RNA, 32 nt, Homo Sapiens
aagcgagggcuuugcagucagaccuucauaug

SEQ ID NO: 88063 - RNA, 32 nt, Homo Sapiens
auguuagauguucuuaagaauaaaauguugcu

SEQ ID NO: 88064 - RNA, 30 nt, Homo Sapiens
cccacuguauuaagaggggaaaccgggcca

SEQ ID NO: 88065 - RNA, 31 nt, Homo Sapiens
uaaaaagacgcuuuccucuccuccuuuagag

SEQ ID NO: 88066 - RNA, 32 nt, Homo Sapiens
caggccccaugcugacgucccuccucaagagc

SEQ ID NO: 88067 - RNA, 32 nt, Homo Sapiens
uuuuuuuuuuuuuuuuuuaagcaggagaaugg

SEQ ID NO: 88068 - RNA, 32 nt, Homo Sapiens
aacaguaagcaccuguacacaagccccaucuc

SEQ ID NO: 88069 - RNA, 32 nt, Homo Sapiens
ggacccucagagcccagcauccaucucuguca

SEQ ID NO: 88070 - RNA, 32 nt, Homo Sapiens
aguaggaaaaagaucauucgggaaauggcggu

SEQ ID NO: 88071 - RNA, 32 nt, Homo Sapiens
aauagagcaaauaacaugggaacgugggggag

SEQ ID NO: 88072 - RNA, 32 nt, Homo Sapiens
agaaaagcagguuuuucuuccucucuuuccuu

SEQ ID NO: 88073 - RNA, 32 nt, Homo Sapiens
uauggaaaaguggauccaauauuuaagauaga

SEQ ID NO: 88074 - RNA, 32 nt, Homo Sapiens
aggugaagccuggccaggcgggaggcuucucu

SEQ ID NO: 88075 - RNA, 32 nt, Homo Sapiens
uccucucugccaccaccccauaaucccauuca

SEQ ID NO: 88076 - RNA, 32 nt, Homo Sapiens
cgguccagccacagcgccagggcccccagagg

SEQ ID NO: 88077 - RNA, 32 nt, Homo Sapiens
aaguaccuuuccacugaaaauaugagcaugcc

SEQ ID NO: 88078 - RNA, 32 nt, Homo Sapiens
ugguaucuggaucuuccuuuuaaacuuugacu

SEQ ID NO: 88079 - RNA, 32 nt, Homo Sapiens
ccagaggaucacuggaggagaacaagugcugu

SEQ ID NO: 88080 - RNA, 32 nt, Homo Sapiens
gaguggcacuaccccaccuggcagcaccuaga

SEQ ID NO: 88081 - RNA, 31 nt, Homo Sapiens
cgggcggcgacgcuccaaccauggcccgugc

SEQ ID NO: 88082 - RNA, 29 nt, Homo Sapiens
augucugacuucaaaauaaaauguaugaa

SEQ ID NO: 88083 - RNA, 32 nt, Homo Sapiens
auugugaaugcuuuuuaauagcauucauuagc

SEQ ID NO: 88084 - RNA, 32 nt, Homo Sapiens
cagggucugggucuuucacccaggcuggagug

SEQ ID NO: 88085 - RNA, 32 nt, Homo Sapiens
uuucuuuggccauuguuuguuuauauuucaca

SEQ ID NO: 88086 - RNA, 32 nt, Homo Sapiens
cuuggauccaaauuuaaauaucuuccuaaacc

SEQ ID NO: 88087 - RNA, 32 nt, Homo Sapiens
uaauuggaagcaguauauagaaacuguuucau

SEQ ID NO: 88088 - RNA, 32 nt, Homo Sapiens
gagagugagaauaauuguguacaaaguagaga

SEQ ID NO: 88089 - RNA, 32 nt, Homo Sapiens
gaccgcggcggcggcccgcgagcgggauguuc

SEQ ID NO: 88090 - RNA, 32 nt, Homo Sapiens
uagaagcccuucccucuuuuucaugcuguaaa

SEQ ID NO: 88091 - RNA, 32 nt, Homo Sapiens
uuuguuauaagccauuugaauuuuuaaaaaau

SEQ ID NO: 88092 - RNA, 32 nt, Homo Sapiens
gcccgcggagaagcagucaucaucauccaugg

SEQ ID NO: 88093 - RNA, 32 nt, Homo Sapiens
gugacucuacugugcuuuaucuuuuaacauua

SEQ ID NO: 88094 - RNA, 32 nt, Homo Sapiens
agauguaaaaauucagguuauauauaggauug

SEQ ID NO: 88095 - RNA, 32 nt, Homo Sapiens
gccaggcucucguccucgcagccucccacaag

SEQ ID NO: 88096 - RNA, 32 nt, Homo Sapiens
ugcccgcccucccuccugccugcgcagcuccu

SEQ ID NO: 88097 - RNA, 32 nt, Homo Sapiens
cugccagucucgcccgcgaucccggcccgggg

SEQ ID NO: 88098 - RNA, 32 nt, Homo Sapiens
ccuuaccccagcugcggcaucccuguguuaac

SEQ ID NO: 88099 - RNA, 32 nt, Homo Sapiens
gugcucagagcuggcgcuugcagacgcagcug

SEQ ID NO: 88100 - RNA, 32 nt, Homo Sapiens
ggccccuggagugugcucuccuccaguguuca

SEQ ID NO: 88101 - RNA, 32 nt, Homo Sapiens
cucaaaaaacaaaaaauagaaugaucauauga

SEQ ID NO: 88102 - RNA, 32 nt, Homo Sapiens
accugugaccucugacccggggagcagagaac

SEQ ID NO: 88103 - RNA, 32 nt, Homo Sapiens
uguccuguggaggagauguuaaaguaacccau

SEQ ID NO: 88104 - RNA, 32 nt, Homo Sapiens
cgggagccaugcgaccccagggccccgccgcc

SEQ ID NO: 88105 - RNA, 32 nt, Homo Sapiens
aauaacaaacaucaucauccagaaauguaagg

SEQ ID NO: 88106 - RNA, 32 nt, Homo Sapiens
aacaaaugccagccacguccuccgccacuugg

SEQ ID NO: 88107 - RNA, 32 nt, Homo Sapiens
aagccacggcccgggguucaaggcuagagcug

SEQ ID NO: 88108 - RNA, 32 nt, Homo Sapiens
cagcugcacaacacaguccuuccacuagcagc

SEQ ID NO: 88109 - RNA, 32 nt, Homo Sapiens
ucaccaaauucuguuuuaaaucaaugaccuaa

SEQ ID NO: 88110 - RNA, 32 nt, Homo Sapiens
acaagucuuaauaguuugugugaguguuaauc

SEQ ID NO: 88111 - RNA, 32 nt, Homo Sapiens
uucugugcaggcugcaguggcuccccugccca

SEQ ID NO: 88112 - RNA, 32 nt, Homo Sapiens
uggagcuccuucccuucccccuggccugagag

SEQ ID NO: 88113 - RNA, 32 nt, Homo Sapiens
gacuggagcccagcagcagcgcggcggcgccg

SEQ ID NO: 88114 - RNA, 32 nt, Homo Sapiens
aaggugguagugagcauagaacugcaacaguu

SEQ ID NO: 88115 - RNA, 32 nt, Homo Sapiens
aggaggacgaggaggaugcggaggacgcggag

SEQ ID NO: 88116 - RNA, 32 nt, Homo Sapiens
aaaucugcauguccucugugugacugauagag

SEQ ID NO: 88117 - RNA, 32 nt, Homo Sapiens
agcuugaccccauuggccauugccuggcuaau

SEQ ID NO: 88118 - RNA, 32 nt, Homo Sapiens
ccaagaacccaccaauuccggacgcaguacca

SEQ ID NO: 88119 - RNA, 32 nt, Homo Sapiens
gcucccagcuggagauaggaggcccagguggc

SEQ ID NO: 88120 - RNA, 32 nt, Homo Sapiens
ggccgaggggagagggugaccauggggaaugu

SEQ ID NO: 88121 - RNA, 32 nt, Homo Sapiens
uucuccucggcgucggccgccgccgccuccca

SEQ ID NO: 88122 - RNA, 32 nt, Homo Sapiens
uuccguugacuucuguacaucuacaaugaaua

SEQ ID NO: 88123 - RNA, 28 nt, Homo Sapiens
gccaugcccuccccagggaccgucugca

SEQ ID NO: 88124 - RNA, 32 nt, Homo Sapiens
uucaaaguauugagggugauaauugcaaaauu

SEQ ID NO: 88125 - RNA, 32 nt, Homo Sapiens
ggaaugggaaagacagaagagaagggaaaugg

SEQ ID NO: 88126 - RNA, 32 nt, Homo Sapiens
uaaggaagaacugccugaaacagccuggaucu

SEQ ID NO: 88127 - RNA, 32 nt, Homo Sapiens
ucacuaauucuuucaaacuugauucaaaugau

SEQ ID NO: 88128 - RNA, 32 nt, Homo Sapiens
acaguuuaaugucauacuggcuuccaaagugg

SEQ ID NO: 88129 - RNA, 32 nt, Homo Sapiens
guugauccucaauagauacuugaugaaugaau

SEQ ID NO: 88130 - RNA, 32 nt, Homo Sapiens
auggaagaaugggguggagggucgccacaccc

SEQ ID NO: 88131 - RNA, 32 nt, Homo Sapiens
gauggcugcgucgggggcgggagcggagguga

SEQ ID NO: 88132 - RNA, 32 nt, Homo Sapiens
ccacccugggaaacagaagcagaucugaugug

SEQ ID NO: 88133 - RNA, 32 nt, Homo Sapiens
cuaacaagguguggagugucagcgaggugcaa

SEQ ID NO: 88134 - RNA, 30 nt, Homo Sapiens
ccauucccuggagguggggaaacucgccug

SEQ ID NO: 88135 - RNA, 32 nt, Homo Sapiens
gaucacagagucaaggaagcaguggcaauucu

SEQ ID NO: 88136 - RNA, 32 nt, Homo Sapiens
agugggugcugggccucgccccgaagcuucug

SEQ ID NO: 88137 - RNA, 32 nt, Homo Sapiens
acaaucccggcgauacuccuggcgauacugac

SEQ ID NO: 88138 - RNA, 32 nt, Homo Sapiens
cggccaggaugcugaaucugcugcugcuggcg

SEQ ID NO: 88139 - RNA, 32 nt, Homo Sapiens
auuuaucaguuauacagaauugucauacugca

SEQ ID NO: 88140 - RNA, 32 nt, Homo Sapiens
aacuggacuuuauacauacugguaaaucauaa

SEQ ID NO: 88141 - RNA, 32 nt, Homo Sapiens
uauuaccaguguucccuggggacuccucuuaa

SEQ ID NO: 88142 - RNA, 32 nt, Homo Sapiens
gcagguggagaggaggauggggaccagcagcu

SEQ ID NO: 88143 - RNA, 32 nt, Homo Sapiens
ggggcuuugauuuggaggaauggggcagggga

SEQ ID NO: 88144 - RNA, 32 nt, Homo Sapiens
ucuagcuuugguuuuucugagcauuuauaaug

SEQ ID NO: 88145 - RNA, 32 nt, Homo Sapiens
cuguguauuuuccgguuacauguacaguagac

SEQ ID NO: 88146 - RNA, 32 nt, Homo Sapiens
cguggaauuccucccuuccccaguggguuuuu

SEQ ID NO: 88147 - RNA, 32 nt, Homo Sapiens
aggacuugggagcuggaggugugacaccuuca

SEQ ID NO: 88148 - RNA, 32 nt, Homo Sapiens
aacucauccacguccugucuguuuccucugua

SEQ ID NO: 88149 - RNA, 32 nt, Homo Sapiens
ucuguaaagggagucgagaugaggcugugggc

SEQ ID NO: 88150 - RNA, 32 nt, Homo Sapiens
gaguucaaacugcuccuccccucccccaucua

SEQ ID NO: 88151 - RNA, 32 nt, Homo Sapiens
gccgcugcgcgagucuuccccaccucuucccg

SEQ ID NO: 88152 - RNA, 32 nt, Homo Sapiens
gcauagccuaguguuugcaugcuuuuuaaacu

SEQ ID NO: 88153 - RNA, 32 nt, Homo Sapiens
uuuugucuguuggucucccuggacugaagaga

SEQ ID NO: 88154 - RNA, 32 nt, Homo Sapiens
ucaaccccaugagacucgauagugguggugaa

SEQ ID NO: 88155 - RNA, 32 nt, Homo Sapiens
agguuuugaaagacauuaaccucggaaguugu

SEQ ID NO: 88156 - RNA, 32 nt, Homo Sapiens
caauugccccacuuaugcugccauccuuuuug

SEQ ID NO: 88157 - RNA, 32 nt, Homo Sapiens
uuuuuaauuuuuucuuuuuuauuaagcuagca

SEQ ID NO: 88158 - RNA, 32 nt, Homo Sapiens
uucggucccuccaggcagccaaggcuuggcag

SEQ ID NO: 88159 - RNA, 32 nt, Homo Sapiens
ccacuuuuuucugcaugcuagcuuguaaggaa

SEQ ID NO: 88160 - RNA, 32 nt, Homo Sapiens
gauuuaguguuuuguuugauaaaguaugcuua

SEQ ID NO: 88161 - RNA, 32 nt, Homo Sapiens
aacagcccuaauugauacaacuuuauggcagg

SEQ ID NO: 88162 - RNA, 32 nt, Homo Sapiens
agggaccggccgcggccccguaggguguuuua

SEQ ID NO: 88163 - RNA, 32 nt, Homo Sapiens
ugugagaaaugcuaaguuuaucagccaaagua

SEQ ID NO: 88164 - RNA, 32 nt, Homo Sapiens
ugcauauuacagugucccauuauaacaauaug

SEQ ID NO: 88165 - RNA, 32 nt, Homo Sapiens
agagcuccagaagggagggaacugcacagaca

SEQ ID NO: 88166 - RNA, 32 nt, Homo Sapiens
ccucccccagaccccucccagcccucuccucc

SEQ ID NO: 88167 - RNA, 32 nt, Homo Sapiens
gucacacgucccgucuuggguguggauggagg

SEQ ID NO: 88168 - RNA, 32 nt, Homo Sapiens
ugcagcccuccacagcguacuacccagcaggc

SEQ ID NO: 88169 - RNA, 32 nt, Homo Sapiens
aaccaagacgcagagaggccaagccccuugcc

SEQ ID NO: 88170 - RNA, 32 nt, Homo Sapiens
cuugcccagggcucagccuggugggccuccuc

SEQ ID NO: 88171 - RNA, 32 nt, Homo Sapiens
cucgagagcugggcucugcguccucguccagc

SEQ ID NO: 88172 - RNA, 32 nt, Homo Sapiens
cucccaaguauuuggguucuaucuuaggguug

SEQ ID NO: 88173 - RNA, 32 nt, Homo Sapiens
cucuauugccagcgcgugggugucauaguugc

SEQ ID NO: 88174 - RNA, 32 nt, Homo Sapiens
cgcugcugccaagcugcaggauggugcacgua

SEQ ID NO: 88175 - RNA, 32 nt, Homo Sapiens
agguggaggagcuucccacuccaggacuguug

SEQ ID NO: 88176 - RNA, 32 nt, Homo Sapiens
aacuaccagaccauggugugugacaucacagg

SEQ ID NO: 88177 - RNA, 32 nt, Homo Sapiens
uauagguaaauuuaaauauuuucugguugaca

SEQ ID NO: 88178 - RNA, 32 nt, Homo Sapiens
aacaaaugaauuguauuuuuuguugaaaguaa

SEQ ID NO: 88179 - RNA, 32 nt, Homo Sapiens
ccgaggugccaggccuuguucuucucaugcug

SEQ ID NO: 88180 - RNA, 32 nt, Homo Sapiens
uauauauaaauauauacagauacauaucugug

SEQ ID NO: 88181 - RNA, 32 nt, Homo Sapiens
guggggccgggcgcagcggcgagaggaggcga

SEQ ID NO: 88182 - RNA, 32 nt, Homo Sapiens
guucuccuccccagccccacucccuguucccu

SEQ ID NO: 88183 - RNA, 32 nt, Homo Sapiens
gcugguuucaggaaacaaaaggugauacgaaa

SEQ ID NO: 88184 - RNA, 32 nt, Homo Sapiens
uggaucugggguggggaucuggaguggaaggg

SEQ ID NO: 88185 - RNA, 32 nt, Homo Sapiens
guuugggaauccaugugauguuuuugauacuu

SEQ ID NO: 88186 - RNA, 32 nt, Homo Sapiens
cacgucccuggccuuccuccccuuccaggcgg

SEQ ID NO: 88187 - RNA, 32 nt, Homo Sapiens
uguagcuuuccacaucaagaguccuuauguua

SEQ ID NO: 88188 - RNA, 32 nt, Homo Sapiens
aaaugaaaacagccaguaacuuauguuucaga

SEQ ID NO: 88189 - RNA, 32 nt, Homo Sapiens
uugaaauaaaaauuauuuguauaauuaagaaa

SEQ ID NO: 88190 - RNA, 32 nt, Homo Sapiens
auauguaaacauauggguauuuuuuauuuugu

SEQ ID NO: 88191 - RNA, 32 nt, Homo Sapiens
accagaucauugugaaauuauucauaauuauu

SEQ ID NO: 88192 - RNA, 32 nt, Homo Sapiens
guaucagaauaaaaggacuugauauaaacaaa

SEQ ID NO: 88193 - RNA, 32 nt, Homo Sapiens
accaggcggggaggaguuggcggagcaggucu

SEQ ID NO: 88194 - RNA, 32 nt, Homo Sapiens
uuuuaaguuguaauaagaaguauuaccauuua

SEQ ID NO: 88195 - RNA, 30 nt, Homo Sapiens
augggcuuucacuacguuagccaggcuggu

SEQ ID NO: 88196 - RNA, 32 nt, Homo Sapiens
cggagggccagcgggccccggcgugggucucc

SEQ ID NO: 88197 - RNA, 32 nt, Homo Sapiens
uucauugcacuuaugaacaaggaaccuucuuu

SEQ ID NO: 88198 - RNA, 32 nt, Homo Sapiens
cagccuuggucgcggcgugccggcgcugcagc

SEQ ID NO: 88199 - RNA, 32 nt, Homo Sapiens
agaagaacaaaugaggcucacccacgaggcug

SEQ ID NO: 88200 - RNA, 32 nt, Homo Sapiens
gugccaccaaccccaucaggauuuccccaggg

SEQ ID NO: 88201 - RNA, 32 nt, Homo Sapiens
gcugaggcaggagaguggacugagcccaggag

SEQ ID NO: 88202 - RNA, 32 nt, Homo Sapiens
auauaugaauauauuucugacauugagguguu

SEQ ID NO: 88203 - RNA, 32 nt, Homo Sapiens
accacuugacuucuaacauuugaucucuuuuc

SEQ ID NO: 88204 - RNA, 32 nt, Homo Sapiens
gcccaugccuucugcaggguauggguugacac

SEQ ID NO: 88205 - RNA, 32 nt, Homo Sapiens
gacccugggccuggagggggagcaccagcggu

SEQ ID NO: 88206 - RNA, 32 nt, Homo Sapiens
gacucauggaucugguagagaccauagacaug

SEQ ID NO: 88207 - RNA, 32 nt, Homo Sapiens
uaaguuauuaaguaguuuaauuuuaauggcug

SEQ ID NO: 88208 - RNA, 32 nt, Homo Sapiens
auuuuguaaaauguuauaucaagauuucaaga

SEQ ID NO: 88209 - RNA, 32 nt, Homo Sapiens
gaauuacuagcugaaaaauuguaauguaccaa

SEQ ID NO: 88210 - RNA, 31 nt, Homo Sapiens
cuucugaaauaaaauacacauggguguaugu

SEQ ID NO: 88211 - RNA, 32 nt, Homo Sapiens
aaccggcgcgcgcguaggggcugggaggccgg

SEQ ID NO: 88212 - RNA, 32 nt, Homo Sapiens
uugcaagguucaguaguggcagaucaugacua

SEQ ID NO: 88213 - RNA, 32 nt, Homo Sapiens
cagagccggccccugcugcugcucgggcagcu

SEQ ID NO: 88214 - RNA, 32 nt, Homo Sapiens
agggcccagcgugugacguaggggccggggca

SEQ ID NO: 88215 - RNA, 30 nt, Homo Sapiens
cugugaggcaggcaggagcgucacccaagc

SEQ ID NO: 88216 - RNA, 31 nt, Homo Sapiens
ccaagccucaccugccugcccagcgccagga

SEQ ID NO: 88217 - RNA, 32 nt, Homo Sapiens
cuucuauuaaaauauaacauugugaaagaaaa

SEQ ID NO: 88218 - RNA, 32 nt, Homo Sapiens
auggugguaguuaagagugcagacacaucugg

SEQ ID NO: 88219 - RNA, 32 nt, Homo Sapiens
caagaccugaauuuauauuauaacaacauucc

SEQ ID NO: 88220 - RNA, 32 nt, Homo Sapiens
aauacauaaaccaaaugccauaaaauuucuuc

SEQ ID NO: 88221 - RNA, 32 nt, Homo Sapiens
acagagggcaaauagcgccaggcggccgcuug

SEQ ID NO: 88222 - RNA, 32 nt, Homo Sapiens
gugagaggaaggcggaggagcgggaaccgcgg

SEQ ID NO: 88223 - RNA, 32 nt, Homo Sapiens
guauccaaaugaaaugacacugaucacugcgu

SEQ ID NO: 88224 - RNA, 32 nt, Homo Sapiens
ucaauggggcucuggugacccuggugagaugu

SEQ ID NO: 88225 - RNA, 32 nt, Homo Sapiens
uauuuuuucuaagaguuuuucuauaaccuucc

SEQ ID NO: 88226 - RNA, 32 nt, Homo Sapiens
ccaggggaucccagggggcacagagcagcccc

SEQ ID NO: 88227 - RNA, 32 nt, Homo Sapiens
guccugaauuaucaaaguaagaauacucagau

SEQ ID NO: 88228 - RNA, 32 nt, Homo Sapiens
uuuuuuuuuuuuuuuuuuuuuaaagaguugga

SEQ ID NO: 88229 - RNA, 32 nt, Homo Sapiens
ucauuuugaacaugugugaaaguugaucauac

SEQ ID NO: 88230 - RNA, 32 nt, Homo Sapiens
uagauuuuuggcuuucacaaucuuauaaccua

SEQ ID NO: 88231 - RNA, 32 nt, Homo Sapiens
gcagcauuguguuggucaauguucccuuggcg

SEQ ID NO: 88232 - RNA, 32 nt, Homo Sapiens
augauuuuguuuuauuauaacauggaaauaug

SEQ ID NO: 88233 - RNA, 32 nt, Homo Sapiens
cccccgcucccucuuuccagugcucuggcugg

SEQ ID NO: 88234 - RNA, 32 nt, Homo Sapiens
ccguugcccugagcugcagccucggccccagg

SEQ ID NO: 88235 - RNA, 32 nt, Homo Sapiens
gcaucacucauguucuguggucgggcccuuug

SEQ ID NO: 88236 - RNA, 32 nt, Homo Sapiens
gaugucggcacuggaugggauguacuucucag

SEQ ID NO: 88237 - RNA, 32 nt, Homo Sapiens
augcagguucuuggggaaugggauggggacag

SEQ ID NO: 88238 - RNA, 32 nt, Homo Sapiens
cauccacaaaaauaugcaauggauguagaaaa

SEQ ID NO: 88239 - RNA, 32 nt, Homo Sapiens
uauggggaaacugaggcccagauugcacauac

SEQ ID NO: 88240 - RNA, 32 nt, Homo Sapiens
ccugcggcgcgagcccggggcggcuccaagcg

SEQ ID NO: 88241 - RNA, 32 nt, Homo Sapiens
ucugggcgcggggacgcggggcggcgcgaagc

SEQ ID NO: 88242 - RNA, 31 nt, Homo Sapiens
cugguggaauaaaaaaccuguauauuuuacu

SEQ ID NO: 88243 - RNA, 32 nt, Homo Sapiens
cuccaaaagaagagccaagagaagguccuuuu

SEQ ID NO: 88244 - RNA, 32 nt, Homo Sapiens
ugcuguaaaucuuuuucaaaaucuucaccuug

SEQ ID NO: 88245 - RNA, 32 nt, Homo Sapiens
gcagguagaaaagagguggagaucagaagcca

SEQ ID NO: 88246 - RNA, 32 nt, Homo Sapiens
uguauuauuauuauuguuuuuuaguagagacg

SEQ ID NO: 88247 - RNA, 32 nt, Homo Sapiens
auacaugccuuuuccucccauccaccuccccc

SEQ ID NO: 88248 - RNA, 32 nt, Homo Sapiens
agaaaaaguggaacaaaaccugguuuucccua

SEQ ID NO: 88249 - RNA, 32 nt, Homo Sapiens
caucucagacagcacccgggcccgccaccccu

SEQ ID NO: 88250 - RNA, 32 nt, Homo Sapiens
agauacuggugauucaaggaauuuuauuuaug

SEQ ID NO: 88251 - RNA, 27 nt, Homo Sapiens
auaucagcagucuucagcuccuuacaa

SEQ ID NO: 88252 - RNA, 31 nt, Homo Sapiens
cccgcccggcgaauugcgccccgcgccccuc

SEQ ID NO: 88253 - RNA, 32 nt, Homo Sapiens
cggcggcugcccccgccuccucugcuggcaug

SEQ ID NO: 88254 - RNA, 32 nt, Homo Sapiens
guagguguguaguggcauugcauugugcuuuc

SEQ ID NO: 88255 - RNA, 32 nt, Homo Sapiens
cugcuuuggucccagagaggcccucugcagau

SEQ ID NO: 88256 - RNA, 29 nt, Homo Sapiens
guaagugaagucaugucuauaagagaugu

SEQ ID NO: 88257 - RNA, 32 nt, Homo Sapiens
aauuacguuaagaauguuugcauugucugagc

SEQ ID NO: 88258 - RNA, 32 nt, Homo Sapiens
gugcuucauggucuucguggacaugugagggc

SEQ ID NO: 88259 - RNA, 32 nt, Homo Sapiens
uguggauggagaagaacaggcagugauauaca

SEQ ID NO: 88260 - RNA, 32 nt, Homo Sapiens
gcuuuuucauugauuugagcaaaugauuuaca

SEQ ID NO: 88261 - RNA, 32 nt, Homo Sapiens
uacaguuuccauuuuuuuuuuauacuugcuua

SEQ ID NO: 88262 - RNA, 32 nt, Homo Sapiens
gcagaagaaaaaguggaauaaaauauuacuuc

SEQ ID NO: 88263 - RNA, 32 nt, Homo Sapiens
ucaggauaauggugggaauggggugaagauga

SEQ ID NO: 88264 - RNA, 32 nt, Homo Sapiens
uucgccagacaauaaacuuacacuggaagcuu

SEQ ID NO: 88265 - RNA, 32 nt, Homo Sapiens
cacauucagcauuaaucacuaggucacuuugc

SEQ ID NO: 88266 - RNA, 32 nt, Homo Sapiens
cggcggcggcgguggccugguguuaaggggag

SEQ ID NO: 88267 - RNA, 32 nt, Homo Sapiens
aagcccuuucccagcccuccaccacuuccacc

SEQ ID NO: 88268 - RNA, 32 nt, Homo Sapiens
acuucacaucaugguggggaccgagauagaga

SEQ ID NO: 88269 - RNA, 32 nt, Homo Sapiens
agcuuuucaggagacaggggucuugagcccag

SEQ ID NO: 88270 - RNA, 32 nt, Homo Sapiens
gaauaacugacuuuauuuuguuuacuucuuac

SEQ ID NO: 88271 - RNA, 31 nt, Homo Sapiens
augaugauaguuuccguugccauggugaagc

SEQ ID NO: 88272 - RNA, 32 nt, Homo Sapiens
auaguaucuuuaaaauuuuuuauuuuaauagc

SEQ ID NO: 88273 - RNA, 32 nt, Homo Sapiens
aauaaagaaauuuuauuuuaaacccaagccuc

SEQ ID NO: 88274 - RNA, 32 nt, Homo Sapiens
ccuugaggaaggggaagcaggauacccuggcg

SEQ ID NO: 88275 - RNA, 32 nt, Homo Sapiens
uaaauucaguuauuguauuugugguguugccu

SEQ ID NO: 88276 - RNA, 32 nt, Homo Sapiens
uccugccuuccacagccucucguuucuccucc

SEQ ID NO: 88277 - RNA, 32 nt, Homo Sapiens
cagaugcauccuccccuucucuuuucuccaca

SEQ ID NO: 88278 - RNA, 32 nt, Homo Sapiens
uuuguuaaagcaaaaacuaugcgaaaggguga

SEQ ID NO: 88279 - RNA, 32 nt, Homo Sapiens
gaggccaucauucugcauggcaaacagcaggc

SEQ ID NO: 88280 - RNA, 32 nt, Homo Sapiens
gcucaccaaugaugaggccugugaagccacgg

SEQ ID NO: 88281 - RNA, 32 nt, Homo Sapiens
aagaaagggggccagcagcagguaggugccau

SEQ ID NO: 88282 - RNA, 32 nt, Homo Sapiens
cacugcacuccagccuggggugauagaacaag

SEQ ID NO: 88283 - RNA, 32 nt, Homo Sapiens
caggcuggagugcgguggugugaucuuggcuc

SEQ ID NO: 88284 - RNA, 32 nt, Homo Sapiens
gggacuggccccagcaguccccuaggaggggc

SEQ ID NO: 88285 - RNA, 32 nt, Homo Sapiens
gagacaaauuaaaaacaaaaacaacuaacaaa

SEQ ID NO: 88286 - RNA, 31 nt, Homo Sapiens
gccagcaugccgugggacgcgcggcggccug

SEQ ID NO: 88287 - RNA, 32 nt, Homo Sapiens
gugugaaauaccagugugguuuguguuugagu

SEQ ID NO: 88288 - RNA, 32 nt, Homo Sapiens
gaaauacaaaaauacucagauaagguaaaaug

SEQ ID NO: 88289 - RNA, 32 nt, Homo Sapiens
uuucaaaaaaucacaguagcaaugcaacucau

SEQ ID NO: 88290 - RNA, 32 nt, Homo Sapiens
gaauaguuugauggggcgccgggcggaugaca

SEQ ID NO: 88291 - RNA, 32 nt, Homo Sapiens
guuuucaccaugguggccaggcuggucucgaa

SEQ ID NO: 88292 - RNA, 32 nt, Homo Sapiens
cuuagcuguacuauaaauuugugagugaaguu

SEQ ID NO: 88293 - RNA, 32 nt, Homo Sapiens
aagcaacacaaaagcuccaaagggcccccuaa

SEQ ID NO: 88294 - RNA, 32 nt, Homo Sapiens
aaauauggaugaugaacugcuguugguugcua

SEQ ID NO: 88295 - RNA, 32 nt, Homo Sapiens
ucaugaucucuuaaaagaugagacucucggaa

SEQ ID NO: 88296 - RNA, 30 nt, Homo Sapiens
ucaaugauuaaauaaacagaugaccuaguu

SEQ ID NO: 88297 - RNA, 32 nt, Homo Sapiens
ccuuuguuuuuuaccuucugucuacccuggaa

SEQ ID NO: 88298 - RNA, 32 nt, Homo Sapiens
uggacagaugacuuggagauguucacuggaca

SEQ ID NO: 88299 - RNA, 32 nt, Homo Sapiens
gcuauuaagaaauuucaaaaccacaggguuuu

SEQ ID NO: 88300 - RNA, 32 nt, Homo Sapiens
agggguaacagaccgcuggaaaacacugucac

SEQ ID NO: 88301 - RNA, 32 nt, Homo Sapiens
auaaagaaaaauuuaaccuaucaugcacugua

SEQ ID NO: 88302 - RNA, 32 nt, Homo Sapiens
caggguggguggcagggggauauagugagggu

SEQ ID NO: 88303 - RNA, 32 nt, Homo Sapiens
uucccgacguuccguuccccccugcccgccuu

SEQ ID NO: 88304 - RNA, 32 nt, Homo Sapiens
uucagacuaugaagagacauauugugaaaguc

SEQ ID NO: 88305 - RNA, 32 nt, Homo Sapiens
aaagccauucuuggggcaaacacacccuaccu

SEQ ID NO: 88306 - RNA, 32 nt, Homo Sapiens
aaacuuacacaauugggacauacguauguguu

SEQ ID NO: 88307 - RNA, 32 nt, Homo Sapiens
guuuggguagacuuuuuuuuuauaucaaguau

SEQ ID NO: 88308 - RNA, 32 nt, Homo Sapiens
gugguccccucagccuccauggggagggaaga

SEQ ID NO: 88309 - RNA, 32 nt, Homo Sapiens
acccaucuuuugcagugcaugccuuccuacuu

SEQ ID NO: 88310 - RNA, 32 nt, Homo Sapiens
auguuggagagccucgagcaccaaggggagga

SEQ ID NO: 88311 - RNA, 32 nt, Homo Sapiens
gaggaugagccgcagcccuuuccugggacaug

SEQ ID NO: 88312 - RNA, 32 nt, Homo Sapiens
ccugaggcgaggguagcgggugcauggcgcag

SEQ ID NO: 88313 - RNA, 32 nt, Homo Sapiens
ccaaucuuacugggaaggcccugguaguguaa

SEQ ID NO: 88314 - RNA, 32 nt, Homo Sapiens
gauuauccuugccaaacaaaaugcugaaacca

SEQ ID NO: 88315 - RNA, 30 nt, Homo Sapiens
guaaagcuuugcucaaaguugugugcauuu

SEQ ID NO: 88316 - RNA, 32 nt, Homo Sapiens
ucuuuauuuugguccuuuaugcuugagguucc

SEQ ID NO: 88317 - RNA, 32 nt, Homo Sapiens
ggggccuggccagucagacagcccuuucguaa

SEQ ID NO: 88318 - RNA, 32 nt, Homo Sapiens
ccaccugcucuccaggccccaggugccagcag

SEQ ID NO: 88319 - RNA, 30 nt, Homo Sapiens
gggaggagaggcggcggcggcaguguccaa

SEQ ID NO: 88320 - RNA, 32 nt, Homo Sapiens
gucacuuuggccuggaaaccaagccccacugc

SEQ ID NO: 88321 - RNA, 32 nt, Homo Sapiens
cggaagcacccuccaaaccagggcucccgaag

SEQ ID NO: 88322 - RNA, 32 nt, Homo Sapiens
caccuuguaguaugucaucauucugcucauga

SEQ ID NO: 88323 - RNA, 32 nt, Homo Sapiens
acccucaccccggccccccacccgcagccggc

SEQ ID NO: 88324 - RNA, 32 nt, Homo Sapiens
ccggcugcgaggaggaggcggcggcggcgcag

SEQ ID NO: 88325 - RNA, 32 nt, Homo Sapiens
acugagacggucucuuguucgccuggacggcg

SEQ ID NO: 88326 - RNA, 32 nt, Homo Sapiens
cuacgagguugcagucuggagggcgccaacag

SEQ ID NO: 88327 - RNA, 32 nt, Homo Sapiens
ccacaggaccugggcuucgucuccaggggaca

SEQ ID NO: 88328 - RNA, 32 nt, Homo Sapiens
acccgugcggggacaagcgcgcggggcgccaa

SEQ ID NO: 88329 - RNA, 32 nt, Homo Sapiens
ucuggaagugaacacucguuuugaaagcuuga

SEQ ID NO: 88330 - RNA, 32 nt, Homo Sapiens
cacgaggccaaccccuuuccaaggcugcuugg

SEQ ID NO: 88331 - RNA, 32 nt, Homo Sapiens
ccacagaggauggauaaaaaugguuuguuaug

SEQ ID NO: 88332 - RNA, 32 nt, Homo Sapiens
augcugucagugacuguuaccuaauuaaucgu

SEQ ID NO: 88333 - RNA, 32 nt, Homo Sapiens
cuuuguuuuuaaaacucuauccuuguauauca

SEQ ID NO: 88334 - RNA, 32 nt, Homo Sapiens
gcgcccucagcuccccgcaguggaucacgcug

SEQ ID NO: 88335 - RNA, 32 nt, Homo Sapiens
cuuguauauacacauagagaucaauuugccaa

SEQ ID NO: 88336 - RNA, 32 nt, Homo Sapiens
cacacacacacacacagagacacacacacaca

SEQ ID NO: 88337 - RNA, 32 nt, Homo Sapiens
ugagccugagacagagagggccaggcaccaac

SEQ ID NO: 88338 - RNA, 32 nt, Homo Sapiens
ggagccgcaucccacccccagagccccagcgc

SEQ ID NO: 88339 - RNA, 32 nt, Homo Sapiens
cagaggaucggggagagaaggggccuguguuc

SEQ ID NO: 88340 - RNA, 32 nt, Homo Sapiens
ggagaagaggggcccuuggcugcagagaucag

SEQ ID NO: 88341 - RNA, 32 nt, Homo Sapiens
cugacugccgugguuagaggacuucuuaugcu

SEQ ID NO: 88342 - RNA, 32 nt, Homo Sapiens
uaauaaaauggcauauuuugcaucuacaacuu

SEQ ID NO: 88343 - RNA, 32 nt, Homo Sapiens
agaggaagggaagaucacugacagaguagacu

SEQ ID NO: 88344 - RNA, 32 nt, Homo Sapiens
uggcccugcuggaagacagcuauguauaaguu

SEQ ID NO: 88345 - RNA, 32 nt, Homo Sapiens
ucuuccccaagccgcucuacccgggaggcccg

SEQ ID NO: 88346 - RNA, 32 nt, Homo Sapiens
ugauggaugggaacgcaagagauacuuacaug

SEQ ID NO: 88347 - RNA, 32 nt, Homo Sapiens
uuuuuuauucagauugggaaauccauuccauu

SEQ ID NO: 88348 - RNA, 32 nt, Homo Sapiens
cacaagccccugcagggagcgggcccgggcgg

SEQ ID NO: 88349 - RNA, 32 nt, Homo Sapiens
ggguuucuuuuggaaauaauuacuuuugaacc

SEQ ID NO: 88350 - RNA, 32 nt, Homo Sapiens
agcuggaggacauugcccugcccugcgcggcc

SEQ ID NO: 88351 - RNA, 32 nt, Homo Sapiens
aaacgagucaaaaauauaucaaucauuaacca

SEQ ID NO: 88352 - RNA, 32 nt, Homo Sapiens
cgccugucaucccagcacuuugggaggcaaag

SEQ ID NO: 88353 - RNA, 32 nt, Homo Sapiens
ccugagcucacucgcgcacgcccgcccggccc

SEQ ID NO: 88354 - RNA, 32 nt, Homo Sapiens
ccggaacccgcagguguccgcgggcgcgccaa

SEQ ID NO: 88355 - RNA, 32 nt, Homo Sapiens
gaaauauaauguuugucaaaaauguaucaaaa

SEQ ID NO: 88356 - RNA, 32 nt, Homo Sapiens
cauccgucaggagcggaguaggacucuggaga

SEQ ID NO: 88357 - RNA, 32 nt, Homo Sapiens
uuucccgcucuucuugcccacccggccggcag

SEQ ID NO: 88358 - RNA, 29 nt, Homo Sapiens
agggauugaaguuuauuauuuucaaagga

SEQ ID NO: 88359 - RNA, 32 nt, Homo Sapiens
cugaggaggaggaggaggcgggggcggccaug

SEQ ID NO: 88360 - RNA, 32 nt, Homo Sapiens
caagggcgugggggguugcagcugggcuggcu

SEQ ID NO: 88361 - RNA, 32 nt, Homo Sapiens
cuuguaggcagacaccagugcacucuagauac

SEQ ID NO: 88362 - RNA, 32 nt, Homo Sapiens
agucuguugauauaaauauaugacguuacuaa

SEQ ID NO: 88363 - RNA, 32 nt, Homo Sapiens
guaagacaaaaauugaauaauguuuuuugaag

SEQ ID NO: 88364 - RNA, 32 nt, Homo Sapiens
auugcugguuggcaaugauguaucggccagau

SEQ ID NO: 88365 - RNA, 32 nt, Homo Sapiens
gcaggaagccuggcccuggaggguggucacgg

SEQ ID NO: 88366 - RNA, 32 nt, Homo Sapiens
gaguauauuucugugaaauaauuauaagucag

SEQ ID NO: 88367 - RNA, 32 nt, Homo Sapiens
uuaacaucuuaaucacauccauagaaaaugac

SEQ ID NO: 88368 - RNA, 32 nt, Homo Sapiens
agcgucauuuuucuuagugugccaagaguucg

SEQ ID NO: 88369 - RNA, 32 nt, Homo Sapiens
uggcucgccugcaggcagcugcugugagcugg

SEQ ID NO: 88370 - RNA, 32 nt, Homo Sapiens
gugcuuggggcagucccaccggagccgggcgu

SEQ ID NO: 88371 - RNA, 32 nt, Homo Sapiens
gcagccccggugcccgcucgcgccucucccuc

SEQ ID NO: 88372 - RNA, 32 nt, Homo Sapiens
aaaugcuggaaaucuugaccucuccuugggau

SEQ ID NO: 88373 - RNA, 32 nt, Homo Sapiens
ucagggcuccagccucuugauauuuuuguacu

SEQ ID NO: 88374 - RNA, 32 nt, Homo Sapiens
gcggcguaguggcagcugggguuagugcuauc

SEQ ID NO: 88375 - RNA, 32 nt, Homo Sapiens
ugggccccugggaaugacuccuggaccuccac

SEQ ID NO: 88376 - RNA, 32 nt, Homo Sapiens
cugucugcacagcagccccggcguguuccucu

SEQ ID NO: 88377 - RNA, 32 nt, Homo Sapiens
ucuaauucagguugucaaacuggccauuugac

SEQ ID NO: 88378 - RNA, 32 nt, Homo Sapiens
uccggugauauuuggccuggccuuacagcuua

SEQ ID NO: 88379 - RNA, 32 nt, Homo Sapiens
aacuggcucugagcacccugccgcccgcggcc

SEQ ID NO: 88380 - RNA, 32 nt, Homo Sapiens
cauuccuuuuucuguccuuuagggacugaaga

SEQ ID NO: 88381 - RNA, 32 nt, Homo Sapiens
gcaguugcauccuggagccugaugcuagaagc

SEQ ID NO: 88382 - RNA, 32 nt, Homo Sapiens
auuggagucucuucuuuuuuugauagcgggag

SEQ ID NO: 88383 - RNA, 32 nt, Homo Sapiens
cgccugaggggcccgccucgggccauggugcu

SEQ ID NO: 88384 - RNA, 32 nt, Homo Sapiens
ucccgcuagcggggccacgaggguugcuaggc

SEQ ID NO: 88385 - RNA, 32 nt, Homo Sapiens
gauucacuauagaauccacuacagcccccucc

SEQ ID NO: 88386 - RNA, 32 nt, Homo Sapiens
ccucaccagaucccaaccaugcuggcaccccg

SEQ ID NO: 88387 - RNA, 32 nt, Homo Sapiens
ucugauccgggcugggggcguguacacucggc

SEQ ID NO: 88388 - RNA, 30 nt, Homo Sapiens
uguguugugaagcuugagacucuggaaaga

SEQ ID NO: 88389 - RNA, 32 nt, Homo Sapiens
gaagaacaagcacagauugaugcugaaaugga

SEQ ID NO: 88390 - RNA, 32 nt, Homo Sapiens
uuggggguacgauguuuauacuccguaaagaa

SEQ ID NO: 88391 - RNA, 32 nt, Homo Sapiens
gcccugacgugcgccuugcauuacuguuuccu

SEQ ID NO: 88392 - RNA, 32 nt, Homo Sapiens
agaaacuccaugaaugaaugacucagggaagu

SEQ ID NO: 88393 - RNA, 32 nt, Homo Sapiens
ggaaagcagagggugaucuuugaaaagaggcu

SEQ ID NO: 88394 - RNA, 32 nt, Homo Sapiens
uccucgcuguccccuguccccccgcaacaucc

SEQ ID NO: 88395 - RNA, 32 nt, Homo Sapiens
ggacaugauuuuuguggcauuuagacaacugu

SEQ ID NO: 88396 - RNA, 32 nt, Homo Sapiens
gggcguugaccauuuggguguacacaugagug

SEQ ID NO: 88397 - RNA, 32 nt, Homo Sapiens
gaggaggaggacgaugaugaagagacugcccc

SEQ ID NO: 88398 - RNA, 32 nt, Homo Sapiens
auaagccuuucugguuucggagcacguaaaug

SEQ ID NO: 88399 - RNA, 32 nt, Homo Sapiens
uguucuucaaggaaacaagaggguccacuuca

SEQ ID NO: 88400 - RNA, 32 nt, Homo Sapiens
cugcagccacccaagcugcagcuguggaccca

SEQ ID NO: 88401 - RNA, 32 nt, Homo Sapiens
ugaaauaaaaacugaaauaaaaaugacuucac

SEQ ID NO: 88402 - RNA, 32 nt, Homo Sapiens
ggacucgcguccuucaacagugagucugacug

SEQ ID NO: 88403 - RNA, 32 nt, Homo Sapiens
ugucccgcuucuccgcgccccagccgccggcu

SEQ ID NO: 88404 - RNA, 32 nt, Homo Sapiens
ggcgccgagacccaaggcgccacugagggcac

SEQ ID NO: 88405 - RNA, 32 nt, Homo Sapiens
auguuugcauacuuguaaaucuguagaauaaa

SEQ ID NO: 88406 - RNA, 32 nt, Homo Sapiens
gcucccuggguuugugcggacccaggcaggca

SEQ ID NO: 88407 - RNA, 32 nt, Homo Sapiens
ggaauguguuuccauuuguuuuugucaucugu

SEQ ID NO: 88408 - RNA, 32 nt, Homo Sapiens
gacucaucgcaguguguuauaugacaggacaa

SEQ ID NO: 88409 - RNA, 28 nt, Homo Sapiens
cgggucggagcgacgccgaggucugacg

SEQ ID NO: 88410 - RNA, 32 nt, Homo Sapiens
gagcugggguguuccuggaagaggucggggag

SEQ ID NO: 88411 - RNA, 32 nt, Homo Sapiens
uucccuuaaucaacucuccuuugauuuuggua

SEQ ID NO: 88412 - RNA, 32 nt, Homo Sapiens
uugaaaaaaaaaucuguaaaacaucaaccccc

SEQ ID NO: 88413 - RNA, 32 nt, Homo Sapiens
aauucaaaaaauuuaaaaaggauguauacauu

SEQ ID NO: 88414 - RNA, 32 nt, Homo Sapiens
accacagagggugagcccugggauaauguguu

SEQ ID NO: 88415 - RNA, 32 nt, Homo Sapiens
aggugggugucugcgugcguccacgugcgugu

SEQ ID NO: 88416 - RNA, 32 nt, Homo Sapiens
uuagcaaaggccaggaggaaaaauagaaauaa

SEQ ID NO: 88417 - RNA, 32 nt, Homo Sapiens
uuaaauagauauuuuuaaccagguguuugguu

SEQ ID NO: 88418 - RNA, 32 nt, Homo Sapiens
cugccccugggaacugaaugucucaguauaaa

SEQ ID NO: 88419 - RNA, 32 nt, Homo Sapiens
ucgagccucacagaagccagcgcgggucucug

SEQ ID NO: 88420 - RNA, 32 nt, Homo Sapiens
cauauucucaauguacaguaaaacagacagaa

SEQ ID NO: 88421 - RNA, 32 nt, Homo Sapiens
cgaugccggcagcguccuggggcccccguagc

SEQ ID NO: 88422 - RNA, 32 nt, Homo Sapiens
uauauaauuuuuccuuuaaucggagacccuau

SEQ ID NO: 88423 - RNA, 32 nt, Homo Sapiens
augagcgguuccuauuagcaucagugggaacu

SEQ ID NO: 88424 - RNA, 32 nt, Homo Sapiens
augcauggucugaugcugggaauucugcagau

SEQ ID NO: 88425 - RNA, 32 nt, Homo Sapiens
uuaauaagaaugccuagaagaggacugauucu

SEQ ID NO: 88426 - RNA, 32 nt, Homo Sapiens
caugccucagucggccugcgcuccucagccug

SEQ ID NO: 88427 - RNA, 32 nt, Homo Sapiens
cagggagcucacggucuucucagguucaucug

SEQ ID NO: 88428 - RNA, 32 nt, Homo Sapiens
ccaagacaagagaauuauauuuuauaggacau

SEQ ID NO: 88429 - RNA, 32 nt, Homo Sapiens
aggagagcugggugguauaaggcuguccucuc

SEQ ID NO: 88430 - RNA, 32 nt, Homo Sapiens
aacagccucaccccacucuccucucucuuccc

SEQ ID NO: 88431 - RNA, 32 nt, Homo Sapiens
ggaucgacagcagcuguccgccaggaugcaug

SEQ ID NO: 88432 - RNA, 32 nt, Homo Sapiens
ccaauuuugguucucacuccuggccccccaga

SEQ ID NO: 88433 - RNA, 32 nt, Homo Sapiens
aaugaacucucuugaauggguagauacaggcc

SEQ ID NO: 88434 - RNA, 32 nt, Homo Sapiens
ugcugaggcaauucaauuguauuuucaacaaa

SEQ ID NO: 88435 - RNA, 32 nt, Homo Sapiens
cugugcgcgccggcugcaauggggccgcauuu

SEQ ID NO: 88436 - RNA, 32 nt, Homo Sapiens
aaaauucuaugaaaaaagacacuagaaugcug

SEQ ID NO: 88437 - RNA, 32 nt, Homo Sapiens
uggcggccugggggucccgggaggcgggugca

SEQ ID NO: 88438 - RNA, 28 nt, Homo Sapiens
uucaccguguuagccaggaugaucucga

SEQ ID NO: 88439 - RNA, 32 nt, Homo Sapiens
agagcggcgcugggggcgggugggggcgcggg

SEQ ID NO: 88440 - RNA, 32 nt, Homo Sapiens
aaaauaguggccuuugaaaaaauaugcugaca

SEQ ID NO: 88441 - RNA, 32 nt, Homo Sapiens
agagcaaagacaaaauaauguuaaacaauucu

SEQ ID NO: 88442 - RNA, 32 nt, Homo Sapiens
cauugcgauugugacaacauagcuuaugaaau

SEQ ID NO: 88443 - RNA, 32 nt, Homo Sapiens
ccgggaccccugcggguggcuccaucagccag

SEQ ID NO: 88444 - RNA, 32 nt, Homo Sapiens
aagugcccacagcuggccccagguugccagcg

SEQ ID NO: 88445 - RNA, 30 nt, Homo Sapiens
aauguaucuaaauugggggaacagaaugaa

SEQ ID NO: 88446 - RNA, 32 nt, Homo Sapiens
uucccuuuuugccaguaaaccaaaaagcagau

SEQ ID NO: 88447 - RNA, 32 nt, Homo Sapiens
aguguccccuucugcccuuccccuggcuccca

SEQ ID NO: 88448 - RNA, 32 nt, Homo Sapiens
ucagcucaggugaucagaacugcccagcugac

SEQ ID NO: 88449 - RNA, 32 nt, Homo Sapiens
aauaguguacauuguacccaauaggugguauu

SEQ ID NO: 88450 - RNA, 32 nt, Homo Sapiens
ucggugaagacuguuucuuaaauuucaauugg

SEQ ID NO: 88451 - RNA, 32 nt, Homo Sapiens
ccucuuucggaaaugauugagagcagccucuu

SEQ ID NO: 88452 - RNA, 32 nt, Homo Sapiens
cuuggagaggaaagaugccaagcugcuucuua

SEQ ID NO: 88453 - RNA, 29 nt, Homo Sapiens
gugaagucagucuuuuauuuucucauaaa

SEQ ID NO: 88454 - RNA, 32 nt, Homo Sapiens
cauucuacuuggaugggaacuggagaucagcc

SEQ ID NO: 88455 - RNA, 32 nt, Homo Sapiens
cuagagccucaccuccuaauagacuuagcccc

SEQ ID NO: 88456 - RNA, 32 nt, Homo Sapiens
uauccugcgcagcgucaucuccugccgcaaga

SEQ ID NO: 88457 - RNA, 32 nt, Homo Sapiens
ggagcccggacagaguaggauggcauccagcc

SEQ ID NO: 88458 - RNA, 32 nt, Homo Sapiens
caguagguuugugaaauugguucuuuguaugg

SEQ ID NO: 88459 - RNA, 32 nt, Homo Sapiens
gccuugccagcuuugucagugcugcccacgug

SEQ ID NO: 88460 - RNA, 32 nt, Homo Sapiens
uaaacuugccagcuuagacagggaucaguccu

SEQ ID NO: 88461 - RNA, 32 nt, Homo Sapiens
auauguauccaguacauuuaauugagaagcgu

SEQ ID NO: 88462 - RNA, 32 nt, Homo Sapiens
uauuuugugaaugauuaaugauguugaggauc

SEQ ID NO: 88463 - RNA, 32 nt, Homo Sapiens
ucagccaugucagucccuguucugggaggugc

SEQ ID NO: 88464 - RNA, 32 nt, Homo Sapiens
aaacggaggagcuuucaucuccugaagaaaaa

SEQ ID NO: 88465 - RNA, 32 nt, Homo Sapiens
uuuuagcccuauagaugauaaauaucacuggg

SEQ ID NO: 88466 - RNA, 32 nt, Homo Sapiens
uuucccaggaggaccagcgggcugccuguggg

SEQ ID NO: 88467 - RNA, 32 nt, Homo Sapiens
uguuuagaaguggguagauauugcagauaaga

SEQ ID NO: 88468 - RNA, 32 nt, Homo Sapiens
gccugggcacacugcuuggggaggucugaugc

SEQ ID NO: 88469 - RNA, 32 nt, Homo Sapiens
aggccaguggaggcucuugggcuuggagaaca

SEQ ID NO: 88470 - RNA, 32 nt, Homo Sapiens
gucucacaguagcuuccugagaacggggaccu

SEQ ID NO: 88471 - RNA, 32 nt, Homo Sapiens
uuauguuucaaaucuuuacauuuuggaaauaa

SEQ ID NO: 88472 - RNA, 32 nt, Homo Sapiens
uaugcagaacuauuuuuguacaaauuguuuaa

SEQ ID NO: 88473 - RNA, 32 nt, Homo Sapiens
caggacuggggcuugccaggcuugucaaauag

SEQ ID NO: 88474 - RNA, 32 nt, Homo Sapiens
cugccacuucuuccagccccagccaaaggcgu

SEQ ID NO: 88475 - RNA, 32 nt, Homo Sapiens
auacuugcauuacauagguacuucaagcaaca

SEQ ID NO: 88476 - RNA, 32 nt, Homo Sapiens
ugagagcccuguguagucuccuccuguaggaa

SEQ ID NO: 88477 - RNA, 32 nt, Homo Sapiens
gagccggagcugggccuagcugucccacgggc

SEQ ID NO: 88478 - RNA, 32 nt, Homo Sapiens
uaaguacuaaaauuauauuuauuauguauaau

SEQ ID NO: 88479 - RNA, 32 nt, Homo Sapiens
ugcuguucucucacuuuccccaguaagcugca

SEQ ID NO: 88480 - RNA, 32 nt, Homo Sapiens
ugaagucuuaccuuuuuuguccuugcuuuuac

SEQ ID NO: 88481 - RNA, 32 nt, Homo Sapiens
agggaagaugacccacaauaaugucugcagug

SEQ ID NO: 88482 - RNA, 32 nt, Homo Sapiens
uuuuugagaaugucaucccauccauccauuac

SEQ ID NO: 88483 - RNA, 25 nt, Homo Sapiens
augcacaggaggagaagcaggagcu

SEQ ID NO: 88484 - RNA, 32 nt, Homo Sapiens
auauccccacuacucaauacuaccucugaaug

SEQ ID NO: 88485 - RNA, 32 nt, Homo Sapiens
accacggugucuucaaaagccccgucaggguu

SEQ ID NO: 88486 - RNA, 31 nt, Homo Sapiens
ccugcugcccuggcccugccccccugcgcau

SEQ ID NO: 88487 - RNA, 32 nt, Homo Sapiens
cauuuguuguacaaucaggaaaagcaauaaag

SEQ ID NO: 88488 - RNA, 32 nt, Homo Sapiens
cguggaauggcuaaaucaagcuaacauaucca

SEQ ID NO: 88489 - RNA, 32 nt, Homo Sapiens
ugucaggggugacaccaggacacagggacagg

SEQ ID NO: 88490 - RNA, 32 nt, Homo Sapiens
cucacaucugagcauuguuuuccucuuccuaa

SEQ ID NO: 88491 - RNA, 32 nt, Homo Sapiens
cauuugaggggagcccauggggccugaaaggc

SEQ ID NO: 88492 - RNA, 32 nt, Homo Sapiens
agaguuuacugacuucuagagccauucucuuu

SEQ ID NO: 88493 - RNA, 30 nt, Homo Sapiens
ugaaggcccugagccacccauucugagcag

SEQ ID NO: 88494 - RNA, 32 nt, Homo Sapiens
gacgagcagcggguggaccucgccgggggccc

SEQ ID NO: 88495 - RNA, 32 nt, Homo Sapiens
ugagaaagaaacccagaagaggaagaagagga

SEQ ID NO: 88496 - RNA, 32 nt, Homo Sapiens
aauauuucugcacuugacccuauuugaauucu

SEQ ID NO: 88497 - RNA, 31 nt, Homo Sapiens
ccgcgccagcgcagccccccagccgcaucgg

SEQ ID NO: 88498 - RNA, 32 nt, Homo Sapiens
uaucuauacucuucauauguuaaaagaccauu

SEQ ID NO: 88499 - RNA, 32 nt, Homo Sapiens
gugagcggcagcgccgccggccucccuccucg

SEQ ID NO: 88500 - RNA, 32 nt, Homo Sapiens
gacuccaggaggagggaccagcugaaggcacc

SEQ ID NO: 88501 - RNA, 32 nt, Homo Sapiens
ucuccaucuacuuuuccacuccagagugggaa

SEQ ID NO: 88502 - RNA, 32 nt, Homo Sapiens
ggccccggggcugccguuuugcugggcagugg

SEQ ID NO: 88503 - RNA, 32 nt, Homo Sapiens
cagacccggcccaggggccgccgggaucaucc

SEQ ID NO: 88504 - RNA, 32 nt, Homo Sapiens
guuugcacuuugcauugaacaauggguuuauu

SEQ ID NO: 88505 - RNA, 32 nt, Homo Sapiens
gaagcacaaaugcuguccauggccgugaggcu

SEQ ID NO: 88506 - RNA, 32 nt, Homo Sapiens
uggccggccgcgccuggcuucuuggaaagagc

SEQ ID NO: 88507 - RNA, 32 nt, Homo Sapiens
ggcaacacccucacagacacacucaggaucaa

SEQ ID NO: 88508 - RNA, 32 nt, Homo Sapiens
aguuaaaauaucuauguguuauucccaaaccc

SEQ ID NO: 88509 - RNA, 32 nt, Homo Sapiens
acaguuccuuaccucaaagucccuuuaggucc

SEQ ID NO: 88510 - RNA, 32 nt, Homo Sapiens
auaaaaaauguuuaaaaaauuagccagggacg

SEQ ID NO: 88511 - RNA, 32 nt, Homo Sapiens
agagugagacccagcccucaucccgagcaccu

SEQ ID NO: 88512 - RNA, 32 nt, Homo Sapiens
gggccagaacacacucuacaaaaugacuagga

SEQ ID NO: 88513 - RNA, 32 nt, Homo Sapiens
aacaggcccaugguggagagaccuccaugagg

SEQ ID NO: 88514 - RNA, 32 nt, Homo Sapiens
cggaaguauggacuaaaaucacacuccuccuu

SEQ ID NO: 88515 - RNA, 32 nt, Homo Sapiens
ucaacaacaaaacagaaaacugugagugccau

SEQ ID NO: 88516 - RNA, 32 nt, Homo Sapiens
aaccauuuaacaaagaauauaaaaugucacaa

SEQ ID NO: 88517 - RNA, 32 nt, Homo Sapiens
gcaguguaucaucuacuaauaaaauuaaacua

SEQ ID NO: 88518 - RNA, 32 nt, Homo Sapiens
gccugcuagugguuuacaaauaugcaacugac

SEQ ID NO: 88519 - RNA, 32 nt, Homo Sapiens
uuccaggacuuccagacagaguaccagguuuu

SEQ ID NO: 88520 - RNA, 32 nt, Homo Sapiens
ggauaauauauucuggauaauauauaauaguc

SEQ ID NO: 88521 - RNA, 32 nt, Homo Sapiens
gaauaacaauguuuucuguuuuaaggguguca

SEQ ID NO: 88522 - RNA, 32 nt, Homo Sapiens
ccauccccccuggcugccccgcacccgcagcc

SEQ ID NO: 88523 - RNA, 32 nt, Homo Sapiens
uccuagauaauuaugucuaaguaguuuuaucu

SEQ ID NO: 88524 - RNA, 32 nt, Homo Sapiens
aacaguaaguuaaauuucagcauaucaguuuu

SEQ ID NO: 88525 - RNA, 32 nt, Homo Sapiens
aagagagaaugcauucuuaaaagaaagcugua

SEQ ID NO: 88526 - RNA, 32 nt, Homo Sapiens
cagucuuggaccauaaucaugguggacaugau

SEQ ID NO: 88527 - RNA, 32 nt, Homo Sapiens
uuaauguguggauauucuuaauuaaaacucau

SEQ ID NO: 88528 - RNA, 32 nt, Homo Sapiens
gucaccugguggcuucccggcgcgcccucugc

SEQ ID NO: 88529 - RNA, 32 nt, Homo Sapiens
cccuuccccucccacacaaaccagccaguaaa

SEQ ID NO: 88530 - RNA, 32 nt, Homo Sapiens
agccgggcugugcaccuaaaugucugucuggg

SEQ ID NO: 88531 - RNA, 32 nt, Homo Sapiens
acggagucccagcaagcgcgggcccgucuucc

SEQ ID NO: 88532 - RNA, 32 nt, Homo Sapiens
aauguuuaaacauuuuaaauguggcauugguu

SEQ ID NO: 88533 - RNA, 32 nt, Homo Sapiens
uguucccuuuuaauagaagcuacaucauugac

SEQ ID NO: 88534 - RNA, 32 nt, Homo Sapiens
ugcacagaugaggaaauugaaagucuaagaga

SEQ ID NO: 88535 - RNA, 32 nt, Homo Sapiens
guuaggagaaaagaaaaaggagaauuugggcu

SEQ ID NO: 88536 - RNA, 32 nt, Homo Sapiens
ccgggccugagcggcagcgucugucaaaugug

SEQ ID NO: 88537 - RNA, 32 nt, Homo Sapiens
uggaagaagauaauauaugguccuguccuuga

SEQ ID NO: 88538 - RNA, 32 nt, Homo Sapiens
uggaagacauauauuauauauagaaaagagga

SEQ ID NO: 88539 - RNA, 32 nt, Homo Sapiens
caagccacuaguccccucuggaccucaacuuc

SEQ ID NO: 88540 - RNA, 32 nt, Homo Sapiens
cuuaugcuccagccccuggcaauuugccucaa

SEQ ID NO: 88541 - RNA, 32 nt, Homo Sapiens
uuuuuuuaaaacaaaacaaaaauuauggucau

SEQ ID NO: 88542 - RNA, 32 nt, Homo Sapiens
aagaauccucuaagauaaaacuucuauuuaaa

SEQ ID NO: 88543 - RNA, 32 nt, Homo Sapiens
cccgucuugggguucuugguguccacgucuug

SEQ ID NO: 88544 - RNA, 32 nt, Homo Sapiens
cucgccuguuggugcuggcccuuggggagcug

SEQ ID NO: 88545 - RNA, 32 nt, Homo Sapiens
agaggcccuuccucggccccaaagccgucugc

SEQ ID NO: 88546 - RNA, 32 nt, Homo Sapiens
acacacaggcacauuggaaacgcaguagaaaa

SEQ ID NO: 88547 - RNA, 32 nt, Homo Sapiens
ugcuuaaucuuugccucauguuauguaaaauu

SEQ ID NO: 88548 - RNA, 32 nt, Homo Sapiens
guuauuagacuuccucauucuuucucagaccu

SEQ ID NO: 88549 - RNA, 32 nt, Homo Sapiens
ggcuccgugcagcuacagccaggccggcugcc

SEQ ID NO: 88550 - RNA, 32 nt, Homo Sapiens
agcccagaucaccaccugaacguucugucugu

SEQ ID NO: 88551 - RNA, 32 nt, Homo Sapiens
guuccccauggccacuugggucuucccuguau

SEQ ID NO: 88552 - RNA, 32 nt, Homo Sapiens
ugacauauguagaugugcugcagcgcuuguua

SEQ ID NO: 88553 - RNA, 32 nt, Homo Sapiens
gaaaucauauccuuucaguacaccguauaacu

SEQ ID NO: 88554 - RNA, 32 nt, Homo Sapiens
gcucguuauggccuuacccccauuuuauagau

SEQ ID NO: 88555 - RNA, 32 nt, Homo Sapiens
uuuuugagacagagacuugcuuugucgcccag

SEQ ID NO: 88556 - RNA, 31 nt, Homo Sapiens
gcguccacaaagaauuauucaaaugauauuu

SEQ ID NO: 88557 - RNA, 32 nt, Homo Sapiens
auguagccaaggccgcccuccucccucuccuu

SEQ ID NO: 88558 - RNA, 31 nt, Homo Sapiens
ugacccucggagcagggacaggcaagacaac

SEQ ID NO: 88559 - RNA, 32 nt, Homo Sapiens
uggggcuuccacagcccuccucucccaagaaa

SEQ ID NO: 88560 - RNA, 32 nt, Homo Sapiens
ugaccauuaggauacaugaagugggguugaug

SEQ ID NO: 88561 - RNA, 32 nt, Homo Sapiens
aaagaaauuuaaaaaacaaaaaaccuagcuca

SEQ ID NO: 88562 - RNA, 32 nt, Homo Sapiens
auguucacacugaguguucaucugaagaccuu

SEQ ID NO: 88563 - RNA, 32 nt, Homo Sapiens
cuccuuuucucaagcacuucugcucuccucua

SEQ ID NO: 88564 - RNA, 32 nt, Homo Sapiens
gauggauuaaagacauaaaaguuagaccuaaa

SEQ ID NO: 88565 - RNA, 32 nt, Homo Sapiens
uauguugucguguguuucaguuucacauuaaa

SEQ ID NO: 88566 - RNA, 32 nt, Homo Sapiens
auggccggcagaauacaucauugucuuuggac

SEQ ID NO: 88567 - RNA, 32 nt, Homo Sapiens
gggugcaggaggaaggcauggacucggagauu

SEQ ID NO: 88568 - RNA, 32 nt, Homo Sapiens
gcauccugccccagccagcuuccaucccugac

SEQ ID NO: 88569 - RNA, 32 nt, Homo Sapiens
caccuggaggccggcauggugccugggcugcc

SEQ ID NO: 88570 - RNA, 32 nt, Homo Sapiens
augaacaauuuaguguagauauuuuauucugg

SEQ ID NO: 88571 - RNA, 32 nt, Homo Sapiens
cacuguugggggugggagugagcccaccacag

SEQ ID NO: 88572 - RNA, 32 nt, Homo Sapiens
acauguagucaucuguuuucugauaagaacau

SEQ ID NO: 88573 - RNA, 32 nt, Homo Sapiens
ggagugcuuucugcaccugaaacucaguucag

SEQ ID NO: 88574 - RNA, 32 nt, Homo Sapiens
agggguguccggccucuggcccgccccggagc

SEQ ID NO: 88575 - RNA, 32 nt, Homo Sapiens
gccccgcguccgcgucgucuccggggcacuua

SEQ ID NO: 88576 - RNA, 31 nt, Homo Sapiens
aauuucagcuggagaaagguccacagcacaa

SEQ ID NO: 88577 - RNA, 32 nt, Homo Sapiens
cauucaagccauuugucuaaagucauuucuuu

SEQ ID NO: 88578 - RNA, 32 nt, Homo Sapiens
cgcggccucgccccggccccucccgagcucau

SEQ ID NO: 88579 - RNA, 32 nt, Homo Sapiens
cgccugaguuggcagcaaagugaggcucccau

SEQ ID NO: 88580 - RNA, 32 nt, Homo Sapiens
uucuccgcaggacaaccccacugcacaggaga

SEQ ID NO: 88581 - RNA, 32 nt, Homo Sapiens
auuuggaacagguaagaaguugguaggaacag

SEQ ID NO: 88582 - RNA, 32 nt, Homo Sapiens
ccaucaagucugucuucacccggagcgagcuc

SEQ ID NO: 88583 - RNA, 32 nt, Homo Sapiens
aaggcauccuaccagcagcaccaucaaggcau

SEQ ID NO: 88584 - RNA, 32 nt, Homo Sapiens
gguuuaauauauauuuuuaaaacauuucacua

SEQ ID NO: 88585 - RNA, 32 nt, Homo Sapiens
uuaagucauacauuuuaauuguguagagguug

SEQ ID NO: 88586 - RNA, 32 nt, Homo Sapiens
guuacugcaauaaccacuccauaaacaaaagg

SEQ ID NO: 88587 - RNA, 32 nt, Homo Sapiens
aucgagacgcagaaggcgcugcuggccgagau

SEQ ID NO: 88588 - RNA, 30 nt, Homo Sapiens
gcucgccaugcuccuggccucggccguggu

SEQ ID NO: 88589 - RNA, 32 nt, Homo Sapiens
ccaggggaccagcucuguguagguaaccagau

SEQ ID NO: 88590 - RNA, 32 nt, Homo Sapiens
uagcucaugagauuuguugaccaaacccucuc

SEQ ID NO: 88591 - RNA, 32 nt, Homo Sapiens
guaugaucagagaggggaccacaggugugugu

SEQ ID NO: 88592 - RNA, 30 nt, Homo Sapiens
auucuagggaggcgcgccccccggcugggc

SEQ ID NO: 88593 - RNA, 32 nt, Homo Sapiens
uguuaagcuguauuauaaguauuguuacacag

SEQ ID NO: 88594 - RNA, 32 nt, Homo Sapiens
cuacccuuucuguacacagccaucauaaaccu

SEQ ID NO: 88595 - RNA, 32 nt, Homo Sapiens
gacccgcgccgcugggacccccaggacgacgu

SEQ ID NO: 88596 - RNA, 32 nt, Homo Sapiens
gcucacaccugugagcacuuugggaggcugag

SEQ ID NO: 88597 - RNA, 31 nt, Homo Sapiens
auuuugaaauaaaaauggaucaagugcggaa

SEQ ID NO: 88598 - RNA, 32 nt, Homo Sapiens
agcagagugucugguauauauaaugcucaaca

SEQ ID NO: 88599 - RNA, 32 nt, Homo Sapiens
cauccugcucagggagacagggcuugcucacu

SEQ ID NO: 88600 - RNA, 32 nt, Homo Sapiens
uaccauguuauuuguuaccaucaccgaugaau

SEQ ID NO: 88601 - RNA, 32 nt, Homo Sapiens
cucuuucuuucuucuuugucauuugagaaagg

SEQ ID NO: 88602 - RNA, 32 nt, Homo Sapiens
ccucaccgccugccacugggcaggaucccuuu

SEQ ID NO: 88603 - RNA, 32 nt, Homo Sapiens
uuuuucagugauuguuuuccaguauaauucca

SEQ ID NO: 88604 - RNA, 32 nt, Homo Sapiens
gguggcagaaagacauuuuuaaaaagcuuauu

SEQ ID NO: 88605 - RNA, 32 nt, Homo Sapiens
aaacaguugacuaucaucaauuucauaggccu

SEQ ID NO: 88606 - RNA, 32 nt, Homo Sapiens
cugcuccugucuccuguccccucccccgguca

SEQ ID NO: 88607 - RNA, 32 nt, Homo Sapiens
ggcccgucauaggcucggggcccgucgacacc

SEQ ID NO: 88608 - RNA, 32 nt, Homo Sapiens
cugauuauagaauccagaggcucaaaagggaa

SEQ ID NO: 88609 - RNA, 32 nt, Homo Sapiens
uuucuaccucugucaccacgaccgcugggacu

SEQ ID NO: 88610 - RNA, 32 nt, Homo Sapiens
caaggacauaauguaagauaauaaaguagguu

SEQ ID NO: 88611 - RNA, 31 nt, Homo Sapiens
gugcuucugcuugcccugccccaggcagccc

SEQ ID NO: 88612 - RNA, 32 nt, Homo Sapiens
gggcaaagcaggggaggcgccaauguggagga

SEQ ID NO: 88613 - RNA, 29 nt, Homo Sapiens
uuugaaauaaaaucaaaauuucaaccugu

SEQ ID NO: 88614 - RNA, 32 nt, Homo Sapiens
ccaguucucuccuucacuuuggcaucaguugu

SEQ ID NO: 88615 - RNA, 32 nt, Homo Sapiens
ccaccuccacccugcacuugcuccucagaacc

SEQ ID NO: 88616 - RNA, 31 nt, Homo Sapiens
uccuccuccagguuggguuccacucccuugg

SEQ ID NO: 88617 - RNA, 31 nt, Homo Sapiens
accccucaucucuccuugccaaauaguuugu

SEQ ID NO: 88618 - RNA, 32 nt, Homo Sapiens
ccaaacuguauauuauuguucuuaauuuccag

SEQ ID NO: 88619 - RNA, 32 nt, Homo Sapiens
gucaauuuaaccaaauucacaaauaacccucc

SEQ ID NO: 88620 - RNA, 32 nt, Homo Sapiens
gauaaaaacaaauagcagauuagucacaugua

SEQ ID NO: 88621 - RNA, 32 nt, Homo Sapiens
gcugugucccgcggcuugcgcuccauugugcu

SEQ ID NO: 88622 - RNA, 32 nt, Homo Sapiens
uaaacuacagcaugagguacaaucaagcaaaa

SEQ ID NO: 88623 - RNA, 32 nt, Homo Sapiens
cauguccuuaaaaagaggauuugaaaucaacu

SEQ ID NO: 88624 - RNA, 32 nt, Homo Sapiens
ugugugugugugcgcgcgcgcgcgugcaugca

SEQ ID NO: 88625 - RNA, 32 nt, Homo Sapiens
cagcucuaugcaaggguuggggugcugcuugu

SEQ ID NO: 88626 - RNA, 32 nt, Homo Sapiens
gcugcugccagccuucuugcugcugucacguu

SEQ ID NO: 88627 - RNA, 32 nt, Homo Sapiens
uuuuuaaaagggcagaagcuuuauuuuuugaa

SEQ ID NO: 88628 - RNA, 32 nt, Homo Sapiens
aacuuauccaaaugauaauugauacaaugaau

SEQ ID NO: 88629 - RNA, 31 nt, Homo Sapiens
ggcuagaugguggaagauugggcccugauga

SEQ ID NO: 88630 - RNA, 32 nt, Homo Sapiens
cuguguucaaacuccuuggagagacgacuagg

SEQ ID NO: 88631 - RNA, 32 nt, Homo Sapiens
uauuauuauuuuuucuguuuguuuuggauaaa

SEQ ID NO: 88632 - RNA, 32 nt, Homo Sapiens
agcagcauuguuaaauaguucuuacgcuuaua

SEQ ID NO: 88633 - RNA, 32 nt, Homo Sapiens
agugaagcggaggcagagcggcuccgcgagcu

SEQ ID NO: 88634 - RNA, 32 nt, Homo Sapiens
cuuucuccagcauggcagcaggaaguaacuac

SEQ ID NO: 88635 - RNA, 32 nt, Homo Sapiens
aguugacucagaagccgaaauuccuagaaauc

SEQ ID NO: 88636 - RNA, 30 nt, Homo Sapiens
gccguaucaguuguaaacgcccugacgagg

SEQ ID NO: 88637 - RNA, 32 nt, Homo Sapiens
cagaggaaggcaccuugcugaaugacuagaau

SEQ ID NO: 88638 - RNA, 32 nt, Homo Sapiens
ucgaaauaaggagccagaggaguuaccugugu

SEQ ID NO: 88639 - RNA, 32 nt, Homo Sapiens
ggugaccaggagaacaaggagcuccuccagca

SEQ ID NO: 88640 - RNA, 28 nt, Homo Sapiens
ccggugguggagccgccgaggaggguca

SEQ ID NO: 88641 - RNA, 32 nt, Homo Sapiens
ucgguagcugucauggccgccgggucacguga

SEQ ID NO: 88642 - RNA, 32 nt, Homo Sapiens
ucaucccacugaauuccuuuggcauuuggggu

SEQ ID NO: 88643 - RNA, 32 nt, Homo Sapiens
caggcucuggcuuguuaucugcaacaggaaca

SEQ ID NO: 88644 - RNA, 32 nt, Homo Sapiens
ccucaggcucugcggucacucgccucccugcu

SEQ ID NO: 88645 - RNA, 32 nt, Homo Sapiens
ccagugggaaggaaaccucucuacugaguugu

SEQ ID NO: 88646 - RNA, 32 nt, Homo Sapiens
uucuuuagguuccugguaaggaucucugaaga

SEQ ID NO: 88647 - RNA, 32 nt, Homo Sapiens
guaugaagugaauugcaaauccugcuuaugga

SEQ ID NO: 88648 - RNA, 31 nt, Homo Sapiens
gccgagcggcacugcgccugcgcggagggcg

SEQ ID NO: 88649 - RNA, 32 nt, Homo Sapiens
ccuucccccggguggaacccagcccucaggac

SEQ ID NO: 88650 - RNA, 32 nt, Homo Sapiens
ucagcugccgcccccacagcggaccggucggg

SEQ ID NO: 88651 - RNA, 32 nt, Homo Sapiens
cgcucgcucgcucccgccucccgccccgcgcc

SEQ ID NO: 88652 - RNA, 32 nt, Homo Sapiens
cugaugcaucauaguugacuuccaccaguguu

SEQ ID NO: 88653 - RNA, 32 nt, Homo Sapiens
ccucacaggggcagcccuuuccccucaguccc

SEQ ID NO: 88654 - RNA, 32 nt, Homo Sapiens
acacuuggaaaaccauuuccccuuccaguagc

SEQ ID NO: 88655 - RNA, 32 nt, Homo Sapiens
acagcagagcagccuuagcaucuuggaagauc

SEQ ID NO: 88656 - RNA, 32 nt, Homo Sapiens
gugacccugggcggggaccccugggucugccg

SEQ ID NO: 88657 - RNA, 32 nt, Homo Sapiens
agaaaaaauggcaagagaucauauccucagac

SEQ ID NO: 88658 - RNA, 32 nt, Homo Sapiens
ggcacgaggccgcgagccgcccggcacucccg

SEQ ID NO: 88659 - RNA, 32 nt, Homo Sapiens
aaaagccauaucuagucaauaacucugauuuu

SEQ ID NO: 88660 - RNA, 32 nt, Homo Sapiens
uccagcuucccccacaccuucccaaaggcugc

SEQ ID NO: 88661 - RNA, 32 nt, Homo Sapiens
cauaccugguuugcuuagauuauucaagaaug

SEQ ID NO: 88662 - RNA, 32 nt, Homo Sapiens
cucccaguucccuggaaccguaucaggcauuc

SEQ ID NO: 88663 - RNA, 32 nt, Homo Sapiens
auuucccugucucucuuccccaggcaauuacu

SEQ ID NO: 88664 - RNA, 32 nt, Homo Sapiens
ccauguuucccucugguucucuaguuugcaga

SEQ ID NO: 88665 - RNA, 32 nt, Homo Sapiens
uguucgauuuucugcccuacccguuugcccaa

SEQ ID NO: 88666 - RNA, 32 nt, Homo Sapiens
guaaaaguguaaaccagcccaugacagguuuu

SEQ ID NO: 88667 - RNA, 32 nt, Homo Sapiens
ugcuagccccugggggcgccuggagccacagu

SEQ ID NO: 88668 - RNA, 32 nt, Homo Sapiens
accagcacgcccuugaugugggauaggagguc

SEQ ID NO: 88669 - RNA, 32 nt, Homo Sapiens
gcuggcugucuccugcucauccagccaugcgg

SEQ ID NO: 88670 - RNA, 32 nt, Homo Sapiens
aacuggccuuccaucucucucagacaccaagc

SEQ ID NO: 88671 - RNA, 32 nt, Homo Sapiens
uuaacuuaauaaauguaugagucuuaaauacc

SEQ ID NO: 88672 - RNA, 32 nt, Homo Sapiens
uuucaaguuuucuuaauugucuauaauguucu

SEQ ID NO: 88673 - RNA, 32 nt, Homo Sapiens
cugucggacccgucuguaaaccaaggacuaug

SEQ ID NO: 88674 - RNA, 32 nt, Homo Sapiens
agaacaauuuuaaaggcuuggaauacuuaugg

SEQ ID NO: 88675 - RNA, 32 nt, Homo Sapiens
aggagcgcagagugcuggcccaggugcugcag

SEQ ID NO: 88676 - RNA, 32 nt, Homo Sapiens
ccuaaagcugaucuuccugggguucugaaggu

SEQ ID NO: 88677 - RNA, 32 nt, Homo Sapiens
cuuccuuuauuacuuauuugaaauagaaggcc

SEQ ID NO: 88678 - RNA, 32 nt, Homo Sapiens
cccccagcucaccugcccuacuggggcccaac

SEQ ID NO: 88679 - RNA, 32 nt, Homo Sapiens
agcaagugaacaggggcuaccugccacauccc

SEQ ID NO: 88680 - RNA, 32 nt, Homo Sapiens
ucaucuucaugggaaauuugcugagcccccac

SEQ ID NO: 88681 - RNA, 32 nt, Homo Sapiens
ucugaauaauaauuauuuucacagugaaaauu

SEQ ID NO: 88682 - RNA, 30 nt, Homo Sapiens
aagaggaaaaagcuugaagagcuggagcca

SEQ ID NO: 88683 - RNA, 32 nt, Homo Sapiens
cgcgcccuccucccucccuccuccccagcugu

SEQ ID NO: 88684 - RNA, 32 nt, Homo Sapiens
aacuagcccuuaauuauggugacaguuccuua

SEQ ID NO: 88685 - RNA, 32 nt, Homo Sapiens
caacucuucuauuuaagagaaccucagaugau

SEQ ID NO: 88686 - RNA, 32 nt, Homo Sapiens
cucggacggaaagcggggccugcggguccuug

SEQ ID NO: 88687 - RNA, 32 nt, Homo Sapiens
auugaggagguguuuuggcaaaaaaguuuugu

SEQ ID NO: 88688 - RNA, 32 nt, Homo Sapiens
gccaucgaucuggaccguccccugcccacuug

SEQ ID NO: 88689 - RNA, 32 nt, Homo Sapiens
caccuguaaucccagcacuuugggaguccaag

SEQ ID NO: 88690 - RNA, 32 nt, Homo Sapiens
caucuguaaugccagcacuuugggaggccaag

SEQ ID NO: 88691 - RNA, 29 nt, Homo Sapiens
caugguucuauccuuuacuuaugagacuc

SEQ ID NO: 88692 - RNA, 32 nt, Homo Sapiens
cacaccaugcccucggcagugugguccaagga

SEQ ID NO: 88693 - RNA, 28 nt, Homo Sapiens
cugugaggucggccgccgccgugacucc

SEQ ID NO: 88694 - RNA, 32 nt, Homo Sapiens
caucugccuccucuccuccucagcugcaugga

SEQ ID NO: 88695 - RNA, 32 nt, Homo Sapiens
cggaaccacaguaaggcugugcagcaggagcc

SEQ ID NO: 88696 - RNA, 32 nt, Homo Sapiens
aaggcgcggagcacccggcgccgagagcgcug

SEQ ID NO: 88697 - RNA, 32 nt, Homo Sapiens
auaaaucaaauacacaugugauaauaugcaug

SEQ ID NO: 88698 - RNA, 32 nt, Homo Sapiens
guuccuuccccggggucuucuaccucagacac

SEQ ID NO: 88699 - RNA, 32 nt, Homo Sapiens
uccagccccccgcucccacccccgagccuacc

SEQ ID NO: 88700 - RNA, 32 nt, Homo Sapiens
guggggagaugggcugggaggggagaucccgg

SEQ ID NO: 88701 - RNA, 32 nt, Homo Sapiens
uguuuuucucccaauuguaaauuuaaugugau

SEQ ID NO: 88702 - RNA, 32 nt, Homo Sapiens
ugugcugauuuaaaugcuggacacggaggcag

SEQ ID NO: 88703 - RNA, 30 nt, Homo Sapiens
uccagauccagaggcggcggcggcggcggc

SEQ ID NO: 88704 - RNA, 32 nt, Homo Sapiens
cacacacgcagacacacacacacacacaaaug

SEQ ID NO: 88705 - RNA, 31 nt, Homo Sapiens
cuguugaaauaaacccaacuguucaugaaaa

SEQ ID NO: 88706 - RNA, 32 nt, Homo Sapiens
aacucuguccuuaacuuuuucuucaccacugg

SEQ ID NO: 88707 - RNA, 32 nt, Homo Sapiens
uccuugugcaguggccuuugauguguguucac

SEQ ID NO: 88708 - RNA, 32 nt, Homo Sapiens
agccccggguccccgcgcccaccccauggcga

SEQ ID NO: 88709 - RNA, 32 nt, Homo Sapiens
auuccccuuuuuucucuauguacgauaaagua

SEQ ID NO: 88710 - RNA, 32 nt, Homo Sapiens
guggucugguccccauugcgggcccgggaggg

SEQ ID NO: 88711 - RNA, 32 nt, Homo Sapiens
gggaacccgaaccuggugacuuugaaaggaua

SEQ ID NO: 88712 - RNA, 32 nt, Homo Sapiens
gggcgguggcgcccggcacagagggguuaagg

SEQ ID NO: 88713 - RNA, 32 nt, Homo Sapiens
ggccuguagaagguugcggggagaggguuuaa

SEQ ID NO: 88714 - RNA, 32 nt, Homo Sapiens
gaucucugccagcaagcuuaucuggccaucag

SEQ ID NO: 88715 - RNA, 32 nt, Homo Sapiens
uacgcggaggaaccacuaucggagacagaugg

SEQ ID NO: 88716 - RNA, 32 nt, Homo Sapiens
ccucccguugguuuccagccccgccccccuuc

SEQ ID NO: 88717 - RNA, 32 nt, Homo Sapiens
ggccuuggagagaggggcuggaggcuggacag

SEQ ID NO: 88718 - RNA, 32 nt, Homo Sapiens
cgggcagcuucauccccucccccucugccccu

SEQ ID NO: 88719 - RNA, 32 nt, Homo Sapiens
aauguucaccaaucauuuuaacuaaauacuca

SEQ ID NO: 88720 - RNA, 32 nt, Homo Sapiens
aucuguguagacuauuugcuuauuuaauaaag

SEQ ID NO: 88721 - RNA, 32 nt, Homo Sapiens
cagaauuguaaaaugcuauaugacuguaagga

SEQ ID NO: 88722 - RNA, 32 nt, Homo Sapiens
ugcucacggcuccucccguccuccccgaagcc

SEQ ID NO: 88723 - RNA, 32 nt, Homo Sapiens
gucaccucaugugauucucaccacagcccugu

SEQ ID NO: 88724 - RNA, 32 nt, Homo Sapiens
uaugcacauguauauauaguuguacauauaug

SEQ ID NO: 88725 - RNA, 32 nt, Homo Sapiens
cauacaccugucuccuucuuccugccugcuug

SEQ ID NO: 88726 - RNA, 32 nt, Homo Sapiens
ugugucugugcggaagacuacugccccacccc

SEQ ID NO: 88727 - RNA, 32 nt, Homo Sapiens
aaaggacggaggaggggcuggacggcgcugcg

SEQ ID NO: 88728 - RNA, 32 nt, Homo Sapiens
gcgcgagaccgaagcuggcggcuggucgguug

SEQ ID NO: 88729 - RNA, 32 nt, Homo Sapiens
gcucaggcuagggcucagcagcugcuuguggg

SEQ ID NO: 88730 - RNA, 32 nt, Homo Sapiens
cccugcagcaaagaagcccgagacugauuccu

SEQ ID NO: 88731 - RNA, 32 nt, Homo Sapiens
gcauucuucuaaagcagacuuuuguguaaaaa

SEQ ID NO: 88732 - RNA, 32 nt, Homo Sapiens
aggacuuuaccaguaccauccugaagacaaac

SEQ ID NO: 88733 - RNA, 32 nt, Homo Sapiens
acacccagugccugucuuugggugcuguaguu

SEQ ID NO: 88734 - RNA, 32 nt, Homo Sapiens
uaugaaguuaauauuuucaaguaagcaaucag

SEQ ID NO: 88735 - RNA, 32 nt, Homo Sapiens
cuucuguucucugcugcagaaagcagacuugc

SEQ ID NO: 88736 - RNA, 32 nt, Homo Sapiens
ccaggacuuuaaaauacuggaaaucugucccg

SEQ ID NO: 88737 - RNA, 32 nt, Homo Sapiens
cacuauuauuuuuuccauuuuccaaaggagca

SEQ ID NO: 88738 - RNA, 32 nt, Homo Sapiens
gacgguucgcaggggaggaggcggcgggaggc

SEQ ID NO: 88739 - RNA, 32 nt, Homo Sapiens
cucccuggcuccugcaggccugcggggaucuc

SEQ ID NO: 88740 - RNA, 32 nt, Homo Sapiens
ggcugcugacccucagcccgcacugggagugg

SEQ ID NO: 88741 - RNA, 32 nt, Homo Sapiens
uuguuuuuggaggcuaucuggauuuuaaccug

SEQ ID NO: 88742 - RNA, 32 nt, Homo Sapiens
gguggggggcgcgggcccggcgccgcgauggg

SEQ ID NO: 88743 - RNA, 32 nt, Homo Sapiens
ccacuuguggauugucauuuugccaugacuuu

SEQ ID NO: 88744 - RNA, 32 nt, Homo Sapiens
ggcuucagagaagagcgaggaucuugccaucu

SEQ ID NO: 88745 - RNA, 32 nt, Homo Sapiens
agaaaggcaaguugcuccugcuggggcccugg

SEQ ID NO: 88746 - RNA, 32 nt, Homo Sapiens
ugucgcccaggcuggaaugcaguggugcgauc

SEQ ID NO: 88747 - RNA, 32 nt, Homo Sapiens
ucccuaagagaaacagaagaggagucagaaag

SEQ ID NO: 88748 - RNA, 32 nt, Homo Sapiens
auaaguuauuuucucugaccgccuacuggaaa

SEQ ID NO: 88749 - RNA, 32 nt, Homo Sapiens
guggggcuuugggcugggaggggaaggcgggu

SEQ ID NO: 88750 - RNA, 32 nt, Homo Sapiens
accaguguugcugacuccaugcugugguugcu

SEQ ID NO: 88751 - RNA, 32 nt, Homo Sapiens
ugggacaaaaugaaagugacuuucaagaaaga

SEQ ID NO: 88752 - RNA, 32 nt, Homo Sapiens
cucaaccuaucacccuuuuugagucuuguuuu

SEQ ID NO: 88753 - RNA, 32 nt, Homo Sapiens
cuuacauuagcuucagaaaacaagaaaaugcu

SEQ ID NO: 88754 - RNA, 32 nt, Homo Sapiens
agcguugggggcaaagccaggcugguuccuug

SEQ ID NO: 88755 - RNA, 32 nt, Homo Sapiens
aggaucccaaggcccaacuccccgaaccacuc

SEQ ID NO: 88756 - RNA, 32 nt, Homo Sapiens
ucugcccuuccaugcuggccccuggcccagca

SEQ ID NO: 88757 - RNA, 32 nt, Homo Sapiens
agugggcucugccagggcugccgcaccugucc

SEQ ID NO: 88758 - RNA, 32 nt, Homo Sapiens
ucucucuacugaauaucauacguuacuuuucu

SEQ ID NO: 88759 - RNA, 32 nt, Homo Sapiens
guuuguuuguuuaauguaucccuguucuguuu

SEQ ID NO: 88760 - RNA, 32 nt, Homo Sapiens
ggaacaggaaaacaaauggcaguaucccugag

SEQ ID NO: 88761 - RNA, 32 nt, Homo Sapiens
uguccccaacuuuuccauccagugcuuaaccu

SEQ ID NO: 88762 - RNA, 32 nt, Homo Sapiens
gcaacugagaaauuauuuguaaaucauguggc

SEQ ID NO: 88763 - RNA, 32 nt, Homo Sapiens
uauauauugucuauagcuguuuuacacauuac

SEQ ID NO: 88764 - RNA, 32 nt, Homo Sapiens
cgaggggcccagggaggacgcggcagagucac

SEQ ID NO: 88765 - RNA, 32 nt, Homo Sapiens
augcuugaaaauaaauuauggggauccuauuu

SEQ ID NO: 88766 - RNA, 32 nt, Homo Sapiens
agcugcuagcgugcgacugaaggcaggguccc

SEQ ID NO: 88767 - RNA, 32 nt, Homo Sapiens
ugccguggaagagacaguugugagauucccuu

SEQ ID NO: 88768 - RNA, 32 nt, Homo Sapiens
uuuauugcaguaacuuuggagagagaaaaaau

SEQ ID NO: 88769 - RNA, 32 nt, Homo Sapiens
auccaggcuccaggagaccccugggcaucucc

SEQ ID NO: 88770 - RNA, 32 nt, Homo Sapiens
uuuacauucgaaauaaaauucagucaagucaa

SEQ ID NO: 88771 - RNA, 32 nt, Homo Sapiens
cguccccggugagcgccgcugacgcgcggaga

SEQ ID NO: 88772 - RNA, 32 nt, Homo Sapiens
ugucuuagcauggaaauaaauaaaccugaaug

SEQ ID NO: 88773 - RNA, 32 nt, Homo Sapiens
acuugcugcugucauauaaucauuccauacuu

SEQ ID NO: 88774 - RNA, 32 nt, Homo Sapiens
auucuauuuuucuuccuucucuacacagcccc

SEQ ID NO: 88775 - RNA, 32 nt, Homo Sapiens
uuugaacaggacuuuuaauuuguuuaaaacuc

SEQ ID NO: 88776 - RNA, 30 nt, Homo Sapiens
aaaagaaagaauaaucccuaacucauuugc

SEQ ID NO: 88777 - RNA, 32 nt, Homo Sapiens
aggcaucggcccggccacuccaagccuucggu

SEQ ID NO: 88778 - RNA, 32 nt, Homo Sapiens
cuuuuaggggguaguuagacaauuuauauaua

SEQ ID NO: 88779 - RNA, 32 nt, Homo Sapiens
uaugcagucgucaaaacagcgauagacagcau

SEQ ID NO: 88780 - RNA, 32 nt, Homo Sapiens
caauacauuugagaauacgcugaagagggaaa

SEQ ID NO: 88781 - RNA, 32 nt, Homo Sapiens
gugcacccaagccucgucccgcacacacaaca

SEQ ID NO: 88782 - RNA, 32 nt, Homo Sapiens
cagaaacuuaggaggagcggcacugaagacua

SEQ ID NO: 88783 - RNA, 32 nt, Homo Sapiens
caguuugaauacaugaaaauccuguuucugag

SEQ ID NO: 88784 - RNA, 32 nt, Homo Sapiens
cugguuggcauggccuggggcaggaggcagag

SEQ ID NO: 88785 - RNA, 32 nt, Homo Sapiens
ccuggguggcucagcauccuccacgggcugcg

SEQ ID NO: 88786 - RNA, 32 nt, Homo Sapiens
gcuucaagaacaagcuggagaagggaagaguu

SEQ ID NO: 88787 - RNA, 32 nt, Homo Sapiens
gcccuucucaguuaauuggguuucacaagcaa

SEQ ID NO: 88788 - RNA, 32 nt, Homo Sapiens
gcacaacuuugaugaagaugaaauggaugauc

SEQ ID NO: 88789 - RNA, 32 nt, Homo Sapiens
auaccaggaaauuuauauuggagaaaaacccu

SEQ ID NO: 88790 - RNA, 32 nt, Homo Sapiens
uuaacuuuuuugauuuaagauauaugcaaagc

SEQ ID NO: 88791 - RNA, 32 nt, Homo Sapiens
aaucguacacugguuuucacuuuugaaaggaa

SEQ ID NO: 88792 - RNA, 30 nt, Homo Sapiens
cuggugcggggcgauuggcggcgggagcga

SEQ ID NO: 88793 - RNA, 32 nt, Homo Sapiens
uguccacaagcacuauggcccccggcucaagu

SEQ ID NO: 88794 - RNA, 32 nt, Homo Sapiens
gggccggggcuuuggggccggaagguucacag

SEQ ID NO: 88795 - RNA, 32 nt, Homo Sapiens
uggcugggugggcccagaacugcccccacugu

SEQ ID NO: 88796 - RNA, 32 nt, Homo Sapiens
uuaauaaagucuuuucuuuuaccugccaaaaa

SEQ ID NO: 88797 - RNA, 32 nt, Homo Sapiens
uuuuacuuguuuuugccucaguuuacagaaaa

SEQ ID NO: 88798 - RNA, 32 nt, Homo Sapiens
gaguuucuucuuucugguggguucguggucuc

SEQ ID NO: 88799 - RNA, 32 nt, Homo Sapiens
uggcgcccaucccuccccuguucugcugucgc

SEQ ID NO: 88800 - RNA, 32 nt, Homo Sapiens
guauauuuucauguaauuugauuuuggaauuc

SEQ ID NO: 88801 - RNA, 32 nt, Homo Sapiens
caggacagccccagcgagagccggccagguug

SEQ ID NO: 88802 - RNA, 32 nt, Homo Sapiens
gaccuuugcuacauugcuacaaaccugaucuu

SEQ ID NO: 88803 - RNA, 32 nt, Homo Sapiens
acagugcccagcucagcaccuggugcaaguaa

SEQ ID NO: 88804 - RNA, 32 nt, Homo Sapiens
auaacauagcugucacaguauagucacaaucc

SEQ ID NO: 88805 - RNA, 32 nt, Homo Sapiens
acauaucgcauguuuauguuaagauuuggucc

SEQ ID NO: 88806 - RNA, 32 nt, Homo Sapiens
gaaccguaguuuuguuuuuuuaaauacagaag

SEQ ID NO: 88807 - RNA, 32 nt, Homo Sapiens
uuauuuaacaauacugacuaugagauuggugc

SEQ ID NO: 88808 - RNA, 32 nt, Homo Sapiens
gcacgcucuggccccaggcuugugccccaccc

SEQ ID NO: 88809 - RNA, 32 nt, Homo Sapiens
cugggcuccagauggcgccgggucccaaucgu

SEQ ID NO: 88810 - RNA, 32 nt, Homo Sapiens
agcgcccagggagagggacagacagccggcug

SEQ ID NO: 88811 - RNA, 32 nt, Homo Sapiens
gccagcgucuuggagcagcuccaggucaucgg

SEQ ID NO: 88812 - RNA, 32 nt, Homo Sapiens
cugaggauucagagaacaauuucuuugaaggg

SEQ ID NO: 88813 - RNA, 32 nt, Homo Sapiens
agagcagaacagaucuuuuacuuuggccgcuu

SEQ ID NO: 88814 - RNA, 32 nt, Homo Sapiens
uccaggaucccagccaggaucccagcugguag

SEQ ID NO: 88815 - RNA, 32 nt, Homo Sapiens
accaaugagugcuuuuuaauucuuacaauaau

SEQ ID NO: 88816 - RNA, 32 nt, Homo Sapiens
accugggugcccgggcaacgccccacagugga

SEQ ID NO: 88817 - RNA, 32 nt, Homo Sapiens
cauccuagccccacccagagguggcccuccca

SEQ ID NO: 88818 - RNA, 32 nt, Homo Sapiens
guuguuguuguuguuguuguuguuuuaaagca

SEQ ID NO: 88819 - RNA, 32 nt, Homo Sapiens
uguucuaaaaauuuuaucgcuguuaagguauu

SEQ ID NO: 88820 - RNA, 32 nt, Homo Sapiens
ucuuuaucuaaugugugcuaagcuugugaaaa

SEQ ID NO: 88821 - RNA, 32 nt, Homo Sapiens
accucucuaucuaugucucaguuucuucaucu

SEQ ID NO: 88822 - RNA, 32 nt, Homo Sapiens
aaaucuuuugugaaagaagaaaaggaaauuca

SEQ ID NO: 88823 - RNA, 32 nt, Homo Sapiens
gagaaggaaggggauaggcagcuuugacaggu

SEQ ID NO: 88824 - RNA, 32 nt, Homo Sapiens
uaacuuagagcuuuuuuuuuuaauuuugucug

SEQ ID NO: 88825 - RNA, 32 nt, Homo Sapiens
uagagauggggucuuggugcccaagcuggucu

SEQ ID NO: 88826 - RNA, 32 nt, Homo Sapiens
gcaucuaaaaauugaaauaaauauauauuuuu

SEQ ID NO: 88827 - RNA, 32 nt, Homo Sapiens
cuucuugcagaagggagggggaaacauacauu

SEQ ID NO: 88828 - RNA, 32 nt, Homo Sapiens
gccucccgcucccugagggccugggccgagag

SEQ ID NO: 88829 - RNA, 32 nt, Homo Sapiens
ucuauuuauuaaggaaaaugucacauugugau

SEQ ID NO: 88830 - RNA, 31 nt, Homo Sapiens
aucuuuuucuggagaaagucagauucacagc

SEQ ID NO: 88831 - RNA, 32 nt, Homo Sapiens
agugcucugaagaccucuugggcaggggcucc

SEQ ID NO: 88832 - RNA, 32 nt, Homo Sapiens
gcucaugguuuuuaaaacucugauggggaggg

SEQ ID NO: 88833 - RNA, 32 nt, Homo Sapiens
uggguguaggggcgaggcgccucccgcccucg

SEQ ID NO: 88834 - RNA, 32 nt, Homo Sapiens
cuuucgcccacuuuccagccacacaauuauug

SEQ ID NO: 88835 - RNA, 32 nt, Homo Sapiens
gggcaaacuacucccuacuuaagggaauaggc

SEQ ID NO: 88836 - RNA, 32 nt, Homo Sapiens
gauagagguuaagaaucaagauauaauggaua

SEQ ID NO: 88837 - RNA, 32 nt, Homo Sapiens
cgcuaugaccucugacccagagcaggcagagg

SEQ ID NO: 88838 - RNA, 32 nt, Homo Sapiens
gaggggaggggaggggagcaggcacugggcgg

SEQ ID NO: 88839 - RNA, 32 nt, Homo Sapiens
uaugguagcacaggcuggccugugcaucggca

SEQ ID NO: 88840 - RNA, 32 nt, Homo Sapiens
agcugaacagagcagauggaaacuuccuucuc

SEQ ID NO: 88841 - RNA, 32 nt, Homo Sapiens
gggacacagcuauaacuguccagcucugugca

SEQ ID NO: 88842 - RNA, 30 nt, Homo Sapiens
agugccaucuuuaagggggaaacuacauga

SEQ ID NO: 88843 - RNA, 32 nt, Homo Sapiens
auucuguuacuuaauguucuguuuauuuauga

SEQ ID NO: 88844 - RNA, 32 nt, Homo Sapiens
uuugacaaguuccuuuuucagaauagguuuuu

SEQ ID NO: 88845 - RNA, 29 nt, Homo Sapiens
augcaggaucacuacaguuuaaugucaua

SEQ ID NO: 88846 - RNA, 32 nt, Homo Sapiens
cugaugaccacucagcaaugaagugcuccagg

SEQ ID NO: 88847 - RNA, 32 nt, Homo Sapiens
cuaggagaggggcuucucucugcucccggcuu

SEQ ID NO: 88848 - RNA, 32 nt, Homo Sapiens
uaguuuaauacugcauuauuuauuuuccuaag

SEQ ID NO: 88849 - RNA, 32 nt, Homo Sapiens
aacugguucaacauggaaaugauuuucauuga

SEQ ID NO: 88850 - RNA, 32 nt, Homo Sapiens
aaagaaauacucagcaaguacaaaaucuguuc

SEQ ID NO: 88851 - RNA, 32 nt, Homo Sapiens
uccuccuacacaccaaugaugagccucaugcc

SEQ ID NO: 88852 - RNA, 32 nt, Homo Sapiens
ggcagugcggggaagcgccgcgggaaggagcg

SEQ ID NO: 88853 - RNA, 32 nt, Homo Sapiens
ccccaggcguccccaggccuccagcccagccc

SEQ ID NO: 88854 - RNA, 32 nt, Homo Sapiens
aaauuaaaauacugaguuuuaggggcagauag

SEQ ID NO: 88855 - RNA, 32 nt, Homo Sapiens
aaaguuuucuucauuuagcugcugauuuaaaa

SEQ ID NO: 88856 - RNA, 31 nt, Homo Sapiens
ugggaucguauguaguuccucaucuaggaac

SEQ ID NO: 88857 - RNA, 32 nt, Homo Sapiens
agcccagagagcuucagcagcuaacauucccu

SEQ ID NO: 88858 - RNA, 32 nt, Homo Sapiens
cccaaugcagagcaguuugcuuugaaaaauag

SEQ ID NO: 88859 - RNA, 32 nt, Homo Sapiens
ggcaguggcaacacugaaggacauagcacuuu

SEQ ID NO: 88860 - RNA, 32 nt, Homo Sapiens
cuuacugugcuaaaaagccacugcaaacauag

SEQ ID NO: 88861 - RNA, 32 nt, Homo Sapiens
cagccuuccccucccuguauaagacacuuugc

SEQ ID NO: 88862 - RNA, 32 nt, Homo Sapiens
ugaccucuaggaccagggcccucucagaggug

SEQ ID NO: 88863 - RNA, 32 nt, Homo Sapiens
gcggcugcaggcuaggggcggcucggaguccg

SEQ ID NO: 88864 - RNA, 32 nt, Homo Sapiens
ccagggagcccccucugugcuccucagaguuc

SEQ ID NO: 88865 - RNA, 32 nt, Homo Sapiens
uaguucuguauauaaauauauuuucuuucuag

SEQ ID NO: 88866 - RNA, 32 nt, Homo Sapiens
acauaucucuuuuuuucuuguuuuuauuauua

SEQ ID NO: 88867 - RNA, 32 nt, Homo Sapiens
gcagaauuuuugcaugacaacauagaaauaau

SEQ ID NO: 88868 - RNA, 32 nt, Homo Sapiens
cucagcacaaaacgacugaguuuaaaccucug

SEQ ID NO: 88869 - RNA, 32 nt, Homo Sapiens
cgguuccugggggaagcagaggccaggaccag

SEQ ID NO: 88870 - RNA, 32 nt, Homo Sapiens
ccaggcagcauuucuucaguauuuugguucaa

SEQ ID NO: 88871 - RNA, 32 nt, Homo Sapiens
uauagcuagcaauauuuuuuuaugccaucugu

SEQ ID NO: 88872 - RNA, 32 nt, Homo Sapiens
uuugauuucagaaaacaauauuugauguauaa

SEQ ID NO: 88873 - RNA, 32 nt, Homo Sapiens
uuuaggguuuuuucuuuuuuugauagugacaa

SEQ ID NO: 88874 - RNA, 32 nt, Homo Sapiens
gaaucugcagcaucuaccugcuccacaaucuc

SEQ ID NO: 88875 - RNA, 32 nt, Homo Sapiens
gcauuucugaagaucucaagaucuggacuacu

SEQ ID NO: 88876 - RNA, 32 nt, Homo Sapiens
cauugaaaccuauucuuuuuuauuuaauguuu

SEQ ID NO: 88877 - RNA, 32 nt, Homo Sapiens
uuuuggaagaugacaucugcaaugcuuuucau

SEQ ID NO: 88878 - RNA, 32 nt, Homo Sapiens
ucugaaggucugguugguuuuguuugcccggg

SEQ ID NO: 88879 - RNA, 32 nt, Homo Sapiens
agaggguacaagcuccagaacaguaaccaagu

SEQ ID NO: 88880 - RNA, 32 nt, Homo Sapiens
uauuuuaacacuuuguauuacuuagguuauuu

SEQ ID NO: 88881 - RNA, 32 nt, Homo Sapiens
caaauuccuuaauaagaacaucucuaaaccca

SEQ ID NO: 88882 - RNA, 32 nt, Homo Sapiens
cccccucugguggcaugccaugccaagagcaa

SEQ ID NO: 88883 - RNA, 32 nt, Homo Sapiens
auggaagcuuucaacagagcauuccauuuugu

SEQ ID NO: 88884 - RNA, 32 nt, Homo Sapiens
ugaagcugugucuguggagcugcggccacuca

SEQ ID NO: 88885 - RNA, 32 nt, Homo Sapiens
acagucuccuggugucacccaggcuggagugc

SEQ ID NO: 88886 - RNA, 32 nt, Homo Sapiens
gcucagucucugucagaggaagaucccuugga

SEQ ID NO: 88887 - RNA, 32 nt, Homo Sapiens
uugcaaaggugauuuggguggggguuuaguaa

SEQ ID NO: 88888 - RNA, 31 nt, Homo Sapiens
guuuugcuggauugcuuuccauagacauaga

SEQ ID NO: 88889 - RNA, 32 nt, Homo Sapiens
acccggcucccauggcgggaggcugugcccug

SEQ ID NO: 88890 - RNA, 32 nt, Homo Sapiens
gagaaaccacaacagcagcaacuuauugccaa

SEQ ID NO: 88891 - RNA, 32 nt, Homo Sapiens
acguugaggggcccguccggcucugcggacag

SEQ ID NO: 88892 - RNA, 32 nt, Homo Sapiens
uguguuauuaaaccccuaacuggcuggcaugc

SEQ ID NO: 88893 - RNA, 32 nt, Homo Sapiens
uccauuaaagcacuaaguuuucuuugaauguu

SEQ ID NO: 88894 - RNA, 32 nt, Homo Sapiens
aagucuucagcccacacccugccagccccaca

SEQ ID NO: 88895 - RNA, 32 nt, Homo Sapiens
aggaggguugccccuccucaugggaauguguc

SEQ ID NO: 88896 - RNA, 32 nt, Homo Sapiens
gaguauguuuuuaaguguaucuuaauauauac

SEQ ID NO: 88897 - RNA, 32 nt, Homo Sapiens
gaaugucauacacaugagaugguauauccuug

SEQ ID NO: 88898 - RNA, 27 nt, Homo Sapiens
cgauguuggccaugucuccgcccgcag

SEQ ID NO: 88899 - RNA, 32 nt, Homo Sapiens
uuggaaaaaccaguuucucuuuuauugucugu

SEQ ID NO: 88900 - RNA, 32 nt, Homo Sapiens
gccgccccaccuugccagacuuagcugaccag

SEQ ID NO: 88901 - RNA, 32 nt, Homo Sapiens
uucgguccuauuuuaaugcuuuuguauggcag

SEQ ID NO: 88902 - RNA, 32 nt, Homo Sapiens
aacacagccagcaguuucccuccugccacgaa

SEQ ID NO: 88903 - RNA, 32 nt, Homo Sapiens
uuuuugugguuuaauuuuuaguagcaggucaa

SEQ ID NO: 88904 - RNA, 32 nt, Homo Sapiens
agaaccaauuguuguacauaaaacagaucugc

SEQ ID NO: 88905 - RNA, 32 nt, Homo Sapiens
aucaugggucauuacgggggcuugagcuggcu

SEQ ID NO: 88906 - RNA, 29 nt, Homo Sapiens
gagagcucaaguuucagagucagaauuag

SEQ ID NO: 88907 - RNA, 32 nt, Homo Sapiens
cccuuccguaauuuuuauguucuugugaggaa

SEQ ID NO: 88908 - RNA, 32 nt, Homo Sapiens
ucuagggccuggaaccccuuucuucuagugga

SEQ ID NO: 88909 - RNA, 32 nt, Homo Sapiens
uggaaugcuccaggcgcgccgacgccugugcc

SEQ ID NO: 88910 - RNA, 32 nt, Homo Sapiens
aagaagagcaguagacagcccuggacacucug

SEQ ID NO: 88911 - RNA, 32 nt, Homo Sapiens
accuuuucuucauuuugguuuauuuuuguaau

SEQ ID NO: 88912 - RNA, 32 nt, Homo Sapiens
aacaagcucaaggagcuuccuuuuaaauuuug

SEQ ID NO: 88913 - RNA, 32 nt, Homo Sapiens
cagaaugaagaccuaaaugaccucagcaaauc

SEQ ID NO: 88914 - RNA, 32 nt, Homo Sapiens
ggaggaaccgggucgugcugcagcgcccagga

SEQ ID NO: 88915 - RNA, 32 nt, Homo Sapiens
gacaagaagggagagagaguggaugccaggga

SEQ ID NO: 88916 - RNA, 32 nt, Homo Sapiens
gacaucugaaaacaaccaaggauccaucuggg

SEQ ID NO: 88917 - RNA, 32 nt, Homo Sapiens
ugggcccucgcacccuugggugcucccggccg

SEQ ID NO: 88918 - RNA, 32 nt, Homo Sapiens
uguguauguuuuacugcaauuaaaaaauguua

SEQ ID NO: 88919 - RNA, 32 nt, Homo Sapiens
uacuuuagaccuguaguuuucaacacugacag

SEQ ID NO: 88920 - RNA, 32 nt, Homo Sapiens
uuucaggguucuacauuuaucuguaaaaugug

SEQ ID NO: 88921 - RNA, 32 nt, Homo Sapiens
cuugaaaaugccaccauccaauaaaaaucagg

SEQ ID NO: 88922 - RNA, 32 nt, Homo Sapiens
uugaugucauguacuuccuguguacucuuuau

SEQ ID NO: 88923 - RNA, 32 nt, Homo Sapiens
aucuuggaggaagcucugaggaccccgcugag

SEQ ID NO: 88924 - RNA, 32 nt, Homo Sapiens
uuuuuguuauuuacaaaaucuagcagacugug

SEQ ID NO: 88925 - RNA, 32 nt, Homo Sapiens
ggggcacccaugggagcucagcccuugccgcc

SEQ ID NO: 88926 - RNA, 32 nt, Homo Sapiens
uugugcucagugugugccaagcacugugcaga

SEQ ID NO: 88927 - RNA, 32 nt, Homo Sapiens
augccuuaaaauuuaaaaagcagggcccaaag

SEQ ID NO: 88928 - RNA, 32 nt, Homo Sapiens
aaagcacauuauucuuuuucuaucagaaaaaa

SEQ ID NO: 88929 - RNA, 32 nt, Homo Sapiens
aaacagggauaccacagcugugccuuaugugu

SEQ ID NO: 88930 - RNA, 32 nt, Homo Sapiens
ucucauggccucagccaagcauugaacuugcc

SEQ ID NO: 88931 - RNA, 32 nt, Homo Sapiens
uauuuaauauccaaauuaguugauaacuguuu

SEQ ID NO: 88932 - RNA, 32 nt, Homo Sapiens
acuuaccugaggacacccagccaggcagagcu

SEQ ID NO: 88933 - RNA, 29 nt, Homo Sapiens
uuggguuuuuguuucagagaacauuuuau

SEQ ID NO: 88934 - RNA, 32 nt, Homo Sapiens
gagcuaggccgcggagugugcugggcuugggg

SEQ ID NO: 88935 - RNA, 32 nt, Homo Sapiens
agccacuggggugggggguggggggugggggu

SEQ ID NO: 88936 - RNA, 32 nt, Homo Sapiens
cuucggucucuaaaagugcucuuuauuaaaua

SEQ ID NO: 88937 - RNA, 32 nt, Homo Sapiens
aacuuugaauuuccucuuccugugcaaauucc

SEQ ID NO: 88938 - RNA, 32 nt, Homo Sapiens
gucuccucuuugugccgagauugucagucugu

SEQ ID NO: 88939 - RNA, 32 nt, Homo Sapiens
gugucccgccggguccccgagcgucccgcgcc

SEQ ID NO: 88940 - RNA, 32 nt, Homo Sapiens
ccggucucaugcccacuccccaucccugcuuc

SEQ ID NO: 88941 - RNA, 32 nt, Homo Sapiens
cucggaguggcguguuccuucucccugggucc

SEQ ID NO: 88942 - RNA, 32 nt, Homo Sapiens
auucuguuucucuaucuucagaaacuucaguu

SEQ ID NO: 88943 - RNA, 32 nt, Homo Sapiens
cacagcaccccuggguuugcagagcacgcagc

SEQ ID NO: 88944 - RNA, 32 nt, Homo Sapiens
augcccccgggaaggccuccccggcucucggc

SEQ ID NO: 88945 - RNA, 32 nt, Homo Sapiens
agcuguauuaugugaaguuguuugucagcuuc

SEQ ID NO: 88946 - RNA, 32 nt, Homo Sapiens
ggggcgcggguggauuggggcuggaggugcgc

SEQ ID NO: 88947 - RNA, 32 nt, Homo Sapiens
uuaaauuguaaaauuaaccauugagugucaaa

SEQ ID NO: 88948 - RNA, 32 nt, Homo Sapiens
gcaccucucuuucauccuuuaagggaccuucc

SEQ ID NO: 88949 - RNA, 32 nt, Homo Sapiens
ggggggacaugccugccuuggaaggggcaccc

SEQ ID NO: 88950 - RNA, 32 nt, Homo Sapiens
cuuuuuaaaaggaaaaauuauuguagaaccac

SEQ ID NO: 88951 - RNA, 32 nt, Homo Sapiens
ucuuccacaaagacccauaucuggagaaggug

SEQ ID NO: 88952 - RNA, 32 nt, Homo Sapiens
cucugcacacacauuggcggguggggugcagg

SEQ ID NO: 88953 - RNA, 32 nt, Homo Sapiens
caucccugugagcaaaaaugccaggcagaaaa

SEQ ID NO: 88954 - RNA, 32 nt, Homo Sapiens
cuccaaagccccacccagugcacauggccuga

SEQ ID NO: 88955 - RNA, 32 nt, Homo Sapiens
cugcucugguggccgugugugagaggagcagg

SEQ ID NO: 88956 - RNA, 32 nt, Homo Sapiens
gaugcaagcagcuccgggggccccaaacgcau

SEQ ID NO: 88957 - RNA, 32 nt, Homo Sapiens
uauuuauaguguuagaaaaccagccacauuac

SEQ ID NO: 88958 - RNA, 32 nt, Homo Sapiens
cagggcgcaggcgcagcucgcuccucaggccu

SEQ ID NO: 88959 - RNA, 32 nt, Homo Sapiens
uaacugcuggccaggcagaaagaauaugggcu

SEQ ID NO: 88960 - RNA, 32 nt, Homo Sapiens
gaugccugcagggcuggggcucucgggacaga

SEQ ID NO: 88961 - RNA, 32 nt, Homo Sapiens
cgggaagcccagaggagagugugcacucacgg

SEQ ID NO: 88962 - RNA, 32 nt, Homo Sapiens
uuuagguuccuuggcuggggccccuauaacaa

SEQ ID NO: 88963 - RNA, 32 nt, Homo Sapiens
cucgcgcccgcgggcuccaaucgcugcuccuc

SEQ ID NO: 88964 - RNA, 32 nt, Homo Sapiens
gccggagggcgggccccuccucacagcaauag

SEQ ID NO: 88965 - RNA, 32 nt, Homo Sapiens
augccagacaucaccagguuguagaaguugac

SEQ ID NO: 88966 - RNA, 32 nt, Homo Sapiens
aaaaugaacagaauucuuuuuccauacuuaua

SEQ ID NO: 88967 - RNA, 32 nt, Homo Sapiens
cuaaguuaauuccacaccccuguaccccccag

SEQ ID NO: 88968 - RNA, 32 nt, Homo Sapiens
agaucuguuucuacuauucaguuccucaaacu

SEQ ID NO: 88969 - RNA, 32 nt, Homo Sapiens
cccagccaggguggccccggcgggggcggguc

SEQ ID NO: 88970 - RNA, 32 nt, Homo Sapiens
ggaggaggugccuagagggaaaaguuauuuuu

SEQ ID NO: 88971 - RNA, 32 nt, Homo Sapiens
aacccgacagagggaagaaaagagcuuucuuc

SEQ ID NO: 88972 - RNA, 32 nt, Homo Sapiens
ucuugaaucuugcucugucacccaggcuggag

SEQ ID NO: 88973 - RNA, 32 nt, Homo Sapiens
ccucaaguggccuucugacugcacgagaaugu

SEQ ID NO: 88974 - RNA, 32 nt, Homo Sapiens
ucugaggccugccugauuugggccacauagau

SEQ ID NO: 88975 - RNA, 32 nt, Homo Sapiens
ugggaucucggagaucgagaccaugcuggcua

SEQ ID NO: 88976 - RNA, 32 nt, Homo Sapiens
acuugaacucaagucagccucuccaggcccag

SEQ ID NO: 88977 - RNA, 30 nt, Homo Sapiens
uuccuugucugugugccaguugcuggcugu

SEQ ID NO: 88978 - RNA, 32 nt, Homo Sapiens
acugaaguggauuucucuguccauuaacagug

SEQ ID NO: 88979 - RNA, 32 nt, Homo Sapiens
gugaccugaaagaugaauuggagauaauuagu

SEQ ID NO: 88980 - RNA, 31 nt, Homo Sapiens
gcuuuauccaucaccaccugggcuccugcau

SEQ ID NO: 88981 - RNA, 32 nt, Homo Sapiens
gggggcccugccugguggcaagagggaauguc

SEQ ID NO: 88982 - RNA, 32 nt, Homo Sapiens
guccuauaaacuauuuauauauuuuuguucuu

SEQ ID NO: 88983 - RNA, 32 nt, Homo Sapiens
ggagccagaugaucugaagaugaugcuaaucc

SEQ ID NO: 88984 - RNA, 32 nt, Homo Sapiens
uccccucugcagcgcgcaccccggcggggcuu

SEQ ID NO: 88985 - RNA, 32 nt, Homo Sapiens
gccgcccuuuucuccuuauccuugccagcacu

SEQ ID NO: 88986 - RNA, 32 nt, Homo Sapiens
gucacaggauggcggcugucguccugccccca

SEQ ID NO: 88987 - RNA, 32 nt, Homo Sapiens
cuguuguaguuuagaaggcuuuucauaaaucc

SEQ ID NO: 88988 - RNA, 32 nt, Homo Sapiens
uuuuuggacugcagccuauuaauaaaguuaac

SEQ ID NO: 88989 - RNA, 32 nt, Homo Sapiens
uaagugaagggagaggcuggcuuggcuguucc

SEQ ID NO: 88990 - RNA, 32 nt, Homo Sapiens
ccgcugcccgcggcgccagcaccaugcucuuc

SEQ ID NO: 88991 - RNA, 32 nt, Homo Sapiens
ucggaaguguuuucaacuaaucaaauaaauga

SEQ ID NO: 88992 - RNA, 30 nt, Homo Sapiens
ggcuaugugugggcgccgccgguggcuuug

SEQ ID NO: 88993 - RNA, 32 nt, Homo Sapiens
agcucaggguuaauguagugguuguuuugguu

SEQ ID NO: 88994 - RNA, 32 nt, Homo Sapiens
cacuggggcugcgucuggcccguuguccagca

SEQ ID NO: 88995 - RNA, 32 nt, Homo Sapiens
ccuuuaaagugaagaagaggagccaguugugc

SEQ ID NO: 88996 - RNA, 32 nt, Homo Sapiens
guaguuaaggcuucuuuuuugcccccagauac

SEQ ID NO: 88997 - RNA, 32 nt, Homo Sapiens
caaaacaaaaacgacaguaauaccaaggaauc

SEQ ID NO: 88998 - RNA, 30 nt, Homo Sapiens
ucguugguguuaaugggggaauguguuccu

SEQ ID NO: 88999 - RNA, 32 nt, Homo Sapiens
acacauggggauccggccugcaggaccuauga

SEQ ID NO: 89000 - RNA, 32 nt, Homo Sapiens
caacaucucauguaguuuaaauuuguaaauac

SEQ ID NO: 89001 - RNA, 32 nt, Homo Sapiens
gugagguugucauggccucagcuaugcuuccu

SEQ ID NO: 89002 - RNA, 32 nt, Homo Sapiens
ggucuccgacugcagggggcggucggcccugu

SEQ ID NO: 89003 - RNA, 32 nt, Homo Sapiens
gcccggcuaauuuuuguauuuucaguaggcug

SEQ ID NO: 89004 - RNA, 28 nt, Homo Sapiens
uguagaacagauuaacguaguugaaaug

SEQ ID NO: 89005 - RNA, 32 nt, Homo Sapiens
aagaagcacaaugucuuuuuuauuuuuauuuu

SEQ ID NO: 89006 - RNA, 32 nt, Homo Sapiens
cugggauggcuucaggggcagcuccuuuucca

SEQ ID NO: 89007 - RNA, 32 nt, Homo Sapiens
guggccaucccaugaaucuguuuacuagcuug

SEQ ID NO: 89008 - RNA, 32 nt, Homo Sapiens
gguuucaccauauuggucaggcuggucucgaa

SEQ ID NO: 89009 - RNA, 32 nt, Homo Sapiens
gccagaaugcccucucuccagaggacacacag

SEQ ID NO: 89010 - RNA, 32 nt, Homo Sapiens
gguuucacuauauuggccaggcuggucucgaa

SEQ ID NO: 89011 - RNA, 32 nt, Homo Sapiens
uucucaguucccuccaggcuucuaaagcaucu

SEQ ID NO: 89012 - RNA, 32 nt, Homo Sapiens
cuugcggacuuccucuagcauaaaagauggaa

SEQ ID NO: 89013 - RNA, 32 nt, Homo Sapiens
cuugcuuugcaaacagaaugcaagcguuaacu

SEQ ID NO: 89014 - RNA, 32 nt, Homo Sapiens
gggcggagacuuggggcggggggcgggcaaua

SEQ ID NO: 89015 - RNA, 32 nt, Homo Sapiens
gaaauauagauauucaugcaucagauaaaagu

SEQ ID NO: 89016 - RNA, 32 nt, Homo Sapiens
ucauuccguuguauuucugaaaauaguuacau

SEQ ID NO: 89017 - RNA, 32 nt, Homo Sapiens
uuaugcguaugugcacggggccgcccgccugg

SEQ ID NO: 89018 - RNA, 32 nt, Homo Sapiens
agcaacagauaaugaccaauaacugguucagu

SEQ ID NO: 89019 - RNA, 32 nt, Homo Sapiens
ccgccuccggugcuggcacuaggggcuggggu

SEQ ID NO: 89020 - RNA, 32 nt, Homo Sapiens
agcaaaccgcugacaagucuuucuagaaauuc

SEQ ID NO: 89021 - RNA, 32 nt, Homo Sapiens
ggcuccgucuucugcuccucagagagcccggc

SEQ ID NO: 89022 - RNA, 32 nt, Homo Sapiens
gugcuggcguccccgagugcugccggggcccc

SEQ ID NO: 89023 - RNA, 32 nt, Homo Sapiens
ggauuuuuggagcagggagauggaauaggagc

SEQ ID NO: 89024 - RNA, 32 nt, Homo Sapiens
uaggagcaaggugguccuuguuccaguuuuug

SEQ ID NO: 89025 - RNA, 32 nt, Homo Sapiens
uauauaaaauaaauauacuaauaaaaagguuu

SEQ ID NO: 89026 - RNA, 32 nt, Homo Sapiens
guuguaauauaaaaacuguguuucuguacgug

SEQ ID NO: 89027 - RNA, 32 nt, Homo Sapiens
auugucuaagccugguuuuggccacuacaacu

SEQ ID NO: 89028 - RNA, 32 nt, Homo Sapiens
guuuuaauuguuucaugguugcagauauaaag

SEQ ID NO: 89029 - RNA, 32 nt, Homo Sapiens
guucucuguaauacccaaaacagugcuguauu

SEQ ID NO: 89030 - RNA, 32 nt, Homo Sapiens
aggccugaggauuugaggaaaaucgggauuuu

SEQ ID NO: 89031 - RNA, 32 nt, Homo Sapiens
auuuguaacaauuugguaacauucaaaucuuu

SEQ ID NO: 89032 - RNA, 32 nt, Homo Sapiens
agguguuucaagauggugacuugguuucugga

SEQ ID NO: 89033 - RNA, 32 nt, Homo Sapiens
aaaagcccacuuuagaguauacauugcuauua

SEQ ID NO: 89034 - RNA, 32 nt, Homo Sapiens
cugaaagucaaucccuggacaaggcagucauc

SEQ ID NO: 89035 - RNA, 32 nt, Homo Sapiens
cuucucuccaggcccugaacuuucucaagucg

SEQ ID NO: 89036 - RNA, 32 nt, Homo Sapiens
agauguccaagcccuaaucccuggagccuggg

SEQ ID NO: 89037 - RNA, 32 nt, Homo Sapiens
aucaacccugucaucuacgccauccgcaaucc

SEQ ID NO: 89038 - RNA, 32 nt, Homo Sapiens
caucccugccuugggcugcccucccccagacc

SEQ ID NO: 89039 - RNA, 32 nt, Homo Sapiens
aauacccauuuuaaaaaaccauuugaaaguag

SEQ ID NO: 89040 - RNA, 32 nt, Homo Sapiens
gggagaagugaccuggaaagguccuguuugca

SEQ ID NO: 89041 - RNA, 32 nt, Homo Sapiens
uggggcccaacaaccauaucuacaugggaguc

SEQ ID NO: 89042 - RNA, 30 nt, Homo Sapiens
aaugguggagguggcggggggaagcagagg

SEQ ID NO: 89043 - RNA, 32 nt, Homo Sapiens
gcaggaugggggaaacuggaaaaggagcugau

SEQ ID NO: 89044 - RNA, 32 nt, Homo Sapiens
cccgaccguagcgagggugcugcugcgcuggg

SEQ ID NO: 89045 - RNA, 32 nt, Homo Sapiens
ugacuuuccaaguuuaauuauucaaaacuuuu

SEQ ID NO: 89046 - RNA, 32 nt, Homo Sapiens
uguaggaaaugggaagaggagucaacuagagg

SEQ ID NO: 89047 - RNA, 32 nt, Homo Sapiens
ccccuccggcgugucaggcauacucugaguag

SEQ ID NO: 89048 - RNA, 32 nt, Homo Sapiens
gcguccaugcuguagcuuccuaccucagucca

SEQ ID NO: 89049 - RNA, 32 nt, Homo Sapiens
ccagcaagguaacagcuucguuuuauuuacau

SEQ ID NO: 89050 - RNA, 32 nt, Homo Sapiens
gguaaagccaaagagccauaugcugaacaacc

SEQ ID NO: 89051 - RNA, 32 nt, Homo Sapiens
ggguggguacuugggugaggaucccugaaggc

SEQ ID NO: 89052 - RNA, 32 nt, Homo Sapiens
uuucacacagaaauauauauuauagacauaga

SEQ ID NO: 89053 - RNA, 32 nt, Homo Sapiens
ggggagggcuggaagaggaggacggucaucug

SEQ ID NO: 89054 - RNA, 32 nt, Homo Sapiens
cucuuuuuuccucgccccggcgggcuccuccg

SEQ ID NO: 89055 - RNA, 32 nt, Homo Sapiens
cucuucuguuccagcccucucuugucugggug

SEQ ID NO: 89056 - RNA, 32 nt, Homo Sapiens
uacgcggcccgcgccuccuucacaagaggaug

SEQ ID NO: 89057 - RNA, 32 nt, Homo Sapiens
ugucgcccaggcagaagcacaaaggugcagua

SEQ ID NO: 89058 - RNA, 32 nt, Homo Sapiens
gcauugguuauuacccuguguaccuugucccu

SEQ ID NO: 89059 - RNA, 32 nt, Homo Sapiens
uauaauagcaguaucugagcugcuccaaaaua

SEQ ID NO: 89060 - RNA, 32 nt, Homo Sapiens
uggucuuuguugagccucuuucugggucucug

SEQ ID NO: 89061 - RNA, 32 nt, Homo Sapiens
guaacaggugucuggaggcugaaggguggagg

SEQ ID NO: 89062 - RNA, 32 nt, Homo Sapiens
ggggaggaggggcucugccacucccagccugg

SEQ ID NO: 89063 - RNA, 32 nt, Homo Sapiens
cccggagccuggcgugggguucuucugcggga

SEQ ID NO: 89064 - RNA, 32 nt, Homo Sapiens
cuauaaccauccccaaacuagcuggagccuga

SEQ ID NO: 89065 - RNA, 32 nt, Homo Sapiens
augguguaaagaacccaaaauccacaagcacu

SEQ ID NO: 89066 - RNA, 32 nt, Homo Sapiens
gcugcgugcgcgucuccuccaggcagcaaggg

SEQ ID NO: 89067 - RNA, 32 nt, Homo Sapiens
uugaccucaauccaaguuuacucuugauauca

SEQ ID NO: 89068 - RNA, 32 nt, Homo Sapiens
acucgagagcgguggggguggcggcgcgaucg

SEQ ID NO: 89069 - RNA, 32 nt, Homo Sapiens
cugggaguuauguaccgcgaagugugucaugu

SEQ ID NO: 89070 - RNA, 32 nt, Homo Sapiens
aaugaaagcugaugaaucuuaaaaggaagaag

SEQ ID NO: 89071 - RNA, 32 nt, Homo Sapiens
cauagcacaacaugauccggauaauauauaua

SEQ ID NO: 89072 - RNA, 32 nt, Homo Sapiens
aacuagaaucaucaaaauuauuuguuguugaa

SEQ ID NO: 89073 - RNA, 32 nt, Homo Sapiens
ugcucucucaccucuauuaccuccucacaucu

SEQ ID NO: 89074 - RNA, 32 nt, Homo Sapiens
aggccaaauucccuccucccuucuacugcuuc

SEQ ID NO: 89075 - RNA, 32 nt, Homo Sapiens
uaauguuaauuucaauaaaugacauucaugca

SEQ ID NO: 89076 - RNA, 32 nt, Homo Sapiens
uauuugauaaauauuucuuccuacauuauauu

SEQ ID NO: 89077 - RNA, 32 nt, Homo Sapiens
ucaagcgauccucccaccucagccuccugagu

SEQ ID NO: 89078 - RNA, 32 nt, Homo Sapiens
gggucucugccagcuggaagugcuuggcucca

SEQ ID NO: 89079 - RNA, 32 nt, Homo Sapiens
cauuucucuccgcuggccccagccgcggggcc

SEQ ID NO: 89080 - RNA, 32 nt, Homo Sapiens
cacaauuauuuuuuccuuuuugguuacuuggu

SEQ ID NO: 89081 - RNA, 32 nt, Homo Sapiens
uuccgcgucaccagcuccugugccugccaguc

SEQ ID NO: 89082 - RNA, 32 nt, Homo Sapiens
guuacuauuuuauauucuuuccugcuuuuugu

SEQ ID NO: 89083 - RNA, 32 nt, Homo Sapiens
cugcuguucugggucucaggcugcuggacccc

SEQ ID NO: 89084 - RNA, 32 nt, Homo Sapiens
uaaccccucagucuccuccccaucacccuccu

SEQ ID NO: 89085 - RNA, 32 nt, Homo Sapiens
ucuuugcaaacaguguucacauuuucauauuu

SEQ ID NO: 89086 - RNA, 32 nt, Homo Sapiens
aacaacuugaguugcucuaaaauguuuggaaa

SEQ ID NO: 89087 - RNA, 32 nt, Homo Sapiens
auuggccuggccucguucucucuucuugcccu

SEQ ID NO: 89088 - RNA, 32 nt, Homo Sapiens
guuccuggugccuucugauggggcuggaauag

SEQ ID NO: 89089 - RNA, 32 nt, Homo Sapiens
cugaggagcgcggaccccggcgcucggcuccc

SEQ ID NO: 89090 - RNA, 32 nt, Homo Sapiens
ucacuguacuuagaguaagagauaugacggaa

SEQ ID NO: 89091 - RNA, 32 nt, Homo Sapiens
ccuucgccgguucagcacccaggcugugguac

SEQ ID NO: 89092 - RNA, 32 nt, Homo Sapiens
uauuuugauauugcagaugacuugcuuacugu

SEQ ID NO: 89093 - RNA, 32 nt, Homo Sapiens
uuguguaacuuauauguaaaucugaaauuauu

SEQ ID NO: 89094 - RNA, 32 nt, Homo Sapiens
uaauucuuucaccuuaaagcauauuuuauguc

SEQ ID NO: 89095 - RNA, 32 nt, Homo Sapiens
uuaauuuuuuaaagacuuuuucugaucuuuga

SEQ ID NO: 89096 - RNA, 32 nt, Homo Sapiens
ugcugggggcagccggugcagccccggggagc

SEQ ID NO: 89097 - RNA, 32 nt, Homo Sapiens
ggauguuaaaaguaacaaaaccaagucaaacu

SEQ ID NO: 89098 - RNA, 32 nt, Homo Sapiens
ugggccauuucuuuuagcuuuggacuuugggg

SEQ ID NO: 89099 - RNA, 32 nt, Homo Sapiens
uacaccuggacaauuucuagaagacuacaauu

SEQ ID NO: 89100 - RNA, 32 nt, Homo Sapiens
agaagugagggugggcugaggacccccaaacc

SEQ ID NO: 89101 - RNA, 32 nt, Homo Sapiens
uucacuguguuagccgggauggucaaucuccu

SEQ ID NO: 89102 - RNA, 32 nt, Homo Sapiens
agcagguguugccaaugcugcgguucgugcag

SEQ ID NO: 89103 - RNA, 32 nt, Homo Sapiens
gcacuuccgugugccgcggcgccggagcccga

SEQ ID NO: 89104 - RNA, 32 nt, Homo Sapiens
uggcccugcuccaggugcaggaaggaggauaa

SEQ ID NO: 89105 - RNA, 32 nt, Homo Sapiens
agccacccgccgcuccucgaguccccucgccc

SEQ ID NO: 89106 - RNA, 32 nt, Homo Sapiens
uuaguugggagcugcgcgccgcgcucaguuac

SEQ ID NO: 89107 - RNA, 32 nt, Homo Sapiens
uauuugcccaucacauuucucauuucaaagug

SEQ ID NO: 89108 - RNA, 32 nt, Homo Sapiens
gccagagcuuaguggaugggugugugugugug

SEQ ID NO: 89109 - RNA, 32 nt, Homo Sapiens
guaaacuaauguauuucuuuauuggcuguuau

SEQ ID NO: 89110 - RNA, 32 nt, Homo Sapiens
aggccgcgucccgcccagagugaggcacggcc

SEQ ID NO: 89111 - RNA, 32 nt, Homo Sapiens
ucauucacuuccuuuuguucucucucugguca

SEQ ID NO: 89112 - RNA, 32 nt, Homo Sapiens
ucaacuauccgaaagauaacaaaagaaaaaug

SEQ ID NO: 89113 - RNA, 32 nt, Homo Sapiens
ugcagcugccuugccuugccgccgccucccug

SEQ ID NO: 89114 - RNA, 32 nt, Homo Sapiens
cacucugccccuugcccuccccugccccucac

SEQ ID NO: 89115 - RNA, 32 nt, Homo Sapiens
auugauguaaaauuauuuuucaagcaaauguu

SEQ ID NO: 89116 - RNA, 32 nt, Homo Sapiens
auuuuugguuguuuugguuguuuucuuaaaaa

SEQ ID NO: 89117 - RNA, 32 nt, Homo Sapiens
acgugguaucaagggcuuuacauccuuguucc

SEQ ID NO: 89118 - RNA, 32 nt, Homo Sapiens
aauaaugacagugcuuuacaguuuacaaagca

SEQ ID NO: 89119 - RNA, 32 nt, Homo Sapiens
caaguacucaaccuucuguuuucucaauaaag

SEQ ID NO: 89120 - RNA, 29 nt, Homo Sapiens
gcacauguggcuuuccugcaaugggaucg

SEQ ID NO: 89121 - RNA, 32 nt, Homo Sapiens
gcuuccugcaccuggugacgcuuggcgaaacu

SEQ ID NO: 89122 - RNA, 32 nt, Homo Sapiens
gauuacauuguggacuuugaaugugagggcug

SEQ ID NO: 89123 - RNA, 32 nt, Homo Sapiens
cuacugugcuucuuggaggaggugggacuuga

SEQ ID NO: 89124 - RNA, 32 nt, Homo Sapiens
augcuuuauuuuucaaaaccuuucucugauau

SEQ ID NO: 89125 - RNA, 32 nt, Homo Sapiens
uuaacacaaaaaugugaaguggcugccaaaag

SEQ ID NO: 89126 - RNA, 32 nt, Homo Sapiens
ugggcgcggcagggcgggaggggcgcgccaug

SEQ ID NO: 89127 - RNA, 32 nt, Homo Sapiens
auaaauuguaaguaauugugggucucaaaaac

SEQ ID NO: 89128 - RNA, 32 nt, Homo Sapiens
ugauuaguuucuguugcauacauauuuacaac

SEQ ID NO: 89129 - RNA, 32 nt, Homo Sapiens
uaaaauuguuuaauguuuaaagaguuucuauu

SEQ ID NO: 89130 - RNA, 32 nt, Homo Sapiens
cagccccagacgcccaccugugccucagggca

SEQ ID NO: 89131 - RNA, 32 nt, Homo Sapiens
cugaucccaucccauauugcaucuuugaagag

SEQ ID NO: 89132 - RNA, 32 nt, Homo Sapiens
ccccaccacacccacaccacagccgcugaaug

SEQ ID NO: 89133 - RNA, 32 nt, Homo Sapiens
guuaauaaacaaaaaugacacaauauaugugg

SEQ ID NO: 89134 - RNA, 32 nt, Homo Sapiens
ggguuuuuuuuucucuuagggucgcugcauaa

SEQ ID NO: 89135 - RNA, 32 nt, Homo Sapiens
augagccacugagccuggcccugaagcguuuu

SEQ ID NO: 89136 - RNA, 32 nt, Homo Sapiens
agguuuuccaugaagaaaucaaccaguccaga

SEQ ID NO: 89137 - RNA, 32 nt, Homo Sapiens
auauuuuuuaaaacgcuagauaccauacugua

SEQ ID NO: 89138 - RNA, 32 nt, Homo Sapiens
agcugaauaaggggucagaacuucugaaacca

SEQ ID NO: 89139 - RNA, 32 nt, Homo Sapiens
ggaauccugccagccgagcgugggucccaguc

SEQ ID NO: 89140 - RNA, 32 nt, Homo Sapiens
acccugcugcccaacagccccgcggccaccag

SEQ ID NO: 89141 - RNA, 30 nt, Homo Sapiens
gaguggugggcgcagcaguuccuggcgaga

SEQ ID NO: 89142 - RNA, 32 nt, Homo Sapiens
cuccucuccccccgcccgcgggccccccaaag

SEQ ID NO: 89143 - RNA, 32 nt, Homo Sapiens
aauugacacgacaacucugaauguguggcccu

SEQ ID NO: 89144 - RNA, 32 nt, Homo Sapiens
aaacgguauauuauuucuuugcagucuccucu

SEQ ID NO: 89145 - RNA, 32 nt, Homo Sapiens
gugcaagaggaaggagugugcccagaccagcu

SEQ ID NO: 89146 - RNA, 32 nt, Homo Sapiens
gugagcuggccaacgagcuccgcgggcuggga

SEQ ID NO: 89147 - RNA, 32 nt, Homo Sapiens
gguuggggggaggggcggggcaugguacaacc

SEQ ID NO: 89148 - RNA, 32 nt, Homo Sapiens
agagcccgccgcccgcgcgagguguagacggg

SEQ ID NO: 89149 - RNA, 32 nt, Homo Sapiens
uuuccuuagucuuuuuguuguuguuguuguug

SEQ ID NO: 89150 - RNA, 27 nt, Homo Sapiens
cacagacuucucuucagccuccgcucc

SEQ ID NO: 89151 - RNA, 32 nt, Homo Sapiens
ugcucaaggguucuuuccucccaggggcaggu

SEQ ID NO: 89152 - RNA, 32 nt, Homo Sapiens
agaaaauaauuuuccuuguaaaaucgggccaa

SEQ ID NO: 89153 - RNA, 32 nt, Homo Sapiens
ucccggacccgcgucccggggaggcugcagcg

SEQ ID NO: 89154 - RNA, 32 nt, Homo Sapiens
aggggucggagcucuuccuuccccucugugga

SEQ ID NO: 89155 - RNA, 32 nt, Homo Sapiens
ccucuggguagcugugcccacccagccuucau

SEQ ID NO: 89156 - RNA, 32 nt, Homo Sapiens
cagauuucauauugcucaaacacacaugcugu

SEQ ID NO: 89157 - RNA, 32 nt, Homo Sapiens
cucugcacuguguaaaggaaaagggagaaaug

SEQ ID NO: 89158 - RNA, 32 nt, Homo Sapiens
aauugugagagaaacuagaugacuguaaacuu

SEQ ID NO: 89159 - RNA, 32 nt, Homo Sapiens
aaauucuguuuuguuuguggaaugacuagcac

SEQ ID NO: 89160 - RNA, 32 nt, Homo Sapiens
auuuuacagauuuuuguuugguuuaacuccag

SEQ ID NO: 89161 - RNA, 32 nt, Homo Sapiens
ggaaagcggagcacaguacugggaaaggggag

SEQ ID NO: 89162 - RNA, 32 nt, Homo Sapiens
ccuguagcugguuuauuuuuuacuuugccccc

SEQ ID NO: 89163 - RNA, 32 nt, Homo Sapiens
uaaauuucagucaagacuacgacugagcaaag

SEQ ID NO: 89164 - RNA, 32 nt, Homo Sapiens
guagaagccgacagagagcuguuuggaaacuu

SEQ ID NO: 89165 - RNA, 32 nt, Homo Sapiens
aaaauaaaaaauaaauguggauaauacuagua

SEQ ID NO: 89166 - RNA, 32 nt, Homo Sapiens
ugaugucaguguuccaguggcuucuaacaggc

SEQ ID NO: 89167 - RNA, 32 nt, Homo Sapiens
ggaggcccagaucacccauccuccccuggggu

SEQ ID NO: 89168 - RNA, 32 nt, Homo Sapiens
guauaguuacaaucuggacacuauuuuuugcu

SEQ ID NO: 89169 - RNA, 32 nt, Homo Sapiens
guccggacccgccgccgagcgggccguggagc

SEQ ID NO: 89170 - RNA, 32 nt, Homo Sapiens
uggcaggaggccugaccccaccccaucagucc

SEQ ID NO: 89171 - RNA, 32 nt, Homo Sapiens
caguguggcagcugcuggccucugggccgcua

SEQ ID NO: 89172 - RNA, 32 nt, Homo Sapiens
guauucaaaggaaaaggaauuguuuucaaagu

SEQ ID NO: 89173 - RNA, 32 nt, Homo Sapiens
guaguuaucuucugggguuucaauuccucaga

SEQ ID NO: 89174 - RNA, 32 nt, Homo Sapiens
aggccucggcccggccucaucgugccggcuuc

SEQ ID NO: 89175 - RNA, 32 nt, Homo Sapiens
ggcgagagucugcggcgccuuggccuuccgca

SEQ ID NO: 89176 - RNA, 32 nt, Homo Sapiens
acuauaaagaagauuuaauuauguaaauagac

SEQ ID NO: 89177 - RNA, 32 nt, Homo Sapiens
gcccggcucccggcggccccagcugucaccgg

SEQ ID NO: 89178 - RNA, 32 nt, Homo Sapiens
cauguuaguguagaagagagauaggucuuuag

SEQ ID NO: 89179 - RNA, 32 nt, Homo Sapiens
gcagcuagauucaaaugggcugauaaccaaau

SEQ ID NO: 89180 - RNA, 28 nt, Homo Sapiens
ccagcaguuacaguuccagguaccuacc

SEQ ID NO: 89181 - RNA, 32 nt, Homo Sapiens
gaagucgucuggccuccccgcggccgcucgca

SEQ ID NO: 89182 - RNA, 32 nt, Homo Sapiens
gguucccucacagccagcacgacccccagaaa

SEQ ID NO: 89183 - RNA, 32 nt, Homo Sapiens
aucauuacaaaacauucuauauugaagcacug

SEQ ID NO: 89184 - RNA, 32 nt, Homo Sapiens
ggagcuaugaacugguuuuggucccucuaaug

SEQ ID NO: 89185 - RNA, 32 nt, Homo Sapiens
agcaauggaugaugaugaugacuguuaccagg

SEQ ID NO: 89186 - RNA, 32 nt, Homo Sapiens
ccaccucccgcacucccgccccucgcgagggc

SEQ ID NO: 89187 - RNA, 32 nt, Homo Sapiens
gcuuucuauccaggucauuuuuuacacgugaa

SEQ ID NO: 89188 - RNA, 32 nt, Homo Sapiens
gggaccccgcggcccgccccggugcucgugau

SEQ ID NO: 89189 - RNA, 32 nt, Homo Sapiens
uggggagaaaucaugaaugucaugaauguggg

SEQ ID NO: 89190 - RNA, 30 nt, Homo Sapiens
gcugcugcugcugggccgccggcgcgugga

SEQ ID NO: 89191 - RNA, 32 nt, Homo Sapiens
acauccgucaauggucagaaaaccaaaagaca

SEQ ID NO: 89192 - RNA, 29 nt, Homo Sapiens
ugauugaagggugggugaaagcuggcugg

SEQ ID NO: 89193 - RNA, 32 nt, Homo Sapiens
gaaugagcuugucaaugugauuuuaaaaaauu

SEQ ID NO: 89194 - RNA, 32 nt, Homo Sapiens
uggcuugguuggaagacugauuggaaaagaag

SEQ ID NO: 89195 - RNA, 32 nt, Homo Sapiens
ggaccucgggccuggggucugcagggggcccg

SEQ ID NO: 89196 - RNA, 32 nt, Homo Sapiens
gcagagcaacaaaggugaaaagggcagcaaag

SEQ ID NO: 89197 - RNA, 32 nt, Homo Sapiens
gcucugucuccucggcgccccagugcccgugc

SEQ ID NO: 89198 - RNA, 32 nt, Homo Sapiens
aguggccacucugggugguucuaagccaggag

SEQ ID NO: 89199 - RNA, 32 nt, Homo Sapiens
cugggugggcauuuuuaacuuuggaggccuuc

SEQ ID NO: 89200 - RNA, 32 nt, Homo Sapiens
uaggagcugaagaucgcggacuuagcguugcc

SEQ ID NO: 89201 - RNA, 32 nt, Homo Sapiens
cauuagaaaaauuuauacuggggaaagucuua

SEQ ID NO: 89202 - RNA, 32 nt, Homo Sapiens
aguuuuugacuucuuuucuaaauauuuacaug

SEQ ID NO: 89203 - RNA, 32 nt, Homo Sapiens
gcaacaagauggugugguuaucuugggucauu

SEQ ID NO: 89204 - RNA, 32 nt, Homo Sapiens
uaggccccagcaggcaaaccacuucacagugc

SEQ ID NO: 89205 - RNA, 32 nt, Homo Sapiens
uuuugagacuccagucugggugucagaaugag

SEQ ID NO: 89206 - RNA, 32 nt, Homo Sapiens
gagcggcagcgggcgucccgaagguucucagg

SEQ ID NO: 89207 - RNA, 32 nt, Homo Sapiens
cugcgugugucucaaggcauccugcuaauaaa

SEQ ID NO: 89208 - RNA, 32 nt, Homo Sapiens
uuuuuaagccccagcccuggcauucacuagcu

SEQ ID NO: 89209 - RNA, 32 nt, Homo Sapiens
auaguaguuuaaaagagaggcuaguaaguuug

SEQ ID NO: 89210 - RNA, 32 nt, Homo Sapiens
uggugcugucaccucccaccuguuccauuccg

SEQ ID NO: 89211 - RNA, 32 nt, Homo Sapiens
cugccugccgggcccucucuucugggacccug

SEQ ID NO: 89212 - RNA, 32 nt, Homo Sapiens
aaucucuccucugccuucuccuuaucagacua

SEQ ID NO: 89213 - RNA, 32 nt, Homo Sapiens
gucaccggaaaccaucagcagaugcuucuaag

SEQ ID NO: 89214 - RNA, 30 nt, Homo Sapiens
gaggggucgcccgugcacccugucccagcc

SEQ ID NO: 89215 - RNA, 32 nt, Homo Sapiens
aaccugugaacuuccuucuccuggcucagaag

SEQ ID NO: 89216 - RNA, 32 nt, Homo Sapiens
uauuuauaaaaagcaaguauuuaauguccuuu

SEQ ID NO: 89217 - RNA, 32 nt, Homo Sapiens
guucugugaauacugcccuuuuuggcgggguu

SEQ ID NO: 89218 - RNA, 32 nt, Homo Sapiens
cuguugccacacacaugcggagggauuuucuu

SEQ ID NO: 89219 - RNA, 32 nt, Homo Sapiens
guuuuauugguaacaaauuucauuacauuuac

SEQ ID NO: 89220 - RNA, 32 nt, Homo Sapiens
ccggcgcugcgacacccggcccggagcccacc

SEQ ID NO: 89221 - RNA, 32 nt, Homo Sapiens
gucggcagcuggcgccagggcggccggaggau

SEQ ID NO: 89222 - RNA, 32 nt, Homo Sapiens
uuccccgauggcggcccaggggugcgcggcau

SEQ ID NO: 89223 - RNA, 32 nt, Homo Sapiens
ugauagcagucuucuguaaaucgaacuuuuca

SEQ ID NO: 89224 - RNA, 32 nt, Homo Sapiens
cgagcuggacggggaggcgggcggccucuccc

SEQ ID NO: 89225 - RNA, 32 nt, Homo Sapiens
ccugugcucccucgcuccuuccucugcauugc

SEQ ID NO: 89226 - RNA, 32 nt, Homo Sapiens
ucgccgccgccgccggccgcagccaggagcag

SEQ ID NO: 89227 - RNA, 32 nt, Homo Sapiens
gggaagaggcgagagcgcggagggcgcgcgug

SEQ ID NO: 89228 - RNA, 32 nt, Homo Sapiens
uauguguuugauacuguauacaaaagacauga

SEQ ID NO: 89229 - RNA, 32 nt, Homo Sapiens
cugagccauagauuuuuaaucuguaaaaggag

SEQ ID NO: 89230 - RNA, 32 nt, Homo Sapiens
acagacaaaaacuaauaacauauuagcugccc

SEQ ID NO: 89231 - RNA, 32 nt, Homo Sapiens
cucgaguguggccuucuaagggucuuugcugc

SEQ ID NO: 89232 - RNA, 32 nt, Homo Sapiens
agcacucuagcuugcauggguguugcauugac

SEQ ID NO: 89233 - RNA, 32 nt, Homo Sapiens
aagcuccccguccagcuuugacagucaguuuu

SEQ ID NO: 89234 - RNA, 32 nt, Homo Sapiens
gaugaaccaaggaaagccaugaguuuaaacaa

SEQ ID NO: 89235 - RNA, 32 nt, Homo Sapiens
cucuccaucgccauccugcaagcuccacagcc

SEQ ID NO: 89236 - RNA, 32 nt, Homo Sapiens
uaaauacuugucaucauggacuccaacagggu

SEQ ID NO: 89237 - RNA, 32 nt, Homo Sapiens
aaccaaaauggagucacuuaugccaaacucua

SEQ ID NO: 89238 - RNA, 32 nt, Homo Sapiens
agacccuucacaucaauuuacuguugucuucg

SEQ ID NO: 89239 - RNA, 32 nt, Homo Sapiens
gcgcugcgcccucugaacgcccggcccccgcg

SEQ ID NO: 89240 - RNA, 32 nt, Homo Sapiens
ccacccacuccagcccgggugacagagcgaga

SEQ ID NO: 89241 - RNA, 32 nt, Homo Sapiens
gagccagggaucggcgggaguugagagcuggg

SEQ ID NO: 89242 - RNA, 32 nt, Homo Sapiens
aaaggaagaacaaggucuugaagggacagcau

SEQ ID NO: 89243 - RNA, 32 nt, Homo Sapiens
ccaaaaaccugccugccugguugggccuucag

SEQ ID NO: 89244 - RNA, 32 nt, Homo Sapiens
uuauauuuucuuuuuccuuauauagaguaaaa

SEQ ID NO: 89245 - RNA, 32 nt, Homo Sapiens
uucacauguucccacucucugugcggccacca

SEQ ID NO: 89246 - RNA, 32 nt, Homo Sapiens
aucaggcuggucucaaacuccucgguucaagc

SEQ ID NO: 89247 - RNA, 32 nt, Homo Sapiens
ugcaagauauuuuuucuuuuuuauagugugaa

SEQ ID NO: 89248 - RNA, 32 nt, Homo Sapiens
ucacaccagccuugggcuccagcccucugccu

SEQ ID NO: 89249 - RNA, 30 nt, Homo Sapiens
guccuaccacuugcauccucugcuggaagg

SEQ ID NO: 89250 - RNA, 32 nt, Homo Sapiens
aagucagagccugggccggcuccggagaaguu

SEQ ID NO: 89251 - RNA, 32 nt, Homo Sapiens
ucuagggacaccuggugauuccuacacaagug

SEQ ID NO: 89252 - RNA, 32 nt, Homo Sapiens
uagauguuuuuagaaaaacuugugaaugaaaa

SEQ ID NO: 89253 - RNA, 32 nt, Homo Sapiens
ugaaacuuguuucuaacaggauuucaugugau

SEQ ID NO: 89254 - RNA, 32 nt, Homo Sapiens
gacagagaucgcuguggggucugugugaccau

SEQ ID NO: 89255 - RNA, 32 nt, Homo Sapiens
ugaaauguggcuagugugacugagaaacugaa

SEQ ID NO: 89256 - RNA, 32 nt, Homo Sapiens
ugaucagagauaaacuauuaaaacuuuaaaaa

SEQ ID NO: 89257 - RNA, 32 nt, Homo Sapiens
augaaaaaacauaaguuuuuuuccaaaauaua

SEQ ID NO: 89258 - RNA, 32 nt, Homo Sapiens
aaccaaggcacgcagcauguccccucaggucu

SEQ ID NO: 89259 - RNA, 32 nt, Homo Sapiens
gagcccgguggcggcgaggaccggcaggcgcg

SEQ ID NO: 89260 - RNA, 27 nt, Homo Sapiens
gcugcuuucuucuucagaucugccacc

SEQ ID NO: 89261 - RNA, 32 nt, Homo Sapiens
acaugcggcuguuuaaaguuaagccaauuaaa

SEQ ID NO: 89262 - RNA, 32 nt, Homo Sapiens
ucaagggacaacuuuuuuaacuuuggagaaaa

SEQ ID NO: 89263 - RNA, 32 nt, Homo Sapiens
gagacuccgguugauagcaccacaauggcuuu

SEQ ID NO: 89264 - RNA, 32 nt, Homo Sapiens
uuccacaagaaaagguuguuuucauguuuggg

SEQ ID NO: 89265 - RNA, 32 nt, Homo Sapiens
agcaguggccuugauuugucuuuuggaagauu

SEQ ID NO: 89266 - RNA, 32 nt, Homo Sapiens
aacauagcugaggaacaaauagaccauuucca

SEQ ID NO: 89267 - RNA, 32 nt, Homo Sapiens
uugcaacccgagcgcgcacgcucugcgcucgg

SEQ ID NO: 89268 - RNA, 32 nt, Homo Sapiens
gcuuguuugaagaaaaucaugacauuccaagu

SEQ ID NO: 89269 - RNA, 32 nt, Homo Sapiens
gggcgcggguggcggaggcgauugaagcugcu

SEQ ID NO: 89270 - RNA, 32 nt, Homo Sapiens
cgccagggagagaaggggagugcggagccccg

SEQ ID NO: 89271 - RNA, 32 nt, Homo Sapiens
aguuuucuuuugcugcuauuaugguaaauuac

SEQ ID NO: 89272 - RNA, 32 nt, Homo Sapiens
ucacagggaccaagcccucaggagacacacac

SEQ ID NO: 89273 - RNA, 32 nt, Homo Sapiens
ugagagggagugacccugcugcugcugcugua

SEQ ID NO: 89274 - RNA, 32 nt, Homo Sapiens
guuauaaguaacacagaagaagaauggaugaa

SEQ ID NO: 89275 - RNA, 32 nt, Homo Sapiens
accaaagacagagggagcuucacugagacuca

SEQ ID NO: 89276 - RNA, 32 nt, Homo Sapiens
auuuuaaaugcuugacccucuugcuuggaguu

SEQ ID NO: 89277 - RNA, 32 nt, Homo Sapiens
uugcucugcuggaagcuggagggugcuaggcc

SEQ ID NO: 89278 - RNA, 32 nt, Homo Sapiens
ccuugucucccucucugaacccgcccaucgug

SEQ ID NO: 89279 - RNA, 32 nt, Homo Sapiens
ugaaccacaaaacagcacuauuuauuuagccu

SEQ ID NO: 89280 - RNA, 32 nt, Homo Sapiens
uagaaaaacaaauguuuaugcuaaaaauaaca

SEQ ID NO: 89281 - RNA, 32 nt, Homo Sapiens
cucccuacacugggcuuauagacgggcaaguc

SEQ ID NO: 89282 - RNA, 32 nt, Homo Sapiens
aaugauuuaaauuuauaauuaaguaaauuaca

SEQ ID NO: 89283 - RNA, 31 nt, Homo Sapiens
uuucaauaggaugcauagguauauuacguuu

SEQ ID NO: 89284 - RNA, 32 nt, Homo Sapiens
ccaggaaagggagcgaggacagcgcugguucc

SEQ ID NO: 89285 - RNA, 32 nt, Homo Sapiens
caguaaacagauucgaauuuuacuucugaacg

SEQ ID NO: 89286 - RNA, 32 nt, Homo Sapiens
agauugaucauuuugaggcugggugcaguggc

SEQ ID NO: 89287 - RNA, 32 nt, Homo Sapiens
aaagaaguuucuuauuuaaacaucucagacgc

SEQ ID NO: 89288 - RNA, 32 nt, Homo Sapiens
uggaagcagggcaccggcugcuggggugggac

SEQ ID NO: 89289 - RNA, 32 nt, Homo Sapiens
aggcccuuccggcgcgcacccggaccccggcg

SEQ ID NO: 89290 - RNA, 32 nt, Homo Sapiens
uggaguccuggcuggagguccucccccagugg

SEQ ID NO: 89291 - RNA, 32 nt, Homo Sapiens
ucuccugucgagauugaaugugccaaauggcu

SEQ ID NO: 89292 - RNA, 32 nt, Homo Sapiens
ggcagaaggcuucuugccuccuccgugugagc

SEQ ID NO: 89293 - RNA, 32 nt, Homo Sapiens
acaccgguggccggggagcagcagcccaggca

SEQ ID NO: 89294 - RNA, 32 nt, Homo Sapiens
ugcccgcccggggaguuuccgcggcggccucu

SEQ ID NO: 89295 - RNA, 32 nt, Homo Sapiens
cagcccacauucaaggggagaggaaguaagca

SEQ ID NO: 89296 - RNA, 32 nt, Homo Sapiens
ccucugcauggcaggaguaacuucugugccuu

SEQ ID NO: 89297 - RNA, 32 nt, Homo Sapiens
uaaaaucuauuuacaaaaaugguucaugugua

SEQ ID NO: 89298 - RNA, 32 nt, Homo Sapiens
gccaugauuuacacagacgugccuagcauggc

SEQ ID NO: 89299 - RNA, 32 nt, Homo Sapiens
aagugcugucuccagcucacuccuggaaaaac

SEQ ID NO: 89300 - RNA, 32 nt, Homo Sapiens
uugcugaggaagagcuugaugaucuugacucc

SEQ ID NO: 89301 - RNA, 32 nt, Homo Sapiens
agccacgcacacagaagccugcuggaagacag

SEQ ID NO: 89302 - RNA, 32 nt, Homo Sapiens
cacaacuccuuaccaaggcuccagguuggggg

SEQ ID NO: 89303 - RNA, 32 nt, Homo Sapiens
ugccaugggccgggaccccccuccccaccccc

SEQ ID NO: 89304 - RNA, 32 nt, Homo Sapiens
gggacuuccuuccuccaccgcacggcaacaaa

SEQ ID NO: 89305 - RNA, 32 nt, Homo Sapiens
caagauccccccagccugacgggccgcuuacc

SEQ ID NO: 89306 - RNA, 32 nt, Homo Sapiens
ugaccuggugucucuguacccgcggcuccuga

SEQ ID NO: 89307 - RNA, 32 nt, Homo Sapiens
uguguuuguauccauguuuuuauccauucaac

SEQ ID NO: 89308 - RNA, 32 nt, Homo Sapiens
cagacuauuuaacuugaggguaauaaacuuag

SEQ ID NO: 89309 - RNA, 32 nt, Homo Sapiens
ccugucccuggcggccaggccauugccuuccc

SEQ ID NO: 89310 - RNA, 32 nt, Homo Sapiens
ucuucccgauacugccuuuggagcggcuagau

SEQ ID NO: 89311 - RNA, 32 nt, Homo Sapiens
aaaguuugauuuuuuucuuagagauuauuuaa

SEQ ID NO: 89312 - RNA, 32 nt, Homo Sapiens
cugaccgccccucccacagcgcuggccgggac

SEQ ID NO: 89313 - RNA, 32 nt, Homo Sapiens
cuguuuucaaauuuauccugaggcuuuguuga

SEQ ID NO: 89314 - RNA, 32 nt, Homo Sapiens
ugaaagccgggcggcaguggaggggacagugg

SEQ ID NO: 89315 - RNA, 32 nt, Homo Sapiens
gaacuuuuaagugguuaaaacuuguauucaug

SEQ ID NO: 89316 - RNA, 32 nt, Homo Sapiens
aguacagauagucguacugaucaugagagacu

SEQ ID NO: 89317 - RNA, 32 nt, Homo Sapiens
uuuuucuuccuucaaauuuuggaccaaagucu

SEQ ID NO: 89318 - RNA, 26 nt, Homo Sapiens
gaugaggacccggcccggccaccugu

SEQ ID NO: 89319 - RNA, 32 nt, Homo Sapiens
cgccgggguuccagcccugcgccugcuccgga

SEQ ID NO: 89320 - RNA, 32 nt, Homo Sapiens
uuaucaguugcagauagccuauuuauuauaaa

SEQ ID NO: 89321 - RNA, 32 nt, Homo Sapiens
gcacugucugcacuuucuuguuuacuguuuga

SEQ ID NO: 89322 - RNA, 32 nt, Homo Sapiens
ccccuuggggcgcgaccuugugcgaggcccuc

SEQ ID NO: 89323 - RNA, 32 nt, Homo Sapiens
uccugcaucuucugccacuccccauagaagcu

SEQ ID NO: 89324 - RNA, 32 nt, Homo Sapiens
gcgaccggcugagcgucauggagggcucaggg

SEQ ID NO: 89325 - RNA, 32 nt, Homo Sapiens
caagagccguggccgccgcgggccgcguggug

SEQ ID NO: 89326 - RNA, 32 nt, Homo Sapiens
aauauuuuggaaagauuguucugaaagaaguc

SEQ ID NO: 89327 - RNA, 27 nt, Homo Sapiens
gggggccuguucuucagcccccgucag

SEQ ID NO: 89328 - RNA, 32 nt, Homo Sapiens
agugugaggcucagggugucagaacagcaucu

SEQ ID NO: 89329 - RNA, 32 nt, Homo Sapiens
gcaguucgggaacauguuggccucgagcagcc

SEQ ID NO: 89330 - RNA, 32 nt, Homo Sapiens
ggaagcguggaguucacccgcgcacucgaagu

SEQ ID NO: 89331 - RNA, 32 nt, Homo Sapiens
uauauuuuccuguccuucaauucaucaguaga

SEQ ID NO: 89332 - RNA, 32 nt, Homo Sapiens
auucccuuucccucauucagcacuucugcugg

SEQ ID NO: 89333 - RNA, 32 nt, Homo Sapiens
aauaacuugauaaaugacuuggacugauguua

SEQ ID NO: 89334 - RNA, 32 nt, Homo Sapiens
agaaauauucuuuucauacagcaaguauggga

SEQ ID NO: 89335 - RNA, 32 nt, Homo Sapiens
cuucuauuaagaccagaaaauaaaauaauuuu

SEQ ID NO: 89336 - RNA, 32 nt, Homo Sapiens
ccuauugcuucuuucuuuggguuuucacauuu

SEQ ID NO: 89337 - RNA, 32 nt, Homo Sapiens
guuuguuauaaucaaauuugacuuccuagccu

SEQ ID NO: 89338 - RNA, 32 nt, Homo Sapiens
cauuuuguuuuccugcuuccuaccucaagauc

SEQ ID NO: 89339 - RNA, 32 nt, Homo Sapiens
auguuguccaggcuggugucaaacuccugacu

SEQ ID NO: 89340 - RNA, 32 nt, Homo Sapiens
ggucacuugagcccaggaguucuagacaagcc

SEQ ID NO: 89341 - RNA, 32 nt, Homo Sapiens
cccucuuccuucccaguugcccuuaagaacug

SEQ ID NO: 89342 - RNA, 32 nt, Homo Sapiens
uccuggaccagccccaggcuccugugcugguu

SEQ ID NO: 89343 - RNA, 32 nt, Homo Sapiens
ggaccauaccgggucuugauucagucacaugg

SEQ ID NO: 89344 - RNA, 32 nt, Homo Sapiens
ggaaacugagcagcugccggacgccuggguca

SEQ ID NO: 89345 - RNA, 32 nt, Homo Sapiens
ucuuagaguaaaaugugucucaucucuaucag

SEQ ID NO: 89346 - RNA, 30 nt, Homo Sapiens
aggccaugaaggugaagaagggcggcggug

SEQ ID NO: 89347 - RNA, 32 nt, Homo Sapiens
ggggcggcgggugggaagaggacuaccagagg

SEQ ID NO: 89348 - RNA, 32 nt, Homo Sapiens
agagaggauuaggggccugaaaaagcugacaa

SEQ ID NO: 89349 - RNA, 32 nt, Homo Sapiens
agccucgaccucagcauccagaaccgcggugg

SEQ ID NO: 89350 - RNA, 32 nt, Homo Sapiens
aacuaaacucaaauaugucuuuucucauauau

SEQ ID NO: 89351 - RNA, 32 nt, Homo Sapiens
uuuacuagaccuuugggggacucuuauaaugg

SEQ ID NO: 89352 - RNA, 32 nt, Homo Sapiens
ggugccuaauuuauuaaagagaauuagcuuag

SEQ ID NO: 89353 - RNA, 32 nt, Homo Sapiens
uuuuuucacuguuuacuagugaaaugagaaaa

SEQ ID NO: 89354 - RNA, 32 nt, Homo Sapiens
gagaacacccagucuggggcgaggggagcgcu

SEQ ID NO: 89355 - RNA, 32 nt, Homo Sapiens
aggucccggccgaguguggcgcagcaguggcg

SEQ ID NO: 89356 - RNA, 32 nt, Homo Sapiens
gcauaauguuggauugaaucuacauuuuggca

SEQ ID NO: 89357 - RNA, 32 nt, Homo Sapiens
uuuugugagguauacauauuguggaauugacu

SEQ ID NO: 89358 - RNA, 31 nt, Homo Sapiens
gcugugaaauaaaagucuggugugccaaaaa

SEQ ID NO: 89359 - RNA, 32 nt, Homo Sapiens
ccacucucauucauauccucaaacacggugcu

SEQ ID NO: 89360 - RNA, 32 nt, Homo Sapiens
gauuuauccauccucuucugaagugcucugcu

SEQ ID NO: 89361 - RNA, 32 nt, Homo Sapiens
aaauuuugugaaauauaacuuacaaauaagua

SEQ ID NO: 89362 - RNA, 32 nt, Homo Sapiens
cccugcucggcauaaugaccuuauuaagucca

SEQ ID NO: 89363 - RNA, 32 nt, Homo Sapiens
cagaagcuacccaaauuugaaccaucucugcc

SEQ ID NO: 89364 - RNA, 32 nt, Homo Sapiens
cugucacccccgcuccucucccccaggaggcu

SEQ ID NO: 89365 - RNA, 32 nt, Homo Sapiens
aauggaaauuuccugcccucuggguuccccau

SEQ ID NO: 89366 - RNA, 32 nt, Homo Sapiens
auaaaccacaggcgaaagaggaugcugcauug

SEQ ID NO: 89367 - RNA, 32 nt, Homo Sapiens
uuauucugucuccuuauguugccauaugaaua

SEQ ID NO: 89368 - RNA, 32 nt, Homo Sapiens
gcaacaacccucacauaugcacugaguaaagg

SEQ ID NO: 89369 - RNA, 32 nt, Homo Sapiens
auaaugguacuauuuagaagcccaguuagucu

SEQ ID NO: 89370 - RNA, 32 nt, Homo Sapiens
aaguagugcaggguuugccuugaaaccauuac

SEQ ID NO: 89371 - RNA, 32 nt, Homo Sapiens
uacuaugaauccagaauaaacacgccaagaua

SEQ ID NO: 89372 - RNA, 32 nt, Homo Sapiens
aggcaggaaaaugugacccagaugggggugcu

SEQ ID NO: 89373 - RNA, 32 nt, Homo Sapiens
cuucucagacugcuuucaggauuccuauguag

SEQ ID NO: 89374 - RNA, 32 nt, Homo Sapiens
ccccguguuccuccugcccacccugccccacu

SEQ ID NO: 89375 - RNA, 32 nt, Homo Sapiens
cuagcaacagagcgauaccuuguuucuuacuu

SEQ ID NO: 89376 - RNA, 32 nt, Homo Sapiens
aaauuagcugggugugguggcgggugccugua

SEQ ID NO: 89377 - RNA, 32 nt, Homo Sapiens
ugcaaggggcucauccugggacucuggaagcu

SEQ ID NO: 89378 - RNA, 32 nt, Homo Sapiens
aaagggguuuaccauggaagagaagauccagg

SEQ ID NO: 89379 - RNA, 32 nt, Homo Sapiens
uaaccaaagcuuaccagaccacaggaggguca

SEQ ID NO: 89380 - RNA, 32 nt, Homo Sapiens
aauugugcauucaaaugaugguacuuugacuu

SEQ ID NO: 89381 - RNA, 32 nt, Homo Sapiens
uccuccuguauuuccucccuccccuuaguugu

SEQ ID NO: 89382 - RNA, 32 nt, Homo Sapiens
ggaccugggacgggucugggcggcucucggug

SEQ ID NO: 89383 - RNA, 32 nt, Homo Sapiens
uuuaucucuuuaaucuuuuuuauuauuaaaag

SEQ ID NO: 89384 - RNA, 32 nt, Homo Sapiens
ggcuucuccgcggacagcuagggagagugucc

SEQ ID NO: 89385 - RNA, 32 nt, Homo Sapiens
gauggcgaacguggggcugcaguuccaggcga

SEQ ID NO: 89386 - RNA, 32 nt, Homo Sapiens
cauauaccagugcgugugcgucuaccucuguc

SEQ ID NO: 89387 - RNA, 32 nt, Homo Sapiens
cccuuuguuuuaaagugaacauuuaccuuuau

SEQ ID NO: 89388 - RNA, 32 nt, Homo Sapiens
aaacuauuguuaucuuuuuuuuuccuuuucac

SEQ ID NO: 89389 - RNA, 32 nt, Homo Sapiens
uguuucaauauuuuccuucucucucaauuuuc

SEQ ID NO: 89390 - RNA, 32 nt, Homo Sapiens
gaaaucaagggucagugagcuaguuguguaug

SEQ ID NO: 89391 - RNA, 32 nt, Homo Sapiens
ugacgcuccaccucccaccuccaaguccuccu

SEQ ID NO: 89392 - RNA, 32 nt, Homo Sapiens
aauggggaaaugaggaucgaucaugagugauu

SEQ ID NO: 89393 - RNA, 32 nt, Homo Sapiens
ucuaaucugaauaguaauaauaauaauaauua

SEQ ID NO: 89394 - RNA, 32 nt, Homo Sapiens
auggugcagagguaggcauucugagcagggga

SEQ ID NO: 89395 - RNA, 32 nt, Homo Sapiens
agccccaaacuccccucccaaaucaacugaaa

SEQ ID NO: 89396 - RNA, 32 nt, Homo Sapiens
cacauauacauccagauggccugaaguuacug

SEQ ID NO: 89397 - RNA, 32 nt, Homo Sapiens
auauuagcaggcaagauagagauggaaaggga

SEQ ID NO: 89398 - RNA, 32 nt, Homo Sapiens
ccugcaguucccagcccucggagcccccaucc

SEQ ID NO: 89399 - RNA, 32 nt, Homo Sapiens
auauugcaugcauauugacuaauuggaauaac

SEQ ID NO: 89400 - RNA, 32 nt, Homo Sapiens
auaugcuaaaagaaugcagaaaaucauuuuau

SEQ ID NO: 89401 - RNA, 32 nt, Homo Sapiens
uaagauuguuaugacaaccauacucuaugcau

SEQ ID NO: 89402 - RNA, 32 nt, Homo Sapiens
auucauuuuuaaaauauuuggaaggucugagc

SEQ ID NO: 89403 - RNA, 32 nt, Homo Sapiens
auauuguauucaaaugcuguaucuuucaugaa

SEQ ID NO: 89404 - RNA, 32 nt, Homo Sapiens
aagccagccuacuccuucuuacauagcuucuc

SEQ ID NO: 89405 - RNA, 30 nt, Homo Sapiens
auuuugcuauuugccaccauccugguuuuu

SEQ ID NO: 89406 - RNA, 31 nt, Homo Sapiens
cgcaucauggaccucgcgggacugcugaagu

SEQ ID NO: 89407 - RNA, 32 nt, Homo Sapiens
gagcugugauuaccucacugcauuccagccug

SEQ ID NO: 89408 - RNA, 32 nt, Homo Sapiens
cugcccugccccaccccaccucacagcuacuc

SEQ ID NO: 89409 - RNA, 32 nt, Homo Sapiens
gagacaaggucucacugucacccaggccggag

SEQ ID NO: 89410 - RNA, 32 nt, Homo Sapiens
cacaaguggaccgggguguugggugcuagucg

SEQ ID NO: 89411 - RNA, 32 nt, Homo Sapiens
ugagugguggggcuggagggcugggguuaggg

SEQ ID NO: 89412 - RNA, 32 nt, Homo Sapiens
acugcucuucccuccccucuccagcuacauac

SEQ ID NO: 89413 - RNA, 31 nt, Homo Sapiens
gaccuugagccccagugcaggccugcugguc

SEQ ID NO: 89414 - RNA, 32 nt, Homo Sapiens
aagguaaaaggcucacuuuguuuuccaguggg

SEQ ID NO: 89415 - RNA, 32 nt, Homo Sapiens
cucccgggcuccuucccagcagcccucucagg

SEQ ID NO: 89416 - RNA, 32 nt, Homo Sapiens
gcccucagcuggagaagcugccuccgccccac

SEQ ID NO: 89417 - RNA, 32 nt, Homo Sapiens
aaugcccagccaguuagcacaaaggaaaacau

SEQ ID NO: 89418 - RNA, 32 nt, Homo Sapiens
cugcugccugccagaggcguggcaccucaccu

SEQ ID NO: 89419 - RNA, 32 nt, Homo Sapiens
agccugaagauaacuugaaucaguuguaaaag

SEQ ID NO: 89420 - RNA, 32 nt, Homo Sapiens
uuuuuuuuacacauauuugcauauguaugaua

SEQ ID NO: 89421 - RNA, 28 nt, Homo Sapiens
uucuaguggggaaacauuauugagaagc

SEQ ID NO: 89422 - RNA, 32 nt, Homo Sapiens
gcuuauuguauauaauuacaauguaaauagcu

SEQ ID NO: 89423 - RNA, 32 nt, Homo Sapiens
uugggcugcuccucaugguggguucaggggac

SEQ ID NO: 89424 - RNA, 32 nt, Homo Sapiens
ggacuuggagcuacagaccuuuuacauccauc

SEQ ID NO: 89425 - RNA, 32 nt, Homo Sapiens
aggacaacccucaaaugaagaagggagcagac

SEQ ID NO: 89426 - RNA, 32 nt, Homo Sapiens
cugaggucgaaaguuugagaccagccuggccc

SEQ ID NO: 89427 - RNA, 32 nt, Homo Sapiens
ggucucaagaugcacaaugcgggagccaggug

SEQ ID NO: 89428 - RNA, 32 nt, Homo Sapiens
accacaggccucuggaaucagaaucuucaggg

SEQ ID NO: 89429 - RNA, 32 nt, Homo Sapiens
agcuuuacuguuuguuauggcuuaaugacacu

SEQ ID NO: 89430 - RNA, 32 nt, Homo Sapiens
ggaaaaaacuaaaguucauauggaaccaaaaa

SEQ ID NO: 89431 - RNA, 32 nt, Homo Sapiens
caacucauuuaucuucugugaggugggauuuu

SEQ ID NO: 89432 - RNA, 32 nt, Homo Sapiens
gcuuacacuacuuagaaaaucaccuuuucaga

SEQ ID NO: 89433 - RNA, 32 nt, Homo Sapiens
cuauagaaaccucagcuagugugccgaggagu

SEQ ID NO: 89434 - RNA, 32 nt, Homo Sapiens
cucccuggggguggcgggagggggaggcuuga

SEQ ID NO: 89435 - RNA, 32 nt, Homo Sapiens
uagugggcaggaggcucugugucuuaaaggcc

SEQ ID NO: 89436 - RNA, 32 nt, Homo Sapiens
ccccggcacugcucagccugcugggguggggg

SEQ ID NO: 89437 - RNA, 32 nt, Homo Sapiens
uagucuuuugcuuuuggcaaaacucuacuuaa

SEQ ID NO: 89438 - RNA, 32 nt, Homo Sapiens
aggcaaguuguagucaucaacaacaaaagaau

SEQ ID NO: 89439 - RNA, 28 nt, Homo Sapiens
cauaugguguuguauauuauaaacuggu

SEQ ID NO: 89440 - RNA, 32 nt, Homo Sapiens
cucagaaaaacacacaagaacaauaacacagc

SEQ ID NO: 89441 - RNA, 32 nt, Homo Sapiens
gagggucgucuggccugcuugcugggucuuug

SEQ ID NO: 89442 - RNA, 32 nt, Homo Sapiens
ggaggguguuugugcacaauagcucugcagua

SEQ ID NO: 89443 - RNA, 32 nt, Homo Sapiens
gcagggccucgugcgggggccgggagcagcgc

SEQ ID NO: 89444 - RNA, 32 nt, Homo Sapiens
cuaaugacacuuuaauuguuuuucuuuaucua

SEQ ID NO: 89445 - RNA, 32 nt, Homo Sapiens
uuuuaaaaacaucgguaucgggagcugcggug

SEQ ID NO: 89446 - RNA, 32 nt, Homo Sapiens
ggaugcaccccucagggagccuggccagaguu

SEQ ID NO: 89447 - RNA, 32 nt, Homo Sapiens
ucuugcccccucccccccuccccuccccucuc

SEQ ID NO: 89448 - RNA, 32 nt, Homo Sapiens
cuaugacacaauuuaaauuauuucaauuuuuu

SEQ ID NO: 89449 - RNA, 32 nt, Homo Sapiens
auguaccuggggauucagagccagcggcggaa

SEQ ID NO: 89450 - RNA, 32 nt, Homo Sapiens
uugggcuagccuggucccacgcucucaggggg

SEQ ID NO: 89451 - RNA, 32 nt, Homo Sapiens
aaauuccagaaauaugcaucacuuccuaauua

SEQ ID NO: 89452 - RNA, 32 nt, Homo Sapiens
aaggaggacagagccaaugcccgccccaucgu

SEQ ID NO: 89453 - RNA, 32 nt, Homo Sapiens
acccggugcccucuccuugccagcuucucccc

SEQ ID NO: 89454 - RNA, 32 nt, Homo Sapiens
uccacauauauucgacuuuaugggagaaaauu

SEQ ID NO: 89455 - RNA, 32 nt, Homo Sapiens
acugauuuguacgucugacugagagaaagaug

SEQ ID NO: 89456 - RNA, 32 nt, Homo Sapiens
uucagcuggaccacucaggccuggacagccuc

SEQ ID NO: 89457 - RNA, 32 nt, Homo Sapiens
aucuaccaaaaauuucaaauaaagucaaaccc

SEQ ID NO: 89458 - RNA, 32 nt, Homo Sapiens
cagcugauccugaaagucuuggggagaucuug

SEQ ID NO: 89459 - RNA, 32 nt, Homo Sapiens
ccuauggucaacaucugggcugugaugggcag

SEQ ID NO: 89460 - RNA, 32 nt, Homo Sapiens
acuguguggccggcccggggccagcgccgccc

SEQ ID NO: 89461 - RNA, 32 nt, Homo Sapiens
gcacauuguauuacuuacugcaagagauauuu

SEQ ID NO: 89462 - RNA, 32 nt, Homo Sapiens
gagucagaccucuggacaacgugcaguuuggc

SEQ ID NO: 89463 - RNA, 32 nt, Homo Sapiens
cagaauaagcaauauggugugcauguaaaccu

SEQ ID NO: 89464 - RNA, 32 nt, Homo Sapiens
cagagacugaucuugaauaugauccuuuccuc

SEQ ID NO: 89465 - RNA, 32 nt, Homo Sapiens
augacucuauacuuauggaaauguagaaacaa

SEQ ID NO: 89466 - RNA, 31 nt, Homo Sapiens
agcuugggggcggugucagcuucggcuacug

SEQ ID NO: 89467 - RNA, 32 nt, Homo Sapiens
accaauaaugaaauagaccuuuaugaaaacug

SEQ ID NO: 89468 - RNA, 32 nt, Homo Sapiens
uuccuuugcucgaugucagugauucagauaac

SEQ ID NO: 89469 - RNA, 32 nt, Homo Sapiens
ccauugucuuuuaaauucguguuggcuucuca

SEQ ID NO: 89470 - RNA, 32 nt, Homo Sapiens
cccaggucuccaugguuaguugaagccaauuu

SEQ ID NO: 89471 - RNA, 32 nt, Homo Sapiens
ccucugcucccucuuccucuagcugagagugg

SEQ ID NO: 89472 - RNA, 32 nt, Homo Sapiens
uccuguuuuuaaaauauacaauuauucuuaaa

SEQ ID NO: 89473 - RNA, 32 nt, Homo Sapiens
aagcacugcaagcagcacauucucaagagcac

SEQ ID NO: 89474 - RNA, 32 nt, Homo Sapiens
cgauggacgcugccugccgccggcccugcucu

SEQ ID NO: 89475 - RNA, 32 nt, Homo Sapiens
aauaauagcuuaauuguacaaauaacuaagag

SEQ ID NO: 89476 - RNA, 32 nt, Homo Sapiens
caucacagcucucuccuuccugggccaggaug

SEQ ID NO: 89477 - RNA, 32 nt, Homo Sapiens
cagcugcaccucucagcgucuccagcuccagg

SEQ ID NO: 89478 - RNA, 32 nt, Homo Sapiens
gcuagaaacaucaucauuauuaaacuucagaa

SEQ ID NO: 89479 - RNA, 32 nt, Homo Sapiens
cacacgcccuccccuuuuggcuucacgccauc

SEQ ID NO: 89480 - RNA, 32 nt, Homo Sapiens
gugccugucagcgugcagcccccgucccagua

SEQ ID NO: 89481 - RNA, 32 nt, Homo Sapiens
aacagccugaacuagcauagaagugcuauccc

SEQ ID NO: 89482 - RNA, 32 nt, Homo Sapiens
ugugggaccugggccugacgggcccuucucag

SEQ ID NO: 89483 - RNA, 32 nt, Homo Sapiens
cgcuggauccugcgccucuggacgugcuagcc

SEQ ID NO: 89484 - RNA, 32 nt, Homo Sapiens
aucuuugggaagcuccacaaauucauuugccu

SEQ ID NO: 89485 - RNA, 32 nt, Homo Sapiens
acaauuaacaauaauuuuagguauggaauguu

SEQ ID NO: 89486 - RNA, 32 nt, Homo Sapiens
agaaaaucccaccuccccugaccuccaccacc

SEQ ID NO: 89487 - RNA, 32 nt, Homo Sapiens
uuuuuuccagcucccaaauucccuuuauucca

SEQ ID NO: 89488 - RNA, 32 nt, Homo Sapiens
auaauauucugacaccaaaagugagagaagua

SEQ ID NO: 89489 - RNA, 32 nt, Homo Sapiens
cuucauuuucaaugaugagucuuuuaaaauac

SEQ ID NO: 89490 - RNA, 32 nt, Homo Sapiens
caugcacgugugugcacguacacacacauaca

SEQ ID NO: 89491 - RNA, 32 nt, Homo Sapiens
gaaagaggccuugauuuaaagguuucguguca

SEQ ID NO: 89492 - RNA, 32 nt, Homo Sapiens
gcaaauguuuacauucaauuaaggggaaaaag

SEQ ID NO: 89493 - RNA, 32 nt, Homo Sapiens
uaagcaaagacuuggauugacuuuacauucau

SEQ ID NO: 89494 - RNA, 32 nt, Homo Sapiens
gauucaguuuagagauaaauguuaacaguaau

SEQ ID NO: 89495 - RNA, 32 nt, Homo Sapiens
gagggaccuucccugcccugcugggggugcuc

SEQ ID NO: 89496 - RNA, 32 nt, Homo Sapiens
cagagcugggugcagacauacacacacacaua

SEQ ID NO: 89497 - RNA, 32 nt, Homo Sapiens
agaggauuaugaggaauccuuucuaugugauu

SEQ ID NO: 89498 - RNA, 32 nt, Homo Sapiens
aauaaauacauggcgggaaacacacaggcaug

SEQ ID NO: 89499 - RNA, 32 nt, Homo Sapiens
ucucuucucuuucaaaauguacuucaagcaug

SEQ ID NO: 89500 - RNA, 31 nt, Homo Sapiens
aucaggaaaggcuaaauaaauauuuuaaaag

SEQ ID NO: 89501 - RNA, 32 nt, Homo Sapiens
agccaggccccggcccggggugcuggggcuuc

SEQ ID NO: 89502 - RNA, 32 nt, Homo Sapiens
caggugcgggauauaaucuuguggcgcgccgu

SEQ ID NO: 89503 - RNA, 32 nt, Homo Sapiens
uggaggcaaccucaguauaggaacugccacuu

SEQ ID NO: 89504 - RNA, 32 nt, Homo Sapiens
cuaauaaaaguccccagcuucuggagaccccc

SEQ ID NO: 89505 - RNA, 32 nt, Homo Sapiens
ugacaaccugaucucguuuacuccauguuaau

SEQ ID NO: 89506 - RNA, 32 nt, Homo Sapiens
agacaacacauuuggugacuaaauuuggaauc

SEQ ID NO: 89507 - RNA, 32 nt, Homo Sapiens
uggaugcaacugagugauuuaguugcuugggu

SEQ ID NO: 89508 - RNA, 32 nt, Homo Sapiens
ugacauuuacacauuuuacagauuuuuguuug

SEQ ID NO: 89509 - RNA, 32 nt, Homo Sapiens
cuuccaacuccagccucucaugggaugguaca

SEQ ID NO: 89510 - RNA, 32 nt, Homo Sapiens
agccauuuauuagucuaauauuccuucacuaa

SEQ ID NO: 89511 - RNA, 32 nt, Homo Sapiens
cuaucuguuuucuuuuggauagaagcagucag

SEQ ID NO: 89512 - RNA, 32 nt, Homo Sapiens
ggaccuccaagcccaggaagccucaguuggcc

SEQ ID NO: 89513 - RNA, 32 nt, Homo Sapiens
ccuggaagcucggacuacaggcacgagccacc

SEQ ID NO: 89514 - RNA, 32 nt, Homo Sapiens
ggcccuuuggucugcuggcuguggaggguggg

SEQ ID NO: 89515 - RNA, 32 nt, Homo Sapiens
uuaccaugucauucugaaauuuuucucuacua

SEQ ID NO: 89516 - RNA, 32 nt, Homo Sapiens
ccggugggagccagcggcgcgcggugggaccc

SEQ ID NO: 89517 - RNA, 32 nt, Homo Sapiens
uaucacgcagcuuauauucaguuuacauaaag

SEQ ID NO: 89518 - RNA, 32 nt, Homo Sapiens
gggcuauauaccuuuccacaccuuaaaaccau

SEQ ID NO: 89519 - RNA, 32 nt, Homo Sapiens
cugcaaaccagcgcuuccuggacggggccagc

SEQ ID NO: 89520 - RNA, 32 nt, Homo Sapiens
cccugcgcacucucuggucaucgccugggagg

SEQ ID NO: 89521 - RNA, 32 nt, Homo Sapiens
gugugggggugguggugcugcaggggcagggc

SEQ ID NO: 89522 - RNA, 32 nt, Homo Sapiens
uaaaaugaucauugggaauuuauuuugaaagu

SEQ ID NO: 89523 - RNA, 32 nt, Homo Sapiens
agugcuaauguuuuauugcauaguagggugac

SEQ ID NO: 89524 - RNA, 32 nt, Homo Sapiens
ugccgagggagcagggggcgcccguggaacug

SEQ ID NO: 89525 - RNA, 32 nt, Homo Sapiens
gcaaaaaaguguuaauaaaaugcucuauuuau

SEQ ID NO: 89526 - RNA, 32 nt, Homo Sapiens
cgcagcaccacaaccucaguucgucgugaaga

SEQ ID NO: 89527 - RNA, 32 nt, Homo Sapiens
aagauccuggggaaaggagagaccauggugug

SEQ ID NO: 89528 - RNA, 32 nt, Homo Sapiens
cauggggcucacugaggccuuguuuuuugguu

SEQ ID NO: 89529 - RNA, 32 nt, Homo Sapiens
aaacucacuucucagucacuuccacagccgau

SEQ ID NO: 89530 - RNA, 32 nt, Homo Sapiens
ccuucuuugcagcugggccucucuauaccccu

SEQ ID NO: 89531 - RNA, 32 nt, Homo Sapiens
cagaccuguccuccugguggguccaggggccc

SEQ ID NO: 89532 - RNA, 32 nt, Homo Sapiens
gccuucuuaaggaaaccauuugauaggaaaga

SEQ ID NO: 89533 - RNA, 32 nt, Homo Sapiens
gcccuccuccccacccucaugacugggaagga

SEQ ID NO: 89534 - RNA, 32 nt, Homo Sapiens
ggcacagggcguggacugggccccagcagcag

SEQ ID NO: 89535 - RNA, 32 nt, Homo Sapiens
cacuguacugcagacugagugaaacagcaaga

SEQ ID NO: 89536 - RNA, 32 nt, Homo Sapiens
uuaaacauugaaaugcacaaacagacugaaau

SEQ ID NO: 89537 - RNA, 32 nt, Homo Sapiens
auagguggucugaacguggugucucacucuga

SEQ ID NO: 89538 - RNA, 32 nt, Homo Sapiens
gcuacacggaggaacugcugcggcacguggcc

SEQ ID NO: 89539 - RNA, 32 nt, Homo Sapiens
acaugugacaguuaaaauuaaguaaaauuaaa

SEQ ID NO: 89540 - RNA, 32 nt, Homo Sapiens
cucugcucauuuagucccgucuuccucaccgc

SEQ ID NO: 89541 - RNA, 27 nt, Homo Sapiens
uguaaauaaaaagaaauggcugaaaga

SEQ ID NO: 89542 - RNA, 32 nt, Homo Sapiens
aaccagaaaugaauggagcucgacuggaaagg

SEQ ID NO: 89543 - RNA, 32 nt, Homo Sapiens
aaugccuuuaaaauguucugucuguagguaca

SEQ ID NO: 89544 - RNA, 32 nt, Homo Sapiens
cucauucuggugggcuucggcgccugcaucua

SEQ ID NO: 89545 - RNA, 32 nt, Homo Sapiens
uagguuuucuuugugcuucucauuuuuccuuu

SEQ ID NO: 89546 - RNA, 32 nt, Homo Sapiens
aucguugaugacuuauggauucugucaguuca

SEQ ID NO: 89547 - RNA, 32 nt, Homo Sapiens
ucaguguuguggugacucagggccuucaccau

SEQ ID NO: 89548 - RNA, 32 nt, Homo Sapiens
gacuggacauacuugcuucaauaaaagaauac

SEQ ID NO: 89549 - RNA, 32 nt, Homo Sapiens
gagggcuucguggaugcccugcaccggguccg

SEQ ID NO: 89550 - RNA, 26 nt, Homo Sapiens
caugggcgccccugccugcgcccucg

SEQ ID NO: 89551 - RNA, 32 nt, Homo Sapiens
aagagaccaacccuuuaaggacccagacgcug

SEQ ID NO: 89552 - RNA, 32 nt, Homo Sapiens
ggauccaggaggagcaggggccagcagugggc

SEQ ID NO: 89553 - RNA, 32 nt, Homo Sapiens
cagggucuuccuccccaucuuuccauccuucc

SEQ ID NO: 89554 - RNA, 32 nt, Homo Sapiens
ucuuccgcuuucucgucaggcuccugcaaccc

SEQ ID NO: 89555 - RNA, 32 nt, Homo Sapiens
aagaaauggaaugaaucuccaaggcuuuuagg

SEQ ID NO: 89556 - RNA, 32 nt, Homo Sapiens
aaacuaguauaacccuauuucucuauaucaca

SEQ ID NO: 89557 - RNA, 32 nt, Homo Sapiens
ggaccagggaggugcaggugucugcaguguca

SEQ ID NO: 89558 - RNA, 32 nt, Homo Sapiens
aaagaugucaacacuguggagauugugcuaug

SEQ ID NO: 89559 - RNA, 32 nt, Homo Sapiens
agagcccuugcuggccaccccuggaacaugcc

SEQ ID NO: 89560 - RNA, 32 nt, Homo Sapiens
auuugauuauuccucccuuugaaaaaauaguc

SEQ ID NO: 89561 - RNA, 32 nt, Homo Sapiens
gguaguuaacacaucaaauauuucuugcugcu

SEQ ID NO: 89562 - RNA, 32 nt, Homo Sapiens
ugcuggcagacacccuggucacccaggacaga

SEQ ID NO: 89563 - RNA, 32 nt, Homo Sapiens
uugguguuucccuuucaagaugccacuuucag

SEQ ID NO: 89564 - RNA, 32 nt, Homo Sapiens
aagcugccaaaauaguugaagcuuaauuacuu

SEQ ID NO: 89565 - RNA, 32 nt, Homo Sapiens
ugaccaacuuugauuuccaaagguggaguuac

SEQ ID NO: 89566 - RNA, 32 nt, Homo Sapiens
gugaguuugacaaauccugcaguguuuccagg

SEQ ID NO: 89567 - RNA, 32 nt, Homo Sapiens
cacgguuaagacuuuagccauggcaucuguau

SEQ ID NO: 89568 - RNA, 32 nt, Homo Sapiens
cuccugcucacuauuucuuuuuuuuuagaugc

SEQ ID NO: 89569 - RNA, 32 nt, Homo Sapiens
uauucuaucugcaguauuuguaccuccagaau

SEQ ID NO: 89570 - RNA, 32 nt, Homo Sapiens
auugggaggggaggacuucucaguucuaacaa

SEQ ID NO: 89571 - RNA, 32 nt, Homo Sapiens
aacaauuugucaaaaauuuucugucuuauuuc

SEQ ID NO: 89572 - RNA, 32 nt, Homo Sapiens
guuucuacaaaguauauaugcaggaucagcaa

SEQ ID NO: 89573 - RNA, 32 nt, Homo Sapiens
uaaauacagauauauauuagaugacauuguua

SEQ ID NO: 89574 - RNA, 32 nt, Homo Sapiens
ugccagcccgcacugcgcaugcuuucugacgc

SEQ ID NO: 89575 - RNA, 32 nt, Homo Sapiens
cgcggguguggugaugcugcuggugcuggugg

SEQ ID NO: 89576 - RNA, 32 nt, Homo Sapiens
uggggccgaggaugcaaguccaggcagagcgg

SEQ ID NO: 89577 - RNA, 32 nt, Homo Sapiens
ccauuggacaaagcaaaucacauggccaaguc

SEQ ID NO: 89578 - RNA, 32 nt, Homo Sapiens
ugggacagagacuccccaaggaccccauucug

SEQ ID NO: 89579 - RNA, 32 nt, Homo Sapiens
gggccuagaccccuccucccauggcuagaagu

SEQ ID NO: 89580 - RNA, 32 nt, Homo Sapiens
gagaaccaaagccccaaagccccagauccccu

SEQ ID NO: 89581 - RNA, 32 nt, Homo Sapiens
agcugaccacagacugggggagccccacaggg

SEQ ID NO: 89582 - RNA, 32 nt, Homo Sapiens
uauggcccagaggggaacuugauucaaaaauu

SEQ ID NO: 89583 - RNA, 32 nt, Homo Sapiens
uaguauccaaaauauuuaaauuuaugaguguu

SEQ ID NO: 89584 - RNA, 32 nt, Homo Sapiens
uguugaggagaugaggaagaacuuuugaaaaa

SEQ ID NO: 89585 - RNA, 32 nt, Homo Sapiens
uuguccacguaucaggaaugugaaugugggac

SEQ ID NO: 89586 - RNA, 31 nt, Homo Sapiens
cuucuuuauugagcauuuaauguggacauac

SEQ ID NO: 89587 - RNA, 32 nt, Homo Sapiens
agcucccugccagcuuccugucccugugcuca

SEQ ID NO: 89588 - RNA, 32 nt, Homo Sapiens
uuuguuuuuuaaaaucaaccauguuagcuggg

SEQ ID NO: 89589 - RNA, 32 nt, Homo Sapiens
guaaucagcugaggccaugucaggagacggag

SEQ ID NO: 89590 - RNA, 32 nt, Homo Sapiens
aaaugaagcaagaaacaaaacuagucuuucaa

SEQ ID NO: 89591 - RNA, 30 nt, Homo Sapiens
caaucugucuguggcugaaaaagucuccuc

SEQ ID NO: 89592 - RNA, 32 nt, Homo Sapiens
cgucaggccagccccggcaugcucugcggccg

SEQ ID NO: 89593 - RNA, 32 nt, Homo Sapiens
cucuguggagucauugugccggaccucugaaa

SEQ ID NO: 89594 - RNA, 32 nt, Homo Sapiens
auuccgaccuucuacuuccccagaggacgccc

SEQ ID NO: 89595 - RNA, 32 nt, Homo Sapiens
caaugggagcgcggggccgggcugcccgcagg

SEQ ID NO: 89596 - RNA, 32 nt, Homo Sapiens
auuucuucuguuucagguuuugucugaguuca

SEQ ID NO: 89597 - RNA, 32 nt, Homo Sapiens
cucggagccgcucuggcccccaggcgcuggau

SEQ ID NO: 89598 - RNA, 30 nt, Homo Sapiens
uaaagagaugggacaaagacuuugaagacc

SEQ ID NO: 89599 - RNA, 32 nt, Homo Sapiens
ccucaagaggggagacagagcggcagcugcug

SEQ ID NO: 89600 - RNA, 32 nt, Homo Sapiens
aguguuuugagguuaaaaacugcuuuuugggu

SEQ ID NO: 89601 - RNA, 32 nt, Homo Sapiens
aagaccacgccgccgcgcgccgggagcugcug

SEQ ID NO: 89602 - RNA, 32 nt, Homo Sapiens
auuuguauuaccauuacuuguauaaauacacu

SEQ ID NO: 89603 - RNA, 32 nt, Homo Sapiens
aagggcauucacccauaucauucucugagcua

SEQ ID NO: 89604 - RNA, 32 nt, Homo Sapiens
ggugauccagagaaggcggagaaggaagaagu

SEQ ID NO: 89605 - RNA, 32 nt, Homo Sapiens
uuacacuuucccuucaggcauccauuaauaaa

SEQ ID NO: 89606 - RNA, 32 nt, Homo Sapiens
uuucuauuugguuuuugugcauuuucuuuuaa

SEQ ID NO: 89607 - RNA, 32 nt, Homo Sapiens
guuggcuugacaaagcauaauucucucauaac

SEQ ID NO: 89608 - RNA, 31 nt, Homo Sapiens
gcagcgcagcgcagccccaucaguccgcaaa

SEQ ID NO: 89609 - RNA, 32 nt, Homo Sapiens
gcuggcugccacgccccgaccccgcccgugcc

SEQ ID NO: 89610 - RNA, 32 nt, Homo Sapiens
cuacucggcuaugcuuuuuggaugccuuccug

SEQ ID NO: 89611 - RNA, 32 nt, Homo Sapiens
ggaggcagcaaauguuacagauccugguggug

SEQ ID NO: 89612 - RNA, 32 nt, Homo Sapiens
guaauaauuagaaaacaugaaauagggaacuc

SEQ ID NO: 89613 - RNA, 32 nt, Homo Sapiens
ccuggggccccggaccgggccuaaccgcccug

SEQ ID NO: 89614 - RNA, 32 nt, Homo Sapiens
agagcuaucauguaaaaacuacauaagguggu

SEQ ID NO: 89615 - RNA, 32 nt, Homo Sapiens
ugaacacacgcuuucugguucuaguaauccug

SEQ ID NO: 89616 - RNA, 32 nt, Homo Sapiens
uacguugugagucuguuaucuguccuaucgcg

SEQ ID NO: 89617 - RNA, 32 nt, Homo Sapiens
cuggccccaggccagcucccaucgcuggggga

SEQ ID NO: 89618 - RNA, 32 nt, Homo Sapiens
ugugacauuccacagaguuacugccacggucc

SEQ ID NO: 89619 - RNA, 32 nt, Homo Sapiens
ccaccccugccugucggacgcggcgggaggcc

SEQ ID NO: 89620 - RNA, 32 nt, Homo Sapiens
gcugccgccuccaggucuccgccccgugugug

SEQ ID NO: 89621 - RNA, 32 nt, Homo Sapiens
accagaacuuaaagcgaugacuggaugucucu

SEQ ID NO: 89622 - RNA, 32 nt, Homo Sapiens
uuuuacuuggaaagauuuuacuugcuggagug

SEQ ID NO: 89623 - RNA, 32 nt, Homo Sapiens
gcgcggggacgaagcagcacagccaucgggga

SEQ ID NO: 89624 - RNA, 32 nt, Homo Sapiens
gguuauauguugucuuuuuuuccuaugucuuu

SEQ ID NO: 89625 - RNA, 30 nt, Homo Sapiens
acgggguuucaccguguuagccaggaugau

SEQ ID NO: 89626 - RNA, 32 nt, Homo Sapiens
gagcuugaaggaccggaaguuacucuggguga

SEQ ID NO: 89627 - RNA, 32 nt, Homo Sapiens
cuuuuguagagcuuuuuuccuuuccuaagccc

SEQ ID NO: 89628 - RNA, 32 nt, Homo Sapiens
aaaaagccaaggaaaaaacagagcagaccuga

SEQ ID NO: 89629 - RNA, 32 nt, Homo Sapiens
gccugcaggagaggcugagaucagcccaccca

SEQ ID NO: 89630 - RNA, 32 nt, Homo Sapiens
aggugcuugcuggggcucucgcugguucagcc

SEQ ID NO: 89631 - RNA, 32 nt, Homo Sapiens
gcggugcggagcagaucuggugguucuccgga

SEQ ID NO: 89632 - RNA, 32 nt, Homo Sapiens
aagucacugucaaugaaaguuguuuuguuugu

SEQ ID NO: 89633 - RNA, 32 nt, Homo Sapiens
ggugccuccaugaaacaaauccaaauacccca

SEQ ID NO: 89634 - RNA, 32 nt, Homo Sapiens
ggcucuggccuggccgaguuccaggugaguag

SEQ ID NO: 89635 - RNA, 32 nt, Homo Sapiens
aaauuaacacuauguguucaguuuucuugugg

SEQ ID NO: 89636 - RNA, 32 nt, Homo Sapiens
guguccccauucaaaucucaucuugaauugua

SEQ ID NO: 89637 - RNA, 32 nt, Homo Sapiens
agagcagugaccccagcagagaggggccuggu

SEQ ID NO: 89638 - RNA, 32 nt, Homo Sapiens
cccuacccauccccugcaccucccuacucucc

SEQ ID NO: 89639 - RNA, 32 nt, Homo Sapiens
guuugaauggaggagccacagcuccuccguau

SEQ ID NO: 89640 - RNA, 32 nt, Homo Sapiens
uaacuccugcccucaagugauccaccagagag

SEQ ID NO: 89641 - RNA, 32 nt, Homo Sapiens
uuuaauacaccugguacauuucugaagagggg

SEQ ID NO: 89642 - RNA, 32 nt, Homo Sapiens
ugggccugccagcaggccagggacucagcguc

SEQ ID NO: 89643 - RNA, 32 nt, Homo Sapiens
aaauuaagacuuuauccuuguuugcuuguaaa

SEQ ID NO: 89644 - RNA, 32 nt, Homo Sapiens
gcgaucugccgcggccggcugcugggcaaaaa

SEQ ID NO: 89645 - RNA, 32 nt, Homo Sapiens
cacggccguggcgggugcccugugggugaggc

SEQ ID NO: 89646 - RNA, 32 nt, Homo Sapiens
caucuugcagccggcggcgcggauugaaugag

SEQ ID NO: 89647 - RNA, 32 nt, Homo Sapiens
gaacaccagguguggccaccuggggcucaggu

SEQ ID NO: 89648 - RNA, 32 nt, Homo Sapiens
acccacugccagcgucagccugccugaggcuu

SEQ ID NO: 89649 - RNA, 32 nt, Homo Sapiens
aggaggccaggacagaauaauaaaaggagcca

SEQ ID NO: 89650 - RNA, 32 nt, Homo Sapiens
ucuuauuuuccacaacuggauauaucuacugu

SEQ ID NO: 89651 - RNA, 32 nt, Homo Sapiens
ucuagcauccucuacucuuagcacugagaguu

SEQ ID NO: 89652 - RNA, 32 nt, Homo Sapiens
uccgggagggcggcucgcaggcaccaugacuc

SEQ ID NO: 89653 - RNA, 32 nt, Homo Sapiens
gggagcuggugccccuggcccgggccucagug

SEQ ID NO: 89654 - RNA, 32 nt, Homo Sapiens
ccuuguuaauaaaauuuugugucauaauuuac

SEQ ID NO: 89655 - RNA, 32 nt, Homo Sapiens
uaaaggucuagagugauuuguauuggauggua

SEQ ID NO: 89656 - RNA, 32 nt, Homo Sapiens
cugcuggggagagggagaaggcaggccucagg

SEQ ID NO: 89657 - RNA, 32 nt, Homo Sapiens
aaguccauuuguuguauuuucuuaaagaggga

SEQ ID NO: 89658 - RNA, 32 nt, Homo Sapiens
uguuagccaggauggucuugaucugaccucgu

SEQ ID NO: 89659 - RNA, 32 nt, Homo Sapiens
ccagccgaggucgggccgggggcgguggggga

SEQ ID NO: 89660 - RNA, 32 nt, Homo Sapiens
uucugaguuaaaacuuaagugauuccugcuuu

SEQ ID NO: 89661 - RNA, 32 nt, Homo Sapiens
ugccugguggggugggggugccaggugugucc

SEQ ID NO: 89662 - RNA, 32 nt, Homo Sapiens
gcgagaccuugucuuuaaaaauaaaaauaaaa

SEQ ID NO: 89663 - RNA, 32 nt, Homo Sapiens
ccauccaagcccugucccacuuuggcccuauc

SEQ ID NO: 89664 - RNA, 32 nt, Homo Sapiens
ugacuguggggugcaucggucuccggaaaaaa

SEQ ID NO: 89665 - RNA, 32 nt, Homo Sapiens
guuuuaaggcucugggaagcaggguugguuag

SEQ ID NO: 89666 - RNA, 28 nt, Homo Sapiens
accuuggcaaaauaaacuuucuaaauug

SEQ ID NO: 89667 - RNA, 32 nt, Homo Sapiens
uggcugggaacaaaauggaagaaaacaaaaac

SEQ ID NO: 89668 - RNA, 32 nt, Homo Sapiens
gagaaaccauaaaauaggaugaaaaucaagua

SEQ ID NO: 89669 - RNA, 32 nt, Homo Sapiens
cagccccggcugcaccucuccuucccgcuucc

SEQ ID NO: 89670 - RNA, 32 nt, Homo Sapiens
gucuucgugucuuucuggaccccuuguccugc

SEQ ID NO: 89671 - RNA, 32 nt, Homo Sapiens
uagcuggaauacugaguucaguucagaaggca

SEQ ID NO: 89672 - RNA, 30 nt, Homo Sapiens
acguggcgcgcgcguggcgcccuggugcga

SEQ ID NO: 89673 - RNA, 32 nt, Homo Sapiens
uaacuccccacuuccuccugcaccaccacggg

SEQ ID NO: 89674 - RNA, 32 nt, Homo Sapiens
agggccaggcaggccaggcccgagauggcacc

SEQ ID NO: 89675 - RNA, 32 nt, Homo Sapiens
augugaaagggagaagacaaacauccacgaac

SEQ ID NO: 89676 - RNA, 32 nt, Homo Sapiens
auuuucuguacuuuuuuguucauuaauuuugu

SEQ ID NO: 89677 - RNA, 32 nt, Homo Sapiens
cagcaucacccaucccugggaaugccguggaa

SEQ ID NO: 89678 - RNA, 32 nt, Homo Sapiens
cuccgguccgagcucggggcgccccgcaggcg

SEQ ID NO: 89679 - RNA, 32 nt, Homo Sapiens
gcugucaccagcccggccccaggggugcccug

SEQ ID NO: 89680 - RNA, 32 nt, Homo Sapiens
ccggcuuuaaagcuagugaggcacagccugcg

SEQ ID NO: 89681 - RNA, 32 nt, Homo Sapiens
caggaagcggguggggggccuggggaucucuc

SEQ ID NO: 89682 - RNA, 32 nt, Homo Sapiens
uuuuuuaagccuucuuuuuucucuuuuaccag

SEQ ID NO: 89683 - RNA, 32 nt, Homo Sapiens
cuagaguggaagcucagcaaagaacggaucua

SEQ ID NO: 89684 - RNA, 32 nt, Homo Sapiens
uuauaaaguauaaaauuaagauauaagcagau

SEQ ID NO: 89685 - RNA, 32 nt, Homo Sapiens
cuuccuaccgcacccucaggucuaaauccgaa

SEQ ID NO: 89686 - RNA, 32 nt, Homo Sapiens
agaaggugagcacagguguccuugacugaggc

SEQ ID NO: 89687 - RNA, 32 nt, Homo Sapiens
uccuuggacuuuuuuacccaaccuuucccgac

SEQ ID NO: 89688 - RNA, 32 nt, Homo Sapiens
cccggcccccuguccuggccaagcugccggcc

SEQ ID NO: 89689 - RNA, 32 nt, Homo Sapiens
cagagcgggugugaggggcgccgauggcggag

SEQ ID NO: 89690 - RNA, 32 nt, Homo Sapiens
cauguaaauagacuauuuuuuauaaucuuuac

SEQ ID NO: 89691 - RNA, 32 nt, Homo Sapiens
ucagaagacuagaagugaaaccucaagccuug

SEQ ID NO: 89692 - RNA, 32 nt, Homo Sapiens
cauuccgcgcguggaccagccgggccagggcg

SEQ ID NO: 89693 - RNA, 32 nt, Homo Sapiens
uuuauaaaugucauuuuacaaauuaugugauu

SEQ ID NO: 89694 - RNA, 32 nt, Homo Sapiens
auuuuccugcuucaucuucccagguagcuggg

SEQ ID NO: 89695 - RNA, 32 nt, Homo Sapiens
ucucuuuuucuuuucuauggagcaaaacaaag

SEQ ID NO: 89696 - RNA, 32 nt, Homo Sapiens
gagcccucuggaugcuugcucaucucugcugc

SEQ ID NO: 89697 - RNA, 32 nt, Homo Sapiens
ugcaaaaccuggggaccaggacucccugucug

SEQ ID NO: 89698 - RNA, 32 nt, Homo Sapiens
aggaggaggagcaaagguguuggagagaaaac

SEQ ID NO: 89699 - RNA, 28 nt, Homo Sapiens
uggcugagggccuccaggaugaagauac

SEQ ID NO: 89700 - RNA, 32 nt, Homo Sapiens
gccccaagcuucccucggagaagugagaggcu

SEQ ID NO: 89701 - RNA, 31 nt, Homo Sapiens
gcucggaaccaucccgcaggaguucagcuga

SEQ ID NO: 89702 - RNA, 32 nt, Homo Sapiens
cgucccugcccggcucguugccggccccggga

SEQ ID NO: 89703 - RNA, 32 nt, Homo Sapiens
aucuggucucguguucgcuggcugaucauugc

SEQ ID NO: 89704 - RNA, 32 nt, Homo Sapiens
ucccuccacccccaagcacuaccacacauggu

SEQ ID NO: 89705 - RNA, 32 nt, Homo Sapiens
gcacaauaagauuccaucaucacuuuggacag

SEQ ID NO: 89706 - RNA, 32 nt, Homo Sapiens
ugagaacgcagggaaagagaaguaaagaguaa

SEQ ID NO: 89707 - RNA, 32 nt, Homo Sapiens
accuggggcugcuggacccucgggcugcaagc

SEQ ID NO: 89708 - RNA, 32 nt, Homo Sapiens
aguguuuaauuuccgauuuuccccucugcauu

SEQ ID NO: 89709 - RNA, 32 nt, Homo Sapiens
ggaggccuggcgggcuagcuuggguguccugc

SEQ ID NO: 89710 - RNA, 32 nt, Homo Sapiens
uaauuccuggcagggcccccagccccuccccu

SEQ ID NO: 89711 - RNA, 32 nt, Homo Sapiens
uucagacuccuugauuuuuagugcaguuucca

SEQ ID NO: 89712 - RNA, 32 nt, Homo Sapiens
ugagggguaaaauggaaccagguagagccacu

SEQ ID NO: 89713 - RNA, 32 nt, Homo Sapiens
gagccuuuuucucggugggggguggggagggg

SEQ ID NO: 89714 - RNA, 32 nt, Homo Sapiens
cuucggucccuccgcccucccagccccgcccc

SEQ ID NO: 89715 - RNA, 32 nt, Homo Sapiens
ccuguuucaaguuuucuggggccucgcuaauu

SEQ ID NO: 89716 - RNA, 32 nt, Homo Sapiens
uauuucuuuaaauaacaaaaccacuaauugcc

SEQ ID NO: 89717 - RNA, 32 nt, Homo Sapiens
uuuugagagaggcauuuaauucuaauaaacca

SEQ ID NO: 89718 - RNA, 32 nt, Homo Sapiens
gaaaagaaaaacacgucucaccacugugguug

SEQ ID NO: 89719 - RNA, 32 nt, Homo Sapiens
ccauguauauuuuauaaagauaauuuggcugu

SEQ ID NO: 89720 - RNA, 32 nt, Homo Sapiens
uaacaacugaaguuuuacaauaaaaacuaauu

SEQ ID NO: 89721 - RNA, 32 nt, Homo Sapiens
accagcaucaucacugcuaucaucauuaacag

SEQ ID NO: 89722 - RNA, 32 nt, Homo Sapiens
gaaaaauauauucgcaaaaugcauuucaaaaa

SEQ ID NO: 89723 - RNA, 32 nt, Homo Sapiens
aaaaagagggagagugugcuuuuuguacagua

SEQ ID NO: 89724 - RNA, 32 nt, Homo Sapiens
uucucauugugaaggacucacuuuuacuggga

SEQ ID NO: 89725 - RNA, 32 nt, Homo Sapiens
uucaagaaauguacacugugguaaaugauuua

SEQ ID NO: 89726 - RNA, 32 nt, Homo Sapiens
cagugcacuccagccugggugacagcgagacc

SEQ ID NO: 89727 - RNA, 32 nt, Homo Sapiens
aauacuguuagccaaggcaauccagucaauuc

SEQ ID NO: 89728 - RNA, 32 nt, Homo Sapiens
uuuauuuauuuuuauuucuugucagggaguau

SEQ ID NO: 89729 - RNA, 32 nt, Homo Sapiens
gugggcuccacccacuagaugccaguggcacc

SEQ ID NO: 89730 - RNA, 32 nt, Homo Sapiens
ucuccgaagcccugcgggccuggcuuguguga

SEQ ID NO: 89731 - RNA, 32 nt, Homo Sapiens
aggcgguuucugcggcucugguauuugagcuu

SEQ ID NO: 89732 - RNA, 32 nt, Homo Sapiens
acaauauggaagcuaaaauugacauauuuuua

SEQ ID NO: 89733 - RNA, 32 nt, Homo Sapiens
ccucuuaugucuccccgcaaacacuggcaccu

SEQ ID NO: 89734 - RNA, 30 nt, Homo Sapiens
uugggcugacugccugcagaagucccaaga

SEQ ID NO: 89735 - RNA, 31 nt, Homo Sapiens
uacccacagaagugccugccucuccagcgcu

SEQ ID NO: 89736 - RNA, 32 nt, Homo Sapiens
gauuucccaaaacagaguagaauagaauucau

SEQ ID NO: 89737 - RNA, 32 nt, Homo Sapiens
caagcaacaacuuuuccuaauucggcauguua

SEQ ID NO: 89738 - RNA, 32 nt, Homo Sapiens
ggcugagguggaggcggagggaggcggcggcg

SEQ ID NO: 89739 - RNA, 32 nt, Homo Sapiens
ccucuaggaucuuugucuucuggcuggaggug

SEQ ID NO: 89740 - RNA, 32 nt, Homo Sapiens
uuucaguuuuuagagcauuucccccauacaga

SEQ ID NO: 89741 - RNA, 32 nt, Homo Sapiens
ccauguuuucccuuuauucauccuaaaaaguu

SEQ ID NO: 89742 - RNA, 32 nt, Homo Sapiens
gagugggugcgccagguggaccacgugaucga

SEQ ID NO: 89743 - RNA, 32 nt, Homo Sapiens
ugucucuguuuucucuuauaagaacacaaguc

SEQ ID NO: 89744 - RNA, 32 nt, Homo Sapiens
uggagccaaugguggggguggccccggcaggc

SEQ ID NO: 89745 - RNA, 30 nt, Homo Sapiens
ugggaacaugcucgcuucucccgugugucg

SEQ ID NO: 89746 - RNA, 32 nt, Homo Sapiens
ucagcuaaaggcgcggagcacccggcgccgag

SEQ ID NO: 89747 - RNA, 32 nt, Homo Sapiens
gccagccugggcaacauagugaagccccaucu

SEQ ID NO: 89748 - RNA, 32 nt, Homo Sapiens
gagaaaacauuuucucuuuccuccucuugaac

SEQ ID NO: 89749 - RNA, 32 nt, Homo Sapiens
gcaggaucgaggaggaaguggcugauuacuga

SEQ ID NO: 89750 - RNA, 32 nt, Homo Sapiens
caccuggacaacauguggggcgugggcaggca

SEQ ID NO: 89751 - RNA, 32 nt, Homo Sapiens
aaaagaaaaaauaaagaaacugcagcgccuua

SEQ ID NO: 89752 - RNA, 32 nt, Homo Sapiens
ggcaagauuaggaagucacagauucuuuucua

SEQ ID NO: 89753 - RNA, 32 nt, Homo Sapiens
agugcuuaauaaaaaugauggggacuuuucaa

SEQ ID NO: 89754 - RNA, 32 nt, Homo Sapiens
uuuuuuaaugaaauauuauugcuggaggcguc

SEQ ID NO: 89755 - RNA, 32 nt, Homo Sapiens
gcagagaccucuuaaacccccaucccagcacc

SEQ ID NO: 89756 - RNA, 32 nt, Homo Sapiens
gaaaauucuuugauuuaucuuaauagugacaa

SEQ ID NO: 89757 - RNA, 32 nt, Homo Sapiens
gugcaccgguggguggggcgcccauagcacug

SEQ ID NO: 89758 - RNA, 32 nt, Homo Sapiens
aaauccugcauaacuaaaaucacaaaccuauu

SEQ ID NO: 89759 - RNA, 30 nt, Homo Sapiens
gggagggagcugcgcgcgggccagacggcg

SEQ ID NO: 89760 - RNA, 32 nt, Homo Sapiens
ucuagucagcuuaaguuuuccaucaccaagaa

SEQ ID NO: 89761 - RNA, 32 nt, Homo Sapiens
gcggccccauguccccagagggcucaccuucc

SEQ ID NO: 89762 - RNA, 32 nt, Homo Sapiens
agggaggaagagagggagggaggaacuuccca

SEQ ID NO: 89763 - RNA, 32 nt, Homo Sapiens
gcccagccuuccccggcgcgcagccccgacgg

SEQ ID NO: 89764 - RNA, 32 nt, Homo Sapiens
ggccacggagagcucgccuuggagagcccagg

SEQ ID NO: 89765 - RNA, 32 nt, Homo Sapiens
agugcuuccuuguccuucucuuaacuucucau

SEQ ID NO: 89766 - RNA, 32 nt, Homo Sapiens
auuuauuaauaaauuauuugcugaaaccaaaa

SEQ ID NO: 89767 - RNA, 32 nt, Homo Sapiens
guuuuaaauuuauaucguaacaccuacuuaag

SEQ ID NO: 89768 - RNA, 32 nt, Homo Sapiens
cugugggcucugcggaugcacgcccuccuccc

SEQ ID NO: 89769 - RNA, 32 nt, Homo Sapiens
uuucagaugucuuaguuuuuuauaaccauagu

SEQ ID NO: 89770 - RNA, 32 nt, Homo Sapiens
uaugggauuuguuugccuuuuacauuuuguuu

SEQ ID NO: 89771 - RNA, 32 nt, Homo Sapiens
acuguguguacgugucugugcgugcaacauaa

SEQ ID NO: 89772 - RNA, 32 nt, Homo Sapiens
uggcacgcuguuuuuacccagcccugccugua

SEQ ID NO: 89773 - RNA, 32 nt, Homo Sapiens
acucuccagauuuuaaguugacaacucaguga

SEQ ID NO: 89774 - RNA, 32 nt, Homo Sapiens
uggcucacguuccugcccuggaugggauguga

SEQ ID NO: 89775 - RNA, 32 nt, Homo Sapiens
uugcagccggcacagggucugcucuuucucug

SEQ ID NO: 89776 - RNA, 32 nt, Homo Sapiens
acagccggaacagugcacaggcuggucuucua

SEQ ID NO: 89777 - RNA, 32 nt, Homo Sapiens
accuccacagagagaugaccaauggaauuuuu

SEQ ID NO: 89778 - RNA, 32 nt, Homo Sapiens
cacuucuguuuggguguuggaagcugggcgau

SEQ ID NO: 89779 - RNA, 32 nt, Homo Sapiens
uaggauuccagaacacugaugccauugucuga

SEQ ID NO: 89780 - RNA, 32 nt, Homo Sapiens
aaugcuacugucagcuaaagaccugcaguauu

SEQ ID NO: 89781 - RNA, 31 nt, Homo Sapiens
ucccuucgcggugcccacuccacuccuugug

SEQ ID NO: 89782 - RNA, 32 nt, Homo Sapiens
ugacuacacacaguacgaaccuacaguuuuaa

SEQ ID NO: 89783 - RNA, 32 nt, Homo Sapiens
ggacugcccuccccaccccaccccaccccagg

SEQ ID NO: 89784 - RNA, 32 nt, Homo Sapiens
ccgagcacugggcccuggcagacgccccaaga

SEQ ID NO: 89785 - RNA, 32 nt, Homo Sapiens
gaauuugugaugucuuugcuguuuacaugcag

SEQ ID NO: 89786 - RNA, 32 nt, Homo Sapiens
uuuugauaauaaauucuuggaacuuuaauaag

SEQ ID NO: 89787 - RNA, 32 nt, Homo Sapiens
cggugagucaggccggguuuucccuccgccuu

SEQ ID NO: 89788 - RNA, 32 nt, Homo Sapiens
ugaaaaugauugggguuuaauaccacugcugg

SEQ ID NO: 89789 - RNA, 32 nt, Homo Sapiens
cauggacuuuccuucccucuccugcuuccucu

SEQ ID NO: 89790 - RNA, 32 nt, Homo Sapiens
ucucuaccacugcucuuucucaugauuauuuu

SEQ ID NO: 89791 - RNA, 32 nt, Homo Sapiens
gguggagauuccaggggugggugaaagaagag

SEQ ID NO: 89792 - RNA, 32 nt, Homo Sapiens
auuuaguaccucaggugguacaggagaaggug

SEQ ID NO: 89793 - RNA, 32 nt, Homo Sapiens
aaaauguuauuuaucaauugaauuaggcuuug

SEQ ID NO: 89794 - RNA, 32 nt, Homo Sapiens
uucagugccuucagcgcagagcguggaugcuc

SEQ ID NO: 89795 - RNA, 32 nt, Homo Sapiens
gaaaagaacaucucaagacuuugguuuuacau

SEQ ID NO: 89796 - RNA, 31 nt, Homo Sapiens
ugagagaaauaaaaacaugaagaaucaaaaa

SEQ ID NO: 89797 - RNA, 32 nt, Homo Sapiens
cacagugucggaaugccuggagcauuucuucu

SEQ ID NO: 89798 - RNA, 32 nt, Homo Sapiens
agguuuacaaauaacaaaggugcaccuuguau

SEQ ID NO: 89799 - RNA, 32 nt, Homo Sapiens
acugaaaaugaaauacuguggauguuaugacu

SEQ ID NO: 89800 - RNA, 29 nt, Homo Sapiens
ucuuuugugacuuucuucuaccucaugcc

SEQ ID NO: 89801 - RNA, 32 nt, Homo Sapiens
uguacgaggcagacggcggcagugcggcuugc

SEQ ID NO: 89802 - RNA, 32 nt, Homo Sapiens
acacagaucucgaccugcuuugaaaccuagag

SEQ ID NO: 89803 - RNA, 32 nt, Homo Sapiens
cggacucgggagauggaggaaaaggagauauu

SEQ ID NO: 89804 - RNA, 32 nt, Homo Sapiens
guaucuuggagcuuguuccuuauucuugauua

SEQ ID NO: 89805 - RNA, 32 nt, Homo Sapiens
cugaaagggaaguuaagguacaugauaccaug

SEQ ID NO: 89806 - RNA, 32 nt, Homo Sapiens
uccaugauagagaaggcaaacacacccaccuu

SEQ ID NO: 89807 - RNA, 32 nt, Homo Sapiens
gcaagcccaagccggugcucggccaguuacaa

SEQ ID NO: 89808 - RNA, 32 nt, Homo Sapiens
gccuaagugucugccuuacuuucugauugucc

SEQ ID NO: 89809 - RNA, 32 nt, Homo Sapiens
aaaauuauaugcucuuuuuuuuuuugagacag

SEQ ID NO: 89810 - RNA, 32 nt, Homo Sapiens
uaguauugaugaugaacauuugguaaugaacg

SEQ ID NO: 89811 - RNA, 32 nt, Homo Sapiens
uuguagguuguugauuuuguuacuucauacug

SEQ ID NO: 89812 - RNA, 32 nt, Homo Sapiens
gcccaggcaacacaacuugauuauggcaauau

SEQ ID NO: 89813 - RNA, 32 nt, Homo Sapiens
gcagguguaaaaauuaauaaauauauuuuuua

SEQ ID NO: 89814 - RNA, 32 nt, Homo Sapiens
gcaggcgugucugugcgugugggcgugugugc

SEQ ID NO: 89815 - RNA, 32 nt, Homo Sapiens
augacgucuucaugccaggggcacucauuucu

SEQ ID NO: 89816 - RNA, 32 nt, Homo Sapiens
cucuauagcaccuuccuuuuucguuuucaguu

SEQ ID NO: 89817 - RNA, 32 nt, Homo Sapiens
ccaucaaaaucccaccugaaccaucuaauccu

SEQ ID NO: 89818 - RNA, 32 nt, Homo Sapiens
uguguguguccccaucccccgccccguuaacu

SEQ ID NO: 89819 - RNA, 32 nt, Homo Sapiens
uuuaaacccaaguuuauuggcagacucccuuu

SEQ ID NO: 89820 - RNA, 32 nt, Homo Sapiens
uaaacuuaaaaauaaacaaguaauuaaccacu

SEQ ID NO: 89821 - RNA, 30 nt, Homo Sapiens
aagggccgucccgugccacggugcugugag

SEQ ID NO: 89822 - RNA, 32 nt, Homo Sapiens
aaauuauuaaacaacucauuuuaagauucaaa

SEQ ID NO: 89823 - RNA, 32 nt, Homo Sapiens
guucagggcuugugggggucugccucaaucuc

SEQ ID NO: 89824 - RNA, 32 nt, Homo Sapiens
ccggagcccagcuguaaauuccucucuuugua

SEQ ID NO: 89825 - RNA, 32 nt, Homo Sapiens
ccgcugggccugcccggcacccaccccggcca

SEQ ID NO: 89826 - RNA, 32 nt, Homo Sapiens
accuuaagaacaaagaacaaggaaguuaaacu

SEQ ID NO: 89827 - RNA, 32 nt, Homo Sapiens
cgacccggcucgccagcuccacgcucggcucc

SEQ ID NO: 89828 - RNA, 32 nt, Homo Sapiens
caagggccgagagacaauuaccaagagcaaaa

SEQ ID NO: 89829 - RNA, 32 nt, Homo Sapiens
ggugcgaccccggcugcgacucggauccguuu

SEQ ID NO: 89830 - RNA, 32 nt, Homo Sapiens
uucucuuuuaguuuuucuucuacuucucugau

SEQ ID NO: 89831 - RNA, 32 nt, Homo Sapiens
aagaaaaugaauugucggaaaccacccguaaa

SEQ ID NO: 89832 - RNA, 32 nt, Homo Sapiens
gugcuuguagcuuugauguggaacaggggccc

SEQ ID NO: 89833 - RNA, 32 nt, Homo Sapiens
acacccauugcagcuguggcgccacguccucc

SEQ ID NO: 89834 - RNA, 32 nt, Homo Sapiens
cucggcucgaaggaccacccaggcugugccug

SEQ ID NO: 89835 - RNA, 32 nt, Homo Sapiens
uuacaaauauaaaugcccagguuguaucucca

SEQ ID NO: 89836 - RNA, 32 nt, Homo Sapiens
gcccauuaaugauucagaaucagugcuugacc

SEQ ID NO: 89837 - RNA, 32 nt, Homo Sapiens
cugcagcuaagugaucuaauccaggaucauau

SEQ ID NO: 89838 - RNA, 32 nt, Homo Sapiens
gcguggggccgcgaccggcgaccccgguaaca

SEQ ID NO: 89839 - RNA, 32 nt, Homo Sapiens
uggagaguaggagaaaacugcaaccaaggaag

SEQ ID NO: 89840 - RNA, 32 nt, Homo Sapiens
gaggauuuuagaccucuuugagcaucugaaaa

SEQ ID NO: 89841 - RNA, 32 nt, Homo Sapiens
aauugagaucaaugaggccaaaaggaaacuga

SEQ ID NO: 89842 - RNA, 32 nt, Homo Sapiens
cauuuugucucucucacauuaagggaguagga

SEQ ID NO: 89843 - RNA, 32 nt, Homo Sapiens
ccacaacccuauaaaggagggagcucguggcg

SEQ ID NO: 89844 - RNA, 32 nt, Homo Sapiens
ggacagagaggaaggagguggagcagcugggg

SEQ ID NO: 89845 - RNA, 32 nt, Homo Sapiens
uuuauuguauggauuuaccauccccuguguau

SEQ ID NO: 89846 - RNA, 32 nt, Homo Sapiens
acuggccccggcuuuauuccuccaccucuugc

SEQ ID NO: 89847 - RNA, 32 nt, Homo Sapiens
uauaaucuaaucccuuagcaucagcuccuccc

SEQ ID NO: 89848 - RNA, 32 nt, Homo Sapiens
cccauucaguuccucagcauuccaggucggcg

SEQ ID NO: 89849 - RNA, 32 nt, Homo Sapiens
agucagcaagagaaaaucuugucuuagaaggg

SEQ ID NO: 89850 - RNA, 32 nt, Homo Sapiens
ugguuuuauauacacacacacacacacacaca

SEQ ID NO: 89851 - RNA, 32 nt, Homo Sapiens
caacaaaaacaaaaauagacaagugauaccua

SEQ ID NO: 89852 - RNA, 31 nt, Homo Sapiens
uguacauguaagaaaaaagcuuauuaaaaac

SEQ ID NO: 89853 - RNA, 32 nt, Homo Sapiens
gcggcaagauggcggcgcccaggccgccgccu

SEQ ID NO: 89854 - RNA, 32 nt, Homo Sapiens
acucuuccccuccucugcaaaucuucacagcc

SEQ ID NO: 89855 - RNA, 29 nt, Homo Sapiens
uacagcauaaguauguacgaggaauuuca

SEQ ID NO: 89856 - RNA, 32 nt, Homo Sapiens
uugcagugagccaaaaucauaacacugcacuc

SEQ ID NO: 89857 - RNA, 32 nt, Homo Sapiens
uugcuuugaagaagggagugaugucaauucuc

SEQ ID NO: 89858 - RNA, 32 nt, Homo Sapiens
uaaguacccuuuggauguacucuuccaaccag

SEQ ID NO: 89859 - RNA, 31 nt, Homo Sapiens
uaaaggaaauaaaacaauguuaacagccaaa

SEQ ID NO: 89860 - RNA, 32 nt, Homo Sapiens
cuuuuggaaaauaccaaaugaacguacaguac

SEQ ID NO: 89861 - RNA, 32 nt, Homo Sapiens
ggagagggaaaggauuugggaucuuaguugcu

SEQ ID NO: 89862 - RNA, 32 nt, Homo Sapiens
aaacacagaaaagugauuaaugaaugauaauu

SEQ ID NO: 89863 - RNA, 32 nt, Homo Sapiens
ccuugcguuccuuuuguuccuguccguuuauc

SEQ ID NO: 89864 - RNA, 32 nt, Homo Sapiens
gcucacugcagccuccaccucccaggcucaag

SEQ ID NO: 89865 - RNA, 32 nt, Homo Sapiens
uuaaguguguucucuuguguccuauggaaucc

SEQ ID NO: 89866 - RNA, 32 nt, Homo Sapiens
aaauuaccauguagugauacaugucuagaaac

SEQ ID NO: 89867 - RNA, 28 nt, Homo Sapiens
aauuguagggcgaggauuauaaaugaaa

SEQ ID NO: 89868 - RNA, 32 nt, Homo Sapiens
gcaggcuggagcagucgccaucuuggcaggga

SEQ ID NO: 89869 - RNA, 31 nt, Homo Sapiens
uaagguuuugcaggaaagucccuucuuccaa

SEQ ID NO: 89870 - RNA, 32 nt, Homo Sapiens
ugauauuuuuauuuucucuccuuuuaagucuu

SEQ ID NO: 89871 - RNA, 32 nt, Homo Sapiens
cggacccuggggaguaggcaccccccggaugg

SEQ ID NO: 89872 - RNA, 32 nt, Homo Sapiens
cuucggaaaaaguuuuccaaagugugucuugu

SEQ ID NO: 89873 - RNA, 32 nt, Homo Sapiens
uaaugccgugcagguugaagguagcauuguaa

SEQ ID NO: 89874 - RNA, 32 nt, Homo Sapiens
uuugcuacuguaaacagagcugugauaagcau

SEQ ID NO: 89875 - RNA, 32 nt, Homo Sapiens
cuugucaacuuucaauaaagcauauaaauguu

SEQ ID NO: 89876 - RNA, 32 nt, Homo Sapiens
auuauguuuuauugucauauuguuauuuucuc

SEQ ID NO: 89877 - RNA, 32 nt, Homo Sapiens
ugucuccuacuccugcccacuccaccuucuua

SEQ ID NO: 89878 - RNA, 32 nt, Homo Sapiens
accaaaaauggcaaacaucaccagcucccaga

SEQ ID NO: 89879 - RNA, 32 nt, Homo Sapiens
gcggggaagggagauucggcaaagacagcuuu

SEQ ID NO: 89880 - RNA, 32 nt, Homo Sapiens
gggacccaguauguccucuccucuagacccag

SEQ ID NO: 89881 - RNA, 32 nt, Homo Sapiens
uuuugucaauuugaauucagggaaaaguuggu

SEQ ID NO: 89882 - RNA, 32 nt, Homo Sapiens
ugguauuuauauggucccaguuauccaucccu

SEQ ID NO: 89883 - RNA, 32 nt, Homo Sapiens
uggcgauucggaccgauccgaccugggcggag

SEQ ID NO: 89884 - RNA, 32 nt, Homo Sapiens
uccugucucagccucccaaaauguugagauug

SEQ ID NO: 89885 - RNA, 32 nt, Homo Sapiens
gagcagucuccaucugcggcccugucccaugg

SEQ ID NO: 89886 - RNA, 32 nt, Homo Sapiens
aaccugccccuguucuucacacugccccccau

SEQ ID NO: 89887 - RNA, 32 nt, Homo Sapiens
aaacuuuaauuucuuuuuuuuaaaaauggugg

SEQ ID NO: 89888 - RNA, 32 nt, Homo Sapiens
ggcaaguaaggagacauugaccagauucaaag

SEQ ID NO: 89889 - RNA, 32 nt, Homo Sapiens
gcugggccuuagcugccuccccgcggggcagg

SEQ ID NO: 89890 - RNA, 31 nt, Homo Sapiens
augcucuaaaacaugaaugcuuuguuacaga

SEQ ID NO: 89891 - RNA, 32 nt, Homo Sapiens
gaaccuugaggagagaggcuuauuuaaguauu

SEQ ID NO: 89892 - RNA, 32 nt, Homo Sapiens
aauggauaaacuauugaugaauuguuuccugg

SEQ ID NO: 89893 - RNA, 32 nt, Homo Sapiens
gggccccggaggccuccauccuccccuagagg

SEQ ID NO: 89894 - RNA, 32 nt, Homo Sapiens
ugaauucugaagaugaacuaaaucguugggac

SEQ ID NO: 89895 - RNA, 32 nt, Homo Sapiens
uauaaaauuguauuuacagcugauggacucaa

SEQ ID NO: 89896 - RNA, 32 nt, Homo Sapiens
acgaagcauuagcaaaaguaauaauuauaccu

SEQ ID NO: 89897 - RNA, 32 nt, Homo Sapiens
caugggccuccgcccgcgccgccccgaggaug

SEQ ID NO: 89898 - RNA, 32 nt, Homo Sapiens
guaaacauggacagaacacacugccauuucug

SEQ ID NO: 89899 - RNA, 32 nt, Homo Sapiens
cucucccaagcaccccagccaagccccagaga

SEQ ID NO: 89900 - RNA, 32 nt, Homo Sapiens
cgcuaguccccgacuccgccagcccucggccc

SEQ ID NO: 89901 - RNA, 32 nt, Homo Sapiens
gucucgggccccaggacccccggggcccggga

SEQ ID NO: 89902 - RNA, 32 nt, Homo Sapiens
cccaccggcuccgacgcgcaaccccgcucagc

SEQ ID NO: 89903 - RNA, 32 nt, Homo Sapiens
ccccagggcacgagaagagcucuugcugucug

SEQ ID NO: 89904 - RNA, 32 nt, Homo Sapiens
cacggguggggauaaaaagaggaauauucugg

SEQ ID NO: 89905 - RNA, 32 nt, Homo Sapiens
cuguucacagcuuuucuugauaggccuaguac

SEQ ID NO: 89906 - RNA, 32 nt, Homo Sapiens
aaaaacgcuuuuauagcuuucaaauauaccua

SEQ ID NO: 89907 - RNA, 32 nt, Homo Sapiens
uauuauaguaguuuauacuuuugcuuaacucu

SEQ ID NO: 89908 - RNA, 32 nt, Homo Sapiens
ugggcgcucuucggggaccuccguggcgcgga

SEQ ID NO: 89909 - RNA, 32 nt, Homo Sapiens
uuagccuuuuuagauugagagauacagagccg

SEQ ID NO: 89910 - RNA, 32 nt, Homo Sapiens
ccugagugagaaccaggggucugugccucucc

SEQ ID NO: 89911 - RNA, 32 nt, Homo Sapiens
aacuguaccuuuauaaaucaauuguuuugcaa

SEQ ID NO: 89912 - RNA, 32 nt, Homo Sapiens
gccccuaaccagcgcgucuaccccggcaacgc

SEQ ID NO: 89913 - RNA, 32 nt, Homo Sapiens
ccaggaaggcggcaggcagagaaguggaguga

SEQ ID NO: 89914 - RNA, 32 nt, Homo Sapiens
uugggggcuggauagcuucccagcacccucag

SEQ ID NO: 89915 - RNA, 32 nt, Homo Sapiens
caagaugcagcuaaguauuuagacauuuugag

SEQ ID NO: 89916 - RNA, 32 nt, Homo Sapiens
gccaggguggagcugggagaggcccuuguuca

SEQ ID NO: 89917 - RNA, 32 nt, Homo Sapiens
aguggaggucaagaggcccagcccccugcagc

SEQ ID NO: 89918 - RNA, 32 nt, Homo Sapiens
acuaaucuggguuuaaaguuuacuucauuauc

SEQ ID NO: 89919 - RNA, 32 nt, Homo Sapiens
gauagaaaaugaauuacaacuuaaauacaugu

SEQ ID NO: 89920 - RNA, 32 nt, Homo Sapiens
gggcucagcagccccaggcuccgucacccccu

SEQ ID NO: 89921 - RNA, 32 nt, Homo Sapiens
aaaaggaaucaugaauccugguaaacaauaaa

SEQ ID NO: 89922 - RNA, 32 nt, Homo Sapiens
caaugaacgcagccgggaucagagcuccggag

SEQ ID NO: 89923 - RNA, 32 nt, Homo Sapiens
uggcggcggcgaagguggcggcggcucggcca

SEQ ID NO: 89924 - RNA, 32 nt, Homo Sapiens
ccuuagucuccuuguucauguugcucacaaca

SEQ ID NO: 89925 - RNA, 32 nt, Homo Sapiens
guuuucaaaggucuggacuaagcaaaacaaca

SEQ ID NO: 89926 - RNA, 32 nt, Homo Sapiens
ggcacucgccccacgccuccccucagccccac

SEQ ID NO: 89927 - RNA, 32 nt, Homo Sapiens
aaauuggauguaaauuuacauuuuugaauaug

SEQ ID NO: 89928 - RNA, 32 nt, Homo Sapiens
ccuccccaugcucuccucccucagccuugcua

SEQ ID NO: 89929 - RNA, 32 nt, Homo Sapiens
cauggugggaccuguuauuuauucauccaugc

SEQ ID NO: 89930 - RNA, 32 nt, Homo Sapiens
uuauaaugaaaacaaucuuauuacuuauaguu

SEQ ID NO: 89931 - RNA, 32 nt, Homo Sapiens
aaauuagguuuuaccauucauuauuauucuug

SEQ ID NO: 89932 - RNA, 32 nt, Homo Sapiens
uugccucccaucucuuaucuccuuguauaauu

SEQ ID NO: 89933 - RNA, 32 nt, Homo Sapiens
cggugauguguggagcggaaaagcagguuggu

SEQ ID NO: 89934 - RNA, 32 nt, Homo Sapiens
uuaacuuuaaacaucaagauccaaaccccaag

SEQ ID NO: 89935 - RNA, 32 nt, Homo Sapiens
ucaaucgcagaccugcccugccucaguuggaa

SEQ ID NO: 89936 - RNA, 32 nt, Homo Sapiens
uaggaaaaugccaugaaaauugcuuuugaaaa

SEQ ID NO: 89937 - RNA, 32 nt, Homo Sapiens
uuuugcuuuuuauguaaaaauuugcauuucua

SEQ ID NO: 89938 - RNA, 32 nt, Homo Sapiens
ggccgaaggggaggugguguacauaggaacgc

SEQ ID NO: 89939 - RNA, 28 nt, Homo Sapiens
accaugcugaguggagcacgcugcaggc

SEQ ID NO: 89940 - RNA, 32 nt, Homo Sapiens
ugauaacucugcaaaggccugggcuggccugg

SEQ ID NO: 89941 - RNA, 32 nt, Homo Sapiens
ccugccccuggaucaccggcccggagagcccg

SEQ ID NO: 89942 - RNA, 32 nt, Homo Sapiens
cgccccugccccgugaaggaccgcgcugcggu

SEQ ID NO: 89943 - RNA, 32 nt, Homo Sapiens
uagacacauauggcuuuuaaacuuuuuuauuu

SEQ ID NO: 89944 - RNA, 32 nt, Homo Sapiens
agagacccgcggagggaggcggaggcugugag

SEQ ID NO: 89945 - RNA, 32 nt, Homo Sapiens
cgucugaggggcggacggaggcggcggcggcg

SEQ ID NO: 89946 - RNA, 32 nt, Homo Sapiens
ugucacgcagugucacgcucggucauggccug

SEQ ID NO: 89947 - RNA, 32 nt, Homo Sapiens
ucaaucuugacacuuuauuuuaaacuuuuuau

SEQ ID NO: 89948 - RNA, 32 nt, Homo Sapiens
gcugcuccuggcugggguggcgcugcagggag

SEQ ID NO: 89949 - RNA, 32 nt, Homo Sapiens
ugccuauaaucccagcacuuuaggaggccaaa

SEQ ID NO: 89950 - RNA, 32 nt, Homo Sapiens
uagcagccgccuccggcgcgggccgacccugg

SEQ ID NO: 89951 - RNA, 32 nt, Homo Sapiens
gacggugcggggggccuggcugggccagaccc

SEQ ID NO: 89952 - RNA, 29 nt, Homo Sapiens
ggauuucugaagauuugacugaggucucu

SEQ ID NO: 89953 - RNA, 32 nt, Homo Sapiens
auccccucagcccacaccccugcgcccugugg

SEQ ID NO: 89954 - RNA, 32 nt, Homo Sapiens
ucgcugcaaccucagcuuccagaguucaagcg

SEQ ID NO: 89955 - RNA, 32 nt, Homo Sapiens
cuccucucuccucgucugcggcguggacuuga

SEQ ID NO: 89956 - RNA, 32 nt, Homo Sapiens
auuacaguccuaucucgggucaccuuacaagu

SEQ ID NO: 89957 - RNA, 32 nt, Homo Sapiens
gcuaaacauuguugccguuucauacuucuacc

SEQ ID NO: 89958 - RNA, 32 nt, Homo Sapiens
gccugggacuggggccucucuccaucaucaca

SEQ ID NO: 89959 - RNA, 32 nt, Homo Sapiens
guugcacucuacaggcacacuucugagguacg

SEQ ID NO: 89960 - RNA, 32 nt, Homo Sapiens
ggugaggaaggggugauggcaugcggaguucu

SEQ ID NO: 89961 - RNA, 32 nt, Homo Sapiens
auagcuacaaacgacuuuucugagaaaccagg

SEQ ID NO: 89962 - RNA, 32 nt, Homo Sapiens
aaccggccacuacccagcccaucucugccugu

SEQ ID NO: 89963 - RNA, 32 nt, Homo Sapiens
agauagauggggagucuuucugggggcggagg

SEQ ID NO: 89964 - RNA, 32 nt, Homo Sapiens
uggucuuagaccccccaccucgggcacucgga

SEQ ID NO: 89965 - RNA, 32 nt, Homo Sapiens
uaaacuaacauuauggauuuuuccaagcuacc

SEQ ID NO: 89966 - RNA, 32 nt, Homo Sapiens
ccccagcuccugggauucuccuccucccuccg

SEQ ID NO: 89967 - RNA, 32 nt, Homo Sapiens
gaggcuauugcagggaguggcuuguaucauuu

SEQ ID NO: 89968 - RNA, 32 nt, Homo Sapiens
uaguaaagucucuauuucuuccuuuuauaaga

SEQ ID NO: 89969 - RNA, 32 nt, Homo Sapiens
acagcuucccccuuuugauugccuguagacuu

SEQ ID NO: 89970 - RNA, 32 nt, Homo Sapiens
ccuucuuucaucucuuuuuuguaauuuguugu

SEQ ID NO: 89971 - RNA, 32 nt, Homo Sapiens
ugaccucaggugcccaccugccucagccuucc

SEQ ID NO: 89972 - RNA, 32 nt, Homo Sapiens
caguaauucccacuccucccagcccccgcagc

SEQ ID NO: 89973 - RNA, 27 nt, Homo Sapiens
acuuuauccuucuuuagguuuuucccu

SEQ ID NO: 89974 - RNA, 32 nt, Homo Sapiens
ugaagucugaagaugucgccauugaacggaca

SEQ ID NO: 89975 - RNA, 32 nt, Homo Sapiens
acgcuguggaagcagccaaggcacuuccucac

SEQ ID NO: 89976 - RNA, 32 nt, Homo Sapiens
ggguggccugagagggcgguggguaugcgaga

SEQ ID NO: 89977 - RNA, 31 nt, Homo Sapiens
ccgcugagccugcagccgccccgcgccguga

SEQ ID NO: 89978 - RNA, 32 nt, Homo Sapiens
aacaugugcuguauccacucaggguugaaugg

SEQ ID NO: 89979 - RNA, 32 nt, Homo Sapiens
agucaugugugcagagucagugcucgggaucc

SEQ ID NO: 89980 - RNA, 32 nt, Homo Sapiens
uuaaaaagggaaggucaagcaaagaacuguaa

SEQ ID NO: 89981 - RNA, 32 nt, Homo Sapiens
cagaugcucugcaacacuuacgcuuuuucaac

SEQ ID NO: 89982 - RNA, 32 nt, Homo Sapiens
aaucauucauuaaaaucuuuuacauuuaauuu

SEQ ID NO: 89983 - RNA, 32 nt, Homo Sapiens
uuucugcucaauccccucuccccauccccagg

SEQ ID NO: 89984 - RNA, 32 nt, Homo Sapiens
uuaagaggacugggcuguguggcauggcucac

SEQ ID NO: 89985 - RNA, 32 nt, Homo Sapiens
acuacaagaaaauguauuugcauaggcucuug

SEQ ID NO: 89986 - RNA, 32 nt, Homo Sapiens
uauucuauauugcuuaccugaucucauguuag

SEQ ID NO: 89987 - RNA, 32 nt, Homo Sapiens
uacaucaggaaggagagcccccugcucaauga

SEQ ID NO: 89988 - RNA, 32 nt, Homo Sapiens
ucuuccacccucgcccugacccuggacacugc

SEQ ID NO: 89989 - RNA, 32 nt, Homo Sapiens
caggccuaccuggggcagcuggagcaugagga

SEQ ID NO: 89990 - RNA, 32 nt, Homo Sapiens
ugccugucugcaaacuaacaauguaaaacgua

SEQ ID NO: 89991 - RNA, 32 nt, Homo Sapiens
ccuccugcagucaaggagaaccacuguauuga

SEQ ID NO: 89992 - RNA, 32 nt, Homo Sapiens
uuguggcacauccuuucaggauguaugugugu

SEQ ID NO: 89993 - RNA, 32 nt, Homo Sapiens
cagauaaaguuuuuauuuuccucugaagggaa

SEQ ID NO: 89994 - RNA, 32 nt, Homo Sapiens
guguucaacuuguaaauuguuaaaagaauuug

SEQ ID NO: 89995 - RNA, 32 nt, Homo Sapiens
gcaauauuucccuuuagaacuucaagauuucu

SEQ ID NO: 89996 - RNA, 32 nt, Homo Sapiens
uuggggacccugcgggccuccucgggcgcacc

SEQ ID NO: 89997 - RNA, 32 nt, Homo Sapiens
uagcaagaacagaguccacccuccucuggaua

SEQ ID NO: 89998 - RNA, 32 nt, Homo Sapiens
gugggcggggccggcccucccaggaucugacg

SEQ ID NO: 89999 - RNA, 23 nt, Homo Sapiens
gauguuaagcugccucuuucuuc

SEQ ID NO: 90000 - RNA, 32 nt, Homo Sapiens
uggggagggguggcaggcaggguggggcacug

SEQ ID NO: 90001 - RNA, 32 nt, Homo Sapiens
gcucgucguccuccguccacucguugagcucg

SEQ ID NO: 90002 - RNA, 32 nt, Homo Sapiens
augccaugggccauggauggaacuuccuuaua

SEQ ID NO: 90003 - RNA, 32 nt, Homo Sapiens
aguguuuguaauauuuaucuuuucacuuugau

SEQ ID NO: 90004 - RNA, 32 nt, Homo Sapiens
aggagaaagaguguguucaaacaucauaaaau

SEQ ID NO: 90005 - RNA, 32 nt, Homo Sapiens
auuuucugagucugaaauaaaagaugcagagc

SEQ ID NO: 90006 - RNA, 32 nt, Homo Sapiens
uagaaggaccaucugcugaaauccagggcucc

SEQ ID NO: 90007 - RNA, 32 nt, Homo Sapiens
cuuucucuuauuuuuaauaaaauagaaaaauc

SEQ ID NO: 90008 - RNA, 32 nt, Homo Sapiens
gccaaaaagaacucaagauauucuggggacug

SEQ ID NO: 90009 - RNA, 32 nt, Homo Sapiens
aaguauagcucuuaccuuuauuacugaauuug

SEQ ID NO: 90010 - RNA, 29 nt, Homo Sapiens
cuccuacgguggaugcggacgccgggagg

SEQ ID NO: 90011 - RNA, 32 nt, Homo Sapiens
ggcaauaaauuauggcauauauugucuacugu

SEQ ID NO: 90012 - RNA, 32 nt, Homo Sapiens
cuguuuagcuuuauaaaacaaacacuuugcug

SEQ ID NO: 90013 - RNA, 32 nt, Homo Sapiens
uccgccugcuccaucauguauagcgccugccu

SEQ ID NO: 90014 - RNA, 32 nt, Homo Sapiens
gcagauguccuugaagagagugaggcauugag

SEQ ID NO: 90015 - RNA, 32 nt, Homo Sapiens
uucacuccugccugacugccaagccaccugca

SEQ ID NO: 90016 - RNA, 32 nt, Homo Sapiens
uuauaagaaaugcacgucuacugcgcccggcc

SEQ ID NO: 90017 - RNA, 32 nt, Homo Sapiens
uccugugggcccucccggggcgccuccccuca

SEQ ID NO: 90018 - RNA, 32 nt, Homo Sapiens
ucaaggaggucauccaacugacuuuaucgagu

SEQ ID NO: 90019 - RNA, 32 nt, Homo Sapiens
auagucauuuuuccucuaugguagaaguaaaa

SEQ ID NO: 90020 - RNA, 32 nt, Homo Sapiens
ggagcccaaccucggcccaaccucguugaaag

SEQ ID NO: 90021 - RNA, 32 nt, Homo Sapiens
aaauuaauguuuauccgaaaucaaaaugagau

SEQ ID NO: 90022 - RNA, 32 nt, Homo Sapiens
ccuugacgcucuucuuuucauuauuucuaaug

SEQ ID NO: 90023 - RNA, 32 nt, Homo Sapiens
gagacucgccuggcagaggccuggagcguccu

SEQ ID NO: 90024 - RNA, 32 nt, Homo Sapiens
gccucauuggccggcccggggcgccggccucg

SEQ ID NO: 90025 - RNA, 32 nt, Homo Sapiens
gacacagccacugcggaguccaggcugcuaga

SEQ ID NO: 90026 - RNA, 32 nt, Homo Sapiens
cucucauauuuugucuuccucaggguggcagg

SEQ ID NO: 90027 - RNA, 32 nt, Homo Sapiens
caaacuccacuugacauuuacuguauaaucug

SEQ ID NO: 90028 - RNA, 32 nt, Homo Sapiens
cagugaguucugcauuuguaucuugcaaguuu

SEQ ID NO: 90029 - RNA, 32 nt, Homo Sapiens
gcggggcagagccccgggagggcgcgucuguc

SEQ ID NO: 90030 - RNA, 32 nt, Homo Sapiens
caaucugcuuuuccuuuuuuucugaagaugug

SEQ ID NO: 90031 - RNA, 32 nt, Homo Sapiens
ggcaaauaugcaaugaguuggccuagauuuuu

SEQ ID NO: 90032 - RNA, 32 nt, Homo Sapiens
ccggggaguugcgagggagcgagggggaauaa

SEQ ID NO: 90033 - RNA, 32 nt, Homo Sapiens
ugauuaagccccaggaaacauauccaagacac

SEQ ID NO: 90034 - RNA, 32 nt, Homo Sapiens
aagaacuuuaagaauaaauauuuuaacacaag

SEQ ID NO: 90035 - RNA, 32 nt, Homo Sapiens
gauugaucucugaaugugaucgacgcccagca

SEQ ID NO: 90036 - RNA, 32 nt, Homo Sapiens
uuuuauaaaucgcuuuugauaaucaacugggc

SEQ ID NO: 90037 - RNA, 32 nt, Homo Sapiens
auggcuugguuauaauuuauaacuuacuuauu

SEQ ID NO: 90038 - RNA, 32 nt, Homo Sapiens
ggaaaaguaagggaauaaauuuuugucuuugu

SEQ ID NO: 90039 - RNA, 32 nt, Homo Sapiens
ccaaacuauugauacauaaggguugagagaaa

SEQ ID NO: 90040 - RNA, 32 nt, Homo Sapiens
augggccaaguuucucagaaaauacauagcuu

SEQ ID NO: 90041 - RNA, 32 nt, Homo Sapiens
ugcaacugcaggacccaaaaauagaggccaug

SEQ ID NO: 90042 - RNA, 32 nt, Homo Sapiens
accaagcugcaggcgagcugccgggcgcuuuu

SEQ ID NO: 90043 - RNA, 32 nt, Homo Sapiens
agaaaauugguaguaaagaacauuuggaaucc

SEQ ID NO: 90044 - RNA, 32 nt, Homo Sapiens
aaggagcaguagcagcagcagcaggagaagau

SEQ ID NO: 90045 - RNA, 30 nt, Homo Sapiens
cucaaugaaaauaaaacuauauucauuucc

SEQ ID NO: 90046 - RNA, 32 nt, Homo Sapiens
gcugguaaaauagaaacagggauuuaaaccug

SEQ ID NO: 90047 - RNA, 32 nt, Homo Sapiens
ucuuucuaguuuguuuaguuaaggugugcagu

SEQ ID NO: 90048 - RNA, 31 nt, Homo Sapiens
ucaacaauaaucauuaaaauguuugcagcgu

SEQ ID NO: 90049 - RNA, 32 nt, Homo Sapiens
ugauucaccuaaaaauguguuaacugaaagaa

SEQ ID NO: 90050 - RNA, 32 nt, Homo Sapiens
gagacaagcuaaaagaggauauccaguuguuu

SEQ ID NO: 90051 - RNA, 32 nt, Homo Sapiens
aaaaagacugauuuuuaaaguauggcauuuuu

SEQ ID NO: 90052 - RNA, 32 nt, Homo Sapiens
gcacauggaguugucguguuucccuucacuuu

SEQ ID NO: 90053 - RNA, 32 nt, Homo Sapiens
uuuucagacaccuuuuguaacagcccugugag

SEQ ID NO: 90054 - RNA, 32 nt, Homo Sapiens
cgacuacacacacgugcgcacccccuucgaga

SEQ ID NO: 90055 - RNA, 32 nt, Homo Sapiens
auacugucuacaugcuuucucauucaagaauu

SEQ ID NO: 90056 - RNA, 32 nt, Homo Sapiens
auucuuaagaaaccaacauaucacugaaagaa

SEQ ID NO: 90057 - RNA, 32 nt, Homo Sapiens
ccagccccauccccuccaccccacaccugagu

SEQ ID NO: 90058 - RNA, 32 nt, Homo Sapiens
gaacugcggucacuauuuuguaauaaaugugg

SEQ ID NO: 90059 - RNA, 32 nt, Homo Sapiens
uuuaacugauguaugaauauuaauacucuaaa

SEQ ID NO: 90060 - RNA, 32 nt, Homo Sapiens
ccggauccgguggggugaaagcagccagcuca

SEQ ID NO: 90061 - RNA, 32 nt, Homo Sapiens
gguuauacaucaugcauaagcuacacuuuuau

SEQ ID NO: 90062 - RNA, 32 nt, Homo Sapiens
gaaacauccucucaaaaaucagaugggacaug

SEQ ID NO: 90063 - RNA, 32 nt, Homo Sapiens
guuguaaaacacaacuuggaaacuggaauuua

SEQ ID NO: 90064 - RNA, 32 nt, Homo Sapiens
cuuuuggcgaguuugcuauuugccuguugaaa

SEQ ID NO: 90065 - RNA, 32 nt, Homo Sapiens
ucuugacagccaaagaaauucgaggaucgccu

SEQ ID NO: 90066 - RNA, 32 nt, Homo Sapiens
cagagggcgaugccucagaaugcccacaagcu

SEQ ID NO: 90067 - RNA, 29 nt, Homo Sapiens
agauuuaugacaaaguccaguuuucaaca

SEQ ID NO: 90068 - RNA, 32 nt, Homo Sapiens
ccaagggccuguucugccccagcuguuccucc

SEQ ID NO: 90069 - RNA, 32 nt, Homo Sapiens
cgguacacauccagcaccuugcaguucaggcu

SEQ ID NO: 90070 - RNA, 32 nt, Homo Sapiens
aaaagaaaaaucaguguuuagaaauguugaua

SEQ ID NO: 90071 - RNA, 32 nt, Homo Sapiens
ucugacacacugggcugccguccggugucaag

SEQ ID NO: 90072 - RNA, 32 nt, Homo Sapiens
cucuuggauacuaaaugaaaugaggugugugg

SEQ ID NO: 90073 - RNA, 32 nt, Homo Sapiens
auaacuaguaauaccaaagacuauuucaaaau

SEQ ID NO: 90074 - RNA, 32 nt, Homo Sapiens
uccccgccagccgccuuccccagcagccgcag

SEQ ID NO: 90075 - RNA, 32 nt, Homo Sapiens
ugagugucucccaggugcaggcaugagccagg

SEQ ID NO: 90076 - RNA, 32 nt, Homo Sapiens
auaagaaacugugaaauugagcuuacugagua

SEQ ID NO: 90077 - RNA, 32 nt, Homo Sapiens
aggagcccugucagcugcccuccuccaccuaa

SEQ ID NO: 90078 - RNA, 32 nt, Homo Sapiens
ugcaaguguccucccccuuaggggccagaaaa

SEQ ID NO: 90079 - RNA, 32 nt, Homo Sapiens
gcaguauugaugccauuguagaauagaacugg

SEQ ID NO: 90080 - RNA, 32 nt, Homo Sapiens
aggaccuuuugcauucucuucagacacaauuu

SEQ ID NO: 90081 - RNA, 31 nt, Homo Sapiens
cuuagugagccagggaaccaggcuccagacc

SEQ ID NO: 90082 - RNA, 32 nt, Homo Sapiens
aggcuucggcccggugccccggcuccuuuccu

SEQ ID NO: 90083 - RNA, 32 nt, Homo Sapiens
cacaaguuccugcuccuccccacacugagcuc

SEQ ID NO: 90084 - RNA, 32 nt, Homo Sapiens
uugccuauauaucugugagggcacauauucau

SEQ ID NO: 90085 - RNA, 32 nt, Homo Sapiens
accuggucaggcuccauccccucccccaccug

SEQ ID NO: 90086 - RNA, 32 nt, Homo Sapiens
uaguaucugaagauacugaaucaucaugaaau

SEQ ID NO: 90087 - RNA, 32 nt, Homo Sapiens
ccaucucuuuuggauuuuuuuaagguauuugc

SEQ ID NO: 90088 - RNA, 30 nt, Homo Sapiens
cgcggcggcgguggcggcggggaaaauggc

SEQ ID NO: 90089 - RNA, 32 nt, Homo Sapiens
caagucacuccagacuaaccugugugccagac

SEQ ID NO: 90090 - RNA, 32 nt, Homo Sapiens
cccgaucgcgcgcggccuccgcccaccgccuc

SEQ ID NO: 90091 - RNA, 31 nt, Homo Sapiens
ccccgaucuggcccccugccccgcgaagaug

SEQ ID NO: 90092 - RNA, 32 nt, Homo Sapiens
ggcccaugccccaaggagcccuucagagccca

SEQ ID NO: 90093 - RNA, 32 nt, Homo Sapiens
gugaaccacagugagaggccuguccucacuac

SEQ ID NO: 90094 - RNA, 32 nt, Homo Sapiens
ugauauuugucaacacaguauaagcuuucuag

SEQ ID NO: 90095 - RNA, 32 nt, Homo Sapiens
aggucccgcggcccgcaccugccgcccgcacc

SEQ ID NO: 90096 - RNA, 32 nt, Homo Sapiens
gauccaaggcgcaauuauuuguuccccagcua

SEQ ID NO: 90097 - RNA, 32 nt, Homo Sapiens
gauugcaaaugccucuucaguuuggacucagc

SEQ ID NO: 90098 - RNA, 32 nt, Homo Sapiens
ucccaucccguuuagaguuauuuaggcuuugu

SEQ ID NO: 90099 - RNA, 32 nt, Homo Sapiens
aauccauuuaggugcugaguuacggucccauc

SEQ ID NO: 90100 - RNA, 32 nt, Homo Sapiens
auuuugcccaacggugguacuccagcagguac

SEQ ID NO: 90101 - RNA, 32 nt, Homo Sapiens
cugcagacgaggacuauccagcccuaggggua

SEQ ID NO: 90102 - RNA, 32 nt, Homo Sapiens
cugcucaucauuccuugagaaaaacaaugagc

SEQ ID NO: 90103 - RNA, 32 nt, Homo Sapiens
ccaaaucucaacucagcuacagaaucuacugu

SEQ ID NO: 90104 - RNA, 32 nt, Homo Sapiens
ccacucuuuuagaacaaaaacagcacaguguu

SEQ ID NO: 90105 - RNA, 32 nt, Homo Sapiens
aauucugacuuuugaaaauauucauuuaccuu

SEQ ID NO: 90106 - RNA, 32 nt, Homo Sapiens
ccaauaguuuuagauuauuuuaucugguaugg

SEQ ID NO: 90107 - RNA, 32 nt, Homo Sapiens
ggggcuggacgggagccaaaaucagagacuca

SEQ ID NO: 90108 - RNA, 32 nt, Homo Sapiens
gcgggccagcgagcugacgggcauggccuuca

SEQ ID NO: 90109 - RNA, 32 nt, Homo Sapiens
agaagccagauaaaaucucagauggaaagaaa

SEQ ID NO: 90110 - RNA, 32 nt, Homo Sapiens
uagacuaaauguuuaacugcugaacuaguucc

SEQ ID NO: 90111 - RNA, 32 nt, Homo Sapiens
ggggccgggccaagaacaccaccucuucaccc

SEQ ID NO: 90112 - RNA, 32 nt, Homo Sapiens
ugauacaucaaaauauaaauggaauguaauua

SEQ ID NO: 90113 - RNA, 32 nt, Homo Sapiens
cugugucucugaccccuucucauuugccuagu

SEQ ID NO: 90114 - RNA, 32 nt, Homo Sapiens
ucucccucccccagccccccaccccaugacag

SEQ ID NO: 90115 - RNA, 32 nt, Homo Sapiens
ugcuuuugaagauggauugaagagaacgucca

SEQ ID NO: 90116 - RNA, 32 nt, Homo Sapiens
uccugacgucucuccacuccucuucuuccaaa

SEQ ID NO: 90117 - RNA, 32 nt, Homo Sapiens
cccggcccgcgacaagaagacccgcaucaucc

SEQ ID NO: 90118 - RNA, 32 nt, Homo Sapiens
acacagauauugugauuuacugcaaggauccu

SEQ ID NO: 90119 - RNA, 32 nt, Homo Sapiens
aacugggaugauaauaaugccuaccuugugag

SEQ ID NO: 90120 - RNA, 32 nt, Homo Sapiens
agacaggaagaucaccugagcccaggagcuca

SEQ ID NO: 90121 - RNA, 32 nt, Homo Sapiens
gaaaaguauugcuugguuaaauuaaaaucauu

SEQ ID NO: 90122 - RNA, 32 nt, Homo Sapiens
uugguuucuaacuagacuaccuuuacugaacu

SEQ ID NO: 90123 - RNA, 32 nt, Homo Sapiens
acagauguuaaaccuuuuaauguuuugauuug

SEQ ID NO: 90124 - RNA, 32 nt, Homo Sapiens
cuucuguuugguacaaauacagugucauuguu

SEQ ID NO: 90125 - RNA, 32 nt, Homo Sapiens
ccuuuauauaucuaucuauaucuauaucuauu

SEQ ID NO: 90126 - RNA, 28 nt, Homo Sapiens
aaguuuuguuuagcaauguguuucuggu

SEQ ID NO: 90127 - RNA, 32 nt, Homo Sapiens
ggcagggaggauuuugcuuuugcuuuugcuuu

SEQ ID NO: 90128 - RNA, 32 nt, Homo Sapiens
ugggcagcagugagucucggccugggcagaaa

SEQ ID NO: 90129 - RNA, 32 nt, Homo Sapiens
ugugugaggucuuggugggcucaggccagcug

SEQ ID NO: 90130 - RNA, 32 nt, Homo Sapiens
uuuuaucuggaaagacuuuucuagcugcaauu

SEQ ID NO: 90131 - RNA, 32 nt, Homo Sapiens
gccaaguuauauugaauauaucagaaucugug

SEQ ID NO: 90132 - RNA, 32 nt, Homo Sapiens
cuacauacuuuuuucuaucaaauauguaaacg

SEQ ID NO: 90133 - RNA, 32 nt, Homo Sapiens
uuucagaagauaagaguucacugaaugcaccu

SEQ ID NO: 90134 - RNA, 32 nt, Homo Sapiens
ggugacgguggccucaggauucagggcccagc

SEQ ID NO: 90135 - RNA, 32 nt, Homo Sapiens
accccggcucugcaggagugcacggaaguggu

SEQ ID NO: 90136 - RNA, 32 nt, Homo Sapiens
cccccagacgacaggcuucucaucgcugucgc

SEQ ID NO: 90137 - RNA, 32 nt, Homo Sapiens
aguggggauugugacauauugcugggcccagc

SEQ ID NO: 90138 - RNA, 32 nt, Homo Sapiens
uucuggaaugcagucuguauaauccuauucag

SEQ ID NO: 90139 - RNA, 32 nt, Homo Sapiens
gaaauacuagagcucucuguuuuacacagaau

SEQ ID NO: 90140 - RNA, 32 nt, Homo Sapiens
caaaccagaaaaagucagacucauuguugauu

SEQ ID NO: 90141 - RNA, 32 nt, Homo Sapiens
agacaggaggggccccaagcccugccccugag

SEQ ID NO: 90142 - RNA, 32 nt, Homo Sapiens
aguuccuugauucugcagauacugcugcuguu

SEQ ID NO: 90143 - RNA, 32 nt, Homo Sapiens
ccuuagguuugccccugaagucugucugcucc

SEQ ID NO: 90144 - RNA, 32 nt, Homo Sapiens
aguauuauaugauuuugcuggacuauuucacu

SEQ ID NO: 90145 - RNA, 32 nt, Homo Sapiens
agcuuuugucuggccugugcugcgugggagcc

SEQ ID NO: 90146 - RNA, 32 nt, Homo Sapiens
ugacuguuaaacacugaugacgcaugcacugc

SEQ ID NO: 90147 - RNA, 32 nt, Homo Sapiens
cagacuuauuuuuuauucuaaugaugguagca

SEQ ID NO: 90148 - RNA, 32 nt, Homo Sapiens
aaacccguggguuuuggaauguguguucccgg

SEQ ID NO: 90149 - RNA, 32 nt, Homo Sapiens
gcacagcucacuuuucaaugguggaauugaaa

SEQ ID NO: 90150 - RNA, 32 nt, Homo Sapiens
ucucagauauuuuucuucuuuaaaaaucuuuc

SEQ ID NO: 90151 - RNA, 32 nt, Homo Sapiens
ccaacaagccccacagccccucaaagacuuuu

SEQ ID NO: 90152 - RNA, 32 nt, Homo Sapiens
guccuaggcagggaccaaaauuccuugucagc

SEQ ID NO: 90153 - RNA, 32 nt, Homo Sapiens
agaugaaugcaaacaucacaaagaaguuucuc

SEQ ID NO: 90154 - RNA, 30 nt, Homo Sapiens
acgaaggcccccacuccgccggcggcgcgu

SEQ ID NO: 90155 - RNA, 32 nt, Homo Sapiens
agauuggaaaaagcaccgcagaugggaaccuu

SEQ ID NO: 90156 - RNA, 32 nt, Homo Sapiens
guguugcucggaauuuaacauguaauuggaug

SEQ ID NO: 90157 - RNA, 32 nt, Homo Sapiens
uccaagugcaucccuuauucuauaggaaauaa

SEQ ID NO: 90158 - RNA, 32 nt, Homo Sapiens
uucgagucuccauugcacaauggccagcccug

SEQ ID NO: 90159 - RNA, 32 nt, Homo Sapiens
ccccaccaccgcccagcucagcucagcccagc

SEQ ID NO: 90160 - RNA, 32 nt, Homo Sapiens
agaggccuuaaccaacgauaacggcggcgacg

SEQ ID NO: 90161 - RNA, 32 nt, Homo Sapiens
gccccugcagauccaggucuccaggccuugcc

SEQ ID NO: 90162 - RNA, 32 nt, Homo Sapiens
acaauuuagauaaauagaaaugucugucuuag

SEQ ID NO: 90163 - RNA, 32 nt, Homo Sapiens
gacacugcccccuaccuucucugcccacaccu

SEQ ID NO: 90164 - RNA, 30 nt, Homo Sapiens
gcgucgggagguguguuuucagauaccaga

SEQ ID NO: 90165 - RNA, 32 nt, Homo Sapiens
ccucggucccggcccccauccuccccgcccca

SEQ ID NO: 90166 - RNA, 32 nt, Homo Sapiens
cagaugggauaguuuacugacuaguuggagca

SEQ ID NO: 90167 - RNA, 32 nt, Homo Sapiens
uggaaaucacagcgugguguuccuccugacgg

SEQ ID NO: 90168 - RNA, 29 nt, Homo Sapiens
ggaagucggggacauaagaugauuuucac

SEQ ID NO: 90169 - RNA, 32 nt, Homo Sapiens
auuauuaaguugauagcccucuagucaguuau

SEQ ID NO: 90170 - RNA, 32 nt, Homo Sapiens
gauagguaacagagaagaccucgucccuuccu

SEQ ID NO: 90171 - RNA, 32 nt, Homo Sapiens
ucacccaccugccauggacgggcccgccgagc

SEQ ID NO: 90172 - RNA, 32 nt, Homo Sapiens
cagugacucacagaguggcacaaguacaaauc

SEQ ID NO: 90173 - RNA, 32 nt, Homo Sapiens
accaucaagaaccuacagacuccaucucuucu

SEQ ID NO: 90174 - RNA, 32 nt, Homo Sapiens
guugagccaggguggggcugcucaggggcgug

SEQ ID NO: 90175 - RNA, 32 nt, Homo Sapiens
agaguggaagagguggcggggaccagcugggc

SEQ ID NO: 90176 - RNA, 32 nt, Homo Sapiens
ucucugcaaucaaauggcacuaaccaagaaag

SEQ ID NO: 90177 - RNA, 32 nt, Homo Sapiens
aaauuaccuuuaugaaauauaguuuuguauaa

SEQ ID NO: 90178 - RNA, 31 nt, Homo Sapiens
cagcccugcgcuuccgccgggggacgcggag

SEQ ID NO: 90179 - RNA, 32 nt, Homo Sapiens
uaucuucaacaccacaccccccaccccaucgu

SEQ ID NO: 90180 - RNA, 32 nt, Homo Sapiens
cucucuucuccucccuagugcgagguuaaaac

SEQ ID NO: 90181 - RNA, 32 nt, Homo Sapiens
ggauccuaggaugcuuacaugcaaugaugaac

SEQ ID NO: 90182 - RNA, 32 nt, Homo Sapiens
auggccaggggagggggucuguggaagauuca

SEQ ID NO: 90183 - RNA, 32 nt, Homo Sapiens
aaggaaucauucuccccucccucccaccacau

SEQ ID NO: 90184 - RNA, 32 nt, Homo Sapiens
gaggcagggcggccgugccuucugccgugcgc

SEQ ID NO: 90185 - RNA, 32 nt, Homo Sapiens
cuuuguuaucuaaauguuucagaauucaaucg

SEQ ID NO: 90186 - RNA, 32 nt, Homo Sapiens
gauauuuuguaucugcuuggaauauauuaucu

SEQ ID NO: 90187 - RNA, 32 nt, Homo Sapiens
uggugcacuccagggcaucacauccuggggcu

SEQ ID NO: 90188 - RNA, 32 nt, Homo Sapiens
uaccucuacugauacuuucuacucaagcauug

SEQ ID NO: 90189 - RNA, 32 nt, Homo Sapiens
cgucgacugcccagaguccgcggccggggcgc

SEQ ID NO: 90190 - RNA, 32 nt, Homo Sapiens
caauuuguauuuccuugguacauauuuuaaaa

SEQ ID NO: 90191 - RNA, 32 nt, Homo Sapiens
cuggucuugauguauuugauaagaaugauuaa

SEQ ID NO: 90192 - RNA, 32 nt, Homo Sapiens
ccccuccgucugccuccgcacggcuggcagag

SEQ ID NO: 90193 - RNA, 31 nt, Homo Sapiens
uugggugaccuggagcuggugcuguuagagc

SEQ ID NO: 90194 - RNA, 32 nt, Homo Sapiens
agaaaacuggccagaggccaucugaagccaaa

SEQ ID NO: 90195 - RNA, 32 nt, Homo Sapiens
gaaaaccugauaggugagacuacuucaguuua

SEQ ID NO: 90196 - RNA, 32 nt, Homo Sapiens
cccaacaacacaaagaaguaagggcaguuauu

SEQ ID NO: 90197 - RNA, 32 nt, Homo Sapiens
augucaaaucaucaaaacagcagcagaggaag

SEQ ID NO: 90198 - RNA, 32 nt, Homo Sapiens
ccucugcuccuggccuugggcaagggcacuca

SEQ ID NO: 90199 - RNA, 32 nt, Homo Sapiens
acgggaggcgagggaggcucuguaugaaacag

SEQ ID NO: 90200 - RNA, 32 nt, Homo Sapiens
gggagccuggagccccggggccuccagcgagg

SEQ ID NO: 90201 - RNA, 32 nt, Homo Sapiens
gaucugaagaacucucuggggaguuucauuug

SEQ ID NO: 90202 - RNA, 31 nt, Homo Sapiens
uccgagcagaagcagaaccaggcggcucuga

SEQ ID NO: 90203 - RNA, 32 nt, Homo Sapiens
cgucauagcggcgggcaucccaucugcacguc

SEQ ID NO: 90204 - RNA, 32 nt, Homo Sapiens
uauucucugugcucuaggggauaccuauuuug

SEQ ID NO: 90205 - RNA, 32 nt, Homo Sapiens
aguuuuuauaugccagauacagagaauuugua

SEQ ID NO: 90206 - RNA, 32 nt, Homo Sapiens
uauacuaaaaaauuauuuguuugaaauucaca

SEQ ID NO: 90207 - RNA, 31 nt, Homo Sapiens
ugcaguaaccgcagccagccggugccuggcg

SEQ ID NO: 90208 - RNA, 32 nt, Homo Sapiens
gauaguaugagaaauaucuuugaaagaaauau

SEQ ID NO: 90209 - RNA, 32 nt, Homo Sapiens
uaguggaccccauuugggcaugugccuagcua

SEQ ID NO: 90210 - RNA, 32 nt, Homo Sapiens
cggggcuguuuaacaagaacuucagcgcagcc

SEQ ID NO: 90211 - RNA, 32 nt, Homo Sapiens
guuucauugugaucacuguaaaugguaaucag

SEQ ID NO: 90212 - RNA, 32 nt, Homo Sapiens
ggcaacacagccagcacggugcucuccagggc

SEQ ID NO: 90213 - RNA, 32 nt, Homo Sapiens
cugggcaccuguaucccaacuacuugggaggc

SEQ ID NO: 90214 - RNA, 32 nt, Homo Sapiens
auuccuguauauuuuagaguauaauaaaacac

SEQ ID NO: 90215 - RNA, 32 nt, Homo Sapiens
caauuaagauaaagugauaugugaagaaaucu

SEQ ID NO: 90216 - RNA, 32 nt, Homo Sapiens
auuugcauauccuucaagaugccugaagacaa

SEQ ID NO: 90217 - RNA, 32 nt, Homo Sapiens
cauuguuccagaacugcauuaguuaagauuac

SEQ ID NO: 90218 - RNA, 32 nt, Homo Sapiens
caugaugaaaggaacagaaacaguguuauuag

SEQ ID NO: 90219 - RNA, 32 nt, Homo Sapiens
guucuccacaguguuuuguauguguuuggggc

SEQ ID NO: 90220 - RNA, 32 nt, Homo Sapiens
ggggcucagcgaugcucugggaacccuugggg

SEQ ID NO: 90221 - RNA, 32 nt, Homo Sapiens
aaucucggccucagccugcaagccaaguguuc

SEQ ID NO: 90222 - RNA, 32 nt, Homo Sapiens
ggacaaggugccuaugucugcuccuuggaauu

SEQ ID NO: 90223 - RNA, 32 nt, Homo Sapiens
cccagucacacaguaucccacacacacuggug

SEQ ID NO: 90224 - RNA, 32 nt, Homo Sapiens
cacagugacaauggaauuguguugugccuuac

SEQ ID NO: 90225 - RNA, 32 nt, Homo Sapiens
uccugauuccaagaaugccaucugauaaaaaa

SEQ ID NO: 90226 - RNA, 32 nt, Homo Sapiens
ucucuucuuauucaacauuaauccuuacuaga

SEQ ID NO: 90227 - RNA, 32 nt, Homo Sapiens
cuucccugcucuugcaguugcucugacguaga

SEQ ID NO: 90228 - RNA, 32 nt, Homo Sapiens
cugaaggauauuuucaacaauuagaggaauuu

SEQ ID NO: 90229 - RNA, 32 nt, Homo Sapiens
agauugcguggguucugccuaaagcugaauuc

SEQ ID NO: 90230 - RNA, 32 nt, Homo Sapiens
gaggaacaaauuacaaguguacccaauaacug

SEQ ID NO: 90231 - RNA, 32 nt, Homo Sapiens
ucagauggggggaaccccacccugccccaccc

SEQ ID NO: 90232 - RNA, 32 nt, Homo Sapiens
gccggccucauucggggcacugcgaguaugga

SEQ ID NO: 90233 - RNA, 32 nt, Homo Sapiens
gauggacacugacuugaggagccaggaaagaa

SEQ ID NO: 90234 - RNA, 32 nt, Homo Sapiens
cccccuccaucccagcccacuggaccagaacu

SEQ ID NO: 90235 - RNA, 28 nt, Homo Sapiens
cgggccgauuuucccaggaugacagagc

SEQ ID NO: 90236 - RNA, 32 nt, Homo Sapiens
ggggaaggccaggguggaagggcggcuugagg

SEQ ID NO: 90237 - RNA, 32 nt, Homo Sapiens
uuuggugccuuacuuuuaucuuaauuuuugcc

SEQ ID NO: 90238 - RNA, 32 nt, Homo Sapiens
cugaaguuggacagcaaaaccauugcuucacu

SEQ ID NO: 90239 - RNA, 32 nt, Homo Sapiens
cuaacagcugggugcggguggagcugcgggcg

SEQ ID NO: 90240 - RNA, 32 nt, Homo Sapiens
uuugauugugaagcaaggcccgaggccuugac

SEQ ID NO: 90241 - RNA, 32 nt, Homo Sapiens
gagccccaccgccccuccacuccucggccuug

SEQ ID NO: 90242 - RNA, 30 nt, Homo Sapiens
gggucuccuggcggcggcggagugaggcug

SEQ ID NO: 90243 - RNA, 32 nt, Homo Sapiens
ggcgagccaaccccaccucuaugcccugagcc

SEQ ID NO: 90244 - RNA, 32 nt, Homo Sapiens
uugcaguccccgccggccccaaggcaccgacu

SEQ ID NO: 90245 - RNA, 32 nt, Homo Sapiens
caacaauuugaaaaacuuugcagaugagccac

SEQ ID NO: 90246 - RNA, 32 nt, Homo Sapiens
aauaauaauuuaaugugaauggguucugagcu

SEQ ID NO: 90247 - RNA, 32 nt, Homo Sapiens
uacaggaagauaaguguucguucuuuucugaa

SEQ ID NO: 90248 - RNA, 32 nt, Homo Sapiens
acucuaaucuacuuaaagguauacaaaauaug

SEQ ID NO: 90249 - RNA, 32 nt, Homo Sapiens
aaaaacaugagaguccaggcugucugagucag

SEQ ID NO: 90250 - RNA, 32 nt, Homo Sapiens
ugcuuguuuacuccuuaagucaauguauuggu

SEQ ID NO: 90251 - RNA, 32 nt, Homo Sapiens
agagcccucucgcggccgcggcggcagcagca

SEQ ID NO: 90252 - RNA, 32 nt, Homo Sapiens
aaaaaugacauuaacagcacucuuucaagaaa

SEQ ID NO: 90253 - RNA, 32 nt, Homo Sapiens
uugcugggagagcgggacgguccggagcaagc

SEQ ID NO: 90254 - RNA, 32 nt, Homo Sapiens
guauaauguuuuguaauuuugcaaaacauauc

SEQ ID NO: 90255 - RNA, 32 nt, Homo Sapiens
uaggcagaggcuuauaaagaaauggguucugg

SEQ ID NO: 90256 - RNA, 32 nt, Homo Sapiens
cagacucggauugcuaacgaaaaguaccuaag

SEQ ID NO: 90257 - RNA, 32 nt, Homo Sapiens
ucugggguggggcggcagcgggagcgcgcccg

SEQ ID NO: 90258 - RNA, 32 nt, Homo Sapiens
guggccgcggccuggcgucugcugcgacagga

SEQ ID NO: 90259 - RNA, 32 nt, Homo Sapiens
auaugguguccugcuuuuuuuguagaaaaugu

SEQ ID NO: 90260 - RNA, 32 nt, Homo Sapiens
ucuuugcacauccugcucuuucugccugaaaa

SEQ ID NO: 90261 - RNA, 32 nt, Homo Sapiens
cugcccagcuggacuccagggugguccacgca

SEQ ID NO: 90262 - RNA, 32 nt, Homo Sapiens
gccuuagagaaugggguccccugcacugaagg

SEQ ID NO: 90263 - RNA, 32 nt, Homo Sapiens
uugcauuuaaacaaacuagacauuuucuuacg

SEQ ID NO: 90264 - RNA, 30 nt, Homo Sapiens
cccgcagccaccgccacccauuggaauggc

SEQ ID NO: 90265 - RNA, 32 nt, Homo Sapiens
gggucccucugggcccaguuucccuaucugua

SEQ ID NO: 90266 - RNA, 32 nt, Homo Sapiens
auuccaggaucuuuaaauuuccauggaugcau

SEQ ID NO: 90267 - RNA, 32 nt, Homo Sapiens
gcaggugaacaggaauugcugcugcugcugga

SEQ ID NO: 90268 - RNA, 32 nt, Homo Sapiens
aaacaacuguagcagcacaucuguguauuugu

SEQ ID NO: 90269 - RNA, 32 nt, Homo Sapiens
aggccgagcugacgggcgugcggccgcugcgc

SEQ ID NO: 90270 - RNA, 32 nt, Homo Sapiens
gugcgccgccgucagugccugcagcuuuccac

SEQ ID NO: 90271 - RNA, 32 nt, Homo Sapiens
ccgucagcacagcuacgggggcccguggacga

SEQ ID NO: 90272 - RNA, 32 nt, Homo Sapiens
acauaaaugcuccuuguggccuuuuuuauaac

SEQ ID NO: 90273 - RNA, 32 nt, Homo Sapiens
aaauuauauuugauuauaucaccaauuaguua

SEQ ID NO: 90274 - RNA, 32 nt, Homo Sapiens
ucuagaaguggaaggauuguagucauccugaa

SEQ ID NO: 90275 - RNA, 32 nt, Homo Sapiens
aggcucugcuccaggaguccaggaaagacgag

SEQ ID NO: 90276 - RNA, 32 nt, Homo Sapiens
gacagcuuucagguuuccagauuagacagucc

SEQ ID NO: 90277 - RNA, 32 nt, Homo Sapiens
aguggucagaggucagaggcaggucugugaug

SEQ ID NO: 90278 - RNA, 32 nt, Homo Sapiens
accucgguugcggaugcuggcggcgagccggg

SEQ ID NO: 90279 - RNA, 32 nt, Homo Sapiens
cucuccuggucgcuuugccaucaagaaacauu

SEQ ID NO: 90280 - RNA, 32 nt, Homo Sapiens
agcagcuuguaauuuauugaucuacauggcau

SEQ ID NO: 90281 - RNA, 31 nt, Homo Sapiens
caaugcucaggaagccugcccugugcuugag

SEQ ID NO: 90282 - RNA, 32 nt, Homo Sapiens
uuuucucugaccagguacaacaccugacuuua

SEQ ID NO: 90283 - RNA, 31 nt, Homo Sapiens
uaacucucaagguauguucuaacugcuucca

SEQ ID NO: 90284 - RNA, 32 nt, Homo Sapiens
uuagcaugcugcuugguuuucuuacuuagugc

SEQ ID NO: 90285 - RNA, 29 nt, Homo Sapiens
agaguaaggcuuauauauuuuauaguagg

SEQ ID NO: 90286 - RNA, 32 nt, Homo Sapiens
cguguagugaauuguucagucuugcuccguuu

SEQ ID NO: 90287 - RNA, 32 nt, Homo Sapiens
ucacagcagaaucaggaucucuuucucauuca

SEQ ID NO: 90288 - RNA, 32 nt, Homo Sapiens
ggaagagaaaucaaaggggcucucgcaaaguu

SEQ ID NO: 90289 - RNA, 32 nt, Homo Sapiens
guaucuccuagggacuucaauguaucuuugcc

SEQ ID NO: 90290 - RNA, 32 nt, Homo Sapiens
uaccucuuuguagcacguaguguugugaaacu

SEQ ID NO: 90291 - RNA, 32 nt, Homo Sapiens
acacauucuuggugugcuugcugcugaggggu

SEQ ID NO: 90292 - RNA, 32 nt, Homo Sapiens
cucgacuccugcaccugucccgagggcuggcc

SEQ ID NO: 90293 - RNA, 31 nt, Homo Sapiens
gagaagagccacugagccugaguugaaauau

SEQ ID NO: 90294 - RNA, 32 nt, Homo Sapiens
agacccgggucgucuguuccacgcggcgguug

SEQ ID NO: 90295 - RNA, 32 nt, Homo Sapiens
gagauguuugaggugacgguaggaaugugagc

SEQ ID NO: 90296 - RNA, 32 nt, Homo Sapiens
ucaauguaaaagcauugaaguaaauguuucuu

SEQ ID NO: 90297 - RNA, 32 nt, Homo Sapiens
uccugguaccccucagaagacacccagacacu

SEQ ID NO: 90298 - RNA, 32 nt, Homo Sapiens
aaaugaaaaggaaaauaaaaacuguggcugac

SEQ ID NO: 90299 - RNA, 32 nt, Homo Sapiens
cagcuucagcccaaaccuuguuuauggggagu

SEQ ID NO: 90300 - RNA, 32 nt, Homo Sapiens
ggagggacacuggagagcagggggaggccacg

SEQ ID NO: 90301 - RNA, 32 nt, Homo Sapiens
guguuggcaaggaaauggagcaacugaaauuc

SEQ ID NO: 90302 - RNA, 32 nt, Homo Sapiens
gaaaguguacacugcagaacugcccauucuca

SEQ ID NO: 90303 - RNA, 32 nt, Homo Sapiens
ggcccacaguacaguguguaucuauaccaggu

SEQ ID NO: 90304 - RNA, 29 nt, Homo Sapiens
guggagaugugacagggaaagcuagcgag

SEQ ID NO: 90305 - RNA, 32 nt, Homo Sapiens
ucuguguagcaccagcccugggaaugauggag

SEQ ID NO: 90306 - RNA, 32 nt, Homo Sapiens
uguaaauagauauaaaaggccuuuuuucuaaa

SEQ ID NO: 90307 - RNA, 32 nt, Homo Sapiens
accuguaaucccaacacuuugggaggccgacc

SEQ ID NO: 90308 - RNA, 32 nt, Homo Sapiens
ccaggaucaaccaucacacucccuuugcuuca

SEQ ID NO: 90309 - RNA, 32 nt, Homo Sapiens
ccaaguugcuguauauuuucacaaguaugucu

SEQ ID NO: 90310 - RNA, 32 nt, Homo Sapiens
gaccccuccucugggggcucugccaguuguga

SEQ ID NO: 90311 - RNA, 32 nt, Homo Sapiens
agacaccccuguagaaagaaacaaagaacagg

SEQ ID NO: 90312 - RNA, 32 nt, Homo Sapiens
aaucuccuuucuguucuacuuuagcauacuau

SEQ ID NO: 90313 - RNA, 32 nt, Homo Sapiens
aguuguuucagauaaauuucaauuagauuuaa

SEQ ID NO: 90314 - RNA, 32 nt, Homo Sapiens
cuggaccucuucugccacgcgcucauuuucug

SEQ ID NO: 90315 - RNA, 32 nt, Homo Sapiens
ggcuuacucuacaaauuuuggugcuggcaaau

SEQ ID NO: 90316 - RNA, 32 nt, Homo Sapiens
aaucuacauaggucuuuuuuuuuagauguuug

SEQ ID NO: 90317 - RNA, 30 nt, Homo Sapiens
gucagaaaacuugccacagagucuugcucu

SEQ ID NO: 90318 - RNA, 32 nt, Homo Sapiens
cucuucaauuuccauccuuguuugcaaagguu

SEQ ID NO: 90319 - RNA, 32 nt, Homo Sapiens
gucagaaaugugcugaagaaacaaaggcuggu

SEQ ID NO: 90320 - RNA, 32 nt, Homo Sapiens
cugcuggcagcccuuccaugucuccaaaccug

SEQ ID NO: 90321 - RNA, 32 nt, Homo Sapiens
ccucggaggagaaggucuugguggccgacaag

SEQ ID NO: 90322 - RNA, 32 nt, Homo Sapiens
cuggagacgcuggccacugaacaucaugaauu

SEQ ID NO: 90323 - RNA, 32 nt, Homo Sapiens
aauucuaugccugucuuaauuuucuuucacuu

SEQ ID NO: 90324 - RNA, 32 nt, Homo Sapiens
uuuuucagaaauguauauaaauaaaaucauuc

SEQ ID NO: 90325 - RNA, 32 nt, Homo Sapiens
aacaguggggagagauuggagagcgggugugg

SEQ ID NO: 90326 - RNA, 32 nt, Homo Sapiens
ugggaaagagacccggggaggccaggaguagc

SEQ ID NO: 90327 - RNA, 32 nt, Homo Sapiens
uaaauacauacauacauagauauauacccaga

SEQ ID NO: 90328 - RNA, 32 nt, Homo Sapiens
acaggcucagcaugcagaagugcaugaacagg

SEQ ID NO: 90329 - RNA, 32 nt, Homo Sapiens
guagaccucaugcauucuuuuagcaugauuuu

SEQ ID NO: 90330 - RNA, 32 nt, Homo Sapiens
gugaggacauccgccucccugaaaguggugcu

SEQ ID NO: 90331 - RNA, 32 nt, Homo Sapiens
cucuuaaugaaaacaaaacauaaaaacaucac

SEQ ID NO: 90332 - RNA, 32 nt, Homo Sapiens
caccacaaucccaaauccaaaggacgcaucag

SEQ ID NO: 90333 - RNA, 32 nt, Homo Sapiens
gcacucuccuggcuccuccccgcuucagccag

SEQ ID NO: 90334 - RNA, 32 nt, Homo Sapiens
auccaaagcaccaagaggcguuccucaaaaca

SEQ ID NO: 90335 - RNA, 32 nt, Homo Sapiens
gugaccgccgugguagcugcuccacacgcagc

SEQ ID NO: 90336 - RNA, 32 nt, Homo Sapiens
ucugaagaucacaacucugacaugggugacau

SEQ ID NO: 90337 - RNA, 32 nt, Homo Sapiens
ugcuugauagaguggauaguauguuaaaacug

SEQ ID NO: 90338 - RNA, 32 nt, Homo Sapiens
uuaaaaaguagacuuuaagagaucaaacucag

SEQ ID NO: 90339 - RNA, 32 nt, Homo Sapiens
gccaugucggacucggcgcccagcgcccaagc

SEQ ID NO: 90340 - RNA, 29 nt, Homo Sapiens
guauauauauguauauggauaacugcaua

SEQ ID NO: 90341 - RNA, 32 nt, Homo Sapiens
gagaacaaauacuuaagacaaaaugggcuggg

SEQ ID NO: 90342 - RNA, 32 nt, Homo Sapiens
acuucaggaaccagcucaugaucucaggaugu

SEQ ID NO: 90343 - RNA, 32 nt, Homo Sapiens
ccaccucuccgccucuccaucaccagccuuca

SEQ ID NO: 90344 - RNA, 32 nt, Homo Sapiens
agcuggcgcgccccucccauuugccuguccug

SEQ ID NO: 90345 - RNA, 32 nt, Homo Sapiens
cggcuucaugccauucucguccuucagccucc

SEQ ID NO: 90346 - RNA, 32 nt, Homo Sapiens
ggaagcaguugacaagacacauccucagugaa

SEQ ID NO: 90347 - RNA, 32 nt, Homo Sapiens
ggauggagccccacagucagaauguuacuaug

SEQ ID NO: 90348 - RNA, 32 nt, Homo Sapiens
ggcuguguuguuaaacaucuucaugcaccagc

SEQ ID NO: 90349 - RNA, 32 nt, Homo Sapiens
ggggaagauuguguuacugcccuucacaguga

SEQ ID NO: 90350 - RNA, 32 nt, Homo Sapiens
agacaaaccugccuuugcagggaaagugucuc

SEQ ID NO: 90351 - RNA, 32 nt, Homo Sapiens
ccagguuaugaaaacaguacuuggaaaacuga

SEQ ID NO: 90352 - RNA, 32 nt, Homo Sapiens
guuguccucuacauuggaaagcuaauccuacc

SEQ ID NO: 90353 - RNA, 32 nt, Homo Sapiens
cccauaaaugacuuaaaucagcuuuacaucau

SEQ ID NO: 90354 - RNA, 32 nt, Homo Sapiens
cuauauuugugauuuguaauaaaacugaguug

SEQ ID NO: 90355 - RNA, 32 nt, Homo Sapiens
aaagaagccaagucugauuauaccauauacca

SEQ ID NO: 90356 - RNA, 31 nt, Homo Sapiens
gccggcggacacugccuuccccaugcugccc

SEQ ID NO: 90357 - RNA, 32 nt, Homo Sapiens
cccucgcgugccaggcccgcggcggccgaaau

SEQ ID NO: 90358 - RNA, 32 nt, Homo Sapiens
guaauuggccccagcugagcagggcaaacacu

SEQ ID NO: 90359 - RNA, 32 nt, Homo Sapiens
acugagagaauucagaauaaauugaaagaugg

SEQ ID NO: 90360 - RNA, 32 nt, Homo Sapiens
gucucaugcaaguugucugauagagaacuuuc

SEQ ID NO: 90361 - RNA, 32 nt, Homo Sapiens
aaaaauaccaaguuauuuuauaaaagaaaaaa

SEQ ID NO: 90362 - RNA, 32 nt, Homo Sapiens
ucauuuuauuuguacuaacaaauuuuuacauc

SEQ ID NO: 90363 - RNA, 32 nt, Homo Sapiens
cugacgcagcgcgggcgcguggagccgccgcc

SEQ ID NO: 90364 - RNA, 32 nt, Homo Sapiens
aaugucuucaacaaagaccacuucccaguccu

SEQ ID NO: 90365 - RNA, 32 nt, Homo Sapiens
auuauucuaggaccaacucuucucuuauuuaa

SEQ ID NO: 90366 - RNA, 32 nt, Homo Sapiens
aagguacuuuugcuuccauuucauccaaggau

SEQ ID NO: 90367 - RNA, 32 nt, Homo Sapiens
ccagccccuguuuuuccaacauuccccaguau

SEQ ID NO: 90368 - RNA, 32 nt, Homo Sapiens
guaacaugaaacaaaugaaaguucuugcuaua

SEQ ID NO: 90369 - RNA, 32 nt, Homo Sapiens
aguaagggaaaggaggaugggagaccccuagc

SEQ ID NO: 90370 - RNA, 32 nt, Homo Sapiens
ugaucuaugaguuuugaaaaagugaauaauca

SEQ ID NO: 90371 - RNA, 32 nt, Homo Sapiens
gcaucgcuguuuccaauggcucaggagacaau

SEQ ID NO: 90372 - RNA, 32 nt, Homo Sapiens
ugaaugaaagacuauuuucauucacaugauua

SEQ ID NO: 90373 - RNA, 32 nt, Homo Sapiens
gccaauccgauugaugaagaaaauagauaauc

SEQ ID NO: 90374 - RNA, 32 nt, Homo Sapiens
cagauauaaaaugacauacguaagaaguuauu

SEQ ID NO: 90375 - RNA, 32 nt, Homo Sapiens
guggaagggguucugaggugggaccagauuuc

SEQ ID NO: 90376 - RNA, 32 nt, Homo Sapiens
aaagaugcuuucuaucucugggaaaaaggagc

SEQ ID NO: 90377 - RNA, 32 nt, Homo Sapiens
agcacuaggcccccacccugcugcugccuucc

SEQ ID NO: 90378 - RNA, 32 nt, Homo Sapiens
aagacauuuucuuagaacaguaccucacaguu

SEQ ID NO: 90379 - RNA, 32 nt, Homo Sapiens
acccccguuuccacugacgugccgucuguggc

SEQ ID NO: 90380 - RNA, 32 nt, Homo Sapiens
cucaucuagaugucauggccuacauuucugcc

SEQ ID NO: 90381 - RNA, 32 nt, Homo Sapiens
agaugaugcuuuuaugauggcaccgaaaccug

SEQ ID NO: 90382 - RNA, 32 nt, Homo Sapiens
cuuugcagcuagucccugcaaaccuugaugau

SEQ ID NO: 90383 - RNA, 32 nt, Homo Sapiens
uugaugggcagaaaugucucagccaugugaac

SEQ ID NO: 90384 - RNA, 32 nt, Homo Sapiens
ucucuaaggaggaugugcugcagugcaugggg

SEQ ID NO: 90385 - RNA, 32 nt, Homo Sapiens
guugccucauuuccugggaggggagagggugc

SEQ ID NO: 90386 - RNA, 32 nt, Homo Sapiens
uuaaaugcgcggccgggggcgguggcucaugc

SEQ ID NO: 90387 - RNA, 32 nt, Homo Sapiens
acgcaauuuuaccuaguuugcacuauaugauc

SEQ ID NO: 90388 - RNA, 32 nt, Homo Sapiens
uuuuuuuaaauucugcacuuugacagugguag

SEQ ID NO: 90389 - RNA, 32 nt, Homo Sapiens
uggugugugaggaggagugcaaguacgccaug

SEQ ID NO: 90390 - RNA, 32 nt, Homo Sapiens
uguucuuacacauaauuucuuaauuuucaccg

SEQ ID NO: 90391 - RNA, 32 nt, Homo Sapiens
uugugaggugagagaaaacuaauguuuacuuu

SEQ ID NO: 90392 - RNA, 32 nt, Homo Sapiens
aaguaaaaugauguguaucaacuugaugguaa

SEQ ID NO: 90393 - RNA, 32 nt, Homo Sapiens
cgcccgcccgcggcgccggcggagcgaacaug

SEQ ID NO: 90394 - RNA, 32 nt, Homo Sapiens
ggguuugguuuuuacuauugaacccuuguacu

SEQ ID NO: 90395 - RNA, 32 nt, Homo Sapiens
cauauauuaaucuacuggcgaaugggaaagga

SEQ ID NO: 90396 - RNA, 32 nt, Homo Sapiens
gccuccuuugugcaugagacacgggacagccu

SEQ ID NO: 90397 - RNA, 32 nt, Homo Sapiens
uuuacuuuauaaacugugaauaugaguaugcc

SEQ ID NO: 90398 - RNA, 29 nt, Homo Sapiens
aucuuugucacugagugaaaucucuguuu

SEQ ID NO: 90399 - RNA, 32 nt, Homo Sapiens
uguaauaauuuaauguuuuuacccauuaaauu

SEQ ID NO: 90400 - RNA, 32 nt, Homo Sapiens
aucgucuuugaaaauguuaaauugagaaaccu

SEQ ID NO: 90401 - RNA, 25 nt, Homo Sapiens
aaauguuugucaacauauucucuua

SEQ ID NO: 90402 - RNA, 32 nt, Homo Sapiens
accuucgccucccgaguucaagugauucuccu

SEQ ID NO: 90403 - RNA, 32 nt, Homo Sapiens
aacacuguguuggggaugucaacugugacagg

SEQ ID NO: 90404 - RNA, 32 nt, Homo Sapiens
uccgugcugguuucuucgcgucuucugucagg

SEQ ID NO: 90405 - RNA, 32 nt, Homo Sapiens
caggggcguggccuuaaugcuccaagcccauu

SEQ ID NO: 90406 - RNA, 32 nt, Homo Sapiens
cagauguuuucuucuuuucuuacugcgcauuu

SEQ ID NO: 90407 - RNA, 32 nt, Homo Sapiens
uucuucaacagagagagauuccuuauuagcaa

SEQ ID NO: 90408 - RNA, 32 nt, Homo Sapiens
acuuugagacacacugauuauguggucugccu

SEQ ID NO: 90409 - RNA, 32 nt, Homo Sapiens
acgaggcagucauggcugccgccgucgcugcu

SEQ ID NO: 90410 - RNA, 32 nt, Homo Sapiens
guggcgggucucucaggaacgcauauuuucuu

SEQ ID NO: 90411 - RNA, 32 nt, Homo Sapiens
ugcgacgcgggcuucuggagcuugucaccauu

SEQ ID NO: 90412 - RNA, 32 nt, Homo Sapiens
caggagccccaggauuagcaucugaaaagggu

SEQ ID NO: 90413 - RNA, 32 nt, Homo Sapiens
uucugggcuuaccccacuccucagguacuucu

SEQ ID NO: 90414 - RNA, 32 nt, Homo Sapiens
aauaaaguagcuuuuuaucaaacaagugaaca

SEQ ID NO: 90415 - RNA, 32 nt, Homo Sapiens
ucagauaaacaacaaauaauuuuuuaguauaa

SEQ ID NO: 90416 - RNA, 32 nt, Homo Sapiens
cccauugaacauacuuuuaaaaacacuauggu

SEQ ID NO: 90417 - RNA, 32 nt, Homo Sapiens
ucacuuccuuuagaucuuuacucacauucgcc

SEQ ID NO: 90418 - RNA, 32 nt, Homo Sapiens
acaguguuacccaagguugugucuuuaagggu

SEQ ID NO: 90419 - RNA, 32 nt, Homo Sapiens
gcggggucaucuucucucugcugcuguagcug

SEQ ID NO: 90420 - RNA, 32 nt, Homo Sapiens
caguguggucuuguucagaagcagccagauuu

SEQ ID NO: 90421 - RNA, 32 nt, Homo Sapiens
accucggccccgccucgauagccccggacccc

SEQ ID NO: 90422 - RNA, 32 nt, Homo Sapiens
cgggaacucacagaaaaugcugaguccggucc

SEQ ID NO: 90423 - RNA, 32 nt, Homo Sapiens
cgcucguggaccggggccgggcggacucgggg

SEQ ID NO: 90424 - RNA, 32 nt, Homo Sapiens
aggcuuguaauccauagcaucaccgacucugc

SEQ ID NO: 90425 - RNA, 32 nt, Homo Sapiens
gggugugccgcucguacuccuggcaccagcgg

SEQ ID NO: 90426 - RNA, 32 nt, Homo Sapiens
gcucaggacuggaaagcagagggggcccauug

SEQ ID NO: 90427 - RNA, 32 nt, Homo Sapiens
ccuagugagcagggacagagccaggagucaag

SEQ ID NO: 90428 - RNA, 32 nt, Homo Sapiens
acuuagaaugauaucuagaaaauauuuauuuu

SEQ ID NO: 90429 - RNA, 32 nt, Homo Sapiens
uguacgaaccccuccccuccccccuguaaaca

SEQ ID NO: 90430 - RNA, 32 nt, Homo Sapiens
uuugugcgaaaacaugccuugcacuuguaccu

SEQ ID NO: 90431 - RNA, 32 nt, Homo Sapiens
uuauugcaucuuuuuuguuuaauuguauuuaa

SEQ ID NO: 90432 - RNA, 32 nt, Homo Sapiens
gagguggugacuggcaggcccgggccccacgg

SEQ ID NO: 90433 - RNA, 32 nt, Homo Sapiens
ggucaggacaaaggccucucaucaccgcagaa

SEQ ID NO: 90434 - RNA, 32 nt, Homo Sapiens
cucucguccaugcuccugggccccagccccgc

SEQ ID NO: 90435 - RNA, 32 nt, Homo Sapiens
ucugaauuugaaaaguacaaaaauauaaauaa

SEQ ID NO: 90436 - RNA, 32 nt, Homo Sapiens
guuuguuaaaaagcuuuagaggaggaaugaaa

SEQ ID NO: 90437 - RNA, 32 nt, Homo Sapiens
caggggcauguauggaauuugcugcuucucug

SEQ ID NO: 90438 - RNA, 32 nt, Homo Sapiens
cacuccaccgugccgaaggagcucugccagug

SEQ ID NO: 90439 - RNA, 32 nt, Homo Sapiens
gaaggauuuauugaaucagagguuacuaaaag

SEQ ID NO: 90440 - RNA, 32 nt, Homo Sapiens
aaaucugauuuaauguuuucugcuguuuaagg

SEQ ID NO: 90441 - RNA, 32 nt, Homo Sapiens
uucuguaaguucaaaucaauguuuaaauuaua

SEQ ID NO: 90442 - RNA, 30 nt, Homo Sapiens
guuugugucugugguugcagucuuuccccc

SEQ ID NO: 90443 - RNA, 32 nt, Homo Sapiens
cccgcagccccgagaccgcaggcgucacaaug

SEQ ID NO: 90444 - RNA, 32 nt, Homo Sapiens
caacugcaccggugccagcugucuugggggcc

SEQ ID NO: 90445 - RNA, 32 nt, Homo Sapiens
gcgggggccauggacgaggggcccguggaccu

SEQ ID NO: 90446 - RNA, 32 nt, Homo Sapiens
ggguaaucucuuaugggugggaggugagauug

SEQ ID NO: 90447 - RNA, 32 nt, Homo Sapiens
aaauaauguauuaccaugaaaaauguuucuaa

SEQ ID NO: 90448 - RNA, 32 nt, Homo Sapiens
ccagacccaugcaggaagagccaggcagggug

SEQ ID NO: 90449 - RNA, 32 nt, Homo Sapiens
uguacacacuguuaggggcucaucucauguag

SEQ ID NO: 90450 - RNA, 32 nt, Homo Sapiens
cugcccgccuuggccucccaaaguacugggau

SEQ ID NO: 90451 - RNA, 32 nt, Homo Sapiens
ccgcggcgcgcgcgauccggcugacgcaucug

SEQ ID NO: 90452 - RNA, 32 nt, Homo Sapiens
aaauaucacauacguugcuauuagcuugagcu

SEQ ID NO: 90453 - RNA, 32 nt, Homo Sapiens
ugcacuggccccaguccauagaggggucaacu

SEQ ID NO: 90454 - RNA, 32 nt, Homo Sapiens
cuuuuucuguguucccauuccauccuauucau

SEQ ID NO: 90455 - RNA, 32 nt, Homo Sapiens
gagucagguugaagcacaggcuuuuguuuuuu

SEQ ID NO: 90456 - RNA, 32 nt, Homo Sapiens
augcugcauuuaaugaaacauguauaugucaa

SEQ ID NO: 90457 - RNA, 32 nt, Homo Sapiens
aagugaaggaacagaggcagggggugggccag

SEQ ID NO: 90458 - RNA, 27 nt, Homo Sapiens
aguuaguucuucuucacccucacuucc

SEQ ID NO: 90459 - RNA, 31 nt, Homo Sapiens
aauuuugucuuuguauaauagauuugauauu

SEQ ID NO: 90460 - RNA, 32 nt, Homo Sapiens
cccaggggccccaggccuccucccuguccuug

SEQ ID NO: 90461 - RNA, 32 nt, Homo Sapiens
caaacauuuuuggugagugcugcuuuuauaaa

SEQ ID NO: 90462 - RNA, 32 nt, Homo Sapiens
ucaucguggaccuggaggaugagaggggcgag

SEQ ID NO: 90463 - RNA, 32 nt, Homo Sapiens
gaagauacuucaaagaauauugagauugucug

SEQ ID NO: 90464 - RNA, 32 nt, Homo Sapiens
ggaagucaaauuauaguagaauguguaucuaa

SEQ ID NO: 90465 - RNA, 32 nt, Homo Sapiens
cucccuuccuucccuccccgcaucuccagaga

SEQ ID NO: 90466 - RNA, 32 nt, Homo Sapiens
augaaacuuucaggugcaacuucuaaaaaaga

SEQ ID NO: 90467 - RNA, 32 nt, Homo Sapiens
ccucucuggcugccacuugguuauguugugug

SEQ ID NO: 90468 - RNA, 32 nt, Homo Sapiens
cuggcccggggcggggagcgcgaugcucugcu

SEQ ID NO: 90469 - RNA, 32 nt, Homo Sapiens
ugcacugccccgaggaacgcugagccuuccuc

SEQ ID NO: 90470 - RNA, 32 nt, Homo Sapiens
ugaauagacuuccacuuuguaauuagaaaauu

SEQ ID NO: 90471 - RNA, 32 nt, Homo Sapiens
guaccccaucccuuccuccccagucuacguuc

SEQ ID NO: 90472 - RNA, 32 nt, Homo Sapiens
cuaggccggugcccggcccuggcagcaagggg

SEQ ID NO: 90473 - RNA, 32 nt, Homo Sapiens
uuuuuauggccauauuuucuacugcaauucug

SEQ ID NO: 90474 - RNA, 32 nt, Homo Sapiens
agagcccaaugcauagagcccuggccagcccu

SEQ ID NO: 90475 - RNA, 32 nt, Homo Sapiens
auuuuuaaauuaaacuuuacuuuuucagacug

SEQ ID NO: 90476 - RNA, 32 nt, Homo Sapiens
uuacaguuugccauuagguuugccauuagggu

SEQ ID NO: 90477 - RNA, 32 nt, Homo Sapiens
uguccaagguaaaaccacagugauauuuuugg

SEQ ID NO: 90478 - RNA, 32 nt, Homo Sapiens
cacagugaaaauguauuauagaguagaauagu

SEQ ID NO: 90479 - RNA, 32 nt, Homo Sapiens
gggacgcagccauggcggaggcggcuuuggaa

SEQ ID NO: 90480 - RNA, 32 nt, Homo Sapiens
caagaaggaaaugaaaauauuuuuaugccuac

SEQ ID NO: 90481 - RNA, 32 nt, Homo Sapiens
guuuccaggcacccucucaggcgcccgaggcc

SEQ ID NO: 90482 - RNA, 32 nt, Homo Sapiens
uuuuuuauauauauuucuagacaauaaagauu

SEQ ID NO: 90483 - RNA, 32 nt, Homo Sapiens
uguggggaacaacugaagacucaggggucacc

SEQ ID NO: 90484 - RNA, 32 nt, Homo Sapiens
accaugaacuaacaauucuuugaaaggaccug

SEQ ID NO: 90485 - RNA, 32 nt, Homo Sapiens
ccgucuccccacucacagccccagcagguaag

SEQ ID NO: 90486 - RNA, 32 nt, Homo Sapiens
auuuguggcuguuccugaugcuaguggcacac

SEQ ID NO: 90487 - RNA, 32 nt, Homo Sapiens
agcaggcggaauccaacccgggcggcuuugcc

SEQ ID NO: 90488 - RNA, 32 nt, Homo Sapiens
cauggaccacuggagccuggaauucugccacu

SEQ ID NO: 90489 - RNA, 32 nt, Homo Sapiens
cccauggcuuugcauguuagagaccuggcaga

SEQ ID NO: 90490 - RNA, 32 nt, Homo Sapiens
uccagguacuuggacuuuuuguagaaggagag

SEQ ID NO: 90491 - RNA, 32 nt, Homo Sapiens
auaacccccucccccuucauuacuucacucag

SEQ ID NO: 90492 - RNA, 32 nt, Homo Sapiens
gaguacuuuuucuuugaaguuuuagcggucaa

SEQ ID NO: 90493 - RNA, 32 nt, Homo Sapiens
ccccagagacugcccucacgaggggacugggu

SEQ ID NO: 90494 - RNA, 32 nt, Homo Sapiens
aaaguggacaaggagugugaccacugaagcac

SEQ ID NO: 90495 - RNA, 32 nt, Homo Sapiens
agcagccuuucugcugauuaucacacaucaug

SEQ ID NO: 90496 - RNA, 32 nt, Homo Sapiens
caggugcccccguccaccuccucgcugugacc

SEQ ID NO: 90497 - RNA, 32 nt, Homo Sapiens
ccggagcccggguggggcggugcggguaccuc

SEQ ID NO: 90498 - RNA, 32 nt, Homo Sapiens
aaaucgaagcucuaugggacuggcacauucag

SEQ ID NO: 90499 - RNA, 32 nt, Homo Sapiens
uccgcuucccagcaacgcagccaggccugaga

SEQ ID NO: 90500 - RNA, 32 nt, Homo Sapiens
uccucucgccuggacccaagagaggcgacagc

SEQ ID NO: 90501 - RNA, 32 nt, Homo Sapiens
ucgugggggagaugcccggccugggaugcugu

SEQ ID NO: 90502 - RNA, 32 nt, Homo Sapiens
agguaccagaagaauauggcugcacaaauacc

SEQ ID NO: 90503 - RNA, 32 nt, Homo Sapiens
gggcacaaggccaggcugccucccagccccca

SEQ ID NO: 90504 - RNA, 32 nt, Homo Sapiens
uuccaccggcuccgcguccgccgcuccccgcg

SEQ ID NO: 90505 - RNA, 32 nt, Homo Sapiens
guaguauacagaaauauaauauuuuuggacau

SEQ ID NO: 90506 - RNA, 32 nt, Homo Sapiens
caguauuauuccucaaaauaacaucaaucuau

SEQ ID NO: 90507 - RNA, 29 nt, Homo Sapiens
cugcccgugacuuuuucugaauggacuuc

SEQ ID NO: 90508 - RNA, 32 nt, Homo Sapiens
aauuucugcaaggagcuuucuauccugaacuc

SEQ ID NO: 90509 - RNA, 32 nt, Homo Sapiens
aauaucauauuuuugaaagguaaaaaguacau

SEQ ID NO: 90510 - RNA, 32 nt, Homo Sapiens
ccgaugcaggggugggguggggggcggagucc

SEQ ID NO: 90511 - RNA, 32 nt, Homo Sapiens
cugaguacugaacaaucuaaaaauagccucug

SEQ ID NO: 90512 - RNA, 32 nt, Homo Sapiens
ucucucuucuguugguaauuauuuaggauuuu

SEQ ID NO: 90513 - RNA, 29 nt, Homo Sapiens
gugaccauaauggcaucuauaaacagaac

SEQ ID NO: 90514 - RNA, 32 nt, Homo Sapiens
acuacuacuuuuuuauuaaacgauguuaaaua

SEQ ID NO: 90515 - RNA, 32 nt, Homo Sapiens
uggcccagugggcggguccgcgguggaguugg

SEQ ID NO: 90516 - RNA, 32 nt, Homo Sapiens
aagugguggcggggagggaggcgcugacggag

SEQ ID NO: 90517 - RNA, 30 nt, Homo Sapiens
cuugcucuggacucagucugucaagucccc

SEQ ID NO: 90518 - RNA, 32 nt, Homo Sapiens
agagacuugagaaauguugguuguuccuaaug

SEQ ID NO: 90519 - RNA, 32 nt, Homo Sapiens
ggggcugagcugggggcgagcgggggcaggcg

SEQ ID NO: 90520 - RNA, 32 nt, Homo Sapiens
auggaccuuuuuccuugguagaacugaauucc

SEQ ID NO: 90521 - RNA, 32 nt, Homo Sapiens
gugggcugcggggaugcgggggaccagcugcg

SEQ ID NO: 90522 - RNA, 32 nt, Homo Sapiens
uccagggugucccggugagcagcccucgcgac

SEQ ID NO: 90523 - RNA, 32 nt, Homo Sapiens
aagaggaaaauccaaaagugcagcaggagaac

SEQ ID NO: 90524 - RNA, 32 nt, Homo Sapiens
cugggagaucauagcccuuccuaggcagaauc

SEQ ID NO: 90525 - RNA, 32 nt, Homo Sapiens
cagggaagggggugggggccuggcgggggcau

SEQ ID NO: 90526 - RNA, 32 nt, Homo Sapiens
cuuuggccauauauuuuuuagcaugcauuguu

SEQ ID NO: 90527 - RNA, 32 nt, Homo Sapiens
ugaaaaaccaccuuaauacccccgucacaucc

SEQ ID NO: 90528 - RNA, 32 nt, Homo Sapiens
cuggagacggccugggugcuggcgaagcggag

SEQ ID NO: 90529 - RNA, 32 nt, Homo Sapiens
cuguuuuaauugacuuauaaguuucuucauuu

SEQ ID NO: 90530 - RNA, 32 nt, Homo Sapiens
auaucuauaucauauugauuuugucucucugg

SEQ ID NO: 90531 - RNA, 32 nt, Homo Sapiens
gcggcggcgggcgggcggugaguuccugguca

SEQ ID NO: 90532 - RNA, 32 nt, Homo Sapiens
uuaguagaauccagucaccguguggaaguuuu

SEQ ID NO: 90533 - RNA, 32 nt, Homo Sapiens
uagccuacuguaacacuugccuguaaucagug

SEQ ID NO: 90534 - RNA, 32 nt, Homo Sapiens
uguguaaaauaacauaaaaauauaagugugca

SEQ ID NO: 90535 - RNA, 32 nt, Homo Sapiens
gcuggagaggccaccgcugugcagugucaugu

SEQ ID NO: 90536 - RNA, 32 nt, Homo Sapiens
caacuuguuuuaaaagauuuuguuuugugaau

SEQ ID NO: 90537 - RNA, 32 nt, Homo Sapiens
uauguggugcaaacaaggcagaaacuuccuuu

SEQ ID NO: 90538 - RNA, 32 nt, Homo Sapiens
accgacguugcaugcugugaggaggcuacaaa

SEQ ID NO: 90539 - RNA, 32 nt, Homo Sapiens
cuuuuagaggcagaggagcggaaggcaguggg

SEQ ID NO: 90540 - RNA, 32 nt, Homo Sapiens
ccgaauuuguacuugcucugguaaaaugaaau

SEQ ID NO: 90541 - RNA, 32 nt, Homo Sapiens
cugcccgccgugcccugcaguaccucaagauc

SEQ ID NO: 90542 - RNA, 32 nt, Homo Sapiens
gcauguggauauauuuguuuucaaagccaugg

SEQ ID NO: 90543 - RNA, 32 nt, Homo Sapiens
cugagaagcuuggccuggacaccugagccugc

SEQ ID NO: 90544 - RNA, 32 nt, Homo Sapiens
gcauugggaaugagagggaacugugcccagua

SEQ ID NO: 90545 - RNA, 32 nt, Homo Sapiens
aauuucuuaaagauuauauggcaugacuugau

SEQ ID NO: 90546 - RNA, 32 nt, Homo Sapiens
gaaguuuuauucucuuguuuugcuggaaacca

SEQ ID NO: 90547 - RNA, 32 nt, Homo Sapiens
cuaggggcccugaucgcccaccugccuggaag

SEQ ID NO: 90548 - RNA, 31 nt, Homo Sapiens
guaggaugcucacuacaaccauagguggggu

SEQ ID NO: 90549 - RNA, 32 nt, Homo Sapiens
cuagaggacccucccccugccuugcagugggc

SEQ ID NO: 90550 - RNA, 32 nt, Homo Sapiens
ugcaccgcaccucgccucgccucucugcucuc

SEQ ID NO: 90551 - RNA, 32 nt, Homo Sapiens
gagcaaccaggaccacccccacguucagaaau

SEQ ID NO: 90552 - RNA, 32 nt, Homo Sapiens
gagccacgccaagcacagcggcuggaacaggg

SEQ ID NO: 90553 - RNA, 32 nt, Homo Sapiens
gagaggcuggguggagcuuggccucuacgguc

SEQ ID NO: 90554 - RNA, 32 nt, Homo Sapiens
gaagcagugacagcugcagauggcagcgggcc

SEQ ID NO: 90555 - RNA, 32 nt, Homo Sapiens
gacugcauucuggucgccacccgccucacggu

SEQ ID NO: 90556 - RNA, 32 nt, Homo Sapiens
guuuuuguguguuuuucuuuauacugcaaauu

SEQ ID NO: 90557 - RNA, 32 nt, Homo Sapiens
cccaaggggaugggcugcuucucccuggccca

SEQ ID NO: 90558 - RNA, 32 nt, Homo Sapiens
agaagaauaugccuuuuaaaaaagcuuauuaa

SEQ ID NO: 90559 - RNA, 32 nt, Homo Sapiens
cuagcucggaagcuaccgaggugcuaggaguu

SEQ ID NO: 90560 - RNA, 32 nt, Homo Sapiens
caucuuggcuugugcuuuauucaaacuaaugu

SEQ ID NO: 90561 - RNA, 32 nt, Homo Sapiens
aucugcgcugccggcccggcgcgggguccgga

SEQ ID NO: 90562 - RNA, 32 nt, Homo Sapiens
ugucagaaaauaucuuuuuuuuuacuuugaag

SEQ ID NO: 90563 - RNA, 32 nt, Homo Sapiens
ccaagaggaugaggaguguuuucuaaaaugca

SEQ ID NO: 90564 - RNA, 32 nt, Homo Sapiens
acauuucuuuauagccucuucugaucucuaac

SEQ ID NO: 90565 - RNA, 32 nt, Homo Sapiens
aggcugcucggcccggccccaccuccgccgug

SEQ ID NO: 90566 - RNA, 32 nt, Homo Sapiens
uuccgccccuucccuucccuaaagugaugggc

SEQ ID NO: 90567 - RNA, 32 nt, Homo Sapiens
cgcgguccccggagcaggccggcggguggcag

SEQ ID NO: 90568 - RNA, 32 nt, Homo Sapiens
gaauuauauuugggggcaaagauuguccccuc

SEQ ID NO: 90569 - RNA, 32 nt, Homo Sapiens
cugcugcuccagccgcccggcagcucugagga

SEQ ID NO: 90570 - RNA, 32 nt, Homo Sapiens
agcuggaagggucaacaucuuuuacauucugc

SEQ ID NO: 90571 - RNA, 28 nt, Homo Sapiens
gcaauguggggacucggggcccggggcc

SEQ ID NO: 90572 - RNA, 32 nt, Homo Sapiens
cccuugucccuggccuuuggacccaggcaaag

SEQ ID NO: 90573 - RNA, 32 nt, Homo Sapiens
acuaacaugcuccugaugaagauaguaccaug

SEQ ID NO: 90574 - RNA, 32 nt, Homo Sapiens
aacuggugaaauuuaaagugaauucaugggcu

SEQ ID NO: 90575 - RNA, 32 nt, Homo Sapiens
aacuguaauuuaauugggaugccagguuuaua

SEQ ID NO: 90576 - RNA, 32 nt, Homo Sapiens
ggguuucuguaguaugagacaucaagagaauu

SEQ ID NO: 90577 - RNA, 32 nt, Homo Sapiens
ucucccagcugauggugagcugacagugucca

SEQ ID NO: 90578 - RNA, 32 nt, Homo Sapiens
uaaauaaaauaaaaauaaaauaaaucccgaag

SEQ ID NO: 90579 - RNA, 32 nt, Homo Sapiens
gguauuguacuugggcuuuaacaucaauguug

SEQ ID NO: 90580 - RNA, 32 nt, Homo Sapiens
aucaggcugcagcccccuccccgcucccaccu

SEQ ID NO: 90581 - RNA, 32 nt, Homo Sapiens
cuuugacucuagguaaauuugugguggagcaa

SEQ ID NO: 90582 - RNA, 32 nt, Homo Sapiens
gcaggaagacgcccggucccgggccggguuag

SEQ ID NO: 90583 - RNA, 32 nt, Homo Sapiens
gucccccagaaaggucugggcugugcgugcuu

SEQ ID NO: 90584 - RNA, 32 nt, Homo Sapiens
acagauaacacagauaguaacuuauacucaga

SEQ ID NO: 90585 - RNA, 32 nt, Homo Sapiens
cuucccuuugguuuuucauauuuaaauguuuc

SEQ ID NO: 90586 - RNA, 32 nt, Homo Sapiens
gccgcggcccggguucgauucccggccaggga

SEQ ID NO: 90587 - RNA, 32 nt, Homo Sapiens
cauuacugucuccuguuauuuaucucaguagu

SEQ ID NO: 90588 - RNA, 32 nt, Homo Sapiens
ucucacuuucuucccuauuccauccuuugaug

SEQ ID NO: 90589 - RNA, 32 nt, Homo Sapiens
uauagaaagaacucuggauguggagaaaugcc

SEQ ID NO: 90590 - RNA, 32 nt, Homo Sapiens
ugauacacauaaauagagaaagagcaauugau

SEQ ID NO: 90591 - RNA, 32 nt, Homo Sapiens
ucaccucucccuuccccaacccuucucuacuu

SEQ ID NO: 90592 - RNA, 32 nt, Homo Sapiens
cuugcucauuuucuucuuauaccauaaguuuu

SEQ ID NO: 90593 - RNA, 32 nt, Homo Sapiens
uccagcuuucccuccccagaguucuugcaccc

SEQ ID NO: 90594 - RNA, 32 nt, Homo Sapiens
gagagagaauuuuaauuacuaauugugcacga

SEQ ID NO: 90595 - RNA, 32 nt, Homo Sapiens
aaaggcaaagacugaagacaaacaugggagga

SEQ ID NO: 90596 - RNA, 32 nt, Homo Sapiens
cgggaggcggcagcggcugcagcguugguagc

SEQ ID NO: 90597 - RNA, 30 nt, Homo Sapiens
ccgccaugcaggcgcgagcgcugcuccugg

SEQ ID NO: 90598 - RNA, 32 nt, Homo Sapiens
acaugaccucugaguucuucgcugcccagcuc

SEQ ID NO: 90599 - RNA, 32 nt, Homo Sapiens
ugaaaacuaaucuugauucauucuacucugaa

SEQ ID NO: 90600 - RNA, 32 nt, Homo Sapiens
ccaagaggcacuagcuggggccccuacagagu

SEQ ID NO: 90601 - RNA, 32 nt, Homo Sapiens
uuuaaguguuuuccuuacauuaucucauuuau

SEQ ID NO: 90602 - RNA, 32 nt, Homo Sapiens
auguggaugcuguugugauugcuguuuguaua

SEQ ID NO: 90603 - RNA, 32 nt, Homo Sapiens
gacgaaugaauguaauaggaaacuauggaguu

SEQ ID NO: 90604 - RNA, 32 nt, Homo Sapiens
uucccuaccggggcugaggccaugcugggagc

SEQ ID NO: 90605 - RNA, 32 nt, Homo Sapiens
gguuuuuuguuuucuuuuuaacuacuuuccaa

SEQ ID NO: 90606 - RNA, 32 nt, Homo Sapiens
gucuaauuuauaugccacggacacuccuuaga

SEQ ID NO: 90607 - RNA, 32 nt, Homo Sapiens
ucucagacaucuuuaaacaucuuuaaacauua

SEQ ID NO: 90608 - RNA, 32 nt, Homo Sapiens
caaaugagacuuuguacugugcacuuuggguu

SEQ ID NO: 90609 - RNA, 32 nt, Homo Sapiens
gcuccgggcacgcccggcaggguccugggggc

SEQ ID NO: 90610 - RNA, 32 nt, Homo Sapiens
cggaugcaccgccguacccugcucaucuggga

SEQ ID NO: 90611 - RNA, 32 nt, Homo Sapiens
gcagugggcccuacucugcaccucugaccaca

SEQ ID NO: 90612 - RNA, 32 nt, Homo Sapiens
gcgguuauaauggauggugguguguacaagau

SEQ ID NO: 90613 - RNA, 32 nt, Homo Sapiens
uggcagggucauggaggacgcuggcggcggcg

SEQ ID NO: 90614 - RNA, 32 nt, Homo Sapiens
ugggacuuuggaagaaugaccauccacauucc

SEQ ID NO: 90615 - RNA, 32 nt, Homo Sapiens
ggcccucugcuuuaacucuccucccauauaga

SEQ ID NO: 90616 - RNA, 32 nt, Homo Sapiens
auucauggaucaggcagcuccaaacugaaagu

SEQ ID NO: 90617 - RNA, 32 nt, Homo Sapiens
uaugaucaauuguuaauuguaauugcaugaca

SEQ ID NO: 90618 - RNA, 32 nt, Homo Sapiens
aauagagaaugaggacuucugugcuguuugcc

SEQ ID NO: 90619 - RNA, 32 nt, Homo Sapiens
cuuucugcccguggacgccgccgaagaagcau

SEQ ID NO: 90620 - RNA, 32 nt, Homo Sapiens
uccauguugugauuggauccauaaguuuacuu

SEQ ID NO: 90621 - RNA, 32 nt, Homo Sapiens
uugacacuucucagccucaauucauaacuaua

SEQ ID NO: 90622 - RNA, 32 nt, Homo Sapiens
acagagaaaaagaaacuaaauacggaccugua

SEQ ID NO: 90623 - RNA, 32 nt, Homo Sapiens
uuagcuauaauggcacuuuguuuguguuguug

SEQ ID NO: 90624 - RNA, 32 nt, Homo Sapiens
ucaguaguuuauuccuuuuuuauggcugaaua

SEQ ID NO: 90625 - RNA, 28 nt, Homo Sapiens
gaaaaugcuagcaacauuauagaaauuu

SEQ ID NO: 90626 - RNA, 32 nt, Homo Sapiens
gcuauuauuugccauggaaaagguuagucuca

SEQ ID NO: 90627 - RNA, 32 nt, Homo Sapiens
cuccaccaagaaguucuucucacaucaagauu

SEQ ID NO: 90628 - RNA, 32 nt, Homo Sapiens
uuagaauucuaaagugcuuugcacuuuucaau

SEQ ID NO: 90629 - RNA, 32 nt, Homo Sapiens
ggaacaugguggccacagcuggagugaccgca

SEQ ID NO: 90630 - RNA, 32 nt, Homo Sapiens
caggcggaaugggauggccuguccccugcaca

SEQ ID NO: 90631 - RNA, 32 nt, Homo Sapiens
agacagaaaaagacaaaagguccagucucauc

SEQ ID NO: 90632 - RNA, 32 nt, Homo Sapiens
agauacagcuacuuauggauucaucaauauca

SEQ ID NO: 90633 - RNA, 32 nt, Homo Sapiens
auguauucgggaggacaagggcuuccaguuuu

SEQ ID NO: 90634 - RNA, 32 nt, Homo Sapiens
uaacugcuauucauuuaacuuuucucauuauc

SEQ ID NO: 90635 - RNA, 28 nt, Homo Sapiens
ugucuuguuacaggucaaagaaaaaagg

SEQ ID NO: 90636 - RNA, 32 nt, Homo Sapiens
auuguuaauugugagcagauuuauugaaugcc

SEQ ID NO: 90637 - RNA, 32 nt, Homo Sapiens
aacugucgccugguugggcccggaaaugggac

SEQ ID NO: 90638 - RNA, 32 nt, Homo Sapiens
gaaauggggugggagggcaggggugggagccc

SEQ ID NO: 90639 - RNA, 32 nt, Homo Sapiens
gaccacauucugauacagccuacuucaagccu

SEQ ID NO: 90640 - RNA, 32 nt, Homo Sapiens
ugcaguaaggugaauaaauguuaaguguauca

SEQ ID NO: 90641 - RNA, 32 nt, Homo Sapiens
ccagauuccaagaacacacuggauacugcucu

SEQ ID NO: 90642 - RNA, 28 nt, Homo Sapiens
acauuuuaauaaagaaaucugacauuug

SEQ ID NO: 90643 - RNA, 32 nt, Homo Sapiens
uagauucuaccagaguucugcacugugcuuuc

SEQ ID NO: 90644 - RNA, 31 nt, Homo Sapiens
gucgucgucuugacuuuggcaaaugagccgg

SEQ ID NO: 90645 - RNA, 30 nt, Homo Sapiens
ggaggcggagguggcaaauaaaccugggca

SEQ ID NO: 90646 - RNA, 32 nt, Homo Sapiens
aguucauacuaaaagauauuuugcaaauacac

SEQ ID NO: 90647 - RNA, 32 nt, Homo Sapiens
aagcacucaaggauugauggacaccacacacc

SEQ ID NO: 90648 - RNA, 32 nt, Homo Sapiens
gugucuaugagguuauugaucuucuuacugau

SEQ ID NO: 90649 - RNA, 32 nt, Homo Sapiens
uacuguuaucuguguccauuuccaaaacuugc

SEQ ID NO: 90650 - RNA, 32 nt, Homo Sapiens
uaaaauauuguaaaaauaucuucaccuguguu

SEQ ID NO: 90651 - RNA, 32 nt, Homo Sapiens
ccugggauccaguguguaaauccaauaucgua

SEQ ID NO: 90652 - RNA, 32 nt, Homo Sapiens
ccguccuucccguccagccccagcccugggcc

SEQ ID NO: 90653 - RNA, 32 nt, Homo Sapiens
gcuggcccaagcagagagcugaggcauccaag

SEQ ID NO: 90654 - RNA, 32 nt, Homo Sapiens
gauguuuucagcaauuaaacuuuuuuaagcug

SEQ ID NO: 90655 - RNA, 32 nt, Homo Sapiens
cccgcccggggaguuuccgcggcggccucucg

SEQ ID NO: 90656 - RNA, 32 nt, Homo Sapiens
aauggcgggggucgcaggaaucugcacucaac

SEQ ID NO: 90657 - RNA, 32 nt, Homo Sapiens
ggggguugguagggaugaguccugucaagggg

SEQ ID NO: 90658 - RNA, 32 nt, Homo Sapiens
cggggggccggggagaggagggggccacuucc

SEQ ID NO: 90659 - RNA, 32 nt, Homo Sapiens
uucucugauucuuuucgccuucaauacacuua

SEQ ID NO: 90660 - RNA, 32 nt, Homo Sapiens
uguuuuuaaugauuuuaauguaagcuuuuauu

SEQ ID NO: 90661 - RNA, 32 nt, Homo Sapiens
gugaaguugcacuauguccauacucuaaaaug

SEQ ID NO: 90662 - RNA, 32 nt, Homo Sapiens
aguccuuucugcauugcuuguuguugucgacu

SEQ ID NO: 90663 - RNA, 32 nt, Homo Sapiens
cuuuugucgaagaaguuuauugugggucaggg

SEQ ID NO: 90664 - RNA, 32 nt, Homo Sapiens
aauaaaagaagacaaauaggucuuaaacauau

SEQ ID NO: 90665 - RNA, 32 nt, Homo Sapiens
acacccucuaagucccgaagugccagcucaga

SEQ ID NO: 90666 - RNA, 32 nt, Homo Sapiens
uagguuauuuuugcuuccgaauuugaaugaaa

SEQ ID NO: 90667 - RNA, 32 nt, Homo Sapiens
uacuuauaaaaagcaucaaaggggggaaugaa

SEQ ID NO: 90668 - RNA, 32 nt, Homo Sapiens
cucugcggagaaucgaacugagggaacugaac

SEQ ID NO: 90669 - RNA, 32 nt, Homo Sapiens
aaauucaacacuuuauuauaaaacgggcuucg

SEQ ID NO: 90670 - RNA, 32 nt, Homo Sapiens
uuuuuuuuugguuuuguuuuuaucuuguuuuc

SEQ ID NO: 90671 - RNA, 32 nt, Homo Sapiens
ugcgcagcugaguucuggaagcugcgucaaga

SEQ ID NO: 90672 - RNA, 30 nt, Homo Sapiens
gaaagcgggcgguggaggggucccggaaga

SEQ ID NO: 90673 - RNA, 32 nt, Homo Sapiens
uggagaaagggagacagcuugcagauggcgcg

SEQ ID NO: 90674 - RNA, 32 nt, Homo Sapiens
aagugaauuuuguaguuucauguuaucaugca

SEQ ID NO: 90675 - RNA, 32 nt, Homo Sapiens
ggcuagcgccgacaaccagcuagcgugcaagg

SEQ ID NO: 90676 - RNA, 32 nt, Homo Sapiens
uaggaaauucaugaauuaaaucaauuucuaga

SEQ ID NO: 90677 - RNA, 32 nt, Homo Sapiens
agucagagaacacagaggugauguuugggacu

SEQ ID NO: 90678 - RNA, 32 nt, Homo Sapiens
uaagucaguuuggguggggcuggaggagcagg

SEQ ID NO: 90679 - RNA, 32 nt, Homo Sapiens
ggucgggugcgguggcucaugccuauaauccu

SEQ ID NO: 90680 - RNA, 32 nt, Homo Sapiens
gggugggagauggggaacaggcagugaggaag

SEQ ID NO: 90681 - RNA, 32 nt, Homo Sapiens
ggauuuguuuuaaaggugauucuuggguuuga

SEQ ID NO: 90682 - RNA, 32 nt, Homo Sapiens
ggcuccgccccggcgccgcagcucccgacucc

SEQ ID NO: 90683 - RNA, 32 nt, Homo Sapiens
ccugcuugucccuuuuuuagaaaacacuuuua

SEQ ID NO: 90684 - RNA, 32 nt, Homo Sapiens
ggaagaaaggauuuuucuuuuuaaugaucuuc

SEQ ID NO: 90685 - RNA, 32 nt, Homo Sapiens
aaagcuuuauagaacuucuggaucuaacucac

SEQ ID NO: 90686 - RNA, 32 nt, Homo Sapiens
aguuuaaaacaaaaauuaggagguuguaugau

SEQ ID NO: 90687 - RNA, 32 nt, Homo Sapiens
cucccugccggggccgcugggccggggaugca

SEQ ID NO: 90688 - RNA, 32 nt, Homo Sapiens
ccccacuucucgcugcucaugccgcugggacu

SEQ ID NO: 90689 - RNA, 32 nt, Homo Sapiens
gaaugagccgcggucauucauuaauucacuca

SEQ ID NO: 90690 - RNA, 30 nt, Homo Sapiens
ggcaucgcgggcggcggcggcgaugagcga

SEQ ID NO: 90691 - RNA, 32 nt, Homo Sapiens
ccaugcaaaaauagcuuuaaaauuauacauga

SEQ ID NO: 90692 - RNA, 31 nt, Homo Sapiens
ggcgccaucgagucagcuccaaggccauuag

SEQ ID NO: 90693 - RNA, 32 nt, Homo Sapiens
gaauucacaaaacagucuugacauggguagcu

SEQ ID NO: 90694 - RNA, 32 nt, Homo Sapiens
acugggguguuuuuauucucauucaacaaacc

SEQ ID NO: 90695 - RNA, 32 nt, Homo Sapiens
cacguuuccccucauucauguggcuguacuua

SEQ ID NO: 90696 - RNA, 32 nt, Homo Sapiens
ccaauggcuggggcaucucccuugacuuaccc

SEQ ID NO: 90697 - RNA, 32 nt, Homo Sapiens
auacauaaacacacauacauguagcacccauu

SEQ ID NO: 90698 - RNA, 32 nt, Homo Sapiens
gaccgacccauucauugggaaccccgucuuuu

SEQ ID NO: 90699 - RNA, 32 nt, Homo Sapiens
ucuucaauucuuaauaaacaauuuauacugaa

SEQ ID NO: 90700 - RNA, 32 nt, Homo Sapiens
guccuuguuacgauuaguacuuuggauuugau

SEQ ID NO: 90701 - RNA, 32 nt, Homo Sapiens
uggcccugccacagcccucccucggcacacuu

SEQ ID NO: 90702 - RNA, 32 nt, Homo Sapiens
gagucaucauagcccaggucuuuauugaaagg

SEQ ID NO: 90703 - RNA, 32 nt, Homo Sapiens
cccaaagcuggagggagaugggcuuuccucug

SEQ ID NO: 90704 - RNA, 32 nt, Homo Sapiens
aggaaggcaauugagauaggaccuccaaggau

SEQ ID NO: 90705 - RNA, 32 nt, Homo Sapiens
cacgcgccugacggcuuuuccggggcccggga

SEQ ID NO: 90706 - RNA, 32 nt, Homo Sapiens
gcagaccuuccagaccuccccagugcagccuc

SEQ ID NO: 90707 - RNA, 32 nt, Homo Sapiens
gggccuucccuucuccucccgcccaccccucu

SEQ ID NO: 90708 - RNA, 32 nt, Homo Sapiens
agugaaugccagugugcugaugggcguacgcu

SEQ ID NO: 90709 - RNA, 32 nt, Homo Sapiens
caguggaugaucuggaaugcgaccggagcacu

SEQ ID NO: 90710 - RNA, 32 nt, Homo Sapiens
caggaagaggugccgccgagucagcgcggggc

SEQ ID NO: 90711 - RNA, 32 nt, Homo Sapiens
gggcccacccaccguguucccagcucugccac

SEQ ID NO: 90712 - RNA, 32 nt, Homo Sapiens
ccccccgcccacccaccacgggugucgcuuua

SEQ ID NO: 90713 - RNA, 32 nt, Homo Sapiens
augucucgauuagacuccauguaguuacuucc

SEQ ID NO: 90714 - RNA, 29 nt, Homo Sapiens
gaauggggaggucagaggacgcaaagcag

SEQ ID NO: 90715 - RNA, 32 nt, Homo Sapiens
cuucacagcagacagagcugccaggccaugau

SEQ ID NO: 90716 - RNA, 32 nt, Homo Sapiens
uuguagaguauguuuuaaaauaaauuucaagu

SEQ ID NO: 90717 - RNA, 32 nt, Homo Sapiens
gcuggacgcaggucccaggacaugcugcuccc

SEQ ID NO: 90718 - RNA, 32 nt, Homo Sapiens
cgcuuuguugcccaggcuggggugcaguggca

SEQ ID NO: 90719 - RNA, 32 nt, Homo Sapiens
guguugaauauauuccuguuuauuuuucuaug

SEQ ID NO: 90720 - RNA, 32 nt, Homo Sapiens
cguggcagugggacccaaaagguugcuugaau

SEQ ID NO: 90721 - RNA, 32 nt, Homo Sapiens
uccccccgccccacgccugccagcaaagccuc

SEQ ID NO: 90722 - RNA, 32 nt, Homo Sapiens
gccgccgcgggaacgcgagcccgguaauuuuu

SEQ ID NO: 90723 - RNA, 32 nt, Homo Sapiens
gcuccucggcucggcccgggguaguuuguagg

SEQ ID NO: 90724 - RNA, 32 nt, Homo Sapiens
cucaaacccagcucuguggaucauguuccuaa

SEQ ID NO: 90725 - RNA, 32 nt, Homo Sapiens
gacaagcgguuaagcgcgacccaggcacugca

SEQ ID NO: 90726 - RNA, 32 nt, Homo Sapiens
acaaggucaggaguuugagaccagccuggcca

SEQ ID NO: 90727 - RNA, 32 nt, Homo Sapiens
auggccacccggggcagcugcccucagccaag

SEQ ID NO: 90728 - RNA, 32 nt, Homo Sapiens
uauacacuuuuguauuuuuauucuuauauaag

SEQ ID NO: 90729 - RNA, 32 nt, Homo Sapiens
ccuuugucugcuugguaccuuaauuuuuuaua

SEQ ID NO: 90730 - RNA, 32 nt, Homo Sapiens
uaauccagcucaguucuguguacaaaccaugg

SEQ ID NO: 90731 - RNA, 30 nt, Homo Sapiens
accuugguguccgugccgcccagggacucc

SEQ ID NO: 90732 - RNA, 32 nt, Homo Sapiens
ccgcagcgccgcgcagcucgcagcgcugaacg

SEQ ID NO: 90733 - RNA, 32 nt, Homo Sapiens
aauggagagaaggguguucaaggucaggagug

SEQ ID NO: 90734 - RNA, 32 nt, Homo Sapiens
uucccggggcgcagcugcgggcggcgggagca

SEQ ID NO: 90735 - RNA, 32 nt, Homo Sapiens
auggaagccaucguuuguucauuuucaccacc

SEQ ID NO: 90736 - RNA, 32 nt, Homo Sapiens
cacccccgcgcgccgccucccaccagucccga

SEQ ID NO: 90737 - RNA, 32 nt, Homo Sapiens
cgagaugggaggaggagaaaaagcgguacgau

SEQ ID NO: 90738 - RNA, 32 nt, Homo Sapiens
acuuaugcagaaaaauaggcaauaagaacuuc

SEQ ID NO: 90739 - RNA, 32 nt, Homo Sapiens
augaccuaaaauuaauggcuuauuuggcaggu

SEQ ID NO: 90740 - RNA, 32 nt, Homo Sapiens
uugaaauucauccuccacggacccauucauac

SEQ ID NO: 90741 - RNA, 32 nt, Homo Sapiens
agcccucucugacuuuaccuugagaucugucu

SEQ ID NO: 90742 - RNA, 32 nt, Homo Sapiens
gucaacuacagagaguccaagcagaagggcag

SEQ ID NO: 90743 - RNA, 32 nt, Homo Sapiens
acagagaccuagauuucuuuucacuuccgcaa

SEQ ID NO: 90744 - RNA, 32 nt, Homo Sapiens
cucaaugucaggaaaaccggaacuuguugaug

SEQ ID NO: 90745 - RNA, 32 nt, Homo Sapiens
aucacuuucuacaggagguuaugauuuuugcc

SEQ ID NO: 90746 - RNA, 32 nt, Homo Sapiens
auaaaagggcagccgcgccggcgccccacagc

SEQ ID NO: 90747 - RNA, 32 nt, Homo Sapiens
uuggguccuaguguuauguuccagucugccca

SEQ ID NO: 90748 - RNA, 32 nt, Homo Sapiens
gauaugguuucaucaacaggaaugacaccaag

SEQ ID NO: 90749 - RNA, 32 nt, Homo Sapiens
gggguggaaggggcaggauucugcagcugcuu

SEQ ID NO: 90750 - RNA, 32 nt, Homo Sapiens
uaaaaugucugccuuacaaauucauaacaaca

SEQ ID NO: 90751 - RNA, 32 nt, Homo Sapiens
gaucucuugcauucugguggguacugggggca

SEQ ID NO: 90752 - RNA, 32 nt, Homo Sapiens
agcccucugccggcugugguguccucugaauu

SEQ ID NO: 90753 - RNA, 32 nt, Homo Sapiens
ugcugugcugggacagaaugggaugccaggaa

SEQ ID NO: 90754 - RNA, 32 nt, Homo Sapiens
aagaacacagaaagaggaggagcaagugggau

SEQ ID NO: 90755 - RNA, 32 nt, Homo Sapiens
ugaaaggguuaagagggaaagauacugcccaa

SEQ ID NO: 90756 - RNA, 32 nt, Homo Sapiens
ccccacccuggccuagugacucucugcggccu

SEQ ID NO: 90757 - RNA, 32 nt, Homo Sapiens
acugugaagcaucugccauggggaagugcugu

SEQ ID NO: 90758 - RNA, 32 nt, Homo Sapiens
ugucuaguauacuuuuagcaaacaagugccac

SEQ ID NO: 90759 - RNA, 32 nt, Homo Sapiens
gagcuguugggguuucucugccaaugaccccu

SEQ ID NO: 90760 - RNA, 32 nt, Homo Sapiens
ccacaacauaucuaucuauuauuucauuugau

SEQ ID NO: 90761 - RNA, 32 nt, Homo Sapiens
uaaauggaaaauuaaaaugguaaaaaaugcaa

SEQ ID NO: 90762 - RNA, 32 nt, Homo Sapiens
ggccucuguucccugcagucugugcugugugu

SEQ ID NO: 90763 - RNA, 32 nt, Homo Sapiens
cuaaaagaucacaugauggaggauguaagcaa

SEQ ID NO: 90764 - RNA, 32 nt, Homo Sapiens
auuugaauuacaaagcacuauccaguucuuau

SEQ ID NO: 90765 - RNA, 32 nt, Homo Sapiens
gucuaucugaccaucuuucucuuacuguccuc

SEQ ID NO: 90766 - RNA, 32 nt, Homo Sapiens
accuagauguuuaacaaaucuaaucucuuauu

SEQ ID NO: 90767 - RNA, 32 nt, Homo Sapiens
ccagccccaaccccacucaugccccgucgucc

SEQ ID NO: 90768 - RNA, 30 nt, Homo Sapiens
aaacuguaucacccccaaaauguaaagucu

SEQ ID NO: 90769 - RNA, 32 nt, Homo Sapiens
agguucuagagggugaacaacuucugcucgug

SEQ ID NO: 90770 - RNA, 32 nt, Homo Sapiens
guuucccucaaaucaugggaaccaucgcaaaa

SEQ ID NO: 90771 - RNA, 32 nt, Homo Sapiens
cgacaucccccugccaccuccucccccaccuc

SEQ ID NO: 90772 - RNA, 32 nt, Homo Sapiens
caggccuacggagugggugcugggcaagcaga

SEQ ID NO: 90773 - RNA, 32 nt, Homo Sapiens
aacuucuacccuagaagcucucugccaucgau

SEQ ID NO: 90774 - RNA, 32 nt, Homo Sapiens
uguguaaguuaaaucacuuuggcaaauaugag

SEQ ID NO: 90775 - RNA, 32 nt, Homo Sapiens
cccaacccuuguauauggggacagugggguca

SEQ ID NO: 90776 - RNA, 32 nt, Homo Sapiens
gauugaaacuguaaauaacauaacacuuuaag

SEQ ID NO: 90777 - RNA, 32 nt, Homo Sapiens
auaaagacaaguaugaauauuacucucaaaau

SEQ ID NO: 90778 - RNA, 32 nt, Homo Sapiens
gagucacccagcuuccuucucugcgcuguuuc

SEQ ID NO: 90779 - RNA, 26 nt, Homo Sapiens
uaccacaauaaauuauuguuaauuaa

SEQ ID NO: 90780 - RNA, 32 nt, Homo Sapiens
uauaucaguaaggaugaucucaacauaauagu

SEQ ID NO: 90781 - RNA, 32 nt, Homo Sapiens
cuugucuaugacucacagcuacgacguggccu

SEQ ID NO: 90782 - RNA, 32 nt, Homo Sapiens
gcuuccccgucccgcccuccccgcuccgaggg

SEQ ID NO: 90783 - RNA, 32 nt, Homo Sapiens
ggccaggugcgguggcucguaccuguaaucca

SEQ ID NO: 90784 - RNA, 32 nt, Homo Sapiens
uggccaggugguggcuccugcagccuggaaaa

SEQ ID NO: 90785 - RNA, 32 nt, Homo Sapiens
aguguguguuccaggagugguggcucugaggu

SEQ ID NO: 90786 - RNA, 32 nt, Homo Sapiens
ggcgcgcucgggcugccgcuggcucuucgcac

SEQ ID NO: 90787 - RNA, 32 nt, Homo Sapiens
ucccagccaggguggccccggcgggggcgggu

SEQ ID NO: 90788 - RNA, 32 nt, Homo Sapiens
gcucccuccgccuccuccccgccccgagcccc

SEQ ID NO: 90789 - RNA, 32 nt, Homo Sapiens
gagucgauagaugcaacaaaacaccauggcac

SEQ ID NO: 90790 - RNA, 29 nt, Homo Sapiens
aaccaauaaaguuuuauauuuuguuuacu

SEQ ID NO: 90791 - RNA, 32 nt, Homo Sapiens
ucucuuccagcauugguguguccuccagggaa

SEQ ID NO: 90792 - RNA, 32 nt, Homo Sapiens
uucuccauucccuccacccacuugccugucac

SEQ ID NO: 90793 - RNA, 32 nt, Homo Sapiens
auacuccaggacuuagaauagugccuaaagug

SEQ ID NO: 90794 - RNA, 32 nt, Homo Sapiens
aacagagccaccuucugcguccugcugagcuc

SEQ ID NO: 90795 - RNA, 32 nt, Homo Sapiens
aacucaggcauuuugggggagagguacagaaa

SEQ ID NO: 90796 - RNA, 32 nt, Homo Sapiens
acgugcaggugggacagugguuccagcuccga

SEQ ID NO: 90797 - RNA, 32 nt, Homo Sapiens
gauucccccccggagcgcggcgcgggcagcgc

SEQ ID NO: 90798 - RNA, 32 nt, Homo Sapiens
gcggcggcggcggugguggcggcaccauguuu

SEQ ID NO: 90799 - RNA, 32 nt, Homo Sapiens
cagcuaucuuaccagacugugccuaaagaauu

SEQ ID NO: 90800 - RNA, 32 nt, Homo Sapiens
ugcugcuugugccgugagcgccgcccagccau

SEQ ID NO: 90801 - RNA, 32 nt, Homo Sapiens
uugcucacucuuuuugaugggugucuuuccaa

SEQ ID NO: 90802 - RNA, 32 nt, Homo Sapiens
auacaagacagcuaaagggcuguuugguuagc

SEQ ID NO: 90803 - RNA, 32 nt, Homo Sapiens
cuuccaccgagacuacgagggccuuugaugcu

SEQ ID NO: 90804 - RNA, 32 nt, Homo Sapiens
aggacuaagcuguucguccacacgccaccauc

SEQ ID NO: 90805 - RNA, 32 nt, Homo Sapiens
cgaggugacggaagcgggagggugcgggagaa

SEQ ID NO: 90806 - RNA, 32 nt, Homo Sapiens
aaaucucugacagguauuuuguuuccuuuaca

SEQ ID NO: 90807 - RNA, 31 nt, Homo Sapiens
ggaggguggcacugccacaucccacuggcag

SEQ ID NO: 90808 - RNA, 32 nt, Homo Sapiens
gagacccuuuuuuuuccaauugugcugagucu

SEQ ID NO: 90809 - RNA, 32 nt, Homo Sapiens
acgcagccccaccgcccuccccacucucgggg

SEQ ID NO: 90810 - RNA, 32 nt, Homo Sapiens
augcagagccagggaaggcugguggagugaug

SEQ ID NO: 90811 - RNA, 32 nt, Homo Sapiens
ccgauaccgaccggcgugggcgcggagcgggc

SEQ ID NO: 90812 - RNA, 32 nt, Homo Sapiens
ccugccaucuggaugugcauuauuaaugcugg

SEQ ID NO: 90813 - RNA, 32 nt, Homo Sapiens
uaucucauacauauuucuguuaaugaacaccc

SEQ ID NO: 90814 - RNA, 32 nt, Homo Sapiens
aaaauuuuacaugacauagaaacuguauuuuu

SEQ ID NO: 90815 - RNA, 32 nt, Homo Sapiens
ccuggcagguuagaaccuagaagggcuagaac

SEQ ID NO: 90816 - RNA, 32 nt, Homo Sapiens
uuaccagggauguagauuaaggugaugugauu

SEQ ID NO: 90817 - RNA, 32 nt, Homo Sapiens
cuguauuugacaaaggaaacucuuaaauuaua

SEQ ID NO: 90818 - RNA, 32 nt, Homo Sapiens
cugguccggccgcuggagcgcccacccuggcc

SEQ ID NO: 90819 - RNA, 32 nt, Homo Sapiens
cacagcgguuaaagaggaaggcugcuucacau

SEQ ID NO: 90820 - RNA, 32 nt, Homo Sapiens
gaccccuucccugccacccauccacgugcauc

SEQ ID NO: 90821 - RNA, 32 nt, Homo Sapiens
gguauuuuuuaaaguauucauugaguuuacca

SEQ ID NO: 90822 - RNA, 32 nt, Homo Sapiens
ggacccccugcgccuuuuuuagcuucagucau

SEQ ID NO: 90823 - RNA, 32 nt, Homo Sapiens
ccugaggucugagcacccuccaaacugagucc

SEQ ID NO: 90824 - RNA, 32 nt, Homo Sapiens
accucaagacuaucagaagaaauauuuaaauu

SEQ ID NO: 90825 - RNA, 29 nt, Homo Sapiens
ugugcguggggacagaggccuggaaaugc

SEQ ID NO: 90826 - RNA, 32 nt, Homo Sapiens
auacuuagugauugccuauuuugugcguaguc

SEQ ID NO: 90827 - RNA, 32 nt, Homo Sapiens
uucucaacaaacacucuugucuggagacaggc

SEQ ID NO: 90828 - RNA, 32 nt, Homo Sapiens
gcgccuucgagccagcgccggggcgggggcag

SEQ ID NO: 90829 - RNA, 32 nt, Homo Sapiens
gcuaucccugucagcuucacccuagcaucagc

SEQ ID NO: 90830 - RNA, 32 nt, Homo Sapiens
uuuucgcugcuucuuggugccccaucucuugu

SEQ ID NO: 90831 - RNA, 32 nt, Homo Sapiens
aauccaguuauuuccugcgcugcgaggguuuc

SEQ ID NO: 90832 - RNA, 32 nt, Homo Sapiens
ugugugagaagcugcagccgccggcagaggag

SEQ ID NO: 90833 - RNA, 32 nt, Homo Sapiens
agacccccacccaaggaaugugcaaggacuga

SEQ ID NO: 90834 - RNA, 32 nt, Homo Sapiens
uacaugcagagagcuucaagaucaagacugcc

SEQ ID NO: 90835 - RNA, 32 nt, Homo Sapiens
ucuguaaaauuccaucucauuucauugcuggc

SEQ ID NO: 90836 - RNA, 32 nt, Homo Sapiens
cgccucccgcccccaaaccccauccccgcggu

SEQ ID NO: 90837 - RNA, 32 nt, Homo Sapiens
acgcccgggguggcgaaacggucgccaccuga

SEQ ID NO: 90838 - RNA, 32 nt, Homo Sapiens
caaaccuugccuguuguuuucuaaucaugaug

SEQ ID NO: 90839 - RNA, 32 nt, Homo Sapiens
cugucagcucuuuaauuucugguauuuuuguu

SEQ ID NO: 90840 - RNA, 32 nt, Homo Sapiens
caccgugggcccggcagccugagcggcaggcc

SEQ ID NO: 90841 - RNA, 32 nt, Homo Sapiens
ucgucugcuuacggaagcgcugaaagacuagg

SEQ ID NO: 90842 - RNA, 32 nt, Homo Sapiens
uacugugaggcacaaauuauacugucaaccua

SEQ ID NO: 90843 - RNA, 32 nt, Homo Sapiens
aauguucaagauagagaaaaacaucaagaccu

SEQ ID NO: 90844 - RNA, 32 nt, Homo Sapiens
gaaauuggcuugggauggauagguauagggaa

SEQ ID NO: 90845 - RNA, 32 nt, Homo Sapiens
acucugagucugcccuauccacagcugcuggg

SEQ ID NO: 90846 - RNA, 32 nt, Homo Sapiens
cccugucuuggcaaccucuacugcccaucucc

SEQ ID NO: 90847 - RNA, 32 nt, Homo Sapiens
ggguuuuuauuuuuauuuucucuuuguuuuua

SEQ ID NO: 90848 - RNA, 32 nt, Homo Sapiens
cuucucccugucauccccaggggucauaggau

SEQ ID NO: 90849 - RNA, 32 nt, Homo Sapiens
aagugaccuuccuggaggaggugggcagcuca

SEQ ID NO: 90850 - RNA, 32 nt, Homo Sapiens
aggcauacagcuuauugauuagagcuggcaag

SEQ ID NO: 90851 - RNA, 32 nt, Homo Sapiens
cauguagaauuuucacuuuguacuggcaggcu

SEQ ID NO: 90852 - RNA, 32 nt, Homo Sapiens
aauuaacauaauuuaaauuugaugcaauuuaa

SEQ ID NO: 90853 - RNA, 32 nt, Homo Sapiens
gcggcuacugggcccugcccagccccggaacu

SEQ ID NO: 90854 - RNA, 31 nt, Homo Sapiens
auaggugcaaaauccaucagagccauuguuu

SEQ ID NO: 90855 - RNA, 32 nt, Homo Sapiens
aaaaggcuagggagcuggggcuggggcucccc

SEQ ID NO: 90856 - RNA, 32 nt, Homo Sapiens
aggaaagugugugaagacccaggucuggcucu

SEQ ID NO: 90857 - RNA, 32 nt, Homo Sapiens
aggaucgcaccccccuccuccucccuggccca

SEQ ID NO: 90858 - RNA, 32 nt, Homo Sapiens
uucugcuuuccacaccugcacugcugugcugu

SEQ ID NO: 90859 - RNA, 32 nt, Homo Sapiens
acuuaggaaaucaacaguuuuaauuuuaauau

SEQ ID NO: 90860 - RNA, 32 nt, Homo Sapiens
cugucuuauccacauuuggcuccaccucugag

SEQ ID NO: 90861 - RNA, 32 nt, Homo Sapiens
ccugcuuccccuccccaccagcagggggcgca

SEQ ID NO: 90862 - RNA, 32 nt, Homo Sapiens
cggacccugcgcacucucuggucaucgccugg

SEQ ID NO: 90863 - RNA, 32 nt, Homo Sapiens
ucauuugaauucugugaaucuccaccuugccu

SEQ ID NO: 90864 - RNA, 32 nt, Homo Sapiens
ugguuugccuucuucuucucuguggcgaugac

SEQ ID NO: 90865 - RNA, 32 nt, Homo Sapiens
auggugccuacucgaaagaaauguagaugcua

SEQ ID NO: 90866 - RNA, 32 nt, Homo Sapiens
ccguccagccgaguccccacuccggagucgcc

SEQ ID NO: 90867 - RNA, 32 nt, Homo Sapiens
uaucauuacagcacguuaacuuuuccauucgg

SEQ ID NO: 90868 - RNA, 32 nt, Homo Sapiens
gugguugacaauguuagcuuaaucuggaguau

SEQ ID NO: 90869 - RNA, 32 nt, Homo Sapiens
ucuaccugaaccugcacaccuacgugcgcagg

SEQ ID NO: 90870 - RNA, 32 nt, Homo Sapiens
acaaaugagcgacuucugugcuuccagaggaa

SEQ ID NO: 90871 - RNA, 32 nt, Homo Sapiens
cucaccuguauauuuaaacuguucuuggcauc

SEQ ID NO: 90872 - RNA, 32 nt, Homo Sapiens
uuuucauaaaacuuuuuuuuuacuuuuuuucc

SEQ ID NO: 90873 - RNA, 32 nt, Homo Sapiens
aaagccuccuugaaguuuuuuacuuagaaaua

SEQ ID NO: 90874 - RNA, 31 nt, Homo Sapiens
ucccacccacccucagccagcgccacacggc

SEQ ID NO: 90875 - RNA, 32 nt, Homo Sapiens
cagcuggaaacaauucuuaaugcugcaggaag

SEQ ID NO: 90876 - RNA, 32 nt, Homo Sapiens
caccugaaggugcugccccggggggugcaaug

SEQ ID NO: 90877 - RNA, 32 nt, Homo Sapiens
auccaugugauuauuaaaaugacuguagcuga

SEQ ID NO: 90878 - RNA, 32 nt, Homo Sapiens
aauggggccuucgaccccagcgggcuaccuga

SEQ ID NO: 90879 - RNA, 32 nt, Homo Sapiens
aaagggaggggagggggcccgguaauguacau

SEQ ID NO: 90880 - RNA, 32 nt, Homo Sapiens
uaguagcagcuacuccagaggcugaaauggga

SEQ ID NO: 90881 - RNA, 32 nt, Homo Sapiens
uagcuuaaauucacuaauauuaauuuaaaaag

SEQ ID NO: 90882 - RNA, 27 nt, Homo Sapiens
cauucuugcugcuucagccccuaucac

SEQ ID NO: 90883 - RNA, 32 nt, Homo Sapiens
auauguguauauuuuuaugaucuuacaaaccu

SEQ ID NO: 90884 - RNA, 32 nt, Homo Sapiens
uugggagagcugcggcaucacaucgcuugggc

SEQ ID NO: 90885 - RNA, 32 nt, Homo Sapiens
cgcgggggcugagcgggcgccacuuccccucc

SEQ ID NO: 90886 - RNA, 32 nt, Homo Sapiens
gcacuuccugcaugcgcccccggcaccugacu

SEQ ID NO: 90887 - RNA, 32 nt, Homo Sapiens
auaccguguuacacacauuugcucuuaugaga

SEQ ID NO: 90888 - RNA, 32 nt, Homo Sapiens
uauguggcuauaugcuuuuuuauuuucucugg

SEQ ID NO: 90889 - RNA, 32 nt, Homo Sapiens
gucccauuauucuaguuucaguaaaucuaaag

SEQ ID NO: 90890 - RNA, 32 nt, Homo Sapiens
auugccagcuccgagacccgggacuccuccug

SEQ ID NO: 90891 - RNA, 32 nt, Homo Sapiens
aagagcuugggguagccacuaauuacuacugu

SEQ ID NO: 90892 - RNA, 32 nt, Homo Sapiens
ugaaacccgcuaucuucaguagggacuuuuac

SEQ ID NO: 90893 - RNA, 32 nt, Homo Sapiens
cuuucagcugauuugcagaaguugcccaugug

SEQ ID NO: 90894 - RNA, 32 nt, Homo Sapiens
gagucugcccgcagcccccuggccccugcccg

SEQ ID NO: 90895 - RNA, 32 nt, Homo Sapiens
accucaacaacaacuucauguuugggcagaag

SEQ ID NO: 90896 - RNA, 32 nt, Homo Sapiens
cgacaggagccaggacccguguaggagauggu

SEQ ID NO: 90897 - RNA, 30 nt, Homo Sapiens
cgcuuucguaagagcgugcgcgcgcccgag

SEQ ID NO: 90898 - RNA, 32 nt, Homo Sapiens
ggcagagaaaauaaauaucaucaaauaagaaa

SEQ ID NO: 90899 - RNA, 32 nt, Homo Sapiens
cucugguguuaccaccucgagacuugucucau

SEQ ID NO: 90900 - RNA, 32 nt, Homo Sapiens
cugcuggaugaaugguccagugccaaaaugag

SEQ ID NO: 90901 - RNA, 32 nt, Homo Sapiens
ccacagcccucgccccacagggacgccugagc

SEQ ID NO: 90902 - RNA, 32 nt, Homo Sapiens
aagaagcccgaccaaggccggcgugggcgagg

SEQ ID NO: 90903 - RNA, 32 nt, Homo Sapiens
cagggggcggggguuggaggcuggggaccuaa

SEQ ID NO: 90904 - RNA, 32 nt, Homo Sapiens
cggcgcccgccguccccgcagcgccgcucugc

SEQ ID NO: 90905 - RNA, 32 nt, Homo Sapiens
cuccuccucgcgccccaccucccccgagagcu

SEQ ID NO: 90906 - RNA, 32 nt, Homo Sapiens
gacuugaaacaaaaaugaguaucuuguagcug

SEQ ID NO: 90907 - RNA, 32 nt, Homo Sapiens
cagcccaaggguggagagggggccaagggcuc

SEQ ID NO: 90908 - RNA, 32 nt, Homo Sapiens
uucaaugguagauucgcuguccccucagcggg

SEQ ID NO: 90909 - RNA, 32 nt, Homo Sapiens
acaugaaugcugucaaaaugacauugauggca

SEQ ID NO: 90910 - RNA, 32 nt, Homo Sapiens
uuguucacauaccaccuucguccccccaggcc

SEQ ID NO: 90911 - RNA, 32 nt, Homo Sapiens
acuuccggccccgccccgggccccagcgcuuu

SEQ ID NO: 90912 - RNA, 32 nt, Homo Sapiens
uccuucauucagcucauccccagcccuggcug

SEQ ID NO: 90913 - RNA, 32 nt, Homo Sapiens
gggacccucccagcugaggccccaccaccacc

SEQ ID NO: 90914 - RNA, 32 nt, Homo Sapiens
gugccagaaugaauuuucuuguuucaggaugc

SEQ ID NO: 90915 - RNA, 32 nt, Homo Sapiens
aagcagcccgcccuucccccucccauccguca

SEQ ID NO: 90916 - RNA, 32 nt, Homo Sapiens
ccuuggucaccaaguuuuggcuccucauacag

SEQ ID NO: 90917 - RNA, 32 nt, Homo Sapiens
acaccuucccccacccauaccccuccugugug

SEQ ID NO: 90918 - RNA, 32 nt, Homo Sapiens
ugaggcccaagcagauggcacuggggcccugc

SEQ ID NO: 90919 - RNA, 30 nt, Homo Sapiens
uccccguagcccgugcgcccucggcgcgga

SEQ ID NO: 90920 - RNA, 32 nt, Homo Sapiens
uacacacuuuguacaaguuacuucuaacagug

SEQ ID NO: 90921 - RNA, 32 nt, Homo Sapiens
gauuuuguuuugcuuuuucugacuccaguggg

SEQ ID NO: 90922 - RNA, 32 nt, Homo Sapiens
caccucgaauacuggggauuaccauucagcau

SEQ ID NO: 90923 - RNA, 32 nt, Homo Sapiens
uuguggccaguuccucuucacaugaagccccu

SEQ ID NO: 90924 - RNA, 32 nt, Homo Sapiens
uuagcuugguggaggcuucaucugaaagccaa

SEQ ID NO: 90925 - RNA, 32 nt, Homo Sapiens
acuaaagucuaucuuuugaauucauaagcaua

SEQ ID NO: 90926 - RNA, 32 nt, Homo Sapiens
gaaucgugguggucuccuucccucuggaguga

SEQ ID NO: 90927 - RNA, 32 nt, Homo Sapiens
uggagagguucaggcacauggcauagcugcua

SEQ ID NO: 90928 - RNA, 32 nt, Homo Sapiens
cccucugccagcuguggcgggccaucauccug

SEQ ID NO: 90929 - RNA, 32 nt, Homo Sapiens
agauccuaagagcuucuuggggauguagaaca

SEQ ID NO: 90930 - RNA, 32 nt, Homo Sapiens
agcgaaacagcaaggugauuugugaaagagau

SEQ ID NO: 90931 - RNA, 32 nt, Homo Sapiens
agaugcugaugauuuguuuuuguauuuuuaau

SEQ ID NO: 90932 - RNA, 32 nt, Homo Sapiens
aaaagcugaucuaaauaaaggcauguguaugg

SEQ ID NO: 90933 - RNA, 32 nt, Homo Sapiens
gcacacaggaccacauuuguucuaccacgcua

SEQ ID NO: 90934 - RNA, 32 nt, Homo Sapiens
uagggguggggagggagggagaggccgccacc

SEQ ID NO: 90935 - RNA, 32 nt, Homo Sapiens
uguuccgucucgccccgagguucacgccaucc

SEQ ID NO: 90936 - RNA, 32 nt, Homo Sapiens
gcuuggagccccaaguacggcuuuucaggcgc

SEQ ID NO: 90937 - RNA, 32 nt, Homo Sapiens
cuguuauugguguuuguuuaauaaaaauaaug

SEQ ID NO: 90938 - RNA, 32 nt, Homo Sapiens
cggagauguggggcuuuuuuuuuaaauaaaau

SEQ ID NO: 90939 - RNA, 32 nt, Homo Sapiens
ucaagaccagcauggcuuacaugcuaaaaccc

SEQ ID NO: 90940 - RNA, 32 nt, Homo Sapiens
ugccgggauggagcugcagagccggcccgagg

SEQ ID NO: 90941 - RNA, 32 nt, Homo Sapiens
cuucuucuuggucuuauuuauuauuguguguu

SEQ ID NO: 90942 - RNA, 32 nt, Homo Sapiens
aaauucagcaacucgcuugaaaggaagacugg

SEQ ID NO: 90943 - RNA, 32 nt, Homo Sapiens
ucccuauucccucucucucccaggucccagcc

SEQ ID NO: 90944 - RNA, 32 nt, Homo Sapiens
aagggucuuuggaccugggggaucucaggagc

SEQ ID NO: 90945 - RNA, 32 nt, Homo Sapiens
gaggcagaggccgggccuccucaagucggccu

SEQ ID NO: 90946 - RNA, 32 nt, Homo Sapiens
uccugaaguuugucuucauguacuguaagaua

SEQ ID NO: 90947 - RNA, 32 nt, Homo Sapiens
uucgucuuuuggacuucuggugucucaaugcu

SEQ ID NO: 90948 - RNA, 32 nt, Homo Sapiens
ucucuugccugccacugugugaaucggcgacg

SEQ ID NO: 90949 - RNA, 32 nt, Homo Sapiens
cuuuggccucaucgcugaccugggccgucaga

SEQ ID NO: 90950 - RNA, 32 nt, Homo Sapiens
cauucauacuaaauaaaacaauguaauuacau

SEQ ID NO: 90951 - RNA, 32 nt, Homo Sapiens
uuaauuuuacuuuucaaagauacuuuaaaaca

SEQ ID NO: 90952 - RNA, 32 nt, Homo Sapiens
aggaugcacaguggaggaaaagaacaaagaag

SEQ ID NO: 90953 - RNA, 32 nt, Homo Sapiens
agcaaaacauaaauuaaaacucaaaugcccag

SEQ ID NO: 90954 - RNA, 32 nt, Homo Sapiens
ccccuggagcccagcuuccauuucuauaaaau

SEQ ID NO: 90955 - RNA, 32 nt, Homo Sapiens
aguggccuuguccaauggccuguguguuacaa

SEQ ID NO: 90956 - RNA, 32 nt, Homo Sapiens
caccauccccuuggugaugaguucuugcuuag

SEQ ID NO: 90957 - RNA, 32 nt, Homo Sapiens
aagagccagugagguuuggagagaacaaugaa

SEQ ID NO: 90958 - RNA, 32 nt, Homo Sapiens
uaccugcuucacguuggccggcggcuacucug

SEQ ID NO: 90959 - RNA, 32 nt, Homo Sapiens
ucagagguuugccaugccccagcuucuuuucu

SEQ ID NO: 90960 - RNA, 32 nt, Homo Sapiens
uuacaggugugagccaccacgcauggcccuga

SEQ ID NO: 90961 - RNA, 32 nt, Homo Sapiens
cgagcugcccucggaggccggcguggggaaga

SEQ ID NO: 90962 - RNA, 32 nt, Homo Sapiens
ucagucuaguucauuuuccccgaggacaucuu

SEQ ID NO: 90963 - RNA, 32 nt, Homo Sapiens
auugaagaaaaaauuggccacagggccaagag

SEQ ID NO: 90964 - RNA, 32 nt, Homo Sapiens
ugaagauacuaaaaauaaugcacuggaaggag

SEQ ID NO: 90965 - RNA, 32 nt, Homo Sapiens
acuugggggaaguggcuugguuugcgugguuu

SEQ ID NO: 90966 - RNA, 32 nt, Homo Sapiens
cuaccgaucaccgugguuuuggaaagucaguc

SEQ ID NO: 90967 - RNA, 32 nt, Homo Sapiens
uugaagccaaaggaaucucacuuguggggccu

SEQ ID NO: 90968 - RNA, 32 nt, Homo Sapiens
gccccuucgaacgagcagccugcccugugucc

SEQ ID NO: 90969 - RNA, 32 nt, Homo Sapiens
ccaggcaagggaacuuuaaagaauuauuaggc

SEQ ID NO: 90970 - RNA, 32 nt, Homo Sapiens
aaaacuaaaaauugagcuaccauaggauccag

SEQ ID NO: 90971 - RNA, 32 nt, Homo Sapiens
cggacuaggguguagcauauuuaguaggaugc

SEQ ID NO: 90972 - RNA, 32 nt, Homo Sapiens
caagacaguuuagcaauacaguuuauaauaga

SEQ ID NO: 90973 - RNA, 32 nt, Homo Sapiens
gucccuucauacccuagucccuggacagcuga

SEQ ID NO: 90974 - RNA, 32 nt, Homo Sapiens
ccgcccgcacgccgccgcgcccgccccagccc

SEQ ID NO: 90975 - RNA, 32 nt, Homo Sapiens
ugccaagaccucuuuuuggggaggaaaggccg

SEQ ID NO: 90976 - RNA, 32 nt, Homo Sapiens
uuugauuucuuacuguacuggcuaucuuaaua

SEQ ID NO: 90977 - RNA, 32 nt, Homo Sapiens
uggccuggcccuguugagucugcacagucccu

SEQ ID NO: 90978 - RNA, 32 nt, Homo Sapiens
uucuuagauagcgucuuccucagcgcccgucg

SEQ ID NO: 90979 - RNA, 32 nt, Homo Sapiens
aauuaaaaaguacuugauaaauuguaauuuga

SEQ ID NO: 90980 - RNA, 32 nt, Homo Sapiens
cacaacucaaauucacuagaaaacuacuguug

SEQ ID NO: 90981 - RNA, 32 nt, Homo Sapiens
caacgggauugugagaaucaagucacucuagu

SEQ ID NO: 90982 - RNA, 32 nt, Homo Sapiens
ggaggcggcgcugcucuccccgagggcggcug

SEQ ID NO: 90983 - RNA, 32 nt, Homo Sapiens
caguccugccuggggagggagcuguuggccau

SEQ ID NO: 90984 - RNA, 32 nt, Homo Sapiens
cgggccccuacggucccggcggcggcuggagg

SEQ ID NO: 90985 - RNA, 32 nt, Homo Sapiens
uugcccaccugcagaagcuugagguccugaac

SEQ ID NO: 90986 - RNA, 32 nt, Homo Sapiens
gaacacaggcgccgaccgccucaugacccagc

SEQ ID NO: 90987 - RNA, 32 nt, Homo Sapiens
uggcaguguuaguaugcugaaugcuugugguu

SEQ ID NO: 90988 - RNA, 32 nt, Homo Sapiens
agauaaaaugagccagugagcuacagcacuuu

SEQ ID NO: 90989 - RNA, 32 nt, Homo Sapiens
caccgggccugugggaacccaggcgucccgcc

SEQ ID NO: 90990 - RNA, 32 nt, Homo Sapiens
aaagccacuccagaccuacauaggugaugaau

SEQ ID NO: 90991 - RNA, 32 nt, Homo Sapiens
ugcuugauuuaaaggggaguuuguuuuccaga

SEQ ID NO: 90992 - RNA, 32 nt, Homo Sapiens
cuuggauuuuuuucuuuuuuguccuuccuuuu

SEQ ID NO: 90993 - RNA, 32 nt, Homo Sapiens
uuuccaagauaagcucaguccuuuuucaaaug

SEQ ID NO: 90994 - RNA, 32 nt, Homo Sapiens
gucagccaacuggggaaaguggaauugaaauc

SEQ ID NO: 90995 - RNA, 32 nt, Homo Sapiens
guguaucaggcaggguucuaccagagaaacag

SEQ ID NO: 90996 - RNA, 32 nt, Homo Sapiens
acucaucauuuuuauacaggacacuaauggga

SEQ ID NO: 90997 - RNA, 32 nt, Homo Sapiens
uuauuaacuuguauuaugaaucaaauuaaguu

SEQ ID NO: 90998 - RNA, 30 nt, Homo Sapiens
caaaagucauuuugcuauucucauuuucag

SEQ ID NO: 90999 - RNA, 32 nt, Homo Sapiens
uuaauuauuuguuuuucuccuauuuuuaaauu

SEQ ID NO: 91000 - RNA, 32 nt, Homo Sapiens
gucugggcagguugccccuuucuggguuugug

SEQ ID NO: 91001 - RNA, 32 nt, Homo Sapiens
ccauaugauaaaugcagcugacuguuaauuag

SEQ ID NO: 91002 - RNA, 32 nt, Homo Sapiens
uagacccagcgguggccucaccacgucguagg

SEQ ID NO: 91003 - RNA, 32 nt, Homo Sapiens
cuccuacuagggcuacccuacugcaccccauc

SEQ ID NO: 91004 - RNA, 32 nt, Homo Sapiens
auaguguguuuaagguaguuaauuucagguug

SEQ ID NO: 91005 - RNA, 32 nt, Homo Sapiens
uuuuuaaaucaucaguauaguuuaacacauuc

SEQ ID NO: 91006 - RNA, 32 nt, Homo Sapiens
ggacuccugagguccuaucuccaggcugcggu

SEQ ID NO: 91007 - RNA, 32 nt, Homo Sapiens
cuaagaaaacauuugggccugguucgcagaug

SEQ ID NO: 91008 - RNA, 32 nt, Homo Sapiens
aacuacacuccagacccgugcugacccugcug

SEQ ID NO: 91009 - RNA, 32 nt, Homo Sapiens
uggcucacaucuuuuuacugaagccagaaagg

SEQ ID NO: 91010 - RNA, 32 nt, Homo Sapiens
ugugucucucugcugucauguuuucuaccuua

SEQ ID NO: 91011 - RNA, 32 nt, Homo Sapiens
acaccuacauggaaauugaacaaccugcuccu

SEQ ID NO: 91012 - RNA, 32 nt, Homo Sapiens
cacgacuuugggggugauuuguguguagcgcc

SEQ ID NO: 91013 - RNA, 32 nt, Homo Sapiens
aggggcugcuccaugcggcauucuuggagguc

SEQ ID NO: 91014 - RNA, 31 nt, Homo Sapiens
aacagagcgggccucuucccucaguuuuucg

SEQ ID NO: 91015 - RNA, 32 nt, Homo Sapiens
guguccugacuucuggaaucuuugagaccaag

SEQ ID NO: 91016 - RNA, 32 nt, Homo Sapiens
uuuuugggggaugggcuaggggaaauaaggcu

SEQ ID NO: 91017 - RNA, 32 nt, Homo Sapiens
uaauagcccucccccucaaccucaccauugug

SEQ ID NO: 91018 - RNA, 32 nt, Homo Sapiens
auggauuugaaagaagcugcugcacccgaaac

SEQ ID NO: 91019 - RNA, 32 nt, Homo Sapiens
ucaaguauuuaaaaauaaggugcauuucuaaa

SEQ ID NO: 91020 - RNA, 32 nt, Homo Sapiens
agggguggagcuggcguccgcgggugcugguc

SEQ ID NO: 91021 - RNA, 32 nt, Homo Sapiens
ccccgugagcgggagcgcggcgcacggcgaug

SEQ ID NO: 91022 - RNA, 32 nt, Homo Sapiens
uaccugcagguauuuucuuuuuaugaacuugu

SEQ ID NO: 91023 - RNA, 32 nt, Homo Sapiens
ccaggagagcaagcaguguuguccucacggga

SEQ ID NO: 91024 - RNA, 32 nt, Homo Sapiens
cuauaaugaucauuuuaauguuucccaugcac

SEQ ID NO: 91025 - RNA, 32 nt, Homo Sapiens
acacugaccccgcauuggggggcccugcaccc

SEQ ID NO: 91026 - RNA, 32 nt, Homo Sapiens
gacauggacaaaggcauugcaccuacuuucuc

SEQ ID NO: 91027 - RNA, 32 nt, Homo Sapiens
aaacccacucucucuuuuuuuuuuuuuugaga

SEQ ID NO: 91028 - RNA, 32 nt, Homo Sapiens
cgauccacccgcccaugccucccagagugcug

SEQ ID NO: 91029 - RNA, 32 nt, Homo Sapiens
guguggucaccauguuccucuccgcggucuuc

SEQ ID NO: 91030 - RNA, 32 nt, Homo Sapiens
uuaauggagagaaaaagcacaguauuguagag

SEQ ID NO: 91031 - RNA, 32 nt, Homo Sapiens
uccgggcuugguuuuuuacgguuuuuauuuau

SEQ ID NO: 91032 - RNA, 32 nt, Homo Sapiens
uccaaauugugcauauggauauauaauguuaa

SEQ ID NO: 91033 - RNA, 32 nt, Homo Sapiens
agaaagaaguggcccaaucuggacggugggaa

SEQ ID NO: 91034 - RNA, 32 nt, Homo Sapiens
gccggggcucccguugcgcugcaccgcguugg

SEQ ID NO: 91035 - RNA, 32 nt, Homo Sapiens
ugauguaauguuuucuuuuucuuucucuugcu

SEQ ID NO: 91036 - RNA, 32 nt, Homo Sapiens
cugagugagaggcugccuucugaugaugcugc

SEQ ID NO: 91037 - RNA, 32 nt, Homo Sapiens
cuaaauuuaauguucagaaaaccagauuuggc

SEQ ID NO: 91038 - RNA, 32 nt, Homo Sapiens
uacauaaaagccaauuccagauugacuguaga

SEQ ID NO: 91039 - RNA, 32 nt, Homo Sapiens
aguguguguaacauaccuguuguuuaucagcc

SEQ ID NO: 91040 - RNA, 32 nt, Homo Sapiens
ccugagacacaugggugcuauugggguugggg

SEQ ID NO: 91041 - RNA, 32 nt, Homo Sapiens
gacgagcagcacaccucugucagaaaaccuaa

SEQ ID NO: 91042 - RNA, 32 nt, Homo Sapiens
gcacagcucacagacacaggaaacacaggacu

SEQ ID NO: 91043 - RNA, 32 nt, Homo Sapiens
ggagccacucaggccuggcuuagagguagcgg

SEQ ID NO: 91044 - RNA, 32 nt, Homo Sapiens
augaagcuccacgcaucuggucaucuuguuuc

SEQ ID NO: 91045 - RNA, 32 nt, Homo Sapiens
gggucccgggccgccugaggcuccuccccacc

SEQ ID NO: 91046 - RNA, 32 nt, Homo Sapiens
cucucuucagcuuccggcccucaacaguggca

SEQ ID NO: 91047 - RNA, 32 nt, Homo Sapiens
guuaacauuccacagauucuaccuuuuguguu

SEQ ID NO: 91048 - RNA, 32 nt, Homo Sapiens
gucuugcacugucacccaggcugcuggaguac

SEQ ID NO: 91049 - RNA, 32 nt, Homo Sapiens
cuagcaagauagucuucaguuucauuuuccug

SEQ ID NO: 91050 - RNA, 32 nt, Homo Sapiens
ggguuugggaugcacugaguuggagguuauga

SEQ ID NO: 91051 - RNA, 32 nt, Homo Sapiens
ugggccugccgggaaggcgcugggacgguuac

SEQ ID NO: 91052 - RNA, 30 nt, Homo Sapiens
cccggcagcaggcgcgucgggacgccccga

SEQ ID NO: 91053 - RNA, 32 nt, Homo Sapiens
cugaggcauccuuggaggaacaggcagacucc

SEQ ID NO: 91054 - RNA, 32 nt, Homo Sapiens
gaugggggcuggcggggagacccgggcgugcg

SEQ ID NO: 91055 - RNA, 32 nt, Homo Sapiens
uccacuccccccaccccacuucgccugccgcg

SEQ ID NO: 91056 - RNA, 32 nt, Homo Sapiens
uucacugguucagcucuguuguuuccuuaaac

SEQ ID NO: 91057 - RNA, 32 nt, Homo Sapiens
caaaagcaccccggaggcgcgacgcuccuucg

SEQ ID NO: 91058 - RNA, 32 nt, Homo Sapiens
cuguccaccugugcugcugcaccaaccucacu

SEQ ID NO: 91059 - RNA, 32 nt, Homo Sapiens
ugcuacuuuguaaaggugaccuuuaaaaaaua

SEQ ID NO: 91060 - RNA, 32 nt, Homo Sapiens
acuguacauucacaacuuauguuucuuugaga

SEQ ID NO: 91061 - RNA, 32 nt, Homo Sapiens
uucauuguggauuauuuaaaugucuucaaaag

SEQ ID NO: 91062 - RNA, 32 nt, Homo Sapiens
guuuggcccaaccuuuucauaggagaugcaaa

SEQ ID NO: 91063 - RNA, 32 nt, Homo Sapiens
agacuggaggccuccgccucccggguuccagu

SEQ ID NO: 91064 - RNA, 32 nt, Homo Sapiens
uugucaucgguugugugagugucgcagaccuu

SEQ ID NO: 91065 - RNA, 32 nt, Homo Sapiens
gugagaaagggaggguggagggugaggccaaa

SEQ ID NO: 91066 - RNA, 32 nt, Homo Sapiens
cccagaaaacggaggauggggguggggcgccu

SEQ ID NO: 91067 - RNA, 32 nt, Homo Sapiens
gauaguauauauaaaaguacauuuuaauagaa

SEQ ID NO: 91068 - RNA, 32 nt, Homo Sapiens
gccaggccgggcgugggcgagagcacgaacgg

SEQ ID NO: 91069 - RNA, 32 nt, Homo Sapiens
cuauuauauauucaguuagugucugauaagau

SEQ ID NO: 91070 - RNA, 30 nt, Homo Sapiens
cugucauucaguuaugcagaagcucauuug

SEQ ID NO: 91071 - RNA, 32 nt, Homo Sapiens
ggacggggcuccugagggguacagguugggug

SEQ ID NO: 91072 - RNA, 32 nt, Homo Sapiens
gcaugaagaaacaacuacaaaaaguuaucauc

SEQ ID NO: 91073 - RNA, 29 nt, Homo Sapiens
aauuauggccucaauuucagagccuguua

SEQ ID NO: 91074 - RNA, 32 nt, Homo Sapiens
gacacugccagccccagggcuccagcccagcc

SEQ ID NO: 91075 - RNA, 32 nt, Homo Sapiens
cugggccuccgcacccgcccucauggaggccg

SEQ ID NO: 91076 - RNA, 31 nt, Homo Sapiens
gcauuguggcacugccucccuugucucucca

SEQ ID NO: 91077 - RNA, 32 nt, Homo Sapiens
gacuuauauggacuugugucuaacauuuugga

SEQ ID NO: 91078 - RNA, 32 nt, Homo Sapiens
aaggagaaucaucauuguugcuuuaucacuuc

SEQ ID NO: 91079 - RNA, 32 nt, Homo Sapiens
uugugaggugucuacaggguuuauaguagucu

SEQ ID NO: 91080 - RNA, 32 nt, Homo Sapiens
uguaaauuguaaaaugauacaaaauuuaaagu

SEQ ID NO: 91081 - RNA, 32 nt, Homo Sapiens
ccagcacuuugggaggccaaaaucacuugagg

SEQ ID NO: 91082 - RNA, 32 nt, Homo Sapiens
uuaucaucuguguaguagguguguguaugugu

SEQ ID NO: 91083 - RNA, 32 nt, Homo Sapiens
ccagaugagaauccuuaugguuuuccaucgga

SEQ ID NO: 91084 - RNA, 32 nt, Homo Sapiens
aauuaagaaagauacauaugcacuuuuacugu

SEQ ID NO: 91085 - RNA, 32 nt, Homo Sapiens
ucacagcgccgcgagcgccgacgcacggguuc

SEQ ID NO: 91086 - RNA, 32 nt, Homo Sapiens
ucaaagugugccuugugucuugugucaggccu

SEQ ID NO: 91087 - RNA, 32 nt, Homo Sapiens
ucccugaagcuuucccacuauaguguggaguu

SEQ ID NO: 91088 - RNA, 32 nt, Homo Sapiens
aaguuacccaaggagaaaugggcucgcagaga

SEQ ID NO: 91089 - RNA, 32 nt, Homo Sapiens
uuuguggaaggaagaaauggagaucaucauga

SEQ ID NO: 91090 - RNA, 32 nt, Homo Sapiens
guggaggcucacggucaugacagcaauugcag

SEQ ID NO: 91091 - RNA, 32 nt, Homo Sapiens
uguuucuauacaaauauaaaucuuaaaaaguu

SEQ ID NO: 91092 - RNA, 32 nt, Homo Sapiens
cuggacgcugcagcuggaacuagcgugccaag

SEQ ID NO: 91093 - RNA, 32 nt, Homo Sapiens
ccucaaagccucgcuccugggggcgcugcugg

SEQ ID NO: 91094 - RNA, 32 nt, Homo Sapiens
aacuccuguggcgagagcugcucugcuuccuu

SEQ ID NO: 91095 - RNA, 32 nt, Homo Sapiens
caggcguggugacacacaccuguagucccagc

SEQ ID NO: 91096 - RNA, 32 nt, Homo Sapiens
guguuccaguucuauuugucuuucucagugau

SEQ ID NO: 91097 - RNA, 32 nt, Homo Sapiens
gcaugcugcauaauuaauaauuuauauuuuca

SEQ ID NO: 91098 - RNA, 32 nt, Homo Sapiens
ugucagugagaucauuuacuuccccggcacgc

SEQ ID NO: 91099 - RNA, 32 nt, Homo Sapiens
ggacagagcuguaucugcauagagcuggucuc

SEQ ID NO: 91100 - RNA, 32 nt, Homo Sapiens
ggagcaguggggaaccgucggaugcuugaacu

SEQ ID NO: 91101 - RNA, 32 nt, Homo Sapiens
ugccuagugucuauuuuauuaaacaaacaaac

SEQ ID NO: 91102 - RNA, 32 nt, Homo Sapiens
uguguacccaccaugucccuggcgacaggaug

SEQ ID NO: 91103 - RNA, 32 nt, Homo Sapiens
caguauauggaaaaguugaagggaaaauacug

SEQ ID NO: 91104 - RNA, 32 nt, Homo Sapiens
cuuugauaauaauguuuuagauaaugucguaa

SEQ ID NO: 91105 - RNA, 32 nt, Homo Sapiens
aagccuguaucccagcacuuugggaggcagag

SEQ ID NO: 91106 - RNA, 32 nt, Homo Sapiens
ugcuggauaaagcuuuuuuauuuaccucaauc

SEQ ID NO: 91107 - RNA, 32 nt, Homo Sapiens
ggguugcucccucccauuuccugccaccagaa

SEQ ID NO: 91108 - RNA, 32 nt, Homo Sapiens
ccaggaucaugccacugcacuccagcuugggc

SEQ ID NO: 91109 - RNA, 32 nt, Homo Sapiens
ugcagaguguauuuuucuuccuccucaacuga

SEQ ID NO: 91110 - RNA, 32 nt, Homo Sapiens
aagccuucgagcgcgaacuugcuggcgcaaua

SEQ ID NO: 91111 - RNA, 32 nt, Homo Sapiens
cagggaugcagcaagccguaaggaaaaccaca

SEQ ID NO: 91112 - RNA, 32 nt, Homo Sapiens
gucuugaaugguuuucuggagagacagcauug

SEQ ID NO: 91113 - RNA, 32 nt, Homo Sapiens
gaggagagaggaauccacaggaccaccagaga

SEQ ID NO: 91114 - RNA, 32 nt, Homo Sapiens
ccagcauguccugaccugugcacggggauggg

SEQ ID NO: 91115 - RNA, 32 nt, Homo Sapiens
uggacagcugcucugcagauucuuauauaccu

SEQ ID NO: 91116 - RNA, 32 nt, Homo Sapiens
uucgcuuuugcuucucuuuggucuuuucgaau

SEQ ID NO: 91117 - RNA, 32 nt, Homo Sapiens
aauucaacauaaauacagcaagaaaauguguu

SEQ ID NO: 91118 - RNA, 32 nt, Homo Sapiens
ccgaugaucuuguaaugcccaacaguaucucc

SEQ ID NO: 91119 - RNA, 31 nt, Homo Sapiens
cuucuggccuccagagcugugagacgauaca

SEQ ID NO: 91120 - RNA, 32 nt, Homo Sapiens
uaguuuauuuaauauaucagucuuuuuccauu

SEQ ID NO: 91121 - RNA, 32 nt, Homo Sapiens
ugguagcuuuucccgaaaaaaucuucacagua

SEQ ID NO: 91122 - RNA, 32 nt, Homo Sapiens
cguucccacggaugggccccccuguccugcau

SEQ ID NO: 91123 - RNA, 32 nt, Homo Sapiens
gugacgcugcugcaccacgugcuggaggaagc

SEQ ID NO: 91124 - RNA, 32 nt, Homo Sapiens
caggacucugcacuccuccccccaccucccca

SEQ ID NO: 91125 - RNA, 32 nt, Homo Sapiens
uguaaauagagugauuugaaauacuauauggc

SEQ ID NO: 91126 - RNA, 32 nt, Homo Sapiens
ugguuuucauuccuuuuuguuuggcuuggcca

SEQ ID NO: 91127 - RNA, 32 nt, Homo Sapiens
uggcaggacuuccaucugugccauacuuguuc

SEQ ID NO: 91128 - RNA, 32 nt, Homo Sapiens
aaacggccgcuccucgcccgcgggaagaccag

SEQ ID NO: 91129 - RNA, 32 nt, Homo Sapiens
uaaauauaaugugucuauaaaauaaugagacu

SEQ ID NO: 91130 - RNA, 32 nt, Homo Sapiens
cuacuucacagcucacaggggcaggaggcagc

SEQ ID NO: 91131 - RNA, 32 nt, Homo Sapiens
guaaaauuccaaggauauaugccccaacgaau

SEQ ID NO: 91132 - RNA, 32 nt, Homo Sapiens
gcuagaaaugacucuuaauuugaauuuuggag

SEQ ID NO: 91133 - RNA, 32 nt, Homo Sapiens
ccuuccgccuggacucauuuucccuccgcccc

SEQ ID NO: 91134 - RNA, 32 nt, Homo Sapiens
cgcccuuguccccuccccuccuccccagccgc

SEQ ID NO: 91135 - RNA, 30 nt, Homo Sapiens
aaaguagagaagcugcucuguguggugguu

SEQ ID NO: 91136 - RNA, 32 nt, Homo Sapiens
ggcgugccugcggaugggcccgcuaaaggagu

SEQ ID NO: 91137 - RNA, 32 nt, Homo Sapiens
aauuagugcccaaagagcacaaacauuuuuca

SEQ ID NO: 91138 - RNA, 32 nt, Homo Sapiens
ggaaaucagaucuucuugcagaaggcccauuc

SEQ ID NO: 91139 - RNA, 32 nt, Homo Sapiens
auuuucuuacacccccuccccagcgugcccuc

SEQ ID NO: 91140 - RNA, 32 nt, Homo Sapiens
caaggaguccagagcaggagccaggccaggcg

SEQ ID NO: 91141 - RNA, 32 nt, Homo Sapiens
ccaugcccgccuuugaagcugaggcgcucuuu

SEQ ID NO: 91142 - RNA, 32 nt, Homo Sapiens
aggaagaggcggugcagaauggcgcacggguu

SEQ ID NO: 91143 - RNA, 32 nt, Homo Sapiens
caaacauguggcaaccuguucuuccuaccaaa

SEQ ID NO: 91144 - RNA, 32 nt, Homo Sapiens
cuggagcaaggaauaaccgagauggaaauaac

SEQ ID NO: 91145 - RNA, 32 nt, Homo Sapiens
uauggugcauuacgugggcauugucuuuuuag

SEQ ID NO: 91146 - RNA, 30 nt, Homo Sapiens
accaguuggccgcccaggccggcgccacca

SEQ ID NO: 91147 - RNA, 32 nt, Homo Sapiens
aaggguuggggaggaaagagacacaaacguau

SEQ ID NO: 91148 - RNA, 32 nt, Homo Sapiens
aacaggguuucuguuuaccaugucagcuucag

SEQ ID NO: 91149 - RNA, 32 nt, Homo Sapiens
ucaggcccaaguguggacacacugccgcccau

SEQ ID NO: 91150 - RNA, 32 nt, Homo Sapiens
cugcccucccguucugcccccaagacgaagga

SEQ ID NO: 91151 - RNA, 32 nt, Homo Sapiens
cauaugggcaaagggaaaaaaugauaaauccu

SEQ ID NO: 91152 - RNA, 32 nt, Homo Sapiens
caagucaugaauuuauacugauauuuucaauu

SEQ ID NO: 91153 - RNA, 32 nt, Homo Sapiens
cucaacacauaaauauuaagauaaaaauaaag

SEQ ID NO: 91154 - RNA, 32 nt, Homo Sapiens
agccaggcggguggagcccaugggagcaaggg

SEQ ID NO: 91155 - RNA, 32 nt, Homo Sapiens
agccccggcccggcgcccgcgggccauugucc

SEQ ID NO: 91156 - RNA, 32 nt, Homo Sapiens
acggaagggucucccaggcggcguaguagggc

SEQ ID NO: 91157 - RNA, 32 nt, Homo Sapiens
cuggagcccuuaaagcuuucuuugcagaucug

SEQ ID NO: 91158 - RNA, 32 nt, Homo Sapiens
caugugagggucaggaagggaggggagcaaga

SEQ ID NO: 91159 - RNA, 32 nt, Homo Sapiens
uuagugguaacauauaucaaggcuuugaauua

SEQ ID NO: 91160 - RNA, 32 nt, Homo Sapiens
acaucagccuccugccagcaguucuugaagcu

SEQ ID NO: 91161 - RNA, 32 nt, Homo Sapiens
ccaccgccugcagcagcaucuacuucaccaug

SEQ ID NO: 91162 - RNA, 32 nt, Homo Sapiens
cggguucucugccuauuuuaaaauagugaaua

SEQ ID NO: 91163 - RNA, 32 nt, Homo Sapiens
ugggagguggagguugcugugagcugagaucg

SEQ ID NO: 91164 - RNA, 32 nt, Homo Sapiens
ccucaggcccccagcccuguggcuuccaccuc

SEQ ID NO: 91165 - RNA, 31 nt, Homo Sapiens
ccccuaggcaacugucugccccgccccgcgc

SEQ ID NO: 91166 - RNA, 32 nt, Homo Sapiens
uuagucacagaaaagaaaagcagagucagcua

SEQ ID NO: 91167 - RNA, 32 nt, Homo Sapiens
uuuuuuuuuuuggaaucucaccacacgggugc

SEQ ID NO: 91168 - RNA, 32 nt, Homo Sapiens
uuauuagaauacaaucuagaaacauuuacuuu

SEQ ID NO: 91169 - RNA, 32 nt, Homo Sapiens
uagcaaucacuaugguuuaucuuuucaaagcu

SEQ ID NO: 91170 - RNA, 32 nt, Homo Sapiens
ccauccgcacccaaaugcaaucaaucaaccca

SEQ ID NO: 91171 - RNA, 32 nt, Homo Sapiens
cccgcaggcccugcaccgccgccgccaggcua

SEQ ID NO: 91172 - RNA, 31 nt, Homo Sapiens
gagcccugcacucucgugccccgcucaccag

SEQ ID NO: 91173 - RNA, 32 nt, Homo Sapiens
guaaguuuaccuauguaacaaaccugcacuua

SEQ ID NO: 91174 - RNA, 32 nt, Homo Sapiens
ggagcugcguucauaggcuggcacucucaauc

SEQ ID NO: 91175 - RNA, 32 nt, Homo Sapiens
aaaaauucacagauuauauuuauaaccugacu

SEQ ID NO: 91176 - RNA, 32 nt, Homo Sapiens
gugggggcggagaggauggagccuccgaggcg

SEQ ID NO: 91177 - RNA, 30 nt, Homo Sapiens
gaaggggguucccuguucccagagucugca

SEQ ID NO: 91178 - RNA, 32 nt, Homo Sapiens
agaguacacuuugaaaaucagauacaugucug

SEQ ID NO: 91179 - RNA, 32 nt, Homo Sapiens
aguauggacaaggccucugguucuccucacca

SEQ ID NO: 91180 - RNA, 30 nt, Homo Sapiens
gacaagaauauccauauaagauuuguuaac

SEQ ID NO: 91181 - RNA, 32 nt, Homo Sapiens
agaguggugucuggauauauuccuuuugucuu

SEQ ID NO: 91182 - RNA, 32 nt, Homo Sapiens
agaccgacggcacaacagacagcugcccaucc

SEQ ID NO: 91183 - RNA, 31 nt, Homo Sapiens
gcggggagggcggaucucccuggccagcagg

SEQ ID NO: 91184 - RNA, 32 nt, Homo Sapiens
aucagccggacauuuuaauuugaaccauguau

SEQ ID NO: 91185 - RNA, 32 nt, Homo Sapiens
gugugauccuuccccucccugucgcccacucc

SEQ ID NO: 91186 - RNA, 32 nt, Homo Sapiens
acaacguguccucacggugccuuuuuucacgg

SEQ ID NO: 91187 - RNA, 32 nt, Homo Sapiens
gaagggagcagguucacaguuuuucagaauac

SEQ ID NO: 91188 - RNA, 32 nt, Homo Sapiens
cuucaccuuugaccccagcagugggcaggugg

SEQ ID NO: 91189 - RNA, 32 nt, Homo Sapiens
uauuugcuaaauauuucuuuuuugagguggag

SEQ ID NO: 91190 - RNA, 32 nt, Homo Sapiens
acagggagggacagcgggaggugucgcgggga

SEQ ID NO: 91191 - RNA, 32 nt, Homo Sapiens
auaccugggguauccuaucuuguacaaaugca

SEQ ID NO: 91192 - RNA, 32 nt, Homo Sapiens
cagaaaaugcagagguaucaucuuucuuggaa

SEQ ID NO: 91193 - RNA, 32 nt, Homo Sapiens
cagggucucgcucuguugccaaggcuggagug

SEQ ID NO: 91194 - RNA, 32 nt, Homo Sapiens
ggagcgaaauuugaagcaagcggaggcggggc

SEQ ID NO: 91195 - RNA, 32 nt, Homo Sapiens
ccacaagguuccuggaggagggaagagaggac

SEQ ID NO: 91196 - RNA, 32 nt, Homo Sapiens
cuccaaaagacacugaugcaugcugaaguuag

SEQ ID NO: 91197 - RNA, 32 nt, Homo Sapiens
gggaccucuaacuccacacauccaccacccgg

SEQ ID NO: 91198 - RNA, 32 nt, Homo Sapiens
aggaaugaccucugggcugaaaacagcagcau

SEQ ID NO: 91199 - RNA, 32 nt, Homo Sapiens
uuccacuuccugugucaugaccucaggaaaua

SEQ ID NO: 91200 - RNA, 32 nt, Homo Sapiens
cuccugaccacuccccucccagcccugggucc

SEQ ID NO: 91201 - RNA, 32 nt, Homo Sapiens
gggaagugccagcaugaacgccuccaacuucg

SEQ ID NO: 91202 - RNA, 32 nt, Homo Sapiens
cuugccacaacacccccgggggcuucuauugc

SEQ ID NO: 91203 - RNA, 32 nt, Homo Sapiens
gacaccaacuucgccggugcugccuggcuggu

SEQ ID NO: 91204 - RNA, 32 nt, Homo Sapiens
auuuauauuucugaacucaguacauguuaaua

SEQ ID NO: 91205 - RNA, 32 nt, Homo Sapiens
acaacaggcaaaugcagaagcaguguggucuc

SEQ ID NO: 91206 - RNA, 32 nt, Homo Sapiens
auuuggccaaaauaaacaaaugcuggucuguc

SEQ ID NO: 91207 - RNA, 32 nt, Homo Sapiens
cgaaguccuggcuuuucucguuuucucacuug

SEQ ID NO: 91208 - RNA, 32 nt, Homo Sapiens
ucauuguauuucauugaaagugcuuaauuaaa

SEQ ID NO: 91209 - RNA, 32 nt, Homo Sapiens
cagaaccucacccugcccuccuccccagccug

SEQ ID NO: 91210 - RNA, 32 nt, Homo Sapiens
auuuuccuuuaauaaaauuugcuuguuuuaaa

SEQ ID NO: 91211 - RNA, 32 nt, Homo Sapiens
aauugagaucccuguuugugaaagagggaacu

SEQ ID NO: 91212 - RNA, 32 nt, Homo Sapiens
uugugccacugcucccagugcugcugcugacc

SEQ ID NO: 91213 - RNA, 32 nt, Homo Sapiens
ucgcggugcaacagggcggggaggcggccgca

SEQ ID NO: 91214 - RNA, 32 nt, Homo Sapiens
ccuuuccucaccaacuaacaugugccagccag

SEQ ID NO: 91215 - RNA, 32 nt, Homo Sapiens
agaguguaggaacugggaauugguuucauggu

SEQ ID NO: 91216 - RNA, 32 nt, Homo Sapiens
auuugcagaagagggggagauguacuuaccca

SEQ ID NO: 91217 - RNA, 32 nt, Homo Sapiens
ccagauagcugggauuggaagugaggagguuu

SEQ ID NO: 91218 - RNA, 32 nt, Homo Sapiens
gguuuacaggggugcucugugcagccccucug

SEQ ID NO: 91219 - RNA, 32 nt, Homo Sapiens
uccucuucucccagcccaucccuccggccccu

SEQ ID NO: 91220 - RNA, 32 nt, Homo Sapiens
ggguuuggaagacaccgccugccaucccgcgg

SEQ ID NO: 91221 - RNA, 32 nt, Homo Sapiens
guuaggguggggcagaaacaaaucacaauggu

SEQ ID NO: 91222 - RNA, 32 nt, Homo Sapiens
gcucaauaaacacuuguugaaccaucaaaaaa

SEQ ID NO: 91223 - RNA, 28 nt, Homo Sapiens
gggggcggcagcggugguagcagcuggu

SEQ ID NO: 91224 - RNA, 32 nt, Homo Sapiens
ccuuuugccucccaccaugauucugaggcuuu

SEQ ID NO: 91225 - RNA, 32 nt, Homo Sapiens
gucggucgcgagagcgggcucuguggaagggg

SEQ ID NO: 91226 - RNA, 32 nt, Homo Sapiens
ggaaaucagaggugucagcagacauaaaagac

SEQ ID NO: 91227 - RNA, 32 nt, Homo Sapiens
ccuucugaggggcggcuugauaccgguggagg

SEQ ID NO: 91228 - RNA, 32 nt, Homo Sapiens
uauucccacguguagcuagugucuagugucag

SEQ ID NO: 91229 - RNA, 32 nt, Homo Sapiens
aagauaaucuaucuugaauauuucauauguga

SEQ ID NO: 91230 - RNA, 32 nt, Homo Sapiens
gggaggggaaaggcugccgaggacccucccca

SEQ ID NO: 91231 - RNA, 32 nt, Homo Sapiens
uaccuuuaaugcaguuccagauggccugguau

SEQ ID NO: 91232 - RNA, 32 nt, Homo Sapiens
uacacagcaaaguuuuaauaaauguugguucc

SEQ ID NO: 91233 - RNA, 32 nt, Homo Sapiens
guuagcuaagcauacaaucagugucgaacguc

SEQ ID NO: 91234 - RNA, 32 nt, Homo Sapiens
gagccaccagagccuuccucucuuuguaccac

SEQ ID NO: 91235 - RNA, 27 nt, Homo Sapiens
ggcaaacuucucuucagccccauggau

SEQ ID NO: 91236 - RNA, 32 nt, Homo Sapiens
ucauaucagaucugagugccccacagagucac

SEQ ID NO: 91237 - RNA, 32 nt, Homo Sapiens
cauguauuagcuuggcuuauagcuuuagccuu

SEQ ID NO: 91238 - RNA, 32 nt, Homo Sapiens
ucccuuagugaagccaugcuuacuccaggaac

SEQ ID NO: 91239 - RNA, 32 nt, Homo Sapiens
guccugagcaccugcgaaagccgcccgcacuc

SEQ ID NO: 91240 - RNA, 32 nt, Homo Sapiens
gaagcuuuuuaaaaauuguaaaguaaaugaaa

SEQ ID NO: 91241 - RNA, 31 nt, Homo Sapiens
cagggcugcgcuuccuccagcagguaccagc

SEQ ID NO: 91242 - RNA, 32 nt, Homo Sapiens
cugaggcagaacucacugggggugggcaguua

SEQ ID NO: 91243 - RNA, 29 nt, Homo Sapiens
uugagggagaaguaaaaacuuauuuaaac

SEQ ID NO: 91244 - RNA, 32 nt, Homo Sapiens
uuuccgcgcgcccuuggcuucccacccuccuc

SEQ ID NO: 91245 - RNA, 32 nt, Homo Sapiens
cagaaugaauuuucuuguuucaggaugcucug

SEQ ID NO: 91246 - RNA, 32 nt, Homo Sapiens
acuuuaccaccugaaacugcugcuucaaguuc

SEQ ID NO: 91247 - RNA, 31 nt, Homo Sapiens
cugugcccugcgcccuugccccgcgccagcu

SEQ ID NO: 91248 - RNA, 32 nt, Homo Sapiens
ucagaaggauuugaaccgagcagccaaucuuu

SEQ ID NO: 91249 - RNA, 32 nt, Homo Sapiens
ggaggcuagcgaggaaggcuagugagggaagc

SEQ ID NO: 91250 - RNA, 32 nt, Homo Sapiens
ccaccagucaacaaaauacuuuuguuuuggcg

SEQ ID NO: 91251 - RNA, 32 nt, Homo Sapiens
cgcacccugaucucucuucucuaugccuaccu

SEQ ID NO: 91252 - RNA, 32 nt, Homo Sapiens
uuguuagucaucucgugacaaauggccaugug

SEQ ID NO: 91253 - RNA, 32 nt, Homo Sapiens
gcgcaaggccccagggguccucccucuuaacc

SEQ ID NO: 91254 - RNA, 32 nt, Homo Sapiens
uugggcucggagccccggcuccgccugcugug

SEQ ID NO: 91255 - RNA, 32 nt, Homo Sapiens
gggagggcacccgccccgccacgguuggagac

SEQ ID NO: 91256 - RNA, 32 nt, Homo Sapiens
ucccucagcagggcuaggugcacuacagccuc

SEQ ID NO: 91257 - RNA, 32 nt, Homo Sapiens
cuuguauuguggcugaagaaauuagaagcagg

SEQ ID NO: 91258 - RNA, 32 nt, Homo Sapiens
gcuguaucaguucuuaaaaucugcagagccug

SEQ ID NO: 91259 - RNA, 32 nt, Homo Sapiens
ccaugcuggucucgaacuccugggcucaagcg

SEQ ID NO: 91260 - RNA, 28 nt, Homo Sapiens
uggccugugugagccaggauggcugccu

SEQ ID NO: 91261 - RNA, 29 nt, Homo Sapiens
aaauaugaccaccccaggaaaagagaacu

SEQ ID NO: 91262 - RNA, 32 nt, Homo Sapiens
gugggaggguugcuuaaggcgaggaguuggag

SEQ ID NO: 91263 - RNA, 32 nt, Homo Sapiens
aacaguacgaucuuaagauugugaaaguggag

SEQ ID NO: 91264 - RNA, 32 nt, Homo Sapiens
gcggcgcucgguuucccgccuccuagggaagg

SEQ ID NO: 91265 - RNA, 32 nt, Homo Sapiens
acuagucccuugcuuuuuaaaugacugaauga

SEQ ID NO: 91266 - RNA, 32 nt, Homo Sapiens
uucaaagaaugagauacaauuuuuuaguuuuc

SEQ ID NO: 91267 - RNA, 32 nt, Homo Sapiens
cccggaggaugaugaagcucaagucgaaccag

SEQ ID NO: 91268 - RNA, 32 nt, Homo Sapiens
agaaaggacuuccaaaaggacuuuccagaaag

SEQ ID NO: 91269 - RNA, 32 nt, Homo Sapiens
cucuacucuggaagcccggcccacugcagagu

SEQ ID NO: 91270 - RNA, 32 nt, Homo Sapiens
uugggguuuuuuuuuucuuuuuuuuuuuuuua

SEQ ID NO: 91271 - RNA, 32 nt, Homo Sapiens
guaugaugcuuuacauuuaaaugagguuauuc

SEQ ID NO: 91272 - RNA, 32 nt, Homo Sapiens
cccgcccgcccugcugcagauacaugcggcac

SEQ ID NO: 91273 - RNA, 32 nt, Homo Sapiens
gugauccugucgucucggcuuccgcaagugcu

SEQ ID NO: 91274 - RNA, 32 nt, Homo Sapiens
ucuccugggcuggcccgggcugccccaggacc

SEQ ID NO: 91275 - RNA, 32 nt, Homo Sapiens
uacauggaaggaaguggaaccagaugcagaag

SEQ ID NO: 91276 - RNA, 32 nt, Homo Sapiens
auggacugcauuuuuuuuuuuaacacagucag

SEQ ID NO: 91277 - RNA, 32 nt, Homo Sapiens
accccguccccaucccccuccccucccccgac

SEQ ID NO: 91278 - RNA, 32 nt, Homo Sapiens
cuccaccuugcucgcccuccaguuguccaggc

SEQ ID NO: 91279 - RNA, 32 nt, Homo Sapiens
auuucagagcucuggagacaccuaguuugaaa

SEQ ID NO: 91280 - RNA, 32 nt, Homo Sapiens
uucugaccugaacaccuaccuccaaguccucc

SEQ ID NO: 91281 - RNA, 32 nt, Homo Sapiens
gugcgacaugcccuucccccagccccagcgcc

SEQ ID NO: 91282 - RNA, 32 nt, Homo Sapiens
uuccguuguacauguuccuguuuaugcauuca

SEQ ID NO: 91283 - RNA, 32 nt, Homo Sapiens
uaccgccuguacuuuuuugaaccauccagccu

SEQ ID NO: 91284 - RNA, 32 nt, Homo Sapiens
augcauguguucacugccuuguccuuucucuc

SEQ ID NO: 91285 - RNA, 32 nt, Homo Sapiens
uaaacugggugaagccacacacacccaaugaa

SEQ ID NO: 91286 - RNA, 32 nt, Homo Sapiens
cccugacuuuacccuuuccuccauuugcuuuc

SEQ ID NO: 91287 - RNA, 32 nt, Homo Sapiens
gcuuauuucuucaacauuccauccuuucccga

SEQ ID NO: 91288 - RNA, 32 nt, Homo Sapiens
uccaaggcugagucuccucccuaacggggaag

SEQ ID NO: 91289 - RNA, 32 nt, Homo Sapiens
gaccccaggaggagggagaggacagagccacu

SEQ ID NO: 91290 - RNA, 32 nt, Homo Sapiens
aaagucaucuucucuuuuuucuugcucagagu

SEQ ID NO: 91291 - RNA, 32 nt, Homo Sapiens
gugauauauaaaauaguugaugagaacuagac

SEQ ID NO: 91292 - RNA, 32 nt, Homo Sapiens
auaaaaagccggaggaugagggaaauaagaug

SEQ ID NO: 91293 - RNA, 32 nt, Homo Sapiens
gaaaauucuuagugugauacagcuuuacucuu

SEQ ID NO: 91294 - RNA, 32 nt, Homo Sapiens
ggcugcugcugggccuggacaccacgccgggc

SEQ ID NO: 91295 - RNA, 32 nt, Homo Sapiens
gggccaccgcagagccgagucggggcggcauc

SEQ ID NO: 91296 - RNA, 32 nt, Homo Sapiens
cuuuucauuucugaucaguuguacuucauccu

SEQ ID NO: 91297 - RNA, 32 nt, Homo Sapiens
ugauugauagaguguuaucagucauaacuaaa

SEQ ID NO: 91298 - RNA, 32 nt, Homo Sapiens
guagacauuauguaugucacuuaacauaaaca

SEQ ID NO: 91299 - RNA, 32 nt, Homo Sapiens
aucuaaaacaauucccuucuuuuucaucccag

SEQ ID NO: 91300 - RNA, 32 nt, Homo Sapiens
aaaauaagggaagccgaggcgagagagacgca

SEQ ID NO: 91301 - RNA, 32 nt, Homo Sapiens
cacuuugaaaauuuuuugagcaacuaguuguu

SEQ ID NO: 91302 - RNA, 32 nt, Homo Sapiens
uccugagcagugccagcuuucuucuguugaug

SEQ ID NO: 91303 - RNA, 32 nt, Homo Sapiens
uccuguaccccagacuugggauaaaggagcug

SEQ ID NO: 91304 - RNA, 32 nt, Homo Sapiens
aggcgcgcucguaggccggcgccgcagcaagg

SEQ ID NO: 91305 - RNA, 32 nt, Homo Sapiens
cucgccugggcgggcugggggauccucagcac

SEQ ID NO: 91306 - RNA, 32 nt, Homo Sapiens
ucccgggcgcgcccucggcuccagguccuacc

SEQ ID NO: 91307 - RNA, 32 nt, Homo Sapiens
guaugagacagaggggacuucagucuuuccag

SEQ ID NO: 91308 - RNA, 32 nt, Homo Sapiens
acauuccagaggucgcccagcuccggcgcuga

SEQ ID NO: 91309 - RNA, 32 nt, Homo Sapiens
agaauuaauuuucagccauguggaccauauuu

SEQ ID NO: 91310 - RNA, 32 nt, Homo Sapiens
caagaaauggggcuuuuuuacuaucccagauc

SEQ ID NO: 91311 - RNA, 32 nt, Homo Sapiens
ucaccuccugcccucaggaucccagagggccu

SEQ ID NO: 91312 - RNA, 32 nt, Homo Sapiens
ugguuggaagaaaaaauacuuggaaacaaaga

SEQ ID NO: 91313 - RNA, 32 nt, Homo Sapiens
agguagguagauagauagauagauagauagau

SEQ ID NO: 91314 - RNA, 32 nt, Homo Sapiens
uagauacaggauaagauagauacaggguaaaa

SEQ ID NO: 91315 - RNA, 32 nt, Homo Sapiens
aggagucaggacuuuugacuucaggccaguca

SEQ ID NO: 91316 - RNA, 31 nt, Homo Sapiens
gaaaugaggugugugcucagagccuggggug

SEQ ID NO: 91317 - RNA, 32 nt, Homo Sapiens
uccggcgcgugcauuucuuuuucagaagaugc

SEQ ID NO: 91318 - RNA, 32 nt, Homo Sapiens
ccuacuuccagaauaaagugauuaccaaggaa

SEQ ID NO: 91319 - RNA, 32 nt, Homo Sapiens
aggcgcaggcuccagcccggccugcaggccgu

SEQ ID NO: 91320 - RNA, 32 nt, Homo Sapiens
auuuuagacaccuucaucagcuccaagaacau

SEQ ID NO: 91321 - RNA, 28 nt, Homo Sapiens
ucccgggcccggccgccaggcgccucua

SEQ ID NO: 91322 - RNA, 32 nt, Homo Sapiens
uggcggcggcgguggccgcgaugauggagauc

SEQ ID NO: 91323 - RNA, 32 nt, Homo Sapiens
ucgccccggcgagcugcccccgacgcgagaug

SEQ ID NO: 91324 - RNA, 32 nt, Homo Sapiens
ugaacugaaaauaaacauggaucuagaaaccc

SEQ ID NO: 91325 - RNA, 32 nt, Homo Sapiens
uuuuuaaacuaauuuauauaaaaucuggaggc

SEQ ID NO: 91326 - RNA, 32 nt, Homo Sapiens
cuuuugugugugacucugcagcuccuggccag

SEQ ID NO: 91327 - RNA, 32 nt, Homo Sapiens
gaucuugcuguccuggccaacaucucacugca

SEQ ID NO: 91328 - RNA, 32 nt, Homo Sapiens
agcuugggaaggaaaagagcuaaucacaugga

SEQ ID NO: 91329 - RNA, 32 nt, Homo Sapiens
uggcacccuggcuucucacacaucucaucgug

SEQ ID NO: 91330 - RNA, 32 nt, Homo Sapiens
gcuguaacccaggcacaggaccucaagguggg

SEQ ID NO: 91331 - RNA, 32 nt, Homo Sapiens
gguggaggcgagccagauuaggccuggaguug

SEQ ID NO: 91332 - RNA, 32 nt, Homo Sapiens
cugaccagugaacauuuuggauguuuccgugu

SEQ ID NO: 91333 - RNA, 32 nt, Homo Sapiens
ugccacuagcuguccuugaggaccucgucuuu

SEQ ID NO: 91334 - RNA, 32 nt, Homo Sapiens
cgcccgcuguaauuauuuucuauuuuuguaaa

SEQ ID NO: 91335 - RNA, 32 nt, Homo Sapiens
ugguauguaccuguaguuccagcuacauagga

SEQ ID NO: 91336 - RNA, 32 nt, Homo Sapiens
aucugaaggggaucacccuuuaugguaaccag

SEQ ID NO: 91337 - RNA, 32 nt, Homo Sapiens
ucacaaccuuggcugagucuugagacugaaag

SEQ ID NO: 91338 - RNA, 32 nt, Homo Sapiens
gaccgaaaccaauguggguguuagaaaaauua

SEQ ID NO: 91339 - RNA, 32 nt, Homo Sapiens
ucuccuuccagggaagacccgugugaccgccu

SEQ ID NO: 91340 - RNA, 32 nt, Homo Sapiens
uuaaagugauuaaaugagaacauggaugagug

SEQ ID NO: 91341 - RNA, 32 nt, Homo Sapiens
ugucaugcagcucagcugggagcugcuuaggu

SEQ ID NO: 91342 - RNA, 32 nt, Homo Sapiens
aggaaaagggauacuuugauaauuaaggccag

SEQ ID NO: 91343 - RNA, 32 nt, Homo Sapiens
uccagcagguaaucccucuccuuccgcugggu

SEQ ID NO: 91344 - RNA, 32 nt, Homo Sapiens
guugaaagaucaagauuggcuccacgaaagug

SEQ ID NO: 91345 - RNA, 32 nt, Homo Sapiens
uugaacuggucccacacgcaccccaggcccca

SEQ ID NO: 91346 - RNA, 32 nt, Homo Sapiens
aggucaugaccacagcacaaccuagccuaugc

SEQ ID NO: 91347 - RNA, 32 nt, Homo Sapiens
gaaaccccgucuccacugaaaauagaaaaauu

SEQ ID NO: 91348 - RNA, 27 nt, Homo Sapiens
cuguucgcucuuuucagccccucgguc

SEQ ID NO: 91349 - RNA, 32 nt, Homo Sapiens
uacggcuuccuccgcagccaugucugacaaac

SEQ ID NO: 91350 - RNA, 32 nt, Homo Sapiens
cacuaauuguaucugagcacacauaggaaagu

SEQ ID NO: 91351 - RNA, 32 nt, Homo Sapiens
acagagcgagacuuauagauagauagauagau

SEQ ID NO: 91352 - RNA, 32 nt, Homo Sapiens
aaaagagauaaauuuuacaagaagguuuaaaa

SEQ ID NO: 91353 - RNA, 32 nt, Homo Sapiens
gcugaaauucagaauauuagugaccucagcuu

SEQ ID NO: 91354 - RNA, 32 nt, Homo Sapiens
cacucccggccgcccggacagggagcuuucgc

SEQ ID NO: 91355 - RNA, 32 nt, Homo Sapiens
cacaaugacaugcagaccugcauauuggagcu

SEQ ID NO: 91356 - RNA, 32 nt, Homo Sapiens
agugcuaccgcuacuucaccaguguccuuuuu

SEQ ID NO: 91357 - RNA, 32 nt, Homo Sapiens
uuuuucaugguguuuauuaaauaauuguguau

SEQ ID NO: 91358 - RNA, 32 nt, Homo Sapiens
caggccucaggcaggcggggcccaugguuggu

SEQ ID NO: 91359 - RNA, 32 nt, Homo Sapiens
ggugaggggcaucacccaggugaauggugucc

SEQ ID NO: 91360 - RNA, 32 nt, Homo Sapiens
ugauauuauggauccaauaaguaaauucaugg

SEQ ID NO: 91361 - RNA, 32 nt, Homo Sapiens
ccgccgagcucggcccgcguucagcgaggagc

SEQ ID NO: 91362 - RNA, 32 nt, Homo Sapiens
auccaggccaagaagaggaaaacuacccagga

SEQ ID NO: 91363 - RNA, 32 nt, Homo Sapiens
guguguaaauuuccuuuuuagcuuauacaaaa

SEQ ID NO: 91364 - RNA, 32 nt, Homo Sapiens
uaacaacuauaaauauucuuagcugucuagaa

SEQ ID NO: 91365 - RNA, 32 nt, Homo Sapiens
aaggggcggccgggcgcggccgagcugccauc

SEQ ID NO: 91366 - RNA, 32 nt, Homo Sapiens
uugguaaucuucauugacuuuucuuuaguuaa

SEQ ID NO: 91367 - RNA, 32 nt, Homo Sapiens
gcgaugccugagagggggucggaggacgcagu

SEQ ID NO: 91368 - RNA, 32 nt, Homo Sapiens
agaucuuugcuuccuugcuuuuauguuuguac

SEQ ID NO: 91369 - RNA, 32 nt, Homo Sapiens
uuagggagagucauauuuugauuauuguauuu

SEQ ID NO: 91370 - RNA, 32 nt, Homo Sapiens
uuaugcucuaaugcugcuuaucggagaacaga

SEQ ID NO: 91371 - RNA, 32 nt, Homo Sapiens
cuguaaugagagaguugagauggggcccaaag

SEQ ID NO: 91372 - RNA, 32 nt, Homo Sapiens
ggcugcucucgaacuccugaccucaggugauc

SEQ ID NO: 91373 - RNA, 32 nt, Homo Sapiens
gcagauacucaugcggauacccauuggaauga

SEQ ID NO: 91374 - RNA, 32 nt, Homo Sapiens
cucaggacugggcucucuggccugcuggggcu

SEQ ID NO: 91375 - RNA, 32 nt, Homo Sapiens
auuaaauguaguaugugaauguucuauguaaa

SEQ ID NO: 91376 - RNA, 32 nt, Homo Sapiens
ccuccagcacgcugccaggcggugguguucag

SEQ ID NO: 91377 - RNA, 32 nt, Homo Sapiens
gucgggcgccgcgcucuuccggcagcgguacg

SEQ ID NO: 91378 - RNA, 32 nt, Homo Sapiens
ggcagggugacccccugaacuccagauguuug

SEQ ID NO: 91379 - RNA, 32 nt, Homo Sapiens
gaggagaggagaagugcugagguugauguuac

SEQ ID NO: 91380 - RNA, 32 nt, Homo Sapiens
uuccauguaaauacucuuucugcuacugaaau

SEQ ID NO: 91381 - RNA, 32 nt, Homo Sapiens
cagccaaauugcuucucaacccuagacaaagc

SEQ ID NO: 91382 - RNA, 32 nt, Homo Sapiens
cccgcccugccacccacaagugucucaccucc

SEQ ID NO: 91383 - RNA, 30 nt, Homo Sapiens
ccuucuuaaagcggcggcgggaagaugagg

SEQ ID NO: 91384 - RNA, 32 nt, Homo Sapiens
auaagagggggguuccugggggcuuccagccc

SEQ ID NO: 91385 - RNA, 30 nt, Homo Sapiens
gaacagcucuagaugggggaugccccuggc

SEQ ID NO: 91386 - RNA, 32 nt, Homo Sapiens
gcaauggauggcuuuguugaccaaaagaagaa

SEQ ID NO: 91387 - RNA, 32 nt, Homo Sapiens
aaugcaguaaaugugaaagagccuucagugcc

SEQ ID NO: 91388 - RNA, 32 nt, Homo Sapiens
gugaaaauccuccugucucuggcagcacuguc

SEQ ID NO: 91389 - RNA, 32 nt, Homo Sapiens
ugcucuuacaaggauccgaagaaauggaauca

SEQ ID NO: 91390 - RNA, 32 nt, Homo Sapiens
aaugcuuugaaauucuaaugguaucugaaaua

SEQ ID NO: 91391 - RNA, 32 nt, Homo Sapiens
uuaucacuucccucacugcccuacccaggcuu

SEQ ID NO: 91392 - RNA, 32 nt, Homo Sapiens
gccuccaccuucagacuaucaggcaccugggg

SEQ ID NO: 91393 - RNA, 32 nt, Homo Sapiens
caguacugcggccuccucuccucuccuaaccu

SEQ ID NO: 91394 - RNA, 32 nt, Homo Sapiens
ccuccaaagugugaagacaaguaaaacaaugu

SEQ ID NO: 91395 - RNA, 32 nt, Homo Sapiens
gggccucggaggcuccucccucugccucaucc

SEQ ID NO: 91396 - RNA, 32 nt, Homo Sapiens
uugacugcugggaagaccuuugaaauuuuaua

SEQ ID NO: 91397 - RNA, 32 nt, Homo Sapiens
ugguggaggaagggcugggccaccagggauca

SEQ ID NO: 91398 - RNA, 32 nt, Homo Sapiens
gccugggaauccagacaagacccuggguuuug

SEQ ID NO: 91399 - RNA, 29 nt, Homo Sapiens
uuaagugugacuuucucucugucucaugu

SEQ ID NO: 91400 - RNA, 32 nt, Homo Sapiens
aaaaaugaaacugugaccgauuuuaaggacag

SEQ ID NO: 91401 - RNA, 32 nt, Homo Sapiens
aggagcaaagggugcacugccggcgccugucu

SEQ ID NO: 91402 - RNA, 32 nt, Homo Sapiens
aaucuuagaaucaaccccacggaaugaagagg

SEQ ID NO: 91403 - RNA, 32 nt, Homo Sapiens
agguccccagggacacacagccaggcaaggag

SEQ ID NO: 91404 - RNA, 32 nt, Homo Sapiens
agcugagauugugccacugcacuucagcuugg

SEQ ID NO: 91405 - RNA, 32 nt, Homo Sapiens
gcagaauccacauccuuucgguggcagggcca

SEQ ID NO: 91406 - RNA, 32 nt, Homo Sapiens
cagcaccugccagggcccgaccuggggcugag

SEQ ID NO: 91407 - RNA, 32 nt, Homo Sapiens
caaagcucaggagagacacagacuuggggcuu

SEQ ID NO: 91408 - RNA, 32 nt, Homo Sapiens
aucucucccagaagacaaacuacuucagugag

SEQ ID NO: 91409 - RNA, 32 nt, Homo Sapiens
cugucagagaggaggaaagcaggcauuugauu

SEQ ID NO: 91410 - RNA, 32 nt, Homo Sapiens
gagaguauauauaugcacauugauuuuuaaug

SEQ ID NO: 91411 - RNA, 32 nt, Homo Sapiens
gcggcacccguggcagcccuggcggacgcagg

SEQ ID NO: 91412 - RNA, 32 nt, Homo Sapiens
uucuggaagggacuuuagagaauaccaguguu

SEQ ID NO: 91413 - RNA, 32 nt, Homo Sapiens
ccaaauuuuuguauuucuuuaaucaauguguu

SEQ ID NO: 91414 - RNA, 32 nt, Homo Sapiens
agugugccaagaguucgauguuggcguuuccg

SEQ ID NO: 91415 - RNA, 32 nt, Homo Sapiens
ugaaacagacugucgcuugauuuuaaaaaaua

SEQ ID NO: 91416 - RNA, 32 nt, Homo Sapiens
acugcauuuauacauuuaauuguuauuuuguu

SEQ ID NO: 91417 - RNA, 32 nt, Homo Sapiens
uaccccuucuaaagauacuacgcggacuuccu

SEQ ID NO: 91418 - RNA, 32 nt, Homo Sapiens
cgcgcucaaguacaccagggugcgagaugcca

SEQ ID NO: 91419 - RNA, 32 nt, Homo Sapiens
gacucugggcauggcuggggccccuggacggc

SEQ ID NO: 91420 - RNA, 28 nt, Homo Sapiens
ucugaggugagucccaggauguuucguc

SEQ ID NO: 91421 - RNA, 32 nt, Homo Sapiens
gagcaagggagguagucgggucgagggaaccu

SEQ ID NO: 91422 - RNA, 32 nt, Homo Sapiens
ugcccugcacuacauagcacagccgggaugcu

SEQ ID NO: 91423 - RNA, 32 nt, Homo Sapiens
uaguuauauuuaaugguuauuuucaucaccag

SEQ ID NO: 91424 - RNA, 32 nt, Homo Sapiens
aggaauuguuuuuauggaggcuuugcauagau

SEQ ID NO: 91425 - RNA, 32 nt, Homo Sapiens
cuccaagcacaccggccauaagagugcgugug

SEQ ID NO: 91426 - RNA, 32 nt, Homo Sapiens
ccugaagccaagggggcaggguuugggagugg

SEQ ID NO: 91427 - RNA, 32 nt, Homo Sapiens
aaaaugugauuuacuugucaaauagauccuga

SEQ ID NO: 91428 - RNA, 32 nt, Homo Sapiens
caauguauuaaaccugugauuagguuguuuuc

SEQ ID NO: 91429 - RNA, 29 nt, Homo Sapiens
uuguauauauguauauacugggacauuuu

SEQ ID NO: 91430 - RNA, 32 nt, Homo Sapiens
uauuagccgggcguaauggcgggcgccuguau

SEQ ID NO: 91431 - RNA, 32 nt, Homo Sapiens
auguguuuuacuuuuuguuuuuuaucaucuuu

SEQ ID NO: 91432 - RNA, 32 nt, Homo Sapiens
cgcccgcucauggcccgggccgccgcggacga

SEQ ID NO: 91433 - RNA, 32 nt, Homo Sapiens
cagcacugcccaucuguaaaaucuuguaaagc

SEQ ID NO: 91434 - RNA, 32 nt, Homo Sapiens
aguccuggaucuuucuuccuucuggaaaucuu

SEQ ID NO: 91435 - RNA, 32 nt, Homo Sapiens
gccccuggccccagcacccuguccgcugccgc

SEQ ID NO: 91436 - RNA, 32 nt, Homo Sapiens
caaucucaguuuuuauuaaccaccucuucugu

SEQ ID NO: 91437 - RNA, 32 nt, Homo Sapiens
ggagagacacagacuuggggcuuuuguuucuu

SEQ ID NO: 91438 - RNA, 32 nt, Homo Sapiens
cuccuacccaaguuaaguguucaaaggggaug

SEQ ID NO: 91439 - RNA, 32 nt, Homo Sapiens
cuugugcauauacauaguacuuugaauaaugu

SEQ ID NO: 91440 - RNA, 32 nt, Homo Sapiens
guauagcuaggaaguguuacuaucuugauuug

SEQ ID NO: 91441 - RNA, 32 nt, Homo Sapiens
caugcgguagaugcccaccuccuccaugccuc

SEQ ID NO: 91442 - RNA, 32 nt, Homo Sapiens
acagaaauugggugagccaaucugcaauuucu

SEQ ID NO: 91443 - RNA, 32 nt, Homo Sapiens
gucgaagaaacaaaaaauaauagcaaaaaaua

SEQ ID NO: 91444 - RNA, 30 nt, Homo Sapiens
gccuguagucccagcuauucuggaggcuga

SEQ ID NO: 91445 - RNA, 32 nt, Homo Sapiens
acguguuucuucaugacagcugcucaaagcag

SEQ ID NO: 91446 - RNA, 32 nt, Homo Sapiens
uguugauguuuccuucuuaauuuauaggauuu

SEQ ID NO: 91447 - RNA, 32 nt, Homo Sapiens
gccccgcccggcugcuccauggcgcugugcga

SEQ ID NO: 91448 - RNA, 32 nt, Homo Sapiens
guguugaugaaacuuuugaucaaaaccacauu

SEQ ID NO: 91449 - RNA, 32 nt, Homo Sapiens
agccaggguugaucuggccccgaggguuuugg

SEQ ID NO: 91450 - RNA, 32 nt, Homo Sapiens
cgcgcggcgcgguggccucggucgguacccug

SEQ ID NO: 91451 - RNA, 32 nt, Homo Sapiens
gccaacaacgaagggacggauuuuaaaacagc

SEQ ID NO: 91452 - RNA, 32 nt, Homo Sapiens
cgcgggcuguggcgggggcugcggucaaggcc

SEQ ID NO: 91453 - RNA, 32 nt, Homo Sapiens
aaagcagcaacuauucacaaaauaucaccaaa

SEQ ID NO: 91454 - RNA, 30 nt, Homo Sapiens
uaccccagagcuuccaugcaaaggaauucu

SEQ ID NO: 91455 - RNA, 32 nt, Homo Sapiens
aauguugcagcuuuuagcugaaacaaaaauuc

SEQ ID NO: 91456 - RNA, 32 nt, Homo Sapiens
cugcaaacgcggugggggcugcucggcgguca

SEQ ID NO: 91457 - RNA, 32 nt, Homo Sapiens
uggccggagcagcguuuucuuaugguggagca

SEQ ID NO: 91458 - RNA, 32 nt, Homo Sapiens
gccgcagcuccagcgccgcgcagcagccgccg

SEQ ID NO: 91459 - RNA, 32 nt, Homo Sapiens
gguguuggacaagcuucugagacgucaugagg

SEQ ID NO: 91460 - RNA, 32 nt, Homo Sapiens
auccagaggaagagccaggagugugggaaggc

SEQ ID NO: 91461 - RNA, 32 nt, Homo Sapiens
ucagaagcugucuagccauucccaggagggua

SEQ ID NO: 91462 - RNA, 32 nt, Homo Sapiens
gcggacccgcgugccccaggccucgcgcugcc

SEQ ID NO: 91463 - RNA, 32 nt, Homo Sapiens
gaagcugaguuccauuacuggugauugaagua

SEQ ID NO: 91464 - RNA, 32 nt, Homo Sapiens
gcgccuggccuggccuggcugaggggaggcgg

SEQ ID NO: 91465 - RNA, 32 nt, Homo Sapiens
cgaacgaaguggucccuaaagcuccucugcag

SEQ ID NO: 91466 - RNA, 32 nt, Homo Sapiens
cagauaaccaaaaaucauuuuaaaagauauca

SEQ ID NO: 91467 - RNA, 32 nt, Homo Sapiens
cucaguacuucuuuccuuuuuaucacugaaaa

SEQ ID NO: 91468 - RNA, 32 nt, Homo Sapiens
uaauauccaaaaaguuaguuuaaggucaaaag

SEQ ID NO: 91469 - RNA, 26 nt, Homo Sapiens
uauguggcgccuggugcccccgaagc

SEQ ID NO: 91470 - RNA, 32 nt, Homo Sapiens
ccgcugggacccccaggacgacguguaccugg

SEQ ID NO: 91471 - RNA, 32 nt, Homo Sapiens
ugcacgcaccuggccuccauggacgagcaagg

SEQ ID NO: 91472 - RNA, 32 nt, Homo Sapiens
uucuuccucccuccccgaagcccagacaguuc

SEQ ID NO: 91473 - RNA, 32 nt, Homo Sapiens
caaagggugcuacguacaugugaggcaucauu

SEQ ID NO: 91474 - RNA, 30 nt, Homo Sapiens
uuacgggagggggaucacgcagagggacag

SEQ ID NO: 91475 - RNA, 32 nt, Homo Sapiens
guagcggccccggcuagagaguuggccuguuc

SEQ ID NO: 91476 - RNA, 31 nt, Homo Sapiens
cccgcgaugcuggcgcugcgcugcggcuccc

SEQ ID NO: 91477 - RNA, 32 nt, Homo Sapiens
ggugcauucagcuucuccauggagagggcuca

SEQ ID NO: 91478 - RNA, 32 nt, Homo Sapiens
gcuggccugacugucccaggggcacaggcucc

SEQ ID NO: 91479 - RNA, 32 nt, Homo Sapiens
cugggacccccuccccacugccugcacagagg

SEQ ID NO: 91480 - RNA, 32 nt, Homo Sapiens
uuuuuuaaaaauuuagcuggguguggugguac

SEQ ID NO: 91481 - RNA, 32 nt, Homo Sapiens
aaaaaacauuuuacagauuuuaugguacuaau

SEQ ID NO: 91482 - RNA, 32 nt, Homo Sapiens
aggacuacuguaacuaugacaucaaugguagg

SEQ ID NO: 91483 - RNA, 29 nt, Homo Sapiens
gugaauguguguauguaugaaggccacau

SEQ ID NO: 91484 - RNA, 32 nt, Homo Sapiens
aaaggucagagguaaagaagucauggcggcgc

SEQ ID NO: 91485 - RNA, 31 nt, Homo Sapiens
ucaugccaagccagcaccugggccuggaacc

SEQ ID NO: 91486 - RNA, 32 nt, Homo Sapiens
guuugggggguucaggauagggaauggggagg

SEQ ID NO: 91487 - RNA, 32 nt, Homo Sapiens
aaguguuuucugugucccacugucuugaagcu

SEQ ID NO: 91488 - RNA, 32 nt, Homo Sapiens
gucagcuuggggagccacuuggccagccugca

SEQ ID NO: 91489 - RNA, 32 nt, Homo Sapiens
auuuacuuucccuuuuucuaucaccuuauguc

SEQ ID NO: 91490 - RNA, 32 nt, Homo Sapiens
auauuuucaugugaguaaaauaaggaaggaac

SEQ ID NO: 91491 - RNA, 32 nt, Homo Sapiens
acuguuguauaaauuuauuuacugcuagucuu

SEQ ID NO: 91492 - RNA, 32 nt, Homo Sapiens
cucuguaccuuccacuuaacccuaauugagcc

SEQ ID NO: 91493 - RNA, 32 nt, Homo Sapiens
aguggaggacaaaggagggccucacugugugg

SEQ ID NO: 91494 - RNA, 27 nt, Homo Sapiens
agacagccccccuucagcccagcccag

SEQ ID NO: 91495 - RNA, 32 nt, Homo Sapiens
gaggcgagccaccuuggguugcuggagcucac

SEQ ID NO: 91496 - RNA, 32 nt, Homo Sapiens
gcuagaccuuggugcugauccaaauauuaccg

SEQ ID NO: 91497 - RNA, 32 nt, Homo Sapiens
ggcuuuccacccggccugcugcuugcugucgc

SEQ ID NO: 91498 - RNA, 32 nt, Homo Sapiens
guucagagccucuuuccagguuccucgcccca

SEQ ID NO: 91499 - RNA, 32 nt, Homo Sapiens
acuuuguauccucuccuuuuagaggcuuugca

SEQ ID NO: 91500 - RNA, 32 nt, Homo Sapiens
auguauauauuuuucaaggucuguuuuucuaa

SEQ ID NO: 91501 - RNA, 32 nt, Homo Sapiens
gccgcuacaccguggcucgccucgcugcgacu

SEQ ID NO: 91502 - RNA, 32 nt, Homo Sapiens
cuucgccauuuuguuucacccuugcuugcccc

SEQ ID NO: 91503 - RNA, 32 nt, Homo Sapiens
uuuuuaaacaaggacucuucagguagacggcu

SEQ ID NO: 91504 - RNA, 32 nt, Homo Sapiens
ugggaaggcuccuggaguugaccuggagcgcc

SEQ ID NO: 91505 - RNA, 32 nt, Homo Sapiens
agugggguuaucuauuugauucaugaugcuua

SEQ ID NO: 91506 - RNA, 32 nt, Homo Sapiens
uaaugcuauuuaaaggcuugaauuuuucccuu

SEQ ID NO: 91507 - RNA, 32 nt, Homo Sapiens
ccaaagcauggccuuaccagcuugucugcacu

SEQ ID NO: 91508 - RNA, 32 nt, Homo Sapiens
gcccaggcccuagacccucccccaccauucca

SEQ ID NO: 91509 - RNA, 32 nt, Homo Sapiens
cgaacccccgguucuccaugaucccgcuggcc

SEQ ID NO: 91510 - RNA, 31 nt, Homo Sapiens
uaagucaaauaaaauccacagauauuaaacg

SEQ ID NO: 91511 - RNA, 32 nt, Homo Sapiens
ggccuggcccagagcccucccagcucaucacu

SEQ ID NO: 91512 - RNA, 32 nt, Homo Sapiens
gcccccuggcgcccagcuggccgcccuguugc

SEQ ID NO: 91513 - RNA, 32 nt, Homo Sapiens
uggucucgaacuccugaucugaagugaucugc

SEQ ID NO: 91514 - RNA, 32 nt, Homo Sapiens
agagcugaugggagcagcuggugccuggccuu

SEQ ID NO: 91515 - RNA, 32 nt, Homo Sapiens
auguauguauauauaauauauauagaaaucug

SEQ ID NO: 91516 - RNA, 32 nt, Homo Sapiens
uccuuaccgagacccgcccggcccggcggugc

SEQ ID NO: 91517 - RNA, 30 nt, Homo Sapiens
ggggagggcaggcgcagguggaccccggcg

SEQ ID NO: 91518 - RNA, 32 nt, Homo Sapiens
aucacuuuggauguuuacuuugaaaagcagaa

SEQ ID NO: 91519 - RNA, 32 nt, Homo Sapiens
aucuuuacaaaugacuugaccuuaauguuaua

SEQ ID NO: 91520 - RNA, 32 nt, Homo Sapiens
aagauuuguaaaugguaaagcacuauauucuu

SEQ ID NO: 91521 - RNA, 32 nt, Homo Sapiens
gugaagauuuuuaaacugacuaacuuaaaaaa

SEQ ID NO: 91522 - RNA, 32 nt, Homo Sapiens
ugugugccauuaaaacagagauuccucagaaa

SEQ ID NO: 91523 - RNA, 32 nt, Homo Sapiens
ucucaccgccccacgcaggaucccggccuggu

SEQ ID NO: 91524 - RNA, 32 nt, Homo Sapiens
gacguuugucaccuccuuucccauuggguuuu

SEQ ID NO: 91525 - RNA, 32 nt, Homo Sapiens
uuccuuguuugguuuucguaguaaaucuuacu

SEQ ID NO: 91526 - RNA, 31 nt, Homo Sapiens
gagagcuugcagccccugccccgggccuguc

SEQ ID NO: 91527 - RNA, 32 nt, Homo Sapiens
gaggagacguccagcucuguccucucuuccuc

SEQ ID NO: 91528 - RNA, 32 nt, Homo Sapiens
ccccaguccacuuuuuuugcagcccagauuca

SEQ ID NO: 91529 - RNA, 32 nt, Homo Sapiens
gacgacucuguaagauucucugcuacuuauuc

SEQ ID NO: 91530 - RNA, 32 nt, Homo Sapiens
auuuuguuaaguucagccauuauuacuuuugg

SEQ ID NO: 91531 - RNA, 25 nt, Homo Sapiens
augaacgacaccguaacuauccgca

SEQ ID NO: 91532 - RNA, 32 nt, Homo Sapiens
agccugcggcgcccucacccguccuccagcug

SEQ ID NO: 91533 - RNA, 32 nt, Homo Sapiens
ugguugccuuuuauuuguuuccucuucuaaaa

SEQ ID NO: 91534 - RNA, 32 nt, Homo Sapiens
ggccgugggcucggcccggaccuggcauccgg

SEQ ID NO: 91535 - RNA, 32 nt, Homo Sapiens
uuaauggcguuuuguuuuuuuauauucuauuu

SEQ ID NO: 91536 - RNA, 32 nt, Homo Sapiens
uauuauacguguccuccuggggguuggagaug

SEQ ID NO: 91537 - RNA, 32 nt, Homo Sapiens
uguaacaagaagcgaguugccaaacuaccugu

SEQ ID NO: 91538 - RNA, 32 nt, Homo Sapiens
ugaaagugcuuaauuaaaauggcuugagaacu

SEQ ID NO: 91539 - RNA, 32 nt, Homo Sapiens
gcggcccggcgccugagcgccuccguuccccg

SEQ ID NO: 91540 - RNA, 32 nt, Homo Sapiens
cugaauuccagaacaaaagaauuuuguaauuu

SEQ ID NO: 91541 - RNA, 32 nt, Homo Sapiens
acuuuugaaucuuaauauuuugaaagucuuaa

SEQ ID NO: 91542 - RNA, 31 nt, Homo Sapiens
gcaggguaccggucggaggagucccguaguc

SEQ ID NO: 91543 - RNA, 32 nt, Homo Sapiens
uauuaccuugguauaucauacuggucuuguug

SEQ ID NO: 91544 - RNA, 31 nt, Homo Sapiens
cuuuugaaauaaaguauuuaucuccugucua

SEQ ID NO: 91545 - RNA, 32 nt, Homo Sapiens
aaguauuuguguaccuggauuaaugaacuaug

SEQ ID NO: 91546 - RNA, 32 nt, Homo Sapiens
aagccuuccuuccauuguuuuucuuccguuca

SEQ ID NO: 91547 - RNA, 32 nt, Homo Sapiens
uucauaggauaagucaauaccuuaaugguggu

SEQ ID NO: 91548 - RNA, 32 nt, Homo Sapiens
gccagcccugguucuccauccccauguguuuc

SEQ ID NO: 91549 - RNA, 32 nt, Homo Sapiens
gggugagcaggggcuuccaggcugcaugaggc

SEQ ID NO: 91550 - RNA, 32 nt, Homo Sapiens
aggccuuuuacauggaaauuuuacaaauuacu

SEQ ID NO: 91551 - RNA, 32 nt, Homo Sapiens
aaaauguugaauggaauaauaaugagaaacug

SEQ ID NO: 91552 - RNA, 31 nt, Homo Sapiens
ccucaagugaucugccugccccgaccuccca

SEQ ID NO: 91553 - RNA, 32 nt, Homo Sapiens
acuguauggugcccucuccaaagggucgggag

SEQ ID NO: 91554 - RNA, 32 nt, Homo Sapiens
uacacuaaggcacaaugcuguagaucaguugg

SEQ ID NO: 91555 - RNA, 32 nt, Homo Sapiens
gaucccuagcaagauuauugcauuccagauuu

SEQ ID NO: 91556 - RNA, 32 nt, Homo Sapiens
guagacuuuuaaaauaaacuguuuucuuuugg

SEQ ID NO: 91557 - RNA, 32 nt, Homo Sapiens
gguaaguguucaagucuuucugaucaccccaa

SEQ ID NO: 91558 - RNA, 32 nt, Homo Sapiens
ccaccccggcgcccgcgccaugcggcgggaga

SEQ ID NO: 91559 - RNA, 32 nt, Homo Sapiens
uuguauguauaaauuggcauuaggauacaaau

SEQ ID NO: 91560 - RNA, 32 nt, Homo Sapiens
cccauaacugguuuuaacacuaacuagaggga

SEQ ID NO: 91561 - RNA, 32 nt, Homo Sapiens
auuuuuuauuuuauuuuccuuauuauuuagug

SEQ ID NO: 91562 - RNA, 32 nt, Homo Sapiens
aaagugaguugaugaaaauauuugcaaaaaag

SEQ ID NO: 91563 - RNA, 32 nt, Homo Sapiens
ccuaguucagugcaagugauuaugagagguga

SEQ ID NO: 91564 - RNA, 32 nt, Homo Sapiens
gcgggucguggugcaccacgggagcgccgcac

SEQ ID NO: 91565 - RNA, 32 nt, Homo Sapiens
agacuuuuuuuauuuuaaccaaaguuacuguu

SEQ ID NO: 91566 - RNA, 32 nt, Homo Sapiens
aauggagucaggugcuggaggccguggcagcg

SEQ ID NO: 91567 - RNA, 32 nt, Homo Sapiens
ugcucccgagaccccgcacagggcuccaaaag

SEQ ID NO: 91568 - RNA, 32 nt, Homo Sapiens
augugaagaaaggaaguuuuguagcuaaaaua

SEQ ID NO: 91569 - RNA, 32 nt, Homo Sapiens
gcuaccagcccacaggcauuuagucuacguug

SEQ ID NO: 91570 - RNA, 32 nt, Homo Sapiens
gcaccucccuccccuggggccgccaccccuuc

SEQ ID NO: 91571 - RNA, 32 nt, Homo Sapiens
acgagagaugacugcagauguaaucgagcuua

SEQ ID NO: 91572 - RNA, 32 nt, Homo Sapiens
cuuugcuccuggaugccccacuccaggaauca

SEQ ID NO: 91573 - RNA, 32 nt, Homo Sapiens
ugauguagcguagaaauaggugccuucguccc

SEQ ID NO: 91574 - RNA, 32 nt, Homo Sapiens
ccucggagacugaguuccacaacuuuuuuagu

SEQ ID NO: 91575 - RNA, 32 nt, Homo Sapiens
gccccgcccuggcccaccggccccacucccug

SEQ ID NO: 91576 - RNA, 31 nt, Homo Sapiens
cuggaggcucugccuuucccaagggcccugg

SEQ ID NO: 91577 - RNA, 32 nt, Homo Sapiens
uguuaguuaguagguagacuuagaucccauuu

SEQ ID NO: 91578 - RNA, 32 nt, Homo Sapiens
agccagcugcaucucgugggaccuccaagcuc

SEQ ID NO: 91579 - RNA, 32 nt, Homo Sapiens
uugaguuuuuaaaacugugguuaaauguuuua

SEQ ID NO: 91580 - RNA, 32 nt, Homo Sapiens
ggugaagaggggcuagcucucuguccccucgu

SEQ ID NO: 91581 - RNA, 32 nt, Homo Sapiens
cugggggccgugucccuguccaggccucagag

SEQ ID NO: 91582 - RNA, 32 nt, Homo Sapiens
caccuguagguaaauuuacuuuagucauauuu

SEQ ID NO: 91583 - RNA, 32 nt, Homo Sapiens
uccucucagaucuaugcacacuugaggaaauc

SEQ ID NO: 91584 - RNA, 32 nt, Homo Sapiens
agccucuguugaccaggaaccuuacugauaau

SEQ ID NO: 91585 - RNA, 32 nt, Homo Sapiens
ucgauuauauuguaggggacugggggcggccg

SEQ ID NO: 91586 - RNA, 32 nt, Homo Sapiens
acagaccaaaaauaucuccugagaucauuggu

SEQ ID NO: 91587 - RNA, 32 nt, Homo Sapiens
auauagaagaaauggacaaauuccugggcaca

SEQ ID NO: 91588 - RNA, 32 nt, Homo Sapiens
aaauugugagguucuaucagguuuguaaucac

SEQ ID NO: 91589 - RNA, 32 nt, Homo Sapiens
agcuccucaaagcagcagcaugucaccucccc

SEQ ID NO: 91590 - RNA, 32 nt, Homo Sapiens
gcugcagggccgcgagaugccgagcgguggcc

SEQ ID NO: 91591 - RNA, 32 nt, Homo Sapiens
aauugaguaccuguagcaaaacagcuguaauu

SEQ ID NO: 91592 - RNA, 32 nt, Homo Sapiens
uacuagggccgaaguaaaaaaccaucaccucc

SEQ ID NO: 91593 - RNA, 32 nt, Homo Sapiens
uuggagguccuccauaaugucagauaauauug

SEQ ID NO: 91594 - RNA, 32 nt, Homo Sapiens
ugcacugucuuacuauucaagguaagaggaua

SEQ ID NO: 91595 - RNA, 32 nt, Homo Sapiens
ugaagagguccuucacaucccuuguaaguugg

SEQ ID NO: 91596 - RNA, 32 nt, Homo Sapiens
aggguuggccccagggacccugggacgaggcu

SEQ ID NO: 91597 - RNA, 32 nt, Homo Sapiens
auucauuuuagaugaauuguuuuguuucacaa

SEQ ID NO: 91598 - RNA, 32 nt, Homo Sapiens
ccucuuaaagauuguggucgcuggccaggcgc

SEQ ID NO: 91599 - RNA, 32 nt, Homo Sapiens
uggauucucacuaggugggaucaugaguuugc

SEQ ID NO: 91600 - RNA, 32 nt, Homo Sapiens
auauggaagaguucaugugccuggacacacag

SEQ ID NO: 91601 - RNA, 32 nt, Homo Sapiens
caaagaaaaguagaauucgaaaacuuuuuaaa

SEQ ID NO: 91602 - RNA, 32 nt, Homo Sapiens
auguaauaauacugaugauucuagguuugccc

SEQ ID NO: 91603 - RNA, 32 nt, Homo Sapiens
gucucugguguuggggagggcccguguguuug

SEQ ID NO: 91604 - RNA, 32 nt, Homo Sapiens
cugugggccccuuagcaaugucuuaggaaagg

SEQ ID NO: 91605 - RNA, 32 nt, Homo Sapiens
cacccucaggccugggccccagagcucagggc

SEQ ID NO: 91606 - RNA, 31 nt, Homo Sapiens
uuuucucuucacugccugccagguuguguug

SEQ ID NO: 91607 - RNA, 32 nt, Homo Sapiens
ccucuuccaacauuuuucaggcuucuaaacua

SEQ ID NO: 91608 - RNA, 32 nt, Homo Sapiens
uuaaaagauaccagaguuacaaugcaauacua

SEQ ID NO: 91609 - RNA, 32 nt, Homo Sapiens
agggguccgggaaggcgccguccgugcgcugg

SEQ ID NO: 91610 - RNA, 32 nt, Homo Sapiens
ugcagccaacuggugcuuuggccuuugcgcug

SEQ ID NO: 91611 - RNA, 32 nt, Homo Sapiens
guuccaggcagagggaacagcauguacaaagg

SEQ ID NO: 91612 - RNA, 32 nt, Homo Sapiens
guaagcaccagcugccucuuugcugcuuuguu

SEQ ID NO: 91613 - RNA, 32 nt, Homo Sapiens
guggggcacugaccuugaaaguggcaaaaugg

SEQ ID NO: 91614 - RNA, 32 nt, Homo Sapiens
uccuguuauaugcauacaguugcuguucaguc

SEQ ID NO: 91615 - RNA, 32 nt, Homo Sapiens
gaaugaaguucugaaauaucuaaagcaguuua

SEQ ID NO: 91616 - RNA, 32 nt, Homo Sapiens
uauuuacuuguacaccacaugcaguuuacauc

SEQ ID NO: 91617 - RNA, 31 nt, Homo Sapiens
gauuguccggcgccacuuccccgcgcugccc

SEQ ID NO: 91618 - RNA, 32 nt, Homo Sapiens
uauaacgauauuuggauuugaccugcauuuug

SEQ ID NO: 91619 - RNA, 32 nt, Homo Sapiens
auacuuuucuuacuauagucucuuguuugucu

SEQ ID NO: 91620 - RNA, 32 nt, Homo Sapiens
ggccaguucccucuccaauguccggugccauc

SEQ ID NO: 91621 - RNA, 32 nt, Homo Sapiens
augcggagucacauuucaaugguacgaaaagu

SEQ ID NO: 91622 - RNA, 32 nt, Homo Sapiens
ugccaggggcuucauucagggugucugugcuc

SEQ ID NO: 91623 - RNA, 32 nt, Homo Sapiens
ccuuauuaccacgaaccucacccaccguggac

SEQ ID NO: 91624 - RNA, 32 nt, Homo Sapiens
agaggggcgggagcugaggcgggagcggacag

SEQ ID NO: 91625 - RNA, 32 nt, Homo Sapiens
aaaaccugacugcaaaucaugucaguguagua

SEQ ID NO: 91626 - RNA, 32 nt, Homo Sapiens
gccuccacagcuccccgccugcaggggcaaag

SEQ ID NO: 91627 - RNA, 32 nt, Homo Sapiens
gccaagaagaggaaacaagauaauaaauguac

SEQ ID NO: 91628 - RNA, 32 nt, Homo Sapiens
auacaaaagacaugauagagaaaagaugagag

SEQ ID NO: 91629 - RNA, 31 nt, Homo Sapiens
cuuaagaaauaaauccacccauguuaucaaa

SEQ ID NO: 91630 - RNA, 32 nt, Homo Sapiens
uuugcuaaaaaauuauuucuagaguuguguua

SEQ ID NO: 91631 - RNA, 32 nt, Homo Sapiens
ccuugagcuuucuucucgcccaggcuuccaac

SEQ ID NO: 91632 - RNA, 32 nt, Homo Sapiens
agccguggcggccgccggggaccgcaaggggc

SEQ ID NO: 91633 - RNA, 32 nt, Homo Sapiens
cccgggccacugacgcccggcgcgcucucccc

SEQ ID NO: 91634 - RNA, 32 nt, Homo Sapiens
gaagagaauggaccaguaauuucucagucccc

SEQ ID NO: 91635 - RNA, 32 nt, Homo Sapiens
agcaugaccaacauggagaaaccccgucucua

SEQ ID NO: 91636 - RNA, 32 nt, Homo Sapiens
acgccuuccgcggaaugaagcggcccaugccc

SEQ ID NO: 91637 - RNA, 32 nt, Homo Sapiens
cuucgcucuugcugccuuaaccccgccggugg

SEQ ID NO: 91638 - RNA, 32 nt, Homo Sapiens
uacaugcugguuuaaauucagaaggaaauaga

SEQ ID NO: 91639 - RNA, 31 nt, Homo Sapiens
auuuuuaaaaagaaaagauauuggaugcucc

SEQ ID NO: 91640 - RNA, 32 nt, Homo Sapiens
aacuggagaagacuccacgcccuuccagcuuu

SEQ ID NO: 91641 - RNA, 32 nt, Homo Sapiens
uccuugcuccuuagccaggucuccagguccuc

SEQ ID NO: 91642 - RNA, 32 nt, Homo Sapiens
ccuccuuggcauuacugccccagccgcuuuuu

SEQ ID NO: 91643 - RNA, 32 nt, Homo Sapiens
ggagggagggggcuauagcuacaggaagcacc

SEQ ID NO: 91644 - RNA, 32 nt, Homo Sapiens
gggccggggucggguuguggucgggccgggau

SEQ ID NO: 91645 - RNA, 32 nt, Homo Sapiens
cggaaauuacgaagaucagcuaugaaggccug

SEQ ID NO: 91646 - RNA, 31 nt, Homo Sapiens
uuaggauacauaguauagguauauuacaaca

SEQ ID NO: 91647 - RNA, 32 nt, Homo Sapiens
augauuugugcuugagugaacaaaagaagacu

SEQ ID NO: 91648 - RNA, 32 nt, Homo Sapiens
cucccuccggggcuccucccauuuaucccagu

SEQ ID NO: 91649 - RNA, 32 nt, Homo Sapiens
uuuuuaaagagauaguacuuuuuucaguuagu

SEQ ID NO: 91650 - RNA, 32 nt, Homo Sapiens
gccuguagugaccggcagggcuggggugagac

SEQ ID NO: 91651 - RNA, 32 nt, Homo Sapiens
cagaaaacagaaaaucaaagacaagaaacaga

SEQ ID NO: 91652 - RNA, 32 nt, Homo Sapiens
gggcagucgcgggaugcgcccgggagccacag

SEQ ID NO: 91653 - RNA, 32 nt, Homo Sapiens
cccggcacagagggguuaagggggcggugcag

SEQ ID NO: 91654 - RNA, 32 nt, Homo Sapiens
auuuguaaaucauauuugauaaaagucuugua

SEQ ID NO: 91655 - RNA, 32 nt, Homo Sapiens
cuuucucuuucaggagccucgaccacaccucu

SEQ ID NO: 91656 - RNA, 32 nt, Homo Sapiens
aaguguuuuaucuucugcucuuucuucuucca

SEQ ID NO: 91657 - RNA, 32 nt, Homo Sapiens
uagauacauaucuauagauauauauguguaug

SEQ ID NO: 91658 - RNA, 32 nt, Homo Sapiens
ccagagucuuugggcccagaucuuuaaaccuu

SEQ ID NO: 91659 - RNA, 32 nt, Homo Sapiens
ggugcuagacaguggaaacauaaaaauccaac

SEQ ID NO: 91660 - RNA, 32 nt, Homo Sapiens
uuuguucuauagaucaauuacaugucacaggg

SEQ ID NO: 91661 - RNA, 32 nt, Homo Sapiens
aggucuugugcccagcgcccccgggaaggcgg

SEQ ID NO: 91662 - RNA, 32 nt, Homo Sapiens
cacagcuuagcaugaaucuucuuuauuguccu

SEQ ID NO: 91663 - RNA, 32 nt, Homo Sapiens
uccacuucagccaaaaaugaacaaagaaauga

SEQ ID NO: 91664 - RNA, 32 nt, Homo Sapiens
ccauacagaacaaaugagaaauuagaagcaau

SEQ ID NO: 91665 - RNA, 32 nt, Homo Sapiens
aaugaaugagugaaugaaucaacgaaggagug

SEQ ID NO: 91666 - RNA, 32 nt, Homo Sapiens
acagacagguugaacuuggccucugagugcau

SEQ ID NO: 91667 - RNA, 32 nt, Homo Sapiens
aaaaauaugcuaccauuaugcauugcaacagc

SEQ ID NO: 91668 - RNA, 32 nt, Homo Sapiens
uggaugucaaguucaagggucuaagaggaggu

SEQ ID NO: 91669 - RNA, 30 nt, Homo Sapiens
gggguccucaaagccgccggagcaaccccc

SEQ ID NO: 91670 - RNA, 32 nt, Homo Sapiens
augugccuuuugguuacaugcauuaaaucuaa

SEQ ID NO: 91671 - RNA, 32 nt, Homo Sapiens
uuccugaugccaaagaauaugaaaauauuuaa

SEQ ID NO: 91672 - RNA, 32 nt, Homo Sapiens
cauuggcccucccuucucccagcccccagagg

SEQ ID NO: 91673 - RNA, 32 nt, Homo Sapiens
gacuguggguuuguggggggaggcugacuccu

SEQ ID NO: 91674 - RNA, 32 nt, Homo Sapiens
caauaucagaaagcugcugaagagguggaagc

SEQ ID NO: 91675 - RNA, 32 nt, Homo Sapiens
cgggagaagaaccgaggcagcaaguuguuuaa

SEQ ID NO: 91676 - RNA, 32 nt, Homo Sapiens
caauugacuccaacuuccuaccucugacagcc

SEQ ID NO: 91677 - RNA, 32 nt, Homo Sapiens
cggaccggucggggcgggggucgggcgguaga

SEQ ID NO: 91678 - RNA, 32 nt, Homo Sapiens
aaagacuuuugaacaugaaaugauuaguauua

SEQ ID NO: 91679 - RNA, 32 nt, Homo Sapiens
ccacucugguggggcugcucucgaucucuccc

SEQ ID NO: 91680 - RNA, 32 nt, Homo Sapiens
gugggagaauccaaauaguauuuuugugggga

SEQ ID NO: 91681 - RNA, 32 nt, Homo Sapiens
gaacaagccaugguggcggcgacgguggcagc

SEQ ID NO: 91682 - RNA, 32 nt, Homo Sapiens
ggcauucacaagaugcagaacaaaauggauaa

SEQ ID NO: 91683 - RNA, 32 nt, Homo Sapiens
gcaucuuauuuaguucuggggugagggucuag

SEQ ID NO: 91684 - RNA, 32 nt, Homo Sapiens
gggucacacacaggaaccgagaccuggcuucc

SEQ ID NO: 91685 - RNA, 32 nt, Homo Sapiens
cacaugauggggaacaacacacacuggggccu

SEQ ID NO: 91686 - RNA, 32 nt, Homo Sapiens
gaucgcuugagcucaggaguucaagaccagcc

SEQ ID NO: 91687 - RNA, 32 nt, Homo Sapiens
gcugagcuuuccagaacaggcagagcucuaga

SEQ ID NO: 91688 - RNA, 32 nt, Homo Sapiens
ucccugccccagcucugcugcccgcccuuccu

SEQ ID NO: 91689 - RNA, 32 nt, Homo Sapiens
gcugccccaagcccagggaugccuggaguccc

SEQ ID NO: 91690 - RNA, 32 nt, Homo Sapiens
cuucggauacgccccuccccagccaguccuga

SEQ ID NO: 91691 - RNA, 32 nt, Homo Sapiens
cugcccgccugggccucccaaagugcugggau

SEQ ID NO: 91692 - RNA, 32 nt, Homo Sapiens
aaaaggggacaaaggagaagggcugagcccac

SEQ ID NO: 91693 - RNA, 32 nt, Homo Sapiens
agagcggccgagcggcucgaggcugggggacc

SEQ ID NO: 91694 - RNA, 32 nt, Homo Sapiens
cuuucuacuuccacaggugcagcccucccaau

SEQ ID NO: 91695 - RNA, 32 nt, Homo Sapiens
cccugccccaucuggugcuuacauucugaaua

SEQ ID NO: 91696 - RNA, 32 nt, Homo Sapiens
cuacuccucacacugcucuacugcucagaaac

SEQ ID NO: 91697 - RNA, 32 nt, Homo Sapiens
augacuuuuaacuuucucugucucucuuccuc

SEQ ID NO: 91698 - RNA, 32 nt, Homo Sapiens
aaauagcacuugacucugccugugauaucugu

SEQ ID NO: 91699 - RNA, 32 nt, Homo Sapiens
aagccgucgccgcccccgccucggggccgagu

SEQ ID NO: 91700 - RNA, 32 nt, Homo Sapiens
ccggcggcggcggagagccguccucggccgag

SEQ ID NO: 91701 - RNA, 32 nt, Homo Sapiens
gcaaauacaaaccuuuauacuaauggauuaag

SEQ ID NO: 91702 - RNA, 32 nt, Homo Sapiens
ccacacguagacaaauguguacggugcacaca

SEQ ID NO: 91703 - RNA, 32 nt, Homo Sapiens
ggcucgggcagagcagcuccgcuggcgcaggc

SEQ ID NO: 91704 - RNA, 32 nt, Homo Sapiens
cauucuuaauuucaaagcuuuauucugucugc

SEQ ID NO: 91705 - RNA, 32 nt, Homo Sapiens
gucagugaaggccuauaugaaugugcacaugu

SEQ ID NO: 91706 - RNA, 32 nt, Homo Sapiens
acucuucuuacagaacuuaaaacaaguuuuaa

SEQ ID NO: 91707 - RNA, 32 nt, Homo Sapiens
guugucaguucacauagcaauuuaaucaagua

SEQ ID NO: 91708 - RNA, 32 nt, Homo Sapiens
ucuguacauauuuuuguaccuuuuauguaaau

SEQ ID NO: 91709 - RNA, 32 nt, Homo Sapiens
agccccugggcaggagacguggcugcugaaca

SEQ ID NO: 91710 - RNA, 32 nt, Homo Sapiens
cuuuuuguucaagauaaagugauuuuuugccu

SEQ ID NO: 91711 - RNA, 32 nt, Homo Sapiens
uacuacuccaugaagggccgggggcucgagau

SEQ ID NO: 91712 - RNA, 32 nt, Homo Sapiens
uccagaaauacuccaugugaucuuuauccccc

SEQ ID NO: 91713 - RNA, 32 nt, Homo Sapiens
cuggaaacaaaacaauaauagagccacagcca

SEQ ID NO: 91714 - RNA, 32 nt, Homo Sapiens
guguggcccuguagagagcugcccugagugag

SEQ ID NO: 91715 - RNA, 32 nt, Homo Sapiens
auguaccccgagaaaugaccgaccugaugcgu

SEQ ID NO: 91716 - RNA, 32 nt, Homo Sapiens
aggacuggcuuauguugauaguuuuuggauuu

SEQ ID NO: 91717 - RNA, 32 nt, Homo Sapiens
guggugccuggagccuguguccugcccugcua

SEQ ID NO: 91718 - RNA, 32 nt, Homo Sapiens
aaacaaugacuggaacaaaacagcagccaucc

SEQ ID NO: 91719 - RNA, 32 nt, Homo Sapiens
ucagaucagaaagaggccucccucgugaguug

SEQ ID NO: 91720 - RNA, 32 nt, Homo Sapiens
acaaggacuggacccuccuucuccagaaggcc

SEQ ID NO: 91721 - RNA, 32 nt, Homo Sapiens
acugcugucucauagaugggauuuguacucuu

SEQ ID NO: 91722 - RNA, 32 nt, Homo Sapiens
cggacgcggcccggaggcgcggggucccgaug

SEQ ID NO: 91723 - RNA, 32 nt, Homo Sapiens
uaacacccaaaauagcaucuaucuagacagua

SEQ ID NO: 91724 - RNA, 32 nt, Homo Sapiens
ccucgcguucccucggacgguugcccaauggc

SEQ ID NO: 91725 - RNA, 32 nt, Homo Sapiens
cgguuuccucccccauccccuugacucucccc

SEQ ID NO: 91726 - RNA, 32 nt, Homo Sapiens
aggcgaggauguggacuuucgucacccagcug

SEQ ID NO: 91727 - RNA, 32 nt, Homo Sapiens
cuguacagcggcucagccugcucugugagagg

SEQ ID NO: 91728 - RNA, 32 nt, Homo Sapiens
gauaggaaccuucuuggagaccccuuugaaga

SEQ ID NO: 91729 - RNA, 32 nt, Homo Sapiens
gucuauuuuuauuuugauguuuuaccuuugua

SEQ ID NO: 91730 - RNA, 32 nt, Homo Sapiens
uucuucagaagacccaugugggacaccuccaa

SEQ ID NO: 91731 - RNA, 32 nt, Homo Sapiens
auaauggauauuuuuuaacuuggcgagaugug

SEQ ID NO: 91732 - RNA, 32 nt, Homo Sapiens
cuuuccuguuuugccuggaccacuuaaagcca

SEQ ID NO: 91733 - RNA, 32 nt, Homo Sapiens
ccucugcagaacuaauuauguugauuuuguuc

SEQ ID NO: 91734 - RNA, 32 nt, Homo Sapiens
uuuguaugcucauaguuuaaauuuuuguagga

SEQ ID NO: 91735 - RNA, 32 nt, Homo Sapiens
agauacuuauugggcauuuacuguaugccaag

SEQ ID NO: 91736 - RNA, 32 nt, Homo Sapiens
ccagccgcgggccucgcuccgugcucggcuac

SEQ ID NO: 91737 - RNA, 32 nt, Homo Sapiens
ggcaugucggcaucagaggaaaugugacgaca

SEQ ID NO: 91738 - RNA, 32 nt, Homo Sapiens
guuguugaugauacaaaaauaauuucauuuaa

SEQ ID NO: 91739 - RNA, 32 nt, Homo Sapiens
gggcugggacauaaguuuuucugcuuucagac

SEQ ID NO: 91740 - RNA, 32 nt, Homo Sapiens
gaacucccaaguggacagggccaggcauggac

SEQ ID NO: 91741 - RNA, 32 nt, Homo Sapiens
aaaguauuuuauucuugcuuuuccaugcuucu

SEQ ID NO: 91742 - RNA, 32 nt, Homo Sapiens
agaagugccucuggucccacuacaccugcgca

SEQ ID NO: 91743 - RNA, 32 nt, Homo Sapiens
cagccacccagcugugucccuuuccccagaaa

SEQ ID NO: 91744 - RNA, 32 nt, Homo Sapiens
agcucucuuccacaggaggccuacaugccgcc

SEQ ID NO: 91745 - RNA, 32 nt, Homo Sapiens
cucaggucaggagaggcagaguugagguucug

SEQ ID NO: 91746 - RNA, 32 nt, Homo Sapiens
uaacuuaaacacaacuuuuacauaucaagaca

SEQ ID NO: 91747 - RNA, 32 nt, Homo Sapiens
gcagcugucugcuucagaaagugagggcucca

SEQ ID NO: 91748 - RNA, 31 nt, Homo Sapiens
cggcggccaagcagccaaccaugcucaacuu

SEQ ID NO: 91749 - RNA, 31 nt, Homo Sapiens
acaagcuauuugacuuuggaugucaugugac

SEQ ID NO: 91750 - RNA, 32 nt, Homo Sapiens
aauagaugaggcaugccugggaaaugcucccu

SEQ ID NO: 91751 - RNA, 32 nt, Homo Sapiens
ucagugcguggggggcgcagggcccccucgug

SEQ ID NO: 91752 - RNA, 32 nt, Homo Sapiens
aaugaagcauauauaauugucaauuuuuucaa

SEQ ID NO: 91753 - RNA, 32 nt, Homo Sapiens
cuauaaugucuuccucaacagcuccaagcuag

SEQ ID NO: 91754 - RNA, 32 nt, Homo Sapiens
aaauucagcucuucacuccagcaugcacaugc

SEQ ID NO: 91755 - RNA, 32 nt, Homo Sapiens
acuaucauaugauaaauaaguuccuccuuauu

SEQ ID NO: 91756 - RNA, 32 nt, Homo Sapiens
agugcucgguuagcccacggugccaaaacucc

SEQ ID NO: 91757 - RNA, 32 nt, Homo Sapiens
ugguauuuagauuugcagaacccuuuauaaug

SEQ ID NO: 91758 - RNA, 32 nt, Homo Sapiens
uccacuuuucacagucuucucauguuuuguau

SEQ ID NO: 91759 - RNA, 32 nt, Homo Sapiens
uauauaucuuucucuuuuuuuuuuuuuugaag

SEQ ID NO: 91760 - RNA, 32 nt, Homo Sapiens
auaguugagguaugugucugcuauuugcaaag

SEQ ID NO: 91761 - RNA, 32 nt, Homo Sapiens
aaauguauugacuguguuuucuucuuagaaaa

SEQ ID NO: 91762 - RNA, 32 nt, Homo Sapiens
uuaaauuguuuuauuuuauuuuucuuuuaaua

SEQ ID NO: 91763 - RNA, 32 nt, Homo Sapiens
caugcugggcucgggggcgaugggcuugugcg

SEQ ID NO: 91764 - RNA, 32 nt, Homo Sapiens
acauucuuucccuucagggauccaaaaugguu

SEQ ID NO: 91765 - RNA, 32 nt, Homo Sapiens
ugggcuuuaacuuccugggauucauaauuuuu

SEQ ID NO: 91766 - RNA, 32 nt, Homo Sapiens
gugaccuggacaggggagagaaugggagagga

SEQ ID NO: 91767 - RNA, 32 nt, Homo Sapiens
gaucagagauaaacuauuaaaacuuuaaaaaa

SEQ ID NO: 91768 - RNA, 32 nt, Homo Sapiens
aaaucaagauuuaauuuuuuuauuuguacuga

SEQ ID NO: 91769 - RNA, 32 nt, Homo Sapiens
uuauuuggugcugaaagagaccaucuaccucc

SEQ ID NO: 91770 - RNA, 32 nt, Homo Sapiens
gcuggagugacaugggaggggaggcggaucug

SEQ ID NO: 91771 - RNA, 32 nt, Homo Sapiens
gaugagccaccucagccacgugagccaugcca

SEQ ID NO: 91772 - RNA, 32 nt, Homo Sapiens
cucagacccacccaagggcagggauucccaaa

SEQ ID NO: 91773 - RNA, 32 nt, Homo Sapiens
aguuuuguugcugucuucuguaaugauacagu

SEQ ID NO: 91774 - RNA, 32 nt, Homo Sapiens
aaaucagccugauuuuaacauuuuacauauua

SEQ ID NO: 91775 - RNA, 32 nt, Homo Sapiens
caauuuuagcaaauaugggaaccucagcaaug

SEQ ID NO: 91776 - RNA, 32 nt, Homo Sapiens
ucgguucccuccccgauggucuaccucgaagg

SEQ ID NO: 91777 - RNA, 32 nt, Homo Sapiens
augucacaucauguaaauuugcuucuaacauc

SEQ ID NO: 91778 - RNA, 32 nt, Homo Sapiens
ugcugugauuccguuuguaucuguaaauauuu

SEQ ID NO: 91779 - RNA, 32 nt, Homo Sapiens
uuguauuuuuaacuuaauggaaguauugauuc

SEQ ID NO: 91780 - RNA, 32 nt, Homo Sapiens
gcccgagcuagauagacacagcccuuggcgga

SEQ ID NO: 91781 - RNA, 32 nt, Homo Sapiens
uagaaggugaaaacuuuuuuggcucucauuuc

SEQ ID NO: 91782 - RNA, 28 nt, Homo Sapiens
gccauggagauggagagcgcggcggccu

SEQ ID NO: 91783 - RNA, 32 nt, Homo Sapiens
auacuccccucccagggugucugguggcaggc

SEQ ID NO: 91784 - RNA, 27 nt, Homo Sapiens
cugaguucugcugacagcccccgccca

SEQ ID NO: 91785 - RNA, 32 nt, Homo Sapiens
gaucgccagcgcagccucgcccugcccagaca

SEQ ID NO: 91786 - RNA, 32 nt, Homo Sapiens
gcgcgccccucgcuauggcggcgcccucgcgg

SEQ ID NO: 91787 - RNA, 32 nt, Homo Sapiens
caggacagaaucaugaauaaacuggaggauaa

SEQ ID NO: 91788 - RNA, 32 nt, Homo Sapiens
aaguaggcgccgccggccguccgccuccccca

SEQ ID NO: 91789 - RNA, 32 nt, Homo Sapiens
ugcucccugacaaccacagccauuucucugca

SEQ ID NO: 91790 - RNA, 32 nt, Homo Sapiens
gacuagaauuuucaaucaauguguuugaaaau

SEQ ID NO: 91791 - RNA, 32 nt, Homo Sapiens
agagcagaacuugcagcagagaugagcuuuuc

SEQ ID NO: 91792 - RNA, 32 nt, Homo Sapiens
aagguugcugagcagagcgggaagcugcaccu

SEQ ID NO: 91793 - RNA, 30 nt, Homo Sapiens
uaauagccauuugccaccccaagugguaug

SEQ ID NO: 91794 - RNA, 32 nt, Homo Sapiens
guggaauaaaacaaaaaugaauguacuuuaaa

SEQ ID NO: 91795 - RNA, 32 nt, Homo Sapiens
caucuccgcccggcugcccgcggccucaccuc

SEQ ID NO: 91796 - RNA, 32 nt, Homo Sapiens
gcauagguagagccucuuguuccuaggcauga

SEQ ID NO: 91797 - RNA, 32 nt, Homo Sapiens
caggcccucaucaccuuuuuucaagucaagau

SEQ ID NO: 91798 - RNA, 32 nt, Homo Sapiens
auccagaaauaguggacagaggucuggcaugu

SEQ ID NO: 91799 - RNA, 32 nt, Homo Sapiens
uggccaaaaucugcaaguaaucucuagccaca

SEQ ID NO: 91800 - RNA, 32 nt, Homo Sapiens
uaaguucuuucugcuugcugcuaagaguuugc

SEQ ID NO: 91801 - RNA, 32 nt, Homo Sapiens
auaaagaucacaccaauuuagaaugaauauua

SEQ ID NO: 91802 - RNA, 32 nt, Homo Sapiens
gcauaacgacccccaaguuuagccauguuguu

SEQ ID NO: 91803 - RNA, 32 nt, Homo Sapiens
aaauguuugugauauuuugcuuuugcaccuuu

SEQ ID NO: 91804 - RNA, 32 nt, Homo Sapiens
guacaggagcccaccagcaggauuuuugaaua

SEQ ID NO: 91805 - RNA, 32 nt, Homo Sapiens
uccauuucaaggacuaaaaugguuuugcauua

SEQ ID NO: 91806 - RNA, 30 nt, Homo Sapiens
gagucacccaaugcugcagaaucucagccu

SEQ ID NO: 91807 - RNA, 32 nt, Homo Sapiens
aaaaacuaaauaaaaaucauuuuuauuuuuua

SEQ ID NO: 91808 - RNA, 32 nt, Homo Sapiens
cggcuccauccuccuuuccccaucccuacccc

SEQ ID NO: 91809 - RNA, 32 nt, Homo Sapiens
ccuugccugcugagcuggcccgcgucauuguc

SEQ ID NO: 91810 - RNA, 32 nt, Homo Sapiens
cagauuacugaauauaauacauuauuuaaaau

SEQ ID NO: 91811 - RNA, 32 nt, Homo Sapiens
aaucacauuuaucuccuggagcauaaagaguu

SEQ ID NO: 91812 - RNA, 32 nt, Homo Sapiens
cggcacgaggauguggucaacucaguggucuu

SEQ ID NO: 91813 - RNA, 32 nt, Homo Sapiens
gcauuuguauauuuagauuuuuugguuaagcu

SEQ ID NO: 91814 - RNA, 32 nt, Homo Sapiens
caagcaguucuuccccaucagccucccaagua

SEQ ID NO: 91815 - RNA, 32 nt, Homo Sapiens
ucugcagguguagcuucggugcucuccuguuc

SEQ ID NO: 91816 - RNA, 31 nt, Homo Sapiens
cgcagcucgcgccccacgccccgcgcccaug

SEQ ID NO: 91817 - RNA, 32 nt, Homo Sapiens
cugcacugggaggccaauggcuccucauccug

SEQ ID NO: 91818 - RNA, 32 nt, Homo Sapiens
aaucuuuggcugcugcagcuagccgcuucuug

SEQ ID NO: 91819 - RNA, 32 nt, Homo Sapiens
ccaaacaagauuguuguaaaucauauuuuuua

SEQ ID NO: 91820 - RNA, 32 nt, Homo Sapiens
cuggucuguggugcauguguguccuugugaug

SEQ ID NO: 91821 - RNA, 31 nt, Homo Sapiens
gagaagacaaauuguaaaguagauauuugua

SEQ ID NO: 91822 - RNA, 32 nt, Homo Sapiens
uccccugagagccaugcagggcgucugcagcc

SEQ ID NO: 91823 - RNA, 32 nt, Homo Sapiens
gcauuguuucuuguaagauaucuugcauguau

SEQ ID NO: 91824 - RNA, 32 nt, Homo Sapiens
ccucgcugauuagcuuccugccugcugucagu

SEQ ID NO: 91825 - RNA, 32 nt, Homo Sapiens
cccacccugccagcugggggcaauggggcagg

SEQ ID NO: 91826 - RNA, 32 nt, Homo Sapiens
cgagcgaccgacgcgccacccgccgacgccuc

SEQ ID NO: 91827 - RNA, 32 nt, Homo Sapiens
ccgauccagagagcuuccugaaggaccuguug

SEQ ID NO: 91828 - RNA, 32 nt, Homo Sapiens
uuguguuuuggcauaaacaaguaaaaugugcc

SEQ ID NO: 91829 - RNA, 32 nt, Homo Sapiens
agcucugccgugacgucaucuccagcuccagc

SEQ ID NO: 91830 - RNA, 32 nt, Homo Sapiens
uggaguucuccgaagggcgaugauuccagcca

SEQ ID NO: 91831 - RNA, 30 nt, Homo Sapiens
uaaagcgcccggcgcgcgccucccaccgcc

SEQ ID NO: 91832 - RNA, 32 nt, Homo Sapiens
uaaaggcauuuuacugauagcuguucguguua

SEQ ID NO: 91833 - RNA, 32 nt, Homo Sapiens
uuuccugcagcagucgcccaagcagacagccc

SEQ ID NO: 91834 - RNA, 32 nt, Homo Sapiens
ccuggauaccaguagcuucccacccaguccaa

SEQ ID NO: 91835 - RNA, 32 nt, Homo Sapiens
cgcgcugcggggauggggagcggcgugccaau

SEQ ID NO: 91836 - RNA, 32 nt, Homo Sapiens
cacuaaccuuuucucuuaauuuuuauuguguu

SEQ ID NO: 91837 - RNA, 32 nt, Homo Sapiens
ggcgcgggagauuuaaaggcugcuggagugag

SEQ ID NO: 91838 - RNA, 32 nt, Homo Sapiens
gauuauucacuuaggacagagguaaucaaauu

SEQ ID NO: 91839 - RNA, 32 nt, Homo Sapiens
cuuuguauucuucuucgucuauauuugucagu

SEQ ID NO: 91840 - RNA, 32 nt, Homo Sapiens
gaagagcucuaagagacugaaaacuuauauga

SEQ ID NO: 91841 - RNA, 32 nt, Homo Sapiens
ggacggugggccgcagccauggccgagagaaa

SEQ ID NO: 91842 - RNA, 32 nt, Homo Sapiens
gacuuaauucguuuuagauggaucuacacauc

SEQ ID NO: 91843 - RNA, 32 nt, Homo Sapiens
cugugauauugacuuuccuguggaucguggug

SEQ ID NO: 91844 - RNA, 32 nt, Homo Sapiens
uauccuuauuuuugauuucuuuaaaauggagg

SEQ ID NO: 91845 - RNA, 32 nt, Homo Sapiens
uaagcucugccagcguggcagagcaugucuug

SEQ ID NO: 91846 - RNA, 32 nt, Homo Sapiens
acugcaaagucaguauguccacuuaagcacau

SEQ ID NO: 91847 - RNA, 32 nt, Homo Sapiens
cacuggggggccgcaucccccugggaaaugac

SEQ ID NO: 91848 - RNA, 32 nt, Homo Sapiens
ugaaaaguuuuuggugauauuccccuaaguuu

SEQ ID NO: 91849 - RNA, 32 nt, Homo Sapiens
gcagccuccacggccaggaucucggacuucca

SEQ ID NO: 91850 - RNA, 32 nt, Homo Sapiens
ugggcgaagagcgcggacuuguggggccgcug

SEQ ID NO: 91851 - RNA, 32 nt, Homo Sapiens
aauuuuguaugaagaacuauuuguuuaaauua

SEQ ID NO: 91852 - RNA, 32 nt, Homo Sapiens
ccgccaaggcucagcugcagugccaggcggag

SEQ ID NO: 91853 - RNA, 32 nt, Homo Sapiens
aaacgagagaauaagaguagaugggcuacaaa

SEQ ID NO: 91854 - RNA, 32 nt, Homo Sapiens
uugugccaguguuucucuuuggagugccucgc

SEQ ID NO: 91855 - RNA, 32 nt, Homo Sapiens
gacucagcaccauccagucugauuccccguuu

SEQ ID NO: 91856 - RNA, 32 nt, Homo Sapiens
auacauauguacuuacauuaaugugcgagaga

SEQ ID NO: 91857 - RNA, 32 nt, Homo Sapiens
ugcucaggacagggggcgggggcaggggcggg

SEQ ID NO: 91858 - RNA, 32 nt, Homo Sapiens
uaucugugaauucagauuuuaaaaagucuuca

SEQ ID NO: 91859 - RNA, 32 nt, Homo Sapiens
aaauggcguagggcugucucagggcccgagug

SEQ ID NO: 91860 - RNA, 32 nt, Homo Sapiens
acaaaccauccaaauaaugauaaagucuauuc

SEQ ID NO: 91861 - RNA, 32 nt, Homo Sapiens
agcacuuugggaggccgagacgggcggaucac

SEQ ID NO: 91862 - RNA, 32 nt, Homo Sapiens
ccagggcccgcgcucgcccgcguccccgccuu

SEQ ID NO: 91863 - RNA, 32 nt, Homo Sapiens
gugauucggccacagccucagccuccgucgcu

SEQ ID NO: 91864 - RNA, 32 nt, Homo Sapiens
agaagagguucaagugauucuugugccucagg

SEQ ID NO: 91865 - RNA, 32 nt, Homo Sapiens
gguucucuagagaaacagaacaaauauacaaa

SEQ ID NO: 91866 - RNA, 32 nt, Homo Sapiens
cauuuauucccuugaaggugcccuuguauucc

SEQ ID NO: 91867 - RNA, 32 nt, Homo Sapiens
aaaagagugguuagucacgugaauucaguuau

SEQ ID NO: 91868 - RNA, 32 nt, Homo Sapiens
aggcccagacccagcccagccugagccccaac

SEQ ID NO: 91869 - RNA, 32 nt, Homo Sapiens
ccacaagggagcagcguccgcgccgccgccca

SEQ ID NO: 91870 - RNA, 32 nt, Homo Sapiens
uggguguguccucccuugguuucccaagcucu

SEQ ID NO: 91871 - RNA, 32 nt, Homo Sapiens
uaacugacguuuccccucccccuccccucuga

SEQ ID NO: 91872 - RNA, 32 nt, Homo Sapiens
cucgccaggucuuugaacugcagguaaagugg

SEQ ID NO: 91873 - RNA, 32 nt, Homo Sapiens
cgccccggcgcgcgcagcccuagccgccggau

SEQ ID NO: 91874 - RNA, 32 nt, Homo Sapiens
gaguccugcugcccuccagccgggcuccucca

SEQ ID NO: 91875 - RNA, 32 nt, Homo Sapiens
ggggccagucgcggccgggacaucgggcgcug

SEQ ID NO: 91876 - RNA, 32 nt, Homo Sapiens
uaguuuuuuuguuuuuuuuuuaugguuaaaag

SEQ ID NO: 91877 - RNA, 32 nt, Homo Sapiens
aaucgcuugagccugggagauggagguugcag

SEQ ID NO: 91878 - RNA, 32 nt, Homo Sapiens
ugcuucauauuucacaucugaaaaguggcguu

SEQ ID NO: 91879 - RNA, 27 nt, Homo Sapiens
uaaacuauguuuuucagcccuucagaa

SEQ ID NO: 91880 - RNA, 32 nt, Homo Sapiens
guguggcacugggggcucgaagacugguuucu

SEQ ID NO: 91881 - RNA, 32 nt, Homo Sapiens
ucaugguguaaaaaacacacacauacacaaau

SEQ ID NO: 91882 - RNA, 32 nt, Homo Sapiens
agggaggagagauaccugcugcuuccauugcu

SEQ ID NO: 91883 - RNA, 32 nt, Homo Sapiens
uggccaucaaccccaucaaaccagcccaagcc

SEQ ID NO: 91884 - RNA, 32 nt, Homo Sapiens
gggccgaggcggcgaugaccgcggccgacagg

SEQ ID NO: 91885 - RNA, 32 nt, Homo Sapiens
gccccggccccgccccgcgagcgccgagacuu

SEQ ID NO: 91886 - RNA, 32 nt, Homo Sapiens
cccaggcagcgggguggugguugugggaggua

SEQ ID NO: 91887 - RNA, 32 nt, Homo Sapiens
gucgguggaggaucuuucuguguguucucuga

SEQ ID NO: 91888 - RNA, 32 nt, Homo Sapiens
gcuaugacuaauuuucuggucuauaugacuuc

SEQ ID NO: 91889 - RNA, 32 nt, Homo Sapiens
uccugguuguacacagugccaccagugcuccu

SEQ ID NO: 91890 - RNA, 32 nt, Homo Sapiens
aacuucuugaaaagcucuuuuacaguggcuuu

SEQ ID NO: 91891 - RNA, 30 nt, Homo Sapiens
gccuuagcggguguugcgggucccuccuuc

SEQ ID NO: 91892 - RNA, 32 nt, Homo Sapiens
accuuccagcauucuccuuucagugagauaau

SEQ ID NO: 91893 - RNA, 32 nt, Homo Sapiens
caggcgagcggcggguggcucuuaccagcggg

SEQ ID NO: 91894 - RNA, 32 nt, Homo Sapiens
ggagauguagccgaccuuggggcugguggcug

SEQ ID NO: 91895 - RNA, 32 nt, Homo Sapiens
cccugaugcugccucaggaucccccauucccc

SEQ ID NO: 91896 - RNA, 32 nt, Homo Sapiens
uugaaugcuccauucaggccuaucauuuuauu

SEQ ID NO: 91897 - RNA, 32 nt, Homo Sapiens
aacucuucguggccagcacgccgcucacuucg

SEQ ID NO: 91898 - RNA, 32 nt, Homo Sapiens
acuauguguagacagguuuuauauuauaaagu

SEQ ID NO: 91899 - RNA, 32 nt, Homo Sapiens
uaaguuuccugaggccuccccagccauguuaa

SEQ ID NO: 91900 - RNA, 32 nt, Homo Sapiens
cguggggaaaaggcagggaggggguggugucc

SEQ ID NO: 91901 - RNA, 32 nt, Homo Sapiens
aaauccauauuuccucugcgcaggcugcuuuc

SEQ ID NO: 91902 - RNA, 32 nt, Homo Sapiens
agcggggagggaaagggaaaacggggcucggc

SEQ ID NO: 91903 - RNA, 32 nt, Homo Sapiens
aacuguggcuagggaaaccuggagcggucaga

SEQ ID NO: 91904 - RNA, 32 nt, Homo Sapiens
uugugcagggguaauuauuagcguggcuuuua

SEQ ID NO: 91905 - RNA, 32 nt, Homo Sapiens
ugugugugcgugugcgcacgcucuggcuguuu

SEQ ID NO: 91906 - RNA, 32 nt, Homo Sapiens
ggaaauguuuauucaauuuaguacuagcaaca

SEQ ID NO: 91907 - RNA, 32 nt, Homo Sapiens
gguuauuggacagugccccacccccaauccgg

SEQ ID NO: 91908 - RNA, 32 nt, Homo Sapiens
cacgcucuucucacccucaacuucugccaccu

SEQ ID NO: 91909 - RNA, 32 nt, Homo Sapiens
ucucucuccggucgcgcacgccgaggccagua

SEQ ID NO: 91910 - RNA, 32 nt, Homo Sapiens
ucugacuuugaaauaccauuuacaauguagua

SEQ ID NO: 91911 - RNA, 32 nt, Homo Sapiens
ugcuuuacuuugcauuugauugcugugaagau

SEQ ID NO: 91912 - RNA, 32 nt, Homo Sapiens
gugggagcgcagcgaggacgcgcggcugcugc

SEQ ID NO: 91913 - RNA, 32 nt, Homo Sapiens
ucaggaguuuuaauguuagaauuuagauuuaa

SEQ ID NO: 91914 - RNA, 32 nt, Homo Sapiens
ggaauuuuauucugauucucuuucaucucauu

SEQ ID NO: 91915 - RNA, 32 nt, Homo Sapiens
uggugcugaaacaaaagguuaaggcuagguug

SEQ ID NO: 91916 - RNA, 32 nt, Homo Sapiens
aaguuacccacuaaagcuugagguggauguug

SEQ ID NO: 91917 - RNA, 32 nt, Homo Sapiens
ggaaaauucaaagcacuauauuucauacuucc

SEQ ID NO: 91918 - RNA, 32 nt, Homo Sapiens
agccuccgccuggcgggugcacccgggccggc

SEQ ID NO: 91919 - RNA, 32 nt, Homo Sapiens
gagggcugcgccccgugcugccuccccccaga

SEQ ID NO: 91920 - RNA, 32 nt, Homo Sapiens
caauuccuguccuccagcccccggcccacgag

SEQ ID NO: 91921 - RNA, 32 nt, Homo Sapiens
gguggcccaucccgcauacccaucuucucggg

SEQ ID NO: 91922 - RNA, 32 nt, Homo Sapiens
aguuauagacauuggagggaacagagacuggc

SEQ ID NO: 91923 - RNA, 32 nt, Homo Sapiens
ggggggagagauggggcggggcuuggaaggag

SEQ ID NO: 91924 - RNA, 32 nt, Homo Sapiens
uguagaauggauaaaaauuauuuugugaucau

SEQ ID NO: 91925 - RNA, 32 nt, Homo Sapiens
gaaccaauggggaccaucccagacacaugggu

SEQ ID NO: 91926 - RNA, 32 nt, Homo Sapiens
agagcugaggggcugcuccugcuugccaauac

SEQ ID NO: 91927 - RNA, 32 nt, Homo Sapiens
gggguggccuguggcuuguauccuucagucca

SEQ ID NO: 91928 - RNA, 32 nt, Homo Sapiens
aggcugagggucucaagggccagaggacuucc

SEQ ID NO: 91929 - RNA, 32 nt, Homo Sapiens
aaauaucccucaugggcauguauuuauugcag

SEQ ID NO: 91930 - RNA, 31 nt, Homo Sapiens
gauuuaccugccaagaccugaguucaggccc

SEQ ID NO: 91931 - RNA, 32 nt, Homo Sapiens
ggucuaaauguggcuuuuuuuuuuuuuuuccu

SEQ ID NO: 91932 - RNA, 32 nt, Homo Sapiens
gaguuucgcucuuguccaggcuggaguauaau

SEQ ID NO: 91933 - RNA, 32 nt, Homo Sapiens
cgaggccguggcgcaggacacgcggcggcgcc

SEQ ID NO: 91934 - RNA, 32 nt, Homo Sapiens
uggcggagggugcgcgccgagccccgguccgg

SEQ ID NO: 91935 - RNA, 32 nt, Homo Sapiens
uuccccgagccagcugagcuguggcagcgggg

SEQ ID NO: 91936 - RNA, 32 nt, Homo Sapiens
ccuguucuacagcuauggccgggccagcugca

SEQ ID NO: 91937 - RNA, 32 nt, Homo Sapiens
gugcugaaaaagaagaaucagcaaauacuacu

SEQ ID NO: 91938 - RNA, 32 nt, Homo Sapiens
ccaaguugcccucuccgagcuaggcccggccg

SEQ ID NO: 91939 - RNA, 31 nt, Homo Sapiens
ggagaagagcucagccaaccuuggauggagc

SEQ ID NO: 91940 - RNA, 32 nt, Homo Sapiens
gagcugggcugccagggccacgagucugcgcu

SEQ ID NO: 91941 - RNA, 32 nt, Homo Sapiens
ucucucuccugucaaugauggaucucagaaau

SEQ ID NO: 91942 - RNA, 32 nt, Homo Sapiens
guugaaucuuuuuaugagacaagcugaaucug

SEQ ID NO: 91943 - RNA, 32 nt, Homo Sapiens
gggcauccgcacagucacuccuggacacaaga

SEQ ID NO: 91944 - RNA, 32 nt, Homo Sapiens
ggcuaaucuuccgggguucguaggaaaccuuu

SEQ ID NO: 91945 - RNA, 32 nt, Homo Sapiens
aauccaguuguauauaauggacagcuaacgga

SEQ ID NO: 91946 - RNA, 32 nt, Homo Sapiens
ucucucagaaauuuaugugugguuuuaaaguc

SEQ ID NO: 91947 - RNA, 32 nt, Homo Sapiens
uacagauuguucugcaguucucucuucuuuuc

SEQ ID NO: 91948 - RNA, 32 nt, Homo Sapiens
uggggagggacugggggugcuucagggagagg

SEQ ID NO: 91949 - RNA, 32 nt, Homo Sapiens
auucggggcacaagucgggccggagcauccgg

SEQ ID NO: 91950 - RNA, 27 nt, Homo Sapiens
uagggauccuucuugcguccccacacc

SEQ ID NO: 91951 - RNA, 32 nt, Homo Sapiens
uguccuuccaccugugagccaagcccccauuu

SEQ ID NO: 91952 - RNA, 32 nt, Homo Sapiens
aauuuucugauauuaagcaguuccaugcaaau

SEQ ID NO: 91953 - RNA, 32 nt, Homo Sapiens
ucagugccuccuggccggggccccucacccca

SEQ ID NO: 91954 - RNA, 32 nt, Homo Sapiens
ggcugggcgcggugucucacaccuguaauccc

SEQ ID NO: 91955 - RNA, 32 nt, Homo Sapiens
ggguuucaccacguuggccacacuggucucaa

SEQ ID NO: 91956 - RNA, 32 nt, Homo Sapiens
agccaccuggaaacacuaggugccugcccagg

SEQ ID NO: 91957 - RNA, 32 nt, Homo Sapiens
uuuagaaaacaaaccaaacaaugcuaauuaaa

SEQ ID NO: 91958 - RNA, 32 nt, Homo Sapiens
gccagcagcaggccccucugccugcacuccuc

SEQ ID NO: 91959 - RNA, 32 nt, Homo Sapiens
gcagccgggagcccucucuucuccgcagagga

SEQ ID NO: 91960 - RNA, 30 nt, Homo Sapiens
guagcuguggguaggaggauaugcuuauuu

SEQ ID NO: 91961 - RNA, 32 nt, Homo Sapiens
cuuugucacaacaaaaucaacaaaauuauuuc

SEQ ID NO: 91962 - RNA, 32 nt, Homo Sapiens
ugcaguggggcgcugggugcuggcggugacca

SEQ ID NO: 91963 - RNA, 32 nt, Homo Sapiens
uaugcaagaacaaggugaagauggagucauaa

SEQ ID NO: 91964 - RNA, 32 nt, Homo Sapiens
ugccagaggccagacccacgggcucaugcacc

SEQ ID NO: 91965 - RNA, 32 nt, Homo Sapiens
aaugugcuguacaguucaguagaguggucacu

SEQ ID NO: 91966 - RNA, 32 nt, Homo Sapiens
cucaggugauucuuccaccccagccucccaag

SEQ ID NO: 91967 - RNA, 32 nt, Homo Sapiens
gugcugauggcuggauccaaucugguacaguu

SEQ ID NO: 91968 - RNA, 32 nt, Homo Sapiens
uaugcgccuuuccccacccauccccacagccc

SEQ ID NO: 91969 - RNA, 32 nt, Homo Sapiens
ugaacugauucacauuuugacaaaagagagaa

SEQ ID NO: 91970 - RNA, 32 nt, Homo Sapiens
agaccauuuuggaggaagaaaagcacccuuau

SEQ ID NO: 91971 - RNA, 32 nt, Homo Sapiens
cucggccucccaaagugcuggcacuacaggca

SEQ ID NO: 91972 - RNA, 32 nt, Homo Sapiens
ucagcccaccucaggauccgggcuugagggcu

SEQ ID NO: 91973 - RNA, 32 nt, Homo Sapiens
gucccucaggccugggcggugcagcuuccaga

SEQ ID NO: 91974 - RNA, 32 nt, Homo Sapiens
uuagcagauucuucuuuuuuuuuuuuuuguuu

SEQ ID NO: 91975 - RNA, 32 nt, Homo Sapiens
ucuuugugccucagucccccccgcccccuuua

SEQ ID NO: 91976 - RNA, 31 nt, Homo Sapiens
aguucacggaggccgagauccacuggggccu

SEQ ID NO: 91977 - RNA, 32 nt, Homo Sapiens
cauuaaggauuuuguuucuauguauaauaggg

SEQ ID NO: 91978 - RNA, 32 nt, Homo Sapiens
aggaugguuuaaaauauaaugaagucauuuua

SEQ ID NO: 91979 - RNA, 32 nt, Homo Sapiens
uaacuuaauuuucagccaucuuugaagcuuga

SEQ ID NO: 91980 - RNA, 32 nt, Homo Sapiens
agccucagccccagccccagccccagugggca

SEQ ID NO: 91981 - RNA, 32 nt, Homo Sapiens
auaauuuccgagcgaagcugcccccaggauga

SEQ ID NO: 91982 - RNA, 32 nt, Homo Sapiens
ccucaaggacaaagucuccagcccacguucuc

SEQ ID NO: 91983 - RNA, 32 nt, Homo Sapiens
cacccugcccccagggccgcuacugagucccu

SEQ ID NO: 91984 - RNA, 32 nt, Homo Sapiens
agcauuacagcuucugacuaauauagcugcca

SEQ ID NO: 91985 - RNA, 31 nt, Homo Sapiens
guuuaagaauaaaaauauaucaauaccccua

SEQ ID NO: 91986 - RNA, 32 nt, Homo Sapiens
uccuccucaaugaaauacauuauauauuaucu

SEQ ID NO: 91987 - RNA, 32 nt, Homo Sapiens
uucgaacaaggugucuggucuuuucuggagcc

SEQ ID NO: 91988 - RNA, 32 nt, Homo Sapiens
cggaggcugcugcggcgccggggcuccguggc

SEQ ID NO: 91989 - RNA, 32 nt, Homo Sapiens
acccaaagugacaaggggaggggguggagacu

SEQ ID NO: 91990 - RNA, 32 nt, Homo Sapiens
aaauuuuaaaauuuauuuuugacucuuuuauc

SEQ ID NO: 91991 - RNA, 30 nt, Homo Sapiens
aggaggaagaagcuucgagaggcuggaaca

SEQ ID NO: 91992 - RNA, 32 nt, Homo Sapiens
acugagaaaagacgaaaauggcaccagcguug

SEQ ID NO: 91993 - RNA, 32 nt, Homo Sapiens
guguauuuaaggaaacaagcguuccuggaauu

SEQ ID NO: 91994 - RNA, 32 nt, Homo Sapiens
gccaagucaucaaggccucuugaaagagaauc

SEQ ID NO: 91995 - RNA, 32 nt, Homo Sapiens
ugaccccauggcccuuccggcgcgggauggcg

SEQ ID NO: 91996 - RNA, 32 nt, Homo Sapiens
caaaaaaguauguuuuuaagauuugauuuuua

SEQ ID NO: 91997 - RNA, 32 nt, Homo Sapiens
ggcugcccccuuggggugccccccgcucccag

SEQ ID NO: 91998 - RNA, 32 nt, Homo Sapiens
gagucagcccuucuccuccccuggcucuuagg

SEQ ID NO: 91999 - RNA, 32 nt, Homo Sapiens
gccaguccuggcgaccccgguuccucuguguc

SEQ ID NO: 92000 - RNA, 32 nt, Homo Sapiens
ugcauugcuguaaaggaauaccugagacugag

SEQ ID NO: 92001 - RNA, 32 nt, Homo Sapiens
gggggcccgcccagcccucccuggccucucca

SEQ ID NO: 92002 - RNA, 31 nt, Homo Sapiens
accuugcuguccucaccuccaaggcagggac

SEQ ID NO: 92003 - RNA, 32 nt, Homo Sapiens
acccagggccagcccacgucauuaagguuaug

SEQ ID NO: 92004 - RNA, 32 nt, Homo Sapiens
gagggcuguuccaugaugggacagcuuuggau

SEQ ID NO: 92005 - RNA, 32 nt, Homo Sapiens
ccgagcgggcugggggaggggagcguggggcc

SEQ ID NO: 92006 - RNA, 32 nt, Homo Sapiens
ggcggcaggaggagcaggagaggcugcuggag

SEQ ID NO: 92007 - RNA, 32 nt, Homo Sapiens
cucuguacugggccagggccagggccagggga

SEQ ID NO: 92008 - RNA, 32 nt, Homo Sapiens
uuaaaaaacaaaguugugaaaacaugccuccu

SEQ ID NO: 92009 - RNA, 32 nt, Homo Sapiens
aauauauaugaaugugauacauguguuuagua

SEQ ID NO: 92010 - RNA, 32 nt, Homo Sapiens
cuucuuccgcccagccccccagccucaagaaa

SEQ ID NO: 92011 - RNA, 32 nt, Homo Sapiens
gugcccugcagaacaaagaggcugguucagag

SEQ ID NO: 92012 - RNA, 32 nt, Homo Sapiens
cacaagcugccagcugcccugggugguggacc

SEQ ID NO: 92013 - RNA, 32 nt, Homo Sapiens
aaagagaggcuuuggcaggggcucuuacugug

SEQ ID NO: 92014 - RNA, 32 nt, Homo Sapiens
gccacugcugcacacagcuggugucggugccg

SEQ ID NO: 92015 - RNA, 32 nt, Homo Sapiens
cccuucgccuucugccgugauugucaguuucc

SEQ ID NO: 92016 - RNA, 32 nt, Homo Sapiens
acugccaguggcggcuagauuucggaggcccc

SEQ ID NO: 92017 - RNA, 32 nt, Homo Sapiens
acugagcggccgcggccauggcguacgccuau

SEQ ID NO: 92018 - RNA, 27 nt, Homo Sapiens
agaugaguggagaggagaacccagcca

SEQ ID NO: 92019 - RNA, 32 nt, Homo Sapiens
gaacauccagaaccuguugaacaaagaaagga

SEQ ID NO: 92020 - RNA, 32 nt, Homo Sapiens
gguauaauuaaaauauaguaaaaugcacagag

SEQ ID NO: 92021 - RNA, 32 nt, Homo Sapiens
cacgucagccucagccggggggagcccuugcu

SEQ ID NO: 92022 - RNA, 28 nt, Homo Sapiens
ucaucaauaaaauagugacauaaaauca

SEQ ID NO: 92023 - RNA, 32 nt, Homo Sapiens
ggcagcucagagagggugggaguggguccaau

SEQ ID NO: 92024 - RNA, 32 nt, Homo Sapiens
agcccuaugcuuuaaaaacaguuccugguggc

SEQ ID NO: 92025 - RNA, 32 nt, Homo Sapiens
uuuuuaauuuuagaccuuucugagaagauuau

SEQ ID NO: 92026 - RNA, 32 nt, Homo Sapiens
gacguggucccacaaccguugccuuuuuaaga

SEQ ID NO: 92027 - RNA, 32 nt, Homo Sapiens
ccaaacauuguaaaaugugucccuggcuucug

SEQ ID NO: 92028 - RNA, 32 nt, Homo Sapiens
aauaccuuuguucaauaaaggaaauaugcacu

SEQ ID NO: 92029 - RNA, 32 nt, Homo Sapiens
cugggaucaaagcuauccaggucauaaaucuc

SEQ ID NO: 92030 - RNA, 32 nt, Homo Sapiens
gcagaacuguccccaaacccacccucgauccc

SEQ ID NO: 92031 - RNA, 32 nt, Homo Sapiens
aggcuuugaagaaaccacuguguaacuugaga

SEQ ID NO: 92032 - RNA, 32 nt, Homo Sapiens
gguugcgcucacacuuaagcgucugugacagg

SEQ ID NO: 92033 - RNA, 32 nt, Homo Sapiens
auacuucacucuucuuuuuuuuuccccacaag

SEQ ID NO: 92034 - RNA, 32 nt, Homo Sapiens
aggauaugauuguauuuggagauacagccuuc

SEQ ID NO: 92035 - RNA, 32 nt, Homo Sapiens
ccuaucacuguccauucuuaauauuucuaucc

SEQ ID NO: 92036 - RNA, 31 nt, Homo Sapiens
ccaggagccccaguuaccgggagaggcugug

SEQ ID NO: 92037 - RNA, 32 nt, Homo Sapiens
ucuucugugaugacuugguauguuguuuggua

SEQ ID NO: 92038 - RNA, 32 nt, Homo Sapiens
aaccacucaauccuaagcuccucaucagcaag

SEQ ID NO: 92039 - RNA, 32 nt, Homo Sapiens
ccuugauuauuaugaaauagagcaucuugaaa

SEQ ID NO: 92040 - RNA, 32 nt, Homo Sapiens
ugagaggagaggaggagaaaacugcaucauau

SEQ ID NO: 92041 - RNA, 32 nt, Homo Sapiens
aggggaggggagauaauaaggagggcugcugg

SEQ ID NO: 92042 - RNA, 32 nt, Homo Sapiens
uccggaccuugcccauggagaaguuuagagag

SEQ ID NO: 92043 - RNA, 32 nt, Homo Sapiens
ugucagccugucagcguucuccaucacuggca

SEQ ID NO: 92044 - RNA, 29 nt, Homo Sapiens
ggugguaugagauuauauuuucuguuuuu

SEQ ID NO: 92045 - RNA, 32 nt, Homo Sapiens
gccaccccgagcuuacccuucugggacaugac

SEQ ID NO: 92046 - RNA, 32 nt, Homo Sapiens
uggcaacuuagcuuaagaaauguaaugacagu

SEQ ID NO: 92047 - RNA, 32 nt, Homo Sapiens
acuugauuuggagccugccugaaauugauuuu

SEQ ID NO: 92048 - RNA, 32 nt, Homo Sapiens
aagaacaucuacaugguuuuuaucuuauugua

SEQ ID NO: 92049 - RNA, 32 nt, Homo Sapiens
aagacaucaauuugaaaagagccccugucaga

SEQ ID NO: 92050 - RNA, 32 nt, Homo Sapiens
cuccugcucccucugcaucagagcccuuccuu

SEQ ID NO: 92051 - RNA, 32 nt, Homo Sapiens
uacauuugauaaaguaaggcaugguugugguu

SEQ ID NO: 92052 - RNA, 32 nt, Homo Sapiens
cagcaguggcccacguggagaaguugcuacgg

SEQ ID NO: 92053 - RNA, 32 nt, Homo Sapiens
caaaccaagaauuuuuuaaagcagaagaugcu

SEQ ID NO: 92054 - RNA, 32 nt, Homo Sapiens
agagcuaggagguccaaccgccguagacagga

SEQ ID NO: 92055 - RNA, 30 nt, Homo Sapiens
aucgcaucauauuacucccaucuuaaaagu

SEQ ID NO: 92056 - RNA, 32 nt, Homo Sapiens
agccuccaccgccccccucauucccaggcaag

SEQ ID NO: 92057 - RNA, 32 nt, Homo Sapiens
cgagccgccccgaggcgaaaccucgcgguucc

SEQ ID NO: 92058 - RNA, 32 nt, Homo Sapiens
uggaaauuccuccaaaguuugccuucaucucu

SEQ ID NO: 92059 - RNA, 32 nt, Homo Sapiens
ugucuauaaucgcagcacuuugggaggccgag

SEQ ID NO: 92060 - RNA, 32 nt, Homo Sapiens
caugcugcaucuuaaccuuuuguauuuauucc

SEQ ID NO: 92061 - RNA, 32 nt, Homo Sapiens
gauugaggugucgguucgugcugcugagcugc

SEQ ID NO: 92062 - RNA, 27 nt, Homo Sapiens
aaaccaccccguuucagcccucagccu

SEQ ID NO: 92063 - RNA, 32 nt, Homo Sapiens
gugauccaugcauagaauaugaaaauaaauuc

SEQ ID NO: 92064 - RNA, 32 nt, Homo Sapiens
uaauagcagaaauaaacauugaguuguacgag

SEQ ID NO: 92065 - RNA, 32 nt, Homo Sapiens
uaccagacauuauuaagugcuggguauauggu

SEQ ID NO: 92066 - RNA, 30 nt, Homo Sapiens
uggucaggcaggcgaauggggagcaagcca

SEQ ID NO: 92067 - RNA, 32 nt, Homo Sapiens
auggagaacaccguaauuugagaugucagaaa

SEQ ID NO: 92068 - RNA, 32 nt, Homo Sapiens
ucucuccuccagcccgcaccgccccgcucccc

SEQ ID NO: 92069 - RNA, 32 nt, Homo Sapiens
ggagcggucagugacgcgauggagcgggcaag

SEQ ID NO: 92070 - RNA, 32 nt, Homo Sapiens
ucccagguagagaaugacccaggucgcuggcg

SEQ ID NO: 92071 - RNA, 32 nt, Homo Sapiens
cacacacacccuuucucgcacacacacacaca

SEQ ID NO: 92072 - RNA, 32 nt, Homo Sapiens
ggauggccaggauggggucccgcggcucucug

SEQ ID NO: 92073 - RNA, 32 nt, Homo Sapiens
accuuuuucugcacuauaugcaaacaggguaa

SEQ ID NO: 92074 - RNA, 32 nt, Homo Sapiens
uugcuauaugaacacaucgggacugugucugc

SEQ ID NO: 92075 - RNA, 32 nt, Homo Sapiens
ggguucugggagcucccuguggccugucuggg

SEQ ID NO: 92076 - RNA, 32 nt, Homo Sapiens
ggaaccuauuuucucaaucuuccuccauguug

SEQ ID NO: 92077 - RNA, 30 nt, Homo Sapiens
uguuaugcuccuacuggggaaaccguccug

SEQ ID NO: 92078 - RNA, 32 nt, Homo Sapiens
aggggagcugggugugaguguuuacacugugc

SEQ ID NO: 92079 - RNA, 32 nt, Homo Sapiens
gggcagcucgggccgaagucguuggcuucgua

SEQ ID NO: 92080 - RNA, 32 nt, Homo Sapiens
cuucagugcuuccuaaauguuuauacucaucu

SEQ ID NO: 92081 - RNA, 32 nt, Homo Sapiens
accucuuuucccuuauaaauuacccagucuca

SEQ ID NO: 92082 - RNA, 32 nt, Homo Sapiens
ucugugcugaaccauggcgccaccagagggcg

SEQ ID NO: 92083 - RNA, 32 nt, Homo Sapiens
aggggcuuuguaaggggaggucgggggaagcc

SEQ ID NO: 92084 - RNA, 32 nt, Homo Sapiens
cagccucagaaagguggaccgaggccacuacc

SEQ ID NO: 92085 - RNA, 32 nt, Homo Sapiens
caaugugccuguggucccacuaaucugugacu

SEQ ID NO: 92086 - RNA, 32 nt, Homo Sapiens
gaacgucucgcacgccuuccugccauuagcac

SEQ ID NO: 92087 - RNA, 32 nt, Homo Sapiens
acauaggaugaccccagccuguccccucuuac

SEQ ID NO: 92088 - RNA, 32 nt, Homo Sapiens
auguuguguuugucuucaguucuguuuauaug

SEQ ID NO: 92089 - RNA, 29 nt, Homo Sapiens
ggcgguuccguccgggucucggccaccgu

SEQ ID NO: 92090 - RNA, 32 nt, Homo Sapiens
gccaagucccuguguuacgaauggugggccaa

SEQ ID NO: 92091 - RNA, 32 nt, Homo Sapiens
auucuagaaauauuucuagaacacacagagag

SEQ ID NO: 92092 - RNA, 32 nt, Homo Sapiens
cuuccuggggaguacgacuuggaccgggaccg

SEQ ID NO: 92093 - RNA, 32 nt, Homo Sapiens
cucuccgucuuuuuaaacucuuuuuuaaguuu

SEQ ID NO: 92094 - RNA, 32 nt, Homo Sapiens
accaccccaccuccccguaggagcagagagca

SEQ ID NO: 92095 - RNA, 32 nt, Homo Sapiens
ucagccagaagauuuuccugugaagccugcgg

SEQ ID NO: 92096 - RNA, 32 nt, Homo Sapiens
guugaaucacauugucagaauuuuuuccuccu

SEQ ID NO: 92097 - RNA, 32 nt, Homo Sapiens
cucccaaagggauauaagaggggcaggccacu

SEQ ID NO: 92098 - RNA, 32 nt, Homo Sapiens
uuuaugcuuuaacuucagagugaguguagggg

SEQ ID NO: 92099 - RNA, 32 nt, Homo Sapiens
ggggcuggccccagccaggcccugcagggcug

SEQ ID NO: 92100 - RNA, 32 nt, Homo Sapiens
aucuucccuggcguccucucccuccuggccag

SEQ ID NO: 92101 - RNA, 32 nt, Homo Sapiens
aauuggagaaaauauuuguaaacuauguaucu

SEQ ID NO: 92102 - RNA, 32 nt, Homo Sapiens
gaggaggggugugggcacccccggcccagugc

SEQ ID NO: 92103 - RNA, 32 nt, Homo Sapiens
ugagucccuuagccaagcaguuucuuucaaag

SEQ ID NO: 92104 - RNA, 32 nt, Homo Sapiens
uaaaacaaagguacggaccaugugcuauauau

SEQ ID NO: 92105 - RNA, 32 nt, Homo Sapiens
aagccuccaaaagcugggaugcuugaggguau

SEQ ID NO: 92106 - RNA, 32 nt, Homo Sapiens
gaaaugaguauuaaacaguauuugaaacagag

SEQ ID NO: 92107 - RNA, 32 nt, Homo Sapiens
uccuguccgucugcuucacaguucugcucggu

SEQ ID NO: 92108 - RNA, 32 nt, Homo Sapiens
cccagcauauugcaggcccuguuuugaguaug

SEQ ID NO: 92109 - RNA, 32 nt, Homo Sapiens
agcuauuuuaaagaagaugcuauguugggaga

SEQ ID NO: 92110 - RNA, 32 nt, Homo Sapiens
agggggaagaggaggaggaggcuguggaugac

SEQ ID NO: 92111 - RNA, 32 nt, Homo Sapiens
uacagcacauucaguuauguacaguauguaau

SEQ ID NO: 92112 - RNA, 32 nt, Homo Sapiens
gaagcugcugagccaugggcuacgcgcgggcu

SEQ ID NO: 92113 - RNA, 32 nt, Homo Sapiens
uagagggucccgggaagcuggaucugucagcc

SEQ ID NO: 92114 - RNA, 32 nt, Homo Sapiens
cccugccaccuccaugugacaaguuugacacc

SEQ ID NO: 92115 - RNA, 32 nt, Homo Sapiens
uccccuggcuucuccacagguuuuccagcgga

SEQ ID NO: 92116 - RNA, 32 nt, Homo Sapiens
ucuggacaacuggaagacaguuacgcuucguc

SEQ ID NO: 92117 - RNA, 32 nt, Homo Sapiens
uuccagccagugcuuccacauuuucaugacuu

SEQ ID NO: 92118 - RNA, 32 nt, Homo Sapiens
ccuaugcgcgcgcugccgcgacgagacgcacc

SEQ ID NO: 92119 - RNA, 28 nt, Homo Sapiens
gaauuuguuacaggagcaauagaaaaug

SEQ ID NO: 92120 - RNA, 32 nt, Homo Sapiens
uugggaaccucauuagaaaugaccucagcugc

SEQ ID NO: 92121 - RNA, 32 nt, Homo Sapiens
ucuuuacagcagccugucccucucccgaucuc

SEQ ID NO: 92122 - RNA, 32 nt, Homo Sapiens
agaauaauacauucaguauacuaccaagaagc

SEQ ID NO: 92123 - RNA, 32 nt, Homo Sapiens
cgacaugugcagaacggccccuuggcugcagu

SEQ ID NO: 92124 - RNA, 32 nt, Homo Sapiens
ccugcccgggcacgcuccgcugugggaggcca

SEQ ID NO: 92125 - RNA, 32 nt, Homo Sapiens
caaaggaucuuuguuccucugagccaagacug

SEQ ID NO: 92126 - RNA, 32 nt, Homo Sapiens
gagcugucccuagucgcccaccgcggccggac

SEQ ID NO: 92127 - RNA, 32 nt, Homo Sapiens
agccgagauugugccacugaacuccaaccugc

SEQ ID NO: 92128 - RNA, 32 nt, Homo Sapiens
cugcaagccaaggagagaggcugcaggagaaa

SEQ ID NO: 92129 - RNA, 32 nt, Homo Sapiens
uguguaucuguguaucucugagggcccuauag

SEQ ID NO: 92130 - RNA, 32 nt, Homo Sapiens
uugaugcccuuaaaaugcugaagacagauguc

SEQ ID NO: 92131 - RNA, 32 nt, Homo Sapiens
cacugccgcccggucugccacgcagaggucca

SEQ ID NO: 92132 - RNA, 32 nt, Homo Sapiens
uguguccacaaaacuacccaucauaugaggaa

SEQ ID NO: 92133 - RNA, 32 nt, Homo Sapiens
ccacuggggggccuguuuagagucagccugcc

SEQ ID NO: 92134 - RNA, 32 nt, Homo Sapiens
cgccgcgcuguucgccuuugccuaccugcagc

SEQ ID NO: 92135 - RNA, 32 nt, Homo Sapiens
ccacaccccguccuuaccccuuccuuuccuua

SEQ ID NO: 92136 - RNA, 32 nt, Homo Sapiens
cuucguuuuuaaaugcccuugaaucuagcuuu

SEQ ID NO: 92137 - RNA, 32 nt, Homo Sapiens
uccucgaacugggaucggguagggaacaaccu

SEQ ID NO: 92138 - RNA, 32 nt, Homo Sapiens
accauaaauuguuccagauuuauauuaaugga

SEQ ID NO: 92139 - RNA, 32 nt, Homo Sapiens
ccggcgcccucccaggcgcuccaggagccggc

SEQ ID NO: 92140 - RNA, 32 nt, Homo Sapiens
agggcuggaaggcagagcuuugggccaaaagc

SEQ ID NO: 92141 - RNA, 32 nt, Homo Sapiens
gagcagaggagcucacgccugcgggucgggag

SEQ ID NO: 92142 - RNA, 32 nt, Homo Sapiens
ugggggcggggcgggaagacggcggccgggag

SEQ ID NO: 92143 - RNA, 32 nt, Homo Sapiens
cagucuaccgugguccagguuaucagcucuuu

SEQ ID NO: 92144 - RNA, 32 nt, Homo Sapiens
gucugaaauuugaccaaaaacaucuucuuuau

SEQ ID NO: 92145 - RNA, 32 nt, Homo Sapiens
cuauugugcugagcacaaucacagcuccugga

SEQ ID NO: 92146 - RNA, 32 nt, Homo Sapiens
ucacuggagcccaggaggucaaggcugcagug

SEQ ID NO: 92147 - RNA, 32 nt, Homo Sapiens
aucguucucaggcccuccccccggaguacuuc

SEQ ID NO: 92148 - RNA, 32 nt, Homo Sapiens
agcuggcgggagaggguggcugcgcccccugc

SEQ ID NO: 92149 - RNA, 32 nt, Homo Sapiens
uccccccaacccugucccaccccaccccuccc

SEQ ID NO: 92150 - RNA, 32 nt, Homo Sapiens
agcuucuccaagugccuagugaaacggggaaa

SEQ ID NO: 92151 - RNA, 28 nt, Homo Sapiens
cgacaggcauaggcucugacuguuccuu

SEQ ID NO: 92152 - RNA, 32 nt, Homo Sapiens
auugugauauuuuagcacuuugguagcuuuua

SEQ ID NO: 92153 - RNA, 32 nt, Homo Sapiens
uaagcacauuuuacuguaaauguuuggguuuc

SEQ ID NO: 92154 - RNA, 32 nt, Homo Sapiens
aaggauacaaaguauugauccugggugccucu

SEQ ID NO: 92155 - RNA, 32 nt, Homo Sapiens
caaccaugucauuucagaaguuaguuuguaua

SEQ ID NO: 92156 - RNA, 32 nt, Homo Sapiens
ccuagaccccucuuccucucucccccaccaua

SEQ ID NO: 92157 - RNA, 32 nt, Homo Sapiens
auuguuguaucauaucuuucugaaaccauucu

SEQ ID NO: 92158 - RNA, 32 nt, Homo Sapiens
cucuucccuccccuccucuccccuccccucuc

SEQ ID NO: 92159 - RNA, 32 nt, Homo Sapiens
agccuuacaaauacaucugugcauucuugcuu

SEQ ID NO: 92160 - RNA, 32 nt, Homo Sapiens
caaaagcucagguuuguccuggucaugcacau

SEQ ID NO: 92161 - RNA, 32 nt, Homo Sapiens
aaagaggccguuuaucuuuguaaacacgaaac

SEQ ID NO: 92162 - RNA, 32 nt, Homo Sapiens
uauagguuugaaaggcuguuugaaagaggaau

SEQ ID NO: 92163 - RNA, 32 nt, Homo Sapiens
gagguugguggugacaggauggggaaccgacc

SEQ ID NO: 92164 - RNA, 32 nt, Homo Sapiens
aucugacaugcuugcccucccccuccccuacc

SEQ ID NO: 92165 - RNA, 32 nt, Homo Sapiens
aaggccuuagucacauuuuagagccagccaaa

SEQ ID NO: 92166 - RNA, 32 nt, Homo Sapiens
cugaccagccuggccggcuggcggagaaaagg

SEQ ID NO: 92167 - RNA, 32 nt, Homo Sapiens
agccuuucuccucuucucuucuugggacagga

SEQ ID NO: 92168 - RNA, 32 nt, Homo Sapiens
ucuuauuuuccuauuuuuauuaaauuuggaac

SEQ ID NO: 92169 - RNA, 32 nt, Homo Sapiens
cgaucuuccagaagcuguacuuuuaccaguuu

SEQ ID NO: 92170 - RNA, 32 nt, Homo Sapiens
gaccaucgggccgggggcgguggcucacgccu

SEQ ID NO: 92171 - RNA, 32 nt, Homo Sapiens
uggagaaagcagcugcagagguucuguauuuc

SEQ ID NO: 92172 - RNA, 32 nt, Homo Sapiens
gcuguuaugucauauugcccuaaucucuauuu

SEQ ID NO: 92173 - RNA, 32 nt, Homo Sapiens
uuuacacugugaaaaccgcaggccugucgccu

SEQ ID NO: 92174 - RNA, 32 nt, Homo Sapiens
accucccauuugauuuuuuuuaauuuucuacc

SEQ ID NO: 92175 - RNA, 32 nt, Homo Sapiens
acacacccagaugccccagggaccccgggaag

SEQ ID NO: 92176 - RNA, 32 nt, Homo Sapiens
uagcagguaaauguauucuaguauaaaacauc

SEQ ID NO: 92177 - RNA, 32 nt, Homo Sapiens
cuggcuuacaggugcugucacacagguacgcc

SEQ ID NO: 92178 - RNA, 32 nt, Homo Sapiens
cgcggcuguggacgggggaggaggaaggggac

SEQ ID NO: 92179 - RNA, 31 nt, Homo Sapiens
auauauauaaagaaaaugauacagcagagcu

SEQ ID NO: 92180 - RNA, 32 nt, Homo Sapiens
cauuguuuuuuaaaauguguauaguaugcauu

SEQ ID NO: 92181 - RNA, 32 nt, Homo Sapiens
ucucaguaccucaggcuccccuguguacuugg

SEQ ID NO: 92182 - RNA, 32 nt, Homo Sapiens
auguuuuuaaaaaccuauuuugaaaggucaga

SEQ ID NO: 92183 - RNA, 31 nt, Homo Sapiens
gccaugagggcggcggggucggccuucaccu

SEQ ID NO: 92184 - RNA, 32 nt, Homo Sapiens
gaccugggaggcacagggaggggagagauggg

SEQ ID NO: 92185 - RNA, 32 nt, Homo Sapiens
cgcgcgucgaaccgucggcccgagggcgcaga

SEQ ID NO: 92186 - RNA, 27 nt, Homo Sapiens
uuauggacucucuucagcuucuggaga

SEQ ID NO: 92187 - RNA, 32 nt, Homo Sapiens
agcugguguggcgaggcccggcucuccugcgg

SEQ ID NO: 92188 - RNA, 32 nt, Homo Sapiens
agcugcccgccuucgggcccugcgcggggagg

SEQ ID NO: 92189 - RNA, 32 nt, Homo Sapiens
ucaagcccuccaucggccccaccagaucucca

SEQ ID NO: 92190 - RNA, 32 nt, Homo Sapiens
guacaauccaaauuugucguagacuugugcaa

SEQ ID NO: 92191 - RNA, 32 nt, Homo Sapiens
aacuuaaauuugcucaaagaagcaaaauauuu

SEQ ID NO: 92192 - RNA, 32 nt, Homo Sapiens
gagaaagaaaucauuacaacucuuuugggcag

SEQ ID NO: 92193 - RNA, 32 nt, Homo Sapiens
uagccccuaaaauuaggaagaauguaaucuca

SEQ ID NO: 92194 - RNA, 32 nt, Homo Sapiens
agaggggaacaucagcugcagcucugcaccag

SEQ ID NO: 92195 - RNA, 32 nt, Homo Sapiens
ccagagcauggaagagcccagaucugaaugua

SEQ ID NO: 92196 - RNA, 32 nt, Homo Sapiens
cccccucgagugccggccugggcccugccagg

SEQ ID NO: 92197 - RNA, 32 nt, Homo Sapiens
uacagguauaucuauuuuuauuuacuuuguaa

SEQ ID NO: 92198 - RNA, 32 nt, Homo Sapiens
gagauguguacguuccuuuucuuuuuuggacu

SEQ ID NO: 92199 - RNA, 32 nt, Homo Sapiens
cuugcucugaggaugccaggacuuuaaggaca

SEQ ID NO: 92200 - RNA, 32 nt, Homo Sapiens
auuuacuucuagguguaauauuguuaaugguu

SEQ ID NO: 92201 - RNA, 32 nt, Homo Sapiens
caguccacauucaagaggagacuuggaguuua

SEQ ID NO: 92202 - RNA, 32 nt, Homo Sapiens
ccuccccgcgcgcccacccacccaguccggcu

SEQ ID NO: 92203 - RNA, 32 nt, Homo Sapiens
cuccgccaguuuugucuugugaugccauuaac

SEQ ID NO: 92204 - RNA, 32 nt, Homo Sapiens
cuugguugauaaaaaaguuucaaaucccaaaa

SEQ ID NO: 92205 - RNA, 32 nt, Homo Sapiens
aaugagaauuccuuagcaaggauuuuguaaga

SEQ ID NO: 92206 - RNA, 32 nt, Homo Sapiens
cauucccaguccauugucaucacgucagagaa

SEQ ID NO: 92207 - RNA, 32 nt, Homo Sapiens
auacuccugugcuaacauguauacuagaaaac

SEQ ID NO: 92208 - RNA, 32 nt, Homo Sapiens
ccuccaguguuuuagacgcccagcugcacaac

SEQ ID NO: 92209 - RNA, 32 nt, Homo Sapiens
ccgaugagggguccugggaggggauggggcug

SEQ ID NO: 92210 - RNA, 32 nt, Homo Sapiens
uacaucuuagaaaaaacauagauagugcuagu

SEQ ID NO: 92211 - RNA, 32 nt, Homo Sapiens
gguuugggcggcggcgucugcugcugguagcc

SEQ ID NO: 92212 - RNA, 32 nt, Homo Sapiens
auaauguuuccacauuauauuauguuauauuu

SEQ ID NO: 92213 - RNA, 32 nt, Homo Sapiens
aauuuugcccagcaagcuucugcacuaguaac

SEQ ID NO: 92214 - RNA, 32 nt, Homo Sapiens
uuacugggguggucacgugggcagcuucugcc

SEQ ID NO: 92215 - RNA, 32 nt, Homo Sapiens
uccuugggcagacaggcugacuggcagcacca

SEQ ID NO: 92216 - RNA, 28 nt, Homo Sapiens
gggagauugucuaaaguguugguuuucu

SEQ ID NO: 92217 - RNA, 32 nt, Homo Sapiens
aggcucucuaccuuuagcacaagggaggucuu

SEQ ID NO: 92218 - RNA, 32 nt, Homo Sapiens
ggccuuugggaggugaugggguuaugagggug

SEQ ID NO: 92219 - RNA, 32 nt, Homo Sapiens
uguuacauugaaauaaaaacaaaguaaaauga

SEQ ID NO: 92220 - RNA, 32 nt, Homo Sapiens
gcgaagcccaagagcuggccucgccacgaagg

SEQ ID NO: 92221 - RNA, 32 nt, Homo Sapiens
gaaaccuuucuacuuuuucuguacuuuuuguu

SEQ ID NO: 92222 - RNA, 32 nt, Homo Sapiens
uugguccccuuugcuccucccugggacuuugg

SEQ ID NO: 92223 - RNA, 32 nt, Homo Sapiens
uauauucagcaauuuuuuaaagggcagauauu

SEQ ID NO: 92224 - RNA, 32 nt, Homo Sapiens
gggccucuggguggagggggauucagacgccg

SEQ ID NO: 92225 - RNA, 32 nt, Homo Sapiens
guggggcgggcgucaccaccggaguggagggc

SEQ ID NO: 92226 - RNA, 32 nt, Homo Sapiens
uccccuccuucccucacccccagcacaggggg

SEQ ID NO: 92227 - RNA, 32 nt, Homo Sapiens
auggcuauguagacauaaagaagaaacuugua

SEQ ID NO: 92228 - RNA, 32 nt, Homo Sapiens
cagcaugugucugccauuucauuuguacgcuu

SEQ ID NO: 92229 - RNA, 32 nt, Homo Sapiens
aacauauaaaauuguguauuuuucuuugguug

SEQ ID NO: 92230 - RNA, 32 nt, Homo Sapiens
uccucaugauucugaugcaccaaaaauuuuaa

SEQ ID NO: 92231 - RNA, 32 nt, Homo Sapiens
ccauagagaacaaaauagacaaauacaucugc

SEQ ID NO: 92232 - RNA, 32 nt, Homo Sapiens
cuccucuaugugaacuugacuuugaaagacag

SEQ ID NO: 92233 - RNA, 32 nt, Homo Sapiens
uacaggccuacagaaauugaaaaugaccaaaa

SEQ ID NO: 92234 - RNA, 32 nt, Homo Sapiens
ggccucugccagcaagagaaguguccugggug

SEQ ID NO: 92235 - RNA, 32 nt, Homo Sapiens
accggcccacccaaagauucuggcccaacucc

SEQ ID NO: 92236 - RNA, 32 nt, Homo Sapiens
aaugaggaccccagccccacuucccuggaacu

SEQ ID NO: 92237 - RNA, 32 nt, Homo Sapiens
aauguugugacuauucagaaaaggugaauaaa

SEQ ID NO: 92238 - RNA, 32 nt, Homo Sapiens
ugaaggagcaccaggaccgaauugaagagcug

SEQ ID NO: 92239 - RNA, 32 nt, Homo Sapiens
ccccuggcccuccugucccacuauugcuggag

SEQ ID NO: 92240 - RNA, 32 nt, Homo Sapiens
uuucucuucucgccguagugccguugguuuca

SEQ ID NO: 92241 - RNA, 32 nt, Homo Sapiens
gcagcgacacguagggacgggcugaaccagcu

SEQ ID NO: 92242 - RNA, 32 nt, Homo Sapiens
ccuggauuccugcaucugcauaugcguauuug

SEQ ID NO: 92243 - RNA, 30 nt, Homo Sapiens
aggaggugcugugcugagaagacuuccugg

SEQ ID NO: 92244 - RNA, 32 nt, Homo Sapiens
uuacaggugugagccaccgcgcccggcuguuu

SEQ ID NO: 92245 - RNA, 32 nt, Homo Sapiens
ucacagacccuacagcuuggggccugggcucc

SEQ ID NO: 92246 - RNA, 32 nt, Homo Sapiens
ucuugggaaagcuggugcugcugcugccugau

SEQ ID NO: 92247 - RNA, 32 nt, Homo Sapiens
agucgggaucagcucagauugugcaguccauc

SEQ ID NO: 92248 - RNA, 32 nt, Homo Sapiens
gcccugcaguguucgcuuggcuccaugcuccu

SEQ ID NO: 92249 - RNA, 32 nt, Homo Sapiens
aaaauuuggagguggggugggagaaagagcua

SEQ ID NO: 92250 - RNA, 32 nt, Homo Sapiens
ugccucugcggugguccuuuggauccaaggag

SEQ ID NO: 92251 - RNA, 32 nt, Homo Sapiens
gcugaggugaaaugccccuggaugccaugaau

SEQ ID NO: 92252 - RNA, 32 nt, Homo Sapiens
uuuuuuacaacugccauuuacuguauguagaa

SEQ ID NO: 92253 - RNA, 32 nt, Homo Sapiens
aucugucaaagugagauauuuuuaccugccua

SEQ ID NO: 92254 - RNA, 32 nt, Homo Sapiens
guaagcaaugcacaacuugcacaaaugguaag

SEQ ID NO: 92255 - RNA, 32 nt, Homo Sapiens
gucauggcuacaccccaccggacccugagagc

SEQ ID NO: 92256 - RNA, 32 nt, Homo Sapiens
aaggaaaggaaauaccaaaauauuugcagacu

SEQ ID NO: 92257 - RNA, 32 nt, Homo Sapiens
auaugugcucaccagcagcaacaggcuaucug

SEQ ID NO: 92258 - RNA, 32 nt, Homo Sapiens
aagaaagcugucuguccuguuuccuucauguu

SEQ ID NO: 92259 - RNA, 32 nt, Homo Sapiens
cuggguccaaauaaaaacuaaauuguaaacuc

SEQ ID NO: 92260 - RNA, 29 nt, Homo Sapiens
ccagcuugacaagcaaggcaaacugggug

SEQ ID NO: 92261 - RNA, 32 nt, Homo Sapiens
gacaauacugaauaaacaucucaccggaauuc

SEQ ID NO: 92262 - RNA, 31 nt, Homo Sapiens
cugguaacauagguuuuuagucuaauugaau

SEQ ID NO: 92263 - RNA, 32 nt, Homo Sapiens
auuccggaggcaaggagugaaguaagaaggac

SEQ ID NO: 92264 - RNA, 32 nt, Homo Sapiens
caagcggacgagccaguuaucccucagagcuc

SEQ ID NO: 92265 - RNA, 32 nt, Homo Sapiens
uuaguugcaauaaaggaaaagauacacauucu

SEQ ID NO: 92266 - RNA, 32 nt, Homo Sapiens
aucugagcagggaucgaucuggccugguggug

SEQ ID NO: 92267 - RNA, 28 nt, Homo Sapiens
uuaugccuuguguguauguguuuuaagu

SEQ ID NO: 92268 - RNA, 32 nt, Homo Sapiens
accacuggacagaggagagggcugucagguuc

SEQ ID NO: 92269 - RNA, 32 nt, Homo Sapiens
ugagaggcacguggaggaauuaauggagguaa

SEQ ID NO: 92270 - RNA, 32 nt, Homo Sapiens
uucaggauggaagccggugggguguggagcga

SEQ ID NO: 92271 - RNA, 32 nt, Homo Sapiens
gcaguuguuguguugguggcacauuggauauu

SEQ ID NO: 92272 - RNA, 32 nt, Homo Sapiens
gcuggugucgacggagugucugaugacccggc

SEQ ID NO: 92273 - RNA, 32 nt, Homo Sapiens
uuaggcagaccuauuuauucuagaugugaauu

SEQ ID NO: 92274 - RNA, 32 nt, Homo Sapiens
cagugaaaugaugugcauaugaaaauguaguu

SEQ ID NO: 92275 - RNA, 32 nt, Homo Sapiens
guucuuaaaaggccuuuguuguagccaaaggc

SEQ ID NO: 92276 - RNA, 32 nt, Homo Sapiens
cgguggcaucuuccuuacuuuguccauccucc

SEQ ID NO: 92277 - RNA, 32 nt, Homo Sapiens
uguugcuucugguaucuggggugucccaccgc

SEQ ID NO: 92278 - RNA, 32 nt, Homo Sapiens
ggcagcggccccagcucgggucccacucaucc

SEQ ID NO: 92279 - RNA, 32 nt, Homo Sapiens
cuccccuauguccugugucuuaaaagauuaug

SEQ ID NO: 92280 - RNA, 32 nt, Homo Sapiens
aaaaauaggaaaagagaagaaaaacuagcaua

SEQ ID NO: 92281 - RNA, 32 nt, Homo Sapiens
cccgggagggguggcgggagcgguccuggaaa

SEQ ID NO: 92282 - RNA, 32 nt, Homo Sapiens
aagggacuugagaauuaauucuggagagaaug

SEQ ID NO: 92283 - RNA, 32 nt, Homo Sapiens
uuugaauaagcugaguaaaaccaccaaagauc

SEQ ID NO: 92284 - RNA, 32 nt, Homo Sapiens
ggaguggugucuauguguggcgguggagucca

SEQ ID NO: 92285 - RNA, 32 nt, Homo Sapiens
uucuucuagcguugcgcaaacacugacccagc

SEQ ID NO: 92286 - RNA, 32 nt, Homo Sapiens
uguguuugccuguugacgugccaucagugcgu

SEQ ID NO: 92287 - RNA, 32 nt, Homo Sapiens
caguguaaggcauagggaauauguaagucagg

SEQ ID NO: 92288 - RNA, 28 nt, Homo Sapiens
auuuguuuuuaacauauguguuugagaa

SEQ ID NO: 92289 - RNA, 32 nt, Homo Sapiens
cuagauauugaggaguuuuucugagggcagag

SEQ ID NO: 92290 - RNA, 32 nt, Homo Sapiens
gccuccgcaccgacgcggcccgggcuggagcc

SEQ ID NO: 92291 - RNA, 32 nt, Homo Sapiens
ccucacgguuucucgucagccccgucacugau

SEQ ID NO: 92292 - RNA, 32 nt, Homo Sapiens
gucugugagagaccgaauagaggggcuggggc

SEQ ID NO: 92293 - RNA, 26 nt, Homo Sapiens
gauggugacaggccugaugaccaagg

SEQ ID NO: 92294 - RNA, 32 nt, Homo Sapiens
cucccaccgagcacggcagccaucgucgcgug

SEQ ID NO: 92295 - RNA, 32 nt, Homo Sapiens
uugucucugguguucucuggcucuuguccauc

SEQ ID NO: 92296 - RNA, 32 nt, Homo Sapiens
gaagggacgagugucgguguggcaccggugca

SEQ ID NO: 92297 - RNA, 32 nt, Homo Sapiens
gcccggcggcucuggccggccguccaguccgu

SEQ ID NO: 92298 - RNA, 32 nt, Homo Sapiens
uaauguaaacugccucaaauuggacuuugggc

SEQ ID NO: 92299 - RNA, 32 nt, Homo Sapiens
uggaaccugccugcucccucucccagaccagc

SEQ ID NO: 92300 - RNA, 32 nt, Homo Sapiens
guauaguugggggacaggggucuggguuuggc

SEQ ID NO: 92301 - RNA, 32 nt, Homo Sapiens
guugugggaagagccauagguauuuuauuuuu

SEQ ID NO: 92302 - RNA, 32 nt, Homo Sapiens
acuauuuagauuuucuuuuuuaucuugcacuu

SEQ ID NO: 92303 - RNA, 32 nt, Homo Sapiens
uaauagguuuauucagaaaacauguccacugc

SEQ ID NO: 92304 - RNA, 32 nt, Homo Sapiens
agcugaccaacccgccaggccugcucaaugca

SEQ ID NO: 92305 - RNA, 26 nt, Homo Sapiens
uaugcgagagaaucagcaggagucca

SEQ ID NO: 92306 - RNA, 32 nt, Homo Sapiens
gugaaagcucuuucaacauccugauguuagaa

SEQ ID NO: 92307 - RNA, 32 nt, Homo Sapiens
aacacuuucuauuucacaaaagaccaaaagcc

SEQ ID NO: 92308 - RNA, 32 nt, Homo Sapiens
augagucucacagaggaccccgagacuucugu

SEQ ID NO: 92309 - RNA, 32 nt, Homo Sapiens
augguggagagaaaagagaaugcugaaaagug

SEQ ID NO: 92310 - RNA, 32 nt, Homo Sapiens
gaagaugaaaauaaauaagccugguuucaacc

SEQ ID NO: 92311 - RNA, 32 nt, Homo Sapiens
ccggcaggccugccgccuaguucacuggcucc

SEQ ID NO: 92312 - RNA, 32 nt, Homo Sapiens
ucgcguguuucccccacuuccuguugagaagg

SEQ ID NO: 92313 - RNA, 32 nt, Homo Sapiens
uaucuauuugcccacccauccauccacccugg

SEQ ID NO: 92314 - RNA, 32 nt, Homo Sapiens
cuggcggacgaggcgcugcugcuaccgcugac

SEQ ID NO: 92315 - RNA, 32 nt, Homo Sapiens
gcgcaauccggagaggacgccaggacgacgcc

SEQ ID NO: 92316 - RNA, 32 nt, Homo Sapiens
aagaaaaacacugaauacuuugaaccacaaau

SEQ ID NO: 92317 - RNA, 32 nt, Homo Sapiens
uauucuccuuugcaugaauccauggcaaaguu

SEQ ID NO: 92318 - RNA, 32 nt, Homo Sapiens
uuaaaauuguaaauaaauuaaacuuuucuggu

SEQ ID NO: 92319 - RNA, 32 nt, Homo Sapiens
aucuugugcuccaugcaggaugaugacagaau

SEQ ID NO: 92320 - RNA, 32 nt, Homo Sapiens
aauugugacaacaauuugaaaauugugguugc

SEQ ID NO: 92321 - RNA, 32 nt, Homo Sapiens
auuggggcuccucauuggggugcuuggggcgc

SEQ ID NO: 92322 - RNA, 32 nt, Homo Sapiens
cggacgccacagcgcuagacgucucccacaac

SEQ ID NO: 92323 - RNA, 32 nt, Homo Sapiens
accacauguucuuuucuuggggugauuuaauc

SEQ ID NO: 92324 - RNA, 32 nt, Homo Sapiens
gccaaacagccaccuggugacagugaagggug

SEQ ID NO: 92325 - RNA, 32 nt, Homo Sapiens
cucuuuacuuggacuuugaacaaaagucaacu

SEQ ID NO: 92326 - RNA, 32 nt, Homo Sapiens
ggggccuugccagcuuccgccgccgcgucguu

SEQ ID NO: 92327 - RNA, 32 nt, Homo Sapiens
auagauaaaaauuuuaaaaacagccagaaaaa

SEQ ID NO: 92328 - RNA, 32 nt, Homo Sapiens
aggaggcggaggaggagguggccuagcugcuc

SEQ ID NO: 92329 - RNA, 32 nt, Homo Sapiens
ugcacgggacacguuacccagcucgggugaga

SEQ ID NO: 92330 - RNA, 32 nt, Homo Sapiens
cuuaccuuccccucaugccgcucccaucucua

SEQ ID NO: 92331 - RNA, 32 nt, Homo Sapiens
gcauuuagcauuucuuuuuucucaaaaagaaa

SEQ ID NO: 92332 - RNA, 31 nt, Homo Sapiens
agccgcacgcacugccguguucucccugcgg

SEQ ID NO: 92333 - RNA, 32 nt, Homo Sapiens
guggcccucaggaugccuucgggggacagauu

SEQ ID NO: 92334 - RNA, 32 nt, Homo Sapiens
cacucgauuuaggcuagauaugcugaaaaaca

SEQ ID NO: 92335 - RNA, 32 nt, Homo Sapiens
cuguugguccccagccucacucuucugaaccu

SEQ ID NO: 92336 - RNA, 32 nt, Homo Sapiens
gcucauuuuuggauguuuguagauaacaauga

SEQ ID NO: 92337 - RNA, 32 nt, Homo Sapiens
gagagcugccccagccgcuucugaccuuccag

SEQ ID NO: 92338 - RNA, 32 nt, Homo Sapiens
ucauugccaugaguguucggacaggcucugcg

SEQ ID NO: 92339 - RNA, 32 nt, Homo Sapiens
guaaggcccaaguuauugagcagcagcuuccu

SEQ ID NO: 92340 - RNA, 32 nt, Homo Sapiens
guccuagcuacuugggugguugaggcaggagg

SEQ ID NO: 92341 - RNA, 32 nt, Homo Sapiens
ggacaaccucgucauugucaggcacagagcgg

SEQ ID NO: 92342 - RNA, 32 nt, Homo Sapiens
augagggacuuccaucagacucuaaugauaau

SEQ ID NO: 92343 - RNA, 32 nt, Homo Sapiens
aaccgugugucuaugaucuacacgagagggcu

SEQ ID NO: 92344 - RNA, 32 nt, Homo Sapiens
cacaggugccuggccaggcccaccugcugcag

SEQ ID NO: 92345 - RNA, 32 nt, Homo Sapiens
gccacgaacugcgccugcgcggcaagaauguc

SEQ ID NO: 92346 - RNA, 32 nt, Homo Sapiens
cgcugucaggccuggugaagggugugagcugu

SEQ ID NO: 92347 - RNA, 32 nt, Homo Sapiens
gcaccuuuccccagagccccagcaucccuugc

SEQ ID NO: 92348 - RNA, 32 nt, Homo Sapiens
ucuucgccccuucggcuuggcuccuacaaggc

SEQ ID NO: 92349 - RNA, 32 nt, Homo Sapiens
ccccgagcugaccccucugccugggcuuugug

SEQ ID NO: 92350 - RNA, 32 nt, Homo Sapiens
ugggaggcacaguaaagcugaugggauucugu

SEQ ID NO: 92351 - RNA, 32 nt, Homo Sapiens
guacuuuggaacgacaaaaugaaacagaacuu

SEQ ID NO: 92352 - RNA, 32 nt, Homo Sapiens
acuucaggcugggaaaggagccaggcugccca

SEQ ID NO: 92353 - RNA, 30 nt, Homo Sapiens
guuggugucuguggucgggggcgagggccg

SEQ ID NO: 92354 - RNA, 32 nt, Homo Sapiens
ggcagugugcugaguucucaguuccuggcccu

SEQ ID NO: 92355 - RNA, 32 nt, Homo Sapiens
ugguacugugugguggauacaugacaauaucc

SEQ ID NO: 92356 - RNA, 32 nt, Homo Sapiens
aaagaucagguggucuguuugccaguauugcc

SEQ ID NO: 92357 - RNA, 32 nt, Homo Sapiens
gggacgacagacggaggcgaacgccaucggua

SEQ ID NO: 92358 - RNA, 32 nt, Homo Sapiens
gacagucauauaaucguucagcacagcgccua

SEQ ID NO: 92359 - RNA, 32 nt, Homo Sapiens
gaauuuuuaaaauaaacuguaaacuaauaggc

SEQ ID NO: 92360 - RNA, 32 nt, Homo Sapiens
cacguugcugcccuuccaugauguugccaucu

SEQ ID NO: 92361 - RNA, 32 nt, Homo Sapiens
gcucccaggaccaguccaguccucuagugccu

SEQ ID NO: 92362 - RNA, 32 nt, Homo Sapiens
cggcaaggccuucgccuggagcuccaaccuca

SEQ ID NO: 92363 - RNA, 32 nt, Homo Sapiens
uguuuuagugugucaccauaaauaucaggggc

SEQ ID NO: 92364 - RNA, 32 nt, Homo Sapiens
cuuggacucgagccccggaacggcugaggagc

SEQ ID NO: 92365 - RNA, 32 nt, Homo Sapiens
cagccugggccucggcgucaaucaucgauaag

SEQ ID NO: 92366 - RNA, 32 nt, Homo Sapiens
aggacugcacuaguccagggaguaggggaccc

SEQ ID NO: 92367 - RNA, 32 nt, Homo Sapiens
acgcggggcuccugcagcauggcugucagcag

SEQ ID NO: 92368 - RNA, 32 nt, Homo Sapiens
caagggcccagcugugugcuccuuuccuguca

SEQ ID NO: 92369 - RNA, 32 nt, Homo Sapiens
ucaggaagucaagaagcaguagagcccuauuu

SEQ ID NO: 92370 - RNA, 32 nt, Homo Sapiens
aggagucuugauucuuuuuuugccucaucaga

SEQ ID NO: 92371 - RNA, 30 nt, Homo Sapiens
gagaaaggaggugguauggaagacucagca

SEQ ID NO: 92372 - RNA, 32 nt, Homo Sapiens
aggggcuccagauaauaagggugaagcaagaa

SEQ ID NO: 92373 - RNA, 30 nt, Homo Sapiens
ucugcugucugugccagugcuccugccggg

SEQ ID NO: 92374 - RNA, 32 nt, Homo Sapiens
uuauuguuucauuucuuuauuagauuaacuuu

SEQ ID NO: 92375 - RNA, 32 nt, Homo Sapiens
uucaguacaucccacagcauccuauagaaaua

SEQ ID NO: 92376 - RNA, 32 nt, Homo Sapiens
uaaagaaaacaguuccuuucugauggggagcg

SEQ ID NO: 92377 - RNA, 32 nt, Homo Sapiens
aguuaccagaauuuauaauuuauaguaauuuu

SEQ ID NO: 92378 - RNA, 32 nt, Homo Sapiens
ucaaaugaccagauuucuuucuuuuuuaaggc

SEQ ID NO: 92379 - RNA, 32 nt, Homo Sapiens
ugguccucacucccuccugcauuccucauuua

SEQ ID NO: 92380 - RNA, 32 nt, Homo Sapiens
uucaggaccggcccccaccuuuccucaggagu

SEQ ID NO: 92381 - RNA, 30 nt, Homo Sapiens
gggcgauggcggggcucuggcuggggcucg

SEQ ID NO: 92382 - RNA, 32 nt, Homo Sapiens
cccgccccgccccgcuaaccgccccagacaca

SEQ ID NO: 92383 - RNA, 32 nt, Homo Sapiens
cccggugcuggggggcagcugaggggcugcag

SEQ ID NO: 92384 - RNA, 32 nt, Homo Sapiens
aaacugcagagaaaacugaaaguuauguucca

SEQ ID NO: 92385 - RNA, 32 nt, Homo Sapiens
ugacaaauaugaacagaagaaaaugguugcuu

SEQ ID NO: 92386 - RNA, 32 nt, Homo Sapiens
gaauccccgagcugcgccuucuggggacgcgg

SEQ ID NO: 92387 - RNA, 32 nt, Homo Sapiens
auggggcagacacuccuuuuuucccaguccug

SEQ ID NO: 92388 - RNA, 32 nt, Homo Sapiens
cccuggggcuguggacaggagcucuggcuguc

SEQ ID NO: 92389 - RNA, 32 nt, Homo Sapiens
cucugguaccugcaaccacgggccgcccugug

SEQ ID NO: 92390 - RNA, 32 nt, Homo Sapiens
ucccagagacacucucccuccuccucuuucac

SEQ ID NO: 92391 - RNA, 32 nt, Homo Sapiens
uauuuauuaacagagcauccagugcaauguuu

SEQ ID NO: 92392 - RNA, 32 nt, Homo Sapiens
uauguguauguaaauuagaaaauacauaccua

SEQ ID NO: 92393 - RNA, 32 nt, Homo Sapiens
uuuaaaauaaaacuuucucaugauuucuugaa

SEQ ID NO: 92394 - RNA, 32 nt, Homo Sapiens
guucacuuuauuuaacaauuuucauguccccc

SEQ ID NO: 92395 - RNA, 32 nt, Homo Sapiens
gaacauaacgcaguuacaaaagaaagggcagg

SEQ ID NO: 92396 - RNA, 32 nt, Homo Sapiens
uuucuaauuccacaggucaucagaugccugcu

SEQ ID NO: 92397 - RNA, 32 nt, Homo Sapiens
gccucuuccuugaguucucggaaccuccuccc

SEQ ID NO: 92398 - RNA, 32 nt, Homo Sapiens
gggcuuggccaaagucacagcagguugauggc

SEQ ID NO: 92399 - RNA, 32 nt, Homo Sapiens
ggaaggaggguacagcugggcuggggaggacc

SEQ ID NO: 92400 - RNA, 32 nt, Homo Sapiens
ugacaguggguuccuuccauggcggauacucc

SEQ ID NO: 92401 - RNA, 32 nt, Homo Sapiens
guccagucagcugcuccaccggguuaggguca

SEQ ID NO: 92402 - RNA, 32 nt, Homo Sapiens
uaagacuacaguuauuuuauucuuaugagcuu

SEQ ID NO: 92403 - RNA, 32 nt, Homo Sapiens
guugauucgucugcgauuuuaucuguuaacca

SEQ ID NO: 92404 - RNA, 32 nt, Homo Sapiens
uuguaaacugcagugcauuguaaaaaugaguu

SEQ ID NO: 92405 - RNA, 32 nt, Homo Sapiens
gucacucugcgauauuucuugaaaauaacgac

SEQ ID NO: 92406 - RNA, 32 nt, Homo Sapiens
caccaugcccggcuccacggccccuacuuuuc

SEQ ID NO: 92407 - RNA, 32 nt, Homo Sapiens
aguuuuaaugaaaucuucaauucuugcagcug

SEQ ID NO: 92408 - RNA, 31 nt, Homo Sapiens
uccggccugcgcagcccggcccggccauggc

SEQ ID NO: 92409 - RNA, 32 nt, Homo Sapiens
ccauuuauuuccuauuuagauauacugacauu

SEQ ID NO: 92410 - RNA, 32 nt, Homo Sapiens
ugguggggagggagggcgggagguagauauag

SEQ ID NO: 92411 - RNA, 28 nt, Homo Sapiens
gaaggaggugcagccaggaugcucuggu

SEQ ID NO: 92412 - RNA, 32 nt, Homo Sapiens
cccuucagcucuucuccguggagcucggggcu

SEQ ID NO: 92413 - RNA, 32 nt, Homo Sapiens
ggacaggagugugggggcgccuuggcggacag

SEQ ID NO: 92414 - RNA, 32 nt, Homo Sapiens
ccacgauguuuuguuuuccugccgcaggaacg

SEQ ID NO: 92415 - RNA, 32 nt, Homo Sapiens
gcaagggggcgcggcgcacgcaguauggcgcc

SEQ ID NO: 92416 - RNA, 32 nt, Homo Sapiens
ggaaggaggaccagucuguguacuucugccaa

SEQ ID NO: 92417 - RNA, 32 nt, Homo Sapiens
cggcguccagcuccaccugaaagcgccaucuu

SEQ ID NO: 92418 - RNA, 32 nt, Homo Sapiens
accucuggccuggccugcacagagaagcccua

SEQ ID NO: 92419 - RNA, 32 nt, Homo Sapiens
cagaagcaaccuuuuucccucuucccagaaaa

SEQ ID NO: 92420 - RNA, 32 nt, Homo Sapiens
guucugucaaaugccgugaaaguauuugcuau

SEQ ID NO: 92421 - RNA, 32 nt, Homo Sapiens
auuugggacagaggaauaaacauuuccguggu

SEQ ID NO: 92422 - RNA, 32 nt, Homo Sapiens
agauacugaauacuaaucauggcauguauaua

SEQ ID NO: 92423 - RNA, 32 nt, Homo Sapiens
cauggugaaucccacuaccgugucucagaugg

SEQ ID NO: 92424 - RNA, 32 nt, Homo Sapiens
aaagaggcacauugcauagaagccauugggga

SEQ ID NO: 92425 - RNA, 32 nt, Homo Sapiens
aucaacuaaaagacaauaguaacauaauucuu

SEQ ID NO: 92426 - RNA, 32 nt, Homo Sapiens
ggguucaguaguuugggaagggagcuggggga

SEQ ID NO: 92427 - RNA, 32 nt, Homo Sapiens
acaggaaacaaauggaauauccagacaucaac

SEQ ID NO: 92428 - RNA, 32 nt, Homo Sapiens
auuuaucaaaaaucugguuugggaaauaccaa

SEQ ID NO: 92429 - RNA, 32 nt, Homo Sapiens
uuuucuggacauuucguaucaauggaaucaaa

SEQ ID NO: 92430 - RNA, 32 nt, Homo Sapiens
uaacagcauucugcacuuggaaugacaaaacu

SEQ ID NO: 92431 - RNA, 32 nt, Homo Sapiens
uuagaaugacuaguguucuuugaaagguuuuu

SEQ ID NO: 92432 - RNA, 32 nt, Homo Sapiens
caucaaucuauuugucuucucaguaguuccac

SEQ ID NO: 92433 - RNA, 32 nt, Homo Sapiens
gguccuuguguggccuggcgcgcgccacaggg

SEQ ID NO: 92434 - RNA, 32 nt, Homo Sapiens
aggagcuuuuagaaauaagauagcagaaauga

SEQ ID NO: 92435 - RNA, 32 nt, Homo Sapiens
gaaacaaagacgcaggcauacucagccagaaa

SEQ ID NO: 92436 - RNA, 32 nt, Homo Sapiens
gccccgcugccccgaacgcgggccauacgcag

SEQ ID NO: 92437 - RNA, 32 nt, Homo Sapiens
ggggccucccgccuccucccccaucccccugc

SEQ ID NO: 92438 - RNA, 31 nt, Homo Sapiens
cuacuucauuugauucagagaaauagagcau

SEQ ID NO: 92439 - RNA, 32 nt, Homo Sapiens
ugaauacauuuuacaaaggcuauugugagggc

SEQ ID NO: 92440 - RNA, 32 nt, Homo Sapiens
aaccgcccgcggcucugagacgcggccccggc

SEQ ID NO: 92441 - RNA, 32 nt, Homo Sapiens
ccuuaacuuacuguugcuuacaccccugaaag

SEQ ID NO: 92442 - RNA, 30 nt, Homo Sapiens
gcugucggcgcgcagcagcagcagcagcag

SEQ ID NO: 92443 - RNA, 32 nt, Homo Sapiens
ccccuaaaacaucagacucaccauccaggugc

SEQ ID NO: 92444 - RNA, 32 nt, Homo Sapiens
ggcgggccggggaugcgccauggccauggccc

SEQ ID NO: 92445 - RNA, 32 nt, Homo Sapiens
acugcugccugggggcgagcagccuaccagau

SEQ ID NO: 92446 - RNA, 32 nt, Homo Sapiens
uuguaauaaaauguaucaauauguuauagaug

SEQ ID NO: 92447 - RNA, 32 nt, Homo Sapiens
aaaccaaagugauucuuaauuaguauacauca

SEQ ID NO: 92448 - RNA, 32 nt, Homo Sapiens
uagcggggagaaaagggaguugguaaguuuca

SEQ ID NO: 92449 - RNA, 32 nt, Homo Sapiens
uuccucucuucccccaggaccugggcagagca

SEQ ID NO: 92450 - RNA, 32 nt, Homo Sapiens
ccuggggcuggggaucccacucuucuugcagc

SEQ ID NO: 92451 - RNA, 32 nt, Homo Sapiens
cagccagccacagguacagagcccaggacccc

SEQ ID NO: 92452 - RNA, 32 nt, Homo Sapiens
augauggaauaauaggaaaaauuggcauuggg

SEQ ID NO: 92453 - RNA, 32 nt, Homo Sapiens
caggcguugguuccccucuuugaccuggauuu

SEQ ID NO: 92454 - RNA, 32 nt, Homo Sapiens
gccaggcagccaaauggacagcucuauaagac

SEQ ID NO: 92455 - RNA, 32 nt, Homo Sapiens
cauucuguuguuuuccucugccaucuaguggc

SEQ ID NO: 92456 - RNA, 32 nt, Homo Sapiens
cggccccgccuggccaucggcaagggccgccg

SEQ ID NO: 92457 - RNA, 32 nt, Homo Sapiens
ugcuaccucuccuauuugauuguuauuuuuac

SEQ ID NO: 92458 - RNA, 32 nt, Homo Sapiens
aagcggaaagagacaaaaguauugaacuacaa

SEQ ID NO: 92459 - RNA, 31 nt, Homo Sapiens
agguguggguucccacgugggcacagagugg

SEQ ID NO: 92460 - RNA, 32 nt, Homo Sapiens
gacaccgagugugccgcgcccgggggaugccu

SEQ ID NO: 92461 - RNA, 32 nt, Homo Sapiens
caaaguucagccuggaccccagccucugccaa

SEQ ID NO: 92462 - RNA, 32 nt, Homo Sapiens
ucuacugaacuccggguuauuccuccucauuc

SEQ ID NO: 92463 - RNA, 32 nt, Homo Sapiens
uuuauauccgacguaaacaaucuccuucacga

SEQ ID NO: 92464 - RNA, 32 nt, Homo Sapiens
uuucguuuuuuuuuuucuuuuuuuucuauaua

SEQ ID NO: 92465 - RNA, 32 nt, Homo Sapiens
cuccccaaguacuuaaauguucucaucugucg

SEQ ID NO: 92466 - RNA, 32 nt, Homo Sapiens
ucauguaaauguugauaauaugcuguuuauua

SEQ ID NO: 92467 - RNA, 32 nt, Homo Sapiens
aagacuacgagagugaugggacauaaagccag

SEQ ID NO: 92468 - RNA, 32 nt, Homo Sapiens
ccagcccucagccccaggccccagcuggagaa

SEQ ID NO: 92469 - RNA, 32 nt, Homo Sapiens
ggcucugggcuugacggucuccagcuccccuu

SEQ ID NO: 92470 - RNA, 32 nt, Homo Sapiens
cagcgcgcagccuucccggcgccggcgggcug

SEQ ID NO: 92471 - RNA, 32 nt, Homo Sapiens
acuaucaggaaaaaacaaaacaaaaacaaaau

SEQ ID NO: 92472 - RNA, 32 nt, Homo Sapiens
aagaaauuggccacagaagagcaagaagcucu

SEQ ID NO: 92473 - RNA, 32 nt, Homo Sapiens
ucauuuggcuccuggggccugcaguggagguu

SEQ ID NO: 92474 - RNA, 32 nt, Homo Sapiens
cccaacccugucauuauuuccccuccgacugg

SEQ ID NO: 92475 - RNA, 32 nt, Homo Sapiens
uugugaaagacauaggggaaguacuaauuuuu

SEQ ID NO: 92476 - RNA, 32 nt, Homo Sapiens
ugugaggcccccggaggcgcccaccugcccag

SEQ ID NO: 92477 - RNA, 32 nt, Homo Sapiens
cucucuaaagggcauauacauggcaucugcca

SEQ ID NO: 92478 - RNA, 32 nt, Homo Sapiens
ugaaccaagaacaggaaaauuuuuuggcugua

SEQ ID NO: 92479 - RNA, 32 nt, Homo Sapiens
aagggcaagaaaaaagggaggggguuggaguu

SEQ ID NO: 92480 - RNA, 29 nt, Homo Sapiens
uaaacagggggacagagcgccuuccaccu

SEQ ID NO: 92481 - RNA, 32 nt, Homo Sapiens
ccaacccgcgcccucuccucucuuccugccaa

SEQ ID NO: 92482 - RNA, 32 nt, Homo Sapiens
ggagggccgggcgcgccggccggauagcgagc

SEQ ID NO: 92483 - RNA, 32 nt, Homo Sapiens
accaucugcacccccacauucuccucgcggga

SEQ ID NO: 92484 - RNA, 31 nt, Homo Sapiens
aucccguguaacauaaguggugcccaccaug

SEQ ID NO: 92485 - RNA, 32 nt, Homo Sapiens
uagcacugaacaaacaaaaaacaaaacgcuca

SEQ ID NO: 92486 - RNA, 32 nt, Homo Sapiens
guguggagggggagcagggauaucuaagcugu

SEQ ID NO: 92487 - RNA, 30 nt, Homo Sapiens
aguuucggcaggcgggugaggucgcugagg

SEQ ID NO: 92488 - RNA, 32 nt, Homo Sapiens
acaggaaauguuuucuucuacauggaaagaua

SEQ ID NO: 92489 - RNA, 32 nt, Homo Sapiens
aauauuuuguuguuuuuacuaugugggucuug

SEQ ID NO: 92490 - RNA, 32 nt, Homo Sapiens
agagcccucucuauccacuuggucuggccagc

SEQ ID NO: 92491 - RNA, 32 nt, Homo Sapiens
ccaacaacauacagggaagagauacaggaucu

SEQ ID NO: 92492 - RNA, 32 nt, Homo Sapiens
caggagcuccagugcagccccaucccaggaug

SEQ ID NO: 92493 - RNA, 32 nt, Homo Sapiens
cuguucucuucggaagaccucguuuucuaaag

SEQ ID NO: 92494 - RNA, 32 nt, Homo Sapiens
cuucuaaagagauuagaguuuuacugagacca

SEQ ID NO: 92495 - RNA, 32 nt, Homo Sapiens
gcgcucggacugucccauccgccccguauuga

SEQ ID NO: 92496 - RNA, 32 nt, Homo Sapiens
augcuacccuccccgccucccuccacagugau

SEQ ID NO: 92497 - RNA, 32 nt, Homo Sapiens
agcaccugcuccagcucaagaaugugcggauc

SEQ ID NO: 92498 - RNA, 31 nt, Homo Sapiens
ccuccugcucacugccucuccugaguagaaa

SEQ ID NO: 92499 - RNA, 32 nt, Homo Sapiens
gagguagaagauggggaagaugagaugucaga

SEQ ID NO: 92500 - RNA, 32 nt, Homo Sapiens
cuccagggaggagcguggagcggcagcggcgg

SEQ ID NO: 92501 - RNA, 32 nt, Homo Sapiens
cagaguagcugguguccuccccccucagccua

SEQ ID NO: 92502 - RNA, 32 nt, Homo Sapiens
ccucacccucucuccagacccacagccagcuu

SEQ ID NO: 92503 - RNA, 32 nt, Homo Sapiens
uuuacagugaaagacacaaauaaaauacaacu

SEQ ID NO: 92504 - RNA, 32 nt, Homo Sapiens
cugugcuuguggcugcggcugcuaacuggcug

SEQ ID NO: 92505 - RNA, 32 nt, Homo Sapiens
guccccccaucccguuucccuccagguguugu

SEQ ID NO: 92506 - RNA, 32 nt, Homo Sapiens
agauguuuuuaugaagucucuuucugaucacg

SEQ ID NO: 92507 - RNA, 32 nt, Homo Sapiens
cugcuaauaaagacauaauugaaacuggguaa

SEQ ID NO: 92508 - RNA, 32 nt, Homo Sapiens
uguccucccuccccaucccugaccuggcgaaa

SEQ ID NO: 92509 - RNA, 32 nt, Homo Sapiens
gaguuuuuucuuccucauccaccgcugcugag

SEQ ID NO: 92510 - RNA, 32 nt, Homo Sapiens
gcccucauggaaagagcugagccgcuucagac

SEQ ID NO: 92511 - RNA, 32 nt, Homo Sapiens
gugguucucuucauccauuuguuuucacacug

SEQ ID NO: 92512 - RNA, 32 nt, Homo Sapiens
ggagcccgcugcaggccagcucugcuguucac

SEQ ID NO: 92513 - RNA, 32 nt, Homo Sapiens
acucucaacagggcauguagucugcacucaag

SEQ ID NO: 92514 - RNA, 32 nt, Homo Sapiens
uagcggaaagggcucgccguccuccuccguuu

SEQ ID NO: 92515 - RNA, 32 nt, Homo Sapiens
gcacccuccgcgcgcccugccggagcgagggg

SEQ ID NO: 92516 - RNA, 32 nt, Homo Sapiens
guccuccacuggcccagcacuccaguuuccuu

SEQ ID NO: 92517 - RNA, 32 nt, Homo Sapiens
guuauuaauuuaauaaaauucaucaucagguu

SEQ ID NO: 92518 - RNA, 32 nt, Homo Sapiens
gcugaucgcucgugccggugcggccguuaacc

SEQ ID NO: 92519 - RNA, 27 nt, Homo Sapiens
ugguuugaccucuucagcccguccggu

SEQ ID NO: 92520 - RNA, 32 nt, Homo Sapiens
aucugcauuaagcugcuucucaucacauuaua

SEQ ID NO: 92521 - RNA, 32 nt, Homo Sapiens
ccagguaaauagugaggccaaacacaagaggc

SEQ ID NO: 92522 - RNA, 32 nt, Homo Sapiens
gauuacacaacaccaucauugccaaccaaguc

SEQ ID NO: 92523 - RNA, 32 nt, Homo Sapiens
gcugcccccuccuccccuccccagugagggac

SEQ ID NO: 92524 - RNA, 32 nt, Homo Sapiens
ugacugugaugcuggaaaaaauuuacuaaaua

SEQ ID NO: 92525 - RNA, 32 nt, Homo Sapiens
aguuuagugguuguauagggcuggggucagga

SEQ ID NO: 92526 - RNA, 32 nt, Homo Sapiens
agcaaaguuaguagaggaggcagcuaggcgug

SEQ ID NO: 92527 - RNA, 32 nt, Homo Sapiens
ugaccacccccucccucacaccugugggcagg

SEQ ID NO: 92528 - RNA, 32 nt, Homo Sapiens
aggccacgcagcgcccgagaguaccagggaga

SEQ ID NO: 92529 - RNA, 32 nt, Homo Sapiens
acucugggcugcgcagcccccggcgccacggc

SEQ ID NO: 92530 - RNA, 32 nt, Homo Sapiens
uuucuuguuuuaaaauaggguuuggagucucu

SEQ ID NO: 92531 - RNA, 32 nt, Homo Sapiens
gcuaaguugcugucguggcggucagugguguc

SEQ ID NO: 92532 - RNA, 32 nt, Homo Sapiens
ugauugcuuucuuuucuggugauaucugugcu

SEQ ID NO: 92533 - RNA, 32 nt, Homo Sapiens
aaguucauuguaaaauggcuuuacugccauca

SEQ ID NO: 92534 - RNA, 27 nt, Homo Sapiens
gcccugcccuucuucccacccccucaa

SEQ ID NO: 92535 - RNA, 32 nt, Homo Sapiens
uugcuaaaaaucaacugugcgcuugaaagacc

SEQ ID NO: 92536 - RNA, 32 nt, Homo Sapiens
ggggaacggccgcgaucggggccgcagccacg

SEQ ID NO: 92537 - RNA, 32 nt, Homo Sapiens
gguaccagcucuucuuuguauaucugauagaa

SEQ ID NO: 92538 - RNA, 32 nt, Homo Sapiens
ugagccaccaaaauacacugcauuacagaaau

SEQ ID NO: 92539 - RNA, 32 nt, Homo Sapiens
accucaccagcuugugguggguacccugugau

SEQ ID NO: 92540 - RNA, 32 nt, Homo Sapiens
caucccugucuuccucauguucacacuugucu

SEQ ID NO: 92541 - RNA, 32 nt, Homo Sapiens
caaaaauaaacuauuuaaauaaucuguuguua

SEQ ID NO: 92542 - RNA, 32 nt, Homo Sapiens
ugccugcccacgcuccuucuuuagcucugaca

SEQ ID NO: 92543 - RNA, 32 nt, Homo Sapiens
aaauuagucuuggaaaaaaaccacagccacua

SEQ ID NO: 92544 - RNA, 32 nt, Homo Sapiens
cccacauccuucccauguuuccucuucccaaa

SEQ ID NO: 92545 - RNA, 32 nt, Homo Sapiens
accuuuuuucuucuaggucuccaggucccgga

SEQ ID NO: 92546 - RNA, 32 nt, Homo Sapiens
uuguuuugacuucuuuaauguuugaauguuuc

SEQ ID NO: 92547 - RNA, 32 nt, Homo Sapiens
uauucaucaaaauaaaauaacuuguucugaag

SEQ ID NO: 92548 - RNA, 32 nt, Homo Sapiens
uuguuaauagcaugguauauguuauuuaacgc

SEQ ID NO: 92549 - RNA, 32 nt, Homo Sapiens
ucgcucugcuaagcaagggcagccgcugcacg

SEQ ID NO: 92550 - RNA, 32 nt, Homo Sapiens
uacuuacucuguaucucuuuguacucuguauc

SEQ ID NO: 92551 - RNA, 32 nt, Homo Sapiens
gaauugagaaaugggguauuuuugcuaucagc

SEQ ID NO: 92552 - RNA, 32 nt, Homo Sapiens
ucucaguaccaagagggggauggcucuaugga

SEQ ID NO: 92553 - RNA, 32 nt, Homo Sapiens
agaaagugguauuccauaaaccuaccaacuca

SEQ ID NO: 92554 - RNA, 32 nt, Homo Sapiens
gaccguggucgugggcggacggcggcuugcag

SEQ ID NO: 92555 - RNA, 32 nt, Homo Sapiens
guauuuaaaaauuaacucauuaguaucauaaa

SEQ ID NO: 92556 - RNA, 32 nt, Homo Sapiens
gccgccgccugacuucggacaccggccccgca

SEQ ID NO: 92557 - RNA, 32 nt, Homo Sapiens
acuguugacccggcccguacugcggccccgug

SEQ ID NO: 92558 - RNA, 32 nt, Homo Sapiens
agugugagcgccccgaggugcuuucucaguug

SEQ ID NO: 92559 - RNA, 32 nt, Homo Sapiens
aaagcuuaaaagacaaaugagacagagcuagg

SEQ ID NO: 92560 - RNA, 29 nt, Homo Sapiens
aacaggugaaguuuauuugccugacguuu

SEQ ID NO: 92561 - RNA, 32 nt, Homo Sapiens
cauaacauccugccuccgagagcgcggucugg

SEQ ID NO: 92562 - RNA, 32 nt, Homo Sapiens
guauuuaagaugaaaaacaggauacuacaaag

SEQ ID NO: 92563 - RNA, 32 nt, Homo Sapiens
guguggaugggcggggcaagccgucggggagc

SEQ ID NO: 92564 - RNA, 32 nt, Homo Sapiens
ggaugggcggcacugugcggcucuggggagcu

SEQ ID NO: 92565 - RNA, 32 nt, Homo Sapiens
uuauacugcaaaagaagugaaacuauauguau

SEQ ID NO: 92566 - RNA, 32 nt, Homo Sapiens
cauauugagauggauauuuaacucugucaaac

SEQ ID NO: 92567 - RNA, 32 nt, Homo Sapiens
aggagauccagguuuaaaucuggcuuauuaac

SEQ ID NO: 92568 - RNA, 32 nt, Homo Sapiens
agcuuccaggacuguucaaucuuuuggcuucc

SEQ ID NO: 92569 - RNA, 32 nt, Homo Sapiens
gcccuccaugcacaaguugcagagcacccuca

SEQ ID NO: 92570 - RNA, 32 nt, Homo Sapiens
ccauuaauuuaaaugauuuaaauuuaaguaag

SEQ ID NO: 92571 - RNA, 32 nt, Homo Sapiens
gacagcacagaaauaaagagcaauaaaaagaa

SEQ ID NO: 92572 - RNA, 32 nt, Homo Sapiens
gggccgaggaggaggauggcauauaccggccc

SEQ ID NO: 92573 - RNA, 32 nt, Homo Sapiens
ugggguccacacuccuggacagggcucugguc

SEQ ID NO: 92574 - RNA, 32 nt, Homo Sapiens
cgagcacgccgcgacccugcgugcgccggggc

SEQ ID NO: 92575 - RNA, 32 nt, Homo Sapiens
agggaagggaccaauuaauuuuaaaacucacu

SEQ ID NO: 92576 - RNA, 32 nt, Homo Sapiens
gggugaguggcuugcuuggugggaccugacga

SEQ ID NO: 92577 - RNA, 32 nt, Homo Sapiens
uuggguuuuuucuguuuguacucuuggggaau

SEQ ID NO: 92578 - RNA, 32 nt, Homo Sapiens
ccuucugucucguucugcccuagcuggcagca

SEQ ID NO: 92579 - RNA, 32 nt, Homo Sapiens
cccccacccauccaguucuccucagcaaagca

SEQ ID NO: 92580 - RNA, 32 nt, Homo Sapiens
uaggccgcuccccugaggaucccaggaaccuc

SEQ ID NO: 92581 - RNA, 31 nt, Homo Sapiens
auccugaaauaaaaaagcaagaauaugaaga

SEQ ID NO: 92582 - RNA, 32 nt, Homo Sapiens
ucauucuacucuaguugaaacucuguacagau

SEQ ID NO: 92583 - RNA, 32 nt, Homo Sapiens
augaggaggaccaguuccucagguccuccaga

SEQ ID NO: 92584 - RNA, 32 nt, Homo Sapiens
gggcagggcagggggagggagucacgggauuu

SEQ ID NO: 92585 - RNA, 32 nt, Homo Sapiens
uuauucugaauuauuuuagaaaacaacugagg

SEQ ID NO: 92586 - RNA, 32 nt, Homo Sapiens
uucugugggaagggcuguagcugauccauccg

SEQ ID NO: 92587 - RNA, 30 nt, Homo Sapiens
auaccguguuuucgcuauuuaauaagaagu

SEQ ID NO: 92588 - RNA, 32 nt, Homo Sapiens
aaaacuacaauucccagcauuccuguggugcc

SEQ ID NO: 92589 - RNA, 32 nt, Homo Sapiens
ucacacgagggaagucaguaaaaacuacgagc

SEQ ID NO: 92590 - RNA, 32 nt, Homo Sapiens
cugcgccccucaggccagcaguugagguccau

SEQ ID NO: 92591 - RNA, 32 nt, Homo Sapiens
aucucauccuaagcaugcuuuauuuuuccuug

SEQ ID NO: 92592 - RNA, 32 nt, Homo Sapiens
uuuggauuuaagaaguuauuuucacauguucu

SEQ ID NO: 92593 - RNA, 32 nt, Homo Sapiens
cgucuggucaacuuagcacaagggcagugccu

SEQ ID NO: 92594 - RNA, 32 nt, Homo Sapiens
uagacagcggacagacgcucacgcccagggga

SEQ ID NO: 92595 - RNA, 32 nt, Homo Sapiens
ggcuguggcuccuguuugugaagagaacuccc

SEQ ID NO: 92596 - RNA, 32 nt, Homo Sapiens
ccucagagccuggccugguugugagugugugu

SEQ ID NO: 92597 - RNA, 32 nt, Homo Sapiens
cauuuuugcagcaguaaaauggcucugucuuc

SEQ ID NO: 92598 - RNA, 32 nt, Homo Sapiens
gaaagcgugugagugagggagacaggaacggc

SEQ ID NO: 92599 - RNA, 32 nt, Homo Sapiens
uuugucauugcaucuuuuuuucauuuuuaaau

SEQ ID NO: 92600 - RNA, 32 nt, Homo Sapiens
auagcucacuggaaaaugauguuaaaguaaga

SEQ ID NO: 92601 - RNA, 32 nt, Homo Sapiens
agccuccaggcacuucugcucucuggcaggca

SEQ ID NO: 92602 - RNA, 32 nt, Homo Sapiens
auguuucauuuucucuuggccauuaucccuau

SEQ ID NO: 92603 - RNA, 32 nt, Homo Sapiens
gguucaggaaaauugaaugcaaaccauagcac

SEQ ID NO: 92604 - RNA, 32 nt, Homo Sapiens
gcccacucccccacccaccacugugcguuucu

SEQ ID NO: 92605 - RNA, 31 nt, Homo Sapiens
uggaauugugagugaaggauauaguggcagg

SEQ ID NO: 92606 - RNA, 32 nt, Homo Sapiens
uuggggacugcaggaaucaucuccccugggcc

SEQ ID NO: 92607 - RNA, 32 nt, Homo Sapiens
cucccauccuucccucaugcccgccagugcac

SEQ ID NO: 92608 - RNA, 32 nt, Homo Sapiens
ugugaggaauuugaauuuagaguuuaauuucu

SEQ ID NO: 92609 - RNA, 32 nt, Homo Sapiens
gggaacagccuggcccaaagccucacuccuca

SEQ ID NO: 92610 - RNA, 32 nt, Homo Sapiens
uguuuucugcuaguaguuuugcagcuucgggu

SEQ ID NO: 92611 - RNA, 32 nt, Homo Sapiens
cagcgccgccgcuuccacgccucccccagggc

SEQ ID NO: 92612 - RNA, 32 nt, Homo Sapiens
uguaaauaaaauguguacagugaauugucuuu

SEQ ID NO: 92613 - RNA, 32 nt, Homo Sapiens
cugcaaccagcauagccugacucucagagacc

SEQ ID NO: 92614 - RNA, 32 nt, Homo Sapiens
acguacacauuuaagaucuguuuggacgcgga

SEQ ID NO: 92615 - RNA, 32 nt, Homo Sapiens
cccuucaucuucauggcccaccuguuuucugc

SEQ ID NO: 92616 - RNA, 32 nt, Homo Sapiens
guagacaaaugugaaaguaaauuuaugcuuaa

SEQ ID NO: 92617 - RNA, 32 nt, Homo Sapiens
ccuccuccaagucuucuguucccuuugggcgc

SEQ ID NO: 92618 - RNA, 32 nt, Homo Sapiens
cugagacgcucgccccgacgcauggacccgag

SEQ ID NO: 92619 - RNA, 32 nt, Homo Sapiens
aaaugucuguuguuuauuaccuguccaguauc

SEQ ID NO: 92620 - RNA, 32 nt, Homo Sapiens
ugaaaccccgucucuacaaaaauagaaaaauu

SEQ ID NO: 92621 - RNA, 32 nt, Homo Sapiens
uguaucccacugauaggagguguuggguggug

SEQ ID NO: 92622 - RNA, 32 nt, Homo Sapiens
ugacgugcuuugcaugagaagcucaucuagaa

SEQ ID NO: 92623 - RNA, 32 nt, Homo Sapiens
uugugguaaucgucugaucauauaaaccaccc

SEQ ID NO: 92624 - RNA, 32 nt, Homo Sapiens
guggaugcugccuaccccggcgcccgcgucuu

SEQ ID NO: 92625 - RNA, 32 nt, Homo Sapiens
guggaggaccucagcccugcccugcccuccuc

SEQ ID NO: 92626 - RNA, 32 nt, Homo Sapiens
ggguuuuuguugccuuuuuuuuuucuuuuuuc

SEQ ID NO: 92627 - RNA, 32 nt, Homo Sapiens
cacacacugggcguucccggcacgggagaggc

SEQ ID NO: 92628 - RNA, 32 nt, Homo Sapiens
agugaagggauuaauauugaccagagccaaug

SEQ ID NO: 92629 - RNA, 32 nt, Homo Sapiens
gggaacagaaaagagucccugcugggcaugcu

SEQ ID NO: 92630 - RNA, 32 nt, Homo Sapiens
cuucuggggggccugucugggagcugggaacg

SEQ ID NO: 92631 - RNA, 30 nt, Homo Sapiens
acggaggccguucagucgcuucuguuuaga

SEQ ID NO: 92632 - RNA, 32 nt, Homo Sapiens
cuuacugggaucugguuuucauuuuccggucc

SEQ ID NO: 92633 - RNA, 32 nt, Homo Sapiens
uuugugcugagugcuguacauguauuaguucc

SEQ ID NO: 92634 - RNA, 32 nt, Homo Sapiens
ccgaggagaaugccagccagggcccgggagag

SEQ ID NO: 92635 - RNA, 32 nt, Homo Sapiens
ggugagcgaaccccaagccaccccccacccca

SEQ ID NO: 92636 - RNA, 30 nt, Homo Sapiens
gcgaagucugguaggacgaagcggagagag

SEQ ID NO: 92637 - RNA, 32 nt, Homo Sapiens
acuagcuccccuccccucucccuggaacuuuc

SEQ ID NO: 92638 - RNA, 30 nt, Homo Sapiens
ggguaguggcgggggccgccggcgggucgu

SEQ ID NO: 92639 - RNA, 32 nt, Homo Sapiens
ggucgccaccggcgcccucccuccgcgccucc

SEQ ID NO: 92640 - RNA, 24 nt, Homo Sapiens
ugccuggaugucccugcccuggcu

SEQ ID NO: 92641 - RNA, 32 nt, Homo Sapiens
aggcucgcacucuugucuucuggucacaccuc

SEQ ID NO: 92642 - RNA, 32 nt, Homo Sapiens
uuuauucuugcuuuuccaugcuucucuacagg

SEQ ID NO: 92643 - RNA, 32 nt, Homo Sapiens
cccaccuucccaguucuaggccaggcaccgcc

SEQ ID NO: 92644 - RNA, 32 nt, Homo Sapiens
aagccuuaaguaccaaauuuuaaagcagcagu

SEQ ID NO: 92645 - RNA, 32 nt, Homo Sapiens
cgcuuccgcucgcccuggggccgcucagggag

SEQ ID NO: 92646 - RNA, 32 nt, Homo Sapiens
ugcuuugugcuuucauauaccauccccacccc

SEQ ID NO: 92647 - RNA, 32 nt, Homo Sapiens
cccacuuccuuucauuuccccagccuaggcaa

SEQ ID NO: 92648 - RNA, 32 nt, Homo Sapiens
aaauuugugguuuuaaacuuucuaaaucaugg

SEQ ID NO: 92649 - RNA, 32 nt, Homo Sapiens
ugccauucuggugagaaaaagcgugacauuug

SEQ ID NO: 92650 - RNA, 32 nt, Homo Sapiens
gaggagaauucaggugaucucuguggagguag

SEQ ID NO: 92651 - RNA, 32 nt, Homo Sapiens
cagaacuaaaugauaaaaaugaaaauuaauca

SEQ ID NO: 92652 - RNA, 32 nt, Homo Sapiens
cgcucgugugcaggcccggcucggcuccuggu

SEQ ID NO: 92653 - RNA, 32 nt, Homo Sapiens
ccauuccccaagaacguacaaaaguuaagcuc

SEQ ID NO: 92654 - RNA, 32 nt, Homo Sapiens
caucuccagcauuuccucucaccucuguguuc

SEQ ID NO: 92655 - RNA, 32 nt, Homo Sapiens
cagauaccaaaauaaacccuaacugaacaugu

SEQ ID NO: 92656 - RNA, 32 nt, Homo Sapiens
ugaguccuuucugcuagcugggugguaucuuu

SEQ ID NO: 92657 - RNA, 32 nt, Homo Sapiens
uuguaaauacucaguuuuauacuguauguaua

SEQ ID NO: 92658 - RNA, 32 nt, Homo Sapiens
cucucacccuaaaauauaccuuaagagacuuu

SEQ ID NO: 92659 - RNA, 32 nt, Homo Sapiens
ggagggugggcaccagauggggaccagccuug

SEQ ID NO: 92660 - RNA, 32 nt, Homo Sapiens
cggggcuacggggcccuuggugucuuucacug

SEQ ID NO: 92661 - RNA, 32 nt, Homo Sapiens
aagcggcggcauaggagucaugccaagcauag

SEQ ID NO: 92662 - RNA, 32 nt, Homo Sapiens
gcaacgaagguaccauggccguugucgucgcc

SEQ ID NO: 92663 - RNA, 32 nt, Homo Sapiens
gucauccccaggccggccccagucucugcugg

SEQ ID NO: 92664 - RNA, 28 nt, Homo Sapiens
uaagggaaagauuuuaauauuaaaccug

SEQ ID NO: 92665 - RNA, 32 nt, Homo Sapiens
auuucuuugauacuugaaauagagggagcuag

SEQ ID NO: 92666 - RNA, 29 nt, Homo Sapiens
cucaugaugaagauucuugagccccauuu

SEQ ID NO: 92667 - RNA, 32 nt, Homo Sapiens
gucuguauuuauaauuuauuugaaaugugcug

SEQ ID NO: 92668 - RNA, 30 nt, Homo Sapiens
cugugaagauuuugccacuaacucuagauu

SEQ ID NO: 92669 - RNA, 32 nt, Homo Sapiens
gagaucauuaauuuagauacaaaccugguuga

SEQ ID NO: 92670 - RNA, 32 nt, Homo Sapiens
gcucugugguuuuaagaccacagugugacagu

SEQ ID NO: 92671 - RNA, 32 nt, Homo Sapiens
cccaaaggguuuguauucugcuaaaaggagau

SEQ ID NO: 92672 - RNA, 32 nt, Homo Sapiens
auuucugcagcuucagcagcucugcucagaca

SEQ ID NO: 92673 - RNA, 32 nt, Homo Sapiens
cgugcugcgaggugggggacccugggcaggaa

SEQ ID NO: 92674 - RNA, 32 nt, Homo Sapiens
uguguaugcguguguguagacacacacgcaua

SEQ ID NO: 92675 - RNA, 32 nt, Homo Sapiens
ugcaguuauugcucauauucucucuuuguuuu

SEQ ID NO: 92676 - RNA, 32 nt, Homo Sapiens
cuccggugcuguaaaacgcaggcgcugggccg

SEQ ID NO: 92677 - RNA, 32 nt, Homo Sapiens
cacucacucacuuuuccacuuuugauaagaug

SEQ ID NO: 92678 - RNA, 32 nt, Homo Sapiens
gggcaggacagccucaggaucccaggucccaa

SEQ ID NO: 92679 - RNA, 32 nt, Homo Sapiens
gacucugggccuccccgcaaaauggcuccaga

SEQ ID NO: 92680 - RNA, 32 nt, Homo Sapiens
acuuuuuucauuagauuggucuucaagaacag

SEQ ID NO: 92681 - RNA, 32 nt, Homo Sapiens
ccgcucugccagcuuggucccccggcagacgc

SEQ ID NO: 92682 - RNA, 32 nt, Homo Sapiens
cgugccugaccgaggccgcgccagggcgcugu

SEQ ID NO: 92683 - RNA, 32 nt, Homo Sapiens
ucaucagcaucuuuucuauuaagagguaaaau

SEQ ID NO: 92684 - RNA, 32 nt, Homo Sapiens
uguuugaaauuuuaaaguacuuuugguuauuu

SEQ ID NO: 92685 - RNA, 32 nt, Homo Sapiens
uuguuuguuuuuaauugcaguaccucacuucu

SEQ ID NO: 92686 - RNA, 32 nt, Homo Sapiens
gggaacguuucccccacuguguuccagugcag

SEQ ID NO: 92687 - RNA, 32 nt, Homo Sapiens
uuuuuagccugccccuggcccaggcccagucc

SEQ ID NO: 92688 - RNA, 32 nt, Homo Sapiens
cuugacccaaaugaaauauuaaccuaagguca

SEQ ID NO: 92689 - RNA, 32 nt, Homo Sapiens
gucuccacggagcccucgggaccugcugcacc

SEQ ID NO: 92690 - RNA, 30 nt, Homo Sapiens
ucgugggcgcccgcauuggugcugacauaa

SEQ ID NO: 92691 - RNA, 32 nt, Homo Sapiens
auuucucuaauaaaucagaacuuauugcaacu

SEQ ID NO: 92692 - RNA, 32 nt, Homo Sapiens
uggagaggccccaggaagcuuccaaccguggu

SEQ ID NO: 92693 - RNA, 32 nt, Homo Sapiens
gugauuuucaacauauauauuaauuuauaguc

SEQ ID NO: 92694 - RNA, 32 nt, Homo Sapiens
acaaguaauauuaauaccgcauggggagaacc

SEQ ID NO: 92695 - RNA, 32 nt, Homo Sapiens
gccugaccgacccgugggagcgaggccaaacc

SEQ ID NO: 92696 - RNA, 32 nt, Homo Sapiens
ugauguauucagugaauaaaagaaucccuuuu

SEQ ID NO: 92697 - RNA, 32 nt, Homo Sapiens
ccagcuuccugcccuccaccgggagucugcau

SEQ ID NO: 92698 - RNA, 32 nt, Homo Sapiens
aaaugcugcauaaaaauaaaagugguguguuu

SEQ ID NO: 92699 - RNA, 32 nt, Homo Sapiens
cgcagcccgcggcgcggcauggcuuccccgcg

SEQ ID NO: 92700 - RNA, 32 nt, Homo Sapiens
uacagaugucaacuccuuggggugcugaucuc

SEQ ID NO: 92701 - RNA, 31 nt, Homo Sapiens
ucagcugcauccuaugcuccaaggccuuuca

SEQ ID NO: 92702 - RNA, 32 nt, Homo Sapiens
aggcauucuggacacgcacacacacacacaca

SEQ ID NO: 92703 - RNA, 32 nt, Homo Sapiens
guauuucagaaccacugacugcucuugacagu

SEQ ID NO: 92704 - RNA, 32 nt, Homo Sapiens
gacccugccucgggaaucccgcucugcaccgc

SEQ ID NO: 92705 - RNA, 32 nt, Homo Sapiens
ccuuccaauuucugcggcuccauccuaagcca

SEQ ID NO: 92706 - RNA, 32 nt, Homo Sapiens
ucuacucuaaauuuauauuaauuuauauucaa

SEQ ID NO: 92707 - RNA, 32 nt, Homo Sapiens
aaggggagacaaaaccacugcagaccuaccac

SEQ ID NO: 92708 - RNA, 32 nt, Homo Sapiens
guugccaggugucacugaugcuacagaacagc

SEQ ID NO: 92709 - RNA, 32 nt, Homo Sapiens
uuugcuagacauuagugggaugcaagcagaaa

SEQ ID NO: 92710 - RNA, 32 nt, Homo Sapiens
gaucagagcuugaacacaggcuuauuuuuaaa

SEQ ID NO: 92711 - RNA, 27 nt, Homo Sapiens
ucauguccaugcucguggucuuucucu

SEQ ID NO: 92712 - RNA, 32 nt, Homo Sapiens
guuuguucguucauugaguauuucauaacaau

SEQ ID NO: 92713 - RNA, 31 nt, Homo Sapiens
uuggucccacccuuguucgaacaucagaaga

SEQ ID NO: 92714 - RNA, 32 nt, Homo Sapiens
cagcgugcagguuuucuguuucuguguugugg

SEQ ID NO: 92715 - RNA, 32 nt, Homo Sapiens
uggcucuuuuucugcucacgggaacuuagcag

SEQ ID NO: 92716 - RNA, 32 nt, Homo Sapiens
agcugagccugggacaggucuuugaaagcuac

SEQ ID NO: 92717 - RNA, 32 nt, Homo Sapiens
aaauuauauaucuaucuaucuauacagcggaa

SEQ ID NO: 92718 - RNA, 32 nt, Homo Sapiens
cugagaacagaaacuggaagauacgucugagu

SEQ ID NO: 92719 - RNA, 32 nt, Homo Sapiens
gugggcaggaccaugucucugguaagccagaa

SEQ ID NO: 92720 - RNA, 32 nt, Homo Sapiens
aagaagggcaaagauaagaacaauauuagcug

SEQ ID NO: 92721 - RNA, 32 nt, Homo Sapiens
cuacagcuccagauguuucucauuuuaaacaa

SEQ ID NO: 92722 - RNA, 32 nt, Homo Sapiens
auauuugcauuauauuuaccaauuuagcaucc

SEQ ID NO: 92723 - RNA, 32 nt, Homo Sapiens
guauuagcauuucuuucaacccuaaguauggg

SEQ ID NO: 92724 - RNA, 32 nt, Homo Sapiens
ccucccggcagcucagccuguggcucuugagg

SEQ ID NO: 92725 - RNA, 32 nt, Homo Sapiens
uuuuuaucauugauuauaagugguauauuugu

SEQ ID NO: 92726 - RNA, 32 nt, Homo Sapiens
agcuguuuuuucauuacucccccgcaugaggu

SEQ ID NO: 92727 - RNA, 32 nt, Homo Sapiens
cacguaggccccaggggaggccucagcagcag

SEQ ID NO: 92728 - RNA, 32 nt, Homo Sapiens
guguggaccaaggagcuuccaucuagugacaa

SEQ ID NO: 92729 - RNA, 32 nt, Homo Sapiens
caggccagaguccuggccccccuggcgcucgg

SEQ ID NO: 92730 - RNA, 32 nt, Homo Sapiens
cuggagaucuagaagacccaugguaccuuaaa

SEQ ID NO: 92731 - RNA, 32 nt, Homo Sapiens
ccggucccaacccccucgggccccauggguca

SEQ ID NO: 92732 - RNA, 32 nt, Homo Sapiens
ugagaggacaggggcugcuggcucugaugucu

SEQ ID NO: 92733 - RNA, 32 nt, Homo Sapiens
ugacaaaggcagaaugcuugugagauuauaag

SEQ ID NO: 92734 - RNA, 32 nt, Homo Sapiens
ugccaauuuuucaaugaaaugaccuaaaaaca

SEQ ID NO: 92735 - RNA, 32 nt, Homo Sapiens
guggacucgccuguaaucucacuacacaggag

SEQ ID NO: 92736 - RNA, 32 nt, Homo Sapiens
acccuacuugaugaggaccauuugcuugugcu

SEQ ID NO: 92737 - RNA, 32 nt, Homo Sapiens
guguaggaacagagacccgccuuaagagacug

SEQ ID NO: 92738 - RNA, 32 nt, Homo Sapiens
cagauagguaaggccaacuuuuuguauacuug

SEQ ID NO: 92739 - RNA, 32 nt, Homo Sapiens
gcuccuuaugaucaugcucagcccuugguggg

SEQ ID NO: 92740 - RNA, 32 nt, Homo Sapiens
uuugaacaaagugaugauuuguguguauuaau

SEQ ID NO: 92741 - RNA, 32 nt, Homo Sapiens
guugggccugggcuacugcucacccugguuag

SEQ ID NO: 92742 - RNA, 32 nt, Homo Sapiens
uaccagggcgcggcgcuggguugccacacuug

SEQ ID NO: 92743 - RNA, 30 nt, Homo Sapiens
guggagaucuucgcgucgcugccgggcacg

SEQ ID NO: 92744 - RNA, 32 nt, Homo Sapiens
augaggcuuccaggcguccgcucgcggcccgc

SEQ ID NO: 92745 - RNA, 32 nt, Homo Sapiens
gggugggaggcacaagaucauuccuguuguac

SEQ ID NO: 92746 - RNA, 32 nt, Homo Sapiens
cugugguaugugggaaucgaucugugagcaua

SEQ ID NO: 92747 - RNA, 32 nt, Homo Sapiens
aaaugugaaagacagaaguuuauuuaauguag

SEQ ID NO: 92748 - RNA, 32 nt, Homo Sapiens
gcaauuguaguaacugacacauccucucuuug

SEQ ID NO: 92749 - RNA, 32 nt, Homo Sapiens
guauaguucaguaauuugaauguuuguucaau

SEQ ID NO: 92750 - RNA, 32 nt, Homo Sapiens
uuagcugggcaugauggcgugugccuguaguc

SEQ ID NO: 92751 - RNA, 30 nt, Homo Sapiens
aagaaagauaaaaggcggaguccuguaaau

SEQ ID NO: 92752 - RNA, 32 nt, Homo Sapiens
guuugauuggcacagcagcaaaaguugaggcc

SEQ ID NO: 92753 - RNA, 32 nt, Homo Sapiens
agaaaaaugaagcagacacacacacacacaca

SEQ ID NO: 92754 - RNA, 32 nt, Homo Sapiens
ggccuauguauucuacuguguuuaauacugca

SEQ ID NO: 92755 - RNA, 32 nt, Homo Sapiens
ccugcucccgaaaaccucuccuguuccagcag

SEQ ID NO: 92756 - RNA, 32 nt, Homo Sapiens
cuucaugccucgggcuagaguucugauaaucg

SEQ ID NO: 92757 - RNA, 32 nt, Homo Sapiens
uaagaggaagguccuuggaggguaucagcagu

SEQ ID NO: 92758 - RNA, 32 nt, Homo Sapiens
ugacuucugaagaugacugccucaccuugcac

SEQ ID NO: 92759 - RNA, 32 nt, Homo Sapiens
ggguuggcgggggguggagcggggcacugauc

SEQ ID NO: 92760 - RNA, 32 nt, Homo Sapiens
acagggaucccgggcugcugccgcuaccaaca

SEQ ID NO: 92761 - RNA, 32 nt, Homo Sapiens
uuuucaaauaggaugcauucgguuuugugauu

SEQ ID NO: 92762 - RNA, 32 nt, Homo Sapiens
ugccguuuuuauuuuauuccuuuuauuuuccc

SEQ ID NO: 92763 - RNA, 32 nt, Homo Sapiens
cggguucucccucuuuucucuggaacauauga

SEQ ID NO: 92764 - RNA, 32 nt, Homo Sapiens
auacacaauuugcuuugaaacuuacuauguuu

SEQ ID NO: 92765 - RNA, 32 nt, Homo Sapiens
ggagcaggagagccccuguuuccuggccgggg

SEQ ID NO: 92766 - RNA, 32 nt, Homo Sapiens
uccccgccccuucuccuccuccuaccugggcc

SEQ ID NO: 92767 - RNA, 32 nt, Homo Sapiens
cagccgggagagugcacagaccauucccacca

SEQ ID NO: 92768 - RNA, 32 nt, Homo Sapiens
uccccaggacggaucuccugcagaccugccuu

SEQ ID NO: 92769 - RNA, 32 nt, Homo Sapiens
agcacaucacaccagcaccagcucccugucuc

SEQ ID NO: 92770 - RNA, 32 nt, Homo Sapiens
cggaacgcuagcgguguuggcgcggaguggac

SEQ ID NO: 92771 - RNA, 32 nt, Homo Sapiens
gaaagaauuagaaauaaauaaaaacuaagcac

SEQ ID NO: 92772 - RNA, 32 nt, Homo Sapiens
uuaaauguaguagaugcuauuagcgcuuguca

SEQ ID NO: 92773 - RNA, 32 nt, Homo Sapiens
ccuggccugguuuccuaaccucuucuuccucc

SEQ ID NO: 92774 - RNA, 32 nt, Homo Sapiens
cuggguagaguuuuugaguuuuugcaguucag

SEQ ID NO: 92775 - RNA, 32 nt, Homo Sapiens
cagagaggcugaccgacgacuacuggggggca

SEQ ID NO: 92776 - RNA, 31 nt, Homo Sapiens
aacccgcggccgcgccugcccgcucgcaccc

SEQ ID NO: 92777 - RNA, 32 nt, Homo Sapiens
agcggcggcggcagcgcgucaucugguggagc

SEQ ID NO: 92778 - RNA, 32 nt, Homo Sapiens
ccuuugcccuccccgucaccgcgcacccaccc

SEQ ID NO: 92779 - RNA, 32 nt, Homo Sapiens
aaaauaaucucucggaucucaggccgcagaca

SEQ ID NO: 92780 - RNA, 32 nt, Homo Sapiens
guuuuaucaaaccacagccaugcuuacuuguu

SEQ ID NO: 92781 - RNA, 32 nt, Homo Sapiens
aauauuuauuuauucuaacaaaaagcaauuac

SEQ ID NO: 92782 - RNA, 32 nt, Homo Sapiens
agccugaacauucacuccuuguccuccaugcu

SEQ ID NO: 92783 - RNA, 32 nt, Homo Sapiens
uacuguaacugggacagaagaaauaaugggga

SEQ ID NO: 92784 - RNA, 32 nt, Homo Sapiens
cugagggccugccuguggugugcccggcucug

SEQ ID NO: 92785 - RNA, 32 nt, Homo Sapiens
gcuccaggacccagcucugcaggcacccaaag

SEQ ID NO: 92786 - RNA, 32 nt, Homo Sapiens
auuaaguuuuuuccuguuaaugcaauuauaga

SEQ ID NO: 92787 - RNA, 32 nt, Homo Sapiens
cccagggcuuuugcguggugaccuggcggcuc

SEQ ID NO: 92788 - RNA, 32 nt, Homo Sapiens
agauauguuuuaucuuuuuuuaacuuuauuug

SEQ ID NO: 92789 - RNA, 32 nt, Homo Sapiens
aaccaaggaaggaaacaaaaaaguagggccug

SEQ ID NO: 92790 - RNA, 32 nt, Homo Sapiens
ggaggaacccaggcugcugcccugcccagccc

SEQ ID NO: 92791 - RNA, 32 nt, Homo Sapiens
agcuuagugaggacaagacccuucuagagcuu

SEQ ID NO: 92792 - RNA, 32 nt, Homo Sapiens
ggagccggaguccgggcgcccgggaucgggcu

SEQ ID NO: 92793 - RNA, 32 nt, Homo Sapiens
accuugcauuucauuucaacacugcuucaagg

SEQ ID NO: 92794 - RNA, 32 nt, Homo Sapiens
gucuuuuugucaaaguguauccagaaugucag

SEQ ID NO: 92795 - RNA, 32 nt, Homo Sapiens
aguccuguacucuggggugcugccugaaucca

SEQ ID NO: 92796 - RNA, 32 nt, Homo Sapiens
uuuuugcuauuuaaauauaauguaucaaaaac

SEQ ID NO: 92797 - RNA, 32 nt, Homo Sapiens
gccagcccgccagcucgucagcccgccagcca

SEQ ID NO: 92798 - RNA, 32 nt, Homo Sapiens
acucuacccgcccugccuucucuucucauaug

SEQ ID NO: 92799 - RNA, 32 nt, Homo Sapiens
cggcagcgcgucgcgggccaggucgcccuuga

SEQ ID NO: 92800 - RNA, 32 nt, Homo Sapiens
gcucacuggcaagcgcccacuccaccgcgugg

SEQ ID NO: 92801 - RNA, 32 nt, Homo Sapiens
uucacuugggaggaguggcagcuccucggccc

SEQ ID NO: 92802 - RNA, 32 nt, Homo Sapiens
accauagacugucuuacccauccccuggauau

SEQ ID NO: 92803 - RNA, 32 nt, Homo Sapiens
cuugguggcuccuggaggggguccagucacca

SEQ ID NO: 92804 - RNA, 32 nt, Homo Sapiens
gggcaggaagggagggccuggggggugggaag

SEQ ID NO: 92805 - RNA, 32 nt, Homo Sapiens
agacagugcuugucuuuuuuuguuauuacacu

SEQ ID NO: 92806 - RNA, 32 nt, Homo Sapiens
uugugguguccagugcgcgucucuccuccauc

SEQ ID NO: 92807 - RNA, 32 nt, Homo Sapiens
gugcaggcccggccuuuccccacgcggacucc

SEQ ID NO: 92808 - RNA, 32 nt, Homo Sapiens
uccuccacugcugaagacccugcuguagagcu

SEQ ID NO: 92809 - RNA, 30 nt, Homo Sapiens
uggacaggcaggcgggugcucucacaccca

SEQ ID NO: 92810 - RNA, 32 nt, Homo Sapiens
agccugcagcgggagacccuguccccgcccca

SEQ ID NO: 92811 - RNA, 32 nt, Homo Sapiens
uuucuggagaccaaaccagauaccagauaauc

SEQ ID NO: 92812 - RNA, 32 nt, Homo Sapiens
cugcggcggcgguggucugaggaaguucuauc

SEQ ID NO: 92813 - RNA, 32 nt, Homo Sapiens
gccaggcggcgguuuccaggcaacgaccgaac

SEQ ID NO: 92814 - RNA, 32 nt, Homo Sapiens
cugcacuugagccugggcagcagagugagacc

SEQ ID NO: 92815 - RNA, 32 nt, Homo Sapiens
uccuucauuucccuaagccuguggcccaaaug

SEQ ID NO: 92816 - RNA, 32 nt, Homo Sapiens
uagcuaccucacgguuacauugcaaagccuua

SEQ ID NO: 92817 - RNA, 32 nt, Homo Sapiens
agccccagcgccccgguuugcaaagcagguga

SEQ ID NO: 92818 - RNA, 32 nt, Homo Sapiens
acuuucagcucaugcuuuuuuauguaggacua

SEQ ID NO: 92819 - RNA, 32 nt, Homo Sapiens
gcggggggcccaggcgcuaaagguggagggaa

SEQ ID NO: 92820 - RNA, 32 nt, Homo Sapiens
gucacauguucccuuaccccuguaccugugaa

SEQ ID NO: 92821 - RNA, 32 nt, Homo Sapiens
cauuaauugguccugauguagaacuugaccca

SEQ ID NO: 92822 - RNA, 32 nt, Homo Sapiens
augugaaacucgaagaaaauguucucuuuuua

SEQ ID NO: 92823 - RNA, 32 nt, Homo Sapiens
auugaaugauuuaaaacuuuauuuucaaggau

SEQ ID NO: 92824 - RNA, 32 nt, Homo Sapiens
gaaaaauaaggaagacgcugcagaauaugcua

SEQ ID NO: 92825 - RNA, 32 nt, Homo Sapiens
agggagacccauuuccucucuggccucuucac

SEQ ID NO: 92826 - RNA, 32 nt, Homo Sapiens
ggaauaaaccugguuuguagauaauauaauau

SEQ ID NO: 92827 - RNA, 32 nt, Homo Sapiens
cagaugaugucccucccccuaccuguaaccuu

SEQ ID NO: 92828 - RNA, 32 nt, Homo Sapiens
ccccuccuuauuucuuuuuucuaucuguuccu

SEQ ID NO: 92829 - RNA, 32 nt, Homo Sapiens
aggccuuacagaucucuuacacucgugguggg

SEQ ID NO: 92830 - RNA, 32 nt, Homo Sapiens
aacucuuucauaaagcacuuuuguggccuagu

SEQ ID NO: 92831 - RNA, 32 nt, Homo Sapiens
acauagagccccuuuccaacuuuaaaacccuu

SEQ ID NO: 92832 - RNA, 32 nt, Homo Sapiens
ccaaaccagaaaaagucagacucauuguugau

SEQ ID NO: 92833 - RNA, 32 nt, Homo Sapiens
gcucucaccccgcacggcacccgcgccgucag

SEQ ID NO: 92834 - RNA, 32 nt, Homo Sapiens
aaaugcucuaaaguuggauuguagagauggcu

SEQ ID NO: 92835 - RNA, 32 nt, Homo Sapiens
uccuccuucauuuuucuuccaaaauugcugcu

SEQ ID NO: 92836 - RNA, 32 nt, Homo Sapiens
auugucaccaaaacagcauggugcugguauag

SEQ ID NO: 92837 - RNA, 32 nt, Homo Sapiens
uuucagauccuccacuuggcaggcagggccaa

SEQ ID NO: 92838 - RNA, 32 nt, Homo Sapiens
cccuuuuggcuuuuuccuuguuugguugaucu

SEQ ID NO: 92839 - RNA, 32 nt, Homo Sapiens
ugaaggaguauuuugcguguguguagggacau

SEQ ID NO: 92840 - RNA, 32 nt, Homo Sapiens
cucacaaguauauauuugaugucuguaauaaa

SEQ ID NO: 92841 - RNA, 32 nt, Homo Sapiens
acccagacugcaauggcagagaagcccagggu

SEQ ID NO: 92842 - RNA, 32 nt, Homo Sapiens
ggaccccuggaaagugggggcugugccuccag

SEQ ID NO: 92843 - RNA, 30 nt, Homo Sapiens
ugaagaggccccgugccccaggcauggcaa

SEQ ID NO: 92844 - RNA, 32 nt, Homo Sapiens
ggccuaaugaaaauacauacuucuucauucgg

SEQ ID NO: 92845 - RNA, 32 nt, Homo Sapiens
ugauauugaugaugaaaugucuuacgaugauc

SEQ ID NO: 92846 - RNA, 32 nt, Homo Sapiens
agccaggcaugguggcucaugccuuugggagg

SEQ ID NO: 92847 - RNA, 32 nt, Homo Sapiens
aaguaagcaaauaaaugugugguucuccaagg

SEQ ID NO: 92848 - RNA, 30 nt, Homo Sapiens
cugguucgccaacgcgcgccggcgccucaa

SEQ ID NO: 92849 - RNA, 32 nt, Homo Sapiens
gauacguguagauaauuaagcauuuugugaug

SEQ ID NO: 92850 - RNA, 32 nt, Homo Sapiens
aauuggauaucuuuaagauaucuguaaguguu

SEQ ID NO: 92851 - RNA, 32 nt, Homo Sapiens
gccucuacuggcaaccugaaccuuucccaccc

SEQ ID NO: 92852 - RNA, 32 nt, Homo Sapiens
ucucuccccuccccucagugcccuugccccau

SEQ ID NO: 92853 - RNA, 32 nt, Homo Sapiens
ucagcgcaccaaaacuauccugauuccaaaua

SEQ ID NO: 92854 - RNA, 32 nt, Homo Sapiens
uagaaccugaauguacuccuuauuuaaagaua

SEQ ID NO: 92855 - RNA, 32 nt, Homo Sapiens
ucuagaagauaaaagaaaaagaugugcauaac

SEQ ID NO: 92856 - RNA, 32 nt, Homo Sapiens
gcagaagguggagaguuaagauguucuauguc

SEQ ID NO: 92857 - RNA, 32 nt, Homo Sapiens
cuucucuaaauaaaugugcuauuuucacagua

SEQ ID NO: 92858 - RNA, 32 nt, Homo Sapiens
gcuaucugggcagaaauaguacacuugugagg

SEQ ID NO: 92859 - RNA, 32 nt, Homo Sapiens
uucccuugagggauuggggaggacccagucca

SEQ ID NO: 92860 - RNA, 30 nt, Homo Sapiens
cgccaucuccacugcauccgaucucauuau

SEQ ID NO: 92861 - RNA, 32 nt, Homo Sapiens
gcuaacauuccuaaaucagggaguuugaaguc

SEQ ID NO: 92862 - RNA, 32 nt, Homo Sapiens
ggaagggagggauuuugccaaaaguuagaaag

SEQ ID NO: 92863 - RNA, 32 nt, Homo Sapiens
acccgcggccccagcuuuccgccugcacccgc

SEQ ID NO: 92864 - RNA, 32 nt, Homo Sapiens
guucuuucuucuucuuuuuuaauaccauaggc

SEQ ID NO: 92865 - RNA, 32 nt, Homo Sapiens
agugaacugcagccuggcaccaccacacccug

SEQ ID NO: 92866 - RNA, 28 nt, Homo Sapiens
uggauaguggcuacuguguuggauggca

SEQ ID NO: 92867 - RNA, 32 nt, Homo Sapiens
uguaaggagugugaaugccggcguggggagcu

SEQ ID NO: 92868 - RNA, 32 nt, Homo Sapiens
uucaucagccccagcccccacacuccaccaaa

SEQ ID NO: 92869 - RNA, 32 nt, Homo Sapiens
uucuggaaaaggaggaaguccaggcuggugug

SEQ ID NO: 92870 - RNA, 32 nt, Homo Sapiens
aucauucuugaacuuagaguauguaaauguaa

SEQ ID NO: 92871 - RNA, 32 nt, Homo Sapiens
ggcacgaauuaaugcagaacacuguuauuaau

SEQ ID NO: 92872 - RNA, 32 nt, Homo Sapiens
agaaaguugaccuugugucacuauuuauuuua

SEQ ID NO: 92873 - RNA, 32 nt, Homo Sapiens
gcauccgcgcggcuaccgcggcggcgcaggag

SEQ ID NO: 92874 - RNA, 32 nt, Homo Sapiens
acauggucaggagacuucauuaucugauuucu

SEQ ID NO: 92875 - RNA, 32 nt, Homo Sapiens
aauaaaagccaagguuaauguuggguacaauu

SEQ ID NO: 92876 - RNA, 32 nt, Homo Sapiens
uaugugucugguuccuugggugggacgauucc

SEQ ID NO: 92877 - RNA, 32 nt, Homo Sapiens
caugucagaaugccuuaacuacccuaacuuga

SEQ ID NO: 92878 - RNA, 32 nt, Homo Sapiens
ugugccacagaaagcaaccauacauaggaauc

SEQ ID NO: 92879 - RNA, 32 nt, Homo Sapiens
caggcccaggacuggagcuuucucuggccaag

SEQ ID NO: 92880 - RNA, 32 nt, Homo Sapiens
uuuauaauauuuuggucauuuuacuguuucug

SEQ ID NO: 92881 - RNA, 32 nt, Homo Sapiens
aauauaaaguauauuuccuaguuucuucuggc

SEQ ID NO: 92882 - RNA, 32 nt, Homo Sapiens
cucguguuccucaucuguagaccuccaggagu

SEQ ID NO: 92883 - RNA, 32 nt, Homo Sapiens
uagcugagggguugcgccagcugcugggggag

SEQ ID NO: 92884 - RNA, 32 nt, Homo Sapiens
ccacuggacuggaagcucuaguggauguggcc

SEQ ID NO: 92885 - RNA, 32 nt, Homo Sapiens
ugaauacaacauaacauagucucccuugaaau

SEQ ID NO: 92886 - RNA, 32 nt, Homo Sapiens
agaaugaacagagggugucuuccugacuccag

SEQ ID NO: 92887 - RNA, 32 nt, Homo Sapiens
ugaagaaucuacagccuuccccggcagcccag

SEQ ID NO: 92888 - RNA, 32 nt, Homo Sapiens
gggccuggcuaauggauuucuuugggaagcug

SEQ ID NO: 92889 - RNA, 32 nt, Homo Sapiens
aauagcccccggcgccagcuggccugcccuau

SEQ ID NO: 92890 - RNA, 32 nt, Homo Sapiens
gcagaucaucauggugcggcugcagaggguga

SEQ ID NO: 92891 - RNA, 32 nt, Homo Sapiens
gcucaguaauugguggcagcucuguuacugua

SEQ ID NO: 92892 - RNA, 32 nt, Homo Sapiens
cccacuccauggcgccagccuccucccccgcu

SEQ ID NO: 92893 - RNA, 32 nt, Homo Sapiens
gcaaaagaacagagguuucucaaaugccucag

SEQ ID NO: 92894 - RNA, 32 nt, Homo Sapiens
uacauuccccacuugcaaaacucuguggggcu

SEQ ID NO: 92895 - RNA, 32 nt, Homo Sapiens
uaaauauuuuuaguauguacuguguaugauuc

SEQ ID NO: 92896 - RNA, 32 nt, Homo Sapiens
uuuuuuguacauacuuucucauuuuuauacuu

SEQ ID NO: 92897 - RNA, 32 nt, Homo Sapiens
cuggaaugugaacacaacucuuugguuaauag

SEQ ID NO: 92898 - RNA, 32 nt, Homo Sapiens
cccgugcccuccccuggcccuggccacacagc

SEQ ID NO: 92899 - RNA, 32 nt, Homo Sapiens
gagugucugacucagauaucuaccucggaggg

SEQ ID NO: 92900 - RNA, 32 nt, Homo Sapiens
cuguaaaucuuauguuuuaguaaaauauuuuu

SEQ ID NO: 92901 - RNA, 32 nt, Homo Sapiens
ggaaauacuaagaacccugcaagauguuuucu

SEQ ID NO: 92902 - RNA, 32 nt, Homo Sapiens
ugcugcuuucacugcugcacccgcgcccucgg

SEQ ID NO: 92903 - RNA, 32 nt, Homo Sapiens
agggaacuucagcaacugggaaucacagaaua

SEQ ID NO: 92904 - RNA, 32 nt, Homo Sapiens
cacacacacacacacacacacacacacaaaau

SEQ ID NO: 92905 - RNA, 32 nt, Homo Sapiens
aaaacaucuuuuggggaaauaaaaauguggac

SEQ ID NO: 92906 - RNA, 31 nt, Homo Sapiens
ugagugugaaacagagcacuugcagagccug

SEQ ID NO: 92907 - RNA, 32 nt, Homo Sapiens
gucauacuuaggaauuucuccuacuuuacacu

SEQ ID NO: 92908 - RNA, 32 nt, Homo Sapiens
auagagaagaauuaaaaggaaagggaaacaau

SEQ ID NO: 92909 - RNA, 32 nt, Homo Sapiens
cauuuauguacaaaaugaauugccuuugauaa

SEQ ID NO: 92910 - RNA, 31 nt, Homo Sapiens
gucuuugugagaagaaagucccugccccucc

SEQ ID NO: 92911 - RNA, 32 nt, Homo Sapiens
uccuucccaucccuacucauuagcucccucgu

SEQ ID NO: 92912 - RNA, 32 nt, Homo Sapiens
accacccaacucugaaacaaucucccggucca

SEQ ID NO: 92913 - RNA, 32 nt, Homo Sapiens
aaguuaaacacuuaacauuuuuuaggucugcu

SEQ ID NO: 92914 - RNA, 29 nt, Homo Sapiens
uuuuuucaaauauauuucuuguaaagaca

SEQ ID NO: 92915 - RNA, 32 nt, Homo Sapiens
agaauuuguaaaugaacaguccaauauuuccu

SEQ ID NO: 92916 - RNA, 32 nt, Homo Sapiens
gauuguauaacccauauacucuucgauguacu

SEQ ID NO: 92917 - RNA, 32 nt, Homo Sapiens
acacaggucaccaauuuucucauuucacccca

SEQ ID NO: 92918 - RNA, 32 nt, Homo Sapiens
cgcaugagauauucagaaaauacuagccuaga

SEQ ID NO: 92919 - RNA, 32 nt, Homo Sapiens
agcaaaaacacggagcugaggaccucauggca

SEQ ID NO: 92920 - RNA, 32 nt, Homo Sapiens
ccuugcagaaccagugacaaucuuaugaguau

SEQ ID NO: 92921 - RNA, 32 nt, Homo Sapiens
ugccuguuugccauuuauguccucuguagcaa

SEQ ID NO: 92922 - RNA, 32 nt, Homo Sapiens
gacagaaucucagucugucacccagguuggag

SEQ ID NO: 92923 - RNA, 32 nt, Homo Sapiens
agccauucaaccaauccccagauaauccagag

SEQ ID NO: 92924 - RNA, 32 nt, Homo Sapiens
augacaugcuucagggaagccuggacacccga

SEQ ID NO: 92925 - RNA, 32 nt, Homo Sapiens
uuguagucaucauauuuuaaugagucuucucu

SEQ ID NO: 92926 - RNA, 32 nt, Homo Sapiens
aacucgacaaaaucauuucauacuauauacau

SEQ ID NO: 92927 - RNA, 32 nt, Homo Sapiens
ccuagggaaggcagccuggcccugcccgccuc

SEQ ID NO: 92928 - RNA, 32 nt, Homo Sapiens
aucuuugacaguuuccuugguuuuaggugcua

SEQ ID NO: 92929 - RNA, 32 nt, Homo Sapiens
uacaggcaugugccaccacaccuagcuaauuu

SEQ ID NO: 92930 - RNA, 32 nt, Homo Sapiens
uugaggccguccccgacuccuuccucccccuu

SEQ ID NO: 92931 - RNA, 32 nt, Homo Sapiens
gcccccacccucgagcuccgcucgggcagagc

SEQ ID NO: 92932 - RNA, 32 nt, Homo Sapiens
cucacucuugcccaggcuggggugucguggcg

SEQ ID NO: 92933 - RNA, 32 nt, Homo Sapiens
gguggucugagcacuuccuucugagugggcuu

SEQ ID NO: 92934 - RNA, 32 nt, Homo Sapiens
acuaguguaaaaauaagugaaaaaauauuuuu

SEQ ID NO: 92935 - RNA, 32 nt, Homo Sapiens
uggcagcccucccuggagaggcagccuguuua

SEQ ID NO: 92936 - RNA, 32 nt, Homo Sapiens
accggucucuuagaagaagacacacauccugg

SEQ ID NO: 92937 - RNA, 32 nt, Homo Sapiens
agaaauacugaauuugccccagccaacaggac

SEQ ID NO: 92938 - RNA, 31 nt, Homo Sapiens
gacuguaggcacugccauggccccugugcuc

SEQ ID NO: 92939 - RNA, 32 nt, Homo Sapiens
gguuuggugcgggccacggggaggggaccggg

SEQ ID NO: 92940 - RNA, 32 nt, Homo Sapiens
guggauacagcagucggagacaucuggcagag

SEQ ID NO: 92941 - RNA, 32 nt, Homo Sapiens
gauucaccuaagagauucugauuugccacuga

SEQ ID NO: 92942 - RNA, 32 nt, Homo Sapiens
ggcauugguuuaggacacaauaauauugggga

SEQ ID NO: 92943 - RNA, 30 nt, Homo Sapiens
cccugucggugacugcgccguccgggcccg

SEQ ID NO: 92944 - RNA, 32 nt, Homo Sapiens
ggucacucgagaauucauggacacggccccca

SEQ ID NO: 92945 - RNA, 32 nt, Homo Sapiens
ucaggucagggugaggauggccucugcuaagc

SEQ ID NO: 92946 - RNA, 32 nt, Homo Sapiens
augaagucuucaguaugagacaucaauggcua

SEQ ID NO: 92947 - RNA, 32 nt, Homo Sapiens
uuguuuggagaugagaacuucuccuggaagca

SEQ ID NO: 92948 - RNA, 32 nt, Homo Sapiens
uaauuaaugcuuccagaggaaauccuucuuaa

SEQ ID NO: 92949 - RNA, 32 nt, Homo Sapiens
uuuauuacguaugucugguucucaauuccaac

SEQ ID NO: 92950 - RNA, 32 nt, Homo Sapiens
uguuccucugcacugggccguggaugacauua

SEQ ID NO: 92951 - RNA, 32 nt, Homo Sapiens
aaauuugcauuucuaacacaaguucccaagug

SEQ ID NO: 92952 - RNA, 32 nt, Homo Sapiens
augaugugaaauuuaugcuauacauuuuuaca

SEQ ID NO: 92953 - RNA, 32 nt, Homo Sapiens
augucuuaaauacauuaagacaacacauuugg

SEQ ID NO: 92954 - RNA, 32 nt, Homo Sapiens
uuuucuguuguauuuuaacucauaccuuuaaa

SEQ ID NO: 92955 - RNA, 32 nt, Homo Sapiens
uccauuuuaaguggagacauauuucagugauu

SEQ ID NO: 92956 - RNA, 32 nt, Homo Sapiens
cacuuaccaaacucagagcaucugaguagcag

SEQ ID NO: 92957 - RNA, 32 nt, Homo Sapiens
ugcuuuuaauuguuguuucauuauauaaaagg

SEQ ID NO: 92958 - RNA, 32 nt, Homo Sapiens
ucaguccucacagaucaagguaaaaguuuugc

SEQ ID NO: 92959 - RNA, 32 nt, Homo Sapiens
gaucugucagaaucugcuauguuucuugacca

SEQ ID NO: 92960 - RNA, 32 nt, Homo Sapiens
uugccggcuggcaaaccuccagcuguggcccg

SEQ ID NO: 92961 - RNA, 32 nt, Homo Sapiens
auagcaaacgcaggacacaccaagaguguccg

SEQ ID NO: 92962 - RNA, 32 nt, Homo Sapiens
gagaaccggccgccgagacgccgcagggugcc

SEQ ID NO: 92963 - RNA, 32 nt, Homo Sapiens
cuauuucuacauucucccugagcauuaagacu

SEQ ID NO: 92964 - RNA, 32 nt, Homo Sapiens
uaaaaauaauucuugguuuuuaucuaaucaga

SEQ ID NO: 92965 - RNA, 32 nt, Homo Sapiens
aguaauguacuauagauauaacuguacaaaaa

SEQ ID NO: 92966 - RNA, 32 nt, Homo Sapiens
aacuggagaguuuucauguuauuuucaauaca

SEQ ID NO: 92967 - RNA, 30 nt, Homo Sapiens
gcaccacugcaccccacccauucaagucca

SEQ ID NO: 92968 - RNA, 32 nt, Homo Sapiens
cgauguuacugccugccuuccuuucgugugag

SEQ ID NO: 92969 - RNA, 32 nt, Homo Sapiens
ucuguuuucuuaagcauauuaauuauagacau

SEQ ID NO: 92970 - RNA, 32 nt, Homo Sapiens
cuccaauauuauuauuugauggcgauggcagg

SEQ ID NO: 92971 - RNA, 32 nt, Homo Sapiens
caggaugaaaauaacuuuauggauauaggagg

SEQ ID NO: 92972 - RNA, 32 nt, Homo Sapiens
guuauacagaaauaauguugauauuuggaacc

SEQ ID NO: 92973 - RNA, 32 nt, Homo Sapiens
uagacauauuaaaauauaccaauguuguagua

SEQ ID NO: 92974 - RNA, 32 nt, Homo Sapiens
ggcagccugcgggggcucucggcccagcagac

SEQ ID NO: 92975 - RNA, 32 nt, Homo Sapiens
aggaguucaaccaacuccauaggaaaaaauua

SEQ ID NO: 92976 - RNA, 32 nt, Homo Sapiens
uuguacaauuguaguggauuucgugagaacac

SEQ ID NO: 92977 - RNA, 32 nt, Homo Sapiens
uaguuccgacgaguaccaggccgcccgagcca

SEQ ID NO: 92978 - RNA, 32 nt, Homo Sapiens
cauugugaaacacuuaacuggacaaacuguag

SEQ ID NO: 92979 - RNA, 32 nt, Homo Sapiens
aauuuucccugauaugaaaaaaugugcauuuu

SEQ ID NO: 92980 - RNA, 32 nt, Homo Sapiens
guucagcugggcgcugcugagguuccugaacu

SEQ ID NO: 92981 - RNA, 32 nt, Homo Sapiens
cccgccaaacaaagccccaagaaaacaaugcc

SEQ ID NO: 92982 - RNA, 32 nt, Homo Sapiens
uugaccuuuggccacugccuucccagcugccc

SEQ ID NO: 92983 - RNA, 32 nt, Homo Sapiens
gaagaucagacugacagagacacacacuagcc

SEQ ID NO: 92984 - RNA, 32 nt, Homo Sapiens
aaggguagccccagaggggagcuccgagggca

SEQ ID NO: 92985 - RNA, 32 nt, Homo Sapiens
gaaaccagcugaggcauccugaaagccuaaga

SEQ ID NO: 92986 - RNA, 32 nt, Homo Sapiens
uuaaaaugaauuucuuuuuuuuuaagacagag

SEQ ID NO: 92987 - RNA, 32 nt, Homo Sapiens
aagccaauuaucugauuaagcauucuuuccac

SEQ ID NO: 92988 - RNA, 32 nt, Homo Sapiens
uuuuucuuuuucugaugacauuuuggcuuaua

SEQ ID NO: 92989 - RNA, 32 nt, Homo Sapiens
guccuugcauucaaaggguuggagauugcugc

SEQ ID NO: 92990 - RNA, 32 nt, Homo Sapiens
ccaacauaauguauuucuuuaaaaccugugug

SEQ ID NO: 92991 - RNA, 32 nt, Homo Sapiens
uccuuuugauaaagggaugcugcauaguagag

SEQ ID NO: 92992 - RNA, 32 nt, Homo Sapiens
aucuaagauaagacauauagaugcuuaagaca

SEQ ID NO: 92993 - RNA, 32 nt, Homo Sapiens
aaaagaaaaaauauagcuaaguauauaaaggc

SEQ ID NO: 92994 - RNA, 32 nt, Homo Sapiens
ucguguguuuagccuacguuuuucucaugccu

SEQ ID NO: 92995 - RNA, 32 nt, Homo Sapiens
cuguccagccucggcgcccgggaccgagcgcg

SEQ ID NO: 92996 - RNA, 32 nt, Homo Sapiens
ggggaccugcggcauccagcaccuggagcggg

SEQ ID NO: 92997 - RNA, 32 nt, Homo Sapiens
ccuaauacuguauauauacauauauauacgug

SEQ ID NO: 92998 - RNA, 32 nt, Homo Sapiens
aaaauuaugaaucugauuuuuaugaugaugaa

SEQ ID NO: 92999 - RNA, 26 nt, Homo Sapiens
uauggagcacgcagccaccacaggcc

SEQ ID NO: 93000 - RNA, 32 nt, Homo Sapiens
gagcagucuaacgaggcccaccuccuccacca

SEQ ID NO: 93001 - RNA, 28 nt, Homo Sapiens
accaugccucacucguacccagcccuuu

SEQ ID NO: 93002 - RNA, 32 nt, Homo Sapiens
aaaucccaccacggugucuccucccaccuccu

SEQ ID NO: 93003 - RNA, 32 nt, Homo Sapiens
ucuccuggacuuagagauuucagacacagaag

SEQ ID NO: 93004 - RNA, 32 nt, Homo Sapiens
uguuaaaauaaauuauuucaaguuucaaugua

SEQ ID NO: 93005 - RNA, 32 nt, Homo Sapiens
uggaauuuucuuaaauuuccuuuugagauugc

SEQ ID NO: 93006 - RNA, 32 nt, Homo Sapiens
cacggagcaugcccgagagccuggacagccca

SEQ ID NO: 93007 - RNA, 32 nt, Homo Sapiens
ucgcccaagcagcugguaauuccauuucaugu

SEQ ID NO: 93008 - RNA, 32 nt, Homo Sapiens
uauaacccuggagaugaaaaucuccuuguccu

SEQ ID NO: 93009 - RNA, 32 nt, Homo Sapiens
cauauuuuucuuuugacaaaguagccaaagac

SEQ ID NO: 93010 - RNA, 32 nt, Homo Sapiens
cuggugaugggguggggccguggcacuuucuc

SEQ ID NO: 93011 - RNA, 32 nt, Homo Sapiens
cauaccuaggacagguaugaccucugcccaau

SEQ ID NO: 93012 - RNA, 32 nt, Homo Sapiens
guugaaauauuuuuagcuuagucaucuguguu

SEQ ID NO: 93013 - RNA, 32 nt, Homo Sapiens
agaagggauaggaguagaagcccacauaaaag

SEQ ID NO: 93014 - RNA, 32 nt, Homo Sapiens
cccgccccugcccagagcuggcagaagcccuc

SEQ ID NO: 93015 - RNA, 28 nt, Homo Sapiens
uuggggugggcgccgccgaggugagguc

SEQ ID NO: 93016 - RNA, 32 nt, Homo Sapiens
uugcuccauccugagcauccccguggcccaca

SEQ ID NO: 93017 - RNA, 32 nt, Homo Sapiens
uuuagagaugcauuuaagaauuauucacaaaa

SEQ ID NO: 93018 - RNA, 32 nt, Homo Sapiens
ccccaaaacacccccacaggcaugcauacccu

SEQ ID NO: 93019 - RNA, 32 nt, Homo Sapiens
aggaggcacugggcugcggcaagugggcaggg

SEQ ID NO: 93020 - RNA, 32 nt, Homo Sapiens
uagguccugugcuuaaaggaggcaaguauaaa

SEQ ID NO: 93021 - RNA, 32 nt, Homo Sapiens
agauuguaauaauaauuuuguaaauuguaagc

SEQ ID NO: 93022 - RNA, 32 nt, Homo Sapiens
uacugucguccccagauccauccacuccaccc

SEQ ID NO: 93023 - RNA, 32 nt, Homo Sapiens
cgccccucggucccucacuggcacuucucccu

SEQ ID NO: 93024 - RNA, 32 nt, Homo Sapiens
gguguauugucacaguagcuuauuugaacuug

SEQ ID NO: 93025 - RNA, 32 nt, Homo Sapiens
agagguugaagauaacagagugcaaaguuucc

SEQ ID NO: 93026 - RNA, 32 nt, Homo Sapiens
cuugccuuuccacgugacuuuuaaaaggcucu

SEQ ID NO: 93027 - RNA, 32 nt, Homo Sapiens
aauaauguguugcauuuacacaguuguuucau

SEQ ID NO: 93028 - RNA, 32 nt, Homo Sapiens
agagaccggugcuggugcagguccuugguaug

SEQ ID NO: 93029 - RNA, 32 nt, Homo Sapiens
uuaauuagagugugaggccugcggauaugggc

SEQ ID NO: 93030 - RNA, 32 nt, Homo Sapiens
gccccaccaaccccuggccaccuugggacucc

SEQ ID NO: 93031 - RNA, 32 nt, Homo Sapiens
uggggcucuuccagaggcuggcacucucugca

SEQ ID NO: 93032 - RNA, 32 nt, Homo Sapiens
aaauaaccaauauuucugagauguuuuauacc

SEQ ID NO: 93033 - RNA, 32 nt, Homo Sapiens
uccgcugcagcuuuccaucucaucuccuuacu

SEQ ID NO: 93034 - RNA, 32 nt, Homo Sapiens
cccgcacgcaccucgcaccaugagauggcgac

SEQ ID NO: 93035 - RNA, 32 nt, Homo Sapiens
uggagagcgugcggcggcugggguugggcgcg

SEQ ID NO: 93036 - RNA, 32 nt, Homo Sapiens
uuaaauaaaaauuuucaaaaaguuaaaaaaaa

SEQ ID NO: 93037 - RNA, 32 nt, Homo Sapiens
guagguauuuuuguuuagaagaacuauuucau

SEQ ID NO: 93038 - RNA, 32 nt, Homo Sapiens
cauguuacagauggugaaccgaaacuuacaga

SEQ ID NO: 93039 - RNA, 32 nt, Homo Sapiens
ccuccucuggacuuaaaucaccucuugauuac

SEQ ID NO: 93040 - RNA, 32 nt, Homo Sapiens
gaucgccugggaggugaggugugugugaccca

SEQ ID NO: 93041 - RNA, 32 nt, Homo Sapiens
uucucauggagagugugaauuuuuuccccugc

SEQ ID NO: 93042 - RNA, 32 nt, Homo Sapiens
cuugaucauaguccaacagggccagcuucccu

SEQ ID NO: 93043 - RNA, 32 nt, Homo Sapiens
gugaugaggaugaagaccuuuaugaugaucca

SEQ ID NO: 93044 - RNA, 32 nt, Homo Sapiens
gagccccuguuguauccgcagaugaacauccg

SEQ ID NO: 93045 - RNA, 32 nt, Homo Sapiens
ccuggccaugcgugcacagccugggaaaagac

SEQ ID NO: 93046 - RNA, 32 nt, Homo Sapiens
gagcaugcaaggaagggcaaccccagcccaga

SEQ ID NO: 93047 - RNA, 32 nt, Homo Sapiens
ucuucuaaugaaauaaagauugaagagguuga

SEQ ID NO: 93048 - RNA, 30 nt, Homo Sapiens
acccuggggcccgugccuggccuaugcucc

SEQ ID NO: 93049 - RNA, 32 nt, Homo Sapiens
augcuuuauuaauauuugauuguuauuaggac

SEQ ID NO: 93050 - RNA, 32 nt, Homo Sapiens
cauaaucacaaauauagagaauuccuauuuaa

SEQ ID NO: 93051 - RNA, 32 nt, Homo Sapiens
caguaagcugucuuaccugaaaccaaaaauag

SEQ ID NO: 93052 - RNA, 32 nt, Homo Sapiens
cugcccagcuccggucccagaucucugaccac

SEQ ID NO: 93053 - RNA, 32 nt, Homo Sapiens
uagaagucaagagcuagccuugagacugugcu

SEQ ID NO: 93054 - RNA, 32 nt, Homo Sapiens
uugcacacaguacacaccagaagaugugaaau

SEQ ID NO: 93055 - RNA, 32 nt, Homo Sapiens
uaguaaauaguauuuucuuaaucucagaggag

SEQ ID NO: 93056 - RNA, 31 nt, Homo Sapiens
acccugagggcggggugucugucuuccuuug

SEQ ID NO: 93057 - RNA, 32 nt, Homo Sapiens
uucauugagaaaaaagaggaaauacuccgcgu

SEQ ID NO: 93058 - RNA, 32 nt, Homo Sapiens
gggauuacuccagagagcugcagccagaacug

SEQ ID NO: 93059 - RNA, 32 nt, Homo Sapiens
uguuguuucugcgcccucuuuuggcuaauuga

SEQ ID NO: 93060 - RNA, 32 nt, Homo Sapiens
ugauaauggauuaguuuauauaaaccuauguu

SEQ ID NO: 93061 - RNA, 32 nt, Homo Sapiens
ccguccccaucccccuccccucccccgacuaa

SEQ ID NO: 93062 - RNA, 32 nt, Homo Sapiens
caugcaccuuauauuucuguguacacaucuau

SEQ ID NO: 93063 - RNA, 32 nt, Homo Sapiens
acaaagccgucucauucaaggguggggagaug

SEQ ID NO: 93064 - RNA, 32 nt, Homo Sapiens
agccgggcguaguggcgggcgccuguaguccc

SEQ ID NO: 93065 - RNA, 32 nt, Homo Sapiens
uucugggcacgguggcucaugccuguaguccc

SEQ ID NO: 93066 - RNA, 32 nt, Homo Sapiens
uaacuuuauaucuauuccauaguauuguaaug

SEQ ID NO: 93067 - RNA, 32 nt, Homo Sapiens
uuaucuucaguguaccuccuuaauccugcuuc

SEQ ID NO: 93068 - RNA, 32 nt, Homo Sapiens
cacacacacgcagacacacacacacacacaca

SEQ ID NO: 93069 - RNA, 32 nt, Homo Sapiens
ccuaacguccgcgggggccgguguuggggggc

SEQ ID NO: 93070 - RNA, 32 nt, Homo Sapiens
aaacuggagcagcucauuuuagaaggaaauaa

SEQ ID NO: 93071 - RNA, 32 nt, Homo Sapiens
gccccaagcaaccuguuuugacaaaucugauu

SEQ ID NO: 93072 - RNA, 32 nt, Homo Sapiens
uguuuguuugcuucuucagaaauguuuuuuac

SEQ ID NO: 93073 - RNA, 32 nt, Homo Sapiens
ggcucguuuuaaaaucacguuuucugacgaau

SEQ ID NO: 93074 - RNA, 29 nt, Homo Sapiens
guaugcauauguauguagauauguuuaua

SEQ ID NO: 93075 - RNA, 32 nt, Homo Sapiens
accaugccuggccaacucacauuuuucuuucu

SEQ ID NO: 93076 - RNA, 32 nt, Homo Sapiens
ggugccgagcgcgggcgagcgggccuuuuccg

SEQ ID NO: 93077 - RNA, 31 nt, Homo Sapiens
aggagcuucaaugauuuguaacugaaauauc

SEQ ID NO: 93078 - RNA, 32 nt, Homo Sapiens
uagcugggacuacaggcaugcgccaccacgcc

SEQ ID NO: 93079 - RNA, 32 nt, Homo Sapiens
uagcugggaccacaggcacgcgccaccacgcc

SEQ ID NO: 93080 - RNA, 32 nt, Homo Sapiens
uagugcaaucugggccaguauuuuuauagauu

SEQ ID NO: 93081 - RNA, 32 nt, Homo Sapiens
gccacccugcgacggagcggcgcccccggacu

SEQ ID NO: 93082 - RNA, 32 nt, Homo Sapiens
gccagugccggggcuacccgcccuggggccug

SEQ ID NO: 93083 - RNA, 32 nt, Homo Sapiens
cuacccuuuucuccauagacgugaccaucaac

SEQ ID NO: 93084 - RNA, 32 nt, Homo Sapiens
cuguauuauuaagaggcuauaugcaucuuuuu

SEQ ID NO: 93085 - RNA, 32 nt, Homo Sapiens
uccucuuccccugggguuccagcccuccuaau

SEQ ID NO: 93086 - RNA, 32 nt, Homo Sapiens
uugcuucugccagcugucauggcaaucguguu

SEQ ID NO: 93087 - RNA, 32 nt, Homo Sapiens
cgaaaaugaugaugaaccagugcucguguccu

SEQ ID NO: 93088 - RNA, 32 nt, Homo Sapiens
aucuugcuuuagcacauguacaguacaguuuc

SEQ ID NO: 93089 - RNA, 32 nt, Homo Sapiens
agugugugggucuauguaaaugcaucuguccu

SEQ ID NO: 93090 - RNA, 32 nt, Homo Sapiens
aagcagguugucccacauguauaaaauacagg

SEQ ID NO: 93091 - RNA, 32 nt, Homo Sapiens
uaccccauuauggccuaaaccuccucagugga

SEQ ID NO: 93092 - RNA, 32 nt, Homo Sapiens
ccgcaggaccccaccccuggcucugaaucucc

SEQ ID NO: 93093 - RNA, 32 nt, Homo Sapiens
uuagggagaaaacuagucuaaauuauuucaac

SEQ ID NO: 93094 - RNA, 32 nt, Homo Sapiens
ugcagagcugucaggaaccuucagauagcagu

SEQ ID NO: 93095 - RNA, 32 nt, Homo Sapiens
gguauuuaaguacauugagguaacugagcacu

SEQ ID NO: 93096 - RNA, 32 nt, Homo Sapiens
ccagugaaaaguguauuuugauagagaacuuu

SEQ ID NO: 93097 - RNA, 32 nt, Homo Sapiens
gcauccccgcgccgccgcaucuccucgccgcc

SEQ ID NO: 93098 - RNA, 32 nt, Homo Sapiens
cugaggagcugccugccuucuuccaucugaga

SEQ ID NO: 93099 - RNA, 32 nt, Homo Sapiens
guuuuccuuuuuucuuuuuuuuuuuuuuuccu

SEQ ID NO: 93100 - RNA, 32 nt, Homo Sapiens
gcucagccagauccuuacacguggagccccca

SEQ ID NO: 93101 - RNA, 32 nt, Homo Sapiens
gggcaggacccuuggcaggcaagccccucccu

SEQ ID NO: 93102 - RNA, 32 nt, Homo Sapiens
ucccccagaaaagaaagcuacagaagaaacug

SEQ ID NO: 93103 - RNA, 32 nt, Homo Sapiens
uccaguucgggcccggccucccugcggccccc

SEQ ID NO: 93104 - RNA, 32 nt, Homo Sapiens
ucccggguucaagugauucuucugccucagcu

SEQ ID NO: 93105 - RNA, 32 nt, Homo Sapiens
uaucauucuuauaacauuguauguuaauagaa

SEQ ID NO: 93106 - RNA, 32 nt, Homo Sapiens
gugggguggggcagggcgggcggaagggggca

SEQ ID NO: 93107 - RNA, 32 nt, Homo Sapiens
cggugagggcgggcaaggggccccagccgcug

SEQ ID NO: 93108 - RNA, 32 nt, Homo Sapiens
uuauaaauuacuuucuuuuuuaucauauaugg

SEQ ID NO: 93109 - RNA, 32 nt, Homo Sapiens
uggcggaagaggcacgugcgcugcugaaugga

SEQ ID NO: 93110 - RNA, 32 nt, Homo Sapiens
aaacugaccaaaacagaagcaaaaauaagaaa

SEQ ID NO: 93111 - RNA, 32 nt, Homo Sapiens
uccggccccgaucccggcaccaugagcuucgg

SEQ ID NO: 93112 - RNA, 32 nt, Homo Sapiens
accccaacuuucuccuuacuccugaaaaauuu

SEQ ID NO: 93113 - RNA, 32 nt, Homo Sapiens
uugcgccgagaccgcagagggaagcgucagcg

SEQ ID NO: 93114 - RNA, 32 nt, Homo Sapiens
caacuuuccagaugauuuguaacuucucugug

SEQ ID NO: 93115 - RNA, 32 nt, Homo Sapiens
cuggccugcccccuggcccacccccacuuucc

SEQ ID NO: 93116 - RNA, 32 nt, Homo Sapiens
ucagcuucagagacagauccaauauaguccca

SEQ ID NO: 93117 - RNA, 32 nt, Homo Sapiens
auguguuuuccuuugucuuaaucgaucuggua

SEQ ID NO: 93118 - RNA, 28 nt, Homo Sapiens
gauguuaauuaaaggaaacaaacaacug

SEQ ID NO: 93119 - RNA, 32 nt, Homo Sapiens
uauauuguuuacaaauauauuucaugcaagaa

SEQ ID NO: 93120 - RNA, 32 nt, Homo Sapiens
uucacaggggguaccuaggagccagguggggu

SEQ ID NO: 93121 - RNA, 32 nt, Homo Sapiens
agugggugccgugcgugugggcacagaaacac

SEQ ID NO: 93122 - RNA, 32 nt, Homo Sapiens
agaaaauaaccuggucucacugugguugcccu

SEQ ID NO: 93123 - RNA, 32 nt, Homo Sapiens
gcccagggauuaggagcagcucuucagcacaa

SEQ ID NO: 93124 - RNA, 32 nt, Homo Sapiens
gguacaagaugagaagaaagaaaaaccuacag

SEQ ID NO: 93125 - RNA, 32 nt, Homo Sapiens
aauuuauaaacaagagauuaauaucuccaugc

SEQ ID NO: 93126 - RNA, 32 nt, Homo Sapiens
accauuagaauuguuacucagcuccuucaaac

SEQ ID NO: 93127 - RNA, 32 nt, Homo Sapiens
uuuccaguuguaaaauuggaaccaucagcuga

SEQ ID NO: 93128 - RNA, 32 nt, Homo Sapiens
gaaacuguacuuuuuucuugaucugucuguaa

SEQ ID NO: 93129 - RNA, 32 nt, Homo Sapiens
gcugcucgccccacccucgcuuaucuguagau

SEQ ID NO: 93130 - RNA, 32 nt, Homo Sapiens
aaaguaauuucugaaauaaacaaugcauguag

SEQ ID NO: 93131 - RNA, 32 nt, Homo Sapiens
cacuagucagcuaacuaagugacucaaccaag

SEQ ID NO: 93132 - RNA, 32 nt, Homo Sapiens
auguaaucguuguuauacuguauuguuuuuau

SEQ ID NO: 93133 - RNA, 32 nt, Homo Sapiens
cacaucuauuuucucaacugccauauccuagg

SEQ ID NO: 93134 - RNA, 32 nt, Homo Sapiens
uugucuugcucggcuucaggucucucuugagu

SEQ ID NO: 93135 - RNA, 32 nt, Homo Sapiens
gaaccuuguagugccaaaaacuuuuuaaaagg

SEQ ID NO: 93136 - RNA, 32 nt, Homo Sapiens
gcggcuguucggccgccuccucugggaggggg

SEQ ID NO: 93137 - RNA, 32 nt, Homo Sapiens
agcaggcucaucucaccuccaggccugaaaca

SEQ ID NO: 93138 - RNA, 32 nt, Homo Sapiens
uuuaaaagauuauaaaacuuuauuacugggcu

SEQ ID NO: 93139 - RNA, 32 nt, Homo Sapiens
gugcucuuuguaaaaugaaauuguaaagaaaa

SEQ ID NO: 93140 - RNA, 32 nt, Homo Sapiens
gugacccacacccacacccuauucauacacuc

SEQ ID NO: 93141 - RNA, 32 nt, Homo Sapiens
ucuuuuuuuuuuucuuuuuaaaucucucuaug

SEQ ID NO: 93142 - RNA, 32 nt, Homo Sapiens
caucccauccggggagccccaggccccacuuc

SEQ ID NO: 93143 - RNA, 32 nt, Homo Sapiens
aaggaaaauggcaggcgcugggcucccacgac

SEQ ID NO: 93144 - RNA, 32 nt, Homo Sapiens
guggccgucugcccggcccagcaccaugcaca

SEQ ID NO: 93145 - RNA, 32 nt, Homo Sapiens
uuauuggguaauaaauauuuucaugaaagcgc

SEQ ID NO: 93146 - RNA, 32 nt, Homo Sapiens
cuuguaaaacuaaggggaaaagggcagaagag

SEQ ID NO: 93147 - RNA, 32 nt, Homo Sapiens
cguggcuccuccgucccggcgucuccaaaacu

SEQ ID NO: 93148 - RNA, 32 nt, Homo Sapiens
aggacagcauauaaauguaauaaguaucacac

SEQ ID NO: 93149 - RNA, 32 nt, Homo Sapiens
ccggccucuguccucuccacuagcgccagggc

SEQ ID NO: 93150 - RNA, 32 nt, Homo Sapiens
auucacagccccagccccauggccccucucca

SEQ ID NO: 93151 - RNA, 32 nt, Homo Sapiens
gucagaucugaucccugcccucauggaccuga

SEQ ID NO: 93152 - RNA, 32 nt, Homo Sapiens
cuacugauuuucguauguuaauuuuguauccu

SEQ ID NO: 93153 - RNA, 31 nt, Homo Sapiens
gauccuuuccggagaaagcgcaggcuaaagc

SEQ ID NO: 93154 - RNA, 32 nt, Homo Sapiens
gucuucgagagcacuuccuuccagggcaagga

SEQ ID NO: 93155 - RNA, 32 nt, Homo Sapiens
ucuguacacugccuuugguuuuagcaguucuu

SEQ ID NO: 93156 - RNA, 32 nt, Homo Sapiens
ccuccgggguaucccaggaucuuccagcaccc

SEQ ID NO: 93157 - RNA, 32 nt, Homo Sapiens
gugcugcugggaaucaggagaauagaagcaaa

SEQ ID NO: 93158 - RNA, 32 nt, Homo Sapiens
gaagaagaaaauaaacaucuccuuuccaacaa

SEQ ID NO: 93159 - RNA, 32 nt, Homo Sapiens
ccgcggcgguagcucgggcucuccggaggagg

SEQ ID NO: 93160 - RNA, 32 nt, Homo Sapiens
auaauaagugaugugcugaauuuuauaaauaa

SEQ ID NO: 93161 - RNA, 32 nt, Homo Sapiens
gcugaggugggaggagugcuugaggccaggag

SEQ ID NO: 93162 - RNA, 32 nt, Homo Sapiens
cagccugccguggggcccgucagccugguccc

SEQ ID NO: 93163 - RNA, 32 nt, Homo Sapiens
ugagccugccccccaccuccggcgcgugggca

SEQ ID NO: 93164 - RNA, 32 nt, Homo Sapiens
uaucuauagauauauauguguauguauauaaa

SEQ ID NO: 93165 - RNA, 32 nt, Homo Sapiens
acaucccuuugaccacaucgcucuaggauaac

SEQ ID NO: 93166 - RNA, 32 nt, Homo Sapiens
caugguuuucuuucugcauuaaaaugcucauu

SEQ ID NO: 93167 - RNA, 32 nt, Homo Sapiens
auccaacauggggcaucucccagagcacauac

SEQ ID NO: 93168 - RNA, 32 nt, Homo Sapiens
ggggucggcgcggugucuucugcccuucugca

SEQ ID NO: 93169 - RNA, 32 nt, Homo Sapiens
aguucuagcauuaaucaacaucagagauucca

SEQ ID NO: 93170 - RNA, 32 nt, Homo Sapiens
caucaugcaucugaggcacauaaaaagauaca

SEQ ID NO: 93171 - RNA, 32 nt, Homo Sapiens
gguaucccagcaugaaauguaauuuacuugga

SEQ ID NO: 93172 - RNA, 32 nt, Homo Sapiens
ugucuuccaagaacagaagaaaaugauccagg

SEQ ID NO: 93173 - RNA, 32 nt, Homo Sapiens
ccaauaaaaauaucuuaaaacugcauuguaca

SEQ ID NO: 93174 - RNA, 32 nt, Homo Sapiens
aaaaaggaacaguggauagcucauacuuuaug

SEQ ID NO: 93175 - RNA, 32 nt, Homo Sapiens
cuccuccugccgccuccgccagcccucccucc

SEQ ID NO: 93176 - RNA, 32 nt, Homo Sapiens
uagaccuuuuacagagaagauacauaaaaggc

SEQ ID NO: 93177 - RNA, 32 nt, Homo Sapiens
cacccccucccugccagcugcccccaccgccu

SEQ ID NO: 93178 - RNA, 32 nt, Homo Sapiens
gacuacacuaauuauuuuaacuguauacaucu

SEQ ID NO: 93179 - RNA, 32 nt, Homo Sapiens
cauuauaaaagcuagguugucucuugaauuuu

SEQ ID NO: 93180 - RNA, 32 nt, Homo Sapiens
ucucugaggaacucaaguuugguugccagaaa

SEQ ID NO: 93181 - RNA, 32 nt, Homo Sapiens
gcuuucuguauauaaauguggagauuagaguu

SEQ ID NO: 93182 - RNA, 32 nt, Homo Sapiens
gcaccaucacuugcuuuuuuuuuuuuucugau

SEQ ID NO: 93183 - RNA, 32 nt, Homo Sapiens
aaccuugaggauguuaugcuaaauuaaauaag

SEQ ID NO: 93184 - RNA, 32 nt, Homo Sapiens
ucaguuccagcuuuuguagauggcacuuuagu

SEQ ID NO: 93185 - RNA, 32 nt, Homo Sapiens
agggcgcccccagccccuccccaggccgcgag

SEQ ID NO: 93186 - RNA, 32 nt, Homo Sapiens
uugugacaaccaaagcacuuugacacuacccc

SEQ ID NO: 93187 - RNA, 32 nt, Homo Sapiens
agauaagcauagagaauuucuguuauaccaag

SEQ ID NO: 93188 - RNA, 32 nt, Homo Sapiens
ccagaggcaaaguggaccuggcaaccacaaga

SEQ ID NO: 93189 - RNA, 32 nt, Homo Sapiens
ccaucccuggaguacugacuggcaccgguaag

SEQ ID NO: 93190 - RNA, 32 nt, Homo Sapiens
gccaugcugagcgccacagucuacccaagacc

SEQ ID NO: 93191 - RNA, 32 nt, Homo Sapiens
uacuugcacuugagacuaugguugacuaaugc

SEQ ID NO: 93192 - RNA, 32 nt, Homo Sapiens
gagaugcagggccaccugaagcgggccuccaa

SEQ ID NO: 93193 - RNA, 32 nt, Homo Sapiens
gaaggaucaaccccaaauucuggguauuugag

SEQ ID NO: 93194 - RNA, 32 nt, Homo Sapiens
uucuaguccuccccgcagccccuugcaaacag

SEQ ID NO: 93195 - RNA, 32 nt, Homo Sapiens
aacaaggaacaaaacaaagcuuugaaaaaacu

SEQ ID NO: 93196 - RNA, 32 nt, Homo Sapiens
ccuacauuccagugccuauuaaaggagccugc

SEQ ID NO: 93197 - RNA, 32 nt, Homo Sapiens
aggaguccaaaauaaguuguugcuucuagugu

SEQ ID NO: 93198 - RNA, 32 nt, Homo Sapiens
aagcuauggaaccagcaguugauucuuguauu

SEQ ID NO: 93199 - RNA, 32 nt, Homo Sapiens
uucaagcaucacucagagagcccuggccuggc

SEQ ID NO: 93200 - RNA, 32 nt, Homo Sapiens
gccuggccccaggcugcuuccacugucucaga

SEQ ID NO: 93201 - RNA, 32 nt, Homo Sapiens
cuguucugugucugcuguaagacggccuugga

SEQ ID NO: 93202 - RNA, 32 nt, Homo Sapiens
cagucucauuugccaucaauagaagguaaaac

SEQ ID NO: 93203 - RNA, 32 nt, Homo Sapiens
ccuuagccaggaagauagauggucauggcaag

SEQ ID NO: 93204 - RNA, 32 nt, Homo Sapiens
uucuccaggcacucccuggagagaggacccag

SEQ ID NO: 93205 - RNA, 32 nt, Homo Sapiens
aauaauaucucuaauauauccacacauuuguu

SEQ ID NO: 93206 - RNA, 30 nt, Homo Sapiens
ccgcugagcaggcgcuccuggcccgggccu

SEQ ID NO: 93207 - RNA, 32 nt, Homo Sapiens
caccugugggaagagaagugaagacuuucucc

SEQ ID NO: 93208 - RNA, 32 nt, Homo Sapiens
ucuucagcagaaauagaaauggccguggauug

SEQ ID NO: 93209 - RNA, 32 nt, Homo Sapiens
gaaguuauauauuugcagaauguuuuaaagug

SEQ ID NO: 93210 - RNA, 32 nt, Homo Sapiens
cggagucagaaaggcgaggggcgccgggaacu

SEQ ID NO: 93211 - RNA, 32 nt, Homo Sapiens
aggccgggagugccugagcgccggcggcgacg

SEQ ID NO: 93212 - RNA, 32 nt, Homo Sapiens
gaugagauauaaugcauccuccaguccaugca

SEQ ID NO: 93213 - RNA, 31 nt, Homo Sapiens
ggguugaaugacacucucaaauuguuccugg

SEQ ID NO: 93214 - RNA, 32 nt, Homo Sapiens
gagccggcgggcgggcggaggauagcgcgggc

SEQ ID NO: 93215 - RNA, 32 nt, Homo Sapiens
aaccuuuaaucugcaccuuacaacucggggac

SEQ ID NO: 93216 - RNA, 32 nt, Homo Sapiens
aggccuuccaugaacagaucgucauugcaguu

SEQ ID NO: 93217 - RNA, 29 nt, Homo Sapiens
uggggagcuaaguuggccauugccugcgg

SEQ ID NO: 93218 - RNA, 28 nt, Homo Sapiens
acuuuguuuacaggauugugugaggauu

SEQ ID NO: 93219 - RNA, 32 nt, Homo Sapiens
aaacgggccgaccacccgcacaugacaucacu

SEQ ID NO: 93220 - RNA, 32 nt, Homo Sapiens
gguucccggcggcaucacugagaugcucaguc

SEQ ID NO: 93221 - RNA, 32 nt, Homo Sapiens
ugugggcuccacguugggaucagacacaccug

SEQ ID NO: 93222 - RNA, 32 nt, Homo Sapiens
aaagcggcauuaccuuuuuuuuuuuuuuuuuu

SEQ ID NO: 93223 - RNA, 32 nt, Homo Sapiens
ccacugcaucccauccugaauauccuuugcaa

SEQ ID NO: 93224 - RNA, 32 nt, Homo Sapiens
uaguaugagcaaauauaaaaugaagcaucaua

SEQ ID NO: 93225 - RNA, 32 nt, Homo Sapiens
cgugggggaaaggaaacguggcucucccuuau

SEQ ID NO: 93226 - RNA, 32 nt, Homo Sapiens
cauaaugcuuugcauugcugcauccugggaag

SEQ ID NO: 93227 - RNA, 32 nt, Homo Sapiens
uuauuuuuguucugaauacuuaacucaagguc

SEQ ID NO: 93228 - RNA, 32 nt, Homo Sapiens
gaugggggcuggagaggagcaaugaaagggag

SEQ ID NO: 93229 - RNA, 32 nt, Homo Sapiens
acaguguaauuuccuucaaguuacuuacauuc

SEQ ID NO: 93230 - RNA, 32 nt, Homo Sapiens
cggucagcccugccggccccagcggcuccuuc

SEQ ID NO: 93231 - RNA, 32 nt, Homo Sapiens
aagacuuguuuuuaugaugugcauggacucau

SEQ ID NO: 93232 - RNA, 32 nt, Homo Sapiens
uaaauccaggauccaaucaagaauuauacguu

SEQ ID NO: 93233 - RNA, 32 nt, Homo Sapiens
cguagaccccucuucccugucaguguugacca

SEQ ID NO: 93234 - RNA, 32 nt, Homo Sapiens
ugcggcugucuccuugaagguucucccuguug

SEQ ID NO: 93235 - RNA, 32 nt, Homo Sapiens
uggccacagccuccccgcaucuaaaggccccu

SEQ ID NO: 93236 - RNA, 32 nt, Homo Sapiens
uuuccagaucucuuuccccaaguugcuauugu

SEQ ID NO: 93237 - RNA, 32 nt, Homo Sapiens
gggcccgcaucccacccucccggaccuaagag

SEQ ID NO: 93238 - RNA, 32 nt, Homo Sapiens
caccaaccucacugcccucccucggccccacc

SEQ ID NO: 93239 - RNA, 32 nt, Homo Sapiens
caguugcaggcuccuuuagcugcaccaugaag

SEQ ID NO: 93240 - RNA, 32 nt, Homo Sapiens
gcacagccccgucuuccaggagccacaacuca

SEQ ID NO: 93241 - RNA, 32 nt, Homo Sapiens
cucagucugccuuaaaggaacugugaaggcuu

SEQ ID NO: 93242 - RNA, 32 nt, Homo Sapiens
caaauaugaggccauucccaacuuguuuuccg

SEQ ID NO: 93243 - RNA, 30 nt, Homo Sapiens
cccaggcuccgucugccgccgcacgccgcg

SEQ ID NO: 93244 - RNA, 32 nt, Homo Sapiens
acacugcucuccaguagcacagaugucugcuc

SEQ ID NO: 93245 - RNA, 32 nt, Homo Sapiens
cgggcgcuggcaagccgcgcgcugccuggggu

SEQ ID NO: 93246 - RNA, 32 nt, Homo Sapiens
acacucuucuauuaauuacuccauuaagagaa

SEQ ID NO: 93247 - RNA, 32 nt, Homo Sapiens
uaagcgcccggugccccuccccggccuccgga

SEQ ID NO: 93248 - RNA, 32 nt, Homo Sapiens
uuaaauugcuaaaaaauguguaugcucauagg

SEQ ID NO: 93249 - RNA, 32 nt, Homo Sapiens
gugauucaaaaugaaaauauuuacuuuguaga

SEQ ID NO: 93250 - RNA, 32 nt, Homo Sapiens
aucgcgacaccaucgugcccugucgagacucc

SEQ ID NO: 93251 - RNA, 32 nt, Homo Sapiens
aacuuccaaaucaaaaucauuugguugaaaca

SEQ ID NO: 93252 - RNA, 32 nt, Homo Sapiens
guguuaagagauaaagaauaauaauuaaccaa

SEQ ID NO: 93253 - RNA, 32 nt, Homo Sapiens
aucccccaagcgcuccucacgccaagcgcuga

SEQ ID NO: 93254 - RNA, 32 nt, Homo Sapiens
auccugagagaccugcccucucugcgcugagg

SEQ ID NO: 93255 - RNA, 32 nt, Homo Sapiens
guauccccaagccacaccaucuggcuaaaugg

SEQ ID NO: 93256 - RNA, 32 nt, Homo Sapiens
uuuuuauuguaauucaacagcuauagagagaa

SEQ ID NO: 93257 - RNA, 32 nt, Homo Sapiens
cgcgucugccccacccucaaacccuguggggc

SEQ ID NO: 93258 - RNA, 32 nt, Homo Sapiens
guagccgcugcagcugaagguuuucaggcggg

SEQ ID NO: 93259 - RNA, 32 nt, Homo Sapiens
auaccagggguuccccaggagagaccuucucu

SEQ ID NO: 93260 - RNA, 32 nt, Homo Sapiens
gugggggaggguguuguuggggccugagaaga

SEQ ID NO: 93261 - RNA, 32 nt, Homo Sapiens
uucugcucgggaucuggcucucuuccccuugg

SEQ ID NO: 93262 - RNA, 32 nt, Homo Sapiens
uggcgagaagccggcgacaucaucauuuacuc

SEQ ID NO: 93263 - RNA, 32 nt, Homo Sapiens
cggagccugucucggccgcggggcauugcccu

SEQ ID NO: 93264 - RNA, 32 nt, Homo Sapiens
auuaaucgagauacacuuguuaggagggacag

SEQ ID NO: 93265 - RNA, 31 nt, Homo Sapiens
gccgcugcauccugccugcccgugggaacug

SEQ ID NO: 93266 - RNA, 32 nt, Homo Sapiens
gcuugggaccccaagugcacgcugugccccug

SEQ ID NO: 93267 - RNA, 27 nt, Homo Sapiens
acaaaagccuucuucucuggacuccuc

SEQ ID NO: 93268 - RNA, 32 nt, Homo Sapiens
gcacacaucuguggucccaggugcucaggaag

SEQ ID NO: 93269 - RNA, 32 nt, Homo Sapiens
uuaggaacauucccuaaaauggcggccggcgc

SEQ ID NO: 93270 - RNA, 31 nt, Homo Sapiens
ccagagccguggugcuugccaagggcugugc

SEQ ID NO: 93271 - RNA, 32 nt, Homo Sapiens
uuguaucuccgaaagaauuaaaaauggccgag

SEQ ID NO: 93272 - RNA, 32 nt, Homo Sapiens
uaacggccggacuuuuggcuguuuccuaauga

SEQ ID NO: 93273 - RNA, 32 nt, Homo Sapiens
cugugcugccagccaucgcagaggagcccgcg

SEQ ID NO: 93274 - RNA, 32 nt, Homo Sapiens
ggacacagguggcaauggcugugcaccagugg

SEQ ID NO: 93275 - RNA, 32 nt, Homo Sapiens
guacuacccaacaacuaaaugguuuagauugu

SEQ ID NO: 93276 - RNA, 32 nt, Homo Sapiens
cuucacccucgccccccuccccuuuagcucug

SEQ ID NO: 93277 - RNA, 32 nt, Homo Sapiens
ccggguugagauccacagagcuaaacguuuua

SEQ ID NO: 93278 - RNA, 32 nt, Homo Sapiens
auuuguucaggguaaaauuugaaacaaaaaau

SEQ ID NO: 93279 - RNA, 32 nt, Homo Sapiens
aaaagagguuugauugcauauuaaauuguuau

SEQ ID NO: 93280 - RNA, 32 nt, Homo Sapiens
uuacaaggaaagcacgaggcccuugaggaaug

SEQ ID NO: 93281 - RNA, 32 nt, Homo Sapiens
caccagcccuccccuccccagggucauagagg

SEQ ID NO: 93282 - RNA, 32 nt, Homo Sapiens
cauugcgccugggugcagcagugugcgucucg

SEQ ID NO: 93283 - RNA, 32 nt, Homo Sapiens
aggucuucuccggccagggagcgcugugggaa

SEQ ID NO: 93284 - RNA, 32 nt, Homo Sapiens
uugcuauuaaacaaguugagauccaguuauaa

SEQ ID NO: 93285 - RNA, 32 nt, Homo Sapiens
acuugauuuuucucuuuuuugccccagacaug

SEQ ID NO: 93286 - RNA, 31 nt, Homo Sapiens
aaagcccauuuggcaagagugcuguuuugga

SEQ ID NO: 93287 - RNA, 32 nt, Homo Sapiens
ggaaggaaaaagaagguacuauuuuuauguua

SEQ ID NO: 93288 - RNA, 32 nt, Homo Sapiens
uacaaggcacugggcuuagcaccacagggaac

SEQ ID NO: 93289 - RNA, 32 nt, Homo Sapiens
aauccguugcaaacccaaaggacccaaguacu

SEQ ID NO: 93290 - RNA, 29 nt, Homo Sapiens
cugagguggagccgcgggacgccggcagg

SEQ ID NO: 93291 - RNA, 32 nt, Homo Sapiens
cuuuggcauuuucccaggcccucgguaaaagu

SEQ ID NO: 93292 - RNA, 32 nt, Homo Sapiens
acagggugugaaugccaggugggggucaccgg

SEQ ID NO: 93293 - RNA, 32 nt, Homo Sapiens
cuuucccagugcuuuucuuuuacaagagguag

SEQ ID NO: 93294 - RNA, 32 nt, Homo Sapiens
cccuaggcuccccagcagccaagaggagagga

SEQ ID NO: 93295 - RNA, 32 nt, Homo Sapiens
ccuuucaacaugaaagguuuguaguugagaca

SEQ ID NO: 93296 - RNA, 32 nt, Homo Sapiens
gugcccaaaacacaaugaacaaauugaauuuu

SEQ ID NO: 93297 - RNA, 32 nt, Homo Sapiens
uuaaacugaucaaugacuguagcuuuuuagac

SEQ ID NO: 93298 - RNA, 32 nt, Homo Sapiens
ucuggaauuuuuuuuuuuuuuaauuagccagg

SEQ ID NO: 93299 - RNA, 32 nt, Homo Sapiens
ugccucaucauucuggggagacugaaaauacc

SEQ ID NO: 93300 - RNA, 32 nt, Homo Sapiens
uugugguugcauauggcaaugaaguguuuguu

SEQ ID NO: 93301 - RNA, 32 nt, Homo Sapiens
agggccccgcccugccuucuggggcaaagcgg

SEQ ID NO: 93302 - RNA, 32 nt, Homo Sapiens
ucaggaaggauccggcccgucuccggaggcaa

SEQ ID NO: 93303 - RNA, 32 nt, Homo Sapiens
ucuuggcuuucugcaacgucugccuuccaggu

SEQ ID NO: 93304 - RNA, 32 nt, Homo Sapiens
acccggggcuccugggccgcucugccgggcug

SEQ ID NO: 93305 - RNA, 32 nt, Homo Sapiens
accuccgccucccggguucgcggguucuccgc

SEQ ID NO: 93306 - RNA, 32 nt, Homo Sapiens
uggguuuucuauuugaacaugugccuuuucug

SEQ ID NO: 93307 - RNA, 32 nt, Homo Sapiens
ucgcacuuaaagauuaugcacaucagcagagg

SEQ ID NO: 93308 - RNA, 32 nt, Homo Sapiens
gaccugaugcccuccuacccacaugguucucc

SEQ ID NO: 93309 - RNA, 32 nt, Homo Sapiens
aauguuuaaaaauuauuuuucuacguaauugc

SEQ ID NO: 93310 - RNA, 32 nt, Homo Sapiens
ggcuuucuaauagagagauuaguaaauaugug

SEQ ID NO: 93311 - RNA, 32 nt, Homo Sapiens
gccccucacacgccuucauccugaaacaggaa

SEQ ID NO: 93312 - RNA, 32 nt, Homo Sapiens
cucgcucugccagccagacuggagugcauugg

SEQ ID NO: 93313 - RNA, 32 nt, Homo Sapiens
auauacacuguaaaauacacuguauuuuagaa

SEQ ID NO: 93314 - RNA, 32 nt, Homo Sapiens
gggugagaauaaaacacccccacauaacaugc

SEQ ID NO: 93315 - RNA, 32 nt, Homo Sapiens
uccgugcggccaggcggagacccggaggaccg

SEQ ID NO: 93316 - RNA, 32 nt, Homo Sapiens
guuccucccagggccauggggcgacgaggaga

SEQ ID NO: 93317 - RNA, 32 nt, Homo Sapiens
cuucuuuuucuuuuuccauuggucuaaucuga

SEQ ID NO: 93318 - RNA, 32 nt, Homo Sapiens
gcagccccgccuucgccugcgccugcccuugc

SEQ ID NO: 93319 - RNA, 32 nt, Homo Sapiens
gcaaguggacaggccagcacugucccccuucc

SEQ ID NO: 93320 - RNA, 32 nt, Homo Sapiens
ucaacugcggacuagagaaauaaauguguauu

SEQ ID NO: 93321 - RNA, 32 nt, Homo Sapiens
augcugcaagauuguugcauuguguauacuga

SEQ ID NO: 93322 - RNA, 32 nt, Homo Sapiens
caaaagaauggcauacgggaguugcugcacaa

SEQ ID NO: 93323 - RNA, 30 nt, Homo Sapiens
gccaagcuggacugcauaaagauugguaug

SEQ ID NO: 93324 - RNA, 31 nt, Homo Sapiens
gaaaaacaguguaugaaagucauguuacagg

SEQ ID NO: 93325 - RNA, 32 nt, Homo Sapiens
uugugaaggagucuuaccuaaaacgaaagaaa

SEQ ID NO: 93326 - RNA, 32 nt, Homo Sapiens
ucuaugaaagaagaauaaaauaauaaaguguu

SEQ ID NO: 93327 - RNA, 32 nt, Homo Sapiens
ugguacuugcugucauagcucuauauaugucc

SEQ ID NO: 93328 - RNA, 32 nt, Homo Sapiens
uccagcgcuaaagcaauccucccaccucugcc

SEQ ID NO: 93329 - RNA, 29 nt, Homo Sapiens
ggccaugagggagagguucgaccgguucc

SEQ ID NO: 93330 - RNA, 32 nt, Homo Sapiens
uucagcccggccccgcugcgccuguccgggcc

SEQ ID NO: 93331 - RNA, 32 nt, Homo Sapiens
cuguggcuagaaccggcggggaaggggcgcuu

SEQ ID NO: 93332 - RNA, 29 nt, Homo Sapiens
gaauggauguggaaaugaaagcuagcgca

SEQ ID NO: 93333 - RNA, 32 nt, Homo Sapiens
ucauguaacuucuauuaacauccugaagaacu

SEQ ID NO: 93334 - RNA, 32 nt, Homo Sapiens
gaaggcccugcucucucccauccaagugacca

SEQ ID NO: 93335 - RNA, 32 nt, Homo Sapiens
ccccgcugguguaugcccugcugcugcagcgc

SEQ ID NO: 93336 - RNA, 32 nt, Homo Sapiens
gggagcagaagacagaaugaagagacugagca

SEQ ID NO: 93337 - RNA, 32 nt, Homo Sapiens
uuuugauauuugucuuuuuuuaaauuuuacag

SEQ ID NO: 93338 - RNA, 32 nt, Homo Sapiens
ggucuugauguauuugauaagaaugauuaauu

SEQ ID NO: 93339 - RNA, 32 nt, Homo Sapiens
uucaguugucuguuuuccagucucucugugug

SEQ ID NO: 93340 - RNA, 32 nt, Homo Sapiens
aucugauaaacuagugugauuguauuuauccu

SEQ ID NO: 93341 - RNA, 32 nt, Homo Sapiens
ccugaaaccauucaauaaaaccucugaucaaa

SEQ ID NO: 93342 - RNA, 32 nt, Homo Sapiens
uucgucuccccgcucugccccaccagggauac

SEQ ID NO: 93343 - RNA, 32 nt, Homo Sapiens
gcacgaacugcccgucagagaagugcacagcc

SEQ ID NO: 93344 - RNA, 32 nt, Homo Sapiens
auguugcccuuaaaccauuucuagcuguuaac

SEQ ID NO: 93345 - RNA, 29 nt, Homo Sapiens
uguuuuuaauguuucagaagccuaacuuu

SEQ ID NO: 93346 - RNA, 32 nt, Homo Sapiens
augaauuaacuccguuaaaaaauaaacguaua

SEQ ID NO: 93347 - RNA, 32 nt, Homo Sapiens
ccugucucuccugauuucuucucuuuacucau

SEQ ID NO: 93348 - RNA, 32 nt, Homo Sapiens
aaggccacuuugugcuccuggaccccacagac

SEQ ID NO: 93349 - RNA, 32 nt, Homo Sapiens
cccaaccggacccuccuccccucuucccaucc

SEQ ID NO: 93350 - RNA, 32 nt, Homo Sapiens
ugguaggguuuuucuuuuucuuuuuuaaauaa

SEQ ID NO: 93351 - RNA, 32 nt, Homo Sapiens
uggaggcaagguggugacaggcagcagggugg

SEQ ID NO: 93352 - RNA, 32 nt, Homo Sapiens
agccuccuccugcuccuucuccuccucggggc

SEQ ID NO: 93353 - RNA, 32 nt, Homo Sapiens
ccauccauggagcacgaggccuucagaaaaga

SEQ ID NO: 93354 - RNA, 32 nt, Homo Sapiens
ggacuugaaacacgcuuuggguugcuguaugg

SEQ ID NO: 93355 - RNA, 32 nt, Homo Sapiens
ugaggaaagggagacaagguauuuuauuucug

SEQ ID NO: 93356 - RNA, 32 nt, Homo Sapiens
agaccuuccacuggccagaccacagccccgcc

SEQ ID NO: 93357 - RNA, 32 nt, Homo Sapiens
guuuggcaauuaaauuuuuugagaaaaguaau

SEQ ID NO: 93358 - RNA, 32 nt, Homo Sapiens
ccucugggcuuaccucucuccucugcaauccu

SEQ ID NO: 93359 - RNA, 30 nt, Homo Sapiens
guagcuguuugugcugcagccaaccuuuac

SEQ ID NO: 93360 - RNA, 32 nt, Homo Sapiens
acaggagagucauuaagaagcauuucacugua

SEQ ID NO: 93361 - RNA, 32 nt, Homo Sapiens
aacuaucuuaauacuguauacuguauuaacua

SEQ ID NO: 93362 - RNA, 32 nt, Homo Sapiens
gaacucuggugcccugcuuggcaaaggauuuc

SEQ ID NO: 93363 - RNA, 32 nt, Homo Sapiens
cgucaucgccgcgcgccggcuugccaggagcu

SEQ ID NO: 93364 - RNA, 32 nt, Homo Sapiens
ccucgcacauccucgagccaggcagggcgccc

SEQ ID NO: 93365 - RNA, 32 nt, Homo Sapiens
ggauuguuggucugcguggaacuucucaggug

SEQ ID NO: 93366 - RNA, 32 nt, Homo Sapiens
cggcguucuucguacccgcccauccuccgcgg

SEQ ID NO: 93367 - RNA, 32 nt, Homo Sapiens
aaagaagguggcaaccaccugaauuucuauug

SEQ ID NO: 93368 - RNA, 32 nt, Homo Sapiens
aggauaaauuuuauguuauguguauuuacuac

SEQ ID NO: 93369 - RNA, 32 nt, Homo Sapiens
gcagagugaacagugaguucccccgacagccc

SEQ ID NO: 93370 - RNA, 32 nt, Homo Sapiens
agcagugccuaguaucuggagagcagcacuac

SEQ ID NO: 93371 - RNA, 32 nt, Homo Sapiens
uucuuggaccucuggcugcagaucuuagaagg

SEQ ID NO: 93372 - RNA, 32 nt, Homo Sapiens
cagaaucucuacaaacuuugaaauacucucua

SEQ ID NO: 93373 - RNA, 32 nt, Homo Sapiens
aaugaagagaaaaugacacgaggcuuuggaac

SEQ ID NO: 93374 - RNA, 32 nt, Homo Sapiens
gaaacaaaaaaguguaaaagauaaaugaaaca

SEQ ID NO: 93375 - RNA, 32 nt, Homo Sapiens
uccucugaugaaugaauggacagaggaaaugu

SEQ ID NO: 93376 - RNA, 32 nt, Homo Sapiens
ggaggcugauguuuuucuuucuuauuuuacuu

SEQ ID NO: 93377 - RNA, 32 nt, Homo Sapiens
agaucaaggagggaggcccagacucuucagga

SEQ ID NO: 93378 - RNA, 32 nt, Homo Sapiens
ugcagccgccgcggcgccgcucggcucuucac

SEQ ID NO: 93379 - RNA, 32 nt, Homo Sapiens
cugcccccacccccggccucagccaccagcac

SEQ ID NO: 93380 - RNA, 32 nt, Homo Sapiens
acagcucccuaucccuggaccccugcccuccu

SEQ ID NO: 93381 - RNA, 32 nt, Homo Sapiens
ccaaauguggaagauuuaaauacuugaaccaa

SEQ ID NO: 93382 - RNA, 32 nt, Homo Sapiens
cucaccccaucccacacccuggaggauuucau

SEQ ID NO: 93383 - RNA, 32 nt, Homo Sapiens
gaacaucagacuccaaguucuucaguuuugag

SEQ ID NO: 93384 - RNA, 32 nt, Homo Sapiens
gaaaaaauuaugccucugguuuaauuauuggu

SEQ ID NO: 93385 - RNA, 32 nt, Homo Sapiens
ccagauacagaaacagaagagaggcugccggg

SEQ ID NO: 93386 - RNA, 32 nt, Homo Sapiens
uugcuguuugguuuuuaccuuaaggacacuaa

SEQ ID NO: 93387 - RNA, 32 nt, Homo Sapiens
gacugaggccagcagaucuccuguggccagga

SEQ ID NO: 93388 - RNA, 32 nt, Homo Sapiens
guuuucaggcaucacugcaaagggcagcuagu

SEQ ID NO: 93389 - RNA, 32 nt, Homo Sapiens
ucuguuuaguaaauacaucacuguauaccgau

SEQ ID NO: 93390 - RNA, 32 nt, Homo Sapiens
agcauuuuccuguggacgagacauggugcaug

SEQ ID NO: 93391 - RNA, 32 nt, Homo Sapiens
ugaagauuggcaaaaacuaaaauaaauuaaaa

SEQ ID NO: 93392 - RNA, 32 nt, Homo Sapiens
gaggcugcgaagaagaggccuggccaugggug

SEQ ID NO: 93393 - RNA, 32 nt, Homo Sapiens
auuaaauaauuucacaauuucaacaugucaaa

SEQ ID NO: 93394 - RNA, 32 nt, Homo Sapiens
ggagcauucuggauuuugaauuuuuggauuag

SEQ ID NO: 93395 - RNA, 32 nt, Homo Sapiens
cacugcuuguuuccauggcuccccucaccaau

SEQ ID NO: 93396 - RNA, 32 nt, Homo Sapiens
uucuucuuuccaccacaaauuaaucacuaugu

SEQ ID NO: 93397 - RNA, 32 nt, Homo Sapiens
acaugaguugaagaguuuggaacuuguccuug

SEQ ID NO: 93398 - RNA, 32 nt, Homo Sapiens
gguccccacacagcgccgcggccgccccucca

SEQ ID NO: 93399 - RNA, 32 nt, Homo Sapiens
gccagagaugacugggguuuucgggcuuuccc

SEQ ID NO: 93400 - RNA, 32 nt, Homo Sapiens
cugcgcggcgggcuguggcugcggagguugag

SEQ ID NO: 93401 - RNA, 32 nt, Homo Sapiens
uugcugcacggcagccgugggacuggcacagg

SEQ ID NO: 93402 - RNA, 32 nt, Homo Sapiens
cagaauaugcuuguuggagauccuucaggcag

SEQ ID NO: 93403 - RNA, 32 nt, Homo Sapiens
cucggcaaggacugaguuuccaaacuugcaga

SEQ ID NO: 93404 - RNA, 32 nt, Homo Sapiens
aucuguacuccucuccuucucuuccacuccau

SEQ ID NO: 93405 - RNA, 32 nt, Homo Sapiens
uugaucccugaauaauucauugacuaaacuga

SEQ ID NO: 93406 - RNA, 32 nt, Homo Sapiens
aauacaauuuuuauuucuuuuacuuuuuuuag

SEQ ID NO: 93407 - RNA, 32 nt, Homo Sapiens
uauaucaaacaugcacacgggcgagcuuucuc

SEQ ID NO: 93408 - RNA, 32 nt, Homo Sapiens
gacucagagggaaaaggaaaagagccucaaac

SEQ ID NO: 93409 - RNA, 32 nt, Homo Sapiens
cagguccgucugucaugucacgccacugcaca

SEQ ID NO: 93410 - RNA, 32 nt, Homo Sapiens
uguucacucguuuauacaaacaugcucaauaa

SEQ ID NO: 93411 - RNA, 32 nt, Homo Sapiens
gggcugaagaugccuccauucgccuguggacc

SEQ ID NO: 93412 - RNA, 32 nt, Homo Sapiens
uuucacuuucccuuuuggguuccaggguauau

SEQ ID NO: 93413 - RNA, 32 nt, Homo Sapiens
cucaaaacaaacaaacaaaagcuacucuuagc

SEQ ID NO: 93414 - RNA, 32 nt, Homo Sapiens
gggacccucagcagcucuggcucugccucagg

SEQ ID NO: 93415 - RNA, 32 nt, Homo Sapiens
ucaacuacuuguucuacccagcauuuaacggc

SEQ ID NO: 93416 - RNA, 32 nt, Homo Sapiens
ucuugugaaucaguguauacuacauuuauaca

SEQ ID NO: 93417 - RNA, 32 nt, Homo Sapiens
aguuuuuccagaagagaguagcuuuaggaaga

SEQ ID NO: 93418 - RNA, 32 nt, Homo Sapiens
aacuccucccauagauacucucuucuucucau

SEQ ID NO: 93419 - RNA, 32 nt, Homo Sapiens
auccuaacuccaugucucugagcauuagauuu

SEQ ID NO: 93420 - RNA, 32 nt, Homo Sapiens
ccaggagcaugcgacugacggcagaugaacgu

SEQ ID NO: 93421 - RNA, 32 nt, Homo Sapiens
acauuauauguuguaauauuuauuuaccugau

SEQ ID NO: 93422 - RNA, 32 nt, Homo Sapiens
ucgauuugauaaaauuaaacaaagugcuuuuu

SEQ ID NO: 93423 - RNA, 32 nt, Homo Sapiens
ccucgaguguagcccaggauccagcaccggcc

SEQ ID NO: 93424 - RNA, 32 nt, Homo Sapiens
uuuugcagaacaguuuuccucuuugcuuagcu

SEQ ID NO: 93425 - RNA, 32 nt, Homo Sapiens
cuacaugaaguggcaguaaccuuuuucacauu

SEQ ID NO: 93426 - RNA, 32 nt, Homo Sapiens
ugauuugucauucuagucacuuccugccuugu

SEQ ID NO: 93427 - RNA, 32 nt, Homo Sapiens
ggcucuuagacuaaaaucaugcccaaguucaa

SEQ ID NO: 93428 - RNA, 32 nt, Homo Sapiens
gguauaagccccagcccugcucauucccacuc

SEQ ID NO: 93429 - RNA, 32 nt, Homo Sapiens
cugggagaccggacccggggcugcagaagaag

SEQ ID NO: 93430 - RNA, 32 nt, Homo Sapiens
ccaagacauaccuuuaccucuuuaaguuucaa

SEQ ID NO: 93431 - RNA, 28 nt, Homo Sapiens
agucuggaaacuuaacauuaugagccuu

SEQ ID NO: 93432 - RNA, 32 nt, Homo Sapiens
cugcuggcgagggcaggggagagggggcauuc

SEQ ID NO: 93433 - RNA, 32 nt, Homo Sapiens
ccaucuugguaguucugugccuccccccagac

SEQ ID NO: 93434 - RNA, 32 nt, Homo Sapiens
gccaacugggaauuagaauugauucaaaacuc

SEQ ID NO: 93435 - RNA, 32 nt, Homo Sapiens
aaggaggaauucuuaaauuagcuguaauguua

SEQ ID NO: 93436 - RNA, 32 nt, Homo Sapiens
guagaggaugauguuuacauaauuuuagcacc

SEQ ID NO: 93437 - RNA, 32 nt, Homo Sapiens
aaaccuggagggagacccccaaaacuucucag

SEQ ID NO: 93438 - RNA, 32 nt, Homo Sapiens
auaaaggcaaggaaauuaagaacugaauccau

SEQ ID NO: 93439 - RNA, 32 nt, Homo Sapiens
guggcagacaccuguggucccagcuauucggg

SEQ ID NO: 93440 - RNA, 32 nt, Homo Sapiens
aacuuuuuucuuuuuaaaaauaagauggggag

SEQ ID NO: 93441 - RNA, 32 nt, Homo Sapiens
ugcuaucccuccccacugcccccaccccacaa

SEQ ID NO: 93442 - RNA, 32 nt, Homo Sapiens
uuuccuuuucuuccuuuuuuuuuuuuuuuuuu

SEQ ID NO: 93443 - RNA, 32 nt, Homo Sapiens
cgcugggggcggggcgggcgcccacugccuga

SEQ ID NO: 93444 - RNA, 32 nt, Homo Sapiens
agagguagaaaagauugggucuaggauauggu

SEQ ID NO: 93445 - RNA, 32 nt, Homo Sapiens
uggggguacaacucggccguugucaccaugcc

SEQ ID NO: 93446 - RNA, 32 nt, Homo Sapiens
uggggugaacuugggagcaaugagauguuugg

SEQ ID NO: 93447 - RNA, 32 nt, Homo Sapiens
gauguccaauacuacccugcuucuggagagaa

SEQ ID NO: 93448 - RNA, 32 nt, Homo Sapiens
gcggacgcaugcguagugggcuucucgggcgg

SEQ ID NO: 93449 - RNA, 32 nt, Homo Sapiens
gacaggauauucuaaagcaaauuaaaggagau

SEQ ID NO: 93450 - RNA, 32 nt, Homo Sapiens
uuacgaaaaugcuauuuuucuaugauguaaac

SEQ ID NO: 93451 - RNA, 32 nt, Homo Sapiens
gccgaggggcgcggccgugggguggggagucc

SEQ ID NO: 93452 - RNA, 32 nt, Homo Sapiens
uugcucgccccuaguaucuggcacauaguaua

SEQ ID NO: 93453 - RNA, 32 nt, Homo Sapiens
uggugggcuucagaugaguccuaugggagcug

SEQ ID NO: 93454 - RNA, 32 nt, Homo Sapiens
ccauccugggggcugugugucaugcucaccug

SEQ ID NO: 93455 - RNA, 32 nt, Homo Sapiens
aagcacuuuuucaaaacacuuuuuggacuuug

SEQ ID NO: 93456 - RNA, 32 nt, Homo Sapiens
gaaauguaacccagcauaaaaauacauuugca

SEQ ID NO: 93457 - RNA, 32 nt, Homo Sapiens
uauauacacauauauauuuugcacuacacaaa

SEQ ID NO: 93458 - RNA, 32 nt, Homo Sapiens
guuacaguagccagggaguggaauuucgucaa

SEQ ID NO: 93459 - RNA, 32 nt, Homo Sapiens
ccugggcccgcaggagggggccacaccaccca

SEQ ID NO: 93460 - RNA, 32 nt, Homo Sapiens
acaaugagagugaaagaggaugucuaaaaggg

SEQ ID NO: 93461 - RNA, 32 nt, Homo Sapiens
aaucgugagccaauauaaaaugugacaugagg

SEQ ID NO: 93462 - RNA, 32 nt, Homo Sapiens
ccacugccugagggcaggccgcggccggcggg

SEQ ID NO: 93463 - RNA, 32 nt, Homo Sapiens
cacaccaggcaggaggagguguggacagugau

SEQ ID NO: 93464 - RNA, 32 nt, Homo Sapiens
uuauuucuauuaugaauauuuuagcgauuaua

SEQ ID NO: 93465 - RNA, 32 nt, Homo Sapiens
ccgugcugcccccuaggagcccgcgccucucc

SEQ ID NO: 93466 - RNA, 32 nt, Homo Sapiens
ugccccugcccaccacccagaucacacagcug

SEQ ID NO: 93467 - RNA, 32 nt, Homo Sapiens
auuaauacagagcugaucuucuuggggguggg

SEQ ID NO: 93468 - RNA, 32 nt, Homo Sapiens
aaacaaaucaugauuucuuuucuaauguuauc

SEQ ID NO: 93469 - RNA, 32 nt, Homo Sapiens
auauugaaaauauaaugaaauaaaagcaucuu

SEQ ID NO: 93470 - RNA, 32 nt, Homo Sapiens
ccccgccucacagagggugccucccccccccg

SEQ ID NO: 93471 - RNA, 32 nt, Homo Sapiens
ggcaccccccucugaauuucugcaucugcauc

SEQ ID NO: 93472 - RNA, 32 nt, Homo Sapiens
cacucugcaauccccggcaccuaacucuucuc

SEQ ID NO: 93473 - RNA, 32 nt, Homo Sapiens
gggguuauuuguaccacugaaucuucauuaau

SEQ ID NO: 93474 - RNA, 32 nt, Homo Sapiens
auccccacaaaacacauugguuuugagaggug

SEQ ID NO: 93475 - RNA, 32 nt, Homo Sapiens
ugaugaauuauuucccaauauuucauaguuua

SEQ ID NO: 93476 - RNA, 32 nt, Homo Sapiens
uagagaagguaacagcuucagcuucagaaucg

SEQ ID NO: 93477 - RNA, 32 nt, Homo Sapiens
acccggacuggccgcaugcgggugcugaaggu

SEQ ID NO: 93478 - RNA, 32 nt, Homo Sapiens
augugugacugcucaugguuaaugcaggcagg

SEQ ID NO: 93479 - RNA, 32 nt, Homo Sapiens
gaaucuucaccaucuuucugauuccgcacccu

SEQ ID NO: 93480 - RNA, 31 nt, Homo Sapiens
gcaggcgagccccagagcuccaccagcccca

SEQ ID NO: 93481 - RNA, 32 nt, Homo Sapiens
cauuuuuucuuguucuuaauuuauauauuaca

SEQ ID NO: 93482 - RNA, 32 nt, Homo Sapiens
gccaagcccagcugcgggucccgcccgccgcg

SEQ ID NO: 93483 - RNA, 32 nt, Homo Sapiens
acacgggcgagggggugcaccgggggcaugac

SEQ ID NO: 93484 - RNA, 32 nt, Homo Sapiens
uaaacucugaauaagcacuuuuuaaaaaacuu

SEQ ID NO: 93485 - RNA, 32 nt, Homo Sapiens
gcaccaccaaccccucuccucaccugcuuuga

SEQ ID NO: 93486 - RNA, 32 nt, Homo Sapiens
gucuccgccggugccccuggcucccacgugug

SEQ ID NO: 93487 - RNA, 32 nt, Homo Sapiens
cugccuuucugcuggagggaaguguuuucaca

SEQ ID NO: 93488 - RNA, 32 nt, Homo Sapiens
caugccaccucaugccccuauauccugcgugu

SEQ ID NO: 93489 - RNA, 32 nt, Homo Sapiens
agaggcauuucccccaccccauuucucuccuc

SEQ ID NO: 93490 - RNA, 32 nt, Homo Sapiens
uuugaaaagacaauuuuccauuucaguauuac

SEQ ID NO: 93491 - RNA, 32 nt, Homo Sapiens
guuuaauuggacuuaaaguuccacauggcugg

SEQ ID NO: 93492 - RNA, 32 nt, Homo Sapiens
ccuuuauccagaagucaacucugauuaaacau

SEQ ID NO: 93493 - RNA, 32 nt, Homo Sapiens
cgcaggcagaacuccuuauugugggacuugaa

SEQ ID NO: 93494 - RNA, 32 nt, Homo Sapiens
gcggggcguuccugggggguagccucaaggcc

SEQ ID NO: 93495 - RNA, 32 nt, Homo Sapiens
gugcgaugcuguacaggucucuguaaaaaguc

SEQ ID NO: 93496 - RNA, 32 nt, Homo Sapiens
gaguuggaagcagccaaaucacaguggguguu

SEQ ID NO: 93497 - RNA, 32 nt, Homo Sapiens
ggggccggcuggcgcggcuggagcuggagcgg

SEQ ID NO: 93498 - RNA, 32 nt, Homo Sapiens
gucucaucccuugcccuggagagacggcagaa

SEQ ID NO: 93499 - RNA, 32 nt, Homo Sapiens
uuucggaaaaaauuauuuauucuaugacacua

SEQ ID NO: 93500 - RNA, 32 nt, Homo Sapiens
guccacaggccuggccugggggcugugggacu

SEQ ID NO: 93501 - RNA, 32 nt, Homo Sapiens
agcuucaggaccagcuugucuuggggguggua

SEQ ID NO: 93502 - RNA, 32 nt, Homo Sapiens
agaaugugacgaaaagcacacccagcaggcua

SEQ ID NO: 93503 - RNA, 32 nt, Homo Sapiens
aaggaggaccagagacccacuggcuucugcuc

SEQ ID NO: 93504 - RNA, 32 nt, Homo Sapiens
caguaagaagccaugucagccuuaauguugcu

SEQ ID NO: 93505 - RNA, 32 nt, Homo Sapiens
acacuaccccaucaggugggaauaccacuccc

SEQ ID NO: 93506 - RNA, 32 nt, Homo Sapiens
gugaacugcaaguauuugauaauaucccuguc

SEQ ID NO: 93507 - RNA, 32 nt, Homo Sapiens
gggccaucgugaggcuaagaauccagugcagg

SEQ ID NO: 93508 - RNA, 32 nt, Homo Sapiens
ugaagaccggggcccggugcugcccggccgga

SEQ ID NO: 93509 - RNA, 32 nt, Homo Sapiens
gcauuccuuagacuucaggagcucagaguuug

SEQ ID NO: 93510 - RNA, 32 nt, Homo Sapiens
uuguauaaaauguuauuuugccacaugagaca

SEQ ID NO: 93511 - RNA, 32 nt, Homo Sapiens
uuacaggcgugagccaccacgcccggccacua

SEQ ID NO: 93512 - RNA, 32 nt, Homo Sapiens
ucuguaagccccaugccgugccuagagacgag

SEQ ID NO: 93513 - RNA, 31 nt, Homo Sapiens
acaccucauuugaccuugccagcugaccuuc

SEQ ID NO: 93514 - RNA, 32 nt, Homo Sapiens
uaaaugccucuuuucuugagcauuccaucucu

SEQ ID NO: 93515 - RNA, 32 nt, Homo Sapiens
uguuaagaaaauaaaaauauuuucuaaagguc

SEQ ID NO: 93516 - RNA, 32 nt, Homo Sapiens
cgacagaccugggcuugaaucccggcucgugu

SEQ ID NO: 93517 - RNA, 32 nt, Homo Sapiens
auacauacaaauauauguauauauauucucag

SEQ ID NO: 93518 - RNA, 32 nt, Homo Sapiens
gaaaauaugggacaauaaguuguggaaagcca

SEQ ID NO: 93519 - RNA, 32 nt, Homo Sapiens
gacuuuaaauguuuaugagcuaguuuaugccu

SEQ ID NO: 93520 - RNA, 32 nt, Homo Sapiens
gagcugggagaugccuguugugugugucugca

SEQ ID NO: 93521 - RNA, 32 nt, Homo Sapiens
cuccuguaaucccagcacuuugggaggcugag

SEQ ID NO: 93522 - RNA, 32 nt, Homo Sapiens
gcuagaaaaugacaaaacaauuaaacugugga

SEQ ID NO: 93523 - RNA, 32 nt, Homo Sapiens
uggggguggugguggggugcuggcagccucag

SEQ ID NO: 93524 - RNA, 32 nt, Homo Sapiens
ggggagccaugccaaggguccaggcugcuuua

SEQ ID NO: 93525 - RNA, 32 nt, Homo Sapiens
ccugccugcguccuggggccugugcacuguug

SEQ ID NO: 93526 - RNA, 32 nt, Homo Sapiens
gcugguaggagccagcggcucuggccaagugc

SEQ ID NO: 93527 - RNA, 32 nt, Homo Sapiens
aaaaauuaugaguuaaugcugccugugucuau

SEQ ID NO: 93528 - RNA, 32 nt, Homo Sapiens
gccaguagguagucccagcuacucgagguugc

SEQ ID NO: 93529 - RNA, 32 nt, Homo Sapiens
guacuaaauuuuguuucuuuucaacuguacaa

SEQ ID NO: 93530 - RNA, 32 nt, Homo Sapiens
cauauuuuucuuuuuaaaugcaaaaccuuuuc

SEQ ID NO: 93531 - RNA, 32 nt, Homo Sapiens
uuccuuuuauguaaugaagguaaaaguagagg

SEQ ID NO: 93532 - RNA, 32 nt, Homo Sapiens
uccggcaugcauccaacaccaauggcuuucua

SEQ ID NO: 93533 - RNA, 27 nt, Homo Sapiens
cugcgcccucuucucagccccucugcc

SEQ ID NO: 93534 - RNA, 32 nt, Homo Sapiens
guacgauaaccaagagccacugagagagggaa

SEQ ID NO: 93535 - RNA, 32 nt, Homo Sapiens
ccugaccucaggugaucugcccgccuuggccu

SEQ ID NO: 93536 - RNA, 32 nt, Homo Sapiens
acaucagacuuccaagcagccaagcaggaaug

SEQ ID NO: 93537 - RNA, 32 nt, Homo Sapiens
uauuugcuguagcagagcuuuauugcaggcau

SEQ ID NO: 93538 - RNA, 32 nt, Homo Sapiens
uaagaguugcuuaaacuugacacuguugacau

SEQ ID NO: 93539 - RNA, 32 nt, Homo Sapiens
guaguuccuuccucuuucuccucuccaauuua

SEQ ID NO: 93540 - RNA, 32 nt, Homo Sapiens
gugcccugcagcgcguggacaggcuagggguc

SEQ ID NO: 93541 - RNA, 32 nt, Homo Sapiens
gguuagaacuguaauagacaaacaauugggaa

SEQ ID NO: 93542 - RNA, 32 nt, Homo Sapiens
ggaggagcuuaaaagaggcuacugaaccccag

SEQ ID NO: 93543 - RNA, 32 nt, Homo Sapiens
caaggcuugaggaggagagccugaaagcaugg

SEQ ID NO: 93544 - RNA, 32 nt, Homo Sapiens
gcucgacgaggcggagcgccaguggaaggccg

SEQ ID NO: 93545 - RNA, 32 nt, Homo Sapiens
ggcugcaccggguggcucugguugggggcgaa

SEQ ID NO: 93546 - RNA, 32 nt, Homo Sapiens
ucggggucaccaugaugccuuugaucgaugcu

SEQ ID NO: 93547 - RNA, 32 nt, Homo Sapiens
uaccaauaaggagaggcacagguacgggacac

SEQ ID NO: 93548 - RNA, 32 nt, Homo Sapiens
aagaggacagaauggaguugggggaacugggc

SEQ ID NO: 93549 - RNA, 32 nt, Homo Sapiens
guaaugccaauauaauauaguuaaugaaaaca

SEQ ID NO: 93550 - RNA, 32 nt, Homo Sapiens
gucagcucucggaaacaaagcacugguacugu

SEQ ID NO: 93551 - RNA, 32 nt, Homo Sapiens
ggcuggagcgcggcggaggugagccggccgcc

SEQ ID NO: 93552 - RNA, 32 nt, Homo Sapiens
ccgggauauaggggcggggcgcagggcgugga

SEQ ID NO: 93553 - RNA, 32 nt, Homo Sapiens
acuauccuccuuuuuuguuuucaguauucagu

SEQ ID NO: 93554 - RNA, 32 nt, Homo Sapiens
uggaaggaagcaggauggcagccggaacagca

SEQ ID NO: 93555 - RNA, 32 nt, Homo Sapiens
uguugguucauuuguucaauuguacaggaaag

SEQ ID NO: 93556 - RNA, 32 nt, Homo Sapiens
uuggaggcugguuucuuaaacacacacgucca

SEQ ID NO: 93557 - RNA, 32 nt, Homo Sapiens
ucuuuggucucuaaaaaguaaauuucaaauuu

SEQ ID NO: 93558 - RNA, 32 nt, Homo Sapiens
uaaagugaauguuuaccaugaagauaaacugu

SEQ ID NO: 93559 - RNA, 31 nt, Homo Sapiens
gguccugcugcuccaaccccaagggcccugg

SEQ ID NO: 93560 - RNA, 32 nt, Homo Sapiens
ggggaaagauagaguaccagguccuaggucag

SEQ ID NO: 93561 - RNA, 32 nt, Homo Sapiens
uguagaggaaaagaagcaagaggaagccaaga

SEQ ID NO: 93562 - RNA, 32 nt, Homo Sapiens
acuccagccugggcaacauagcaagacuccau

SEQ ID NO: 93563 - RNA, 32 nt, Homo Sapiens
ccaguuaaagguuccuuggagaugaggcugaa

SEQ ID NO: 93564 - RNA, 28 nt, Homo Sapiens
gaaacggggcggccgcuaggccucaagu

SEQ ID NO: 93565 - RNA, 32 nt, Homo Sapiens
agaaaagcggucgcugcgggacccccaguccc

SEQ ID NO: 93566 - RNA, 32 nt, Homo Sapiens
aaaugcacauauauuuacaaugacaucccugg

SEQ ID NO: 93567 - RNA, 32 nt, Homo Sapiens
ggugcuuucucuguaccccccagcccaugucc

SEQ ID NO: 93568 - RNA, 32 nt, Homo Sapiens
cucccuccagcaagcccucccugcccagaagg

SEQ ID NO: 93569 - RNA, 31 nt, Homo Sapiens
gcggagcugccgggggcuccuuagcacccgg

SEQ ID NO: 93570 - RNA, 32 nt, Homo Sapiens
augucucauuuuccuuuuggcauguggaaagc

SEQ ID NO: 93571 - RNA, 32 nt, Homo Sapiens
ugcaaauguccacuuccagauucuacagaaag

SEQ ID NO: 93572 - RNA, 32 nt, Homo Sapiens
ugucuaucucaaaaucuuaccuuauacuugcu

SEQ ID NO: 93573 - RNA, 32 nt, Homo Sapiens
uucuggauauuuguauuauccaaaugugcuua

SEQ ID NO: 93574 - RNA, 32 nt, Homo Sapiens
uauguauuaaaacaaaagaacaauaaccugaa

SEQ ID NO: 93575 - RNA, 32 nt, Homo Sapiens
uggcuauggcacccuggccccuggagccugag

SEQ ID NO: 93576 - RNA, 32 nt, Homo Sapiens
aauugccuuucugaauagaacaugacaugcca

SEQ ID NO: 93577 - RNA, 32 nt, Homo Sapiens
gcggagcgucaucgucucccgccccgugcguc

SEQ ID NO: 93578 - RNA, 32 nt, Homo Sapiens
cuuuccuuucauaucaucuucccaauguugcu

SEQ ID NO: 93579 - RNA, 32 nt, Homo Sapiens
aacucuuugggaggccgacgcgggcggaccgg

SEQ ID NO: 93580 - RNA, 32 nt, Homo Sapiens
cugaggccaaaggggcuggggaggcaggccug

SEQ ID NO: 93581 - RNA, 27 nt, Homo Sapiens
gugcugcccgucuucagccuagccgac

SEQ ID NO: 93582 - RNA, 32 nt, Homo Sapiens
uuuuuguuuuguuuuguuuucuucuuaacaga

SEQ ID NO: 93583 - RNA, 32 nt, Homo Sapiens
cuugggucucacucucaucacccaggcuagag

SEQ ID NO: 93584 - RNA, 32 nt, Homo Sapiens
gugguggguuugggggcccagcccacccgcca

SEQ ID NO: 93585 - RNA, 32 nt, Homo Sapiens
aagcagucacaaguacagacacuucacuuagc

SEQ ID NO: 93586 - RNA, 32 nt, Homo Sapiens
uguccagcagccucuccuguuccuccugccac

SEQ ID NO: 93587 - RNA, 32 nt, Homo Sapiens
caucugaauguuuugguggagagaugacgacc

SEQ ID NO: 93588 - RNA, 32 nt, Homo Sapiens
gaaagguaagaaagcugauagcuccuccaugu

SEQ ID NO: 93589 - RNA, 32 nt, Homo Sapiens
uuuuaguaagauauuugugucuguaugauggu

SEQ ID NO: 93590 - RNA, 32 nt, Homo Sapiens
gaaagguauugugacagauccacugggcugua

SEQ ID NO: 93591 - RNA, 32 nt, Homo Sapiens
uugcuguuguacacaggguauuucuagaagca

SEQ ID NO: 93592 - RNA, 32 nt, Homo Sapiens
gcaaugauacaugauaucauggccuagauccu

SEQ ID NO: 93593 - RNA, 32 nt, Homo Sapiens
uugacaauuggaaaagaaaaguguaauugcgu

SEQ ID NO: 93594 - RNA, 32 nt, Homo Sapiens
gaaaaaauauaaaguuaaaucucuacacuaaa

SEQ ID NO: 93595 - RNA, 32 nt, Homo Sapiens
aucucuuuucccuuuauucaagcugucaauuu

SEQ ID NO: 93596 - RNA, 32 nt, Homo Sapiens
aaugucuuuuucugcuuuugguauuagaacuu

SEQ ID NO: 93597 - RNA, 32 nt, Homo Sapiens
ggccaugcaagggcuuccugagaguucaggaa

SEQ ID NO: 93598 - RNA, 32 nt, Homo Sapiens
uccaguguucuucucucuaaacagcaaagcca

SEQ ID NO: 93599 - RNA, 32 nt, Homo Sapiens
cuacauucguaaaauucuauuuugugaauugg

SEQ ID NO: 93600 - RNA, 32 nt, Homo Sapiens
aggggugccugccauugaaaagacugucauac

SEQ ID NO: 93601 - RNA, 32 nt, Homo Sapiens
ggaauuguuuuaaagucaguuugagucucaca

SEQ ID NO: 93602 - RNA, 32 nt, Homo Sapiens
agcggagguagagggccaggaugguggugggg

SEQ ID NO: 93603 - RNA, 32 nt, Homo Sapiens
agagccaggugagcaguggagagaaggggggc

SEQ ID NO: 93604 - RNA, 32 nt, Homo Sapiens
aggaagguaugagacaucaaucaaauacauau

SEQ ID NO: 93605 - RNA, 32 nt, Homo Sapiens
ggucaccuucccacgggcuggcaccugggcgc

SEQ ID NO: 93606 - RNA, 32 nt, Homo Sapiens
accucucguuucugcccagcccucuguggcca

SEQ ID NO: 93607 - RNA, 32 nt, Homo Sapiens
aaagacugggaagagagcuagagggacuagga

SEQ ID NO: 93608 - RNA, 32 nt, Homo Sapiens
caaauaaugaauugguauaccauauccggaau

SEQ ID NO: 93609 - RNA, 32 nt, Homo Sapiens
ccacccugcaauccacaccccauccucugcug

SEQ ID NO: 93610 - RNA, 32 nt, Homo Sapiens
ggucagguacgcugcuaaacacugcagcuccc

SEQ ID NO: 93611 - RNA, 32 nt, Homo Sapiens
caagaagaaauuggggcgccauggggaaagcc

SEQ ID NO: 93612 - RNA, 32 nt, Homo Sapiens
aaagggaaugcauuaaaugauuguuuuaauac

SEQ ID NO: 93613 - RNA, 32 nt, Homo Sapiens
agucaacaaacuauuucuuauauaugugaaca

SEQ ID NO: 93614 - RNA, 32 nt, Homo Sapiens
gggcacagcuggagacgaucuugcuggcaggg

SEQ ID NO: 93615 - RNA, 32 nt, Homo Sapiens
gugcauaaaaauuaaauagaggugaacacaau

SEQ ID NO: 93616 - RNA, 32 nt, Homo Sapiens
uuucaagcagugcuuuaucucauguccuugaa

SEQ ID NO: 93617 - RNA, 32 nt, Homo Sapiens
ggagcgguccucaguggcgccaccugcuggug

SEQ ID NO: 93618 - RNA, 30 nt, Homo Sapiens
guaagcauauuuuugggggaaagugcugcu

SEQ ID NO: 93619 - RNA, 32 nt, Homo Sapiens
aaauaggaaagauacaucagauuuacagauua

SEQ ID NO: 93620 - RNA, 32 nt, Homo Sapiens
uuuugguauaaaauguaauuaaugagcaaaau

SEQ ID NO: 93621 - RNA, 32 nt, Homo Sapiens
ugcaguaggggcgggauggggguguggaagag

SEQ ID NO: 93622 - RNA, 32 nt, Homo Sapiens
uauguugaauccacccaaaucuauuguugucu

SEQ ID NO: 93623 - RNA, 32 nt, Homo Sapiens
aggggccccacugggcuuggccugcaguagua

SEQ ID NO: 93624 - RNA, 32 nt, Homo Sapiens
uccauucuuuggucgucguccucgguagcaag

SEQ ID NO: 93625 - RNA, 32 nt, Homo Sapiens
guaggcuacuccggagucacauuuucaucugu

SEQ ID NO: 93626 - RNA, 32 nt, Homo Sapiens
gagcgcgcgugcagccgccgccgccccgagca

SEQ ID NO: 93627 - RNA, 32 nt, Homo Sapiens
cuaacuuguaaauauauuuuaaucauuacuuc

SEQ ID NO: 93628 - RNA, 32 nt, Homo Sapiens
uguguguguccauggcauccggagcgaggcga

SEQ ID NO: 93629 - RNA, 32 nt, Homo Sapiens
uggaaugaugcaucagaaaacaugucauaaug

SEQ ID NO: 93630 - RNA, 27 nt, Homo Sapiens
gguccauccuucuuggacccacagacu

SEQ ID NO: 93631 - RNA, 32 nt, Homo Sapiens
aucaacaaaaacucagucuagacauauuauga

SEQ ID NO: 93632 - RNA, 32 nt, Homo Sapiens
gauuuuaaauuaaauuaauacauauauacgag

SEQ ID NO: 93633 - RNA, 32 nt, Homo Sapiens
uaggagguuugagguccaaauuccugggacuc

SEQ ID NO: 93634 - RNA, 32 nt, Homo Sapiens
uaccccacauucauuaggaaucuuggcgucca

SEQ ID NO: 93635 - RNA, 32 nt, Homo Sapiens
cagaggcagccucagcuccagggcuaaggacu

SEQ ID NO: 93636 - RNA, 32 nt, Homo Sapiens
guucgcggcgcgcgccaccggggaaggagcgg

SEQ ID NO: 93637 - RNA, 32 nt, Homo Sapiens
aacugggaaguugaacagaugaaaauaauugg

SEQ ID NO: 93638 - RNA, 32 nt, Homo Sapiens
cuguauccgcggcugccgcgcacucgccugcc

SEQ ID NO: 93639 - RNA, 32 nt, Homo Sapiens
aguguuauuuuguaucucucaagggcuuuugu

SEQ ID NO: 93640 - RNA, 32 nt, Homo Sapiens
uuucuaacaaaauaaacuugcuuguuugaucu

SEQ ID NO: 93641 - RNA, 32 nt, Homo Sapiens
aggaggcccaaccgcagaccuggcaaguggac

SEQ ID NO: 93642 - RNA, 32 nt, Homo Sapiens
accgauuaaucuagagauaaaauauuuucuua

SEQ ID NO: 93643 - RNA, 32 nt, Homo Sapiens
cacagaauaguuuuaaugagaaaugcagcuuu

SEQ ID NO: 93644 - RNA, 32 nt, Homo Sapiens
gggaaagggcuucaaggcaccaccagugguau

SEQ ID NO: 93645 - RNA, 32 nt, Homo Sapiens
aagugaauuaaugaugaggaucugaaaacuug

SEQ ID NO: 93646 - RNA, 32 nt, Homo Sapiens
ugaucaauucuguugguauuuucaguaucuca

SEQ ID NO: 93647 - RNA, 32 nt, Homo Sapiens
cuuggauuugagaucauguccauccacaucgu

SEQ ID NO: 93648 - RNA, 32 nt, Homo Sapiens
aauuaucuuuggauugugcugcccuauauaaa

SEQ ID NO: 93649 - RNA, 32 nt, Homo Sapiens
gggcgggagggcggggcguggggcggacggaa

SEQ ID NO: 93650 - RNA, 32 nt, Homo Sapiens
gcaagcuccgucugccggguucacgccauucu

SEQ ID NO: 93651 - RNA, 32 nt, Homo Sapiens
ugcuuacuuuuguauacuguauuuuccagcau

SEQ ID NO: 93652 - RNA, 32 nt, Homo Sapiens
cgcccccucccucccccuccccccuagaaccu

SEQ ID NO: 93653 - RNA, 32 nt, Homo Sapiens
acuguuacauuaauuuaacaugcauuuauaga

SEQ ID NO: 93654 - RNA, 32 nt, Homo Sapiens
ugccguuccuucccuuccugccccacaagcuc

SEQ ID NO: 93655 - RNA, 32 nt, Homo Sapiens
agaaagccauacauagaaugcuucaagcuauc

SEQ ID NO: 93656 - RNA, 32 nt, Homo Sapiens
cagagagaugcugaguuaggccugucaggucu

SEQ ID NO: 93657 - RNA, 32 nt, Homo Sapiens
ccaauuuuguggaacccugagaggaacauuuu

SEQ ID NO: 93658 - RNA, 32 nt, Homo Sapiens
cccuacaguguagcaauaaaaaucacauguca

SEQ ID NO: 93659 - RNA, 32 nt, Homo Sapiens
cgccugggggugccggcguuggugacugcggg

SEQ ID NO: 93660 - RNA, 32 nt, Homo Sapiens
gggguuuauugcugaggcccagcugugcagaa

SEQ ID NO: 93661 - RNA, 32 nt, Homo Sapiens
acaaaauaucuuuauuugauuugauuuuuuuu

SEQ ID NO: 93662 - RNA, 32 nt, Homo Sapiens
agauacguuaaauaauaaaauaagauaaucug

SEQ ID NO: 93663 - RNA, 32 nt, Homo Sapiens
ggccacaugcgguggcucaugccuguaauccc

SEQ ID NO: 93664 - RNA, 32 nt, Homo Sapiens
gcaucuacauauauuuguacaucuauaugaca

SEQ ID NO: 93665 - RNA, 32 nt, Homo Sapiens
accaacaaacuuaaaaguuuaucuaccucguu

SEQ ID NO: 93666 - RNA, 32 nt, Homo Sapiens
cuacugaauaaucaaagaucaucuuagauuug

SEQ ID NO: 93667 - RNA, 32 nt, Homo Sapiens
aggguugaagauaaauaugguagcaaugucua

SEQ ID NO: 93668 - RNA, 32 nt, Homo Sapiens
gcacacgaauaaauaacgaaugaacguacgag

SEQ ID NO: 93669 - RNA, 28 nt, Homo Sapiens
ccccagcagggcccuccgagguggagca

SEQ ID NO: 93670 - RNA, 32 nt, Homo Sapiens
gccgggcgcgccccgucgcugccugacucggc

SEQ ID NO: 93671 - RNA, 32 nt, Homo Sapiens
gaggccuucaguacagccccagccaacucuca

SEQ ID NO: 93672 - RNA, 32 nt, Homo Sapiens
uuuucaggaaagggcgcugcgaccacccccgu

SEQ ID NO: 93673 - RNA, 30 nt, Homo Sapiens
uuccuggucaccccuuucaacucugaaggg

SEQ ID NO: 93674 - RNA, 32 nt, Homo Sapiens
cugggagaagaccaccugaauucucaucccau

SEQ ID NO: 93675 - RNA, 32 nt, Homo Sapiens
cucccuggggcucggcuuggaccgcgaugggg

SEQ ID NO: 93676 - RNA, 32 nt, Homo Sapiens
cucuccgccuccccgucuccuccucaggcucg

SEQ ID NO: 93677 - RNA, 32 nt, Homo Sapiens
gcaggcagaaagcggcuucgugccggcggagg

SEQ ID NO: 93678 - RNA, 32 nt, Homo Sapiens
gaauugauuccaugcuaaaugucaguuaccag

SEQ ID NO: 93679 - RNA, 32 nt, Homo Sapiens
cgacccucacuggccuggccuugugggggcuc

SEQ ID NO: 93680 - RNA, 32 nt, Homo Sapiens
gcugcacuggauaccccaccccggugccgggc

SEQ ID NO: 93681 - RNA, 32 nt, Homo Sapiens
gccauuuugaagaucucaguuuuacugaaagg

SEQ ID NO: 93682 - RNA, 32 nt, Homo Sapiens
uucaggaccagccaguuuacaagcaugucuca

SEQ ID NO: 93683 - RNA, 32 nt, Homo Sapiens
aaaacuauauauacauauacauauguguguau

SEQ ID NO: 93684 - RNA, 32 nt, Homo Sapiens
gccucaggccggucggccgccgcuccccuccc

SEQ ID NO: 93685 - RNA, 32 nt, Homo Sapiens
ucggaguggggagaggcugagccgggccaccg

SEQ ID NO: 93686 - RNA, 32 nt, Homo Sapiens
ccauuuaaaaauacugucucagcuccuuuuca

SEQ ID NO: 93687 - RNA, 32 nt, Homo Sapiens
uacagccucagcugcgaugcccacgagaaaca

SEQ ID NO: 93688 - RNA, 32 nt, Homo Sapiens
aagaagacaaauucacagaagccuggagccua

SEQ ID NO: 93689 - RNA, 32 nt, Homo Sapiens
uuuuuugcuuugucgguggcugucgugaaauu

SEQ ID NO: 93690 - RNA, 32 nt, Homo Sapiens
cacaggcccucccuggcacuguccccccaacc

SEQ ID NO: 93691 - RNA, 32 nt, Homo Sapiens
ggagagguucugugcaaaacuaccacauucug

SEQ ID NO: 93692 - RNA, 32 nt, Homo Sapiens
gauuuacuuggagaagauuugcuaucuggcaa

SEQ ID NO: 93693 - RNA, 27 nt, Homo Sapiens
ugagacagaggauucugguguaggggu

SEQ ID NO: 93694 - RNA, 32 nt, Homo Sapiens
acuagguuauaagaucuuucugugacagguaa

SEQ ID NO: 93695 - RNA, 32 nt, Homo Sapiens
caccagcagcugguccuggccuuggagcgcaa

SEQ ID NO: 93696 - RNA, 32 nt, Homo Sapiens
ucaguguaauaaaaacagaaucuuuguauauc

SEQ ID NO: 93697 - RNA, 32 nt, Homo Sapiens
uucccgaggaugccuccguccuccccaacccc

SEQ ID NO: 93698 - RNA, 32 nt, Homo Sapiens
uuggccaauauuuggagccugaccaagaaguu

SEQ ID NO: 93699 - RNA, 32 nt, Homo Sapiens
caagcaucaaggucuaaauaauuuucagaaga

SEQ ID NO: 93700 - RNA, 32 nt, Homo Sapiens
ccauuuccaugaugaugaugaugggacucaau

SEQ ID NO: 93701 - RNA, 32 nt, Homo Sapiens
agagagggaaagggcuugguuaggaucacacc

SEQ ID NO: 93702 - RNA, 32 nt, Homo Sapiens
ugcgucccggcccuuccacaucgguccaccgc

SEQ ID NO: 93703 - RNA, 32 nt, Homo Sapiens
cuucucaaaacaaacaaacaaacaccauauua

SEQ ID NO: 93704 - RNA, 32 nt, Homo Sapiens
ggagcgggcgcucgaggcgcgcacggcgcggg

SEQ ID NO: 93705 - RNA, 32 nt, Homo Sapiens
ucacgguggaagaugauguggauaugcuuucc

SEQ ID NO: 93706 - RNA, 32 nt, Homo Sapiens
cccuagucuagucucugccccuggauaguguc

SEQ ID NO: 93707 - RNA, 30 nt, Homo Sapiens
ugagaacagcggagcgcggaaaccgcggag

SEQ ID NO: 93708 - RNA, 32 nt, Homo Sapiens
cuuguugugaauauuucuuugaugauuguuaa

SEQ ID NO: 93709 - RNA, 32 nt, Homo Sapiens
aaaguuuuaccauuuuaaaguugccaacauuu

SEQ ID NO: 93710 - RNA, 32 nt, Homo Sapiens
aguggaucucuuaugaaugaggaggaaugugg

SEQ ID NO: 93711 - RNA, 30 nt, Homo Sapiens
cggcccggacaggccacgggucccucuccc

SEQ ID NO: 93712 - RNA, 32 nt, Homo Sapiens
gauguuuuugugcccagcaacaugcuguagga

SEQ ID NO: 93713 - RNA, 32 nt, Homo Sapiens
gccgcgcgccgcggcgcuguaaucggacacca

SEQ ID NO: 93714 - RNA, 32 nt, Homo Sapiens
aauuucuucuauuuuuaguagagacgggguuu

SEQ ID NO: 93715 - RNA, 32 nt, Homo Sapiens
aucgucauaucauauuuaucgcaucucauaac

SEQ ID NO: 93716 - RNA, 32 nt, Homo Sapiens
auacuuaugcaagauauuuuugaaguaaauua

SEQ ID NO: 93717 - RNA, 32 nt, Homo Sapiens
ggggguacaccgaugggucacacugggucugg

SEQ ID NO: 93718 - RNA, 32 nt, Homo Sapiens
ccuuuuuucuucaaaucugcuccaaucaucca

SEQ ID NO: 93719 - RNA, 32 nt, Homo Sapiens
cgugggaaggagcggacccugcucuccccggg

SEQ ID NO: 93720 - RNA, 32 nt, Homo Sapiens
acuuguuaucccacacuaucucuuguuuuguu

SEQ ID NO: 93721 - RNA, 32 nt, Homo Sapiens
cccagugaucuugggcugggguugucuuuagg

SEQ ID NO: 93722 - RNA, 32 nt, Homo Sapiens
cauggacaacaaauucuuagucuauaauauua

SEQ ID NO: 93723 - RNA, 32 nt, Homo Sapiens
gcucccuccacccaccuugagaccugggagga

SEQ ID NO: 93724 - RNA, 32 nt, Homo Sapiens
cacaaggucaaggcccgaccuccgcccauccc

SEQ ID NO: 93725 - RNA, 32 nt, Homo Sapiens
aaaauuaaaaauucauugaagcugaaaaaaaa

SEQ ID NO: 93726 - RNA, 32 nt, Homo Sapiens
uagaagacccuucuggggagccagggagcuca

SEQ ID NO: 93727 - RNA, 32 nt, Homo Sapiens
ggaucaguuuuuccucuuaggaaagcugcagg

SEQ ID NO: 93728 - RNA, 32 nt, Homo Sapiens
cccuucuuauucauuuacuuuacaauaccaaa

SEQ ID NO: 93729 - RNA, 28 nt, Homo Sapiens
agaaugucagaugcagcagaagcucccc

SEQ ID NO: 93730 - RNA, 32 nt, Homo Sapiens
aauggccagauuuuaauaaacguuguuaccca

SEQ ID NO: 93731 - RNA, 32 nt, Homo Sapiens
cugccccaccgccacucacgucacucggggcu

SEQ ID NO: 93732 - RNA, 32 nt, Homo Sapiens
aguuugagccugcggugagcugugaaugcacc

SEQ ID NO: 93733 - RNA, 27 nt, Homo Sapiens
guuaugaaauaaaagaggauacaaaca

SEQ ID NO: 93734 - RNA, 32 nt, Homo Sapiens
auuuuuguuuucuguucccaauaaaaauucca

SEQ ID NO: 93735 - RNA, 32 nt, Homo Sapiens
acugugugaagauaaggacagaagugcagagc

SEQ ID NO: 93736 - RNA, 32 nt, Homo Sapiens
uuuaccuugguaguuuauuuguggauggcagu

SEQ ID NO: 93737 - RNA, 32 nt, Homo Sapiens
ccaggaagccccaguaggagggagcuucagac

SEQ ID NO: 93738 - RNA, 32 nt, Homo Sapiens
ccucgugcgcgccgcgucgccguggagacgag

SEQ ID NO: 93739 - RNA, 28 nt, Homo Sapiens
cuauuggaagauuaacauuauuuaccaa

SEQ ID NO: 93740 - RNA, 32 nt, Homo Sapiens
auguuugaguaccugaugaaaaugaauagaga

SEQ ID NO: 93741 - RNA, 31 nt, Homo Sapiens
cuacugucaguggcuuugccaagaugggagg

SEQ ID NO: 93742 - RNA, 32 nt, Homo Sapiens
ucggccccgcggccaagcgcgucagcggcccc

SEQ ID NO: 93743 - RNA, 32 nt, Homo Sapiens
uagguucugaugcauggaaaggugguugguga

SEQ ID NO: 93744 - RNA, 32 nt, Homo Sapiens
gcagaagaacuaacauaacuaacuccauuuuu

SEQ ID NO: 93745 - RNA, 32 nt, Homo Sapiens
cuccuccguuuauaagcacucccuuuaugggg

SEQ ID NO: 93746 - RNA, 32 nt, Homo Sapiens
ugguguggccuucucuugcaagagggagaaga

SEQ ID NO: 93747 - RNA, 32 nt, Homo Sapiens
accaaacagcucagggacccucuugccccuuc

SEQ ID NO: 93748 - RNA, 32 nt, Homo Sapiens
ggagcggagcagccauucuccaggccccgugg

SEQ ID NO: 93749 - RNA, 32 nt, Homo Sapiens
uccccgugccagcacacacgaguccagcuucc

SEQ ID NO: 93750 - RNA, 32 nt, Homo Sapiens
ccgcgccugccugcccagcccgcggaaccccg

SEQ ID NO: 93751 - RNA, 32 nt, Homo Sapiens
aaagccuccaguugccuauuaugaaaucagca

SEQ ID NO: 93752 - RNA, 32 nt, Homo Sapiens
uuacagcaucacgagugcuauuguugccugug

SEQ ID NO: 93753 - RNA, 32 nt, Homo Sapiens
accccacccccuuggcccccagccucacugcg

SEQ ID NO: 93754 - RNA, 32 nt, Homo Sapiens
gcuaaaauugguuaauugguuccuuugcauga

SEQ ID NO: 93755 - RNA, 32 nt, Homo Sapiens
guagccacugacuugcucgcgcggccguggcc

SEQ ID NO: 93756 - RNA, 32 nt, Homo Sapiens
caaauccagcuuucccauuuuacugaugagaa

SEQ ID NO: 93757 - RNA, 32 nt, Homo Sapiens
auggaccacaguguuugcacauauuugcaauu

SEQ ID NO: 93758 - RNA, 32 nt, Homo Sapiens
ucucuggcugacauccucucccugcgggaccg

SEQ ID NO: 93759 - RNA, 32 nt, Homo Sapiens
uacguggaggaaccacuaucggagacagaugg

SEQ ID NO: 93760 - RNA, 32 nt, Homo Sapiens
uggcaaggucuucagucaaaguuuaaauccug

SEQ ID NO: 93761 - RNA, 32 nt, Homo Sapiens
uaguccacugugcuuuguuuccucuguuucuu

SEQ ID NO: 93762 - RNA, 32 nt, Homo Sapiens
cuugcugacuuaccaaagaagaguuaagaaga

SEQ ID NO: 93763 - RNA, 32 nt, Homo Sapiens
ucagcgugacagcaucacccucuuucuucccu

SEQ ID NO: 93764 - RNA, 32 nt, Homo Sapiens
guccuccucggccccagguccagcggugcccu

SEQ ID NO: 93765 - RNA, 32 nt, Homo Sapiens
uaacuuuuuuuuuuugccugugaauugagugc

SEQ ID NO: 93766 - RNA, 32 nt, Homo Sapiens
ggcugugggugggauggacuggcugccggacc

SEQ ID NO: 93767 - RNA, 32 nt, Homo Sapiens
accucgcacugacaccauggacuccaugccaa

SEQ ID NO: 93768 - RNA, 32 nt, Homo Sapiens
agucccucucuuuugccaacccucauuugggg

SEQ ID NO: 93769 - RNA, 32 nt, Homo Sapiens
cuccaacucugcagcaguggcagcagcaguca

SEQ ID NO: 93770 - RNA, 32 nt, Homo Sapiens
aguauuuuucuuuuggaaaugugccuuauguu

SEQ ID NO: 93771 - RNA, 32 nt, Homo Sapiens
ggugagcguccccgggcgccuccggagcgccg

SEQ ID NO: 93772 - RNA, 32 nt, Homo Sapiens
uggauuaaacauuacuucgcuccgucugccug

SEQ ID NO: 93773 - RNA, 32 nt, Homo Sapiens
aguggcaaggccagccgcccccugucuucccu

SEQ ID NO: 93774 - RNA, 32 nt, Homo Sapiens
gcccuucugaacaaagauauaaaccuagcaua

SEQ ID NO: 93775 - RNA, 32 nt, Homo Sapiens
gggcggaaagccauauaucuuauuaagcuuua

SEQ ID NO: 93776 - RNA, 32 nt, Homo Sapiens
ggccccugcccggcucccccacccauucugcu

SEQ ID NO: 93777 - RNA, 32 nt, Homo Sapiens
ucucaaagauuucaugagacaagcuggggaag

SEQ ID NO: 93778 - RNA, 32 nt, Homo Sapiens
uauuauuacuaaugcucugaucuguccaaacu

SEQ ID NO: 93779 - RNA, 32 nt, Homo Sapiens
ccaagggcacaucccaccugccugagccccgc

SEQ ID NO: 93780 - RNA, 32 nt, Homo Sapiens
auuuuugauuaagagaaaaauguaauacaauu

SEQ ID NO: 93781 - RNA, 32 nt, Homo Sapiens
ccguguaauguuuuauugcauugauaauguuu

SEQ ID NO: 93782 - RNA, 32 nt, Homo Sapiens
cacccgcccuccccguccugccuccucggccc

SEQ ID NO: 93783 - RNA, 32 nt, Homo Sapiens
uucggauguacaaaacaaagacuuuucaucaa

SEQ ID NO: 93784 - RNA, 32 nt, Homo Sapiens
accugcccacagggcucuguccucuaguuuug

SEQ ID NO: 93785 - RNA, 30 nt, Homo Sapiens
guggggugcugccccaugcaaaaaaaucca

SEQ ID NO: 93786 - RNA, 32 nt, Homo Sapiens
ggguggcgguggcaauaggccaaggcugggac

SEQ ID NO: 93787 - RNA, 32 nt, Homo Sapiens
ugcaacgcucacugguuuuggccaccccuugc

SEQ ID NO: 93788 - RNA, 32 nt, Homo Sapiens
agaauacugcuaguuucuuaauuuuaauucac

SEQ ID NO: 93789 - RNA, 32 nt, Homo Sapiens
uagcuuugaggguaaaugaaaauauaacccau

SEQ ID NO: 93790 - RNA, 30 nt, Homo Sapiens
uggcaucugcuaauggugcccuuugaaagu

SEQ ID NO: 93791 - RNA, 32 nt, Homo Sapiens
gagccaauuaaaccucuuuucuuuauaaauug

SEQ ID NO: 93792 - RNA, 32 nt, Homo Sapiens
auccugaguuguaggaacugcuuuccaacucc

SEQ ID NO: 93793 - RNA, 32 nt, Homo Sapiens
accuggaggcugggcuucaggcuggggggaga

SEQ ID NO: 93794 - RNA, 32 nt, Homo Sapiens
cccuguucucuagugugaguaguuagauuacu

SEQ ID NO: 93795 - RNA, 30 nt, Homo Sapiens
cugcaauuccuugccacuugcuauguccac

SEQ ID NO: 93796 - RNA, 31 nt, Homo Sapiens
gaaagcuuacccuuggauaaccaguuugacu

SEQ ID NO: 93797 - RNA, 32 nt, Homo Sapiens
ccaugguuuuucuuccaaaucaaguauuuuac

SEQ ID NO: 93798 - RNA, 32 nt, Homo Sapiens
cccucgcgcccucuccuucuugugccuugagu

SEQ ID NO: 93799 - RNA, 30 nt, Homo Sapiens
ggaggauguucccugcucaggaggaggccg

SEQ ID NO: 93800 - RNA, 32 nt, Homo Sapiens
auugguuuaugcaugaauaugugauguauuuu

SEQ ID NO: 93801 - RNA, 30 nt, Homo Sapiens
uaguacgcacuugccgcuaagccuuaccag

SEQ ID NO: 93802 - RNA, 32 nt, Homo Sapiens
acuuucccacccuauccuuccuccccacucug

SEQ ID NO: 93803 - RNA, 32 nt, Homo Sapiens
uucuuuuggcauuuucuuuucaauguucuuau

SEQ ID NO: 93804 - RNA, 32 nt, Homo Sapiens
gaucacaugcuuuugucuccacagcaaccagc

SEQ ID NO: 93805 - RNA, 32 nt, Homo Sapiens
auuaucucuccaugggaagcuaaguuauaaaa

SEQ ID NO: 93806 - RNA, 32 nt, Homo Sapiens
cuuugcauagcuggguugcagcugcgaaccuc

SEQ ID NO: 93807 - RNA, 32 nt, Homo Sapiens
cccagcuacucuauagccugaggugggagaau

SEQ ID NO: 93808 - RNA, 32 nt, Homo Sapiens
ggguggaaaaaucaacguggccuuugaguuca

SEQ ID NO: 93809 - RNA, 32 nt, Homo Sapiens
uaugcuuacccaugcuuaaauucuagggaagc

SEQ ID NO: 93810 - RNA, 32 nt, Homo Sapiens
gaagggcagaguuacuugauaagggacuugau

SEQ ID NO: 93811 - RNA, 32 nt, Homo Sapiens
gaacaacacaauucgauucaccguauggcuuc

SEQ ID NO: 93812 - RNA, 32 nt, Homo Sapiens
gcgcuacuuccacuccagcgccaacuacacug

SEQ ID NO: 93813 - RNA, 32 nt, Homo Sapiens
agcagagcagagcagagcuccucagccagcac

SEQ ID NO: 93814 - RNA, 32 nt, Homo Sapiens
acugcgagacaaaguggaccgaggaugaauga

SEQ ID NO: 93815 - RNA, 31 nt, Homo Sapiens
gacuuguggauuuauguuucaguguacugga

SEQ ID NO: 93816 - RNA, 32 nt, Homo Sapiens
uguuaaaauggggaugauaauacugaccuacc

SEQ ID NO: 93817 - RNA, 32 nt, Homo Sapiens
ccuacagugcggauaaaggugcggaugcugcu

SEQ ID NO: 93818 - RNA, 32 nt, Homo Sapiens
gaaaaagagauuaaaugcauacagaccucaaa

SEQ ID NO: 93819 - RNA, 31 nt, Homo Sapiens
uccaagcagacucuggguugcuguuaaccca

SEQ ID NO: 93820 - RNA, 32 nt, Homo Sapiens
uaugccacuuuucucuucaaugccuuugacac

SEQ ID NO: 93821 - RNA, 32 nt, Homo Sapiens
acgggcccuaaaaggacacuccuuagaugacu

SEQ ID NO: 93822 - RNA, 32 nt, Homo Sapiens
gacagggccccggcuggacacacguggaacca

SEQ ID NO: 93823 - RNA, 32 nt, Homo Sapiens
ccuaagugcccugugcugguugccaggcgcag

SEQ ID NO: 93824 - RNA, 32 nt, Homo Sapiens
agcgccgcgucccugcgccgcugcggcggacu

SEQ ID NO: 93825 - RNA, 32 nt, Homo Sapiens
caauccaauuuuaaaauggaggaaaggacuug

SEQ ID NO: 93826 - RNA, 32 nt, Homo Sapiens
cucuuggggaaacguaauaaaaaugaacuuuu

SEQ ID NO: 93827 - RNA, 32 nt, Homo Sapiens
uuuauaucuucaguacucaaguacuucuugaa

SEQ ID NO: 93828 - RNA, 32 nt, Homo Sapiens
cacccuuggugcccuguacuucacuguggucc

SEQ ID NO: 93829 - RNA, 32 nt, Homo Sapiens
gguuagggaucuuuugguuuuaaaucacagaa

SEQ ID NO: 93830 - RNA, 32 nt, Homo Sapiens
ggacaccaccuggccuggugggagaggagcuu

SEQ ID NO: 93831 - RNA, 32 nt, Homo Sapiens
aagaauaaaccuaaguuuuugugauuguuaaa

SEQ ID NO: 93832 - RNA, 32 nt, Homo Sapiens
cugaccuucacccagagcugccuaugcccagc

SEQ ID NO: 93833 - RNA, 32 nt, Homo Sapiens
ugguuuuggccauugacuggcaacauggcagu

SEQ ID NO: 93834 - RNA, 32 nt, Homo Sapiens
agcaccuuaggacuacagacguuuaucaucuc

SEQ ID NO: 93835 - RNA, 32 nt, Homo Sapiens
uaacugguugcugugucauaacuucauagaug

SEQ ID NO: 93836 - RNA, 32 nt, Homo Sapiens
cgugggcucacagaccccggccucggagcccg

SEQ ID NO: 93837 - RNA, 32 nt, Homo Sapiens
uucaccacuguaguucucucauuuccaaacca

SEQ ID NO: 93838 - RNA, 32 nt, Homo Sapiens
gucaaugaagaccucaaagucuggagaaaaau

SEQ ID NO: 93839 - RNA, 32 nt, Homo Sapiens
ccucuccaugccuauuugauggaagugcaggc

SEQ ID NO: 93840 - RNA, 32 nt, Homo Sapiens
cuggccccgaacuguguuucugcuaauaugaa

SEQ ID NO: 93841 - RNA, 32 nt, Homo Sapiens
ccguaaccccaccccacccccaagaguuucca

SEQ ID NO: 93842 - RNA, 32 nt, Homo Sapiens
acccccacuccagcugcagacgccacggaguu

SEQ ID NO: 93843 - RNA, 32 nt, Homo Sapiens
ccgccgagccgggcuuccuggguguuucaggc

SEQ ID NO: 93844 - RNA, 32 nt, Homo Sapiens
gcagcucccgucuccuucccucuugacuccua

SEQ ID NO: 93845 - RNA, 32 nt, Homo Sapiens
uuaccucugcuuggggguuuuguguguucccc

SEQ ID NO: 93846 - RNA, 32 nt, Homo Sapiens
caguacccgaacuacgaccagcgacugaaucu

SEQ ID NO: 93847 - RNA, 32 nt, Homo Sapiens
aggccccgacacuggguggccuggacaaucca

SEQ ID NO: 93848 - RNA, 32 nt, Homo Sapiens
gaccucugugcagcuaaggaugcuaugcuuug

SEQ ID NO: 93849 - RNA, 32 nt, Homo Sapiens
ccgucugcgaggagucccgggguguggggcau

SEQ ID NO: 93850 - RNA, 32 nt, Homo Sapiens
agcuguuccucaaacgacacgcagccgaggug

SEQ ID NO: 93851 - RNA, 32 nt, Homo Sapiens
ucagccuucagcuugagcccggcggcccccgc

SEQ ID NO: 93852 - RNA, 29 nt, Homo Sapiens
cuguggaggcagcggcggacgccgagcua

SEQ ID NO: 93853 - RNA, 32 nt, Homo Sapiens
cagagucaaaugcagaagugggcuugucaugg

SEQ ID NO: 93854 - RNA, 32 nt, Homo Sapiens
cgucucaucuucucucaucugaucacuucaug

SEQ ID NO: 93855 - RNA, 32 nt, Homo Sapiens
uuguaagagugauuuuuucaauauauuuuauu

SEQ ID NO: 93856 - RNA, 32 nt, Homo Sapiens
ugaaaggugucuuauauuuaaaaaagauugua

SEQ ID NO: 93857 - RNA, 32 nt, Homo Sapiens
ccccuagcugacccccaccuuccugccgccaa

SEQ ID NO: 93858 - RNA, 32 nt, Homo Sapiens
gccccugccgcaccgcugcaguggcucagcca

SEQ ID NO: 93859 - RNA, 29 nt, Homo Sapiens
caucauggcggcugagugggcuucucguu

SEQ ID NO: 93860 - RNA, 32 nt, Homo Sapiens
uagguuauuuauguuaaauuuuucucauaaaa

SEQ ID NO: 93861 - RNA, 32 nt, Homo Sapiens
uuuugaaccaauuugcagaagcucacauagca

SEQ ID NO: 93862 - RNA, 32 nt, Homo Sapiens
cguggugaggauguuggcaaaccagugcaugc

SEQ ID NO: 93863 - RNA, 32 nt, Homo Sapiens
ucuguaagcaagcaguauacuuugaaaguaac

SEQ ID NO: 93864 - RNA, 32 nt, Homo Sapiens
uccucguuugcugccuccuccuccuccugcag

SEQ ID NO: 93865 - RNA, 32 nt, Homo Sapiens
acuuacuugacaacaaaacccauucuuucagu

SEQ ID NO: 93866 - RNA, 32 nt, Homo Sapiens
ccuuggccgggaacccggggcucuagggcugc

SEQ ID NO: 93867 - RNA, 32 nt, Homo Sapiens
cagcuuugccgggaaguaaagcuuuggaggaa

SEQ ID NO: 93868 - RNA, 32 nt, Homo Sapiens
cgggaggccccggagcuggcccauggggagca

SEQ ID NO: 93869 - RNA, 32 nt, Homo Sapiens
ucaugaucuaaaagaaucaauaaauaagagug

SEQ ID NO: 93870 - RNA, 32 nt, Homo Sapiens
aggaaguuuguucacuucgaugacuggauaca

SEQ ID NO: 93871 - RNA, 32 nt, Homo Sapiens
cacccgcuagcugugcugcugcugaccgacgg

SEQ ID NO: 93872 - RNA, 32 nt, Homo Sapiens
cccugggaacagagcaacagucucucuggguc

SEQ ID NO: 93873 - RNA, 32 nt, Homo Sapiens
ggguguauugaauaauggugggaauugggcuu

SEQ ID NO: 93874 - RNA, 32 nt, Homo Sapiens
aggcccaggcccgggaggauccccccacguug

SEQ ID NO: 93875 - RNA, 31 nt, Homo Sapiens
agcacacuagcccuggcuccaagggcugccu

SEQ ID NO: 93876 - RNA, 32 nt, Homo Sapiens
ccuccgcggccggcugcguggugaucguuggc

SEQ ID NO: 93877 - RNA, 32 nt, Homo Sapiens
uaaaugaaugaaauuuugauuuccugagaauu

SEQ ID NO: 93878 - RNA, 32 nt, Homo Sapiens
aaucccuucuccccacagccagcccucgccaa

SEQ ID NO: 93879 - RNA, 32 nt, Homo Sapiens
ucguggugggcaacugugcugcuguuucuuuu

SEQ ID NO: 93880 - RNA, 32 nt, Homo Sapiens
augugaauuccaagaguugccuggacagggca

SEQ ID NO: 93881 - RNA, 32 nt, Homo Sapiens
ccgccgccaccauggccacgccgcugcccggc

SEQ ID NO: 93882 - RNA, 32 nt, Homo Sapiens
ggagccacaugcccccacccagcccccucugg

SEQ ID NO: 93883 - RNA, 32 nt, Homo Sapiens
gggagggcauuugcauugugauggaagacaga

SEQ ID NO: 93884 - RNA, 29 nt, Homo Sapiens
uugcugagaugugagugaaaccagcuagu

SEQ ID NO: 93885 - RNA, 32 nt, Homo Sapiens
cugaugugccgcuggcugaacuuuggguucau

SEQ ID NO: 93886 - RNA, 32 nt, Homo Sapiens
acuggccuccuggcagaagccgagugugcugg

SEQ ID NO: 93887 - RNA, 32 nt, Homo Sapiens
cggcuccgccagcgcugccgccgcccucgagg

SEQ ID NO: 93888 - RNA, 32 nt, Homo Sapiens
acaguauuuauaaaugaguaaauaaaacugug

SEQ ID NO: 93889 - RNA, 32 nt, Homo Sapiens
cacuuuuaauuuucauuuaacaauggauuaga

SEQ ID NO: 93890 - RNA, 32 nt, Homo Sapiens
uaugauuaauaaaaaugugcauggcuuuccug

SEQ ID NO: 93891 - RNA, 32 nt, Homo Sapiens
accugagacgccgcccucgccgagggcccaug

SEQ ID NO: 93892 - RNA, 32 nt, Homo Sapiens
ucgaguggaagcaugaacaaauccacaaaaug

SEQ ID NO: 93893 - RNA, 28 nt, Homo Sapiens
uuucaccguguuaccaggauggucucaa

SEQ ID NO: 93894 - RNA, 32 nt, Homo Sapiens
aaguaacuuuuuuuuuuugccugugaauugag

SEQ ID NO: 93895 - RNA, 32 nt, Homo Sapiens
guggccgaggcgguugggcggaggcggagcag

SEQ ID NO: 93896 - RNA, 32 nt, Homo Sapiens
gcgcgagcgggaagaggggaccugcagccaca

SEQ ID NO: 93897 - RNA, 30 nt, Homo Sapiens
uccuccggaggugggaucccagagccugcc

SEQ ID NO: 93898 - RNA, 32 nt, Homo Sapiens
auucauagaaaaugcauagaaauuuguaacac

SEQ ID NO: 93899 - RNA, 32 nt, Homo Sapiens
acaccagcgaggggccaggccgggccagacuc

SEQ ID NO: 93900 - RNA, 32 nt, Homo Sapiens
cgggggccgggcggaugaugccgucggagagc

SEQ ID NO: 93901 - RNA, 32 nt, Homo Sapiens
cuugugaaaccucagcgugaagggacauauca

SEQ ID NO: 93902 - RNA, 32 nt, Homo Sapiens
cuguuggucgcccucugugcguuacaacaaug

SEQ ID NO: 93903 - RNA, 32 nt, Homo Sapiens
gaacagucuugcucuugccauguucuuugauu

SEQ ID NO: 93904 - RNA, 32 nt, Homo Sapiens
ccuacccuauauccagcauccuccucaugagc

SEQ ID NO: 93905 - RNA, 32 nt, Homo Sapiens
gcccuagaggggccuaucucugcccugaguau

SEQ ID NO: 93906 - RNA, 32 nt, Homo Sapiens
uuucuuucuuguuuuucuucccccccaccccc

SEQ ID NO: 93907 - RNA, 32 nt, Homo Sapiens
accauggucauuuuuaggcauguaucauucau

SEQ ID NO: 93908 - RNA, 30 nt, Homo Sapiens
cgucguccuacaaaugaggaaaccgagccu

SEQ ID NO: 93909 - RNA, 32 nt, Homo Sapiens
ggcagcagaagaccaauguuccagcucaagaa

SEQ ID NO: 93910 - RNA, 32 nt, Homo Sapiens
accugaagaaaugagugguggauuggcuccaa

SEQ ID NO: 93911 - RNA, 32 nt, Homo Sapiens
uuuuuucuguucucuccaaccacacaucaucc

SEQ ID NO: 93912 - RNA, 32 nt, Homo Sapiens
gccccacgcgcgggcucgcgcuucgguuuccc

SEQ ID NO: 93913 - RNA, 32 nt, Homo Sapiens
aagauuuugauaauauauacaaaccuuuagcu

SEQ ID NO: 93914 - RNA, 32 nt, Homo Sapiens
accaauaaccaaacagaagggaaaugucugga

SEQ ID NO: 93915 - RNA, 32 nt, Homo Sapiens
cauuccucugcuuuuccaagaaugugaaucuu

SEQ ID NO: 93916 - RNA, 31 nt, Homo Sapiens
aaaaugcauuugaccaggauaaaugagguau

SEQ ID NO: 93917 - RNA, 32 nt, Homo Sapiens
ucuuuaaggguaaggaggcuaguuacaguguc

SEQ ID NO: 93918 - RNA, 32 nt, Homo Sapiens
aucaauagguuacuggacaaaagcagaaaaac

SEQ ID NO: 93919 - RNA, 32 nt, Homo Sapiens
cagauugugucucauucaucuucagacacagg

SEQ ID NO: 93920 - RNA, 32 nt, Homo Sapiens
gaacuucuccuccuccuccuccccuacaauuc

SEQ ID NO: 93921 - RNA, 32 nt, Homo Sapiens
acucccugagccuaucgucuccacugacagcc

SEQ ID NO: 93922 - RNA, 32 nt, Homo Sapiens
agggaaagucaaggaaaccuugcugcuaagua

SEQ ID NO: 93923 - RNA, 32 nt, Homo Sapiens
uuuauaguuaugcuuuguguuuuugauauucu

SEQ ID NO: 93924 - RNA, 32 nt, Homo Sapiens
aaaccgggugccggcaggcgccagucgcaggu

SEQ ID NO: 93925 - RNA, 32 nt, Homo Sapiens
cuucuaggguagcaucuuuauguaucuauuau

SEQ ID NO: 93926 - RNA, 32 nt, Homo Sapiens
caaucaccacuuauucucaggcaaauuauaug

SEQ ID NO: 93927 - RNA, 32 nt, Homo Sapiens
ggggcccaggacaagcaggaacuggggaucca

SEQ ID NO: 93928 - RNA, 32 nt, Homo Sapiens
gcguucccacuuccccgcacucugacccggcc

SEQ ID NO: 93929 - RNA, 32 nt, Homo Sapiens
uacgucaaaaucuguaaaaucuguucuugcau

SEQ ID NO: 93930 - RNA, 32 nt, Homo Sapiens
caggcaaugaacucgcucuucaaauaccauag

SEQ ID NO: 93931 - RNA, 32 nt, Homo Sapiens
ccucaggaaaucaaccaaugcugcggaaggcg

SEQ ID NO: 93932 - RNA, 32 nt, Homo Sapiens
gcaugauuauagcucuuguuuuucucacaguu

SEQ ID NO: 93933 - RNA, 32 nt, Homo Sapiens
auaaauauuuuuccauaaaauaguugugauua

SEQ ID NO: 93934 - RNA, 32 nt, Homo Sapiens
caaguacccaagugguauucuuccaaucuuau

SEQ ID NO: 93935 - RNA, 32 nt, Homo Sapiens
aagcccgugucugcagaaccccugucagaaug

SEQ ID NO: 93936 - RNA, 32 nt, Homo Sapiens
uucacauaucuguuuaugccuacuucaauacu

SEQ ID NO: 93937 - RNA, 32 nt, Homo Sapiens
cugaggcccuggcccugcccccggccccugcc

SEQ ID NO: 93938 - RNA, 32 nt, Homo Sapiens
ugguugguggaaagaagagaugcuugggaacc

SEQ ID NO: 93939 - RNA, 32 nt, Homo Sapiens
cacgccugggaggggcccagcugggguuacug

SEQ ID NO: 93940 - RNA, 32 nt, Homo Sapiens
gacuuaucucauaaauaaauagauagauacuc

SEQ ID NO: 93941 - RNA, 32 nt, Homo Sapiens
ucaaauggaaaacaucuuccucaaagucugcc

SEQ ID NO: 93942 - RNA, 32 nt, Homo Sapiens
gccgcgcccccuugcuggccccauggaggcgg

SEQ ID NO: 93943 - RNA, 32 nt, Homo Sapiens
cggcccacaaaacagccagucagguuggcuuu

SEQ ID NO: 93944 - RNA, 32 nt, Homo Sapiens
ggcgacuuucccuauaucgcagagacucaucc

SEQ ID NO: 93945 - RNA, 32 nt, Homo Sapiens
gugagucuggggauuggaacagggaucuuagg

SEQ ID NO: 93946 - RNA, 32 nt, Homo Sapiens
acgcggcggcggcagcggcgucggcucggggu

SEQ ID NO: 93947 - RNA, 32 nt, Homo Sapiens
gggccacugcccccggcccccgccauggugcg

SEQ ID NO: 93948 - RNA, 32 nt, Homo Sapiens
uucuuagcuaucaagggcugcauuguauuuua

SEQ ID NO: 93949 - RNA, 32 nt, Homo Sapiens
gccgugggugccagguucccgguuggaaccug

SEQ ID NO: 93950 - RNA, 32 nt, Homo Sapiens
ggguccauuuuacaauccauuauuuuugacca

SEQ ID NO: 93951 - RNA, 32 nt, Homo Sapiens
uggaugccuauagcuuccugaagcuguucgau

SEQ ID NO: 93952 - RNA, 32 nt, Homo Sapiens
cuuaugcacugcacacucuggaccucaccugc

SEQ ID NO: 93953 - RNA, 32 nt, Homo Sapiens
gauauagccaaggugggacacuacuggaggga

SEQ ID NO: 93954 - RNA, 27 nt, Homo Sapiens
cucaggaauuucuucagccucuguaag

SEQ ID NO: 93955 - RNA, 32 nt, Homo Sapiens
ggcugcccgcgggugcacccaggcugcagggu

SEQ ID NO: 93956 - RNA, 32 nt, Homo Sapiens
guagcguuucgcggacgccgggacaggcggcc

SEQ ID NO: 93957 - RNA, 32 nt, Homo Sapiens
agaaccacgaggaggagaugaacgccccgcga

SEQ ID NO: 93958 - RNA, 32 nt, Homo Sapiens
gauaaucugaaucaccagcauucaaacaaaua

SEQ ID NO: 93959 - RNA, 32 nt, Homo Sapiens
auaacucuuaauaugcagaaaugcuuuauuuc

SEQ ID NO: 93960 - RNA, 32 nt, Homo Sapiens
gccuccccacaccagcaacacaguggucucuc

SEQ ID NO: 93961 - RNA, 32 nt, Homo Sapiens
gugugccacuaaauaaagagauugagcaagug

SEQ ID NO: 93962 - RNA, 32 nt, Homo Sapiens
ccccuucucgcaccccuggcagucugucaguc

SEQ ID NO: 93963 - RNA, 32 nt, Homo Sapiens
gggcaaggagagagugcagggaggcgcagcuc

SEQ ID NO: 93964 - RNA, 32 nt, Homo Sapiens
ucccugccucggccgcugcagucgccgccgcc

SEQ ID NO: 93965 - RNA, 32 nt, Homo Sapiens
ggcuaaaguuugggguagagcacaagggacaa

SEQ ID NO: 93966 - RNA, 32 nt, Homo Sapiens
ugcacacacaaauauagauguaacuuaggugu

SEQ ID NO: 93967 - RNA, 32 nt, Homo Sapiens
aaaucucagaguaaucagcaaaagcuacggaa

SEQ ID NO: 93968 - RNA, 32 nt, Homo Sapiens
aaaaugucaacacaaaaauagcugaaagccag

SEQ ID NO: 93969 - RNA, 32 nt, Homo Sapiens
uucagcaguuccauauugacagagcacaauuu

SEQ ID NO: 93970 - RNA, 32 nt, Homo Sapiens
guaucuagguggcaguaucugcucuuaguuua

SEQ ID NO: 93971 - RNA, 32 nt, Homo Sapiens
uuuauuauuauuauacuuuaaguuuuagggua

SEQ ID NO: 93972 - RNA, 32 nt, Homo Sapiens
cuaaauccauucucaaauuccaaauaucacag

SEQ ID NO: 93973 - RNA, 32 nt, Homo Sapiens
cccuuggcccccagccugugccagcccuggcc

SEQ ID NO: 93974 - RNA, 32 nt, Homo Sapiens
agaaggaaggcagaggagaucaugcuccggcc

SEQ ID NO: 93975 - RNA, 30 nt, Homo Sapiens
ggcgguggcggcggcggcgaggaggggaau

SEQ ID NO: 93976 - RNA, 32 nt, Homo Sapiens
ccuguccccccgcaacaucccccaccaauacc

SEQ ID NO: 93977 - RNA, 32 nt, Homo Sapiens
agacuugacaacaucccacaguggcacggaga

SEQ ID NO: 93978 - RNA, 32 nt, Homo Sapiens
guguuguuguguuugaaguaaaacuaguuguu

SEQ ID NO: 93979 - RNA, 32 nt, Homo Sapiens
guaguguggaguggaugaguguuccaugagcc

SEQ ID NO: 93980 - RNA, 32 nt, Homo Sapiens
cugaggucaggagcuugagaucaucccggcca

SEQ ID NO: 93981 - RNA, 32 nt, Homo Sapiens
uucagugauuuucuauagcaacuuuuuuggua

SEQ ID NO: 93982 - RNA, 32 nt, Homo Sapiens
ucagcuucucucccuuucacccgcgccuccuc

SEQ ID NO: 93983 - RNA, 30 nt, Homo Sapiens
aagaggcagcggggcgcggguggauugggg

SEQ ID NO: 93984 - RNA, 32 nt, Homo Sapiens
caguugccugccuuggagucgucuggcaucuc

SEQ ID NO: 93985 - RNA, 32 nt, Homo Sapiens
cacacuguaggacucacauacgacuccaacgg

SEQ ID NO: 93986 - RNA, 32 nt, Homo Sapiens
aguugcuugugcugcccugucuauguuaugcu

SEQ ID NO: 93987 - RNA, 32 nt, Homo Sapiens
guaugccaugggcuguauucagagcaucggag

SEQ ID NO: 93988 - RNA, 32 nt, Homo Sapiens
aggacagacagcaggcacggcccgcagccugg

SEQ ID NO: 93989 - RNA, 32 nt, Homo Sapiens
uggcugccgucucuggcuauagauaaguagau

SEQ ID NO: 93990 - RNA, 32 nt, Homo Sapiens
cgguacaggcuucucuggcccguagccucagc

SEQ ID NO: 93991 - RNA, 32 nt, Homo Sapiens
acaguuguuuaccaggcacuguguguagcccc

SEQ ID NO: 93992 - RNA, 32 nt, Homo Sapiens
auagccuccuuccccacccagcuggccacccu

SEQ ID NO: 93993 - RNA, 32 nt, Homo Sapiens
gugucuguuugcauguaagaugagaugagauc

SEQ ID NO: 93994 - RNA, 32 nt, Homo Sapiens
cugugucucccucuuuaacaaaaggccaccuu

SEQ ID NO: 93995 - RNA, 32 nt, Homo Sapiens
cagacuucuguugacucauacucucaagagug

SEQ ID NO: 93996 - RNA, 32 nt, Homo Sapiens
caggcgguccggcuuuacaaucugccaggggu

SEQ ID NO: 93997 - RNA, 32 nt, Homo Sapiens
uugggacuaauauuuucuuauucguauuucca

SEQ ID NO: 93998 - RNA, 32 nt, Homo Sapiens
guuaccccuuggauuauauaucaaccuguaaa

SEQ ID NO: 93999 - RNA, 32 nt, Homo Sapiens
uucacucugaagagagcggucaguguucucag

SEQ ID NO: 94000 - RNA, 32 nt, Homo Sapiens
uagccucauggacaauaaauggaugugacacc

SEQ ID NO: 94001 - RNA, 32 nt, Homo Sapiens
cuuauaggccccacaggugcuauuuguugugc

SEQ ID NO: 94002 - RNA, 32 nt, Homo Sapiens
cccuuggaagcaggccgcagaguagacagcug

SEQ ID NO: 94003 - RNA, 32 nt, Homo Sapiens
ucccagguucacgccauucucccgccucggga

SEQ ID NO: 94004 - RNA, 32 nt, Homo Sapiens
uguggccaagaggcuuccuggcauccaccccc

SEQ ID NO: 94005 - RNA, 32 nt, Homo Sapiens
ucucaguacaucaaaaucauugcagaguauua

SEQ ID NO: 94006 - RNA, 32 nt, Homo Sapiens
cccaccgugcaggggagggaguccgcagccuc

SEQ ID NO: 94007 - RNA, 32 nt, Homo Sapiens
guucggcuggggcaggcacgcuguggcuggcu

SEQ ID NO: 94008 - RNA, 32 nt, Homo Sapiens
ugaucuuacuccagccucccaagcagcuggga

SEQ ID NO: 94009 - RNA, 32 nt, Homo Sapiens
aauacacuaauaguaagauuaaguuaggcagu

SEQ ID NO: 94010 - RNA, 32 nt, Homo Sapiens
auaaaauaaaaugaucuguaugauaccugcaa

SEQ ID NO: 94011 - RNA, 32 nt, Homo Sapiens
aaccaaggugcgcauuccuucucccuggacuu

SEQ ID NO: 94012 - RNA, 32 nt, Homo Sapiens
ggaaacgcuccuuacgucgagauguuggaccu

SEQ ID NO: 94013 - RNA, 32 nt, Homo Sapiens
uguucuggcucccagaagaugccucaguucaa

SEQ ID NO: 94014 - RNA, 32 nt, Homo Sapiens
accuucccacucaccuuccccagcuacaaaaa

SEQ ID NO: 94015 - RNA, 32 nt, Homo Sapiens
uucaaacuagagaauaaagauuuggguuuuag

SEQ ID NO: 94016 - RNA, 32 nt, Homo Sapiens
uggcugagggucugagagcaggacaggaaaac

SEQ ID NO: 94017 - RNA, 32 nt, Homo Sapiens
ggaggcgcccgcuccgcgguggcgcucuugga

SEQ ID NO: 94018 - RNA, 32 nt, Homo Sapiens
aaaggacugucaauauacaaaacuuuaaagau

SEQ ID NO: 94019 - RNA, 32 nt, Homo Sapiens
gagggaggagaguucacuuuuacuucaguguc

SEQ ID NO: 94020 - RNA, 32 nt, Homo Sapiens
cguugcaguucugcgccuuggaugccauaggc

SEQ ID NO: 94021 - RNA, 32 nt, Homo Sapiens
gggugggagcggccggcccaccuguccccucg

SEQ ID NO: 94022 - RNA, 32 nt, Homo Sapiens
cauucuuuguaaguauagcuuaucagauagca

SEQ ID NO: 94023 - RNA, 32 nt, Homo Sapiens
uuaucuucugcuguuuguuuuccauuucuucc

SEQ ID NO: 94024 - RNA, 32 nt, Homo Sapiens
cgucccugcagcccucgcccggcgcuccagua

SEQ ID NO: 94025 - RNA, 27 nt, Homo Sapiens
caauggcaggaaaaucaucacuuuuua

SEQ ID NO: 94026 - RNA, 32 nt, Homo Sapiens
ggucaggcuccauccccucccccaccugcccc

SEQ ID NO: 94027 - RNA, 32 nt, Homo Sapiens
uucugagcucuguuagauacauuuagaaaugu

SEQ ID NO: 94028 - RNA, 30 nt, Homo Sapiens
ccaggauggcugcagcuccuccaaguuacu

SEQ ID NO: 94029 - RNA, 32 nt, Homo Sapiens
uucauauuguuuuuaugauucuaaucaagcug

SEQ ID NO: 94030 - RNA, 32 nt, Homo Sapiens
gugugccauuuucucuugugauauccccugcc

SEQ ID NO: 94031 - RNA, 32 nt, Homo Sapiens
uccacagccucuuuucuggcuguguuuuagag

SEQ ID NO: 94032 - RNA, 32 nt, Homo Sapiens
gcgcgcgcagccguggcugcugcugaguggcg

SEQ ID NO: 94033 - RNA, 32 nt, Homo Sapiens
uguacaugaaaacacauuuuucuuagggaagg

SEQ ID NO: 94034 - RNA, 32 nt, Homo Sapiens
cagcaggagcccaaguuguucuggccacaccu

SEQ ID NO: 94035 - RNA, 32 nt, Homo Sapiens
agugggaggagcugccaggcuugagcugggac

SEQ ID NO: 94036 - RNA, 32 nt, Homo Sapiens
ccagcagggccuucugcuugccugcugccaua

SEQ ID NO: 94037 - RNA, 32 nt, Homo Sapiens
ggaaggcgcgcucccgcgucccgcccccuccu

SEQ ID NO: 94038 - RNA, 31 nt, Homo Sapiens
ccucuuugcugaucccuuccaaggguucaau

SEQ ID NO: 94039 - RNA, 32 nt, Homo Sapiens
agcugcuccccgcggcggccgcacagcagccc

SEQ ID NO: 94040 - RNA, 32 nt, Homo Sapiens
cucacccccuucaagaccccaggccgcuccuc

SEQ ID NO: 94041 - RNA, 32 nt, Homo Sapiens
gcaaaggaaaauuuuaagccaggauaguuaac

SEQ ID NO: 94042 - RNA, 32 nt, Homo Sapiens
aaauguggcaccuuuaaucgucuuugauauuu

SEQ ID NO: 94043 - RNA, 32 nt, Homo Sapiens
ccacacacccagcagagacuucucugccacca

SEQ ID NO: 94044 - RNA, 32 nt, Homo Sapiens
uccuguguagcggcugcagagggugccgccgc

SEQ ID NO: 94045 - RNA, 32 nt, Homo Sapiens
acuccgugccuggccugucagcucccugcuag

SEQ ID NO: 94046 - RNA, 32 nt, Homo Sapiens
gcugguccucaucguauggccuuuuucuuaca

SEQ ID NO: 94047 - RNA, 32 nt, Homo Sapiens
ucaggacagggcuggaggagaacagccuucau

SEQ ID NO: 94048 - RNA, 26 nt, Homo Sapiens
cauggccaggugccgccaccacucgg

SEQ ID NO: 94049 - RNA, 32 nt, Homo Sapiens
ccagcccuagccagcccugcucugccuaagug

SEQ ID NO: 94050 - RNA, 31 nt, Homo Sapiens
uuggugcggugaguccugccccggcugugca

SEQ ID NO: 94051 - RNA, 32 nt, Homo Sapiens
gccaaauuuauaaggaaaaaugauucccaaug

SEQ ID NO: 94052 - RNA, 32 nt, Homo Sapiens
gaucggaccggcccugcccccggcuucaaggc

SEQ ID NO: 94053 - RNA, 32 nt, Homo Sapiens
gcuugcugaauguuuucuuaaauugaacccuu

SEQ ID NO: 94054 - RNA, 32 nt, Homo Sapiens
acccacgaggcaacacauuauccaccagguaa

SEQ ID NO: 94055 - RNA, 32 nt, Homo Sapiens
ggucucuugccaacagaaggacagcugagaaa

SEQ ID NO: 94056 - RNA, 32 nt, Homo Sapiens
uaaaacguaaucuaauuaaauuucauacaguu

SEQ ID NO: 94057 - RNA, 32 nt, Homo Sapiens
cccaguauauauaaaauacaucaagucugucu

SEQ ID NO: 94058 - RNA, 32 nt, Homo Sapiens
guucagucugaauuaugggaaaguuagcucuu

SEQ ID NO: 94059 - RNA, 32 nt, Homo Sapiens
gcggcucgccauggcuggcccgcagcagcagc

SEQ ID NO: 94060 - RNA, 32 nt, Homo Sapiens
gcugcuaaauuguuuucuuaauaaacauuuuu

SEQ ID NO: 94061 - RNA, 32 nt, Homo Sapiens
ggagagcccccggccggcugccagaagauccc

SEQ ID NO: 94062 - RNA, 32 nt, Homo Sapiens
uaguguggcccgggcguccgcuccucagcgga

SEQ ID NO: 94063 - RNA, 32 nt, Homo Sapiens
ucccaccuuaguugguuacagggugagugaga

SEQ ID NO: 94064 - RNA, 32 nt, Homo Sapiens
uuucuccauuuuccucuugucuacagugcggc

SEQ ID NO: 94065 - RNA, 32 nt, Homo Sapiens
ggcucagaaaaaagacaggaagauguggggaa

SEQ ID NO: 94066 - RNA, 32 nt, Homo Sapiens
aaauaggacauuagauggauagauggagagag

SEQ ID NO: 94067 - RNA, 30 nt, Homo Sapiens
cccaggugagguggcauauucagaggagcc

SEQ ID NO: 94068 - RNA, 32 nt, Homo Sapiens
uuucuucgccgugcuggccgcggcccgccuca

SEQ ID NO: 94069 - RNA, 32 nt, Homo Sapiens
gcuaggcgcugggugcgcgcgcggugucugcu

SEQ ID NO: 94070 - RNA, 32 nt, Homo Sapiens
cuucaaaggagggaaaacuuucuacgaaucua

SEQ ID NO: 94071 - RNA, 32 nt, Homo Sapiens
auuaauaaacaaauugucuaaacgcacaguug

SEQ ID NO: 94072 - RNA, 32 nt, Homo Sapiens
uauccagcccagcuguccccagccccgcgccu

SEQ ID NO: 94073 - RNA, 32 nt, Homo Sapiens
auagcuuggggauauuuaucuaaagguacccc

SEQ ID NO: 94074 - RNA, 32 nt, Homo Sapiens
gccccugugacugcgaucuggagucagccagg

SEQ ID NO: 94075 - RNA, 32 nt, Homo Sapiens
ccauuugugcccauccuguugugaccaacccc

SEQ ID NO: 94076 - RNA, 32 nt, Homo Sapiens
ggggugagcgugcaauggaggcuggggguggc

SEQ ID NO: 94077 - RNA, 32 nt, Homo Sapiens
ucggcucggcccggcccgggaggcgugcaugc

SEQ ID NO: 94078 - RNA, 32 nt, Homo Sapiens
aggugcucaccagcuccugugcucucgaccug

SEQ ID NO: 94079 - RNA, 32 nt, Homo Sapiens
guccgcccggccgcucaacccccgccaggacu

SEQ ID NO: 94080 - RNA, 30 nt, Homo Sapiens
ccaccauggcggugcgacaggcgcugggcc

SEQ ID NO: 94081 - RNA, 32 nt, Homo Sapiens
cucacucuccccuucuuccccaggcugcuguu

SEQ ID NO: 94082 - RNA, 32 nt, Homo Sapiens
uggccacaccucugccugccucaugccccuuc

SEQ ID NO: 94083 - RNA, 29 nt, Homo Sapiens
uguucauaaaguuucauuuuguaugcacu

SEQ ID NO: 94084 - RNA, 32 nt, Homo Sapiens
gccagaugccagcaccugagguugcccaccac

SEQ ID NO: 94085 - RNA, 32 nt, Homo Sapiens
cagauggggauaucccugggggagccuggugc

SEQ ID NO: 94086 - RNA, 32 nt, Homo Sapiens
ggugcgggaugaggagauccgcggccgccacu

SEQ ID NO: 94087 - RNA, 32 nt, Homo Sapiens
uggaggcuuggugagaauaucaacccugaccc

SEQ ID NO: 94088 - RNA, 27 nt, Homo Sapiens
gccugcuccuucuuguucugcccucca

SEQ ID NO: 94089 - RNA, 32 nt, Homo Sapiens
gaucaggcuucccagacaccuccuucccaaac

SEQ ID NO: 94090 - RNA, 32 nt, Homo Sapiens
gguauuuguaaaaggcagaauguuugggccau

SEQ ID NO: 94091 - RNA, 31 nt, Homo Sapiens
gccgauggacgcugccugccgccggcccugc

SEQ ID NO: 94092 - RNA, 32 nt, Homo Sapiens
cgucucccacugacuuuucuggaaaucccacc

SEQ ID NO: 94093 - RNA, 32 nt, Homo Sapiens
cuugggaguucuccaacgcucugugcucuggu

SEQ ID NO: 94094 - RNA, 28 nt, Homo Sapiens
cacuuuuaugcuaccaguaugacuuuau

SEQ ID NO: 94095 - RNA, 31 nt, Homo Sapiens
aaaacaauuagguauuuuaaucugaaaucag

SEQ ID NO: 94096 - RNA, 32 nt, Homo Sapiens
ugguaaucauuuucuucagggaaucacagucu

SEQ ID NO: 94097 - RNA, 32 nt, Homo Sapiens
cuucuuuacugauuccuuguccuucaguaagg

SEQ ID NO: 94098 - RNA, 32 nt, Homo Sapiens
uccugagccuuugccugcuaagagggagacca

SEQ ID NO: 94099 - RNA, 32 nt, Homo Sapiens
gugacaccaaaggcuuuguaacuaugucuuga

SEQ ID NO: 94100 - RNA, 32 nt, Homo Sapiens
uuauguuauagaaugauacugauuagacuuug

SEQ ID NO: 94101 - RNA, 32 nt, Homo Sapiens
uuacuuuuugaaaaaaguguuaacucuugaaa

SEQ ID NO: 94102 - RNA, 32 nt, Homo Sapiens
gcuucccgcucccaccagggcccggugggucc

SEQ ID NO: 94103 - RNA, 32 nt, Homo Sapiens
cuggagugcaggggcguaaucucggcucacug

SEQ ID NO: 94104 - RNA, 32 nt, Homo Sapiens
uggaaagcaagagaaugaccagugaccuugcu

SEQ ID NO: 94105 - RNA, 32 nt, Homo Sapiens
accuuucuguggccucaaauguuuuaagcaaa

SEQ ID NO: 94106 - RNA, 32 nt, Homo Sapiens
gguagggccuuuaggaggaaauuaggucauga

SEQ ID NO: 94107 - RNA, 32 nt, Homo Sapiens
ccaaggugccugaaacgauacgugugcccacu

SEQ ID NO: 94108 - RNA, 32 nt, Homo Sapiens
gaaaauacuuccacuuuuuuuuuuucaaguau

SEQ ID NO: 94109 - RNA, 32 nt, Homo Sapiens
uaaaaucuguggcuugccuguucaauucauua

SEQ ID NO: 94110 - RNA, 32 nt, Homo Sapiens
agaaucacagaaaaauccugccuaaggcaaag

SEQ ID NO: 94111 - RNA, 32 nt, Homo Sapiens
auggugaugaguagcaacacacacuucucugc

SEQ ID NO: 94112 - RNA, 31 nt, Homo Sapiens
cucuacuauugagcuguagacgaacuguuuc

SEQ ID NO: 94113 - RNA, 32 nt, Homo Sapiens
guauaucaguuauuuaguaaauaaucucaaua

SEQ ID NO: 94114 - RNA, 32 nt, Homo Sapiens
accaaagucuauaaaaauaaauuuuacauguu

SEQ ID NO: 94115 - RNA, 32 nt, Homo Sapiens
gugaaauuuuaauaaacuucuguaauuaccaa

SEQ ID NO: 94116 - RNA, 32 nt, Homo Sapiens
caacgugcacuucagcuggagaaagaaaccaa

SEQ ID NO: 94117 - RNA, 32 nt, Homo Sapiens
cacuugcaauuauuagguuuuguuuuucuuuu

SEQ ID NO: 94118 - RNA, 32 nt, Homo Sapiens
ggccgcgcgcggcaaugcugaggcugcuggcg

SEQ ID NO: 94119 - RNA, 32 nt, Homo Sapiens
gcuggaaguuagagacaugaaauguacuagag

SEQ ID NO: 94120 - RNA, 32 nt, Homo Sapiens
cuuaaaaguugagaccaauuguaaccaguuua

SEQ ID NO: 94121 - RNA, 32 nt, Homo Sapiens
accgccagagccauccuguggccuucacuguc

SEQ ID NO: 94122 - RNA, 32 nt, Homo Sapiens
ucuccuuuucagacagauuaauccagaagcag

SEQ ID NO: 94123 - RNA, 32 nt, Homo Sapiens
ccuuguccaguuccucacacacuucuagauuc

SEQ ID NO: 94124 - RNA, 32 nt, Homo Sapiens
caaagucucgcacugucucccaggcuggacug

SEQ ID NO: 94125 - RNA, 32 nt, Homo Sapiens
cuuuaguuuuucuauuugaaaaaaaaaaaauc

SEQ ID NO: 94126 - RNA, 32 nt, Homo Sapiens
guucaucuaccuugucaaugucccugagaaug

SEQ ID NO: 94127 - RNA, 32 nt, Homo Sapiens
aguuuugaaguauuggauaaccaagagcucag

SEQ ID NO: 94128 - RNA, 32 nt, Homo Sapiens
auccacgccucccagcaacagccuccagcacc

SEQ ID NO: 94129 - RNA, 32 nt, Homo Sapiens
aggacacagaucuggaggacguggacuggggu

SEQ ID NO: 94130 - RNA, 32 nt, Homo Sapiens
uuuuuggcgaagagggucagggaggcucucua

SEQ ID NO: 94131 - RNA, 32 nt, Homo Sapiens
gcugggcuuggggguaagggggaccagagagg

SEQ ID NO: 94132 - RNA, 32 nt, Homo Sapiens
gaaccuuguuuaaaucaagagcuuacauaauu

SEQ ID NO: 94133 - RNA, 32 nt, Homo Sapiens
aaaccaagaacaaagaagugaaggaucuagaa

SEQ ID NO: 94134 - RNA, 32 nt, Homo Sapiens
uuuguuuacuuugaaauuaaauguguuuucca

SEQ ID NO: 94135 - RNA, 32 nt, Homo Sapiens
caggaugcuggcugguggaacaaccugcuggc

SEQ ID NO: 94136 - RNA, 32 nt, Homo Sapiens
cuguuagacaagaaaagcauucacuggcuaau

SEQ ID NO: 94137 - RNA, 27 nt, Homo Sapiens
ugauccucccgcuucagccucucaagc

SEQ ID NO: 94138 - RNA, 32 nt, Homo Sapiens
ccugggcguuugcagaugguguagaagccagc

SEQ ID NO: 94139 - RNA, 32 nt, Homo Sapiens
cgggcggcgugcgccgcggugccuaguguggg

SEQ ID NO: 94140 - RNA, 32 nt, Homo Sapiens
accagcugcagagcgcacuaugcauccuuuag

SEQ ID NO: 94141 - RNA, 32 nt, Homo Sapiens
gcgcacugguggccuccgcggcgaguccuggg

SEQ ID NO: 94142 - RNA, 32 nt, Homo Sapiens
uuauugaaugucuauuugaguaucauuuaaaa

SEQ ID NO: 94143 - RNA, 32 nt, Homo Sapiens
gauugccgugcaggagccgagcugcugcccuu

SEQ ID NO: 94144 - RNA, 32 nt, Homo Sapiens
cugggcuauggcggccguggcgcuggcgagcg

SEQ ID NO: 94145 - RNA, 32 nt, Homo Sapiens
ugugcccgaggggguguccgguccugcccauc

SEQ ID NO: 94146 - RNA, 32 nt, Homo Sapiens
auauuaagauuuaagauauuuugugcaccaaa

SEQ ID NO: 94147 - RNA, 32 nt, Homo Sapiens
gucagagaagugaagagagauguguggaaauu

SEQ ID NO: 94148 - RNA, 32 nt, Homo Sapiens
ugcugagcugggccgccggcccggguggccca

SEQ ID NO: 94149 - RNA, 32 nt, Homo Sapiens
ccuuguauuauuuuauacuguguucucauaug

SEQ ID NO: 94150 - RNA, 32 nt, Homo Sapiens
acaagacacacacgcucaaaccccuguccaca

SEQ ID NO: 94151 - RNA, 32 nt, Homo Sapiens
ucugauugcuguccucucuuguccucuuccca

SEQ ID NO: 94152 - RNA, 32 nt, Homo Sapiens
caaagaucaaggaaugucaauaacauuuuaaa

SEQ ID NO: 94153 - RNA, 32 nt, Homo Sapiens
uuucuuuucuuuccuuuuuuuuuuuuuuuuaa

SEQ ID NO: 94154 - RNA, 32 nt, Homo Sapiens
aaacuaagccaggccuggcuggaggagcagca

SEQ ID NO: 94155 - RNA, 32 nt, Homo Sapiens
gucuacuuucccuuuauaaguagccauuguac

SEQ ID NO: 94156 - RNA, 32 nt, Homo Sapiens
agaauauaaaaagcuagacucuacccucuaag

SEQ ID NO: 94157 - RNA, 32 nt, Homo Sapiens
ccugaccucaggugaucugccugccuuggccu

SEQ ID NO: 94158 - RNA, 32 nt, Homo Sapiens
gugcccggccccacccccugggcagauguccc

SEQ ID NO: 94159 - RNA, 32 nt, Homo Sapiens
gaggaaggacuucaggaccaacuggggccugc

SEQ ID NO: 94160 - RNA, 32 nt, Homo Sapiens
cuccacauuucuccccauuuccaauugggacu

SEQ ID NO: 94161 - RNA, 32 nt, Homo Sapiens
aagcccuagacuccaaauguccucccagcuca

SEQ ID NO: 94162 - RNA, 32 nt, Homo Sapiens
uaauguggauguagugcuuuuacuuuacagau

SEQ ID NO: 94163 - RNA, 32 nt, Homo Sapiens
uuuauguauauguaaguaugugaaugugcgca

SEQ ID NO: 94164 - RNA, 32 nt, Homo Sapiens
uccaucgagggagaggccugaagggacugccu

SEQ ID NO: 94165 - RNA, 32 nt, Homo Sapiens
uucuagaaccacuuccugcuacaggagggguc

SEQ ID NO: 94166 - RNA, 32 nt, Homo Sapiens
gggaguccagcauucauguauaaacccuaagg

SEQ ID NO: 94167 - RNA, 32 nt, Homo Sapiens
auauuucucuacauuuuguuuaucuguaaguc

SEQ ID NO: 94168 - RNA, 30 nt, Homo Sapiens
cgggggccuuuccugccgccgacgccgggg

SEQ ID NO: 94169 - RNA, 32 nt, Homo Sapiens
augaugacaaugaaauuagugccuguuuucuu

SEQ ID NO: 94170 - RNA, 32 nt, Homo Sapiens
uguuuccaauaaaacuucuccuuucaugucuc

SEQ ID NO: 94171 - RNA, 32 nt, Homo Sapiens
gccaaaccuugauccauuuugacauuuguuau

SEQ ID NO: 94172 - RNA, 32 nt, Homo Sapiens
ccgucagccgcgccggaccgcgcaccaggagg

SEQ ID NO: 94173 - RNA, 32 nt, Homo Sapiens
aaaccuugaaagacauaggauaauucauacug

SEQ ID NO: 94174 - RNA, 32 nt, Homo Sapiens
auaaagauuuguauuucuuuuccaauagcaaa

SEQ ID NO: 94175 - RNA, 32 nt, Homo Sapiens
uggggacgaggcgucgggaggguauacaggga

SEQ ID NO: 94176 - RNA, 32 nt, Homo Sapiens
auacggaagcgaggccuggaccaagagaggcc

SEQ ID NO: 94177 - RNA, 32 nt, Homo Sapiens
gacgcuguacacaacaucgcuaaugaggacac

SEQ ID NO: 94178 - RNA, 32 nt, Homo Sapiens
aaauuucggcccuuaacccagccuuuuccagu

SEQ ID NO: 94179 - RNA, 32 nt, Homo Sapiens
gggcaucugucuuuuuguuacuuuuuuguccg

SEQ ID NO: 94180 - RNA, 32 nt, Homo Sapiens
caaguggauccugccaacuuucuggggcuucu

SEQ ID NO: 94181 - RNA, 32 nt, Homo Sapiens
ggggaauugagggcucaggggaggcaggaaga

SEQ ID NO: 94182 - RNA, 32 nt, Homo Sapiens
guuuuuuuucuuucuuuuuuuuuuuguaguug

SEQ ID NO: 94183 - RNA, 31 nt, Homo Sapiens
acgcccgcagccagccccccaagggcgcguc

SEQ ID NO: 94184 - RNA, 29 nt, Homo Sapiens
uuucggaugaagaaauggagaguaaaugg

SEQ ID NO: 94185 - RNA, 32 nt, Homo Sapiens
aaagccccgcgggcgagcucagcagcccggag

SEQ ID NO: 94186 - RNA, 32 nt, Homo Sapiens
acuccuucaaguaugccugggucuugcauaaa

SEQ ID NO: 94187 - RNA, 32 nt, Homo Sapiens
gccccggcucgccgcgccauggagcggauccc

SEQ ID NO: 94188 - RNA, 32 nt, Homo Sapiens
uuuaaauucuaccauguuagagcaaaacaaug

SEQ ID NO: 94189 - RNA, 32 nt, Homo Sapiens
aaucuucuaccucauaacuuccuuccaaaggc

SEQ ID NO: 94190 - RNA, 32 nt, Homo Sapiens
aaagauuucuuucaauuggucuucccauugca

SEQ ID NO: 94191 - RNA, 32 nt, Homo Sapiens
ggagaguagucagaggcccaccuuccugugac

SEQ ID NO: 94192 - RNA, 32 nt, Homo Sapiens
gguaaccacagugcaaggcaacugucagcgca

SEQ ID NO: 94193 - RNA, 32 nt, Homo Sapiens
ucacaguaauuucccuguaaaaugugguaccu

SEQ ID NO: 94194 - RNA, 32 nt, Homo Sapiens
guugaaggagaagagggugcggaggcagcaaa

SEQ ID NO: 94195 - RNA, 32 nt, Homo Sapiens
gucaguuuaauuucuuugauaauuuaaccuau

SEQ ID NO: 94196 - RNA, 32 nt, Homo Sapiens
acuacagagaauuuccagaggcaaauuuugaa

SEQ ID NO: 94197 - RNA, 32 nt, Homo Sapiens
uguguagagaaugucacuguaguuuugagugu

SEQ ID NO: 94198 - RNA, 32 nt, Homo Sapiens
auauaauauaucuauauuuuuaaagaaauguu

SEQ ID NO: 94199 - RNA, 32 nt, Homo Sapiens
ugugggaccugcccccagcuucugccacgcuu

SEQ ID NO: 94200 - RNA, 32 nt, Homo Sapiens
cagggucagggugcuggguuccuaaggugcaa

SEQ ID NO: 94201 - RNA, 32 nt, Homo Sapiens
uccguuagcgcgagguagcagugucgccucgc

SEQ ID NO: 94202 - RNA, 32 nt, Homo Sapiens
cagucccuucugcccugccgggcccgucggga

SEQ ID NO: 94203 - RNA, 32 nt, Homo Sapiens
uauucuguuucuguuggagagacagcauauaa

SEQ ID NO: 94204 - RNA, 32 nt, Homo Sapiens
caggugggggcacccugcggccugcagccucc

SEQ ID NO: 94205 - RNA, 32 nt, Homo Sapiens
acacgaccguggugcccggcccuugggagccu

SEQ ID NO: 94206 - RNA, 32 nt, Homo Sapiens
ugcuuuucugaucugugaguaccuguuugucu

SEQ ID NO: 94207 - RNA, 32 nt, Homo Sapiens
auccuuggggacaggaggaaaagcagccuguc

SEQ ID NO: 94208 - RNA, 32 nt, Homo Sapiens
aauuugaauccacaugaaaacaauggcaacaa

SEQ ID NO: 94209 - RNA, 32 nt, Homo Sapiens
ugcuuuaauuuaauaguuaauguugccaucaa

SEQ ID NO: 94210 - RNA, 32 nt, Homo Sapiens
ggcucccagggccagaggagccagggacuauu

SEQ ID NO: 94211 - RNA, 32 nt, Homo Sapiens
gugcacaguggucaagggugcagcucugcagc

SEQ ID NO: 94212 - RNA, 32 nt, Homo Sapiens
cagugagcacccaugggccugcucuuggaugg

SEQ ID NO: 94213 - RNA, 32 nt, Homo Sapiens
aggaaaggggagaagagcaaagggcgcuuuua

SEQ ID NO: 94214 - RNA, 32 nt, Homo Sapiens
gcugagaugugcguggggguuguuuuuguuac

SEQ ID NO: 94215 - RNA, 32 nt, Homo Sapiens
uacauauuugugccuccuugguaaauacaaca

SEQ ID NO: 94216 - RNA, 30 nt, Homo Sapiens
agaaaaccacuuggccauuuauuucuaugu

SEQ ID NO: 94217 - RNA, 32 nt, Homo Sapiens
cucucugugucugagagcaaagugaccugguu

SEQ ID NO: 94218 - RNA, 32 nt, Homo Sapiens
aguuucccacuuuggaccugcugcccuuggcu

SEQ ID NO: 94219 - RNA, 30 nt, Homo Sapiens
gcugggcugugcgccccgccggcgccggua

SEQ ID NO: 94220 - RNA, 32 nt, Homo Sapiens
cucccgaguagcugggauuccaggcgcccgcc

SEQ ID NO: 94221 - RNA, 32 nt, Homo Sapiens
ccccacugcccccugcccuccagccauacuca

SEQ ID NO: 94222 - RNA, 32 nt, Homo Sapiens
cgaggcuggggaugggggcgccgcugcucucu

SEQ ID NO: 94223 - RNA, 32 nt, Homo Sapiens
cucuguuuccugcgcccuuucauuuuuuccua

SEQ ID NO: 94224 - RNA, 32 nt, Homo Sapiens
uacacuguuucauugcucuagauuucuuuuug

SEQ ID NO: 94225 - RNA, 32 nt, Homo Sapiens
ccuucagcccccagccccucccccauguccca

SEQ ID NO: 94226 - RNA, 32 nt, Homo Sapiens
uuugcagaugagcuggcaaagguccaagcccc

SEQ ID NO: 94227 - RNA, 32 nt, Homo Sapiens
gccguuuuaaacaacuuucaccgagaucuuac

SEQ ID NO: 94228 - RNA, 30 nt, Homo Sapiens
ucgcagaucuucgggcggcuaggggaaauc

SEQ ID NO: 94229 - RNA, 32 nt, Homo Sapiens
agucggcggcgguggccauauggcagacgcuc

SEQ ID NO: 94230 - RNA, 30 nt, Homo Sapiens
auucugauaggagggggcggcagggcuggg

SEQ ID NO: 94231 - RNA, 32 nt, Homo Sapiens
cagccugccccaauucccccagccccugcucc

SEQ ID NO: 94232 - RNA, 31 nt, Homo Sapiens
ccgggcucucccuucgcuccaagccucaggc

SEQ ID NO: 94233 - RNA, 32 nt, Homo Sapiens
ccaugggacuucuucccuuccuccucagcccc

SEQ ID NO: 94234 - RNA, 32 nt, Homo Sapiens
aaaauacaaaaauuagccgggugugguggugc

SEQ ID NO: 94235 - RNA, 32 nt, Homo Sapiens
aaaguacaaaaauuagccgggugugguagugc

SEQ ID NO: 94236 - RNA, 32 nt, Homo Sapiens
aucuauucuaguugauuaauugccagggccug

SEQ ID NO: 94237 - RNA, 32 nt, Homo Sapiens
cucucuugcucaccacccaagaaccucaggac

SEQ ID NO: 94238 - RNA, 32 nt, Homo Sapiens
cuuauuucucagcuuuuucuuucuuaaguuca

SEQ ID NO: 94239 - RNA, 32 nt, Homo Sapiens
ccuucucuccaagugcacuacccuggagagug

SEQ ID NO: 94240 - RNA, 32 nt, Homo Sapiens
cagucaggccgcagcucuggcuccaguucccg

SEQ ID NO: 94241 - RNA, 32 nt, Homo Sapiens
cuagagaauuuaaugucuccaguugggcugaa

SEQ ID NO: 94242 - RNA, 32 nt, Homo Sapiens
gggcccaauuucuuaagugaugagagagcacg

SEQ ID NO: 94243 - RNA, 32 nt, Homo Sapiens
aaauuguuuuuagaauuauugcuuuuuguucu

SEQ ID NO: 94244 - RNA, 32 nt, Homo Sapiens
cgcauggcggguggggaccuggggugcucagg

SEQ ID NO: 94245 - RNA, 32 nt, Homo Sapiens
acaauggccugguucaauuucuuucuuuccuu

SEQ ID NO: 94246 - RNA, 32 nt, Homo Sapiens
ggucgcgggguuggcggccgcagcgcuggugg

SEQ ID NO: 94247 - RNA, 32 nt, Homo Sapiens
aggcaaaaggagaaaaucauguugaaacaaac

SEQ ID NO: 94248 - RNA, 32 nt, Homo Sapiens
gugauuacaucaucuuucugacaucauuguua

SEQ ID NO: 94249 - RNA, 32 nt, Homo Sapiens
uccacgcaggagggcagagcccucguggccug

SEQ ID NO: 94250 - RNA, 32 nt, Homo Sapiens
uggugcuguuugcggaugcugaugcaguuucu

SEQ ID NO: 94251 - RNA, 32 nt, Homo Sapiens
uaaaugcauaauaucaaagagaaucauagaug

SEQ ID NO: 94252 - RNA, 32 nt, Homo Sapiens
uuuaggcaguaaucaaagauuaaauggaccau

SEQ ID NO: 94253 - RNA, 32 nt, Homo Sapiens
caggaauuuccugagccagagaucugacuccg

SEQ ID NO: 94254 - RNA, 32 nt, Homo Sapiens
ugcggcgccggggcuccguggccuggauugaa

SEQ ID NO: 94255 - RNA, 32 nt, Homo Sapiens
gccgccggcucgggagaccugccgccccucgg

SEQ ID NO: 94256 - RNA, 32 nt, Homo Sapiens
auacuucaacuuucugaaaaaguaaacuucga

SEQ ID NO: 94257 - RNA, 32 nt, Homo Sapiens
caguagauugacugagcauguugccaaagcuu

SEQ ID NO: 94258 - RNA, 32 nt, Homo Sapiens
acugcccuggcucuuuccuaggccuuccacua

SEQ ID NO: 94259 - RNA, 32 nt, Homo Sapiens
cggcggcggcgguggugguuguggcgaggcug

SEQ ID NO: 94260 - RNA, 32 nt, Homo Sapiens
cuugaguuccugccccacugggcccccucccc

SEQ ID NO: 94261 - RNA, 32 nt, Homo Sapiens
agagugagucggcguccagcuccaccugaaag

SEQ ID NO: 94262 - RNA, 32 nt, Homo Sapiens
cucccgggagugcgcacgucuucauucgucca

SEQ ID NO: 94263 - RNA, 32 nt, Homo Sapiens
ccagcccccucgccugccugugucucucccca

SEQ ID NO: 94264 - RNA, 32 nt, Homo Sapiens
gacuaagaaagagaaauugaucagaaucuacu

SEQ ID NO: 94265 - RNA, 32 nt, Homo Sapiens
uugaauagugaauaauuugaucaauguuacug

SEQ ID NO: 94266 - RNA, 32 nt, Homo Sapiens
aguucaggagaguagcaacaaaaggaaaauaa

SEQ ID NO: 94267 - RNA, 32 nt, Homo Sapiens
ugcaaauggaggccaaccucacaggggugcug

SEQ ID NO: 94268 - RNA, 32 nt, Homo Sapiens
gaauguuacuuaugugcugagauguguauauu

SEQ ID NO: 94269 - RNA, 32 nt, Homo Sapiens
uaauggucuggaugccagacagguguuuugca

SEQ ID NO: 94270 - RNA, 32 nt, Homo Sapiens
caggccuuuuucuguguccacuggagagcuug

SEQ ID NO: 94271 - RNA, 32 nt, Homo Sapiens
auuccaacuuuuucucuuuguuuuuguccagu

SEQ ID NO: 94272 - RNA, 32 nt, Homo Sapiens
agagggcagcauaaggaggucagguggugcug

SEQ ID NO: 94273 - RNA, 32 nt, Homo Sapiens
uugaaaaggauauuuuacaaccaaauacaggu

SEQ ID NO: 94274 - RNA, 32 nt, Homo Sapiens
uguuuucccccggcccccuaccucugaagcca

SEQ ID NO: 94275 - RNA, 32 nt, Homo Sapiens
ugggaagggaggggcugcugaguucccuuguu

SEQ ID NO: 94276 - RNA, 32 nt, Homo Sapiens
ugagagaacugggcuuucggcgcggggggaca

SEQ ID NO: 94277 - RNA, 32 nt, Homo Sapiens
cacaggcaugcgccagccaccauggguggcac

SEQ ID NO: 94278 - RNA, 32 nt, Homo Sapiens
uugcuuuacaaauuuuaaccuugugguuaaaa

SEQ ID NO: 94279 - RNA, 32 nt, Homo Sapiens
aaggcagacaccugguucuagaacuagcucug

SEQ ID NO: 94280 - RNA, 29 nt, Homo Sapiens
uuguugguauguaugugcagggaguacug

SEQ ID NO: 94281 - RNA, 31 nt, Homo Sapiens
gcaaauguuagauaguagguauaucagucac

SEQ ID NO: 94282 - RNA, 32 nt, Homo Sapiens
acauuccuuaggaggacuuugguaauugguuu

SEQ ID NO: 94283 - RNA, 32 nt, Homo Sapiens
cuacuuugggaaugagaacaugcaaaaucagg

SEQ ID NO: 94284 - RNA, 32 nt, Homo Sapiens
auccccacacuggucuugccucuucuuuucca

SEQ ID NO: 94285 - RNA, 32 nt, Homo Sapiens
gccuccauuucacauuugauaaucugaacaua

SEQ ID NO: 94286 - RNA, 32 nt, Homo Sapiens
ucuuguuuucuuucuccuccaugugucuuggc

SEQ ID NO: 94287 - RNA, 32 nt, Homo Sapiens
augaagcauaccccggccucucaguucuugag

SEQ ID NO: 94288 - RNA, 32 nt, Homo Sapiens
ucauucaacaauuuuuaaauuuuuaacaaagc

SEQ ID NO: 94289 - RNA, 32 nt, Homo Sapiens
uccuggucucuccucaaaagaauuuuacauga

SEQ ID NO: 94290 - RNA, 32 nt, Homo Sapiens
cccugggagccaggaaggugggggguguccag

SEQ ID NO: 94291 - RNA, 32 nt, Homo Sapiens
cucaaccgcccggccgccucccccgggcagcc

SEQ ID NO: 94292 - RNA, 32 nt, Homo Sapiens
ccuuguuccagaaaaguguuuaaggcaacaau

SEQ ID NO: 94293 - RNA, 32 nt, Homo Sapiens
acauuccuuucugcuuucuggagggcaccagg

SEQ ID NO: 94294 - RNA, 32 nt, Homo Sapiens
agggagggaggggcuggaagauacugaaggau

SEQ ID NO: 94295 - RNA, 30 nt, Homo Sapiens
gcguguuugcuugaggcagaagcuucagca

SEQ ID NO: 94296 - RNA, 32 nt, Homo Sapiens
ggacucccuggccccugguaccuuucccugac

SEQ ID NO: 94297 - RNA, 32 nt, Homo Sapiens
agcugugcugguccgggcuggccucucuaaga

SEQ ID NO: 94298 - RNA, 32 nt, Homo Sapiens
uuuuguacaaaaaguguuauugaaagaaaugu

SEQ ID NO: 94299 - RNA, 32 nt, Homo Sapiens
uuaaacgaugagaagggaauccgguuauguug

SEQ ID NO: 94300 - RNA, 32 nt, Homo Sapiens
gaggcggcgcgaacggucagggggcggccgau

SEQ ID NO: 94301 - RNA, 31 nt, Homo Sapiens
cuauuacaaaagaaaacgugguuauuaacuu

SEQ ID NO: 94302 - RNA, 32 nt, Homo Sapiens
uaucacucaauuucucugaggacacagauagg

SEQ ID NO: 94303 - RNA, 32 nt, Homo Sapiens
aauucucuuaauuuauaagaagauaguaggag

SEQ ID NO: 94304 - RNA, 32 nt, Homo Sapiens
ccgagccggcgccccaacaacgcgcccucucc

SEQ ID NO: 94305 - RNA, 32 nt, Homo Sapiens
accuuguauuaaauaacugccugcugcucaga

SEQ ID NO: 94306 - RNA, 32 nt, Homo Sapiens
cauuccacucuauaauaaaacaaaagauuuug

SEQ ID NO: 94307 - RNA, 32 nt, Homo Sapiens
ugccucucucuccuccuccccucugggaauug

SEQ ID NO: 94308 - RNA, 32 nt, Homo Sapiens
acugguggcacauccuucuccucccccgcccc

SEQ ID NO: 94309 - RNA, 32 nt, Homo Sapiens
aaucgcgacagcuacagcuacggaagccgccg

SEQ ID NO: 94310 - RNA, 32 nt, Homo Sapiens
cuuaauucuuaaauuucuuuacucaugacauu

SEQ ID NO: 94311 - RNA, 32 nt, Homo Sapiens
agugaccgacagagcaagagccaugccgcgcc

SEQ ID NO: 94312 - RNA, 32 nt, Homo Sapiens
uggguugcacaaaaucugcuaagagcaaagga

SEQ ID NO: 94313 - RNA, 32 nt, Homo Sapiens
aacgagaaaaagaaggaaaucagaucgagacc

SEQ ID NO: 94314 - RNA, 32 nt, Homo Sapiens
gcugcccucccucuuauucggcccaaggacuu

SEQ ID NO: 94315 - RNA, 32 nt, Homo Sapiens
uaaauggagcagaggaacagguguggcagcac

SEQ ID NO: 94316 - RNA, 32 nt, Homo Sapiens
gggagaugagagagcucucuggacaggaauua

SEQ ID NO: 94317 - RNA, 30 nt, Homo Sapiens
cugugugucugugccauaguuuuucagugu

SEQ ID NO: 94318 - RNA, 32 nt, Homo Sapiens
gggcucaggggcaggaggagggggagcugauu

SEQ ID NO: 94319 - RNA, 32 nt, Homo Sapiens
uacaggugcacaagaacgcuagaguggcccau

SEQ ID NO: 94320 - RNA, 32 nt, Homo Sapiens
aagugggagccggagcggcagcuggcagcguu

SEQ ID NO: 94321 - RNA, 32 nt, Homo Sapiens
uacgcagaccagagcacauaagggcagcauuu

SEQ ID NO: 94322 - RNA, 32 nt, Homo Sapiens
aacauucaggaauucuuggagaagauggguuu

SEQ ID NO: 94323 - RNA, 32 nt, Homo Sapiens
gauaucuuucccucuuuuucacuuugagcuuu

SEQ ID NO: 94324 - RNA, 32 nt, Homo Sapiens
cucccaucccucgggaugcccaggagaggcca

SEQ ID NO: 94325 - RNA, 32 nt, Homo Sapiens
acgaggucaggaggucgagaccauccuggcua

SEQ ID NO: 94326 - RNA, 32 nt, Homo Sapiens
acgagaucaggagaucgagaccauccuggcua

SEQ ID NO: 94327 - RNA, 32 nt, Homo Sapiens
guacauacauauauauuuuuggaaaauggagc

SEQ ID NO: 94328 - RNA, 32 nt, Homo Sapiens
uggcagguuucccaucgggagagguguuugag

SEQ ID NO: 94329 - RNA, 32 nt, Homo Sapiens
ccgagacagcguuuccuccuccuccagcaugu

SEQ ID NO: 94330 - RNA, 32 nt, Homo Sapiens
agagccacugggggaauaggggcuugcucuca

SEQ ID NO: 94331 - RNA, 32 nt, Homo Sapiens
gccuagggagggugggagcugcugcuggacug

SEQ ID NO: 94332 - RNA, 32 nt, Homo Sapiens
cgucucuacuaaaaauacaaacaaaauuagcu

SEQ ID NO: 94333 - RNA, 32 nt, Homo Sapiens
gcuggaggauaagacacugaaaaugauauuua

SEQ ID NO: 94334 - RNA, 32 nt, Homo Sapiens
uccuggcuggccugggucggccucuggaguau

SEQ ID NO: 94335 - RNA, 32 nt, Homo Sapiens
cucuugaagccuuuuuuuuuuaauucuuaauu

SEQ ID NO: 94336 - RNA, 32 nt, Homo Sapiens
uuuacauccuucccacuacacaguugcuauga

SEQ ID NO: 94337 - RNA, 32 nt, Homo Sapiens
ugcugggugugguggcucacgccuguaauccc

SEQ ID NO: 94338 - RNA, 32 nt, Homo Sapiens
gcucucgcagucucagcccgggccgugcaacg

SEQ ID NO: 94339 - RNA, 32 nt, Homo Sapiens
ccuugggcuguggaccuggggguuggaaggau

SEQ ID NO: 94340 - RNA, 32 nt, Homo Sapiens
auaccucacugcagccucuugggcuuauguga

SEQ ID NO: 94341 - RNA, 32 nt, Homo Sapiens
ccacuguacagcagaucgugcagcugucuccu

SEQ ID NO: 94342 - RNA, 32 nt, Homo Sapiens
cugugcaccuaaguugcccagcccugcuggca

SEQ ID NO: 94343 - RNA, 32 nt, Homo Sapiens
aggugcauuuuuccaaucacaauauucuggac

SEQ ID NO: 94344 - RNA, 32 nt, Homo Sapiens
ugaccagcaucgucuguaaagguuaagaaggc

SEQ ID NO: 94345 - RNA, 32 nt, Homo Sapiens
ggcugucagcagggccggugcacgggagaaga

SEQ ID NO: 94346 - RNA, 32 nt, Homo Sapiens
cgcgucgaguuuccggcguccggaaggaccga

SEQ ID NO: 94347 - RNA, 32 nt, Homo Sapiens
aacgcgggauccuggggagaucugccuucugg

SEQ ID NO: 94348 - RNA, 32 nt, Homo Sapiens
agucucccugcagcugcuaguuccugcccagg

SEQ ID NO: 94349 - RNA, 32 nt, Homo Sapiens
gaaaaagaaaaaaggagagugcuuaaaauaau

SEQ ID NO: 94350 - RNA, 32 nt, Homo Sapiens
gucucaggcuccugggcucagaugguccuccu

SEQ ID NO: 94351 - RNA, 32 nt, Homo Sapiens
uaugaugaugccacuguacugcagcuugggua

SEQ ID NO: 94352 - RNA, 32 nt, Homo Sapiens
uuucccauaaaauguuuaaaagaucaaauuag

SEQ ID NO: 94353 - RNA, 32 nt, Homo Sapiens
ugugugaggucuuaguaagaaaagcuaggagc

SEQ ID NO: 94354 - RNA, 32 nt, Homo Sapiens
gcacaacagguuuauagagauguauauagaau

SEQ ID NO: 94355 - RNA, 32 nt, Homo Sapiens
cauugugcaggaggggaauugcuggcugcuuu

SEQ ID NO: 94356 - RNA, 32 nt, Homo Sapiens
gccaggccgcgguggcugaugccuguaauccc

SEQ ID NO: 94357 - RNA, 32 nt, Homo Sapiens
ccgccaaccugaucggcuccgcgcgcaguacg

SEQ ID NO: 94358 - RNA, 32 nt, Homo Sapiens
ggccugcagggccgcagccccucaccacagga

SEQ ID NO: 94359 - RNA, 32 nt, Homo Sapiens
uuuggcucugggaauuucuccucccacgugga

SEQ ID NO: 94360 - RNA, 32 nt, Homo Sapiens
cacgguaucuccuggccaggcugcugggacag

SEQ ID NO: 94361 - RNA, 32 nt, Homo Sapiens
ggcaggaggggagggggcaggcuccggcucac

SEQ ID NO: 94362 - RNA, 32 nt, Homo Sapiens
ugaggacccagcugcgucaggaguuuugcuuc

SEQ ID NO: 94363 - RNA, 32 nt, Homo Sapiens
aacagagaaucgaaggauucuguucaaauauu

SEQ ID NO: 94364 - RNA, 32 nt, Homo Sapiens
agaauguaaaaggaauauuacaguguuaacug

SEQ ID NO: 94365 - RNA, 32 nt, Homo Sapiens
aagagcccaagcauagacuuggugccguggug

SEQ ID NO: 94366 - RNA, 32 nt, Homo Sapiens
auaaggaucuacugaggcuagucucguuuaau

SEQ ID NO: 94367 - RNA, 32 nt, Homo Sapiens
agaugagcaguugaggggacugagagagugau

SEQ ID NO: 94368 - RNA, 32 nt, Homo Sapiens
uuccucaugcugccggguggguuuugcagaag

SEQ ID NO: 94369 - RNA, 32 nt, Homo Sapiens
gucagugcggcgccagcucugcagagcccaga

SEQ ID NO: 94370 - RNA, 32 nt, Homo Sapiens
ugccucccugcacuucaucccggagcgcaccu

SEQ ID NO: 94371 - RNA, 32 nt, Homo Sapiens
guaccuggccccagcacucucccaucuguucu

SEQ ID NO: 94372 - RNA, 32 nt, Homo Sapiens
ucccuggaaaacagugaagugaaauguucaug

SEQ ID NO: 94373 - RNA, 32 nt, Homo Sapiens
gaagaggaauccagugaauguuccuguuugau

SEQ ID NO: 94374 - RNA, 32 nt, Homo Sapiens
cacuccuggcuccucaguaggacagacagacg

SEQ ID NO: 94375 - RNA, 32 nt, Homo Sapiens
ucgugcuggugccucuggccccguggagugga

SEQ ID NO: 94376 - RNA, 32 nt, Homo Sapiens
ugacagugcuggggcucuggcugccuucucca

SEQ ID NO: 94377 - RNA, 32 nt, Homo Sapiens
aucgcacguccaucugccaggaccccugcguc

SEQ ID NO: 94378 - RNA, 32 nt, Homo Sapiens
ggacagaucagcaaauuguuauuuuaaaaagu

SEQ ID NO: 94379 - RNA, 32 nt, Homo Sapiens
ggcuccugguguucacuaaggcguggggugac

SEQ ID NO: 94380 - RNA, 32 nt, Homo Sapiens
uuauaguuuuggggaagaaaauaucaugggga

SEQ ID NO: 94381 - RNA, 28 nt, Homo Sapiens
aaguuauuuuguagcguacaucaaugau

SEQ ID NO: 94382 - RNA, 32 nt, Homo Sapiens
ucuaggucaucguauaucaggcacgaagauuu

SEQ ID NO: 94383 - RNA, 32 nt, Homo Sapiens
cgcugaguuccgaggccgccuagguaugcaau

SEQ ID NO: 94384 - RNA, 32 nt, Homo Sapiens
ggugaucugcccacccaggccucccaaagugc

SEQ ID NO: 94385 - RNA, 32 nt, Homo Sapiens
auuacauguaauacaaaacaaacauguaguuu

SEQ ID NO: 94386 - RNA, 32 nt, Homo Sapiens
acagaauuguguuuuauugguuuuggaugaca

SEQ ID NO: 94387 - RNA, 32 nt, Homo Sapiens
gcagagggucauuuuaggagagcugccccagc

SEQ ID NO: 94388 - RNA, 32 nt, Homo Sapiens
gaugaguguugcaaagccuuuacuucauguuc

SEQ ID NO: 94389 - RNA, 32 nt, Homo Sapiens
uggcauggauacugauuuuacugaccuuguuu

SEQ ID NO: 94390 - RNA, 32 nt, Homo Sapiens
uuuuuaaaaaucuauuuuaaaaugugauuuuc

SEQ ID NO: 94391 - RNA, 32 nt, Homo Sapiens
cucacccggcccggugccacccggguccacag

SEQ ID NO: 94392 - RNA, 32 nt, Homo Sapiens
ucuccaaccugguuuucaccuacugagggcgc

SEQ ID NO: 94393 - RNA, 32 nt, Homo Sapiens
auauccauauauauuucuauaaaaaaaguguu

SEQ ID NO: 94394 - RNA, 32 nt, Homo Sapiens
ucaaaucugaucuaguaugaaaauagaugcua

SEQ ID NO: 94395 - RNA, 32 nt, Homo Sapiens
aagggacugucaaguuuguaaggcuguagaca

SEQ ID NO: 94396 - RNA, 32 nt, Homo Sapiens
guguguucugguuuuuuuucuuuuaauuuuua

SEQ ID NO: 94397 - RNA, 32 nt, Homo Sapiens
ucuaauacuguaaguaguugucauauucugga

SEQ ID NO: 94398 - RNA, 32 nt, Homo Sapiens
ucacccggugcuucuacgacuccgccaaucag

SEQ ID NO: 94399 - RNA, 32 nt, Homo Sapiens
caaggcaggcugcuacugccuuugcugacccc

SEQ ID NO: 94400 - RNA, 32 nt, Homo Sapiens
uggcuuuggggcaagugcuaccuguggaauaa

SEQ ID NO: 94401 - RNA, 32 nt, Homo Sapiens
uaggggagcugagccgagcggcugggcgggcc

SEQ ID NO: 94402 - RNA, 32 nt, Homo Sapiens
auuuuauccguuauuugaaauuuuacauuucu

SEQ ID NO: 94403 - RNA, 32 nt, Homo Sapiens
ccauucuccuuccccaccccaccacaaaaaga

SEQ ID NO: 94404 - RNA, 32 nt, Homo Sapiens
aguuacauauuauuauuuuaaaaguauauauu

SEQ ID NO: 94405 - RNA, 32 nt, Homo Sapiens
cuuguaauaauggcccaguuucagggcacagu

SEQ ID NO: 94406 - RNA, 31 nt, Homo Sapiens
gugagacacaacacucuuggaggucaucaca

SEQ ID NO: 94407 - RNA, 32 nt, Homo Sapiens
uucauguauuuuccucaugauuuuuucucuuu

SEQ ID NO: 94408 - RNA, 32 nt, Homo Sapiens
auggaaauauauauguauacauuuuaaguucu

SEQ ID NO: 94409 - RNA, 32 nt, Homo Sapiens
aaaguaacugguuugauuucucguucauugua

SEQ ID NO: 94410 - RNA, 32 nt, Homo Sapiens
agccuuuuagguggaagaagugagggugcagc

SEQ ID NO: 94411 - RNA, 32 nt, Homo Sapiens
uuuucuccaaguuuuuucaggcuacuagaccu

SEQ ID NO: 94412 - RNA, 32 nt, Homo Sapiens
ugguuccugucuguuauuuguaaacugaggac

SEQ ID NO: 94413 - RNA, 32 nt, Homo Sapiens
ggcucccacuaauuccucuccauucuauccuc

SEQ ID NO: 94414 - RNA, 32 nt, Homo Sapiens
acaggcugugcauuuuaagauacuaguuucag

SEQ ID NO: 94415 - RNA, 32 nt, Homo Sapiens
cuuuuaauauuuuaaaaaauuguuaggacuca

SEQ ID NO: 94416 - RNA, 32 nt, Homo Sapiens
cccaaauggaagaccuaggcaguucugauggg

SEQ ID NO: 94417 - RNA, 32 nt, Homo Sapiens
acacgugcccuccccaccucacuagacucucc

SEQ ID NO: 94418 - RNA, 32 nt, Homo Sapiens
accacucaugucaagugucuggguacuuguag

SEQ ID NO: 94419 - RNA, 31 nt, Homo Sapiens
gaggugcucagguccaggggaguccaguggg

SEQ ID NO: 94420 - RNA, 32 nt, Homo Sapiens
gaggugggaggaggcaaagaaacuacaggcag

SEQ ID NO: 94421 - RNA, 32 nt, Homo Sapiens
agggggaggcgccugguccagcccuggacaga

SEQ ID NO: 94422 - RNA, 32 nt, Homo Sapiens
ugaauguacuuuguaacuccuagaaaauaggc

SEQ ID NO: 94423 - RNA, 32 nt, Homo Sapiens
cacacauuucccuuggaugggacuugcaggcc

SEQ ID NO: 94424 - RNA, 32 nt, Homo Sapiens
cuuccgggucgccgccggcagcagccucccgg

SEQ ID NO: 94425 - RNA, 32 nt, Homo Sapiens
ccguugaaaugaauaucacuuaagcaacguug

SEQ ID NO: 94426 - RNA, 27 nt, Homo Sapiens
gagucccccuucuucucccagacucug

SEQ ID NO: 94427 - RNA, 32 nt, Homo Sapiens
uagucuacaaugaaacuuucaauuaauucugu

SEQ ID NO: 94428 - RNA, 31 nt, Homo Sapiens
guuugucaagccacaucuguaggaauguugc

SEQ ID NO: 94429 - RNA, 32 nt, Homo Sapiens
uuuguaaagcaaacagaacccaaugccucccu

SEQ ID NO: 94430 - RNA, 32 nt, Homo Sapiens
aaggauuccagaagaaguaauacuuuauucuc

SEQ ID NO: 94431 - RNA, 32 nt, Homo Sapiens
uagugugaccccacccaagagcaugacacacc

SEQ ID NO: 94432 - RNA, 31 nt, Homo Sapiens
aggggucucugcagccaacugagacuaucuu

SEQ ID NO: 94433 - RNA, 32 nt, Homo Sapiens
uguucacacuggcucucagucuagucaggugc

SEQ ID NO: 94434 - RNA, 32 nt, Homo Sapiens
cucagcaugacuucaccuccauccugguggac

SEQ ID NO: 94435 - RNA, 32 nt, Homo Sapiens
aaaauaauauccaugcguuucuuccacugagu

SEQ ID NO: 94436 - RNA, 32 nt, Homo Sapiens
agacugaccacuugcuuggagugugugcuuga

SEQ ID NO: 94437 - RNA, 32 nt, Homo Sapiens
ccuggcugggccugggcuuccacagugugaag

SEQ ID NO: 94438 - RNA, 32 nt, Homo Sapiens
uuaauaugucauuaaugguauuucuuuuuuac

SEQ ID NO: 94439 - RNA, 32 nt, Homo Sapiens
ccaagucuuucuucuuuuuuaaguugucaaag

SEQ ID NO: 94440 - RNA, 32 nt, Homo Sapiens
guugcaggcagaugagacaguguuauaucagg

SEQ ID NO: 94441 - RNA, 32 nt, Homo Sapiens
ggaccuguagcaguuucuuuggcugccugggc

SEQ ID NO: 94442 - RNA, 32 nt, Homo Sapiens
cuccuguuccgcgcagccucuccggccucgcc

SEQ ID NO: 94443 - RNA, 32 nt, Homo Sapiens
cuccucaaaucgaauuauuuucuuuuuaaauu

SEQ ID NO: 94444 - RNA, 32 nt, Homo Sapiens
gaacugaaguuuuuucuuaauuaucaugugac

SEQ ID NO: 94445 - RNA, 29 nt, Homo Sapiens
caaagacugucaaguggaaagcuaucauu

SEQ ID NO: 94446 - RNA, 32 nt, Homo Sapiens
caugagguccaguguugucaccaucuacuagg

SEQ ID NO: 94447 - RNA, 29 nt, Homo Sapiens
uauaucacuaugaugucugugagaauggg

SEQ ID NO: 94448 - RNA, 32 nt, Homo Sapiens
ugucuauuauuggauuucauuaucauaugaac

SEQ ID NO: 94449 - RNA, 32 nt, Homo Sapiens
auugcugugaagauuagugaaauaaugcaugu

SEQ ID NO: 94450 - RNA, 32 nt, Homo Sapiens
uuggaaauuuugcaaaauacauguaagaaaga

SEQ ID NO: 94451 - RNA, 32 nt, Homo Sapiens
gaagccaguuuaggcuagagaggaaaaaacua

SEQ ID NO: 94452 - RNA, 32 nt, Homo Sapiens
uggaaauuuauaauacaaacauuuucuauaaa

SEQ ID NO: 94453 - RNA, 32 nt, Homo Sapiens
uuuggggcauuuguuuuuuguaaauaagauga

SEQ ID NO: 94454 - RNA, 32 nt, Homo Sapiens
ucccgggaaggggcucccccucuacacccacc

SEQ ID NO: 94455 - RNA, 32 nt, Homo Sapiens
gccgugcucgggcucgccugcucagcucacuc

SEQ ID NO: 94456 - RNA, 32 nt, Homo Sapiens
aggcuggagcuggacuggcggcggcggcaccu

SEQ ID NO: 94457 - RNA, 32 nt, Homo Sapiens
auaucuacuccucaauaaagcauguucucugc

SEQ ID NO: 94458 - RNA, 32 nt, Homo Sapiens
cugauuaugaauugagcagaaggaaacaaagu

SEQ ID NO: 94459 - RNA, 32 nt, Homo Sapiens
ugaggugugggcugacggaaugcccuaguuga

SEQ ID NO: 94460 - RNA, 32 nt, Homo Sapiens
cccgcccagagccccagcgcgccgaggaugug

SEQ ID NO: 94461 - RNA, 32 nt, Homo Sapiens
cauacaugccccaccuacucuuucauccccuc

SEQ ID NO: 94462 - RNA, 31 nt, Homo Sapiens
uggugccaagccaggcaccuuccugaguucu

SEQ ID NO: 94463 - RNA, 28 nt, Homo Sapiens
ccugagguccggccgcccaggggugcgc

SEQ ID NO: 94464 - RNA, 32 nt, Homo Sapiens
uuagcuggucugaccuugcggggccccuucua

SEQ ID NO: 94465 - RNA, 32 nt, Homo Sapiens
ggcaggcgccgcgagagaggcagcagccggcu

SEQ ID NO: 94466 - RNA, 32 nt, Homo Sapiens
cagaggaacugcucccaccucuccuucucuuu

SEQ ID NO: 94467 - RNA, 32 nt, Homo Sapiens
accuccgccucccggguucaagccauucuccu

SEQ ID NO: 94468 - RNA, 32 nt, Homo Sapiens
gcaccuuuugaaugacuugcaccuggaagaag

SEQ ID NO: 94469 - RNA, 32 nt, Homo Sapiens
gggaaggaaaaccaguagcaucagcagcagca

SEQ ID NO: 94470 - RNA, 32 nt, Homo Sapiens
uaaaauaucugagugaggucuaucuucuuuga

SEQ ID NO: 94471 - RNA, 32 nt, Homo Sapiens
gaucuaagaagcagaagcugguuggaggcugg

SEQ ID NO: 94472 - RNA, 32 nt, Homo Sapiens
ucccgccggcgccaccaccgcggucacucacc

SEQ ID NO: 94473 - RNA, 32 nt, Homo Sapiens
uuuacuaacuucauuagcauuuccauacauug

SEQ ID NO: 94474 - RNA, 32 nt, Homo Sapiens
uucucaugcuauaaaaguggacagguacucua

SEQ ID NO: 94475 - RNA, 32 nt, Homo Sapiens
uagcugggacuacaggcaugcgccaccacacc

SEQ ID NO: 94476 - RNA, 31 nt, Homo Sapiens
aaccccgcagcuagccaacccagagccagga

SEQ ID NO: 94477 - RNA, 32 nt, Homo Sapiens
agaaaacaaacacacgaggagcaugcagcgaa

SEQ ID NO: 94478 - RNA, 32 nt, Homo Sapiens
acuaagcugugaugaagaaagugugguaaaaa

SEQ ID NO: 94479 - RNA, 32 nt, Homo Sapiens
gaguuggggcccuggggugauagccucgagga

SEQ ID NO: 94480 - RNA, 32 nt, Homo Sapiens
gcggaaggcugcuggggugcgcaggugggcgc

SEQ ID NO: 94481 - RNA, 32 nt, Homo Sapiens
agagagaaaaacaguauuagugaaaagcucau

SEQ ID NO: 94482 - RNA, 32 nt, Homo Sapiens
ggagacauugcacuugaugacauugugcuuac

SEQ ID NO: 94483 - RNA, 32 nt, Homo Sapiens
guggaaggugaacacaagcuauucugucuccu

SEQ ID NO: 94484 - RNA, 32 nt, Homo Sapiens
auuuguaagaaauaacacugugaauguaaaac

SEQ ID NO: 94485 - RNA, 32 nt, Homo Sapiens
gugguguccccuggcccuccccccaccccucu

SEQ ID NO: 94486 - RNA, 32 nt, Homo Sapiens
caucagcauggcggggcggggggcggggggcg

SEQ ID NO: 94487 - RNA, 32 nt, Homo Sapiens
ccgccugccgugcccgccuccacgcgcgccgc

SEQ ID NO: 94488 - RNA, 32 nt, Homo Sapiens
agcuggaggcugguccaccucccucagcuucc

SEQ ID NO: 94489 - RNA, 32 nt, Homo Sapiens
gggacccgagauggggggcgcauuguggcauu

SEQ ID NO: 94490 - RNA, 32 nt, Homo Sapiens
gguacucagaucuucacuaaauaaugaaucug

SEQ ID NO: 94491 - RNA, 32 nt, Homo Sapiens
aaaauugcuaaaacaauagauuuuaaaugcac

SEQ ID NO: 94492 - RNA, 32 nt, Homo Sapiens
gugaguuauagaucucucgaauuauauuuaua

SEQ ID NO: 94493 - RNA, 32 nt, Homo Sapiens
uguuuuuauagcauuuugcuuuuucuuggaau

SEQ ID NO: 94494 - RNA, 32 nt, Homo Sapiens
ggccugggccuggccagaccagagggcagguu

SEQ ID NO: 94495 - RNA, 32 nt, Homo Sapiens
ggaagcugaaaauuauaauauugaaucugcaa

SEQ ID NO: 94496 - RNA, 32 nt, Homo Sapiens
ccagaggccaccccggcccggccuccaggcag

SEQ ID NO: 94497 - RNA, 32 nt, Homo Sapiens
cuuuuauguguggcaggcacgcagcuuugaau

SEQ ID NO: 94498 - RNA, 32 nt, Homo Sapiens
gaccacacaguggcguucuggaugcccgaguc

SEQ ID NO: 94499 - RNA, 32 nt, Homo Sapiens
aucagaaaaugaagcaacacuugagcuguuca

SEQ ID NO: 94500 - RNA, 32 nt, Homo Sapiens
aucaucacauaaauucaaaugcaaaaaccaca

SEQ ID NO: 94501 - RNA, 32 nt, Homo Sapiens
cguucguucagaugcuucgcgauuuagcuugc

SEQ ID NO: 94502 - RNA, 32 nt, Homo Sapiens
aaauguacuccugcuguaaaucuuuuucaaaa

SEQ ID NO: 94503 - RNA, 32 nt, Homo Sapiens
gaucccaagcucaagggugaauccccaauacu

SEQ ID NO: 94504 - RNA, 32 nt, Homo Sapiens
cgauuaucuaaaaaccauaguacuuaaauuga

SEQ ID NO: 94505 - RNA, 32 nt, Homo Sapiens
ucggagugagcgcgaagugcuggugagcagug

SEQ ID NO: 94506 - RNA, 32 nt, Homo Sapiens
caucccagccucagccgguggggacggcugcc

SEQ ID NO: 94507 - RNA, 32 nt, Homo Sapiens
gugcggcgcccgggcgcaacgcaaacauggcg

SEQ ID NO: 94508 - RNA, 32 nt, Homo Sapiens
ccaggugugcauucucuuucucaaggauguuc

SEQ ID NO: 94509 - RNA, 32 nt, Homo Sapiens
ucccaccauuggaaaauuuuggaagucuuuca

SEQ ID NO: 94510 - RNA, 32 nt, Homo Sapiens
cuaaaaaugcaaacauuagcugggcauggugg

SEQ ID NO: 94511 - RNA, 28 nt, Homo Sapiens
agcagggcuggggucaggaugacgaggc

SEQ ID NO: 94512 - RNA, 32 nt, Homo Sapiens
gaccuggaaauacccacucaugaucccacugc

SEQ ID NO: 94513 - RNA, 32 nt, Homo Sapiens
gccuuaugaacagggugacuguuuccccaucg

SEQ ID NO: 94514 - RNA, 32 nt, Homo Sapiens
gagaguugucaggggugucuucugccuggucu

SEQ ID NO: 94515 - RNA, 32 nt, Homo Sapiens
uuaaagacuguucuuugcccaauaaccacauu

SEQ ID NO: 94516 - RNA, 32 nt, Homo Sapiens
ugauaaugagugaguucucacgagaucugaug

SEQ ID NO: 94517 - RNA, 32 nt, Homo Sapiens
cgcggccaccgccgccugaucagcgcgacccc

SEQ ID NO: 94518 - RNA, 32 nt, Homo Sapiens
cuguaucuugucauguauauguagcucauuuu

SEQ ID NO: 94519 - RNA, 29 nt, Homo Sapiens
cucaauaaauaagccuuuuuuacaaccug

SEQ ID NO: 94520 - RNA, 32 nt, Homo Sapiens
ccccuggauucuggaagaccucaccaugggac

SEQ ID NO: 94521 - RNA, 32 nt, Homo Sapiens
acaacauucugaaaauacaauuuggcuacgaa

SEQ ID NO: 94522 - RNA, 32 nt, Homo Sapiens
augugaaaaaggaauaaaaaauacuguugggc

SEQ ID NO: 94523 - RNA, 32 nt, Homo Sapiens
cuaggcuugaggguggagagccaggccuccuc

SEQ ID NO: 94524 - RNA, 32 nt, Homo Sapiens
ucucuaugaagauacgucuguccaaacuuuua

SEQ ID NO: 94525 - RNA, 32 nt, Homo Sapiens
guaacucuuuggugguuuuaugaugcuuacaa

SEQ ID NO: 94526 - RNA, 32 nt, Homo Sapiens
guuauguguuugucaauguacuggcugaggau

SEQ ID NO: 94527 - RNA, 32 nt, Homo Sapiens
guagcugggauuacaggcacccgccaccacac

SEQ ID NO: 94528 - RNA, 32 nt, Homo Sapiens
gagaggaagggcugacacuugcuggcauggcc

SEQ ID NO: 94529 - RNA, 32 nt, Homo Sapiens
acuguauuugcauuguuagaaaacaguuugua

SEQ ID NO: 94530 - RNA, 32 nt, Homo Sapiens
ccggagacccgccccggcccgguccacauucu

SEQ ID NO: 94531 - RNA, 32 nt, Homo Sapiens
gcagacaaagaccaggggcagcucccgagggc

SEQ ID NO: 94532 - RNA, 32 nt, Homo Sapiens
gcaaaaggacaguaaacuguggaccuugaagu

SEQ ID NO: 94533 - RNA, 32 nt, Homo Sapiens
caacucauucuaugaggccaacaucaucuuga

SEQ ID NO: 94534 - RNA, 32 nt, Homo Sapiens
aguaguugacauuuaucagcaaaucucuugca

SEQ ID NO: 94535 - RNA, 32 nt, Homo Sapiens
ggguggcaaguaaggcuuugccucaggcacaa

SEQ ID NO: 94536 - RNA, 32 nt, Homo Sapiens
ggcuauugcuugcuucagcugcagccugccug

SEQ ID NO: 94537 - RNA, 32 nt, Homo Sapiens
gugggcccgcagagccggggacagagagaguc

SEQ ID NO: 94538 - RNA, 32 nt, Homo Sapiens
uguggaagggauguuuuguaagaacuaccaac

SEQ ID NO: 94539 - RNA, 32 nt, Homo Sapiens
agaagaagggaagagucagggagacccccagc

SEQ ID NO: 94540 - RNA, 32 nt, Homo Sapiens
ggagaggaacugccagcucccgcuuucuguuu

SEQ ID NO: 94541 - RNA, 32 nt, Homo Sapiens
ucuauuuuguacacuuuaucauuaaaggauuu

SEQ ID NO: 94542 - RNA, 32 nt, Homo Sapiens
gcgauucuggagccaggcggcugggguuugca

SEQ ID NO: 94543 - RNA, 32 nt, Homo Sapiens
uuuggagcggcugugggugucgucuggacuga

SEQ ID NO: 94544 - RNA, 32 nt, Homo Sapiens
acuugggaucuguauuuucagaugauuuuauu

SEQ ID NO: 94545 - RNA, 32 nt, Homo Sapiens
uuaaaauauagccuucaggaaucuuguagaau

SEQ ID NO: 94546 - RNA, 32 nt, Homo Sapiens
cgcccccacauacacaccccuucuucccacuc

SEQ ID NO: 94547 - RNA, 32 nt, Homo Sapiens
gauaagguacuauuuguaaaauuuaucagccg

SEQ ID NO: 94548 - RNA, 32 nt, Homo Sapiens
gaacuucaguggugcugaucuuucucguuugg

SEQ ID NO: 94549 - RNA, 32 nt, Homo Sapiens
aauuacccauucucuuuuucuucagauuuucu

SEQ ID NO: 94550 - RNA, 32 nt, Homo Sapiens
acaaagggacuguuuucuuacucuuagucuga

SEQ ID NO: 94551 - RNA, 32 nt, Homo Sapiens
ugcuguuuuaaagauucaacuuguuuuucacu

SEQ ID NO: 94552 - RNA, 32 nt, Homo Sapiens
aacuaaaaacaaaggagauaaauuuaguauac

SEQ ID NO: 94553 - RNA, 32 nt, Homo Sapiens
agcauguuucuuacauagauaauuauggauac

SEQ ID NO: 94554 - RNA, 32 nt, Homo Sapiens
cgcgaugccucaugcccacuuuagcagauagu

SEQ ID NO: 94555 - RNA, 32 nt, Homo Sapiens
aaguuuuacugauaauuugagguuagauggga

SEQ ID NO: 94556 - RNA, 32 nt, Homo Sapiens
cucauuuuucccauggaucucuucccagcauu

SEQ ID NO: 94557 - RNA, 32 nt, Homo Sapiens
agcagugucgccauaguuguguuguuuacaau

SEQ ID NO: 94558 - RNA, 32 nt, Homo Sapiens
aaaaaagaaggaaaaaacuuuuuggugcucca

SEQ ID NO: 94559 - RNA, 32 nt, Homo Sapiens
uugagguagaauacuuucauuauucuugcagc

SEQ ID NO: 94560 - RNA, 32 nt, Homo Sapiens
auggcacaggggucuuggggccccacagcccu

SEQ ID NO: 94561 - RNA, 32 nt, Homo Sapiens
gggcccucggaacagagccccugugucauucu

SEQ ID NO: 94562 - RNA, 32 nt, Homo Sapiens
uucuuccaauaaaacuaauuauggcucauucc

SEQ ID NO: 94563 - RNA, 32 nt, Homo Sapiens
uccucuuggccauccuucuguguaccacuucc

SEQ ID NO: 94564 - RNA, 32 nt, Homo Sapiens
gcaauucguuuuuggugcacucaugcaugccu

SEQ ID NO: 94565 - RNA, 32 nt, Homo Sapiens
auuucuuuccugaguucaggugacugaggaag

SEQ ID NO: 94566 - RNA, 32 nt, Homo Sapiens
acuucgcugccagcuggucgucgccaugaacc

SEQ ID NO: 94567 - RNA, 32 nt, Homo Sapiens
auguucagcucagcgauugccaaauaccaguu

SEQ ID NO: 94568 - RNA, 32 nt, Homo Sapiens
cagcgccccuccccacccagcgcccucacaga

SEQ ID NO: 94569 - RNA, 31 nt, Homo Sapiens
gcaaugaaauaaaauuaaagguauacuagcu

SEQ ID NO: 94570 - RNA, 32 nt, Homo Sapiens
aucaguguacuauuggcugcagaauuuguuuc

SEQ ID NO: 94571 - RNA, 32 nt, Homo Sapiens
acuaugggacuggauacaaacacacacccggc

SEQ ID NO: 94572 - RNA, 31 nt, Homo Sapiens
ggagacaaauaaaacuagaguauucauccag

SEQ ID NO: 94573 - RNA, 30 nt, Homo Sapiens
cuucuauuacuugccauaugcuaauccauc

SEQ ID NO: 94574 - RNA, 32 nt, Homo Sapiens
cuuuauguugugguccuuuggcagaugaaaaa

SEQ ID NO: 94575 - RNA, 32 nt, Homo Sapiens
gagaucagaacaccugggguccuucuauuugg

SEQ ID NO: 94576 - RNA, 32 nt, Homo Sapiens
ggcccucccgacagaggccccaggugcgcugg

SEQ ID NO: 94577 - RNA, 32 nt, Homo Sapiens
gcaacaguuugagagaggcgcuucugcggcca

SEQ ID NO: 94578 - RNA, 32 nt, Homo Sapiens
caucuuuugggaagccaggaaagcguuuggaa

SEQ ID NO: 94579 - RNA, 32 nt, Homo Sapiens
ucccucgcacagccucgcacaaaccacauugc

SEQ ID NO: 94580 - RNA, 32 nt, Homo Sapiens
ugucccaaggaccuguugugugcccagcuugg

SEQ ID NO: 94581 - RNA, 32 nt, Homo Sapiens
gccacccaggaggaagagcgggcugaggaaac

SEQ ID NO: 94582 - RNA, 32 nt, Homo Sapiens
auuaauggagaauucagagaaaucagagcuuc

SEQ ID NO: 94583 - RNA, 32 nt, Homo Sapiens
ggcgaccgcuccccggcgggagccagcgaagg

SEQ ID NO: 94584 - RNA, 32 nt, Homo Sapiens
gggcccugccagcugccacagcugcaugaccu

SEQ ID NO: 94585 - RNA, 32 nt, Homo Sapiens
aauguguucuuugccaaggugaucuaaguugc

SEQ ID NO: 94586 - RNA, 32 nt, Homo Sapiens
gccaggccuggcuggaggagcagcagcuuggg

SEQ ID NO: 94587 - RNA, 32 nt, Homo Sapiens
agaagccccccugucgcccacccagcuggucc

SEQ ID NO: 94588 - RNA, 32 nt, Homo Sapiens
ugcugcccuggggcacaccccugggccuucgu

SEQ ID NO: 94589 - RNA, 32 nt, Homo Sapiens
gugagguacagagggaaaacauacagugggua

SEQ ID NO: 94590 - RNA, 32 nt, Homo Sapiens
aaccuugcugcuaugcuguucauugaugacau

SEQ ID NO: 94591 - RNA, 32 nt, Homo Sapiens
cugugcuauaaacugcaauuucuauuuggggu

SEQ ID NO: 94592 - RNA, 32 nt, Homo Sapiens
ugggaggaauucuggaggagaguaaagucgaa

SEQ ID NO: 94593 - RNA, 32 nt, Homo Sapiens
uccugauuauauuugcaaacuucuuuauaaaa

SEQ ID NO: 94594 - RNA, 32 nt, Homo Sapiens
gacagggucuuguuuugucacccaggcuggag

SEQ ID NO: 94595 - RNA, 32 nt, Homo Sapiens
uggcaacccagcuuuaacuucuuuggcuucua

SEQ ID NO: 94596 - RNA, 32 nt, Homo Sapiens
gacauuccggugggggacucuggccagcccga

SEQ ID NO: 94597 - RNA, 32 nt, Homo Sapiens
cgcaucgccuccuccgcccgccgcguggucgc

SEQ ID NO: 94598 - RNA, 32 nt, Homo Sapiens
aggguuuggcgugugugucauguggcugugug

SEQ ID NO: 94599 - RNA, 32 nt, Homo Sapiens
cuuugaauauaauuuuagauugagauucagau

SEQ ID NO: 94600 - RNA, 32 nt, Homo Sapiens
gacaggaggaggaggucaccaccaugauccug

SEQ ID NO: 94601 - RNA, 32 nt, Homo Sapiens
uuaggcccaggcgggggucguggccucguucc

SEQ ID NO: 94602 - RNA, 29 nt, Homo Sapiens
cucccuucuauccaacauucaacaacggg

SEQ ID NO: 94603 - RNA, 32 nt, Homo Sapiens
cuucgcggccccaguccccgaccucggcgcug

SEQ ID NO: 94604 - RNA, 32 nt, Homo Sapiens
uuuuucaccaauauuucucagacaucgguuca

SEQ ID NO: 94605 - RNA, 32 nt, Homo Sapiens
acacagcacgggggccaaggaugccccguccc

SEQ ID NO: 94606 - RNA, 32 nt, Homo Sapiens
agccuccugcccacccagggcccuuuacucuc

SEQ ID NO: 94607 - RNA, 29 nt, Homo Sapiens
uuugugaagggacuauauuuuuugagaaa

SEQ ID NO: 94608 - RNA, 32 nt, Homo Sapiens
uuuacauauguuugugcaauuauuuucuguac

SEQ ID NO: 94609 - RNA, 32 nt, Homo Sapiens
uauucuccccgcacggaagcgacgacuggccu

SEQ ID NO: 94610 - RNA, 32 nt, Homo Sapiens
caccaagcauggauuauugggauuguagagaa

SEQ ID NO: 94611 - RNA, 32 nt, Homo Sapiens
ugaucaggauggaaaggaaaauacugaguuua

SEQ ID NO: 94612 - RNA, 32 nt, Homo Sapiens
uucuugcugcugugucccucaccgguuccuug

SEQ ID NO: 94613 - RNA, 32 nt, Homo Sapiens
cuggaggugaagguaccaccucauggagaccc

SEQ ID NO: 94614 - RNA, 32 nt, Homo Sapiens
agaaauauaaagccuguuaaauuugugauuag

SEQ ID NO: 94615 - RNA, 32 nt, Homo Sapiens
ugucuuucuauacuuuuugccuuuguagccuc

SEQ ID NO: 94616 - RNA, 32 nt, Homo Sapiens
cgccgcccccgcgcugcucgcugcuggagcug

SEQ ID NO: 94617 - RNA, 32 nt, Homo Sapiens
auauucaggaccaacucucucccuccccucau

SEQ ID NO: 94618 - RNA, 32 nt, Homo Sapiens
gcagagagaggaggcagaggcugggaauggga

SEQ ID NO: 94619 - RNA, 32 nt, Homo Sapiens
cugugccacugggacccgccucugccaugaaa

SEQ ID NO: 94620 - RNA, 32 nt, Homo Sapiens
guuucugcuccucgcugcgccggcgaccccgg

SEQ ID NO: 94621 - RNA, 32 nt, Homo Sapiens
ggcuagccgcgugcguucgcgccgcgccuccu

SEQ ID NO: 94622 - RNA, 32 nt, Homo Sapiens
ggauuuuaauuuccuauggaaaguugcuuaaa

SEQ ID NO: 94623 - RNA, 32 nt, Homo Sapiens
aagccgaacauacguauaaacugauccagcag

SEQ ID NO: 94624 - RNA, 32 nt, Homo Sapiens
gcauuuuccagaagcuucuuugaaagggaauc

SEQ ID NO: 94625 - RNA, 32 nt, Homo Sapiens
gucuauuuuuauuuauuuauuuuucuucuccc

SEQ ID NO: 94626 - RNA, 32 nt, Homo Sapiens
gcugcauuugggaguuauaugguuauuuggua

SEQ ID NO: 94627 - RNA, 32 nt, Homo Sapiens
gacagaaguaauccucuuucugcucaccccag

SEQ ID NO: 94628 - RNA, 25 nt, Homo Sapiens
auguccacuccagacccaccccugg

SEQ ID NO: 94629 - RNA, 32 nt, Homo Sapiens
ucaaucaucuucuccuggccaaggcucugacc

SEQ ID NO: 94630 - RNA, 32 nt, Homo Sapiens
gcccggggccgcgaccccgaccgucccugcug

SEQ ID NO: 94631 - RNA, 32 nt, Homo Sapiens
gaaccaugcugcuugggaaugugugugaugcc

SEQ ID NO: 94632 - RNA, 32 nt, Homo Sapiens
aacuaguccaugagucucaucauccucaaauu

SEQ ID NO: 94633 - RNA, 32 nt, Homo Sapiens
gcgggggcgggugccagggacuuggaggugga

SEQ ID NO: 94634 - RNA, 32 nt, Homo Sapiens
gagagggugccguuuccugcuccagcuccaga

SEQ ID NO: 94635 - RNA, 32 nt, Homo Sapiens
ccuuuugggaccuuggaauggggugaauguau

SEQ ID NO: 94636 - RNA, 32 nt, Homo Sapiens
gugggcaucuucugcccaugggcuccauuugg

SEQ ID NO: 94637 - RNA, 32 nt, Homo Sapiens
uccgcagaaggguuaaacaggucuuugggcuu

SEQ ID NO: 94638 - RNA, 32 nt, Homo Sapiens
gccugucccggugcugccccagccaggaucug

SEQ ID NO: 94639 - RNA, 32 nt, Homo Sapiens
aucugcaaacaaugaagaauuauguaauauau

SEQ ID NO: 94640 - RNA, 32 nt, Homo Sapiens
uuaacuaagcuaaacugcucucugauuauuca

SEQ ID NO: 94641 - RNA, 32 nt, Homo Sapiens
aagaauauaaaauaauauaacaagugcagcua

SEQ ID NO: 94642 - RNA, 32 nt, Homo Sapiens
aucaauuuuaaagauuaguuucgguccccauc

SEQ ID NO: 94643 - RNA, 32 nt, Homo Sapiens
auccuggguucuugugggaagaacgggaacaa

SEQ ID NO: 94644 - RNA, 32 nt, Homo Sapiens
gggucagggcgcaauggcggcgcugggcgggg

SEQ ID NO: 94645 - RNA, 32 nt, Homo Sapiens
uaguugucaugccuauguuuagaccauaucuu

SEQ ID NO: 94646 - RNA, 32 nt, Homo Sapiens
ugauugcuacccuaaccuugaccuuuaacccg

SEQ ID NO: 94647 - RNA, 32 nt, Homo Sapiens
uagggagaggcggguugcgggcggcggcggcg

SEQ ID NO: 94648 - RNA, 32 nt, Homo Sapiens
ggcaguccaggccgagagccggcggcccugaa

SEQ ID NO: 94649 - RNA, 28 nt, Homo Sapiens
uggccggggcggcgcacucagguggccu

SEQ ID NO: 94650 - RNA, 26 nt, Homo Sapiens
caacauuaaagguucugguauugguu

SEQ ID NO: 94651 - RNA, 32 nt, Homo Sapiens
aggagagucggcggccggagccgucaccccgg

SEQ ID NO: 94652 - RNA, 32 nt, Homo Sapiens
uccauuuuucucacuuuaugucucucugaccu

SEQ ID NO: 94653 - RNA, 32 nt, Homo Sapiens
gaaacccggcuccgagcggcggcggcccggcu

SEQ ID NO: 94654 - RNA, 32 nt, Homo Sapiens
uggagcuagagauguaaaauggacagucuuga

SEQ ID NO: 94655 - RNA, 32 nt, Homo Sapiens
uaaagcuguccauucaauuccaaauacugguu

SEQ ID NO: 94656 - RNA, 31 nt, Homo Sapiens
ucgcugcauuuuauuucacaagaggagugug

SEQ ID NO: 94657 - RNA, 32 nt, Homo Sapiens
gguuuauucuuucugaaaaugucuagauucag

SEQ ID NO: 94658 - RNA, 32 nt, Homo Sapiens
ggggccucaguugcaggcaggcacagaaaacc

SEQ ID NO: 94659 - RNA, 32 nt, Homo Sapiens
aaauuccauuuucuugggugagcaugaacuuu

SEQ ID NO: 94660 - RNA, 32 nt, Homo Sapiens
cuggacugccagccccuguccucccuucaccc

SEQ ID NO: 94661 - RNA, 32 nt, Homo Sapiens
cuguugugggguggggggaggggggagggaua

SEQ ID NO: 94662 - RNA, 31 nt, Homo Sapiens
aaaaggauggaguugggaaaaggaaaacuac

SEQ ID NO: 94663 - RNA, 32 nt, Homo Sapiens
ucccuguaaaauaaauguaauuuaucuuugcc

SEQ ID NO: 94664 - RNA, 32 nt, Homo Sapiens
ucugguuggaauggugacaacaugcuggagcc

SEQ ID NO: 94665 - RNA, 32 nt, Homo Sapiens
cacuuccaggcaauguucugugcagccgcucu

SEQ ID NO: 94666 - RNA, 32 nt, Homo Sapiens
uugacaccuuggcaguguuuauggccagcagc

SEQ ID NO: 94667 - RNA, 32 nt, Homo Sapiens
gauacuauaaaaagggaagagaaggaccgaga

SEQ ID NO: 94668 - RNA, 32 nt, Homo Sapiens
ugagucacugcgccuggccaaguuucaguucu

SEQ ID NO: 94669 - RNA, 30 nt, Homo Sapiens
ucugggcagaagcuuugagagccugggucc

SEQ ID NO: 94670 - RNA, 32 nt, Homo Sapiens
acagcguuuaggaaucuuucugggggacuuuu

SEQ ID NO: 94671 - RNA, 32 nt, Homo Sapiens
acccuucugucuacuggccucccuuugugugc

SEQ ID NO: 94672 - RNA, 32 nt, Homo Sapiens
uggcccagcccgacucccuccuccuucccgaa

SEQ ID NO: 94673 - RNA, 32 nt, Homo Sapiens
gugaaaggguuuaaaaguuugggggcauggcu

SEQ ID NO: 94674 - RNA, 32 nt, Homo Sapiens
cgacugauguccguugagggcugcagucagag

SEQ ID NO: 94675 - RNA, 32 nt, Homo Sapiens
uccuacuuucccuugaauagugcuuuucuccc

SEQ ID NO: 94676 - RNA, 32 nt, Homo Sapiens
auguucuuuggcagugauauaguucuuagaca

SEQ ID NO: 94677 - RNA, 32 nt, Homo Sapiens
ggucuuuccucauuucugcuucugggaugaca

SEQ ID NO: 94678 - RNA, 32 nt, Homo Sapiens
uaucccaguauuuuauguuguuauuauugaua

SEQ ID NO: 94679 - RNA, 32 nt, Homo Sapiens
acauacuauggaauuucucccagucauuuaau

SEQ ID NO: 94680 - RNA, 32 nt, Homo Sapiens
aagccaauaaauaauauuauauuguauuuaac

SEQ ID NO: 94681 - RNA, 32 nt, Homo Sapiens
ugaaaacacuguaucuucuaguuguuggauuu

SEQ ID NO: 94682 - RNA, 32 nt, Homo Sapiens
accauucugaugcaggugcugaugaguuagga

SEQ ID NO: 94683 - RNA, 32 nt, Homo Sapiens
aaacagguguuagaaaccauuuucucagagaa

SEQ ID NO: 94684 - RNA, 32 nt, Homo Sapiens
ugucaaaaugacuucagaccacuucuagccuu

SEQ ID NO: 94685 - RNA, 32 nt, Homo Sapiens
uaucuuuuauauauuuaucaaugguggacacu

SEQ ID NO: 94686 - RNA, 31 nt, Homo Sapiens
accuugcagccgggugagccaagggcacuuu

SEQ ID NO: 94687 - RNA, 32 nt, Homo Sapiens
aggggcuguccacuuccuguggguucacagcu

SEQ ID NO: 94688 - RNA, 32 nt, Homo Sapiens
uucauugcuucacagcaccugaugccuuuuaa

SEQ ID NO: 94689 - RNA, 32 nt, Homo Sapiens
gguaacaaccacaagaagacaagcaucugugg

SEQ ID NO: 94690 - RNA, 32 nt, Homo Sapiens
gcagaaauucuauaaacucuuugcuguuuuug

SEQ ID NO: 94691 - RNA, 32 nt, Homo Sapiens
gcugaucucccagcugaggggcugagcacugg

SEQ ID NO: 94692 - RNA, 32 nt, Homo Sapiens
uuaagauugccaaaaacuguuaaaauuuaaaa

SEQ ID NO: 94693 - RNA, 32 nt, Homo Sapiens
uggccugcccccacccgccauccucucugccc

SEQ ID NO: 94694 - RNA, 32 nt, Homo Sapiens
gugauaucaucguugaacuauuagcuuugaag

SEQ ID NO: 94695 - RNA, 32 nt, Homo Sapiens
agccaaauuuuaaauucauacuguauaacaaa

SEQ ID NO: 94696 - RNA, 32 nt, Homo Sapiens
cugugacagagcugcagaccccugccuugagu

SEQ ID NO: 94697 - RNA, 32 nt, Homo Sapiens
ggucagcugacagauuucccauuuaguaguca

SEQ ID NO: 94698 - RNA, 32 nt, Homo Sapiens
gaugauccaaaaauaagugauaaugaaaacca

SEQ ID NO: 94699 - RNA, 32 nt, Homo Sapiens
caacuuagcaggcaacaguucuccuccccuag

SEQ ID NO: 94700 - RNA, 32 nt, Homo Sapiens
gcggaccggcuggcggaggaggaggcgaagga

SEQ ID NO: 94701 - RNA, 32 nt, Homo Sapiens
ccaccacaaacacaguggacugggacagggca

SEQ ID NO: 94702 - RNA, 32 nt, Homo Sapiens
cuuucaagcagugcuuguugugaggucccauc

SEQ ID NO: 94703 - RNA, 32 nt, Homo Sapiens
ucaggagaauggugugaucaccugucacagac

SEQ ID NO: 94704 - RNA, 32 nt, Homo Sapiens
cuggacuguuuucucucggcuccccauguguc

SEQ ID NO: 94705 - RNA, 32 nt, Homo Sapiens
acuugcgcuccacagcacuguaaugccagugg

SEQ ID NO: 94706 - RNA, 32 nt, Homo Sapiens
aagcuucuccuccaaugacaaucuguuagcac

SEQ ID NO: 94707 - RNA, 32 nt, Homo Sapiens
acggugcggcgcagcuccugcucgccuuuccc

SEQ ID NO: 94708 - RNA, 32 nt, Homo Sapiens
ucuccccgccccuucuccuccuccuaccuggg

SEQ ID NO: 94709 - RNA, 32 nt, Homo Sapiens
cccgggaaggcacugucuuugcgccugcacau

SEQ ID NO: 94710 - RNA, 32 nt, Homo Sapiens
cacacacacacacacacagacacacaccaagu

SEQ ID NO: 94711 - RNA, 32 nt, Homo Sapiens
uauaucccuggguggagcugggcccccacccg

SEQ ID NO: 94712 - RNA, 32 nt, Homo Sapiens
cuggacuuuaguaggcuuugguaaaugugaga

SEQ ID NO: 94713 - RNA, 32 nt, Homo Sapiens
augccucccccgcuccuaacccaacuuuaguu

SEQ ID NO: 94714 - RNA, 32 nt, Homo Sapiens
uaggugcauuuugucugcaagaacgcauuggu

SEQ ID NO: 94715 - RNA, 32 nt, Homo Sapiens
cugagcuccgcggaacgguccuuagaccccgc

SEQ ID NO: 94716 - RNA, 32 nt, Homo Sapiens
ccagugguuuuauguuuuguuuuguuucgugu

SEQ ID NO: 94717 - RNA, 28 nt, Homo Sapiens
ggaguccugcggccgcccaggugucagg

SEQ ID NO: 94718 - RNA, 32 nt, Homo Sapiens
uccuccgcccgcgcccgacggagccuguucgc

SEQ ID NO: 94719 - RNA, 32 nt, Homo Sapiens
agucacucaguggccuccaaccagagaaaaca

SEQ ID NO: 94720 - RNA, 32 nt, Homo Sapiens
aucccugcccucgggggcucgagccuggagug

SEQ ID NO: 94721 - RNA, 32 nt, Homo Sapiens
gaggcuuauuaaaaauagugauucuaauguaa

SEQ ID NO: 94722 - RNA, 32 nt, Homo Sapiens
accuucauuuccccauaaguauugcuuucaga

SEQ ID NO: 94723 - RNA, 32 nt, Homo Sapiens
uucccaguguccuuggaguguugguucuuccc

SEQ ID NO: 94724 - RNA, 32 nt, Homo Sapiens
cagacagcgucucauuggccaaagaugggagg

SEQ ID NO: 94725 - RNA, 32 nt, Homo Sapiens
aggagucugcauagccaggaacaucaaguuuu

SEQ ID NO: 94726 - RNA, 32 nt, Homo Sapiens
aaaggucugccagccaggaaggagcacucuua

SEQ ID NO: 94727 - RNA, 32 nt, Homo Sapiens
ccccagcugcgguagagcugccgcagccgcgc

SEQ ID NO: 94728 - RNA, 32 nt, Homo Sapiens
auggccaagcuuugcccucccaggacccugag

SEQ ID NO: 94729 - RNA, 32 nt, Homo Sapiens
gcccucccaggccacuagguuuugacucuucc

SEQ ID NO: 94730 - RNA, 32 nt, Homo Sapiens
ccccagcucccucuugccccuccaggaagcug

SEQ ID NO: 94731 - RNA, 32 nt, Homo Sapiens
gggugggggagggagggaaagagaagagcucu

SEQ ID NO: 94732 - RNA, 32 nt, Homo Sapiens
uagauacuauuuuuaccaaguuucuuuuucug

SEQ ID NO: 94733 - RNA, 31 nt, Homo Sapiens
ucuucuuugugcuccacuucaggggacauau

SEQ ID NO: 94734 - RNA, 32 nt, Homo Sapiens
uuuagaacagagggaccaaauugcuucuagga

SEQ ID NO: 94735 - RNA, 32 nt, Homo Sapiens
aauguagaugaccuaaagaaugcguuauccau

SEQ ID NO: 94736 - RNA, 32 nt, Homo Sapiens
acugcggccgcaagcuuauucccuuuaggagg

SEQ ID NO: 94737 - RNA, 32 nt, Homo Sapiens
uucugauggcuaacuuuucucuaauuaaacua

SEQ ID NO: 94738 - RNA, 32 nt, Homo Sapiens
gcacuuuaauaaaagaauuugaaauggguuga

SEQ ID NO: 94739 - RNA, 32 nt, Homo Sapiens
uaauuauuccaagagaaaaggugacagaaugu

SEQ ID NO: 94740 - RNA, 32 nt, Homo Sapiens
auagauuagggcuggggugcugcccaagauuc

SEQ ID NO: 94741 - RNA, 32 nt, Homo Sapiens
uaggcacggggcccgcgcggugaccugcggcc

SEQ ID NO: 94742 - RNA, 32 nt, Homo Sapiens
acuggguuucuuuuugaggaagagggaaagug

SEQ ID NO: 94743 - RNA, 32 nt, Homo Sapiens
ugcagccaccggggacuugcgcggccguggca

SEQ ID NO: 94744 - RNA, 32 nt, Homo Sapiens
ggaugggcgagggugggcauugggggagaggg

SEQ ID NO: 94745 - RNA, 32 nt, Homo Sapiens
uccugugagugacaccagugaugaaauggacc

SEQ ID NO: 94746 - RNA, 32 nt, Homo Sapiens
cauuugaaggauuuggcauauuuugccuauuu

SEQ ID NO: 94747 - RNA, 32 nt, Homo Sapiens
ugaugauucacuuuucaguucucaaauuaaaa

SEQ ID NO: 94748 - RNA, 32 nt, Homo Sapiens
uuucuuucaugugugaaaugucuuaaaucaga

SEQ ID NO: 94749 - RNA, 32 nt, Homo Sapiens
gagaaguuagacagccuuuacuugcuccauca

SEQ ID NO: 94750 - RNA, 32 nt, Homo Sapiens
gauagacuaugaaugcuauuucuagaaaaagu

SEQ ID NO: 94751 - RNA, 32 nt, Homo Sapiens
uggugcaggaccagcugggagccgcugugguc

SEQ ID NO: 94752 - RNA, 32 nt, Homo Sapiens
uuauuugccuacauuuagagucuguagaugca

SEQ ID NO: 94753 - RNA, 32 nt, Homo Sapiens
uucaaagacucauguuucugcuaugaccauga

SEQ ID NO: 94754 - RNA, 32 nt, Homo Sapiens
gauugcuugagcucaggaguuugagaccagcc

SEQ ID NO: 94755 - RNA, 32 nt, Homo Sapiens
cccgucucuccgccggcccccugccucgcagu

SEQ ID NO: 94756 - RNA, 32 nt, Homo Sapiens
aauggggucuugcucugucacccaggcuggag

SEQ ID NO: 94757 - RNA, 30 nt, Homo Sapiens
gccggaacaccugggccgccgggcaccgag

SEQ ID NO: 94758 - RNA, 32 nt, Homo Sapiens
accucagcugcccacacccacacucuccagca

SEQ ID NO: 94759 - RNA, 32 nt, Homo Sapiens
ugucugcagcucaagggcuggcacuuuuuuaa

SEQ ID NO: 94760 - RNA, 32 nt, Homo Sapiens
acuucuccuucuuuuuugcccuuggcucuuga

SEQ ID NO: 94761 - RNA, 32 nt, Homo Sapiens
agacacgacgcaugccgcucugccguccggag

SEQ ID NO: 94762 - RNA, 32 nt, Homo Sapiens
gcagaagcucuuuaauuuaauuagaucuccuu

SEQ ID NO: 94763 - RNA, 32 nt, Homo Sapiens
cuuggaagaauauuuugggacuucuuaggaga

SEQ ID NO: 94764 - RNA, 32 nt, Homo Sapiens
aaagucuccccaaagccuggcuccucaugcuc

SEQ ID NO: 94765 - RNA, 32 nt, Homo Sapiens
caagcucagaucugucugucuacgcucagaug

SEQ ID NO: 94766 - RNA, 32 nt, Homo Sapiens
guuuaaaaccauccccaaaaccgaggacaugg

SEQ ID NO: 94767 - RNA, 32 nt, Homo Sapiens
cggugggcacgaugagccaggugcuggggaag

SEQ ID NO: 94768 - RNA, 32 nt, Homo Sapiens
uacuggaggauuuuuguuuuuaucauauuggu

SEQ ID NO: 94769 - RNA, 32 nt, Homo Sapiens
auuuuuaaucauguacaauauucauguacaaa

SEQ ID NO: 94770 - RNA, 32 nt, Homo Sapiens
agccugaagauaacagugcacaaggugggaaa

SEQ ID NO: 94771 - RNA, 32 nt, Homo Sapiens
gguaauuuuguacaguauaguguaugaauugc

SEQ ID NO: 94772 - RNA, 32 nt, Homo Sapiens
cgggggcaugguagcagggcugucugguuuua

SEQ ID NO: 94773 - RNA, 32 nt, Homo Sapiens
ucacuguaaacuaaucugucauuguuuuuacc

SEQ ID NO: 94774 - RNA, 32 nt, Homo Sapiens
cuuuccccuuugcaugugaaauacugugaaga

SEQ ID NO: 94775 - RNA, 32 nt, Homo Sapiens
gagcaguaaagcucagcucuguguaaugagug

SEQ ID NO: 94776 - RNA, 32 nt, Homo Sapiens
aucccugagccugguccuuaugcugucaacug

SEQ ID NO: 94777 - RNA, 32 nt, Homo Sapiens
cuuauacagcaacauuucuucaauuagcaguc

SEQ ID NO: 94778 - RNA, 32 nt, Homo Sapiens
agucauaaaagaagaaagcaaaaaauauaaau

SEQ ID NO: 94779 - RNA, 32 nt, Homo Sapiens
uauuuuaaaaacuguauucauaaaaagauauu

SEQ ID NO: 94780 - RNA, 32 nt, Homo Sapiens
cgcguccggccaagcauacaucucuaauuuua

SEQ ID NO: 94781 - RNA, 30 nt, Homo Sapiens
cugguuuucugugcuuuuuuggcuccuaaa

SEQ ID NO: 94782 - RNA, 32 nt, Homo Sapiens
gaacauauuuguaugcauuuuaaugaaaugug

SEQ ID NO: 94783 - RNA, 32 nt, Homo Sapiens
auaugaccaugaaaaugaaugcuauuuucaaa

SEQ ID NO: 94784 - RNA, 32 nt, Homo Sapiens
gaccaacuuccacagcucuguggccuucaugu

SEQ ID NO: 94785 - RNA, 32 nt, Homo Sapiens
aaccccaauuuaagaauuucuuuagccaauac

SEQ ID NO: 94786 - RNA, 32 nt, Homo Sapiens
cgucaucguuuuugaugguguuccaucuaaga

SEQ ID NO: 94787 - RNA, 32 nt, Homo Sapiens
agcccucuuggggcuccaggauuugcugaaag

SEQ ID NO: 94788 - RNA, 32 nt, Homo Sapiens
gaaaaggauugcuuguaauguuugucauggua

SEQ ID NO: 94789 - RNA, 29 nt, Homo Sapiens
cccuuucagcuuuucagaggcacgugugc

SEQ ID NO: 94790 - RNA, 32 nt, Homo Sapiens
aaaaagucauuggcuuuagaaacuguacaaaa

SEQ ID NO: 94791 - RNA, 32 nt, Homo Sapiens
ccuuaucucacaccaacucuguuuccucauug

SEQ ID NO: 94792 - RNA, 32 nt, Homo Sapiens
uucuggacauucucuuugauaacaaaaaauaa

SEQ ID NO: 94793 - RNA, 32 nt, Homo Sapiens
uguguuacugauguguugcugaagauuaaagu

SEQ ID NO: 94794 - RNA, 32 nt, Homo Sapiens
agccacagucuaauaugucuuauuuuccaaaa

SEQ ID NO: 94795 - RNA, 32 nt, Homo Sapiens
cucgcccgcucgccagccggcucuccucccgc

SEQ ID NO: 94796 - RNA, 32 nt, Homo Sapiens
aaacauguauguacuuuuuuuuucuaaguuau

SEQ ID NO: 94797 - RNA, 32 nt, Homo Sapiens
ggagugccugacaauuagcucuauucaucuug

SEQ ID NO: 94798 - RNA, 32 nt, Homo Sapiens
uuuucuuuucuuuucuuuuucaagauggaguc

SEQ ID NO: 94799 - RNA, 32 nt, Homo Sapiens
ucuggacaucauccucaagaaaacuauuuacu

SEQ ID NO: 94800 - RNA, 32 nt, Homo Sapiens
uccuuggccuccuucuuggccagccgccgugc

SEQ ID NO: 94801 - RNA, 32 nt, Homo Sapiens
ccccuuuggaccaucugccaucuuucaugagu

SEQ ID NO: 94802 - RNA, 32 nt, Homo Sapiens
cuccucugccagccacuucccagccgccccac

SEQ ID NO: 94803 - RNA, 32 nt, Homo Sapiens
cugccaacgcgcacgcucggguccgaggcugc

SEQ ID NO: 94804 - RNA, 32 nt, Homo Sapiens
cccagagcugcuuguggguuucugggguggaa

SEQ ID NO: 94805 - RNA, 32 nt, Homo Sapiens
aggggcugggagagcagaagggcaggcccugc

SEQ ID NO: 94806 - RNA, 32 nt, Homo Sapiens
uggaacuuuuaacucguuugaccuccaaacca

SEQ ID NO: 94807 - RNA, 32 nt, Homo Sapiens
gaagacugguauuuuucuucuuuugcucucag

SEQ ID NO: 94808 - RNA, 32 nt, Homo Sapiens
ccuacauagaagacuuuuuuuauuuuaaccaa

SEQ ID NO: 94809 - RNA, 32 nt, Homo Sapiens
ggcagauguuuguagaacagauccguguaaaa

SEQ ID NO: 94810 - RNA, 32 nt, Homo Sapiens
gccgucccgcugccgccgccaagcccggagug

SEQ ID NO: 94811 - RNA, 32 nt, Homo Sapiens
augucuaugcgggccuggcucgaggcgagaac

SEQ ID NO: 94812 - RNA, 32 nt, Homo Sapiens
gggaaacauggacccuuuuggcccugcaggga

SEQ ID NO: 94813 - RNA, 32 nt, Homo Sapiens
cuuauuuuauaaauaaugugauguaaauguaa

SEQ ID NO: 94814 - RNA, 32 nt, Homo Sapiens
cgccuccgcccggugguucucgggcgaaggga

SEQ ID NO: 94815 - RNA, 32 nt, Homo Sapiens
gaacauacauguaaaaagccagcaaacuaucu

SEQ ID NO: 94816 - RNA, 30 nt, Homo Sapiens
gcucuucuggacugcacacuuccaccauag

SEQ ID NO: 94817 - RNA, 32 nt, Homo Sapiens
gaggccucauaauguuuguagaucagaaaagg

SEQ ID NO: 94818 - RNA, 32 nt, Homo Sapiens
gaaacauggcaaaacccgucuuuaugugccug

SEQ ID NO: 94819 - RNA, 32 nt, Homo Sapiens
gagcgguucccugagcgccgcggccgcagagc

SEQ ID NO: 94820 - RNA, 32 nt, Homo Sapiens
ggaugaagaaggaaacccacagaggcccaggg

SEQ ID NO: 94821 - RNA, 32 nt, Homo Sapiens
gcugugagcuccuggggguggggguggcgccu

SEQ ID NO: 94822 - RNA, 32 nt, Homo Sapiens
gauuuuaagagucagacaaauggcucuguguu

SEQ ID NO: 94823 - RNA, 32 nt, Homo Sapiens
ccuucauauuaauauuugauaaagauuuuaau

SEQ ID NO: 94824 - RNA, 32 nt, Homo Sapiens
ugucuagccaaguuuugagauaucacaaagcu

SEQ ID NO: 94825 - RNA, 32 nt, Homo Sapiens
cuggaccaccccagcccucccacuacaccagg

SEQ ID NO: 94826 - RNA, 32 nt, Homo Sapiens
caagacaggugacaccagcacuuuaaauucuu

SEQ ID NO: 94827 - RNA, 32 nt, Homo Sapiens
gugacugaauaugggacaaagcauuauggucu

SEQ ID NO: 94828 - RNA, 32 nt, Homo Sapiens
cccuucccuacgcuuuucccugccuaggccuc

SEQ ID NO: 94829 - RNA, 32 nt, Homo Sapiens
ucuauaaaaauacaagguuaaaacuuuaaaug

SEQ ID NO: 94830 - RNA, 29 nt, Homo Sapiens
auguauguauguaugaguuauagcaaaau

SEQ ID NO: 94831 - RNA, 32 nt, Homo Sapiens
ugcacaaucugugucuugaccugggcaucugu

SEQ ID NO: 94832 - RNA, 32 nt, Homo Sapiens
uugcggaggggagaggcagacguguccugcag

SEQ ID NO: 94833 - RNA, 32 nt, Homo Sapiens
uccggggagcggggccuucguuccagaggacg

SEQ ID NO: 94834 - RNA, 32 nt, Homo Sapiens
cugaauuucugaauuucuuuuauaauuagaau

SEQ ID NO: 94835 - RNA, 32 nt, Homo Sapiens
caauggccugcacuuguacaguuuggguguuu

SEQ ID NO: 94836 - RNA, 32 nt, Homo Sapiens
aauaaauuuaagaaaaauaccuguaugagcag

SEQ ID NO: 94837 - RNA, 32 nt, Homo Sapiens
ucccaucccacugcucccccaacacaaacccc

SEQ ID NO: 94838 - RNA, 32 nt, Homo Sapiens
cuauuuguuguccuaacccagaagcagcucug

SEQ ID NO: 94839 - RNA, 32 nt, Homo Sapiens
ugaaaauuagaagccggauccuggaauacaca

SEQ ID NO: 94840 - RNA, 32 nt, Homo Sapiens
cccaagcaggacccggggguuccagccccuag

SEQ ID NO: 94841 - RNA, 32 nt, Homo Sapiens
aagucagugauuuuagacugaccuccauuuaa

SEQ ID NO: 94842 - RNA, 32 nt, Homo Sapiens
agccgccggagcccgccgcccgggacauggcc

SEQ ID NO: 94843 - RNA, 32 nt, Homo Sapiens
guccuuugcccauuuuuaaauugguuguuugu

SEQ ID NO: 94844 - RNA, 32 nt, Homo Sapiens
uugcauuugaguuuuggaggaccauguggccu

SEQ ID NO: 94845 - RNA, 31 nt, Homo Sapiens
auccccucccaggguccaccaagggcuccug

SEQ ID NO: 94846 - RNA, 32 nt, Homo Sapiens
cugccuuggagcuggugaaucuguggaccaca

SEQ ID NO: 94847 - RNA, 32 nt, Homo Sapiens
gcucugcaggauguggccauccugucaccagg

SEQ ID NO: 94848 - RNA, 32 nt, Homo Sapiens
gagacuccguacuacuggauguuuuaauauca

SEQ ID NO: 94849 - RNA, 32 nt, Homo Sapiens
caggggaccauaggucccgucauguacucagu

SEQ ID NO: 94850 - RNA, 32 nt, Homo Sapiens
aaaacaacuuggauaauguguaacagccagcc

SEQ ID NO: 94851 - RNA, 32 nt, Homo Sapiens
aauuugguggguaggggaccagugaguuggga

SEQ ID NO: 94852 - RNA, 32 nt, Homo Sapiens
gccauuaucagugaaagaaaaaguccacauuu

SEQ ID NO: 94853 - RNA, 32 nt, Homo Sapiens
cgccaguagagccccucucaccaccugcccuc

SEQ ID NO: 94854 - RNA, 32 nt, Homo Sapiens
aauaaaaugucacuaccucucaucuuaugaac

SEQ ID NO: 94855 - RNA, 32 nt, Homo Sapiens
auggagggggagaguacgucggcggugcucuc

SEQ ID NO: 94856 - RNA, 31 nt, Homo Sapiens
ucuaggaaauaaaauuccucgguguauuaau

SEQ ID NO: 94857 - RNA, 32 nt, Homo Sapiens
cugccgccccgcgaccccgaccgccagcauga

SEQ ID NO: 94858 - RNA, 32 nt, Homo Sapiens
ugcuauuccucgcgccucgguugcgguucugu

SEQ ID NO: 94859 - RNA, 32 nt, Homo Sapiens
cgggggcugcagcagccaagcgcaugagaggu

SEQ ID NO: 94860 - RNA, 32 nt, Homo Sapiens
cagauugacaacaaagacaguuucagaaaaug

SEQ ID NO: 94861 - RNA, 32 nt, Homo Sapiens
cugccucacacgcucugcgcugccauccucga

SEQ ID NO: 94862 - RNA, 32 nt, Homo Sapiens
gggucuuccgagcagcccccagcccuccccuc

SEQ ID NO: 94863 - RNA, 32 nt, Homo Sapiens
cucugauguggggggcugcugcucugaccauu

SEQ ID NO: 94864 - RNA, 32 nt, Homo Sapiens
agcauggccuaaucuuaacuaauuacauuugc

SEQ ID NO: 94865 - RNA, 32 nt, Homo Sapiens
gaccagagggagaagcccgaugccccaucccg

SEQ ID NO: 94866 - RNA, 32 nt, Homo Sapiens
aacacaccgacguguagguccuggccaggcuu

SEQ ID NO: 94867 - RNA, 32 nt, Homo Sapiens
aaucuggaagauugugucaauaugcacuagcc

SEQ ID NO: 94868 - RNA, 32 nt, Homo Sapiens
agccuuuucucucaaagcguuuauugagaaac

SEQ ID NO: 94869 - RNA, 32 nt, Homo Sapiens
uuuucugucuccugggggguuugaggcugggc

SEQ ID NO: 94870 - RNA, 32 nt, Homo Sapiens
cgugcugacaacagugucuuuggccuguaccg

SEQ ID NO: 94871 - RNA, 32 nt, Homo Sapiens
uaacgcagcacuuagacacgugcuguuccacc

SEQ ID NO: 94872 - RNA, 32 nt, Homo Sapiens
uucucuucacgguggaaaacacagauccagag

SEQ ID NO: 94873 - RNA, 32 nt, Homo Sapiens
uuaaauaaaaauuaucuaguaaggaauuucuu

SEQ ID NO: 94874 - RNA, 27 nt, Homo Sapiens
uauucucauagauucuggugcugaucc

SEQ ID NO: 94875 - RNA, 32 nt, Homo Sapiens
aaaauggcaccuaagcaucagauggaagcuua

SEQ ID NO: 94876 - RNA, 32 nt, Homo Sapiens
gaagagauugagagcauugaccaggaaauaaa

SEQ ID NO: 94877 - RNA, 32 nt, Homo Sapiens
uucuucuggugcuggggugcagcaggcucugu

SEQ ID NO: 94878 - RNA, 32 nt, Homo Sapiens
uccuugaauguuggaaucuaacuuuuuauauu

SEQ ID NO: 94879 - RNA, 28 nt, Homo Sapiens
ggaggggggcggccgaaaggggggcggu

SEQ ID NO: 94880 - RNA, 32 nt, Homo Sapiens
ccgaggcuuacuguaguagaaacuuuaguuuu

SEQ ID NO: 94881 - RNA, 32 nt, Homo Sapiens
gcgaaauggaggggcgggugacggggagcggc

SEQ ID NO: 94882 - RNA, 32 nt, Homo Sapiens
gguggggaaauaguucuggugccuuaacgcau

SEQ ID NO: 94883 - RNA, 32 nt, Homo Sapiens
ucccucugggacagucaccgcugggguccugg

SEQ ID NO: 94884 - RNA, 32 nt, Homo Sapiens
uagaaguauccuccauagaaacaucaacauga

SEQ ID NO: 94885 - RNA, 32 nt, Homo Sapiens
uggauuuguauuuuguuauuaagggggaaaau

SEQ ID NO: 94886 - RNA, 32 nt, Homo Sapiens
gcauuccauuuuccuagugccacaugugaaau

SEQ ID NO: 94887 - RNA, 32 nt, Homo Sapiens
ugcuguggucugaucuuaagggucuauauauu

SEQ ID NO: 94888 - RNA, 32 nt, Homo Sapiens
acaaagauauuuaugauacauguaugacuugu

SEQ ID NO: 94889 - RNA, 32 nt, Homo Sapiens
cccagguacacacaggccauggcagacacccc

SEQ ID NO: 94890 - RNA, 32 nt, Homo Sapiens
uuuccgccuggacggggcgcgcgcggccuuag

SEQ ID NO: 94891 - RNA, 32 nt, Homo Sapiens
uuucagcagccccgucaaccgcugcuccgucc

SEQ ID NO: 94892 - RNA, 32 nt, Homo Sapiens
agaaauguauuguuaaacuuuucuaagacagu

SEQ ID NO: 94893 - RNA, 32 nt, Homo Sapiens
ccuccgagauccuggggcugcaggaagccauc

SEQ ID NO: 94894 - RNA, 32 nt, Homo Sapiens
uaggccuucuuauuguccuccuccuccuggcu

SEQ ID NO: 94895 - RNA, 32 nt, Homo Sapiens
gggaaggcauuugagccauuuugggguguaua

SEQ ID NO: 94896 - RNA, 32 nt, Homo Sapiens
cugugaaaauauuucuuugaaaacuuugcaag

SEQ ID NO: 94897 - RNA, 32 nt, Homo Sapiens
agaucggcaggagguacgcccgggccgcgccc

SEQ ID NO: 94898 - RNA, 32 nt, Homo Sapiens
uucuccugcuaacuuuuuuucuuaagcuuucu

SEQ ID NO: 94899 - RNA, 27 nt, Homo Sapiens
gagucuuucuucuucaaaccuuugugu

SEQ ID NO: 94900 - RNA, 32 nt, Homo Sapiens
cguuagagaaagagaagaagagaaagaggaag

SEQ ID NO: 94901 - RNA, 32 nt, Homo Sapiens
acagaacuaauaggauauauguacauaugaaa

SEQ ID NO: 94902 - RNA, 30 nt, Homo Sapiens
uucccagagaagcucauuuaguuagaaaau

SEQ ID NO: 94903 - RNA, 32 nt, Homo Sapiens
guggcaaagcuaccuggaauggauuugugugc

SEQ ID NO: 94904 - RNA, 32 nt, Homo Sapiens
agaaggcaccagacagugaacucuguggucac

SEQ ID NO: 94905 - RNA, 32 nt, Homo Sapiens
gacggaagcucucacauccuccaaaugcuguc

SEQ ID NO: 94906 - RNA, 32 nt, Homo Sapiens
guccuuuggggauaaauaaguuagagcauauc

SEQ ID NO: 94907 - RNA, 32 nt, Homo Sapiens
acuuuagaacagaggauuguauugcaagacaa

SEQ ID NO: 94908 - RNA, 32 nt, Homo Sapiens
gggacuggagaggagugaguggcgggcugggc

SEQ ID NO: 94909 - RNA, 32 nt, Homo Sapiens
uggaguagcugggauuacagaugggaccaccu

SEQ ID NO: 94910 - RNA, 32 nt, Homo Sapiens
caccaggguauuaaaauacagagggaguaugg

SEQ ID NO: 94911 - RNA, 32 nt, Homo Sapiens
cacaacuccaugagucagggccgagccagccc

SEQ ID NO: 94912 - RNA, 32 nt, Homo Sapiens
cccaaccagaagcucacaaaaacuagcagccu

SEQ ID NO: 94913 - RNA, 32 nt, Homo Sapiens
gaugagaagauggcagcgcggcugcuugcacc

SEQ ID NO: 94914 - RNA, 32 nt, Homo Sapiens
aucguguagacugccgggagggcggcgggaaa

SEQ ID NO: 94915 - RNA, 32 nt, Homo Sapiens
gcgcaccgagccgggcgggcggaggggcgguu

SEQ ID NO: 94916 - RNA, 32 nt, Homo Sapiens
aagaaugaucauguuuaaagcuaacauagcca

SEQ ID NO: 94917 - RNA, 32 nt, Homo Sapiens
gccgccgccccuccccugccccguugguguga

SEQ ID NO: 94918 - RNA, 32 nt, Homo Sapiens
caggguuguguucagugcaucauuccuauuac

SEQ ID NO: 94919 - RNA, 32 nt, Homo Sapiens
cgcagcaggagcgaguggggccgcccgccggg

SEQ ID NO: 94920 - RNA, 32 nt, Homo Sapiens
uggggcagagggucgcggcggcugggaacgcc

SEQ ID NO: 94921 - RNA, 32 nt, Homo Sapiens
auucuaaaauuaacacacauuauuauagcuag

SEQ ID NO: 94922 - RNA, 31 nt, Homo Sapiens
gacuggagggcgguggacggcuacucagcgg

SEQ ID NO: 94923 - RNA, 32 nt, Homo Sapiens
ggccaggcgcgguggcuucuguaaucccagga

SEQ ID NO: 94924 - RNA, 32 nt, Homo Sapiens
ccaacagguucaaagcauacuuuucaugauuu

SEQ ID NO: 94925 - RNA, 32 nt, Homo Sapiens
cucuuuucaaagcugcauaucucucauauuug

SEQ ID NO: 94926 - RNA, 32 nt, Homo Sapiens
caaaugggggaagaggugaggcuaggggagug

SEQ ID NO: 94927 - RNA, 32 nt, Homo Sapiens
gcacucucguguucuccucacucugugcacuu

SEQ ID NO: 94928 - RNA, 32 nt, Homo Sapiens
augcuauguauggguauguaaauaucagugcu

SEQ ID NO: 94929 - RNA, 32 nt, Homo Sapiens
augccaccaaaggagacauaucacugcugcug

SEQ ID NO: 94930 - RNA, 32 nt, Homo Sapiens
cuuucagauguuugacaaagagguaccaggca

SEQ ID NO: 94931 - RNA, 29 nt, Homo Sapiens
cauuuguaaaguuucuuuuuguuuuaucu

SEQ ID NO: 94932 - RNA, 32 nt, Homo Sapiens
aaaaauggcggcgacgcggcggcugcggggac

SEQ ID NO: 94933 - RNA, 32 nt, Homo Sapiens
cugggaacaacccccaaaugcccuugggagga

SEQ ID NO: 94934 - RNA, 32 nt, Homo Sapiens
gggaaauaaaacaaaacauuauuuguaaaagg

SEQ ID NO: 94935 - RNA, 32 nt, Homo Sapiens
ucaggaguguaaaauccuagggagagaaagua

SEQ ID NO: 94936 - RNA, 32 nt, Homo Sapiens
ugcagggaaggaugaugccagccccggauccg

SEQ ID NO: 94937 - RNA, 32 nt, Homo Sapiens
ugccucacugucugcuggucaguucuggguuc

SEQ ID NO: 94938 - RNA, 32 nt, Homo Sapiens
acuuauccccuggcagaggggaugccaggacc

SEQ ID NO: 94939 - RNA, 32 nt, Homo Sapiens
ugaugcagacugccguccacuagaggcuggac

SEQ ID NO: 94940 - RNA, 31 nt, Homo Sapiens
uuucuuuuguaauaaacuauuuuuguaccau

SEQ ID NO: 94941 - RNA, 31 nt, Homo Sapiens
gaaucucuucccucagcucaauacagacaac

SEQ ID NO: 94942 - RNA, 32 nt, Homo Sapiens
caccgaaggcggcgacaccugauucagcgcac

SEQ ID NO: 94943 - RNA, 32 nt, Homo Sapiens
aguguggccugaguugaauuucugggaggaug

SEQ ID NO: 94944 - RNA, 32 nt, Homo Sapiens
gaagcuccuccuccccgccuauauauaaaggg

SEQ ID NO: 94945 - RNA, 27 nt, Homo Sapiens
uguagcuccacauucugguguaguuua

SEQ ID NO: 94946 - RNA, 32 nt, Homo Sapiens
aguaaaaaaugguguuuuaucuucuauauaau

SEQ ID NO: 94947 - RNA, 32 nt, Homo Sapiens
ccaucccgucuucuccaacaccaccucuccag

SEQ ID NO: 94948 - RNA, 32 nt, Homo Sapiens
ccuggcguccgccuccucccuccccuugaggc

SEQ ID NO: 94949 - RNA, 32 nt, Homo Sapiens
cggcagcgccgacagcccuucccucgccagug

SEQ ID NO: 94950 - RNA, 32 nt, Homo Sapiens
acacuacaacucccacggggcagcgggcgcgg

SEQ ID NO: 94951 - RNA, 32 nt, Homo Sapiens
uaagcaucaucugauuugauauucccuaaaaa

SEQ ID NO: 94952 - RNA, 32 nt, Homo Sapiens
guuuccaaaaucaaagauuugaccuuaagagg

SEQ ID NO: 94953 - RNA, 32 nt, Homo Sapiens
cuaguugcugguuuucguuuaaugauuuuagu

SEQ ID NO: 94954 - RNA, 32 nt, Homo Sapiens
ucuuugggaggaauaaugccggcgucuuccgg

SEQ ID NO: 94955 - RNA, 32 nt, Homo Sapiens
ggcccuuguaaguuagcuguacagcagaaguu

SEQ ID NO: 94956 - RNA, 32 nt, Homo Sapiens
cugagaaagguggucaggcccuucuaaaugcu

SEQ ID NO: 94957 - RNA, 32 nt, Homo Sapiens
gcuuucccucuuacccagaaaucuaaggaucu

SEQ ID NO: 94958 - RNA, 32 nt, Homo Sapiens
ucccagugugccaaaaugaacugcucucagcu

SEQ ID NO: 94959 - RNA, 32 nt, Homo Sapiens
uuuccauuguucagcucugugcuuucuuggau

SEQ ID NO: 94960 - RNA, 32 nt, Homo Sapiens
gucuccgccaggcgacaagagcucggugcuga

SEQ ID NO: 94961 - RNA, 32 nt, Homo Sapiens
aaauuuguacuauuagcaagaaucauuuugug

SEQ ID NO: 94962 - RNA, 30 nt, Homo Sapiens
uguuagugaaaccacuacaagguguuucag

SEQ ID NO: 94963 - RNA, 32 nt, Homo Sapiens
gauuucucacuuuuauuuauuuuuuuuuuuga

SEQ ID NO: 94964 - RNA, 32 nt, Homo Sapiens
cacccccagacacguacugcaaugcaagucac

SEQ ID NO: 94965 - RNA, 32 nt, Homo Sapiens
aauaacuucggacuugcagaaaaguuaaaaga

SEQ ID NO: 94966 - RNA, 32 nt, Homo Sapiens
uuaauuuuuacuacacuuuggcuugggagagg

SEQ ID NO: 94967 - RNA, 32 nt, Homo Sapiens
aauguuuuucuuuucuuuuaaaaaauuuguag

SEQ ID NO: 94968 - RNA, 32 nt, Homo Sapiens
uggugccgucuuccauuccugucucacuaugu

SEQ ID NO: 94969 - RNA, 32 nt, Homo Sapiens
gagagcgucugaagcgcgagccaggcgcaguu

SEQ ID NO: 94970 - RNA, 32 nt, Homo Sapiens
aucacagccaucucugggauuugaaauaucca

SEQ ID NO: 94971 - RNA, 32 nt, Homo Sapiens
cgacccccgugccugcccuggcuggauccuag

SEQ ID NO: 94972 - RNA, 32 nt, Homo Sapiens
gcagugcggggugcccaggcagacggguucag

SEQ ID NO: 94973 - RNA, 32 nt, Homo Sapiens
uuauuaaaaaauuuguauaagccacuugucuu

SEQ ID NO: 94974 - RNA, 32 nt, Homo Sapiens
aagagcacccucacagaaacacccagaauaau

SEQ ID NO: 94975 - RNA, 32 nt, Homo Sapiens
guuuccaccuggauguuugagguuguguagau

SEQ ID NO: 94976 - RNA, 32 nt, Homo Sapiens
guaaaguuuuauacagaagagagaagagcaug

SEQ ID NO: 94977 - RNA, 32 nt, Homo Sapiens
aaaaguugagcgucguuuuucuuagugugaca

SEQ ID NO: 94978 - RNA, 32 nt, Homo Sapiens
cuggaaggccccaggaguggcaccuuagugug

SEQ ID NO: 94979 - RNA, 32 nt, Homo Sapiens
ugauuucuuaaaguuauuaaacuuguacauau

SEQ ID NO: 94980 - RNA, 29 nt, Homo Sapiens
gaagauggcgcccucgggcccgggcagca

SEQ ID NO: 94981 - RNA, 32 nt, Homo Sapiens
agccugaccaaccuggagaaaccccgucucua

SEQ ID NO: 94982 - RNA, 32 nt, Homo Sapiens
ggagccgcggggcugugcucggcggccaaggg

SEQ ID NO: 94983 - RNA, 32 nt, Homo Sapiens
gagccuuugcccagcccaguccucucugccuc

SEQ ID NO: 94984 - RNA, 32 nt, Homo Sapiens
cugugguagccccagcaguucucagggugcug

SEQ ID NO: 94985 - RNA, 32 nt, Homo Sapiens
ccgaauggagggcaugaggaugaccuuugaca

SEQ ID NO: 94986 - RNA, 32 nt, Homo Sapiens
gaaggauggugacugcgccauggccuggaucu

SEQ ID NO: 94987 - RNA, 32 nt, Homo Sapiens
aggcaggacugggaucgaggcccagaaaacgg

SEQ ID NO: 94988 - RNA, 32 nt, Homo Sapiens
ggaaggagagcgucguuaauuuauuucuuauu

SEQ ID NO: 94989 - RNA, 32 nt, Homo Sapiens
ugccacccugaacauuuuucucaguucccugg

SEQ ID NO: 94990 - RNA, 32 nt, Homo Sapiens
cagagcugccggccgacaccggacagagacga

SEQ ID NO: 94991 - RNA, 32 nt, Homo Sapiens
uggaaccgcgaggcggagccaagccccugcac

SEQ ID NO: 94992 - RNA, 32 nt, Homo Sapiens
cucucccgcacgcgcgcaucccuccaccuucc

SEQ ID NO: 94993 - RNA, 32 nt, Homo Sapiens
uguggggaauccacgugguugacguuagaacc

SEQ ID NO: 94994 - RNA, 32 nt, Homo Sapiens
uccacacaaugguguucgcauuuuggaagguc

SEQ ID NO: 94995 - RNA, 32 nt, Homo Sapiens
auuauaaauguuuggaaagguucuaaggggac

SEQ ID NO: 94996 - RNA, 32 nt, Homo Sapiens
guguaugugaaaagggaauuguaaauggacug

SEQ ID NO: 94997 - RNA, 32 nt, Homo Sapiens
uuauuuuguuucugguuuuuuauauugaggua

SEQ ID NO: 94998 - RNA, 32 nt, Homo Sapiens
agaaguagcuaauuucuuuucucaaaagagug

SEQ ID NO: 94999 - RNA, 32 nt, Homo Sapiens
uucuugcccccggggagcugguguggacagag

SEQ ID NO: 95000 - RNA, 32 nt, Homo Sapiens
gcggcucaggguggcgcggcugcugcucacug

SEQ ID NO: 95001 - RNA, 32 nt, Homo Sapiens
ggacuugccagcucagcccguuaggaugaggg

SEQ ID NO: 95002 - RNA, 32 nt, Homo Sapiens
ucacuucuuugucagagaauaguucuuguuca

SEQ ID NO: 95003 - RNA, 32 nt, Homo Sapiens
cuucaccccuccccagcuucccaaacuucugu

SEQ ID NO: 95004 - RNA, 32 nt, Homo Sapiens
uaacaucguaagucaguugggaggcaaguaaa

SEQ ID NO: 95005 - RNA, 32 nt, Homo Sapiens
gaacgcagacugcaggggccgcgccuggcuca

SEQ ID NO: 95006 - RNA, 32 nt, Homo Sapiens
auuuauuaaaaauucuauugugaucuaaagca

SEQ ID NO: 95007 - RNA, 32 nt, Homo Sapiens
guccugagcugguuaaaaggaacacugguugc

SEQ ID NO: 95008 - RNA, 32 nt, Homo Sapiens
gugcuccucccucuccugaaccucuacccuca

SEQ ID NO: 95009 - RNA, 32 nt, Homo Sapiens
cagaucaugaggcucuuucucuagguuuaauu

SEQ ID NO: 95010 - RNA, 32 nt, Homo Sapiens
auuacguaggauuaauacagaaauuuaaucau

SEQ ID NO: 95011 - RNA, 32 nt, Homo Sapiens
ugcuauagucuaacuucuuguuugcugaguaa

SEQ ID NO: 95012 - RNA, 32 nt, Homo Sapiens
uacuuguggacacagcucuucuccaggcugua

SEQ ID NO: 95013 - RNA, 32 nt, Homo Sapiens
cuggaggcggcgggauggaggcggcggccgag

SEQ ID NO: 95014 - RNA, 32 nt, Homo Sapiens
accacccuccgccaucagccugccugggccag

SEQ ID NO: 95015 - RNA, 32 nt, Homo Sapiens
gggacaggccccagcgcuugcagcccgcuccc

SEQ ID NO: 95016 - RNA, 32 nt, Homo Sapiens
agcagcgcccgcgccucgccgugcggaggagc

SEQ ID NO: 95017 - RNA, 32 nt, Homo Sapiens
uggaggacccgcugcuccugcugcucccgggg

SEQ ID NO: 95018 - RNA, 32 nt, Homo Sapiens
cauccuuccuucccagcccuuguggcucuguc

SEQ ID NO: 95019 - RNA, 32 nt, Homo Sapiens
cugaggaacaaaugaaggucauccgggagaga

SEQ ID NO: 95020 - RNA, 32 nt, Homo Sapiens
gggagagauuuccauccugguucagauaaagu

SEQ ID NO: 95021 - RNA, 30 nt, Homo Sapiens
cccugggacgaggcugcagaagcucucccu

SEQ ID NO: 95022 - RNA, 32 nt, Homo Sapiens
uacuccacaauuuacauguauauuacagccau

SEQ ID NO: 95023 - RNA, 32 nt, Homo Sapiens
cucagcucacugcagccuccacuuccuggguu

SEQ ID NO: 95024 - RNA, 32 nt, Homo Sapiens
gggaggcccgcggcgguggagccgagcgggga

SEQ ID NO: 95025 - RNA, 32 nt, Homo Sapiens
uugcagcggggacuucggcggcggcgccucag

SEQ ID NO: 95026 - RNA, 31 nt, Homo Sapiens
uuucuacaggagguuuugacggcuggaugcu

SEQ ID NO: 95027 - RNA, 32 nt, Homo Sapiens
gagaguuaauauauuuguuuuauuuauuugcu

SEQ ID NO: 95028 - RNA, 31 nt, Homo Sapiens
cuugcuaugaaaaggggcagagccugccauc

SEQ ID NO: 95029 - RNA, 32 nt, Homo Sapiens
ccaccgagcaugggccuauauuugaagccuua

SEQ ID NO: 95030 - RNA, 32 nt, Homo Sapiens
gcuuaugaaugcagugaaugcgggaaagccuu

SEQ ID NO: 95031 - RNA, 32 nt, Homo Sapiens
cuauaacuuuuguacuuaguauauguuuuaua

SEQ ID NO: 95032 - RNA, 32 nt, Homo Sapiens
cuuuuucaacucuacagcauuccuuuccuuga

SEQ ID NO: 95033 - RNA, 32 nt, Homo Sapiens
ccgcgagcggccuggacugucggagacccgcg

SEQ ID NO: 95034 - RNA, 32 nt, Homo Sapiens
gacuuaagaugaucccaucaccagagagguuu

SEQ ID NO: 95035 - RNA, 32 nt, Homo Sapiens
acuuugcacacagccccaggcuccacacagaa

SEQ ID NO: 95036 - RNA, 32 nt, Homo Sapiens
cacaucuuuggccacuauuugcuugugaaaag

SEQ ID NO: 95037 - RNA, 32 nt, Homo Sapiens
cagaauucacaaaauuuccacaaaaucugucc

SEQ ID NO: 95038 - RNA, 28 nt, Homo Sapiens
uaagaagcagugaccaggauguggauuu

SEQ ID NO: 95039 - RNA, 32 nt, Homo Sapiens
uagcucacaauacaauaaaucuguagauucug

SEQ ID NO: 95040 - RNA, 32 nt, Homo Sapiens
aaguuugcuuugcaaaccaucugccuugcccc

SEQ ID NO: 95041 - RNA, 32 nt, Homo Sapiens
guccuuccugaacaugucacuccacagcagag

SEQ ID NO: 95042 - RNA, 32 nt, Homo Sapiens
uggcugcaauccagccagagacaggcgcaggu

SEQ ID NO: 95043 - RNA, 32 nt, Homo Sapiens
gcaguaggggcaggcugcuuucuuaucccauu

SEQ ID NO: 95044 - RNA, 32 nt, Homo Sapiens
gaccaaagcaaccuauuuaaugaggacaaaug

SEQ ID NO: 95045 - RNA, 32 nt, Homo Sapiens
ccuaaauuugugaaguuuauaguucuauuguc

SEQ ID NO: 95046 - RNA, 32 nt, Homo Sapiens
guauaaugcacaauaaaacuguaccaaaugac

SEQ ID NO: 95047 - RNA, 32 nt, Homo Sapiens
uuaaaaauuaggaugcuaguugcauucugaau

SEQ ID NO: 95048 - RNA, 32 nt, Homo Sapiens
aaauggaagaagcacaucaagacuguucuccu

SEQ ID NO: 95049 - RNA, 32 nt, Homo Sapiens
uacgacauuuugcaugauguguccugugcacu

SEQ ID NO: 95050 - RNA, 32 nt, Homo Sapiens
auugaaucucuuaaauuuaguguauguaaaca

SEQ ID NO: 95051 - RNA, 32 nt, Homo Sapiens
gagcuuaguuugcgguuuccuggacguggaaa

SEQ ID NO: 95052 - RNA, 32 nt, Homo Sapiens
uagcugaaagagcaagaguacacaucaacaaa

SEQ ID NO: 95053 - RNA, 32 nt, Homo Sapiens
ucaaaggagauaacagaaaaacaaggaguacu

SEQ ID NO: 95054 - RNA, 32 nt, Homo Sapiens
uuacucauguaacagucuuucauuaaccuaua

SEQ ID NO: 95055 - RNA, 32 nt, Homo Sapiens
aggauucuauagaauauucuauacuuuccaua

SEQ ID NO: 95056 - RNA, 32 nt, Homo Sapiens
gcugagucagcuugcaucugcuccuucggucg

SEQ ID NO: 95057 - RNA, 32 nt, Homo Sapiens
uaauuacuguuuucuuuuuugucaguguaaag

SEQ ID NO: 95058 - RNA, 32 nt, Homo Sapiens
gaaucccugggcaaagauuuccucacuggugu

SEQ ID NO: 95059 - RNA, 32 nt, Homo Sapiens
aaguaaaaacaaacagguacaguguuuuuuac

SEQ ID NO: 95060 - RNA, 32 nt, Homo Sapiens
ccgccaggacgggccacgugggcccccagccu

SEQ ID NO: 95061 - RNA, 32 nt, Homo Sapiens
aauuuugcacuaguggaauaacuuaaggugga

SEQ ID NO: 95062 - RNA, 32 nt, Homo Sapiens
cuuugcugugugcucuguccagugucaugagg

SEQ ID NO: 95063 - RNA, 32 nt, Homo Sapiens
cacuuccgcucucaggccuccuccuccaucac

SEQ ID NO: 95064 - RNA, 32 nt, Homo Sapiens
cagucugccugccucggggacacuagugacag

SEQ ID NO: 95065 - RNA, 32 nt, Homo Sapiens
gcagcgccugagagggcggugggguggcgggg

SEQ ID NO: 95066 - RNA, 32 nt, Homo Sapiens
gcuggcauugaaaggacaaaacauuauacuag

SEQ ID NO: 95067 - RNA, 32 nt, Homo Sapiens
ugcccagggcccacccagaugccucugggguu

SEQ ID NO: 95068 - RNA, 32 nt, Homo Sapiens
cugaaugaacauaauaauaaguuguaaaauau

SEQ ID NO: 95069 - RNA, 32 nt, Homo Sapiens
ccgcaguguuugugucccuggguacuugagau

SEQ ID NO: 95070 - RNA, 32 nt, Homo Sapiens
aauaguauagaagucuggcaaaaacagaaaca

SEQ ID NO: 95071 - RNA, 32 nt, Homo Sapiens
cagaaccaggacccaaacccgccgacucccuc

SEQ ID NO: 95072 - RNA, 32 nt, Homo Sapiens
ccgcgccuccgccccaggagcuggagccaagc

SEQ ID NO: 95073 - RNA, 32 nt, Homo Sapiens
aauacuugauagauuuauccuacuugggagaa

SEQ ID NO: 95074 - RNA, 32 nt, Homo Sapiens
ucaaaccaugguuguauaugcaguugaccgaa

SEQ ID NO: 95075 - RNA, 32 nt, Homo Sapiens
ucuuugcauuuggcucuacuuacuaacaaccc

SEQ ID NO: 95076 - RNA, 32 nt, Homo Sapiens
cagggaggaaggagaggugcugccggaggagg

SEQ ID NO: 95077 - RNA, 31 nt, Homo Sapiens
ccugggucugggcugcguccaagggcgggcu

SEQ ID NO: 95078 - RNA, 32 nt, Homo Sapiens
aacuccgcccgcgcccuuaauuuaaaucgcag

SEQ ID NO: 95079 - RNA, 32 nt, Homo Sapiens
aggcaagcaaaaacagaagcaaaucauaucaa

SEQ ID NO: 95080 - RNA, 32 nt, Homo Sapiens
uggggccgcucagggagccgggacgcgcugcc

SEQ ID NO: 95081 - RNA, 32 nt, Homo Sapiens
ccugagcccucccucuucaucccccaaggccu

SEQ ID NO: 95082 - RNA, 32 nt, Homo Sapiens
gcuccaggggccucuggugcgguuccgggaag

SEQ ID NO: 95083 - RNA, 32 nt, Homo Sapiens
agaaaagcauucaaguaugacaauauacuauc

SEQ ID NO: 95084 - RNA, 32 nt, Homo Sapiens
cuuguaaagaaaccauggguaaugauggagug

SEQ ID NO: 95085 - RNA, 32 nt, Homo Sapiens
auagaaaaaaucagaaucucugguugguggag

SEQ ID NO: 95086 - RNA, 32 nt, Homo Sapiens
acauuuuuuaccauuucaccaagauaacaggg

SEQ ID NO: 95087 - RNA, 32 nt, Homo Sapiens
ccauaaacaacccccaaagucccugcugaucc

SEQ ID NO: 95088 - RNA, 32 nt, Homo Sapiens
cuagccgccugccuggcccccgccgggacucu

SEQ ID NO: 95089 - RNA, 32 nt, Homo Sapiens
gccaggagucguggagcuccagugccuuggug

SEQ ID NO: 95090 - RNA, 32 nt, Homo Sapiens
acagagucuugaucuuuuuucaucuaggcugg

SEQ ID NO: 95091 - RNA, 32 nt, Homo Sapiens
agcgcgggcggcgccuucgggaggcgagcagg

SEQ ID NO: 95092 - RNA, 32 nt, Homo Sapiens
auauguauuguuacuuuuuuuauccugacaau

SEQ ID NO: 95093 - RNA, 32 nt, Homo Sapiens
cuucucgcgcgcgggcgguuugugugauuuug

SEQ ID NO: 95094 - RNA, 32 nt, Homo Sapiens
gggcccagcccucggagugcugccaagugccu

SEQ ID NO: 95095 - RNA, 32 nt, Homo Sapiens
uuaguggagacgggguuucaccauguuggcua

SEQ ID NO: 95096 - RNA, 32 nt, Homo Sapiens
guuguguagucuuagcuguaugcugaaauugg

SEQ ID NO: 95097 - RNA, 32 nt, Homo Sapiens
gcuugugaauguuuagugugcugcuguucugu

SEQ ID NO: 95098 - RNA, 32 nt, Homo Sapiens
gcacacgugacucauaacacacacauagacca

SEQ ID NO: 95099 - RNA, 32 nt, Homo Sapiens
cuccccgccccucccccuaaccacaagggauu

SEQ ID NO: 95100 - RNA, 32 nt, Homo Sapiens
guucgcccaguagucuuguggaugccagagac

SEQ ID NO: 95101 - RNA, 32 nt, Homo Sapiens
cccucgacccuucucucucccguauuccgagc

SEQ ID NO: 95102 - RNA, 32 nt, Homo Sapiens
gggagaggagaugggcacuguuguggugggag

SEQ ID NO: 95103 - RNA, 32 nt, Homo Sapiens
caccaaauauaaugcagacaaauuaugcuauu

SEQ ID NO: 95104 - RNA, 32 nt, Homo Sapiens
ggcuucuccgggaucuuaauucaggagguaga

SEQ ID NO: 95105 - RNA, 32 nt, Homo Sapiens
ucuccccguggcguggcauggacgguggcagc

SEQ ID NO: 95106 - RNA, 32 nt, Homo Sapiens
aaauuggucuuaaaaaugauguuaacccaaga

SEQ ID NO: 95107 - RNA, 32 nt, Homo Sapiens
ggugauacuuuuucauuaauaaauagacguau

SEQ ID NO: 95108 - RNA, 32 nt, Homo Sapiens
guacacgacaccacggacgugccacguacccg

SEQ ID NO: 95109 - RNA, 32 nt, Homo Sapiens
acaucugcauguccuaaauuuugaauuuagau

SEQ ID NO: 95110 - RNA, 32 nt, Homo Sapiens
agcaagaugcauuguucuuuucgacucugggg

SEQ ID NO: 95111 - RNA, 32 nt, Homo Sapiens
ccguucuccaagcacaggagccagguuuacca

SEQ ID NO: 95112 - RNA, 32 nt, Homo Sapiens
uuugauaaugaaaaugauuugagacacuaagc

SEQ ID NO: 95113 - RNA, 27 nt, Homo Sapiens
ccuacuccuugccucagccccacacgg

SEQ ID NO: 95114 - RNA, 32 nt, Homo Sapiens
ccgccccugggccucacucuggagcgggcugc

SEQ ID NO: 95115 - RNA, 32 nt, Homo Sapiens
aaaccuuuguaucuauagaagacugaaaacca

SEQ ID NO: 95116 - RNA, 32 nt, Homo Sapiens
uaucuauuuucagaucuguguguucugucuua

SEQ ID NO: 95117 - RNA, 30 nt, Homo Sapiens
gagacuugccaguugggggaaaauagcauu

SEQ ID NO: 95118 - RNA, 32 nt, Homo Sapiens
gugcauuuuaugggugacuuugaaagaucugu

SEQ ID NO: 95119 - RNA, 31 nt, Homo Sapiens
auuguagcaggcagccaaacauuuucaaaug

SEQ ID NO: 95120 - RNA, 28 nt, Homo Sapiens
ggagcggggcggcugccgacucccccaa

SEQ ID NO: 95121 - RNA, 32 nt, Homo Sapiens
ggugggagugggugcgcguguguguaugugag

SEQ ID NO: 95122 - RNA, 30 nt, Homo Sapiens
uuggaaugccagggaccauucccggccaaa

SEQ ID NO: 95123 - RNA, 32 nt, Homo Sapiens
auauguucacugugcagagggauuguaccuug

SEQ ID NO: 95124 - RNA, 32 nt, Homo Sapiens
ugcccgccccugggcuuuggucacccgcggga

SEQ ID NO: 95125 - RNA, 32 nt, Homo Sapiens
agccaggcgcaauggauagcaaagauguggaa

SEQ ID NO: 95126 - RNA, 32 nt, Homo Sapiens
uugccaccagcaugccugaccacaguauucac

SEQ ID NO: 95127 - RNA, 32 nt, Homo Sapiens
gcagaucaaacacauuuauggcaugcacugac

SEQ ID NO: 95128 - RNA, 32 nt, Homo Sapiens
ccuuuggccuuucuccucccaggccuccacaa

SEQ ID NO: 95129 - RNA, 32 nt, Homo Sapiens
ugguaaucauccugugaaaaauguacagagau

SEQ ID NO: 95130 - RNA, 32 nt, Homo Sapiens
cguuuuuauagggaaacuauuuauauguaaca

SEQ ID NO: 95131 - RNA, 32 nt, Homo Sapiens
ugcucauuuuugcuaggggaaauauaugaaga

SEQ ID NO: 95132 - RNA, 32 nt, Homo Sapiens
augugaacaguuuauaccaaagggcagccugu

SEQ ID NO: 95133 - RNA, 32 nt, Homo Sapiens
gcuccccaucuucuccuuacugcaucucagcc

SEQ ID NO: 95134 - RNA, 32 nt, Homo Sapiens
uaaaauuuguaucugacugaagauauguuaga

SEQ ID NO: 95135 - RNA, 32 nt, Homo Sapiens
uggaagccagaagccucaaacacacauuucug

SEQ ID NO: 95136 - RNA, 32 nt, Homo Sapiens
uaaaauaacuaaauuuaaaccaauugaaggug

SEQ ID NO: 95137 - RNA, 29 nt, Homo Sapiens
uucaucauagugacaacugugagcauucc

SEQ ID NO: 95138 - RNA, 32 nt, Homo Sapiens
cagauuuauaugcuguguaucacauaaugccu

SEQ ID NO: 95139 - RNA, 32 nt, Homo Sapiens
aaacaugaggcaaaagaaaaaauacauguuuu

SEQ ID NO: 95140 - RNA, 32 nt, Homo Sapiens
ugggcggcgguggugcggcggucgccguuaug

SEQ ID NO: 95141 - RNA, 32 nt, Homo Sapiens
guuacaaaagcaucuuuuuuguuauuuguuug

SEQ ID NO: 95142 - RNA, 32 nt, Homo Sapiens
ugagccggccgcagagccauggcgggcgggga

SEQ ID NO: 95143 - RNA, 32 nt, Homo Sapiens
ggugaagggagucugggcaagcaaagcauaga

SEQ ID NO: 95144 - RNA, 32 nt, Homo Sapiens
ugcuccccaucccacguuccacucgcccugcc

SEQ ID NO: 95145 - RNA, 32 nt, Homo Sapiens
uuauaugaacauauucuacacucuguauaacc

SEQ ID NO: 95146 - RNA, 32 nt, Homo Sapiens
cagagauccaacauguugugggaccuuguaca

SEQ ID NO: 95147 - RNA, 32 nt, Homo Sapiens
ccgggacaacaaaguccauccugccgccggcu

SEQ ID NO: 95148 - RNA, 32 nt, Homo Sapiens
aaaaucucuaagguacuugguuauccagugca

SEQ ID NO: 95149 - RNA, 32 nt, Homo Sapiens
agucgaaugcaaacagugugucauaccagagu

SEQ ID NO: 95150 - RNA, 32 nt, Homo Sapiens
ggagccgcccucaccgccgggcccguggcccu

SEQ ID NO: 95151 - RNA, 32 nt, Homo Sapiens
agaacaugaauagcaaagaaaagggagagacg

SEQ ID NO: 95152 - RNA, 32 nt, Homo Sapiens
gguguauugugauuauuugauguaccugggag

SEQ ID NO: 95153 - RNA, 32 nt, Homo Sapiens
uuuaaaauaaacgauuuuaaguuauaaaaggu

SEQ ID NO: 95154 - RNA, 32 nt, Homo Sapiens
acaaagagugacucagucucuaguucuuugau

SEQ ID NO: 95155 - RNA, 32 nt, Homo Sapiens
gccuuugcccacgcagcuuucagucauggccu

SEQ ID NO: 95156 - RNA, 32 nt, Homo Sapiens
gacuaaaauuuugccuauaccuuuaagacaaa

SEQ ID NO: 95157 - RNA, 31 nt, Homo Sapiens
accucugcaucuucgaacucagccauguggu

SEQ ID NO: 95158 - RNA, 32 nt, Homo Sapiens
caucaucugaaucaucaguauugucuauuuuu

SEQ ID NO: 95159 - RNA, 32 nt, Homo Sapiens
cucucugccgcgcgcgcagagccaaggcacug

SEQ ID NO: 95160 - RNA, 32 nt, Homo Sapiens
ggauuccaccacacccaaugcucuggagccac

SEQ ID NO: 95161 - RNA, 32 nt, Homo Sapiens
ggggaggagaguggaaacuuuuacauuuguuu

SEQ ID NO: 95162 - RNA, 32 nt, Homo Sapiens
cuggcugccucauugccaccuccaccugcagg

SEQ ID NO: 95163 - RNA, 32 nt, Homo Sapiens
gggucucuauaccccaggauccuccaugccac

SEQ ID NO: 95164 - RNA, 32 nt, Homo Sapiens
ucuguccccuccccgacaggcacucaugguac

SEQ ID NO: 95165 - RNA, 32 nt, Homo Sapiens
guugaucuauccagugacguggccuggugggc

SEQ ID NO: 95166 - RNA, 32 nt, Homo Sapiens
ggucaagcaguguuccuucucuaucaggccug

SEQ ID NO: 95167 - RNA, 28 nt, Homo Sapiens
cugcccuugugcaguguacagccugcuc

SEQ ID NO: 95168 - RNA, 32 nt, Homo Sapiens
gggagauagaagcucagauagcuuaguggauu

SEQ ID NO: 95169 - RNA, 32 nt, Homo Sapiens
agcgggcgcggggcugcgagcuagggcgggag

SEQ ID NO: 95170 - RNA, 30 nt, Homo Sapiens
caggaaaucagcuccuauucuccaguggag

SEQ ID NO: 95171 - RNA, 32 nt, Homo Sapiens
ccugccugcccuccccucccccacucuauacu

SEQ ID NO: 95172 - RNA, 32 nt, Homo Sapiens
auagauugggugauuauauucaugggugaaaa

SEQ ID NO: 95173 - RNA, 32 nt, Homo Sapiens
uuuauucguguucuguuuccgaaacacuuagc

SEQ ID NO: 95174 - RNA, 32 nt, Homo Sapiens
acuacucaaauacuacuuuuuaaaagagaccg

SEQ ID NO: 95175 - RNA, 32 nt, Homo Sapiens
uagcccaggucuuuauugaaagggaguguuga

SEQ ID NO: 95176 - RNA, 32 nt, Homo Sapiens
ucgccauaauaauguauuuauagaauuaaaca

SEQ ID NO: 95177 - RNA, 30 nt, Homo Sapiens
cuucuaucacuugccacauaauuaaaagaa

SEQ ID NO: 95178 - RNA, 32 nt, Homo Sapiens
uuuuuucuguuguugcugcuucucuaguggag

SEQ ID NO: 95179 - RNA, 32 nt, Homo Sapiens
auauggcggugggaggcccagcccaaaccccg

SEQ ID NO: 95180 - RNA, 32 nt, Homo Sapiens
caauuuuuauuaauacauuauaucuaaugacc

SEQ ID NO: 95181 - RNA, 32 nt, Homo Sapiens
ggggaagccgcccugcgguucaucucacagcg

SEQ ID NO: 95182 - RNA, 32 nt, Homo Sapiens
acuucagcauucaaauuuaugaaugacaguag

SEQ ID NO: 95183 - RNA, 32 nt, Homo Sapiens
ccucugcggcggcuccucccuccuugcaguug

SEQ ID NO: 95184 - RNA, 32 nt, Homo Sapiens
uucaaaagggagcaaugcugugaaugcagcuu

SEQ ID NO: 95185 - RNA, 32 nt, Homo Sapiens
auaauucuaaaauuauuuuuuaaaguuaaaca

SEQ ID NO: 95186 - RNA, 32 nt, Homo Sapiens
ccaaacggguguuggaguuggcggcggccaug

SEQ ID NO: 95187 - RNA, 32 nt, Homo Sapiens
auauauaacaaggccauuaaaaugucgggagc

SEQ ID NO: 95188 - RNA, 32 nt, Homo Sapiens
cagaaccaaaugcuuuuguaaaacuuuuugga

SEQ ID NO: 95189 - RNA, 32 nt, Homo Sapiens
agaacuauaagagcuuuguuucugaugggggu

SEQ ID NO: 95190 - RNA, 32 nt, Homo Sapiens
cucccucuucuuuaacccaguggccuguuggu

SEQ ID NO: 95191 - RNA, 32 nt, Homo Sapiens
aacaguguuuugcaauuugugaaacaguguau

SEQ ID NO: 95192 - RNA, 32 nt, Homo Sapiens
guuccccucucgaccuucggcuccucaggacc

SEQ ID NO: 95193 - RNA, 31 nt, Homo Sapiens
caaaauuugugcuuugcuauuguauucauuu

SEQ ID NO: 95194 - RNA, 32 nt, Homo Sapiens
accuuacaauguaacuuuuuuauuuuauuuua

SEQ ID NO: 95195 - RNA, 32 nt, Homo Sapiens
aagucaggcagaccuuggugaaucuggaagca

SEQ ID NO: 95196 - RNA, 32 nt, Homo Sapiens
gugauguaugugacaaggucuuuauucggaag

SEQ ID NO: 95197 - RNA, 32 nt, Homo Sapiens
cagugacacgggggagaugacauacaaaaagg

SEQ ID NO: 95198 - RNA, 32 nt, Homo Sapiens
uuuuuuuuuuuuucuuuuuuuuucggcggaga

SEQ ID NO: 95199 - RNA, 32 nt, Homo Sapiens
uacaccuaggaugggcauuaugcaaaagcaca

SEQ ID NO: 95200 - RNA, 32 nt, Homo Sapiens
acuucccaucagaucaccuugcuggacuugca

SEQ ID NO: 95201 - RNA, 32 nt, Homo Sapiens
gcgcggggcgggcuguuuugcauuaugugcgg

SEQ ID NO: 95202 - RNA, 32 nt, Homo Sapiens
uaucaguagccacuacucccccugccuggccc

SEQ ID NO: 95203 - RNA, 30 nt, Homo Sapiens
ugaggagccugaggcggcggcggggguggc

SEQ ID NO: 95204 - RNA, 32 nt, Homo Sapiens
ccuaaagaaaaaacaaaccaaaaacggauaug

SEQ ID NO: 95205 - RNA, 32 nt, Homo Sapiens
uuguuucaaugugacugaaacaaaauguuuuu

SEQ ID NO: 95206 - RNA, 32 nt, Homo Sapiens
gcaggggguggcccgcguggcgucgguggccu

SEQ ID NO: 95207 - RNA, 29 nt, Homo Sapiens
aaugaauaaaaauaaacuuuuuuucuuca

SEQ ID NO: 95208 - RNA, 32 nt, Homo Sapiens
cccccaaauccuauugcuuaucuuggguuaaa

SEQ ID NO: 95209 - RNA, 32 nt, Homo Sapiens
aaaaccuggcagugaccaucugccugaggauu

SEQ ID NO: 95210 - RNA, 32 nt, Homo Sapiens
uauaagugucagcugugagauuuuaauuugau

SEQ ID NO: 95211 - RNA, 32 nt, Homo Sapiens
cuccuccgucgcugcccuucacaccuuuuggu

SEQ ID NO: 95212 - RNA, 32 nt, Homo Sapiens
gauugaagucuucuaacucugucucaguuuuc

SEQ ID NO: 95213 - RNA, 32 nt, Homo Sapiens
ucugcucugaucuuugcagaucuuuaaguugu

SEQ ID NO: 95214 - RNA, 32 nt, Homo Sapiens
auccuauggugggagagugggcugggaugugc

SEQ ID NO: 95215 - RNA, 32 nt, Homo Sapiens
cagagguugacggggugacuaaugagggcaca

SEQ ID NO: 95216 - RNA, 32 nt, Homo Sapiens
aaggugccugggcuugcucauucagucacagu

SEQ ID NO: 95217 - RNA, 32 nt, Homo Sapiens
ucucuuugcugaauuaaugaguucuuaacaug

SEQ ID NO: 95218 - RNA, 32 nt, Homo Sapiens
uaaaagccaaaauauaauuauugcugccuuuc

SEQ ID NO: 95219 - RNA, 28 nt, Homo Sapiens
uuuguggugaauaccaggauugacugca

SEQ ID NO: 95220 - RNA, 32 nt, Homo Sapiens
gagagagaugguggcagccgccaggcgagcag

SEQ ID NO: 95221 - RNA, 32 nt, Homo Sapiens
cuccgggaccucccuuggguccuuccagcuca

SEQ ID NO: 95222 - RNA, 32 nt, Homo Sapiens
caggaagcggggcagcagcacagcgugggguc

SEQ ID NO: 95223 - RNA, 32 nt, Homo Sapiens
acaugaauuaacugauaauauuccaaucauuu

SEQ ID NO: 95224 - RNA, 30 nt, Homo Sapiens
aaaucagcaaggagcaugcaaaaaaaucuc

SEQ ID NO: 95225 - RNA, 31 nt, Homo Sapiens
aaggaaguggcuugaaggaugugcuaguaag

SEQ ID NO: 95226 - RNA, 32 nt, Homo Sapiens
gguuuuucuuucguaguuuugguuuuucacuc

SEQ ID NO: 95227 - RNA, 28 nt, Homo Sapiens
auuuuaaaagauguacauuugaaaauuc

SEQ ID NO: 95228 - RNA, 32 nt, Homo Sapiens
agagucauaaauaugccauuuacaauaaggag

SEQ ID NO: 95229 - RNA, 32 nt, Homo Sapiens
uuuuuaaauugucauuuaauucuuaaacuguc

SEQ ID NO: 95230 - RNA, 32 nt, Homo Sapiens
uguguucucuaaaaauguuuuauccucccuuu

SEQ ID NO: 95231 - RNA, 32 nt, Homo Sapiens
caaucaaaacaaaaggcagaauagaaugcuga

SEQ ID NO: 95232 - RNA, 32 nt, Homo Sapiens
guagugagagaaggaaacaucuguggacauug

SEQ ID NO: 95233 - RNA, 32 nt, Homo Sapiens
gacagccagacaagggcugugcucaggggcag

SEQ ID NO: 95234 - RNA, 32 nt, Homo Sapiens
guggagucgucgcaucgcuugucguguugguc

SEQ ID NO: 95235 - RNA, 32 nt, Homo Sapiens
uauaccccaccccaguacuccacagcaccuug

SEQ ID NO: 95236 - RNA, 32 nt, Homo Sapiens
agucgcccuguguugcccaggcuggucuugaa

SEQ ID NO: 95237 - RNA, 32 nt, Homo Sapiens
guucccuggucaugccauugcacaugucuccc

SEQ ID NO: 95238 - RNA, 30 nt, Homo Sapiens
acuguucuggacugcaaaucugcacacaca

SEQ ID NO: 95239 - RNA, 32 nt, Homo Sapiens
gagagaauaugaugaagagacuguucgauggg

SEQ ID NO: 95240 - RNA, 32 nt, Homo Sapiens
uaacuaaaucucuauuuguucggaugaugcuu

SEQ ID NO: 95241 - RNA, 32 nt, Homo Sapiens
gcgugguggugcaugcuuguaauccuagcuac

SEQ ID NO: 95242 - RNA, 32 nt, Homo Sapiens
gcaagaacccuaccccaccuccaauuuuuuau

SEQ ID NO: 95243 - RNA, 32 nt, Homo Sapiens
cugaaaaugcgugccugaugaccaaacucucc

SEQ ID NO: 95244 - RNA, 32 nt, Homo Sapiens
ugacuccuaagccccuuccuccuuccauucug

SEQ ID NO: 95245 - RNA, 32 nt, Homo Sapiens
ugggggugggggcaugggaggggcaggcauuc

SEQ ID NO: 95246 - RNA, 32 nt, Homo Sapiens
ucucacuauucuagcuagaauaugugaaugaa

SEQ ID NO: 95247 - RNA, 32 nt, Homo Sapiens
gucucucugcgccucccugcuuccccccuuga

SEQ ID NO: 95248 - RNA, 32 nt, Homo Sapiens
ggauggacggugaaauucuggaccucacagga

SEQ ID NO: 95249 - RNA, 32 nt, Homo Sapiens
cucuucucuggaccagaucugucccaguccug

SEQ ID NO: 95250 - RNA, 32 nt, Homo Sapiens
acagacuccugccugcccucugccgaugcugc

SEQ ID NO: 95251 - RNA, 32 nt, Homo Sapiens
ucaggcagcaggggcugcugugaugccguccu

SEQ ID NO: 95252 - RNA, 32 nt, Homo Sapiens
aaauuauugauaguucaucuggauuaccaaaa

SEQ ID NO: 95253 - RNA, 32 nt, Homo Sapiens
gccuugaucccaugggcccagcagaaggaaac

SEQ ID NO: 95254 - RNA, 32 nt, Homo Sapiens
agacacugugcuaaugugaauuuuaaaugacc

SEQ ID NO: 95255 - RNA, 32 nt, Homo Sapiens
gaccugacuuuagaaccugaccucaaggauau

SEQ ID NO: 95256 - RNA, 32 nt, Homo Sapiens
uauccucaccccacccgugccugugagugagg

SEQ ID NO: 95257 - RNA, 32 nt, Homo Sapiens
gcccugucaaggaaauuuaaaagaaaaaaaaa

SEQ ID NO: 95258 - RNA, 32 nt, Homo Sapiens
ccacacagaugucagcggcagcugcucggcag

SEQ ID NO: 95259 - RNA, 32 nt, Homo Sapiens
aucuagaaaagacaggacauaaauggcauaac

SEQ ID NO: 95260 - RNA, 32 nt, Homo Sapiens
ccuuugccuuuugcacacgcaccuggaaaaga

SEQ ID NO: 95261 - RNA, 32 nt, Homo Sapiens
ccgcgggccuccccggaccuuccccaccgccu

SEQ ID NO: 95262 - RNA, 32 nt, Homo Sapiens
ccuuuugucuccuggugauuaggccaaagucu

SEQ ID NO: 95263 - RNA, 32 nt, Homo Sapiens
gcucuguugggucuaccucaucugagguggcu

SEQ ID NO: 95264 - RNA, 32 nt, Homo Sapiens
uagcuaucaucuccugacuuaauguuuuuuaa

SEQ ID NO: 95265 - RNA, 32 nt, Homo Sapiens
gauauuaccguaaauacucaggauuggagcug

SEQ ID NO: 95266 - RNA, 32 nt, Homo Sapiens
auuuagcgccuggccggcuggaggcugcacag

SEQ ID NO: 95267 - RNA, 32 nt, Homo Sapiens
uagcauuugucaacaaagucacccacuuccca

SEQ ID NO: 95268 - RNA, 32 nt, Homo Sapiens
ucaguuuccuucccauggcugcaucuuaagau

SEQ ID NO: 95269 - RNA, 32 nt, Homo Sapiens
uuuguuugcgcgggguuggcugaggccaccag

SEQ ID NO: 95270 - RNA, 32 nt, Homo Sapiens
ccccaggcuggacuuugugugagccuguuuag

SEQ ID NO: 95271 - RNA, 32 nt, Homo Sapiens
caugaagugggccaugcucuggggcuugggca

SEQ ID NO: 95272 - RNA, 32 nt, Homo Sapiens
cccaccucagcacguggaggccucucacgguc

SEQ ID NO: 95273 - RNA, 29 nt, Homo Sapiens
aggcacugaugaagauauuuucucuggag

SEQ ID NO: 95274 - RNA, 32 nt, Homo Sapiens
gugcugucaacagagucagugcgauccgauuu

SEQ ID NO: 95275 - RNA, 32 nt, Homo Sapiens
gucuuuguugcuaucaucaucaucaucaucau

SEQ ID NO: 95276 - RNA, 32 nt, Homo Sapiens
uuuuucuugccccuuuuuguuuaguugaacgg

SEQ ID NO: 95277 - RNA, 32 nt, Homo Sapiens
aaaaugugaucuuccuuguugaugcuggagcu

SEQ ID NO: 95278 - RNA, 32 nt, Homo Sapiens
uccaucuucgguuuugcacaccccgcuuucca

SEQ ID NO: 95279 - RNA, 32 nt, Homo Sapiens
gagaacucgccgagcuccucccgggaaacccg

SEQ ID NO: 95280 - RNA, 28 nt, Homo Sapiens
aagacaagacaaauacauuugaacaguc

SEQ ID NO: 95281 - RNA, 32 nt, Homo Sapiens
cccccuccagcaccaccaccacaaaugguaug

SEQ ID NO: 95282 - RNA, 32 nt, Homo Sapiens
augguaucuugugguuuugauuugcauuucuc

SEQ ID NO: 95283 - RNA, 32 nt, Homo Sapiens
gcuugcggagccguccggcggcugggaucgag

SEQ ID NO: 95284 - RNA, 32 nt, Homo Sapiens
uuauguaauaaaaagcauuugucauaacaaaa

SEQ ID NO: 95285 - RNA, 32 nt, Homo Sapiens
ccaccucugccuuacaaaauacagggauuacu

SEQ ID NO: 95286 - RNA, 32 nt, Homo Sapiens
uauggaugagguggagagugggaagcaggagc

SEQ ID NO: 95287 - RNA, 32 nt, Homo Sapiens
uggggaaaauuuagaaacuguaaauguaaaga

SEQ ID NO: 95288 - RNA, 32 nt, Homo Sapiens
agacauucuuaugcuucuuuuacaacuacauc

SEQ ID NO: 95289 - RNA, 32 nt, Homo Sapiens
cagcccucccguccucggggccccugcagcca

SEQ ID NO: 95290 - RNA, 32 nt, Homo Sapiens
uguucauguaaugugguaaguuuaaaaaguga

SEQ ID NO: 95291 - RNA, 31 nt, Homo Sapiens
cccugcaugcugugccugccgcgugcccuuc

SEQ ID NO: 95292 - RNA, 32 nt, Homo Sapiens
uaacuucguuuuuuguggcuggaagaaaaagu

SEQ ID NO: 95293 - RNA, 32 nt, Homo Sapiens
ugaaaccaccauauuacagaaauauuuacuac

SEQ ID NO: 95294 - RNA, 32 nt, Homo Sapiens
uuaagagauuguucucacucccgccccaucuu

SEQ ID NO: 95295 - RNA, 30 nt, Homo Sapiens
uguuuccugugcaccuacaagaguguaaga

SEQ ID NO: 95296 - RNA, 32 nt, Homo Sapiens
acgcuccugugcugcugaccaacacagcugcu

SEQ ID NO: 95297 - RNA, 32 nt, Homo Sapiens
auccgguguugcauccuuggagcgagcugaga

SEQ ID NO: 95298 - RNA, 32 nt, Homo Sapiens
cugcaauauuccauccugggugucugggcugc

SEQ ID NO: 95299 - RNA, 32 nt, Homo Sapiens
cuuaucaaccucagcuuaaaaaguugaaguau

SEQ ID NO: 95300 - RNA, 32 nt, Homo Sapiens
uauaggcaggauguucaacaucaguuuacuug

SEQ ID NO: 95301 - RNA, 29 nt, Homo Sapiens
ugugagugaaguuuauucuucaacaaugu

SEQ ID NO: 95302 - RNA, 32 nt, Homo Sapiens
acaagagagucuaugaccucugacacugugcu

SEQ ID NO: 95303 - RNA, 32 nt, Homo Sapiens
ccauucuuuaaaccuuuauggggugggguguc

SEQ ID NO: 95304 - RNA, 32 nt, Homo Sapiens
aauccucuuccucuccucuguggcuuuuccug

SEQ ID NO: 95305 - RNA, 31 nt, Homo Sapiens
gugaugaaauaaacauaagauuuaucauuuu

SEQ ID NO: 95306 - RNA, 32 nt, Homo Sapiens
caagaucugagccugaguguguguacgugcgc

SEQ ID NO: 95307 - RNA, 32 nt, Homo Sapiens
acaaauuaugguaucuauuacuuuuuaaaugg

SEQ ID NO: 95308 - RNA, 32 nt, Homo Sapiens
gagaaggaggaggcagaaugucugcauuguua

SEQ ID NO: 95309 - RNA, 32 nt, Homo Sapiens
gcgcuggccaacgcuuugugggugcugcccgu

SEQ ID NO: 95310 - RNA, 32 nt, Homo Sapiens
gugcuccccagccccaggaccacuggccccuu

SEQ ID NO: 95311 - RNA, 32 nt, Homo Sapiens
cagagcccgcggcggaggucggcgcggcuccg

SEQ ID NO: 95312 - RNA, 32 nt, Homo Sapiens
uuagcguucugcagcagucccuggacaauuuu

SEQ ID NO: 95313 - RNA, 32 nt, Homo Sapiens
aaguuuacuuuuuugaaacacauguagaaaaa

SEQ ID NO: 95314 - RNA, 30 nt, Homo Sapiens
gucucagagaagcugcauucuucuagaguc

SEQ ID NO: 95315 - RNA, 32 nt, Homo Sapiens
gaacuucuuucuuuucuacuguuuaugacaac

SEQ ID NO: 95316 - RNA, 32 nt, Homo Sapiens
cagccacuucacuucuuccccccgcgcucaga

SEQ ID NO: 95317 - RNA, 32 nt, Homo Sapiens
ucagcugaaagaaacagauauuuuaaauugcc

SEQ ID NO: 95318 - RNA, 32 nt, Homo Sapiens
cgagaggcucacggacguugccuggucacugg

SEQ ID NO: 95319 - RNA, 32 nt, Homo Sapiens
agaggucaguuucucuuugguuuuccagauuu

SEQ ID NO: 95320 - RNA, 32 nt, Homo Sapiens
auguucucugaccccugguuaccuguggccug

SEQ ID NO: 95321 - RNA, 32 nt, Homo Sapiens
ucugccucuggugaugagaugguuucucucaa

SEQ ID NO: 95322 - RNA, 32 nt, Homo Sapiens
cccaggcguccggcugcuguccccugccgggg

SEQ ID NO: 95323 - RNA, 32 nt, Homo Sapiens
uccugagcugaaugcagaugaccacauucaag

SEQ ID NO: 95324 - RNA, 32 nt, Homo Sapiens
acugcuuccaaguuuaagcaugagcuccccaa

SEQ ID NO: 95325 - RNA, 32 nt, Homo Sapiens
aaugucagaaaauaccuuuuggaggguuagaa

SEQ ID NO: 95326 - RNA, 32 nt, Homo Sapiens
gccuggcgggccugggggcgcuacggugggag

SEQ ID NO: 95327 - RNA, 32 nt, Homo Sapiens
cugucuucuccccucagcaauuccugcaaagg

SEQ ID NO: 95328 - RNA, 32 nt, Homo Sapiens
uuuuucuuauuuccaaauacuugagaaauuac

SEQ ID NO: 95329 - RNA, 32 nt, Homo Sapiens
ucuacaaguuggcuucuagguuaugcuccagg

SEQ ID NO: 95330 - RNA, 32 nt, Homo Sapiens
agggagcaccauuguacagucuagcauaaaca

SEQ ID NO: 95331 - RNA, 32 nt, Homo Sapiens
cuguuccuggaacacuaaaugaggcuguugua

SEQ ID NO: 95332 - RNA, 32 nt, Homo Sapiens
gggccagcccuggcuggcauggagggugaggc

SEQ ID NO: 95333 - RNA, 32 nt, Homo Sapiens
guuugucuuuugucuuaacaguucugaaugcu

SEQ ID NO: 95334 - RNA, 32 nt, Homo Sapiens
ucucuccugcugcuccuccagcuguaucugca

SEQ ID NO: 95335 - RNA, 32 nt, Homo Sapiens
gcugaccaacugguaaaugaggcaccagccuc

SEQ ID NO: 95336 - RNA, 32 nt, Homo Sapiens
ggagaaagagcagaugaaauauuuucucagug

SEQ ID NO: 95337 - RNA, 32 nt, Homo Sapiens
aaacuucauucaugucuuuuuacaaaugagaa

SEQ ID NO: 95338 - RNA, 32 nt, Homo Sapiens
aaaauucuguuguuuaauuugguuaucuugcu

SEQ ID NO: 95339 - RNA, 32 nt, Homo Sapiens
ucauacuaugauuuagaaagugguucgauucc

SEQ ID NO: 95340 - RNA, 32 nt, Homo Sapiens
acaguauuguuaacuauagccacaguguugua

SEQ ID NO: 95341 - RNA, 32 nt, Homo Sapiens
gacucuuuuacucagcucugguauugcucaua

SEQ ID NO: 95342 - RNA, 32 nt, Homo Sapiens
agucuugguaaaaauaaauaaauguccuuuag

SEQ ID NO: 95343 - RNA, 32 nt, Homo Sapiens
gcaauuggugucauuuuuuuuaaagucaaauu

SEQ ID NO: 95344 - RNA, 32 nt, Homo Sapiens
cuuuuuguauaaauggagucucacuauguuuc

SEQ ID NO: 95345 - RNA, 32 nt, Homo Sapiens
acagguaaacacauaaaugaaagaaacccaca

SEQ ID NO: 95346 - RNA, 32 nt, Homo Sapiens
cuaaggagguagauccugggacacaugggauc

SEQ ID NO: 95347 - RNA, 29 nt, Homo Sapiens
ugagccauauguaaucacuguguuuguag

SEQ ID NO: 95348 - RNA, 32 nt, Homo Sapiens
ccgaucuggccaaugggccauuuuacaggaac

SEQ ID NO: 95349 - RNA, 32 nt, Homo Sapiens
acuguuugaaacaaaaguacagacagaacaca

SEQ ID NO: 95350 - RNA, 32 nt, Homo Sapiens
gugaaaccaggcaacagcaacaauauucuguu

SEQ ID NO: 95351 - RNA, 32 nt, Homo Sapiens
cucugcucggggccggccgccucaggcucgcc

SEQ ID NO: 95352 - RNA, 32 nt, Homo Sapiens
uauugguuagggaaacaaacuucaggucacca

SEQ ID NO: 95353 - RNA, 32 nt, Homo Sapiens
aauaguuugcuaggaagauuguuauuauucuu

SEQ ID NO: 95354 - RNA, 32 nt, Homo Sapiens
cccacuccuccuccagcccacccaaccgccuu

SEQ ID NO: 95355 - RNA, 32 nt, Homo Sapiens
aggguguucacuuuguggcuccuuccaauaag

SEQ ID NO: 95356 - RNA, 32 nt, Homo Sapiens
cucugcugcuccccgggacuccagccgcgccc

SEQ ID NO: 95357 - RNA, 32 nt, Homo Sapiens
cuuucuaggccuccaaagcgccaggcaagugg

SEQ ID NO: 95358 - RNA, 32 nt, Homo Sapiens
agccuggcgccugcccugcccccgucacggga

SEQ ID NO: 95359 - RNA, 32 nt, Homo Sapiens
auguuagauggaaaagcagaggagcaacacua

SEQ ID NO: 95360 - RNA, 32 nt, Homo Sapiens
cugaacaugugagcuuaaguacucauuuuguc

SEQ ID NO: 95361 - RNA, 32 nt, Homo Sapiens
cugcuuggagauccagaagagaauuagaaaca

SEQ ID NO: 95362 - RNA, 32 nt, Homo Sapiens
cugcuaacgaucucugugacucugugccaaac

SEQ ID NO: 95363 - RNA, 32 nt, Homo Sapiens
ugugauuccgccgguccgggucccgcagcgac

SEQ ID NO: 95364 - RNA, 32 nt, Homo Sapiens
ccagauaugauuaugaagcuuuuuccaaagau

SEQ ID NO: 95365 - RNA, 32 nt, Homo Sapiens
cgcagaccugccccccggggccccacagugcu

SEQ ID NO: 95366 - RNA, 32 nt, Homo Sapiens
uuucuucccucauuuucugggauucucaaaaa

SEQ ID NO: 95367 - RNA, 32 nt, Homo Sapiens
acugcugggggcggggcuugguggugacugcu

SEQ ID NO: 95368 - RNA, 32 nt, Homo Sapiens
uccugcuucucaaaguuuuucucauccaucac

SEQ ID NO: 95369 - RNA, 32 nt, Homo Sapiens
uaagugcauaaagaauaguaauuuagaaguau

SEQ ID NO: 95370 - RNA, 32 nt, Homo Sapiens
gaccuggaguuuucagauccccgggaaggaug

SEQ ID NO: 95371 - RNA, 32 nt, Homo Sapiens
agcuagagccuguacuuuuugcuggcauuuga

SEQ ID NO: 95372 - RNA, 32 nt, Homo Sapiens
ugcugaugggcaccucccgacaauggcgccuc

SEQ ID NO: 95373 - RNA, 32 nt, Homo Sapiens
acagccacucccuuuuuggccuccaacugggc

SEQ ID NO: 95374 - RNA, 32 nt, Homo Sapiens
auauauccuaaaacagugauuuuacuguaugu

SEQ ID NO: 95375 - RNA, 32 nt, Homo Sapiens
aggggcuguggcggcgccucgagcggcugcag

SEQ ID NO: 95376 - RNA, 32 nt, Homo Sapiens
gguugggcacgguggcucacgcuuguaauccc

SEQ ID NO: 95377 - RNA, 32 nt, Homo Sapiens
ugcaauuauauuaaaacuuauucuaaauaccu

SEQ ID NO: 95378 - RNA, 32 nt, Homo Sapiens
aauuuuaucucauuuuuuauuaaauugcuugc

SEQ ID NO: 95379 - RNA, 32 nt, Homo Sapiens
ugcaaaaaguauuggaaggaaauugucuacgu

SEQ ID NO: 95380 - RNA, 32 nt, Homo Sapiens
gggagcagcagguaacugcgcaaccccugccu

SEQ ID NO: 95381 - RNA, 32 nt, Homo Sapiens
uaugcugugcuaaauaucaaucaagccaugua

SEQ ID NO: 95382 - RNA, 32 nt, Homo Sapiens
gggcacagaaaacaaaugaaaacccucaguuu

SEQ ID NO: 95383 - RNA, 32 nt, Homo Sapiens
uagauagaaaaagaagcauggauccuugagga

SEQ ID NO: 95384 - RNA, 32 nt, Homo Sapiens
gccaagccagcucucggggccuuuuuuccacu

SEQ ID NO: 95385 - RNA, 32 nt, Homo Sapiens
guauugauuuaacuucauuuuucuaauaauca

SEQ ID NO: 95386 - RNA, 32 nt, Homo Sapiens
uuccuaagucaucaaaauguauauaaauuauc

SEQ ID NO: 95387 - RNA, 32 nt, Homo Sapiens
aacagugacuucugugucaucuagugagacac

SEQ ID NO: 95388 - RNA, 32 nt, Homo Sapiens
cggacuugucuucgcggccccaguccccgacc

SEQ ID NO: 95389 - RNA, 32 nt, Homo Sapiens
cagaccuggggcaggaggcagcucuucacguu

SEQ ID NO: 95390 - RNA, 32 nt, Homo Sapiens
uuauuuucuuguuugagccccucccccaauaa

SEQ ID NO: 95391 - RNA, 32 nt, Homo Sapiens
uuucggaggagagggcccgagaaggggccaua

SEQ ID NO: 95392 - RNA, 32 nt, Homo Sapiens
gggggagaggaggggaaagcuagaccugcaga

SEQ ID NO: 95393 - RNA, 32 nt, Homo Sapiens
gaagagugcagggggacggggccaugauaugg

SEQ ID NO: 95394 - RNA, 32 nt, Homo Sapiens
gguuuauaaauauuuuagacuuugcaggcuau

SEQ ID NO: 95395 - RNA, 32 nt, Homo Sapiens
gccgagcuccagcacuagagccagcugcgagc

SEQ ID NO: 95396 - RNA, 32 nt, Homo Sapiens
gauccgccggccgcggaccggggcugccucgg

SEQ ID NO: 95397 - RNA, 32 nt, Homo Sapiens
gugucacugucaauaaaauguaaaauauaaaa

SEQ ID NO: 95398 - RNA, 32 nt, Homo Sapiens
agcagccucagcagcugucuugguaaaggaga

SEQ ID NO: 95399 - RNA, 32 nt, Homo Sapiens
ugcuguuuguaaaauaaaucaggaugguagaa

SEQ ID NO: 95400 - RNA, 32 nt, Homo Sapiens
acuuccauuacccucggcuccucccacuccuc

SEQ ID NO: 95401 - RNA, 32 nt, Homo Sapiens
gcgagcagagcgagacccccagguccugcggg

SEQ ID NO: 95402 - RNA, 29 nt, Homo Sapiens
uagaucgggugucagaggacgaccaaucu

SEQ ID NO: 95403 - RNA, 32 nt, Homo Sapiens
ugaguccugcgagguugcccagcccucagaug

SEQ ID NO: 95404 - RNA, 32 nt, Homo Sapiens
gacaacucauuucuugauaucaaaagaauucg

SEQ ID NO: 95405 - RNA, 32 nt, Homo Sapiens
augucauugguaguuugauagggauagcauug

SEQ ID NO: 95406 - RNA, 32 nt, Homo Sapiens
ugaucaagugacuacugguuagccagagggag

SEQ ID NO: 95407 - RNA, 32 nt, Homo Sapiens
uuuagagguuuguuauuuuaaaaucacaaucu

SEQ ID NO: 95408 - RNA, 32 nt, Homo Sapiens
cggccucggggagagggaugccugggcacuac

SEQ ID NO: 95409 - RNA, 32 nt, Homo Sapiens
uggccagggcugugcccgagaauggcggagcg

SEQ ID NO: 95410 - RNA, 32 nt, Homo Sapiens
cccauggaaggggaaagccuucacgucagaac

SEQ ID NO: 95411 - RNA, 32 nt, Homo Sapiens
ucuuuauauaaaaauaacagauuggauagaug

SEQ ID NO: 95412 - RNA, 32 nt, Homo Sapiens
ggacaaggacucaggacauggguguggaagaa

SEQ ID NO: 95413 - RNA, 32 nt, Homo Sapiens
cuacuagaaauacaaaacaauuagcugggugu

SEQ ID NO: 95414 - RNA, 32 nt, Homo Sapiens
agaaaccuggcaaagaaaacggucucgacaau

SEQ ID NO: 95415 - RNA, 32 nt, Homo Sapiens
cuuccaguucccucaccuccccuuucggcugg

SEQ ID NO: 95416 - RNA, 32 nt, Homo Sapiens
uagucacucucccagacuugcgugggucaguu

SEQ ID NO: 95417 - RNA, 32 nt, Homo Sapiens
agaccgauggccuugggaagcccgagaguugg

SEQ ID NO: 95418 - RNA, 32 nt, Homo Sapiens
ccggggagggggccgggagcgaggggcagcuc

SEQ ID NO: 95419 - RNA, 32 nt, Homo Sapiens
ggcuuggugcccucgccagaccauggcugaug

SEQ ID NO: 95420 - RNA, 32 nt, Homo Sapiens
ugacccugggacccuccaggcagcguggccug

SEQ ID NO: 95421 - RNA, 32 nt, Homo Sapiens
caaaaccaucaucaacaccaagauaaaaggac

SEQ ID NO: 95422 - RNA, 32 nt, Homo Sapiens
auccgaaagcccagucccacccgccacccgac

SEQ ID NO: 95423 - RNA, 32 nt, Homo Sapiens
uucuagggcaccaagaggcuaaagucagcaca

SEQ ID NO: 95424 - RNA, 32 nt, Homo Sapiens
ggcguaaauuaacauuuuaauuucauauauau

SEQ ID NO: 95425 - RNA, 32 nt, Homo Sapiens
uaguacuuagaucuuauaucaaaugacaaggu

SEQ ID NO: 95426 - RNA, 32 nt, Homo Sapiens
auuucugggaacauuuauauugagauucuuug

SEQ ID NO: 95427 - RNA, 32 nt, Homo Sapiens
ccuccuuccccgccggccgcgcuccggagccu

SEQ ID NO: 95428 - RNA, 32 nt, Homo Sapiens
aaauuuuaauuuugucccacagcguugcuagg

SEQ ID NO: 95429 - RNA, 32 nt, Homo Sapiens
cagcauggccccagugcugaggcucccacugc

SEQ ID NO: 95430 - RNA, 32 nt, Homo Sapiens
caggaagcacaccgggguuaacacugguugac

SEQ ID NO: 95431 - RNA, 32 nt, Homo Sapiens
ggcaguuguuaucuacagaaucauauuucaua

SEQ ID NO: 95432 - RNA, 32 nt, Homo Sapiens
agcagagccagacagacauuccugaggggccc

SEQ ID NO: 95433 - RNA, 32 nt, Homo Sapiens
gagaccacguaugucugaaagucuuuuuuguc

SEQ ID NO: 95434 - RNA, 32 nt, Homo Sapiens
auacguagucuagcuuuuuucuuguaggucag

SEQ ID NO: 95435 - RNA, 32 nt, Homo Sapiens
uuacuagguaggugguuguuuccccuccuucc

SEQ ID NO: 95436 - RNA, 32 nt, Homo Sapiens
uaggcucgucugaccuauuuccuucaguuaua

SEQ ID NO: 95437 - RNA, 32 nt, Homo Sapiens
uggcugugugucugcggaucuguaguggcggc

SEQ ID NO: 95438 - RNA, 32 nt, Homo Sapiens
ccuuuggacaaaugcauuuaguggugguagaa

SEQ ID NO: 95439 - RNA, 32 nt, Homo Sapiens
cccuccugaugaugaagacugagguguagacu

SEQ ID NO: 95440 - RNA, 32 nt, Homo Sapiens
uuuccaaacaaauguacuguacuguuauauaa

SEQ ID NO: 95441 - RNA, 32 nt, Homo Sapiens
ggagcgucccauacuucgcgggcccgcccgua

SEQ ID NO: 95442 - RNA, 32 nt, Homo Sapiens
auggaccucagggcacucuccucccugcccac

SEQ ID NO: 95443 - RNA, 32 nt, Homo Sapiens
ucauggacuuuuucugcauuuauuuugauuuu

SEQ ID NO: 95444 - RNA, 32 nt, Homo Sapiens
ggauucauucgaaagcacaucuuuuaaauuaa

SEQ ID NO: 95445 - RNA, 32 nt, Homo Sapiens
guacagagaaaagaaaagugagaaauggcauc

SEQ ID NO: 95446 - RNA, 32 nt, Homo Sapiens
uuaaauaaaaauuuauugacauguaaagaugg

SEQ ID NO: 95447 - RNA, 32 nt, Homo Sapiens
ggggagccgguggagggaaagggguacaacag

SEQ ID NO: 95448 - RNA, 32 nt, Homo Sapiens
ugugagucgaagaguggacaaacagggaacaa

SEQ ID NO: 95449 - RNA, 32 nt, Homo Sapiens
aauggcuuaggacaaaugcuuuaacaaaagaa

SEQ ID NO: 95450 - RNA, 32 nt, Homo Sapiens
uuggccauaaaaaggaaggaaauucugacgca

SEQ ID NO: 95451 - RNA, 32 nt, Homo Sapiens
auugaucaugcaccauauccacaggagguugg

SEQ ID NO: 95452 - RNA, 29 nt, Homo Sapiens
uauuauguguguauguaugggacaggguc

SEQ ID NO: 95453 - RNA, 32 nt, Homo Sapiens
uucacuuccuagguccucuccuucugauggga

SEQ ID NO: 95454 - RNA, 32 nt, Homo Sapiens
ucucgguauaguuuugucacaauuauagauua

SEQ ID NO: 95455 - RNA, 32 nt, Homo Sapiens
cuuuccccugcccucccuccccgaaggagcuc

SEQ ID NO: 95456 - RNA, 32 nt, Homo Sapiens
ccuugcgcauuugguacuggcuuuugugauac

SEQ ID NO: 95457 - RNA, 32 nt, Homo Sapiens
aucugggcguucgcacccugagagaggggguc

SEQ ID NO: 95458 - RNA, 32 nt, Homo Sapiens
cacuugggaaaggcugguuccuuagccuccug

SEQ ID NO: 95459 - RNA, 32 nt, Homo Sapiens
auucugccuccaaagacuaugcucuuaaccac

SEQ ID NO: 95460 - RNA, 32 nt, Homo Sapiens
ccuuuuaaauauucuuuuuaauuuuauuuuag

SEQ ID NO: 95461 - RNA, 32 nt, Homo Sapiens
cuguggcggagcucccgcccccugcgcccuaa

SEQ ID NO: 95462 - RNA, 32 nt, Homo Sapiens
gcuagucaggaggaugcugugcacacugugug

SEQ ID NO: 95463 - RNA, 32 nt, Homo Sapiens
ugcuaaauaaacccucuuucucaaauucguaa

SEQ ID NO: 95464 - RNA, 32 nt, Homo Sapiens
cugcauccagugacuuuuuuuuguuuguuucu

SEQ ID NO: 95465 - RNA, 32 nt, Homo Sapiens
cuccccgugcuucaugugacucuuggccucuc

SEQ ID NO: 95466 - RNA, 32 nt, Homo Sapiens
ccccuacccggagcagcccgcuggggccgucc

SEQ ID NO: 95467 - RNA, 31 nt, Homo Sapiens
gugauuuugugauaaaguucagguaacagga

SEQ ID NO: 95468 - RNA, 27 nt, Homo Sapiens
guuucuucagacuccagauuucccugu

SEQ ID NO: 95469 - RNA, 32 nt, Homo Sapiens
uccggguugcugugacagccgguagagccucu

SEQ ID NO: 95470 - RNA, 32 nt, Homo Sapiens
gacuacucuguccacguagugaaaacaugcac

SEQ ID NO: 95471 - RNA, 32 nt, Homo Sapiens
gaggugggacgccccguccucagaacauccaa

SEQ ID NO: 95472 - RNA, 32 nt, Homo Sapiens
gcuguauuucacuguaauucugauguucguag

SEQ ID NO: 95473 - RNA, 32 nt, Homo Sapiens
ugauccuuggccccuuuccccauucucaacac

SEQ ID NO: 95474 - RNA, 32 nt, Homo Sapiens
guaccgguucuucccuugccucaugcuggggu

SEQ ID NO: 95475 - RNA, 32 nt, Homo Sapiens
uguuucuaaaauugcuugcacugcccaauccc

SEQ ID NO: 95476 - RNA, 30 nt, Homo Sapiens
guggugcugcuaaugggugcugcacugggc

SEQ ID NO: 95477 - RNA, 30 nt, Homo Sapiens
uuacauauuagguuggugcaaaauaauugu

SEQ ID NO: 95478 - RNA, 32 nt, Homo Sapiens
aaccuggagacgggauaugaagaucaaugaug

SEQ ID NO: 95479 - RNA, 32 nt, Homo Sapiens
uagguagcaacaacagaagggaaauuucaaua

SEQ ID NO: 95480 - RNA, 32 nt, Homo Sapiens
gucgcgucgcgagggcccggcgcggagcuaga

SEQ ID NO: 95481 - RNA, 32 nt, Homo Sapiens
ggcccugcccuccacacccucaugaggaaugc

SEQ ID NO: 95482 - RNA, 32 nt, Homo Sapiens
ugccacaggaggacugggcccccacgucccug

SEQ ID NO: 95483 - RNA, 32 nt, Homo Sapiens
uguccuggccccacaguaugucagcuguauag

SEQ ID NO: 95484 - RNA, 32 nt, Homo Sapiens
uuucccgcaaccugggguugucgggggagcgc

SEQ ID NO: 95485 - RNA, 32 nt, Homo Sapiens
auagauugguuuccuguggcucccuccaaacc

SEQ ID NO: 95486 - RNA, 32 nt, Homo Sapiens
uuuuacagaaaagagggugggagggugugguc

SEQ ID NO: 95487 - RNA, 32 nt, Homo Sapiens
ucuucuccgagccccaggcagcggugauucag

SEQ ID NO: 95488 - RNA, 32 nt, Homo Sapiens
uauaucuguauauaaaauauuuucauacagca

SEQ ID NO: 95489 - RNA, 32 nt, Homo Sapiens
uuguuuguuuguuucuucuuugagagggaguc

SEQ ID NO: 95490 - RNA, 32 nt, Homo Sapiens
aguccuuccaguguccuccccagccuccugag

SEQ ID NO: 95491 - RNA, 32 nt, Homo Sapiens
ucuguccgggagcggcuggagcggcagcggcg

SEQ ID NO: 95492 - RNA, 32 nt, Homo Sapiens
ggaaggaagggacacacacacacacacacaca

SEQ ID NO: 95493 - RNA, 32 nt, Homo Sapiens
ggauauuguuaugcaauuuuuauccuguuuag

SEQ ID NO: 95494 - RNA, 32 nt, Homo Sapiens
cauccaccaaaauuguguguguuugggggaga

SEQ ID NO: 95495 - RNA, 32 nt, Homo Sapiens
cccgaggcuggccugacugucccaggggcaca

SEQ ID NO: 95496 - RNA, 32 nt, Homo Sapiens
agugaauagaaagggaggagagcucuauuaug

SEQ ID NO: 95497 - RNA, 32 nt, Homo Sapiens
ggcuaaaaccaucauaguacagguaaggugag

SEQ ID NO: 95498 - RNA, 32 nt, Homo Sapiens
uguaaguuggaacuuauuuccaaacaugauug

SEQ ID NO: 95499 - RNA, 32 nt, Homo Sapiens
gucuuuggugacaaucaaguggguaggaugcu

SEQ ID NO: 95500 - RNA, 32 nt, Homo Sapiens
cuaucuacaauuuuuucaggauuauuaaaauc

SEQ ID NO: 95501 - RNA, 32 nt, Homo Sapiens
ugacuucauuggcaaauuacuucaaguauuuu

SEQ ID NO: 95502 - RNA, 28 nt, Homo Sapiens
uuaaaugauugugauauguguuacuuuu

SEQ ID NO: 95503 - RNA, 32 nt, Homo Sapiens
cagcucagccugccuccccaagggaccucaga

SEQ ID NO: 95504 - RNA, 32 nt, Homo Sapiens
uggcaggcgggugggugggggcugcagcuuuc

SEQ ID NO: 95505 - RNA, 32 nt, Homo Sapiens
ugagccaggaggaggagguugcagugagccga

SEQ ID NO: 95506 - RNA, 32 nt, Homo Sapiens
ccucuugcuauguauuuucucccgguaaaaau

SEQ ID NO: 95507 - RNA, 32 nt, Homo Sapiens
uggccguguagaagcauggugcccuggcuucu

SEQ ID NO: 95508 - RNA, 32 nt, Homo Sapiens
cgcccuuaggccaggucagcugcgagggucac

SEQ ID NO: 95509 - RNA, 32 nt, Homo Sapiens
uucacaaaguacuuuuucaaacaucagaugcu

SEQ ID NO: 95510 - RNA, 32 nt, Homo Sapiens
uauuacuuuuguaauugccaauaaaagcccag

SEQ ID NO: 95511 - RNA, 32 nt, Homo Sapiens
gaaaguauuauaaaaacaaaauagaaaaagag

SEQ ID NO: 95512 - RNA, 32 nt, Homo Sapiens
ugugugaccucugccugaaaaagcagguauuu

SEQ ID NO: 95513 - RNA, 32 nt, Homo Sapiens
aaauuucucccuuuuuuaggcugggcauggug

SEQ ID NO: 95514 - RNA, 32 nt, Homo Sapiens
aggugacccggcgggggcggagccagcgggcg

SEQ ID NO: 95515 - RNA, 32 nt, Homo Sapiens
cuccagccgcggcucgcgcgcucgcucugagc

SEQ ID NO: 95516 - RNA, 32 nt, Homo Sapiens
ucagucauaauuauauauacuguggaacagua

SEQ ID NO: 95517 - RNA, 32 nt, Homo Sapiens
aggacggugagacggccgcggcggcggcgaca

SEQ ID NO: 95518 - RNA, 32 nt, Homo Sapiens
ugauuuuguaaguaaaugacagaaugcuuuua

SEQ ID NO: 95519 - RNA, 32 nt, Homo Sapiens
gcacaagggggugagggaaagggaaggcuuaa

SEQ ID NO: 95520 - RNA, 32 nt, Homo Sapiens
cucccacugucuguguucuccucacuguuagc

SEQ ID NO: 95521 - RNA, 32 nt, Homo Sapiens
accucccuaccuuuccagguuuuguggggauc

SEQ ID NO: 95522 - RNA, 32 nt, Homo Sapiens
caggaaugcugacaaugcugccaugcccacca

SEQ ID NO: 95523 - RNA, 32 nt, Homo Sapiens
agaagcaggguggaggggaagggugggucuca

SEQ ID NO: 95524 - RNA, 32 nt, Homo Sapiens
ugugacccuguccucccucacccaggcugcag

SEQ ID NO: 95525 - RNA, 32 nt, Homo Sapiens
augaaugagguuucuuuuuucuuuuuccuuuu

SEQ ID NO: 95526 - RNA, 32 nt, Homo Sapiens
gguuacauauauauuucuuugucuaauuuaau

SEQ ID NO: 95527 - RNA, 32 nt, Homo Sapiens
ggccgagggucuucgggagcaggccgcagggc

SEQ ID NO: 95528 - RNA, 32 nt, Homo Sapiens
acggggucggggugggggcuaccaggaaaccu

SEQ ID NO: 95529 - RNA, 32 nt, Homo Sapiens
auuccaucccaucaccccaugauccuucccca

SEQ ID NO: 95530 - RNA, 32 nt, Homo Sapiens
ucuaauauauacugucgcaaagaguaguuuuu

SEQ ID NO: 95531 - RNA, 32 nt, Homo Sapiens
acuuugaaaauccccaaggaaacugaagauga

SEQ ID NO: 95532 - RNA, 32 nt, Homo Sapiens
agacagagccugucucagcucuaggcuguggg

SEQ ID NO: 95533 - RNA, 32 nt, Homo Sapiens
uauguggaaaauuaaaauauauucaaauguau

SEQ ID NO: 95534 - RNA, 32 nt, Homo Sapiens
uaaaauguaaaauaaacuuuuaaaaagcaggc

SEQ ID NO: 95535 - RNA, 32 nt, Homo Sapiens
uuucacaaauaaaauaugaccuuauuuucccu

SEQ ID NO: 95536 - RNA, 32 nt, Homo Sapiens
ggaggaagggacagcugcuuggguucuaaugc

SEQ ID NO: 95537 - RNA, 31 nt, Homo Sapiens
agcugcggcccugccccaccccauggcuggc

SEQ ID NO: 95538 - RNA, 32 nt, Homo Sapiens
uuucugguuucuuuuauugugggaaguaaaug

SEQ ID NO: 95539 - RNA, 30 nt, Homo Sapiens
uuggaguggggcgaggagagagccagaaaa

SEQ ID NO: 95540 - RNA, 32 nt, Homo Sapiens
uucaucguaaacaaaagcacaaacacuuguag

SEQ ID NO: 95541 - RNA, 32 nt, Homo Sapiens
uagagcagcgccucccgccgccgcccgggagg

SEQ ID NO: 95542 - RNA, 28 nt, Homo Sapiens
uaaauagcuggaaauauuauaaaucacu

SEQ ID NO: 95543 - RNA, 32 nt, Homo Sapiens
gcacagagccccacaauguuaaauucuguaga

SEQ ID NO: 95544 - RNA, 32 nt, Homo Sapiens
gacuaaaucuuuaucuugaauuuuacacaacu

SEQ ID NO: 95545 - RNA, 32 nt, Homo Sapiens
uuuacugaauuguagaaggacauaaccguguu

SEQ ID NO: 95546 - RNA, 32 nt, Homo Sapiens
gaaggcagcucucuggagcuuaugacaggcac

SEQ ID NO: 95547 - RNA, 32 nt, Homo Sapiens
uauagucuuuugccagagaaacugagguaacu

SEQ ID NO: 95548 - RNA, 32 nt, Homo Sapiens
ucaccuacuugcaagaaaauuauuuccacuag

SEQ ID NO: 95549 - RNA, 32 nt, Homo Sapiens
uuuuucacaccucucuuaauuuuaguucuguu

SEQ ID NO: 95550 - RNA, 32 nt, Homo Sapiens
acaccuggugccauugccaaguggcugugucc

SEQ ID NO: 95551 - RNA, 32 nt, Homo Sapiens
ggaucucgcuuucuuuggagcaguacagaaga

SEQ ID NO: 95552 - RNA, 32 nt, Homo Sapiens
aauggagcuucagcccucugggucagagacug

SEQ ID NO: 95553 - RNA, 32 nt, Homo Sapiens
cauucaaaucagccuuuuauaauuacauuuua

SEQ ID NO: 95554 - RNA, 32 nt, Homo Sapiens
cccuugacuucugaucuuugucuacuucauuu

SEQ ID NO: 95555 - RNA, 32 nt, Homo Sapiens
uggcaccuccaaguggugucauuugagcauug

SEQ ID NO: 95556 - RNA, 32 nt, Homo Sapiens
uggcccugcauaaaaugaacucugaaaacuuu

SEQ ID NO: 95557 - RNA, 31 nt, Homo Sapiens
uauuaaugaaacacuucaaaacacugaugug

SEQ ID NO: 95558 - RNA, 32 nt, Homo Sapiens
aguuagucuuaaaauguaaauaaaaugugaaa

SEQ ID NO: 95559 - RNA, 30 nt, Homo Sapiens
uuucaguuaguaucgggggaaaaaaaucca

SEQ ID NO: 95560 - RNA, 32 nt, Homo Sapiens
ucagacauugagaaacauuauucaacacuggu

SEQ ID NO: 95561 - RNA, 32 nt, Homo Sapiens
augcaggagagaaaugucacaagugugaugag

SEQ ID NO: 95562 - RNA, 32 nt, Homo Sapiens
aagccauaaugugguauaacauccuuuuugag

SEQ ID NO: 95563 - RNA, 32 nt, Homo Sapiens
ggagacccaagugggcccggcgccaacggcuc

SEQ ID NO: 95564 - RNA, 32 nt, Homo Sapiens
cgcaaggaggggcugcuucugaggucgguggc

SEQ ID NO: 95565 - RNA, 32 nt, Homo Sapiens
gggcucgcucccugcgccccggagcaggccaa

SEQ ID NO: 95566 - RNA, 32 nt, Homo Sapiens
gcacacuugggggauugcaaaagggaggaagg

SEQ ID NO: 95567 - RNA, 32 nt, Homo Sapiens
ggcuggcggugggcgggagcggucggcggccu

SEQ ID NO: 95568 - RNA, 32 nt, Homo Sapiens
uuggccugaggggcugggggccccacgaccug

SEQ ID NO: 95569 - RNA, 32 nt, Homo Sapiens
gcuagcagguuaaugauuucauaggugucugu

SEQ ID NO: 95570 - RNA, 32 nt, Homo Sapiens
uguguugugggaaugggaccuagguaggaggu

SEQ ID NO: 95571 - RNA, 32 nt, Homo Sapiens
ugacccugcuucauugaguccugaaacagcuc

SEQ ID NO: 95572 - RNA, 32 nt, Homo Sapiens
aaggaauauuaagaagacgugccugcuucccu

SEQ ID NO: 95573 - RNA, 32 nt, Homo Sapiens
guccggccucccugacaugcagcccucuggac

SEQ ID NO: 95574 - RNA, 32 nt, Homo Sapiens
cuguaaaauggggaugauaccacuucauaaag

SEQ ID NO: 95575 - RNA, 28 nt, Homo Sapiens
aagcgcaggacggcaccgaggugguggu

SEQ ID NO: 95576 - RNA, 32 nt, Homo Sapiens
cggggagcaaggccugcggggaggcgcaggau

SEQ ID NO: 95577 - RNA, 32 nt, Homo Sapiens
uggaaggcaacagcuuccagcgacucaaaggc

SEQ ID NO: 95578 - RNA, 32 nt, Homo Sapiens
cuugaccucucucgccccuuucuggguguguu

SEQ ID NO: 95579 - RNA, 30 nt, Homo Sapiens
aucccaugccccagcccccacccucucgug

SEQ ID NO: 95580 - RNA, 32 nt, Homo Sapiens
cuugugggugugacuggauauuagacauccgg

SEQ ID NO: 95581 - RNA, 32 nt, Homo Sapiens
cugcccuuucucugcugggcccuguggaugca

SEQ ID NO: 95582 - RNA, 32 nt, Homo Sapiens
uccaugucccuacaaaggacaugaacucauca

SEQ ID NO: 95583 - RNA, 32 nt, Homo Sapiens
agaggaagcucucagaacgcagcccucacggg

SEQ ID NO: 95584 - RNA, 32 nt, Homo Sapiens
gcugcuggcuccugcccugcuuccugugaucg

SEQ ID NO: 95585 - RNA, 32 nt, Homo Sapiens
cagacgcagcggggggacacaucucgcggugg

SEQ ID NO: 95586 - RNA, 32 nt, Homo Sapiens
uauugcacuccagccugggugacagacuaaga

SEQ ID NO: 95587 - RNA, 28 nt, Homo Sapiens
gaggcgguggcuacugcugcggccacug

SEQ ID NO: 95588 - RNA, 31 nt, Homo Sapiens
auccugcaaucucucugcagagccugcgcau

SEQ ID NO: 95589 - RNA, 32 nt, Homo Sapiens
gauauauuuuuucaaaagaacaaaauccacag

SEQ ID NO: 95590 - RNA, 32 nt, Homo Sapiens
gagaaggagcgggaccccgagcaccgggcccu

SEQ ID NO: 95591 - RNA, 32 nt, Homo Sapiens
acccacguuccuuguaaauccaaauguuucua

SEQ ID NO: 95592 - RNA, 32 nt, Homo Sapiens
ggcucccaggguggaggaaggugacugugugu

SEQ ID NO: 95593 - RNA, 32 nt, Homo Sapiens
aguguuuaauuuccgauuuucuccucugcauu

SEQ ID NO: 95594 - RNA, 32 nt, Homo Sapiens
gguuucaccauguuggucaggcuggucuugaa

SEQ ID NO: 95595 - RNA, 32 nt, Homo Sapiens
ccagccggcuuggcuagcgcgcggcggccgug

SEQ ID NO: 95596 - RNA, 32 nt, Homo Sapiens
cggugguuugguuuuucaaaugaugauauggc

SEQ ID NO: 95597 - RNA, 32 nt, Homo Sapiens
cacuuaaacaaauuguuuugaguguuagcuac

SEQ ID NO: 95598 - RNA, 30 nt, Homo Sapiens
agagugggcaggcgguuccagggagacaag

SEQ ID NO: 95599 - RNA, 32 nt, Homo Sapiens
uaugucuauauucuugcuguacucauugguag

SEQ ID NO: 95600 - RNA, 32 nt, Homo Sapiens
cugcugagccuggccugggccucuuacccacu

SEQ ID NO: 95601 - RNA, 32 nt, Homo Sapiens
gaccuccuucccgguccccucccggcccaguc

SEQ ID NO: 95602 - RNA, 32 nt, Homo Sapiens
gccauaccaaccccagguauuaauucucgcug

SEQ ID NO: 95603 - RNA, 31 nt, Homo Sapiens
ugaaccuggggccccacaggauuaacagggg

SEQ ID NO: 95604 - RNA, 32 nt, Homo Sapiens
ccuccuggcuccuggcccguguccuggccugg

SEQ ID NO: 95605 - RNA, 32 nt, Homo Sapiens
cagccaccgugccugcccuugggauauguuuu

SEQ ID NO: 95606 - RNA, 30 nt, Homo Sapiens
gcuucuucaggcgguggcggcagcagcgaa

SEQ ID NO: 95607 - RNA, 30 nt, Homo Sapiens
uuuuuuaauaaauguuccugguugguuuuc

SEQ ID NO: 95608 - RNA, 32 nt, Homo Sapiens
gagcauacauuuauguuauuucuaagccuccc

SEQ ID NO: 95609 - RNA, 32 nt, Homo Sapiens
ccggcaccgcuggggcggccaggccgugagga

SEQ ID NO: 95610 - RNA, 32 nt, Homo Sapiens
ugcuucuaccuuuagcauuuccugcuuccgcc

SEQ ID NO: 95611 - RNA, 32 nt, Homo Sapiens
uggccucuaggaguugaggaccucaagccuac

SEQ ID NO: 95612 - RNA, 32 nt, Homo Sapiens
uuacugcaaaugucaucagaacuuuuugguuu

SEQ ID NO: 95613 - RNA, 32 nt, Homo Sapiens
gcagaccccucuaccuccuccaggcugggaga

SEQ ID NO: 95614 - RNA, 32 nt, Homo Sapiens
gcggcgguggaggcugaggcggcggccgaggc

SEQ ID NO: 95615 - RNA, 32 nt, Homo Sapiens
ucuagggugugaugaugguuucccucuucuca

SEQ ID NO: 95616 - RNA, 32 nt, Homo Sapiens
uggagaaugggaguguuaagacuuuugacuuc

SEQ ID NO: 95617 - RNA, 32 nt, Homo Sapiens
agcacaaccggacuaacacagugaccuuaguu

SEQ ID NO: 95618 - RNA, 32 nt, Homo Sapiens
cgagaagggggucgggcccagcccuuccaccc

SEQ ID NO: 95619 - RNA, 32 nt, Homo Sapiens
aguauaaauauuucaauagauacaucucucua

SEQ ID NO: 95620 - RNA, 32 nt, Homo Sapiens
uuguuaugugcugugccuggacuuggcaugaa

SEQ ID NO: 95621 - RNA, 32 nt, Homo Sapiens
cagcaggggcccugggguuuuagccucuggcc

SEQ ID NO: 95622 - RNA, 32 nt, Homo Sapiens
cuuugcaaguuguguacauaauaauucuaaag

SEQ ID NO: 95623 - RNA, 32 nt, Homo Sapiens
agccggccgugcugcuggccgggggcccaggu

SEQ ID NO: 95624 - RNA, 32 nt, Homo Sapiens
caaauggugagcauuucuuuuuguuacauaag

SEQ ID NO: 95625 - RNA, 32 nt, Homo Sapiens
acucccuaaaaugccagcugagcauaggcaca

SEQ ID NO: 95626 - RNA, 32 nt, Homo Sapiens
gugauugaguaucauguaauaauuauaauaua

SEQ ID NO: 95627 - RNA, 32 nt, Homo Sapiens
uuccagaaaaggaagaauaugaaccccagacc

SEQ ID NO: 95628 - RNA, 32 nt, Homo Sapiens
uuuaaaaacccauuuuuauugugguguuuggu

SEQ ID NO: 95629 - RNA, 32 nt, Homo Sapiens
gaaacucugaagaguuugacacauuuggacuu

SEQ ID NO: 95630 - RNA, 32 nt, Homo Sapiens
uucaucugcuuccucucucaccaccccaucuc

SEQ ID NO: 95631 - RNA, 32 nt, Homo Sapiens
gagcagauacucaaggaggcacugggcucagc

SEQ ID NO: 95632 - RNA, 32 nt, Homo Sapiens
ucuuuucuuuuuucuuuuuuaaaauguuuuau

SEQ ID NO: 95633 - RNA, 32 nt, Homo Sapiens
cccccgcagaacuggcugcugcgugugaacug

SEQ ID NO: 95634 - RNA, 32 nt, Homo Sapiens
cgggcacgccuggcucucccgggagccucgcc

SEQ ID NO: 95635 - RNA, 32 nt, Homo Sapiens
ggaagggaggcggccucuggccccgacccugc

SEQ ID NO: 95636 - RNA, 32 nt, Homo Sapiens
uccuuuuugugauuucuguauaggacucuuua

SEQ ID NO: 95637 - RNA, 28 nt, Homo Sapiens
gguugaggggacugacauuugaggacag

SEQ ID NO: 95638 - RNA, 32 nt, Homo Sapiens
caaaguuaaaagacuauuaagaacacaagaug

SEQ ID NO: 95639 - RNA, 32 nt, Homo Sapiens
auaauuuuauuacauaugauuagagggaugag

SEQ ID NO: 95640 - RNA, 32 nt, Homo Sapiens
uuuucaauuuuauguguaaauuuuauugucug

SEQ ID NO: 95641 - RNA, 32 nt, Homo Sapiens
cuggccuuaagugaucugcccaucucagcgac

SEQ ID NO: 95642 - RNA, 32 nt, Homo Sapiens
auuaaacuuuuuucuuuuuuucuaaaaaaaaa

SEQ ID NO: 95643 - RNA, 32 nt, Homo Sapiens
ucccugucucuccucagugacaucgucuuuaa

SEQ ID NO: 95644 - RNA, 32 nt, Homo Sapiens
auaggcacagucuacagaacuacuuccuaaug

SEQ ID NO: 95645 - RNA, 32 nt, Homo Sapiens
guccccuacaagcuccuccaagccccgccggc

SEQ ID NO: 95646 - RNA, 32 nt, Homo Sapiens
ucgguugguugccagggcuugcagaucgcagu

SEQ ID NO: 95647 - RNA, 32 nt, Homo Sapiens
caggacagggccagcugucucccagccaugcu

SEQ ID NO: 95648 - RNA, 32 nt, Homo Sapiens
ucagauucuauucucuguucuuucccacaaug

SEQ ID NO: 95649 - RNA, 32 nt, Homo Sapiens
uacugggcgggggaggggcggccugcccucau

SEQ ID NO: 95650 - RNA, 32 nt, Homo Sapiens
uggcaugugauagcaaaauuguauuucacuua

SEQ ID NO: 95651 - RNA, 32 nt, Homo Sapiens
agucugagucccaaaacaaaaguagagaagcc

SEQ ID NO: 95652 - RNA, 32 nt, Homo Sapiens
acuuccucccgccccaggaaaccugccauggc

SEQ ID NO: 95653 - RNA, 32 nt, Homo Sapiens
cuggguuggaggaggcagagccaugaccaagg

SEQ ID NO: 95654 - RNA, 31 nt, Homo Sapiens
gcccagcucuacuuuucgccccgcgucuccu

SEQ ID NO: 95655 - RNA, 32 nt, Homo Sapiens
guggcuaucacuacaaggccaagccccgggua

SEQ ID NO: 95656 - RNA, 31 nt, Homo Sapiens
cagggugagccccaaaauugggguucagcgu

SEQ ID NO: 95657 - RNA, 32 nt, Homo Sapiens
uggagggcagugacgugaucagagcucacugc

SEQ ID NO: 95658 - RNA, 32 nt, Homo Sapiens
guuauaggcuccaugaaagggauggggacaug

SEQ ID NO: 95659 - RNA, 32 nt, Homo Sapiens
gcauuggguggcccaggaugacaaugcacagc

SEQ ID NO: 95660 - RNA, 32 nt, Homo Sapiens
ugggcgggcgcgcgugagcucgggcugcccgg

SEQ ID NO: 95661 - RNA, 32 nt, Homo Sapiens
cgcgcgacgcgaagguugucgggauccgcggc

SEQ ID NO: 95662 - RNA, 32 nt, Homo Sapiens
gccaagggagcggggcgggcugaggccugcuu

SEQ ID NO: 95663 - RNA, 32 nt, Homo Sapiens
gcugggcuccgucuccaggucugguucagggg

SEQ ID NO: 95664 - RNA, 32 nt, Homo Sapiens
ugggcgaggaggcguuuccacccccuggugcc

SEQ ID NO: 95665 - RNA, 32 nt, Homo Sapiens
gaugagacuaucuuagaacuacaguguagucg

SEQ ID NO: 95666 - RNA, 32 nt, Homo Sapiens
uaaggauagaacuuuuaaagauauaaagauuu

SEQ ID NO: 95667 - RNA, 30 nt, Homo Sapiens
aacucauuuugugccacccauuuagguauc

SEQ ID NO: 95668 - RNA, 32 nt, Homo Sapiens
cacugccuuuucugcuuugcuucguggacugg

SEQ ID NO: 95669 - RNA, 29 nt, Homo Sapiens
cgcucccggcaccaggggacgccggacgc

SEQ ID NO: 95670 - RNA, 30 nt, Homo Sapiens
gggccauggcugcccuucuccgagcugugc

SEQ ID NO: 95671 - RNA, 32 nt, Homo Sapiens
cuggggaaagacugauuuugagguuuuaauag

SEQ ID NO: 95672 - RNA, 32 nt, Homo Sapiens
agaacgaaggaucacccaggccucgaguccuc

SEQ ID NO: 95673 - RNA, 32 nt, Homo Sapiens
ugaugucugcaccuacguuuccaccuccuccc

SEQ ID NO: 95674 - RNA, 32 nt, Homo Sapiens
cagugagacaggaaaaauaauaaaacaacccc

SEQ ID NO: 95675 - RNA, 32 nt, Homo Sapiens
ugcuauacugaauuguagcuaacaauccuaau

SEQ ID NO: 95676 - RNA, 32 nt, Homo Sapiens
ucuaccugucucccccugauauuguucuauga

SEQ ID NO: 95677 - RNA, 32 nt, Homo Sapiens
ggcacgugcggugacggcacccgagcccugag

SEQ ID NO: 95678 - RNA, 32 nt, Homo Sapiens
aaaacaucugaaagccuuccaaugcuguauua

SEQ ID NO: 95679 - RNA, 32 nt, Homo Sapiens
uuucuuaaguagcaaguacauguaucggaacu

SEQ ID NO: 95680 - RNA, 32 nt, Homo Sapiens
auuaggcacaaagggauucccauaucccuccu

SEQ ID NO: 95681 - RNA, 32 nt, Homo Sapiens
cacuaggcuguaaaaacaaaacaauguagagu

SEQ ID NO: 95682 - RNA, 32 nt, Homo Sapiens
ucauuuuaucgagagaaccuucugcuucugag

SEQ ID NO: 95683 - RNA, 32 nt, Homo Sapiens
aauaaauucugaaccauccucaucucaaaaaa

SEQ ID NO: 95684 - RNA, 32 nt, Homo Sapiens
cuuuuaugaaagauuauuucaaguaaaaauag

SEQ ID NO: 95685 - RNA, 32 nt, Homo Sapiens
cccauugcgagggacccagcucuguuucugcu

SEQ ID NO: 95686 - RNA, 32 nt, Homo Sapiens
uuuucucuuuggguuucuuguuuaccaaagaa

SEQ ID NO: 95687 - RNA, 32 nt, Homo Sapiens
uuuuaagaaguauuuaaaaaucuuacuaggau

SEQ ID NO: 95688 - RNA, 32 nt, Homo Sapiens
uacuuauauaagaaaucucacacugagauaga

SEQ ID NO: 95689 - RNA, 32 nt, Homo Sapiens
gguacugccuucugcccccaaaucucuaagcc

SEQ ID NO: 95690 - RNA, 32 nt, Homo Sapiens
uccugaccucaagugaucugcccgccuuggcc

SEQ ID NO: 95691 - RNA, 32 nt, Homo Sapiens
ugauuauuuuguuucuucugcaauaucaagau

SEQ ID NO: 95692 - RNA, 32 nt, Homo Sapiens
gggucccuuucugcagaggaagggaugcucgc

SEQ ID NO: 95693 - RNA, 32 nt, Homo Sapiens
uagccagggacucccaugcugcuguuggcucc

SEQ ID NO: 95694 - RNA, 32 nt, Homo Sapiens
caguuguuugaugcauuaaaagaaaauaaaaa

SEQ ID NO: 95695 - RNA, 32 nt, Homo Sapiens
cagaggcacuucugcccgggcugccucucccc

SEQ ID NO: 95696 - RNA, 32 nt, Homo Sapiens
uccagguccuuaucauccuucagguugucuua

SEQ ID NO: 95697 - RNA, 32 nt, Homo Sapiens
gaagcgggcgaccgccgucagcccggaggagg

SEQ ID NO: 95698 - RNA, 32 nt, Homo Sapiens
ugguuugggguggucagugcccucugugcuuu

SEQ ID NO: 95699 - RNA, 32 nt, Homo Sapiens
guaaauugaagaagccucacacguaaaagaaa

SEQ ID NO: 95700 - RNA, 32 nt, Homo Sapiens
agcccccuccaaggcggaguggagcuuuggga

SEQ ID NO: 95701 - RNA, 32 nt, Homo Sapiens
uucuaucacuugcuugaccccuggacccauaa

SEQ ID NO: 95702 - RNA, 32 nt, Homo Sapiens
uuugaaaaucauauuaugguuauguacauugu

SEQ ID NO: 95703 - RNA, 32 nt, Homo Sapiens
acuuuuauuaauaaaacaaaauguuuuggagc

SEQ ID NO: 95704 - RNA, 32 nt, Homo Sapiens
gcagcgccggggcccucagaucgaggcugccu

SEQ ID NO: 95705 - RNA, 32 nt, Homo Sapiens
uugugccuccuaguguuggcucccucaugaaa

SEQ ID NO: 95706 - RNA, 32 nt, Homo Sapiens
cccuggcucaggagcucauagauggaggaggu

SEQ ID NO: 95707 - RNA, 32 nt, Homo Sapiens
guuccccaugagggcucugccccugcagcaaa

SEQ ID NO: 95708 - RNA, 32 nt, Homo Sapiens
agccaacugggcgggggcacccgggcaggggu

SEQ ID NO: 95709 - RNA, 31 nt, Homo Sapiens
ccgucaccaaauuguaaccuggauguuauag

SEQ ID NO: 95710 - RNA, 30 nt, Homo Sapiens
gguccgcagucagugccgccgcgcccggcc

SEQ ID NO: 95711 - RNA, 32 nt, Homo Sapiens
gaaugaauguauaauaauaauuacuguauaua

SEQ ID NO: 95712 - RNA, 32 nt, Homo Sapiens
ccccagaugccuggcugagacacgccaguggc

SEQ ID NO: 95713 - RNA, 32 nt, Homo Sapiens
aaagugguguuguagaaaucacaguacccuga

SEQ ID NO: 95714 - RNA, 32 nt, Homo Sapiens
gcuucuguacugccagguccgggucggcggcu

SEQ ID NO: 95715 - RNA, 32 nt, Homo Sapiens
agccccgggugcggccacgcaacgagggggcc

SEQ ID NO: 95716 - RNA, 32 nt, Homo Sapiens
uccuggggguucugagaguccugggcagugug

SEQ ID NO: 95717 - RNA, 32 nt, Homo Sapiens
auccucuccccccaagaauucuaacacaggag

SEQ ID NO: 95718 - RNA, 32 nt, Homo Sapiens
cgggcccuuuugggggcggggggaggggaaaa

SEQ ID NO: 95719 - RNA, 32 nt, Homo Sapiens
uuucgacuccacugcuaacaaagauaaguugc

SEQ ID NO: 95720 - RNA, 32 nt, Homo Sapiens
aacagggggaugugucccaguacacuuacaaa

SEQ ID NO: 95721 - RNA, 32 nt, Homo Sapiens
cugaggagacgccggcauccucgggggccugg

SEQ ID NO: 95722 - RNA, 32 nt, Homo Sapiens
ccuuagagaaggaaaacggagagccgaaggag

SEQ ID NO: 95723 - RNA, 32 nt, Homo Sapiens
gagagcugggauuuuuaucuguuuugcuguau

SEQ ID NO: 95724 - RNA, 32 nt, Homo Sapiens
gcgcugggacaggggcgcugggggcgagcccu

SEQ ID NO: 95725 - RNA, 32 nt, Homo Sapiens
gaugaugacaaugaaauuagugccuguuuucu

SEQ ID NO: 95726 - RNA, 31 nt, Homo Sapiens
auugagagugacugccuggcccugcugcaac

SEQ ID NO: 95727 - RNA, 32 nt, Homo Sapiens
acuuuugggagaaacuuuuugucuccauuccu

SEQ ID NO: 95728 - RNA, 32 nt, Homo Sapiens
acuaugacaauuuuugcuguuuucagccuuca

SEQ ID NO: 95729 - RNA, 30 nt, Homo Sapiens
aucccggaccauggcggcggcggggggcgc

SEQ ID NO: 95730 - RNA, 32 nt, Homo Sapiens
agugucuugacaucacccuacccaggcggugg

SEQ ID NO: 95731 - RNA, 32 nt, Homo Sapiens
aacggagauggaaugucacgagggauccagcc

SEQ ID NO: 95732 - RNA, 32 nt, Homo Sapiens
ccuaauuuuaaucgugcacaccuaccauggca

SEQ ID NO: 95733 - RNA, 32 nt, Homo Sapiens
gcccaccuuggagcagagagccaagcaucuuc

SEQ ID NO: 95734 - RNA, 32 nt, Homo Sapiens
uacuugcggaagcuguuggaugaugagcagcc

SEQ ID NO: 95735 - RNA, 32 nt, Homo Sapiens
uuugaauacugauuuuuuuucuuaguauuucu

SEQ ID NO: 95736 - RNA, 28 nt, Homo Sapiens
uagauggaguauaaacauuugaauggaa

SEQ ID NO: 95737 - RNA, 32 nt, Homo Sapiens
cucagaacccucgggcaccuggagagauguuu

SEQ ID NO: 95738 - RNA, 32 nt, Homo Sapiens
uuuuuauuuuuagaggcagggcugcauuggga

SEQ ID NO: 95739 - RNA, 32 nt, Homo Sapiens
acaucucuuauuucucuuuuccccuuacucuc

SEQ ID NO: 95740 - RNA, 32 nt, Homo Sapiens
auauaguagauauauauaccuauugaaauucu

SEQ ID NO: 95741 - RNA, 32 nt, Homo Sapiens
cauggcacccucagaccacacaguagccaagu

SEQ ID NO: 95742 - RNA, 32 nt, Homo Sapiens
ggucggugcaccacugcgugaccuccaggcag

SEQ ID NO: 95743 - RNA, 32 nt, Homo Sapiens
uguccgguucaauggcgacugcggaagcuagc

SEQ ID NO: 95744 - RNA, 32 nt, Homo Sapiens
ggcaccgccagccgccugggcacgggacuggg

SEQ ID NO: 95745 - RNA, 32 nt, Homo Sapiens
gaagguagucccugaaggaaaaguaggaaucu

SEQ ID NO: 95746 - RNA, 32 nt, Homo Sapiens
aagcugcuuaauuaugugaacaucuuauaaug

SEQ ID NO: 95747 - RNA, 32 nt, Homo Sapiens
augaaguagacacuauugcccucagaaugaga

SEQ ID NO: 95748 - RNA, 32 nt, Homo Sapiens
cuagagaagcagaacggccugagccugggcca

SEQ ID NO: 95749 - RNA, 32 nt, Homo Sapiens
uccccacccccuccugcuccuggggccggccc

SEQ ID NO: 95750 - RNA, 31 nt, Homo Sapiens
agagcagcaccgugccugcccugaggcagug

SEQ ID NO: 95751 - RNA, 32 nt, Homo Sapiens
gccauccuuguauuucugaaguaaauggagcc

SEQ ID NO: 95752 - RNA, 32 nt, Homo Sapiens
uaaaauaaaagcuuuuaugauugggaauuuau

SEQ ID NO: 95753 - RNA, 32 nt, Homo Sapiens
gugccugccugucugacagaccuugauauguu

SEQ ID NO: 95754 - RNA, 32 nt, Homo Sapiens
gggaggaggaaauggauuagguccuggagguu

SEQ ID NO: 95755 - RNA, 32 nt, Homo Sapiens
uacaaggggcugcugcugcugcugggaaucuu

SEQ ID NO: 95756 - RNA, 32 nt, Homo Sapiens
uucccugaccucaguacccauccgucaggagc

SEQ ID NO: 95757 - RNA, 32 nt, Homo Sapiens
uuuuguguccaucaguauuaacuauugguaua

SEQ ID NO: 95758 - RNA, 32 nt, Homo Sapiens
ugugaaccuaugaguuuuguuuuguuuuguuu

SEQ ID NO: 95759 - RNA, 32 nt, Homo Sapiens
guaauggugugccucgcccuguccuugcccug

SEQ ID NO: 95760 - RNA, 32 nt, Homo Sapiens
aaugugauaauaaggacacuauggaaaugucu

SEQ ID NO: 95761 - RNA, 32 nt, Homo Sapiens
ugagugcuaauagauuaggauaaaauacucac

SEQ ID NO: 95762 - RNA, 32 nt, Homo Sapiens
uugagcugggcagcugcaaucagcuucuuuau

SEQ ID NO: 95763 - RNA, 32 nt, Homo Sapiens
agaaucacuuuucuagacaucuaccuauacuu

SEQ ID NO: 95764 - RNA, 32 nt, Homo Sapiens
augaaggauuccaggaagaucauggagaccug

SEQ ID NO: 95765 - RNA, 32 nt, Homo Sapiens
auggaggagaaauaaacuuauuccuccuuaaa

SEQ ID NO: 95766 - RNA, 32 nt, Homo Sapiens
uccgugccuaucugcuggacgugguggacagc

SEQ ID NO: 95767 - RNA, 31 nt, Homo Sapiens
cacucccaagccaccauuugagagggagggg

SEQ ID NO: 95768 - RNA, 32 nt, Homo Sapiens
cguuucugcugugcccagcaguggcugcuggg

SEQ ID NO: 95769 - RNA, 32 nt, Homo Sapiens
acauaacuauuuuaagguuaauccauuaucuu

SEQ ID NO: 95770 - RNA, 31 nt, Homo Sapiens
acugauuguuugacuuuuaaaauaaguaaua

SEQ ID NO: 95771 - RNA, 32 nt, Homo Sapiens
uaaaaaaugauuacagaagaggacgccuccac

SEQ ID NO: 95772 - RNA, 32 nt, Homo Sapiens
ucacucuguugaccaggcuggagugaaguggu

SEQ ID NO: 95773 - RNA, 32 nt, Homo Sapiens
uaugacccagcauggguuagugcuaugguggg

SEQ ID NO: 95774 - RNA, 32 nt, Homo Sapiens
agaaggaggaagauacugugguacugucauaa

SEQ ID NO: 95775 - RNA, 32 nt, Homo Sapiens
uugaugcaaaaauaauauaugaaaagagacga

SEQ ID NO: 95776 - RNA, 32 nt, Homo Sapiens
gcccugcaggucugcuggcugcgcacauaacu

SEQ ID NO: 95777 - RNA, 32 nt, Homo Sapiens
cugcccugcccccgacucuccugccgcacccc

SEQ ID NO: 95778 - RNA, 30 nt, Homo Sapiens
ccuuuucuaaaaaggggggaaaauccggau

SEQ ID NO: 95779 - RNA, 32 nt, Homo Sapiens
uaauuuuccagaagcaauuucuuguuuccucc

SEQ ID NO: 95780 - RNA, 32 nt, Homo Sapiens
ccugugauuggcagaaagaagccagggugugc

SEQ ID NO: 95781 - RNA, 32 nt, Homo Sapiens
cuacugauguagaacggcuucucccacacagu

SEQ ID NO: 95782 - RNA, 32 nt, Homo Sapiens
auaaucaggaagaaaugaaagaucugauggau

SEQ ID NO: 95783 - RNA, 32 nt, Homo Sapiens
ucugaggguccugcugcuggccccaccaaaua

SEQ ID NO: 95784 - RNA, 32 nt, Homo Sapiens
ucugaaucaaggaucacaaacuacagccugca

SEQ ID NO: 95785 - RNA, 32 nt, Homo Sapiens
ccccaccuauuuaggacgagauugaagacuga

SEQ ID NO: 95786 - RNA, 32 nt, Homo Sapiens
cagagcagccccagccgcugccgcugcuaccc

SEQ ID NO: 95787 - RNA, 32 nt, Homo Sapiens
guguaaaaguuccuggugaauaucgaagaaag

SEQ ID NO: 95788 - RNA, 32 nt, Homo Sapiens
ugcugaauuuaaauuauuuacauauuaauuca

SEQ ID NO: 95789 - RNA, 32 nt, Homo Sapiens
cuuaaggugucugcuuauccagccagaaauaa

SEQ ID NO: 95790 - RNA, 32 nt, Homo Sapiens
agaaggggcagagggagggcagaggcuuaaag

SEQ ID NO: 95791 - RNA, 32 nt, Homo Sapiens
agggagauuccaggccagcccaaacuacccug

SEQ ID NO: 95792 - RNA, 32 nt, Homo Sapiens
aucuuuuuaaacacuguauagacggaagagcc

SEQ ID NO: 95793 - RNA, 32 nt, Homo Sapiens
aaguauaggauaaauuacauuaaaauagcaca

SEQ ID NO: 95794 - RNA, 32 nt, Homo Sapiens
gggccgaguggccgcgggcgccauggaggggg

SEQ ID NO: 95795 - RNA, 32 nt, Homo Sapiens
cccgcgggguggaaaccacgggcgcccgcccg

SEQ ID NO: 95796 - RNA, 32 nt, Homo Sapiens
ugacgcugcuccaggggaaagaaggaccaggg

SEQ ID NO: 95797 - RNA, 32 nt, Homo Sapiens
caauuucuguguuccccuuccacccuuuaaau

SEQ ID NO: 95798 - RNA, 32 nt, Homo Sapiens
uacauucuuagaagcuggaaauuuugacaucu

SEQ ID NO: 95799 - RNA, 32 nt, Homo Sapiens
aggacugagacugggcucuguuuuccaagggu

SEQ ID NO: 95800 - RNA, 32 nt, Homo Sapiens
agagcuggugagaccacgugcugcuggcguag

SEQ ID NO: 95801 - RNA, 32 nt, Homo Sapiens
cuggucagauggacucuagaagcacugagcuc

SEQ ID NO: 95802 - RNA, 32 nt, Homo Sapiens
ucucagucccuggccuugccccuggcucuggc

SEQ ID NO: 95803 - RNA, 32 nt, Homo Sapiens
ggagcggcuccgggcgcgaggucugaggauga

SEQ ID NO: 95804 - RNA, 32 nt, Homo Sapiens
ccugagcucaggugauccaccugccucggccu

SEQ ID NO: 95805 - RNA, 32 nt, Homo Sapiens
ucucucggcggagcugcugugcaguggaacgc

SEQ ID NO: 95806 - RNA, 32 nt, Homo Sapiens
gaccgcgcugagucuuuuuuuuuuuccuagca

SEQ ID NO: 95807 - RNA, 32 nt, Homo Sapiens
gcuucggcaacgccacaggcucuaggggcugc

SEQ ID NO: 95808 - RNA, 32 nt, Homo Sapiens
accuuauuggaaguauuaauucuaagccuguc

SEQ ID NO: 95809 - RNA, 32 nt, Homo Sapiens
gcaaacgguagcuaauacuaucaucauuguca

SEQ ID NO: 95810 - RNA, 32 nt, Homo Sapiens
uaagaauguuuuaaauucuguaaugaacuuuu

SEQ ID NO: 95811 - RNA, 32 nt, Homo Sapiens
agaaccuaugcggcccggcaugguggcucaca

SEQ ID NO: 95812 - RNA, 32 nt, Homo Sapiens
cuaggcuuaguuauguuauuuuuguguaugug

SEQ ID NO: 95813 - RNA, 32 nt, Homo Sapiens
acaggugucaccguaguggcuaccaccucagg

SEQ ID NO: 95814 - RNA, 32 nt, Homo Sapiens
auggauacugguuuuguuaauuaugauucuuu

SEQ ID NO: 95815 - RNA, 32 nt, Homo Sapiens
uucugauucccggccacacuuugcauuucaac

SEQ ID NO: 95816 - RNA, 32 nt, Homo Sapiens
gucuccaggggagagguggcuguuuggaggga

SEQ ID NO: 95817 - RNA, 32 nt, Homo Sapiens
aagaacuggagaaagggaaccacagagccagg

SEQ ID NO: 95818 - RNA, 32 nt, Homo Sapiens
gcuucagucaucagccagcaagagggaacaaa

SEQ ID NO: 95819 - RNA, 32 nt, Homo Sapiens
uaguuuugcuggaaacaaacacugcuuaugac

SEQ ID NO: 95820 - RNA, 32 nt, Homo Sapiens
gauaguuuacugaagcacaaucucuuauacua

SEQ ID NO: 95821 - RNA, 32 nt, Homo Sapiens
cauuuuugguaugagcaacucuauucauuccu

SEQ ID NO: 95822 - RNA, 32 nt, Homo Sapiens
uuaugaacagggugacuguuuccccaucggcc

SEQ ID NO: 95823 - RNA, 32 nt, Homo Sapiens
cucacacugcgugggagggacugggucacuau

SEQ ID NO: 95824 - RNA, 32 nt, Homo Sapiens
uuguaacgggaaaugucagaaauacugcaagc

SEQ ID NO: 95825 - RNA, 32 nt, Homo Sapiens
cuccccgccucgcgcggacugucucgugcggg

SEQ ID NO: 95826 - RNA, 32 nt, Homo Sapiens
ccucaccagccugggcagcagcaagaacuauu

SEQ ID NO: 95827 - RNA, 32 nt, Homo Sapiens
acugagauggggcagggaaaaggugggcuaug

SEQ ID NO: 95828 - RNA, 32 nt, Homo Sapiens
ucuccuuuuuauuuuaggcacuguucaauacu

SEQ ID NO: 95829 - RNA, 32 nt, Homo Sapiens
gaaaaacuuuauucuccucuuuugaaaaggua

SEQ ID NO: 95830 - RNA, 32 nt, Homo Sapiens
cugaggccccccugccucccccuccccuuccu

SEQ ID NO: 95831 - RNA, 29 nt, Homo Sapiens
aacugauaaaguuuguaaagugcuauaaa

SEQ ID NO: 95832 - RNA, 29 nt, Homo Sapiens
ggacaugucuccugcagcugcugcugagc

SEQ ID NO: 95833 - RNA, 32 nt, Homo Sapiens
acgggaggcuucaggaauauuccuccuggcau

SEQ ID NO: 95834 - RNA, 32 nt, Homo Sapiens
gaagaccuggagaggaggggcucuggcugcug

SEQ ID NO: 95835 - RNA, 32 nt, Homo Sapiens
uagccgcgaaguucuaguucuugcugccgguc

SEQ ID NO: 95836 - RNA, 32 nt, Homo Sapiens
uaauaguauugguauuauuaaaaacuaauuug

SEQ ID NO: 95837 - RNA, 32 nt, Homo Sapiens
cgucucguuccugaucgaacgugguggugaga

SEQ ID NO: 95838 - RNA, 32 nt, Homo Sapiens
aucgguacauuuucuucucauggcauuuagau

SEQ ID NO: 95839 - RNA, 32 nt, Homo Sapiens
uuuucuuaagcauauuaauuauagacauucaa

SEQ ID NO: 95840 - RNA, 32 nt, Homo Sapiens
ggaaucugacuuaccuggaccgcuguccuugu

SEQ ID NO: 95841 - RNA, 32 nt, Homo Sapiens
acauauguauaaauaaagagugugaaucaagc

SEQ ID NO: 95842 - RNA, 32 nt, Homo Sapiens
gggaacaaccauuuuccaaccuuggcuuuaau

SEQ ID NO: 95843 - RNA, 32 nt, Homo Sapiens
uuauuuuaaaauuuauaaacaagucacuuaaa

SEQ ID NO: 95844 - RNA, 30 nt, Homo Sapiens
aaaaagaauauccgggcccagcuggcacgc

SEQ ID NO: 95845 - RNA, 32 nt, Homo Sapiens
ggaaaauaaccaaaagagagggagaaugugac

SEQ ID NO: 95846 - RNA, 32 nt, Homo Sapiens
guggcuccuggccaaguguucucuguuuuccu

SEQ ID NO: 95847 - RNA, 32 nt, Homo Sapiens
aggagccgccccugcgggcucgagggcgcgcu

SEQ ID NO: 95848 - RNA, 32 nt, Homo Sapiens
agugagcggccccugggcaccaccagaaaaca

SEQ ID NO: 95849 - RNA, 32 nt, Homo Sapiens
gccgcggcucugcggagaaaccacgaccaccg

SEQ ID NO: 95850 - RNA, 32 nt, Homo Sapiens
gcgucagcgcgguggccagcgcgcagaggcgg

SEQ ID NO: 95851 - RNA, 32 nt, Homo Sapiens
aaggugggaaccgggggccgggcgcgguggcu

SEQ ID NO: 95852 - RNA, 32 nt, Homo Sapiens
cuucuggcugcgguuaaaagggcucaccagcc

SEQ ID NO: 95853 - RNA, 32 nt, Homo Sapiens
cuggcaaaaggucuuguuuaaaucagcuguuu

SEQ ID NO: 95854 - RNA, 31 nt, Homo Sapiens
ugaccaacacggagaaaccccgucucuacua

SEQ ID NO: 95855 - RNA, 32 nt, Homo Sapiens
uaauaauggcaguacuaagagauuuauaauca

SEQ ID NO: 95856 - RNA, 32 nt, Homo Sapiens
cguucugcccagccggcccccaccucggcugc

SEQ ID NO: 95857 - RNA, 32 nt, Homo Sapiens
guuucaggugauccuccugccucagccucuua

SEQ ID NO: 95858 - RNA, 32 nt, Homo Sapiens
ucuccggcgcgcucccuggcccggcccgggac

SEQ ID NO: 95859 - RNA, 32 nt, Homo Sapiens
ccucauuuucuuuuaaaauugaauaaaauuuc

SEQ ID NO: 95860 - RNA, 32 nt, Homo Sapiens
gccgaaccucuagccgaugccggcgccgccgc

SEQ ID NO: 95861 - RNA, 32 nt, Homo Sapiens
gucccgggggccugaaaucggcagcuucccgg

SEQ ID NO: 95862 - RNA, 32 nt, Homo Sapiens
ugccucaugcuuccuggggccuccagcagcuc

SEQ ID NO: 95863 - RNA, 32 nt, Homo Sapiens
aaccucaaacuuuuacguaacaucucagggga

SEQ ID NO: 95864 - RNA, 32 nt, Homo Sapiens
guaguuguuguccaaaggaagucugaucugug

SEQ ID NO: 95865 - RNA, 32 nt, Homo Sapiens
gcaauuuuaaauuuauauugugugugauguuc

SEQ ID NO: 95866 - RNA, 32 nt, Homo Sapiens
guaacuuccacagaaaacacaaacauguauuu

SEQ ID NO: 95867 - RNA, 32 nt, Homo Sapiens
gcaggguaaguacucaaaaauauuuguugagu

SEQ ID NO: 95868 - RNA, 32 nt, Homo Sapiens
gcccagcccgucuccucuucccuucccuggcc

SEQ ID NO: 95869 - RNA, 32 nt, Homo Sapiens
accuuugggcuuaaauaucuuuuuccuagaca

SEQ ID NO: 95870 - RNA, 32 nt, Homo Sapiens
auaucguauaagugacucauccugucugcuaa

SEQ ID NO: 95871 - RNA, 31 nt, Homo Sapiens
uuauaacuccugagaaagucauucacauaag

SEQ ID NO: 95872 - RNA, 32 nt, Homo Sapiens
ucuuuucuuugcuacaucuuagugacaauaaa

SEQ ID NO: 95873 - RNA, 32 nt, Homo Sapiens
ugccuauaauuccagcacuuuggagggccaag

SEQ ID NO: 95874 - RNA, 28 nt, Homo Sapiens
gcggguccgcggccgcggcgggaacaug

SEQ ID NO: 95875 - RNA, 32 nt, Homo Sapiens
gcagagccuuggagugcugaaggaggugcugu

SEQ ID NO: 95876 - RNA, 32 nt, Homo Sapiens
uacagaggccccacagaaggcucagggcaccg

SEQ ID NO: 95877 - RNA, 32 nt, Homo Sapiens
aguggccgguugccacucuccuccccucccuc

SEQ ID NO: 95878 - RNA, 32 nt, Homo Sapiens
guguuuuuaaaauaaacucacccgaaacgucc

SEQ ID NO: 95879 - RNA, 32 nt, Homo Sapiens
accuucagcagggcuguggcuaccauguucuc

SEQ ID NO: 95880 - RNA, 32 nt, Homo Sapiens
gacgccuggaagcucacagaacuugggucugg

SEQ ID NO: 95881 - RNA, 32 nt, Homo Sapiens
guggguggagggcaggcagguggcuggguagg

SEQ ID NO: 95882 - RNA, 32 nt, Homo Sapiens
cggugauuuguuugucuuucugauagguugaa

SEQ ID NO: 95883 - RNA, 32 nt, Homo Sapiens
cagccccgcagcgcaucccggucgccgcccag

SEQ ID NO: 95884 - RNA, 32 nt, Homo Sapiens
uacuaagaucauaaacccuuggaaaucugugu

SEQ ID NO: 95885 - RNA, 32 nt, Homo Sapiens
aaacuguagaugguugaacuacuagugacuuu

SEQ ID NO: 95886 - RNA, 32 nt, Homo Sapiens
ugaccuuucuaaaacagcauuuuuaaagagcu

SEQ ID NO: 95887 - RNA, 32 nt, Homo Sapiens
uuucuagagaauaagagugcaguguaaaaaug

SEQ ID NO: 95888 - RNA, 32 nt, Homo Sapiens
gccuuugaacuucaggacuuguaccaggaggc

SEQ ID NO: 95889 - RNA, 32 nt, Homo Sapiens
auguuugcaauaaaggaaagguuuguggcgcc

SEQ ID NO: 95890 - RNA, 32 nt, Homo Sapiens
gaauucagcuuggaagcagaaagaaugaccca

SEQ ID NO: 95891 - RNA, 32 nt, Homo Sapiens
ccugguuguggggaccaagucugugggccuca

SEQ ID NO: 95892 - RNA, 32 nt, Homo Sapiens
cgggaacuuaggagccugcucgccuacaaaaa

SEQ ID NO: 95893 - RNA, 32 nt, Homo Sapiens
gcgggacaauuugaagcaaagggaggaagacu

SEQ ID NO: 95894 - RNA, 32 nt, Homo Sapiens
guggggaucuguccgggacugugcagucugaa

SEQ ID NO: 95895 - RNA, 32 nt, Homo Sapiens
aagauauugauguaauaacauuacugaguccc

SEQ ID NO: 95896 - RNA, 32 nt, Homo Sapiens
gucacugucauucggggacguggcugugggcu

SEQ ID NO: 95897 - RNA, 32 nt, Homo Sapiens
gcucaugcccauggaggccgggacgucaaggg

SEQ ID NO: 95898 - RNA, 32 nt, Homo Sapiens
aaacuucagcuuccucuagcccggcccucucu

SEQ ID NO: 95899 - RNA, 32 nt, Homo Sapiens
gaguccccaucccauucucuagccucaccuau

SEQ ID NO: 95900 - RNA, 32 nt, Homo Sapiens
ccgccggugagccgcauggagccccgggcggc

SEQ ID NO: 95901 - RNA, 32 nt, Homo Sapiens
agaaaguuuucuuugaggaaggagaggagagg

SEQ ID NO: 95902 - RNA, 32 nt, Homo Sapiens
auauuguaaaauuuagacugaugauacuaaca

SEQ ID NO: 95903 - RNA, 26 nt, Homo Sapiens
aauggacacaggaaguaaaaacaaag

SEQ ID NO: 95904 - RNA, 32 nt, Homo Sapiens
gagauuucuuugaucuuauaggaauagaucca

SEQ ID NO: 95905 - RNA, 32 nt, Homo Sapiens
aaaccacuugccauccuguuagauugccaguu

SEQ ID NO: 95906 - RNA, 32 nt, Homo Sapiens
aggcuguaccucugcccuuccuuuucucauca

SEQ ID NO: 95907 - RNA, 32 nt, Homo Sapiens
aauuuaucuuauuauguauuaaguauacagga

SEQ ID NO: 95908 - RNA, 32 nt, Homo Sapiens
acggaccuggcgacuccaccguguucgggucu

SEQ ID NO: 95909 - RNA, 32 nt, Homo Sapiens
ucaagcaggaggagguggguggggugaaggag

SEQ ID NO: 95910 - RNA, 32 nt, Homo Sapiens
uuucuuccuugacaggccuuggcuccaucucc

SEQ ID NO: 95911 - RNA, 32 nt, Homo Sapiens
gaccaccuuacaugcuggucuuaguuauuguu

SEQ ID NO: 95912 - RNA, 32 nt, Homo Sapiens
ccgcggucggcggcagcgcucuccuaagcucu

SEQ ID NO: 95913 - RNA, 32 nt, Homo Sapiens
uuuugaccaaaaugcugauagugauguggaca

SEQ ID NO: 95914 - RNA, 32 nt, Homo Sapiens
gccagcuuccgcguuggaggcacguguucaga

SEQ ID NO: 95915 - RNA, 32 nt, Homo Sapiens
ugaggcaucauuccugggccagagucgugucc

SEQ ID NO: 95916 - RNA, 32 nt, Homo Sapiens
aguauuuccuucccuauaugucacagagggca

SEQ ID NO: 95917 - RNA, 32 nt, Homo Sapiens
ggcaccaacaucaucauuggcuccaucgcugg

SEQ ID NO: 95918 - RNA, 32 nt, Homo Sapiens
agcagcgccccggccaucgccgggcuucgcac

SEQ ID NO: 95919 - RNA, 32 nt, Homo Sapiens
cuauucauaaugaugaaauuucaacuacauac

SEQ ID NO: 95920 - RNA, 32 nt, Homo Sapiens
uacauacaagauaguauuaggugcaacauuug

SEQ ID NO: 95921 - RNA, 32 nt, Homo Sapiens
ucaauuaaacuucuuucuuuuauaaauuaccc

SEQ ID NO: 95922 - RNA, 32 nt, Homo Sapiens
cgucuuucuccaugaggcucguggccagaacu

SEQ ID NO: 95923 - RNA, 32 nt, Homo Sapiens
ggggcuuuuuaaaagaaaacuauuuugaugaa

SEQ ID NO: 95924 - RNA, 32 nt, Homo Sapiens
agcaauauugccugugcuucucuucuuuauug

SEQ ID NO: 95925 - RNA, 32 nt, Homo Sapiens
gauauaaaacaguccauacuugagagaaaaac

SEQ ID NO: 95926 - RNA, 32 nt, Homo Sapiens
auaagaaaacaucuuugcaauauuuacuuuug

SEQ ID NO: 95927 - RNA, 32 nt, Homo Sapiens
gguuagcgggccgggcgggggaucggggguua

SEQ ID NO: 95928 - RNA, 32 nt, Homo Sapiens
cuggaauuuucuuuuucuuuuucuuuuucuuu

SEQ ID NO: 95929 - RNA, 32 nt, Homo Sapiens
ggucauguagagguuguaguagaauggcuuuu

SEQ ID NO: 95930 - RNA, 32 nt, Homo Sapiens
ccagcuuaguuauaaugaauaauaugaaccuc

SEQ ID NO: 95931 - RNA, 32 nt, Homo Sapiens
uuuucauagucauuacucuuuacaaugggagu

SEQ ID NO: 95932 - RNA, 32 nt, Homo Sapiens
acagaaacccucaaccauagcaugcaggaaca

SEQ ID NO: 95933 - RNA, 32 nt, Homo Sapiens
gagggggcgggggccguggcggcuuuaaagcg

SEQ ID NO: 95934 - RNA, 31 nt, Homo Sapiens
acggagaaaaguaguaccgugagauguguag

SEQ ID NO: 95935 - RNA, 32 nt, Homo Sapiens
ggggugcacugacggagaugcggacuccuggg

SEQ ID NO: 95936 - RNA, 32 nt, Homo Sapiens
ggcuguucuguagcuggagagcuccgugggug

SEQ ID NO: 95937 - RNA, 32 nt, Homo Sapiens
gacaggggcaaaguugcugaaaaaguuuuggu

SEQ ID NO: 95938 - RNA, 32 nt, Homo Sapiens
cuaaagaaggauuuuacucccccagcccagaa

SEQ ID NO: 95939 - RNA, 32 nt, Homo Sapiens
ccaagugcuucauguuagccagcaaaucugac

SEQ ID NO: 95940 - RNA, 32 nt, Homo Sapiens
accucaggcucuuuguccuaauaaaaagcgca

SEQ ID NO: 95941 - RNA, 30 nt, Homo Sapiens
ugucucuggugcugcauccagcacgguggc

SEQ ID NO: 95942 - RNA, 32 nt, Homo Sapiens
aaaaccauguuugggaauacaugugaagagcg

SEQ ID NO: 95943 - RNA, 32 nt, Homo Sapiens
aggccaggcagaagcugugcucugaagcuagg

SEQ ID NO: 95944 - RNA, 32 nt, Homo Sapiens
cagaggcauggaggagggaggcgugggauggg

SEQ ID NO: 95945 - RNA, 32 nt, Homo Sapiens
uauucugggcuuugaauuccauaaugcuccca

SEQ ID NO: 95946 - RNA, 32 nt, Homo Sapiens
gaagacaacucagauugccauuuuaaauaaag

SEQ ID NO: 95947 - RNA, 32 nt, Homo Sapiens
aagcauggaaauucuuguuugggggaucuugg

SEQ ID NO: 95948 - RNA, 32 nt, Homo Sapiens
ccucccacagaaucuauuucugaugaauauga

SEQ ID NO: 95949 - RNA, 32 nt, Homo Sapiens
gacuggggaaggucuugugucuggaagaccca

SEQ ID NO: 95950 - RNA, 32 nt, Homo Sapiens
agcccgucuuccggaauuucucaacuaaauuu

SEQ ID NO: 95951 - RNA, 32 nt, Homo Sapiens
uuagaauguaguuuuguuauauucccagcauu

SEQ ID NO: 95952 - RNA, 32 nt, Homo Sapiens
gccucccuuguggaugggaggaggcgggaucu

SEQ ID NO: 95953 - RNA, 32 nt, Homo Sapiens
cgccguuaucccgggcccgccggcccugagcu

SEQ ID NO: 95954 - RNA, 32 nt, Homo Sapiens
ccgccugggcugcagcagaucgcgggagaacg

SEQ ID NO: 95955 - RNA, 32 nt, Homo Sapiens
gcccuggauauuuaaaucuccuccucuucuuc

SEQ ID NO: 95956 - RNA, 32 nt, Homo Sapiens
ccucacugcauggucccuggggugucuggcuc

SEQ ID NO: 95957 - RNA, 32 nt, Homo Sapiens
ggggagugugggcaugggaggggucugaaaau

SEQ ID NO: 95958 - RNA, 32 nt, Homo Sapiens
ccccugucucccgcuccgcagccccgggcacg

SEQ ID NO: 95959 - RNA, 32 nt, Homo Sapiens
cccacacucugagcggccggccggccccgcca

SEQ ID NO: 95960 - RNA, 32 nt, Homo Sapiens
aggcuauggcugaguucucuaagacucagggu

SEQ ID NO: 95961 - RNA, 32 nt, Homo Sapiens
guuccuuuuacuaccacucuugaguccauaua

SEQ ID NO: 95962 - RNA, 32 nt, Homo Sapiens
gugucuucucucaauuacauagcaauuucucc

SEQ ID NO: 95963 - RNA, 32 nt, Homo Sapiens
aagggugaugcagcucaccucccuccuguuca

SEQ ID NO: 95964 - RNA, 32 nt, Homo Sapiens
ggggauggggacgaggaugaagcuuccucgac

SEQ ID NO: 95965 - RNA, 32 nt, Homo Sapiens
cucauagucaaucccaguugcuuuuccccaga

SEQ ID NO: 95966 - RNA, 32 nt, Homo Sapiens
ggggcugcgacaccaucuggcuccucacaggg

SEQ ID NO: 95967 - RNA, 32 nt, Homo Sapiens
aaccugaagaucugaggcaagcuggacaggag

SEQ ID NO: 95968 - RNA, 32 nt, Homo Sapiens
gaucccccucccccaacacacaugcuuuuauu

SEQ ID NO: 95969 - RNA, 32 nt, Homo Sapiens
gucgugccugacgugcaccuuccucgggcacu

SEQ ID NO: 95970 - RNA, 32 nt, Homo Sapiens
ugaggaugaugaugauaacaaugaaugccugc

SEQ ID NO: 95971 - RNA, 32 nt, Homo Sapiens
auaaccucccacaugagaaggaggcggaggca

SEQ ID NO: 95972 - RNA, 32 nt, Homo Sapiens
gagaauguuccauguguugaugagaugacugu

SEQ ID NO: 95973 - RNA, 32 nt, Homo Sapiens
auaagaauugaauugugcuuguccagauauga

SEQ ID NO: 95974 - RNA, 32 nt, Homo Sapiens
cuaugaaguuguuauaguuuaagggacauucu

SEQ ID NO: 95975 - RNA, 32 nt, Homo Sapiens
acuuaaaaaauaucacugugaacaacuuacag

SEQ ID NO: 95976 - RNA, 32 nt, Homo Sapiens
auauuuagaauguaccauauuuuuuguaaauu

SEQ ID NO: 95977 - RNA, 32 nt, Homo Sapiens
ucagacuuaaguuagacccuuaucuuuuauau

SEQ ID NO: 95978 - RNA, 32 nt, Homo Sapiens
ucgcuccagcucagagcucccggagccgcccg

SEQ ID NO: 95979 - RNA, 32 nt, Homo Sapiens
gagcggccgugcguccagcccgggccucucca

SEQ ID NO: 95980 - RNA, 31 nt, Homo Sapiens
ucaucaacaaauuguauuccuuauugugaaa

SEQ ID NO: 95981 - RNA, 32 nt, Homo Sapiens
ccccaucagcucagccaaccauagcagauccc

SEQ ID NO: 95982 - RNA, 32 nt, Homo Sapiens
gccucucagugcauuuggaacuugcuuaugca

SEQ ID NO: 95983 - RNA, 32 nt, Homo Sapiens
ugucucuguguguuuauuugccugccagugcu

SEQ ID NO: 95984 - RNA, 32 nt, Homo Sapiens
aggaugauguguuaacaguauuaggguggaag

SEQ ID NO: 95985 - RNA, 32 nt, Homo Sapiens
uauauaauuuuccuguuuaacaacaagagugu

SEQ ID NO: 95986 - RNA, 32 nt, Homo Sapiens
uuccuuuuguuacuuuucauuugccucuaauu

SEQ ID NO: 95987 - RNA, 32 nt, Homo Sapiens
ccuacaaaaauauuucagaaauucuauuuaag

SEQ ID NO: 95988 - RNA, 32 nt, Homo Sapiens
cucccucggcccgugguccccagcuggugacu

SEQ ID NO: 95989 - RNA, 32 nt, Homo Sapiens
gagcucaacuaaaaguggcauagagaauacac

SEQ ID NO: 95990 - RNA, 32 nt, Homo Sapiens
cuuagcuguggaucggggaggggggugggggg

SEQ ID NO: 95991 - RNA, 32 nt, Homo Sapiens
aaugucuuaaagggaaucauuuuuguaggaag

SEQ ID NO: 95992 - RNA, 32 nt, Homo Sapiens
cuaggucuccgccagggcuggccucaguuucu

SEQ ID NO: 95993 - RNA, 32 nt, Homo Sapiens
ucaacccucccccaagcucccaauacaagccc

SEQ ID NO: 95994 - RNA, 32 nt, Homo Sapiens
gucgcagccccggcgccccgaagcgggaaaaa

SEQ ID NO: 95995 - RNA, 32 nt, Homo Sapiens
aacuaguauuggauugaugaauagucuuccau

SEQ ID NO: 95996 - RNA, 32 nt, Homo Sapiens
uacaaaagauucuaaggccuaguaguauuuaa

SEQ ID NO: 95997 - RNA, 32 nt, Homo Sapiens
ggggaagacagagaaaagcaaacacauuccuc

SEQ ID NO: 95998 - RNA, 32 nt, Homo Sapiens
cuuucuguccgaauccaauaccaguggucuaa

SEQ ID NO: 95999 - RNA, 32 nt, Homo Sapiens
caagugcccggaaguucacugauccuucagaa

SEQ ID NO: 96000 - RNA, 32 nt, Homo Sapiens
auuuuggggagccaccugaagguugauguaua

SEQ ID NO: 96001 - RNA, 28 nt, Homo Sapiens
aaaggauuuacaggagauaaguggcucu

SEQ ID NO: 96002 - RNA, 32 nt, Homo Sapiens
agcagguggcgcuggacgcgcaacugacaagg

SEQ ID NO: 96003 - RNA, 32 nt, Homo Sapiens
uggacacaaaaauaugcuauguagugccuugg

SEQ ID NO: 96004 - RNA, 32 nt, Homo Sapiens
gacugcagagccggggcugggcuaggcgcgcg

SEQ ID NO: 96005 - RNA, 32 nt, Homo Sapiens
aaccaaacuuucuuuacccagugcaauagauu

SEQ ID NO: 96006 - RNA, 32 nt, Homo Sapiens
gaccgcucacccuccuccuccccucucacccc

SEQ ID NO: 96007 - RNA, 32 nt, Homo Sapiens
ucccuuugcuauugaacuuuggaccauuucca

SEQ ID NO: 96008 - RNA, 32 nt, Homo Sapiens
gaauguguucccuccgcuggugucgugguggu

SEQ ID NO: 96009 - RNA, 32 nt, Homo Sapiens
gaaagcaauggagaauguguccugcugaaugc

SEQ ID NO: 96010 - RNA, 32 nt, Homo Sapiens
cagacccuggcuggaagccagaacgcagacug

SEQ ID NO: 96011 - RNA, 32 nt, Homo Sapiens
gggaaacaaggugguucucacacuggaaauga

SEQ ID NO: 96012 - RNA, 32 nt, Homo Sapiens
ugcagugucgcuuccuuuugcauauguugcua

SEQ ID NO: 96013 - RNA, 32 nt, Homo Sapiens
auucuaaucaucugcaguucuuuuuguacacu

SEQ ID NO: 96014 - RNA, 32 nt, Homo Sapiens
ucuugcgcugcucagcugggaacaucgucuca

SEQ ID NO: 96015 - RNA, 32 nt, Homo Sapiens
uauuuaaguaaauggucuaauuucuacauaau

SEQ ID NO: 96016 - RNA, 32 nt, Homo Sapiens
uuacuggagaauaaaucauuuauuuacaugug

SEQ ID NO: 96017 - RNA, 32 nt, Homo Sapiens
guccuguaggggagacaaaaccagauuggggg

SEQ ID NO: 96018 - RNA, 31 nt, Homo Sapiens
cagcagaugcuucuaagucagaauaggcugc

SEQ ID NO: 96019 - RNA, 32 nt, Homo Sapiens
gcgcgccgcccgcuccucacgugucccucccg

SEQ ID NO: 96020 - RNA, 32 nt, Homo Sapiens
agugccuuuugugaaagugucaucacgggucc

SEQ ID NO: 96021 - RNA, 32 nt, Homo Sapiens
guaauaggccugggucccacucacccaugccg

SEQ ID NO: 96022 - RNA, 32 nt, Homo Sapiens
uaucuccuuaaaccucuuccucauucccucgg

SEQ ID NO: 96023 - RNA, 32 nt, Homo Sapiens
ugcaauuuuggagaugaaaaaauacucauuuc

SEQ ID NO: 96024 - RNA, 32 nt, Homo Sapiens
auuagaagaaagauuacaacaacuugugaugu

SEQ ID NO: 96025 - RNA, 32 nt, Homo Sapiens
auaagauguuuuauguucaaugccuaauuucu

SEQ ID NO: 96026 - RNA, 32 nt, Homo Sapiens
aucuauaacuugaacgaaaugucaaggaggca

SEQ ID NO: 96027 - RNA, 32 nt, Homo Sapiens
aucucugacaggcuaggagagaagggacuggg

SEQ ID NO: 96028 - RNA, 32 nt, Homo Sapiens
gggccgaggaggggcggggaaggucagccagg

SEQ ID NO: 96029 - RNA, 32 nt, Homo Sapiens
auuucuggucccacccaccucugccuccgcca

SEQ ID NO: 96030 - RNA, 32 nt, Homo Sapiens
ugcuggaucccaugggaucgaugucugagguc

SEQ ID NO: 96031 - RNA, 32 nt, Homo Sapiens
ccaagguguuuccauuucucaaucagugcagu

SEQ ID NO: 96032 - RNA, 32 nt, Homo Sapiens
gucaaaaacaacauuccauaaaaggccaucac

SEQ ID NO: 96033 - RNA, 32 nt, Homo Sapiens
gccacugcauucaaauuccaauguguacuuca

SEQ ID NO: 96034 - RNA, 32 nt, Homo Sapiens
gggaugggcucccacccuccccugaggauggc

SEQ ID NO: 96035 - RNA, 32 nt, Homo Sapiens
cauuucuccggaagcugagccagucuccuggu

SEQ ID NO: 96036 - RNA, 32 nt, Homo Sapiens
gacaagggccugcuguccagcgcacggaggca

SEQ ID NO: 96037 - RNA, 32 nt, Homo Sapiens
cccgcuccaccggcaccagugccucgcuccau

SEQ ID NO: 96038 - RNA, 32 nt, Homo Sapiens
accuucuaucuguguccggcggccccagcucc

SEQ ID NO: 96039 - RNA, 32 nt, Homo Sapiens
auugcugcuuggucucucuccucuuccucccc

SEQ ID NO: 96040 - RNA, 32 nt, Homo Sapiens
guaagcuuccccagcccugccugagcagccuu

SEQ ID NO: 96041 - RNA, 32 nt, Homo Sapiens
cacaaccugaggcccaggaucugcucugugcc

SEQ ID NO: 96042 - RNA, 32 nt, Homo Sapiens
cacacucagcacuccaggaucccagcgauguc

SEQ ID NO: 96043 - RNA, 32 nt, Homo Sapiens
cugacgccuucgagcgcggcccggggcccgga

SEQ ID NO: 96044 - RNA, 32 nt, Homo Sapiens
ccuggaugaauccguucugugcuuccuuuucc

SEQ ID NO: 96045 - RNA, 32 nt, Homo Sapiens
aggacggcuccugggcagcugggcccuccugg

SEQ ID NO: 96046 - RNA, 32 nt, Homo Sapiens
aauauuuucugcaaugguuuguaggaauuuua

SEQ ID NO: 96047 - RNA, 32 nt, Homo Sapiens
auacuuauauaaaauauuaucuugcccaacug

SEQ ID NO: 96048 - RNA, 32 nt, Homo Sapiens
agugcgccgccguccagccgcgcgcguccucc

SEQ ID NO: 96049 - RNA, 32 nt, Homo Sapiens
gaggagaaguaggaaguuuucuuaaagggcca

SEQ ID NO: 96050 - RNA, 32 nt, Homo Sapiens
gccuggccagcauggugaaaccccaucucuac

SEQ ID NO: 96051 - RNA, 32 nt, Homo Sapiens
ggcaaaacaaaacaagcaugauugaagagcag

SEQ ID NO: 96052 - RNA, 32 nt, Homo Sapiens
ugcagggguguggggggcgcagggguguggcu

SEQ ID NO: 96053 - RNA, 32 nt, Homo Sapiens
accguguguuugcaguaaguugugagauguua

SEQ ID NO: 96054 - RNA, 32 nt, Homo Sapiens
agucgccgacucagcgcccaagagggucgccu

SEQ ID NO: 96055 - RNA, 32 nt, Homo Sapiens
acaaggacagacagcaggcacggcccgcagcc

SEQ ID NO: 96056 - RNA, 31 nt, Homo Sapiens
aacugggaacgagagagccaccgaaacagaa

SEQ ID NO: 96057 - RNA, 32 nt, Homo Sapiens
ggagcgagccggugcugcugcaggcugaggcu

SEQ ID NO: 96058 - RNA, 32 nt, Homo Sapiens
aauaaauggaauacuuuuuuuuuuuuuaaaga

SEQ ID NO: 96059 - RNA, 32 nt, Homo Sapiens
gagaaggauggaagaaggagccaggcaccgaa

SEQ ID NO: 96060 - RNA, 32 nt, Homo Sapiens
agcagguguccacgcguccggccguccauccg

SEQ ID NO: 96061 - RNA, 32 nt, Homo Sapiens
aggcaggccucccacucagagucugggucuca

SEQ ID NO: 96062 - RNA, 32 nt, Homo Sapiens
aaaaaacaagcucugggugcugcuuuguucuc

SEQ ID NO: 96063 - RNA, 32 nt, Homo Sapiens
uccaaaugggaacuaucuccaaagugcuaaau

SEQ ID NO: 96064 - RNA, 32 nt, Homo Sapiens
ccuuuacccgcgggaagggggcggggcuuccc

SEQ ID NO: 96065 - RNA, 32 nt, Homo Sapiens
ucccggcgcccccuccucuccucccaccggcc

SEQ ID NO: 96066 - RNA, 32 nt, Homo Sapiens
ggggaaggcuaugugguaagcucuacuaaaug

SEQ ID NO: 96067 - RNA, 32 nt, Homo Sapiens
caaagucucgcagcaccgccguggugagucug

SEQ ID NO: 96068 - RNA, 32 nt, Homo Sapiens
cuuucucaaccucaccugccccggugggaugc

SEQ ID NO: 96069 - RNA, 32 nt, Homo Sapiens
acgcuauaaaagacugucguaguaaaagagau

SEQ ID NO: 96070 - RNA, 32 nt, Homo Sapiens
ucaaagaacugaaagcacuagagcagccuugg

SEQ ID NO: 96071 - RNA, 32 nt, Homo Sapiens
cauauauuuccacuucuucauucucucgguau

SEQ ID NO: 96072 - RNA, 32 nt, Homo Sapiens
cuagcagcugucugaaauugguucgucuguuu

SEQ ID NO: 96073 - RNA, 32 nt, Homo Sapiens
uaacuccauuccaggugacauggauaaagagc

SEQ ID NO: 96074 - RNA, 32 nt, Homo Sapiens
gucagauuuauuuguuugauuuucauaucccg

SEQ ID NO: 96075 - RNA, 32 nt, Homo Sapiens
gcggcagcgcggcgguggggccccaagcuggg

SEQ ID NO: 96076 - RNA, 32 nt, Homo Sapiens
uucugguccuuggggccugggcggcgauuccc

SEQ ID NO: 96077 - RNA, 32 nt, Homo Sapiens
ggaugguacaagcagccauggcaccucagugu

SEQ ID NO: 96078 - RNA, 32 nt, Homo Sapiens
uuuuaaaaaaucuauuuauuuauuuauguaga

SEQ ID NO: 96079 - RNA, 32 nt, Homo Sapiens
cccagaggaacacacccacaccaggccucagg

SEQ ID NO: 96080 - RNA, 32 nt, Homo Sapiens
cugcuaguggggaggccacacccacaagcgcu

SEQ ID NO: 96081 - RNA, 32 nt, Homo Sapiens
cucccucaugcaagggugcguguacacauaca

SEQ ID NO: 96082 - RNA, 31 nt, Homo Sapiens
aaccccccgccggucggggccaggccaggcc

SEQ ID NO: 96083 - RNA, 32 nt, Homo Sapiens
cguggcucuguguguuuuuaaaaauuguccac

SEQ ID NO: 96084 - RNA, 32 nt, Homo Sapiens
uauugauaagguccccuugguguugccuucuu

SEQ ID NO: 96085 - RNA, 32 nt, Homo Sapiens
ucugcaugaagucaccaaaugccagugauucu

SEQ ID NO: 96086 - RNA, 32 nt, Homo Sapiens
gccccuccaccucaggccccagccccugccuc

SEQ ID NO: 96087 - RNA, 32 nt, Homo Sapiens
ggagugaguucucggcggccgggcugcagucu

SEQ ID NO: 96088 - RNA, 32 nt, Homo Sapiens
cauuguuugggguuuggaagugucugcacugg

SEQ ID NO: 96089 - RNA, 32 nt, Homo Sapiens
cauuaauaacaaguuaaauuauucuuuagugg

SEQ ID NO: 96090 - RNA, 32 nt, Homo Sapiens
uucucuccuguguuuuuucagcauuaucaaug

SEQ ID NO: 96091 - RNA, 32 nt, Homo Sapiens
gcuguguugcggcuccggcggcggcggagacu

SEQ ID NO: 96092 - RNA, 32 nt, Homo Sapiens
cauagguacaguggcaccugagguaggaggca

SEQ ID NO: 96093 - RNA, 32 nt, Homo Sapiens
agggauugaccagaguaucuuuuacugauaug

SEQ ID NO: 96094 - RNA, 32 nt, Homo Sapiens
uaaucaagcugauacuucaugauuaaauuauu

SEQ ID NO: 96095 - RNA, 32 nt, Homo Sapiens
ugcccuguucuucuucaugcuguugcugcuug

SEQ ID NO: 96096 - RNA, 32 nt, Homo Sapiens
ugguuccuguugugcucuuguaaaagaaaaau

SEQ ID NO: 96097 - RNA, 32 nt, Homo Sapiens
gcucaggcuuuaggaucagagagcagcagauu

SEQ ID NO: 96098 - RNA, 32 nt, Homo Sapiens
cuuccagagcacuugaauaaaaugagaaucac

SEQ ID NO: 96099 - RNA, 32 nt, Homo Sapiens
aaaccacagugagccugagagagacggcgauu

SEQ ID NO: 96100 - RNA, 32 nt, Homo Sapiens
cuugggaauauguuaauuucaggcagcauucc

SEQ ID NO: 96101 - RNA, 32 nt, Homo Sapiens
guaaugucagacacuggcaaacaucauauguu

SEQ ID NO: 96102 - RNA, 32 nt, Homo Sapiens
ucacgaaugcuguuaauauuuauucuguauug

SEQ ID NO: 96103 - RNA, 27 nt, Homo Sapiens
aggcuuacuaucuacagcccccaaagu

SEQ ID NO: 96104 - RNA, 32 nt, Homo Sapiens
uaccuacagagggguccauacggcguuguucu

SEQ ID NO: 96105 - RNA, 32 nt, Homo Sapiens
gccccugccgcucccacccccacccaucuggg

SEQ ID NO: 96106 - RNA, 32 nt, Homo Sapiens
uccauuaaaagcucuguuuugguuaugaaguc

SEQ ID NO: 96107 - RNA, 32 nt, Homo Sapiens
aacauuguauuuuuuuuuuuuaacgaugcagu

SEQ ID NO: 96108 - RNA, 32 nt, Homo Sapiens
aaaggagcucacauuuauggaauggaugaauc

SEQ ID NO: 96109 - RNA, 32 nt, Homo Sapiens
auaaauuugacagauagcuauuuacauagccu

SEQ ID NO: 96110 - RNA, 32 nt, Homo Sapiens
accuaagcagcaugcauuaauugaaccuuaaa

SEQ ID NO: 96111 - RNA, 32 nt, Homo Sapiens
acuuuaaugaccuuaucaaugaccuuuacuaa

SEQ ID NO: 96112 - RNA, 32 nt, Homo Sapiens
gguggacacuuuuauagguacucugugucauu

SEQ ID NO: 96113 - RNA, 32 nt, Homo Sapiens
gcuuuugaaaagcacuuuaauuagauaaugua

SEQ ID NO: 96114 - RNA, 32 nt, Homo Sapiens
uuguaaucccagcuacucccaaggcugaggca

SEQ ID NO: 96115 - RNA, 32 nt, Homo Sapiens
aaggcgcgggcucggggcgccugcgggacggu

SEQ ID NO: 96116 - RNA, 32 nt, Homo Sapiens
auuacugacaagauuucucaagggcaggacca

SEQ ID NO: 96117 - RNA, 32 nt, Homo Sapiens
uuuuuccuuuuuucuuuuuuuuuuuuuugaga

SEQ ID NO: 96118 - RNA, 32 nt, Homo Sapiens
gcuggccgcgcgcgggaagccgcggaacugcg

SEQ ID NO: 96119 - RNA, 32 nt, Homo Sapiens
uguaggugggagagggccugggggcugggagg

SEQ ID NO: 96120 - RNA, 32 nt, Homo Sapiens
acuucaugggccuggguucuguugaguuuuuu

SEQ ID NO: 96121 - RNA, 32 nt, Homo Sapiens
uucuaccuggggaaauggaaaacagaggccac

SEQ ID NO: 96122 - RNA, 32 nt, Homo Sapiens
uggccgcccgcgagaaaguggugcugguguuu

SEQ ID NO: 96123 - RNA, 32 nt, Homo Sapiens
caaauguaauucggaucagauccucauccccu

SEQ ID NO: 96124 - RNA, 32 nt, Homo Sapiens
guguuggcggcaauggcaagauucccuugcug

SEQ ID NO: 96125 - RNA, 32 nt, Homo Sapiens
uggauuucaaaugguguguaacuucagcucca

SEQ ID NO: 96126 - RNA, 32 nt, Homo Sapiens
aagugggagggguggggguccaggcuggaggg

SEQ ID NO: 96127 - RNA, 32 nt, Homo Sapiens
cuuuuccagagcucaggaagccaggcuggagg

SEQ ID NO: 96128 - RNA, 32 nt, Homo Sapiens
cucacaaaauauauuucugauaaacauuaaga

SEQ ID NO: 96129 - RNA, 32 nt, Homo Sapiens
uaugggguuuuuucucuuuccuuuuuugugag

SEQ ID NO: 96130 - RNA, 32 nt, Homo Sapiens
ugaugucuguaauacauuuguaaacuuccaau

SEQ ID NO: 96131 - RNA, 32 nt, Homo Sapiens
uagucaucuucacaacaaaacuaugaguaagc

SEQ ID NO: 96132 - RNA, 32 nt, Homo Sapiens
uuccccagacucuucagggaaacuacuuagcu

SEQ ID NO: 96133 - RNA, 32 nt, Homo Sapiens
cuggaccgcgcgcugcacaaugcacuaccuuc

SEQ ID NO: 96134 - RNA, 32 nt, Homo Sapiens
aacaauauuuauaacauggaaaaaaaaaaaaa

SEQ ID NO: 96135 - RNA, 32 nt, Homo Sapiens
guugagugccauaaguuuguuuuccguuauuu

SEQ ID NO: 96136 - RNA, 32 nt, Homo Sapiens
ccauaggcgugagaguuuauuuuuguacaagg

SEQ ID NO: 96137 - RNA, 32 nt, Homo Sapiens
uauuccuugugacagcacagccauccagcauu

SEQ ID NO: 96138 - RNA, 32 nt, Homo Sapiens
ggacgagcgggcccagggcugagcccagcggc

SEQ ID NO: 96139 - RNA, 32 nt, Homo Sapiens
aauccgacagcccccaggagcagguccaggga

SEQ ID NO: 96140 - RNA, 32 nt, Homo Sapiens
ccuuuaguccacggacccccagagcaccccca

SEQ ID NO: 96141 - RNA, 32 nt, Homo Sapiens
ccagcuguacggagucuucccagagggccggc

SEQ ID NO: 96142 - RNA, 32 nt, Homo Sapiens
cacaaaauauguggaguaguaacuuaauaugu

SEQ ID NO: 96143 - RNA, 32 nt, Homo Sapiens
ggagaggcacacaugugcugcagccgugugug

SEQ ID NO: 96144 - RNA, 32 nt, Homo Sapiens
cgggucgcucgggcgcuguccaggcggagccg

SEQ ID NO: 96145 - RNA, 32 nt, Homo Sapiens
gucuggugggagagugcagacacacacggggc

SEQ ID NO: 96146 - RNA, 32 nt, Homo Sapiens
ugaaaauguauuaaguugucuaccauguuuuc

SEQ ID NO: 96147 - RNA, 32 nt, Homo Sapiens
cagcucccggggaugcccgggcggcucggagc

SEQ ID NO: 96148 - RNA, 32 nt, Homo Sapiens
gcgagccgucuuccccaggccugcguccgagu

SEQ ID NO: 96149 - RNA, 32 nt, Homo Sapiens
cucucccuuccuuccuucucagcccucgagga

SEQ ID NO: 96150 - RNA, 32 nt, Homo Sapiens
cagcaccaggagaggagucaggccgcgacugu

SEQ ID NO: 96151 - RNA, 32 nt, Homo Sapiens
gcugugaaugauaccuggccuuucucacuaug

SEQ ID NO: 96152 - RNA, 32 nt, Homo Sapiens
ucuaaaugucuaauauaaagggagaugcuuau

SEQ ID NO: 96153 - RNA, 32 nt, Homo Sapiens
uggcucuucaccuuguccucuccggggcuucu

SEQ ID NO: 96154 - RNA, 32 nt, Homo Sapiens
acaggcuuuuauuaaacauacugguuuucaug

SEQ ID NO: 96155 - RNA, 32 nt, Homo Sapiens
acaggcucugagauuucacaggucuugcccaa

SEQ ID NO: 96156 - RNA, 32 nt, Homo Sapiens
cuaacauuuuaccaacuuacguaaaucaaaaa

SEQ ID NO: 96157 - RNA, 32 nt, Homo Sapiens
ucccugccuggaggagcacaggugauagugua

SEQ ID NO: 96158 - RNA, 31 nt, Homo Sapiens
cagaccacagugauuuagccaaauaagucuu

SEQ ID NO: 96159 - RNA, 32 nt, Homo Sapiens
gggguaacagucugcaucaucaucacaaccua

SEQ ID NO: 96160 - RNA, 32 nt, Homo Sapiens
ggggaggcgggugggggagggagggaucauaa

SEQ ID NO: 96161 - RNA, 32 nt, Homo Sapiens
uuggacuuuuuuucuuuuuuugacucguugac

SEQ ID NO: 96162 - RNA, 32 nt, Homo Sapiens
ccuguggggggcuuccggaaaagggaacccug

SEQ ID NO: 96163 - RNA, 32 nt, Homo Sapiens
uauuauauaauaauguuuuaaauucaaacuag

SEQ ID NO: 96164 - RNA, 32 nt, Homo Sapiens
gcggccuuccccgcccggggcgcucccagagc

SEQ ID NO: 96165 - RNA, 30 nt, Homo Sapiens
uugcaguguuaaaacuacaagagcuagaaa

SEQ ID NO: 96166 - RNA, 32 nt, Homo Sapiens
cuucuuucuagaauguccaugcacuuggguuu

SEQ ID NO: 96167 - RNA, 32 nt, Homo Sapiens
guaaggugcuaaggggaaugccagcuguucuc

SEQ ID NO: 96168 - RNA, 32 nt, Homo Sapiens
cuucacaugaaucacauccuuaucugucaccu

SEQ ID NO: 96169 - RNA, 32 nt, Homo Sapiens
aggcagugccagcagcuggagucuguuaaacg

SEQ ID NO: 96170 - RNA, 32 nt, Homo Sapiens
ccccucugaacugcuugccugcacuuuuaucu

SEQ ID NO: 96171 - RNA, 32 nt, Homo Sapiens
cacaaugccucccaaaacacugcucucaccag

SEQ ID NO: 96172 - RNA, 32 nt, Homo Sapiens
uguccucaucacccucuuuugcugccugucaa

SEQ ID NO: 96173 - RNA, 32 nt, Homo Sapiens
acagugacugcccagguguccacacaccugua

SEQ ID NO: 96174 - RNA, 32 nt, Homo Sapiens
auuuuuucuucuuucacuuucauucagucacu

SEQ ID NO: 96175 - RNA, 32 nt, Homo Sapiens
uccuccagauauggccucaacuacccuccaac

SEQ ID NO: 96176 - RNA, 27 nt, Homo Sapiens
ccaugcugcccgccgcgcugcuccgcc

SEQ ID NO: 96177 - RNA, 32 nt, Homo Sapiens
auaucaaaaccacccagccccauccccaggag

SEQ ID NO: 96178 - RNA, 32 nt, Homo Sapiens
cucucgugguucuggaggggaaaagucagaaa

SEQ ID NO: 96179 - RNA, 32 nt, Homo Sapiens
aggaauuguuuuuauaaaaacauugaaguauu

SEQ ID NO: 96180 - RNA, 32 nt, Homo Sapiens
aucugcaaggcacuauucuagauccagaagau

SEQ ID NO: 96181 - RNA, 32 nt, Homo Sapiens
guuucugcacaguuguaacugcucuuggggau

SEQ ID NO: 96182 - RNA, 32 nt, Homo Sapiens
guggagugaacggccggagaccacguggagaa

SEQ ID NO: 96183 - RNA, 32 nt, Homo Sapiens
ccaggcuucggcccggccgccgccgcacauaa

SEQ ID NO: 96184 - RNA, 32 nt, Homo Sapiens
cagccaaauaaucaaguugccauuaguaauuu

SEQ ID NO: 96185 - RNA, 32 nt, Homo Sapiens
agccauacauauucaguagaacaucaauaaau

SEQ ID NO: 96186 - RNA, 32 nt, Homo Sapiens
acaaauuuuuaaaacuucuacauguauuuuuc

SEQ ID NO: 96187 - RNA, 32 nt, Homo Sapiens
auagcaccaagcuguagaagcuacauaguugu

SEQ ID NO: 96188 - RNA, 32 nt, Homo Sapiens
uccuggaaacauuuuuccacuuggcuucauga

SEQ ID NO: 96189 - RNA, 32 nt, Homo Sapiens
auaaaguaggaaaagagaaccgaggaagcacg

SEQ ID NO: 96190 - RNA, 32 nt, Homo Sapiens
gggcguggucgggcuccgcgccucgcgcagcg

SEQ ID NO: 96191 - RNA, 32 nt, Homo Sapiens
gguuaagggcugcagagccuggaccaaugccc

SEQ ID NO: 96192 - RNA, 32 nt, Homo Sapiens
cggaaggggccgugcgcguggggucgcuccgc

SEQ ID NO: 96193 - RNA, 32 nt, Homo Sapiens
agggagacgaucuagcuauagauucuugauac

SEQ ID NO: 96194 - RNA, 31 nt, Homo Sapiens
cagacaucucugggagucccaagggcacacc

SEQ ID NO: 96195 - RNA, 32 nt, Homo Sapiens
ugaucuccacugugucccaggcacccuaagau

SEQ ID NO: 96196 - RNA, 32 nt, Homo Sapiens
cacauaguuugauaaaaagaucaauaaauguu

SEQ ID NO: 96197 - RNA, 32 nt, Homo Sapiens
cacgcccguaaugcugcagaccacgugugcug

SEQ ID NO: 96198 - RNA, 32 nt, Homo Sapiens
aaaguuuccccucuauuuuggugaccaauacu

SEQ ID NO: 96199 - RNA, 32 nt, Homo Sapiens
aaccgggaagcaggcccuuaccagacauggac

SEQ ID NO: 96200 - RNA, 32 nt, Homo Sapiens
uuuuuagaaauacauauacuguaauauuuacc

SEQ ID NO: 96201 - RNA, 32 nt, Homo Sapiens
aguugguuugcacuuuaccugauugguugaug

SEQ ID NO: 96202 - RNA, 32 nt, Homo Sapiens
cuuuuagagauauuuuuaaaacuuguuuaaaa

SEQ ID NO: 96203 - RNA, 32 nt, Homo Sapiens
gcaaccuguguguuugucaucauccucaucuc

SEQ ID NO: 96204 - RNA, 32 nt, Homo Sapiens
cacacacacacauaugcacacacacacacaga

SEQ ID NO: 96205 - RNA, 32 nt, Homo Sapiens
ggccuguuuuguuuuucuuuccuugggcucag

SEQ ID NO: 96206 - RNA, 32 nt, Homo Sapiens
gaagucuaaaagcagccccaucaauacagaac

SEQ ID NO: 96207 - RNA, 32 nt, Homo Sapiens
uuuacuuugacaaaguaauguaauuuuuaccu

SEQ ID NO: 96208 - RNA, 32 nt, Homo Sapiens
gucgcacacacacacacacacacacacacacc

SEQ ID NO: 96209 - RNA, 32 nt, Homo Sapiens
ggggcgggcgacgggcgggcugggaaggucuc

SEQ ID NO: 96210 - RNA, 32 nt, Homo Sapiens
augaugagaagaaauguuaaagugcuuucuaa

SEQ ID NO: 96211 - RNA, 32 nt, Homo Sapiens
gcaacacuucuccgagccagcgagccagcgag

SEQ ID NO: 96212 - RNA, 32 nt, Homo Sapiens
ucauuuucuauuucuguuuuugggguuuuuug

SEQ ID NO: 96213 - RNA, 31 nt, Homo Sapiens
uggacacagugauucugcagagccugagcug

SEQ ID NO: 96214 - RNA, 32 nt, Homo Sapiens
gaacucccgagggccucuaggaccaggguuug

SEQ ID NO: 96215 - RNA, 32 nt, Homo Sapiens
cuagaguauaaaaugugaauguuuuuguagcu

SEQ ID NO: 96216 - RNA, 32 nt, Homo Sapiens
uucuucuuaaaaauuuauaugauucaaaacca

SEQ ID NO: 96217 - RNA, 32 nt, Homo Sapiens
uguuuucuaaugcuuugcauuaucaguuacaa

SEQ ID NO: 96218 - RNA, 32 nt, Homo Sapiens
ggucuggccccgggcugcugggcucacaaagu

SEQ ID NO: 96219 - RNA, 32 nt, Homo Sapiens
gucgcucggcagcccgagccugcggcagcggc

SEQ ID NO: 96220 - RNA, 32 nt, Homo Sapiens
uuauaaaaaguaccuguaucaaaggaauuuua

SEQ ID NO: 96221 - RNA, 32 nt, Homo Sapiens
gggcgccccggccgggucggcgcggacggcac

SEQ ID NO: 96222 - RNA, 32 nt, Homo Sapiens
aacuuggcuuuaucuuggagucaccagaggag

SEQ ID NO: 96223 - RNA, 32 nt, Homo Sapiens
ucugcuaaguauuuacaacucuauuuauuauu

SEQ ID NO: 96224 - RNA, 32 nt, Homo Sapiens
cgugccaaggcacugaggggaagugcugcaau

SEQ ID NO: 96225 - RNA, 32 nt, Homo Sapiens
gggaaugcuuaugaggaaauucaugccgagac

SEQ ID NO: 96226 - RNA, 32 nt, Homo Sapiens
cuuuugcagaauaaguuuuguuuacucuuuau

SEQ ID NO: 96227 - RNA, 32 nt, Homo Sapiens
accuguuuaagaaagugaaauguuauggucuc

SEQ ID NO: 96228 - RNA, 32 nt, Homo Sapiens
cucugagcaagcacuguguuauuuucacagug

SEQ ID NO: 96229 - RNA, 32 nt, Homo Sapiens
uagaagucauuugguguuggagguggguuucu

SEQ ID NO: 96230 - RNA, 32 nt, Homo Sapiens
cucuuagaucauagauuggaccugguuuuguu

SEQ ID NO: 96231 - RNA, 32 nt, Homo Sapiens
ucagccccacccaagccuuggccuagcauggg

SEQ ID NO: 96232 - RNA, 32 nt, Homo Sapiens
uauuuaagauggauauuugguggcucuauuug

SEQ ID NO: 96233 - RNA, 32 nt, Homo Sapiens
ccagagggacagcugagcccccugccuuggcu

SEQ ID NO: 96234 - RNA, 32 nt, Homo Sapiens
aacuagauaaaacuauuuuaaaauucauacag

SEQ ID NO: 96235 - RNA, 32 nt, Homo Sapiens
cacgcaugcauggacacacacacacacacaca

SEQ ID NO: 96236 - RNA, 32 nt, Homo Sapiens
ucccuguguuccuucucccccaucuuucuaaa

SEQ ID NO: 96237 - RNA, 32 nt, Homo Sapiens
acacugacagcagggagaagccaggcagcaga

SEQ ID NO: 96238 - RNA, 32 nt, Homo Sapiens
gggcagccagcauggcaccuggaucugaucaa

SEQ ID NO: 96239 - RNA, 29 nt, Homo Sapiens
ugauucgugacuuucuuucccaauagaac

SEQ ID NO: 96240 - RNA, 32 nt, Homo Sapiens
ccuuuuucagauguaauuuuuaucuuugcucc

SEQ ID NO: 96241 - RNA, 32 nt, Homo Sapiens
agagccacagaaaauggaggauaauugaggcu

SEQ ID NO: 96242 - RNA, 32 nt, Homo Sapiens
guugauaagaaaccuauauugcuagguagaau

SEQ ID NO: 96243 - RNA, 32 nt, Homo Sapiens
acuuuuuaccaacggucaguuuuuacauuuua

SEQ ID NO: 96244 - RNA, 32 nt, Homo Sapiens
ucuuuuaauguuuuaaauaugcauuuucagac

SEQ ID NO: 96245 - RNA, 32 nt, Homo Sapiens
acacgggcugacuggggugucugccccccuug

SEQ ID NO: 96246 - RNA, 32 nt, Homo Sapiens
cucccugcccuccuccucccugggccuucacc

SEQ ID NO: 96247 - RNA, 32 nt, Homo Sapiens
agaugagacuuuuugugucaacucuguccaca

SEQ ID NO: 96248 - RNA, 32 nt, Homo Sapiens
gagagacugcgcucucuuggggcugagggagc

SEQ ID NO: 96249 - RNA, 32 nt, Homo Sapiens
guccagugagaugaaacacagauuacugaacc

SEQ ID NO: 96250 - RNA, 32 nt, Homo Sapiens
cucuauuaguucuuuguaaaucacuuaguaca

SEQ ID NO: 96251 - RNA, 32 nt, Homo Sapiens
gaggaaggugcgaggcggauggagcggguggu

SEQ ID NO: 96252 - RNA, 32 nt, Homo Sapiens
ugacugaacugggaguccagggagggagcuga

SEQ ID NO: 96253 - RNA, 32 nt, Homo Sapiens
aaccucagguauuucuuuauaucagugugaaa

SEQ ID NO: 96254 - RNA, 32 nt, Homo Sapiens
gugugccugugucaguggccaugaugacuccc

SEQ ID NO: 96255 - RNA, 32 nt, Homo Sapiens
cauggaaaucauauuauauugaaauauaauau

SEQ ID NO: 96256 - RNA, 32 nt, Homo Sapiens
ugaggugcugggacagccaugguuucagacga

SEQ ID NO: 96257 - RNA, 31 nt, Homo Sapiens
uugugucucaaugauaauuaaauuagcuuaa

SEQ ID NO: 96258 - RNA, 28 nt, Homo Sapiens
accaugucaggagacuacgaggaugacc

SEQ ID NO: 96259 - RNA, 32 nt, Homo Sapiens
gcauccagaaaagauaaauguauagggacaaa

SEQ ID NO: 96260 - RNA, 32 nt, Homo Sapiens
aguuuggacuuccagcuuccagaacugugaga

SEQ ID NO: 96261 - RNA, 32 nt, Homo Sapiens
ucaagcauguuuucuuuuucuccuuuauauga

SEQ ID NO: 96262 - RNA, 31 nt, Homo Sapiens
augcggcggcacuggucuacccgccgcccuc

SEQ ID NO: 96263 - RNA, 32 nt, Homo Sapiens
gcgcggcaggacgcgcccgggucucagcggac

SEQ ID NO: 96264 - RNA, 32 nt, Homo Sapiens
uacaugcauggauuuuuaaauugccugccaug

SEQ ID NO: 96265 - RNA, 32 nt, Homo Sapiens
cgggggcggcgggcuccuggggucucgccuga

SEQ ID NO: 96266 - RNA, 32 nt, Homo Sapiens
ccuagaauaacauuuggugccucgcagaguca

SEQ ID NO: 96267 - RNA, 32 nt, Homo Sapiens
cugcggucagucggacgcggcgcuggaaaucc

SEQ ID NO: 96268 - RNA, 32 nt, Homo Sapiens
aaagguaacacagugcacggaccuuugagcua

SEQ ID NO: 96269 - RNA, 32 nt, Homo Sapiens
acgcuugauccccggccgcggggccaggaagu

SEQ ID NO: 96270 - RNA, 32 nt, Homo Sapiens
uuuggaagauaacaguggauucuuucucuggu

SEQ ID NO: 96271 - RNA, 32 nt, Homo Sapiens
accuuagcuucucaaaguguugagaucacagg

SEQ ID NO: 96272 - RNA, 32 nt, Homo Sapiens
gcuucaaauacaaaccagaauaugaguaaaaa

SEQ ID NO: 96273 - RNA, 32 nt, Homo Sapiens
gcugcccagcgccccaggcuggacugagcccc

SEQ ID NO: 96274 - RNA, 32 nt, Homo Sapiens
gccacugcacugcagccugggcgacagagcga

SEQ ID NO: 96275 - RNA, 32 nt, Homo Sapiens
auggggugaaaguuauuaggagagauacucuc

SEQ ID NO: 96276 - RNA, 32 nt, Homo Sapiens
uacagccaaacacagcauccaauaugaauacc

SEQ ID NO: 96277 - RNA, 32 nt, Homo Sapiens
uuugucuuuacuaugcacuuuagcuuauaaag

SEQ ID NO: 96278 - RNA, 32 nt, Homo Sapiens
uaaugguccuccugcuggccccagcaaggccc

SEQ ID NO: 96279 - RNA, 32 nt, Homo Sapiens
cuguauaauagaaaagcagagaaauaaauuuc

SEQ ID NO: 96280 - RNA, 32 nt, Homo Sapiens
cguuaucagugccuaggaauguucaaggccca

SEQ ID NO: 96281 - RNA, 32 nt, Homo Sapiens
ucuaccaucgccauuuuugcuccaacugagga

SEQ ID NO: 96282 - RNA, 32 nt, Homo Sapiens
uggacaaaaauuuaguucuacugcuugauuac

SEQ ID NO: 96283 - RNA, 32 nt, Homo Sapiens
acccaaacacacuuggaggucauguucaauau

SEQ ID NO: 96284 - RNA, 32 nt, Homo Sapiens
ccaguguggcacucaugguuuuuaaauaagau

SEQ ID NO: 96285 - RNA, 32 nt, Homo Sapiens
caaucaagaaacaaacaaaagcugaacacauu

SEQ ID NO: 96286 - RNA, 32 nt, Homo Sapiens
acacugcagccagggggccagaaggacugaca

SEQ ID NO: 96287 - RNA, 27 nt, Homo Sapiens
acauggagggugggaggcugggcguuc

SEQ ID NO: 96288 - RNA, 32 nt, Homo Sapiens
ugcagcgguaauauauuuuagaaauaauauau

SEQ ID NO: 96289 - RNA, 32 nt, Homo Sapiens
gacuugggaacaggcuguguguuugucccagc

SEQ ID NO: 96290 - RNA, 32 nt, Homo Sapiens
agguuuaagaaaccaacugauuaugcaagguu

SEQ ID NO: 96291 - RNA, 32 nt, Homo Sapiens
ucccugggggcggcaggacagcagccaccucc

SEQ ID NO: 96292 - RNA, 32 nt, Homo Sapiens
gcccaguguaucuaagugagucuaaauauauu

SEQ ID NO: 96293 - RNA, 32 nt, Homo Sapiens
aacaggaugcagccuucccuccgcccuggaag

SEQ ID NO: 96294 - RNA, 32 nt, Homo Sapiens
ucauuccacggugcacacaucuaucgaauccu

SEQ ID NO: 96295 - RNA, 32 nt, Homo Sapiens
gaaggcugaggcgggggaguggcgugagcccg

SEQ ID NO: 96296 - RNA, 32 nt, Homo Sapiens
ucuguaugcaugugaacacacacacacacaca

SEQ ID NO: 96297 - RNA, 32 nt, Homo Sapiens
agcauguagucuuauuaugccuuuaaaauaug

SEQ ID NO: 96298 - RNA, 32 nt, Homo Sapiens
cacgcccacucauccauucauccaccccgccc

SEQ ID NO: 96299 - RNA, 32 nt, Homo Sapiens
ucuguucagcucucagcagcugagagagacgc

SEQ ID NO: 96300 - RNA, 32 nt, Homo Sapiens
ggccgagcugcaggccggaccggagccggauc

SEQ ID NO: 96301 - RNA, 32 nt, Homo Sapiens
uugugaugaaauauuaaaaauauugagcaagu

SEQ ID NO: 96302 - RNA, 32 nt, Homo Sapiens
gaagaaguauguaaauaacauaaaaauaguaa

SEQ ID NO: 96303 - RNA, 32 nt, Homo Sapiens
cgcugcgggcggggcgggucuccgggauucca

SEQ ID NO: 96304 - RNA, 32 nt, Homo Sapiens
ccagcccccuucgcccguuuccaucacgagug

SEQ ID NO: 96305 - RNA, 32 nt, Homo Sapiens
gcauuuaaagaacaacucuucauauacaguca

SEQ ID NO: 96306 - RNA, 32 nt, Homo Sapiens
ggccgggcgcgguggcucaugccuguaauccg

SEQ ID NO: 96307 - RNA, 32 nt, Homo Sapiens
ucuguuuuauuaugauaucaaaguuaaauuua

SEQ ID NO: 96308 - RNA, 32 nt, Homo Sapiens
augauagugguaccucuuccccugcccaacac

SEQ ID NO: 96309 - RNA, 32 nt, Homo Sapiens
aagaaagcaagccagauuuacugcacaauaug

SEQ ID NO: 96310 - RNA, 32 nt, Homo Sapiens
aaucuucaggguggggcccagcagucuguguu

SEQ ID NO: 96311 - RNA, 32 nt, Homo Sapiens
ggccuccuauucuccugcuccacccccaaccc

SEQ ID NO: 96312 - RNA, 32 nt, Homo Sapiens
gaagaccccgccugcgcccccggggacggacg

SEQ ID NO: 96313 - RNA, 32 nt, Homo Sapiens
uuuuugagguauucaaaggaaaaggaauuguu

SEQ ID NO: 96314 - RNA, 32 nt, Homo Sapiens
ccauaaaugauuaauuaaauagcuuuuguguc

SEQ ID NO: 96315 - RNA, 32 nt, Homo Sapiens
acggcugccgggacuggcgcgcggggacacug

SEQ ID NO: 96316 - RNA, 32 nt, Homo Sapiens
cuuaaucucaguauguugcuuauauuaacaag

SEQ ID NO: 96317 - RNA, 32 nt, Homo Sapiens
cgaagagccgggcggcggccagagcccucccc

SEQ ID NO: 96318 - RNA, 32 nt, Homo Sapiens
uauuuaagcagugcucaccaugugcuaagcac

SEQ ID NO: 96319 - RNA, 32 nt, Homo Sapiens
cuuaguggguucccuuuccuguccccagucga

SEQ ID NO: 96320 - RNA, 32 nt, Homo Sapiens
gucccgccagaacgaucgccgcggccggaaga

SEQ ID NO: 96321 - RNA, 32 nt, Homo Sapiens
aaguuaguuauuuucuccucuuucuuuccuuu

SEQ ID NO: 96322 - RNA, 32 nt, Homo Sapiens
gguuacugcauaaugauuucauuuugauaaug

SEQ ID NO: 96323 - RNA, 32 nt, Homo Sapiens
gucaaaaauauuugcuaucuggucccuuacag

SEQ ID NO: 96324 - RNA, 32 nt, Homo Sapiens
gaaaagcagccucccuucuccucucccuccac

SEQ ID NO: 96325 - RNA, 32 nt, Homo Sapiens
cagggcagaggguggcaguggcacauaggcaa

SEQ ID NO: 96326 - RNA, 32 nt, Homo Sapiens
accugaaagaguuacuacaaccccaaagaguu

SEQ ID NO: 96327 - RNA, 32 nt, Homo Sapiens
ccaugaagcugauggguuugcaggaaggccug

SEQ ID NO: 96328 - RNA, 32 nt, Homo Sapiens
aggacugcuucugcccucugccugccagugcc

SEQ ID NO: 96329 - RNA, 32 nt, Homo Sapiens
cuaaggagaccuggacucuggguguggguugg

SEQ ID NO: 96330 - RNA, 32 nt, Homo Sapiens
acugucagacaaauagaaacacugccaacuug

SEQ ID NO: 96331 - RNA, 32 nt, Homo Sapiens
uauucaggacagagacucucacaaaguucaga

SEQ ID NO: 96332 - RNA, 32 nt, Homo Sapiens
ucgggggcugcagaggccugugcgggcugcgg

SEQ ID NO: 96333 - RNA, 32 nt, Homo Sapiens
cccgcgguguguagaguccgccgccccggagc

SEQ ID NO: 96334 - RNA, 32 nt, Homo Sapiens
cuuucaaaaucucacauagcuaauggaaguug

SEQ ID NO: 96335 - RNA, 32 nt, Homo Sapiens
ugaaaacugagucauccacuuuugacugucau

SEQ ID NO: 96336 - RNA, 32 nt, Homo Sapiens
uucccuuuuugugcacaccuauauuaccuuaa

SEQ ID NO: 96337 - RNA, 32 nt, Homo Sapiens
guuccugccacuuuuccuguccguccuccucc

SEQ ID NO: 96338 - RNA, 32 nt, Homo Sapiens
gaccguggacggccggggcgcuucuguauuca

SEQ ID NO: 96339 - RNA, 32 nt, Homo Sapiens
caguuacuuccacuccccucaccugccauaaa

SEQ ID NO: 96340 - RNA, 32 nt, Homo Sapiens
gacuucucauuuccacaccuagagauggaaac

SEQ ID NO: 96341 - RNA, 32 nt, Homo Sapiens
cuuagguguucacucucgccagcucaguuggc

SEQ ID NO: 96342 - RNA, 32 nt, Homo Sapiens
uauucagcuguaucuguagaaacucuuugacg

SEQ ID NO: 96343 - RNA, 32 nt, Homo Sapiens
cagaaauggagaagaguauuaaaccauauuua

SEQ ID NO: 96344 - RNA, 32 nt, Homo Sapiens
guucaaaagcaucuugagaggaacagaaagga

SEQ ID NO: 96345 - RNA, 32 nt, Homo Sapiens
auauaaagggaagagaaggaggcucaccggag

SEQ ID NO: 96346 - RNA, 32 nt, Homo Sapiens
aaacugcuauauauuuauuuguuauuuuaaaa

SEQ ID NO: 96347 - RNA, 32 nt, Homo Sapiens
auacaggugucugccaccauacccaguuucau

SEQ ID NO: 96348 - RNA, 32 nt, Homo Sapiens
cuggggagcugauguuccagcccugugccccc

SEQ ID NO: 96349 - RNA, 32 nt, Homo Sapiens
uaguguuugaaaagauucuuaauagcuggcug

SEQ ID NO: 96350 - RNA, 32 nt, Homo Sapiens
cuuuugucaauaccugaauccuugacaaaaga

SEQ ID NO: 96351 - RNA, 32 nt, Homo Sapiens
ucuggacaugcgcguuugaggguggagggguc

SEQ ID NO: 96352 - RNA, 32 nt, Homo Sapiens
uugggcagggagagggcggaagggcuggcgau

SEQ ID NO: 96353 - RNA, 32 nt, Homo Sapiens
gaauaauucuuccagugcaacaaaaucaauuu

SEQ ID NO: 96354 - RNA, 32 nt, Homo Sapiens
gcccgcggccccagacccagcuccccgggucc

SEQ ID NO: 96355 - RNA, 32 nt, Homo Sapiens
uccgcgccgggcguggacgguguggggcgguc

SEQ ID NO: 96356 - RNA, 32 nt, Homo Sapiens
cucuucugcuuccucugccccucccccagcca

SEQ ID NO: 96357 - RNA, 32 nt, Homo Sapiens
ggggcgcgggcuccgccggcaccauggagccc

SEQ ID NO: 96358 - RNA, 32 nt, Homo Sapiens
uuucuuuauuugugccauuguuuggacaauau

SEQ ID NO: 96359 - RNA, 32 nt, Homo Sapiens
aaaggcugaacucagcagcaacaccaaauccu

SEQ ID NO: 96360 - RNA, 32 nt, Homo Sapiens
acggccacgcgcgcacccugccgcccgcaccc

SEQ ID NO: 96361 - RNA, 32 nt, Homo Sapiens
uguucuuugugcuuguguaugaguaaguugcc

SEQ ID NO: 96362 - RNA, 29 nt, Homo Sapiens
gugauaaugaguuucagaggcugaucucu

SEQ ID NO: 96363 - RNA, 32 nt, Homo Sapiens
aaacuaauugcuuuuccaagugugacuuugaa

SEQ ID NO: 96364 - RNA, 32 nt, Homo Sapiens
uucuguugaagaaaccguuauacuugaauuca

SEQ ID NO: 96365 - RNA, 32 nt, Homo Sapiens
gcaagugagcgcgggcgcccgcggcgcgaccc

SEQ ID NO: 96366 - RNA, 31 nt, Homo Sapiens
acuaucugaaaucugcucagagccuaugugc

SEQ ID NO: 96367 - RNA, 32 nt, Homo Sapiens
agaacgguguuuuuauuuuuauuuuuucuugu

SEQ ID NO: 96368 - RNA, 32 nt, Homo Sapiens
uuaugucuaaggcuaggaacuaucaggugucu

SEQ ID NO: 96369 - RNA, 32 nt, Homo Sapiens
caagggccugggaggggugcugccggccaaga

SEQ ID NO: 96370 - RNA, 32 nt, Homo Sapiens
ccccaggcgggggucgggcagccccagccccu

SEQ ID NO: 96371 - RNA, 32 nt, Homo Sapiens
gccccccgagcagcugcagcccuggagugcug

SEQ ID NO: 96372 - RNA, 32 nt, Homo Sapiens
aauauagguauuuuaguacaguacauacuugc

SEQ ID NO: 96373 - RNA, 32 nt, Homo Sapiens
ugucuccugugcugcgaugggggaucagcagg

SEQ ID NO: 96374 - RNA, 32 nt, Homo Sapiens
cuguacucuacagaagaggaccucaaggauca

SEQ ID NO: 96375 - RNA, 32 nt, Homo Sapiens
gccugaagaagacauuucuacugcagaggguu

SEQ ID NO: 96376 - RNA, 32 nt, Homo Sapiens
aggcagauuaccuugcugggaaguaccagagg

SEQ ID NO: 96377 - RNA, 32 nt, Homo Sapiens
uggccgggcagacaggcccggggggcgucgug

SEQ ID NO: 96378 - RNA, 32 nt, Homo Sapiens
agccuggguugcccccaccccgcuggggaguu

SEQ ID NO: 96379 - RNA, 32 nt, Homo Sapiens
agagcccccccuuuuccaguaacaccagcacu

SEQ ID NO: 96380 - RNA, 32 nt, Homo Sapiens
gcaccucaugcaagcgagggaccugggacugc

SEQ ID NO: 96381 - RNA, 32 nt, Homo Sapiens
aguggaugauauuuccuuccaagauugcuccc

SEQ ID NO: 96382 - RNA, 32 nt, Homo Sapiens
aauuuaauauaaauuucuguuugugcauuucu

SEQ ID NO: 96383 - RNA, 32 nt, Homo Sapiens
uauuggcacuguuguuuauauuagccuccugg

SEQ ID NO: 96384 - RNA, 32 nt, Homo Sapiens
cccuccugucuuauuccacugcuucucccagc

SEQ ID NO: 96385 - RNA, 29 nt, Homo Sapiens
gaauacauauguauggcauguacuagauu

SEQ ID NO: 96386 - RNA, 32 nt, Homo Sapiens
cauugcacuccagccugggugacagaacgaga

SEQ ID NO: 96387 - RNA, 32 nt, Homo Sapiens
aguguguugucucuuuccuacaaguuaaccag

SEQ ID NO: 96388 - RNA, 32 nt, Homo Sapiens
uaaauauauaaaaagaaaagauaaagaugauc

SEQ ID NO: 96389 - RNA, 32 nt, Homo Sapiens
ccaucugaagauuaagaaaucuggccaggugc

SEQ ID NO: 96390 - RNA, 32 nt, Homo Sapiens
cgggguagguguggcucugugugcgugaccug

SEQ ID NO: 96391 - RNA, 32 nt, Homo Sapiens
uuuuaaauugcaacuguaaauaugaaaugguc

SEQ ID NO: 96392 - RNA, 32 nt, Homo Sapiens
cuuagcuguuucuccagacucccuuugauguu

SEQ ID NO: 96393 - RNA, 32 nt, Homo Sapiens
gauaucuccuacuucacugagguuugugagga

SEQ ID NO: 96394 - RNA, 32 nt, Homo Sapiens
uaacugcuaagagguuacaaaaacauuauugg

SEQ ID NO: 96395 - RNA, 32 nt, Homo Sapiens
aaauaaaaacacacaagaaagcaugaggcgua

SEQ ID NO: 96396 - RNA, 32 nt, Homo Sapiens
auauuuagucaucuugaucauagagaaaagug

SEQ ID NO: 96397 - RNA, 32 nt, Homo Sapiens
cauuacauuucuauuucuugguggagcagcac

SEQ ID NO: 96398 - RNA, 32 nt, Homo Sapiens
cagaggagaggaaagggaaguaguuugguucu

SEQ ID NO: 96399 - RNA, 32 nt, Homo Sapiens
guuugcaguacucagcaaaaaauaggguacau

SEQ ID NO: 96400 - RNA, 32 nt, Homo Sapiens
aauuaagaccaaacagaacaugagaauacaca

SEQ ID NO: 96401 - RNA, 32 nt, Homo Sapiens
uuccauccaucaaauacuuuacaggauggcau

SEQ ID NO: 96402 - RNA, 32 nt, Homo Sapiens
ccgagucagaucacuauaaacaaaauuuccac

SEQ ID NO: 96403 - RNA, 32 nt, Homo Sapiens
uucugacccaaagauguagucuacauagcccc

SEQ ID NO: 96404 - RNA, 32 nt, Homo Sapiens
ccagguguuuuaaggggcucaguccuccucau

SEQ ID NO: 96405 - RNA, 32 nt, Homo Sapiens
agaagugcuuccagcaucacuccagcaacacg

SEQ ID NO: 96406 - RNA, 32 nt, Homo Sapiens
ccggcccagaaaggggcucccacagugcagcg

SEQ ID NO: 96407 - RNA, 32 nt, Homo Sapiens
cauauucuauuguuuacuauaaaaaucaugug

SEQ ID NO: 96408 - RNA, 32 nt, Homo Sapiens
cuugauggaaaacugauaccuuuuucuuuccg

SEQ ID NO: 96409 - RNA, 32 nt, Homo Sapiens
ucaucuccugccgggcgggggagggcucugcc

SEQ ID NO: 96410 - RNA, 32 nt, Homo Sapiens
agagaaaacucuuuuuagauaucaucugagag

SEQ ID NO: 96411 - RNA, 32 nt, Homo Sapiens
gucacagauaaaaguuuacaacucugaugcug

SEQ ID NO: 96412 - RNA, 32 nt, Homo Sapiens
gaaggaguuuuuaugucuuugugcauacuucu

SEQ ID NO: 96413 - RNA, 32 nt, Homo Sapiens
uuagaaggcagacauugguuaggaggugcagg

SEQ ID NO: 96414 - RNA, 32 nt, Homo Sapiens
caacacuuuuaaaaaauaauucagaugagacu

SEQ ID NO: 96415 - RNA, 32 nt, Homo Sapiens
gggggaugucuaggaagcuucagcuuagccac

SEQ ID NO: 96416 - RNA, 32 nt, Homo Sapiens
agccccccagcaaguccucuggcaagccggag

SEQ ID NO: 96417 - RNA, 32 nt, Homo Sapiens
uuaaaaauuaacaaaaucaggccaaggcagga

SEQ ID NO: 96418 - RNA, 32 nt, Homo Sapiens
ugguguccaucacauauauuauagaagcaagc

SEQ ID NO: 96419 - RNA, 32 nt, Homo Sapiens
ugugggauagaaggacuggugcgaccccugcc

SEQ ID NO: 96420 - RNA, 32 nt, Homo Sapiens
ggggagccgggcccgcgcgccgagauguugcu

SEQ ID NO: 96421 - RNA, 32 nt, Homo Sapiens
cagagccuuggcacucugguguguagaaucug

SEQ ID NO: 96422 - RNA, 32 nt, Homo Sapiens
acucuuucuuugcaacagcaguguucugggug

SEQ ID NO: 96423 - RNA, 30 nt, Homo Sapiens
agaggguggggcggaccgcgugcgcucggc

SEQ ID NO: 96424 - RNA, 28 nt, Homo Sapiens
auaaagaaagauuaguguuuaagagcgu

SEQ ID NO: 96425 - RNA, 32 nt, Homo Sapiens
ucacagaggcucuuaaagugugagauggagag

SEQ ID NO: 96426 - RNA, 32 nt, Homo Sapiens
cucccucuguucugcccuaugcccauccuuag

SEQ ID NO: 96427 - RNA, 31 nt, Homo Sapiens
cugggcacucccuuccugccccaggcccugg

SEQ ID NO: 96428 - RNA, 32 nt, Homo Sapiens
gagagaagacuggcaguggagcaugcaucugg

SEQ ID NO: 96429 - RNA, 30 nt, Homo Sapiens
aagagguaucaccauuuuaggacucuaccg

SEQ ID NO: 96430 - RNA, 32 nt, Homo Sapiens
cuguuaaaaaauuuuuuaaaaaugugaaaugu

SEQ ID NO: 96431 - RNA, 32 nt, Homo Sapiens
acucguacaaauacuguuagauuuaguugcaa

SEQ ID NO: 96432 - RNA, 32 nt, Homo Sapiens
cacugcagcccuuuugagaccacacagcuguu

SEQ ID NO: 96433 - RNA, 31 nt, Homo Sapiens
uuuacccauuuuguagcucaaaaauaauuuu

SEQ ID NO: 96434 - RNA, 32 nt, Homo Sapiens
agcaugaagcauguggcaauggcuguggcgau

SEQ ID NO: 96435 - RNA, 32 nt, Homo Sapiens
gggcacugaaccuggugccgcccacaccuccu

SEQ ID NO: 96436 - RNA, 32 nt, Homo Sapiens
gagcaaauggaaugugacuuugaaaaccacug

SEQ ID NO: 96437 - RNA, 32 nt, Homo Sapiens
cccagggcccccacuccuggcuccucacacuu

SEQ ID NO: 96438 - RNA, 32 nt, Homo Sapiens
aucacaggcugugccaacauguggggcgagua

SEQ ID NO: 96439 - RNA, 32 nt, Homo Sapiens
uggccacugacccaucugcacguccgcucagc

SEQ ID NO: 96440 - RNA, 32 nt, Homo Sapiens
guuuuuaccugccuguuguggauggauggggg

SEQ ID NO: 96441 - RNA, 32 nt, Homo Sapiens
gguuaaauucuaaaucugaaaaugcuaguggg

SEQ ID NO: 96442 - RNA, 32 nt, Homo Sapiens
cgagcugaagcuguugucacuucacugcccuc

SEQ ID NO: 96443 - RNA, 32 nt, Homo Sapiens
ccccagccucgcccgacagagcccggggcgca

SEQ ID NO: 96444 - RNA, 32 nt, Homo Sapiens
uuuuucucacuauuaaugcuuuagaagcaaga

SEQ ID NO: 96445 - RNA, 32 nt, Homo Sapiens
aauuccuucucgccuuuaagggcuaugguugu

SEQ ID NO: 96446 - RNA, 32 nt, Homo Sapiens
uuuuuuaugugguuauuaaaacaguaugaaca

SEQ ID NO: 96447 - RNA, 32 nt, Homo Sapiens
gagccgguccccagcccugcccccaggggaca

SEQ ID NO: 96448 - RNA, 32 nt, Homo Sapiens
ucuguucauagauauuggaagagagaauuugc

SEQ ID NO: 96449 - RNA, 32 nt, Homo Sapiens
ggggggucuugggucucccaggacggaaggcc

SEQ ID NO: 96450 - RNA, 32 nt, Homo Sapiens
acauuuuguauuauucaugaucugaauaguag

SEQ ID NO: 96451 - RNA, 32 nt, Homo Sapiens
uguagaaacugggacauauagauaccaagcaa

SEQ ID NO: 96452 - RNA, 32 nt, Homo Sapiens
guuucccugcugcugcagcccccgucggcucc

SEQ ID NO: 96453 - RNA, 32 nt, Homo Sapiens
ccgccuguccacagccccuuaagggaaaggua

SEQ ID NO: 96454 - RNA, 32 nt, Homo Sapiens
gauuuuucauuuacuuucucucucuuggaucu

SEQ ID NO: 96455 - RNA, 30 nt, Homo Sapiens
aagggaacaaaauaaagugaaauccaauac

SEQ ID NO: 96456 - RNA, 32 nt, Homo Sapiens
gcccaccugccagugucuugggcauuuccuug

SEQ ID NO: 96457 - RNA, 32 nt, Homo Sapiens
ccuuuuuagugaugcagauuugucuguuuguu

SEQ ID NO: 96458 - RNA, 32 nt, Homo Sapiens
ucaugacuaugcaguuucuaacauacacauag

SEQ ID NO: 96459 - RNA, 32 nt, Homo Sapiens
gcaguggccuacaaaucaguaauuuucgggug

SEQ ID NO: 96460 - RNA, 32 nt, Homo Sapiens
cuuuguaaaaauuaugucauucucagaauugu

SEQ ID NO: 96461 - RNA, 32 nt, Homo Sapiens
ccccuuugaucccugugugcugaagaggucaa

SEQ ID NO: 96462 - RNA, 32 nt, Homo Sapiens
cagcuaauuuuuguaauuuuaguggagauggg

SEQ ID NO: 96463 - RNA, 32 nt, Homo Sapiens
ucuugagccugccugcagggauggucuccuuu

SEQ ID NO: 96464 - RNA, 32 nt, Homo Sapiens
uccccuuccacccucacccccaggucccagcc

SEQ ID NO: 96465 - RNA, 30 nt, Homo Sapiens
ggaggcaggccccgcgcggggaucucggaa

SEQ ID NO: 96466 - RNA, 32 nt, Homo Sapiens
aacggacaagaaaaaagcaaagucaacgacac

SEQ ID NO: 96467 - RNA, 32 nt, Homo Sapiens
auucuuggggguaaacagugggucuuuucuuu

SEQ ID NO: 96468 - RNA, 32 nt, Homo Sapiens
accugagccuggguggaacaauccaaaguuuu

SEQ ID NO: 96469 - RNA, 32 nt, Homo Sapiens
cuagagaaaaagauucugaaggaacucacucc

SEQ ID NO: 96470 - RNA, 32 nt, Homo Sapiens
auaacaugaaaauaaacauuuccuuuuuaaca

SEQ ID NO: 96471 - RNA, 32 nt, Homo Sapiens
cuugcgguuugagguagccgugucuguuccuu

SEQ ID NO: 96472 - RNA, 32 nt, Homo Sapiens
cuguggacgaggaggaugcgguaggggcccuc

SEQ ID NO: 96473 - RNA, 31 nt, Homo Sapiens
aaaauucuugguaguugagcagcucuggggg

SEQ ID NO: 96474 - RNA, 32 nt, Homo Sapiens
guggaauaaaugugauacaacauauacucacu

SEQ ID NO: 96475 - RNA, 32 nt, Homo Sapiens
acacagcaccucaggccgcugcucagaugccu

SEQ ID NO: 96476 - RNA, 32 nt, Homo Sapiens
gucacuccuuugcccauacccccgccccgaga

SEQ ID NO: 96477 - RNA, 32 nt, Homo Sapiens
ccugagccccagggaggcggcgcggagcgacc

SEQ ID NO: 96478 - RNA, 32 nt, Homo Sapiens
uagagagagcuaaacuguguaauuuaauggua

SEQ ID NO: 96479 - RNA, 32 nt, Homo Sapiens
ggcuccaucgcggccuggccggggggcggugu

SEQ ID NO: 96480 - RNA, 32 nt, Homo Sapiens
uccuauucugucaucucccucacuuaagucuc

SEQ ID NO: 96481 - RNA, 32 nt, Homo Sapiens
ccacuaguuuucaucagucuguucaagcaaag

SEQ ID NO: 96482 - RNA, 32 nt, Homo Sapiens
ucggggucguaugacgcacuuuuccagcucga

SEQ ID NO: 96483 - RNA, 32 nt, Homo Sapiens
ucauaggucaaugggaaagcugucugagacaa

SEQ ID NO: 96484 - RNA, 32 nt, Homo Sapiens
cucagaaacucggacugcucucgucugccgug

SEQ ID NO: 96485 - RNA, 32 nt, Homo Sapiens
ucaacauucuucugccuccaguuauuuuccau

SEQ ID NO: 96486 - RNA, 32 nt, Homo Sapiens
ugguaauaauauauuugauuuaaaugcuguug

SEQ ID NO: 96487 - RNA, 32 nt, Homo Sapiens
ugacucccccagucuccaacccuggccuugac

SEQ ID NO: 96488 - RNA, 32 nt, Homo Sapiens
ugccccacacuaacuugcccugucccaauccc

SEQ ID NO: 96489 - RNA, 30 nt, Homo Sapiens
uggggauauaucccuccuugggacucuugg

SEQ ID NO: 96490 - RNA, 32 nt, Homo Sapiens
cuccgagacugucuccucccuccccgccugua

SEQ ID NO: 96491 - RNA, 32 nt, Homo Sapiens
auuuucccggagugcgagguccugcugguccu

SEQ ID NO: 96492 - RNA, 32 nt, Homo Sapiens
agccaugaccguuaugaggaaauaucccccau

SEQ ID NO: 96493 - RNA, 32 nt, Homo Sapiens
agcuuccugcucuggauacagccccggagccg

SEQ ID NO: 96494 - RNA, 32 nt, Homo Sapiens
uccagccaguguagggagcucugcggugauga

SEQ ID NO: 96495 - RNA, 32 nt, Homo Sapiens
ugacucugugcagcugcgcaccuguguccccc

SEQ ID NO: 96496 - RNA, 32 nt, Homo Sapiens
ucuuauaaauguuuagguuuggugcuggcccu

SEQ ID NO: 96497 - RNA, 32 nt, Homo Sapiens
ggaagugaagucaggaugaugaaaguaggcaa

SEQ ID NO: 96498 - RNA, 32 nt, Homo Sapiens
uuuagaaauugaagcaaagagaagguugaauu

SEQ ID NO: 96499 - RNA, 29 nt, Homo Sapiens
uucuaguaaaguuuucgauauguuucuga

SEQ ID NO: 96500 - RNA, 32 nt, Homo Sapiens
aggauguggaugggggcgggguuggggguaaa

SEQ ID NO: 96501 - RNA, 32 nt, Homo Sapiens
ucugcgcucccauugccuucacgcugcaaguc

SEQ ID NO: 96502 - RNA, 32 nt, Homo Sapiens
uugguguuagucugcuggggaaugggauaaag

SEQ ID NO: 96503 - RNA, 32 nt, Homo Sapiens
ggucccccgcggcugucgccgccgccuacgcc

SEQ ID NO: 96504 - RNA, 32 nt, Homo Sapiens
gagaggaggggaggaagcuugauacugggugg

SEQ ID NO: 96505 - RNA, 32 nt, Homo Sapiens
aguccuguuucaucaggaaagcaaaagcucuc

SEQ ID NO: 96506 - RNA, 29 nt, Homo Sapiens
aggagaauccacccaaacaccuuuaaagg

SEQ ID NO: 96507 - RNA, 32 nt, Homo Sapiens
cugacagcgaucccaaccuggacccacucaug

SEQ ID NO: 96508 - RNA, 32 nt, Homo Sapiens
gcuggcaccacagugggccccuggacccggcc

SEQ ID NO: 96509 - RNA, 32 nt, Homo Sapiens
uauuaugcaucagcucucauucccuauggguc

SEQ ID NO: 96510 - RNA, 32 nt, Homo Sapiens
aaaggaaaauuccagcuggugacauugacaac

SEQ ID NO: 96511 - RNA, 32 nt, Homo Sapiens
uggaaaguaaaggugaaaacauccccuuucac

SEQ ID NO: 96512 - RNA, 32 nt, Homo Sapiens
guuaccuaccugcaagugguucagugcgugcc

SEQ ID NO: 96513 - RNA, 32 nt, Homo Sapiens
cugcgcuccggccgcucccgcggcccguggau

SEQ ID NO: 96514 - RNA, 32 nt, Homo Sapiens
gcccuggcggggggcaggggguuggcaggaca

SEQ ID NO: 96515 - RNA, 32 nt, Homo Sapiens
agagguggggguggaggggaauuagucugucc

SEQ ID NO: 96516 - RNA, 32 nt, Homo Sapiens
agcugaccugcccuguccucuccagcuguccc

SEQ ID NO: 96517 - RNA, 32 nt, Homo Sapiens
uacaaauaaaaagcuaagauucuauaucgcac

SEQ ID NO: 96518 - RNA, 32 nt, Homo Sapiens
cugccaacaucauagguuuguuuugauuucca

SEQ ID NO: 96519 - RNA, 32 nt, Homo Sapiens
guagagguguugcucauuuguggggaugugau

SEQ ID NO: 96520 - RNA, 32 nt, Homo Sapiens
ggacuuuucucuggggacccucaaggacagau

SEQ ID NO: 96521 - RNA, 32 nt, Homo Sapiens
gccguugcagcacaagcuuaugcuucccguag

SEQ ID NO: 96522 - RNA, 32 nt, Homo Sapiens
auguguauauauauguaaacuagacaaagauc

SEQ ID NO: 96523 - RNA, 32 nt, Homo Sapiens
gaggcugcgcggcgaugcugcaguucguccgg

SEQ ID NO: 96524 - RNA, 32 nt, Homo Sapiens
cccaggggcacgcaggccgaccuguccucgag

SEQ ID NO: 96525 - RNA, 32 nt, Homo Sapiens
cuguguagcuccggucucgccuggagccacuu

SEQ ID NO: 96526 - RNA, 32 nt, Homo Sapiens
agugcucugauccagcucaggagaaaaaggag

SEQ ID NO: 96527 - RNA, 32 nt, Homo Sapiens
agacucguaugaggcuccccccugcccugggc

SEQ ID NO: 96528 - RNA, 32 nt, Homo Sapiens
uugguagcacuuuauauguuuaccaaugggag

SEQ ID NO: 96529 - RNA, 32 nt, Homo Sapiens
acucaguggaagggugauaucaugacacugau

SEQ ID NO: 96530 - RNA, 32 nt, Homo Sapiens
aaacacuucuuuuccuucucuuccucguuuug

SEQ ID NO: 96531 - RNA, 32 nt, Homo Sapiens
caucuagugauugcaaaacuggaccaauggga

SEQ ID NO: 96532 - RNA, 32 nt, Homo Sapiens
gcagcucuuuugcccagagcguucccuguagc

SEQ ID NO: 96533 - RNA, 32 nt, Homo Sapiens
gauguacccaagucuuacguuucccaauaaag

SEQ ID NO: 96534 - RNA, 32 nt, Homo Sapiens
gcauauaaaauaucuguaaaaauuaaacaugu

SEQ ID NO: 96535 - RNA, 32 nt, Homo Sapiens
cuuaaaauuucugcagaaaacaaacagcuucu

SEQ ID NO: 96536 - RNA, 30 nt, Homo Sapiens
cggccaugucccgcccucgcaugcgccugg

SEQ ID NO: 96537 - RNA, 32 nt, Homo Sapiens
uuagaguguacuugauuacugggcauccuugu

SEQ ID NO: 96538 - RNA, 32 nt, Homo Sapiens
gcuggcugcaagcagcagcuacacaacacuac

SEQ ID NO: 96539 - RNA, 32 nt, Homo Sapiens
ugccccacuccagccuggggaccccacuucag

SEQ ID NO: 96540 - RNA, 32 nt, Homo Sapiens
cgugcgcagcccgggcgggcuucgcccgcgga

SEQ ID NO: 96541 - RNA, 32 nt, Homo Sapiens
cccagccccggccccaggcgucccagccaugg

SEQ ID NO: 96542 - RNA, 31 nt, Homo Sapiens
aggauagcuggguccauucagagcaccuuga

SEQ ID NO: 96543 - RNA, 32 nt, Homo Sapiens
accggacgcgccgaggucgcgcugccuguguu

SEQ ID NO: 96544 - RNA, 32 nt, Homo Sapiens
cugcccgccugccugccaccucucggacucca

SEQ ID NO: 96545 - RNA, 32 nt, Homo Sapiens
ccuuuauuuuuagaagucuucauguuaucuau

SEQ ID NO: 96546 - RNA, 32 nt, Homo Sapiens
gaauguccuuaacucagcaucuccaggacgag

SEQ ID NO: 96547 - RNA, 32 nt, Homo Sapiens
uaaacucuccccgucauuuccaaauauuucca

SEQ ID NO: 96548 - RNA, 32 nt, Homo Sapiens
aaaaaguagacuauuucacccuauugcagcua

SEQ ID NO: 96549 - RNA, 32 nt, Homo Sapiens
caugacugguggugagagaccacacauuuuau

SEQ ID NO: 96550 - RNA, 32 nt, Homo Sapiens
aggcugcggugucugcugcugcuguccgagcu

SEQ ID NO: 96551 - RNA, 32 nt, Homo Sapiens
acuuauugacauuaucauaggaauuuacuacc

SEQ ID NO: 96552 - RNA, 32 nt, Homo Sapiens
aacauuaaaaugugugguauaucaguacuggg

SEQ ID NO: 96553 - RNA, 32 nt, Homo Sapiens
cacguagacaccuaggaagagcccgcaugccc

SEQ ID NO: 96554 - RNA, 32 nt, Homo Sapiens
uccuccagaggucugcacacuccacuucacau

SEQ ID NO: 96555 - RNA, 28 nt, Homo Sapiens
cagcagaaagauuaaaucuugaauuaag

SEQ ID NO: 96556 - RNA, 32 nt, Homo Sapiens
ucgauguugcaauaauacaaaccaauguaccu

SEQ ID NO: 96557 - RNA, 32 nt, Homo Sapiens
aaguuauauaaaggcaaggaaauuaagaacug

SEQ ID NO: 96558 - RNA, 32 nt, Homo Sapiens
gucagcaugauuauauuuuaauguagaaaaug

SEQ ID NO: 96559 - RNA, 32 nt, Homo Sapiens
ccacaggugcugggcuuuagagaacaugggaa

SEQ ID NO: 96560 - RNA, 32 nt, Homo Sapiens
aaaagucauuggcuuuagaaacuguacaaaau

SEQ ID NO: 96561 - RNA, 32 nt, Homo Sapiens
cgccgagggcgcgggccaggcgcgcgguguca

SEQ ID NO: 96562 - RNA, 32 nt, Homo Sapiens
cccuacagucuuuggagacaagauggagggag

SEQ ID NO: 96563 - RNA, 32 nt, Homo Sapiens
uuguugcugguuuuuauuuaauuagaugguaa

SEQ ID NO: 96564 - RNA, 32 nt, Homo Sapiens
ccaacucggggaaacuucguugccagagauga

SEQ ID NO: 96565 - RNA, 32 nt, Homo Sapiens
cuagcaccuuuaaggggaggggaagaauugga

SEQ ID NO: 96566 - RNA, 29 nt, Homo Sapiens
acaccccggggacaggaagcuguagaguu

SEQ ID NO: 96567 - RNA, 32 nt, Homo Sapiens
gucuauagcuaaugcuacuuucauuuauauuu

SEQ ID NO: 96568 - RNA, 32 nt, Homo Sapiens
cucugcacuccagccuggcgacugagugagac

SEQ ID NO: 96569 - RNA, 32 nt, Homo Sapiens
agucgcggaguaguccucauggccgccccgcc

SEQ ID NO: 96570 - RNA, 32 nt, Homo Sapiens
uuuuguuauuuuuauuguuuguacuaauguug

SEQ ID NO: 96571 - RNA, 32 nt, Homo Sapiens
aagaagaggcuguguccucaguuacccuggaa

SEQ ID NO: 96572 - RNA, 32 nt, Homo Sapiens
cacugcacuccagcacuccagccugggugaca

SEQ ID NO: 96573 - RNA, 32 nt, Homo Sapiens
ugccuucccgugggcacuuccacauccucugg

SEQ ID NO: 96574 - RNA, 32 nt, Homo Sapiens
agggcgaagccagcagagguguguguaugucu

SEQ ID NO: 96575 - RNA, 32 nt, Homo Sapiens
aagagaauaucaauauaaauaaggaaaauaaa

SEQ ID NO: 96576 - RNA, 32 nt, Homo Sapiens
gcucauaauaaguuuaauaugcacagcaucuu

SEQ ID NO: 96577 - RNA, 32 nt, Homo Sapiens
gagcccccgacccgaggcgccgagccgccgcc

SEQ ID NO: 96578 - RNA, 31 nt, Homo Sapiens
cauggcagucugugaaggaaaugguauuuga

SEQ ID NO: 96579 - RNA, 32 nt, Homo Sapiens
gacagggccauuuaggcccagcccugucugac

SEQ ID NO: 96580 - RNA, 32 nt, Homo Sapiens
ucaguugcucugagacuaugggguacaaguuu

SEQ ID NO: 96581 - RNA, 32 nt, Homo Sapiens
aucgggacacaaaccacccaccccauugggag

SEQ ID NO: 96582 - RNA, 32 nt, Homo Sapiens
ggcagccuugacgcgcggcccucucggcagag

SEQ ID NO: 96583 - RNA, 32 nt, Homo Sapiens
gcagggggccaguggcggggcccagcgcccag

SEQ ID NO: 96584 - RNA, 32 nt, Homo Sapiens
uggcagcuuggugauuauccacagaaggggca

SEQ ID NO: 96585 - RNA, 32 nt, Homo Sapiens
gaucuacuggucagcaucaggguccccagccu

SEQ ID NO: 96586 - RNA, 32 nt, Homo Sapiens
uauauuaauaaccgcaacuaugcugaaaagua

SEQ ID NO: 96587 - RNA, 32 nt, Homo Sapiens
cccggccagccgggcucuccuccucgcggcgg

SEQ ID NO: 96588 - RNA, 32 nt, Homo Sapiens
uguugcacaauuuugauaaaaauuuagaacag

SEQ ID NO: 96589 - RNA, 32 nt, Homo Sapiens
uaaauguaauuccacaauuaguguauuaaguu

SEQ ID NO: 96590 - RNA, 32 nt, Homo Sapiens
uccaugguaggggaaacgugcuccuucuccau

SEQ ID NO: 96591 - RNA, 32 nt, Homo Sapiens
agaauaaaccauccaagagacggcgcugcagg

SEQ ID NO: 96592 - RNA, 32 nt, Homo Sapiens
gggacaccaacugcccaguccacuggccauuu

SEQ ID NO: 96593 - RNA, 32 nt, Homo Sapiens
gggucugccucccacgcugggacacagaccgg

SEQ ID NO: 96594 - RNA, 32 nt, Homo Sapiens
guccagaacucuuuggugacuccaacuaugga

SEQ ID NO: 96595 - RNA, 32 nt, Homo Sapiens
gguucccugggcuuuccuuguuugacuucaga

SEQ ID NO: 96596 - RNA, 32 nt, Homo Sapiens
cguguucggucccgagugaggacugugugucu

SEQ ID NO: 96597 - RNA, 32 nt, Homo Sapiens
auaauuaaaaauuaagaauaaauaaacgaguu

SEQ ID NO: 96598 - RNA, 32 nt, Homo Sapiens
cauggaaaucuuaucuaaaauuuuauaccauu

SEQ ID NO: 96599 - RNA, 32 nt, Homo Sapiens
cucuaagauaaaacuucuauuuaaagacuuua

SEQ ID NO: 96600 - RNA, 32 nt, Homo Sapiens
aacauagucucagauucuucuaauguguaucu

SEQ ID NO: 96601 - RNA, 32 nt, Homo Sapiens
cucgccgcugcguugggaccgcgcagcccggu

SEQ ID NO: 96602 - RNA, 32 nt, Homo Sapiens
cuauccauauuccauguuacaaauugacauga

SEQ ID NO: 96603 - RNA, 30 nt, Homo Sapiens
gaugacugugguaggacccaaggaagagau

SEQ ID NO: 96604 - RNA, 32 nt, Homo Sapiens
uggugaaggcagccacucucuugcuugucccc

SEQ ID NO: 96605 - RNA, 32 nt, Homo Sapiens
ugccuuuagaaaauauaaguaaagugauuaaa

SEQ ID NO: 96606 - RNA, 32 nt, Homo Sapiens
uuauagagacugaguaccaggccacgggcugc

SEQ ID NO: 96607 - RNA, 31 nt, Homo Sapiens
gcggaccagcggaccaccugggugcugucgu

SEQ ID NO: 96608 - RNA, 32 nt, Homo Sapiens
uuugaugcuauuauuuuaacucuauuagcuua

SEQ ID NO: 96609 - RNA, 32 nt, Homo Sapiens
aacccuacugggcugagcugcccuccccacca

SEQ ID NO: 96610 - RNA, 32 nt, Homo Sapiens
acucaagugucuacgagugaccuugauggcaa

SEQ ID NO: 96611 - RNA, 32 nt, Homo Sapiens
auccaccccccuccaccucccaagguguuggg

SEQ ID NO: 96612 - RNA, 32 nt, Homo Sapiens
ucacaauacuauuugcauaagacaaaauacca

SEQ ID NO: 96613 - RNA, 32 nt, Homo Sapiens
uuaaaauacucuuuuuacaauccauauaagcc

SEQ ID NO: 96614 - RNA, 32 nt, Homo Sapiens
cagaaucaauagcccagagagcuuagucaaag

SEQ ID NO: 96615 - RNA, 32 nt, Homo Sapiens
ucagcucaggugggcacacuccucugccccug

SEQ ID NO: 96616 - RNA, 32 nt, Homo Sapiens
uuuguuuaauggauuccaccccugccuuccua

SEQ ID NO: 96617 - RNA, 32 nt, Homo Sapiens
augcaggugcugccggccccaggaccccucuu

SEQ ID NO: 96618 - RNA, 32 nt, Homo Sapiens
aaagucuuucuuuucugaaaucuucgugguau

SEQ ID NO: 96619 - RNA, 32 nt, Homo Sapiens
acuaaacaaaaaucuccaguguuaacuauaau

SEQ ID NO: 96620 - RNA, 32 nt, Homo Sapiens
uugauaaacaaauguagaugauuaaaauagga

SEQ ID NO: 96621 - RNA, 32 nt, Homo Sapiens
ucugucgggggcggggcgguagguccgaaaga

SEQ ID NO: 96622 - RNA, 32 nt, Homo Sapiens
ugaaaaaaaugguccaagaaaauguuugccau

SEQ ID NO: 96623 - RNA, 32 nt, Homo Sapiens
aggaagugcagguugaagugagccaaaaucag

SEQ ID NO: 96624 - RNA, 32 nt, Homo Sapiens
uguggcccugaacaucccaggaggccgaucgu

SEQ ID NO: 96625 - RNA, 32 nt, Homo Sapiens
ggugcucuggccugcuauugaagcuuaugcag

SEQ ID NO: 96626 - RNA, 32 nt, Homo Sapiens
caagcaggcgggcgcgggggucggggacugag

SEQ ID NO: 96627 - RNA, 32 nt, Homo Sapiens
ucuagggcguccgcggggcagcagccacguga

SEQ ID NO: 96628 - RNA, 32 nt, Homo Sapiens
aaauuuucgaagaacauuaaaguucuaccaau

SEQ ID NO: 96629 - RNA, 32 nt, Homo Sapiens
gcagagcucagguuggcccuggccuuugccau

SEQ ID NO: 96630 - RNA, 32 nt, Homo Sapiens
uuuuccagcgggacucuucucauccuuccuca

SEQ ID NO: 96631 - RNA, 32 nt, Homo Sapiens
aggcuccgacgcccucgcccagcccagcucuc

SEQ ID NO: 96632 - RNA, 32 nt, Homo Sapiens
ccagccgccggguggagggucccggccgggag

SEQ ID NO: 96633 - RNA, 32 nt, Homo Sapiens
uuguguaaguaaaguaaguuaaguuauagcuu

SEQ ID NO: 96634 - RNA, 32 nt, Homo Sapiens
uccaggugccccagagucuggugcugggggcu

SEQ ID NO: 96635 - RNA, 32 nt, Homo Sapiens
cuacaaaaaauuuaaaaaauuagccauggugg

SEQ ID NO: 96636 - RNA, 32 nt, Homo Sapiens
aggauaacugucagucuugucuuagguaaaug

SEQ ID NO: 96637 - RNA, 32 nt, Homo Sapiens
uggcgggcggcgaggagaagcucggcggcguc

SEQ ID NO: 96638 - RNA, 32 nt, Homo Sapiens
gaaucuuucuucaucaucuaaaugguguguug

SEQ ID NO: 96639 - RNA, 32 nt, Homo Sapiens
aacuuucuguugaaucacaacaaaauuagauu

SEQ ID NO: 96640 - RNA, 32 nt, Homo Sapiens
ugguaucccagggucccugcucaaguuuucuu

SEQ ID NO: 96641 - RNA, 32 nt, Homo Sapiens
cagaggaagguggugaugcugcugaaggagga

SEQ ID NO: 96642 - RNA, 32 nt, Homo Sapiens
cugggagggggcaaacuggggguugccacagg

SEQ ID NO: 96643 - RNA, 32 nt, Homo Sapiens
auguuguccauaucagaacgugcucagacucu

SEQ ID NO: 96644 - RNA, 32 nt, Homo Sapiens
gccgcauccccugccccagcugacgggucaaa

SEQ ID NO: 96645 - RNA, 32 nt, Homo Sapiens
uugggcugggguggaggcugggaucagaccgu

SEQ ID NO: 96646 - RNA, 32 nt, Homo Sapiens
ccgaggggucccuggaggaaggaagcagggaa

SEQ ID NO: 96647 - RNA, 32 nt, Homo Sapiens
cccugccucccucuccgcuguggucauuuagg

SEQ ID NO: 96648 - RNA, 32 nt, Homo Sapiens
uuaauaaaacaaaacaaaacaaagcaaaauau

SEQ ID NO: 96649 - RNA, 32 nt, Homo Sapiens
acuauggaauaauugacaaauugaaaucucgu

SEQ ID NO: 96650 - RNA, 32 nt, Homo Sapiens
uggcugucaggagggcuuccugggaggugucu

SEQ ID NO: 96651 - RNA, 31 nt, Homo Sapiens
augaucaaauaaaaaauuuguacaucacaau

SEQ ID NO: 96652 - RNA, 32 nt, Homo Sapiens
agggagaagaaaaaacaaaacacuugaaccaa

SEQ ID NO: 96653 - RNA, 32 nt, Homo Sapiens
ucgucgccggggauuggggucccagcgacacc

SEQ ID NO: 96654 - RNA, 32 nt, Homo Sapiens
acaaauaaagaggagaaaaaacagaagaacuu

SEQ ID NO: 96655 - RNA, 32 nt, Homo Sapiens
uuauuucccccucccugccuuaaaacuuggga

SEQ ID NO: 96656 - RNA, 32 nt, Homo Sapiens
aaagaggagagaaagaaauuuauuuuacauug

SEQ ID NO: 96657 - RNA, 32 nt, Homo Sapiens
gaccgggacugggagcugagcggcacugggag

SEQ ID NO: 96658 - RNA, 32 nt, Homo Sapiens
gaauuguaggauguuuagcagcaucacuggcc

SEQ ID NO: 96659 - RNA, 32 nt, Homo Sapiens
agcaauggccaccagcaggugaagggcaucgc

SEQ ID NO: 96660 - RNA, 32 nt, Homo Sapiens
uccugcacugguacaugcaucuguaauacagu

SEQ ID NO: 96661 - RNA, 32 nt, Homo Sapiens
agcuuccucuaucugauucucuaacaacugca

SEQ ID NO: 96662 - RNA, 32 nt, Homo Sapiens
uacuacagaauuaaaauguaggucuaacauaa

SEQ ID NO: 96663 - RNA, 32 nt, Homo Sapiens
accccaagucccgcccggaggagaggcacagc

SEQ ID NO: 96664 - RNA, 32 nt, Homo Sapiens
uuuugcucuguuuuuaccacagcugugccuug

SEQ ID NO: 96665 - RNA, 32 nt, Homo Sapiens
caggccuaucuugaacuuugguaaauuauuuu

SEQ ID NO: 96666 - RNA, 32 nt, Homo Sapiens
gaacccuccugccccaggcuuccaggccccau

SEQ ID NO: 96667 - RNA, 32 nt, Homo Sapiens
ccccucgcucguucccucccuccggcgagggc

SEQ ID NO: 96668 - RNA, 30 nt, Homo Sapiens
aaaugugcagaauaaacuauuuuuugaagg

SEQ ID NO: 96669 - RNA, 32 nt, Homo Sapiens
cugucaucccagagcaggcagaugggcucccg

SEQ ID NO: 96670 - RNA, 32 nt, Homo Sapiens
ugaccgcgcgucugcugcagagaccaugucug

SEQ ID NO: 96671 - RNA, 32 nt, Homo Sapiens
gccucacuaauccuaauuauguacauacagaa

SEQ ID NO: 96672 - RNA, 32 nt, Homo Sapiens
cuuccccuccuccagcuguugcagcuugaggg

SEQ ID NO: 96673 - RNA, 32 nt, Homo Sapiens
aauuuguacaugcagccaaauuuacaggaauu

SEQ ID NO: 96674 - RNA, 32 nt, Homo Sapiens
uuugaugguggugagggugggugauggugccc

SEQ ID NO: 96675 - RNA, 32 nt, Homo Sapiens
caacacaauuuaauuuuugucugccacauuag

SEQ ID NO: 96676 - RNA, 32 nt, Homo Sapiens
acucaggaggcuguggcagagaauugcuugaa

SEQ ID NO: 96677 - RNA, 32 nt, Homo Sapiens
gcaggcuccuggauggacaccagcuacacugu

SEQ ID NO: 96678 - RNA, 32 nt, Homo Sapiens
uauaguaauguuuggaucugacucuaaaaguu

SEQ ID NO: 96679 - RNA, 32 nt, Homo Sapiens
gccgcuggguccucgggggcuuacucaucucc

SEQ ID NO: 96680 - RNA, 32 nt, Homo Sapiens
cuauacuucuccacuuuuuagagcggcgucuu

SEQ ID NO: 96681 - RNA, 32 nt, Homo Sapiens
aacugccugugacuccucuccuccccggcccc

SEQ ID NO: 96682 - RNA, 30 nt, Homo Sapiens
ccggaguggggcgagccgcggaacccggcc

SEQ ID NO: 96683 - RNA, 32 nt, Homo Sapiens
cuugcccugggaauggagguguagagacaggg

SEQ ID NO: 96684 - RNA, 32 nt, Homo Sapiens
ugagggggucagacacaggcccugccccugcc

SEQ ID NO: 96685 - RNA, 32 nt, Homo Sapiens
cuucaaagaaauguauaugcagugagacauuu

SEQ ID NO: 96686 - RNA, 32 nt, Homo Sapiens
guaaaucaaaacuacuaugaggucggguguag

SEQ ID NO: 96687 - RNA, 32 nt, Homo Sapiens
cggacucggcgcccagcgcccaagcgcuaacc

SEQ ID NO: 96688 - RNA, 32 nt, Homo Sapiens
ggagcucuggaguuaaaacggcccucggagau

SEQ ID NO: 96689 - RNA, 32 nt, Homo Sapiens
uucccuugcagggcagugaugaugacaugaaa

SEQ ID NO: 96690 - RNA, 32 nt, Homo Sapiens
agcucuccauccucucugggaauuuaccgaug

SEQ ID NO: 96691 - RNA, 32 nt, Homo Sapiens
gaauauauauauauuuuuaaaguagcuugaga

SEQ ID NO: 96692 - RNA, 32 nt, Homo Sapiens
ucgcgcggccccagcggcugcccgcaccccag

SEQ ID NO: 96693 - RNA, 32 nt, Homo Sapiens
aacuguccuaaaauaaaagacuuauuuuuuaa

SEQ ID NO: 96694 - RNA, 32 nt, Homo Sapiens
gguagguggggcggggguagggguggauaaua

SEQ ID NO: 96695 - RNA, 32 nt, Homo Sapiens
agaaaugugucaaauguaaaucuuucaaagcc

SEQ ID NO: 96696 - RNA, 32 nt, Homo Sapiens
aaauuagcuggguguguuggcacgugccugua

SEQ ID NO: 96697 - RNA, 32 nt, Homo Sapiens
uuuuuguuugguuuuucuuuuagcugaaucau

SEQ ID NO: 96698 - RNA, 32 nt, Homo Sapiens
aaggacaccaaaaugaagaagacacagaggug

SEQ ID NO: 96699 - RNA, 32 nt, Homo Sapiens
accaaacggaacaaccucuuuuuucuacauug

SEQ ID NO: 96700 - RNA, 32 nt, Homo Sapiens
acgcucccggccccggccccggcaucggcauc

SEQ ID NO: 96701 - RNA, 32 nt, Homo Sapiens
accgggcagcgggagucaggaccgccuguccu

SEQ ID NO: 96702 - RNA, 32 nt, Homo Sapiens
gcucccuucccucuccuggggcgggggaaggu

SEQ ID NO: 96703 - RNA, 32 nt, Homo Sapiens
cccccauccuccuuccucucccacagcucacu

SEQ ID NO: 96704 - RNA, 32 nt, Homo Sapiens
uucauaauuuaaaagagucaaacacuauaaaa

SEQ ID NO: 96705 - RNA, 32 nt, Homo Sapiens
uguguggcuucgugaccugaagauacugggaa

SEQ ID NO: 96706 - RNA, 32 nt, Homo Sapiens
uccguucuccagaucuguuugcucuuaacagg

SEQ ID NO: 96707 - RNA, 31 nt, Homo Sapiens
gugccagcgggccuggugauucggaaaugau

SEQ ID NO: 96708 - RNA, 32 nt, Homo Sapiens
cugcaggagccgcggcagccgccguccuugca

SEQ ID NO: 96709 - RNA, 32 nt, Homo Sapiens
gagccggagaccgcggcggcggcggcugcugc

SEQ ID NO: 96710 - RNA, 32 nt, Homo Sapiens
gggagccauuuucccugauuuguuugccucau

SEQ ID NO: 96711 - RNA, 32 nt, Homo Sapiens
ugcaucuuagggcaucgaucuuccucacacca

SEQ ID NO: 96712 - RNA, 32 nt, Homo Sapiens
cuagggguucuuugcuccugcugcuucaggua

SEQ ID NO: 96713 - RNA, 32 nt, Homo Sapiens
aaaguaggccccacaaauaauauuuuuaaaau

SEQ ID NO: 96714 - RNA, 32 nt, Homo Sapiens
uuauuucuucuuuuccaaauacaaauaagauu

SEQ ID NO: 96715 - RNA, 32 nt, Homo Sapiens
guugccucaugcugcugcugagcaaccuucac

SEQ ID NO: 96716 - RNA, 32 nt, Homo Sapiens
ucaaguaacaagguuugggacaaugucuaagg

SEQ ID NO: 96717 - RNA, 32 nt, Homo Sapiens
cucaggcugggaagaacacaucuugggccaac

SEQ ID NO: 96718 - RNA, 32 nt, Homo Sapiens
gagaauucagguuaccaagacggaaggugucu

SEQ ID NO: 96719 - RNA, 32 nt, Homo Sapiens
aaaaccuaguggagagaacacaugguacaauc

SEQ ID NO: 96720 - RNA, 32 nt, Homo Sapiens
ccccaucuugucacaucuggcccugaccccac

SEQ ID NO: 96721 - RNA, 32 nt, Homo Sapiens
acaaaucuuuaaaaucugcugcaaauuuaaau

SEQ ID NO: 96722 - RNA, 32 nt, Homo Sapiens
uaguaucagggugagagcauccuugaucuggc

SEQ ID NO: 96723 - RNA, 32 nt, Homo Sapiens
acuaauccauauauucuuuagacaaggagagu

SEQ ID NO: 96724 - RNA, 32 nt, Homo Sapiens
agcucgccccgccuccucccgcuggguuccgu

SEQ ID NO: 96725 - RNA, 32 nt, Homo Sapiens
auccggcagccucucuucacugcuacaugugc

SEQ ID NO: 96726 - RNA, 32 nt, Homo Sapiens
auaacauguucccuuuuguuuuguaaauaaau

SEQ ID NO: 96727 - RNA, 28 nt, Homo Sapiens
gagggaaagcaguuuuccuggaggaagc

SEQ ID NO: 96728 - RNA, 32 nt, Homo Sapiens
gugcugagaugagcacacacacguacggagaa

SEQ ID NO: 96729 - RNA, 32 nt, Homo Sapiens
agaagcuucucgcgcacaggaagucgcugcga

SEQ ID NO: 96730 - RNA, 32 nt, Homo Sapiens
cugguccagguuuugaugugggucccguaaag

SEQ ID NO: 96731 - RNA, 32 nt, Homo Sapiens
gcugggacagguggagaaggaaguaggaauga

SEQ ID NO: 96732 - RNA, 32 nt, Homo Sapiens
cagcacuuuuaaaaauaugugaacucaaauau

SEQ ID NO: 96733 - RNA, 32 nt, Homo Sapiens
cuuucauuccuuguugucuacuccaaaggaaa

SEQ ID NO: 96734 - RNA, 32 nt, Homo Sapiens
auuucagaauaaaacaauugggcaaaacuacc

SEQ ID NO: 96735 - RNA, 32 nt, Homo Sapiens
ugucaggagaggacauggagggggcugaguga

SEQ ID NO: 96736 - RNA, 32 nt, Homo Sapiens
ugccuguaaucccagcacuuugagaggccuga

SEQ ID NO: 96737 - RNA, 32 nt, Homo Sapiens
uggcuacggaggggcgcgggaggaagaggagg

SEQ ID NO: 96738 - RNA, 32 nt, Homo Sapiens
ggggcaauuuaaauuaagaagugguuaggcau

SEQ ID NO: 96739 - RNA, 32 nt, Homo Sapiens
augguccuaaaagcaaaauaaaaacuauucga

SEQ ID NO: 96740 - RNA, 32 nt, Homo Sapiens
agcuguucacuuccucuuccuggagcuguggc

SEQ ID NO: 96741 - RNA, 32 nt, Homo Sapiens
guuuagaauggaggaagaacaacaaagacaug

SEQ ID NO: 96742 - RNA, 32 nt, Homo Sapiens
uuugcaguuacaggccaguucuccagcucucc

SEQ ID NO: 96743 - RNA, 32 nt, Homo Sapiens
gcgcagcguccuguguuggaaugugcggcugc

SEQ ID NO: 96744 - RNA, 32 nt, Homo Sapiens
aaugccaaguuaaaaagcacccgcccugugac

SEQ ID NO: 96745 - RNA, 32 nt, Homo Sapiens
cggaagcgcaggcucccggcgcugcgcuggag

SEQ ID NO: 96746 - RNA, 32 nt, Homo Sapiens
guugugggagggaccuggugggaaauaauuug

SEQ ID NO: 96747 - RNA, 32 nt, Homo Sapiens
gggcgaaguuugggggguguuuuguggggcuc

SEQ ID NO: 96748 - RNA, 32 nt, Homo Sapiens
gaggcccaucuggccugaacugaggcuccagc

SEQ ID NO: 96749 - RNA, 32 nt, Homo Sapiens
caaaauuguaaguguuguuagguuuuugugug

SEQ ID NO: 96750 - RNA, 32 nt, Homo Sapiens
ccccguccaccgccuccacgccgcaccuggag

SEQ ID NO: 96751 - RNA, 32 nt, Homo Sapiens
ucauuuacuguggcuucuuaaucuuuucacaa

SEQ ID NO: 96752 - RNA, 32 nt, Homo Sapiens
ggcccgggcugccccaggaccacggacggaaa

SEQ ID NO: 96753 - RNA, 32 nt, Homo Sapiens
gagcuugcuucuuuuuguuuugccugccacua

SEQ ID NO: 96754 - RNA, 32 nt, Homo Sapiens
cccaaacccgcugcccaguccuggcacugccu

SEQ ID NO: 96755 - RNA, 32 nt, Homo Sapiens
gagucugcccuucucaggccugcuccccaccc

SEQ ID NO: 96756 - RNA, 32 nt, Homo Sapiens
gccaguagcaccaggauaugucuuaaagagcu

SEQ ID NO: 96757 - RNA, 32 nt, Homo Sapiens
uuggaucaaaugcuccacaacuaguugaaacu

SEQ ID NO: 96758 - RNA, 32 nt, Homo Sapiens
guucucgggaagggcugcaucuccgagccgaa

SEQ ID NO: 96759 - RNA, 32 nt, Homo Sapiens
acucuggugaagccucugcugcagacagcccg

SEQ ID NO: 96760 - RNA, 32 nt, Homo Sapiens
agccgccuccugccgaucgcccggggcugcga

SEQ ID NO: 96761 - RNA, 32 nt, Homo Sapiens
gggggccccaagaggagaggagaagugcugag

SEQ ID NO: 96762 - RNA, 32 nt, Homo Sapiens
gucaggccgccccuuccucucuaggggcuugg

SEQ ID NO: 96763 - RNA, 32 nt, Homo Sapiens
ggauuacaggugugagccacccugcccagccg

SEQ ID NO: 96764 - RNA, 32 nt, Homo Sapiens
agcaccuugaaaucuguaaaaccacaagaaag

SEQ ID NO: 96765 - RNA, 32 nt, Homo Sapiens
agucacuuuuuucuuuggccuguccccaucuu

SEQ ID NO: 96766 - RNA, 32 nt, Homo Sapiens
uugaaguguuuguucaguuaggggcuggagag

SEQ ID NO: 96767 - RNA, 32 nt, Homo Sapiens
gaaggguguggacuuuggaaugggguuugcug

SEQ ID NO: 96768 - RNA, 32 nt, Homo Sapiens
ggcccggagcgguccccggcccgggaaacuug

SEQ ID NO: 96769 - RNA, 32 nt, Homo Sapiens
cccauuucaaccagucuagcagcaucugcaac

SEQ ID NO: 96770 - RNA, 32 nt, Homo Sapiens
cccuacuguccuuugggagccuggaccggaag

SEQ ID NO: 96771 - RNA, 31 nt, Homo Sapiens
ugcugaucagaaggaaaguccacaucuugca

SEQ ID NO: 96772 - RNA, 32 nt, Homo Sapiens
ucuguauggcuucggcggcugaucuaagaaua

SEQ ID NO: 96773 - RNA, 32 nt, Homo Sapiens
aucucuccaaauauuauguccugagccaguca

SEQ ID NO: 96774 - RNA, 32 nt, Homo Sapiens
ugcaguaccucaccagggagcauuccacuaug

SEQ ID NO: 96775 - RNA, 32 nt, Homo Sapiens
ucagucccugucaggacgcccucgauccugug

SEQ ID NO: 96776 - RNA, 32 nt, Homo Sapiens
gauuacauuuuucccucgcauuaauauauaac

SEQ ID NO: 96777 - RNA, 32 nt, Homo Sapiens
ggugauguuguaccucuuuugcuugccaaagu

SEQ ID NO: 96778 - RNA, 32 nt, Homo Sapiens
gugcauguauaaauaauggcaggauggggggu

SEQ ID NO: 96779 - RNA, 32 nt, Homo Sapiens
ucgcuuuuuucuuuuuaugcuuucguuuguuu

SEQ ID NO: 96780 - RNA, 32 nt, Homo Sapiens
uugcgccucuucagguucuuaagggauucucc

SEQ ID NO: 96781 - RNA, 32 nt, Homo Sapiens
aaacuggaaaauaaaauggcuuaucugcugau

SEQ ID NO: 96782 - RNA, 32 nt, Homo Sapiens
gcugggacaaggauuccuggccucgaagcccu

SEQ ID NO: 96783 - RNA, 32 nt, Homo Sapiens
gcucgaccacggccgcaucucaucugggggug

SEQ ID NO: 96784 - RNA, 32 nt, Homo Sapiens
agcugaaagauuugaugagggauuggaaugug

SEQ ID NO: 96785 - RNA, 32 nt, Homo Sapiens
gaagguagagauguggggguccuguauccugg

SEQ ID NO: 96786 - RNA, 32 nt, Homo Sapiens
aacagaagagugagaagaaaggagaggaaaag

SEQ ID NO: 96787 - RNA, 32 nt, Homo Sapiens
gcuuucacccucagcggcaaaauuaauggaca

SEQ ID NO: 96788 - RNA, 32 nt, Homo Sapiens
aaacucgacaggacccugcccgaggggcccuc

SEQ ID NO: 96789 - RNA, 32 nt, Homo Sapiens
agucaccaugaagcugcugcugcugcacccgg

SEQ ID NO: 96790 - RNA, 32 nt, Homo Sapiens
cagagaauaagaagauagaaucauaugucugc

SEQ ID NO: 96791 - RNA, 32 nt, Homo Sapiens
guaaucccagcauugguggacacacauuaugu

SEQ ID NO: 96792 - RNA, 32 nt, Homo Sapiens
uggcuaauuuuuuguauuuuuguagagacaag

SEQ ID NO: 96793 - RNA, 32 nt, Homo Sapiens
gcauaauuuuagaugccugugaaauaguacug

SEQ ID NO: 96794 - RNA, 31 nt, Homo Sapiens
agaauuucauggagaaaguagaggcucuaac

SEQ ID NO: 96795 - RNA, 32 nt, Homo Sapiens
cugucccccaccagagccccagcuccugucug

SEQ ID NO: 96796 - RNA, 32 nt, Homo Sapiens
gcuuuaguggccggccggccgcucucaucccc

SEQ ID NO: 96797 - RNA, 32 nt, Homo Sapiens
uccuacuccuugccccccaccccgccccgccc

SEQ ID NO: 96798 - RNA, 29 nt, Homo Sapiens
uuuguauaaaguuugcuuucaauaacagu

SEQ ID NO: 96799 - RNA, 32 nt, Homo Sapiens
caccuguagucaccccaccacacgcagacuca

SEQ ID NO: 96800 - RNA, 32 nt, Homo Sapiens
aagagagguugagucacccauccccgaggugg

SEQ ID NO: 96801 - RNA, 32 nt, Homo Sapiens
cucacaaugacucuggcuggccccacgcagcg

SEQ ID NO: 96802 - RNA, 32 nt, Homo Sapiens
agguugcagcuaucauuauauucugcauguau

SEQ ID NO: 96803 - RNA, 32 nt, Homo Sapiens
ugugucuggcccuuggugacuguccguguuuc

SEQ ID NO: 96804 - RNA, 32 nt, Homo Sapiens
uagcgcuuaucuccgggccgcggcugcugccc

SEQ ID NO: 96805 - RNA, 32 nt, Homo Sapiens
guuuucaggagcccgagcgagggcgccgcuuu

SEQ ID NO: 96806 - RNA, 32 nt, Homo Sapiens
acugaugcuguaaauuauuuuuaauaaagaaa

SEQ ID NO: 96807 - RNA, 32 nt, Homo Sapiens
uaguauaagucugggcacuggaugcaugaauu

SEQ ID NO: 96808 - RNA, 32 nt, Homo Sapiens
acagauuugcaaccgauucccaugccuccuuu

SEQ ID NO: 96809 - RNA, 32 nt, Homo Sapiens
aggccuggcagaaugggugcugauggagcuac

SEQ ID NO: 96810 - RNA, 32 nt, Homo Sapiens
cugugucaaaauuuauaaagauacaaaaggca

SEQ ID NO: 96811 - RNA, 32 nt, Homo Sapiens
ccaggaacauguaacuuggagagggacgaaga

SEQ ID NO: 96812 - RNA, 32 nt, Homo Sapiens
cugaguuuucccuuauuuucagcuuuuuccua

SEQ ID NO: 96813 - RNA, 32 nt, Homo Sapiens
ucgccacgguugggggaaacgcggcggacgcc

SEQ ID NO: 96814 - RNA, 29 nt, Homo Sapiens
cgucauggcccuccgauuccucuugggcu

SEQ ID NO: 96815 - RNA, 32 nt, Homo Sapiens
caguauacacggucuaacucaucucuccccag

SEQ ID NO: 96816 - RNA, 32 nt, Homo Sapiens
cuagaagguaacuggaacaggccugggcacuu

SEQ ID NO: 96817 - RNA, 32 nt, Homo Sapiens
gggugccccucgcgcgugugggucccggggca

SEQ ID NO: 96818 - RNA, 32 nt, Homo Sapiens
ucggguuggccauucuuuuuguucacuuucua

SEQ ID NO: 96819 - RNA, 32 nt, Homo Sapiens
agccuaguagaucaugcauuaauagcaaggug

SEQ ID NO: 96820 - RNA, 32 nt, Homo Sapiens
uuuuuacauaauuuauacuaauaguaauuauu

SEQ ID NO: 96821 - RNA, 32 nt, Homo Sapiens
ggcagcgguguccgccccacggccggcguugc

SEQ ID NO: 96822 - RNA, 32 nt, Homo Sapiens
gagaggaugggguggggcaccaggcgagagau

SEQ ID NO: 96823 - RNA, 32 nt, Homo Sapiens
uuaauucucuuuccauccuccuccucagaaau

SEQ ID NO: 96824 - RNA, 32 nt, Homo Sapiens
gacgccccuuucucuugcuguuuaccgcccac

SEQ ID NO: 96825 - RNA, 32 nt, Homo Sapiens
ugaaagccccccauacccacagcccucugucc

SEQ ID NO: 96826 - RNA, 32 nt, Homo Sapiens
uuuuucacuccagcccuccuucaucguuacau

SEQ ID NO: 96827 - RNA, 32 nt, Homo Sapiens
aggguuaauaagacuccaacccuaauggccca

SEQ ID NO: 96828 - RNA, 32 nt, Homo Sapiens
gcauacuuggagcuauaauccaaacguuuuac

SEQ ID NO: 96829 - RNA, 32 nt, Homo Sapiens
cggaggagggggcggggcucucgggagccgug

SEQ ID NO: 96830 - RNA, 32 nt, Homo Sapiens
guaaucaauuuaaugguccuuuaaaaugucug

SEQ ID NO: 96831 - RNA, 32 nt, Homo Sapiens
uccucuguuauaaagaguauuuacaaauuucc

SEQ ID NO: 96832 - RNA, 32 nt, Homo Sapiens
ugcagagucuuuguugcuaucaucaucaucau

SEQ ID NO: 96833 - RNA, 32 nt, Homo Sapiens
gacgccucggcugguucgcgacgcagcccccc

SEQ ID NO: 96834 - RNA, 32 nt, Homo Sapiens
aaguguuuauggugcugguguaaacgugcugc

SEQ ID NO: 96835 - RNA, 32 nt, Homo Sapiens
gagcagggcgccccguagccggcggggucggc

SEQ ID NO: 96836 - RNA, 32 nt, Homo Sapiens
aguagggagggagaggcaccaugcaugugggu

SEQ ID NO: 96837 - RNA, 29 nt, Homo Sapiens
uugcauauauguauauauacauacacgca

SEQ ID NO: 96838 - RNA, 32 nt, Homo Sapiens
ucugcauggccacugggcauguguguugggag

SEQ ID NO: 96839 - RNA, 32 nt, Homo Sapiens
caccuccccucccccagcaucucucagagaug

SEQ ID NO: 96840 - RNA, 32 nt, Homo Sapiens
ccuaccuguuuccuccucccgguccuuucgac

SEQ ID NO: 96841 - RNA, 32 nt, Homo Sapiens
ggccgugggcucggcccggacccggcauucgg

SEQ ID NO: 96842 - RNA, 32 nt, Homo Sapiens
acaggaggggagaggaaacaaaugugaaguug

SEQ ID NO: 96843 - RNA, 32 nt, Homo Sapiens
cacgucucggcuuuucggccaucggagucggu

SEQ ID NO: 96844 - RNA, 32 nt, Homo Sapiens
cuccuguaaucccagcacuuugggagguugag

SEQ ID NO: 96845 - RNA, 32 nt, Homo Sapiens
caaauuucacuuuccuucucaggucucaccuc

SEQ ID NO: 96846 - RNA, 32 nt, Homo Sapiens
cgaaaaaagagacaacucuacagugcauuggc

SEQ ID NO: 96847 - RNA, 32 nt, Homo Sapiens
ggacucuggaggcagagcuggggccuccugcu

SEQ ID NO: 96848 - RNA, 32 nt, Homo Sapiens
ugguggcggcgguggaggcugaggcggcggcc

SEQ ID NO: 96849 - RNA, 32 nt, Homo Sapiens
aauaggauuuuaaugaauuuuuggcaaguggc

SEQ ID NO: 96850 - RNA, 32 nt, Homo Sapiens
ucaccuucgucuccccgccauggagaccucag

SEQ ID NO: 96851 - RNA, 32 nt, Homo Sapiens
aaauuuuaugaguagugcugugucuggaguug

SEQ ID NO: 96852 - RNA, 32 nt, Homo Sapiens
ucuuuuaaaaauuuacuuguagagaugggguc

SEQ ID NO: 96853 - RNA, 32 nt, Homo Sapiens
aucucauuuuuagguuuucucuucguuccaga

SEQ ID NO: 96854 - RNA, 32 nt, Homo Sapiens
ccuagguguccaucaauagagaauuggguaaa

SEQ ID NO: 96855 - RNA, 32 nt, Homo Sapiens
cugcagaccucaaucucacgcccgcaaggauu

SEQ ID NO: 96856 - RNA, 32 nt, Homo Sapiens
uaagaaaugaaauaagaaacaugugcaggcac

SEQ ID NO: 96857 - RNA, 32 nt, Homo Sapiens
aggccugcucuccucacacauugugugguuug

SEQ ID NO: 96858 - RNA, 32 nt, Homo Sapiens
gcauguguugugcaauugcuuucaacccuuug

SEQ ID NO: 96859 - RNA, 32 nt, Homo Sapiens
cgcacccucgcccagggcuggggcgcagugcg

SEQ ID NO: 96860 - RNA, 32 nt, Homo Sapiens
agagauccuuuucaaaaagauuauaacuggau

SEQ ID NO: 96861 - RNA, 32 nt, Homo Sapiens
ccauacagccucagccaaugaccccggcucgg

SEQ ID NO: 96862 - RNA, 28 nt, Homo Sapiens
gaagaaauggcgaaguuuguaugacucc

SEQ ID NO: 96863 - RNA, 32 nt, Homo Sapiens
gccaggaaugagggagaaaugcccuuuuuggc

SEQ ID NO: 96864 - RNA, 32 nt, Homo Sapiens
cuaagggacagacugccuccucaagugggucc

SEQ ID NO: 96865 - RNA, 32 nt, Homo Sapiens
uggaaaucccaucaaaaauuggauuaaaaaau

SEQ ID NO: 96866 - RNA, 32 nt, Homo Sapiens
gggacgcuucucuggaggguguggcggaaacu

SEQ ID NO: 96867 - RNA, 32 nt, Homo Sapiens
cuguccuaaaauccacacaguuuuaccuccug

SEQ ID NO: 96868 - RNA, 32 nt, Homo Sapiens
uggggugccgcggcaccacggggcaugcauga

SEQ ID NO: 96869 - RNA, 32 nt, Homo Sapiens
uuugugccaggccccaucuggauguccaugcc

SEQ ID NO: 96870 - RNA, 32 nt, Homo Sapiens
uggacuuaggguaauauucaccaccaugguga

SEQ ID NO: 96871 - RNA, 32 nt, Homo Sapiens
cuggagcagacacuuugugccccccaucccca

SEQ ID NO: 96872 - RNA, 32 nt, Homo Sapiens
gggaaaccugaacacgcugcugucagcaugug

SEQ ID NO: 96873 - RNA, 32 nt, Homo Sapiens
uggcccugcaugccuaguguggcaccuggcug

SEQ ID NO: 96874 - RNA, 32 nt, Homo Sapiens
ugccagccgggcccgccaggcccaggagcggc

SEQ ID NO: 96875 - RNA, 32 nt, Homo Sapiens
cgacgugugcgcgcuucucugggccagagcga

SEQ ID NO: 96876 - RNA, 32 nt, Homo Sapiens
aaggcuuccgucccuggagaggaggcggcgcc

SEQ ID NO: 96877 - RNA, 32 nt, Homo Sapiens
gcaacaaaaaaguuuuugugaaugcugcaaga

SEQ ID NO: 96878 - RNA, 32 nt, Homo Sapiens
uuaaguuuuuucugcucugauaucuugccucu

SEQ ID NO: 96879 - RNA, 32 nt, Homo Sapiens
cagggggaaugggggcuguaugccugcuccug

SEQ ID NO: 96880 - RNA, 32 nt, Homo Sapiens
cauggaugcugggaaacguaguuucuaucugg

SEQ ID NO: 96881 - RNA, 32 nt, Homo Sapiens
ugcaggugauggagaacacagaugacucgggc

SEQ ID NO: 96882 - RNA, 32 nt, Homo Sapiens
ucaggggcccccuuccuccccccgugucaacu

SEQ ID NO: 96883 - RNA, 32 nt, Homo Sapiens
ggcugccucucuugguucugcaugguacauuu

SEQ ID NO: 96884 - RNA, 32 nt, Homo Sapiens
cguguggaaaauuaguggagagcugacaagug

SEQ ID NO: 96885 - RNA, 32 nt, Homo Sapiens
ggcuccgccagccugcugcugcccucccgccc

SEQ ID NO: 96886 - RNA, 32 nt, Homo Sapiens
cacgcaccaucuguugccaucccggccggccg

SEQ ID NO: 96887 - RNA, 32 nt, Homo Sapiens
uucuuuuugccaacuuuccccacguuaaaggu

SEQ ID NO: 96888 - RNA, 32 nt, Homo Sapiens
guuugugaauauauuuuagaaagagaggaagg

SEQ ID NO: 96889 - RNA, 32 nt, Homo Sapiens
ugcgugcaugugcacucgcacgcccaugugug

SEQ ID NO: 96890 - RNA, 32 nt, Homo Sapiens
ccaccgcacgaugggagcuggugugggugagc

SEQ ID NO: 96891 - RNA, 32 nt, Homo Sapiens
uucuauccuaaacacauccauaaaaaaugugc

SEQ ID NO: 96892 - RNA, 32 nt, Homo Sapiens
aggaucgugucugggaaccagaaacccuacac

SEQ ID NO: 96893 - RNA, 32 nt, Homo Sapiens
auucuuuuagcagcacugcaagggcagucaug

SEQ ID NO: 96894 - RNA, 32 nt, Homo Sapiens
ggucuccaagggcaucacugggucugcuggcu

SEQ ID NO: 96895 - RNA, 32 nt, Homo Sapiens
gcuggcucacucuuccuucucugaaaugcaga

SEQ ID NO: 96896 - RNA, 28 nt, Homo Sapiens
ugagucauggucaugauuauaaacauca

SEQ ID NO: 96897 - RNA, 32 nt, Homo Sapiens
cgggggcugagcggcgcccgcuggggucgcuc

SEQ ID NO: 96898 - RNA, 32 nt, Homo Sapiens
gccggcaggcccagcccauccccucccucauc

SEQ ID NO: 96899 - RNA, 32 nt, Homo Sapiens
agcccguuggcgagcucuggcaccugcaaacc

SEQ ID NO: 96900 - RNA, 32 nt, Homo Sapiens
ggcgccuuuuuggccugugauguuuuauccuu

SEQ ID NO: 96901 - RNA, 32 nt, Homo Sapiens
gaggacacccccagccccccaagcauugaaga

SEQ ID NO: 96902 - RNA, 32 nt, Homo Sapiens
aggcagggugcucugcccacuccaucaccaug

SEQ ID NO: 96903 - RNA, 32 nt, Homo Sapiens
ucgcuccccccuccccaccuucagcuggcacc

SEQ ID NO: 96904 - RNA, 32 nt, Homo Sapiens
aacaagaccaaggagcucaauaacuucaugau

SEQ ID NO: 96905 - RNA, 32 nt, Homo Sapiens
ugaaaagaacugagaagaaaaauguauaauuu

SEQ ID NO: 96906 - RNA, 32 nt, Homo Sapiens
gagguauuaggacgaccauacugccucugagc

SEQ ID NO: 96907 - RNA, 32 nt, Homo Sapiens
aacuuagcugggugugguggugugaucuguag

SEQ ID NO: 96908 - RNA, 32 nt, Homo Sapiens
gggcuggcaagagcugccgccggugcugggag

SEQ ID NO: 96909 - RNA, 32 nt, Homo Sapiens
auuucaaugagaaagcacugugaaauugugaa

SEQ ID NO: 96910 - RNA, 32 nt, Homo Sapiens
ucuucccugcuacuccaugcugguggccucac

SEQ ID NO: 96911 - RNA, 32 nt, Homo Sapiens
uaugggggaaaauuauuuugacaugacguggu

SEQ ID NO: 96912 - RNA, 32 nt, Homo Sapiens
augguguuggcuuccccuccccaccccacgcg

SEQ ID NO: 96913 - RNA, 32 nt, Homo Sapiens
gacugcagggagccuggccccggagccccggg

SEQ ID NO: 96914 - RNA, 32 nt, Homo Sapiens
cugccauuucucaggaaaggguggaguaugua

SEQ ID NO: 96915 - RNA, 32 nt, Homo Sapiens
guggagcgcugagggcuugguggcguggggug

SEQ ID NO: 96916 - RNA, 32 nt, Homo Sapiens
ggcgaaaacuuacugacgauaagaucaauucg

SEQ ID NO: 96917 - RNA, 32 nt, Homo Sapiens
ugucugucucaaagaaaacugcugcagaugga

SEQ ID NO: 96918 - RNA, 32 nt, Homo Sapiens
uggaaauacauaaagaaaauggucucccacag

SEQ ID NO: 96919 - RNA, 32 nt, Homo Sapiens
uggcaguaaaauguagagugaaaguuaaaucc

SEQ ID NO: 96920 - RNA, 32 nt, Homo Sapiens
agcauccucacaggcacccugggccccaagca

SEQ ID NO: 96921 - RNA, 32 nt, Homo Sapiens
uaucuuccugccuuuuucagauuuucaauauu

SEQ ID NO: 96922 - RNA, 32 nt, Homo Sapiens
ucagauggaaccacuguucccucaguguccuu

SEQ ID NO: 96923 - RNA, 32 nt, Homo Sapiens
auaauggagcaaguggccaaacaucagaaucg

SEQ ID NO: 96924 - RNA, 32 nt, Homo Sapiens
ccccuccccuaucuugccgcccgcccccucca

SEQ ID NO: 96925 - RNA, 32 nt, Homo Sapiens
uuguuauacuaaaaugucuacaucuuacuauu

SEQ ID NO: 96926 - RNA, 32 nt, Homo Sapiens
cagaggcgcucuugcgucaggacggcgccgcc

SEQ ID NO: 96927 - RNA, 32 nt, Homo Sapiens
ggaaugcucuucauuacuguugcucuguuuug

SEQ ID NO: 96928 - RNA, 32 nt, Homo Sapiens
ccucucuagacaacuaccccuuaguuauaauu

SEQ ID NO: 96929 - RNA, 32 nt, Homo Sapiens
gcuugcauuucuauuggaaaucagaacuuuga

SEQ ID NO: 96930 - RNA, 32 nt, Homo Sapiens
cacccuuccacacacacacacacacacacaca

SEQ ID NO: 96931 - RNA, 32 nt, Homo Sapiens
agugggauugaaggaaaaguagucuuugcccu

SEQ ID NO: 96932 - RNA, 32 nt, Homo Sapiens
uaaugucuuauguuuccucccagauuguuuuc

SEQ ID NO: 96933 - RNA, 32 nt, Homo Sapiens
aacgccaacaccuggugccuuuugcagccagc

SEQ ID NO: 96934 - RNA, 32 nt, Homo Sapiens
cauuuauuugguccuuugaagaucucaguagc

SEQ ID NO: 96935 - RNA, 32 nt, Homo Sapiens
ggaaggaacaauagcuagguaagauuuuuauc

SEQ ID NO: 96936 - RNA, 32 nt, Homo Sapiens
uggaggagggcuuguuuggagaagggaggcug

SEQ ID NO: 96937 - RNA, 30 nt, Homo Sapiens
cgugguggcaggcgccuguggucccagcua

SEQ ID NO: 96938 - RNA, 32 nt, Homo Sapiens
acgcccuuguagagcagcccgaccacaggagc

SEQ ID NO: 96939 - RNA, 32 nt, Homo Sapiens
caguuagaaaucaacaucuuugaaauuagggu

SEQ ID NO: 96940 - RNA, 32 nt, Homo Sapiens
auaguaagaucacuuguguauuuuauauuuua

SEQ ID NO: 96941 - RNA, 32 nt, Homo Sapiens
caauauagggaaaaaaugcaacaaagagcaaa

SEQ ID NO: 96942 - RNA, 32 nt, Homo Sapiens
caacauucgggaggccucuugguuucaggguc

SEQ ID NO: 96943 - RNA, 32 nt, Homo Sapiens
auugucauuuuccucuuugccuguggguuuaa

SEQ ID NO: 96944 - RNA, 32 nt, Homo Sapiens
uccuuuaaggcacagguuuucuccugcccugc

SEQ ID NO: 96945 - RNA, 32 nt, Homo Sapiens
accacuaugcuuaauguuaacaugauucuguu

SEQ ID NO: 96946 - RNA, 32 nt, Homo Sapiens
aguucgacaucagacagugguuccucgucacg

SEQ ID NO: 96947 - RNA, 32 nt, Homo Sapiens
uugaaugucuuuccaauggcuggaaagguccc

SEQ ID NO: 96948 - RNA, 32 nt, Homo Sapiens
ccagguguggacuuaaguugcuaggcuugcag

SEQ ID NO: 96949 - RNA, 32 nt, Homo Sapiens
cuucaggaggucaguucucaccccuuccucga

SEQ ID NO: 96950 - RNA, 32 nt, Homo Sapiens
ugaaaugcuguaaauacguugguuuuccuugu

SEQ ID NO: 96951 - RNA, 32 nt, Homo Sapiens
guguauuuucuuucccuuauucaaguaauaua

SEQ ID NO: 96952 - RNA, 32 nt, Homo Sapiens
cgggcccgccacgcgccgccacgagugagccc

SEQ ID NO: 96953 - RNA, 32 nt, Homo Sapiens
cggccggcgcguccuccugcucuccuccgcag

SEQ ID NO: 96954 - RNA, 32 nt, Homo Sapiens
acagaaaagucuuuaugagaaaucacauagga

SEQ ID NO: 96955 - RNA, 32 nt, Homo Sapiens
cucaaaaucagagaacacacguggggagaaau

SEQ ID NO: 96956 - RNA, 32 nt, Homo Sapiens
gcugcuuccagggccucugccuucaaggcccc

SEQ ID NO: 96957 - RNA, 32 nt, Homo Sapiens
uauauaugaugaaugcuaugcagauguugucu

SEQ ID NO: 96958 - RNA, 32 nt, Homo Sapiens
cgugggcacggagcuuccugccucugcuccga

SEQ ID NO: 96959 - RNA, 32 nt, Homo Sapiens
auguugacaaauugagauuugcugauggaaga

SEQ ID NO: 96960 - RNA, 32 nt, Homo Sapiens
cuuaguguuuuugucugacuuaaauaugcaaa

SEQ ID NO: 96961 - RNA, 31 nt, Homo Sapiens
ccacuccucaccccagcucaagccauggcag

SEQ ID NO: 96962 - RNA, 32 nt, Homo Sapiens
uccagagaccugagcuuuuggggcgcgggugg

SEQ ID NO: 96963 - RNA, 32 nt, Homo Sapiens
uauuuauacuaaagaugaguuuaucugauaga

SEQ ID NO: 96964 - RNA, 32 nt, Homo Sapiens
uaucauauuaucccuuuuuuuguuuguuguac

SEQ ID NO: 96965 - RNA, 32 nt, Homo Sapiens
cuggggaagugaugguguggccaggcaguuau

SEQ ID NO: 96966 - RNA, 32 nt, Homo Sapiens
uagauauguacaauaacauuuguugauauuaa

SEQ ID NO: 96967 - RNA, 32 nt, Homo Sapiens
cuuggacuucggggcggccucggacggccaug

SEQ ID NO: 96968 - RNA, 32 nt, Homo Sapiens
augagaguguaaacugcauaugagguugggcu

SEQ ID NO: 96969 - RNA, 32 nt, Homo Sapiens
uguaauuaauuuauuuuauguacaauaaaucg

SEQ ID NO: 96970 - RNA, 32 nt, Homo Sapiens
gcaggggauuauuugagguguagaggguggga

SEQ ID NO: 96971 - RNA, 32 nt, Homo Sapiens
aggauuuugaguaucucggaccuuucagcugu

SEQ ID NO: 96972 - RNA, 32 nt, Homo Sapiens
cucaccccaagccccagcccgcgaggccuccc

SEQ ID NO: 96973 - RNA, 32 nt, Homo Sapiens
uccgucaagcgucuuuucaaaguucggaguga

SEQ ID NO: 96974 - RNA, 32 nt, Homo Sapiens
gagagcuguguggugcagaaauccagaaauga

SEQ ID NO: 96975 - RNA, 32 nt, Homo Sapiens
ugccugggagaggggaagcagaucugaggaca

SEQ ID NO: 96976 - RNA, 32 nt, Homo Sapiens
agcuccucuaaccccuguucugaugggggagg

SEQ ID NO: 96977 - RNA, 32 nt, Homo Sapiens
cccaaggccugccuggcucugucugaacagaa

SEQ ID NO: 96978 - RNA, 32 nt, Homo Sapiens
gcaggcacgcaccaucuggggcagguggucug

SEQ ID NO: 96979 - RNA, 32 nt, Homo Sapiens
caaucuuuccugucacaguaacgugaaaacug

SEQ ID NO: 96980 - RNA, 32 nt, Homo Sapiens
uaaauugaaaauauaauggucauugcagaaaa

SEQ ID NO: 96981 - RNA, 32 nt, Homo Sapiens
aauaccucuucccuaaugccaccucaguuugu

SEQ ID NO: 96982 - RNA, 32 nt, Homo Sapiens
ccaucccccuucuuccuccccucaacagugag

SEQ ID NO: 96983 - RNA, 32 nt, Homo Sapiens
aaaaauguguguuugugggugaaauggcugcg

SEQ ID NO: 96984 - RNA, 28 nt, Homo Sapiens
ggguugggcuggaugccgagguaaaagu

SEQ ID NO: 96985 - RNA, 32 nt, Homo Sapiens
cggcucagcgucagggaggagagagaaugucu

SEQ ID NO: 96986 - RNA, 32 nt, Homo Sapiens
guguacuuuauagacauuuucagacauuuuug

SEQ ID NO: 96987 - RNA, 32 nt, Homo Sapiens
accugcagacaaacuggagcaauguuauuuuu

SEQ ID NO: 96988 - RNA, 32 nt, Homo Sapiens
ugcgcuucuccgaccgagaacucugcuaagcu

SEQ ID NO: 96989 - RNA, 32 nt, Homo Sapiens
ucaccuugaaccuguuugaaaaggcuucuucu

SEQ ID NO: 96990 - RNA, 32 nt, Homo Sapiens
cagacugucacuguauugaccggagcauuuac

SEQ ID NO: 96991 - RNA, 32 nt, Homo Sapiens
auaucuauuucuggcaucuauuaacaauuggu

SEQ ID NO: 96992 - RNA, 32 nt, Homo Sapiens
cuuggugccgcaguggcccaucuuuuauggga

SEQ ID NO: 96993 - RNA, 32 nt, Homo Sapiens
ucugcccaaacacacucccauggggcaagcac

SEQ ID NO: 96994 - RNA, 32 nt, Homo Sapiens
ugcaaagacaccuccuuaccuacugggaucac

SEQ ID NO: 96995 - RNA, 32 nt, Homo Sapiens
gacaguuuucccuuaguuuacaguuuccaaau

SEQ ID NO: 96996 - RNA, 32 nt, Homo Sapiens
aaggugucaaaagaaggaaaaauacaugugac

SEQ ID NO: 96997 - RNA, 32 nt, Homo Sapiens
cgggacccggagucggccgccuggugccacag

SEQ ID NO: 96998 - RNA, 32 nt, Homo Sapiens
gugacugaacucucaaaacacccuggguuggu

SEQ ID NO: 96999 - RNA, 32 nt, Homo Sapiens
cccaugaggagcugcugcugcucacugauggu

SEQ ID NO: 97000 - RNA, 32 nt, Homo Sapiens
cacaacaaacaccaccugagucccaucaaagc

SEQ ID NO: 97001 - RNA, 32 nt, Homo Sapiens
cccuggguucccucagcccagcccuguccagc

SEQ ID NO: 97002 - RNA, 32 nt, Homo Sapiens
ggcauggcugcacgcuccggcugcuaguagga

SEQ ID NO: 97003 - RNA, 32 nt, Homo Sapiens
cuuccuuaacaaugacuauuauaaugucuuac

SEQ ID NO: 97004 - RNA, 32 nt, Homo Sapiens
ugugggguggggucuuccccuugcugcuauug

SEQ ID NO: 97005 - RNA, 32 nt, Homo Sapiens
ucugggcacgccugcuggccgacccacugacc

SEQ ID NO: 97006 - RNA, 32 nt, Homo Sapiens
caguggggugagaggagggguuuacaggguua

SEQ ID NO: 97007 - RNA, 32 nt, Homo Sapiens
agaguucuaaauuuugucuuuaacucauaaaa

SEQ ID NO: 97008 - RNA, 32 nt, Homo Sapiens
uuagggcaggguggagaaugguacuccuuccu

SEQ ID NO: 97009 - RNA, 32 nt, Homo Sapiens
caccauguacugagcuaaccacuucuaagaaa

SEQ ID NO: 97010 - RNA, 32 nt, Homo Sapiens
cagaacagcugagacagaugaugugcaaagug

SEQ ID NO: 97011 - RNA, 32 nt, Homo Sapiens
augugaggagccuggaacagggcucugaauug

SEQ ID NO: 97012 - RNA, 32 nt, Homo Sapiens
gcgcggcucuguguggacucggagaaacgcgg

SEQ ID NO: 97013 - RNA, 32 nt, Homo Sapiens
uuuguaccuuuuccccccacagaugagaagug

SEQ ID NO: 97014 - RNA, 32 nt, Homo Sapiens
agaugucuagaauaaguuguucaguugaaguu

SEQ ID NO: 97015 - RNA, 32 nt, Homo Sapiens
uugguaccuagugauuaaucugcacuuuuauu

SEQ ID NO: 97016 - RNA, 32 nt, Homo Sapiens
cuggggcagggccagguuuuguguuuuagucc

SEQ ID NO: 97017 - RNA, 32 nt, Homo Sapiens
ccucaaagcucccucccaucuguaggagauua

SEQ ID NO: 97018 - RNA, 32 nt, Homo Sapiens
aauaggguggcagucccuggcugcugaggggg

SEQ ID NO: 97019 - RNA, 29 nt, Homo Sapiens
ccauaaagucauuuauauuugauuuugaa

SEQ ID NO: 97020 - RNA, 32 nt, Homo Sapiens
ucuuugggcucgggggcucccggagcagggcg

SEQ ID NO: 97021 - RNA, 32 nt, Homo Sapiens
agaaugcauguauuuucuuuuaucuuuggaac

SEQ ID NO: 97022 - RNA, 32 nt, Homo Sapiens
uuccugguguucccuuucccugcugaccuugg

SEQ ID NO: 97023 - RNA, 32 nt, Homo Sapiens
cuauuucucuuuucaaaccccaaaaaacuaug

SEQ ID NO: 97024 - RNA, 32 nt, Homo Sapiens
ccaacccgggcucgagcggcggcggccucagg

SEQ ID NO: 97025 - RNA, 32 nt, Homo Sapiens
uguaauacaaaacaaacauguaguuugaaggc

SEQ ID NO: 97026 - RNA, 32 nt, Homo Sapiens
cagccuggccaacauauagugaaacccugucu

SEQ ID NO: 97027 - RNA, 32 nt, Homo Sapiens
ggcuggaggguucugaauguccucucuccaug

SEQ ID NO: 97028 - RNA, 32 nt, Homo Sapiens
ugcauccuauaauuccaaauguugccagaggu

SEQ ID NO: 97029 - RNA, 32 nt, Homo Sapiens
cucgaggugccuucuucagggccugguugaag

SEQ ID NO: 97030 - RNA, 32 nt, Homo Sapiens
ucaagaaaugguuuguauaagaauaacaaucu

SEQ ID NO: 97031 - RNA, 32 nt, Homo Sapiens
gccaagcuugggaagauguguggccuugcccc

SEQ ID NO: 97032 - RNA, 32 nt, Homo Sapiens
uuggaugugaggauaguuaugaaaauacugag

SEQ ID NO: 97033 - RNA, 32 nt, Homo Sapiens
ucgcguagucucccgcgccgccguccacugcg

SEQ ID NO: 97034 - RNA, 32 nt, Homo Sapiens
cguucguuuuguuugguuuucuuuuuaccuag

SEQ ID NO: 97035 - RNA, 32 nt, Homo Sapiens
ccagaucccagcugugugacugauccacgcca

SEQ ID NO: 97036 - RNA, 32 nt, Homo Sapiens
ggagucagccucagcccugucuguacugcucg

SEQ ID NO: 97037 - RNA, 32 nt, Homo Sapiens
ucacagcucgguuuuucuuauuuguugagugc

SEQ ID NO: 97038 - RNA, 32 nt, Homo Sapiens
ggugguuaaggguagcaaaucucuaaagcacg

SEQ ID NO: 97039 - RNA, 32 nt, Homo Sapiens
guaauaauggaaauaaagugccuaauaaaugc

SEQ ID NO: 97040 - RNA, 32 nt, Homo Sapiens
uguucaaauguacuauggucucuuuuagaguc

SEQ ID NO: 97041 - RNA, 32 nt, Homo Sapiens
ucccagccccaaccccagucccagccccaacc

SEQ ID NO: 97042 - RNA, 32 nt, Homo Sapiens
uacugaauauuuuuagcuuucuuuugagaccu

SEQ ID NO: 97043 - RNA, 32 nt, Homo Sapiens
augaggagccuuggaaagaaaccagggggcca

SEQ ID NO: 97044 - RNA, 32 nt, Homo Sapiens
acgccgccgccaccgccuccucagagcggggc

SEQ ID NO: 97045 - RNA, 32 nt, Homo Sapiens
ugaggcgggcgcgggcccggguggggccaagg

SEQ ID NO: 97046 - RNA, 32 nt, Homo Sapiens
uacucauccaacaaagggcaaauauccagaau

SEQ ID NO: 97047 - RNA, 32 nt, Homo Sapiens
aauuucauguugaguucucaguuucucugcag

SEQ ID NO: 97048 - RNA, 32 nt, Homo Sapiens
cagauuucauaaaaauagugauucugguucuu

SEQ ID NO: 97049 - RNA, 32 nt, Homo Sapiens
gcugggcucccagacuccugggugcuguggga

SEQ ID NO: 97050 - RNA, 32 nt, Homo Sapiens
agcacgcuggugggaaaggacccgggacuuga

SEQ ID NO: 97051 - RNA, 32 nt, Homo Sapiens
auuaucagugauugaaacguuuacauguaccc

SEQ ID NO: 97052 - RNA, 32 nt, Homo Sapiens
uaaaacauuucuccaucacucauuccaggucc

SEQ ID NO: 97053 - RNA, 32 nt, Homo Sapiens
gcgguacccacccagcccaagggagucacagu

SEQ ID NO: 97054 - RNA, 32 nt, Homo Sapiens
guucaauagaaaguuuauggaggaauuauuca

SEQ ID NO: 97055 - RNA, 32 nt, Homo Sapiens
gagggucaggguggagaggaagaucagucagu

SEQ ID NO: 97056 - RNA, 32 nt, Homo Sapiens
acagaggcggcagcugcggcggcggcggcgcc

SEQ ID NO: 97057 - RNA, 32 nt, Homo Sapiens
agccaggaggggcaguggggcugggccugggu

SEQ ID NO: 97058 - RNA, 32 nt, Homo Sapiens
cucuccuguugcuaccacggaccccaucacaa

SEQ ID NO: 97059 - RNA, 32 nt, Homo Sapiens
gcuuuugucuaauucuaauggcuuaaagccaa

SEQ ID NO: 97060 - RNA, 32 nt, Homo Sapiens
ccgaaccuaaaauaaaaguaaacaagauagag

SEQ ID NO: 97061 - RNA, 32 nt, Homo Sapiens
ugaaaaacaaaguguuagacugugugcgugug

SEQ ID NO: 97062 - RNA, 32 nt, Homo Sapiens
agcugagcaggacuugggaggcccguaguccc

SEQ ID NO: 97063 - RNA, 32 nt, Homo Sapiens
auaagaggagaggcaagaagaagugccaaguu

SEQ ID NO: 97064 - RNA, 32 nt, Homo Sapiens
ccaugcaccgacagugccuggccuggcuccaa

SEQ ID NO: 97065 - RNA, 32 nt, Homo Sapiens
acucuagcucuuaggccaagcuuauuuguaau

SEQ ID NO: 97066 - RNA, 32 nt, Homo Sapiens
caauugucccuccucagccucccaaagugcuc

SEQ ID NO: 97067 - RNA, 32 nt, Homo Sapiens
uaugcauguaauugcaaauguuagauacauuu

SEQ ID NO: 97068 - RNA, 32 nt, Homo Sapiens
auagucauaagagcuugcagggaggagaaaag

SEQ ID NO: 97069 - RNA, 32 nt, Homo Sapiens
uacggaccagauacugaauauuaaaaaccagc

SEQ ID NO: 97070 - RNA, 32 nt, Homo Sapiens
caucauucaucucaugccuccauccugcguca

SEQ ID NO: 97071 - RNA, 32 nt, Homo Sapiens
cgccagugcacguacacaccacguccuggucu

SEQ ID NO: 97072 - RNA, 32 nt, Homo Sapiens
caccaucgaggcgggggccgcgcgagggccgg

SEQ ID NO: 97073 - RNA, 32 nt, Homo Sapiens
uugggcauuuggaggcccgugugugaauuccu

SEQ ID NO: 97074 - RNA, 32 nt, Homo Sapiens
acuauuaaaucucucugacaguuucuuuuuua

SEQ ID NO: 97075 - RNA, 32 nt, Homo Sapiens
uauuguuugccucacuccuggaugcugcguuu

SEQ ID NO: 97076 - RNA, 32 nt, Homo Sapiens
ugagcacagcuauauacaguguagaauaaaug

SEQ ID NO: 97077 - RNA, 32 nt, Homo Sapiens
cccgcccuucccuccgucagccccgggagcuc

SEQ ID NO: 97078 - RNA, 32 nt, Homo Sapiens
caucuaccuccagccgggacccgcccccgagc

SEQ ID NO: 97079 - RNA, 32 nt, Homo Sapiens
uuuggggcccugggccgcuggaggaagcugcu

SEQ ID NO: 97080 - RNA, 32 nt, Homo Sapiens
ucucuguguccuggggaauacuggccaugccu

SEQ ID NO: 97081 - RNA, 32 nt, Homo Sapiens
gugaugucacacucaagaggccuuggcagcuc

SEQ ID NO: 97082 - RNA, 32 nt, Homo Sapiens
uucugaaauauauuucaaaauauguguguacg

SEQ ID NO: 97083 - RNA, 32 nt, Homo Sapiens
ucuuuuaaaaauuuguaugcuguacuacauuu

SEQ ID NO: 97084 - RNA, 32 nt, Homo Sapiens
gugucaguuucagauccugaucuuaagaggcu

SEQ ID NO: 97085 - RNA, 32 nt, Homo Sapiens
caagacuacaguguucuuuggaugcucaugaa

SEQ ID NO: 97086 - RNA, 32 nt, Homo Sapiens
ucuguucaaauuauuauauggucuaucuuucc

SEQ ID NO: 97087 - RNA, 32 nt, Homo Sapiens
ccggcccggcccggccguggcccuccucagug

SEQ ID NO: 97088 - RNA, 32 nt, Homo Sapiens
uggccugcagugccguggucugcgugcucugc

SEQ ID NO: 97089 - RNA, 32 nt, Homo Sapiens
auuucaagguaacuguccaucuccuucacucu

SEQ ID NO: 97090 - RNA, 32 nt, Homo Sapiens
ugaccaagggccaggagcugcugcugaccauc

SEQ ID NO: 97091 - RNA, 32 nt, Homo Sapiens
aggcgggcugacggcagcaccaugcaggcggc

SEQ ID NO: 97092 - RNA, 32 nt, Homo Sapiens
aacauucauacuacuaccaucugguaaaggca

SEQ ID NO: 97093 - RNA, 32 nt, Homo Sapiens
uaucauaucagaugcucaaggcuggcagcuac

SEQ ID NO: 97094 - RNA, 32 nt, Homo Sapiens
aauuccaucuucuucucuucccuccuuuguga

SEQ ID NO: 97095 - RNA, 32 nt, Homo Sapiens
aaggaaaagauaacaaagugcaauuaucagca

SEQ ID NO: 97096 - RNA, 32 nt, Homo Sapiens
aguucuaaaagaaaaagcuaaaaaauaugguu

SEQ ID NO: 97097 - RNA, 32 nt, Homo Sapiens
aaauguuuuacauuccauuucauuuguguugu

SEQ ID NO: 97098 - RNA, 28 nt, Homo Sapiens
acaauggaaauggaacaagaaaaaauga

SEQ ID NO: 97099 - RNA, 31 nt, Homo Sapiens
agggauggaaagacuaggagagccugggauc

SEQ ID NO: 97100 - RNA, 32 nt, Homo Sapiens
uuccaaucauuuaaaaguacuuauuaaguacu

SEQ ID NO: 97101 - RNA, 32 nt, Homo Sapiens
aucucuggaaaaccagccauuccuccucccug

SEQ ID NO: 97102 - RNA, 28 nt, Homo Sapiens
aggaugcuggugagaggcagggaccagg

SEQ ID NO: 97103 - RNA, 32 nt, Homo Sapiens
ggaguacugcucucauaauugaagacguguuu

SEQ ID NO: 97104 - RNA, 32 nt, Homo Sapiens
gacggcgugggcgguggccgcgcagcagcuga

SEQ ID NO: 97105 - RNA, 32 nt, Homo Sapiens
gccaagugcccuagagcccacccgguguccug

SEQ ID NO: 97106 - RNA, 32 nt, Homo Sapiens
cgacagcccgucugccaccaggccaugguucc

SEQ ID NO: 97107 - RNA, 32 nt, Homo Sapiens
cccuucccaagcccuuagggaccgcagaggac

SEQ ID NO: 97108 - RNA, 32 nt, Homo Sapiens
ugccuuuagacuacaguuguguuagccucuug

SEQ ID NO: 97109 - RNA, 32 nt, Homo Sapiens
ucuggaaguauuuuccuccaaaguaauguagc

SEQ ID NO: 97110 - RNA, 32 nt, Homo Sapiens
ugccaaauugguuuuucacaaguguguaauuu

SEQ ID NO: 97111 - RNA, 32 nt, Homo Sapiens
uccuuuucaaccauagccaacacuccaucuuc

SEQ ID NO: 97112 - RNA, 32 nt, Homo Sapiens
gaaccaggguauucuuuuuccauccuuagcca

SEQ ID NO: 97113 - RNA, 32 nt, Homo Sapiens
auacagaauuuuagagaacaucugaagacauc

SEQ ID NO: 97114 - RNA, 32 nt, Homo Sapiens
cccagccauugccuggugugcggccgcagggg

SEQ ID NO: 97115 - RNA, 32 nt, Homo Sapiens
aacuaguggcugcccaauugcugcugaccagu

SEQ ID NO: 97116 - RNA, 32 nt, Homo Sapiens
ucauucuggcccagcccuuuuaucucuuuauc

SEQ ID NO: 97117 - RNA, 32 nt, Homo Sapiens
uuucccuuuguagccgaucucuaggcccuucu

SEQ ID NO: 97118 - RNA, 32 nt, Homo Sapiens
gagcgguagcgcgcgcccgcgcgcguucuuag

SEQ ID NO: 97119 - RNA, 30 nt, Homo Sapiens
acuguccuggcuggcggcgggaucgugcgc

SEQ ID NO: 97120 - RNA, 32 nt, Homo Sapiens
agaguggggagcauauugggcugggguaagca

SEQ ID NO: 97121 - RNA, 32 nt, Homo Sapiens
ggaugccuuccugcugccccagccaggguugg

SEQ ID NO: 97122 - RNA, 30 nt, Homo Sapiens
cagacgccccugcagccgccggucggcgcc

SEQ ID NO: 97123 - RNA, 32 nt, Homo Sapiens
gcacaaauuaaucuuuuauauaucuaaagguu

SEQ ID NO: 97124 - RNA, 32 nt, Homo Sapiens
gaaccagacagagcugagcucaaaauauccua

SEQ ID NO: 97125 - RNA, 32 nt, Homo Sapiens
agcuaaaacucagcugcagccuggacaguaga

SEQ ID NO: 97126 - RNA, 32 nt, Homo Sapiens
cauagcuccugcuccacagccaucccagccuu

SEQ ID NO: 97127 - RNA, 32 nt, Homo Sapiens
gcguccccugccccggccucagccagcccugg

SEQ ID NO: 97128 - RNA, 32 nt, Homo Sapiens
cagauauccuugauauuggacauaggauuugg

SEQ ID NO: 97129 - RNA, 32 nt, Homo Sapiens
ucacuuugccccaguuacaaaaauaguagaac

SEQ ID NO: 97130 - RNA, 32 nt, Homo Sapiens
gaggaggcgcaggagugagcugcccgagaccg

SEQ ID NO: 97131 - RNA, 32 nt, Homo Sapiens
auaucuuggauuugcagcuguugguacuaugu

SEQ ID NO: 97132 - RNA, 32 nt, Homo Sapiens
cuacagcgaguauaugaacaacaaagaggcuu

SEQ ID NO: 97133 - RNA, 32 nt, Homo Sapiens
caggagagcuacuuucuauccaaauaauuuaa

SEQ ID NO: 97134 - RNA, 32 nt, Homo Sapiens
agcuucaucaaaacagaagaaaaaggcuaagu

SEQ ID NO: 97135 - RNA, 32 nt, Homo Sapiens
ggauguaguuguauuuauugcauuguaauauu

SEQ ID NO: 97136 - RNA, 32 nt, Homo Sapiens
ggcguggagcccagucuuucagauuauguuca

SEQ ID NO: 97137 - RNA, 30 nt, Homo Sapiens
acggaguccaccccucccucucuagaaccc

SEQ ID NO: 97138 - RNA, 32 nt, Homo Sapiens
caaauuuguauaaauuuuuuuaauucaaagga

SEQ ID NO: 97139 - RNA, 32 nt, Homo Sapiens
uaggguggauguucucguggggccugacaugc

SEQ ID NO: 97140 - RNA, 32 nt, Homo Sapiens
agcagcccagggugggucgcagcccaggcccc

SEQ ID NO: 97141 - RNA, 32 nt, Homo Sapiens
ucacagcaaucucugauucuguguaauaauau

SEQ ID NO: 97142 - RNA, 32 nt, Homo Sapiens
aaaacuugacauuuuaaccuguggcauuuaga

SEQ ID NO: 97143 - RNA, 32 nt, Homo Sapiens
ggccucguaccccagaccccaagcccauaaau

SEQ ID NO: 97144 - RNA, 32 nt, Homo Sapiens
agugggaccagauuccagguccaaagucacca

SEQ ID NO: 97145 - RNA, 32 nt, Homo Sapiens
ccuugcccugcgauguccccccgggggccagg

SEQ ID NO: 97146 - RNA, 32 nt, Homo Sapiens
gugagcagcugcccagcuccugcucaguuuug

SEQ ID NO: 97147 - RNA, 32 nt, Homo Sapiens
augcacacagaaaauauuagauauggagagau

SEQ ID NO: 97148 - RNA, 32 nt, Homo Sapiens
aaaaccauaucaagcacugacaugacacugga

SEQ ID NO: 97149 - RNA, 32 nt, Homo Sapiens
acugguugucuccuuugccuuucuucaaggau

SEQ ID NO: 97150 - RNA, 32 nt, Homo Sapiens
caaguccucuucugccucagcucucacagcag

SEQ ID NO: 97151 - RNA, 32 nt, Homo Sapiens
uuuacagugaugccgauauuuucuugcuggau

SEQ ID NO: 97152 - RNA, 32 nt, Homo Sapiens
uguuauguggaggaaauguguauuaccaaugg

SEQ ID NO: 97153 - RNA, 32 nt, Homo Sapiens
ccccaggugacucgacgugacacgccaguagc

SEQ ID NO: 97154 - RNA, 32 nt, Homo Sapiens
uauguggacgcuggggcagagccaggccggag

SEQ ID NO: 97155 - RNA, 32 nt, Homo Sapiens
cagaccggcagguucucuggggcccgcacagg

SEQ ID NO: 97156 - RNA, 32 nt, Homo Sapiens
uguugaacauuuccaucaccccagagaguuca

SEQ ID NO: 97157 - RNA, 32 nt, Homo Sapiens
aagagugacagguuggcucaacuuuuuucuuu

SEQ ID NO: 97158 - RNA, 32 nt, Homo Sapiens
aguaguacuguacuaagagcucugcccucaug

SEQ ID NO: 97159 - RNA, 32 nt, Homo Sapiens
uguucauuuaguuuucugaauucaggaaugaa

SEQ ID NO: 97160 - RNA, 32 nt, Homo Sapiens
gaaucaauuuaaccucuuuccuuuauaaauug

SEQ ID NO: 97161 - RNA, 32 nt, Homo Sapiens
gcuguuugucaucauccucguguguguaccgc

SEQ ID NO: 97162 - RNA, 32 nt, Homo Sapiens
ugggagaggggaggggccggcuuuugcuuuaa

SEQ ID NO: 97163 - RNA, 28 nt, Homo Sapiens
aucagacuggaaaaaaggaugacuauau

SEQ ID NO: 97164 - RNA, 32 nt, Homo Sapiens
uugagacugugcuauacacacacagcugagag

SEQ ID NO: 97165 - RNA, 32 nt, Homo Sapiens
gaacugcaauaccaccacaguagaucugauaa

SEQ ID NO: 97166 - RNA, 32 nt, Homo Sapiens
uagaaguuggggguggggugggugcuggcugc

SEQ ID NO: 97167 - RNA, 32 nt, Homo Sapiens
acaaccugacucuuuguucacacacacgggcc

SEQ ID NO: 97168 - RNA, 32 nt, Homo Sapiens
gugcaucauuuucaaguuuaaaacagauauuu

SEQ ID NO: 97169 - RNA, 32 nt, Homo Sapiens
gggggcgcgggcagggccggcugcugagacgc

SEQ ID NO: 97170 - RNA, 32 nt, Homo Sapiens
cucuugggaugucagaaaucuaaaaucuaaaa

SEQ ID NO: 97171 - RNA, 32 nt, Homo Sapiens
uuguguucgguuucaagugcugauuuguaacu

SEQ ID NO: 97172 - RNA, 32 nt, Homo Sapiens
gacucccgagccccggccuccucguccucggu

SEQ ID NO: 97173 - RNA, 32 nt, Homo Sapiens
aaugcuaaaaauacuugguagaucagcaugcu

SEQ ID NO: 97174 - RNA, 32 nt, Homo Sapiens
gcccgcgggucucuguccugcgguccgugguu

SEQ ID NO: 97175 - RNA, 32 nt, Homo Sapiens
ugcucccccgcggccggagccagggaaccgag

SEQ ID NO: 97176 - RNA, 32 nt, Homo Sapiens
gaaaaguugcugucaucaaaauggcagccuuu

SEQ ID NO: 97177 - RNA, 32 nt, Homo Sapiens
ugcacuuuuggaguuuuucugaugccaaucuc

SEQ ID NO: 97178 - RNA, 32 nt, Homo Sapiens
cuucuuuguuugugacccaugcuugaaaacuu

SEQ ID NO: 97179 - RNA, 32 nt, Homo Sapiens
cucugcugccccaccccauccuccaauuuuua

SEQ ID NO: 97180 - RNA, 32 nt, Homo Sapiens
acaggaaagggagccagaagauggguucaagu

SEQ ID NO: 97181 - RNA, 32 nt, Homo Sapiens
gagcacggggcaccugcgaucgcgaagagccu

SEQ ID NO: 97182 - RNA, 32 nt, Homo Sapiens
ucguccaccccuccccuuucuuacagauaaag

SEQ ID NO: 97183 - RNA, 32 nt, Homo Sapiens
gucucugaggggugggggugccgcucuaaauu

SEQ ID NO: 97184 - RNA, 32 nt, Homo Sapiens
aacaagcauucuuuuuauauuucuuccaguau

SEQ ID NO: 97185 - RNA, 32 nt, Homo Sapiens
uuuuaaauauuuuaauauaucuccuaucugau

SEQ ID NO: 97186 - RNA, 32 nt, Homo Sapiens
auugcuuuaaaauuauucauaauaaaaacaca

SEQ ID NO: 97187 - RNA, 32 nt, Homo Sapiens
gaccggaggugcgucauucaccggcgacgccg

SEQ ID NO: 97188 - RNA, 32 nt, Homo Sapiens
aucuugacaaauugagauuugcugauggaagc

SEQ ID NO: 97189 - RNA, 32 nt, Homo Sapiens
agcagguggcgcuggacgcgcaacggacaagg

SEQ ID NO: 97190 - RNA, 32 nt, Homo Sapiens
ggguauacuauuaaaaaguaagucucucuucc

SEQ ID NO: 97191 - RNA, 32 nt, Homo Sapiens
ccugaaguaaagacauaauacgcaaaucacau

SEQ ID NO: 97192 - RNA, 32 nt, Homo Sapiens
cuccagagauaaaauaccauuccuucacaacu

SEQ ID NO: 97193 - RNA, 32 nt, Homo Sapiens
cucuuacucagaaagaaaaaacaaaaagaaaa

SEQ ID NO: 97194 - RNA, 32 nt, Homo Sapiens
acgcugcuucccucacuccccuucuccuaaga

SEQ ID NO: 97195 - RNA, 32 nt, Homo Sapiens
uggcaacacacacacacacacacacacacaca

SEQ ID NO: 97196 - RNA, 32 nt, Homo Sapiens
acaccuacgcccuccccuccccggcccuccac

SEQ ID NO: 97197 - RNA, 32 nt, Homo Sapiens
gugcccccucugccuccaccccggcuccuggc

SEQ ID NO: 97198 - RNA, 32 nt, Homo Sapiens
gggccauauggugcucuucccagucugguucc

SEQ ID NO: 97199 - RNA, 32 nt, Homo Sapiens
agcugccugccagcugcccuuccccagauccc

SEQ ID NO: 97200 - RNA, 32 nt, Homo Sapiens
uauguucuuuaaaaauauaauuuuuuagagag

SEQ ID NO: 97201 - RNA, 32 nt, Homo Sapiens
ggaccauggcgcuuaguccccaucccggguuu

SEQ ID NO: 97202 - RNA, 32 nt, Homo Sapiens
uugguuugauuucuaguaucuauuguguuggc

SEQ ID NO: 97203 - RNA, 32 nt, Homo Sapiens
auaaaggcuacauaugacaaauccacagcuaa

SEQ ID NO: 97204 - RNA, 32 nt, Homo Sapiens
auuuuacugucugcuuuuuuuggcugcuuaua

SEQ ID NO: 97205 - RNA, 32 nt, Homo Sapiens
auguguucuuuuuguucauuucguucuuacuu

SEQ ID NO: 97206 - RNA, 32 nt, Homo Sapiens
gaccugaauugcgaccccaaccuggacugcuc

SEQ ID NO: 97207 - RNA, 32 nt, Homo Sapiens
cuauucuaaacaauuugcauuuauauaauuuu

SEQ ID NO: 97208 - RNA, 32 nt, Homo Sapiens
uggucucuguugucugagaaacucaggggccc

SEQ ID NO: 97209 - RNA, 32 nt, Homo Sapiens
aucuaucugaagauggaggcuuaucggugagu

SEQ ID NO: 97210 - RNA, 32 nt, Homo Sapiens
ccuuccucccagcagcagcagugcagagcccg

SEQ ID NO: 97211 - RNA, 32 nt, Homo Sapiens
gguggggcggguggggagcuguccggugcuac

SEQ ID NO: 97212 - RNA, 32 nt, Homo Sapiens
uccgcguucccgccggccccagcuccagcccc

SEQ ID NO: 97213 - RNA, 32 nt, Homo Sapiens
caucaggcagcacccaugggcuccaccagccc

SEQ ID NO: 97214 - RNA, 32 nt, Homo Sapiens
guaaccugguccacggagggcggccgccaccc

SEQ ID NO: 97215 - RNA, 32 nt, Homo Sapiens
cugggaaguguguggagggcugugcuagaccu

SEQ ID NO: 97216 - RNA, 32 nt, Homo Sapiens
ucacacagaaaaguggaggccaaggcgugaga

SEQ ID NO: 97217 - RNA, 32 nt, Homo Sapiens
auguggggauaguggagaagggggcugcagga

SEQ ID NO: 97218 - RNA, 32 nt, Homo Sapiens
ugccuuuuguuuccugugcaaacaagugaguc

SEQ ID NO: 97219 - RNA, 32 nt, Homo Sapiens
gcugcuggggggaucacagaccauuucuuucu

SEQ ID NO: 97220 - RNA, 32 nt, Homo Sapiens
uggaaacuuguuucuuuuuuuguauaaaugag

SEQ ID NO: 97221 - RNA, 32 nt, Homo Sapiens
gcuacaaauuagccuuuuuuuuuugagaaaau

SEQ ID NO: 97222 - RNA, 32 nt, Homo Sapiens
augcggaguggcggccgcggcgguggcggaga

SEQ ID NO: 97223 - RNA, 28 nt, Homo Sapiens
gaaaugacucuucaggaauuggugcaua

SEQ ID NO: 97224 - RNA, 32 nt, Homo Sapiens
agccccagccccagcccagucccuuugguuuc

SEQ ID NO: 97225 - RNA, 32 nt, Homo Sapiens
cugggucaggcgcuuguggagagagggcuucg

SEQ ID NO: 97226 - RNA, 32 nt, Homo Sapiens
uaauaggaauaauuugagaugacucaauauua

SEQ ID NO: 97227 - RNA, 32 nt, Homo Sapiens
acccaccaugagcaggcagcucugggcaugug

SEQ ID NO: 97228 - RNA, 32 nt, Homo Sapiens
cauccuggggcaugccugccucaugugggggu

SEQ ID NO: 97229 - RNA, 32 nt, Homo Sapiens
ccacccugccagccgggcugcuacugccccaa

SEQ ID NO: 97230 - RNA, 32 nt, Homo Sapiens
acuguaaauaccacaugugaguuuaccugaau

SEQ ID NO: 97231 - RNA, 32 nt, Homo Sapiens
agcuuguagcccuggauggccucuggggcagg

SEQ ID NO: 97232 - RNA, 32 nt, Homo Sapiens
uguuacagcucuuaagguggugcgucuggagu

SEQ ID NO: 97233 - RNA, 32 nt, Homo Sapiens
gugacaugaaagacuuaccggaccacugaagg

SEQ ID NO: 97234 - RNA, 32 nt, Homo Sapiens
ggaaccucuucagaaagugugcuuuaugcuga

SEQ ID NO: 97235 - RNA, 32 nt, Homo Sapiens
caguuacagcuaacgugguaauuagcaacacu

SEQ ID NO: 97236 - RNA, 32 nt, Homo Sapiens
ccaucacagaugccgagcugcacggggauuug

SEQ ID NO: 97237 - RNA, 32 nt, Homo Sapiens
cuccuucagggccccaggucgcuugcugccag

SEQ ID NO: 97238 - RNA, 32 nt, Homo Sapiens
guugagccugaauuaggaauguguacauugua

SEQ ID NO: 97239 - RNA, 32 nt, Homo Sapiens
uauuugggaaauguggcaauguuguuuauaua

SEQ ID NO: 97240 - RNA, 32 nt, Homo Sapiens
gcauuaggguuaacggcugccggcgccggcuc

SEQ ID NO: 97241 - RNA, 31 nt, Homo Sapiens
uauuugcaagugguuuuuacauaauauuuga

SEQ ID NO: 97242 - RNA, 32 nt, Homo Sapiens
auugcuuccccucugugaucucauuucaucug

SEQ ID NO: 97243 - RNA, 32 nt, Homo Sapiens
cgcuguuaauaaauauuguuucauucuucucu

SEQ ID NO: 97244 - RNA, 32 nt, Homo Sapiens
uuucgacccacccauucucaccaccuguuucu

SEQ ID NO: 97245 - RNA, 32 nt, Homo Sapiens
uuagacaaauauauuucgauugaauacaaaaa

SEQ ID NO: 97246 - RNA, 32 nt, Homo Sapiens
auccuggucccauguaucuggaaucuaauaaa

SEQ ID NO: 97247 - RNA, 32 nt, Homo Sapiens
uguggagguguucgggaagcugaaggaccuaa

SEQ ID NO: 97248 - RNA, 32 nt, Homo Sapiens
aaaauguggugauguuucuuuaugauagaugc

SEQ ID NO: 97249 - RNA, 32 nt, Homo Sapiens
guggcuggaauuuacaagcuaauuguucaaua

SEQ ID NO: 97250 - RNA, 32 nt, Homo Sapiens
guugggggagcugauaagguuuuuguacagua

SEQ ID NO: 97251 - RNA, 30 nt, Homo Sapiens
gagggauggaggggacagaggcggcggcgg

SEQ ID NO: 97252 - RNA, 32 nt, Homo Sapiens
cuaaccgaaagagcuuucugucaaggaccgua

SEQ ID NO: 97253 - RNA, 32 nt, Homo Sapiens
cccagucuugccuggcucuccuccuuggccca

SEQ ID NO: 97254 - RNA, 31 nt, Homo Sapiens
aagccaccauuaaugaauuagucuaucaugu

SEQ ID NO: 97255 - RNA, 32 nt, Homo Sapiens
uuuccuggauuugguaguggugcuggagggaa

SEQ ID NO: 97256 - RNA, 32 nt, Homo Sapiens
aagcaaacaaagaaacaaaaguuuuuccuaaa

SEQ ID NO: 97257 - RNA, 32 nt, Homo Sapiens
cgguuugcaaacaaaaugaugggaaaguggaa

SEQ ID NO: 97258 - RNA, 32 nt, Homo Sapiens
acacucaccccuucuuuuuuuccccucuccaa

SEQ ID NO: 97259 - RNA, 32 nt, Homo Sapiens
gcgggacggacgguggacgcugggacgcguuu

SEQ ID NO: 97260 - RNA, 32 nt, Homo Sapiens
aagguugcugcuaugguguacuaauuuuguca

SEQ ID NO: 97261 - RNA, 32 nt, Homo Sapiens
cgggcaggcgggggcgcugacgagaagcagga

SEQ ID NO: 97262 - RNA, 32 nt, Homo Sapiens
ugggaauaacuuuuuuaaccuuuaaaaaaacc

SEQ ID NO: 97263 - RNA, 32 nt, Homo Sapiens
caguggggugcuuggcagcuguucuguguuuu

SEQ ID NO: 97264 - RNA, 32 nt, Homo Sapiens
aaugaagaccagcaaaaggaaaaggaucagcu

SEQ ID NO: 97265 - RNA, 32 nt, Homo Sapiens
auauuuggcugccagcuuuuuaucuuucucuc

SEQ ID NO: 97266 - RNA, 32 nt, Homo Sapiens
ccauuuuugcagaucucguggacaaguguuua

SEQ ID NO: 97267 - RNA, 32 nt, Homo Sapiens
cugaaacccccugccccugccucccccagccc

SEQ ID NO: 97268 - RNA, 32 nt, Homo Sapiens
accaauguauagcuuagaaauaaaacuuugaa

SEQ ID NO: 97269 - RNA, 32 nt, Homo Sapiens
aauagaaguuauacuguagaaaacgcuuauga

SEQ ID NO: 97270 - RNA, 32 nt, Homo Sapiens
ggacucacuggagagauacucuauaaugugga

SEQ ID NO: 97271 - RNA, 32 nt, Homo Sapiens
uuuggagagggaagaaaucuggaauacuuaau

SEQ ID NO: 97272 - RNA, 32 nt, Homo Sapiens
aguauaauuuuagguuuuuucuucuguacaca

SEQ ID NO: 97273 - RNA, 31 nt, Homo Sapiens
caucccacacacagccugccccagcgucccu

SEQ ID NO: 97274 - RNA, 32 nt, Homo Sapiens
ucccagcauugagcccuugguugccugggccc

SEQ ID NO: 97275 - RNA, 32 nt, Homo Sapiens
gcaacaacuugguaggaaagauucauccaguu

SEQ ID NO: 97276 - RNA, 32 nt, Homo Sapiens
gcgacuggggcgcgcuguugcuccacaaggcc

SEQ ID NO: 97277 - RNA, 32 nt, Homo Sapiens
cagccaaacaagcaacucuuuccccgccaggc

SEQ ID NO: 97278 - RNA, 32 nt, Homo Sapiens
ugccauccuggagcccaguccuggaccccaug

SEQ ID NO: 97279 - RNA, 29 nt, Homo Sapiens
uuuuaacuaaccaacaaccacaaaagcag

SEQ ID NO: 97280 - RNA, 32 nt, Homo Sapiens
cucuaccuuucugcuuuaaagcaaaguaaacu

SEQ ID NO: 97281 - RNA, 32 nt, Homo Sapiens
ggugguuggggauggggugggacauugaacag

SEQ ID NO: 97282 - RNA, 32 nt, Homo Sapiens
ucacaaguaaaauuauaaagauaaaaaacauc

SEQ ID NO: 97283 - RNA, 32 nt, Homo Sapiens
uugcuuuuauuacauuaguuaagaugucugag

SEQ ID NO: 97284 - RNA, 30 nt, Homo Sapiens
acgccaggcaggccagugggccuaagccag

SEQ ID NO: 97285 - RNA, 32 nt, Homo Sapiens
caaggacacagaugaaacacaaacaauaguaa

SEQ ID NO: 97286 - RNA, 32 nt, Homo Sapiens
uuuucauuuucucaacuuuuaauagcaaaaag

SEQ ID NO: 97287 - RNA, 32 nt, Homo Sapiens
aagccacugcaaacauagcaauaaaaaccugu

SEQ ID NO: 97288 - RNA, 32 nt, Homo Sapiens
guuucaccaugcuggccaggcuuguuaugaac

SEQ ID NO: 97289 - RNA, 32 nt, Homo Sapiens
cuggggcagcauacgggguugcaagugaagcc

SEQ ID NO: 97290 - RNA, 32 nt, Homo Sapiens
gcagucaggaggagcagggccagccguuccug

SEQ ID NO: 97291 - RNA, 32 nt, Homo Sapiens
ccagcacuuugggaggccuaggcgggcagauc

SEQ ID NO: 97292 - RNA, 32 nt, Homo Sapiens
gcaagguagggucuuucuaccuagucaugagg

SEQ ID NO: 97293 - RNA, 31 nt, Homo Sapiens
uuguguaccugccagaaccaggagaagugug

SEQ ID NO: 97294 - RNA, 31 nt, Homo Sapiens
gauauacagaagaaaaauuauuaaacaacuc

SEQ ID NO: 97295 - RNA, 32 nt, Homo Sapiens
acuaaauuaacauugggaaaucuuauauucca

SEQ ID NO: 97296 - RNA, 32 nt, Homo Sapiens
ccuguucacaccucaggcaacuucugaagugg

SEQ ID NO: 97297 - RNA, 32 nt, Homo Sapiens
cuuuccaggcccagcucuugccucaugguggc

SEQ ID NO: 97298 - RNA, 32 nt, Homo Sapiens
uuauuuaacacagauuuuuuuauuuuuuauuu

SEQ ID NO: 97299 - RNA, 27 nt, Homo Sapiens
guaggggucuguaucagccccagcagg

SEQ ID NO: 97300 - RNA, 32 nt, Homo Sapiens
aagaaaaaauuggagauggaaaaggaagaacu

SEQ ID NO: 97301 - RNA, 32 nt, Homo Sapiens
ggaaaugagagaauacaucuuuugugggggau

SEQ ID NO: 97302 - RNA, 32 nt, Homo Sapiens
uuguuauuuuucucuuuuuuguuguugguggu

SEQ ID NO: 97303 - RNA, 32 nt, Homo Sapiens
uaauuuugcccauacagucuuccuucuguaga

SEQ ID NO: 97304 - RNA, 32 nt, Homo Sapiens
caaaagcagcucucacuaucagaaaacccaac

SEQ ID NO: 97305 - RNA, 32 nt, Homo Sapiens
acaucacaaccugugacaggcgcaucacgccc

SEQ ID NO: 97306 - RNA, 32 nt, Homo Sapiens
acagaacuugcguguauaauucuuguguacau

SEQ ID NO: 97307 - RNA, 32 nt, Homo Sapiens
gccgggcguggcggcacgcgccuguaguccca

SEQ ID NO: 97308 - RNA, 32 nt, Homo Sapiens
gugagccaggauggucucaaucuccugaccuu

SEQ ID NO: 97309 - RNA, 32 nt, Homo Sapiens
gaagcgcccuccugggcccugcugucacgugg

SEQ ID NO: 97310 - RNA, 32 nt, Homo Sapiens
acaccacccuuggcucccacuccagcucccug

SEQ ID NO: 97311 - RNA, 32 nt, Homo Sapiens
caacauccuuauauugcaaugaggauaaagac

SEQ ID NO: 97312 - RNA, 32 nt, Homo Sapiens
ucaaggucgcuggaugcugaucuaaucaguag

SEQ ID NO: 97313 - RNA, 32 nt, Homo Sapiens
aagaaagcuccucccccguccuccguuagcua

SEQ ID NO: 97314 - RNA, 32 nt, Homo Sapiens
aguuuagauugugaguccauguuuugucuguu

SEQ ID NO: 97315 - RNA, 28 nt, Homo Sapiens
gccaugcuguuccggcucucagagcacu

SEQ ID NO: 97316 - RNA, 32 nt, Homo Sapiens
acugagggggugucgggcagggggcggaggag

SEQ ID NO: 97317 - RNA, 32 nt, Homo Sapiens
ugaagaagaugaugaugaugaauaguuggcuc

SEQ ID NO: 97318 - RNA, 32 nt, Homo Sapiens
ucuaguauuauguacaguacaucauuguaagc

SEQ ID NO: 97319 - RNA, 32 nt, Homo Sapiens
auaccauaugcuagcauucccaguccccagcu

SEQ ID NO: 97320 - RNA, 32 nt, Homo Sapiens
cccagugccccucuuccccagcccagaccccc

SEQ ID NO: 97321 - RNA, 32 nt, Homo Sapiens
uucaucuuugauuuuucuuuagcuucaucagu

SEQ ID NO: 97322 - RNA, 32 nt, Homo Sapiens
cuuuuucccgcacugucuccagucacgaucca

SEQ ID NO: 97323 - RNA, 32 nt, Homo Sapiens
ccucuaacagcuuuuguccggagcuagacuuc

SEQ ID NO: 97324 - RNA, 32 nt, Homo Sapiens
aacucaucucaaaaagcugguuuucuacccug

SEQ ID NO: 97325 - RNA, 32 nt, Homo Sapiens
gcuuuacguuuaguguuuaagcuuguuguugg

SEQ ID NO: 97326 - RNA, 32 nt, Homo Sapiens
gaugcuggcgaucuccuucaucucggccguca

SEQ ID NO: 97327 - RNA, 31 nt, Homo Sapiens
ggaugggagccccacagaggcagguccugga

SEQ ID NO: 97328 - RNA, 32 nt, Homo Sapiens
gggcuccggaucuuccucggccucgggccccc

SEQ ID NO: 97329 - RNA, 29 nt, Homo Sapiens
cuaaauaaauacauguuuuugaauaguuc

SEQ ID NO: 97330 - RNA, 32 nt, Homo Sapiens
guuuuauuuagaacuuuuuuuauuuguuuuau

SEQ ID NO: 97331 - RNA, 32 nt, Homo Sapiens
cuuuauguuuuaaaaaugaucaauguuuugau

SEQ ID NO: 97332 - RNA, 32 nt, Homo Sapiens
cucagugguguuguauuuuuuauuuuccaaua

SEQ ID NO: 97333 - RNA, 32 nt, Homo Sapiens
auauauagaaaugaaaaauguuguguaugcuu

SEQ ID NO: 97334 - RNA, 30 nt, Homo Sapiens
gagcaggcggcgcagcaccagcauuguguu

SEQ ID NO: 97335 - RNA, 32 nt, Homo Sapiens
ggcauuugaacuuuguuuuucuuuaaagaaau

SEQ ID NO: 97336 - RNA, 32 nt, Homo Sapiens
accuccagcuggagaugggugugccccagaag

SEQ ID NO: 97337 - RNA, 32 nt, Homo Sapiens
cuaaagaaaugaauuuguggcuggucugaagg

SEQ ID NO: 97338 - RNA, 32 nt, Homo Sapiens
ggucgaguaggcgaugggggagcccggcuucu

SEQ ID NO: 97339 - RNA, 32 nt, Homo Sapiens
ccugauagagagacuuuugucuguggauguau

SEQ ID NO: 97340 - RNA, 32 nt, Homo Sapiens
gccuggucucaaacuccugaccucaagugacc

SEQ ID NO: 97341 - RNA, 32 nt, Homo Sapiens
cacauuggagauagacccugugaauguaagca

SEQ ID NO: 97342 - RNA, 32 nt, Homo Sapiens
cgggucucggaacgcaucccgccgcgggggcu

SEQ ID NO: 97343 - RNA, 32 nt, Homo Sapiens
accaaaacugguuuuauuuucauuuuccuaaa

SEQ ID NO: 97344 - RNA, 32 nt, Homo Sapiens
caugaccuauccacaucuuuccaagauagaca

SEQ ID NO: 97345 - RNA, 32 nt, Homo Sapiens
ccccccucccagcaccccacagcccucacauc

SEQ ID NO: 97346 - RNA, 32 nt, Homo Sapiens
ccuacugccuacuaccauuuggaccagagggg

SEQ ID NO: 97347 - RNA, 32 nt, Homo Sapiens
guuuguuuaaagcgugggguuuuuuaaucucu

SEQ ID NO: 97348 - RNA, 32 nt, Homo Sapiens
acagaacacugucuugaagacaauggcuuacu

SEQ ID NO: 97349 - RNA, 32 nt, Homo Sapiens
ggaaaagggacugggaaguaaagggaaaccau

SEQ ID NO: 97350 - RNA, 32 nt, Homo Sapiens
ggcggcugcgcggugaacgaggcggccugcgc

SEQ ID NO: 97351 - RNA, 32 nt, Homo Sapiens
auggucguuuuuccuguuuaaaggagauaacu

SEQ ID NO: 97352 - RNA, 32 nt, Homo Sapiens
uuuaaacuguaaaguucaauugugaaaaugaa

SEQ ID NO: 97353 - RNA, 32 nt, Homo Sapiens
ccaucaugauuacauacccauccaccaauggg

SEQ ID NO: 97354 - RNA, 32 nt, Homo Sapiens
ggggggaucuuggcugugugucugcggaucug

SEQ ID NO: 97355 - RNA, 32 nt, Homo Sapiens
ugauuggggaauuauucucuucaucagccccu

SEQ ID NO: 97356 - RNA, 32 nt, Homo Sapiens
ccaugaaaacaucagugaacuuguaacuauug

SEQ ID NO: 97357 - RNA, 32 nt, Homo Sapiens
ggagagcugucccuccuucuccaccugcccac

SEQ ID NO: 97358 - RNA, 32 nt, Homo Sapiens
gugaaguucuuugcugugcuauaucugauaug

SEQ ID NO: 97359 - RNA, 32 nt, Homo Sapiens
gaagcugcagugaugggggucuguagaggaga

SEQ ID NO: 97360 - RNA, 32 nt, Homo Sapiens
uauugcuaagugaaguauguccuguuuucugc

SEQ ID NO: 97361 - RNA, 32 nt, Homo Sapiens
ugugaaggcuugauugugagugugccugggag

SEQ ID NO: 97362 - RNA, 32 nt, Homo Sapiens
ucaggagauggagacaauccugguuucaucac

SEQ ID NO: 97363 - RNA, 32 nt, Homo Sapiens
agagcucagacauuuucuuuuuuuaacuggug

SEQ ID NO: 97364 - RNA, 32 nt, Homo Sapiens
ggccaggacaucugcugacaagggcaguguga

SEQ ID NO: 97365 - RNA, 32 nt, Homo Sapiens
acuaugcagccagggaugccccugccccccau

SEQ ID NO: 97366 - RNA, 32 nt, Homo Sapiens
gauuggggcagacagcacuggcccagggaugc

SEQ ID NO: 97367 - RNA, 32 nt, Homo Sapiens
uagucgcaccaagcgcggaacugggguugcgg

SEQ ID NO: 97368 - RNA, 32 nt, Homo Sapiens
ugauauauuauaaacuaacacaugagcucuua

SEQ ID NO: 97369 - RNA, 30 nt, Homo Sapiens
uauguguguagugcugcagcagggccugag

SEQ ID NO: 97370 - RNA, 32 nt, Homo Sapiens
gugugaaaaguacaugacacaguaguugcuug

SEQ ID NO: 97371 - RNA, 31 nt, Homo Sapiens
agaagcaguagcagccaacuggcccuccuga

SEQ ID NO: 97372 - RNA, 31 nt, Homo Sapiens
cuuccgagggcggugucagcaaagcuagagu

SEQ ID NO: 97373 - RNA, 32 nt, Homo Sapiens
ugcgugugguggccuaugacaggaggcugaga

SEQ ID NO: 97374 - RNA, 32 nt, Homo Sapiens
acuacuugaauaagagggaacugugugcucca

SEQ ID NO: 97375 - RNA, 32 nt, Homo Sapiens
agagccgauuccaccccggggcccguagggcc

SEQ ID NO: 97376 - RNA, 32 nt, Homo Sapiens
auccaaagcuacugccuacugccuggccaauc

SEQ ID NO: 97377 - RNA, 32 nt, Homo Sapiens
gacuacauacacaacuagcaaugggaggagaa

SEQ ID NO: 97378 - RNA, 32 nt, Homo Sapiens
aggggcuggcugggacuguggaugcuggagua

SEQ ID NO: 97379 - RNA, 32 nt, Homo Sapiens
caccccaugcgugcugagaggcgagcuccuug

SEQ ID NO: 97380 - RNA, 32 nt, Homo Sapiens
gcugaaugggcaaaucuguccaaacagcuagu

SEQ ID NO: 97381 - RNA, 32 nt, Homo Sapiens
cauggagaacggcucgggcgccaggcaugacu

SEQ ID NO: 97382 - RNA, 32 nt, Homo Sapiens
guguugcauacuuucuaaggcggcggcugcag

SEQ ID NO: 97383 - RNA, 32 nt, Homo Sapiens
aggcugggaggacagagccagcagcugccaug

SEQ ID NO: 97384 - RNA, 32 nt, Homo Sapiens
gcccacagcgucuguauuuggugcugggaugc

SEQ ID NO: 97385 - RNA, 32 nt, Homo Sapiens
gacucucaaaccaaaaaugaccuggaggcacc

SEQ ID NO: 97386 - RNA, 32 nt, Homo Sapiens
ucacucccaagagcuuacuguuuaaucaccag

SEQ ID NO: 97387 - RNA, 32 nt, Homo Sapiens
acaccccuggggcugagucuccagggcccccc

SEQ ID NO: 97388 - RNA, 32 nt, Homo Sapiens
aaguucuuguaucugucuguucugggaccugg

SEQ ID NO: 97389 - RNA, 32 nt, Homo Sapiens
gggagucgcgauucgugccggccgguccuggu

SEQ ID NO: 97390 - RNA, 32 nt, Homo Sapiens
cugguccccguccagccgcugacgugaagaug

SEQ ID NO: 97391 - RNA, 32 nt, Homo Sapiens
agcagcagugugccguaauaaggucugguaug

SEQ ID NO: 97392 - RNA, 32 nt, Homo Sapiens
gcuuuaggaagauaccugggggauggaggggu

SEQ ID NO: 97393 - RNA, 32 nt, Homo Sapiens
guauuauaccacagcacucuauggaaaucuca

SEQ ID NO: 97394 - RNA, 32 nt, Homo Sapiens
ugauuuuuaaaauaaauuuagugaaccuaaaa

SEQ ID NO: 97395 - RNA, 32 nt, Homo Sapiens
acagcugccugagacuccuugaggaacacagg

SEQ ID NO: 97396 - RNA, 32 nt, Homo Sapiens
uacuucuaauauauuacuucuuugcauuugcu

SEQ ID NO: 97397 - RNA, 32 nt, Homo Sapiens
ccauagcaccucaguaccaaggggagggauuu

SEQ ID NO: 97398 - RNA, 32 nt, Homo Sapiens
aaaauauacucuauauuacuugguuuauuaua

SEQ ID NO: 97399 - RNA, 32 nt, Homo Sapiens
aaaaagcgcuggccuggugcucagcggccugg

SEQ ID NO: 97400 - RNA, 32 nt, Homo Sapiens
cccucccauuugguagcagcuccaacaggggu

SEQ ID NO: 97401 - RNA, 32 nt, Homo Sapiens
uucuugcuuauuuuagaguugaggacagcuau

SEQ ID NO: 97402 - RNA, 32 nt, Homo Sapiens
auuacacagccuacugccggaacucucuggau

SEQ ID NO: 97403 - RNA, 32 nt, Homo Sapiens
gagaugaguggugaauggugucugcauuaaaa

SEQ ID NO: 97404 - RNA, 32 nt, Homo Sapiens
uaagagaaagacugagguuuuuaacauuaauu

SEQ ID NO: 97405 - RNA, 32 nt, Homo Sapiens
aagccccugcaccuggaacuguuuguuuuucu

SEQ ID NO: 97406 - RNA, 32 nt, Homo Sapiens
aagggccuuccguauugggguucugccaagga

SEQ ID NO: 97407 - RNA, 32 nt, Homo Sapiens
aaaacccuccaagauugucucauauucuaccu

SEQ ID NO: 97408 - RNA, 32 nt, Homo Sapiens
gguccaaaauguaauuuagugauucauuuaag

SEQ ID NO: 97409 - RNA, 32 nt, Homo Sapiens
ucuuggucuagauggacagccauggcagcgga

SEQ ID NO: 97410 - RNA, 32 nt, Homo Sapiens
aucucugugaaugggacucaagagaaguuugg

SEQ ID NO: 97411 - RNA, 32 nt, Homo Sapiens
uuguggaggaugaauaaaugugaucacugaga

SEQ ID NO: 97412 - RNA, 32 nt, Homo Sapiens
gcggcgaacacccgguaccccuggcgcagcga

SEQ ID NO: 97413 - RNA, 32 nt, Homo Sapiens
cugguagacuagauaucuuccaaacauuaucu

SEQ ID NO: 97414 - RNA, 32 nt, Homo Sapiens
acagggaaaaggaagguugaccauagcauccu

SEQ ID NO: 97415 - RNA, 32 nt, Homo Sapiens
cgggggcccaaguggggugcucuggucugacc

SEQ ID NO: 97416 - RNA, 32 nt, Homo Sapiens
aagaguggaaggaaacaacauccacaaaguaa

SEQ ID NO: 97417 - RNA, 32 nt, Homo Sapiens
ccugccugcgcccccaggacucuggccucacc

SEQ ID NO: 97418 - RNA, 32 nt, Homo Sapiens
uuagagauugcugaacugcugcuaaagugauu

SEQ ID NO: 97419 - RNA, 28 nt, Homo Sapiens
ugugauuagcuaaccaggaugaaaaaua

SEQ ID NO: 97420 - RNA, 32 nt, Homo Sapiens
guugcauuuuaaauaacaauuuauugaaaaau

SEQ ID NO: 97421 - RNA, 32 nt, Homo Sapiens
aaacauccaaaauaaauuuuaaaaugagaaaa

SEQ ID NO: 97422 - RNA, 32 nt, Homo Sapiens
cuuuguccauuggagaggucuuuuuuggucug

SEQ ID NO: 97423 - RNA, 32 nt, Homo Sapiens
ucuugguccacgacggccccagcacccaacuu

SEQ ID NO: 97424 - RNA, 32 nt, Homo Sapiens
agauuagaauuugaauccguggauuggcaaag

SEQ ID NO: 97425 - RNA, 32 nt, Homo Sapiens
aaaccuacucauuaaauuguuaaacuuuuuaa

SEQ ID NO: 97426 - RNA, 32 nt, Homo Sapiens
gcuggccccgccccugcccccagagcguccuu

SEQ ID NO: 97427 - RNA, 32 nt, Homo Sapiens
ugcacaauuuuauauacugauuuuuucaauca

SEQ ID NO: 97428 - RNA, 32 nt, Homo Sapiens
cgggagagcucguggggugcgaggggagcagg

SEQ ID NO: 97429 - RNA, 31 nt, Homo Sapiens
ucugcccaggccaccacaggcaggggucgac

SEQ ID NO: 97430 - RNA, 32 nt, Homo Sapiens
ggcaguggcaggcaccuccuccucaggugccc

SEQ ID NO: 97431 - RNA, 32 nt, Homo Sapiens
agccuguaaucccagcacuuuagguggcugag

SEQ ID NO: 97432 - RNA, 32 nt, Homo Sapiens
ugccuguaaucccagcacuuugggaggcuaag

SEQ ID NO: 97433 - RNA, 32 nt, Homo Sapiens
ggccgagccgggggcgcgcgcgcacgcggccg

SEQ ID NO: 97434 - RNA, 32 nt, Homo Sapiens
ugccuauaaucccagcacuuugggaggcugag

SEQ ID NO: 97435 - RNA, 32 nt, Homo Sapiens
ugccuauaauccuagcacuuugggaggccgag

SEQ ID NO: 97436 - RNA, 32 nt, Homo Sapiens
ugccuguaauccuagcacuuugggaggccaag

SEQ ID NO: 97437 - RNA, 32 nt, Homo Sapiens
uuagaauacuuauggcagauaaguaaggcaug

SEQ ID NO: 97438 - RNA, 32 nt, Homo Sapiens
gacacauuuacauuuuccuuaucaagguguca

SEQ ID NO: 97439 - RNA, 32 nt, Homo Sapiens
auuaagugaauuaauauuuguaaaacgcuuag

SEQ ID NO: 97440 - RNA, 32 nt, Homo Sapiens
uggaugauauuuacaagagagaauuucagauc

SEQ ID NO: 97441 - RNA, 32 nt, Homo Sapiens
cuugucugcacuuuagaaacaccuggagagca

SEQ ID NO: 97442 - RNA, 32 nt, Homo Sapiens
uguaaucaauuucuucaaauagcuugcuuaca

SEQ ID NO: 97443 - RNA, 32 nt, Homo Sapiens
uaguucuacacuucuuuuuucccccucaugug

SEQ ID NO: 97444 - RNA, 32 nt, Homo Sapiens
ggcccgggcgcccgagccuccucggccuugga

SEQ ID NO: 97445 - RNA, 32 nt, Homo Sapiens
guuugccuccaagacaccauugucucccuuua

SEQ ID NO: 97446 - RNA, 32 nt, Homo Sapiens
cccgucccuggccauucuuggccuccaccccg

SEQ ID NO: 97447 - RNA, 31 nt, Homo Sapiens
gaaggccaagccauuacgggagcacagcaug

SEQ ID NO: 97448 - RNA, 32 nt, Homo Sapiens
ugcugguuucaggagucaaaauguagaaaaag

SEQ ID NO: 97449 - RNA, 32 nt, Homo Sapiens
agugagccgagaccgugccacugcacuccagc

SEQ ID NO: 97450 - RNA, 32 nt, Homo Sapiens
gccccggcggggggcauggggcaggaggcagc

SEQ ID NO: 97451 - RNA, 32 nt, Homo Sapiens
accuguggucauuauuuuuucuuucuguacag

SEQ ID NO: 97452 - RNA, 32 nt, Homo Sapiens
uaccuggcccuuccagccccagccuuuggagc

SEQ ID NO: 97453 - RNA, 32 nt, Homo Sapiens
uuaaaauuauuacuuuguuuuccuuguguuuu

SEQ ID NO: 97454 - RNA, 31 nt, Homo Sapiens
ccuuugccccacugccuccccuguucugcuc

SEQ ID NO: 97455 - RNA, 32 nt, Homo Sapiens
augucuuaaaagacuagaauccacacuuccug

SEQ ID NO: 97456 - RNA, 32 nt, Homo Sapiens
agccguauguguacugugaucuguaagaagua

SEQ ID NO: 97457 - RNA, 32 nt, Homo Sapiens
ucccuacuacagucgucaguacucuguggcuu

SEQ ID NO: 97458 - RNA, 32 nt, Homo Sapiens
gguggaacccucauggagaacguuagggcagu

SEQ ID NO: 97459 - RNA, 32 nt, Homo Sapiens
aagggggugggggacauuuucuuaccucaccc

SEQ ID NO: 97460 - RNA, 31 nt, Homo Sapiens
ggugcccaagccagaggcuggguucauuugu

SEQ ID NO: 97461 - RNA, 32 nt, Homo Sapiens
ggccagaggagcuucucuccucugggcgcugg

SEQ ID NO: 97462 - RNA, 32 nt, Homo Sapiens
cagcaucccgauaaccguuuuguuuuucucau

SEQ ID NO: 97463 - RNA, 32 nt, Homo Sapiens
auuacuuuuuaaaaacuguacuguuuuauguu

SEQ ID NO: 97464 - RNA, 32 nt, Homo Sapiens
gcucuucuguugaaacacacgugcugugggcc

SEQ ID NO: 97465 - RNA, 32 nt, Homo Sapiens
ucuuuggcauacuuuguagacuuugaccacuu

SEQ ID NO: 97466 - RNA, 32 nt, Homo Sapiens
gucagucgccgugcaacuuccccggggggagu

SEQ ID NO: 97467 - RNA, 32 nt, Homo Sapiens
caagaaaaaaguaugucucacuuuuuguuaau

SEQ ID NO: 97468 - RNA, 32 nt, Homo Sapiens
auugucggucucacaugaugcuuguaaugaau

SEQ ID NO: 97469 - RNA, 32 nt, Homo Sapiens
uauuuccuaaauauuugcuacacacacagcug

SEQ ID NO: 97470 - RNA, 32 nt, Homo Sapiens
ggaggcggugaguaaggucagagccugcucca

SEQ ID NO: 97471 - RNA, 32 nt, Homo Sapiens
cauguguguuugcaugaggaacucuuuagugg

SEQ ID NO: 97472 - RNA, 32 nt, Homo Sapiens
uuuuuaaaugccuuauggauaggaauuaguac

SEQ ID NO: 97473 - RNA, 32 nt, Homo Sapiens
auuugguucaucugaggauguucaggcugggg

SEQ ID NO: 97474 - RNA, 32 nt, Homo Sapiens
ccuuccugccccaccccauuccuuauauucag

SEQ ID NO: 97475 - RNA, 32 nt, Homo Sapiens
uuuaguugaauauuuucuuuuggagagauugu

SEQ ID NO: 97476 - RNA, 32 nt, Homo Sapiens
cccaguucucugagaaaggagcucagugggga

SEQ ID NO: 97477 - RNA, 32 nt, Homo Sapiens
ggccucugugucuggacuucagagcaccugcu

SEQ ID NO: 97478 - RNA, 32 nt, Homo Sapiens
cugcugggugggauugggggcugggcccccaa

SEQ ID NO: 97479 - RNA, 32 nt, Homo Sapiens
auguuuuccuuguucccuuccaugccuagcug

SEQ ID NO: 97480 - RNA, 32 nt, Homo Sapiens
guagagggcgcaucgccggcccggggcccuug

SEQ ID NO: 97481 - RNA, 32 nt, Homo Sapiens
cccugcugggugcacaaugcugcuuccucgaa

SEQ ID NO: 97482 - RNA, 32 nt, Homo Sapiens
ccuuaggaugugcaguaaaaaauauagaccua

SEQ ID NO: 97483 - RNA, 32 nt, Homo Sapiens
ucgguuccgggcgguugggagcgcgcgagcua

SEQ ID NO: 97484 - RNA, 32 nt, Homo Sapiens
aagucacaaaaauaguuuuuaaaggaaaaagu

SEQ ID NO: 97485 - RNA, 32 nt, Homo Sapiens
cacuccgcuccauggucuccagucaucagagc

SEQ ID NO: 97486 - RNA, 32 nt, Homo Sapiens
cuuccucugaccaagcacuguccuaaccaauu

SEQ ID NO: 97487 - RNA, 32 nt, Homo Sapiens
cuuaaauuaauuuacccuuaagaguauguuag

SEQ ID NO: 97488 - RNA, 32 nt, Homo Sapiens
uucaagcuguggcucuaugagggcgcccgucu

SEQ ID NO: 97489 - RNA, 32 nt, Homo Sapiens
aagcuugggcuuuuuucuucguuguucccaag

SEQ ID NO: 97490 - RNA, 32 nt, Homo Sapiens
ucaaugacaguuucuuuuuucuuacuagaccu

SEQ ID NO: 97491 - RNA, 32 nt, Homo Sapiens
aaaaauucacacaaagaucauucucuuuuuga

SEQ ID NO: 97492 - RNA, 32 nt, Homo Sapiens
aggugaacgcaucacuugccaaacuguuggaa

SEQ ID NO: 97493 - RNA, 32 nt, Homo Sapiens
cggcucuguuguuugaauaaacgugaacguga

SEQ ID NO: 97494 - RNA, 32 nt, Homo Sapiens
uaugaaugaagauagugggaaaagugucauua

SEQ ID NO: 97495 - RNA, 32 nt, Homo Sapiens
acucacacucagucucccuucuccggggccuc

SEQ ID NO: 97496 - RNA, 32 nt, Homo Sapiens
aaggaaaugaaagaagcaagaaggaaagcacc

SEQ ID NO: 97497 - RNA, 32 nt, Homo Sapiens
ccgggcggcaggugucggcgucggcggcauuc

SEQ ID NO: 97498 - RNA, 32 nt, Homo Sapiens
gcuuaauuaaacuagaugauaauucucaggua

SEQ ID NO: 97499 - RNA, 32 nt, Homo Sapiens
ucugcugacuacugagccagaccuccauuacc

SEQ ID NO: 97500 - RNA, 32 nt, Homo Sapiens
ggaugucacagggcuccuggucuggcucuguc

SEQ ID NO: 97501 - RNA, 32 nt, Homo Sapiens
gccucagccucucgaguagcugcgacuacagg

SEQ ID NO: 97502 - RNA, 32 nt, Homo Sapiens
acacagugacuugagcuauagauaguaaaaau

SEQ ID NO: 97503 - RNA, 32 nt, Homo Sapiens
cauuagccgcgcugcgcggugcugcgcccucg

SEQ ID NO: 97504 - RNA, 29 nt, Homo Sapiens
uagcuaauauguaugugucaguaguaggc

SEQ ID NO: 97505 - RNA, 32 nt, Homo Sapiens
gcugcucaucccagggaaaucccggccccacu

SEQ ID NO: 97506 - RNA, 32 nt, Homo Sapiens
augacuucuaaggcucuuucuggcuugaacug

SEQ ID NO: 97507 - RNA, 32 nt, Homo Sapiens
caaccucguccauuuuaacuggcaccucaggg

SEQ ID NO: 97508 - RNA, 32 nt, Homo Sapiens
caggccagccccacaggccaugccuugaagug

SEQ ID NO: 97509 - RNA, 29 nt, Homo Sapiens
aaaacuccaaauaaagugcgccugucgcc

SEQ ID NO: 97510 - RNA, 32 nt, Homo Sapiens
cagcggcgugaggcccgucccggagcgagccg

SEQ ID NO: 97511 - RNA, 32 nt, Homo Sapiens
ccucagcggacccgugguggugcgggggaugu

SEQ ID NO: 97512 - RNA, 32 nt, Homo Sapiens
guucacaaacuccauccuuucagcauauccuu

SEQ ID NO: 97513 - RNA, 32 nt, Homo Sapiens
uuauagaauuagagaauaaacuuuuuaauggg

SEQ ID NO: 97514 - RNA, 32 nt, Homo Sapiens
agcugaaaaugaauaagcaucugauuuuauga

SEQ ID NO: 97515 - RNA, 32 nt, Homo Sapiens
aauuugcaucugaaauaggaaacaagugaaag

SEQ ID NO: 97516 - RNA, 32 nt, Homo Sapiens
uagcacccacucuccaguucucuucucccaaa

SEQ ID NO: 97517 - RNA, 32 nt, Homo Sapiens
acagucucccuaugucacccaggcuguggugc

SEQ ID NO: 97518 - RNA, 32 nt, Homo Sapiens
agcgggcccucccgcgcccugugcuggccgga

SEQ ID NO: 97519 - RNA, 32 nt, Homo Sapiens
ggcgugacuagaagcggaaguaguugugggcg

SEQ ID NO: 97520 - RNA, 32 nt, Homo Sapiens
guguccucggagccccgcccugacauccugga

SEQ ID NO: 97521 - RNA, 32 nt, Homo Sapiens
auaauguacuucuaauuauacucuugaauuua

SEQ ID NO: 97522 - RNA, 32 nt, Homo Sapiens
uggacuuauuugccuugguuugcaauaccugc

SEQ ID NO: 97523 - RNA, 32 nt, Homo Sapiens
gggaauugauauuuuuaauauugccguuauau

SEQ ID NO: 97524 - RNA, 32 nt, Homo Sapiens
auagaaaagagauacgugaauuuuuuagcuaa

SEQ ID NO: 97525 - RNA, 32 nt, Homo Sapiens
uuuguuuuucuuucuuuuuuaaaagaagaugg

SEQ ID NO: 97526 - RNA, 32 nt, Homo Sapiens
cucaggggccaagcuucccgugggaugagauc

SEQ ID NO: 97527 - RNA, 31 nt, Homo Sapiens
gcuggcugcgcuucuccggguauuuaguacu

SEQ ID NO: 97528 - RNA, 32 nt, Homo Sapiens
auccuggaaugggaauggaaugccuggauuug

SEQ ID NO: 97529 - RNA, 32 nt, Homo Sapiens
uuacaugaaacuuaaaaacaaacaaauaugug

SEQ ID NO: 97530 - RNA, 32 nt, Homo Sapiens
ggcggcucugcugguugggggaggaagguucc

SEQ ID NO: 97531 - RNA, 30 nt, Homo Sapiens
ugcucagagaagcuggcaggacugggaggc

SEQ ID NO: 97532 - RNA, 32 nt, Homo Sapiens
guguuaaaauuuagccuuacuaauuauaacaa

SEQ ID NO: 97533 - RNA, 32 nt, Homo Sapiens
cagaugaacgaagcgugcaaauccacguggaa

SEQ ID NO: 97534 - RNA, 32 nt, Homo Sapiens
aaacuaagggccuccaacaggcaaauucaggg

SEQ ID NO: 97535 - RNA, 32 nt, Homo Sapiens
ggcccaagccgccauuguuccgccgagggagg

SEQ ID NO: 97536 - RNA, 28 nt, Homo Sapiens
gcacgcguuacaggagccaggucgguau

SEQ ID NO: 97537 - RNA, 32 nt, Homo Sapiens
augguuacauuugaaucucuuaaauaaucagu

SEQ ID NO: 97538 - RNA, 32 nt, Homo Sapiens
ucugcugccauucugaggaacaucuccaagga

SEQ ID NO: 97539 - RNA, 32 nt, Homo Sapiens
auucagucaacaccuauuuccuuagugccuac

SEQ ID NO: 97540 - RNA, 32 nt, Homo Sapiens
uacuuauuuucagugcaucauuacuguuccag

SEQ ID NO: 97541 - RNA, 32 nt, Homo Sapiens
guuuguucauucaacuaacaauauuuggggau

SEQ ID NO: 97542 - RNA, 32 nt, Homo Sapiens
caccagaaggcacugccugcaggaagaagaug

SEQ ID NO: 97543 - RNA, 32 nt, Homo Sapiens
auuaucugucuccuuccauuaucccucuccuu

SEQ ID NO: 97544 - RNA, 32 nt, Homo Sapiens
gaccaugccggggugcugcccgggcaggccau

SEQ ID NO: 97545 - RNA, 32 nt, Homo Sapiens
aguuagccgggugugguggugcaugccuguaa

SEQ ID NO: 97546 - RNA, 32 nt, Homo Sapiens
gaaguuucagaauuggcugauggucgugagug

SEQ ID NO: 97547 - RNA, 32 nt, Homo Sapiens
guuucgggcacgcauugucauugauaacaucu

SEQ ID NO: 97548 - RNA, 32 nt, Homo Sapiens
guuuggaggaagagacggagguugagguuuuu

SEQ ID NO: 97549 - RNA, 32 nt, Homo Sapiens
gguaaauaaagugggggcaaccccuggauaug

SEQ ID NO: 97550 - RNA, 32 nt, Homo Sapiens
uguauauguuauguaauuuauuuuaggcuaua

SEQ ID NO: 97551 - RNA, 32 nt, Homo Sapiens
aaacuuuuauuacaagauuucaauuaaacagg

SEQ ID NO: 97552 - RNA, 32 nt, Homo Sapiens
cuggugauuguaaaaauuucuuuuguaaagua

SEQ ID NO: 97553 - RNA, 32 nt, Homo Sapiens
uuuauuuuuuauuuucuaacucgucuucuuuc

SEQ ID NO: 97554 - RNA, 32 nt, Homo Sapiens
aagguguccucgggagcaggguuccaccggga

SEQ ID NO: 97555 - RNA, 32 nt, Homo Sapiens
cauuauuuuuauucuugugacccucccagaac

SEQ ID NO: 97556 - RNA, 32 nt, Homo Sapiens
cuugcuuccuuccacccugccucccuacccgc

SEQ ID NO: 97557 - RNA, 32 nt, Homo Sapiens
uuccuccugacaccccacuuagccuuucuuuu

SEQ ID NO: 97558 - RNA, 32 nt, Homo Sapiens
gugccgcugccagccugacggcucuguggcau

SEQ ID NO: 97559 - RNA, 32 nt, Homo Sapiens
cacacugggccaagagcagcugccauugcaga

SEQ ID NO: 97560 - RNA, 31 nt, Homo Sapiens
ucagccuacugcagucccugaguuagucucu

SEQ ID NO: 97561 - RNA, 32 nt, Homo Sapiens
uaaggcauccgcauccagcaucagauggcuuu

SEQ ID NO: 97562 - RNA, 32 nt, Homo Sapiens
aagagccuggaaagaggacucuguuggcuguu

SEQ ID NO: 97563 - RNA, 32 nt, Homo Sapiens
acaauucacaugauuucuauguuucuuaauga

SEQ ID NO: 97564 - RNA, 32 nt, Homo Sapiens
uaaagauguugacuuggauuuauuuaaauuca

SEQ ID NO: 97565 - RNA, 32 nt, Homo Sapiens
uucauguguuuccauuauuuguugucaaucug

SEQ ID NO: 97566 - RNA, 32 nt, Homo Sapiens
gaugaccacuguuuuccaaacccagucuguuc

SEQ ID NO: 97567 - RNA, 32 nt, Homo Sapiens
ucaauucaggcacaacugacugguucacagca

SEQ ID NO: 97568 - RNA, 27 nt, Homo Sapiens
ccaugcuggccucagggcugcuucugg

SEQ ID NO: 97569 - RNA, 27 nt, Homo Sapiens
acuuccugcuucuucaggccucagagg

SEQ ID NO: 97570 - RNA, 30 nt, Homo Sapiens
ggauuagcggcgggcggcgggcauggccug

SEQ ID NO: 97571 - RNA, 32 nt, Homo Sapiens
gguucaagcaauucugccccagccucccaagu

SEQ ID NO: 97572 - RNA, 32 nt, Homo Sapiens
agacaugagcauggcugagccuggacaaagac

SEQ ID NO: 97573 - RNA, 32 nt, Homo Sapiens
uugcgaagaaauagcaacguuuuuacgcuguu

SEQ ID NO: 97574 - RNA, 32 nt, Homo Sapiens
gugggucaggguggagguccugggugggcuaa

SEQ ID NO: 97575 - RNA, 32 nt, Homo Sapiens
ccggauucucccucggcccucccggccgauuc

SEQ ID NO: 97576 - RNA, 32 nt, Homo Sapiens
cacgugauaggggcugguuucuguggagccag

SEQ ID NO: 97577 - RNA, 32 nt, Homo Sapiens
uccccauuccuccgccuucuuccuccacacgc

SEQ ID NO: 97578 - RNA, 32 nt, Homo Sapiens
ucaaaggagucaggaauuauuuauguagaaac

SEQ ID NO: 97579 - RNA, 32 nt, Homo Sapiens
ggcacccgcucccucuggcagcgaauguagga

SEQ ID NO: 97580 - RNA, 32 nt, Homo Sapiens
ucuacgcucucgccgccacgcugcacguggcg

SEQ ID NO: 97581 - RNA, 32 nt, Homo Sapiens
agccuccuuccuccccggggaccuuugaaguc

SEQ ID NO: 97582 - RNA, 32 nt, Homo Sapiens
ucucugacuccagccgcacaccuccugccucu

SEQ ID NO: 97583 - RNA, 32 nt, Homo Sapiens
gccgcagcccucgcagagggcgggugcacagc

SEQ ID NO: 97584 - RNA, 32 nt, Homo Sapiens
gucuagcacaaugcuugaugcauauuguguga

SEQ ID NO: 97585 - RNA, 32 nt, Homo Sapiens
cacaacgcaugucugugaccuuugguaaucau

SEQ ID NO: 97586 - RNA, 32 nt, Homo Sapiens
ccagcuguggaagccagaaguugggcgguuuc

SEQ ID NO: 97587 - RNA, 32 nt, Homo Sapiens
gcgggcugagaggucagaggcugcgagugucg

SEQ ID NO: 97588 - RNA, 32 nt, Homo Sapiens
uuuccuguaaauauuuuguaauauuuuacuug

SEQ ID NO: 97589 - RNA, 32 nt, Homo Sapiens
uggcgccgccuccgggacccccaggacaggcu

SEQ ID NO: 97590 - RNA, 32 nt, Homo Sapiens
gccaugucccgaaagcagugauacagauuggc

SEQ ID NO: 97591 - RNA, 32 nt, Homo Sapiens
aggccucugaccaguagccugagaggggcuuu

SEQ ID NO: 97592 - RNA, 32 nt, Homo Sapiens
cgacaaguuauguuuugaguuugaugccauaa

SEQ ID NO: 97593 - RNA, 32 nt, Homo Sapiens
agcccaaaagggugggggugggaggggcagag

SEQ ID NO: 97594 - RNA, 32 nt, Homo Sapiens
uucagaaaguggggagcagagacccagccaaa

SEQ ID NO: 97595 - RNA, 32 nt, Homo Sapiens
cuuucuucccaaugucuauuaagaucacacau

SEQ ID NO: 97596 - RNA, 32 nt, Homo Sapiens
gccgccaagcccagccuuccccggcgcgcagc

SEQ ID NO: 97597 - RNA, 30 nt, Homo Sapiens
ccagcucacgcaggggcgggucccgguagc

SEQ ID NO: 97598 - RNA, 32 nt, Homo Sapiens
gcguucgcugucuaucagcugugauuuguaaa

SEQ ID NO: 97599 - RNA, 32 nt, Homo Sapiens
ugagagggaacaagaugccaucugucaacugc

SEQ ID NO: 97600 - RNA, 32 nt, Homo Sapiens
gaggucucgcuaaaaucaucauggauucacuu

SEQ ID NO: 97601 - RNA, 32 nt, Homo Sapiens
acaguacaaaaauucucugaaugaacauaaua

SEQ ID NO: 97602 - RNA, 32 nt, Homo Sapiens
gugaggacaaagugugggaaggccgugagggu

SEQ ID NO: 97603 - RNA, 32 nt, Homo Sapiens
aggccacuaacacaacgaaaagaaaucaugca

SEQ ID NO: 97604 - RNA, 32 nt, Homo Sapiens
aagcuuugaagucucccauuccccucaugcua

SEQ ID NO: 97605 - RNA, 32 nt, Homo Sapiens
cccaagucucuuccuuugucauuucaagcaau

SEQ ID NO: 97606 - RNA, 32 nt, Homo Sapiens
cagaucacuccccagcaucauucuucaaauuc

SEQ ID NO: 97607 - RNA, 32 nt, Homo Sapiens
uugcaaccacugcaauaucuucguuaguaauc

SEQ ID NO: 97608 - RNA, 32 nt, Homo Sapiens
auacuaaagcaguacuggacuggccauuggac

SEQ ID NO: 97609 - RNA, 32 nt, Homo Sapiens
cccaucaaggccaucagccugugcuuguucuu

SEQ ID NO: 97610 - RNA, 32 nt, Homo Sapiens
uguggacuuuacccaggaggaaugggaacaac

SEQ ID NO: 97611 - RNA, 32 nt, Homo Sapiens
cauucugcugaccacagcacuccaaccaaaag

SEQ ID NO: 97612 - RNA, 32 nt, Homo Sapiens
agaggagaaaguugugcagugauuccacccug

SEQ ID NO: 97613 - RNA, 32 nt, Homo Sapiens
gggugcagagaccuccccacccccaguucugg

SEQ ID NO: 97614 - RNA, 32 nt, Homo Sapiens
gcucugggacgcccagacccugcccgccgccc

SEQ ID NO: 97615 - RNA, 32 nt, Homo Sapiens
auauugacacuggggcugggcauggugguuca

SEQ ID NO: 97616 - RNA, 32 nt, Homo Sapiens
ccagccucugcagcugcacuucagcuccgcag

SEQ ID NO: 97617 - RNA, 28 nt, Homo Sapiens
cguucgggguaggcgauggcugcgacgc

SEQ ID NO: 97618 - RNA, 32 nt, Homo Sapiens
uguucuaagccaucgugcuuuggagugguuuc

SEQ ID NO: 97619 - RNA, 32 nt, Homo Sapiens
aaaggcuguuuuuuacugagagaauuucuaaa

SEQ ID NO: 97620 - RNA, 32 nt, Homo Sapiens
uuggaagacauucuggaaggggugggguguga

SEQ ID NO: 97621 - RNA, 32 nt, Homo Sapiens
aucccuucucaaucuuuccccacagcugucua

SEQ ID NO: 97622 - RNA, 32 nt, Homo Sapiens
ugucaucuuugccacuucccucuucuuugucc

SEQ ID NO: 97623 - RNA, 32 nt, Homo Sapiens
uguguuuguaagugagugucccuaugcgauua

SEQ ID NO: 97624 - RNA, 32 nt, Homo Sapiens
ugaugaugaaaucucugcauggcugcaaugau

SEQ ID NO: 97625 - RNA, 32 nt, Homo Sapiens
guaguggcgggugccuguagucccaguacuca

SEQ ID NO: 97626 - RNA, 32 nt, Homo Sapiens
accuagagguggccauagagaggacaguggcc

SEQ ID NO: 97627 - RNA, 32 nt, Homo Sapiens
gcacagccuguccugggcccagcccugagccc

SEQ ID NO: 97628 - RNA, 32 nt, Homo Sapiens
gacuuugcagaugugauucaguuuaggauuuu

SEQ ID NO: 97629 - RNA, 32 nt, Homo Sapiens
uccaccuaccuauucaucuaccuguguguaug

SEQ ID NO: 97630 - RNA, 32 nt, Homo Sapiens
caauuggauuucaaguuauaugaugaaauucu

SEQ ID NO: 97631 - RNA, 32 nt, Homo Sapiens
agcccuaaaugaauacuugacccacagcaaau

SEQ ID NO: 97632 - RNA, 32 nt, Homo Sapiens
ugauucuauuaagaugaccuuuauguuaaacu

SEQ ID NO: 97633 - RNA, 32 nt, Homo Sapiens
cauucuucugaagugaaauuuacuugacacag

SEQ ID NO: 97634 - RNA, 32 nt, Homo Sapiens
ugggcacugcuuugggcgcgagacuugcggag

SEQ ID NO: 97635 - RNA, 32 nt, Homo Sapiens
auguuggacuacaggauccuagcugugucugg

SEQ ID NO: 97636 - RNA, 31 nt, Homo Sapiens
uuuuuucuugguagucuuuaaaaauuagggg

SEQ ID NO: 97637 - RNA, 32 nt, Homo Sapiens
cugucuuuucuguaauauucucuuucaugcug

SEQ ID NO: 97638 - RNA, 29 nt, Homo Sapiens
aacauguaaaguuuuucugcuuucaagug

SEQ ID NO: 97639 - RNA, 32 nt, Homo Sapiens
uggcuucgggcagggaaggcggguagaggcug

SEQ ID NO: 97640 - RNA, 32 nt, Homo Sapiens
gcuccucacuuuacccuagccacacauaauua

SEQ ID NO: 97641 - RNA, 32 nt, Homo Sapiens
gcccagagcugcugggcccacuggccguccug

SEQ ID NO: 97642 - RNA, 32 nt, Homo Sapiens
acuuuguucaacaucagggaauuuauauugaa

SEQ ID NO: 97643 - RNA, 32 nt, Homo Sapiens
ucuaucauagaguauuagcccuugcaaguuuu

SEQ ID NO: 97644 - RNA, 32 nt, Homo Sapiens
cuggauuugcagaaguuuuuuuuuuuuuucuu

SEQ ID NO: 97645 - RNA, 32 nt, Homo Sapiens
cgcggcagugggggcuuccgcggcugcaagcc

SEQ ID NO: 97646 - RNA, 32 nt, Homo Sapiens
cugcgccccgucccaugcccgcucuugaguau

SEQ ID NO: 97647 - RNA, 32 nt, Homo Sapiens
gauuggaacuggagaccccucccaaccccccu

SEQ ID NO: 97648 - RNA, 31 nt, Homo Sapiens
caaucagcgggcccugcagaguuacugaugu

SEQ ID NO: 97649 - RNA, 32 nt, Homo Sapiens
auugcacguugacuggaauucuuucuuugugu

SEQ ID NO: 97650 - RNA, 32 nt, Homo Sapiens
cugcagcguuuacgccgagauaacucguggau

SEQ ID NO: 97651 - RNA, 32 nt, Homo Sapiens
acagcaugcaggcaccaagagaguggacgcac

SEQ ID NO: 97652 - RNA, 32 nt, Homo Sapiens
gauugggaggcacaagugcccgcugcgauggg

SEQ ID NO: 97653 - RNA, 32 nt, Homo Sapiens
aaugacugaaagaugggacuccuccuuuauuu

SEQ ID NO: 97654 - RNA, 32 nt, Homo Sapiens
gaaggucaccuccuuuccaguccccgugcgag

SEQ ID NO: 97655 - RNA, 32 nt, Homo Sapiens
uuggaacagacugggagccugaucccaagagg

SEQ ID NO: 97656 - RNA, 32 nt, Homo Sapiens
cuucauaaacacaguguaaagaaaucuacuuu

SEQ ID NO: 97657 - RNA, 32 nt, Homo Sapiens
aaguuagccaagguugcuuuuguguuauaaug

SEQ ID NO: 97658 - RNA, 32 nt, Homo Sapiens
uuuaagaugcuauaaagacugauaaaaugcuc

SEQ ID NO: 97659 - RNA, 32 nt, Homo Sapiens
gaugugccagugccuucucaccaccacgugcc

SEQ ID NO: 97660 - RNA, 32 nt, Homo Sapiens
ggcccaggaaaaugcagaugcugacgauacga

SEQ ID NO: 97661 - RNA, 32 nt, Homo Sapiens
aaaagacacacaagucgcguggguuggagaag

SEQ ID NO: 97662 - RNA, 32 nt, Homo Sapiens
uagaugugcuagaacaaauuaccacaaacugg

SEQ ID NO: 97663 - RNA, 32 nt, Homo Sapiens
uuuaggauauaaaagaggguuuucucagaccu

SEQ ID NO: 97664 - RNA, 28 nt, Homo Sapiens
gggauguuaucuuucauuuucauuucau

SEQ ID NO: 97665 - RNA, 32 nt, Homo Sapiens
gcccgccuggcucuggggccugucauugguau

SEQ ID NO: 97666 - RNA, 32 nt, Homo Sapiens
guuguugaucagacccuucucuuaauagagag

SEQ ID NO: 97667 - RNA, 32 nt, Homo Sapiens
uugggguuuuuggcccagggggugacuuuauu

SEQ ID NO: 97668 - RNA, 32 nt, Homo Sapiens
guugccgccgccgccuguagcugcuggacccg

SEQ ID NO: 97669 - RNA, 32 nt, Homo Sapiens
cagcaucucgauccaugagugauagaaaaaga

SEQ ID NO: 97670 - RNA, 32 nt, Homo Sapiens
caccaugcaggccuuggagaucgagcugcagu

SEQ ID NO: 97671 - RNA, 31 nt, Homo Sapiens
cuccgagggcacugcgugccgcgcaggcgca

SEQ ID NO: 97672 - RNA, 32 nt, Homo Sapiens
gauagcauagaggagauuaagggugaggccac

SEQ ID NO: 97673 - RNA, 32 nt, Homo Sapiens
acuauucuuggaauauuuauggucagucuacu

SEQ ID NO: 97674 - RNA, 32 nt, Homo Sapiens
agggacagaggcgggggcgggccggaaaguuu

SEQ ID NO: 97675 - RNA, 32 nt, Homo Sapiens
cugccgcgcgcccucgcgccuguucacauccc

SEQ ID NO: 97676 - RNA, 32 nt, Homo Sapiens
ugaauuucagaguaaaauuuguuaacaauuuu

SEQ ID NO: 97677 - RNA, 32 nt, Homo Sapiens
cacauuuguaauuuacacuacucuucuucaau

SEQ ID NO: 97678 - RNA, 32 nt, Homo Sapiens
ggcuccugcacgggcucuguucuuuugcagaa

SEQ ID NO: 97679 - RNA, 32 nt, Homo Sapiens
accugggcuugccugccucuguuggagaaucu

SEQ ID NO: 97680 - RNA, 32 nt, Homo Sapiens
gaaaauggacacugugcccagcccggaccuug

SEQ ID NO: 97681 - RNA, 32 nt, Homo Sapiens
uucaaaaaugaaacuuuucagugauucacuuu

SEQ ID NO: 97682 - RNA, 32 nt, Homo Sapiens
uauaaccauauuaccguuuucaucucaggaga

SEQ ID NO: 97683 - RNA, 32 nt, Homo Sapiens
gccaguucgugugugggacgccggccaucacc

SEQ ID NO: 97684 - RNA, 32 nt, Homo Sapiens
ccucacacuuugagcugagacuugaaaacgau

SEQ ID NO: 97685 - RNA, 32 nt, Homo Sapiens
cucaacccuugaucccaaaggcacacaaucac

SEQ ID NO: 97686 - RNA, 30 nt, Homo Sapiens
ugucuagcacugaauggggaaacugggggc

SEQ ID NO: 97687 - RNA, 32 nt, Homo Sapiens
uaaaugauaaaauuauuuaaaaaaaaaaaaaa

SEQ ID NO: 97688 - RNA, 32 nt, Homo Sapiens
ccgcaugugugcacucgggccacacauacagc

SEQ ID NO: 97689 - RNA, 32 nt, Homo Sapiens
augcccagcggcugccgcugccugcaucucgu

SEQ ID NO: 97690 - RNA, 32 nt, Homo Sapiens
uucaaguaaaaugauaaaauagucauuauaua

SEQ ID NO: 97691 - RNA, 32 nt, Homo Sapiens
cgccccagcaagccucuuucggggaguccucu

SEQ ID NO: 97692 - RNA, 32 nt, Homo Sapiens
ggauuugggggaggaauauuagacucggagga

SEQ ID NO: 97693 - RNA, 32 nt, Homo Sapiens
ggcacccuggacacguccugcuggugagggac

SEQ ID NO: 97694 - RNA, 28 nt, Homo Sapiens
cacccaguuacaggggcauuuagggagc

SEQ ID NO: 97695 - RNA, 32 nt, Homo Sapiens
ugagagcugcuucuccuucucccugggcagca

SEQ ID NO: 97696 - RNA, 32 nt, Homo Sapiens
cucaggcuccagcugagcagagauuuuaauca

SEQ ID NO: 97697 - RNA, 32 nt, Homo Sapiens
ggcccugcacaccauggcccccgggugggcag

SEQ ID NO: 97698 - RNA, 32 nt, Homo Sapiens
cccgcgccugcgcagcgucccgggccgagagg

SEQ ID NO: 97699 - RNA, 32 nt, Homo Sapiens
uaaagaacauaaauggaaagauacaaaugcuu

SEQ ID NO: 97700 - RNA, 32 nt, Homo Sapiens
aaagggggcuuagggaugagguccugguuuuu

SEQ ID NO: 97701 - RNA, 32 nt, Homo Sapiens
auuugaguuuuguugaaaagauggaguuuaca

SEQ ID NO: 97702 - RNA, 32 nt, Homo Sapiens
gacgucaggugauccgcccaccuuggccuccc

SEQ ID NO: 97703 - RNA, 32 nt, Homo Sapiens
caacucauuaaaaaacaaaacaacucuggcuu

SEQ ID NO: 97704 - RNA, 32 nt, Homo Sapiens
uacaacuuucaacaucgucauuuuuucuuaga

SEQ ID NO: 97705 - RNA, 32 nt, Homo Sapiens
uaagccaauccucacuccccagccuccucugg

SEQ ID NO: 97706 - RNA, 32 nt, Homo Sapiens
acuguucgcucuugucuacagaacagcccugg

SEQ ID NO: 97707 - RNA, 32 nt, Homo Sapiens
auuuucuuuuuuucuuuuuugccuuuuauucc

SEQ ID NO: 97708 - RNA, 32 nt, Homo Sapiens
agaaaaaccugccccaggaucucuccucagua

SEQ ID NO: 97709 - RNA, 32 nt, Homo Sapiens
caacagcaugauuugcaggacuucaguuacac

SEQ ID NO: 97710 - RNA, 32 nt, Homo Sapiens
guggggcuccgcgccugccggugaagagcugc

SEQ ID NO: 97711 - RNA, 32 nt, Homo Sapiens
auuuggagcaucuugaaaagcuggagcuucac

SEQ ID NO: 97712 - RNA, 32 nt, Homo Sapiens
cacgaaccucaauagacuccauugacucagga

SEQ ID NO: 97713 - RNA, 32 nt, Homo Sapiens
uaguccaacaguuguuuacauuuuaaauaguc

SEQ ID NO: 97714 - RNA, 32 nt, Homo Sapiens
ggguggccagguggggcgggaccccagcaccu

SEQ ID NO: 97715 - RNA, 32 nt, Homo Sapiens
aggcuucucuucugaaaugaugacuuaauguc

SEQ ID NO: 97716 - RNA, 32 nt, Homo Sapiens
auauuugcauaauuuauuuaauuuaagccuca

SEQ ID NO: 97717 - RNA, 28 nt, Homo Sapiens
aagcaauaaaaagcaaguuuucaaugau

SEQ ID NO: 97718 - RNA, 32 nt, Homo Sapiens
auacauaaaaauuucaucuuaaagcacuuuca

SEQ ID NO: 97719 - RNA, 32 nt, Homo Sapiens
ccugcccagucccccaaccccagccgcucgga

SEQ ID NO: 97720 - RNA, 32 nt, Homo Sapiens
cuccccccgaacuuucccucucgcaugcuuuu

SEQ ID NO: 97721 - RNA, 32 nt, Homo Sapiens
ggguuuguuucauuaucugguuuuauuaagca

SEQ ID NO: 97722 - RNA, 32 nt, Homo Sapiens
ugcuugaaaaagauuagcauacaucuaaugug

SEQ ID NO: 97723 - RNA, 32 nt, Homo Sapiens
gguuucgucauguuggccaggcuggucucgaa

SEQ ID NO: 97724 - RNA, 29 nt, Homo Sapiens
aaaaaauaaaguuguaauuucugaugacu

SEQ ID NO: 97725 - RNA, 32 nt, Homo Sapiens
uucagagucucacccugucacccaggcuggaa

SEQ ID NO: 97726 - RNA, 32 nt, Homo Sapiens
ccggagccgcggcuccgagcucgcauucggau

SEQ ID NO: 97727 - RNA, 32 nt, Homo Sapiens
agagcucaaggauuuuggguuuuguuuuguuu

SEQ ID NO: 97728 - RNA, 32 nt, Homo Sapiens
gggaacuagggucaccuggagagccgcccacc

SEQ ID NO: 97729 - RNA, 32 nt, Homo Sapiens
cuaaggagauggaaggugacgcacaaaagcuu

SEQ ID NO: 97730 - RNA, 32 nt, Homo Sapiens
cuuguucuugaaguccuccaccagccccugcg

SEQ ID NO: 97731 - RNA, 32 nt, Homo Sapiens
uucccaggagggcggcggggcagaggcgcccc

SEQ ID NO: 97732 - RNA, 32 nt, Homo Sapiens
aaauuauugaauagggcagcuaaccaagaaga

SEQ ID NO: 97733 - RNA, 32 nt, Homo Sapiens
cuuguguuuuauuuucaccaccagacccauuc

SEQ ID NO: 97734 - RNA, 32 nt, Homo Sapiens
ugcaaagauccgagcugucagagauuugaaaa

SEQ ID NO: 97735 - RNA, 32 nt, Homo Sapiens
auauguauaaauauaacagcucugacaaagca

SEQ ID NO: 97736 - RNA, 31 nt, Homo Sapiens
cgcgccggccagcgccugcccuaugagugug

SEQ ID NO: 97737 - RNA, 32 nt, Homo Sapiens
agacuuuuacuuuugauuucccuaggauggaa

SEQ ID NO: 97738 - RNA, 32 nt, Homo Sapiens
aauguagugauguuuacauuguuuacauucuu

SEQ ID NO: 97739 - RNA, 32 nt, Homo Sapiens
caacugcaguggggcugcuugugguuuccaaa

SEQ ID NO: 97740 - RNA, 30 nt, Homo Sapiens
acccagggccuaggacggauaggcaggaac

SEQ ID NO: 97741 - RNA, 32 nt, Homo Sapiens
aacccucucccucucugccugaauuugccaaa

SEQ ID NO: 97742 - RNA, 32 nt, Homo Sapiens
uagcuggaaaaaucugccaacuuuacacagua

SEQ ID NO: 97743 - RNA, 27 nt, Homo Sapiens
ugccguccaccucucagccccuccccu

SEQ ID NO: 97744 - RNA, 32 nt, Homo Sapiens
ucucccuuggcaaauguaaguuuucuaaguug

SEQ ID NO: 97745 - RNA, 32 nt, Homo Sapiens
ggauaggagaggaaaaggcuugagucuggaua

SEQ ID NO: 97746 - RNA, 32 nt, Homo Sapiens
aggagcauucauauuuuucauaaaaccggcua

SEQ ID NO: 97747 - RNA, 32 nt, Homo Sapiens
gaauuguucccucccccgcaaugugggcacuu

SEQ ID NO: 97748 - RNA, 32 nt, Homo Sapiens
ucgagggagcaggagcaucaggcggccggcgc

SEQ ID NO: 97749 - RNA, 32 nt, Homo Sapiens
ugauuucugaaauaaacuguaaguagugaacg

SEQ ID NO: 97750 - RNA, 32 nt, Homo Sapiens
uuuuuuguauauauuuauuauuguaaaucaug

SEQ ID NO: 97751 - RNA, 32 nt, Homo Sapiens
ccucuauuccuccagcacuuacuucuaccauu

SEQ ID NO: 97752 - RNA, 32 nt, Homo Sapiens
agagcaacccucaggcugaggcaggaggguca

SEQ ID NO: 97753 - RNA, 27 nt, Homo Sapiens
gccuaccauuaauaguguauaucuugg

SEQ ID NO: 97754 - RNA, 32 nt, Homo Sapiens
ucagcaguucccucgacuggccagucggggua

SEQ ID NO: 97755 - RNA, 32 nt, Homo Sapiens
ugguacaauguaaaaugccaugcuuauguuua

SEQ ID NO: 97756 - RNA, 32 nt, Homo Sapiens
uaacacauugaaacuauuauuuuuuagauuug

SEQ ID NO: 97757 - RNA, 32 nt, Homo Sapiens
acagcuccuguauccuucucauccuugucucu

SEQ ID NO: 97758 - RNA, 32 nt, Homo Sapiens
cuggcccagcugcuccagcagugugcacggac

SEQ ID NO: 97759 - RNA, 30 nt, Homo Sapiens
gugcccggaccugaggcgccggcgugucag

SEQ ID NO: 97760 - RNA, 32 nt, Homo Sapiens
augggagaaggggaggcaugauucuucugacc

SEQ ID NO: 97761 - RNA, 32 nt, Homo Sapiens
acuguagugcuggggaucccccuuguaacacu

SEQ ID NO: 97762 - RNA, 32 nt, Homo Sapiens
ggugagaaaaauaccaaaaauauuaaauuuau

SEQ ID NO: 97763 - RNA, 30 nt, Homo Sapiens
ucacauacugguaggaccgugaugacaacc

SEQ ID NO: 97764 - RNA, 32 nt, Homo Sapiens
gggcuuagagcaguuucuguccugcugguuaa

SEQ ID NO: 97765 - RNA, 32 nt, Homo Sapiens
guccuucugaaucccuucccuguuccuuaggu

SEQ ID NO: 97766 - RNA, 32 nt, Homo Sapiens
uuucuaaacacaugccaauguuugucuuuucc

SEQ ID NO: 97767 - RNA, 32 nt, Homo Sapiens
agacaguauauguuuuaaacuuugauguaaac

SEQ ID NO: 97768 - RNA, 32 nt, Homo Sapiens
ugaaagaccccauagugaaauauuugggauca

SEQ ID NO: 97769 - RNA, 32 nt, Homo Sapiens
uugcauuuuuaaagccugcuuccuggauuuaa

SEQ ID NO: 97770 - RNA, 32 nt, Homo Sapiens
cgcugcgauguugcgcgcugccgcccgcuucg

SEQ ID NO: 97771 - RNA, 32 nt, Homo Sapiens
cccccgccacccaccuccuccuccccaggcca

SEQ ID NO: 97772 - RNA, 32 nt, Homo Sapiens
aguuucggguccgaggagccucgcgcggcgcu

SEQ ID NO: 97773 - RNA, 32 nt, Homo Sapiens
acugugauucuuugcaccuuccuuguacauca

SEQ ID NO: 97774 - RNA, 32 nt, Homo Sapiens
auuugcuagucacggacagugauuccugccuc

SEQ ID NO: 97775 - RNA, 32 nt, Homo Sapiens
auaugggaauaaaaauuugugcaagucagaga

SEQ ID NO: 97776 - RNA, 32 nt, Homo Sapiens
uguuucuuauggaaaucugcuuccugcaccac

SEQ ID NO: 97777 - RNA, 32 nt, Homo Sapiens
cccgacuccgccagcccucggcccgcugccgu

SEQ ID NO: 97778 - RNA, 32 nt, Homo Sapiens
guuguuguuguuguuguuguuuuauauaaugc

SEQ ID NO: 97779 - RNA, 32 nt, Homo Sapiens
uggauuggucuacacaucaaggugcuggaagu

SEQ ID NO: 97780 - RNA, 32 nt, Homo Sapiens
gggaccuccaaguagcccagccaggcccccaa

SEQ ID NO: 97781 - RNA, 32 nt, Homo Sapiens
uagcccugaaacaaagcagugggggagagggg

SEQ ID NO: 97782 - RNA, 31 nt, Homo Sapiens
agcuggagugagggccucagagccugaccug

SEQ ID NO: 97783 - RNA, 32 nt, Homo Sapiens
agcguuuuaaauuguuuuuucuuucuuccuag

SEQ ID NO: 97784 - RNA, 32 nt, Homo Sapiens
uauccuuuaaugccuaaaacuccaucaaggga

SEQ ID NO: 97785 - RNA, 32 nt, Homo Sapiens
aaagaucccuuccggcagguaagggacuacca

SEQ ID NO: 97786 - RNA, 32 nt, Homo Sapiens
auuucuauuuuuuuuucuuauaaguucguugu

SEQ ID NO: 97787 - RNA, 32 nt, Homo Sapiens
uugggaaugaauuccugggacaaacggaggag

SEQ ID NO: 97788 - RNA, 32 nt, Homo Sapiens
gggcggcgcagccgcuccuguuggagccccca

SEQ ID NO: 97789 - RNA, 32 nt, Homo Sapiens
uggcauuugcuggccuggcagggggugaaggc

SEQ ID NO: 97790 - RNA, 32 nt, Homo Sapiens
ccggguucaucccacaccagccgccuccacca

SEQ ID NO: 97791 - RNA, 32 nt, Homo Sapiens
ucaggccuguacucaccucagcaucuaucaag

SEQ ID NO: 97792 - RNA, 32 nt, Homo Sapiens
aaagcauuaauagaaaaucaauccacaaccuc

SEQ ID NO: 97793 - RNA, 32 nt, Homo Sapiens
gcccagcccagaagcuaauuuuuuaauauugu

SEQ ID NO: 97794 - RNA, 32 nt, Homo Sapiens
uguggcacaaacgauagcauuuccaagcuuua

SEQ ID NO: 97795 - RNA, 32 nt, Homo Sapiens
agaacgugcugcgcucagcaugcgacaccgug

SEQ ID NO: 97796 - RNA, 32 nt, Homo Sapiens
aagucagaaaucaguucacucccuggaagaga

SEQ ID NO: 97797 - RNA, 32 nt, Homo Sapiens
auuuucuucuauuuuucuuaguuuucuaucuu

SEQ ID NO: 97798 - RNA, 32 nt, Homo Sapiens
accaggcggcgcguucccgguggcggcgcccu

SEQ ID NO: 97799 - RNA, 32 nt, Homo Sapiens
ccagcucugggggcuccagcguggccuccgug

SEQ ID NO: 97800 - RNA, 32 nt, Homo Sapiens
gucuccagucagagggaaccgcccccaaacua

SEQ ID NO: 97801 - RNA, 32 nt, Homo Sapiens
uuucuuuguauuucucuguuaagcaaagaaau

SEQ ID NO: 97802 - RNA, 32 nt, Homo Sapiens
gaaaccuguuuaauuucuuuuguaucuuugaa

SEQ ID NO: 97803 - RNA, 32 nt, Homo Sapiens
cacagucaguauguagaaugggauguauucuu

SEQ ID NO: 97804 - RNA, 32 nt, Homo Sapiens
aaucagaagauaagugugaaggaaucgucuug

SEQ ID NO: 97805 - RNA, 32 nt, Homo Sapiens
cguuggcgccaucagucugcugugcagccagc

SEQ ID NO: 97806 - RNA, 32 nt, Homo Sapiens
gagugcuaaguaaauuuaauauuuggaguugu

SEQ ID NO: 97807 - RNA, 32 nt, Homo Sapiens
aaaagugacugggacgaugcuuccucucaucc

SEQ ID NO: 97808 - RNA, 32 nt, Homo Sapiens
auccaaugaaaugaguuuuucuuuucauuuac

SEQ ID NO: 97809 - RNA, 32 nt, Homo Sapiens
ccggaugccccgaggcgggaggccggcugugc

SEQ ID NO: 97810 - RNA, 32 nt, Homo Sapiens
ugagaucacccccaugcuggaacucuuugaag

SEQ ID NO: 97811 - RNA, 32 nt, Homo Sapiens
acaaaaacccaaccaaaccaagcccuguugug

SEQ ID NO: 97812 - RNA, 32 nt, Homo Sapiens
gaacgggcuuugggggcgucaggucuuuccaa

SEQ ID NO: 97813 - RNA, 30 nt, Homo Sapiens
gugguaggcagacgcgcggggaaauucgga

SEQ ID NO: 97814 - RNA, 32 nt, Homo Sapiens
uaauauuaaggguaauuugagguaaaacaaaa

SEQ ID NO: 97815 - RNA, 32 nt, Homo Sapiens
uuacagcauaguggaagauuagcugaugaccc

SEQ ID NO: 97816 - RNA, 32 nt, Homo Sapiens
cuacuugauugaacccauuuaagucauuuuag

SEQ ID NO: 97817 - RNA, 32 nt, Homo Sapiens
guguauuuacacaagugauggcauaccacaua

SEQ ID NO: 97818 - RNA, 32 nt, Homo Sapiens
aaaaagugaugaugauuuugcugacuuccacu

SEQ ID NO: 97819 - RNA, 32 nt, Homo Sapiens
uucguguaaaauggugcuguuauuacucuguc

SEQ ID NO: 97820 - RNA, 32 nt, Homo Sapiens
cuaccugaauuaacauacaaaauauuugauuu

SEQ ID NO: 97821 - RNA, 32 nt, Homo Sapiens
ggucauaaggcuuccaguggcuucuacagauu

SEQ ID NO: 97822 - RNA, 32 nt, Homo Sapiens
uucagaguaaccugugugcauacucuagaaga

SEQ ID NO: 97823 - RNA, 32 nt, Homo Sapiens
ucagacgcgggccggggccaggggucucugac

SEQ ID NO: 97824 - RNA, 32 nt, Homo Sapiens
aaaaguaagagacacgaggacacacacacagg

SEQ ID NO: 97825 - RNA, 32 nt, Homo Sapiens
ugggugggugaaagcaaaugugaaauguggag

SEQ ID NO: 97826 - RNA, 32 nt, Homo Sapiens
ggcagggaagcagcacugaguaaaguucaauu

SEQ ID NO: 97827 - RNA, 32 nt, Homo Sapiens
aggggccugccagcuuagugagggccccguug

SEQ ID NO: 97828 - RNA, 32 nt, Homo Sapiens
ccgauuaucuucauugcuuuuaauguucuauu

SEQ ID NO: 97829 - RNA, 32 nt, Homo Sapiens
cggagccgcgcgccgcggcgcuguaaucggac

SEQ ID NO: 97830 - RNA, 32 nt, Homo Sapiens
guggagccaaagaaacaaagauccacacacau

SEQ ID NO: 97831 - RNA, 32 nt, Homo Sapiens
uuauuccuaaguauuucuuauuuuaaguucuc

SEQ ID NO: 97832 - RNA, 32 nt, Homo Sapiens
aggauuuuuuucugccuauuuauggcaucuua

SEQ ID NO: 97833 - RNA, 32 nt, Homo Sapiens
acggaggagcuagcugaguaugcugaaauccg

SEQ ID NO: 97834 - RNA, 32 nt, Homo Sapiens
acccaaaugcaaaauaaacaaacaaacaaaua

SEQ ID NO: 97835 - RNA, 32 nt, Homo Sapiens
ccuaaccagggccagaaguagcuuugcacuuu

SEQ ID NO: 97836 - RNA, 32 nt, Homo Sapiens
ggagcaucaacagcagggugggcuuguggggc

SEQ ID NO: 97837 - RNA, 32 nt, Homo Sapiens
gaaaauuuacacaauuagguuuaaauucagua

SEQ ID NO: 97838 - RNA, 32 nt, Homo Sapiens
ugauccagcagccccccuccccacugccuccc

SEQ ID NO: 97839 - RNA, 32 nt, Homo Sapiens
cccacaggcacgugcaaucacacacacacgug

SEQ ID NO: 97840 - RNA, 32 nt, Homo Sapiens
gcaggaggcucugaagcggcugcugcaccgcg

SEQ ID NO: 97841 - RNA, 32 nt, Homo Sapiens
cuuuaacaggauucugcccccugagguguaau

SEQ ID NO: 97842 - RNA, 32 nt, Homo Sapiens
uacauuuuucuuuuaguuuuuccaaacaugag

SEQ ID NO: 97843 - RNA, 32 nt, Homo Sapiens
aagauaguuuucuucaggugucaauggcguua

SEQ ID NO: 97844 - RNA, 32 nt, Homo Sapiens
ccucuuuuuaaaccuuuacuuauagcuagaau

SEQ ID NO: 97845 - RNA, 32 nt, Homo Sapiens
augcagccccugggcuggcccuugguggucuc

SEQ ID NO: 97846 - RNA, 32 nt, Homo Sapiens
augcgucggucgucgcccccgucguucccucc

SEQ ID NO: 97847 - RNA, 32 nt, Homo Sapiens
uccgccccuggaccggccggcagcggagcgca

SEQ ID NO: 97848 - RNA, 32 nt, Homo Sapiens
aauuaaagggauaacgugucaagccaauugag

SEQ ID NO: 97849 - RNA, 32 nt, Homo Sapiens
gggcucugucuccucggcgccccagugcccgu

SEQ ID NO: 97850 - RNA, 32 nt, Homo Sapiens
agaugugacuacugaggggaggucugaguguu

SEQ ID NO: 97851 - RNA, 32 nt, Homo Sapiens
uggccaaaagcuccuugugagucaccuuucuu

SEQ ID NO: 97852 - RNA, 32 nt, Homo Sapiens
agguuuuacugaugguguugaugugagaugag

SEQ ID NO: 97853 - RNA, 32 nt, Homo Sapiens
ggauauuaucuaauggugaauuguagaauuuu

SEQ ID NO: 97854 - RNA, 32 nt, Homo Sapiens
aagaucgucuccauuuuuaugcuuuugggaga

SEQ ID NO: 97855 - RNA, 32 nt, Homo Sapiens
uguuugguaaauguuucuuuuaaagacccucc

SEQ ID NO: 97856 - RNA, 32 nt, Homo Sapiens
guccgacuugcagcuggcccagaucaaaugca

SEQ ID NO: 97857 - RNA, 32 nt, Homo Sapiens
guaaauuguauauaaccaucuuaaguucuggu

SEQ ID NO: 97858 - RNA, 32 nt, Homo Sapiens
aaucuggagacgccagcccugcccaaucagag

SEQ ID NO: 97859 - RNA, 32 nt, Homo Sapiens
uuggcuaucgggucaucugugcugcuccccac

SEQ ID NO: 97860 - RNA, 32 nt, Homo Sapiens
ucacuccucaauccccuucuccucgccaucau

SEQ ID NO: 97861 - RNA, 32 nt, Homo Sapiens
gacauaguucccuccuucuggggcuccacauc

SEQ ID NO: 97862 - RNA, 32 nt, Homo Sapiens
aaacacguucuuuuccaacagaugagcaaagg

SEQ ID NO: 97863 - RNA, 32 nt, Homo Sapiens
cccauuuuaauagaaaaagucaauaccaauuc

SEQ ID NO: 97864 - RNA, 32 nt, Homo Sapiens
aacaggugcaggguugugggagccgagacgag

SEQ ID NO: 97865 - RNA, 32 nt, Homo Sapiens
aucucauugugauuuugguuugcauuucccug

SEQ ID NO: 97866 - RNA, 32 nt, Homo Sapiens
uaaaaaaugaauguauuaaaucuuaugaguag

SEQ ID NO: 97867 - RNA, 32 nt, Homo Sapiens
ucaacuguggucugcauuccuucggcccgugg

SEQ ID NO: 97868 - RNA, 32 nt, Homo Sapiens
cagguggcccagcgugguguccugucagcuuc

SEQ ID NO: 97869 - RNA, 32 nt, Homo Sapiens
agcauguagaugguugugcaauauuuuucaaa

SEQ ID NO: 97870 - RNA, 32 nt, Homo Sapiens
ucacucaaucuuguuggcccuccggcgaucuc

SEQ ID NO: 97871 - RNA, 32 nt, Homo Sapiens
ugggggucuagaccaggauuauagaggacaca

SEQ ID NO: 97872 - RNA, 32 nt, Homo Sapiens
caucagagccccccagcccacccaccacaggc

SEQ ID NO: 97873 - RNA, 32 nt, Homo Sapiens
cugcagcuuauucuugccaugcuuaggugaca

SEQ ID NO: 97874 - RNA, 32 nt, Homo Sapiens
agcaaaacaaagugcaauauuaaauguuugcu

SEQ ID NO: 97875 - RNA, 32 nt, Homo Sapiens
gaccuggaggcucucuccagcugcugauugug

SEQ ID NO: 97876 - RNA, 32 nt, Homo Sapiens
ggaaaacucuucauuaaaguccguauuucuuc

SEQ ID NO: 97877 - RNA, 32 nt, Homo Sapiens
guuuaguggccccaggcccacuccucaugcag

SEQ ID NO: 97878 - RNA, 32 nt, Homo Sapiens
acacacacacacaaucuucaggccaauacccu

SEQ ID NO: 97879 - RNA, 32 nt, Homo Sapiens
aacacacaggaauggaauggacaggcucaccu

SEQ ID NO: 97880 - RNA, 32 nt, Homo Sapiens
uacuacuaaugugacccuguauauacauggau

SEQ ID NO: 97881 - RNA, 32 nt, Homo Sapiens
ggcacgaggcggggagcccggggccugccagg

SEQ ID NO: 97882 - RNA, 32 nt, Homo Sapiens
auguuuuccugccuauguuaauaugucagaaa

SEQ ID NO: 97883 - RNA, 32 nt, Homo Sapiens
gauccuugaaccaaaggaucuauacauugauc

SEQ ID NO: 97884 - RNA, 32 nt, Homo Sapiens
gcaaaauaauacuaacuuauuauuauuuauga

SEQ ID NO: 97885 - RNA, 32 nt, Homo Sapiens
caggacucaguccugcuucuuuugccucgagu

SEQ ID NO: 97886 - RNA, 32 nt, Homo Sapiens
cgaaacuuucauuguuaauguauauuauucag

SEQ ID NO: 97887 - RNA, 32 nt, Homo Sapiens
auaccuucccgcgcggacgccggcgcugccaa

SEQ ID NO: 97888 - RNA, 32 nt, Homo Sapiens
gcggcgggccagcugggcugcccgguucccag

SEQ ID NO: 97889 - RNA, 32 nt, Homo Sapiens
cucugcaaaauaauucaggccacugucucuuu

SEQ ID NO: 97890 - RNA, 32 nt, Homo Sapiens
guugauuacuaaaacuauacuuuguuucccau

SEQ ID NO: 97891 - RNA, 32 nt, Homo Sapiens
uucuucuuucuuuuccucuuuuuccccaagag

SEQ ID NO: 97892 - RNA, 32 nt, Homo Sapiens
agcuuuauucaaagaauagauguuauauuucu

SEQ ID NO: 97893 - RNA, 32 nt, Homo Sapiens
gggcaguggucacuguggcacccagguguggg

SEQ ID NO: 97894 - RNA, 32 nt, Homo Sapiens
cuaacacuugauuuucugaagucuagcuuaac

SEQ ID NO: 97895 - RNA, 32 nt, Homo Sapiens
cuugaacauauuuggaucuaaaucucacaaac

SEQ ID NO: 97896 - RNA, 32 nt, Homo Sapiens
uccauccccaaguugaaacugacacggccugu

SEQ ID NO: 97897 - RNA, 32 nt, Homo Sapiens
gcugggcagcagccuuccugccauucugcaga

SEQ ID NO: 97898 - RNA, 32 nt, Homo Sapiens
ucuugccuccauccaccccccauccccccggu

SEQ ID NO: 97899 - RNA, 32 nt, Homo Sapiens
uuuccugaaugaugaaguuuggaauuugucaa

SEQ ID NO: 97900 - RNA, 32 nt, Homo Sapiens
auuuuagauuguguccuuuuaauauuguuuuc

SEQ ID NO: 97901 - RNA, 32 nt, Homo Sapiens
gcuauggaauaauuuuuaauuuuugucucuaa

SEQ ID NO: 97902 - RNA, 32 nt, Homo Sapiens
ucgggguuguagaguaauauguaaccagacug

SEQ ID NO: 97903 - RNA, 32 nt, Homo Sapiens
uaccacaagggucccccuccccauccuacaca

SEQ ID NO: 97904 - RNA, 32 nt, Homo Sapiens
aacuuucugagaauuuaaaaagccaccacugu

SEQ ID NO: 97905 - RNA, 32 nt, Homo Sapiens
cuacuguaccagcugagcugccuucuuuuacu

SEQ ID NO: 97906 - RNA, 32 nt, Homo Sapiens
gucacuggcgauguccuaggggugcugcauuu

SEQ ID NO: 97907 - RNA, 32 nt, Homo Sapiens
caaaugugcccugcucucuccccucuuaaaaa

SEQ ID NO: 97908 - RNA, 32 nt, Homo Sapiens
gugauggggugggcggugucagaagcagccac

SEQ ID NO: 97909 - RNA, 32 nt, Homo Sapiens
acugucgcugucuauggccccaacucaugcuc

SEQ ID NO: 97910 - RNA, 32 nt, Homo Sapiens
gucgagcucaccggcuacccaggccacagcca

SEQ ID NO: 97911 - RNA, 32 nt, Homo Sapiens
cagagcacccucugguugugggcuuggaccac

SEQ ID NO: 97912 - RNA, 32 nt, Homo Sapiens
gaacucaguauuuggaaauaauuucagcuuaa

SEQ ID NO: 97913 - RNA, 32 nt, Homo Sapiens
gaaaauauguuaagagcaggcucuccaaucac

SEQ ID NO: 97914 - RNA, 32 nt, Homo Sapiens
uccgcagcuagggcugccuaccccgcugggug

SEQ ID NO: 97915 - RNA, 32 nt, Homo Sapiens
acugugcugugaccgcugccccaaaguguucc

SEQ ID NO: 97916 - RNA, 32 nt, Homo Sapiens
ugacuccuuggccacucacucuggcuauccuu

SEQ ID NO: 97917 - RNA, 32 nt, Homo Sapiens
gccaggugucccucuccuccccuggggcacag

SEQ ID NO: 97918 - RNA, 31 nt, Homo Sapiens
acucagacacccucacaaacacaguagucua

SEQ ID NO: 97919 - RNA, 32 nt, Homo Sapiens
cacuuuggccuuccuuuccccagcgccccuga

SEQ ID NO: 97920 - RNA, 32 nt, Homo Sapiens
uuugcucuuuuggagcugaagaauuguuugau

SEQ ID NO: 97921 - RNA, 32 nt, Homo Sapiens
cugccacccucccacaccagacuaucagcagc

SEQ ID NO: 97922 - RNA, 32 nt, Homo Sapiens
acaauguccauacaugggugaacucuugaauc

SEQ ID NO: 97923 - RNA, 32 nt, Homo Sapiens
augaaacaccaaagucuguuuccccguccgca

SEQ ID NO: 97924 - RNA, 32 nt, Homo Sapiens
cacccgcagcuccggcgccgcggcgagacgga

SEQ ID NO: 97925 - RNA, 32 nt, Homo Sapiens
agguauacuuggauuggccgagaccuggccug

SEQ ID NO: 97926 - RNA, 32 nt, Homo Sapiens
ggccgcggcagagcucccugccaccggcccug

SEQ ID NO: 97927 - RNA, 30 nt, Homo Sapiens
gagcaggauggcggcggcggcggcugcagg

SEQ ID NO: 97928 - RNA, 32 nt, Homo Sapiens
cacaaaucagccaggugaaguuucacacaauc

SEQ ID NO: 97929 - RNA, 32 nt, Homo Sapiens
ggcgugauuguuuugaguacaaaccuuaaauc

SEQ ID NO: 97930 - RNA, 32 nt, Homo Sapiens
uugugggcaaagggcugcuuuagcacuuuucu

SEQ ID NO: 97931 - RNA, 32 nt, Homo Sapiens
uauauaauuauguauuugauuauaauuacuga

SEQ ID NO: 97932 - RNA, 32 nt, Homo Sapiens
ugugguaggaaaggaaaacaugcaaaacauac

SEQ ID NO: 97933 - RNA, 31 nt, Homo Sapiens
cggcugugagaugagcccagagccuuccuga

SEQ ID NO: 97934 - RNA, 30 nt, Homo Sapiens
caaucgugcaggggacacgcagcagaccca

SEQ ID NO: 97935 - RNA, 30 nt, Homo Sapiens
cgaagggagaagcuuuguuuugccugcaga

SEQ ID NO: 97936 - RNA, 32 nt, Homo Sapiens
accaggcucagguggcguuccaggagccaaua

SEQ ID NO: 97937 - RNA, 32 nt, Homo Sapiens
cuucccuucuauuuaaaaauagccacaaaaua

SEQ ID NO: 97938 - RNA, 32 nt, Homo Sapiens
aacuuuuuaaguggucauugaugacaucccac

SEQ ID NO: 97939 - RNA, 32 nt, Homo Sapiens
ggcagcugcgcccggcuccuccccucccaggc

SEQ ID NO: 97940 - RNA, 28 nt, Homo Sapiens
acaguaguuacagugcaccaggcacucu

SEQ ID NO: 97941 - RNA, 32 nt, Homo Sapiens
gggcuuuucuuuccgucauguuuuccuuuucg

SEQ ID NO: 97942 - RNA, 32 nt, Homo Sapiens
cuucaaggucaagacccaggacauauucagca

SEQ ID NO: 97943 - RNA, 32 nt, Homo Sapiens
auaucuuuauuacaaacugaaagagagaagau

SEQ ID NO: 97944 - RNA, 32 nt, Homo Sapiens
uauagauuauuuuuuagcuauuuuuuccaugu

SEQ ID NO: 97945 - RNA, 32 nt, Homo Sapiens
gcccaggccuccguggccuccuccugugugag

SEQ ID NO: 97946 - RNA, 32 nt, Homo Sapiens
cacgucggggucaaacaaaacauuguuuuccc

SEQ ID NO: 97947 - RNA, 32 nt, Homo Sapiens
uuagugauuacuuugaguuugcugggggaagc

SEQ ID NO: 97948 - RNA, 32 nt, Homo Sapiens
ucgagaccagccugaccaacguggugaaaccc

SEQ ID NO: 97949 - RNA, 32 nt, Homo Sapiens
uaaauacuuggcgccuccagcugcuggccaag

SEQ ID NO: 97950 - RNA, 32 nt, Homo Sapiens
aucauauuuucccauccaauuguuugguuuca

SEQ ID NO: 97951 - RNA, 32 nt, Homo Sapiens
accuagugggucuuggggaccuucgaaaucgc

SEQ ID NO: 97952 - RNA, 32 nt, Homo Sapiens
auggaaaguauuuuuaacuaaucuguuauuaa

SEQ ID NO: 97953 - RNA, 32 nt, Homo Sapiens
gaggcaggggccgggcucuccuccaccgcucc

SEQ ID NO: 97954 - RNA, 30 nt, Homo Sapiens
cgaucgcacugucgcgcagaagcuccucaa

SEQ ID NO: 97955 - RNA, 32 nt, Homo Sapiens
gccugagguaugggguaugugcauguggaggc

SEQ ID NO: 97956 - RNA, 32 nt, Homo Sapiens
ucuccaccucccguccuccccaucauugguuu

SEQ ID NO: 97957 - RNA, 32 nt, Homo Sapiens
gaagaauguuagaguaaugaaauggaggaucu

SEQ ID NO: 97958 - RNA, 32 nt, Homo Sapiens
aaugaauaaguauggcuguauuccaauaaagu

SEQ ID NO: 97959 - RNA, 32 nt, Homo Sapiens
cuugagucaggaguuugagagcagccugagca

SEQ ID NO: 97960 - RNA, 32 nt, Homo Sapiens
aggggugugggaagaccaaaggaaggaacgcu

SEQ ID NO: 97961 - RNA, 32 nt, Homo Sapiens
ggagggcugugauuuuuccaguauuaaacaug

SEQ ID NO: 97962 - RNA, 32 nt, Homo Sapiens
uacuaauacaggcaggaagauacaucuugaug

SEQ ID NO: 97963 - RNA, 32 nt, Homo Sapiens
gcaccuuuaccccucaaucuccugcuuccucc

SEQ ID NO: 97964 - RNA, 32 nt, Homo Sapiens
cuauaaaugacaaagacuauguuuuuaaaaag

SEQ ID NO: 97965 - RNA, 32 nt, Homo Sapiens
gucucucugggucuuagucccacuuagcaccc

SEQ ID NO: 97966 - RNA, 32 nt, Homo Sapiens
agagaagaaaaaauacuguaauacuaagaaac

SEQ ID NO: 97967 - RNA, 32 nt, Homo Sapiens
gcauucggguagccgaagaagucccaggauug

SEQ ID NO: 97968 - RNA, 32 nt, Homo Sapiens
ucugagaccaccuccgccuggaccuuauuguc

SEQ ID NO: 97969 - RNA, 32 nt, Homo Sapiens
aaguucuucaguuuuuaagugaggauaucgug

SEQ ID NO: 97970 - RNA, 32 nt, Homo Sapiens
uccugcagaccgcgcccgaucccggcgacagg

SEQ ID NO: 97971 - RNA, 32 nt, Homo Sapiens
ugggccagacugccuugcuuucuggugcuggg

SEQ ID NO: 97972 - RNA, 32 nt, Homo Sapiens
cgccccgcgcgccgcuugcuccacacucuggg

SEQ ID NO: 97973 - RNA, 32 nt, Homo Sapiens
cagacaccccacgaugaguccgaccgccggac

SEQ ID NO: 97974 - RNA, 32 nt, Homo Sapiens
gucaguguuuauaugaauaugacuuucauuuc

SEQ ID NO: 97975 - RNA, 32 nt, Homo Sapiens
aggggcgauggauggauucaccgcagcggcga

SEQ ID NO: 97976 - RNA, 32 nt, Homo Sapiens
aauuagcaaacaaaagugacuugcucaggguc

SEQ ID NO: 97977 - RNA, 32 nt, Homo Sapiens
cuccucgugucugcuguuuuuuucccuuggug

SEQ ID NO: 97978 - RNA, 32 nt, Homo Sapiens
uuguagggaaagggagagcuuuugauuuuugu

SEQ ID NO: 97979 - RNA, 32 nt, Homo Sapiens
cgagcgcggguggccgcgguguccgugggcca

SEQ ID NO: 97980 - RNA, 32 nt, Homo Sapiens
ggcccccgcucccgaacccccggcgaccaccc

SEQ ID NO: 97981 - RNA, 32 nt, Homo Sapiens
gucacauacgauugagcaucuccaucuggucg

SEQ ID NO: 97982 - RNA, 32 nt, Homo Sapiens
cugagcguggucguugugaagaacggucuguc

SEQ ID NO: 97983 - RNA, 32 nt, Homo Sapiens
cugcccucgcggcuaccacuaccccauuaguu

SEQ ID NO: 97984 - RNA, 32 nt, Homo Sapiens
ugguuugcaauaaaaccuugaaaaauauuuac

SEQ ID NO: 97985 - RNA, 32 nt, Homo Sapiens
cgagggugaaacaaaauccaacccugucagaa

SEQ ID NO: 97986 - RNA, 32 nt, Homo Sapiens
aaggagaggaguguggaggccgaggagagguu

SEQ ID NO: 97987 - RNA, 32 nt, Homo Sapiens
acaacugauaaaaccuuaugauucuuuucucc

SEQ ID NO: 97988 - RNA, 32 nt, Homo Sapiens
auuucagggcuuugcaugcgcucuauuccccc

SEQ ID NO: 97989 - RNA, 32 nt, Homo Sapiens
ucggcuguuucccccaccagaccccagggaag

SEQ ID NO: 97990 - RNA, 32 nt, Homo Sapiens
uccaggacaaagacgagagcgaguaccgccac

SEQ ID NO: 97991 - RNA, 32 nt, Homo Sapiens
aauuucuuuagaauuucucaaucuucaaggcu

SEQ ID NO: 97992 - RNA, 32 nt, Homo Sapiens
accucuacccggaacacacccucucacagacg

SEQ ID NO: 97993 - RNA, 32 nt, Homo Sapiens
cucaggaaauuuacaaucauggcggaagccaa

SEQ ID NO: 97994 - RNA, 32 nt, Homo Sapiens
cacagucuucccagcaauuauuacaauucuug

SEQ ID NO: 97995 - RNA, 32 nt, Homo Sapiens
gcggggcgagguacuggcugcagagucgccuu

SEQ ID NO: 97996 - RNA, 32 nt, Homo Sapiens
cuggggcugccugcaugccuccccugcaccug

SEQ ID NO: 97997 - RNA, 32 nt, Homo Sapiens
ucauucccaugucuaccuaagaaggaagcagu

SEQ ID NO: 97998 - RNA, 32 nt, Homo Sapiens
agguugguagcaaagaucuugucuagccaggg

SEQ ID NO: 97999 - RNA, 32 nt, Homo Sapiens
aaacacccugucagaacagucauuuucaguau

SEQ ID NO: 98000 - RNA, 31 nt, Homo Sapiens
ucccuaaaauaaaaaccagaaucauaauuuu

SEQ ID NO: 98001 - RNA, 32 nt, Homo Sapiens
gcggcgccaccauggcggugcgacaggcgcug

SEQ ID NO: 98002 - RNA, 30 nt, Homo Sapiens
cuaagugucuguguggcuguggagcucgag

SEQ ID NO: 98003 - RNA, 32 nt, Homo Sapiens
cacuuuacagauaucacccacacacaccucgc

SEQ ID NO: 98004 - RNA, 30 nt, Homo Sapiens
ugccccgucgcccggccgccggcuuagggc

SEQ ID NO: 98005 - RNA, 32 nt, Homo Sapiens
agcgucuccagcugccaggggcgaggcuagag

SEQ ID NO: 98006 - RNA, 32 nt, Homo Sapiens
cuugaguguugcauuuguuuugugggcauuuc

SEQ ID NO: 98007 - RNA, 32 nt, Homo Sapiens
uggcccgcggagcggucccgcggccgaguacc

SEQ ID NO: 98008 - RNA, 32 nt, Homo Sapiens
gggcuuagaaacaaaaacuggaugaaagagua

SEQ ID NO: 98009 - RNA, 32 nt, Homo Sapiens
uucacuuucuuaccucaaggcucugucuagcc

SEQ ID NO: 98010 - RNA, 29 nt, Homo Sapiens
uguuauaaaacugagugaaggcugcuaug

SEQ ID NO: 98011 - RNA, 32 nt, Homo Sapiens
agaggccucaguguggcugugcguggcccgug

SEQ ID NO: 98012 - RNA, 32 nt, Homo Sapiens
uacuccacugcucauauuuuuaucuaauucag

SEQ ID NO: 98013 - RNA, 32 nt, Homo Sapiens
gaguaccuaaaauggagagaagaaugaacuag

SEQ ID NO: 98014 - RNA, 32 nt, Homo Sapiens
cauuuauacuucagaaagauuguacaaauaca

SEQ ID NO: 98015 - RNA, 32 nt, Homo Sapiens
uguaugucagguuugcucacaaugagguauuc

SEQ ID NO: 98016 - RNA, 32 nt, Homo Sapiens
ugcucccugguucugaugaugugccugggugg

SEQ ID NO: 98017 - RNA, 32 nt, Homo Sapiens
uuaauuagcagacaagcagagauaugccuugu

SEQ ID NO: 98018 - RNA, 32 nt, Homo Sapiens
ugcagagggcacgggcgaggaccgccggccuc

SEQ ID NO: 98019 - RNA, 32 nt, Homo Sapiens
agaugacagagguaauaucaagaguguucaga

SEQ ID NO: 98020 - RNA, 32 nt, Homo Sapiens
agagaauguucugaguuauacuuuuuauuuuu

SEQ ID NO: 98021 - RNA, 32 nt, Homo Sapiens
ccaaauuuuacuacaagacucuuguccucauu

SEQ ID NO: 98022 - RNA, 32 nt, Homo Sapiens
uaaaaauucaaauuauuuuaaaaggcaaaauu

SEQ ID NO: 98023 - RNA, 32 nt, Homo Sapiens
ugcuggcgugacucccggcccgugccgcgccc

SEQ ID NO: 98024 - RNA, 32 nt, Homo Sapiens
uuuaaaaaauuccccccauguaauuauuguga

SEQ ID NO: 98025 - RNA, 32 nt, Homo Sapiens
cgccagcagguucccucuccccggccccagcu

SEQ ID NO: 98026 - RNA, 32 nt, Homo Sapiens
ugaaaccuguucuaccaauuauagaucaaaug

SEQ ID NO: 98027 - RNA, 32 nt, Homo Sapiens
cccaaauauauauuuaaucuugugguucaaau

SEQ ID NO: 98028 - RNA, 30 nt, Homo Sapiens
ccucuguuugaugcugcagaggaaacucag

SEQ ID NO: 98029 - RNA, 32 nt, Homo Sapiens
cgccgcccgcacacccaccucccgcacucccg

SEQ ID NO: 98030 - RNA, 30 nt, Homo Sapiens
ggauggcgcgcgcggggcccgcacguggag

SEQ ID NO: 98031 - RNA, 32 nt, Homo Sapiens
auuagcuguaugaauaugauuuaauuaacaag

SEQ ID NO: 98032 - RNA, 32 nt, Homo Sapiens
accaauuuuuauuugcagcuugaguuuuuaua

SEQ ID NO: 98033 - RNA, 32 nt, Homo Sapiens
cgagacgcgggccgugugucugcugggcuagu

SEQ ID NO: 98034 - RNA, 32 nt, Homo Sapiens
caguuaagggagagguagagaggggcccguga

SEQ ID NO: 98035 - RNA, 32 nt, Homo Sapiens
caguguugcuggagcuggccuggugucuccaa

SEQ ID NO: 98036 - RNA, 32 nt, Homo Sapiens
agcaauccucaaaguccgcauaaaaaccauua

SEQ ID NO: 98037 - RNA, 32 nt, Homo Sapiens
guuccuauuauguggugaaauuuuguaaauaa

SEQ ID NO: 98038 - RNA, 32 nt, Homo Sapiens
ggugacugcgcggcgggcuguggcugcggagg

SEQ ID NO: 98039 - RNA, 32 nt, Homo Sapiens
aguuauugauuugcuuucugucacuauggauu

SEQ ID NO: 98040 - RNA, 32 nt, Homo Sapiens
gacccugccaaagaugaggcuccagcugcccu

SEQ ID NO: 98041 - RNA, 32 nt, Homo Sapiens
caaaaugggucuagaaucuggcacuuuacuca

SEQ ID NO: 98042 - RNA, 32 nt, Homo Sapiens
uaaaacacccucacagaaacaccuagaauaau

SEQ ID NO: 98043 - RNA, 32 nt, Homo Sapiens
ucaauugauuuuacuuaauucuugugagguuc

SEQ ID NO: 98044 - RNA, 32 nt, Homo Sapiens
uaugccugcacugcagcccagccccggacagc

SEQ ID NO: 98045 - RNA, 32 nt, Homo Sapiens
cuccuaaugucaaauaugaaguagacagucgu

SEQ ID NO: 98046 - RNA, 32 nt, Homo Sapiens
cgugcuucaaauauccauauuaaccacuauuu

SEQ ID NO: 98047 - RNA, 32 nt, Homo Sapiens
gccauggaagcagagcucaaaggacugaagag

SEQ ID NO: 98048 - RNA, 32 nt, Homo Sapiens
gccccgcgguccccggccuucccacggacgcc

SEQ ID NO: 98049 - RNA, 32 nt, Homo Sapiens
gugagguaggggugggggugcuguaggcucuu

SEQ ID NO: 98050 - RNA, 32 nt, Homo Sapiens
aaguuuaaaaauuucugccuccuaaguuuaug

SEQ ID NO: 98051 - RNA, 32 nt, Homo Sapiens
cugugcauuguuaacucuuucauuucuguagu

SEQ ID NO: 98052 - RNA, 30 nt, Homo Sapiens
ccccaccagcucccggcuucucgaacgcuc

SEQ ID NO: 98053 - RNA, 32 nt, Homo Sapiens
gaccagccaccaaaccacgaaaagugacuuuc

SEQ ID NO: 98054 - RNA, 32 nt, Homo Sapiens
ucacgggcuacgccagcuucugcugcaaccac

SEQ ID NO: 98055 - RNA, 32 nt, Homo Sapiens
auuagaugagagaacagggcugaagcuguguc

SEQ ID NO: 98056 - RNA, 32 nt, Homo Sapiens
ccuaauagaaauauuucuucccuacucuuucc

SEQ ID NO: 98057 - RNA, 32 nt, Homo Sapiens
ugggugaugaaauuauaagugauuuuaaacuu

SEQ ID NO: 98058 - RNA, 32 nt, Homo Sapiens
ucagacacagugguuauaugauuuugugucca

SEQ ID NO: 98059 - RNA, 32 nt, Homo Sapiens
uuuguaugucuuuuuuuuuuuaagcaaucgug

SEQ ID NO: 98060 - RNA, 32 nt, Homo Sapiens
ccagagauggccccuccucaccugggacggaa

SEQ ID NO: 98061 - RNA, 32 nt, Homo Sapiens
guggggucggagcuugggggcagguccuggga

SEQ ID NO: 98062 - RNA, 32 nt, Homo Sapiens
cuguauuuuuuacuuuuucuguuacaguuuug

SEQ ID NO: 98063 - RNA, 32 nt, Homo Sapiens
gaaaauauuucuacagcaucauguaaagcaug

SEQ ID NO: 98064 - RNA, 32 nt, Homo Sapiens
gccugagcggcuucccagcgaagguuuuugaa

SEQ ID NO: 98065 - RNA, 32 nt, Homo Sapiens
ccuggccgacagagcaagauucugucucaaaa

SEQ ID NO: 98066 - RNA, 31 nt, Homo Sapiens
aggggcggggcccagaacgaagcggggaggc

SEQ ID NO: 98067 - RNA, 32 nt, Homo Sapiens
ggucucucuguuccucacacucagcuucagca

SEQ ID NO: 98068 - RNA, 32 nt, Homo Sapiens
ucucaacuuuagcuuccaacccuucuguugag

SEQ ID NO: 98069 - RNA, 32 nt, Homo Sapiens
cucaguuugccagagaaaaauuucuaggaccc

SEQ ID NO: 98070 - RNA, 32 nt, Homo Sapiens
caguugugucaacaccaauuauuaaauaaaca

SEQ ID NO: 98071 - RNA, 32 nt, Homo Sapiens
uccaauagacgaagugcacacaacacaauaug

SEQ ID NO: 98072 - RNA, 32 nt, Homo Sapiens
gacuauguggaacacagaagcuguugcuuaga

SEQ ID NO: 98073 - RNA, 32 nt, Homo Sapiens
cccggaauaaaggugauugauuguauugcaaa

SEQ ID NO: 98074 - RNA, 32 nt, Homo Sapiens
cucuccugccacccaguggugugcuagagcca

SEQ ID NO: 98075 - RNA, 32 nt, Homo Sapiens
gugucuugggcacccuuucuugacuuccaaag

SEQ ID NO: 98076 - RNA, 32 nt, Homo Sapiens
cccagucucccucccccucgcgccugggcagc

SEQ ID NO: 98077 - RNA, 31 nt, Homo Sapiens
agugaaauaaauuguauuuaggaagugucag

SEQ ID NO: 98078 - RNA, 32 nt, Homo Sapiens
gcacgagguaguggcgggaggcugugagcuga

SEQ ID NO: 98079 - RNA, 32 nt, Homo Sapiens
ccuacucuuccgggcagcccacuuccgcggcc

SEQ ID NO: 98080 - RNA, 32 nt, Homo Sapiens
aaaugaaaaacaaaaauucagaaauaguguuc

SEQ ID NO: 98081 - RNA, 32 nt, Homo Sapiens
gcaacggcgagggcgccggcggggcauacgag

SEQ ID NO: 98082 - RNA, 32 nt, Homo Sapiens
cacggcagccacugcuugggguagcgggaggg

SEQ ID NO: 98083 - RNA, 32 nt, Homo Sapiens
agcgggcgggcuucagcgaggcgggagggcgg

SEQ ID NO: 98084 - RNA, 31 nt, Homo Sapiens
uaaucccauacucucaauugaguuaaaucag

SEQ ID NO: 98085 - RNA, 32 nt, Homo Sapiens
ucacaccaaaaugugacaguucuuucauguuu

SEQ ID NO: 98086 - RNA, 32 nt, Homo Sapiens
gacgugggaguagcaguggcugagagaguccu

SEQ ID NO: 98087 - RNA, 32 nt, Homo Sapiens
ugucucagcucuucgaagguuugccuugucag

SEQ ID NO: 98088 - RNA, 32 nt, Homo Sapiens
agcauuuugugauguuuggacacacuggagaa

SEQ ID NO: 98089 - RNA, 32 nt, Homo Sapiens
uccacaucagaugccauaaauaugaacugcag

SEQ ID NO: 98090 - RNA, 32 nt, Homo Sapiens
ggucagucucaaccaaacaaguuggcuagaaa

SEQ ID NO: 98091 - RNA, 32 nt, Homo Sapiens
gggcaaaggagccccaggcccugucuccccag

SEQ ID NO: 98092 - RNA, 32 nt, Homo Sapiens
uguuguuuacuucuuauacuggauuguaagcu

SEQ ID NO: 98093 - RNA, 32 nt, Homo Sapiens
uacuuuuguucuauagccugugaaauggcuag

SEQ ID NO: 98094 - RNA, 32 nt, Homo Sapiens
ucccacugaggguggggcagcuguggggagcu

SEQ ID NO: 98095 - RNA, 32 nt, Homo Sapiens
ucucaggagacggggccccugccugccacacc

SEQ ID NO: 98096 - RNA, 32 nt, Homo Sapiens
cugggauccagaagaaaaugucuuuaaucugu

SEQ ID NO: 98097 - RNA, 32 nt, Homo Sapiens
cucuuuauggucuccuaggagcauaacuugga

SEQ ID NO: 98098 - RNA, 32 nt, Homo Sapiens
cuugucuugaucuuuuucauaguguucaaauc

SEQ ID NO: 98099 - RNA, 32 nt, Homo Sapiens
gacaagaagagauaaugucuucaguuuuaaaa

SEQ ID NO: 98100 - RNA, 32 nt, Homo Sapiens
acucacuauuccaccuauguccugcaugaaag

SEQ ID NO: 98101 - RNA, 32 nt, Homo Sapiens
ggaggacccugagggcaaccacaccuugccau

SEQ ID NO: 98102 - RNA, 32 nt, Homo Sapiens
agcagagauugugccacugcacuccagccaga

SEQ ID NO: 98103 - RNA, 32 nt, Homo Sapiens
uccuggggacacacucaccauaaacacauccc

SEQ ID NO: 98104 - RNA, 32 nt, Homo Sapiens
aguguuggaaacggccuugaaauauuuaaaac

SEQ ID NO: 98105 - RNA, 32 nt, Homo Sapiens
uaauugccuauaaauaaacaaacaaaugaacu

SEQ ID NO: 98106 - RNA, 28 nt, Homo Sapiens
gaugaaguuacaggauauagacacaaac

SEQ ID NO: 98107 - RNA, 32 nt, Homo Sapiens
uugcaccuugcaccuucgcagcgcccugcacc

SEQ ID NO: 98108 - RNA, 32 nt, Homo Sapiens
ccuaagaauaaucaauguuccugaggaagaag

SEQ ID NO: 98109 - RNA, 32 nt, Homo Sapiens
ccuccuagugguucuccaccccguuguggcuu

SEQ ID NO: 98110 - RNA, 32 nt, Homo Sapiens
auauaaacaaugaagagucaugcugaagauaa

SEQ ID NO: 98111 - RNA, 32 nt, Homo Sapiens
agcagcaauggcggcgggcggcggcgguagcu

SEQ ID NO: 98112 - RNA, 32 nt, Homo Sapiens
gacgugcuaccccucccggucccggcccuggc

SEQ ID NO: 98113 - RNA, 32 nt, Homo Sapiens
uacaggcauaaaauagaguaaauacagguagu

SEQ ID NO: 98114 - RNA, 32 nt, Homo Sapiens
gaacuaggaagaugggcacagaugaacaaaca

SEQ ID NO: 98115 - RNA, 32 nt, Homo Sapiens
gagccggagcugcgaggcgcggcgcagagcug

SEQ ID NO: 98116 - RNA, 30 nt, Homo Sapiens
cacugggcgcccgccagccgcggcgcagac

SEQ ID NO: 98117 - RNA, 32 nt, Homo Sapiens
cggcugccuuggaguuuucauaagaaauuguc

SEQ ID NO: 98118 - RNA, 32 nt, Homo Sapiens
gauaaaggcauugcuuaacuucuuauauaauu

SEQ ID NO: 98119 - RNA, 32 nt, Homo Sapiens
cacccagcgccgucagcgcccggcacugccac

SEQ ID NO: 98120 - RNA, 32 nt, Homo Sapiens
cuccggggcacgcucggggccugcgcucagag

SEQ ID NO: 98121 - RNA, 32 nt, Homo Sapiens
gccccagagcgcucgcucuccuccccuuccuu

SEQ ID NO: 98122 - RNA, 32 nt, Homo Sapiens
ucugaagagcuuccgcgccuucccccuggucu

SEQ ID NO: 98123 - RNA, 32 nt, Homo Sapiens
gcccgaggggagaggagaguuuggggcaggga

SEQ ID NO: 98124 - RNA, 32 nt, Homo Sapiens
ggagaggugggggagggaaagugggccagugg

SEQ ID NO: 98125 - RNA, 32 nt, Homo Sapiens
ccccugccucccccggccccagcccgugccuc

SEQ ID NO: 98126 - RNA, 32 nt, Homo Sapiens
cgggcggcccagguccucuacugugaaggagc

SEQ ID NO: 98127 - RNA, 32 nt, Homo Sapiens
gauuccggagaaucgcgaggcagagcgggagc

SEQ ID NO: 98128 - RNA, 32 nt, Homo Sapiens
accugccuaguagggccuuuggcauuuggggg

SEQ ID NO: 98129 - RNA, 32 nt, Homo Sapiens
ugaguucguuugucuucagucaacagcggcug

SEQ ID NO: 98130 - RNA, 32 nt, Homo Sapiens
agccgccugcguugagcgcccacggugggcug

SEQ ID NO: 98131 - RNA, 32 nt, Homo Sapiens
gucacccucagccggcgccgggcacccuggac

SEQ ID NO: 98132 - RNA, 32 nt, Homo Sapiens
uguagguccucagaaaguguauaauaagaaac

SEQ ID NO: 98133 - RNA, 32 nt, Homo Sapiens
cuucugcugcccgcccugccccggccgcaucg

SEQ ID NO: 98134 - RNA, 27 nt, Homo Sapiens
uauccuaccaaauacugguauaaugua

SEQ ID NO: 98135 - RNA, 32 nt, Homo Sapiens
aaacccuauuuucagcuacuauuugaauauuc

SEQ ID NO: 98136 - RNA, 32 nt, Homo Sapiens
ugggagcucagugacauaaaugcugaagagac

SEQ ID NO: 98137 - RNA, 32 nt, Homo Sapiens
caggcccguggcgccggcucaugugucugcug

SEQ ID NO: 98138 - RNA, 32 nt, Homo Sapiens
gccgagagugugcgccagcccgcggcccagcc

SEQ ID NO: 98139 - RNA, 32 nt, Homo Sapiens
ggaggggcgcgguggcucaggccgggcguagu

SEQ ID NO: 98140 - RNA, 32 nt, Homo Sapiens
ugagauacagcuauuuaauauuucugggagau

SEQ ID NO: 98141 - RNA, 32 nt, Homo Sapiens
gucuccagcagacaaucagauguuguuggaug

SEQ ID NO: 98142 - RNA, 32 nt, Homo Sapiens
gaucuacucacuggagcagcugcugcaggaag

SEQ ID NO: 98143 - RNA, 32 nt, Homo Sapiens
ggagggagaggcugaauguuggcucgguaauu

SEQ ID NO: 98144 - RNA, 32 nt, Homo Sapiens
uucuugcgcccgcaggggcaugacucagguga

SEQ ID NO: 98145 - RNA, 32 nt, Homo Sapiens
cuuuuagagaauaagaaaugaauuauuguacc

SEQ ID NO: 98146 - RNA, 32 nt, Homo Sapiens
cuggacuguaaaauauauguaugaaauaaaau

SEQ ID NO: 98147 - RNA, 32 nt, Homo Sapiens
ugacacccccacauucucuccucuggaccccc

SEQ ID NO: 98148 - RNA, 32 nt, Homo Sapiens
gggcggcgccuggcguuucgaggcugagcggc

SEQ ID NO: 98149 - RNA, 32 nt, Homo Sapiens
gcagagcagaaagaaaacagaugauggaauua

SEQ ID NO: 98150 - RNA, 32 nt, Homo Sapiens
gcaagggcugagaggagaggcuugggccucag

SEQ ID NO: 98151 - RNA, 32 nt, Homo Sapiens
ugucuuugccuucugcuguagguccagcaccu

SEQ ID NO: 98152 - RNA, 32 nt, Homo Sapiens
gggacucccagccccagagcuccgaggcggag

SEQ ID NO: 98153 - RNA, 32 nt, Homo Sapiens
ucccuuuuauuuccaaaauaaaaugaaaaauc

SEQ ID NO: 98154 - RNA, 32 nt, Homo Sapiens
uugugacagggcggggguggcggcggccccua

SEQ ID NO: 98155 - RNA, 32 nt, Homo Sapiens
uugaggugaggguggggugccccagcuaggaa

SEQ ID NO: 98156 - RNA, 32 nt, Homo Sapiens
gccuugagucccguuuaacagcagauccagaa

SEQ ID NO: 98157 - RNA, 32 nt, Homo Sapiens
auuguaaauuuaugcaaaaacuaaccgggccu

SEQ ID NO: 98158 - RNA, 32 nt, Homo Sapiens
agacgggcgggggcuccuugcggccggcuagc

SEQ ID NO: 98159 - RNA, 32 nt, Homo Sapiens
gaguauauuuaauuguuagaaaacaguuccuc

SEQ ID NO: 98160 - RNA, 32 nt, Homo Sapiens
gagguaggagcuggagaugaagagacugcuag

SEQ ID NO: 98161 - RNA, 32 nt, Homo Sapiens
acacuguaauuucccuuuaggagacgugaugu

SEQ ID NO: 98162 - RNA, 32 nt, Homo Sapiens
uuagaagagucaacucuuaagauuaucauuag

SEQ ID NO: 98163 - RNA, 32 nt, Homo Sapiens
caguuuccagggggcucugcuccaaguucccu

SEQ ID NO: 98164 - RNA, 32 nt, Homo Sapiens
cuccgccucgcccuuccagccgcacgugccuu

SEQ ID NO: 98165 - RNA, 32 nt, Homo Sapiens
caauucucauugaauaugaggaagugggagac

SEQ ID NO: 98166 - RNA, 32 nt, Homo Sapiens
caggcggggcacccucggaggggaggguucgg

SEQ ID NO: 98167 - RNA, 32 nt, Homo Sapiens
ggucucaaacuccaccaaauguacuucuuauu

SEQ ID NO: 98168 - RNA, 32 nt, Homo Sapiens
uuuauaugacuuuaauauccacagugguaaug

SEQ ID NO: 98169 - RNA, 32 nt, Homo Sapiens
ucucauaacagaagugcagacucauugcuaga

SEQ ID NO: 98170 - RNA, 32 nt, Homo Sapiens
ggaagaaaaggugacuuguuauagaagauuaa

SEQ ID NO: 98171 - RNA, 32 nt, Homo Sapiens
uuauucuguauauuaaaauuuaucuuuuaagg

SEQ ID NO: 98172 - RNA, 32 nt, Homo Sapiens
gcaaguggagaauggggacuguaguggauuga

SEQ ID NO: 98173 - RNA, 32 nt, Homo Sapiens
ggccccuccccggcugcuggcagaaugguggc

SEQ ID NO: 98174 - RNA, 32 nt, Homo Sapiens
guggagguggggauagaacaucuuucacacug

SEQ ID NO: 98175 - RNA, 32 nt, Homo Sapiens
uuuggaaccuaugaacacuuugaggcugccac

SEQ ID NO: 98176 - RNA, 32 nt, Homo Sapiens
cacuguuaucuaaacgcaagugaagccgaguc

SEQ ID NO: 98177 - RNA, 28 nt, Homo Sapiens
ggaaacaugguuuggauuauaaaauucu

SEQ ID NO: 98178 - RNA, 32 nt, Homo Sapiens
cucucccucuggcaugcaugcugcugguagga

SEQ ID NO: 98179 - RNA, 32 nt, Homo Sapiens
caaagccagccccuccucccaccuauucugag

SEQ ID NO: 98180 - RNA, 30 nt, Homo Sapiens
cugauugacugugcuggcucaacuucacca

SEQ ID NO: 98181 - RNA, 30 nt, Homo Sapiens
cuggaucuggacuguuucuuccuguugcug

SEQ ID NO: 98182 - RNA, 32 nt, Homo Sapiens
gccggcuccguccugggaccaacccugcgugc

SEQ ID NO: 98183 - RNA, 32 nt, Homo Sapiens
uuagaaccgggaccgcggcggcaccgauuggc

SEQ ID NO: 98184 - RNA, 32 nt, Homo Sapiens
gggacuggcagggcugaagugugcgggacagc

SEQ ID NO: 98185 - RNA, 32 nt, Homo Sapiens
acaaacuccuaacugcaucacuguaagaucua

SEQ ID NO: 98186 - RNA, 32 nt, Homo Sapiens
aagcucagaaaguuauauucaucccucuuagc

SEQ ID NO: 98187 - RNA, 32 nt, Homo Sapiens
gauauuuuuuucuguguagauuuaaauaauuu

SEQ ID NO: 98188 - RNA, 32 nt, Homo Sapiens
acguuguauuuauguuucauuuuauaguuuuu

SEQ ID NO: 98189 - RNA, 32 nt, Homo Sapiens
ccuuggcuuguccuuccuucccgggaaggaag

SEQ ID NO: 98190 - RNA, 32 nt, Homo Sapiens
caaaggcaucucaggaacaucaccuuagugag

SEQ ID NO: 98191 - RNA, 32 nt, Homo Sapiens
gcaguggguagaggagugcaggcacccugacc

SEQ ID NO: 98192 - RNA, 32 nt, Homo Sapiens
cagagccagugaaucaccggaccuccagcacc

SEQ ID NO: 98193 - RNA, 32 nt, Homo Sapiens
augcugagacacuguggccggaccugacaguc

SEQ ID NO: 98194 - RNA, 32 nt, Homo Sapiens
aaucugauaauuaaugguuuguggaauccauu

SEQ ID NO: 98195 - RNA, 32 nt, Homo Sapiens
ggcgccucaggcagcucugcgugggccggggu

SEQ ID NO: 98196 - RNA, 32 nt, Homo Sapiens
gcuacaccauguccagcuccuacgaugaggcc

SEQ ID NO: 98197 - RNA, 32 nt, Homo Sapiens
gaccuggugggaagauuggaucaugggggagu

SEQ ID NO: 98198 - RNA, 32 nt, Homo Sapiens
gcagcagaguggccgcggcagcuccuccagag

SEQ ID NO: 98199 - RNA, 32 nt, Homo Sapiens
gaauuccgggcccggauagccggcggcggcgg

SEQ ID NO: 98200 - RNA, 32 nt, Homo Sapiens
ucugccagugauuuagcuaugccaacugguug

SEQ ID NO: 98201 - RNA, 32 nt, Homo Sapiens
ggggacacauucaaaccacaggagaaacucaa

SEQ ID NO: 98202 - RNA, 32 nt, Homo Sapiens
uaauuaaaagugugggcugggcgugggggcuc

SEQ ID NO: 98203 - RNA, 32 nt, Homo Sapiens
guccucacucgccccuggcccagaggcuccug

SEQ ID NO: 98204 - RNA, 32 nt, Homo Sapiens
auacacagggauuguuuacuagguuaaugaca

SEQ ID NO: 98205 - RNA, 32 nt, Homo Sapiens
auaguuuugccauuuuaacauuucuguauuug

SEQ ID NO: 98206 - RNA, 32 nt, Homo Sapiens
uaguagcagacacagggcuccccugcccuacu

SEQ ID NO: 98207 - RNA, 32 nt, Homo Sapiens
ccgcaggagucgggcuucggucgcaccagaga

SEQ ID NO: 98208 - RNA, 32 nt, Homo Sapiens
uacaaaaggguugaacgucaggcuaaaaaagc

SEQ ID NO: 98209 - RNA, 32 nt, Homo Sapiens
uaaguuuuuuaaaaccacgaugcugcaauuuu

SEQ ID NO: 98210 - RNA, 32 nt, Homo Sapiens
ggacaccagaaagccacgugggucccuggcgc

SEQ ID NO: 98211 - RNA, 32 nt, Homo Sapiens
cucucccaaggagaggacacagacacaguugu

SEQ ID NO: 98212 - RNA, 32 nt, Homo Sapiens
agcggggccggggucaggagcggcccccuccc

SEQ ID NO: 98213 - RNA, 32 nt, Homo Sapiens
ucugcgcagcgugguggccgccgccccccgac

SEQ ID NO: 98214 - RNA, 32 nt, Homo Sapiens
ucuugcucuuuugccaggcuagagugguguug

SEQ ID NO: 98215 - RNA, 32 nt, Homo Sapiens
gccagugaaguaggaagaaaguauuucaagga

SEQ ID NO: 98216 - RNA, 32 nt, Homo Sapiens
ucaagggucuuuaugagaagggcagaaagaug

SEQ ID NO: 98217 - RNA, 32 nt, Homo Sapiens
accaaaaagcuaguuuugucuaccucaguucu

SEQ ID NO: 98218 - RNA, 32 nt, Homo Sapiens
gaaaagagaaaaucgauaaaacccaaaacugg

SEQ ID NO: 98219 - RNA, 32 nt, Homo Sapiens
uucacaaacaacacauaaagauccagacauua

SEQ ID NO: 98220 - RNA, 32 nt, Homo Sapiens
auuuuaaagucaguguugaauuuuauugaaag

SEQ ID NO: 98221 - RNA, 30 nt, Homo Sapiens
ggccaugucugugagcgggaccucaucuug

SEQ ID NO: 98222 - RNA, 32 nt, Homo Sapiens
ucuuucuuucuuucuuuuuuuuuaaauuuugu

SEQ ID NO: 98223 - RNA, 32 nt, Homo Sapiens
cugucugugugucaccucuccuccuucagcca

SEQ ID NO: 98224 - RNA, 32 nt, Homo Sapiens
ugacuuacaugaugaggcuuucuggggaagaa

SEQ ID NO: 98225 - RNA, 32 nt, Homo Sapiens
cauaguuauuuuggucuguuaaguaaguugca

SEQ ID NO: 98226 - RNA, 32 nt, Homo Sapiens
gggccagugucugcugcgaucgagucccaccu

SEQ ID NO: 98227 - RNA, 32 nt, Homo Sapiens
aagcaaguaucuggaucuuuuaccagcuaaau

SEQ ID NO: 98228 - RNA, 32 nt, Homo Sapiens
ccucaauguaauuauuaaaaauucucaaguca

SEQ ID NO: 98229 - RNA, 32 nt, Homo Sapiens
gaguguaugcagacggcgcccggcccgaaccc

SEQ ID NO: 98230 - RNA, 32 nt, Homo Sapiens
agcagucuuuugcucucuagccuauguggauu

SEQ ID NO: 98231 - RNA, 32 nt, Homo Sapiens
uuguuuuucuaaaaacaaaugcuguuuauaca

SEQ ID NO: 98232 - RNA, 32 nt, Homo Sapiens
ggagauauggaagaggaccggggauugguacc

SEQ ID NO: 98233 - RNA, 32 nt, Homo Sapiens
cguccucaauacugagccucuuuggagcauac

SEQ ID NO: 98234 - RNA, 32 nt, Homo Sapiens
cuccgaccgcaucacugucuuccggagucccc

SEQ ID NO: 98235 - RNA, 31 nt, Homo Sapiens
ccagcaaaugggguugaaggaguccgagugg

SEQ ID NO: 98236 - RNA, 32 nt, Homo Sapiens
gcgccggaagggggcgugaaucggugcgaccg

SEQ ID NO: 98237 - RNA, 32 nt, Homo Sapiens
cccacccuaggccccgccccagcccagugcca

SEQ ID NO: 98238 - RNA, 32 nt, Homo Sapiens
cccuuuucaaccaccaacaacuguucguacug

SEQ ID NO: 98239 - RNA, 32 nt, Homo Sapiens
ggagcuugggagcggagcccaggccgugccgc

SEQ ID NO: 98240 - RNA, 32 nt, Homo Sapiens
gcggacgaggcgcugcugcuaccgcugaccgu

SEQ ID NO: 98241 - RNA, 32 nt, Homo Sapiens
acacuugggauggccccgccuccuggacuucc

SEQ ID NO: 98242 - RNA, 32 nt, Homo Sapiens
cuuauuugauacuagggaaaucuccugauuaa

SEQ ID NO: 98243 - RNA, 32 nt, Homo Sapiens
augcugaagaucaaauaaccaauauaaagcau

SEQ ID NO: 98244 - RNA, 32 nt, Homo Sapiens
ccaaagaaaagcauguggaaaagcagaagcuu

SEQ ID NO: 98245 - RNA, 32 nt, Homo Sapiens
cagccauaaaaugaauggcguuucucuccaua

SEQ ID NO: 98246 - RNA, 32 nt, Homo Sapiens
gacaagcagcauagggcauucgguggccagag

SEQ ID NO: 98247 - RNA, 32 nt, Homo Sapiens
uccaaagccccggcucuuuccaccacacugug

SEQ ID NO: 98248 - RNA, 32 nt, Homo Sapiens
gucccucguuuccauccuguuucugugacuug

SEQ ID NO: 98249 - RNA, 32 nt, Homo Sapiens
gagauuccggcgaggccgcgggucccaccucc

SEQ ID NO: 98250 - RNA, 32 nt, Homo Sapiens
aguaagccauguggaugaaugccaaggcaaca

SEQ ID NO: 98251 - RNA, 32 nt, Homo Sapiens
gagggagcaugacuucggcaacuucaccuauc

SEQ ID NO: 98252 - RNA, 32 nt, Homo Sapiens
auaguuacuauguuuuguaaauccauuuugua

SEQ ID NO: 98253 - RNA, 32 nt, Homo Sapiens
guccuggagacgggggcauggaccccuuuccu

SEQ ID NO: 98254 - RNA, 32 nt, Homo Sapiens
uucugguagaaaguugcugcaaaaacauuuga

SEQ ID NO: 98255 - RNA, 32 nt, Homo Sapiens
agccucugggaaaaaacaaacauguuacagug

SEQ ID NO: 98256 - RNA, 32 nt, Homo Sapiens
caggauuagagccuaggaaucuauauuuuagg

SEQ ID NO: 98257 - RNA, 32 nt, Homo Sapiens
ccguggagcaaagggccugcgaggggaucccg

SEQ ID NO: 98258 - RNA, 32 nt, Homo Sapiens
gucaugagaauaaaacaaaaggugauucuauu

SEQ ID NO: 98259 - RNA, 32 nt, Homo Sapiens
gggcaggagggaggagugagacuuaucagaug

SEQ ID NO: 98260 - RNA, 32 nt, Homo Sapiens
ccuuuaguuucuguguaguuugccaugcagca

SEQ ID NO: 98261 - RNA, 32 nt, Homo Sapiens
uucaguaucuucugcuuugucugugucuaucc

SEQ ID NO: 98262 - RNA, 32 nt, Homo Sapiens
gacuuucccguccacacacaggccugguaguc

SEQ ID NO: 98263 - RNA, 32 nt, Homo Sapiens
uguggugaagaagaagaaguugugaggacagc

SEQ ID NO: 98264 - RNA, 32 nt, Homo Sapiens
aguagcccgggcggcgagggcuggggguuccu

SEQ ID NO: 98265 - RNA, 32 nt, Homo Sapiens
agaaacagaguccaagcagagaagguaggaac

SEQ ID NO: 98266 - RNA, 32 nt, Homo Sapiens
gagcuggagggggugguucggcgugggggccg

SEQ ID NO: 98267 - RNA, 31 nt, Homo Sapiens
ggugugagccacugccuggccuggccguagg

SEQ ID NO: 98268 - RNA, 32 nt, Homo Sapiens
ugauuguuauuuaaauuugugguucagcgaua

SEQ ID NO: 98269 - RNA, 32 nt, Homo Sapiens
gaugccuacguaaaaaugguuccuagcugugu

SEQ ID NO: 98270 - RNA, 32 nt, Homo Sapiens
acuaucucugcauuccccuccucccccagacu

SEQ ID NO: 98271 - RNA, 32 nt, Homo Sapiens
acaaugaaacaaugguguuuaaauuauagacu

SEQ ID NO: 98272 - RNA, 32 nt, Homo Sapiens
gagaaugguauguuuucuuaacuauagguuau

SEQ ID NO: 98273 - RNA, 32 nt, Homo Sapiens
agcuugguacugguaccaaaacagagauauag

SEQ ID NO: 98274 - RNA, 32 nt, Homo Sapiens
ucuauuccucaacaauaaaggauuuuugcaua

SEQ ID NO: 98275 - RNA, 32 nt, Homo Sapiens
guaaaucaaaaauuacuuuuauuuaggaguuu

SEQ ID NO: 98276 - RNA, 32 nt, Homo Sapiens
uggcgucaggaugaccacacggcggccuuucc

SEQ ID NO: 98277 - RNA, 32 nt, Homo Sapiens
ugcaaaccuuucucagcccuggaagggaggga

SEQ ID NO: 98278 - RNA, 32 nt, Homo Sapiens
cuccgcccauccccaccagcccaaagacuugc

SEQ ID NO: 98279 - RNA, 32 nt, Homo Sapiens
gcaacaaauuaaauauaguauuagauuguuac

SEQ ID NO: 98280 - RNA, 32 nt, Homo Sapiens
cugaggcggccgaccuccggcccgaggcaccg

SEQ ID NO: 98281 - RNA, 32 nt, Homo Sapiens
aaauccuugucuaaggacugcacuauaguuga

SEQ ID NO: 98282 - RNA, 32 nt, Homo Sapiens
auagcaaguggaucaaugcugaagauaaauca

SEQ ID NO: 98283 - RNA, 32 nt, Homo Sapiens
cccucugaaucugagaucuaugaggcaggagc

SEQ ID NO: 98284 - RNA, 32 nt, Homo Sapiens
ugcaugagcaggccaggcaaaacuaagaggga

SEQ ID NO: 98285 - RNA, 31 nt, Homo Sapiens
caggaagcagcaccugccccccgcgccagcc

SEQ ID NO: 98286 - RNA, 32 nt, Homo Sapiens
agccuggccaacauggagaaaccccgucucua

SEQ ID NO: 98287 - RNA, 32 nt, Homo Sapiens
cguuuacaaauuaaaauggaggaaauuucguu

SEQ ID NO: 98288 - RNA, 32 nt, Homo Sapiens
gauuuucuuaaaaggggaguagaugguuguag

SEQ ID NO: 98289 - RNA, 32 nt, Homo Sapiens
uugauggacaguggaagaaaucacaacaugga

SEQ ID NO: 98290 - RNA, 32 nt, Homo Sapiens
caagauauuuuuguuaugcucaggaaucucuu

SEQ ID NO: 98291 - RNA, 32 nt, Homo Sapiens
aauuagccgggcgugguggugcgcgccuguaa

SEQ ID NO: 98292 - RNA, 32 nt, Homo Sapiens
cggccguaaggguacauaagcaucugagagua

SEQ ID NO: 98293 - RNA, 32 nt, Homo Sapiens
uuuuucuguuugggaaaaucuaaggauuuacu

SEQ ID NO: 98294 - RNA, 31 nt, Homo Sapiens
cucaaugcuacagagcacuuugaauacauca

SEQ ID NO: 98295 - RNA, 32 nt, Homo Sapiens
auccugggcuccugaagaagcugucuucccau

SEQ ID NO: 98296 - RNA, 32 nt, Homo Sapiens
cugacauaaaauuaauauaaaguaaaauucac

SEQ ID NO: 98297 - RNA, 32 nt, Homo Sapiens
aggcaaacaaaggcuauuaacacauaggaaaa

SEQ ID NO: 98298 - RNA, 32 nt, Homo Sapiens
auccuguaaucuaaugugacaagcauuacagu

SEQ ID NO: 98299 - RNA, 32 nt, Homo Sapiens
gacuggcaucuucccucagacuugcaguugau

SEQ ID NO: 98300 - RNA, 32 nt, Homo Sapiens
aaucuccagaucucuguaaaugauaccuacau

SEQ ID NO: 98301 - RNA, 32 nt, Homo Sapiens
uuugguuuuuuauuuuuugucuauaacaaaau

SEQ ID NO: 98302 - RNA, 32 nt, Homo Sapiens
gcaccaggggagaaggggcgucuucaggaggg

SEQ ID NO: 98303 - RNA, 32 nt, Homo Sapiens
gcugggcggggccgggaagcggcaguggcggc

SEQ ID NO: 98304 - RNA, 32 nt, Homo Sapiens
ccucugcagaagaaaauuuugcucuuauaaaa

SEQ ID NO: 98305 - RNA, 32 nt, Homo Sapiens
ucuugccucugacaguagcuuauuugcucugg

SEQ ID NO: 98306 - RNA, 32 nt, Homo Sapiens
uucaaggacccuuuuuccccucuaucugccug

SEQ ID NO: 98307 - RNA, 32 nt, Homo Sapiens
gcaaguaaauguaaguuuuucucuaguuauuu

SEQ ID NO: 98308 - RNA, 31 nt, Homo Sapiens
gcccuccugcggccauccugaguugggguga

SEQ ID NO: 98309 - RNA, 32 nt, Homo Sapiens
uuaaauuguaaaauaaauggacuuauugaagc

SEQ ID NO: 98310 - RNA, 32 nt, Homo Sapiens
ucagcggaugcacuuuagcagauggaacuucu

SEQ ID NO: 98311 - RNA, 32 nt, Homo Sapiens
aguggcucuugccuguaaucccagcauucugg

SEQ ID NO: 98312 - RNA, 32 nt, Homo Sapiens
agcaggggcaggaagcgcucgguggugaagua

SEQ ID NO: 98313 - RNA, 32 nt, Homo Sapiens
ucuacuggugucagggcgggugcggggacuga

SEQ ID NO: 98314 - RNA, 32 nt, Homo Sapiens
aaugugauuaauaaugcugaaaaaguauuagc

SEQ ID NO: 98315 - RNA, 32 nt, Homo Sapiens
aagaguacaaacauuggcaaucacguugaaac

SEQ ID NO: 98316 - RNA, 32 nt, Homo Sapiens
aggaagcagagaccgagcgcuggucauuuugu

SEQ ID NO: 98317 - RNA, 32 nt, Homo Sapiens
aaaucacucugcagcccugcccgaggcuagua

SEQ ID NO: 98318 - RNA, 32 nt, Homo Sapiens
ccucagcugccaaaugggaagaauagaagaau

SEQ ID NO: 98319 - RNA, 32 nt, Homo Sapiens
ucaaguggacucgugagaaggaguagagcugc

SEQ ID NO: 98320 - RNA, 32 nt, Homo Sapiens
aaugacugcaagauuuuggacagccuugugcg

SEQ ID NO: 98321 - RNA, 32 nt, Homo Sapiens
ggccagcagcacggccugggcggcgguggacu

SEQ ID NO: 98322 - RNA, 32 nt, Homo Sapiens
ugaaagcagucucucaaaagacuuuguuguug

SEQ ID NO: 98323 - RNA, 32 nt, Homo Sapiens
ucgauauuauuuguaaucuuauggagagauau

SEQ ID NO: 98324 - RNA, 32 nt, Homo Sapiens
cacugauaacacucagaaaaccacaguguguu

SEQ ID NO: 98325 - RNA, 32 nt, Homo Sapiens
accuggccccuuucugcggcugcgagggacuu

SEQ ID NO: 98326 - RNA, 32 nt, Homo Sapiens
gguugcaggaggaggagcugggcagggccugc

SEQ ID NO: 98327 - RNA, 32 nt, Homo Sapiens
cugucccuccaagggcagccucucuaacuggc

SEQ ID NO: 98328 - RNA, 30 nt, Homo Sapiens
ggcuagggcguuugaccgccggcggugaag

SEQ ID NO: 98329 - RNA, 32 nt, Homo Sapiens
gagaagaucuguuauuacauuaguauauuacg

SEQ ID NO: 98330 - RNA, 32 nt, Homo Sapiens
uuggggacuuuccaauaacuaaagcacaauga

SEQ ID NO: 98331 - RNA, 32 nt, Homo Sapiens
ucaaggagcaagggggaacuuuuggggaccac

SEQ ID NO: 98332 - RNA, 32 nt, Homo Sapiens
acuuucugggacugauguuuaauuguaacaca

SEQ ID NO: 98333 - RNA, 32 nt, Homo Sapiens
ugugccacagagguaaaaaauuuccuugucag

SEQ ID NO: 98334 - RNA, 32 nt, Homo Sapiens
uccccauuugucaaaguugaccucaagauaac

SEQ ID NO: 98335 - RNA, 32 nt, Homo Sapiens
uugggguucacugagugaaggcacauaaagca

SEQ ID NO: 98336 - RNA, 32 nt, Homo Sapiens
aagaagugggguggaagaaguggggugggacg

SEQ ID NO: 98337 - RNA, 32 nt, Homo Sapiens
acgcguuugcccugauaccaugucucuucgac

SEQ ID NO: 98338 - RNA, 32 nt, Homo Sapiens
ccagguucuacagggaggcugcacccacucca

SEQ ID NO: 98339 - RNA, 32 nt, Homo Sapiens
cucagcuuucuuauuucuuuuauauguugagg

SEQ ID NO: 98340 - RNA, 32 nt, Homo Sapiens
aaagagagggcggggacaaauaucaaauuaag

SEQ ID NO: 98341 - RNA, 32 nt, Homo Sapiens
aaauuuuaacugugauuaaauuuagguuuauu

SEQ ID NO: 98342 - RNA, 32 nt, Homo Sapiens
cuuucuuucuuuucuuuuuuuuuuuuuuuuua

SEQ ID NO: 98343 - RNA, 32 nt, Homo Sapiens
ccccagcggcagagaccucccucggcacucca

SEQ ID NO: 98344 - RNA, 32 nt, Homo Sapiens
cgccgcugucgccgccaccuccucugaucuac

SEQ ID NO: 98345 - RNA, 32 nt, Homo Sapiens
acauuugucugcccagacacguaacugggacc

SEQ ID NO: 98346 - RNA, 32 nt, Homo Sapiens
auuaaaaauaaaugugagagucguuaauguag

SEQ ID NO: 98347 - RNA, 32 nt, Homo Sapiens
ggauuccaugauucuguaaaugccuaugcauu

SEQ ID NO: 98348 - RNA, 32 nt, Homo Sapiens
cagggauagggacuggagggggugugggguau

SEQ ID NO: 98349 - RNA, 32 nt, Homo Sapiens
ugccuccccucccccgacccuccugccuuccg

SEQ ID NO: 98350 - RNA, 32 nt, Homo Sapiens
ggagagauacucaaaagagcuaaaacugcagc

SEQ ID NO: 98351 - RNA, 29 nt, Homo Sapiens
gaugugucauaugaguccucaagcuucuc

SEQ ID NO: 98352 - RNA, 32 nt, Homo Sapiens
agcugguccuccagcccuggcaggcccucagc

SEQ ID NO: 98353 - RNA, 32 nt, Homo Sapiens
cuugguacggugcagugauaucauuaagagcu

SEQ ID NO: 98354 - RNA, 32 nt, Homo Sapiens
uaccugugaaucaaaacaaauucaagaaugca

SEQ ID NO: 98355 - RNA, 32 nt, Homo Sapiens
aauacucuuucugcuacugaaaugccggcccc

SEQ ID NO: 98356 - RNA, 32 nt, Homo Sapiens
ucugcugggucagcaucuccagccaccuggcu

SEQ ID NO: 98357 - RNA, 32 nt, Homo Sapiens
ucuuacaguguuucuaccaucucagaaaaagc

SEQ ID NO: 98358 - RNA, 32 nt, Homo Sapiens
agaccaggagggacugcugugcucucccuucu

SEQ ID NO: 98359 - RNA, 32 nt, Homo Sapiens
acuguuaagcuguguucaguacuguuucugaa

SEQ ID NO: 98360 - RNA, 31 nt, Homo Sapiens
uggccacaccucugccugccucaugccccuu

SEQ ID NO: 98361 - RNA, 31 nt, Homo Sapiens
aggagcucacggaggcggcaccgcucccgaa

SEQ ID NO: 98362 - RNA, 32 nt, Homo Sapiens
ugucggagaaagugaagaggaagcauccauag

SEQ ID NO: 98363 - RNA, 32 nt, Homo Sapiens
auaguaaaauggucuucaauucuuaacaaaug

SEQ ID NO: 98364 - RNA, 30 nt, Homo Sapiens
gaagcaggagauguugaugaggcuguauuu

SEQ ID NO: 98365 - RNA, 32 nt, Homo Sapiens
uccagcugagcagcugcuucacguugugaggg

SEQ ID NO: 98366 - RNA, 32 nt, Homo Sapiens
uugagaugcagccauccuuucucuuucuucuc

SEQ ID NO: 98367 - RNA, 28 nt, Homo Sapiens
uucaccguggcuaccauugucacucgua

SEQ ID NO: 98368 - RNA, 32 nt, Homo Sapiens
ucuuuauaauuucagaauuuucuaagcaacuu

SEQ ID NO: 98369 - RNA, 32 nt, Homo Sapiens
uucgaggaaaucaauuucugaugcuccagcca

SEQ ID NO: 98370 - RNA, 32 nt, Homo Sapiens
cacauguguugaggauguagcauuccaggcug

SEQ ID NO: 98371 - RNA, 32 nt, Homo Sapiens
cuuccuccagcaugacuaagucuggaacagca

SEQ ID NO: 98372 - RNA, 32 nt, Homo Sapiens
agagucugcagcagcagcagccggcgaggagg

SEQ ID NO: 98373 - RNA, 32 nt, Homo Sapiens
ggaaggggaggcuucgugcagcagccgcaaag

SEQ ID NO: 98374 - RNA, 31 nt, Homo Sapiens
auacuacacaaugaucucugauuuugcugag

SEQ ID NO: 98375 - RNA, 31 nt, Homo Sapiens
aaagucaccacuuuugccaagcuuaaaaaaa

SEQ ID NO: 98376 - RNA, 32 nt, Homo Sapiens
gacacgucugcugcgccccgcuucucgcugcu

SEQ ID NO: 98377 - RNA, 32 nt, Homo Sapiens
cugccuuccugauccuuucccucccccaaccc

SEQ ID NO: 98378 - RNA, 32 nt, Homo Sapiens
ccuagaaguguucuuauaaaggucuaauguau

SEQ ID NO: 98379 - RNA, 32 nt, Homo Sapiens
ugcccgucacaugcccucugggugacaucgga

SEQ ID NO: 98380 - RNA, 30 nt, Homo Sapiens
acguggggcaggcgcgggugggcccagccu

SEQ ID NO: 98381 - RNA, 32 nt, Homo Sapiens
cgcucauaaauacauaauauauugaauuuaaa

SEQ ID NO: 98382 - RNA, 32 nt, Homo Sapiens
guggacaugcgugaccagcaguacucagguuu

SEQ ID NO: 98383 - RNA, 32 nt, Homo Sapiens
ucauacuacauauauacuuuuuauguaagcuu

SEQ ID NO: 98384 - RNA, 32 nt, Homo Sapiens
gagcggcagccagaagagaacacgccucucaa

SEQ ID NO: 98385 - RNA, 32 nt, Homo Sapiens
cagcagagcggggggaucucccugcccccacc

SEQ ID NO: 98386 - RNA, 32 nt, Homo Sapiens
ccguccagacagcaacaagaccgagaaccggc

SEQ ID NO: 98387 - RNA, 32 nt, Homo Sapiens
ucguggcagcacggcccggccccucacccucu

SEQ ID NO: 98388 - RNA, 32 nt, Homo Sapiens
cccagauaaucuauuuacaucaccuuauagga

SEQ ID NO: 98389 - RNA, 32 nt, Homo Sapiens
ggauagagugguuuuuaaauugugauguuugu

SEQ ID NO: 98390 - RNA, 32 nt, Homo Sapiens
auacacuuuugagacuccagugagacgcuguu

SEQ ID NO: 98391 - RNA, 32 nt, Homo Sapiens
ucacacagcuaagaagcagugaugggauauga

SEQ ID NO: 98392 - RNA, 32 nt, Homo Sapiens
uuauacuuugguuccuuuuuuauuuuuauuuu

SEQ ID NO: 98393 - RNA, 32 nt, Homo Sapiens
gaaguucguguuuccaggcgcuuccggaaacc

SEQ ID NO: 98394 - RNA, 32 nt, Homo Sapiens
ucccugcuggaugagggacugcggcugcagag

SEQ ID NO: 98395 - RNA, 32 nt, Homo Sapiens
auuggaggcagacuugauauuucagaguugca

SEQ ID NO: 98396 - RNA, 32 nt, Homo Sapiens
auggcuucaaggauuuuaaguuucccuuuagu

SEQ ID NO: 98397 - RNA, 32 nt, Homo Sapiens
gucauauaaauuugcagggaaccacaaaccca

SEQ ID NO: 98398 - RNA, 32 nt, Homo Sapiens
uccuccagaaaagaagcucuaacagaggaccc

SEQ ID NO: 98399 - RNA, 32 nt, Homo Sapiens
aaagcuaaauguuuccucgaugacuggcagca

SEQ ID NO: 98400 - RNA, 32 nt, Homo Sapiens
ccaccugggggagaggggcgggcgccgcgcug

SEQ ID NO: 98401 - RNA, 32 nt, Homo Sapiens
cgcccucccgguuuaccgcccccuguguccag

SEQ ID NO: 98402 - RNA, 32 nt, Homo Sapiens
uguuuuuguucuacucuaggcagugacagugc

SEQ ID NO: 98403 - RNA, 32 nt, Homo Sapiens
augaggaucaugggcuggagggggagcgaggg

SEQ ID NO: 98404 - RNA, 32 nt, Homo Sapiens
uguggauggccauuuuauggcugcagaucaca

SEQ ID NO: 98405 - RNA, 32 nt, Homo Sapiens
aaaacaaaacccuguggcucaggccgcugagc

SEQ ID NO: 98406 - RNA, 32 nt, Homo Sapiens
cuuccugaucugcugcuuccaaguugugugac

SEQ ID NO: 98407 - RNA, 32 nt, Homo Sapiens
caguuccucacaacguaugccuaucucaguca

SEQ ID NO: 98408 - RNA, 32 nt, Homo Sapiens
acccaccugcuagaggcgcugcggcugugauc

SEQ ID NO: 98409 - RNA, 32 nt, Homo Sapiens
ccauucccugcugcccugagggugcugucccc

SEQ ID NO: 98410 - RNA, 32 nt, Homo Sapiens
cauuggccucugcagcugggugaccagagccc

SEQ ID NO: 98411 - RNA, 32 nt, Homo Sapiens
ccaccuuccuucccacccacaugccgaagggu

SEQ ID NO: 98412 - RNA, 30 nt, Homo Sapiens
agguaggauaucccugauuccugggcuccc

SEQ ID NO: 98413 - RNA, 32 nt, Homo Sapiens
cguuaaauuuaaaaauuuguuuuuaaaacgug

SEQ ID NO: 98414 - RNA, 32 nt, Homo Sapiens
gcuccuggccuagacuccaaaggguuggguag

SEQ ID NO: 98415 - RNA, 32 nt, Homo Sapiens
ugggaggcaugggaaacagugcagugacucac

SEQ ID NO: 98416 - RNA, 32 nt, Homo Sapiens
ucgacuuacuaaaauuucauuuuagcuuuuau

SEQ ID NO: 98417 - RNA, 32 nt, Homo Sapiens
gggacccgcgucucggcccccggagcggggac

SEQ ID NO: 98418 - RNA, 32 nt, Homo Sapiens
ccccacccgccuuugccugcgagucucccucg

SEQ ID NO: 98419 - RNA, 32 nt, Homo Sapiens
auuggauguauuaaguguuuuauggagcaguc

SEQ ID NO: 98420 - RNA, 32 nt, Homo Sapiens
cuccgucgccuggucagaggcccgaagcaggg

SEQ ID NO: 98421 - RNA, 32 nt, Homo Sapiens
uguagaggcaggggcggcggaggcggaacugc

SEQ ID NO: 98422 - RNA, 32 nt, Homo Sapiens
gaaauugugucuuauuucugguuuuuagagcc

SEQ ID NO: 98423 - RNA, 32 nt, Homo Sapiens
ggcgagcuucuuggccuaagggcaggaagaga

SEQ ID NO: 98424 - RNA, 32 nt, Homo Sapiens
cgcgcucagccucgcucuccccgggacucuca

SEQ ID NO: 98425 - RNA, 32 nt, Homo Sapiens
cagucccauguuuagauuauuuuaacauaauu

SEQ ID NO: 98426 - RNA, 32 nt, Homo Sapiens
cgucuuuccgccuugggcggguccauucuguu

SEQ ID NO: 98427 - RNA, 32 nt, Homo Sapiens
agaccuggccgcggcucggaggcucccgcgca

SEQ ID NO: 98428 - RNA, 32 nt, Homo Sapiens
ucauugagucgugggaguucaaugaaauguug

SEQ ID NO: 98429 - RNA, 32 nt, Homo Sapiens
uuuaggucaacacuagcugccagcaggaugga

SEQ ID NO: 98430 - RNA, 32 nt, Homo Sapiens
uuuccccugcagcugugacuaauuguggaaca

SEQ ID NO: 98431 - RNA, 32 nt, Homo Sapiens
aaaacugauuauugaaugaaauuaaaaccuaa

SEQ ID NO: 98432 - RNA, 32 nt, Homo Sapiens
uuugauaucugugaugugcauuuuggaagugc

SEQ ID NO: 98433 - RNA, 32 nt, Homo Sapiens
ugacuuuagaaccugaccucaaggauauggca

SEQ ID NO: 98434 - RNA, 32 nt, Homo Sapiens
ccaaacgcaaccgggucuggagggauccccgc

SEQ ID NO: 98435 - RNA, 32 nt, Homo Sapiens
ucuagaaucuucugccuggcugaccucugagc

SEQ ID NO: 98436 - RNA, 30 nt, Homo Sapiens
ccuuugguuuuaaugggggaaaaaaagaaa

SEQ ID NO: 98437 - RNA, 32 nt, Homo Sapiens
caggggaaaugcuugaaguaaaugauuguuuc

SEQ ID NO: 98438 - RNA, 32 nt, Homo Sapiens
gcucuaauucucaacuguaggcaaacugcuuu

SEQ ID NO: 98439 - RNA, 32 nt, Homo Sapiens
ugcucaaaggauuuaaaggaguucuaauucau

SEQ ID NO: 98440 - RNA, 32 nt, Homo Sapiens
cuguagcaaaauaccuugacugcuugugagac

SEQ ID NO: 98441 - RNA, 32 nt, Homo Sapiens
aagccccuaaaaugugguaaguguugucagag

SEQ ID NO: 98442 - RNA, 32 nt, Homo Sapiens
ggagcagcacaccuggugcguggggaugccug

SEQ ID NO: 98443 - RNA, 32 nt, Homo Sapiens
cgucagccaaggaaagggaagugcugcuuagu

SEQ ID NO: 98444 - RNA, 32 nt, Homo Sapiens
uuugcaguucucuuuuucagagaugauucuau

SEQ ID NO: 98445 - RNA, 32 nt, Homo Sapiens
gcccuccccuccccaacuacccccggucccag

SEQ ID NO: 98446 - RNA, 32 nt, Homo Sapiens
ggcaugaggggccugcccguccugcagggugc

SEQ ID NO: 98447 - RNA, 32 nt, Homo Sapiens
uggccuuccaaaucucauguccuuccauacaa

SEQ ID NO: 98448 - RNA, 32 nt, Homo Sapiens
ugcugcagacagauuuuguuucccucuguaaa

SEQ ID NO: 98449 - RNA, 29 nt, Homo Sapiens
augauguuugagaccaaucuuuaacaucu

SEQ ID NO: 98450 - RNA, 32 nt, Homo Sapiens
ggcugggcucugcggugcgguccacgggagag

SEQ ID NO: 98451 - RNA, 31 nt, Homo Sapiens
auugagcagcgcaacgcuaucaucaacugcc

SEQ ID NO: 98452 - RNA, 32 nt, Homo Sapiens
cauguagggaauguuauuuuguguuccacauc

SEQ ID NO: 98453 - RNA, 32 nt, Homo Sapiens
ccuaggcacugacuacgugcacaaguuugugg

SEQ ID NO: 98454 - RNA, 32 nt, Homo Sapiens
ggacgccuggggggcucugugguaaggcucug

SEQ ID NO: 98455 - RNA, 32 nt, Homo Sapiens
cacaaagccaaccaugcccagcccuucccagc

SEQ ID NO: 98456 - RNA, 32 nt, Homo Sapiens
gaagacagcugccugccuggcugccgggaaca

SEQ ID NO: 98457 - RNA, 32 nt, Homo Sapiens
auggacaaagaaaacagcgauguuucagccgc

SEQ ID NO: 98458 - RNA, 32 nt, Homo Sapiens
auuuccccgcaugucuuauucuugcccuuccc

SEQ ID NO: 98459 - RNA, 32 nt, Homo Sapiens
gagauuuauguguucugaggcuuuugucuucu

SEQ ID NO: 98460 - RNA, 32 nt, Homo Sapiens
guggggagccugggcuuuuggggaaccaggcu

SEQ ID NO: 98461 - RNA, 32 nt, Homo Sapiens
uuuucauuugaaaaauaagcuaauguguaagg

SEQ ID NO: 98462 - RNA, 32 nt, Homo Sapiens
gcuaugagcauaguguguggacagguaucuuc

SEQ ID NO: 98463 - RNA, 32 nt, Homo Sapiens
uucucuucacuaucuuuuuuuuucuuuuuggu

SEQ ID NO: 98464 - RNA, 32 nt, Homo Sapiens
cccacccaaccuggucuucacaccagauugca

SEQ ID NO: 98465 - RNA, 32 nt, Homo Sapiens
auauaaguaaauuuauauauaaaaauaccaaa

SEQ ID NO: 98466 - RNA, 32 nt, Homo Sapiens
ugcguguggaguccggacucgugggagacgau

SEQ ID NO: 98467 - RNA, 32 nt, Homo Sapiens
agggagcgcugugggggcgcgcugccuucugc

SEQ ID NO: 98468 - RNA, 32 nt, Homo Sapiens
ccuuuuuuuuuuuuuucuuuuuccaauaaaag

SEQ ID NO: 98469 - RNA, 32 nt, Homo Sapiens
auuccuaaacuaucuuuuuuuuauuccacauc

SEQ ID NO: 98470 - RNA, 32 nt, Homo Sapiens
aucagaaagauucuagcuauuauuuucuuuaa

SEQ ID NO: 98471 - RNA, 32 nt, Homo Sapiens
cacuuuuccuugcaugaguaauuuucugaaug

SEQ ID NO: 98472 - RNA, 32 nt, Homo Sapiens
aggcugggggccucacucuguuuuccagggga

SEQ ID NO: 98473 - RNA, 32 nt, Homo Sapiens
uuucuucaaaaauuaagaauuucuagagguca

SEQ ID NO: 98474 - RNA, 32 nt, Homo Sapiens
gggugacggggcugucccaguauuaaaggugg

SEQ ID NO: 98475 - RNA, 32 nt, Homo Sapiens
cucagugcucccuuccucuccucuccuucuag

SEQ ID NO: 98476 - RNA, 32 nt, Homo Sapiens
caaccaaguaagcaagugucagggcucaccaa

SEQ ID NO: 98477 - RNA, 32 nt, Homo Sapiens
guauauuauuuuugccuuacaguggaucauuc

SEQ ID NO: 98478 - RNA, 32 nt, Homo Sapiens
gaggcaguuuugguggaugggggaccuccacu

SEQ ID NO: 98479 - RNA, 32 nt, Homo Sapiens
accuaaauuuaaagggucaggcauuagaaaca

SEQ ID NO: 98480 - RNA, 32 nt, Homo Sapiens
uuagaaaaugucaauauagacauaucacaggg

SEQ ID NO: 98481 - RNA, 32 nt, Homo Sapiens
uuuccuauacuuucuuguuauccauaucauuc

SEQ ID NO: 98482 - RNA, 32 nt, Homo Sapiens
uauuccacacaaacuuuuuucuuaguaucucu

SEQ ID NO: 98483 - RNA, 32 nt, Homo Sapiens
cugauucauauccuaauguggaccaccaaucu

SEQ ID NO: 98484 - RNA, 32 nt, Homo Sapiens
accgcuuaaaauugauauaaauuacugagguu

SEQ ID NO: 98485 - RNA, 32 nt, Homo Sapiens
uguguuaaugaaaaugaauggcuguacauauu

SEQ ID NO: 98486 - RNA, 32 nt, Homo Sapiens
uauuucucucaccaccugaggaaauugggguu

SEQ ID NO: 98487 - RNA, 32 nt, Homo Sapiens
ccaaaauaaaaauugaaaaauaaaaaccauaa

SEQ ID NO: 98488 - RNA, 32 nt, Homo Sapiens
cacaucaaccucaagcccguuuagcaaugagg

SEQ ID NO: 98489 - RNA, 32 nt, Homo Sapiens
uaguacuuuuucugcggccuuugguuuguggc

SEQ ID NO: 98490 - RNA, 32 nt, Homo Sapiens
acgggcggcgggauagcgggaccccggcggcg

SEQ ID NO: 98491 - RNA, 32 nt, Homo Sapiens
aaaaauagcuguaacguucgcguuaggaaaga

SEQ ID NO: 98492 - RNA, 32 nt, Homo Sapiens
gggcuugauuucaacagccaagccaaguuuca

SEQ ID NO: 98493 - RNA, 32 nt, Homo Sapiens
accugaauuuugauugguuagccuuaauuaua

SEQ ID NO: 98494 - RNA, 32 nt, Homo Sapiens
gcagaaccaaggacucagugcuuacagcuuua

SEQ ID NO: 98495 - RNA, 32 nt, Homo Sapiens
uaaggcugguugacauuuuuuauuuucauuuu

SEQ ID NO: 98496 - RNA, 32 nt, Homo Sapiens
ugucgagaucucaggagccccuugcuguuuuu

SEQ ID NO: 98497 - RNA, 32 nt, Homo Sapiens
caucauagugaagacuccauacagacacauga

SEQ ID NO: 98498 - RNA, 32 nt, Homo Sapiens
auacacaucuugccuuuuuuuuuuuuuuuuuu

SEQ ID NO: 98499 - RNA, 32 nt, Homo Sapiens
ccaggcuccuucccauccucacacccgcgccu

SEQ ID NO: 98500 - RNA, 32 nt, Homo Sapiens
aacuacuacuauuuguaauauuacaaaugaac

SEQ ID NO: 98501 - RNA, 32 nt, Homo Sapiens
agggcagcagcugccacguggaggaagcucaa

SEQ ID NO: 98502 - RNA, 32 nt, Homo Sapiens
aauguuagguaguuuagggucucuagguguua

SEQ ID NO: 98503 - RNA, 32 nt, Homo Sapiens
cccuuuacaaauagaauuugagcaucagugag

SEQ ID NO: 98504 - RNA, 32 nt, Homo Sapiens
ccucuccaacugagcucggcgccgggagagga

SEQ ID NO: 98505 - RNA, 32 nt, Homo Sapiens
acaaaauacuuauguguuguaugucaguguaa

SEQ ID NO: 98506 - RNA, 32 nt, Homo Sapiens
ugagaauagaaucuugaggaacggaucagaug

SEQ ID NO: 98507 - RNA, 32 nt, Homo Sapiens
ugaggaggccgaagaggaggccuaggcagagc

SEQ ID NO: 98508 - RNA, 32 nt, Homo Sapiens
ccggaguuggguccuugccuggauuuugacac

SEQ ID NO: 98509 - RNA, 32 nt, Homo Sapiens
acuuaauacagcaauaagaaugugcuagaguu

SEQ ID NO: 98510 - RNA, 32 nt, Homo Sapiens
uuucaggaaggcgaccggcagccucgggcagg

SEQ ID NO: 98511 - RNA, 32 nt, Homo Sapiens
ucccugcuacuacagauucaaagagcagguag

SEQ ID NO: 98512 - RNA, 32 nt, Homo Sapiens
acaauaaggguuuuuaguuuuaucuacucuuc

SEQ ID NO: 98513 - RNA, 29 nt, Homo Sapiens
uuuauguaaaguuuuucuauucuuugauu

SEQ ID NO: 98514 - RNA, 32 nt, Homo Sapiens
ucuugaauacucauugaguauuuggcuguaua

SEQ ID NO: 98515 - RNA, 32 nt, Homo Sapiens
aaugcagaaaucaugugacugucacgugcugg

SEQ ID NO: 98516 - RNA, 32 nt, Homo Sapiens
gccagcccugugcuccucccucccccaacacu

SEQ ID NO: 98517 - RNA, 32 nt, Homo Sapiens
gaggaauuugaaacaggauauuuaagagugug

SEQ ID NO: 98518 - RNA, 32 nt, Homo Sapiens
cuagcagucucccagcucccaacagccugggg

SEQ ID NO: 98519 - RNA, 32 nt, Homo Sapiens
ggcauacgcuuugcuggcaugcuuggaugccc

SEQ ID NO: 98520 - RNA, 32 nt, Homo Sapiens
gaagccgggauucguggcaaccccuaguuuuu

SEQ ID NO: 98521 - RNA, 32 nt, Homo Sapiens
uuuggcuuucucuuggaggugggucgcagcac

SEQ ID NO: 98522 - RNA, 32 nt, Homo Sapiens
uccccaucuguaacuugagaaaauagaacuag

SEQ ID NO: 98523 - RNA, 32 nt, Homo Sapiens
agagcucuuuuggaccuacauacauuuuccuu

SEQ ID NO: 98524 - RNA, 32 nt, Homo Sapiens
guaauucuugccgcuccccccagcccaucguu

SEQ ID NO: 98525 - RNA, 32 nt, Homo Sapiens
gagcaaaauuuuacuguugugauguaccaauu

SEQ ID NO: 98526 - RNA, 32 nt, Homo Sapiens
ucuggaacaagagcuuagugagccagggaacc

SEQ ID NO: 98527 - RNA, 32 nt, Homo Sapiens
ccucauccuggcucagccuggugauggagaag

SEQ ID NO: 98528 - RNA, 32 nt, Homo Sapiens
ggaauguuugcaugagcauccuguggugggag

SEQ ID NO: 98529 - RNA, 32 nt, Homo Sapiens
ucugcccgccccaaaccuuacaauccuccugg

SEQ ID NO: 98530 - RNA, 32 nt, Homo Sapiens
uccgaaagcggcaucggugggcugggaccccc

SEQ ID NO: 98531 - RNA, 32 nt, Homo Sapiens
gccagcuggugccaacuuccuguggguccugg

SEQ ID NO: 98532 - RNA, 32 nt, Homo Sapiens
auugaaccuuauacaacugaaaagaugagucg

SEQ ID NO: 98533 - RNA, 32 nt, Homo Sapiens
uggcuuucaguggucaugcuaccuacccauac

SEQ ID NO: 98534 - RNA, 32 nt, Homo Sapiens
ccuucuacucccucuugacugucucagccucu

SEQ ID NO: 98535 - RNA, 32 nt, Homo Sapiens
ggggccguuugguggaugccguagcugccgug

SEQ ID NO: 98536 - RNA, 32 nt, Homo Sapiens
uuaagaaaaauauuuucuaauggaauuacaua

SEQ ID NO: 98537 - RNA, 32 nt, Homo Sapiens
ugucuggccagguucugccuuuaguuuguggu

SEQ ID NO: 98538 - RNA, 31 nt, Homo Sapiens
uaaaaaauggccuccaacaaaacuacauugc

SEQ ID NO: 98539 - RNA, 32 nt, Homo Sapiens
ucucaguuguggccauuccagaggacucuuua

SEQ ID NO: 98540 - RNA, 32 nt, Homo Sapiens
caccuuugcuccauguucaagaccagaaguag

SEQ ID NO: 98541 - RNA, 32 nt, Homo Sapiens
agguauagaacuucuuuuuuuuaaucucugaa

SEQ ID NO: 98542 - RNA, 32 nt, Homo Sapiens
ucaaccaaauacuuuaauguauaaaauaaaua

SEQ ID NO: 98543 - RNA, 32 nt, Homo Sapiens
ucaacgcgucacuuugggcagcguauucccug

SEQ ID NO: 98544 - RNA, 32 nt, Homo Sapiens
uaacauuucuuuugaguugucuauuaacacuu

SEQ ID NO: 98545 - RNA, 32 nt, Homo Sapiens
caguggucuuacuggcagguguugguguccag

SEQ ID NO: 98546 - RNA, 32 nt, Homo Sapiens
aaccuugaaacacauaagaaaaugcaugcuga

SEQ ID NO: 98547 - RNA, 32 nt, Homo Sapiens
ugagcuugcacgggucucggacacgcgcuccg

SEQ ID NO: 98548 - RNA, 32 nt, Homo Sapiens
cuuacagauuuuacuucaauuuuuguguacgg

SEQ ID NO: 98549 - RNA, 32 nt, Homo Sapiens
gucuuuucuaaagauuugcguagauaggaagc

SEQ ID NO: 98550 - RNA, 32 nt, Homo Sapiens
cccagauuccuugaccuauuucugggacacca

SEQ ID NO: 98551 - RNA, 32 nt, Homo Sapiens
auuauauguuucuguuucugguaaauaccaua

SEQ ID NO: 98552 - RNA, 32 nt, Homo Sapiens
cggcagcagcgggggaccggaaguggcucgcg

SEQ ID NO: 98553 - RNA, 32 nt, Homo Sapiens
guacagaggcggaugaacugcugagacuugau

SEQ ID NO: 98554 - RNA, 32 nt, Homo Sapiens
auauuacccaguaacauugaauguagauggcu

SEQ ID NO: 98555 - RNA, 32 nt, Homo Sapiens
uauuucaugagcaaucuuuuaaauuucauuua

SEQ ID NO: 98556 - RNA, 32 nt, Homo Sapiens
cauucucacaugcuagacccuucuaagcagcu

SEQ ID NO: 98557 - RNA, 32 nt, Homo Sapiens
acaaaggaugucugugaugacaguggccaucc

SEQ ID NO: 98558 - RNA, 32 nt, Homo Sapiens
aagacuuccucuggcuccccaaggcugcaaag

SEQ ID NO: 98559 - RNA, 32 nt, Homo Sapiens
ccugcccugaagccggccccugcccucuuccu

SEQ ID NO: 98560 - RNA, 32 nt, Homo Sapiens
cccauuugacuuccuuucuucuuucaggcuuu

SEQ ID NO: 98561 - RNA, 32 nt, Homo Sapiens
accccgcaucgcgaccccgcgccccgccggcc

SEQ ID NO: 98562 - RNA, 32 nt, Homo Sapiens
aggucacuuacuauuucuuccuguuacaaaug

SEQ ID NO: 98563 - RNA, 32 nt, Homo Sapiens
aacagcccagcuuggcgugggguuagguugcu

SEQ ID NO: 98564 - RNA, 32 nt, Homo Sapiens
ggggagggggguaaccagagccacauccuuua

SEQ ID NO: 98565 - RNA, 32 nt, Homo Sapiens
uggaugcugacaagggagagccaaguacuguu

SEQ ID NO: 98566 - RNA, 32 nt, Homo Sapiens
cagauucgggugccggcaccuccccugagucu

SEQ ID NO: 98567 - RNA, 32 nt, Homo Sapiens
ccuccaggucuucguuucuccucuuccccgca

SEQ ID NO: 98568 - RNA, 32 nt, Homo Sapiens
guggggagcuggucucaaggacccagcauggu

SEQ ID NO: 98569 - RNA, 32 nt, Homo Sapiens
auuuuauaaaaagucacuaagcucaagugcuu

SEQ ID NO: 98570 - RNA, 32 nt, Homo Sapiens
uuaugccgaaccacccaacuguccuggucaca

SEQ ID NO: 98571 - RNA, 32 nt, Homo Sapiens
gggccccggaauaccggagucccuuuagauau

SEQ ID NO: 98572 - RNA, 32 nt, Homo Sapiens
aaaucggaggccgggcgcugcguguggggugu

SEQ ID NO: 98573 - RNA, 32 nt, Homo Sapiens
aauccugcuuccucacuacaauaaaaaggaga

SEQ ID NO: 98574 - RNA, 32 nt, Homo Sapiens
guccccuggagaagaacaaggccaugggucgg

SEQ ID NO: 98575 - RNA, 32 nt, Homo Sapiens
aggaaaugcaagaauuguggaugcucagaaaa

SEQ ID NO: 98576 - RNA, 32 nt, Homo Sapiens
gcuuugcccuggcaccucccuccagcugccca

SEQ ID NO: 98577 - RNA, 32 nt, Homo Sapiens
gagggaggcccggcccuugcucccgaguuggg

SEQ ID NO: 98578 - RNA, 32 nt, Homo Sapiens
uggcgucugugcuuguccacaugcgcugggcg

SEQ ID NO: 98579 - RNA, 32 nt, Homo Sapiens
acucuccuggggacagguauccucuugagaug

SEQ ID NO: 98580 - RNA, 32 nt, Homo Sapiens
cccuggauucuggauuaggagcuucugaaucu

SEQ ID NO: 98581 - RNA, 32 nt, Homo Sapiens
agguggagggcaucaggcagggugagccccag

SEQ ID NO: 98582 - RNA, 32 nt, Homo Sapiens
caccgacaccacagaagccaauguuuggagau

SEQ ID NO: 98583 - RNA, 32 nt, Homo Sapiens
cuucccucccaucuccucccugcuccugcgug

SEQ ID NO: 98584 - RNA, 32 nt, Homo Sapiens
auguauacaaacgaauagcagauaaugaugac

SEQ ID NO: 98585 - RNA, 32 nt, Homo Sapiens
ccauuccuggaugcuuccugugcccucucaag

SEQ ID NO: 98586 - RNA, 32 nt, Homo Sapiens
cuauuuucuuuuaagaugcuguaaucuaucuu

SEQ ID NO: 98587 - RNA, 32 nt, Homo Sapiens
ugaacggcggguggauagagaagguuggcgcg

SEQ ID NO: 98588 - RNA, 32 nt, Homo Sapiens
aucaaacggaaggauuaacuagacagagaaug

SEQ ID NO: 98589 - RNA, 32 nt, Homo Sapiens
cuacucaacuuucaaaagauguuuguucuuca

SEQ ID NO: 98590 - RNA, 32 nt, Homo Sapiens
aauccuuucaggugcuagauggcggcugcaga

SEQ ID NO: 98591 - RNA, 32 nt, Homo Sapiens
uccuugguccaguugcuaaaguucuuaguauu

SEQ ID NO: 98592 - RNA, 32 nt, Homo Sapiens
gagagugcuguaugcgguucccuuucaugcug

SEQ ID NO: 98593 - RNA, 32 nt, Homo Sapiens
guauuuuucuucacuuccaaugaucuuuuuuc

SEQ ID NO: 98594 - RNA, 32 nt, Homo Sapiens
ugucuuaugcuucuauggauaaugcuauauaa

SEQ ID NO: 98595 - RNA, 32 nt, Homo Sapiens
ucuacuaaaaauacaaaaauuagcugcacaug

SEQ ID NO: 98596 - RNA, 31 nt, Homo Sapiens
ucuuggugucuacguuaccaggcaggaaggc

SEQ ID NO: 98597 - RNA, 32 nt, Homo Sapiens
caaggcauuuccccuauuguuuacauggucaa

SEQ ID NO: 98598 - RNA, 32 nt, Homo Sapiens
auaguaaaaagcuaggaauaggaugugauucu

SEQ ID NO: 98599 - RNA, 32 nt, Homo Sapiens
agauaaugaguaaggacacuuuuguucaaggc

SEQ ID NO: 98600 - RNA, 32 nt, Homo Sapiens
ugugcauuucacugaauauaaacuauaccuca

SEQ ID NO: 98601 - RNA, 32 nt, Homo Sapiens
cuccauucagaagugugcagucuuaaauguac

SEQ ID NO: 98602 - RNA, 32 nt, Homo Sapiens
aaguuucaccguuugucuucuuaccucauuuu

SEQ ID NO: 98603 - RNA, 32 nt, Homo Sapiens
agauuucucagaccacggagaagugacuuuug

SEQ ID NO: 98604 - RNA, 31 nt, Homo Sapiens
cuccagcccucccagcccucccgcagccuuu

SEQ ID NO: 98605 - RNA, 32 nt, Homo Sapiens
auuacuuuaugaacacaggugucugagcuaga

SEQ ID NO: 98606 - RNA, 32 nt, Homo Sapiens
ccgggcuucggugaggccgccgugggccccau

SEQ ID NO: 98607 - RNA, 32 nt, Homo Sapiens
acccucugccccuuccucucugccccaaacuc

SEQ ID NO: 98608 - RNA, 30 nt, Homo Sapiens
ugugucuauggugcugcaucuugcuguugu

SEQ ID NO: 98609 - RNA, 32 nt, Homo Sapiens
gagagcagcuggaaguuuggguuuggugguuu

SEQ ID NO: 98610 - RNA, 32 nt, Homo Sapiens
gccagaugaucaacgacgcccuuuuuccuuuu

SEQ ID NO: 98611 - RNA, 32 nt, Homo Sapiens
aucugaccaacagggggagccugcaggccgag

SEQ ID NO: 98612 - RNA, 32 nt, Homo Sapiens
accgcggcggaggacgcgcccggcgccccuga

SEQ ID NO: 98613 - RNA, 32 nt, Homo Sapiens
uggcucccucuucuuucagacuugccauguga

SEQ ID NO: 98614 - RNA, 32 nt, Homo Sapiens
agauuagcugggugugguggugugugccuaua

SEQ ID NO: 98615 - RNA, 32 nt, Homo Sapiens
cauaaagaaagauacucauuuauaguuacguu

SEQ ID NO: 98616 - RNA, 32 nt, Homo Sapiens
agauugaauauuuggagugcuuccccagaaua

SEQ ID NO: 98617 - RNA, 32 nt, Homo Sapiens
aaaacugacgcacugcacuaguuauuauuaga

SEQ ID NO: 98618 - RNA, 32 nt, Homo Sapiens
ccagccuggcccugcaggucucccaugaaggc

SEQ ID NO: 98619 - RNA, 32 nt, Homo Sapiens
ggauuuuaaaaugagccuggaauugagcccca

SEQ ID NO: 98620 - RNA, 32 nt, Homo Sapiens
ucgaaaccucaacacgaggccuaagaauuucc

SEQ ID NO: 98621 - RNA, 32 nt, Homo Sapiens
cucggccucccuaccuucuccaggcgcggguc

SEQ ID NO: 98622 - RNA, 32 nt, Homo Sapiens
gagagaggagcagaagcaggaauacaggacac

SEQ ID NO: 98623 - RNA, 30 nt, Homo Sapiens
ucgagggugcgcgugaggccggcgcagcgc

SEQ ID NO: 98624 - RNA, 32 nt, Homo Sapiens
aaucaucaaagucuaaauuuagaaucuuaaug

SEQ ID NO: 98625 - RNA, 32 nt, Homo Sapiens
uugggagacaccuauacuuaggaaaaagccuu

SEQ ID NO: 98626 - RNA, 32 nt, Homo Sapiens
uucagcuuuaucugaauuuuaauagcauaaag

SEQ ID NO: 98627 - RNA, 32 nt, Homo Sapiens
aaccuagacauguggggugcuccauggcucac

SEQ ID NO: 98628 - RNA, 32 nt, Homo Sapiens
uggcaucgcgaccacagugugaaugccuuuga

SEQ ID NO: 98629 - RNA, 32 nt, Homo Sapiens
uuccugggaacaaaagaauaacugugugaugc

SEQ ID NO: 98630 - RNA, 32 nt, Homo Sapiens
ccucgcccgcgggaagaccaggcugcgaccgc

SEQ ID NO: 98631 - RNA, 32 nt, Homo Sapiens
gcagugaggcagcaaugcugaguagguaggau

SEQ ID NO: 98632 - RNA, 32 nt, Homo Sapiens
cacacucuccucagcucucucaucuccuggaa

SEQ ID NO: 98633 - RNA, 32 nt, Homo Sapiens
gcaggaagugggaguguuuuuauuguuagcua

SEQ ID NO: 98634 - RNA, 32 nt, Homo Sapiens
caugugcggugacaccagcccccagaugccuu

SEQ ID NO: 98635 - RNA, 32 nt, Homo Sapiens
ucacagaacaaaugcaugcaaaccuugcuauc

SEQ ID NO: 98636 - RNA, 32 nt, Homo Sapiens
cacaggacuccagcuccaaguggguuuucuug

SEQ ID NO: 98637 - RNA, 32 nt, Homo Sapiens
agaggaagcggaggcgcgagcuggaggcggcg

SEQ ID NO: 98638 - RNA, 32 nt, Homo Sapiens
ucuugauuuaaaaagaaaagucuauuuuguua

SEQ ID NO: 98639 - RNA, 32 nt, Homo Sapiens
ugaucucaacugcuuugguuuucaguaaacga

SEQ ID NO: 98640 - RNA, 32 nt, Homo Sapiens
cuuucaggacccuaaaguugcagguuaguagg

SEQ ID NO: 98641 - RNA, 32 nt, Homo Sapiens
uuuuauuacccucagaagaaauucuacgcccc

SEQ ID NO: 98642 - RNA, 31 nt, Homo Sapiens
aaagagaacaugacuaacggauauucuuagu

SEQ ID NO: 98643 - RNA, 32 nt, Homo Sapiens
ugaagcuaauguuuggaaaaaauauauacuug

SEQ ID NO: 98644 - RNA, 32 nt, Homo Sapiens
gcggaggagccuggcggccacccccucuuccu

SEQ ID NO: 98645 - RNA, 32 nt, Homo Sapiens
uguuucauguaguuucuaauucuuaaaggaaa

SEQ ID NO: 98646 - RNA, 31 nt, Homo Sapiens
ucguguuugaacacucuccuggccacguggg

SEQ ID NO: 98647 - RNA, 32 nt, Homo Sapiens
ucacccuccacccucugccuugcaauacgcaa

SEQ ID NO: 98648 - RNA, 32 nt, Homo Sapiens
ucgugcaggcgcugcccuccagcuagcccuug

SEQ ID NO: 98649 - RNA, 32 nt, Homo Sapiens
auaauguuuuguucuuuuuguacuuuagaaua

SEQ ID NO: 98650 - RNA, 32 nt, Homo Sapiens
gacucaaacaauuguaauuuuugaaauaaacu

SEQ ID NO: 98651 - RNA, 32 nt, Homo Sapiens
cguuugcccuucccugcgcccagcccaagcug

SEQ ID NO: 98652 - RNA, 32 nt, Homo Sapiens
cccaguugcuaugggagggaggaugcuggcac

SEQ ID NO: 98653 - RNA, 32 nt, Homo Sapiens
ugugccuggcagcugggacgggcccccagggc

SEQ ID NO: 98654 - RNA, 32 nt, Homo Sapiens
ggucgccacgucgggggcgcggccaggacccg

SEQ ID NO: 98655 - RNA, 32 nt, Homo Sapiens
uauaucuuuagugcugacacuaacuuugucca

SEQ ID NO: 98656 - RNA, 32 nt, Homo Sapiens
ccugcuccagagcguggaccgaggaggucuuu

SEQ ID NO: 98657 - RNA, 32 nt, Homo Sapiens
ggaacauacucuacugcauauguucuagugga

SEQ ID NO: 98658 - RNA, 30 nt, Homo Sapiens
ucaguuccgucuugcuauucuuccuaaucu

SEQ ID NO: 98659 - RNA, 32 nt, Homo Sapiens
gcaaccuccgccucccggguuccagcgauucu

SEQ ID NO: 98660 - RNA, 32 nt, Homo Sapiens
ucaaaauuuuaaaaauaccaaucacaaggaua

SEQ ID NO: 98661 - RNA, 32 nt, Homo Sapiens
ugggguggcuucagaaucauggcggaaggcaa

SEQ ID NO: 98662 - RNA, 32 nt, Homo Sapiens
aucacggggaaugaggugggggugcuuauuuu

SEQ ID NO: 98663 - RNA, 32 nt, Homo Sapiens
cacagcgcgggggucauguggucgcuccucga

SEQ ID NO: 98664 - RNA, 32 nt, Homo Sapiens
aagagcaaaaacagauauuuauugaaaaugaa

SEQ ID NO: 98665 - RNA, 32 nt, Homo Sapiens
auuuuugagucuuuuucuuucucauauacaga

SEQ ID NO: 98666 - RNA, 32 nt, Homo Sapiens
caaaugggcuaggccuuuuuuauauugaagca

SEQ ID NO: 98667 - RNA, 32 nt, Homo Sapiens
guucugauuuaguuaggaggaccgcugauagg

SEQ ID NO: 98668 - RNA, 32 nt, Homo Sapiens
ucugccuucucccacaccccuuacacuaguga

SEQ ID NO: 98669 - RNA, 32 nt, Homo Sapiens
aggcagagccccagcaccucugugccccccag

SEQ ID NO: 98670 - RNA, 32 nt, Homo Sapiens
auauuuuuaaaagcuuuguaaaaauuauguca

SEQ ID NO: 98671 - RNA, 32 nt, Homo Sapiens
acauuuuccuuccuugcucuuuaagccucaag

SEQ ID NO: 98672 - RNA, 32 nt, Homo Sapiens
gacccacccacccucccucucagaccaaggug

SEQ ID NO: 98673 - RNA, 31 nt, Homo Sapiens
ugcauugacggcccugugacggccuccagcc

SEQ ID NO: 98674 - RNA, 32 nt, Homo Sapiens
uaagcagagagaaaugcauauauuuuaaaugg

SEQ ID NO: 98675 - RNA, 32 nt, Homo Sapiens
auucaguccacauauuuuauagauaaagaugg

SEQ ID NO: 98676 - RNA, 32 nt, Homo Sapiens
ucugcacuuaacaagcucccaggccgagaagc

SEQ ID NO: 98677 - RNA, 32 nt, Homo Sapiens
guuuagcacaauuuauauuuucccucucuugc

SEQ ID NO: 98678 - RNA, 32 nt, Homo Sapiens
gcgggcggaagcggccacaacccggcgaucga

SEQ ID NO: 98679 - RNA, 32 nt, Homo Sapiens
augagggaggcacaaacucugcacgggggaac

SEQ ID NO: 98680 - RNA, 32 nt, Homo Sapiens
gaucaacuggucugacuaaaauuuauuaggug

SEQ ID NO: 98681 - RNA, 32 nt, Homo Sapiens
ugugaagggugauuggagaaggacaagacugu

SEQ ID NO: 98682 - RNA, 32 nt, Homo Sapiens
guagaguuuuguuuucuggaucugucuaguag

SEQ ID NO: 98683 - RNA, 32 nt, Homo Sapiens
ggucucuuguggugcuagauguguguuuagag

SEQ ID NO: 98684 - RNA, 32 nt, Homo Sapiens
agcgcagaguccuuguuuaaaggucauugacu

SEQ ID NO: 98685 - RNA, 32 nt, Homo Sapiens
uuauaugaacaaaguacugcagaaguuaaacc

SEQ ID NO: 98686 - RNA, 32 nt, Homo Sapiens
cacgugcauggcuuggagugggugggcucuga

SEQ ID NO: 98687 - RNA, 32 nt, Homo Sapiens
gccauugauauuaaaaaauauagaccagacau

SEQ ID NO: 98688 - RNA, 32 nt, Homo Sapiens
cccucauaccugggggcggguugggggugcag

SEQ ID NO: 98689 - RNA, 32 nt, Homo Sapiens
aauucaaauauuugugcacauuuucaucguua

SEQ ID NO: 98690 - RNA, 32 nt, Homo Sapiens
ucacuuuuucccuuuaucauggacucuuauuu

SEQ ID NO: 98691 - RNA, 32 nt, Homo Sapiens
uuugaucagauacagucagauggagugccuug

SEQ ID NO: 98692 - RNA, 32 nt, Homo Sapiens
guugcaguguuuaaggccaucauuucacugcu

SEQ ID NO: 98693 - RNA, 32 nt, Homo Sapiens
cucggcucaccgcaagcuccgccucccggguu

SEQ ID NO: 98694 - RNA, 32 nt, Homo Sapiens
uacuuaaacugggauuaaaaccucauagucau

SEQ ID NO: 98695 - RNA, 32 nt, Homo Sapiens
aaaauacaaaaauuagcugaucaugguggcac

SEQ ID NO: 98696 - RNA, 32 nt, Homo Sapiens
gucauuuuuuagaagaaaaacuauuugaaggu

SEQ ID NO: 98697 - RNA, 31 nt, Homo Sapiens
ugugaugcaagguuagggaguaugagcaccg

SEQ ID NO: 98698 - RNA, 32 nt, Homo Sapiens
gaugcuacugucaguguccucagggcucuacc

SEQ ID NO: 98699 - RNA, 32 nt, Homo Sapiens
cucugcccccagcacccacccucccccauucc

SEQ ID NO: 98700 - RNA, 32 nt, Homo Sapiens
gaccgucgcgguguguuacaguucuuaaagau

SEQ ID NO: 98701 - RNA, 32 nt, Homo Sapiens
agagggccccucagagccaggugcuggccaga

SEQ ID NO: 98702 - RNA, 32 nt, Homo Sapiens
aacaauuguaaauuucuuuuagcccauuuuuc

SEQ ID NO: 98703 - RNA, 32 nt, Homo Sapiens
augcagaagcuacuguauaugcaucauggugu

SEQ ID NO: 98704 - RNA, 32 nt, Homo Sapiens
uuacaccccuucccuuuaauaccucgcuuggc

SEQ ID NO: 98705 - RNA, 32 nt, Homo Sapiens
ggccuugccuucugagagcccccguggccaag

SEQ ID NO: 98706 - RNA, 32 nt, Homo Sapiens
acagcgacgacggcagcgauggcuggggcggg

SEQ ID NO: 98707 - RNA, 32 nt, Homo Sapiens
aaacaugauauaaaaauauaugcugaauuacu

SEQ ID NO: 98708 - RNA, 32 nt, Homo Sapiens
uccugcuaaaauugacauuuagggauauuuua

SEQ ID NO: 98709 - RNA, 32 nt, Homo Sapiens
cggugugacaacaugcaccaccaguggcuucu

SEQ ID NO: 98710 - RNA, 32 nt, Homo Sapiens
aucuuuuaaucaugagccuguuuauugccauu

SEQ ID NO: 98711 - RNA, 32 nt, Homo Sapiens
ccuuuuuugcauucuaucccaugugaauuuua

SEQ ID NO: 98712 - RNA, 32 nt, Homo Sapiens
agccccacagaccaccugagacauccuccgcc

SEQ ID NO: 98713 - RNA, 32 nt, Homo Sapiens
ugugucccaguuccagccuccucccuggucuc

SEQ ID NO: 98714 - RNA, 32 nt, Homo Sapiens
ccgcugaauuucugaggccuugcuuaaagcuc

SEQ ID NO: 98715 - RNA, 32 nt, Homo Sapiens
ucugcagagacuucuaggaggaugcugugccu

SEQ ID NO: 98716 - RNA, 32 nt, Homo Sapiens
agcucccaccuccuccucccgccccugccccc

SEQ ID NO: 98717 - RNA, 32 nt, Homo Sapiens
cuccucuccgcgcggggcgggcuccgcgccac

SEQ ID NO: 98718 - RNA, 32 nt, Homo Sapiens
caugccuagagcagcuccgucucacuguugga

SEQ ID NO: 98719 - RNA, 32 nt, Homo Sapiens
caguuuggggcaacggaagucuuuuagugaug

SEQ ID NO: 98720 - RNA, 32 nt, Homo Sapiens
guuguauuggaugcccuaucuaucugcuaaag

SEQ ID NO: 98721 - RNA, 32 nt, Homo Sapiens
ccucccuccgcggagcagccagacagcgaggg

SEQ ID NO: 98722 - RNA, 32 nt, Homo Sapiens
cagaacugggagaaauacaauucugucugccc

SEQ ID NO: 98723 - RNA, 32 nt, Homo Sapiens
cuuuauuuuguguaaaaaaaccaccaaaaaca

SEQ ID NO: 98724 - RNA, 32 nt, Homo Sapiens
aagaguuguuuaauagagaaaauguacacaga

SEQ ID NO: 98725 - RNA, 32 nt, Homo Sapiens
cguagaggcagacccaugugcugcuguugcaa

SEQ ID NO: 98726 - RNA, 32 nt, Homo Sapiens
cugccaucgggucuccucuccucucccacgcg

SEQ ID NO: 98727 - RNA, 32 nt, Homo Sapiens
cuacagagaagcuggcugguaggacccgcagg

SEQ ID NO: 98728 - RNA, 32 nt, Homo Sapiens
ccucccccgagggcagacccagccagcugcua

SEQ ID NO: 98729 - RNA, 32 nt, Homo Sapiens
caucugccauggggaagugcuguuuguuaucc

SEQ ID NO: 98730 - RNA, 32 nt, Homo Sapiens
uguuuguuuuuccgcuuaauuucaaagauaaa

SEQ ID NO: 98731 - RNA, 32 nt, Homo Sapiens
aagcgcgugucugcugucugugccagugcucc

SEQ ID NO: 98732 - RNA, 32 nt, Homo Sapiens
uaaaggcccuccugguucugguugccuaaaag

SEQ ID NO: 98733 - RNA, 32 nt, Homo Sapiens
uuucuggagagggguccccuccccuuacgaac

SEQ ID NO: 98734 - RNA, 32 nt, Homo Sapiens
ggauugugcccucuccugugucuguccuccgg

SEQ ID NO: 98735 - RNA, 32 nt, Homo Sapiens
ucucucuuuuucugugaacucuuuuuuuuuuu

SEQ ID NO: 98736 - RNA, 32 nt, Homo Sapiens
ugggucuauuuuuuuauauggauuguagauca

SEQ ID NO: 98737 - RNA, 32 nt, Homo Sapiens
guuuggguguugccuuccugaaggugaccaag

SEQ ID NO: 98738 - RNA, 32 nt, Homo Sapiens
gaaaacacuacggaaaauaaaaaauaagauaa

SEQ ID NO: 98739 - RNA, 28 nt, Homo Sapiens
acgaggcgccggccgccauguggagcug

SEQ ID NO: 98740 - RNA, 32 nt, Homo Sapiens
aggacccaaagguggcccgaggcagccgggau

SEQ ID NO: 98741 - RNA, 32 nt, Homo Sapiens
cuuaacuuggaucauuucugguaaaugcuuau

SEQ ID NO: 98742 - RNA, 32 nt, Homo Sapiens
uucacuucuaaggaguugauugauuaaacuuu

SEQ ID NO: 98743 - RNA, 32 nt, Homo Sapiens
cgcccacccagcuguguguccuccgccgaggg

SEQ ID NO: 98744 - RNA, 32 nt, Homo Sapiens
ucuccgccagaccgccgccgcgccgccaucau

SEQ ID NO: 98745 - RNA, 32 nt, Homo Sapiens
uacuccccggugcccgccucgugacgugccgc

SEQ ID NO: 98746 - RNA, 32 nt, Homo Sapiens
cguucuucccucggggauugcucauggcaugg

SEQ ID NO: 98747 - RNA, 32 nt, Homo Sapiens
ggugaaugucuuccuuuucuuucucccuaacc

SEQ ID NO: 98748 - RNA, 32 nt, Homo Sapiens
cagaacugaaccugcagcagccagcacagcug

SEQ ID NO: 98749 - RNA, 32 nt, Homo Sapiens
ggagcuggguggcagaggagauaaacagccau

SEQ ID NO: 98750 - RNA, 32 nt, Homo Sapiens
gcaaagaaaaauaccuaauuguaauuaucaaa

SEQ ID NO: 98751 - RNA, 32 nt, Homo Sapiens
acgccagccaggccccagucccagccccaacc

SEQ ID NO: 98752 - RNA, 32 nt, Homo Sapiens
ucccauccugaagacuugcuuaccacaacuga

SEQ ID NO: 98753 - RNA, 32 nt, Homo Sapiens
gcccuggaaggucuguaucagcgucugucgcg

SEQ ID NO: 98754 - RNA, 32 nt, Homo Sapiens
acagccauuuccccugcagacaggccagagcg

SEQ ID NO: 98755 - RNA, 32 nt, Homo Sapiens
uaucccaagaccucacuggucuguggacagca

SEQ ID NO: 98756 - RNA, 32 nt, Homo Sapiens
cagggugcuuuggguuuugauuuuguuguugu

SEQ ID NO: 98757 - RNA, 32 nt, Homo Sapiens
cuaccagugcugauaaagucuuucucgugaga

SEQ ID NO: 98758 - RNA, 32 nt, Homo Sapiens
auguaagcugaaucuuuuuuggacuucugcug

SEQ ID NO: 98759 - RNA, 32 nt, Homo Sapiens
gaggauccugucauuaaaagacuccuggccug

SEQ ID NO: 98760 - RNA, 32 nt, Homo Sapiens
cguugggcgggggcggcgguccgagcggcugc

SEQ ID NO: 98761 - RNA, 32 nt, Homo Sapiens
guaauuucaugggaaaccuugguuuuucauua

SEQ ID NO: 98762 - RNA, 32 nt, Homo Sapiens
gcggguucuggguccugugaccggucaggcgg

SEQ ID NO: 98763 - RNA, 32 nt, Homo Sapiens
aaaaagaaagauuguacaggagugcauaauuu

SEQ ID NO: 98764 - RNA, 32 nt, Homo Sapiens
cccucgcacuccccggacaccacagcucaaag

SEQ ID NO: 98765 - RNA, 32 nt, Homo Sapiens
acucccacgcacccggggaaggacacccucac

SEQ ID NO: 98766 - RNA, 32 nt, Homo Sapiens
uuuugcauauuguaaaagcagugucacagcua

SEQ ID NO: 98767 - RNA, 32 nt, Homo Sapiens
ccaaagaccccaugggagugggagggaugaca

SEQ ID NO: 98768 - RNA, 32 nt, Homo Sapiens
acaacuaaguagccucagaucuguaaaguuga

SEQ ID NO: 98769 - RNA, 32 nt, Homo Sapiens
gaggaggucauuuuuuaauaaguuagcauccu

SEQ ID NO: 98770 - RNA, 32 nt, Homo Sapiens
aggccuggccagaugcaccagcccuuagcagg

SEQ ID NO: 98771 - RNA, 32 nt, Homo Sapiens
agggcccaacuggcuccccgaguuuguccagu

SEQ ID NO: 98772 - RNA, 32 nt, Homo Sapiens
cguuuacucuuggugacuuuggaucacuuggu

SEQ ID NO: 98773 - RNA, 32 nt, Homo Sapiens
cuuuuagagcaucuuaaugaaaacauggauga

SEQ ID NO: 98774 - RNA, 32 nt, Homo Sapiens
ugugcuuugaaauguguaaaucuuauuucuaa

SEQ ID NO: 98775 - RNA, 32 nt, Homo Sapiens
ugggagcucagccccaggguucggucgucagc

SEQ ID NO: 98776 - RNA, 32 nt, Homo Sapiens
cccgggccccucaggacuccaaggagacggug

SEQ ID NO: 98777 - RNA, 32 nt, Homo Sapiens
caaaaguauaagauucauagacuuuauauuug

SEQ ID NO: 98778 - RNA, 32 nt, Homo Sapiens
uguucugaaguaccugauacauguuaaaauua

SEQ ID NO: 98779 - RNA, 32 nt, Homo Sapiens
agagacggaguuucgcucuucuucccaugcug

SEQ ID NO: 98780 - RNA, 32 nt, Homo Sapiens
cuauguucugcuugcguuuuugaaacaggagg

SEQ ID NO: 98781 - RNA, 32 nt, Homo Sapiens
uugcccuggaacauggaggcccugcccggggc

SEQ ID NO: 98782 - RNA, 28 nt, Homo Sapiens
aaccagucagcuaccagggucucagaga

SEQ ID NO: 98783 - RNA, 32 nt, Homo Sapiens
gcuccucugaggcuccuccuccagcaucaggc

SEQ ID NO: 98784 - RNA, 32 nt, Homo Sapiens
acucuuuuacuuugguuccuguugugcucuug

SEQ ID NO: 98785 - RNA, 32 nt, Homo Sapiens
cccugacuuugcaacagaccuacugacuacug

SEQ ID NO: 98786 - RNA, 32 nt, Homo Sapiens
ucacaggaagcagcagcaguaaggacaagggg

SEQ ID NO: 98787 - RNA, 32 nt, Homo Sapiens
gggucucuacccauccuucucuggggcuccca

SEQ ID NO: 98788 - RNA, 32 nt, Homo Sapiens
ccacgaaaaauauuuauuuuguggaucuuuga

SEQ ID NO: 98789 - RNA, 32 nt, Homo Sapiens
cgaaggagggagaggaugggugcccuggcgcg

SEQ ID NO: 98790 - RNA, 32 nt, Homo Sapiens
cucugggauagaugguuaagaaguagaaaauu

SEQ ID NO: 98791 - RNA, 32 nt, Homo Sapiens
ggcaaaguucccucugacucuucccccacucc

SEQ ID NO: 98792 - RNA, 32 nt, Homo Sapiens
acuguguuauuuaaaugcuaagccaaaguauc

SEQ ID NO: 98793 - RNA, 32 nt, Homo Sapiens
agcauggagguagacaguguuuccuuaauaug

SEQ ID NO: 98794 - RNA, 32 nt, Homo Sapiens
ugguggcaguugcagaugagaaaugcuuacag

SEQ ID NO: 98795 - RNA, 32 nt, Homo Sapiens
aaucaugagagaauguguauuuguagguagua

SEQ ID NO: 98796 - RNA, 32 nt, Homo Sapiens
gccgccgggcggugcuggaggugacugugucc

SEQ ID NO: 98797 - RNA, 32 nt, Homo Sapiens
uggucuacagcaugccaguaaauaauauguag

SEQ ID NO: 98798 - RNA, 32 nt, Homo Sapiens
ugccugaggguggggcacacacaaccagggag

SEQ ID NO: 98799 - RNA, 32 nt, Homo Sapiens
ucuguggagaacucaaagccguccguggagcc

SEQ ID NO: 98800 - RNA, 32 nt, Homo Sapiens
auggauaaaaaguuguuggugugugugcaggu

SEQ ID NO: 98801 - RNA, 32 nt, Homo Sapiens
cugccauaaccaaacaccacagacuagguguc

SEQ ID NO: 98802 - RNA, 32 nt, Homo Sapiens
cacagaccgcuuuaaccucuuuauuucugucc

SEQ ID NO: 98803 - RNA, 32 nt, Homo Sapiens
ccgcagcucuccgccaaagacggacauugacu

SEQ ID NO: 98804 - RNA, 32 nt, Homo Sapiens
uuuugggggaacauuucuuuuacauuuuaaau

SEQ ID NO: 98805 - RNA, 32 nt, Homo Sapiens
ugauggccagcucugcugugugauccugaagg

SEQ ID NO: 98806 - RNA, 29 nt, Homo Sapiens
gaagacaaaaguuuaaaacuuucuaauac

SEQ ID NO: 98807 - RNA, 32 nt, Homo Sapiens
gaaaacggcccugucuccauggccagguucuu

SEQ ID NO: 98808 - RNA, 32 nt, Homo Sapiens
cccccuaugaaucuuuccuacuuguccaggug

SEQ ID NO: 98809 - RNA, 32 nt, Homo Sapiens
gugugggcgggugggagggcgcucggggcccg

SEQ ID NO: 98810 - RNA, 32 nt, Homo Sapiens
auuguuuacaaucuagaaaugaugaagcucuu

SEQ ID NO: 98811 - RNA, 32 nt, Homo Sapiens
ccccaacgcccggcccuccgggacgauaccua

SEQ ID NO: 98812 - RNA, 32 nt, Homo Sapiens
gaugcauccaugagaguggucuccaugaauca

SEQ ID NO: 98813 - RNA, 29 nt, Homo Sapiens
cucaccuagucugagugaaaagcugagaa

SEQ ID NO: 98814 - RNA, 32 nt, Homo Sapiens
aucucaaacagacaaaucauggcuuggaagaa

SEQ ID NO: 98815 - RNA, 32 nt, Homo Sapiens
aauauucuccaauaauguaaaauaauuaaggu

SEQ ID NO: 98816 - RNA, 32 nt, Homo Sapiens
aauucuguuuuaaucuguguauucuuuuucuc

SEQ ID NO: 98817 - RNA, 30 nt, Homo Sapiens
ccgggauggcggccaccgcgcugcuggagg

SEQ ID NO: 98818 - RNA, 32 nt, Homo Sapiens
cgccgccacucccaugccugcugcugggaccg

SEQ ID NO: 98819 - RNA, 32 nt, Homo Sapiens
acaccagagcauuucccagagcccacgccggg

SEQ ID NO: 98820 - RNA, 32 nt, Homo Sapiens
aucuggugucagaguucucugcuccuguuggc

SEQ ID NO: 98821 - RNA, 32 nt, Homo Sapiens
gcagguguucuucauuaccucagugagaagcc

SEQ ID NO: 98822 - RNA, 32 nt, Homo Sapiens
auuuuuaaguuccaaaggucuacuggacuaag

SEQ ID NO: 98823 - RNA, 32 nt, Homo Sapiens
ugcggagcccgcgcccccggggagagggggag

SEQ ID NO: 98824 - RNA, 32 nt, Homo Sapiens
caagaagguggcgucucgcagcuccucguuau

SEQ ID NO: 98825 - RNA, 32 nt, Homo Sapiens
agggagcccuucccuuacuaucgcagagagag

SEQ ID NO: 98826 - RNA, 32 nt, Homo Sapiens
ugucacaggcccagcucuucaccagaagcuuu

SEQ ID NO: 98827 - RNA, 27 nt, Homo Sapiens
aggcccaccuucuucccacccccggca

SEQ ID NO: 98828 - RNA, 32 nt, Homo Sapiens
uuuaauuuuuuuaauuuuuuuauuuuuuauuu

SEQ ID NO: 98829 - RNA, 32 nt, Homo Sapiens
uuugugcuccuuuuuuuuuuuaauggugcuua

SEQ ID NO: 98830 - RNA, 32 nt, Homo Sapiens
ucaaacacucuuaaauuuuucuuaaguaaugu

SEQ ID NO: 98831 - RNA, 32 nt, Homo Sapiens
aguugcaggagggagcuuuucuccuccccucu

SEQ ID NO: 98832 - RNA, 32 nt, Homo Sapiens
uuuguucgcucuuacuucugaggaagguuucc

SEQ ID NO: 98833 - RNA, 32 nt, Homo Sapiens
uuuuuuccugguuuuuguuugguuuucguuuu

SEQ ID NO: 98834 - RNA, 32 nt, Homo Sapiens
aagaaaggcagacaacagcuucugagcuuugg

SEQ ID NO: 98835 - RNA, 32 nt, Homo Sapiens
gauuugaaaaggaauguuugaauuuauauagc

SEQ ID NO: 98836 - RNA, 32 nt, Homo Sapiens
agacgcacaaaggagaucucucaguggcagcg

SEQ ID NO: 98837 - RNA, 32 nt, Homo Sapiens
agacacgugauggagucaucacaugugugggc

SEQ ID NO: 98838 - RNA, 32 nt, Homo Sapiens
uguacaaaaaauacaaaaaauuagccaggugu

SEQ ID NO: 98839 - RNA, 32 nt, Homo Sapiens
uggaaggauaguuuccuggugcgcuggauuag

SEQ ID NO: 98840 - RNA, 32 nt, Homo Sapiens
gugcucugcaggcaugcugacuguccugauug

SEQ ID NO: 98841 - RNA, 32 nt, Homo Sapiens
ggugguuggggauggagcggcagcaaggggug

SEQ ID NO: 98842 - RNA, 32 nt, Homo Sapiens
auucccgcacugacaaacgucugcccugggug

SEQ ID NO: 98843 - RNA, 32 nt, Homo Sapiens
aaaaucggcuuauuuguuuauuuuauaaaaaa

SEQ ID NO: 98844 - RNA, 32 nt, Homo Sapiens
aggggggugagcggggcccacccugcccagcu

SEQ ID NO: 98845 - RNA, 32 nt, Homo Sapiens
uuguaaaggauugaugagaaaagcagaugguu

SEQ ID NO: 98846 - RNA, 32 nt, Homo Sapiens
aucaaguguugggaaagaaaaaaggaagugga

SEQ ID NO: 98847 - RNA, 32 nt, Homo Sapiens
uucugccucaaccaugagauaggagagucucu

SEQ ID NO: 98848 - RNA, 32 nt, Homo Sapiens
cgacaaugccgggcguucccggaccggggcaa

SEQ ID NO: 98849 - RNA, 32 nt, Homo Sapiens
auuuuuuuuuaauugcagaaaaauuuauuaaa

SEQ ID NO: 98850 - RNA, 32 nt, Homo Sapiens
gaucucuuguacaacauggggauuguauugau

SEQ ID NO: 98851 - RNA, 32 nt, Homo Sapiens
uggccuggaggcucagcccacccuccagcuuu

SEQ ID NO: 98852 - RNA, 32 nt, Homo Sapiens
agugaccccuggauuguccccccucaucauua

SEQ ID NO: 98853 - RNA, 32 nt, Homo Sapiens
gcucagggaggaggcaugagagggaucguuuu

SEQ ID NO: 98854 - RNA, 32 nt, Homo Sapiens
gacauugcaaauaacacauaaauauauaauau

SEQ ID NO: 98855 - RNA, 32 nt, Homo Sapiens
aauacuuauuuuuucaaaauuuaauguguucc

SEQ ID NO: 98856 - RNA, 32 nt, Homo Sapiens
uugggagaaugaauuuuaaaaugucagugcua

SEQ ID NO: 98857 - RNA, 32 nt, Homo Sapiens
gcccucgcaggucuuggugccuccacucagcu

SEQ ID NO: 98858 - RNA, 32 nt, Homo Sapiens
ccauuuggugggugggggaggaaguuaaaguu

SEQ ID NO: 98859 - RNA, 32 nt, Homo Sapiens
auuuugcuucaaguaauuuaauuagauagcaa

SEQ ID NO: 98860 - RNA, 32 nt, Homo Sapiens
ccaucaguugauuuuucuuauuuacagauaac

SEQ ID NO: 98861 - RNA, 32 nt, Homo Sapiens
ucaaucaguaugguuacauugauaaaauagua

SEQ ID NO: 98862 - RNA, 32 nt, Homo Sapiens
ugcaacgugccgaagugucagcuccugccuca

SEQ ID NO: 98863 - RNA, 32 nt, Homo Sapiens
uuauauuugcugucagcaugauagaauaagaa

SEQ ID NO: 98864 - RNA, 32 nt, Homo Sapiens
auucccccaugucuccucccaucccucccgcc

SEQ ID NO: 98865 - RNA, 32 nt, Homo Sapiens
cuguggccgcauuuggguggcagaagcccacc

SEQ ID NO: 98866 - RNA, 32 nt, Homo Sapiens
ugugaccugacaaaaacacguaggggcaggga

SEQ ID NO: 98867 - RNA, 32 nt, Homo Sapiens
auuaugagaugaaacuuuuauaugacguguau

SEQ ID NO: 98868 - RNA, 32 nt, Homo Sapiens
caguucuaaauacuuugucuggagcacaaaac

SEQ ID NO: 98869 - RNA, 32 nt, Homo Sapiens
caucuaagauuuguuuacaaaugugcaaauua

SEQ ID NO: 98870 - RNA, 32 nt, Homo Sapiens
gugccaugccuacaauggcaagugucaagcug

SEQ ID NO: 98871 - RNA, 32 nt, Homo Sapiens
uggacacccagcugccuuuguuucugcauuaa

SEQ ID NO: 98872 - RNA, 32 nt, Homo Sapiens
ucagcacagcuggccuccagauccacaucacc

SEQ ID NO: 98873 - RNA, 32 nt, Homo Sapiens
auauaguacuagguaacacuaugguuacuggc

SEQ ID NO: 98874 - RNA, 32 nt, Homo Sapiens
gcagaauauuucugcccagaaguugcaucaag

SEQ ID NO: 98875 - RNA, 32 nt, Homo Sapiens
caauguuuccaaggaaaggaaauguuaugagc

SEQ ID NO: 98876 - RNA, 32 nt, Homo Sapiens
uacuuguuacugaguuuaaauuacuugacggu

SEQ ID NO: 98877 - RNA, 32 nt, Homo Sapiens
uggaaaaagaaaagaaaagaccacgugaccau

SEQ ID NO: 98878 - RNA, 32 nt, Homo Sapiens
aacaaacaaaaauaaacucaaugaaaggaaag

SEQ ID NO: 98879 - RNA, 31 nt, Homo Sapiens
uaacacugcaaauaaacuugguagcaaacag

SEQ ID NO: 98880 - RNA, 32 nt, Homo Sapiens
gcauacuauuuucacagagacuugcugaagga

SEQ ID NO: 98881 - RNA, 32 nt, Homo Sapiens
cggcggaggaggagguggugacuggcaggccc

SEQ ID NO: 98882 - RNA, 32 nt, Homo Sapiens
ucaacugccugccuuuuggggaaagaccaccu

SEQ ID NO: 98883 - RNA, 32 nt, Homo Sapiens
auauacagagcuuaugacuuuaauuuuucaau

SEQ ID NO: 98884 - RNA, 32 nt, Homo Sapiens
agauucgggccuggugcagggcccguguggau

SEQ ID NO: 98885 - RNA, 32 nt, Homo Sapiens
gcaggcuugggagguccugagcagaagaucca

SEQ ID NO: 98886 - RNA, 32 nt, Homo Sapiens
uuuauagcuccuguuauaauagcaaguuuaau

SEQ ID NO: 98887 - RNA, 32 nt, Homo Sapiens
ugccuagaccucugcugggcaaugccagggac

SEQ ID NO: 98888 - RNA, 31 nt, Homo Sapiens
guuuaguucauuucuuugccaauugaucuaa

SEQ ID NO: 98889 - RNA, 32 nt, Homo Sapiens
caggcgggcagugggugaggggaccaggaggu

SEQ ID NO: 98890 - RNA, 32 nt, Homo Sapiens
ucuuuacaucagaaagccaucaugacuuucac

SEQ ID NO: 98891 - RNA, 32 nt, Homo Sapiens
aaacccgugcgcgugcucggcuuugagcgauc

SEQ ID NO: 98892 - RNA, 31 nt, Homo Sapiens
ucugaucagcgcaggggccagccagggacau

SEQ ID NO: 98893 - RNA, 32 nt, Homo Sapiens
uuaaaauggcuuuuuguuguuuguuuggaagg

SEQ ID NO: 98894 - RNA, 32 nt, Homo Sapiens
acauuccacaugccaagaggaugcaggauuuc

SEQ ID NO: 98895 - RNA, 32 nt, Homo Sapiens
ccggcgggggcgcggcuuggacugaggagcgg

SEQ ID NO: 98896 - RNA, 32 nt, Homo Sapiens
aucuagccgccucuccugcccugccuuccucu

SEQ ID NO: 98897 - RNA, 32 nt, Homo Sapiens
ucacgugguagaagaggaaggcagcucuccgg

SEQ ID NO: 98898 - RNA, 32 nt, Homo Sapiens
cagcacccugaaacgacagaaacaagcaaucc

SEQ ID NO: 98899 - RNA, 32 nt, Homo Sapiens
ggaucccgccaccagcagucagcagacagcuc

SEQ ID NO: 98900 - RNA, 32 nt, Homo Sapiens
ugcgcugcgcagggcgcuaggaggcauugucg

SEQ ID NO: 98901 - RNA, 32 nt, Homo Sapiens
ccuggcacagcccaggcauagacgagcuggcg

SEQ ID NO: 98902 - RNA, 32 nt, Homo Sapiens
gggcugcguggcaauuuccacaccugugcacc

SEQ ID NO: 98903 - RNA, 32 nt, Homo Sapiens
guauuaaugagacugcuuugcauaaaacuggg

SEQ ID NO: 98904 - RNA, 29 nt, Homo Sapiens
ccacguucuaaauaauauuuagcucaacu

SEQ ID NO: 98905 - RNA, 32 nt, Homo Sapiens
uagaagugaaaguaauuucacaauuaaagaaa

SEQ ID NO: 98906 - RNA, 32 nt, Homo Sapiens
aacacaacagcagcccagacaaugagaugcaa

SEQ ID NO: 98907 - RNA, 28 nt, Homo Sapiens
cuagagaaagauugcccuugaacuccau

SEQ ID NO: 98908 - RNA, 32 nt, Homo Sapiens
uaaaaacugauacuuaaaauaaauggcuguua

SEQ ID NO: 98909 - RNA, 32 nt, Homo Sapiens
ucacauuccugacccucacuuuucucaucugu

SEQ ID NO: 98910 - RNA, 32 nt, Homo Sapiens
uagcugagggaaguucuuugccugcugucaga

SEQ ID NO: 98911 - RNA, 32 nt, Homo Sapiens
uuaacuuaauaaaacguuccagcagcaaaaaa

SEQ ID NO: 98912 - RNA, 32 nt, Homo Sapiens
auauacaacagaaaacacuuugaguugaaagu

SEQ ID NO: 98913 - RNA, 31 nt, Homo Sapiens
augcaagacgcugcacgaccccgcgcccgcu

SEQ ID NO: 98914 - RNA, 32 nt, Homo Sapiens
gcugacuucauuagaugaggagcguuucuauc

SEQ ID NO: 98915 - RNA, 32 nt, Homo Sapiens
aguggcuaaaagacguugagagagacagugca

SEQ ID NO: 98916 - RNA, 32 nt, Homo Sapiens
ccaaauggcagaggcagggucgcugguccucc

SEQ ID NO: 98917 - RNA, 32 nt, Homo Sapiens
aauauuuuaaauaagauaauaugugagguguc

SEQ ID NO: 98918 - RNA, 32 nt, Homo Sapiens
cagccagccuucccuccacccaggccagcagc

SEQ ID NO: 98919 - RNA, 32 nt, Homo Sapiens
cccuccucucaggcaagcugcagaugcccuuu

SEQ ID NO: 98920 - RNA, 32 nt, Homo Sapiens
uguuucagauggaaaaauauaaacuauuuuuu

SEQ ID NO: 98921 - RNA, 32 nt, Homo Sapiens
ugagauuagcuaaaguuaaguuguuggaagaa

SEQ ID NO: 98922 - RNA, 32 nt, Homo Sapiens
uggaaaacccuguaccccuccuccucaaucug

SEQ ID NO: 98923 - RNA, 32 nt, Homo Sapiens
aguaggggaccgcgggcuccgcggcagaaaug

SEQ ID NO: 98924 - RNA, 32 nt, Homo Sapiens
cuaugcccugcagagcaauaacacuauauuua

SEQ ID NO: 98925 - RNA, 32 nt, Homo Sapiens
guaaaauaggcaccauugcuuaaaagaaaguu

SEQ ID NO: 98926 - RNA, 32 nt, Homo Sapiens
uguugggccucuuuucucugguagacuuuaaa

SEQ ID NO: 98927 - RNA, 32 nt, Homo Sapiens
agucuucugggguggggacccguccaaggaca

SEQ ID NO: 98928 - RNA, 32 nt, Homo Sapiens
uuaucugaccauccuuuuuuacugugacucuu

SEQ ID NO: 98929 - RNA, 32 nt, Homo Sapiens
ugcaggauuucugaugacauugaaagacuuua

SEQ ID NO: 98930 - RNA, 32 nt, Homo Sapiens
cuccuccccccuccucugaaacagcugccuua

SEQ ID NO: 98931 - RNA, 32 nt, Homo Sapiens
cacccggggucugcuggucuccgcggauguca

SEQ ID NO: 98932 - RNA, 32 nt, Homo Sapiens
ugaaaaaagucuccuaaaauugugaaacuagu

SEQ ID NO: 98933 - RNA, 32 nt, Homo Sapiens
aggcccaggaggagggggaauaaagaaggugg

SEQ ID NO: 98934 - RNA, 32 nt, Homo Sapiens
guugggaccugagggacagaggaucggaaugg

SEQ ID NO: 98935 - RNA, 32 nt, Homo Sapiens
ucagcgcuuauacugaaguauuagauuaaagc

SEQ ID NO: 98936 - RNA, 32 nt, Homo Sapiens
ggguacaggggcugcgcagaguuuguccccga

SEQ ID NO: 98937 - RNA, 32 nt, Homo Sapiens
ugugaccugcacuuauacauccagauggccug

SEQ ID NO: 98938 - RNA, 32 nt, Homo Sapiens
aggcuguuugcugacaggaggaggaaguagug

SEQ ID NO: 98939 - RNA, 32 nt, Homo Sapiens
uccucguccuccggggccccagcgucgugggc

SEQ ID NO: 98940 - RNA, 32 nt, Homo Sapiens
gcuaaugucuuacuuuuguuucuuuugcuuuu

SEQ ID NO: 98941 - RNA, 32 nt, Homo Sapiens
agaagggcacuugggcgggcugcuucagagag

SEQ ID NO: 98942 - RNA, 32 nt, Homo Sapiens
uugacaucaaaggagcuaauauuauucaguua

SEQ ID NO: 98943 - RNA, 32 nt, Homo Sapiens
agauggaggugaugcaccuugaugaugcauaa

SEQ ID NO: 98944 - RNA, 32 nt, Homo Sapiens
auauaucauuuucucacaugccagauagguau

SEQ ID NO: 98945 - RNA, 32 nt, Homo Sapiens
gcaccccgggagcugacuggcuccgccauucg

SEQ ID NO: 98946 - RNA, 32 nt, Homo Sapiens
cuguguggaauucagaggaaaacccagauuca

SEQ ID NO: 98947 - RNA, 32 nt, Homo Sapiens
uagggccaauaagagaucacauagagcauguu

SEQ ID NO: 98948 - RNA, 32 nt, Homo Sapiens
gccuuucaagcauuuuaaauaugacaauauuu

SEQ ID NO: 98949 - RNA, 32 nt, Homo Sapiens
augguggacugucguucuccacagcucccuuc

SEQ ID NO: 98950 - RNA, 32 nt, Homo Sapiens
cggauuuccgccuccggguggcgcuucccggu

SEQ ID NO: 98951 - RNA, 32 nt, Homo Sapiens
gccgcgggcuucagcgcuccccggcucccucg

SEQ ID NO: 98952 - RNA, 32 nt, Homo Sapiens
gaacaaguacccuuauuuucagagcaucaugu

SEQ ID NO: 98953 - RNA, 32 nt, Homo Sapiens
acugccaaaaauuuauacugucaaucuuucuc

SEQ ID NO: 98954 - RNA, 32 nt, Homo Sapiens
cuggugauccugaaaugauggcgugugggaga

SEQ ID NO: 98955 - RNA, 32 nt, Homo Sapiens
acuuugaagaccaaauaauaacaaagcauuac

SEQ ID NO: 98956 - RNA, 32 nt, Homo Sapiens
ggagaagucacaaaaccuauuucugucucaga

SEQ ID NO: 98957 - RNA, 32 nt, Homo Sapiens
ggagcguguggcgggggugugccggggcguga

SEQ ID NO: 98958 - RNA, 32 nt, Homo Sapiens
cuuaagcuuggagugggaggagaggggguggg

SEQ ID NO: 98959 - RNA, 32 nt, Homo Sapiens
cgugaagucugcuuaccaaaacauaagacgac

SEQ ID NO: 98960 - RNA, 32 nt, Homo Sapiens
agggccaggcuaugcuugggacuggccugagg

SEQ ID NO: 98961 - RNA, 32 nt, Homo Sapiens
ucacugaagaaccaguuagaaguagaaacagc

SEQ ID NO: 98962 - RNA, 32 nt, Homo Sapiens
aacuuaaaucucacucuaggaguucaguggag

SEQ ID NO: 98963 - RNA, 32 nt, Homo Sapiens
uauucuccuuauugguggaaauccagcugacu

SEQ ID NO: 98964 - RNA, 32 nt, Homo Sapiens
gccacuggcccccaacaugaccacacgugggu

SEQ ID NO: 98965 - RNA, 32 nt, Homo Sapiens
cugaggaaagcagaggagaggaacuccauuau

SEQ ID NO: 98966 - RNA, 32 nt, Homo Sapiens
agggcgaaauuccagucugagcccugagcagu

SEQ ID NO: 98967 - RNA, 32 nt, Homo Sapiens
aggccacucccucuccagcccccgauguggac

SEQ ID NO: 98968 - RNA, 30 nt, Homo Sapiens
ccccucaccacugccacccaacuuuacaac

SEQ ID NO: 98969 - RNA, 32 nt, Homo Sapiens
gagcccggccccaccucccugcgcccuugagg

SEQ ID NO: 98970 - RNA, 32 nt, Homo Sapiens
agcaguguuguacuugugaauuuugugauauu

SEQ ID NO: 98971 - RNA, 32 nt, Homo Sapiens
cuguacuauguauuaugaauccauuccuuuga

SEQ ID NO: 98972 - RNA, 32 nt, Homo Sapiens
ucugcaaguuuccagaaguaagagggaaaaug

SEQ ID NO: 98973 - RNA, 32 nt, Homo Sapiens
auuauuacuuuagggcuugauucucuugggga

SEQ ID NO: 98974 - RNA, 32 nt, Homo Sapiens
ugagguauuaaaccucacagaggaaugccaug

SEQ ID NO: 98975 - RNA, 32 nt, Homo Sapiens
uaagggaacuguagggcccagauucuggaggu

SEQ ID NO: 98976 - RNA, 32 nt, Homo Sapiens
ugcacuguacacaaccuguacaacuaaaccac

SEQ ID NO: 98977 - RNA, 32 nt, Homo Sapiens
gggaugugggaaacagaagaaaaguugaggaa

SEQ ID NO: 98978 - RNA, 32 nt, Homo Sapiens
cugaucuaggccuucccagaggaggcgagcag

SEQ ID NO: 98979 - RNA, 32 nt, Homo Sapiens
uaacuggguugauuuuaaguaaaauuauuugu

SEQ ID NO: 98980 - RNA, 32 nt, Homo Sapiens
aguugguguacaaacaugccuuaauauuguca

SEQ ID NO: 98981 - RNA, 32 nt, Homo Sapiens
cccaccccucgacuuugaaaucugagcaaaac

SEQ ID NO: 98982 - RNA, 32 nt, Homo Sapiens
uugcuagugauugugguggggugugucuggau

SEQ ID NO: 98983 - RNA, 32 nt, Homo Sapiens
auggaaguaagaaugcaaaauauuaauaggga

SEQ ID NO: 98984 - RNA, 32 nt, Homo Sapiens
acguuuaguggagcucuuucuguugaaaagag

SEQ ID NO: 98985 - RNA, 32 nt, Homo Sapiens
uuguauauuucuguguauuacauuuaauccug

SEQ ID NO: 98986 - RNA, 32 nt, Homo Sapiens
gagaugggcagggccuaggggcugggagcugc

SEQ ID NO: 98987 - RNA, 32 nt, Homo Sapiens
cccgccgccgccgcugccgagcgccgccuuug

SEQ ID NO: 98988 - RNA, 32 nt, Homo Sapiens
gauguauuacauuauuugcuuuucucaacugc

SEQ ID NO: 98989 - RNA, 32 nt, Homo Sapiens
cggaacggcugcggccgggcaccccgggaguu

SEQ ID NO: 98990 - RNA, 32 nt, Homo Sapiens
gggaacuucgacccuccucgguucaggacucg

SEQ ID NO: 98991 - RNA, 32 nt, Homo Sapiens
ugauaauagaaagcauuaaagcuguuuugcua

SEQ ID NO: 98992 - RNA, 32 nt, Homo Sapiens
aggcgugcgcuguccugggcggcagcgacucc

SEQ ID NO: 98993 - RNA, 32 nt, Homo Sapiens
gggcccuugagccuggcuggaguagguggaau

SEQ ID NO: 98994 - RNA, 32 nt, Homo Sapiens
cccagugcuugacuucucggcccggaagagaa

SEQ ID NO: 98995 - RNA, 32 nt, Homo Sapiens
cagauguuucaugugcagaaagaaaguugguc

SEQ ID NO: 98996 - RNA, 32 nt, Homo Sapiens
uggacaaagcaucgaagcagaaaaugagccug

SEQ ID NO: 98997 - RNA, 32 nt, Homo Sapiens
gguccuagagugccuccaggguggucuuccug

SEQ ID NO: 98998 - RNA, 32 nt, Homo Sapiens
gacacgcaaagaaaccacagcacauacuucuu

SEQ ID NO: 98999 - RNA, 32 nt, Homo Sapiens
ucuuugaaaaaauuauucaggcuagguaaggu

SEQ ID NO: 99000 - RNA, 32 nt, Homo Sapiens
agaucaagccauugcacucuagcccggacgac

SEQ ID NO: 99001 - RNA, 32 nt, Homo Sapiens
gcgcagaggcaucugauguguaggaaaguaau

SEQ ID NO: 99002 - RNA, 32 nt, Homo Sapiens
aaauaguuuguaaauuuucaguuucuacacac

SEQ ID NO: 99003 - RNA, 32 nt, Homo Sapiens
uaagagaaauuuccucaaguuuccaugugcgg

SEQ ID NO: 99004 - RNA, 32 nt, Homo Sapiens
uccgcgcccccucccucccccuccccccuaga

SEQ ID NO: 99005 - RNA, 32 nt, Homo Sapiens
auauucaccaaaacuuagaauuuugcaaaugc

SEQ ID NO: 99006 - RNA, 32 nt, Homo Sapiens
cugccggcgggcgggcggacggcacagaggga

SEQ ID NO: 99007 - RNA, 32 nt, Homo Sapiens
gggucagagagcagggaguggcugggaaggua

SEQ ID NO: 99008 - RNA, 32 nt, Homo Sapiens
gcgacgccgcagaagacaacuaccuguagcca

SEQ ID NO: 99009 - RNA, 32 nt, Homo Sapiens
gauggaagauggaaacaaaaucuauuauuaug

SEQ ID NO: 99010 - RNA, 32 nt, Homo Sapiens
gagaugagaggcuggggguacacaaucagguu

SEQ ID NO: 99011 - RNA, 32 nt, Homo Sapiens
ccagcaacuccugacagaaagcuccucccacc

SEQ ID NO: 99012 - RNA, 32 nt, Homo Sapiens
agcagggcucccucauguagccccgccuuccc

SEQ ID NO: 99013 - RNA, 32 nt, Homo Sapiens
caucuauuuuuggcagucugaauuuuuaaaac

SEQ ID NO: 99014 - RNA, 32 nt, Homo Sapiens
cugacuuggccuggggcccaggaggcaggugu

SEQ ID NO: 99015 - RNA, 32 nt, Homo Sapiens
cccuggggccccuccgccccgcaaacgcucgg

SEQ ID NO: 99016 - RNA, 32 nt, Homo Sapiens
gccucagcaaaagccacaaggucugagcggcc

SEQ ID NO: 99017 - RNA, 32 nt, Homo Sapiens
uggaggaggguggggcuggccggggacaggag

SEQ ID NO: 99018 - RNA, 32 nt, Homo Sapiens
acugaguaccuaccaugugccaaauacuaugc

SEQ ID NO: 99019 - RNA, 32 nt, Homo Sapiens
ucacagaauuuugaacuggaaaacagaaacaa

SEQ ID NO: 99020 - RNA, 32 nt, Homo Sapiens
uaaaagggguuguuaggcuacugcaaauauaa

SEQ ID NO: 99021 - RNA, 30 nt, Homo Sapiens
gagaacugacaaaagggggaaaugcucuga

SEQ ID NO: 99022 - RNA, 32 nt, Homo Sapiens
cauaugcagcuagagcagacccaggaaagcuu

SEQ ID NO: 99023 - RNA, 32 nt, Homo Sapiens
aagguggagaagaaucacgaaaaggagaaguc

SEQ ID NO: 99024 - RNA, 32 nt, Homo Sapiens
guaaaagccagacuuggcagggaccccucuuu

SEQ ID NO: 99025 - RNA, 32 nt, Homo Sapiens
gcggcgucuggggagcacccaggcagcaagac

SEQ ID NO: 99026 - RNA, 32 nt, Homo Sapiens
uaauucuuggccauguucucucuucucuaggu

SEQ ID NO: 99027 - RNA, 32 nt, Homo Sapiens
ccucaggugucugcccaccucuaccucccaaa

SEQ ID NO: 99028 - RNA, 32 nt, Homo Sapiens
gaaaucagcacuaguuuuaaaugacaaaauug

SEQ ID NO: 99029 - RNA, 32 nt, Homo Sapiens
gaggacccggcgggcggccucgcgggucagga

SEQ ID NO: 99030 - RNA, 32 nt, Homo Sapiens
uuccuggaggucggcagacaugccaaccuugg

SEQ ID NO: 99031 - RNA, 32 nt, Homo Sapiens
uuucuuuccuucccaagaaacugaggaauguu

SEQ ID NO: 99032 - RNA, 32 nt, Homo Sapiens
ggcgggcacauggagagcggcgugccugcugc

SEQ ID NO: 99033 - RNA, 32 nt, Homo Sapiens
ggaggccgcgcgcgaugcggcucgcggaggag

SEQ ID NO: 99034 - RNA, 32 nt, Homo Sapiens
ggugcccuuggcaggaccgugcaggcagcucc

SEQ ID NO: 99035 - RNA, 32 nt, Homo Sapiens
cccgcuccgcgguggcgcucuuggagguggug

SEQ ID NO: 99036 - RNA, 32 nt, Homo Sapiens
aaacaagauuaccauugcuugaaaucuaacuc

SEQ ID NO: 99037 - RNA, 32 nt, Homo Sapiens
ucccugugaaaacaacuggaaucuuaaaaaag

SEQ ID NO: 99038 - RNA, 32 nt, Homo Sapiens
aguccugcucuccgcacgccaccuuaggcccg

SEQ ID NO: 99039 - RNA, 32 nt, Homo Sapiens
cucccucuggcaugcaugcugcugguaggaga

SEQ ID NO: 99040 - RNA, 32 nt, Homo Sapiens
uaaugcagcgggaagcuaauucuugaaauaug

SEQ ID NO: 99041 - RNA, 32 nt, Homo Sapiens
acgggucucggacacgcgcuccgugccuccuu

SEQ ID NO: 99042 - RNA, 32 nt, Homo Sapiens
ccccucaccaaggaugacucagcacugccgcu

SEQ ID NO: 99043 - RNA, 31 nt, Homo Sapiens
agggcgcggcgcagccgagcagcggcucuuu

SEQ ID NO: 99044 - RNA, 32 nt, Homo Sapiens
uaagaagaaaagacacuugcaaaggaagagcu

SEQ ID NO: 99045 - RNA, 32 nt, Homo Sapiens
ucuggcuauaugguggggcgcgggcggugucg

SEQ ID NO: 99046 - RNA, 32 nt, Homo Sapiens
ugugccguguggaccggcggcgucuaccuggu

SEQ ID NO: 99047 - RNA, 28 nt, Homo Sapiens
uaaaccaggccucccaggauggcgagcu

SEQ ID NO: 99048 - RNA, 32 nt, Homo Sapiens
uagcaggcgccccagcgccggagcagggucag

SEQ ID NO: 99049 - RNA, 32 nt, Homo Sapiens
caauugggagaaauuuuauaauuuuuuauugg

SEQ ID NO: 99050 - RNA, 32 nt, Homo Sapiens
accacaggccucgaagcagggugcuggugggu

SEQ ID NO: 99051 - RNA, 32 nt, Homo Sapiens
cuggucuugugucacgucuccuccugccugaa

SEQ ID NO: 99052 - RNA, 32 nt, Homo Sapiens
gugauauuuuuaauuucuuuuuuaaaaaauua

SEQ ID NO: 99053 - RNA, 32 nt, Homo Sapiens
agaaggaaaugaauuucucuacagauguccca

SEQ ID NO: 99054 - RNA, 30 nt, Homo Sapiens
accgggugcuggcgggcggguccgcuggcu

SEQ ID NO: 99055 - RNA, 32 nt, Homo Sapiens
ugauaaaaaucgaauucuugucuuuuuagugg

SEQ ID NO: 99056 - RNA, 32 nt, Homo Sapiens
uuugccucagaaugaauuguacucugagucuc

SEQ ID NO: 99057 - RNA, 32 nt, Homo Sapiens
cggagagggggcuccgggagcggcgggaccac

SEQ ID NO: 99058 - RNA, 32 nt, Homo Sapiens
cagugcugcauccagcuggggaguacagcccc

SEQ ID NO: 99059 - RNA, 32 nt, Homo Sapiens
acggcucgucaugggggcgcggugggugcugu

SEQ ID NO: 99060 - RNA, 32 nt, Homo Sapiens
ugcauggcgcgguagucccccgaguggagguc

SEQ ID NO: 99061 - RNA, 32 nt, Homo Sapiens
uggguaaugcguuguuguuguuuucuuucucu

SEQ ID NO: 99062 - RNA, 32 nt, Homo Sapiens
ggaucuacuagaugcauuauacuccauaccug

SEQ ID NO: 99063 - RNA, 31 nt, Homo Sapiens
caucgcucacggacggaacugggguccagag

SEQ ID NO: 99064 - RNA, 32 nt, Homo Sapiens
acaguuuuuuuauguagcacaaaauaggugua

SEQ ID NO: 99065 - RNA, 32 nt, Homo Sapiens
gugacacuuaccuccacccccauccagcaccc

SEQ ID NO: 99066 - RNA, 32 nt, Homo Sapiens
guacaaacuauuugugugauuaauuuuuaaaa

SEQ ID NO: 99067 - RNA, 32 nt, Homo Sapiens
cuucauauuuaguacuuuuacaauuuuaacag

SEQ ID NO: 99068 - RNA, 32 nt, Homo Sapiens
gaucuauuguacuucaugaugacuccaguaaa

SEQ ID NO: 99069 - RNA, 32 nt, Homo Sapiens
uuccauuugacuguuugcauugagauugcaau

SEQ ID NO: 99070 - RNA, 32 nt, Homo Sapiens
ccgcccgcacgucccaggaugcgcugcgauua

SEQ ID NO: 99071 - RNA, 32 nt, Homo Sapiens
ggccaggcgugguggcucaugccuguaguccc

SEQ ID NO: 99072 - RNA, 32 nt, Homo Sapiens
ucgcucguggagccgcacacacgucucccacc

SEQ ID NO: 99073 - RNA, 27 nt, Homo Sapiens
ucuugcucccucuucagcccgcugagg

SEQ ID NO: 99074 - RNA, 32 nt, Homo Sapiens
acagaccgugggccccucccagcccucagacc

SEQ ID NO: 99075 - RNA, 32 nt, Homo Sapiens
gcaucuccacccaaccagcagaaaaccggucu

SEQ ID NO: 99076 - RNA, 32 nt, Homo Sapiens
guuugcuuaaugcuuuuguuaugaaucaauua

SEQ ID NO: 99077 - RNA, 32 nt, Homo Sapiens
uggggggcggcggacgcgggcuccucugccug

SEQ ID NO: 99078 - RNA, 32 nt, Homo Sapiens
uuuggaacacuuuuuaaaauguaucuguuuuu

SEQ ID NO: 99079 - RNA, 32 nt, Homo Sapiens
agagauauaauagauaacuuuuucuugucuuu

SEQ ID NO: 99080 - RNA, 32 nt, Homo Sapiens
uacaccgccgccugggucacguggcccggacg

SEQ ID NO: 99081 - RNA, 32 nt, Homo Sapiens
uggcaacgcugugcccggggccuugcacgcgg

SEQ ID NO: 99082 - RNA, 32 nt, Homo Sapiens
uccaggcccggggcuggugcuggggaguuggc

SEQ ID NO: 99083 - RNA, 32 nt, Homo Sapiens
ccuccccucaggcuuuccagucaccagggaca

SEQ ID NO: 99084 - RNA, 28 nt, Homo Sapiens
cagggcaagguuuaaauguguuucuuau

SEQ ID NO: 99085 - RNA, 32 nt, Homo Sapiens
cuacuggaguggucccugggcucuggggcuga

SEQ ID NO: 99086 - RNA, 32 nt, Homo Sapiens
gcuguauuuugucuucuuucugauuuuucccu

SEQ ID NO: 99087 - RNA, 32 nt, Homo Sapiens
agaacuugaauuuuaaaugguuugaauacuaa

SEQ ID NO: 99088 - RNA, 32 nt, Homo Sapiens
ggguggcccauggaccugcccgagggcccggu

SEQ ID NO: 99089 - RNA, 32 nt, Homo Sapiens
gagcagagggcgggugcgagggcgcgagggaa

SEQ ID NO: 99090 - RNA, 32 nt, Homo Sapiens
cuuggaaccaucugaggucaccaccuguuaag

SEQ ID NO: 99091 - RNA, 32 nt, Homo Sapiens
cccacccccguccuaggcucccauccuuucca

SEQ ID NO: 99092 - RNA, 32 nt, Homo Sapiens
acuggauggcugagcuggcccggggcugcccc

SEQ ID NO: 99093 - RNA, 32 nt, Homo Sapiens
gucccugccaccuagagcugcuagcauaguau

SEQ ID NO: 99094 - RNA, 31 nt, Homo Sapiens
agauacccagccuggcccugaguuauuacag

SEQ ID NO: 99095 - RNA, 32 nt, Homo Sapiens
uugauguuuccagaugguaacaugggagaggg

SEQ ID NO: 99096 - RNA, 32 nt, Homo Sapiens
cuuucccaguguucaagacuggggaggaagac

SEQ ID NO: 99097 - RNA, 32 nt, Homo Sapiens
aacugaggcacacagcgguuaagggacuuacg

SEQ ID NO: 99098 - RNA, 32 nt, Homo Sapiens
uuuugcaaguguauauaaaugugaaaauggag

SEQ ID NO: 99099 - RNA, 32 nt, Homo Sapiens
caccuguaaucccagcacuuugggaggcuggg

SEQ ID NO: 99100 - RNA, 32 nt, Homo Sapiens
gaaguucucaaucccagcaguucuuuguaguc

SEQ ID NO: 99101 - RNA, 32 nt, Homo Sapiens
gccuccaucucuaauaaauggaaggccccaag

SEQ ID NO: 99102 - RNA, 32 nt, Homo Sapiens
acacguaccucagagacuuugguaucagucac

SEQ ID NO: 99103 - RNA, 32 nt, Homo Sapiens
gccuuuaaaaacaaacagaacaaaaacaaaac

SEQ ID NO: 99104 - RNA, 32 nt, Homo Sapiens
aaccaacucguggucagacuccagcaaaugac

SEQ ID NO: 99105 - RNA, 32 nt, Homo Sapiens
ccaagagccaucuggaguccaugcuagucauc

SEQ ID NO: 99106 - RNA, 32 nt, Homo Sapiens
auuggggguuggauuugaagacuuuuaaguuu

SEQ ID NO: 99107 - RNA, 32 nt, Homo Sapiens
gccaccagggugcaugggugcaugucugcuca

SEQ ID NO: 99108 - RNA, 30 nt, Homo Sapiens
uuuauauuaugaguuguccaucuuaaagaa

SEQ ID NO: 99109 - RNA, 32 nt, Homo Sapiens
ucuccccauauaaucacuccuguccuaauucu

SEQ ID NO: 99110 - RNA, 32 nt, Homo Sapiens
ccaggucuuaggaugugucuuggggugggcac

SEQ ID NO: 99111 - RNA, 32 nt, Homo Sapiens
guguugggcuguuaacugcugcaccucauugc

SEQ ID NO: 99112 - RNA, 32 nt, Homo Sapiens
uaccacacuccagccugggugacagagcgaga

SEQ ID NO: 99113 - RNA, 32 nt, Homo Sapiens
uacugcacuccagccugggugacagaguaaga

SEQ ID NO: 99114 - RNA, 32 nt, Homo Sapiens
gagacagugggcugcacccacccaggagugug

SEQ ID NO: 99115 - RNA, 32 nt, Homo Sapiens
uguaccaaagaaugcagaugugcuguuuuccu

SEQ ID NO: 99116 - RNA, 32 nt, Homo Sapiens
gcgcgcagcgggggcgcggguggcgcgcgugu

SEQ ID NO: 99117 - RNA, 32 nt, Homo Sapiens
ucauugcagccucggcguuuguagaagaggag

SEQ ID NO: 99118 - RNA, 32 nt, Homo Sapiens
ccugggcuaaacaaaagcuugaacuugccacu

SEQ ID NO: 99119 - RNA, 32 nt, Homo Sapiens
uuggggaaaugguggugguuauuuggucuuua

SEQ ID NO: 99120 - RNA, 32 nt, Homo Sapiens
auuccaggcucccagacaccucaagcccuauu

SEQ ID NO: 99121 - RNA, 31 nt, Homo Sapiens
ggggacccaaccaccaccgaaguacccuagg

SEQ ID NO: 99122 - RNA, 32 nt, Homo Sapiens
guucccccuuucugccagcaguucugguucuu

SEQ ID NO: 99123 - RNA, 32 nt, Homo Sapiens
uaaaagacagcagggacaagauacauaugagg

SEQ ID NO: 99124 - RNA, 32 nt, Homo Sapiens
auuuucagcauuaaaaugcuuccaaaagauca

SEQ ID NO: 99125 - RNA, 32 nt, Homo Sapiens
ggucccgggggagagguggacagacaccuccc

SEQ ID NO: 99126 - RNA, 32 nt, Homo Sapiens
cuucccuccucaagcaggcacccaggcuuuag

SEQ ID NO: 99127 - RNA, 32 nt, Homo Sapiens
ucaagccauaccaaaaucagggucacaugugg

SEQ ID NO: 99128 - RNA, 32 nt, Homo Sapiens
ccacaggguaagaauugucacccacgaugcaa

SEQ ID NO: 99129 - RNA, 32 nt, Homo Sapiens
uggaguugaccuggagcgccaggaaaggucag

SEQ ID NO: 99130 - RNA, 32 nt, Homo Sapiens
gcacaguuugguccguuagaauuaaaaguuga

SEQ ID NO: 99131 - RNA, 32 nt, Homo Sapiens
gccccaccguggagauggcggcuggagcagug

SEQ ID NO: 99132 - RNA, 32 nt, Homo Sapiens
uauuuuuuucuuucuucagaguacucuguaca

SEQ ID NO: 99133 - RNA, 32 nt, Homo Sapiens
acuccccggacgccgcccgccgugccaugggg

SEQ ID NO: 99134 - RNA, 32 nt, Homo Sapiens
acuucuuugacaaaguaaauuacuuuuuugau

SEQ ID NO: 99135 - RNA, 32 nt, Homo Sapiens
agcauuucuugucucccuguggcuuguuccac

SEQ ID NO: 99136 - RNA, 32 nt, Homo Sapiens
caauaucuccuuguuauugugaggauaaaaua

SEQ ID NO: 99137 - RNA, 32 nt, Homo Sapiens
ccccacaucugccagcggggccccacgcacac

SEQ ID NO: 99138 - RNA, 31 nt, Homo Sapiens
uccaacuuauugcuucuucaagaucgacuug

SEQ ID NO: 99139 - RNA, 32 nt, Homo Sapiens
caauucuucuaaaauauuaucuacccaaggac

SEQ ID NO: 99140 - RNA, 32 nt, Homo Sapiens
aggauuugaaagagcauugacuuugccacuua

SEQ ID NO: 99141 - RNA, 32 nt, Homo Sapiens
acccuccagcugucggcaguacucaguggaag

SEQ ID NO: 99142 - RNA, 32 nt, Homo Sapiens
gaggagaguagaaaccacagcucuuaguagua

SEQ ID NO: 99143 - RNA, 32 nt, Homo Sapiens
guaucucacacucaugcauuguccucuuuuua

SEQ ID NO: 99144 - RNA, 32 nt, Homo Sapiens
ggcauugugugggcauguggccaggcagaugg

SEQ ID NO: 99145 - RNA, 32 nt, Homo Sapiens
ucugucauuauguuacugucuuuuuuaaucau

SEQ ID NO: 99146 - RNA, 32 nt, Homo Sapiens
ucccauuuucccuugcugggaguagccacaug

SEQ ID NO: 99147 - RNA, 32 nt, Homo Sapiens
aaacggaaauugaaaaugaccugguaucuugc

SEQ ID NO: 99148 - RNA, 32 nt, Homo Sapiens
uuaaaacugugaaaaauagcuaugaaauuaua

SEQ ID NO: 99149 - RNA, 32 nt, Homo Sapiens
cggugguaucggcggcagcugugaggggguuc

SEQ ID NO: 99150 - RNA, 32 nt, Homo Sapiens
guccgcggacgcgugggcgcgcgggagcuggg

SEQ ID NO: 99151 - RNA, 32 nt, Homo Sapiens
ggguggggcagcaugcacaccccucuggcagc

SEQ ID NO: 99152 - RNA, 29 nt, Homo Sapiens
ccacagcauauuuauaaccacaaagaggu

SEQ ID NO: 99153 - RNA, 32 nt, Homo Sapiens
ccggacugucuuuccuccacccgcccauggag

SEQ ID NO: 99154 - RNA, 30 nt, Homo Sapiens
ucggguaucuucgguggcugcaggagagcg

SEQ ID NO: 99155 - RNA, 32 nt, Homo Sapiens
ggaccaccuggccaugcgugcacagccuggga

SEQ ID NO: 99156 - RNA, 32 nt, Homo Sapiens
aauguuuccugugcaccuacaagaguguaaga

SEQ ID NO: 99157 - RNA, 32 nt, Homo Sapiens
aaaacuuucucgcuccccacgaccccagaaug

SEQ ID NO: 99158 - RNA, 32 nt, Homo Sapiens
gcuacuuccgccuucuuagcgucuggucagag

SEQ ID NO: 99159 - RNA, 32 nt, Homo Sapiens
gacaggaggggaggggugcagaucggacagga

SEQ ID NO: 99160 - RNA, 32 nt, Homo Sapiens
uggucuggccuggccguguggugaugaggcuu

SEQ ID NO: 99161 - RNA, 32 nt, Homo Sapiens
cucuucagugguuuccucucuucauucucuua

SEQ ID NO: 99162 - RNA, 32 nt, Homo Sapiens
ucggagcccuggggcugcugcggcccuaggcc

SEQ ID NO: 99163 - RNA, 32 nt, Homo Sapiens
ccgccggcccguuccgugucgccccgcagugc

SEQ ID NO: 99164 - RNA, 32 nt, Homo Sapiens
auuguuuccugugaauucugugacuccuaaua

SEQ ID NO: 99165 - RNA, 32 nt, Homo Sapiens
aaacgcacaagagccccugcccugcccuagcu

SEQ ID NO: 99166 - RNA, 32 nt, Homo Sapiens
uuuucuccaaauaaaaauuagauggaaaaaug

SEQ ID NO: 99167 - RNA, 32 nt, Homo Sapiens
cugccuggcuccuugggacccguuccccagcc

SEQ ID NO: 99168 - RNA, 32 nt, Homo Sapiens
cuuuuuuguaaaauguuuguacauauguuguc

SEQ ID NO: 99169 - RNA, 32 nt, Homo Sapiens
ccaggcuccggguuuucuuaaauguuuucuug

SEQ ID NO: 99170 - RNA, 32 nt, Homo Sapiens
cuaugggaaaauugugaagauaaaugaaaguu

SEQ ID NO: 99171 - RNA, 32 nt, Homo Sapiens
ccuaguuucuuugaggccccaggcccucuuuu

SEQ ID NO: 99172 - RNA, 32 nt, Homo Sapiens
uggaagaaaaggacuuuuaaccaccauuuugu

SEQ ID NO: 99173 - RNA, 32 nt, Homo Sapiens
aaagaguuucgcuuuaccccucugguaauuaa

SEQ ID NO: 99174 - RNA, 32 nt, Homo Sapiens
augaucugcagagcauguugcuuuuguuuuuu

SEQ ID NO: 99175 - RNA, 32 nt, Homo Sapiens
guaggagguuugacuaagaucaaucaugacga

SEQ ID NO: 99176 - RNA, 32 nt, Homo Sapiens
gcuuugacccuuucuuuuuuaaucuacuuuug

SEQ ID NO: 99177 - RNA, 32 nt, Homo Sapiens
aggagggaggaggcgcgccgcgccaugguguc

SEQ ID NO: 99178 - RNA, 32 nt, Homo Sapiens
ucgagcggaaucgggcgggaucacccgggggc

SEQ ID NO: 99179 - RNA, 32 nt, Homo Sapiens
uuguuuugacucuugugugcugugggcacugg

SEQ ID NO: 99180 - RNA, 32 nt, Homo Sapiens
uaucagguggguggaggggagacgcucaggag

SEQ ID NO: 99181 - RNA, 32 nt, Homo Sapiens
agaaaaccgcacccucaccucccuucaccugc

SEQ ID NO: 99182 - RNA, 30 nt, Homo Sapiens
uuuuaucuggacugcaucuugggggguacu

SEQ ID NO: 99183 - RNA, 32 nt, Homo Sapiens
gcuauuggguauauuucaacuuaaaauuacac

SEQ ID NO: 99184 - RNA, 32 nt, Homo Sapiens
ucaucggcggugaggaagcccaggcggguccc

SEQ ID NO: 99185 - RNA, 32 nt, Homo Sapiens
ugaggaaguggcuauaaauauuaaacuaaaag

SEQ ID NO: 99186 - RNA, 32 nt, Homo Sapiens
cauaaaaugcuuuauuuagaaaaccuacauga

SEQ ID NO: 99187 - RNA, 32 nt, Homo Sapiens
uuucaacuuuuuaggagugcuuccucacaguu

SEQ ID NO: 99188 - RNA, 32 nt, Homo Sapiens
cuccccccaggucuaccccucccggcccugcc

SEQ ID NO: 99189 - RNA, 32 nt, Homo Sapiens
aauggaaaggauuaaauauguauuuuguagac

SEQ ID NO: 99190 - RNA, 32 nt, Homo Sapiens
cuccuguggcggugcaguggcaaaggauccag

SEQ ID NO: 99191 - RNA, 32 nt, Homo Sapiens
accaccaagccuucuuuccccaucaguccaaa

SEQ ID NO: 99192 - RNA, 32 nt, Homo Sapiens
cccuuugaaauuauucuuucucucauuuuccu

SEQ ID NO: 99193 - RNA, 32 nt, Homo Sapiens
gauugagcguguauagggaggggaaugcuauc

SEQ ID NO: 99194 - RNA, 32 nt, Homo Sapiens
accuauccccggaugugugagaauaauguguu

SEQ ID NO: 99195 - RNA, 32 nt, Homo Sapiens
gcguccaggaggagcuggauuucacccugaag

SEQ ID NO: 99196 - RNA, 32 nt, Homo Sapiens
gaggcggagcugcagcagcugcggcaggcggc

SEQ ID NO: 99197 - RNA, 32 nt, Homo Sapiens
agcauucgguggugaggcuguugugugcgcgg

SEQ ID NO: 99198 - RNA, 32 nt, Homo Sapiens
ccccaccccacuucucccccaaaaccagagcc

SEQ ID NO: 99199 - RNA, 32 nt, Homo Sapiens
ccggcuccccccaccccuucauuuggacccgc

SEQ ID NO: 99200 - RNA, 32 nt, Homo Sapiens
aauuauugcugucuuuuuuuuaaaaaaaaaag

SEQ ID NO: 99201 - RNA, 32 nt, Homo Sapiens
caggacuggcgccgcgcacgcggauccccgag

SEQ ID NO: 99202 - RNA, 32 nt, Homo Sapiens
cucuggggacuacaagugacugacagccagcu

SEQ ID NO: 99203 - RNA, 32 nt, Homo Sapiens
guauuaggaucugggaauaacaaccuaaccau

SEQ ID NO: 99204 - RNA, 32 nt, Homo Sapiens
acacacagcugcuuuuguggagguggacgaaa

SEQ ID NO: 99205 - RNA, 29 nt, Homo Sapiens
uggugcauauguauauaugugcaaaaugg

SEQ ID NO: 99206 - RNA, 32 nt, Homo Sapiens
uucuguagaaacacggaugugcaugugcagau

SEQ ID NO: 99207 - RNA, 32 nt, Homo Sapiens
ugcaaggaccauaaguuuuuccucuugcagau

SEQ ID NO: 99208 - RNA, 32 nt, Homo Sapiens
gagcugccacggagcuggggguugccauggau

SEQ ID NO: 99209 - RNA, 30 nt, Homo Sapiens
aaagaauggccacuucuuggggcacagucu

SEQ ID NO: 99210 - RNA, 31 nt, Homo Sapiens
guuaaugcaagguuugggguccccuuuaaca

SEQ ID NO: 99211 - RNA, 32 nt, Homo Sapiens
uauucaguauuuccucuuuucuguauguagua

SEQ ID NO: 99212 - RNA, 32 nt, Homo Sapiens
ggguauuucuucagcaggucccaaucuacugg

SEQ ID NO: 99213 - RNA, 32 nt, Homo Sapiens
uuacaaagcuaaaauaauggcuucacucuuau

SEQ ID NO: 99214 - RNA, 32 nt, Homo Sapiens
uuccucccagggcugaugugagagaaagaaaa

SEQ ID NO: 99215 - RNA, 32 nt, Homo Sapiens
gauauauuacuaguaucagaaacuacaguuuu

SEQ ID NO: 99216 - RNA, 32 nt, Homo Sapiens
gugaauuugaauguauuuugaauuguaagagc

SEQ ID NO: 99217 - RNA, 32 nt, Homo Sapiens
gcuccauuccuagucuuaauuaccauauucag

SEQ ID NO: 99218 - RNA, 32 nt, Homo Sapiens
ucugucaagagccuaucuccauauacagucac

SEQ ID NO: 99219 - RNA, 32 nt, Homo Sapiens
ccugcccugcucgccccuccacagccucgguc

SEQ ID NO: 99220 - RNA, 32 nt, Homo Sapiens
accugggacaggucgauugcuggaccagggca

SEQ ID NO: 99221 - RNA, 28 nt, Homo Sapiens
ucauagugggugcccaggauguuguccu

SEQ ID NO: 99222 - RNA, 32 nt, Homo Sapiens
ugcacagaaaaucauuuauauuugagaaaaau

SEQ ID NO: 99223 - RNA, 32 nt, Homo Sapiens
caucucuugaauuugaauaaauuauuugaacu

SEQ ID NO: 99224 - RNA, 32 nt, Homo Sapiens
acauugcccagaauguuuuguaaaaugaagac

SEQ ID NO: 99225 - RNA, 32 nt, Homo Sapiens
acauguacguacaauuuaaagaauaauuuuaa

SEQ ID NO: 99226 - RNA, 32 nt, Homo Sapiens
gcccaaggaaggugcaugucaaccugucagau

SEQ ID NO: 99227 - RNA, 32 nt, Homo Sapiens
aauaugaaauucauuaaaauguccauguucca

SEQ ID NO: 99228 - RNA, 32 nt, Homo Sapiens
cccuuccuuguuuccuuugacucucaaacaaa

SEQ ID NO: 99229 - RNA, 32 nt, Homo Sapiens
uggagggaacagagacuggcacaggaccucuu

SEQ ID NO: 99230 - RNA, 32 nt, Homo Sapiens
aaagucuacgcucuccuuucuuucuaacucca

SEQ ID NO: 99231 - RNA, 32 nt, Homo Sapiens
caaaauguucuauuuaacaacugggucaugug

SEQ ID NO: 99232 - RNA, 32 nt, Homo Sapiens
ccugcgggagcuccggcuucucguccuccggu

SEQ ID NO: 99233 - RNA, 32 nt, Homo Sapiens
aacagccuuuccugugagucuuucucagaauu

SEQ ID NO: 99234 - RNA, 29 nt, Homo Sapiens
ugaguccaggcuaaggggacgccggccgg

SEQ ID NO: 99235 - RNA, 32 nt, Homo Sapiens
uaauccucacgaccaccucaugagacucucca

SEQ ID NO: 99236 - RNA, 32 nt, Homo Sapiens
ucucaacuucuuucuuuuuuuuuugaagacuu

SEQ ID NO: 99237 - RNA, 32 nt, Homo Sapiens
uuugagguucagaaacaaaacuguugcuggcu

SEQ ID NO: 99238 - RNA, 32 nt, Homo Sapiens
gaacgggacaccuuuagagaagcuugaucuug

SEQ ID NO: 99239 - RNA, 32 nt, Homo Sapiens
gccaggggugccccuucaggccugcucucaca

SEQ ID NO: 99240 - RNA, 32 nt, Homo Sapiens
uuucuuuugaguuuugggagaaauauuuguuu

SEQ ID NO: 99241 - RNA, 32 nt, Homo Sapiens
gagagaaugcaacggaugcaauuuccaggcug

SEQ ID NO: 99242 - RNA, 32 nt, Homo Sapiens
gaucaugguucauguuacugaaaagacuuuaa

SEQ ID NO: 99243 - RNA, 32 nt, Homo Sapiens
cauccaccaaaggaguuugggauugaguuuug

SEQ ID NO: 99244 - RNA, 32 nt, Homo Sapiens
uccuaaucaaggacaagccacccuagugucuc

SEQ ID NO: 99245 - RNA, 32 nt, Homo Sapiens
cugggaggcucggcccggccgcccgagcaggc

SEQ ID NO: 99246 - RNA, 32 nt, Homo Sapiens
cuccagccuucucggggcccaggccugggcca

SEQ ID NO: 99247 - RNA, 32 nt, Homo Sapiens
gccuggcgccccacacuacccccuggagcccc

SEQ ID NO: 99248 - RNA, 32 nt, Homo Sapiens
ccugaggagcucucccggcugcaccggcugga

SEQ ID NO: 99249 - RNA, 32 nt, Homo Sapiens
gcuaaagauguauauauacauauacuuuuuug

SEQ ID NO: 99250 - RNA, 32 nt, Homo Sapiens
ccugucggugucugcuccuacacgccaacgcc

SEQ ID NO: 99251 - RNA, 32 nt, Homo Sapiens
cucuguuuacuuucuaagaacuaauauaauug

SEQ ID NO: 99252 - RNA, 32 nt, Homo Sapiens
cauuucuggcugcuuuuuguuuuucauuuucu

SEQ ID NO: 99253 - RNA, 32 nt, Homo Sapiens
gaagcacugcgggugucgccaagcccuuuccu

SEQ ID NO: 99254 - RNA, 32 nt, Homo Sapiens
ugagcccgggccacgcaggggcccugagccaa

SEQ ID NO: 99255 - RNA, 32 nt, Homo Sapiens
gggggugcaaaagaggagcggcugggcugggg

SEQ ID NO: 99256 - RNA, 32 nt, Homo Sapiens
cccauaaccugggcgaaaugcucuacaccaag

SEQ ID NO: 99257 - RNA, 32 nt, Homo Sapiens
aaauaaaugaaguaucucuaggaaacagucug

SEQ ID NO: 99258 - RNA, 32 nt, Homo Sapiens
ugcaaaaacaaauguuaaauuugugcuucagu

SEQ ID NO: 99259 - RNA, 32 nt, Homo Sapiens
ccagccagucaccugagcugccggagccaguu

SEQ ID NO: 99260 - RNA, 32 nt, Homo Sapiens
aagcucuuuguacagugucaauuuguaaaaaa

SEQ ID NO: 99261 - RNA, 32 nt, Homo Sapiens
gggccggcggggguggggggaacgugggggaa

SEQ ID NO: 99262 - RNA, 32 nt, Homo Sapiens
cuccaagcacuaaaaggcaguauauuacagaa

SEQ ID NO: 99263 - RNA, 32 nt, Homo Sapiens
gaacaguauuugcauuuguacugucuuagaau

SEQ ID NO: 99264 - RNA, 32 nt, Homo Sapiens
aacagguggcggcggggcgcgcgccgggagac

SEQ ID NO: 99265 - RNA, 32 nt, Homo Sapiens
ggaagcuugaguuugaugcagggaggaggaag

SEQ ID NO: 99266 - RNA, 32 nt, Homo Sapiens
ggggaacaaagcggcaucauuccacuauucca

SEQ ID NO: 99267 - RNA, 32 nt, Homo Sapiens
uauccacaaccuguauagugauagccauauau

SEQ ID NO: 99268 - RNA, 32 nt, Homo Sapiens
ccuaccuuuuccuucuuuaaucuccugguuua

SEQ ID NO: 99269 - RNA, 32 nt, Homo Sapiens
ggcuauaugggaccuaauaacuuuaaauagac

SEQ ID NO: 99270 - RNA, 32 nt, Homo Sapiens
ggaguaugccuuuggugucccccucccaaggg

SEQ ID NO: 99271 - RNA, 32 nt, Homo Sapiens
cugcccucacuggccaguggccacaggaaccc

SEQ ID NO: 99272 - RNA, 32 nt, Homo Sapiens
guguuuuuuuuuucuuuuuauacaauaccaug

SEQ ID NO: 99273 - RNA, 32 nt, Homo Sapiens
uuaugauacugauaaauugugaucuugcaguc

SEQ ID NO: 99274 - RNA, 32 nt, Homo Sapiens
cuguaccgcccggcagccccuucuggccggug

SEQ ID NO: 99275 - RNA, 32 nt, Homo Sapiens
auguagaagccugucucuguaccucuaacugg

SEQ ID NO: 99276 - RNA, 32 nt, Homo Sapiens
acaucuauuuuugauauuuguggguaccuagg

SEQ ID NO: 99277 - RNA, 32 nt, Homo Sapiens
gaauccuugacaaaagaaaaagugguuuugau

SEQ ID NO: 99278 - RNA, 32 nt, Homo Sapiens
agacaaugccagcauaaauccauccauccaaa

SEQ ID NO: 99279 - RNA, 32 nt, Homo Sapiens
ccuguggcucugccaucagcuccaauaucaau

SEQ ID NO: 99280 - RNA, 32 nt, Homo Sapiens
aaaguuuaaaaauuagcuugguguggugcccu

SEQ ID NO: 99281 - RNA, 32 nt, Homo Sapiens
cucugcaauauuuacuuuacccuguuaaugaa

SEQ ID NO: 99282 - RNA, 32 nt, Homo Sapiens
caccaggguccuccuccuuccucucuccuugu

SEQ ID NO: 99283 - RNA, 32 nt, Homo Sapiens
gacucucuccuccuccucccggcacgaccugg

SEQ ID NO: 99284 - RNA, 32 nt, Homo Sapiens
ugugucgugugagauuucccacaguaccaguu

SEQ ID NO: 99285 - RNA, 32 nt, Homo Sapiens
caucaugagccugaccaaaacaaaauuugaaa

SEQ ID NO: 99286 - RNA, 32 nt, Homo Sapiens
gagaggcaucuggguucggacuggggccgcca

SEQ ID NO: 99287 - RNA, 28 nt, Homo Sapiens
cauuguauagaagaacauuuggaaacuc

SEQ ID NO: 99288 - RNA, 32 nt, Homo Sapiens
gugguaaucaucugggggcccugguuuucuug

SEQ ID NO: 99289 - RNA, 32 nt, Homo Sapiens
uguagaagacauuuugggaaacacugucuuaa

SEQ ID NO: 99290 - RNA, 32 nt, Homo Sapiens
cuaucugcaaugcauuugauaaucauuucuau

SEQ ID NO: 99291 - RNA, 32 nt, Homo Sapiens
gcauuuguauaaaaauauauguguguaauuau

SEQ ID NO: 99292 - RNA, 32 nt, Homo Sapiens
uuugaaguagaugguaaaauuuuugucauccu

SEQ ID NO: 99293 - RNA, 32 nt, Homo Sapiens
uacauggauauuugguuuguuuuuaaacaaaa

SEQ ID NO: 99294 - RNA, 32 nt, Homo Sapiens
uucauugaaaaauuauuuuauuuauugcaagu

SEQ ID NO: 99295 - RNA, 32 nt, Homo Sapiens
aucgaugcuggcuccaccuggaccagggauuc

SEQ ID NO: 99296 - RNA, 32 nt, Homo Sapiens
uucaaaaagguauuucuauuccaaugauauuu

SEQ ID NO: 99297 - RNA, 32 nt, Homo Sapiens
ccaucagccaggggcuguguucccuccggggc

SEQ ID NO: 99298 - RNA, 32 nt, Homo Sapiens
agaacugugcuacauucaggcuuacccauuga

SEQ ID NO: 99299 - RNA, 32 nt, Homo Sapiens
gguucagcauuucugucauuuacuucugcuau

SEQ ID NO: 99300 - RNA, 32 nt, Homo Sapiens
uauagaaaugcaaagaauaaagaacugaggga

SEQ ID NO: 99301 - RNA, 32 nt, Homo Sapiens
cgggaagcgcgcugcgcugccgaggcgagcua

SEQ ID NO: 99302 - RNA, 32 nt, Homo Sapiens
cagcucuggcagagaccucugcccuccucacc

SEQ ID NO: 99303 - RNA, 32 nt, Homo Sapiens
uuuugcuaauacauuuggcuccacuguaaauu

SEQ ID NO: 99304 - RNA, 32 nt, Homo Sapiens
ccugagcuuuuuuccugcacccgccccgugcc

SEQ ID NO: 99305 - RNA, 32 nt, Homo Sapiens
ccuucuccgcaguuggcuuccucgguagcuuc

SEQ ID NO: 99306 - RNA, 32 nt, Homo Sapiens
ucccgcggucggagccgcgucuucucccggcu

SEQ ID NO: 99307 - RNA, 32 nt, Homo Sapiens
agaucugaauucugcccuuuucucucacccau

SEQ ID NO: 99308 - RNA, 32 nt, Homo Sapiens
aaaugcaauauuuggcuguuuuugcguuaauu

SEQ ID NO: 99309 - RNA, 32 nt, Homo Sapiens
agaggcagcuuguaggugauuguacaagugag

SEQ ID NO: 99310 - RNA, 32 nt, Homo Sapiens
ugagggaagagcuaucuggccuugggguaccc

SEQ ID NO: 99311 - RNA, 32 nt, Homo Sapiens
uccuguucaggagacucaacaucugauuguuu

SEQ ID NO: 99312 - RNA, 32 nt, Homo Sapiens
uuggaacgauggcggcggcagcugccgccggg

SEQ ID NO: 99313 - RNA, 32 nt, Homo Sapiens
agaagucagaucuacagccacccagaggaaag

SEQ ID NO: 99314 - RNA, 32 nt, Homo Sapiens
cucuauuuccuuucucuuucucucucucucuc

SEQ ID NO: 99315 - RNA, 32 nt, Homo Sapiens
cagcuugagucugcagaaugccuugcaaaucc

SEQ ID NO: 99316 - RNA, 32 nt, Homo Sapiens
aauaggcaggacuuaacuuggggugggaggag

SEQ ID NO: 99317 - RNA, 32 nt, Homo Sapiens
ggccuccucagcuuccuccccaucugggugcc

SEQ ID NO: 99318 - RNA, 32 nt, Homo Sapiens
ugucucugcuaaggacgcuagucccauucuug

SEQ ID NO: 99319 - RNA, 32 nt, Homo Sapiens
aggccuagugccgucggagaagagagcgggag

SEQ ID NO: 99320 - RNA, 32 nt, Homo Sapiens
uaagcuuucuucauuuuauuuauuuauuuccc

SEQ ID NO: 99321 - RNA, 32 nt, Homo Sapiens
cccaacuucagcgccaccaggaaggugaacac

SEQ ID NO: 99322 - RNA, 32 nt, Homo Sapiens
caucauuuuccacauacuuuacuucauuuagc

SEQ ID NO: 99323 - RNA, 32 nt, Homo Sapiens
aaggucucaucccacaaccccugacuuccucc

SEQ ID NO: 99324 - RNA, 32 nt, Homo Sapiens
uaaagggacuaccucugugccuugccacauua

SEQ ID NO: 99325 - RNA, 32 nt, Homo Sapiens
agcuaguaaauauauuuggagagaagaggaau

SEQ ID NO: 99326 - RNA, 32 nt, Homo Sapiens
cgacauggggacgggcauucuugccgcuuccu

SEQ ID NO: 99327 - RNA, 32 nt, Homo Sapiens
augugagcaugaguuuaggaaaugguguagca

SEQ ID NO: 99328 - RNA, 32 nt, Homo Sapiens
ucccgacggcaucgccacgggcggcggcaaag

SEQ ID NO: 99329 - RNA, 28 nt, Homo Sapiens
uaguaauaaaguuucauuuuuccuaagu

SEQ ID NO: 99330 - RNA, 32 nt, Homo Sapiens
caggugggcucgcuaggcggagcucagcuggg

SEQ ID NO: 99331 - RNA, 32 nt, Homo Sapiens
uuuccagucacuggaugcguggcaccaacugg

SEQ ID NO: 99332 - RNA, 32 nt, Homo Sapiens
guagguucuguggaaguuccaguguucucucu

SEQ ID NO: 99333 - RNA, 32 nt, Homo Sapiens
gcugucucagacucuuuuuguaccuggugacc

SEQ ID NO: 99334 - RNA, 32 nt, Homo Sapiens
ucgggggaucccuccgccgccagcgcgugguc

SEQ ID NO: 99335 - RNA, 32 nt, Homo Sapiens
ugagcaucuacuguauaccaugugcugagaua

SEQ ID NO: 99336 - RNA, 32 nt, Homo Sapiens
ugggaauuugguaaauuuuucuuuguauuuuu

SEQ ID NO: 99337 - RNA, 32 nt, Homo Sapiens
cccagcacuuuggggggcugaggugggcgaau

SEQ ID NO: 99338 - RNA, 32 nt, Homo Sapiens
aauuagccgggcgcgguggcgggcgccuguag

SEQ ID NO: 99339 - RNA, 32 nt, Homo Sapiens
uaaaugcuaguaaucagcacucuuucuuuuuu

SEQ ID NO: 99340 - RNA, 32 nt, Homo Sapiens
ccuuccccaccgccugggcccgagggacgcgu

SEQ ID NO: 99341 - RNA, 32 nt, Homo Sapiens
augcucucccuguuccucuccccgccacccca

SEQ ID NO: 99342 - RNA, 32 nt, Homo Sapiens
cuaaauuaaucauauugucaguuuugguuuau

SEQ ID NO: 99343 - RNA, 29 nt, Homo Sapiens
gauuuauaaaguuuugauauuuuucccua

SEQ ID NO: 99344 - RNA, 32 nt, Homo Sapiens
gacgccgccgccguugcugcccggcccggaga

SEQ ID NO: 99345 - RNA, 32 nt, Homo Sapiens
gucuccaagccucugucuuuucugggaugugg

SEQ ID NO: 99346 - RNA, 32 nt, Homo Sapiens
acgcccuccccgacccucucccggccccuguc

SEQ ID NO: 99347 - RNA, 32 nt, Homo Sapiens
cuggcaguccuuuuuuguuguuuuccaucuca

SEQ ID NO: 99348 - RNA, 32 nt, Homo Sapiens
cuggggcgcaggcggcagcggcguggccauga

SEQ ID NO: 99349 - RNA, 32 nt, Homo Sapiens
ucucuccucuuacagcucucaaugauguauau

SEQ ID NO: 99350 - RNA, 32 nt, Homo Sapiens
acgacuuccuacuucacccauucaucuauccg

SEQ ID NO: 99351 - RNA, 32 nt, Homo Sapiens
acagggcacucccgaccaccccugcccaccgu

SEQ ID NO: 99352 - RNA, 32 nt, Homo Sapiens
cuaccaccuuggagcauagguggggauccucc

SEQ ID NO: 99353 - RNA, 32 nt, Homo Sapiens
aaaauggaacauuaaaucaugcuguauaaagc

SEQ ID NO: 99354 - RNA, 32 nt, Homo Sapiens
cgccgccagggcccggacucggacgcguggua

SEQ ID NO: 99355 - RNA, 32 nt, Homo Sapiens
uuaaaugaaacacaagaaauuggccacuggua

SEQ ID NO: 99356 - RNA, 32 nt, Homo Sapiens
ccuguacaaaggccgcgugaacagccagcgug

SEQ ID NO: 99357 - RNA, 32 nt, Homo Sapiens
cucaguuaucuuuccccauaauaaaaaauauc

SEQ ID NO: 99358 - RNA, 32 nt, Homo Sapiens
guagcuuguaccauuuaacuuaguuuggcuag

SEQ ID NO: 99359 - RNA, 32 nt, Homo Sapiens
cagauguggggaagaggccagcagccuagucu

SEQ ID NO: 99360 - RNA, 32 nt, Homo Sapiens
uucuuccucagcuguucuucagcccucuauac

SEQ ID NO: 99361 - RNA, 32 nt, Homo Sapiens
cgggcaccauggucgguggcgaggcggcugcc

SEQ ID NO: 99362 - RNA, 32 nt, Homo Sapiens
aagcgggcccugggcuugucacucacugugcc

SEQ ID NO: 99363 - RNA, 32 nt, Homo Sapiens
auggcgagcuagagaaaucaccaccguuuaga

SEQ ID NO: 99364 - RNA, 32 nt, Homo Sapiens
gcgaucuugacccuaagaccggcggccaugau

SEQ ID NO: 99365 - RNA, 32 nt, Homo Sapiens
ugugguaggcauggcugggaaugugcagcuuu

SEQ ID NO: 99366 - RNA, 32 nt, Homo Sapiens
gaccgacccuccuggggucugucaggaaaaag

SEQ ID NO: 99367 - RNA, 32 nt, Homo Sapiens
ucucgccggcgcccgagccaguccgcgcgcac

SEQ ID NO: 99368 - RNA, 32 nt, Homo Sapiens
uuugccacucacagaagccggucuguaccaag

SEQ ID NO: 99369 - RNA, 32 nt, Homo Sapiens
aaaccucuacaguuugucaagcuuugcagugc

SEQ ID NO: 99370 - RNA, 32 nt, Homo Sapiens
uccgcuaagggccagcgugcuucuucuggcua

SEQ ID NO: 99371 - RNA, 32 nt, Homo Sapiens
accggaggacaaaguacaaacggcagaagcug

SEQ ID NO: 99372 - RNA, 32 nt, Homo Sapiens
acuccuccuaacaguccuucucuucuuuccuc

SEQ ID NO: 99373 - RNA, 32 nt, Homo Sapiens
cugaaaaggggagaggcauucagccgcugcuu

SEQ ID NO: 99374 - RNA, 32 nt, Homo Sapiens
augaagacaagcugaaacaacgcaagcugguu

SEQ ID NO: 99375 - RNA, 32 nt, Homo Sapiens
gccucaaaaugaaauucaacuagaaauggaaa

SEQ ID NO: 99376 - RNA, 32 nt, Homo Sapiens
ucucuauucuacauuuaccuuggucaaauuug

SEQ ID NO: 99377 - RNA, 32 nt, Homo Sapiens
uaguuuucagucuccuuuucuuucucaccauu

SEQ ID NO: 99378 - RNA, 32 nt, Homo Sapiens
uacacccuccaccuccccauccccuguucucc

SEQ ID NO: 99379 - RNA, 32 nt, Homo Sapiens
acuuccagguguuuaaauucuguucacucaac

SEQ ID NO: 99380 - RNA, 32 nt, Homo Sapiens
auaauaaacuguccucuuucagaaaacagaaa

SEQ ID NO: 99381 - RNA, 32 nt, Homo Sapiens
gccagcaucacugguaugauguauauuuaauu

SEQ ID NO: 99382 - RNA, 32 nt, Homo Sapiens
acaggccaggacuugucucugugcugaaagca

SEQ ID NO: 99383 - RNA, 32 nt, Homo Sapiens
ugaagaccucauucuccugucuggaggggcug

SEQ ID NO: 99384 - RNA, 32 nt, Homo Sapiens
ggacuuguauuuugaucuuaauaaaaaauaau

SEQ ID NO: 99385 - RNA, 32 nt, Homo Sapiens
ggcuuucagggcagccccugcagacgucuggc

SEQ ID NO: 99386 - RNA, 32 nt, Homo Sapiens
uaugccuucuaaaaaccaaaucugcauaguua

SEQ ID NO: 99387 - RNA, 32 nt, Homo Sapiens
uuagccgacucacuugcaacuccaccucagca

SEQ ID NO: 99388 - RNA, 32 nt, Homo Sapiens
aggcugcuggcuggcccuggcucccacaggcc

SEQ ID NO: 99389 - RNA, 32 nt, Homo Sapiens
uacucuaaaaauuaaagagacucucaacaaaa

SEQ ID NO: 99390 - RNA, 32 nt, Homo Sapiens
cuuuaauaauuuguugauaaguuuacauaaac

SEQ ID NO: 99391 - RNA, 32 nt, Homo Sapiens
ccuuggaaggauuuuuugcuuugcuuaugaaa

SEQ ID NO: 99392 - RNA, 32 nt, Homo Sapiens
uucaagcagcuaggaguacaguugggagccac

SEQ ID NO: 99393 - RNA, 32 nt, Homo Sapiens
ggggcuggagcauggagggcgaggggagagag

SEQ ID NO: 99394 - RNA, 32 nt, Homo Sapiens
aaguucgguguugggaggagccccggugacag

SEQ ID NO: 99395 - RNA, 32 nt, Homo Sapiens
aguaaucaagacaauuauugaagagguggcgc

SEQ ID NO: 99396 - RNA, 32 nt, Homo Sapiens
gacgauagacaucuaccuauauuguuaagaaa

SEQ ID NO: 99397 - RNA, 32 nt, Homo Sapiens
agggggcggggcgggggaggggagguaggacc

SEQ ID NO: 99398 - RNA, 32 nt, Homo Sapiens
cuuccucgccaccguucucaccucuuuguccg

SEQ ID NO: 99399 - RNA, 32 nt, Homo Sapiens
cuccugggccccagcagcaucucugcccgucc

SEQ ID NO: 99400 - RNA, 32 nt, Homo Sapiens
gcaugauuacuuguuuuauauuucauguuggg

SEQ ID NO: 99401 - RNA, 32 nt, Homo Sapiens
ugggcagguuacugaggcucuuccaaccucac

SEQ ID NO: 99402 - RNA, 32 nt, Homo Sapiens
aaaauaauuuguaaaauguccuuuaaaaguuu

SEQ ID NO: 99403 - RNA, 32 nt, Homo Sapiens
caguugaauaaucaaaaauauuuuauuaggcc

SEQ ID NO: 99404 - RNA, 32 nt, Homo Sapiens
uucuuuucaaggacugcaagauuauuugauaa

SEQ ID NO: 99405 - RNA, 32 nt, Homo Sapiens
uaauacauuauguuuaccuccaucauaguugc

SEQ ID NO: 99406 - RNA, 32 nt, Homo Sapiens
cuagggauguuaacaucagggauuugugugug

SEQ ID NO: 99407 - RNA, 32 nt, Homo Sapiens
caaauuacugucauaauucaguuuaagcuaug

SEQ ID NO: 99408 - RNA, 32 nt, Homo Sapiens
cgagcgguccccagcccucuucauguuccgaa

SEQ ID NO: 99409 - RNA, 32 nt, Homo Sapiens
cagagauauuccaggaaugugggugacggccu

SEQ ID NO: 99410 - RNA, 32 nt, Homo Sapiens
guuaggccaaaauaaacaacuuauaggguaca

SEQ ID NO: 99411 - RNA, 32 nt, Homo Sapiens
gauauuagagauuauucaguacucuugagagu

SEQ ID NO: 99412 - RNA, 32 nt, Homo Sapiens
uuuggcccugagccagcagaucaagcaaaugu

SEQ ID NO: 99413 - RNA, 32 nt, Homo Sapiens
uaauaaaauuuauguuacaggauaacuuuauu

SEQ ID NO: 99414 - RNA, 32 nt, Homo Sapiens
uguugguggaaucugcagaaaucgaugcaaca

SEQ ID NO: 99415 - RNA, 32 nt, Homo Sapiens
gccccgaccuccccggcugacgcgcucugcgg

SEQ ID NO: 99416 - RNA, 32 nt, Homo Sapiens
agauaaacuuugggcuuuggacauuugcugga

SEQ ID NO: 99417 - RNA, 32 nt, Homo Sapiens
gagagcugcaggaugucuggggucugggcaag

SEQ ID NO: 99418 - RNA, 32 nt, Homo Sapiens
gacgcgggugcuugcgcguguccgcgccccgg

SEQ ID NO: 99419 - RNA, 32 nt, Homo Sapiens
aaacugccacuacuauguaccugcaguggggu

SEQ ID NO: 99420 - RNA, 32 nt, Homo Sapiens
uccugguguaccugugucuccucggaaggaag

SEQ ID NO: 99421 - RNA, 32 nt, Homo Sapiens
ugcacgagauaguugguugucuauaugucaaa

SEQ ID NO: 99422 - RNA, 32 nt, Homo Sapiens
ugggugagcugcagcggcugcugcuggacgcg

SEQ ID NO: 99423 - RNA, 32 nt, Homo Sapiens
gaagagggaagugaaaagaucuucuugugaac

SEQ ID NO: 99424 - RNA, 30 nt, Homo Sapiens
gaggauguggggaagggggaaagcggugag

SEQ ID NO: 99425 - RNA, 32 nt, Homo Sapiens
ucaaaguuuaguaaguuuuucuucaugaggcc

SEQ ID NO: 99426 - RNA, 32 nt, Homo Sapiens
ccaggauuugaauuauuuuaacucauccaugg

SEQ ID NO: 99427 - RNA, 32 nt, Homo Sapiens
gccggcgacgugaggcgggcguugcucgcgcg

SEQ ID NO: 99428 - RNA, 32 nt, Homo Sapiens
uggcaccccucuuucuggaaauccacgaacaa

SEQ ID NO: 99429 - RNA, 32 nt, Homo Sapiens
agcagggccccgagaggcagugcacugggcau

SEQ ID NO: 99430 - RNA, 32 nt, Homo Sapiens
ggagcccagccagcugcgccugcgcugcagga

SEQ ID NO: 99431 - RNA, 32 nt, Homo Sapiens
ugaaucauucugccuauacaaacaagcuagcu

SEQ ID NO: 99432 - RNA, 32 nt, Homo Sapiens
cucuaagaguucccuaggcauucuuuuucuuu

SEQ ID NO: 99433 - RNA, 32 nt, Homo Sapiens
ucugauagacugccuggaccaucagaacucag

SEQ ID NO: 99434 - RNA, 32 nt, Homo Sapiens
ggauuugggcaaacagaacugaaugagcccau

SEQ ID NO: 99435 - RNA, 31 nt, Homo Sapiens
agcuuugggggccccagggaauuggaacucu

SEQ ID NO: 99436 - RNA, 32 nt, Homo Sapiens
aaggauacacuucuaaccacauuuuacuuccu

SEQ ID NO: 99437 - RNA, 32 nt, Homo Sapiens
ugacuuaucccauuuucaauaacaaaacgaac

SEQ ID NO: 99438 - RNA, 32 nt, Homo Sapiens
aggaggguggagucccugggucaugcccuccc

SEQ ID NO: 99439 - RNA, 32 nt, Homo Sapiens
aaacauuugaguucuguccuccagguucaucc

SEQ ID NO: 99440 - RNA, 32 nt, Homo Sapiens
ggcugcagccucaggacccugagggguuuccc

SEQ ID NO: 99441 - RNA, 32 nt, Homo Sapiens
uucuuuuuuguuuuaauggagaauagaaaaua

SEQ ID NO: 99442 - RNA, 32 nt, Homo Sapiens
gcuccaggcccaaggcguguugguuuugccuu

SEQ ID NO: 99443 - RNA, 32 nt, Homo Sapiens
gccguugacauuaagaggcauguuuaacggug

SEQ ID NO: 99444 - RNA, 32 nt, Homo Sapiens
uauaggccaaacuggcaaacuucagacugaac

SEQ ID NO: 99445 - RNA, 32 nt, Homo Sapiens
gaaaaagaaucaaaaacuggaauacaaauauu

SEQ ID NO: 99446 - RNA, 32 nt, Homo Sapiens
ggggugacuucugcuuugguccuuccaccacc

SEQ ID NO: 99447 - RNA, 32 nt, Homo Sapiens
cuugccugcgcuucuucagagucauuaauuug

SEQ ID NO: 99448 - RNA, 31 nt, Homo Sapiens
uuuacauauuugacuuaaauaacuguaagau

SEQ ID NO: 99449 - RNA, 32 nt, Homo Sapiens
ccagaccacuccugccuccaccucugacucuu

SEQ ID NO: 99450 - RNA, 32 nt, Homo Sapiens
ggcagcgccucgccccagccaagccugacuuu

SEQ ID NO: 99451 - RNA, 32 nt, Homo Sapiens
accgccgccaccgccgccaccgccuccuggga

SEQ ID NO: 99452 - RNA, 29 nt, Homo Sapiens
ucaaaauaaaguuuguguuuccugaaaaa

SEQ ID NO: 99453 - RNA, 32 nt, Homo Sapiens
uuucuuagaaauuuauuuccuaguucuguaga

SEQ ID NO: 99454 - RNA, 32 nt, Homo Sapiens
ggacuuccugacgccgccagugggcggggccc

SEQ ID NO: 99455 - RNA, 32 nt, Homo Sapiens
acaaaaagauguuagaaaaauaaaaguauaaa

SEQ ID NO: 99456 - RNA, 32 nt, Homo Sapiens
acaaaggaguguguucagaaaaggagagagag

SEQ ID NO: 99457 - RNA, 32 nt, Homo Sapiens
gcucggcucacugagacccggugguccagacg

SEQ ID NO: 99458 - RNA, 32 nt, Homo Sapiens
cuucgauaagaaucuguuugggacaugaaauc

SEQ ID NO: 99459 - RNA, 32 nt, Homo Sapiens
uaagccaagaguaauuuuuaaauuaaaaauga

SEQ ID NO: 99460 - RNA, 32 nt, Homo Sapiens
auugacuuuuucucuuuuuuauuugggauaau

SEQ ID NO: 99461 - RNA, 32 nt, Homo Sapiens
uguuggcugagaccgagaugugcucuccacug

SEQ ID NO: 99462 - RNA, 32 nt, Homo Sapiens
cgcucauuuuacgcacuuuguacuucugcuuu

SEQ ID NO: 99463 - RNA, 32 nt, Homo Sapiens
gaagaauuugaaacagacaguagugaucagca

SEQ ID NO: 99464 - RNA, 32 nt, Homo Sapiens
gucggggugucuaugcaaaggaagcucaguuu

SEQ ID NO: 99465 - RNA, 32 nt, Homo Sapiens
cucaccccugcacagcggcggcgacuccucua

SEQ ID NO: 99466 - RNA, 32 nt, Homo Sapiens
ccacugcccuggcagcagcagguguggccaau

SEQ ID NO: 99467 - RNA, 32 nt, Homo Sapiens
ucggcuuggggagccagagggagcggagcgga

SEQ ID NO: 99468 - RNA, 32 nt, Homo Sapiens
ugacuuuuucaagaucaucagaauagauacag

SEQ ID NO: 99469 - RNA, 32 nt, Homo Sapiens
guuuucccuucuuuuuauacuguuuucugugc

SEQ ID NO: 99470 - RNA, 32 nt, Homo Sapiens
aagcaagguuggaaaauguuuuaucuuucuau

SEQ ID NO: 99471 - RNA, 30 nt, Homo Sapiens
ggugugggaggugggaagggugagggucug

SEQ ID NO: 99472 - RNA, 32 nt, Homo Sapiens
ugaggauaaugggaauuuacugaaacccgugg

SEQ ID NO: 99473 - RNA, 32 nt, Homo Sapiens
agaaacuccugucaaggcagcgagagcugaug

SEQ ID NO: 99474 - RNA, 32 nt, Homo Sapiens
aacccggaaacagacaagcaacccaaacugaa

SEQ ID NO: 99475 - RNA, 32 nt, Homo Sapiens
ugaagguuuguaaauaguccaugaugaugucg

SEQ ID NO: 99476 - RNA, 32 nt, Homo Sapiens
uuuacguaaaaggaauaaaauaagcaaguuaa

SEQ ID NO: 99477 - RNA, 32 nt, Homo Sapiens
accaacucccaaaauauagguuacucuuguuc

SEQ ID NO: 99478 - RNA, 32 nt, Homo Sapiens
augagcccacgcccggccccacucccaccauc

SEQ ID NO: 99479 - RNA, 32 nt, Homo Sapiens
cgaaaccaucuacuccacacaugcaggaggcg

SEQ ID NO: 99480 - RNA, 32 nt, Homo Sapiens
acaccuguggccuuccucuccuuccuguuugg

SEQ ID NO: 99481 - RNA, 32 nt, Homo Sapiens
uguuggaugcauaguuggcaaauauuuucuac

SEQ ID NO: 99482 - RNA, 32 nt, Homo Sapiens
caugguuuuggaagaacauacuuuagaaaagg

SEQ ID NO: 99483 - RNA, 32 nt, Homo Sapiens
gggccgcggccuccuccacacacacacacacc

SEQ ID NO: 99484 - RNA, 32 nt, Homo Sapiens
ugguggccuuccccggccauguuccuaucuga

SEQ ID NO: 99485 - RNA, 32 nt, Homo Sapiens
cgaggagaggcagcacugcugcucuugacuuc

SEQ ID NO: 99486 - RNA, 32 nt, Homo Sapiens
aauuggggauccaggugucagagguaggggaa

SEQ ID NO: 99487 - RNA, 32 nt, Homo Sapiens
ccuggggcugacaaaagggugauuccaagauc

SEQ ID NO: 99488 - RNA, 32 nt, Homo Sapiens
ugguucauaccuugucaccacccgggaagcug

SEQ ID NO: 99489 - RNA, 32 nt, Homo Sapiens
aaaaagaugauuaagaaggaugcuccuacaac

SEQ ID NO: 99490 - RNA, 32 nt, Homo Sapiens
uuguaucaaauguuacaguuuauauuguggaa

SEQ ID NO: 99491 - RNA, 32 nt, Homo Sapiens
cacccgagcggcugcgagagccaaggcccgag

SEQ ID NO: 99492 - RNA, 32 nt, Homo Sapiens
ccggcccuggggcagcagagccaggauggagc

SEQ ID NO: 99493 - RNA, 32 nt, Homo Sapiens
uuucccacauucauagccuguagugcccccuc

SEQ ID NO: 99494 - RNA, 31 nt, Homo Sapiens
uuguugaugaaauaaacuuuguucaauuugu

SEQ ID NO: 99495 - RNA, 32 nt, Homo Sapiens
caugcccgccgggaagcccuggcccgcuucgc

SEQ ID NO: 99496 - RNA, 32 nt, Homo Sapiens
gguaacacuguucucaccuggacuucaaguuu

SEQ ID NO: 99497 - RNA, 32 nt, Homo Sapiens
aagaaggcggccuggggcccacgagcuccaga

SEQ ID NO: 99498 - RNA, 32 nt, Homo Sapiens
agaaccaagaaggagcuccauaaauccuucuu

SEQ ID NO: 99499 - RNA, 32 nt, Homo Sapiens
cgccuccccacuuguugagcaugggagcuggg

SEQ ID NO: 99500 - RNA, 32 nt, Homo Sapiens
gacagcuuuauggugccuccucgagugagccc

SEQ ID NO: 99501 - RNA, 32 nt, Homo Sapiens
cuucaucagaaauuaaauuuaaugcaaguaaa

SEQ ID NO: 99502 - RNA, 32 nt, Homo Sapiens
ggaagugagcggugcuguccucagguggccau

SEQ ID NO: 99503 - RNA, 32 nt, Homo Sapiens
guuugcaauauuuuuauaguagccuuuaugaa

SEQ ID NO: 99504 - RNA, 32 nt, Homo Sapiens
uggcuaaugcuguuagugaauuuuccaacuaa

SEQ ID NO: 99505 - RNA, 32 nt, Homo Sapiens
cucgcucaccgccgccgcuucucccugccccg

SEQ ID NO: 99506 - RNA, 32 nt, Homo Sapiens
uaauuugaccuaguaguauaaaacaugaggcu

SEQ ID NO: 99507 - RNA, 32 nt, Homo Sapiens
uuguuuacaguuuuugucugauguuuuuucuu

SEQ ID NO: 99508 - RNA, 32 nt, Homo Sapiens
auuuuugcaaauaacuuugguauuaugugaca

SEQ ID NO: 99509 - RNA, 32 nt, Homo Sapiens
uuauuucuacagugauucuacuucugaggagu

SEQ ID NO: 99510 - RNA, 32 nt, Homo Sapiens
augugaguggaggugugugugaugugugucag

SEQ ID NO: 99511 - RNA, 32 nt, Homo Sapiens
uucuaccuacuccgaguguccuccccugcccc

SEQ ID NO: 99512 - RNA, 32 nt, Homo Sapiens
cgaugaugaugaugaugaugaugaugauaaua

SEQ ID NO: 99513 - RNA, 32 nt, Homo Sapiens
cccacccccgucccugcuggccuccagccagu

SEQ ID NO: 99514 - RNA, 32 nt, Homo Sapiens
acgcccggguuccgaaagucucgggggugggu

SEQ ID NO: 99515 - RNA, 32 nt, Homo Sapiens
uugaauaaaaguuaauaacagcuccuuuauua

SEQ ID NO: 99516 - RNA, 32 nt, Homo Sapiens
uauucauuuucuccaccuuguuuauaugguaa

SEQ ID NO: 99517 - RNA, 32 nt, Homo Sapiens
ucccugggcugcggccggccuucucagaacga

SEQ ID NO: 99518 - RNA, 32 nt, Homo Sapiens
aaucauaaaucauauuugauuaacauuucauu

SEQ ID NO: 99519 - RNA, 32 nt, Homo Sapiens
ucaaggaggaggagaauguuuuaggcaggugg

SEQ ID NO: 99520 - RNA, 32 nt, Homo Sapiens
ugacaaauaaaauggagaaaaugaaacgaaaa

SEQ ID NO: 99521 - RNA, 32 nt, Homo Sapiens
ucucacuacacuuaagacaugugacacauucc

SEQ ID NO: 99522 - RNA, 32 nt, Homo Sapiens
gcggugcggcauccuccuccugggauuccugu

SEQ ID NO: 99523 - RNA, 32 nt, Homo Sapiens
ugagggacgccaucacccuggaccucuucugc

SEQ ID NO: 99524 - RNA, 32 nt, Homo Sapiens
cuaguuaggggaggucagguggucaauguccu

SEQ ID NO: 99525 - RNA, 32 nt, Homo Sapiens
guuguaaaauguaaaggucacuuuucacaucc

SEQ ID NO: 99526 - RNA, 32 nt, Homo Sapiens
auugauuuucuuccuccaauaguugguuucaa

SEQ ID NO: 99527 - RNA, 32 nt, Homo Sapiens
uucaaggucgaagagcaucccaguaugguugu

SEQ ID NO: 99528 - RNA, 32 nt, Homo Sapiens
acauugguagauuucuaaagacaacucauaaa

SEQ ID NO: 99529 - RNA, 32 nt, Homo Sapiens
uccuagaacuucuguccuuccuccccccuccc

SEQ ID NO: 99530 - RNA, 32 nt, Homo Sapiens
caguuucuuuucugugaucgagauugcuuaga

SEQ ID NO: 99531 - RNA, 32 nt, Homo Sapiens
cagcccaggucccagugccauuggcuucaaga

SEQ ID NO: 99532 - RNA, 32 nt, Homo Sapiens
cauucacaaauaccuauuuaugcuguacagau

SEQ ID NO: 99533 - RNA, 32 nt, Homo Sapiens
uucaucuagguggucaugauuaccugcaugcu

SEQ ID NO: 99534 - RNA, 30 nt, Homo Sapiens
ucaagauggcggcgucuguauuaaacaccg

SEQ ID NO: 99535 - RNA, 32 nt, Homo Sapiens
cacaguccuggucuuucucgucccagguaagg

SEQ ID NO: 99536 - RNA, 32 nt, Homo Sapiens
ugcgugcacgcccugccgccgccccgcagaaa

SEQ ID NO: 99537 - RNA, 32 nt, Homo Sapiens
cacagggggagcaaguccagaucacgcaggac

SEQ ID NO: 99538 - RNA, 32 nt, Homo Sapiens
cucuugugugguaagacuauuucaguuacuga

SEQ ID NO: 99539 - RNA, 32 nt, Homo Sapiens
caaccugugcaaccaggaugaaauucccccag

SEQ ID NO: 99540 - RNA, 32 nt, Homo Sapiens
cuacagccuuccccggcagcccagccuccacc

SEQ ID NO: 99541 - RNA, 32 nt, Homo Sapiens
aauuagccgggugugguggcgcaugucuguaa

SEQ ID NO: 99542 - RNA, 32 nt, Homo Sapiens
acccggcagcgggcgauaggggggccaggugc

SEQ ID NO: 99543 - RNA, 32 nt, Homo Sapiens
cuccagacaauuuuauuuuuccaauuaaaucu

SEQ ID NO: 99544 - RNA, 32 nt, Homo Sapiens
cgccugucgucccccgggcccagccgcucguc

SEQ ID NO: 99545 - RNA, 32 nt, Homo Sapiens
agccccaggcgaagcugguaccucuggcuaca

SEQ ID NO: 99546 - RNA, 32 nt, Homo Sapiens
gggugcaccaaaaucucagaagucacugcuaa

SEQ ID NO: 99547 - RNA, 32 nt, Homo Sapiens
aggaagaugagagauggucagauggaagagag

SEQ ID NO: 99548 - RNA, 32 nt, Homo Sapiens
uccucgccccccagcgcgcccgggcccgagag

SEQ ID NO: 99549 - RNA, 32 nt, Homo Sapiens
agcgggccuggagcuuccuccgcggggccccc

SEQ ID NO: 99550 - RNA, 32 nt, Homo Sapiens
gugcugaaacaugacccuuguuugucacauug

SEQ ID NO: 99551 - RNA, 32 nt, Homo Sapiens
uugaagccgucucaugcagaagagggaaugag

SEQ ID NO: 99552 - RNA, 32 nt, Homo Sapiens
ucuucuguuguccaaggcuguaaaauggacag

SEQ ID NO: 99553 - RNA, 32 nt, Homo Sapiens
ucaucuacauagguaauacugauaaacauuuu

SEQ ID NO: 99554 - RNA, 32 nt, Homo Sapiens
aucauugagggugacuaaucuucaguggacca

SEQ ID NO: 99555 - RNA, 32 nt, Homo Sapiens
gggggacggugauuguuggcuccaguuacuaa

SEQ ID NO: 99556 - RNA, 32 nt, Homo Sapiens
acauucucuccauggugacuggugaggggccu

SEQ ID NO: 99557 - RNA, 30 nt, Homo Sapiens
caaacugagaagcugaugguuuggguaaca

SEQ ID NO: 99558 - RNA, 32 nt, Homo Sapiens
aaaauacaaaaauuggcuggguguggugucac

SEQ ID NO: 99559 - RNA, 32 nt, Homo Sapiens
ugccuuguuucauuaaucuuguuucagagcuu

SEQ ID NO: 99560 - RNA, 32 nt, Homo Sapiens
guaauuccuauuuccuuaaucauuccuauuga

SEQ ID NO: 99561 - RNA, 32 nt, Homo Sapiens
uuuuguauuauacagcucugaaaauucugcca

SEQ ID NO: 99562 - RNA, 32 nt, Homo Sapiens
cgcagcuacccucagccuccaaugcauuggcc

SEQ ID NO: 99563 - RNA, 32 nt, Homo Sapiens
ccuccccucgcucgcucuccucuuccucuagg

SEQ ID NO: 99564 - RNA, 32 nt, Homo Sapiens
uuggggcggcggugcagaccgcggcggcggcu

SEQ ID NO: 99565 - RNA, 32 nt, Homo Sapiens
cagaaucugaaagcggaaggccaggcaagcug

SEQ ID NO: 99566 - RNA, 32 nt, Homo Sapiens
gguccccuucccuccgcaucccgucagcugga

SEQ ID NO: 99567 - RNA, 32 nt, Homo Sapiens
cagcggcaggucccgggaaccaaggcaacaga

SEQ ID NO: 99568 - RNA, 32 nt, Homo Sapiens
ugucaucaaagucuacaaaauauuuaccuucu

SEQ ID NO: 99569 - RNA, 32 nt, Homo Sapiens
ugaccagguaguccagguguucccuguguuug

SEQ ID NO: 99570 - RNA, 32 nt, Homo Sapiens
aguccggccaggagccggcgucccgcggccag

SEQ ID NO: 99571 - RNA, 32 nt, Homo Sapiens
agacccugccucuguuugaccccgcacugacu

SEQ ID NO: 99572 - RNA, 32 nt, Homo Sapiens
uacaggggcugacgcucuucccucgugcaucc

SEQ ID NO: 99573 - RNA, 32 nt, Homo Sapiens
gagcuuguuuuguuucauccuguccguaaggg

SEQ ID NO: 99574 - RNA, 32 nt, Homo Sapiens
agccaggugggcugggcagagccuuggggccu

SEQ ID NO: 99575 - RNA, 32 nt, Homo Sapiens
agucaguucuuugucccacuguaguuugcauu

SEQ ID NO: 99576 - RNA, 32 nt, Homo Sapiens
cgccgaagcugcgggcgggcgggcgggcacca

SEQ ID NO: 99577 - RNA, 32 nt, Homo Sapiens
auaugguuugcuaaaaucuauaagcugcuuau

SEQ ID NO: 99578 - RNA, 32 nt, Homo Sapiens
aaggguuagggcuagucagagaaucauagaac

SEQ ID NO: 99579 - RNA, 32 nt, Homo Sapiens
uccuaaacaaaaauguuagucagggucacuaa

SEQ ID NO: 99580 - RNA, 32 nt, Homo Sapiens
ugccuaauuguacagcuagagccugcaaguuc

SEQ ID NO: 99581 - RNA, 32 nt, Homo Sapiens
ccagcucaagacauuuuggaggaucuggcccu

SEQ ID NO: 99582 - RNA, 32 nt, Homo Sapiens
uuuuuccauugccacugucuccagguucagua

SEQ ID NO: 99583 - RNA, 32 nt, Homo Sapiens
ccccagaccugccagccccggcguccuggagc

SEQ ID NO: 99584 - RNA, 32 nt, Homo Sapiens
ggaaacgcagcaccccacugguucugaggccc

SEQ ID NO: 99585 - RNA, 32 nt, Homo Sapiens
acgucuggguggcggcagcagcuuugcucuga

SEQ ID NO: 99586 - RNA, 32 nt, Homo Sapiens
agauggagcuggaggaggaaaaggcaggcagu

SEQ ID NO: 99587 - RNA, 32 nt, Homo Sapiens
acuucuuuuuuuucuuuuuaauaaaaacuguu

SEQ ID NO: 99588 - RNA, 32 nt, Homo Sapiens
cccaaagaaaucagcaguuuacaaauggauaa

SEQ ID NO: 99589 - RNA, 32 nt, Homo Sapiens
cgccuucccgagcacacauaaaagcacaaaga

SEQ ID NO: 99590 - RNA, 32 nt, Homo Sapiens
uaggaaccccauuuuuccaccuccccccgaau

SEQ ID NO: 99591 - RNA, 32 nt, Homo Sapiens
aaucuauauuccagguauuguuuuuagucuga

SEQ ID NO: 99592 - RNA, 23 nt, Homo Sapiens
gaaggccgugcaggcagaucagg

SEQ ID NO: 99593 - RNA, 32 nt, Homo Sapiens
agugguagcaauuuaaucauaacuuucauuug

SEQ ID NO: 99594 - RNA, 32 nt, Homo Sapiens
aagacugcccuggcugcccucggcugggccuu

SEQ ID NO: 99595 - RNA, 32 nt, Homo Sapiens
guuuugaaugaauauuuugugaaucuuucuua

SEQ ID NO: 99596 - RNA, 32 nt, Homo Sapiens
guggucugguggauagcggggagcauggcuca

SEQ ID NO: 99597 - RNA, 32 nt, Homo Sapiens
gcugugaguaccucuuucuacuccuuucaggu

SEQ ID NO: 99598 - RNA, 32 nt, Homo Sapiens
gcagcuucuucuccgaaccaacccuuugccuu

SEQ ID NO: 99599 - RNA, 32 nt, Homo Sapiens
aaagcugcgaaccguggcacacgcucauaguu

SEQ ID NO: 99600 - RNA, 32 nt, Homo Sapiens
guuuuauuuugguagucuggaacugaaccugc

SEQ ID NO: 99601 - RNA, 32 nt, Homo Sapiens
cgcccuacucuccacccgugaccuccagugga

SEQ ID NO: 99602 - RNA, 32 nt, Homo Sapiens
cggccuaggaggcccaggaucccggagacgcc

SEQ ID NO: 99603 - RNA, 32 nt, Homo Sapiens
ggcgcgcggggcccgccauggcugcgucggag

SEQ ID NO: 99604 - RNA, 32 nt, Homo Sapiens
ccucacucugcuagcaccuccucccuuucccc

SEQ ID NO: 99605 - RNA, 32 nt, Homo Sapiens
agaaugaggagcugcaagagccuggcugggaa

SEQ ID NO: 99606 - RNA, 32 nt, Homo Sapiens
ugauugcauccacuagcuucucuuuuucucgc

SEQ ID NO: 99607 - RNA, 32 nt, Homo Sapiens
auuuacuuaauaaaaauacacgcuaugaguca

SEQ ID NO: 99608 - RNA, 32 nt, Homo Sapiens
auauuuaugcaaauaaaaucuuuaaaugggug

SEQ ID NO: 99609 - RNA, 29 nt, Homo Sapiens
ucagcgugaagcaguuauuuucuacacua

SEQ ID NO: 99610 - RNA, 32 nt, Homo Sapiens
agaauuuuguuguuucucagcuguuuuccaaa

SEQ ID NO: 99611 - RNA, 32 nt, Homo Sapiens
gccucaaguauauauuugauaaguauuguuac

SEQ ID NO: 99612 - RNA, 32 nt, Homo Sapiens
gaauauuucaaccaccucuggagaccaaagag

SEQ ID NO: 99613 - RNA, 32 nt, Homo Sapiens
gcagagaugaugaacagaaguguauguaaaua

SEQ ID NO: 99614 - RNA, 32 nt, Homo Sapiens
gggagcgcgggccgcggccaugggcacccugg

SEQ ID NO: 99615 - RNA, 32 nt, Homo Sapiens
uuucuuuuuuuguguuuuuaaucuucgauacu

SEQ ID NO: 99616 - RNA, 32 nt, Homo Sapiens
uuaaugaaacacacuuguaaaccucuuuugca

SEQ ID NO: 99617 - RNA, 32 nt, Homo Sapiens
accgggcuggcucucgccgagccccgggccuc

SEQ ID NO: 99618 - RNA, 32 nt, Homo Sapiens
ucauuucauuggcguuugagucagcaaagaag

SEQ ID NO: 99619 - RNA, 32 nt, Homo Sapiens
ccuuccaaauuugaaaacucaauaaaaauaac

SEQ ID NO: 99620 - RNA, 32 nt, Homo Sapiens
uauacacacauauauauguauauauacacaua

SEQ ID NO: 99621 - RNA, 32 nt, Homo Sapiens
uuuggcugccccagcgagagccggccagguug

SEQ ID NO: 99622 - RNA, 32 nt, Homo Sapiens
gugauggguuaguggauggaaggggcugacag

SEQ ID NO: 99623 - RNA, 32 nt, Homo Sapiens
ugccuagcagagccccagucuccagccccuuc

SEQ ID NO: 99624 - RNA, 32 nt, Homo Sapiens
agccgcagcaggggcggcggcggcggaucgag

SEQ ID NO: 99625 - RNA, 32 nt, Homo Sapiens
cuaauauccuaggggcauguuccuccuaaugu

SEQ ID NO: 99626 - RNA, 32 nt, Homo Sapiens
ggcggagggcuuugaaguccaagcagcugaac

SEQ ID NO: 99627 - RNA, 32 nt, Homo Sapiens
cuuacauugagaaauaaaaauguuguuuuguu

SEQ ID NO: 99628 - RNA, 32 nt, Homo Sapiens
uccccucacccgcuccacgcccuccugggccg

SEQ ID NO: 99629 - RNA, 32 nt, Homo Sapiens
ugggugguuuccccggccgcagcuccguacgg

SEQ ID NO: 99630 - RNA, 32 nt, Homo Sapiens
gggggcgugcgcggcgauccgcugcuacccgg

SEQ ID NO: 99631 - RNA, 32 nt, Homo Sapiens
acgcggguuccugccggagcagcccucccaaa

SEQ ID NO: 99632 - RNA, 32 nt, Homo Sapiens
gcaggcuccccggccccggggccucagggucc

SEQ ID NO: 99633 - RNA, 32 nt, Homo Sapiens
ugcauuucauuguuauguuuuauuuucugaua

SEQ ID NO: 99634 - RNA, 32 nt, Homo Sapiens
ugguggggugucaucacccccauugucccuag

SEQ ID NO: 99635 - RNA, 32 nt, Homo Sapiens
uagagaaacaacaugguuccaagaaggagggu

SEQ ID NO: 99636 - RNA, 32 nt, Homo Sapiens
aucugcacacgagccaguggcugcuugcaguu

SEQ ID NO: 99637 - RNA, 32 nt, Homo Sapiens
gucacaaucuacuuuucuuaaacuuuguaucu

SEQ ID NO: 99638 - RNA, 32 nt, Homo Sapiens
gauugauugcuuuaaaaaacaaaccuggcucu

SEQ ID NO: 99639 - RNA, 32 nt, Homo Sapiens
cgcccccgcgucugcaccucugugguuccugc

SEQ ID NO: 99640 - RNA, 32 nt, Homo Sapiens
uuguuugaaaauuuuuaugaaaccaaaaacaa

SEQ ID NO: 99641 - RNA, 32 nt, Homo Sapiens
ugauucguuggaaaaauucauugucucuagag

SEQ ID NO: 99642 - RNA, 32 nt, Homo Sapiens
ggugggugaaccaggccauacacgucggccau

SEQ ID NO: 99643 - RNA, 32 nt, Homo Sapiens
gucgcaguccggaguuuuggcuccucuccuuu

SEQ ID NO: 99644 - RNA, 32 nt, Homo Sapiens
uauguuaaacacauuuuggcagugugcuauaa

SEQ ID NO: 99645 - RNA, 32 nt, Homo Sapiens
aaccauuggggaugauagcagauucacaaugg

SEQ ID NO: 99646 - RNA, 32 nt, Homo Sapiens
ugcuguggccagcuggggggcuuccuccagac

SEQ ID NO: 99647 - RNA, 32 nt, Homo Sapiens
agaggaagacccugccauuccacagccccuuc

SEQ ID NO: 99648 - RNA, 32 nt, Homo Sapiens
caugagaugccuccacacaucuaugcuauauc

SEQ ID NO: 99649 - RNA, 32 nt, Homo Sapiens
aaagccggagaauuggggcacgaagcggggcu

SEQ ID NO: 99650 - RNA, 32 nt, Homo Sapiens
ggaaucucuuagcagacuuuggaguuccccau

SEQ ID NO: 99651 - RNA, 32 nt, Homo Sapiens
acaguggacuuccaaagugcugggauuacagg

SEQ ID NO: 99652 - RNA, 32 nt, Homo Sapiens
aaaggcgagugugugggguuccuccuucccuc

SEQ ID NO: 99653 - RNA, 32 nt, Homo Sapiens
uugaugcccgucuuuugguuuacgucaucauu

SEQ ID NO: 99654 - RNA, 32 nt, Homo Sapiens
caaagguguacuuacuuccuuauuuaucucca

SEQ ID NO: 99655 - RNA, 28 nt, Homo Sapiens
cugaaaguggaucagauuauaaacugga

SEQ ID NO: 99656 - RNA, 32 nt, Homo Sapiens
auggcaaagggagaacuggggggcuggcaggu

SEQ ID NO: 99657 - RNA, 32 nt, Homo Sapiens
uaucuuuuaaauguuucuuuuauuacaaagcc

SEQ ID NO: 99658 - RNA, 32 nt, Homo Sapiens
acauuuacaaucgucuuaauuuuguacucaga

SEQ ID NO: 99659 - RNA, 32 nt, Homo Sapiens
guuugugugcaaauauaaggcuaaauaaaugg

SEQ ID NO: 99660 - RNA, 32 nt, Homo Sapiens
cucuccaguggugaagacccagccugcugaga

SEQ ID NO: 99661 - RNA, 32 nt, Homo Sapiens
ugcaaugcauauaaaaacuauaaaugccgagu

SEQ ID NO: 99662 - RNA, 32 nt, Homo Sapiens
caagcagcaaggaagauguggauacuuacugu

SEQ ID NO: 99663 - RNA, 32 nt, Homo Sapiens
aaucuuccagcaugcauccccaaaaaacaaga

SEQ ID NO: 99664 - RNA, 32 nt, Homo Sapiens
gaggaagugccuccagcuuuucugggggucuc

SEQ ID NO: 99665 - RNA, 32 nt, Homo Sapiens
ucagcuccacuuucagugaaagcaucacuugg

SEQ ID NO: 99666 - RNA, 32 nt, Homo Sapiens
gagugaaauauguugcuuccacagcaacugga

SEQ ID NO: 99667 - RNA, 32 nt, Homo Sapiens
ggauucccacugggcucugguccuucccuugg

SEQ ID NO: 99668 - RNA, 32 nt, Homo Sapiens
gcaccugcagcggcugcccucuggggccacuu

SEQ ID NO: 99669 - RNA, 32 nt, Homo Sapiens
gacuuugcuguauggaaaaauaaagugaaauu

SEQ ID NO: 99670 - RNA, 32 nt, Homo Sapiens
uuuguuuuuuggucuuuuuuuguauuauaaaa

SEQ ID NO: 99671 - RNA, 32 nt, Homo Sapiens
uaacuuguaguuuaucagguauucccaggaaa

SEQ ID NO: 99672 - RNA, 32 nt, Homo Sapiens
aaauucauuuuucaugcuuaaaaauaauagaa

SEQ ID NO: 99673 - RNA, 32 nt, Homo Sapiens
caagucaaagauuuacagagaagacuaaauga

SEQ ID NO: 99674 - RNA, 32 nt, Homo Sapiens
ggcccucugugcccucagccagcccuguaagg

SEQ ID NO: 99675 - RNA, 32 nt, Homo Sapiens
agacgggcucugccggaugcuggacgagcggc

SEQ ID NO: 99676 - RNA, 32 nt, Homo Sapiens
gugcggaguuuggcugcuccgggguuagcagg

SEQ ID NO: 99677 - RNA, 32 nt, Homo Sapiens
aauguuggucauuuuauguuaagggaagaauu

SEQ ID NO: 99678 - RNA, 32 nt, Homo Sapiens
uuacccccugucauguucugggcaacaucaua

SEQ ID NO: 99679 - RNA, 32 nt, Homo Sapiens
cuuuaagaacuaaaauguucuaaauaucccuu

SEQ ID NO: 99680 - RNA, 32 nt, Homo Sapiens
acucuaccucaucacucagcaguuguugggca

SEQ ID NO: 99681 - RNA, 32 nt, Homo Sapiens
ucgugggugggauggccgcgggccgccucuuu

SEQ ID NO: 99682 - RNA, 32 nt, Homo Sapiens
aggaguggggaccgggcgggggguggaggaag

SEQ ID NO: 99683 - RNA, 32 nt, Homo Sapiens
gaagugccaggacgaccaaaccccgcugcucu

SEQ ID NO: 99684 - RNA, 32 nt, Homo Sapiens
uuuaaauugguagaauucuuugcgaacuguca

SEQ ID NO: 99685 - RNA, 32 nt, Homo Sapiens
cauucuguuuccuccuccacgaccacagccau

SEQ ID NO: 99686 - RNA, 27 nt, Homo Sapiens
ugucccagcuccuucagcccuuucugu

SEQ ID NO: 99687 - RNA, 32 nt, Homo Sapiens
gaagcuuaacuccuguggauucacaucaaaua

SEQ ID NO: 99688 - RNA, 32 nt, Homo Sapiens
auugauuuaaguggaucauagaccuaaauaua

SEQ ID NO: 99689 - RNA, 32 nt, Homo Sapiens
accuugccgcggccgccuggcuccuuuccgcg

SEQ ID NO: 99690 - RNA, 31 nt, Homo Sapiens
cuguccccagccugccugccuccguuucccu

SEQ ID NO: 99691 - RNA, 32 nt, Homo Sapiens
gggcugggcccucgcuccugacuguugcugcu

SEQ ID NO: 99692 - RNA, 32 nt, Homo Sapiens
ccccaucucggguccauccuauacuuccaugg

SEQ ID NO: 99693 - RNA, 32 nt, Homo Sapiens
aauaucaaacuuaugagucaccuagggguuca

SEQ ID NO: 99694 - RNA, 32 nt, Homo Sapiens
uucauagcaaagacauagucagcuaaaagccg

SEQ ID NO: 99695 - RNA, 32 nt, Homo Sapiens
ccccucgcgcccccgagacaaagaggagagaa

SEQ ID NO: 99696 - RNA, 32 nt, Homo Sapiens
auuuggaaauuaacauucuccaaacauuccag

SEQ ID NO: 99697 - RNA, 32 nt, Homo Sapiens
augucuagaaaguaagaaaacaauaugaggag

SEQ ID NO: 99698 - RNA, 32 nt, Homo Sapiens
ggucacuaaaaagaagaaaaggacuaacaagc

SEQ ID NO: 99699 - RNA, 32 nt, Homo Sapiens
agccgggaaugggagauggcaacagucccugu

SEQ ID NO: 99700 - RNA, 32 nt, Homo Sapiens
agcaaaacugauccaugguguuagaagccagg

SEQ ID NO: 99701 - RNA, 30 nt, Homo Sapiens
cuaauuaggaagcuugauuugcuuugugau

SEQ ID NO: 99702 - RNA, 32 nt, Homo Sapiens
ccccaccgccagccgcagccaaguagaggggg

SEQ ID NO: 99703 - RNA, 32 nt, Homo Sapiens
uacugcucuccccuuccaaccccauuucccca

SEQ ID NO: 99704 - RNA, 32 nt, Homo Sapiens
guauuuuuaaacauuucucaccaacuuucuua

SEQ ID NO: 99705 - RNA, 32 nt, Homo Sapiens
gcagggguuuguggagguggguagggcagggg

SEQ ID NO: 99706 - RNA, 32 nt, Homo Sapiens
gaaccagugggaucaaugccggcggccucugu

SEQ ID NO: 99707 - RNA, 32 nt, Homo Sapiens
gaauuuuacccccauucucuucuguuugucug

SEQ ID NO: 99708 - RNA, 32 nt, Homo Sapiens
aaaaagggauuuucuuuuuuuuuucuuuuaaa

SEQ ID NO: 99709 - RNA, 32 nt, Homo Sapiens
ugugauggagaagccgcggcggagcccgaacc

SEQ ID NO: 99710 - RNA, 32 nt, Homo Sapiens
caggcuugacuugcaauuauuauuuaaauacc

SEQ ID NO: 99711 - RNA, 32 nt, Homo Sapiens
cuggacuugagccuagagauuuagguuuaauu

SEQ ID NO: 99712 - RNA, 32 nt, Homo Sapiens
auuuaccgucuucucauccucuguacaaaagc

SEQ ID NO: 99713 - RNA, 32 nt, Homo Sapiens
gggggagguugguggaccauggagucccuggu

SEQ ID NO: 99714 - RNA, 32 nt, Homo Sapiens
aguacuaucucauguuauuuuauuuuuuaaaa

SEQ ID NO: 99715 - RNA, 32 nt, Homo Sapiens
ucugguguugaggaucaagugccauagccuuu

SEQ ID NO: 99716 - RNA, 32 nt, Homo Sapiens
aggggcuggggaagccgagacgggcacucccu

SEQ ID NO: 99717 - RNA, 32 nt, Homo Sapiens
cuggccaguguccuuccaccuguccacaagca

SEQ ID NO: 99718 - RNA, 32 nt, Homo Sapiens
ugagaggguuccugggggaaguauggugaaua

SEQ ID NO: 99719 - RNA, 32 nt, Homo Sapiens
aucugggcaacgcacacugcgcuuuaaucaag

SEQ ID NO: 99720 - RNA, 32 nt, Homo Sapiens
auaguauggaucuuuuuaaaucaauaagaugc

SEQ ID NO: 99721 - RNA, 32 nt, Homo Sapiens
ucaguguacucauaugucucauuuucaucuaa

SEQ ID NO: 99722 - RNA, 32 nt, Homo Sapiens
cuuggacccuacuauuuauccuggacuagcuu

SEQ ID NO: 99723 - RNA, 32 nt, Homo Sapiens
agucagugggccgcagccccagacccccugcg

SEQ ID NO: 99724 - RNA, 32 nt, Homo Sapiens
ccgacccugugggacccccaccccucugaugc

SEQ ID NO: 99725 - RNA, 32 nt, Homo Sapiens
uaguuugacauucaaagugacaauguuuagca

SEQ ID NO: 99726 - RNA, 32 nt, Homo Sapiens
cuuguuuuguuaauuucuuuaauauuuuuauc

SEQ ID NO: 99727 - RNA, 32 nt, Homo Sapiens
auacuaaauuuuugguaauuuguuauggcagc

SEQ ID NO: 99728 - RNA, 32 nt, Homo Sapiens
acaguaugaacaucucauuggaccucagaaaa

SEQ ID NO: 99729 - RNA, 32 nt, Homo Sapiens
cuuuugauguaggugcuguuauuaucucuacg

SEQ ID NO: 99730 - RNA, 32 nt, Homo Sapiens
gccuguuuccggauccgccgugucacagacau

SEQ ID NO: 99731 - RNA, 32 nt, Homo Sapiens
ugacgagaacgccguggaccacagcucugaga

SEQ ID NO: 99732 - RNA, 32 nt, Homo Sapiens
gagggaauguguggcucuggcugcccagggcc

SEQ ID NO: 99733 - RNA, 32 nt, Homo Sapiens
caucagucaccauuugccccucgcagcaaccc

SEQ ID NO: 99734 - RNA, 32 nt, Homo Sapiens
gacuuucugaccaaggaggugaugguggauga

SEQ ID NO: 99735 - RNA, 32 nt, Homo Sapiens
ggcucuauccuccacggccccauccaagccag

SEQ ID NO: 99736 - RNA, 32 nt, Homo Sapiens
gagaggugucuauggggcacccgcugccgccg

SEQ ID NO: 99737 - RNA, 32 nt, Homo Sapiens
gcgagccugugccuuccuccccgccuccuccc

SEQ ID NO: 99738 - RNA, 32 nt, Homo Sapiens
uuugcccauuuuuuaaugggguuguuugcuuu

SEQ ID NO: 99739 - RNA, 28 nt, Homo Sapiens
ucggguuuugguaucaggaugauucugg

SEQ ID NO: 99740 - RNA, 32 nt, Homo Sapiens
uguggagcggaaaagcagguugguaaaguucc

SEQ ID NO: 99741 - RNA, 32 nt, Homo Sapiens
uucuuggguugugacaaggaugggcuauaggg

SEQ ID NO: 99742 - RNA, 32 nt, Homo Sapiens
uacaggcgccugccaccacaccuggcuaauuu

SEQ ID NO: 99743 - RNA, 32 nt, Homo Sapiens
gagguucgccuggaagggauagauacaauuuu

SEQ ID NO: 99744 - RNA, 32 nt, Homo Sapiens
ggcagggguguugguguuggggcagcccucag

SEQ ID NO: 99745 - RNA, 32 nt, Homo Sapiens
ucaaauuucaacaugagguuuggguaaaggau

SEQ ID NO: 99746 - RNA, 32 nt, Homo Sapiens
gucgaaugguaguucugcuuuuagcucuuuga

SEQ ID NO: 99747 - RNA, 32 nt, Homo Sapiens
cuucccacaccagccgcgcccaccgcaggugg

SEQ ID NO: 99748 - RNA, 32 nt, Homo Sapiens
agaagauauuugcgguauuuucaacaaaggac

SEQ ID NO: 99749 - RNA, 32 nt, Homo Sapiens
gucaccgagggaggaggccgacacaccacacc

SEQ ID NO: 99750 - RNA, 32 nt, Homo Sapiens
cucaguuuucgggucgucauggcuggcuacga

SEQ ID NO: 99751 - RNA, 32 nt, Homo Sapiens
gaauacugaacaucugaguccuggaugauacu

SEQ ID NO: 99752 - RNA, 32 nt, Homo Sapiens
agccuucccucauuauugucauucuuggagag

SEQ ID NO: 99753 - RNA, 32 nt, Homo Sapiens
uaaagccugugcuaccaguacuaagaggggaa

SEQ ID NO: 99754 - RNA, 32 nt, Homo Sapiens
ucuaagaucccauuggaaggaaugcucuaccu

SEQ ID NO: 99755 - RNA, 32 nt, Homo Sapiens
gcucgcuacaaccuccaccucccagcaacccg

SEQ ID NO: 99756 - RNA, 32 nt, Homo Sapiens
guacuuuggugacacuuuucguggggcucucu

SEQ ID NO: 99757 - RNA, 32 nt, Homo Sapiens
cccagccugccagccgcgcugcugcugcuccu

SEQ ID NO: 99758 - RNA, 32 nt, Homo Sapiens
acguuggugaauuguaugguauguaaauuaua

SEQ ID NO: 99759 - RNA, 32 nt, Homo Sapiens
gacauaccuuacauuuagcauguagaauucca

SEQ ID NO: 99760 - RNA, 32 nt, Homo Sapiens
aaacuucagaaccugagcacuuugggaggccc

SEQ ID NO: 99761 - RNA, 32 nt, Homo Sapiens
ccuuccgggcggaugcagggcuggggucaucu

SEQ ID NO: 99762 - RNA, 32 nt, Homo Sapiens
cugacuuuguauccucuccuuuuagaggcuuu

SEQ ID NO: 99763 - RNA, 32 nt, Homo Sapiens
aggugugacaccuucagcaggucucagggaag

SEQ ID NO: 99764 - RNA, 32 nt, Homo Sapiens
aucugucagaucuguggcuucaggcaggagga

SEQ ID NO: 99765 - RNA, 32 nt, Homo Sapiens
acccagcgcccucgcugcccagcccugccugu

SEQ ID NO: 99766 - RNA, 32 nt, Homo Sapiens
gacaaaagaaagacauaugaaaggaauuguaa

SEQ ID NO: 99767 - RNA, 32 nt, Homo Sapiens
acaugugagugcucugagguguguacaccacg

SEQ ID NO: 99768 - RNA, 32 nt, Homo Sapiens
cagggucugcccgcugcacguucugccaaggu

SEQ ID NO: 99769 - RNA, 32 nt, Homo Sapiens
gcggaucccuccccgccuccauccucguucug

SEQ ID NO: 99770 - RNA, 32 nt, Homo Sapiens
aaagguagcccccgagggauguccuuggggag

SEQ ID NO: 99771 - RNA, 32 nt, Homo Sapiens
ucauuuuucuauacuuuuuuuuuugaggcaga

SEQ ID NO: 99772 - RNA, 32 nt, Homo Sapiens
auacaccuuguacaccuaguggaugcucuaga

SEQ ID NO: 99773 - RNA, 32 nt, Homo Sapiens
ccguuccucacuuuucccuuuucauucccacc

SEQ ID NO: 99774 - RNA, 32 nt, Homo Sapiens
augacguggugggcuacguauuguucacguca

SEQ ID NO: 99775 - RNA, 32 nt, Homo Sapiens
uccuuaaagagauaagucauauacaccuaguu

SEQ ID NO: 99776 - RNA, 32 nt, Homo Sapiens
gacuucuuccugugccagguccaagucggggg

SEQ ID NO: 99777 - RNA, 32 nt, Homo Sapiens
uguuuaaaaaucacauuuauaagugaaccgua

SEQ ID NO: 99778 - RNA, 28 nt, Homo Sapiens
gcuguaauuacaggagcaagagaaagaa

SEQ ID NO: 99779 - RNA, 32 nt, Homo Sapiens
caauucagaaaaguauaacaaaggaaauaaaa

SEQ ID NO: 99780 - RNA, 32 nt, Homo Sapiens
ugggcuucucugggucccacucucuggcugcc

SEQ ID NO: 99781 - RNA, 32 nt, Homo Sapiens
cccauacuacguaugcagaaauuucuaagacu

SEQ ID NO: 99782 - RNA, 32 nt, Homo Sapiens
uucucucccucauccguuuuccucuucaacau

SEQ ID NO: 99783 - RNA, 32 nt, Homo Sapiens
agcgcggaaccggcccgagggcccuacccgga

SEQ ID NO: 99784 - RNA, 32 nt, Homo Sapiens
gggggcugcccccgagguuggagagaaacaca

SEQ ID NO: 99785 - RNA, 32 nt, Homo Sapiens
uuauaaaucuaucagucugcauggaugcaaac

SEQ ID NO: 99786 - RNA, 32 nt, Homo Sapiens
uccuccuuuaccuuccucucuccucagcggcc

SEQ ID NO: 99787 - RNA, 32 nt, Homo Sapiens
cuguuugaguuuuuaaacuuaaucuagaacag

SEQ ID NO: 99788 - RNA, 32 nt, Homo Sapiens
ugccuucagggagcugcuaagaaggacaaaua

SEQ ID NO: 99789 - RNA, 32 nt, Homo Sapiens
guagcugcuuugcagguacaucaugugacagu

SEQ ID NO: 99790 - RNA, 32 nt, Homo Sapiens
aagagucugcagagccuuugcccgccagcgcc

SEQ ID NO: 99791 - RNA, 32 nt, Homo Sapiens
gugcuuaacgcaggagcuggcagagaaagugg

SEQ ID NO: 99792 - RNA, 32 nt, Homo Sapiens
gacuccagugcccuccucucccaagagacaaa

SEQ ID NO: 99793 - RNA, 32 nt, Homo Sapiens
aggaaagaacaucagcugaccaaaugucaucg

SEQ ID NO: 99794 - RNA, 32 nt, Homo Sapiens
uaagucaaacaaaaugagaacaccaaauuuug

SEQ ID NO: 99795 - RNA, 32 nt, Homo Sapiens
auucaguaggaauuacaauaugauguuauuag

SEQ ID NO: 99796 - RNA, 32 nt, Homo Sapiens
agaguucuucacggucuuggauauaguaacuc

SEQ ID NO: 99797 - RNA, 32 nt, Homo Sapiens
uggcgcgcaccuguaaucccagcugcucggga

SEQ ID NO: 99798 - RNA, 32 nt, Homo Sapiens
aaaugcacauaaauuuggaaggaggaaauaca

SEQ ID NO: 99799 - RNA, 32 nt, Homo Sapiens
auguaaauguaauuauuuaaaacacacacacu

SEQ ID NO: 99800 - RNA, 32 nt, Homo Sapiens
gaaaaucugaaucagaaagcuuucucaauuga

SEQ ID NO: 99801 - RNA, 32 nt, Homo Sapiens
ucgucaggggagacuuuuaggaggccgcagcc

SEQ ID NO: 99802 - RNA, 32 nt, Homo Sapiens
aggaagaacacaagagcaaacacacaacaaug

SEQ ID NO: 99803 - RNA, 32 nt, Homo Sapiens
aggagcugaccagggagggagguacccaugag

SEQ ID NO: 99804 - RNA, 32 nt, Homo Sapiens
uuggcuugcuuuuggaacaggcuggcccagca

SEQ ID NO: 99805 - RNA, 32 nt, Homo Sapiens
gcagguacuuggagagugggaccaagacccuu

SEQ ID NO: 99806 - RNA, 32 nt, Homo Sapiens
ugcgguccccggggauucuggaugcuggucuu

SEQ ID NO: 99807 - RNA, 32 nt, Homo Sapiens
ugaguaugaagccacagagauucuucagaaag

SEQ ID NO: 99808 - RNA, 32 nt, Homo Sapiens
cccugcgcugcgcgcccggcccgugcugccau

SEQ ID NO: 99809 - RNA, 32 nt, Homo Sapiens
gcuuccuccuucacuuggcacccauuaucucu

SEQ ID NO: 99810 - RNA, 32 nt, Homo Sapiens
aacacagauacauuuugguuugcagucuguac

SEQ ID NO: 99811 - RNA, 32 nt, Homo Sapiens
ugcaugccuuccccacuccccagcuggcugaa

SEQ ID NO: 99812 - RNA, 32 nt, Homo Sapiens
gugacugccuguguucugggguucugagaggg

SEQ ID NO: 99813 - RNA, 30 nt, Homo Sapiens
aggaguggagauggcggcggcggcggcuca

SEQ ID NO: 99814 - RNA, 32 nt, Homo Sapiens
uggcucuccgcaaccugagaguccuccugccc

SEQ ID NO: 99815 - RNA, 32 nt, Homo Sapiens
gagauuucgauugagauauuuucucaugcaga

SEQ ID NO: 99816 - RNA, 32 nt, Homo Sapiens
gauguaauugguuuuugagaaacauuaguaua

SEQ ID NO: 99817 - RNA, 32 nt, Homo Sapiens
gcuggcggagagcgggaggcggcugcgacugc

SEQ ID NO: 99818 - RNA, 32 nt, Homo Sapiens
aaagaaauauuuuuaagauguucuuaagcaaa

SEQ ID NO: 99819 - RNA, 32 nt, Homo Sapiens
gcugccucgaggaugaagugcaaacccaacca

SEQ ID NO: 99820 - RNA, 32 nt, Homo Sapiens
acuacagacaccuggucuuccuugguauuguu

SEQ ID NO: 99821 - RNA, 32 nt, Homo Sapiens
ccuuccaggcacagcucuggucaccucugguc

SEQ ID NO: 99822 - RNA, 31 nt, Homo Sapiens
accucuugcgcuucuuacagugagugccaau

SEQ ID NO: 99823 - RNA, 32 nt, Homo Sapiens
auagaauaaugagaauugaauuuuuaaguucu

SEQ ID NO: 99824 - RNA, 32 nt, Homo Sapiens
gcccccaccccauuacuguaccucuggaguca

SEQ ID NO: 99825 - RNA, 32 nt, Homo Sapiens
agcagcacucggcgccagcagccucugccaga

SEQ ID NO: 99826 - RNA, 32 nt, Homo Sapiens
aaaguuuuuuauuccuuuauuuccugccuggg

SEQ ID NO: 99827 - RNA, 32 nt, Homo Sapiens
gagccagcccagcccuguuuccccucaguccu

SEQ ID NO: 99828 - RNA, 32 nt, Homo Sapiens
gccggacccgcaccucggcgggcgccacacac

SEQ ID NO: 99829 - RNA, 32 nt, Homo Sapiens
ggggaaggguuuugcagaaguacccagaacug

SEQ ID NO: 99830 - RNA, 32 nt, Homo Sapiens
ccaaaggagguagguugauggugcuuaacaaa

SEQ ID NO: 99831 - RNA, 27 nt, Homo Sapiens
ugauccuccugcuucagccucccauau

SEQ ID NO: 99832 - RNA, 32 nt, Homo Sapiens
aagggaagaaggaauagaaucuggagaucugg

SEQ ID NO: 99833 - RNA, 32 nt, Homo Sapiens
caauggaaggauucuucucagccuugacccug

SEQ ID NO: 99834 - RNA, 32 nt, Homo Sapiens
gagaccaccccgcuccuugcugcagcugaaag

SEQ ID NO: 99835 - RNA, 30 nt, Homo Sapiens
ucagaggcuccgaacucgccggcggagucg

SEQ ID NO: 99836 - RNA, 32 nt, Homo Sapiens
auuuuacuuggccaauucaaauaaaaauaaag

SEQ ID NO: 99837 - RNA, 32 nt, Homo Sapiens
uuauuauuacuuuauccuggaacaugcaaaau

SEQ ID NO: 99838 - RNA, 32 nt, Homo Sapiens
uuuggggagcagcgguucuccuuauuuuucua

SEQ ID NO: 99839 - RNA, 32 nt, Homo Sapiens
cuuccuucucuccccccaagccuccauauuua

SEQ ID NO: 99840 - RNA, 32 nt, Homo Sapiens
caaccuggcuggggcggggaggaggugcaggg

SEQ ID NO: 99841 - RNA, 31 nt, Homo Sapiens
gccuccaccgcggaccugccccagccccgca

SEQ ID NO: 99842 - RNA, 32 nt, Homo Sapiens
guggggaccccucgcaacccugccugucaccu

SEQ ID NO: 99843 - RNA, 32 nt, Homo Sapiens
ucucucuucacaauugugggugucaagcuuca

SEQ ID NO: 99844 - RNA, 32 nt, Homo Sapiens
uggcagugugggauggaugaaugaaguggaau

SEQ ID NO: 99845 - RNA, 32 nt, Homo Sapiens
gaaagagggaguuaauaaagccauuggagcau

SEQ ID NO: 99846 - RNA, 32 nt, Homo Sapiens
guggagucaacacagucaaucaauagccaacc

SEQ ID NO: 99847 - RNA, 32 nt, Homo Sapiens
caggcguguggcagccacacacaggcggccag

SEQ ID NO: 99848 - RNA, 32 nt, Homo Sapiens
aaucugaaaaucaauuugcuuugucaaugcuu

SEQ ID NO: 99849 - RNA, 32 nt, Homo Sapiens
uuucuaacacaaguucccaagugauugcuggu

SEQ ID NO: 99850 - RNA, 32 nt, Homo Sapiens
agaucuagggacagaagggcuuugaaagacau

SEQ ID NO: 99851 - RNA, 32 nt, Homo Sapiens
cagagaagccuccaccugaggauggggaggac

SEQ ID NO: 99852 - RNA, 32 nt, Homo Sapiens
guuuaacagaguucugagaauaccaugaaaga

SEQ ID NO: 99853 - RNA, 32 nt, Homo Sapiens
gaaauaaguuggggccagauuaugacaaacac

SEQ ID NO: 99854 - RNA, 32 nt, Homo Sapiens
acgaaauuuugauucuaauauuuuuucuauua

SEQ ID NO: 99855 - RNA, 32 nt, Homo Sapiens
gcugugugaugcugucuccucuccagggacaa

SEQ ID NO: 99856 - RNA, 32 nt, Homo Sapiens
uuuuaauuaaaauuauuaaauuccuuuuaaua

SEQ ID NO: 99857 - RNA, 32 nt, Homo Sapiens
aaaauggugugcuauaaagauaaaggugaggg

SEQ ID NO: 99858 - RNA, 32 nt, Homo Sapiens
ccgccccgcgcccugccccuagguuccugugc

SEQ ID NO: 99859 - RNA, 32 nt, Homo Sapiens
cucccaggggagaguagaagucgcacacgcag

SEQ ID NO: 99860 - RNA, 32 nt, Homo Sapiens
ugaagcugacuucugauucaccaccccagggc

SEQ ID NO: 99861 - RNA, 32 nt, Homo Sapiens
cuuuuuaaacauuugcauuugcuggacaauug

SEQ ID NO: 99862 - RNA, 32 nt, Homo Sapiens
gucuggaaauguuucaacuguuuuaauauauu

SEQ ID NO: 99863 - RNA, 32 nt, Homo Sapiens
agcugacuugccaggggacucccuacagaauu

SEQ ID NO: 99864 - RNA, 32 nt, Homo Sapiens
gaggacucucuuaaaucagaagaugaaugaau

SEQ ID NO: 99865 - RNA, 32 nt, Homo Sapiens
gucgauaaaaacaagcaaugggaaaaagacuc

SEQ ID NO: 99866 - RNA, 32 nt, Homo Sapiens
caaggaacaacaauaaaucauauggaaauuua

SEQ ID NO: 99867 - RNA, 32 nt, Homo Sapiens
accuguuuuuaaaauaaaguaucuugaaauaa

SEQ ID NO: 99868 - RNA, 32 nt, Homo Sapiens
acuuguggaucuuuuguacuucucauaaccua

SEQ ID NO: 99869 - RNA, 32 nt, Homo Sapiens
agcccucaacugauuaccauuuucaacaaacu

SEQ ID NO: 99870 - RNA, 32 nt, Homo Sapiens
ccagccugccuuuggcagcugcaagcugaggu

SEQ ID NO: 99871 - RNA, 32 nt, Homo Sapiens
uggcggagauggaggaucuuguucaagauggg

SEQ ID NO: 99872 - RNA, 32 nt, Homo Sapiens
cguggcugucucccaguaucuguuccuucuca

SEQ ID NO: 99873 - RNA, 32 nt, Homo Sapiens
cugcugccuggccaugugcuuuucuccgcaga

SEQ ID NO: 99874 - RNA, 32 nt, Homo Sapiens
ggaaauuguccagaagguacuacauaaggaca

SEQ ID NO: 99875 - RNA, 32 nt, Homo Sapiens
ucgcuucugcauccccguugccgcccggagcc

SEQ ID NO: 99876 - RNA, 32 nt, Homo Sapiens
agggccuccuucccugccccggcgcggggcca

SEQ ID NO: 99877 - RNA, 32 nt, Homo Sapiens
uuuuaguugcuuaauuuguacacacuuuuaaa

SEQ ID NO: 99878 - RNA, 32 nt, Homo Sapiens
cucuccccuucuuucccuuccacuucuagagc

SEQ ID NO: 99879 - RNA, 32 nt, Homo Sapiens
cagucgcaguuuuuauacuaggacuuuaggau

SEQ ID NO: 99880 - RNA, 32 nt, Homo Sapiens
uucauaccuugaacaccaucucuucuaauaga

SEQ ID NO: 99881 - RNA, 32 nt, Homo Sapiens
gccaagcugcccaagaggcucuucagagauca

SEQ ID NO: 99882 - RNA, 32 nt, Homo Sapiens
agagcuugucuaauuaguuaguagcagaaccu

SEQ ID NO: 99883 - RNA, 32 nt, Homo Sapiens
cuuaaaaauuuauacaccagcaauuuagacaa

SEQ ID NO: 99884 - RNA, 32 nt, Homo Sapiens
gguucccacccguccuucucacuucugccuga

SEQ ID NO: 99885 - RNA, 32 nt, Homo Sapiens
cccaccugccgcccgcagagccugcaggcccc

SEQ ID NO: 99886 - RNA, 32 nt, Homo Sapiens
ggugcggcggucccagcucccuggcucccaug

SEQ ID NO: 99887 - RNA, 32 nt, Homo Sapiens
aaaagacuugcuuuuacccagggaggggacau

SEQ ID NO: 99888 - RNA, 32 nt, Homo Sapiens
cccggcuaauuuuuuucuuuuuuugagacaga

SEQ ID NO: 99889 - RNA, 32 nt, Homo Sapiens
aagcaaauauuuuuaaaaauuucuguuuguac

SEQ ID NO: 99890 - RNA, 32 nt, Homo Sapiens
cuggugcccgggcuaccagggacaugccagag

SEQ ID NO: 99891 - RNA, 32 nt, Homo Sapiens
uagcccguugucugucucuaguuucuuucugu

SEQ ID NO: 99892 - RNA, 32 nt, Homo Sapiens
gucaugugccacagaagcucagccugggcuuc

SEQ ID NO: 99893 - RNA, 32 nt, Homo Sapiens
cagugccguuugcgccaguuggaaucgaagcc

SEQ ID NO: 99894 - RNA, 32 nt, Homo Sapiens
gauggccuggagaccacccagcccugaccugg

SEQ ID NO: 99895 - RNA, 32 nt, Homo Sapiens
ucugccccaucccuucacccuggagguuccag

SEQ ID NO: 99896 - RNA, 32 nt, Homo Sapiens
guggauagucuuucccucuccccuccuguuuu

SEQ ID NO: 99897 - RNA, 32 nt, Homo Sapiens
gcugccccacccacagggagcaggggccuccu

SEQ ID NO: 99898 - RNA, 32 nt, Homo Sapiens
agaauguuucguucccucuggguaugcacagc

SEQ ID NO: 99899 - RNA, 32 nt, Homo Sapiens
uuuggaaggggaggaaaauggcaaguguauuu

SEQ ID NO: 99900 - RNA, 32 nt, Homo Sapiens
cagcaucucagucugaagcuucugggacuuga

SEQ ID NO: 99901 - RNA, 32 nt, Homo Sapiens
gguauugcgauaacuguagauuuuacaauaau

SEQ ID NO: 99902 - RNA, 32 nt, Homo Sapiens
aacugggacuacaagcaacgcgccaccacacu

SEQ ID NO: 99903 - RNA, 32 nt, Homo Sapiens
aucacuacagaaaacagcugaagacaguggcc

SEQ ID NO: 99904 - RNA, 32 nt, Homo Sapiens
uuaguaaauaucuauauuccuuauaauauguc

SEQ ID NO: 99905 - RNA, 29 nt, Homo Sapiens
uaauauauauguauaugacugugcugugu

SEQ ID NO: 99906 - RNA, 32 nt, Homo Sapiens
agugccaggcugguuuccauggagauagggca

SEQ ID NO: 99907 - RNA, 32 nt, Homo Sapiens
ucuguguguuugucuucauuccucuagcacca

SEQ ID NO: 99908 - RNA, 32 nt, Homo Sapiens
gccaggagggcguucuuaggcugcugggaugg

SEQ ID NO: 99909 - RNA, 32 nt, Homo Sapiens
acauuugaaggagggagggggugcagguucag

SEQ ID NO: 99910 - RNA, 32 nt, Homo Sapiens
agucguccaaaccccaggaagagagcucuaaa

SEQ ID NO: 99911 - RNA, 32 nt, Homo Sapiens
auacgcccucuuucaucuguaagggacuagga

SEQ ID NO: 99912 - RNA, 32 nt, Homo Sapiens
cccugagccaucuccugcuuucccgccuccuu

SEQ ID NO: 99913 - RNA, 32 nt, Homo Sapiens
auuuaucuggauggaaauuuuaaagaugaauc

SEQ ID NO: 99914 - RNA, 32 nt, Homo Sapiens
gggcucugccagcagacagccuuggcacacag

SEQ ID NO: 99915 - RNA, 32 nt, Homo Sapiens
uuuuaguuaaauugaugcacuacacuuuugau

SEQ ID NO: 99916 - RNA, 32 nt, Homo Sapiens
aaaugcucuaccccacuucucuaugaacaggu

SEQ ID NO: 99917 - RNA, 32 nt, Homo Sapiens
agcaaucagugagacuccgugggcguaggacc

SEQ ID NO: 99918 - RNA, 32 nt, Homo Sapiens
gagacugaagaaaagauuuaaauacuaauaaa

SEQ ID NO: 99919 - RNA, 32 nt, Homo Sapiens
caaagaaagcuaccuucccagagcaagcaggc

SEQ ID NO: 99920 - RNA, 32 nt, Homo Sapiens
auuugaaaguuccugucuccaaucacagaaag

SEQ ID NO: 99921 - RNA, 32 nt, Homo Sapiens
uuuguauuguugcuccugaacaaccuguuuca

SEQ ID NO: 99922 - RNA, 32 nt, Homo Sapiens
gauugguaacugccuggccuggcaccguuauc

SEQ ID NO: 99923 - RNA, 30 nt, Homo Sapiens
auaaagagaagaaggcauauguucgacuug

SEQ ID NO: 99924 - RNA, 32 nt, Homo Sapiens
uuuguauuuaguaguguaucucauagauacag

SEQ ID NO: 99925 - RNA, 32 nt, Homo Sapiens
agggccgggugguggcucugaggauggucccc

SEQ ID NO: 99926 - RNA, 32 nt, Homo Sapiens
cgacaaccgaggaggaggggcgggacgccgug

SEQ ID NO: 99927 - RNA, 32 nt, Homo Sapiens
gaaccaccuuggcaagauauuuacccaccggc

SEQ ID NO: 99928 - RNA, 32 nt, Homo Sapiens
acacucauuuugcuuuuucacccauacacuuu

SEQ ID NO: 99929 - RNA, 32 nt, Homo Sapiens
gaggcgaggccggcgccgcacacacacauuaa

SEQ ID NO: 99930 - RNA, 32 nt, Homo Sapiens
ugauuugcaauaaaaaugauacugauggugaa

SEQ ID NO: 99931 - RNA, 32 nt, Homo Sapiens
gcucagacaacgacugaugaaaacgcccaugc

SEQ ID NO: 99932 - RNA, 32 nt, Homo Sapiens
uggauuucaaguuauaugaugaaauucugaau

SEQ ID NO: 99933 - RNA, 32 nt, Homo Sapiens
ugucuuggacuucuacaccacacucagacuuc

SEQ ID NO: 99934 - RNA, 32 nt, Homo Sapiens
gaccauauuuguaagagcuuugaaagccagcc

SEQ ID NO: 99935 - RNA, 32 nt, Homo Sapiens
auuuauuugccuggcaagaaaaguuuauuuca

SEQ ID NO: 99936 - RNA, 32 nt, Homo Sapiens
ucuuuuguuccaaguuuguauuuccucagagu

SEQ ID NO: 99937 - RNA, 32 nt, Homo Sapiens
aauaaucugaagaguugacaaauuguguacua

SEQ ID NO: 99938 - RNA, 32 nt, Homo Sapiens
ucccagaaaaaguaauuuuaaauuaugucacc

SEQ ID NO: 99939 - RNA, 32 nt, Homo Sapiens
caguggcugguaggcaguggcugggaggcagc

SEQ ID NO: 99940 - RNA, 32 nt, Homo Sapiens
cgccaggccgcgagacccccggggcggcuucc

SEQ ID NO: 99941 - RNA, 32 nt, Homo Sapiens
cuuggaaucuggguaauuaaaaacagaaaauu

SEQ ID NO: 99942 - RNA, 32 nt, Homo Sapiens
uggucucugcaccaccccucugguucacaccg

SEQ ID NO: 99943 - RNA, 32 nt, Homo Sapiens
augucuuaaccucagggagugcagacaccuaa

SEQ ID NO: 99944 - RNA, 28 nt, Homo Sapiens
cuuccagaaaauuaacauuugaacuuag

SEQ ID NO: 99945 - RNA, 32 nt, Homo Sapiens
aaugcuguguggaaacaucuauccuauagauc

SEQ ID NO: 99946 - RNA, 32 nt, Homo Sapiens
caggccacguaugugaacggcagccucccaac

SEQ ID NO: 99947 - RNA, 32 nt, Homo Sapiens
agccucuguaguucuuuuuacaacauuuuuca

SEQ ID NO: 99948 - RNA, 32 nt, Homo Sapiens
cagggacccgcuccaaggcgccugcaggaggg

SEQ ID NO: 99949 - RNA, 28 nt, Homo Sapiens
gaaggggaaucauuaaagugcuuucaga

SEQ ID NO: 99950 - RNA, 32 nt, Homo Sapiens
caggcgcccagcccugcggaggaggccggggc

SEQ ID NO: 99951 - RNA, 32 nt, Homo Sapiens
aggggaccaugccggggugcugcccgggcagg

SEQ ID NO: 99952 - RNA, 32 nt, Homo Sapiens
cccaccugccccccagcucagagacucgugac

SEQ ID NO: 99953 - RNA, 32 nt, Homo Sapiens
gcagccgggugcgcuccgacagcucaaguuca

SEQ ID NO: 99954 - RNA, 32 nt, Homo Sapiens
ucacuaaccugcacauucugcacauguacccu

SEQ ID NO: 99955 - RNA, 32 nt, Homo Sapiens
ggcagcaaucccaauaaauucugacauguccu

SEQ ID NO: 99956 - RNA, 32 nt, Homo Sapiens
uuggcagcagcugccgaggccggagcaauggc

SEQ ID NO: 99957 - RNA, 32 nt, Homo Sapiens
ucuauuucuuuuucuuuuucuuuuuuuuuuuu

SEQ ID NO: 99958 - RNA, 32 nt, Homo Sapiens
cacggggagggggacgcgcacacacaccgguc

SEQ ID NO: 99959 - RNA, 32 nt, Homo Sapiens
ugacgcuguccuacagccggcgcggagaccug

SEQ ID NO: 99960 - RNA, 32 nt, Homo Sapiens
cgccagugugucuggccuuucaucgucaugau

SEQ ID NO: 99961 - RNA, 32 nt, Homo Sapiens
ugacauugucuccuauauauuucuauuauuaa

SEQ ID NO: 99962 - RNA, 32 nt, Homo Sapiens
cagggccuggccucagcccaaagcgucaggga

SEQ ID NO: 99963 - RNA, 32 nt, Homo Sapiens
ugugccuuguaagauuguuguaaaauuuuuug

SEQ ID NO: 99964 - RNA, 32 nt, Homo Sapiens
acaccugccuuaaauagcacagaccuauugug

SEQ ID NO: 99965 - RNA, 32 nt, Homo Sapiens
gaagccggcgccggggccgccgccucgugucc

SEQ ID NO: 99966 - RNA, 32 nt, Homo Sapiens
cgacagcggagcagcgugcgcgcgggggaaaa

SEQ ID NO: 99967 - RNA, 32 nt, Homo Sapiens
uuccauaccuccccggcuccgcucgguuccug

SEQ ID NO: 99968 - RNA, 32 nt, Homo Sapiens
gcauaugugagcccugguggguuuccaggcac

SEQ ID NO: 99969 - RNA, 32 nt, Homo Sapiens
aguagaugauauuauuaccauccugucccuau

SEQ ID NO: 99970 - RNA, 32 nt, Homo Sapiens
ucgcucaugcccucugcgccaacagcacccug

SEQ ID NO: 99971 - RNA, 32 nt, Homo Sapiens
gaauuccuggaaaugauugugaauugccuuca

SEQ ID NO: 99972 - RNA, 32 nt, Homo Sapiens
ggaaagaaaauauuuuugucgauucuuauucu

SEQ ID NO: 99973 - RNA, 32 nt, Homo Sapiens
ucucucccggccgcauucuccuccgcugcggg

SEQ ID NO: 99974 - RNA, 32 nt, Homo Sapiens
uuguggagaaaagagccagaaguugauguggg

SEQ ID NO: 99975 - RNA, 32 nt, Homo Sapiens
ugucuuuaaauuuuuuuuuuuaggcaaagagc

SEQ ID NO: 99976 - RNA, 32 nt, Homo Sapiens
ucggcauggccgcgucacuucucugauuaugu

SEQ ID NO: 99977 - RNA, 32 nt, Homo Sapiens
gccuagucuuggauuguaguaaucugcagaua

SEQ ID NO: 99978 - RNA, 32 nt, Homo Sapiens
uguuguauuuagucaguaugucuuuuugugua

SEQ ID NO: 99979 - RNA, 32 nt, Homo Sapiens
aucuucguuggcggccauggcuucggcuucuc

SEQ ID NO: 99980 - RNA, 32 nt, Homo Sapiens
gaucuggccccggucccauccccuucccuccc

SEQ ID NO: 99981 - RNA, 32 nt, Homo Sapiens
ugaugcaaguaugugguuuaucacauguagcu

SEQ ID NO: 99982 - RNA, 32 nt, Homo Sapiens
caggggaccugccuguccucagcucccuggga

SEQ ID NO: 99983 - RNA, 32 nt, Homo Sapiens
acugagcacucccagcuggacgugauggagca

SEQ ID NO: 99984 - RNA, 32 nt, Homo Sapiens
aggcccugcagugggagggagccacgugugcc

SEQ ID NO: 99985 - RNA, 32 nt, Homo Sapiens
gaugacagcuccggaagugucgugccugaacc

SEQ ID NO: 99986 - RNA, 32 nt, Homo Sapiens
caugggaagaaacgacgaugugaucaauucuu

SEQ ID NO: 99987 - RNA, 32 nt, Homo Sapiens
ucuacauuuguuccuggcuucuccauggaacu

SEQ ID NO: 99988 - RNA, 32 nt, Homo Sapiens
agaagcacauagguaaaaccagcaguuuccag

SEQ ID NO: 99989 - RNA, 32 nt, Homo Sapiens
cggcaggcgcccgggguccucagcgcugcaga

SEQ ID NO: 99990 - RNA, 32 nt, Homo Sapiens
cugccccaaugagcaagaggacaggcuacccu

SEQ ID NO: 99991 - RNA, 32 nt, Homo Sapiens
guggcgggcaggccagcucccaggacgucuca

SEQ ID NO: 99992 - RNA, 32 nt, Homo Sapiens
ccuugagcuguccuauggaaggguaauuugau

SEQ ID NO: 99993 - RNA, 32 nt, Homo Sapiens
gugucaugaagauugaaacuguaggugcuuug

SEQ ID NO: 99994 - RNA, 32 nt, Homo Sapiens
aacuaagguagaagaauacauguucacuucca

SEQ ID NO: 99995 - RNA, 32 nt, Homo Sapiens
gcccuaacagagccucaacaacuaccugguga

SEQ ID NO: 99996 - RNA, 32 nt, Homo Sapiens
cgccuugcaauuauuucacugaagauauucca

SEQ ID NO: 99997 - RNA, 32 nt, Homo Sapiens
ucucccggcggccgccgcugcccgcgauggug

SEQ ID NO: 99998 - RNA, 32 nt, Homo Sapiens
cgccccguccuuccuccuucccgggcggucac

SEQ ID NO: 99999 - RNA, 32 nt, Homo Sapiens
gaucggcggagcucccaccuccgcuuacagcu

SEQ ID NO: 100000 - RNA, 32 nt, Homo Sapiens
ucuuuagggagacacagauggcugggaucccu

SEQ ID NO: 100001 - RNA, 32 nt, Homo Sapiens
ggugccaccgcagcccgaccccggccgccagu

SEQ ID NO: 100002 - RNA, 32 nt, Homo Sapiens
ggcgcaaggggagggggagugagcgcaagaug

SEQ ID NO: 100003 - RNA, 32 nt, Homo Sapiens
cgagugggcgaccaggcgcuugcccgcccagu

SEQ ID NO: 100004 - RNA, 32 nt, Homo Sapiens
gucugcagaaaagaaggaaagagggcacccuu

SEQ ID NO: 100005 - RNA, 32 nt, Homo Sapiens
cuagggcagacacacaaccuccuccuccucuu

SEQ ID NO: 100006 - RNA, 32 nt, Homo Sapiens
caccauggaacgcuacucagcaaacuucuaaa

SEQ ID NO: 100007 - RNA, 32 nt, Homo Sapiens
gagugggaaggccgagugucagagcuggagag

SEQ ID NO: 100008 - RNA, 32 nt, Homo Sapiens
auuuucucaaggaaauaugauuuaauuaaaua

SEQ ID NO: 100009 - RNA, 32 nt, Homo Sapiens
cagccccauucccaucuacugaaacagggucu

SEQ ID NO: 100010 - RNA, 32 nt, Homo Sapiens
uugauuuuuaauucugcaauguuuccuuaaca

SEQ ID NO: 100011 - RNA, 32 nt, Homo Sapiens
cucauuguugugcuuugguuucaauccaggga

SEQ ID NO: 100012 - RNA, 32 nt, Homo Sapiens
ccagugggaugggacagggaggccacacgcac

SEQ ID NO: 100013 - RNA, 32 nt, Homo Sapiens
ugugugugaugauaaacaccacugcuccgggc

SEQ ID NO: 100014 - RNA, 32 nt, Homo Sapiens
cucccagguucaauugauucuccugccucagc

SEQ ID NO: 100015 - RNA, 32 nt, Homo Sapiens
aagaaaauugagaugagauuugaaaggacccg

SEQ ID NO: 100016 - RNA, 32 nt, Homo Sapiens
ugaccucaaagcacuuucauggcugcccucug

SEQ ID NO: 100017 - RNA, 32 nt, Homo Sapiens
ucgucuucaguuauauggggauuuccccacuu

SEQ ID NO: 100018 - RNA, 32 nt, Homo Sapiens
cauaggaacucuggagguggguucuggucauc

SEQ ID NO: 100019 - RNA, 32 nt, Homo Sapiens
ccuucaaauuuaugucuuuguuacugauaaau

SEQ ID NO: 100020 - RNA, 32 nt, Homo Sapiens
ucgcugggccgcggcucccgggugucccaggc

SEQ ID NO: 100021 - RNA, 32 nt, Homo Sapiens
uaacuugcauuucuaacaaguucccaggugau

SEQ ID NO: 100022 - RNA, 32 nt, Homo Sapiens
cuaagcuagaugugucccuucauguaagugag

SEQ ID NO: 100023 - RNA, 32 nt, Homo Sapiens
uuguuucccgcacugauccccuccauuuuuug

SEQ ID NO: 100024 - RNA, 32 nt, Homo Sapiens
uuuagcaaauauauuuuuuauuuguuauaucu

SEQ ID NO: 100025 - RNA, 32 nt, Homo Sapiens
ugaaagacauucaagauuacgaaguuuagaug

SEQ ID NO: 100026 - RNA, 32 nt, Homo Sapiens
ccucugugcuggagaagcuggacuggcgcagg

SEQ ID NO: 100027 - RNA, 32 nt, Homo Sapiens
ccauccugcauggcugagagccaggcuuccuu

SEQ ID NO: 100028 - RNA, 32 nt, Homo Sapiens
uugugaaaaucgugcuucuaucugaucccuuc

SEQ ID NO: 100029 - RNA, 31 nt, Homo Sapiens
agaauuaagaaaacuuuuugaguuaauauca

SEQ ID NO: 100030 - RNA, 32 nt, Homo Sapiens
uccggcucugcgucccgagccucccccggcuc

SEQ ID NO: 100031 - RNA, 32 nt, Homo Sapiens
uuuguuaaaugugagguguguuugaggcucgu

SEQ ID NO: 100032 - RNA, 32 nt, Homo Sapiens
cagaucaccuagaccuugucccugccccaccu

SEQ ID NO: 100033 - RNA, 32 nt, Homo Sapiens
aauuagcuaaugcuuucuuguuuuuauauuua

SEQ ID NO: 100034 - RNA, 32 nt, Homo Sapiens
cuugcauccuccauccuguuacucugggccca

SEQ ID NO: 100035 - RNA, 32 nt, Homo Sapiens
aaacuauagaaaggcacugcaggcugggcgca

SEQ ID NO: 100036 - RNA, 32 nt, Homo Sapiens
cuuuuaaaggauuaaacaaaugaaugcuacaa

SEQ ID NO: 100037 - RNA, 32 nt, Homo Sapiens
uucaaauacuaaaaguagcuuuuauuaaauau

SEQ ID NO: 100038 - RNA, 32 nt, Homo Sapiens
ugccagaagcugccuccgugguuuggucaccg

SEQ ID NO: 100039 - RNA, 32 nt, Homo Sapiens
uguguguauguacaguuuacaugauguuccuc

SEQ ID NO: 100040 - RNA, 32 nt, Homo Sapiens
cuggaagaaaagucucuuggggaccucugggg

SEQ ID NO: 100041 - RNA, 32 nt, Homo Sapiens
uucaaaaaauuugggguuagagcaacuguuag

SEQ ID NO: 100042 - RNA, 32 nt, Homo Sapiens
ggaaaccguucccucuuucagcccuugguuac

SEQ ID NO: 100043 - RNA, 32 nt, Homo Sapiens
ugcuguaaacaaaacaaaacaaaauaaaacaa

SEQ ID NO: 100044 - RNA, 32 nt, Homo Sapiens
augacccccucccccaggacaccaccucccac

SEQ ID NO: 100045 - RNA, 32 nt, Homo Sapiens
uagauccagugaccggggaaacguaugaauuc

SEQ ID NO: 100046 - RNA, 32 nt, Homo Sapiens
ccauuuuaaaauucuucaguuuuacauuaugc

SEQ ID NO: 100047 - RNA, 32 nt, Homo Sapiens
gccuguuagggucacaugagagagaacaaaug

SEQ ID NO: 100048 - RNA, 32 nt, Homo Sapiens
uggaggggcuguuucuuuuuccgugugggugg

SEQ ID NO: 100049 - RNA, 32 nt, Homo Sapiens
aguagaggugauuaauggggcuggcaucucuc

SEQ ID NO: 100050 - RNA, 32 nt, Homo Sapiens
gcagguacuguguguaccuggcgcuguguucc

SEQ ID NO: 100051 - RNA, 32 nt, Homo Sapiens
gauuucuggaagcucauagaagggaccacagc

SEQ ID NO: 100052 - RNA, 32 nt, Homo Sapiens
cccuguuucuucaccauuuccuaaggucucaa

SEQ ID NO: 100053 - RNA, 32 nt, Homo Sapiens
cacucuguuuaaaaauauauauucuauguaug

SEQ ID NO: 100054 - RNA, 32 nt, Homo Sapiens
uccagacaugcuccugauuucuaggccuuauc

SEQ ID NO: 100055 - RNA, 32 nt, Homo Sapiens
ccaaacuacuauuagauauguacaauaacauu

SEQ ID NO: 100056 - RNA, 32 nt, Homo Sapiens
cuacgaaagggagaccacaugugugcacaggg

SEQ ID NO: 100057 - RNA, 32 nt, Homo Sapiens
cccuccccggugggggccaggaugcugaagaa

SEQ ID NO: 100058 - RNA, 32 nt, Homo Sapiens
guccuccucccacucugcggcccgcggccccu

SEQ ID NO: 100059 - RNA, 31 nt, Homo Sapiens
uguuucacaaagauguuguaauauuauaccu

SEQ ID NO: 100060 - RNA, 32 nt, Homo Sapiens
cuuguuuaaguaaauuuagaauacauuuaagu

SEQ ID NO: 100061 - RNA, 32 nt, Homo Sapiens
cagaucuuuguccuaaccacaagguuccccuu

SEQ ID NO: 100062 - RNA, 32 nt, Homo Sapiens
agggccggauguggggacccucuuccucuagc

SEQ ID NO: 100063 - RNA, 30 nt, Homo Sapiens
aguuugacugguggcauggaauuuguguau

SEQ ID NO: 100064 - RNA, 32 nt, Homo Sapiens
ccuauuuuuacuuccuucucugaaauauucca

SEQ ID NO: 100065 - RNA, 32 nt, Homo Sapiens
ccaaugaucauaaauaauauguuuccuaaaga

SEQ ID NO: 100066 - RNA, 32 nt, Homo Sapiens
aaggagccacgcuuucggggguugcaagaugg

SEQ ID NO: 100067 - RNA, 32 nt, Homo Sapiens
aagauauaauuucuuuacugcaguuaaaucau

SEQ ID NO: 100068 - RNA, 32 nt, Homo Sapiens
uggauguacagggcagucucucuucccggggc

SEQ ID NO: 100069 - RNA, 32 nt, Homo Sapiens
aguauuuuuaauguauuuuauaagaaagacaa

SEQ ID NO: 100070 - RNA, 32 nt, Homo Sapiens
gauccauagcccuauuugauacuugacagugc

SEQ ID NO: 100071 - RNA, 32 nt, Homo Sapiens
ggaauuugaaagaagaaaaccagauggaacaa

SEQ ID NO: 100072 - RNA, 32 nt, Homo Sapiens
auaguaaguauuuuguucuauaaagcuguuca

SEQ ID NO: 100073 - RNA, 32 nt, Homo Sapiens
ugcugccuaagccccauccuuuguucuccugc

SEQ ID NO: 100074 - RNA, 32 nt, Homo Sapiens
aaaauuuaauaaaucucccugcuucuuuucuu

SEQ ID NO: 100075 - RNA, 32 nt, Homo Sapiens
uccuaggcagaggagcuccuuggauuuucuua

SEQ ID NO: 100076 - RNA, 31 nt, Homo Sapiens
agggucuccuggaggcugccaagggcauuuu

SEQ ID NO: 100077 - RNA, 32 nt, Homo Sapiens
cuccacucaguccugcugccugcuucaccaga

SEQ ID NO: 100078 - RNA, 32 nt, Homo Sapiens
ccccuucucccccuucagccacuucccagcga

SEQ ID NO: 100079 - RNA, 32 nt, Homo Sapiens
gaggagccaaaaaauggugaugggaacugaga

SEQ ID NO: 100080 - RNA, 32 nt, Homo Sapiens
gugugggccaggccuggcagugcugagcacaa

SEQ ID NO: 100081 - RNA, 32 nt, Homo Sapiens
ccucggccgguccuagcagggauuguccccau

SEQ ID NO: 100082 - RNA, 32 nt, Homo Sapiens
acacacacagaagccucuggggccugagguuc

SEQ ID NO: 100083 - RNA, 32 nt, Homo Sapiens
guucauccagauggagaagagaagccauuccu

SEQ ID NO: 100084 - RNA, 32 nt, Homo Sapiens
uggagagcagcuugcgugggcugggccugcag

SEQ ID NO: 100085 - RNA, 32 nt, Homo Sapiens
gccacaaauggcaauucauauuucuucaggaa

SEQ ID NO: 100086 - RNA, 32 nt, Homo Sapiens
cuauauggaaaaguuaccauuaggaaaauaug

SEQ ID NO: 100087 - RNA, 32 nt, Homo Sapiens
ggacagguuguauauuaccagaucaucacuag

SEQ ID NO: 100088 - RNA, 27 nt, Homo Sapiens
gcaccugcugucuucagcucuucuuga

SEQ ID NO: 100089 - RNA, 32 nt, Homo Sapiens
cuuguuuauguuuuaauccuuugcaaggugag

SEQ ID NO: 100090 - RNA, 32 nt, Homo Sapiens
agaauaauguugcauuuccuuaugucucagga

SEQ ID NO: 100091 - RNA, 32 nt, Homo Sapiens
acccugccugcaccuccgcgggcugacugggc

SEQ ID NO: 100092 - RNA, 31 nt, Homo Sapiens
gcgccgcugccggucgggggaagagaccuga

SEQ ID NO: 100093 - RNA, 32 nt, Homo Sapiens
cuugccuucuaccuuugugcuaaauccuagca

SEQ ID NO: 100094 - RNA, 32 nt, Homo Sapiens
ggcagccuuggggaaccccgagcugggggguu

SEQ ID NO: 100095 - RNA, 32 nt, Homo Sapiens
cucgucuucauggacgagugaacgccucgcuu

SEQ ID NO: 100096 - RNA, 32 nt, Homo Sapiens
cuuuugcauuaccauguaaaauuuagacauuu

SEQ ID NO: 100097 - RNA, 32 nt, Homo Sapiens
ugacaaggggagagaucaguugcgggacagac

SEQ ID NO: 100098 - RNA, 32 nt, Homo Sapiens
caagugcaauuccaacgucacaaccgccuuca

SEQ ID NO: 100099 - RNA, 32 nt, Homo Sapiens
ugcgaccagacucagggaaaacaucaggcccc

SEQ ID NO: 100100 - RNA, 32 nt, Homo Sapiens
aucaaaggcuacauuuucaguguaagauaaau

SEQ ID NO: 100101 - RNA, 32 nt, Homo Sapiens
gucuccccgcggaucaugggcuccucgaggac

SEQ ID NO: 100102 - RNA, 32 nt, Homo Sapiens
gaaggugcugcugggcagcuguggccucucuu

SEQ ID NO: 100103 - RNA, 32 nt, Homo Sapiens
uguuacuuuuucuuugcgggaugggggugggg

SEQ ID NO: 100104 - RNA, 32 nt, Homo Sapiens
ucuccaaauaaagauacuaaccacugagcugg

SEQ ID NO: 100105 - RNA, 32 nt, Homo Sapiens
cuuagacccucuauaaaagcucugugcauccu

SEQ ID NO: 100106 - RNA, 32 nt, Homo Sapiens
aauguucccugacaccaguguguggauuuuua

SEQ ID NO: 100107 - RNA, 32 nt, Homo Sapiens
aaaucaaaaaaauuagcugggggugguggugu

SEQ ID NO: 100108 - RNA, 32 nt, Homo Sapiens
ugaggggugcaaacagauaaugcuguuaacau

SEQ ID NO: 100109 - RNA, 32 nt, Homo Sapiens
gcgcccggagcgccccgccgcgcacaggaguu

SEQ ID NO: 100110 - RNA, 31 nt, Homo Sapiens
gggagcccacccuucagcacgagcacacugc

SEQ ID NO: 100111 - RNA, 32 nt, Homo Sapiens
caugacagcagauccgcggaagggcagaaugg

SEQ ID NO: 100112 - RNA, 32 nt, Homo Sapiens
caccaagagggacgccugggggugccaggacc

SEQ ID NO: 100113 - RNA, 32 nt, Homo Sapiens
ucccuagaugcauuuguguaggaaguauauac

SEQ ID NO: 100114 - RNA, 32 nt, Homo Sapiens
aaggagcuuucuauccugaacucuucuuucuu

SEQ ID NO: 100115 - RNA, 32 nt, Homo Sapiens
aaugaaaguaguaagaauagcuuugacaaaau

SEQ ID NO: 100116 - RNA, 32 nt, Homo Sapiens
ugaugauacuaacaguugaugaaaugacauau

SEQ ID NO: 100117 - RNA, 32 nt, Homo Sapiens
ccacugcccagcugcuggaagccagccagggc

SEQ ID NO: 100118 - RNA, 30 nt, Homo Sapiens
agaagcggcaggcggcggacguggcccgga

SEQ ID NO: 100119 - RNA, 32 nt, Homo Sapiens
cuuuauugucuauuauccuuaagggacuuaaa

SEQ ID NO: 100120 - RNA, 32 nt, Homo Sapiens
augggggacggcccagcgugggugggggugcc

SEQ ID NO: 100121 - RNA, 32 nt, Homo Sapiens
auauucugauggacugguuuggucuuaauacc

SEQ ID NO: 100122 - RNA, 32 nt, Homo Sapiens
gauggaguuuugcucuuguugcugaggcagga

SEQ ID NO: 100123 - RNA, 31 nt, Homo Sapiens
uccugaaagccccagaaggacacuggagggg

SEQ ID NO: 100124 - RNA, 32 nt, Homo Sapiens
ccccuuagccauaaguuuucaggaaauaaauu

SEQ ID NO: 100125 - RNA, 32 nt, Homo Sapiens
ggauauuuaacccuuuaagugcuguuuuggga

SEQ ID NO: 100126 - RNA, 32 nt, Homo Sapiens
aggaaggccauggcggggcccgagcgcugggg

SEQ ID NO: 100127 - RNA, 32 nt, Homo Sapiens
gucucugcagucauccuguguaaucauguucu

SEQ ID NO: 100128 - RNA, 32 nt, Homo Sapiens
uuuguauuacuuaaucuuuuaagcaagcaaaa

SEQ ID NO: 100129 - RNA, 32 nt, Homo Sapiens
auuuuuauauuuuuaacucuuuauucuuggau

SEQ ID NO: 100130 - RNA, 32 nt, Homo Sapiens
gggccacaaagucucaaaucugcccagaaauc

SEQ ID NO: 100131 - RNA, 32 nt, Homo Sapiens
auuggugauguucggcucacauauuguuugca

SEQ ID NO: 100132 - RNA, 32 nt, Homo Sapiens
gggccucauaaggagcuguguggucuuggagg

SEQ ID NO: 100133 - RNA, 32 nt, Homo Sapiens
uuuaguuuuguaacuuagcuuuauuuuucuuu

SEQ ID NO: 100134 - RNA, 32 nt, Homo Sapiens
cuggcaggggagcgccaccuccuuccacagga

SEQ ID NO: 100135 - RNA, 32 nt, Homo Sapiens
aauaaggagauccagaauaaaaagaagagacu

SEQ ID NO: 100136 - RNA, 32 nt, Homo Sapiens
aggagguccuuacuuuuuuguuuuccuuccug

SEQ ID NO: 100137 - RNA, 32 nt, Homo Sapiens
cacaacuguauuucccaauacacuugagcagu

SEQ ID NO: 100138 - RNA, 32 nt, Homo Sapiens
ccagacggaaaggcgcacacgugcacacagca

SEQ ID NO: 100139 - RNA, 32 nt, Homo Sapiens
gggaggagccaagauggccgaauagaacagcu

SEQ ID NO: 100140 - RNA, 32 nt, Homo Sapiens
cugcagaggacacgaggcggcgggcuggagac

SEQ ID NO: 100141 - RNA, 32 nt, Homo Sapiens
ccagcgucaucuugucucccaguguccaacag

SEQ ID NO: 100142 - RNA, 32 nt, Homo Sapiens
gacccucucugugcccucccccgccccccgaa

SEQ ID NO: 100143 - RNA, 32 nt, Homo Sapiens
caagaagagcaaccccaagacacauaauuguc

SEQ ID NO: 100144 - RNA, 32 nt, Homo Sapiens
aacucucuguuuccaauuucagaauccuaacu

SEQ ID NO: 100145 - RNA, 32 nt, Homo Sapiens
aucccuagagcccugcuucuccaggcccgaga

SEQ ID NO: 100146 - RNA, 32 nt, Homo Sapiens
aaaaauacaucauuuuguaaugucuuuaguau

SEQ ID NO: 100147 - RNA, 32 nt, Homo Sapiens
accaccauuucccccagauccugauucucugg

SEQ ID NO: 100148 - RNA, 32 nt, Homo Sapiens
gcaggcaccagccccagccucccaccacgcuc

SEQ ID NO: 100149 - RNA, 32 nt, Homo Sapiens
cuauaagccagacugcucugauaggucugaug

SEQ ID NO: 100150 - RNA, 32 nt, Homo Sapiens
gguugcagcauugcagaagagaaaaguaguuu

SEQ ID NO: 100151 - RNA, 32 nt, Homo Sapiens
agaaagacaucugaggaaaauggaagaccuaa

SEQ ID NO: 100152 - RNA, 32 nt, Homo Sapiens
gcuguucagaccacaagaagugccugcaaaug

SEQ ID NO: 100153 - RNA, 30 nt, Homo Sapiens
ggcccucuggacuccuuucuccuuuucuuu

SEQ ID NO: 100154 - RNA, 32 nt, Homo Sapiens
gaacaauguggaagaggcugagguuguggaac

SEQ ID NO: 100155 - RNA, 32 nt, Homo Sapiens
aauuuguagaaauuauuuacuagaagcuuccu

SEQ ID NO: 100156 - RNA, 32 nt, Homo Sapiens
uguugauugccccgccggggccggcccgcggg

SEQ ID NO: 100157 - RNA, 32 nt, Homo Sapiens
uagcgccucuccccggggcccgcgccccgagc

SEQ ID NO: 100158 - RNA, 32 nt, Homo Sapiens
accaaucggaagccuaagugacgaugacccuc

SEQ ID NO: 100159 - RNA, 32 nt, Homo Sapiens
ugaagcugaaugccugggggccuggaagcugc

SEQ ID NO: 100160 - RNA, 32 nt, Homo Sapiens
uugguuauauuaccaaggcuuugauugggaug

SEQ ID NO: 100161 - RNA, 32 nt, Homo Sapiens
cgguggcgaggagaggcgggcggauuugggga

SEQ ID NO: 100162 - RNA, 32 nt, Homo Sapiens
cauauguuugaaaaauccgugaguauuccaaa

SEQ ID NO: 100163 - RNA, 32 nt, Homo Sapiens
aucgguaaagcagugccuccucacuuaaguga

SEQ ID NO: 100164 - RNA, 32 nt, Homo Sapiens
uauauccuauuauuucugaauauauguccuca

SEQ ID NO: 100165 - RNA, 32 nt, Homo Sapiens
augaaaaaaaauuuacuaagcuuaacuacaug

SEQ ID NO: 100166 - RNA, 32 nt, Homo Sapiens
guuugugggaauucguuacagcagccccagaa

SEQ ID NO: 100167 - RNA, 32 nt, Homo Sapiens
cucuggauuaauggaaaccuucagggguacuu

SEQ ID NO: 100168 - RNA, 32 nt, Homo Sapiens
aaaaaguuugagagcuggccuuccugccuacu

SEQ ID NO: 100169 - RNA, 32 nt, Homo Sapiens
ggucggagggucaccgcagaggcuacucgggc

SEQ ID NO: 100170 - RNA, 31 nt, Homo Sapiens
cgcaggcuucggagaaaccccuacuccaguc

SEQ ID NO: 100171 - RNA, 29 nt, Homo Sapiens
agugaugugacuuccaaguagaauuuaau

SEQ ID NO: 100172 - RNA, 32 nt, Homo Sapiens
ugaaaacuauaaaacauuguugaaagagauua

SEQ ID NO: 100173 - RNA, 32 nt, Homo Sapiens
uucuauuucugggauucccuggauucauuaua

SEQ ID NO: 100174 - RNA, 32 nt, Homo Sapiens
ucccugggccuggccuugagcggguccacugg

SEQ ID NO: 100175 - RNA, 32 nt, Homo Sapiens
acugcugccucaucgauaccccauuuagcucc

SEQ ID NO: 100176 - RNA, 32 nt, Homo Sapiens
auaaaaacacgaguuauucauaaagagaaaau

SEQ ID NO: 100177 - RNA, 32 nt, Homo Sapiens
acgccuagucccgccuucgggaaggcugccug

SEQ ID NO: 100178 - RNA, 32 nt, Homo Sapiens
cuucugcucccucacuagcuuuuccaccagac

SEQ ID NO: 100179 - RNA, 32 nt, Homo Sapiens
uaccaauaaaaugauuuuacaaguggaaaaaa

SEQ ID NO: 100180 - RNA, 32 nt, Homo Sapiens
cuggaaauaacugagcacuuugaauuuuuuuu

SEQ ID NO: 100181 - RNA, 32 nt, Homo Sapiens
auaauuuauuuuuacucuguugauaggcaaug

SEQ ID NO: 100182 - RNA, 32 nt, Homo Sapiens
cacaagaagagaccgaggcggguggccccgag

SEQ ID NO: 100183 - RNA, 32 nt, Homo Sapiens
gugucccucccggccccggggccaccucacgu

SEQ ID NO: 100184 - RNA, 32 nt, Homo Sapiens
aauggacaacaauguacaguuuuuacuaugug

SEQ ID NO: 100185 - RNA, 30 nt, Homo Sapiens
ugcagaggcaggcuggugugacccugggaa

SEQ ID NO: 100186 - RNA, 32 nt, Homo Sapiens
acugaccuuucacagagaaaaaauauuucccu

SEQ ID NO: 100187 - RNA, 29 nt, Homo Sapiens
ucuucuucuuaaacaaaccacaaacggau

SEQ ID NO: 100188 - RNA, 32 nt, Homo Sapiens
uaggaaaauuuuacugcugucuaauuuaugua

SEQ ID NO: 100189 - RNA, 32 nt, Homo Sapiens
aaacaaaguuuagguaaaugaauuaucgcaga

SEQ ID NO: 100190 - RNA, 32 nt, Homo Sapiens
ccgaugguuucauauuaacuaaaaaagcuggg

SEQ ID NO: 100191 - RNA, 32 nt, Homo Sapiens
uauuuuuaucuaaugccauuuuagaauuuucu

SEQ ID NO: 100192 - RNA, 32 nt, Homo Sapiens
cccauuucaaagcagggagcugagguccuggg

SEQ ID NO: 100193 - RNA, 32 nt, Homo Sapiens
agaaccacaggaccugcccccaucucucacuc

SEQ ID NO: 100194 - RNA, 32 nt, Homo Sapiens
cucccucgucguucccggccccggccccccac

SEQ ID NO: 100195 - RNA, 32 nt, Homo Sapiens
ccugagguggguggaggggacaguguucugga

SEQ ID NO: 100196 - RNA, 32 nt, Homo Sapiens
ucacccaagagauuguuguuugccauacuuug

SEQ ID NO: 100197 - RNA, 32 nt, Homo Sapiens
cccuggggcuaccaccugguugaucuaucgug

SEQ ID NO: 100198 - RNA, 32 nt, Homo Sapiens
aaguggggaugcagauggccaagcucccaccc

SEQ ID NO: 100199 - RNA, 32 nt, Homo Sapiens
cgccugcgacccggcguccgggcgcgcuggag

SEQ ID NO: 100200 - RNA, 32 nt, Homo Sapiens
aaagugagacucggugucaucaccaauccauc

SEQ ID NO: 100201 - RNA, 32 nt, Homo Sapiens
cgcggcgccgcggccauuggcccgaggcacgu

SEQ ID NO: 100202 - RNA, 31 nt, Homo Sapiens
ucccgcccgcacugcccuccccccgcagcag

SEQ ID NO: 100203 - RNA, 32 nt, Homo Sapiens
agcucccagacaccuuugccacauccccucac

SEQ ID NO: 100204 - RNA, 32 nt, Homo Sapiens
gcggcggcacuggcuggacccacgcgcgcgcc

SEQ ID NO: 100205 - RNA, 32 nt, Homo Sapiens
ugcuaccagaaugucuuaauuuuuuaaauuug

SEQ ID NO: 100206 - RNA, 32 nt, Homo Sapiens
auagcacaacgcuaaaucacacaguaacuaca

SEQ ID NO: 100207 - RNA, 32 nt, Homo Sapiens
cacaucagcucaguguucggcccgggauuacc

SEQ ID NO: 100208 - RNA, 32 nt, Homo Sapiens
augggucagguggucacuucgcacacccaaga

SEQ ID NO: 100209 - RNA, 32 nt, Homo Sapiens
gauuucuucuauuauuuguggaaugaauuaua

SEQ ID NO: 100210 - RNA, 32 nt, Homo Sapiens
ccaagaaggaggaggaggagagaaaggcggcu

SEQ ID NO: 100211 - RNA, 32 nt, Homo Sapiens
cuagucugucuugaaacuuguuuaccuuaaaa

SEQ ID NO: 100212 - RNA, 32 nt, Homo Sapiens
uuuguuuuggaauuggaccauucuugcaacca

SEQ ID NO: 100213 - RNA, 32 nt, Homo Sapiens
gcuggcuagggauugaaguccuggacagugac

SEQ ID NO: 100214 - RNA, 32 nt, Homo Sapiens
caacucuucuauuuauggauaucacacauauc

SEQ ID NO: 100215 - RNA, 32 nt, Homo Sapiens
uacaacaaaucuguuuucucauuuuuaucaaa

SEQ ID NO: 100216 - RNA, 32 nt, Homo Sapiens
gcgcaagggauuccgcggcaccacguguccaa

SEQ ID NO: 100217 - RNA, 31 nt, Homo Sapiens
cuauagauggaagcagugugucugggcacau

SEQ ID NO: 100218 - RNA, 32 nt, Homo Sapiens
aacucugaaaacaaaaucuuguucuaugcaaa

SEQ ID NO: 100219 - RNA, 32 nt, Homo Sapiens
cuuguccuugggucacccugcauuccauagcc

SEQ ID NO: 100220 - RNA, 32 nt, Homo Sapiens
ccugcaugcgugggccacaggcugguuucuug

SEQ ID NO: 100221 - RNA, 32 nt, Homo Sapiens
ucaccgcggagcagacgcggaggcugguggcc

SEQ ID NO: 100222 - RNA, 32 nt, Homo Sapiens
gcuuguacaaacacgcacacacaaauggauaa

SEQ ID NO: 100223 - RNA, 32 nt, Homo Sapiens
auuauuggacauuucuaucauuccgcguuugg

SEQ ID NO: 100224 - RNA, 32 nt, Homo Sapiens
gggaggccaaggguucacugggcuugaauccu

SEQ ID NO: 100225 - RNA, 32 nt, Homo Sapiens
gccuguggaagacaugccgacgucuccucugc

SEQ ID NO: 100226 - RNA, 32 nt, Homo Sapiens
ucccugcccucccccagugagcccugcuguuc

SEQ ID NO: 100227 - RNA, 32 nt, Homo Sapiens
cugucucugaggggugggggugccgcugucug

SEQ ID NO: 100228 - RNA, 32 nt, Homo Sapiens
gucuaaaugugcaauguacaacucuaggugga

SEQ ID NO: 100229 - RNA, 32 nt, Homo Sapiens
auauuuggggaauuuuuuuuuaaucacuuuaa

SEQ ID NO: 100230 - RNA, 32 nt, Homo Sapiens
ccccagggccgcccggccccuucuggaccuuu

SEQ ID NO: 100231 - RNA, 32 nt, Homo Sapiens
ugguccagucaccaccugcagccucggcaggg

SEQ ID NO: 100232 - RNA, 32 nt, Homo Sapiens
gccaccauuauguccucagucagugaaguaaa

SEQ ID NO: 100233 - RNA, 32 nt, Homo Sapiens
cgccgccgccgcugccgccgcgcgccuuugag

SEQ ID NO: 100234 - RNA, 32 nt, Homo Sapiens
cgagaaaagccacguggggggcugguuccccu

SEQ ID NO: 100235 - RNA, 32 nt, Homo Sapiens
uggauguugucaacaaaauugggaucaucuaa

SEQ ID NO: 100236 - RNA, 32 nt, Homo Sapiens
ccaucgccgucuccagcucagagcccauugca

SEQ ID NO: 100237 - RNA, 32 nt, Homo Sapiens
caggccccgccccuccucccacccucguucag

SEQ ID NO: 100238 - RNA, 32 nt, Homo Sapiens
aggagggagcgcggcgcagagaggaggggcuu

SEQ ID NO: 100239 - RNA, 32 nt, Homo Sapiens
gucucuuuuccacccccugccauccucacuua

SEQ ID NO: 100240 - RNA, 32 nt, Homo Sapiens
cauugaaagauuauuuacauuuugaaaaacau

SEQ ID NO: 100241 - RNA, 32 nt, Homo Sapiens
uuaaaggaggggcuaggggagaagcugcagcu

SEQ ID NO: 100242 - RNA, 32 nt, Homo Sapiens
cugaauauuuauauuucacuauuuuuauuuau

SEQ ID NO: 100243 - RNA, 32 nt, Homo Sapiens
cugacacgugugugcagcagccugcagcugcc

SEQ ID NO: 100244 - RNA, 32 nt, Homo Sapiens
gugcuuugaauacaacaggacucaucaaucag

SEQ ID NO: 100245 - RNA, 32 nt, Homo Sapiens
aauaaaagugcaacagaagaauuugauuaguc

SEQ ID NO: 100246 - RNA, 32 nt, Homo Sapiens
aggguggagagguuccugggguggauuccuaa

SEQ ID NO: 100247 - RNA, 32 nt, Homo Sapiens
accaugccuggccagaaaucuauguuuucuua

SEQ ID NO: 100248 - RNA, 32 nt, Homo Sapiens
cuccauacuguuucuuuuuuuuuuuuccauua

SEQ ID NO: 100249 - RNA, 32 nt, Homo Sapiens
guacacgcaccugccggggacgcacugaccga

SEQ ID NO: 100250 - RNA, 32 nt, Homo Sapiens
cccaaaagacagucagccuuguccucaggccc

SEQ ID NO: 100251 - RNA, 32 nt, Homo Sapiens
gagaggaaauacugaggagaaaauggcagauu

SEQ ID NO: 100252 - RNA, 32 nt, Homo Sapiens
gcccgcgcagcguugaguugcacagcgguauu

SEQ ID NO: 100253 - RNA, 32 nt, Homo Sapiens
gaguaggaugucugcugaagucauccaucagg

SEQ ID NO: 100254 - RNA, 32 nt, Homo Sapiens
ucaacccagaguuaaugucaagcaugcuaauu

SEQ ID NO: 100255 - RNA, 32 nt, Homo Sapiens
ucaaguaaacauuuuuuuuuuaaacuuuuauu

SEQ ID NO: 100256 - RNA, 32 nt, Homo Sapiens
uucuuuuucuuuguuuuuuucuugaucacuug

SEQ ID NO: 100257 - RNA, 32 nt, Homo Sapiens
uucaagccauucuccugccuaagccucccaag

SEQ ID NO: 100258 - RNA, 32 nt, Homo Sapiens
gaccuugagcuaauagaucuuuuaccacuaaa

SEQ ID NO: 100259 - RNA, 32 nt, Homo Sapiens
uguuacaucaaauaaacaucuucuguggacca

SEQ ID NO: 100260 - RNA, 32 nt, Homo Sapiens
aguaugagucccgggggcggcggcggggcuca

SEQ ID NO: 100261 - RNA, 32 nt, Homo Sapiens
gauuugcuggagugcuggcuccacgcccuggg

SEQ ID NO: 100262 - RNA, 32 nt, Homo Sapiens
uaccaccccccggcccagcucacacacacuca

SEQ ID NO: 100263 - RNA, 32 nt, Homo Sapiens
cauucugugaaugaaauauuguauguucagau

SEQ ID NO: 100264 - RNA, 32 nt, Homo Sapiens
cuuaguuaaaauuuaaaugcgcggccgggggc

SEQ ID NO: 100265 - RNA, 32 nt, Homo Sapiens
aaagauuuuauuuaguaauugggauuuacuua

SEQ ID NO: 100266 - RNA, 32 nt, Homo Sapiens
acuuugcuuuccuaagaaaauucuucaguuuc

SEQ ID NO: 100267 - RNA, 32 nt, Homo Sapiens
cuucuggggacacuugggguccacaaucccag

SEQ ID NO: 100268 - RNA, 32 nt, Homo Sapiens
ccggaaauaaacgaacaucuccgauuaugguu

SEQ ID NO: 100269 - RNA, 32 nt, Homo Sapiens
uucauuccucgguuagcuggaacuuugccccg

SEQ ID NO: 100270 - RNA, 32 nt, Homo Sapiens
gaggccgggcugcugcagaaccccgccgugua

SEQ ID NO: 100271 - RNA, 32 nt, Homo Sapiens
caggcaggagggcagggaugguggcagccaua

SEQ ID NO: 100272 - RNA, 32 nt, Homo Sapiens
aagagcuucuucauuacgacuuuauuuccuaa

SEQ ID NO: 100273 - RNA, 32 nt, Homo Sapiens
gugcaaaagaaaauucuuaucaugauuauaau

SEQ ID NO: 100274 - RNA, 32 nt, Homo Sapiens
cucccacccucuuuuccaagcuguuucgcuuu

SEQ ID NO: 100275 - RNA, 32 nt, Homo Sapiens
uguucaucaggggccagccccaucccagcugc

SEQ ID NO: 100276 - RNA, 32 nt, Homo Sapiens
ucauggguguaaacccuuuauaacuuagugcu

SEQ ID NO: 100277 - RNA, 32 nt, Homo Sapiens
ggggaaaaaauauuuuuuaaacaaaggauaua

SEQ ID NO: 100278 - RNA, 32 nt, Homo Sapiens
ccacggcuggauuggagacaagaugggauccu

SEQ ID NO: 100279 - RNA, 30 nt, Homo Sapiens
gauguugacuguuaacuagaagcucugucc

SEQ ID NO: 100280 - RNA, 32 nt, Homo Sapiens
agauucuucuauugaguuuaggaauugcggca

SEQ ID NO: 100281 - RNA, 32 nt, Homo Sapiens
uguuaacugaagauauuccaacucaaaaccag

SEQ ID NO: 100282 - RNA, 32 nt, Homo Sapiens
ugggagaaggcagggugggggguguggaaaaa

SEQ ID NO: 100283 - RNA, 32 nt, Homo Sapiens
gcggcuuuaaacaaugccacagugucuggcag

SEQ ID NO: 100284 - RNA, 32 nt, Homo Sapiens
gacuccuaucgagagcucuucagacacuuugu

SEQ ID NO: 100285 - RNA, 32 nt, Homo Sapiens
gugcuggccccggauccagcgucgcccacgac

SEQ ID NO: 100286 - RNA, 32 nt, Homo Sapiens
guuccguucuucguuuucuuccuccguauuga

SEQ ID NO: 100287 - RNA, 32 nt, Homo Sapiens
ugguagcuuccucuucaacagccacuuccgug

SEQ ID NO: 100288 - RNA, 32 nt, Homo Sapiens
caaaacguccaaggccgaaagcccuccaguuu

SEQ ID NO: 100289 - RNA, 32 nt, Homo Sapiens
cucuuccugcagugugguaaaacuacagcaau

SEQ ID NO: 100290 - RNA, 32 nt, Homo Sapiens
ugaugcauuuaaaauaagauucugaugccaga

SEQ ID NO: 100291 - RNA, 31 nt, Homo Sapiens
cauaaggagccccagaguucuuucaccagca

SEQ ID NO: 100292 - RNA, 32 nt, Homo Sapiens
cuggggcugggggugcagcugccugccgaggc

SEQ ID NO: 100293 - RNA, 32 nt, Homo Sapiens
uuaagccuucaacuugauuuccaauuauucca

SEQ ID NO: 100294 - RNA, 32 nt, Homo Sapiens
aggacuugcgcggugacgugcgccgcugccag

SEQ ID NO: 100295 - RNA, 31 nt, Homo Sapiens
agccagcaguccugaguaggaguccaggacu

SEQ ID NO: 100296 - RNA, 32 nt, Homo Sapiens
ccaacccaacugcuuuucuuuacaauuuuggc

SEQ ID NO: 100297 - RNA, 32 nt, Homo Sapiens
gagccacggggcggcgcagagccccacucgca

SEQ ID NO: 100298 - RNA, 32 nt, Homo Sapiens
uacacuaaaaauuauuucuuaggcauucugaa

SEQ ID NO: 100299 - RNA, 32 nt, Homo Sapiens
aauguggcaaagcuuuuaaacaguccucaauc

SEQ ID NO: 100300 - RNA, 32 nt, Homo Sapiens
agaauguuguaaaacagacaaacaagaaaaca

SEQ ID NO: 100301 - RNA, 32 nt, Homo Sapiens
guucugggucugucuuggguauucccauaugg

SEQ ID NO: 100302 - RNA, 32 nt, Homo Sapiens
gauccaguggacaaugcuauuuuuguaugcca

SEQ ID NO: 100303 - RNA, 32 nt, Homo Sapiens
cuagaaacaaucacuacagaaaacagcugaag

SEQ ID NO: 100304 - RNA, 32 nt, Homo Sapiens
ucuuugugagaagguacagagauggaaaccuu

SEQ ID NO: 100305 - RNA, 32 nt, Homo Sapiens
uuuaccaagaacaccguggaugcugaagggaa

SEQ ID NO: 100306 - RNA, 32 nt, Homo Sapiens
caaaguuguuaaauaaaugcaguucuuuuugu

SEQ ID NO: 100307 - RNA, 32 nt, Homo Sapiens
uuucuuucuuucucuuuuuuuuaguggcaagg

SEQ ID NO: 100308 - RNA, 32 nt, Homo Sapiens
caaacagaacaaaaacaaaacaccagggacac

SEQ ID NO: 100309 - RNA, 32 nt, Homo Sapiens
cggagucgcggcccgagucccggcgccagcag

SEQ ID NO: 100310 - RNA, 32 nt, Homo Sapiens
uucaauggcagacugugccugauuaucagaga

SEQ ID NO: 100311 - RNA, 32 nt, Homo Sapiens
auagguggaaaacauggaauuucuuuuaggug

SEQ ID NO: 100312 - RNA, 32 nt, Homo Sapiens
cggcccucugaggccucuggcuccuggucugg

SEQ ID NO: 100313 - RNA, 32 nt, Homo Sapiens
gagaccgcaguaacccaacacgaagcagauag

SEQ ID NO: 100314 - RNA, 32 nt, Homo Sapiens
cuuucucucaucaagacuuugcagcauuuuag

SEQ ID NO: 100315 - RNA, 32 nt, Homo Sapiens
aauaauaauuuucuacuuggaguugaagaggg

SEQ ID NO: 100316 - RNA, 32 nt, Homo Sapiens
gagccaauugucagcaucucuguggguuuuuu

SEQ ID NO: 100317 - RNA, 32 nt, Homo Sapiens
gugcacacgcgagguauaggcuccagacuccu

SEQ ID NO: 100318 - RNA, 30 nt, Homo Sapiens
gggaagggaggugggcagcagugggucaga

SEQ ID NO: 100319 - RNA, 32 nt, Homo Sapiens
auaucuguuugagaauuauugauuaaugcuug

SEQ ID NO: 100320 - RNA, 32 nt, Homo Sapiens
ucugucuuagaucuuuuuguuucugccuaguc

SEQ ID NO: 100321 - RNA, 32 nt, Homo Sapiens
ggacugugcuguuuccuccgcccccacucccg

SEQ ID NO: 100322 - RNA, 32 nt, Homo Sapiens
cacggcgguccugcagcagccaucuuggcugc

SEQ ID NO: 100323 - RNA, 32 nt, Homo Sapiens
uaguuauuuauuacaaaauuauauucacguaa

SEQ ID NO: 100324 - RNA, 32 nt, Homo Sapiens
cgccugggcugucagcacuuuggcagcagguc

SEQ ID NO: 100325 - RNA, 32 nt, Homo Sapiens
caccacugcauuccagccuggcgacagaguga

SEQ ID NO: 100326 - RNA, 32 nt, Homo Sapiens
cagggagagucuuuuuuuuuuuuuuuuuaaau

SEQ ID NO: 100327 - RNA, 32 nt, Homo Sapiens
guauggagagauucaagaaauaauuuuaaaac

SEQ ID NO: 100328 - RNA, 31 nt, Homo Sapiens
ccagcgcugcccaccaccugacguacugccc

SEQ ID NO: 100329 - RNA, 32 nt, Homo Sapiens
ucccagaggcugugcgcagagccaagccucuc

SEQ ID NO: 100330 - RNA, 32 nt, Homo Sapiens
guagugucuuguccugcaaacacauacggacu

SEQ ID NO: 100331 - RNA, 32 nt, Homo Sapiens
agccaggcccacagaccaaggcacauggguuu

SEQ ID NO: 100332 - RNA, 32 nt, Homo Sapiens
cuaguacuauuauggaauuacucuacuguucu

SEQ ID NO: 100333 - RNA, 32 nt, Homo Sapiens
cucuggccaagcccugggugggaggccaggcc

SEQ ID NO: 100334 - RNA, 32 nt, Homo Sapiens
gaauccacuagaaggccugucuacacugcagg

SEQ ID NO: 100335 - RNA, 32 nt, Homo Sapiens
uugaaugacucccuuccaucuaucagucuuac

SEQ ID NO: 100336 - RNA, 32 nt, Homo Sapiens
cgcaggcugcgcaccucuuucccucagccagg

SEQ ID NO: 100337 - RNA, 32 nt, Homo Sapiens
gucaccauggucuaaucccaagagggacucgu

SEQ ID NO: 100338 - RNA, 32 nt, Homo Sapiens
ucccugggccgcggccuggcgcggaagccgcc

SEQ ID NO: 100339 - RNA, 32 nt, Homo Sapiens
accgcacaccgcugauggggaccuccggaaag

SEQ ID NO: 100340 - RNA, 32 nt, Homo Sapiens
gaauguauauauaaagcagauggggaaagacu

SEQ ID NO: 100341 - RNA, 32 nt, Homo Sapiens
aaagcuucuucagagugaagaaucuuaaugcu

SEQ ID NO: 100342 - RNA, 32 nt, Homo Sapiens
ucacugguguuccucacccaccagcuguaacu

SEQ ID NO: 100343 - RNA, 32 nt, Homo Sapiens
guccccuuugugggcuggaaaagcaggugagg

SEQ ID NO: 100344 - RNA, 32 nt, Homo Sapiens
ucaucaaaaagagucuuaauuuucuaaaacaa

SEQ ID NO: 100345 - RNA, 32 nt, Homo Sapiens
cuggagcccuuaaaacuucgagcguggacgcu

SEQ ID NO: 100346 - RNA, 32 nt, Homo Sapiens
ggcccugagacaguauguugggaaaugcugac

SEQ ID NO: 100347 - RNA, 32 nt, Homo Sapiens
uaagaagccugcaaaacaaaaugggaagaaag

SEQ ID NO: 100348 - RNA, 32 nt, Homo Sapiens
ccuucuaaccugcaagacugcccgccaacuga

SEQ ID NO: 100349 - RNA, 32 nt, Homo Sapiens
ucucaccccccgccucuccccggcccccgccg

SEQ ID NO: 100350 - RNA, 32 nt, Homo Sapiens
cggcggccgcagcagcagcagcaagacggacu

SEQ ID NO: 100351 - RNA, 32 nt, Homo Sapiens
cugccugggcccaccugcugcugcugcuguug

SEQ ID NO: 100352 - RNA, 31 nt, Homo Sapiens
accuugacaaauugguaggauuuggucaggc

SEQ ID NO: 100353 - RNA, 32 nt, Homo Sapiens
cuucugggguggaggguggggguggagguccu

SEQ ID NO: 100354 - RNA, 32 nt, Homo Sapiens
ucguggcggucggagauccgagagcucugcuu

SEQ ID NO: 100355 - RNA, 32 nt, Homo Sapiens
aguagcuaauauaauugaccggugcuaaaguc

SEQ ID NO: 100356 - RNA, 32 nt, Homo Sapiens
uguccugucuucuuggugguguggaccuggug

SEQ ID NO: 100357 - RNA, 27 nt, Homo Sapiens
gcuguugguuucuucagccucugccau

SEQ ID NO: 100358 - RNA, 32 nt, Homo Sapiens
ccucuccccaccuuacccccgccccgcuuggc

SEQ ID NO: 100359 - RNA, 32 nt, Homo Sapiens
ccuucccggccgcgucggaguccggcggcgac

SEQ ID NO: 100360 - RNA, 32 nt, Homo Sapiens
gaauuccggcugccaggggcguccgguuacau

SEQ ID NO: 100361 - RNA, 32 nt, Homo Sapiens
uuuuaaaaaucuaccuucuguaguuuuaucac

SEQ ID NO: 100362 - RNA, 32 nt, Homo Sapiens
cugcuaugaagaugaguguacaagugucuauu

SEQ ID NO: 100363 - RNA, 32 nt, Homo Sapiens
accagccugggcccuggcucggucgcacacuc

SEQ ID NO: 100364 - RNA, 32 nt, Homo Sapiens
gauugguugaucgaaucauugauucauucaau

SEQ ID NO: 100365 - RNA, 32 nt, Homo Sapiens
ugcagcugccccccaccaaccccaccauucac

SEQ ID NO: 100366 - RNA, 32 nt, Homo Sapiens
aaaaggaggagaagaggaaaguguucaugggu

SEQ ID NO: 100367 - RNA, 32 nt, Homo Sapiens
aucagcggggccgggggcggcgccguacaacu

SEQ ID NO: 100368 - RNA, 29 nt, Homo Sapiens
aaauauauaaagcuauauuuucaggcucc

SEQ ID NO: 100369 - RNA, 32 nt, Homo Sapiens
uggacaagauuaccccaccuugcccuuuacgu

SEQ ID NO: 100370 - RNA, 30 nt, Homo Sapiens
gcagacuggucaaugggggaugacgguggg

SEQ ID NO: 100371 - RNA, 32 nt, Homo Sapiens
uggcuuacaccuguaauuccagcacuuuggga

SEQ ID NO: 100372 - RNA, 32 nt, Homo Sapiens
agcggggggugcggggcgcagcauugugcggu

SEQ ID NO: 100373 - RNA, 32 nt, Homo Sapiens
ggcuauuucaauuuuaucagacuuuuaccaga

SEQ ID NO: 100374 - RNA, 32 nt, Homo Sapiens
gcggggcguuggaguucagauguucgcucccg

SEQ ID NO: 100375 - RNA, 32 nt, Homo Sapiens
cauuuaacaaaacuaaucuaaaaaagaacuaa

SEQ ID NO: 100376 - RNA, 32 nt, Homo Sapiens
uaagcccaaccacucugcacuuuguuucccac

SEQ ID NO: 100377 - RNA, 32 nt, Homo Sapiens
gggcccuguggcugggucugcugcagagcucc

SEQ ID NO: 100378 - RNA, 32 nt, Homo Sapiens
aaugacuugcugucaucccacaugaacuccug

SEQ ID NO: 100379 - RNA, 32 nt, Homo Sapiens
agagaaaauagaugcauacugaaaaaagaauu

SEQ ID NO: 100380 - RNA, 32 nt, Homo Sapiens
ugcacaugcuuccagaugccacaugugaacau

SEQ ID NO: 100381 - RNA, 32 nt, Homo Sapiens
ugccuccccccaaccucuggcucccacaaggc

SEQ ID NO: 100382 - RNA, 32 nt, Homo Sapiens
ucuccacucagcccuggugggugcgggaacca

SEQ ID NO: 100383 - RNA, 32 nt, Homo Sapiens
ccgugaacgcaccagcguuacugcaccaugcc

SEQ ID NO: 100384 - RNA, 32 nt, Homo Sapiens
cauggaucaaguaagcauaguuuuauccaggg

SEQ ID NO: 100385 - RNA, 32 nt, Homo Sapiens
cugaaaauguucaagacuuauguucagggugg

SEQ ID NO: 100386 - RNA, 32 nt, Homo Sapiens
guaugucugccgcacgcagggcguggaggggg

SEQ ID NO: 100387 - RNA, 32 nt, Homo Sapiens
cccuucccucuuuaacccccugaccuuucuug

SEQ ID NO: 100388 - RNA, 32 nt, Homo Sapiens
cgggaggaagcagcugcggccaucgcgccgug

SEQ ID NO: 100389 - RNA, 32 nt, Homo Sapiens
uggcaccuuucagagagucaaauaucacacuc

SEQ ID NO: 100390 - RNA, 32 nt, Homo Sapiens
uagcucccucuugugucccucccuuugccuuu

SEQ ID NO: 100391 - RNA, 32 nt, Homo Sapiens
uccacauuuguguccucuuuuacugacuucca

SEQ ID NO: 100392 - RNA, 32 nt, Homo Sapiens
gacaguguccuuccuuucccagcagcagugcc

SEQ ID NO: 100393 - RNA, 32 nt, Homo Sapiens
gggauuuggaccagcccuucacuacucaaagu

SEQ ID NO: 100394 - RNA, 32 nt, Homo Sapiens
cuugcuccuguguaaaacuauauucucagugu

SEQ ID NO: 100395 - RNA, 32 nt, Homo Sapiens
ccuucagcguguccugguuuuaaaagacuaac

SEQ ID NO: 100396 - RNA, 32 nt, Homo Sapiens
aaauaagaugaaucacuuaauaccguaucuuc

SEQ ID NO: 100397 - RNA, 32 nt, Homo Sapiens
aaugcacuuguggucagcagcuagcggucuuu

SEQ ID NO: 100398 - RNA, 32 nt, Homo Sapiens
caaugaguaaacaguaaaguguggauccugcu

SEQ ID NO: 100399 - RNA, 32 nt, Homo Sapiens
cuucucuggagcuuaacaaacuuuuauuuccu

SEQ ID NO: 100400 - RNA, 32 nt, Homo Sapiens
caggauauggcuuugaauggggccuaacacaa

SEQ ID NO: 100401 - RNA, 32 nt, Homo Sapiens
uaacuauguuaaauaacauaugguauuuggca

SEQ ID NO: 100402 - RNA, 32 nt, Homo Sapiens
uuauucuuccagcuaccacuugggcacuucac

SEQ ID NO: 100403 - RNA, 32 nt, Homo Sapiens
uuguccaaacuccccaaccgaguucuagaagc

SEQ ID NO: 100404 - RNA, 32 nt, Homo Sapiens
acaucuuaucuugaucuuugcucccaguggau

SEQ ID NO: 100405 - RNA, 32 nt, Homo Sapiens
caccuuuaaucccagcacuuugggagacugag

SEQ ID NO: 100406 - RNA, 32 nt, Homo Sapiens
cuuaacuucuaaauuuacaaggccuaucaugu

SEQ ID NO: 100407 - RNA, 32 nt, Homo Sapiens
auauacaaugaaauuuguuucaagugaacuac

SEQ ID NO: 100408 - RNA, 32 nt, Homo Sapiens
agcacccugguccucccuggcuccuagaucca

SEQ ID NO: 100409 - RNA, 29 nt, Homo Sapiens
uuuucuaucaaccaauaccaagaaauaag

SEQ ID NO: 100410 - RNA, 32 nt, Homo Sapiens
agaaaaacuguuuacauagaaauuccuacaca

SEQ ID NO: 100411 - RNA, 32 nt, Homo Sapiens
gggcggcggccgcgaaggucgcgguggugggg

SEQ ID NO: 100412 - RNA, 32 nt, Homo Sapiens
uucuuuuuuuuuucuuuuuauuaaaacuguga

SEQ ID NO: 100413 - RNA, 32 nt, Homo Sapiens
uuccucaaggacuuaacuugugcaagcugacu

SEQ ID NO: 100414 - RNA, 32 nt, Homo Sapiens
caguggggucugggccucggccccaccauguc

SEQ ID NO: 100415 - RNA, 32 nt, Homo Sapiens
uagaccacccucaucaaugaaaggaaguucuc

SEQ ID NO: 100416 - RNA, 32 nt, Homo Sapiens
cccauucagcggggcuuggucccaucaaggcc

SEQ ID NO: 100417 - RNA, 32 nt, Homo Sapiens
ugggcaacgccugccgccugcucugggcccga

SEQ ID NO: 100418 - RNA, 32 nt, Homo Sapiens
ggcgggcaguggagcuggcccggcgccugggc

SEQ ID NO: 100419 - RNA, 32 nt, Homo Sapiens
uucuucaguaaugaguuaaauaaaacauugac

SEQ ID NO: 100420 - RNA, 32 nt, Homo Sapiens
guaauagacauuggacagauauuuuuaguuca

SEQ ID NO: 100421 - RNA, 32 nt, Homo Sapiens
aaccacacacucaagcacuuuggaacccaugg

SEQ ID NO: 100422 - RNA, 32 nt, Homo Sapiens
agaugaaugucuuuccucucccugccucccac

SEQ ID NO: 100423 - RNA, 32 nt, Homo Sapiens
uuucuugugggcuaauuaaauaaaucauuaau

SEQ ID NO: 100424 - RNA, 32 nt, Homo Sapiens
acaaaauaaaaagcaucuguauuaauguaaag

SEQ ID NO: 100425 - RNA, 32 nt, Homo Sapiens
gaccugggcgggggcgcggggcgccgccgagc

SEQ ID NO: 100426 - RNA, 32 nt, Homo Sapiens
uuaggagggagccgagccuucucccggacccu

SEQ ID NO: 100427 - RNA, 32 nt, Homo Sapiens
cguucugcgaggggcucaugggucugagagcc

SEQ ID NO: 100428 - RNA, 32 nt, Homo Sapiens
gcgccuggccuggccgcagcauccuggagucu

SEQ ID NO: 100429 - RNA, 32 nt, Homo Sapiens
ggcgaacggacggacggacggaaggcgacucg

SEQ ID NO: 100430 - RNA, 32 nt, Homo Sapiens
aagugaaggcuuuaaaagugcauuauuuuaag

SEQ ID NO: 100431 - RNA, 32 nt, Homo Sapiens
gaauaagcauauauucaguuauauucagcaug

SEQ ID NO: 100432 - RNA, 32 nt, Homo Sapiens
ccauccuuguggguugcuaccuuuaagucgca

SEQ ID NO: 100433 - RNA, 32 nt, Homo Sapiens
ggcaaagaucaucuccugcguuuuccaauagc

SEQ ID NO: 100434 - RNA, 32 nt, Homo Sapiens
ccacaagaaugacuuucacaagggcaggaaca

SEQ ID NO: 100435 - RNA, 32 nt, Homo Sapiens
caggacgaaguuuuuggcugugggcucucugg

SEQ ID NO: 100436 - RNA, 32 nt, Homo Sapiens
ggguuugaggggcuggaaucagggccagggcc

SEQ ID NO: 100437 - RNA, 32 nt, Homo Sapiens
uccugaaacaaggcaggacuuuggcaaugccu

SEQ ID NO: 100438 - RNA, 32 nt, Homo Sapiens
caagcauggguucuugccgugugugcauugug

SEQ ID NO: 100439 - RNA, 32 nt, Homo Sapiens
gcacugugaggugggcaggcgaggagcgggaa

SEQ ID NO: 100440 - RNA, 32 nt, Homo Sapiens
acuuuaggaaaugagguuucauaauucugccu

SEQ ID NO: 100441 - RNA, 28 nt, Homo Sapiens
uugaggcaggagaaucauuugaacucag

SEQ ID NO: 100442 - RNA, 32 nt, Homo Sapiens
accauugccuuaaauuaauagcagccucucaa

SEQ ID NO: 100443 - RNA, 32 nt, Homo Sapiens
cagccccgcgcgcagauggcgcacucggcugc

SEQ ID NO: 100444 - RNA, 32 nt, Homo Sapiens
gguucgggugaccauggacagugcgcucaccg

SEQ ID NO: 100445 - RNA, 32 nt, Homo Sapiens
cucugaguugguuaaauguuaauggauuucag

SEQ ID NO: 100446 - RNA, 32 nt, Homo Sapiens
gaccugaugaccucaucccagcccuugaucgc

SEQ ID NO: 100447 - RNA, 32 nt, Homo Sapiens
uaugaagaaaagguguacaaaaauuugcccuu

SEQ ID NO: 100448 - RNA, 32 nt, Homo Sapiens
gcaacacugauuuucuguaucguuguuaugaa

SEQ ID NO: 100449 - RNA, 32 nt, Homo Sapiens
uuuuucacaauguuucauuuuuacacaucucu

SEQ ID NO: 100450 - RNA, 32 nt, Homo Sapiens
aauuauucauauuuauacugaucuuuuuccau

SEQ ID NO: 100451 - RNA, 29 nt, Homo Sapiens
gcgcgggagcggaugaggacgcugcggaa

SEQ ID NO: 100452 - RNA, 32 nt, Homo Sapiens
caagauccauucucuaugaugcccuucccacu

SEQ ID NO: 100453 - RNA, 32 nt, Homo Sapiens
agauauucaccgauguuuauaugugauacaag

SEQ ID NO: 100454 - RNA, 32 nt, Homo Sapiens
ugcugccggggacagagcugcccccgaggguc

SEQ ID NO: 100455 - RNA, 32 nt, Homo Sapiens
uuuccccucacccaccauccaauaaugaguaa

SEQ ID NO: 100456 - RNA, 32 nt, Homo Sapiens
ggaaaaauaaagacaugguuaaagacacuucg

SEQ ID NO: 100457 - RNA, 32 nt, Homo Sapiens
caaucccguucgcucugacccuugcuggcuga

SEQ ID NO: 100458 - RNA, 32 nt, Homo Sapiens
acgcccugggaacgcggcugcaggguccgguc

SEQ ID NO: 100459 - RNA, 32 nt, Homo Sapiens
aggucaccuuguucccuuuuuaucuccuucac

SEQ ID NO: 100460 - RNA, 32 nt, Homo Sapiens
cacggggcccgccaugcgccggcggcccugac

SEQ ID NO: 100461 - RNA, 32 nt, Homo Sapiens
uucuuucagaccuuuuucccgaauuccccuuc

SEQ ID NO: 100462 - RNA, 32 nt, Homo Sapiens
aucucagguuugcauucucaccacggccguuc

SEQ ID NO: 100463 - RNA, 29 nt, Homo Sapiens
accaguuacuaugagugaaagggagccag

SEQ ID NO: 100464 - RNA, 32 nt, Homo Sapiens
ugguauugucuuccuuuguaguguuguuuauu

SEQ ID NO: 100465 - RNA, 28 nt, Homo Sapiens
agcaauaaacacaaaacucugggagaag

SEQ ID NO: 100466 - RNA, 32 nt, Homo Sapiens
acuggacgccgcccgcggccggaccgguucaa

SEQ ID NO: 100467 - RNA, 32 nt, Homo Sapiens
cuuuucuuuccacguuauacuguguaagguga

SEQ ID NO: 100468 - RNA, 32 nt, Homo Sapiens
ucaaacaacgauccuuccagauaugacauuug

SEQ ID NO: 100469 - RNA, 30 nt, Homo Sapiens
ugcccgggagguguauucuacaaaaacguc

SEQ ID NO: 100470 - RNA, 32 nt, Homo Sapiens
gaaaauaaacacauauagaaggcuuacuaugu

SEQ ID NO: 100471 - RNA, 32 nt, Homo Sapiens
aauucuggccccagaacucugugcccaggagc

SEQ ID NO: 100472 - RNA, 32 nt, Homo Sapiens
ccugccagcccggcucggcccagcacccccuc

SEQ ID NO: 100473 - RNA, 32 nt, Homo Sapiens
acaugggccaauuuaaaccacaccaggaauga

SEQ ID NO: 100474 - RNA, 32 nt, Homo Sapiens
ccauccagcugugcgcucucgucgggaguccc

SEQ ID NO: 100475 - RNA, 32 nt, Homo Sapiens
uguguuuuucccuguuuguagcaagacucuga

SEQ ID NO: 100476 - RNA, 32 nt, Homo Sapiens
ccacguggcugagacuacaggugcuugccacu

SEQ ID NO: 100477 - RNA, 32 nt, Homo Sapiens
uggcuaugcuuaaaagguugcauacugagcca

SEQ ID NO: 100478 - RNA, 32 nt, Homo Sapiens
ucccuggcaccaggcucuggcgcucugcuggg

SEQ ID NO: 100479 - RNA, 32 nt, Homo Sapiens
cucuggggaagccccacagccuuggcugugcc

SEQ ID NO: 100480 - RNA, 32 nt, Homo Sapiens
agacucccaagcagccugggcaggcagaugua

SEQ ID NO: 100481 - RNA, 32 nt, Homo Sapiens
ugcgggaggaagcuguacaugcacacacucgc

SEQ ID NO: 100482 - RNA, 32 nt, Homo Sapiens
cauguuguaaaaaaucuuuuuggaagauacag

SEQ ID NO: 100483 - RNA, 32 nt, Homo Sapiens
cacaauuugcgcgcucucuuucugcugcuccc

SEQ ID NO: 100484 - RNA, 32 nt, Homo Sapiens
uugccucugaguuagcucuuuggaaucgugaa

SEQ ID NO: 100485 - RNA, 32 nt, Homo Sapiens
uguaguaaaagcuuuaguuuauggugagucau

SEQ ID NO: 100486 - RNA, 32 nt, Homo Sapiens
cccgguccccucccggcccagucccucccgcc

SEQ ID NO: 100487 - RNA, 32 nt, Homo Sapiens
ggccggcagaaaggguaagagaagggaacccc

SEQ ID NO: 100488 - RNA, 32 nt, Homo Sapiens
gcuccagacuccggcauuuccuccccgcuagc

SEQ ID NO: 100489 - RNA, 32 nt, Homo Sapiens
ugcugcuuguucuggagacccccgcccccgca

SEQ ID NO: 100490 - RNA, 32 nt, Homo Sapiens
agacgcuccccuccccugucugcagaugagga

SEQ ID NO: 100491 - RNA, 32 nt, Homo Sapiens
gacagcgacgccugcacagcucuggugagaug

SEQ ID NO: 100492 - RNA, 32 nt, Homo Sapiens
agacauaugaauccaggcugacugcuuaagug

SEQ ID NO: 100493 - RNA, 32 nt, Homo Sapiens
augcguaauuucaauuacuguauaaaguuuau

SEQ ID NO: 100494 - RNA, 32 nt, Homo Sapiens
ucuguguuuccacuuuauacucuuuguccaaa

SEQ ID NO: 100495 - RNA, 32 nt, Homo Sapiens
gccacggaauccacacguggaccauugugggu

SEQ ID NO: 100496 - RNA, 32 nt, Homo Sapiens
cugaugugucuaaaugagcaugacaggaacua

SEQ ID NO: 100497 - RNA, 32 nt, Homo Sapiens
aaaagacuaauuaaaaucauguucacuuaaca

SEQ ID NO: 100498 - RNA, 32 nt, Homo Sapiens
cagcuucagcaguugcuuggaacuuugguucu

SEQ ID NO: 100499 - RNA, 32 nt, Homo Sapiens
uguggccacgacagccuccacccccaccagcc

SEQ ID NO: 100500 - RNA, 32 nt, Homo Sapiens
gacaagaaggaaagauuuuguuguuguuuguu

SEQ ID NO: 100501 - RNA, 32 nt, Homo Sapiens
aaaagaaaaauauauaugugcaguauuuuauu

SEQ ID NO: 100502 - RNA, 32 nt, Homo Sapiens
agagccgggcggcggccagagcccuccccgcg

SEQ ID NO: 100503 - RNA, 32 nt, Homo Sapiens
uugauacugauauuuuccuaugcugaauaguu

SEQ ID NO: 100504 - RNA, 32 nt, Homo Sapiens
ccugauuuuaacaacuugauaaugguguaaua

SEQ ID NO: 100505 - RNA, 32 nt, Homo Sapiens
agcccuucccagcuccuccuccgaugaaggaa

SEQ ID NO: 100506 - RNA, 32 nt, Homo Sapiens
ugagaaggaguagagcugcugcuggcgcccga

SEQ ID NO: 100507 - RNA, 32 nt, Homo Sapiens
ccagaggcagugccgaccauccugcuaaacac

SEQ ID NO: 100508 - RNA, 32 nt, Homo Sapiens
gggaaagcugcagcagugauggagcacaaggc

SEQ ID NO: 100509 - RNA, 32 nt, Homo Sapiens
uguauaugaauaacccacagauguacugaauu

SEQ ID NO: 100510 - RNA, 32 nt, Homo Sapiens
uauuuguugaagagaagaauguguggugaugu

SEQ ID NO: 100511 - RNA, 32 nt, Homo Sapiens
accuucaucauucugugcuuacaguuucacca

SEQ ID NO: 100512 - RNA, 32 nt, Homo Sapiens
uuuccugacaauaaauaucaaucucuaucauc

SEQ ID NO: 100513 - RNA, 32 nt, Homo Sapiens
cccgcuucccccagccgcggccuaguguccca

SEQ ID NO: 100514 - RNA, 32 nt, Homo Sapiens
gggacacauugccuucuguuuucuccagcaug

SEQ ID NO: 100515 - RNA, 32 nt, Homo Sapiens
gaaacacccaucccuuccagauuggcagaauc

SEQ ID NO: 100516 - RNA, 32 nt, Homo Sapiens
cguucucugcagaccuggccgccccggguguc

SEQ ID NO: 100517 - RNA, 32 nt, Homo Sapiens
gauauuacaaauaauaucacagaguguacacc

SEQ ID NO: 100518 - RNA, 32 nt, Homo Sapiens
gaaggugucugcaugugggacucuguacagcc

SEQ ID NO: 100519 - RNA, 32 nt, Homo Sapiens
caucucuugguaguuuaaagcucuauuuuagu

SEQ ID NO: 100520 - RNA, 32 nt, Homo Sapiens
ucaguuaguggaaaaacauuucaaccugacua

SEQ ID NO: 100521 - RNA, 32 nt, Homo Sapiens
aauuuaugugguuuuuauauauuuuuuaauaa

SEQ ID NO: 100522 - RNA, 31 nt, Homo Sapiens
cacuggaauaaugaacucagagccuggagau

SEQ ID NO: 100523 - RNA, 32 nt, Homo Sapiens
aggaacuugaucuugguuuugcuggauugcuu

SEQ ID NO: 100524 - RNA, 32 nt, Homo Sapiens
uggaaucaaguaugaaaaucugcacaaaugca

SEQ ID NO: 100525 - RNA, 30 nt, Homo Sapiens
cucgcggaccuggcggugccggcgcccgga

SEQ ID NO: 100526 - RNA, 32 nt, Homo Sapiens
auggcaagaagaguccagugauaagggaugag

SEQ ID NO: 100527 - RNA, 32 nt, Homo Sapiens
aaaaagccuacccaagcaggcaucagauacag

SEQ ID NO: 100528 - RNA, 32 nt, Homo Sapiens
uccucucccacaucaggcuggcacucugcaca

SEQ ID NO: 100529 - RNA, 32 nt, Homo Sapiens
gcuucuuggagccgcauagaugggugaucaga

SEQ ID NO: 100530 - RNA, 32 nt, Homo Sapiens
ugcaguggugcuuauacaaaucuacacaagug

SEQ ID NO: 100531 - RNA, 32 nt, Homo Sapiens
aggcucuggaacuucugcccagcucuccuugu

SEQ ID NO: 100532 - RNA, 32 nt, Homo Sapiens
aguuuccccugagacuuaauguaaccacuuaa

SEQ ID NO: 100533 - RNA, 32 nt, Homo Sapiens
ggcggccgcgcgcuccaggccggucgcuccac

SEQ ID NO: 100534 - RNA, 32 nt, Homo Sapiens
aguguuuugucuguccgcgcccaagaaagaua

SEQ ID NO: 100535 - RNA, 32 nt, Homo Sapiens
gcuccggagguggugggcgcgcgggcagcggu

SEQ ID NO: 100536 - RNA, 32 nt, Homo Sapiens
ucgacgucuccuuggagcuaugagauguccaa

SEQ ID NO: 100537 - RNA, 32 nt, Homo Sapiens
augauggaaggggauaccuuggcugcccuaug

SEQ ID NO: 100538 - RNA, 32 nt, Homo Sapiens
aaaacuuguaaauuagcagaugacuuuuuucc

SEQ ID NO: 100539 - RNA, 32 nt, Homo Sapiens
ucucagcggucucucuucuccucaaguuugaa

SEQ ID NO: 100540 - RNA, 32 nt, Homo Sapiens
gaugcugcugcaggucucggacagcccgggag

SEQ ID NO: 100541 - RNA, 32 nt, Homo Sapiens
gucaaguccucuuguuuuuuuaucuugcccaa

SEQ ID NO: 100542 - RNA, 32 nt, Homo Sapiens
ucccgggcgggcgggcgcggagagacgcggga

SEQ ID NO: 100543 - RNA, 32 nt, Homo Sapiens
ucugcuauguucucccagaaaaaauugauuac

SEQ ID NO: 100544 - RNA, 32 nt, Homo Sapiens
gcuggucugcgagcggccccugcccggcuccc

SEQ ID NO: 100545 - RNA, 32 nt, Homo Sapiens
ggcacgaggcugcgcgcgggcgggcgggcuau

SEQ ID NO: 100546 - RNA, 32 nt, Homo Sapiens
uccgggaccugccugucagaucugaggugucu

SEQ ID NO: 100547 - RNA, 32 nt, Homo Sapiens
ugacaccgaggaugaauaaaugaugcucgcug

SEQ ID NO: 100548 - RNA, 32 nt, Homo Sapiens
cagaaacuugcugauuuacaguauuguuauuu

SEQ ID NO: 100549 - RNA, 32 nt, Homo Sapiens
uccaauagaccagggauugaccagaguaucuu

SEQ ID NO: 100550 - RNA, 32 nt, Homo Sapiens
cagguacauggauccaggcuucugccaaaaaa

SEQ ID NO: 100551 - RNA, 32 nt, Homo Sapiens
cgggguccacgcugcagcagagucccaggguu

SEQ ID NO: 100552 - RNA, 30 nt, Homo Sapiens
cagauccucugugcugggaauccuccccuc

SEQ ID NO: 100553 - RNA, 32 nt, Homo Sapiens
uuguggggcuuuuacagccuuuggauugugaa

SEQ ID NO: 100554 - RNA, 32 nt, Homo Sapiens
aagauguugcuuaauaauuaagcuuccuccau

SEQ ID NO: 100555 - RNA, 32 nt, Homo Sapiens
agguggugcuaggaagggcauucucuucaguu

SEQ ID NO: 100556 - RNA, 32 nt, Homo Sapiens
uucgagaucagccuaggcaacauggugaaauc

SEQ ID NO: 100557 - RNA, 32 nt, Homo Sapiens
uggccauucuucugccuucccagaccuuaguu

SEQ ID NO: 100558 - RNA, 32 nt, Homo Sapiens
gaggccaaaucgaauauggaaaaaauggcaaa

SEQ ID NO: 100559 - RNA, 32 nt, Homo Sapiens
agcagaaacugggaagugcaggacagagaugu

SEQ ID NO: 100560 - RNA, 32 nt, Homo Sapiens
ugaugucuguugugagcugcacacucaagggu

SEQ ID NO: 100561 - RNA, 32 nt, Homo Sapiens
ggucugguggggaggagggaagcuuaacucaa

SEQ ID NO: 100562 - RNA, 32 nt, Homo Sapiens
gaagauuuuuuggagaguuacaaguauacuuu

SEQ ID NO: 100563 - RNA, 32 nt, Homo Sapiens
gaagcagaggggcugggcuguugcaccucuac

SEQ ID NO: 100564 - RNA, 32 nt, Homo Sapiens
ggagaagcggcuuggucggggguggucucgug

SEQ ID NO: 100565 - RNA, 32 nt, Homo Sapiens
ucuuuaaagagaagaacuuuuuuauuauuauu

SEQ ID NO: 100566 - RNA, 32 nt, Homo Sapiens
cagggaccuggcuggaggaucaagcacaggga

SEQ ID NO: 100567 - RNA, 32 nt, Homo Sapiens
cucuuagcucuuuuccucuauuucccaucaca

SEQ ID NO: 100568 - RNA, 32 nt, Homo Sapiens
uggcccuagggagcuuccuguucccagaaguc

SEQ ID NO: 100569 - RNA, 32 nt, Homo Sapiens
ccgugaccuuggcaagccagcaggcugguacu

SEQ ID NO: 100570 - RNA, 32 nt, Homo Sapiens
acaaccagucucugcgggccagcaacgugauu

SEQ ID NO: 100571 - RNA, 32 nt, Homo Sapiens
guggggggagggcccgggaaaagggggaguug

SEQ ID NO: 100572 - RNA, 32 nt, Homo Sapiens
uuguuccaagguuaauaaaaauuugagcuuaa

SEQ ID NO: 100573 - RNA, 32 nt, Homo Sapiens
gguucccgcucgcccggcgccauggauccgcu

SEQ ID NO: 100574 - RNA, 32 nt, Homo Sapiens
uccucccugggggccccaggauggggggccac

SEQ ID NO: 100575 - RNA, 32 nt, Homo Sapiens
uggugauguacaagauacuuuuaaaguuuugu

SEQ ID NO: 100576 - RNA, 32 nt, Homo Sapiens
gugccgaggggccucuggagggggcggguucu

SEQ ID NO: 100577 - RNA, 32 nt, Homo Sapiens
ggagcggcuggagcggcagcggcggccgggca

SEQ ID NO: 100578 - RNA, 28 nt, Homo Sapiens
cagcugaaagauugauuaaugaacuauu

SEQ ID NO: 100579 - RNA, 32 nt, Homo Sapiens
uuuuuuucuuuuucuuuuuuccuguuuucuaa

SEQ ID NO: 100580 - RNA, 32 nt, Homo Sapiens
cacugcacuggugagguggccggcgcucgcua

SEQ ID NO: 100581 - RNA, 30 nt, Homo Sapiens
ccccggcgcgcgcagcccuagccgccggau

SEQ ID NO: 100582 - RNA, 32 nt, Homo Sapiens
uuuaagaagucuuucuggauagagagcagugc

SEQ ID NO: 100583 - RNA, 32 nt, Homo Sapiens
ucagccgccaaggggaagaucacuggcagauc

SEQ ID NO: 100584 - RNA, 32 nt, Homo Sapiens
gaguguugguuaauuuuauguguugacuugac

SEQ ID NO: 100585 - RNA, 32 nt, Homo Sapiens
uguauacugccauuuuaauguuuaccuaugaa

SEQ ID NO: 100586 - RNA, 32 nt, Homo Sapiens
auaaaguuuaauuuauaaauuaggcacaguaa

SEQ ID NO: 100587 - RNA, 32 nt, Homo Sapiens
guuugcuacuuuugcaugacacagcaagccca

SEQ ID NO: 100588 - RNA, 29 nt, Homo Sapiens
cuuaagcuauguauguauggaggccaguc

SEQ ID NO: 100589 - RNA, 32 nt, Homo Sapiens
uuuacuuuguccauaaaaaauuuacauuggau

SEQ ID NO: 100590 - RNA, 31 nt, Homo Sapiens
uaagggaaauaaaucaauguggcucaaacua

SEQ ID NO: 100591 - RNA, 32 nt, Homo Sapiens
ugcaacugacauucuuguagcuaaauuuugca

SEQ ID NO: 100592 - RNA, 32 nt, Homo Sapiens
uguuacugugucuauguagaaagggaagacau

SEQ ID NO: 100593 - RNA, 32 nt, Homo Sapiens
gcggaggggcuaccuuccuucccaucgcccug

SEQ ID NO: 100594 - RNA, 32 nt, Homo Sapiens
uauaaaacagacccccuaauagcaauaguacu

SEQ ID NO: 100595 - RNA, 32 nt, Homo Sapiens
aagaggcuggaauaagaucugauuccuggagu

SEQ ID NO: 100596 - RNA, 32 nt, Homo Sapiens
guuugcccuucccugcgcccagcccaagcugg

SEQ ID NO: 100597 - RNA, 32 nt, Homo Sapiens
cauuugucuugucugccgacuguccgugugug

SEQ ID NO: 100598 - RNA, 32 nt, Homo Sapiens
uaauuccuguauugcucggcccggggaguuuc

SEQ ID NO: 100599 - RNA, 32 nt, Homo Sapiens
ggccacaauuuaauuaauugguaagauauaau

SEQ ID NO: 100600 - RNA, 32 nt, Homo Sapiens
ucuugauguaaauuuacacuauuauaauacau

SEQ ID NO: 100601 - RNA, 32 nt, Homo Sapiens
uccccccaaaaaaggcacaaaaauagguuuug

SEQ ID NO: 100602 - RNA, 32 nt, Homo Sapiens
gcccacuguccagcugcagaaauucguugcca

SEQ ID NO: 100603 - RNA, 32 nt, Homo Sapiens
gaguaucucugcugcuuuuguuuaccugggua

SEQ ID NO: 100604 - RNA, 32 nt, Homo Sapiens
caaugugcccugguccacugggccgugagcag

SEQ ID NO: 100605 - RNA, 32 nt, Homo Sapiens
ggggccccugccggagccucagacacacugga

SEQ ID NO: 100606 - RNA, 32 nt, Homo Sapiens
uuauuuuaauuuaguucucaauagauaugccu

SEQ ID NO: 100607 - RNA, 32 nt, Homo Sapiens
cgccccucccagcgcugagagccuccccuggc

SEQ ID NO: 100608 - RNA, 32 nt, Homo Sapiens
ugcucugccagaagcagcuccucuuuaaacuc

SEQ ID NO: 100609 - RNA, 32 nt, Homo Sapiens
ggaggcaccaaaacuuggcagcugugccagaa

SEQ ID NO: 100610 - RNA, 30 nt, Homo Sapiens
caucugagaucuggccagucgcugugguug

SEQ ID NO: 100611 - RNA, 31 nt, Homo Sapiens
uuuuuguggguucucgcuccaggagaaggca

SEQ ID NO: 100612 - RNA, 32 nt, Homo Sapiens
ucgggaggaggggccggcacccaccccugggu

SEQ ID NO: 100613 - RNA, 32 nt, Homo Sapiens
cccgauggaguauaagggggagcuagccuccu

SEQ ID NO: 100614 - RNA, 32 nt, Homo Sapiens
uaauggcacuugucuauguacaaaacacaaac

SEQ ID NO: 100615 - RNA, 32 nt, Homo Sapiens
caauauugcuccaugaugacuuaguacaaagu

SEQ ID NO: 100616 - RNA, 32 nt, Homo Sapiens
uucccuuucuuuucucaggccuccccccaccg

SEQ ID NO: 100617 - RNA, 32 nt, Homo Sapiens
caguccagggccggcugcagcggcagcuccgc

SEQ ID NO: 100618 - RNA, 32 nt, Homo Sapiens
caucuuccugcaggcccuuccucugccugcug

SEQ ID NO: 100619 - RNA, 32 nt, Homo Sapiens
uuuccugggauucaaguaugcaaccagaacac

SEQ ID NO: 100620 - RNA, 32 nt, Homo Sapiens
auguuucuuucugccccguugaagaggugcag

SEQ ID NO: 100621 - RNA, 32 nt, Homo Sapiens
aaucccuguccucuccucuccugccgcaugag

SEQ ID NO: 100622 - RNA, 32 nt, Homo Sapiens
aaggagggaagauaaauaugggauaaaaucca

SEQ ID NO: 100623 - RNA, 32 nt, Homo Sapiens
uucccuuuccuccuccuugggccaugcaacgg

SEQ ID NO: 100624 - RNA, 32 nt, Homo Sapiens
agaaaauguauuauuuuagaugaacaaugugg

SEQ ID NO: 100625 - RNA, 32 nt, Homo Sapiens
gaaauguacagugaauacuuugaaggucuaga

SEQ ID NO: 100626 - RNA, 32 nt, Homo Sapiens
aauucaaugcccuucauccaauggguaucuau

SEQ ID NO: 100627 - RNA, 32 nt, Homo Sapiens
augaagaagcaggagaaggcaacugagauccu

SEQ ID NO: 100628 - RNA, 32 nt, Homo Sapiens
cagguguuucugcggcaggcgccaugucagaa

SEQ ID NO: 100629 - RNA, 32 nt, Homo Sapiens
ucccuccagagcccggcccugaagcaggucuc

SEQ ID NO: 100630 - RNA, 32 nt, Homo Sapiens
aagguccuaccuuuguaucuaaaugcuguguc

SEQ ID NO: 100631 - RNA, 32 nt, Homo Sapiens
gcccggccagcucgcccuggcccgcacagcca

SEQ ID NO: 100632 - RNA, 32 nt, Homo Sapiens
auguuuguuacuuguuaucccucccccaaccu

SEQ ID NO: 100633 - RNA, 32 nt, Homo Sapiens
cuuacuauuuuacuucuagagauaguacauaa

SEQ ID NO: 100634 - RNA, 32 nt, Homo Sapiens
gagcgguccccggcccgggaaacuuggaccga

SEQ ID NO: 100635 - RNA, 32 nt, Homo Sapiens
aacugggcgucuguuccggcgccggaccccug

SEQ ID NO: 100636 - RNA, 32 nt, Homo Sapiens
aaugaggggaaauggauuuauaaacuuguuuu

SEQ ID NO: 100637 - RNA, 32 nt, Homo Sapiens
cugcgccccgcaccccuccgagcagcccgggg

SEQ ID NO: 100638 - RNA, 32 nt, Homo Sapiens
aacgagacucgcggccccaggcccaggcccca

SEQ ID NO: 100639 - RNA, 32 nt, Homo Sapiens
agcugggcgugguggcgggcgccuguaauccc

SEQ ID NO: 100640 - RNA, 32 nt, Homo Sapiens
aguccguauaucuaugauguaaaaguguauau

SEQ ID NO: 100641 - RNA, 32 nt, Homo Sapiens
guuugaauuuucuugucgcuuccuaucaaaau

SEQ ID NO: 100642 - RNA, 32 nt, Homo Sapiens
cuuuuuagaggcauuaacuacuccucguaagu

SEQ ID NO: 100643 - RNA, 32 nt, Homo Sapiens
caacgcucuccacuuccugauuucugcuuuaa

SEQ ID NO: 100644 - RNA, 32 nt, Homo Sapiens
aauuauggaaguaucagaguggaagugaggac

SEQ ID NO: 100645 - RNA, 32 nt, Homo Sapiens
gcagacacucacccagcuccgcgagcucagcc

SEQ ID NO: 100646 - RNA, 32 nt, Homo Sapiens
ugcuuggcugggcgcaguggcucacaccugua

SEQ ID NO: 100647 - RNA, 32 nt, Homo Sapiens
uaaucaauuuuuagaaccaaaaccaagagaag

SEQ ID NO: 100648 - RNA, 32 nt, Homo Sapiens
ccuccuaaguagcugagaccacagggacacac

SEQ ID NO: 100649 - RNA, 32 nt, Homo Sapiens
uccccaaguuuggggucagaggccgggacacu

SEQ ID NO: 100650 - RNA, 32 nt, Homo Sapiens
cgcauguaaucccagcacuuugggaggccgag

SEQ ID NO: 100651 - RNA, 32 nt, Homo Sapiens
ucucgggugcauuugagagaagccacgcuguc

SEQ ID NO: 100652 - RNA, 32 nt, Homo Sapiens
caugaguaccucaggcuguccagcugagcucc

SEQ ID NO: 100653 - RNA, 32 nt, Homo Sapiens
gugcucaauaaguauccaaugaguggacaaau

SEQ ID NO: 100654 - RNA, 32 nt, Homo Sapiens
cccugcgcgcccagaagcugcuacggggggag

SEQ ID NO: 100655 - RNA, 32 nt, Homo Sapiens
uaggacugcgcggcuccaggcugagggucggu

SEQ ID NO: 100656 - RNA, 32 nt, Homo Sapiens
ucccaccucagccgcaccuugcuggaugcuuc

SEQ ID NO: 100657 - RNA, 31 nt, Homo Sapiens
acaggguuagcgugaggauuaaauaaaaaug

SEQ ID NO: 100658 - RNA, 32 nt, Homo Sapiens
agguggcucuucugcuggggcugacuugucca

SEQ ID NO: 100659 - RNA, 32 nt, Homo Sapiens
guuaaauauaaauuauuuuguuuuaaaaugcc

SEQ ID NO: 100660 - RNA, 32 nt, Homo Sapiens
uggauauuacucugcaucacaaugaagccaac

SEQ ID NO: 100661 - RNA, 32 nt, Homo Sapiens
ccuaccccagaacuuuggcucccuuucccuuc

SEQ ID NO: 100662 - RNA, 32 nt, Homo Sapiens
auauacuuuccuguuuuucccugacccccgaa

SEQ ID NO: 100663 - RNA, 29 nt, Homo Sapiens
uuuuuaaaaaguuuauuuuagccauucua

SEQ ID NO: 100664 - RNA, 32 nt, Homo Sapiens
agacauauaaagucugaaaauaaaggaaugac

SEQ ID NO: 100665 - RNA, 32 nt, Homo Sapiens
aagaccuucagcguugcccuggcggacagaga

SEQ ID NO: 100666 - RNA, 30 nt, Homo Sapiens
aaacaugucugugaacuugauguucguggg

SEQ ID NO: 100667 - RNA, 32 nt, Homo Sapiens
uguggauuuuaaaauguauacucuguacgguu

SEQ ID NO: 100668 - RNA, 32 nt, Homo Sapiens
gcccugaccuguuuccucaugacugcccccgg

SEQ ID NO: 100669 - RNA, 32 nt, Homo Sapiens
uugcuuuuuccuaaguuuuuacugaaauggua

SEQ ID NO: 100670 - RNA, 32 nt, Homo Sapiens
ucuggguuuugaucccccacuccaggcucugg

SEQ ID NO: 100671 - RNA, 32 nt, Homo Sapiens
cugaaacaguuucuccuacaucuuuaaaugca

SEQ ID NO: 100672 - RNA, 32 nt, Homo Sapiens
ccgucgcagcagcagcggcagccccggcagcc

SEQ ID NO: 100673 - RNA, 32 nt, Homo Sapiens
gcuuucuauuaaguauaaacuauguauauaua

SEQ ID NO: 100674 - RNA, 32 nt, Homo Sapiens
acgguggcugccaggggcuggaggaagagggg

SEQ ID NO: 100675 - RNA, 32 nt, Homo Sapiens
gaugcccaggacaaaauccuaguugucuuacu

SEQ ID NO: 100676 - RNA, 32 nt, Homo Sapiens
gaggccccccaguucucccccaucucccccuc

SEQ ID NO: 100677 - RNA, 32 nt, Homo Sapiens
gucccagcgaggaugcuugcuaccuccaggug

SEQ ID NO: 100678 - RNA, 32 nt, Homo Sapiens
uucuacuccaugauccagucggccaacagcca

SEQ ID NO: 100679 - RNA, 32 nt, Homo Sapiens
cccuaauauauucuuauauguagagcaauaau

SEQ ID NO: 100680 - RNA, 32 nt, Homo Sapiens
ucuaacugcuaaggagggaguugacauccccc

SEQ ID NO: 100681 - RNA, 32 nt, Homo Sapiens
gacggucaaguccagggcucauuuugguuauu

SEQ ID NO: 100682 - RNA, 25 nt, Homo Sapiens
auguguauauauacauauaugugua

SEQ ID NO: 100683 - RNA, 32 nt, Homo Sapiens
uuuuuaagggaaggauuggauagaggcuaauu

SEQ ID NO: 100684 - RNA, 30 nt, Homo Sapiens
guagaugucugugucugugagaugccuuuc

SEQ ID NO: 100685 - RNA, 30 nt, Homo Sapiens
ucaaaguauuguccagacaagagucacugg

SEQ ID NO: 100686 - RNA, 32 nt, Homo Sapiens
cgcgcgcgcuucccucccggcgcagucaccgg

SEQ ID NO: 100687 - RNA, 32 nt, Homo Sapiens
gcgaggcacggacggcgggcgcccgguaccuc

SEQ ID NO: 100688 - RNA, 32 nt, Homo Sapiens
gcccccgcccaggccccccagcccagcccagc

SEQ ID NO: 100689 - RNA, 32 nt, Homo Sapiens
cuugcaauucccucacccggcgcgcgccuuuc

SEQ ID NO: 100690 - RNA, 32 nt, Homo Sapiens
ugaaccaucaucccugcucucaucucagcucc

SEQ ID NO: 100691 - RNA, 32 nt, Homo Sapiens
ucuuccuugaccucacagguggugguaaggau

SEQ ID NO: 100692 - RNA, 32 nt, Homo Sapiens
cagagaugaugcugcgcguuggagcuuuccug

SEQ ID NO: 100693 - RNA, 32 nt, Homo Sapiens
auuucuuuuuauucuaaugucucuguucuaaa

SEQ ID NO: 100694 - RNA, 32 nt, Homo Sapiens
cugcgggaagcagaucgagaaaaaucacgggc

SEQ ID NO: 100695 - RNA, 32 nt, Homo Sapiens
aaaugcuguauauauggcuuucacucaaucau

SEQ ID NO: 100696 - RNA, 32 nt, Homo Sapiens
cacaugcacacacagccuagcugcccccaggg

SEQ ID NO: 100697 - RNA, 32 nt, Homo Sapiens
ucaacagggcuguauucugaagggcaggccuc

SEQ ID NO: 100698 - RNA, 32 nt, Homo Sapiens
guuaaagccauucucucgccucagccucccga

SEQ ID NO: 100699 - RNA, 32 nt, Homo Sapiens
gccaggagucaguggcaggcgcggccgguggg

SEQ ID NO: 100700 - RNA, 29 nt, Homo Sapiens
ggaaaugacaacaaaaacgaugucccagu

SEQ ID NO: 100701 - RNA, 32 nt, Homo Sapiens
acaaacguuuuagccauugugaauuuucuuca

SEQ ID NO: 100702 - RNA, 32 nt, Homo Sapiens
gaucagaucugcauuucuuuugacgaaggcaa

SEQ ID NO: 100703 - RNA, 32 nt, Homo Sapiens
cacaucccaaaauaaaauucagaagccaggug

SEQ ID NO: 100704 - RNA, 32 nt, Homo Sapiens
cacuggaccccguaggaguccugaccccagau

SEQ ID NO: 100705 - RNA, 32 nt, Homo Sapiens
cuugaucuuucugcaucaucaagaauggaaac

SEQ ID NO: 100706 - RNA, 32 nt, Homo Sapiens
aguagccaggacugaugguuuucuggucugga

SEQ ID NO: 100707 - RNA, 32 nt, Homo Sapiens
aagauuuaaggguugagauuuuuaagaggcaa

SEQ ID NO: 100708 - RNA, 32 nt, Homo Sapiens
gccccugccacuccgagauaaccaguggaugc

SEQ ID NO: 100709 - RNA, 32 nt, Homo Sapiens
guaucuuagggucagaacugcugaaagagaca

SEQ ID NO: 100710 - RNA, 32 nt, Homo Sapiens
uguugcauuuuucacucuuaacccgagggugu

SEQ ID NO: 100711 - RNA, 32 nt, Homo Sapiens
gagaaauuaaguaucugacaucucugcaaucu

SEQ ID NO: 100712 - RNA, 32 nt, Homo Sapiens
aagcucaccugccuuuucuguuggaagagauc

SEQ ID NO: 100713 - RNA, 32 nt, Homo Sapiens
cguuccuccuucccuuucccaaggaagccaaa

SEQ ID NO: 100714 - RNA, 32 nt, Homo Sapiens
ugggaggccaagggggcagaucacuucagguc

SEQ ID NO: 100715 - RNA, 32 nt, Homo Sapiens
uuacagugauugaacauucagauggaagacca

SEQ ID NO: 100716 - RNA, 32 nt, Homo Sapiens
ggcugcagcggugggaaggcgggggcgugccg

SEQ ID NO: 100717 - RNA, 32 nt, Homo Sapiens
cagugcccagcgccugggaauuugggagggga

SEQ ID NO: 100718 - RNA, 32 nt, Homo Sapiens
guagaccugagaugcuggucaagcccccuuug

SEQ ID NO: 100719 - RNA, 32 nt, Homo Sapiens
guaaccucacuucuuauugauuccuaagaaga

SEQ ID NO: 100720 - RNA, 32 nt, Homo Sapiens
caagagaauuucgagcgcuagcugucucucgg

SEQ ID NO: 100721 - RNA, 31 nt, Homo Sapiens
agccgccggugcuguugcccaagggcguggu

SEQ ID NO: 100722 - RNA, 32 nt, Homo Sapiens
ugcccugcgauggaaauuagauauauuucaug

SEQ ID NO: 100723 - RNA, 32 nt, Homo Sapiens
cuagccucagaucuguuaauucuuuuggcccc

SEQ ID NO: 100724 - RNA, 29 nt, Homo Sapiens
uagcugucauaugaaggaaaugcaaagaa

SEQ ID NO: 100725 - RNA, 32 nt, Homo Sapiens
ugcagugagcugagaucucaccacugcacucc

SEQ ID NO: 100726 - RNA, 32 nt, Homo Sapiens
aaaaacagaaaaggggacaugcugggaacagg

SEQ ID NO: 100727 - RNA, 32 nt, Homo Sapiens
uguuauagcucuucuggguauuugagaaaugc

SEQ ID NO: 100728 - RNA, 32 nt, Homo Sapiens
gcgggggucuggggagcgcagcagccauggca

SEQ ID NO: 100729 - RNA, 32 nt, Homo Sapiens
cuucuaggccucuggaccgcagaugcccuccu

SEQ ID NO: 100730 - RNA, 32 nt, Homo Sapiens
uggugaggcccugccauaaccaggcgcccagc

SEQ ID NO: 100731 - RNA, 32 nt, Homo Sapiens
ccaucacagagcaaagugaccuccacgucuga

SEQ ID NO: 100732 - RNA, 32 nt, Homo Sapiens
auuucccucauacuaaugcuuaauggcaauga

SEQ ID NO: 100733 - RNA, 32 nt, Homo Sapiens
aggcagcccggguccccgccucccggauccag

SEQ ID NO: 100734 - RNA, 32 nt, Homo Sapiens
ccgcucuccuaccacacccaccuuucccggcc

SEQ ID NO: 100735 - RNA, 32 nt, Homo Sapiens
uuauaaaauguuaaccggcagaaguauuuuca

SEQ ID NO: 100736 - RNA, 32 nt, Homo Sapiens
acaagauguguggcguugcaaauaaugaugaa

SEQ ID NO: 100737 - RNA, 32 nt, Homo Sapiens
uugaaugguuuucauuuuaaucugcaaugucu

SEQ ID NO: 100738 - RNA, 32 nt, Homo Sapiens
aacguaaugauuauaugacaauccugaagaaa

SEQ ID NO: 100739 - RNA, 32 nt, Homo Sapiens
ccacuccccccgccucuuucguccgcgggccg

SEQ ID NO: 100740 - RNA, 32 nt, Homo Sapiens
aggauuuggagaaguggagagaaggucugaug

SEQ ID NO: 100741 - RNA, 32 nt, Homo Sapiens
acuuuuguacuauuaaaaaacuguagccagug

SEQ ID NO: 100742 - RNA, 32 nt, Homo Sapiens
ggaagggaccugcugcagcugcagccgccugg

SEQ ID NO: 100743 - RNA, 32 nt, Homo Sapiens
cuugcagggcuuugcagcugcucaucuguuug

SEQ ID NO: 100744 - RNA, 32 nt, Homo Sapiens
uuuaaaggggcaggccccuucuccugccccag

SEQ ID NO: 100745 - RNA, 31 nt, Homo Sapiens
aucaggaacauaugaguugagcagaguaauu

SEQ ID NO: 100746 - RNA, 32 nt, Homo Sapiens
cucacugugcuaaauacagucuucccacuaau

SEQ ID NO: 100747 - RNA, 32 nt, Homo Sapiens
uuauaugugucugauuuuuaaaggguauaugu

SEQ ID NO: 100748 - RNA, 32 nt, Homo Sapiens
agacgcuggagucgcugcggguccugggauuc

SEQ ID NO: 100749 - RNA, 32 nt, Homo Sapiens
gaggacccucaggcccggggcgagagcccggc

SEQ ID NO: 100750 - RNA, 32 nt, Homo Sapiens
gagagacuugggucagggaaccacugcagaag

SEQ ID NO: 100751 - RNA, 32 nt, Homo Sapiens
ucaguaacgggagaagcaggaggauguccaga

SEQ ID NO: 100752 - RNA, 32 nt, Homo Sapiens
uauagucauuaauaaacuaacuuuaugugcac

SEQ ID NO: 100753 - RNA, 32 nt, Homo Sapiens
gccuccggcugugccuucagcccaguguggug

SEQ ID NO: 100754 - RNA, 32 nt, Homo Sapiens
ugggaucuaccuugggucuuacuugaguucca

SEQ ID NO: 100755 - RNA, 32 nt, Homo Sapiens
aggccacucugcaacgugugaguaccaggagc

SEQ ID NO: 100756 - RNA, 30 nt, Homo Sapiens
gucauuuagcuggcugcagaacuccuuugc

SEQ ID NO: 100757 - RNA, 32 nt, Homo Sapiens
gaagaaccuugauaauuuugacccacuguaac

SEQ ID NO: 100758 - RNA, 32 nt, Homo Sapiens
uagcccuguauauauguacaccaacaugaaac

SEQ ID NO: 100759 - RNA, 32 nt, Homo Sapiens
uuauuuguggcagggugaaaaauguacaaacu

SEQ ID NO: 100760 - RNA, 32 nt, Homo Sapiens
gcucacaugaccucuagagacuugcagacccc

SEQ ID NO: 100761 - RNA, 32 nt, Homo Sapiens
auuaacagaaaguuaccaaauacaguucugua

SEQ ID NO: 100762 - RNA, 32 nt, Homo Sapiens
gaggagaagcgugcugaauagauucuucucag

SEQ ID NO: 100763 - RNA, 32 nt, Homo Sapiens
auuugggaucauuugaggucaagaauucgaga

SEQ ID NO: 100764 - RNA, 32 nt, Homo Sapiens
ugccagcagaacuucuguguaaaauuauaguc

SEQ ID NO: 100765 - RNA, 32 nt, Homo Sapiens
gccgcaccucggaucuaggagcuacucgcccg

SEQ ID NO: 100766 - RNA, 32 nt, Homo Sapiens
ucacagggcuccuggucuggcucuguccucau

SEQ ID NO: 100767 - RNA, 30 nt, Homo Sapiens
gaagaaccaagcugggucuauaggaauugc

SEQ ID NO: 100768 - RNA, 32 nt, Homo Sapiens
aggugucagaucuuuuucaagaacagcagaaa

SEQ ID NO: 100769 - RNA, 32 nt, Homo Sapiens
uugacuguuguaauggaguaaagaagagggcc

SEQ ID NO: 100770 - RNA, 32 nt, Homo Sapiens
gaggugggcagguaggugggcggacggccgcg

SEQ ID NO: 100771 - RNA, 32 nt, Homo Sapiens
aucagaccacucccuucccccauccuccagga

SEQ ID NO: 100772 - RNA, 32 nt, Homo Sapiens
cuugggcagaaugaauucgaugcguauucugu

SEQ ID NO: 100773 - RNA, 32 nt, Homo Sapiens
gauaauuagcuguaaugagccuggcuacauuu

SEQ ID NO: 100774 - RNA, 32 nt, Homo Sapiens
uuuaaauaaggagugaaacaaucuugucuauu

SEQ ID NO: 100775 - RNA, 32 nt, Homo Sapiens
uauuauuauuuucucugcuauuguaauauuuu

SEQ ID NO: 100776 - RNA, 32 nt, Homo Sapiens
uguauuuagacuauauucaagccucgcucugu

SEQ ID NO: 100777 - RNA, 32 nt, Homo Sapiens
uuguaggcguuuuaaauaugcuuauuuugugu

SEQ ID NO: 100778 - RNA, 32 nt, Homo Sapiens
aaggcuugguggccaacacccagaggaacaaa

SEQ ID NO: 100779 - RNA, 32 nt, Homo Sapiens
gcacagagauuuauaguauucuuaauaguaug

SEQ ID NO: 100780 - RNA, 32 nt, Homo Sapiens
agcacgaaaguaccauaugauuguuaaauacc

SEQ ID NO: 100781 - RNA, 32 nt, Homo Sapiens
acguugcccaagguugcacagcaagaaaaggg

SEQ ID NO: 100782 - RNA, 32 nt, Homo Sapiens
uguggcucucucuggagacaaaagcuaagacu

SEQ ID NO: 100783 - RNA, 32 nt, Homo Sapiens
ucugucagcacugacuucuguaucaugucagg

SEQ ID NO: 100784 - RNA, 32 nt, Homo Sapiens
uauuucagaugaugcagccaacacgaacgguu

SEQ ID NO: 100785 - RNA, 32 nt, Homo Sapiens
ccgugucuguucuugucacaccuagucagguc

SEQ ID NO: 100786 - RNA, 32 nt, Homo Sapiens
agaaacccuacaaguguacugagugugucaag

SEQ ID NO: 100787 - RNA, 32 nt, Homo Sapiens
gguaucggcuauacuagggaaccauuuuguag

SEQ ID NO: 100788 - RNA, 32 nt, Homo Sapiens
ggagggcagcccggggcagagccucagccccg

SEQ ID NO: 100789 - RNA, 32 nt, Homo Sapiens
uggggaugcuguaacaaaucaucacaagcuga

SEQ ID NO: 100790 - RNA, 32 nt, Homo Sapiens
guacauuucuaaaauaccacauuucugaaauc

SEQ ID NO: 100791 - RNA, 32 nt, Homo Sapiens
cccccacccaaguguggagcccugcucaggga

SEQ ID NO: 100792 - RNA, 32 nt, Homo Sapiens
uauuauuuuuugcugucaacuuucuagcaaug

SEQ ID NO: 100793 - RNA, 32 nt, Homo Sapiens
cugcgcgcggccuccucggcgcagccauccuc

SEQ ID NO: 100794 - RNA, 32 nt, Homo Sapiens
cagaaaauauuuuaaaauauuaaaagagugcu

SEQ ID NO: 100795 - RNA, 32 nt, Homo Sapiens
ccccccgucccggccccccuggguucccucag

SEQ ID NO: 100796 - RNA, 32 nt, Homo Sapiens
guuuucuuucuuuuuccuuggauuaaauguga

SEQ ID NO: 100797 - RNA, 32 nt, Homo Sapiens
gagcuggggaccagcuuaggccuccuccauag

SEQ ID NO: 100798 - RNA, 32 nt, Homo Sapiens
uccaccccauccccucagggccccgauaaccu

SEQ ID NO: 100799 - RNA, 32 nt, Homo Sapiens
ccugugccccucugcuggguguaacugcucug

SEQ ID NO: 100800 - RNA, 32 nt, Homo Sapiens
gucucacccucccaggcagcuccuacacucaa

SEQ ID NO: 100801 - RNA, 32 nt, Homo Sapiens
cauuccuaggguuccuagucccgggaaggcaa

SEQ ID NO: 100802 - RNA, 32 nt, Homo Sapiens
gaggcaggagaaucauuucaacccaggaggca

SEQ ID NO: 100803 - RNA, 32 nt, Homo Sapiens
caugaucaggggauguggcgggggguggcuag

SEQ ID NO: 100804 - RNA, 32 nt, Homo Sapiens
ccagccuccuucccgcuacagaaucgcucauc

SEQ ID NO: 100805 - RNA, 32 nt, Homo Sapiens
uucacgcuuuuguagaacugagguuucaauaa

SEQ ID NO: 100806 - RNA, 32 nt, Homo Sapiens
uugguuacaaaaaauacaaauaaaaacaaugc

SEQ ID NO: 100807 - RNA, 32 nt, Homo Sapiens
cauuuuggagauggaaauugacgaggagggaa

SEQ ID NO: 100808 - RNA, 32 nt, Homo Sapiens
cgccagaagcccuccgcccucaugguccauug

SEQ ID NO: 100809 - RNA, 31 nt, Homo Sapiens
agugccuugagcugccugcucugcagcccac

SEQ ID NO: 100810 - RNA, 32 nt, Homo Sapiens
guaagagaguuccaugcaggauggacaagaaa

SEQ ID NO: 100811 - RNA, 31 nt, Homo Sapiens
uuucuucauuugagauuugggagguaaaggc

SEQ ID NO: 100812 - RNA, 32 nt, Homo Sapiens
agaucaagaacaaucagagaaaaaugauacca

SEQ ID NO: 100813 - RNA, 32 nt, Homo Sapiens
gccagagaucauaggucacuucagguagcaag

SEQ ID NO: 100814 - RNA, 32 nt, Homo Sapiens
gguggauauggcggcccugggcggggugcugg

SEQ ID NO: 100815 - RNA, 32 nt, Homo Sapiens
cucuuuguuuuaaagagagaauuuuguaaacc

SEQ ID NO: 100816 - RNA, 29 nt, Homo Sapiens
aaauuacuauguauguuauaggccuuuga

SEQ ID NO: 100817 - RNA, 32 nt, Homo Sapiens
uuuuaagguuuauaguucccucaacacaauug

SEQ ID NO: 100818 - RNA, 32 nt, Homo Sapiens
acaggcucagaauuucugaaaaaugccuccuu

SEQ ID NO: 100819 - RNA, 32 nt, Homo Sapiens
gaugucagcucuuuccuuuggcagcguguuuc

SEQ ID NO: 100820 - RNA, 32 nt, Homo Sapiens
augggaagcaccuuugugcuuucaaaggcaag

SEQ ID NO: 100821 - RNA, 32 nt, Homo Sapiens
aagugggacgucacgcagacagcacugucaac

SEQ ID NO: 100822 - RNA, 32 nt, Homo Sapiens
ugggagguggagguugcagugagccaagauug

SEQ ID NO: 100823 - RNA, 32 nt, Homo Sapiens
gauggaagcuguacuugggucuguguaucuuu

SEQ ID NO: 100824 - RNA, 32 nt, Homo Sapiens
caguuuucugucacuggugggcacuggacagg

SEQ ID NO: 100825 - RNA, 32 nt, Homo Sapiens
gcccgggcccgcgacccccgcacccagcuccg

SEQ ID NO: 100826 - RNA, 32 nt, Homo Sapiens
ggcugagugggugggccaccuccugcggcagg

SEQ ID NO: 100827 - RNA, 32 nt, Homo Sapiens
gggcaccacacaccccacuuccagcagagucc

SEQ ID NO: 100828 - RNA, 32 nt, Homo Sapiens
aaugcucaugagacuauauuuaugaucaguga

SEQ ID NO: 100829 - RNA, 32 nt, Homo Sapiens
caaaucagggggcccgugaaaggcaacugagc

SEQ ID NO: 100830 - RNA, 32 nt, Homo Sapiens
cuagacuaaaauuguauaugcuuuugguaauu

SEQ ID NO: 100831 - RNA, 32 nt, Homo Sapiens
ccauuugguccacagggcuguuucaaggcccu

SEQ ID NO: 100832 - RNA, 32 nt, Homo Sapiens
gggcagguggagagggcgggcaggggagagac

SEQ ID NO: 100833 - RNA, 32 nt, Homo Sapiens
aucaaaguccucuucuaggauuuuuucaaauu

SEQ ID NO: 100834 - RNA, 32 nt, Homo Sapiens
uuaaacuuguacacugaguuacuaaacaacag

SEQ ID NO: 100835 - RNA, 32 nt, Homo Sapiens
ccguccccgcggcuggcgcaggaccucacucg

SEQ ID NO: 100836 - RNA, 32 nt, Homo Sapiens
aacagaugaagauaaguugguugaaugucucc

SEQ ID NO: 100837 - RNA, 32 nt, Homo Sapiens
ugugccuuaaucuucccuccccugugcugccc

SEQ ID NO: 100838 - RNA, 32 nt, Homo Sapiens
gccaguggagaggcaggaggacaggcuggggg

SEQ ID NO: 100839 - RNA, 31 nt, Homo Sapiens
ucugccagggggauggcguccacuccgaugg

SEQ ID NO: 100840 - RNA, 32 nt, Homo Sapiens
cacaaugagaaaccagaggagccgaugaguua

SEQ ID NO: 100841 - RNA, 32 nt, Homo Sapiens
gugccuccgccgggcgcccaggguguagcgga

SEQ ID NO: 100842 - RNA, 28 nt, Homo Sapiens
caggcuaacuaaaggggaauguuacugc

SEQ ID NO: 100843 - RNA, 32 nt, Homo Sapiens
guuuuuauuucugaauuuuccaugugcuuuaa

SEQ ID NO: 100844 - RNA, 32 nt, Homo Sapiens
guguucaaaaauacauaggaaaagacugauaa

SEQ ID NO: 100845 - RNA, 29 nt, Homo Sapiens
auggaugugacuuguuuugaauguuuugu

SEQ ID NO: 100846 - RNA, 32 nt, Homo Sapiens
aauuuauuuaacaaagauguuuugucuuuugu

SEQ ID NO: 100847 - RNA, 32 nt, Homo Sapiens
ccaguccccuuaccccuguggaccucagugac

SEQ ID NO: 100848 - RNA, 32 nt, Homo Sapiens
uagagccucaguucagaagagcuugcagcuuu

SEQ ID NO: 100849 - RNA, 32 nt, Homo Sapiens
agcguccgccgggcccccgcgcgucgcgccau

SEQ ID NO: 100850 - RNA, 32 nt, Homo Sapiens
cugauuguuuuguugggaaaagaaauuuacca

SEQ ID NO: 100851 - RNA, 32 nt, Homo Sapiens
gggauucauuacaagacuuugggcucuuaugu

SEQ ID NO: 100852 - RNA, 32 nt, Homo Sapiens
aucagaucaguucucuuuguggauuauauuuu

SEQ ID NO: 100853 - RNA, 32 nt, Homo Sapiens
gagcugggcagguggaugcggcuggaagaugg

SEQ ID NO: 100854 - RNA, 32 nt, Homo Sapiens
gaucccagcagguuaggccggaggaacagcgc

SEQ ID NO: 100855 - RNA, 31 nt, Homo Sapiens
acaaguacaaauuggugaugaagauguauuc

SEQ ID NO: 100856 - RNA, 32 nt, Homo Sapiens
auguagacugguuuguauuaaaaugugucaau

SEQ ID NO: 100857 - RNA, 32 nt, Homo Sapiens
cuuaaguuuguaagacagugcccugagaccuc

SEQ ID NO: 100858 - RNA, 32 nt, Homo Sapiens
ggcaagaagauaagaugagacauuugaaauug

SEQ ID NO: 100859 - RNA, 32 nt, Homo Sapiens
uugauaucaaggaaaguggggcacugagaaag

SEQ ID NO: 100860 - RNA, 32 nt, Homo Sapiens
auaaucuucaggaauuuuuagauucuuaaaau

SEQ ID NO: 100861 - RNA, 32 nt, Homo Sapiens
ccagccucaggauggcguccucccugcuugag

SEQ ID NO: 100862 - RNA, 32 nt, Homo Sapiens
augcagaaaaggaagauguucuguagcaaggg

SEQ ID NO: 100863 - RNA, 32 nt, Homo Sapiens
cugacccaaaaaucaggcauggcauuaaaacg

SEQ ID NO: 100864 - RNA, 32 nt, Homo Sapiens
uccacuugcagaacccaaagauacacaaucag

SEQ ID NO: 100865 - RNA, 32 nt, Homo Sapiens
uucacaggaacgacagacauguaugacugcau

SEQ ID NO: 100866 - RNA, 32 nt, Homo Sapiens
uacuugaagaucuagguuuugggagauucccg

SEQ ID NO: 100867 - RNA, 32 nt, Homo Sapiens
cauaagaacuugggcuuuucuacgagaugacc

SEQ ID NO: 100868 - RNA, 32 nt, Homo Sapiens
uuuauggaagcuuuaaaguuuugucaaaacau

SEQ ID NO: 100869 - RNA, 32 nt, Homo Sapiens
uccgccgcugccgccgccgcugcuacagccgc

SEQ ID NO: 100870 - RNA, 32 nt, Homo Sapiens
caccacugggcucucccucccccagccuggag

SEQ ID NO: 100871 - RNA, 32 nt, Homo Sapiens
gccgcgcgcgaaucgcggucgcgagccaugga

SEQ ID NO: 100872 - RNA, 32 nt, Homo Sapiens
agauugcaauauagaggcacuuucucauuucc

SEQ ID NO: 100873 - RNA, 32 nt, Homo Sapiens
aagguuuauauuaaauggaaauccauaaacca

SEQ ID NO: 100874 - RNA, 32 nt, Homo Sapiens
uguugcugcaugugucccaugugccugucaga

SEQ ID NO: 100875 - RNA, 32 nt, Homo Sapiens
aauaagcucagcaacuaaaaaccauuacccaa

SEQ ID NO: 100876 - RNA, 27 nt, Homo Sapiens
ggauggagaaauuuaaggcugcgaugu

SEQ ID NO: 100877 - RNA, 32 nt, Homo Sapiens
agagauugaagaaagacaaagguuuaaagguc

SEQ ID NO: 100878 - RNA, 32 nt, Homo Sapiens
ccaguacccccuccagccccacaccugggccu

SEQ ID NO: 100879 - RNA, 32 nt, Homo Sapiens
uaucuauguuucccuuucgucuauucuaucuu

SEQ ID NO: 100880 - RNA, 32 nt, Homo Sapiens
gguuugagguaacaacagagacuuucacuaua

SEQ ID NO: 100881 - RNA, 32 nt, Homo Sapiens
uuucccauaccuuuuuuuuucuuacuauaaaa

SEQ ID NO: 100882 - RNA, 32 nt, Homo Sapiens
aaagcugaauaaauaaaaacuacaguaaaugu

SEQ ID NO: 100883 - RNA, 32 nt, Homo Sapiens
gugccuucccucccuuucuccuaaagccuggu

SEQ ID NO: 100884 - RNA, 32 nt, Homo Sapiens
gagccguuagcgccgcgccgccgccgccuccc

SEQ ID NO: 100885 - RNA, 32 nt, Homo Sapiens
gagccggccucagcuggugcugccguggcugg

SEQ ID NO: 100886 - RNA, 29 nt, Homo Sapiens
acuuugauagugauuuagauguaaaaagu

SEQ ID NO: 100887 - RNA, 32 nt, Homo Sapiens
agccaucacuaaugaggacacuguauauggca

SEQ ID NO: 100888 - RNA, 32 nt, Homo Sapiens
ggaacuuuucgccggcgccgggccgccucuga

SEQ ID NO: 100889 - RNA, 32 nt, Homo Sapiens
auuuugauaauggcuuccagacucuuuggcgu

SEQ ID NO: 100890 - RNA, 32 nt, Homo Sapiens
uaagcuuugugcuuagagaauguauguguuuu

SEQ ID NO: 100891 - RNA, 32 nt, Homo Sapiens
aaaggccuggggcguccuggggucugggagga

SEQ ID NO: 100892 - RNA, 32 nt, Homo Sapiens
cagcggcagaggcagcaccagggcugcggagc

SEQ ID NO: 100893 - RNA, 32 nt, Homo Sapiens
aaaccuuuuccacaccaguucugcagcagucg

SEQ ID NO: 100894 - RNA, 32 nt, Homo Sapiens
ccaggagaggggccgagagcgcggcugacccu

SEQ ID NO: 100895 - RNA, 32 nt, Homo Sapiens
aaagucagaaccuaucucugaaaauuaaugug

SEQ ID NO: 100896 - RNA, 32 nt, Homo Sapiens
ggcuuuugugcccaagcucaccagcccugcgc

SEQ ID NO: 100897 - RNA, 32 nt, Homo Sapiens
auuauacagugauugaaaauccauuuaauucc

SEQ ID NO: 100898 - RNA, 27 nt, Homo Sapiens
ugaugacaaaggaaacacagcacauuc

SEQ ID NO: 100899 - RNA, 32 nt, Homo Sapiens
cuucccugcauuaacugcacaaacaauauguu

SEQ ID NO: 100900 - RNA, 32 nt, Homo Sapiens
cuacuggcuuucagcccucacuggcgucaucu

SEQ ID NO: 100901 - RNA, 32 nt, Homo Sapiens
ucaccucccaagaacgccugcccgcccacccg

SEQ ID NO: 100902 - RNA, 32 nt, Homo Sapiens
uguucgguuuccccagccuguuaaugaacagc

SEQ ID NO: 100903 - RNA, 32 nt, Homo Sapiens
ggaggcagcuggcgccaucgcuccggauuagu

SEQ ID NO: 100904 - RNA, 32 nt, Homo Sapiens
ccagcucugccagcucgaggaggccugcuagg

SEQ ID NO: 100905 - RNA, 32 nt, Homo Sapiens
ggggcuuggcgaaugcacgucugccugagaac

SEQ ID NO: 100906 - RNA, 32 nt, Homo Sapiens
ccaaauuugaguuugggaagaaccagagagaa

SEQ ID NO: 100907 - RNA, 32 nt, Homo Sapiens
augaggucaggagauugagaccauccuggcua

SEQ ID NO: 100908 - RNA, 32 nt, Homo Sapiens
gucaccgccuccugggucguccgccacggguu

SEQ ID NO: 100909 - RNA, 32 nt, Homo Sapiens
gucccggugugguggcuccccaugcaggacgg

SEQ ID NO: 100910 - RNA, 30 nt, Homo Sapiens
cccugaauguacccugccucugcuuucucc

SEQ ID NO: 100911 - RNA, 32 nt, Homo Sapiens
accccagggagagaagcagaaaggcacuucgc

SEQ ID NO: 100912 - RNA, 32 nt, Homo Sapiens
uuuaguggcugucuggggugaauggaaugagc

SEQ ID NO: 100913 - RNA, 32 nt, Homo Sapiens
cacacacaggugguguuacugucccuccuggu

SEQ ID NO: 100914 - RNA, 32 nt, Homo Sapiens
uguuucuccaaguuucauaaccguucaguugc

SEQ ID NO: 100915 - RNA, 29 nt, Homo Sapiens
cuggugcaugguggucggacgaaggaauu

SEQ ID NO: 100916 - RNA, 32 nt, Homo Sapiens
ccgcacacuggccccagggcccugcugccugg

SEQ ID NO: 100917 - RNA, 32 nt, Homo Sapiens
ccaucgccacgcugcagcaggccguggucaug

SEQ ID NO: 100918 - RNA, 32 nt, Homo Sapiens
cacauucuuuugcauguggauauccaguuguc

SEQ ID NO: 100919 - RNA, 32 nt, Homo Sapiens
uguaugccaaaauagguuuucucuuaaugcuu

SEQ ID NO: 100920 - RNA, 32 nt, Homo Sapiens
cucauggacaaagagaccaagcuggugagguu

SEQ ID NO: 100921 - RNA, 32 nt, Homo Sapiens
ccacagccggacuccgccacuccgguagccuc

SEQ ID NO: 100922 - RNA, 29 nt, Homo Sapiens
gacucuaagaagggccauuuucccuuguu

SEQ ID NO: 100923 - RNA, 32 nt, Homo Sapiens
uacugacucauaauucacuugucccaaaagcc

SEQ ID NO: 100924 - RNA, 32 nt, Homo Sapiens
ggcgcugcacugggggcugggugcuggggagg

SEQ ID NO: 100925 - RNA, 32 nt, Homo Sapiens
ccugaaggacuucccccucugccaugauuguu

SEQ ID NO: 100926 - RNA, 32 nt, Homo Sapiens
ugauuucugaggccauaucuuuuacucuuuuu

SEQ ID NO: 100927 - RNA, 32 nt, Homo Sapiens
ccuucuucuaaucuccucccugccugcugaga

SEQ ID NO: 100928 - RNA, 32 nt, Homo Sapiens
uguuuugagguucugagaguaaaauuaugcaa

SEQ ID NO: 100929 - RNA, 32 nt, Homo Sapiens
cucccuguaacuuaaccuuuuuucccuuuuau

SEQ ID NO: 100930 - RNA, 32 nt, Homo Sapiens
uguaguuuugccugaucucacucauugcacuu

SEQ ID NO: 100931 - RNA, 32 nt, Homo Sapiens
ucauggaaccagucagcccucuguggagucau

SEQ ID NO: 100932 - RNA, 32 nt, Homo Sapiens
gcucuuggacauuuuauucuggcuuaaccuug

SEQ ID NO: 100933 - RNA, 32 nt, Homo Sapiens
auugacacacagaaaugugucaauguaaagcc

SEQ ID NO: 100934 - RNA, 32 nt, Homo Sapiens
ccccuugacucuccccucccagcccucgcucu

SEQ ID NO: 100935 - RNA, 32 nt, Homo Sapiens
accugggagaaaucuggcuucuggccaggaag

SEQ ID NO: 100936 - RNA, 32 nt, Homo Sapiens
ccccugcccccuccccgccagggagguuucau

SEQ ID NO: 100937 - RNA, 32 nt, Homo Sapiens
agaauauaacagacauaagaaaaaauuaccua

SEQ ID NO: 100938 - RNA, 32 nt, Homo Sapiens
ccaccgaaccuccggcgguucuccucggccca

SEQ ID NO: 100939 - RNA, 30 nt, Homo Sapiens
uuaagcgggaggcgcgccgggcgucugcac

SEQ ID NO: 100940 - RNA, 32 nt, Homo Sapiens
uuggccuagcuaagccaagcaccugggcccaa

SEQ ID NO: 100941 - RNA, 29 nt, Homo Sapiens
gccagcauauguagaucacauggcaagac

SEQ ID NO: 100942 - RNA, 32 nt, Homo Sapiens
ggugcccuggauaggaggguguguacagggca

SEQ ID NO: 100943 - RNA, 32 nt, Homo Sapiens
gauggaaguaaaauagauuaugcuggauuauc

SEQ ID NO: 100944 - RNA, 32 nt, Homo Sapiens
uaauauaguauuuguuugauaauuagaguugg

SEQ ID NO: 100945 - RNA, 32 nt, Homo Sapiens
cccuccacuccagcccaccggugacucagccc

SEQ ID NO: 100946 - RNA, 32 nt, Homo Sapiens
caucccgcaucacuauuggaccucugagacuu

SEQ ID NO: 100947 - RNA, 28 nt, Homo Sapiens
uaggcugguggcaccaggauucuggccc

SEQ ID NO: 100948 - RNA, 32 nt, Homo Sapiens
cugggggaucuuugggucaauaaaacauucua

SEQ ID NO: 100949 - RNA, 32 nt, Homo Sapiens
guuacauuguauauuucugggacuguuugaau

SEQ ID NO: 100950 - RNA, 32 nt, Homo Sapiens
cuaaauuaguaaaaagccuuugauuuauuuug

SEQ ID NO: 100951 - RNA, 32 nt, Homo Sapiens
gacauuauguaaaagaaagguugcguuuaaua

SEQ ID NO: 100952 - RNA, 32 nt, Homo Sapiens
uaaaauacauauucuuaauauuugagcauuga

SEQ ID NO: 100953 - RNA, 32 nt, Homo Sapiens
uucguguucucuugcccucccugccuaagagc

SEQ ID NO: 100954 - RNA, 32 nt, Homo Sapiens
ccagaagccaucucccccgcugugugucccca

SEQ ID NO: 100955 - RNA, 32 nt, Homo Sapiens
uucuaagcacgcuuaccugauagggugccagc

SEQ ID NO: 100956 - RNA, 32 nt, Homo Sapiens
gggagagaggacuuaagucagauggacucaac

SEQ ID NO: 100957 - RNA, 32 nt, Homo Sapiens
uacauacucuucaguguagagcucuuguuuua

SEQ ID NO: 100958 - RNA, 32 nt, Homo Sapiens
agagucuguagagaugugguccuccuuuugca

SEQ ID NO: 100959 - RNA, 32 nt, Homo Sapiens
auuuucauuucuuaaaauuugcugaauggaaa

SEQ ID NO: 100960 - RNA, 32 nt, Homo Sapiens
uagcggcaagacgaaggacgccagcagcagca

SEQ ID NO: 100961 - RNA, 32 nt, Homo Sapiens
gcugcugugauccaggaccagggcgcaccggc

SEQ ID NO: 100962 - RNA, 32 nt, Homo Sapiens
ccggcgagcgcgcgcgaggccccggcuucugu

SEQ ID NO: 100963 - RNA, 32 nt, Homo Sapiens
ccccuggagcagcagcuuugauaccaugggug

SEQ ID NO: 100964 - RNA, 32 nt, Homo Sapiens
aaucuuaauaaauguuuuuuuaauccugagag

SEQ ID NO: 100965 - RNA, 32 nt, Homo Sapiens
caccccccgcuuuccuuuaucuccagggacuc

SEQ ID NO: 100966 - RNA, 32 nt, Homo Sapiens
gccgucugacuaugucuaacauggagaaacac

SEQ ID NO: 100967 - RNA, 32 nt, Homo Sapiens
gauuuugcugagaugaagcuaauugugcacau

SEQ ID NO: 100968 - RNA, 32 nt, Homo Sapiens
ugcaagucucaaacagcuuagaugggaggcug

SEQ ID NO: 100969 - RNA, 32 nt, Homo Sapiens
ucugcagugucugugcuaucucccaggggccu

SEQ ID NO: 100970 - RNA, 32 nt, Homo Sapiens
gugaaaaaccuuucugggaaaaacagaccugu

SEQ ID NO: 100971 - RNA, 32 nt, Homo Sapiens
ggucucaaaaacaaaauuuaaaaaagauauaa

SEQ ID NO: 100972 - RNA, 32 nt, Homo Sapiens
uaguuugggguaacugagucuugaaugcuuua

SEQ ID NO: 100973 - RNA, 32 nt, Homo Sapiens
cucccuagguugaaaucagggaaaagcuaaua

SEQ ID NO: 100974 - RNA, 32 nt, Homo Sapiens
uugaaugacuguucuuuuucucauuuuuaauu

SEQ ID NO: 100975 - RNA, 32 nt, Homo Sapiens
uuaggaauguccaugcagauacaguuaaacaa

SEQ ID NO: 100976 - RNA, 32 nt, Homo Sapiens
gguucugguaauuuccucuucuugaucugggu

SEQ ID NO: 100977 - RNA, 32 nt, Homo Sapiens
uaggugguugggccucuuccaaucaguugaca

SEQ ID NO: 100978 - RNA, 32 nt, Homo Sapiens
gaaagcagacacugaccucaccaagagggcgg

SEQ ID NO: 100979 - RNA, 32 nt, Homo Sapiens
ggagggccugcugugcccccagccccacccag

SEQ ID NO: 100980 - RNA, 32 nt, Homo Sapiens
cgacuucucgcacgggcuggcgcucuacgagc

SEQ ID NO: 100981 - RNA, 32 nt, Homo Sapiens
acgacugacaacagugaccaguggguccucaa

SEQ ID NO: 100982 - RNA, 32 nt, Homo Sapiens
uuaagauggaaauuucuuuuuaggcuaauuug

SEQ ID NO: 100983 - RNA, 32 nt, Homo Sapiens
aacauucaugauagggcaaggauuuuaaaaca

SEQ ID NO: 100984 - RNA, 30 nt, Homo Sapiens
uccggauaaggaagcgcgggucccgcauga

SEQ ID NO: 100985 - RNA, 32 nt, Homo Sapiens
agaggcccucgggggcccguggagaagacaca

SEQ ID NO: 100986 - RNA, 32 nt, Homo Sapiens
ucugggagccccagcucacacccucccaaugc

SEQ ID NO: 100987 - RNA, 32 nt, Homo Sapiens
caaguagaaccucagcuugcuaacugaagugu

SEQ ID NO: 100988 - RNA, 32 nt, Homo Sapiens
cauauuguccggaguggguccuugacauucag

SEQ ID NO: 100989 - RNA, 32 nt, Homo Sapiens
uuucugaggaggagagcauggcgcgggccucg

SEQ ID NO: 100990 - RNA, 32 nt, Homo Sapiens
agugcacagcuccauccacaccacucagggua

SEQ ID NO: 100991 - RNA, 32 nt, Homo Sapiens
cccuaguucugugcucuucucuagaacaguga

SEQ ID NO: 100992 - RNA, 32 nt, Homo Sapiens
cagcugcucggaagaggagcucagcagcccgg

SEQ ID NO: 100993 - RNA, 32 nt, Homo Sapiens
aggugugagccaccgcgccgggccgguugcug

SEQ ID NO: 100994 - RNA, 29 nt, Homo Sapiens
uugacucagugaaugccuauaaaaauaau

SEQ ID NO: 100995 - RNA, 32 nt, Homo Sapiens
uggauagcuuuucuaauaauuuucaucaauag

SEQ ID NO: 100996 - RNA, 32 nt, Homo Sapiens
guuguuuuuuaaauaaaguagccauauguaac

SEQ ID NO: 100997 - RNA, 32 nt, Homo Sapiens
ccaauuuuucuuuauaaaaauucauaguaauc

SEQ ID NO: 100998 - RNA, 32 nt, Homo Sapiens
cugaggugcuggccggccggcuggcuggcgac

SEQ ID NO: 100999 - RNA, 32 nt, Homo Sapiens
accuauccccuacacauacaugcacauagaca

SEQ ID NO: 101000 - RNA, 32 nt, Homo Sapiens
cagguaggggguaagggugaggccugcugggu

SEQ ID NO: 101001 - RNA, 28 nt, Homo Sapiens
cucugugaagacaaacauuugagcucaa

SEQ ID NO: 101002 - RNA, 32 nt, Homo Sapiens
cuuccacugaauacacuagaaaauacagaaca

SEQ ID NO: 101003 - RNA, 32 nt, Homo Sapiens
auuggguguuuccaugcuccaccauguuaaga

SEQ ID NO: 101004 - RNA, 32 nt, Homo Sapiens
uugaaaguauauaaaaucuuccuguccuguga

SEQ ID NO: 101005 - RNA, 32 nt, Homo Sapiens
auuugaagauagccuuuuuuauguuucucuau

SEQ ID NO: 101006 - RNA, 32 nt, Homo Sapiens
gcaggcggacgccggccgcgggcugcuuucgu

SEQ ID NO: 101007 - RNA, 32 nt, Homo Sapiens
acaauggacaagcaguggauacgugucaaugu

SEQ ID NO: 101008 - RNA, 32 nt, Homo Sapiens
cccaccacagcgauccacggagcugaagcugg

SEQ ID NO: 101009 - RNA, 32 nt, Homo Sapiens
cguggcucccagcagaggccguaaauugagcg

SEQ ID NO: 101010 - RNA, 32 nt, Homo Sapiens
aaaaggggaguagaugguuguagauugacuaa

SEQ ID NO: 101011 - RNA, 32 nt, Homo Sapiens
gaugauaaagcacgcggccccucccaaaggag

SEQ ID NO: 101012 - RNA, 32 nt, Homo Sapiens
cagcauccaacugucagugaugaccugccaaa

SEQ ID NO: 101013 - RNA, 32 nt, Homo Sapiens
aguuuacucaacaauaaaucugcagagauuga

SEQ ID NO: 101014 - RNA, 32 nt, Homo Sapiens
cauaguuagcuuuguaauaaauuuauguuuuc

SEQ ID NO: 101015 - RNA, 32 nt, Homo Sapiens
cauuuuccucuggggaccccaggccccagcuc

SEQ ID NO: 101016 - RNA, 32 nt, Homo Sapiens
agaauuauuucuggacuuugaguugccuauca

SEQ ID NO: 101017 - RNA, 32 nt, Homo Sapiens
gcccagaauuagaguuauuagagcaagagaga

SEQ ID NO: 101018 - RNA, 32 nt, Homo Sapiens
cacuugccauuugcuccuguccuuccaggaaa

SEQ ID NO: 101019 - RNA, 31 nt, Homo Sapiens
uccuugagggcgggaugaacugcuuugugac

SEQ ID NO: 101020 - RNA, 32 nt, Homo Sapiens
cugggcucauugagaauagggaugaagauaug

SEQ ID NO: 101021 - RNA, 32 nt, Homo Sapiens
aucugucauggguugacccauccauccccuca

SEQ ID NO: 101022 - RNA, 32 nt, Homo Sapiens
auaaggacaaggaaaaauauuuuugggggcaa

SEQ ID NO: 101023 - RNA, 32 nt, Homo Sapiens
uuagaaccuguggauuguuucaauugcauaua

SEQ ID NO: 101024 - RNA, 32 nt, Homo Sapiens
gcagcaacauaaguacaaauauuguuccuuuu

SEQ ID NO: 101025 - RNA, 32 nt, Homo Sapiens
gacucacacgggggagaagcccugcgacugcg

SEQ ID NO: 101026 - RNA, 32 nt, Homo Sapiens
ccugcuugccagcaccccgcuaccagggaccc

SEQ ID NO: 101027 - RNA, 32 nt, Homo Sapiens
ccucaggagagcuugcugcacccaggccgccc

SEQ ID NO: 101028 - RNA, 32 nt, Homo Sapiens
cugggcauuuccuuccaacauggccgccacug

SEQ ID NO: 101029 - RNA, 32 nt, Homo Sapiens
aauguguuaaacaaaauuauguuaauaaauau

SEQ ID NO: 101030 - RNA, 32 nt, Homo Sapiens
auuucagauaaaauaauaacuuugaagaauau

SEQ ID NO: 101031 - RNA, 32 nt, Homo Sapiens
cugaauaucuucauuucuaucucuguguuucu

SEQ ID NO: 101032 - RNA, 29 nt, Homo Sapiens
cugucuuggaggcagaggacccuuggugg

SEQ ID NO: 101033 - RNA, 32 nt, Homo Sapiens
aagcagcagagagaggcgcuggagcgggcccu

SEQ ID NO: 101034 - RNA, 32 nt, Homo Sapiens
uuacagcacagugugguggguguuacgggaag

SEQ ID NO: 101035 - RNA, 32 nt, Homo Sapiens
agaacccugcugccuccaugugggcuggggug

SEQ ID NO: 101036 - RNA, 32 nt, Homo Sapiens
gaaguuucagagcuacacaaacacuuuuucug

SEQ ID NO: 101037 - RNA, 32 nt, Homo Sapiens
uuuuguugcccaggcuggucuccagcuucuag

SEQ ID NO: 101038 - RNA, 32 nt, Homo Sapiens
ccugggaugcaaacaaaaacagaucagaggca

SEQ ID NO: 101039 - RNA, 32 nt, Homo Sapiens
gcgcggaggccgggcgcugacggugugugugg

SEQ ID NO: 101040 - RNA, 32 nt, Homo Sapiens
agggcucaaacacaccacacuuaauggcuuuc

SEQ ID NO: 101041 - RNA, 32 nt, Homo Sapiens
cuugucaaaucgucuuaaggugaaaucuagaa

SEQ ID NO: 101042 - RNA, 32 nt, Homo Sapiens
aagugcaaggacuuaacuugcguuugaaaagg

SEQ ID NO: 101043 - RNA, 32 nt, Homo Sapiens
agcccgcgccuccgccgccgcggccgggacua

SEQ ID NO: 101044 - RNA, 32 nt, Homo Sapiens
ucuuggagagcuggggaccagcagucugccug

SEQ ID NO: 101045 - RNA, 32 nt, Homo Sapiens
ucuuguaggccguuguuucagauucuuucugu

SEQ ID NO: 101046 - RNA, 32 nt, Homo Sapiens
cuuauaaauaauauauauaguuggaucacauu

SEQ ID NO: 101047 - RNA, 32 nt, Homo Sapiens
uguccuccaaaaagcuaacauacgguuuugaa

SEQ ID NO: 101048 - RNA, 32 nt, Homo Sapiens
ugguguugucauuguaaacaaacucuugaaga

SEQ ID NO: 101049 - RNA, 32 nt, Homo Sapiens
cugggugccgggguuugggcucggggccaugu

SEQ ID NO: 101050 - RNA, 32 nt, Homo Sapiens
cuuaaccuuucugugucucaguuucuuuuucu

SEQ ID NO: 101051 - RNA, 32 nt, Homo Sapiens
ccuccgugaagcccuccucccagccgcggggc

SEQ ID NO: 101052 - RNA, 32 nt, Homo Sapiens
uuugaauccaacaaagacuacauuuuggaauc

SEQ ID NO: 101053 - RNA, 32 nt, Homo Sapiens
ccgcgguugccucuuggugcugccuuggccgu

SEQ ID NO: 101054 - RNA, 32 nt, Homo Sapiens
acagguuaaaagacccuguccuagaugcccag

SEQ ID NO: 101055 - RNA, 32 nt, Homo Sapiens
ucaagcagauaagguggaauccacaacugacu

SEQ ID NO: 101056 - RNA, 32 nt, Homo Sapiens
auuuuguaacauuugucuaacuuuuuacuugu

SEQ ID NO: 101057 - RNA, 32 nt, Homo Sapiens
acagaaggcgaaggagacccccugccguagcc

SEQ ID NO: 101058 - RNA, 32 nt, Homo Sapiens
ucucauacuguagugcgucuaaugguggcccc

SEQ ID NO: 101059 - RNA, 32 nt, Homo Sapiens
augagaaaguuaguaucugcaauacagagcuu

SEQ ID NO: 101060 - RNA, 32 nt, Homo Sapiens
aauagaaagauuuuaauauccaagaguaguca

SEQ ID NO: 101061 - RNA, 32 nt, Homo Sapiens
ucucccaagaucuuuaacuccuccuggcugca

SEQ ID NO: 101062 - RNA, 32 nt, Homo Sapiens
gcggcgagcgcagcccucgcuccggagcccgg

SEQ ID NO: 101063 - RNA, 32 nt, Homo Sapiens
gauuuccccggguggggcgggcgcgguguagc

SEQ ID NO: 101064 - RNA, 32 nt, Homo Sapiens
cuuaauucugguguaggguguaugugcuaauc

SEQ ID NO: 101065 - RNA, 32 nt, Homo Sapiens
aagacucaagacacaaaguccucagggggcga

SEQ ID NO: 101066 - RNA, 32 nt, Homo Sapiens
ccggccaaccucagugacguggugcagcucgu

SEQ ID NO: 101067 - RNA, 32 nt, Homo Sapiens
gucccagaaauauuuauucuugugacucucac

SEQ ID NO: 101068 - RNA, 32 nt, Homo Sapiens
ugaaugagaaaguuaacacugcaacuaccacc

SEQ ID NO: 101069 - RNA, 32 nt, Homo Sapiens
acuccugaaccaugaggccucgcucugggguc

SEQ ID NO: 101070 - RNA, 32 nt, Homo Sapiens
gucaggggaaacaaaaucuugacccagcugaa

SEQ ID NO: 101071 - RNA, 32 nt, Homo Sapiens
uugcccgcucugcgccuccggcacucugguga

SEQ ID NO: 101072 - RNA, 32 nt, Homo Sapiens
ggacagaggaagcugugugugcaugugaaggg

SEQ ID NO: 101073 - RNA, 32 nt, Homo Sapiens
gcccagcucgcccagcguccgccgcgccucgc

SEQ ID NO: 101074 - RNA, 32 nt, Homo Sapiens
gaaaggagauaaacguuucaguaauugucaga

SEQ ID NO: 101075 - RNA, 32 nt, Homo Sapiens
aaagggagggagaaaggcuuuuuuaggugggg

SEQ ID NO: 101076 - RNA, 32 nt, Homo Sapiens
aguccuagcauuauaggaucuuguaauagaaa

SEQ ID NO: 101077 - RNA, 32 nt, Homo Sapiens
guaacaucuauuuccauugauccuagguucuu

SEQ ID NO: 101078 - RNA, 32 nt, Homo Sapiens
ccuuuuguuauaagaaagaagagagagaacuu

SEQ ID NO: 101079 - RNA, 32 nt, Homo Sapiens
aggccaaaggucggcagccagcgaggcuauga

SEQ ID NO: 101080 - RNA, 32 nt, Homo Sapiens
caaugacuuucaaagcacuguguauaaaacau

SEQ ID NO: 101081 - RNA, 32 nt, Homo Sapiens
ucucuauauguauguguucccaguugugggag

SEQ ID NO: 101082 - RNA, 32 nt, Homo Sapiens
ucuuuuuauauagcuauaguauauuuaaacaa

SEQ ID NO: 101083 - RNA, 32 nt, Homo Sapiens
uauauacaaaaauuaauguuacuguguuacuu

SEQ ID NO: 101084 - RNA, 32 nt, Homo Sapiens
gcgccagccccuuucgcgugcugcugagacuc

SEQ ID NO: 101085 - RNA, 32 nt, Homo Sapiens
cuacgaucuggugauaauuuugugugcacagc

SEQ ID NO: 101086 - RNA, 32 nt, Homo Sapiens
uuguguauaauaaaccuuuaauuuugguguug

SEQ ID NO: 101087 - RNA, 32 nt, Homo Sapiens
gugcuagaacagagccgccugcccaggacccu

SEQ ID NO: 101088 - RNA, 32 nt, Homo Sapiens
augaucaaucaucauauuaaaucauaaugagc

SEQ ID NO: 101089 - RNA, 29 nt, Homo Sapiens
auuaugaugaagauugaggaugguaguuu

SEQ ID NO: 101090 - RNA, 32 nt, Homo Sapiens
cgacgcguccacuugcaacacccgccucacug

SEQ ID NO: 101091 - RNA, 32 nt, Homo Sapiens
auuuggcugcaccucuuuaucaugccuguauu

SEQ ID NO: 101092 - RNA, 32 nt, Homo Sapiens
gaacaugugcauacaaagaauuuuauacacag

SEQ ID NO: 101093 - RNA, 32 nt, Homo Sapiens
agggugucaccaucucgguguccccacagcac

SEQ ID NO: 101094 - RNA, 32 nt, Homo Sapiens
cugaaacccacccacccgcugugcugaccaug

SEQ ID NO: 101095 - RNA, 32 nt, Homo Sapiens
auccugguaaacaauaaagaagauucagacac

SEQ ID NO: 101096 - RNA, 32 nt, Homo Sapiens
acggagacccucacgcgccgcggccgaucccc

SEQ ID NO: 101097 - RNA, 32 nt, Homo Sapiens
uaaaaucaagacaggauacaagugggagcaca

SEQ ID NO: 101098 - RNA, 31 nt, Homo Sapiens
uucugggcgggcccaguggaguuuggggagg

SEQ ID NO: 101099 - RNA, 32 nt, Homo Sapiens
agggucauucuauuuggccuuuugaauuagua

SEQ ID NO: 101100 - RNA, 32 nt, Homo Sapiens
ucccugagcggugggcgggccucgaccgcagg

SEQ ID NO: 101101 - RNA, 32 nt, Homo Sapiens
caggcucuggugucuccuccucuucuuauaaa

SEQ ID NO: 101102 - RNA, 32 nt, Homo Sapiens
agcugcggcggcgcgucgggaagugcuugggg

SEQ ID NO: 101103 - RNA, 32 nt, Homo Sapiens
cccagcgugguggucagcacggaagcuccacc

SEQ ID NO: 101104 - RNA, 32 nt, Homo Sapiens
augcaaaauggcucccagcauuuugggaggcu

SEQ ID NO: 101105 - RNA, 32 nt, Homo Sapiens
uacagcuuguccuuccugaucaccuucacuuu

SEQ ID NO: 101106 - RNA, 28 nt, Homo Sapiens
gucgaugugucuaccaggcagacgaagc

SEQ ID NO: 101107 - RNA, 32 nt, Homo Sapiens
auacuugauuguguuucuuaaguuucauuuuu

SEQ ID NO: 101108 - RNA, 31 nt, Homo Sapiens
agacagccuaacagccugccccgcaggaagg

SEQ ID NO: 101109 - RNA, 32 nt, Homo Sapiens
uguacuuuuuaaugaacacgugucucacacac

SEQ ID NO: 101110 - RNA, 32 nt, Homo Sapiens
gagggcagcgccgcccaccucccgcguaucug

SEQ ID NO: 101111 - RNA, 32 nt, Homo Sapiens
acccuguaacccaggaagacaagcucgugguu

SEQ ID NO: 101112 - RNA, 32 nt, Homo Sapiens
cccucagcccucuggaguguacgaguuuugga

SEQ ID NO: 101113 - RNA, 30 nt, Homo Sapiens
cacugaaauuuauaauacacuuauccaugu

SEQ ID NO: 101114 - RNA, 32 nt, Homo Sapiens
cauuacauugaaaaguaaauguuuuauuaguu

SEQ ID NO: 101115 - RNA, 32 nt, Homo Sapiens
caagaaaaacaaacaaacaguggccuccuuug

SEQ ID NO: 101116 - RNA, 32 nt, Homo Sapiens
acggcgacgacgggggaauguggcgcuggauc

SEQ ID NO: 101117 - RNA, 32 nt, Homo Sapiens
uuaauuuugugauuuguucuuccauaugacau

SEQ ID NO: 101118 - RNA, 32 nt, Homo Sapiens
uaaauacucuugagacauuuugaaagcagaag

SEQ ID NO: 101119 - RNA, 32 nt, Homo Sapiens
ugccuuuuucuuuuccccacaacuucacacuu

SEQ ID NO: 101120 - RNA, 32 nt, Homo Sapiens
aagccgcggacgagaagaaaagacaggaggcc

SEQ ID NO: 101121 - RNA, 32 nt, Homo Sapiens
cccaggagcuucuggccugaccaucugcagcc

SEQ ID NO: 101122 - RNA, 32 nt, Homo Sapiens
gaacauuuucuuugguuaaaccaaaaacacau

SEQ ID NO: 101123 - RNA, 32 nt, Homo Sapiens
ucacccauuuuucuucuucagaaggccuuucc

SEQ ID NO: 101124 - RNA, 32 nt, Homo Sapiens
ugccacagaacaaagacaagaaguauacacua

SEQ ID NO: 101125 - RNA, 32 nt, Homo Sapiens
aaggggaguuaauuaaguauuaacucacacaa

SEQ ID NO: 101126 - RNA, 32 nt, Homo Sapiens
cccccgucacauccaggucuccaggggaaauc

SEQ ID NO: 101127 - RNA, 32 nt, Homo Sapiens
auaagcgucugugcguggaguccccaauaaac

SEQ ID NO: 101128 - RNA, 32 nt, Homo Sapiens
gugcacugacacccccaccuucccauccccug

SEQ ID NO: 101129 - RNA, 32 nt, Homo Sapiens
cuuccucgguacccuugguacccuagcuccca

SEQ ID NO: 101130 - RNA, 32 nt, Homo Sapiens
caggcuuuaagugaaugcuucaaaauaaaagg

SEQ ID NO: 101131 - RNA, 32 nt, Homo Sapiens
ggaggaaaauagacuugaguagucuuuggucc

SEQ ID NO: 101132 - RNA, 32 nt, Homo Sapiens
gggacucaaacuuuuccaguuccccaucuuua

SEQ ID NO: 101133 - RNA, 32 nt, Homo Sapiens
uguuuuccaucccacauaaauacaguauuccc

SEQ ID NO: 101134 - RNA, 32 nt, Homo Sapiens
cuuggaagaugcagacagcugcaccgaggggc

SEQ ID NO: 101135 - RNA, 32 nt, Homo Sapiens
ucuccuggcaggguagacccaggccucuaacc

SEQ ID NO: 101136 - RNA, 32 nt, Homo Sapiens
auuucaaaugauuuucaaauuugaugaaauca

SEQ ID NO: 101137 - RNA, 32 nt, Homo Sapiens
cugaggaaguggggcaaggaaugccgcuaguc

SEQ ID NO: 101138 - RNA, 32 nt, Homo Sapiens
aguugucacucacuccucucucccucccaagg

SEQ ID NO: 101139 - RNA, 32 nt, Homo Sapiens
ugauugucuuuuuauuaaaaguaaauuuccuc

SEQ ID NO: 101140 - RNA, 32 nt, Homo Sapiens
uuguaggugaugaaauaccggcugcuuagacg

SEQ ID NO: 101141 - RNA, 32 nt, Homo Sapiens
guaguggugguacuacuacuacugguauuuag

SEQ ID NO: 101142 - RNA, 32 nt, Homo Sapiens
ggaugcgggagugggguauuuucuaacuaaug

SEQ ID NO: 101143 - RNA, 32 nt, Homo Sapiens
caacggauauauauuuaucaauguagacuucu

SEQ ID NO: 101144 - RNA, 32 nt, Homo Sapiens
ggccuuucucucagccucuggaagccaccugc

SEQ ID NO: 101145 - RNA, 32 nt, Homo Sapiens
ccaaaacuuccaccucccucccuggccaccuc

SEQ ID NO: 101146 - RNA, 32 nt, Homo Sapiens
cagcgcgcucgggagaggcugcaccgccgcgc

SEQ ID NO: 101147 - RNA, 32 nt, Homo Sapiens
gcguggcagggcccucucugugccucuccucc

SEQ ID NO: 101148 - RNA, 32 nt, Homo Sapiens
uggaacccacgccuccugaggacacagccauc

SEQ ID NO: 101149 - RNA, 32 nt, Homo Sapiens
ugaauauccuugccauuuauguuuccugcugu

SEQ ID NO: 101150 - RNA, 32 nt, Homo Sapiens
cccccagccuugaggugcccugcccggcgggg

SEQ ID NO: 101151 - RNA, 32 nt, Homo Sapiens
gaggcuccagacugggucuucuccguggcucu

SEQ ID NO: 101152 - RNA, 32 nt, Homo Sapiens
guauuuagacauuuugagcccaguauuuuuca

SEQ ID NO: 101153 - RNA, 32 nt, Homo Sapiens
aacauagugucugcugcugccucccuggggac

SEQ ID NO: 101154 - RNA, 32 nt, Homo Sapiens
ucauuuaaaaacaaucauuuuggagggcugag

SEQ ID NO: 101155 - RNA, 32 nt, Homo Sapiens
ggcaucuggagggcuuucguggcugccagggc

SEQ ID NO: 101156 - RNA, 32 nt, Homo Sapiens
cugcccugccaggcugcccuuguccaugugag

SEQ ID NO: 101157 - RNA, 32 nt, Homo Sapiens
uguggccuacaguguuauguuugcuguaagaa

SEQ ID NO: 101158 - RNA, 32 nt, Homo Sapiens
uccccugguuuuaucaucucuacucuguuuca

SEQ ID NO: 101159 - RNA, 32 nt, Homo Sapiens
uuaucucagaaauaaaaagagaugcagcagcu

SEQ ID NO: 101160 - RNA, 32 nt, Homo Sapiens
uccugcuuugugaagccuggaaaguaugugug

SEQ ID NO: 101161 - RNA, 32 nt, Homo Sapiens
aaaagugggaaccagugugcuuugaaaccaaa

SEQ ID NO: 101162 - RNA, 32 nt, Homo Sapiens
gguuuucaaugaacuuuuuuuuuuuuuuuuuu

SEQ ID NO: 101163 - RNA, 32 nt, Homo Sapiens
ucaccauugagaccgugaagauacuuuguauu

SEQ ID NO: 101164 - RNA, 32 nt, Homo Sapiens
aagguacaucagcaauuaauucuagagcaacu

SEQ ID NO: 101165 - RNA, 32 nt, Homo Sapiens
gaacaggcccggcaccaccucugcgcacaacc

SEQ ID NO: 101166 - RNA, 30 nt, Homo Sapiens
uaagccacuaucccuggccuaaccuggcua

SEQ ID NO: 101167 - RNA, 32 nt, Homo Sapiens
gggacugccuucuccuuccugcuucauccggc

SEQ ID NO: 101168 - RNA, 32 nt, Homo Sapiens
ggaaguggggguggggggaggggaucggggcc

SEQ ID NO: 101169 - RNA, 32 nt, Homo Sapiens
ggcaaccuccaaucaaauggccuugagcaagu

SEQ ID NO: 101170 - RNA, 32 nt, Homo Sapiens
guuguaucuggaauugguggguucuuggucuc

SEQ ID NO: 101171 - RNA, 32 nt, Homo Sapiens
uaugcugucuggacgcacacacgugcagauau

SEQ ID NO: 101172 - RNA, 32 nt, Homo Sapiens
agaugaggaggcugaggccuagugcuccuagc

SEQ ID NO: 101173 - RNA, 32 nt, Homo Sapiens
uagaacacauaaaaaugcuuaauaaaugcuug

SEQ ID NO: 101174 - RNA, 32 nt, Homo Sapiens
gcgcgccauggggcucccggcgcugcuggcca

SEQ ID NO: 101175 - RNA, 30 nt, Homo Sapiens
cgcuagcgcgcgccgggcaugguccccucu

SEQ ID NO: 101176 - RNA, 32 nt, Homo Sapiens
gcacguggauauuagaguuugcuggguuuugu

SEQ ID NO: 101177 - RNA, 32 nt, Homo Sapiens
uauuuuggaggaguguaugugcauguguacac

SEQ ID NO: 101178 - RNA, 32 nt, Homo Sapiens
uuuucgauuaguccucauauauuuaucuacua

SEQ ID NO: 101179 - RNA, 32 nt, Homo Sapiens
agccagccacuacuguuucauuguguucuacu

SEQ ID NO: 101180 - RNA, 32 nt, Homo Sapiens
gcuacggaauaauucuaagaauuagauguuuc

SEQ ID NO: 101181 - RNA, 32 nt, Homo Sapiens
cacacacgcgcgcgcgcgcacacacacucuuc

SEQ ID NO: 101182 - RNA, 32 nt, Homo Sapiens
ugggcuacuccagccgcuucagacugccgggc

SEQ ID NO: 101183 - RNA, 32 nt, Homo Sapiens
uucaucccucgcagcagucuccaggcgagaga

SEQ ID NO: 101184 - RNA, 32 nt, Homo Sapiens
ggagguuuggacgggugcugugccgcaugucg

SEQ ID NO: 101185 - RNA, 32 nt, Homo Sapiens
cgcugccgagaccccucgggggcugcacaccc

SEQ ID NO: 101186 - RNA, 32 nt, Homo Sapiens
ugauggcugucaacaaagugccacgucucuau

SEQ ID NO: 101187 - RNA, 32 nt, Homo Sapiens
gaucaagacauuuuuuaauguuaggcagaaca

SEQ ID NO: 101188 - RNA, 32 nt, Homo Sapiens
gagggugggggcucaugguuucccucuacuuu

SEQ ID NO: 101189 - RNA, 32 nt, Homo Sapiens
acaccuguacuauugagaaagcugauggccuu

SEQ ID NO: 101190 - RNA, 32 nt, Homo Sapiens
gagcuccaaaccagcaucacaccaacucugac

SEQ ID NO: 101191 - RNA, 32 nt, Homo Sapiens
gaguaaagauaaagaguaggagaaucaaagcu

SEQ ID NO: 101192 - RNA, 28 nt, Homo Sapiens
caucaggggcggcuucagguguagaagc

SEQ ID NO: 101193 - RNA, 32 nt, Homo Sapiens
ggaagcaaagauugugcuaaccaggccaugag

SEQ ID NO: 101194 - RNA, 32 nt, Homo Sapiens
gaggggcugaugcccaccuggagcucucugcu

SEQ ID NO: 101195 - RNA, 32 nt, Homo Sapiens
cuguggcagagaaaguccuccacucagaggca

SEQ ID NO: 101196 - RNA, 32 nt, Homo Sapiens
ugcgcgagugcccggugugugcgcgccggcga

SEQ ID NO: 101197 - RNA, 32 nt, Homo Sapiens
uggaggcaucugugaacagccugugaaggaaa

SEQ ID NO: 101198 - RNA, 32 nt, Homo Sapiens
uccuaccuuuuagucuacuuugaaaggugaaa

SEQ ID NO: 101199 - RNA, 32 nt, Homo Sapiens
auuguguugguuguuacggagccuaaccuagc

SEQ ID NO: 101200 - RNA, 32 nt, Homo Sapiens
gggacagagaauaaaauuuuuguuaaaauaug

SEQ ID NO: 101201 - RNA, 32 nt, Homo Sapiens
ggcucgggcggccgggaagcgacgggauggcu

SEQ ID NO: 101202 - RNA, 32 nt, Homo Sapiens
ucagcgcgguccagcccuccgccugccgggcg

SEQ ID NO: 101203 - RNA, 32 nt, Homo Sapiens
gaaaagugaagauagugaugguguaagagcua

SEQ ID NO: 101204 - RNA, 32 nt, Homo Sapiens
uagcaaauugauucuuuuuuaaaugcauagga

SEQ ID NO: 101205 - RNA, 32 nt, Homo Sapiens
ggcaccugaccaggugacgugggcguggucac

SEQ ID NO: 101206 - RNA, 32 nt, Homo Sapiens
uaggaaacagagcccuuaaagggcuugggaau

SEQ ID NO: 101207 - RNA, 32 nt, Homo Sapiens
aucgccagggcgggcggcagggcgcggccucu

SEQ ID NO: 101208 - RNA, 32 nt, Homo Sapiens
auuuuuuaacucccaagcaguagcaggacgau

SEQ ID NO: 101209 - RNA, 32 nt, Homo Sapiens
agauggaaugcuguguuaaauaaaccucaaaa

SEQ ID NO: 101210 - RNA, 32 nt, Homo Sapiens
aguucuuccacaguucagcaaacaagugcuag

SEQ ID NO: 101211 - RNA, 32 nt, Homo Sapiens
cauuuauaacucauaauuauuuagacauaaug

SEQ ID NO: 101212 - RNA, 32 nt, Homo Sapiens
cucucagaguguagugccagguccuggugcca

SEQ ID NO: 101213 - RNA, 32 nt, Homo Sapiens
gcaggacccguccaaagaugccccggggaggg

SEQ ID NO: 101214 - RNA, 32 nt, Homo Sapiens
auggauuuaaacauguagauucaacuagaauc

SEQ ID NO: 101215 - RNA, 32 nt, Homo Sapiens
uacaggugugagccaccacaccugacccauag

SEQ ID NO: 101216 - RNA, 32 nt, Homo Sapiens
cuucagaucccggcugagcucugcuuaaaucc

SEQ ID NO: 101217 - RNA, 32 nt, Homo Sapiens
uugccuuuaagugaucuuuugugauuuuacuu

SEQ ID NO: 101218 - RNA, 32 nt, Homo Sapiens
uucucuugaaacaagcacuuugaaauuugaau

SEQ ID NO: 101219 - RNA, 32 nt, Homo Sapiens
aauguuuaauuguuguaaauauuacaguuuuu

SEQ ID NO: 101220 - RNA, 32 nt, Homo Sapiens
gaaagaaaaaauauugucauauuugacuacaa

SEQ ID NO: 101221 - RNA, 31 nt, Homo Sapiens
cauagaaugaguuagggaggaguccauccuc

SEQ ID NO: 101222 - RNA, 32 nt, Homo Sapiens
ccuuuaaggcaucagucuuacaucuuggcagu

SEQ ID NO: 101223 - RNA, 30 nt, Homo Sapiens
auugugacugugccgccgaaacgccggccg

SEQ ID NO: 101224 - RNA, 32 nt, Homo Sapiens
cucggguaguccaguggccuagcugguaccac

SEQ ID NO: 101225 - RNA, 32 nt, Homo Sapiens
ccccaaggagcgggagggucugucccaaugga

SEQ ID NO: 101226 - RNA, 32 nt, Homo Sapiens
ucauguuuauuuuuuauuuuuacaauaauagu

SEQ ID NO: 101227 - RNA, 32 nt, Homo Sapiens
uccccugcucaugggugcuccuccucagggcc

SEQ ID NO: 101228 - RNA, 32 nt, Homo Sapiens
uuuuaaauguuuauguuggaagcaauuguagu

SEQ ID NO: 101229 - RNA, 32 nt, Homo Sapiens
guggccuggggccccagggcgcccgggcucug

SEQ ID NO: 101230 - RNA, 32 nt, Homo Sapiens
guuaaaagagguuuuucuuaaauaauaaagau

SEQ ID NO: 101231 - RNA, 32 nt, Homo Sapiens
ugggcgugggcucggcggggccccacucagag

SEQ ID NO: 101232 - RNA, 32 nt, Homo Sapiens
cucucguccuccuggguagccugggaggaaug

SEQ ID NO: 101233 - RNA, 32 nt, Homo Sapiens
uaagcuugaaauuuaucauuuuaucaugaaaa

SEQ ID NO: 101234 - RNA, 32 nt, Homo Sapiens
gcaacagauugugaugggaaaauguuuucugu

SEQ ID NO: 101235 - RNA, 32 nt, Homo Sapiens
caguggcuuaugccuguaaucccagcacuugg

SEQ ID NO: 101236 - RNA, 32 nt, Homo Sapiens
ccaacgcccagugcggccgcccggggagccgc

SEQ ID NO: 101237 - RNA, 32 nt, Homo Sapiens
caauguaaacaaaauaaaaauggauaauugcu

SEQ ID NO: 101238 - RNA, 32 nt, Homo Sapiens
auggaaagugauuaaguaaugccaacuaugca

SEQ ID NO: 101239 - RNA, 32 nt, Homo Sapiens
agcccuuagagaccgagucccggcggcgacgg

SEQ ID NO: 101240 - RNA, 32 nt, Homo Sapiens
auuaugaaucaucaagaauucaucaugaucaa

SEQ ID NO: 101241 - RNA, 32 nt, Homo Sapiens
cacagaaaucuggauuuacaguuucuuaugaa

SEQ ID NO: 101242 - RNA, 32 nt, Homo Sapiens
gcgaauucaugcauucaacaaacacuuaugag

SEQ ID NO: 101243 - RNA, 32 nt, Homo Sapiens
cucuugguuugugcuuacauguauggaugugu

SEQ ID NO: 101244 - RNA, 32 nt, Homo Sapiens
auggcucaaaauugaaaaguguagccagugau

SEQ ID NO: 101245 - RNA, 32 nt, Homo Sapiens
aaaagauuuaacaaauacauucauaaggaaau

SEQ ID NO: 101246 - RNA, 32 nt, Homo Sapiens
uuaauccugugcugucgagggauggauauaug

SEQ ID NO: 101247 - RNA, 32 nt, Homo Sapiens
caguuucgccccagccacccccacugccuggg

SEQ ID NO: 101248 - RNA, 32 nt, Homo Sapiens
gcaaccugucgcucagguuccuccucucccgg

SEQ ID NO: 101249 - RNA, 32 nt, Homo Sapiens
agggcagcuccuuagcucaagagcaaguggcc

SEQ ID NO: 101250 - RNA, 32 nt, Homo Sapiens
uuuuaaaaacaaaauaaaacaauaaagacugc

SEQ ID NO: 101251 - RNA, 32 nt, Homo Sapiens
gauuauucagaagcauuuuaauuuagaaagga

SEQ ID NO: 101252 - RNA, 32 nt, Homo Sapiens
cuauaaaauacaaacaacuuugaaggcaacag

SEQ ID NO: 101253 - RNA, 32 nt, Homo Sapiens
uccucuuugguuucuucagagcuuucccaaga

SEQ ID NO: 101254 - RNA, 32 nt, Homo Sapiens
agaagucacauaucaguccuggccaugauaac

SEQ ID NO: 101255 - RNA, 32 nt, Homo Sapiens
aaagaagguuuucauuuugaugaugagaggca

SEQ ID NO: 101256 - RNA, 32 nt, Homo Sapiens
cucuccacuccagaagccgccugauggggagg

SEQ ID NO: 101257 - RNA, 32 nt, Homo Sapiens
ggaugcugcccuugggccccagccuccugcuc

SEQ ID NO: 101258 - RNA, 32 nt, Homo Sapiens
ggauguggaaacugaggcugacuuaaacuucc

SEQ ID NO: 101259 - RNA, 32 nt, Homo Sapiens
aaagguggcucuggcagcggcggcuccagcuc

SEQ ID NO: 101260 - RNA, 32 nt, Homo Sapiens
ggggagugcgcggcggccgcagcugccacaaa

SEQ ID NO: 101261 - RNA, 32 nt, Homo Sapiens
gcgggggcccggugcuggccgagagucccugu

SEQ ID NO: 101262 - RNA, 32 nt, Homo Sapiens
gaguuucguuuucaaaauuguuacaaauugua

SEQ ID NO: 101263 - RNA, 32 nt, Homo Sapiens
ggcuucgcucaccacccgggcuuaccagaugg

SEQ ID NO: 101264 - RNA, 32 nt, Homo Sapiens
augucauuuguccucauucucauuccagcaug

SEQ ID NO: 101265 - RNA, 30 nt, Homo Sapiens
cugcuaugagucucaagagccuauuuugua

SEQ ID NO: 101266 - RNA, 32 nt, Homo Sapiens
uggcuguggggauagaguccugaggaaugugg

SEQ ID NO: 101267 - RNA, 32 nt, Homo Sapiens
ucauuuuucuaaaaacuauaacauucuguugg

SEQ ID NO: 101268 - RNA, 32 nt, Homo Sapiens
gaauuacaaugcauauaugucuauuuauucaa

SEQ ID NO: 101269 - RNA, 32 nt, Homo Sapiens
uaugaccagaaucauggaauuugcuagaacug

SEQ ID NO: 101270 - RNA, 32 nt, Homo Sapiens
aauuguagcaugccaguaauuuuuaccaacau

SEQ ID NO: 101271 - RNA, 32 nt, Homo Sapiens
gcucccugcgggagcaggcugggcucagcucc

SEQ ID NO: 101272 - RNA, 32 nt, Homo Sapiens
gccccgcggucgcucaggggccccggguuuga

SEQ ID NO: 101273 - RNA, 32 nt, Homo Sapiens
cauagaaauguuucuguuucauaucauuuggg

SEQ ID NO: 101274 - RNA, 32 nt, Homo Sapiens
guuuuggcggcggcgccggcgggcuaggcugc

SEQ ID NO: 101275 - RNA, 32 nt, Homo Sapiens
caugcaagaucaugaagaguguaaccaaagua

SEQ ID NO: 101276 - RNA, 32 nt, Homo Sapiens
ugagcggcgcccuccuccggcccgcgagcguc

SEQ ID NO: 101277 - RNA, 32 nt, Homo Sapiens
uuuuuauauaauuuauaaagaaagauuaaagc

SEQ ID NO: 101278 - RNA, 32 nt, Homo Sapiens
cagacauuuuaaaaauaaguuauuuuuauaug

SEQ ID NO: 101279 - RNA, 32 nt, Homo Sapiens
caccccggcuccugggccccagcagcaucucu

SEQ ID NO: 101280 - RNA, 32 nt, Homo Sapiens
gcuaaacuauaaaugcaguuguguccaguugg

SEQ ID NO: 101281 - RNA, 32 nt, Homo Sapiens
caaaagguucagaacguagucucuacucuucc

SEQ ID NO: 101282 - RNA, 32 nt, Homo Sapiens
uuucuuuugugaagccucuucagccuugauca

SEQ ID NO: 101283 - RNA, 32 nt, Homo Sapiens
gggaggaucauuugagcccaggaguucgagac

SEQ ID NO: 101284 - RNA, 32 nt, Homo Sapiens
agcucacaccuguccuucccucauggaagcua

SEQ ID NO: 101285 - RNA, 32 nt, Homo Sapiens
acuauaaaaaagucaaaagaauaauauuacca

SEQ ID NO: 101286 - RNA, 32 nt, Homo Sapiens
ccuguggguggucacgggagggugugagucag

SEQ ID NO: 101287 - RNA, 32 nt, Homo Sapiens
uccacaccagaagcuuccuagcugcuggucug

SEQ ID NO: 101288 - RNA, 32 nt, Homo Sapiens
uguguuacauggucuguaaauauuuguauuua

SEQ ID NO: 101289 - RNA, 32 nt, Homo Sapiens
caguuggaaggcuguagaaguaauguuuaaau

SEQ ID NO: 101290 - RNA, 32 nt, Homo Sapiens
ccggcugagggcgggggucuccacgguggucc

SEQ ID NO: 101291 - RNA, 32 nt, Homo Sapiens
gugaugaaggccuggaggagcaggaugaguag

SEQ ID NO: 101292 - RNA, 32 nt, Homo Sapiens
auauguauaauauauauuccaauguauuccaa

SEQ ID NO: 101293 - RNA, 32 nt, Homo Sapiens
ccaauuuucugcagccucuuuuugccugagca

SEQ ID NO: 101294 - RNA, 32 nt, Homo Sapiens
uguguuuuaaaauaaacuuuuggaaacaugaa

SEQ ID NO: 101295 - RNA, 32 nt, Homo Sapiens
cuggugguugaaccuggaggugccaaaaaagc

SEQ ID NO: 101296 - RNA, 32 nt, Homo Sapiens
ccaccauuuaaccaaaaaaggaaguggaaugg

SEQ ID NO: 101297 - RNA, 32 nt, Homo Sapiens
aagcgaccugucacggacuccacuuuuaauuu

SEQ ID NO: 101298 - RNA, 32 nt, Homo Sapiens
acauuaauucuauagaauuaaugaucagagca

SEQ ID NO: 101299 - RNA, 32 nt, Homo Sapiens
auugagaaaaauauauacuaaacaaaaaaaaa

SEQ ID NO: 101300 - RNA, 32 nt, Homo Sapiens
uguuaaaaacaguuaugagauuccuuaugaag

SEQ ID NO: 101301 - RNA, 32 nt, Homo Sapiens
cuuccccccgguuccgggucuccacgcccucc

SEQ ID NO: 101302 - RNA, 32 nt, Homo Sapiens
auauccugucuuuucuuuuuuauaagcaacca

SEQ ID NO: 101303 - RNA, 32 nt, Homo Sapiens
uuucuguaagggcuauaacauacaugucaaua

SEQ ID NO: 101304 - RNA, 32 nt, Homo Sapiens
gaggcaacggagcuaccagccgcuccucucug

SEQ ID NO: 101305 - RNA, 32 nt, Homo Sapiens
uaagaaaguuucacccaauaaaauauuuuuga

SEQ ID NO: 101306 - RNA, 32 nt, Homo Sapiens
cuugauucucuuaauucugugacugaacucuc

SEQ ID NO: 101307 - RNA, 32 nt, Homo Sapiens
aaucaaggaucuuuggaacuauuugaaaucag

SEQ ID NO: 101308 - RNA, 32 nt, Homo Sapiens
uuacuuuaaaaagauuuauuuagaaucgugaa

SEQ ID NO: 101309 - RNA, 32 nt, Homo Sapiens
ggacugcaaccuggacagagccgccucccucu

SEQ ID NO: 101310 - RNA, 32 nt, Homo Sapiens
ucugcacaaggugaaauaagagcucaagggca

SEQ ID NO: 101311 - RNA, 32 nt, Homo Sapiens
ugcggagggaggagggcgggagcgggcggcgc

SEQ ID NO: 101312 - RNA, 32 nt, Homo Sapiens
ccaggcugaagaauuugacaaaagagauagca

SEQ ID NO: 101313 - RNA, 32 nt, Homo Sapiens
gagcaguugcagggcuggccugggcuguggga

SEQ ID NO: 101314 - RNA, 32 nt, Homo Sapiens
gacagaguuucgcucuuguugcugaggcugga

SEQ ID NO: 101315 - RNA, 32 nt, Homo Sapiens
cgggaccggccgcgucuccauggcgacgcggg

SEQ ID NO: 101316 - RNA, 32 nt, Homo Sapiens
gagguuggugccuuccugggaacuagccacca

SEQ ID NO: 101317 - RNA, 32 nt, Homo Sapiens
gccagggcagagggcugcccagggccaggcuc

SEQ ID NO: 101318 - RNA, 32 nt, Homo Sapiens
ccaggccccguccgcccgagccgcgcugagag

SEQ ID NO: 101319 - RNA, 32 nt, Homo Sapiens
ugcuucgaaucgccaggauccccugagggucu

SEQ ID NO: 101320 - RNA, 32 nt, Homo Sapiens
ucuuucuuguuugucagcaucugaccaucugu

SEQ ID NO: 101321 - RNA, 32 nt, Homo Sapiens
cucagccggcucuggagugcgggcggaggcga

SEQ ID NO: 101322 - RNA, 32 nt, Homo Sapiens
gagguccgucccccucagacgucucccccaac

SEQ ID NO: 101323 - RNA, 32 nt, Homo Sapiens
caaucugauauuaaaguggaaucaggagagcc

SEQ ID NO: 101324 - RNA, 32 nt, Homo Sapiens
uggaaaugcaggaggaaagcugugcucugugg

SEQ ID NO: 101325 - RNA, 32 nt, Homo Sapiens
cuccaggcucugcucugcagcacacccguggg

SEQ ID NO: 101326 - RNA, 32 nt, Homo Sapiens
gacaugccacgaaagguuuuaacugguauggu

SEQ ID NO: 101327 - RNA, 32 nt, Homo Sapiens
cuguugaaucauuacaucaaggagcugccccu

SEQ ID NO: 101328 - RNA, 32 nt, Homo Sapiens
cauuugcucucuccacuacucaucucuggaau

SEQ ID NO: 101329 - RNA, 32 nt, Homo Sapiens
cccagaacuuggaaaaguuguagggauuucua

SEQ ID NO: 101330 - RNA, 32 nt, Homo Sapiens
gugauccuuccacuucagccucccaaguagcu

SEQ ID NO: 101331 - RNA, 32 nt, Homo Sapiens
cugucagcauauaaaaugugcuugucauuugu

SEQ ID NO: 101332 - RNA, 32 nt, Homo Sapiens
uaaagauggcugacuuugcucuuucuugacuc

SEQ ID NO: 101333 - RNA, 32 nt, Homo Sapiens
cuucagggaagaugggaggcgaggagaagccg

SEQ ID NO: 101334 - RNA, 32 nt, Homo Sapiens
uauaguuuuaauuuuuucagcuuuuaagauac

SEQ ID NO: 101335 - RNA, 32 nt, Homo Sapiens
gcuguuggguuuuuuucuucuuaaggaaaacg

SEQ ID NO: 101336 - RNA, 32 nt, Homo Sapiens
uguuguggagggcuaaguugguucugugacuc

SEQ ID NO: 101337 - RNA, 32 nt, Homo Sapiens
agaugugccugcaccuugaucuuggacuugcc

SEQ ID NO: 101338 - RNA, 30 nt, Homo Sapiens
uccaggacggagcuugaugaagccagaccc

SEQ ID NO: 101339 - RNA, 32 nt, Homo Sapiens
ucaccgugagacuggggaucccgcacaucugg

SEQ ID NO: 101340 - RNA, 32 nt, Homo Sapiens
ucugucaucauucuuaguucaacagaaagcca

SEQ ID NO: 101341 - RNA, 32 nt, Homo Sapiens
cuugugaugggagagguggugcgggcuccgaa

SEQ ID NO: 101342 - RNA, 32 nt, Homo Sapiens
guccaggugugguggcucacgccgguaauccc

SEQ ID NO: 101343 - RNA, 32 nt, Homo Sapiens
guaguggaaaaccagcagccucccgcgacgau

SEQ ID NO: 101344 - RNA, 32 nt, Homo Sapiens
gagccacugcaccuggcucuugcacuuguuua

SEQ ID NO: 101345 - RNA, 32 nt, Homo Sapiens
aaucuaaaucaucaaaacagaauccccacccc

SEQ ID NO: 101346 - RNA, 32 nt, Homo Sapiens
cucgccccagcgccccaccuucccccacggcu

SEQ ID NO: 101347 - RNA, 32 nt, Homo Sapiens
cugaguccagagaagaaauaauccccugcccu

SEQ ID NO: 101348 - RNA, 32 nt, Homo Sapiens
uaucagccccacuuccccauguagaagcugga

SEQ ID NO: 101349 - RNA, 32 nt, Homo Sapiens
gccaggggagcacggaggcagaucugagcuau

SEQ ID NO: 101350 - RNA, 32 nt, Homo Sapiens
gagcuccugggaccagaaccccucagauucca

SEQ ID NO: 101351 - RNA, 32 nt, Homo Sapiens
guuggccauuuucucuaacuaacaugugguau

SEQ ID NO: 101352 - RNA, 32 nt, Homo Sapiens
gcgaggucgcagugacagcggcgggcgaucgg

SEQ ID NO: 101353 - RNA, 32 nt, Homo Sapiens
ucuaaugugguauuuuaaauaaaguaucauaa

SEQ ID NO: 101354 - RNA, 32 nt, Homo Sapiens
ccguggugguggccaugccacucaugguugcu

SEQ ID NO: 101355 - RNA, 32 nt, Homo Sapiens
cuggguuucuuuuugaggaagagggaaaguga

SEQ ID NO: 101356 - RNA, 32 nt, Homo Sapiens
cgccuguaauuccagcacuuugggaggcagag

SEQ ID NO: 101357 - RNA, 32 nt, Homo Sapiens
auaacgcuguaauuaaaaauguuuauaugaaa

SEQ ID NO: 101358 - RNA, 30 nt, Homo Sapiens
cuuugcgcugcgcagcacucugcccuccac

SEQ ID NO: 101359 - RNA, 32 nt, Homo Sapiens
cuuucagacacacccccagagccccguggcuc

SEQ ID NO: 101360 - RNA, 32 nt, Homo Sapiens
cccauccaguccagugaauccacgacccucag

SEQ ID NO: 101361 - RNA, 32 nt, Homo Sapiens
gcucagggaagcugcgcuccgaguggccuugg

SEQ ID NO: 101362 - RNA, 32 nt, Homo Sapiens
ccccaugugucuuuuuuccuuugcugauuuug

SEQ ID NO: 101363 - RNA, 27 nt, Homo Sapiens
ccauggccucugaccuagacuucucac

SEQ ID NO: 101364 - RNA, 32 nt, Homo Sapiens
cauaucaaacugaaacaaaauuagaaauguaa

SEQ ID NO: 101365 - RNA, 32 nt, Homo Sapiens
gcuggguuacugcccaauuccauccuucccug

SEQ ID NO: 101366 - RNA, 32 nt, Homo Sapiens
cccuccugcccccaaagcuuuccgagucuggu

SEQ ID NO: 101367 - RNA, 32 nt, Homo Sapiens
aaccugauucagaaaacauuugagauuagcaa

SEQ ID NO: 101368 - RNA, 32 nt, Homo Sapiens
cccaaggugaccucucucuccucagauuuccu

SEQ ID NO: 101369 - RNA, 32 nt, Homo Sapiens
aggagccuugggcugggcagcugcuggccugg

SEQ ID NO: 101370 - RNA, 32 nt, Homo Sapiens
accugcugcuggaagccggugacccggccacg

SEQ ID NO: 101371 - RNA, 32 nt, Homo Sapiens
uuaaguaguuuauuauggaaaauugucacacu

SEQ ID NO: 101372 - RNA, 32 nt, Homo Sapiens
gccagaggucccagguggcccgagggcuauuu

SEQ ID NO: 101373 - RNA, 32 nt, Homo Sapiens
cuaagagccaacaaaaccccauauccagauag

SEQ ID NO: 101374 - RNA, 32 nt, Homo Sapiens
uucuccagccugugugauacaaguuugauccc

SEQ ID NO: 101375 - RNA, 32 nt, Homo Sapiens
gggggaaaaaauaccaaauuuaaauuauaugu

SEQ ID NO: 101376 - RNA, 32 nt, Homo Sapiens
cuaaagacagcaauaugggaccaagaggcuuu

SEQ ID NO: 101377 - RNA, 32 nt, Homo Sapiens
ugaaauaaaaauuguuauugaugacugaaaaa

SEQ ID NO: 101378 - RNA, 32 nt, Homo Sapiens
auggaaaaucaucuauuacaaugauaaccuuc

SEQ ID NO: 101379 - RNA, 32 nt, Homo Sapiens
caaagagaauuguggcagauguugugugugaa

SEQ ID NO: 101380 - RNA, 32 nt, Homo Sapiens
gcugaagggcuuucacuauaucuacuugauga

SEQ ID NO: 101381 - RNA, 32 nt, Homo Sapiens
agaauaacuuguuuaaacuauauucauauaaa

SEQ ID NO: 101382 - RNA, 32 nt, Homo Sapiens
cauuucucucauucuuuuuuauuuuggaaaau

SEQ ID NO: 101383 - RNA, 32 nt, Homo Sapiens
gggacuuggggauacagcgugaagguggggaa

SEQ ID NO: 101384 - RNA, 32 nt, Homo Sapiens
uuuucauagugggaaucaggauugugcuuuau

SEQ ID NO: 101385 - RNA, 32 nt, Homo Sapiens
cuuccagacugaggagaagaucgagcgaaccc

SEQ ID NO: 101386 - RNA, 32 nt, Homo Sapiens
uggauuuguaagguguuuuucuuuuuuacgca

SEQ ID NO: 101387 - RNA, 32 nt, Homo Sapiens
cuuccgccccccacacuuugccugcaggugca

SEQ ID NO: 101388 - RNA, 32 nt, Homo Sapiens
gcuucccucgcaccgcacaguccugggagccg

SEQ ID NO: 101389 - RNA, 32 nt, Homo Sapiens
gagaaaugggagcacaguacugggaaauggua

SEQ ID NO: 101390 - RNA, 32 nt, Homo Sapiens
auuuaacuuauuucaaaaauucauuuacuguc

SEQ ID NO: 101391 - RNA, 32 nt, Homo Sapiens
caucuccaucacugccauggcgcggagaccac

SEQ ID NO: 101392 - RNA, 32 nt, Homo Sapiens
uuccccccuugaccacugggccaguugggugg

SEQ ID NO: 101393 - RNA, 32 nt, Homo Sapiens
gaaauggggcauuuggggcccagaccuacacu

SEQ ID NO: 101394 - RNA, 32 nt, Homo Sapiens
cucauugguggauguuaaaccaauauuccuuu

SEQ ID NO: 101395 - RNA, 32 nt, Homo Sapiens
gucacuucccauuuuccaaacucagcaacccc

SEQ ID NO: 101396 - RNA, 32 nt, Homo Sapiens
uccgcgcccucccucccccucgagccgccgcg

SEQ ID NO: 101397 - RNA, 32 nt, Homo Sapiens
gacagaagggaagacugaggaggccacacgca

SEQ ID NO: 101398 - RNA, 32 nt, Homo Sapiens
augggccccagauugggacucugcgccuagcc

SEQ ID NO: 101399 - RNA, 32 nt, Homo Sapiens
gcaacaacaacaacuacugugccuugggcugc

SEQ ID NO: 101400 - RNA, 31 nt, Homo Sapiens
aaggggcagcacugccugcugcuuccuuccc

SEQ ID NO: 101401 - RNA, 31 nt, Homo Sapiens
cugaggcuuccccagaaccaggccucugcuc

SEQ ID NO: 101402 - RNA, 32 nt, Homo Sapiens
gaggcaggacaaucgcuugaaccugggaggca

SEQ ID NO: 101403 - RNA, 32 nt, Homo Sapiens
ggcucagccaagguggugcccugcucugagca

SEQ ID NO: 101404 - RNA, 32 nt, Homo Sapiens
uauggcaaaaaaaaaaaucauaaaaagugcuu

SEQ ID NO: 101405 - RNA, 32 nt, Homo Sapiens
gaacagugcccuaaguuuucccuguuguuacu

SEQ ID NO: 101406 - RNA, 26 nt, Homo Sapiens
uguaaagugaauaaauauucaucuuu

SEQ ID NO: 101407 - RNA, 32 nt, Homo Sapiens
uggauucucccacuucucuacuccauuauuuc

SEQ ID NO: 101408 - RNA, 32 nt, Homo Sapiens
guucuuaaauguuuauacuguauuucuaagaa

SEQ ID NO: 101409 - RNA, 32 nt, Homo Sapiens
caccccacuggcucuucuuaauuagaagugac

SEQ ID NO: 101410 - RNA, 32 nt, Homo Sapiens
agggaggacagaggaaaacaucacaagccaau

SEQ ID NO: 101411 - RNA, 32 nt, Homo Sapiens
guccccacuguggucugugcucuucuucauua

SEQ ID NO: 101412 - RNA, 32 nt, Homo Sapiens
uauaagcauuccuuccuguguccauuaagacu

SEQ ID NO: 101413 - RNA, 32 nt, Homo Sapiens
aagcuguugagagcauggagccaggcugcggg

SEQ ID NO: 101414 - RNA, 32 nt, Homo Sapiens
caggucaucuucucccuugacaugcccaucag

SEQ ID NO: 101415 - RNA, 32 nt, Homo Sapiens
cccaggugccuggccuggccuagaccucugga

SEQ ID NO: 101416 - RNA, 32 nt, Homo Sapiens
cucaauaaagguggccgaagggccucgaugug

SEQ ID NO: 101417 - RNA, 32 nt, Homo Sapiens
acaccugacuaauuuuuuguauuguuaguaga

SEQ ID NO: 101418 - RNA, 32 nt, Homo Sapiens
cccaaucagcaguuagagagcaaggaaacucu

SEQ ID NO: 101419 - RNA, 32 nt, Homo Sapiens
agaagacacuccuggaggagucggcggagcag

SEQ ID NO: 101420 - RNA, 32 nt, Homo Sapiens
gcugggcccucccccacccagucugccaggcu

SEQ ID NO: 101421 - RNA, 32 nt, Homo Sapiens
ucagcugcccaugccaccuccuccuucucugc

SEQ ID NO: 101422 - RNA, 32 nt, Homo Sapiens
aggccggcucgagacucccgggcgccgaggcg

SEQ ID NO: 101423 - RNA, 32 nt, Homo Sapiens
cccugugaauuuguguagaacuuugacccccg

SEQ ID NO: 101424 - RNA, 32 nt, Homo Sapiens
auucaaagcuugugaaaaaauaaagaaaauga

SEQ ID NO: 101425 - RNA, 32 nt, Homo Sapiens
uaaagaguaagugcuauuggcauuccaaaauu

SEQ ID NO: 101426 - RNA, 32 nt, Homo Sapiens
uaauuuuguccuuguuauuuuuguuuccuuug

SEQ ID NO: 101427 - RNA, 32 nt, Homo Sapiens
ccaggggcagccaauuccuaucauucagaucu

SEQ ID NO: 101428 - RNA, 32 nt, Homo Sapiens
aggggaagccagcaggggagcuugccgaagcc

SEQ ID NO: 101429 - RNA, 32 nt, Homo Sapiens
gccuggccaauauagugggacccccaucucua

SEQ ID NO: 101430 - RNA, 32 nt, Homo Sapiens
acuagaaaacuauuaaaacugauaaagcgagu

SEQ ID NO: 101431 - RNA, 32 nt, Homo Sapiens
cuacaauucacagauaggaagaggucaaugac

SEQ ID NO: 101432 - RNA, 32 nt, Homo Sapiens
uauuucaaucauaucaugaacauuuuauuuug

SEQ ID NO: 101433 - RNA, 32 nt, Homo Sapiens
aaggguggauguuuauacuuuuuuaaaaagga

SEQ ID NO: 101434 - RNA, 32 nt, Homo Sapiens
uuuggcuacuuccagcaggauaccaaggguuu

SEQ ID NO: 101435 - RNA, 32 nt, Homo Sapiens
ugaucguucucacacucauauuagcucauguu

SEQ ID NO: 101436 - RNA, 32 nt, Homo Sapiens
gaaaaggagaaaaggaccuuugaaagauguga

SEQ ID NO: 101437 - RNA, 32 nt, Homo Sapiens
gaaauuagacauuuuauauguagcucagauua

SEQ ID NO: 101438 - RNA, 32 nt, Homo Sapiens
uacuaugaucauaccaaucaccucugagaagc

SEQ ID NO: 101439 - RNA, 32 nt, Homo Sapiens
cacugauccaaauuaacuaggauggcuccaag

SEQ ID NO: 101440 - RNA, 32 nt, Homo Sapiens
cugucaucuugcaggaugcccgagggccagau

SEQ ID NO: 101441 - RNA, 32 nt, Homo Sapiens
uuaauucauaaauuauuguuuucauugacauu

SEQ ID NO: 101442 - RNA, 32 nt, Homo Sapiens
cggcccgcgcagcggccgcagcucuggcuccu

SEQ ID NO: 101443 - RNA, 28 nt, Homo Sapiens
uuagauagucuaacaauguguuucagau

SEQ ID NO: 101444 - RNA, 32 nt, Homo Sapiens
ggagcagcuguguguccccggcaccucacucc

SEQ ID NO: 101445 - RNA, 32 nt, Homo Sapiens
gaggccaugugugugggccgcuccauuauacc

SEQ ID NO: 101446 - RNA, 32 nt, Homo Sapiens
uagggugacacacuaugguauuugaguguuuu

SEQ ID NO: 101447 - RNA, 32 nt, Homo Sapiens
guaggucuuuggcauuaggagcuugagcccag

SEQ ID NO: 101448 - RNA, 32 nt, Homo Sapiens
auggaugugcucacuggggucuguguggugcc

SEQ ID NO: 101449 - RNA, 32 nt, Homo Sapiens
caccuucccugugcucggucuccaccugucuc

SEQ ID NO: 101450 - RNA, 32 nt, Homo Sapiens
gugugggugagggucgaaaugccaaaggucua

SEQ ID NO: 101451 - RNA, 32 nt, Homo Sapiens
gggacggcgcaucagccgagagggagggaacu

SEQ ID NO: 101452 - RNA, 32 nt, Homo Sapiens
uggaaggucuugcgcaggcugcaacccuggug

SEQ ID NO: 101453 - RNA, 32 nt, Homo Sapiens
uauuugacuugguuuccuuucagauauucuug

SEQ ID NO: 101454 - RNA, 30 nt, Homo Sapiens
uaaccucuggacugcuugcuacauggacaa

SEQ ID NO: 101455 - RNA, 32 nt, Homo Sapiens
cggcuugacuaggcccuuugcccugaaccuca

SEQ ID NO: 101456 - RNA, 32 nt, Homo Sapiens
gucaaagcacaaagucauggcugguuuuguuu

SEQ ID NO: 101457 - RNA, 32 nt, Homo Sapiens
ccacgccacccccuacuacucacucucacccu

SEQ ID NO: 101458 - RNA, 32 nt, Homo Sapiens
uaccgcaggcgaagguucccaccuuacuacau

SEQ ID NO: 101459 - RNA, 32 nt, Homo Sapiens
aggucaggaggagaagcagacggccugguucc

SEQ ID NO: 101460 - RNA, 31 nt, Homo Sapiens
cacaggccuuugacuuugccacauggcaagg

SEQ ID NO: 101461 - RNA, 32 nt, Homo Sapiens
cacacuacuccaaaucaaaaccacuaagaguu

SEQ ID NO: 101462 - RNA, 32 nt, Homo Sapiens
cuucagaauauauugaauaggcauuaaaugca

SEQ ID NO: 101463 - RNA, 32 nt, Homo Sapiens
cuaaagaagauaaacacaaaauccauuccagg

SEQ ID NO: 101464 - RNA, 32 nt, Homo Sapiens
acaaaaagguaaaacuuuuuauauuuuauaca

SEQ ID NO: 101465 - RNA, 29 nt, Homo Sapiens
uguauguaaauacuguaccauuuuauauc

SEQ ID NO: 101466 - RNA, 32 nt, Homo Sapiens
cccuggccgccccgucugagaagugaggagcc

SEQ ID NO: 101467 - RNA, 28 nt, Homo Sapiens
cagauuaaaaacauucauuugaacacag

SEQ ID NO: 101468 - RNA, 32 nt, Homo Sapiens
uauaauaaaaauuauauacaaguauaaaauuu

SEQ ID NO: 101469 - RNA, 32 nt, Homo Sapiens
cgcgcuccaaccgccuccuccuccucaguaac

SEQ ID NO: 101470 - RNA, 32 nt, Homo Sapiens
ggccaggcccgguggcucacgccuguaauccc

SEQ ID NO: 101471 - RNA, 32 nt, Homo Sapiens
guguguguuguuucuuuuuuuuuuuuuuacag

SEQ ID NO: 101472 - RNA, 32 nt, Homo Sapiens
cccacgcccugcacuccgggaccgucccugcg

SEQ ID NO: 101473 - RNA, 32 nt, Homo Sapiens
ggugacuaaaugauauauuuauauuauaagau

SEQ ID NO: 101474 - RNA, 32 nt, Homo Sapiens
ccucucugccccacccaagcccaaacuugguu

SEQ ID NO: 101475 - RNA, 32 nt, Homo Sapiens
gcuccuugguauuugauuugcacuauauuuag

SEQ ID NO: 101476 - RNA, 31 nt, Homo Sapiens
uuuauuacaaagaauagcuuauuauaaagga

SEQ ID NO: 101477 - RNA, 32 nt, Homo Sapiens
uccucuguucuuaugugcuuaaucaaaagauu

SEQ ID NO: 101478 - RNA, 32 nt, Homo Sapiens
ggccggauccaccgugccucugcggccugcgu

SEQ ID NO: 101479 - RNA, 32 nt, Homo Sapiens
aagggaggcgaccgcggaggguggcgaggggc

SEQ ID NO: 101480 - RNA, 32 nt, Homo Sapiens
accugauuucagcugugucaccaccccccagg

SEQ ID NO: 101481 - RNA, 32 nt, Homo Sapiens
gagaagugggacgucacgcagacagcacuguc

SEQ ID NO: 101482 - RNA, 32 nt, Homo Sapiens
ucuaguuuucacucaugguuaacacgcauuua

SEQ ID NO: 101483 - RNA, 32 nt, Homo Sapiens
aggaggacugacagcgaagaucgagcucaggu

SEQ ID NO: 101484 - RNA, 32 nt, Homo Sapiens
cauuucucccaggacuuggggguggggugaaa

SEQ ID NO: 101485 - RNA, 32 nt, Homo Sapiens
ugagggcuguggcuuuggcagcugcgacgggg

SEQ ID NO: 101486 - RNA, 32 nt, Homo Sapiens
guguccaagucucucugugccuuuuucuuuua

SEQ ID NO: 101487 - RNA, 32 nt, Homo Sapiens
gguugcuugagcucaggaguuugagaccaggc

SEQ ID NO: 101488 - RNA, 32 nt, Homo Sapiens
augucauggggucaugggaggacccagcaaug

SEQ ID NO: 101489 - RNA, 32 nt, Homo Sapiens
cuuugccgcuaccgcuuucuuacccuccgcac

SEQ ID NO: 101490 - RNA, 32 nt, Homo Sapiens
aagucacagcuauauuccagagcugcuauuag

SEQ ID NO: 101491 - RNA, 32 nt, Homo Sapiens
accgacagugagcucugccacccaggacaucc

SEQ ID NO: 101492 - RNA, 32 nt, Homo Sapiens
uggcggcgggagaggcgcaguggcugcaggcu

SEQ ID NO: 101493 - RNA, 32 nt, Homo Sapiens
aacacccgcaucccuuccuccucccauggguc

SEQ ID NO: 101494 - RNA, 32 nt, Homo Sapiens
caauuccaaauauuuaucuugguguauauauu

SEQ ID NO: 101495 - RNA, 32 nt, Homo Sapiens
cccugagugucacggcagcaucagaggccagu

SEQ ID NO: 101496 - RNA, 32 nt, Homo Sapiens
ucagaguucaacauaugcuauaauuuagaauu

SEQ ID NO: 101497 - RNA, 32 nt, Homo Sapiens
aagaggcugaugcggccccggcgggagggggg

SEQ ID NO: 101498 - RNA, 32 nt, Homo Sapiens
ggcaggacuucucaccagcagucguggggaac

SEQ ID NO: 101499 - RNA, 32 nt, Homo Sapiens
ccgccuuccuucccucacaagcccccuuggca

SEQ ID NO: 101500 - RNA, 32 nt, Homo Sapiens
cguggccccgccuccgccggcgcggccccgcc

SEQ ID NO: 101501 - RNA, 32 nt, Homo Sapiens
uagaacaguuuagaggggaaagagccacagca

SEQ ID NO: 101502 - RNA, 32 nt, Homo Sapiens
acuagaggcccauuuucacuaaacaauaaaau

SEQ ID NO: 101503 - RNA, 32 nt, Homo Sapiens
ccaugggaagcaguugguuacacgauucuuau

SEQ ID NO: 101504 - RNA, 32 nt, Homo Sapiens
cucuccccauccccacccagucucauguuggg

SEQ ID NO: 101505 - RNA, 32 nt, Homo Sapiens
caaaauuuuauaauacuuggaacuuucauauu

SEQ ID NO: 101506 - RNA, 32 nt, Homo Sapiens
cuggccgaggaggagcucucugccugccagaa

SEQ ID NO: 101507 - RNA, 32 nt, Homo Sapiens
gggcucuuuuuuucuuuuugcauaugacaacu

SEQ ID NO: 101508 - RNA, 32 nt, Homo Sapiens
gcccugccucccaauauuaucaccuuggugcu

SEQ ID NO: 101509 - RNA, 32 nt, Homo Sapiens
auuuguguaaaugaguaaaacauuuuauuucu

SEQ ID NO: 101510 - RNA, 32 nt, Homo Sapiens
gaccacgcggagccccgcaggaagcuggagcu

SEQ ID NO: 101511 - RNA, 32 nt, Homo Sapiens
guauagaaaucuuuaaaaauuuuaaaauguac

SEQ ID NO: 101512 - RNA, 32 nt, Homo Sapiens
cgcuuguugggagaaaccuuggagauucacgg

SEQ ID NO: 101513 - RNA, 32 nt, Homo Sapiens
uccagcuguuucucacucaacccauuacccac

SEQ ID NO: 101514 - RNA, 32 nt, Homo Sapiens
uaagggagaaaggcaccaagcuaacaucugac

SEQ ID NO: 101515 - RNA, 32 nt, Homo Sapiens
gccggagcucgcggcccggagccaagagauuc

SEQ ID NO: 101516 - RNA, 32 nt, Homo Sapiens
ugggcgcugggucgaauacuucugccuggccg

SEQ ID NO: 101517 - RNA, 32 nt, Homo Sapiens
acggagggcacccgcgcagaggucucccuggc

SEQ ID NO: 101518 - RNA, 32 nt, Homo Sapiens
ucuguggugaauggcuggccugugaugaacgg

SEQ ID NO: 101519 - RNA, 32 nt, Homo Sapiens
cuucugagaucaugucugugcuguucuucuac

SEQ ID NO: 101520 - RNA, 32 nt, Homo Sapiens
auguguauauauacagacacauauguauacac

SEQ ID NO: 101521 - RNA, 32 nt, Homo Sapiens
gugguguguucaauguguuuguuucauauggg

SEQ ID NO: 101522 - RNA, 32 nt, Homo Sapiens
ucgaggugggcagccaucaccagccacaguua

SEQ ID NO: 101523 - RNA, 32 nt, Homo Sapiens
gaauuguguuaauaguucccauaaucccuacg

SEQ ID NO: 101524 - RNA, 32 nt, Homo Sapiens
ccucccugaccccgcacccccacuccucccag

SEQ ID NO: 101525 - RNA, 32 nt, Homo Sapiens
aauaauauuacauguuacaauuagauuaauag

SEQ ID NO: 101526 - RNA, 29 nt, Homo Sapiens
gcauucaaaauaaaacaaaacaauuaaug

SEQ ID NO: 101527 - RNA, 32 nt, Homo Sapiens
uuuagggaaggggacugauguuaucagaggcc

SEQ ID NO: 101528 - RNA, 32 nt, Homo Sapiens
gcaauuagcgcgcgccaggcugcauuccccgc

SEQ ID NO: 101529 - RNA, 32 nt, Homo Sapiens
gcgucccuggggauuguugggaccaugcugcc

SEQ ID NO: 101530 - RNA, 32 nt, Homo Sapiens
aagucauaaagugcuucuuuuaagugaaaagg

SEQ ID NO: 101531 - RNA, 32 nt, Homo Sapiens
gagugugcauuacauaaagcccccagguuaca

SEQ ID NO: 101532 - RNA, 32 nt, Homo Sapiens
uauaaauucagcucuaaggaaauaucuuuaac

SEQ ID NO: 101533 - RNA, 32 nt, Homo Sapiens
aaagauugaaagcuuaauaaucuccuaccuaa

SEQ ID NO: 101534 - RNA, 32 nt, Homo Sapiens
ggcgggaugggucucaucugcugcuugcaccg

SEQ ID NO: 101535 - RNA, 32 nt, Homo Sapiens
aaggugcggggguggggcagggcacagugggu

SEQ ID NO: 101536 - RNA, 32 nt, Homo Sapiens
cgcccagagagcgaaaucauggagccuuccaa

SEQ ID NO: 101537 - RNA, 32 nt, Homo Sapiens
guuaaauaaaaauuauuuccaacaaaaaaaaa

SEQ ID NO: 101538 - RNA, 32 nt, Homo Sapiens
cacgucccagcaugcauaugagcagaugacug

SEQ ID NO: 101539 - RNA, 32 nt, Homo Sapiens
aggucgcagacacucaaaacauccuucaccau

SEQ ID NO: 101540 - RNA, 30 nt, Homo Sapiens
cagaagaggaagcuuggggugugcuguggg

SEQ ID NO: 101541 - RNA, 32 nt, Homo Sapiens
cuccuucugauucuugcauuugaggcaucugu

SEQ ID NO: 101542 - RNA, 32 nt, Homo Sapiens
caaggaucaaggaccugcucuggggcuaccuc

SEQ ID NO: 101543 - RNA, 32 nt, Homo Sapiens
uuucugugggagagaaagaauccuagaggcag

SEQ ID NO: 101544 - RNA, 32 nt, Homo Sapiens
cacuggaaaggaagaaaugaccgagggagaag

SEQ ID NO: 101545 - RNA, 32 nt, Homo Sapiens
ccuuugcuuguuccuuucccaccgcccacuuc

SEQ ID NO: 101546 - RNA, 32 nt, Homo Sapiens
cugguucucggguugcgaaagccucgccaggc

SEQ ID NO: 101547 - RNA, 32 nt, Homo Sapiens
ccuuugugguccaucuuguccugcuuccucac

SEQ ID NO: 101548 - RNA, 32 nt, Homo Sapiens
ugaggccgcccgggcugccgccagccaagugc

SEQ ID NO: 101549 - RNA, 32 nt, Homo Sapiens
aauacucuggcauccuuuggcccugagaaggu

SEQ ID NO: 101550 - RNA, 32 nt, Homo Sapiens
caucuucugacuuuuccucgugugacccaucu

SEQ ID NO: 101551 - RNA, 32 nt, Homo Sapiens
uaauucuuuguuuccucuuuaccuguucaaaa

SEQ ID NO: 101552 - RNA, 32 nt, Homo Sapiens
gaggcuuucagcaaaaaggcugcuuaaaagca

SEQ ID NO: 101553 - RNA, 32 nt, Homo Sapiens
agccaguauuguuaaaauaccauuuuauacaa

SEQ ID NO: 101554 - RNA, 32 nt, Homo Sapiens
gcucuaacaaaauaaaccuuagacauaucaca

SEQ ID NO: 101555 - RNA, 32 nt, Homo Sapiens
guggcgggcuagagacccuugccuguguccgg

SEQ ID NO: 101556 - RNA, 32 nt, Homo Sapiens
ugccccaucagcucccugaggaccaccuccua

SEQ ID NO: 101557 - RNA, 32 nt, Homo Sapiens
caagauuugacaaaggcaucucuuauccuugg

SEQ ID NO: 101558 - RNA, 32 nt, Homo Sapiens
gacaucgccucccagccgacaucacucacccc

SEQ ID NO: 101559 - RNA, 32 nt, Homo Sapiens
gucuggagucagagacccucucccugccccca

SEQ ID NO: 101560 - RNA, 32 nt, Homo Sapiens
gagaauuggauaaagucuugggaaaugagaca

SEQ ID NO: 101561 - RNA, 32 nt, Homo Sapiens
ucccauugcauucugggaguccacaucuggcu

SEQ ID NO: 101562 - RNA, 32 nt, Homo Sapiens
acuaucgggcaccuuaaggacgucgugggccg

SEQ ID NO: 101563 - RNA, 32 nt, Homo Sapiens
ccacaaaauaagcacuaacaaaaguguauugu

SEQ ID NO: 101564 - RNA, 32 nt, Homo Sapiens
uggaaagacauuagcacaacuuacgcauuggg

SEQ ID NO: 101565 - RNA, 32 nt, Homo Sapiens
aagagaagaaaguaccugaggauugcucuuuu

SEQ ID NO: 101566 - RNA, 32 nt, Homo Sapiens
uccccugggaguccccucuccuccacauguuc

SEQ ID NO: 101567 - RNA, 32 nt, Homo Sapiens
cauuucccguugccuccauagcaagaagaguu

SEQ ID NO: 101568 - RNA, 32 nt, Homo Sapiens
ugcuuaggggccuuggaaugccugcuguccag

SEQ ID NO: 101569 - RNA, 32 nt, Homo Sapiens
ccgcccccgcggccucgucgcuccugcugagg

SEQ ID NO: 101570 - RNA, 32 nt, Homo Sapiens
gugcacgcagccucgccuguauggggagcagg

SEQ ID NO: 101571 - RNA, 32 nt, Homo Sapiens
cacaucagcaaccaaaagaugcccacagcugu

SEQ ID NO: 101572 - RNA, 32 nt, Homo Sapiens
uuucuugcugauccaugaaauaggaacuucuu

SEQ ID NO: 101573 - RNA, 32 nt, Homo Sapiens
cgggagcggcgguccagacuggggagggacgc

SEQ ID NO: 101574 - RNA, 32 nt, Homo Sapiens
aauaaaaugucgcuugaauguugcagucaugu

SEQ ID NO: 101575 - RNA, 32 nt, Homo Sapiens
auuuuggagggagcuuccuuccuuccuuccug

SEQ ID NO: 101576 - RNA, 32 nt, Homo Sapiens
auuucugguguuaugaggaagaauaaagggga

SEQ ID NO: 101577 - RNA, 32 nt, Homo Sapiens
ccugcagugcugggcccagagcccuuggacag

SEQ ID NO: 101578 - RNA, 32 nt, Homo Sapiens
cucuugccccccaccccagccuaagaugaaga

SEQ ID NO: 101579 - RNA, 32 nt, Homo Sapiens
uuuaaaagcugauguuccaagucgauucacca

SEQ ID NO: 101580 - RNA, 32 nt, Homo Sapiens
caaaccucaauccucagugaggaucacaggau

SEQ ID NO: 101581 - RNA, 32 nt, Homo Sapiens
cugaauuuuuaaagucucuuccgcaucuucug

SEQ ID NO: 101582 - RNA, 32 nt, Homo Sapiens
cugagggccaaggggcgugggcgucuuccugg

SEQ ID NO: 101583 - RNA, 32 nt, Homo Sapiens
acgcccgccgacagaaacaucugcaaagauac

SEQ ID NO: 101584 - RNA, 32 nt, Homo Sapiens
acagcuagugagggagcagagacaagacaagg

SEQ ID NO: 101585 - RNA, 32 nt, Homo Sapiens
ggcgugagguggcggcggccgcgcccugguug

SEQ ID NO: 101586 - RNA, 32 nt, Homo Sapiens
ccaccuuggcuuccaauauggcaagagggugc

SEQ ID NO: 101587 - RNA, 32 nt, Homo Sapiens
ugaaggaggagcuauuucugaaaauaaauuua

SEQ ID NO: 101588 - RNA, 32 nt, Homo Sapiens
auuacauaucuaggcaacuaaaaacaaacauu

SEQ ID NO: 101589 - RNA, 32 nt, Homo Sapiens
ucaagcggcagagcaguuauuaacagaaucac

SEQ ID NO: 101590 - RNA, 32 nt, Homo Sapiens
caccuaggaauuuaauauuguuguguauauuu

SEQ ID NO: 101591 - RNA, 32 nt, Homo Sapiens
ggcugggacagagggagagaacaaggccuccc

SEQ ID NO: 101592 - RNA, 32 nt, Homo Sapiens
aguacuuuuccucuugucuacuccagacaguu

SEQ ID NO: 101593 - RNA, 32 nt, Homo Sapiens
aaaaacggauuuccucuuccuagcuuaaaauc

SEQ ID NO: 101594 - RNA, 30 nt, Homo Sapiens
uucaauucugagaugggggaaaaaccgccc

SEQ ID NO: 101595 - RNA, 32 nt, Homo Sapiens
aggcagcaacgcggcugcucccaccgagcacg

SEQ ID NO: 101596 - RNA, 32 nt, Homo Sapiens
uuuaauuuaauuuuauuuuuuauuuaaaggaa

SEQ ID NO: 101597 - RNA, 32 nt, Homo Sapiens
uccugacagggaagagcgcuggcagaggcugu

SEQ ID NO: 101598 - RNA, 32 nt, Homo Sapiens
cuaggguagggccuguucccaccacccuagcu

SEQ ID NO: 101599 - RNA, 30 nt, Homo Sapiens
gcaguagaggacugcagcugucuaggucug

SEQ ID NO: 101600 - RNA, 32 nt, Homo Sapiens
ggaaggcgcugggacgguuacccagcgggccg

SEQ ID NO: 101601 - RNA, 32 nt, Homo Sapiens
aaaauguauuuaugaagugagguugaguauau

SEQ ID NO: 101602 - RNA, 32 nt, Homo Sapiens
aaagggauuuaauuauuuugaauauaauuaua

SEQ ID NO: 101603 - RNA, 32 nt, Homo Sapiens
ggaacuuaggcugaaacucaccacagugccaa

SEQ ID NO: 101604 - RNA, 32 nt, Homo Sapiens
cgaggccaguagccccggggcccugagcagag

SEQ ID NO: 101605 - RNA, 32 nt, Homo Sapiens
caaugugaagaaucaaagucagggcaagaaag

SEQ ID NO: 101606 - RNA, 32 nt, Homo Sapiens
ucgugccuggggaauggggaucaugggugcug

SEQ ID NO: 101607 - RNA, 32 nt, Homo Sapiens
agagcuggccgcgcgccgccgccucccgcacg

SEQ ID NO: 101608 - RNA, 32 nt, Homo Sapiens
cuucucuugccauggccucaggucuugaggga

SEQ ID NO: 101609 - RNA, 32 nt, Homo Sapiens
acacccacaacaaaaccuuguucccuuuguuu

SEQ ID NO: 101610 - RNA, 32 nt, Homo Sapiens
uugagaugaugugguuuucaucuuucauuaug

SEQ ID NO: 101611 - RNA, 32 nt, Homo Sapiens
auggagcaaagaaauaccaaaacuacuuuaaa

SEQ ID NO: 101612 - RNA, 32 nt, Homo Sapiens
agcuaaauuguauuucuuuauagagaaaguac

SEQ ID NO: 101613 - RNA, 32 nt, Homo Sapiens
gguucacaaaaauuauguuaguguguuuucag

SEQ ID NO: 101614 - RNA, 32 nt, Homo Sapiens
gaaggucucucugggccccgggcccgacuccc

SEQ ID NO: 101615 - RNA, 32 nt, Homo Sapiens
agagguccacaacacacagauuugagcucagc

SEQ ID NO: 101616 - RNA, 32 nt, Homo Sapiens
gugaggggcggagacccggcccggggaggugg

SEQ ID NO: 101617 - RNA, 28 nt, Homo Sapiens
augagagaauuguaucauuugaacaacu

SEQ ID NO: 101618 - RNA, 32 nt, Homo Sapiens
ugcucaaaccaucaggauggaaacagucaggc

SEQ ID NO: 101619 - RNA, 32 nt, Homo Sapiens
cccuuguauuuaugacucugguagaggucuuc

SEQ ID NO: 101620 - RNA, 32 nt, Homo Sapiens
gugagagaaacgcagugggggaggcagggagu

SEQ ID NO: 101621 - RNA, 32 nt, Homo Sapiens
uuuagcaucuucuuuaccuccaguguuccugc

SEQ ID NO: 101622 - RNA, 32 nt, Homo Sapiens
ugucuuacugguuuuuuaauaaauccuuuugu

SEQ ID NO: 101623 - RNA, 32 nt, Homo Sapiens
ccagagugacagagcaagacuccaucucaaaa

SEQ ID NO: 101624 - RNA, 32 nt, Homo Sapiens
ccugcugcacuugccugcccugccuugcuugg

SEQ ID NO: 101625 - RNA, 32 nt, Homo Sapiens
ucuccugucauuccuagcuuccuugcuucaga

SEQ ID NO: 101626 - RNA, 32 nt, Homo Sapiens
ugcccccaggcgggcuccccgcugcuccagcu

SEQ ID NO: 101627 - RNA, 32 nt, Homo Sapiens
guagugggccccaguguugcgcucucuggccg

SEQ ID NO: 101628 - RNA, 32 nt, Homo Sapiens
gggucaaagggacccucugugccuucuucuuu

SEQ ID NO: 101629 - RNA, 32 nt, Homo Sapiens
ggaacugggaaggggagggaaggccacgcagg

SEQ ID NO: 101630 - RNA, 32 nt, Homo Sapiens
gccucgcccuccccgccaggcaccuggcuuuu

SEQ ID NO: 101631 - RNA, 32 nt, Homo Sapiens
acgggagcugccgcuuccuucccggccccgcu

SEQ ID NO: 101632 - RNA, 32 nt, Homo Sapiens
uguaagacagugcccugagaccucuagagaaa

SEQ ID NO: 101633 - RNA, 32 nt, Homo Sapiens
uauugguuuuucauuacuucugaauagucuua

SEQ ID NO: 101634 - RNA, 32 nt, Homo Sapiens
gugacuucuuugagggcaucggcaagaaaaag

SEQ ID NO: 101635 - RNA, 32 nt, Homo Sapiens
cuuaaacugucaauuugcucuagugucuuauu

SEQ ID NO: 101636 - RNA, 32 nt, Homo Sapiens
aguuauaaagcacauuuuuuuaucacgaugga

SEQ ID NO: 101637 - RNA, 32 nt, Homo Sapiens
guuggauaggggauuuggggcugggucggcgg

SEQ ID NO: 101638 - RNA, 32 nt, Homo Sapiens
ggccaucccguccaccauccuccggcuuccag

SEQ ID NO: 101639 - RNA, 32 nt, Homo Sapiens
aacaccccugugauacuguucuuaauauucag

SEQ ID NO: 101640 - RNA, 32 nt, Homo Sapiens
cuucuccucugccccgggcccgcgaggccacg

SEQ ID NO: 101641 - RNA, 30 nt, Homo Sapiens
gcccagugcgcccugccgccgcgcuuggga

SEQ ID NO: 101642 - RNA, 32 nt, Homo Sapiens
cugcacauggcccuccuccccacccucaugac

SEQ ID NO: 101643 - RNA, 32 nt, Homo Sapiens
ccacugcccagcaacucaaggcugggucuuuc

SEQ ID NO: 101644 - RNA, 29 nt, Homo Sapiens
agucugugauuuuggugaaagcuccccuc

SEQ ID NO: 101645 - RNA, 32 nt, Homo Sapiens
uuggggggaccuagcucugucuucccagcccc

SEQ ID NO: 101646 - RNA, 32 nt, Homo Sapiens
ucagccuugggguuggccguuccucuaaucug

SEQ ID NO: 101647 - RNA, 31 nt, Homo Sapiens
cacgacucaccugcuuguccaagggcccccu

SEQ ID NO: 101648 - RNA, 32 nt, Homo Sapiens
acuguuuccauuuuuguuuuuacaaauccuuu

SEQ ID NO: 101649 - RNA, 32 nt, Homo Sapiens
auuuuaccuauugugaauaaagucacuccucc

SEQ ID NO: 101650 - RNA, 32 nt, Homo Sapiens
aucugaucaagaugaaguuuucauccccaucu

SEQ ID NO: 101651 - RNA, 32 nt, Homo Sapiens
aucauuaaaauuacagagcuauaugauccaua

SEQ ID NO: 101652 - RNA, 32 nt, Homo Sapiens
aggcccauccagggauuucaucucuaagccug

SEQ ID NO: 101653 - RNA, 32 nt, Homo Sapiens
uggguugagcagaguaauauauaggguuuacu

SEQ ID NO: 101654 - RNA, 32 nt, Homo Sapiens
augguuuggcuguguccccacucaaauccuau

SEQ ID NO: 101655 - RNA, 32 nt, Homo Sapiens
cuucugaguuaaaacuuaagugauuccugcuu

SEQ ID NO: 101656 - RNA, 32 nt, Homo Sapiens
gcaagccaggacugagcuucccucggaaagac

SEQ ID NO: 101657 - RNA, 32 nt, Homo Sapiens
uggaaaccgcggccauggcggcaccgcggcaa

SEQ ID NO: 101658 - RNA, 32 nt, Homo Sapiens
guuuaauuugcccuucucuccccaucuucccu

SEQ ID NO: 101659 - RNA, 32 nt, Homo Sapiens
cccgugaauacuuuuugcaugaugauuugaag

SEQ ID NO: 101660 - RNA, 32 nt, Homo Sapiens
agcgggccgcggccacccgcuccucccgcucc

SEQ ID NO: 101661 - RNA, 29 nt, Homo Sapiens
guaucaaaguguaaacaccauagggaccc

SEQ ID NO: 101662 - RNA, 32 nt, Homo Sapiens
ugcauacaagggugcuuggggguggguugggg

SEQ ID NO: 101663 - RNA, 32 nt, Homo Sapiens
ggccccaaggccacgucugugcuucccaggga

SEQ ID NO: 101664 - RNA, 32 nt, Homo Sapiens
caggacgucgggucgcugccgacauaauguca

SEQ ID NO: 101665 - RNA, 32 nt, Homo Sapiens
accggccggcauggaggagcgcggcgauuccg

SEQ ID NO: 101666 - RNA, 32 nt, Homo Sapiens
ggacugcgagauggaggaggggcgcgcugcgg

SEQ ID NO: 101667 - RNA, 32 nt, Homo Sapiens
cccaacuacucggguaucugaggugggaggau

SEQ ID NO: 101668 - RNA, 31 nt, Homo Sapiens
uuaaacaauaaauacaccugaguuaguuuuc

SEQ ID NO: 101669 - RNA, 32 nt, Homo Sapiens
cuccuguaacucaacuaacaaaaucaagccug

SEQ ID NO: 101670 - RNA, 32 nt, Homo Sapiens
cuguuucgccuggaggcucgcgcgcuuuuugg

SEQ ID NO: 101671 - RNA, 32 nt, Homo Sapiens
cucacagcuuuggccccuuucagagauuagaa

SEQ ID NO: 101672 - RNA, 32 nt, Homo Sapiens
uggagcuaaaauuauauacuguaucauauaca

SEQ ID NO: 101673 - RNA, 32 nt, Homo Sapiens
ggaucaacuuugcaugaauaaugugagugcgc

SEQ ID NO: 101674 - RNA, 32 nt, Homo Sapiens
cuuggagauaaaaauuacauaagggacuuuuu

SEQ ID NO: 101675 - RNA, 32 nt, Homo Sapiens
gaggaagcugggguucaugacaauggcagaug

SEQ ID NO: 101676 - RNA, 32 nt, Homo Sapiens
cgacccuggggcugcgcgcuggggcgcgaaca

SEQ ID NO: 101677 - RNA, 32 nt, Homo Sapiens
cacaaaaacaugagauauaauaaaaugguugu

SEQ ID NO: 101678 - RNA, 32 nt, Homo Sapiens
acgccuggcccucucccaguuucuguuggcca

SEQ ID NO: 101679 - RNA, 32 nt, Homo Sapiens
uucaagcaaaacaguucucagaaaugucauga

SEQ ID NO: 101680 - RNA, 32 nt, Homo Sapiens
aagcucuccagaaggggugugaucucugagca

SEQ ID NO: 101681 - RNA, 32 nt, Homo Sapiens
agcaggcagaugcacaccggaccuggucaagg

SEQ ID NO: 101682 - RNA, 32 nt, Homo Sapiens
uaaauacuucugaugaaaaauccgcugaggag

SEQ ID NO: 101683 - RNA, 32 nt, Homo Sapiens
caaagaaauauguagaugaauauuuaaauacu

SEQ ID NO: 101684 - RNA, 32 nt, Homo Sapiens
aaccagaggguggagguugguguggaagaggu

SEQ ID NO: 101685 - RNA, 32 nt, Homo Sapiens
cuuugugguaccaaagugggacuaggacaaaa

SEQ ID NO: 101686 - RNA, 32 nt, Homo Sapiens
uguuuacacacuguaucagggauuuggugaua

SEQ ID NO: 101687 - RNA, 27 nt, Homo Sapiens
uugccuucacccuucagccucccgcuc

SEQ ID NO: 101688 - RNA, 32 nt, Homo Sapiens
gcgcugcggggccgcccacgcugcgcuccagg

SEQ ID NO: 101689 - RNA, 32 nt, Homo Sapiens
uauagacuauucuaugacucaagacaacuagg

SEQ ID NO: 101690 - RNA, 32 nt, Homo Sapiens
uucaggucaaggaaaaccauugccugcacccc

SEQ ID NO: 101691 - RNA, 32 nt, Homo Sapiens
ugggaauguaaauuaguuccaccauuguggaa

SEQ ID NO: 101692 - RNA, 32 nt, Homo Sapiens
uugucuccacuugcaguuuuuaaaagaguugc

SEQ ID NO: 101693 - RNA, 32 nt, Homo Sapiens
aagugaucuucccacaccagccucccaaaaua

SEQ ID NO: 101694 - RNA, 32 nt, Homo Sapiens
gcgggguuaggggcuaggcgggggcgaagccg

SEQ ID NO: 101695 - RNA, 30 nt, Homo Sapiens
ggaagcacagccagauccuauaggaaugaa

SEQ ID NO: 101696 - RNA, 32 nt, Homo Sapiens
cacaacuaggaccucauaucuuccucaucagu

SEQ ID NO: 101697 - RNA, 32 nt, Homo Sapiens
ugggagugaaggaggaggagggaugccacaca

SEQ ID NO: 101698 - RNA, 32 nt, Homo Sapiens
gaugacguucggaaagggucaugggcuaaaug

SEQ ID NO: 101699 - RNA, 32 nt, Homo Sapiens
aacuucauuucaguuuacuuuguuaugccuua

SEQ ID NO: 101700 - RNA, 30 nt, Homo Sapiens
agaaggcuggacugcauaagcauggcaguu

SEQ ID NO: 101701 - RNA, 32 nt, Homo Sapiens
accucuaggcuggaagcuugggcuugcaagug

SEQ ID NO: 101702 - RNA, 32 nt, Homo Sapiens
caggcucuggcuuguuaucugcaacaggaaua

SEQ ID NO: 101703 - RNA, 32 nt, Homo Sapiens
uagugugugucugaugccgguuggugucaaag

SEQ ID NO: 101704 - RNA, 32 nt, Homo Sapiens
uuucuuuaaguuauuaagaaauugagauaucu

SEQ ID NO: 101705 - RNA, 32 nt, Homo Sapiens
gaagcgggcgggugccccugcugcccuugucc

SEQ ID NO: 101706 - RNA, 30 nt, Homo Sapiens
ccuccagccugugcuguuggcucagaaggg

SEQ ID NO: 101707 - RNA, 32 nt, Homo Sapiens
uaacuggcaggcauggcaagguugcauaugua

SEQ ID NO: 101708 - RNA, 32 nt, Homo Sapiens
caccccauggcacccaggaucuggucucggug

SEQ ID NO: 101709 - RNA, 27 nt, Homo Sapiens
ggauggcggcggccguagcggcuccac

SEQ ID NO: 101710 - RNA, 32 nt, Homo Sapiens
agagaauucacuuuucucaaauuuuaaaauuu

SEQ ID NO: 101711 - RNA, 32 nt, Homo Sapiens
uggcuuugcugcgucucuagaggguuaggaua

SEQ ID NO: 101712 - RNA, 32 nt, Homo Sapiens
uucaugaaugcuucauggggcuccaggaagcc

SEQ ID NO: 101713 - RNA, 32 nt, Homo Sapiens
gucuucgcgacccucggcugggcccgccgccc

SEQ ID NO: 101714 - RNA, 32 nt, Homo Sapiens
gaggaccgccccacccuggaaugccaauguca

SEQ ID NO: 101715 - RNA, 32 nt, Homo Sapiens
uguacacuuugagcagacgugccuggccacac

SEQ ID NO: 101716 - RNA, 32 nt, Homo Sapiens
agagccaccagaagcugaaagagaugaggaag

SEQ ID NO: 101717 - RNA, 32 nt, Homo Sapiens
auucggcuggccugcgcagagauuggcugugg

SEQ ID NO: 101718 - RNA, 32 nt, Homo Sapiens
gcucaggugagaggcacagaauccacacacuu

SEQ ID NO: 101719 - RNA, 32 nt, Homo Sapiens
agggccacggcuuuagcggugucuuuugcgag

SEQ ID NO: 101720 - RNA, 32 nt, Homo Sapiens
ccaccuuggggcuucucaugggaaaugugccc

SEQ ID NO: 101721 - RNA, 32 nt, Homo Sapiens
guagagaugcuuaaagugcuagcuuuauuuaa

SEQ ID NO: 101722 - RNA, 32 nt, Homo Sapiens
acagguuaagacaaaggguugacuggccuauu

SEQ ID NO: 101723 - RNA, 32 nt, Homo Sapiens
ugcguucuuaacgguucagucaccuuaaccgu

SEQ ID NO: 101724 - RNA, 32 nt, Homo Sapiens
uauuaaaagcuuauguaacauaaaagcaagua

SEQ ID NO: 101725 - RNA, 32 nt, Homo Sapiens
uuccucauuuuucucuugcugcagccauguaa

SEQ ID NO: 101726 - RNA, 32 nt, Homo Sapiens
ccgggcagggcgagcaggauguccuuguccag

SEQ ID NO: 101727 - RNA, 32 nt, Homo Sapiens
ugguuuggagcuagaguugcuuccuggugaga

SEQ ID NO: 101728 - RNA, 32 nt, Homo Sapiens
gcgcagcccuccccccucggccgcccggcagu

SEQ ID NO: 101729 - RNA, 32 nt, Homo Sapiens
ggcuggucucgaacuuaugaccucaggugauc

SEQ ID NO: 101730 - RNA, 28 nt, Homo Sapiens
aaauuuguaucagauauguguuuuugca

SEQ ID NO: 101731 - RNA, 32 nt, Homo Sapiens
aaaaauuguaaaaaugagccaggcauguggug

SEQ ID NO: 101732 - RNA, 32 nt, Homo Sapiens
uccccaggacaaagcagcgcacagucuucuug

SEQ ID NO: 101733 - RNA, 32 nt, Homo Sapiens
aaaugcugcugagugacugcaugaugagauac

SEQ ID NO: 101734 - RNA, 32 nt, Homo Sapiens
aaguuaccugaguaucucugggaggccucaug

SEQ ID NO: 101735 - RNA, 32 nt, Homo Sapiens
aauuguaaguuuucugaggccuccucagaagc

SEQ ID NO: 101736 - RNA, 32 nt, Homo Sapiens
aaguccccacugaccacacuuuccccaaggcu

SEQ ID NO: 101737 - RNA, 27 nt, Homo Sapiens
agauggcggcggccgacggggcuuugc

SEQ ID NO: 101738 - RNA, 32 nt, Homo Sapiens
cucugcucacuuuaagaacuuuuaccgacucc

SEQ ID NO: 101739 - RNA, 32 nt, Homo Sapiens
agucggaggcggagaaggacgaagacugagac

SEQ ID NO: 101740 - RNA, 32 nt, Homo Sapiens
aggucgguuuggguuugaauucugccucuucu

SEQ ID NO: 101741 - RNA, 32 nt, Homo Sapiens
uuccuccacuaccuccgcccccgcccccgccc

SEQ ID NO: 101742 - RNA, 32 nt, Homo Sapiens
uuuggagcaccuuuugaaugacuugcaccugg

SEQ ID NO: 101743 - RNA, 32 nt, Homo Sapiens
ggcagaacugggcccaaagacacacacccccu

SEQ ID NO: 101744 - RNA, 32 nt, Homo Sapiens
uuucuaaacuaucaaaaacucuagcaguuuga

SEQ ID NO: 101745 - RNA, 32 nt, Homo Sapiens
uacaaacauuugaguucuguccuccagguuca

SEQ ID NO: 101746 - RNA, 29 nt, Homo Sapiens
cuaaauauauguauaugcugugucauacu

SEQ ID NO: 101747 - RNA, 32 nt, Homo Sapiens
aauuucagacaaaacagacuuuaagccaacaa

SEQ ID NO: 101748 - RNA, 32 nt, Homo Sapiens
uggcugcauacuuauaccuggauggguacuuu

SEQ ID NO: 101749 - RNA, 32 nt, Homo Sapiens
cugagcccugcagcugccauccugccuggcag

SEQ ID NO: 101750 - RNA, 32 nt, Homo Sapiens
uuuggguuguggccauacugucugcaagaugu

SEQ ID NO: 101751 - RNA, 32 nt, Homo Sapiens
uugucaauuaucuaaagcauguuaguuuggug

SEQ ID NO: 101752 - RNA, 32 nt, Homo Sapiens
auggacuggugccuuugcauucagaaggagag

SEQ ID NO: 101753 - RNA, 32 nt, Homo Sapiens
uucaauuaaaauaaaguuaucggauuacacca

SEQ ID NO: 101754 - RNA, 32 nt, Homo Sapiens
ucuuaacucugcaggaaaucagagcuggcagc

SEQ ID NO: 101755 - RNA, 32 nt, Homo Sapiens
agugcagucuaauauauaaauuuuaugaaaag

SEQ ID NO: 101756 - RNA, 32 nt, Homo Sapiens
cuacuuauaguauuucaaaucuagucaaguca

SEQ ID NO: 101757 - RNA, 32 nt, Homo Sapiens
agccuggacaccuuuggcccuguuaccuugau

SEQ ID NO: 101758 - RNA, 32 nt, Homo Sapiens
agagacgcgggaagcaggggcugggcgggggu

SEQ ID NO: 101759 - RNA, 32 nt, Homo Sapiens
ugcaauauauaaauaaacaguaagaauuuuaa

SEQ ID NO: 101760 - RNA, 32 nt, Homo Sapiens
uccggggcgcuacuccauuggcggccgggaug

SEQ ID NO: 101761 - RNA, 32 nt, Homo Sapiens
uacccacaaaaauuuaaaaauaaaguuaauuu

SEQ ID NO: 101762 - RNA, 32 nt, Homo Sapiens
uucagcacuuuaacagaugccauuccagguua

SEQ ID NO: 101763 - RNA, 32 nt, Homo Sapiens
acgacucauuggcucacugcagccuagaccuc

SEQ ID NO: 101764 - RNA, 30 nt, Homo Sapiens
aauuuauuuccagcugcccaucuugucccu

SEQ ID NO: 101765 - RNA, 32 nt, Homo Sapiens
gaucauccuuggaauacccccauucuccuugc

SEQ ID NO: 101766 - RNA, 32 nt, Homo Sapiens
gagauguaacucucuugauauggaugcuugcu

SEQ ID NO: 101767 - RNA, 32 nt, Homo Sapiens
accggcacguauuuuucuuuuuuuaacagccu

SEQ ID NO: 101768 - RNA, 32 nt, Homo Sapiens
cugccuucccaggcugcccccaggguuucugc

SEQ ID NO: 101769 - RNA, 32 nt, Homo Sapiens
gugucagaggggcuugggcagcccuugggagu

SEQ ID NO: 101770 - RNA, 32 nt, Homo Sapiens
uuuuucuuucuuucuuuuuuuuuuucuuagca

SEQ ID NO: 101771 - RNA, 32 nt, Homo Sapiens
ggggcguagugggauauggccaacucgggcug

SEQ ID NO: 101772 - RNA, 32 nt, Homo Sapiens
auagucugccuccccacccccacaccaucuug

SEQ ID NO: 101773 - RNA, 32 nt, Homo Sapiens
augaagaaauaccgcacuuacaaucccaccuu

SEQ ID NO: 101774 - RNA, 32 nt, Homo Sapiens
uuguggaucauuuugcacauagcuuuaucaac

SEQ ID NO: 101775 - RNA, 32 nt, Homo Sapiens
gcauguuccgccucuggacggccucucugaac

SEQ ID NO: 101776 - RNA, 32 nt, Homo Sapiens
uuaccuaccguuggaaccgcgaugccccguuc

SEQ ID NO: 101777 - RNA, 32 nt, Homo Sapiens
uuuuaacuuuuuaaucagacuauacauuuaca

SEQ ID NO: 101778 - RNA, 32 nt, Homo Sapiens
gggagggggccgugggggcggcucggcggaac

SEQ ID NO: 101779 - RNA, 32 nt, Homo Sapiens
gaaagaaagagaauacaccaacaaagaguuuc

SEQ ID NO: 101780 - RNA, 28 nt, Homo Sapiens
uggagggggcggccuggggcuggggcug

SEQ ID NO: 101781 - RNA, 32 nt, Homo Sapiens
agcgccgcgcggugagguucucuaguccacgc

SEQ ID NO: 101782 - RNA, 32 nt, Homo Sapiens
gcugaggauuaccauaaugaaauguacuaaau

SEQ ID NO: 101783 - RNA, 32 nt, Homo Sapiens
agcaagaaguuccagaugaaauaugcauaaga

SEQ ID NO: 101784 - RNA, 32 nt, Homo Sapiens
cuucuggcaaggacagaggcgaggggacagcc

SEQ ID NO: 101785 - RNA, 32 nt, Homo Sapiens
uucagaggaaggugagauauuuuuuguacucc

SEQ ID NO: 101786 - RNA, 32 nt, Homo Sapiens
uggagggggagguaggcggggcggcgcgugac

SEQ ID NO: 101787 - RNA, 32 nt, Homo Sapiens
gaaacgcuucuuuuccauccuagugagaagcu

SEQ ID NO: 101788 - RNA, 32 nt, Homo Sapiens
aggagcuccuccaggagcaggcugggauccca

SEQ ID NO: 101789 - RNA, 32 nt, Homo Sapiens
gggcgccggccgcggcaggaggcgcuguagcg

SEQ ID NO: 101790 - RNA, 32 nt, Homo Sapiens
cuuucaauuccacagcauucuaaucacccaaa

SEQ ID NO: 101791 - RNA, 32 nt, Homo Sapiens
uggagaugagagaggcuucgagagggugggug

SEQ ID NO: 101792 - RNA, 32 nt, Homo Sapiens
ucgccgaagucucgcgagcccggagcguggca

SEQ ID NO: 101793 - RNA, 32 nt, Homo Sapiens
ggcgggagggugggcacggggcacggggggca

SEQ ID NO: 101794 - RNA, 32 nt, Homo Sapiens
cuucucagugggcagcaggaaguaaaggcauc

SEQ ID NO: 101795 - RNA, 32 nt, Homo Sapiens
auuuuuuuuaugcauagcacaaacuccuccug

SEQ ID NO: 101796 - RNA, 32 nt, Homo Sapiens
auguaccgccuggccaugaccggggcagggau

SEQ ID NO: 101797 - RNA, 32 nt, Homo Sapiens
agaaaaaccuaguuucacuccuccccuucuuc

SEQ ID NO: 101798 - RNA, 32 nt, Homo Sapiens
gagucuuugggcgcagaagacccggguuaaua

SEQ ID NO: 101799 - RNA, 32 nt, Homo Sapiens
cggugagccaacccaaacccauccgcgggucu

SEQ ID NO: 101800 - RNA, 32 nt, Homo Sapiens
guuuuccaucuguuuuugauaagaauaagaaa

SEQ ID NO: 101801 - RNA, 32 nt, Homo Sapiens
guauuagaugaaaugugaggaucuuguucaau

SEQ ID NO: 101802 - RNA, 28 nt, Homo Sapiens
acaaccaugauaaccauuauaaaugauc

SEQ ID NO: 101803 - RNA, 32 nt, Homo Sapiens
auguguuggacaagcauagaaagugauuuaua

SEQ ID NO: 101804 - RNA, 32 nt, Homo Sapiens
ugauucuugaguuuagugaucugaacagaaau

SEQ ID NO: 101805 - RNA, 32 nt, Homo Sapiens
cagcccugaacgugagcacgcugaaggcuuac

SEQ ID NO: 101806 - RNA, 32 nt, Homo Sapiens
gcuuggcagaaucuuuguagugugugggaucu

SEQ ID NO: 101807 - RNA, 32 nt, Homo Sapiens
ucugugagaaaguagaagacaccucugaccag

SEQ ID NO: 101808 - RNA, 32 nt, Homo Sapiens
caagaagaaucagaucuugaaaaaagaagaag

SEQ ID NO: 101809 - RNA, 32 nt, Homo Sapiens
guccaaaugcagaauauuaauacaucgaacaa

SEQ ID NO: 101810 - RNA, 32 nt, Homo Sapiens
acagccaagccccuuccacaucuacaggguca

SEQ ID NO: 101811 - RNA, 32 nt, Homo Sapiens
caucucccagcuccaggugcugcugucugcag

SEQ ID NO: 101812 - RNA, 32 nt, Homo Sapiens
aguauuugaaagauuaagaaguauuaaauagc

SEQ ID NO: 101813 - RNA, 32 nt, Homo Sapiens
uuggaggacccaccugugaggacccugaccug

SEQ ID NO: 101814 - RNA, 32 nt, Homo Sapiens
aauggagagaauaaaauguuucuugucaaacg

SEQ ID NO: 101815 - RNA, 32 nt, Homo Sapiens
gagaauaacccaucauaauccaaacaaaugau

SEQ ID NO: 101816 - RNA, 32 nt, Homo Sapiens
cauuuuugugcuuuuauguuuaauuuuaugag

SEQ ID NO: 101817 - RNA, 32 nt, Homo Sapiens
uuugugaagaaagcggguccagaugugauuca

SEQ ID NO: 101818 - RNA, 31 nt, Homo Sapiens
cugaugcuucugagaaagucuuuuccuagua

SEQ ID NO: 101819 - RNA, 32 nt, Homo Sapiens
caccucccucuuucgcaucaguucugaauccc

SEQ ID NO: 101820 - RNA, 32 nt, Homo Sapiens
aaccaagucucaacacuuacuauacauaagau

SEQ ID NO: 101821 - RNA, 32 nt, Homo Sapiens
ugugucucuguuagccuccuucuugcuuugua

SEQ ID NO: 101822 - RNA, 32 nt, Homo Sapiens
gccggguagccacagcggcagcuccagcccgg

SEQ ID NO: 101823 - RNA, 32 nt, Homo Sapiens
aaugcuucaacacgccacuggaugcagccagu

SEQ ID NO: 101824 - RNA, 32 nt, Homo Sapiens
cacuucgucuuacguuccgaaaggaaggcguc

SEQ ID NO: 101825 - RNA, 32 nt, Homo Sapiens
ugcaucggggauagcugauggugcuggagcug

SEQ ID NO: 101826 - RNA, 32 nt, Homo Sapiens
ccacagugcagucccucuguauucccagagug

SEQ ID NO: 101827 - RNA, 32 nt, Homo Sapiens
cgggcagugaacgcgcgccgggcgggaugggc

SEQ ID NO: 101828 - RNA, 32 nt, Homo Sapiens
cauugguagagcuggggugcucucaguuuccg

SEQ ID NO: 101829 - RNA, 32 nt, Homo Sapiens
ccugccugcccuccuucccaccuaccuaccca

SEQ ID NO: 101830 - RNA, 32 nt, Homo Sapiens
acuggguuaggaccugaggaccucacuuggcc

SEQ ID NO: 101831 - RNA, 32 nt, Homo Sapiens
cauuucccaucccccaucuccucaaccaccag

SEQ ID NO: 101832 - RNA, 32 nt, Homo Sapiens
aaccucuuccuaggccacguccagguccguag

SEQ ID NO: 101833 - RNA, 32 nt, Homo Sapiens
agugcuucgggaagaaggggacaauggcagaa

SEQ ID NO: 101834 - RNA, 32 nt, Homo Sapiens
cagggucucccucugucauccaggcuggagug

SEQ ID NO: 101835 - RNA, 32 nt, Homo Sapiens
uccuccuagcuagcggccgccgcccgccgccg

SEQ ID NO: 101836 - RNA, 32 nt, Homo Sapiens
ugccccugccuugauuagacuccuagcaccug

SEQ ID NO: 101837 - RNA, 32 nt, Homo Sapiens
uccuggccuuugcauguuccaucucuucucuu

SEQ ID NO: 101838 - RNA, 32 nt, Homo Sapiens
cucgccgccucccggacucucgucggacccuc

SEQ ID NO: 101839 - RNA, 32 nt, Homo Sapiens
gccggggcagagccaggcgcgcggaagucuga

SEQ ID NO: 101840 - RNA, 32 nt, Homo Sapiens
cagaaagacccugcgccugaccacgugggaac

SEQ ID NO: 101841 - RNA, 32 nt, Homo Sapiens
gcucggcagggcagcuggccucugggcaccgg

SEQ ID NO: 101842 - RNA, 32 nt, Homo Sapiens
ggccgggcgugguggcuccugccuguaauccc

SEQ ID NO: 101843 - RNA, 32 nt, Homo Sapiens
ggcuucagccucucccacccagcccugccccu

SEQ ID NO: 101844 - RNA, 32 nt, Homo Sapiens
aguuguuugcagucuucaguuguguucuuaug

SEQ ID NO: 101845 - RNA, 32 nt, Homo Sapiens
gggguaaagggagugggugcagugcccucucu

SEQ ID NO: 101846 - RNA, 32 nt, Homo Sapiens
ggcccgcucaggaugcccuggcccaggcuugg

SEQ ID NO: 101847 - RNA, 32 nt, Homo Sapiens
gagccauccacacuugccccagccuccuccaa

SEQ ID NO: 101848 - RNA, 32 nt, Homo Sapiens
ccccccgcucuuuccacggucucccucugaug

SEQ ID NO: 101849 - RNA, 32 nt, Homo Sapiens
uuguuuuaauaaaaugugucacugauuuuuua

SEQ ID NO: 101850 - RNA, 32 nt, Homo Sapiens
aacaugaccagagagaagauuuuugucaugau

SEQ ID NO: 101851 - RNA, 32 nt, Homo Sapiens
aagacaauuuuugauacuggaacuaugcuuug

SEQ ID NO: 101852 - RNA, 32 nt, Homo Sapiens
ggguaggcccugguaccacggguuucaggcug

SEQ ID NO: 101853 - RNA, 32 nt, Homo Sapiens
cagaauuacaagcaaaaauaacaaccagcacc

SEQ ID NO: 101854 - RNA, 32 nt, Homo Sapiens
gcacuuggggaggccaaggcgaguggauugcu

SEQ ID NO: 101855 - RNA, 32 nt, Homo Sapiens
guuugacgugcagcaugcacaccaggccuuaa

SEQ ID NO: 101856 - RNA, 32 nt, Homo Sapiens
ccgugccaggccgcccgccgggaugcaguggg

SEQ ID NO: 101857 - RNA, 32 nt, Homo Sapiens
caccaggagcaccuggacccccugcccgccac

SEQ ID NO: 101858 - RNA, 32 nt, Homo Sapiens
cacacagagaggaaacaauaaaucucagcuac

SEQ ID NO: 101859 - RNA, 32 nt, Homo Sapiens
cccuuccuggucccaacgccagcccuucaucc

SEQ ID NO: 101860 - RNA, 32 nt, Homo Sapiens
uggaccauaugaacucaaaacuaguuguggca

SEQ ID NO: 101861 - RNA, 32 nt, Homo Sapiens
cagggcugcccccaggcccaugaagccaauag

SEQ ID NO: 101862 - RNA, 32 nt, Homo Sapiens
aaugacauuggacuuuuuuuuauauaucugcu

SEQ ID NO: 101863 - RNA, 32 nt, Homo Sapiens
gcagagccgggcguuggagcccgcgcgcgcau

SEQ ID NO: 101864 - RNA, 32 nt, Homo Sapiens
gcuuugaggaacaugcauaagaaauguagcug

SEQ ID NO: 101865 - RNA, 32 nt, Homo Sapiens
aaaugcaaaugagacuccuggaaacugggugg

SEQ ID NO: 101866 - RNA, 32 nt, Homo Sapiens
ucuguagagaauaauuauuguaccagggcccg

SEQ ID NO: 101867 - RNA, 32 nt, Homo Sapiens
ccucgcagggacagcucugcccagcaucaccc

SEQ ID NO: 101868 - RNA, 30 nt, Homo Sapiens
ggagcugggucccuaguuacacagagaacc

SEQ ID NO: 101869 - RNA, 32 nt, Homo Sapiens
ccuguggccccgaggcugggacacuguguggc

SEQ ID NO: 101870 - RNA, 32 nt, Homo Sapiens
ugcagucaccucagcucugccugagaagaagc

SEQ ID NO: 101871 - RNA, 32 nt, Homo Sapiens
ccuggugacacagccuugagcaaaacagugag

SEQ ID NO: 101872 - RNA, 32 nt, Homo Sapiens
aaccaagccacagccuggcagcucugaucagg

SEQ ID NO: 101873 - RNA, 32 nt, Homo Sapiens
cucaaaaaaacacacacacacacacacacaca

SEQ ID NO: 101874 - RNA, 32 nt, Homo Sapiens
ggugcugcgagggucagcacugcacccgcccc

SEQ ID NO: 101875 - RNA, 32 nt, Homo Sapiens
agaacaaaacaaaaagccaccgcaauaauucg

SEQ ID NO: 101876 - RNA, 32 nt, Homo Sapiens
ggaguuagcuguauuuuuuuuaaaaaaagaaa

SEQ ID NO: 101877 - RNA, 32 nt, Homo Sapiens
uggaggccaccucagcuggagaacaugagcug

SEQ ID NO: 101878 - RNA, 32 nt, Homo Sapiens
cccaguacuuugagacgcugaggugggaggau

SEQ ID NO: 101879 - RNA, 32 nt, Homo Sapiens
agcccggcacagcccggaccgaaauuuugccg

SEQ ID NO: 101880 - RNA, 32 nt, Homo Sapiens
uauagaucuaucauauuuuaccuacauaugua

SEQ ID NO: 101881 - RNA, 30 nt, Homo Sapiens
guaucucuagauaagaagauaugcaccacg

SEQ ID NO: 101882 - RNA, 32 nt, Homo Sapiens
gagcaccccaccccggccccggccccuccugg

SEQ ID NO: 101883 - RNA, 32 nt, Homo Sapiens
gacuccggguggcaggcgcccgggggaauccc

SEQ ID NO: 101884 - RNA, 32 nt, Homo Sapiens
agcuuguuaaggccaaagaacagauugaaaau

SEQ ID NO: 101885 - RNA, 32 nt, Homo Sapiens
uuugucuugugucuuauuuauuacaaucucuc

SEQ ID NO: 101886 - RNA, 32 nt, Homo Sapiens
cuaauauuauugaagacaauuauuuucuuagc

SEQ ID NO: 101887 - RNA, 32 nt, Homo Sapiens
cacgaaggcgccaucuggugucugcaugggug

SEQ ID NO: 101888 - RNA, 32 nt, Homo Sapiens
uguggaaggggaggaacugugugguaugccca

SEQ ID NO: 101889 - RNA, 32 nt, Homo Sapiens
uuucuucaagugaaggcugugggaucuauuac

SEQ ID NO: 101890 - RNA, 32 nt, Homo Sapiens
ggaagggaagggggaccugggucucaaugggu

SEQ ID NO: 101891 - RNA, 32 nt, Homo Sapiens
uggccuccuggacucaaacuccugcuacaucc

SEQ ID NO: 101892 - RNA, 32 nt, Homo Sapiens
ucacaccgcgucuggugacaaccgaguggcug

SEQ ID NO: 101893 - RNA, 32 nt, Homo Sapiens
uaauuuguauaaaugauuuucuuguccuugcu

SEQ ID NO: 101894 - RNA, 32 nt, Homo Sapiens
guccaguuggaagagauuucagaugugcuaca

SEQ ID NO: 101895 - RNA, 32 nt, Homo Sapiens
guucuuucugcauagacucacuuguuaaauag

SEQ ID NO: 101896 - RNA, 32 nt, Homo Sapiens
ggaaaacggaagcuggcuggcugagaagaagc

SEQ ID NO: 101897 - RNA, 32 nt, Homo Sapiens
ucaugcagucauuugcagugaauuauuuauug

SEQ ID NO: 101898 - RNA, 32 nt, Homo Sapiens
gcugcucgcugcuggagcugccgcccgagcug

SEQ ID NO: 101899 - RNA, 32 nt, Homo Sapiens
ccugccggccccagcggcuccuuccaucccca

SEQ ID NO: 101900 - RNA, 32 nt, Homo Sapiens
aagcacccuuccgaaaaucaacacucgggaaa

SEQ ID NO: 101901 - RNA, 32 nt, Homo Sapiens
ucacauaugaagaggaaaauuugcagcugcca

SEQ ID NO: 101902 - RNA, 32 nt, Homo Sapiens
gugagggcacaccacugccaggggucagccuc

SEQ ID NO: 101903 - RNA, 32 nt, Homo Sapiens
aacaauccagcauuacuuaggaaaugcuacau

SEQ ID NO: 101904 - RNA, 32 nt, Homo Sapiens
cagcgcuucagcguuuuccccuggagggcgcc

SEQ ID NO: 101905 - RNA, 32 nt, Homo Sapiens
aaauguugcugaaaagcauggugcugguaaca

SEQ ID NO: 101906 - RNA, 32 nt, Homo Sapiens
ccaggagauggagccaguuggguguggcagau

SEQ ID NO: 101907 - RNA, 32 nt, Homo Sapiens
gggaguucuuugacgaacuuugauauguggaa

SEQ ID NO: 101908 - RNA, 32 nt, Homo Sapiens
agcugagcgugguggcgggcgccuguaguccc

SEQ ID NO: 101909 - RNA, 32 nt, Homo Sapiens
acacaaggcuggaagguugggacaccagaugg

SEQ ID NO: 101910 - RNA, 32 nt, Homo Sapiens
uuugucugcggugcugcggccgugggagccgg

SEQ ID NO: 101911 - RNA, 32 nt, Homo Sapiens
gagagcgggcagccuuccagguggacagaaau

SEQ ID NO: 101912 - RNA, 32 nt, Homo Sapiens
caugccacaaggacuuccuguccagcuccaac

SEQ ID NO: 101913 - RNA, 32 nt, Homo Sapiens
ccucgcuccccacccacccgggccccuuccuc

SEQ ID NO: 101914 - RNA, 32 nt, Homo Sapiens
ggcggcuccagaggucauuccucccccggaag

SEQ ID NO: 101915 - RNA, 32 nt, Homo Sapiens
ggcugacccgucugacuucccguccgugccga

SEQ ID NO: 101916 - RNA, 32 nt, Homo Sapiens
cuccccucaagccccagugggagcacggccca

SEQ ID NO: 101917 - RNA, 32 nt, Homo Sapiens
ugcgccccggcggcucuagggacccccggcgc

SEQ ID NO: 101918 - RNA, 32 nt, Homo Sapiens
cuaaggggagaagacuccaaccauaauaaaua

SEQ ID NO: 101919 - RNA, 32 nt, Homo Sapiens
auccuuugauucuccuucagcccucaccccug

SEQ ID NO: 101920 - RNA, 32 nt, Homo Sapiens
gcuugucccgggcagcggcccgggcccgcugc

SEQ ID NO: 101921 - RNA, 32 nt, Homo Sapiens
uaaauucacaugcaugauaggcauguuggaaa

SEQ ID NO: 101922 - RNA, 32 nt, Homo Sapiens
gguguuccagggugcauguuuccuucccauau

SEQ ID NO: 101923 - RNA, 32 nt, Homo Sapiens
agcaugggaaauguaaaggcagucuuucucug

SEQ ID NO: 101924 - RNA, 32 nt, Homo Sapiens
uccaucagacugaacuuacacuguauauuuug

SEQ ID NO: 101925 - RNA, 32 nt, Homo Sapiens
aggugucguccucaucgccaugugcacguguc

SEQ ID NO: 101926 - RNA, 32 nt, Homo Sapiens
ccgccacgcgcgcucgcaggaucggugcgugg

SEQ ID NO: 101927 - RNA, 32 nt, Homo Sapiens
ugaggggcuucccgcaccugaucgcgagaccc

SEQ ID NO: 101928 - RNA, 32 nt, Homo Sapiens
augccuccccccacccaacaucucucagguug

SEQ ID NO: 101929 - RNA, 32 nt, Homo Sapiens
cauguuuuaaacauuuaucaaugaagucaucc

SEQ ID NO: 101930 - RNA, 32 nt, Homo Sapiens
auuuggggugaaaaguuuuguuuucuaggucu

SEQ ID NO: 101931 - RNA, 32 nt, Homo Sapiens
cugucccaugguauuuaacauaaaaaaaaaua

SEQ ID NO: 101932 - RNA, 32 nt, Homo Sapiens
ugggcaccuccagcugccccugggaugcaggc

SEQ ID NO: 101933 - RNA, 31 nt, Homo Sapiens
cuguagaugcccuccaaauccuugguuaugg

SEQ ID NO: 101934 - RNA, 32 nt, Homo Sapiens
gagccguggggcuggggcagggggugucagcu

SEQ ID NO: 101935 - RNA, 29 nt, Homo Sapiens
auucuuauagugauucuaugcagaaguua

SEQ ID NO: 101936 - RNA, 32 nt, Homo Sapiens
ucugacuggagggauccaggaaggcuucgugg

SEQ ID NO: 101937 - RNA, 32 nt, Homo Sapiens
cucuguauguuguauuugaucauauuuaaagg

SEQ ID NO: 101938 - RNA, 32 nt, Homo Sapiens
acgugggugggaagaaaaagaaaauuaacagg

SEQ ID NO: 101939 - RNA, 32 nt, Homo Sapiens
gacccaacaagagcucucugccuccggucacu

SEQ ID NO: 101940 - RNA, 32 nt, Homo Sapiens
ugguucugcccuuggaagccacuuccugcuca

SEQ ID NO: 101941 - RNA, 32 nt, Homo Sapiens
aauuccauguguuugcugagguguaaagguaa

SEQ ID NO: 101942 - RNA, 32 nt, Homo Sapiens
ucagcccaggcacaacuucagcaggggauggc

SEQ ID NO: 101943 - RNA, 32 nt, Homo Sapiens
uuuuucuuuucuucuuuuuuauuauuuuuuuc

SEQ ID NO: 101944 - RNA, 32 nt, Homo Sapiens
aggcccugugcugcaacagagccccucugggg

SEQ ID NO: 101945 - RNA, 32 nt, Homo Sapiens
uaagacucugucaucauaccuguuacacguuc

SEQ ID NO: 101946 - RNA, 32 nt, Homo Sapiens
uuacaggugugagccaccgcgcccggccucuc

SEQ ID NO: 101947 - RNA, 32 nt, Homo Sapiens
uucagggcgcgagcgcgggcggugccgaccac

SEQ ID NO: 101948 - RNA, 32 nt, Homo Sapiens
uguuuccuauuaaaauacagacauuucuaccc

SEQ ID NO: 101949 - RNA, 32 nt, Homo Sapiens
gccuuuuucuguucuuguuuugaugguuuugu

SEQ ID NO: 101950 - RNA, 32 nt, Homo Sapiens
cggggcagcgccauguaccacaguggauggaa

SEQ ID NO: 101951 - RNA, 32 nt, Homo Sapiens
gccuauuuuuucugcuguaauuguucugggua

SEQ ID NO: 101952 - RNA, 32 nt, Homo Sapiens
gccagcauccgagccgccucuccggaauacca

SEQ ID NO: 101953 - RNA, 32 nt, Homo Sapiens
gcggagcagaucuggugguucuccggagagca

SEQ ID NO: 101954 - RNA, 32 nt, Homo Sapiens
ggguagaaaaggagaggguccgaggguggugg

SEQ ID NO: 101955 - RNA, 32 nt, Homo Sapiens
gccucugcaaggggaggcgcgcgaggcggcgc

SEQ ID NO: 101956 - RNA, 32 nt, Homo Sapiens
uccagcaacuucaguucucaccgaauuacugc

SEQ ID NO: 101957 - RNA, 32 nt, Homo Sapiens
ugccuguggccauacccgcucugccaggcccu

SEQ ID NO: 101958 - RNA, 32 nt, Homo Sapiens
agaaauguauaccaccaauuuagaaauuguug

SEQ ID NO: 101959 - RNA, 32 nt, Homo Sapiens
aagagguuuacuauugaugcuuagggucgucu

SEQ ID NO: 101960 - RNA, 32 nt, Homo Sapiens
cgucccgaguccgcugcucgccggcggccgcc

SEQ ID NO: 101961 - RNA, 32 nt, Homo Sapiens
aaauggaacagaaaacaugaaaaaauaauaug

SEQ ID NO: 101962 - RNA, 32 nt, Homo Sapiens
cagauggacaaaauguauaugguacagaugua

SEQ ID NO: 101963 - RNA, 32 nt, Homo Sapiens
cugcuucuuucugcaguagaagcgugugcugg

SEQ ID NO: 101964 - RNA, 32 nt, Homo Sapiens
aggcuggaaauuccauaagaguuaagggugcu

SEQ ID NO: 101965 - RNA, 32 nt, Homo Sapiens
uaguauuucuucccuuccuuagcacaaaauac

SEQ ID NO: 101966 - RNA, 32 nt, Homo Sapiens
uguuugcggcggguccggggccuggaagcgcg

SEQ ID NO: 101967 - RNA, 32 nt, Homo Sapiens
uuguccucacuugcuuuaggucucucuuuccc

SEQ ID NO: 101968 - RNA, 32 nt, Homo Sapiens
gaagguaacaaggugacuguuuuugugagcca

SEQ ID NO: 101969 - RNA, 32 nt, Homo Sapiens
caaccccacacgcuccucccucugaggcugua

SEQ ID NO: 101970 - RNA, 32 nt, Homo Sapiens
aaauguggcugauuuucuuaauuauaauggua

SEQ ID NO: 101971 - RNA, 32 nt, Homo Sapiens
gccguguugaagaguucugacugcacaaacca

SEQ ID NO: 101972 - RNA, 32 nt, Homo Sapiens
gcaccuuuaaucuuggguguucuauucauugc

SEQ ID NO: 101973 - RNA, 32 nt, Homo Sapiens
ccaucaggauggucccugguccuuagagaggg

SEQ ID NO: 101974 - RNA, 32 nt, Homo Sapiens
acccuuugucccucaccuauauauacacggac

SEQ ID NO: 101975 - RNA, 32 nt, Homo Sapiens
aacuuuuuacauauggugaggugcguaaggaa

SEQ ID NO: 101976 - RNA, 32 nt, Homo Sapiens
ucucuaauuggccacuuauugggaugggcagg

SEQ ID NO: 101977 - RNA, 32 nt, Homo Sapiens
ggguaaguggccuggugaguggagguagaaaa

SEQ ID NO: 101978 - RNA, 32 nt, Homo Sapiens
ggaacccaagcaguagagagcgauauuggagu

SEQ ID NO: 101979 - RNA, 28 nt, Homo Sapiens
gucuguugcugaggaccaaggaggagaa

SEQ ID NO: 101980 - RNA, 32 nt, Homo Sapiens
caggugucugaugggggcucacuuccuggcuu

SEQ ID NO: 101981 - RNA, 32 nt, Homo Sapiens
guauuuaaagcacaguuuguuuuucugucacc

SEQ ID NO: 101982 - RNA, 32 nt, Homo Sapiens
ccucuagggugugaagcagagauggcucacaa

SEQ ID NO: 101983 - RNA, 32 nt, Homo Sapiens
gaaaaaaaaaaaaaacaaaacauuuaaggggu

SEQ ID NO: 101984 - RNA, 32 nt, Homo Sapiens
auauguuuacacaauuaauucaucccuuaauu

SEQ ID NO: 101985 - RNA, 32 nt, Homo Sapiens
agcacccucuccccggccuccucugucugcac

SEQ ID NO: 101986 - RNA, 32 nt, Homo Sapiens
gcuggggcgaaaagggggcgccgggccgcucu

SEQ ID NO: 101987 - RNA, 32 nt, Homo Sapiens
aaaaagaacaaacauguuuuugugaaagcuac

SEQ ID NO: 101988 - RNA, 32 nt, Homo Sapiens
agaaacuaucaugagcauccauauguggcagg

SEQ ID NO: 101989 - RNA, 32 nt, Homo Sapiens
uuuuugaaaauauuucuguacaugacuuuacu

SEQ ID NO: 101990 - RNA, 32 nt, Homo Sapiens
acuucucugugccugcucagaggcgcccuagg

SEQ ID NO: 101991 - RNA, 32 nt, Homo Sapiens
acaucaacaugggucagcacguucaguuacgg

SEQ ID NO: 101992 - RNA, 32 nt, Homo Sapiens
uggucuuccagaugggagucauauucccacaa

SEQ ID NO: 101993 - RNA, 32 nt, Homo Sapiens
uguucacugcuuuaugauauucccuuauuagu

SEQ ID NO: 101994 - RNA, 32 nt, Homo Sapiens
agucagcccggccugggcauggagcgcggggu

SEQ ID NO: 101995 - RNA, 32 nt, Homo Sapiens
agucugaccccucucuccaccccugggcuaug

SEQ ID NO: 101996 - RNA, 32 nt, Homo Sapiens
agccaguaugaccuaucuuaaucaucagcuca

SEQ ID NO: 101997 - RNA, 32 nt, Homo Sapiens
ugacugcucugcuuaaaggugaaaguagcagg

SEQ ID NO: 101998 - RNA, 32 nt, Homo Sapiens
agccaggauugccucagcuccucccccucagg

SEQ ID NO: 101999 - RNA, 32 nt, Homo Sapiens
aucucaacuggacuucccgcccuccuucucca

SEQ ID NO: 102000 - RNA, 32 nt, Homo Sapiens
cacauagaggaaggugaaugggaagcuaaagc

SEQ ID NO: 102001 - RNA, 32 nt, Homo Sapiens
ccuguucaccagcuggaugaccucaggcaaau

SEQ ID NO: 102002 - RNA, 32 nt, Homo Sapiens
cagcuaauuuuuguauuuuugguagagauggg

SEQ ID NO: 102003 - RNA, 32 nt, Homo Sapiens
ggucugagguaccccugagccaucuccugcuu

SEQ ID NO: 102004 - RNA, 32 nt, Homo Sapiens
agacuauguuuccucccuccuuuccuguccuc

SEQ ID NO: 102005 - RNA, 32 nt, Homo Sapiens
agagaagugucuaaaagcuucaaaauguucca

SEQ ID NO: 102006 - RNA, 32 nt, Homo Sapiens
gugucauaaaaggauucacacuggagagaaac

SEQ ID NO: 102007 - RNA, 32 nt, Homo Sapiens
acacgcuauacuuaacagggcaucauagaaua

SEQ ID NO: 102008 - RNA, 32 nt, Homo Sapiens
ucuuuaucaaggagauauaucaguguugucuc

SEQ ID NO: 102009 - RNA, 32 nt, Homo Sapiens
gccgccgccccgagucccgguaccaugcauuu

SEQ ID NO: 102010 - RNA, 32 nt, Homo Sapiens
acagcuucagaauucaucaggaccaagaaagg

SEQ ID NO: 102011 - RNA, 32 nt, Homo Sapiens
auuaugucagagauugcaucauccuucugcuu

SEQ ID NO: 102012 - RNA, 32 nt, Homo Sapiens
acagcuaguguuuuuuaccauccgucauuacc

SEQ ID NO: 102013 - RNA, 32 nt, Homo Sapiens
acagcucacuccaaaaaugagcgggacuccca

SEQ ID NO: 102014 - RNA, 32 nt, Homo Sapiens
gggcucuagcaccacccuccccuccccgcaca

SEQ ID NO: 102015 - RNA, 32 nt, Homo Sapiens
agucucuacuaauaauacaaaaauuagcuggg

SEQ ID NO: 102016 - RNA, 32 nt, Homo Sapiens
uccagauaacguccuuaagaccaucuguucag

SEQ ID NO: 102017 - RNA, 32 nt, Homo Sapiens
ggucaguaggggcccccuccccacauggcccu

SEQ ID NO: 102018 - RNA, 32 nt, Homo Sapiens
uacguuucccggguccuucuggcacuccucug

SEQ ID NO: 102019 - RNA, 32 nt, Homo Sapiens
ggcuucccacccauaagcucugggauacccag

SEQ ID NO: 102020 - RNA, 32 nt, Homo Sapiens
aaccuaaaaaucaaucacuugaaagugaacaa

SEQ ID NO: 102021 - RNA, 32 nt, Homo Sapiens
ucugcuuugguccuuccaccacccccaccaag

SEQ ID NO: 102022 - RNA, 32 nt, Homo Sapiens
guggcgcggcgcguuggagacuuuauugcgau

SEQ ID NO: 102023 - RNA, 32 nt, Homo Sapiens
acccccgaugccaccacagccaucgccacugc

SEQ ID NO: 102024 - RNA, 32 nt, Homo Sapiens
ugagaggagcuuagaaacgaccaagaagagag

SEQ ID NO: 102025 - RNA, 32 nt, Homo Sapiens
ugggugcuggcucgcggcgcauguucagugug

SEQ ID NO: 102026 - RNA, 32 nt, Homo Sapiens
uaaauuuuaauucaaaucaugucuguaaaacu

SEQ ID NO: 102027 - RNA, 32 nt, Homo Sapiens
uguuaaaauuuauacaguuauucuuuuggugc

SEQ ID NO: 102028 - RNA, 32 nt, Homo Sapiens
aagcuacuuuugugggaguauuucuauuauau

SEQ ID NO: 102029 - RNA, 32 nt, Homo Sapiens
guuaguucaaggaaccaaacucugguccugac

SEQ ID NO: 102030 - RNA, 32 nt, Homo Sapiens
uauuggacauggauuaaacauaaaauaaagaa

SEQ ID NO: 102031 - RNA, 32 nt, Homo Sapiens
gaaugccucuaagauuucuucauuaauuauaa

SEQ ID NO: 102032 - RNA, 32 nt, Homo Sapiens
aucaaggcccugggcuggaggaagacauccca

SEQ ID NO: 102033 - RNA, 32 nt, Homo Sapiens
acgcugcuuuuaacauaacagagcaacaucac

SEQ ID NO: 102034 - RNA, 32 nt, Homo Sapiens
aagcagcgccgccccaucggcgcggagcuccg

SEQ ID NO: 102035 - RNA, 32 nt, Homo Sapiens
gaaccucugagagcauuuuccuguucccccua

SEQ ID NO: 102036 - RNA, 32 nt, Homo Sapiens
caggucaaggucuuacuccagcccuuccuggg

SEQ ID NO: 102037 - RNA, 32 nt, Homo Sapiens
uuguaaggggaagagggaaauguacacuuuuu

SEQ ID NO: 102038 - RNA, 32 nt, Homo Sapiens
gggccagcucauaaaaagccugaaugccaagc

SEQ ID NO: 102039 - RNA, 32 nt, Homo Sapiens
gccuguccagguuuccuucccuuucccaagcc

SEQ ID NO: 102040 - RNA, 32 nt, Homo Sapiens
gaccccuuccccgccccucucccggccggccu

SEQ ID NO: 102041 - RNA, 32 nt, Homo Sapiens
gcagcggaccggcgggagacggcggcuugcga

SEQ ID NO: 102042 - RNA, 32 nt, Homo Sapiens
gggagcgauccggcgcugacagccccgcucag

SEQ ID NO: 102043 - RNA, 32 nt, Homo Sapiens
uauuucauaaccuguuuugaucugucugcaua

SEQ ID NO: 102044 - RNA, 32 nt, Homo Sapiens
gcgcuggggagcuucuagggcuuccugggguu

SEQ ID NO: 102045 - RNA, 32 nt, Homo Sapiens
gugggaggucagaggagaugggggccggcucu

SEQ ID NO: 102046 - RNA, 32 nt, Homo Sapiens
cuaaaaaagacuaucucuaaucaaggcuagaa

SEQ ID NO: 102047 - RNA, 32 nt, Homo Sapiens
uucggcugcccccaaggccaggcauccagugu

SEQ ID NO: 102048 - RNA, 32 nt, Homo Sapiens
cugcuggcugagaaggagguguguggcuccgg

SEQ ID NO: 102049 - RNA, 32 nt, Homo Sapiens
gcugcaggcuccugggcgauuguagcgggacc

SEQ ID NO: 102050 - RNA, 32 nt, Homo Sapiens
aaagacaugagcaaccuaaugggaagaggaaa

SEQ ID NO: 102051 - RNA, 32 nt, Homo Sapiens
ugggaggaucaccugaugucgggaguuugaga

SEQ ID NO: 102052 - RNA, 32 nt, Homo Sapiens
aguacuguauaaaaaacagaauuguguuuuau

SEQ ID NO: 102053 - RNA, 32 nt, Homo Sapiens
uucuauuuuuugcugguaguccgcauacccau

SEQ ID NO: 102054 - RNA, 32 nt, Homo Sapiens
ccagccagacuggcagaugggggcuucccccu

SEQ ID NO: 102055 - RNA, 32 nt, Homo Sapiens
accuucaucuuucugaccuccuccuauucugu

SEQ ID NO: 102056 - RNA, 32 nt, Homo Sapiens
auccuagguggugggggagucaugcucccuuu

SEQ ID NO: 102057 - RNA, 32 nt, Homo Sapiens
aaggauagguauucaucuggggccugauaccc

SEQ ID NO: 102058 - RNA, 32 nt, Homo Sapiens
gcccgugugucuguguguaugugugugggggu

SEQ ID NO: 102059 - RNA, 32 nt, Homo Sapiens
guugaauugcaaacagguuggauagaagaguc

SEQ ID NO: 102060 - RNA, 32 nt, Homo Sapiens
ccuaauguucauuuauuuucuaaauccagccg

SEQ ID NO: 102061 - RNA, 32 nt, Homo Sapiens
aucuaugaauguuuuucuuaaaauuuacaaag

SEQ ID NO: 102062 - RNA, 32 nt, Homo Sapiens
cccuagaucaguacuggcucugggacagguga

SEQ ID NO: 102063 - RNA, 32 nt, Homo Sapiens
ccagccauacaagagcuguugcagcuguccca

SEQ ID NO: 102064 - RNA, 32 nt, Homo Sapiens
gauccuagaaaagaggccacucaggaugggga

SEQ ID NO: 102065 - RNA, 32 nt, Homo Sapiens
aagggggguggcugccuggagccccguagcca

SEQ ID NO: 102066 - RNA, 25 nt, Homo Sapiens
ccaccuccacccagccccuggcccc

SEQ ID NO: 102067 - RNA, 32 nt, Homo Sapiens
uccagggcccgcggccgcggguucgcgagcac

SEQ ID NO: 102068 - RNA, 32 nt, Homo Sapiens
accuucucuggacucccugcuuccaugcuuuc

SEQ ID NO: 102069 - RNA, 32 nt, Homo Sapiens
uuuuacuguuaacauucaugucauauugcauu

SEQ ID NO: 102070 - RNA, 32 nt, Homo Sapiens
aaagaacacugaaaggugauguguguggauga

SEQ ID NO: 102071 - RNA, 32 nt, Homo Sapiens
cugccuccagcaugcuagauuuguagacuggc

SEQ ID NO: 102072 - RNA, 32 nt, Homo Sapiens
ucuuguaaauguucccugacaauguuuguaau

SEQ ID NO: 102073 - RNA, 32 nt, Homo Sapiens
uccucaguaugugggggcuucaucucuuuaga

SEQ ID NO: 102074 - RNA, 32 nt, Homo Sapiens
cucugagggcuggggggcagggggcaugcacc

SEQ ID NO: 102075 - RNA, 32 nt, Homo Sapiens
gguuucaccaugcuagcaaggauggucucgau

SEQ ID NO: 102076 - RNA, 32 nt, Homo Sapiens
aagcaggagagccagcagcacuuccagcauuu

SEQ ID NO: 102077 - RNA, 32 nt, Homo Sapiens
cuggccaggggcccgagcugcccccacccccg

SEQ ID NO: 102078 - RNA, 32 nt, Homo Sapiens
auuccugacaacagacagaaaagaggcaaacc

SEQ ID NO: 102079 - RNA, 32 nt, Homo Sapiens
gcggguccuucccaugcuggucuugugauaau

SEQ ID NO: 102080 - RNA, 32 nt, Homo Sapiens
agcuuuuuuuuuucuuuuuucgaaugcccaaa

SEQ ID NO: 102081 - RNA, 32 nt, Homo Sapiens
ugguaauauuuuucacauccauaaaaacaacu

SEQ ID NO: 102082 - RNA, 32 nt, Homo Sapiens
cucaauuacccacuuaaaucugcagggaaugg

SEQ ID NO: 102083 - RNA, 31 nt, Homo Sapiens
cuccucucacggaaaggucgcggccuguggc

SEQ ID NO: 102084 - RNA, 28 nt, Homo Sapiens
gagcucgggcggccguggaggaacucag

SEQ ID NO: 102085 - RNA, 32 nt, Homo Sapiens
ggcccccaagguggucaugacuggucucauuu

SEQ ID NO: 102086 - RNA, 32 nt, Homo Sapiens
ccuggaucugcagcccacacgugggagucugg

SEQ ID NO: 102087 - RNA, 32 nt, Homo Sapiens
uuaaguuaaaagacaaugaguaaauauuauaa

SEQ ID NO: 102088 - RNA, 32 nt, Homo Sapiens
aagcuccugucgcuccucuuuguccccucagu

SEQ ID NO: 102089 - RNA, 32 nt, Homo Sapiens
ucugggagguggucccuggcccccuccuccuu

SEQ ID NO: 102090 - RNA, 31 nt, Homo Sapiens
gaauuuauuauuaaaucaguuuuguguacag

SEQ ID NO: 102091 - RNA, 32 nt, Homo Sapiens
uauugaaauauuacagauggaaagaaugaggc

SEQ ID NO: 102092 - RNA, 32 nt, Homo Sapiens
uaucaauuacaaugaugauauuucacuacagc

SEQ ID NO: 102093 - RNA, 32 nt, Homo Sapiens
ggucccgcgcugccuccgccgcuccucggaug

SEQ ID NO: 102094 - RNA, 32 nt, Homo Sapiens
uuucucauacccagauaguagauuauucacuu

SEQ ID NO: 102095 - RNA, 32 nt, Homo Sapiens
uguggugucaggacagccugugcggccucauu

SEQ ID NO: 102096 - RNA, 32 nt, Homo Sapiens
aaguugccaagaguucuuuaggugccuccugu

SEQ ID NO: 102097 - RNA, 32 nt, Homo Sapiens
cagccucagccagcuggaggaguuuggccggc

SEQ ID NO: 102098 - RNA, 32 nt, Homo Sapiens
aggcgagagggagagcgugcgcgagaggagag

SEQ ID NO: 102099 - RNA, 32 nt, Homo Sapiens
aacuucaagugauuuagauaucuaucuaucua

SEQ ID NO: 102100 - RNA, 32 nt, Homo Sapiens
uccuuuuacugcguagaaccuauaucgagagu

SEQ ID NO: 102101 - RNA, 32 nt, Homo Sapiens
ggcgcagaggcuuuuccaguguguauaaaucc

SEQ ID NO: 102102 - RNA, 32 nt, Homo Sapiens
aggucucuuuuaacaagucucaucuuaaaaua

SEQ ID NO: 102103 - RNA, 32 nt, Homo Sapiens
cugauagcaauaacuuaagcacaccuuuauaa

SEQ ID NO: 102104 - RNA, 28 nt, Homo Sapiens
ucccggaccggaccgccgaggggagcug

SEQ ID NO: 102105 - RNA, 32 nt, Homo Sapiens
acuaauaagaaaguuugcuacaguauuuacug

SEQ ID NO: 102106 - RNA, 32 nt, Homo Sapiens
gcccugucccaucccccuccccggguuccuuc

SEQ ID NO: 102107 - RNA, 32 nt, Homo Sapiens
uccuguuaguaaauaaaauuaacaaauuucuu

SEQ ID NO: 102108 - RNA, 32 nt, Homo Sapiens
ccuggagcuauauguuuuuuuagcuuacuauu

SEQ ID NO: 102109 - RNA, 32 nt, Homo Sapiens
uguuaguuccacucuuggucuuucacgcuccc

SEQ ID NO: 102110 - RNA, 32 nt, Homo Sapiens
auuaggcccuggaugaguagcgcuauaguuac

SEQ ID NO: 102111 - RNA, 31 nt, Homo Sapiens
aaagcagugaauuguaagugugagguguguu

SEQ ID NO: 102112 - RNA, 30 nt, Homo Sapiens
uugcuaugggagauuggaugacuguuacag

SEQ ID NO: 102113 - RNA, 32 nt, Homo Sapiens
cagaagucaauacacaaaugugccaggcagag

SEQ ID NO: 102114 - RNA, 32 nt, Homo Sapiens
gcuuugucaacucagcugggaacauuucccag

SEQ ID NO: 102115 - RNA, 32 nt, Homo Sapiens
acgccguccgcucaggaggcgccccgcgaccg

SEQ ID NO: 102116 - RNA, 32 nt, Homo Sapiens
gcgccugccccagagcucccaagccccugccc

SEQ ID NO: 102117 - RNA, 32 nt, Homo Sapiens
cccucauagaaagugaaugggagcuacggaca

SEQ ID NO: 102118 - RNA, 32 nt, Homo Sapiens
guuuuugucagguuugucaaagaucagauagu

SEQ ID NO: 102119 - RNA, 32 nt, Homo Sapiens
agcugcaccccucccuuccuggagggauggcc

SEQ ID NO: 102120 - RNA, 32 nt, Homo Sapiens
ucccacaaccucaaagccccgaaagcccuccg

SEQ ID NO: 102121 - RNA, 32 nt, Homo Sapiens
gcugcgucguggaagucaccccauuuccccag

SEQ ID NO: 102122 - RNA, 32 nt, Homo Sapiens
cucucccguccucgccucugucgacuaucagg

SEQ ID NO: 102123 - RNA, 32 nt, Homo Sapiens
cgcggcaggaugaggugcugcaggcacgggcc

SEQ ID NO: 102124 - RNA, 32 nt, Homo Sapiens
cacgcuugccguauccuucuccagucguauuu

SEQ ID NO: 102125 - RNA, 32 nt, Homo Sapiens
acauuggcgccugccuucuggccacgcuggcg

SEQ ID NO: 102126 - RNA, 32 nt, Homo Sapiens
uugugguagcuguuacaaguauagaaauaaau

SEQ ID NO: 102127 - RNA, 32 nt, Homo Sapiens
ccccagcagagacuggagagccagaggccccu

SEQ ID NO: 102128 - RNA, 32 nt, Homo Sapiens
gcuauuaagaaacuaagguacggugagacucu

SEQ ID NO: 102129 - RNA, 28 nt, Homo Sapiens
cguggguaggcucucaggaugacucuug

SEQ ID NO: 102130 - RNA, 32 nt, Homo Sapiens
ugguuaucggccggcccgguggcuuggcaggc

SEQ ID NO: 102131 - RNA, 32 nt, Homo Sapiens
cuuuguacauacaaaaucaugucugcaaauag

SEQ ID NO: 102132 - RNA, 32 nt, Homo Sapiens
gguaaaaugucaggaacaacuuuccucuuauu

SEQ ID NO: 102133 - RNA, 32 nt, Homo Sapiens
aaaucgucguuguucagaguccagauggcagu

SEQ ID NO: 102134 - RNA, 32 nt, Homo Sapiens
ccacccuaaaauucuugauacccauuccguga

SEQ ID NO: 102135 - RNA, 32 nt, Homo Sapiens
aacaauugguaacacucaccaauauaacuguu

SEQ ID NO: 102136 - RNA, 32 nt, Homo Sapiens
uggucuaaaaauuauauuaaacauuuauuuug

SEQ ID NO: 102137 - RNA, 32 nt, Homo Sapiens
uauauuuuuuauugccauuuuguccuuugauu

SEQ ID NO: 102138 - RNA, 32 nt, Homo Sapiens
ccagccauccggccaaucccgccccgccgcgc

SEQ ID NO: 102139 - RNA, 32 nt, Homo Sapiens
gcagggucucaaagagauaucuguacacccgu

SEQ ID NO: 102140 - RNA, 32 nt, Homo Sapiens
cucaaguacaugguuucauacugggguuucug

SEQ ID NO: 102141 - RNA, 32 nt, Homo Sapiens
augagcugggugugguggcgggcccccguagu

SEQ ID NO: 102142 - RNA, 32 nt, Homo Sapiens
accccuggaggcggcggcggcggcgagggagc

SEQ ID NO: 102143 - RNA, 26 nt, Homo Sapiens
uccuuaaaauacuuugaaaauauggc

SEQ ID NO: 102144 - RNA, 32 nt, Homo Sapiens
guaaauaaaccacugugcgucuugguguaauu

SEQ ID NO: 102145 - RNA, 32 nt, Homo Sapiens
ggagggaggucuguucuaucuguugcuguaaa

SEQ ID NO: 102146 - RNA, 32 nt, Homo Sapiens
gaaaaauguuaaaaucuaaagaguaauuuauc

SEQ ID NO: 102147 - RNA, 32 nt, Homo Sapiens
gggcagccccucucagacgaggaggcagcggg

SEQ ID NO: 102148 - RNA, 32 nt, Homo Sapiens
ggcccaauuucucucacuucugcaugaaguca

SEQ ID NO: 102149 - RNA, 32 nt, Homo Sapiens
cccucugugguggucacuguuuuucucucuug

SEQ ID NO: 102150 - RNA, 32 nt, Homo Sapiens
cuuuauuucauccacaccccaauucuggccca

SEQ ID NO: 102151 - RNA, 32 nt, Homo Sapiens
gagccggggaggaggggguugcagugagccga

SEQ ID NO: 102152 - RNA, 32 nt, Homo Sapiens
uggcaaaaacaaugacauugagaugaagcgug

SEQ ID NO: 102153 - RNA, 32 nt, Homo Sapiens
aauccucucuugaguguggaccucaacaccuu

SEQ ID NO: 102154 - RNA, 32 nt, Homo Sapiens
agaggugcgcgcugcgcgugggaucagcccgg

SEQ ID NO: 102155 - RNA, 32 nt, Homo Sapiens
cuuguuuguauauaauacaauguguacaugua

SEQ ID NO: 102156 - RNA, 32 nt, Homo Sapiens
uuaagaacauuugaugcaagauggccagcacu

SEQ ID NO: 102157 - RNA, 32 nt, Homo Sapiens
gcuuccaccccucccuggagaaugguggcuaa

SEQ ID NO: 102158 - RNA, 32 nt, Homo Sapiens
ucccuuuugcuuaauuacuggguuuucugggc

SEQ ID NO: 102159 - RNA, 32 nt, Homo Sapiens
agaugauggugggagagugcugacauacuaug

SEQ ID NO: 102160 - RNA, 32 nt, Homo Sapiens
ggugacuuuccucugcagaaagcaaaguuugg

SEQ ID NO: 102161 - RNA, 32 nt, Homo Sapiens
uccuguguccucccggccccgccggaucccug

SEQ ID NO: 102162 - RNA, 32 nt, Homo Sapiens
uauacagguacaaauauaaggccuuaaguaaa

SEQ ID NO: 102163 - RNA, 32 nt, Homo Sapiens
gccuggaucugcgaccccagccugagccuagu

SEQ ID NO: 102164 - RNA, 32 nt, Homo Sapiens
auauauagauauauuuuaguaaaaaaggaaca

SEQ ID NO: 102165 - RNA, 32 nt, Homo Sapiens
ccugggggguuugaggcugggcugggaggggg

SEQ ID NO: 102166 - RNA, 32 nt, Homo Sapiens
ucuauggcagcaugcauguauaggccgaacua

SEQ ID NO: 102167 - RNA, 32 nt, Homo Sapiens
gggacuggucacugccucaggacccccaagcc

SEQ ID NO: 102168 - RNA, 32 nt, Homo Sapiens
ucuuuaauagcacagcaaacaucuuuucagaa

SEQ ID NO: 102169 - RNA, 32 nt, Homo Sapiens
ccuagcgcgggccagcggcgcacggugggcag

SEQ ID NO: 102170 - RNA, 32 nt, Homo Sapiens
gguguggccaaugaaauugaagaggaagucua

SEQ ID NO: 102171 - RNA, 32 nt, Homo Sapiens
uguccuccauuuccuuuucucauccaaaauaa

SEQ ID NO: 102172 - RNA, 32 nt, Homo Sapiens
aaacaguagaaccuguguaaccucaaggagau

SEQ ID NO: 102173 - RNA, 32 nt, Homo Sapiens
acaugauugcucucugucucuuuuuucagcuu

SEQ ID NO: 102174 - RNA, 32 nt, Homo Sapiens
cagaaaugagagauuaggagcugggagaagag

SEQ ID NO: 102175 - RNA, 32 nt, Homo Sapiens
cugccaauucagcuccucuggaguggagcuuu

SEQ ID NO: 102176 - RNA, 32 nt, Homo Sapiens
cguccccggccgcggcgugaugcgcgcggacc

SEQ ID NO: 102177 - RNA, 32 nt, Homo Sapiens
uauucuuuauggcuuuuaaauaaauauacaau

SEQ ID NO: 102178 - RNA, 32 nt, Homo Sapiens
uggguauuacuugaguaguaguagcaaguacc

SEQ ID NO: 102179 - RNA, 32 nt, Homo Sapiens
uuucacuacaguguucugcaauaguuggagca

SEQ ID NO: 102180 - RNA, 32 nt, Homo Sapiens
uguuccagccugaccuagaagcguuugucagc

SEQ ID NO: 102181 - RNA, 32 nt, Homo Sapiens
ggaaaaugacauuuuuuuuucuuucuaguccu

SEQ ID NO: 102182 - RNA, 32 nt, Homo Sapiens
gcagucugccuugucuguggagcugcucucuc

SEQ ID NO: 102183 - RNA, 28 nt, Homo Sapiens
gagcugagccuggaugcugagcccauug

SEQ ID NO: 102184 - RNA, 32 nt, Homo Sapiens
ggaacaucaaggauggauuaucccaaaaugga

SEQ ID NO: 102185 - RNA, 32 nt, Homo Sapiens
ugccuagcacugggcaggggccuuggugggca

SEQ ID NO: 102186 - RNA, 32 nt, Homo Sapiens
ccauccacccgccgcuucuuuccuccaucuag

SEQ ID NO: 102187 - RNA, 32 nt, Homo Sapiens
cccuucuucccacagcaauauccccaauacgu

SEQ ID NO: 102188 - RNA, 32 nt, Homo Sapiens
accucgucagagucucagcaucaggcaaacuu

SEQ ID NO: 102189 - RNA, 32 nt, Homo Sapiens
gcuucccacagcagcccaggcuccacagacac

SEQ ID NO: 102190 - RNA, 32 nt, Homo Sapiens
uggcaaacaauccuaaaauauacaagacuaca

SEQ ID NO: 102191 - RNA, 32 nt, Homo Sapiens
guggcuccagagcccauccucuucccacugcu

SEQ ID NO: 102192 - RNA, 32 nt, Homo Sapiens
uuagcuagcauuagcauaauuaccgacguugc

SEQ ID NO: 102193 - RNA, 32 nt, Homo Sapiens
cuucagggguacccaugcccccugcccucgcc

SEQ ID NO: 102194 - RNA, 32 nt, Homo Sapiens
ccucugaggguggagaaggaggcgggugaugu

SEQ ID NO: 102195 - RNA, 32 nt, Homo Sapiens
agacucgggugggggucccggcggcgguagcg

SEQ ID NO: 102196 - RNA, 32 nt, Homo Sapiens
gcggacuccgcggacaaggccaggccuagccu

SEQ ID NO: 102197 - RNA, 32 nt, Homo Sapiens
cuauucucuuugcucacuggcucuccuauaau

SEQ ID NO: 102198 - RNA, 32 nt, Homo Sapiens
acuuugcucacucgcucugccauggugccaug

SEQ ID NO: 102199 - RNA, 32 nt, Homo Sapiens
ccguguucaagcaauucuccuaccucagccua

SEQ ID NO: 102200 - RNA, 32 nt, Homo Sapiens
uccucggcugccgccgccuucuccgggacucg

SEQ ID NO: 102201 - RNA, 32 nt, Homo Sapiens
agcucggacguagaagcccagcccuccgugag

SEQ ID NO: 102202 - RNA, 32 nt, Homo Sapiens
uuaggaaugaacuucugagggccaaaaaaugu

SEQ ID NO: 102203 - RNA, 32 nt, Homo Sapiens
agguagaguuguuggcagaaauccugggauaa

SEQ ID NO: 102204 - RNA, 32 nt, Homo Sapiens
gccuccugccggcuccacgggcacuuucuacu

SEQ ID NO: 102205 - RNA, 32 nt, Homo Sapiens
auucccauuguuauaugauaguauuucagcua

SEQ ID NO: 102206 - RNA, 32 nt, Homo Sapiens
ccuggccuaagcauguaugaccagaagaagug

SEQ ID NO: 102207 - RNA, 32 nt, Homo Sapiens
gcacuggaauggggacauucacucccaccuaa

SEQ ID NO: 102208 - RNA, 32 nt, Homo Sapiens
cuccagaaccaccccggcccccugcccguucu

SEQ ID NO: 102209 - RNA, 32 nt, Homo Sapiens
uuugcccauuucuccuucguaaauccauccuc

SEQ ID NO: 102210 - RNA, 32 nt, Homo Sapiens
ugagaagaaaucacaccacugcacucuagccu

SEQ ID NO: 102211 - RNA, 32 nt, Homo Sapiens
aguaucuucuaaagacuuuauauuuuugccuu

SEQ ID NO: 102212 - RNA, 32 nt, Homo Sapiens
aagcggggaguaugguggggguccuggccaug

SEQ ID NO: 102213 - RNA, 32 nt, Homo Sapiens
uuaugggcugggcauccagagaucgcccugac

SEQ ID NO: 102214 - RNA, 32 nt, Homo Sapiens
cacgggaggguggggcggcugggaagcuggca

SEQ ID NO: 102215 - RNA, 31 nt, Homo Sapiens
cuagcgagggcgggccggccggcccggaugg

SEQ ID NO: 102216 - RNA, 32 nt, Homo Sapiens
gguaccggggcuugggggcgcuccuggaggug

SEQ ID NO: 102217 - RNA, 32 nt, Homo Sapiens
auuaaugcaugauuaacuacucucucaguaca

SEQ ID NO: 102218 - RNA, 32 nt, Homo Sapiens
aaaaaacaagcacacuucucaccccuauggag

SEQ ID NO: 102219 - RNA, 32 nt, Homo Sapiens
cgauuaaaaaaguucuugcagguaauguuuau

SEQ ID NO: 102220 - RNA, 32 nt, Homo Sapiens
auuccgauccuagcugcagaucgcaucccaca

SEQ ID NO: 102221 - RNA, 32 nt, Homo Sapiens
gucccacguuguacgugaauguuuaugugcuc

SEQ ID NO: 102222 - RNA, 32 nt, Homo Sapiens
ucccuggugugaacucuuucuuugguauucca

SEQ ID NO: 102223 - RNA, 32 nt, Homo Sapiens
ucauucacugaacaggcacguauugacagcuu

SEQ ID NO: 102224 - RNA, 32 nt, Homo Sapiens
aguacugaagaauuauuuuugcauguuuuucu

SEQ ID NO: 102225 - RNA, 32 nt, Homo Sapiens
ccacuuuacagagauaaauguaugugaauguu

SEQ ID NO: 102226 - RNA, 32 nt, Homo Sapiens
ggagggugaagaugaggcaggggcugcuggug

SEQ ID NO: 102227 - RNA, 32 nt, Homo Sapiens
agcacuagcuccacggccccagacaccuuccc

SEQ ID NO: 102228 - RNA, 32 nt, Homo Sapiens
uuuuucuagagcaauaaucaguggugcuuuug

SEQ ID NO: 102229 - RNA, 32 nt, Homo Sapiens
ucuuuuuauagcaagaaaucaauauccuuuuu

SEQ ID NO: 102230 - RNA, 32 nt, Homo Sapiens
aaacuuauaaaguggauuauacuauuuguauu

SEQ ID NO: 102231 - RNA, 32 nt, Homo Sapiens
acuaaaaaugaacauuaauguuaaagacuuaa

SEQ ID NO: 102232 - RNA, 32 nt, Homo Sapiens
cucaagaggcucucuuguucuccaucaggaga

SEQ ID NO: 102233 - RNA, 32 nt, Homo Sapiens
ggagucuccgcggcgaguggccguggaggggc

SEQ ID NO: 102234 - RNA, 31 nt, Homo Sapiens
caggggauggcccugcugcugcuuccggggc

SEQ ID NO: 102235 - RNA, 32 nt, Homo Sapiens
uguauguggccaucguggucuacuccgucauu

SEQ ID NO: 102236 - RNA, 32 nt, Homo Sapiens
aauuuuguguggggugugaacugugguuuaac

SEQ ID NO: 102237 - RNA, 32 nt, Homo Sapiens
auuuaaauuagauaacaaaauuuuauagucug

SEQ ID NO: 102238 - RNA, 32 nt, Homo Sapiens
gugcuggguccgccgcggggcccgccucuacg

SEQ ID NO: 102239 - RNA, 32 nt, Homo Sapiens
guguccugaagcugcuggagcccgcacugucc

SEQ ID NO: 102240 - RNA, 32 nt, Homo Sapiens
aggagggcuguuggccugcugcugugcugcug

SEQ ID NO: 102241 - RNA, 32 nt, Homo Sapiens
aauuagccgggcgugguggugugcgccuguag

SEQ ID NO: 102242 - RNA, 30 nt, Homo Sapiens
acgugaggcaggcggcgagcgcgggugggg

SEQ ID NO: 102243 - RNA, 32 nt, Homo Sapiens
cuagaaauauuuuucuccaucuccuugaauau

SEQ ID NO: 102244 - RNA, 32 nt, Homo Sapiens
auccauguuuuaacuuauuuugagccuuucuu

SEQ ID NO: 102245 - RNA, 32 nt, Homo Sapiens
agcuucugcaacgcagcagacuccugggccug

SEQ ID NO: 102246 - RNA, 32 nt, Homo Sapiens
aaugguugggauacaauaaacugcacauauuu

SEQ ID NO: 102247 - RNA, 32 nt, Homo Sapiens
agacuuacuguauuuugaaaaccaucauuacc

SEQ ID NO: 102248 - RNA, 32 nt, Homo Sapiens
ugcuggggucauuuuuaggggaaaaaggagga

SEQ ID NO: 102249 - RNA, 32 nt, Homo Sapiens
gaaaaauuaauuugcaaugacaaccuauguuu

SEQ ID NO: 102250 - RNA, 32 nt, Homo Sapiens
cagaguugucuuaaauuagugguggauagacu

SEQ ID NO: 102251 - RNA, 32 nt, Homo Sapiens
gcaggagaagacagacugcugcuuuggaccug

SEQ ID NO: 102252 - RNA, 32 nt, Homo Sapiens
caugaagagaauuuuucccugugaaaaguaag

SEQ ID NO: 102253 - RNA, 32 nt, Homo Sapiens
uugaaagcuaagugagagagccagagggccuc

SEQ ID NO: 102254 - RNA, 32 nt, Homo Sapiens
ggagggcagucuccgaguuucggaggggcuug

SEQ ID NO: 102255 - RNA, 32 nt, Homo Sapiens
aagucauuugagggcucuggcucuguggcuuu

SEQ ID NO: 102256 - RNA, 32 nt, Homo Sapiens
aaaggccgacagaggggaaggaauggaccugu

SEQ ID NO: 102257 - RNA, 32 nt, Homo Sapiens
ggaagggaagagcggcgugagcggagggagug

SEQ ID NO: 102258 - RNA, 32 nt, Homo Sapiens
uucacuguuccucuuugguuucuucagagcuu

SEQ ID NO: 102259 - RNA, 32 nt, Homo Sapiens
auuuauacugucaaucuuucucccagccugcc

SEQ ID NO: 102260 - RNA, 32 nt, Homo Sapiens
gcggcgggagcagucggcgaaguagcagcagc

SEQ ID NO: 102261 - RNA, 32 nt, Homo Sapiens
cacgcggcacaauacccacuccccuccccuuu

SEQ ID NO: 102262 - RNA, 32 nt, Homo Sapiens
uuuguuaauuuucuuguuuuuucaugcacaca

SEQ ID NO: 102263 - RNA, 31 nt, Homo Sapiens
gugugcucugcaugggguucagugugaaggg

SEQ ID NO: 102264 - RNA, 32 nt, Homo Sapiens
agaaaauguaacagauccuacucuucaaaaua

SEQ ID NO: 102265 - RNA, 32 nt, Homo Sapiens
ggagacacucccuggcuccggccaggcggacc

SEQ ID NO: 102266 - RNA, 32 nt, Homo Sapiens
auucccaaacucucaccuuaugcuuagcucuc

SEQ ID NO: 102267 - RNA, 32 nt, Homo Sapiens
ccuggaagaggccgugaugcaccuggaccaca

SEQ ID NO: 102268 - RNA, 32 nt, Homo Sapiens
auuagacuuuuguauaagagaugucaugccuc

SEQ ID NO: 102269 - RNA, 32 nt, Homo Sapiens
aagcuuuuucuuuuuccuuuuuaaaaaguaaa

SEQ ID NO: 102270 - RNA, 32 nt, Homo Sapiens
uuauauuaaugaucuugcauuugauuauauca

SEQ ID NO: 102271 - RNA, 32 nt, Homo Sapiens
accuccuuucccuccaugcuuccgcggaggag

SEQ ID NO: 102272 - RNA, 27 nt, Homo Sapiens
uucccuuccuucuuagcauccuucagu

SEQ ID NO: 102273 - RNA, 32 nt, Homo Sapiens
uauguuuugacugacaucaaggggagacggga

SEQ ID NO: 102274 - RNA, 32 nt, Homo Sapiens
cuccuccccagacuguccugggcccgcccucu

SEQ ID NO: 102275 - RNA, 32 nt, Homo Sapiens
cccggugcggccgagcugggaagaccuugggg

SEQ ID NO: 102276 - RNA, 32 nt, Homo Sapiens
cuuaaaugugaaggaacaacagcaacaagacc

SEQ ID NO: 102277 - RNA, 32 nt, Homo Sapiens
ucucugcucccccagaaucucaucucuaugac

SEQ ID NO: 102278 - RNA, 32 nt, Homo Sapiens
guucagcggagcagccagccagggcggaugag

SEQ ID NO: 102279 - RNA, 32 nt, Homo Sapiens
ugggcauugucauggcaugcgccuguagucuc

SEQ ID NO: 102280 - RNA, 32 nt, Homo Sapiens
cagcucaaacuuagaacagcuguuguccagcu

SEQ ID NO: 102281 - RNA, 32 nt, Homo Sapiens
aauauagguuguagaauuguuaccugcaguuc

SEQ ID NO: 102282 - RNA, 32 nt, Homo Sapiens
accuuuucacauugccacaaucaagaauauaa

SEQ ID NO: 102283 - RNA, 32 nt, Homo Sapiens
ugaaagauauugugcuuuauuaugauauaagg

SEQ ID NO: 102284 - RNA, 32 nt, Homo Sapiens
accugacccucaccaauuccagcccugacccu

SEQ ID NO: 102285 - RNA, 32 nt, Homo Sapiens
ucacugcccucccucggccccacccacccucu

SEQ ID NO: 102286 - RNA, 32 nt, Homo Sapiens
cuuuacugaaaauggacagaaauaggaaaugg

SEQ ID NO: 102287 - RNA, 32 nt, Homo Sapiens
aagucucgcgaggccgggcccgagcagagugu

SEQ ID NO: 102288 - RNA, 32 nt, Homo Sapiens
gcacaacugucaagagucuuguacacacaacu

SEQ ID NO: 102289 - RNA, 32 nt, Homo Sapiens
gggaauuguucgcuuuagugccggcgccaugg

SEQ ID NO: 102290 - RNA, 32 nt, Homo Sapiens
cagccugucggccacaccccagacuccaggcc

SEQ ID NO: 102291 - RNA, 32 nt, Homo Sapiens
gccuggcuaccuuguuccugcuguccccuccc

SEQ ID NO: 102292 - RNA, 32 nt, Homo Sapiens
ccggaggggagguauuaagaauagauacgaua

SEQ ID NO: 102293 - RNA, 32 nt, Homo Sapiens
aaaaaaggcauuguuugagcugucccaucucc

SEQ ID NO: 102294 - RNA, 32 nt, Homo Sapiens
guuucagauuuuuuuuuuuuuaagagauccuu

SEQ ID NO: 102295 - RNA, 32 nt, Homo Sapiens
uagauuaaugaaauuuaucagauacaaccugu

SEQ ID NO: 102296 - RNA, 32 nt, Homo Sapiens
uuccccacucggcuccucuccccccucgcgcc

SEQ ID NO: 102297 - RNA, 32 nt, Homo Sapiens
ucggcuacccucggcccaggcccgcagcgccg

SEQ ID NO: 102298 - RNA, 32 nt, Homo Sapiens
agucugcuauauuuucaugacuuuuccaugua

SEQ ID NO: 102299 - RNA, 32 nt, Homo Sapiens
ccacccccaagccucacacucccuugucuuuu

SEQ ID NO: 102300 - RNA, 32 nt, Homo Sapiens
cuagguguuucugccuuguugacauggagaga

SEQ ID NO: 102301 - RNA, 32 nt, Homo Sapiens
uucaggggccgcgccgggccgagcugucgccc

SEQ ID NO: 102302 - RNA, 32 nt, Homo Sapiens
uuuagccuucaccaagcuuucagaaacuagcc

SEQ ID NO: 102303 - RNA, 32 nt, Homo Sapiens
agugcacuugggcgagcgcuccuuccagugcg

SEQ ID NO: 102304 - RNA, 32 nt, Homo Sapiens
ccauccauccauccauccuccuccuccaugua

SEQ ID NO: 102305 - RNA, 32 nt, Homo Sapiens
uuuguggcagauaacuggcuuaugacaccuug

SEQ ID NO: 102306 - RNA, 32 nt, Homo Sapiens
auuuuuguaaauuggguucuucauggaaguuu

SEQ ID NO: 102307 - RNA, 32 nt, Homo Sapiens
uugaagcaccucagaaugugaccuuguuugga

SEQ ID NO: 102308 - RNA, 32 nt, Homo Sapiens
cauugcucucugggcuuuugguuugggggcgc

SEQ ID NO: 102309 - RNA, 32 nt, Homo Sapiens
agaggacuacagcuccacggaggggucugggg

SEQ ID NO: 102310 - RNA, 32 nt, Homo Sapiens
agccaccacaccuggccaagaauaccacuuuu

SEQ ID NO: 102311 - RNA, 32 nt, Homo Sapiens
ucaguuuccuacugccuuaggaggccccugcu

SEQ ID NO: 102312 - RNA, 32 nt, Homo Sapiens
gcaccucucugucccuuccgugucucacuguc

SEQ ID NO: 102313 - RNA, 32 nt, Homo Sapiens
ccagggcugaggggaggcagggaugugugcug

SEQ ID NO: 102314 - RNA, 32 nt, Homo Sapiens
gcacagaaacucacuauauaagucacauagga

SEQ ID NO: 102315 - RNA, 32 nt, Homo Sapiens
uuccggcaauagggcgggagggagcgcguccc

SEQ ID NO: 102316 - RNA, 32 nt, Homo Sapiens
aguguuuucuuccucuggguucuuauaauguu

SEQ ID NO: 102317 - RNA, 32 nt, Homo Sapiens
ccuggaggcgucuacacuggcuccacauccac

SEQ ID NO: 102318 - RNA, 32 nt, Homo Sapiens
gcugugauuuuccauuaacucuaaucgaaaaa

SEQ ID NO: 102319 - RNA, 32 nt, Homo Sapiens
aaccauauacauguguauaauuaggguaugua

SEQ ID NO: 102320 - RNA, 32 nt, Homo Sapiens
cuucacuuuuccagagugaaauguaggaggga

SEQ ID NO: 102321 - RNA, 32 nt, Homo Sapiens
ugaaugaaggaaccucuuucuuacaaaacaaa

SEQ ID NO: 102322 - RNA, 32 nt, Homo Sapiens
cagaggccacgggcuuccugccugugaggagc

SEQ ID NO: 102323 - RNA, 32 nt, Homo Sapiens
uuuacauauauuccacauauauaacaggauuu

SEQ ID NO: 102324 - RNA, 32 nt, Homo Sapiens
uggaaugugaaugugguggcaaagugggcaga

SEQ ID NO: 102325 - RNA, 32 nt, Homo Sapiens
uugaacguuggccuuacaaucaaauguaaguu

SEQ ID NO: 102326 - RNA, 32 nt, Homo Sapiens
uagauucaaucgucucugaguauauagggcug

SEQ ID NO: 102327 - RNA, 32 nt, Homo Sapiens
gagcguggacgaagccgacauggagaaugcug

SEQ ID NO: 102328 - RNA, 32 nt, Homo Sapiens
uauucugcuucuuuuguguuucuauguaaauu

SEQ ID NO: 102329 - RNA, 32 nt, Homo Sapiens
gcccaagaacuuaaagauaaaaaguuagcaga

SEQ ID NO: 102330 - RNA, 32 nt, Homo Sapiens
uguuuuugagacggagucucgcuuuguuuccc

SEQ ID NO: 102331 - RNA, 32 nt, Homo Sapiens
ggguccugcaaugagcaggggcugggaguaga

SEQ ID NO: 102332 - RNA, 32 nt, Homo Sapiens
caguaauucgccaaaaugacaaacacaaaggg

SEQ ID NO: 102333 - RNA, 32 nt, Homo Sapiens
ggacaggaagucuggaggcugaaacagagacu

SEQ ID NO: 102334 - RNA, 32 nt, Homo Sapiens
gaacacuggaguggugguguuggugaaaacau

SEQ ID NO: 102335 - RNA, 32 nt, Homo Sapiens
ggaggaucaaggaagcagagauggacggugag

SEQ ID NO: 102336 - RNA, 32 nt, Homo Sapiens
ggccaggcacgguggcucacgccuguaauccc

SEQ ID NO: 102337 - RNA, 32 nt, Homo Sapiens
agccaggugcgguggcucacgccuguaauccu

SEQ ID NO: 102338 - RNA, 32 nt, Homo Sapiens
auguuuuacucuagugcuaaauaaaaacucua

SEQ ID NO: 102339 - RNA, 32 nt, Homo Sapiens
uugcuuuaaaagaugucuuguuuuuuauauac

SEQ ID NO: 102340 - RNA, 32 nt, Homo Sapiens
guaaauuuuguacaauaaaauuuuauuuccua

SEQ ID NO: 102341 - RNA, 32 nt, Homo Sapiens
aggaaaacccaccuauggaauaggugccuauc

SEQ ID NO: 102342 - RNA, 31 nt, Homo Sapiens
ggcagauggugcagccaacaaugcugaccgg

SEQ ID NO: 102343 - RNA, 32 nt, Homo Sapiens
cugaaagcuacaccccacuuugacccucgacc

SEQ ID NO: 102344 - RNA, 32 nt, Homo Sapiens
uggaggaagaacuugagagaauuuggggcaac

SEQ ID NO: 102345 - RNA, 32 nt, Homo Sapiens
caaauaagucauugauuagcccauugguguac

SEQ ID NO: 102346 - RNA, 32 nt, Homo Sapiens
uggggacggaggggaaagggaagccuggguuu

SEQ ID NO: 102347 - RNA, 32 nt, Homo Sapiens
gcuggucucuccacgcggcugcggcccgguac

SEQ ID NO: 102348 - RNA, 32 nt, Homo Sapiens
agaaggaggagcuggaggagcgcgcgucugag

SEQ ID NO: 102349 - RNA, 32 nt, Homo Sapiens
gaccuccgugaugcuuccugagugcuuacuau

SEQ ID NO: 102350 - RNA, 32 nt, Homo Sapiens
cuugcaucauggaagcagcauuggaagaaauc

SEQ ID NO: 102351 - RNA, 32 nt, Homo Sapiens
guaugcugagaauccacugccucuaagacauc

SEQ ID NO: 102352 - RNA, 32 nt, Homo Sapiens
uaaacaaauucacauaaugccaaauacacaau

SEQ ID NO: 102353 - RNA, 32 nt, Homo Sapiens
cauuaaaaaaauuuacauagguguaguaacuc

SEQ ID NO: 102354 - RNA, 32 nt, Homo Sapiens
aaaacaaacaagcaagcagacacacacaguga

SEQ ID NO: 102355 - RNA, 32 nt, Homo Sapiens
gccccacuccaugccacccccaccagcuggag

SEQ ID NO: 102356 - RNA, 32 nt, Homo Sapiens
acuggcuacuccuuucccaccucccccugaac

SEQ ID NO: 102357 - RNA, 32 nt, Homo Sapiens
gcugccuucccucuccucccccaguccacccu

SEQ ID NO: 102358 - RNA, 32 nt, Homo Sapiens
gugggaagcuuugaccccgcccugcccacucg

SEQ ID NO: 102359 - RNA, 32 nt, Homo Sapiens
cuagaagaacagacaucuuccagcagcuguca

SEQ ID NO: 102360 - RNA, 32 nt, Homo Sapiens
ugcugccaccgccuccucaucuucugcccggc

SEQ ID NO: 102361 - RNA, 32 nt, Homo Sapiens
cucccagguucaagcaauucuccugcaucagc

SEQ ID NO: 102362 - RNA, 32 nt, Homo Sapiens
ugaccacccccucagagcacagaucagggacc

SEQ ID NO: 102363 - RNA, 32 nt, Homo Sapiens
agauggaagggagaggguccagggcuuccuaa

SEQ ID NO: 102364 - RNA, 32 nt, Homo Sapiens
uuuauauuuaguuccuuccccagucaacaacu

SEQ ID NO: 102365 - RNA, 32 nt, Homo Sapiens
cucauauaaaaauuauauuuagaauuuuuaaa

SEQ ID NO: 102366 - RNA, 32 nt, Homo Sapiens
uuccaggcuuugcaucuggagccuuuaccggu

SEQ ID NO: 102367 - RNA, 32 nt, Homo Sapiens
agggugggcuuccugcccuucccucugggcac

SEQ ID NO: 102368 - RNA, 32 nt, Homo Sapiens
cagauaggggguaucugacccagucuucuuuu

SEQ ID NO: 102369 - RNA, 25 nt, Homo Sapiens
gcuagaucuuucuucagguuccugg

SEQ ID NO: 102370 - RNA, 32 nt, Homo Sapiens
ucuuauuuugggacucucaugaugcugagguc

SEQ ID NO: 102371 - RNA, 32 nt, Homo Sapiens
cauagucaaggguuuagagucuggagacagga

SEQ ID NO: 102372 - RNA, 32 nt, Homo Sapiens
gaggcgcuccuggccgggcccgcgcuucugca

SEQ ID NO: 102373 - RNA, 32 nt, Homo Sapiens
guagauaugugcaagguagcaugaugagcaac

SEQ ID NO: 102374 - RNA, 32 nt, Homo Sapiens
ugaugacgugagaucaauaagaagaaccuagu

SEQ ID NO: 102375 - RNA, 32 nt, Homo Sapiens
gaaguagaaaccgaaaauaaaacagaaugucu

SEQ ID NO: 102376 - RNA, 32 nt, Homo Sapiens
ugugccaggcgggagggaagggcggcacugga

SEQ ID NO: 102377 - RNA, 32 nt, Homo Sapiens
guauaguagcagcuaaacaggcaauguguuau

SEQ ID NO: 102378 - RNA, 32 nt, Homo Sapiens
ucaucaaauauguugaauugaucuagaaauua

SEQ ID NO: 102379 - RNA, 32 nt, Homo Sapiens
cgcgaagugucugugagaacaaaucccaggca

SEQ ID NO: 102380 - RNA, 32 nt, Homo Sapiens
uauaucacuugagaauggcauuauuuaauuaa

SEQ ID NO: 102381 - RNA, 32 nt, Homo Sapiens
cuggccuccgcgggcgggggcagcgggcugag

SEQ ID NO: 102382 - RNA, 32 nt, Homo Sapiens
caacugagaaaauacaggaaaagcagguccaa

SEQ ID NO: 102383 - RNA, 32 nt, Homo Sapiens
aaggugggauccaacaagaguguaguauggaa

SEQ ID NO: 102384 - RNA, 32 nt, Homo Sapiens
cccggcucugaggcugccccaggggcacugug

SEQ ID NO: 102385 - RNA, 32 nt, Homo Sapiens
uaguguccuuaccuuuaucuuaccacacacau

SEQ ID NO: 102386 - RNA, 29 nt, Homo Sapiens
uggauugugacuucacccuggaauguuua

SEQ ID NO: 102387 - RNA, 32 nt, Homo Sapiens
aagguagaagagaaaggaauauuuuaaaccuu

SEQ ID NO: 102388 - RNA, 32 nt, Homo Sapiens
aaagcuaauugcuucaagauccugcuaccauu

SEQ ID NO: 102389 - RNA, 32 nt, Homo Sapiens
ggggagucggugcaggaugccgcuucugcuuu

SEQ ID NO: 102390 - RNA, 32 nt, Homo Sapiens
aaagcgggagggugggcgggguggugcgagcc

SEQ ID NO: 102391 - RNA, 32 nt, Homo Sapiens
ucaaccauauccuuucaaaccagaucagugag

SEQ ID NO: 102392 - RNA, 32 nt, Homo Sapiens
uuuuuauuuaaauaaaccuaaaaugcuuugug

SEQ ID NO: 102393 - RNA, 32 nt, Homo Sapiens
uaaagaacauaaauaacaaaucucaagcaaac

SEQ ID NO: 102394 - RNA, 32 nt, Homo Sapiens
ggcguggcugugggucccggauuagcggcggc

SEQ ID NO: 102395 - RNA, 32 nt, Homo Sapiens
gcagugcuggguggagaaagccagaaaacaga

SEQ ID NO: 102396 - RNA, 32 nt, Homo Sapiens
gcaagcuccagccccagccgcugaccccucug

SEQ ID NO: 102397 - RNA, 32 nt, Homo Sapiens
ucugcggccuccugggaauccgucugccugga

SEQ ID NO: 102398 - RNA, 32 nt, Homo Sapiens
ugcugauguaccuguucacgcugcugggcaac

SEQ ID NO: 102399 - RNA, 32 nt, Homo Sapiens
gauauuuucuucacuacuuuuucuaucuuaau

SEQ ID NO: 102400 - RNA, 32 nt, Homo Sapiens
cagcgccgcgcagggaggggccgcagcauccu

SEQ ID NO: 102401 - RNA, 32 nt, Homo Sapiens
cucaucccagaaggcaucuggugcuucuugua

SEQ ID NO: 102402 - RNA, 32 nt, Homo Sapiens
uaaaaugaaaacuucaauuaauuguggauuug

SEQ ID NO: 102403 - RNA, 32 nt, Homo Sapiens
ccacugcauggauuuggcuguuuaaucagccg

SEQ ID NO: 102404 - RNA, 32 nt, Homo Sapiens
gggcgucaauggaucgccacuccagcuacauc

SEQ ID NO: 102405 - RNA, 32 nt, Homo Sapiens
cucucguggucguucuggcccgaggcccuuag

SEQ ID NO: 102406 - RNA, 32 nt, Homo Sapiens
gcagggagagcaccgcccacccugccccucag

SEQ ID NO: 102407 - RNA, 32 nt, Homo Sapiens
cccaggucguuguuuuuuccagcuuagaagcc

SEQ ID NO: 102408 - RNA, 32 nt, Homo Sapiens
cagguugacacagacuguguugccagagcuga

SEQ ID NO: 102409 - RNA, 32 nt, Homo Sapiens
cucuucccaagccucccgggacugggacaugu

SEQ ID NO: 102410 - RNA, 32 nt, Homo Sapiens
guuggggcggguggucgggucaagauagcagc

SEQ ID NO: 102411 - RNA, 32 nt, Homo Sapiens
agcauccauauggccaaauaaauacacugaau

SEQ ID NO: 102412 - RNA, 28 nt, Homo Sapiens
aggaacugaaagauacauuugaacauga

SEQ ID NO: 102413 - RNA, 32 nt, Homo Sapiens
ggcgagcgguugauggcgagggggcgcggcgc

SEQ ID NO: 102414 - RNA, 28 nt, Homo Sapiens
uuuauauuugucuucauguguuuuuguu

SEQ ID NO: 102415 - RNA, 32 nt, Homo Sapiens
gacucggauggugguaaugggagguagauuga

SEQ ID NO: 102416 - RNA, 32 nt, Homo Sapiens
aguaaaggcaucugagauagaaugggauacgg

SEQ ID NO: 102417 - RNA, 32 nt, Homo Sapiens
ucccgcgccgacggggcugugccggagcagcu

SEQ ID NO: 102418 - RNA, 32 nt, Homo Sapiens
gaguuucgcucuuguugcccaagcuggagugc

SEQ ID NO: 102419 - RNA, 32 nt, Homo Sapiens
aaacugagaucaaaguuaagauuauauccugu

SEQ ID NO: 102420 - RNA, 32 nt, Homo Sapiens
gcuugugaugauacacacacaugcacagguuc

SEQ ID NO: 102421 - RNA, 32 nt, Homo Sapiens
ugagacuucugugaugggggcgcggacaccac

SEQ ID NO: 102422 - RNA, 32 nt, Homo Sapiens
aauguauuauuuccucaagagguugcuaggaa

SEQ ID NO: 102423 - RNA, 29 nt, Homo Sapiens
gcccuaugaaguagcaauuuucuauagga

SEQ ID NO: 102424 - RNA, 32 nt, Homo Sapiens
uacaggcaugcaccaccacaccuggcuaauuu

SEQ ID NO: 102425 - RNA, 32 nt, Homo Sapiens
augaaaaauaugugcuugaaaugagaaacuuu

SEQ ID NO: 102426 - RNA, 32 nt, Homo Sapiens
cucuacaaaaauaagaaaauuagccaggugua

SEQ ID NO: 102427 - RNA, 32 nt, Homo Sapiens
ugggugaaugugguuauggccgaaaaggauau

SEQ ID NO: 102428 - RNA, 31 nt, Homo Sapiens
gcaaaacagcgcagacgccggggacaugagg

SEQ ID NO: 102429 - RNA, 32 nt, Homo Sapiens
ggaucccacccuggggacccccaugauuggcc

SEQ ID NO: 102430 - RNA, 32 nt, Homo Sapiens
aggagacaucagaaagaaugaaaacucugccg

SEQ ID NO: 102431 - RNA, 32 nt, Homo Sapiens
gcucccggcgucugcaccccggcagcgcgagg

SEQ ID NO: 102432 - RNA, 32 nt, Homo Sapiens
gaaauaaauggcaaauaguuguaccuggaucu

SEQ ID NO: 102433 - RNA, 32 nt, Homo Sapiens
gagucauccuugcugcagcaucgcuugcacuc

SEQ ID NO: 102434 - RNA, 32 nt, Homo Sapiens
caccaggaagguggccagagccucacugagcc

SEQ ID NO: 102435 - RNA, 31 nt, Homo Sapiens
uggggggaguaaaaacaugauuucaauguaa

SEQ ID NO: 102436 - RNA, 32 nt, Homo Sapiens
acaacaaaaugaauucuauuaaagaauagccc

SEQ ID NO: 102437 - RNA, 32 nt, Homo Sapiens
ugggcggugugcggccggcaccgccucgcacc

SEQ ID NO: 102438 - RNA, 32 nt, Homo Sapiens
cuacuguucuuugccucguccaggucucuauc

SEQ ID NO: 102439 - RNA, 32 nt, Homo Sapiens
uccuuauauuauuuuuuuuuuaugcaugauuu

SEQ ID NO: 102440 - RNA, 32 nt, Homo Sapiens
gugacagcuuuggggguuugcugcuggcucug

SEQ ID NO: 102441 - RNA, 32 nt, Homo Sapiens
uaaauggaaucauauucuguaaucuuuugaga

SEQ ID NO: 102442 - RNA, 32 nt, Homo Sapiens
aauuuuuuaccuuguuuuggcauguuuguaua

SEQ ID NO: 102443 - RNA, 32 nt, Homo Sapiens
uguauauggugaauauuuaauuaugguuuucu

SEQ ID NO: 102444 - RNA, 32 nt, Homo Sapiens
acccugcuauacauguacagacuuugaugaaa

SEQ ID NO: 102445 - RNA, 32 nt, Homo Sapiens
ccugucucagcaagcucugaggucuccccuga

SEQ ID NO: 102446 - RNA, 32 nt, Homo Sapiens
caauagcaacaccucccuauucuguuauuucu

SEQ ID NO: 102447 - RNA, 32 nt, Homo Sapiens
aaaucuggcccauuuuaggguuaccauuuuuu

SEQ ID NO: 102448 - RNA, 28 nt, Homo Sapiens
accauguggaccgcggaugagauugcuc

SEQ ID NO: 102449 - RNA, 32 nt, Homo Sapiens
agagguggauggcaaugugauuggugcuauaa

SEQ ID NO: 102450 - RNA, 32 nt, Homo Sapiens
aguauacucuccuguuuggagacagaggaaga

SEQ ID NO: 102451 - RNA, 32 nt, Homo Sapiens
gagaauuuacugagcucauacucugugcuggg

SEQ ID NO: 102452 - RNA, 32 nt, Homo Sapiens
accuccagguugguucuggguguccugcugug

SEQ ID NO: 102453 - RNA, 32 nt, Homo Sapiens
ucugguuuaaacagaucaugaacuacugaaac

SEQ ID NO: 102454 - RNA, 32 nt, Homo Sapiens
augcuguucauuuauaauaguggacauuaugg

SEQ ID NO: 102455 - RNA, 32 nt, Homo Sapiens
ugcuuugcuguggaccucuccuccuucuccuu

SEQ ID NO: 102456 - RNA, 30 nt, Homo Sapiens
caaccauggcccgugcccaggcgcucgugc

SEQ ID NO: 102457 - RNA, 32 nt, Homo Sapiens
cacuauaaagcaaccacacaaacaagucugca

SEQ ID NO: 102458 - RNA, 32 nt, Homo Sapiens
cgcggccguggcggcggagcccucagccaugg

SEQ ID NO: 102459 - RNA, 32 nt, Homo Sapiens
ugaccccccgguuucagauuuccggccuccac

SEQ ID NO: 102460 - RNA, 32 nt, Homo Sapiens
gagugacccagcuacugaaccagccacgaaca

SEQ ID NO: 102461 - RNA, 32 nt, Homo Sapiens
ggaucagaagguaagagaaaagagaaaauaug

SEQ ID NO: 102462 - RNA, 32 nt, Homo Sapiens
gggaaugagugaaacuaaauuaaugagaagaa

SEQ ID NO: 102463 - RNA, 32 nt, Homo Sapiens
uaaaggaccuucccaagucucccuuucccugu

SEQ ID NO: 102464 - RNA, 32 nt, Homo Sapiens
guggauuugaauaacaauaccauacagcugug

SEQ ID NO: 102465 - RNA, 28 nt, Homo Sapiens
uccccaguagagaaacauuuggaaaaga

SEQ ID NO: 102466 - RNA, 32 nt, Homo Sapiens
caaagugucacagauauugaacccacugauuu

SEQ ID NO: 102467 - RNA, 30 nt, Homo Sapiens
aggaaggucugugcucuggagccaggguaa

SEQ ID NO: 102468 - RNA, 32 nt, Homo Sapiens
cucauuucaguuucuggcaaccccguguauuu

SEQ ID NO: 102469 - RNA, 32 nt, Homo Sapiens
gaaaaagccuccauugcccacccgccaggcgg

SEQ ID NO: 102470 - RNA, 32 nt, Homo Sapiens
gguccccaguccagcucugccugucccucgca

SEQ ID NO: 102471 - RNA, 32 nt, Homo Sapiens
cccgggggcgccauggcgaccggagcgaacgc

SEQ ID NO: 102472 - RNA, 32 nt, Homo Sapiens
gacuucaggaccaucuuugaauccuccucggc

SEQ ID NO: 102473 - RNA, 29 nt, Homo Sapiens
ucucauggcuccugggagcgucaccagcg

SEQ ID NO: 102474 - RNA, 32 nt, Homo Sapiens
accacuuaaggccuacaaaaccacaugggagu

SEQ ID NO: 102475 - RNA, 27 nt, Homo Sapiens
gacuucuccuucuuuuuugcccuuggc

SEQ ID NO: 102476 - RNA, 32 nt, Homo Sapiens
guaggucauuggccacugucuccacucacaac

SEQ ID NO: 102477 - RNA, 32 nt, Homo Sapiens
ugcggggacugaagaagggcgagggcgagcgg

SEQ ID NO: 102478 - RNA, 32 nt, Homo Sapiens
cccaccccugaacuggccccagcuccucuucc

SEQ ID NO: 102479 - RNA, 32 nt, Homo Sapiens
uuaguugaacuuuuaaaauacuugauuuaaaa

SEQ ID NO: 102480 - RNA, 32 nt, Homo Sapiens
cgccgggugcaucaccagguccuuuuaccgga

SEQ ID NO: 102481 - RNA, 32 nt, Homo Sapiens
ugugaugcugaagggaaauguacaagagcacu

SEQ ID NO: 102482 - RNA, 32 nt, Homo Sapiens
caaggugcaagagcucugagagugagccuucu

SEQ ID NO: 102483 - RNA, 32 nt, Homo Sapiens
aaacaaagcaucuaucucugaaagcuguuugg

SEQ ID NO: 102484 - RNA, 32 nt, Homo Sapiens
ucaugcugacaaaaaauagcugcuaugacuuu

SEQ ID NO: 102485 - RNA, 32 nt, Homo Sapiens
cugcugcgcgccgagcgucgcauccugagccg

SEQ ID NO: 102486 - RNA, 30 nt, Homo Sapiens
ggagcccggccgcagcacuacgagccgcgc

SEQ ID NO: 102487 - RNA, 32 nt, Homo Sapiens
ccuguuuccucaucuauaaauuggggauagua

SEQ ID NO: 102488 - RNA, 32 nt, Homo Sapiens
ggcauugccgggguaggguggugucuucacca

SEQ ID NO: 102489 - RNA, 32 nt, Homo Sapiens
ggaccggaaggggccgaggcugcacgggccuc

SEQ ID NO: 102490 - RNA, 32 nt, Homo Sapiens
cuucgugcaggacuuugaugcuugggguguuc

SEQ ID NO: 102491 - RNA, 32 nt, Homo Sapiens
gcucagcauugcgggucucuguagaaguccca

SEQ ID NO: 102492 - RNA, 32 nt, Homo Sapiens
gcuuugggacagauuuuauauuaugucaauug

SEQ ID NO: 102493 - RNA, 32 nt, Homo Sapiens
gguugcguguucaaaucacgucggggucaaac

SEQ ID NO: 102494 - RNA, 32 nt, Homo Sapiens
cuaagcuuaugaugaugaguuauguaugccaa

SEQ ID NO: 102495 - RNA, 32 nt, Homo Sapiens
uaaggugucauggaaauacagauucuuuguuu

SEQ ID NO: 102496 - RNA, 32 nt, Homo Sapiens
uguauuuuaagugguuguauguuuauuuucuu

SEQ ID NO: 102497 - RNA, 32 nt, Homo Sapiens
cugaggcggcgccgcgcgagcagcagcagagg

SEQ ID NO: 102498 - RNA, 32 nt, Homo Sapiens
ccucaugggaagggaugcagccaggcagacuc

SEQ ID NO: 102499 - RNA, 32 nt, Homo Sapiens
ugagacgaugaguuaucuucuacauucuagaa

SEQ ID NO: 102500 - RNA, 32 nt, Homo Sapiens
agacaggaauggggcgaggaaggagccaggcc

SEQ ID NO: 102501 - RNA, 31 nt, Homo Sapiens
uuguuuuugugcuucaguuuguccagugcuc

SEQ ID NO: 102502 - RNA, 32 nt, Homo Sapiens
aguuauguaaaauaaacauacucuucuuccuc

SEQ ID NO: 102503 - RNA, 32 nt, Homo Sapiens
ucucgaucacugguuucagauguucauuuauu

SEQ ID NO: 102504 - RNA, 32 nt, Homo Sapiens
gcuccgcgucugcgccgccgccggaguccacu

SEQ ID NO: 102505 - RNA, 32 nt, Homo Sapiens
acuuccggugcgaaccgccucggccguucccu

SEQ ID NO: 102506 - RNA, 32 nt, Homo Sapiens
ccauggccgcugguaacagacaucaggguucc

SEQ ID NO: 102507 - RNA, 32 nt, Homo Sapiens
cguugcacuccagccugucgcugugcagaccu

SEQ ID NO: 102508 - RNA, 32 nt, Homo Sapiens
uuuacuuuauagaacugucuaccugggagaug

SEQ ID NO: 102509 - RNA, 32 nt, Homo Sapiens
uuuuuuguuguaauuauggcacugucauguuu

SEQ ID NO: 102510 - RNA, 32 nt, Homo Sapiens
ggccgggcgggggaucggggguuaggggugga

SEQ ID NO: 102511 - RNA, 32 nt, Homo Sapiens
uuaaaauagcugcccaagauuauagaacagag

SEQ ID NO: 102512 - RNA, 32 nt, Homo Sapiens
uuuuccucuuuccuuuuuguuuguuuuaaugu

SEQ ID NO: 102513 - RNA, 32 nt, Homo Sapiens
uaacggcggcggugucggcagcugcuguagcg

SEQ ID NO: 102514 - RNA, 32 nt, Homo Sapiens
gucaccgcggccaggcccaggcugguacugaa

SEQ ID NO: 102515 - RNA, 32 nt, Homo Sapiens
auucaaucuuggcaauaaagcaaacauaaugg

SEQ ID NO: 102516 - RNA, 32 nt, Homo Sapiens
uaaauaaauuaaaagagcgguuuguguagaaa

SEQ ID NO: 102517 - RNA, 32 nt, Homo Sapiens
ccucacuccuggaugcugcguuuuaaggaagu

SEQ ID NO: 102518 - RNA, 32 nt, Homo Sapiens
uaauuuuguguaagaaauacagacuggaugua

SEQ ID NO: 102519 - RNA, 32 nt, Homo Sapiens
aaaacaaucucuucuuuuuuuuaguuuacccc

SEQ ID NO: 102520 - RNA, 32 nt, Homo Sapiens
cuugauguucuucccucccucgccagccaaca

SEQ ID NO: 102521 - RNA, 32 nt, Homo Sapiens
uguguagcaaucaaaucaggguaauugggaua

SEQ ID NO: 102522 - RNA, 32 nt, Homo Sapiens
uugagaacaccugugccucccugcucggccag

SEQ ID NO: 102523 - RNA, 32 nt, Homo Sapiens
gucacuguucuggugucaacuccagcgucggc

SEQ ID NO: 102524 - RNA, 32 nt, Homo Sapiens
ggccagaugcuuaauugagcucuaggguggcu

SEQ ID NO: 102525 - RNA, 32 nt, Homo Sapiens
uuuuaaaaauuuugauuguuugccauauuggg

SEQ ID NO: 102526 - RNA, 32 nt, Homo Sapiens
uccuuggcaugaauaacgugggugccaugaac

SEQ ID NO: 102527 - RNA, 32 nt, Homo Sapiens
ugacucaaaaaugagguacuucaguauuaaau

SEQ ID NO: 102528 - RNA, 32 nt, Homo Sapiens
ggaggcucauagucuccuggagggauaaaaca

SEQ ID NO: 102529 - RNA, 32 nt, Homo Sapiens
ccaacacuccucccuguggaggaggcaguuag

SEQ ID NO: 102530 - RNA, 32 nt, Homo Sapiens
cuccacgccaacucccagagcugaugcuauug

SEQ ID NO: 102531 - RNA, 32 nt, Homo Sapiens
guguuccugaagagauugaaccuaguaacagg

SEQ ID NO: 102532 - RNA, 32 nt, Homo Sapiens
ggcauccugcaaccaccccauccauccaagua

SEQ ID NO: 102533 - RNA, 32 nt, Homo Sapiens
cauucuaaaacuggauugugauuuugguuaca

SEQ ID NO: 102534 - RNA, 32 nt, Homo Sapiens
aaccuccuaaaaggaauucauauuuuaaagga

SEQ ID NO: 102535 - RNA, 32 nt, Homo Sapiens
ugacuuaaauguauuauauguuagaauugaca

SEQ ID NO: 102536 - RNA, 32 nt, Homo Sapiens
aaccccaucucuacuaaaaauacgaaacuagc

SEQ ID NO: 102537 - RNA, 32 nt, Homo Sapiens
acucugggcuuaguugaacagcugggagcaau

SEQ ID NO: 102538 - RNA, 32 nt, Homo Sapiens
uggcugcuucgcucgcgcucuacgcgcucagu

SEQ ID NO: 102539 - RNA, 32 nt, Homo Sapiens
aaggcauacugaagugaggauuauaagagaaa

SEQ ID NO: 102540 - RNA, 32 nt, Homo Sapiens
gcauggccaggauggacaccagagcacauuuc

SEQ ID NO: 102541 - RNA, 32 nt, Homo Sapiens
uccucaaguuuuaaugaauuccaauuauaccu

SEQ ID NO: 102542 - RNA, 32 nt, Homo Sapiens
ggggagagaaggcccggaggggcucugcguuc

SEQ ID NO: 102543 - RNA, 32 nt, Homo Sapiens
uacaucugcaccugcccuuuuuucauaccaca

SEQ ID NO: 102544 - RNA, 32 nt, Homo Sapiens
gcuaaagccagaauucuuaaccaguacccagc

SEQ ID NO: 102545 - RNA, 32 nt, Homo Sapiens
gagcugccugucugcccacgggcucugcgucu

SEQ ID NO: 102546 - RNA, 32 nt, Homo Sapiens
ugggucacucaccgugagccaucaaugugcuc

SEQ ID NO: 102547 - RNA, 32 nt, Homo Sapiens
cugaaagaaaucagagaugauucucugaaaaa

SEQ ID NO: 102548 - RNA, 32 nt, Homo Sapiens
caugaucucugcuggaggaagcgaggaggcgg

SEQ ID NO: 102549 - RNA, 32 nt, Homo Sapiens
uuguaacuacucaaggccaacugucacaugaa

SEQ ID NO: 102550 - RNA, 32 nt, Homo Sapiens
acagcugcuguaaauuuuuuauaaaugaauuu

SEQ ID NO: 102551 - RNA, 32 nt, Homo Sapiens
cauucugguacacuguuggagagaugagacag

SEQ ID NO: 102552 - RNA, 32 nt, Homo Sapiens
aauagcuuucguuuugaguucuggaaagaaaa

SEQ ID NO: 102553 - RNA, 32 nt, Homo Sapiens
uauauagugaaauuauuuugcauauuuugaaa

SEQ ID NO: 102554 - RNA, 32 nt, Homo Sapiens
cuuuuguagauggcgacuguguuauagacggu

SEQ ID NO: 102555 - RNA, 32 nt, Homo Sapiens
ccuuuuuucgccugcggcgccggcgacagauc

SEQ ID NO: 102556 - RNA, 32 nt, Homo Sapiens
agaaugauauuuuuucacuuuguauuuuccuu

SEQ ID NO: 102557 - RNA, 32 nt, Homo Sapiens
ccugggccaccucgguuccagcaaguuccuac

SEQ ID NO: 102558 - RNA, 32 nt, Homo Sapiens
cuuuggaugcugucauaugcugcuuugaguga

SEQ ID NO: 102559 - RNA, 32 nt, Homo Sapiens
uaaacucagggugggcccccuucccaagccug

SEQ ID NO: 102560 - RNA, 32 nt, Homo Sapiens
uaaaagugcaggucugcuuugguccuucuccu

SEQ ID NO: 102561 - RNA, 32 nt, Homo Sapiens
gacacuaauaauaaaaucauggcaaugcaaaa

SEQ ID NO: 102562 - RNA, 32 nt, Homo Sapiens
ggaggagcuuaggauccucguuuucuggguuu

SEQ ID NO: 102563 - RNA, 32 nt, Homo Sapiens
gcacagaauuguaaaccuucccuuuugacccu

SEQ ID NO: 102564 - RNA, 32 nt, Homo Sapiens
uagcgugcaccuguaauccuagcuaccgagaa

SEQ ID NO: 102565 - RNA, 32 nt, Homo Sapiens
gaaagccacuuggcagaaauagccucuguaag

SEQ ID NO: 102566 - RNA, 32 nt, Homo Sapiens
guaggacguaaugcaugaaauaauuuaauuuu

SEQ ID NO: 102567 - RNA, 32 nt, Homo Sapiens
guuuuuaugauagggcugauauuuucaacaac

SEQ ID NO: 102568 - RNA, 32 nt, Homo Sapiens
auuguuuuugcucaaggcaaccagaggaaacu

SEQ ID NO: 102569 - RNA, 32 nt, Homo Sapiens
acuguuuguauauauuguauauauuaaaacag

SEQ ID NO: 102570 - RNA, 32 nt, Homo Sapiens
acgccucgccgcggccagcucgcugcucucgc

SEQ ID NO: 102571 - RNA, 32 nt, Homo Sapiens
acaaccugcccccaggcuuccuccagcaaaag

SEQ ID NO: 102572 - RNA, 32 nt, Homo Sapiens
ccuggcacgggcucagcccaggaagaggagaa

SEQ ID NO: 102573 - RNA, 32 nt, Homo Sapiens
ugaaauuaaaauuuaugcuuuaacuggaauau

SEQ ID NO: 102574 - RNA, 32 nt, Homo Sapiens
uuggugaaggcacacucagauugcacuuaggg

SEQ ID NO: 102575 - RNA, 32 nt, Homo Sapiens
uguuuacaccgacuagcgcgggcccguugcgg

SEQ ID NO: 102576 - RNA, 32 nt, Homo Sapiens
ugggaauucauuucugaaaaugaugaaccucc

SEQ ID NO: 102577 - RNA, 32 nt, Homo Sapiens
ggcgaauccagaagcucugaagauccuuucug

SEQ ID NO: 102578 - RNA, 32 nt, Homo Sapiens
guucagaaagacugaauguaaagcugggcucu

SEQ ID NO: 102579 - RNA, 32 nt, Homo Sapiens
uugcccaggcugguugcaaacuucuggccuuc

SEQ ID NO: 102580 - RNA, 32 nt, Homo Sapiens
ccugaugcuaauguguaaauggcaaaggugua

SEQ ID NO: 102581 - RNA, 32 nt, Homo Sapiens
uauguucuaaucugauauuuauacaggcuaug

SEQ ID NO: 102582 - RNA, 32 nt, Homo Sapiens
acacccuaggcaagacauuaugccagagccuc

SEQ ID NO: 102583 - RNA, 30 nt, Homo Sapiens
aagauauccucucugccgccggcgcaggcc

SEQ ID NO: 102584 - RNA, 32 nt, Homo Sapiens
uaucuacaguacuuccagauggcugcccccag

SEQ ID NO: 102585 - RNA, 32 nt, Homo Sapiens
aagaucauuuuucauuugauaagaauuacugg

SEQ ID NO: 102586 - RNA, 32 nt, Homo Sapiens
ggugucuuugaucaggaugacaugugccauuu

SEQ ID NO: 102587 - RNA, 32 nt, Homo Sapiens
aagucgaggggcggagagagggggccggagga

SEQ ID NO: 102588 - RNA, 32 nt, Homo Sapiens
cuccaaaaaaggggaaggagcggcugcggcgc

SEQ ID NO: 102589 - RNA, 32 nt, Homo Sapiens
uccgcgccacacagcgcuacgacgacugcuuc

SEQ ID NO: 102590 - RNA, 32 nt, Homo Sapiens
gggcgcuccuccccgggcgcuccuccccaggc

SEQ ID NO: 102591 - RNA, 32 nt, Homo Sapiens
cagcccugugcucuggccccagaagccggacu

SEQ ID NO: 102592 - RNA, 32 nt, Homo Sapiens
acauuuccacuuuauuuguuuguuuguuuauu

SEQ ID NO: 102593 - RNA, 32 nt, Homo Sapiens
cggcagaggcagccuuuucuccagugaggagu

SEQ ID NO: 102594 - RNA, 32 nt, Homo Sapiens
accagugcauauaaauuguauguuaaauguaa

SEQ ID NO: 102595 - RNA, 32 nt, Homo Sapiens
cgcucgauggcgugguggagccaggaggcucg

SEQ ID NO: 102596 - RNA, 32 nt, Homo Sapiens
guaaaaagagagaaaacuuauuugagugauua

SEQ ID NO: 102597 - RNA, 32 nt, Homo Sapiens
cccacggugccaaaacuccaaacaaguucccc

SEQ ID NO: 102598 - RNA, 32 nt, Homo Sapiens
agcugagaaguaccuaucuauggaagagacuu

SEQ ID NO: 102599 - RNA, 32 nt, Homo Sapiens
uuccggcuggaaccauggaggguguagaagag

SEQ ID NO: 102600 - RNA, 32 nt, Homo Sapiens
uaucugggggagaggaguguggaaggguuggg

SEQ ID NO: 102601 - RNA, 32 nt, Homo Sapiens
aauguuugcacuucacauuuccacauuuaggg

SEQ ID NO: 102602 - RNA, 32 nt, Homo Sapiens
ugcucuaggacgagcucugugucccccacacc

SEQ ID NO: 102603 - RNA, 32 nt, Homo Sapiens
auuaauauuaggaauuaucauuguuuuaguag

SEQ ID NO: 102604 - RNA, 32 nt, Homo Sapiens
ggcaguuugauauuuggaguaaguuuguuuaa

SEQ ID NO: 102605 - RNA, 32 nt, Homo Sapiens
uggugcacaccuguagucccagcuacucugga

SEQ ID NO: 102606 - RNA, 32 nt, Homo Sapiens
ugcccgugggaaagugcuguguccuuggagug

SEQ ID NO: 102607 - RNA, 32 nt, Homo Sapiens
uaagggguuaaugaauaaucacagugaugagc

SEQ ID NO: 102608 - RNA, 32 nt, Homo Sapiens
uggccauggcauggagaaugggcuggaggugg

SEQ ID NO: 102609 - RNA, 32 nt, Homo Sapiens
ggcucaggcaggagggcggggucccaggaggu

SEQ ID NO: 102610 - RNA, 32 nt, Homo Sapiens
uaugugacuucuuuuucuuuuaguucuauucu

SEQ ID NO: 102611 - RNA, 32 nt, Homo Sapiens
uuuuucgccucccagggccugugcgaucuggu

SEQ ID NO: 102612 - RNA, 32 nt, Homo Sapiens
gcucuggccucuacucucuccucccucuggcu

SEQ ID NO: 102613 - RNA, 32 nt, Homo Sapiens
cggaacacacccugaggccagcccuggcugcc

SEQ ID NO: 102614 - RNA, 32 nt, Homo Sapiens
uuggcucccggcucuggagaucugcccuccag

SEQ ID NO: 102615 - RNA, 32 nt, Homo Sapiens
ucaaccuguauuucccaaagaaauguaaguga

SEQ ID NO: 102616 - RNA, 32 nt, Homo Sapiens
aaguacauucauguauaacauagggacaguuc

SEQ ID NO: 102617 - RNA, 32 nt, Homo Sapiens
aacaguacugucuaggcuguugcaauauguuc

SEQ ID NO: 102618 - RNA, 32 nt, Homo Sapiens
uuucuuaaaaauuaacacuguaucucaauaag

SEQ ID NO: 102619 - RNA, 32 nt, Homo Sapiens
auaugggggaacagugaagaaaaggaggguga

SEQ ID NO: 102620 - RNA, 32 nt, Homo Sapiens
cagagccacagcuucgggguccugucaucaca

SEQ ID NO: 102621 - RNA, 32 nt, Homo Sapiens
aagacucccuggaucucugaauauaugcaaaa

SEQ ID NO: 102622 - RNA, 32 nt, Homo Sapiens
ggcgccacuuccccgcgcugcccggcagccgu

SEQ ID NO: 102623 - RNA, 32 nt, Homo Sapiens
gucccagcuggccuuauaacaacugucccagg

SEQ ID NO: 102624 - RNA, 32 nt, Homo Sapiens
gcaucuaaaaagacugcaauggcugcugcuaa

SEQ ID NO: 102625 - RNA, 32 nt, Homo Sapiens
cagugaaggacaaaaaucaugauuguggaaga

SEQ ID NO: 102626 - RNA, 32 nt, Homo Sapiens
ccaaccuccgccuccacccccauccuggaacc

SEQ ID NO: 102627 - RNA, 32 nt, Homo Sapiens
cccagccagaagucuuuuuuucuuuucuucuu

SEQ ID NO: 102628 - RNA, 32 nt, Homo Sapiens
uagacuaaauguguuaaaugggcuugccaaca

SEQ ID NO: 102629 - RNA, 32 nt, Homo Sapiens
ccccagccccucagcccucccagcccacuucu

SEQ ID NO: 102630 - RNA, 32 nt, Homo Sapiens
gcggauugacuucuaaagaaucuugguacgug

SEQ ID NO: 102631 - RNA, 32 nt, Homo Sapiens
uucauugcuguggucaggccauuuuuaaggga

SEQ ID NO: 102632 - RNA, 32 nt, Homo Sapiens
agaugcaggugguagucacaucaccagaguga

SEQ ID NO: 102633 - RNA, 32 nt, Homo Sapiens
aagggaagguggggugauagggagggcagcca

SEQ ID NO: 102634 - RNA, 32 nt, Homo Sapiens
ccuuguaauauuuguguuuauuuuuaauauuu

SEQ ID NO: 102635 - RNA, 32 nt, Homo Sapiens
uucccccuuuucuuuauuuugcuggggagagg

SEQ ID NO: 102636 - RNA, 32 nt, Homo Sapiens
aggcucugucuccucagcucauuucuuacucu

SEQ ID NO: 102637 - RNA, 32 nt, Homo Sapiens
ucauuuguuugucaaggacucucaaugcauuu

SEQ ID NO: 102638 - RNA, 32 nt, Homo Sapiens
gagccacugcacccggcccuugccucauguuu

SEQ ID NO: 102639 - RNA, 32 nt, Homo Sapiens
agauguuuaaauaauggugugaaucauucagg

SEQ ID NO: 102640 - RNA, 32 nt, Homo Sapiens
aacaccuauuuauuuccuuguuugugcuaugc

SEQ ID NO: 102641 - RNA, 32 nt, Homo Sapiens
gcucugaagaagucaaggguggagccagagaa

SEQ ID NO: 102642 - RNA, 32 nt, Homo Sapiens
aguguguucauggucgcccauuuuuucaucau

SEQ ID NO: 102643 - RNA, 32 nt, Homo Sapiens
guguugaaccaaugcuuucucaugucucaauu

SEQ ID NO: 102644 - RNA, 32 nt, Homo Sapiens
aaaguguuccuaaagguuugaaugcuuuaaca

SEQ ID NO: 102645 - RNA, 32 nt, Homo Sapiens
gacagguagugccaagcgucuuucucauccug

SEQ ID NO: 102646 - RNA, 32 nt, Homo Sapiens
gucacuuguuuccuuuucuccccucucugggu

SEQ ID NO: 102647 - RNA, 32 nt, Homo Sapiens
uuuaagaagaaaguagaaagugcccaaacagc

SEQ ID NO: 102648 - RNA, 32 nt, Homo Sapiens
uucauuuuuuucuguauagauacuuuaucaug

SEQ ID NO: 102649 - RNA, 32 nt, Homo Sapiens
uuuucugugcugccagccccaggucuuccucc

SEQ ID NO: 102650 - RNA, 32 nt, Homo Sapiens
agugcauccagaagcguuuauauucugagcgc

SEQ ID NO: 102651 - RNA, 32 nt, Homo Sapiens
ucugucucaaaauaaagaacuuaugguguguu

SEQ ID NO: 102652 - RNA, 32 nt, Homo Sapiens
ucccaaaugccgaagaaauuuucuggccuuug

SEQ ID NO: 102653 - RNA, 32 nt, Homo Sapiens
uuaguggagacgggguuucaccauguugucca

SEQ ID NO: 102654 - RNA, 32 nt, Homo Sapiens
ccgaacgccaggugggggcgaggcgucucgga

SEQ ID NO: 102655 - RNA, 32 nt, Homo Sapiens
cggcuuggaaaucaacgugguuguccccgcca

SEQ ID NO: 102656 - RNA, 32 nt, Homo Sapiens
gccugccccaguacccaaaaaacaauggcuau

SEQ ID NO: 102657 - RNA, 32 nt, Homo Sapiens
agagguggaggguggggggcgcugaguaggga

SEQ ID NO: 102658 - RNA, 32 nt, Homo Sapiens
cuaacaaaaauauaacuuuucuaauaucuguu

SEQ ID NO: 102659 - RNA, 32 nt, Homo Sapiens
agccgcugcuacugugggccgccccggggcag

SEQ ID NO: 102660 - RNA, 32 nt, Homo Sapiens
uuacaggcgugagcuaccacgcccggccuuau

SEQ ID NO: 102661 - RNA, 32 nt, Homo Sapiens
gacgcuggagacccugcgccccugcccagcac

SEQ ID NO: 102662 - RNA, 32 nt, Homo Sapiens
aaacaucaggcaugaacacuguuuaugucuga

SEQ ID NO: 102663 - RNA, 32 nt, Homo Sapiens
caguguucgggggccucuggcugcugaaggau

SEQ ID NO: 102664 - RNA, 32 nt, Homo Sapiens
cagccgcuccagccuuugaagacuuugaaagc

SEQ ID NO: 102665 - RNA, 32 nt, Homo Sapiens
uccaggacacccucugaguccuugacgcuggc

SEQ ID NO: 102666 - RNA, 32 nt, Homo Sapiens
ggcgggggcaggggcggggaggugaaaaggug

SEQ ID NO: 102667 - RNA, 32 nt, Homo Sapiens
ggccucugaggccccaggcacacgcugggucc

SEQ ID NO: 102668 - RNA, 32 nt, Homo Sapiens
augccuguggaggaccugagugaagacuccau

SEQ ID NO: 102669 - RNA, 32 nt, Homo Sapiens
aauacguauggacuggauaacucugagaaaca

SEQ ID NO: 102670 - RNA, 32 nt, Homo Sapiens
uuuguuaccuggaggacuaaauguagaugucu

SEQ ID NO: 102671 - RNA, 32 nt, Homo Sapiens
cggcguuggcggggcgggggacaguaguugua

SEQ ID NO: 102672 - RNA, 32 nt, Homo Sapiens
cagcagagugaaaguggaucagacacaaaaac

SEQ ID NO: 102673 - RNA, 32 nt, Homo Sapiens
cugcccauagccaggaguuacugcacaaacac

SEQ ID NO: 102674 - RNA, 32 nt, Homo Sapiens
ucaaguaccgugggacccaggccugcccggag

SEQ ID NO: 102675 - RNA, 32 nt, Homo Sapiens
gaguggggggucgggcgccccccgcagcucag

SEQ ID NO: 102676 - RNA, 29 nt, Homo Sapiens
aauggaauauguauauaccagguuuuagc

SEQ ID NO: 102677 - RNA, 32 nt, Homo Sapiens
aagaauacagaaaaaugaaaauaacauuuuac

SEQ ID NO: 102678 - RNA, 32 nt, Homo Sapiens
uaaggggagggcccgucuggccguguagcccg

SEQ ID NO: 102679 - RNA, 32 nt, Homo Sapiens
ccuucaucuauuauaucauaauacauguuaca

SEQ ID NO: 102680 - RNA, 32 nt, Homo Sapiens
aaccccaugaaauuauuuguagacuuguaugu

SEQ ID NO: 102681 - RNA, 32 nt, Homo Sapiens
cuuuuucuuuacagcugaaauugcuuuaaaug

SEQ ID NO: 102682 - RNA, 32 nt, Homo Sapiens
agggaguaagaauggccacagaguagugaaau

SEQ ID NO: 102683 - RNA, 32 nt, Homo Sapiens
agacauagcagcaguauccucuccggaucugu

SEQ ID NO: 102684 - RNA, 32 nt, Homo Sapiens
guguggggaauugggugagccccucuucccca

SEQ ID NO: 102685 - RNA, 32 nt, Homo Sapiens
uucuucccaccucggcuggucccuuuuccucc

SEQ ID NO: 102686 - RNA, 32 nt, Homo Sapiens
uggccccggcgcccacccgcaccccuccccag

SEQ ID NO: 102687 - RNA, 32 nt, Homo Sapiens
uugagauuauuuugaaauuaaauauccuuaac

SEQ ID NO: 102688 - RNA, 32 nt, Homo Sapiens
auuuauuuauuuacuaacauggccauuuuuug

SEQ ID NO: 102689 - RNA, 32 nt, Homo Sapiens
cacagacuauuccccaccugcuucccagcuuc

SEQ ID NO: 102690 - RNA, 32 nt, Homo Sapiens
cugcugaaucugucuguucaguuugucaagga

SEQ ID NO: 102691 - RNA, 32 nt, Homo Sapiens
agaaguuugucaacagaggaccccuacuccau

SEQ ID NO: 102692 - RNA, 32 nt, Homo Sapiens
agccagccagcaugucggggaucaagaagcaa

SEQ ID NO: 102693 - RNA, 32 nt, Homo Sapiens
acugccuuacuggcagccaggugcgcuauuca

SEQ ID NO: 102694 - RNA, 32 nt, Homo Sapiens
ggggggcggggagaggcagcagaaggggcugg

SEQ ID NO: 102695 - RNA, 32 nt, Homo Sapiens
aacccuuguuuuauuuaagagacagaggagaa

SEQ ID NO: 102696 - RNA, 32 nt, Homo Sapiens
gguacugagugggggcgccgcgccugcgcaaa

SEQ ID NO: 102697 - RNA, 32 nt, Homo Sapiens
aaccaggcucugccaaucagugcuuguacugg

SEQ ID NO: 102698 - RNA, 32 nt, Homo Sapiens
uaaugauuuugaaauauuaaggucuugccaag

SEQ ID NO: 102699 - RNA, 32 nt, Homo Sapiens
agaagcccgggagaggcccacuggcuaccaga

SEQ ID NO: 102700 - RNA, 32 nt, Homo Sapiens
gaucuuggcucacugcaagcuccaccuccugg

SEQ ID NO: 102701 - RNA, 32 nt, Homo Sapiens
gaugcggagacggggcggcaggaccugcuaga

SEQ ID NO: 102702 - RNA, 32 nt, Homo Sapiens
ugugaaggccuagggcauuacuguauacuacu

SEQ ID NO: 102703 - RNA, 32 nt, Homo Sapiens
uguuucauggaaguuguuuauaaaauucaaag

SEQ ID NO: 102704 - RNA, 30 nt, Homo Sapiens
ggcaaaguuaagcuugaugaugguuaaaau

SEQ ID NO: 102705 - RNA, 29 nt, Homo Sapiens
uugaaaguagugaugucauaauuguacua

SEQ ID NO: 102706 - RNA, 32 nt, Homo Sapiens
caaaugugacucugaaaauuguuaagaggaaa

SEQ ID NO: 102707 - RNA, 32 nt, Homo Sapiens
cagaaagucauucaagacugaguuuauagaaa

SEQ ID NO: 102708 - RNA, 32 nt, Homo Sapiens
auucugucaucuccaagcugaguuuccucuuc

SEQ ID NO: 102709 - RNA, 32 nt, Homo Sapiens
cccggcgccgggcauccuggggaugugcugag

SEQ ID NO: 102710 - RNA, 32 nt, Homo Sapiens
uuauucacguugacaguaccuagcuguaaugu

SEQ ID NO: 102711 - RNA, 29 nt, Homo Sapiens
agcugaaugugauacaugccgaaugccac

SEQ ID NO: 102712 - RNA, 32 nt, Homo Sapiens
cauccgcucaugccacuguaagcagcccuagc

SEQ ID NO: 102713 - RNA, 32 nt, Homo Sapiens
gagccuggccuggccgcgucauacagcgggug

SEQ ID NO: 102714 - RNA, 32 nt, Homo Sapiens
ccgacccugccagcuuagagggaccccacccc

SEQ ID NO: 102715 - RNA, 32 nt, Homo Sapiens
ucuugagcaaauuuguuuuuuauuaugccauu

SEQ ID NO: 102716 - RNA, 32 nt, Homo Sapiens
ugugaggcuggcgauuacauaaguauaagcag

SEQ ID NO: 102717 - RNA, 32 nt, Homo Sapiens
gacuuucagggugauggcuugcuggccugauc

SEQ ID NO: 102718 - RNA, 32 nt, Homo Sapiens
aggcaucaagguaaacaaaaaauaaucaacua

SEQ ID NO: 102719 - RNA, 32 nt, Homo Sapiens
acuggacugucucguuuagacuguauacauca

SEQ ID NO: 102720 - RNA, 32 nt, Homo Sapiens
aauuguucaaggauuuuaaaauucuauuucag

SEQ ID NO: 102721 - RNA, 32 nt, Homo Sapiens
uuuuaauuuugaugaaguguaacuuauucauu

SEQ ID NO: 102722 - RNA, 32 nt, Homo Sapiens
aucgggcuaggccggcggccucgcucccuccc

SEQ ID NO: 102723 - RNA, 32 nt, Homo Sapiens
agcaagucggaaaguacaaugaaaauaaauau

SEQ ID NO: 102724 - RNA, 32 nt, Homo Sapiens
cguuguugcgcauggcggcgcggcccccggac

SEQ ID NO: 102725 - RNA, 32 nt, Homo Sapiens
ugcugacccugcagcuaugaccucugaccugu

SEQ ID NO: 102726 - RNA, 32 nt, Homo Sapiens
aggagaucauuuaugucuuuuuuguuauuaag

SEQ ID NO: 102727 - RNA, 32 nt, Homo Sapiens
gggcucugguuggcugugaccucccccagggc

SEQ ID NO: 102728 - RNA, 32 nt, Homo Sapiens
gaugggggucauuaaaggaaacugaacauuga

SEQ ID NO: 102729 - RNA, 32 nt, Homo Sapiens
ugccuguaaucccagcacuuuuggaggcccag

SEQ ID NO: 102730 - RNA, 32 nt, Homo Sapiens
agagggacaaagggcugugcuacacuucccag

SEQ ID NO: 102731 - RNA, 31 nt, Homo Sapiens
gcaacagcaagccuuucaugaguuaaaggaa

SEQ ID NO: 102732 - RNA, 32 nt, Homo Sapiens
gauuaaagaguaccuuagauccauagaaggug

SEQ ID NO: 102733 - RNA, 32 nt, Homo Sapiens
aggugaaugucuuccuuuucuuucucccuaac

SEQ ID NO: 102734 - RNA, 29 nt, Homo Sapiens
agcugcaagggacagaggcgcggcaggcg

SEQ ID NO: 102735 - RNA, 32 nt, Homo Sapiens
cuuuauugauaaugacaaaaagaauauuuuuu

SEQ ID NO: 102736 - RNA, 32 nt, Homo Sapiens
uggcacagaugaugaggucugagaccagccgg

SEQ ID NO: 102737 - RNA, 32 nt, Homo Sapiens
caaaaucuggcagacacacacacacacacaca

SEQ ID NO: 102738 - RNA, 32 nt, Homo Sapiens
gcugcggcggaggagguggcggcggccgaauc

SEQ ID NO: 102739 - RNA, 32 nt, Homo Sapiens
uaguauucauuuaucaaaaaugaccuauguuu

SEQ ID NO: 102740 - RNA, 32 nt, Homo Sapiens
ugagaaaacacaggcuuuugcacauccaaugu

SEQ ID NO: 102741 - RNA, 30 nt, Homo Sapiens
aacgcgugaggcgcuuuugagucugggguc

SEQ ID NO: 102742 - RNA, 31 nt, Homo Sapiens
uuuccagagccccagagccagcucaucuucc

SEQ ID NO: 102743 - RNA, 32 nt, Homo Sapiens
ugucaggcagccaacucccagcccuguucaca

SEQ ID NO: 102744 - RNA, 32 nt, Homo Sapiens
uguucccaccucuggcugugagguagguggca

SEQ ID NO: 102745 - RNA, 32 nt, Homo Sapiens
ugcagcugcauaauuaacacauuaucaaaguc

SEQ ID NO: 102746 - RNA, 32 nt, Homo Sapiens
gaguguacgcguugccggcgaagaggggagcc

SEQ ID NO: 102747 - RNA, 32 nt, Homo Sapiens
uucagcugucuccaucccccuuuuccgccucu

SEQ ID NO: 102748 - RNA, 29 nt, Homo Sapiens
uagcuugugacuuuucuccugauggagca

SEQ ID NO: 102749 - RNA, 32 nt, Homo Sapiens
uuccccuggcuucaggaccguguuucccugca

SEQ ID NO: 102750 - RNA, 32 nt, Homo Sapiens
ucucccccaucccaguccucagcauugugcca

SEQ ID NO: 102751 - RNA, 32 nt, Homo Sapiens
cggaucgcacgucggcggccgguggaacgcgg

SEQ ID NO: 102752 - RNA, 32 nt, Homo Sapiens
aaaaaagaccugugauuaggagacccuaagaa

SEQ ID NO: 102753 - RNA, 32 nt, Homo Sapiens
cuuaguguuugaugucauuaacaguuucguaa

SEQ ID NO: 102754 - RNA, 32 nt, Homo Sapiens
uguguguguguauuuuacaaaauauguauggu

SEQ ID NO: 102755 - RNA, 32 nt, Homo Sapiens
ggucccuuaaagauuuucugcuugaagucucc

SEQ ID NO: 102756 - RNA, 32 nt, Homo Sapiens
cauugacuauagaaugagauguauccugcaag

SEQ ID NO: 102757 - RNA, 32 nt, Homo Sapiens
ugugaggauacaaugagaagucagcagucugc

SEQ ID NO: 102758 - RNA, 32 nt, Homo Sapiens
uuuugucguuuuuaaauugagaauugcuucua

SEQ ID NO: 102759 - RNA, 32 nt, Homo Sapiens
ccauuauauaaaaauagaauagagaguuagga

SEQ ID NO: 102760 - RNA, 32 nt, Homo Sapiens
cucuauaacaauuuaauguauucaguuuugac

SEQ ID NO: 102761 - RNA, 32 nt, Homo Sapiens
uaguacuuuauuuuuauuuuuaagagguaaag

SEQ ID NO: 102762 - RNA, 32 nt, Homo Sapiens
ugcauucauuuucuguuccguuuuguccuuuu

SEQ ID NO: 102763 - RNA, 32 nt, Homo Sapiens
uguauggaaaauuugaaacauauucaagauug

SEQ ID NO: 102764 - RNA, 32 nt, Homo Sapiens
ucagucuccugacuagcugggacuacaggugc

SEQ ID NO: 102765 - RNA, 32 nt, Homo Sapiens
ugauugcauuauuuuaauuugcuuuucuggga

SEQ ID NO: 102766 - RNA, 32 nt, Homo Sapiens
auucagucaguuccuuuguuacauuuaguucu

SEQ ID NO: 102767 - RNA, 32 nt, Homo Sapiens
uuguuuugauaaagugacauuauagugauuaa

SEQ ID NO: 102768 - RNA, 31 nt, Homo Sapiens
cuuaagacaaauuggggcugaugucaucuug

SEQ ID NO: 102769 - RNA, 32 nt, Homo Sapiens
cccagggcgucccugagucccgucuggucugg

SEQ ID NO: 102770 - RNA, 32 nt, Homo Sapiens
agguuucuuucugcaccaggaggaggcgugcu

SEQ ID NO: 102771 - RNA, 32 nt, Homo Sapiens
gaggcuacagagcugccgcggcuggcacacga

SEQ ID NO: 102772 - RNA, 32 nt, Homo Sapiens
agaaggauuaaauucuaagcaccaggcaaaug

SEQ ID NO: 102773 - RNA, 32 nt, Homo Sapiens
gugggaaaaaggaagaugauugucaggggaaa

SEQ ID NO: 102774 - RNA, 28 nt, Homo Sapiens
augagggaaccuuaacauuuuuaaccua

SEQ ID NO: 102775 - RNA, 32 nt, Homo Sapiens
uacuuuuucuuucuggauuucaucucuagaaa

SEQ ID NO: 102776 - RNA, 32 nt, Homo Sapiens
auuaucucacaaauauaaaaccacuauaagac

SEQ ID NO: 102777 - RNA, 32 nt, Homo Sapiens
ugaagacagcacuguagaggagaauauugaug

SEQ ID NO: 102778 - RNA, 32 nt, Homo Sapiens
uugcccucagaauuacagcaacugauggagag

SEQ ID NO: 102779 - RNA, 32 nt, Homo Sapiens
cuuccuggaggagaggcccauggccagcacuu

SEQ ID NO: 102780 - RNA, 32 nt, Homo Sapiens
aacaaggaggcagucgcuugugcauguuccag

SEQ ID NO: 102781 - RNA, 32 nt, Homo Sapiens
cugcgcuguaauuggauuuucuuaauauucau

SEQ ID NO: 102782 - RNA, 32 nt, Homo Sapiens
gcagggggagggagucacgggauuuagcaggu

SEQ ID NO: 102783 - RNA, 32 nt, Homo Sapiens
ggcaggaagugucaagaucccagguuacggaa

SEQ ID NO: 102784 - RNA, 32 nt, Homo Sapiens
auuagaguccgaaaguauuuuuauaaguuacu

SEQ ID NO: 102785 - RNA, 32 nt, Homo Sapiens
acaggcagagauuggaacaguuuggaggacuu

SEQ ID NO: 102786 - RNA, 32 nt, Homo Sapiens
uggguucuaaaggacuaacauaaaaucuguga

SEQ ID NO: 102787 - RNA, 32 nt, Homo Sapiens
uguuggccaggcuggucuuaaucuaacuucaa

SEQ ID NO: 102788 - RNA, 32 nt, Homo Sapiens
acuagagacuguguccacggaaaucucuguug

SEQ ID NO: 102789 - RNA, 32 nt, Homo Sapiens
ggaauucuggggauugccuucuaauccaguuu

SEQ ID NO: 102790 - RNA, 31 nt, Homo Sapiens
acuuacucaaaauaaaaguaguuuuaaaaug

SEQ ID NO: 102791 - RNA, 32 nt, Homo Sapiens
uagauucaucuuggcacagguuuaucauucag

SEQ ID NO: 102792 - RNA, 32 nt, Homo Sapiens
agacacuggggucagacacucagggugcacau

SEQ ID NO: 102793 - RNA, 32 nt, Homo Sapiens
augcugaauauuaagcuacugggguuaucagc

SEQ ID NO: 102794 - RNA, 32 nt, Homo Sapiens
ccaagguacuuuguauucucaaauugugucug

SEQ ID NO: 102795 - RNA, 32 nt, Homo Sapiens
gcaaggggcagcacugccugcugcuuccuucc

SEQ ID NO: 102796 - RNA, 32 nt, Homo Sapiens
cgggggcgugcagcugacccagguggccagac

SEQ ID NO: 102797 - RNA, 32 nt, Homo Sapiens
gcccgagccagaagacccccucccccauaauu

SEQ ID NO: 102798 - RNA, 32 nt, Homo Sapiens
acauugaaacuguauuuacuuguuauguugua

SEQ ID NO: 102799 - RNA, 32 nt, Homo Sapiens
ucuacuaaaaauacaaaaacuagcugggcaug

SEQ ID NO: 102800 - RNA, 32 nt, Homo Sapiens
cccuuggagagccaugugggcugggugaugga

SEQ ID NO: 102801 - RNA, 32 nt, Homo Sapiens
auccucccuugccccaggccagguagcaagag

SEQ ID NO: 102802 - RNA, 32 nt, Homo Sapiens
caggugcccuggaugaggccgccccgcgcgcc

SEQ ID NO: 102803 - RNA, 30 nt, Homo Sapiens
gcaagagugaucccugccugacaaugaugc

SEQ ID NO: 102804 - RNA, 32 nt, Homo Sapiens
agugaagacugucauugguaggucaugauccu

SEQ ID NO: 102805 - RNA, 32 nt, Homo Sapiens
cgggcgccuuggcgaacucggccacuccaguu

SEQ ID NO: 102806 - RNA, 32 nt, Homo Sapiens
ucuuccaaaaagauuuucagaaaauauuaugu

SEQ ID NO: 102807 - RNA, 32 nt, Homo Sapiens
cuaaugacggagugcuccuucuccaguuccgg

SEQ ID NO: 102808 - RNA, 32 nt, Homo Sapiens
ugcugcugcgcccuuaccuuccccagcguccc

SEQ ID NO: 102809 - RNA, 32 nt, Homo Sapiens
gucucuguuuaaguauaaucagauauaaauau

SEQ ID NO: 102810 - RNA, 32 nt, Homo Sapiens
auuaagagacaguuuuucuauggcaucuccaa

SEQ ID NO: 102811 - RNA, 32 nt, Homo Sapiens
gcacgggugggacgaggccccucgggcugggu

SEQ ID NO: 102812 - RNA, 32 nt, Homo Sapiens
cugagaacaucauugccaucgccgccaccaac

SEQ ID NO: 102813 - RNA, 32 nt, Homo Sapiens
uuaagauaaggaucuaaauacuguguuaaaau

SEQ ID NO: 102814 - RNA, 32 nt, Homo Sapiens
cuuucccugucuucuuucagauuaucucauuu

SEQ ID NO: 102815 - RNA, 32 nt, Homo Sapiens
uuggcugcuguaauuuuuaaguauuugaguuu

SEQ ID NO: 102816 - RNA, 32 nt, Homo Sapiens
uauuuuaugcccuugcguauuaaacgugaaag

SEQ ID NO: 102817 - RNA, 32 nt, Homo Sapiens
auggcgggcagcucacgucgugcccuccgcag

SEQ ID NO: 102818 - RNA, 32 nt, Homo Sapiens
acuguugaccuucucagcaucucccuuuugcc

SEQ ID NO: 102819 - RNA, 32 nt, Homo Sapiens
aggcucugagcccccagaagcagagcuuuguu

SEQ ID NO: 102820 - RNA, 30 nt, Homo Sapiens
agcaucgcgcgcaaggccugccgguugcuc

SEQ ID NO: 102821 - RNA, 32 nt, Homo Sapiens
aaauaaaggcugccaaagcagaugaagaacca

SEQ ID NO: 102822 - RNA, 32 nt, Homo Sapiens
gcgaggugcuggcgccggagcacgcugggaac

SEQ ID NO: 102823 - RNA, 32 nt, Homo Sapiens
ggcaccccuccccucaccacagaugcugagau

SEQ ID NO: 102824 - RNA, 32 nt, Homo Sapiens
aaacagugagccagaccaugcuggucucaagc

SEQ ID NO: 102825 - RNA, 32 nt, Homo Sapiens
cgugcccaaggcugugugcucaucucugccag

SEQ ID NO: 102826 - RNA, 32 nt, Homo Sapiens
aaagaaauaggaaauguuuaucauugaccaua

SEQ ID NO: 102827 - RNA, 32 nt, Homo Sapiens
ucgcguuccuucccgccgcccccucccccgca

SEQ ID NO: 102828 - RNA, 32 nt, Homo Sapiens
cugugauuccagaguuuagaauguagaaauga

SEQ ID NO: 102829 - RNA, 32 nt, Homo Sapiens
aagcauaugacauauaacuuauagaaaucagu

SEQ ID NO: 102830 - RNA, 32 nt, Homo Sapiens
cuuauguugauagcauguaggagugagaaaaa

SEQ ID NO: 102831 - RNA, 29 nt, Homo Sapiens
gcaagguuuuaugaguggaauuagcccuc

SEQ ID NO: 102832 - RNA, 29 nt, Homo Sapiens
agacggaugaagauuacaacgucacacuc

SEQ ID NO: 102833 - RNA, 32 nt, Homo Sapiens
ggaggggccgguccccggggcuaccaggcagg

SEQ ID NO: 102834 - RNA, 32 nt, Homo Sapiens
ccccgaggugcagcugccgaaagugucagaga

SEQ ID NO: 102835 - RNA, 32 nt, Homo Sapiens
uuccccgaaucccacaacccccuccaacauuu

SEQ ID NO: 102836 - RNA, 32 nt, Homo Sapiens
ucuacuaaaaauacaaaaacuagccaggcaug

SEQ ID NO: 102837 - RNA, 32 nt, Homo Sapiens
uacuuuuguuccacauucucucucuuuaccuu

SEQ ID NO: 102838 - RNA, 32 nt, Homo Sapiens
auauauauauauauuuauuuuuuuuacugaga

SEQ ID NO: 102839 - RNA, 32 nt, Homo Sapiens
gaccccaaacugugucccaguagagggucccg

SEQ ID NO: 102840 - RNA, 32 nt, Homo Sapiens
guaaaucacuuuuuaaauuuucucucacugau

SEQ ID NO: 102841 - RNA, 32 nt, Homo Sapiens
ugccgcuggcugugcccuccccuggcacucug

SEQ ID NO: 102842 - RNA, 32 nt, Homo Sapiens
cacuuuggaggccaaggcaggaggauggcuug

SEQ ID NO: 102843 - RNA, 32 nt, Homo Sapiens
uaggauuccgccgcuggaagccuucuguucag

SEQ ID NO: 102844 - RNA, 32 nt, Homo Sapiens
agugcacagauguuuuucaaguuccucaguuu

SEQ ID NO: 102845 - RNA, 32 nt, Homo Sapiens
agaggcugcgagcccugcugcagagccuccgg

SEQ ID NO: 102846 - RNA, 32 nt, Homo Sapiens
uugcagauaauguucucauuuauuuuugaugu

SEQ ID NO: 102847 - RNA, 29 nt, Homo Sapiens
cccgggcgagggcagaggacacugggagc

SEQ ID NO: 102848 - RNA, 32 nt, Homo Sapiens
ggcuuagaggcagcagcacuugguaaaaguuu

SEQ ID NO: 102849 - RNA, 32 nt, Homo Sapiens
ggagccgagagcgggcggcggagccugagcug

SEQ ID NO: 102850 - RNA, 30 nt, Homo Sapiens
aguuuucccuggugcgcggguuccgccuuu

SEQ ID NO: 102851 - RNA, 32 nt, Homo Sapiens
ucaagagcaaagggcugcccacaggccucagc

SEQ ID NO: 102852 - RNA, 28 nt, Homo Sapiens
aggaugccgcguggaagccgaagccgca

SEQ ID NO: 102853 - RNA, 32 nt, Homo Sapiens
uccgagccaagagcacugcaugagcaaggagu

SEQ ID NO: 102854 - RNA, 32 nt, Homo Sapiens
ggccccucuaaaggauucguggugcucauccc

SEQ ID NO: 102855 - RNA, 32 nt, Homo Sapiens
ugaugcuugggguguuccguguugacucccag

SEQ ID NO: 102856 - RNA, 32 nt, Homo Sapiens
ggcagauaaggcccugguuucuccucagcgcg

SEQ ID NO: 102857 - RNA, 32 nt, Homo Sapiens
gcuagugaugaaaucuaaaggaaaccucuacu

SEQ ID NO: 102858 - RNA, 32 nt, Homo Sapiens
aucauuucugggcgucagcgccaggcaguugu

SEQ ID NO: 102859 - RNA, 32 nt, Homo Sapiens
aaauuaaaacaguggacucauggagauaugga

SEQ ID NO: 102860 - RNA, 32 nt, Homo Sapiens
acggaauucagauaaaauuuccuuauguucug

SEQ ID NO: 102861 - RNA, 32 nt, Homo Sapiens
aauaugucauaguucugagcugccaguggacc

SEQ ID NO: 102862 - RNA, 32 nt, Homo Sapiens
uuccugccccccagcccccucaauccauuggc

SEQ ID NO: 102863 - RNA, 32 nt, Homo Sapiens
gcaccagcgcacgcacacgggcgagcggcccu

SEQ ID NO: 102864 - RNA, 32 nt, Homo Sapiens
guacacauuuuaccagaugcuacuucauuauu

SEQ ID NO: 102865 - RNA, 32 nt, Homo Sapiens
gggcguagcgucugcucucucggccucugccu

SEQ ID NO: 102866 - RNA, 32 nt, Homo Sapiens
acagccugcucuccccaaccacucuccccaga

SEQ ID NO: 102867 - RNA, 32 nt, Homo Sapiens
cccagaagauuuuauuauuuaauuguaaaggu

SEQ ID NO: 102868 - RNA, 32 nt, Homo Sapiens
ccggcccggcggcugcugcugcugcugacgcu

SEQ ID NO: 102869 - RNA, 32 nt, Homo Sapiens
aagaaauaaccacugcaaguccuuuuguaaag

SEQ ID NO: 102870 - RNA, 32 nt, Homo Sapiens
accacaugugcaacaaauaccuccauuaaaug

SEQ ID NO: 102871 - RNA, 32 nt, Homo Sapiens
gaaauuauuuuugaauuucaagguuauaaaua

SEQ ID NO: 102872 - RNA, 32 nt, Homo Sapiens
uguuguuggguccgcaucguauucccggaauc

SEQ ID NO: 102873 - RNA, 32 nt, Homo Sapiens
cauuauugguuuauaauuaauaucuaaugaaa

SEQ ID NO: 102874 - RNA, 32 nt, Homo Sapiens
cgcaucgcggccgccuccccccggcccucccu

SEQ ID NO: 102875 - RNA, 32 nt, Homo Sapiens
aguuucuagaaaaggcagacacugguugggac

SEQ ID NO: 102876 - RNA, 32 nt, Homo Sapiens
uggcucuagugaugcauaggaaacaggggaca

SEQ ID NO: 102877 - RNA, 32 nt, Homo Sapiens
gugggugcccauggauaguacguguguacaca

SEQ ID NO: 102878 - RNA, 32 nt, Homo Sapiens
ucguagaucucauucccaaggcugguccuggu

SEQ ID NO: 102879 - RNA, 32 nt, Homo Sapiens
uaaaauaggggauauuuaagguagcuucagcu

SEQ ID NO: 102880 - RNA, 32 nt, Homo Sapiens
gcccuuguaagaaaaacacaccacagguuuuc

SEQ ID NO: 102881 - RNA, 32 nt, Homo Sapiens
acgauggaggcccaauaaaaacacuggacaca

SEQ ID NO: 102882 - RNA, 32 nt, Homo Sapiens
cuccuccaccucccacuggaaagcagacugcu

SEQ ID NO: 102883 - RNA, 32 nt, Homo Sapiens
cgcagucggacucccuccccagccggccaguc

SEQ ID NO: 102884 - RNA, 32 nt, Homo Sapiens
auaguuuguuucuuuuuaauucuuaauuugac

SEQ ID NO: 102885 - RNA, 32 nt, Homo Sapiens
cuuccuuuuuaaaauuuugucccucucucuuu

SEQ ID NO: 102886 - RNA, 32 nt, Homo Sapiens
ucuuagaaguauaaacagaaauggcaauauuu

SEQ ID NO: 102887 - RNA, 32 nt, Homo Sapiens
gcaucuagggaauggauucacaaacgauguga

SEQ ID NO: 102888 - RNA, 32 nt, Homo Sapiens
cuuccauccagaugcauggauacaaauuucca

SEQ ID NO: 102889 - RNA, 30 nt, Homo Sapiens
ugcugagagaagcucugggaaguguuccug

SEQ ID NO: 102890 - RNA, 32 nt, Homo Sapiens
ugaaacaucuguacaagaagagauaucugugg

SEQ ID NO: 102891 - RNA, 32 nt, Homo Sapiens
ucaauauugaaguauugaaauaaaauauucuu

SEQ ID NO: 102892 - RNA, 32 nt, Homo Sapiens
uaggaagcuccaucuugaaggcuggucuagcc

SEQ ID NO: 102893 - RNA, 32 nt, Homo Sapiens
ggacggcugugggaccaggucuguggaaagug

SEQ ID NO: 102894 - RNA, 32 nt, Homo Sapiens
ugggagagaaagucuagaauauaagcaacauu

SEQ ID NO: 102895 - RNA, 32 nt, Homo Sapiens
ugcguccgcacgagagggcggaaccgucucca

SEQ ID NO: 102896 - RNA, 32 nt, Homo Sapiens
uccuggggcccgugggggcccuguucccgcag

SEQ ID NO: 102897 - RNA, 32 nt, Homo Sapiens
gaaaauauaaaguggaaggaaggaccguccgg

SEQ ID NO: 102898 - RNA, 32 nt, Homo Sapiens
cgccauucaaggacuccucucuuucuucacca

SEQ ID NO: 102899 - RNA, 30 nt, Homo Sapiens
aagaucuggacugcgggcgcccugagcccu

SEQ ID NO: 102900 - RNA, 32 nt, Homo Sapiens
uugcugggucagaacgugucaaccaaaagucc

SEQ ID NO: 102901 - RNA, 32 nt, Homo Sapiens
ucaagcaguccucucaccuugccucccaaggu

SEQ ID NO: 102902 - RNA, 32 nt, Homo Sapiens
ggggauccuuugcugcugagcuuccccaagca

SEQ ID NO: 102903 - RNA, 32 nt, Homo Sapiens
aggcuucauuguauuaaucuauccuuugaggu

SEQ ID NO: 102904 - RNA, 32 nt, Homo Sapiens
gggugacccucccacacccagccuggaacccu

SEQ ID NO: 102905 - RNA, 32 nt, Homo Sapiens
ugagccggagagcugcuugcugagccaaaugc

SEQ ID NO: 102906 - RNA, 32 nt, Homo Sapiens
gcuaaggauuuuuauauggccuuguaugaggg

SEQ ID NO: 102907 - RNA, 32 nt, Homo Sapiens
auauaugaaauaaaauauauucuucuaagcaa

SEQ ID NO: 102908 - RNA, 32 nt, Homo Sapiens
ugcaugcuuuuguagcaauugcuuaucaaccu

SEQ ID NO: 102909 - RNA, 32 nt, Homo Sapiens
aaagaaggaccauuuuagcuuaacacuuccuu

SEQ ID NO: 102910 - RNA, 32 nt, Homo Sapiens
aaggguggaaguucuaaugucuguuagcuacc

SEQ ID NO: 102911 - RNA, 32 nt, Homo Sapiens
cugcaggccccggggaccccagcacguggguc

SEQ ID NO: 102912 - RNA, 32 nt, Homo Sapiens
cagucuccugguggcucuggccucggcccugc

SEQ ID NO: 102913 - RNA, 32 nt, Homo Sapiens
cuggaguuagacauagauuuucuauuuuguuu

SEQ ID NO: 102914 - RNA, 32 nt, Homo Sapiens
ugaacuugaagaaaauauauugaaauuaaagc

SEQ ID NO: 102915 - RNA, 32 nt, Homo Sapiens
gcaguuaaacacauacuccaaaagacugcuac

SEQ ID NO: 102916 - RNA, 32 nt, Homo Sapiens
cgagggcacccggcagugcgcccgccaccacc

SEQ ID NO: 102917 - RNA, 32 nt, Homo Sapiens
caugcuuuccaaaaagauuaauacagaaccau

SEQ ID NO: 102918 - RNA, 32 nt, Homo Sapiens
ccugauuagugucuccagucaagcucugggua

SEQ ID NO: 102919 - RNA, 32 nt, Homo Sapiens
ccucauuuuuuaccaacagucuauucaugaug

SEQ ID NO: 102920 - RNA, 32 nt, Homo Sapiens
cacaugagcagauuuuaguaaauaugaaguca

SEQ ID NO: 102921 - RNA, 32 nt, Homo Sapiens
ucucucuuuucugcaugucaaguucugagcgc

SEQ ID NO: 102922 - RNA, 32 nt, Homo Sapiens
ugaccgagaugcugcgggccugucaguuaucg

SEQ ID NO: 102923 - RNA, 32 nt, Homo Sapiens
caguucauuuucugcaaacccauccuccuuuc

SEQ ID NO: 102924 - RNA, 32 nt, Homo Sapiens
aguagagaacaacuggcagcuuugaaaaaaca

SEQ ID NO: 102925 - RNA, 32 nt, Homo Sapiens
gaaaaugaaaauaaacaguggucauucaccuc

SEQ ID NO: 102926 - RNA, 30 nt, Homo Sapiens
gaagagggcaggcgugagcaaccauggccg

SEQ ID NO: 102927 - RNA, 32 nt, Homo Sapiens
cagggaagcagaggagcagcagggucagggug

SEQ ID NO: 102928 - RNA, 32 nt, Homo Sapiens
cgcagcaagcggggcgcuguguccccaagcuc

SEQ ID NO: 102929 - RNA, 32 nt, Homo Sapiens
uacgagaaggagcagaaggggcccgugacugc

SEQ ID NO: 102930 - RNA, 32 nt, Homo Sapiens
agucaaugaaacaaaaacaaaaucacaagagg

SEQ ID NO: 102931 - RNA, 32 nt, Homo Sapiens
gugccggcuaccuggugauggugcugcguggc

SEQ ID NO: 102932 - RNA, 32 nt, Homo Sapiens
uacgugagcaguaugagaagauggcaaagaag

SEQ ID NO: 102933 - RNA, 32 nt, Homo Sapiens
cucccggccuaggcaccuccccgcucucccug

SEQ ID NO: 102934 - RNA, 32 nt, Homo Sapiens
ugugugguggggggcccaggaugcugccaggg

SEQ ID NO: 102935 - RNA, 32 nt, Homo Sapiens
gcagaggcggccugugccauccugcacagcuc

SEQ ID NO: 102936 - RNA, 32 nt, Homo Sapiens
gcugaaguuguccccccgucagcccucacccc

SEQ ID NO: 102937 - RNA, 32 nt, Homo Sapiens
gagaggagugauauuccauuuauuuagaaagc

SEQ ID NO: 102938 - RNA, 32 nt, Homo Sapiens
agccgccgccgccgcugcugcgguucauaucc

SEQ ID NO: 102939 - RNA, 32 nt, Homo Sapiens
gggaccgugggguuggaaagucagcuggaccu

SEQ ID NO: 102940 - RNA, 32 nt, Homo Sapiens
aauucccgaggccguagcgccacgcgagacgc

SEQ ID NO: 102941 - RNA, 32 nt, Homo Sapiens
gugacaagcucgggcugcuguggccccagcac

SEQ ID NO: 102942 - RNA, 32 nt, Homo Sapiens
uccccagggcuccccaggaaccucaccauucc

SEQ ID NO: 102943 - RNA, 32 nt, Homo Sapiens
cuugcaguuaacuccgcccugacccacccuuc

SEQ ID NO: 102944 - RNA, 32 nt, Homo Sapiens
gaagggaaaaauuuauagcuacagaggguagu

SEQ ID NO: 102945 - RNA, 32 nt, Homo Sapiens
gccgcggguccuguuuccuuacuggggauuuc

SEQ ID NO: 102946 - RNA, 32 nt, Homo Sapiens
ugguggcuagccagugcggggaggcccugccc

SEQ ID NO: 102947 - RNA, 32 nt, Homo Sapiens
uaccgucgcccggcucuccgccgcucucccgg

SEQ ID NO: 102948 - RNA, 32 nt, Homo Sapiens
ccucuccguccucagggcugugccucugggag

SEQ ID NO: 102949 - RNA, 32 nt, Homo Sapiens
caguuaucagggcaagcugugcucugaguuuc

SEQ ID NO: 102950 - RNA, 32 nt, Homo Sapiens
cacaggacuuuuugcccucuguucccgggucc

SEQ ID NO: 102951 - RNA, 31 nt, Homo Sapiens
cgcugccgccacugccugugcuucaugagga

SEQ ID NO: 102952 - RNA, 31 nt, Homo Sapiens
gagcugaguuuucugacuugaguuaacaauc

SEQ ID NO: 102953 - RNA, 32 nt, Homo Sapiens
guguuuucacuacucgguuggaugccucagcc

SEQ ID NO: 102954 - RNA, 32 nt, Homo Sapiens
aacuuuuuuccacagaaugucuugcaagucgu

SEQ ID NO: 102955 - RNA, 32 nt, Homo Sapiens
cccuugccccuaaccagcgcgucuaccccggc

SEQ ID NO: 102956 - RNA, 32 nt, Homo Sapiens
gcaucuugacugcaacucaugagcgauucuaa

SEQ ID NO: 102957 - RNA, 32 nt, Homo Sapiens
acuaguuuggcaauaggauauugaacugagag

SEQ ID NO: 102958 - RNA, 32 nt, Homo Sapiens
cauuccgacugccuaugaacgggugugggggc

SEQ ID NO: 102959 - RNA, 32 nt, Homo Sapiens
guagaucuccuccuccuucaugcagccaggau

SEQ ID NO: 102960 - RNA, 32 nt, Homo Sapiens
ucuauuacuuuucuuugacauaaagaaaauaa

SEQ ID NO: 102961 - RNA, 32 nt, Homo Sapiens
gccgggcugggaaaaacuggcggaaaauauua

SEQ ID NO: 102962 - RNA, 32 nt, Homo Sapiens
ucugauugcauucuuccccuaauccauuuucc

SEQ ID NO: 102963 - RNA, 32 nt, Homo Sapiens
gaggcccagcccagcccagcauagcccgaggg

SEQ ID NO: 102964 - RNA, 30 nt, Homo Sapiens
ccggcccugaucggcggcugcgggagcgac

SEQ ID NO: 102965 - RNA, 32 nt, Homo Sapiens
gaaccaacccucaucaccaugcuuccccuaga

SEQ ID NO: 102966 - RNA, 32 nt, Homo Sapiens
cauccuuacuuuaugauaggcaucauuuuagu

SEQ ID NO: 102967 - RNA, 32 nt, Homo Sapiens
ccauccccacccaaaagugcucagaccuuguc

SEQ ID NO: 102968 - RNA, 32 nt, Homo Sapiens
cuguggccaagccccagccugcaccgucgcug

SEQ ID NO: 102969 - RNA, 32 nt, Homo Sapiens
ugacccuuugucugcuggccugcugggugcug

SEQ ID NO: 102970 - RNA, 32 nt, Homo Sapiens
uaaaaacagcuauaaaaagcaacugcagaugc

SEQ ID NO: 102971 - RNA, 32 nt, Homo Sapiens
ugcuuugucaugccauuaagcccacaauaacg

SEQ ID NO: 102972 - RNA, 32 nt, Homo Sapiens
uuaagugauuuguccgugaccacaaagaguuu

SEQ ID NO: 102973 - RNA, 32 nt, Homo Sapiens
aagaguaaaacaaaaauucugauggaaauaaa

SEQ ID NO: 102974 - RNA, 32 nt, Homo Sapiens
ccaauccagagcucccucagguccugggacua

SEQ ID NO: 102975 - RNA, 32 nt, Homo Sapiens
cucuaccuccuccugcuccccauccccagccc

SEQ ID NO: 102976 - RNA, 30 nt, Homo Sapiens
ccaaaaugucauuacacaguacucauaaua

SEQ ID NO: 102977 - RNA, 31 nt, Homo Sapiens
uuuucuaauguuaucaccugagucaaggaaa

SEQ ID NO: 102978 - RNA, 32 nt, Homo Sapiens
aaauagaccuauugccacucuugacuuaacuu

SEQ ID NO: 102979 - RNA, 32 nt, Homo Sapiens
cuugauucugugggaagggcuguagcugaucc

SEQ ID NO: 102980 - RNA, 32 nt, Homo Sapiens
gauuuuguuacuuuuuuauacuguguauauuu

SEQ ID NO: 102981 - RNA, 32 nt, Homo Sapiens
cuuuuuucggaacacgaggguuauuuuggagc

SEQ ID NO: 102982 - RNA, 32 nt, Homo Sapiens
ucaacucuguuauaauuaauacagauguuuua

SEQ ID NO: 102983 - RNA, 32 nt, Homo Sapiens
caccccuuccucgagggccccaucccccacag

SEQ ID NO: 102984 - RNA, 32 nt, Homo Sapiens
uaaggcagaaagugaucggagaaggaaugaga

SEQ ID NO: 102985 - RNA, 32 nt, Homo Sapiens
uggcagaggaggaggagucaagggagcagggc

SEQ ID NO: 102986 - RNA, 30 nt, Homo Sapiens
auacuggccguucugaccuguugccagcag

SEQ ID NO: 102987 - RNA, 32 nt, Homo Sapiens
agaaaaguuuggagaaagagaauuugaggcgg

SEQ ID NO: 102988 - RNA, 32 nt, Homo Sapiens
ggggccuggcggcugggcuggugcagggagug

SEQ ID NO: 102989 - RNA, 32 nt, Homo Sapiens
gggggaaaucauagacaauuucuuuuguaggg

SEQ ID NO: 102990 - RNA, 32 nt, Homo Sapiens
gcugccucuccagccaccucugauacuucucu

SEQ ID NO: 102991 - RNA, 32 nt, Homo Sapiens
agauuuucaaggaaaccaucuaccgugugcaa

SEQ ID NO: 102992 - RNA, 32 nt, Homo Sapiens
acggcuccugcuucugcccccaggguucgugg

SEQ ID NO: 102993 - RNA, 32 nt, Homo Sapiens
cugugcccacuuuagauguaucuaauucuccu

SEQ ID NO: 102994 - RNA, 32 nt, Homo Sapiens
gaccugcccucccuuggucccaggucacugga

SEQ ID NO: 102995 - RNA, 32 nt, Homo Sapiens
cacugcaagcuccgccaucuggguucaagcga

SEQ ID NO: 102996 - RNA, 32 nt, Homo Sapiens
auuagccucaauccccguguucacuugcuccc

SEQ ID NO: 102997 - RNA, 32 nt, Homo Sapiens
ugaugcaaggacuuaauauugaugucucaaau

SEQ ID NO: 102998 - RNA, 32 nt, Homo Sapiens
ccggaggaaaggaaaaaacaucggccaaccua

SEQ ID NO: 102999 - RNA, 32 nt, Homo Sapiens
caacaagcacuacuccggccucuaugggcuaa

SEQ ID NO: 103000 - RNA, 32 nt, Homo Sapiens
ggcacccgcgcggcgccgguuggccuucccgg

SEQ ID NO: 103001 - RNA, 32 nt, Homo Sapiens
agcugugcgacggcgugcggcagugucccgac

SEQ ID NO: 103002 - RNA, 32 nt, Homo Sapiens
auauguuaaugauuaagagugguugcccaggc

SEQ ID NO: 103003 - RNA, 32 nt, Homo Sapiens
cggcacagccaaucgcagcgcgggaaggcggu

SEQ ID NO: 103004 - RNA, 32 nt, Homo Sapiens
cuacaaagcaguaguuguuucuuaauugcuaa

SEQ ID NO: 103005 - RNA, 32 nt, Homo Sapiens
gcuaauaaaaauuguuugaacuuuuuacaguc

SEQ ID NO: 103006 - RNA, 32 nt, Homo Sapiens
ggacccugacuuccaaauguuuggaagucugc

SEQ ID NO: 103007 - RNA, 32 nt, Homo Sapiens
ucuuucccagaauaaacuuaucaugcauuugc

SEQ ID NO: 103008 - RNA, 32 nt, Homo Sapiens
aucucccgccccaggcugaaccuucccucucc

SEQ ID NO: 103009 - RNA, 32 nt, Homo Sapiens
aagggcacuuaauuuguaaacuucugaagacu

SEQ ID NO: 103010 - RNA, 31 nt, Homo Sapiens
ggcacgcagucgugccugccuagaggcguua

SEQ ID NO: 103011 - RNA, 32 nt, Homo Sapiens
gccgcgggcgcgagacuacaacccguaccccu

SEQ ID NO: 103012 - RNA, 32 nt, Homo Sapiens
agcgcacccuacucuuuccgugacgaugaggg

SEQ ID NO: 103013 - RNA, 32 nt, Homo Sapiens
auaucucugauccaacuguuggcagcucuuug

SEQ ID NO: 103014 - RNA, 27 nt, Homo Sapiens
agagguguuccuugcagcccccucccu

SEQ ID NO: 103015 - RNA, 32 nt, Homo Sapiens
uugucauauuuaagucggcagcuuucuaauuu

SEQ ID NO: 103016 - RNA, 32 nt, Homo Sapiens
cacaaagccuacucucuguucuugucccugcc

SEQ ID NO: 103017 - RNA, 32 nt, Homo Sapiens
uauaauuuuucugaauacuugauucucgauug

SEQ ID NO: 103018 - RNA, 30 nt, Homo Sapiens
acacuugguuuccuaguagaagcucacuug

SEQ ID NO: 103019 - RNA, 32 nt, Homo Sapiens
aagcugcugcuucaucugggguccuaaccucc

SEQ ID NO: 103020 - RNA, 32 nt, Homo Sapiens
cagagcucccagcccuucuccuccugcuaacc

SEQ ID NO: 103021 - RNA, 32 nt, Homo Sapiens
guagcucgcucgucuccgccggggacgugcug

SEQ ID NO: 103022 - RNA, 32 nt, Homo Sapiens
ccaccagccauggcggggccccggggccuccu

SEQ ID NO: 103023 - RNA, 32 nt, Homo Sapiens
aagugucuccuguugugaggggcucacuuugg

SEQ ID NO: 103024 - RNA, 32 nt, Homo Sapiens
aauauucauauugcagaauggaaugcaugcua

SEQ ID NO: 103025 - RNA, 32 nt, Homo Sapiens
agccccuaagugucccauuauguaccauucac

SEQ ID NO: 103026 - RNA, 32 nt, Homo Sapiens
uuuguguguaccccgcuucugacugccuaggg

SEQ ID NO: 103027 - RNA, 32 nt, Homo Sapiens
uaagcaugacauuauuugauaaguauauaaca

SEQ ID NO: 103028 - RNA, 32 nt, Homo Sapiens
ggugguugcccccaagaccccuccuucaggca

SEQ ID NO: 103029 - RNA, 32 nt, Homo Sapiens
aaggguuagugucgagcucaccccagcauccu

SEQ ID NO: 103030 - RNA, 32 nt, Homo Sapiens
caguuggcuaugucaguguguauuauucaccu

SEQ ID NO: 103031 - RNA, 32 nt, Homo Sapiens
gcagccacccacccuccggaccgcggcagcug

SEQ ID NO: 103032 - RNA, 32 nt, Homo Sapiens
auaauaguaaguccaugauguugauagagggu

SEQ ID NO: 103033 - RNA, 32 nt, Homo Sapiens
uguggccuugagcuaaggaaaagggacccaag

SEQ ID NO: 103034 - RNA, 32 nt, Homo Sapiens
guguggcagacaccuguccccugcccugcaug

SEQ ID NO: 103035 - RNA, 32 nt, Homo Sapiens
gaauucagcaagcugcuucuccaaucaaagcu

SEQ ID NO: 103036 - RNA, 32 nt, Homo Sapiens
aagaaccuuccacagcucuccaucacccagug

SEQ ID NO: 103037 - RNA, 32 nt, Homo Sapiens
uaugaguaguucauucuuuuuaucuuagaaua

SEQ ID NO: 103038 - RNA, 32 nt, Homo Sapiens
aucugcaucacugcuguuuguuacuauaaauu

SEQ ID NO: 103039 - RNA, 32 nt, Homo Sapiens
ccacucucuccagcugagcaggcaaccacagu

SEQ ID NO: 103040 - RNA, 32 nt, Homo Sapiens
cuuucucuccucuucccuuuccgggugcacgg

SEQ ID NO: 103041 - RNA, 32 nt, Homo Sapiens
guuucuuucaauaauuaaaaaauacugcuuca

SEQ ID NO: 103042 - RNA, 32 nt, Homo Sapiens
cccuguuuuuuguagaaucucuucaugcuuga

SEQ ID NO: 103043 - RNA, 32 nt, Homo Sapiens
uccaaguuuaaaaagaaaugguguaaaaguuc

SEQ ID NO: 103044 - RNA, 32 nt, Homo Sapiens
gccccugacagugaccuuccugucucaggggu

SEQ ID NO: 103045 - RNA, 32 nt, Homo Sapiens
guccugggaugcuugggguggcgugggcuugc

SEQ ID NO: 103046 - RNA, 32 nt, Homo Sapiens
uccaucuaucugauuccauuccuuccacaccc

SEQ ID NO: 103047 - RNA, 32 nt, Homo Sapiens
gucucugccaugaacuggaggccaggaaucuc

SEQ ID NO: 103048 - RNA, 32 nt, Homo Sapiens
guccggacuccuccuccuccucuucucgccau

SEQ ID NO: 103049 - RNA, 32 nt, Homo Sapiens
aacagugguuuuuacuuagaucaugaguugaa

SEQ ID NO: 103050 - RNA, 32 nt, Homo Sapiens
gacagugguggagcucggaugugcuguuguug

SEQ ID NO: 103051 - RNA, 32 nt, Homo Sapiens
uccaggcugccagacagcugcccuggcguugc

SEQ ID NO: 103052 - RNA, 32 nt, Homo Sapiens
aguauauguaaaauaaaugugacauuuuuaua

SEQ ID NO: 103053 - RNA, 32 nt, Homo Sapiens
uccucucccugcuuucuuuaccucugagguug

SEQ ID NO: 103054 - RNA, 32 nt, Homo Sapiens
ugaaguuguaaaaacuugaauguguauaguua

SEQ ID NO: 103055 - RNA, 32 nt, Homo Sapiens
auggcacuggugccgggccugggcuuccucga

SEQ ID NO: 103056 - RNA, 32 nt, Homo Sapiens
guauaggcgccuuuuaccccagcguguccuga

SEQ ID NO: 103057 - RNA, 31 nt, Homo Sapiens
ugaggcuguaacaugcccagaagcuguugug

SEQ ID NO: 103058 - RNA, 32 nt, Homo Sapiens
ucuuggcccuccccucuuucucccccaaccca

SEQ ID NO: 103059 - RNA, 32 nt, Homo Sapiens
uguuaggaauccagggauaaagaugaaugaaa

SEQ ID NO: 103060 - RNA, 32 nt, Homo Sapiens
caguagaggugauuaauggggcuggcaucucu

SEQ ID NO: 103061 - RNA, 32 nt, Homo Sapiens
cacugacaggagaggagagggcggcggcggcg

SEQ ID NO: 103062 - RNA, 32 nt, Homo Sapiens
cacaguccuguaguuacccagcccgcuccagc

SEQ ID NO: 103063 - RNA, 32 nt, Homo Sapiens
gggagcuggaccagccuggguuucaucuccca

SEQ ID NO: 103064 - RNA, 32 nt, Homo Sapiens
cauggcuccagggcgugucugccguguuuacu

SEQ ID NO: 103065 - RNA, 32 nt, Homo Sapiens
guauuuuguaaauaaagaugguuuaaacauga

SEQ ID NO: 103066 - RNA, 30 nt, Homo Sapiens
guguugcuguuuuccacccauuuuauuaua

SEQ ID NO: 103067 - RNA, 32 nt, Homo Sapiens
agugugcgccgcgcgagagugggaggcgaagg

SEQ ID NO: 103068 - RNA, 32 nt, Homo Sapiens
cauaaggaagaccauguauaaaacugauggaa

SEQ ID NO: 103069 - RNA, 32 nt, Homo Sapiens
agaauugcaaguuacaugcucuauaugcaaug

SEQ ID NO: 103070 - RNA, 32 nt, Homo Sapiens
auauuucugcugaucaaagaugaucaagcuuu

SEQ ID NO: 103071 - RNA, 32 nt, Homo Sapiens
auccaaaacuaaacuugguagaaaaauuauuu

SEQ ID NO: 103072 - RNA, 29 nt, Homo Sapiens
uaaauaaacgagccuauuucucuuugcac

SEQ ID NO: 103073 - RNA, 31 nt, Homo Sapiens
gcaccacugcugccccugccccuacucucag

SEQ ID NO: 103074 - RNA, 32 nt, Homo Sapiens
aggagccagauucauuccuucuucauucuuug

SEQ ID NO: 103075 - RNA, 32 nt, Homo Sapiens
gaagccccccuuuggcacuggauggacuuggc

SEQ ID NO: 103076 - RNA, 32 nt, Homo Sapiens
cugugggcugcacuuuuuaugcuugcaguaac

SEQ ID NO: 103077 - RNA, 32 nt, Homo Sapiens
cccugcgcauaaauacacucugcguuauuggc

SEQ ID NO: 103078 - RNA, 32 nt, Homo Sapiens
acagucagagaguagauugugcaugugugagc

SEQ ID NO: 103079 - RNA, 32 nt, Homo Sapiens
cccccaccccuacagccugcacacaccugccu

SEQ ID NO: 103080 - RNA, 32 nt, Homo Sapiens
caaugauuuauuaaauauguuuucucaauugu

SEQ ID NO: 103081 - RNA, 32 nt, Homo Sapiens
cugguucaccucuuuguucucuagacucuuaa

SEQ ID NO: 103082 - RNA, 32 nt, Homo Sapiens
aacuaugaaaaagaauacuuugaaagacaaag

SEQ ID NO: 103083 - RNA, 32 nt, Homo Sapiens
acagcagagaaaaaccauucaaauaugagaac

SEQ ID NO: 103084 - RNA, 32 nt, Homo Sapiens
ggcuugcagcgggcugugagaggggccggcgc

SEQ ID NO: 103085 - RNA, 32 nt, Homo Sapiens
ucuggaagccccaugagaugguaauuauaggc

SEQ ID NO: 103086 - RNA, 32 nt, Homo Sapiens
acacaauuauccacacaagaaaacaccucugu

SEQ ID NO: 103087 - RNA, 30 nt, Homo Sapiens
cccuggaagguucauggggaaacucgcucc

SEQ ID NO: 103088 - RNA, 32 nt, Homo Sapiens
gcgggcggggcacgcuccucgccuucgccgcg

SEQ ID NO: 103089 - RNA, 32 nt, Homo Sapiens
ccagcgggucaucuaccuccagggcucugcac

SEQ ID NO: 103090 - RNA, 32 nt, Homo Sapiens
augccacccccggcauggcuccagguggccug

SEQ ID NO: 103091 - RNA, 32 nt, Homo Sapiens
uuaaaguaaaauugagagacccuuuaaaccau

SEQ ID NO: 103092 - RNA, 32 nt, Homo Sapiens
gcagagcagcagagcaggcugccacugccccu

SEQ ID NO: 103093 - RNA, 32 nt, Homo Sapiens
guuucuuaaaagacaauaaaaucuuauuaaua

SEQ ID NO: 103094 - RNA, 32 nt, Homo Sapiens
cuggggcaacuggcaccaggagcugcuacacc

SEQ ID NO: 103095 - RNA, 32 nt, Homo Sapiens
gaaacuauuuuuguguuugaaagugaaaccaa

SEQ ID NO: 103096 - RNA, 32 nt, Homo Sapiens
uuuaauggugccuucauuugggaugcuacucu

SEQ ID NO: 103097 - RNA, 32 nt, Homo Sapiens
ggggccagaacagucugcccucuuccauagcu

SEQ ID NO: 103098 - RNA, 32 nt, Homo Sapiens
aggcuguuaguagccgcagagagccacacuca

SEQ ID NO: 103099 - RNA, 32 nt, Homo Sapiens
aguacuucagaucauaaugauaaaauacuuga

SEQ ID NO: 103100 - RNA, 32 nt, Homo Sapiens
aaauuuauaugacuuugaauuuaagaaccacu

SEQ ID NO: 103101 - RNA, 32 nt, Homo Sapiens
uguuguauagauacacaauggaauacuauuca

SEQ ID NO: 103102 - RNA, 32 nt, Homo Sapiens
acaccuuauaaaauuguaaucaaagauaucuc

SEQ ID NO: 103103 - RNA, 32 nt, Homo Sapiens
uauuauuagggcauguuaacaguauaccagua

SEQ ID NO: 103104 - RNA, 32 nt, Homo Sapiens
ugggccacaugcauuccuuuucugggucgccu

SEQ ID NO: 103105 - RNA, 32 nt, Homo Sapiens
uguguguccagaauugguggguucuuggucuc

SEQ ID NO: 103106 - RNA, 31 nt, Homo Sapiens
uuuuaauuuuugacuuuucacaaaugaguaa

SEQ ID NO: 103107 - RNA, 32 nt, Homo Sapiens
cucggaggccuggccauauaggagggugggug

SEQ ID NO: 103108 - RNA, 32 nt, Homo Sapiens
cuccuaaagcauaugccucaccugguuaaaaa

SEQ ID NO: 103109 - RNA, 32 nt, Homo Sapiens
caccucuucuuugauucccugggauaguggcu

SEQ ID NO: 103110 - RNA, 32 nt, Homo Sapiens
ucccauuuucagaagauaaugacucacauggg

SEQ ID NO: 103111 - RNA, 32 nt, Homo Sapiens
gucagauauuuuggauguugcauaagaguccu

SEQ ID NO: 103112 - RNA, 32 nt, Homo Sapiens
uuuuugaauuuuguagauauguuuccuauaau

SEQ ID NO: 103113 - RNA, 32 nt, Homo Sapiens
cagcccacaagcaaaauggcgccgggcagcuu

SEQ ID NO: 103114 - RNA, 32 nt, Homo Sapiens
aaaaggaaaaagacaguaaggaguauagcacu

SEQ ID NO: 103115 - RNA, 32 nt, Homo Sapiens
uuggguagccggggcugggggucgccacgucg

SEQ ID NO: 103116 - RNA, 32 nt, Homo Sapiens
cagcccccagggcuccuccuccagugagcuca

SEQ ID NO: 103117 - RNA, 28 nt, Homo Sapiens
ggagggaaagauuagccaaagaguuaau

SEQ ID NO: 103118 - RNA, 32 nt, Homo Sapiens
gagaauuaauuauaaacuuguuuuguuuuuag

SEQ ID NO: 103119 - RNA, 32 nt, Homo Sapiens
agagcuccauggggcucugcccugcccacccc

SEQ ID NO: 103120 - RNA, 32 nt, Homo Sapiens
auuuuugucauuuccaaauacauccuguccau

SEQ ID NO: 103121 - RNA, 32 nt, Homo Sapiens
acgugacccagcucguggcgccguggguccgu

SEQ ID NO: 103122 - RNA, 32 nt, Homo Sapiens
auccagcacucccugcggcugcugcuggagga

SEQ ID NO: 103123 - RNA, 32 nt, Homo Sapiens
aaugggagagccgaggcggggaggugcggcca

SEQ ID NO: 103124 - RNA, 32 nt, Homo Sapiens
cuuaaagguguuacaaggggauaaugguauuu

SEQ ID NO: 103125 - RNA, 32 nt, Homo Sapiens
caaaggugguaaguuucaucauuugaaucaau

SEQ ID NO: 103126 - RNA, 32 nt, Homo Sapiens
caacauugccuuaucacgcuagguucaccuga

SEQ ID NO: 103127 - RNA, 32 nt, Homo Sapiens
caccaacagaauaccaagcagaaugaugagga

SEQ ID NO: 103128 - RNA, 32 nt, Homo Sapiens
gcccugaguuggcaucaccugcgcagggcccu

SEQ ID NO: 103129 - RNA, 32 nt, Homo Sapiens
acacgggauggcgcccaaacuccggcguucac

SEQ ID NO: 103130 - RNA, 32 nt, Homo Sapiens
gccuggcucccucugguuucucagucagagcc

SEQ ID NO: 103131 - RNA, 32 nt, Homo Sapiens
ccucaggcuuucccagcuuccuccccuugcua

SEQ ID NO: 103132 - RNA, 32 nt, Homo Sapiens
uucauguuaauucugacaguucaccaaauagc

SEQ ID NO: 103133 - RNA, 31 nt, Homo Sapiens
cuaguguccuaaaaauggcuaacugaugaau

SEQ ID NO: 103134 - RNA, 32 nt, Homo Sapiens
agagugggcgggauagagagcgugggcggggg

SEQ ID NO: 103135 - RNA, 32 nt, Homo Sapiens
ugcagcauucuuguaaagauuagaugauaaaa

SEQ ID NO: 103136 - RNA, 32 nt, Homo Sapiens
gaguacagagagcgucuggccuuggagagggg

SEQ ID NO: 103137 - RNA, 32 nt, Homo Sapiens
gucgcggggggaggaggaggagggacugagcg

SEQ ID NO: 103138 - RNA, 32 nt, Homo Sapiens
gcaaauuuauaggagaaaaaacacuuucagau

SEQ ID NO: 103139 - RNA, 32 nt, Homo Sapiens
uccacccugugcugcuucccuucacagcauua

SEQ ID NO: 103140 - RNA, 32 nt, Homo Sapiens
gucguccuuucugaacaaacgcagcaaagcaa

SEQ ID NO: 103141 - RNA, 32 nt, Homo Sapiens
aaagaaacaaauuuaauugauuuccaaguuau

SEQ ID NO: 103142 - RNA, 32 nt, Homo Sapiens
agcuggaguaggugggggaggccagacaugga

SEQ ID NO: 103143 - RNA, 32 nt, Homo Sapiens
ucuuaauagaaagucagaugacuaccguguug

SEQ ID NO: 103144 - RNA, 32 nt, Homo Sapiens
ggcagaucccccuuuccaaccuguaacucuga

SEQ ID NO: 103145 - RNA, 32 nt, Homo Sapiens
aaggucuggagguuccuguggaccucagggaa

SEQ ID NO: 103146 - RNA, 32 nt, Homo Sapiens
gccagcagcgagggcucuggccucuucauugg

SEQ ID NO: 103147 - RNA, 32 nt, Homo Sapiens
cugccuagggacgaggccuacaguucugccau

SEQ ID NO: 103148 - RNA, 32 nt, Homo Sapiens
ucucaaaaguauaaaaaacuuuaauacaagua

SEQ ID NO: 103149 - RNA, 32 nt, Homo Sapiens
ggacccucucauuuccugucugcacagcagcc

SEQ ID NO: 103150 - RNA, 32 nt, Homo Sapiens
cuugaaaugcuaaacuuaauggcuguauguga

SEQ ID NO: 103151 - RNA, 32 nt, Homo Sapiens
gcauggaguuacuacaucugaagcauuuagaa

SEQ ID NO: 103152 - RNA, 32 nt, Homo Sapiens
ccugccccauccccuccucaccccacgagcuu

SEQ ID NO: 103153 - RNA, 32 nt, Homo Sapiens
aggacaugagcugugugaauuuuuagccagcc

SEQ ID NO: 103154 - RNA, 32 nt, Homo Sapiens
aauguuccaggugagggcuuugaaaggccuuc

SEQ ID NO: 103155 - RNA, 32 nt, Homo Sapiens
gucaguccugcucccaggccagcccuugacau

SEQ ID NO: 103156 - RNA, 32 nt, Homo Sapiens
gggagcgccgcgccuggggaggaggcggaggc

SEQ ID NO: 103157 - RNA, 32 nt, Homo Sapiens
gcucgccgcuccaugcagccgggguagagccc

SEQ ID NO: 103158 - RNA, 32 nt, Homo Sapiens
augauuucauugauucaugauggauggcagaa

SEQ ID NO: 103159 - RNA, 32 nt, Homo Sapiens
aacguacagaccccaaaaccuugauucuugga

SEQ ID NO: 103160 - RNA, 32 nt, Homo Sapiens
gaguaggggcuuuggggccaacuuggugggcu

SEQ ID NO: 103161 - RNA, 32 nt, Homo Sapiens
aaguucuuguggugauuuugcacuauuguuuu

SEQ ID NO: 103162 - RNA, 32 nt, Homo Sapiens
gccugggcggggucaccccggcugggacaaga

SEQ ID NO: 103163 - RNA, 32 nt, Homo Sapiens
aauugugacgguauauacuaagccuauguuau

SEQ ID NO: 103164 - RNA, 32 nt, Homo Sapiens
guuuuauacuauaaaguuaugaaaaugccaaa

SEQ ID NO: 103165 - RNA, 32 nt, Homo Sapiens
aaagaugcugggcugggugcggugccucaugc

SEQ ID NO: 103166 - RNA, 32 nt, Homo Sapiens
uuaccgaauuuuuacagcuuuccuccuauacu

SEQ ID NO: 103167 - RNA, 32 nt, Homo Sapiens
caggcggagcggggcggggcgcacaagcucgg

SEQ ID NO: 103168 - RNA, 32 nt, Homo Sapiens
acuguccaaauuaguucuuccuccucaacuca

SEQ ID NO: 103169 - RNA, 32 nt, Homo Sapiens
aucaaggguaguuaaauccuuccaaguuaguu

SEQ ID NO: 103170 - RNA, 32 nt, Homo Sapiens
agucaugccuuguuuuauuuuauuuuauuuuu

SEQ ID NO: 103171 - RNA, 32 nt, Homo Sapiens
ucugcguugagaguaauggccuaugauuauca

SEQ ID NO: 103172 - RNA, 32 nt, Homo Sapiens
uuccccaaggccagcuacaagccccucugccc

SEQ ID NO: 103173 - RNA, 32 nt, Homo Sapiens
cagccaaaauuugaguuagcaacacuguuuuc

SEQ ID NO: 103174 - RNA, 32 nt, Homo Sapiens
gcuuaugaaaacaaaaugauguacauuacugu

SEQ ID NO: 103175 - RNA, 32 nt, Homo Sapiens
caccuagaaugacuugucuaagaucuaaauca

SEQ ID NO: 103176 - RNA, 32 nt, Homo Sapiens
ccauucucuauucccaguauaagggacgaaac

SEQ ID NO: 103177 - RNA, 32 nt, Homo Sapiens
ccguaaacaaggugaugugaucuuucaugugu

SEQ ID NO: 103178 - RNA, 31 nt, Homo Sapiens
uggcggcagcgaugccugcccggcuguuggg

SEQ ID NO: 103179 - RNA, 32 nt, Homo Sapiens
uccugccaccccacccuugcguucugcauuag

SEQ ID NO: 103180 - RNA, 30 nt, Homo Sapiens
gggacuucugaaaugggggaggcagugugg

SEQ ID NO: 103181 - RNA, 32 nt, Homo Sapiens
gcuucaacugccuccguuuccacacugugcac

SEQ ID NO: 103182 - RNA, 32 nt, Homo Sapiens
agagccgcgaggagcaggcugugcugcuugug

SEQ ID NO: 103183 - RNA, 32 nt, Homo Sapiens
gaaggggccgaggcugcacgggccucugccag

SEQ ID NO: 103184 - RNA, 32 nt, Homo Sapiens
gcagcuucccuggccuugaagcccaaggcaca

SEQ ID NO: 103185 - RNA, 32 nt, Homo Sapiens
aucauaugguaguuuuguuuuacuaaucuaag

SEQ ID NO: 103186 - RNA, 32 nt, Homo Sapiens
acuugauaaucauauuauaauuuuuuaucaug

SEQ ID NO: 103187 - RNA, 29 nt, Homo Sapiens
auguauauauguauuucuauauagacuug

SEQ ID NO: 103188 - RNA, 32 nt, Homo Sapiens
gggaguugcucaguggcucugcaccgcuggcg

SEQ ID NO: 103189 - RNA, 32 nt, Homo Sapiens
gccugggcugccugcgcccaccccgcucugca

SEQ ID NO: 103190 - RNA, 32 nt, Homo Sapiens
aaauguuuucuuucucuaagccaauaacauau

SEQ ID NO: 103191 - RNA, 32 nt, Homo Sapiens
guccgagcugcuggucccacuucugacaccaa

SEQ ID NO: 103192 - RNA, 32 nt, Homo Sapiens
cugaggucaggaguucgagaccggccugguca

SEQ ID NO: 103193 - RNA, 32 nt, Homo Sapiens
gauauuuacucuaaaacaaaaguguagaauag

SEQ ID NO: 103194 - RNA, 32 nt, Homo Sapiens
uucccauaaaacuucuauuugcuguuuuguuu

SEQ ID NO: 103195 - RNA, 32 nt, Homo Sapiens
ggggauggugcagcugugaagcucgggcugau

SEQ ID NO: 103196 - RNA, 32 nt, Homo Sapiens
cuaccucgcaucauugcagaucguagcgcguu

SEQ ID NO: 103197 - RNA, 32 nt, Homo Sapiens
uguuaggauuaauuuucuuaaucaccuccaca

SEQ ID NO: 103198 - RNA, 32 nt, Homo Sapiens
uuuuauacaggaaaaacaaaacaaagaaauaa

SEQ ID NO: 103199 - RNA, 32 nt, Homo Sapiens
gcgcgggccccggcgagguggcgcugcaggag

SEQ ID NO: 103200 - RNA, 32 nt, Homo Sapiens
cacagcuuuggaaagauuuaguucuugguuuu

SEQ ID NO: 103201 - RNA, 32 nt, Homo Sapiens
guugcccgcucccggaaucccggagucuccgc

SEQ ID NO: 103202 - RNA, 32 nt, Homo Sapiens
cugggcccaggccccaggagccaggcccagcc

SEQ ID NO: 103203 - RNA, 32 nt, Homo Sapiens
cgcgcccugugcuggccggagcagcguuuucu

SEQ ID NO: 103204 - RNA, 31 nt, Homo Sapiens
ggaaaccggcacugccugccggcuuuacauc

SEQ ID NO: 103205 - RNA, 32 nt, Homo Sapiens
uguuaagccuacuacuguugacuggaagccuu

SEQ ID NO: 103206 - RNA, 32 nt, Homo Sapiens
ccauuuccaucccaucauccuuguccaaugca

SEQ ID NO: 103207 - RNA, 32 nt, Homo Sapiens
cagauugaaaaguuuugagaaaauguuauuuu

SEQ ID NO: 103208 - RNA, 32 nt, Homo Sapiens
gcggacgccaccgaccccgccgccggaggacu

SEQ ID NO: 103209 - RNA, 32 nt, Homo Sapiens
acuggacuuuuguggaaaauaucagcgucgcu

SEQ ID NO: 103210 - RNA, 32 nt, Homo Sapiens
cgcugccgcucccggagccgccgaggccagcu

SEQ ID NO: 103211 - RNA, 32 nt, Homo Sapiens
ucaugggaggcgcuggugcuagguuccagugu

SEQ ID NO: 103212 - RNA, 32 nt, Homo Sapiens
auugauuggugcccacccagggcacacugucg

SEQ ID NO: 103213 - RNA, 32 nt, Homo Sapiens
gaaacccggaaguggaacucugagccauucag

SEQ ID NO: 103214 - RNA, 32 nt, Homo Sapiens
cuggaaucagcaugcagcaagcucacagugcc

SEQ ID NO: 103215 - RNA, 32 nt, Homo Sapiens
agcugcuggggcuccgcccacccugcucccuu

SEQ ID NO: 103216 - RNA, 32 nt, Homo Sapiens
augaaaugaaacuucaaucaaccaaggcuuuc

SEQ ID NO: 103217 - RNA, 32 nt, Homo Sapiens
uccuaacccacccccgagaggcggagagaaug

SEQ ID NO: 103218 - RNA, 32 nt, Homo Sapiens
cccagccuccacccccauccagaugggacuca

SEQ ID NO: 103219 - RNA, 32 nt, Homo Sapiens
auuucauacauuucaauugauuguacuguauu

SEQ ID NO: 103220 - RNA, 32 nt, Homo Sapiens
gcuguguuguaccacugcacuccagccugggu

SEQ ID NO: 103221 - RNA, 32 nt, Homo Sapiens
uuaaugaugaagaucacugccuugggcuucau

SEQ ID NO: 103222 - RNA, 32 nt, Homo Sapiens
acaguuuuaaggaaaagaaaaagaauguaaaa

SEQ ID NO: 103223 - RNA, 32 nt, Homo Sapiens
ccgacgcgagucuggcggcugcugcuugcgac

SEQ ID NO: 103224 - RNA, 32 nt, Homo Sapiens
cuccuggcuggcccggccuaauaaagcagugu

SEQ ID NO: 103225 - RNA, 32 nt, Homo Sapiens
uucagaagaaaauaaacaaaugcauuauguaa

SEQ ID NO: 103226 - RNA, 32 nt, Homo Sapiens
ggcaagagcaucucgaugcagcgcauacaggc

SEQ ID NO: 103227 - RNA, 32 nt, Homo Sapiens
uggcgcuggaggcagcagcggcuggagcggag

SEQ ID NO: 103228 - RNA, 32 nt, Homo Sapiens
guuggggaggccacgcuggaaccauugcucua

SEQ ID NO: 103229 - RNA, 32 nt, Homo Sapiens
uaauuguggaugucucucuccucuuuuccucu

SEQ ID NO: 103230 - RNA, 32 nt, Homo Sapiens
uuaaucuaaugaggaaauaucagugaagcugg

SEQ ID NO: 103231 - RNA, 32 nt, Homo Sapiens
uccauguuugaucagucccagauccaggaguu

SEQ ID NO: 103232 - RNA, 32 nt, Homo Sapiens
uggggggauuacccgaggucaggaauucgaga

SEQ ID NO: 103233 - RNA, 32 nt, Homo Sapiens
ugugcauauuacucugccuaaucuugugcaug

SEQ ID NO: 103234 - RNA, 32 nt, Homo Sapiens
gcauguuaacuguguucuuuaacauuuccagg

SEQ ID NO: 103235 - RNA, 32 nt, Homo Sapiens
ggcggcggaaguucgacggcgccgggcgagug

SEQ ID NO: 103236 - RNA, 32 nt, Homo Sapiens
agcaccuuucuagcgugagcuguaaaguaacg

SEQ ID NO: 103237 - RNA, 32 nt, Homo Sapiens
caugauuccuuccauuuucaacaguagaugaa

SEQ ID NO: 103238 - RNA, 32 nt, Homo Sapiens
aaagcugauauucugggagaugauguucaccu

SEQ ID NO: 103239 - RNA, 32 nt, Homo Sapiens
augcuugcaaguucuagaacugcuacaaagga

SEQ ID NO: 103240 - RNA, 32 nt, Homo Sapiens
gggccagucccugccaguccguccgccugucc

SEQ ID NO: 103241 - RNA, 32 nt, Homo Sapiens
ugcuuacuguuacaccaauuuguccaaagagu

SEQ ID NO: 103242 - RNA, 32 nt, Homo Sapiens
uaaaacugacuuuuucauuacguggguuuuga

SEQ ID NO: 103243 - RNA, 32 nt, Homo Sapiens
cugcuugcaccucccggauggugcugacugcu

SEQ ID NO: 103244 - RNA, 32 nt, Homo Sapiens
uuuguggaaaugcuuaaaauagaccuaacuga

SEQ ID NO: 103245 - RNA, 32 nt, Homo Sapiens
uucuuaaaaaacaguaaugaagacuauaucuc

SEQ ID NO: 103246 - RNA, 32 nt, Homo Sapiens
uauuuuauuaggcccccaaaauuuaauagaua

SEQ ID NO: 103247 - RNA, 32 nt, Homo Sapiens
gggaccggggaccccaggauccagcauuagga

SEQ ID NO: 103248 - RNA, 32 nt, Homo Sapiens
ucugcaaaaauaugguuuaaagugacaugauu

SEQ ID NO: 103249 - RNA, 32 nt, Homo Sapiens
cccagccgugggugggggcccugaggugaaga

SEQ ID NO: 103250 - RNA, 32 nt, Homo Sapiens
aggcugcagcccagcccgccugagacacgacg

SEQ ID NO: 103251 - RNA, 32 nt, Homo Sapiens
ucaagaaucuucauucaucucucucuuucagc

SEQ ID NO: 103252 - RNA, 32 nt, Homo Sapiens
gauaagcuuugaauaucaauucuuacauaaac

SEQ ID NO: 103253 - RNA, 32 nt, Homo Sapiens
ucaggcaaacuccagcuuaaagcccuagacag

SEQ ID NO: 103254 - RNA, 32 nt, Homo Sapiens
ucucucgcaggguggggggaagaggaggagga

SEQ ID NO: 103255 - RNA, 32 nt, Homo Sapiens
uaaaaagcaagaauucuguuuccuaggcaaac

SEQ ID NO: 103256 - RNA, 32 nt, Homo Sapiens
cugaaaucaucuacaagcuuguccaacucuag

SEQ ID NO: 103257 - RNA, 32 nt, Homo Sapiens
gaaacuacuucauuuuaauuguauauuauuca

SEQ ID NO: 103258 - RNA, 32 nt, Homo Sapiens
aggaucaacaaauaagcacauuuuaaaauuuc

SEQ ID NO: 103259 - RNA, 32 nt, Homo Sapiens
guacguaaguuaaaaaauaccaguucacccaa

SEQ ID NO: 103260 - RNA, 32 nt, Homo Sapiens
gaggagcaggcgggggcgccggggcuuuugcu

SEQ ID NO: 103261 - RNA, 32 nt, Homo Sapiens
uacuucuuuuuuuuuucuuuuuauuaaaacug

SEQ ID NO: 103262 - RNA, 32 nt, Homo Sapiens
ggagcuggccccagcacggaggagccccuggu

SEQ ID NO: 103263 - RNA, 32 nt, Homo Sapiens
cuaaaggaggauguucgaacccaucacaaaga

SEQ ID NO: 103264 - RNA, 32 nt, Homo Sapiens
aaaugaaauauuuggaacacuuucaauccaag

SEQ ID NO: 103265 - RNA, 32 nt, Homo Sapiens
ugcuggguggccugggcuuuuuacccugcagg

SEQ ID NO: 103266 - RNA, 32 nt, Homo Sapiens
ggcauaggguuagcucaguuucccuccuuccc

SEQ ID NO: 103267 - RNA, 32 nt, Homo Sapiens
augcaagcaaaauaauguugugccuugacucu

SEQ ID NO: 103268 - RNA, 32 nt, Homo Sapiens
cggccggccccggcucaccgacucgggcagca

SEQ ID NO: 103269 - RNA, 32 nt, Homo Sapiens
cuacggcgcgucggcuuuggcggcuccgcgca

SEQ ID NO: 103270 - RNA, 31 nt, Homo Sapiens
guaguuuauugagcuuuguauauuuggacag

SEQ ID NO: 103271 - RNA, 32 nt, Homo Sapiens
ugcguugggacaguuauuucagugucccagag

SEQ ID NO: 103272 - RNA, 32 nt, Homo Sapiens
aggguuggggacaagaggcauucugcagcugg

SEQ ID NO: 103273 - RNA, 32 nt, Homo Sapiens
ugggggaggaggaagugcucuuguggaggcag

SEQ ID NO: 103274 - RNA, 32 nt, Homo Sapiens
gcggguuugagagggcggggauugcgacucuc

SEQ ID NO: 103275 - RNA, 32 nt, Homo Sapiens
cuuuuugcuguaacuuuuuaaaaguuuugacu

SEQ ID NO: 103276 - RNA, 32 nt, Homo Sapiens
gcuguguuaguagaguuugauuuguaucauau

SEQ ID NO: 103277 - RNA, 32 nt, Homo Sapiens
agcuaacccuccagcccugguccccagccccu

SEQ ID NO: 103278 - RNA, 32 nt, Homo Sapiens
uaaauuaccauaaaaugucagcaaauguaaaa

SEQ ID NO: 103279 - RNA, 31 nt, Homo Sapiens
caaggccugccgguugcucggggucguauga

SEQ ID NO: 103280 - RNA, 32 nt, Homo Sapiens
guuguacaacaccagcaacauuauaauggccc

SEQ ID NO: 103281 - RNA, 32 nt, Homo Sapiens
acuggaguuccuuucauuuuggcacugaugcu

SEQ ID NO: 103282 - RNA, 32 nt, Homo Sapiens
aaucuguauaaaugucuauuauuaugaagaau

SEQ ID NO: 103283 - RNA, 32 nt, Homo Sapiens
acagcgcaucgccgcccgcccgggucgccgcg

SEQ ID NO: 103284 - RNA, 32 nt, Homo Sapiens
uacuuucuuugccaaaacaaaauguaaaagca

SEQ ID NO: 103285 - RNA, 32 nt, Homo Sapiens
ucuugguuguguuuuucuuucuucuucuucuu

SEQ ID NO: 103286 - RNA, 32 nt, Homo Sapiens
cgugcucccgcacggacgggcgcgccgccaac

SEQ ID NO: 103287 - RNA, 32 nt, Homo Sapiens
gggcuauagaaacaucuagaaauagacugaaa

SEQ ID NO: 103288 - RNA, 32 nt, Homo Sapiens
acuugccugacaccccauugcuaguaaguagu

SEQ ID NO: 103289 - RNA, 32 nt, Homo Sapiens
guggagaggccaggguaucacaaacuuaugga

SEQ ID NO: 103290 - RNA, 32 nt, Homo Sapiens
auauucaaaaauacccucacacaucccugcau

SEQ ID NO: 103291 - RNA, 32 nt, Homo Sapiens
cccgaucagcaguaucuuuguuaucauagcgg

SEQ ID NO: 103292 - RNA, 32 nt, Homo Sapiens
guuuugucugcuguggaugacuuccagcuugg

SEQ ID NO: 103293 - RNA, 32 nt, Homo Sapiens
gcaggaggccuggccuugucaggacccaggcc

SEQ ID NO: 103294 - RNA, 32 nt, Homo Sapiens
uguucuauaaaacaggggugaucacagcaccu

SEQ ID NO: 103295 - RNA, 32 nt, Homo Sapiens
ugcuguucaggaccacuaaaugcugaaaugug

SEQ ID NO: 103296 - RNA, 32 nt, Homo Sapiens
uuccccaucauucuaggaugauacagaaagaa

SEQ ID NO: 103297 - RNA, 32 nt, Homo Sapiens
accccgccuuugagaugcccgccccgccuccg

SEQ ID NO: 103298 - RNA, 32 nt, Homo Sapiens
uaggcaaaauguuugaaguauguucaguagaa

SEQ ID NO: 103299 - RNA, 32 nt, Homo Sapiens
cgacauccagcaugccaucgccaucaacuaug

SEQ ID NO: 103300 - RNA, 32 nt, Homo Sapiens
augggugcaguagacacuaaucaaauggucac

SEQ ID NO: 103301 - RNA, 32 nt, Homo Sapiens
gaggaugaaggggcuccauuucugcugccucc

SEQ ID NO: 103302 - RNA, 32 nt, Homo Sapiens
uauuuguauauguuuuauuucuuucucuugcc

SEQ ID NO: 103303 - RNA, 32 nt, Homo Sapiens
auauuguggauuuaauauuugauaaaacugau

SEQ ID NO: 103304 - RNA, 32 nt, Homo Sapiens
acaagccucgcuugcuggccgcaaccaaggag

SEQ ID NO: 103305 - RNA, 32 nt, Homo Sapiens
ucaucgggaaaaaacuuugcuccaggcaucac

SEQ ID NO: 103306 - RNA, 32 nt, Homo Sapiens
aaagaaggcaaaaggaaguaaauguggaggcc

SEQ ID NO: 103307 - RNA, 32 nt, Homo Sapiens
gcugauuuuuaaaaauaucaucuagcgcacac

SEQ ID NO: 103308 - RNA, 32 nt, Homo Sapiens
accgcuggucccugcccuccccugcucccagg

SEQ ID NO: 103309 - RNA, 32 nt, Homo Sapiens
ugccucucuccccacacccucaccugcacccu

SEQ ID NO: 103310 - RNA, 32 nt, Homo Sapiens
ugggaggaucauuugaggccaggaguuugaga

SEQ ID NO: 103311 - RNA, 32 nt, Homo Sapiens
cuauugcaaaaauuucuuuuucuagaaaaaau

SEQ ID NO: 103312 - RNA, 32 nt, Homo Sapiens
aagccggcucggcgagcucucccgacacccga

SEQ ID NO: 103313 - RNA, 32 nt, Homo Sapiens
gggcggcagcagcccaggggccccaggccucc

SEQ ID NO: 103314 - RNA, 32 nt, Homo Sapiens
auaguagcauguuacaagauuauugugaacaa

SEQ ID NO: 103315 - RNA, 32 nt, Homo Sapiens
ugugggggccccaaacucauuaauucacugaa

SEQ ID NO: 103316 - RNA, 30 nt, Homo Sapiens
cagggaggaagcggcgcgggugcuguccag

SEQ ID NO: 103317 - RNA, 32 nt, Homo Sapiens
aaagcauugugauuuuaaugauacuucucuag

SEQ ID NO: 103318 - RNA, 32 nt, Homo Sapiens
cugcaaaauggggagucuccaauauagccugu

SEQ ID NO: 103319 - RNA, 32 nt, Homo Sapiens
uuucuguauacagcuuaaaaucaaaaauguau

SEQ ID NO: 103320 - RNA, 32 nt, Homo Sapiens
uauucugaacaaagugaucaaauuagaauaca

SEQ ID NO: 103321 - RNA, 32 nt, Homo Sapiens
uguuuuuuaaaaaacuauuauucucgaugcuu

SEQ ID NO: 103322 - RNA, 32 nt, Homo Sapiens
caaaccagaggagugaaccaacaaagaguacc

SEQ ID NO: 103323 - RNA, 32 nt, Homo Sapiens
cggaugaagugcaaaacaaacuucuccauaga

SEQ ID NO: 103324 - RNA, 32 nt, Homo Sapiens
cugcuggauauuuaguucaacuguauaguuuu

SEQ ID NO: 103325 - RNA, 32 nt, Homo Sapiens
cuguaaccaaagguauaguuuuguuuuuuauu

SEQ ID NO: 103326 - RNA, 29 nt, Homo Sapiens
uuuguggaauaaaaacggcuguuuccgug

SEQ ID NO: 103327 - RNA, 32 nt, Homo Sapiens
ucguacuggugcccuaguuucccagccggcag

SEQ ID NO: 103328 - RNA, 32 nt, Homo Sapiens
ggugguaaguauggccguugguugagcugcca

SEQ ID NO: 103329 - RNA, 32 nt, Homo Sapiens
agguguuuucuuugauguccaggaggagaaag

SEQ ID NO: 103330 - RNA, 32 nt, Homo Sapiens
cuacucugcaaguggacgagaauagucucuuu

SEQ ID NO: 103331 - RNA, 32 nt, Homo Sapiens
uuuuccauuaugugacuguuugaccugcauau

SEQ ID NO: 103332 - RNA, 32 nt, Homo Sapiens
ugucuguuuccucuccuuguuaaccauggaua

SEQ ID NO: 103333 - RNA, 25 nt, Homo Sapiens
ccucugcauuuuccucacugguuag

SEQ ID NO: 103334 - RNA, 32 nt, Homo Sapiens
uacagaaaauaaacuggcaacaauaucuccuu

SEQ ID NO: 103335 - RNA, 32 nt, Homo Sapiens
auaugugagaacuuuucauagaugaacuuuuu

SEQ ID NO: 103336 - RNA, 32 nt, Homo Sapiens
aucagcaaaaggggaggaggggugugggguug

SEQ ID NO: 103337 - RNA, 32 nt, Homo Sapiens
aggcagcaaagauggaggaagagucagauuac

SEQ ID NO: 103338 - RNA, 32 nt, Homo Sapiens
uaaaucauuuuuccuuuuccuuuagaguuaug

SEQ ID NO: 103339 - RNA, 32 nt, Homo Sapiens
aaugacagaagagcuuccuuggccugacucgg

SEQ ID NO: 103340 - RNA, 32 nt, Homo Sapiens
gcccugcucgaugcucacagggcccccagcga

SEQ ID NO: 103341 - RNA, 32 nt, Homo Sapiens
gccccugcccgagccuggcccgccgcgaugcu

SEQ ID NO: 103342 - RNA, 32 nt, Homo Sapiens
gccucuaaccaucaguauaggguuuuuucuuu

SEQ ID NO: 103343 - RNA, 32 nt, Homo Sapiens
aaaaaucagaucuuggugaggaccucgagcag

SEQ ID NO: 103344 - RNA, 32 nt, Homo Sapiens
uggaauaaacgugguguuuuauuuucuggguu

SEQ ID NO: 103345 - RNA, 31 nt, Homo Sapiens
ugccaacacuaagcugucucgagccaagcug

SEQ ID NO: 103346 - RNA, 32 nt, Homo Sapiens
ugauguuccagguuuggucuggcacucugccu

SEQ ID NO: 103347 - RNA, 32 nt, Homo Sapiens
accagggcacaucacccaccucaagacaagcc

SEQ ID NO: 103348 - RNA, 32 nt, Homo Sapiens
gaaugagguaaaauauaauaauaacgauaacc

SEQ ID NO: 103349 - RNA, 32 nt, Homo Sapiens
cuuccuccagcuccccgcacccaccggcccug

SEQ ID NO: 103350 - RNA, 32 nt, Homo Sapiens
aaccugaggcuguacggcuacagccugggcaa

SEQ ID NO: 103351 - RNA, 32 nt, Homo Sapiens
gcuauuuuuuauuuuuaaauauaucuucaggu

SEQ ID NO: 103352 - RNA, 32 nt, Homo Sapiens
cacuccgcgggcggaggacgcacgucggggcg

SEQ ID NO: 103353 - RNA, 32 nt, Homo Sapiens
ugcauuucauucaaaucagugaucuauguuug

SEQ ID NO: 103354 - RNA, 32 nt, Homo Sapiens
cuuugaacuccaugguuacguguuagguccac

SEQ ID NO: 103355 - RNA, 32 nt, Homo Sapiens
aacauuguuucugaaaaaaugcauuccaaguu

SEQ ID NO: 103356 - RNA, 32 nt, Homo Sapiens
uuucccuaauccaauuuuuagaguggcuagua

SEQ ID NO: 103357 - RNA, 32 nt, Homo Sapiens
aucugcucaguuccauauuucauccgugaaaa

SEQ ID NO: 103358 - RNA, 32 nt, Homo Sapiens
gucaucuagcuuugauacacuugcccuuucau

SEQ ID NO: 103359 - RNA, 32 nt, Homo Sapiens
gcggcgccgggcgcuuggggcuggaggaggca

SEQ ID NO: 103360 - RNA, 32 nt, Homo Sapiens
cugugagaaaucagcaacuugcaggaggcaca

SEQ ID NO: 103361 - RNA, 32 nt, Homo Sapiens
cccgccgggaccagcucugcgccacagcgcau

SEQ ID NO: 103362 - RNA, 32 nt, Homo Sapiens
uuggcagccuggcuuccaggccccacaccgac

SEQ ID NO: 103363 - RNA, 32 nt, Homo Sapiens
aacaaagugacuauauuucuuuuuacgaaaau

SEQ ID NO: 103364 - RNA, 32 nt, Homo Sapiens
guauggcugccauucucuucagcccucgcucu

SEQ ID NO: 103365 - RNA, 32 nt, Homo Sapiens
gucacaaguuacagcugugacaauggcaacaa

SEQ ID NO: 103366 - RNA, 30 nt, Homo Sapiens
uguucccaugcucaccuuucgccacuuccu

SEQ ID NO: 103367 - RNA, 32 nt, Homo Sapiens
uuuuauugcccauuuuaugggcuggaguuaaa

SEQ ID NO: 103368 - RNA, 32 nt, Homo Sapiens
uucaggaugugcggcaccuccuuacugaccuc

SEQ ID NO: 103369 - RNA, 32 nt, Homo Sapiens
caugugacugauuaggaaauauuuuauggucu

SEQ ID NO: 103370 - RNA, 32 nt, Homo Sapiens
aguuccccaucccuaaucucugaucucugagc

SEQ ID NO: 103371 - RNA, 32 nt, Homo Sapiens
ugagcauuuuuuaaaacaaaaauagaauuuag

SEQ ID NO: 103372 - RNA, 32 nt, Homo Sapiens
cagggggcccacagcccucugugggcuccguu

SEQ ID NO: 103373 - RNA, 32 nt, Homo Sapiens
acgagagcuucacggcggccgagggccccgcc

SEQ ID NO: 103374 - RNA, 32 nt, Homo Sapiens
aggaacaguaacucuuccuucggguggaagcu

SEQ ID NO: 103375 - RNA, 32 nt, Homo Sapiens
aggauauggaggcaaggggaacaaagagcaug

SEQ ID NO: 103376 - RNA, 32 nt, Homo Sapiens
ggggcgggggccugcuggcgcuucuggccaau

SEQ ID NO: 103377 - RNA, 32 nt, Homo Sapiens
cugccucguucaaugcggcaaguuuuuguaua

SEQ ID NO: 103378 - RNA, 32 nt, Homo Sapiens
uuuucugcuuucauuucuuuaaaaguuuuuug

SEQ ID NO: 103379 - RNA, 32 nt, Homo Sapiens
uugagaacuguagggaaccuuuccagcucagg

SEQ ID NO: 103380 - RNA, 32 nt, Homo Sapiens
ccacugggagauggcugcuugccaggccccca

SEQ ID NO: 103381 - RNA, 27 nt, Homo Sapiens
ugaugccuggggaggcgacgccggcag

SEQ ID NO: 103382 - RNA, 32 nt, Homo Sapiens
caggcagcuggacggcagcugcgccccacccc

SEQ ID NO: 103383 - RNA, 32 nt, Homo Sapiens
caagcagagagccaaaucaugaaugaacuccc

SEQ ID NO: 103384 - RNA, 32 nt, Homo Sapiens
auggccgcugcgcucuggcccgggcaacacug

SEQ ID NO: 103385 - RNA, 32 nt, Homo Sapiens
ucucauauaauuucaauguaaaacagaaaaca

SEQ ID NO: 103386 - RNA, 32 nt, Homo Sapiens
gacucugucgguuuccccucuuuacccuuccc

SEQ ID NO: 103387 - RNA, 32 nt, Homo Sapiens
gacaguggcucacgcuuuuccacagccccugu

SEQ ID NO: 103388 - RNA, 32 nt, Homo Sapiens
uucuguggaggagaggcgggguaauggggaag

SEQ ID NO: 103389 - RNA, 32 nt, Homo Sapiens
ggagcuggcagagcucaugucugcagggcucu

SEQ ID NO: 103390 - RNA, 32 nt, Homo Sapiens
aagagguggggaggaggaggcacaguuaaugg

SEQ ID NO: 103391 - RNA, 31 nt, Homo Sapiens
cagguguguggcugcacaggagucuugcuga

SEQ ID NO: 103392 - RNA, 32 nt, Homo Sapiens
gugaaggaagaaguggggugggacaacaguga

SEQ ID NO: 103393 - RNA, 32 nt, Homo Sapiens
aauguauauucccaaugaaaaaauaguuauau

SEQ ID NO: 103394 - RNA, 30 nt, Homo Sapiens
ugaccguuggcccugcggccggcgcccuag

SEQ ID NO: 103395 - RNA, 29 nt, Homo Sapiens
ucaccugugugggcgugaaagcugauugg

SEQ ID NO: 103396 - RNA, 32 nt, Homo Sapiens
gcggccucaacccggguccgcggggcacccgc

SEQ ID NO: 103397 - RNA, 32 nt, Homo Sapiens
gagccggagccuccuuccuugaauuucuccgu

SEQ ID NO: 103398 - RNA, 32 nt, Homo Sapiens
ucugagcugguguaauacuuagucuuugucug

SEQ ID NO: 103399 - RNA, 32 nt, Homo Sapiens
aaagaagacucuuuuuauuaauauuuuggcgu

SEQ ID NO: 103400 - RNA, 32 nt, Homo Sapiens
uacuauuugaacauuaguuagauccaucucac

SEQ ID NO: 103401 - RNA, 31 nt, Homo Sapiens
cccgcguggcacugcugauccucucuggcug

SEQ ID NO: 103402 - RNA, 32 nt, Homo Sapiens
ugcuuccuucuccucaccaucuucccagacgg

SEQ ID NO: 103403 - RNA, 31 nt, Homo Sapiens
uccuggggaaacuuuuccagagccuguuagc

SEQ ID NO: 103404 - RNA, 32 nt, Homo Sapiens
aguccacuuaaaccucuuuucguucccaguuu

SEQ ID NO: 103405 - RNA, 32 nt, Homo Sapiens
ucccucuccuucccugggcucccuuuccaagu

SEQ ID NO: 103406 - RNA, 32 nt, Homo Sapiens
auagguagacugccuaaucuggcacuugccac

SEQ ID NO: 103407 - RNA, 32 nt, Homo Sapiens
gugcuaaagaacuaaacuuacuaaacaaucca

SEQ ID NO: 103408 - RNA, 32 nt, Homo Sapiens
gauguugcucuuucaccugggugucugggcuc

SEQ ID NO: 103409 - RNA, 32 nt, Homo Sapiens
gucacagucuuagguuugguaaugcucacucc

SEQ ID NO: 103410 - RNA, 32 nt, Homo Sapiens
gagaaccucuucagugaccuacaggaugggag

SEQ ID NO: 103411 - RNA, 32 nt, Homo Sapiens
gcuggggcgucccucuccucucuccccagucu

SEQ ID NO: 103412 - RNA, 32 nt, Homo Sapiens
uuuugaguuuuucuuuuugugcauuguccuca

SEQ ID NO: 103413 - RNA, 32 nt, Homo Sapiens
auuuuucuuucuucuuucuuuuuuuuaaauuu

SEQ ID NO: 103414 - RNA, 32 nt, Homo Sapiens
auuaguaaacaaacuaaagaaauacaaaucug

SEQ ID NO: 103415 - RNA, 32 nt, Homo Sapiens
uucugagcuggcgucugagcugcugcggggug

SEQ ID NO: 103416 - RNA, 32 nt, Homo Sapiens
ggauaagcggcucaguucagcagagcuggagu

SEQ ID NO: 103417 - RNA, 32 nt, Homo Sapiens
ggcugcauggccauccuccagggcccaggaag

SEQ ID NO: 103418 - RNA, 32 nt, Homo Sapiens
uucaaaucccgugugcacgcugaacgacacag

SEQ ID NO: 103419 - RNA, 32 nt, Homo Sapiens
uuguaaaaaaucuauuuauuugcuuuauucca

SEQ ID NO: 103420 - RNA, 32 nt, Homo Sapiens
uuuucuuucuucucuuuuuuuuuccccacagu

SEQ ID NO: 103421 - RNA, 32 nt, Homo Sapiens
guaguuuauuuaucuuguacauauguauuuug

SEQ ID NO: 103422 - RNA, 32 nt, Homo Sapiens
aggccuccucucagccuucucuuuguccagau

SEQ ID NO: 103423 - RNA, 32 nt, Homo Sapiens
cguugggacugagucgccgccgugagcucccc

SEQ ID NO: 103424 - RNA, 32 nt, Homo Sapiens
auuucuugcugucaccaauuuuuuauaauagc

SEQ ID NO: 103425 - RNA, 32 nt, Homo Sapiens
augauagcaaauauguaguguuuucuguguca

SEQ ID NO: 103426 - RNA, 32 nt, Homo Sapiens
aguguuccaaaauauacuuaauaauggaaggu

SEQ ID NO: 103427 - RNA, 32 nt, Homo Sapiens
auauugguuauagguuuguguuuucugccaaa

SEQ ID NO: 103428 - RNA, 30 nt, Homo Sapiens
cgaggaggaggggacuggggucccggauuc

SEQ ID NO: 103429 - RNA, 32 nt, Homo Sapiens
ugcucuggguggcagaggguacaggguccuga

SEQ ID NO: 103430 - RNA, 32 nt, Homo Sapiens
agucagaaaauaacacaaaaaaugccgagguu

SEQ ID NO: 103431 - RNA, 32 nt, Homo Sapiens
cccaccaccagcgaugcccagcccuugguaga

SEQ ID NO: 103432 - RNA, 32 nt, Homo Sapiens
gacagcuuuccuuuggggugccaggcagcgag

SEQ ID NO: 103433 - RNA, 32 nt, Homo Sapiens
agcaaaaugaauagugggauauuuugggccau

SEQ ID NO: 103434 - RNA, 32 nt, Homo Sapiens
ggaccagcccaccgugucugcugaccuaccuc

SEQ ID NO: 103435 - RNA, 32 nt, Homo Sapiens
cacuacaacuucugccucccaggcucaagcaa

SEQ ID NO: 103436 - RNA, 32 nt, Homo Sapiens
cguuucuuuugaucucuugauugaaggaggau

SEQ ID NO: 103437 - RNA, 32 nt, Homo Sapiens
ugauaccauaauguauauuuauguagaaucaa

SEQ ID NO: 103438 - RNA, 32 nt, Homo Sapiens
cagcgcugaggaaaauauauucaacugugaag

SEQ ID NO: 103439 - RNA, 32 nt, Homo Sapiens
gcauuguuauacauacuguguaccuaauuaug

SEQ ID NO: 103440 - RNA, 32 nt, Homo Sapiens
gccauuaaaaauugcacuuauaucaucuuaca

SEQ ID NO: 103441 - RNA, 32 nt, Homo Sapiens
auuacagacauuagccaucacgccugcccuag

SEQ ID NO: 103442 - RNA, 32 nt, Homo Sapiens
ccccuacacacacacacacacacacacacaca

SEQ ID NO: 103443 - RNA, 32 nt, Homo Sapiens
gccuagugcguuacucuucccagugauaccua

SEQ ID NO: 103444 - RNA, 32 nt, Homo Sapiens
uuaaaucuagaauuagccgggcauggucgcuc

SEQ ID NO: 103445 - RNA, 32 nt, Homo Sapiens
ugcuucggacgcccggagcuuucccagcaggc

SEQ ID NO: 103446 - RNA, 32 nt, Homo Sapiens
cgggacugccagcaggcuagacauccuucgcc

SEQ ID NO: 103447 - RNA, 32 nt, Homo Sapiens
uuguccuuuuaaagggauuuaauguaccuuuu

SEQ ID NO: 103448 - RNA, 32 nt, Homo Sapiens
gcgggagagaggccgagauggcagaugagauu

SEQ ID NO: 103449 - RNA, 32 nt, Homo Sapiens
uaaguuuugacaaauaguguaucucguggaau

SEQ ID NO: 103450 - RNA, 32 nt, Homo Sapiens
gaagcauuaagugacuuucaaagacuuucaga

SEQ ID NO: 103451 - RNA, 32 nt, Homo Sapiens
gguuuuaaauuaaaaguguuaucaaaaguuuc

SEQ ID NO: 103452 - RNA, 32 nt, Homo Sapiens
ccccaaagcucuucuaguucucaccuggcuug

SEQ ID NO: 103453 - RNA, 32 nt, Homo Sapiens
accucuuguacccuccucucccucccccagug

SEQ ID NO: 103454 - RNA, 28 nt, Homo Sapiens
aaacugaaagauuagugaaaggaaugaa

SEQ ID NO: 103455 - RNA, 32 nt, Homo Sapiens
ccagggcccccucccucgucaggaccggggca

SEQ ID NO: 103456 - RNA, 32 nt, Homo Sapiens
auauauuuguagcacauauuauagauggaaag

SEQ ID NO: 103457 - RNA, 32 nt, Homo Sapiens
gcgggguccuggccaagcaagcccgccccucu

SEQ ID NO: 103458 - RNA, 32 nt, Homo Sapiens
cggcugggggagagcagaggcagcuggggagg

SEQ ID NO: 103459 - RNA, 32 nt, Homo Sapiens
guagacagaaagugaagaaaacaucaacguuc

SEQ ID NO: 103460 - RNA, 32 nt, Homo Sapiens
agaugccccuccccaggccuuggacucuuccg

SEQ ID NO: 103461 - RNA, 32 nt, Homo Sapiens
guaugguguaaauaaaccuguguugccauggc

SEQ ID NO: 103462 - RNA, 32 nt, Homo Sapiens
cagguguuuucagcuuggaggaggaaguacug

SEQ ID NO: 103463 - RNA, 32 nt, Homo Sapiens
uacucagggcuagucuguucuucccggacauc

SEQ ID NO: 103464 - RNA, 29 nt, Homo Sapiens
gcucugguucagaggcagaguccugugcc

SEQ ID NO: 103465 - RNA, 30 nt, Homo Sapiens
aaggccaauaucccauaggcuaacuuuaaa

SEQ ID NO: 103466 - RNA, 32 nt, Homo Sapiens
ggugggggugauuugaggaaaugacaugagga

SEQ ID NO: 103467 - RNA, 32 nt, Homo Sapiens
ggggcauaggcaggaccccccuuguggugcca

SEQ ID NO: 103468 - RNA, 32 nt, Homo Sapiens
uaaacuugaaacaaagaguuagcugucagcuc

SEQ ID NO: 103469 - RNA, 32 nt, Homo Sapiens
gccgacgcuggggcuuccagaaggcccggggg

SEQ ID NO: 103470 - RNA, 32 nt, Homo Sapiens
ucaggccauaauguucccugguuugggacaga

SEQ ID NO: 103471 - RNA, 32 nt, Homo Sapiens
agaaguuuagcucgacagguccacccucacca

SEQ ID NO: 103472 - RNA, 32 nt, Homo Sapiens
aguaaaaguuugcaauuuuaaaaugcaaaaau

SEQ ID NO: 103473 - RNA, 32 nt, Homo Sapiens
gagaagcugaggcagagcugcggcuaaucgaa

SEQ ID NO: 103474 - RNA, 32 nt, Homo Sapiens
aaauguccucccacaaggaguauguuaaauuu

SEQ ID NO: 103475 - RNA, 32 nt, Homo Sapiens
cacacaaagaacgcggugggcggcggcggcga

SEQ ID NO: 103476 - RNA, 32 nt, Homo Sapiens
uccugagcgggcgggcgugcgaggucggcgcc

SEQ ID NO: 103477 - RNA, 29 nt, Homo Sapiens
aguuuaguagugauguaaagagaaguaca

SEQ ID NO: 103478 - RNA, 32 nt, Homo Sapiens
uucugauagaaagugcuuaaaccaccacucuu

SEQ ID NO: 103479 - RNA, 32 nt, Homo Sapiens
gaaaagggaacacuuauacacuguugguggga

SEQ ID NO: 103480 - RNA, 32 nt, Homo Sapiens
gcuagugagaggaggaggaggugggcagagga

SEQ ID NO: 103481 - RNA, 32 nt, Homo Sapiens
aggaugcaauaauucagugugaggucgugagc

SEQ ID NO: 103482 - RNA, 32 nt, Homo Sapiens
accaauucugguggauauuacucugcaucaca

SEQ ID NO: 103483 - RNA, 32 nt, Homo Sapiens
ggaacaccuucuucuuuuugucaaucggcaca

SEQ ID NO: 103484 - RNA, 32 nt, Homo Sapiens
agcucuuacugacuuggccccgaggccaucac

SEQ ID NO: 103485 - RNA, 32 nt, Homo Sapiens
aaauuaucuauuuuccagagauucuugauaaa

SEQ ID NO: 103486 - RNA, 32 nt, Homo Sapiens
guccccgcgcggcugagcccaggccgccagcg

SEQ ID NO: 103487 - RNA, 32 nt, Homo Sapiens
uuguaugguguuaugacuaauuguuacugauu

SEQ ID NO: 103488 - RNA, 32 nt, Homo Sapiens
ccacacagccccacccuugggcugagaggacc

SEQ ID NO: 103489 - RNA, 32 nt, Homo Sapiens
uggcgaggcugagcacugucacaggggccucc

SEQ ID NO: 103490 - RNA, 32 nt, Homo Sapiens
aucgggugcauucucucugcuucgugugugac

SEQ ID NO: 103491 - RNA, 32 nt, Homo Sapiens
uuccucccuguccuccuucuuggucucacacu

SEQ ID NO: 103492 - RNA, 32 nt, Homo Sapiens
ugcguuucuuacugccuucuuuaugggaaccc

SEQ ID NO: 103493 - RNA, 32 nt, Homo Sapiens
auggaucagaauagcaacauuuagaacacuuu

SEQ ID NO: 103494 - RNA, 30 nt, Homo Sapiens
gagagaggagacagcaugcaaagucaagau

SEQ ID NO: 103495 - RNA, 32 nt, Homo Sapiens
cuuggacgaccauuguuggcgaggggcaccac

SEQ ID NO: 103496 - RNA, 32 nt, Homo Sapiens
gcgacaggugauuuggcuucugcacaguuagg

SEQ ID NO: 103497 - RNA, 32 nt, Homo Sapiens
gucauuuuuuaaacccuuuguucucucucauu

SEQ ID NO: 103498 - RNA, 32 nt, Homo Sapiens
aaaauucacagggcuuccagaucacuuuuuca

SEQ ID NO: 103499 - RNA, 32 nt, Homo Sapiens
acacaggggguucuuaaaauggcugcccccgc

SEQ ID NO: 103500 - RNA, 32 nt, Homo Sapiens
uuucuuuuucuuuuuuuuuuuaaugugagaca

SEQ ID NO: 103501 - RNA, 32 nt, Homo Sapiens
uuccuaugcaagagugucucacaugugcuuaa

SEQ ID NO: 103502 - RNA, 32 nt, Homo Sapiens
gaccugagggcuucccuuacugaggaggccuc

SEQ ID NO: 103503 - RNA, 32 nt, Homo Sapiens
ucauccauuuuucuuaaaagcuggaaauuaaa

SEQ ID NO: 103504 - RNA, 32 nt, Homo Sapiens
ggcacucccccugcugcaccccgccguuucua

SEQ ID NO: 103505 - RNA, 32 nt, Homo Sapiens
accacgcccggcuaauuuuuuauauuuuuagu

SEQ ID NO: 103506 - RNA, 32 nt, Homo Sapiens
agcugaucucaaacuccugaccucaagugauc

SEQ ID NO: 103507 - RNA, 32 nt, Homo Sapiens
guacuguauguggagcaguguacagugaagcg

SEQ ID NO: 103508 - RNA, 32 nt, Homo Sapiens
guaugcuacuauugcuacuucuggugugauuu

SEQ ID NO: 103509 - RNA, 32 nt, Homo Sapiens
auagccguuaaacuuugguuugaaugaagaau

SEQ ID NO: 103510 - RNA, 32 nt, Homo Sapiens
ggcucuuguuggccgcacguggcagugcagcu

SEQ ID NO: 103511 - RNA, 32 nt, Homo Sapiens
cgggcccgcgguucuccacccguacuguacac

SEQ ID NO: 103512 - RNA, 30 nt, Homo Sapiens
cagauguuaauaaucggggaaacugugugu

SEQ ID NO: 103513 - RNA, 29 nt, Homo Sapiens
cacauuuuaaauaaaaucaugcauaccug

SEQ ID NO: 103514 - RNA, 32 nt, Homo Sapiens
uucaaauguauuacaguggggaaugaagauac

SEQ ID NO: 103515 - RNA, 32 nt, Homo Sapiens
uguggcuccagccccagggauucugagucuga

SEQ ID NO: 103516 - RNA, 32 nt, Homo Sapiens
gccuuugcucaaagcuugggguuucuuuggug

SEQ ID NO: 103517 - RNA, 32 nt, Homo Sapiens
uguaguaaaucuugcuuucauuuuggaaaacu

SEQ ID NO: 103518 - RNA, 32 nt, Homo Sapiens
accagacauaaaacuuuuggugcucaagucac

SEQ ID NO: 103519 - RNA, 32 nt, Homo Sapiens
auucacaggaggaggggagguuggggggcggg

SEQ ID NO: 103520 - RNA, 32 nt, Homo Sapiens
ggugacuccaugauggacgaucuugcucccag

SEQ ID NO: 103521 - RNA, 32 nt, Homo Sapiens
gaacagauuugguuguaaauuauuuaagucac

SEQ ID NO: 103522 - RNA, 32 nt, Homo Sapiens
aagcgcagcccugccagacgcgcuagauuccu

SEQ ID NO: 103523 - RNA, 32 nt, Homo Sapiens
guauuuaguuuaugcuguacuauuuaauuauc

SEQ ID NO: 103524 - RNA, 31 nt, Homo Sapiens
agcaucgcuacgccacacugaguuaauuaac

SEQ ID NO: 103525 - RNA, 32 nt, Homo Sapiens
auuuuuugauuaaugaagaaaguaaaaccaua

SEQ ID NO: 103526 - RNA, 32 nt, Homo Sapiens
cgcccagugcuggccuuggaggacggucagcu

SEQ ID NO: 103527 - RNA, 32 nt, Homo Sapiens
ucaagucagagggaagcagagacgcgcgucuc

SEQ ID NO: 103528 - RNA, 32 nt, Homo Sapiens
ccuggcccacagagugagauccugucucaaga

SEQ ID NO: 103529 - RNA, 32 nt, Homo Sapiens
ucuauguguuuugucuuuuucuuaaauauuau

SEQ ID NO: 103530 - RNA, 32 nt, Homo Sapiens
accaguaucugucccaagagaggaaauucccc

SEQ ID NO: 103531 - RNA, 32 nt, Homo Sapiens
guaaaagcccucgugagccagaugcgguggcu

SEQ ID NO: 103532 - RNA, 32 nt, Homo Sapiens
ugucuguguccguccucuaccagcgccuuggc

SEQ ID NO: 103533 - RNA, 32 nt, Homo Sapiens
auaaaaugaauuaauggaaacauauccacacu

SEQ ID NO: 103534 - RNA, 32 nt, Homo Sapiens
ugacuugaacucuguugguuuacuguguuagu

SEQ ID NO: 103535 - RNA, 32 nt, Homo Sapiens
gguaugcaacaggugguggauguuguuggggg

SEQ ID NO: 103536 - RNA, 32 nt, Homo Sapiens
ugaccugugaggaguauaacuucuuucagccc

SEQ ID NO: 103537 - RNA, 32 nt, Homo Sapiens
uaugggacaugaugaauuaauggugcaugagu

SEQ ID NO: 103538 - RNA, 32 nt, Homo Sapiens
ccgccgcagaggaaaagcaggugccggugccu

SEQ ID NO: 103539 - RNA, 32 nt, Homo Sapiens
ucucuccugugaucgcacugacacggccgggg

SEQ ID NO: 103540 - RNA, 32 nt, Homo Sapiens
aaauccccacaacuuugucaaauaauguacag

SEQ ID NO: 103541 - RNA, 32 nt, Homo Sapiens
uggccagaggauguugcgcauccucugggggg

SEQ ID NO: 103542 - RNA, 32 nt, Homo Sapiens
acugaagucuuagagauuggaacauacggguu

SEQ ID NO: 103543 - RNA, 32 nt, Homo Sapiens
gaucaggucauacuccacagccugccuggcaa

SEQ ID NO: 103544 - RNA, 32 nt, Homo Sapiens
ucccgaguccucgccgccgccgggccgccgca

SEQ ID NO: 103545 - RNA, 32 nt, Homo Sapiens
aauaacggguggcauuggguggcaacauuugg

SEQ ID NO: 103546 - RNA, 32 nt, Homo Sapiens
cacugcacuccagccugggcgacagugagacc

SEQ ID NO: 103547 - RNA, 32 nt, Homo Sapiens
gacaggacuugugcgccggcgccccggacgcc

SEQ ID NO: 103548 - RNA, 32 nt, Homo Sapiens
aagcagacggguguauaaaaagaaaaugaaca

SEQ ID NO: 103549 - RNA, 32 nt, Homo Sapiens
aaaaauggaaaacccccugugcuucacaucug

SEQ ID NO: 103550 - RNA, 32 nt, Homo Sapiens
cugcacacaucgucugugaauuguggcuguuc

SEQ ID NO: 103551 - RNA, 32 nt, Homo Sapiens
uauuauagagugggaggcagggugcgguggcu

SEQ ID NO: 103552 - RNA, 32 nt, Homo Sapiens
aagacggcucugccacaccugacaccuggcag

SEQ ID NO: 103553 - RNA, 32 nt, Homo Sapiens
uuaguauucuucauuauccuuuugaugucugc

SEQ ID NO: 103554 - RNA, 32 nt, Homo Sapiens
aacucuugucuccuuaggauauguuaccugcu

SEQ ID NO: 103555 - RNA, 32 nt, Homo Sapiens
agccaaggaguggaugccuccagucauauuua

SEQ ID NO: 103556 - RNA, 32 nt, Homo Sapiens
cauggacauuugugauucucauuuucucacca

SEQ ID NO: 103557 - RNA, 32 nt, Homo Sapiens
agccucaaacucccaggcucaagcaauccuac

SEQ ID NO: 103558 - RNA, 32 nt, Homo Sapiens
uucugcuucuguggauguagaauggggcaauc

SEQ ID NO: 103559 - RNA, 32 nt, Homo Sapiens
agcccagggauguggcagcugcagugggcuug

SEQ ID NO: 103560 - RNA, 32 nt, Homo Sapiens
cggagcugcguccgccacucauguuucuccga

SEQ ID NO: 103561 - RNA, 32 nt, Homo Sapiens
ugugggugugugagagagcggcugguucauug

SEQ ID NO: 103562 - RNA, 32 nt, Homo Sapiens
guagccgguuccccggccacgacucugggcac

SEQ ID NO: 103563 - RNA, 32 nt, Homo Sapiens
ugaggcccccuguguccaagccucccccuggc

SEQ ID NO: 103564 - RNA, 32 nt, Homo Sapiens
uggaaacuucgcugucccccaacacugagcaa

SEQ ID NO: 103565 - RNA, 32 nt, Homo Sapiens
cagugucuggaugaucuuuguggucacugcau

SEQ ID NO: 103566 - RNA, 32 nt, Homo Sapiens
cuugugcccccgcuucgcgcgcgcuccgugac

SEQ ID NO: 103567 - RNA, 30 nt, Homo Sapiens
ucucuguggggcgaugcugcagcggcugaa

SEQ ID NO: 103568 - RNA, 32 nt, Homo Sapiens
ggcauuauuauuaauaguaauaaguuuagcau

SEQ ID NO: 103569 - RNA, 32 nt, Homo Sapiens
aaugccaucuucuuccuucucuuuuuuauaau

SEQ ID NO: 103570 - RNA, 32 nt, Homo Sapiens
acccacgagagccccaggagaaaggacaacug

SEQ ID NO: 103571 - RNA, 32 nt, Homo Sapiens
ucucuuaccuguaaaguaaaauuuagaucaau

SEQ ID NO: 103572 - RNA, 32 nt, Homo Sapiens
acccucggagcuggucucggacugcuggggcg

SEQ ID NO: 103573 - RNA, 32 nt, Homo Sapiens
ugggccuggaccucugccacucaguggacaca

SEQ ID NO: 103574 - RNA, 32 nt, Homo Sapiens
aacacuaacaauaccgaucuugaaaaaucauc

SEQ ID NO: 103575 - RNA, 32 nt, Homo Sapiens
agugcucuggggcuaccuggcuccuaggccca

SEQ ID NO: 103576 - RNA, 32 nt, Homo Sapiens
caaaacaaaacaaaacaaaacacugccaaacu

SEQ ID NO: 103577 - RNA, 32 nt, Homo Sapiens
cgagccgggccgggggcggggaaagggguggg
